(19) United States
(12) Patent Application Publication
(10) Pub. No.: US 2010/0105134 A1
(43) Pub. Date: Apr. 29, 2010

(54) NUCLEIC ACID COMPOUNDS FOR INHIBITING GENE EXPRESSION AND USES THEREOF

(75) Inventors: Steven C. Quay, Seattle, WA (US); James McSwiggen, Boulder, CO (US); Narendra K. Vaish, Kirkland, WA (US); Mohammad Ahmadian, Carlsbad, CA (US)

Correspondence Address: SCHWABE, WILLIAMSON & WYATT, P.C., 1420 FIFTH, SUITE 3010, SEATTLE, WA, 98101, US

(73) Assignee: MDRNA, Inc., Bothell, WA (US)

(21) Appl. No.: 12/552,082

(22) Filed: Sep. 1, 2009

Related U.S. Application Data
(63) Continuation-in-part of application No. PCT/US2008/055371, filed on Feb. 28, 2008.
Application No. PCT/US2008/055371 is a continuation-in-part of application No. PCT/US2008/055370, filed on Feb. 28, 2008.
Application No. PCT/US2008/055370 is a continuation-in-part of application No. PCT/US2008/055362, filed on Feb. 28, 2008.
Application No. PCT/US2008/055362 is a continuation-in-part of application No. PCT/US2008/055380, filed on Feb. 28, 2008.
Application No. PCT/US2008/055380 is a continuation-in-part of application No. PCT/US2008/055383, filed on Feb. 28, 2008.
Application No. PCT/US2008/055383 is a continuation-in-part of application No. PCT/US2008/055375, filed on Feb. 28, 2008.
Application No. PCT/US2008/055375 is a continuation-in-part of application No. PCT/US2008/055360, filed on Feb. 28, 2008.
Application No. PCT/US2008/055360 is a continuation-in-part of application No. PCT/US2008/055374, filed on Feb. 28, 2008.
Application No. PCT/US2008/055374 is a continuation-in-part of application No. PCT/US2008/055357, filed on Feb. 28, 2008.
Application No. PCT/US2008/055357 is a continuation-in-part of application No. PCT/US2008/055381, filed on Feb. 28, 2008.
Application No. PCT/US2008/055381 is a continuation-in-part of application No. PCT/US2008/055378, filed on Feb. 28, 2008.
Application No. PCT/US2008/055378 is a continuation-in-part of application No. PCT/US2008/055372, filed on Feb. 28, 2008.
Application No. PCT/US2008/055372 is a continuation-in-part of application No. PCT/US2008/055345, filed on Feb. 28, 2008.
Application No. PCT/US2008/055345 is a continuation-in-part of application No. PCT/US2008/055377, filed on Feb. 28, 2008.
Application No. PCT/US2008/055377 is a continuation-in-part of application No. PCT/US2008/055376, filed on Feb. 28, 2008.
Application No. PCT/US2008/055376 is a continuation-in-part of application No. PCT/US2008/055373, filed on Feb. 28, 2008.
Application No. PCT/US2008/055373 is a continuation-in-part of application No. PCT/US2008/055385, filed on Feb. 28, 2008.
Application No. PCT/US2008/055385 is a continuation-in-part of application No. PCT/US2008/055386, filed on Feb. 28, 2008.
Application No. PCT/US2008/055386 is a continuation-in-part of application No. PCT/US2008/055382, filed on Feb. 28, 2008.
Application No. PCT/US2008/055382 is a continuation-in-part of application No. PCT/US2008/055333, filed on Feb. 28, 2008.
Application No. PCT/US2008/055333 is a continuation-in-part of application No. PCT/US2008/055341, filed on Feb. 28, 2008.
Application No. PCT/US2008/055341 is a continuation-in-part of application No. PCT/US2008/055350, filed on Feb. 28, 2008.
Application No. PCT/US2008/055350 is a continuation-in-part of application No. PCT/US2008/055356, filed on Feb. 28, 2008.
Application No. PCT/US2008/055356 is a continuation-in-part of application No. PCT/US2008/055366, filed on Feb. 28, 2008.
Application No. PCT/US2008/055366 is a continuation-in-part of application No. PCT/US2008/055339, filed on Feb. 28, 2008.
Application No. PCT/US2008/055339 is a continuation-in-part of application No. PCT/US2008/055365, filed on Feb. 28, 2008.
Application No. PCT/US2008/055365 is a continuation-in-part of application No. PCT/US2008/055340, filed on Feb. 28, 2008.
Application No. PCT/US2008/055340 is a continuation-in-part of application No. PCT/US2008/055505, filed on Feb. 29, 2008.
Application No. PCT/US2008/055505 is a continuation-in-part of application No. PCT/US2008/055556, filed on Feb. 29, 2008.
Application No. PCT/US2008/055556 is a continuation-in-part of application No. PCT/US2008/055515, filed on Feb. 29, 2008.
Application No. PCT/US2008/055515 is a continuation-in-part of application No. PCT/US2008/055599, filed on Mar. 3, 2008.
Application No. PCT/US2008/055599 is a continuation-in-part of application No. PCT/US2008/055601, filed on Mar. 3, 2008.
Application No. PCT/US2008/055601 is a continuation-in-part of application No. PCT/US2008/055603, filed on Mar. 3, 2008.
Application No. PCT/US2008/055603 is a continuation-in-part of application No. PCT/US2008/055606, filed on Mar. 3, 2008.
Application No. PCT/US2008/055606 is a continuation-in-part of application No. PCT/US2008/055548, filed on Feb. 29, 2008.
Application No. PCT/US2008/055548 is a continuation-in-part of application No. PCT/US2008/055611, filed on Mar. 3, 2008.
Application No. PCT/US2008/055611 is a continuation-in-part of application No. PCT/US2008/055615, filed on Mar. 3, 2008.
Application No. PCT/US2008/055615 is a continuation-in-part of application No. PCT/US2008/055709, filed on Mar. 3, 2008.
Application No. PCT/US2008/055709 is a continuation-in-part of application No. PCT/US2008/055618, filed on Mar. 3, 2008.
Application No. PCT/US2008/055618 is a continuation-in-part of application No. PCT/US2008/055644, filed on Mar. 3, 2008.
Application No. PCT/US2008/055644 is a continuation-in-part of application No. PCT/US2008/055651, filed on Mar. 3, 2008.
Application No. PCT/US2008/055651 is a continuation-in-part of application No. PCT/US2008/055649, filed on Mar. 3, 2008.
Application No. PCT/US2008/055649 is a continuation-in-part of application No. PCT/US2008/055711, filed on Mar. 3, 2008.
Application No. PCT/US2008/055711 is a continuation-in-part of application No. PCT/US2008/055635, filed on Mar. 3, 2008.
Application No. PCT/US2008/055635 is a continuation-in-part of application No. PCT/US2008/055524, filed on Feb. 29, 2008.
Application No. PCT/US2008/055524 is a continuation-in-part of application No. PCT/US2008/055572, filed on Mar. 3, 2008.
Application No. PCT/US2008/055572 is a continuation-in-part of application No. PCT/US2008/055627, filed on Mar. 3, 2008.
Application No. PCT/US2008/055627 is a continuation-in-part of application No. PCT/US2008/055697, filed on Mar. 3, 2008.
Application No. PCT/US2008/055697 is a continuation-in-part of application No. PCT/US2008/055662, filed on Mar. 3, 2008.
Application No. PCT/US2008/055662 is a continuation-in-part of application No. PCT/US2008/055678, filed on Mar. 3, 2008.
Application No. PCT/US2008/055678 is a continuation-in-part of application No. PCT/US2008/055368, filed on Feb. 2, 2008.
Application No. PCT/US2008/055368 is a continuation-in-part of application No. PCT/US2008/055676, filed on Mar. 3, 2008.
Application No. PCT/US2008/055676 is a continuation-in-part of application No. PCT/US2008/055550, filed on Feb. 29, 2008.
Application No. PCT/US2008/055550 is a continuation-in-part of application No. PCT/US2008/055560, filed on Feb. 29, 2008.
Application No. PCT/US2008/055560 is a continuation-in-part of application No. PCT/US2008/055698, filed on Mar. 3, 2008.
Application No. PCT/US2008/055698 is a continuation-in-part of application No. PCT/US2008/055695, filed on Mar. 3, 2008.
Application No. PCT/US2008/055695 is a continuation-in-part of application No. PCT/US2008/055701, filed on Mar. 3, 2008.
Application No. PCT/US2008/055701 is a continuation-in-part of application No. PCT/US2008/055693, filed on Mar. 3, 2008.
Application No. PCT/US2008/055693 is a continuation-in-part of application No. PCT/US2008/055704, filed on Mar. 3, 2008.
Application No. PCT/US2008/055704 is a continuation-in-part of application No. PCT/US2008/055708, filed on Mar. 3, 2008.
Application No. PCT/US2008/055708 is a continuation-in-part of application No. PCT/US2008/055597, filed on Mar. 3, 2008.
Application No. PCT/US2008/055597 is a continuation-in-part of application No. PCT/US2008/055604, filed on Mar. 3, 2008.
Application No. PCT/US2008/055604 is a continuation-in-part of application No. PCT/US2008/055608, filed on Mar. 3, 2008.
Application No. PCT/US2008/055608 is a continuation-in-part of application No. PCT/US2008/055353, filed on Mar. 3, 2008.
Application No. PCT/US2008/055353 is a continuation-in-part of application No. PCT/US2008/055631, filed on Mar. 3, 2008.
Application No. PCT/US2008/055631 is a continuation-in-part of application No. PCT/US2008/055563, filed on Mar. 3, 2008.
Application No. PCT/US2008/055563 is a continuation-in-part of application No. PCT/US2008/055612, filed on Mar. 3, 2008.
Application No. PCT/US2008/055612 is a continuation-in-part of application No. PCT/US2008/055622, filed on Mar. 3, 2008.
Application No. PCT/US2008/055622 is a continuation-in-part of application No. PCT/US2008/055625, filed on Mar. 3, 2008.
Application No. PCT/US2008/055625 is a continuation-in-part of application No. PCT/US2008/055527, filed on Feb. 29, 2008.
Application No. PCT/US2008/055527 is a continuation-in-part of application No. PCT/US2008/055533, filed on Feb. 29, 2008.
Application No. PCT/US2008/055533 is a continuation-in-part of application No. PCT/US2008/055554, filed on Feb. 29, 2008.
Application No. PCT/US2008/055554 is a continuation-in-part of application No. PCT/US2008/055511, filed on Feb. 29, 2008.
Application No. PCT/US2008/055511 is a continuation-in-part of application No. PCT/US2008/055532, filed on Feb. 29, 2008.
Application No. PCT/US2008/055532 is a continuation-in-part of application No. PCT/US2008/055516, filed on Feb. 29, 2008.
Application No. PCT/US2008/055516 is a continuation-in-part of application No. PCT/US2008/055551, filed on Feb. 29, 2008.
Application No. PCT/US2008/055551 is a continuation-in-part of application No. PCT/US2008/055519, filed on Feb. 29, 2008.
Application No. PCT/US2008/055519 is a continuation-in-part of application No. PCT/US2008/055542, filed on Feb. 29, 2008.
Application No. PCT/US2008/055542 is a continuation-in-part of application No. PCT/US2008/055526, filed on Feb. 29, 2008.
(60) Provisional application No. 60/934,930, filed on Mar. 16, 2007.
(60) Provisional application No. 60/934,940, filed on Mar. 2, 2007.
(60) Provisional application No. 60/934,930, filed on Mar. 16, 2007.
(60) Provisional application No. 60/934,940, filed on Mar. 2, 2007.
(60) Provisional application No. 60/934,941, filed on Apr. 13, 2007.
(60) Provisional application No. 60/934,932, filed on Apr. 20, 2007.
(60) Provisional application No. 60/934,930, filed on Mar. 16, 2007.
(60) Provisional application No. 60/934,940, filed on Mar. 2, 2007.
(60) Provisional application No. 60/934,931, filed on Apr. 20, 2007.
(60) Provisional application No. 60/934,934, filed on Apr. 24, 2007.
(60) Provisional application No. 60/934,928, filed on Apr. 24, 2007.
(60) Provisional application No. 60/934,943, filed on Apr. 25, 2007.
(60) Provisional application No. 60/934,942, filed on Apr. 25, 2007.
(60) Provisional application No. 60/934,930, filed on Mar. 16, 2007.
(60) Provisional application No. 60/934,940, filed on Mar. 2, 2007.
(60) Provisional application No. 60/934,931, filed on Apr. 20, 2007.
(60) Provisional application No. 60/934,934, filed on Apr. 24, 2007.
(60) Provisional application No. 60/934,928, filed on Apr. 24, 2007.
(60) Provisional application No. 60/934,943, filed on Apr. 25, 2007.
(60) Provisional application No. 60/934,965, filed on Jun. 18, 2007.
(60) Provisional application No. 60/934,929, filed on Jun. 14, 2007.
(60) Provisional application No. 60/934,954, filed on Jun. 6, 2007.
(60) Provisional application No. 60/934,940, filed on Mar. 2, 2007.
(60) Provisional application No. 60/934,930, filed on Mar. 16, 2007.
(60) Provisional application No. 60/934,930, filed on Mar. 16, 2007.
(60) Provisional application No. 60/934,940, filed on Mar. 2, 2007.
(60) Provisional application No. 60/934,921, filed on May 24, 2007.
(60) Provisional application No. 60/932,968, filed on May 30, 2007.
(60) Provisional application No. 60/932,969, filed on May 30, 2007.
(60) Provisional application No. 60/932,967, filed on Jun. 1, 2007.
(60) Provisional application No. 60/934,930, filed on Mar. 16, 2007.
(60) Provisional application No. 60/934,940, filed on Mar. 2, 2007.
(60) Provisional application No. 60/934,954, filed on Jun. 6, 2007.
(60) Provisional application No. 60/934,929, filed on Jun. 14, 2007.
(60) Provisional application No. 60/934,930, filed on Mar. 16, 2007.
(60) Provisional application No. 60/934,940, filed on Mar. 2, 2007.
(60) Provisional application No. 60/949,443, filed on Jul. 12, 2007.
(60) Provisional application No. 60/934,930, filed on Mar. 16, 2007.
(60) Provisional application No. 60/934,940, filed on Mar. 2, 2007.
(60) Provisional application No. 60/949,444, filed on Jul. 12, 2007.
(60) Provisional application No. 60/934,930, filed on Mar. 16, 2007.
(60) Provisional application No. 60/934,940, filed on Mar. 2, 2007.
(60) Provisional application No. 60/949,448, filed on Jul. 12, 2007.
(60) Provisional application No. 60/934,930, filed on Mar. 16, 2007.
(60) Provisional application No. 60/934,940, filed on Mar. 2, 2007.
(60) Provisional application No. 60/949,450, filed on Jul. 12, 2007.
(60) Provisional application No. 60/951,167, filed on Jul. 20, 2007.
(60) Provisional application No. 60/951,168, filed on Jul. 20, 2007.
(60) Provisional application No. 60/951,170, filed on Jul. 20, 2007.
(60) Provisional application No. 60/934,930, filed on Mar. 16, 2007.
(60) Provisional application No. 60/934,940, filed on Mar. 2, 2007.
(60) Provisional application No. 60/952,191, filed on Jul. 26, 2007.
(60) Provisional application No. 60/952,188, filed on Jul. 26, 2007.
(60) Provisional application No. 60/952,192, filed on Jul. 26, 2007.
(60) Provisional application No. 60/952,499, filed on Jul. 27, 2007.
(60) Provisional application No. 60/934,930, filed on Mar. 16, 2007.
(60) Provisional application No. 60/934,940, filed on Mar. 2, 2007.
(60) Provisional application No. 60/952,191, filed on Jul. 26, 2007.
(60) Provisional application No. 60/952,188, filed on Jul. 26, 2007.
(60) Provisional application No. 60/952,192, filed on Jul. 26, 2007.
(60) Provisional application No. 60/952,499, filed on Jul. 27, 2007.
(60) Provisional application No. 60/953,873, filed on Aug. 3, 2007.
(60) Provisional application No. 60/934,930, filed on Mar. 16, 2007.
(60) Provisional application No. 60/934,940, filed on Mar. 2, 2007.
(60) Provisional application No. 60/956,093, filed on Aug. 15, 2007.
(60) Provisional application No. 60/934,930, filed on Mar. 16, 2007.
(60) Provisional application No. 60/934,940, filed on Mar. 2, 2007.
(60) Provisional application No. 60/970,414, filed on Sep. 6, 2007.
(60) Provisional application No. 60/934,930, filed on Mar. 16, 2007.
(60) Provisional application No. 60/934,940, filed on Mar. 2, 2007.
(60) Provisional application No. 60/956,679, filed on Aug. 17, 2007.
(60) Provisional application No. 60/934,930, filed on Mar. 16, 2007.
(60) Provisional application No. 60/934,940, filed on Mar. 2, 2007.
(60) Provisional application No. 60/970,796, filed on Sep. 7, 2007.
(60) Provisional application No. 60/934,930, filed on Mar. 16, 2007.
(60) Provisional application No. 60/934,940, filed on Mar. 2, 2007.
(60) Provisional application No. 60/970,858, filed on Sep. 7, 2007.
(60) Provisional application No. 60/934,930, filed on Mar. 16, 2007.
(60) Provisional application No. 60/934,940, filed on Mar. 2, 2007.
(60) Provisional application No. 60/971,476, filed on Sep. 11, 2007.
(60) Provisional application No. 60/934,930, filed on Mar. 16, 2007.
(60) Provisional application No. 60/934,940, filed on Mar. 2, 2007.
(60) Provisional application No. 60/971,874, filed on Sep. 12, 2007.
(60) Provisional application No. 60/934,930, filed on Mar. 16, 2007.
(60) Provisional application No. 60/934,940, filed on Mar. 2, 2007.
(60) Provisional application No. 60/973,397, filed on Sep. 18, 2007.
(60) Provisional application No. 60/934,930, filed on Mar. 16, 2007.
(60) Provisional application No. 60/934,940, filed on Mar. 2, 2007.
(60) Provisional application No. 60/973,398, filed on Sep. 18, 2007.
(60) Provisional application No. 60/973,397, filed on Sep. 18, 2007.
(60) Provisional application No. 60/934,930, filed on Mar. 16, 2007.
(60) Provisional application No. 60/934,940, filed on Mar. 2, 2007.
(60) Provisional application No. 60/983,179, filed on Oct. 27, 2007.
(60) Provisional application No. 60/934,930, filed on Mar. 16, 2007.
(60) Provisional application No. 60/934,940, filed on Mar. 2, 2007.
(60) Provisional application No. 60/983,183, filed on Oct. 27, 2007.
(60) Provisional application No. 60/983,182, filed on Oct. 27, 2007.
(60) Provisional application No. 60/983,180, filed on Oct. 27, 2007.
(60) Provisional application No. 60/983,181, filed on Oct. 27, 2007.
(60) Provisional application No. 60/986,910, filed on Nov. 9, 2007.
(60) Provisional application No. 60/986,822, filed on Nov. 9, 2007.
(60) Provisional application No. 60/986,893, filed on Nov. 9, 2007.
(60) Provisional application No. 60/934,930, filed on Mar. 16, 2007.
(60) Provisional application No. 60/934,940, filed on Mar. 2, 2007.
(60) Provisional application No. 60/986,913, filed on Nov. 9, 2007.
(60) Provisional application No. 60/934,930, filed on Mar. 16, 2007.
(60) Provisional application No. 60/934,940, filed on Mar. 2, 2007.
(60) Provisional application No. 61/021,491, filed on Jan. 16, 2008.
(60) Provisional application No. 60/934,930, filed on Mar. 16, 2007.
(60) Provisional application No. 60/934,940, filed on Mar. 2, 2007.
(60) Provisional application No. 60/989,419, filed on Nov. 20, 2007.
(60) Provisional application No. 60/934,930, filed on Mar. 16, 2007.
(60) Provisional application No. 60/934,940, filed on Mar. 2, 2007.
(60) Provisional application No. 60/986,916, filed on Nov. 9, 2007.
(60) Provisional application No. 60/934,930, filed on Mar. 16, 2007.
(60) Provisional application No. 60/934,940, filed on Mar. 2, 2007.
(60) Provisional application No. 60/986,919, filed on Nov. 9, 2007.
(60) Provisional application No. 60/934,930, filed on Mar. 16, 2007.
(60) Provisional application No. 60/934,940, filed on Mar. 2, 2007.
(60) Provisional application No. 60/987,733, filed on Nov. 13, 2007.
(60) Provisional application No. 60/934,930, filed on Mar. 16, 2007.
(60) Provisional application No. 60/934,940, filed on Mar. 2, 2007.
(60) Provisional application No. 60/987,737, filed on Nov. 13, 2007.
(60) Provisional application No. 60/934,930, filed on Mar. 16, 2007.
(60) Provisional application No. 60/934,940, filed on Mar. 2, 2007.
(60) Provisional application No. 60/987,740, filed on Nov. 13, 2007.
(60) Provisional application No. 60/988,076, filed on Nov. 14, 2007.
(60) Provisional application No. 60/988,079, filed on Nov. 14, 2007.
(60) Provisional application No. 60/988,082, filed on Nov. 14, 2007.
(60) Provisional application No. 60/988,083, filed on Nov. 14, 2007.
(60) Provisional application No. 60/934,930, filed on Mar. 16, 2007.
(60) Provisional application No. 60/934,940, filed on Mar. 2, 2007.
(60) Provisional application No. 61/013,979, filed on Dec. 14, 2007.
(60) Provisional application No. 60/934,930, filed on Mar. 16, 2007.
(60) Provisional application No. 60/934,940, filed on Mar. 2, 2007.
(60) Provisional application No. 60/988,395, filed on Nov. 15, 2007.
(60) Provisional application No. 60/934,930, filed on Mar. 16, 2007.
(60) Provisional application No. 60/934,940, filed on Mar. 2, 2007.
(60) Provisional application No. 60/988,397, filed on Nov. 15, 2007.
(60) Provisional application No. 60/988,398, filed on Nov. 15, 2007.
(60) Provisional application No. 60/934,930, filed on Mar. 16, 2007.
(60) Provisional application No. 60/934,940, filed on Mar. 2, 2007.
(60) Provisional application No. 60/988,399, filed on Nov. 15, 2007.
(60) Provisional application No. 60/934,930, filed on Mar. 16, 2007.
(60) Provisional application No. 60/934,940, filed on Mar. 2, 2007.
(60) Provisional application No. 60/988,400, filed on Nov. 15, 2007.
(60) Provisional application No. 60/988,401, filed on Nov. 15, 2007.
(60) Provisional application No. 60/988,402, filed on Nov. 15, 2007.
(60) Provisional application No. 60/934,930, filed on Mar. 16, 2007.
(60) Provisional application No. 60/934,940, filed on Mar. 2, 2007.
(60) Provisional application No. 60/986,944, filed on Nov. 9, 2007.
(60) Provisional application No. 60/988,403, filed on Nov. 15, 2007.
(60) Provisional application No. 61/013,981, filed on Dec. 14, 2007.
(60) Provisional application No. 60/934,930, filed on Mar. 16, 2007.
(60) Provisional application No. 60/934,940, filed on Mar. 2, 2007.
(60) Provisional application No. 61/015,611, filed on Dec. 20, 2007.
(60) Provisional application No. 60/934,930, filed on Mar. 16, 2007.
(60) Provisional application No. 60/934,940, filed on Mar. 2, 2007.
(60) Provisional application No. 60/988,405, filed on Nov. 15, 2007.
(60) Provisional application No. 60/989,427, filed on Nov. 20, 2007.
(60) Provisional application No. 60/989,424, filed on Nov. 20, 2007.
(60) Provisional application No. 60/989,428, filed on Nov. 20, 2007.
(60) Provisional application No. 60/934,930, filed on Mar. 16, 2007.
(60) Provisional application No. 60/934,940, filed on Mar. 2, 2007.
(60) Provisional application No. 61/014,305, filed on Dec. 17, 2007.
(60) Provisional application No. 60/934,930, filed on Mar. 16, 2007.
(60) Provisional application No. 60/934,940, filed on Mar. 2, 2007.
(60) Provisional application No. 61/014,730, filed on Dec. 18, 2007.
(60) Provisional application No. 60/934,930, filed on Mar. 16, 2007.
(60) Provisional application No. 60/934,940, filed on Mar. 2, 2007.
(60) Provisional application No. 61/015,164, filed on Dec. 19, 2007.
(60) Provisional application No. 60/934,930, filed on Mar. 16, 2007.
(60) Provisional application No. 60/934,940, filed on Mar. 2, 2007.
(60) Provisional application No. 61/015,166, filed on Dec. 19, 2007.
(60) Provisional application No. 60/934,930, filed on Mar. 16, 2007.
(60) Provisional application No. 60/934,940, filed on Mar. 2, 2007.
(60) Provisional application No. 61/012,401, filed on Dec. 7, 2007.
(60) Provisional application No. 60/934,930, filed on Mar. 16, 2007.
(60) Provisional application No. 60/934,940, filed on Mar. 2, 2007.
(60) Provisional application No. 61/016,340, filed on Dec. 21, 2007.
(60) Provisional application No. 60/934,930, filed on Mar. 16, 2007.
(60) Provisional application No. 60/934,940, filed on Mar. 2, 2007.
(60) Provisional application No. 60/992,808, filed on Dec. 6, 2007.
(60) Provisional application No. 60/934,930, filed on Mar. 16, 2007.
(60) Provisional application No. 60/934,940, filed on Mar. 2, 2007.
(60) Provisional application No. 61/013,982, filed on Dec. 14, 2007.
(60) Provisional application No. 60/934,930, filed on Mar. 16, 2007.
(60) Provisional application No. 60/934,940, filed on Mar. 2, 2007.
(60) Provisional application No. 61/014,139, filed on Dec. 17, 2007.
(60) Provisional application No. 60/934,930, filed on Mar. 16, 2007.
(60) Provisional application No. 60/934,940, filed on Mar. 2, 2007.
(60) Provisional application No. 60/934,921, filed on May 24, 2007.
(60) Provisional application No. 60/932,968, filed on May 30, 2007.
(60) Provisional application No. 60/932,969, filed on May 30, 2007.
(60) Provisional application No. 60/932,967, filed on Jun. 1, 2007.
(60) Provisional application No. 60/934,930, filed on Mar. 16, 2007.
(60) Provisional application No. 60/934,940, filed on Mar. 2, 2007.
(60) Provisional application No. 60/934,921, filed on May 24, 2007.
(60) Provisional application No. 60/932,968, filed on May 30, 2007.
(60) Provisional application No. 60/932,969, filed on May 30, 2007.
(60) Provisional application No. 60/932,967, filed on Jun. 1, 2007.
(60) Provisional application No. 61/014,733, filed on Dec. 18, 2007.
(60) Provisional application No. 60/934,930, filed on Mar. 16, 2007.
(60) Provisional application No. 60/934,940, filed on Mar. 2, 2007.
(60) Provisional application No. 61/012,402, filed on Dec. 7, 2007.
(60) Provisional application No. 60/934,930, filed on Mar. 16, 2007.
(60) Provisional application No. 60/934,940, filed on Mar. 2, 2007.
(60) Provisional application No. 61/016,343, filed on Dec. 21, 2007.
(60) Provisional application No. 60/934,930, filed on Mar. 16, 2007.
(60) Provisional application No. 60/934,940, filed on Mar. 2, 2007.
(60) Provisional application No. 61/015,616, filed on Dec. 20, 2007.
(60) Provisional application No. 60/934,930, filed on Mar. 16, 2007.
(60) Provisional application No. 60/934,940, filed on Mar. 2, 2007.
(60) Provisional application No. 61/015,618, filed on Dec. 20, 2007.
(60) Provisional application No. 60/934,930, filed on Mar. 16, 2007.
(60) Provisional application No. 60/934,940, filed on Mar. 2, 2007.
(60) Provisional application No. 61/014,734, filed on Dec. 18, 2007.
(60) Provisional application No. 60/934,930, filed on Mar. 16, 2007.
(60) Provisional application No. 60/934,940, filed on Mar. 2, 2007.
(60) Provisional application No. 61/015,167, filed on Dec. 19, 2007.
(60) Provisional application No. 60/934,930, filed on Mar. 16, 2007.
(60) Provisional application No. 60/934,940, filed on Mar. 2, 2007.
(60) Provisional application No. 61/015,170, filed on Dec. 19, 2007.
(60) Provisional application No. 60/934,930, filed on Mar. 16, 2007.
(60) Provisional application No. 60/934,940, filed on Mar. 2, 2007.
(60) Provisional application No. 61/014,735, filed on Dec. 18, 2007.
(60) Provisional application No. 60/934,930, filed on Mar. 16, 2007.
(60) Provisional application No. 60/934,940, filed on Mar. 2, 2007.
(60) Provisional application No. 61/014,737, filed on Dec. 18, 2007.
(60) Provisional application No. 60/934,930, filed on Mar. 16, 2007.
(60) Provisional application No. 60/934,940, filed on Mar. 2, 2007.
(60) Provisional application No. 60/992,975, filed on Dec. 6, 2007.
(60) Provisional application No. 60/934,930, filed on Mar. 16, 2007.
(60) Provisional application No. 60/934,940, filed on Mar. 2, 2007.
(60) Provisional application No. 61/015,171, filed on Dec. 19, 2007.
(60) Provisional application No. 60/934,930, filed on Mar. 16, 2007.
(60) Provisional application No. 60/934,940, filed on Mar. 2, 2007.
(60) Provisional application No. 61/015,173, filed on Dec. 19, 2007.
(60) Provisional application No. 60/934,930, filed on Mar. 16, 2007.
(60) Provisional application No. 60/934,940, filed on Mar. 2, 2007.
(60) Provisional application No. 61/012,404, filed on Dec. 7, 2007.
(60) Provisional application No. 60/934,930, filed on Mar. 16, 2007.
(60) Provisional application No. 60/934,940, filed on Mar. 2, 2007.
(60) Provisional application No. 61/014,738, filed on Dec. 18, 2007.
(60) Provisional application No. 60/934,930, filed on Mar. 16, 2007.
(60) Provisional application No. 60/934,940, filed on Mar. 2, 2007.
(60) Provisional application No. 61/015,619, filed on Dec. 20, 2007.
(60) Provisional application No. 60/934,930, filed on Mar. 16, 2007.
(60) Provisional application No. 60/934,940, filed on Mar. 2, 2007.
(60) Provisional application No. 60/934,930, filed on Mar. 16, 2007.
(60) Provisional application No. 60/934,940, filed on Mar. 2, 2007.
(60) Provisional application No. 61/016,319, filed on Dec. 21, 2007.
(60) Provisional application No. 60/934,930, filed on Mar. 16, 2007.
(60) Provisional application No. 60/934,940, filed on Mar. 2, 2007.
(60) Provisional application No. 60/934,930, filed on Mar. 16, 2007.
(60) Provisional application No. 60/934,940, filed on Mar. 2, 2007.
(60) Provisional application No. 60/934,930, filed on Mar. 16, 2007.
(60) Provisional application No. 60/934,940, filed on Mar. 2, 2007.
(60) Provisional application No. 60/934,930, filed on Mar. 16, 2007.
(60) Provisional application No. 60/934,940, filed on Mar. 2, 2007.
(60) Provisional application No. 60/934,930, filed on Mar. 16, 2007.
(60) Provisional application No. 60/934,940, filed on Mar. 2, 2007.
(60) Provisional application No. 60/934,930, filed on Mar. 16, 2007.
(60) Provisional application No. 60/934,940, filed on Mar. 2, 2007.
(60) Provisional application No. 60/934,930, filed on Mar. 16, 2007.
(60) Provisional application No. 60/934,940, filed on Mar. 2, 2007.
(60) Provisional application No. 60/934,930, filed on Mar. 16, 2007.
(60) Provisional application No. 60/934,940, filed on Mar. 2, 2007.

(51) Int. Cl. C12N 5/071; C07H 21/02; C12N 5/00

(52) U.S. Cl. 435/366; 536/23.1; 435/375

(57) ABSTRACT

The present disclosure provides RNA molecules, for example, meroduplex ribonucleic acid molecules (mdRNA), and blunt ended double-stranded ribonucleic acid molecules capable of decreasing or silencing expression of a target gene. An mdRNA of this disclosure comprises at least three strands that combine to form at least two non-overlapping double-stranded regions separated by a nick or gap wherein one strand is complementary to a target mRNA. Also provided are methods of decreasing expression of a target gene in a cell or in a subject to treat a disease or condition associated with the target gene.

### CROSS-REFERENCE TO RELATED APPLICATIONS

[0001] This application is a continuation-in-part of:

[0002] (1) International Application No. PCT/US2008/055371, filed Feb. 28, 2008, which claims the benefit of U.S. Provisional Patent Application Nos. 60/934,930, filed Mar. 16, 2007, and 60/934,940, filed Mar. 2, 2007;

[0003] (2) International Application No. PCT/US2008/055370, filed Feb. 28, 2008, which claims the benefit of U.S. Provisional Patent Application Nos. 60/934,930, filed Mar. 16, 2007, 60/934,940, filed Mar. 2, 2007, 60/934,941, filed Apr. 13, 2007, and 60/934,932, filed Apr. 20, 2007;

[0004] (3) International Application No. PCT/US2008/055362, filed Feb. 28, 2008, which claims the benefit of U.S. Provisional Patent Application Nos. 60/934,930, filed Mar. 16, 2007, 60/934,940, filed Mar. 2, 2007, 60/934,931, filed Apr. 20, 2007, 60/934,934, filed Apr. 24, 2007, 60/934,928, filed Apr. 24, 2007, 60/934,943, filed Apr. 25, 2007, and 60/934,942, filed Apr. 25, 2007;

[0005] (4) International Application No. PCT/US2008/055380, filed Feb. 28, 2008, which claims the benefit of U.S. Provisional Patent Application Nos. 60/934,930, filed Mar. 16, 2007, 60/934,940, filed Mar. 2, 2007, 60/934,931, filed Apr. 20, 2007, 60/934,934, filed Apr. 24, 2007, 60/934,928, filed Apr. 24, 2007, 60/934,943, filed Apr. 25, 2007, and 60/934,949, filed May 3, 2007;

[0006] (5) International Application No. PCT/US2008/055383, filed Feb. 28, 2008, which claims the benefit of U.S. Provisional Patent Application Nos. 60/934,930, filed Mar. 16, 2007, 60/934,940, filed Mar. 2, 2007, 60/934,941, filed Apr. 13, 2007, 60/934,932, filed Apr. 20, 2007, 60/934,933, filed Apr. 20, 2007, and 60/934,944, filed May 10, 2007;

[0007] (6) International Application No. PCT/US2008/055375, filed Feb. 28, 2008, which claims the benefit of U.S. Provisional Patent Application Nos. 60/934,930, filed Mar. 16, 2007, 60/934,940, filed Mar. 2, 2007, 60/934,946, filed May 3, 2007, 60/934,945, filed May 10, 2007, 60/934,935, filed May 15, 2007, and 60/934,922, filed May 17, 2007;

[0008] (7) International Application No. PCT/US2008/055360, filed Feb. 28, 2008, which claims the benefit of U.S. Provisional Patent Application Nos. 60/934,930, filed Mar. 16, 2007, 60/934,940, filed Mar. 2, 2007, 60/934,946, filed May 3, 2007, 60/934,945, filed May 10, 2007, 60/934,935, filed May 15, 2007, 60/934,922, filed May 17, 2007, and 60/932,970, filed May 22, 2007;

[0009] (8) International Application No. PCT/US2008/055374, filed Feb. 28, 2008, which claims the benefit of U.S. Provisional Patent Application Nos. 60/934,930, filed Mar. 16, 2007, 60/934,940, filed Mar. 2, 2007, 60/934,921, filed May 24, 2007, 60/932,968, filed May 30, 2007, 60/932,969, filed May 30, 2007, and 60/932,967, filed Jun. 1, 2007;

[0010] (9) International Application No. PCT/US2008/055381, filed Feb. 28, 2008, which claims the benefit of U.S. Provisional Patent Application Nos. 60/934,930, filed Mar. 16, 2007, 60/934,940, filed Mar. 2, 2007, 60/934,954, filed Jun. 6, 2007, and 60/934,929, filed Jun. 14, 2007;

[0011] (10) International Application No. PCT/US2008/055357, filed Feb. 28, 2008, which claims the benefit of U.S. Provisional Patent Application Nos. 60/934,930, filed Mar. 16, 2007, 60/934,940, filed Mar. 2, 2007, 60/934,954, filed Jun. 6, 2007, 60/934,929, filed Jun. 14, 2007, and 60/934,965, filed Jun. 22, 2007;

[0012] (11) International Application No. PCT/US2008/055378, filed Feb. 28, 2008, which claims the benefit of U.S. Provisional Patent Application Nos. 60/934,930, filed Mar. 16, 2007, 60/934,940, filed Mar. 2, 2007, and 60/949,443, filed Jul. 12, 2007;

[0013] (12) International Application No. PCT/US2008/055372, filed Feb. 28, 2008, which claims the benefit of U.S. Provisional Patent Application Nos. 60/934,930, filed Mar. 16, 2007, 60/934,940, filed Mar. 2, 2007, and 60/949,444, filed Jul. 12, 2007;

[0014] (13) International Application No. PCT/US2008/055345, filed Feb. 28, 2008, which claims the benefit of U.S. Provisional Patent Application Nos. 60/934,930, filed Mar. 16, 2007, 60/934,940, filed Mar. 2, 2007, and 60/949,448, filed Jul. 12, 2007;

[0015] (14) International Application No. PCT/US2008/055377, filed Feb. 28, 2008, which claims the benefit of U.S. Provisional Patent Application Nos. 60/934,930, filed Mar. 16, 2007, 60/934,940, filed Mar. 2, 2007, 60/949,450, filed Jul. 12, 2007, 60/951,167, filed Jul. 20, 2007, 60/951,168, filed Jul. 20, 2007, and 60/951,170, filed Jul. 20, 2007;

[0016] (15) International Application No. PCT/US2008/055376, filed Feb. 28, 2008, which claims the benefit of U.S. Provisional Patent Application Nos. 60/934,930, filed Mar. 16, 2007, 60/934,940, filed Mar. 2, 2007, 60/952,191, filed Jul. 26, 2007, 60/952,188, filed Jul. 26, 2007, 60/952,192, filed Jul. 26, 2007, and 60/952,499, filed Jul. 27, 2007;

[0017] (16) International Application No. PCT/US2008/055373, filed Feb. 28, 2008, which claims the benefit of U.S. Provisional Patent Application Nos. 60/934,930, filed Mar. 16, 2007, 60/934,940, filed Mar. 2, 2007, 60/952,191, filed Jul. 26, 2007, 60/952,188, filed Jul. 26, 2007, 60/952,192, filed Jul. 26, 2007, 60/952,499, filed Jul. 27, 2007, and 60/953,873, filed Aug. 3, 2007;

[0018] (17) International Application No. PCT/US2008/055385, filed Feb. 28, 2008, which claims the benefit of U.S. Provisional Patent Application Nos. 60/934,930, filed Mar. 16, 2007, 60/934,940, filed Mar. 2, 2007, and 60/956,093, filed Aug. 15, 2007;

[0019] (18) International Application No. PCT/US2008/055386, filed Feb. 28, 2008, which claims the benefit of U.S. Provisional Patent Application Nos. 60/934,930, filed Mar. 16, 2007, 60/934,940, filed Mar. 2, 2007, and 60/970,414, filed Sep. 6, 2007;

[0020] (19) International Application No. PCT/US2008/055382, filed Feb. 28, 2008, which claims the benefit of U.S. Provisional Patent Application Nos. 60/934,930, filed Mar. 16, 2007, 60/934,940, filed Mar. 2, 2007, and 60/956,679, filed Aug. 17, 2007;

[0021] (20) International Application No. PCT/US2008/055333, filed Feb. 28, 2008, which claims the benefit of U.S. Provisional Patent Application Nos. 60/934,930, filed Mar. 16, 2007, 60/934,940, filed Mar. 2, 2007, and 60/970,796, filed Sep. 7, 2007;

[0022] (21) International Application No. PCT/US2008/055341, filed Feb. 28, 2008, which claims the benefit of U.S. Provisional Patent Application Nos. 60/934,930, filed Mar. 16, 2007, 60/934,940, filed Mar. 2, 2007, and 60/970,858, filed Sep. 7, 2007;

[0023] (22) International Application No. PCT/US2008/055350, filed Feb. 28, 2008, which claims the benefit of U.S. Provisional Patent Application Nos. 60/934,930, filed Mar. 16, 2007, 60/934,940, filed Mar. 2, 2007, and 60/971,476, filed Sep. 11, 2007;

[0024] (23) International Application No. PCT/US2008/055356, filed Feb. 28, 2008, which claims the benefit of U.S. Provisional Patent Application Nos. 60/934,930, filed Mar. 16, 2007, 60/934,940, filed Mar. 2, 2007, and 60/971,874, filed Sep. 12, 2007;

[0025] (24) International Application No. PCT/US2008/055366, filed Feb. 28, 2008, which claims the benefit of U.S. Provisional Patent Application Nos. 60/934,930, filed Mar. 16, 2007, 60/934,940, filed Mar. 2, 2007, and 60/973,397, filed Sep. 18, 2007;

[0026] (25) International Application No. PCT/US2008/055339, filed Feb. 28, 2008, which claims the benefit of U.S. Provisional Patent Application Nos. 60/934,930, filed Mar. 16, 2007, 60/934,940, filed Mar. 2, 2007, 60/973,398, filed Sep. 18, 2007, 60/013,212, filed Dec. 12, 2007, 60/013,239, filed Dec. 12, 2007, and 60/973,397, filed Sep. 18, 2007;

[0027] (26) International Application No. PCT/US2008/055365, filed Feb. 28, 2008, which claims the benefit of U.S. Provisional Patent Application Nos. 60/934,930, filed Mar. 16, 2007, 60/934,940, filed Mar. 2, 2007, and 60/983,179, filed Oct. 27, 2007;

[0028] (27) International Application No. PCT/US2008/055340, filed Feb. 28, 2008, which claims the benefit of U.S. Provisional Patent Application Nos. 60/934,930, filed Mar. 16, 2007, 60/934,940, filed Mar. 2, 2007, 60/983,183, filed Oct. 27, 2007, 60/983,182, filed Oct. 27, 2007, 60/983,180, filed Oct. 27, 2007, 60/983,181, filed Oct. 27, 2007, 60/986,910, filed Nov. 9, 2007, 60/986,822, filed Nov. 9, 2007, and 60/986,893, filed Nov. 9, 2007;

[0029] (28) International Application No. PCT/US2008/055505, filed Feb. 29, 2008, which claims the benefit of U.S. Provisional Patent Application Nos. 60/934,930, filed Mar. 16, 2007, 60/934,940, filed Mar. 2, 2007, and 60/986,913, filed Nov. 9, 2007;

[0030] (29) International Application No. PCT/US2008/055556, filed Feb. 29, 2008, which claims the benefit of U.S. Provisional Patent Application Nos. 60/934,930, filed Mar. 16, 2007, 60/934,940, filed Mar. 2, 2007, and 61/021,491, filed Nov. 16, 2007;

[0031] (30) International Application No. PCT/US2008/055515, filed Feb. 29, 2008, which claims the benefit of U.S. Provisional Patent Application Nos. 60/934,930, filed Mar. 16, 2007, 60/934,940, filed Mar. 2, 2007, and 60/989,419, filed Nov. 20, 2007;

[0032] (31) International Application No. PCT/US2008/055599, filed Mar. 3, 2008, which claims the benefit of U.S. Provisional Patent Application Nos. 60/934,930, filed Mar. 16, 2007, 60/934,940, filed Mar. 2, 2007, and 60/986,916, filed Nov. 9, 2007;

[0033] (32) International Application No. PCT/US2008/055601, filed Mar. 3, 2008, which claims the benefit of U.S. Provisional Patent Application Nos. 60/934,930, filed Mar. 16, 2007, 60/934,940, filed Mar. 2, 2007, and 60/986,919, filed Nov. 9, 2007;

[0034] (33) International Application No. PCT/US2008/055603, filed Mar. 3, 2008, which claims the benefit of U.S. Provisional Patent Application Nos. 60/934,930, filed Mar. 16, 2007, 60/934,940, filed Mar. 2, 2007, and 60/987,733, filed Nov. 13, 2007;

[0035] (34) International Application No. PCT/US2008/055606, filed Mar. 3, 2008, which claims the benefit of U.S. Provisional Patent Application Nos. 60/934,930, filed Mar. 16, 2007, 60/934,940, filed Mar. 2, 2007, and 60/987,737, filed Nov. 13, 2007;

[0036] (35) International Application No. PCT/US2008/055548, filed Feb. 29, 2008, which claims the benefit of U.S. Provisional Patent Application Nos. 60/934,930, filed Mar. 16, 2007, 60/934,940, filed Mar. 2, 2007, 60/987,740, filed Nov. 13, 2007, 60/988,076, filed Nov. 14, 2007, 60/988,079, filed Nov. 14, 2007, 60/988,082, filed Nov. 14, 2007, and 60/988,083, filed Nov. 14, 2007;

[0037] (36) International Application No. PCT/US2008/055611, filed Mar. 3, 2008, which claims the benefit of U.S. Provisional Patent Application Nos. 60/934,930, filed Mar. 16, 2007, 60/934,940, filed Mar. 2, 2007, and 61/013,979, filed Dec. 14, 2007;

[0038] (37) International Application No. PCT/US2008/055615, filed Mar. 3, 2008, which claims the benefit of U.S. Provisional Patent Application Nos. 60/934,930, filed Mar. 16, 2007, 60/934,940, filed Mar. 2, 2007, and 60/988,395, filed Nov. 15, 2007;

[0039] (38) International Application No. PCT/US2008/055709, filed Mar. 3, 2008, which claims the benefit of U.S. Provisional Patent Application Nos. 60/934,930, filed Mar. 16, 2007, 60/934,940, filed Mar. 2, 2007, 60/988,397, filed Nov. 15, 2007, and 60/988,398, filed Nov. 15, 2007;

[0040] (39) International Application No. PCT/US2008/055618, filed Mar. 3, 2008, which claims the benefit of U.S. Provisional Patent Application Nos. 60/934,930, filed Mar. 16, 2007, 60/934,940, filed Mar. 2, 2007, and 60/988,399, filed Nov. 15, 2007;

[0041] (40) International Application No. PCT/US2008/055644, filed Mar. 3, 2008, which claims the benefit of U.S. Provisional Patent Application Nos. 60/934,930, filed Mar. 16, 2007, 60/934,940, filed Mar. 2, 2007, 60/988,400, filed Nov. 15, 2007, 60/988,401, filed Nov. 15, 2007, and 60/988,402, filed Nov. 15, 2007;

[0042] (41) International Application No. PCT/US2008/055651, filed Mar. 3, 2008, which claims the benefit of U.S. Provisional Patent Application Nos. 60/934,930, filed Mar. 16, 2007, 60/934,940, filed Mar. 2, 2007, 60/986,944, filed Nov. 9, 2007, 60/988,403, filed Nov. 15, 2007, and 61/013,981, filed Dec. 14, 2007;

[0043] (42) International Application No. PCT/US2008/055649, filed Mar. 3, 2008, which claims the benefit of U.S. Provisional Patent Application Nos. 60/934,930, filed Mar. 16, 2007, 60/934,940, filed Mar. 2, 2007, and 61/015,611, filed Dec. 20, 2007;

[0044] (43) International Application No. PCT/US2008/055711, filed Mar. 3, 2008, which claims the benefit of U.S. Provisional Patent Application Nos. 60/934,930, filed Mar. 16, 2007, 60/934,940, filed Mar. 2, 2007, 60/988,405, filed Nov. 15, 2007, 60/989,427, filed Nov. 20, 2007, 60/989,424, filed Nov. 20, 2007, and 60/989,428, filed Nov. 20, 2007;

[0045] (44) International Application No. PCT/US2008/055635, filed Mar. 3, 2008, which claims the benefit of U.S. Provisional Patent Application Nos. 60/934,930, filed Mar. 16, 2007, 60/934,940, filed Mar. 2, 2007, and 61/014,305, filed Dec. 17, 2007;

[0046] (45) International Application No. PCT/US2008/055524, filed Feb. 29, 2008, which claims the benefit of U.S. Provisional Patent Application Nos. 60/934,930, filed Mar. 16, 2007, 60/934,940, filed Mar. 2, 2007, and 61/014,730, filed Dec. 18, 2007;

[0047] (46) International Application No. PCT/US2008/055572, filed Mar. 3, 2008, which claims the benefit of U.S. Provisional Patent Application Nos. 60/934,930, filed Mar. 16, 2007, 60/934,940, filed Mar. 2, 2007, and 61/015,164, filed Dec. 19, 2007;

[0048] (47) International Application No. PCT/US2008/055627, filed Mar. 3, 2008, which claims the benefit of U.S. Provisional Patent Application Nos. 60/934,930, filed Mar. 16, 2007, 60/934,940, filed Mar. 2, 2007, and 61/015,166, filed Dec. 19, 2007;

[0049] (48) International Application No. PCT/US2008/055697, filed Mar. 3, 2008, which claims the benefit of U.S. Provisional Patent Application Nos. 60/934,930, filed Mar. 16, 2007, 60/934,940, filed Mar. 2, 2007, and 61/012,401, filed Dec. 7, 2007;

[0050] (49) International Application No. PCT/US2008/055662, filed Mar. 3, 2008, which claims the benefit of U.S. Provisional Patent Application Nos. 60/934,930, filed Mar. 16, 2007, 60/934,940, filed Mar. 2, 2007, and 61/016,340, filed Dec. 21, 2007;

[0051] (50) International Application No. PCT/US2008/055678, filed Mar. 3, 2008, which claims the benefit of U.S. Provisional Patent Application Nos. 60/934,930, filed Mar. 16, 2007, 60/934,940, filed Mar. 2, 2007, and 60/992,808, filed Dec. 6, 2007;

[0052] (51) International Application No. PCT/US2008/055368, filed Feb. 2, 2008, which claims the benefit of U.S. Provisional Patent Application Nos. 60/934,930, filed Mar. 16, 2007, 60/934,940, filed Mar. 2, 2007, and 61/013,982, filed Dec. 14, 2007;

[0053] (52) International Application No. PCT/US2008/055676, filed Mar. 3, 2008, which claims the benefit of U.S. Provisional Patent Application Nos. 60/934,930, filed Mar. 16, 2007, 60/934,940, filed Mar. 2, 2007, and 61/014,139, filed Dec. 17, 2007;

[0054] (53) International Application No. PCT/US2008/055550, filed Feb. 29, 2008, which claims the benefit of U.S. Provisional Patent Application Nos. 60/934,930, filed Mar. 16, 2007, 60/934,940, filed Mar. 2, 2007, 60/934,921, filed May 24, 2007, 60/932,968, filed May 30, 2007, 60/932,969, filed May 30, 2007, and 60/932,967, filed Jun. 1, 2007;

[0055] (54) International Application No. PCT/US2008/055560, filed Feb. 29, 2008, which claims the benefit of U.S. Provisional Patent Application Nos. 60/934,930, filed Mar. 16, 2007, 60/934,940, filed Mar. 2, 2007, 60/934,921, filed May 24, 2007; 60/932,968, filed May 30, 2007, 60/932,969, filed May 30, 2007, 60/932,967, filed Jun. 1, 2007, and 61/014,733 filed Dec. 18, 2007;

[0056] (55) International Application No. PCT/US2008/055698, filed Mar. 3, 2008, which claims the benefit of U.S. Provisional Patent Application Nos. 60/934,930, filed Mar. 16, 2007, 60/934,940, filed Mar. 2, 2007, and 61/012,402, filed Dec. 7, 2007;

[0057] (56) International Application No. PCT/US2008/055695, filed Mar. 3, 2008, which claims the benefit of U.S. Provisional Patent Application Nos. 60/934,930, filed Mar. 16, 2007, 60/934,940, filed Mar. 2, 2007, and 61/016,343, filed Dec. 21, 2007;

[0058] (57) International Application No. PCT/US2008/055701, filed Mar. 3, 2008, which claims the benefit of U.S. Provisional Patent Application Nos. 60/934,930, filed Mar. 16, 2007, 60/934,940, filed Mar. 2, 2007, and 61/015,616, filed Dec. 20, 2007;

[0059] (58) International Application No. PCT/US2008/055693, filed Mar. 3, 2008, which claims the benefit of U.S. Provisional Patent Application Nos. 60/934,930, filed Mar. 16, 2007, 60/934,940, filed Mar. 2, 2007, and 61/015,618, filed Dec. 20, 2007;

[0060] (59) International Application No. PCT/US2008/055704, filed Mar. 3, 2008, which claims the benefit of U.S. Provisional Patent Application Nos. 60/934,930, filed Mar. 16, 2007, 60/934,940, filed Mar. 2, 2007, and 61/014,734, filed Dec. 18, 2007;

[0061] (60) International Application No. PCT/US2008/055708, filed Mar. 3, 2008, which claims the benefit of U.S. Provisional Patent Application Nos. 60/934,930, filed Mar. 16, 2007, 60/934,940, filed Mar. 2, 2007, and 61/015,167, filed Dec. 19, 2007;

[0062] (61) International Application No. PCT/US2008/055597, filed Mar. 3, 2008, which claims the benefit of U.S. Provisional Patent Application Nos. 60/934,930, filed Mar. 16, 2007, 60/934,940, filed Mar. 2, 2007, and 61/015,170, filed Dec. 19, 2007;

[0063] (62) International Application No. PCT/US2008/055604, filed Mar. 3, 2008, which claims the benefit of U.S. Provisional Patent Application Nos. 60/934,930, filed Mar. 16, 2007, 60/934,940, filed Mar. 2, 2007, and 61/014,735, filed Dec. 18, 2007;

[0064] (63) International Application No. PCT/US2008/055608, filed Mar. 3, 2008, which claims the benefit of U.S. Provisional Patent Application Nos. 60/934,930, filed Mar. 16, 2007, 60/934,940, filed Mar. 2, 2007, and 61/014,737, filed Dec. 18, 2007;

[0065] (64) International Application No. PCT/US2008/055353, filed Mar. 3, 2008, which claims the benefit of U.S. Provisional Patent Application Nos. 60/934,930, filed Mar. 16, 2007, 60/934,940, filed Mar. 2, 2007, and 60/992,975, filed Dec. 6, 2007;

[0066] (65) International Application No. PCT/US2008/055631, filed Mar. 3, 2008, which claims the benefit of U.S. Provisional Patent Application Nos. 60/934,930, filed Mar. 16, 2007, 60/934,940, filed Mar. 2, 2007, and 61/015,171, filed Dec. 19, 2007;

[0067] (66) International Application No. PCT/US2008/055563, filed Feb. 29, 2008, which claims the benefit of U.S. Provisional Patent Application Nos. 60/934,930, filed Mar. 16, 2007, 60/934,940, filed Mar. 2, 2007, and 61/015,173, filed Dec. 19, 2007;

[0068] (67) International Application No. PCT/US2008/055612, filed Mar. 3, 2008, which claims the benefit of U.S. Provisional Patent Application Nos. 60/934,930, filed Mar. 16, 2007, 60/934,940, filed Mar. 2, 2007, and 61/012,404, filed Dec. 7, 2007;

[0069] (68) International Application No. PCT/US2008/055622, filed Mar. 3, 2008, which claims the benefit of U.S. Provisional Patent Application Nos. 60/934,930, filed Mar. 16, 2007, 60/934,940, filed Mar. 2, 2007, and 61/014,738, filed Dec. 18, 2007;

[0070] (69) International Application No. PCT/US2008/055625, filed Mar. 3, 2008, which claims the benefit of U.S. Provisional Patent Application Nos. 60/934,930, filed Mar. 16, 2007, 60/934,940, filed Mar. 2, 2007, and 61/015,619, filed Dec. 20, 2007;

[0071] (70) International Application No. PCT/US2008/055527, filed Feb. 29, 2008, which claims the benefit of U.S. Provisional Patent Application Nos. 60/934,930, filed Mar. 16, 2007, and 60/934,940, filed Mar. 2, 2007;

[0072] (71) International Application No. PCT/US2008/055533, filed Feb. 29, 2008, which claims the benefit of U.S. Provisional Patent Application Nos. 60/934,930, filed Mar. 16, 2007, 60/934,940, filed Mar. 2, 2007, and 61/016,319, filed Dec. 21, 2007;

[0073] (72) International Application No. PCT/US2008/055554, filed Feb. 29, 2008, which claims the benefit of U.S. Provisional Patent Application Nos. 60/934,930, filed Mar. 16, 2007, and 60/934,940, filed Mar. 2, 2007;

[0074] (73) International Application No. PCT/US2008/055511, filed Feb. 29, 2008, which claims the benefit of U.S. Provisional Patent Application Nos. 60/934,930, filed Mar. 16, 2007, and 60/934,940, filed Mar. 2, 2007;

[0075] (74) International Application No. PCT/US2008/055532, filed Feb. 29, 2008, which claims the benefit of U.S. Provisional Patent Application Nos. 60/934,930, filed Mar. 16, 2007, and 60/934,940, filed Mar. 2, 2007;

[0076] (75) International Application No. PCT/US2008/055516, filed Feb. 29, 2008, which claims the benefit of U.S. Provisional Patent Application Nos. 60/934,930, filed Mar. 16, 2007, and 60/934,940, filed Mar. 2, 2007;

[0077] (76) International Application No. PCT/US2008/055551, filed Feb. 29, 2008, which claims the benefit of U.S. Provisional Patent Application Nos. 60/934,930, filed Mar. 16, 2007, and 60/934,940, filed Mar. 2, 2007;

[0078] (77) International Application No. PCT/US2008/055519, filed Feb. 29, 2008, which claims the benefit of U.S. Provisional Patent Application Nos. 60/934,930, filed Mar. 16, 2007, and 60/934,940, filed Mar. 2, 2007;

[0079] (78) International Application No. PCT/US2008/055542, filed Feb. 29, 2008, which claims the benefit of U.S. Provisional Patent Application Nos. 60/934,930, filed Mar. 16, 2007, and 60/934,940, filed Mar. 2, 2007; and

[0080] (79) International Application No. PCT/US2008/055526, filed Feb. 29, 2008, which claims the benefit of U.S. Provisional Patent Application Nos. 60/934,930, filed Mar. 16, 2007, and 60/934,940, filed Mar. 2, 2007.

[0081] All of the above identified applications are incorporated by reference in their entirety.

### TECHNICAL FIELD

[0082] The present disclosure provides RNA molecules, for example, meroduplex ribonucleic acid molecules (mdRNA) and blunt ended double-stranded ribonucleic acid molecules, which are capable of decreasing or silencing expression of a target gene or family of genes. An mdRNA of this disclosure comprises at least three strands that combine to form at least two non-overlapping double-stranded regions separated by a nick or gap wherein at least one strand is complementary to a particular mRNA(s). Also provided are methods of decreasing expression of a target gene or family of genes in a cell or in a subject to treat a disease or condition associated with the target gene or family of genes.

### BACKGROUND

[0083] RNA interference (RNAi) refers to the cellular process of sequence specific, post-transcriptional gene silencing in animals mediated by small inhibitory nucleic acid molecules, such as a double-stranded RNA (dsRNA) that is homologous to a portion of a targeted messenger RNA (Fire et al., Nature 391:806, 1998; Hamilton et al., Science 286:950-951, 1999). RNAi has been observed in a variety of organisms, including mammals (Fire et al., Nature 391:806, 1998; Bahramian and Zarbl, Mol. Cell. Biol. 19:274-283, 1999; Wianny and Goetz, Nature Cell Biol. 2:70, 1999). RNAi can be induced by introducing an exogenous synthetic 21-nucleotide RNA duplex into cultured mammalian cells (Elbashir et al., Nature 411:494, 2001a).

[0084] The mechanism by which dsRNA mediates targeted gene-silencing can be described as involving two steps. The first step involves degradation of long dsRNAs by a ribonuclease III-like enzyme, referred to as Dicer, into short interfering RNAs (siRNAs) having from 21 to 23 nucleotides with double-stranded regions of about 19 base pairs and a two nucleotide, generally, overhang at each 3′-end (Berstein et al., Nature 409:363, 2001; Elbashir et al., Genes Dev. 15:188, 2001b; and Kim et al., Nature Biotech. 23:222, 2005). The second step of RNAi gene-silencing involves activation of a multi-component nuclease having one strand (guide or antisense strand) from the siRNA and an Argonaute protein to form an RNA-induced silencing complex (“RISC”) (Elbashir et al., Genes Dev. 15:188, 2001). Argonaute initially associates with a double-stranded siRNA and then endonucleolytically cleaves the non-incorporated strand (passenger or sense strand) to facilitate its release due to resulting thermodynamic instability of the cleaved duplex (Leuschner et al., EMBO 7:314, 2006). The guide strand in the activated RISC binds to a complementary target mRNA, which is then cleaved by the RISC to promote gene silencing. Cleavage of the target RNA occurs in the middle of the target region that is complementary to the guide strand (Elbashir et al., 2001b).

[0085] There continues to be a need for alternative effective therapeutic modalities useful for treating or preventing diseases or disorders in which reduced expression of a gene or family of genes (gene silencing) would be beneficial. The present disclosure meets such needs, and further provides other related advantages.

### BRIEF SUMMARY

[0086] Briefly, the present disclosure provides nicked or gapped double-stranded RNA (dsRNA) comprising at least three strands, and blunt ended double-stranded RNA having continuous strands (i.e., not nicked or gapped) that are suitable as substrate for Dicer or as RISC activators to modify expression of a target messenger RNA (mRNA).

[0087] In one aspect, the instant disclosure provides meroduplex mdRNA molecules, comprising a first strand that is complementary to a human mRNA nucleotide sequence, and a second strand and a third strand that are each complementary to non-overlapping regions of the first strand, wherein the second strand and third strands can anneal with the first strand to form at least two double-stranded regions spaced apart by up to 10 nucleotides and thereby forming a gap between the second and third strands, and wherein (a) the mdRNA molecule optionally includes at least one double-stranded region of 5 base pairs to 13 base pairs, or (b) the double-stranded regions combined total about 15 base pairs to about 40 base pairs and the mdRNA molecule optionally has blunt ends. In certain embodiments, the first strand is about 15 to about 40 nucleotides in length, and the second and third strands are each, individually, about 5 to about 20 nucleotides, wherein the combined length of the second and third strands is about 15 nucleotides to about 40 nucleotides. In other embodiments, the first strand is about 15 to about 40 nucleotides in length and is complementary to at least 15, 16, 17, 18, 19, 20, 21, 22, 23, 24, 25, 26, 27, 28, 29, 30, 31, 32, 33, 34, 35, 36, 37, 38, 39, or 40 contiguous nucleotides of a human mRNA nucleotide sequence. In still further embodiments, the first strand is about 15 to about 40 nucleotides in length and is at least 70%, 75%, 80%, 85%, 90%, 95%, 96%, 97%, 98%, or 99% identical to a sequence that is complementary to at least 15, 16, 17, 18, 19, 20, 21, 22, 23, 24, 25, 26, 27, 28, 29, 30, 31, 32, 33, 34, 35, 36, 37, 38, 39, or 40 contiguous nucleotides of a human mRNA nucleotide sequence.

[0088] In other embodiments, the mdRNA is a RISC activator (e.g., the first strand has about 15 nucleotides to about 25 nucleotides) or a Dicer substrate (e.g., the first strand has about 26 nucleotides to about 40 nucleotides). In some embodiments, the gap comprises at least one to ten unpaired nucleotides in the first strand positioned between the double-stranded regions formed by the second and third strands when annealed to the first strand. In other embodiments, the gap is a nick. In certain embodiments, the nick or gap is located 10 nucleotides from the 5′-end of the first (antisense) strand or at the Argonaute cleavage site. In another embodiment, the meroduplex nick or gap is positioned such that the thermal stability is maximized for the first and second strand duplex and for the first and third strand duplex as compared to the thermal stability of such meroduplexes having a nick or gap in a different position.

[0089] In another aspect, the instant disclosure provides mdRNA molecules having a first strand that is complementary to a human mRNA nucleotide sequence, and a second strand and a third strand that are each complementary to non-overlapping regions of the first strand, wherein the second strand and third strand can anneal with the first strand to form at least two double-stranded regions spaced apart by up to 10 nucleotides and thereby forming a gap between the second and third strands, and wherein (a) the mdRNA molecule includes at least one double-stranded region of 5 base pairs to 13 base pairs or (b) the double-stranded regions combined total about 15 base pairs to about 40 base pairs and the mdRNA molecule optionally has blunt ends; and wherein at least one pyrimidine of the mdRNA comprises a pyrimidine nucleoside according to Formula I or II:

[chemical structure]

wherein

[0090] R¹ and R² are each independently a —H, —OH, —OCH₃, —OCH₂OCH₂CH₃, —OCH₂CH₂OCH₃, halogen, substituted or unsubstituted C₁-C₁₀ alkyl, alkoxy, alkoxyalkyl, hydroxyalkyl, carboxyalkyl, alkylsulfonylamino, aminoalkyl, dialkylamino, alkylaminoalkyl, dialkylaminoalkyl, haloalkyl, trifluoromethyl, cycloalkyl, (cycloalkyl)alkyl, substituted or unsubstituted C₂-C₁₀ alkenyl, substituted or unsubstituted —O-allyl, —O—CH₂CH═CH₂, —O—CH═CHCH₃, substituted or unsubstituted C₂-C₁₀ alkynyl, carbamoyl, carbamyl, carboxy, carbonylamino, substituted or unsubstituted aryl, substituted or unsubstituted aralkyl, —NH₂, —NO₂, —C≡N, or heterocyclo group;

[0091] R³ and R⁴ are each independently a hydroxyl, a protected hydroxyl, a phosphate, or an internucleoside linking group; and

[0092] R⁵ and R⁸ are independently O or S.

[0093] In certain embodiments, at least one nucleoside is according to Formula I in which R¹ is methyl and R² is —OH. In certain related embodiments, at least one uridine of the dsRNA molecule is replaced with a nucleoside according to Formula I in which R¹ is methyl and R² is —OH, or R¹ is methyl, R² is —OH, and R⁸ is S. In some embodiments, at least one R¹ is a C₁-C₅ alkyl, such as methyl. In some embodiments, at least one R² is selected from 2′-O—(C₁-C₅) alkyl, 2′-O-methyl, 2′-OCH₂OCH₂CH₃, 2′-OCH₂CH₂OCH₃, 2′-O-allyl, or fluoro.

[0094] In some embodiments, at least one pyrimidine nucleoside of the mdRNA molecule is a locked nucleic acid (LNA) in the form of a bicyclic sugar, wherein R² is oxygen, and the 2′-O and 4′-C form an oxymethylene bridge on the same ribose ring (e.g., a 5-methyluridine LNA) or is a G clamp. In other embodiments, one or more of the nucleosides are according to Formula I in which R¹ is methyl and R² is a 2′-O—(C₁-C₅) alkyl, such as 2′-O-methyl.

[0095] In some embodiments, the gap comprises at least one unpaired nucleotide in the first strand positioned between the double-stranded regions formed by the second and third strands when annealed to the first strand, or the gap is a nick. In certain embodiments, the nick or gap is located 10 nucleotides from the 5′-end of the first strand or at the Argonaute cleavage site. In another embodiment, the meroduplex nick or gap is positioned such that the thermal stability is maximized for the first and second strand duplex and for the first and third strand duplex as compared to the thermal stability of such meroduplexes having a nick or gap in a different position.

[0096] In still another aspect, the instant disclosure provides for an mdRNA having one more hydroxymethyl modified nucleomonomer(s) (see chemical formulas below—monomers D, F, G, H, I, and J.). Hereunder as one such example is an acyclic nucleomonomer, more preferably an acyclic monomer selected from the group consisting of monomers D, F, G, H, I, and J. Additional monomers that may be incorporated into an mdRNA of this disclosure include:

[chemical structure]

[0097] In still another aspect, the instant disclosure provides a method for reducing the expression of a human gene in a cell, comprising administering an mdRNA molecule to a cell expressing the gene, wherein the mdRNA molecule is capable of specifically binding to an mRNA and thereby reducing the gene's level of expression in the cell. In a related aspect, there is provided a method of treating or preventing a disease associated with the expression of a gene or family of genes in a subject by administering an mdRNA molecule of this disclosure. In certain embodiments, the cell or subject is human. In certain embodiments, the disease is cancer, a metabolic disease or an inflammatory disease.

[0098] In any of the aspects of this disclosure, some embodiments provide an mdRNA molecule having a 5-methyluridine (ribothymidine), a 2-thioribothymidine, or 2′-O-methyl-5-methyluridine in place of at least one uridine on the first, second, or third strand, or in place of each and every uridine on the first, second, or third strand. In further embodiments, the mdRNA further comprises one or more non-standard nucleoside, such as a deoxyuridine, locked nucleic acid (LNA) molecule, or a universal-binding nucleotide, or a G clamp. Exemplary universal-binding nucleotides include C-phenyl, C-naphthyl, inosine, azole carboxamide, 1-β-D-ribofuranosyl-4-nitroindole, 1-β-D-ribofuranosyl-5-nitroindole, 1-β-D-ribofuranosyl-6-nitroindole, or 1-β-D-ribofuranosyl-3-nitropyrrole.

[0099] In some embodiments, the mdRNA molecule further comprises a 2′-sugar substitution, such as a 2′-O-methyl, 2′-O-methoxyethyl, 2′-O-2-methoxyethyl, 2′-O-allyl, or halogen (e.g., 2′-fluoro). In certain embodiments, the mdRNA molecule further comprises a terminal cap substituent on one or both ends of one or more of the first strand, second strand, or third strand, such as independently an alkyl, abasic, deoxy abasic, glyceryl, dinucleotide, acyclic nucleotide, or inverted deoxynucleotide moiety. In other embodiments, the mdRNA molecule further comprises at least one modified internucleoside linkage, such as independently a phosphorothioate, chiral phosphorothioate, phosphorodithioate, phosphotriester, aminoalkylphosphotriester, methyl phosphonate, alkyl phosphonate, 3′-alkylene phosphonate, 5′-alkylene phosphonate, chiral phosphonate, phosphonoacetate, thiophosphonoacetate, phosphinate, phosphoramidate, 3′-amino phosphoramidate, aminoalkylphosphoramidate, thionophosphoramidate, thionoalkylphosphonate, thionoalkylphosphotriester, selenophosphate, or boranophosphate linkage.

[0100] In any of the aspects of this disclosure, some embodiments provide mdRNA comprising an overhang of one to four nucleotides on at least one 3′-end that is not part of the gap, such as at least one deoxyribonucleotide or two deoxyribonucleotides (e.g., thymidine). In some embodiments, at least one or two 5′-terminal ribonucleotide(s) of the second strand within the double-stranded region comprises a 2′-sugar substitution. In related embodiments, at least one or two 5′-terminal ribonucleotide(s) of the first strand within the double-stranded region comprises a 2′-sugar substitution. In other related embodiments, at least one or two 5′-terminal ribonucleotide of the second strand and at least one or two 5′-terminal ribonucleotide of the first strand within the double-stranded regions comprise independent 2′-sugar substitutions. In other embodiments, the mdRNA molecules comprise at least three 5-methyluridines within at least one double-stranded region. In some embodiments, the mdRNA molecules have a blunt end at one or both ends. In other embodiments, the 5′-terminal of the third strand is a hydroxyl or a phosphate.

[0101] In one aspect, the instant disclosure provides double-stranded (dsRNA) molecules, comprising a first strand that is complementary to a human mRNA nucleotide sequence, and a second strand that is complementary to the first strand, wherein the double-stranded region is from about 15 base pairs to about 40 base pairs. In certain aspects, the dsRNA molecule has one or more blunt ends. In certain embodiments, the first strand and the second strand are each independently from about 15 to about 40 nucleotides in length. In other embodiments, the first strand is about 15 to about 40 nucleotides in length and is complementary to at least 15, 16, 17, 18, 19, 20, 21, 22, 23, 24, 25, 26, 27, 28, 29, 30, 31, 32, 33, 34, 35, 36, 37, 38, 39, or 40 contiguous nucleotides of a human mRNA nucleotide sequence. In still further embodiments, the first strand is about 15 to about 40 nucleotides in length and is at least 70%, 75%, 80%, 85%, 90%, 95%, 96%, 97%, 98%, or 99% identical to a sequence that is complementary to at least 15, 16, 17, 18, 19, 20, 21, 22, 23, 24, 25, 26, 27, 28, 29, 30, 31, 32, 33, 34, 35, 36, 37, 38, 39, or 40 contiguous nucleotides of a human mRNA nucleotide sequence.

[0102] In other embodiments, the dsRNA is a RISC activator (e.g., the first strand has about 15 nucleotides to about 25 nucleotides) or a Dicer substrate (e.g., the first strand has about 26 nucleotides to about 40 nucleotides).

[0103] In another aspect, the instant disclosure provides dsRNA molecules having a first strand that is complementary to a human mRNA nucleotide sequence, and a second strand that is complementary to the first strand, wherein the double-stranded region is from about 15 base pairs to about 40 base pairs. In certain embodiments, the dsRNA has one or more blunt ends and at least one pyrimidine of the dsRNA comprises a pyrimidine nucleoside according to Formula I or II:

[chemical structure]

wherein

[0104] R¹ and R² are each independently a —H, —OH, —OCH₃, —OCH₂OCH₂CH₃, —OCH₂CH₂OCH₃, halogen, substituted or unsubstituted C₁-C₁₀ alkyl, alkoxy, alkoxyalkyl, hydroxyalkyl, carboxyalkyl, alkylsulfonylamino, aminoalkyl, dialkylamino, alkylaminoalkyl, dialkylaminoalkyl, haloalkyl, trifluoromethyl, cycloalkyl, (cycloalkyl)alkyl, substituted or unsubstituted C₂-C₁₀ alkenyl, substituted or unsubstituted —O-allyl, —O—CH₂CH═CH₂, —O—CH═CHCH₃, substituted or unsubstituted C₂-C₁₀ alkynyl, carbamoyl, carbamyl, carboxy, carbonylamino, substituted or unsubstituted aryl, substituted or unsubstituted aralkyl, —NH₂, —NO₂, —C≡N, or heterocyclo group;

[0105] R³ and R⁴ are each independently a hydroxyl, a protected hydroxyl, a phosphate, or an internucleoside linking group; and

[0106] R⁵ and R⁸ are independently O or S.

[0107] In certain embodiments, at least one nucleoside is according to Formula I in which R¹ is methyl and R² is —OH. In certain related embodiments, at least one uridine of the dsRNA molecule is replaced with a nucleoside according to Formula I in which R¹ is methyl and R² is —OH, or R¹ is methyl, R² is —OH, and R⁸ is S. In some embodiments, the at least one R¹ is a C₁-C₅ alkyl, such as methyl. In some embodiments, at least one R² is selected from 2′-O—(C₁-C₅) alkyl, 2′-O-methyl, 2′-OCH₂OCH₂CH₃, 2′-OCH₂CH₂OCH₃, 2′-O-allyl, or fluoro.

[0108] In some embodiments, at least one pyrimidine nucleoside of the dsRNA molecule is a locked nucleic acid (LNA) in the form of a bicyclic sugar, wherein R² is oxygen, and the 2′-O and 4′-C form an oxymethylene bridge on the same ribose ring (e.g., a 5-methyluridine LNA) or is a G clamp. In other embodiments, one or more of the nucleosides are according to Formula I in which R¹ is methyl and R² is a 2′-O—(C₁-C₅) alkyl, such as 2′-O-methyl.

[0109] In still another aspect, the instant disclosure provide for a dsRNA having one more hydroxymethyl modified nucleomonomer(s) (see chemical formulas below—monomers D, F, G, H, I, and J.). Hereunder as one such example is an acyclic nucleomonomer, more preferably an acyclic monomer selected from the group consisting of monomers D, F, G, H, I, and J. Additional monomers that may be incorporated into a dsRNA of this disclosure include:

[chemical structure]

[0110] In still another aspect, the instant disclosure provides a method for reducing the expression of a human gene in a cell, comprising administering a dsRNA molecule to a cell expressing the gene, wherein the dsRNA molecule is capable of specifically binding to an mRNA and thereby reducing the gene's level of expression in the cell. In a related aspect, there is provided a method of treating or preventing a disease associated with the expression of a gene or family of genes in a subject by administering a dsRNA molecule of this disclosure. In certain embodiments, the cell or subject is human. In certain embodiments, the disease is cancer, a metabolic disease or inflammatory disease.

[0111] In any of the aspects of this disclosure, some embodiments provide dsRNA molecules having a 5-methyluridine (ribothymidine), a 2-thioribothymidine, or 2′-O-methyl-5-methyluridine in place of at least one uridine on the first, second, or third strand, or in place of each and every uridine on the first, second, or third strand.

[0112] In further embodiments, the dsRNA further comprises one or more non-standard nucleoside, such as a deoxyuridine, locked nucleic acid (LNA) molecule, or a universal-binding nucleotide, or a G clamp. Exemplary universal-binding nucleotides include C-phenyl, C-naphthyl, inosine, azole carboxamide, 1-β-D-ribofuranosyl-4-nitroindole, 1-β-D-ribofuranosyl-5-nitroindole, 1-β-D-ribofuranosyl-6-nitroindole, or 1-β-D-ribofuranosyl-3-nitropyrrole. In some embodiments, the dsRNA molecules further comprise a 2′-sugar substitution, such as a 2′-O-methyl, 2′-O-methoxyethyl, 2′-O-2-methoxyethyl, 2′-O-allyl, or halogen (e.g., 2′-fluoro).

[0113] In certain embodiments, the dsRNA molecules further comprise a terminal cap substituent on one or both ends of one or more of the first strand or second strands, such as independently an alkyl, abasic, deoxy abasic, glyceryl, dinucleotide, acyclic nucleotide, or inverted deoxynucleotide moiety. In other embodiments, the mdRNA molecule further comprises at least one modified internucleoside linkage, such as independently a phosphorothioate, chiral phosphorothioate, phosphorodithioate, phosphotriester, aminoalkylphosphotriester, methyl phosphonate, alkyl phosphonate, 3′-alkylene phosphonate, 5′-alkylene phosphonate, chiral phosphonate, phosphonoacetate, thiophosphonoacetate, phosphinate, phosphoramidate, 3′-amino phosphoramidate, aminoalkylphosphoramidate, thionophosphoramidate, thionoalkylphosphonate, thionoalkylphosphotriester, selenophosphate, or boranophosphate linkage.

[0114] In any of the aspects of this disclosure, some embodiments provide a dsRNA comprising an overhang of one to four nucleotides on at least one 3′-end, such as at least one deoxyribonucleotide or two deoxyribonucleotides (e.g., thymidine). In some embodiments, at least one or two 5′-terminal ribonucleotide of the second strand within the double-stranded region comprises a 2′-sugar substitution. In related embodiments, at least one or two 5′-terminal ribonucleotide of the first strand within the double-stranded region comprises a 2′-sugar substitution. In other related embodiments, at least one or two 5′-terminal ribonucleotide of the second strand and at least one or two 5′-terminal ribonucleotide of the first strand within the double-stranded region comprise independent 2′-sugar substitutions. In other embodiments, the dsdRNA molecule comprises at least three 5-methyluridines within the double-stranded region. In some embodiments, the dsRNA molecule has a blunt end at one or both ends. In other embodiments, the 5′-terminal of the third strand is a hydroxyl or a phosphate.

### BRIEF DESCRIPTION OF THE DRAWINGS

[0115] FIG. 1 shows the average gene silencing activity of intact (first bar), nicked (middle bar), and gapped (last bar) dsRNA Dicer substrate specific for each of 22 different targets (AKT, EGFR, FLT1, FRAP1, HIF1A, 1L17A, IL18, IL6, MAP2K1, MAPK1, MAPK14, PDGFA, PDGFRA, PIKC3A, PKN3, RAF1, SRD5A1, TNF, TNFSF13B, VEGFA, BCR-ABL [b2a2], and BCR-ABL [b3a2]). Each bar is a graphical representation of an average activity of ten different sequences for each target, which is calculated from the data found in Table 1.

[0116] FIG. 2 shows knockdown activity for RISC activator lacZ dsRNA (21 nucleotide sense strand/21 nucleotide antisense strand; 21/21), Dicer substrate lacZ dsRNA (25 nucleotide sense strand/27 nucleotide antisense strand; 25/27), and meroduplex lacZ mdRNA (13 nucleotide sense strand and 11 nucleotide sense strand/27 nucleotide antisense strand; 13, 11/27—the sense strand is missing one nucleotide so that a single nucleotide gap is left between the 13 nucleotide and 11 nucleotide sense strands when annealed to the 27 nucleotide antisense strand. Knockdown activities were normalized to a Qneg control dsRNA and presented as a normalized value of Qneg (i.e., Qneg represents 100% or “normal” gene expression levels). A smaller value indicates a greater knockdown effect.

[0117] FIG. 3 shows knockdown activity of a RISC activator influenza dsRNA G1498 (21/21) and nicked dsRNA (10, 11/21) at 100 nM. The “wt” designation indicates an unsubstituted RNA molecule; “rT” indicates RNA having each uridine substituted with a ribothymidine; and “p” indicates that the 5′-nucleotide of that strand was phosphorylated. The 21 nucleotide sense and antisense strands of G1498 were individually nicked between the nucleotides 10 and 11 as measured from the 5′-end, and is referred to as 11, 10/21 and 21/10, 11, respectively. The G1498 single stranded 21 nucleotide antisense strand alone (designated AS-only) was used as a control.

[0118] FIG. 4 shows knockdown activity of a lacZ dicer substrate (25/27) having a nick in one of each of positions 8 to 14 and a one nucleotide gap at position 13 of the sense strand (counted from the 5′-end). A dideoxy guanosine (ddG) was incorporated at the 5′-end of the 3′-most strand of the nicked or gapped sense sequence at position 13. FIG. 4 discloses SEQ ID NO: 3.

[0119] FIG. 5 shows knockdown activity of a dicer substrate influenza dsRNA G1498DS (25/27) and this sequence nicked at one of each of positions 8 to 14 of the sense strand, and shows the activity of these nicked molecules that are also phosphorylated or have a locked nucleic acid substitution.

[0120] FIG. 6 shows a dose dependent knockdown activity a dicer substrate influenza dsRNA G1498DS (25/27) and this sequence nicked at position 13 of the sense strand.

[0121] FIG. 7 shows knockdown activity of a dicer substrate influenza dsRNA G1498DS having a nick or a gap of one to six nucleotides that begins at any one of positions 8 to 12 of the sense strand.

[0122] FIG. 8 shows knockdown activity of a LacZ RISC dsRNA having a nick or a gap of one to six nucleotides that begins at any one of positions 8 to 14 of the sense strand.

[0123] FIG. 9 shows knockdown activity of an influenza RISC dsRNA having a nick at any one of positions 8 to 14 of the sense strand and further having one or two locked nucleic acids (LNA) per sense strand. The inserts on the right side of the graph provides a graphic depiction of the meroduplex structures (for clarity, a single antisense strand is shown at the bottom of the grouping with each of the different nicked sense strands above the antisense) having different nick positions with the relative positioning of the LNAs on the sense strands.

[0124] FIG. 10 shows knockdown activity of a LacZ dicer substrate dsRNA having a nick at any one of positions 8 to 14 of the sense strand as compared to the same nicked dicer substrates but having a locked nucleic acid substitution.

[0125] FIG. 11 shows the percent knockdown in influenza viral titers using influenza specific mdRNA against influenza strain WSN.

[0126] FIG. 12 shows the in vivo reduction in PR8 influenza viral titers using influenza specific mdRNA as measured by TCID₅₀.

### DETAILED DESCRIPTION

[0127] The instant disclosure provides nicked or gapped double-stranded RNA comprising at least three strands, and blunt ended double-stranded RNA having continuous strands (i.e., not nicked or gapped) that are suitable substrates for Dicer or RISC and, therefore, may be advantageously employed for gene silencing via, for example, the RNA interference pathway. That is, partially duplexed dsRNA molecules described herein (also referred to as “meroduplexes,” which have a nick or gap in at least one strand) and blunt-ended dsRNA are capable of initiating an RNA interference cascade that modifies (e.g., reduces) expression of a target messenger RNA (mRNA), such as a human tumor necrosis factor (TNF) mRNA, vascular endothelial growth factor (VEGF) mRNA, vascular endothelial growth factor receptor (VEGFR) mRNA, epidermal growth factor receptor (EGFR) mRNA, erythroblastic leukemia viral oncogene homolog (ERBB) mRNA, platelet derived growth factor (PDGF) mRNA, platelet derived growth factor receptor (PDGFR) mRNA, breakpoint cluster region (BCR)-abelson murine leukemia viral oncogene homolog (ABL) mRNA, steroid-5-alpha-reductase, alpha polypeptide 1 (SRD5A1) mRNA, steroid-5-alpha-reductase, alpha polypeptide 2 (SRD5A2) mRNA, phosphoinositide-3-kinase, catalytic (PIK3C) mRNA, mitogen-activated protein kinase (MAPK) mRNA, p38 MAPK family mRNA, hypoxia-inducible factor 1 alpha (HIF1A) mRNA, protein kinase N3 (PKN3) mRNA, interleukin 17A (IL17A) mRNA, interleukin 6 (IL6) mRNA, interleukin 18 (IL18) mRNA, tumor necrosis factor (ligand) superfamily member 13b (TNFSF13B) mRNA, mitogen-activated protein kinase 1 (MAPK1) mRNA, v-raf-1 murine leukemia viral oncogene homolog 1 (RAF1) mRNA, v-AKT murine thymoma viral oncogene (AKT) mRNA, FK506 binding protein 12-rapamycin associated protein 1 (FRAP1) mRNA, mitogen-activated protein kinase 2 (MAPK2) mRNA, cyclin-dependent kinase 2 (CDK2) mRNA, ATP-binding cassette, subfamily B, member 1 (ABCB1) mRNA, B-cell CLL/lymphoma 2 (BCL2) mRNA, angiopoietin 2 (ANGPT2) mRNA, checkpoint kinase 1 homolog (CHEK1) mRNA, insulin-like growth factor 1 receptor (IGF1R) mRNA, signal transducer and activator of transcription 3 (STAT3) mRNA, matrix metalloproteinase (MMP) mRNA, folate hydrolase (prostate-specific membrane antigen) 1 (FOLH1) mRNA, v-myc myelocytomatosis viral oncogene homolog (avian) (MYC) mRNA, telomerase RNA component (TERC) mRNA, telomerase reverse transcriptase (TERT) mRNA, protein kinase C, alpha (PRKCA) mRNA, RAS viral (v-ras) oncogene homolog (RAS) mRNA, chemokine (C-X-C motif) ligand or receptor (CXC) mRNA, Wingless-Type MMTV (Murine Mammary Tumor Virus) Integration Site (WNT) mRNA, toll-like receptor (TLR) mRNA, Fc fragment of IgE, low affinity II, receptor for (CD23) (FCER2) mRNA, FOS gene, (FOS, FOSB, FOSL1, OR FOSL2) mRNA, hydroxysteroid (11-beta) dehydrogenase (HSD11B1) mRNA, JUN gene (cJUN, JUNB, or JUND) mRNA, thymidine phosphorylase (TYMP) mRNA, early growth response (EGR) mRNA, zeste homolog 2 (EZH2) mRNA, cyclin D1 (CCND1) mRNA, Fas (TNF receptor superfamily, member 6) (FAS) mRNA, proliferating cell nuclear antigen (PCNA) mRNA, fibroblast growth factor 2 (FGF2) mRNA, tumor growth factor-beta (TGF-β) mRNA, tumor growth factor-beta receptor (TGF-βR) mRNA, tumor-associated calcium signal transducer 1 (TACSTD1) mRNA, Mucin 1 (MUC1) mRNA, protein tyrosine phosphatase, non-receptor-11 (Noonan Syndrome 1) (PTPN11) mRNA, neuregulin 1 (NRG1) mRNA, membrane metallo-endopeptidase (MME) mRNA, CD19 molecule (CD19) mRNA, CD40 molecule, TNF receptor superfamily member 5 (CD40) mRNA, apolipoprotein B (including Ag(x) antigen) (ApoB) mRNA, synuclein, alpha (non A4 component of amyloid precursor) (SNCA) mRNA, silent mating type information regulation 2 homolog (SIRT2) mRNA, histone deacetylase (HDAC) mRNA, membrane-spanning 4-domains, subfamily A, member 1 (MS4A1) mRNA, CD22 molecule (CD22) mRNA, diacylglycerol o-acyltransferase 1 (DGAT1) mRNA, diacylglycerol o-acyltransferase 2 (DGAT2) mRNA, CD3 molecule (CD3) mRNA, proprotein convertase subtilisin-like kexin type 9 (PCSK9) mRNA, MET (Mesenchymal epithelial transition factor) (c-Met proto-oncogene) mRNA, catenin (cadherin-associated protein) (beta-catenin) (CTNNB1) mRNA, inhition of DNA binding proteins (Inhibition of Differentiation Proteins, Dominant Negative Helix-Loop-Helix Protein) (ID, e.g., ID-1) mRNA, protein tyrosine phosphatase, non-receptor type 1 (PTPN1) mRNA, tie-1 (TIE1; tyrosine kinase with immunoglobulin and EGF factor homology domains 1) mRNA, tek tyrosine kinase (TEK) mRNA, fibroblast growth factor receptor (FGFR) mRNA, mitogen-activated protein kinase 3 (MAPK3) mRNA, survivin (BIRC5) mRNA, polo-like kinase family genes (PLK Family; PLK1, PLK2, and PLK3) mRNA, or any one or more combination gene targets identified above.

[0128] Meroduplex ribonucleic acid (mdRNA) molecules described herein include a first (antisense) strand that is complementary to a human mRNA nucleotide sequence, along with second and third strands (together forming a gapped sense strand) that are each complementary to non-overlapping regions of the first strand, wherein the second and third strands can anneal with the first strand to form at least two double-stranded regions separated by a gap, and wherein at least one double-stranded region is from about 5 base pairs to about 15 base pairs, or the combined double-stranded regions total about 15 base pairs to about 40 base pairs and the mdRNA is blunt-ended.

[0129] The gap can be from 0 nucleotides (i.e., a nick in which only a phosphodiester bond between two nucleotides is broken in a polynucleotide molecule) up to about 10 nucleotides (i.e., the first strand will have at least one unpaired nucleotide). In certain embodiments, the nick or gap is located 10 nucleotides from the 5′-end of the first (antisense) strand or at the Argonaute cleavage site. In another embodiment, the meroduplex nick or gap is positioned such that the thermal stability is maximized for the first and second strand duplex and for the first and third strand duplex as compared to the thermal stability of such meroduplexes having a nick or gap in a different position.

[0130] Also provided herein are methods of using such dsRNA to reduce expression of a gene in a cell or to treat or prevent diseases or disorders associated with gene expression, including cancer, metabolic, and inflammatory diseases.

[0131] Prior to introducing more detail to this disclosure, it may be helpful to an appreciation thereof to provide definitions of certain terms to be used herein.

[0132] In the present description, any concentration range, percentage range, ratio range, or integer range is to be understood to include the value of any integer within the recited range and, when appropriate, fractions thereof (such as one tenth and one hundredth of an integer), unless otherwise indicated. Also, any number range recited herein relating to any physical feature, such as polymer subunits, size or thickness, are to be understood to include any integer within the recited range, unless otherwise indicated. As used herein, “about” or “consisting essentially of” mean±20% of the indicated range, value, or structure, unless otherwise indicated. As used herein, the terms “include” and “comprise” are open ended and are used synonymously. It should be understood that the terms “a” and “an” as used herein refer to “one or more” of the enumerated components. The use of the alternative (e.g., “or”) should be understood to mean either one, both, or any combination thereof of the alternatives.

[0133] As used herein, the term “isolated” means that the referenced material (e.g., nucleic acid molecules of the instant disclosure), is removed from its original environment, such as being separated from some or all of the co-existing materials in a natural environment (e.g., a natural environment may be a cell).

[0134] As used herein, “complementary” refers to a nucleic acid molecule that can form hydrogen bond(s) with another nucleic acid molecule or itself by either traditional Watson-Crick base pairing or other non-traditional types of pairing (e.g., Hoogsteen or reversed Hoogsteen hydrogen bonding) between complementary nucleosides or nucleotides. In reference to the nucleic acid molecules of the present disclosure, the binding free energy for a nucleic acid molecule with its complementary sequence is sufficient to allow the relevant function of the nucleic acid molecule to proceed, for example, RNAi activity, and there is a sufficient degree of complementarity to avoid non-specific binding of the nucleic acid molecule (e.g., dsRNA) to non-target sequences under conditions in which specific binding is desired, i.e., under physiological conditions in the case of in vivo assays or therapeutic treatment, or under conditions in which the assays are performed in the case of in vitro assays (e.g., hybridization assays). Determination of binding free energies for nucleic acid molecules is well known in the art (see, e.g., Turner et al., CSH Symp. Quant. Biol. LII:123, 1987; Frier et al., Proc. Nat'l. Acad. Sci. USA 83:9373, 1986; Turner et al., J. Am. Chem. Soc. 109:3783, 1987). Thus, “complementary” or “specifically hybridizable” or “specifically binds” are terms that indicate a sufficient degree of complementarity or precise pairing such that stable and specific binding occurs between a nucleic acid molecule (e.g., RNA) and a DNA or RNA target.

[0135] It is understood in the art that a nucleic acid molecule need not be 100% complementary to a target nucleic acid sequence to be specifically hybridizable or to specifically bind. That is, two or more nucleic acid molecules may be less than fully complementary, as indicated by a percentage of contiguous residues in a nucleic acid molecule that can form hydrogen bonds with a second nucleic acid molecule. For example, a first nucleic acid molecule may have 10 nucleotides and a second nucleic acid molecule may have 10 nucleotides, then base pairing of 5, 6, 7, 8, 9, or 10 nucleotides between the first and second nucleic acid molecules, which may or may not form a contiguous double-stranded region, represents 50%, 60%, 70%, 80%, 90%, and 100% complementarity, respectively. In certain embodiments, complementary nucleic acid molecules may have wrongly paired bases—that is, bases that cannot form a traditional Watson-Crick base pair or other non-traditional types of pair (i.e., “mismatched” bases). For instance, complementary nucleic acid molecules may be identified as having a certain number of “mismatches,” such as zero or about 1, about 2, about 3, about 4 or about 5.

[0136] “Perfectly” or “fully” complementary nucleic acid molecules means those in which a certain number of nucleotides of a first nucleic acid molecule hydrogen bond (anneal) with the same number of residues in a second nucleic acid molecule to form a contiguous double-stranded region. For example, two or more fully complementary nucleic acid molecule strands can have the same number of nucleotides (i.e., have the same length and form one double-stranded region, with or without an overhang) or have a different number of nucleotides (e.g., one strand may be shorter than but fully contained within another strand or one strand may overhang the other strand).

[0137] By “ribonucleic acid” or “RNA” is meant a nucleic acid molecule comprising at least one ribonucleotide molecule. As used herein, “ribonucleotide” refers to a nucleotide with a hydroxyl group at the 2′-position of a β-D-ribofuranose moiety. The term RNA includes double-stranded (ds) RNA, single-stranded (ss) RNA, isolated RNA (such as partially purified RNA, essentially pure RNA, synthetic RNA, recombinantly produced RNA), altered RNA (which differs from naturally occurring RNA by the addition, deletion, substitution or alteration of one or more nucleotides), or any combination thereof. For example, such altered RNA can include addition of non-nucleotide material, such as at one or both ends of an RNA molecule, internally at one or more nucleotides of the RNA, or any combination thereof. Nucleotides in RNA molecules of the instant disclosure can also comprise non-standard nucleotides, such as naturally occurring nucleotides, non-naturally occurring nucleotides, chemically-modified nucleotides, deoxynucleotides, or any combination thereof. These altered RNAs may be referred to as analogs or analogs of RNA containing standard nucleotides (i.e., standard nucleotides, as used herein, are considered to be adenine, cytidine, guanidine, thymidine, and uridine).

[0138] The term “dsRNA” as used herein, which includes “mdRNA,” refers to any nucleic acid molecule comprising at least one ribonucleotide molecule and capable of inhibiting or down regulating gene expression, for example, by promoting RNA interference (“RNAi”) or gene silencing in a sequence-specific manner. The dsRNAs and mdRNAs of the instant disclosure may be suitable substrates for Dicer or for association with RISC to mediate gene silencing by RNAi. Examples of dsRNA molecules of this disclosure may be generated with single stranded nucleic acid molecules as presented in the provided Sequence Listing identified herein. One or both strands of the dsRNA can further comprise a terminal phosphate group, such as a 5′-phosphate or 5′, 3′-diphosphate. As used herein, dsRNA molecules, in addition to at least one ribonucleotide, can further include substitutions, chemically-modified nucleotides, and non-nucleotides. In certain embodiments, dsRNA molecules comprise ribonucleotides up to about 100% of the nucleotide positions.

[0139] In addition, as used herein, the term dsRNA is meant to be equivalent to other terms used to describe nucleic acid molecules that are capable of mediating sequence specific RNAi, for example, meroduplex RNA (mdRNA), nicked dsRNA (ndsRNA), gapped dsRNA (gdsRNA), short interfering nucleic acid (siNA), siRNA, micro-RNA (miRNA), short hairpin RNA (shRNA), short interfering oligonucleotide, short interfering substituted oligonucleotide, short interfering modified oligonucleotide, chemically-modified dsRNA, post-transcriptional gene silencing RNA (ptgsRNA), or the like. The term “large double-stranded RNA” (“large dsRNA”) refers to any double-stranded RNA longer than about 40 base pairs (bp) to about 100 by or more, particularly up to about 300 by to about 500 bp. The sequence of a large dsRNA may represent a segment of an mRNA or an entire mRNA. A double-stranded structure may be formed by a self-complementary nucleic acid molecule or by annealing of two or more distinct complementary nucleic acid molecule strands.

[0140] In one aspect, a dsRNA comprises two separate oligonucleotides, comprising a first strand (antisense) and a second strand (sense), wherein the antisense and sense strands are self-complementary (i.e., each strand comprises a nucleotide sequence that is complementary to a nucleotide sequence in the other strand and the two separate strands form a duplex or double-stranded structure, for example, wherein the double-stranded region is about 15 to about 24 base pairs or about 26 to about 40 base pairs); the antisense strand comprises a nucleotide sequence that is complementary to a nucleotide sequence in a target nucleic acid molecule or a portion thereof; and the sense strand comprises a nucleotide sequence corresponding (i.e., homologous) to the target nucleic acid sequence or a portion thereof (e.g., a sense strand of about 15 to about 25 nucleotides or about 26 to about 40 nucleotides corresponds to the target nucleic acid or a portion thereof).

[0141] In another aspect, the dsRNA is assembled from a single oligonucleotide in which the self-complementary sense and antisense strands of the dsRNA are linked together by a nucleic acid based-linker or a non-nucleic acid-based linker. In certain embodiments, the first (antisense) and second (sense) strands of the dsRNA molecule are covalently linked by a nucleotide or non-nucleotide linker as described herein and known in the art. In other embodiments, a first dsRNA molecule is covalently linked to at least one second dsRNA molecule by a nucleotide or non-nucleotide linker known in the art, wherein the first dsRNA molecule can be linked to a plurality of other dsRNA molecules that can be the same or different, or any combination thereof. In another embodiment, the linked dsRNA may include a third strand that forms a meroduplex with the linked dsRNA.

[0142] In still another aspect, dsRNA molecules described herein form a meroduplex RNA (mdRNA) having three or more strands such as, for example, an ‘A’ (first or antisense) strand, ‘S1’ (second) strand, and ‘S2’ (third) strand in which the ‘S1’ and ‘S2’ strands are complementary to and form base pairs (bp) with non-overlapping regions of the ‘A’ strand (e.g., an mdRNA can have the form of A:S1S2). The double-stranded region formed by the annealing of the ‘S1’ and ‘A’ strands is distinct from and non-overlapping with the double-stranded region formed by the annealing of the ‘S2’ and ‘A’ strands. An mdRNA molecule is a “gapped” molecule, i.e., it contains a “gap” ranging from 0 nucleotides up to about 10 nucleotides (or a gap of 11, 12, 13, 14, 15, 16, 17, 18, 19, 20, 21, 22, 23, 24, 25, 26, 27, 28, 29, 30, 31, 32, 33, 34 or 35 nucleotides). In one embodiment, the A:S1 duplex is separated from the A:S2 duplex by a gap resulting from at least one unpaired nucleotide (up to about 10 unpaired nucleotides) in the ‘A’ strand that is positioned between the A:S1 duplex and the A:S2 duplex and that is distinct from any one or more unpaired nucleotide at the 3′-end of one or more of the ‘A’, ‘S1’, or ‘S2’ strands. In another embodiment, the A:S1 duplex is separated from the A:S2 duplex by a gap of zero nucleotides (i.e., a nick in which only a phosphodiester bond between two nucleotides is broken or missing in the polynucleotide molecule) between the A:S1 duplex and the A:S2 duplex—which can also be referred to as nicked dsRNA (ndsRNA). For example, A:S1S2 may be comprised of a dsRNA having at least two double-stranded regions that, in combination, total about 14 base pairs to about 40 base pairs wherein the double-stranded regions are separated by a gap of 0, 1, 2, 3, 4, 5, 6, 7, 8, 9, 10, 11, 12, 13, 14, 15, 16, 17, 18, 19, 20, 21, 22, 23, 24, 25, 26, 27, 28, 29, 30, 31, 32, 33, 34 or 35 nucleotides, optionally having blunt ends, or A:S1S2 may comprise a dsRNA having at least two double-stranded regions spaced apart by up to 10 nucleotides and thereby forming a gap between the second and third strands wherein at least one of the double-stranded regions optionally has from 5 base pairs to 13 base pairs.

[0143] A dsRNA or large dsRNA may include a substitution or modification in which the substitution or modification may be in a phosphate backbone bond, a sugar, a base, or a nucleoside. Such nucleoside substitutions can include natural non-standard nucleosides (e.g., 5-methyluridine or 5-methylcytidine or a 2-thioribothymidine), and such backbone, sugar, or nucleoside modifications can include an alkyl or heteroatom substitution or addition, such as a methyl, alkoxyalkyl, halogen, nitrogen or sulfur, or other modifications known in the art.

[0144] In addition, as used herein, the term “RNAi” is meant to be equivalent to other terms used to describe sequence specific RNA interference, such as post transcriptional gene silencing, translational inhibition, or epigenetics. For example, dsRNA molecules of this disclosure can be used to epigenetically silence genes at the post-transcriptional level or the pre-transcriptional level or any combination thereof.

[0145] As used herein, “target nucleic acid”, “target mRNA”, “target RNA”, and “target gene” refers to any nucleic acid sequence whose expression or activity is to be altered (e.g. a target gene may be one or more of the following: tumor necrosis factor (TNF), vascular endothelial growth factor (VEGF), vascular endothelial growth factor receptor (VEGFR), epidermal growth factor receptor (EGFR), erythroblastic leukemia viral oncogene homolog (ERBB), platelet derived growth factor (PDGF), platelet derived growth factor receptor (PDGFR), breakpoint cluster region (BCR)-abelson murine leukemia viral oncogene homolog (ABL), steroid-5-alpha-reductase, alpha polypeptide 1 (SRD5A1), steroid-5-alpha-reductase, alpha polypeptide 2 (SRD5A2), phosphoinositide-3-kinase, catalytic (PIK3C), mitogen-activated protein kinase (MAPK), p38 MAPK family, hypoxia-inducible factor 1 alpha (HIF1A), protein kinase N3 (PKN3), interleukin 17A (IL17A), interleukin 6 (IL6), interleukin 18 (IL18), tumor necrosis factor (ligand) superfamily member 13b (TNFSF13B), mitogen-activated protein kinase 1 (MAPK1), v-raf-1 murine leukemia viral oncogene homolog 1 (RAF1), v-AKT murine thymoma viral oncogene (AKT), FK506 binding protein 12-rapamycin associated protein 1 (FRAP1), mitogen-activated protein kinase 2 (MAPK2), cyclin-dependent kinase 2 (CDK2), ATP-binding cassette, subfamily B, member 1 (ABCB1), B-cell CLL/lymphoma 2 (BCL2), angiopoietin 2 (ANGPT2), checkpoint kinase 1 homolog (CHEK1), insulin-like growth factor 1 receptor (IGF1R), signal transducer and activator of transcription 3 (STAT3), matrix metalloproteinase (MMP), folate hydrolase (prostate-specific membrane antigen) 1 (FOLH1), v-myc myelocytomatosis viral oncogene homolog (avian) (MYC), telomerase RNA component (TERC), telomerase reverse transcriptase (TERT), protein kinase C, alpha (PRKCA), RAS viral (v-ras) oncogene homolog (RAS), chemokine (C-X-C motif) ligand or receptor (CXC), Wingless-Type MMTV (Murine Mammary Tumor Virus) Integration Site (WNT), toll-like receptor (TLR), Fc fragment of IgE, low affinity II, receptor for (CD23) (FCER2), FOS gene, (FOS, FOSB, FOSL1, OR FOSL2), hydroxysteroid (11-beta) dehydrogenase (HSD11B1), JUN gene (cJUN, JUNB, or JUND), thymidine phosphorylase (TYMP), early growth response (EGR), zeste homolog 2 (EZH2), cyclin D1 (CCND1), Fas (TNF receptor superfamily, member 6) (FAS), proliferating cell nuclear antigen (PCNA), fibroblast growth factor 2 (FGF2), tumor growth factor-beta (TGF-β), tumor growth factor-beta receptor (TGF-βR), tumor-associated calcium signal transducer 1 (TACSTD1), Mucin 1 (MUC1), protein tyrosine phosphatase, non-receptor-11 (Noonan Syndrome 1) (PTPN11), neuregulin 1 (NRG1), membrane metallo-endopeptidase (MME), CD19 molecule (CD19), CD40 molecule, TNF receptor superfamily member 5 (CD40), apolipoprotein B (including Ag(x) antigen) (ApoB), synuclein, alpha (non A4 component of amyloid precursor) (SNCA), silent mating type information regulation 2 homolog (SIRT2), histone deacetylase (HDAC), membrane-spanning 4-domains, subfamily A, member 1 (MS4A1), CD22 molecule (CD22), diacylglycerol o-acyltransferase 1 (DGAT1), diacylglycerol o-acyltransferase 2 (DGAT2), CD3 molecule (CD3), proprotein convertase subtilisin-like kexin type 9 (PCSK9), MET (Mesenchymal epithelial transition factor) (c-Met proto-oncogene), catenin (cadherin-associated protein) (beta-catenin) (CTNNB1), inhition of DNA binding proteins (Inhibition of Differentiation Proteins, Dominant Negative Helix-Loop-Helix Protein) (ID, e.g., ID-1), protein tyrosine phosphatase, non-receptor type 1 (PTPN1), tie-1 (TIE1; tyrosine kinase with immunoglobulin and EGF factor homology domains 1), tek tyrosine kinase (TEK), fibroblast growth factor receptor (FGFR), mitogen-activated protein kinase 3 (MAPK3), survivin (BIRC5), polo-like kinase family genes (PLK Family; PLK1, PLK2, and PLK3). The target nucleic acid can be DNA, RNA, or analogs thereof, and includes single, double, and multi-stranded forms. By “target site” or “target sequence” is meant a sequence within a target nucleic acid (e.g., mRNA) that, when present in an RNA molecule, is “targeted” for cleavage by RNAi and mediated by a dsRNA construct of this disclosure containing a sequence within the antisense strand that is complementary to the target site or sequence.

[0146] As used herein, “off-target effect” or “off-target profile” refers to the observed altered expression pattern of one or more genes in a cell or other biological sample not targeted, directly or indirectly, for gene silencing by an mdRNA or dsRNA. For example, an off-target effect can be quantified by using a DNA microarray to determine how many non-target genes have an expression level altered by about two-fold or more in the presence of a candidate mdRNA or dsRNA or analog thereof that is specific for a target sequence. A “minimal off-target effect” means that an mdRNA or dsRNA affects expression by about two-fold or more of about 25% to about 1% of the non-target genes examined or it means that the off-target effect of substituted or modified mdRNA or dsRNA (e.g., having at least one uridine substituted with a 5-methyluridine or 2-thioribothymidine and optionally having at least one nucleotide modified at the 2′-position), is reduced by at least about 1% to about 80% or more as compared to the effect on non-target genes of an unsubstituted or unmodified mdRNA or dsRNA.

[0147] By “sense region” or “sense strand” is meant one or more nucleotide sequences of a dsRNA molecule having complementarity to one or more antisense regions of the dsRNA molecule. In addition, the sense region of a dsRNA molecule comprises a nucleic acid sequence having homology with or identity to a target sequence. By “antisense region” or “antisense strand” is meant a nucleotide sequence of a dsRNA molecule having complementarity to a target nucleic acid sequence. In addition, the antisense region of a dsRNA molecule can comprise nucleic acid sequence region having complementarity to one or more sense strands of the dsRNA molecule.

[0148] “Analog” as used herein refers to a compound that is structurally similar to a parent compound (e.g., a nucleic acid molecule), but differs slightly in composition (e.g., one atom or functional group is different, added, or removed). The analog may or may not have different chemical or physical properties than the original compound and may or may not have improved biological or chemical activity. For example, the analog may be more hydrophilic or it may have altered activity as compared to a parent compound. The analog may mimic the chemical or biological activity of the parent compound (i.e., it may have similar or identical activity), or, in some cases, may have increased or decreased activity. The analog may be a naturally or non-naturally occurring (e.g., chemically-modified or recombinant) variant of the original compound. An example of an RNA analog is an RNA molecule having a non-standard nucleotide, such as 5-methyuridine or 5-methylcytidine or 2-thioribothymidine, which may impart certain desirable properties (e.g., improve stability, bioavailability, minimize off-target effects or interferon response).

[0149] As used herein, the term “universal base” refers to nucleotide base analogs that form base pairs with each of the standard DNA/RNA bases with little discrimination between them. A universal base is thus interchangeable with all of the standard bases when substituted into a nucleotide duplex (see, e.g., Loakes et al., J. Mol. Bio. 270:426, 1997). Exemplary universal bases include C-phenyl, C-naphthyl and other aromatic derivatives, inosine, azole carboxamides, or nitroazole derivatives such as 3-nitropyrrole, 4-nitroindole, 5-nitroindole, and 6-nitroindole (see, e.g., Loakes, Nucleic Acids Res. 29:2437, 2001).

[0150] The term “gene” as used herein, especially in the context of “target gene” or “gene target” for RNAi, means a nucleic acid molecule that encodes an RNA or a transcription product of such gene, including a messenger RNA (mRNA, also referred to as structural genes that encode for a polypeptide), an mRNA splice variant of such gene, a functional RNA (fRNA), or non-coding RNA (ncRNA), such as small temporal RNA (stRNA), microRNA (miRNA), small nuclear RNA (snRNA), short interfering RNA (siRNA), small nucleolar RNA (snRNA), ribosomal RNA (rRNA), transfer RNA (tRNA) and precursor RNAs thereof. Such non-coding RNAs can serve as target nucleic acid molecules for dsRNA mediated RNAi to alter the activity of the target RNA involved in functional or regulatory cellular processes.

[0151] As used herein, “gene silencing” refers to a partial or complete loss-of-function through targeted inhibition of gene expression in a cell, which may also be referred to as RNAi “knockdown,” “inhibition,” “down-regulation,” or “reduction” of expression of a target gene. Depending on the circumstances and the biological problem to be addressed, it may be preferable to partially reduce gene expression. Alternatively, it might be desirable to reduce gene expression as much as possible. The extent of silencing may be determined by methods described herein and known in the art (see, e.g., PCT Publication No. WO 99/32619; Elbashir et al., EMBO J. 20:6877, 2001). Depending on the assay, quantification of gene expression permits detection of various amounts of inhibition that may be desired in certain embodiments of this disclosure, including prophylactic and therapeutic methods, which will be capable of knocking down target gene expression, in terms of mRNA level or protein level or activity, for example, by equal to or greater than 10%, 30%, 50%, 75% 90%, 95% or 99% of baseline (i.e., normal) or other control levels, including elevated expression levels as may be associated with particular disease states or other conditions targeted for therapy.

[0152] As used herein, the term “therapeutically effective amount” means an amount of dsRNA that is sufficient to result in a decrease in severity of disease symptoms, an increase in frequency or duration of disease symptom-free periods, or a prevention of impairment or disability due to the disease, in the subject (e.g., human) to which it is administered. For example, a therapeutically effective amount of dsRNA directed against an mRNA of a target nucleic acid or target gene can reduce or alleviate the signs and/or symptoms of a disease or condition by at least about 20%, at least about 40%, at least about 60%, or at least about 80% relative to untreated subjects. A therapeutically effective amount of a therapeutic compound can decrease, for example, atheromatous plaque size or otherwise ameliorate symptoms in a subject. One of ordinary skill in the art would be able to determine such therapeutically effective amounts based on such factors as the subject's size, the severity of symptoms, and the particular composition or route of administration selected. The nucleic acid molecules of the instant disclosure, individually, or in combination or in conjunction with other drugs, can be used to treat diseases or conditions discussed herein. For example, to treat a particular disease, disorder, or condition, the dsRNA molecules can be administered to a patient or can be administered to other appropriate cells evident to those skilled in the art, individually or in combination with one or more drugs, under conditions suitable for treatment.

[0153] In addition, one or more dsRNA may be used to knockdown expression of an mRNA or a related mRNA splice variant. In this regard it is noted that a target gene may be transcribed into two or more mRNA splice variants; and thus, for example, in certain embodiments, knockdown of one mRNA splice variant without affecting the other mRNA splice variant may be desired, or vice versa; or knockdown of all transcription products may be targeted.

[0154] In addition, it should be understood that the individual compounds, or groups of compounds, derived from the various combinations of the structures and substituents described herein, are disclosed by the present application to the same extent as if each compound or group of compounds was set forth individually. Thus, selection of particular structures or particular substituents is within the scope of the present disclosure. As described herein, all value ranges are inclusive over the indicated range. Thus, a range of C₁-C₄ will be understood to include the values of 1, 2, 3, and 4, such that C1, C2, C3 and C₄ are included.

[0155] The term “alkyl” as used herein refers to saturated straight- or branched-chain aliphatic groups containing from 1-20 carbon atoms, preferably 1-8 carbon atoms and most preferably 1-4 carbon atoms. This definition applies as well to the alkyl portion of alkoxy, alkanoyl and aralkyl groups. The alkyl group may be substituted or unsubstituted. In certain embodiments, the alkyl is a (C₁-C₄) alkyl or methyl.

[0156] The term “cycloalkyl” as used herein refers to a saturated cyclic hydrocarbon ring system containing from 3 to 12 carbon atoms that may be optionally substituted. Exemplary embodiments include, but are not limited to, cyclopropyl, cyclobutyl, cyclopentyl and cyclohexyl. In certain embodiments, the cycloalkyl group is cyclopropyl. In another embodiment, the (cycloalkyl)alkyl groups contain from 3 to 12 carbon atoms in the cyclic portion and 1 to 6 carbon atoms in the alkyl portion. In certain embodiments, the (cycloalkyl)alkyl group is cyclopropylmethyl. The alkyl groups are optionally substituted with from one to three substituents selected from the group consisting of halogen, hydroxy and amino.

[0157] The terms “alkanoyl” and “alkanoyloxy” as used herein refer, respectively, to —C(O)-alkyl groups and —O—C(═O)— alkyl groups, each optionally containing 2 to 10 carbon atoms. Specific embodiments of alkanoyl and alkanoyloxy groups are acetyl and acetoxy, respectively.

[0158] The term “alkenyl” refers to an unsaturated branched, straight-chain or cyclic alkyl group having 2 to 15 carbon atoms and having at least one carbon-carbon double bond derived by the removal of one hydrogen atom from a single carbon atom of a parent alkene. The group may be in either the cis or trans conformation about the double bond(s). Certain embodiments include ethenyl, 1-propenyl, 2-propenyl, 1-methylethenyl, 1-butenyl, 2-butenyl, 3-butenyl, 2-methyl-2-propenyl, 1-pentenyl, 2-pentenyl, 4-pentenyl, 3-methyl-2-butenyl, 1-hexenyl, 2-hexenyl, 1-heptenyl, 2-heptenyl, 1-octenyl, 2-octenyl, 1,3-octadienyl, 2-nonenyl, 1,3-nonadienyl, 2-decenyl, etc., or the like. The alkenyl group may be substituted or unsubstituted.

[0159] The term “alkynyl” as used herein refers to an unsaturated branched, straight-chain, or cyclic alkyl group having 2 to 10 carbon atoms and having at least one carbon-carbon triple bond derived by the removal of one hydrogen atom from a single carbon atom of a parent alkyne. Exemplary alkynyls include ethynyl, 1-propynyl, 2-propynyl, 1-butynyl, 2-butynyl, 3-butynyl, 1-pentynyl, 2-pentynyl, 4-pentynyl, 1-octynyl, 6-methyl-1-heptynyl, 2-decynyl, or the like. The alkynyl group may be substituted or unsubstituted.

[0160] The term “hydroxyalkyl” alone or in combination, refers to an alkyl group as previously defined, wherein one or several hydrogen atoms, preferably one hydrogen atom has been replaced by a hydroxyl group. Examples include hydroxymethyl, hydroxyethyl and 2-hydroxyethyl.

[0161] The term “aminoalkyl” as used herein refers to the group —NRR′, where R and R′ may independently be hydrogen or (C₁-C₄) alkyl.

[0162] The term “alkylaminoalkyl” refers to an alkylamino group linked via an alkyl group (i.e., a group having the general structure -alkyl-NH-alkyl or -alkyl-N(alkyl)(alkyl)). Such groups include, but are not limited to, mono- and di-(C₁-C₈ alkyl)aminoC₁-C₈ alkyl, in which each alkyl may be the same or different.

[0163] The term “dialkylaminoalkyl” refers to alkylamino groups attached to an alkyl group. Examples include, but are not limited to, N,N-dimethylaminomethyl, N,N-dimethylaminoethyl N,N-dimethylaminopropyl, and the like. The term dialkylaminoalkyl also includes groups where the bridging alkyl moiety is optionally substituted.

[0164] The term “haloalkyl” refers to an alkyl group substituted with one or more halo groups, for example chloromethyl, 2-bromoethyl, 3-iodopropyl, trifluoromethyl, perfluoropropyl, 8-chlorononyl, or the like.

[0165] The term “carboxyalkyl” as used herein refers to the substituent —R¹⁰—COOH, wherein R¹⁰ is alkylene; and “carbalkoxyalkyl” refers to —R¹⁰—C(═O)OR¹¹, wherein R¹⁰ and R¹¹ are alkylene and alkyl respectively. In certain embodiments, alkyl refers to a saturated straight- or branched-chain hydrocarbyl radical of 1 to 6 carbon atoms such as methyl, ethyl, n-propyl, isopropyl, n-butyl, t-butyl, n-pentyl, 2-methylpentyl, n-hexyl, and so forth. Alkylene is the same as alkyl except that the group is divalent.

[0166] The term “alkoxy” includes substituted and unsubstituted alkyl, alkenyl, and alkynyl groups covalently linked to an oxygen atom. In one embodiment, the alkoxy group contains 1 to about 10 carbon atoms. Embodiments of alkoxy groups include, but are not limited to, methoxy, ethoxy, isopropyloxy, propoxy, butoxy, and pentoxy groups. Embodiments of substituted alkoxy groups include halogenated alkoxy groups. In a further embodiment, the alkoxy groups can be substituted with groups such as alkenyl, alkynyl, halogen, hydroxyl, alkylcarbonyloxy, arylcarbonyloxy, alkoxycarbonyloxy, aryloxycarbonyloxy, carboxylate, alkylcarbonyl, arylcarbonyl, alkoxycarbonyl, aminocarbonyl, alkylaminocarbonyl, dialkylaminocarbonyl, alkylthiocarbonyl, alkoxyl, phosphate, phosphonato, phosphinato, cyano, amino (including alkylamino, dialkylamino, arylamino, diarylamino, and alkylarylamino), acylamino (including alkylcarbonylamino, arylcarbonylamino, carbamoyl and ureido), amidino, imino, sulfhydryl, alkylthio, arylthio, thiocarboxylate, sulfates, alkylsulfinyl, sulfonato, sulfamoyl, sulfonamido, nitro, trifluoromethyl, cyano, azido, heterocyclyl, alkylaryl, or an aromatic or heteroaromatic moieties. Exemplary halogen substituted alkoxy groups include, but are not limited to, fluoromethoxy, difluoromethoxy, trifluoromethoxy, chloromethoxy, dichloromethoxy, and trichloromethoxy.

[0167] The term “alkoxyalkyl” refers to an alkylene group substituted with an alkoxy group. For example, methoxyethyl (CH₃OCH₂CH₂—) and ethoxymethyl (CH₃CH₂OCH₂—) are both C3 alkoxyalkyl groups.

[0168] The term “aryl” as used herein refers to monocyclic or bicyclic aromatic hydrocarbon groups having from 6 to 12 carbon atoms in the ring portion, for example, phenyl, naphthyl, biphenyl and diphenyl groups, each of which may be substituted with, for example, one to four substituents such as alkyl; substituted alkyl as defined above, halogen, trifluoromethyl, trifluoromethoxy, hydroxy, alkoxy, cycloalkyloxy, alkanoyl, alkanoyloxy, amino, alkylamino, dialkylamino, nitro, cyano, carboxy, carboxyalkyl, carbamyl, carbamoyl and aryloxy. Specific embodiments of aryl groups in accordance with the present disclosure include phenyl, substituted phenyl, naphthyl, biphenyl, and diphenyl.

[0169] The term “aroyl,” as used alone or in combination herein, refers to an aryl radical derived from an aromatic carboxylic acid, such as optionally substituted benzoic or naphthoic acids.

[0170] The term “aralkyl” as used herein refers to an aryl group bonded to the 2-pyridinyl ring or the 4-pyridinyl ring through an alkyl group, preferably one containing 1 to 10 carbon atoms. A preferred aralkyl group is benzyl.

[0171] The term “carboxy,” as used herein, represents a group of the formula —C(═O)OH or —C(═O)O⁻.

[0172] The term “carbonyl” as used herein refers to a group in which an oxygen atom is double-bonded to a carbon atom —C═O.

[0173] The term “trifluoromethyl” as used herein refers to —CF₃.

[0174] The term “trifluoromethoxy” as used herein refers to —OCF₃.

[0175] The term “hydroxyl” as used herein refers to —OH or —O⁻.

[0176] The term “nitrile” or “cyano” as used herein refers to the group —CN.

[0177] The term “nitro,” as used herein alone or in combination refers to a —NO₂ group.

[0178] The term “amino” as used herein refers to the group —NR⁹R⁹, wherein R⁹ may independently be hydrogen, alkyl, aryl, alkoxy, or heteroaryl. The term “aminoalkyl” as used herein represents a more detailed selection as compared to “amino” and refers to the group —NR′R′, wherein R′ may independently be hydrogen or (C₁-C₄) alkyl. The term “dialkylamino” refers to an amino group having two attached alkyl groups that can be the same or different.

[0179] The term “alkanoylamino” refers to alkyl, alkenyl or alkynyl groups containing the group —C(═O)— followed by —N(H)—, for example acetylamino, propanoylamino and butanoylamino and the like.

[0180] The term “carbonylamino” refers to the group —NR′—CO—CH₂—R′, wherein R′ may be independently selected from hydrogen or (C₁-C₄) alkyl.

[0181] The term “carbamoyl” as used herein refers to —O—C(O)NH₂.

[0182] The term “carbamyl” as used herein refers to a functional group in which a nitrogen atom is directly bonded to a carbonyl, i.e., as in —NR″C(═O)R″ or —C(═O)NR″R″, wherein R″ can be independently hydrogen, alkyl, substituted alkyl, alkenyl, substituted alkenyl, alkoxy, cycloalkyl, aryl, heterocyclo, or heteroaryl.

[0183] The term “alkylsulfonylamino” refers to the group —NHS(O)₂R¹², wherein R¹² is alkyl.

[0184] The term “halogen” as used herein refers to bromine, chlorine, fluorine or iodine. In one embodiment, the halogen is fluorine. In another embodiment, the halogen is chlorine.

[0185] The term “heterocyclo” refers to an optionally substituted, unsaturated, partially saturated, or fully saturated, aromatic or nonaromatic cyclic group that is a 4 to 7 membered monocyclic, or 7 to 11 membered bicyclic ring system that has at least one heteroatom in at least one carbon atom-containing ring. The substituents on the heterocyclo rings may be selected from those given above for the aryl groups. Each ring of the heterocyclo group containing a heteroatom may have 1, 2, or 3 heteroatoms selected from nitrogen, oxygen or sulfur. Plural heteroatoms in a given heterocyclo ring may be the same or different.

[0186] Exemplary monocyclic heterocyclo groups include pyrrolidinyl, pyrrolyl, indolyl, pyrazolyl, imidazolyl, oxazolyl, isoxazolyl, thiazolyl, furyl, tetrahydrofuryl, thienyl, piperidinyl, piperazinyl, azepinyl, pyrimidinyl, pyridazinyl, tetrahydropyranyl, morpholinyl, dioxanyl, triazinyl and triazolyl. Preferred bicyclic heterocyclo groups include benzothiazolyl, benzoxazolyl, benzothienyl, quinolinyl, tetrahydroisoquinolinyl, benzimidazolyl, benzofuryl, indazolyl, benzisothiazolyl, isoindolinyl and tetrahydroquinolinyl. In more detailed embodiments heterocyclo groups may include indolyl, imidazolyl, furyl, thienyl, thiazolyl, pyrrolidyl, pyridyl and pyrimidyl.

[0187] “Substituted” refers to a group in which one or more hydrogen atoms are each independently replaced with the same or different substituent(s). Representative substituents include —X, —R⁶, —O—, ═O, —OR, —SR⁶, —S—, ═S, —NR⁶R⁶, ═NR⁶, —CX₃, —CF₃, —CN, —OCN, —SCN, —NO, —NO₂, ═N₂, —N₃, —S(═O)₂O—, —S(═O)₂OH, —S(═O)₂R⁶, —OS(═O)₂O—, —OS(═O)₂OH, —OS(═O)₂R⁶, —P(═O)(O⁻)₂, —P(═O)(OH)(O⁻), —OP(═O)₂(O⁻), —C(—O)R⁶, —C(═S)R⁶, —C(═O)OR⁶, —C(═O)O⁻, —C(═S)OR⁶, —NR⁶—C(═O)—N(R⁶)₂, —NR⁶—C(═S)—N(R⁶)₂, and —C(═NR⁶)NR⁶R⁶, wherein each X is independently a halogen; and each R⁶ is independently hydrogen, halogen, alkyl, aryl, arylalkyl, arylaryl, arylheteroalkyl, heteroaryl, heteroarylalkyl, NR⁷R⁷, —C(═O)R⁷, and —S(═O)₂R⁷; and each R⁷ is independently hydrogen, alkyl, alkanyl, alkynyl, aryl, arylalkyl, arylheteralkyl, arylaryl, heteroaryl or heteroarylalkyl. Aryl containing substituents, whether or not having one or more substitutions, may be attached in a para (p-), meta (m-) or ortho (o-) conformation, or any combination thereof.

Target Genes and Exemplary dsRNA Molecules

[0188] More detail regarding TNF and its nucleotide sequence (target mRNA), function(s), diseases and disorders related thereto, and example siRNA sequences are found in the priority document patent application PCT/US2008/055371 and associated sequence listing, the contents of which are hereby incorporated by reference in their entirety.

[0189] More detail regarding VEGF and its nucleotide sequence (target mRNA), function(s), diseases and disorders related thereto, and example siRNA sequences are found in the priority document patent applications PCT/US2008/055362 and associated sequence listing; and PCT/US2008/055380 and associated sequence listing, the contents of which are hereby incorporated by reference in their entirety.

[0190] More detail regarding VEGFR and its nucleotide sequence (target mRNA), function(s), diseases and disorders related thereto, and example siRNA sequences are found in the priority document patent application PCT/US2008/055370 and associated sequence listing; and PCT/US2008/055383 and associated sequence listing, the contents of which are hereby incorporated by reference in their entirety.

[0191] More detail regarding ERBB and EGFR and their nucleotide sequences (target mRNAs), function(s), diseases and disorders related thereto, and example siRNA sequences are found in the priority document patent application PCT/US2008/055375 and associated sequence listing; and PCT/US2008/055360 and associated sequence listing, the contents of which are hereby incorporated by reference in their entirety.

[0192] More detail regarding PDGF and its nucleotide sequence (target mRNA), function(s), diseases and disorders related thereto, and example siRNA sequences are found in the priority document patent application PCT/US2008/055374 and associated sequence listing, the contents of which are hereby incorporated by reference in their entirety.

[0193] More detail regarding PDGFR and its nucleotide sequence (target mRNA), function(s), diseases and disorders related thereto, and example siRNA sequences are found in the priority document patent application PCT/US2008/055381 and associated sequence listing; and PCT/US2008/055357 and associated sequence listing, the contents of which are hereby incorporated by reference in their entirety.

[0194] More detail regarding BCR-ABL and its nucleotide sequence (target mRNA), function(s), diseases and disorders related thereto, and example siRNA sequences are found in the priority document patent application PCT/US2008/055378 and associated sequence listing, the contents of which are hereby incorporated by reference in their entirety.

[0195] More detail regarding SRD5A1 and its nucleotide sequence (target mRNA), function(s), diseases and disorders related thereto, and example siRNA sequences are found in the priority document patent application PCT/US2008/055372 and associated sequence listing, the contents of which are hereby incorporated by reference in their entirety.

[0196] More detail regarding SRD5A2 and its nucleotide sequence (target mRNA), function(s), diseases and disorders related thereto, and example siRNA sequences are found in the priority document patent application PCT/US2008/055345 and associated sequence listing, the contents of which are hereby incorporated by reference in their entirety.

[0197] More detail regarding PIK3C and its nucleotide sequence (target mRNA), function(s), diseases and disorders related thereto, and example siRNA sequences are found in the priority document patent application PCT/US2008/055377 and associated sequence listing, the contents of which are hereby incorporated by reference in their entirety.

[0198] More detail regarding MAPK and its nucleotide sequence (target mRNA), function(s), diseases and disorders related thereto, and example siRNA sequences are found in the priority document patent application PCT/US2008/055376 and associated sequence listing; and PCT/US2008/055373 and associated sequence listing, the contents of which are hereby incorporated by reference in their entirety.

[0199] More detail regarding HIF1A and its nucleotide sequence (target mRNA), function(s), diseases and disorders related thereto, and example siRNA sequences are found in the priority document patent application PCT/US2008/055385 and associated sequence listing, the contents of which are hereby incorporated by reference in their entirety.

[0200] More detail regarding PKN3 and its nucleotide sequence (target mRNA), function(s), diseases and disorders related thereto, and example siRNA sequences are found in the priority document patent application PCT/US2008/055386 and associated sequence listing, the contents of which are hereby incorporated by reference in their entirety.

[0201] More detail regarding IL17A and its nucleotide sequence (target mRNA), function(s), diseases and disorders related thereto, and example siRNA sequences are found in the priority document patent application PCT/US2008/055382 and associated sequence listing, the contents of which are hereby incorporated by reference in their entirety.

[0202] More detail regarding IL6 and its nucleotide sequence (target mRNA), function(s), diseases and disorders related thereto, and example siRNA sequences are found in the priority document patent application PCT/US2008/055333 and associated sequence listing, the contents of which are hereby incorporated by reference in their entirety.

[0203] More detail regarding IL18 and its nucleotide sequence (target mRNA), function(s), diseases and disorders related thereto, and example siRNA sequences are found in the priority document patent application PCT/US2008/055341 and associated sequence listing, the contents of which are hereby incorporated by reference in their entirety.

[0204] More detail regarding TNFSF13B and its nucleotide sequence (target mRNA), function(s), diseases and disorders related thereto, and example siRNA sequences are found in the priority document patent application PCT/US2008/055350 and associated sequence listing, the contents of which are hereby incorporated by reference in their entirety.

[0205] More detail regarding MAPK1 and its nucleotide sequence (target mRNA), function(s), diseases and disorders related thereto, and example siRNA sequences are found in the priority document patent application PCT/US2008/055356 and associated sequence listing, the contents of which are hereby incorporated by reference in their entirety.

[0206] More detail regarding RAF1 and its nucleotide sequence (target mRNA), function(s), diseases and disorders related thereto, and example siRNA sequences are found in the priority document patent application PCT/US2008/055366 and associated sequence listing, the contents of which are hereby incorporated by reference in their entirety.

[0207] More detail regarding AKT and its nucleotide sequence (target mRNA), function(s), diseases and disorders related thereto, and example siRNA sequences are found in the priority document patent application PCT/US2008/055339 and associated sequence listing, the contents of which are hereby incorporated by reference in their entirety.

[0208] More detail regarding FRAP1 and its nucleotide sequence (target mRNA), function(s), diseases and disorders related thereto, and example siRNA sequences are found in the priority document patent application PCT/US2008/055365 and associated sequence listing, the contents of which are hereby incorporated by reference in their entirety.

[0209] More detail regarding MAPK2 and its nucleotide sequence (target mRNA), function(s), diseases and disorders related thereto, and example siRNA sequences are found in the priority document patent application PCT/US2008/055340 and associated sequence listing, the contents of which are hereby incorporated by reference in their entirety.

[0210] More detail regarding CDK2 and its nucleotide sequence (target mRNA), function(s), diseases and disorders related thereto, and example siRNA sequences are found in the priority document patent application PCT/US2008/055505 and associated sequence listing, the contents of which are hereby incorporated by reference in their entirety.

[0211] More detail regarding ABCB1 and its nucleotide sequence (target mRNA), function(s), diseases and disorders related thereto, and example siRNA sequences are found in the priority document patent application PCT/US2008/055556 and associated sequence listing, the contents of which are hereby incorporated by reference in their entirety.

[0212] More detail regarding BCL2 and its nucleotide sequence (target mRNA), function(s), diseases and disorders related thereto, and example siRNA sequences are found in the priority document patent application PCT/US2008/055515 and associated sequence listing, the contents of which are hereby incorporated by reference in their entirety.

[0213] More detail regarding ANGPT2 and its nucleotide sequence (target mRNA), function(s), diseases and disorders related thereto, and example siRNA sequences are found in the priority document patent application PCT/US2008/055599 and associated sequence listing, the contents of which are hereby incorporated by reference in their entirety.

[0214] More detail regarding CHEK1 and its nucleotide sequence (target mRNA), function(s), diseases and disorders related thereto, and example siRNA sequences are found in the priority document patent application PCT/US2008/055601 and associated sequence listing, the contents of which are hereby incorporated by reference in their entirety.

[0215] More detail regarding IGF1R and its nucleotide sequence (target mRNA), function(s), diseases and disorders related thereto, and example siRNA sequences are found in the priority document patent application PCT/US2008/055603 and associated sequence listing, the contents of which are hereby incorporated by reference in their entirety.

[0216] More detail regarding STAT3 and its nucleotide sequence (target mRNA), function(s), diseases and disorders related thereto, and example siRNA sequences are found in the priority document patent application PCT/US2008/055606 and associated sequence listing, the contents of which are hereby incorporated by reference in their entirety.

[0217] More detail regarding MMP and its nucleotide sequence (target mRNA), function(s), diseases and disorders related thereto, and example siRNA sequences are found in the priority document patent application PCT/U2008/055548 and associated sequence listing, the contents of which are hereby incorporated by reference in their entirety.

[0218] More detail regarding FOLH1 and its nucleotide sequence (target mRNA), function(s), diseases and disorders related thereto, and example siRNA sequences are found in the priority document patent application PCT/US2008/055611 and associated sequence listing, the contents of which are hereby incorporated by reference in their entirety.

[0219] More detail regarding MYC and its nucleotide sequence (target mRNA), function(s), diseases and disorders related thereto, and example siRNA sequences are found in the priority document patent application PCT/US2008/055615 and associated sequence listing, the contents of which are hereby incorporated by reference in their entirety.

[0220] More detail regarding TERC and its nucleotide sequence (target mRNA), function(s), diseases and disorders related thereto, and example siRNA sequences are found in the priority document patent application PCT/US2008/055709 and associated sequence listing, the contents of which are hereby incorporated by reference in their entirety.

[0221] More detail regarding TERT and its nucleotide sequence (target mRNA), function(s), diseases and disorders related thereto, and example siRNA sequences are found in the priority document patent application PCT/US2008/055709 and associated sequence listing, the contents of which are hereby incorporated by reference in their entirety.

[0222] More detail regarding PRKCA and its nucleotide sequence (target mRNA), function(s), diseases and disorders related thereto, and example siRNA sequences are found in the priority document patent application PCT/US2008/055618 and associated sequence listing, the contents of which are hereby incorporated by reference in their entirety.

[0223] More detail regarding RAS and its nucleotide sequence (target mRNA), function(s), diseases and disorders related thereto, and example siRNA sequences are found in the priority document patent application PCT/US2008/055644 and associated sequence listing, the contents of which are hereby incorporated by reference in their entirety.

[0224] More detail regarding CXC and its nucleotide sequence (target mRNA), function(s), diseases and disorders related thereto, and example siRNA sequences are found in the priority document patent application PCT/US2008/055651 and associated sequence listing, the contents of which are hereby incorporated by reference in their entirety.

[0225] More detail regarding WNT and its nucleotide sequence (target mRNA), function(s), diseases and disorders related thereto, and example siRNA sequences are found in the priority document patent application PCT/US2008/055649 and associated sequence listing, the contents of which are hereby incorporated by reference in their entirety.

[0226] More detail regarding TLR and its nucleotide sequence (target mRNA), function(s), diseases and disorders related thereto, and example siRNA sequences are found in the priority document patent application PCT/US2008/055711 and associated sequence listing, the contents of which are hereby incorporated by reference in their entirety.

[0227] More detail regarding FCER2 and its nucleotide sequence (target mRNA), function(s), diseases and disorders related thereto, and example siRNA sequences are found in the priority document patent application PCT/US2008/055635 and associated sequence listing, the contents of which are hereby incorporated by reference in their entirety.

[0228] More detail regarding FOS (FOS, FOSB, FOSL1, or FOSL2) and its nucleotide sequence (target mRNA), function(s), diseases and disorders related thereto, and example siRNA sequences are found in the priority document patent application PCT/US2008/055524 and associated sequence listing, the contents of which are hereby incorporated by reference in their entirety.

[0229] More detail regarding HSD11B1 and its nucleotide sequence (target mRNA), function(s), diseases and disorders related thereto, and example siRNA sequences are found in the priority document patent application PCT/US2008/055672 and associated sequence listing, the contents of which are hereby incorporated by reference in their entirety.

[0230] More detail regarding cJUN, JUNB, or JUND and their nucleotide sequences (target mRNAs), functions, diseases and disorders related thereto, and example siRNA sequences are found in the priority document patent application PCT/US2008/055627 and associated sequence listing, the contents of which are hereby incorporated by reference in their entirety.

[0231] More detail regarding TYMP and its nucleotide sequence (target mRNA), function(s), diseases and disorders related thereto, and example siRNA sequences are found in the priority document patent application PCT/US2008/055697 and associated sequence listing, the contents of which are hereby incorporated by reference in their entirety.

[0232] More detail regarding EGR and its nucleotide sequence (target mRNA), function(s), diseases and disorders related thereto, and example siRNA sequences are found in the priority document patent application PCT/US2008/055662 and associated sequence listing, the contents of which are hereby incorporated by reference in their entirety.

[0233] More detail regarding EZH2 and its nucleotide sequence (target mRNA), function(s), diseases and disorders related thereto, and example siRNA sequences are found in the priority document patent application PCT/US2008/055678 and associated sequence listing, the contents of which are hereby incorporated by reference in their entirety.

[0234] More detail regarding CCND1 and its nucleotide sequence (target mRNA), function(s), diseases and disorders related thereto, and example siRNA sequences are found in the priority document patent application PCT/US2008/055368 and associated sequence listing, the contents of which are hereby incorporated by reference in their entirety.

[0235] More detail regarding FAS and its nucleotide sequence (target mRNA), function(s), diseases and disorders related thereto, and example siRNA sequences are found in the priority document patent application PCT/US2008/055676 and associated sequence listing, the contents of which are hereby incorporated by reference in their entirety.

[0236] More detail regarding PCNA and its nucleotide sequence (target mRNA), function(s), diseases and disorders related thereto, and example siRNA sequences are found in the priority document patent application PCT/US2008/055550 and associated sequence listing, the contents of which are hereby incorporated by reference in their entirety.

[0237] More detail regarding FGF2 and its nucleotide sequence (target mRNA), function(s), diseases and disorders related thereto, and example siRNA sequences are found in the priority document patent application PCT/US2008/055560 and associated sequence listing, the contents of which are hereby incorporated by reference in their entirety.

[0238] More detail regarding TGF-β and its nucleotide sequence (target mRNA), function(s), diseases and disorders related thereto, and example siRNA sequences are found in the priority document patent application PCT/US2008/055698 and associated sequence listing, the contents of which are hereby incorporated by reference in their entirety.

[0239] More detail regarding TGF-βR and its nucleotide sequence (target mRNA), function(s), diseases and disorders related thereto, and example siRNA sequences are found in the priority document patent application PCT/US2008/055695 and associated sequence listing, the contents of which are hereby incorporated by reference in their entirety.

[0240] More detail regarding TACSTD1 and its nucleotide sequence (target mRNA), function(s), diseases and disorders related thereto, and example siRNA sequences are found in the priority document patent application PCT/US2008/055701 and associated sequence listing, the contents of which are hereby incorporated by reference in their entirety.

[0241] More detail regarding MUC1 and its nucleotide sequence (target mRNA), function(s), diseases and disorders related thereto, and example siRNA sequences are found in the priority document patent application PCT/US2008/055693 and associated sequence listing, the contents of which are hereby incorporated by reference in their entirety.

[0242] More detail regarding PTPN11 and its nucleotide sequence (target mRNA), function(s), diseases and disorders related thereto, and example siRNA sequences are found in the priority document patent application PCT/US2008/055704 and associated sequence listing, the contents of which are hereby incorporated by reference in their entirety.

[0243] More detail regarding NGR1 and its nucleotide sequence (target mRNA), function(s), diseases and disorders related thereto, and example siRNA sequences are found in the priority document patent application PCT/US2008/055708 and associated sequence listing, the contents of which are hereby incorporated by reference in their entirety.

[0244] More detail regarding MME and its nucleotide sequence (target mRNA), function(s), diseases and disorders related thereto, and example siRNA sequences are found in the priority document patent application PCT/US2008/055597 and associated sequence listing, the contents of which are hereby incorporated by reference in their entirety.

[0245] More detail regarding CD19 and its nucleotide sequence (target mRNA), function(s), diseases and disorders related thereto, and example siRNA sequences are found in the priority document patent application PCT/US2008/055604 and associated sequence listing, the contents of which are hereby incorporated by reference in their entirety.

[0246] More detail regarding CD40 and its nucleotide sequence (target mRNA), function(s), diseases and disorders related thereto, and example siRNA sequences are found in the priority document patent application PCT/US2008/055608 and associated sequence listing, the contents of which are hereby incorporated by reference in their entirety.

[0247] More detail regarding ApoB and its nucleotide sequence (target mRNA), function(s), diseases and disorders related thereto, and example siRNA sequences are found in the priority document patent application PCT/US2008/055353 and associated sequence listing, the contents of which are hereby incorporated by reference in their entirety.

[0248] More detail regarding SNCA and its nucleotide sequence (target mRNA), function(s), diseases and disorders related thereto, and example siRNA sequences are found in the priority document patent application PCT/US2008/055631 and associated sequence listing, the contents of which are hereby incorporated by reference in their entirety.

[0249] More detail regarding SIRT2 and its nucleotide sequence (target mRNA), function(s), diseases and disorders related thereto, and example siRNA sequences are found in the priority document patent application PCT/US2008/055563 and associated sequence listing, the contents of which are hereby incorporated by reference in their entirety.

[0250] More detail regarding HDAC and its nucleotide sequence (target mRNA), function(s), diseases and disorders related thereto, and example siRNA sequences are found in the priority document patent application PCT/US2008/055612 and associated sequence listing, the contents of which are hereby incorporated by reference in their entirety.

[0251] More detail regarding MS4A1 and its nucleotide sequence (target mRNA), function(s), diseases and disorders related thereto, and example siRNA sequences are found in the priority document patent application PCT/US2008/055622 and associated sequence listing, the contents of which are hereby incorporated by reference in their entirety.

[0252] More detail regarding CD22 and its nucleotide sequence (target mRNA), function(s), diseases and disorders related thereto, and example siRNA sequences are found in the priority document patent application PCT/US2008/055625 and associated sequence listing, the contents of which are hereby incorporated by reference in their entirety.

[0253] More detail regarding DGAT1 and DGAT2 and their nucleotide sequences (target mRNAs), functions, diseases and disorders related thereto, and example siRNA sequences are found in the priority document patent application PCT/US2008/055527 and associated sequence listing, the contents of which are hereby incorporated by reference in their entirety.

[0254] More detail regarding CD3 and its nucleotide sequence (target mRNA), function(s), diseases and disorders related thereto, and example siRNA sequences are found in the priority document patent application PCT/US2008/055533 and associated sequence listing, the contents of which are hereby incorporated by reference in their entirety.

[0255] More detail regarding PCSK9 and its nucleotide sequence (target mRNA), function(s), diseases and disorders related thereto, and example siRNA sequences are found in the priority document patent application PCT/US2008/055554 and associated sequence listing, the contents of which are hereby incorporated by reference in their entirety.

[0256] More detail regarding MET and its nucleotide sequence (target mRNA), function(s), diseases and disorders related thereto, and example siRNA sequences are found in the priority document patent application PCT/US2008/055511 and associated sequence listing, the contents of which are hereby incorporated by reference in their entirety.

[0257] More detail regarding CTNNB1 and its nucleotide sequence (target mRNA), function(s), diseases and disorders related thereto, and example siRNA sequences are found in the priority document patent application PCT/US2008/055532 and associated sequence listing, the contents of which are hereby incorporated by reference in their entirety.

[0258] More detail regarding ID and its nucleotide sequence (target mRNA), function(s), diseases and disorders related thereto, and example siRNA sequences are found in the priority document patent application PCT/US2008/055516 and associated sequence listing, the contents of which are hereby incorporated by reference in their entirety.

[0259] More detail regarding PTPN1 and its nucleotide sequence (target mRNA), function(s), diseases and disorders related thereto, and example siRNA sequences are found in the priority document patent application PCT/US2008/055551 and associated sequence listing, the contents of which are hereby incorporated by reference in their entirety.

[0260] More detail regarding TIE1 and TEK and their nucleotide sequences (target mRNAs), functions, diseases and disorders related thereto, and example siRNA sequences are found in the priority document patent application PCT/US2008/055519 and associated sequence listing, the contents of which are hereby incorporated by reference in their entirety.

[0261] More detail regarding FGFR and its nucleotide sequence (target mRNA), function(s), diseases and disorders related thereto, and example siRNA sequences are found in the priority document patent application PCT/US2008/055542 and associated sequence listing, the contents of which are hereby incorporated by reference in their entirety.

[0262] More detail regarding MAPK3 and its nucleotide sequence (target mRNA), function(s), diseases and disorders related thereto, and example siRNA sequences are found in the priority document patent application PCT/US2008/055526 and associated sequence listing, the contents of which are hereby incorporated by reference in their entirety.

[0263] More detail regarding survivin (BIRC5) and its nucleotide sequence (target mRNA), function(s), diseases and disorders related thereto, and example siRNA sequences are found in patent application PCT/US2009/52878 and associated sequence listing, the contents of which are hereby incorporated by reference in their entirety.

[0264] More detail regarding PLK1, PLK2, and PLK3 and their nucleotide sequences (target mRNAs), functions, diseases and disorders related thereto, and example siRNA sequences are found in patent application PCT/US2009/52888 and associated sequence listing, the contents of which are hereby incorporated by reference in their entirety.

[0265] As used herein, reference to target mRNA or target RNA sequences or sense strands means an RNA isoform of a nucleotide sequence of a gene identified herein, as well as variants and homologs having at least 80% or more identity with the target mRNA.

[0266] The “percent identity” between two or more nucleic acid sequences is a function of the number of identical positions shared by the sequences (i.e., % identity=number of identical positions/total number of positions×100), taking into account the number of gaps, and the length of each gap that needs to be introduced to optimize alignment of two or more sequences. The comparison of sequences and determination of percent identity between two or more sequences can be accomplished using a mathematical algorithm, such as BLAST and Gapped BLAST programs at their default parameters (e.g., BLASTN, see www.ncbi.nlm.nih.gov/BLAST; see also Altschul et al., J. Mol. Biol. 215:403-410, 1990).

[0267] In one aspect, the instant disclosure provides an mdRNA molecule, comprising a first strand that is complementary to a target mRNA, and a second strand and a third strand that are each complementary to non-overlapping regions of the first strand, wherein the second strand and third strands can anneal with the first strand to form at least two double-stranded regions spaced apart by up to 10 nucleotides and thereby forming a gap between the second and third strands, and wherein (a) the mdRNA molecule optionally has at least one double-stranded region of 5 base pairs to 13 base pairs, or (b) the combined double-stranded regions total about 15 base pairs to about 40 base pairs and the mdRNA molecule optionally has blunt ends; wherein at least one pyrimidine of the mdRNA is substituted with a pyrimidine nucleoside according to Formula I or II:

[chemical structure]

wherein

[0268] R¹ and R² are each independently a —H, —OH, —OCH₃, —OCH₂OCH₂CH₃, —OCH₂CH₂OCH₃, halogen, substituted or unsubstituted C₁-C₁₀ alkyl, alkoxy, alkoxyalkyl, hydroxyalkyl, carboxyalkyl, alkylsulfonylamino, aminoalkyl, dialkylamino, alkylaminoalkyl, dialkylaminoalkyl, haloalkyl, trifluoromethyl, cycloalkyl, (cycloalkyl)alkyl, substituted or unsubstituted C₂-C₁₀ alkenyl, substituted or unsubstituted —O-allyl, —O—CH₂CH═CH₂, —O—CH═CHCH₃, substituted or unsubstituted C₂-C₁₀ alkynyl, carbamoyl, carbamyl, carboxy, carbonylamino, substituted or unsubstituted aryl, substituted or unsubstituted aralkyl, —NH₂, —NO₂, —C≡N, or heterocyclo group;

[0269] R³ and R⁴ are each independently a hydroxyl, a protected hydroxyl, a phosphate, or an internucleoside linking group; and

[0270] R⁵ and R⁸ are each independently O or S.

[0271] In certain embodiments, at least one nucleoside is according to Formula I in which R¹ is methyl and R² is —OH, or R¹ is methyl, R² is —OH, and R⁸ is S.

[0272] In other embodiments, the internucleoside linking group covalently links from about 5 to about 40 nucleosides.

[0273] In some embodiments, the gap comprises at least one unpaired nucleotide in the first strand positioned between the double-stranded regions formed by the second and third strands when annealed to the first strand, or the gap is a nick. In certain embodiments, the nick or gap is located 10 nucleotides from the 5′-end of the first (antisense) strand or at the Argonaute cleavage site. In another embodiment, the meroduplex nick or gap is positioned such that the thermal stability is maximized for the first and second strand duplex and for the first and third strand duplex as compared to the thermal stability of such meroduplexes having a nick or gap in a different position.

[0274] In still another aspect, the instant disclosure provides an mdRNA molecule, comprising a first strand that is complementary to a target mRNA, and a second strand and a third strand that are each complementary to non-overlapping regions of the first strand, wherein the second strand and third strands can anneal with the first strand to form at least two double-stranded regions spaced apart by up to 10 nucleotides and thereby forming a gap between the second and third strands, and wherein the mdRNA molecule optionally includes at least one double-stranded region of 5 base pairs to 13 base pairs. In a further aspect, the instant disclosure provides an mdRNA molecule having a first strand that is complementary to a target mRNA, and a second strand and a third strand that are each complementary to non-overlapping regions of the first strand, wherein the second strand and third strands can anneal with the first strand to form at least two double-stranded regions spaced apart by up to 10 nucleotides and thereby forming a gap between the second and third strands, and wherein the combined double-stranded regions total about 15 base pairs to about 40 base pairs and the mdRNA molecule optionally has blunt ends. In some embodiments, the gap comprises at least one unpaired nucleotide in the first strand positioned between the double-stranded regions formed by the second and third strands when annealed to the first strand, or the gap is a nick. In certain embodiments, the nick or gap is located 10 nucleotides from the 5′-end of the first (antisense) strand or at the Argonaute cleavage site. In another embodiment, the meroduplex nick or gap is positioned such that the thermal stability is maximized for the first and second strand duplex and for the first and third strand duplex as compared to the thermal stability of such meroduplexes having a nick or gap in a different position.

[0275] As provided herein, any of the aspects or embodiments disclosed herein would be useful in treating a target mRNA-associated diseases or disorders, such as cancer, a metabolic disease and/or inflammatory disease.

[0276] In some embodiments, the dsRNA comprises at least three strands in which the first strand comprises about 5 nucleotides to about 40 nucleotides, and the second and third strands include each, individually, about 5 nucleotides to about 20 nucleotides, wherein the combined length of the second and third strands is about 15 nucleotides to about 40 nucleotides. In other embodiments, the dsRNA comprises at least two strands in which the first strand comprises about 15 nucleotides to about 24 nucleotides or about 25 nucleotides to about 40 nucleotides. In yet other embodiments, the first strand comprises about 15 to about 24 nucleotides or about 25 nucleotides to about 40 nucleotides and is complementary to at least 15, 16, 17, 18, 19, 20, 21, 22, 23, 24, 25, 26, 27, 28, 29, 30, 31, 32, 33, 34, 35, 36, 37, 38, 39, or 40 contiguous nucleotides of a human target mRNA. In alternative embodiments, the first strand comprises about 15 to about 24 nucleotides or about 25 nucleotides to about 40 nucleotides and is at least 70%, 75%, 80%, 85%, 90%, 95%, 96%, 97%, 98%, or 99% identical to a sequence that is complementary to at least 15, 16, 17, 18, 19, 20, 21, 22, 23, 24, 25, 26, 27, 28, 29, 30, 31, 32, 33, 34, 35, 36, 37, 38, 39, or 40 contiguous nucleotides of a human target mRNA.

[0277] In further embodiments, the first strand will be complementary to a second strand, to a second and third strand, or to a plurality of strands. The first strand and its complements will be able to form dsRNA and mdRNA molecules of this disclosure, but only about 19 to about 25 nucleotides of the first strand comprise a sequence complementary to a target mRNA. For example, a Dicer substrate dsRNA can have about 25 nucleotides to about 40 nucleotides, but with only 19 nucleotides of the antisense (first) strand being complementary to a target mRNA. In further embodiments, the first strand having complementarity to a target mRNA in about 19 nucleotides to about 25 nucleotides will have one, two, or three mismatches with a target mRNA, or the first strand of 19 nucleotides to about 25 nucleotides, that for example activates or is capable of loading into RISC, will have at least 80% identity with the corresponding nucleotides found in a target mRNA.

[0278] Certain illustrative dsRNA molecules, which can be used to design mdRNA or dsRNA molecules and can optionally include substitutions or modifications as described herein are provided in the Sequence Listings as attached herewith, which is herein incorporated by reference (text file named “07-R-US-CIP_Sequence_Listing”). In addition, the content of Table B as disclosed in U.S. Provisional Patent Application No. 60/934,930 (filed Mar. 16, 2007), which was submitted with that application as a separate text file named “Table_B_Human_RefSeq_Accession_Numbers.txt” (created Mar. 16, 2007 and having a size of 3,604 kilobytes), is incorporated herein by reference in its entirety.

Substituting and Modifying Target dsRNA Molecules

[0279] The introduction of substituted and modified nucleotides into mdRNA and dsRNA molecules of this disclosure provides a powerful tool in overcoming potential limitations of in vivo stability and bioavailability inherent to native RNA molecules (i.e., having standard nucleotides) that are exogenously delivered. For example, the use of dsRNA molecules of this disclosure can enable a lower dose of a particular nucleic acid molecule for a given therapeutic effect (e.g., reducing or silencing target gene expression) since dsRNA molecules of this disclosure tend to have a longer half-life in serum. Furthermore, certain substitutions and modifications can improve the bioavailability of dsRNA by targeting particular cells or tissues or improving cellular uptake of the dsRNA molecules. Therefore, even if the activity of a dsRNA molecule of this disclosure is reduced as compared to a native RNA molecule, the overall activity of the substituted or modified dsRNA molecule can be greater than that of the native RNA molecule due to improved stability or delivery of the molecule. Unlike native unmodified dsRNA, substituted and modified dsRNA can also minimize the possibility of activating the interferon response in, for example, humans.

[0280] In certain embodiments, a dsRNA molecule of this disclosure has at least one uridine, at least three uridines, or each and every uridine (i.e., all uridines) of the first (antisense) strand of the dsRNA substituted or replaced with 5-methyluridine or 2-thioribothymidine. In a related embodiment, the dsRNA molecule or analog thereof of this disclosure has at least one uridine, at least three uridines, or each and every uridine of the second (sense) strand of the dsRNA substituted or replaced with 5-methyluridine or 2-thioribothymidine. In a related embodiment, the dsRNA molecule or analog thereof of this disclosure has at least one uridine, at least three uridines, or each and every uridine of the third (sense) strand of the dsRNA substituted or replaced with 5-methyluridine or 2-thioribothymidine. In still another embodiment, the dsRNA molecule or analog thereof of this disclosure has at least one uridine, at least three uridines, or each and every uridine of both the first (antisense) and second (sense) strands; of both the first (antisense) and third (sense) strands; of both the second (sense) and third (sense) strands; or of all of the first (antisense), second (sense) and third (sense) strands of the dsRNA substituted or replaced with 5-methyluridine or 2-thioribothymidine. In some embodiments, the double-stranded region of a dsRNA molecule has at least three 5-methyluridines or 2-thioribothymidines. In certain embodiments, dsRNA molecules comprise ribonucleotides at about 5% to about 95% of the nucleotide positions in one strand, both strands, or any combination thereof.

[0281] In further embodiments, a dsRNA molecule that decreases expression of a target gene by RNAi according to the instant disclosure further comprises one or more natural or synthetic non-standard nucleoside. In related embodiments, the non-standard nucleoside is one or more deoxyuridine, locked nucleic acid (LNA) molecule, a modified base (e.g., 5-methyluridine), a universal-binding nucleotide, a 2′-O-methyl nucleotide, a modified internucleoside linkage (e.g., phosphorothioate), a G clamp, or any combination thereof. In certain embodiments, the universal-binding nucleotide can be C-phenyl, C-naphthyl, inosine, azole carboxamide, 1-β-D-ribofuranosyl-4-nitroindole, ribofuranosyl-5-nitroindole, 1-β-D-ribofuranosyl-6-nitroindole, or 1-β-D-ribofuranosyl-3-nitropyrrole.

[0282] Substituted or modified nucleotides present in dsRNA molecules, preferably in the sense or antisense strand, but also optionally in both the antisense and sense strands, comprise modified or substituted nucleotides according to this disclosure having properties or characteristics similar to natural or standard ribonucleotides. For example, this disclosure features dsRNA molecules including nucleotides having a Northern conformation (e.g., Northern pseudorotation cycle; see, e.g., Saenger, Principles of Nucleic Acid Structure, Springer-Verlag ed., 1984). As such, chemically modified nucleotides present in dsRNA molecules of this disclosure, preferably in the antisense strand, but also optionally in the sense or both the antisense and sense strands, are resistant to nuclease degradation while at the same time maintaining the capacity to mediate RNAi. Exemplary nucleotides having a Northern configuration include locked nucleic acid (LNA) nucleotides (e.g., 2′-O, 4′-C-methylene-(D-ribofuranosyl) nucleotides), 2′-methoxyethyl (MOE) nucleotides, 2′-methyl-thio-ethyl, 2′-deoxy-2′-fluoro nucleotides, 2′-deoxy-2′-chloro nucleotides, 2′-azido nucleotides, 5-methyluridines, or 2′-O-methyl nucleotides. In certain embodiments, the LNA is a 5-methyluridine LNA or 2-thio-5-methyluridine LNA. In any of these embodiments, one or more substituted or modified nucleotides can be a G clamp (e.g., a cytosine analog that forms an additional hydrogen bond to guanine, such as 9-(aminoethoxy)phenoxazine; see, e.g., Lin and Mateucci, J. Am. Chem. Soc. 120:8531, 1998).

[0283] As described herein, the first and one or more second strands of a dsRNA molecule or analog thereof provided by this disclosure can anneal or hybridize together (i.e., due to complementarity between the strands) to form at least one double-stranded region having a length of about 4 to about 10 base pairs, about 5 to about 13 base pairs, or about 15 to about 40 base pairs. In some embodiments, the dsRNA has at least one double-stranded region ranging in length from about 15 to about 24 base pairs or about 19 to about 23 base pairs. In other embodiments, the dsRNA has at least one double-stranded region ranging in length from about 26 to about 40 base pairs or about 27 to about 30 base pairs or about 30 to about 35 base pairs. In other embodiments, the two or more strands of a dsRNA molecule of this disclosure may optionally be covalently linked together by nucleotide or non-nucleotide linker molecules.

[0284] In certain embodiments, the dsRNA molecule or analog thereof comprises an overhang of one to four nucleotides on one or both 3′-ends of the dsRNA, such as an overhang comprising a deoxyribonucleotide or two deoxyribonucleotides (e.g., thymidine, adenine). In certain embodiments, the 3′-end comprising one or more deoxyribonucleotide is in an mdRNA molecule and is either in the gap, not in the gap, or any combination thereof. In some embodiments, dsRNA molecules or analogs thereof have a blunt end at one or both ends of the dsRNA. In certain embodiments, the 5′-end of the first or second strand is phosphorylated. In any of the embodiments of dsRNA molecules described herein, the 3′-terminal nucleotide overhangs can comprise ribonucleotides or deoxyribonucleotides that are chemically-modified at a nucleic acid sugar, base, or backbone. In any of the embodiments of dsRNA molecules described herein, the 3′-terminal nucleotide overhangs can comprise one or more universal base ribonucleotides. In any of the embodiments of dsRNA molecules described herein, the 3′-terminal nucleotide overhangs can comprise one or more acyclic nucleotides. In any of the embodiments of dsRNA molecules described herein, the dsRNA can further comprise a terminal phosphate group, such as a 5′-phosphate (see Martinez et al., Cell. 110:563-574, 2002; and Schwarz et al., Molec. Cell 10:537-568, 2002) or a 5′,3′-diphosphate.

[0285] As set forth herein, the terminal structure of dsRNAs of this disclosure that decrease expression of a target gene by, for example, RNAi may either have blunt ends or one or more overhangs. In certain embodiments, the overhang may be at the 3′-end or the 5′-end. The total length of dsRNAs having overhangs is expressed as the sum of the length of the paired double-stranded portion together with the overhanging nucleotides. For example, if a 19 base pair dsRNA has a two nucleotide overhang at both ends, the total length is expressed as 21-mer. Furthermore, since the overhanging sequence may have low specificity to a target gene, it is not necessarily complementary (antisense) or identical (sense) to a target gene sequence. In further embodiments, a dsRNA of this disclosure that decreases expression of a target gene by RNAi may further comprise a low molecular weight structure (e.g., a natural RNA molecule such as a tRNA, rRNA or viral RNA, or an artificial RNA molecule) at, for example, one or more overhanging portion of the dsRNA.

[0286] In further embodiments, a dsRNA molecule that decreases expression of an target gene by RNAi according to the instant disclosure further comprises a 2′-sugar substitution, such as 2′-deoxy, 2′-O-methyl, 2′-O-methoxyethyl, 2′-O-2-methoxyethyl, halogen, 2′-fluoro, 2′-O-allyl, or the like, or any combination thereof. In still further embodiments, a dsRNA molecule that decreases expression of a target gene by RNAi according to the instant disclosure further comprises a terminal cap substituent on one or both ends of the first strand or one or more second strands, such as an alkyl, abasic, deoxy abasic, glyceryl, dinucleotide, acyclic nucleotide, inverted deoxynucleotide moiety, or any combination thereof. In certain embodiments, at least one or two 5′-terminal ribonucleotides of the sense strand within the double-stranded region have a 2′-sugar substitution. In certain other embodiments, at least one or two 5′-terminal ribonucleotides of the antisense strand within the double-stranded region have a 2′-sugar substitution. In certain embodiments, at least one or two 5′-terminal ribonucleotides of the sense strand and the antisense strand within the double-stranded region have a 2′-sugar substitution.

[0287] In other embodiments, a dsRNA molecule that decreases expression of one or more target gene by RNAi according to the instant disclosure comprises one or more substitutions in the sugar backbone, including any combination of ribosyl, 2′-deoxyribosyl, a tetrofuranosyl (e.g., L-α-threofuranosyl), a hexopyranosyl (e.g., β-allopyranosyl, β-altropyranosyl, and β-glucopyranosyl), a pentopyranosyl (e.g., β-ribopyranosyl, α-lyxopyranosyl, β-xylopyranosyl, and α-arabinopyranosyl), a carbocyclic (carbon only ring) analog, a pyranose, a furanose, a morpholino, or analogs or derivatives thereof.

[0288] In yet other embodiments, a dsRNA molecule that decreases expression of a target gene (including a mRNA splice variant thereof) by RNAi according to the instant disclosure further comprises at least one modified internucleoside linkage, such as independently a phosphorothioate, chiral phosphorothioate, phosphorodithioate, phosphotriester, aminoalkylphosphotriester, methyl phosphonate, alkyl phosphonate, 3′-alkylene phosphonate, 5′-alkylene phosphonate, chiral phosphonate, phosphonoacetate, thiophosphonoacetate, phosphinate, phosphoramidate, 3′-amino phosphoramidate, aminoalkylphosphoramidate, thionophosphoramidate, thionoalkylphosphonate, thionoalkylphosphotriester, selenophosphate, boranophosphate linkage, or any combination thereof.

[0289] A modified internucleotide linkage, as described herein, can be present in one or more strands of a dsRNA molecule of this disclosure, for example, in the sense strand, the antisense strand, both strands, or a plurality of strands (e.g., in an mdRNA). The dsRNA molecules of this disclosure can comprise one or more modified internucleotide linkages at the 3′-end, the 5′-end, or both of the 3′- and 5′-ends of the second sense strand, the third sense strand, the antisense strand or any combination of the antisense strand and one or more of the sense strands. In one embodiment, a dsRNA molecule capable of decreasing expression of a target gene (including a specific or selected mRNA splice variant thereof) by RNAi has one modified internucleotide linkage at the 3′-end, such as a phosphorothioate linkage. For example, this disclosure provides a dsRNA molecule capable of decreasing expression of a target gene by RNAi having about 1 to about 8 or more phosphorothioate internucleotide linkages in one dsRNA strand. In yet another embodiment, this disclosure provides a dsRNA molecule capable of decreasing expression of a target gene by RNAi having about 1 to about 8 or more phosphorothioate internucleotide linkages in the dsRNA strands. In other embodiments, an exemplary dsRNA molecule of this disclosure can comprise from about 1 to about 5 or more consecutive phosphorothioate internucleotide linkages at the 5′-end of the sense strand, the antisense strand, both strands, or a plurality of strands. In another example, an exemplary dsRNA molecule of this disclosure can comprise one or more pyrimidine phosphorothioate internucleotide linkages in the sense strand, the antisense strand, either strand, or a plurality of strands. In yet another example, an exemplary dsRNA molecule of this disclosure comprises one or more purine phosphorothioate internucleotide linkages in the sense strand, the antisense strand, either strand, or a plurality of strands.

[0290] Many exemplary modified nucleotide bases or analogs thereof useful in the dsRNA of the instant disclosure include 5-methylcytosine; 5-hydroxymethylcytosine; xanthine; hypoxanthine; 2-aminoadenine; 6-methyl, 2-propyl, or other alkyl derivatives of adenine and guanine; 8-substituted adenines and guanines (such as 8-aza, 8-halo, 8-amino, 8-thiol, 8-thioalkyl, 8-hydroxyl, or the like); 7-methyl, 7-deaza, and 3-deaza adenines and guanines; 2-thiouracil; 2-thiothymine; 2-thiocytosine; 5-methyl, 5-propynyl, 5-halo (such as 5-bromo or 5-fluoro), 5-trifluoromethyl, or other 5-substituted uracils and cytosines; and 6-azouracil. Further useful nucleotide bases can be found in Kurreck, Eur. J. Biochem. 270:1628, 2003; Herdewijn, Antisense Nucleic Acid Develop. 10:297, 2000; Concise Encyclopedia of Polymer Science and Engineering, pages 858-859, Kroschwitz, J. I., ed. John Wiley & Sons, 1990; U.S. Pat. No. 3,687,808, and similar references.

[0291] Certain nucleotide base moieties are particularly useful for increasing the binding affinity of the dsRNA molecules of this disclosure to complementary targets. These include 5-substituted pyrimidines; 6-azapyrimidines; and N-2, N-6, or O-6 substituted purines (including 2-aminopropyladenine, 5-propynyluracil and 5-propynylcytosine). For example, 5-methyluridine and 5-methylcytosine substitutions are known to increase nucleic acid duplex stability, which can be combined with 2′-sugar modifications (such as 2′-methoxy or 2′-methoxyethyl) or internucleotide linkages (e.g., phosphorothioate) that provide nuclease resistance to the modified or substituted dsRNA.

[0292] In another aspect of the instant disclosure, there is provided a dsRNA that decreases expression of a target gene, comprising a first strand that is complementary to a target mRNA and a second strand that is complementary to the first strand, wherein the first and second strands form a double-stranded region of about 15 to about 40 base pairs; wherein at least one pyrimidine of the dsRNA is substituted with a pyrimidine nucleoside according to Formula I or II:

[chemical structure]

wherein

[0293] R¹ and R² are each independently a —H, —OH, —OCH₃, —OCH₂OCH₂CH₃, —OCH₂CH₂OCH₃, halogen, substituted or unsubstituted C₁-C₁₀ alkyl, alkoxy, alkoxyalkyl, hydroxyalkyl, carboxyalkyl, alkylsulfonylamino, aminoalkyl, dialkylamino, alkylaminoalkyl, dialkylaminoalkyl, haloalkyl, trifluoromethyl, cycloalkyl, (cycloalkyl)alkyl, substituted or unsubstituted C₂-C₁₀ alkenyl, substituted or unsubstituted —O-allyl, —O—CH₂CH═CH₂, —O—CH═CHCH₃, substituted or unsubstituted C₂-C₁₀ alkynyl, carbamoyl, carbamyl, carboxy, carbonylamino, substituted or unsubstituted aryl, substituted or unsubstituted aralkyl, —NH₂, —NO₂, —C≡N, or heterocyclo group;

[0294] R³ and R⁴ are each independently a hydroxyl, a protected hydroxyl, or an internucleoside linking group; and

[0295] R⁵ and R⁸ are each independently O or S.

[0296] In certain embodiments, at least one nucleoside is according to Formula I in which R¹ is methyl and R² is —OH, or R¹ is methyl, R² is —OH, and R⁸ is S. In other embodiments, the internucleoside linking group covalently links from about 2 to about 40 nucleosides.

[0297] In certain embodiments, the first and one or more second strands of a dsRNA, which decreases expression of a target gene by RNAi and has at least one pyrimidine substituted with a pyrimidine nucleoside according to Formula I or II, can anneal or hybridize together (i.e., due to complementarity between the strands) to form at least one double-stranded region having a length or a combined length of about 15 to about 40 base pairs. In some embodiments, the dsRNA has at least one double-stranded region ranging in length from about 4 base pairs to about 10 base pairs or about 5 to about 13 base pairs or about 15 to about 25 base pairs or about 19 to about 23 base pairs. In other embodiments, the dsRNA has at least one double-stranded region ranging in length from about 26 to about 40 base pairs or about 27 to about 30 base pairs or about 30 to about 35 base pairs. In certain embodiments, the dsRNA molecule or analog thereof has an overhang of one to four nucleotides on one or both 3′-ends, such as an overhang comprising a deoxyribonucleotide or two deoxyribonucleotides (e.g., thymidine). In some embodiments, dsRNA molecule or analog thereof has a blunt end at one or both ends of the dsRNA. In certain embodiments, the 5′-end of the first or second strand is phosphorylated.

[0298] In certain embodiments, at least one R¹ is a C₁-C₅ alkyl, such as methyl or ethyl. Within other exemplary embodiments of this disclosure, compounds of Formula I are a 5-alkyluridine (i.e., R¹ is alkyl, R² is —OH, and R³, R⁴, and R⁵ are as defined herein) or compounds of Formula II are a 5-alkylcytidine (i.e., R¹ is alkyl, R² is —OH, and R³, R⁴, and R⁵ are as defined herein). In related embodiments, the 5-alkyluridine is a 5-methyluridine (also referred to as ribothymidine or T^{r}—i.e., R¹ is methyl and R² is —OH), and the 5-alkylcytidine is a 5-methylcytidine. In other embodiments, at least one, at least three, or all uridines of the first strand of the dsRNA are replaced with 5-methyluridine, or at least one, at least three, or all uridines of the second strand of the dsRNA are replaced with 5-methyluridine, or any combination thereof (e.g., such changes are made on more than one strand).

[0299] In certain embodiments, at least one pyrimidine nucleoside of Formula I or Formula II has an R⁵ that is S or R⁸ that is S. In further embodiments, at least one pyrimidine nucleoside of the dsRNA is a locked nucleic acid (LNA) in the form of a bicyclic sugar, wherein R² is oxygen, and the 2′-O and 4′-C form an oxymethylene bridge on the same ribose ring. In a related embodiment, the LNA comprises a base substitution, such as a 5-methyluridine LNA or 2-thio-5-methyluridine LNA. In other embodiments, at least one, at least three, or all uridines of the first strand of the dsRNA are replaced with 5-methyluridine or 2-thioribothymidine or 5-methyluridine LNA or 2-thio-5-methyluridine LNA, or at least one, at least three, or all uridines of the second strand of the dsRNA are replaced with 5-methyluridine, 2-thioribothymidine, 5-methyluridine LNA, 2-thio-5-methyluridine LNA, or any combination thereof (e.g., such changes are made on both strands, or some substitutions include 5-methyluridine only, 2-thioribothymidine only, 5-methyluridine LNA only, 2-thio-5-methyluridine LNA only, or one or more 5-methyluridine or 2-thioribothymidine with one or more 5-methyluridine LNA or 2-thio-5-methyluridine LNA).

[0300] In further embodiments, a ribose of the pyrimidine nucleoside or the internucleoside linkage can be optionally modified. For example, compounds of Formula I or II are provided wherein R² is alkoxy, such as a 2′-O-methyl substitution (e.g., which may be in addition to a 5-alkyluridine or a 5-alkylcytidine, respectively). In certain embodiments, R² is selected from 2′-O—(C₁-C₅) alkyl, 2′-O-methyl, 2′-OCH₂OCH₂CH₃, 2′-OCH₂CH₂OCH₃, 2′-O-allyl, or 2′-fluoro.

[0301] In further embodiments, one or more of the pyrimidine nucleosides are according to Formula I in which R¹ is methyl and R² is a 2′-O—(C₁-C₅) alkyl (e.g., 2′-O-methyl), or in which R¹ is methyl, R² is a 2′O—(C₁-C₅) alkyl (e.g., 2′O-methyl), and R² is S, or any combination thereof. In other embodiments, one or more, or at least two, pyrimidine nucleosides according to Formula I or II have an R² that is not —H or —OH and is incorporated at a 3′-end or 5′-end and not within the gap of one or more strands within the double-stranded region of the dsRNA molecule.

[0302] In further embodiments, a dsRNA molecule or analog thereof comprising a pyrimidine nucleoside according to Formula I or Formula II in which R² is not —H or —OH and an overhang, further comprises at least two of pyrimidine nucleosides that are incorporated either at a 3′-end or a 5′-end or both of one strand or two strands within the double-stranded region of the dsRNA molecule. In a related embodiment, at least one of the at least two pyrimidine nucleosides in which R² is not —H or —OH is located at a 3′-end or a 5′-end within the double-stranded region of at least one strand of the dsRNA molecule, and wherein at least one of the at least two pyrimidine nucleosides in which R² is not —H or —OH is located internally within a strand of the dsRNA molecule.

[0303] In still further embodiments, a dsRNA molecule or analog thereof that has an overhang has a first of the two or more pyrimidine nucleosides in which R² is not —H or —OH that is incorporated at a 5′-end within the double-stranded region of the sense strand of the dsRNA molecule and a second of the two or more pyrimidine nucleosides is incorporated at a 5′-end within the double-stranded region of the antisense strand of the dsRNA molecule. In any of these embodiments, one or more substituted or modified nucleotides can be a G clamp (e.g., a cytosine analog that forms an additional hydrogen bond to guanine, such as 9-(aminoethoxy)phenoxazine; see, e.g., Lin and Mateucci, 1998). In any of these embodiments, provided the one or more pyrimidine nucleosides are not within the gap.

[0304] In yet other embodiments, a dsRNA molecule or analog thereof of Formula I or II according to the instant disclosure that has an overhang that comprises four or more independent pyrimidine nucleosides or four or more independent pyrimidine nucleosides in which R² is not —H or —OH, wherein (a) a first pyrimidine nucleoside is incorporated into a 3′-end within the double-stranded region of the sense (second) strand of the dsRNA, (b) a second pyrimidine nucleoside is incorporated into a 5′-end within the double-stranded region of the sense (second) strand, (c) a third pyrimidine nucleoside is incorporated into a 3′-end within the double-stranded region of the antisense (first) strand of the dsRNA, and (d) a fourth pyrimidine nucleoside is incorporated into a 5′-end within the double-stranded region of the antisense (first) strand. In any of these embodiments, provided the one or more pyrimidine nucleosides are not within the gap.

[0305] In further embodiments, a dsRNA molecule or analog thereof comprising a pyrimidine nucleoside according to Formula I or Formula II in which R² is not —H or —OH and is blunt-ended, further comprises at least two of pyrimidine nucleosides that are incorporated either at a 3′-end or a 5′-end or both of one strand or two strands of the dsRNA molecule. In a related embodiment, at least one of the at least two pyrimidine nucleosides in which R² is not —H or —OH is located at a 3′-end or a 5′-end of at least one strand of the dsRNA molecule, and wherein at least one of the at least two pyrimidine nucleosides in which R² is not —H or —OH is located internally within a strand of the dsRNA molecule. In still further embodiments, a dsRNA molecule or analog thereof that is blunt-ended has a first of the two or more pyrimidine nucleosides in which R² is not —H or —OH that is incorporated at a 5′-end of the sense strand of the dsRNA molecule and a second of the two or more pyrimidine nucleosides is incorporated at a 5′-end of the antisense strand of the dsRNA molecule. In any of these embodiments, provided the one or more pyrimidine nucleosides are not within the gap.

[0306] In yet other embodiments, a dsRNA molecule comprising a pyrimidine nucleoside according to Formula I or Formula II and that is blunt-ended comprises four or more independent pyrimidine nucleosides or four or more independent pyrimidine nucleosides in which R² is not —H or —OH, wherein (a) a first pyrimidine nucleoside is incorporated into a 3′-end within the double-stranded region of the sense (second) strand of the dsRNA, (b) a second pyrimidine nucleoside is incorporated into a 5′-end within the double-stranded region of the sense (second) strand, (c) a third pyrimidine nucleoside is incorporated into a 3′-end within the double-stranded region of the antisense (first) strand of the dsRNA, and (d) a fourth pyrimidine nucleoside is incorporated into a 5′-end within the double-stranded region of the antisense (first) strand. In any of these embodiments, provided the one or more pyrimidine nucleosides are not within the gap.

[0307] In still further embodiments, a dsRNA molecule or analog thereof of Formula I or II according to the instant disclosure further comprises a terminal cap substituent on one or both ends of the first strand or second strand, such as an alkyl, abasic, deoxy abasic, glyceryl, dinucleotide, acyclic nucleotide, inverted deoxynucleotide moiety, or any combination thereof. In further embodiments, one or more internucleoside linkage can be optionally modified. For example, a dsRNA molecule or analog thereof of Formula I or II according to the instant disclosure wherein at least one internucleoside linkage is modified to a phosphorothioate, chiral phosphorothioate, phosphorodithioate, phosphotriester, aminoalkylphosphotriester, methyl phosphonate, alkyl phosphonate, 3′-alkylene phosphonate, 5′-alkylene phosphonate, chiral phosphonate, phosphonoacetate, thiophosphonoacetate, phosphinate, phosphoramidate, 3′-amino phosphoramidate, aminoalkylphosphoramidate, thionophosphoramidate, thionoalkylphosphonate, thionoalkylphosphotriester, selenophosphate, boranophosphate linkage, or any combination thereof.

[0308] In still another embodiment, a nicked or gapped dsRNA molecule (ndsRNA or gdsRNA, respectively) that decreases expression of a target gene by RNAi, comprising a first strand that is complementary to a target mRNA and two or more second strands that are complementary to the first strand, wherein the first and at least one of the second strands form a non-overlapping double-stranded region of about 5 to about 13 base pairs. Any of the substitutions or modifications described herein is contemplated within this embodiment as well.

[0309] In another exemplary of this disclosure, the dsRNAs comprise at least two or more substituted pyrimidine nucleosides can each be independently selected wherein R¹ comprises any chemical modification or substitution as contemplated herein, for example an alkyl (e.g., methyl), halogen, hydroxy, alkoxy, nitro, amino, trifluoromethyl, cycloalkyl, (cycloalkyl)alkyl, alkanoyl, alkanoyloxy, aryl, aroyl, aralkyl, nitrile, dialkylamino, alkenyl, alkynyl, hydroxyalkyl, aminoalkyl, alkylaminoalkyl, dialkylaminoalkyl, haloalkyl, carboxyalkyl, alkoxyalkyl, carboxy, carbonyl, alkanoylamino, carbamoyl, carbonylamino, alkylsulfonylamino, or heterocyclo group. When two or more modified ribonucleotides are present, each modified ribonucleotide can be independently modified to have the same, or different, modification or substitution at R¹ or R².

[0310] In other detailed embodiments, one or more substituted pyrimidine nucleosides according to Formula I or II can be located at any ribonucleotide position, or any combination of ribonucleotide positions, on either or both of the sense and antisense strands of a dsRNA molecule of this disclosure, including at one or more multiple terminal positions as noted above, or at any one or combination of multiple non-terminal (“internal”) positions. In this regard, each of the sense and antisense strands can incorporate about 1 to about 6 or more of the substituted pyrimidine nucleosides.

[0311] In certain embodiments, when two or more substituted pyrimidine nucleosides are incorporated within a dsRNA of this disclosure, at least one of the substituted pyrimidine nucleosides will be at a 3′- or 5′-end of one or both strands, and in certain embodiments at least one of the substituted pyrimidine nucleosides will be at a 5′-end of one or both strands. In other embodiments, the substituted pyrimidine nucleosides are located at a position corresponding to a position of a pyrimidine in an unmodified dsRNA that is constructed as a homologous sequence for targeting a cognate mRNA, as described herein.

[0312] In addition, the terminal structure of the dsRNAs of this disclosure may have a stem-loop structure in which ends of one side of the dsRNA molecule are connected by a linker nucleic acid, e.g., a linker RNA. The length of the double-stranded region (stem-loop portion) can be, for example, about 15 to about 49 bp, about 15 to about 35 bp, or about 21 to about 30 by long. Alternatively, the length of the double-stranded region that is a final transcription product of dsRNAs to be expressed in a target cell may be, for example, approximately about 15 to about 49 bp, about 15 to about 35 bp, or about 21 to about 30 by long. When linker segments are employed, there is no particular limitation in the length of the linker as long as it does not hinder pairing of the stem portion. For example, for stable pairing of the stem portion and suppression of recombination between DNAs coding for this portion, the linker portion may have a clover-leaf tRNA structure. Even if the linker has a length that would hinder pairing of the stem portion, it is possible, for example, to construct the linker portion to include introns so that the introns are excised during processing of a precursor RNA into mature RNA, thereby allowing pairing of the stem portion. In the case of a stem-loop dsRNA, either end (head or tail) of RNA with no loop structure may have a low molecular weight RNA. As described above, these low molecular weight RNAs may include a natural RNA molecule, such as tRNA, rRNA or viral RNA, or an artificial RNA molecule.

[0313] A dsRNA molecule may be comprised of a circular nucleic acid molecule, wherein the dsRNA is about 38 to about 70 nucleotides in length having from about 18 to about 23 base pairs (e.g., about 19 to about 21 bp) wherein the circular oligonucleotide forms a dumbbell shaped structure having about 19 base pairs and two loops. In certain embodiments, a circular dsRNA molecule contains two loop motifs wherein one or both loop portions of the dsRNA molecule is biodegradable. For example, a circular dsRNA molecule of this disclosure is designed such that degradation of the loop portions of the dsRNA molecule in vivo can generate a dsRNA molecule with 3′-terminal overhangs, such as 3′-terminal nucleotide overhangs comprising from about 1 to about 4 (unpaired) nucleotides.

[0314] Substituting or modifying nucleosides of a dsRNA according to this disclosure can result in increased resistance to enzymatic degradation, such as exonucleolytic degradation, including 5′-exonucleolytic or 3′-exonucleolytic degradation. As such, in some embodiments, the dsRNAs described herein will exhibit significant resistance to enzymatic degradation compared to a corresponding dsRNA having standard nucleotides, and will thereby possess greater stability, increased half-life, and greater bioavailability in physiological environments (e.g., when introduced into a eukaryotic target cell). In addition to increasing resistance of the substituted or modified dsRNAs to exonucleolytic degradation, the incorporation of one or more pyrimidine nucleosides according to Formula I or II will render dsRNAs more resistant to other enzymatic or chemical degradation processes and thus more stable and bioavailable than otherwise identical dsRNAs that do not include the substitutions or modifications. In related aspects of this disclosure, dsRNA substitutions or modifications described herein will often improve stability of a modified dsRNA for use within research, diagnostic and treatment methods wherein the modified dsRNA is contacted with a biological sample, for example, a mammalian cell, intracellular compartment, serum or other extracellular fluid, tissue, or other in vitro or in vivo physiological compartment or environment. In one embodiment, diagnosis is performed on an isolated biological sample. In another embodiment, the diagnostic method is performed in vitro. In a further embodiment, the diagnostic method is not performed (directly) on a human or animal body.

[0315] In addition to increasing stability of substituted or modified dsRNAs, incorporation of one or more pyrimidine nucleosides according to Formula I or II in a dsRNA designed for gene silencing can provide additional desired functional results, including increasing a melting point of a substituted or modified dsRNA compared to a corresponding unmodified dsRNA. In another aspect of this disclosure, certain substitutions or modifications of dsRNAs described herein can reduce “off-target effects” of the substituted or modified dsRNA molecules when they are contacted with a biological sample (e.g., when introduced into a target eukaryotic cell having specific, and non-specific mRNA species present as potential specific and non-specific targets). In yet another aspect of this disclosure, the dsRNA substitutions or modifications described herein can reduce interferon activation by the dsRNA molecule when the dsRNA is contacted with a biological sample, e.g., when introduced into a eukaryotic cell.

[0316] In further embodiments, dsRNAs of this disclosure can comprise one or more sense (second) strand that is homologous or corresponds to a sequence of a target gene and an antisense (first) strand that is complementary to the sense strand and a sequence of the target gene. In exemplary embodiments, at least one strand of the dsRNA incorporates one or more pyrimidines substituted according to Formula I or II (e.g., wherein the pyrimidine is one or more 5-methyluridines or 2-thioribothymidines, the ribose is modified to incorporate one or more 2′-O-methyl substitutions, or any combination thereof). These and other multiple substitutions or modifications according to Formula I or II can be introduced into one or more pyrimidines, or into any combination and up to all pyrimidines present in one or more strands of a dsRNA of the instant disclosure, so long as the dsRNA has or retains RNAi activity similar to or better than the activity of an unmodified dsRNA.

[0317] In any of the embodiments described herein, the dsRNA may include multiple modifications. For example, a dsRNA having at least one ribothymidine or 2′-O-methyl-5-methyluridine may further comprise at least one LNA, 2′-methoxy, 2′-fluoro, 2′-deoxy, phosphorothioate linkage, an inverted base terminal cap, or any combination thereof. In certain embodiments, a dsRNA will have from one to all ribothymidines and have up to 75% LNA. In other embodiments, a dsRNA will have from one to all ribothymidines and have up to 75% 2′-methoxy (e.g., not at the Argonaute cleavage site). In still other embodiments, a dsRNA will have from one to all ribothymidines and have up to 100% 2′-fluoro. In further embodiments, a dsRNA will have from one to all ribothymidines and have up to 75% 2′-deoxy. In further embodiments, a dsRNA will have up to 75% LNA and have up to 75% 2′-methoxy. In still other embodiments, a dsRNA will have up to 75% LNA and have up to 100% 2′-fluoro. In further embodiments, a dsRNA will have up to 75% LNA and have up to 75% 2′-deoxy. In other embodiments, a dsRNA will have up to 75% 2′-methoxy and have up to 100% 2′-fluoro. In more embodiments, a dsRNA will have up to 75% 2′-methoxy and have up to 75% 2′-deoxy. In further embodiments, a dsRNA will have up to 100% 2′-fluoro and have up to 75% 2′-deoxy.

[0318] In further multiple modification embodiments, a dsRNA will have from one to all ribothymidines, up to 75% LNA, and up to 75% 2′-methoxy. In still further embodiments, a dsRNA will have from one to all ribothymidines, up to 75% LNA, and up to 100% 2′-fluoro. In further embodiments, a dsRNA will have from one to all ribothymidines, up to 75% LNA, and up to about 75% 2′-deoxy. In further embodiments, a dsRNA will have from one to all ribothymidines, up to 75% 2′-methoxy, and up to 75% 2′-fluoro. In further embodiments, a dsRNA will have from one to all ribothymidines, up to 75% 2′-methoxy, and up to 75% 2′-deoxy. In further embodiments, a dsRNA will have from one to all ribothymidines, up to 100% 2′-fluoro, and up to 75% 2′-deoxy. In yet further embodiments, a dsRNA will have from one to all ribothymidines, up to 75% LNA substitutions, up to 75% 2′-methoxy, up to 100% 2′-fluoro, and up to 75% 2′-deoxy. In other embodiments, a dsRNA will have up to 75% LNA, up to 75% 2′-methoxy, and up to 100% 2′-fluoro. In further embodiments, a dsRNA will have up to 75% LNA, up to 75% 2′-methoxy, and up to about 75% 2′-deoxy. In further embodiments, a dsRNA will have up to 75% LNA, up to 100% 2′-fluoro, and up to 75% 2′-deoxy. In still further embodiments, a dsRNA will have up to 75% 2′-methoxy, up to 100% 2′-fluoro, and up to 75% 2′-deoxy.

[0319] In any of these exemplary methods for using multiply modified dsRNA, the dsRNA may further comprise up to 100% phosphorothioate internucleoside linkages, from one to ten or more inverted base terminal caps, or any combination thereof. Additionally, any of these dsRNA may have these multiple modifications on one strand, two strands, three strands, a plurality of strands, or all strands, or on the same or different nucleoside within a dsRNA molecule. Finally, in any of these multiple modification dsRNA, the dsRNA must have gene silencing activity.

[0320] Within certain aspects, the present disclosure provides dsRNA that decreases expression of a target gene by RNAi and compositions comprising one or more dsRNA, wherein at least one dsRNA comprises one or more universal-binding nucleotide(s) in the first, second or third position in the anti-codon of the antisense or sense strand of the dsRNA and wherein the dsRNA is capable of specifically binding to a target sequence, such as an RNA expressed by a target cell. In cases wherein the sequence of a target target RNA includes one or more single nucleotide substitutions, dsRNA comprising a universal-binding nucleotide retains its capacity to specifically bind a target RNA, thereby mediating gene silencing and, as a consequence, overcoming escape of the target gene from dsRNA-mediated gene silencing. Exemplary universal-binding nucleotides that may be suitably employed in the compositions and methods disclosed herein include inosine, 1-β-D-ribofuranosyl-5-nitroindole, or 1-β-D-ribofuranosyl-3-nitropyrrole.

[0321] In certain aspects, dsRNA disclosed herein can include between about 1 universal-binding nucleotide and about 10 universal-binding nucleotides. Within other aspects, the presently disclosed dsRNA may comprise a sense strand that is homologous to a sequence of a target gene and an antisense strand that is complementary to the sense strand, with the proviso that at least one nucleotide of the antisense or sense strand of the otherwise complementary dsRNA duplex has one or more universal-binding nucleotide.

[0322] In certain aspects, dsRNA disclosed herein comprises one or more hydroxymethyl modified nucleomonomer(s) (see chemical formulas below). Hereunder as one such example is an acyclic nucleomonomer, more preferably an acyclic monomer selected from the group consisting of monomers D, F, G, H, I, and J. Thus, the embodiments described in the first aspect with regards to hydroxymethyl modified nucleomonomers will apply for other embodiments relating to acyclic nucleomonomers.

[0323] As used herein, the terms “hydroxylmethyl substituted nucleomonomers”, “hydroxylmethyl substituted monomers”, “acyclic nucleomonomers”, “acyclic monomers”, “acyclic hydroxymethyl subsitituted nucleomoners”, “nucleobase analog monomers” may be used interchangeably throughout.

[chemical structure]

[chemical structure]

[0324] R, in the above structures, is selected from the group consisting of hydrogen, methyl group, C(1-10) alkyl, cholesterol, naturally or non-naturally occurring amino acid, sugar, vitamin, fluorophore, polyamine and fatty acid.

[0325] In certain aspects, a dsRNA having one or more hydroxymethyl modified nucleomonomer(s) has increased potency, reduced off-target effects, reduced immune stimulation, increased stability for storage, increased stability in biological media like serum, increased duration of action and/or improved pharmacokinetic properties, all relative to the native unmodified form of the dsRNA.

[0326] In certain aspects, the antisense (guide strand) of a dsRNA comprises one or more hydroxymethyl modified nucleomonomer(s). In certain aspects, the antisense of a dsRNA comprises 1, 2, 3, 4, 5, 6, 7, 8, 9 or 10 hydroxymethyl modified nucleomonomer(s). In certain aspects, the entire antisense of a dsRNA comprises hydroxymethyl modified nucleomonomer(s). In certain aspects, a hydroxymethyl modified nucleomonomer in the antisense strand is present in positions 1, 2, 3, 4, 5, 6, 7, and/or 8 wherein the positions are counted from the 5′-end of the antisense strand. In certain aspects, a hydroxymethyl modified nucleomonomer in the antisense strand is present in positions 3, 4, 5, 6, 7, and/or 8 wherein the positions are counted from the 5′-end of the antisense strand. In certain aspects, a hydroxymethyl modified nucleomonomer in the antisense strand is present in positions 7 and/or 8 wherein the positions are counted from the 5′-end of the antisense strand.

[0327] In certain aspects, a hydroxymethyl modified nucleomonomer in the antisense strand is present in positions 9, 10, 11, 12, 13, 14, 15, and/or 16 wherein the positions are counted from the 5′-end of the antisense strand. In certain aspects, a hydroxymethyl modified nucleomonomer in the antisense strand is present in positions 9, 10, and/or 11, wherein the positions are counted from the 5′-end of the antisense strand. In certain aspects, a hydroxymethyl modified nucleomonomer in the antisense strand is present in positions 1, 2, 3, 4, 5, 6, 7, 8, 9, 10, 11, 12, 13, 14, 15, 16, and/or 17, wherein the positions are counted from the 5′-end of the antisense strand. In certain aspects, a hydroxymethyl modified nucleomonomer in the antisense strand is present in positions 1, 2, 3, 4, 5, 6, 7, 8, 9 and/or 10, wherein the positions are counted from the 3′-end of the antisense strand.

[0328] In certain aspects, the sense (passenger strand) of a dsRNA comprises one or more hydroxymethyl modified nucleomonomer(s). In certain aspects, the sense (passenger strand) of a dsRNA comprises 1, 2, 3, 4, 5, 6, 7, 8, 9 or 10 hydroxymethyl modified nucleomonomer(s). In certain aspects, the entire sense (passenger strand) of a dsRNA comprises hydroxymethyl modified nucleomonomer(s). In certain aspects, a hydroxymethyl modified nucleomonomer in the sense strand is present in positions 1, 2, 3, 4, 5, 6, 7, and/or 8 wherein the positions are counted from the 5′-end of the sense strand. In certain aspects, a hydroxymethyl modified nucleomonomer in the sense strand is present in positions 3, 4, 5, 6, 7, and/or 8 wherein the positions are counted from the 5′-end of the sense strand. In certain aspects, a hydroxymethyl modified nucleomonomer in the sense strand is present in positions 7 and/or 8 wherein the positions are counted from the 5′-end of the sense strand. In certain aspects, a hydroxymethyl modified nucleomonomer in the sense strand is present in positions 9, 10, 11, 12, 13, 14, 15, and/or 16 wherein the positions are counted from the 5′-end of the sense strand. In certain aspects, a hydroxymethyl modified nucleomonomer in the sense strand is present in positions 9, 10, and/or 11, wherein the positions are counted from the 5′-end of the sense strand.). In certain aspects, a hydroxymethyl modified nucleomonomer in the sense strand is present in positions 19, 20, 21, 22, 23, 24, 25, 26, 27, 28, 29, 30, 31 and/or 32 wherein the positions are counted from the 5′-end of the sense strand. In certain aspects, a hydroxymethyl modified nucleomonomer in the sense strand is present in positions 1, 2, 3, 4, 5, 6, 7, 8, 9 and/or 10, wherein the positions are counted from the 3′-end of the sense strand.

[0329] In certain aspects, the first, second, and/or third strands of an mdRNA having a nick or gap comprises one or more hydroxymethyl modified nucleomonomer(s). In certain aspects, the first, second, and/or third strands of an mdRNA comprises 1, 2, 3, 4, 5, 6, 7, 8, 9 or 10 hydroxymethyl modified nucleomonomer(s). In certain aspects, the entire first strand of an mdRNA comprises hydroxymethyl modified nucleomonomer(s). In certain aspects, a hydroxymethyl modified nucleomonomer in the first strand is present in positions 1, 2, 3, 4, 5, 6, 7, and/or 8 wherein the positions are counted from the 5′-end of the first strand strand. In certain aspects, a hydroxymethyl modified nucleomonomer in the first strand is present in positions 9, 10, 11, 12, 13, 14, 15, and/or 16 wherein the positions are counted from the 5′-end of the first strand.

[0330] In certain aspects, the dsRNA has at least one blunt end having one or more a hydroxymethyl modified nucleomonomer(s) covalently linked to the blunt end. In certain aspects, the dsRNA has two blunt ends each having one or more a hydroxymethyl modified nucleomonomer(s) covalently linked to each blunt end. In certain aspects, a blunt end has 1, 2, 3, 4, 5, 6, 7, 8 or more hydroxymethyl modified nucleomonomers covalently linked to the blunt end. In certain aspects, a blunt end has two hydroxymethyl modified nucleomonomers covalently linked to the blunt end. In certain aspects, the one or more a hydroxymethyl modified nucleomonomer(s) are covalently linked to the 5′-end of the antisense strand. In certain aspects, the one or more a hydroxymethyl modified nucleomonomer(s) are covalently linked to the 3′-end of the antisense strand. In certain aspects, the one or more a hydroxymethyl modified nucleomonomer(s) are covalently linked to the 5′-end and the 3′-end of the antisense strand. In certain aspects, the one or more a hydroxymethyl modified nucleomonomer(s) are covalently linked to the 5′-end of the sense strand. In certain aspects, the one or more a hydroxymethyl modified nucleomonomer(s) are covalently linked to the 3′-end of the sense strand. In certain aspects, the one or more a hydroxymethyl modified nucleomonomer(s) are covalently linked to the 5′-end and the 3′-end of the sense strand. In certain aspects, the one or more a hydroxymethyl modified nucleomonomer(s) are covalently linked to the 3′-end of the sense strand and the 3′-end of the antisense strand. In certain aspects, the one or more a hydroxymethyl modified nucleomonomer(s) are covalently linked to the 5′-end of the sense strand and the 5′-end of the antisense strand. In certain aspects, the one or more a hydroxymethyl modified nucleomonomer(s) are covalently linked to the 3′-end of the sense strand and the 5′-end of the antisense strand. In certain aspects, the one or more a hydroxymethyl modified nucleomonomer(s) are covalently linked to the 5′-end of the sense strand and the 3′-end of the antisense strand.

[0331] In certain aspects, the mdRNA has at least one blunt end having one or more a hydroxymethyl modified nucleomonomer(s) covalently linked to the blunt end. In certain aspects, the mdRNA has two blunt ends each having one or more a hydroxymethyl modified nucleomonomer(s) covalently linked to each blunt end. In certain aspects, a blunt end has 1, 2, 3, 4, 5, 6, 7, 8 or more hydroxymethyl modified nucleomonomers covalently linked to the blunt end. In certain aspects, a blunt end has two hydroxymethyl modified nucleomonomers covalently linked to the blunt end. In certain aspects, the one or more a hydroxymethyl modified nucleomonomer(s) are covalently linked to the 5′-end of the antisense strand. In certain aspects, the one or more a hydroxymethyl modified nucleomonomer(s) are covalently linked to the 3′-end of the antisense strand. In certain aspects, the one or more a hydroxymethyl modified nucleomonomer(s) are covalently linked to the 5′-end and the 3′-end of the antisense strand. In certain aspects, the one or more a hydroxymethyl modified nucleomonomer(s) are covalently linked to the 5′-end of one or both of the sense strands of an mdRNA. In certain aspects, the one or more a hydroxymethyl modified nucleomonomer(s) are covalently linked to the 3′-end of one or both of the sense strands of an mdRNA. In certain aspects, the one or more a hydroxymethyl modified nucleomonomer(s) are covalently linked to the 5′-end and the 3′-end of one or both of the sense strands of an mdRNA. In certain aspects, the one or more a hydroxymethyl modified nucleomonomer(s) are covalently linked to the 3′-end of one or both of the sense strands, and the 3′-end of the antisense strand of an mdRNA. In certain aspects, the one or more a hydroxymethyl modified nucleomonomer(s) are covalently linked to the 5′-end of one or both of the sense strands, and the 5′-end of the antisense strand of an mdRNA. In certain aspects, the one or more a hydroxymethyl modified nucleomonomer(s) are covalently linked to the 3′-end of one or both of the sense strands, and the 5′-end of the antisense strand of the mdRNA. In certain aspects, the one or more a hydroxymethyl modified nucleomonomer(s) are covalently linked to the 5′-end of one or both of the sense strands, and the 3′-end of the antisense strand of an mdRNA.

[0332] In certain aspects, the dsRNA comprises hydroxymethyl substituted monomers at one or more position(s) that prevent and/or reduce dicer enzyme processing of the dsRNA compared to an unmodified form of the dsRNA.

[0333] In certain aspects, the dsRNA comprises hydroxymethyl substituted monomers at one or more position(s) that prevent and/or reduce cytokine induction by the dsRNA compared to an unmodified form of the dsRNA.

[0334] In certain aspects, the dsRNA comprises hydroxymethyl substituted monomers at one or more position(s) that improves and/or enhances the potency or target message knockdown activity of the dsRNA compared to an unmodified form of the dsRNA.

[0335] In certain aspects, the dsRNA comprises hydroxymethyl substituted monomers at one or more position(s) that prevent and/or reduce off-target effect by the dsRNA compared to an unmodified form of the dsRNA.

[0336] In certain aspects, the dsRNA comprises hydroxymethyl substituted monomers at one or more position(s) that improves and/or enhances the stability of the dsRNA in serum compared to an unmodified form of the dsRNA.

[0337] The contents of PCT patent application PCT/US2008/064417, for example FIG. 1, are hereby incorporated by reference in its entirety. Monomers disclosed in PCT/US2008/064417, for example FIG. 1, may be used in combination the dsRNA molecules disclosed herein and used in combination with any modification disclosed herein. Examples monomers include the following:

[chemical structure]

### Synthesis of Nucleic Acid Molecules

[0338] Exemplary molecules of the instant disclosure are recombinantly produced, chemically synthesized, or a combination thereof. Oligonucleotides (e.g., certain modified oligonucleotides or portions of oligonucleotides lacking ribonucleotides) are synthesized using protocols known in the art, for example as described in Caruthers et al., Methods in Enzymol. 211:3-19, 1992; Thompson et al., PCT Publication No. WO 99/54459, Wincott et al., Nucleic Acids Res. 23:2677-2684, 1995; Wincott et al., Methods Mol. Bio. 74:59, 1997; Brennan et al., Biotechnol Bioeng. 61:33-45, 1998; and Brennan, U.S. Pat. No. 6,001,311. Synthesis of RNA, including certain dsRNA molecules and analogs thereof of this disclosure, can be made using the procedure as described in Usman et al., J. Am. Chem. Soc. 109:7845, 1987; Scaringe et al., Nucleic Acids Res. 18:5433, 1990; and Wincott et al., Nucleic Acids Res. 23:2677-2684, 1995; Wincott et al., Methods Mol. Bio. 74:59, 1997.

[0339] In certain embodiments, the nucleic acid molecules of the present disclosure can be synthesized separately and joined together post-synthetically, for example, by ligation (Moore et al., Science 256:9923, 1992; Draper et al., PCT Publication No. WO 93/23569; Shabarova et al., Nucleic Acids Res. 19:4247, 1991; Bellon et al., Nucleosides & Nucleotides 16:951, 1997; Bellon et al., Bioconjugate Chem. 8:204, 1997), or by hybridization following synthesis or deprotection.

[0340] In further embodiments, dsRNAs of this disclosure that decrease expression of a target gene by RNAi can be made as single or multiple transcription products expressed by a polynucleotide vector encoding one or more dsRNAs and directing their expression within host cells. In these embodiments the double-stranded portion of a final transcription product of the dsRNAs to be expressed within the target cell can be, for example, about 5 to about 40 bp, about 15 to about 24 bp, or about 25 to about 40 by long. Within exemplary embodiments, double-stranded portions of dsRNAs, in which two or more strands pair up, are not limited to completely paired nucleotide segments, and may contain non-pairing portions due to a mismatch (the corresponding nucleotides are not complementary), bulge (lacking in the corresponding complementary nucleotide on one strand), overhang, or the like. Non-pairing portions can be contained to the extent that they do not interfere with dsRNA formation and function. In certain embodiments, a “bulge” may comprise 1 to 2 non-pairing nucleotides, and the double-stranded region of dsRNAs in which two strands pair up may contain from about 1 to 7, or about 1 to 5 bulges. In addition, “mismatch” portions contained in the double-stranded region of dsRNAs may include from about 1 to 7, or about 1 to 5 mismatches. In other embodiments, the double-stranded region of dsRNAs of this disclosure may contain both bulge and mismatched portions in the approximate numerical ranges specified herein.

[0341] A dsRNA or analog thereof of this disclosure may be further comprised of a nucleotide, non-nucleotide, or mixed nucleotide/non-nucleotide linker that joins the sense region of the dsRNA to the antisense region of the dsRNA. In one embodiment, a nucleotide linker can be a linker of more than about 2 nucleotides length up to about 10 nucleotides in length. In another embodiment, the nucleotide linker can be a nucleic acid aptamer. By “aptamer” or “nucleic acid aptamer” as used herein is meant a nucleic acid molecule that binds specifically to a target molecule wherein the nucleic acid molecule has sequence that comprises a sequence recognized by the target molecule in its natural setting. Alternately, an aptamer can be a nucleic acid molecule that binds to a target molecule wherein the target molecule does not naturally bind to a nucleic acid. The target molecule can be any molecule of interest. For example, the aptamer can be used to bind to a ligand-binding domain of a protein, thereby preventing interaction of the naturally occurring ligand with the protein. This is a non-limiting example and those in the art will recognize that other embodiments can be readily generated using techniques generally known in the art (see, e.g., Gold et al., Annu. Rev. Biochem. 64:763, 1995; Brody and Gold, J. Biotechnol. 74:5, 2000; Sun, Curr. Opin. Mol. Ther. 2:100, 2000; Kusser, J. Biotechnol. 74:27, 2000; Hermann and Patel, Science 287:820, 2000; and Jayasena, Clinical Chem. 45:1628, 1999).

[0342] A non-nucleotide linker may be comprised of an abasic nucleotide, polyether, polyamine, polyamide, peptide, carbohydrate, lipid, polyhydrocarbon, or other polymeric compounds (e.g., polyethylene glycols such as those having between 2 and 100 ethylene glycol units). Specific examples include those described by Seela and Kaiser, Nucleic Acids Res. 18:6353, 1990, and Nucleic Acids Res. 15:3113, 1987; Cload and Schepartz, J. Am. Chem. Soc. 113:6324, 1991; Richardson and Schepartz, J. Am. Chem. Soc. 113:5109, 1991; Ma et al., Nucleic Acids Res. 21:2585, 1993, and Biochemistry 32:1751, 1993; Durand et al., Nucleic Acids Res. 18:6353, 1990; McCurdy et al., Nucleosides & Nucleotides 10:287, 1991; Jaschke et al., Tetrahedron Lett. 34:301, 1993; Ono et al., Biochemistry 30:9914, 1991; Arnold et al., PCT Publication No. WO 89/02439; Usman et al., PCT Publication No. WO 95/06731; Dudycz et al., PCT Publication No. WO 95/11910 and Ferentz and Verdine, J. Am. Chem. Soc. 113:4000, 1991. The synthesis of a dsRNA molecule of this disclosure, which can be further modified, comprises: (a) synthesis of a first (antisense) strand and synthesis of a second (sense) strand and a third (sense) strand that are each complementary to non-overlapping regions of the first strand; and (b) annealing the first, second and third strands together under conditions suitable to obtain a dsRNA molecule. In another embodiment, synthesis of the first, second and thirdstrands of a dsRNA molecule is by solid phase oligonucleotide synthesis. In yet another embodiment, synthesis of the first, second, and third strands of a dsRNA molecule is by solid phase tandem oligonucleotide synthesis.

[0343] Chemically synthesizing nucleic acid molecules with substitutions or modifications (base, sugar, phosphate, or any combination thereof) can prevent their degradation by serum ribonucleases, which may lead to increased potency. See, e.g., Eckstein et al., PCT Publication No. WO 92/07065; Perrault et al., Nature 344:565, 1990; Pieken et al., Science 253:314, 1991; Usman and Cedergren, Trends in Biochem. Sci. 17:334, 1992; Usman et al., Nucleic Acids Symp. Ser. 31:163, 1994; Beigelman et al., J. Biol. Chem. 270:25702, 1995; Burgin et al., Biochemistry 35:14090, 1996; Burlina et al., Bioorg. Med. Chem. 5:1999, 1997; Thompson et al., Karpeisky et al., Tetrahedron Lett. 39:1131, 1998; Earnshaw and Gait, Biopolymers (Nucleic Acid Sciences) 48:39-55, 1998; Verma and Eckstein, Annu. Rev. Biochem. 67:99-134, 1998; Herdewijn, Antisense Nucleic Acid Drug Dev. 10:297, 2000; Kurreck, Eur. J. Biochem. 270:1628, 2003; Dorsett and Tuschl, Nature Rev. Drug Discov. 3:318, 2004; PCT Publication Nos. WO 91/03162; WO 93/15187; WO 97/26270; WO 98/13526; U.S. Pat. Nos. 5,334,711; 5,627,053; 5,716,824; 5,767,264; 6,300,074. Each of the above references discloses various substitutions and chemical modifications to the base, phosphate, or sugar moieties of nucleic acid molecules, which can be used in the dsRNAs described herein. For example, oligonucleotides can be modified at the sugar moiety to enhance stability or prolong biological activity by increasing nuclease resistance. Representative sugar modifications include 2′-amino, 2′-C-allyl, 2′-fluoro, 2′-O-methyl, 2′-O-allyl, or 2′-H. Other modifications to enhance stability or prolong biological activity can be internucleoside linkages, such as phosphorothioate, or base-modifications, such as locked nucleic acids (see, e.g., U.S. Pat. Nos. 6,670,461; 6,794,499; 6,268,490), or 5-methyluridine or 2′-O-methyl-5-methyluridine in place of uridine (see, e.g., U.S. Patent Application Publication No. 2006/0142230). Hence, dsRNA molecules of the instant disclosure can be modified to increase nuclease resistance or duplex stability while substantially retaining or having enhanced RNAi activity as compared to unmodified dsRNA.

[0344] In one embodiment, this disclosure features substituted or modified dsRNA molecules, such as phosphate backbone modifications comprising one or more phosphorothioate, phosphorodithioate, methylphosphonate, phosphotriester, morpholino, amidate carbamate, carboxymethyl, acetamidate, polyamide, sulfonate, sulfonamide, sulfamate, formacetal, thioformacetal, or alkylsilyl substitutions. For a review of oligonucleotide backbone modifications, see Hunziker and Leumann, Nucleic Acid Analogues: Synthesis and Properties, in Modern Synthetic Methods, VCH, 331-417, 1995; and Mesmaeker et al., ACS, 24-39, 1994.

[0345] In another embodiment, a conjugate molecule can be optionally attached to a dsRNA or analog thereof that decreases expression of a target gene by RNAi. For example, such conjugate molecules may be polyethylene glycol, human serum albumin, polyarginine, Gln-Asn polymer, or a ligand for a cellular receptor that can, for example, mediate cellular uptake (e.g., HIV TAT, see Vocero-Akbani et al., Nature Med. 5:23, 1999; see also U.S. Patent Application Publication No. 2004/0132161). Examples of specific conjugate molecules contemplated by the instant disclosure that can be attached to a dsRNA or analog thereof of this disclosure are described in Vargeese et al., U.S. Patent Application Publication No. 2003/0130186, and U.S. Patent Application Publication No. 2004/0110296. In another embodiment, a conjugate molecule is covalently attached to a dsRNA or analog thereof that decreases expression of a target gene by RNAi via a biodegradable linker. In certain embodiments, a conjugate molecule can be attached at the 3′-end of either the sense strand, the antisense strand, or both strands of a dsRNA molecule provided herein. In another embodiment, a conjugate molecule can be attached at the 5′-end of either the sense strand, the antisense strand, or both strands of the dsRNA or analog thereof. In yet another embodiment, a conjugate molecule is attached at both the 3′-end and 5′-end of either the sense strand, the antisense strand, or both strands of a dsRNA molecule, or any combination thereof. In further embodiments, a conjugate molecule of this disclosure comprises a molecule that facilitates delivery of a dsRNA or analog thereof into a biological system, such as a cell. A person of skill in the art can screen dsRNA of this disclosure having various conjugates to determine whether the dsRNA-conjugate possesses improved properties (e.g., pharmacokinetic profiles, bioavailability, stability) while maintaining the ability to mediate RNAi in, for example, an animal model as described herein or generally known in the art.

Methods for Selecting dsRNA Molecules Specific for a Target Gene

[0346] As indicated herein, the present disclosure also provides methods for selecting dsRNA and analogs thereof that are capable of specifically binding to a target gene (including a mRNA splice variant thereof) while being incapable of specifically binding or minimally binding to non-target genes (i.e, any nucleic acid sequence whose expression or activity is not to be altered). Thus, any of the target genes identified herein may be a non-target gene depending on what target gene(s) is identified for selecting dsRNAs capable of specifically binding to the target gene. The selection process disclosed herein is useful, for example, in eliminating dsRNAs analogs that are cytotoxic due to non-specific binding to, and subsequent degradation of, one or more non-target genes.

[0347] Methods of the present disclosure do not require a priori knowledge of the nucleotide sequence of every possible gene variant (including mRNA splice variants) targeted by the dsRNA or analog thereof. In one embodiment, the nucleotide sequence of the dsRNA is selected from a conserved region or consensus sequence of a target gene. In another embodiment, the nucleotide sequence of the dsRNA may be selectively or preferentially targeted to a certain sequence contained in an mRNA splice variant of a target gene.

[0348] In certain embodiments, methods are provided for selecting one or more dsRNA molecule that decreases expression of a target gene by RNAi, comprising a first strand that is complementary to a target mRNA and a second strand that is complementary to the first strand, wherein the first and second strands form a double-stranded region of about 15 to about 40 base pairs (see, e.g., target nucleotide sequences in the Sequence Listing identified herein), and wherein at least one uridine of the dsRNA molecule is replaced with a 5-methyluridine or 2-thioribothymidine or 2′-O-methyl-5-methyluridine, which methods employ “off-target” profiling whereby one or more dsRNA provided herein is contacted with a cell, either in vivo or in vitro, and total mRNA is collected for use in probing a microarray comprising oligonucleotides having one or more nucleotide sequence from a panel of known genes, including non-target genes (e.g., interferon). Within related embodiments, one or more dsRNA molecule that decreases expression of a target gene by RNAi may further comprise a third strand that is complementary to the first strand, wherein the first and third strands form a double-stranded region wherein the double-stranded region formed by the first and third strands is non-overlapping with a double-stranded region formed by the first and second strands. The “off-target” profile of the dsRNA provided herein is quantified by determining the number of non-target genes having reduced expression levels in the presence of the candidate dsRNAs. The existence of “off target” binding indicates a dsRNA is capable of specifically binding to one or more non-target gene messages. In certain embodiments, a dsRNA as provided herein (see, e.g., sequences in the Sequence Listing identified herein) applicable to therapeutic use will exhibit a greater stability, minimal interferon response, and little or no “off-target” binding.

[0349] Still further embodiments provide methods for selecting more efficacious dsRNA by using one or more reporter gene constructs comprising a constitutive promoter, such as a cytomegalovirus (CMV) or phosphoglycerate kinase (PGK) promoter, operably fused to, and capable of altering the expression of one or more reporter genes, such as a luciferase, chloramphenicol (CAT), or β-galactosidase, which, in turn, is operably fused in-frame with a dsRNA (such as one having a length between about 15 base-pairs and about 40 base-pairs or from about 5 nucleotides to about 24 nucleotides, or about 25 nucleotides to about 40 nucleotides) that contains a target sequence, as provided herein.

[0350] Individual reporter gene expression constructs may be co-transfected with one or more dsRNA or analog thereof. The capacity of a given dsRNA to reduce the expression level of target may be determined by comparing the measured reporter gene activity in cells transfected with or without a dsRNA molecule of interest.

[0351] Certain embodiments disclosed herein provide methods for selecting one or more modified dsRNA molecule(s) that employ the step of predicting the stability of a dsRNA duplex. In some embodiments, such a prediction is achieved by employing a theoretical melting curve wherein a higher theoretical melting curve indicates an increase in dsRNA duplex stability and a concomitant decrease in cytotoxic effects. Alternatively, stability of a dsRNA duplex may be determined empirically by measuring the hybridization of a single RNA analog strand as described herein to a complementary target gene within, for example, a polynucleotide array. The melting temperature (i.e., the Tₘ value) for each modified RNA and complementary RNA immobilized on the array can be determined and, from this Tₘ value, the relative stability of the modified RNA pairing with a complementary RNA molecule determined.

[0352] For example, Kawase et al. (Nucleic Acids Res. 14:7727, 1986) have described an analysis of the nucleotide-pairing properties of Di (inosine) to A, C, G, and T, which was achieved by measuring the hybridization of oligonucleotides (ODNs) with Di in various positions to complementary sets of ODNs made as an array. The relative strength of nucleotide-pairing is I-C>I-A>I-G≈I-T. Generally, Di containing duplexes showed lower Tₘ values when compared to the corresponding wild type (WT) nucleotide pair. The stabilization of Di by pairing was in order of Dc>Da>Dg>Dt>Du. As a person of skill in the art would understand, although universal-binding nucleotides are used herein as an example of determining duplex stability (i.e., the Tₘ value), other nucleotide substitutions (e.g., 5-methyluridine for uridine) or further modifications (e.g., a ribose modification at the 2′-position) can also be evaluated by these or similar methods.

[0353] In still further embodiments of the presently disclosed methods, one or more anti-codon within an antisense strand of a dsRNA molecule or analog thereof is substituted with a universal-binding nucleotide in a second or third position in the anti-codon of the antisense strand. By substituting a universal-binding nucleotide for a first or second position, the one or more first or second position nucleotide-pair substitution allows the substituted dsRNA molecule to specifically bind to mRNA wherein a first or a second position nucleotide-pair substitution has occurred, wherein the one or more nucleotide-pair substitution results in an amino acid change in the corresponding gene product.

[0354] Any of these methods of identifying dsRNA of interest can also be used to examine a dsRNA that decreases expression of a target gene by RNA interference, comprising a first strand that is complementary to a target T mRNA and a second and third strand that have non-overlapping complementarity to the first strand, wherein the first and at least one of the second or third strand form a double-stranded region of about 5 to about 13 base pairs; wherein at least one pyrimidine of the dsRNA comprises a pyrimidine nucleoside according to Formula I or II:

[chemical structure]

wherein

[0355] R¹ and R² are each independently a —H, —OH, —OCH₃, —OCH₂OCH₂CH₃, —OCH₂CH₂OCH₃, halogen, substituted or unsubstituted C₁-C₁₀ alkyl, alkoxy, alkoxyalkyl, hydroxyalkyl, carboxyalkyl, alkylsulfonylamino, aminoalkyl, dialkylamino, alkylaminoalkyl, dialkylaminoalkyl, haloalkyl, trifluoromethyl, cycloalkyl, (cycloalkyl)alkyl, substituted or unsubstituted C₂-C₁₀ alkenyl, substituted or unsubstituted —O-allyl, —O—CH₂CH═CH₂, —O—CH═CHCH₃, substituted or unsubstituted C₂-C₁₀ alkynyl, carbamoyl, carbamyl, carboxy, carbonylamino, substituted or unsubstituted aryl, substituted or unsubstituted aralkyl, —NH₂, —NO₂, —C≡N, or heterocyclo group;

[0356] R³ and R⁴ are each independently a hydroxyl, a protected hydroxyl, or an internucleoside linking group; and

[0357] R⁵ and R⁸ are independently O or S.

[0358] In certain embodiments, at least one nucleoside is according to Formula I in which R¹ is methyl and R² is —OH, or R¹ is methyl, R² is —OH, and R⁸ is S. In certain embodiments, at least one nucleoside is according to Formula I in which R¹ is methyl and R² is —O-methyl, or R¹ is methyl, R² is —O-methyl, and R⁸ is O. In other embodiments, the internucleoside linking group covalently links from about 5 to about 40 nucleosides.

### Compositions and Methods of Use

[0359] As set forth herein, dsRNA of the instant disclosure are designed to target a target gene (including one or more mRNA splice variant thereof) that is expressed at an elevated level or continues to be expressed when it should not, and is a causal or contributing factor associated with, for example, atherosclerosis, diabetes mellitus, and cerebrovascular disease, state, or adverse condition. In this context, a dsRNA or analog thereof of this disclosure will effectively downregulate expression of a target gene to levels that prevent, alleviate, or reduce the severity or recurrence of one or more associated disease symptoms. Alternatively, for various distinct disease models in which expression of a target gene is not necessarily elevated as a consequence or sequel of disease or other adverse condition, down regulation of a target gene will nonetheless result in a therapeutic result by lowering gene expression (i.e., to reduce levels of a selected mRNA or protein product of a target gene). Furthermore, dsRNAs of this disclosure may be targeted to lower expression of target, which can result in upregulation of a “downstream” gene whose expression is negatively regulated, directly or indirectly, by a target protein. The dsRNA molecules of the instant disclosure comprise useful reagents and can be used in methods for a variety of therapeutic, diagnostic, target validation, genomic discovery, genetic engineering, and pharmacogenomic applications.

[0360] In certain embodiments, aqueous suspensions contain dsRNA of this disclosure in admixture with suitable excipients, such as suspending agents or dispersing or wetting agents. Exemplary suspending agents include sodium carboxymethylcellulose, methylcellulose, hydropropyl-methylcellulose, sodium alginate, polyvinylpyrrolidone, gum tragacanth and gum acacia. Representative dispersing or wetting agents include naturally-occurring phosphatides (e.g., lecithin), condensation products of an alkylene oxide with fatty acids (e.g., polyoxyethylene stearate), condensation products of ethylene oxide with long chain aliphatic alcohols (e.g., heptadecaethyleneoxycetanol), condensation products of ethylene oxide with partial esters derived from fatty acids and hexitol (e.g., polyoxyethylene sorbitol monooleate), or condensation products of ethylene oxide with partial esters derived from fatty acids and hexitol anhydrides (e.g., polyethylene sorbitan monooleate). In certain embodiments, the aqueous suspensions can optionally contain one or more preservatives (e.g., ethyl or n-propyl-p-hydroxybenzoate), one or more coloring agents, one or more flavoring agents, or one or more sweetening agents (e.g., sucrose, saccharin). In additional embodiments, dispersible powders and granules suitable for preparation of an aqueous suspension by the addition of water provide dsRNA of this disclosure in admixture with a dispersing or wetting agent, suspending agent and optionally one or more preservative, coloring agent, flavoring agent, or sweetening agent.

[0361] The present disclosure includes dsRNA compositions prepared for storage or administration that include a pharmaceutically effective amount of a desired compound in a pharmaceutically acceptable carrier or diluent. Acceptable carriers or diluents for therapeutic use are well known in the pharmaceutical art, and are described, for example, in Remington's Pharmaceutical Sciences, Mack Publishing Co., A. R. Gennaro edit., 1985, hereby incorporated by reference herein. In certain embodiments, pharmaceutical compositions of this disclosure can optionally include preservatives, antioxidants, stabilizers, dyes, flavoring agents, or any combination thereof. Exemplary preservatives include sodium benzoate, sorbic acid, chlorobutanol, and esters of p-hydroxybenzoic acid.

[0362] The dsRNA compositions of the instant disclosure can be effectively employed as pharmaceutically-acceptable formulations. Pharmaceutically-acceptable formulations prevent, alter the occurrence or severity of, or treat (alleviate one or more symptom(s) to a detectable or measurable extent) of a disease state or other adverse condition in a subject. A pharmaceutically acceptable formulation includes salts of the above compounds, e.g., acid addition salts, such as salts of hydrochloric acid, hydrobromic acid, acetic acid, or benzene sulfonic acid. A pharmaceutical composition or formulation refers to a composition or formulation in a form suitable for administration into a cell, or a subject such as a human (e.g., systemic administration). The formulations of the present disclosure, having an amount of dsRNA sufficient to treat or prevent a disorder associated with target gene expression are, for example, suitable for topical (e.g., creams, ointments, skin patches, eye drops, ear drops) application or administration. Other routes of administration include oral, parenteral, sublingual, bladder wash-out, vaginal, rectal, enteric, suppository, nasal, and inhalation. The term parenteral, as used herein, includes subcutaneous, intravenous, intramuscular, intraarterial, intraabdominal, intraperitoneal, intraarticular, intraocular or retrobulbar, intraaural, intrathecal, intracavitary, intracelial, intraspinal, intrapulmonary or transpulmonary, intrasynovial, and intraurethral injection or infusion techniques. The pharmaceutical compositions of the present disclosure are formulated to allow the dsRNA contained therein to be bioavailable upon administration to a subject.

[0363] In further embodiments, dsRNA of this disclosure can be formulated as oily suspensions or emulsions (e.g., oil-in-water) by suspending dsRNA in, for example, a vegetable oil (e.g., arachis oil, olive oil, sesame oil or coconut oil) or a mineral oil (e.g., liquid paraffin). Suitable emulsifying agents can be naturally-occurring gums (e.g., gum acacia or gum tragacanth), naturally-occurring phosphatides (e.g., soy bean, lecithin, esters or partial esters derived from fatty acids and hexitol), anhydrides (e.g., sorbitan monooleate), or condensation products of partial esters with ethylene oxide (e.g., polyoxyethylene sorbitan monooleate). In certain embodiments, the oily suspensions or emulsions can optionally contain a thickening agent, such as beeswax, hard paraffin or acetyl alcohol. In related embodiments, sweetening agents and flavoring agents can optionally be added to provide palatable oral preparations. In yet other embodiments, these compositions can be preserved by optionally adding an anti-oxidant, such as ascorbic acid.

[0364] In further embodiments, dsRNA of this disclosure can be formulated as syrups and elixirs with sweetening agents (e.g., glycerol, propylene glycol, sorbitol, glucose or sucrose). Such formulations can also contain a demulcent, preservative, flavoring, coloring agent, or any combination thereof. In other embodiments, pharmaceutical compositions comprising dsRNA of this disclosure can be in the form of a sterile, injectable aqueous or oleaginous suspension. The sterile injectable preparation can also be a sterile, injectable solution or suspension in a non-toxic parenterally acceptable diluent or solvent (e.g., as a solution in 1,3-butanediol). Among the exemplary acceptable vehicles and solvents useful in the compositions of this disclosure is water, Ringer's solution, or isotonic sodium chloride solution. In addition, sterile, fixed oils may be employed as a solvent or suspending medium for the dsRNA of this disclosure. For this purpose, any bland fixed oil can be employed including synthetic mono- or diglycerides. In addition, fatty acids such as oleic acid find use in the preparation of parenteral formulations.

[0365] Within certain embodiments of this disclosure, pharmaceutical compositions and methods are provided that feature the presence or administration of one or more dsRNA or analogs thereof of this disclosure, combined, complexed, or conjugated with a polypeptide, optionally formulated with a pharmaceutically-acceptable carrier, such as a diluent, stabilizer, buffer, or the like. The negatively charged dsRNA molecules of this disclosure may be administered to a patient by any standard means, with or without stabilizers, buffers, or the like, to form a composition suitable for treatment. When it is desired to use a liposome delivery mechanism, standard protocols for formation of liposomes can be followed. The compositions of the present disclosure may also be formulated and used as a tablet, capsule or elixir for oral administration, suppository for rectal administration, sterile solution, or suspension for injectable administration, either with or without other compounds known in the art. Thus, dsRNAs of the present disclosure may be administered in any form, such as nasally, transdermally, parenterally, or by local injection.

[0366] In accordance with this disclosure, dsRNA molecules (optionally substituted or modified or conjugated), compositions thereof, and methods for inhibiting expression of a target gene in a cell or organism are provided. In certain embodiments, this disclosure provides methods and dsRNA compositions for treating a subject, including a human cell, tissue or individual, having a disease or at risk of developing a disease caused by or associated with the expression of a target gene. In one embodiment, the method includes administering a dsRNA of this disclosure or a pharmaceutical composition containing the dsRNA to a cell or an organism, such as a mammal, such that expression of the target gene is silenced. Subjects (e.g., mammalian, human) amendable for treatment using the dsRNA molecules (optionally substituted or modified or conjugated), compositions thereof, and methods of the present disclosure include those suffering from one or more disease or condition mediated, at least in part, by overexpression or inappropriate expression of a target gene, or which are amenable to treatment by reducing expression of a target protein, including coronary artery disease (i.e., coronary heart disease, ischaemic heart disease), atherosclerosis, diabetes mellitus, dyslipidemia (e.g., hyperlipidemia), peripheral vascular and ischemic cerebrovascular disease, and risk of ischemic stroke (cerebral thrombosis and cerebral embolisms) and hemorrhagic stroke (cerebral hemorrhage and subarachnoid hemorrhage), cancer (e.g., lung cancer, heptacellular carcinoma, bladder cancer, and pancreatic cancer). Within exemplary embodiments, the compositions and methods of this disclosure are also useful as therapeutic tools to regulate expression of target to treat or prevent symptoms of, for example, the conditions listed herein.

[0367] In any of the methods disclosed herein there may be used with one or more dsRNA, or substituted or modified dsRNA, as described herein, comprising a first strand that is complementary to a human target mRNA and a second strand and a third strand that is each complementary to non-overlapping regions of the first strand, wherein the second strand and third strands can anneal with the first strand to form at least two double-stranded regions spaced apart by up to 10 nucleotides and thereby forming a gap between the second and third strands, and wherein the mdRNA molecule optionally includes at least one double-stranded region of 5 base pairs to 13 base pairs. In other embodiments, subjects can be effectively treated, prophylactically or therapeutically, by administering an effective amount of one or more dsRNA having a first strand that is complementary to a human target mRNA and a second strand and a third strand that is each complementary to non-overlapping regions of the first strand, wherein the second strand and third strands can anneal with the first strand to form at least two double-stranded regions spaced apart by up to 10 nucleotides and thereby forming a gap between the second and third strands, and wherein the mdRNA molecule optionally includes at least one double-stranded region of 5 base pairs to 13 base pairs and at least one pyrimidine of the mdRNA is substituted with a pyrimidine nucleoside according to Formula I or II:

[chemical structure]

wherein

[0368] R¹ and R² are each independently a —H, —OH, —OCH₃, —OCH₂OCH₂CH₃, —OCH₂CH₂OCH₃, halogen, substituted or unsubstituted C₁-C₁₀ alkyl, alkoxy, alkoxyalkyl, hydroxyalkyl, carboxyalkyl, alkylsulfonylamino, aminoalkyl, dialkylamino, alkylaminoalkyl, dialkylaminoalkyl, haloalkyl, trifluoromethyl, cycloalkyl, (cycloalkyl)alkyl, substituted or unsubstituted C₂-C₁₀ alkenyl, substituted or unsubstituted —O-allyl, —O—CH₂CH═CH₂, —O—CH═CHCH₃, substituted or unsubstituted C₂-C₁₀ alkynyl, carbamoyl, carbamyl, carboxy, carbonylamino, substituted or unsubstituted aryl, substituted or unsubstituted aralkyl, —NH₂, —NO₂, —C≡N, or heterocyclo group;

[0369] R³ and R⁴ are each independently a hydroxyl, a protected hydroxyl, or an internucleoside linking group; and

[0370] R⁵ and R⁸ are independently O or S.

[0371] In certain embodiments, at least one nucleoside is according to Formula I in which R¹ is methyl and R² is —OH, or R¹ is methyl, R² is —OH, and R⁸ is S. In other embodiments, the internucleoside linking group covalently links from about 5 to about 40 nucleosides.

[0372] In any of the methods described herein, the dsRNA used may include multiple modifications. For example, a dsRNA can have at least one 5-methyluridine, 2′-O-methyl-5-methyluridine, LNA, 2′-methoxy, 2′-fluoro, 2′-deoxy, phosphorothioate linkage, inverted base terminal cap, or any combination thereof. In certain exemplary methods, a dsRNA will have from one to all 5-methyluridines and have up to about 75% LNA.

[0373] In other exemplary methods, a dsRNA will have from one to all 5-methyluridines and have up to about 75% 2′-methoxy provided the 2′-methoxy are not at the Argonaute cleavage site. In still other exemplary methods, a dsRNA will have from one to all 5-methyluridines and have up to about 100% 2′-fluoro substitutions. In further exemplary methods, a dsRNA will have from one to all 5-methyluridines and have up to about 75% 2′-deoxy.

[0374] In further exemplary methods, a dsRNA will have up to about 75% LNA and have up to about 75% 2′-methoxy. In still other embodiments, a dsRNA will have up to about 75% LNA and have up to about 100% 2′-fluoro. In further exemplary methods, a dsRNA will have up to about 75% LNA and have up to about 75% 2′-deoxy. In further exemplary methods, a dsRNA will have up to about 75% 2′-methoxy and have up to about 100% 2′-fluoro. In further exemplary methods, a dsRNA will have up to about 75% 2′-methoxy and have up to about 75% 2′-deoxy. In further embodiments, a dsRNA will have up to about 100% 2′-fluoro and have up to about 75% 2′-deoxy.

[0375] In other exemplary methods for using multiply modified dsRNA, a dsRNA will have from one to all uridines substituted with 5-methyluridine, up to about 75% LNA, and up to about 75% 2′-methoxy. In still further exemplary methods, a dsRNA will have from one to all 5-methyluridines, up to about 75% LNA, and up to about 100% 2′-fluoro. In further exemplary methods, a dsRNA will have from one to all 5-methyluridines, up to about 75% LNA, and up to about 75% 2′-deoxy. In further exemplary methods, a dsRNA will have from one to all 5-methyluridines, up to about 75% 2′-methoxy, and up to about 75% 2′-fluoro. In further exemplary methods, a dsRNA will have from one to all 5-methyluridines, up to about 75% 2′-methoxy, and up to about 75% 2′-deoxy. In more exemplary methods, a dsRNA will have from one to all 5-methyluridines, up to about 100% 2′-fluoro, and up to about 75% 2′-deoxy. In yet other exemplary methods, a dsRNA will have from one to all 5-methyluridines, up to about 75% LNA, up to about 75% 2′-methoxy, up to about 100% 2′-fluoro, and up to about 75% 2′-deoxy. In other exemplary methods, a dsRNA will have up to about 75% LNA, up to about 75% 2′-methoxy, and up to about 100% 2′-fluoro. In further exemplary methods, a dsRNA will have up to about 75% LNA, up to about 75% 2′-methoxy, and up to about 75% 2′-deoxy. In more exemplary methods, a dsRNA will have up to about 75% LNA, up to about 100% 2′-fluoro, and up to about 75% 2′-deoxy. In still further exemplary methods, a dsRNA will have up to about 75% 2′-methoxy, up to about 100% 2′-fluoro, and up to about 75% 2′-deoxy.

[0376] In any of these exemplary methods for using multiply modified dsRNA, the dsRNA may further comprise up to 100% phosphorothioate internucleoside linkages, from one to ten or more inverted base terminal caps, or any combination thereof. Additionally, any of these dsRNA may have these multiple modifications on one strand, two strands, three strands, a plurality of strands, or all strands, or on the same or different nucleoside within a dsRNA molecule. Finally, in any of these multiple modification dsRNA, the dsRNA must have gene silencing activity.

[0377] In further embodiments, subjects can be effectively treated, prophylactically or therapeutically, by administering an effective amount of one or more dsRNA, or substituted or modified dsRNA as described herein, having a first strand that is complementary to a target mRNA and a second strand and a third strand that is each complementary to non-overlapping regions of the first strand, wherein the second strand and third strands can anneal with the first strand to form at least two double-stranded regions spaced apart by up to 10 nucleotides and thereby forming a gap between the second and third strands, and wherein the combined double-stranded regions total about 15 base pairs to about 40 base pairs and the mdRNA molecule optionally has blunt ends. In still further embodiments, methods disclosed herein there may be used with one or more dsRNA that comprises a first strand that is complementary to a target mRNA and a second strand and a third strand that is each complementary to non-overlapping regions of the first strand, wherein the second strand and third strands can anneal with the first strand to form at least two double-stranded regions spaced apart by up to 10 nucleotides and thereby forming a gap between the second and third strands, and wherein the mdRNA molecule optionally includes at least one double-stranded region of 5 base pairs to 13 base pairs, the mdRNA molecule optionally has blunt ends, and at least one pyrimidine of the mdRNA is substituted with a pyrimidine nucleoside according to Formula I or II:

[chemical structure]

wherein

[0378] R¹ and R² are each independently a —H, —OH, —OCH₃, —OCH₂OCH₂CH₃, —OCH₂CH₂OCH₃, halogen, substituted or unsubstituted C₁-C₁₀ alkyl, alkoxy, alkoxyalkyl, hydroxyalkyl, carboxyalkyl, alkylsulfonylamino, aminoalkyl, dialkylamino, alkylaminoalkyl, dialkylaminoalkyl, haloalkyl, trifluoromethyl, cycloalkyl, (cycloalkyl)alkyl, substituted or unsubstituted C₂-C₁₀ alkenyl, substituted or unsubstituted —O-allyl, —O—CH₂CH═CH₂, —O—CH═CHCH₃, substituted or unsubstituted C₂-C₁₀ alkynyl, carbamoyl, carbamyl, carboxy, carbonylamino, substituted or unsubstituted aryl, substituted or unsubstituted aralkyl, —NH₂, —NO₂, —C≡N, or heterocyclo group;

[0379] R³ and R⁴ are each independently a hydroxyl, a protected hydroxyl, or an internucleoside linking group; and

[0380] R⁵ and R⁸ are independently O or S.

[0381] In certain embodiments, at least one nucleoside is according to Formula I in which R¹ is methyl and R² is —OH, or R¹ is methyl, R² is —OH, and R⁸ is S.

[0382] In certain embodiments, at least one nucleoside is according to Formula I in which R¹ is methyl and R² is —O-methyl, or R¹ is methyl, R² is —O-methyl, and R⁸ is O. In other embodiments, the internucleoside linking group covalently links from about 5 to about 40 nucleosides.

[0383] Within additional aspects of this disclosure, combination formulations and methods are provided comprising an effective amount of one or more dsRNA of the present disclosure in combination with one or more secondary or adjunctive active agents that are formulated together or administered coordinately with the dsRNA of this disclosure to control a target gene-associated disease or condition. Useful adjunctive therapeutic agents in these combinatorial formulations and coordinate treatment methods include, for example, dsRNAs that target and decrease the expression of other genes whose abbarent expression is related to a disease or condition described herein (e.g., bladder cancer and/liver cancer), enzymatic nucleic acid molecules, allosteric nucleic acid molecules, antisense, decoy, or aptamer nucleic acid molecules, antibodies such as monoclonal antibodies, small molecules and other organic or inorganic compounds including metals, salts and ions, and other drugs and active agents indicated for treating a target gene-associated disease or condition, including chemotherapeutic agents used to treat cancer, steroids, non-steroidal anti-inflammatory drugs (NSAIDs), tyrosine kinase inhibitors, or the like.

[0384] Exemplary chemotherapeutic agents include alkylating agents (e.g., cisplatin, oxaliplatin, carboplatin, busulfan, nitrosoureas, nitrogen mustards, uramustine, temozolomide), antimetabolites (e.g., aminopterin, methotrexate, mercaptopurine, fluorouracil, cytarabine), taxanes (e.g., paclitaxel, docetaxel), anthracyclines (e.g., doxorubicin, daunorubicin, epirubicin, idaruicin, mitoxantrone, valrubicin), bleomycin, mytomycin, actinomycin, hydroxyurea, topoisomerase inhibitors (e.g., camptothecin, topotecan, irinotecan, etoposide, teniposide), monoclonal antibodies (e.g., alemtuzumab, bevacizumab, cetuximab, gemtuzumab, panitumumab, rituximab, tositumomab, trastuzumab), vinca alkaloids (e.g., vincristine, vinblastine, vindesine, vinorelbine), cyclophosphamide, prednisone, leucovorin, oxaliplatin.

[0385] Some adjunctive therapies may be directed at targets that interact or associate with the target gene or affect specific target gene biological activities. Adjunctive therapies include statins (e.g., rosuvastatin, lovastatin, atorvastatin, cerivastatin, fluvastatin, mevastatin, pitavastatin, pravastatin, simvastatin), bile acid-binding resins, stanol and sterol esters from plants, and inhibitors of cholesterol absorption, fibrates (e.g., fenofibrate, bezafibrate, ciprofibrate, clofibrate, gemfibrozil), niacin, fish-oils, ezetimibe, amlodipine, other lipid-altering agents, additional small molecules, rationally designed peptides, and antibodies or fragments thereof.

[0386] Genes may be targeted via the RNAi pathway by way of a dsRNA and used in combination with two or more dsRNAs of this disclosure

[0387] To practice the coordinate administration methods of this disclosure, a dsRNA is administered, simultaneously or sequentially, in a coordinated treatment protocol with one or more of the secondary or adjunctive therapeutic agents contemplated herein. The coordinate administration may be done in any order, and there may be a time period while only one or both (or all) active therapeutic agents, individually or collectively, exert their biological activities. A distinguishing aspect of all such coordinate treatment methods is that the dsRNA present in a composition elicits some favorable clinical response, which may or may not be in conjunction with a secondary clinical response provided by the secondary therapeutic agent. For example, the coordinate administration of the dsRNA with a secondary therapeutic agent as contemplated herein can yield an enhanced (synergistic) therapeutic response beyond the therapeutic response elicited by either or both the purified dsRNA or secondary therapeutic agent alone.

[0388] In another embodiment, a dsRNA of this disclosure can include a conjugate member on one or more of the terminal nucleotides of a dsRNA. The conjugate member can be, for example, a lipophile, a terpene, a protein binding agent, a vitamin, a carbohydrate, or a peptide. For example, the conjugate member can be naproxen, nitroindole (or another conjugate that contributes to stacking interactions), folate, ibuprofen, or a C5 pyrimidine linker. In other embodiments, the conjugate member is a glyceride lipid conjugate (e.g., a dialkyl glyceride derivatives), vitamin E conjugates, or thio-cholesterols. Additional conjugate members include peptides that function, when conjugated to a modified dsRNA of this disclosure, to facilitate delivery of the dsRNA into a target cell, or otherwise enhance delivery, stability, or activity of the dsRNA when contacted with a biological sample (e.g., a target cell expressing the target gene). Exemplary peptide conjugate members for use within these aspects of this disclosure, include peptides PN27, PN28, PN29, PN58, PN61, PN73, PN158, PN159, PN173, PN182, PN183, PN202, PN204, PN250, PN361, PN365, PN404, PN453, PN509, and PN963, described, for example, in U.S. Patent Application Publication Nos. 2006/0040882 and 2006/0014289, and U.S. Provisional Patent Application Nos. 60/822,896 and 60/939,578; and PCT Application PCT/US2007/075744, which are all incorporated herein by reference. In certain embodiments, when peptide conjugate partners are used to enhance delivery of dsRNA of this disclosure, the resulting dsRNA formulations and methods will often exhibit further reduction of an interferon response in target cells as compared to dsRNAs delivered in combination with alternate delivery vehicles, such as lipid delivery vehicles (e.g., Lipofectamine™).

[0389] In still another embodiment, a dsRNA or analog thereof of this disclosure may be conjugated to the polypeptide and admixed with one or more non-cationic lipids or a combination of a non-cationic lipid and a cationic lipid to form a composition that enhances intracellular delivery of the dsRNA as compared to delivery resulting from contacting the target cells with a naked dsRNA. In more detailed aspects of this disclosure, the mixture, complex or conjugate comprising a dsRNA and a polypeptide can be optionally combined with (e.g., admixed or complexed with) a cationic lipid, such as Lipofectine™. To produce these compositions comprised of a polypeptide, dsRNA and a cationic lipid, the dsRNA and peptide may be mixed together first in a suitable medium such as a cell culture medium, after which the cationic lipid is added to the mixture to form a dsRNA/delivery peptide/cationic lipid composition. Optionally, the peptide and cationic lipid can be mixed together first in a suitable medium such as a cell culture medium, followed by the addition of the dsRNA to form the dsRNA/delivery peptide/cationic lipid composition.

[0390] This disclosure also features the use of dsRNA compositions comprising surface-modified liposomes containing, for example, poly(ethylene glycol) lipids (PEG-modified, or long-circulating liposomes or stealth liposomes) (Lasic et al., Chem. Rev. 95:2601, 1995; Ishiwata et al., Chem. Pharm. Bull. 43:1005, 1995; Lasic et al., Science 267:1275, 1995; Oku et al., Biochim. Biophys. Acta 1238:86, 1995; Liu et al., J. Biol. Chem. 42:24864, 1995; PCT Publication Nos. WO 96/10391; WO 96/10390; WO 96/10392).

[0391] In another embodiment, compositions are provided for targeting dsRNA molecules of this disclosure to specific cell types, such as hepatocytes. For example, dsRNA can be complexed or conjugated glycoproteins or synthetic glycoconjugates glycoproteins or synthetic glycoconjugates having branched galactose (e.g., asialoorosomucoid), N-acetyl-D-galactosamine, or mannose (see, e.g., Wu and Wu, J. Biol. Chem. 262:4429, 1987; Baenziger and Fiete, Cell 22: 611, 1980; Connolly et al., J. Biol. Chem. 257:939, 1982; Lee and Lee, Glycoconjugate J. 4:317, 1987; Ponpipom et al., J. Med. Chem. 24:1388, 1981) for a targeted delivery to, for example, the liver.

[0392] A pharmaceutically effective dose is that dose required to prevent, inhibit the occurrence of, or treat (alleviate a symptom to some extent, preferably all of the symptoms) a disease state. The pharmaceutically effective dose depends on the type of disease, the composition used, the route of administration, the type of subject being treated, the physical characteristics of the specific subject under consideration for treatment, concurrent medication, and other factors that those skilled in the medical arts will recognize. For example, an amount between 0.1 mg/kg and 100 mg/kg body weight/day of active ingredients may be administered depending on the potency of a dsRNA of this disclosure.

[0393] A specific dose level for any particular patient depends upon a variety of factors including the activity of the specific compound employed, age, body weight, general health, sex, diet, time of administration, route of administration, rate of excretion, drug combination, and the severity of the particular disease undergoing therapy. Following administration of dsRNA compositions as disclosed herein, test subjects will exhibit about a 10% up to about a 99% reduction in one or more symptoms associated with the disease or disorder being treated, as compared to placebo-treated or other suitable control subjects.

[0394] Dosage levels in the order of about 0.1 mg to about 140 mg per kilogram of body weight per day can be useful in the treatment of the above-indicated conditions (about 0.5 mg to about 7 g per patient per day). The amount of active ingredient that can be combined with the carrier materials to produce a single dosage form varies depending upon the host treated and the particular mode of administration. Dosage unit forms generally contain between from about 1 mg to about 500 mg of an active ingredient.

[0395] A dosage form of a dsRNA or composition thereof of this disclosure can be liquid, an emulsion, or a micelle, or in the form of an aerosol or droplets. A dosage form of a dsRNA or composition thereof of this disclosure can be solid, which can be reconstituted in a liquid prior to administration. The solid can be administered as a powder. The solid can be in the form of a capsule, tablet, or gel. In addition to in vivo gene inhibition, a skilled artisan will appreciate that the dsRNA and analogs thereof of the present disclosure are useful in a wide variety of in vitro applications, such as scientific and commercial research (e.g., elucidation of physiological pathways, drug discovery and development), and medical and veterinary diagnostics.

[0396] Nucleic acid molecules and polypeptides can be administered to cells by a variety of methods known to those of skill in the art, including administration within formulations that comprise a dsRNA alone, a dsRNA and a polypeptide complex/conjugate alone, or that further comprise one or more additional components, such as a pharmaceutically acceptable carrier, diluent, excipient, adjuvant, emulsifier, stabilizer, preservative, or the like. Other exemplary substances used to approximate physiological conditions include pH adjusting and buffering agents, tonicity adjusting agents, and wetting agents, for example, sodium acetate, sodium lactate, sodium chloride, potassium chloride, calcium chloride, sorbitan monolaurate, triethanolamine oleate, and mixtures thereof. For solid compositions, conventional nontoxic pharmaceutically acceptable carriers can be used which include, for example, pharmaceutical grades of mannitol, lactose, starch, magnesium stearate, sodium saccharin, talcum, cellulose, glucose, sucrose, magnesium carbonate, and the like.

[0397] In certain embodiments, the dsRNA and compositions thereof can be encapsulated in liposomes, administered by iontophoresis, or incorporated into other vehicles, such as hydrogels, cyclodextrins, biodegradable nanocapsules, bioadhesive microspheres, or proteinaceous vectors (see, e.g., PCT Publication No. WO 00/53722). In certain embodiments of this disclosure, the dsRNA may be administered in a time release formulation, for example, in a composition that includes a slow release polymer. The dsRNA can be prepared with carriers that will protect against rapid release, for example, a controlled release vehicle such as a polymer, microencapsulated delivery system, or bioadhesive gel. Prolonged delivery of the dsRNA, in various compositions of this disclosure can be brought about by including in the composition agents that delay absorption, for example, aluminum monosterate hydrogels and gelatin.

[0398] Alternatively, a dsRNA composition of this disclosure can be locally delivered by direct injection or by use of, for example, an infusion pump. Direct injection of dsRNAs of this disclosure, whether subcutaneous, intramuscular, or intradermal, can be done by using standard needle and syringe methodologies or by needle-free technologies, such as those described in Conry et al., Clin. Cancer Res. 5:2330, 1999 and PCT Publication No. WO 99/31262.

[0399] The dsRNA of this disclosure and compositions thereof may be administered to subjects by a variety of mucosal administration modes, including oral, rectal, vaginal, intranasal, intrapulmonary, or transdermal delivery, or by topical delivery to the eyes, ears, skin, or other mucosal surfaces. In one embodiment, the mucosal tissue layer includes an epithelial cell layer, which can be pulmonary, tracheal, bronchial, alveolar, nasal, buccal, epidermal, or gastrointestinal. Compositions of this disclosure can be administered using conventional actuators, such as mechanical spray devices, as well as pressurized, electrically activated, or other types of actuators. The dsRNAs can also be administered in the form of suppositories, e.g., for rectal administration. For example, these compositions can be mixed with an excipient that is solid at room temperature but liquid at the rectal temperature so that the dsRNA is released. Such materials include, for example, cocoa butter and polyethylene glycols.

[0400] Further methods for delivery of nucleic acid molecules, such as the dsRNAs of this disclosure, are described, for example, in Boado et al., J. Pharm. Sci. 87:1308, 1998; Tyler et al., FEBS Lett. 421:280, 1999; Pardridge et al., Proc. Nat'l Acad. Sci. USA 92:5592, 1995; Boado, Adv. Drug Delivery Rev. 15:73, 1995; Aldrian-Herrada et al., Nucleic Acids Res. 26:4910, 1998; Tyler et al., Proc. Nat'l Acad. Sci. USA 96:7053-7058, 1999; Akhtar et al., Trends Cell Bio. 2:139, 1992; “Delivery Strategies for Antisense Oligonucleotide Therapeutics,” ed. Akhtar, 1995, Maurer et al., Mol. Membr. Biol. 16:129, 1999; Hofland and Huang, Handb. Exp. Pharmacol 137:165, 1999; and Lee et al., ACS Symp. Ser. 752:184, 2000; PCT Publication No. WO 94/02595.

[0401] All U.S. patents, U.S. patent application publications, U.S. patent applications, foreign patents, foreign patent applications, non-patent publications, figures, tables, and websites referred to in this specification are expressly incorporated herein by reference, in their entirety.

### EXAMPLES

### Example 1

### Knockdown of Gene Expression by mdRNA

[0402] The gene silencing activity of dsRNA as compared to nicked or gapped versions of the same dsRNA was examined using a dual fluorescence assay. A total of 22 different genes were targeted at ten different sites each (see Table 1).

[0403] A Dicer substrate dsRNA molecule was used, which has a 25 nucleotide sense strand, a 27 nucleotide antisense strand, and a two deoxynucleotide overhang at the 3′-end of the antisense strand (referred to as a 25/27 dsRNA). The nicked version of each dsRNA Dicer substrate has a nick at one of positions 9 to 16 on the sense strand as measured from the 5′-end of the sense strand. For example, an ndsRNA having a nick at position 11 has three strands—a 5′-sense strand of 11 nucleotides, a 3′-sense strand of 14 nucleotides, and an antisense strand of 27 nucleotides (which is also referred to as an N11-14/27 mdRNA). In addition, each of the sense strands of the ndsRNA have three locked nucleic acids (LNAs) evenly distributed along each sense fragment. If the nick is at position 9, then the LNAs can be found at positions 2, 6, and 9 of the 5′ sense strand fragment and at positions 11, 18, and 23 of the 3′ sense strand fragment. If the nick is at position 10, then the LNAs can be found at positions 2, 6, and 10 of the 5′ sense strand fragment and at positions 12, 18, and 23 of the 3′ sense strand fragment. If the nick is at position 11, then the LNAs can be found at positions 2, 6, and 11 of the 5′ sense strand fragment and at positions 13, 18, and 23 of the 3′ sense strand fragment. If the nick is at position 12, then the LNAs can be found at positions 2, 6, and 12 of the 5′ sense strand fragment and at positions 14, 18, and 23 of the 3′ sense strand fragment. If the nick is at position 13, then the LNAs can be found at positions 2, 7, and 13 of the 5′ sense strand fragment and at positions 15, 18, and 23 of the 3′ sense strand fragment. If the nick is at position 14, then the LNAs can be found at positions 2, 7, and 14 of the 5′ sense strand fragment and at positions 16, 18, and 23 of the 3′ sense strand fragment. If the nick is at position 15, then the LNAs can be found at positions 2, 8, and 15 of the 5′ sense strand fragment and at positions 17, 19, and 23 of the 3′ sense strand fragment. If the nick is at position 16, then the LNAs can be found at positions 2, 8, and 16 of the 5′ sense strand fragment and at positions 18, 19, and 23 of the 3′ sense strand fragment. Similarly, a gapped version of each dsRNA Dicer substrate has a single nucleotide missing at one of positions 10 to 17 on the sense strand as measured from the 5′-end of the sense strand. For example, a gdsRNA having a gap at position 11 has three strands—a 5′-sense strand of 11 nucleotides, a 3′-sense strand of 13 nucleotides, and an antisense strand of 27 nucleotides (which is also referred to as G11-(1)-13/27 mdRNA). In addition, each of the sense strands of the gdsRNA contain three locked nucleic acids (LNAs) evenly distributed along each sense fragment (as described for the nicked counterparts).

[0404] In sum, three dsRNA were tested at each of the ten different sites per gene—an unmodified dsRNA, a nicked mdRNA with three LNAs per sense strand fragment, and a single nucleotide gapped mdRNA with three LNAs per sense strand fragment. In other words, 660 different dsRNA were examined.

[0405] Briefly, multiwell plates were seeded with about 7-8×10⁵ HeLa cells/well in DMEM having 10% fetal bovine serum, and incubated overnight at 37° C./5% CO₂. The HeLa cell medium was changed to serum-free DMEM just prior to transfection. The psiCHECK™-2 vector, containing about a 1,000 basepair insert of a target gene, diluted in serum-free DMEM was mixed with diluted GenJet™ transfection reagent (SignalDT Biosystems, Hayward, Calif.) according to the manufacturer's instructions and then incubated at room temperature for 10 minutes. The GenJet/psiCHECK™-2-target gene solution was added to the HeLa cells and then incubated at 37° C., 5% CO₂ for 4.5 hours. After the vector transfection, cells were trypsinized and suspended in antibiotic-free DMEM containing 10% FBS at a concentration of 10⁵ cells per mL.

[0406] To transfect the dsRNA, the dsRNA was formulated in OPTI-MEM I reduced serum medium (Gibco® Invitrogen, Carlsbad, Calif.) and placed in multiwell plates. Then Lipofectamine™ RNAiMAX (Invitrogen) was mixed with OPTI-MEM per manufacture's specifications, added to each well containing dsRNA, mixed manually, and incubated at room temperature for 10-20 minutes. Then 30 μL of vector-transfected HeLa cells at 10⁵ cells per mL were added to each well (final dsRNA concentration of 25 nM), the plates were spun for 30 seconds at 1,000 rpm, and then incubated at 37° C./5% CO₂ for 2 days. The Cell Titer Blue (CTB) reagent (Promega, Madison, Wisconsin) was used to assay for cell viability and proliferation—none of the dsRNA showed any substantial toxicity.

[0407] After transfecting, the media and CTB reagent were removed and the wells washed once with 100 PBS. Cells were assayed for firefly and Renilla luciferase reporter activity by first adding Dual-Glo™ Luciferase Reagent (Promega, Madison, Wis.) for 10 minutes with shaking, and then quantitating the luminescent signal on a VICTOR³™ 1420 Multilabel Counter (PerkinElmer). After measuring the firefly luminescence, Stop & Glo® Reagent (Promega, Madison, Wis.) was added for 10 minutes with shaking to simultaneously quench the firefly reaction and initiate the Renilla luciferase reaction, which was then quantitated on a VICTOR³™ 1420 Multilabel Counter (PerkinElmer). The results are presented in Table 1.

TABLE 1
Gene Silencing Activity* of dsRNA Dicer Substrate and mdRNA (nicked or gapped) Dicer Substrate

| | | | | Dicer | | | Nicked | | | Gapped | | |
|---|---|---|---|---|---|---|---|---|---|---|---|---|
| | | | Dicer | Mean | Dicer | Nicked | Mean | Nicked | Gapped | Mean | Gapped | Length |
| Set | Target | Pos† | SEQ ID NOS‡ | (%) | 95% CI | SEQ ID NOS | (%) | 95% CI | SEQ ID NOS | (%) | 95% CI | 5′-S\hat{ } |
| 1 | AKT1 | 1862 | 63, 283 | 20.6 | 4.0% | 503, 723, 283 | 23.5 | 5.7% | 503, 940, 283 | 54.3 | 12.0% | 14 |
| 2 | AKT1 | 1883 | 64, 284 | 29.7 | 7.3% | 504, 724, 284 | 51.4 | 6.7% | 504, 941, 284 | 76.9 | 19.5% | 12 |
| 3 | AKT1 | 2178 | 65, 285 | 15.4 | 2.4% | 505, 725, 285 | 22.3 | 6.4% | 505, 942, 285 | 24.4 | 5.1% | 14 |
| 4 | AKT1 | 2199 | 66, 286 | 26.4 | 3.6% | 506, 726, 286 | 62.7 | 6.6% | 506, 943, 286 | 66.8 | 10.8% | 15 |
| 5 | AKT1 | 2264 | 67, 287 | 35.2 | 7.3% | 507, 727, 287 | 34.1 | 7.3% | 507, 944, 287 | 31.3 | 5.2% | 12 |
| 6 | AKT1 | 2580 | 68, 288 | 27.6 | 5.7% | 508, 728, 288 | 40.1 | 8.3% | 508, 945, 288 | 91.5 | 17.0% | 12 |
| 7 | AKT1 | 2606 | 69, 289 | 14.0 | 2.6% | 509, 729, 289 | 14.9 | 3.2% | 509, 946, 289 | 33.4 | 6.9% | 11 |
| 8 | AKT1 | 2629 | 70, 290 | 21.0 | 10.1% | 510, 730, 290 | 13.5 | 2.4% | 510, 947, 290 | 13.6 | 2.1% | 12 |
| 9 | AKT1 | 2661 | 71, 291 | 37.4 | 6.6% | 511, 731, 291 | 41.0 | 12.1% | 511, 948, 291 | 71.6 | 11.9% | 15 |
| 10 | AKT1 | 2663 | 72, 292 | 18.1 | 4.3% | 512, 732, 292 | 23.0 | 5.9% | 512, 949, 292 | 51.4 | 9.2% | 14 |
| 11 | BCR-ABL (b2a2) | 66 | 73, 293 | 16.9 | 5.9% | 513, 733, 293 | 30.4 | 10.5% | 513, 950, 293 | 38.2 | 11.7% | 13 |
| 12 | BCR-ABL (b2a2) | 190 | 74, 294 | 40.0 | 11.6% | 514, 734, 294 | 22.0 | 6.4% | 514, 951, 294 | 34.6 | 12.0% | 14 |
| 13 | BCR-ABL (b2a2) | 282 | 75, 295 | 24.2 | 5.2% | 515, 735, 295 | 37.6 | 8.2% | 515, 952, 295 | 34.6 | 8.6% | 13 |
| 14 | BCR-ABL (b2a2) | 284 | 76, 296 | 50.9 | 6.9% | 516, 736, 296 | 38.3 | 7.8% | 516, 953, 296 | 68.3 | 18.0% | 13 |
| 15 | BCR-ABL (b2a2) | 287 | 77, 297 | 45.5 | 13.2% | 517, 737, 297 | 39.6 | 11.5% | 517, 954, 297 | 75.2 | 17.2% | 14 |
| 16 | BCR-ABL (b2a2) | 289 | 78, 298 | 36.9 | 7.7% | 518, 738, 298 | 40.0 | 8.9% | 518, 955, 298 | 60.9 | 12.3% | 14 |
| 17 | BCR-ABL (b2a2) | 293 | 79, 299 | 55.9 | 9.8% | 519, 739, 299 | 58.6 | 14.7% | 519, 956, 299 | 87.0 | 14.3% | 13 |
| 18 | BCR-ABL (b2a2) | 461 | 80, 300 | 38.4 | 9.4% | 520, 740, 300 | 35.9 | 12.1% | 520, 957, 300 | 28.6 | 10.2% | 13 |
| 19 | BCR-ABL (b2a2) | 462 | 81, 301 | 31.1 | 13.7% | 521, 741, 301 | 26.5 | 5.5% | 521, 958, 301 | 35.8 | 10.7% | 14 |
| 20 | BCR-ABL (b2a2) | 561 | 82, 302 | 17.7 | 3.4% | 522, 742, 302 | 20.7 | 3.4% | 522, 959, 302 | 35.5 | 10.6% | 12 |
| 21 | BCR-ABL (b3a2) | 352 | 83, 303 | 45.4 | 7.0% | 523, 743, 303 | 39.8 | 8.3% | 523, 960, 303 | 45.5 | 11.0% | 12 |
| 22 | BCR-ABL (b3a2) | 353 | 84, 304 | 22.6 | 1.8% | 524, 744, 304 | 20.5 | 5.1% | 524, 961, 304 | 66.1 | 17.8% | 12 |
| 23 | BCR-ABL (b3a2) | 356 | 85, 305 | 11.9 | 2.5% | 525, 745, 305 | 28.4 | 5.8% | 525, 962, 305 | 56.0 | 10.6% | 13 |
| 24 | BCR-ABL (b3a2) | 357 | 86, 306 | 24.5 | 6.0% | 526, 746, 306 | 25.6 | 7.5% | 526, 963, 306 | 39.2 | 10.0% | 13 |
| 25 | BCR-ABL (b3a2) | 359 | 87, 307 | 56.8 | 9.3% | 527, 747, 307 | 42.4 | 7.3% | 527, 964, 307 | 46.4 | 9.5% | 13 |
| 26 | BCR-ABL (b3a2) | 360 | 88, 308 | 32.3 | 5.0% | 528, 748, 308 | 37.2 | 7.3% | 528, 965, 308 | 55.3 | 13.8% | 13 |
| 27 | BCR-ABL (b3a2) | 362 | 89, 309 | 12.4 | 3.2% | 529, 737, 309 | 26.3 | 9.8% | 529, 954, 309 | 46.2 | 8.3% | 14 |
| 28 | BCR-ABL (b3a2) | 410 | 90, 310 | 66.2 | 12.2% | 530, 749, 310 | 55.9 | 11.2% | 530, 966, 310 | 58.4 | 16.4% | 12 |
| 29 | BCR-ABL (b3a2) | 629 | 91, 311 | 35.0 | 11.7% | 531, 750, 311 | 46.5 | 10.1% | 531, 967, 311 | 41.0 | 9.0% | 13 |
| 30 | BCR-ABL (b3a2) | 727 | 92, 312 | 83.4 | 13.6% | 532, 751, 312 | 76.7 | 22.5% | 532, 968, 312 | 62.9 | 10.9% | 12 |
| 31 | EGFR | 4715 | 93, 313 | 15.3 | 2.2% | 533, 752, 313 | 9.4 | 0.9% | 533, 969, 313 | 11.3 | 1.7% | 11 |
| 32 | EGFR | 4759 | 94, 314 | 3.8 | 0.4% | 534, 753, 314 | 6.3 | 0.8% | 534, 970, 314 | 8.4 | 1.1% | 12 |
| 33 | EGFR | 4810 | 95, 315 | 5.2 | 0.6% | 535, 754, 315 | 5.8 | 0.7% | 535, 971, 315 | 7.2 | 1.0% | 13 |
| 34 | EGFR | 5249 | 96, 316 | 2.6 | 0.4% | 536, 755, 316 | 16.6 | 1.8% | 536, 972, 316 | 42.9 | 3.5% | 14 |
| 35 | EGFR | 5279 | 97, 317 | 7.6 | 1.0% | 537, 756, 317 | 10.6 | 1.1% | 537, 973, 317 | 11.8 | 1.7% | 13 |
| 36 | EGFR | 5374 | 98, 318 | 9.6 | 1.0% | 538, 757, 318 | 8.7 | 0.9% | 538, 974, 318 | 34.7 | 4.3% | 12 |
| 37 | EGFR | 5442 | 99, 319 | 4.1 | 0.8% | 539, 758, 319 | 15.1 | 1.8% | 539, 975, 319 | 19.7 | 2.4% | 12 |
| 38 | EGFR | 5451 | 100, 320 | 5.1 | 0.3% | 540, 759, 320 | 11.5 | 1.3% | 540, 976, 320 | 16.5 | 3.0% | 13 |
| 39 | EGFR | 5469 | 101, 321 | 5.6 | 0.8% | 541, 760, 321 | 5.1 | 0.5% | 541, 977, 321 | 12.2 | 2.5% | 13 |
| 40 | EGFR | 5483 | 102, 322 | 2.2 | 0.4% | 542, 761, 322 | 2.4 | 0.5% | 542, 978, 322 | 6.1 | 0.7% | 9 |
| 41 | FLT1 | 863 | 103, 323 | 7.6 | 1.1% | 543, 762, 323 | 10.2 | 3.3% | 543, 979, 323 | 29.2 | 8.1% | 12 |
| 42 | FLT1 | 906 | 104, 324 | 10.0 | 2.4% | 544, 763, 324 | 10.8 | 0.8% | 544, 980, 324 | 12.4 | 2.1% | 12 |
| 43 | FLT1 | 993 | 105, 325 | 12.2 | 2.5% | 545, 764, 325 | 13.7 | 2.8% | 545, 981, 325 | 20.0 | 11.3% | 13 |
| 44 | FLT1 | 1283 | 106, 326 | 19.6 | 4.5% | 546, 765, 326 | 25.8 | 7.3% | 546, 982, 326 | 18.7 | 6.5% | 12 |
| 45 | FLT1 | 1289 | 107, 327 | 15.5 | 2.0% | 547, 766, 327 | 13.5 | 1.6% | 547, 983, 327 | 22.5 | 5.0% | 12 |
| 46 | FLT1 | 1349 | 108, 328 | 36.8 | 4.2% | 548, 767, 328 | 22.9 | 4.0% | 548, 984, 328 | 52.7 | 5.4% | 14 |
| 47 | FLT1 | 1354 | 109, 329 | 36.6 | 4.0% | 549, 768, 329 | 49.7 | 5.9% | 549, 985, 329 | 45.8 | 9.3% | 14 |
| 48 | FLT1 | 1448 | 110, 330 | 9.3 | 2.5% | 550, 769, 330 | 16.1 | 2.9% | 550, 986, 330 | 24.2 | 3.6% | 13 |
| 49 | FLT1 | 1459 | 111, 331 | 13.7 | 3.6% | 551, 770, 331 | 20.0 | 8.7% | 551, 987, 331 | 22.4 | 4.4% | 12 |
| 50 | FLT1 | 1700 | 112, 332 | 7.9 | 2.2% | 552, 771, 332 | 11.2 | 3.7% | 552, 988, 332 | 36.4 | 8.0% | 13 |
| 51 | FRAP1 | 7631 | 113, 333 | 9.5 | 2.7% | 553, 772, 333 | 23.3 | 4.9% | 553, 989, 333 | 61.8 | 18.3% | 13 |
| 52 | FRAP1 | 7784 | 114, 334 | 15.1 | 1.7% | 554, 773, 334 | 19.9 | 2.8% | 554, 990, 334 | 29.3 | 3.4% | 12 |
| 53 | FRAP1 | 7812 | 115, 335 | 11.9 | 2.9% | 555, 774, 335 | 14.4 | 3.2% | 555, 991, 335 | 28.3 | 12.7% | 11 |
| 54 | FRAP1 | 7853 | 116, 336 | 16.8 | 3.3% | 556, 775, 336 | 24.1 | 3.7% | 556, 992, 336 | 67.5 | 9.2% | 11 |
| 55 | FRAP1 | 8018 | 117, 337 | 41.1 | 9.1% | 557, 776, 337 | 19.8 | 3.3% | 557, 993, 337 | 41.8 | 9.6% | 12 |
| 56 | FRAP1 | 8102 | 118, 338 | 35.7 | 5.1% | 558, 777, 338 | 30.2 | 6.3% | 558, 994, 338 | 39.5 | 9.9% | 12 |
| 57 | FRAP1 | 8177 | 119, 339 | 21.2 | 3.9% | 559, 778, 339 | 33.2 | 9.3% | 559, 995, 339 | 47.3 | 12.3% | 14 |
| 58 | FRAP1 | 8348 | 120, 340 | 25.8 | 3.6% | 560, 779, 340 | 26.8 | 4.4% | 560, 996, 340 | 37.4 | 4.7% | 11 |
| 59 | FRAP1 | 8435 | 121, 341 | 41.1 | 6.7% | 561, 780, 341 | 54.1 | 9.5% | 561, 997, 341 | 74.9 | 8.5% | 12 |
| 60 | FRAP1 | 8542 | 122, 342 | 23.1 | 4.8% | 562, 781, 342 | 16.5 | 5.5% | 562, 998, 342 | 33.6 | 6.4% | 10 |
| 61 | HIF1A | 1780 | 123, 343 | 76.6 | 14.9% | 563, 782, 343 | 89.2 | 11.9% | 563, 999, 343 | 86.3 | 9.3% | 12 |
| 62 | HIF1A | 1831 | 124, 344 | 9.0 | 0.6% | 564, 783, 344 | 14.0 | 2.3% | 564, 1000, 344 | 38.2 | 8.5% | 12 |
| 63 | HIF1A | 1870 | 125, 345 | 21.4 | 4.5% | 565, 784, 345 | 21.2 | 3.3% | 565, 1001, 345 | 19.6 | 2.2% | 13 |
| 64 | HIF1A | 1941 | 126, 346 | 8.9 | 2.1% | 566, 785, 346 | 11.4 | 2.2% | 566, 1002, 346 | 11.7 | 2.5% | 12 |
| 65 | HIF1A | 2068 | 127, 347 | 7.8 | 1.5% | 567, 786, 347 | 7.0 | 1.4% | 567, 1003, 347 | 16.9 | 3.9% | 12 |
| 66 | HIF1A | 2133 | 128, 348 | 13.0 | 2.0% | 568, 787, 348 | 16.7 | 3.1% | 568, 1004, 348 | 16.3 | 3.1% | 10 |
| 67 | HIF1A | 2232 | 129, 349 | 8.6 | 2.0% | 569, 788, 349 | 17.4 | 3.6% | 569, 1005, 349 | 37.8 | 9.6% | 13 |
| 68 | HIF1A | 2273 | 130, 350 | 19.1 | 5.3% | 570, 789, 350 | 23.4 | 4.4% | 570, 1006, 350 | 20.3 | 3.4% | 12 |
| 69 | HIF1A | 2437 | 131, 351 | 8.2 | 1.4% | 571, 790, 351 | 47.7 | 11.5% | 571, 1007, 351 | 72.4 | 14.3% | 13 |
| 70 | HIF1A | 2607 | 132, 352 | 8.0 | 2.1% | 572, 791, 352 | 11.0 | 1.2% | 572, 1008, 352 | 33.6 | 6.0% | 13 |
| 71 | IL17A | 923 | 133, 353 | 5.0 | 0.6% | 573, 792, 353 | 7.3 | 0.7% | 573, 1009, 353 | 26.3 | 2.5% | 12 |
| 72 | IL17A | 962 | 134, 354 | 6.7 | 0.8% | 574, 793, 354 | 7.7 | 0.9% | 574, 1010, 354 | 8.9 | 2.0% | 13 |
| 73 | IL17A | 969 | 135, 355 | 8.9 | 1.7% | 575, 794, 355 | 17.1 | 1.6% | 575, 1011, 355 | 49.5 | 4.3% | 14 |
| 74 | IL17A | 1098 | 136, 356 | 7.2 | 1.3% | 576, 795, 356 | 10.0 | 2.4% | 576, 1012, 356 | 15.4 | 2.8% | 12 |
| 75 | IL17A | 1201 | 137, 357 | 14.1 | 2.2% | 577, 796, 357 | 13.4 | 1.1% | 577, 1013, 357 | 17.2 | 2.8% | 12 |
| 76 | IL17A | 1433 | 138, 358 | 107.1 | 9.7% | 578, 797, 358 | 111.5 | 10.4% | 578, 1014, 358 | 108.1 | 8.8% | 13 |
| 77 | IL17A | 1455 | 139, 359 | 115.4 | 11.1% | 579, 798, 359 | 120.8 | 8.7% | 579, 1015, 359 | 120.3 | 9.9% | 12 |
| 78 | IL17A | 1478 | 140, 360 | 82.7 | 6.3% | 580, 799, 360 | 87.6 | 5.0% | 580, 1016, 360 | 95.9 | 5.6% | 14 |
| 79 | IL17A | 1663 | 141, 361 | 140.2 | 7.8% | 581, 800, 361 | 125.9 | 9.8% | 581, 1017, 361 | 114.7 | 10.1% | 14 |
| 80 | IL17A | 1764 | 142, 362 | 114.3 | 9.2% | 582, 801, 362 | 109.4 | 2.9% | 582, 1018, 362 | 105.7 | 8.1% | 15 |
| 81 | IL18 | 210 | 143, 363 | 13.8 | 2.8% | 583, 802, 363 | 23.9 | 5.8% | 583, 1019, 363 | 21.4 | 5.7% | 14 |
| 82 | IL18 | 368 | 144, 364 | 22.5 | 1.8% | 584, 803, 364 | 21.0 | 2.0% | 584, 1020, 364 | 29.7 | 3.7% | 13 |
| 83 | IL18 | 479 | 145, 365 | 88.1 | 12.9% | 585, 804, 365 | 66.3 | 9.8% | 585, 1021, 365 | 80.0 | 16.8% | 14 |
| 84 | IL18 | 508 | 146, 366 | 8.0 | 1.9% | 586, 805, 366 | 15.7 | 3.5% | 586, 1022, 366 | 17.0 | 5.7% | 12 |
| 85 | IL18 | 521 | 147, 367 | 9.9 | 2.1% | 587, 806, 367 | 10.8 | 2.1% | 587, 1023, 367 | 18.4 | 3.3% | 11 |
| 86 | IL18 | 573 | 148, 368 | 18.6 | 4.7% | 588, 807, 368 | 24.8 | 7.6% | 588, 1024, 368 | 48.8 | 7.7% | 14 |
| 87 | IL18 | 605 | 149, 369 | 27.5 | 6.1% | 589, 808, 369 | 21.3 | 3.9% | 589, 1025, 369 | 14.9 | 2.7% | 13 |
| 88 | IL18 | 663 | 150, 370 | 5.3 | 1.0% | 590, 809, 370 | 8.2 | 1.5% | 590, 1026, 370 | 11.7 | 3.4% | 12 |
| 89 | IL18 | 785 | 151, 371 | 8.6 | 1.0% | 591, 810, 371 | 11.7 | 2.8% | 591, 1027, 371 | 21.1 | 9.1% | 12 |
| 90 | IL18 | 918 | 152, 372 | 13.9 | 1.6% | 592, 811, 372 | 15.0 | 3.0% | 592, 1028, 372 | 30.4 | 3.6% | 11 |
| 91 | IL6 | 24 | 153, 373 | 22.6 | 1.7% | 593, 812, 373 | 45.7 | 7.8% | 593, 1029, 373 | 47.8 | 4.5% | 13 |
| 92 | IL6 | 74 | 154, 374 | 52.5 | 12.6% | 594, 813, 374 | 56.4 | 7.1% | 594, 1030, 374 | 88.3 | 15.5% | 12 |
| 93 | IL6 | 160 | 155, 375 | 49.8 | 7.8% | 595, 814, 375 | 50.6 | 6.1% | 595, 1031, 375 | 68.3 | 9.4% | 14 |
| 94 | IL6 | 370 | 156, 376 | 44.7 | 8.2% | 596, 815, 376 | 52.5 | 4.2% | 596, 1032, 376 | 74.3 | 9.3% | 13 |
| 95 | IL6 | 451 | 157, 377 | 39.3 | 5.0% | 597, 816, 377 | 35.6 | 4.1% | 597, 1033, 377 | 66.6 | 7.1% | 13 |
| 96 | IL6 | 481 | 158, 378 | 68.3 | 8.1% | 598, 817, 378 | 78.7 | 15.6% | 598, 1034, 378 | 63.2 | 6.2% | 11 |
| 97 | IL6 | 710 | 159, 379 | 29.2 | 4.2% | 599, 818, 379 | 32.0 | 4.1% | 599, 1035, 379 | 77.3 | 11.4% | 12 |
| 98 | IL6 | 822 | 160, 380 | 73.7 | 11.0% | 600, 819, 380 | 72.2 | 11.6% | 600, 1036, 380 | 85.2 | 13.3% | 12 |
| 99 | IL6 | 836 | 161, 381 | 98.8 | 21.8% | 601, 820, 381 | 95.0 | 13.2% | 601, 1037, 381 | 90.5 | 15.6% | 13 |
| 100 | IL6 | 960 | 162, 382 | 31.1 | 4.4% | 602, 821, 382 | 20.5 | 6.1% | 602, 1038, 382 | 25.6 | 2.4% | 12 |
| 101 | MAP2K1 | 1237 | 163, 383 | 21.0 | 3.3% | 603, 822, 383 | 27.9 | 3.8% | 603, 1039, 383 | 50.0 | 8.8% | 11 |
| 102 | MAP2K1 | 1342 | 164, 384 | 3.9 | 0.5% | 604, 823, 384 | 8.7 | 1.5% | 604, 1040, 384 | 11.4 | 1.3% | 13 |
| 103 | MAP2K1 | 1501 | 165, 385 | 12.9 | 1.9% | 605, 824, 385 | 19.4 | 2.9% | 605, 1041, 385 | 19.7 | 5.3% | 12 |
| 104 | MAP2K1 | 1542 | 166, 386 | 7.2 | 1.3% | 606, 825, 386 | 11.7 | 2.1% | 606, 1042, 386 | 18.7 | 3.2% | 11 |
| 105 | MAP2K1 | 1544 | 167, 387 | 13.1 | 2.1% | 607, 826, 387 | 11.1 | 1.1% | 607, 1043, 387 | 16.5 | 3.0% | 10 |
| 106 | MAP2K1 | 1728 | 168, 388 | 11.9 | 1.7% | 608, 827, 388 | 11.9 | 1.0% | 608, 1044, 388 | 27.9 | 4.3% | 13 |
| 107 | MAP2K1 | 1777 | 169, 389 | 18.3 | 2.8% | 609, 828, 389 | 37.2 | 4.3% | 609, 1045, 389 | 64.5 | 8.5% | 13 |
| 108 | MAP2K1 | 1892 | 170, 390 | 34.5 | 4.7% | 610, 829, 390 | 37.6 | 6.8% | 610, 1046, 390 | 42.4 | 7.3% | 12 |
| 109 | MAP2K1 | 1954 | 171, 391 | 4.6 | 0.5% | 611, 830, 391 | 4.2 | 0.5% | 611, 1047, 391 | 6.5 | 1.1% | 13 |
| 110 | MAP2K1 | 2062 | 172, 392 | 10.2 | 0.8% | 612, 831, 392 | 10.4 | 2.9% | 612, 1048, 392 | 12.2 | 2.0% | 12 |
| 111 | MAPK1 | 3683 | 173, 393 | 7.0 | 0.9% | 613, 614, 393 | 24.4 | 17.3% | 613, 1049, 393 | 25.2 | 2.6% | 12 |
| 112 | MAPK1 | 3695 | 174, 394 | 32.9 | 4.6% | 614, 832, 394 | 30.9 | 4.0% | 614, 1050, 394 | 33.8 | 3.1% | 13 |
| 113 | MAPK1 | 3797 | 175, 395 | 7.4 | 1.1% | 615, 833, 395 | 6.4 | 1.3% | 615, 1051, 395 | 40.4 | 5.8% | 11 |
| 114 | MAPK1 | 3905 | 176, 396 | 8.0 | 1.0% | 616, 834, 396 | 8.1 | 0.5% | 616, 1052, 396 | 14.8 | 1.4% | 12 |
| 115 | MAPK1 | 3916 | 177, 397 | 11.0 | 1.7% | 617, 835, 397 | 16.0 | 3.3% | 617, 1053, 397 | 45.5 | 8.1% | 10 |
| 116 | MAPK1 | 3943 | 178, 398 | 6.8 | 0.8% | 618, 836, 398 | 6.6 | 0.7% | 618, 1054, 398 | 11.0 | 2.3% | 10 |
| 117 | MAPK1 | 4121 | 179, 399 | 7.6 | 1.1% | 619, 837, 399 | 12.7 | 1.6% | 619, 1055, 399 | 25.1 | 3.1% | 12 |
| 118 | MAPK1 | 4256 | 180, 400 | 27.6 | 2.5% | 620, 838, 400 | 36.8 | 4.0% | 620, 1056, 400 | 57.7 | 7.0% | 13 |
| 119 | MAPK1 | 4294 | 181, 401 | 31.0 | 3.0% | 621, 839, 401 | 22.3 | 3.6% | 621, 1057, 401 | 50.9 | 4.6% | 12 |
| 120 | MAPK1 | 4375 | 182, 402 | 10.9 | 1.1% | 622, 840, 402 | 12.4 | 1.4% | 622, 1058, 402 | 16.9 | 2.7% | 11 |
| 121 | MAPK14 | 2715 | 183, 403 | 11.4 | 2.8% | 623, 841, 403 | 16.5 | 4.1% | 623, 1059, 403 | 16.6 | 2.4% | 12 |
| 122 | MAPK14 | 2737 | 184, 404 | 7.5 | 0.8% | 624, 842, 404 | 10.3 | 1.1% | 624, 1060, 404 | 13.1 | 1.2% | 11 |
| 123 | MAPK14 | 2750 | 185, 405 | 8.7 | 1.0% | 625, 843, 405 | 12.2 | 1.8% | 625, 1061, 405 | 15.8 | 1.9% | 13 |
| 124 | MAPK14 | 2817 | 186, 406 | 6.4 | 0.8% | 626, 844, 406 | 14.6 | 1.7% | 626, 1062, 406 | 19.4 | 2.0% | 11 |
| 125 | MAPK14 | 3091 | 187, 407 | 9.9 | 0.6% | 627, 845, 407 | 10.3 | 1.3% | 627, 1063, 407 | 24.7 | 1.5% | 11 |
| 126 | MAPK14 | 3312 | 188, 408 | 20.4 | 1.8% | 628, 846, 408 | 30.5 | 2.9% | 628, 1064, 408 | 38.5 | 3.4% | 13 |
| 127 | MAPK14 | 3346 | 189, 409 | 20.9 | 1.6% | 629, 847, 409 | 23.0 | 2.6% | 629, 1065, 409 | 58.3 | 6.7% | 11 |
| 128 | MAPK14 | 3531 | 190, 410 | 42.4 | 3.2% | 630, 848, 410 | 55.1 | 5.0% | 630, 1066, 410 | 61.9 | 3.6% | 12 |
| 129 | MAPK14 | 3621 | 191, 411 | 28.6 | 1.9% | 631, 849, 411 | 42.4 | 13.5% | 631, 1067, 411 | 71.9 | 5.2% | 11 |
| 130 | MAPK14 | 3680 | 192, 412 | 15.6 | 1.3% | 632, 850, 412 | 15.5 | 1.9% | 632, 1068, 412 | 19.8 | 2.1% | 12 |
| 131 | PDGFA | 1322 | 193, 413 | 23.7 | 3.6% | 633, 851, 413 | 31.6 | 4.3% | 633, 1069, 413 | 38.4 | 3.3% | 12 |
| 132 | PDGFA | 1332 | 194, 414 | 35.5 | 5.4% | 634, 852, 414 | 48.4 | 3.0% | 634, 1070, 414 | 65.4 | 10.5% | 14 |
| 133 | PDGFA | 1395 | 195, 415 | 25.9 | 3.3% | 635, 853, 415 | 40.2 | 6.0% | 635, 1071, 415 | 55.2 | 9.8% | 14 |
| 134 | PDGFA | 1669 | 196, 416 | 40.4 | 5.1% | 636, 854, 416 | 29.5 | 4.3% | 636, 1072, 416 | 33.9 | 5.9% | 12 |
| 135 | PDGFA | 1676 | 197, 417 | 27.1 | 2.5% | 637, 855, 417 | 36.8 | 4.5% | 637, 1073, 417 | 47.4 | 3.4% | 13 |
| 136 | PDGFA | 1748 | 198, 418 | 27.4 | 4.7% | 638, 856, 418 | 34.5 | 5.0% | 638, 1074, 418 | 47.5 | 4.7% | 11 |
| 137 | PDGFA | 2020 | 199, 419 | 31.6 | 6.6% | 639, 857, 419 | 37.5 | 4.3% | 639, 1075, 419 | 51.9 | 5.0% | 13 |
| 138 | PDGFA | 2021 | 200, 420 | 16.7 | 1.0% | 640, 858, 420 | 24.2 | 3.1% | 640, 1076, 420 | 62.6 | 6.9% | 14 |
| 139 | PDGFA | 2030 | 201, 421 | 38.7 | 6.2% | 641, 859, 421 | 47.0 | 10.5% | 641, 1077, 421 | 80.5 | 7.6% | 13 |
| 140 | PDGFA | 2300 | 202, 422 | 55.3 | 7.7% | 642, 860, 422 | 41.2 | 4.7% | 642, 1078, 422 | 71.7 | 9.1% | 15 |
| 141 | PDGFRA | 4837 | 203, 423 | 16.9 | 3.1% | 643, 861, 423 | 21.1 | 5.1% | 643, 1079, 423 | 23.1 | 4.8% | 12 |
| 142 | PDGFRA | 4900 | 204, 424 | 23.8 | 3.8% | 644, 862, 424 | 40.9 | 8.4% | 644, 1080, 424 | 62.5 | 12.5% | 16 |
| 143 | PDGFRA | 5007 | 205, 425 | 52.6 | 9.4% | 645, 863, 425 | 49.6 | 7.7% | 645, 1081, 425 | 47.0 | 9.5% | 12 |
| 144 | PDGFRA | 5043 | 206, 426 | 30.1 | 7.9% | 646, 864, 426 | 30.0 | 5.4% | 646, 1082, 426 | 57.3 | 7.8% | 11 |
| 145 | PDGFRA | 5082 | 207, 427 | 8.3 | 1.1% | 647, 865, 427 | 11.9 | 1.8% | 647, 1083, 427 | 18.2 | 4.0% | 13 |
| 146 | PDGFRA | 5352 | 208, 428 | 6.3 | 1.4% | 648, 866, 428 | 8.2 | 1.6% | 648, 1084, 428 | 7.9 | 1.1% | 12 |
| 147 | PDGFRA | 5367 | 209, 429 | 19.1 | 5.6% | 649, 867, 429 | 10.9 | 1.6% | 649, 1085, 429 | 25.1 | 2.9% | 14 |
| 148 | PDGFRA | 5496 | 210, 430 | 18.9 | 5.4% | 650, 868, 430 | 17.0 | 2.9% | 650, 1086, 430 | 17.8 | 4.0% | 12 |
| 149 | PDGFRA | 5706 | 211, 431 | 24.5 | 4.0% | 651, 869, 431 | 47.8 | 4.3% | 651, 1087, 431 | 50.6 | 5.5% | 13 |
| 150 | PDGFRA | 5779 | 212, 432 | 13.0 | 1.4% | 652, 870, 432 | 14.0 | 2.1% | 652, 1088, 432 | 17.2 | 4.3% | 14 |
| 151 | PIK3CA | 213 | 213, 433 | 4.3 | 1.0% | 653, 871, 433 | 3.7 | 0.6% | 653, 1089, 433 | 5.7 | 0.9% | 12 |
| 152 | PIK3CA | 389 | 214, 434 | 5.3 | 1.0% | 654, 872, 434 | 7.0 | 1.5% | 654, 1090, 434 | 5.6 | 1.5% | 10 |
| 153 | PIK3CA | 517 | 215, 435 | 9.6 | 1.1% | 655, 873, 435 | 11.5 | 2.1% | 655, 1091, 435 | 13.5 | 1.6% | 11 |
| 154 | PIK3CA | 630 | 216, 436 | 6.1 | 1.2% | 656, 874, 436 | 8.9 | 2.6% | 656, 1092, 436 | 9.3 | 1.8% | 12 |
| 155 | PIK3CA | 680 | 217, 437 | 3.8 | 0.3% | 657, 875, 437 | 5.9 | 0.6% | 657, 1093, 437 | 6.9 | 1.0% | 11 |
| 156 | PIK3CA | 732 | 218, 438 | 5.7 | 1.7% | 658, 876, 438 | 15.3 | 1.5% | 658, 1094, 438 | 17.4 | 4.0% | 11 |
| 157 | PIK3CA | 736 | 219, 439 | 5.9 | 0.9% | 659, 877, 439 | 7.8 | 1.1% | 659, 1095, 439 | 6.5 | 1.4% | 12 |
| 158 | PIK3CA | 923 | 220, 440 | 5.0 | 0.7% | 660, 878, 440 | 8.5 | 1.5% | 660, 1096, 440 | 7.4 | 0.6% | 12 |
| 159 | PIK3CA | 1087 | 221, 441 | 8.1 | 2.3% | 661, 879, 441 | 8.5 | 1.6% | 661, 1097, 441 | 17.5 | 4.9% | 12 |
| 160 | PIK3CA | 1094 | 222, 442 | 13.0 | 3.8% | 662, 880, 442 | 13.0 | 2.5% | 662, 1098, 442 | 30.1 | 6.4% | 11 |
| 161 | PKN3 | 2408 | 223, 443 | 9.4 | 2.1% | 663, 881, 443 | 15.2 | 3.7% | 663, 665, 443 | 32.1 | 6.6% | 12 |
| 162 | PKN3 | 2420 | 224, 444 | 14.5 | 1.7% | 664, 882, 444 | 30.4 | 7.5% | 664, 1099, 444 | 40.1 | 6.7% | 12 |
| 163 | PKN3 | 2421 | 225, 445 | 15.2 | 2.0% | 665, 883, 445 | 20.6 | 2.7% | 665, 1100, 445 | 50.8 | 7.8% | 12 |
| 164 | PKN3 | 2425 | 226, 446 | 28.4 | 3.8% | 666, 884, 446 | 27.0 | 6.9% | 666, 1101, 446 | 36.2 | 4.8% | 15 |
| 165 | PKN3 | 2682 | 227, 447 | 30.0 | 4.6% | 667, 885, 447 | 27.1 | 2.8% | 667, 1102, 447 | 37.1 | 6.2% | 11 |
| 166 | PKN3 | 2683 | 228, 448 | 22.4 | 2.8% | 668, 886, 448 | 34.8 | 2.2% | 668, 1103, 448 | 51.9 | 7.4% | 12 |
| 167 | PKN3 | 2931 | 229, 449 | 35.1 | 4.4% | 669, 887, 449 | 57.3 | 7.8% | 669, 1104, 449 | 88.6 | 7.1% | 13 |
| 168 | PKN3 | 3063 | 230, 450 | 21.8 | 3.1% | 670, 888, 450 | 28.6 | 8.5% | 670, 1105, 450 | 40.5 | 6.2% | 12 |
| 169 | PKN3 | 3314 | 231, 451 | 9.7 | 1.8% | 671, 889, 451 | 12.0 | 1.4% | 671, 1106, 451 | 17.3 | 1.3% | 10 |
| 170 | PKN3 | 3315 | 232, 452 | 10.1 | 1.3% | 672, 890, 452 | 15.3 | 2.8% | 672, 1107, 452 | 37.4 | 3.6% | 11 |
| 171 | RAF1 | 1509 | 233, 453 | 46.2 | 9.4% | 673, 891, 453 | 51.3 | 10.7% | 673, 1108, 453 | 61.3 | 4.4% | 12 |
| 172 | RAF1 | 1512 | 234, 454 | 40.1 | 9.7% | 674, 892, 454 | 34.5 | 5.6% | 674, 1109, 454 | 62.4 | 8.6% | 13 |
| 173 | RAF1 | 1628 | 235, 455 | 48.3 | 7.9% | 675, 893, 455 | 47.4 | 7.1% | 675, 1110, 455 | 41.1 | 5.1% | 12 |
| 174 | RAF1 | 1645 | 236, 456 | 38.9 | 2.3% | 676, 894, 456 | 62.1 | 9.0% | 676, 1111, 456 | 85.0 | 9.3% | 13 |
| 175 | RAF1 | 1780 | 237, 457 | 22.6 | 4.9% | 677, 895, 457 | 24.8 | 5.3% | 677, 1112, 457 | 37.6 | 10.4% | 12 |
| 176 | RAF1 | 1799 | 238, 458 | 23.2 | 3.1% | 678, 896, 458 | 43.6 | 7.6% | 678, 1113, 458 | 50.7 | 6.2% | 12 |
| 177 | RAF1 | 1807 | 239, 459 | 28.0 | 5.4% | 679, 897, 459 | 34.8 | 5.8% | 679, 1114, 459 | 37.0 | 5.3% | 15 |
| 178 | RAF1 | 1863 | 240, 460 | 28.2 | 3.1% | 680, 898, 460 | 38.1 | 4.5% | 680, 1115, 460 | 35.7 | 4.2% | 14 |
| 179 | RAF1 | 2157 | 241, 461 | 68.8 | 6.5% | 681, 899, 461 | 64.1 | 8.0% | 681, 1116, 461 | 86.7 | 12.6% | 14 |
| 180 | RAF1 | 2252 | 242, 462 | 11.4 | 1.7% | 682, 900, 462 | 25.8 | 5.4% | 682, 1117, 462 | 71.2 | 10.7% | 13 |
| 181 | SRD5A1 | 1150 | 243, 463 | 3.7 | 0.5% | 683, 901, 463 | 4.4 | 0.7% | 683, 1118, 463 | 3.8 | 0.4% | 12 |
| 182 | SRD5A1 | 1153 | 244, 464 | 3.2 | 0.4% | 684, 902, 464 | 5.2 | 0.5% | 684, 1119, 464 | 7.0 | 0.9% | 12 |
| 183 | SRD5A1 | 1845 | 245, 465 | 3.9 | 0.5% | 685, 903, 465 | 4.5 | 0.6% | 685, 1120, 465 | 7.4 | 0.8% | 13 |
| 184 | SRD5A1 | 1917 | 246, 466 | 9.4 | 0.8% | 686, 904, 466 | 10.2 | 1.3% | 686, 1121, 466 | 22.0 | 2.8% | 12 |
| 185 | SRD5A1 | 1920 | 247, 467 | 4.6 | 0.3% | 687, 905, 467 | 4.9 | 1.0% | 687, 1122, 467 | 6.4 | 0.5% | 11 |
| 186 | SRD5A1 | 1964 | 248, 468 | 6.2 | 0.7% | 688, 906, 468 | 10.4 | 0.7% | 688, 1123, 468 | 21.0 | 4.6% | 10 |
| 187 | SRD5A1 | 1981 | 249, 469 | 6.5 | 1.0% | 689, 907, 469 | 7.1 | 0.7% | 689, 1124, 469 | 8.8 | 1.5% | 12 |
| 188 | SRD5A1 | 2084 | 250, 470 | 16.9 | 1.1% | 690, 908, 470 | 15.7 | 1.5% | 690, 1125, 470 | 13.3 | 1.5% | 12 |
| 189 | SRD5A1 | 2085 | 251, 471 | 17.3 | 1.6% | 691, 909, 471 | 19.4 | 1.7% | 691, 1126, 471 | 20.8 | 2.6% | 12 |
| 190 | SRD5A1 | 2103 | 252, 472 | 7.5 | 1.3% | 692, 910, 472 | 10.9 | 1.2% | 692, 1127, 472 | 12.3 | 1.7% | 12 |
| 191 | TNF | 32 | 253, 473 | 71.4 | 13.2% | 693, 911, 473 | 93.7 | 14.9% | 693, 1128, 473 | 122.6 | 21.1% | 12 |
| 192 | TNF | 649 | 254, 474 | 100.0 | 16.3% | 694, 912, 474 | 127.7 | 12.6% | 694, 1129, 474 | 147.9 | 21.7% | 12 |
| 193 | TNF | 802 | 255, 475 | 67.2 | 10.7% | 695, 913, 475 | 64.0 | 6.6% | 695, 1130, 475 | 116.4 | 21.0% | 12 |
| 194 | TNF | 875 | 256, 476 | 101.7 | 19.9% | 696, 914, 476 | 99.3 | 15.5% | 696, 1131, 476 | 108.8 | 14.2% | 12 |
| 195 | TNF | 983 | 257, 477 | 94.5 | 7.0% | 697, 915, 477 | 83.1 | 7.3% | 697, 1132, 477 | 140.6 | 20.4% | 11 |
| 196 | TNF | 987 | 258, 478 | 82.0 | 10.9% | 698, 916, 478 | 139.4 | 8.2% | 698, 1133, 478 | 143.8 | 9.2% | 10 |
| 197 | TNF | 992 | 259, 479 | 126.7 | 15.8% | 699, 700, 479 | 121.7 | 10.8% | 699, 1134, 479 | 115.9 | 16.4% | 11 |
| 198 | TNF | 1003 | 260, 480 | 123.4 | 16.7% | 700, 917, 480 | 114.4 | 47.8% | 700, 1135, 480 | 98.5 | 17.2% | 14 |
| 199 | TNF | 1630 | 261, 481 | 58.0 | 5.7% | 701, 918, 481 | 56.1 | 9.4% | 701, 1136, 481 | 71.0 | 17.2% | 11 |
| 200 | TNF | 1631 | 262, 482 | 54.2 | 13.4% | 702, 919, 482 | 63.9 | 10.1% | 702, 1137, 482 | 73.8 | 14.8% | 11 |
| 201 | TNFSF13B | 188 | 263, 483 | 20.4 | 3.2% | 703, 920, 483 | 46.2 | 11.9% | 703, 1138, 483 | 58.4 | 12.7% | 13 |
| 202 | TNFSF13B | 313 | 264, 484 | 15.9 | 5.1% | 704, 921, 484 | 18.9 | 7.4% | 704, 1139, 484 | 48.0 | 8.1% | 12 |
| 203 | TNFSF13B | 337 | 265, 485 | 22.3 | 4.6% | 705, 922, 485 | 37.1 | 11.0% | 705, 1140, 485 | 63.6 | 10.4% | 12 |
| 204 | TNFSF13B | 590 | 266, 486 | 35.8 | 8.7% | 706, 923, 486 | 49.4 | 11.0% | 706, 1141, 486 | 50.7 | 10.3% | 10 |
| 205 | TNFSF13B | 652 | 267, 487 | 21.3 | 7.2% | 707, 924, 487 | 57.6 | 16.7% | 707, 1142, 487 | 78.8 | 5.6% | 14 |
| 206 | TNFSF13B | 661 | 268, 488 | 28.8 | 3.0% | 708, 925, 488 | 38.3 | 8.4% | 708, 1143, 488 | 56.5 | 16.3% | 12 |
| 207 | TNFSF13B | 684 | 269, 489 | 46.3 | 7.2% | 709, 926, 489 | 43.8 | 9.7% | 709, 1144, 489 | 54.5 | 4.6% | 12 |
| 208 | TNFSF13B | 905 | 270, 490 | 18.5 | 5.0% | 710, 927, 490 | 27.9 | 3.1% | 710, 1145, 490 | 51.7 | 10.9% | 12 |
| 209 | TNFSF13B | 961 | 271, 491 | 21.4 | 4.0% | 711, 928, 491 | 37.5 | 10.1% | 711, 1146, 491 | 77.6 | 11.2% | 14 |
| 210 | TNFSF13B | 1150 | 272, 492 | 24.1 | 7.0% | 712, 929, 492 | 23.4 | 5.7% | 712, 1147, 492 | 35.9 | 8.0% | 13 |
| 211 | VEGFA | 1426 | 273, 493 | 14.5 | 2.2% | 713, 930, 493 | 18.1 | 3.2% | 713, 1148, 493 | 21.0 | 3.8% | 13 |
| 212 | VEGFA | 1428 | 274, 494 | 18.5 | 2.6% | 714, 931, 494 | 32.1 | 5.8% | 714, 1149, 494 | 46.7 | 9.4% | 12 |
| 213 | VEGFA | 1603 | 275, 495 | 14.6 | 2.1% | 715, 932, 495 | 36.6 | 17.5% | 715, 1150, 495 | 65.6 | 6.9% | 13 |
| 214 | VEGFA | 1685 | 276, 496 | 17.1 | 1.3% | 716, 933, 496 | 20.2 | 5.5% | 716, 1151, 496 | 23.4 | 3.8% | 13 |
| 215 | VEGFA | 1792 | 277, 497 | 17.0 | 1.8% | 717, 934, 497 | 21.2 | 3.2% | 717, 1152, 497 | 39.5 | 6.3% | 12 |
| 216 | VEGFA | 2100 | 278, 498 | 116.9 | 11.5% | 718, 935, 498 | 103.6 | 7.5% | 718, 1153, 498 | 101.5 | 12.9% | 12 |
| 217 | VEGFA | 2102 | 279, 499 | 116.3 | 9.1% | 719, 936, 499 | 110.2 | 9.3% | 719, 1154, 499 | 105.0 | 8.0% | 12 |
| 218 | VEGFA | 2196 | 280, 500 | 24.2 | 2.7% | 720, 937, 500 | 26.6 | 3.1% | 720, 1155, 500 | 43.5 | 3.5% | 12 |
| 219 | VEGFA | 2261 | 281, 501 | 15.6 | 2.2% | 721, 938, 501 | 44.2 | 6.2% | 721, 1156, 501 | 109.0 | 9.8% | 12 |
| 220 | VEGFA | 2292 | 282, 502 | 48.4 | 4.3% | 722, 939, 502 | 45.1 | 7.2% | 722, 1157, 502 | 80.7 | 6.7% | 15 |

*All samples were normalized to the respective dsRNA QNeg (Qiagen) negative control samples run in the same experiment. That is, QNeg values were set as 100% active (i.e., no knockdown), with 95% confidence intervals (CI) ranging from 6.3-22.5%. As a positive control, an siRNA specific for rLuc was used, which samples showed on average expression levels that varied from 1.2% to 16.8% (i.e., about 83% to about 99% knockdown activity and a 95% CI ranging from 0.3% to 13.7%).
†“Pos” refers to the position on the target gene mRNA message that aligns with the 5′-end of the dsRNA sense strand. The mRNA numbering is based on the GenBank accession numbers as described herein.
‡The SEQ ID NOS. are provided in the following order: (1) Dicer: sense strand, antisense strand; (2) Nicked: 5′-sense strand fragment, 3′-sense strand fragment, and antisense strand; and (3) Gapped: 5′-sense strand fragment, 3′-sense strand fragment, and antisense strand. The Dicer dsRNA has two strands, while ndsRNA and gdsRNA have three strands each. The nicked or gapped sense strand fragments have three locked nucleic acids each.
\hat{ }“Length 5′-S” refers to the length of the 5′-sense strand fragment of the nicked or gapped mdRNA, which indicates the position of the nick (e.g., 10 means the nick is between position 10 and 11, so the 5′sense strand fragment is 10 nucleotides long and the 3′-sense strand fragment is 15 nucelotides long) or one nucleotide gap (e.g., 10 means the missing nucleotide is number 11, so the 5′sense strand fragment is 10 nucleotides long and the 3′-sense strand fragment is 14 nucelotides long).

### Example 2

### Knockdown of β-Galactosidase Activity by Gapped dsRNA Dicer Substrate

[0408] The activity of a Dicer substrate dsRNA containing a gap in the double-stranded structure in silencing LacZ mRNA as compared to the normal Dicer substrate dsRNA (i.e., not having a gap) was examined.

Nucleotide Sequences of dsRNA and mdRNA Targeting LacZ mRNA

[0409] The nucleic acid sequence of the one or more sense strands, and the antisense strand of the dsRNA and gapped dsRNA (also referred to herein as a meroduplex or mdRNA) are shown below and were synthesized using standard techniques. The RISC activator LacZ dsRNA comprises a 21 nucleotide sense strand and a 21 nucleotide antisense strand, which can anneal to form a double-stranded region of 19 base pairs with a two deoxythymidine overhang on each strand (referred to as 21/21 dsRNA).

LacZ dsRNA (21/21)—RISC Activator

| | |
|---|---|
| Sense | |
| 5′-CUACACAAAUCAGCGAUUUdTdT-3′ | (SEQ ID NO: 1) |
| Antisense | |
| 3′-dTdTGAUGUGUUUAGUCGCUAAA-5′ | (SEQ ID NO: 2) |

[0410] The Dicer substrate LacZ dsRNA comprises a 25 nucleotide sense strand and a 27 nucleotide antisense strand, which can anneal to form a double-stranded region of 25 base pairs with one blunt end and a cytidine and uridine overhang on the other end (referred to as 25/27 dsRNA).

LacZ dsRNA (25/27)—Dicer Substrate

| | |
|---|---|
| Sense | |
| 5′-CUACACAAAUCAGCGAUUUCCAUdGdT-3′ | (SEQ ID NO: 3) |
| Antisense | |
| 3′-CUGAUGUGUUUAGUCGCUAAAGGUA C A -5′ | (SEQ ID NO: 4) |

The LacZ mdRNA comprises two sense strands of 13 nucleotides (5′-portion) and 11 nucleotides (3′-portion) and a 27 nucleotide antisense strand, which three strands can anneal to form two double-stranded regions of 13 and 11 base pairs separated by a single nucleotide gap (referred to as a 13, 11/27 mdRNA). The 5′-end of the 11 nucleotide sense strand fragment may be optionally phosphorylated. The “*” indicates a gap—in this case, a single nucleotide gap (i.e., a cytidine is missing).
LacZ mdRNA (13, 11/27)—Dicer Substrate

(SEQ ID NOS: 5, 6)

| | |
|---|---|
| Sense | 5′-CUACACAAAUCAG*GAUUUCCAUdGdT-3′ |

(SEQ ID NO: 4)

| | |
|---|---|
| Antisense | 3′-CUGAUGUGUUUAGUCGCUAAAGGUA C A-5′ |

Each of the LacZ dsRNA or mdRNA was used to transfect 9lacZ/R cells.

### Transfection

[0411] Six well collagen-coated plates were seeded with 5×10⁵ 9lacZ/R cells/well in a 2 ml volume per well, and incubated overnight at 37° C./5% CO₂ in DMEM/high glucose media. Preparation for transfection: 250 μl of OPTIMEM media without serum was mixed with 5 μl of 20 pmol/μl dsRNA and 5 μl of HIPERFECT transfection solution (Qiagen) was mixed with another 250 μl OPTIMEM media. After both mixtures were allowed to equilibrate for 5 minutes, the RNA and transfection solutions were combined and left at room temperature for 20 minutes to form transfection complexes. The final concentration of HIPERFECT was 50 μM, and the dsRNAs were tested at 0.05 nM, 0.1 nM, 0.2 nM, 0.5 nM, 1 nM, 2 nM, 5 nM, and 10 nM, while the mdRNA was tested at 0.2 nM, 0.5 nM, 1 nM, 2 nM, 5 nM, 10 nM, 20 nM, and 50 nM. Complete media was removed, the cells were washed with incomplete OPTIMEM, and then 500 μl transfection mixture was applied to the cells, which were incubated with gentle shaking at 37° C. for 4 hours. After transfecting, the transfection media was removed, cells were washed once with complete DMEM/high glucose media, fresh media added, and the cells were then incubated for 48 hours at 37° C., 5% CO₂.

### β-Galactosidase Assay

[0412] Transfected cells were washed with PBS, and then detached with 0.5 ml trypsin/EDTA. The detached cells were suspended in 1 ml complete DMEM/high glucose and transferred to a clean tube. The cells were harvested by centrifugation at 250×g for 5 minutes, and then resuspended in 50 μl 1× lysis buffer at 4° C. The lysed cells were subjected to two freeze-thaw cycles on dry ice and a 37° C. water bath. The lysed samples were centrifuged for 5 minutes at 4° C. and the supernatant was recovered. For each sample, 1.5 μl and 10 μl of lysate was transferred to a clean tube and sterile water added to a final volume of 30 μl followed by the addition of 70 μl o-nitrophenyl-β-D-galactopyranose (ONPG) and 200 μl 1× cleavage buffer with β-mercaptoethanol. The samples were mixed briefly, incubated for 30 minutes at 37° C., and then 500 μl stop buffer was added (final volume 800 μl). β-Galactosidase activity for each sample was measured in disposable cuvettes at 420 nm. Protein concentration was determined by the BCA (bicinchoninic acid) method. For the purpose of the instant example, the level of measured LacZ activity was correlated with the quantity of LacZ transcript within 9L/LacZ cells. Thus, a reduction in β-galactosidase activity after dsRNA transfection, absent a negative impact on cell viability, was attributed to a reduction in the quantity of LacZ transcripts resulting from targeted degradation mediated by the LacZ dsRNA.

### Results

[0413] Knockdown activity in transfected and untransfected cells was normalized to a Qneg control dsRNA and presented as a normalized value of the Qneg control (i.e., Qneg represented 100% or “normal” gene expression levels). Both the lacZ RISC activator and Dicer substrate dsRNAs molecule showed good knockdown of β-galactosidase activity at concentration as low as 0.1 nM (FIG. 2), while the Dicer substrate antisense strand alone (single stranded 27mer) had no silencing effect. A gapped mdRNA showed good knockdown although somewhat lower than that of intact RISC activator and Dicer substrate dsRNAs (FIG. 2). The presence of the gapmer cytidine (i.e., the missing nucleotide) at various concentrations (0.1 μM to 50 μM) had no effect on the activity of the mdRNA (data not shown). None of the dsRNA or mdRNA solutions showed any detectable toxicity in the transfected 9L/LacZ cells. The IC₅₀ of the lacZ mdRNA was calculated to be 3.74 nM, which is about 10 fold lower than what had been previously measured for lacZ dsRNA 21/21 (data not shown). These results show that a meroduplex (gapped dsRNA) is capable of inducing gene silencing.

### Example 3

### Knockdown of Influenza Gene Expression by Nicked dsRNA

[0414] The activity of a nicked dsRNA (21/21) in silencing influenza gene expression as compared to a normal dsRNA (i.e., not having a nick) was examined.

Nucleotide Sequences of dsRNA and mdRNA Targeting Influenza mRNA

[0415] The dsRNA and nicked dsRNA (another form of meroduplex, referred to herein as ndsRNA) are shown below and were synthesized using standard techniques. The RISC activator influenza G1498 dsRNA comprises a 21 nucleotide sense strand and a 21 nucleotide antisense strand, which can anneal to form a double-stranded region of 19 base pairs with a two deoxythymidine overhang on each strand.

G1498-wt dsRNA (21/21)

| | |
|---|---|
| Sense | |
| 5′-GGAUCUUAUUUCUUCGGAGdTdT-3′ | (SEQ ID NO: 7) |
| Antisense | |
| 3′-dTdTCCUAGAAUAAAGAAGCCUC-5′ | (SEQ ID NO :8) |

[0416] The RISC activator influenza G1498 dsRNA was nicked on the sense strand after nucleotide 11 to produce a ndsRNA having two sense strands of 11 nucleotides (5′-portion, italic) and 10 nucleotides (3′-portion) and a 21 nucleotide antisense strand, which three strands can anneal to form two double-stranded regions of 11 (shown in italics) and 10 base pairs separated by a one nucleotide gap (which may be referred to as G1498 11, 10/21 ndsRNA-wt). The 5′-end of the 10 nucleotide sense strand fragment may be optionally phosphorylated, as depicted by a “p” preceding the nucleotide (e.g., pC).

G1498 ndsRNA-wt (11, 10/21)

| | |
|---|---|
| Sense | |
| 5′-GGAUCUUAUUUCUUCGGAGdTdT-3′ | (SEQ ID NO: 9, 10) |
| Antisense | |
| 3′-dTdTCCUAGAAUAAAGAAGCCUC-5′ | (SEQ ID NO :8) |

G1498 ndsRNA-wt (11, 10/21)

| | |
|---|---|
| Sense | |
| 5′-GGAUCUUAUUUpCUUCGGAGdTdT-3′ | (SEQ ID NOS: 9, 10) |
| Antisense | |
| 3′-dTdTCCUAGAAUAAAGAAGCCUC-5′ | (SEQ ID NO: 8) |

In addition, each of these G1498 dsRNAs were made with each U substituted with a 5-methyluridine (ribothymidine) and are referred to as G1498 dsRNA-rT. Each of the G1498 dsRNA or ndsRNA (meroduplex), with or without the 5-methyluridine substitution, was used to transfect HeLa S3 cells having an influenza target sequence associated with a luciferase gene. Also, the G1498 antisense strand alone or the antisense strand annealed to the 11 nucleotide sense strand portion alone or the 10 nucleotide sense strand portion alone were examined for activity.

### Transfection and Dual Luciferase Assay

[0417] The reporter plasmid psiCHECK™-2 (Promega, Madison, Wis.), which constitutively expresses both firefly luc2 (Photinus pyralis) and Renilla (Renilla reniformis, also known as sea pansy) luciferases, was used to clone in a portion of the influenza NP gene downstream of the Renilla translational stop codon that results in a Renilla-influenza NP fusion mRNA. The firefly luciferase in the psiCHECK™-2 vector is used to normalize Renilla luciferase expression and serves as a control for transfection efficiency.

[0418] Multi-well plates were seeded with HeLa S3 cells/well in 100 μl Ham's F12 medium and 10% fetal bovine serum, and incubated overnight at 37° C./5% CO₂. The HeLa S3 cells were transfected with the psiCHECK™-influenza plasmid (75 ng) and G1498 dsRNA or ndsRNA (final concentration of 10 nM or 100 nM) formulated in Lipofectamine™ 2000 and OPTIMEM reduced serum medium. The transfection mixture was incubated with the HeLa S3 cells with gentle shaking at 37° C. for about 18 to 20 hours.

[0419] After transfecting, firefly luciferase reporter activity was measured first by adding Dual-Glo™ Luciferase Reagent (Promega, Madison, Wis.) for 10 minutes with shaking, and then quantitating the luminescent signal using a VICTOR³™ 1420 Multilabel Counter (PerkinElmer, Waltham, Mass.). After measuring the firefly luminescence, Stop & Glo® Reagent (Promega, Madison, Wis.) was added for 10 minutes with shaking to simultaneously quench the firefly reaction and initiate the Renilla luciferase reaction, and then the Renilla luciferase luminescent signal was quantitated VICTOR³™ 1420 Multilabel Counter (PerkinElmer, Waltham, Mass.).

### Results

[0420] Knockdown activity in transfected and untransfected cells was normalized to a Qneg control dsRNA and presented as a normalized value of the Qneg control (i.e., Qneg represented 100% or “normal” gene expression levels). Thus, a smaller value indicates a greater knockdown effect. The G1498 dsRNA-wt and dsRNA-rT showed similar good knockdown at a 100 nM concentration (FIG. 3). The G1498 ndsRNA-rT, whether phosphorylated or not, showed good knockdown although somewhat lower than the G1498 dsRNA-wt (FIG. 3). Similar results were obtained with dsRNA or ndsRNA at 10 nM (data not shown). None of the G1498 dsRNA or ndsRNA solutions showed any detectable toxicity in HeLa S3 cells at either 10 nM or 100 nM. Even the presence of only half a nicked sense strand (an 11 nucleotide or 10 nucleotide strand alone) with a G1498 antisense strand showed some detectable activity. These results show that a nicked-type meroduplex dsRNA molecule is unexpectedly capable of promoting gene silencing.

### Example 4

### Knockdown Activity of Nicked mdRNA

[0421] In this example, the activity of a dicer substrate LacZ dsRNA of Example 1 having a sense strand with a nick at various positions was examined. In addition, a dideoxy nucleotide (i.e., ddG) was incorporated at the 5′-end of the 3′-most strand of a sense sequence having a nick or a single nucleotide gap to determine whether the in vivo ligation of the nicked sense strand is “rescuing” activity. The ddG is not a substrate for ligation. Also examined was the influenza dicer substrate dsRNA of Example 7 having a sense strand with a nick at one of positions 8 to 14. The “p” designation indicates that the 5′-end of the 3′-most strand of the nicked sense influenza sequence was phosphorylated. The “L” designation indicates that the G at position 2 of the 5′-most strand of the nicked sense influenza sequence was substituted for a locked nucleic acid G. The Qneg is a negative control dsRNA.

[0422] The dual fluorescence assay of Example 3 was used to measure knockdown activity with 5 nM of the LacZ sequences and 0.5 nM of the influenza sequences. The lacZ dicer substrate (25/27, LacZ-DS) and lacZ RISC activator (21/21, LacZ) are equally active, and the LacZ-DS can be nicked in any position between 8 and 14 without affecting activity (FIG. 3). In addition, the inclusion of a ddG on the 5′-end of the 3′-most LacZ sense sequence having a nick (LacZ:DSNkd13-3′dd) or a one nucleotide gap (LacZ:DSNkd13D1-3′dd) was essentially as active as the unsubstituted sequence (FIG. 4). The influenza dicer substrate (G1498DS) nicked at any one of positions 8 to 14 was also highly active (FIG. 5). Phosphorylation of the 5′-end of the 3′-most strand of the nicked sense influenza sequence had essentially no effect on activity, but addition of a locked nucleic acid appears to improve activity.

### Example 5

### Mean Inhibitory Concentration of mdRNA

[0423] In this example, a dose response assay was performed to measure the mean inhibitory concentration (IC₅₀) of the influenza dicer substrate dsRNA of Example 8 having a sense strand with a nick at position 12, 13, or 14, including or not a locked nucleic acid. The dual luciferase assay of Example 2 was used. The influenza dicer substrate dsRNA (G1498DS) was tested at 0.0004 nM, 0.002 nM, 0.005 nM, 0.019 nM, 0.067 nM, 0.233 nM, 0.816 nM, 2.8 nM, and 10 nM, while the mdRNA with a nick at position 13 (G1498DS:Nkd13) was tested at 0.001 nM, 0.048 nM, 0.167 nM, 1 nM, 2 nM, 7 nM, and 25 nM (see FIG. 6). Also tested were RISC activator molecules (21/21) with or without a nick at various positions (including G1498DS:Nkd11, G1498DS:Nkd12, and G1498DS:Nkd14), each of the nicked versions with a locked nucleic acid as described above (data not shown). The Qneg is a negative control dsRNA.

[0424] The IC₅₀ of the RISC activator G1498 was calculated to be about 22 pM, while the dicer substrate G1498DS IC₅₀ was calculated to be about 6 pM. The IC₅₀ of RISC and Dicer mdRNAs range from about 200 pM to about 15 nM. The inclusion of a single locked nucleic acid reduced the IC₅₀ of Dicer mdRNAs by up 4 fold (data not shown). These results show that a meroduplex dsRNA having a nick or gap in any position is capable of inducing gene silencing.

### Example 6

### Knockdown Activity of Gapped mdRNA

[0425] The activity of an influenza dicer substrate dsRNA having a sense strand with a gap of differing sizes and positions was examined. The influenza dicer substrate dsRNA of Example 8 was generated with a sense strand having a gap of 0 to 6 nucleotides at position 8, a gap of 4 nucleotides at position 9, a gap of 3 nucleotides at position 10, a gap of 2 nucleotides at position 11, and a gap of 1 nucleotide at position 12 (see Table 2). The Qneg is a negative control dsRNA. Each of the mdRNAs was tested at a concentration of 5 nM (data not shown) and 10 nM. The mdRNAs have the following antisense strand 5′-CAUUGUCUCCGAAGAAAUAAGAUCCUU (SEQ ID NO:11), and nicked or gapped sense strands as shown in Table 2.

TABLE 2

| | | | | | |
|---|---|---|---|---|---|
| | 5′ Sense* | | Gap | Gap | % |
| mdRNA | (SEQ ID NO.) | 3′ Sense (SEQ ID NO.) | Pos | Size | KD^{†} |

| | | | | | |
|---|---|---|---|---|---|
| G1498: DSNkd8 | GGAUCUUA (12) | UUUCUUCGGAGACAAdTdG (13) | 8 | 0 | 67.8 |
| G1498: DSNkd8D1 | GGAUCUUA (12) | UUCUUCGGAGACAAdTdG (14) | 8 | 1 | 60.9 |
| G1498: DSNkd8D2 | GGAUCUUA (12) | UCUUCGGAGACAAdTdG (15) | 8 | 2 | 48.2 |
| G1498: DSNkd8D3 | GGAUCUUA (12) | CUUCGGAGACAAdTdG (16) | 8 | 3 | 44.1 |
| G1498: DSNkd8D4 | GGAUCUUA (12) | UUCGGAGACAAdTdG (17) | 8 | 4 | 30.8 |
| G1498: DSNkd8D5 | GGAUCUUA (12) | UCGGAGACAAdTdG (18) | 8 | 5 | 10.8 |
| G1498: DSNkd8D6 | GGAUCUUA (12) | CGGAGACAAdTdG (19) | 8 | 6 | 17.9 |
| G1498: DSNkd9D4 | GGAUCUUAU (20) | UCGGAGACAAdTdG (18) | 9 | 4 | 38.9 |
| G1498: DSNkd10D3 | GGAUCUUAUU (21) | UCGGAGACAAdTdG (18) | 10 | 3 | 38.4 |
| G1498: DSNkd11D2 | GGAUCUUAUUU (22) | UCGGAGACAAdTdG (18) | 11 | 2 | 46.2 |
| G1498: DSNkd12D1 | GGAUCUUAUUUC (23) | UCGGAGACAAdTdG (18) | 12 | 1 | 49.6 |
| Plasmid | — | — | — | — | 5.3 |

*G indicates a locked nucleic acid G in the 5′ sense strand.
^{†}KD means percent knockdown activity.

[0426] The dual fluorescence assay of Example 2 was used to measure knockdown activity. Similar results were obtained at both the 5 nM and 10 nM concentrations. These data show that an mdRNA having a gap of up to 6 nucleotides still has activity, although having four or fewer missing nucleotides shows the best activity (see, also, FIG. 7). Thus, mdRNA having various sizes gaps that are in various different positions have knockdown activity.

[0427] To examine the general applicability of a sequence having a sense strand with a gap of differing sizes and positions, a different dsRNA sequence was tested. The lacZ RISC dsRNA of Example 1 was generated with a sense strand having a gap of 0 to 6 nucleotides at position 8, a gap of 5 nucleotides at position 9, a gap of 4 nucleotides at position 10, a gap of 3 nucleotides at position 11, a gap of 2 nucleotides at position 12, a gap of 1 nucleotide at position 12, and a nick (gap of 0) at position 14 (see Table 3). The Qneg is a negative control dsRNA. Each of the mdRNAs was tested at a concentration of 5 nM (data not shown) and 25 nM. The lacZ mdRNAs have the following antisense strand 5′-AAAUCGCUGAUUUGUGUAGdTdTUAAA (SEQ ID NO:2) and nicked or gapped sense strands as shown in Table 3.

TABLE 3

| | | | | |
|---|---|---|---|---|
| | 5′ Sense* | | Gap | Gap |
| mdRNA | (SEQ ID NO.) | 3′ Sense* (SEQ ID NO.) | Pos | Size |

| | | | | |
|---|---|---|---|---|
| LacZ: Nkd8 | CUACACAA (24) | AUCAGCGAUUUdTdT (25) | 8 | 0 |
| LacZ: Nkd8D1 | CUACACAA (24) | UCAGCGAUUUdTdT (26) | 8 | 1 |
| LacZ Nkd8D2 | CUACACAA (24) | CAGCGAUUUdTdT (27) | 8 | 2 |
| LacZ Nkd8D3 | CUACACAA (24) | AGCGAUUUdTdT (28) | 8 | 3 |
| LacZ Nkd8D4 | CUACACAA (24) | GCGAUUUdTdT (29) | 8 | 4 |
| LacZ: Nkd8D5 | CUACACAA (24) | CGAUUUdTdT (30) | 8 | 5 |
| LacZ: Nkd8D6 | CUACACAA (24) | GAUUUdTdT (31) | 8 | 6 |
| LacZ: Nkd9D5 | CUACACAAA (32) | GAUUUdTdT (31) | 9 | 5 |
| LacZ: Nkd10D4 | CUACACAAAU (33) | GAUUUdTdT (31) | 10 | 4 |
| LacZ: Nkd11D3 | CUACACAAAUC (34) | GAUUUdTdT (31) | 11 | 3 |
| LacZ: Nkd12D2 | CUACACAAAUCA (35) | GAUUUdTdT (31) | 12 | 2 |
| LacZ: Nkd13D1 | CUACACAAAUCAG (36) | GAUUUdTdT (31) | 13 | 1 |
| LacZ: Nkd14 | CUACACAAAUCAGC (37) | GAUUUdTdT (31) | 14 | 0 |

*A indicates a locked nucleic acid A in each sense strand.

[0428] The dual fluorescence assay of Example 3 was used to measure knockdown activity. FIG. 8 shows that an mdRNA having a gap of up to 6 nucleotides has substantial activity and the position of the gap may affect the potency of knockdown. Thus, mdRNA having various sizes gaps that are in various different positions and in different mdRNA sequences have knockdown activity.

### Example 7

### Knockdown Activity of Substituted mdRNA

[0429] The activity of an influenza dsRNA RISC sequences having a nicked sense strand and the sense strands having locked nucleic acid substitutions were examined. The influenza RISC sequence G1498 of Example 3 was generated with a sense strand having a nick at positions 8 to 14 counting from the 5′-end. Each sense strand was substituted with one or two locked nucleic acids as shown in Table 4. The Qneg and Plasmid are negative controls. Each of the mdRNAs was tested at a concentration of 5 nM. The antisense strand used was 5′-CUCCGAAGAAAUAAGAUCCdTdT (SEQ ID NO:8).

TABLE 4

| | | | | |
|---|---|---|---|---|
| | | | Nick | % |
| mdRNA | 5′ Sense* (SEQ ID NO.) | 3′ Sense* (SEQ ID NO.) | Pos | KD |

| | | | | |
|---|---|---|---|---|
| G1498-wt | GGAUCUUAUUUCUUCGGAGdTdT (7) | — | — | 85.8 |
| G1498-L | GGAUCUUAUUUCUUCGGAGdTdT (61) | — | — | 86.8 |
| G1498: Nkd8-1 | GGAUCUUA (12) | UUUCUUCGGAGdTdT (47) | 8 | 36.0 |
| G1498: Nkd8-2 | GGAUCUUA (40) | UUUCUUCGGAGdTdT (54) | 8 | 66.2 |
| G1498: Nkd9-1 | GGAUCUUAU (20) | UUCUUCGGAGdTdT (48) | 9 | 60.9 |
| G1498: Nkd9-2 | GGAUCUUAU (41) | UUCUUCGGAGdTdT (55) | 9 | 64.4 |
| G1498: Nkd10-1 | GGAUCUUAUU (21) | UCUUCGGAGdTdT (49) | 10 | 58.2 |
| G1498: Nkd10-2 | GGAUCUUAUU (42) | UCUUCGGAGdTdT (56) | 10 | 68.5 |
| G1498: Nkd11-1 | GGAUCUUAUUU (22) | CUUCGGAGdTdT (50) | 11 | 75.9 |
| G1498: Nkd11-2 | GGAUCUUAUUU (43) | CUUCGGAGdTdT (57) | 11 | 67.1 |
| G1498: Nkd12-1 | GGAUCUUAUUUC (23) | UUCGGAGdTdT (51) | 12 | 59.9 |
| G1498: Nkd12-2 | GGAUCUUAUUUC (44) | UUCGGAGdTdT (58) | 12 | 72.8 |
| G1498: Nkd13-1 | GGAUCUUAUUUCU (38) | UCGGAGdTdT (52) | 13 | 37.1 |
| G1498: Nkd13-2 | GGAUCUUAUUUCU (45) | UCGGAGdTdT (59) | 13 | 74.3 |
| G1498: Nkd14-1 | GGAUCUUAUUUCUU (39) | CGGAGdTdT (53) | 14 | 29.0 |
| G1498: Nkd14-2 | GGAUCUUAUUUCUU (46) | CGGAGdTdT (60) | 14 | 60.2 |
| Qneg | — | — | — | 0 |
| Plasmid | — | — | — | 3.6 |

*Nucleotides that are bold and underlined are locked nucleic acids.

[0430] The dual fluorescence assay of Example 3 was used to measure knockdown activity. These data show that increasing the number of locked nucleic acid substitutions tends to increase activity of an mdRNA having a nick at any of a number of positions. The single locked nucleic acid per sense strand appears to be most active when the nick is at position 11 (see FIG. 9). But, multiple locked nucleic acids on each sense strand make mdRNA having a nick at any position as active as the most optimal nick position with a single substitution (i.e., position 11) (FIG. 9). Thus, mdRNA having duplex stabilizing modifications make mdRNA essentially equally active regardless of the nick position.

[0431] Similar results were observed when locked nucleic acid substitutions were made in the LacZ dicer substrate mdRNA of Example 2 (SEQ ID NOS:3 and 4). The lacZ dicer was nicked at positions 8 to 14, and a duplicate set of nicked LacZ dicer molecules were made with the exception that the A at position 3 (from the 5′-end) of the 5′ sense strand was substituted for a locked nucleic acid A (LNA-A). As is evident from FIG. 10, most of the nicked lacZ dicer molecules containing LNA-A were as potent in knockdown activity as the unsubstituted lacZ dicer.

### Example 8

### mdRNA Knockdown of Influenza Virus Titer

[0432] The activity of a dicer substrate nicked dsRNA in reducing influenza virus titer as compared to a wild-type dsRNA (i.e., not having a nick) was examined. The influenza dicer substrate sequence (25/27) is as follows:

| | |
|---|---|
| Sense | |
| 5′-GGAUCUUAUUUCUUCGGAGACAAdTdG | (SEQ ID NO: 62) |
| Antisense | |
| 5′-CAUUGUCUCCGAAGAAAUAAGAUCCUU | (SEQ ID NO: 11) |

The mdRNA sequences have a nicked sense strand after position 12, 13, and 14, respectively, as counted from the 5′-end, and the G at position 2 is substituted with locked nucleic acid G.

[0433] For the viral infectivity assay, Vero cells were seeded at 6.5×10⁴ cells/well the day before transfection in 500 μl A 10% FBS/DMEM media per well. Samples of 100, 10, 1, 0.1, and 0.01 nM stock of each dsRNA were complexed with 1.0 μl (1 mg/ml stock) of Lipofectamine™ 2000 (Invitrogen, Carlsbad, Calif.) and incubated for 20 minutes at room temperature in 150 μl OPTIMEM (total volume) (Gibco, Carlsbad, Calif.). Vero cells were washed with OPTIMEM, and 150 μl of the transfection complex in OPTIMEM was then added to each well containing 150 μl of OPTIMEM media. Triplicate wells were tested for each condition. An additional control well with no transfection condition was prepared. Three hours post transfection, the media was removed. Each well was washed once with 200 μl PBS containing 0.3% BSA and 10 mM HEPES/PS. Cells in each well were infected with WSN strain of influenza virus at an MOI 0.01 in 200 μl of infection media containing 0.3% BSA/10 mM HEPES/PS and 4 μg/ml trypsin. The plate was incubated for 1 hour at 37° C. Unadsorbed virus was washed off with the 200 μl of infection media and discarded, then 400 μl DMEM containing 0.3% BSA/10 mM HEPES/PS and 4 μg/ml trypsin was added to each well. The plate was incubated at 37° C., 5% CO₂ for 48 hours, then 50 μl supernatant from each well was tested in duplicate by TCID₅₀ assays (50% Tissue-Culture Infective Dose, WHO protocol) in MDCK cells and titers were estimated using the Spearman and Karber formula. The results show that these mdRNAs show about a 50% to 60% viral titer knockdown, even at a concentration as low as 10 pM (FIG. 11).

[0434] An in vivo influenza mouse model was also used to examine the activity of a dicer substrate nicked dsRNA in reducing influenza virus titer as compared to a wild-type dsRNA (i.e., not having a nick). Female BALB/c mice (age 8-10 weeks with 5-10 mice per group) were dosed intranasally with 120 nmol/kg/day dsRNA (formulated in C12-norArg(NH₃+Cl⁻)—C12/DSPE-PEG2000/DSPC/cholesterol at a ratio of 30:1:20:49) for three consecutive days before intranasal challenge with influenza strain PR8 (20 PFU/mouse). Two days after infection, whole lungs are harvested from each mouse and placed in a solution of PBS/0.3% BSA with antibiotics, homogenize, and measure the viral titer (TCID₅₀). Doses were well tolerated by the mice, indicated by less than 2% body weight reduction in any of the dose groups. The mdRNAs tested exhibit similar, if not slightly greater, virus reduction in vivo as compared to unmodified and unnicked G1498 dicer substrate (see FIG. 12). Hence, mdRNA are active in vivo.

### Example 9

### Effect of mdRNA on Cytokine Induction

[0435] The effect of the mdRNA structure on cytokine induction in vivo was examined. Female BALB/c mice (age 7-9 weeks) were dosed intranasally with about 50 μM dsRNA (formulated in C12-norArg(NH₃+Cl—)—C12/DSPE-PEG2000/DSPC/cholesterol at a ratio of 30:1:20:49) or with 605 nmol/kg/day naked dsRNA for three consecutive days. About four hours after the final dose is administered, the mice were sacrificed to collect bronchoalveolar fluid (BALF), and collected blood is processed to serum for evaluation of the cytokine response. Bronchial lavage was performed with 0.5 mL ice-cold 0.3% BSA in saline two times for a total of 1 mL. BALF was spun and supernatants collected and frozen until cytokine analysis. Blood was collected from the vena cava immediately following euthanasia, placed into serum separator tubes, and allowed to clot at room temperature for at least 20 minutes. The samples were processed to serum, aliquoted into Millipore ULTRAFREE 0.22 μm filter tubes, spun at 12,000 rpm, frozen on dry ice, and then stored at −70° C. until analysis. Cytokine analysis of BALF and plasma were performed using the Procarta™ mouse 10-Plex Cytokine Assay Kit (Panomics, Fremont, Calif.) on a Bio-Plex™ array reader. Toxicity parameters were also measured, including body weights, prior to the first dose on day 0 and again on day 3 (just prior to euthanasia). Spleens were harvested and weighed (normalized to final body weight). The results are provided in Table 5.

TABLE 5
In vivo Cytokine Induction by Naked mdRNA

| | | | G1498:Nkd | | G1498:DSNkd | G1498:DSNkd | G1498:DSNkd |
|---|---|---|---|---|---|---|---|
| Cytokine | | G1498 | 11-1 | G1498:DS | 12-1 | 13-1 | 14-1 |
| IL-6 | Conc (pg/mL) | 90.68 | 10.07 | 77.35 | 17.17 | 18.21 | 38.59 |
| | Fold decrease | — | 9 | — | 5 | 4 | 2 |
| IL-12 | Conc (pg/mL) | 661.48 | 20.32 | 1403.61 | 25.07 | 37.70 | 57.02 |
| (p40) | Fold decrease | — | 33 | — | 56 | 37 | 25 |
| TNFα | Conc (pg/mL) | 264.49 | 25.59 | 112.95 | 20.52 | 29.00 | 64.93 |
| | Fold decrease | — | 10 | — | 6 | 4 | 2 |

[0436] The mdRNA (RISC or dicer sized) induced cytokines to lesser extent than the intact (i.e., not nicked) parent molecules. The decrease in cytokine induction was greatest when looking at IL-12(p40), the cytokine with consistently the highest levels of induction of the 10 cytokine multiplex assay. For the mdRNA, the decrease in IL-12 (p40) ranges from 25- to 56-fold, while the reduction in either IL-6 or TNFα induction was more modest (the decrease in these two cytokines ranges from 2- to 10-fold). Thus, the mdRNA structure appears to provide an advantage in vivo in that cytokine induction is minimized compared to unmodified dsRNA.

[0437] Similar results were obtained with the formulated mdRNA, although the reduction in induction was not as prominent. In addition, the presence or absence of a locked nucleic acid has no effect on cytokine induction. These results are shown in Table 6.

TABLE 6
In vivo Cytokine Induction by Formulated mdRNA

| | | | G1498:Nkd | G1498:Nkd | G1498:DSNkd | G1498:DSNkd |
|---|---|---|---|---|---|---|
| Cytokine | | G1498:DS | 12-1 | 13-1 | 14-1 | 13 |
| IL-6 | Conc (pg/mL) | 29.04 | 52.95 | 10.28 | 7.79 | 44.29 |
| | Fold decrease | — | −1.8 | 3 | 4 | −1.5 |
| IL-12 | Conc (pg/mL) | 298.93 | 604.24 | 136.45 | 126.71 | 551.49 |
| (p40) | Fold decrease | — | 0 | 2 | 2 | 1 |
| TNFα | Conc (pg/mL) | 13.49 | 21.35 | 3.15 | 3.15 | 18.69 |
| | Fold decrease | — | −1.6 | 4 | 4 | 1.4 |

### Example 10

### Survivin siRNA Induce Caspase Activation

[0438] Induction of caspase activity and cell death by transfection of Survivin siRNA in a KU-7 bladder cancer cell line was examined.

[0439] Both Caspase 3 and 7 are effector caspases that mediate programmed cell death (i.e., apoptosis), which plays an important role in preventing cancer. Therefore, the ability of a drug, for example an siRNA, to induce the activity of caspases in a cancer or pre-cancer cell and consequently induce apoptosis to prevent cancer or treat cancer in a human subject is highly advantageous. In this Example, Survivin siRNA transfected into a bladder cancer cell line induced Caspase 3 and Caspase 7 activity, and further induced cell morphology changes observed via microscopy analysis that were highly indicative of apopotsis. Accordingly, the data indicate that Survivin siRNA may induce apoptosis in bladder cancer cells.

[0440] Briefly, KU-7 cells were plated at a density of 7,500 cells/well on a 96-well plate. Twenty-fours later, 25 μL mixture containing 25 nM or 5 nM siRNA and RNAi MAX diluted 1/50 in optiMEM media was added to each well containing 75 μL cell medium with 10% fetal bovine serum. The transfection was performed in triplacate. The transfection mixture was incubated with the cells for 24 hours. Following the incubation, cells were lysed, RNA extracted and qRT-PCR was performed to determine gene expression levels. The Qneg siRNA served as the negative control. Separately, the transfected cells of the duplicate plate were lysed, and CASPASE-GLO reagent was added (PROMEGA) to measure caspase activity per the manufacturer's protocol. Caspase activity was measured with a Wallac Plate reader. Cell viability was measured with the CELLTITER 96 assay kit (PROMEGA) per the manufacturer's protocol.

[0441] The sequence specific Survivin siRNA and a negative control siRNA (i.e., a scrambled sequence of a Survivin siRNA) used in this Example are shown below. Knockdown activity in transfected and untransfected cells was normalized to a Qneg control dsRNA (QIAGEN) and presented as a normalized value of the Qneg control (i.e., Qneg represented 100% or “normal” gene expression levels).

[0442] Survivin-11 (DX9792):

| | |
|---|---|
| Sense Strand: | |
| 5′-CCAGUGUUUCUUCUGCUUCTT-3′ | (SEQ ID NO: 1896) |
| Antisense Strand: | |
| 5′-GAAGCAGAAGAAACACUGGTT-3′ | (SEQ ID NO: 1897) |

[0443] Survivin-11UNA (DX9794):

Sense Strand:

(SEQ ID NO: 1898)

5′-CCAGUGUUUCUUCUGCUUCunaUunaU-3′
Antisense Strand:

(SEQ ID NO: 1899)

5′-GAAGCAGAAGAAACACUGGunaUunaU-3′

[0444] Survivin-11UNA-SCR (DX9794)—Negative Control:

Sense Strand:

(SEQ ID NO: 1900)

5′-UCCCGUUCUAGUGUUUCCUunaUunaU-3′
Antisense Strand:

(SEQ ID NO: 1901)

5′-AGGAAACACUAGAACGGGAunaUunaU-3′

[0445] Hydroxymethyl substituted monomer(s) in the sequences of the table below are identified as “unaX” where X is the one letter code for the nucleomonomer (e.g., “unaU” indicates that the uracil comprises a hydroxymethyl substituted monomer). In this Example, the Survivin:286UNA siRNA is a double-stranded RNA having a 19 base pair region with two blunt ends and two hydroxymethyl substituted monomers were covalently linked to the 3′-end of both the sense strand and the antisense strand.

[0446] The results for the percent survivin gene knockdown, percent cell death induction, and the fold caspase induction are shown below in Table 10. The percent knockdown (% KD) is relative to Qneg siRNA, percent cell death induction (% CD) is relative to untransfected cells; and fold caspase induction (Ca) is also relative to untransfected cells.

TABLE 10

| | siRNA | KU-7 Cells | | |
|---|---|---|---|---|
| siRNA Identifier | Conc. | % KD | % CD | Ca |
| Survivin-11 | 25 nM | 80 | 19 | 7.1 |
| (DX9792) | 5 nM | 85 | 17 | 5.2 |
| Survivin-11UNA | 25 nM | 79 | 23 | 6.6 |
| (DX9794) | 5 nM | 84 | 23 | 5.2 |
| Survivin-11UNA-SCR | 25 nM | 0 | 9 | 1 |
| (DX9794) | 5 nM | 15 | 8 | 1.1 |

[0447] The results show that Survivin siRNA reducted target gene expression levels relative to the Qneg siRNA negative control in the KU-7 bladder cancer cell line. Further, Survivin siRNA induced over a five-fold increase in caspase activity relative to untransfected cells. Lastly, these results show that there is a correlation between siRNA mediated knockdown of Survivin gene expression and both cell death induction and caspase activity induction. In other words, upon a reduction in Survivin gene expression mediated by the Survivin siRNA, both caspase activity increases and cell death induction increases.

What is claimed is:

1. An RNA molecule that down regulates the expression of a target mRNA, the RNA molecules comprising a first strand that is complementary to a human target mRNA and a second strand complementary to the first strand, wherein the first strand and second strands can anneal to form a double-stranded region having from 15 base pairs to 40 base pairs.

2. The RNA molecule of claim 1 wherein the first strand is from 19 to 24 nucleotides in length or from 25 to 29 nucleotides in length and is complementary to a human target gene selected from the group consisting of tumor necrosis factor (TNF), vascular endothelial growth factor (VEGF), vascular endothelial growth factor receptor (VEGFR), epidermal growth factor receptor (EGFR), erythroblastic leukemia viral oncogene homolog (ERBB), platelet derived growth factor (PDGF), platelet derived growth factor receptor (PDGFR), breakpoint cluster region (BCR)-abelson murine leukemia viral oncogene homolog (ABL), steroid-5-alpha-reductase, alpha polypeptide 1 (SRD5A1), steroid-5-alpha-reductase, alpha polypeptide 2 (SRD5A2), phosphoinositide-3-kinase, catalytic (PIK3C), mitogen-activated protein kinase (MAPK), p38 MAPK family, hypoxia-inducible factor 1 alpha (HIF1A), protein kinase N3 (PKN3), interleukin 17A (IL17A), interleukin 6 (IL6), interleukin 18 (IL18), tumor necrosis factor (ligand) superfamily member 13b (TNFSF13B), mitogen-activated protein kinase 1 (MAPK1), v-raf-1 murine leukemia viral oncogene homolog 1 (RAF1), v-AKT murine thymoma viral oncogene (AKT), FK506 binding protein 12-rapamycin associated protein 1 (FRAP1), mitogen-activated protein kinase 2 (MAPK2), cyclin-dependent kinase 2 (CDK2), ATP-binding cassette, subfamily B, member 1 (ABCB1), B-cell CLL/lymphoma 2 (BCL2), angiopoietin 2 (ANGPT2), checkpoint kinase 1 homolog (CHEK1), insulin-like growth factor 1 receptor (IGF1R), signal transducer and activator of transcription 3 (STAT3), matrix metalloproteinase (MMP), folate hydrolase (prostate-specific membrane antigen) 1 (FOLH1), v-myc myelocytomatosis viral oncogene homolog (avian) (MYC), telomerase RNA component (TERC), telomerase reverse transcriptase (TERT), protein kinase C, alpha (PRKCA), RAS viral (v-ras) oncogene homolog (RAS), chemokine (C-X-C motif) ligand or receptor (CXC), Wingless-Type MMTV (Murine Mammary Tumor Virus) Integration Site (WNT), toll-like receptor (TLR), Fc fragment of IgE, low affinity II, receptor for (CD23) (FCER2), FOS gene, (FOS, FOSB, FOSL1, OR FOSL2), hydroxysteroid (11-beta) dehydrogenase (HSD11B1), JUN gene (cJUN, JUNB, or JUND), thymidine phosphorylase (TYMP), early growth response (EGR), zeste homolog 2 (EZH2), cyclin D1 (CCND1), Fas (TNF receptor superfamily, member 6) (FAS), proliferating cell nuclear antigen (PCNA), fibroblast growth factor 2 (FGF2), tumor growth factor-beta (TGF-β), tumor growth factor-beta receptor (TGF-βR), tumor-associated calcium signal transducer 1 (TACSTD1), Mucin 1 (MUC1), protein tyrosine phosphatase, non-receptor-11 (Noonan Syndrome 1) (PTPN11), neuregulin 1 (NRG1), membrane metallo-endopeptidase (MME), CD19 molecule (CD19), CD40 molecule, TNF receptor superfamily member 5 (CD40), apolipoprotein B (including Ag(x) antigen) (ApoB), synuclein, alpha (non A4 component of amyloid precursor) (SNCA), silent mating type information regulation 2 homolog (SIRT2), histone deacetylase (HDAC), membrane-spanning 4-domains, subfamily A, member 1 (MS4A1), CD22 molecule (CD22), diacylglycerol o-acyltransferase 1 (DGAT1), diacylglycerol o-acyltransferase 2 (DGAT2), CD3 molecule (CD3), proprotein convertase subtilisin-like kexin type 9 (PCSK9), MET (Mesenchymal epithelial transition factor) (c-Met proto-oncogene), catenin (cadherin-associated protein) (beta-catenin) (CTNNB1), inhition of DNA binding proteins (Inhibition of Differentiation Proteins, Dominant Negative Helix-Loop-Helix Protein) (ID), protein tyrosine phosphatase, non-receptor type 1 (PTPN1), tie-1 (TIE1; tyrosine kinase with immunoglobulin and EGF factor homology domains 1), tek tyrosine kinase (TEK), fibroblast growth factor receptor (FGFR), mitogen-activated protein kinase 3 (MAPK3), survivin (BIRC5), and polo-like kinase family genes (PLK1).

3. The RNA molecule of claim 1 wherein the RNA molecule has at least one blunt end.

4. The RNA molecule of claim 1 wherein the RNA molecule has at least one 3′-overhang.

5. The RNA molecule of claim 1 further comprising at least one acyclic nucleomonomer.

6. The RNA molecule of claim 5 wherein the acyclic nucleomonomer is selected from the group consisting of: [chemical structure] [chemical structure]
wherein,
R is selected from the group consisting of hydrogen, a methyl group, C(1-10) alkyl, cholesterol, naturally or non-naturally occurring amino acid, sugar, vitamin, fluorophore, polyamine and fatty acid.

7. The RNA molecule of claim 6 wherein at least one acyclic nucleomonomer is linked to the blunt end of the RNA molecule.

8. The RNA molecule of claim 6 at least one acyclic nucleomonomer is in the double-stranded region of the RNA molecule.

9. A method for reducing the expression of a human target gene, comprising administering an RNA molecule of claim 1 to a cell expressing the target gene, wherein the RNA molecule reduces expression of the target gene in the cell.

10. The method according to claim 9 wherein the cell is a human cell.

11. A meroduplex ribonucleic acid (mdRNA) molecule that down regulates the expression of a target mRNA, the mdRNA molecules comprising a first strand of 15 to 40 nucleotides in length that is complementary to a target mRNA and a second strand and a third strand that are each complementary to non-overlapping regions of the first strand, wherein the second strand and third strand can anneal with the first strand to form at least two double-stranded regions spaced apart by a nick or a gap.

12. The mdRNA molecule of claim 11 wherein the first strand is 15 to 25 nucleotides in length or 26 to 40 nucleotides in length.

13. The mdRNA molecule of claim 11 wherein the first strand is from 19 to 24 nucleotides in length or from 25 to 29 nucleotides in length and is complementary to a human target gene selected from the group consisting of tumor necrosis factor (TNF), vascular endothelial growth factor (VEGF), vascular endothelial growth factor receptor (VEGFR), epidermal growth factor receptor (EGFR), erythroblastic leukemia viral oncogene homolog (ERBB), platelet derived growth factor (PDGF), platelet derived growth factor receptor (PDGFR), breakpoint cluster region (BCR)-abelson murine leukemia viral oncogene homolog (ABL), steroid-5-alpha-reductase, alpha polypeptide 1 (SRD5A1), steroid-5-alpha-reductase, alpha polypeptide 2 (SRD5A2), phosphoinositide-3-kinase, catalytic (PIK3C), mitogen-activated protein kinase (MAPK), p38 MAPK family, hypoxia-inducible factor 1 alpha (HIF1A), protein kinase N3 (PKN3), interleukin 17A (IL17A), interleukin 6 (IL6), interleukin 18 (IL18), tumor necrosis factor (ligand) superfamily member 13b (TNFSF13B), mitogen-activated protein kinase 1 (MAPK1), v-raf-1 murine leukemia viral oncogene homolog 1 (RAF1), v-AKT murine thymoma viral oncogene (AKT), FK506 binding protein 12-rapamycin associated protein 1 (FRAP1), mitogen-activated protein kinase 2 (MAPK2), cyclin-dependent kinase 2 (CDK2), ATP-binding cassette, subfamily B, member 1 (ABCB1), B-cell CLL/lymphoma 2 (BCL2), angiopoietin 2 (ANGPT2), checkpoint kinase 1 homolog (CHEK1), insulin-like growth factor 1 receptor (IGF1R), signal transducer and activator of transcription 3 (STAT3), matrix metalloproteinase (MMP), folate hydrolase (prostate-specific membrane antigen) 1 (FOLH1), v-myc myelocytomatosis viral oncogene homolog (avian) (MYC), telomerase RNA component (TERC), telomerase reverse transcriptase (TERT), protein kinase C, alpha (PRKCA), RAS viral (v-ras) oncogene homolog (RAS), chemokine (C-X-C motif) ligand or receptor (CXC), Wingless-Type MMTV (Murine Mammary Tumor Virus) Integration Site (WNT), toll-like receptor (TLR), Fc fragment of IgE, low affinity II, receptor for (CD23) (FCER2), FOS gene, (FOS, FOSB, FOSL1, OR FOSL2), hydroxysteroid (11-beta) dehydrogenase (HSD11B1), JUN gene (cJUN, JUNB, or JUND), thymidine phosphorylase (TYMP), early growth response (EGR), zeste homolog 2 (EZH2), cyclin D1 (CCND1), Fas (TNF receptor superfamily, member 6) (FAS), proliferating cell nuclear antigen (PCNA), fibroblast growth factor 2 (FGF2), tumor growth factor-beta (TGF-β), tumor growth factor-beta receptor (TGF-βR), tumor-associated calcium signal transducer 1 (TACSTD1), Mucin 1 (MUC1), protein tyrosine phosphatase, non-receptor-11 (Noonan Syndrome 1) (PTPN11), neuregulin 1 (NRG1), membrane metallo-endopeptidase (MME), CD19 molecule (CD19), CD40 molecule, TNF receptor superfamily member 5 (CD40), apolipoprotein B (including Ag(x) antigen) (ApoB), synuclein, alpha (non A4 component of amyloid precursor) (SNCA), silent mating type information regulation 2 homolog (SIRT2), histone deacetylase (HDAC), membrane-spanning 4-domains, subfamily A, member 1 (MS4A1), CD22 molecule (CD22), diacylglycerol o-acyltransferase 1 (DGAT1), diacylglycerol o-acyltransferase 2 (DGAT2), CD3 molecule (CD3), proprotein convertase subtilisin-like kexin type 9 (PCSK9), MET (Mesenchymal epithelial transition factor) (c-Met proto-oncogene), catenin (cadherin-associated protein) (beta-catenin) (CTNNB1), inhition of DNA binding proteins (Inhibition of Differentiation Proteins, Dominant Negative Helix-Loop-Helix Protein) (ID), protein tyrosine phosphatase, non-receptor type 1 (PTPN1), tie-1 (TIE1; tyrosine kinase with immunoglobulin and EGF factor homology domains 1), tek tyrosine kinase (TEK), fibroblast growth factor receptor (FGFR), mitogen-activated protein kinase 3 (MAPK3), survivin (BIRC5), and polo-like kinase family genes (PLK1).

14. The mdRNA molecule of claim 11 wherein the gap comprises from 1 to 10 unpaired nucleotides.

15. The mdRNA molecule of claim 11 wherein the mdRNA molecule has at least one blunt end.

16. The mdRNA molecule of claim 11 wherein the mdRNA molecule has at least one 3′-overhang comprising one to four nucleotides that are not part of the gap.

17. The mdRNA molecule of claim 11 further comprising at least on acyclic nucleomonomer.

18. The mdRNA molecule of claim 17 wherein the at least one acyclic nucleomonomer selected from the group consisting of: [chemical structure] [chemical structure]
wherein,
R is selected from the group consisting of hydrogen, methyl group, C(1-10) alkyl, cholesterol, naturally or non-naturally occurring amino acid, sugar, vitamin, fluorophore, polyamine and fatty acid.

19. The mdRNA molecule of claim 18 wherein at least one acyclic nucleomonomer is linked to the blunt end of the mdRNA molecule.

20. The mdRNA molecule of claim 18 at least one acyclic nucleomonomer is in one of the double-stranded regions of the mdRNA molecule.

21. A method for reducing the expression of a human target gene, comprising administering an mdRNA molecule of claim 11 to a cell expressing the target gene, wherein the mdRNA molecule reduces expression of the target gene in the cell.

22. The method according to claim 21 wherein the cell is a human cell.

The application's sequence listing, which the Patent Office published only in electronic form, follows.

SEQUENCE LISTING (166591 sequences)

SEQ ID NO: 1 - DNA, 21 bp, Artificial Sequence
  Description of Artificial Sequence: Synthetic oligonucleotide
  Description of Combined DNA/RNA Molecule: Synthetic oligonucleotide
cuacacaaaucagcgauuutt

SEQ ID NO: 2 - DNA, 21 bp, Artificial Sequence
  Description of Artificial Sequence: Synthetic oligonucleotide
  Description of Combined DNA/RNA Molecule: Synthetic oligonucleotide
aaaucgcugauuuguguagtt

SEQ ID NO: 3 - DNA, 25 bp, Artificial Sequence
  Description of Artificial Sequence: Synthetic oligonucleotide
  Description of Combined DNA/RNA Molecule: Synthetic oligonucleotide
cuacacaaaucagcgauuuccaugt

SEQ ID NO: 4 - RNA, 27 nt, Artificial Sequence
  Description of Artificial Sequence: Synthetic oligonucleotide
acauggaaaucgcugauuuguguaguc

SEQ ID NO: 5 - RNA, 13 nt, Artificial Sequence
  Description of Artificial Sequence: Synthetic oligonucleotide
cuacacaaaucag

SEQ ID NO: 6 - DNA, 11 bp, Artificial Sequence
  Description of Artificial Sequence: Synthetic oligonucleotide
  Description of Combined DNA/RNA Molecule: Synthetic oligonucleotide
gauuuccaugt

SEQ ID NO: 7 - DNA, 21 bp, Artificial Sequence
  Description of Artificial Sequence: Synthetic oligonucleotide
  Description of Combined DNA/RNA Molecule: Synthetic oligonucleotide
ggaucuuauuucuucggagtt

SEQ ID NO: 8 - DNA, 21 bp, Artificial Sequence
  Description of Artificial Sequence: Synthetic oligonucleotide
  Description of Combined DNA/RNA Molecule: Synthetic oligonucleotide
cuccgaagaaauaagaucctt

SEQ ID NO: 9 - RNA, 11 nt, Artificial Sequence
  Description of Artificial Sequence: Synthetic oligonucleotide
ggaucuuauuu

SEQ ID NO: 10 - DNA, 10 bp, Artificial Sequence
  Description of Artificial Sequence: Synthetic oligonucleotide
  Description of Combined DNA/RNA Molecule: Synthetic oligonucleotide
cuucggagtt

SEQ ID NO: 11 - RNA, 27 nt, Artificial Sequence
  Description of Artificial Sequence: Synthetic oligonucleotide
cauugucuccgaagaaauaagauccuu

SEQ ID NO: 12 - RNA, 8 nt, Artificial Sequence
  Description of Artificial Sequence: Synthetic oligonucleotide
  modified_base (2): LNA-G
ggaucuua

SEQ ID NO: 13 - DNA, 17 bp, Artificial Sequence
  Description of Artificial Sequence: Synthetic oligonucleotide
  Description of Combined DNA/RNA Molecule: Synthetic oligonucleotide
uuucuucggagacaatg

SEQ ID NO: 14 - DNA, 16 bp, Artificial Sequence
  Description of Artificial Sequence: Synthetic oligonucleotide
  Description of Combined DNA/RNA Molecule: Synthetic oligonucleotide
uucuucggagacaatg

SEQ ID NO: 15 - DNA, 15 bp, Artificial Sequence
  Description of Artificial Sequence: Synthetic oligonucleotide
  Description of Combined DNA/RNA Molecule: Synthetic oligonucleotide
ucuucggagacaatg

SEQ ID NO: 16 - DNA, 14 bp, Artificial Sequence
  Description of Artificial Sequence: Synthetic oligonucleotide
  Description of Combined DNA/RNA Molecule: Synthetic oligonucleotide
cuucggagacaatg

SEQ ID NO: 17 - DNA, 13 bp, Artificial Sequence
  Description of Artificial Sequence: Synthetic oligonucleotide
  Description of Combined DNA/RNA Molecule: Synthetic oligonucleotide
uucggagacaatg

SEQ ID NO: 18 - DNA, 12 bp, Artificial Sequence
  Description of Artificial Sequence: Synthetic oligonucleotide
  Description of Combined DNA/RNA Molecule: Synthetic oligonucleotide
ucggagacaatg

SEQ ID NO: 19 - DNA, 11 bp, Artificial Sequence
  Description of Artificial Sequence: Synthetic oligonucleotide
  Description of Combined DNA/RNA Molecule: Synthetic oligonucleotide
cggagacaatg

SEQ ID NO: 20 - RNA, 9 nt, Artificial Sequence
  Description of Artificial Sequence: Synthetic oligonucleotide
  modified_base (2): LNA-G
ggaucuuau

SEQ ID NO: 21 - RNA, 10 nt, Artificial Sequence
  Description of Artificial Sequence: Synthetic oligonucleotide
  modified_base (2): LNA-G
ggaucuuauu

SEQ ID NO: 22 - RNA, 11 nt, Artificial Sequence
  Description of Artificial Sequence: Synthetic oligonucleotide
  modified_base (2): LNA-G
ggaucuuauuu

SEQ ID NO: 23 - RNA, 12 nt, Artificial Sequence
  Description of Artificial Sequence: Synthetic oligonucleotide
  modified_base (2): LNA-G
ggaucuuauuuc

SEQ ID NO: 24 - RNA, 8 nt, Artificial Sequence
  Description of Artificial Sequence: Synthetic oligonucleotide
  modified_base (3): LNA-A
cuacacaa

SEQ ID NO: 25 - DNA, 13 bp, Artificial Sequence
  Description of Artificial Sequence: Synthetic oligonucleotide
  Description of Combined DNA/RNA Molecule: Synthetic oligonucleotide
  modified_base (8): LNA-A
aucagcgauuutt

SEQ ID NO: 26 - DNA, 12 bp, Artificial Sequence
  Description of Artificial Sequence: Synthetic oligonucleotide
  Description of Combined DNA/RNA Molecule: Synthetic oligonucleotide
  modified_base (7): LNA-A
ucagcgauuutt

SEQ ID NO: 27 - DNA, 11 bp, Artificial Sequence
  Description of Artificial Sequence: Synthetic oligonucleotide
  Description of Combined DNA/RNA Molecule: Synthetic oligonucleotide
  modified_base (6): LNA-A
cagcgauuutt

SEQ ID NO: 28 - DNA, 10 bp, Artificial Sequence
  Description of Artificial Sequence: Synthetic oligonucleotide
  Description of Combined DNA/RNA Molecule: Synthetic oligonucleotide
  modified_base (5): LNA-A
agcgauuutt

SEQ ID NO: 29 - DNA, 9 bp, Artificial Sequence
  Description of Artificial Sequence: Synthetic oligonucleotide
  Description of Combined DNA/RNA Molecule: Synthetic oligonucleotide
  modified_base (4): LNA-A
gcgauuutt

SEQ ID NO: 30 - DNA, 8 bp, Artificial Sequence
  Description of Artificial Sequence: Synthetic oligonucleotide
  Description of Combined DNA/RNA Molecule: Synthetic oligonucleotide
  modified_base (3): LNA-A
cgauuutt

SEQ ID NO: 31 - DNA, 7 bp, Artificial Sequence
  Description of Artificial Sequence: Synthetic oligonucleotide
  Description of Combined DNA/RNA Molecule: Synthetic oligonucleotide
  modified_base (2): LNA-A
gauuutt

SEQ ID NO: 32 - RNA, 9 nt, Artificial Sequence
  Description of Artificial Sequence: Synthetic oligonucleotide
  modified_base (3): LNA-A
cuacacaaa

SEQ ID NO: 33 - RNA, 10 nt, Artificial Sequence
  Description of Artificial Sequence: Synthetic oligonucleotide
  modified_base (3): LNA-A
cuacacaaau

SEQ ID NO: 34 - RNA, 11 nt, Artificial Sequence
  Description of Artificial Sequence: Synthetic oligonucleotide
  modified_base (3): LNA-A
cuacacaaauc

SEQ ID NO: 35 - RNA, 12 nt, Artificial Sequence
  Description of Artificial Sequence: Synthetic oligonucleotide
  modified_base (3): LNA-A
cuacacaaauca

SEQ ID NO: 36 - RNA, 13 nt, Artificial Sequence
  Description of Artificial Sequence: Synthetic oligonucleotide
  modified_base (3): LNA-A
cuacacaaaucag

SEQ ID NO: 37 - RNA, 14 nt, Artificial Sequence
  Description of Artificial Sequence: Synthetic oligonucleotide
  modified_base (3): LNA-A
cuacacaaaucagc

SEQ ID NO: 38 - RNA, 13 nt, Artificial Sequence
  Description of Artificial Sequence: Synthetic oligonucleotide
  modified_base (2): LNA-G
ggaucuuauuucu

SEQ ID NO: 39 - RNA, 14 nt, Artificial Sequence
  Description of Artificial Sequence: Synthetic oligonucleotide
  modified_base (2): LNA-G
ggaucuuauuucuu

SEQ ID NO: 40 - RNA, 8 nt, Artificial Sequence
  Description of Artificial Sequence: Synthetic oligonucleotide
  modified_base (2): LNA-G
  modified_base (8): LNA-A
ggaucuua

SEQ ID NO: 41 - RNA, 9 nt, Artificial Sequence
  Description of Artificial Sequence: Synthetic oligonucleotide
  modified_base (2): LNA-G
  modified_base (9): LNA-U
ggaucuuau

SEQ ID NO: 42 - RNA, 10 nt, Artificial Sequence
  Description of Artificial Sequence: Synthetic oligonucleotide
  modified_base (2): LNA-G
  modified_base (10): LNA-U
ggaucuuauu

SEQ ID NO: 43 - RNA, 11 nt, Artificial Sequence
  Description of Artificial Sequence: Synthetic oligonucleotide
  modified_base (2): LNA-G
  modified_base (11): LNA-U
ggaucuuauuu

SEQ ID NO: 44 - RNA, 12 nt, Artificial Sequence
  Description of Artificial Sequence: Synthetic oligonucleotide
  modified_base (2): LNA-G
  modified_base (12): LNA-C
ggaucuuauuuc

SEQ ID NO: 45 - RNA, 13 nt, Artificial Sequence
  Description of Artificial Sequence: Synthetic oligonucleotide
  modified_base (2): LNA-G
  modified_base (13): LNA-U
ggaucuuauuucu

SEQ ID NO: 46 - RNA, 14 nt, Artificial Sequence
  Description of Artificial Sequence: Synthetic oligonucleotide
  modified_base (2): LNA-G
  modified_base (14): LNA-U
ggaucuuauuucuu

SEQ ID NO: 47 - DNA, 13 bp, Artificial Sequence
  Description of Artificial Sequence: Synthetic oligonucleotide
  Description of Combined DNA/RNA Molecule: Synthetic oligonucleotide
  modified_base (8): LNA-G
uuucuucggagtt

SEQ ID NO: 48 - DNA, 12 bp, Artificial Sequence
  Description of Artificial Sequence: Synthetic oligonucleotide
  Description of Combined DNA/RNA Molecule: Synthetic oligonucleotide
  modified_base (7): LNA-G
uucuucggagtt

SEQ ID NO: 49 - DNA, 11 bp, Artificial Sequence
  Description of Artificial Sequence: Synthetic oligonucleotide
  Description of Combined DNA/RNA Molecule: Synthetic oligonucleotide
  modified_base (6): LNA-G
ucuucggagtt

SEQ ID NO: 50 - DNA, 10 bp, Artificial Sequence
  Description of Artificial Sequence: Synthetic oligonucleotide
  Description of Combined DNA/RNA Molecule: Synthetic oligonucleotide
  modified_base (5): LNA-G
cuucggagtt

SEQ ID NO: 51 - DNA, 9 bp, Artificial Sequence
  Description of Artificial Sequence: Synthetic oligonucleotide
  Description of Combined DNA/RNA Molecule: Synthetic oligonucleotide
  modified_base (4): LNA-G
uucggagtt

SEQ ID NO: 52 - DNA, 8 bp, Artificial Sequence
  Description of Artificial Sequence: Synthetic oligonucleotide
  Description of Combined DNA/RNA Molecule: Synthetic oligonucleotide
  modified_base (3): LNA-G
ucggagtt

SEQ ID NO: 53 - DNA, 7 bp, Artificial Sequence
  Description of Artificial Sequence: Synthetic oligonucleotide
  Description of Combined DNA/RNA Molecule: Synthetic oligonucleotide
  modified_base (2): LNA-G
cggagtt

SEQ ID NO: 54 - DNA, 13 bp, Artificial Sequence
  Description of Artificial Sequence: Synthetic oligonucleotide
  Description of Combined DNA/RNA Molecule: Synthetic oligonucleotide
  modified_base (1): LNA-U
  modified_base (8): LNA-G
uuucuucggagtt

SEQ ID NO: 55 - DNA, 12 bp, Artificial Sequence
  Description of Artificial Sequence: Synthetic oligonucleotide
  Description of Combined DNA/RNA Molecule: Synthetic oligonucleotide
  modified_base (1): LNA-U
  modified_base (7): LNA-G
uucuucggagtt

SEQ ID NO: 56 - DNA, 11 bp, Artificial Sequence
  Description of Artificial Sequence: Synthetic oligonucleotide
  Description of Combined DNA/RNA Molecule: Synthetic oligonucleotide
  modified_base (1): LNA-U
  modified_base (6): LNA-G
ucuucggagtt

SEQ ID NO: 57 - DNA, 10 bp, Artificial Sequence
  Description of Artificial Sequence: Synthetic oligonucleotide
  Description of Combined DNA/RNA Molecule: Synthetic oligonucleotide
  modified_base (1): LNA-C
  modified_base (5): LNA-G
cuucggagtt

SEQ ID NO: 58 - DNA, 9 bp, Artificial Sequence
  Description of Artificial Sequence: Synthetic oligonucleotide
  Description of Combined DNA/RNA Molecule: Synthetic oligonucleotide
  modified_base (1): LNA-U
  modified_base (4): LNA-G
uucggagtt

SEQ ID NO: 59 - DNA, 8 bp, Artificial Sequence
  Description of Artificial Sequence: Synthetic oligonucleotide
  Description of Combined DNA/RNA Molecule: Synthetic oligonucleotide
  modified_base (1): LNA-U
  modified_base (3): LNA-G
ucggagtt

SEQ ID NO: 60 - DNA, 7 bp, Artificial Sequence
  Description of Artificial Sequence: Synthetic oligonucleotide
  Description of Combined DNA/RNA Molecule: Synthetic oligonucleotide
  modified_base (1): LNA-C
  modified_base (2): LNA-G
cggagtt

SEQ ID NO: 61 - DNA, 21 bp, Artificial Sequence
  Description of Artificial Sequence: Synthetic oligonucleotide
  Description of Combined DNA/RNA Molecule: Synthetic oligonucleotide
  modified_base (2): LNA-G
  modified_base (16): LNA-G
ggaucuuauuucuucggagtt

SEQ ID NO: 62 - DNA, 25 bp, Artificial Sequence
  Description of Artificial Sequence: Synthetic oligonucleotide
  Description of Combined DNA/RNA Molecule: Synthetic oligonucleotide
ggaucuuauuucuucggagacaatg

SEQ ID NO: 63 - RNA, 25 nt, Artificial Sequence
  Description of Artificial Sequence: Synthetic oligonucleotide
guauuuugaugaggaguucacggcc

SEQ ID NO: 64 - RNA, 25 nt, Artificial Sequence
  Description of Artificial Sequence: Synthetic oligonucleotide
ggcccagaugaucaccaucacacca

SEQ ID NO: 65 - RNA, 25 nt, Artificial Sequence
  Description of Artificial Sequence: Synthetic oligonucleotide
gggaagaaaacuauccugcggguuu

SEQ ID NO: 66 - RNA, 25 nt, Artificial Sequence
  Description of Artificial Sequence: Synthetic oligonucleotide
guuuuaauuuauuucauccaguuug

SEQ ID NO: 67 - RNA, 25 nt, Artificial Sequence
  Description of Artificial Sequence: Synthetic oligonucleotide
acguagggaaauguuaaggacuucu

SEQ ID NO: 68 - RNA, 25 nt, Artificial Sequence
  Description of Artificial Sequence: Synthetic oligonucleotide
ccaggguuuacccagugggacagag

SEQ ID NO: 69 - RNA, 25 nt, Artificial Sequence
  Description of Artificial Sequence: Synthetic oligonucleotide
agcaagguuuaaauuuguuauugug

SEQ ID NO: 70 - RNA, 25 nt, Artificial Sequence
  Description of Artificial Sequence: Synthetic oligonucleotide
uguauuauguuguucaaaugcauuu

SEQ ID NO: 71 - RNA, 25 nt, Artificial Sequence
  Description of Artificial Sequence: Synthetic oligonucleotide
uuuuaaucuuugugacaggaaagcc

SEQ ID NO: 72 - RNA, 25 nt, Artificial Sequence
  Description of Artificial Sequence: Synthetic oligonucleotide
uuaaucuuugugacaggaaagcccu

SEQ ID NO: 73 - RNA, 25 nt, Artificial Sequence
  Description of Artificial Sequence: Synthetic oligonucleotide
gcugcuuaugucucccagcauggcc

SEQ ID NO: 74 - RNA, 25 nt, Artificial Sequence
  Description of Artificial Sequence: Synthetic oligonucleotide
aaguguuucagaagcuucucccuga

SEQ ID NO: 75 - RNA, 25 nt, Artificial Sequence
  Description of Artificial Sequence: Synthetic oligonucleotide
gaccaucaauaaggaagaagcccuu

SEQ ID NO: 76 - RNA, 25 nt, Artificial Sequence
  Description of Artificial Sequence: Synthetic oligonucleotide
ccaucaauaaggaagaagcccuuca

SEQ ID NO: 77 - RNA, 25 nt, Artificial Sequence
  Description of Artificial Sequence: Synthetic oligonucleotide
ucaauaaggaagaagcccuucagcg

SEQ ID NO: 78 - RNA, 25 nt, Artificial Sequence
  Description of Artificial Sequence: Synthetic oligonucleotide
aauaaggaagaagcccuucagcggc

SEQ ID NO: 79 - RNA, 25 nt, Artificial Sequence
  Description of Artificial Sequence: Synthetic oligonucleotide
aggaagaagcccuucagcggccagu

SEQ ID NO: 80 - RNA, 25 nt, Artificial Sequence
  Description of Artificial Sequence: Synthetic oligonucleotide
gcauaacuaaaggugaaaagcuccg

SEQ ID NO: 81 - RNA, 25 nt, Artificial Sequence
  Description of Artificial Sequence: Synthetic oligonucleotide
cauaacuaaaggugaaaagcuccgg

SEQ ID NO: 82 - RNA, 25 nt, Artificial Sequence
  Description of Artificial Sequence: Synthetic oligonucleotide
cuacaucacgccagucaacagucug

SEQ ID NO: 83 - RNA, 25 nt, Artificial Sequence
  Description of Artificial Sequence: Synthetic oligonucleotide
acuggauuuaagcagaguucaaaag

SEQ ID NO: 84 - RNA, 25 nt, Artificial Sequence
  Description of Artificial Sequence: Synthetic oligonucleotide
cuggauuuaagcagaguucaaaagc

SEQ ID NO: 85 - RNA, 25 nt, Artificial Sequence
  Description of Artificial Sequence: Synthetic oligonucleotide
gauuuaagcagaguucaaaagcccu

SEQ ID NO: 86 - RNA, 25 nt, Artificial Sequence
  Description of Artificial Sequence: Synthetic oligonucleotide
auuuaagcagaguucaaaagcccuu

SEQ ID NO: 87 - RNA, 25 nt, Artificial Sequence
  Description of Artificial Sequence: Synthetic oligonucleotide
uuaagcagaguucaaaagcccuuca

SEQ ID NO: 88 - RNA, 25 nt, Artificial Sequence
  Description of Artificial Sequence: Synthetic oligonucleotide
uaagcagaguucaaaagcccuucag

SEQ ID NO: 89 - RNA, 25 nt, Artificial Sequence
  Description of Artificial Sequence: Synthetic oligonucleotide
agcagaguucaaaagcccuucagcg

SEQ ID NO: 90 - RNA, 25 nt, Artificial Sequence
  Description of Artificial Sequence: Synthetic oligonucleotide
cucagggucugagugaagccgcucg

SEQ ID NO: 91 - RNA, 25 nt, Artificial Sequence
  Description of Artificial Sequence: Synthetic oligonucleotide
caagcaacuacaucacgccagucaa

SEQ ID NO: 92 - RNA, 25 nt, Artificial Sequence
  Description of Artificial Sequence: Synthetic oligonucleotide
aucaauggcagcuucuuggugcgug

SEQ ID NO: 93 - RNA, 25 nt, Artificial Sequence
  Description of Artificial Sequence: Synthetic oligonucleotide
uuccagcccacauuggauucaucag

SEQ ID NO: 94 - RNA, 25 nt, Artificial Sequence
  Description of Artificial Sequence: Synthetic oligonucleotide
cagcugagaauguggaauaccuaag

SEQ ID NO: 95 - RNA, 25 nt, Artificial Sequence
  Description of Artificial Sequence: Synthetic oligonucleotide
aacguaucuccuaauuugaggcuca

SEQ ID NO: 96 - RNA, 25 nt, Artificial Sequence
  Description of Artificial Sequence: Synthetic oligonucleotide
ccuaaaauaauuucucuacaauugg

SEQ ID NO: 97 - RNA, 25 nt, Artificial Sequence
  Description of Artificial Sequence: Synthetic oligonucleotide
uggaagauucagcuaguuaggagcc

SEQ ID NO: 98 - RNA, 25 nt, Artificial Sequence
  Description of Artificial Sequence: Synthetic oligonucleotide
uuaaacucuccuagucaauauccac

SEQ ID NO: 99 - RNA, 25 nt, Artificial Sequence
  Description of Artificial Sequence: Synthetic oligonucleotide
cagccuacaguuauguucagucaca

SEQ ID NO: 100 - RNA, 25 nt, Artificial Sequence
  Description of Artificial Sequence: Synthetic oligonucleotide
guuauguucagucacacacacauac

SEQ ID NO: 101 - RNA, 25 nt, Artificial Sequence
  Description of Artificial Sequence: Synthetic oligonucleotide
cacauacaaaauguuccuuuugcuu

SEQ ID NO: 102 - RNA, 25 nt, Artificial Sequence
  Description of Artificial Sequence: Synthetic oligonucleotide
uccuuuugcuuuuaaaguaauuuuu

SEQ ID NO: 103 - RNA, 25 nt, Artificial Sequence
  Description of Artificial Sequence: Synthetic oligonucleotide
ugaccugugaagcaacagucaaugg

SEQ ID NO: 104 - RNA, 25 nt, Artificial Sequence
  Description of Artificial Sequence: Synthetic oligonucleotide
cuaucucacacaucgacaaaccaau

SEQ ID NO: 105 - RNA, 25 nt, Artificial Sequence
  Description of Artificial Sequence: Synthetic oligonucleotide
uguccucaauuguacugcuaccacu

SEQ ID NO: 106 - RNA, 25 nt, Artificial Sequence
  Description of Artificial Sequence: Synthetic oligonucleotide
aaaccguagcuggcaagcggucuua

SEQ ID NO: 107 - RNA, 25 nt, Artificial Sequence
  Description of Artificial Sequence: Synthetic oligonucleotide
uagcuggcaagcggucuuaccggcu

SEQ ID NO: 108 - RNA, 25 nt, Artificial Sequence
  Description of Artificial Sequence: Synthetic oligonucleotide
uuguaugguuaaaagauggguuacc

SEQ ID NO: 109 - RNA, 25 nt, Artificial Sequence
  Description of Artificial Sequence: Synthetic oligonucleotide
ugguuaaaagauggguuaccugcga

SEQ ID NO: 110 - RNA, 25 nt, Artificial Sequence
  Description of Artificial Sequence: Synthetic oligonucleotide
cagggaauuauacaaucuugcugag

SEQ ID NO: 111 - RNA, 25 nt, Artificial Sequence
  Description of Artificial Sequence: Synthetic oligonucleotide
acaaucuugcugagcauaaaacagu

SEQ ID NO: 112 - RNA, 25 nt, Artificial Sequence
  Description of Artificial Sequence: Synthetic oligonucleotide
ccaauaaugaagaguccuuuauccu

SEQ ID NO: 113 - RNA, 25 nt, Artificial Sequence
  Description of Artificial Sequence: Synthetic oligonucleotide
acuuuggauguuccaacgcaaguug

SEQ ID NO: 114 - RNA, 25 nt, Artificial Sequence
  Description of Artificial Sequence: Synthetic oligonucleotide
aaugcuuccacuaaacugaaaccau

SEQ ID NO: 115 - RNA, 25 nt, Artificial Sequence
  Description of Artificial Sequence: Synthetic oligonucleotide
gagaaaguuugacuuuguuaaauau

SEQ ID NO: 116 - RNA, 25 nt, Artificial Sequence
  Description of Artificial Sequence: Synthetic oligonucleotide
aaagaacuacuguauauuaaaaguu

SEQ ID NO: 117 - RNA, 25 nt, Artificial Sequence
  Description of Artificial Sequence: Synthetic oligonucleotide
uuagaaauacggguuuugacuuaac

SEQ ID NO: 118 - RNA, 25 nt, Artificial Sequence
  Description of Artificial Sequence: Synthetic oligonucleotide
aacauggguacagcaaacucagcac

SEQ ID NO: 119 - RNA, 25 nt, Artificial Sequence
  Description of Artificial Sequence: Synthetic oligonucleotide
aaagacacagaagaugcugaccuca

SEQ ID NO: 120 - RNA, 25 nt, Artificial Sequence
  Description of Artificial Sequence: Synthetic oligonucleotide
uaguagggagguuuauucagaucgc

SEQ ID NO: 121 - RNA, 25 nt, Artificial Sequence
  Description of Artificial Sequence: Synthetic oligonucleotide
gccuucugcagcaggguucugggau

SEQ ID NO: 122 - RNA, 25 nt, Artificial Sequence
  Description of Artificial Sequence: Synthetic oligonucleotide
ggucugguacauauuggaaauuaug

SEQ ID NO: 123 - RNA, 25 nt, Artificial Sequence
  Description of Artificial Sequence: Synthetic oligonucleotide
cuaguccuuccgauggaagcacuag

SEQ ID NO: 124 - RNA, 25 nt, Artificial Sequence
  Description of Artificial Sequence: Synthetic oligonucleotide
ccagugaauauuguuuuuaugugga

SEQ ID NO: 125 - RNA, 25 nt, Artificial Sequence
  Description of Artificial Sequence: Synthetic oligonucleotide
augaauucaaguuggaauugguaga

SEQ ID NO: 126 - RNA, 25 nt, Artificial Sequence
  Description of Artificial Sequence: Synthetic oligonucleotide
caggacacagauuuagacuuggaga

SEQ ID NO: 127 - RNA, 25 nt, Artificial Sequence
  Description of Artificial Sequence: Synthetic oligonucleotide
cucaaagcacaguuacaguauucca

SEQ ID NO: 128 - RNA, 25 nt, Artificial Sequence
  Description of Artificial Sequence: Synthetic oligonucleotide
accacugccaccacugaugaauuaa

SEQ ID NO: 129 - RNA, 25 nt, Artificial Sequence
  Description of Artificial Sequence: Synthetic oligonucleotide
gaaacuacuagugccacaucaucac

SEQ ID NO: 130 - RNA, 25 nt, Artificial Sequence
  Description of Artificial Sequence: Synthetic oligonucleotide
aagucggacagccucaccaaacaga

SEQ ID NO: 131 - RNA, 25 nt, Artificial Sequence
  Description of Artificial Sequence: Synthetic oligonucleotide
gaaagcgaaaaauggaacaugaugg

SEQ ID NO: 132 - RNA, 25 nt, Artificial Sequence
  Description of Artificial Sequence: Synthetic oligonucleotide
cccucugauuuagcauguagacugc

SEQ ID NO: 133 - RNA, 25 nt, Artificial Sequence
  Description of Artificial Sequence: Synthetic oligonucleotide
ugagcuauuuaaggaucuauuuaug

SEQ ID NO: 134 - RNA, 25 nt, Artificial Sequence
  Description of Artificial Sequence: Synthetic oligonucleotide
aaaaggugaaaaagcacuauuauca

SEQ ID NO: 135 - RNA, 25 nt, Artificial Sequence
  Description of Artificial Sequence: Synthetic oligonucleotide
gaaaaagcacuauuaucaguucugc

SEQ ID NO: 136 - RNA, 25 nt, Artificial Sequence
  Description of Artificial Sequence: Synthetic oligonucleotide
ggcugaaaagaaagauuaaaccuac

SEQ ID NO: 137 - RNA, 25 nt, Artificial Sequence
  Description of Artificial Sequence: Synthetic oligonucleotide
uaaacccuuauaauaaaauccuucu

SEQ ID NO: 138 - RNA, 25 nt, Artificial Sequence
  Description of Artificial Sequence: Synthetic oligonucleotide
cauacuauuagccaaugcuguagac

SEQ ID NO: 139 - RNA, 25 nt, Artificial Sequence
  Description of Artificial Sequence: Synthetic oligonucleotide
gacagaagcauuuugauaggaauag

SEQ ID NO: 140 - RNA, 25 nt, Artificial Sequence
  Description of Artificial Sequence: Synthetic oligonucleotide
agagcaaauaagauaauggcccuga

SEQ ID NO: 141 - RNA, 25 nt, Artificial Sequence
  Description of Artificial Sequence: Synthetic oligonucleotide
ccaacauuuuucucuuccucaagca

SEQ ID NO: 142 - RNA, 25 nt, Artificial Sequence
  Description of Artificial Sequence: Synthetic oligonucleotide
uuaaguaugagaaaaguucagccca

SEQ ID NO: 143 - RNA, 25 nt, Artificial Sequence
  Description of Artificial Sequence: Synthetic oligonucleotide
caggaauaaagauggcugcugaacc

SEQ ID NO: 144 - RNA, 25 nt, Artificial Sequence
  Description of Artificial Sequence: Synthetic oligonucleotide
aauuugaaugaccaaguucucuuca

SEQ ID NO: 145 - RNA, 25 nt, Artificial Sequence
  Description of Artificial Sequence: Synthetic oligonucleotide
auguauaaagauagccagccuagag

SEQ ID NO: 146 - RNA, 25 nt, Artificial Sequence
  Description of Artificial Sequence: Synthetic oligonucleotide
ggcuguaacuaucucugugaagugu

SEQ ID NO: 147 - RNA, 25 nt, Artificial Sequence
  Description of Artificial Sequence: Synthetic oligonucleotide
ucugugaagugugagaaaauuucaa

SEQ ID NO: 148 - RNA, 25 nt, Artificial Sequence
  Description of Artificial Sequence: Synthetic oligonucleotide
ccuuuaaggaaaugaauccuccuga

SEQ ID NO: 149 - RNA, 25 nt, Artificial Sequence
  Description of Artificial Sequence: Synthetic oligonucleotide
aaggauacaaaaagugacaucauau

SEQ ID NO: 150 - RNA, 25 nt, Artificial Sequence
  Description of Artificial Sequence: Synthetic oligonucleotide
agaugcaauuugaaucuucaucaua

SEQ ID NO: 151 - RNA, 25 nt, Artificial Sequence
  Description of Artificial Sequence: Synthetic oligonucleotide
guucaaaacgaagacuagcuauuaa

SEQ ID NO: 152 - RNA, 25 nt, Artificial Sequence
  Description of Artificial Sequence: Synthetic oligonucleotide
gugaaaccucaucucuacuaaaaau

SEQ ID NO: 153 - RNA, 25 nt, Artificial Sequence
  Description of Artificial Sequence: Synthetic oligonucleotide
acgaaagagaagcucuaucucgccu

SEQ ID NO: 154 - RNA, 25 nt, Artificial Sequence
  Description of Artificial Sequence: Synthetic oligonucleotide
cuccacaagcgccuucgguccaguu

SEQ ID NO: 155 - RNA, 25 nt, Artificial Sequence
  Description of Artificial Sequence: Synthetic oligonucleotide
gagaagauuccaaagauguagccgc

SEQ ID NO: 156 - RNA, 25 nt, Artificial Sequence
  Description of Artificial Sequence: Synthetic oligonucleotide
aaucuggauucaaugaggagacuug

SEQ ID NO: 157 - RNA, 25 nt, Artificial Sequence
  Description of Artificial Sequence: Synthetic oligonucleotide
agaacagauuugagaguagugagga

SEQ ID NO: 158 - RNA, 25 nt, Artificial Sequence
  Description of Artificial Sequence: Synthetic oligonucleotide
ccagagcugugcagaugaguacaaa

SEQ ID NO: 159 - RNA, 25 nt, Artificial Sequence
  Description of Artificial Sequence: Synthetic oligonucleotide
ccucagauuguuguuguuaaugggc

SEQ ID NO: 160 - RNA, 25 nt, Artificial Sequence
  Description of Artificial Sequence: Synthetic oligonucleotide
cuauuuuaauuauuuuuaauuuauu

SEQ ID NO: 161 - RNA, 25 nt, Artificial Sequence
  Description of Artificial Sequence: Synthetic oligonucleotide
uuuaauuuauuaauauuuaaauaug

SEQ ID NO: 162 - RNA, 25 nt, Artificial Sequence
  Description of Artificial Sequence: Synthetic oligonucleotide
augcaguuugaauauccuuuguuuc

SEQ ID NO: 163 - RNA, 25 nt, Artificial Sequence
  Description of Artificial Sequence: Synthetic oligonucleotide
caugcugcuggcgucuaaguguuug

SEQ ID NO: 164 - RNA, 25 nt, Artificial Sequence
  Description of Artificial Sequence: Synthetic oligonucleotide
agaugugcauuucaccugugacaaa

SEQ ID NO: 165 - RNA, 25 nt, Artificial Sequence
  Description of Artificial Sequence: Synthetic oligonucleotide
ucaaaaccugugccaggcugaauua

SEQ ID NO: 166 - RNA, 25 nt, Artificial Sequence
  Description of Artificial Sequence: Synthetic oligonucleotide
gaauguggguagucauucuuacaau

SEQ ID NO: 167 - RNA, 25 nt, Artificial Sequence
  Description of Artificial Sequence: Synthetic oligonucleotide
auguggguagucauucuuacaauug

SEQ ID NO: 168 - RNA, 25 nt, Artificial Sequence
  Description of Artificial Sequence: Synthetic oligonucleotide
ugaaaaugagcaucagagaguguac

SEQ ID NO: 169 - RNA, 25 nt, Artificial Sequence
  Description of Artificial Sequence: Synthetic oligonucleotide
uugcuuuucauguagaacucagcag

SEQ ID NO: 170 - RNA, 25 nt, Artificial Sequence
  Description of Artificial Sequence: Synthetic oligonucleotide
uguauuucuauauuuauuuucagua

SEQ ID NO: 171 - RNA, 25 nt, Artificial Sequence
  Description of Artificial Sequence: Synthetic oligonucleotide
uuugauuaauguuucuuaaauggaa

SEQ ID NO: 172 - RNA, 25 nt, Artificial Sequence
  Description of Artificial Sequence: Synthetic oligonucleotide
caacguguauagugccuaaaauugu

SEQ ID NO: 173 - RNA, 25 nt, Artificial Sequence
  Description of Artificial Sequence: Synthetic oligonucleotide
cauauccuuggcuacuaacaucugg

SEQ ID NO: 174 - RNA, 25 nt, Artificial Sequence
  Description of Artificial Sequence: Synthetic oligonucleotide
uacuaacaucuggagacugugagcu

SEQ ID NO: 175 - RNA, 25 nt, Artificial Sequence
  Description of Artificial Sequence: Synthetic oligonucleotide
cauaaguugugugcuuuuuauuaau

SEQ ID NO: 176 - RNA, 25 nt, Artificial Sequence
  Description of Artificial Sequence: Synthetic oligonucleotide
gcaucauuuuggcucuucuuacauu

SEQ ID NO: 177 - RNA, 25 nt, Artificial Sequence
  Description of Artificial Sequence: Synthetic oligonucleotide
gcucuucuuacauuuguaaaaaugu

SEQ ID NO: 178 - RNA, 25 nt, Artificial Sequence
  Description of Artificial Sequence: Synthetic oligonucleotide
agauuaggucaucuuaauucauauu

SEQ ID NO: 179 - RNA, 25 nt, Artificial Sequence
  Description of Artificial Sequence: Synthetic oligonucleotide
auggaauugaaagaacuaaucauga

SEQ ID NO: 180 - RNA, 25 nt, Artificial Sequence
  Description of Artificial Sequence: Synthetic oligonucleotide
cacacucauuccuucugcucuuggg

SEQ ID NO: 181 - RNA, 25 nt, Artificial Sequence
  Description of Artificial Sequence: Synthetic oligonucleotide
uguagagguaaccaguagcuuugag

SEQ ID NO: 182 - RNA, 25 nt, Artificial Sequence
  Description of Artificial Sequence: Synthetic oligonucleotide
caaccacaugccacguaauauuuca

SEQ ID NO: 183 - RNA, 25 nt, Artificial Sequence
  Description of Artificial Sequence: Synthetic oligonucleotide
ucggaaacaaguuauucucuucacu

SEQ ID NO: 184 - RNA, 25 nt, Artificial Sequence
  Description of Artificial Sequence: Synthetic oligonucleotide
acucccaauaacuaaugcuaagaaa

SEQ ID NO: 185 - RNA, 25 nt, Artificial Sequence
  Description of Artificial Sequence: Synthetic oligonucleotide
aaugcuaagaaaugcugaaaaucaa

SEQ ID NO: 186 - RNA, 25 nt, Artificial Sequence
  Description of Artificial Sequence: Synthetic oligonucleotide
gucuuucucuaaauaugauuacuuu

SEQ ID NO: 187 - RNA, 25 nt, Artificial Sequence
  Description of Artificial Sequence: Synthetic oligonucleotide
ugaauuucaggcauuuuguucuaca

SEQ ID NO: 188 - RNA, 25 nt, Artificial Sequence
  Description of Artificial Sequence: Synthetic oligonucleotide
cgauucccucucacccgggacucuc

SEQ ID NO: 189 - RNA, 25 nt, Artificial Sequence
  Description of Artificial Sequence: Synthetic oligonucleotide
aggaaagugaaccuuuaaaguaaag

SEQ ID NO: 190 - RNA, 25 nt, Artificial Sequence
  Description of Artificial Sequence: Synthetic oligonucleotide
gaggcugcaugcucuggaagccugg

SEQ ID NO: 191 - RNA, 25 nt, Artificial Sequence
  Description of Artificial Sequence: Synthetic oligonucleotide
ucucugaacagaaaacaaaagagag

SEQ ID NO: 192 - RNA, 25 nt, Artificial Sequence
  Description of Artificial Sequence: Synthetic oligonucleotide
aacuuggcuguaaucaguuaugccg

SEQ ID NO: 193 - RNA, 25 nt, Artificial Sequence
  Description of Artificial Sequence: Synthetic oligonucleotide
agaagccaaaauuaaaagaagucca

SEQ ID NO: 194 - RNA, 25 nt, Artificial Sequence
  Description of Artificial Sequence: Synthetic oligonucleotide
auuaaaagaaguccaggugagguua

SEQ ID NO: 195 - RNA, 25 nt, Artificial Sequence
  Description of Artificial Sequence: Synthetic oligonucleotide
gaauccggauuaucgggaagaggac

SEQ ID NO: 196 - RNA, 25 nt, Artificial Sequence
  Description of Artificial Sequence: Synthetic oligonucleotide
aaugugacaucaaagcaaguauugu

SEQ ID NO: 197 - RNA, 25 nt, Artificial Sequence
  Description of Artificial Sequence: Synthetic oligonucleotide
caucaaagcaaguauuguagcacuc

SEQ ID NO: 198 - RNA, 25 nt, Artificial Sequence
  Description of Artificial Sequence: Synthetic oligonucleotide
agagagagaaaacaaaaccacaaau

SEQ ID NO: 199 - RNA, 25 nt, Artificial Sequence
  Description of Artificial Sequence: Synthetic oligonucleotide
ucgcuguaguauuuaagcccauaca

SEQ ID NO: 200 - RNA, 25 nt, Artificial Sequence
  Description of Artificial Sequence: Synthetic oligonucleotide
cgcuguaguauuuaagcccauacag

SEQ ID NO: 201 - RNA, 25 nt, Artificial Sequence
  Description of Artificial Sequence: Synthetic oligonucleotide
auuuaagcccauacagaaaccuucc

SEQ ID NO: 202 - RNA, 25 nt, Artificial Sequence
  Description of Artificial Sequence: Synthetic oligonucleotide
auuaaaauaaacaugguauaccuac

SEQ ID NO: 203 - RNA, 25 nt, Artificial Sequence
  Description of Artificial Sequence: Synthetic oligonucleotide
cuguucugaucggccaguuuucgga

SEQ ID NO: 204 - RNA, 25 nt, Artificial Sequence
  Description of Artificial Sequence: Synthetic oligonucleotide
aaauaauuugaacuuuggaacaggg

SEQ ID NO: 205 - RNA, 25 nt, Artificial Sequence
  Description of Artificial Sequence: Synthetic oligonucleotide
ugcgaccuuaauuuaacuuuccagu

SEQ ID NO: 206 - RNA, 25 nt, Artificial Sequence
  Description of Artificial Sequence: Synthetic oligonucleotide
cugagaaagcuaaaguuugguuuug

SEQ ID NO: 207 - RNA, 25 nt, Artificial Sequence
  Description of Artificial Sequence: Synthetic oligonucleotide
aguaaagaugcuacuucccacugua

SEQ ID NO: 208 - RNA, 25 nt, Artificial Sequence
  Description of Artificial Sequence: Synthetic oligonucleotide
cugcuuaauugcugauaccauauga

SEQ ID NO: 209 - RNA, 25 nt, Artificial Sequence
  Description of Artificial Sequence: Synthetic oligonucleotide
uaccauaugaaugaaacaugggcug

SEQ ID NO: 210 - RNA, 25 nt, Artificial Sequence
  Description of Artificial Sequence: Synthetic oligonucleotide
aacuuucuuauccaacuuuuucaua

SEQ ID NO: 211 - RNA, 25 nt, Artificial Sequence
  Description of Artificial Sequence: Synthetic oligonucleotide
ccuugcaugacaucaugaggccgga

SEQ ID NO: 212 - RNA, 25 nt, Artificial Sequence
  Description of Artificial Sequence: Synthetic oligonucleotide
ugaauuuguauaugacugcauuugu

SEQ ID NO: 213 - RNA, 25 nt, Artificial Sequence
  Description of Artificial Sequence: Synthetic oligonucleotide
gaauccuaguagaauguuuacuacc

SEQ ID NO: 214 - RNA, 25 nt, Artificial Sequence
  Description of Artificial Sequence: Synthetic oligonucleotide
gaaagggaagaauuuuuugaugaaa

SEQ ID NO: 215 - RNA, 25 nt, Artificial Sequence
  Description of Artificial Sequence: Synthetic oligonucleotide
uaucggcaugccagugugugaauuu

SEQ ID NO: 216 - RNA, 25 nt, Artificial Sequence
  Description of Artificial Sequence: Synthetic oligonucleotide
caccucauaguagagcaauguaugu

SEQ ID NO: 217 - RNA, 25 nt, Artificial Sequence
  Description of Artificial Sequence: Synthetic oligonucleotide
ccagaauugccaaagcacauauaua

SEQ ID NO: 218 - RNA, 25 nt, Artificial Sequence
  Description of Artificial Sequence: Synthetic oligonucleotide
uggugaucuggguaauaguuucucc

SEQ ID NO: 219 - RNA, 25 nt, Artificial Sequence
  Description of Artificial Sequence: Synthetic oligonucleotide
gaucuggguaauaguuucuccaaau

SEQ ID NO: 220 - RNA, 25 nt, Artificial Sequence
  Description of Artificial Sequence: Synthetic oligonucleotide
ggaugugaugaauacuuccuagaaa

SEQ ID NO: 221 - RNA, 25 nt, Artificial Sequence
  Description of Artificial Sequence: Synthetic oligonucleotide
cauuuccacagcuacaccauauaug

SEQ ID NO: 222 - RNA, 25 nt, Artificial Sequence
  Description of Artificial Sequence: Synthetic oligonucleotide
acagcuacaccauauaugaauggag

SEQ ID NO: 223 - RNA, 25 nt, Artificial Sequence
  Description of Artificial Sequence: Synthetic oligonucleotide
ugcaguucuuacacgagaagaagau

SEQ ID NO: 224 - RNA, 25 nt, Artificial Sequence
  Description of Artificial Sequence: Synthetic oligonucleotide
acgagaagaagaucauuuacaggga

SEQ ID NO: 225 - RNA, 25 nt, Artificial Sequence
  Description of Artificial Sequence: Synthetic oligonucleotide
cgagaagaagaucauuuacagggac

SEQ ID NO: 226 - RNA, 25 nt, Artificial Sequence
  Description of Artificial Sequence: Synthetic oligonucleotide
aagaagaucauuuacagggaccuga

SEQ ID NO: 227 - RNA, 25 nt, Artificial Sequence
  Description of Artificial Sequence: Synthetic oligonucleotide
agaggaagagguguuugacugcauc

SEQ ID NO: 228 - RNA, 25 nt, Artificial Sequence
  Description of Artificial Sequence: Synthetic oligonucleotide
gaggaagagguguuugacugcaucg

SEQ ID NO: 229 - RNA, 25 nt, Artificial Sequence
  Description of Artificial Sequence: Synthetic oligonucleotide
cuacuuugagggcgaguucacaggg

SEQ ID NO: 230 - RNA, 25 nt, Artificial Sequence
  Description of Artificial Sequence: Synthetic oligonucleotide
agggcaucuccuggcaccucugucc

SEQ ID NO: 231 - RNA, 25 nt, Artificial Sequence
  Description of Artificial Sequence: Synthetic oligonucleotide
ggagugauaugguuugucuuuuuaa

SEQ ID NO: 232 - RNA, 25 nt, Artificial Sequence
  Description of Artificial Sequence: Synthetic oligonucleotide
gagugauaugguuugucuuuuuaag

SEQ ID NO: 233 - RNA, 25 nt, Artificial Sequence
  Description of Artificial Sequence: Synthetic oligonucleotide
ugcaguaaagauccuaaagguuguc

SEQ ID NO: 234 - RNA, 25 nt, Artificial Sequence
  Description of Artificial Sequence: Synthetic oligonucleotide
aguaaagauccuaaagguugucgac

SEQ ID NO: 235 - RNA, 25 nt, Artificial Sequence
  Description of Artificial Sequence: Synthetic oligonucleotide
ugacaaaggacaaccuggcaauugu

SEQ ID NO: 236 - RNA, 25 nt, Artificial Sequence
  Description of Artificial Sequence: Synthetic oligonucleotide
gcaauugugacccaguggugcgagg

SEQ ID NO: 237 - RNA, 25 nt, Artificial Sequence
  Description of Artificial Sequence: Synthetic oligonucleotide
aacaucauccauagagacaugaaau

SEQ ID NO: 238 - RNA, 25 nt, Artificial Sequence
  Description of Artificial Sequence: Synthetic oligonucleotide
ugaaauccaacaauauauuucucca

SEQ ID NO: 239 - RNA, 25 nt, Artificial Sequence
  Description of Artificial Sequence: Synthetic oligonucleotide
aacaauauauuucuccaugaaggcu

SEQ ID NO: 240 - RNA, 25 nt, Artificial Sequence
  Description of Artificial Sequence: Synthetic oligonucleotide
aacaguaaagucacgcuggaguggu

SEQ ID NO: 241 - RNA, 25 nt, Artificial Sequence
  Description of Artificial Sequence: Synthetic oligonucleotide
ugugaagaaaguaaaggaagagagg

SEQ ID NO: 242 - RNA, 25 nt, Artificial Sequence
  Description of Artificial Sequence: Synthetic oligonucleotide
cuuccgagccauccuugcaucgggc

SEQ ID NO: 243 - RNA, 25 nt, Artificial Sequence
  Description of Artificial Sequence: Synthetic oligonucleotide
aauggagguugaauauccuacugug

SEQ ID NO: 244 - RNA, 25 nt, Artificial Sequence
  Description of Artificial Sequence: Synthetic oligonucleotide
ggagguugaauauccuacuguguaa

SEQ ID NO: 245 - RNA, 25 nt, Artificial Sequence
  Description of Artificial Sequence: Synthetic oligonucleotide
auuuugaguuuucccuuguagugua

SEQ ID NO: 246 - RNA, 25 nt, Artificial Sequence
  Description of Artificial Sequence: Synthetic oligonucleotide
uauccuguuuguucuuuguugauug

SEQ ID NO: 247 - RNA, 25 nt, Artificial Sequence
  Description of Artificial Sequence: Synthetic oligonucleotide
ccuguuuguucuuuguugauugaaa

SEQ ID NO: 248 - RNA, 25 nt, Artificial Sequence
  Description of Artificial Sequence: Synthetic oligonucleotide
cucuacagccuucuuuuucuuccau

SEQ ID NO: 249 - RNA, 25 nt, Artificial Sequence
  Description of Artificial Sequence: Synthetic oligonucleotide
ucuuccauagcuaaucuuccuucua

SEQ ID NO: 250 - RNA, 25 nt, Artificial Sequence
  Description of Artificial Sequence: Synthetic oligonucleotide
auaaucuuccuguugaaugcuucau

SEQ ID NO: 251 - RNA, 25 nt, Artificial Sequence
  Description of Artificial Sequence: Synthetic oligonucleotide
uaaucuuccuguugaaugcuucaug

SEQ ID NO: 252 - RNA, 25 nt, Artificial Sequence
  Description of Artificial Sequence: Synthetic oligonucleotide
cuucaugacuugaauucuacuuuga

SEQ ID NO: 253 - RNA, 25 nt, Artificial Sequence
  Description of Artificial Sequence: Synthetic oligonucleotide
aagagggagagaagcaacuacagac

SEQ ID NO: 254 - RNA, 25 nt, Artificial Sequence
  Description of Artificial Sequence: Synthetic oligonucleotide
cgucuccuaccagaccaaggucaac

SEQ ID NO: 255 - RNA, 25 nt, Artificial Sequence
  Description of Artificial Sequence: Synthetic oligonucleotide
gaucaaucggcccgacuaucucgac

SEQ ID NO: 256 - RNA, 25 nt, Artificial Sequence
  Description of Artificial Sequence: Synthetic oligonucleotide
ggacgaacauccaaccuucccaaac

SEQ ID NO: 257 - RNA, 25 nt, Artificial Sequence
  Description of Artificial Sequence: Synthetic oligonucleotide
agggucggaacccaagcuuagaacu

SEQ ID NO: 258 - RNA, 25 nt, Artificial Sequence
  Description of Artificial Sequence: Synthetic oligonucleotide
ucggaacccaagcuuagaacuuuaa

SEQ ID NO: 259 - RNA, 25 nt, Artificial Sequence
  Description of Artificial Sequence: Synthetic oligonucleotide
acccaagcuuagaacuuuaagcaac

SEQ ID NO: 260 - RNA, 25 nt, Artificial Sequence
  Description of Artificial Sequence: Synthetic oligonucleotide
gaacuuuaagcaacaagaccaccac

SEQ ID NO: 261 - RNA, 25 nt, Artificial Sequence
  Description of Artificial Sequence: Synthetic oligonucleotide
acuauucaguggcgagaaauaaagu

SEQ ID NO: 262 - RNA, 25 nt, Artificial Sequence
  Description of Artificial Sequence: Synthetic oligonucleotide
cuauucaguggcgagaaauaaaguu

SEQ ID NO: 263 - RNA, 25 nt, Artificial Sequence
  Description of Artificial Sequence: Synthetic oligonucleotide
aaacacagauaacaggaaaugaucc

SEQ ID NO: 264 - RNA, 25 nt, Artificial Sequence
  Description of Artificial Sequence: Synthetic oligonucleotide
cuuaagaaaagagaagaaaugaaac

SEQ ID NO: 265 - RNA, 25 nt, Artificial Sequence
  Description of Artificial Sequence: Synthetic oligonucleotide
cugaaggaguguguuuccauccucc

SEQ ID NO: 266 - RNA, 25 nt, Artificial Sequence
  Description of Artificial Sequence: Synthetic oligonucleotide
ucaccgcgggacugaaaaucuuuga

SEQ ID NO: 267 - RNA, 25 nt, Artificial Sequence
  Description of Artificial Sequence: Synthetic oligonucleotide
agcagaaauaagcgugccguucagg

SEQ ID NO: 268 - RNA, 25 nt, Artificial Sequence
  Description of Artificial Sequence: Synthetic oligonucleotide
aagcgugccguucaggguccagaag

SEQ ID NO: 269 - RNA, 25 nt, Artificial Sequence
  Description of Artificial Sequence: Synthetic oligonucleotide
agaaacagucacucaagacugcuug

SEQ ID NO: 270 - RNA, 25 nt, Artificial Sequence
  Description of Artificial Sequence: Synthetic oligonucleotide
agaggaagaagguccaugucuuugg

SEQ ID NO: 271 - RNA, 25 nt, Artificial Sequence
  Description of Artificial Sequence: Synthetic oligonucleotide
uguauucaaaauaugccugaaacac

SEQ ID NO: 272 - RNA, 25 nt, Artificial Sequence
  Description of Artificial Sequence: Synthetic oligonucleotide
auuuuccucccuuucucuguaccuc

SEQ ID NO: 273 - RNA, 25 nt, Artificial Sequence
  Description of Artificial Sequence: Synthetic oligonucleotide
caaagaaagauagagcaagacaaga

SEQ ID NO: 274 - RNA, 25 nt, Artificial Sequence
  Description of Artificial Sequence: Synthetic oligonucleotide
aagaaagauagagcaagacaagaaa

SEQ ID NO: 275 - RNA, 25 nt, Artificial Sequence
  Description of Artificial Sequence: Synthetic oligonucleotide
gaaagcauuuguuuguacaagaucc

SEQ ID NO: 276 - RNA, 25 nt, Artificial Sequence
  Description of Artificial Sequence: Synthetic oligonucleotide
ugaguuaaacgaacguacuugcaga

SEQ ID NO: 277 - RNA, 25 nt, Artificial Sequence
  Description of Artificial Sequence: Synthetic oligonucleotide
acugauacagaacgaucgauacaga

SEQ ID NO: 278 - RNA, 25 nt, Artificial Sequence
  Description of Artificial Sequence: Synthetic oligonucleotide
auauuauauauauauaaaaauaaau

SEQ ID NO: 279 - RNA, 25 nt, Artificial Sequence
  Description of Artificial Sequence: Synthetic oligonucleotide
auuauauauauauaaaaauaaauau

SEQ ID NO: 280 - RNA, 25 nt, Artificial Sequence
  Description of Artificial Sequence: Synthetic oligonucleotide
ucacuggauguauuugacugcugug

SEQ ID NO: 281 - RNA, 25 nt, Artificial Sequence
  Description of Artificial Sequence: Synthetic oligonucleotide
cagggaagaggaggagaugagagac

SEQ ID NO: 282 - RNA, 25 nt, Artificial Sequence
  Description of Artificial Sequence: Synthetic oligonucleotide
augaucuuuuuuuugucccacuugg

SEQ ID NO: 283 - RNA, 27 nt, Artificial Sequence
  Description of Artificial Sequence: Synthetic oligonucleotide
ggccgugaacuccucaucaaaauaccu

SEQ ID NO: 284 - RNA, 27 nt, Artificial Sequence
  Description of Artificial Sequence: Synthetic oligonucleotide
uggugugauggugaucaucugggccgu

SEQ ID NO: 285 - RNA, 27 nt, Artificial Sequence
  Description of Artificial Sequence: Synthetic oligonucleotide
aaacccgcaggauaguuuucuucccua

SEQ ID NO: 286 - RNA, 27 nt, Artificial Sequence
  Description of Artificial Sequence: Synthetic oligonucleotide
caaacuggaugaaauaaauuaaaaccc

SEQ ID NO: 287 - RNA, 27 nt, Artificial Sequence
  Description of Artificial Sequence: Synthetic oligonucleotide
agaaguccuuaacauuucccuacguga

SEQ ID NO: 288 - RNA, 27 nt, Artificial Sequence
  Description of Artificial Sequence: Synthetic oligonucleotide
cucugucccacuggguaaacccuggcc

SEQ ID NO: 289 - RNA, 27 nt, Artificial Sequence
  Description of Artificial Sequence: Synthetic oligonucleotide
cacaauaacaaauuuaaaccuugcucc

SEQ ID NO: 290 - RNA, 27 nt, Artificial Sequence
  Description of Artificial Sequence: Synthetic oligonucleotide
aaaugcauuugaacaacauaauacaca

SEQ ID NO: 291 - RNA, 27 nt, Artificial Sequence
  Description of Artificial Sequence: Synthetic oligonucleotide
ggcuuuccugucacaaagauuaaaaac

SEQ ID NO: 292 - RNA, 27 nt, Artificial Sequence
  Description of Artificial Sequence: Synthetic oligonucleotide
agggcuuuccugucacaaagauuaaaa

SEQ ID NO: 293 - RNA, 27 nt, Artificial Sequence
  Description of Artificial Sequence: Synthetic oligonucleotide
ggccaugcugggagacauaagcagcag

SEQ ID NO: 294 - RNA, 27 nt, Artificial Sequence
  Description of Artificial Sequence: Synthetic oligonucleotide
ucagggagaagcuucugaaacacuucu

SEQ ID NO: 295 - RNA, 27 nt, Artificial Sequence
  Description of Artificial Sequence: Synthetic oligonucleotide
aagggcuucuuccuuauugauggucag

SEQ ID NO: 296 - RNA, 27 nt, Artificial Sequence
  Description of Artificial Sequence: Synthetic oligonucleotide
ugaagggcuucuuccuuauugaugguc

SEQ ID NO: 297 - RNA, 27 nt, Artificial Sequence
  Description of Artificial Sequence: Synthetic oligonucleotide
cgcugaagggcuucuuccuuauugaug

SEQ ID NO: 298 - RNA, 27 nt, Artificial Sequence
  Description of Artificial Sequence: Synthetic oligonucleotide
gccgcugaagggcuucuuccuuauuga

SEQ ID NO: 299 - RNA, 27 nt, Artificial Sequence
  Description of Artificial Sequence: Synthetic oligonucleotide
acuggccgcugaagggcuucuuccuua

SEQ ID NO: 300 - RNA, 27 nt, Artificial Sequence
  Description of Artificial Sequence: Synthetic oligonucleotide
cggagcuuuucaccuuuaguuaugcuu

SEQ ID NO: 301 - RNA, 27 nt, Artificial Sequence
  Description of Artificial Sequence: Synthetic oligonucleotide
ccggagcuuuucaccuuuaguuaugcu

SEQ ID NO: 302 - RNA, 27 nt, Artificial Sequence
  Description of Artificial Sequence: Synthetic oligonucleotide
cagacuguugacuggcgugauguaguu

SEQ ID NO: 303 - RNA, 27 nt, Artificial Sequence
  Description of Artificial Sequence: Synthetic oligonucleotide
cuuuugaacucugcuuaaauccagugg

SEQ ID NO: 304 - RNA, 27 nt, Artificial Sequence
  Description of Artificial Sequence: Synthetic oligonucleotide
gcuuuugaacucugcuuaaauccagug

SEQ ID NO: 305 - RNA, 27 nt, Artificial Sequence
  Description of Artificial Sequence: Synthetic oligonucleotide
agggcuuuugaacucugcuuaaaucca

SEQ ID NO: 306 - RNA, 27 nt, Artificial Sequence
  Description of Artificial Sequence: Synthetic oligonucleotide
aagggcuuuugaacucugcuuaaaucc

SEQ ID NO: 307 - RNA, 27 nt, Artificial Sequence
  Description of Artificial Sequence: Synthetic oligonucleotide
ugaagggcuuuugaacucugcuuaaau

SEQ ID NO: 308 - RNA, 27 nt, Artificial Sequence
  Description of Artificial Sequence: Synthetic oligonucleotide
cugaagggcuuuugaacucugcuuaaa

SEQ ID NO: 309 - RNA, 27 nt, Artificial Sequence
  Description of Artificial Sequence: Synthetic oligonucleotide
cgcugaagggcuuuugaacucugcuua

SEQ ID NO: 310 - RNA, 27 nt, Artificial Sequence
  Description of Artificial Sequence: Synthetic oligonucleotide
cgagcggcuucacucagacccugaggc

SEQ ID NO: 311 - RNA, 27 nt, Artificial Sequence
  Description of Artificial Sequence: Synthetic oligonucleotide
uugacuggcgugauguaguugcuuggg

SEQ ID NO: 312 - RNA, 27 nt, Artificial Sequence
  Description of Artificial Sequence: Synthetic oligonucleotide
cacgcaccaagaagcugccauugaucc

SEQ ID NO: 313 - RNA, 27 nt, Artificial Sequence
  Description of Artificial Sequence: Synthetic oligonucleotide
cugaugaauccaaugugggcuggaauc

SEQ ID NO: 314 - RNA, 27 nt, Artificial Sequence
  Description of Artificial Sequence: Synthetic oligonucleotide
cuuagguauuccacauucucagcugug

SEQ ID NO: 315 - RNA, 27 nt, Artificial Sequence
  Description of Artificial Sequence: Synthetic oligonucleotide
ugagccucaaauuaggagauacguuuu

SEQ ID NO: 316 - RNA, 27 nt, Artificial Sequence
  Description of Artificial Sequence: Synthetic oligonucleotide
ccaauuguagagaaauuauuuuaggaa

SEQ ID NO: 317 - RNA, 27 nt, Artificial Sequence
  Description of Artificial Sequence: Synthetic oligonucleotide
ggcuccuaacuagcugaaucuuccaau

SEQ ID NO: 318 - RNA, 27 nt, Artificial Sequence
  Description of Artificial Sequence: Synthetic oligonucleotide
guggauauugacuaggagaguuuaaaa

SEQ ID NO: 319 - RNA, 27 nt, Artificial Sequence
  Description of Artificial Sequence: Synthetic oligonucleotide
ugugacugaacauaacuguaggcugaa

SEQ ID NO: 320 - RNA, 27 nt, Artificial Sequence
  Description of Artificial Sequence: Synthetic oligonucleotide
guaugugugugugacugaacauaacug

SEQ ID NO: 321 - RNA, 27 nt, Artificial Sequence
  Description of Artificial Sequence: Synthetic oligonucleotide
aagcaaaaggaacauuuuguaugugug

SEQ ID NO: 322 - RNA, 27 nt, Artificial Sequence
  Description of Artificial Sequence: Synthetic oligonucleotide
aaaaauuacuuuaaaagcaaaaggaac

SEQ ID NO: 323 - RNA, 27 nt, Artificial Sequence
  Description of Artificial Sequence: Synthetic oligonucleotide
ccauugacuguugcuucacaggucaga

SEQ ID NO: 324 - RNA, 27 nt, Artificial Sequence
  Description of Artificial Sequence: Synthetic oligonucleotide
auugguuugucgaugugugagauaguu

SEQ ID NO: 325 - RNA, 27 nt, Artificial Sequence
  Description of Artificial Sequence: Synthetic oligonucleotide
agugguagcaguacaauugaggacaag

SEQ ID NO: 326 - RNA, 27 nt, Artificial Sequence
  Description of Artificial Sequence: Synthetic oligonucleotide
uaagaccgcuugccagcuacgguuuca

SEQ ID NO: 327 - RNA, 27 nt, Artificial Sequence
  Description of Artificial Sequence: Synthetic oligonucleotide
agccgguaagaccgcuugccagcuacg

SEQ ID NO: 328 - RNA, 27 nt, Artificial Sequence
  Description of Artificial Sequence: Synthetic oligonucleotide
gguaacccaucuuuuaaccauacaacu

SEQ ID NO: 329 - RNA, 27 nt, Artificial Sequence
  Description of Artificial Sequence: Synthetic oligonucleotide
ucgcagguaacccaucuuuuaaccaua

SEQ ID NO: 330 - RNA, 27 nt, Artificial Sequence
  Description of Artificial Sequence: Synthetic oligonucleotide
cucagcaagauuguauaauucccugca

SEQ ID NO: 331 - RNA, 27 nt, Artificial Sequence
  Description of Artificial Sequence: Synthetic oligonucleotide
acuguuuuaugcucagcaagauuguau

SEQ ID NO: 332 - RNA, 27 nt, Artificial Sequence
  Description of Artificial Sequence: Synthetic oligonucleotide
aggauaaaggacucuucauuauuggaa

SEQ ID NO: 333 - RNA, 27 nt, Artificial Sequence
  Description of Artificial Sequence: Synthetic oligonucleotide
caacuugcguuggaacauccaaagugu

SEQ ID NO: 334 - RNA, 27 nt, Artificial Sequence
  Description of Artificial Sequence: Synthetic oligonucleotide
augguuucaguuuaguggaagcauuua

SEQ ID NO: 335 - RNA, 27 nt, Artificial Sequence
  Description of Artificial Sequence: Synthetic oligonucleotide
auauuuaacaaagucaaacuuucucac

SEQ ID NO: 336 - RNA, 27 nt, Artificial Sequence
  Description of Artificial Sequence: Synthetic oligonucleotide
aacuuuuaauauacaguaguucuuuuc

SEQ ID NO: 337 - RNA, 27 nt, Artificial Sequence
  Description of Artificial Sequence: Synthetic oligonucleotide
guuaagucaaaacccguauuucuaaag

SEQ ID NO: 338 - RNA, 27 nt, Artificial Sequence
  Description of Artificial Sequence: Synthetic oligonucleotide
gugcugaguuugcuguacccauguuga

SEQ ID NO: 339 - RNA, 27 nt, Artificial Sequence
  Description of Artificial Sequence: Synthetic oligonucleotide
ugaggucagcaucuucugugucuuuac

SEQ ID NO: 340 - RNA, 27 nt, Artificial Sequence
  Description of Artificial Sequence: Synthetic oligonucleotide
gcgaucugaauaaaccucccuacuagc

SEQ ID NO: 341 - RNA, 27 nt, Artificial Sequence
  Description of Artificial Sequence: Synthetic oligonucleotide
aucccagaacccugcugcagaaggcca

SEQ ID NO: 342 - RNA, 27 nt, Artificial Sequence
  Description of Artificial Sequence: Synthetic oligonucleotide
cauaauuuccaauauguaccagaccuu

SEQ ID NO: 343 - RNA, 27 nt, Artificial Sequence
  Description of Artificial Sequence: Synthetic oligonucleotide
cuagugcuuccaucggaaggacuaggu

SEQ ID NO: 344 - RNA, 27 nt, Artificial Sequence
  Description of Artificial Sequence: Synthetic oligonucleotide
uccacauaaaaacaauauucacuggga

SEQ ID NO: 345 - RNA, 27 nt, Artificial Sequence
  Description of Artificial Sequence: Synthetic oligonucleotide
ucuaccaauuccaacuugaauucauug

SEQ ID NO: 346 - RNA, 27 nt, Artificial Sequence
  Description of Artificial Sequence: Synthetic oligonucleotide
ucuccaagucuaaaucuguguccugag

SEQ ID NO: 347 - RNA, 27 nt, Artificial Sequence
  Description of Artificial Sequence: Synthetic oligonucleotide
uggaauacuguaacugugcuuugagga

SEQ ID NO: 348 - RNA, 27 nt, Artificial Sequence
  Description of Artificial Sequence: Synthetic oligonucleotide
uuaauucaucagugguggcagugguag

SEQ ID NO: 349 - RNA, 27 nt, Artificial Sequence
  Description of Artificial Sequence: Synthetic oligonucleotide
gugaugauguggcacuaguaguuucuu

SEQ ID NO: 350 - RNA, 27 nt, Artificial Sequence
  Description of Artificial Sequence: Synthetic oligonucleotide
ucuguuuggugaggcuguccgacuuug

SEQ ID NO: 351 - RNA, 27 nt, Artificial Sequence
  Description of Artificial Sequence: Synthetic oligonucleotide
ccaucauguuccauuuuucgcuuucuc

SEQ ID NO: 352 - RNA, 27 nt, Artificial Sequence
  Description of Artificial Sequence: Synthetic oligonucleotide
gcagucuacaugcuaaaucagagggua

SEQ ID NO: 353 - RNA, 27 nt, Artificial Sequence
  Description of Artificial Sequence: Synthetic oligonucleotide
cauaaauagauccuuaaauagcucaaa

SEQ ID NO: 354 - RNA, 27 nt, Artificial Sequence
  Description of Artificial Sequence: Synthetic oligonucleotide
ugauaauagugcuuuuucaccuuuuuc

SEQ ID NO: 355 - RNA, 27 nt, Artificial Sequence
  Description of Artificial Sequence: Synthetic oligonucleotide
gcagaacugauaauagugcuuuuucac

SEQ ID NO: 356 - RNA, 27 nt, Artificial Sequence
  Description of Artificial Sequence: Synthetic oligonucleotide
guagguuuaaucuuucuuuucagccau

SEQ ID NO: 357 - RNA, 27 nt, Artificial Sequence
  Description of Artificial Sequence: Synthetic oligonucleotide
agaaggauuuuauuauaaggguuuaau

SEQ ID NO: 358 - RNA, 27 nt, Artificial Sequence
  Description of Artificial Sequence: Synthetic oligonucleotide
gucuacagcauuggcuaauaguaugaa

SEQ ID NO: 359 - RNA, 27 nt, Artificial Sequence
  Description of Artificial Sequence: Synthetic oligonucleotide
cuauuccuaucaaaaugcuucugucua

SEQ ID NO: 360 - RNA, 27 nt, Artificial Sequence
  Description of Artificial Sequence: Synthetic oligonucleotide
ucagggccauuaucuuauuugcucuau

SEQ ID NO: 361 - RNA, 27 nt, Artificial Sequence
  Description of Artificial Sequence: Synthetic oligonucleotide
ugcuugaggaagagaaaaauguugguc

SEQ ID NO: 362 - RNA, 27 nt, Artificial Sequence
  Description of Artificial Sequence: Synthetic oligonucleotide
ugggcugaacuuuucucauacuuaaag

SEQ ID NO: 363 - RNA, 27 nt, Artificial Sequence
  Description of Artificial Sequence: Synthetic oligonucleotide
gguucagcagccaucuuuauuccugcg

SEQ ID NO: 364 - RNA, 27 nt, Artificial Sequence
  Description of Artificial Sequence: Synthetic oligonucleotide
ugaagagaacuuggucauucaaauuuc

SEQ ID NO: 365 - RNA, 27 nt, Artificial Sequence
  Description of Artificial Sequence: Synthetic oligonucleotide
cucuaggcuggcuaucuuuauacauac

SEQ ID NO: 366 - RNA, 27 nt, Artificial Sequence
  Description of Artificial Sequence: Synthetic oligonucleotide
acacuucacagagauaguuacagccau

SEQ ID NO: 367 - RNA, 27 nt, Artificial Sequence
  Description of Artificial Sequence: Synthetic oligonucleotide
uugaaauuuucucacacuucacagaga

SEQ ID NO: 368 - RNA, 27 nt, Artificial Sequence
  Description of Artificial Sequence: Synthetic oligonucleotide
ucaggaggauucauuuccuuaaaggaa

SEQ ID NO: 369 - RNA, 27 nt, Artificial Sequence
  Description of Artificial Sequence: Synthetic oligonucleotide
auaugaugucacuuuuuguauccuuga

SEQ ID NO: 370 - RNA, 27 nt, Artificial Sequence
  Description of Artificial Sequence: Synthetic oligonucleotide
uaugaugaagauucaaauugcaucuua

SEQ ID NO: 371 - RNA, 27 nt, Artificial Sequence
  Description of Artificial Sequence: Synthetic oligonucleotide
uuaauagcuagucuucguuuugaacag

SEQ ID NO: 372 - RNA, 27 nt, Artificial Sequence
  Description of Artificial Sequence: Synthetic oligonucleotide
auuuuuaguagagaugagguuucacca

SEQ ID NO: 373 - RNA, 27 nt, Artificial Sequence
  Description of Artificial Sequence: Synthetic oligonucleotide
aggcgagauagagcuucucuuucguuc

SEQ ID NO: 374 - RNA, 27 nt, Artificial Sequence
  Description of Artificial Sequence: Synthetic oligonucleotide
aacuggaccgaaggcgcuuguggagaa

SEQ ID NO: 375 - RNA, 27 nt, Artificial Sequence
  Description of Artificial Sequence: Synthetic oligonucleotide
gcggcuacaucuuuggaaucuucuccu

SEQ ID NO: 376 - RNA, 27 nt, Artificial Sequence
  Description of Artificial Sequence: Synthetic oligonucleotide
caagucuccucauugaauccagauugg

SEQ ID NO: 377 - RNA, 27 nt, Artificial Sequence
  Description of Artificial Sequence: Synthetic oligonucleotide
uccucacuacucucaaaucuguucugg

SEQ ID NO: 378 - RNA, 27 nt, Artificial Sequence
  Description of Artificial Sequence: Synthetic oligonucleotide
uuuguacucaucugcacagcucuggcu

SEQ ID NO: 379 - RNA, 27 nt, Artificial Sequence
  Description of Artificial Sequence: Synthetic oligonucleotide
gcccauuaacaacaacaaucugaggug

SEQ ID NO: 380 - RNA, 27 nt, Artificial Sequence
  Description of Artificial Sequence: Synthetic oligonucleotide
aauaaauuaaaaauaauuaaaauagug

SEQ ID NO: 381 - RNA, 27 nt, Artificial Sequence
  Description of Artificial Sequence: Synthetic oligonucleotide
cauauuuaaauauuaauaaauuaaaaa

SEQ ID NO: 382 - RNA, 27 nt, Artificial Sequence
  Description of Artificial Sequence: Synthetic oligonucleotide
gaaacaaaggauauucaaacugcauag

SEQ ID NO: 383 - RNA, 27 nt, Artificial Sequence
  Description of Artificial Sequence: Synthetic oligonucleotide
caaacacuuagacgccagcagcauggg

SEQ ID NO: 384 - RNA, 27 nt, Artificial Sequence
  Description of Artificial Sequence: Synthetic oligonucleotide
uuugucacaggugaaaugcacaucuga

SEQ ID NO: 385 - RNA, 27 nt, Artificial Sequence
  Description of Artificial Sequence: Synthetic oligonucleotide
uaauucagccuggcacagguuuugauc

SEQ ID NO: 386 - RNA, 27 nt, Artificial Sequence
  Description of Artificial Sequence: Synthetic oligonucleotide
auuguaagaaugacuacccacauucac

SEQ ID NO: 387 - RNA, 27 nt, Artificial Sequence
  Description of Artificial Sequence: Synthetic oligonucleotide
caauuguaagaaugacuacccacauuc

SEQ ID NO: 388 - RNA, 27 nt, Artificial Sequence
  Description of Artificial Sequence: Synthetic oligonucleotide
guacacucucugaugcucauuuucaua

SEQ ID NO: 389 - RNA, 27 nt, Artificial Sequence
  Description of Artificial Sequence: Synthetic oligonucleotide
cugcugaguucuacaugaaaagcaaau

SEQ ID NO: 390 - RNA, 27 nt, Artificial Sequence
  Description of Artificial Sequence: Synthetic oligonucleotide
uacugaaaauaaauauagaaauacaac

SEQ ID NO: 391 - RNA, 27 nt, Artificial Sequence
  Description of Artificial Sequence: Synthetic oligonucleotide
uuccauuuaagaaacauuaaucaaaac

SEQ ID NO: 392 - RNA, 27 nt, Artificial Sequence
  Description of Artificial Sequence: Synthetic oligonucleotide
acaauuuuaggcacuauacacguuguu

SEQ ID NO: 393 - RNA, 27 nt, Artificial Sequence
  Description of Artificial Sequence: Synthetic oligonucleotide
ccagauguuaguagccaaggauauggu

SEQ ID NO: 394 - RNA, 27 nt, Artificial Sequence
  Description of Artificial Sequence: Synthetic oligonucleotide
agcucacagucuccagauguuaguagc

SEQ ID NO: 395 - RNA, 27 nt, Artificial Sequence
  Description of Artificial Sequence: Synthetic oligonucleotide
auuaauaaaaagcacacaacuuauggc

SEQ ID NO: 396 - RNA, 27 nt, Artificial Sequence
  Description of Artificial Sequence: Synthetic oligonucleotide
aauguaagaagagccaaaaugaugcau

SEQ ID NO: 397 - RNA, 27 nt, Artificial Sequence
  Description of Artificial Sequence: Synthetic oligonucleotide
acauuuuuacaaauguaagaagagcca

SEQ ID NO: 398 - RNA, 27 nt, Artificial Sequence
  Description of Artificial Sequence: Synthetic oligonucleotide
aauaugaauuaagaugaccuaaucugu

SEQ ID NO: 399 - RNA, 27 nt, Artificial Sequence
  Description of Artificial Sequence: Synthetic oligonucleotide
ucaugauuaguucuuucaauuccaucc

SEQ ID NO: 400 - RNA, 27 nt, Artificial Sequence
  Description of Artificial Sequence: Synthetic oligonucleotide
cccaagagcagaaggaaugagugugca

SEQ ID NO: 401 - RNA, 27 nt, Artificial Sequence
  Description of Artificial Sequence: Synthetic oligonucleotide
cucaaagcuacugguuaccucuacacc

SEQ ID NO: 402 - RNA, 27 nt, Artificial Sequence
  Description of Artificial Sequence: Synthetic oligonucleotide
ugaaauauuacguggcaugugguuggg

SEQ ID NO: 403 - RNA, 27 nt, Artificial Sequence
  Description of Artificial Sequence: Synthetic oligonucleotide
agugaagagaauaacuuguuuccgaag

SEQ ID NO: 404 - RNA, 27 nt, Artificial Sequence
  Description of Artificial Sequence: Synthetic oligonucleotide
uuucuuagcauuaguuauugggaguga

SEQ ID NO: 405 - RNA, 27 nt, Artificial Sequence
  Description of Artificial Sequence: Synthetic oligonucleotide
uugauuuucagcauuucuuagcauuag

SEQ ID NO: 406 - RNA, 27 nt, Artificial Sequence
  Description of Artificial Sequence: Synthetic oligonucleotide
aaaguaaucauauuuagagaaagacag

SEQ ID NO: 407 - RNA, 27 nt, Artificial Sequence
  Description of Artificial Sequence: Synthetic oligonucleotide
uguagaacaaaaugccugaaauucagc

SEQ ID NO: 408 - RNA, 27 nt, Artificial Sequence
  Description of Artificial Sequence: Synthetic oligonucleotide
gagagucccgggugagagggaaucgcc

SEQ ID NO: 409 - RNA, 27 nt, Artificial Sequence
  Description of Artificial Sequence: Synthetic oligonucleotide
cuuuacuuuaaagguucacuuuccuug

SEQ ID NO: 410 - RNA, 27 nt, Artificial Sequence
  Description of Artificial Sequence: Synthetic oligonucleotide
ccaggcuuccagagcaugcagccuccu

SEQ ID NO: 411 - RNA, 27 nt, Artificial Sequence
  Description of Artificial Sequence: Synthetic oligonucleotide
cucucuuuuguuuucuguucagagaaa

SEQ ID NO: 412 - RNA, 27 nt, Artificial Sequence
  Description of Artificial Sequence: Synthetic oligonucleotide
cggcauaacugauuacagccaaguuca

SEQ ID NO: 413 - RNA, 27 nt, Artificial Sequence
  Description of Artificial Sequence: Synthetic oligonucleotide
uggacuucuuuuaauuuuggcuucuuc

SEQ ID NO: 414 - RNA, 27 nt, Artificial Sequence
  Description of Artificial Sequence: Synthetic oligonucleotide
uaaccucaccuggacuucuuuuaauuu

SEQ ID NO: 415 - RNA, 27 nt, Artificial Sequence
  Description of Artificial Sequence: Synthetic oligonucleotide
guccucuucccgauaauccggauucag

SEQ ID NO: 416 - RNA, 27 nt, Artificial Sequence
  Description of Artificial Sequence: Synthetic oligonucleotide
acaauacuugcuuugaugucacauuaa

SEQ ID NO: 417 - RNA, 27 nt, Artificial Sequence
  Description of Artificial Sequence: Synthetic oligonucleotide
gagugcuacaauacuugcuuugauguc

SEQ ID NO: 418 - RNA, 27 nt, Artificial Sequence
  Description of Artificial Sequence: Synthetic oligonucleotide
auuugugguuuuguuuucucucucucu

SEQ ID NO: 419 - RNA, 27 nt, Artificial Sequence
  Description of Artificial Sequence: Synthetic oligonucleotide
uguaugggcuuaaauacuacagcgagg

SEQ ID NO: 420 - RNA, 27 nt, Artificial Sequence
  Description of Artificial Sequence: Synthetic oligonucleotide
cuguaugggcuuaaauacuacagcgag

SEQ ID NO: 421 - RNA, 27 nt, Artificial Sequence
  Description of Artificial Sequence: Synthetic oligonucleotide
ggaagguuucuguaugggcuuaaauac

SEQ ID NO: 422 - RNA, 27 nt, Artificial Sequence
  Description of Artificial Sequence: Synthetic oligonucleotide
guagguauaccauguuuauuuuaauac

SEQ ID NO: 423 - RNA, 27 nt, Artificial Sequence
  Description of Artificial Sequence: Synthetic oligonucleotide
uccgaaaacuggccgaucagaacagcc

SEQ ID NO: 424 - RNA, 27 nt, Artificial Sequence
  Description of Artificial Sequence: Synthetic oligonucleotide
cccuguuccaaaguucaaauuauuugu

SEQ ID NO: 425 - RNA, 27 nt, Artificial Sequence
  Description of Artificial Sequence: Synthetic oligonucleotide
acuggaaaguuaaauuaaggucgcaau

SEQ ID NO: 426 - RNA, 27 nt, Artificial Sequence
  Description of Artificial Sequence: Synthetic oligonucleotide
caaaaccaaacuuuagcuuucucagcc

SEQ ID NO: 427 - RNA, 27 nt, Artificial Sequence
  Description of Artificial Sequence: Synthetic oligonucleotide
uacagugggaaguagcaucuuuacuuu

SEQ ID NO: 428 - RNA, 27 nt, Artificial Sequence
  Description of Artificial Sequence: Synthetic oligonucleotide
ucauaugguaucagcaauuaagcagua

SEQ ID NO: 429 - RNA, 27 nt, Artificial Sequence
  Description of Artificial Sequence: Synthetic oligonucleotide
cagcccauguuucauucauaugguauc

SEQ ID NO: 430 - RNA, 27 nt, Artificial Sequence
  Description of Artificial Sequence: Synthetic oligonucleotide
uaugaaaaaguuggauaagaaaguugg

SEQ ID NO: 431 - RNA, 27 nt, Artificial Sequence
  Description of Artificial Sequence: Synthetic oligonucleotide
uccggccucaugaugucaugcaaggcu

SEQ ID NO: 432 - RNA, 27 nt, Artificial Sequence
  Description of Artificial Sequence: Synthetic oligonucleotide
acaaaugcagucauauacaaauucagg

SEQ ID NO: 433 - RNA, 27 nt, Artificial Sequence
  Description of Artificial Sequence: Synthetic oligonucleotide
gguaguaaacauucuacuaggauucuu

SEQ ID NO: 434 - RNA, 27 nt, Artificial Sequence
  Description of Artificial Sequence: Synthetic oligonucleotide
uuucaucaaaaaauucuucccuuucug

SEQ ID NO: 435 - RNA, 27 nt, Artificial Sequence
  Description of Artificial Sequence: Synthetic oligonucleotide
aaauucacacacuggcaugccgauagc

SEQ ID NO: 436 - RNA, 27 nt, Artificial Sequence
  Description of Artificial Sequence: Synthetic oligonucleotide
acauacauugcucuacuaugaggugaa

SEQ ID NO: 437 - RNA, 27 nt, Artificial Sequence
  Description of Artificial Sequence: Synthetic oligonucleotide
uauauaugugcuuuggcaauucuggug

SEQ ID NO: 438 - RNA, 27 nt, Artificial Sequence
  Description of Artificial Sequence: Synthetic oligonucleotide
ggagaaacuauuacccagaucaccacu

SEQ ID NO: 439 - RNA, 27 nt, Artificial Sequence
  Description of Artificial Sequence: Synthetic oligonucleotide
auuuggagaaacuauuacccagaucac

SEQ ID NO: 440 - RNA, 27 nt, Artificial Sequence
  Description of Artificial Sequence: Synthetic oligonucleotide
uuucuaggaaguauucaucacauccac

SEQ ID NO: 441 - RNA, 27 nt, Artificial Sequence
  Description of Artificial Sequence: Synthetic oligonucleotide
cauauaugguguagcuguggaaaugcg

SEQ ID NO: 442 - RNA, 27 nt, Artificial Sequence
  Description of Artificial Sequence: Synthetic oligonucleotide
cuccauucauauaugguguagcugugg

SEQ ID NO: 443 - RNA, 27 nt, Artificial Sequence
  Description of Artificial Sequence: Synthetic oligonucleotide
aucuucuucucguguaagaacugcagc

SEQ ID NO: 444 - RNA, 27 nt, Artificial Sequence
  Description of Artificial Sequence: Synthetic oligonucleotide
ucccuguaaaugaucuucuucucgugu

SEQ ID NO: 445 - RNA, 27 nt, Artificial Sequence
  Description of Artificial Sequence: Synthetic oligonucleotide
gucccuguaaaugaucuucuucucgug

SEQ ID NO: 446 - RNA, 27 nt, Artificial Sequence
  Description of Artificial Sequence: Synthetic oligonucleotide
ucaggucccuguaaaugaucuucuucu

SEQ ID NO: 447 - RNA, 27 nt, Artificial Sequence
  Description of Artificial Sequence: Synthetic oligonucleotide
gaugcagucaaacaccucuuccucugu

SEQ ID NO: 448 - RNA, 27 nt, Artificial Sequence
  Description of Artificial Sequence: Synthetic oligonucleotide
cgaugcagucaaacaccucuuccucug

SEQ ID NO: 449 - RNA, 27 nt, Artificial Sequence
  Description of Artificial Sequence: Synthetic oligonucleotide
cccugugaacucgcccucaaaguagcg

SEQ ID NO: 450 - RNA, 27 nt, Artificial Sequence
  Description of Artificial Sequence: Synthetic oligonucleotide
ggacagaggugccaggagaugcccuca

SEQ ID NO: 451 - RNA, 27 nt, Artificial Sequence
  Description of Artificial Sequence: Synthetic oligonucleotide
uuaaaaagacaaaccauaucacuccuu

SEQ ID NO: 452 - RNA, 27 nt, Artificial Sequence
  Description of Artificial Sequence: Synthetic oligonucleotide
cuuaaaaagacaaaccauaucacuccu

SEQ ID NO: 453 - RNA, 27 nt, Artificial Sequence
  Description of Artificial Sequence: Synthetic oligonucleotide
gacaaccuuuaggaucuuuacugcaac

SEQ ID NO: 454 - RNA, 27 nt, Artificial Sequence
  Description of Artificial Sequence: Synthetic oligonucleotide
gucgacaaccuuuaggaucuuuacugc

SEQ ID NO: 455 - RNA, 27 nt, Artificial Sequence
  Description of Artificial Sequence: Synthetic oligonucleotide
acaauugccagguuguccuuugucaug

SEQ ID NO: 456 - RNA, 27 nt, Artificial Sequence
  Description of Artificial Sequence: Synthetic oligonucleotide
ccucgcaccacugggucacaauugcca

SEQ ID NO: 457 - RNA, 27 nt, Artificial Sequence
  Description of Artificial Sequence: Synthetic oligonucleotide
auuucaugucucuauggaugauguucu

SEQ ID NO: 458 - RNA, 27 nt, Artificial Sequence
  Description of Artificial Sequence: Synthetic oligonucleotide
uggagaaauauauuguuggauuucaug

SEQ ID NO: 459 - RNA, 27 nt, Artificial Sequence
  Description of Artificial Sequence: Synthetic oligonucleotide
agccuucauggagaaauauauuguugg

SEQ ID NO: 460 - RNA, 27 nt, Artificial Sequence
  Description of Artificial Sequence: Synthetic oligonucleotide
accacuccagcgugacuuuacuguugc

SEQ ID NO: 461 - RNA, 27 nt, Artificial Sequence
  Description of Artificial Sequence: Synthetic oligonucleotide
ccucucuuccuuuacuuucuucacaca

SEQ ID NO: 462 - RNA, 27 nt, Artificial Sequence
  Description of Artificial Sequence: Synthetic oligonucleotide
gcccgaugcaaggauggcucggaagcg

SEQ ID NO: 463 - RNA, 27 nt, Artificial Sequence
  Description of Artificial Sequence: Synthetic oligonucleotide
cacaguaggauauucaaccuccauuuc

SEQ ID NO: 464 - RNA, 27 nt, Artificial Sequence
  Description of Artificial Sequence: Synthetic oligonucleotide
uuacacaguaggauauucaaccuccau

SEQ ID NO: 465 - RNA, 27 nt, Artificial Sequence
  Description of Artificial Sequence: Synthetic oligonucleotide
uacacuacaagggaaaacucaaaaucu

SEQ ID NO: 466 - RNA, 27 nt, Artificial Sequence
  Description of Artificial Sequence: Synthetic oligonucleotide
caaucaacaaagaacaaacaggauaaa

SEQ ID NO: 467 - RNA, 27 nt, Artificial Sequence
  Description of Artificial Sequence: Synthetic oligonucleotide
uuucaaucaacaaagaacaaacaggau

SEQ ID NO: 468 - RNA, 27 nt, Artificial Sequence
  Description of Artificial Sequence: Synthetic oligonucleotide
auggaagaaaaagaaggcuguagagaa

SEQ ID NO: 469 - RNA, 27 nt, Artificial Sequence
  Description of Artificial Sequence: Synthetic oligonucleotide
uagaaggaagauuagcuauggaagaaa

SEQ ID NO: 470 - RNA, 27 nt, Artificial Sequence
  Description of Artificial Sequence: Synthetic oligonucleotide
augaagcauucaacaggaagauuauuu

SEQ ID NO: 471 - RNA, 27 nt, Artificial Sequence
  Description of Artificial Sequence: Synthetic oligonucleotide
caugaagcauucaacaggaagauuauu

SEQ ID NO: 472 - RNA, 27 nt, Artificial Sequence
  Description of Artificial Sequence: Synthetic oligonucleotide
ucaaaguagaauucaagucaugaagca

SEQ ID NO: 473 - RNA, 27 nt, Artificial Sequence
  Description of Artificial Sequence: Synthetic oligonucleotide
gucuguaguugcuucucucccucuuag

SEQ ID NO: 474 - RNA, 27 nt, Artificial Sequence
  Description of Artificial Sequence: Synthetic oligonucleotide
guugaccuuggucugguaggagacggc

SEQ ID NO: 475 - RNA, 27 nt, Artificial Sequence
  Description of Artificial Sequence: Synthetic oligonucleotide
gucgagauagucgggccgauugaucuc

SEQ ID NO: 476 - RNA, 27 nt, Artificial Sequence
  Description of Artificial Sequence: Synthetic oligonucleotide
guuugggaagguuggauguucguccuc

SEQ ID NO: 477 - RNA, 27 nt, Artificial Sequence
  Description of Artificial Sequence: Synthetic oligonucleotide
aguucuaagcuuggguuccgacccuaa

SEQ ID NO: 478 - RNA, 27 nt, Artificial Sequence
  Description of Artificial Sequence: Synthetic oligonucleotide
uuaaaguucuaagcuuggguuccgacc

SEQ ID NO: 479 - RNA, 27 nt, Artificial Sequence
  Description of Artificial Sequence: Synthetic oligonucleotide
guugcuuaaaguucuaagcuuggguuc

SEQ ID NO: 480 - RNA, 27 nt, Artificial Sequence
  Description of Artificial Sequence: Synthetic oligonucleotide
gugguggucuuguugcuuaaaguucua

SEQ ID NO: 481 - RNA, 27 nt, Artificial Sequence
  Description of Artificial Sequence: Synthetic oligonucleotide
acuuuauuucucgccacugaauaguag

SEQ ID NO: 482 - RNA, 27 nt, Artificial Sequence
  Description of Artificial Sequence: Synthetic oligonucleotide
aacuuuauuucucgccacugaauagua

SEQ ID NO: 483 - RNA, 27 nt, Artificial Sequence
  Description of Artificial Sequence: Synthetic oligonucleotide
ggaucauuuccuguuaucuguguuugu

SEQ ID NO: 484 - RNA, 27 nt, Artificial Sequence
  Description of Artificial Sequence: Synthetic oligonucleotide
guuucauuucuucucuuuucuuaaggc

SEQ ID NO: 485 - RNA, 27 nt, Artificial Sequence
  Description of Artificial Sequence: Synthetic oligonucleotide
ggaggauggaaacacacuccuucaguu

SEQ ID NO: 486 - RNA, 27 nt, Artificial Sequence
  Description of Artificial Sequence: Synthetic oligonucleotide
ucaaagauuuucagucccgcggugaca

SEQ ID NO: 487 - RNA, 27 nt, Artificial Sequence
  Description of Artificial Sequence: Synthetic oligonucleotide
ccugaacggcacgcuuauuucugcugu

SEQ ID NO: 488 - RNA, 27 nt, Artificial Sequence
  Description of Artificial Sequence: Synthetic oligonucleotide
cuucuggacccugaacggcacgcuuau

SEQ ID NO: 489 - RNA, 27 nt, Artificial Sequence
  Description of Artificial Sequence: Synthetic oligonucleotide
caagcagucuugagugacuguuucuuc

SEQ ID NO: 490 - RNA, 27 nt, Artificial Sequence
  Description of Artificial Sequence: Synthetic oligonucleotide
ccaaagacauggaccuucuuccucuga

SEQ ID NO: 491 - RNA, 27 nt, Artificial Sequence
  Description of Artificial Sequence: Synthetic oligonucleotide
guguuucaggcauauuuugaauacauc

SEQ ID NO: 492 - RNA, 27 nt, Artificial Sequence
  Description of Artificial Sequence: Synthetic oligonucleotide
gagguacagagaaagggaggaaaauag

SEQ ID NO: 493 - RNA, 27 nt, Artificial Sequence
  Description of Artificial Sequence: Synthetic oligonucleotide
ucuugucuugcucuaucuuucuuuggu

SEQ ID NO: 494 - RNA, 27 nt, Artificial Sequence
  Description of Artificial Sequence: Synthetic oligonucleotide
uuucuugucuugcucuaucuuucuuug

SEQ ID NO: 495 - RNA, 27 nt, Artificial Sequence
  Description of Artificial Sequence: Synthetic oligonucleotide
ggaucuuguacaaacaaaugcuuucuc

SEQ ID NO: 496 - RNA, 27 nt, Artificial Sequence
  Description of Artificial Sequence: Synthetic oligonucleotide
ucugcaaguacguucguuuaacucaag

SEQ ID NO: 497 - RNA, 27 nt, Artificial Sequence
  Description of Artificial Sequence: Synthetic oligonucleotide
ucuguaucgaucguucuguaucagucu

SEQ ID NO: 498 - RNA, 27 nt, Artificial Sequence
  Description of Artificial Sequence: Synthetic oligonucleotide
auuuauuuuuauauauauauaauauau

SEQ ID NO: 499 - RNA, 27 nt, Artificial Sequence
  Description of Artificial Sequence: Synthetic oligonucleotide
auauuuauuuuuauauauauauaauau

SEQ ID NO: 500 - RNA, 27 nt, Artificial Sequence
  Description of Artificial Sequence: Synthetic oligonucleotide
cacagcagucaaauacauccagugaag

SEQ ID NO: 501 - RNA, 27 nt, Artificial Sequence
  Description of Artificial Sequence: Synthetic oligonucleotide
gucucucaucuccuccucuucccuguc

SEQ ID NO: 502 - RNA, 27 nt, Artificial Sequence
  Description of Artificial Sequence: Synthetic oligonucleotide
ccaagugggacaaaaaaaagaucaugc

SEQ ID NO: 503 - RNA, 14 nt, Artificial Sequence
  Description of Artificial Sequence: Synthetic oligonucleotide
guauuuugaugagg

SEQ ID NO: 504 - RNA, 12 nt, Artificial Sequence
  Description of Artificial Sequence: Synthetic oligonucleotide
ggcccagaugau

SEQ ID NO: 505 - RNA, 14 nt, Artificial Sequence
  Description of Artificial Sequence: Synthetic oligonucleotide
gggaagaaaacuau

SEQ ID NO: 506 - RNA, 15 nt, Artificial Sequence
  Description of Artificial Sequence: Synthetic oligonucleotide
guuuuaauuuauuuc

SEQ ID NO: 507 - RNA, 12 nt, Artificial Sequence
  Description of Artificial Sequence: Synthetic oligonucleotide
acguagggaaau

SEQ ID NO: 508 - RNA, 12 nt, Artificial Sequence
  Description of Artificial Sequence: Synthetic oligonucleotide
ccaggguuuacc

SEQ ID NO: 509 - RNA, 11 nt, Artificial Sequence
  Description of Artificial Sequence: Synthetic oligonucleotide
agcaagguuua

SEQ ID NO: 510 - RNA, 12 nt, Artificial Sequence
  Description of Artificial Sequence: Synthetic oligonucleotide
uguauuauguug

SEQ ID NO: 511 - RNA, 15 nt, Artificial Sequence
  Description of Artificial Sequence: Synthetic oligonucleotide
uuuuaaucuuuguga

SEQ ID NO: 512 - RNA, 14 nt, Artificial Sequence
  Description of Artificial Sequence: Synthetic oligonucleotide
uuaaucuuugugac

SEQ ID NO: 513 - RNA, 13 nt, Artificial Sequence
  Description of Artificial Sequence: Synthetic oligonucleotide
gcugcuuaugucu

SEQ ID NO: 514 - RNA, 14 nt, Artificial Sequence
  Description of Artificial Sequence: Synthetic oligonucleotide
aaguguuucagaag

SEQ ID NO: 515 - RNA, 13 nt, Artificial Sequence
  Description of Artificial Sequence: Synthetic oligonucleotide
gaccaucaauaag

SEQ ID NO: 516 - RNA, 13 nt, Artificial Sequence
  Description of Artificial Sequence: Synthetic oligonucleotide
ccaucaauaagga

SEQ ID NO: 517 - RNA, 14 nt, Artificial Sequence
  Description of Artificial Sequence: Synthetic oligonucleotide
ucaauaaggaagaa

SEQ ID NO: 518 - RNA, 14 nt, Artificial Sequence
  Description of Artificial Sequence: Synthetic oligonucleotide
aauaaggaagaagc

SEQ ID NO: 519 - RNA, 13 nt, Artificial Sequence
  Description of Artificial Sequence: Synthetic oligonucleotide
aggaagaagcccu

SEQ ID NO: 520 - RNA, 13 nt, Artificial Sequence
  Description of Artificial Sequence: Synthetic oligonucleotide
gcauaacuaaagg

SEQ ID NO: 521 - RNA, 14 nt, Artificial Sequence
  Description of Artificial Sequence: Synthetic oligonucleotide
cauaacuaaaggug

SEQ ID NO: 522 - RNA, 12 nt, Artificial Sequence
  Description of Artificial Sequence: Synthetic oligonucleotide
cuacaucacgcc

SEQ ID NO: 523 - RNA, 12 nt, Artificial Sequence
  Description of Artificial Sequence: Synthetic oligonucleotide
acuggauuuaag

SEQ ID NO: 524 - RNA, 12 nt, Artificial Sequence
  Description of Artificial Sequence: Synthetic oligonucleotide
cuggauuuaagc

SEQ ID NO: 525 - RNA, 13 nt, Artificial Sequence
  Description of Artificial Sequence: Synthetic oligonucleotide
gauuuaagcagag

SEQ ID NO: 526 - RNA, 13 nt, Artificial Sequence
  Description of Artificial Sequence: Synthetic oligonucleotide
auuuaagcagagu

SEQ ID NO: 527 - RNA, 13 nt, Artificial Sequence
  Description of Artificial Sequence: Synthetic oligonucleotide
uuaagcagaguuc

SEQ ID NO: 528 - RNA, 13 nt, Artificial Sequence
  Description of Artificial Sequence: Synthetic oligonucleotide
uaagcagaguuca

SEQ ID NO: 529 - RNA, 14 nt, Artificial Sequence
  Description of Artificial Sequence: Synthetic oligonucleotide
agcagaguucaaaa

SEQ ID NO: 530 - RNA, 12 nt, Artificial Sequence
  Description of Artificial Sequence: Synthetic oligonucleotide
cucagggucuga

SEQ ID NO: 531 - RNA, 13 nt, Artificial Sequence
  Description of Artificial Sequence: Synthetic oligonucleotide
caagcaacuacau

SEQ ID NO: 532 - RNA, 12 nt, Artificial Sequence
  Description of Artificial Sequence: Synthetic oligonucleotide
aucaauggcagc

SEQ ID NO: 533 - RNA, 11 nt, Artificial Sequence
  Description of Artificial Sequence: Synthetic oligonucleotide
uuccagcccac

SEQ ID NO: 534 - RNA, 12 nt, Artificial Sequence
  Description of Artificial Sequence: Synthetic oligonucleotide
cagcugagaaug

SEQ ID NO: 535 - RNA, 13 nt, Artificial Sequence
  Description of Artificial Sequence: Synthetic oligonucleotide
aacguaucuccua

SEQ ID NO: 536 - RNA, 14 nt, Artificial Sequence
  Description of Artificial Sequence: Synthetic oligonucleotide
ccuaaaauaauuuc

SEQ ID NO: 537 - RNA, 13 nt, Artificial Sequence
  Description of Artificial Sequence: Synthetic oligonucleotide
uggaagauucagc

SEQ ID NO: 538 - RNA, 12 nt, Artificial Sequence
  Description of Artificial Sequence: Synthetic oligonucleotide
uuaaacucuccu

SEQ ID NO: 539 - RNA, 12 nt, Artificial Sequence
  Description of Artificial Sequence: Synthetic oligonucleotide
cagccuacaguu

SEQ ID NO: 540 - RNA, 13 nt, Artificial Sequence
  Description of Artificial Sequence: Synthetic oligonucleotide
guuauguucaguc

SEQ ID NO: 541 - RNA, 13 nt, Artificial Sequence
  Description of Artificial Sequence: Synthetic oligonucleotide
cacauacaaaaug

SEQ ID NO: 542 - RNA, 9 nt, Artificial Sequence
  Description of Artificial Sequence: Synthetic oligonucleotide
uccuuuugc

SEQ ID NO: 543 - RNA, 12 nt, Artificial Sequence
  Description of Artificial Sequence: Synthetic oligonucleotide
ugaccugugaag

SEQ ID NO: 544 - RNA, 12 nt, Artificial Sequence
  Description of Artificial Sequence: Synthetic oligonucleotide
cuaucucacaca

SEQ ID NO: 545 - RNA, 13 nt, Artificial Sequence
  Description of Artificial Sequence: Synthetic oligonucleotide
uguccucaauugu

SEQ ID NO: 546 - RNA, 12 nt, Artificial Sequence
  Description of Artificial Sequence: Synthetic oligonucleotide
aaaccguagcug

SEQ ID NO: 547 - RNA, 12 nt, Artificial Sequence
  Description of Artificial Sequence: Synthetic oligonucleotide
uagcuggcaagc

SEQ ID NO: 548 - RNA, 14 nt, Artificial Sequence
  Description of Artificial Sequence: Synthetic oligonucleotide
uuguaugguuaaaa

SEQ ID NO: 549 - RNA, 14 nt, Artificial Sequence
  Description of Artificial Sequence: Synthetic oligonucleotide
ugguuaaaagaugg

SEQ ID NO: 550 - RNA, 13 nt, Artificial Sequence
  Description of Artificial Sequence: Synthetic oligonucleotide
cagggaauuauac

SEQ ID NO: 551 - RNA, 12 nt, Artificial Sequence
  Description of Artificial Sequence: Synthetic oligonucleotide
acaaucuugcug

SEQ ID NO: 552 - RNA, 13 nt, Artificial Sequence
  Description of Artificial Sequence: Synthetic oligonucleotide
ccaauaaugaaga

SEQ ID NO: 553 - RNA, 13 nt, Artificial Sequence
  Description of Artificial Sequence: Synthetic oligonucleotide
acuuuggauguuc

SEQ ID NO: 554 - RNA, 12 nt, Artificial Sequence
  Description of Artificial Sequence: Synthetic oligonucleotide
aaugcuuccacu

SEQ ID NO: 555 - RNA, 11 nt, Artificial Sequence
  Description of Artificial Sequence: Synthetic oligonucleotide
gagaaaguuug

SEQ ID NO: 556 - RNA, 11 nt, Artificial Sequence
  Description of Artificial Sequence: Synthetic oligonucleotide
aaagaacuacu

SEQ ID NO: 557 - RNA, 12 nt, Artificial Sequence
  Description of Artificial Sequence: Synthetic oligonucleotide
uuagaaauacgg

SEQ ID NO: 558 - RNA, 12 nt, Artificial Sequence
  Description of Artificial Sequence: Synthetic oligonucleotide
aacauggguaca

SEQ ID NO: 559 - RNA, 14 nt, Artificial Sequence
  Description of Artificial Sequence: Synthetic oligonucleotide
aaagacacagaaga

SEQ ID NO: 560 - RNA, 11 nt, Artificial Sequence
  Description of Artificial Sequence: Synthetic oligonucleotide
uaguagggagg

SEQ ID NO: 561 - RNA, 12 nt, Artificial Sequence
  Description of Artificial Sequence: Synthetic oligonucleotide
gccuucugcagc

SEQ ID NO: 562 - RNA, 10 nt, Artificial Sequence
  Description of Artificial Sequence: Synthetic oligonucleotide
ggucugguac

SEQ ID NO: 563 - RNA, 12 nt, Artificial Sequence
  Description of Artificial Sequence: Synthetic oligonucleotide
cuaguccuuccg

SEQ ID NO: 564 - RNA, 12 nt, Artificial Sequence
  Description of Artificial Sequence: Synthetic oligonucleotide
ccagugaauauu

SEQ ID NO: 565 - RNA, 13 nt, Artificial Sequence
  Description of Artificial Sequence: Synthetic oligonucleotide
augaauucaaguu

SEQ ID NO: 566 - RNA, 12 nt, Artificial Sequence
  Description of Artificial Sequence: Synthetic oligonucleotide
caggacacagau

SEQ ID NO: 567 - RNA, 12 nt, Artificial Sequence
  Description of Artificial Sequence: Synthetic oligonucleotide
cucaaagcacag

SEQ ID NO: 568 - RNA, 10 nt, Artificial Sequence
  Description of Artificial Sequence: Synthetic oligonucleotide
accacugcca

SEQ ID NO: 569 - RNA, 13 nt, Artificial Sequence
  Description of Artificial Sequence: Synthetic oligonucleotide
gaaacuacuagug

SEQ ID NO: 570 - RNA, 12 nt, Artificial Sequence
  Description of Artificial Sequence: Synthetic oligonucleotide
aagucggacagc

SEQ ID NO: 571 - RNA, 13 nt, Artificial Sequence
  Description of Artificial Sequence: Synthetic oligonucleotide
gaaagcgaaaaau

SEQ ID NO: 572 - RNA, 13 nt, Artificial Sequence
  Description of Artificial Sequence: Synthetic oligonucleotide
cccucugauuuag

SEQ ID NO: 573 - RNA, 12 nt, Artificial Sequence
  Description of Artificial Sequence: Synthetic oligonucleotide
ugagcuauuuaa

SEQ ID NO: 574 - RNA, 13 nt, Artificial Sequence
  Description of Artificial Sequence: Synthetic oligonucleotide
aaaaggugaaaaa

SEQ ID NO: 575 - RNA, 14 nt, Artificial Sequence
  Description of Artificial Sequence: Synthetic oligonucleotide
gaaaaagcacuauu

SEQ ID NO: 576 - RNA, 12 nt, Artificial Sequence
  Description of Artificial Sequence: Synthetic oligonucleotide
ggcugaaaagaa

SEQ ID NO: 577 - RNA, 12 nt, Artificial Sequence
  Description of Artificial Sequence: Synthetic oligonucleotide
uaaacccuuaua

SEQ ID NO: 578 - RNA, 13 nt, Artificial Sequence
  Description of Artificial Sequence: Synthetic oligonucleotide
cauacuauuagcc

SEQ ID NO: 579 - RNA, 12 nt, Artificial Sequence
  Description of Artificial Sequence: Synthetic oligonucleotide
gacagaagcauu

SEQ ID NO: 580 - RNA, 14 nt, Artificial Sequence
  Description of Artificial Sequence: Synthetic oligonucleotide
agagcaaauaagau

SEQ ID NO: 581 - RNA, 14 nt, Artificial Sequence
  Description of Artificial Sequence: Synthetic oligonucleotide
ccaacauuuuucuc

SEQ ID NO: 582 - RNA, 15 nt, Artificial Sequence
  Description of Artificial Sequence: Synthetic oligonucleotide
uuaaguaugagaaaa

SEQ ID NO: 583 - RNA, 14 nt, Artificial Sequence
  Description of Artificial Sequence: Synthetic oligonucleotide
caggaauaaagaug

SEQ ID NO: 584 - RNA, 13 nt, Artificial Sequence
  Description of Artificial Sequence: Synthetic oligonucleotide
aauuugaaugacc

SEQ ID NO: 585 - RNA, 14 nt, Artificial Sequence
  Description of Artificial Sequence: Synthetic oligonucleotide
auguauaaagauag

SEQ ID NO: 586 - RNA, 12 nt, Artificial Sequence
  Description of Artificial Sequence: Synthetic oligonucleotide
ggcuguaacuau

SEQ ID NO: 587 - RNA, 11 nt, Artificial Sequence
  Description of Artificial Sequence: Synthetic oligonucleotide
ucugugaagug

SEQ ID NO: 588 - RNA, 14 nt, Artificial Sequence
  Description of Artificial Sequence: Synthetic oligonucleotide
ccuuuaaggaaaug

SEQ ID NO: 589 - RNA, 13 nt, Artificial Sequence
  Description of Artificial Sequence: Synthetic oligonucleotide
aaggauacaaaaa

SEQ ID NO: 590 - RNA, 12 nt, Artificial Sequence
  Description of Artificial Sequence: Synthetic oligonucleotide
agaugcaauuug

SEQ ID NO: 591 - RNA, 12 nt, Artificial Sequence
  Description of Artificial Sequence: Synthetic oligonucleotide
guucaaaacgaa

SEQ ID NO: 592 - RNA, 11 nt, Artificial Sequence
  Description of Artificial Sequence: Synthetic oligonucleotide
gugaaaccuca

SEQ ID NO: 593 - RNA, 13 nt, Artificial Sequence
  Description of Artificial Sequence: Synthetic oligonucleotide
acgaaagagaagc

SEQ ID NO: 594 - RNA, 12 nt, Artificial Sequence
  Description of Artificial Sequence: Synthetic oligonucleotide
cuccacaagcgc

SEQ ID NO: 595 - RNA, 14 nt, Artificial Sequence
  Description of Artificial Sequence: Synthetic oligonucleotide
gagaagauuccaaa

SEQ ID NO: 596 - RNA, 13 nt, Artificial Sequence
  Description of Artificial Sequence: Synthetic oligonucleotide
aaucuggauucaa

SEQ ID NO: 597 - RNA, 13 nt, Artificial Sequence
  Description of Artificial Sequence: Synthetic oligonucleotide
agaacagauuuga

SEQ ID NO: 598 - RNA, 11 nt, Artificial Sequence
  Description of Artificial Sequence: Synthetic oligonucleotide
ccagagcugug

SEQ ID NO: 599 - RNA, 12 nt, Artificial Sequence
  Description of Artificial Sequence: Synthetic oligonucleotide
ccucagauuguu

SEQ ID NO: 600 - RNA, 12 nt, Artificial Sequence
  Description of Artificial Sequence: Synthetic oligonucleotide
cuauuuuaauua

SEQ ID NO: 601 - RNA, 13 nt, Artificial Sequence
  Description of Artificial Sequence: Synthetic oligonucleotide
uuuaauuuauuaa

SEQ ID NO: 602 - RNA, 12 nt, Artificial Sequence
  Description of Artificial Sequence: Synthetic oligonucleotide
augcaguuugaa

SEQ ID NO: 603 - RNA, 11 nt, Artificial Sequence
  Description of Artificial Sequence: Synthetic oligonucleotide
caugcugcugg

SEQ ID NO: 604 - RNA, 13 nt, Artificial Sequence
  Description of Artificial Sequence: Synthetic oligonucleotide
agaugugcauuuc

SEQ ID NO: 605 - RNA, 12 nt, Artificial Sequence
  Description of Artificial Sequence: Synthetic oligonucleotide
ucaaaaccugug

SEQ ID NO: 606 - RNA, 11 nt, Artificial Sequence
  Description of Artificial Sequence: Synthetic oligonucleotide
gaaugugggua

SEQ ID NO: 607 - RNA, 10 nt, Artificial Sequence
  Description of Artificial Sequence: Synthetic oligonucleotide
auguggguag

SEQ ID NO: 608 - RNA, 13 nt, Artificial Sequence
  Description of Artificial Sequence: Synthetic oligonucleotide
ugaaaaugagcau

SEQ ID NO: 609 - RNA, 13 nt, Artificial Sequence
  Description of Artificial Sequence: Synthetic oligonucleotide
uugcuuuucaugu

SEQ ID NO: 610 - RNA, 12 nt, Artificial Sequence
  Description of Artificial Sequence: Synthetic oligonucleotide
uguauuucuaua

SEQ ID NO: 611 - RNA, 13 nt, Artificial Sequence
  Description of Artificial Sequence: Synthetic oligonucleotide
uuugauuaauguu

SEQ ID NO: 612 - RNA, 12 nt, Artificial Sequence
  Description of Artificial Sequence: Synthetic oligonucleotide
caacguguauag

SEQ ID NO: 613 - RNA, 12 nt, Artificial Sequence
  Description of Artificial Sequence: Synthetic oligonucleotide
cauauccuuggc

SEQ ID NO: 614 - RNA, 13 nt, Artificial Sequence
  Description of Artificial Sequence: Synthetic oligonucleotide
uacuaacaucugg

SEQ ID NO: 615 - RNA, 11 nt, Artificial Sequence
  Description of Artificial Sequence: Synthetic oligonucleotide
cauaaguugug

SEQ ID NO: 616 - RNA, 12 nt, Artificial Sequence
  Description of Artificial Sequence: Synthetic oligonucleotide
gcaucauuuugg

SEQ ID NO: 617 - RNA, 10 nt, Artificial Sequence
  Description of Artificial Sequence: Synthetic oligonucleotide
gcucuucuua

SEQ ID NO: 618 - RNA, 10 nt, Artificial Sequence
  Description of Artificial Sequence: Synthetic oligonucleotide
agauuagguc

SEQ ID NO: 619 - RNA, 12 nt, Artificial Sequence
  Description of Artificial Sequence: Synthetic oligonucleotide
auggaauugaaa

SEQ ID NO: 620 - RNA, 13 nt, Artificial Sequence
  Description of Artificial Sequence: Synthetic oligonucleotide
cacacucauuccu

SEQ ID NO: 621 - RNA, 12 nt, Artificial Sequence
  Description of Artificial Sequence: Synthetic oligonucleotide
uguagagguaac

SEQ ID NO: 622 - RNA, 11 nt, Artificial Sequence
  Description of Artificial Sequence: Synthetic oligonucleotide
caaccacaugc

SEQ ID NO: 623 - RNA, 12 nt, Artificial Sequence
  Description of Artificial Sequence: Synthetic oligonucleotide
ucggaaacaagu

SEQ ID NO: 624 - RNA, 11 nt, Artificial Sequence
  Description of Artificial Sequence: Synthetic oligonucleotide
acucccaauaa

SEQ ID NO: 625 - RNA, 13 nt, Artificial Sequence
  Description of Artificial Sequence: Synthetic oligonucleotide
aaugcuaagaaau

SEQ ID NO: 626 - RNA, 11 nt, Artificial Sequence
  Description of Artificial Sequence: Synthetic oligonucleotide
gucuuucucua

SEQ ID NO: 627 - RNA, 11 nt, Artificial Sequence
  Description of Artificial Sequence: Synthetic oligonucleotide
ugaauuucagg

SEQ ID NO: 628 - RNA, 13 nt, Artificial Sequence
  Description of Artificial Sequence: Synthetic oligonucleotide
cgauucccucuca

SEQ ID NO: 629 - RNA, 11 nt, Artificial Sequence
  Description of Artificial Sequence: Synthetic oligonucleotide
aggaaagugaa

SEQ ID NO: 630 - RNA, 12 nt, Artificial Sequence
  Description of Artificial Sequence: Synthetic oligonucleotide
gaggcugcaugc

SEQ ID NO: 631 - RNA, 11 nt, Artificial Sequence
  Description of Artificial Sequence: Synthetic oligonucleotide
ucucugaacag

SEQ ID NO: 632 - RNA, 12 nt, Artificial Sequence
  Description of Artificial Sequence: Synthetic oligonucleotide
aacuuggcugua

SEQ ID NO: 633 - RNA, 12 nt, Artificial Sequence
  Description of Artificial Sequence: Synthetic oligonucleotide
agaagccaaaau

SEQ ID NO: 634 - RNA, 14 nt, Artificial Sequence
  Description of Artificial Sequence: Synthetic oligonucleotide
auuaaaagaagucc

SEQ ID NO: 635 - RNA, 14 nt, Artificial Sequence
  Description of Artificial Sequence: Synthetic oligonucleotide
gaauccggauuauc

SEQ ID NO: 636 - RNA, 12 nt, Artificial Sequence
  Description of Artificial Sequence: Synthetic oligonucleotide
aaugugacauca

SEQ ID NO: 637 - RNA, 13 nt, Artificial Sequence
  Description of Artificial Sequence: Synthetic oligonucleotide
caucaaagcaagu

SEQ ID NO: 638 - RNA, 11 nt, Artificial Sequence
  Description of Artificial Sequence: Synthetic oligonucleotide
agagagagaaa

SEQ ID NO: 639 - RNA, 13 nt, Artificial Sequence
  Description of Artificial Sequence: Synthetic oligonucleotide
ucgcuguaguauu

SEQ ID NO: 640 - RNA, 14 nt, Artificial Sequence
  Description of Artificial Sequence: Synthetic oligonucleotide
cgcuguaguauuua

SEQ ID NO: 641 - RNA, 13 nt, Artificial Sequence
  Description of Artificial Sequence: Synthetic oligonucleotide
auuuaagcccaua

SEQ ID NO: 642 - RNA, 15 nt, Artificial Sequence
  Description of Artificial Sequence: Synthetic oligonucleotide
auuaaaauaaacaug

SEQ ID NO: 643 - RNA, 12 nt, Artificial Sequence
  Description of Artificial Sequence: Synthetic oligonucleotide
cuguucugaucg

SEQ ID NO: 644 - RNA, 16 nt, Artificial Sequence
  Description of Artificial Sequence: Synthetic oligonucleotide
aaauaauuugaacuuu

SEQ ID NO: 645 - RNA, 12 nt, Artificial Sequence
  Description of Artificial Sequence: Synthetic oligonucleotide
ugcgaccuuaau

SEQ ID NO: 646 - RNA, 11 nt, Artificial Sequence
  Description of Artificial Sequence: Synthetic oligonucleotide
cugagaaagcu

SEQ ID NO: 647 - RNA, 13 nt, Artificial Sequence
  Description of Artificial Sequence: Synthetic oligonucleotide
aguaaagaugcua

SEQ ID NO: 648 - RNA, 12 nt, Artificial Sequence
  Description of Artificial Sequence: Synthetic oligonucleotide
cugcuuaauugc

SEQ ID NO: 649 - RNA, 14 nt, Artificial Sequence
  Description of Artificial Sequence: Synthetic oligonucleotide
uaccauaugaauga

SEQ ID NO: 650 - RNA, 12 nt, Artificial Sequence
  Description of Artificial Sequence: Synthetic oligonucleotide
aacuuucuuauc

SEQ ID NO: 651 - RNA, 13 nt, Artificial Sequence
  Description of Artificial Sequence: Synthetic oligonucleotide
ccuugcaugacau

SEQ ID NO: 652 - RNA, 14 nt, Artificial Sequence
  Description of Artificial Sequence: Synthetic oligonucleotide
ugaauuuguauaug

SEQ ID NO: 653 - RNA, 12 nt, Artificial Sequence
  Description of Artificial Sequence: Synthetic oligonucleotide
gaauccuaguag

SEQ ID NO: 654 - RNA, 10 nt, Artificial Sequence
  Description of Artificial Sequence: Synthetic oligonucleotide
gaaagggaag

SEQ ID NO: 655 - RNA, 11 nt, Artificial Sequence
  Description of Artificial Sequence: Synthetic oligonucleotide
uaucggcaugc

SEQ ID NO: 656 - RNA, 12 nt, Artificial Sequence
  Description of Artificial Sequence: Synthetic oligonucleotide
caccucauagua

SEQ ID NO: 657 - RNA, 11 nt, Artificial Sequence
  Description of Artificial Sequence: Synthetic oligonucleotide
ccagaauugcc

SEQ ID NO: 658 - RNA, 11 nt, Artificial Sequence
  Description of Artificial Sequence: Synthetic oligonucleotide
uggugaucugg

SEQ ID NO: 659 - RNA, 12 nt, Artificial Sequence
  Description of Artificial Sequence: Synthetic oligonucleotide
gaucuggguaau

SEQ ID NO: 660 - RNA, 12 nt, Artificial Sequence
  Description of Artificial Sequence: Synthetic oligonucleotide
ggaugugaugaa

SEQ ID NO: 661 - RNA, 12 nt, Artificial Sequence
  Description of Artificial Sequence: Synthetic oligonucleotide
cauuuccacagc

SEQ ID NO: 662 - RNA, 11 nt, Artificial Sequence
  Description of Artificial Sequence: Synthetic oligonucleotide
acagcuacacc

SEQ ID NO: 663 - RNA, 12 nt, Artificial Sequence
  Description of Artificial Sequence: Synthetic oligonucleotide
ugcaguucuuac

SEQ ID NO: 664 - RNA, 12 nt, Artificial Sequence
  Description of Artificial Sequence: Synthetic oligonucleotide
acgagaagaaga

SEQ ID NO: 665 - RNA, 12 nt, Artificial Sequence
  Description of Artificial Sequence: Synthetic oligonucleotide
cgagaagaagau

SEQ ID NO: 666 - RNA, 15 nt, Artificial Sequence
  Description of Artificial Sequence: Synthetic oligonucleotide
aagaagaucauuuac

SEQ ID NO: 667 - RNA, 11 nt, Artificial Sequence
  Description of Artificial Sequence: Synthetic oligonucleotide
agaggaagagg

SEQ ID NO: 668 - RNA, 12 nt, Artificial Sequence
  Description of Artificial Sequence: Synthetic oligonucleotide
gaggaagaggug

SEQ ID NO: 669 - RNA, 13 nt, Artificial Sequence
  Description of Artificial Sequence: Synthetic oligonucleotide
cuacuuugagggc

SEQ ID NO: 670 - RNA, 12 nt, Artificial Sequence
  Description of Artificial Sequence: Synthetic oligonucleotide
agggcaucuccu

SEQ ID NO: 671 - RNA, 10 nt, Artificial Sequence
  Description of Artificial Sequence: Synthetic oligonucleotide
ggagugauau

SEQ ID NO: 672 - RNA, 11 nt, Artificial Sequence
  Description of Artificial Sequence: Synthetic oligonucleotide
gagugauaugg

SEQ ID NO: 673 - RNA, 12 nt, Artificial Sequence
  Description of Artificial Sequence: Synthetic oligonucleotide
ugcaguaaagau

SEQ ID NO: 674 - RNA, 13 nt, Artificial Sequence
  Description of Artificial Sequence: Synthetic oligonucleotide
aguaaagauccua

SEQ ID NO: 675 - RNA, 12 nt, Artificial Sequence
  Description of Artificial Sequence: Synthetic oligonucleotide
ugacaaaggaca

SEQ ID NO: 676 - RNA, 13 nt, Artificial Sequence
  Description of Artificial Sequence: Synthetic oligonucleotide
gcaauugugaccc

SEQ ID NO: 677 - RNA, 12 nt, Artificial Sequence
  Description of Artificial Sequence: Synthetic oligonucleotide
aacaucauccau

SEQ ID NO: 678 - RNA, 12 nt, Artificial Sequence
  Description of Artificial Sequence: Synthetic oligonucleotide
ugaaauccaaca

SEQ ID NO: 679 - RNA, 15 nt, Artificial Sequence
  Description of Artificial Sequence: Synthetic oligonucleotide
aacaauauauuucuc

SEQ ID NO: 680 - RNA, 14 nt, Artificial Sequence
  Description of Artificial Sequence: Synthetic oligonucleotide
aacaguaaagucac

SEQ ID NO: 681 - RNA, 14 nt, Artificial Sequence
  Description of Artificial Sequence: Synthetic oligonucleotide
ugugaagaaaguaa

SEQ ID NO: 682 - RNA, 13 nt, Artificial Sequence
  Description of Artificial Sequence: Synthetic oligonucleotide
cuuccgagccauc

SEQ ID NO: 683 - RNA, 12 nt, Artificial Sequence
  Description of Artificial Sequence: Synthetic oligonucleotide
aauggagguuga

SEQ ID NO: 684 - RNA, 12 nt, Artificial Sequence
  Description of Artificial Sequence: Synthetic oligonucleotide
ggagguugaaua

SEQ ID NO: 685 - RNA, 13 nt, Artificial Sequence
  Description of Artificial Sequence: Synthetic oligonucleotide
auuuugaguuuuc

SEQ ID NO: 686 - RNA, 12 nt, Artificial Sequence
  Description of Artificial Sequence: Synthetic oligonucleotide
uauccuguuugu

SEQ ID NO: 687 - RNA, 11 nt, Artificial Sequence
  Description of Artificial Sequence: Synthetic oligonucleotide
ccuguuuguuc

SEQ ID NO: 688 - RNA, 10 nt, Artificial Sequence
  Description of Artificial Sequence: Synthetic oligonucleotide
cucuacagcc

SEQ ID NO: 689 - RNA, 12 nt, Artificial Sequence
  Description of Artificial Sequence: Synthetic oligonucleotide
ucuuccauagcu

SEQ ID NO: 690 - RNA, 12 nt, Artificial Sequence
  Description of Artificial Sequence: Synthetic oligonucleotide
auaaucuuccug

SEQ ID NO: 691 - RNA, 12 nt, Artificial Sequence
  Description of Artificial Sequence: Synthetic oligonucleotide
uaaucuuccugu

SEQ ID NO: 692 - RNA, 12 nt, Artificial Sequence
  Description of Artificial Sequence: Synthetic oligonucleotide
cuucaugacuug

SEQ ID NO: 693 - RNA, 12 nt, Artificial Sequence
  Description of Artificial Sequence: Synthetic oligonucleotide
aagagggagaga

SEQ ID NO: 694 - RNA, 12 nt, Artificial Sequence
  Description of Artificial Sequence: Synthetic oligonucleotide
cgucuccuacca

SEQ ID NO: 695 - RNA, 12 nt, Artificial Sequence
  Description of Artificial Sequence: Synthetic oligonucleotide
gaucaaucggcc

SEQ ID NO: 696 - RNA, 12 nt, Artificial Sequence
  Description of Artificial Sequence: Synthetic oligonucleotide
ggacgaacaucc

SEQ ID NO: 697 - RNA, 11 nt, Artificial Sequence
  Description of Artificial Sequence: Synthetic oligonucleotide
agggucggaac

SEQ ID NO: 698 - RNA, 10 nt, Artificial Sequence
  Description of Artificial Sequence: Synthetic oligonucleotide
ucggaaccca

SEQ ID NO: 699 - RNA, 11 nt, Artificial Sequence
  Description of Artificial Sequence: Synthetic oligonucleotide
acccaagcuua

SEQ ID NO: 700 - RNA, 14 nt, Artificial Sequence
  Description of Artificial Sequence: Synthetic oligonucleotide
gaacuuuaagcaac

SEQ ID NO: 701 - RNA, 11 nt, Artificial Sequence
  Description of Artificial Sequence: Synthetic oligonucleotide
acuauucagug

SEQ ID NO: 702 - RNA, 11 nt, Artificial Sequence
  Description of Artificial Sequence: Synthetic oligonucleotide
cuauucagugg

SEQ ID NO: 703 - RNA, 13 nt, Artificial Sequence
  Description of Artificial Sequence: Synthetic oligonucleotide
aaacacagauaac

SEQ ID NO: 704 - RNA, 12 nt, Artificial Sequence
  Description of Artificial Sequence: Synthetic oligonucleotide
cuuaagaaaaga

SEQ ID NO: 705 - RNA, 12 nt, Artificial Sequence
  Description of Artificial Sequence: Synthetic oligonucleotide
cugaaggagugu

SEQ ID NO: 706 - RNA, 10 nt, Artificial Sequence
  Description of Artificial Sequence: Synthetic oligonucleotide
ucaccgcggg

SEQ ID NO: 707 - RNA, 14 nt, Artificial Sequence
  Description of Artificial Sequence: Synthetic oligonucleotide
agcagaaauaagcg

SEQ ID NO: 708 - RNA, 12 nt, Artificial Sequence
  Description of Artificial Sequence: Synthetic oligonucleotide
aagcgugccguu

SEQ ID NO: 709 - RNA, 12 nt, Artificial Sequence
  Description of Artificial Sequence: Synthetic oligonucleotide
agaaacagucac

SEQ ID NO: 710 - RNA, 12 nt, Artificial Sequence
  Description of Artificial Sequence: Synthetic oligonucleotide
agaggaagaagg

SEQ ID NO: 711 - RNA, 14 nt, Artificial Sequence
  Description of Artificial Sequence: Synthetic oligonucleotide
uguauucaaaauau

SEQ ID NO: 712 - RNA, 13 nt, Artificial Sequence
  Description of Artificial Sequence: Synthetic oligonucleotide
auuuuccucccuu

SEQ ID NO: 713 - RNA, 13 nt, Artificial Sequence
  Description of Artificial Sequence: Synthetic oligonucleotide
caaagaaagauag

SEQ ID NO: 714 - RNA, 12 nt, Artificial Sequence
  Description of Artificial Sequence: Synthetic oligonucleotide
aagaaagauaga

SEQ ID NO: 715 - RNA, 13 nt, Artificial Sequence
  Description of Artificial Sequence: Synthetic oligonucleotide
gaaagcauuuguu

SEQ ID NO: 716 - RNA, 13 nt, Artificial Sequence
  Description of Artificial Sequence: Synthetic oligonucleotide
ugaguuaaacgaa

SEQ ID NO: 717 - RNA, 12 nt, Artificial Sequence
  Description of Artificial Sequence: Synthetic oligonucleotide
acugauacagaa

SEQ ID NO: 718 - RNA, 12 nt, Artificial Sequence
  Description of Artificial Sequence: Synthetic oligonucleotide
auauuauauaua

SEQ ID NO: 719 - RNA, 12 nt, Artificial Sequence
  Description of Artificial Sequence: Synthetic oligonucleotide
auuauauauaua

SEQ ID NO: 720 - RNA, 12 nt, Artificial Sequence
  Description of Artificial Sequence: Synthetic oligonucleotide
ucacuggaugua

SEQ ID NO: 721 - RNA, 12 nt, Artificial Sequence
  Description of Artificial Sequence: Synthetic oligonucleotide
cagggaagagga

SEQ ID NO: 722 - RNA, 15 nt, Artificial Sequence
  Description of Artificial Sequence: Synthetic oligonucleotide
augaucuuuuuuuug

SEQ ID NO: 723 - RNA, 11 nt, Artificial Sequence
  Description of Artificial Sequence: Synthetic oligonucleotide
aguucacggcc

SEQ ID NO: 724 - RNA, 13 nt, Artificial Sequence
  Description of Artificial Sequence: Synthetic oligonucleotide
caccaucacacca

SEQ ID NO: 725 - RNA, 11 nt, Artificial Sequence
  Description of Artificial Sequence: Synthetic oligonucleotide
ccugcggguuu

SEQ ID NO: 726 - RNA, 10 nt, Artificial Sequence
  Description of Artificial Sequence: Synthetic oligonucleotide
auccaguuug

SEQ ID NO: 727 - RNA, 13 nt, Artificial Sequence
  Description of Artificial Sequence: Synthetic oligonucleotide
guuaaggacuucu

SEQ ID NO: 728 - RNA, 13 nt, Artificial Sequence
  Description of Artificial Sequence: Synthetic oligonucleotide
cagugggacagag

SEQ ID NO: 729 - RNA, 14 nt, Artificial Sequence
  Description of Artificial Sequence: Synthetic oligonucleotide
aauuuguuauugug

SEQ ID NO: 730 - RNA, 13 nt, Artificial Sequence
  Description of Artificial Sequence: Synthetic oligonucleotide
uucaaaugcauuu

SEQ ID NO: 731 - RNA, 10 nt, Artificial Sequence
  Description of Artificial Sequence: Synthetic oligonucleotide
caggaaagcc

SEQ ID NO: 732 - RNA, 11 nt, Artificial Sequence
  Description of Artificial Sequence: Synthetic oligonucleotide
aggaaagcccu

SEQ ID NO: 733 - RNA, 12 nt, Artificial Sequence
  Description of Artificial Sequence: Synthetic oligonucleotide
cccagcauggcc

SEQ ID NO: 734 - RNA, 11 nt, Artificial Sequence
  Description of Artificial Sequence: Synthetic oligonucleotide
cuucucccuga

SEQ ID NO: 735 - RNA, 12 nt, Artificial Sequence
  Description of Artificial Sequence: Synthetic oligonucleotide
gaagaagcccuu

SEQ ID NO: 736 - RNA, 12 nt, Artificial Sequence
  Description of Artificial Sequence: Synthetic oligonucleotide
agaagcccuuca

SEQ ID NO: 737 - RNA, 11 nt, Artificial Sequence
  Description of Artificial Sequence: Synthetic oligonucleotide
gcccuucagcg

SEQ ID NO: 738 - RNA, 11 nt, Artificial Sequence
  Description of Artificial Sequence: Synthetic oligonucleotide
ccuucagcggc

SEQ ID NO: 739 - RNA, 12 nt, Artificial Sequence
  Description of Artificial Sequence: Synthetic oligonucleotide
ucagcggccagu

SEQ ID NO: 740 - RNA, 12 nt, Artificial Sequence
  Description of Artificial Sequence: Synthetic oligonucleotide
ugaaaagcuccg

SEQ ID NO: 741 - RNA, 11 nt, Artificial Sequence
  Description of Artificial Sequence: Synthetic oligonucleotide
aaaagcuccgg

SEQ ID NO: 742 - RNA, 13 nt, Artificial Sequence
  Description of Artificial Sequence: Synthetic oligonucleotide
agucaacagucug

SEQ ID NO: 743 - RNA, 13 nt, Artificial Sequence
  Description of Artificial Sequence: Synthetic oligonucleotide
cagaguucaaaag

SEQ ID NO: 744 - RNA, 13 nt, Artificial Sequence
  Description of Artificial Sequence: Synthetic oligonucleotide
agaguucaaaagc

SEQ ID NO: 745 - RNA, 12 nt, Artificial Sequence
  Description of Artificial Sequence: Synthetic oligonucleotide
uucaaaagcccu

SEQ ID NO: 746 - RNA, 12 nt, Artificial Sequence
  Description of Artificial Sequence: Synthetic oligonucleotide
ucaaaagcccuu

SEQ ID NO: 747 - RNA, 12 nt, Artificial Sequence
  Description of Artificial Sequence: Synthetic oligonucleotide
aaaagcccuuca

SEQ ID NO: 748 - RNA, 12 nt, Artificial Sequence
  Description of Artificial Sequence: Synthetic oligonucleotide
aaagcccuucag

SEQ ID NO: 749 - RNA, 13 nt, Artificial Sequence
  Description of Artificial Sequence: Synthetic oligonucleotide
gugaagccgcucg

SEQ ID NO: 750 - RNA, 12 nt, Artificial Sequence
  Description of Artificial Sequence: Synthetic oligonucleotide
cacgccagucaa

SEQ ID NO: 751 - RNA, 13 nt, Artificial Sequence
  Description of Artificial Sequence: Synthetic oligonucleotide
uucuuggugcgug

SEQ ID NO: 752 - RNA, 14 nt, Artificial Sequence
  Description of Artificial Sequence: Synthetic oligonucleotide
auuggauucaucag

SEQ ID NO: 753 - RNA, 13 nt, Artificial Sequence
  Description of Artificial Sequence: Synthetic oligonucleotide
uggaauaccuaag

SEQ ID NO: 754 - RNA, 12 nt, Artificial Sequence
  Description of Artificial Sequence: Synthetic oligonucleotide
auuugaggcuca

SEQ ID NO: 755 - RNA, 11 nt, Artificial Sequence
  Description of Artificial Sequence: Synthetic oligonucleotide
ucuacaauugg

SEQ ID NO: 756 - RNA, 12 nt, Artificial Sequence
  Description of Artificial Sequence: Synthetic oligonucleotide
uaguuaggagcc

SEQ ID NO: 757 - RNA, 13 nt, Artificial Sequence
  Description of Artificial Sequence: Synthetic oligonucleotide
agucaauauccac

SEQ ID NO: 758 - RNA, 13 nt, Artificial Sequence
  Description of Artificial Sequence: Synthetic oligonucleotide
auguucagucaca

SEQ ID NO: 759 - RNA, 12 nt, Artificial Sequence
  Description of Artificial Sequence: Synthetic oligonucleotide
acacacacauac

SEQ ID NO: 760 - RNA, 12 nt, Artificial Sequence
  Description of Artificial Sequence: Synthetic oligonucleotide
uuccuuuugcuu

SEQ ID NO: 761 - RNA, 16 nt, Artificial Sequence
  Description of Artificial Sequence: Synthetic oligonucleotide
uuuuaaaguaauuuuu

SEQ ID NO: 762 - RNA, 13 nt, Artificial Sequence
  Description of Artificial Sequence: Synthetic oligonucleotide
caacagucaaugg

SEQ ID NO: 763 - RNA, 13 nt, Artificial Sequence
  Description of Artificial Sequence: Synthetic oligonucleotide
ucgacaaaccaau

SEQ ID NO: 764 - RNA, 12 nt, Artificial Sequence
  Description of Artificial Sequence: Synthetic oligonucleotide
acugcuaccacu

SEQ ID NO: 765 - RNA, 13 nt, Artificial Sequence
  Description of Artificial Sequence: Synthetic oligonucleotide
gcaagcggucuua

SEQ ID NO: 766 - RNA, 13 nt, Artificial Sequence
  Description of Artificial Sequence: Synthetic oligonucleotide
ggucuuaccggcu

SEQ ID NO: 767 - RNA, 11 nt, Artificial Sequence
  Description of Artificial Sequence: Synthetic oligonucleotide
gauggguuacc

SEQ ID NO: 768 - RNA, 11 nt, Artificial Sequence
  Description of Artificial Sequence: Synthetic oligonucleotide
guuaccugcga

SEQ ID NO: 769 - RNA, 12 nt, Artificial Sequence
  Description of Artificial Sequence: Synthetic oligonucleotide
aaucuugcugag

SEQ ID NO: 770 - RNA, 13 nt, Artificial Sequence
  Description of Artificial Sequence: Synthetic oligonucleotide
agcauaaaacagu

SEQ ID NO: 771 - RNA, 12 nt, Artificial Sequence
  Description of Artificial Sequence: Synthetic oligonucleotide
guccuuuauccu

SEQ ID NO: 772 - RNA, 12 nt, Artificial Sequence
  Description of Artificial Sequence: Synthetic oligonucleotide
caacgcaaguug

SEQ ID NO: 773 - RNA, 13 nt, Artificial Sequence
  Description of Artificial Sequence: Synthetic oligonucleotide
aaacugaaaccau

SEQ ID NO: 774 - RNA, 14 nt, Artificial Sequence
  Description of Artificial Sequence: Synthetic oligonucleotide
acuuuguuaaauau

SEQ ID NO: 775 - RNA, 14 nt, Artificial Sequence
  Description of Artificial Sequence: Synthetic oligonucleotide
guauauuaaaaguu

SEQ ID NO: 776 - RNA, 13 nt, Artificial Sequence
  Description of Artificial Sequence: Synthetic oligonucleotide
guuuugacuuaac

SEQ ID NO: 777 - RNA, 13 nt, Artificial Sequence
  Description of Artificial Sequence: Synthetic oligonucleotide
gcaaacucagcac

SEQ ID NO: 778 - RNA, 11 nt, Artificial Sequence
  Description of Artificial Sequence: Synthetic oligonucleotide
ugcugaccuca

SEQ ID NO: 779 - RNA, 14 nt, Artificial Sequence
  Description of Artificial Sequence: Synthetic oligonucleotide
uuuauucagaucgc

SEQ ID NO: 780 - RNA, 13 nt, Artificial Sequence
  Description of Artificial Sequence: Synthetic oligonucleotide
aggguucugggau

SEQ ID NO: 781 - RNA, 15 nt, Artificial Sequence
  Description of Artificial Sequence: Synthetic oligonucleotide
auauuggaaauuaug

SEQ ID NO: 782 - RNA, 13 nt, Artificial Sequence
  Description of Artificial Sequence: Synthetic oligonucleotide
auggaagcacuag

SEQ ID NO: 783 - RNA, 13 nt, Artificial Sequence
  Description of Artificial Sequence: Synthetic oligonucleotide
guuuuuaugugga

SEQ ID NO: 784 - RNA, 12 nt, Artificial Sequence
  Description of Artificial Sequence: Synthetic oligonucleotide
ggaauugguaga

SEQ ID NO: 785 - RNA, 13 nt, Artificial Sequence
  Description of Artificial Sequence: Synthetic oligonucleotide
uuagacuuggaga

SEQ ID NO: 786 - RNA, 13 nt, Artificial Sequence
  Description of Artificial Sequence: Synthetic oligonucleotide
uuacaguauucca

SEQ ID NO: 787 - RNA, 15 nt, Artificial Sequence
  Description of Artificial Sequence: Synthetic oligonucleotide
ccacugaugaauuaa

SEQ ID NO: 788 - RNA, 12 nt, Artificial Sequence
  Description of Artificial Sequence: Synthetic oligonucleotide
ccacaucaucac

SEQ ID NO: 789 - RNA, 13 nt, Artificial Sequence
  Description of Artificial Sequence: Synthetic oligonucleotide
cucaccaaacaga

SEQ ID NO: 790 - RNA, 12 nt, Artificial Sequence
  Description of Artificial Sequence: Synthetic oligonucleotide
ggaacaugaugg

SEQ ID NO: 791 - RNA, 12 nt, Artificial Sequence
  Description of Artificial Sequence: Synthetic oligonucleotide
cauguagacugc

SEQ ID NO: 792 - RNA, 13 nt, Artificial Sequence
  Description of Artificial Sequence: Synthetic oligonucleotide
ggaucuauuuaug

SEQ ID NO: 793 - RNA, 12 nt, Artificial Sequence
  Description of Artificial Sequence: Synthetic oligonucleotide
gcacuauuauca

SEQ ID NO: 794 - RNA, 11 nt, Artificial Sequence
  Description of Artificial Sequence: Synthetic oligonucleotide
aucaguucugc

SEQ ID NO: 795 - RNA, 13 nt, Artificial Sequence
  Description of Artificial Sequence: Synthetic oligonucleotide
agauuaaaccuac

SEQ ID NO: 796 - RNA, 13 nt, Artificial Sequence
  Description of Artificial Sequence: Synthetic oligonucleotide
auaaaauccuucu

SEQ ID NO: 797 - RNA, 12 nt, Artificial Sequence
  Description of Artificial Sequence: Synthetic oligonucleotide
aaugcuguagac

SEQ ID NO: 798 - RNA, 13 nt, Artificial Sequence
  Description of Artificial Sequence: Synthetic oligonucleotide
uugauaggaauag

SEQ ID NO: 799 - RNA, 11 nt, Artificial Sequence
  Description of Artificial Sequence: Synthetic oligonucleotide
aauggcccuga

SEQ ID NO: 800 - RNA, 11 nt, Artificial Sequence
  Description of Artificial Sequence: Synthetic oligonucleotide
uuccucaagca

SEQ ID NO: 801 - RNA, 10 nt, Artificial Sequence
  Description of Artificial Sequence: Synthetic oligonucleotide
guucagccca

SEQ ID NO: 802 - RNA, 11 nt, Artificial Sequence
  Description of Artificial Sequence: Synthetic oligonucleotide
gcugcugaacc

SEQ ID NO: 803 - RNA, 12 nt, Artificial Sequence
  Description of Artificial Sequence: Synthetic oligonucleotide
aaguucucuuca

SEQ ID NO: 804 - RNA, 11 nt, Artificial Sequence
  Description of Artificial Sequence: Synthetic oligonucleotide
ccagccuagag

SEQ ID NO: 805 - RNA, 13 nt, Artificial Sequence
  Description of Artificial Sequence: Synthetic oligonucleotide
cucugugaagugu

SEQ ID NO: 806 - RNA, 14 nt, Artificial Sequence
  Description of Artificial Sequence: Synthetic oligonucleotide
ugagaaaauuucaa

SEQ ID NO: 807 - RNA, 11 nt, Artificial Sequence
  Description of Artificial Sequence: Synthetic oligonucleotide
aauccuccuga

SEQ ID NO: 808 - RNA, 12 nt, Artificial Sequence
  Description of Artificial Sequence: Synthetic oligonucleotide
gugacaucauau

SEQ ID NO: 809 - RNA, 13 nt, Artificial Sequence
  Description of Artificial Sequence: Synthetic oligonucleotide
aaucuucaucaua

SEQ ID NO: 810 - RNA, 13 nt, Artificial Sequence
  Description of Artificial Sequence: Synthetic oligonucleotide
gacuagcuauuaa

SEQ ID NO: 811 - RNA, 14 nt, Artificial Sequence
  Description of Artificial Sequence: Synthetic oligonucleotide
ucucuacuaaaaau

SEQ ID NO: 812 - RNA, 12 nt, Artificial Sequence
  Description of Artificial Sequence: Synthetic oligonucleotide
ucuaucucgccu

SEQ ID NO: 813 - RNA, 13 nt, Artificial Sequence
  Description of Artificial Sequence: Synthetic oligonucleotide
cuucgguccaguu

SEQ ID NO: 814 - RNA, 11 nt, Artificial Sequence
  Description of Artificial Sequence: Synthetic oligonucleotide
gauguagccgc

SEQ ID NO: 815 - RNA, 12 nt, Artificial Sequence
  Description of Artificial Sequence: Synthetic oligonucleotide
ugaggagacuug

SEQ ID NO: 816 - RNA, 12 nt, Artificial Sequence
  Description of Artificial Sequence: Synthetic oligonucleotide
gaguagugagga

SEQ ID NO: 817 - RNA, 14 nt, Artificial Sequence
  Description of Artificial Sequence: Synthetic oligonucleotide
cagaugaguacaaa

SEQ ID NO: 818 - RNA, 13 nt, Artificial Sequence
  Description of Artificial Sequence: Synthetic oligonucleotide
guuguuaaugggc

SEQ ID NO: 819 - RNA, 13 nt, Artificial Sequence
  Description of Artificial Sequence: Synthetic oligonucleotide
uuuuuaauuuauu

SEQ ID NO: 820 - RNA, 12 nt, Artificial Sequence
  Description of Artificial Sequence: Synthetic oligonucleotide
uauuuaaauaug

SEQ ID NO: 821 - RNA, 13 nt, Artificial Sequence
  Description of Artificial Sequence: Synthetic oligonucleotide
uauccuuuguuuc

SEQ ID NO: 822 - RNA, 14 nt, Artificial Sequence
  Description of Artificial Sequence: Synthetic oligonucleotide
cgucuaaguguuug

SEQ ID NO: 823 - RNA, 12 nt, Artificial Sequence
  Description of Artificial Sequence: Synthetic oligonucleotide
accugugacaaa

SEQ ID NO: 824 - RNA, 13 nt, Artificial Sequence
  Description of Artificial Sequence: Synthetic oligonucleotide
ccaggcugaauua

SEQ ID NO: 825 - RNA, 14 nt, Artificial Sequence
  Description of Artificial Sequence: Synthetic oligonucleotide
gucauucuuacaau

SEQ ID NO: 826 - RNA, 15 nt, Artificial Sequence
  Description of Artificial Sequence: Synthetic oligonucleotide
ucauucuuacaauug

SEQ ID NO: 827 - RNA, 12 nt, Artificial Sequence
  Description of Artificial Sequence: Synthetic oligonucleotide
cagagaguguac

SEQ ID NO: 828 - RNA, 12 nt, Artificial Sequence
  Description of Artificial Sequence: Synthetic oligonucleotide
agaacucagcag

SEQ ID NO: 829 - RNA, 13 nt, Artificial Sequence
  Description of Artificial Sequence: Synthetic oligonucleotide
uuuauuuucagua

SEQ ID NO: 830 - RNA, 12 nt, Artificial Sequence
  Description of Artificial Sequence: Synthetic oligonucleotide
ucuuaaauggaa

SEQ ID NO: 831 - RNA, 13 nt, Artificial Sequence
  Description of Artificial Sequence: Synthetic oligonucleotide
ugccuaaaauugu

SEQ ID NO: 832 - RNA, 12 nt, Artificial Sequence
  Description of Artificial Sequence: Synthetic oligonucleotide
agacugugagcu

SEQ ID NO: 833 - RNA, 14 nt, Artificial Sequence
  Description of Artificial Sequence: Synthetic oligonucleotide
ugcuuuuuauuaau

SEQ ID NO: 834 - RNA, 13 nt, Artificial Sequence
  Description of Artificial Sequence: Synthetic oligonucleotide
cucuucuuacauu

SEQ ID NO: 835 - RNA, 15 nt, Artificial Sequence
  Description of Artificial Sequence: Synthetic oligonucleotide
cauuuguaaaaaugu

SEQ ID NO: 836 - RNA, 15 nt, Artificial Sequence
  Description of Artificial Sequence: Synthetic oligonucleotide
aucuuaauucauauu

SEQ ID NO: 837 - RNA, 13 nt, Artificial Sequence
  Description of Artificial Sequence: Synthetic oligonucleotide
gaacuaaucauga

SEQ ID NO: 838 - RNA, 12 nt, Artificial Sequence
  Description of Artificial Sequence: Synthetic oligonucleotide
ucugcucuuggg

SEQ ID NO: 839 - RNA, 13 nt, Artificial Sequence
  Description of Artificial Sequence: Synthetic oligonucleotide
caguagcuuugag

SEQ ID NO: 840 - RNA, 14 nt, Artificial Sequence
  Description of Artificial Sequence: Synthetic oligonucleotide
cacguaauauuuca

SEQ ID NO: 841 - RNA, 13 nt, Artificial Sequence
  Description of Artificial Sequence: Synthetic oligonucleotide
uauucucuucacu

SEQ ID NO: 842 - RNA, 14 nt, Artificial Sequence
  Description of Artificial Sequence: Synthetic oligonucleotide
cuaaugcuaagaaa

SEQ ID NO: 843 - RNA, 12 nt, Artificial Sequence
  Description of Artificial Sequence: Synthetic oligonucleotide
gcugaaaaucaa

SEQ ID NO: 844 - RNA, 14 nt, Artificial Sequence
  Description of Artificial Sequence: Synthetic oligonucleotide
aauaugauuacuuu

SEQ ID NO: 845 - RNA, 14 nt, Artificial Sequence
  Description of Artificial Sequence: Synthetic oligonucleotide
cauuuuguucuaca

SEQ ID NO: 846 - RNA, 12 nt, Artificial Sequence
  Description of Artificial Sequence: Synthetic oligonucleotide
cccgggacucuc

SEQ ID NO: 847 - RNA, 14 nt, Artificial Sequence
  Description of Artificial Sequence: Synthetic oligonucleotide
ccuuuaaaguaaag

SEQ ID NO: 848 - RNA, 13 nt, Artificial Sequence
  Description of Artificial Sequence: Synthetic oligonucleotide
ucuggaagccugg

SEQ ID NO: 849 - RNA, 14 nt, Artificial Sequence
  Description of Artificial Sequence: Synthetic oligonucleotide
aaaacaaaagagag

SEQ ID NO: 850 - RNA, 13 nt, Artificial Sequence
  Description of Artificial Sequence: Synthetic oligonucleotide
aucaguuaugccg

SEQ ID NO: 851 - RNA, 13 nt, Artificial Sequence
  Description of Artificial Sequence: Synthetic oligonucleotide
uaaaagaagucca

SEQ ID NO: 852 - RNA, 11 nt, Artificial Sequence
  Description of Artificial Sequence: Synthetic oligonucleotide
aggugagguua

SEQ ID NO: 853 - RNA, 11 nt, Artificial Sequence
  Description of Artificial Sequence: Synthetic oligonucleotide
gggaagaggac

SEQ ID NO: 854 - RNA, 13 nt, Artificial Sequence
  Description of Artificial Sequence: Synthetic oligonucleotide
aagcaaguauugu

SEQ ID NO: 855 - RNA, 12 nt, Artificial Sequence
  Description of Artificial Sequence: Synthetic oligonucleotide
auuguagcacuc

SEQ ID NO: 856 - RNA, 14 nt, Artificial Sequence
  Description of Artificial Sequence: Synthetic oligonucleotide
acaaaaccacaaau

SEQ ID NO: 857 - RNA, 12 nt, Artificial Sequence
  Description of Artificial Sequence: Synthetic oligonucleotide
uaagcccauaca

SEQ ID NO: 858 - RNA, 11 nt, Artificial Sequence
  Description of Artificial Sequence: Synthetic oligonucleotide
agcccauacag

SEQ ID NO: 859 - RNA, 12 nt, Artificial Sequence
  Description of Artificial Sequence: Synthetic oligonucleotide
cagaaaccuucc

SEQ ID NO: 860 - RNA, 10 nt, Artificial Sequence
  Description of Artificial Sequence: Synthetic oligonucleotide
guauaccuac

SEQ ID NO: 861 - RNA, 13 nt, Artificial Sequence
  Description of Artificial Sequence: Synthetic oligonucleotide
gccaguuuucgga

SEQ ID NO: 862 - RNA, 9 nt, Artificial Sequence
  Description of Artificial Sequence: Synthetic oligonucleotide
ggaacaggg

SEQ ID NO: 863 - RNA, 13 nt, Artificial Sequence
  Description of Artificial Sequence: Synthetic oligonucleotide
uuaacuuuccagu

SEQ ID NO: 864 - RNA, 14 nt, Artificial Sequence
  Description of Artificial Sequence: Synthetic oligonucleotide
aaaguuugguuuug

SEQ ID NO: 865 - RNA, 12 nt, Artificial Sequence
  Description of Artificial Sequence: Synthetic oligonucleotide
cuucccacugua

SEQ ID NO: 866 - RNA, 13 nt, Artificial Sequence
  Description of Artificial Sequence: Synthetic oligonucleotide
ugauaccauauga

SEQ ID NO: 867 - RNA, 11 nt, Artificial Sequence
  Description of Artificial Sequence: Synthetic oligonucleotide
aacaugggcug

SEQ ID NO: 868 - RNA, 13 nt, Artificial Sequence
  Description of Artificial Sequence: Synthetic oligonucleotide
caacuuuuucaua

SEQ ID NO: 869 - RNA, 12 nt, Artificial Sequence
  Description of Artificial Sequence: Synthetic oligonucleotide
caugaggccgga

SEQ ID NO: 870 - RNA, 11 nt, Artificial Sequence
  Description of Artificial Sequence: Synthetic oligonucleotide
acugcauuugu

SEQ ID NO: 871 - RNA, 13 nt, Artificial Sequence
  Description of Artificial Sequence: Synthetic oligonucleotide
aauguuuacuacc

SEQ ID NO: 872 - RNA, 15 nt, Artificial Sequence
  Description of Artificial Sequence: Synthetic oligonucleotide
aauuuuuugaugaaa

SEQ ID NO: 873 - RNA, 14 nt, Artificial Sequence
  Description of Artificial Sequence: Synthetic oligonucleotide
cagugugugaauuu

SEQ ID NO: 874 - RNA, 13 nt, Artificial Sequence
  Description of Artificial Sequence: Synthetic oligonucleotide
gagcaauguaugu

SEQ ID NO: 875 - RNA, 14 nt, Artificial Sequence
  Description of Artificial Sequence: Synthetic oligonucleotide
aaagcacauauaua

SEQ ID NO: 876 - RNA, 14 nt, Artificial Sequence
  Description of Artificial Sequence: Synthetic oligonucleotide
guaauaguuucucc

SEQ ID NO: 877 - RNA, 13 nt, Artificial Sequence
  Description of Artificial Sequence: Synthetic oligonucleotide
aguuucuccaaau

SEQ ID NO: 878 - RNA, 13 nt, Artificial Sequence
  Description of Artificial Sequence: Synthetic oligonucleotide
uacuuccuagaaa

SEQ ID NO: 879 - RNA, 13 nt, Artificial Sequence
  Description of Artificial Sequence: Synthetic oligonucleotide
uacaccauauaug

SEQ ID NO: 880 - RNA, 14 nt, Artificial Sequence
  Description of Artificial Sequence: Synthetic oligonucleotide
auauaugaauggag

SEQ ID NO: 881 - RNA, 13 nt, Artificial Sequence
  Description of Artificial Sequence: Synthetic oligonucleotide
acgagaagaagau

SEQ ID NO: 882 - RNA, 13 nt, Artificial Sequence
  Description of Artificial Sequence: Synthetic oligonucleotide
ucauuuacaggga

SEQ ID NO: 883 - RNA, 13 nt, Artificial Sequence
  Description of Artificial Sequence: Synthetic oligonucleotide
cauuuacagggac

SEQ ID NO: 884 - RNA, 10 nt, Artificial Sequence
  Description of Artificial Sequence: Synthetic oligonucleotide
agggaccuga

SEQ ID NO: 885 - RNA, 14 nt, Artificial Sequence
  Description of Artificial Sequence: Synthetic oligonucleotide
uguuugacugcauc

SEQ ID NO: 886 - RNA, 13 nt, Artificial Sequence
  Description of Artificial Sequence: Synthetic oligonucleotide
uuugacugcaucg

SEQ ID NO: 887 - RNA, 12 nt, Artificial Sequence
  Description of Artificial Sequence: Synthetic oligonucleotide
gaguucacaggg

SEQ ID NO: 888 - RNA, 13 nt, Artificial Sequence
  Description of Artificial Sequence: Synthetic oligonucleotide
ggcaccucugucc

SEQ ID NO: 889 - RNA, 15 nt, Artificial Sequence
  Description of Artificial Sequence: Synthetic oligonucleotide
gguuugucuuuuuaa

SEQ ID NO: 890 - RNA, 14 nt, Artificial Sequence
  Description of Artificial Sequence: Synthetic oligonucleotide
uuugucuuuuuaag

SEQ ID NO: 891 - RNA, 13 nt, Artificial Sequence
  Description of Artificial Sequence: Synthetic oligonucleotide
ccuaaagguuguc

SEQ ID NO: 892 - RNA, 12 nt, Artificial Sequence
  Description of Artificial Sequence: Synthetic oligonucleotide
aagguugucgac

SEQ ID NO: 893 - RNA, 13 nt, Artificial Sequence
  Description of Artificial Sequence: Synthetic oligonucleotide
accuggcaauugu

SEQ ID NO: 894 - RNA, 12 nt, Artificial Sequence
  Description of Artificial Sequence: Synthetic oligonucleotide
aguggugcgagg

SEQ ID NO: 895 - RNA, 13 nt, Artificial Sequence
  Description of Artificial Sequence: Synthetic oligonucleotide
agagacaugaaau

SEQ ID NO: 896 - RNA, 13 nt, Artificial Sequence
  Description of Artificial Sequence: Synthetic oligonucleotide
auauauuucucca

SEQ ID NO: 897 - RNA, 10 nt, Artificial Sequence
  Description of Artificial Sequence: Synthetic oligonucleotide
caugaaggcu

SEQ ID NO: 898 - RNA, 11 nt, Artificial Sequence
  Description of Artificial Sequence: Synthetic oligonucleotide
gcuggaguggu

SEQ ID NO: 899 - RNA, 11 nt, Artificial Sequence
  Description of Artificial Sequence: Synthetic oligonucleotide
aggaagagagg

SEQ ID NO: 900 - RNA, 12 nt, Artificial Sequence
  Description of Artificial Sequence: Synthetic oligonucleotide
cuugcaucgggc

SEQ ID NO: 901 - RNA, 13 nt, Artificial Sequence
  Description of Artificial Sequence: Synthetic oligonucleotide
auauccuacugug

SEQ ID NO: 902 - RNA, 13 nt, Artificial Sequence
  Description of Artificial Sequence: Synthetic oligonucleotide
uccuacuguguaa

SEQ ID NO: 903 - RNA, 12 nt, Artificial Sequence
  Description of Artificial Sequence: Synthetic oligonucleotide
ccuuguagugua

SEQ ID NO: 904 - RNA, 13 nt, Artificial Sequence
  Description of Artificial Sequence: Synthetic oligonucleotide
ucuuuguugauug

SEQ ID NO: 905 - RNA, 14 nt, Artificial Sequence
  Description of Artificial Sequence: Synthetic oligonucleotide
uuuguugauugaaa

SEQ ID NO: 906 - RNA, 15 nt, Artificial Sequence
  Description of Artificial Sequence: Synthetic oligonucleotide
uucuuuuucuuccau

SEQ ID NO: 907 - RNA, 13 nt, Artificial Sequence
  Description of Artificial Sequence: Synthetic oligonucleotide
aaucuuccuucua

SEQ ID NO: 908 - RNA, 13 nt, Artificial Sequence
  Description of Artificial Sequence: Synthetic oligonucleotide
uugaaugcuucau

SEQ ID NO: 909 - RNA, 13 nt, Artificial Sequence
  Description of Artificial Sequence: Synthetic oligonucleotide
ugaaugcuucaug

SEQ ID NO: 910 - RNA, 13 nt, Artificial Sequence
  Description of Artificial Sequence: Synthetic oligonucleotide
aauucuacuuuga

SEQ ID NO: 911 - RNA, 13 nt, Artificial Sequence
  Description of Artificial Sequence: Synthetic oligonucleotide
agcaacuacagac

SEQ ID NO: 912 - RNA, 13 nt, Artificial Sequence
  Description of Artificial Sequence: Synthetic oligonucleotide
gaccaaggucaac

SEQ ID NO: 913 - RNA, 13 nt, Artificial Sequence
  Description of Artificial Sequence: Synthetic oligonucleotide
cgacuaucucgac

SEQ ID NO: 914 - RNA, 13 nt, Artificial Sequence
  Description of Artificial Sequence: Synthetic oligonucleotide
aaccuucccaaac

SEQ ID NO: 915 - RNA, 14 nt, Artificial Sequence
  Description of Artificial Sequence: Synthetic oligonucleotide
ccaagcuuagaacu

SEQ ID NO: 916 - RNA, 15 nt, Artificial Sequence
  Description of Artificial Sequence: Synthetic oligonucleotide
agcuuagaacuuuaa

SEQ ID NO: 917 - RNA, 11 nt, Artificial Sequence
  Description of Artificial Sequence: Synthetic oligonucleotide
aagaccaccac

SEQ ID NO: 918 - RNA, 14 nt, Artificial Sequence
  Description of Artificial Sequence: Synthetic oligonucleotide
gcgagaaauaaagu

SEQ ID NO: 919 - RNA, 14 nt, Artificial Sequence
  Description of Artificial Sequence: Synthetic oligonucleotide
cgagaaauaaaguu

SEQ ID NO: 920 - RNA, 12 nt, Artificial Sequence
  Description of Artificial Sequence: Synthetic oligonucleotide
aggaaaugaucc

SEQ ID NO: 921 - RNA, 13 nt, Artificial Sequence
  Description of Artificial Sequence: Synthetic oligonucleotide
gaagaaaugaaac

SEQ ID NO: 922 - RNA, 13 nt, Artificial Sequence
  Description of Artificial Sequence: Synthetic oligonucleotide
guuuccauccucc

SEQ ID NO: 923 - RNA, 15 nt, Artificial Sequence
  Description of Artificial Sequence: Synthetic oligonucleotide
acugaaaaucuuuga

SEQ ID NO: 924 - RNA, 11 nt, Artificial Sequence
  Description of Artificial Sequence: Synthetic oligonucleotide
ugccguucagg

SEQ ID NO: 925 - RNA, 13 nt, Artificial Sequence
  Description of Artificial Sequence: Synthetic oligonucleotide
caggguccagaag

SEQ ID NO: 926 - RNA, 13 nt, Artificial Sequence
  Description of Artificial Sequence: Synthetic oligonucleotide
ucaagacugcuug

SEQ ID NO: 927 - RNA, 13 nt, Artificial Sequence
  Description of Artificial Sequence: Synthetic oligonucleotide
uccaugucuuugg

SEQ ID NO: 928 - RNA, 11 nt, Artificial Sequence
  Description of Artificial Sequence: Synthetic oligonucleotide
gccugaaacac

SEQ ID NO: 929 - RNA, 12 nt, Artificial Sequence
  Description of Artificial Sequence: Synthetic oligonucleotide
ucucuguaccuc

SEQ ID NO: 930 - RNA, 12 nt, Artificial Sequence
  Description of Artificial Sequence: Synthetic oligonucleotide
agcaagacaaga

SEQ ID NO: 931 - RNA, 13 nt, Artificial Sequence
  Description of Artificial Sequence: Synthetic oligonucleotide
gcaagacaagaaa

SEQ ID NO: 932 - RNA, 12 nt, Artificial Sequence
  Description of Artificial Sequence: Synthetic oligonucleotide
uguacaagaucc

SEQ ID NO: 933 - RNA, 12 nt, Artificial Sequence
  Description of Artificial Sequence: Synthetic oligonucleotide
cguacuugcaga

SEQ ID NO: 934 - RNA, 13 nt, Artificial Sequence
  Description of Artificial Sequence: Synthetic oligonucleotide
cgaucgauacaga

SEQ ID NO: 935 - RNA, 13 nt, Artificial Sequence
  Description of Artificial Sequence: Synthetic oligonucleotide
uauaaaaauaaau

SEQ ID NO: 936 - RNA, 13 nt, Artificial Sequence
  Description of Artificial Sequence: Synthetic oligonucleotide
uaaaaauaaauau

SEQ ID NO: 937 - RNA, 13 nt, Artificial Sequence
  Description of Artificial Sequence: Synthetic oligonucleotide
uuugacugcugug

SEQ ID NO: 938 - RNA, 13 nt, Artificial Sequence
  Description of Artificial Sequence: Synthetic oligonucleotide
ggagaugagagac

SEQ ID NO: 939 - RNA, 10 nt, Artificial Sequence
  Description of Artificial Sequence: Synthetic oligonucleotide
ucccacuugg

SEQ ID NO: 940 - RNA, 10 nt, Artificial Sequence
  Description of Artificial Sequence: Synthetic oligonucleotide
guucacggcc

SEQ ID NO: 941 - RNA, 12 nt, Artificial Sequence
  Description of Artificial Sequence: Synthetic oligonucleotide
accaucacacca

SEQ ID NO: 942 - RNA, 10 nt, Artificial Sequence
  Description of Artificial Sequence: Synthetic oligonucleotide
cugcggguuu

SEQ ID NO: 943 - RNA, 9 nt, Artificial Sequence
  Description of Artificial Sequence: Synthetic oligonucleotide
uccaguuug

SEQ ID NO: 944 - RNA, 12 nt, Artificial Sequence
  Description of Artificial Sequence: Synthetic oligonucleotide
uuaaggacuucu

SEQ ID NO: 945 - RNA, 12 nt, Artificial Sequence
  Description of Artificial Sequence: Synthetic oligonucleotide
agugggacagag

SEQ ID NO: 946 - RNA, 13 nt, Artificial Sequence
  Description of Artificial Sequence: Synthetic oligonucleotide
auuuguuauugug

SEQ ID NO: 947 - RNA, 12 nt, Artificial Sequence
  Description of Artificial Sequence: Synthetic oligonucleotide
ucaaaugcauuu

SEQ ID NO: 948 - RNA, 9 nt, Artificial Sequence
  Description of Artificial Sequence: Synthetic oligonucleotide
aggaaagcc

SEQ ID NO: 949 - RNA, 10 nt, Artificial Sequence
  Description of Artificial Sequence: Synthetic oligonucleotide
ggaaagcccu

SEQ ID NO: 950 - RNA, 11 nt, Artificial Sequence
  Description of Artificial Sequence: Synthetic oligonucleotide
ccagcauggcc

SEQ ID NO: 951 - RNA, 10 nt, Artificial Sequence
  Description of Artificial Sequence: Synthetic oligonucleotide
uucucccuga

SEQ ID NO: 952 - RNA, 11 nt, Artificial Sequence
  Description of Artificial Sequence: Synthetic oligonucleotide
aagaagcccuu

SEQ ID NO: 953 - RNA, 11 nt, Artificial Sequence
  Description of Artificial Sequence: Synthetic oligonucleotide
gaagcccuuca

SEQ ID NO: 954 - RNA, 10 nt, Artificial Sequence
  Description of Artificial Sequence: Synthetic oligonucleotide
cccuucagcg

SEQ ID NO: 955 - RNA, 10 nt, Artificial Sequence
  Description of Artificial Sequence: Synthetic oligonucleotide
cuucagcggc

SEQ ID NO: 956 - RNA, 11 nt, Artificial Sequence
  Description of Artificial Sequence: Synthetic oligonucleotide
cagcggccagu

SEQ ID NO: 957 - RNA, 11 nt, Artificial Sequence
  Description of Artificial Sequence: Synthetic oligonucleotide
gaaaagcuccg

SEQ ID NO: 958 - RNA, 10 nt, Artificial Sequence
  Description of Artificial Sequence: Synthetic oligonucleotide
aaagcuccgg

SEQ ID NO: 959 - RNA, 12 nt, Artificial Sequence
  Description of Artificial Sequence: Synthetic oligonucleotide
gucaacagucug

SEQ ID NO: 960 - RNA, 12 nt, Artificial Sequence
  Description of Artificial Sequence: Synthetic oligonucleotide
agaguucaaaag

SEQ ID NO: 961 - RNA, 12 nt, Artificial Sequence
  Description of Artificial Sequence: Synthetic oligonucleotide
gaguucaaaagc

SEQ ID NO: 962 - RNA, 11 nt, Artificial Sequence
  Description of Artificial Sequence: Synthetic oligonucleotide
ucaaaagcccu

SEQ ID NO: 963 - RNA, 11 nt, Artificial Sequence
  Description of Artificial Sequence: Synthetic oligonucleotide
caaaagcccuu

SEQ ID NO: 964 - RNA, 11 nt, Artificial Sequence
  Description of Artificial Sequence: Synthetic oligonucleotide
aaagcccuuca

SEQ ID NO: 965 - RNA, 11 nt, Artificial Sequence
  Description of Artificial Sequence: Synthetic oligonucleotide
aagcccuucag

SEQ ID NO: 966 - RNA, 12 nt, Artificial Sequence
  Description of Artificial Sequence: Synthetic oligonucleotide
ugaagccgcucg

SEQ ID NO: 967 - RNA, 11 nt, Artificial Sequence
  Description of Artificial Sequence: Synthetic oligonucleotide
acgccagucaa

SEQ ID NO: 968 - RNA, 12 nt, Artificial Sequence
  Description of Artificial Sequence: Synthetic oligonucleotide
ucuuggugcgug

SEQ ID NO: 969 - RNA, 13 nt, Artificial Sequence
  Description of Artificial Sequence: Synthetic oligonucleotide
uuggauucaucag

SEQ ID NO: 970 - RNA, 12 nt, Artificial Sequence
  Description of Artificial Sequence: Synthetic oligonucleotide
ggaauaccuaag

SEQ ID NO: 971 - RNA, 11 nt, Artificial Sequence
  Description of Artificial Sequence: Synthetic oligonucleotide
uuugaggcuca

SEQ ID NO: 972 - RNA, 10 nt, Artificial Sequence
  Description of Artificial Sequence: Synthetic oligonucleotide
cuacaauugg

SEQ ID NO: 973 - RNA, 11 nt, Artificial Sequence
  Description of Artificial Sequence: Synthetic oligonucleotide
aguuaggagcc

SEQ ID NO: 974 - RNA, 12 nt, Artificial Sequence
  Description of Artificial Sequence: Synthetic oligonucleotide
gucaauauccac

SEQ ID NO: 975 - RNA, 12 nt, Artificial Sequence
  Description of Artificial Sequence: Synthetic oligonucleotide
uguucagucaca

SEQ ID NO: 976 - RNA, 11 nt, Artificial Sequence
  Description of Artificial Sequence: Synthetic oligonucleotide
cacacacauac

SEQ ID NO: 977 - RNA, 11 nt, Artificial Sequence
  Description of Artificial Sequence: Synthetic oligonucleotide
uccuuuugcuu

SEQ ID NO: 978 - RNA, 15 nt, Artificial Sequence
  Description of Artificial Sequence: Synthetic oligonucleotide
uuuaaaguaauuuuu

SEQ ID NO: 979 - RNA, 12 nt, Artificial Sequence
  Description of Artificial Sequence: Synthetic oligonucleotide
aacagucaaugg

SEQ ID NO: 980 - RNA, 12 nt, Artificial Sequence
  Description of Artificial Sequence: Synthetic oligonucleotide
cgacaaaccaau

SEQ ID NO: 981 - RNA, 11 nt, Artificial Sequence
  Description of Artificial Sequence: Synthetic oligonucleotide
cugcuaccacu

SEQ ID NO: 982 - RNA, 12 nt, Artificial Sequence
  Description of Artificial Sequence: Synthetic oligonucleotide
caagcggucuua

SEQ ID NO: 983 - RNA, 12 nt, Artificial Sequence
  Description of Artificial Sequence: Synthetic oligonucleotide
gucuuaccggcu

SEQ ID NO: 984 - RNA, 10 nt, Artificial Sequence
  Description of Artificial Sequence: Synthetic oligonucleotide
auggguuacc

SEQ ID NO: 985 - RNA, 10 nt, Artificial Sequence
  Description of Artificial Sequence: Synthetic oligonucleotide
uuaccugcga

SEQ ID NO: 986 - RNA, 11 nt, Artificial Sequence
  Description of Artificial Sequence: Synthetic oligonucleotide
aucuugcugag

SEQ ID NO: 987 - RNA, 12 nt, Artificial Sequence
  Description of Artificial Sequence: Synthetic oligonucleotide
gcauaaaacagu

SEQ ID NO: 988 - RNA, 11 nt, Artificial Sequence
  Description of Artificial Sequence: Synthetic oligonucleotide
uccuuuauccu

SEQ ID NO: 989 - RNA, 11 nt, Artificial Sequence
  Description of Artificial Sequence: Synthetic oligonucleotide
aacgcaaguug

SEQ ID NO: 990 - RNA, 12 nt, Artificial Sequence
  Description of Artificial Sequence: Synthetic oligonucleotide
aacugaaaccau

SEQ ID NO: 991 - RNA, 13 nt, Artificial Sequence
  Description of Artificial Sequence: Synthetic oligonucleotide
cuuuguuaaauau

SEQ ID NO: 992 - RNA, 13 nt, Artificial Sequence
  Description of Artificial Sequence: Synthetic oligonucleotide
uauauuaaaaguu

SEQ ID NO: 993 - RNA, 12 nt, Artificial Sequence
  Description of Artificial Sequence: Synthetic oligonucleotide
uuuugacuuaac

SEQ ID NO: 994 - RNA, 12 nt, Artificial Sequence
  Description of Artificial Sequence: Synthetic oligonucleotide
caaacucagcac

SEQ ID NO: 995 - RNA, 10 nt, Artificial Sequence
  Description of Artificial Sequence: Synthetic oligonucleotide
gcugaccuca

SEQ ID NO: 996 - RNA, 13 nt, Artificial Sequence
  Description of Artificial Sequence: Synthetic oligonucleotide
uuauucagaucgc

SEQ ID NO: 997 - RNA, 12 nt, Artificial Sequence
  Description of Artificial Sequence: Synthetic oligonucleotide
ggguucugggau

SEQ ID NO: 998 - RNA, 14 nt, Artificial Sequence
  Description of Artificial Sequence: Synthetic oligonucleotide
uauuggaaauuaug

SEQ ID NO: 999 - RNA, 12 nt, Artificial Sequence
  Description of Artificial Sequence: Synthetic oligonucleotide
uggaagcacuag

SEQ ID NO: 1000 - RNA, 12 nt, Artificial Sequence
  Description of Artificial Sequence: Synthetic oligonucleotide
uuuuuaugugga

SEQ ID NO: 1001 - RNA, 11 nt, Artificial Sequence
  Description of Artificial Sequence: Synthetic oligonucleotide
gaauugguaga

SEQ ID NO: 1002 - RNA, 12 nt, Artificial Sequence
  Description of Artificial Sequence: Synthetic oligonucleotide
uagacuuggaga

SEQ ID NO: 1003 - RNA, 12 nt, Artificial Sequence
  Description of Artificial Sequence: Synthetic oligonucleotide
uacaguauucca

SEQ ID NO: 1004 - RNA, 14 nt, Artificial Sequence
  Description of Artificial Sequence: Synthetic oligonucleotide
cacugaugaauuaa

SEQ ID NO: 1005 - RNA, 11 nt, Artificial Sequence
  Description of Artificial Sequence: Synthetic oligonucleotide
cacaucaucac

SEQ ID NO: 1006 - RNA, 12 nt, Artificial Sequence
  Description of Artificial Sequence: Synthetic oligonucleotide
ucaccaaacaga

SEQ ID NO: 1007 - RNA, 11 nt, Artificial Sequence
  Description of Artificial Sequence: Synthetic oligonucleotide
gaacaugaugg

SEQ ID NO: 1008 - RNA, 11 nt, Artificial Sequence
  Description of Artificial Sequence: Synthetic oligonucleotide
auguagacugc

SEQ ID NO: 1009 - RNA, 12 nt, Artificial Sequence
  Description of Artificial Sequence: Synthetic oligonucleotide
gaucuauuuaug

SEQ ID NO: 1010 - RNA, 11 nt, Artificial Sequence
  Description of Artificial Sequence: Synthetic oligonucleotide
cacuauuauca

SEQ ID NO: 1011 - RNA, 10 nt, Artificial Sequence
  Description of Artificial Sequence: Synthetic oligonucleotide
ucaguucugc

SEQ ID NO: 1012 - RNA, 12 nt, Artificial Sequence
  Description of Artificial Sequence: Synthetic oligonucleotide
gauuaaaccuac

SEQ ID NO: 1013 - RNA, 12 nt, Artificial Sequence
  Description of Artificial Sequence: Synthetic oligonucleotide
uaaaauccuucu

SEQ ID NO: 1014 - RNA, 11 nt, Artificial Sequence
  Description of Artificial Sequence: Synthetic oligonucleotide
augcuguagac

SEQ ID NO: 1015 - RNA, 12 nt, Artificial Sequence
  Description of Artificial Sequence: Synthetic oligonucleotide
ugauaggaauag

SEQ ID NO: 1016 - RNA, 10 nt, Artificial Sequence
  Description of Artificial Sequence: Synthetic oligonucleotide
auggcccuga

SEQ ID NO: 1017 - RNA, 10 nt, Artificial Sequence
  Description of Artificial Sequence: Synthetic oligonucleotide
uccucaagca

SEQ ID NO: 1018 - RNA, 9 nt, Artificial Sequence
  Description of Artificial Sequence: Synthetic oligonucleotide
uucagccca

SEQ ID NO: 1019 - RNA, 10 nt, Artificial Sequence
  Description of Artificial Sequence: Synthetic oligonucleotide
cugcugaacc

SEQ ID NO: 1020 - RNA, 11 nt, Artificial Sequence
  Description of Artificial Sequence: Synthetic oligonucleotide
aguucucuuca

SEQ ID NO: 1021 - RNA, 10 nt, Artificial Sequence
  Description of Artificial Sequence: Synthetic oligonucleotide
cagccuagag

SEQ ID NO: 1022 - RNA, 12 nt, Artificial Sequence
  Description of Artificial Sequence: Synthetic oligonucleotide
ucugugaagugu

SEQ ID NO: 1023 - RNA, 13 nt, Artificial Sequence
  Description of Artificial Sequence: Synthetic oligonucleotide
gagaaaauuucaa

SEQ ID NO: 1024 - RNA, 10 nt, Artificial Sequence
  Description of Artificial Sequence: Synthetic oligonucleotide
auccuccuga

SEQ ID NO: 1025 - RNA, 11 nt, Artificial Sequence
  Description of Artificial Sequence: Synthetic oligonucleotide
ugacaucauau

SEQ ID NO: 1026 - RNA, 12 nt, Artificial Sequence
  Description of Artificial Sequence: Synthetic oligonucleotide
aucuucaucaua

SEQ ID NO: 1027 - RNA, 12 nt, Artificial Sequence
  Description of Artificial Sequence: Synthetic oligonucleotide
acuagcuauuaa

SEQ ID NO: 1028 - RNA, 13 nt, Artificial Sequence
  Description of Artificial Sequence: Synthetic oligonucleotide
cucuacuaaaaau

SEQ ID NO: 1029 - RNA, 11 nt, Artificial Sequence
  Description of Artificial Sequence: Synthetic oligonucleotide
cuaucucgccu

SEQ ID NO: 1030 - RNA, 12 nt, Artificial Sequence
  Description of Artificial Sequence: Synthetic oligonucleotide
uucgguccaguu

SEQ ID NO: 1031 - RNA, 10 nt, Artificial Sequence
  Description of Artificial Sequence: Synthetic oligonucleotide
auguagccgc

SEQ ID NO: 1032 - RNA, 11 nt, Artificial Sequence
  Description of Artificial Sequence: Synthetic oligonucleotide
gaggagacuug

SEQ ID NO: 1033 - RNA, 11 nt, Artificial Sequence
  Description of Artificial Sequence: Synthetic oligonucleotide
aguagugagga

SEQ ID NO: 1034 - RNA, 13 nt, Artificial Sequence
  Description of Artificial Sequence: Synthetic oligonucleotide
agaugaguacaaa

SEQ ID NO: 1035 - RNA, 12 nt, Artificial Sequence
  Description of Artificial Sequence: Synthetic oligonucleotide
uuguuaaugggc

SEQ ID NO: 1036 - RNA, 12 nt, Artificial Sequence
  Description of Artificial Sequence: Synthetic oligonucleotide
uuuuaauuuauu

SEQ ID NO: 1037 - RNA, 11 nt, Artificial Sequence
  Description of Artificial Sequence: Synthetic oligonucleotide
auuuaaauaug

SEQ ID NO: 1038 - RNA, 12 nt, Artificial Sequence
  Description of Artificial Sequence: Synthetic oligonucleotide
auccuuuguuuc

SEQ ID NO: 1039 - RNA, 13 nt, Artificial Sequence
  Description of Artificial Sequence: Synthetic oligonucleotide
gucuaaguguuug

SEQ ID NO: 1040 - RNA, 11 nt, Artificial Sequence
  Description of Artificial Sequence: Synthetic oligonucleotide
ccugugacaaa

SEQ ID NO: 1041 - RNA, 12 nt, Artificial Sequence
  Description of Artificial Sequence: Synthetic oligonucleotide
caggcugaauua

SEQ ID NO: 1042 - RNA, 13 nt, Artificial Sequence
  Description of Artificial Sequence: Synthetic oligonucleotide
ucauucuuacaau

SEQ ID NO: 1043 - RNA, 14 nt, Artificial Sequence
  Description of Artificial Sequence: Synthetic oligonucleotide
cauucuuacaauug

SEQ ID NO: 1044 - RNA, 11 nt, Artificial Sequence
  Description of Artificial Sequence: Synthetic oligonucleotide
agagaguguac

SEQ ID NO: 1045 - RNA, 11 nt, Artificial Sequence
  Description of Artificial Sequence: Synthetic oligonucleotide
gaacucagcag

SEQ ID NO: 1046 - RNA, 12 nt, Artificial Sequence
  Description of Artificial Sequence: Synthetic oligonucleotide
uuauuuucagua

SEQ ID NO: 1047 - RNA, 11 nt, Artificial Sequence
  Description of Artificial Sequence: Synthetic oligonucleotide
cuuaaauggaa

SEQ ID NO: 1048 - RNA, 12 nt, Artificial Sequence
  Description of Artificial Sequence: Synthetic oligonucleotide
gccuaaaauugu

SEQ ID NO: 1049 - RNA, 12 nt, Artificial Sequence
  Description of Artificial Sequence: Synthetic oligonucleotide
acuaacaucugg

SEQ ID NO: 1050 - RNA, 11 nt, Artificial Sequence
  Description of Artificial Sequence: Synthetic oligonucleotide
gacugugagcu

SEQ ID NO: 1051 - RNA, 13 nt, Artificial Sequence
  Description of Artificial Sequence: Synthetic oligonucleotide
gcuuuuuauuaau

SEQ ID NO: 1052 - RNA, 12 nt, Artificial Sequence
  Description of Artificial Sequence: Synthetic oligonucleotide
ucuucuuacauu

SEQ ID NO: 1053 - RNA, 14 nt, Artificial Sequence
  Description of Artificial Sequence: Synthetic oligonucleotide
auuuguaaaaaugu

SEQ ID NO: 1054 - RNA, 14 nt, Artificial Sequence
  Description of Artificial Sequence: Synthetic oligonucleotide
ucuuaauucauauu

SEQ ID NO: 1055 - RNA, 12 nt, Artificial Sequence
  Description of Artificial Sequence: Synthetic oligonucleotide
aacuaaucauga

SEQ ID NO: 1056 - RNA, 11 nt, Artificial Sequence
  Description of Artificial Sequence: Synthetic oligonucleotide
cugcucuuggg

SEQ ID NO: 1057 - RNA, 12 nt, Artificial Sequence
  Description of Artificial Sequence: Synthetic oligonucleotide
aguagcuuugag

SEQ ID NO: 1058 - RNA, 13 nt, Artificial Sequence
  Description of Artificial Sequence: Synthetic oligonucleotide
acguaauauuuca

SEQ ID NO: 1059 - RNA, 12 nt, Artificial Sequence
  Description of Artificial Sequence: Synthetic oligonucleotide
auucucuucacu

SEQ ID NO: 1060 - RNA, 13 nt, Artificial Sequence
  Description of Artificial Sequence: Synthetic oligonucleotide
uaaugcuaagaaa

SEQ ID NO: 1061 - RNA, 11 nt, Artificial Sequence
  Description of Artificial Sequence: Synthetic oligonucleotide
cugaaaaucaa

SEQ ID NO: 1062 - RNA, 13 nt, Artificial Sequence
  Description of Artificial Sequence: Synthetic oligonucleotide
auaugauuacuuu

SEQ ID NO: 1063 - RNA, 13 nt, Artificial Sequence
  Description of Artificial Sequence: Synthetic oligonucleotide
auuuuguucuaca

SEQ ID NO: 1064 - RNA, 11 nt, Artificial Sequence
  Description of Artificial Sequence: Synthetic oligonucleotide
ccgggacucuc

SEQ ID NO: 1065 - RNA, 13 nt, Artificial Sequence
  Description of Artificial Sequence: Synthetic oligonucleotide
cuuuaaaguaaag

SEQ ID NO: 1066 - RNA, 12 nt, Artificial Sequence
  Description of Artificial Sequence: Synthetic oligonucleotide
cuggaagccugg

SEQ ID NO: 1067 - RNA, 13 nt, Artificial Sequence
  Description of Artificial Sequence: Synthetic oligonucleotide
aaacaaaagagag

SEQ ID NO: 1068 - RNA, 12 nt, Artificial Sequence
  Description of Artificial Sequence: Synthetic oligonucleotide
ucaguuaugccg

SEQ ID NO: 1069 - RNA, 12 nt, Artificial Sequence
  Description of Artificial Sequence: Synthetic oligonucleotide
aaaagaagucca

SEQ ID NO: 1070 - RNA, 10 nt, Artificial Sequence
  Description of Artificial Sequence: Synthetic oligonucleotide
ggugagguua

SEQ ID NO: 1071 - RNA, 10 nt, Artificial Sequence
  Description of Artificial Sequence: Synthetic oligonucleotide
ggaagaggac

SEQ ID NO: 1072 - RNA, 12 nt, Artificial Sequence
  Description of Artificial Sequence: Synthetic oligonucleotide
agcaaguauugu

SEQ ID NO: 1073 - RNA, 11 nt, Artificial Sequence
  Description of Artificial Sequence: Synthetic oligonucleotide
uuguagcacuc

SEQ ID NO: 1074 - RNA, 13 nt, Artificial Sequence
  Description of Artificial Sequence: Synthetic oligonucleotide
caaaaccacaaau

SEQ ID NO: 1075 - RNA, 11 nt, Artificial Sequence
  Description of Artificial Sequence: Synthetic oligonucleotide
aagcccauaca

SEQ ID NO: 1076 - RNA, 10 nt, Artificial Sequence
  Description of Artificial Sequence: Synthetic oligonucleotide
gcccauacag

SEQ ID NO: 1077 - RNA, 11 nt, Artificial Sequence
  Description of Artificial Sequence: Synthetic oligonucleotide
agaaaccuucc

SEQ ID NO: 1078 - RNA, 9 nt, Artificial Sequence
  Description of Artificial Sequence: Synthetic oligonucleotide
uauaccuac

SEQ ID NO: 1079 - RNA, 12 nt, Artificial Sequence
  Description of Artificial Sequence: Synthetic oligonucleotide
ccaguuuucgga

SEQ ID NO: 1080 - RNA, 8 nt, Artificial Sequence
  Description of Artificial Sequence: Synthetic oligonucleotide
gaacaggg

SEQ ID NO: 1081 - RNA, 12 nt, Artificial Sequence
  Description of Artificial Sequence: Synthetic oligonucleotide
uaacuuuccagu

SEQ ID NO: 1082 - RNA, 13 nt, Artificial Sequence
  Description of Artificial Sequence: Synthetic oligonucleotide
aaguuugguuuug

SEQ ID NO: 1083 - RNA, 11 nt, Artificial Sequence
  Description of Artificial Sequence: Synthetic oligonucleotide
uucccacugua

SEQ ID NO: 1084 - RNA, 12 nt, Artificial Sequence
  Description of Artificial Sequence: Synthetic oligonucleotide
gauaccauauga

SEQ ID NO: 1085 - RNA, 10 nt, Artificial Sequence
  Description of Artificial Sequence: Synthetic oligonucleotide
acaugggcug

SEQ ID NO: 1086 - RNA, 12 nt, Artificial Sequence
  Description of Artificial Sequence: Synthetic oligonucleotide
aacuuuuucaua

SEQ ID NO: 1087 - RNA, 11 nt, Artificial Sequence
  Description of Artificial Sequence: Synthetic oligonucleotide
augaggccgga

SEQ ID NO: 1088 - RNA, 10 nt, Artificial Sequence
  Description of Artificial Sequence: Synthetic oligonucleotide
cugcauuugu

SEQ ID NO: 1089 - RNA, 12 nt, Artificial Sequence
  Description of Artificial Sequence: Synthetic oligonucleotide
auguuuacuacc

SEQ ID NO: 1090 - RNA, 14 nt, Artificial Sequence
  Description of Artificial Sequence: Synthetic oligonucleotide
auuuuuugaugaaa

SEQ ID NO: 1091 - RNA, 13 nt, Artificial Sequence
  Description of Artificial Sequence: Synthetic oligonucleotide
agugugugaauuu

SEQ ID NO: 1092 - RNA, 12 nt, Artificial Sequence
  Description of Artificial Sequence: Synthetic oligonucleotide
agcaauguaugu

SEQ ID NO: 1093 - RNA, 13 nt, Artificial Sequence
  Description of Artificial Sequence: Synthetic oligonucleotide
aagcacauauaua

SEQ ID NO: 1094 - RNA, 13 nt, Artificial Sequence
  Description of Artificial Sequence: Synthetic oligonucleotide
uaauaguuucucc

SEQ ID NO: 1095 - RNA, 12 nt, Artificial Sequence
  Description of Artificial Sequence: Synthetic oligonucleotide
guuucuccaaau

SEQ ID NO: 1096 - RNA, 12 nt, Artificial Sequence
  Description of Artificial Sequence: Synthetic oligonucleotide
acuuccuagaaa

SEQ ID NO: 1097 - RNA, 12 nt, Artificial Sequence
  Description of Artificial Sequence: Synthetic oligonucleotide
acaccauauaug

SEQ ID NO: 1098 - RNA, 13 nt, Artificial Sequence
  Description of Artificial Sequence: Synthetic oligonucleotide
uauaugaauggag

SEQ ID NO: 1099 - RNA, 12 nt, Artificial Sequence
  Description of Artificial Sequence: Synthetic oligonucleotide
cauuuacaggga

SEQ ID NO: 1100 - RNA, 12 nt, Artificial Sequence
  Description of Artificial Sequence: Synthetic oligonucleotide
auuuacagggac

SEQ ID NO: 1101 - RNA, 9 nt, Artificial Sequence
  Description of Artificial Sequence: Synthetic oligonucleotide
gggaccuga

SEQ ID NO: 1102 - RNA, 13 nt, Artificial Sequence
  Description of Artificial Sequence: Synthetic oligonucleotide
guuugacugcauc

SEQ ID NO: 1103 - RNA, 12 nt, Artificial Sequence
  Description of Artificial Sequence: Synthetic oligonucleotide
uugacugcaucg

SEQ ID NO: 1104 - RNA, 11 nt, Artificial Sequence
  Description of Artificial Sequence: Synthetic oligonucleotide
aguucacaggg

SEQ ID NO: 1105 - RNA, 12 nt, Artificial Sequence
  Description of Artificial Sequence: Synthetic oligonucleotide
gcaccucugucc

SEQ ID NO: 1106 - RNA, 14 nt, Artificial Sequence
  Description of Artificial Sequence: Synthetic oligonucleotide
guuugucuuuuuaa

SEQ ID NO: 1107 - RNA, 13 nt, Artificial Sequence
  Description of Artificial Sequence: Synthetic oligonucleotide
uugucuuuuuaag

SEQ ID NO: 1108 - RNA, 12 nt, Artificial Sequence
  Description of Artificial Sequence: Synthetic oligonucleotide
cuaaagguuguc

SEQ ID NO: 1109 - RNA, 11 nt, Artificial Sequence
  Description of Artificial Sequence: Synthetic oligonucleotide
agguugucgac

SEQ ID NO: 1110 - RNA, 12 nt, Artificial Sequence
  Description of Artificial Sequence: Synthetic oligonucleotide
ccuggcaauugu

SEQ ID NO: 1111 - RNA, 11 nt, Artificial Sequence
  Description of Artificial Sequence: Synthetic oligonucleotide
guggugcgagg

SEQ ID NO: 1112 - RNA, 12 nt, Artificial Sequence
  Description of Artificial Sequence: Synthetic oligonucleotide
gagacaugaaau

SEQ ID NO: 1113 - RNA, 12 nt, Artificial Sequence
  Description of Artificial Sequence: Synthetic oligonucleotide
uauauuucucca

SEQ ID NO: 1114 - RNA, 9 nt, Artificial Sequence
  Description of Artificial Sequence: Synthetic oligonucleotide
augaaggcu

SEQ ID NO: 1115 - RNA, 10 nt, Artificial Sequence
  Description of Artificial Sequence: Synthetic oligonucleotide
cuggaguggu

SEQ ID NO: 1116 - RNA, 10 nt, Artificial Sequence
  Description of Artificial Sequence: Synthetic oligonucleotide
ggaagagagg

SEQ ID NO: 1117 - RNA, 11 nt, Artificial Sequence
  Description of Artificial Sequence: Synthetic oligonucleotide
uugcaucgggc

SEQ ID NO: 1118 - RNA, 12 nt, Artificial Sequence
  Description of Artificial Sequence: Synthetic oligonucleotide
uauccuacugug

SEQ ID NO: 1119 - RNA, 12 nt, Artificial Sequence
  Description of Artificial Sequence: Synthetic oligonucleotide
ccuacuguguaa

SEQ ID NO: 1120 - RNA, 11 nt, Artificial Sequence
  Description of Artificial Sequence: Synthetic oligonucleotide
cuuguagugua

SEQ ID NO: 1121 - RNA, 12 nt, Artificial Sequence
  Description of Artificial Sequence: Synthetic oligonucleotide
cuuuguugauug

SEQ ID NO: 1122 - RNA, 13 nt, Artificial Sequence
  Description of Artificial Sequence: Synthetic oligonucleotide
uuguugauugaaa

SEQ ID NO: 1123 - RNA, 14 nt, Artificial Sequence
  Description of Artificial Sequence: Synthetic oligonucleotide
ucuuuuucuuccau

SEQ ID NO: 1124 - RNA, 12 nt, Artificial Sequence
  Description of Artificial Sequence: Synthetic oligonucleotide
aucuuccuucua

SEQ ID NO: 1125 - RNA, 12 nt, Artificial Sequence
  Description of Artificial Sequence: Synthetic oligonucleotide
ugaaugcuucau

SEQ ID NO: 1126 - RNA, 12 nt, Artificial Sequence
  Description of Artificial Sequence: Synthetic oligonucleotide
gaaugcuucaug

SEQ ID NO: 1127 - RNA, 12 nt, Artificial Sequence
  Description of Artificial Sequence: Synthetic oligonucleotide
auucuacuuuga

SEQ ID NO: 1128 - RNA, 12 nt, Artificial Sequence
  Description of Artificial Sequence: Synthetic oligonucleotide
gcaacuacagac

SEQ ID NO: 1129 - RNA, 12 nt, Artificial Sequence
  Description of Artificial Sequence: Synthetic oligonucleotide
accaaggucaac

SEQ ID NO: 1130 - RNA, 12 nt, Artificial Sequence
  Description of Artificial Sequence: Synthetic oligonucleotide
gacuaucucgac

SEQ ID NO: 1131 - RNA, 12 nt, Artificial Sequence
  Description of Artificial Sequence: Synthetic oligonucleotide
accuucccaaac

SEQ ID NO: 1132 - RNA, 13 nt, Artificial Sequence
  Description of Artificial Sequence: Synthetic oligonucleotide
caagcuuagaacu

SEQ ID NO: 1133 - RNA, 14 nt, Artificial Sequence
  Description of Artificial Sequence: Synthetic oligonucleotide
gcuuagaacuuuaa

SEQ ID NO: 1134 - RNA, 13 nt, Artificial Sequence
  Description of Artificial Sequence: Synthetic oligonucleotide
aacuuuaagcaac

SEQ ID NO: 1135 - RNA, 10 nt, Artificial Sequence
  Description of Artificial Sequence: Synthetic oligonucleotide
agaccaccac

SEQ ID NO: 1136 - RNA, 13 nt, Artificial Sequence
  Description of Artificial Sequence: Synthetic oligonucleotide
cgagaaauaaagu

SEQ ID NO: 1137 - RNA, 13 nt, Artificial Sequence
  Description of Artificial Sequence: Synthetic oligonucleotide
gagaaauaaaguu

SEQ ID NO: 1138 - RNA, 11 nt, Artificial Sequence
  Description of Artificial Sequence: Synthetic oligonucleotide
ggaaaugaucc

SEQ ID NO: 1139 - RNA, 12 nt, Artificial Sequence
  Description of Artificial Sequence: Synthetic oligonucleotide
aagaaaugaaac

SEQ ID NO: 1140 - RNA, 12 nt, Artificial Sequence
  Description of Artificial Sequence: Synthetic oligonucleotide
uuuccauccucc

SEQ ID NO: 1141 - RNA, 14 nt, Artificial Sequence
  Description of Artificial Sequence: Synthetic oligonucleotide
cugaaaaucuuuga

SEQ ID NO: 1142 - RNA, 10 nt, Artificial Sequence
  Description of Artificial Sequence: Synthetic oligonucleotide
gccguucagg

SEQ ID NO: 1143 - RNA, 12 nt, Artificial Sequence
  Description of Artificial Sequence: Synthetic oligonucleotide
aggguccagaag

SEQ ID NO: 1144 - RNA, 12 nt, Artificial Sequence
  Description of Artificial Sequence: Synthetic oligonucleotide
caagacugcuug

SEQ ID NO: 1145 - RNA, 12 nt, Artificial Sequence
  Description of Artificial Sequence: Synthetic oligonucleotide
ccaugucuuugg

SEQ ID NO: 1146 - RNA, 10 nt, Artificial Sequence
  Description of Artificial Sequence: Synthetic oligonucleotide
ccugaaacac

SEQ ID NO: 1147 - RNA, 11 nt, Artificial Sequence
  Description of Artificial Sequence: Synthetic oligonucleotide
cucuguaccuc

SEQ ID NO: 1148 - RNA, 11 nt, Artificial Sequence
  Description of Artificial Sequence: Synthetic oligonucleotide
gcaagacaaga

SEQ ID NO: 1149 - RNA, 12 nt, Artificial Sequence
  Description of Artificial Sequence: Synthetic oligonucleotide
caagacaagaaa

SEQ ID NO: 1150 - RNA, 11 nt, Artificial Sequence
  Description of Artificial Sequence: Synthetic oligonucleotide
guacaagaucc

SEQ ID NO: 1151 - RNA, 11 nt, Artificial Sequence
  Description of Artificial Sequence: Synthetic oligonucleotide
guacuugcaga

SEQ ID NO: 1152 - RNA, 12 nt, Artificial Sequence
  Description of Artificial Sequence: Synthetic oligonucleotide
gaucgauacaga

SEQ ID NO: 1153 - RNA, 12 nt, Artificial Sequence
  Description of Artificial Sequence: Synthetic oligonucleotide
auaaaaauaaau

SEQ ID NO: 1154 - RNA, 12 nt, Artificial Sequence
  Description of Artificial Sequence: Synthetic oligonucleotide
aaaaauaaauau

SEQ ID NO: 1155 - RNA, 12 nt, Artificial Sequence
  Description of Artificial Sequence: Synthetic oligonucleotide
uugacugcugug

SEQ ID NO: 1156 - RNA, 12 nt, Artificial Sequence
  Description of Artificial Sequence: Synthetic oligonucleotide
gagaugagagac

SEQ ID NO: 1157 - RNA, 9 nt, Artificial Sequence
  Description of Artificial Sequence: Synthetic oligonucleotide
cccacuugg

SEQ ID NO: 1158 - RNA, 1669 nt, Homo sapiens
cucccucagcaaggacagcagaggaccagcuaagagggagagaagcaacuacagacccccccugaaaacaacccucagacgccacauccccugacaagcugccaggcagguucucuuccucucacauacugacccacggcuccacccucucuccccuggaaaggacaccaugagcacugaaagcaugauccgggacguggagcuggccgaggaggcgcuccccaagaagacaggggggccccagggcuccaggcggugcuuguuccucagccucuucuccuuccugaucguggcaggcgccaccacgcucuucugccugcugcacuuuggagugaucggcccccagagggaagaguuccccagggaccucucucuaaucagcccucuggcccaggcagucagaucaucuucucgaaccccgagugacaagccuguagcccauguuguagcaaacccucaagcugaggggcagcuccaguggcugaaccgccgggccaaugcccuccuggccaauggcguggagcugagagauaaccagcugguggugccaucagagggccuguaccucaucuacucccagguccucuucaagggccaaggcugccccuccacccaugugcuccucacccacaccaucagccgcaucgccgucuccuaccagaccaaggucaaccuccucucugccaucaagagccccugccagagggagaccccagagggggcugaggccaagcccugguaugagcccaucuaucugggaggggucuuccagcuggagaagggugaccgacucagcgcugagaucaaucggcccgacuaucucgacuuugccgagucugggcaggucuacuuugggaucauugcccugugaggaggacgaacauccaaccuucccaaacgccuccccugccccaaucccuuuauuacccccuccuucagacacccucaaccucuucuggcucaaaaagagaauugggggcuuagggucggaacccaagcuuagaacuuuaagcaacaagaccaccacuucgaaaccugggauucaggaauguguggccugcacagugaagugcuggcaaccacuaagaauucaaacuggggccuccagaacucacuggggccuacagcuuugaucccugacaucuggaaucuggagaccagggagccuuugguucuggccagaaugcugcaggacuugagaagaccucaccuagaaauugacacaaguggaccuuaggccuuccucucuccagauguuuccagacuuccuugagacacggagcccagcccuccccauggagccagcucccucuauuuauguuugcacuugugauuauuuauuauuuauuuauuauuuauuuauuuacagaugaauguauuuauuugggagaccgggguauccugggggacccaauguaggagcugccuuggcucagacauguuuuccgugaaaacggagcugaacaauaggcuguucccauguagcccccuggccucugugccuucuuuugauuauguuuuuuaaaauauuuaucugauuaaguugucuaaacaaugcugauuuggugaccaacugucacucauugcugagccucugcuccccaggggaguugugucuguaaucgcccuacuauucaguggcgagaaauaaaguuugcuuagaaaagaa

SEQ ID NO: 1159 - RNA, 19 nt, Artificial Sequence
  Description of Artificial Sequence: Synthetic oligonucleotide
cccucagcaaggacagcag

SEQ ID NO: 1160 - RNA, 19 nt, Artificial Sequence
  Description of Artificial Sequence: Synthetic oligonucleotide
gaggaccagcuaagaggga

SEQ ID NO: 1161 - RNA, 19 nt, Artificial Sequence
  Description of Artificial Sequence: Synthetic oligonucleotide
agagaagcaacuacagacc

SEQ ID NO: 1162 - RNA, 19 nt, Artificial Sequence
  Description of Artificial Sequence: Synthetic oligonucleotide
ccccccugaaaacaacccu

SEQ ID NO: 1163 - RNA, 19 nt, Artificial Sequence
  Description of Artificial Sequence: Synthetic oligonucleotide
ucagacgccacauccccug

SEQ ID NO: 1164 - RNA, 19 nt, Artificial Sequence
  Description of Artificial Sequence: Synthetic oligonucleotide
gacaagcugccaggcaggu

SEQ ID NO: 1165 - RNA, 19 nt, Artificial Sequence
  Description of Artificial Sequence: Synthetic oligonucleotide
uucucuuccucucacauac

SEQ ID NO: 1166 - RNA, 19 nt, Artificial Sequence
  Description of Artificial Sequence: Synthetic oligonucleotide
cugacccacggcuccaccc

SEQ ID NO: 1167 - RNA, 19 nt, Artificial Sequence
  Description of Artificial Sequence: Synthetic oligonucleotide
cucucuccccuggaaagga

SEQ ID NO: 1168 - RNA, 19 nt, Artificial Sequence
  Description of Artificial Sequence: Synthetic oligonucleotide
acaccaugagcacugaaag

SEQ ID NO: 1169 - RNA, 19 nt, Artificial Sequence
  Description of Artificial Sequence: Synthetic oligonucleotide
gcaugauccgggacgugga

SEQ ID NO: 1170 - RNA, 19 nt, Artificial Sequence
  Description of Artificial Sequence: Synthetic oligonucleotide
agcuggccgaggaggcgcu

SEQ ID NO: 1171 - RNA, 19 nt, Artificial Sequence
  Description of Artificial Sequence: Synthetic oligonucleotide
uccccaagaagacaggggg

SEQ ID NO: 1172 - RNA, 19 nt, Artificial Sequence
  Description of Artificial Sequence: Synthetic oligonucleotide
ggccccagggcuccaggcg

SEQ ID NO: 1173 - RNA, 19 nt, Artificial Sequence
  Description of Artificial Sequence: Synthetic oligonucleotide
ggugcuuguuccucagccu

SEQ ID NO: 1174 - RNA, 19 nt, Artificial Sequence
  Description of Artificial Sequence: Synthetic oligonucleotide
ucuucuccuuccugaucgu

SEQ ID NO: 1175 - RNA, 19 nt, Artificial Sequence
  Description of Artificial Sequence: Synthetic oligonucleotide
uggcaggcgccaccacgcu

SEQ ID NO: 1176 - RNA, 19 nt, Artificial Sequence
  Description of Artificial Sequence: Synthetic oligonucleotide
ucuucugccugcugcacuu

SEQ ID NO: 1177 - RNA, 19 nt, Artificial Sequence
  Description of Artificial Sequence: Synthetic oligonucleotide
uuggagugaucggccccca

SEQ ID NO: 1178 - RNA, 19 nt, Artificial Sequence
  Description of Artificial Sequence: Synthetic oligonucleotide
agagggaagaguuccccag

SEQ ID NO: 1179 - RNA, 19 nt, Artificial Sequence
  Description of Artificial Sequence: Synthetic oligonucleotide
gggaccucucucuaaucag

SEQ ID NO: 1180 - RNA, 19 nt, Artificial Sequence
  Description of Artificial Sequence: Synthetic oligonucleotide
gcccucuggcccaggcagu

SEQ ID NO: 1181 - RNA, 19 nt, Artificial Sequence
  Description of Artificial Sequence: Synthetic oligonucleotide
ucagaucaucuucucgaac

SEQ ID NO: 1182 - RNA, 19 nt, Artificial Sequence
  Description of Artificial Sequence: Synthetic oligonucleotide
ccccgagugacaagccugu

SEQ ID NO: 1183 - RNA, 19 nt, Artificial Sequence
  Description of Artificial Sequence: Synthetic oligonucleotide
uagcccauguuguagcaaa

SEQ ID NO: 1184 - RNA, 19 nt, Artificial Sequence
  Description of Artificial Sequence: Synthetic oligonucleotide
acccucaagcugaggggca

SEQ ID NO: 1185 - RNA, 19 nt, Artificial Sequence
  Description of Artificial Sequence: Synthetic oligonucleotide
agcuccaguggcugaaccg

SEQ ID NO: 1186 - RNA, 19 nt, Artificial Sequence
  Description of Artificial Sequence: Synthetic oligonucleotide
gccgggccaaugcccuccu

SEQ ID NO: 1187 - RNA, 19 nt, Artificial Sequence
  Description of Artificial Sequence: Synthetic oligonucleotide
uggccaauggcguggagcu

SEQ ID NO: 1188 - RNA, 19 nt, Artificial Sequence
  Description of Artificial Sequence: Synthetic oligonucleotide
ugagagauaaccagcuggu

SEQ ID NO: 1189 - RNA, 19 nt, Artificial Sequence
  Description of Artificial Sequence: Synthetic oligonucleotide
uggugccaucagagggccu

SEQ ID NO: 1190 - RNA, 19 nt, Artificial Sequence
  Description of Artificial Sequence: Synthetic oligonucleotide
uguaccucaucuacuccca

SEQ ID NO: 1191 - RNA, 19 nt, Artificial Sequence
  Description of Artificial Sequence: Synthetic oligonucleotide
agguccucuucaagggcca

SEQ ID NO: 1192 - RNA, 19 nt, Artificial Sequence
  Description of Artificial Sequence: Synthetic oligonucleotide
aaggcugccccuccaccca

SEQ ID NO: 1193 - RNA, 19 nt, Artificial Sequence
  Description of Artificial Sequence: Synthetic oligonucleotide
augugcuccucacccacac

SEQ ID NO: 1194 - RNA, 19 nt, Artificial Sequence
  Description of Artificial Sequence: Synthetic oligonucleotide
ccaucagccgcaucgccgu

SEQ ID NO: 1195 - RNA, 19 nt, Artificial Sequence
  Description of Artificial Sequence: Synthetic oligonucleotide
ucuccuaccagaccaaggu

SEQ ID NO: 1196 - RNA, 19 nt, Artificial Sequence
  Description of Artificial Sequence: Synthetic oligonucleotide
ucaaccuccucucugccau

SEQ ID NO: 1197 - RNA, 19 nt, Artificial Sequence
  Description of Artificial Sequence: Synthetic oligonucleotide
ucaagagccccugccagag

SEQ ID NO: 1198 - RNA, 19 nt, Artificial Sequence
  Description of Artificial Sequence: Synthetic oligonucleotide
gggagaccccagagggggc

SEQ ID NO: 1199 - RNA, 19 nt, Artificial Sequence
  Description of Artificial Sequence: Synthetic oligonucleotide
cugaggccaagcccuggua

SEQ ID NO: 1200 - RNA, 19 nt, Artificial Sequence
  Description of Artificial Sequence: Synthetic oligonucleotide
augagcccaucuaucuggg

SEQ ID NO: 1201 - RNA, 19 nt, Artificial Sequence
  Description of Artificial Sequence: Synthetic oligonucleotide
gaggggucuuccagcugga

SEQ ID NO: 1202 - RNA, 19 nt, Artificial Sequence
  Description of Artificial Sequence: Synthetic oligonucleotide
agaagggugaccgacucag

SEQ ID NO: 1203 - RNA, 19 nt, Artificial Sequence
  Description of Artificial Sequence: Synthetic oligonucleotide
gcgcugagaucaaucggcc

SEQ ID NO: 1204 - RNA, 19 nt, Artificial Sequence
  Description of Artificial Sequence: Synthetic oligonucleotide
ccgacuaucucgacuuugc

SEQ ID NO: 1205 - RNA, 19 nt, Artificial Sequence
  Description of Artificial Sequence: Synthetic oligonucleotide
ccgagucugggcaggucua

SEQ ID NO: 1206 - RNA, 19 nt, Artificial Sequence
  Description of Artificial Sequence: Synthetic oligonucleotide
acuuugggaucauugcccu

SEQ ID NO: 1207 - RNA, 19 nt, Artificial Sequence
  Description of Artificial Sequence: Synthetic oligonucleotide
ugugaggaggacgaacauc

SEQ ID NO: 1208 - RNA, 19 nt, Artificial Sequence
  Description of Artificial Sequence: Synthetic oligonucleotide
ccaaccuucccaaacgccu

SEQ ID NO: 1209 - RNA, 19 nt, Artificial Sequence
  Description of Artificial Sequence: Synthetic oligonucleotide
uccccugccccaaucccuu

SEQ ID NO: 1210 - RNA, 19 nt, Artificial Sequence
  Description of Artificial Sequence: Synthetic oligonucleotide
uuauuacccccuccuucag

SEQ ID NO: 1211 - RNA, 19 nt, Artificial Sequence
  Description of Artificial Sequence: Synthetic oligonucleotide
gacacccucaaccucuucu

SEQ ID NO: 1212 - RNA, 19 nt, Artificial Sequence
  Description of Artificial Sequence: Synthetic oligonucleotide
uggcucaaaaagagaauug

SEQ ID NO: 1213 - RNA, 19 nt, Artificial Sequence
  Description of Artificial Sequence: Synthetic oligonucleotide
gggggcuuagggucggaac

SEQ ID NO: 1214 - RNA, 19 nt, Artificial Sequence
  Description of Artificial Sequence: Synthetic oligonucleotide
cccaagcuuagaacuuuaa

SEQ ID NO: 1215 - RNA, 19 nt, Artificial Sequence
  Description of Artificial Sequence: Synthetic oligonucleotide
agcaacaagaccaccacuu

SEQ ID NO: 1216 - RNA, 19 nt, Artificial Sequence
  Description of Artificial Sequence: Synthetic oligonucleotide
ucgaaaccugggauucagg

SEQ ID NO: 1217 - RNA, 19 nt, Artificial Sequence
  Description of Artificial Sequence: Synthetic oligonucleotide
gaauguguggccugcacag

SEQ ID NO: 1218 - RNA, 19 nt, Artificial Sequence
  Description of Artificial Sequence: Synthetic oligonucleotide
gugaagugcuggcaaccac

SEQ ID NO: 1219 - RNA, 19 nt, Artificial Sequence
  Description of Artificial Sequence: Synthetic oligonucleotide
cuaagaauucaaacugggg

SEQ ID NO: 1220 - RNA, 19 nt, Artificial Sequence
  Description of Artificial Sequence: Synthetic oligonucleotide
gccuccagaacucacuggg

SEQ ID NO: 1221 - RNA, 19 nt, Artificial Sequence
  Description of Artificial Sequence: Synthetic oligonucleotide
ggccuacagcuuugauccc

SEQ ID NO: 1222 - RNA, 19 nt, Artificial Sequence
  Description of Artificial Sequence: Synthetic oligonucleotide
cugacaucuggaaucugga

SEQ ID NO: 1223 - RNA, 19 nt, Artificial Sequence
  Description of Artificial Sequence: Synthetic oligonucleotide
agaccagggagccuuuggu

SEQ ID NO: 1224 - RNA, 19 nt, Artificial Sequence
  Description of Artificial Sequence: Synthetic oligonucleotide
uucuggccagaaugcugca

SEQ ID NO: 1225 - RNA, 19 nt, Artificial Sequence
  Description of Artificial Sequence: Synthetic oligonucleotide
aggacuugagaagaccuca

SEQ ID NO: 1226 - RNA, 19 nt, Artificial Sequence
  Description of Artificial Sequence: Synthetic oligonucleotide
accuagaaauugacacaag

SEQ ID NO: 1227 - RNA, 19 nt, Artificial Sequence
  Description of Artificial Sequence: Synthetic oligonucleotide
guggaccuuaggccuuccu

SEQ ID NO: 1228 - RNA, 19 nt, Artificial Sequence
  Description of Artificial Sequence: Synthetic oligonucleotide
ucucuccagauguuuccag

SEQ ID NO: 1229 - RNA, 19 nt, Artificial Sequence
  Description of Artificial Sequence: Synthetic oligonucleotide
gacuuccuugagacacgga

SEQ ID NO: 1230 - RNA, 19 nt, Artificial Sequence
  Description of Artificial Sequence: Synthetic oligonucleotide
agcccagcccuccccaugg

SEQ ID NO: 1231 - RNA, 19 nt, Artificial Sequence
  Description of Artificial Sequence: Synthetic oligonucleotide
gagccagcucccucuauuu

SEQ ID NO: 1232 - RNA, 19 nt, Artificial Sequence
  Description of Artificial Sequence: Synthetic oligonucleotide
uauguuugcacuugugauu

SEQ ID NO: 1233 - RNA, 19 nt, Artificial Sequence
  Description of Artificial Sequence: Synthetic oligonucleotide
uauuuauuauuuauuuauu

SEQ ID NO: 1234 - RNA, 19 nt, Artificial Sequence
  Description of Artificial Sequence: Synthetic oligonucleotide
uauuuauuuauuuacagau

SEQ ID NO: 1235 - RNA, 19 nt, Artificial Sequence
  Description of Artificial Sequence: Synthetic oligonucleotide
ugaauguauuuauuuggga

SEQ ID NO: 1236 - RNA, 19 nt, Artificial Sequence
  Description of Artificial Sequence: Synthetic oligonucleotide
agaccgggguauccugggg

SEQ ID NO: 1237 - RNA, 19 nt, Artificial Sequence
  Description of Artificial Sequence: Synthetic oligonucleotide
ggacccaauguaggagcug

SEQ ID NO: 1238 - RNA, 19 nt, Artificial Sequence
  Description of Artificial Sequence: Synthetic oligonucleotide
gccuuggcucagacauguu

SEQ ID NO: 1239 - RNA, 19 nt, Artificial Sequence
  Description of Artificial Sequence: Synthetic oligonucleotide
uuuccgugaaaacggagcu

SEQ ID NO: 1240 - RNA, 19 nt, Artificial Sequence
  Description of Artificial Sequence: Synthetic oligonucleotide
ugaacaauaggcuguuccc

SEQ ID NO: 1241 - RNA, 19 nt, Artificial Sequence
  Description of Artificial Sequence: Synthetic oligonucleotide
cauguagcccccuggccuc

SEQ ID NO: 1242 - RNA, 19 nt, Artificial Sequence
  Description of Artificial Sequence: Synthetic oligonucleotide
cugugccuucuuuugauua

SEQ ID NO: 1243 - RNA, 19 nt, Artificial Sequence
  Description of Artificial Sequence: Synthetic oligonucleotide
auguuuuuuaaaauauuua

SEQ ID NO: 1244 - RNA, 19 nt, Artificial Sequence
  Description of Artificial Sequence: Synthetic oligonucleotide
aucugauuaaguugucuaa

SEQ ID NO: 1245 - RNA, 19 nt, Artificial Sequence
  Description of Artificial Sequence: Synthetic oligonucleotide
aacaaugcugauuugguga

SEQ ID NO: 1246 - RNA, 19 nt, Artificial Sequence
  Description of Artificial Sequence: Synthetic oligonucleotide
accaacugucacucauugc

SEQ ID NO: 1247 - RNA, 19 nt, Artificial Sequence
  Description of Artificial Sequence: Synthetic oligonucleotide
cugagccucugcuccccag

SEQ ID NO: 1248 - RNA, 19 nt, Artificial Sequence
  Description of Artificial Sequence: Synthetic oligonucleotide
ggggaguugugucuguaau

SEQ ID NO: 1249 - RNA, 19 nt, Artificial Sequence
  Description of Artificial Sequence: Synthetic oligonucleotide
ucgcccuacuauucagugg

SEQ ID NO: 1250 - RNA, 19 nt, Artificial Sequence
  Description of Artificial Sequence: Synthetic oligonucleotide
gcgagaaauaaaguuugcu

SEQ ID NO: 1251 - RNA, 19 nt, Artificial Sequence
  Description of Artificial Sequence: Synthetic oligonucleotide
uaaaguuugcuuagaaaag

SEQ ID NO: 1252 - RNA, 19 nt, Artificial Sequence
  Description of Artificial Sequence: Synthetic oligonucleotide
cacccugacaagcugccag

SEQ ID NO: 1253 - RNA, 19 nt, Artificial Sequence
  Description of Artificial Sequence: Synthetic oligonucleotide
ggcagguucucuuccucuc

SEQ ID NO: 1254 - RNA, 19 nt, Artificial Sequence
  Description of Artificial Sequence: Synthetic oligonucleotide
cacauacugacccacggcu

SEQ ID NO: 1255 - RNA, 19 nt, Artificial Sequence
  Description of Artificial Sequence: Synthetic oligonucleotide
uccacccucucuccccugg

SEQ ID NO: 1256 - RNA, 19 nt, Artificial Sequence
  Description of Artificial Sequence: Synthetic oligonucleotide
gaaaggacaccaugagcac

SEQ ID NO: 1257 - RNA, 19 nt, Artificial Sequence
  Description of Artificial Sequence: Synthetic oligonucleotide
cugaaagcaugauccggga

SEQ ID NO: 1258 - RNA, 19 nt, Artificial Sequence
  Description of Artificial Sequence: Synthetic oligonucleotide
acguggagcuggccgagga

SEQ ID NO: 1259 - RNA, 19 nt, Artificial Sequence
  Description of Artificial Sequence: Synthetic oligonucleotide
aggcgcuccccaagaagac

SEQ ID NO: 1260 - RNA, 19 nt, Artificial Sequence
  Description of Artificial Sequence: Synthetic oligonucleotide
caggggggccccagggcuc

SEQ ID NO: 1261 - RNA, 19 nt, Artificial Sequence
  Description of Artificial Sequence: Synthetic oligonucleotide
ccaggcggugcuuguuccu

SEQ ID NO: 1262 - RNA, 19 nt, Artificial Sequence
  Description of Artificial Sequence: Synthetic oligonucleotide
ucagccucuucuccuuccu

SEQ ID NO: 1263 - RNA, 19 nt, Artificial Sequence
  Description of Artificial Sequence: Synthetic oligonucleotide
ugaucguggcaggcgccac

SEQ ID NO: 1264 - RNA, 19 nt, Artificial Sequence
  Description of Artificial Sequence: Synthetic oligonucleotide
ccacgcucuucugccugcu

SEQ ID NO: 1265 - RNA, 19 nt, Artificial Sequence
  Description of Artificial Sequence: Synthetic oligonucleotide
ugcacuuuggagugaucgg

SEQ ID NO: 1266 - RNA, 19 nt, Artificial Sequence
  Description of Artificial Sequence: Synthetic oligonucleotide
gcccccagagggaagaguc

SEQ ID NO: 1267 - RNA, 19 nt, Artificial Sequence
  Description of Artificial Sequence: Synthetic oligonucleotide
cccccagggaccucucucu

SEQ ID NO: 1268 - RNA, 19 nt, Artificial Sequence
  Description of Artificial Sequence: Synthetic oligonucleotide
uaaucagcccucuggccca

SEQ ID NO: 1269 - RNA, 19 nt, Artificial Sequence
  Description of Artificial Sequence: Synthetic oligonucleotide
aggcagucagaucaucuuc

SEQ ID NO: 1270 - RNA, 19 nt, Artificial Sequence
  Description of Artificial Sequence: Synthetic oligonucleotide
cucgaaccccgagugacaa

SEQ ID NO: 1271 - RNA, 19 nt, Artificial Sequence
  Description of Artificial Sequence: Synthetic oligonucleotide
agccuguagcccauguugu

SEQ ID NO: 1272 - RNA, 19 nt, Artificial Sequence
  Description of Artificial Sequence: Synthetic oligonucleotide
uagcaaacccucaagcuga

SEQ ID NO: 1273 - RNA, 19 nt, Artificial Sequence
  Description of Artificial Sequence: Synthetic oligonucleotide
aggggcagcuccaguggcu

SEQ ID NO: 1274 - RNA, 19 nt, Artificial Sequence
  Description of Artificial Sequence: Synthetic oligonucleotide
ugaaccgccgggccaaugc

SEQ ID NO: 1275 - RNA, 19 nt, Artificial Sequence
  Description of Artificial Sequence: Synthetic oligonucleotide
cccuccuggccaauggcgu

SEQ ID NO: 1276 - RNA, 19 nt, Artificial Sequence
  Description of Artificial Sequence: Synthetic oligonucleotide
uggagcugagagauaacca

SEQ ID NO: 1277 - RNA, 19 nt, Artificial Sequence
  Description of Artificial Sequence: Synthetic oligonucleotide
agcugguggugccaucaga

SEQ ID NO: 1278 - RNA, 19 nt, Artificial Sequence
  Description of Artificial Sequence: Synthetic oligonucleotide
agggccuguaccucaucua

SEQ ID NO: 1279 - RNA, 19 nt, Artificial Sequence
  Description of Artificial Sequence: Synthetic oligonucleotide
acucccagguccucuucaa

SEQ ID NO: 1280 - RNA, 19 nt, Artificial Sequence
  Description of Artificial Sequence: Synthetic oligonucleotide
agggccaaggcugccccuc

SEQ ID NO: 1281 - RNA, 19 nt, Artificial Sequence
  Description of Artificial Sequence: Synthetic oligonucleotide
ccacccaugugcuccucac

SEQ ID NO: 1282 - RNA, 19 nt, Artificial Sequence
  Description of Artificial Sequence: Synthetic oligonucleotide
cccacaccaucagccgcau

SEQ ID NO: 1283 - RNA, 19 nt, Artificial Sequence
  Description of Artificial Sequence: Synthetic oligonucleotide
ucgccgucuccuaccagac

SEQ ID NO: 1284 - RNA, 19 nt, Artificial Sequence
  Description of Artificial Sequence: Synthetic oligonucleotide
ccaaggucaaccuccucuc

SEQ ID NO: 1285 - RNA, 19 nt, Artificial Sequence
  Description of Artificial Sequence: Synthetic oligonucleotide
cugccaucaagagccccug

SEQ ID NO: 1286 - RNA, 19 nt, Artificial Sequence
  Description of Artificial Sequence: Synthetic oligonucleotide
gccagagggagaccccaga

SEQ ID NO: 1287 - RNA, 19 nt, Artificial Sequence
  Description of Artificial Sequence: Synthetic oligonucleotide
agggggcugaggccaagcc

SEQ ID NO: 1288 - RNA, 19 nt, Artificial Sequence
  Description of Artificial Sequence: Synthetic oligonucleotide
ccugguaugagcccaucua

SEQ ID NO: 1289 - RNA, 19 nt, Artificial Sequence
  Description of Artificial Sequence: Synthetic oligonucleotide
aucugggaggggucuucca

SEQ ID NO: 1290 - RNA, 19 nt, Artificial Sequence
  Description of Artificial Sequence: Synthetic oligonucleotide
agcuggagaagggugaccg

SEQ ID NO: 1291 - RNA, 19 nt, Artificial Sequence
  Description of Artificial Sequence: Synthetic oligonucleotide
gacucagcgcugagaucaa

SEQ ID NO: 1292 - RNA, 19 nt, Artificial Sequence
  Description of Artificial Sequence: Synthetic oligonucleotide
aucggcccgacuaucucga

SEQ ID NO: 1293 - RNA, 19 nt, Artificial Sequence
  Description of Artificial Sequence: Synthetic oligonucleotide
acuuugccgagucugggca

SEQ ID NO: 1294 - RNA, 19 nt, Artificial Sequence
  Description of Artificial Sequence: Synthetic oligonucleotide
aggucuacuuugggaucau

SEQ ID NO: 1295 - RNA, 19 nt, Artificial Sequence
  Description of Artificial Sequence: Synthetic oligonucleotide
uugcccugugaggaggacg

SEQ ID NO: 1296 - RNA, 19 nt, Artificial Sequence
  Description of Artificial Sequence: Synthetic oligonucleotide
gaacauccaaccuucccaa

SEQ ID NO: 1297 - RNA, 19 nt, Artificial Sequence
  Description of Artificial Sequence: Synthetic oligonucleotide
aacgccuccccugccccaa

SEQ ID NO: 1298 - RNA, 19 nt, Artificial Sequence
  Description of Artificial Sequence: Synthetic oligonucleotide
aucccuuuauuacccccuc

SEQ ID NO: 1299 - RNA, 19 nt, Artificial Sequence
  Description of Artificial Sequence: Synthetic oligonucleotide
ccuucagacacccucaacc

SEQ ID NO: 1300 - RNA, 19 nt, Artificial Sequence
  Description of Artificial Sequence: Synthetic oligonucleotide
cucuucuggcucaaaaaga

SEQ ID NO: 1301 - RNA, 19 nt, Artificial Sequence
  Description of Artificial Sequence: Synthetic oligonucleotide
agaauugggggcuuagggu

SEQ ID NO: 1302 - RNA, 19 nt, Artificial Sequence
  Description of Artificial Sequence: Synthetic oligonucleotide
ucggaacccaagcuuagaa

SEQ ID NO: 1303 - RNA, 19 nt, Artificial Sequence
  Description of Artificial Sequence: Synthetic oligonucleotide
acuuuaagcaacaagacca

SEQ ID NO: 1304 - RNA, 19 nt, Artificial Sequence
  Description of Artificial Sequence: Synthetic oligonucleotide
accacuucgaaaccuggga

SEQ ID NO: 1305 - RNA, 19 nt, Artificial Sequence
  Description of Artificial Sequence: Synthetic oligonucleotide
auucaggaauguguggccu

SEQ ID NO: 1306 - RNA, 19 nt, Artificial Sequence
  Description of Artificial Sequence: Synthetic oligonucleotide
ugcacagugaagugcuggc

SEQ ID NO: 1307 - RNA, 19 nt, Artificial Sequence
  Description of Artificial Sequence: Synthetic oligonucleotide
caaccacuaagaauucaaa

SEQ ID NO: 1308 - RNA, 19 nt, Artificial Sequence
  Description of Artificial Sequence: Synthetic oligonucleotide
acuggggccuccagaacuc

SEQ ID NO: 1309 - RNA, 19 nt, Artificial Sequence
  Description of Artificial Sequence: Synthetic oligonucleotide
cacuggggccuacagcuuu

SEQ ID NO: 1310 - RNA, 19 nt, Artificial Sequence
  Description of Artificial Sequence: Synthetic oligonucleotide
ugaucccugacaucuggaa

SEQ ID NO: 1311 - RNA, 19 nt, Artificial Sequence
  Description of Artificial Sequence: Synthetic oligonucleotide
aucuggagaccagggagcc

SEQ ID NO: 1312 - RNA, 19 nt, Artificial Sequence
  Description of Artificial Sequence: Synthetic oligonucleotide
cuuugguucuggccagaau

SEQ ID NO: 1313 - RNA, 19 nt, Artificial Sequence
  Description of Artificial Sequence: Synthetic oligonucleotide
ugcugcaggacuugagaag

SEQ ID NO: 1314 - RNA, 19 nt, Artificial Sequence
  Description of Artificial Sequence: Synthetic oligonucleotide
gaccucaccuagaaauuga

SEQ ID NO: 1315 - RNA, 19 nt, Artificial Sequence
  Description of Artificial Sequence: Synthetic oligonucleotide
acacaaguggaccuuaggc

SEQ ID NO: 1316 - RNA, 19 nt, Artificial Sequence
  Description of Artificial Sequence: Synthetic oligonucleotide
ccuuccucucuccagaugu

SEQ ID NO: 1317 - RNA, 19 nt, Artificial Sequence
  Description of Artificial Sequence: Synthetic oligonucleotide
uuuccagacuuccuugaga

SEQ ID NO: 1318 - RNA, 19 nt, Artificial Sequence
  Description of Artificial Sequence: Synthetic oligonucleotide
acacggagcccagcccucc

SEQ ID NO: 1319 - RNA, 19 nt, Artificial Sequence
  Description of Artificial Sequence: Synthetic oligonucleotide
cccauggagccagcucccu

SEQ ID NO: 1320 - RNA, 19 nt, Artificial Sequence
  Description of Artificial Sequence: Synthetic oligonucleotide
ucuauuuauguuugcacuu

SEQ ID NO: 1321 - RNA, 19 nt, Artificial Sequence
  Description of Artificial Sequence: Synthetic oligonucleotide
ugugauuauuuauuauuua

SEQ ID NO: 1322 - RNA, 19 nt, Artificial Sequence
  Description of Artificial Sequence: Synthetic oligonucleotide
auuuauuauuuauuuauuu

SEQ ID NO: 1323 - RNA, 19 nt, Artificial Sequence
  Description of Artificial Sequence: Synthetic oligonucleotide
uacagaugaauguauuuau

SEQ ID NO: 1324 - RNA, 19 nt, Artificial Sequence
  Description of Artificial Sequence: Synthetic oligonucleotide
uuugggagaccgggguauc

SEQ ID NO: 1325 - RNA, 19 nt, Artificial Sequence
  Description of Artificial Sequence: Synthetic oligonucleotide
ccugggggacccaauguag

SEQ ID NO: 1326 - RNA, 19 nt, Artificial Sequence
  Description of Artificial Sequence: Synthetic oligonucleotide
ggagcugccuuggcucaga

SEQ ID NO: 1327 - RNA, 19 nt, Artificial Sequence
  Description of Artificial Sequence: Synthetic oligonucleotide
acauguuuuccgugaaaac

SEQ ID NO: 1328 - RNA, 19 nt, Artificial Sequence
  Description of Artificial Sequence: Synthetic oligonucleotide
cggaggcugaacaauaggc

SEQ ID NO: 1329 - RNA, 19 nt, Artificial Sequence
  Description of Artificial Sequence: Synthetic oligonucleotide
cuguucccauguagccccc

SEQ ID NO: 1330 - RNA, 19 nt, Artificial Sequence
  Description of Artificial Sequence: Synthetic oligonucleotide
cuggccucugugccuucuu

SEQ ID NO: 1331 - RNA, 19 nt, Artificial Sequence
  Description of Artificial Sequence: Synthetic oligonucleotide
uuugauuauguuuuuuaaa

SEQ ID NO: 1332 - RNA, 19 nt, Artificial Sequence
  Description of Artificial Sequence: Synthetic oligonucleotide
aauauuaucugauuaaguu

SEQ ID NO: 1333 - RNA, 19 nt, Artificial Sequence
  Description of Artificial Sequence: Synthetic oligonucleotide
ugucuaaacaaugcugauu

SEQ ID NO: 1334 - RNA, 19 nt, Artificial Sequence
  Description of Artificial Sequence: Synthetic oligonucleotide
uuggugaccaacugucacu

SEQ ID NO: 1335 - RNA, 19 nt, Artificial Sequence
  Description of Artificial Sequence: Synthetic oligonucleotide
ucauugcugaggccucugc

SEQ ID NO: 1336 - RNA, 19 nt, Artificial Sequence
  Description of Artificial Sequence: Synthetic oligonucleotide
cuccccagggaguuguguc

SEQ ID NO: 1337 - RNA, 19 nt, Artificial Sequence
  Description of Artificial Sequence: Synthetic oligonucleotide
cuguaaucggccuacuauu

SEQ ID NO: 1338 - RNA, 19 nt, Artificial Sequence
  Description of Artificial Sequence: Synthetic oligonucleotide
ucaguggcgagaaauaaag

SEQ ID NO: 1339 - RNA, 19 nt, Artificial Sequence
  Description of Artificial Sequence: Synthetic oligonucleotide
uaaagguugcuuaggaaag

SEQ ID NO: 1340 - RNA, 25 nt, Artificial Sequence
  Description of Artificial Sequence: Synthetic oligonucleotide
cucccucagcaaggacagcagagga

SEQ ID NO: 1341 - RNA, 25 nt, Artificial Sequence
  Description of Artificial Sequence: Synthetic oligonucleotide
accagcuaagagggagagaagcaac

SEQ ID NO: 1342 - RNA, 25 nt, Artificial Sequence
  Description of Artificial Sequence: Synthetic oligonucleotide
cuacagacccccccugaaaacaacc

SEQ ID NO: 1343 - RNA, 25 nt, Artificial Sequence
  Description of Artificial Sequence: Synthetic oligonucleotide
ccucagacgccacauccccugacaa

SEQ ID NO: 1344 - RNA, 25 nt, Artificial Sequence
  Description of Artificial Sequence: Synthetic oligonucleotide
agcugccaggcagguucucuuccuc

SEQ ID NO: 1345 - RNA, 25 nt, Artificial Sequence
  Description of Artificial Sequence: Synthetic oligonucleotide
cucacauacugacccacggcuccac

SEQ ID NO: 1346 - RNA, 25 nt, Artificial Sequence
  Description of Artificial Sequence: Synthetic oligonucleotide
cccucucuccccuggaaaggacacc

SEQ ID NO: 1347 - RNA, 25 nt, Artificial Sequence
  Description of Artificial Sequence: Synthetic oligonucleotide
caugagcacugaaagcaugauccgg

SEQ ID NO: 1348 - RNA, 25 nt, Artificial Sequence
  Description of Artificial Sequence: Synthetic oligonucleotide
ggacguggagcuggccgaggaggcg

SEQ ID NO: 1349 - RNA, 25 nt, Artificial Sequence
  Description of Artificial Sequence: Synthetic oligonucleotide
gcuccccaagaagacaggggggccc

SEQ ID NO: 1350 - RNA, 25 nt, Artificial Sequence
  Description of Artificial Sequence: Synthetic oligonucleotide
ccagggcuccaggcggugcuuguuc

SEQ ID NO: 1351 - RNA, 25 nt, Artificial Sequence
  Description of Artificial Sequence: Synthetic oligonucleotide
ccucagccucuucuccuuccugauc

SEQ ID NO: 1352 - RNA, 25 nt, Artificial Sequence
  Description of Artificial Sequence: Synthetic oligonucleotide
cguggcaggcgccaccacgcucuuc

SEQ ID NO: 1353 - RNA, 25 nt, Artificial Sequence
  Description of Artificial Sequence: Synthetic oligonucleotide
cugccugcugcacuuuggagugauc

SEQ ID NO: 1354 - RNA, 25 nt, Artificial Sequence
  Description of Artificial Sequence: Synthetic oligonucleotide
cggcccccagagggaagaguucccc

SEQ ID NO: 1355 - RNA, 25 nt, Artificial Sequence
  Description of Artificial Sequence: Synthetic oligonucleotide
cagggaccucucucuaaucagcccu

SEQ ID NO: 1356 - RNA, 25 nt, Artificial Sequence
  Description of Artificial Sequence: Synthetic oligonucleotide
ucuggcccaggcagucagaucaucu

SEQ ID NO: 1357 - RNA, 25 nt, Artificial Sequence
  Description of Artificial Sequence: Synthetic oligonucleotide
uucucgaaccccgagugacaagccu

SEQ ID NO: 1358 - RNA, 25 nt, Artificial Sequence
  Description of Artificial Sequence: Synthetic oligonucleotide
uguagcccauguuguagcaaacccu

SEQ ID NO: 1359 - RNA, 25 nt, Artificial Sequence
  Description of Artificial Sequence: Synthetic oligonucleotide
ucaagcugaggggcagcuccagugg

SEQ ID NO: 1360 - RNA, 25 nt, Artificial Sequence
  Description of Artificial Sequence: Synthetic oligonucleotide
gcugaaccgccgggccaaugcccuc

SEQ ID NO: 1361 - RNA, 25 nt, Artificial Sequence
  Description of Artificial Sequence: Synthetic oligonucleotide
ccuggccaauggcguggagcugaga

SEQ ID NO: 1362 - RNA, 25 nt, Artificial Sequence
  Description of Artificial Sequence: Synthetic oligonucleotide
agauaaccagcugguggugccauca

SEQ ID NO: 1363 - RNA, 25 nt, Artificial Sequence
  Description of Artificial Sequence: Synthetic oligonucleotide
agagggccuguaccucaucuacucc

SEQ ID NO: 1364 - RNA, 25 nt, Artificial Sequence
  Description of Artificial Sequence: Synthetic oligonucleotide
ccagguccucuucaagggccaaggc

SEQ ID NO: 1365 - RNA, 25 nt, Artificial Sequence
  Description of Artificial Sequence: Synthetic oligonucleotide
cugccccuccacccaugugcuccuc

SEQ ID NO: 1366 - RNA, 25 nt, Artificial Sequence
  Description of Artificial Sequence: Synthetic oligonucleotide
cacccacaccaucagccgcaucgcc

SEQ ID NO: 1367 - RNA, 25 nt, Artificial Sequence
  Description of Artificial Sequence: Synthetic oligonucleotide
ccuccucucugccaucaagagcccc

SEQ ID NO: 1368 - RNA, 25 nt, Artificial Sequence
  Description of Artificial Sequence: Synthetic oligonucleotide
cugccagagggagaccccagagggg

SEQ ID NO: 1369 - RNA, 25 nt, Artificial Sequence
  Description of Artificial Sequence: Synthetic oligonucleotide
ggcugaggccaagcccugguaugag

SEQ ID NO: 1370 - RNA, 25 nt, Artificial Sequence
  Description of Artificial Sequence: Synthetic oligonucleotide
gcccaucuaucugggaggggucuuc

SEQ ID NO: 1371 - RNA, 25 nt, Artificial Sequence
  Description of Artificial Sequence: Synthetic oligonucleotide
ccagcuggagaagggugaccgacuc

SEQ ID NO: 1372 - RNA, 25 nt, Artificial Sequence
  Description of Artificial Sequence: Synthetic oligonucleotide
cagcgcugagaucaaucggcccgac

SEQ ID NO: 1373 - RNA, 25 nt, Artificial Sequence
  Description of Artificial Sequence: Synthetic oligonucleotide
cuaucucgacuuugccgagucuggg

SEQ ID NO: 1374 - RNA, 25 nt, Artificial Sequence
  Description of Artificial Sequence: Synthetic oligonucleotide
gcaggucuacuuugggaucauugcc

SEQ ID NO: 1375 - RNA, 25 nt, Artificial Sequence
  Description of Artificial Sequence: Synthetic oligonucleotide
ccugugaggaggacgaacauccaac

SEQ ID NO: 1376 - RNA, 25 nt, Artificial Sequence
  Description of Artificial Sequence: Synthetic oligonucleotide
ccuucccaaacgccuccccugcccc

SEQ ID NO: 1377 - RNA, 25 nt, Artificial Sequence
  Description of Artificial Sequence: Synthetic oligonucleotide
caaucccuuuauuacccccuccuuc

SEQ ID NO: 1378 - RNA, 25 nt, Artificial Sequence
  Description of Artificial Sequence: Synthetic oligonucleotide
cagacacccucaaccucuucuggcu

SEQ ID NO: 1379 - RNA, 25 nt, Artificial Sequence
  Description of Artificial Sequence: Synthetic oligonucleotide
ucaaaaagagaauugggggcuuagg

SEQ ID NO: 1380 - RNA, 25 nt, Artificial Sequence
  Description of Artificial Sequence: Synthetic oligonucleotide
ggucggaacccaagcuuagaacuuu

SEQ ID NO: 1381 - RNA, 25 nt, Artificial Sequence
  Description of Artificial Sequence: Synthetic oligonucleotide
uaagcaacaagaccaccacuucgaa

SEQ ID NO: 1382 - RNA, 25 nt, Artificial Sequence
  Description of Artificial Sequence: Synthetic oligonucleotide
aaccugggauucaggaauguguggc

SEQ ID NO: 1383 - RNA, 25 nt, Artificial Sequence
  Description of Artificial Sequence: Synthetic oligonucleotide
ccugcacagugaagugcuggcaacc

SEQ ID NO: 1384 - RNA, 25 nt, Artificial Sequence
  Description of Artificial Sequence: Synthetic oligonucleotide
cacuaagaauucaaacuggggccuc

SEQ ID NO: 1385 - RNA, 25 nt, Artificial Sequence
  Description of Artificial Sequence: Synthetic oligonucleotide
ccagaacucacuggggccuacagcu

SEQ ID NO: 1386 - RNA, 25 nt, Artificial Sequence
  Description of Artificial Sequence: Synthetic oligonucleotide
uuugaucccugacaucuggaaucug

SEQ ID NO: 1387 - RNA, 25 nt, Artificial Sequence
  Description of Artificial Sequence: Synthetic oligonucleotide
ggagaccagggagccuuugguucug

SEQ ID NO: 1388 - RNA, 25 nt, Artificial Sequence
  Description of Artificial Sequence: Synthetic oligonucleotide
ggccagaaugcugcaggacuugaga

SEQ ID NO: 1389 - RNA, 25 nt, Artificial Sequence
  Description of Artificial Sequence: Synthetic oligonucleotide
aagaccucaccuagaaauugacaca

SEQ ID NO: 1390 - RNA, 25 nt, Artificial Sequence
  Description of Artificial Sequence: Synthetic oligonucleotide
aaguggaccuuaggccuuccucucu

SEQ ID NO: 1391 - RNA, 25 nt, Artificial Sequence
  Description of Artificial Sequence: Synthetic oligonucleotide
uccagauguuuccagacuuccuuga

SEQ ID NO: 1392 - RNA, 25 nt, Artificial Sequence
  Description of Artificial Sequence: Synthetic oligonucleotide
agacacggagcccagcccuccccau

SEQ ID NO: 1393 - RNA, 25 nt, Artificial Sequence
  Description of Artificial Sequence: Synthetic oligonucleotide
uggagccagcucccucuauuuaugu

SEQ ID NO: 1394 - RNA, 25 nt, Artificial Sequence
  Description of Artificial Sequence: Synthetic oligonucleotide
uuugcacuugugauuauuuauuauu

SEQ ID NO: 1395 - RNA, 25 nt, Artificial Sequence
  Description of Artificial Sequence: Synthetic oligonucleotide
uuauuuauuauuuauuuauuuacag

SEQ ID NO: 1396 - RNA, 25 nt, Artificial Sequence
  Description of Artificial Sequence: Synthetic oligonucleotide
gaugaauguauuuauuugggagacc

SEQ ID NO: 1397 - RNA, 25 nt, Artificial Sequence
  Description of Artificial Sequence: Synthetic oligonucleotide
cgggguauccugggggacccaaugu

SEQ ID NO: 1398 - RNA, 25 nt, Artificial Sequence
  Description of Artificial Sequence: Synthetic oligonucleotide
uaggagcugccuuggcucagacaug

SEQ ID NO: 1399 - RNA, 25 nt, Artificial Sequence
  Description of Artificial Sequence: Synthetic oligonucleotide
guuuuccgugaaaacggagcugaac

SEQ ID NO: 1400 - RNA, 25 nt, Artificial Sequence
  Description of Artificial Sequence: Synthetic oligonucleotide
caauaggcuguucccauguagcccc

SEQ ID NO: 1401 - RNA, 25 nt, Artificial Sequence
  Description of Artificial Sequence: Synthetic oligonucleotide
ccuggccucugugccuucuuuugau

SEQ ID NO: 1402 - RNA, 25 nt, Artificial Sequence
  Description of Artificial Sequence: Synthetic oligonucleotide
uuauguuuuuuaaaauauuuaucug

SEQ ID NO: 1403 - RNA, 25 nt, Artificial Sequence
  Description of Artificial Sequence: Synthetic oligonucleotide
gauuaaguugucuaaacaaugcuga

SEQ ID NO: 1404 - RNA, 25 nt, Artificial Sequence
  Description of Artificial Sequence: Synthetic oligonucleotide
auuuggugaccaacugucacucauu

SEQ ID NO: 1405 - RNA, 25 nt, Artificial Sequence
  Description of Artificial Sequence: Synthetic oligonucleotide
ugcugagccucugcuccccagggga

SEQ ID NO: 1406 - RNA, 25 nt, Artificial Sequence
  Description of Artificial Sequence: Synthetic oligonucleotide
aguugugucuguaaucgcccuacua

SEQ ID NO: 1407 - RNA, 25 nt, Artificial Sequence
  Description of Artificial Sequence: Synthetic oligonucleotide
auucaguggcgagaaauaaaguuug

SEQ ID NO: 1408 - RNA, 25 nt, Artificial Sequence
  Description of Artificial Sequence: Synthetic oligonucleotide
gaaauaaaguuugcuuagaaaagaa

SEQ ID NO: 1409 - RNA, 19 nt, Artificial Sequence
  Description of Artificial Sequence: Synthetic oligonucleotide
gcguggagcugagagauaa

SEQ ID NO: 1410 - RNA, 19 nt, Artificial Sequence
  Description of Artificial Sequence: Synthetic oligonucleotide
gccuguagcccauguugua

SEQ ID NO: 1411 - RNA, 19 nt, Artificial Sequence
  Description of Artificial Sequence: Synthetic oligonucleotide
gguaugagcccaucuaucu

SEQ ID NO: 1412 - RNA, 19 nt, Artificial Sequence
  Description of Artificial Sequence: Synthetic oligonucleotide
ccagggaccucucucuaau

SEQ ID NO: 1413 - RNA, 19 nt, Artificial Sequence
  Description of Artificial Sequence: Synthetic oligonucleotide
gcccgacuaucucgacuuu

SEQ ID NO: 1414 - RNA, 19 nt, Artificial Sequence
  Description of Artificial Sequence: Synthetic oligonucleotide
ugacaagccuguagcccau

SEQ ID NO: 1415 - RNA, 19 nt, Artificial Sequence
  Description of Artificial Sequence: Synthetic oligonucleotide
ggucuacuuugggaucauu

SEQ ID NO: 1416 - RNA, 19 nt, Artificial Sequence
  Description of Artificial Sequence: Synthetic oligonucleotide
cccagggaccucucucuaa

SEQ ID NO: 1417 - RNA, 23 nt, Artificial Sequence
  Description of Artificial Sequence: Synthetic oligonucleotide
aaucggcccgacuaucucgacuu

SEQ ID NO: 1418 - RNA, 19 nt, Artificial Sequence
  Description of Artificial Sequence: Synthetic oligonucleotide
uggcguggagcugagagau

SEQ ID NO: 1419 - RNA, 19 nt, Artificial Sequence
  Description of Artificial Sequence: Synthetic oligonucleotide
ccuccucucugccaucaag

SEQ ID NO: 1420 - RNA, 19 nt, Artificial Sequence
  Description of Artificial Sequence: Synthetic oligonucleotide
ucucgacuuugccgagucu

SEQ ID NO: 1421 - RNA, 19 nt, Artificial Sequence
  Description of Artificial Sequence: Synthetic oligonucleotide
gggugaccgacucagcgcu

SEQ ID NO: 1422 - RNA, 19 nt, Artificial Sequence
  Description of Artificial Sequence: Synthetic oligonucleotide
ucagccgcaucgccgucuc

SEQ ID NO: 1423 - RNA, 19 nt, Artificial Sequence
  Description of Artificial Sequence: Synthetic oligonucleotide
cccaugugcuccucaccca

SEQ ID NO: 1424 - RNA, 19 nt, Artificial Sequence
  Description of Artificial Sequence: Synthetic oligonucleotide
gcuccaguggcugaaccgc

SEQ ID NO: 1425 - RNA, 19 nt, Artificial Sequence
  Description of Artificial Sequence: Synthetic oligonucleotide
gucagaucaucuucucgaa

SEQ ID NO: 1426 - RNA, 23 nt, Artificial Sequence
  Description of Artificial Sequence: Synthetic oligonucleotide
ccucagccucuucuccuuccuga

SEQ ID NO: 1427 - RNA, 19 nt, Artificial Sequence
  Description of Artificial Sequence: Synthetic oligonucleotide
uccucagccucuucuccuu

SEQ ID NO: 1428 - RNA, 19 nt, Artificial Sequence
  Description of Artificial Sequence: Synthetic oligonucleotide
ccaaugcccuccuggccaa

SEQ ID NO: 1429 - RNA, 21 nt, Artificial Sequence
  Description of Artificial Sequence: Synthetic oligonucleotide
cugauuaaguugucuaaacaa

SEQ ID NO: 1430 - RNA, 21 nt, Artificial Sequence
  Description of Artificial Sequence: Synthetic oligonucleotide
ccgacucagcgcugagaucaa

SEQ ID NO: 1431 - RNA, 21 nt, Artificial Sequence
  Description of Artificial Sequence: Synthetic oligonucleotide
cuugugauuauuuauuauuua

SEQ ID NO: 1432 - RNA, 21 nt, Artificial Sequence
  Description of Artificial Sequence: Synthetic oligonucleotide
aagccuguagcccauguugua

SEQ ID NO: 1433 - RNA, 21 nt, Artificial Sequence
  Description of Artificial Sequence: Synthetic oligonucleotide
uagggucggaacccaagcuua

SEQ ID NO: 1434 - RNA, 19 nt, Artificial Sequence
  Description of Artificial Sequence: Synthetic oligonucleotide
aggcggugcuuguuccuca

SEQ ID NO: 1435 - RNA, 19 nt, Artificial Sequence
  Description of Artificial Sequence: Synthetic oligonucleotide
ccaccacgcucuucugccu

SEQ ID NO: 1436 - RNA, 19 nt, Artificial Sequence
  Description of Artificial Sequence: Synthetic oligonucleotide
agggaccucucucuaauca

SEQ ID NO: 1437 - RNA, 19 nt, Artificial Sequence
  Description of Artificial Sequence: Synthetic oligonucleotide
ccaauggcguggagcugag

SEQ ID NO: 1438 - RNA, 19 nt, Artificial Sequence
  Description of Artificial Sequence: Synthetic oligonucleotide
ggcguggagcugagagaua

SEQ ID NO: 1439 - RNA, 19 nt, Artificial Sequence
  Description of Artificial Sequence: Synthetic oligonucleotide
gccuguaccucaucuacuc

SEQ ID NO: 1440 - RNA, 19 nt, Artificial Sequence
  Description of Artificial Sequence: Synthetic oligonucleotide
gcuggagaagggugaccga

SEQ ID NO: 1441 - RNA, 19 nt, Artificial Sequence
  Description of Artificial Sequence: Synthetic oligonucleotide
gagaagggugaccgacuca

SEQ ID NO: 1442 - RNA, 19 nt, Artificial Sequence
  Description of Artificial Sequence: Synthetic oligonucleotide
gcaggucuacuuugggauc

SEQ ID NO: 1443 - RNA, 19 nt, Artificial Sequence
  Description of Artificial Sequence: Synthetic oligonucleotide
ugggaucauugcccuguga

SEQ ID NO: 1444 - RNA, 19 nt, Artificial Sequence
  Description of Artificial Sequence: Synthetic oligonucleotide
ggucggaacccaagcuuag

SEQ ID NO: 1445 - RNA, 19 nt, Artificial Sequence
  Description of Artificial Sequence: Synthetic oligonucleotide
ccagaaugcugcaggacuu

SEQ ID NO: 1446 - RNA, 19 nt, Artificial Sequence
  Description of Artificial Sequence: Synthetic oligonucleotide
gagaagaccucaccuagaa

SEQ ID NO: 1447 - RNA, 19 nt, Artificial Sequence
  Description of Artificial Sequence: Synthetic oligonucleotide
gaagaccucaccuagaaau

SEQ ID NO: 1448 - RNA, 19 nt, Artificial Sequence
  Description of Artificial Sequence: Synthetic oligonucleotide
ccagauguuuccagacuuc

SEQ ID NO: 1449 - RNA, 19 nt, Artificial Sequence
  Description of Artificial Sequence: Synthetic oligonucleotide
cuauuuauguuugcacuug

SEQ ID NO: 1450 - RNA, 19 nt, Artificial Sequence
  Description of Artificial Sequence: Synthetic oligonucleotide
ucuaaacaaugcugauuug

SEQ ID NO: 1451 - RNA, 18 nt, Artificial Sequence
  Description of Artificial Sequence: Synthetic oligonucleotide
gaccaacugucacucauu

SEQ ID NO: 1452 - RNA, 25 nt, Artificial Sequence
  Description of Artificial Sequence: Synthetic oligonucleotide
caggcagucagaucaucuucucgaa

SEQ ID NO: 1453 - RNA, 25 nt, Artificial Sequence
  Description of Artificial Sequence: Synthetic oligonucleotide
gcuggagaagggugaccgacucagc

SEQ ID NO: 1454 - RNA, 25 nt, Artificial Sequence
  Description of Artificial Sequence: Synthetic oligonucleotide
agaccaaggucaaccuccucucugc

SEQ ID NO: 1455 - RNA, 25 nt, Artificial Sequence
  Description of Artificial Sequence: Synthetic oligonucleotide
gagauaaccagcugguggugccauc

SEQ ID NO: 1456 - RNA, 25 nt, Artificial Sequence
  Description of Artificial Sequence: Synthetic oligonucleotide
gccucuucuccuuccugaucguggc

SEQ ID NO: 1457 - RNA, 25 nt, Artificial Sequence
  Description of Artificial Sequence: Synthetic oligonucleotide
gccugcugcacuuuggagugaucgg

SEQ ID NO: 1458 - RNA, 25 nt, Artificial Sequence
  Description of Artificial Sequence: Synthetic oligonucleotide
cccaugugcuccucacccacaccau

SEQ ID NO: 1459 - RNA, 25 nt, Artificial Sequence
  Description of Artificial Sequence: Synthetic oligonucleotide
accucaucuacucccagguccucuu

SEQ ID NO: 1460 - RNA, 25 nt, Artificial Sequence
  Description of Artificial Sequence: Synthetic oligonucleotide
cauguuguagcaaacccucaagcug

SEQ ID NO: 1461 - RNA, 25 nt, Artificial Sequence
  Description of Artificial Sequence: Synthetic oligonucleotide
gggucggaacccaagcuuagaacuu

SEQ ID NO: 1462 - RNA, 25 nt, Artificial Sequence
  Description of Artificial Sequence: Synthetic oligonucleotide
gacucagcgcugagaucaaucggcc

SEQ ID NO: 1463 - RNA, 25 nt, Artificial Sequence
  Description of Artificial Sequence: Synthetic oligonucleotide
gcccugguaugagcccaucuaucug

SEQ ID NO: 1464 - RNA, 25 nt, Artificial Sequence
  Description of Artificial Sequence: Synthetic oligonucleotide
gcccgacuaucucgacuuugccgag

SEQ ID NO: 1465 - RNA, 25 nt, Artificial Sequence
  Description of Artificial Sequence: Synthetic oligonucleotide
gccagcucccucuauuuauguuugc

SEQ ID NO: 1466 - RNA, 25 nt, Artificial Sequence
  Description of Artificial Sequence: Synthetic oligonucleotide
uccucagccucuucuccuuccugau

SEQ ID NO: 1467 - RNA, 19 nt, Artificial Sequence
  Description of Artificial Sequence: Synthetic oligonucleotide
cgagugacaagccuguagc

SEQ ID NO: 1468 - RNA, 19 nt, Artificial Sequence
  Description of Artificial Sequence: Synthetic oligonucleotide
gagugacaagccuguagcc

SEQ ID NO: 1469 - RNA, 19 nt, Artificial Sequence
  Description of Artificial Sequence: Synthetic oligonucleotide
agugacaagccuguagccc

SEQ ID NO: 1470 - RNA, 19 nt, Artificial Sequence
  Description of Artificial Sequence: Synthetic oligonucleotide
gugacaagccuguagccca

SEQ ID NO: 1471 - RNA, 19 nt, Artificial Sequence
  Description of Artificial Sequence: Synthetic oligonucleotide
gucuuccagcuggagaagg

SEQ ID NO: 1472 - RNA, 19 nt, Artificial Sequence
  Description of Artificial Sequence: Synthetic oligonucleotide
ucuuccagcuggagaaggg

SEQ ID NO: 1473 - RNA, 19 nt, Artificial Sequence
  Description of Artificial Sequence: Synthetic oligonucleotide
auuauuuauuauuuauuua

SEQ ID NO: 1474 - RNA, 19 nt, Artificial Sequence
  Description of Artificial Sequence: Synthetic oligonucleotide
uuauuuauuauuuauuuau

SEQ ID NO: 1475 - RNA, 19 nt, Artificial Sequence
  Description of Artificial Sequence: Synthetic oligonucleotide
auuuauuauuuauuuauua

SEQ ID NO: 1476 - RNA, 19 nt, Artificial Sequence
  Description of Artificial Sequence: Synthetic oligonucleotide
uuuauuauuuauuuauuau

SEQ ID NO: 1477 - RNA, 19 nt, Artificial Sequence
  Description of Artificial Sequence: Synthetic oligonucleotide
uuauuauuuauuuauuauu

SEQ ID NO: 1478 - RNA, 19 nt, Artificial Sequence
  Description of Artificial Sequence: Synthetic oligonucleotide
uauuauuuauuuauuauuu

SEQ ID NO: 1479 - RNA, 19 nt, Artificial Sequence
  Description of Artificial Sequence: Synthetic oligonucleotide
auuauuuauuuauuauuua

SEQ ID NO: 1480 - RNA, 19 nt, Artificial Sequence
  Description of Artificial Sequence: Synthetic oligonucleotide
uuauuuauuuauuauuuau

SEQ ID NO: 1481 - RNA, 19 nt, Artificial Sequence
  Description of Artificial Sequence: Synthetic oligonucleotide
uauuuauuuauuauuuauu

SEQ ID NO: 1482 - RNA, 19 nt, Artificial Sequence
  Description of Artificial Sequence: Synthetic oligonucleotide
auuuauuuauuauuuauuu

SEQ ID NO: 1483 - RNA, 19 nt, Artificial Sequence
  Description of Artificial Sequence: Synthetic oligonucleotide
uuuauuuauuauuuauuua

SEQ ID NO: 1484 - RNA, 19 nt, Artificial Sequence
  Description of Artificial Sequence: Synthetic oligonucleotide
gggucggaacccaagcuua

SEQ ID NO: 1485 - RNA, 19 nt, Artificial Sequence
  Description of Artificial Sequence: Synthetic oligonucleotide
ccgucagccgauuugcuau

SEQ ID NO: 1486 - DNA, 21 bp, Artificial Sequence
  Description of Artificial Sequence: Synthetic oligonucleotide
  Description of Combined DNA/RNA Molecule: Synthetic oligonucleotide
cuacacaaaucagcgauuutt

SEQ ID NO: 1487 - DNA, 21 bp, Artificial Sequence
  Description of Artificial Sequence: Synthetic oligonucleotide
  Description of Combined DNA/RNA Molecule: Synthetic oligonucleotide
aaaucgcugauuuguguagtt

SEQ ID NO: 1488 - DNA, 25 bp, Artificial Sequence
  Description of Artificial Sequence: Synthetic oligonucleotide
  Description of Combined DNA/RNA Molecule: Synthetic oligonucleotide
cuacacaaaucagcgauuuccaugt

SEQ ID NO: 1489 - RNA, 27 nt, Artificial Sequence
  Description of Artificial Sequence: Synthetic oligonucleotide
acauggaaaucgcugauuuguguaguc

SEQ ID NO: 1490 - RNA, 13 nt, Artificial Sequence
  Description of Artificial Sequence: Synthetic oligonucleotide
cuacacaaaucag

SEQ ID NO: 1491 - DNA, 11 bp, Artificial Sequence
  Description of Artificial Sequence: Synthetic oligonucleotide
  Description of Combined DNA/RNA Molecule: Synthetic oligonucleotide
gauuuccaugt

SEQ ID NO: 1492 - DNA, 21 bp, Artificial Sequence
  Description of Artificial Sequence: Synthetic oligonucleotide
  Description of Combined DNA/RNA Molecule: Synthetic oligonucleotide
ggaucuuauuucuucggagtt

SEQ ID NO: 1493 - DNA, 21 bp, Artificial Sequence
  Description of Artificial Sequence: Synthetic oligonucleotide
  Description of Combined DNA/RNA Molecule: Synthetic oligonucleotide
cuccgaagaaauaagaucctt

SEQ ID NO: 1494 - RNA, 11 nt, Artificial Sequence
  Description of Artificial Sequence: Synthetic oligonucleotide
ggaucuuauuu

SEQ ID NO: 1495 - DNA, 10 bp, Artificial Sequence
  Description of Artificial Sequence: Synthetic oligonucleotide
  Description of Combined DNA/RNA Molecule: Synthetic oligonucleotide
cuucggagtt

SEQ ID NO: 1496 - RNA, 27 nt, Artificial Sequence
  Description of Artificial Sequence: Synthetic oligonucleotide
cauugucuccgaagaaauaagauccuu

SEQ ID NO: 1497 - RNA, 8 nt, Artificial Sequence
  Description of Artificial Sequence: Synthetic oligonucleotide
  modified_base (2): LNA-G
ggaucuua

SEQ ID NO: 1498 - DNA, 17 bp, Artificial Sequence
  Description of Artificial Sequence: Synthetic oligonucleotide
  Description of Combined DNA/RNA Molecule: Synthetic oligonucleotide
uuucuucggagacaatg

SEQ ID NO: 1499 - DNA, 16 bp, Artificial Sequence
  Description of Artificial Sequence: Synthetic oligonucleotide
  Description of Combined DNA/RNA Molecule: Synthetic oligonucleotide
uucuucggagacaatg

SEQ ID NO: 1500 - DNA, 15 bp, Artificial Sequence
  Description of Artificial Sequence: Synthetic oligonucleotide
  Description of Combined DNA/RNA Molecule: Synthetic oligonucleotide
ucuucggagacaatg

SEQ ID NO: 1501 - DNA, 14 bp, Artificial Sequence
  Description of Artificial Sequence: Synthetic oligonucleotide
  Description of Combined DNA/RNA Molecule: Synthetic oligonucleotide
cuucggagacaatg

SEQ ID NO: 1502 - DNA, 13 bp, Artificial Sequence
  Description of Artificial Sequence: Synthetic oligonucleotide
  Description of Combined DNA/RNA Molecule: Synthetic oligonucleotide
uucggagacaatg

SEQ ID NO: 1503 - DNA, 12 bp, Artificial Sequence
  Description of Artificial Sequence: Synthetic oligonucleotide
  Description of Combined DNA/RNA Molecule: Synthetic oligonucleotide
ucggagacaatg

SEQ ID NO: 1504 - DNA, 11 bp, Artificial Sequence
  Description of Artificial Sequence: Synthetic oligonucleotide
  Description of Combined DNA/RNA Molecule: Synthetic oligonucleotide
cggagacaatg

SEQ ID NO: 1505 - RNA, 9 nt, Artificial Sequence
  Description of Artificial Sequence: Synthetic oligonucleotide
  modified_base (2): LNA-G
ggaucuuau

SEQ ID NO: 1506 - RNA, 10 nt, Artificial Sequence
  Description of Artificial Sequence: Synthetic oligonucleotide
  modified_base (2): LNA-G
ggaucuuauu

SEQ ID NO: 1507 - RNA, 11 nt, Artificial Sequence
  Description of Artificial Sequence: Synthetic oligonucleotide
  modified_base (2): LNA-G
ggaucuuauuu

SEQ ID NO: 1508 - RNA, 12 nt, Artificial Sequence
  Description of Artificial Sequence: Synthetic oligonucleotide
  modified_base (2): LNA-G
ggaucuuauuuc

SEQ ID NO: 1509 - RNA, 8 nt, Artificial Sequence
  Description of Artificial Sequence: Synthetic oligonucleotide
  modified_base (3): LNA-A
cuacacaa

SEQ ID NO: 1510 - DNA, 13 bp, Artificial Sequence
  Description of Artificial Sequence: Synthetic oligonucleotide
  Description of Combined DNA/RNA Molecule: Synthetic oligonucleotide
  modified_base (8): LNA-A
aucagcgauuutt

SEQ ID NO: 1511 - DNA, 12 bp, Artificial Sequence
  Description of Artificial Sequence: Synthetic oligonucleotide
  Description of Combined DNA/RNA Molecule: Synthetic oligonucleotide
  modified_base (7): LNA-A
ucagcgauuutt

SEQ ID NO: 1512 - DNA, 11 bp, Artificial Sequence
  Description of Artificial Sequence: Synthetic oligonucleotide
  Description of Combined DNA/RNA Molecule: Synthetic oligonucleotide
  modified_base (6): LNA-A
cagcgauuutt

SEQ ID NO: 1513 - DNA, 10 bp, Artificial Sequence
  Description of Artificial Sequence: Synthetic oligonucleotide
  Description of Combined DNA/RNA Molecule: Synthetic oligonucleotide
  modified_base (5): LNA-A
agcgauuutt

SEQ ID NO: 1514 - DNA, 9 bp, Artificial Sequence
  Description of Artificial Sequence: Synthetic oligonucleotide
  Description of Combined DNA/RNA Molecule: Synthetic oligonucleotide
  modified_base (4): LNA-A
gcgauuutt

SEQ ID NO: 1515 - DNA, 8 bp, Artificial Sequence
  Description of Artificial Sequence: Synthetic oligonucleotide
  Description of Combined DNA/RNA Molecule: Synthetic oligonucleotide
  modified_base (3): LNA-A
cgauuutt

SEQ ID NO: 1516 - DNA, 7 bp, Artificial Sequence
  Description of Artificial Sequence: Synthetic oligonucleotide
  Description of Combined DNA/RNA Molecule: Synthetic oligonucleotide
  modified_base (2): LNA-A
gauuutt

SEQ ID NO: 1517 - RNA, 9 nt, Artificial Sequence
  Description of Artificial Sequence: Synthetic oligonucleotide
  modified_base (3): LNA-A
cuacacaaa

SEQ ID NO: 1518 - RNA, 10 nt, Artificial Sequence
  Description of Artificial Sequence: Synthetic oligonucleotide
  modified_base (3): LNA-A
cuacacaaau

SEQ ID NO: 1519 - RNA, 11 nt, Artificial Sequence
  Description of Artificial Sequence: Synthetic oligonucleotide
  modified_base (3): LNA-A
cuacacaaauc

SEQ ID NO: 1520 - RNA, 12 nt, Artificial Sequence
  Description of Artificial Sequence: Synthetic oligonucleotide
  modified_base (3): LNA-A
cuacacaaauca

SEQ ID NO: 1521 - RNA, 13 nt, Artificial Sequence
  Description of Artificial Sequence: Synthetic oligonucleotide
  modified_base (3): LNA-A
cuacacaaaucag

SEQ ID NO: 1522 - RNA, 14 nt, Artificial Sequence
  Description of Artificial Sequence: Synthetic oligonucleotide
  modified_base (3): LNA-A
cuacacaaaucagc

SEQ ID NO: 1523 - RNA, 13 nt, Artificial Sequence
  Description of Artificial Sequence: Synthetic oligonucleotide
  modified_base (2): LNA-G
ggaucuuauuucu

SEQ ID NO: 1524 - RNA, 14 nt, Artificial Sequence
  Description of Artificial Sequence: Synthetic oligonucleotide
  modified_base (2): LNA-G
ggaucuuauuucuu

SEQ ID NO: 1525 - RNA, 8 nt, Artificial Sequence
  Description of Artificial Sequence: Synthetic oligonucleotide
  modified_base (2): LNA-G
  modified_base (8): LNA-A
ggaucuua

SEQ ID NO: 1526 - RNA, 9 nt, Artificial Sequence
  Description of Artificial Sequence: Synthetic oligonucleotide
  modified_base (2): LNA-G
  modified_base (9): LNA-U
ggaucuuau

SEQ ID NO: 1527 - RNA, 10 nt, Artificial Sequence
  Description of Artificial Sequence: Synthetic oligonucleotide
  modified_base (2): LNA-G
  modified_base (10): LNA-U
ggaucuuauu

SEQ ID NO: 1528 - RNA, 11 nt, Artificial Sequence
  Description of Artificial Sequence: Synthetic oligonucleotide
  modified_base (2): LNA-G
  modified_base (11): LNA-U
ggaucuuauuu

SEQ ID NO: 1529 - RNA, 12 nt, Artificial Sequence
  Description of Artificial Sequence: Synthetic oligonucleotide
  modified_base (2): LNA-G
  modified_base (12): LNA-C
ggaucuuauuuc

SEQ ID NO: 1530 - RNA, 13 nt, Artificial Sequence
  Description of Artificial Sequence: Synthetic oligonucleotide
  modified_base (2): LNA-G
  modified_base (13): LNA-U
ggaucuuauuucu

SEQ ID NO: 1531 - RNA, 14 nt, Artificial Sequence
  Description of Artificial Sequence: Synthetic oligonucleotide
  modified_base (2): LNA-G
  modified_base (14): LNA-U
ggaucuuauuucuu

SEQ ID NO: 1532 - DNA, 13 bp, Artificial Sequence
  Description of Artificial Sequence: Synthetic oligonucleotide
  Description of Combined DNA/RNA Molecule: Synthetic oligonucleotide
  modified_base (8): LNA-G
uuucuucggagtt

SEQ ID NO: 1533 - DNA, 12 bp, Artificial Sequence
  Description of Artificial Sequence: Synthetic oligonucleotide
  Description of Combined DNA/RNA Molecule: Synthetic oligonucleotide
  modified_base (7): LNA-G
uucuucggagtt

SEQ ID NO: 1534 - DNA, 11 bp, Artificial Sequence
  Description of Artificial Sequence: Synthetic oligonucleotide
  Description of Combined DNA/RNA Molecule: Synthetic oligonucleotide
  modified_base (6): LNA-G
ucuucggagtt

SEQ ID NO: 1535 - DNA, 10 bp, Artificial Sequence
  Description of Artificial Sequence: Synthetic oligonucleotide
  Description of Combined DNA/RNA Molecule: Synthetic oligonucleotide
  modified_base (5): LNA-G
cuucggagtt

SEQ ID NO: 1536 - DNA, 9 bp, Artificial Sequence
  Description of Artificial Sequence: Synthetic oligonucleotide
  Description of Combined DNA/RNA Molecule: Synthetic oligonucleotide
  modified_base (4): LNA-G
uucggagtt

SEQ ID NO: 1537 - DNA, 8 bp, Artificial Sequence
  Description of Artificial Sequence: Synthetic oligonucleotide
  Description of Combined DNA/RNA Molecule: Synthetic oligonucleotide
  modified_base (3): LNA-G
ucggagtt

SEQ ID NO: 1538 - DNA, 7 bp, Artificial Sequence
  Description of Artificial Sequence: Synthetic oligonucleotide
  Description of Combined DNA/RNA Molecule: Synthetic oligonucleotide
  modified_base (2): LNA-G
cggagtt

SEQ ID NO: 1539 - DNA, 13 bp, Artificial Sequence
  Description of Artificial Sequence: Synthetic oligonucleotide
  Description of Combined DNA/RNA Molecule: Synthetic oligonucleotide
  modified_base (1): LNA-U
  modified_base (8): LNA-G
uuucuucggagtt

SEQ ID NO: 1540 - DNA, 12 bp, Artificial Sequence
  Description of Artificial Sequence: Synthetic oligonucleotide
  Description of Combined DNA/RNA Molecule: Synthetic oligonucleotide
  modified_base (1): LNA-U
  modified_base (7): LNA-G
uucuucggagtt

SEQ ID NO: 1541 - DNA, 11 bp, Artificial Sequence
  Description of Artificial Sequence: Synthetic oligonucleotide
  Description of Combined DNA/RNA Molecule: Synthetic oligonucleotide
  modified_base (1): LNA-U
  modified_base (6): LNA-G
ucuucggagtt

SEQ ID NO: 1542 - DNA, 10 bp, Artificial Sequence
  Description of Artificial Sequence: Synthetic oligonucleotide
  Description of Combined DNA/RNA Molecule: Synthetic oligonucleotide
  modified_base (1): LNA-C
  modified_base (5): LNA-G
cuucggagtt

SEQ ID NO: 1543 - DNA, 9 bp, Artificial Sequence
  Description of Artificial Sequence: Synthetic oligonucleotide
  Description of Combined DNA/RNA Molecule: Synthetic oligonucleotide
  modified_base (1): LNA-U
  modified_base (4): LNA-G
uucggagtt

SEQ ID NO: 1544 - DNA, 8 bp, Artificial Sequence
  Description of Artificial Sequence: Synthetic oligonucleotide
  Description of Combined DNA/RNA Molecule: Synthetic oligonucleotide
  modified_base (1): LNA-U
  modified_base (3): LNA-G
ucggagtt

SEQ ID NO: 1545 - DNA, 7 bp, Artificial Sequence
  Description of Artificial Sequence: Synthetic oligonucleotide
  Description of Combined DNA/RNA Molecule: Synthetic oligonucleotide
  modified_base (1): LNA-C
  modified_base (2): LNA-G
cggagtt

SEQ ID NO: 1546 - DNA, 21 bp, Artificial Sequence
  Description of Artificial Sequence: Synthetic oligonucleotide
  Description of Combined DNA/RNA Molecule: Synthetic oligonucleotide
  modified_base (2): LNA-G
  modified_base (16): LNA-G
ggaucuuauuucuucggagtt

SEQ ID NO: 1547 - DNA, 25 bp, Artificial Sequence
  Description of Artificial Sequence: Synthetic oligonucleotide
  Description of Combined DNA/RNA Molecule: Synthetic oligonucleotide
ggaucuuauuucuucggagacaatg

SEQ ID NO: 1548 - RNA, 25 nt, Artificial Sequence
  Description of Artificial Sequence: Synthetic oligonucleotide
uuaagcagaguucaaaagcccuuca

SEQ ID NO: 1549 - RNA, 25 nt, Artificial Sequence
  Description of Artificial Sequence: Synthetic oligonucleotide
uaagcagaguucaaaagcccuucag

SEQ ID NO: 1550 - RNA, 25 nt, Artificial Sequence
  Description of Artificial Sequence: Synthetic oligonucleotide
agcagaguucaaaagcccuucagcg

SEQ ID NO: 1551 - RNA, 25 nt, Artificial Sequence
  Description of Artificial Sequence: Synthetic oligonucleotide
cucagggucugagugaagccgcucg

SEQ ID NO: 1552 - RNA, 25 nt, Artificial Sequence
  Description of Artificial Sequence: Synthetic oligonucleotide
caagcaacuacaucacgccagucaa

SEQ ID NO: 1553 - RNA, 25 nt, Artificial Sequence
  Description of Artificial Sequence: Synthetic oligonucleotide
aucaauggcagcuucuuggugcgug

SEQ ID NO: 1554 - RNA, 25 nt, Artificial Sequence
  Description of Artificial Sequence: Synthetic oligonucleotide
uuccagcccacauuggauucaucag

SEQ ID NO: 1555 - RNA, 25 nt, Artificial Sequence
  Description of Artificial Sequence: Synthetic oligonucleotide
cagcugagaauguggaauaccuaag

SEQ ID NO: 1556 - RNA, 25 nt, Artificial Sequence
  Description of Artificial Sequence: Synthetic oligonucleotide
aacguaucuccuaauuugaggcuca

SEQ ID NO: 1557 - RNA, 25 nt, Artificial Sequence
  Description of Artificial Sequence: Synthetic oligonucleotide
ccuaaaauaauuucucuacaauugg

SEQ ID NO: 1558 - RNA, 25 nt, Artificial Sequence
  Description of Artificial Sequence: Synthetic oligonucleotide
uggaagauucagcuaguuaggagcc

SEQ ID NO: 1559 - RNA, 25 nt, Artificial Sequence
  Description of Artificial Sequence: Synthetic oligonucleotide
uuaaacucuccuagucaauauccac

SEQ ID NO: 1560 - RNA, 25 nt, Artificial Sequence
  Description of Artificial Sequence: Synthetic oligonucleotide
cagccuacaguuauguucagucaca

SEQ ID NO: 1561 - RNA, 25 nt, Artificial Sequence
  Description of Artificial Sequence: Synthetic oligonucleotide
guuauguucagucacacacacauac

SEQ ID NO: 1562 - RNA, 25 nt, Artificial Sequence
  Description of Artificial Sequence: Synthetic oligonucleotide
cacauacaaaauguuccuuuugcuu

SEQ ID NO: 1563 - RNA, 25 nt, Artificial Sequence
  Description of Artificial Sequence: Synthetic oligonucleotide
uccuuuugcuuuuaaaguaauuuuu

SEQ ID NO: 1564 - RNA, 25 nt, Artificial Sequence
  Description of Artificial Sequence: Synthetic oligonucleotide
ugaccugugaagcaacagucaaugg

SEQ ID NO: 1565 - RNA, 25 nt, Artificial Sequence
  Description of Artificial Sequence: Synthetic oligonucleotide
cuaucucacacaucgacaaaccaau

SEQ ID NO: 1566 - RNA, 25 nt, Artificial Sequence
  Description of Artificial Sequence: Synthetic oligonucleotide
uguccucaauuguacugcuaccacu

SEQ ID NO: 1567 - RNA, 25 nt, Artificial Sequence
  Description of Artificial Sequence: Synthetic oligonucleotide
aaaccguagcuggcaagcggucuua

SEQ ID NO: 1568 - RNA, 25 nt, Artificial Sequence
  Description of Artificial Sequence: Synthetic oligonucleotide
uagcuggcaagcggucuuaccggcu

SEQ ID NO: 1569 - RNA, 25 nt, Artificial Sequence
  Description of Artificial Sequence: Synthetic oligonucleotide
uuguaugguuaaaagauggguuacc

SEQ ID NO: 1570 - RNA, 25 nt, Artificial Sequence
  Description of Artificial Sequence: Synthetic oligonucleotide
ugguuaaaagauggguuaccugcga

SEQ ID NO: 1571 - RNA, 25 nt, Artificial Sequence
  Description of Artificial Sequence: Synthetic oligonucleotide
cagggaauuauacaaucuugcugag

SEQ ID NO: 1572 - RNA, 25 nt, Artificial Sequence
  Description of Artificial Sequence: Synthetic oligonucleotide
acaaucuugcugagcauaaaacagu

SEQ ID NO: 1573 - RNA, 25 nt, Artificial Sequence
  Description of Artificial Sequence: Synthetic oligonucleotide
ccaauaaugaagaguccuuuauccu

SEQ ID NO: 1574 - RNA, 25 nt, Artificial Sequence
  Description of Artificial Sequence: Synthetic oligonucleotide
acuuuggauguuccaacgcaaguug

SEQ ID NO: 1575 - RNA, 25 nt, Artificial Sequence
  Description of Artificial Sequence: Synthetic oligonucleotide
aaugcuuccacuaaacugaaaccau

SEQ ID NO: 1576 - RNA, 25 nt, Artificial Sequence
  Description of Artificial Sequence: Synthetic oligonucleotide
gagaaaguuugacuuuguuaaauau

SEQ ID NO: 1577 - RNA, 25 nt, Artificial Sequence
  Description of Artificial Sequence: Synthetic oligonucleotide
aaagaacuacuguauauuaaaaguu

SEQ ID NO: 1578 - RNA, 25 nt, Artificial Sequence
  Description of Artificial Sequence: Synthetic oligonucleotide
uuagaaauacggguuuugacuuaac

SEQ ID NO: 1579 - RNA, 25 nt, Artificial Sequence
  Description of Artificial Sequence: Synthetic oligonucleotide
aacauggguacagcaaacucagcac

SEQ ID NO: 1580 - RNA, 25 nt, Artificial Sequence
  Description of Artificial Sequence: Synthetic oligonucleotide
aaagacacagaagaugcugaccuca

SEQ ID NO: 1581 - RNA, 25 nt, Artificial Sequence
  Description of Artificial Sequence: Synthetic oligonucleotide
uaguagggagguuuauucagaucgc

SEQ ID NO: 1582 - RNA, 25 nt, Artificial Sequence
  Description of Artificial Sequence: Synthetic oligonucleotide
gccuucugcagcaggguucugggau

SEQ ID NO: 1583 - RNA, 25 nt, Artificial Sequence
  Description of Artificial Sequence: Synthetic oligonucleotide
ggucugguacauauuggaaauuaug

SEQ ID NO: 1584 - RNA, 25 nt, Artificial Sequence
  Description of Artificial Sequence: Synthetic oligonucleotide
cuaguccuuccgauggaagcacuag

SEQ ID NO: 1585 - RNA, 25 nt, Artificial Sequence
  Description of Artificial Sequence: Synthetic oligonucleotide
ccagugaauauuguuuuuaugugga

SEQ ID NO: 1586 - RNA, 25 nt, Artificial Sequence
  Description of Artificial Sequence: Synthetic oligonucleotide
augaauucaaguuggaauugguaga

SEQ ID NO: 1587 - RNA, 25 nt, Artificial Sequence
  Description of Artificial Sequence: Synthetic oligonucleotide
caggacacagauuuagacuuggaga

SEQ ID NO: 1588 - RNA, 25 nt, Artificial Sequence
  Description of Artificial Sequence: Synthetic oligonucleotide
cucaaagcacaguuacaguauucca

SEQ ID NO: 1589 - RNA, 25 nt, Artificial Sequence
  Description of Artificial Sequence: Synthetic oligonucleotide
accacugccaccacugaugaauuaa

SEQ ID NO: 1590 - RNA, 25 nt, Artificial Sequence
  Description of Artificial Sequence: Synthetic oligonucleotide
gaaacuacuagugccacaucaucac

SEQ ID NO: 1591 - RNA, 25 nt, Artificial Sequence
  Description of Artificial Sequence: Synthetic oligonucleotide
aagucggacagccucaccaaacaga

SEQ ID NO: 1592 - RNA, 25 nt, Artificial Sequence
  Description of Artificial Sequence: Synthetic oligonucleotide
gaaagcgaaaaauggaacaugaugg

SEQ ID NO: 1593 - RNA, 25 nt, Artificial Sequence
  Description of Artificial Sequence: Synthetic oligonucleotide
cccucugauuuagcauguagacugc

SEQ ID NO: 1594 - RNA, 25 nt, Artificial Sequence
  Description of Artificial Sequence: Synthetic oligonucleotide
ugagcuauuuaaggaucuauuuaug

SEQ ID NO: 1595 - RNA, 25 nt, Artificial Sequence
  Description of Artificial Sequence: Synthetic oligonucleotide
aaaaggugaaaaagcacuauuauca

SEQ ID NO: 1596 - RNA, 25 nt, Artificial Sequence
  Description of Artificial Sequence: Synthetic oligonucleotide
gaaaaagcacuauuaucaguucugc

SEQ ID NO: 1597 - RNA, 25 nt, Artificial Sequence
  Description of Artificial Sequence: Synthetic oligonucleotide
ggcugaaaagaaagauuaaaccuac

SEQ ID NO: 1598 - RNA, 25 nt, Artificial Sequence
  Description of Artificial Sequence: Synthetic oligonucleotide
uaaacccuuauaauaaaauccuucu

SEQ ID NO: 1599 - RNA, 25 nt, Artificial Sequence
  Description of Artificial Sequence: Synthetic oligonucleotide
cauacuauuagccaaugcuguagac

SEQ ID NO: 1600 - RNA, 25 nt, Artificial Sequence
  Description of Artificial Sequence: Synthetic oligonucleotide
gacagaagcauuuugauaggaauag

SEQ ID NO: 1601 - RNA, 25 nt, Artificial Sequence
  Description of Artificial Sequence: Synthetic oligonucleotide
agagcaaauaagauaauggcccuga

SEQ ID NO: 1602 - RNA, 25 nt, Artificial Sequence
  Description of Artificial Sequence: Synthetic oligonucleotide
ccaacauuuuucucuuccucaagca

SEQ ID NO: 1603 - RNA, 25 nt, Artificial Sequence
  Description of Artificial Sequence: Synthetic oligonucleotide
uuaaguaugagaaaaguucagccca

SEQ ID NO: 1604 - RNA, 25 nt, Artificial Sequence
  Description of Artificial Sequence: Synthetic oligonucleotide
caggaauaaagauggcugcugaacc

SEQ ID NO: 1605 - RNA, 25 nt, Artificial Sequence
  Description of Artificial Sequence: Synthetic oligonucleotide
aauuugaaugaccaaguucucuuca

SEQ ID NO: 1606 - RNA, 25 nt, Artificial Sequence
  Description of Artificial Sequence: Synthetic oligonucleotide
auguauaaagauagccagccuagag

SEQ ID NO: 1607 - RNA, 25 nt, Artificial Sequence
  Description of Artificial Sequence: Synthetic oligonucleotide
ggcuguaacuaucucugugaagugu

SEQ ID NO: 1608 - RNA, 25 nt, Artificial Sequence
  Description of Artificial Sequence: Synthetic oligonucleotide
ucugugaagugugagaaaauuucaa

SEQ ID NO: 1609 - RNA, 25 nt, Artificial Sequence
  Description of Artificial Sequence: Synthetic oligonucleotide
ccuuuaaggaaaugaauccuccuga

SEQ ID NO: 1610 - RNA, 25 nt, Artificial Sequence
  Description of Artificial Sequence: Synthetic oligonucleotide
aaggauacaaaaagugacaucauau

SEQ ID NO: 1611 - RNA, 25 nt, Artificial Sequence
  Description of Artificial Sequence: Synthetic oligonucleotide
agaugcaauuugaaucuucaucaua

SEQ ID NO: 1612 - RNA, 25 nt, Artificial Sequence
  Description of Artificial Sequence: Synthetic oligonucleotide
guucaaaacgaagacuagcuauuaa

SEQ ID NO: 1613 - RNA, 25 nt, Artificial Sequence
  Description of Artificial Sequence: Synthetic oligonucleotide
gugaaaccucaucucuacuaaaaau

SEQ ID NO: 1614 - RNA, 25 nt, Artificial Sequence
  Description of Artificial Sequence: Synthetic oligonucleotide
acgaaagagaagcucuaucucgccu

SEQ ID NO: 1615 - RNA, 25 nt, Artificial Sequence
  Description of Artificial Sequence: Synthetic oligonucleotide
cuccacaagcgccuucgguccaguu

SEQ ID NO: 1616 - RNA, 25 nt, Artificial Sequence
  Description of Artificial Sequence: Synthetic oligonucleotide
gagaagauuccaaagauguagccgc

SEQ ID NO: 1617 - RNA, 25 nt, Artificial Sequence
  Description of Artificial Sequence: Synthetic oligonucleotide
aaucuggauucaaugaggagacuug

SEQ ID NO: 1618 - RNA, 25 nt, Artificial Sequence
  Description of Artificial Sequence: Synthetic oligonucleotide
agaacagauuugagaguagugagga

SEQ ID NO: 1619 - RNA, 25 nt, Artificial Sequence
  Description of Artificial Sequence: Synthetic oligonucleotide
ccagagcugugcagaugaguacaaa

SEQ ID NO: 1620 - RNA, 25 nt, Artificial Sequence
  Description of Artificial Sequence: Synthetic oligonucleotide
ccucagauuguuguuguuaaugggc

SEQ ID NO: 1621 - RNA, 25 nt, Artificial Sequence
  Description of Artificial Sequence: Synthetic oligonucleotide
cuauuuuaauuauuuuuaauuuauu

SEQ ID NO: 1622 - RNA, 25 nt, Artificial Sequence
  Description of Artificial Sequence: Synthetic oligonucleotide
uuuaauuuauuaauauuuaaauaug

SEQ ID NO: 1623 - RNA, 25 nt, Artificial Sequence
  Description of Artificial Sequence: Synthetic oligonucleotide
augcaguuugaauauccuuuguuuc

SEQ ID NO: 1624 - RNA, 25 nt, Artificial Sequence
  Description of Artificial Sequence: Synthetic oligonucleotide
caugcugcuggcgucuaaguguuug

SEQ ID NO: 1625 - RNA, 25 nt, Artificial Sequence
  Description of Artificial Sequence: Synthetic oligonucleotide
agaugugcauuucaccugugacaaa

SEQ ID NO: 1626 - RNA, 25 nt, Artificial Sequence
  Description of Artificial Sequence: Synthetic oligonucleotide
ucaaaaccugugccaggcugaauua

SEQ ID NO: 1627 - RNA, 25 nt, Artificial Sequence
  Description of Artificial Sequence: Synthetic oligonucleotide
gaauguggguagucauucuuacaau

SEQ ID NO: 1628 - RNA, 25 nt, Artificial Sequence
  Description of Artificial Sequence: Synthetic oligonucleotide
auguggguagucauucuuacaauug

SEQ ID NO: 1629 - RNA, 25 nt, Artificial Sequence
  Description of Artificial Sequence: Synthetic oligonucleotide
ugaaaaugagcaucagagaguguac

SEQ ID NO: 1630 - RNA, 25 nt, Artificial Sequence
  Description of Artificial Sequence: Synthetic oligonucleotide
uugcuuuucauguagaacucagcag

SEQ ID NO: 1631 - RNA, 25 nt, Artificial Sequence
  Description of Artificial Sequence: Synthetic oligonucleotide
uguauuucuauauuuauuuucagua

SEQ ID NO: 1632 - RNA, 25 nt, Artificial Sequence
  Description of Artificial Sequence: Synthetic oligonucleotide
uuugauuaauguuucuuaaauggaa

SEQ ID NO: 1633 - RNA, 25 nt, Artificial Sequence
  Description of Artificial Sequence: Synthetic oligonucleotide
caacguguauagugccuaaaauugu

SEQ ID NO: 1634 - RNA, 25 nt, Artificial Sequence
  Description of Artificial Sequence: Synthetic oligonucleotide
cauauccuuggcuacuaacaucugg

SEQ ID NO: 1635 - RNA, 25 nt, Artificial Sequence
  Description of Artificial Sequence: Synthetic oligonucleotide
uacuaacaucuggagacugugagcu

SEQ ID NO: 1636 - RNA, 25 nt, Artificial Sequence
  Description of Artificial Sequence: Synthetic oligonucleotide
cauaaguugugugcuuuuuauuaau

SEQ ID NO: 1637 - RNA, 25 nt, Artificial Sequence
  Description of Artificial Sequence: Synthetic oligonucleotide
gcaucauuuuggcucuucuuacauu

SEQ ID NO: 1638 - RNA, 25 nt, Artificial Sequence
  Description of Artificial Sequence: Synthetic oligonucleotide
gcucuucuuacauuuguaaaaaugu

SEQ ID NO: 1639 - RNA, 25 nt, Artificial Sequence
  Description of Artificial Sequence: Synthetic oligonucleotide
agauuaggucaucuuaauucauauu

SEQ ID NO: 1640 - RNA, 25 nt, Artificial Sequence
  Description of Artificial Sequence: Synthetic oligonucleotide
auggaauugaaagaacuaaucauga

SEQ ID NO: 1641 - RNA, 25 nt, Artificial Sequence
  Description of Artificial Sequence: Synthetic oligonucleotide
cacacucauuccuucugcucuuggg

SEQ ID NO: 1642 - RNA, 25 nt, Artificial Sequence
  Description of Artificial Sequence: Synthetic oligonucleotide
uguagagguaaccaguagcuuugag

SEQ ID NO: 1643 - RNA, 25 nt, Artificial Sequence
  Description of Artificial Sequence: Synthetic oligonucleotide
caaccacaugccacguaauauuuca

SEQ ID NO: 1644 - RNA, 25 nt, Artificial Sequence
  Description of Artificial Sequence: Synthetic oligonucleotide
ucggaaacaaguuauucucuucacu

SEQ ID NO: 1645 - RNA, 25 nt, Artificial Sequence
  Description of Artificial Sequence: Synthetic oligonucleotide
acucccaauaacuaaugcuaagaaa

SEQ ID NO: 1646 - RNA, 25 nt, Artificial Sequence
  Description of Artificial Sequence: Synthetic oligonucleotide
aaugcuaagaaaugcugaaaaucaa

SEQ ID NO: 1647 - RNA, 25 nt, Artificial Sequence
  Description of Artificial Sequence: Synthetic oligonucleotide
gucuuucucuaaauaugauuacuuu

SEQ ID NO: 1648 - RNA, 25 nt, Artificial Sequence
  Description of Artificial Sequence: Synthetic oligonucleotide
ugaauuucaggcauuuuguucuaca

SEQ ID NO: 1649 - RNA, 25 nt, Artificial Sequence
  Description of Artificial Sequence: Synthetic oligonucleotide
cgauucccucucacccgggacucuc

SEQ ID NO: 1650 - RNA, 25 nt, Artificial Sequence
  Description of Artificial Sequence: Synthetic oligonucleotide
aggaaagugaaccuuuaaaguaaag

SEQ ID NO: 1651 - RNA, 25 nt, Artificial Sequence
  Description of Artificial Sequence: Synthetic oligonucleotide
gaggcugcaugcucuggaagccugg

SEQ ID NO: 1652 - RNA, 25 nt, Artificial Sequence
  Description of Artificial Sequence: Synthetic oligonucleotide
ucucugaacagaaaacaaaagagag

SEQ ID NO: 1653 - RNA, 25 nt, Artificial Sequence
  Description of Artificial Sequence: Synthetic oligonucleotide
aacuuggcuguaaucaguuaugccg

SEQ ID NO: 1654 - RNA, 25 nt, Artificial Sequence
  Description of Artificial Sequence: Synthetic oligonucleotide
agaagccaaaauuaaaagaagucca

SEQ ID NO: 1655 - RNA, 25 nt, Artificial Sequence
  Description of Artificial Sequence: Synthetic oligonucleotide
auuaaaagaaguccaggugagguua

SEQ ID NO: 1656 - RNA, 25 nt, Artificial Sequence
  Description of Artificial Sequence: Synthetic oligonucleotide
gaauccggauuaucgggaagaggac

SEQ ID NO: 1657 - RNA, 25 nt, Artificial Sequence
  Description of Artificial Sequence: Synthetic oligonucleotide
aaugugacaucaaagcaaguauugu

SEQ ID NO: 1658 - RNA, 25 nt, Artificial Sequence
  Description of Artificial Sequence: Synthetic oligonucleotide
caucaaagcaaguauuguagcacuc

SEQ ID NO: 1659 - RNA, 25 nt, Artificial Sequence
  Description of Artificial Sequence: Synthetic oligonucleotide
agagagagaaaacaaaaccacaaau

SEQ ID NO: 1660 - RNA, 25 nt, Artificial Sequence
  Description of Artificial Sequence: Synthetic oligonucleotide
ucgcuguaguauuuaagcccauaca

SEQ ID NO: 1661 - RNA, 25 nt, Artificial Sequence
  Description of Artificial Sequence: Synthetic oligonucleotide
cgcuguaguauuuaagcccauacag

SEQ ID NO: 1662 - RNA, 25 nt, Artificial Sequence
  Description of Artificial Sequence: Synthetic oligonucleotide
auuuaagcccauacagaaaccuucc

SEQ ID NO: 1663 - RNA, 25 nt, Artificial Sequence
  Description of Artificial Sequence: Synthetic oligonucleotide
auuaaaauaaacaugguauaccuac

SEQ ID NO: 1664 - RNA, 25 nt, Artificial Sequence
  Description of Artificial Sequence: Synthetic oligonucleotide
cuguucugaucggccaguuuucgga

SEQ ID NO: 1665 - RNA, 25 nt, Artificial Sequence
  Description of Artificial Sequence: Synthetic oligonucleotide
aaauaauuugaacuuuggaacaggg

SEQ ID NO: 1666 - RNA, 25 nt, Artificial Sequence
  Description of Artificial Sequence: Synthetic oligonucleotide
ugcgaccuuaauuuaacuuuccagu

SEQ ID NO: 1667 - RNA, 25 nt, Artificial Sequence
  Description of Artificial Sequence: Synthetic oligonucleotide
cugagaaagcuaaaguuugguuuug

SEQ ID NO: 1668 - RNA, 25 nt, Artificial Sequence
  Description of Artificial Sequence: Synthetic oligonucleotide
aguaaagaugcuacuucccacugua

SEQ ID NO: 1669 - RNA, 25 nt, Artificial Sequence
  Description of Artificial Sequence: Synthetic oligonucleotide
cugcuuaauugcugauaccauauga

SEQ ID NO: 1670 - RNA, 25 nt, Artificial Sequence
  Description of Artificial Sequence: Synthetic oligonucleotide
uaccauaugaaugaaacaugggcug

SEQ ID NO: 1671 - RNA, 25 nt, Artificial Sequence
  Description of Artificial Sequence: Synthetic oligonucleotide
aacuuucuuauccaacuuuuucaua

SEQ ID NO: 1672 - RNA, 25 nt, Artificial Sequence
  Description of Artificial Sequence: Synthetic oligonucleotide
ccuugcaugacaucaugaggccgga

SEQ ID NO: 1673 - RNA, 25 nt, Artificial Sequence
  Description of Artificial Sequence: Synthetic oligonucleotide
ugaauuuguauaugacugcauuugu

SEQ ID NO: 1674 - RNA, 25 nt, Artificial Sequence
  Description of Artificial Sequence: Synthetic oligonucleotide
gaauccuaguagaauguuuacuacc

SEQ ID NO: 1675 - RNA, 25 nt, Artificial Sequence
  Description of Artificial Sequence: Synthetic oligonucleotide
gaaagggaagaauuuuuugaugaaa

SEQ ID NO: 1676 - RNA, 25 nt, Artificial Sequence
  Description of Artificial Sequence: Synthetic oligonucleotide
uaucggcaugccagugugugaauuu

SEQ ID NO: 1677 - RNA, 25 nt, Artificial Sequence
  Description of Artificial Sequence: Synthetic oligonucleotide
caccucauaguagagcaauguaugu

SEQ ID NO: 1678 - RNA, 25 nt, Artificial Sequence
  Description of Artificial Sequence: Synthetic oligonucleotide
ccagaauugccaaagcacauauaua

SEQ ID NO: 1679 - RNA, 25 nt, Artificial Sequence
  Description of Artificial Sequence: Synthetic oligonucleotide
uggugaucuggguaauaguuucucc

SEQ ID NO: 1680 - RNA, 25 nt, Artificial Sequence
  Description of Artificial Sequence: Synthetic oligonucleotide
gaucuggguaauaguuucuccaaau

SEQ ID NO: 1681 - RNA, 25 nt, Artificial Sequence
  Description of Artificial Sequence: Synthetic oligonucleotide
ggaugugaugaauacuuccuagaaa

SEQ ID NO: 1682 - RNA, 25 nt, Artificial Sequence
  Description of Artificial Sequence: Synthetic oligonucleotide
cauuuccacagcuacaccauauaug

SEQ ID NO: 1683 - RNA, 25 nt, Artificial Sequence
  Description of Artificial Sequence: Synthetic oligonucleotide
acagcuacaccauauaugaauggag

SEQ ID NO: 1684 - RNA, 25 nt, Artificial Sequence
  Description of Artificial Sequence: Synthetic oligonucleotide
ugcaguucuuacacgagaagaagau

SEQ ID NO: 1685 - RNA, 25 nt, Artificial Sequence
  Description of Artificial Sequence: Synthetic oligonucleotide
acgagaagaagaucauuuacaggga

SEQ ID NO: 1686 - RNA, 25 nt, Artificial Sequence
  Description of Artificial Sequence: Synthetic oligonucleotide
cgagaagaagaucauuuacagggac

SEQ ID NO: 1687 - RNA, 25 nt, Artificial Sequence
  Description of Artificial Sequence: Synthetic oligonucleotide
aagaagaucauuuacagggaccuga

SEQ ID NO: 1688 - RNA, 25 nt, Artificial Sequence
  Description of Artificial Sequence: Synthetic oligonucleotide
agaggaagagguguuugacugcauc

SEQ ID NO: 1689 - RNA, 25 nt, Artificial Sequence
  Description of Artificial Sequence: Synthetic oligonucleotide
gaggaagagguguuugacugcaucg

SEQ ID NO: 1690 - RNA, 25 nt, Artificial Sequence
  Description of Artificial Sequence: Synthetic oligonucleotide
cuacuuugagggcgaguucacaggg

SEQ ID NO: 1691 - RNA, 25 nt, Artificial Sequence
  Description of Artificial Sequence: Synthetic oligonucleotide
agggcaucuccuggcaccucugucc

SEQ ID NO: 1692 - RNA, 25 nt, Artificial Sequence
  Description of Artificial Sequence: Synthetic oligonucleotide
ggagugauaugguuugucuuuuuaa

SEQ ID NO: 1693 - RNA, 25 nt, Artificial Sequence
  Description of Artificial Sequence: Synthetic oligonucleotide
gagugauaugguuugucuuuuuaag

SEQ ID NO: 1694 - RNA, 25 nt, Artificial Sequence
  Description of Artificial Sequence: Synthetic oligonucleotide
ugcaguaaagauccuaaagguuguc

SEQ ID NO: 1695 - RNA, 25 nt, Artificial Sequence
  Description of Artificial Sequence: Synthetic oligonucleotide
aguaaagauccuaaagguugucgac

SEQ ID NO: 1696 - RNA, 25 nt, Artificial Sequence
  Description of Artificial Sequence: Synthetic oligonucleotide
ugacaaaggacaaccuggcaauugu

SEQ ID NO: 1697 - RNA, 25 nt, Artificial Sequence
  Description of Artificial Sequence: Synthetic oligonucleotide
gcaauugugacccaguggugcgagg

SEQ ID NO: 1698 - RNA, 25 nt, Artificial Sequence
  Description of Artificial Sequence: Synthetic oligonucleotide
aacaucauccauagagacaugaaau

SEQ ID NO: 1699 - RNA, 25 nt, Artificial Sequence
  Description of Artificial Sequence: Synthetic oligonucleotide
ugaaauccaacaauauauuucucca

SEQ ID NO: 1700 - RNA, 25 nt, Artificial Sequence
  Description of Artificial Sequence: Synthetic oligonucleotide
aacaauauauuucuccaugaaggcu

SEQ ID NO: 1701 - RNA, 25 nt, Artificial Sequence
  Description of Artificial Sequence: Synthetic oligonucleotide
aacaguaaagucacgcuggaguggu

SEQ ID NO: 1702 - RNA, 25 nt, Artificial Sequence
  Description of Artificial Sequence: Synthetic oligonucleotide
ugugaagaaaguaaaggaagagagg

SEQ ID NO: 1703 - RNA, 25 nt, Artificial Sequence
  Description of Artificial Sequence: Synthetic oligonucleotide
cuuccgagccauccuugcaucgggc

SEQ ID NO: 1704 - RNA, 25 nt, Artificial Sequence
  Description of Artificial Sequence: Synthetic oligonucleotide
aauggagguugaauauccuacugug

SEQ ID NO: 1705 - RNA, 25 nt, Artificial Sequence
  Description of Artificial Sequence: Synthetic oligonucleotide
ggagguugaauauccuacuguguaa

SEQ ID NO: 1706 - RNA, 25 nt, Artificial Sequence
  Description of Artificial Sequence: Synthetic oligonucleotide
auuuugaguuuucccuuguagugua

SEQ ID NO: 1707 - RNA, 25 nt, Artificial Sequence
  Description of Artificial Sequence: Synthetic oligonucleotide
uauccuguuuguucuuuguugauug

SEQ ID NO: 1708 - RNA, 25 nt, Artificial Sequence
  Description of Artificial Sequence: Synthetic oligonucleotide
ccuguuuguucuuuguugauugaaa

SEQ ID NO: 1709 - RNA, 25 nt, Artificial Sequence
  Description of Artificial Sequence: Synthetic oligonucleotide
cucuacagccuucuuuuucuuccau

SEQ ID NO: 1710 - RNA, 25 nt, Artificial Sequence
  Description of Artificial Sequence: Synthetic oligonucleotide
ucuuccauagcuaaucuuccuucua

SEQ ID NO: 1711 - RNA, 25 nt, Artificial Sequence
  Description of Artificial Sequence: Synthetic oligonucleotide
auaaucuuccuguugaaugcuucau

SEQ ID NO: 1712 - RNA, 25 nt, Artificial Sequence
  Description of Artificial Sequence: Synthetic oligonucleotide
uaaucuuccuguugaaugcuucaug

SEQ ID NO: 1713 - RNA, 25 nt, Artificial Sequence
  Description of Artificial Sequence: Synthetic oligonucleotide
cuucaugacuugaauucuacuuuga

SEQ ID NO: 1714 - RNA, 25 nt, Artificial Sequence
  Description of Artificial Sequence: Synthetic oligonucleotide
aagagggagagaagcaacuacagac

SEQ ID NO: 1715 - RNA, 25 nt, Artificial Sequence
  Description of Artificial Sequence: Synthetic oligonucleotide
cgucuccuaccagaccaaggucaac

SEQ ID NO: 1716 - RNA, 25 nt, Artificial Sequence
  Description of Artificial Sequence: Synthetic oligonucleotide
gaucaaucggcccgacuaucucgac

SEQ ID NO: 1717 - RNA, 25 nt, Artificial Sequence
  Description of Artificial Sequence: Synthetic oligonucleotide
ggacgaacauccaaccuucccaaac

SEQ ID NO: 1718 - RNA, 25 nt, Artificial Sequence
  Description of Artificial Sequence: Synthetic oligonucleotide
agggucggaacccaagcuuagaacu

SEQ ID NO: 1719 - RNA, 25 nt, Artificial Sequence
  Description of Artificial Sequence: Synthetic oligonucleotide
ucggaacccaagcuuagaacuuuaa

SEQ ID NO: 1720 - RNA, 25 nt, Artificial Sequence
  Description of Artificial Sequence: Synthetic oligonucleotide
acccaagcuuagaacuuuaagcaac

SEQ ID NO: 1721 - RNA, 25 nt, Artificial Sequence
  Description of Artificial Sequence: Synthetic oligonucleotide
gaacuuuaagcaacaagaccaccac

SEQ ID NO: 1722 - RNA, 25 nt, Artificial Sequence
  Description of Artificial Sequence: Synthetic oligonucleotide
acuauucaguggcgagaaauaaagu

SEQ ID NO: 1723 - RNA, 25 nt, Artificial Sequence
  Description of Artificial Sequence: Synthetic oligonucleotide
cuauucaguggcgagaaauaaaguu

SEQ ID NO: 1724 - RNA, 25 nt, Artificial Sequence
  Description of Artificial Sequence: Synthetic oligonucleotide
aaacacagauaacaggaaaugaucc

SEQ ID NO: 1725 - RNA, 25 nt, Artificial Sequence
  Description of Artificial Sequence: Synthetic oligonucleotide
cuuaagaaaagagaagaaaugaaac

SEQ ID NO: 1726 - RNA, 25 nt, Artificial Sequence
  Description of Artificial Sequence: Synthetic oligonucleotide
cugaaggaguguguuuccauccucc

SEQ ID NO: 1727 - RNA, 25 nt, Artificial Sequence
  Description of Artificial Sequence: Synthetic oligonucleotide
ucaccgcgggacugaaaaucuuuga

SEQ ID NO: 1728 - RNA, 25 nt, Artificial Sequence
  Description of Artificial Sequence: Synthetic oligonucleotide
agcagaaauaagcgugccguucagg

SEQ ID NO: 1729 - RNA, 25 nt, Artificial Sequence
  Description of Artificial Sequence: Synthetic oligonucleotide
aagcgugccguucaggguccagaag

SEQ ID NO: 1730 - RNA, 25 nt, Artificial Sequence
  Description of Artificial Sequence: Synthetic oligonucleotide
agaaacagucacucaagacugcuug

SEQ ID NO: 1731 - RNA, 25 nt, Artificial Sequence
  Description of Artificial Sequence: Synthetic oligonucleotide
agaggaagaagguccaugucuuugg

SEQ ID NO: 1732 - RNA, 25 nt, Artificial Sequence
  Description of Artificial Sequence: Synthetic oligonucleotide
uguauucaaaauaugccugaaacac

SEQ ID NO: 1733 - RNA, 25 nt, Artificial Sequence
  Description of Artificial Sequence: Synthetic oligonucleotide
auuuuccucccuuucucuguaccuc

SEQ ID NO: 1734 - RNA, 25 nt, Artificial Sequence
  Description of Artificial Sequence: Synthetic oligonucleotide
caaagaaagauagagcaagacaaga

SEQ ID NO: 1735 - RNA, 25 nt, Artificial Sequence
  Description of Artificial Sequence: Synthetic oligonucleotide
aagaaagauagagcaagacaagaaa

SEQ ID NO: 1736 - RNA, 25 nt, Artificial Sequence
  Description of Artificial Sequence: Synthetic oligonucleotide
gaaagcauuuguuuguacaagaucc

SEQ ID NO: 1737 - RNA, 25 nt, Artificial Sequence
  Description of Artificial Sequence: Synthetic oligonucleotide
ugaguuaaacgaacguacuugcaga

SEQ ID NO: 1738 - RNA, 25 nt, Artificial Sequence
  Description of Artificial Sequence: Synthetic oligonucleotide
acugauacagaacgaucgauacaga

SEQ ID NO: 1739 - RNA, 25 nt, Artificial Sequence
  Description of Artificial Sequence: Synthetic oligonucleotide
auauuauauauauauaaaaauaaau

SEQ ID NO: 1740 - RNA, 25 nt, Artificial Sequence
  Description of Artificial Sequence: Synthetic oligonucleotide
auuauauauauauaaaaauaaauau

SEQ ID NO: 1741 - RNA, 25 nt, Artificial Sequence
  Description of Artificial Sequence: Synthetic oligonucleotide
ucacuggauguauuugacugcugug

SEQ ID NO: 1742 - RNA, 25 nt, Artificial Sequence
  Description of Artificial Sequence: Synthetic oligonucleotide
cagggaagaggaggagaugagagac

SEQ ID NO: 1743 - RNA, 25 nt, Artificial Sequence
  Description of Artificial Sequence: Synthetic oligonucleotide
augaucuuuuuuuugucccacuugg

SEQ ID NO: 1744 - RNA, 27 nt, Artificial Sequence
  Description of Artificial Sequence: Synthetic oligonucleotide
ggccgugaacuccucaucaaaauaccu

SEQ ID NO: 1745 - RNA, 27 nt, Artificial Sequence
  Description of Artificial Sequence: Synthetic oligonucleotide
uggugugauggugaucaucugggccgu

SEQ ID NO: 1746 - RNA, 27 nt, Artificial Sequence
  Description of Artificial Sequence: Synthetic oligonucleotide
aaacccgcaggauaguuuucuucccua

SEQ ID NO: 1747 - RNA, 27 nt, Artificial Sequence
  Description of Artificial Sequence: Synthetic oligonucleotide
caaacuggaugaaauaaauuaaaaccc

SEQ ID NO: 1748 - RNA, 27 nt, Artificial Sequence
  Description of Artificial Sequence: Synthetic oligonucleotide
agaaguccuuaacauuucccuacguga

SEQ ID NO: 1749 - RNA, 27 nt, Artificial Sequence
  Description of Artificial Sequence: Synthetic oligonucleotide
cucugucccacuggguaaacccuggcc

SEQ ID NO: 1750 - RNA, 27 nt, Artificial Sequence
  Description of Artificial Sequence: Synthetic oligonucleotide
cacaauaacaaauuuaaaccuugcucc

SEQ ID NO: 1751 - RNA, 27 nt, Artificial Sequence
  Description of Artificial Sequence: Synthetic oligonucleotide
aaaugcauuugaacaacauaauacaca

SEQ ID NO: 1752 - RNA, 27 nt, Artificial Sequence
  Description of Artificial Sequence: Synthetic oligonucleotide
ggcuuuccugucacaaagauuaaaaac

SEQ ID NO: 1753 - RNA, 27 nt, Artificial Sequence
  Description of Artificial Sequence: Synthetic oligonucleotide
agggcuuuccugucacaaagauuaaaa

SEQ ID NO: 1754 - RNA, 27 nt, Artificial Sequence
  Description of Artificial Sequence: Synthetic oligonucleotide
ggccaugcugggagacauaagcagcag

SEQ ID NO: 1755 - RNA, 27 nt, Artificial Sequence
  Description of Artificial Sequence: Synthetic oligonucleotide
ucagggagaagcuucugaaacacuucu

SEQ ID NO: 1756 - RNA, 27 nt, Artificial Sequence
  Description of Artificial Sequence: Synthetic oligonucleotide
aagggcuucuuccuuauugauggucag

SEQ ID NO: 1757 - RNA, 27 nt, Artificial Sequence
  Description of Artificial Sequence: Synthetic oligonucleotide
ugaagggcuucuuccuuauugaugguc

SEQ ID NO: 1758 - RNA, 27 nt, Artificial Sequence
  Description of Artificial Sequence: Synthetic oligonucleotide
cgcugaagggcuucuuccuuauugaug

SEQ ID NO: 1759 - RNA, 27 nt, Artificial Sequence
  Description of Artificial Sequence: Synthetic oligonucleotide
gccgcugaagggcuucuuccuuauuga

SEQ ID NO: 1760 - RNA, 27 nt, Artificial Sequence
  Description of Artificial Sequence: Synthetic oligonucleotide
acuggccgcugaagggcuucuuccuua

SEQ ID NO: 1761 - RNA, 27 nt, Artificial Sequence
  Description of Artificial Sequence: Synthetic oligonucleotide
cggagcuuuucaccuuuaguuaugcuu

SEQ ID NO: 1762 - RNA, 27 nt, Artificial Sequence
  Description of Artificial Sequence: Synthetic oligonucleotide
ccggagcuuuucaccuuuaguuaugcu

SEQ ID NO: 1763 - RNA, 27 nt, Artificial Sequence
  Description of Artificial Sequence: Synthetic oligonucleotide
cagacuguugacuggcgugauguaguu

SEQ ID NO: 1764 - RNA, 27 nt, Artificial Sequence
  Description of Artificial Sequence: Synthetic oligonucleotide
cuuuugaacucugcuuaaauccagugg

SEQ ID NO: 1765 - RNA, 27 nt, Artificial Sequence
  Description of Artificial Sequence: Synthetic oligonucleotide
gcuuuugaacucugcuuaaauccagug

SEQ ID NO: 1766 - RNA, 27 nt, Artificial Sequence
  Description of Artificial Sequence: Synthetic oligonucleotide
agggcuuuugaacucugcuuaaaucca

SEQ ID NO: 1767 - RNA, 27 nt, Artificial Sequence
  Description of Artificial Sequence: Synthetic oligonucleotide
aagggcuuuugaacucugcuuaaaucc

SEQ ID NO: 1768 - RNA, 27 nt, Artificial Sequence
  Description of Artificial Sequence: Synthetic oligonucleotide
ugaagggcuuuugaacucugcuuaaau

SEQ ID NO: 1769 - RNA, 27 nt, Artificial Sequence
  Description of Artificial Sequence: Synthetic oligonucleotide
cugaagggcuuuugaacucugcuuaaa

SEQ ID NO: 1770 - RNA, 27 nt, Artificial Sequence
  Description of Artificial Sequence: Synthetic oligonucleotide
cgcugaagggcuuuugaacucugcuua

SEQ ID NO: 1771 - RNA, 27 nt, Artificial Sequence
  Description of Artificial Sequence: Synthetic oligonucleotide
cgagcggcuucacucagacccugaggc

SEQ ID NO: 1772 - RNA, 27 nt, Artificial Sequence
  Description of Artificial Sequence: Synthetic oligonucleotide
uugacuggcgugauguaguugcuuggg

SEQ ID NO: 1773 - RNA, 27 nt, Artificial Sequence
  Description of Artificial Sequence: Synthetic oligonucleotide
cacgcaccaagaagcugccauugaucc

SEQ ID NO: 1774 - RNA, 27 nt, Artificial Sequence
  Description of Artificial Sequence: Synthetic oligonucleotide
cugaugaauccaaugugggcuggaauc

SEQ ID NO: 1775 - RNA, 27 nt, Artificial Sequence
  Description of Artificial Sequence: Synthetic oligonucleotide
cuuagguauuccacauucucagcugug

SEQ ID NO: 1776 - RNA, 27 nt, Artificial Sequence
  Description of Artificial Sequence: Synthetic oligonucleotide
ugagccucaaauuaggagauacguuuu

SEQ ID NO: 1777 - RNA, 27 nt, Artificial Sequence
  Description of Artificial Sequence: Synthetic oligonucleotide
ccaauuguagagaaauuauuuuaggaa

SEQ ID NO: 1778 - RNA, 27 nt, Artificial Sequence
  Description of Artificial Sequence: Synthetic oligonucleotide
ggcuccuaacuagcugaaucuuccaau

SEQ ID NO: 1779 - RNA, 27 nt, Artificial Sequence
  Description of Artificial Sequence: Synthetic oligonucleotide
guggauauugacuaggagaguuuaaaa

SEQ ID NO: 1780 - RNA, 27 nt, Artificial Sequence
  Description of Artificial Sequence: Synthetic oligonucleotide
ugugacugaacauaacuguaggcugaa

SEQ ID NO: 1781 - RNA, 27 nt, Artificial Sequence
  Description of Artificial Sequence: Synthetic oligonucleotide
guaugugugugugacugaacauaacug

SEQ ID NO: 1782 - RNA, 27 nt, Artificial Sequence
  Description of Artificial Sequence: Synthetic oligonucleotide
aagcaaaaggaacauuuuguaugugug

SEQ ID NO: 1783 - RNA, 27 nt, Artificial Sequence
  Description of Artificial Sequence: Synthetic oligonucleotide
aaaaauuacuuuaaaagcaaaaggaac

SEQ ID NO: 1784 - RNA, 27 nt, Artificial Sequence
  Description of Artificial Sequence: Synthetic oligonucleotide
ccauugacuguugcuucacaggucaga

SEQ ID NO: 1785 - RNA, 27 nt, Artificial Sequence
  Description of Artificial Sequence: Synthetic oligonucleotide
auugguuugucgaugugugagauaguu

SEQ ID NO: 1786 - RNA, 27 nt, Artificial Sequence
  Description of Artificial Sequence: Synthetic oligonucleotide
agugguagcaguacaauugaggacaag

SEQ ID NO: 1787 - RNA, 27 nt, Artificial Sequence
  Description of Artificial Sequence: Synthetic oligonucleotide
uaagaccgcuugccagcuacgguuuca

SEQ ID NO: 1788 - RNA, 27 nt, Artificial Sequence
  Description of Artificial Sequence: Synthetic oligonucleotide
agccgguaagaccgcuugccagcuacg

SEQ ID NO: 1789 - RNA, 27 nt, Artificial Sequence
  Description of Artificial Sequence: Synthetic oligonucleotide
gguaacccaucuuuuaaccauacaacu

SEQ ID NO: 1790 - RNA, 27 nt, Artificial Sequence
  Description of Artificial Sequence: Synthetic oligonucleotide
ucgcagguaacccaucuuuuaaccaua

SEQ ID NO: 1791 - RNA, 27 nt, Artificial Sequence
  Description of Artificial Sequence: Synthetic oligonucleotide
cucagcaagauuguauaauucccugca

SEQ ID NO: 1792 - RNA, 27 nt, Artificial Sequence
  Description of Artificial Sequence: Synthetic oligonucleotide
acuguuuuaugcucagcaagauuguau

SEQ ID NO: 1793 - RNA, 27 nt, Artificial Sequence
  Description of Artificial Sequence: Synthetic oligonucleotide
aggauaaaggacucuucauuauuggaa

SEQ ID NO: 1794 - RNA, 27 nt, Artificial Sequence
  Description of Artificial Sequence: Synthetic oligonucleotide
caacuugcguuggaacauccaaagugu

SEQ ID NO: 1795 - RNA, 27 nt, Artificial Sequence
  Description of Artificial Sequence: Synthetic oligonucleotide
augguuucaguuuaguggaagcauuua

SEQ ID NO: 1796 - RNA, 27 nt, Artificial Sequence
  Description of Artificial Sequence: Synthetic oligonucleotide
auauuuaacaaagucaaacuuucucac

SEQ ID NO: 1797 - RNA, 27 nt, Artificial Sequence
  Description of Artificial Sequence: Synthetic oligonucleotide
aacuuuuaauauacaguaguucuuuuc

SEQ ID NO: 1798 - RNA, 27 nt, Artificial Sequence
  Description of Artificial Sequence: Synthetic oligonucleotide
guuaagucaaaacccguauuucuaaag

SEQ ID NO: 1799 - RNA, 27 nt, Artificial Sequence
  Description of Artificial Sequence: Synthetic oligonucleotide
gugcugaguuugcuguacccauguuga

SEQ ID NO: 1800 - RNA, 27 nt, Artificial Sequence
  Description of Artificial Sequence: Synthetic oligonucleotide
ugaggucagcaucuucugugucuuuac

SEQ ID NO: 1801 - RNA, 27 nt, Artificial Sequence
  Description of Artificial Sequence: Synthetic oligonucleotide
gcgaucugaauaaaccucccuacuagc

SEQ ID NO: 1802 - RNA, 27 nt, Artificial Sequence
  Description of Artificial Sequence: Synthetic oligonucleotide
aucccagaacccugcugcagaaggcca

SEQ ID NO: 1803 - RNA, 27 nt, Artificial Sequence
  Description of Artificial Sequence: Synthetic oligonucleotide
cauaauuuccaauauguaccagaccuu

SEQ ID NO: 1804 - RNA, 27 nt, Artificial Sequence
  Description of Artificial Sequence: Synthetic oligonucleotide
cuagugcuuccaucggaaggacuaggu

SEQ ID NO: 1805 - RNA, 27 nt, Artificial Sequence
  Description of Artificial Sequence: Synthetic oligonucleotide
uccacauaaaaacaauauucacuggga

SEQ ID NO: 1806 - RNA, 27 nt, Artificial Sequence
  Description of Artificial Sequence: Synthetic oligonucleotide
ucuaccaauuccaacuugaauucauug

SEQ ID NO: 1807 - RNA, 27 nt, Artificial Sequence
  Description of Artificial Sequence: Synthetic oligonucleotide
ucuccaagucuaaaucuguguccugag

SEQ ID NO: 1808 - RNA, 27 nt, Artificial Sequence
  Description of Artificial Sequence: Synthetic oligonucleotide
uggaauacuguaacugugcuuugagga

SEQ ID NO: 1809 - RNA, 27 nt, Artificial Sequence
  Description of Artificial Sequence: Synthetic oligonucleotide
uuaauucaucagugguggcagugguag

SEQ ID NO: 1810 - RNA, 27 nt, Artificial Sequence
  Description of Artificial Sequence: Synthetic oligonucleotide
gugaugauguggcacuaguaguuucuu

SEQ ID NO: 1811 - RNA, 27 nt, Artificial Sequence
  Description of Artificial Sequence: Synthetic oligonucleotide
ucuguuuggugaggcuguccgacuuug

SEQ ID NO: 1812 - RNA, 27 nt, Artificial Sequence
  Description of Artificial Sequence: Synthetic oligonucleotide
ccaucauguuccauuuuucgcuuucuc

SEQ ID NO: 1813 - RNA, 27 nt, Artificial Sequence
  Description of Artificial Sequence: Synthetic oligonucleotide
gcagucuacaugcuaaaucagagggua

SEQ ID NO: 1814 - RNA, 27 nt, Artificial Sequence
  Description of Artificial Sequence: Synthetic oligonucleotide
cauaaauagauccuuaaauagcucaaa

SEQ ID NO: 1815 - RNA, 27 nt, Artificial Sequence
  Description of Artificial Sequence: Synthetic oligonucleotide
ugauaauagugcuuuuucaccuuuuuc

SEQ ID NO: 1816 - RNA, 27 nt, Artificial Sequence
  Description of Artificial Sequence: Synthetic oligonucleotide
gcagaacugauaauagugcuuuuucac

SEQ ID NO: 1817 - RNA, 27 nt, Artificial Sequence
  Description of Artificial Sequence: Synthetic oligonucleotide
guagguuuaaucuuucuuuucagccau

SEQ ID NO: 1818 - RNA, 27 nt, Artificial Sequence
  Description of Artificial Sequence: Synthetic oligonucleotide
agaaggauuuuauuauaaggguuuaau

SEQ ID NO: 1819 - RNA, 27 nt, Artificial Sequence
  Description of Artificial Sequence: Synthetic oligonucleotide
gucuacagcauuggcuaauaguaugaa

SEQ ID NO: 1820 - RNA, 27 nt, Artificial Sequence
  Description of Artificial Sequence: Synthetic oligonucleotide
cuauuccuaucaaaaugcuucugucua

SEQ ID NO: 1821 - RNA, 27 nt, Artificial Sequence
  Description of Artificial Sequence: Synthetic oligonucleotide
ucagggccauuaucuuauuugcucuau

SEQ ID NO: 1822 - RNA, 27 nt, Artificial Sequence
  Description of Artificial Sequence: Synthetic oligonucleotide
ugcuugaggaagagaaaaauguugguc

SEQ ID NO: 1823 - RNA, 27 nt, Artificial Sequence
  Description of Artificial Sequence: Synthetic oligonucleotide
ugggcugaacuuuucucauacuuaaag

SEQ ID NO: 1824 - RNA, 27 nt, Artificial Sequence
  Description of Artificial Sequence: Synthetic oligonucleotide
gguucagcagccaucuuuauuccugcg

SEQ ID NO: 1825 - RNA, 27 nt, Artificial Sequence
  Description of Artificial Sequence: Synthetic oligonucleotide
ugaagagaacuuggucauucaaauuuc

SEQ ID NO: 1826 - RNA, 27 nt, Artificial Sequence
  Description of Artificial Sequence: Synthetic oligonucleotide
cucuaggcuggcuaucuuuauacauac

SEQ ID NO: 1827 - RNA, 27 nt, Artificial Sequence
  Description of Artificial Sequence: Synthetic oligonucleotide
acacuucacagagauaguuacagccau

SEQ ID NO: 1828 - RNA, 27 nt, Artificial Sequence
  Description of Artificial Sequence: Synthetic oligonucleotide
uugaaauuuucucacacuucacagaga

SEQ ID NO: 1829 - RNA, 27 nt, Artificial Sequence
  Description of Artificial Sequence: Synthetic oligonucleotide
ucaggaggauucauuuccuuaaaggaa

SEQ ID NO: 1830 - RNA, 27 nt, Artificial Sequence
  Description of Artificial Sequence: Synthetic oligonucleotide
auaugaugucacuuuuuguauccuuga

SEQ ID NO: 1831 - RNA, 27 nt, Artificial Sequence
  Description of Artificial Sequence: Synthetic oligonucleotide
uaugaugaagauucaaauugcaucuua

SEQ ID NO: 1832 - RNA, 27 nt, Artificial Sequence
  Description of Artificial Sequence: Synthetic oligonucleotide
uuaauagcuagucuucguuuugaacag

SEQ ID NO: 1833 - RNA, 27 nt, Artificial Sequence
  Description of Artificial Sequence: Synthetic oligonucleotide
auuuuuaguagagaugagguuucacca

SEQ ID NO: 1834 - RNA, 27 nt, Artificial Sequence
  Description of Artificial Sequence: Synthetic oligonucleotide
aggcgagauagagcuucucuuucguuc

SEQ ID NO: 1835 - RNA, 27 nt, Artificial Sequence
  Description of Artificial Sequence: Synthetic oligonucleotide
aacuggaccgaaggcgcuuguggagaa

SEQ ID NO: 1836 - RNA, 27 nt, Artificial Sequence
  Description of Artificial Sequence: Synthetic oligonucleotide
gcggcuacaucuuuggaaucuucuccu

SEQ ID NO: 1837 - RNA, 27 nt, Artificial Sequence
  Description of Artificial Sequence: Synthetic oligonucleotide
caagucuccucauugaauccagauugg

SEQ ID NO: 1838 - RNA, 27 nt, Artificial Sequence
  Description of Artificial Sequence: Synthetic oligonucleotide
uccucacuacucucaaaucuguucugg

SEQ ID NO: 1839 - RNA, 27 nt, Artificial Sequence
  Description of Artificial Sequence: Synthetic oligonucleotide
uuuguacucaucugcacagcucuggcu

SEQ ID NO: 1840 - RNA, 27 nt, Artificial Sequence
  Description of Artificial Sequence: Synthetic oligonucleotide
gcccauuaacaacaacaaucugaggug

SEQ ID NO: 1841 - RNA, 27 nt, Artificial Sequence
  Description of Artificial Sequence: Synthetic oligonucleotide
aauaaauuaaaaauaauuaaaauagug

SEQ ID NO: 1842 - RNA, 27 nt, Artificial Sequence
  Description of Artificial Sequence: Synthetic oligonucleotide
cauauuuaaauauuaauaaauuaaaaa

SEQ ID NO: 1843 - RNA, 27 nt, Artificial Sequence
  Description of Artificial Sequence: Synthetic oligonucleotide
gaaacaaaggauauucaaacugcauag

SEQ ID NO: 1844 - RNA, 27 nt, Artificial Sequence
  Description of Artificial Sequence: Synthetic oligonucleotide
caaacacuuagacgccagcagcauggg

SEQ ID NO: 1845 - RNA, 27 nt, Artificial Sequence
  Description of Artificial Sequence: Synthetic oligonucleotide
uuugucacaggugaaaugcacaucuga

SEQ ID NO: 1846 - RNA, 27 nt, Artificial Sequence
  Description of Artificial Sequence: Synthetic oligonucleotide
uaauucagccuggcacagguuuugauc

SEQ ID NO: 1847 - RNA, 27 nt, Artificial Sequence
  Description of Artificial Sequence: Synthetic oligonucleotide
auuguaagaaugacuacccacauucac

SEQ ID NO: 1848 - RNA, 27 nt, Artificial Sequence
  Description of Artificial Sequence: Synthetic oligonucleotide
caauuguaagaaugacuacccacauuc

SEQ ID NO: 1849 - RNA, 27 nt, Artificial Sequence
  Description of Artificial Sequence: Synthetic oligonucleotide
guacacucucugaugcucauuuucaua

SEQ ID NO: 1850 - RNA, 27 nt, Artificial Sequence
  Description of Artificial Sequence: Synthetic oligonucleotide
cugcugaguucuacaugaaaagcaaau

SEQ ID NO: 1851 - RNA, 27 nt, Artificial Sequence
  Description of Artificial Sequence: Synthetic oligonucleotide
uacugaaaauaaauauagaaauacaac

SEQ ID NO: 1852 - RNA, 27 nt, Artificial Sequence
  Description of Artificial Sequence: Synthetic oligonucleotide
uuccauuuaagaaacauuaaucaaaac

SEQ ID NO: 1853 - RNA, 27 nt, Artificial Sequence
  Description of Artificial Sequence: Synthetic oligonucleotide
acaauuuuaggcacuauacacguuguu

SEQ ID NO: 1854 - RNA, 27 nt, Artificial Sequence
  Description of Artificial Sequence: Synthetic oligonucleotide
ccagauguuaguagccaaggauauggu

SEQ ID NO: 1855 - RNA, 27 nt, Artificial Sequence
  Description of Artificial Sequence: Synthetic oligonucleotide
agcucacagucuccagauguuaguagc

SEQ ID NO: 1856 - RNA, 27 nt, Artificial Sequence
  Description of Artificial Sequence: Synthetic oligonucleotide
auuaauaaaaagcacacaacuuauggc

SEQ ID NO: 1857 - RNA, 27 nt, Artificial Sequence
  Description of Artificial Sequence: Synthetic oligonucleotide
aauguaagaagagccaaaaugaugcau

SEQ ID NO: 1858 - RNA, 27 nt, Artificial Sequence
  Description of Artificial Sequence: Synthetic oligonucleotide
acauuuuuacaaauguaagaagagcca

SEQ ID NO: 1859 - RNA, 27 nt, Artificial Sequence
  Description of Artificial Sequence: Synthetic oligonucleotide
aauaugaauuaagaugaccuaaucugu

SEQ ID NO: 1860 - RNA, 27 nt, Artificial Sequence
  Description of Artificial Sequence: Synthetic oligonucleotide
ucaugauuaguucuuucaauuccaucc

SEQ ID NO: 1861 - RNA, 27 nt, Artificial Sequence
  Description of Artificial Sequence: Synthetic oligonucleotide
cccaagagcagaaggaaugagugugca

SEQ ID NO: 1862 - RNA, 27 nt, Artificial Sequence
  Description of Artificial Sequence: Synthetic oligonucleotide
cucaaagcuacugguuaccucuacacc

SEQ ID NO: 1863 - RNA, 27 nt, Artificial Sequence
  Description of Artificial Sequence: Synthetic oligonucleotide
ugaaauauuacguggcaugugguuggg

SEQ ID NO: 1864 - RNA, 27 nt, Artificial Sequence
  Description of Artificial Sequence: Synthetic oligonucleotide
agugaagagaauaacuuguuuccgaag

SEQ ID NO: 1865 - RNA, 27 nt, Artificial Sequence
  Description of Artificial Sequence: Synthetic oligonucleotide
uuucuuagcauuaguuauugggaguga

SEQ ID NO: 1866 - RNA, 27 nt, Artificial Sequence
  Description of Artificial Sequence: Synthetic oligonucleotide
uugauuuucagcauuucuuagcauuag

SEQ ID NO: 1867 - RNA, 27 nt, Artificial Sequence
  Description of Artificial Sequence: Synthetic oligonucleotide
aaaguaaucauauuuagagaaagacag

SEQ ID NO: 1868 - RNA, 27 nt, Artificial Sequence
  Description of Artificial Sequence: Synthetic oligonucleotide
uguagaacaaaaugccugaaauucagc

SEQ ID NO: 1869 - RNA, 27 nt, Artificial Sequence
  Description of Artificial Sequence: Synthetic oligonucleotide
gagagucccgggugagagggaaucgcc

SEQ ID NO: 1870 - RNA, 27 nt, Artificial Sequence
  Description of Artificial Sequence: Synthetic oligonucleotide
cuuuacuuuaaagguucacuuuccuug

SEQ ID NO: 1871 - RNA, 27 nt, Artificial Sequence
  Description of Artificial Sequence: Synthetic oligonucleotide
ccaggcuuccagagcaugcagccuccu

SEQ ID NO: 1872 - RNA, 27 nt, Artificial Sequence
  Description of Artificial Sequence: Synthetic oligonucleotide
cucucuuuuguuuucuguucagagaaa

SEQ ID NO: 1873 - RNA, 27 nt, Artificial Sequence
  Description of Artificial Sequence: Synthetic oligonucleotide
cggcauaacugauuacagccaaguuca

SEQ ID NO: 1874 - RNA, 27 nt, Artificial Sequence
  Description of Artificial Sequence: Synthetic oligonucleotide
uggacuucuuuuaauuuuggcuucuuc

SEQ ID NO: 1875 - RNA, 27 nt, Artificial Sequence
  Description of Artificial Sequence: Synthetic oligonucleotide
uaaccucaccuggacuucuuuuaauuu

SEQ ID NO: 1876 - RNA, 27 nt, Artificial Sequence
  Description of Artificial Sequence: Synthetic oligonucleotide
guccucuucccgauaauccggauucag

SEQ ID NO: 1877 - RNA, 27 nt, Artificial Sequence
  Description of Artificial Sequence: Synthetic oligonucleotide
acaauacuugcuuugaugucacauuaa

SEQ ID NO: 1878 - RNA, 27 nt, Artificial Sequence
  Description of Artificial Sequence: Synthetic oligonucleotide
gagugcuacaauacuugcuuugauguc

SEQ ID NO: 1879 - RNA, 27 nt, Artificial Sequence
  Description of Artificial Sequence: Synthetic oligonucleotide
auuugugguuuuguuuucucucucucu

SEQ ID NO: 1880 - RNA, 27 nt, Artificial Sequence
  Description of Artificial Sequence: Synthetic oligonucleotide
uguaugggcuuaaauacuacagcgagg

SEQ ID NO: 1881 - RNA, 27 nt, Artificial Sequence
  Description of Artificial Sequence: Synthetic oligonucleotide
cuguaugggcuuaaauacuacagcgag

SEQ ID NO: 1882 - RNA, 27 nt, Artificial Sequence
  Description of Artificial Sequence: Synthetic oligonucleotide
ggaagguuucuguaugggcuuaaauac

SEQ ID NO: 1883 - RNA, 27 nt, Artificial Sequence
  Description of Artificial Sequence: Synthetic oligonucleotide
guagguauaccauguuuauuuuaauac

SEQ ID NO: 1884 - RNA, 27 nt, Artificial Sequence
  Description of Artificial Sequence: Synthetic oligonucleotide
uccgaaaacuggccgaucagaacagcc

SEQ ID NO: 1885 - RNA, 27 nt, Artificial Sequence
  Description of Artificial Sequence: Synthetic oligonucleotide
cccuguuccaaaguucaaauuauuugu

SEQ ID NO: 1886 - RNA, 27 nt, Artificial Sequence
  Description of Artificial Sequence: Synthetic oligonucleotide
acuggaaaguuaaauuaaggucgcaau

SEQ ID NO: 1887 - RNA, 27 nt, Artificial Sequence
  Description of Artificial Sequence: Synthetic oligonucleotide
caaaaccaaacuuuagcuuucucagcc

SEQ ID NO: 1888 - RNA, 27 nt, Artificial Sequence
  Description of Artificial Sequence: Synthetic oligonucleotide
uacagugggaaguagcaucuuuacuuu

SEQ ID NO: 1889 - RNA, 27 nt, Artificial Sequence
  Description of Artificial Sequence: Synthetic oligonucleotide
ucauaugguaucagcaauuaagcagua

SEQ ID NO: 1890 - RNA, 27 nt, Artificial Sequence
  Description of Artificial Sequence: Synthetic oligonucleotide
cagcccauguuucauucauaugguauc

SEQ ID NO: 1891 - RNA, 27 nt, Artificial Sequence
  Description of Artificial Sequence: Synthetic oligonucleotide
uaugaaaaaguuggauaagaaaguugg

SEQ ID NO: 1892 - RNA, 27 nt, Artificial Sequence
  Description of Artificial Sequence: Synthetic oligonucleotide
uccggccucaugaugucaugcaaggcu

SEQ ID NO: 1893 - RNA, 27 nt, Artificial Sequence
  Description of Artificial Sequence: Synthetic oligonucleotide
acaaaugcagucauauacaaauucagg

SEQ ID NO: 1894 - RNA, 27 nt, Artificial Sequence
  Description of Artificial Sequence: Synthetic oligonucleotide
gguaguaaacauucuacuaggauucuu

SEQ ID NO: 1895 - RNA, 27 nt, Artificial Sequence
  Description of Artificial Sequence: Synthetic oligonucleotide
uuucaucaaaaaauucuucccuuucug

SEQ ID NO: 1896 - RNA, 27 nt, Artificial Sequence
  Description of Artificial Sequence: Synthetic oligonucleotide
aaauucacacacuggcaugccgauagc

SEQ ID NO: 1897 - RNA, 27 nt, Artificial Sequence
  Description of Artificial Sequence: Synthetic oligonucleotide
acauacauugcucuacuaugaggugaa

SEQ ID NO: 1898 - RNA, 27 nt, Artificial Sequence
  Description of Artificial Sequence: Synthetic oligonucleotide
uauauaugugcuuuggcaauucuggug

SEQ ID NO: 1899 - RNA, 27 nt, Artificial Sequence
  Description of Artificial Sequence: Synthetic oligonucleotide
ggagaaacuauuacccagaucaccacu

SEQ ID NO: 1900 - RNA, 27 nt, Artificial Sequence
  Description of Artificial Sequence: Synthetic oligonucleotide
auuuggagaaacuauuacccagaucac

SEQ ID NO: 1901 - RNA, 27 nt, Artificial Sequence
  Description of Artificial Sequence: Synthetic oligonucleotide
uuucuaggaaguauucaucacauccac

SEQ ID NO: 1902 - RNA, 27 nt, Artificial Sequence
  Description of Artificial Sequence: Synthetic oligonucleotide
cauauaugguguagcuguggaaaugcg

SEQ ID NO: 1903 - RNA, 27 nt, Artificial Sequence
  Description of Artificial Sequence: Synthetic oligonucleotide
cuccauucauauaugguguagcugugg

SEQ ID NO: 1904 - RNA, 27 nt, Artificial Sequence
  Description of Artificial Sequence: Synthetic oligonucleotide
aucuucuucucguguaagaacugcagc

SEQ ID NO: 1905 - RNA, 27 nt, Artificial Sequence
  Description of Artificial Sequence: Synthetic oligonucleotide
ucccuguaaaugaucuucuucucgugu

SEQ ID NO: 1906 - RNA, 27 nt, Artificial Sequence
  Description of Artificial Sequence: Synthetic oligonucleotide
gucccuguaaaugaucuucuucucgug

SEQ ID NO: 1907 - RNA, 27 nt, Artificial Sequence
  Description of Artificial Sequence: Synthetic oligonucleotide
ucaggucccuguaaaugaucuucuucu

SEQ ID NO: 1908 - RNA, 27 nt, Artificial Sequence
  Description of Artificial Sequence: Synthetic oligonucleotide
gaugcagucaaacaccucuuccucugu

SEQ ID NO: 1909 - RNA, 27 nt, Artificial Sequence
  Description of Artificial Sequence: Synthetic oligonucleotide
cgaugcagucaaacaccucuuccucug

SEQ ID NO: 1910 - RNA, 27 nt, Artificial Sequence
  Description of Artificial Sequence: Synthetic oligonucleotide
cccugugaacucgcccucaaaguagcg

SEQ ID NO: 1911 - RNA, 27 nt, Artificial Sequence
  Description of Artificial Sequence: Synthetic oligonucleotide
ggacagaggugccaggagaugcccuca

SEQ ID NO: 1912 - RNA, 27 nt, Artificial Sequence
  Description of Artificial Sequence: Synthetic oligonucleotide
uuaaaaagacaaaccauaucacuccuu

SEQ ID NO: 1913 - RNA, 27 nt, Artificial Sequence
  Description of Artificial Sequence: Synthetic oligonucleotide
cuuaaaaagacaaaccauaucacuccu

SEQ ID NO: 1914 - RNA, 27 nt, Artificial Sequence
  Description of Artificial Sequence: Synthetic oligonucleotide
gacaaccuuuaggaucuuuacugcaac

SEQ ID NO: 1915 - RNA, 27 nt, Artificial Sequence
  Description of Artificial Sequence: Synthetic oligonucleotide
gucgacaaccuuuaggaucuuuacugc

SEQ ID NO: 1916 - RNA, 27 nt, Artificial Sequence
  Description of Artificial Sequence: Synthetic oligonucleotide
acaauugccagguuguccuuugucaug

SEQ ID NO: 1917 - RNA, 27 nt, Artificial Sequence
  Description of Artificial Sequence: Synthetic oligonucleotide
ccucgcaccacugggucacaauugcca

SEQ ID NO: 1918 - RNA, 27 nt, Artificial Sequence
  Description of Artificial Sequence: Synthetic oligonucleotide
auuucaugucucuauggaugauguucu

SEQ ID NO: 1919 - RNA, 27 nt, Artificial Sequence
  Description of Artificial Sequence: Synthetic oligonucleotide
uggagaaauauauuguuggauuucaug

SEQ ID NO: 1920 - RNA, 27 nt, Artificial Sequence
  Description of Artificial Sequence: Synthetic oligonucleotide
agccuucauggagaaauauauuguugg

SEQ ID NO: 1921 - RNA, 27 nt, Artificial Sequence
  Description of Artificial Sequence: Synthetic oligonucleotide
accacuccagcgugacuuuacuguugc

SEQ ID NO: 1922 - RNA, 27 nt, Artificial Sequence
  Description of Artificial Sequence: Synthetic oligonucleotide
ccucucuuccuuuacuuucuucacaca

SEQ ID NO: 1923 - RNA, 27 nt, Artificial Sequence
  Description of Artificial Sequence: Synthetic oligonucleotide
gcccgaugcaaggauggcucggaagcg

SEQ ID NO: 1924 - RNA, 27 nt, Artificial Sequence
  Description of Artificial Sequence: Synthetic oligonucleotide
cacaguaggauauucaaccuccauuuc

SEQ ID NO: 1925 - RNA, 27 nt, Artificial Sequence
  Description of Artificial Sequence: Synthetic oligonucleotide
uuacacaguaggauauucaaccuccau

SEQ ID NO: 1926 - RNA, 27 nt, Artificial Sequence
  Description of Artificial Sequence: Synthetic oligonucleotide
uacacuacaagggaaaacucaaaaucu

SEQ ID NO: 1927 - RNA, 27 nt, Artificial Sequence
  Description of Artificial Sequence: Synthetic oligonucleotide
caaucaacaaagaacaaacaggauaaa

SEQ ID NO: 1928 - RNA, 27 nt, Artificial Sequence
  Description of Artificial Sequence: Synthetic oligonucleotide
uuucaaucaacaaagaacaaacaggau

SEQ ID NO: 1929 - RNA, 27 nt, Artificial Sequence
  Description of Artificial Sequence: Synthetic oligonucleotide
auggaagaaaaagaaggcuguagagaa

SEQ ID NO: 1930 - RNA, 27 nt, Artificial Sequence
  Description of Artificial Sequence: Synthetic oligonucleotide
uagaaggaagauuagcuauggaagaaa

SEQ ID NO: 1931 - RNA, 27 nt, Artificial Sequence
  Description of Artificial Sequence: Synthetic oligonucleotide
augaagcauucaacaggaagauuauuu

SEQ ID NO: 1932 - RNA, 27 nt, Artificial Sequence
  Description of Artificial Sequence: Synthetic oligonucleotide
caugaagcauucaacaggaagauuauu

SEQ ID NO: 1933 - RNA, 27 nt, Artificial Sequence
  Description of Artificial Sequence: Synthetic oligonucleotide
ucaaaguagaauucaagucaugaagca

SEQ ID NO: 1934 - RNA, 27 nt, Artificial Sequence
  Description of Artificial Sequence: Synthetic oligonucleotide
gucuguaguugcuucucucccucuuag

SEQ ID NO: 1935 - RNA, 27 nt, Artificial Sequence
  Description of Artificial Sequence: Synthetic oligonucleotide
guugaccuuggucugguaggagacggc

SEQ ID NO: 1936 - RNA, 27 nt, Artificial Sequence
  Description of Artificial Sequence: Synthetic oligonucleotide
gucgagauagucgggccgauugaucuc

SEQ ID NO: 1937 - RNA, 27 nt, Artificial Sequence
  Description of Artificial Sequence: Synthetic oligonucleotide
guuugggaagguuggauguucguccuc

SEQ ID NO: 1938 - RNA, 27 nt, Artificial Sequence
  Description of Artificial Sequence: Synthetic oligonucleotide
aguucuaagcuuggguuccgacccuaa

SEQ ID NO: 1939 - RNA, 27 nt, Artificial Sequence
  Description of Artificial Sequence: Synthetic oligonucleotide
uuaaaguucuaagcuuggguuccgacc

SEQ ID NO: 1940 - RNA, 27 nt, Artificial Sequence
  Description of Artificial Sequence: Synthetic oligonucleotide
guugcuuaaaguucuaagcuuggguuc

SEQ ID NO: 1941 - RNA, 27 nt, Artificial Sequence
  Description of Artificial Sequence: Synthetic oligonucleotide
gugguggucuuguugcuuaaaguucua

SEQ ID NO: 1942 - RNA, 27 nt, Artificial Sequence
  Description of Artificial Sequence: Synthetic oligonucleotide
acuuuauuucucgccacugaauaguag

SEQ ID NO: 1943 - RNA, 27 nt, Artificial Sequence
  Description of Artificial Sequence: Synthetic oligonucleotide
aacuuuauuucucgccacugaauagua

SEQ ID NO: 1944 - RNA, 27 nt, Artificial Sequence
  Description of Artificial Sequence: Synthetic oligonucleotide
ggaucauuuccuguuaucuguguuugu

SEQ ID NO: 1945 - RNA, 27 nt, Artificial Sequence
  Description of Artificial Sequence: Synthetic oligonucleotide
guuucauuucuucucuuuucuuaaggc

SEQ ID NO: 1946 - RNA, 27 nt, Artificial Sequence
  Description of Artificial Sequence: Synthetic oligonucleotide
ggaggauggaaacacacuccuucaguu

SEQ ID NO: 1947 - RNA, 27 nt, Artificial Sequence
  Description of Artificial Sequence: Synthetic oligonucleotide
ucaaagauuuucagucccgcggugaca

SEQ ID NO: 1948 - RNA, 27 nt, Artificial Sequence
  Description of Artificial Sequence: Synthetic oligonucleotide
ccugaacggcacgcuuauuucugcugu

SEQ ID NO: 1949 - RNA, 27 nt, Artificial Sequence
  Description of Artificial Sequence: Synthetic oligonucleotide
cuucuggacccugaacggcacgcuuau

SEQ ID NO: 1950 - RNA, 27 nt, Artificial Sequence
  Description of Artificial Sequence: Synthetic oligonucleotide
caagcagucuugagugacuguuucuuc

SEQ ID NO: 1951 - RNA, 27 nt, Artificial Sequence
  Description of Artificial Sequence: Synthetic oligonucleotide
ccaaagacauggaccuucuuccucuga

SEQ ID NO: 1952 - RNA, 27 nt, Artificial Sequence
  Description of Artificial Sequence: Synthetic oligonucleotide
guguuucaggcauauuuugaauacauc

SEQ ID NO: 1953 - RNA, 27 nt, Artificial Sequence
  Description of Artificial Sequence: Synthetic oligonucleotide
gagguacagagaaagggaggaaaauag

SEQ ID NO: 1954 - RNA, 27 nt, Artificial Sequence
  Description of Artificial Sequence: Synthetic oligonucleotide
ucuugucuugcucuaucuuucuuuggu

SEQ ID NO: 1955 - RNA, 27 nt, Artificial Sequence
  Description of Artificial Sequence: Synthetic oligonucleotide
uuucuugucuugcucuaucuuucuuug

SEQ ID NO: 1956 - RNA, 27 nt, Artificial Sequence
  Description of Artificial Sequence: Synthetic oligonucleotide
ggaucuuguacaaacaaaugcuuucuc

SEQ ID NO: 1957 - RNA, 27 nt, Artificial Sequence
  Description of Artificial Sequence: Synthetic oligonucleotide
ucugcaaguacguucguuuaacucaag

SEQ ID NO: 1958 - RNA, 27 nt, Artificial Sequence
  Description of Artificial Sequence: Synthetic oligonucleotide
ucuguaucgaucguucuguaucagucu

SEQ ID NO: 1959 - RNA, 27 nt, Artificial Sequence
  Description of Artificial Sequence: Synthetic oligonucleotide
auuuauuuuuauauauauauaauauau

SEQ ID NO: 1960 - RNA, 27 nt, Artificial Sequence
  Description of Artificial Sequence: Synthetic oligonucleotide
auauuuauuuuuauauauauauaauau

SEQ ID NO: 1961 - RNA, 27 nt, Artificial Sequence
  Description of Artificial Sequence: Synthetic oligonucleotide
cacagcagucaaauacauccagugaag

SEQ ID NO: 1962 - RNA, 27 nt, Artificial Sequence
  Description of Artificial Sequence: Synthetic oligonucleotide
gucucucaucuccuccucuucccuguc

SEQ ID NO: 1963 - RNA, 27 nt, Artificial Sequence
  Description of Artificial Sequence: Synthetic oligonucleotide
ccaagugggacaaaaaaaagaucaugc

SEQ ID NO: 1964 - RNA, 14 nt, Artificial Sequence
  Description of Artificial Sequence: Synthetic oligonucleotide
guauuuugaugagg

SEQ ID NO: 1965 - RNA, 12 nt, Artificial Sequence
  Description of Artificial Sequence: Synthetic oligonucleotide
ggcccagaugau

SEQ ID NO: 1966 - RNA, 14 nt, Artificial Sequence
  Description of Artificial Sequence: Synthetic oligonucleotide
gggaagaaaacuau

SEQ ID NO: 1967 - RNA, 15 nt, Artificial Sequence
  Description of Artificial Sequence: Synthetic oligonucleotide
guuuuaauuuauuuc

SEQ ID NO: 1968 - RNA, 12 nt, Artificial Sequence
  Description of Artificial Sequence: Synthetic oligonucleotide
acguagggaaau

SEQ ID NO: 1969 - RNA, 12 nt, Artificial Sequence
  Description of Artificial Sequence: Synthetic oligonucleotide
ccaggguuuacc

SEQ ID NO: 1970 - RNA, 11 nt, Artificial Sequence
  Description of Artificial Sequence: Synthetic oligonucleotide
agcaagguuua

SEQ ID NO: 1971 - RNA, 12 nt, Artificial Sequence
  Description of Artificial Sequence: Synthetic oligonucleotide
uguauuauguug

SEQ ID NO: 1972 - RNA, 15 nt, Artificial Sequence
  Description of Artificial Sequence: Synthetic oligonucleotide
uuuuaaucuuuguga

SEQ ID NO: 1973 - RNA, 14 nt, Artificial Sequence
  Description of Artificial Sequence: Synthetic oligonucleotide
uuaaucuuugugac

SEQ ID NO: 1974 - RNA, 13 nt, Artificial Sequence
  Description of Artificial Sequence: Synthetic oligonucleotide
gcugcuuaugucu

SEQ ID NO: 1975 - RNA, 14 nt, Artificial Sequence
  Description of Artificial Sequence: Synthetic oligonucleotide
aaguguuucagaag

SEQ ID NO: 1976 - RNA, 13 nt, Artificial Sequence
  Description of Artificial Sequence: Synthetic oligonucleotide
gaccaucaauaag

SEQ ID NO: 1977 - RNA, 13 nt, Artificial Sequence
  Description of Artificial Sequence: Synthetic oligonucleotide
ccaucaauaagga

SEQ ID NO: 1978 - RNA, 14 nt, Artificial Sequence
  Description of Artificial Sequence: Synthetic oligonucleotide
ucaauaaggaagaa

SEQ ID NO: 1979 - RNA, 14 nt, Artificial Sequence
  Description of Artificial Sequence: Synthetic oligonucleotide
aauaaggaagaagc

SEQ ID NO: 1980 - RNA, 13 nt, Artificial Sequence
  Description of Artificial Sequence: Synthetic oligonucleotide
aggaagaagcccu

SEQ ID NO: 1981 - RNA, 13 nt, Artificial Sequence
  Description of Artificial Sequence: Synthetic oligonucleotide
gcauaacuaaagg

SEQ ID NO: 1982 - RNA, 14 nt, Artificial Sequence
  Description of Artificial Sequence: Synthetic oligonucleotide
cauaacuaaaggug

SEQ ID NO: 1983 - RNA, 12 nt, Artificial Sequence
  Description of Artificial Sequence: Synthetic oligonucleotide
cuacaucacgcc

SEQ ID NO: 1984 - RNA, 12 nt, Artificial Sequence
  Description of Artificial Sequence: Synthetic oligonucleotide
acuggauuuaag

SEQ ID NO: 1985 - RNA, 12 nt, Artificial Sequence
  Description of Artificial Sequence: Synthetic oligonucleotide
cuggauuuaagc

SEQ ID NO: 1986 - RNA, 13 nt, Artificial Sequence
  Description of Artificial Sequence: Synthetic oligonucleotide
gauuuaagcagag

SEQ ID NO: 1987 - RNA, 13 nt, Artificial Sequence
  Description of Artificial Sequence: Synthetic oligonucleotide
auuuaagcagagu

SEQ ID NO: 1988 - RNA, 13 nt, Artificial Sequence
  Description of Artificial Sequence: Synthetic oligonucleotide
uuaagcagaguuc

SEQ ID NO: 1989 - RNA, 13 nt, Artificial Sequence
  Description of Artificial Sequence: Synthetic oligonucleotide
uaagcagaguuca

SEQ ID NO: 1990 - RNA, 14 nt, Artificial Sequence
  Description of Artificial Sequence: Synthetic oligonucleotide
agcagaguucaaaa

SEQ ID NO: 1991 - RNA, 12 nt, Artificial Sequence
  Description of Artificial Sequence: Synthetic oligonucleotide
cucagggucuga

SEQ ID NO: 1992 - RNA, 13 nt, Artificial Sequence
  Description of Artificial Sequence: Synthetic oligonucleotide
caagcaacuacau

SEQ ID NO: 1993 - RNA, 12 nt, Artificial Sequence
  Description of Artificial Sequence: Synthetic oligonucleotide
aucaauggcagc

SEQ ID NO: 1994 - RNA, 11 nt, Artificial Sequence
  Description of Artificial Sequence: Synthetic oligonucleotide
uuccagcccac

SEQ ID NO: 1995 - RNA, 12 nt, Artificial Sequence
  Description of Artificial Sequence: Synthetic oligonucleotide
cagcugagaaug

SEQ ID NO: 1996 - RNA, 13 nt, Artificial Sequence
  Description of Artificial Sequence: Synthetic oligonucleotide
aacguaucuccua

SEQ ID NO: 1997 - RNA, 14 nt, Artificial Sequence
  Description of Artificial Sequence: Synthetic oligonucleotide
ccuaaaauaauuuc

SEQ ID NO: 1998 - RNA, 13 nt, Artificial Sequence
  Description of Artificial Sequence: Synthetic oligonucleotide
uggaagauucagc

SEQ ID NO: 1999 - RNA, 12 nt, Artificial Sequence
  Description of Artificial Sequence: Synthetic oligonucleotide
uuaaacucuccu

SEQ ID NO: 2000 - RNA, 12 nt, Artificial Sequence
  Description of Artificial Sequence: Synthetic oligonucleotide
cagccuacaguu

SEQ ID NO: 2001 - RNA, 13 nt, Artificial Sequence
  Description of Artificial Sequence: Synthetic oligonucleotide
guuauguucaguc

SEQ ID NO: 2002 - RNA, 13 nt, Artificial Sequence
  Description of Artificial Sequence: Synthetic oligonucleotide
cacauacaaaaug

SEQ ID NO: 2003 - RNA, 9 nt, Artificial Sequence
  Description of Artificial Sequence: Synthetic oligonucleotide
uccuuuugc

SEQ ID NO: 2004 - RNA, 12 nt, Artificial Sequence
  Description of Artificial Sequence: Synthetic oligonucleotide
ugaccugugaag

SEQ ID NO: 2005 - RNA, 12 nt, Artificial Sequence
  Description of Artificial Sequence: Synthetic oligonucleotide
cuaucucacaca

SEQ ID NO: 2006 - RNA, 13 nt, Artificial Sequence
  Description of Artificial Sequence: Synthetic oligonucleotide
uguccucaauugu

SEQ ID NO: 2007 - RNA, 12 nt, Artificial Sequence
  Description of Artificial Sequence: Synthetic oligonucleotide
aaaccguagcug

SEQ ID NO: 2008 - RNA, 12 nt, Artificial Sequence
  Description of Artificial Sequence: Synthetic oligonucleotide
uagcuggcaagc

SEQ ID NO: 2009 - RNA, 14 nt, Artificial Sequence
  Description of Artificial Sequence: Synthetic oligonucleotide
uuguaugguuaaaa

SEQ ID NO: 2010 - RNA, 14 nt, Artificial Sequence
  Description of Artificial Sequence: Synthetic oligonucleotide
ugguuaaaagaugg

SEQ ID NO: 2011 - RNA, 13 nt, Artificial Sequence
  Description of Artificial Sequence: Synthetic oligonucleotide
cagggaauuauac

SEQ ID NO: 2012 - RNA, 12 nt, Artificial Sequence
  Description of Artificial Sequence: Synthetic oligonucleotide
acaaucuugcug

SEQ ID NO: 2013 - RNA, 13 nt, Artificial Sequence
  Description of Artificial Sequence: Synthetic oligonucleotide
ccaauaaugaaga

SEQ ID NO: 2014 - RNA, 13 nt, Artificial Sequence
  Description of Artificial Sequence: Synthetic oligonucleotide
acuuuggauguuc

SEQ ID NO: 2015 - RNA, 12 nt, Artificial Sequence
  Description of Artificial Sequence: Synthetic oligonucleotide
aaugcuuccacu

SEQ ID NO: 2016 - RNA, 11 nt, Artificial Sequence
  Description of Artificial Sequence: Synthetic oligonucleotide
gagaaaguuug

SEQ ID NO: 2017 - RNA, 11 nt, Artificial Sequence
  Description of Artificial Sequence: Synthetic oligonucleotide
aaagaacuacu

SEQ ID NO: 2018 - RNA, 12 nt, Artificial Sequence
  Description of Artificial Sequence: Synthetic oligonucleotide
uuagaaauacgg

SEQ ID NO: 2019 - RNA, 12 nt, Artificial Sequence
  Description of Artificial Sequence: Synthetic oligonucleotide
aacauggguaca

SEQ ID NO: 2020 - RNA, 14 nt, Artificial Sequence
  Description of Artificial Sequence: Synthetic oligonucleotide
aaagacacagaaga

SEQ ID NO: 2021 - RNA, 11 nt, Artificial Sequence
  Description of Artificial Sequence: Synthetic oligonucleotide
uaguagggagg

SEQ ID NO: 2022 - RNA, 12 nt, Artificial Sequence
  Description of Artificial Sequence: Synthetic oligonucleotide
gccuucugcagc

SEQ ID NO: 2023 - RNA, 10 nt, Artificial Sequence
  Description of Artificial Sequence: Synthetic oligonucleotide
ggucugguac

SEQ ID NO: 2024 - RNA, 12 nt, Artificial Sequence
  Description of Artificial Sequence: Synthetic oligonucleotide
cuaguccuuccg

SEQ ID NO: 2025 - RNA, 12 nt, Artificial Sequence
  Description of Artificial Sequence: Synthetic oligonucleotide
ccagugaauauu

SEQ ID NO: 2026 - RNA, 13 nt, Artificial Sequence
  Description of Artificial Sequence: Synthetic oligonucleotide
augaauucaaguu

SEQ ID NO: 2027 - RNA, 12 nt, Artificial Sequence
  Description of Artificial Sequence: Synthetic oligonucleotide
caggacacagau

SEQ ID NO: 2028 - RNA, 12 nt, Artificial Sequence
  Description of Artificial Sequence: Synthetic oligonucleotide
cucaaagcacag

SEQ ID NO: 2029 - RNA, 10 nt, Artificial Sequence
  Description of Artificial Sequence: Synthetic oligonucleotide
accacugcca

SEQ ID NO: 2030 - RNA, 13 nt, Artificial Sequence
  Description of Artificial Sequence: Synthetic oligonucleotide
gaaacuacuagug

SEQ ID NO: 2031 - RNA, 12 nt, Artificial Sequence
  Description of Artificial Sequence: Synthetic oligonucleotide
aagucggacagc

SEQ ID NO: 2032 - RNA, 13 nt, Artificial Sequence
  Description of Artificial Sequence: Synthetic oligonucleotide
gaaagcgaaaaau

SEQ ID NO: 2033 - RNA, 13 nt, Artificial Sequence
  Description of Artificial Sequence: Synthetic oligonucleotide
cccucugauuuag

SEQ ID NO: 2034 - RNA, 12 nt, Artificial Sequence
  Description of Artificial Sequence: Synthetic oligonucleotide
ugagcuauuuaa

SEQ ID NO: 2035 - RNA, 13 nt, Artificial Sequence
  Description of Artificial Sequence: Synthetic oligonucleotide
aaaaggugaaaaa

SEQ ID NO: 2036 - RNA, 14 nt, Artificial Sequence
  Description of Artificial Sequence: Synthetic oligonucleotide
gaaaaagcacuauu

SEQ ID NO: 2037 - RNA, 12 nt, Artificial Sequence
  Description of Artificial Sequence: Synthetic oligonucleotide
ggcugaaaagaa

SEQ ID NO: 2038 - RNA, 12 nt, Artificial Sequence
  Description of Artificial Sequence: Synthetic oligonucleotide
uaaacccuuaua

SEQ ID NO: 2039 - RNA, 13 nt, Artificial Sequence
  Description of Artificial Sequence: Synthetic oligonucleotide
cauacuauuagcc

SEQ ID NO: 2040 - RNA, 12 nt, Artificial Sequence
  Description of Artificial Sequence: Synthetic oligonucleotide
gacagaagcauu

SEQ ID NO: 2041 - RNA, 14 nt, Artificial Sequence
  Description of Artificial Sequence: Synthetic oligonucleotide
agagcaaauaagau

SEQ ID NO: 2042 - RNA, 14 nt, Artificial Sequence
  Description of Artificial Sequence: Synthetic oligonucleotide
ccaacauuuuucuc

SEQ ID NO: 2043 - RNA, 15 nt, Artificial Sequence
  Description of Artificial Sequence: Synthetic oligonucleotide
uuaaguaugagaaaa

SEQ ID NO: 2044 - RNA, 14 nt, Artificial Sequence
  Description of Artificial Sequence: Synthetic oligonucleotide
caggaauaaagaug

SEQ ID NO: 2045 - RNA, 13 nt, Artificial Sequence
  Description of Artificial Sequence: Synthetic oligonucleotide
aauuugaaugacc

SEQ ID NO: 2046 - RNA, 14 nt, Artificial Sequence
  Description of Artificial Sequence: Synthetic oligonucleotide
auguauaaagauag

SEQ ID NO: 2047 - RNA, 12 nt, Artificial Sequence
  Description of Artificial Sequence: Synthetic oligonucleotide
ggcuguaacuau

SEQ ID NO: 2048 - RNA, 11 nt, Artificial Sequence
  Description of Artificial Sequence: Synthetic oligonucleotide
ucugugaagug

SEQ ID NO: 2049 - RNA, 14 nt, Artificial Sequence
  Description of Artificial Sequence: Synthetic oligonucleotide
ccuuuaaggaaaug

SEQ ID NO: 2050 - RNA, 13 nt, Artificial Sequence
  Description of Artificial Sequence: Synthetic oligonucleotide
aaggauacaaaaa

SEQ ID NO: 2051 - RNA, 12 nt, Artificial Sequence
  Description of Artificial Sequence: Synthetic oligonucleotide
agaugcaauuug

SEQ ID NO: 2052 - RNA, 12 nt, Artificial Sequence
  Description of Artificial Sequence: Synthetic oligonucleotide
guucaaaacgaa

SEQ ID NO: 2053 - RNA, 11 nt, Artificial Sequence
  Description of Artificial Sequence: Synthetic oligonucleotide
gugaaaccuca

SEQ ID NO: 2054 - RNA, 13 nt, Artificial Sequence
  Description of Artificial Sequence: Synthetic oligonucleotide
acgaaagagaagc

SEQ ID NO: 2055 - RNA, 12 nt, Artificial Sequence
  Description of Artificial Sequence: Synthetic oligonucleotide
cuccacaagcgc

SEQ ID NO: 2056 - RNA, 14 nt, Artificial Sequence
  Description of Artificial Sequence: Synthetic oligonucleotide
gagaagauuccaaa

SEQ ID NO: 2057 - RNA, 13 nt, Artificial Sequence
  Description of Artificial Sequence: Synthetic oligonucleotide
aaucuggauucaa

SEQ ID NO: 2058 - RNA, 13 nt, Artificial Sequence
  Description of Artificial Sequence: Synthetic oligonucleotide
agaacagauuuga

SEQ ID NO: 2059 - RNA, 11 nt, Artificial Sequence
  Description of Artificial Sequence: Synthetic oligonucleotide
ccagagcugug

SEQ ID NO: 2060 - RNA, 12 nt, Artificial Sequence
  Description of Artificial Sequence: Synthetic oligonucleotide
ccucagauuguu

SEQ ID NO: 2061 - RNA, 12 nt, Artificial Sequence
  Description of Artificial Sequence: Synthetic oligonucleotide
cuauuuuaauua

SEQ ID NO: 2062 - RNA, 13 nt, Artificial Sequence
  Description of Artificial Sequence: Synthetic oligonucleotide
uuuaauuuauuaa

SEQ ID NO: 2063 - RNA, 12 nt, Artificial Sequence
  Description of Artificial Sequence: Synthetic oligonucleotide
augcaguuugaa

SEQ ID NO: 2064 - RNA, 11 nt, Artificial Sequence
  Description of Artificial Sequence: Synthetic oligonucleotide
caugcugcugg

SEQ ID NO: 2065 - RNA, 13 nt, Artificial Sequence
  Description of Artificial Sequence: Synthetic oligonucleotide
agaugugcauuuc

SEQ ID NO: 2066 - RNA, 12 nt, Artificial Sequence
  Description of Artificial Sequence: Synthetic oligonucleotide
ucaaaaccugug

SEQ ID NO: 2067 - RNA, 11 nt, Artificial Sequence
  Description of Artificial Sequence: Synthetic oligonucleotide
gaaugugggua

SEQ ID NO: 2068 - RNA, 10 nt, Artificial Sequence
  Description of Artificial Sequence: Synthetic oligonucleotide
auguggguag

SEQ ID NO: 2069 - RNA, 13 nt, Artificial Sequence
  Description of Artificial Sequence: Synthetic oligonucleotide
ugaaaaugagcau

SEQ ID NO: 2070 - RNA, 13 nt, Artificial Sequence
  Description of Artificial Sequence: Synthetic oligonucleotide
uugcuuuucaugu

SEQ ID NO: 2071 - RNA, 12 nt, Artificial Sequence
  Description of Artificial Sequence: Synthetic oligonucleotide
uguauuucuaua

SEQ ID NO: 2072 - RNA, 13 nt, Artificial Sequence
  Description of Artificial Sequence: Synthetic oligonucleotide
uuugauuaauguu

SEQ ID NO: 2073 - RNA, 12 nt, Artificial Sequence
  Description of Artificial Sequence: Synthetic oligonucleotide
caacguguauag

SEQ ID NO: 2074 - RNA, 12 nt, Artificial Sequence
  Description of Artificial Sequence: Synthetic oligonucleotide
cauauccuuggc

SEQ ID NO: 2075 - RNA, 13 nt, Artificial Sequence
  Description of Artificial Sequence: Synthetic oligonucleotide
uacuaacaucugg

SEQ ID NO: 2076 - RNA, 11 nt, Artificial Sequence
  Description of Artificial Sequence: Synthetic oligonucleotide
cauaaguugug

SEQ ID NO: 2077 - RNA, 12 nt, Artificial Sequence
  Description of Artificial Sequence: Synthetic oligonucleotide
gcaucauuuugg

SEQ ID NO: 2078 - RNA, 10 nt, Artificial Sequence
  Description of Artificial Sequence: Synthetic oligonucleotide
gcucuucuua

SEQ ID NO: 2079 - RNA, 10 nt, Artificial Sequence
  Description of Artificial Sequence: Synthetic oligonucleotide
agauuagguc

SEQ ID NO: 2080 - RNA, 12 nt, Artificial Sequence
  Description of Artificial Sequence: Synthetic oligonucleotide
auggaauugaaa

SEQ ID NO: 2081 - RNA, 13 nt, Artificial Sequence
  Description of Artificial Sequence: Synthetic oligonucleotide
cacacucauuccu

SEQ ID NO: 2082 - RNA, 12 nt, Artificial Sequence
  Description of Artificial Sequence: Synthetic oligonucleotide
uguagagguaac

SEQ ID NO: 2083 - RNA, 11 nt, Artificial Sequence
  Description of Artificial Sequence: Synthetic oligonucleotide
caaccacaugc

SEQ ID NO: 2084 - RNA, 12 nt, Artificial Sequence
  Description of Artificial Sequence: Synthetic oligonucleotide
ucggaaacaagu

SEQ ID NO: 2085 - RNA, 11 nt, Artificial Sequence
  Description of Artificial Sequence: Synthetic oligonucleotide
acucccaauaa

SEQ ID NO: 2086 - RNA, 13 nt, Artificial Sequence
  Description of Artificial Sequence: Synthetic oligonucleotide
aaugcuaagaaau

SEQ ID NO: 2087 - RNA, 11 nt, Artificial Sequence
  Description of Artificial Sequence: Synthetic oligonucleotide
gucuuucucua

SEQ ID NO: 2088 - RNA, 11 nt, Artificial Sequence
  Description of Artificial Sequence: Synthetic oligonucleotide
ugaauuucagg

SEQ ID NO: 2089 - RNA, 13 nt, Artificial Sequence
  Description of Artificial Sequence: Synthetic oligonucleotide
cgauucccucuca

SEQ ID NO: 2090 - RNA, 11 nt, Artificial Sequence
  Description of Artificial Sequence: Synthetic oligonucleotide
aggaaagugaa

SEQ ID NO: 2091 - RNA, 12 nt, Artificial Sequence
  Description of Artificial Sequence: Synthetic oligonucleotide
gaggcugcaugc

SEQ ID NO: 2092 - RNA, 11 nt, Artificial Sequence
  Description of Artificial Sequence: Synthetic oligonucleotide
ucucugaacag

SEQ ID NO: 2093 - RNA, 12 nt, Artificial Sequence
  Description of Artificial Sequence: Synthetic oligonucleotide
aacuuggcugua

SEQ ID NO: 2094 - RNA, 12 nt, Artificial Sequence
  Description of Artificial Sequence: Synthetic oligonucleotide
agaagccaaaau

SEQ ID NO: 2095 - RNA, 14 nt, Artificial Sequence
  Description of Artificial Sequence: Synthetic oligonucleotide
auuaaaagaagucc

SEQ ID NO: 2096 - RNA, 14 nt, Artificial Sequence
  Description of Artificial Sequence: Synthetic oligonucleotide
gaauccggauuauc

SEQ ID NO: 2097 - RNA, 12 nt, Artificial Sequence
  Description of Artificial Sequence: Synthetic oligonucleotide
aaugugacauca

SEQ ID NO: 2098 - RNA, 13 nt, Artificial Sequence
  Description of Artificial Sequence: Synthetic oligonucleotide
caucaaagcaagu

SEQ ID NO: 2099 - RNA, 11 nt, Artificial Sequence
  Description of Artificial Sequence: Synthetic oligonucleotide
agagagagaaa

SEQ ID NO: 2100 - RNA, 13 nt, Artificial Sequence
  Description of Artificial Sequence: Synthetic oligonucleotide
ucgcuguaguauu

SEQ ID NO: 2101 - RNA, 14 nt, Artificial Sequence
  Description of Artificial Sequence: Synthetic oligonucleotide
cgcuguaguauuua

SEQ ID NO: 2102 - RNA, 13 nt, Artificial Sequence
  Description of Artificial Sequence: Synthetic oligonucleotide
auuuaagcccaua

SEQ ID NO: 2103 - RNA, 15 nt, Artificial Sequence
  Description of Artificial Sequence: Synthetic oligonucleotide
auuaaaauaaacaug

SEQ ID NO: 2104 - RNA, 12 nt, Artificial Sequence
  Description of Artificial Sequence: Synthetic oligonucleotide
cuguucugaucg

SEQ ID NO: 2105 - RNA, 16 nt, Artificial Sequence
  Description of Artificial Sequence: Synthetic oligonucleotide
aaauaauuugaacuuu

SEQ ID NO: 2106 - RNA, 12 nt, Artificial Sequence
  Description of Artificial Sequence: Synthetic oligonucleotide
ugcgaccuuaau

SEQ ID NO: 2107 - RNA, 11 nt, Artificial Sequence
  Description of Artificial Sequence: Synthetic oligonucleotide
cugagaaagcu

SEQ ID NO: 2108 - RNA, 13 nt, Artificial Sequence
  Description of Artificial Sequence: Synthetic oligonucleotide
aguaaagaugcua

SEQ ID NO: 2109 - RNA, 12 nt, Artificial Sequence
  Description of Artificial Sequence: Synthetic oligonucleotide
cugcuuaauugc

SEQ ID NO: 2110 - RNA, 14 nt, Artificial Sequence
  Description of Artificial Sequence: Synthetic oligonucleotide
uaccauaugaauga

SEQ ID NO: 2111 - RNA, 12 nt, Artificial Sequence
  Description of Artificial Sequence: Synthetic oligonucleotide
aacuuucuuauc

SEQ ID NO: 2112 - RNA, 13 nt, Artificial Sequence
  Description of Artificial Sequence: Synthetic oligonucleotide
ccuugcaugacau

SEQ ID NO: 2113 - RNA, 14 nt, Artificial Sequence
  Description of Artificial Sequence: Synthetic oligonucleotide
ugaauuuguauaug

SEQ ID NO: 2114 - RNA, 12 nt, Artificial Sequence
  Description of Artificial Sequence: Synthetic oligonucleotide
gaauccuaguag

SEQ ID NO: 2115 - RNA, 10 nt, Artificial Sequence
  Description of Artificial Sequence: Synthetic oligonucleotide
gaaagggaag

SEQ ID NO: 2116 - RNA, 11 nt, Artificial Sequence
  Description of Artificial Sequence: Synthetic oligonucleotide
uaucggcaugc

SEQ ID NO: 2117 - RNA, 12 nt, Artificial Sequence
  Description of Artificial Sequence: Synthetic oligonucleotide
caccucauagua

SEQ ID NO: 2118 - RNA, 11 nt, Artificial Sequence
  Description of Artificial Sequence: Synthetic oligonucleotide
ccagaauugcc

SEQ ID NO: 2119 - RNA, 11 nt, Artificial Sequence
  Description of Artificial Sequence: Synthetic oligonucleotide
uggugaucugg

SEQ ID NO: 2120 - RNA, 12 nt, Artificial Sequence
  Description of Artificial Sequence: Synthetic oligonucleotide
gaucuggguaau

SEQ ID NO: 2121 - RNA, 12 nt, Artificial Sequence
  Description of Artificial Sequence: Synthetic oligonucleotide
ggaugugaugaa

SEQ ID NO: 2122 - RNA, 12 nt, Artificial Sequence
  Description of Artificial Sequence: Synthetic oligonucleotide
cauuuccacagc

SEQ ID NO: 2123 - RNA, 11 nt, Artificial Sequence
  Description of Artificial Sequence: Synthetic oligonucleotide
acagcuacacc

SEQ ID NO: 2124 - RNA, 12 nt, Artificial Sequence
  Description of Artificial Sequence: Synthetic oligonucleotide
ugcaguucuuac

SEQ ID NO: 2125 - RNA, 12 nt, Artificial Sequence
  Description of Artificial Sequence: Synthetic oligonucleotide
acgagaagaaga

SEQ ID NO: 2126 - RNA, 12 nt, Artificial Sequence
  Description of Artificial Sequence: Synthetic oligonucleotide
cgagaagaagau

SEQ ID NO: 2127 - RNA, 15 nt, Artificial Sequence
  Description of Artificial Sequence: Synthetic oligonucleotide
aagaagaucauuuac

SEQ ID NO: 2128 - RNA, 11 nt, Artificial Sequence
  Description of Artificial Sequence: Synthetic oligonucleotide
agaggaagagg

SEQ ID NO: 2129 - RNA, 12 nt, Artificial Sequence
  Description of Artificial Sequence: Synthetic oligonucleotide
gaggaagaggug

SEQ ID NO: 2130 - RNA, 13 nt, Artificial Sequence
  Description of Artificial Sequence: Synthetic oligonucleotide
cuacuuugagggc

SEQ ID NO: 2131 - RNA, 12 nt, Artificial Sequence
  Description of Artificial Sequence: Synthetic oligonucleotide
agggcaucuccu

SEQ ID NO: 2132 - RNA, 10 nt, Artificial Sequence
  Description of Artificial Sequence: Synthetic oligonucleotide
ggagugauau

SEQ ID NO: 2133 - RNA, 11 nt, Artificial Sequence
  Description of Artificial Sequence: Synthetic oligonucleotide
gagugauaugg

SEQ ID NO: 2134 - RNA, 12 nt, Artificial Sequence
  Description of Artificial Sequence: Synthetic oligonucleotide
ugcaguaaagau

SEQ ID NO: 2135 - RNA, 13 nt, Artificial Sequence
  Description of Artificial Sequence: Synthetic oligonucleotide
aguaaagauccua

SEQ ID NO: 2136 - RNA, 12 nt, Artificial Sequence
  Description of Artificial Sequence: Synthetic oligonucleotide
ugacaaaggaca

SEQ ID NO: 2137 - RNA, 13 nt, Artificial Sequence
  Description of Artificial Sequence: Synthetic oligonucleotide
gcaauugugaccc

SEQ ID NO: 2138 - RNA, 12 nt, Artificial Sequence
  Description of Artificial Sequence: Synthetic oligonucleotide
aacaucauccau

SEQ ID NO: 2139 - RNA, 12 nt, Artificial Sequence
  Description of Artificial Sequence: Synthetic oligonucleotide
ugaaauccaaca

SEQ ID NO: 2140 - RNA, 15 nt, Artificial Sequence
  Description of Artificial Sequence: Synthetic oligonucleotide
aacaauauauuucuc

SEQ ID NO: 2141 - RNA, 14 nt, Artificial Sequence
  Description of Artificial Sequence: Synthetic oligonucleotide
aacaguaaagucac

SEQ ID NO: 2142 - RNA, 14 nt, Artificial Sequence
  Description of Artificial Sequence: Synthetic oligonucleotide
ugugaagaaaguaa

SEQ ID NO: 2143 - RNA, 13 nt, Artificial Sequence
  Description of Artificial Sequence: Synthetic oligonucleotide
cuuccgagccauc

SEQ ID NO: 2144 - RNA, 12 nt, Artificial Sequence
  Description of Artificial Sequence: Synthetic oligonucleotide
aauggagguuga

SEQ ID NO: 2145 - RNA, 12 nt, Artificial Sequence
  Description of Artificial Sequence: Synthetic oligonucleotide
ggagguugaaua

SEQ ID NO: 2146 - RNA, 13 nt, Artificial Sequence
  Description of Artificial Sequence: Synthetic oligonucleotide
auuuugaguuuuc

SEQ ID NO: 2147 - RNA, 12 nt, Artificial Sequence
  Description of Artificial Sequence: Synthetic oligonucleotide
uauccuguuugu

SEQ ID NO: 2148 - RNA, 11 nt, Artificial Sequence
  Description of Artificial Sequence: Synthetic oligonucleotide
ccuguuuguuc

SEQ ID NO: 2149 - RNA, 10 nt, Artificial Sequence
  Description of Artificial Sequence: Synthetic oligonucleotide
cucuacagcc

SEQ ID NO: 2150 - RNA, 12 nt, Artificial Sequence
  Description of Artificial Sequence: Synthetic oligonucleotide
ucuuccauagcu

SEQ ID NO: 2151 - RNA, 12 nt, Artificial Sequence
  Description of Artificial Sequence: Synthetic oligonucleotide
auaaucuuccug

SEQ ID NO: 2152 - RNA, 12 nt, Artificial Sequence
  Description of Artificial Sequence: Synthetic oligonucleotide
uaaucuuccugu

SEQ ID NO: 2153 - RNA, 12 nt, Artificial Sequence
  Description of Artificial Sequence: Synthetic oligonucleotide
cuucaugacuug

SEQ ID NO: 2154 - RNA, 12 nt, Artificial Sequence
  Description of Artificial Sequence: Synthetic oligonucleotide
aagagggagaga

SEQ ID NO: 2155 - RNA, 12 nt, Artificial Sequence
  Description of Artificial Sequence: Synthetic oligonucleotide
cgucuccuacca

SEQ ID NO: 2156 - RNA, 12 nt, Artificial Sequence
  Description of Artificial Sequence: Synthetic oligonucleotide
gaucaaucggcc

SEQ ID NO: 2157 - RNA, 12 nt, Artificial Sequence
  Description of Artificial Sequence: Synthetic oligonucleotide
ggacgaacaucc

SEQ ID NO: 2158 - RNA, 11 nt, Artificial Sequence
  Description of Artificial Sequence: Synthetic oligonucleotide
agggucggaac

SEQ ID NO: 2159 - RNA, 10 nt, Artificial Sequence
  Description of Artificial Sequence: Synthetic oligonucleotide
ucggaaccca

SEQ ID NO: 2160 - RNA, 11 nt, Artificial Sequence
  Description of Artificial Sequence: Synthetic oligonucleotide
acccaagcuua

SEQ ID NO: 2161 - RNA, 14 nt, Artificial Sequence
  Description of Artificial Sequence: Synthetic oligonucleotide
gaacuuuaagcaac

SEQ ID NO: 2162 - RNA, 11 nt, Artificial Sequence
  Description of Artificial Sequence: Synthetic oligonucleotide
acuauucagug

SEQ ID NO: 2163 - RNA, 11 nt, Artificial Sequence
  Description of Artificial Sequence: Synthetic oligonucleotide
cuauucagugg

SEQ ID NO: 2164 - RNA, 13 nt, Artificial Sequence
  Description of Artificial Sequence: Synthetic oligonucleotide
aaacacagauaac

SEQ ID NO: 2165 - RNA, 12 nt, Artificial Sequence
  Description of Artificial Sequence: Synthetic oligonucleotide
cuuaagaaaaga

SEQ ID NO: 2166 - RNA, 12 nt, Artificial Sequence
  Description of Artificial Sequence: Synthetic oligonucleotide
cugaaggagugu

SEQ ID NO: 2167 - RNA, 10 nt, Artificial Sequence
  Description of Artificial Sequence: Synthetic oligonucleotide
ucaccgcggg

SEQ ID NO: 2168 - RNA, 14 nt, Artificial Sequence
  Description of Artificial Sequence: Synthetic oligonucleotide
agcagaaauaagcg

SEQ ID NO: 2169 - RNA, 12 nt, Artificial Sequence
  Description of Artificial Sequence: Synthetic oligonucleotide
aagcgugccguu

SEQ ID NO: 2170 - RNA, 12 nt, Artificial Sequence
  Description of Artificial Sequence: Synthetic oligonucleotide
agaaacagucac

SEQ ID NO: 2171 - RNA, 12 nt, Artificial Sequence
  Description of Artificial Sequence: Synthetic oligonucleotide
agaggaagaagg

SEQ ID NO: 2172 - RNA, 14 nt, Artificial Sequence
  Description of Artificial Sequence: Synthetic oligonucleotide
uguauucaaaauau

SEQ ID NO: 2173 - RNA, 13 nt, Artificial Sequence
  Description of Artificial Sequence: Synthetic oligonucleotide
auuuuccucccuu

SEQ ID NO: 2174 - RNA, 13 nt, Artificial Sequence
  Description of Artificial Sequence: Synthetic oligonucleotide
caaagaaagauag

SEQ ID NO: 2175 - RNA, 12 nt, Artificial Sequence
  Description of Artificial Sequence: Synthetic oligonucleotide
aagaaagauaga

SEQ ID NO: 2176 - RNA, 13 nt, Artificial Sequence
  Description of Artificial Sequence: Synthetic oligonucleotide
gaaagcauuuguu

SEQ ID NO: 2177 - RNA, 13 nt, Artificial Sequence
  Description of Artificial Sequence: Synthetic oligonucleotide
ugaguuaaacgaa

SEQ ID NO: 2178 - RNA, 12 nt, Artificial Sequence
  Description of Artificial Sequence: Synthetic oligonucleotide
acugauacagaa

SEQ ID NO: 2179 - RNA, 12 nt, Artificial Sequence
  Description of Artificial Sequence: Synthetic oligonucleotide
auauuauauaua

SEQ ID NO: 2180 - RNA, 12 nt, Artificial Sequence
  Description of Artificial Sequence: Synthetic oligonucleotide
auuauauauaua

SEQ ID NO: 2181 - RNA, 12 nt, Artificial Sequence
  Description of Artificial Sequence: Synthetic oligonucleotide
ucacuggaugua

SEQ ID NO: 2182 - RNA, 12 nt, Artificial Sequence
  Description of Artificial Sequence: Synthetic oligonucleotide
cagggaagagga

SEQ ID NO: 2183 - RNA, 15 nt, Artificial Sequence
  Description of Artificial Sequence: Synthetic oligonucleotide
augaucuuuuuuuug

SEQ ID NO: 2184 - RNA, 11 nt, Artificial Sequence
  Description of Artificial Sequence: Synthetic oligonucleotide
aguucacggcc

SEQ ID NO: 2185 - RNA, 13 nt, Artificial Sequence
  Description of Artificial Sequence: Synthetic oligonucleotide
caccaucacacca

SEQ ID NO: 2186 - RNA, 11 nt, Artificial Sequence
  Description of Artificial Sequence: Synthetic oligonucleotide
ccugcggguuu

SEQ ID NO: 2187 - RNA, 10 nt, Artificial Sequence
  Description of Artificial Sequence: Synthetic oligonucleotide
auccaguuug

SEQ ID NO: 2188 - RNA, 13 nt, Artificial Sequence
  Description of Artificial Sequence: Synthetic oligonucleotide
guuaaggacuucu

SEQ ID NO: 2189 - RNA, 13 nt, Artificial Sequence
  Description of Artificial Sequence: Synthetic oligonucleotide
cagugggacagag

SEQ ID NO: 2190 - RNA, 14 nt, Artificial Sequence
  Description of Artificial Sequence: Synthetic oligonucleotide
aauuuguuauugug

SEQ ID NO: 2191 - RNA, 13 nt, Artificial Sequence
  Description of Artificial Sequence: Synthetic oligonucleotide
uucaaaugcauuu

SEQ ID NO: 2192 - RNA, 10 nt, Artificial Sequence
  Description of Artificial Sequence: Synthetic oligonucleotide
caggaaagcc

SEQ ID NO: 2193 - RNA, 11 nt, Artificial Sequence
  Description of Artificial Sequence: Synthetic oligonucleotide
aggaaagcccu

SEQ ID NO: 2194 - RNA, 12 nt, Artificial Sequence
  Description of Artificial Sequence: Synthetic oligonucleotide
cccagcauggcc

SEQ ID NO: 2195 - RNA, 11 nt, Artificial Sequence
  Description of Artificial Sequence: Synthetic oligonucleotide
cuucucccuga

SEQ ID NO: 2196 - RNA, 12 nt, Artificial Sequence
  Description of Artificial Sequence: Synthetic oligonucleotide
gaagaagcccuu

SEQ ID NO: 2197 - RNA, 12 nt, Artificial Sequence
  Description of Artificial Sequence: Synthetic oligonucleotide
agaagcccuuca

SEQ ID NO: 2198 - RNA, 11 nt, Artificial Sequence
  Description of Artificial Sequence: Synthetic oligonucleotide
gcccuucagcg

SEQ ID NO: 2199 - RNA, 11 nt, Artificial Sequence
  Description of Artificial Sequence: Synthetic oligonucleotide
ccuucagcggc

SEQ ID NO: 2200 - RNA, 12 nt, Artificial Sequence
  Description of Artificial Sequence: Synthetic oligonucleotide
ucagcggccagu

SEQ ID NO: 2201 - RNA, 12 nt, Artificial Sequence
  Description of Artificial Sequence: Synthetic oligonucleotide
ugaaaagcuccg

SEQ ID NO: 2202 - RNA, 11 nt, Artificial Sequence
  Description of Artificial Sequence: Synthetic oligonucleotide
aaaagcuccgg

SEQ ID NO: 2203 - RNA, 13 nt, Artificial Sequence
  Description of Artificial Sequence: Synthetic oligonucleotide
agucaacagucug

SEQ ID NO: 2204 - RNA, 13 nt, Artificial Sequence
  Description of Artificial Sequence: Synthetic oligonucleotide
cagaguucaaaag

SEQ ID NO: 2205 - RNA, 13 nt, Artificial Sequence
  Description of Artificial Sequence: Synthetic oligonucleotide
agaguucaaaagc

SEQ ID NO: 2206 - RNA, 12 nt, Artificial Sequence
  Description of Artificial Sequence: Synthetic oligonucleotide
uucaaaagcccu

SEQ ID NO: 2207 - RNA, 12 nt, Artificial Sequence
  Description of Artificial Sequence: Synthetic oligonucleotide
ucaaaagcccuu

SEQ ID NO: 2208 - RNA, 12 nt, Artificial Sequence
  Description of Artificial Sequence: Synthetic oligonucleotide
aaaagcccuuca

SEQ ID NO: 2209 - RNA, 12 nt, Artificial Sequence
  Description of Artificial Sequence: Synthetic oligonucleotide
aaagcccuucag

SEQ ID NO: 2210 - RNA, 13 nt, Artificial Sequence
  Description of Artificial Sequence: Synthetic oligonucleotide
gugaagccgcucg

SEQ ID NO: 2211 - RNA, 12 nt, Artificial Sequence
  Description of Artificial Sequence: Synthetic oligonucleotide
cacgccagucaa

SEQ ID NO: 2212 - RNA, 13 nt, Artificial Sequence
  Description of Artificial Sequence: Synthetic oligonucleotide
uucuuggugcgug

SEQ ID NO: 2213 - RNA, 14 nt, Artificial Sequence
  Description of Artificial Sequence: Synthetic oligonucleotide
auuggauucaucag

SEQ ID NO: 2214 - RNA, 13 nt, Artificial Sequence
  Description of Artificial Sequence: Synthetic oligonucleotide
uggaauaccuaag

SEQ ID NO: 2215 - RNA, 12 nt, Artificial Sequence
  Description of Artificial Sequence: Synthetic oligonucleotide
auuugaggcuca

SEQ ID NO: 2216 - RNA, 11 nt, Artificial Sequence
  Description of Artificial Sequence: Synthetic oligonucleotide
ucuacaauugg

SEQ ID NO: 2217 - RNA, 12 nt, Artificial Sequence
  Description of Artificial Sequence: Synthetic oligonucleotide
uaguuaggagcc

SEQ ID NO: 2218 - RNA, 13 nt, Artificial Sequence
  Description of Artificial Sequence: Synthetic oligonucleotide
agucaauauccac

SEQ ID NO: 2219 - RNA, 13 nt, Artificial Sequence
  Description of Artificial Sequence: Synthetic oligonucleotide
auguucagucaca

SEQ ID NO: 2220 - RNA, 12 nt, Artificial Sequence
  Description of Artificial Sequence: Synthetic oligonucleotide
acacacacauac

SEQ ID NO: 2221 - RNA, 12 nt, Artificial Sequence
  Description of Artificial Sequence: Synthetic oligonucleotide
uuccuuuugcuu

SEQ ID NO: 2222 - RNA, 16 nt, Artificial Sequence
  Description of Artificial Sequence: Synthetic oligonucleotide
uuuuaaaguaauuuuu

SEQ ID NO: 2223 - RNA, 13 nt, Artificial Sequence
  Description of Artificial Sequence: Synthetic oligonucleotide
caacagucaaugg

SEQ ID NO: 2224 - RNA, 13 nt, Artificial Sequence
  Description of Artificial Sequence: Synthetic oligonucleotide
ucgacaaaccaau

SEQ ID NO: 2225 - RNA, 12 nt, Artificial Sequence
  Description of Artificial Sequence: Synthetic oligonucleotide
acugcuaccacu

SEQ ID NO: 2226 - RNA, 13 nt, Artificial Sequence
  Description of Artificial Sequence: Synthetic oligonucleotide
gcaagcggucuua

SEQ ID NO: 2227 - RNA, 13 nt, Artificial Sequence
  Description of Artificial Sequence: Synthetic oligonucleotide
ggucuuaccggcu

SEQ ID NO: 2228 - RNA, 11 nt, Artificial Sequence
  Description of Artificial Sequence: Synthetic oligonucleotide
gauggguuacc

SEQ ID NO: 2229 - RNA, 11 nt, Artificial Sequence
  Description of Artificial Sequence: Synthetic oligonucleotide
guuaccugcga

SEQ ID NO: 2230 - RNA, 12 nt, Artificial Sequence
  Description of Artificial Sequence: Synthetic oligonucleotide
aaucuugcugag

SEQ ID NO: 2231 - RNA, 13 nt, Artificial Sequence
  Description of Artificial Sequence: Synthetic oligonucleotide
agcauaaaacagu

SEQ ID NO: 2232 - RNA, 12 nt, Artificial Sequence
  Description of Artificial Sequence: Synthetic oligonucleotide
guccuuuauccu

SEQ ID NO: 2233 - RNA, 12 nt, Artificial Sequence
  Description of Artificial Sequence: Synthetic oligonucleotide
caacgcaaguug

SEQ ID NO: 2234 - RNA, 13 nt, Artificial Sequence
  Description of Artificial Sequence: Synthetic oligonucleotide
aaacugaaaccau

SEQ ID NO: 2235 - RNA, 14 nt, Artificial Sequence
  Description of Artificial Sequence: Synthetic oligonucleotide
acuuuguuaaauau

SEQ ID NO: 2236 - RNA, 14 nt, Artificial Sequence
  Description of Artificial Sequence: Synthetic oligonucleotide
guauauuaaaaguu

SEQ ID NO: 2237 - RNA, 13 nt, Artificial Sequence
  Description of Artificial Sequence: Synthetic oligonucleotide
guuuugacuuaac

SEQ ID NO: 2238 - RNA, 13 nt, Artificial Sequence
  Description of Artificial Sequence: Synthetic oligonucleotide
gcaaacucagcac

SEQ ID NO: 2239 - RNA, 11 nt, Artificial Sequence
  Description of Artificial Sequence: Synthetic oligonucleotide
ugcugaccuca

SEQ ID NO: 2240 - RNA, 14 nt, Artificial Sequence
  Description of Artificial Sequence: Synthetic oligonucleotide
uuuauucagaucgc

SEQ ID NO: 2241 - RNA, 13 nt, Artificial Sequence
  Description of Artificial Sequence: Synthetic oligonucleotide
aggguucugggau

SEQ ID NO: 2242 - RNA, 15 nt, Artificial Sequence
  Description of Artificial Sequence: Synthetic oligonucleotide
auauuggaaauuaug

SEQ ID NO: 2243 - RNA, 13 nt, Artificial Sequence
  Description of Artificial Sequence: Synthetic oligonucleotide
auggaagcacuag

SEQ ID NO: 2244 - RNA, 13 nt, Artificial Sequence
  Description of Artificial Sequence: Synthetic oligonucleotide
guuuuuaugugga

SEQ ID NO: 2245 - RNA, 12 nt, Artificial Sequence
  Description of Artificial Sequence: Synthetic oligonucleotide
ggaauugguaga

SEQ ID NO: 2246 - RNA, 13 nt, Artificial Sequence
  Description of Artificial Sequence: Synthetic oligonucleotide
uuagacuuggaga

SEQ ID NO: 2247 - RNA, 13 nt, Artificial Sequence
  Description of Artificial Sequence: Synthetic oligonucleotide
uuacaguauucca

SEQ ID NO: 2248 - RNA, 15 nt, Artificial Sequence
  Description of Artificial Sequence: Synthetic oligonucleotide
ccacugaugaauuaa

SEQ ID NO: 2249 - RNA, 12 nt, Artificial Sequence
  Description of Artificial Sequence: Synthetic oligonucleotide
ccacaucaucac

SEQ ID NO: 2250 - RNA, 13 nt, Artificial Sequence
  Description of Artificial Sequence: Synthetic oligonucleotide
cucaccaaacaga

SEQ ID NO: 2251 - RNA, 12 nt, Artificial Sequence
  Description of Artificial Sequence: Synthetic oligonucleotide
ggaacaugaugg

SEQ ID NO: 2252 - RNA, 12 nt, Artificial Sequence
  Description of Artificial Sequence: Synthetic oligonucleotide
cauguagacugc

SEQ ID NO: 2253 - RNA, 13 nt, Artificial Sequence
  Description of Artificial Sequence: Synthetic oligonucleotide
ggaucuauuuaug

SEQ ID NO: 2254 - RNA, 12 nt, Artificial Sequence
  Description of Artificial Sequence: Synthetic oligonucleotide
gcacuauuauca

SEQ ID NO: 2255 - RNA, 11 nt, Artificial Sequence
  Description of Artificial Sequence: Synthetic oligonucleotide
aucaguucugc

SEQ ID NO: 2256 - RNA, 13 nt, Artificial Sequence
  Description of Artificial Sequence: Synthetic oligonucleotide
agauuaaaccuac

SEQ ID NO: 2257 - RNA, 13 nt, Artificial Sequence
  Description of Artificial Sequence: Synthetic oligonucleotide
auaaaauccuucu

SEQ ID NO: 2258 - RNA, 12 nt, Artificial Sequence
  Description of Artificial Sequence: Synthetic oligonucleotide
aaugcuguagac

SEQ ID NO: 2259 - RNA, 13 nt, Artificial Sequence
  Description of Artificial Sequence: Synthetic oligonucleotide
uugauaggaauag

SEQ ID NO: 2260 - RNA, 11 nt, Artificial Sequence
  Description of Artificial Sequence: Synthetic oligonucleotide
aauggcccuga

SEQ ID NO: 2261 - RNA, 11 nt, Artificial Sequence
  Description of Artificial Sequence: Synthetic oligonucleotide
uuccucaagca

SEQ ID NO: 2262 - RNA, 10 nt, Artificial Sequence
  Description of Artificial Sequence: Synthetic oligonucleotide
guucagccca

SEQ ID NO: 2263 - RNA, 11 nt, Artificial Sequence
  Description of Artificial Sequence: Synthetic oligonucleotide
gcugcugaacc

SEQ ID NO: 2264 - RNA, 12 nt, Artificial Sequence
  Description of Artificial Sequence: Synthetic oligonucleotide
aaguucucuuca

SEQ ID NO: 2265 - RNA, 11 nt, Artificial Sequence
  Description of Artificial Sequence: Synthetic oligonucleotide
ccagccuagag

SEQ ID NO: 2266 - RNA, 13 nt, Artificial Sequence
  Description of Artificial Sequence: Synthetic oligonucleotide
cucugugaagugu

SEQ ID NO: 2267 - RNA, 14 nt, Artificial Sequence
  Description of Artificial Sequence: Synthetic oligonucleotide
ugagaaaauuucaa

SEQ ID NO: 2268 - RNA, 11 nt, Artificial Sequence
  Description of Artificial Sequence: Synthetic oligonucleotide
aauccuccuga

SEQ ID NO: 2269 - RNA, 12 nt, Artificial Sequence
  Description of Artificial Sequence: Synthetic oligonucleotide
gugacaucauau

SEQ ID NO: 2270 - RNA, 13 nt, Artificial Sequence
  Description of Artificial Sequence: Synthetic oligonucleotide
aaucuucaucaua

SEQ ID NO: 2271 - RNA, 13 nt, Artificial Sequence
  Description of Artificial Sequence: Synthetic oligonucleotide
gacuagcuauuaa

SEQ ID NO: 2272 - RNA, 14 nt, Artificial Sequence
  Description of Artificial Sequence: Synthetic oligonucleotide
ucucuacuaaaaau

SEQ ID NO: 2273 - RNA, 12 nt, Artificial Sequence
  Description of Artificial Sequence: Synthetic oligonucleotide
ucuaucucgccu

SEQ ID NO: 2274 - RNA, 13 nt, Artificial Sequence
  Description of Artificial Sequence: Synthetic oligonucleotide
cuucgguccaguu

SEQ ID NO: 2275 - RNA, 11 nt, Artificial Sequence
  Description of Artificial Sequence: Synthetic oligonucleotide
gauguagccgc

SEQ ID NO: 2276 - RNA, 12 nt, Artificial Sequence
  Description of Artificial Sequence: Synthetic oligonucleotide
ugaggagacuug

SEQ ID NO: 2277 - RNA, 12 nt, Artificial Sequence
  Description of Artificial Sequence: Synthetic oligonucleotide
gaguagugagga

SEQ ID NO: 2278 - RNA, 14 nt, Artificial Sequence
  Description of Artificial Sequence: Synthetic oligonucleotide
cagaugaguacaaa

SEQ ID NO: 2279 - RNA, 13 nt, Artificial Sequence
  Description of Artificial Sequence: Synthetic oligonucleotide
guuguuaaugggc

SEQ ID NO: 2280 - RNA, 13 nt, Artificial Sequence
  Description of Artificial Sequence: Synthetic oligonucleotide
uuuuuaauuuauu

SEQ ID NO: 2281 - RNA, 12 nt, Artificial Sequence
  Description of Artificial Sequence: Synthetic oligonucleotide
uauuuaaauaug

SEQ ID NO: 2282 - RNA, 13 nt, Artificial Sequence
  Description of Artificial Sequence: Synthetic oligonucleotide
uauccuuuguuuc

SEQ ID NO: 2283 - RNA, 14 nt, Artificial Sequence
  Description of Artificial Sequence: Synthetic oligonucleotide
cgucuaaguguuug

SEQ ID NO: 2284 - RNA, 12 nt, Artificial Sequence
  Description of Artificial Sequence: Synthetic oligonucleotide
accugugacaaa

SEQ ID NO: 2285 - RNA, 13 nt, Artificial Sequence
  Description of Artificial Sequence: Synthetic oligonucleotide
ccaggcugaauua

SEQ ID NO: 2286 - RNA, 14 nt, Artificial Sequence
  Description of Artificial Sequence: Synthetic oligonucleotide
gucauucuuacaau

SEQ ID NO: 2287 - RNA, 15 nt, Artificial Sequence
  Description of Artificial Sequence: Synthetic oligonucleotide
ucauucuuacaauug

SEQ ID NO: 2288 - RNA, 12 nt, Artificial Sequence
  Description of Artificial Sequence: Synthetic oligonucleotide
cagagaguguac

SEQ ID NO: 2289 - RNA, 12 nt, Artificial Sequence
  Description of Artificial Sequence: Synthetic oligonucleotide
agaacucagcag

SEQ ID NO: 2290 - RNA, 13 nt, Artificial Sequence
  Description of Artificial Sequence: Synthetic oligonucleotide
uuuauuuucagua

SEQ ID NO: 2291 - RNA, 12 nt, Artificial Sequence
  Description of Artificial Sequence: Synthetic oligonucleotide
ucuuaaauggaa

SEQ ID NO: 2292 - RNA, 13 nt, Artificial Sequence
  Description of Artificial Sequence: Synthetic oligonucleotide
ugccuaaaauugu

SEQ ID NO: 2293 - RNA, 12 nt, Artificial Sequence
  Description of Artificial Sequence: Synthetic oligonucleotide
agacugugagcu

SEQ ID NO: 2294 - RNA, 14 nt, Artificial Sequence
  Description of Artificial Sequence: Synthetic oligonucleotide
ugcuuuuuauuaau

SEQ ID NO: 2295 - RNA, 13 nt, Artificial Sequence
  Description of Artificial Sequence: Synthetic oligonucleotide
cucuucuuacauu

SEQ ID NO: 2296 - RNA, 15 nt, Artificial Sequence
  Description of Artificial Sequence: Synthetic oligonucleotide
cauuuguaaaaaugu

SEQ ID NO: 2297 - RNA, 15 nt, Artificial Sequence
  Description of Artificial Sequence: Synthetic oligonucleotide
aucuuaauucauauu

SEQ ID NO: 2298 - RNA, 13 nt, Artificial Sequence
  Description of Artificial Sequence: Synthetic oligonucleotide
gaacuaaucauga

SEQ ID NO: 2299 - RNA, 12 nt, Artificial Sequence
  Description of Artificial Sequence: Synthetic oligonucleotide
ucugcucuuggg

SEQ ID NO: 2300 - RNA, 13 nt, Artificial Sequence
  Description of Artificial Sequence: Synthetic oligonucleotide
caguagcuuugag

SEQ ID NO: 2301 - RNA, 14 nt, Artificial Sequence
  Description of Artificial Sequence: Synthetic oligonucleotide
cacguaauauuuca

SEQ ID NO: 2302 - RNA, 13 nt, Artificial Sequence
  Description of Artificial Sequence: Synthetic oligonucleotide
uauucucuucacu

SEQ ID NO: 2303 - RNA, 14 nt, Artificial Sequence
  Description of Artificial Sequence: Synthetic oligonucleotide
cuaaugcuaagaaa

SEQ ID NO: 2304 - RNA, 12 nt, Artificial Sequence
  Description of Artificial Sequence: Synthetic oligonucleotide
gcugaaaaucaa

SEQ ID NO: 2305 - RNA, 14 nt, Artificial Sequence
  Description of Artificial Sequence: Synthetic oligonucleotide
aauaugauuacuuu

SEQ ID NO: 2306 - RNA, 14 nt, Artificial Sequence
  Description of Artificial Sequence: Synthetic oligonucleotide
cauuuuguucuaca

SEQ ID NO: 2307 - RNA, 12 nt, Artificial Sequence
  Description of Artificial Sequence: Synthetic oligonucleotide
cccgggacucuc

SEQ ID NO: 2308 - RNA, 14 nt, Artificial Sequence
  Description of Artificial Sequence: Synthetic oligonucleotide
ccuuuaaaguaaag

SEQ ID NO: 2309 - RNA, 13 nt, Artificial Sequence
  Description of Artificial Sequence: Synthetic oligonucleotide
ucuggaagccugg

SEQ ID NO: 2310 - RNA, 14 nt, Artificial Sequence
  Description of Artificial Sequence: Synthetic oligonucleotide
aaaacaaaagagag

SEQ ID NO: 2311 - RNA, 13 nt, Artificial Sequence
  Description of Artificial Sequence: Synthetic oligonucleotide
aucaguuaugccg

SEQ ID NO: 2312 - RNA, 13 nt, Artificial Sequence
  Description of Artificial Sequence: Synthetic oligonucleotide
uaaaagaagucca

SEQ ID NO: 2313 - RNA, 11 nt, Artificial Sequence
  Description of Artificial Sequence: Synthetic oligonucleotide
aggugagguua

SEQ ID NO: 2314 - RNA, 11 nt, Artificial Sequence
  Description of Artificial Sequence: Synthetic oligonucleotide
gggaagaggac

SEQ ID NO: 2315 - RNA, 13 nt, Artificial Sequence
  Description of Artificial Sequence: Synthetic oligonucleotide
aagcaaguauugu

SEQ ID NO: 2316 - RNA, 12 nt, Artificial Sequence
  Description of Artificial Sequence: Synthetic oligonucleotide
auuguagcacuc

SEQ ID NO: 2317 - RNA, 14 nt, Artificial Sequence
  Description of Artificial Sequence: Synthetic oligonucleotide
acaaaaccacaaau

SEQ ID NO: 2318 - RNA, 12 nt, Artificial Sequence
  Description of Artificial Sequence: Synthetic oligonucleotide
uaagcccauaca

SEQ ID NO: 2319 - RNA, 11 nt, Artificial Sequence
  Description of Artificial Sequence: Synthetic oligonucleotide
agcccauacag

SEQ ID NO: 2320 - RNA, 12 nt, Artificial Sequence
  Description of Artificial Sequence: Synthetic oligonucleotide
cagaaaccuucc

SEQ ID NO: 2321 - RNA, 10 nt, Artificial Sequence
  Description of Artificial Sequence: Synthetic oligonucleotide
guauaccuac

SEQ ID NO: 2322 - RNA, 13 nt, Artificial Sequence
  Description of Artificial Sequence: Synthetic oligonucleotide
gccaguuuucgga

SEQ ID NO: 2323 - RNA, 9 nt, Artificial Sequence
  Description of Artificial Sequence: Synthetic oligonucleotide
ggaacaggg

SEQ ID NO: 2324 - RNA, 13 nt, Artificial Sequence
  Description of Artificial Sequence: Synthetic oligonucleotide
uuaacuuuccagu

SEQ ID NO: 2325 - RNA, 14 nt, Artificial Sequence
  Description of Artificial Sequence: Synthetic oligonucleotide
aaaguuugguuuug

SEQ ID NO: 2326 - RNA, 12 nt, Artificial Sequence
  Description of Artificial Sequence: Synthetic oligonucleotide
cuucccacugua

SEQ ID NO: 2327 - RNA, 13 nt, Artificial Sequence
  Description of Artificial Sequence: Synthetic oligonucleotide
ugauaccauauga

SEQ ID NO: 2328 - RNA, 11 nt, Artificial Sequence
  Description of Artificial Sequence: Synthetic oligonucleotide
aacaugggcug

SEQ ID NO: 2329 - RNA, 13 nt, Artificial Sequence
  Description of Artificial Sequence: Synthetic oligonucleotide
caacuuuuucaua

SEQ ID NO: 2330 - RNA, 12 nt, Artificial Sequence
  Description of Artificial Sequence: Synthetic oligonucleotide
caugaggccgga

SEQ ID NO: 2331 - RNA, 11 nt, Artificial Sequence
  Description of Artificial Sequence: Synthetic oligonucleotide
acugcauuugu

SEQ ID NO: 2332 - RNA, 13 nt, Artificial Sequence
  Description of Artificial Sequence: Synthetic oligonucleotide
aauguuuacuacc

SEQ ID NO: 2333 - RNA, 15 nt, Artificial Sequence
  Description of Artificial Sequence: Synthetic oligonucleotide
aauuuuuugaugaaa

SEQ ID NO: 2334 - RNA, 14 nt, Artificial Sequence
  Description of Artificial Sequence: Synthetic oligonucleotide
cagugugugaauuu

SEQ ID NO: 2335 - RNA, 13 nt, Artificial Sequence
  Description of Artificial Sequence: Synthetic oligonucleotide
gagcaauguaugu

SEQ ID NO: 2336 - RNA, 14 nt, Artificial Sequence
  Description of Artificial Sequence: Synthetic oligonucleotide
aaagcacauauaua

SEQ ID NO: 2337 - RNA, 14 nt, Artificial Sequence
  Description of Artificial Sequence: Synthetic oligonucleotide
guaauaguuucucc

SEQ ID NO: 2338 - RNA, 13 nt, Artificial Sequence
  Description of Artificial Sequence: Synthetic oligonucleotide
aguuucuccaaau

SEQ ID NO: 2339 - RNA, 13 nt, Artificial Sequence
  Description of Artificial Sequence: Synthetic oligonucleotide
uacuuccuagaaa

SEQ ID NO: 2340 - RNA, 13 nt, Artificial Sequence
  Description of Artificial Sequence: Synthetic oligonucleotide
uacaccauauaug

SEQ ID NO: 2341 - RNA, 14 nt, Artificial Sequence
  Description of Artificial Sequence: Synthetic oligonucleotide
auauaugaauggag

SEQ ID NO: 2342 - RNA, 13 nt, Artificial Sequence
  Description of Artificial Sequence: Synthetic oligonucleotide
acgagaagaagau

SEQ ID NO: 2343 - RNA, 13 nt, Artificial Sequence
  Description of Artificial Sequence: Synthetic oligonucleotide
ucauuuacaggga

SEQ ID NO: 2344 - RNA, 13 nt, Artificial Sequence
  Description of Artificial Sequence: Synthetic oligonucleotide
cauuuacagggac

SEQ ID NO: 2345 - RNA, 10 nt, Artificial Sequence
  Description of Artificial Sequence: Synthetic oligonucleotide
agggaccuga

SEQ ID NO: 2346 - RNA, 14 nt, Artificial Sequence
  Description of Artificial Sequence: Synthetic oligonucleotide
uguuugacugcauc

SEQ ID NO: 2347 - RNA, 13 nt, Artificial Sequence
  Description of Artificial Sequence: Synthetic oligonucleotide
uuugacugcaucg

SEQ ID NO: 2348 - RNA, 12 nt, Artificial Sequence
  Description of Artificial Sequence: Synthetic oligonucleotide
gaguucacaggg

SEQ ID NO: 2349 - RNA, 13 nt, Artificial Sequence
  Description of Artificial Sequence: Synthetic oligonucleotide
ggcaccucugucc

SEQ ID NO: 2350 - RNA, 15 nt, Artificial Sequence
  Description of Artificial Sequence: Synthetic oligonucleotide
gguuugucuuuuuaa

SEQ ID NO: 2351 - RNA, 14 nt, Artificial Sequence
  Description of Artificial Sequence: Synthetic oligonucleotide
uuugucuuuuuaag

SEQ ID NO: 2352 - RNA, 13 nt, Artificial Sequence
  Description of Artificial Sequence: Synthetic oligonucleotide
ccuaaagguuguc

SEQ ID NO: 2353 - RNA, 12 nt, Artificial Sequence
  Description of Artificial Sequence: Synthetic oligonucleotide
aagguugucgac

SEQ ID NO: 2354 - RNA, 13 nt, Artificial Sequence
  Description of Artificial Sequence: Synthetic oligonucleotide
accuggcaauugu

SEQ ID NO: 2355 - RNA, 12 nt, Artificial Sequence
  Description of Artificial Sequence: Synthetic oligonucleotide
aguggugcgagg

SEQ ID NO: 2356 - RNA, 13 nt, Artificial Sequence
  Description of Artificial Sequence: Synthetic oligonucleotide
agagacaugaaau

SEQ ID NO: 2357 - RNA, 13 nt, Artificial Sequence
  Description of Artificial Sequence: Synthetic oligonucleotide
auauauuucucca

SEQ ID NO: 2358 - RNA, 10 nt, Artificial Sequence
  Description of Artificial Sequence: Synthetic oligonucleotide
caugaaggcu

SEQ ID NO: 2359 - RNA, 11 nt, Artificial Sequence
  Description of Artificial Sequence: Synthetic oligonucleotide
gcuggaguggu

SEQ ID NO: 2360 - RNA, 11 nt, Artificial Sequence
  Description of Artificial Sequence: Synthetic oligonucleotide
aggaagagagg

SEQ ID NO: 2361 - RNA, 12 nt, Artificial Sequence
  Description of Artificial Sequence: Synthetic oligonucleotide
cuugcaucgggc

SEQ ID NO: 2362 - RNA, 13 nt, Artificial Sequence
  Description of Artificial Sequence: Synthetic oligonucleotide
auauccuacugug

SEQ ID NO: 2363 - RNA, 13 nt, Artificial Sequence
  Description of Artificial Sequence: Synthetic oligonucleotide
uccuacuguguaa

SEQ ID NO: 2364 - RNA, 12 nt, Artificial Sequence
  Description of Artificial Sequence: Synthetic oligonucleotide
ccuuguagugua

SEQ ID NO: 2365 - RNA, 13 nt, Artificial Sequence
  Description of Artificial Sequence: Synthetic oligonucleotide
ucuuuguugauug

SEQ ID NO: 2366 - RNA, 14 nt, Artificial Sequence
  Description of Artificial Sequence: Synthetic oligonucleotide
uuuguugauugaaa

SEQ ID NO: 2367 - RNA, 15 nt, Artificial Sequence
  Description of Artificial Sequence: Synthetic oligonucleotide
uucuuuuucuuccau

SEQ ID NO: 2368 - RNA, 13 nt, Artificial Sequence
  Description of Artificial Sequence: Synthetic oligonucleotide
aaucuuccuucua

SEQ ID NO: 2369 - RNA, 13 nt, Artificial Sequence
  Description of Artificial Sequence: Synthetic oligonucleotide
uugaaugcuucau

SEQ ID NO: 2370 - RNA, 13 nt, Artificial Sequence
  Description of Artificial Sequence: Synthetic oligonucleotide
ugaaugcuucaug

SEQ ID NO: 2371 - RNA, 13 nt, Artificial Sequence
  Description of Artificial Sequence: Synthetic oligonucleotide
aauucuacuuuga

SEQ ID NO: 2372 - RNA, 13 nt, Artificial Sequence
  Description of Artificial Sequence: Synthetic oligonucleotide
agcaacuacagac

SEQ ID NO: 2373 - RNA, 13 nt, Artificial Sequence
  Description of Artificial Sequence: Synthetic oligonucleotide
gaccaaggucaac

SEQ ID NO: 2374 - RNA, 13 nt, Artificial Sequence
  Description of Artificial Sequence: Synthetic oligonucleotide
cgacuaucucgac

SEQ ID NO: 2375 - RNA, 13 nt, Artificial Sequence
  Description of Artificial Sequence: Synthetic oligonucleotide
aaccuucccaaac

SEQ ID NO: 2376 - RNA, 14 nt, Artificial Sequence
  Description of Artificial Sequence: Synthetic oligonucleotide
ccaagcuuagaacu

SEQ ID NO: 2377 - RNA, 15 nt, Artificial Sequence
  Description of Artificial Sequence: Synthetic oligonucleotide
agcuuagaacuuuaa

SEQ ID NO: 2378 - RNA, 11 nt, Artificial Sequence
  Description of Artificial Sequence: Synthetic oligonucleotide
aagaccaccac

SEQ ID NO: 2379 - RNA, 14 nt, Artificial Sequence
  Description of Artificial Sequence: Synthetic oligonucleotide
gcgagaaauaaagu

SEQ ID NO: 2380 - RNA, 14 nt, Artificial Sequence
  Description of Artificial Sequence: Synthetic oligonucleotide
cgagaaauaaaguu

SEQ ID NO: 2381 - RNA, 12 nt, Artificial Sequence
  Description of Artificial Sequence: Synthetic oligonucleotide
aggaaaugaucc

SEQ ID NO: 2382 - RNA, 13 nt, Artificial Sequence
  Description of Artificial Sequence: Synthetic oligonucleotide
gaagaaaugaaac

SEQ ID NO: 2383 - RNA, 13 nt, Artificial Sequence
  Description of Artificial Sequence: Synthetic oligonucleotide
guuuccauccucc

SEQ ID NO: 2384 - RNA, 15 nt, Artificial Sequence
  Description of Artificial Sequence: Synthetic oligonucleotide
acugaaaaucuuuga

SEQ ID NO: 2385 - RNA, 11 nt, Artificial Sequence
  Description of Artificial Sequence: Synthetic oligonucleotide
ugccguucagg

SEQ ID NO: 2386 - RNA, 13 nt, Artificial Sequence
  Description of Artificial Sequence: Synthetic oligonucleotide
caggguccagaag

SEQ ID NO: 2387 - RNA, 13 nt, Artificial Sequence
  Description of Artificial Sequence: Synthetic oligonucleotide
ucaagacugcuug

SEQ ID NO: 2388 - RNA, 13 nt, Artificial Sequence
  Description of Artificial Sequence: Synthetic oligonucleotide
uccaugucuuugg

SEQ ID NO: 2389 - RNA, 11 nt, Artificial Sequence
  Description of Artificial Sequence: Synthetic oligonucleotide
gccugaaacac

SEQ ID NO: 2390 - RNA, 12 nt, Artificial Sequence
  Description of Artificial Sequence: Synthetic oligonucleotide
ucucuguaccuc

SEQ ID NO: 2391 - RNA, 12 nt, Artificial Sequence
  Description of Artificial Sequence: Synthetic oligonucleotide
agcaagacaaga

SEQ ID NO: 2392 - RNA, 13 nt, Artificial Sequence
  Description of Artificial Sequence: Synthetic oligonucleotide
gcaagacaagaaa

SEQ ID NO: 2393 - RNA, 12 nt, Artificial Sequence
  Description of Artificial Sequence: Synthetic oligonucleotide
uguacaagaucc

SEQ ID NO: 2394 - RNA, 12 nt, Artificial Sequence
  Description of Artificial Sequence: Synthetic oligonucleotide
cguacuugcaga

SEQ ID NO: 2395 - RNA, 13 nt, Artificial Sequence
  Description of Artificial Sequence: Synthetic oligonucleotide
cgaucgauacaga

SEQ ID NO: 2396 - RNA, 13 nt, Artificial Sequence
  Description of Artificial Sequence: Synthetic oligonucleotide
uauaaaaauaaau

SEQ ID NO: 2397 - RNA, 13 nt, Artificial Sequence
  Description of Artificial Sequence: Synthetic oligonucleotide
uaaaaauaaauau

SEQ ID NO: 2398 - RNA, 13 nt, Artificial Sequence
  Description of Artificial Sequence: Synthetic oligonucleotide
uuugacugcugug

SEQ ID NO: 2399 - RNA, 13 nt, Artificial Sequence
  Description of Artificial Sequence: Synthetic oligonucleotide
ggagaugagagac

SEQ ID NO: 2400 - RNA, 10 nt, Artificial Sequence
  Description of Artificial Sequence: Synthetic oligonucleotide
ucccacuugg

SEQ ID NO: 2401 - RNA, 10 nt, Artificial Sequence
  Description of Artificial Sequence: Synthetic oligonucleotide
guucacggcc

SEQ ID NO: 2402 - RNA, 12 nt, Artificial Sequence
  Description of Artificial Sequence: Synthetic oligonucleotide
accaucacacca

SEQ ID NO: 2403 - RNA, 10 nt, Artificial Sequence
  Description of Artificial Sequence: Synthetic oligonucleotide
cugcggguuu

SEQ ID NO: 2404 - RNA, 9 nt, Artificial Sequence
  Description of Artificial Sequence: Synthetic oligonucleotide
uccaguuug

SEQ ID NO: 2405 - RNA, 12 nt, Artificial Sequence
  Description of Artificial Sequence: Synthetic oligonucleotide
uuaaggacuucu

SEQ ID NO: 2406 - RNA, 12 nt, Artificial Sequence
  Description of Artificial Sequence: Synthetic oligonucleotide
agugggacagag

SEQ ID NO: 2407 - RNA, 13 nt, Artificial Sequence
  Description of Artificial Sequence: Synthetic oligonucleotide
auuuguuauugug

SEQ ID NO: 2408 - RNA, 12 nt, Artificial Sequence
  Description of Artificial Sequence: Synthetic oligonucleotide
ucaaaugcauuu

SEQ ID NO: 2409 - RNA, 9 nt, Artificial Sequence
  Description of Artificial Sequence: Synthetic oligonucleotide
aggaaagcc

SEQ ID NO: 2410 - RNA, 10 nt, Artificial Sequence
  Description of Artificial Sequence: Synthetic oligonucleotide
ggaaagcccu

SEQ ID NO: 2411 - RNA, 11 nt, Artificial Sequence
  Description of Artificial Sequence: Synthetic oligonucleotide
ccagcauggcc

SEQ ID NO: 2412 - RNA, 10 nt, Artificial Sequence
  Description of Artificial Sequence: Synthetic oligonucleotide
uucucccuga

SEQ ID NO: 2413 - RNA, 11 nt, Artificial Sequence
  Description of Artificial Sequence: Synthetic oligonucleotide
aagaagcccuu

SEQ ID NO: 2414 - RNA, 11 nt, Artificial Sequence
  Description of Artificial Sequence: Synthetic oligonucleotide
gaagcccuuca

SEQ ID NO: 2415 - RNA, 10 nt, Artificial Sequence
  Description of Artificial Sequence: Synthetic oligonucleotide
cccuucagcg

SEQ ID NO: 2416 - RNA, 10 nt, Artificial Sequence
  Description of Artificial Sequence: Synthetic oligonucleotide
cuucagcggc

SEQ ID NO: 2417 - RNA, 11 nt, Artificial Sequence
  Description of Artificial Sequence: Synthetic oligonucleotide
cagcggccagu

SEQ ID NO: 2418 - RNA, 11 nt, Artificial Sequence
  Description of Artificial Sequence: Synthetic oligonucleotide
gaaaagcuccg

SEQ ID NO: 2419 - RNA, 10 nt, Artificial Sequence
  Description of Artificial Sequence: Synthetic oligonucleotide
aaagcuccgg

SEQ ID NO: 2420 - RNA, 12 nt, Artificial Sequence
  Description of Artificial Sequence: Synthetic oligonucleotide
gucaacagucug

SEQ ID NO: 2421 - RNA, 12 nt, Artificial Sequence
  Description of Artificial Sequence: Synthetic oligonucleotide
agaguucaaaag

SEQ ID NO: 2422 - RNA, 12 nt, Artificial Sequence
  Description of Artificial Sequence: Synthetic oligonucleotide
gaguucaaaagc

SEQ ID NO: 2423 - RNA, 11 nt, Artificial Sequence
  Description of Artificial Sequence: Synthetic oligonucleotide
ucaaaagcccu

SEQ ID NO: 2424 - RNA, 11 nt, Artificial Sequence
  Description of Artificial Sequence: Synthetic oligonucleotide
caaaagcccuu

SEQ ID NO: 2425 - RNA, 11 nt, Artificial Sequence
  Description of Artificial Sequence: Synthetic oligonucleotide
aaagcccuuca

SEQ ID NO: 2426 - RNA, 11 nt, Artificial Sequence
  Description of Artificial Sequence: Synthetic oligonucleotide
aagcccuucag

SEQ ID NO: 2427 - RNA, 12 nt, Artificial Sequence
  Description of Artificial Sequence: Synthetic oligonucleotide
ugaagccgcucg

SEQ ID NO: 2428 - RNA, 11 nt, Artificial Sequence
  Description of Artificial Sequence: Synthetic oligonucleotide
acgccagucaa

SEQ ID NO: 2429 - RNA, 12 nt, Artificial Sequence
  Description of Artificial Sequence: Synthetic oligonucleotide
ucuuggugcgug

SEQ ID NO: 2430 - RNA, 13 nt, Artificial Sequence
  Description of Artificial Sequence: Synthetic oligonucleotide
uuggauucaucag

SEQ ID NO: 2431 - RNA, 12 nt, Artificial Sequence
  Description of Artificial Sequence: Synthetic oligonucleotide
ggaauaccuaag

SEQ ID NO: 2432 - RNA, 11 nt, Artificial Sequence
  Description of Artificial Sequence: Synthetic oligonucleotide
uuugaggcuca

SEQ ID NO: 2433 - RNA, 10 nt, Artificial Sequence
  Description of Artificial Sequence: Synthetic oligonucleotide
cuacaauugg

SEQ ID NO: 2434 - RNA, 11 nt, Artificial Sequence
  Description of Artificial Sequence: Synthetic oligonucleotide
aguuaggagcc

SEQ ID NO: 2435 - RNA, 12 nt, Artificial Sequence
  Description of Artificial Sequence: Synthetic oligonucleotide
gucaauauccac

SEQ ID NO: 2436 - RNA, 12 nt, Artificial Sequence
  Description of Artificial Sequence: Synthetic oligonucleotide
uguucagucaca

SEQ ID NO: 2437 - RNA, 11 nt, Artificial Sequence
  Description of Artificial Sequence: Synthetic oligonucleotide
cacacacauac

SEQ ID NO: 2438 - RNA, 11 nt, Artificial Sequence
  Description of Artificial Sequence: Synthetic oligonucleotide
uccuuuugcuu

SEQ ID NO: 2439 - RNA, 15 nt, Artificial Sequence
  Description of Artificial Sequence: Synthetic oligonucleotide
uuuaaaguaauuuuu

SEQ ID NO: 2440 - RNA, 12 nt, Artificial Sequence
  Description of Artificial Sequence: Synthetic oligonucleotide
aacagucaaugg

SEQ ID NO: 2441 - RNA, 12 nt, Artificial Sequence
  Description of Artificial Sequence: Synthetic oligonucleotide
cgacaaaccaau

SEQ ID NO: 2442 - RNA, 11 nt, Artificial Sequence
  Description of Artificial Sequence: Synthetic oligonucleotide
cugcuaccacu

SEQ ID NO: 2443 - RNA, 12 nt, Artificial Sequence
  Description of Artificial Sequence: Synthetic oligonucleotide
caagcggucuua

SEQ ID NO: 2444 - RNA, 12 nt, Artificial Sequence
  Description of Artificial Sequence: Synthetic oligonucleotide
gucuuaccggcu

SEQ ID NO: 2445 - RNA, 10 nt, Artificial Sequence
  Description of Artificial Sequence: Synthetic oligonucleotide
auggguuacc

SEQ ID NO: 2446 - RNA, 10 nt, Artificial Sequence
  Description of Artificial Sequence: Synthetic oligonucleotide
uuaccugcga

SEQ ID NO: 2447 - RNA, 11 nt, Artificial Sequence
  Description of Artificial Sequence: Synthetic oligonucleotide
aucuugcugag

SEQ ID NO: 2448 - RNA, 12 nt, Artificial Sequence
  Description of Artificial Sequence: Synthetic oligonucleotide
gcauaaaacagu

SEQ ID NO: 2449 - RNA, 11 nt, Artificial Sequence
  Description of Artificial Sequence: Synthetic oligonucleotide
uccuuuauccu

SEQ ID NO: 2450 - RNA, 11 nt, Artificial Sequence
  Description of Artificial Sequence: Synthetic oligonucleotide
aacgcaaguug

SEQ ID NO: 2451 - RNA, 12 nt, Artificial Sequence
  Description of Artificial Sequence: Synthetic oligonucleotide
aacugaaaccau

SEQ ID NO: 2452 - RNA, 13 nt, Artificial Sequence
  Description of Artificial Sequence: Synthetic oligonucleotide
cuuuguuaaauau

SEQ ID NO: 2453 - RNA, 13 nt, Artificial Sequence
  Description of Artificial Sequence: Synthetic oligonucleotide
uauauuaaaaguu

SEQ ID NO: 2454 - RNA, 12 nt, Artificial Sequence
  Description of Artificial Sequence: Synthetic oligonucleotide
uuuugacuuaac

SEQ ID NO: 2455 - RNA, 12 nt, Artificial Sequence
  Description of Artificial Sequence: Synthetic oligonucleotide
caaacucagcac

SEQ ID NO: 2456 - RNA, 10 nt, Artificial Sequence
  Description of Artificial Sequence: Synthetic oligonucleotide
gcugaccuca

SEQ ID NO: 2457 - RNA, 13 nt, Artificial Sequence
  Description of Artificial Sequence: Synthetic oligonucleotide
uuauucagaucgc

SEQ ID NO: 2458 - RNA, 12 nt, Artificial Sequence
  Description of Artificial Sequence: Synthetic oligonucleotide
ggguucugggau

SEQ ID NO: 2459 - RNA, 14 nt, Artificial Sequence
  Description of Artificial Sequence: Synthetic oligonucleotide
uauuggaaauuaug

SEQ ID NO: 2460 - RNA, 12 nt, Artificial Sequence
  Description of Artificial Sequence: Synthetic oligonucleotide
uggaagcacuag

SEQ ID NO: 2461 - RNA, 12 nt, Artificial Sequence
  Description of Artificial Sequence: Synthetic oligonucleotide
uuuuuaugugga

SEQ ID NO: 2462 - RNA, 11 nt, Artificial Sequence
  Description of Artificial Sequence: Synthetic oligonucleotide
gaauugguaga

SEQ ID NO: 2463 - RNA, 12 nt, Artificial Sequence
  Description of Artificial Sequence: Synthetic oligonucleotide
uagacuuggaga

SEQ ID NO: 2464 - RNA, 12 nt, Artificial Sequence
  Description of Artificial Sequence: Synthetic oligonucleotide
uacaguauucca

SEQ ID NO: 2465 - RNA, 14 nt, Artificial Sequence
  Description of Artificial Sequence: Synthetic oligonucleotide
cacugaugaauuaa

SEQ ID NO: 2466 - RNA, 11 nt, Artificial Sequence
  Description of Artificial Sequence: Synthetic oligonucleotide
cacaucaucac

SEQ ID NO: 2467 - RNA, 12 nt, Artificial Sequence
  Description of Artificial Sequence: Synthetic oligonucleotide
ucaccaaacaga

SEQ ID NO: 2468 - RNA, 11 nt, Artificial Sequence
  Description of Artificial Sequence: Synthetic oligonucleotide
gaacaugaugg

SEQ ID NO: 2469 - RNA, 11 nt, Artificial Sequence
  Description of Artificial Sequence: Synthetic oligonucleotide
auguagacugc

SEQ ID NO: 2470 - RNA, 12 nt, Artificial Sequence
  Description of Artificial Sequence: Synthetic oligonucleotide
gaucuauuuaug

SEQ ID NO: 2471 - RNA, 11 nt, Artificial Sequence
  Description of Artificial Sequence: Synthetic oligonucleotide
cacuauuauca

SEQ ID NO: 2472 - RNA, 10 nt, Artificial Sequence
  Description of Artificial Sequence: Synthetic oligonucleotide
ucaguucugc

SEQ ID NO: 2473 - RNA, 12 nt, Artificial Sequence
  Description of Artificial Sequence: Synthetic oligonucleotide
gauuaaaccuac

SEQ ID NO: 2474 - RNA, 12 nt, Artificial Sequence
  Description of Artificial Sequence: Synthetic oligonucleotide
uaaaauccuucu

SEQ ID NO: 2475 - RNA, 11 nt, Artificial Sequence
  Description of Artificial Sequence: Synthetic oligonucleotide
augcuguagac

SEQ ID NO: 2476 - RNA, 12 nt, Artificial Sequence
  Description of Artificial Sequence: Synthetic oligonucleotide
ugauaggaauag

SEQ ID NO: 2477 - RNA, 10 nt, Artificial Sequence
  Description of Artificial Sequence: Synthetic oligonucleotide
auggcccuga

SEQ ID NO: 2478 - RNA, 10 nt, Artificial Sequence
  Description of Artificial Sequence: Synthetic oligonucleotide
uccucaagca

SEQ ID NO: 2479 - RNA, 9 nt, Artificial Sequence
  Description of Artificial Sequence: Synthetic oligonucleotide
uucagccca

SEQ ID NO: 2480 - RNA, 10 nt, Artificial Sequence
  Description of Artificial Sequence: Synthetic oligonucleotide
cugcugaacc

SEQ ID NO: 2481 - RNA, 11 nt, Artificial Sequence
  Description of Artificial Sequence: Synthetic oligonucleotide
aguucucuuca

SEQ ID NO: 2482 - RNA, 10 nt, Artificial Sequence
  Description of Artificial Sequence: Synthetic oligonucleotide
cagccuagag

SEQ ID NO: 2483 - RNA, 12 nt, Artificial Sequence
  Description of Artificial Sequence: Synthetic oligonucleotide
ucugugaagugu

SEQ ID NO: 2484 - RNA, 13 nt, Artificial Sequence
  Description of Artificial Sequence: Synthetic oligonucleotide
gagaaaauuucaa

SEQ ID NO: 2485 - RNA, 10 nt, Artificial Sequence
  Description of Artificial Sequence: Synthetic oligonucleotide
auccuccuga

SEQ ID NO: 2486 - RNA, 11 nt, Artificial Sequence
  Description of Artificial Sequence: Synthetic oligonucleotide
ugacaucauau

SEQ ID NO: 2487 - RNA, 12 nt, Artificial Sequence
  Description of Artificial Sequence: Synthetic oligonucleotide
aucuucaucaua

SEQ ID NO: 2488 - RNA, 12 nt, Artificial Sequence
  Description of Artificial Sequence: Synthetic oligonucleotide
acuagcuauuaa

SEQ ID NO: 2489 - RNA, 13 nt, Artificial Sequence
  Description of Artificial Sequence: Synthetic oligonucleotide
cucuacuaaaaau

SEQ ID NO: 2490 - RNA, 11 nt, Artificial Sequence
  Description of Artificial Sequence: Synthetic oligonucleotide
cuaucucgccu

SEQ ID NO: 2491 - RNA, 12 nt, Artificial Sequence
  Description of Artificial Sequence: Synthetic oligonucleotide
uucgguccaguu

SEQ ID NO: 2492 - RNA, 10 nt, Artificial Sequence
  Description of Artificial Sequence: Synthetic oligonucleotide
auguagccgc

SEQ ID NO: 2493 - RNA, 11 nt, Artificial Sequence
  Description of Artificial Sequence: Synthetic oligonucleotide
gaggagacuug

SEQ ID NO: 2494 - RNA, 11 nt, Artificial Sequence
  Description of Artificial Sequence: Synthetic oligonucleotide
aguagugagga

SEQ ID NO: 2495 - RNA, 13 nt, Artificial Sequence
  Description of Artificial Sequence: Synthetic oligonucleotide
agaugaguacaaa

SEQ ID NO: 2496 - RNA, 12 nt, Artificial Sequence
  Description of Artificial Sequence: Synthetic oligonucleotide
uuguuaaugggc

SEQ ID NO: 2497 - RNA, 12 nt, Artificial Sequence
  Description of Artificial Sequence: Synthetic oligonucleotide
uuuuaauuuauu

SEQ ID NO: 2498 - RNA, 11 nt, Artificial Sequence
  Description of Artificial Sequence: Synthetic oligonucleotide
auuuaaauaug

SEQ ID NO: 2499 - RNA, 12 nt, Artificial Sequence
  Description of Artificial Sequence: Synthetic oligonucleotide
auccuuuguuuc

SEQ ID NO: 2500 - RNA, 13 nt, Artificial Sequence
  Description of Artificial Sequence: Synthetic oligonucleotide
gucuaaguguuug

SEQ ID NO: 2501 - RNA, 11 nt, Artificial Sequence
  Description of Artificial Sequence: Synthetic oligonucleotide
ccugugacaaa

SEQ ID NO: 2502 - RNA, 12 nt, Artificial Sequence
  Description of Artificial Sequence: Synthetic oligonucleotide
caggcugaauua

SEQ ID NO: 2503 - RNA, 13 nt, Artificial Sequence
  Description of Artificial Sequence: Synthetic oligonucleotide
ucauucuuacaau

SEQ ID NO: 2504 - RNA, 14 nt, Artificial Sequence
  Description of Artificial Sequence: Synthetic oligonucleotide
cauucuuacaauug

SEQ ID NO: 2505 - RNA, 11 nt, Artificial Sequence
  Description of Artificial Sequence: Synthetic oligonucleotide
agagaguguac

SEQ ID NO: 2506 - RNA, 11 nt, Artificial Sequence
  Description of Artificial Sequence: Synthetic oligonucleotide
gaacucagcag

SEQ ID NO: 2507 - RNA, 12 nt, Artificial Sequence
  Description of Artificial Sequence: Synthetic oligonucleotide
uuauuuucagua

SEQ ID NO: 2508 - RNA, 11 nt, Artificial Sequence
  Description of Artificial Sequence: Synthetic oligonucleotide
cuuaaauggaa

SEQ ID NO: 2509 - RNA, 12 nt, Artificial Sequence
  Description of Artificial Sequence: Synthetic oligonucleotide
gccuaaaauugu

SEQ ID NO: 2510 - RNA, 12 nt, Artificial Sequence
  Description of Artificial Sequence: Synthetic oligonucleotide
acuaacaucugg

SEQ ID NO: 2511 - RNA, 11 nt, Artificial Sequence
  Description of Artificial Sequence: Synthetic oligonucleotide
gacugugagcu

SEQ ID NO: 2512 - RNA, 13 nt, Artificial Sequence
  Description of Artificial Sequence: Synthetic oligonucleotide
gcuuuuuauuaau

SEQ ID NO: 2513 - RNA, 12 nt, Artificial Sequence
  Description of Artificial Sequence: Synthetic oligonucleotide
ucuucuuacauu

SEQ ID NO: 2514 - RNA, 14 nt, Artificial Sequence
  Description of Artificial Sequence: Synthetic oligonucleotide
auuuguaaaaaugu

SEQ ID NO: 2515 - RNA, 14 nt, Artificial Sequence
  Description of Artificial Sequence: Synthetic oligonucleotide
ucuuaauucauauu

SEQ ID NO: 2516 - RNA, 12 nt, Artificial Sequence
  Description of Artificial Sequence: Synthetic oligonucleotide
aacuaaucauga

SEQ ID NO: 2517 - RNA, 11 nt, Artificial Sequence
  Description of Artificial Sequence: Synthetic oligonucleotide
cugcucuuggg

SEQ ID NO: 2518 - RNA, 12 nt, Artificial Sequence
  Description of Artificial Sequence: Synthetic oligonucleotide
aguagcuuugag

SEQ ID NO: 2519 - RNA, 13 nt, Artificial Sequence
  Description of Artificial Sequence: Synthetic oligonucleotide
acguaauauuuca

SEQ ID NO: 2520 - RNA, 12 nt, Artificial Sequence
  Description of Artificial Sequence: Synthetic oligonucleotide
auucucuucacu

SEQ ID NO: 2521 - RNA, 13 nt, Artificial Sequence
  Description of Artificial Sequence: Synthetic oligonucleotide
uaaugcuaagaaa

SEQ ID NO: 2522 - RNA, 11 nt, Artificial Sequence
  Description of Artificial Sequence: Synthetic oligonucleotide
cugaaaaucaa

SEQ ID NO: 2523 - RNA, 13 nt, Artificial Sequence
  Description of Artificial Sequence: Synthetic oligonucleotide
auaugauuacuuu

SEQ ID NO: 2524 - RNA, 13 nt, Artificial Sequence
  Description of Artificial Sequence: Synthetic oligonucleotide
auuuuguucuaca

SEQ ID NO: 2525 - RNA, 11 nt, Artificial Sequence
  Description of Artificial Sequence: Synthetic oligonucleotide
ccgggacucuc

SEQ ID NO: 2526 - RNA, 13 nt, Artificial Sequence
  Description of Artificial Sequence: Synthetic oligonucleotide
cuuuaaaguaaag

SEQ ID NO: 2527 - RNA, 12 nt, Artificial Sequence
  Description of Artificial Sequence: Synthetic oligonucleotide
cuggaagccugg

SEQ ID NO: 2528 - RNA, 13 nt, Artificial Sequence
  Description of Artificial Sequence: Synthetic oligonucleotide
aaacaaaagagag

SEQ ID NO: 2529 - RNA, 12 nt, Artificial Sequence
  Description of Artificial Sequence: Synthetic oligonucleotide
ucaguuaugccg

SEQ ID NO: 2530 - RNA, 12 nt, Artificial Sequence
  Description of Artificial Sequence: Synthetic oligonucleotide
aaaagaagucca

SEQ ID NO: 2531 - RNA, 10 nt, Artificial Sequence
  Description of Artificial Sequence: Synthetic oligonucleotide
ggugagguua

SEQ ID NO: 2532 - RNA, 10 nt, Artificial Sequence
  Description of Artificial Sequence: Synthetic oligonucleotide
ggaagaggac

SEQ ID NO: 2533 - RNA, 12 nt, Artificial Sequence
  Description of Artificial Sequence: Synthetic oligonucleotide
agcaaguauugu

SEQ ID NO: 2534 - RNA, 11 nt, Artificial Sequence
  Description of Artificial Sequence: Synthetic oligonucleotide
uuguagcacuc

SEQ ID NO: 2535 - RNA, 13 nt, Artificial Sequence
  Description of Artificial Sequence: Synthetic oligonucleotide
caaaaccacaaau

SEQ ID NO: 2536 - RNA, 11 nt, Artificial Sequence
  Description of Artificial Sequence: Synthetic oligonucleotide
aagcccauaca

SEQ ID NO: 2537 - RNA, 10 nt, Artificial Sequence
  Description of Artificial Sequence: Synthetic oligonucleotide
gcccauacag

SEQ ID NO: 2538 - RNA, 11 nt, Artificial Sequence
  Description of Artificial Sequence: Synthetic oligonucleotide
agaaaccuucc

SEQ ID NO: 2539 - RNA, 9 nt, Artificial Sequence
  Description of Artificial Sequence: Synthetic oligonucleotide
uauaccuac

SEQ ID NO: 2540 - RNA, 12 nt, Artificial Sequence
  Description of Artificial Sequence: Synthetic oligonucleotide
ccaguuuucgga

SEQ ID NO: 2541 - RNA, 8 nt, Artificial Sequence
  Description of Artificial Sequence: Synthetic oligonucleotide
gaacaggg

SEQ ID NO: 2542 - RNA, 12 nt, Artificial Sequence
  Description of Artificial Sequence: Synthetic oligonucleotide
uaacuuuccagu

SEQ ID NO: 2543 - RNA, 13 nt, Artificial Sequence
  Description of Artificial Sequence: Synthetic oligonucleotide
aaguuugguuuug

SEQ ID NO: 2544 - RNA, 11 nt, Artificial Sequence
  Description of Artificial Sequence: Synthetic oligonucleotide
uucccacugua

SEQ ID NO: 2545 - RNA, 12 nt, Artificial Sequence
  Description of Artificial Sequence: Synthetic oligonucleotide
gauaccauauga

SEQ ID NO: 2546 - RNA, 10 nt, Artificial Sequence
  Description of Artificial Sequence: Synthetic oligonucleotide
acaugggcug

SEQ ID NO: 2547 - RNA, 12 nt, Artificial Sequence
  Description of Artificial Sequence: Synthetic oligonucleotide
aacuuuuucaua

SEQ ID NO: 2548 - RNA, 11 nt, Artificial Sequence
  Description of Artificial Sequence: Synthetic oligonucleotide
augaggccgga

SEQ ID NO: 2549 - RNA, 10 nt, Artificial Sequence
  Description of Artificial Sequence: Synthetic oligonucleotide
cugcauuugu

SEQ ID NO: 2550 - RNA, 12 nt, Artificial Sequence
  Description of Artificial Sequence: Synthetic oligonucleotide
auguuuacuacc

SEQ ID NO: 2551 - RNA, 14 nt, Artificial Sequence
  Description of Artificial Sequence: Synthetic oligonucleotide
auuuuuugaugaaa

SEQ ID NO: 2552 - RNA, 13 nt, Artificial Sequence
  Description of Artificial Sequence: Synthetic oligonucleotide
agugugugaauuu

SEQ ID NO: 2553 - RNA, 12 nt, Artificial Sequence
  Description of Artificial Sequence: Synthetic oligonucleotide
agcaauguaugu

SEQ ID NO: 2554 - RNA, 13 nt, Artificial Sequence
  Description of Artificial Sequence: Synthetic oligonucleotide
aagcacauauaua

SEQ ID NO: 2555 - RNA, 13 nt, Artificial Sequence
  Description of Artificial Sequence: Synthetic oligonucleotide
uaauaguuucucc

SEQ ID NO: 2556 - RNA, 12 nt, Artificial Sequence
  Description of Artificial Sequence: Synthetic oligonucleotide
guuucuccaaau

SEQ ID NO: 2557 - RNA, 12 nt, Artificial Sequence
  Description of Artificial Sequence: Synthetic oligonucleotide
acuuccuagaaa

SEQ ID NO: 2558 - RNA, 12 nt, Artificial Sequence
  Description of Artificial Sequence: Synthetic oligonucleotide
acaccauauaug

SEQ ID NO: 2559 - RNA, 13 nt, Artificial Sequence
  Description of Artificial Sequence: Synthetic oligonucleotide
uauaugaauggag

SEQ ID NO: 2560 - RNA, 12 nt, Artificial Sequence
  Description of Artificial Sequence: Synthetic oligonucleotide
cauuuacaggga

SEQ ID NO: 2561 - RNA, 12 nt, Artificial Sequence
  Description of Artificial Sequence: Synthetic oligonucleotide
auuuacagggac

SEQ ID NO: 2562 - RNA, 9 nt, Artificial Sequence
  Description of Artificial Sequence: Synthetic oligonucleotide
gggaccuga

SEQ ID NO: 2563 - RNA, 13 nt, Artificial Sequence
  Description of Artificial Sequence: Synthetic oligonucleotide
guuugacugcauc

SEQ ID NO: 2564 - RNA, 12 nt, Artificial Sequence
  Description of Artificial Sequence: Synthetic oligonucleotide
uugacugcaucg

SEQ ID NO: 2565 - RNA, 11 nt, Artificial Sequence
  Description of Artificial Sequence: Synthetic oligonucleotide
aguucacaggg

SEQ ID NO: 2566 - RNA, 12 nt, Artificial Sequence
  Description of Artificial Sequence: Synthetic oligonucleotide
gcaccucugucc

SEQ ID NO: 2567 - RNA, 14 nt, Artificial Sequence
  Description of Artificial Sequence: Synthetic oligonucleotide
guuugucuuuuuaa

SEQ ID NO: 2568 - RNA, 13 nt, Artificial Sequence
  Description of Artificial Sequence: Synthetic oligonucleotide
uugucuuuuuaag

SEQ ID NO: 2569 - RNA, 12 nt, Artificial Sequence
  Description of Artificial Sequence: Synthetic oligonucleotide
cuaaagguuguc

SEQ ID NO: 2570 - RNA, 11 nt, Artificial Sequence
  Description of Artificial Sequence: Synthetic oligonucleotide
agguugucgac

SEQ ID NO: 2571 - RNA, 12 nt, Artificial Sequence
  Description of Artificial Sequence: Synthetic oligonucleotide
ccuggcaauugu

SEQ ID NO: 2572 - RNA, 11 nt, Artificial Sequence
  Description of Artificial Sequence: Synthetic oligonucleotide
guggugcgagg

SEQ ID NO: 2573 - RNA, 12 nt, Artificial Sequence
  Description of Artificial Sequence: Synthetic oligonucleotide
gagacaugaaau

SEQ ID NO: 2574 - RNA, 12 nt, Artificial Sequence
  Description of Artificial Sequence: Synthetic oligonucleotide
uauauuucucca

SEQ ID NO: 2575 - RNA, 9 nt, Artificial Sequence
  Description of Artificial Sequence: Synthetic oligonucleotide
augaaggcu

SEQ ID NO: 2576 - RNA, 10 nt, Artificial Sequence
  Description of Artificial Sequence: Synthetic oligonucleotide
cuggaguggu

SEQ ID NO: 2577 - RNA, 10 nt, Artificial Sequence
  Description of Artificial Sequence: Synthetic oligonucleotide
ggaagagagg

SEQ ID NO: 2578 - RNA, 11 nt, Artificial Sequence
  Description of Artificial Sequence: Synthetic oligonucleotide
uugcaucgggc

SEQ ID NO: 2579 - RNA, 12 nt, Artificial Sequence
  Description of Artificial Sequence: Synthetic oligonucleotide
uauccuacugug

SEQ ID NO: 2580 - RNA, 12 nt, Artificial Sequence
  Description of Artificial Sequence: Synthetic oligonucleotide
ccuacuguguaa

SEQ ID NO: 2581 - RNA, 11 nt, Artificial Sequence
  Description of Artificial Sequence: Synthetic oligonucleotide
cuuguagugua

SEQ ID NO: 2582 - RNA, 12 nt, Artificial Sequence
  Description of Artificial Sequence: Synthetic oligonucleotide
cuuuguugauug

SEQ ID NO: 2583 - RNA, 13 nt, Artificial Sequence
  Description of Artificial Sequence: Synthetic oligonucleotide
uuguugauugaaa

SEQ ID NO: 2584 - RNA, 14 nt, Artificial Sequence
  Description of Artificial Sequence: Synthetic oligonucleotide
ucuuuuucuuccau

SEQ ID NO: 2585 - RNA, 12 nt, Artificial Sequence
  Description of Artificial Sequence: Synthetic oligonucleotide
aucuuccuucua

SEQ ID NO: 2586 - RNA, 12 nt, Artificial Sequence
  Description of Artificial Sequence: Synthetic oligonucleotide
ugaaugcuucau

SEQ ID NO: 2587 - RNA, 12 nt, Artificial Sequence
  Description of Artificial Sequence: Synthetic oligonucleotide
gaaugcuucaug

SEQ ID NO: 2588 - RNA, 12 nt, Artificial Sequence
  Description of Artificial Sequence: Synthetic oligonucleotide
auucuacuuuga

SEQ ID NO: 2589 - RNA, 12 nt, Artificial Sequence
  Description of Artificial Sequence: Synthetic oligonucleotide
gcaacuacagac

SEQ ID NO: 2590 - RNA, 12 nt, Artificial Sequence
  Description of Artificial Sequence: Synthetic oligonucleotide
accaaggucaac

SEQ ID NO: 2591 - RNA, 12 nt, Artificial Sequence
  Description of Artificial Sequence: Synthetic oligonucleotide
gacuaucucgac

SEQ ID NO: 2592 - RNA, 12 nt, Artificial Sequence
  Description of Artificial Sequence: Synthetic oligonucleotide
accuucccaaac

SEQ ID NO: 2593 - RNA, 13 nt, Artificial Sequence
  Description of Artificial Sequence: Synthetic oligonucleotide
caagcuuagaacu

SEQ ID NO: 2594 - RNA, 14 nt, Artificial Sequence
  Description of Artificial Sequence: Synthetic oligonucleotide
gcuuagaacuuuaa

SEQ ID NO: 2595 - RNA, 13 nt, Artificial Sequence
  Description of Artificial Sequence: Synthetic oligonucleotide
aacuuuaagcaac

SEQ ID NO: 2596 - RNA, 10 nt, Artificial Sequence
  Description of Artificial Sequence: Synthetic oligonucleotide
agaccaccac

SEQ ID NO: 2597 - RNA, 13 nt, Artificial Sequence
  Description of Artificial Sequence: Synthetic oligonucleotide
cgagaaauaaagu

SEQ ID NO: 2598 - RNA, 13 nt, Artificial Sequence
  Description of Artificial Sequence: Synthetic oligonucleotide
gagaaauaaaguu

SEQ ID NO: 2599 - RNA, 11 nt, Artificial Sequence
  Description of Artificial Sequence: Synthetic oligonucleotide
ggaaaugaucc

SEQ ID NO: 2600 - RNA, 12 nt, Artificial Sequence
  Description of Artificial Sequence: Synthetic oligonucleotide
aagaaaugaaac

SEQ ID NO: 2601 - RNA, 12 nt, Artificial Sequence
  Description of Artificial Sequence: Synthetic oligonucleotide
uuuccauccucc

SEQ ID NO: 2602 - RNA, 14 nt, Artificial Sequence
  Description of Artificial Sequence: Synthetic oligonucleotide
cugaaaaucuuuga

SEQ ID NO: 2603 - RNA, 10 nt, Artificial Sequence
  Description of Artificial Sequence: Synthetic oligonucleotide
gccguucagg

SEQ ID NO: 2604 - RNA, 12 nt, Artificial Sequence
  Description of Artificial Sequence: Synthetic oligonucleotide
aggguccagaag

SEQ ID NO: 2605 - RNA, 12 nt, Artificial Sequence
  Description of Artificial Sequence: Synthetic oligonucleotide
caagacugcuug

SEQ ID NO: 2606 - RNA, 12 nt, Artificial Sequence
  Description of Artificial Sequence: Synthetic oligonucleotide
ccaugucuuugg

SEQ ID NO: 2607 - RNA, 10 nt, Artificial Sequence
  Description of Artificial Sequence: Synthetic oligonucleotide
ccugaaacac

SEQ ID NO: 2608 - RNA, 11 nt, Artificial Sequence
  Description of Artificial Sequence: Synthetic oligonucleotide
cucuguaccuc

SEQ ID NO: 2609 - RNA, 11 nt, Artificial Sequence
  Description of Artificial Sequence: Synthetic oligonucleotide
gcaagacaaga

SEQ ID NO: 2610 - RNA, 12 nt, Artificial Sequence
  Description of Artificial Sequence: Synthetic oligonucleotide
caagacaagaaa

SEQ ID NO: 2611 - RNA, 11 nt, Artificial Sequence
  Description of Artificial Sequence: Synthetic oligonucleotide
guacaagaucc

SEQ ID NO: 2612 - RNA, 11 nt, Artificial Sequence
  Description of Artificial Sequence: Synthetic oligonucleotide
guacuugcaga

SEQ ID NO: 2613 - RNA, 12 nt, Artificial Sequence
  Description of Artificial Sequence: Synthetic oligonucleotide
gaucgauacaga

SEQ ID NO: 2614 - RNA, 12 nt, Artificial Sequence
  Description of Artificial Sequence: Synthetic oligonucleotide
auaaaaauaaau

SEQ ID NO: 2615 - RNA, 12 nt, Artificial Sequence
  Description of Artificial Sequence: Synthetic oligonucleotide
aaaaauaaauau

SEQ ID NO: 2616 - RNA, 12 nt, Artificial Sequence
  Description of Artificial Sequence: Synthetic oligonucleotide
uugacugcugug

SEQ ID NO: 2617 - RNA, 12 nt, Artificial Sequence
  Description of Artificial Sequence: Synthetic oligonucleotide
gagaugagagac

SEQ ID NO: 2618 - RNA, 9 nt, Artificial Sequence
  Description of Artificial Sequence: Synthetic oligonucleotide
cccacuugg

SEQ ID NO: 2619 - RNA, 5777 nt, Homo sapiens
gcggacacuccucucggcuccuccccggcagcggcggcggcucggagcgggcuccggggcucgggugcagcggccagcgggccuggcggcgaggauuacccggggaagugguugucuccuggcuggagccgcgagacgggcgcucagggcgcggggccggcggcggcgaacgagaggacggacucuggcggccgggucguuggccgggggagcgcgggcaccgggcgagcaggccgcgucgcgcucaccauggucagcuacugggacaccgggguccugcugugcgcgcugcucagcugucugcuucucacaggaucuaguucagguucaaaauuaaaagauccugaacugaguuuaaaaggcacccagcacaucaugcaagcaggccagacacugcaucuccaaugcaggggggaagcagcccauaaauggucuuugccugaaauggugaguaaggaaagcgaaaggcugagcauaacuaaaucugccuguggaagaaauggcaaacaauucugcaguacuuuaaccuugaacacagcucaagcaaaccacacuggcuucuacagcugcaaauaucuagcuguaccuacuucaaagaagaaggaaacagaaucugcaaucuauauauuuauuagugauacagguagaccuuucguagagauguacagugaaauccccgaaauuauacacaugacugaaggaagggagcucgucauucccugccggguuacgucaccuaacaucacuguuacuuuaaaaaaguuuccacuugacacuuugaucccugauggaaaacgcauaaucugggacaguagaaagggcuucaucauaucaaaugcaacguacaaagaaauagggcuucugaccugugaagcaacagucaaugggcauuuguauaagacaaacuaucucacacaucgacaaaccaauacaaucauagauguccaaauaagcacaccacgcccagucaaauuacuuagaggccauacucuuguccucaauuguacugcuaccacucccuugaacacgagaguucaaaugaccuggaguuacccugaugaaaaaaauaagagagcuuccguaaggcgacgaauugaccaaagcaauucccaugccaacauauucuacaguguucuuacuauugacaaaaugcagaacaaagacaaaggacuuuauacuugucguguaaggaguggaccaucauucaaaucuguuaacaccucagugcauauauaugauaaagcauucaucacugugaaacaucgaaaacagcaggugcuugaaaccguagcuggcaagcggucuuaccggcucucuaugaaagugaaggcauuucccucgccggaaguuguaugguuaaaagauggguuaccugcgacugagaaaucugcucgcuauuugacucguggcuacucguuaauuaucaaggacguaacugaagaggaugcagggaauuauacaaucuugcugagcauaaaacagucaaauguguuuaaaaaccucacugccacucuaauugucaaugugaaaccccagauuuacgaaaaggccgugucaucguuuccagacccggcucucuacccacugggcagcagacaaauccugacuuguaccgcauaugguaucccucaaccuacaaucaagugguucuggcaccccuguaaccauaaucauuccgaagcaaggugugacuuuuguuccaauaaugaagaguccuuuauccuggaugcugacagcaacaugggaaacagaauugagagcaucacucagcgcauggcaauaauagaaggaaagaauaagauggcuagcaccuugguuguggcugacucuagaauuucuggaaucuacauuugcauagcuuccaauaaaguugggacugugggaagaaacauaagcuuuuauaucacagaugugccaaauggguuucauguuaacuuggaaaaaaugccgacggaaggagaggaccugaaacugucuugcacaguuaacaaguucuuauacagagacguuacuuggauuuuacugcggacaguuaauaacagaacaaugcacuacaguauuagcaagcaaaaaauggccaucacuaaggagcacuccaucacucuuaaucuuaccaucaugaauguuucccugcaagauucaggcaccuaugccugcagagccaggaauguauacacaggggaagaaauccuccagaagaaagaaauuacaaucagagaucaggaagcaccauaccuccugcgaaaccucagugaucacacaguggccaucagcaguuccaccacuuuagacugucaugcuaaugguguccccgagccucagaucacuugguuuaaaaacaaccacaaaauacaacaagagccuggaauuauuuuaggaccaggaagcagcacgcuguuuauugaaagagucacagaagaggaugaaggugucuaucacugcaaagccaccaaccagaagggcucuguggaaaguucagcauaccucacuguucaaggaaccucggacaagucuaaucuggagcugaucacucuaacaugcaccuguguggcugcgacucucuucuggcuccuauuaacccuccuuauccgaaaaaugaaaaggucuucuucugaaauaaagacugacuaccuaucaauuauaauggacccagaugaaguuccuuuggaugagcagugugagcggcucccuuaugaugccagcaagugggaguuugcccgggagagacuuaaacugggcaaaucacuuggaagaggggcuuuuggaaaagugguucaagcaucagcauuuggcauuaagaaaucaccuacgugccggacuguggcugugaaaaugcugaaagagggggccacggccagcgaguacaaagcucugaugacugagcuaaaaaucuugacccacauuggccaccaucugaacgugguuaaccugcugggagccugcaccaagcaaggagggccucugauggugauuguugaauacugcaaauauggaaaucucuccaacuaccucaagagcaaacgugacuuauuuuuucucaacaaggaugcagcacuacacauggagccuaagaaagaaaaaauggagccaggccuggaacaaggcaagaaaccaagacuagauagcgucaccagcagcgaaagcuuugcgagcuccggcuuucaggaagauaaaagucugagugauguugaggaagaggaggauucugacgguuucuacaaggagcccaucacuauggaagaucugauuucuuacaguuuucaaguggccagaggcauggaguuccugucuuccagaaagugcauucaucgggaccuggcagcgagaaacauucuuuuaucugagaacaacguggugaagauuugugauuuuggccuugcccgggauauuuauaagaaccccgauuaugugagaaaaggagauacucgacuuccucugaaauggauggcucccgaaucuaucuuugacaaaaucuacagcaccaagagcgacguguggucuuacggaguauugcugugggaaaucuucuccuuaggugggucuccauacccaggaguacaaauggaugaggacuuuugcagucgccugagggaaggcaugaggaugagagcuccugaguacucuacuccugaaaucuaucagaucaugcuggacugcuggcacagagacccaaaagaaaggccaagauuugcagaacuuguggaaaaacuaggugauuugcuucaagcaaauguacaacaggaugguaaagacuacaucccaaucaaugccauacugacaggaaauaguggguuuacauacucaacuccugccuucucugaggacuucuucaaggaaaguauuucagcuccgaaguuuaauucaggaagcucugaugaugucagauauguaaaugcuuucaaguucaugagccuggaaagaaucaaaaccuuugaagaacuuuuaccgaaugccaccuccauguuugaugacuaccagggcgacagcagcacucuguuggccucucccaugcugaagcgcuucaccuggacugacagcaaacccaaggccucgcucaagauugacuugagaguaaccaguaaaaguaaggagucggggcugucugaugucagcaggcccaguuucugccauuccagcugugggcacgucagcgaaggcaagcgcagguucaccuacgaccacgcugagcuggaaaggaaaaucgcgugcugcuccccgcccccagacuacaacucggugguccuguacuccaccccacccaucuagaguuugacacgaagccuuauuucuagaagcacauguguauuuauacccccaggaaacuagcuuuugccaguauuaugcauauauaaguuuacaccuuuaucuuuccaugggagccagcugcuuuuugugauuuuuuuaauagugcuuuuuuuuuuugacuaacaagaauguaacuccagauagagaaauagugacaagugaagaacacuacugcuaaauccucauguuacucaguguuagagaaauccuuccuaaacccaaugacuucccugcuccaacccccgccaccucagggcacgcaggaccaguuugauugaggagcugcacugaucacccaaugcaucacguaccccacugggccagcccugcagcccaaaacccagggcaacaagcccguuagccccaggggaucacuggcuggccugagcaacaucucgggaguccucuagcaggccuaagacaugugaggaggaaaaggaaaaaaagcaaaaagcaagggagaaaagagaaaccgggagaaggcaugagaaagaauuugagacgcaccaugugggcacggagggggacggggcucagcaaugccauuucaguggcuucccagcucugacccuucuacauuugagggcccagccaggagcagauggacagcgaugaggggacauuuucuggauucugggaggcaagaaaaggacaaauaucuuuuuuggaacuaaagcaaauuuuagaccuuuaccuauggaagugguucuauguccauucucauucguggcauguuuugauuuguagcacugaggguggcacucaacucugagcccauacuuuuggcuccucuaguaagaugcacugaaaacuuagccagaguuagguugucuccaggccaugauggccuuacacugaaaaugucacauucuauuuuggguauuaauauauaguccagacacuuaacucaauuucuugguauuauucuguuuugcacaguuaguugugaaagaaagcugagaagaaugaaaaugcaguccugaggagaguuuucuccauaucaaaacgagggcugauggaggaaaaaggucaauaaggucaagggaagaccccgucucuauaccaaccaaaccaauucaccaacacaguugggacccaaaacacaggaagucagucacguuuccuuuucauuuaauggggauuccacuaucucacacuaaucugaaaggauguggaagagcauuagcuggcgcauauuaagcacuuuaagcuccuugaguaaaaaggugguauguaauuuaugcaagguauuucuccaguugggacucaggauauuaguuaaugagccaucacuagaagaaaagcccauuuucaacugcuuugaaacuugccuggggucugagcaugaugggaauagggagacaggguaggaaagggcgccuacucuucagggucuaaagaucaagugggccuuggaucgcuaagcuggcucuguuugaugcuauuuaugcaaguuagggucuauguauuua

SEQ ID NO: 2620 - RNA, 5217 nt, Homo sapiens
aucgagguccgcgggaggcucggagcgcgccaggcggacacuccucucggcuccuccccggcagcggcggcggcucggagcgggcuccggggcucgggugcagcggccagcgggcgccuggcggcgaggauuacccggggaagugguugucuccuggcuggagccgcgagacgggcgcucagggcgcggggccggcggcggcgaacgagaggacggacucuggcggccgggucguuggccgcggggagcgcgggcaccgggcgagcaggccgcgucgcgcucaccauggucagcuacugggacaccgggguccugcugugcgcgcugcucagcugucugcuucucacaggaucuaguucagguucaaaauuaaaagauccugaacugaguuuaaaaggcacccagcacaucaugcaagcaggccagacacugcaucuccaaugcaggggggaagcagcccauaaauggucuuugccugaaauggugaguaaggaaagcgaaaggcugagcauaacuaaaucugccuguggaagaaauggcaaacaauucugcaguacuuuaaccuugaacacagcucaagcaaaccacacuggcuucuacagcugcaaauaucuagcuguaccuacuucaaagaagaaggaaacagaaucugcaaucuauauauuuauuagugauacagguagaccuuucguagagauguacagugaaauccccgaaauuauacacaugacugaaggaagggagcucgucauucccugccggguuacgucaccuaacaucacuguuacuuuaaaaaaguuuccacuugacacuuugaucccugauggaaaacgcauaaucugggacaguagaaagggcuucaucauaucaaaugcaacguacaaagaaauagggcuucugaccugugaagcaacagucaaugggcauuuguauaagacaaacuaucucacacaucgacaaaccaauacaaucauagauguccaaauaagcacaccacgcccagucaaauuacuuagaggccauacucuuguccucaauuguacugcuaccacucccuugaacacgagaguucaaaugaccuggaguuacccugaugaaaaaaauaagagagcuuccguaaggcgacgaauugaccaaagcaauucccaugccaacauauucuacaguguucuuacuauugacaaaaugcagaacaaagacaaaggacuuuauacuugucguguaaggaguggaccaucauucaaaucuguuaacaccucagugcauauauaugauaaagcauucaucacugugaaacaucgaaaacagcaggugcuugaaaccguagcuggcaagcggucuuaccggcucucuaugaaagugaaggcauuucccucgccggaaguuguaugguuaaaagauggguuaccugcgacugagaaaucugcucgcuauuugacucguggcuacucguuaauuaucaaggacguaacugaagaggaugcagggaauuauacaaucuugcugagcauaaaacagucaaauguguuuaaaaaccucacugccacucuaauugucaaugugaaaccccagauuuacgaaaaggccgugucaucguuuccagacccggcucucuacccacugggcagcagacaaauccugacuuguaccgcauaugguaucccucaaccuacaaucaagugguucuggcaccccuguaaccauaaucauuccgaagcaaggugugacuuuuguuccaauaaugaagaguccuuuauccuggaugcugacagcaacaugggaaacagaauugagagcaucacucagcgcauggcaauaauagaaggaaagaauaagauggcuagcaccuugguuguggcugacucuagaauuucuggaaucuacauuugcauagcuuccaauaaaguugggacugugggaagaaacauaagcuuuuauaucacagaugugccaaauggguuucauguuaacuuggaaaaaaugccgacggaaggagaggaccugaaacugucuugcacaguuaacaaguucuuauacagagacguuacuuggauuuuacugcggacaguuaauaacagaacaaugcacuacaguauuagcaagcaaaaaauggccaucacuaaggagcacuccaucacucuuaaucuuaccaucaugaauguuucccugcaagauucaggcaccuaugccugcagagccaggaauguauacacaggggaagaaauccuccagaagaaagaaauuacaaucagagaucaggaagcaccauaccuccugcgaaaccucagugaucacacaguggccaucagcaguuccaccacuuuagacugucaugcuaaugguguccccgagccucagaucacuugguuuaaaaacaaccacaaaauacaacaagagccuggaauuauuuuaggaccaggaagcagcacgcuguuuauugaaagagucacagaagaggaugaaggugucuaucacugcaaagccaccaaccagaagggcucuguggaaaguucagcauaccucacuguucaaggaaccucggacaagucuaaucuggagcugaucacucuaacaugcaccuguguggcugcgacucucuucuggcuccuauuaacccucuuuauccgaaaaaugaaaaggucuucuucugaaauaaagacugacuaccuaucaauuauaauggacccagaugaaguuccuuuggaugagcagugugagcggcucccuuaugaugccagcaagugggaguuugcccgggagagacuuaaacugggcaaaucacuuggaagaggggcuuuuggaaaagugguucaagcaucagcauuuggcauuaagaaaucaccuacgugccggacuguggcugugaaaaugcugaaagagggggccacggccagcgaguacaaagcucugaugacugagcuaaaaaucuugacccacauuggccaccaucugaacgugguuaaccugcugggagccugcaccaagcaaggagggccucugauggugauuguugaauacugcaaauauggaaaucucuccaacuaccucaagagcaaacgugacuuauuuuuucucaacaaggaugcagcacuacacauggagccuaagaaagaaaaaauggagccaggccuggaacaaggcaagaaaccaagacuagauagcgucaccagcagcgaaagcuuugcgagcuccggcuuucaggaagauaaaagucugagugauguugaggaagaggaggauucugacgguuucuacaaggagcccaucacuauggaagaucugauuucuuacaguuuucaaguggccagaggcauggaguuccugucuuccagaaagugcauucaucgggaccuggcagcgagaaacauucuuuuaucugagaacaacguggugaagauuugugauuuuggccuugcccgggauauuuauaagaaccccgauuaugugagaaaaggagauacucgacuuccucugaaauggauggcuccugaaucuaucuuugacaaaaucuacagcaccaagagcgacguguggucuuacggaguauugcugugggaaaucuucuccuuaggugggucuccauacccaggaguacaaauggaugaggacuuuugcagucgccugagggaaggcaugaggaugagagcuccugaguacucuacuccugaaaucuaucagaucaugcuggacugcuggcacagagacccaaaagaaaggccaagauuugcagaacuuguggaaaaacuaggugauuugcuucaagcaaauguacaacaggaugguaaagacuacaucccaaucaaugccauacugacaggaaauaguggguuuacauacucaacuccugccuucucugaggacuucuucaaggaaaguauuucagcuccgaaguuuaauucaggaagcucugaugaugucagauacguaaaugcuuucaaguucaugagccuggaaagaaucaaaaccuuugaagaacuuuuaccgaaugccaccuccauguuugaugacuaccagggcgacagcagcacucuguuggccucucccaugcugaagcgcuucaccuggacugacagcaaacccaaggccucgcucaagauugacuugagaguaaccaguaaaaguaaggagucggggcugucugaugucagcaggcccaguuucugccauuccagcugugggcacgucagcgaaggcaagcgcagguucaccuacgaccacgcugagcuggaaaggaaaaucgcgugcugcuccccgcccccagacuacaacucggugguccuguacuccaccccacccaucuagaguuugacacgaagccuuauuucuagaagcacauguguauuuauacccccaggaaacuagcuuuugccaguauuaugcauauauaaguuuacaccuuuaucuuuccaugggagccagcugcuuuuugugauuuuuuuaauagugcuuuuuuuuuuuugacuaacaagaauguaacuccagauagagaaauagugacaagugaagaacacuacugcuaaauccucauguuacucaguguuagagaaauccuuccuaaacccaaugacuucccugcuccaacccccgccaccucagggcacgcaggaccaguuugauugaggagcugcacugaucacccaaugcaucacguaccccacugggccagcccugcagcccaaaacccagggcaacaagcccguuagccccagggaucacuggcuggccugagcaacaucucgggaguccucuagcaggccuaagacaugugaggaggaaaaggaaaaaaagcaaaaagcaagggagaaaagagaaaccgggagaaggcaugagaaagaauuugagacgcaccaugugggcacggagggggacggggcucagcaaugccauuucaguggcuucccagcucugacccuucuacauuugagggcccagccaggagcagauggacagcgaugaggggacauuuucuggauucugggaggcaagaaaaggacaaauaucuuuuuuggaacuaaagcaaauuuuagaacuuuaccuauggaagugguucuauguccauucucauucguggcauguuuugauuuguagcacugaggguggcacucaacucugagcccauacuuuuggcuccucuaguaagaugcacugaaaacuuagccagaguuagguugucuccaggccaugauggccuuacacugaaaaugucacauucuauuu

SEQ ID NO: 2621 - RNA, 19 nt, Artificial Sequence
  Description of Artificial Sequence: Synthetic oligonucleotide
gcggacacuccucucggcu

SEQ ID NO: 2622 - RNA, 19 nt, Artificial Sequence
  Description of Artificial Sequence: Synthetic oligonucleotide
uccuccccggcagcggcgg

SEQ ID NO: 2623 - RNA, 19 nt, Artificial Sequence
  Description of Artificial Sequence: Synthetic oligonucleotide
gcggcucggagcgggcucc

SEQ ID NO: 2624 - RNA, 19 nt, Artificial Sequence
  Description of Artificial Sequence: Synthetic oligonucleotide
cggggcucgggugcagcgg

SEQ ID NO: 2625 - RNA, 19 nt, Artificial Sequence
  Description of Artificial Sequence: Synthetic oligonucleotide
gccagcgggccuggcggcg

SEQ ID NO: 2626 - RNA, 19 nt, Artificial Sequence
  Description of Artificial Sequence: Synthetic oligonucleotide
gaggauuacccggggaagu

SEQ ID NO: 2627 - RNA, 19 nt, Artificial Sequence
  Description of Artificial Sequence: Synthetic oligonucleotide
ugguugucuccuggcugga

SEQ ID NO: 2628 - RNA, 19 nt, Artificial Sequence
  Description of Artificial Sequence: Synthetic oligonucleotide
agccgcgagacgggcgcuc

SEQ ID NO: 2629 - RNA, 19 nt, Artificial Sequence
  Description of Artificial Sequence: Synthetic oligonucleotide
cagggcgcggggccggcgg

SEQ ID NO: 2630 - RNA, 19 nt, Artificial Sequence
  Description of Artificial Sequence: Synthetic oligonucleotide
gcggcgaacgagaggacgg

SEQ ID NO: 2631 - RNA, 19 nt, Artificial Sequence
  Description of Artificial Sequence: Synthetic oligonucleotide
gacucuggcggccgggucg

SEQ ID NO: 2632 - RNA, 19 nt, Artificial Sequence
  Description of Artificial Sequence: Synthetic oligonucleotide
guuggccgggggagcgcgg

SEQ ID NO: 2633 - RNA, 19 nt, Artificial Sequence
  Description of Artificial Sequence: Synthetic oligonucleotide
ggcaccgggcgagcaggcc

SEQ ID NO: 2634 - RNA, 19 nt, Artificial Sequence
  Description of Artificial Sequence: Synthetic oligonucleotide
cgcgucgcgcucaccaugg

SEQ ID NO: 2635 - RNA, 19 nt, Artificial Sequence
  Description of Artificial Sequence: Synthetic oligonucleotide
gucagcuacugggacaccg

SEQ ID NO: 2636 - RNA, 19 nt, Artificial Sequence
  Description of Artificial Sequence: Synthetic oligonucleotide
gggguccugcugugcgcgc

SEQ ID NO: 2637 - RNA, 19 nt, Artificial Sequence
  Description of Artificial Sequence: Synthetic oligonucleotide
cugcucagcugucugcuuc

SEQ ID NO: 2638 - RNA, 19 nt, Artificial Sequence
  Description of Artificial Sequence: Synthetic oligonucleotide
cucacaggaucuaguucag

SEQ ID NO: 2639 - RNA, 19 nt, Artificial Sequence
  Description of Artificial Sequence: Synthetic oligonucleotide
gguucaaaauuaaaagauc

SEQ ID NO: 2640 - RNA, 19 nt, Artificial Sequence
  Description of Artificial Sequence: Synthetic oligonucleotide
ccugaacugaguuuaaaag

SEQ ID NO: 2641 - RNA, 19 nt, Artificial Sequence
  Description of Artificial Sequence: Synthetic oligonucleotide
ggcacccagcacaucaugc

SEQ ID NO: 2642 - RNA, 19 nt, Artificial Sequence
  Description of Artificial Sequence: Synthetic oligonucleotide
caagcaggccagacacugc

SEQ ID NO: 2643 - RNA, 19 nt, Artificial Sequence
  Description of Artificial Sequence: Synthetic oligonucleotide
caucuccaaugcagggggg

SEQ ID NO: 2644 - RNA, 19 nt, Artificial Sequence
  Description of Artificial Sequence: Synthetic oligonucleotide
gaagcagcccauaaauggu

SEQ ID NO: 2645 - RNA, 19 nt, Artificial Sequence
  Description of Artificial Sequence: Synthetic oligonucleotide
ucuuugccugaaaugguga

SEQ ID NO: 2646 - RNA, 19 nt, Artificial Sequence
  Description of Artificial Sequence: Synthetic oligonucleotide
aguaaggaaagcgaaaggc

SEQ ID NO: 2647 - RNA, 19 nt, Artificial Sequence
  Description of Artificial Sequence: Synthetic oligonucleotide
cugagcauaacuaaaucug

SEQ ID NO: 2648 - RNA, 19 nt, Artificial Sequence
  Description of Artificial Sequence: Synthetic oligonucleotide
gccuguggaagaaauggca

SEQ ID NO: 2649 - RNA, 19 nt, Artificial Sequence
  Description of Artificial Sequence: Synthetic oligonucleotide
aaacaauucugcaguacuu

SEQ ID NO: 2650 - RNA, 19 nt, Artificial Sequence
  Description of Artificial Sequence: Synthetic oligonucleotide
uuaaccuugaacacagcuc

SEQ ID NO: 2651 - RNA, 19 nt, Artificial Sequence
  Description of Artificial Sequence: Synthetic oligonucleotide
caagcaaaccacacuggcu

SEQ ID NO: 2652 - RNA, 19 nt, Artificial Sequence
  Description of Artificial Sequence: Synthetic oligonucleotide
uucuacagcugcaaauauc

SEQ ID NO: 2653 - RNA, 19 nt, Artificial Sequence
  Description of Artificial Sequence: Synthetic oligonucleotide
cuagcuguaccuacuucaa

SEQ ID NO: 2654 - RNA, 19 nt, Artificial Sequence
  Description of Artificial Sequence: Synthetic oligonucleotide
aagaagaaggaaacagaau

SEQ ID NO: 2655 - RNA, 19 nt, Artificial Sequence
  Description of Artificial Sequence: Synthetic oligonucleotide
ucugcaaucuauauauuua

SEQ ID NO: 2656 - RNA, 19 nt, Artificial Sequence
  Description of Artificial Sequence: Synthetic oligonucleotide
auuagugauacagguagac

SEQ ID NO: 2657 - RNA, 19 nt, Artificial Sequence
  Description of Artificial Sequence: Synthetic oligonucleotide
ccuuucguagagauguaca

SEQ ID NO: 2658 - RNA, 19 nt, Artificial Sequence
  Description of Artificial Sequence: Synthetic oligonucleotide
agugaaauccccgaaauua

SEQ ID NO: 2659 - RNA, 19 nt, Artificial Sequence
  Description of Artificial Sequence: Synthetic oligonucleotide
auacacaugacugaaggaa

SEQ ID NO: 2660 - RNA, 19 nt, Artificial Sequence
  Description of Artificial Sequence: Synthetic oligonucleotide
agggagcucgucauucccu

SEQ ID NO: 2661 - RNA, 19 nt, Artificial Sequence
  Description of Artificial Sequence: Synthetic oligonucleotide
ugccggguuacgucaccua

SEQ ID NO: 2662 - RNA, 19 nt, Artificial Sequence
  Description of Artificial Sequence: Synthetic oligonucleotide
aacaucacuguuacuuuaa

SEQ ID NO: 2663 - RNA, 19 nt, Artificial Sequence
  Description of Artificial Sequence: Synthetic oligonucleotide
aaaaaguuuccacuugaca

SEQ ID NO: 2664 - RNA, 19 nt, Artificial Sequence
  Description of Artificial Sequence: Synthetic oligonucleotide
acuuugaucccugauggaa

SEQ ID NO: 2665 - RNA, 19 nt, Artificial Sequence
  Description of Artificial Sequence: Synthetic oligonucleotide
aaacgcauaaucugggaca

SEQ ID NO: 2666 - RNA, 19 nt, Artificial Sequence
  Description of Artificial Sequence: Synthetic oligonucleotide
aguagaaagggcuucauca

SEQ ID NO: 2667 - RNA, 19 nt, Artificial Sequence
  Description of Artificial Sequence: Synthetic oligonucleotide
auaucaaaugcaacguaca

SEQ ID NO: 2668 - RNA, 19 nt, Artificial Sequence
  Description of Artificial Sequence: Synthetic oligonucleotide
aaagaaauagggcuucuga

SEQ ID NO: 2669 - RNA, 19 nt, Artificial Sequence
  Description of Artificial Sequence: Synthetic oligonucleotide
accugugaagcaacaguca

SEQ ID NO: 2670 - RNA, 19 nt, Artificial Sequence
  Description of Artificial Sequence: Synthetic oligonucleotide
aaugggcauuuguauaaga

SEQ ID NO: 2671 - RNA, 19 nt, Artificial Sequence
  Description of Artificial Sequence: Synthetic oligonucleotide
acaaacuaucucacacauc

SEQ ID NO: 2672 - RNA, 19 nt, Artificial Sequence
  Description of Artificial Sequence: Synthetic oligonucleotide
cgacaaaccaauacaauca

SEQ ID NO: 2673 - RNA, 19 nt, Artificial Sequence
  Description of Artificial Sequence: Synthetic oligonucleotide
auagauguccaaauaagca

SEQ ID NO: 2674 - RNA, 19 nt, Artificial Sequence
  Description of Artificial Sequence: Synthetic oligonucleotide
acaccacgcccagucaaau

SEQ ID NO: 2675 - RNA, 19 nt, Artificial Sequence
  Description of Artificial Sequence: Synthetic oligonucleotide
uuacuuagaggccauacuc

SEQ ID NO: 2676 - RNA, 19 nt, Artificial Sequence
  Description of Artificial Sequence: Synthetic oligonucleotide
cuuguccucaauuguacug

SEQ ID NO: 2677 - RNA, 19 nt, Artificial Sequence
  Description of Artificial Sequence: Synthetic oligonucleotide
gcuaccacucccuugaaca

SEQ ID NO: 2678 - RNA, 19 nt, Artificial Sequence
  Description of Artificial Sequence: Synthetic oligonucleotide
acgagaguucaaaugaccu

SEQ ID NO: 2679 - RNA, 19 nt, Artificial Sequence
  Description of Artificial Sequence: Synthetic oligonucleotide
uggaguuacccugaugaaa

SEQ ID NO: 2680 - RNA, 19 nt, Artificial Sequence
  Description of Artificial Sequence: Synthetic oligonucleotide
aaaaauaagagagcuuccg

SEQ ID NO: 2681 - RNA, 19 nt, Artificial Sequence
  Description of Artificial Sequence: Synthetic oligonucleotide
guaaggcgacgaauugacc

SEQ ID NO: 2682 - RNA, 19 nt, Artificial Sequence
  Description of Artificial Sequence: Synthetic oligonucleotide
caaagcaauucccaugcca

SEQ ID NO: 2683 - RNA, 19 nt, Artificial Sequence
  Description of Artificial Sequence: Synthetic oligonucleotide
aacauauucuacaguguuc

SEQ ID NO: 2684 - RNA, 19 nt, Artificial Sequence
  Description of Artificial Sequence: Synthetic oligonucleotide
cuuacuauugacaaaaugc

SEQ ID NO: 2685 - RNA, 19 nt, Artificial Sequence
  Description of Artificial Sequence: Synthetic oligonucleotide
cagaacaaagacaaaggac

SEQ ID NO: 2686 - RNA, 19 nt, Artificial Sequence
  Description of Artificial Sequence: Synthetic oligonucleotide
cuuuauacuugucguguaa

SEQ ID NO: 2687 - RNA, 19 nt, Artificial Sequence
  Description of Artificial Sequence: Synthetic oligonucleotide
aggaguggaccaucauuca

SEQ ID NO: 2688 - RNA, 19 nt, Artificial Sequence
  Description of Artificial Sequence: Synthetic oligonucleotide
aaaucuguuaacaccucag

SEQ ID NO: 2689 - RNA, 19 nt, Artificial Sequence
  Description of Artificial Sequence: Synthetic oligonucleotide
gugcauauauaugauaaag

SEQ ID NO: 2690 - RNA, 19 nt, Artificial Sequence
  Description of Artificial Sequence: Synthetic oligonucleotide
gcauucaucacugugaaac

SEQ ID NO: 2691 - RNA, 19 nt, Artificial Sequence
  Description of Artificial Sequence: Synthetic oligonucleotide
caucgaaaacagcaggugc

SEQ ID NO: 2692 - RNA, 19 nt, Artificial Sequence
  Description of Artificial Sequence: Synthetic oligonucleotide
cuugaaaccguagcuggca

SEQ ID NO: 2693 - RNA, 19 nt, Artificial Sequence
  Description of Artificial Sequence: Synthetic oligonucleotide
aagcggucuuaccggcucu

SEQ ID NO: 2694 - RNA, 19 nt, Artificial Sequence
  Description of Artificial Sequence: Synthetic oligonucleotide
ucuaugaaagugaaggcau

SEQ ID NO: 2695 - RNA, 19 nt, Artificial Sequence
  Description of Artificial Sequence: Synthetic oligonucleotide
uuucccucgccggaaguug

SEQ ID NO: 2696 - RNA, 19 nt, Artificial Sequence
  Description of Artificial Sequence: Synthetic oligonucleotide
guaugguuaaaagaugggu

SEQ ID NO: 2697 - RNA, 19 nt, Artificial Sequence
  Description of Artificial Sequence: Synthetic oligonucleotide
uuaccugcgacugagaaau

SEQ ID NO: 2698 - RNA, 19 nt, Artificial Sequence
  Description of Artificial Sequence: Synthetic oligonucleotide
ucugcucgcuauuugacuc

SEQ ID NO: 2699 - RNA, 19 nt, Artificial Sequence
  Description of Artificial Sequence: Synthetic oligonucleotide
cguggcuacucguuaauua

SEQ ID NO: 2700 - RNA, 19 nt, Artificial Sequence
  Description of Artificial Sequence: Synthetic oligonucleotide
aucaaggacguaacugaag

SEQ ID NO: 2701 - RNA, 19 nt, Artificial Sequence
  Description of Artificial Sequence: Synthetic oligonucleotide
gaggaugcagggaauuaua

SEQ ID NO: 2702 - RNA, 19 nt, Artificial Sequence
  Description of Artificial Sequence: Synthetic oligonucleotide
acaaucuugcugagcauaa

SEQ ID NO: 2703 - RNA, 19 nt, Artificial Sequence
  Description of Artificial Sequence: Synthetic oligonucleotide
aaacagucaaauguguuua

SEQ ID NO: 2704 - RNA, 19 nt, Artificial Sequence
  Description of Artificial Sequence: Synthetic oligonucleotide
aaaaaccucacugccacuc

SEQ ID NO: 2705 - RNA, 19 nt, Artificial Sequence
  Description of Artificial Sequence: Synthetic oligonucleotide
cuaauugucaaugugaaac

SEQ ID NO: 2706 - RNA, 19 nt, Artificial Sequence
  Description of Artificial Sequence: Synthetic oligonucleotide
ccccagauuuacgaaaagg

SEQ ID NO: 2707 - RNA, 19 nt, Artificial Sequence
  Description of Artificial Sequence: Synthetic oligonucleotide
gccgugucaucguuuccag

SEQ ID NO: 2708 - RNA, 19 nt, Artificial Sequence
  Description of Artificial Sequence: Synthetic oligonucleotide
gacccggcucucuacccac

SEQ ID NO: 2709 - RNA, 19 nt, Artificial Sequence
  Description of Artificial Sequence: Synthetic oligonucleotide
cugggcagcagacaaaucc

SEQ ID NO: 2710 - RNA, 19 nt, Artificial Sequence
  Description of Artificial Sequence: Synthetic oligonucleotide
cugacuuguaccgcauaug

SEQ ID NO: 2711 - RNA, 19 nt, Artificial Sequence
  Description of Artificial Sequence: Synthetic oligonucleotide
gguaucccucaaccuacaa

SEQ ID NO: 2712 - RNA, 19 nt, Artificial Sequence
  Description of Artificial Sequence: Synthetic oligonucleotide
aucaagugguucuggcacc

SEQ ID NO: 2713 - RNA, 19 nt, Artificial Sequence
  Description of Artificial Sequence: Synthetic oligonucleotide
cccuguaaccauaaucauu

SEQ ID NO: 2714 - RNA, 19 nt, Artificial Sequence
  Description of Artificial Sequence: Synthetic oligonucleotide
uccgaagcaaggugugacu

SEQ ID NO: 2715 - RNA, 19 nt, Artificial Sequence
  Description of Artificial Sequence: Synthetic oligonucleotide
uuuuguuccaauaaugaag

SEQ ID NO: 2716 - RNA, 19 nt, Artificial Sequence
  Description of Artificial Sequence: Synthetic oligonucleotide
gaguccuuuauccuggaug

SEQ ID NO: 2717 - RNA, 19 nt, Artificial Sequence
  Description of Artificial Sequence: Synthetic oligonucleotide
gcugacagcaacaugggaa

SEQ ID NO: 2718 - RNA, 19 nt, Artificial Sequence
  Description of Artificial Sequence: Synthetic oligonucleotide
aacagaauugagagcauca

SEQ ID NO: 2719 - RNA, 19 nt, Artificial Sequence
  Description of Artificial Sequence: Synthetic oligonucleotide
acucagcgcauggcaauaa

SEQ ID NO: 2720 - RNA, 19 nt, Artificial Sequence
  Description of Artificial Sequence: Synthetic oligonucleotide
auagaaggaaagaauaaga

SEQ ID NO: 2721 - RNA, 19 nt, Artificial Sequence
  Description of Artificial Sequence: Synthetic oligonucleotide
auggcuagcaccuugguug

SEQ ID NO: 2722 - RNA, 19 nt, Artificial Sequence
  Description of Artificial Sequence: Synthetic oligonucleotide
guggcugacucuagaauuu

SEQ ID NO: 2723 - RNA, 19 nt, Artificial Sequence
  Description of Artificial Sequence: Synthetic oligonucleotide
ucuggaaucuacauuugca

SEQ ID NO: 2724 - RNA, 19 nt, Artificial Sequence
  Description of Artificial Sequence: Synthetic oligonucleotide
auagcuuccaauaaaguug

SEQ ID NO: 2725 - RNA, 19 nt, Artificial Sequence
  Description of Artificial Sequence: Synthetic oligonucleotide
gggacugugggaagaaaca

SEQ ID NO: 2726 - RNA, 19 nt, Artificial Sequence
  Description of Artificial Sequence: Synthetic oligonucleotide
auaagcuuuuauaucacag

SEQ ID NO: 2727 - RNA, 19 nt, Artificial Sequence
  Description of Artificial Sequence: Synthetic oligonucleotide
gaugugccaaauggguuuc

SEQ ID NO: 2728 - RNA, 19 nt, Artificial Sequence
  Description of Artificial Sequence: Synthetic oligonucleotide
cauguuaacuuggaaaaaa

SEQ ID NO: 2729 - RNA, 19 nt, Artificial Sequence
  Description of Artificial Sequence: Synthetic oligonucleotide
augccgacggaaggagagg

SEQ ID NO: 2730 - RNA, 19 nt, Artificial Sequence
  Description of Artificial Sequence: Synthetic oligonucleotide
gaccugaaacugucuugca

SEQ ID NO: 2731 - RNA, 19 nt, Artificial Sequence
  Description of Artificial Sequence: Synthetic oligonucleotide
acaguuaacaaguucuuau

SEQ ID NO: 2732 - RNA, 19 nt, Artificial Sequence
  Description of Artificial Sequence: Synthetic oligonucleotide
uacagagacguuacuugga

SEQ ID NO: 2733 - RNA, 19 nt, Artificial Sequence
  Description of Artificial Sequence: Synthetic oligonucleotide
auuuuacugcggacaguua

SEQ ID NO: 2734 - RNA, 19 nt, Artificial Sequence
  Description of Artificial Sequence: Synthetic oligonucleotide
aauaacagaacaaugcacu

SEQ ID NO: 2735 - RNA, 19 nt, Artificial Sequence
  Description of Artificial Sequence: Synthetic oligonucleotide
uacaguauuagcaagcaaa

SEQ ID NO: 2736 - RNA, 19 nt, Artificial Sequence
  Description of Artificial Sequence: Synthetic oligonucleotide
aaaauggccaucacuaagg

SEQ ID NO: 2737 - RNA, 19 nt, Artificial Sequence
  Description of Artificial Sequence: Synthetic oligonucleotide
gagcacuccaucacucuua

SEQ ID NO: 2738 - RNA, 19 nt, Artificial Sequence
  Description of Artificial Sequence: Synthetic oligonucleotide
aaucuuaccaucaugaaug

SEQ ID NO: 2739 - RNA, 19 nt, Artificial Sequence
  Description of Artificial Sequence: Synthetic oligonucleotide
guuucccugcaagauucag

SEQ ID NO: 2740 - RNA, 19 nt, Artificial Sequence
  Description of Artificial Sequence: Synthetic oligonucleotide
ggcaccuaugccugcagag

SEQ ID NO: 2741 - RNA, 19 nt, Artificial Sequence
  Description of Artificial Sequence: Synthetic oligonucleotide
gccaggaauguauacacag

SEQ ID NO: 2742 - RNA, 19 nt, Artificial Sequence
  Description of Artificial Sequence: Synthetic oligonucleotide
ggggaagaaauccuccaga

SEQ ID NO: 2743 - RNA, 19 nt, Artificial Sequence
  Description of Artificial Sequence: Synthetic oligonucleotide
aagaaagaaauuacaauca

SEQ ID NO: 2744 - RNA, 19 nt, Artificial Sequence
  Description of Artificial Sequence: Synthetic oligonucleotide
agagaucaggaagcaccau

SEQ ID NO: 2745 - RNA, 19 nt, Artificial Sequence
  Description of Artificial Sequence: Synthetic oligonucleotide
uaccuccugcgaaaccuca

SEQ ID NO: 2746 - RNA, 19 nt, Artificial Sequence
  Description of Artificial Sequence: Synthetic oligonucleotide
agugaucacacaguggcca

SEQ ID NO: 2747 - RNA, 19 nt, Artificial Sequence
  Description of Artificial Sequence: Synthetic oligonucleotide
aucagcaguuccaccacuu

SEQ ID NO: 2748 - RNA, 19 nt, Artificial Sequence
  Description of Artificial Sequence: Synthetic oligonucleotide
uuagacugucaugcuaaug

SEQ ID NO: 2749 - RNA, 19 nt, Artificial Sequence
  Description of Artificial Sequence: Synthetic oligonucleotide
gguguccccgagccucaga

SEQ ID NO: 2750 - RNA, 19 nt, Artificial Sequence
  Description of Artificial Sequence: Synthetic oligonucleotide
aucacuugguuuaaaaaca

SEQ ID NO: 2751 - RNA, 19 nt, Artificial Sequence
  Description of Artificial Sequence: Synthetic oligonucleotide
aaccacaaaauacaacaag

SEQ ID NO: 2752 - RNA, 19 nt, Artificial Sequence
  Description of Artificial Sequence: Synthetic oligonucleotide
gagccuggaauuauuuuag

SEQ ID NO: 2753 - RNA, 19 nt, Artificial Sequence
  Description of Artificial Sequence: Synthetic oligonucleotide
ggaccaggaagcagcacgc

SEQ ID NO: 2754 - RNA, 19 nt, Artificial Sequence
  Description of Artificial Sequence: Synthetic oligonucleotide
cuguuuauugaaagaguca

SEQ ID NO: 2755 - RNA, 19 nt, Artificial Sequence
  Description of Artificial Sequence: Synthetic oligonucleotide
acagaagaggaugaaggug

SEQ ID NO: 2756 - RNA, 19 nt, Artificial Sequence
  Description of Artificial Sequence: Synthetic oligonucleotide
gucuaucacugcaaagcca

SEQ ID NO: 2757 - RNA, 19 nt, Artificial Sequence
  Description of Artificial Sequence: Synthetic oligonucleotide
accaaccagaagggcucug

SEQ ID NO: 2758 - RNA, 19 nt, Artificial Sequence
  Description of Artificial Sequence: Synthetic oligonucleotide
guggaaaguucagcauacc

SEQ ID NO: 2759 - RNA, 19 nt, Artificial Sequence
  Description of Artificial Sequence: Synthetic oligonucleotide
cucacuguucaaggaaccu

SEQ ID NO: 2760 - RNA, 19 nt, Artificial Sequence
  Description of Artificial Sequence: Synthetic oligonucleotide
ucggacaagucuaaucugg

SEQ ID NO: 2761 - RNA, 19 nt, Artificial Sequence
  Description of Artificial Sequence: Synthetic oligonucleotide
gagcugaucacucuaacau

SEQ ID NO: 2762 - RNA, 19 nt, Artificial Sequence
  Description of Artificial Sequence: Synthetic oligonucleotide
ugcaccuguguggcugcga

SEQ ID NO: 2763 - RNA, 19 nt, Artificial Sequence
  Description of Artificial Sequence: Synthetic oligonucleotide
acucucuucuggcuccuau

SEQ ID NO: 2764 - RNA, 19 nt, Artificial Sequence
  Description of Artificial Sequence: Synthetic oligonucleotide
uuaacccuccuuauccgaa

SEQ ID NO: 2765 - RNA, 19 nt, Artificial Sequence
  Description of Artificial Sequence: Synthetic oligonucleotide
aaaaugaaaaggucuucuu

SEQ ID NO: 2766 - RNA, 19 nt, Artificial Sequence
  Description of Artificial Sequence: Synthetic oligonucleotide
ucugaaauaaagacugacu

SEQ ID NO: 2767 - RNA, 19 nt, Artificial Sequence
  Description of Artificial Sequence: Synthetic oligonucleotide
uaccuaucaauuauaaugg

SEQ ID NO: 2768 - RNA, 19 nt, Artificial Sequence
  Description of Artificial Sequence: Synthetic oligonucleotide
gacccagaugaaguuccuu

SEQ ID NO: 2769 - RNA, 19 nt, Artificial Sequence
  Description of Artificial Sequence: Synthetic oligonucleotide
uuggaugagcagugugagc

SEQ ID NO: 2770 - RNA, 19 nt, Artificial Sequence
  Description of Artificial Sequence: Synthetic oligonucleotide
cggcucccuuaugaugcca

SEQ ID NO: 2771 - RNA, 19 nt, Artificial Sequence
  Description of Artificial Sequence: Synthetic oligonucleotide
agcaagugggaguuugccc

SEQ ID NO: 2772 - RNA, 19 nt, Artificial Sequence
  Description of Artificial Sequence: Synthetic oligonucleotide
cgggagagacuuaaacugg

SEQ ID NO: 2773 - RNA, 19 nt, Artificial Sequence
  Description of Artificial Sequence: Synthetic oligonucleotide
ggcaaaucacuuggaagag

SEQ ID NO: 2774 - RNA, 19 nt, Artificial Sequence
  Description of Artificial Sequence: Synthetic oligonucleotide
ggggcuuuuggaaaagugg

SEQ ID NO: 2775 - RNA, 19 nt, Artificial Sequence
  Description of Artificial Sequence: Synthetic oligonucleotide
guucaagcaucagcauuug

SEQ ID NO: 2776 - RNA, 19 nt, Artificial Sequence
  Description of Artificial Sequence: Synthetic oligonucleotide
ggcauuaagaaaucaccua

SEQ ID NO: 2777 - RNA, 19 nt, Artificial Sequence
  Description of Artificial Sequence: Synthetic oligonucleotide
acgugccggacuguggcug

SEQ ID NO: 2778 - RNA, 19 nt, Artificial Sequence
  Description of Artificial Sequence: Synthetic oligonucleotide
gugaaaaugcugaaagagg

SEQ ID NO: 2779 - RNA, 19 nt, Artificial Sequence
  Description of Artificial Sequence: Synthetic oligonucleotide
ggggccacggccagcgagu

SEQ ID NO: 2780 - RNA, 19 nt, Artificial Sequence
  Description of Artificial Sequence: Synthetic oligonucleotide
uacaaagcucugaugacug

SEQ ID NO: 2781 - RNA, 19 nt, Artificial Sequence
  Description of Artificial Sequence: Synthetic oligonucleotide
gagcuaaaaaucuugaccc

SEQ ID NO: 2782 - RNA, 19 nt, Artificial Sequence
  Description of Artificial Sequence: Synthetic oligonucleotide
cacauuggccaccaucuga

SEQ ID NO: 2783 - RNA, 19 nt, Artificial Sequence
  Description of Artificial Sequence: Synthetic oligonucleotide
aacgugguuaaccugcugg

SEQ ID NO: 2784 - RNA, 19 nt, Artificial Sequence
  Description of Artificial Sequence: Synthetic oligonucleotide
ggagccugcaccaagcaag

SEQ ID NO: 2785 - RNA, 19 nt, Artificial Sequence
  Description of Artificial Sequence: Synthetic oligonucleotide
ggagggccucugaugguga

SEQ ID NO: 2786 - RNA, 19 nt, Artificial Sequence
  Description of Artificial Sequence: Synthetic oligonucleotide
auuguugaauacugcaaau

SEQ ID NO: 2787 - RNA, 19 nt, Artificial Sequence
  Description of Artificial Sequence: Synthetic oligonucleotide
uauggaaaucucuccaacu

SEQ ID NO: 2788 - RNA, 19 nt, Artificial Sequence
  Description of Artificial Sequence: Synthetic oligonucleotide
uaccucaagagcaaacgug

SEQ ID NO: 2789 - RNA, 19 nt, Artificial Sequence
  Description of Artificial Sequence: Synthetic oligonucleotide
gacuuauuuuuucucaaca

SEQ ID NO: 2790 - RNA, 19 nt, Artificial Sequence
  Description of Artificial Sequence: Synthetic oligonucleotide
aaggaugcagcacuacaca

SEQ ID NO: 2791 - RNA, 19 nt, Artificial Sequence
  Description of Artificial Sequence: Synthetic oligonucleotide
auggagccuaagaaagaaa

SEQ ID NO: 2792 - RNA, 19 nt, Artificial Sequence
  Description of Artificial Sequence: Synthetic oligonucleotide
aaaauggagccaggccugg

SEQ ID NO: 2793 - RNA, 19 nt, Artificial Sequence
  Description of Artificial Sequence: Synthetic oligonucleotide
gaacaaggcaagaaaccaa

SEQ ID NO: 2794 - RNA, 19 nt, Artificial Sequence
  Description of Artificial Sequence: Synthetic oligonucleotide
agacuagauagcgucacca

SEQ ID NO: 2795 - RNA, 19 nt, Artificial Sequence
  Description of Artificial Sequence: Synthetic oligonucleotide
agcagcgaaagcuuugcga

SEQ ID NO: 2796 - RNA, 19 nt, Artificial Sequence
  Description of Artificial Sequence: Synthetic oligonucleotide
agcuccggcuuucaggaag

SEQ ID NO: 2797 - RNA, 19 nt, Artificial Sequence
  Description of Artificial Sequence: Synthetic oligonucleotide
gauaaaagucugagugaug

SEQ ID NO: 2798 - RNA, 19 nt, Artificial Sequence
  Description of Artificial Sequence: Synthetic oligonucleotide
guugaggaagaggaggauu

SEQ ID NO: 2799 - RNA, 19 nt, Artificial Sequence
  Description of Artificial Sequence: Synthetic oligonucleotide
ucugacgguuucuacaagg

SEQ ID NO: 2800 - RNA, 19 nt, Artificial Sequence
  Description of Artificial Sequence: Synthetic oligonucleotide
gagcccaucacuauggaag

SEQ ID NO: 2801 - RNA, 19 nt, Artificial Sequence
  Description of Artificial Sequence: Synthetic oligonucleotide
gaucugauuucuuacaguu

SEQ ID NO: 2802 - RNA, 19 nt, Artificial Sequence
  Description of Artificial Sequence: Synthetic oligonucleotide
uuucaaguggccagaggca

SEQ ID NO: 2803 - RNA, 19 nt, Artificial Sequence
  Description of Artificial Sequence: Synthetic oligonucleotide
auggaguuccugucuucca

SEQ ID NO: 2804 - RNA, 19 nt, Artificial Sequence
  Description of Artificial Sequence: Synthetic oligonucleotide
agaaagugcauucaucggg

SEQ ID NO: 2805 - RNA, 19 nt, Artificial Sequence
  Description of Artificial Sequence: Synthetic oligonucleotide
gaccuggcagcgagaaaca

SEQ ID NO: 2806 - RNA, 19 nt, Artificial Sequence
  Description of Artificial Sequence: Synthetic oligonucleotide
auucuuuuaucugagaaca

SEQ ID NO: 2807 - RNA, 19 nt, Artificial Sequence
  Description of Artificial Sequence: Synthetic oligonucleotide
aacguggugaagauuugug

SEQ ID NO: 2808 - RNA, 19 nt, Artificial Sequence
  Description of Artificial Sequence: Synthetic oligonucleotide
gauuuuggccuugcccggg

SEQ ID NO: 2809 - RNA, 19 nt, Artificial Sequence
  Description of Artificial Sequence: Synthetic oligonucleotide
gauauuuauaagaaccccg

SEQ ID NO: 2810 - RNA, 19 nt, Artificial Sequence
  Description of Artificial Sequence: Synthetic oligonucleotide
gauuaugugagaaaaggag

SEQ ID NO: 2811 - RNA, 19 nt, Artificial Sequence
  Description of Artificial Sequence: Synthetic oligonucleotide
gauacucgacuuccucuga

SEQ ID NO: 2812 - RNA, 19 nt, Artificial Sequence
  Description of Artificial Sequence: Synthetic oligonucleotide
aaauggauggcucccgaau

SEQ ID NO: 2813 - RNA, 19 nt, Artificial Sequence
  Description of Artificial Sequence: Synthetic oligonucleotide
ucuaucuuugacaaaaucu

SEQ ID NO: 2814 - RNA, 19 nt, Artificial Sequence
  Description of Artificial Sequence: Synthetic oligonucleotide
uacagcaccaagagcgacg

SEQ ID NO: 2815 - RNA, 19 nt, Artificial Sequence
  Description of Artificial Sequence: Synthetic oligonucleotide
guguggucuuacggaguau

SEQ ID NO: 2816 - RNA, 19 nt, Artificial Sequence
  Description of Artificial Sequence: Synthetic oligonucleotide
uugcugugggaaaucuucu

SEQ ID NO: 2817 - RNA, 19 nt, Artificial Sequence
  Description of Artificial Sequence: Synthetic oligonucleotide
uccuuaggugggucuccau

SEQ ID NO: 2818 - RNA, 19 nt, Artificial Sequence
  Description of Artificial Sequence: Synthetic oligonucleotide
uacccaggaguacaaaugg

SEQ ID NO: 2819 - RNA, 19 nt, Artificial Sequence
  Description of Artificial Sequence: Synthetic oligonucleotide
gaugaggacuuuugcaguc

SEQ ID NO: 2820 - RNA, 19 nt, Artificial Sequence
  Description of Artificial Sequence: Synthetic oligonucleotide
cgccugagggaaggcauga

SEQ ID NO: 2821 - RNA, 19 nt, Artificial Sequence
  Description of Artificial Sequence: Synthetic oligonucleotide
aggaugagagcuccugagu

SEQ ID NO: 2822 - RNA, 19 nt, Artificial Sequence
  Description of Artificial Sequence: Synthetic oligonucleotide
uacucuacuccugaaaucu

SEQ ID NO: 2823 - RNA, 19 nt, Artificial Sequence
  Description of Artificial Sequence: Synthetic oligonucleotide
uaucagaucaugcuggacu

SEQ ID NO: 2824 - RNA, 19 nt, Artificial Sequence
  Description of Artificial Sequence: Synthetic oligonucleotide
ugcuggcacagagacccaa

SEQ ID NO: 2825 - RNA, 19 nt, Artificial Sequence
  Description of Artificial Sequence: Synthetic oligonucleotide
aaagaaaggccaagauuug

SEQ ID NO: 2826 - RNA, 19 nt, Artificial Sequence
  Description of Artificial Sequence: Synthetic oligonucleotide
gcagaacuuguggaaaaac

SEQ ID NO: 2827 - RNA, 19 nt, Artificial Sequence
  Description of Artificial Sequence: Synthetic oligonucleotide
cuaggugauuugcuucaag

SEQ ID NO: 2828 - RNA, 19 nt, Artificial Sequence
  Description of Artificial Sequence: Synthetic oligonucleotide
gcaaauguacaacaggaug

SEQ ID NO: 2829 - RNA, 19 nt, Artificial Sequence
  Description of Artificial Sequence: Synthetic oligonucleotide
gguaaagacuacaucccaa

SEQ ID NO: 2830 - RNA, 19 nt, Artificial Sequence
  Description of Artificial Sequence: Synthetic oligonucleotide
aucaaugccauacugacag

SEQ ID NO: 2831 - RNA, 19 nt, Artificial Sequence
  Description of Artificial Sequence: Synthetic oligonucleotide
ggaaauaguggguuuacau

SEQ ID NO: 2832 - RNA, 19 nt, Artificial Sequence
  Description of Artificial Sequence: Synthetic oligonucleotide
uacucaacuccugccuucu

SEQ ID NO: 2833 - RNA, 19 nt, Artificial Sequence
  Description of Artificial Sequence: Synthetic oligonucleotide
ucugaggacuucuucaagg

SEQ ID NO: 2834 - RNA, 19 nt, Artificial Sequence
  Description of Artificial Sequence: Synthetic oligonucleotide
gaaaguauuucagcuccga

SEQ ID NO: 2835 - RNA, 19 nt, Artificial Sequence
  Description of Artificial Sequence: Synthetic oligonucleotide
aaguuuaauucaggaagcu

SEQ ID NO: 2836 - RNA, 19 nt, Artificial Sequence
  Description of Artificial Sequence: Synthetic oligonucleotide
ucugaugaugucagauaug

SEQ ID NO: 2837 - RNA, 19 nt, Artificial Sequence
  Description of Artificial Sequence: Synthetic oligonucleotide
guaaaugcuuucaaguuca

SEQ ID NO: 2838 - RNA, 19 nt, Artificial Sequence
  Description of Artificial Sequence: Synthetic oligonucleotide
augagccuggaaagaauca

SEQ ID NO: 2839 - RNA, 19 nt, Artificial Sequence
  Description of Artificial Sequence: Synthetic oligonucleotide
aaaaccuuugaagaacuuu

SEQ ID NO: 2840 - RNA, 19 nt, Artificial Sequence
  Description of Artificial Sequence: Synthetic oligonucleotide
uuaccgaaugccaccucca

SEQ ID NO: 2841 - RNA, 19 nt, Artificial Sequence
  Description of Artificial Sequence: Synthetic oligonucleotide
auguuugaugacuaccagg

SEQ ID NO: 2842 - RNA, 19 nt, Artificial Sequence
  Description of Artificial Sequence: Synthetic oligonucleotide
ggcgacagcagcacucugu

SEQ ID NO: 2843 - RNA, 19 nt, Artificial Sequence
  Description of Artificial Sequence: Synthetic oligonucleotide
uuggccucucccaugcuga

SEQ ID NO: 2844 - RNA, 19 nt, Artificial Sequence
  Description of Artificial Sequence: Synthetic oligonucleotide
aagcgcuucaccuggacug

SEQ ID NO: 2845 - RNA, 19 nt, Artificial Sequence
  Description of Artificial Sequence: Synthetic oligonucleotide
gacagcaaacccaaggccu

SEQ ID NO: 2846 - RNA, 19 nt, Artificial Sequence
  Description of Artificial Sequence: Synthetic oligonucleotide
ucgcucaagauugacuuga

SEQ ID NO: 2847 - RNA, 19 nt, Artificial Sequence
  Description of Artificial Sequence: Synthetic oligonucleotide
agaguaaccaguaaaagua

SEQ ID NO: 2848 - RNA, 19 nt, Artificial Sequence
  Description of Artificial Sequence: Synthetic oligonucleotide
aaggagucggggcugucug

SEQ ID NO: 2849 - RNA, 19 nt, Artificial Sequence
  Description of Artificial Sequence: Synthetic oligonucleotide
gaugucagcaggcccaguu

SEQ ID NO: 2850 - RNA, 19 nt, Artificial Sequence
  Description of Artificial Sequence: Synthetic oligonucleotide
uucugccauuccagcugug

SEQ ID NO: 2851 - RNA, 19 nt, Artificial Sequence
  Description of Artificial Sequence: Synthetic oligonucleotide
gggcacgucagcgaaggca

SEQ ID NO: 2852 - RNA, 19 nt, Artificial Sequence
  Description of Artificial Sequence: Synthetic oligonucleotide
aagcgcagguucaccuacg

SEQ ID NO: 2853 - RNA, 19 nt, Artificial Sequence
  Description of Artificial Sequence: Synthetic oligonucleotide
gaccacgcugagcuggaaa

SEQ ID NO: 2854 - RNA, 19 nt, Artificial Sequence
  Description of Artificial Sequence: Synthetic oligonucleotide
aggaaaaucgcgugcugcu

SEQ ID NO: 2855 - RNA, 19 nt, Artificial Sequence
  Description of Artificial Sequence: Synthetic oligonucleotide
uccccgcccccagacuaca

SEQ ID NO: 2856 - RNA, 19 nt, Artificial Sequence
  Description of Artificial Sequence: Synthetic oligonucleotide
aacucggugguccuguacu

SEQ ID NO: 2857 - RNA, 19 nt, Artificial Sequence
  Description of Artificial Sequence: Synthetic oligonucleotide
uccaccccacccaucuaga

SEQ ID NO: 2858 - RNA, 19 nt, Artificial Sequence
  Description of Artificial Sequence: Synthetic oligonucleotide
aguuugacacgaagccuua

SEQ ID NO: 2859 - RNA, 19 nt, Artificial Sequence
  Description of Artificial Sequence: Synthetic oligonucleotide
auuucuagaagcacaugug

SEQ ID NO: 2860 - RNA, 19 nt, Artificial Sequence
  Description of Artificial Sequence: Synthetic oligonucleotide
guauuuauacccccaggaa

SEQ ID NO: 2861 - RNA, 19 nt, Artificial Sequence
  Description of Artificial Sequence: Synthetic oligonucleotide
aacuagcuuuugccaguau

SEQ ID NO: 2862 - RNA, 19 nt, Artificial Sequence
  Description of Artificial Sequence: Synthetic oligonucleotide
uuaugcauauauaaguuua

SEQ ID NO: 2863 - RNA, 19 nt, Artificial Sequence
  Description of Artificial Sequence: Synthetic oligonucleotide
acaccuuuaucuuuccaug

SEQ ID NO: 2864 - RNA, 19 nt, Artificial Sequence
  Description of Artificial Sequence: Synthetic oligonucleotide
gggagccagcugcuuuuug

SEQ ID NO: 2865 - RNA, 19 nt, Artificial Sequence
  Description of Artificial Sequence: Synthetic oligonucleotide
gugauuuuuuuaauagugc

SEQ ID NO: 2866 - RNA, 19 nt, Artificial Sequence
  Description of Artificial Sequence: Synthetic oligonucleotide
caagaauguaacuccagau

SEQ ID NO: 2867 - RNA, 19 nt, Artificial Sequence
  Description of Artificial Sequence: Synthetic oligonucleotide
uagagaaauagugacaagu

SEQ ID NO: 2868 - RNA, 19 nt, Artificial Sequence
  Description of Artificial Sequence: Synthetic oligonucleotide
ugaagaacacuacugcuaa

SEQ ID NO: 2869 - RNA, 19 nt, Artificial Sequence
  Description of Artificial Sequence: Synthetic oligonucleotide
aauccucauguuacucagu

SEQ ID NO: 2870 - RNA, 19 nt, Artificial Sequence
  Description of Artificial Sequence: Synthetic oligonucleotide
uguuagagaaauccuuccu

SEQ ID NO: 2871 - RNA, 19 nt, Artificial Sequence
  Description of Artificial Sequence: Synthetic oligonucleotide
uaaacccaaugacuucccu

SEQ ID NO: 2872 - RNA, 19 nt, Artificial Sequence
  Description of Artificial Sequence: Synthetic oligonucleotide
ugcuccaacccccgccacc

SEQ ID NO: 2873 - RNA, 19 nt, Artificial Sequence
  Description of Artificial Sequence: Synthetic oligonucleotide
cucagggcacgcaggacca

SEQ ID NO: 2874 - RNA, 19 nt, Artificial Sequence
  Description of Artificial Sequence: Synthetic oligonucleotide
aguuugauugaggagcugc

SEQ ID NO: 2875 - RNA, 19 nt, Artificial Sequence
  Description of Artificial Sequence: Synthetic oligonucleotide
cacugaucacccaaugcau

SEQ ID NO: 2876 - RNA, 19 nt, Artificial Sequence
  Description of Artificial Sequence: Synthetic oligonucleotide
ucacguaccccacugggcc

SEQ ID NO: 2877 - RNA, 19 nt, Artificial Sequence
  Description of Artificial Sequence: Synthetic oligonucleotide
cagcccugcagcccaaaac

SEQ ID NO: 2878 - RNA, 19 nt, Artificial Sequence
  Description of Artificial Sequence: Synthetic oligonucleotide
cccagggcaacaagcccgu

SEQ ID NO: 2879 - RNA, 19 nt, Artificial Sequence
  Description of Artificial Sequence: Synthetic oligonucleotide
uuagccccaggggaucacu

SEQ ID NO: 2880 - RNA, 19 nt, Artificial Sequence
  Description of Artificial Sequence: Synthetic oligonucleotide
uggcuggccugagcaacau

SEQ ID NO: 2881 - RNA, 19 nt, Artificial Sequence
  Description of Artificial Sequence: Synthetic oligonucleotide
ucucgggaguccucuagca

SEQ ID NO: 2882 - RNA, 19 nt, Artificial Sequence
  Description of Artificial Sequence: Synthetic oligonucleotide
aggccuaagacaugugagg

SEQ ID NO: 2883 - RNA, 19 nt, Artificial Sequence
  Description of Artificial Sequence: Synthetic oligonucleotide
gaggaaaaggaaaaaaagc

SEQ ID NO: 2884 - RNA, 19 nt, Artificial Sequence
  Description of Artificial Sequence: Synthetic oligonucleotide
caaaaagcaagggagaaaa

SEQ ID NO: 2885 - RNA, 19 nt, Artificial Sequence
  Description of Artificial Sequence: Synthetic oligonucleotide
agagaaaccgggagaaggc

SEQ ID NO: 2886 - RNA, 19 nt, Artificial Sequence
  Description of Artificial Sequence: Synthetic oligonucleotide
caugagaaagaauuugaga

SEQ ID NO: 2887 - RNA, 19 nt, Artificial Sequence
  Description of Artificial Sequence: Synthetic oligonucleotide
acgcaccaugugggcacgg

SEQ ID NO: 2888 - RNA, 19 nt, Artificial Sequence
  Description of Artificial Sequence: Synthetic oligonucleotide
gagggggacggggcucagc

SEQ ID NO: 2889 - RNA, 19 nt, Artificial Sequence
  Description of Artificial Sequence: Synthetic oligonucleotide
caaugccauuucaguggcu

SEQ ID NO: 2890 - RNA, 19 nt, Artificial Sequence
  Description of Artificial Sequence: Synthetic oligonucleotide
uucccagcucugacccuuc

SEQ ID NO: 2891 - RNA, 19 nt, Artificial Sequence
  Description of Artificial Sequence: Synthetic oligonucleotide
cuacauuugagggcccagc

SEQ ID NO: 2892 - RNA, 19 nt, Artificial Sequence
  Description of Artificial Sequence: Synthetic oligonucleotide
ccaggagcagauggacagc

SEQ ID NO: 2893 - RNA, 19 nt, Artificial Sequence
  Description of Artificial Sequence: Synthetic oligonucleotide
cgaugaggggacauuuucu

SEQ ID NO: 2894 - RNA, 19 nt, Artificial Sequence
  Description of Artificial Sequence: Synthetic oligonucleotide
uggauucugggaggcaaga

SEQ ID NO: 2895 - RNA, 19 nt, Artificial Sequence
  Description of Artificial Sequence: Synthetic oligonucleotide
aaaaggacaaauaucuuuu

SEQ ID NO: 2896 - RNA, 19 nt, Artificial Sequence
  Description of Artificial Sequence: Synthetic oligonucleotide
uuuggaacuaaagcaaauu

SEQ ID NO: 2897 - RNA, 19 nt, Artificial Sequence
  Description of Artificial Sequence: Synthetic oligonucleotide
uuuagaccuuuaccuaugg

SEQ ID NO: 2898 - RNA, 19 nt, Artificial Sequence
  Description of Artificial Sequence: Synthetic oligonucleotide
gaagugguucuauguccau

SEQ ID NO: 2899 - RNA, 19 nt, Artificial Sequence
  Description of Artificial Sequence: Synthetic oligonucleotide
uucucauucguggcauguu

SEQ ID NO: 2900 - RNA, 19 nt, Artificial Sequence
  Description of Artificial Sequence: Synthetic oligonucleotide
uuugauuuguagcacugag

SEQ ID NO: 2901 - RNA, 19 nt, Artificial Sequence
  Description of Artificial Sequence: Synthetic oligonucleotide
ggguggcacucaacucuga

SEQ ID NO: 2902 - RNA, 19 nt, Artificial Sequence
  Description of Artificial Sequence: Synthetic oligonucleotide
agcccauacuuuuggcucc

SEQ ID NO: 2903 - RNA, 19 nt, Artificial Sequence
  Description of Artificial Sequence: Synthetic oligonucleotide
cucuaguaagaugcacuga

SEQ ID NO: 2904 - RNA, 19 nt, Artificial Sequence
  Description of Artificial Sequence: Synthetic oligonucleotide
aaaacuuagccagaguuag

SEQ ID NO: 2905 - RNA, 19 nt, Artificial Sequence
  Description of Artificial Sequence: Synthetic oligonucleotide
gguugucuccaggccauga

SEQ ID NO: 2906 - RNA, 19 nt, Artificial Sequence
  Description of Artificial Sequence: Synthetic oligonucleotide
auggccuuacacugaaaau

SEQ ID NO: 2907 - RNA, 19 nt, Artificial Sequence
  Description of Artificial Sequence: Synthetic oligonucleotide
ugucacauucuauuuuggg

SEQ ID NO: 2908 - RNA, 19 nt, Artificial Sequence
  Description of Artificial Sequence: Synthetic oligonucleotide
guauuaauauauaguccag

SEQ ID NO: 2909 - RNA, 19 nt, Artificial Sequence
  Description of Artificial Sequence: Synthetic oligonucleotide
gacacuuaacucaauuucu

SEQ ID NO: 2910 - RNA, 19 nt, Artificial Sequence
  Description of Artificial Sequence: Synthetic oligonucleotide
uugguauuauucuguuuug

SEQ ID NO: 2911 - RNA, 19 nt, Artificial Sequence
  Description of Artificial Sequence: Synthetic oligonucleotide
gcacaguuaguugugaaag

SEQ ID NO: 2912 - RNA, 19 nt, Artificial Sequence
  Description of Artificial Sequence: Synthetic oligonucleotide
gaaagcugagaagaaugaa

SEQ ID NO: 2913 - RNA, 19 nt, Artificial Sequence
  Description of Artificial Sequence: Synthetic oligonucleotide
aaaugcaguccugaggaga

SEQ ID NO: 2914 - RNA, 19 nt, Artificial Sequence
  Description of Artificial Sequence: Synthetic oligonucleotide
aguuuucuccauaucaaaa

SEQ ID NO: 2915 - RNA, 19 nt, Artificial Sequence
  Description of Artificial Sequence: Synthetic oligonucleotide
acgagggcugauggaggaa

SEQ ID NO: 2916 - RNA, 19 nt, Artificial Sequence
  Description of Artificial Sequence: Synthetic oligonucleotide
aaaaggucaauaaggucaa

SEQ ID NO: 2917 - RNA, 19 nt, Artificial Sequence
  Description of Artificial Sequence: Synthetic oligonucleotide
agggaagaccccgucucua

SEQ ID NO: 2918 - RNA, 19 nt, Artificial Sequence
  Description of Artificial Sequence: Synthetic oligonucleotide
auaccaaccaaaccaauuc

SEQ ID NO: 2919 - RNA, 19 nt, Artificial Sequence
  Description of Artificial Sequence: Synthetic oligonucleotide
caccaacacaguugggacc

SEQ ID NO: 2920 - RNA, 19 nt, Artificial Sequence
  Description of Artificial Sequence: Synthetic oligonucleotide
ccaaaacacaggaagucag

SEQ ID NO: 2921 - RNA, 19 nt, Artificial Sequence
  Description of Artificial Sequence: Synthetic oligonucleotide
gucacguuuccuuuucauu

SEQ ID NO: 2922 - RNA, 19 nt, Artificial Sequence
  Description of Artificial Sequence: Synthetic oligonucleotide
uuaauggggauuccacuau

SEQ ID NO: 2923 - RNA, 19 nt, Artificial Sequence
  Description of Artificial Sequence: Synthetic oligonucleotide
ucucacacuaaucugaaag

SEQ ID NO: 2924 - RNA, 19 nt, Artificial Sequence
  Description of Artificial Sequence: Synthetic oligonucleotide
ggauguggaagagcauuag

SEQ ID NO: 2925 - RNA, 19 nt, Artificial Sequence
  Description of Artificial Sequence: Synthetic oligonucleotide
gcuggcgcauauuaagcac

SEQ ID NO: 2926 - RNA, 19 nt, Artificial Sequence
  Description of Artificial Sequence: Synthetic oligonucleotide
cuuuaagcuccuugaguaa

SEQ ID NO: 2927 - RNA, 19 nt, Artificial Sequence
  Description of Artificial Sequence: Synthetic oligonucleotide
aaaaggugguauguaauuu

SEQ ID NO: 2928 - RNA, 19 nt, Artificial Sequence
  Description of Artificial Sequence: Synthetic oligonucleotide
uaugcaagguauuucucca

SEQ ID NO: 2929 - RNA, 19 nt, Artificial Sequence
  Description of Artificial Sequence: Synthetic oligonucleotide
aguugggacucaggauauu

SEQ ID NO: 2930 - RNA, 19 nt, Artificial Sequence
  Description of Artificial Sequence: Synthetic oligonucleotide
uaguuaaugagccaucacu

SEQ ID NO: 2931 - RNA, 19 nt, Artificial Sequence
  Description of Artificial Sequence: Synthetic oligonucleotide
uagaagaaaagcccauuuu

SEQ ID NO: 2932 - RNA, 19 nt, Artificial Sequence
  Description of Artificial Sequence: Synthetic oligonucleotide
ucaacugcuuugaaacuug

SEQ ID NO: 2933 - RNA, 19 nt, Artificial Sequence
  Description of Artificial Sequence: Synthetic oligonucleotide
gccuggggucugagcauga

SEQ ID NO: 2934 - RNA, 19 nt, Artificial Sequence
  Description of Artificial Sequence: Synthetic oligonucleotide
augggaauagggagacagg

SEQ ID NO: 2935 - RNA, 19 nt, Artificial Sequence
  Description of Artificial Sequence: Synthetic oligonucleotide
gguaggaaagggcgccuac

SEQ ID NO: 2936 - RNA, 19 nt, Artificial Sequence
  Description of Artificial Sequence: Synthetic oligonucleotide
cucuucagggucuaaagau

SEQ ID NO: 2937 - RNA, 19 nt, Artificial Sequence
  Description of Artificial Sequence: Synthetic oligonucleotide
ucaagugggccuuggaucg

SEQ ID NO: 2938 - RNA, 19 nt, Artificial Sequence
  Description of Artificial Sequence: Synthetic oligonucleotide
gcuaagcuggcucuguuug

SEQ ID NO: 2939 - RNA, 19 nt, Artificial Sequence
  Description of Artificial Sequence: Synthetic oligonucleotide
gaugcuauuuaugcaaguu

SEQ ID NO: 2940 - RNA, 19 nt, Artificial Sequence
  Description of Artificial Sequence: Synthetic oligonucleotide
guuagggucuauguauuua

SEQ ID NO: 2941 - RNA, 19 nt, Artificial Sequence
  Description of Artificial Sequence: Synthetic oligonucleotide
aucgagguccgcgggaggc

SEQ ID NO: 2942 - RNA, 19 nt, Artificial Sequence
  Description of Artificial Sequence: Synthetic oligonucleotide
cucggagcgcgccaggcgg

SEQ ID NO: 2943 - RNA, 19 nt, Artificial Sequence
  Description of Artificial Sequence: Synthetic oligonucleotide
gacacuccucucggcuccu

SEQ ID NO: 2944 - RNA, 19 nt, Artificial Sequence
  Description of Artificial Sequence: Synthetic oligonucleotide
uccccggcagcggcggcgg

SEQ ID NO: 2945 - RNA, 19 nt, Artificial Sequence
  Description of Artificial Sequence: Synthetic oligonucleotide
gcucggagcgggcuccggg

SEQ ID NO: 2946 - RNA, 19 nt, Artificial Sequence
  Description of Artificial Sequence: Synthetic oligonucleotide
ggcucgggugcagcggcca

SEQ ID NO: 2947 - RNA, 19 nt, Artificial Sequence
  Description of Artificial Sequence: Synthetic oligonucleotide
gccagcgggcgccuggcgg

SEQ ID NO: 2948 - RNA, 19 nt, Artificial Sequence
  Description of Artificial Sequence: Synthetic oligonucleotide
agcgggcgccuggcggcga

SEQ ID NO: 2949 - RNA, 19 nt, Artificial Sequence
  Description of Artificial Sequence: Synthetic oligonucleotide
gcgaggauuacccggggaa

SEQ ID NO: 2950 - RNA, 19 nt, Artificial Sequence
  Description of Artificial Sequence: Synthetic oligonucleotide
aggauuacccggggaagug

SEQ ID NO: 2951 - RNA, 19 nt, Artificial Sequence
  Description of Artificial Sequence: Synthetic oligonucleotide
agugguugucuccuggcug

SEQ ID NO: 2952 - RNA, 19 nt, Artificial Sequence
  Description of Artificial Sequence: Synthetic oligonucleotide
gguugucuccuggcuggag

SEQ ID NO: 2953 - RNA, 19 nt, Artificial Sequence
  Description of Artificial Sequence: Synthetic oligonucleotide
ggagccgcgagacgggcgc

SEQ ID NO: 2954 - RNA, 19 nt, Artificial Sequence
  Description of Artificial Sequence: Synthetic oligonucleotide
gccgcgagacgggcgcuca

SEQ ID NO: 2955 - RNA, 19 nt, Artificial Sequence
  Description of Artificial Sequence: Synthetic oligonucleotide
cucagggcgcggggccggc

SEQ ID NO: 2956 - RNA, 19 nt, Artificial Sequence
  Description of Artificial Sequence: Synthetic oligonucleotide
agggcgcggggccggcggc

SEQ ID NO: 2957 - RNA, 19 nt, Artificial Sequence
  Description of Artificial Sequence: Synthetic oligonucleotide
cggcggcgaacgagaggac

SEQ ID NO: 2958 - RNA, 19 nt, Artificial Sequence
  Description of Artificial Sequence: Synthetic oligonucleotide
cggcgaacgagaggacgga

SEQ ID NO: 2959 - RNA, 19 nt, Artificial Sequence
  Description of Artificial Sequence: Synthetic oligonucleotide
cggacucuggcggccgggu

SEQ ID NO: 2960 - RNA, 19 nt, Artificial Sequence
  Description of Artificial Sequence: Synthetic oligonucleotide
acucuggcggccgggucgu

SEQ ID NO: 2961 - RNA, 19 nt, Artificial Sequence
  Description of Artificial Sequence: Synthetic oligonucleotide
ucguuggccgcggggagcg

SEQ ID NO: 2962 - RNA, 19 nt, Artificial Sequence
  Description of Artificial Sequence: Synthetic oligonucleotide
uuggccgcggggagcgcgg

SEQ ID NO: 2963 - RNA, 19 nt, Artificial Sequence
  Description of Artificial Sequence: Synthetic oligonucleotide
gcgggcaccgggcgagcag

SEQ ID NO: 2964 - RNA, 19 nt, Artificial Sequence
  Description of Artificial Sequence: Synthetic oligonucleotide
ggccgcgucgcgcucacca

SEQ ID NO: 2965 - RNA, 19 nt, Artificial Sequence
  Description of Artificial Sequence: Synthetic oligonucleotide
auggucagcuacugggaca

SEQ ID NO: 2966 - RNA, 19 nt, Artificial Sequence
  Description of Artificial Sequence: Synthetic oligonucleotide
accgggguccugcugugcg

SEQ ID NO: 2967 - RNA, 19 nt, Artificial Sequence
  Description of Artificial Sequence: Synthetic oligonucleotide
gcgcugcucagcugucugc

SEQ ID NO: 2968 - RNA, 19 nt, Artificial Sequence
  Description of Artificial Sequence: Synthetic oligonucleotide
cuucucacaggaucuaguu

SEQ ID NO: 2969 - RNA, 19 nt, Artificial Sequence
  Description of Artificial Sequence: Synthetic oligonucleotide
ucagguucaaaauuaaaag

SEQ ID NO: 2970 - RNA, 19 nt, Artificial Sequence
  Description of Artificial Sequence: Synthetic oligonucleotide
gauccugaacugaguuuaa

SEQ ID NO: 2971 - RNA, 19 nt, Artificial Sequence
  Description of Artificial Sequence: Synthetic oligonucleotide
aaaggcacccagcacauca

SEQ ID NO: 2972 - RNA, 19 nt, Artificial Sequence
  Description of Artificial Sequence: Synthetic oligonucleotide
augcaagcaggccagacac

SEQ ID NO: 2973 - RNA, 19 nt, Artificial Sequence
  Description of Artificial Sequence: Synthetic oligonucleotide
cugcaucuccaaugcaggg

SEQ ID NO: 2974 - RNA, 19 nt, Artificial Sequence
  Description of Artificial Sequence: Synthetic oligonucleotide
ggggaagcagcccauaaau

SEQ ID NO: 2975 - RNA, 19 nt, Artificial Sequence
  Description of Artificial Sequence: Synthetic oligonucleotide
uggucuuugccugaaaugg

SEQ ID NO: 2976 - RNA, 19 nt, Artificial Sequence
  Description of Artificial Sequence: Synthetic oligonucleotide
gugaguaaggaaagcgaaa

SEQ ID NO: 2977 - RNA, 19 nt, Artificial Sequence
  Description of Artificial Sequence: Synthetic oligonucleotide
aggcugagcauaacuaaau

SEQ ID NO: 2978 - RNA, 19 nt, Artificial Sequence
  Description of Artificial Sequence: Synthetic oligonucleotide
ucugccuguggaagaaaug

SEQ ID NO: 2979 - RNA, 19 nt, Artificial Sequence
  Description of Artificial Sequence: Synthetic oligonucleotide
ggcaaacaauucugcagua

SEQ ID NO: 2980 - RNA, 19 nt, Artificial Sequence
  Description of Artificial Sequence: Synthetic oligonucleotide
acuuuaaccuugaacacag

SEQ ID NO: 2981 - RNA, 19 nt, Artificial Sequence
  Description of Artificial Sequence: Synthetic oligonucleotide
gcucaagcaaaccacacug

SEQ ID NO: 2982 - RNA, 19 nt, Artificial Sequence
  Description of Artificial Sequence: Synthetic oligonucleotide
ggcuucuacagcugcaaau

SEQ ID NO: 2983 - RNA, 19 nt, Artificial Sequence
  Description of Artificial Sequence: Synthetic oligonucleotide
uaucuagcuguaccuacuu

SEQ ID NO: 2984 - RNA, 19 nt, Artificial Sequence
  Description of Artificial Sequence: Synthetic oligonucleotide
ucaaagaagaaggaaacag

SEQ ID NO: 2985 - RNA, 19 nt, Artificial Sequence
  Description of Artificial Sequence: Synthetic oligonucleotide
gaaucugcaaucuauauau

SEQ ID NO: 2986 - RNA, 19 nt, Artificial Sequence
  Description of Artificial Sequence: Synthetic oligonucleotide
uuuauuagugauacaggua

SEQ ID NO: 2987 - RNA, 19 nt, Artificial Sequence
  Description of Artificial Sequence: Synthetic oligonucleotide
agaccuuucguagagaugu

SEQ ID NO: 2988 - RNA, 19 nt, Artificial Sequence
  Description of Artificial Sequence: Synthetic oligonucleotide
uacagugaaauccccgaaa

SEQ ID NO: 2989 - RNA, 19 nt, Artificial Sequence
  Description of Artificial Sequence: Synthetic oligonucleotide
auuauacacaugacugaag

SEQ ID NO: 2990 - RNA, 19 nt, Artificial Sequence
  Description of Artificial Sequence: Synthetic oligonucleotide
ggaagggagcucgucauuc

SEQ ID NO: 2991 - RNA, 19 nt, Artificial Sequence
  Description of Artificial Sequence: Synthetic oligonucleotide
cccugccggguuacgucac

SEQ ID NO: 2992 - RNA, 19 nt, Artificial Sequence
  Description of Artificial Sequence: Synthetic oligonucleotide
ccuaacaucacuguuacuu

SEQ ID NO: 2993 - RNA, 19 nt, Artificial Sequence
  Description of Artificial Sequence: Synthetic oligonucleotide
uuaaaaaaguuuccacuug

SEQ ID NO: 2994 - RNA, 19 nt, Artificial Sequence
  Description of Artificial Sequence: Synthetic oligonucleotide
gacacuuugaucccugaug

SEQ ID NO: 2995 - RNA, 19 nt, Artificial Sequence
  Description of Artificial Sequence: Synthetic oligonucleotide
ggaaaacgcauaaucuggg

SEQ ID NO: 2996 - RNA, 19 nt, Artificial Sequence
  Description of Artificial Sequence: Synthetic oligonucleotide
gacaguagaaagggcuuca

SEQ ID NO: 2997 - RNA, 19 nt, Artificial Sequence
  Description of Artificial Sequence: Synthetic oligonucleotide
aucauaucaaaugcaacgu

SEQ ID NO: 2998 - RNA, 19 nt, Artificial Sequence
  Description of Artificial Sequence: Synthetic oligonucleotide
uacaaagaaauagggcuuc

SEQ ID NO: 2999 - RNA, 19 nt, Artificial Sequence
  Description of Artificial Sequence: Synthetic oligonucleotide
cugaccugugaagcaacag

SEQ ID NO: 3000 - RNA, 19 nt, Artificial Sequence
  Description of Artificial Sequence: Synthetic oligonucleotide
gucaaugggcauuuguaua

SEQ ID NO: 3001 - RNA, 19 nt, Artificial Sequence
  Description of Artificial Sequence: Synthetic oligonucleotide
aagacaaacuaucucacac

SEQ ID NO: 3002 - RNA, 19 nt, Artificial Sequence
  Description of Artificial Sequence: Synthetic oligonucleotide
caucgacaaaccaauacaa

SEQ ID NO: 3003 - RNA, 19 nt, Artificial Sequence
  Description of Artificial Sequence: Synthetic oligonucleotide
aucauagauguccaaauaa

SEQ ID NO: 3004 - RNA, 19 nt, Artificial Sequence
  Description of Artificial Sequence: Synthetic oligonucleotide
agcacaccacgcccaguca

SEQ ID NO: 3005 - RNA, 19 nt, Artificial Sequence
  Description of Artificial Sequence: Synthetic oligonucleotide
aaauuacuuagaggccaua

SEQ ID NO: 3006 - RNA, 19 nt, Artificial Sequence
  Description of Artificial Sequence: Synthetic oligonucleotide
acucuuguccucaauugua

SEQ ID NO: 3007 - RNA, 19 nt, Artificial Sequence
  Description of Artificial Sequence: Synthetic oligonucleotide
acugcuaccacucccuuga

SEQ ID NO: 3008 - RNA, 19 nt, Artificial Sequence
  Description of Artificial Sequence: Synthetic oligonucleotide
aacacgagaguucaaauga

SEQ ID NO: 3009 - RNA, 19 nt, Artificial Sequence
  Description of Artificial Sequence: Synthetic oligonucleotide
accuggaguuacccugaug

SEQ ID NO: 3010 - RNA, 19 nt, Artificial Sequence
  Description of Artificial Sequence: Synthetic oligonucleotide
gaaaaaaauaagagagcuu

SEQ ID NO: 3011 - RNA, 19 nt, Artificial Sequence
  Description of Artificial Sequence: Synthetic oligonucleotide
uccguaaggcgacgaauug

SEQ ID NO: 3012 - RNA, 19 nt, Artificial Sequence
  Description of Artificial Sequence: Synthetic oligonucleotide
gaccaaagcaauucccaug

SEQ ID NO: 3013 - RNA, 19 nt, Artificial Sequence
  Description of Artificial Sequence: Synthetic oligonucleotide
gccaacauauucuacagug

SEQ ID NO: 3014 - RNA, 19 nt, Artificial Sequence
  Description of Artificial Sequence: Synthetic oligonucleotide
guucuuacuauugacaaaa

SEQ ID NO: 3015 - RNA, 19 nt, Artificial Sequence
  Description of Artificial Sequence: Synthetic oligonucleotide
augcagaacaaagacaaag

SEQ ID NO: 3016 - RNA, 19 nt, Artificial Sequence
  Description of Artificial Sequence: Synthetic oligonucleotide
ggacuuuauacuugucgug

SEQ ID NO: 3017 - RNA, 19 nt, Artificial Sequence
  Description of Artificial Sequence: Synthetic oligonucleotide
guaaggaguggaccaucau

SEQ ID NO: 3018 - RNA, 19 nt, Artificial Sequence
  Description of Artificial Sequence: Synthetic oligonucleotide
uucaaaucuguuaacaccu

SEQ ID NO: 3019 - RNA, 19 nt, Artificial Sequence
  Description of Artificial Sequence: Synthetic oligonucleotide
ucagugcauauauaugaua

SEQ ID NO: 3020 - RNA, 19 nt, Artificial Sequence
  Description of Artificial Sequence: Synthetic oligonucleotide
aaagcauucaucacuguga

SEQ ID NO: 3021 - RNA, 19 nt, Artificial Sequence
  Description of Artificial Sequence: Synthetic oligonucleotide
aaacaucgaaaacagcagg

SEQ ID NO: 3022 - RNA, 19 nt, Artificial Sequence
  Description of Artificial Sequence: Synthetic oligonucleotide
gugcuugaaaccguagcug

SEQ ID NO: 3023 - RNA, 19 nt, Artificial Sequence
  Description of Artificial Sequence: Synthetic oligonucleotide
ggcaagcggucuuaccggc

SEQ ID NO: 3024 - RNA, 19 nt, Artificial Sequence
  Description of Artificial Sequence: Synthetic oligonucleotide
cucucuaugaaagugaagg

SEQ ID NO: 3025 - RNA, 19 nt, Artificial Sequence
  Description of Artificial Sequence: Synthetic oligonucleotide
gcauuucccucgccggaag

SEQ ID NO: 3026 - RNA, 19 nt, Artificial Sequence
  Description of Artificial Sequence: Synthetic oligonucleotide
guuguaugguuaaaagaug

SEQ ID NO: 3027 - RNA, 19 nt, Artificial Sequence
  Description of Artificial Sequence: Synthetic oligonucleotide
ggguuaccugcgacugaga

SEQ ID NO: 3028 - RNA, 19 nt, Artificial Sequence
  Description of Artificial Sequence: Synthetic oligonucleotide
aaaucugcucgcuauuuga

SEQ ID NO: 3029 - RNA, 19 nt, Artificial Sequence
  Description of Artificial Sequence: Synthetic oligonucleotide
acucguggcuacucguuaa

SEQ ID NO: 3030 - RNA, 19 nt, Artificial Sequence
  Description of Artificial Sequence: Synthetic oligonucleotide
auuaucaaggacguaacug

SEQ ID NO: 3031 - RNA, 19 nt, Artificial Sequence
  Description of Artificial Sequence: Synthetic oligonucleotide
gaagaggaugcagggaauu

SEQ ID NO: 3032 - RNA, 19 nt, Artificial Sequence
  Description of Artificial Sequence: Synthetic oligonucleotide
uauacaaucuugcugagca

SEQ ID NO: 3033 - RNA, 19 nt, Artificial Sequence
  Description of Artificial Sequence: Synthetic oligonucleotide
auaaaacagucaaaugugu

SEQ ID NO: 3034 - RNA, 19 nt, Artificial Sequence
  Description of Artificial Sequence: Synthetic oligonucleotide
uuuaaaaaccucacugcca

SEQ ID NO: 3035 - RNA, 19 nt, Artificial Sequence
  Description of Artificial Sequence: Synthetic oligonucleotide
acucuaauugucaauguga

SEQ ID NO: 3036 - RNA, 19 nt, Artificial Sequence
  Description of Artificial Sequence: Synthetic oligonucleotide
aaaccccagauuuacgaaa

SEQ ID NO: 3037 - RNA, 19 nt, Artificial Sequence
  Description of Artificial Sequence: Synthetic oligonucleotide
aaggccgugucaucguuuc

SEQ ID NO: 3038 - RNA, 19 nt, Artificial Sequence
  Description of Artificial Sequence: Synthetic oligonucleotide
ccagacccggcucucuacc

SEQ ID NO: 3039 - RNA, 19 nt, Artificial Sequence
  Description of Artificial Sequence: Synthetic oligonucleotide
ccacugggcagcagacaaa

SEQ ID NO: 3040 - RNA, 19 nt, Artificial Sequence
  Description of Artificial Sequence: Synthetic oligonucleotide
auccugacuuguaccgcau

SEQ ID NO: 3041 - RNA, 19 nt, Artificial Sequence
  Description of Artificial Sequence: Synthetic oligonucleotide
uaugguaucccucaaccua

SEQ ID NO: 3042 - RNA, 19 nt, Artificial Sequence
  Description of Artificial Sequence: Synthetic oligonucleotide
acaaucaagugguucuggc

SEQ ID NO: 3043 - RNA, 19 nt, Artificial Sequence
  Description of Artificial Sequence: Synthetic oligonucleotide
caccccuguaaccauaauc

SEQ ID NO: 3044 - RNA, 19 nt, Artificial Sequence
  Description of Artificial Sequence: Synthetic oligonucleotide
cauuccgaagcaaggugug

SEQ ID NO: 3045 - RNA, 19 nt, Artificial Sequence
  Description of Artificial Sequence: Synthetic oligonucleotide
gacuuuuguuccaauaaug

SEQ ID NO: 3046 - RNA, 19 nt, Artificial Sequence
  Description of Artificial Sequence: Synthetic oligonucleotide
gaagaguccuuuauccugg

SEQ ID NO: 3047 - RNA, 19 nt, Artificial Sequence
  Description of Artificial Sequence: Synthetic oligonucleotide
gaugcugacagcaacaugg

SEQ ID NO: 3048 - RNA, 19 nt, Artificial Sequence
  Description of Artificial Sequence: Synthetic oligonucleotide
ggaaacagaauugagagca

SEQ ID NO: 3049 - RNA, 19 nt, Artificial Sequence
  Description of Artificial Sequence: Synthetic oligonucleotide
aucacucagcgcauggcaa

SEQ ID NO: 3050 - RNA, 19 nt, Artificial Sequence
  Description of Artificial Sequence: Synthetic oligonucleotide
auaauagaaggaaagaaua

SEQ ID NO: 3051 - RNA, 19 nt, Artificial Sequence
  Description of Artificial Sequence: Synthetic oligonucleotide
aagauggcuagcaccuugg

SEQ ID NO: 3052 - RNA, 19 nt, Artificial Sequence
  Description of Artificial Sequence: Synthetic oligonucleotide
guuguggcugacucuagaa

SEQ ID NO: 3053 - RNA, 19 nt, Artificial Sequence
  Description of Artificial Sequence: Synthetic oligonucleotide
auuucuggaaucuacauuu

SEQ ID NO: 3054 - RNA, 19 nt, Artificial Sequence
  Description of Artificial Sequence: Synthetic oligonucleotide
ugcauagcuuccaauaaag

SEQ ID NO: 3055 - RNA, 19 nt, Artificial Sequence
  Description of Artificial Sequence: Synthetic oligonucleotide
guugggacugugggaagaa

SEQ ID NO: 3056 - RNA, 19 nt, Artificial Sequence
  Description of Artificial Sequence: Synthetic oligonucleotide
aacauaagcuuuuauauca

SEQ ID NO: 3057 - RNA, 19 nt, Artificial Sequence
  Description of Artificial Sequence: Synthetic oligonucleotide
acagaugugccaaaugggu

SEQ ID NO: 3058 - RNA, 19 nt, Artificial Sequence
  Description of Artificial Sequence: Synthetic oligonucleotide
uuucauguuaacuuggaaa

SEQ ID NO: 3059 - RNA, 19 nt, Artificial Sequence
  Description of Artificial Sequence: Synthetic oligonucleotide
aaaaugccgacggaaggag

SEQ ID NO: 3060 - RNA, 19 nt, Artificial Sequence
  Description of Artificial Sequence: Synthetic oligonucleotide
gaggaccugaaacugucuu

SEQ ID NO: 3061 - RNA, 19 nt, Artificial Sequence
  Description of Artificial Sequence: Synthetic oligonucleotide
ugcacaguuaacaaguucu

SEQ ID NO: 3062 - RNA, 19 nt, Artificial Sequence
  Description of Artificial Sequence: Synthetic oligonucleotide
uuauacagagacguuacuu

SEQ ID NO: 3063 - RNA, 19 nt, Artificial Sequence
  Description of Artificial Sequence: Synthetic oligonucleotide
uggauuuuacugcggacag

SEQ ID NO: 3064 - RNA, 19 nt, Artificial Sequence
  Description of Artificial Sequence: Synthetic oligonucleotide
guuaauaacagaacaaugc

SEQ ID NO: 3065 - RNA, 19 nt, Artificial Sequence
  Description of Artificial Sequence: Synthetic oligonucleotide
cacuacaguauuagcaagc

SEQ ID NO: 3066 - RNA, 19 nt, Artificial Sequence
  Description of Artificial Sequence: Synthetic oligonucleotide
caaaaaauggccaucacua

SEQ ID NO: 3067 - RNA, 19 nt, Artificial Sequence
  Description of Artificial Sequence: Synthetic oligonucleotide
aaggagcacuccaucacuc

SEQ ID NO: 3068 - RNA, 19 nt, Artificial Sequence
  Description of Artificial Sequence: Synthetic oligonucleotide
cuuaaucuuaccaucauga

SEQ ID NO: 3069 - RNA, 19 nt, Artificial Sequence
  Description of Artificial Sequence: Synthetic oligonucleotide
aauguuucccugcaagauu

SEQ ID NO: 3070 - RNA, 19 nt, Artificial Sequence
  Description of Artificial Sequence: Synthetic oligonucleotide
ucaggcaccuaugccugca

SEQ ID NO: 3071 - RNA, 19 nt, Artificial Sequence
  Description of Artificial Sequence: Synthetic oligonucleotide
agagccaggaauguauaca

SEQ ID NO: 3072 - RNA, 19 nt, Artificial Sequence
  Description of Artificial Sequence: Synthetic oligonucleotide
acaggggaagaaauccucc

SEQ ID NO: 3073 - RNA, 19 nt, Artificial Sequence
  Description of Artificial Sequence: Synthetic oligonucleotide
cagaagaaagaaauuacaa

SEQ ID NO: 3074 - RNA, 19 nt, Artificial Sequence
  Description of Artificial Sequence: Synthetic oligonucleotide
aucagagaucaggaagcac

SEQ ID NO: 3075 - RNA, 19 nt, Artificial Sequence
  Description of Artificial Sequence: Synthetic oligonucleotide
ccauaccuccugcgaaacc

SEQ ID NO: 3076 - RNA, 19 nt, Artificial Sequence
  Description of Artificial Sequence: Synthetic oligonucleotide
cucagugaucacacagugg

SEQ ID NO: 3077 - RNA, 19 nt, Artificial Sequence
  Description of Artificial Sequence: Synthetic oligonucleotide
gccaucagcaguuccacca

SEQ ID NO: 3078 - RNA, 19 nt, Artificial Sequence
  Description of Artificial Sequence: Synthetic oligonucleotide
acuuuagacugucaugcua

SEQ ID NO: 3079 - RNA, 19 nt, Artificial Sequence
  Description of Artificial Sequence: Synthetic oligonucleotide
aaugguguccccgagccuc

SEQ ID NO: 3080 - RNA, 19 nt, Artificial Sequence
  Description of Artificial Sequence: Synthetic oligonucleotide
cagaucacuugguuuaaaa

SEQ ID NO: 3081 - RNA, 19 nt, Artificial Sequence
  Description of Artificial Sequence: Synthetic oligonucleotide
aacaaccacaaaauacaac

SEQ ID NO: 3082 - RNA, 19 nt, Artificial Sequence
  Description of Artificial Sequence: Synthetic oligonucleotide
caagagccuggaauuauuu

SEQ ID NO: 3083 - RNA, 19 nt, Artificial Sequence
  Description of Artificial Sequence: Synthetic oligonucleotide
uuaggaccaggaagcagca

SEQ ID NO: 3084 - RNA, 19 nt, Artificial Sequence
  Description of Artificial Sequence: Synthetic oligonucleotide
acgcuguuuauugaaagag

SEQ ID NO: 3085 - RNA, 19 nt, Artificial Sequence
  Description of Artificial Sequence: Synthetic oligonucleotide
gucacagaagaggaugaag

SEQ ID NO: 3086 - RNA, 19 nt, Artificial Sequence
  Description of Artificial Sequence: Synthetic oligonucleotide
ggugucuaucacugcaaag

SEQ ID NO: 3087 - RNA, 19 nt, Artificial Sequence
  Description of Artificial Sequence: Synthetic oligonucleotide
gccaccaaccagaagggcu

SEQ ID NO: 3088 - RNA, 19 nt, Artificial Sequence
  Description of Artificial Sequence: Synthetic oligonucleotide
ucuguggaaaguucagcau

SEQ ID NO: 3089 - RNA, 19 nt, Artificial Sequence
  Description of Artificial Sequence: Synthetic oligonucleotide
uaccucacuguucaaggaa

SEQ ID NO: 3090 - RNA, 19 nt, Artificial Sequence
  Description of Artificial Sequence: Synthetic oligonucleotide
accucggacaagucuaauc

SEQ ID NO: 3091 - RNA, 19 nt, Artificial Sequence
  Description of Artificial Sequence: Synthetic oligonucleotide
cuggagcugaucacucuaa

SEQ ID NO: 3092 - RNA, 19 nt, Artificial Sequence
  Description of Artificial Sequence: Synthetic oligonucleotide
acaugcaccuguguggcug

SEQ ID NO: 3093 - RNA, 19 nt, Artificial Sequence
  Description of Artificial Sequence: Synthetic oligonucleotide
gcgacucucuucuggcucc

SEQ ID NO: 3094 - RNA, 19 nt, Artificial Sequence
  Description of Artificial Sequence: Synthetic oligonucleotide
cuauuaacccucuuuaucc

SEQ ID NO: 3095 - RNA, 19 nt, Artificial Sequence
  Description of Artificial Sequence: Synthetic oligonucleotide
uuaacccucuuuauccgaa

SEQ ID NO: 3096 - RNA, 19 nt, Artificial Sequence
  Description of Artificial Sequence: Synthetic oligonucleotide
cgaaaaaugaaaaggucuu

SEQ ID NO: 3097 - RNA, 19 nt, Artificial Sequence
  Description of Artificial Sequence: Synthetic oligonucleotide
ucuucugaaauaaagacug

SEQ ID NO: 3098 - RNA, 19 nt, Artificial Sequence
  Description of Artificial Sequence: Synthetic oligonucleotide
gacuaccuaucaauuauaa

SEQ ID NO: 3099 - RNA, 19 nt, Artificial Sequence
  Description of Artificial Sequence: Synthetic oligonucleotide
auggacccagaugaaguuc

SEQ ID NO: 3100 - RNA, 19 nt, Artificial Sequence
  Description of Artificial Sequence: Synthetic oligonucleotide
ccuuuggaugagcagugug

SEQ ID NO: 3101 - RNA, 19 nt, Artificial Sequence
  Description of Artificial Sequence: Synthetic oligonucleotide
gagcggcucccuuaugaug

SEQ ID NO: 3102 - RNA, 19 nt, Artificial Sequence
  Description of Artificial Sequence: Synthetic oligonucleotide
gccagcaagugggaguuug

SEQ ID NO: 3103 - RNA, 19 nt, Artificial Sequence
  Description of Artificial Sequence: Synthetic oligonucleotide
gcccgggagagacuuaaac

SEQ ID NO: 3104 - RNA, 19 nt, Artificial Sequence
  Description of Artificial Sequence: Synthetic oligonucleotide
cugggcaaaucacuuggaa

SEQ ID NO: 3105 - RNA, 19 nt, Artificial Sequence
  Description of Artificial Sequence: Synthetic oligonucleotide
agaggggcuuuuggaaaag

SEQ ID NO: 3106 - RNA, 19 nt, Artificial Sequence
  Description of Artificial Sequence: Synthetic oligonucleotide
gugguucaagcaucagcau

SEQ ID NO: 3107 - RNA, 19 nt, Artificial Sequence
  Description of Artificial Sequence: Synthetic oligonucleotide
uuuggcauuaagaaaucac

SEQ ID NO: 3108 - RNA, 19 nt, Artificial Sequence
  Description of Artificial Sequence: Synthetic oligonucleotide
ccuacgugccggacugugg

SEQ ID NO: 3109 - RNA, 19 nt, Artificial Sequence
  Description of Artificial Sequence: Synthetic oligonucleotide
gcugugaaaaugcugaaag

SEQ ID NO: 3110 - RNA, 19 nt, Artificial Sequence
  Description of Artificial Sequence: Synthetic oligonucleotide
gagggggccacggccagcg

SEQ ID NO: 3111 - RNA, 19 nt, Artificial Sequence
  Description of Artificial Sequence: Synthetic oligonucleotide
gaguacaaagcucugauga

SEQ ID NO: 3112 - RNA, 19 nt, Artificial Sequence
  Description of Artificial Sequence: Synthetic oligonucleotide
acugagcuaaaaaucuuga

SEQ ID NO: 3113 - RNA, 19 nt, Artificial Sequence
  Description of Artificial Sequence: Synthetic oligonucleotide
acccacauuggccaccauc

SEQ ID NO: 3114 - RNA, 19 nt, Artificial Sequence
  Description of Artificial Sequence: Synthetic oligonucleotide
cugaacgugguuaaccugc

SEQ ID NO: 3115 - RNA, 19 nt, Artificial Sequence
  Description of Artificial Sequence: Synthetic oligonucleotide
cugggagccugcaccaagc

SEQ ID NO: 3116 - RNA, 19 nt, Artificial Sequence
  Description of Artificial Sequence: Synthetic oligonucleotide
caaggagggccucugaugg

SEQ ID NO: 3117 - RNA, 19 nt, Artificial Sequence
  Description of Artificial Sequence: Synthetic oligonucleotide
gugauuguugaauacugca

SEQ ID NO: 3118 - RNA, 19 nt, Artificial Sequence
  Description of Artificial Sequence: Synthetic oligonucleotide
aaauauggaaaucucucca

SEQ ID NO: 3119 - RNA, 19 nt, Artificial Sequence
  Description of Artificial Sequence: Synthetic oligonucleotide
aacuaccucaagagcaaac

SEQ ID NO: 3120 - RNA, 19 nt, Artificial Sequence
  Description of Artificial Sequence: Synthetic oligonucleotide
cgugacuuauuuuuucuca

SEQ ID NO: 3121 - RNA, 19 nt, Artificial Sequence
  Description of Artificial Sequence: Synthetic oligonucleotide
aacaaggaugcagcacuac

SEQ ID NO: 3122 - RNA, 19 nt, Artificial Sequence
  Description of Artificial Sequence: Synthetic oligonucleotide
cacauggagccuaagaaag

SEQ ID NO: 3123 - RNA, 19 nt, Artificial Sequence
  Description of Artificial Sequence: Synthetic oligonucleotide
gaaaaaauggagccaggcc

SEQ ID NO: 3124 - RNA, 19 nt, Artificial Sequence
  Description of Artificial Sequence: Synthetic oligonucleotide
cuggaacaaggcaagaaac

SEQ ID NO: 3125 - RNA, 19 nt, Artificial Sequence
  Description of Artificial Sequence: Synthetic oligonucleotide
ccaagacuagauagcguca

SEQ ID NO: 3126 - RNA, 19 nt, Artificial Sequence
  Description of Artificial Sequence: Synthetic oligonucleotide
accagcagcgaaagcuuug

SEQ ID NO: 3127 - RNA, 19 nt, Artificial Sequence
  Description of Artificial Sequence: Synthetic oligonucleotide
gcgagcuccggcuuucagg

SEQ ID NO: 3128 - RNA, 19 nt, Artificial Sequence
  Description of Artificial Sequence: Synthetic oligonucleotide
gaagauaaaagucugagug

SEQ ID NO: 3129 - RNA, 19 nt, Artificial Sequence
  Description of Artificial Sequence: Synthetic oligonucleotide
gauguugaggaagaggagg

SEQ ID NO: 3130 - RNA, 19 nt, Artificial Sequence
  Description of Artificial Sequence: Synthetic oligonucleotide
gauucugacgguuucuaca

SEQ ID NO: 3131 - RNA, 19 nt, Artificial Sequence
  Description of Artificial Sequence: Synthetic oligonucleotide
aaggagcccaucacuaugg

SEQ ID NO: 3132 - RNA, 19 nt, Artificial Sequence
  Description of Artificial Sequence: Synthetic oligonucleotide
gaagaucugauuucuuaca

SEQ ID NO: 3133 - RNA, 19 nt, Artificial Sequence
  Description of Artificial Sequence: Synthetic oligonucleotide
aguuuucaaguggccagag

SEQ ID NO: 3134 - RNA, 19 nt, Artificial Sequence
  Description of Artificial Sequence: Synthetic oligonucleotide
ggcauggaguuccugucuu

SEQ ID NO: 3135 - RNA, 19 nt, Artificial Sequence
  Description of Artificial Sequence: Synthetic oligonucleotide
uccagaaagugcauucauc

SEQ ID NO: 3136 - RNA, 19 nt, Artificial Sequence
  Description of Artificial Sequence: Synthetic oligonucleotide
cgggaccuggcagcgagaa

SEQ ID NO: 3137 - RNA, 19 nt, Artificial Sequence
  Description of Artificial Sequence: Synthetic oligonucleotide
aacauucuuuuaucugaga

SEQ ID NO: 3138 - RNA, 19 nt, Artificial Sequence
  Description of Artificial Sequence: Synthetic oligonucleotide
aacaacguggugaagauuu

SEQ ID NO: 3139 - RNA, 19 nt, Artificial Sequence
  Description of Artificial Sequence: Synthetic oligonucleotide
ugugauuuuggccuugccc

SEQ ID NO: 3140 - RNA, 19 nt, Artificial Sequence
  Description of Artificial Sequence: Synthetic oligonucleotide
cgggauauuuauaagaacc

SEQ ID NO: 3141 - RNA, 19 nt, Artificial Sequence
  Description of Artificial Sequence: Synthetic oligonucleotide
cccgauuaugugagaaaag

SEQ ID NO: 3142 - RNA, 19 nt, Artificial Sequence
  Description of Artificial Sequence: Synthetic oligonucleotide
ggagauacucgacuuccuc

SEQ ID NO: 3143 - RNA, 19 nt, Artificial Sequence
  Description of Artificial Sequence: Synthetic oligonucleotide
cugaaauggauggcuccug

SEQ ID NO: 3144 - RNA, 19 nt, Artificial Sequence
  Description of Artificial Sequence: Synthetic oligonucleotide
aaauggauggcuccugaau

SEQ ID NO: 3145 - RNA, 19 nt, Artificial Sequence
  Description of Artificial Sequence: Synthetic oligonucleotide
gaaucuaucuuugacaaaa

SEQ ID NO: 3146 - RNA, 19 nt, Artificial Sequence
  Description of Artificial Sequence: Synthetic oligonucleotide
aucuacagcaccaagagcg

SEQ ID NO: 3147 - RNA, 19 nt, Artificial Sequence
  Description of Artificial Sequence: Synthetic oligonucleotide
gacguguggucuuacggag

SEQ ID NO: 3148 - RNA, 19 nt, Artificial Sequence
  Description of Artificial Sequence: Synthetic oligonucleotide
guauugcugugggaaaucu

SEQ ID NO: 3149 - RNA, 19 nt, Artificial Sequence
  Description of Artificial Sequence: Synthetic oligonucleotide
uucuccuuaggugggucuc

SEQ ID NO: 3150 - RNA, 19 nt, Artificial Sequence
  Description of Artificial Sequence: Synthetic oligonucleotide
ccauacccaggaguacaaa

SEQ ID NO: 3151 - RNA, 19 nt, Artificial Sequence
  Description of Artificial Sequence: Synthetic oligonucleotide
auggaugaggacuuuugca

SEQ ID NO: 3152 - RNA, 19 nt, Artificial Sequence
  Description of Artificial Sequence: Synthetic oligonucleotide
agucgccugagggaaggca

SEQ ID NO: 3153 - RNA, 19 nt, Artificial Sequence
  Description of Artificial Sequence: Synthetic oligonucleotide
augaggaugagagcuccug

SEQ ID NO: 3154 - RNA, 19 nt, Artificial Sequence
  Description of Artificial Sequence: Synthetic oligonucleotide
gaguacucuacuccugaaa

SEQ ID NO: 3155 - RNA, 19 nt, Artificial Sequence
  Description of Artificial Sequence: Synthetic oligonucleotide
aucuaucagaucaugcugg

SEQ ID NO: 3156 - RNA, 19 nt, Artificial Sequence
  Description of Artificial Sequence: Synthetic oligonucleotide
gacugcuggcacagagacc

SEQ ID NO: 3157 - RNA, 19 nt, Artificial Sequence
  Description of Artificial Sequence: Synthetic oligonucleotide
ccaaaagaaaggccaagau

SEQ ID NO: 3158 - RNA, 19 nt, Artificial Sequence
  Description of Artificial Sequence: Synthetic oligonucleotide
uuugcagaacuuguggaaa

SEQ ID NO: 3159 - RNA, 19 nt, Artificial Sequence
  Description of Artificial Sequence: Synthetic oligonucleotide
aaacuaggugauuugcuuc

SEQ ID NO: 3160 - RNA, 19 nt, Artificial Sequence
  Description of Artificial Sequence: Synthetic oligonucleotide
caagcaaauguacaacagg

SEQ ID NO: 3161 - RNA, 19 nt, Artificial Sequence
  Description of Artificial Sequence: Synthetic oligonucleotide
gaugguaaagacuacaucc

SEQ ID NO: 3162 - RNA, 19 nt, Artificial Sequence
  Description of Artificial Sequence: Synthetic oligonucleotide
ccaaucaaugccauacuga

SEQ ID NO: 3163 - RNA, 19 nt, Artificial Sequence
  Description of Artificial Sequence: Synthetic oligonucleotide
acaggaaauaguggguuua

SEQ ID NO: 3164 - RNA, 19 nt, Artificial Sequence
  Description of Artificial Sequence: Synthetic oligonucleotide
acauacucaacuccugccu

SEQ ID NO: 3165 - RNA, 19 nt, Artificial Sequence
  Description of Artificial Sequence: Synthetic oligonucleotide
uucucugaggacuucuuca

SEQ ID NO: 3166 - RNA, 19 nt, Artificial Sequence
  Description of Artificial Sequence: Synthetic oligonucleotide
aaggaaaguauuucagcuc

SEQ ID NO: 3167 - RNA, 19 nt, Artificial Sequence
  Description of Artificial Sequence: Synthetic oligonucleotide
ccgaaguuuaauucaggaa

SEQ ID NO: 3168 - RNA, 19 nt, Artificial Sequence
  Description of Artificial Sequence: Synthetic oligonucleotide
agcucugaugaugucagau

SEQ ID NO: 3169 - RNA, 19 nt, Artificial Sequence
  Description of Artificial Sequence: Synthetic oligonucleotide
ucugaugaugucagauacg

SEQ ID NO: 3170 - RNA, 19 nt, Artificial Sequence
  Description of Artificial Sequence: Synthetic oligonucleotide
uacguaaaugcuuucaagu

SEQ ID NO: 3171 - RNA, 19 nt, Artificial Sequence
  Description of Artificial Sequence: Synthetic oligonucleotide
uucaugagccuggaaagaa

SEQ ID NO: 3172 - RNA, 19 nt, Artificial Sequence
  Description of Artificial Sequence: Synthetic oligonucleotide
aucaaaaccuuugaagaac

SEQ ID NO: 3173 - RNA, 19 nt, Artificial Sequence
  Description of Artificial Sequence: Synthetic oligonucleotide
cuuuuaccgaaugccaccu

SEQ ID NO: 3174 - RNA, 19 nt, Artificial Sequence
  Description of Artificial Sequence: Synthetic oligonucleotide
uccauguuugaugacuacc

SEQ ID NO: 3175 - RNA, 19 nt, Artificial Sequence
  Description of Artificial Sequence: Synthetic oligonucleotide
cagggcgacagcagcacuc

SEQ ID NO: 3176 - RNA, 19 nt, Artificial Sequence
  Description of Artificial Sequence: Synthetic oligonucleotide
cuguuggccucucccaugc

SEQ ID NO: 3177 - RNA, 19 nt, Artificial Sequence
  Description of Artificial Sequence: Synthetic oligonucleotide
cugaagcgcuucaccugga

SEQ ID NO: 3178 - RNA, 19 nt, Artificial Sequence
  Description of Artificial Sequence: Synthetic oligonucleotide
acugacagcaaacccaagg

SEQ ID NO: 3179 - RNA, 19 nt, Artificial Sequence
  Description of Artificial Sequence: Synthetic oligonucleotide
gccucgcucaagauugacu

SEQ ID NO: 3180 - RNA, 19 nt, Artificial Sequence
  Description of Artificial Sequence: Synthetic oligonucleotide
uugagaguaaccaguaaaa

SEQ ID NO: 3181 - RNA, 19 nt, Artificial Sequence
  Description of Artificial Sequence: Synthetic oligonucleotide
aguaaggagucggggcugu

SEQ ID NO: 3182 - RNA, 19 nt, Artificial Sequence
  Description of Artificial Sequence: Synthetic oligonucleotide
ucugaugucagcaggccca

SEQ ID NO: 3183 - RNA, 19 nt, Artificial Sequence
  Description of Artificial Sequence: Synthetic oligonucleotide
aguuucugccauuccagcu

SEQ ID NO: 3184 - RNA, 19 nt, Artificial Sequence
  Description of Artificial Sequence: Synthetic oligonucleotide
ugugggcacgucagcgaag

SEQ ID NO: 3185 - RNA, 19 nt, Artificial Sequence
  Description of Artificial Sequence: Synthetic oligonucleotide
ggcaagcgcagguucaccu

SEQ ID NO: 3186 - RNA, 19 nt, Artificial Sequence
  Description of Artificial Sequence: Synthetic oligonucleotide
uacgaccacgcugagcugg

SEQ ID NO: 3187 - RNA, 19 nt, Artificial Sequence
  Description of Artificial Sequence: Synthetic oligonucleotide
gaaaggaaaaucgcgugcu

SEQ ID NO: 3188 - RNA, 19 nt, Artificial Sequence
  Description of Artificial Sequence: Synthetic oligonucleotide
ugcuccccgcccccagacu

SEQ ID NO: 3189 - RNA, 19 nt, Artificial Sequence
  Description of Artificial Sequence: Synthetic oligonucleotide
uacaacucggugguccugu

SEQ ID NO: 3190 - RNA, 19 nt, Artificial Sequence
  Description of Artificial Sequence: Synthetic oligonucleotide
uacuccaccccacccaucu

SEQ ID NO: 3191 - RNA, 19 nt, Artificial Sequence
  Description of Artificial Sequence: Synthetic oligonucleotide
uagaguuugacacgaagcc

SEQ ID NO: 3192 - RNA, 19 nt, Artificial Sequence
  Description of Artificial Sequence: Synthetic oligonucleotide
cuuauuucuagaagcacau

SEQ ID NO: 3193 - RNA, 19 nt, Artificial Sequence
  Description of Artificial Sequence: Synthetic oligonucleotide
uguguauuuauacccccag

SEQ ID NO: 3194 - RNA, 19 nt, Artificial Sequence
  Description of Artificial Sequence: Synthetic oligonucleotide
ggaaacuagcuuuugccag

SEQ ID NO: 3195 - RNA, 19 nt, Artificial Sequence
  Description of Artificial Sequence: Synthetic oligonucleotide
guauuaugcauauauaagu

SEQ ID NO: 3196 - RNA, 19 nt, Artificial Sequence
  Description of Artificial Sequence: Synthetic oligonucleotide
uuuacaccuuuaucuuucc

SEQ ID NO: 3197 - RNA, 19 nt, Artificial Sequence
  Description of Artificial Sequence: Synthetic oligonucleotide
caugggagccagcugcuuu

SEQ ID NO: 3198 - RNA, 19 nt, Artificial Sequence
  Description of Artificial Sequence: Synthetic oligonucleotide
uuugugauuuuuuuaauag

SEQ ID NO: 3199 - RNA, 19 nt, Artificial Sequence
  Description of Artificial Sequence: Synthetic oligonucleotide
gugcuuuuuuuuuuuugac

SEQ ID NO: 3200 - RNA, 19 nt, Artificial Sequence
  Description of Artificial Sequence: Synthetic oligonucleotide
cuuuuuuuuuuuugacuaa

SEQ ID NO: 3201 - RNA, 19 nt, Artificial Sequence
  Description of Artificial Sequence: Synthetic oligonucleotide
cuaacaagaauguaacucc

SEQ ID NO: 3202 - RNA, 19 nt, Artificial Sequence
  Description of Artificial Sequence: Synthetic oligonucleotide
acaagaauguaacuccaga

SEQ ID NO: 3203 - RNA, 19 nt, Artificial Sequence
  Description of Artificial Sequence: Synthetic oligonucleotide
cagauagagaaauagugac

SEQ ID NO: 3204 - RNA, 19 nt, Artificial Sequence
  Description of Artificial Sequence: Synthetic oligonucleotide
auagagaaauagugacaag

SEQ ID NO: 3205 - RNA, 19 nt, Artificial Sequence
  Description of Artificial Sequence: Synthetic oligonucleotide
caagugaagaacacuacug

SEQ ID NO: 3206 - RNA, 19 nt, Artificial Sequence
  Description of Artificial Sequence: Synthetic oligonucleotide
gugaagaacacuacugcua

SEQ ID NO: 3207 - RNA, 19 nt, Artificial Sequence
  Description of Artificial Sequence: Synthetic oligonucleotide
gcuaaauccucauguuacu

SEQ ID NO: 3208 - RNA, 19 nt, Artificial Sequence
  Description of Artificial Sequence: Synthetic oligonucleotide
aaauccucauguuacucag

SEQ ID NO: 3209 - RNA, 19 nt, Artificial Sequence
  Description of Artificial Sequence: Synthetic oligonucleotide
ucaguguuagagaaauccu

SEQ ID NO: 3210 - RNA, 19 nt, Artificial Sequence
  Description of Artificial Sequence: Synthetic oligonucleotide
guguuagagaaauccuucc

SEQ ID NO: 3211 - RNA, 19 nt, Artificial Sequence
  Description of Artificial Sequence: Synthetic oligonucleotide
uuccuaaacccaaugacuu

SEQ ID NO: 3212 - RNA, 19 nt, Artificial Sequence
  Description of Artificial Sequence: Synthetic oligonucleotide
cuaaacccaaugacuuccc

SEQ ID NO: 3213 - RNA, 19 nt, Artificial Sequence
  Description of Artificial Sequence: Synthetic oligonucleotide
ucccugcuccaacccccgc

SEQ ID NO: 3214 - RNA, 19 nt, Artificial Sequence
  Description of Artificial Sequence: Synthetic oligonucleotide
cugcuccaacccccgccac

SEQ ID NO: 3215 - RNA, 19 nt, Artificial Sequence
  Description of Artificial Sequence: Synthetic oligonucleotide
ccaccucagggcacgcagg

SEQ ID NO: 3216 - RNA, 19 nt, Artificial Sequence
  Description of Artificial Sequence: Synthetic oligonucleotide
ccucagggcacgcaggacc

SEQ ID NO: 3217 - RNA, 19 nt, Artificial Sequence
  Description of Artificial Sequence: Synthetic oligonucleotide
gaccaguuugauugaggag

SEQ ID NO: 3218 - RNA, 19 nt, Artificial Sequence
  Description of Artificial Sequence: Synthetic oligonucleotide
caguuugauugaggagcug

SEQ ID NO: 3219 - RNA, 19 nt, Artificial Sequence
  Description of Artificial Sequence: Synthetic oligonucleotide
gcugcacugaucacccaau

SEQ ID NO: 3220 - RNA, 19 nt, Artificial Sequence
  Description of Artificial Sequence: Synthetic oligonucleotide
gcacugaucacccaaugca

SEQ ID NO: 3221 - RNA, 19 nt, Artificial Sequence
  Description of Artificial Sequence: Synthetic oligonucleotide
ugcaucacguaccccacug

SEQ ID NO: 3222 - RNA, 19 nt, Artificial Sequence
  Description of Artificial Sequence: Synthetic oligonucleotide
aucacguaccccacugggc

SEQ ID NO: 3223 - RNA, 19 nt, Artificial Sequence
  Description of Artificial Sequence: Synthetic oligonucleotide
gggccagcccugcagccca

SEQ ID NO: 3224 - RNA, 19 nt, Artificial Sequence
  Description of Artificial Sequence: Synthetic oligonucleotide
ccagcccugcagcccaaaa

SEQ ID NO: 3225 - RNA, 19 nt, Artificial Sequence
  Description of Artificial Sequence: Synthetic oligonucleotide
aaaacccagggcaacaagc

SEQ ID NO: 3226 - RNA, 19 nt, Artificial Sequence
  Description of Artificial Sequence: Synthetic oligonucleotide
acccagggcaacaagcccg

SEQ ID NO: 3227 - RNA, 19 nt, Artificial Sequence
  Description of Artificial Sequence: Synthetic oligonucleotide
cccguuagccccagggauc

SEQ ID NO: 3228 - RNA, 19 nt, Artificial Sequence
  Description of Artificial Sequence: Synthetic oligonucleotide
guuagccccagggaucacu

SEQ ID NO: 3229 - RNA, 19 nt, Artificial Sequence
  Description of Artificial Sequence: Synthetic oligonucleotide
cacuggcuggccugagcaa

SEQ ID NO: 3230 - RNA, 19 nt, Artificial Sequence
  Description of Artificial Sequence: Synthetic oligonucleotide
acaucucgggaguccucua

SEQ ID NO: 3231 - RNA, 19 nt, Artificial Sequence
  Description of Artificial Sequence: Synthetic oligonucleotide
agcaggccuaagacaugug

SEQ ID NO: 3232 - RNA, 19 nt, Artificial Sequence
  Description of Artificial Sequence: Synthetic oligonucleotide
gaggaggaaaaggaaaaaa

SEQ ID NO: 3233 - RNA, 19 nt, Artificial Sequence
  Description of Artificial Sequence: Synthetic oligonucleotide
aagcaaaaagcaagggaga

SEQ ID NO: 3234 - RNA, 19 nt, Artificial Sequence
  Description of Artificial Sequence: Synthetic oligonucleotide
aaaagagaaaccgggagaa

SEQ ID NO: 3235 - RNA, 19 nt, Artificial Sequence
  Description of Artificial Sequence: Synthetic oligonucleotide
aggcaugagaaagaauuug

SEQ ID NO: 3236 - RNA, 19 nt, Artificial Sequence
  Description of Artificial Sequence: Synthetic oligonucleotide
gagacgcaccaugugggca

SEQ ID NO: 3237 - RNA, 19 nt, Artificial Sequence
  Description of Artificial Sequence: Synthetic oligonucleotide
acggagggggacggggcuc

SEQ ID NO: 3238 - RNA, 19 nt, Artificial Sequence
  Description of Artificial Sequence: Synthetic oligonucleotide
cagcaaugccauuucagug

SEQ ID NO: 3239 - RNA, 19 nt, Artificial Sequence
  Description of Artificial Sequence: Synthetic oligonucleotide
ggcuucccagcucugaccc

SEQ ID NO: 3240 - RNA, 19 nt, Artificial Sequence
  Description of Artificial Sequence: Synthetic oligonucleotide
cuucuacauuugagggccc

SEQ ID NO: 3241 - RNA, 19 nt, Artificial Sequence
  Description of Artificial Sequence: Synthetic oligonucleotide
cagccaggagcagauggac

SEQ ID NO: 3242 - RNA, 19 nt, Artificial Sequence
  Description of Artificial Sequence: Synthetic oligonucleotide
cagcgaugaggggacauuu

SEQ ID NO: 3243 - RNA, 19 nt, Artificial Sequence
  Description of Artificial Sequence: Synthetic oligonucleotide
uucuggauucugggaggca

SEQ ID NO: 3244 - RNA, 19 nt, Artificial Sequence
  Description of Artificial Sequence: Synthetic oligonucleotide
aagaaaaggacaaauaucu

SEQ ID NO: 3245 - RNA, 19 nt, Artificial Sequence
  Description of Artificial Sequence: Synthetic oligonucleotide
uuuuuuggaacuaaagcaa

SEQ ID NO: 3246 - RNA, 19 nt, Artificial Sequence
  Description of Artificial Sequence: Synthetic oligonucleotide
aauuuuagaacuuuaccua

SEQ ID NO: 3247 - RNA, 19 nt, Artificial Sequence
  Description of Artificial Sequence: Synthetic oligonucleotide
uuuagaacuuuaccuaugg

SEQ ID NO: 3248 - RNA, 19 nt, Artificial Sequence
  Description of Artificial Sequence: Synthetic oligonucleotide
auggaagugguucuauguc

SEQ ID NO: 3249 - RNA, 19 nt, Artificial Sequence
  Description of Artificial Sequence: Synthetic oligonucleotide
ccauucucauucguggcau

SEQ ID NO: 3250 - RNA, 19 nt, Artificial Sequence
  Description of Artificial Sequence: Synthetic oligonucleotide
uguuuugauuuguagcacu

SEQ ID NO: 3251 - RNA, 19 nt, Artificial Sequence
  Description of Artificial Sequence: Synthetic oligonucleotide
ugaggguggcacucaacuc

SEQ ID NO: 3252 - RNA, 19 nt, Artificial Sequence
  Description of Artificial Sequence: Synthetic oligonucleotide
cugagcccauacuuuuggc

SEQ ID NO: 3253 - RNA, 19 nt, Artificial Sequence
  Description of Artificial Sequence: Synthetic oligonucleotide
cuccucuaguaagaugcac

SEQ ID NO: 3254 - RNA, 19 nt, Artificial Sequence
  Description of Artificial Sequence: Synthetic oligonucleotide
cugaaaacuuagccagagu

SEQ ID NO: 3255 - RNA, 19 nt, Artificial Sequence
  Description of Artificial Sequence: Synthetic oligonucleotide
uuagguugucuccaggcca

SEQ ID NO: 3256 - RNA, 19 nt, Artificial Sequence
  Description of Artificial Sequence: Synthetic oligonucleotide
augauggccuuacacugaa

SEQ ID NO: 3257 - RNA, 19 nt, Artificial Sequence
  Description of Artificial Sequence: Synthetic oligonucleotide
aaaaugucacauucuauuu

SEQ ID NO: 3258 - RNA, 25 nt, Artificial Sequence
  Description of Artificial Sequence: Synthetic oligonucleotide
gcggacacuccucucggcuccuccc

SEQ ID NO: 3259 - RNA, 25 nt, Artificial Sequence
  Description of Artificial Sequence: Synthetic oligonucleotide
ccggcagcggcggcggcucggagcg

SEQ ID NO: 3260 - RNA, 25 nt, Artificial Sequence
  Description of Artificial Sequence: Synthetic oligonucleotide
gggcuccggggcucgggugcagcgg

SEQ ID NO: 3261 - RNA, 25 nt, Artificial Sequence
  Description of Artificial Sequence: Synthetic oligonucleotide
gccagcgggccuggcggcgaggauu

SEQ ID NO: 3262 - RNA, 25 nt, Artificial Sequence
  Description of Artificial Sequence: Synthetic oligonucleotide
uacccggggaagugguugucuccug

SEQ ID NO: 3263 - RNA, 25 nt, Artificial Sequence
  Description of Artificial Sequence: Synthetic oligonucleotide
ggcuggagccgcgagacgggcgcuc

SEQ ID NO: 3264 - RNA, 25 nt, Artificial Sequence
  Description of Artificial Sequence: Synthetic oligonucleotide
cagggcgcggggccggcggcggcga

SEQ ID NO: 3265 - RNA, 25 nt, Artificial Sequence
  Description of Artificial Sequence: Synthetic oligonucleotide
aacgagaggacggacucuggcggcc

SEQ ID NO: 3266 - RNA, 25 nt, Artificial Sequence
  Description of Artificial Sequence: Synthetic oligonucleotide
cgggucguuggccgggggagcgcgg

SEQ ID NO: 3267 - RNA, 25 nt, Artificial Sequence
  Description of Artificial Sequence: Synthetic oligonucleotide
ggcaccgggcgagcaggccgcgucg

SEQ ID NO: 3268 - RNA, 25 nt, Artificial Sequence
  Description of Artificial Sequence: Synthetic oligonucleotide
gcgcucaccauggucagcuacuggg

SEQ ID NO: 3269 - RNA, 25 nt, Artificial Sequence
  Description of Artificial Sequence: Synthetic oligonucleotide
gacaccgggguccugcugugcgcgc

SEQ ID NO: 3270 - RNA, 25 nt, Artificial Sequence
  Description of Artificial Sequence: Synthetic oligonucleotide
cugcucagcugucugcuucucacag

SEQ ID NO: 3271 - RNA, 25 nt, Artificial Sequence
  Description of Artificial Sequence: Synthetic oligonucleotide
ggaucuaguucagguucaaaauuaa

SEQ ID NO: 3272 - RNA, 25 nt, Artificial Sequence
  Description of Artificial Sequence: Synthetic oligonucleotide
aaagauccugaacugaguuuaaaag

SEQ ID NO: 3273 - RNA, 25 nt, Artificial Sequence
  Description of Artificial Sequence: Synthetic oligonucleotide
ggcacccagcacaucaugcaagcag

SEQ ID NO: 3274 - RNA, 25 nt, Artificial Sequence
  Description of Artificial Sequence: Synthetic oligonucleotide
ggccagacacugcaucuccaaugca

SEQ ID NO: 3275 - RNA, 25 nt, Artificial Sequence
  Description of Artificial Sequence: Synthetic oligonucleotide
aggggggaagcagcccauaaauggu

SEQ ID NO: 3276 - RNA, 25 nt, Artificial Sequence
  Description of Artificial Sequence: Synthetic oligonucleotide
ucuuugccugaaauggugaguaagg

SEQ ID NO: 3277 - RNA, 25 nt, Artificial Sequence
  Description of Artificial Sequence: Synthetic oligonucleotide
gaaagcgaaaggcugagcauaacua

SEQ ID NO: 3278 - RNA, 25 nt, Artificial Sequence
  Description of Artificial Sequence: Synthetic oligonucleotide
aaaucugccuguggaagaaauggca

SEQ ID NO: 3279 - RNA, 25 nt, Artificial Sequence
  Description of Artificial Sequence: Synthetic oligonucleotide
aaacaauucugcaguacuuuaaccu

SEQ ID NO: 3280 - RNA, 25 nt, Artificial Sequence
  Description of Artificial Sequence: Synthetic oligonucleotide
uugaacacagcucaagcaaaccaca

SEQ ID NO: 3281 - RNA, 25 nt, Artificial Sequence
  Description of Artificial Sequence: Synthetic oligonucleotide
acuggcuucuacagcugcaaauauc

SEQ ID NO: 3282 - RNA, 25 nt, Artificial Sequence
  Description of Artificial Sequence: Synthetic oligonucleotide
cuagcuguaccuacuucaaagaaga

SEQ ID NO: 3283 - RNA, 25 nt, Artificial Sequence
  Description of Artificial Sequence: Synthetic oligonucleotide
aaggaaacagaaucugcaaucuaua

SEQ ID NO: 3284 - RNA, 25 nt, Artificial Sequence
  Description of Artificial Sequence: Synthetic oligonucleotide
auauuuauuagugauacagguagac

SEQ ID NO: 3285 - RNA, 25 nt, Artificial Sequence
  Description of Artificial Sequence: Synthetic oligonucleotide
ccuuucguagagauguacagugaaa

SEQ ID NO: 3286 - RNA, 25 nt, Artificial Sequence
  Description of Artificial Sequence: Synthetic oligonucleotide
auccccgaaauuauacacaugacug

SEQ ID NO: 3287 - RNA, 25 nt, Artificial Sequence
  Description of Artificial Sequence: Synthetic oligonucleotide
gaaggaagggagcucgucauucccu

SEQ ID NO: 3288 - RNA, 25 nt, Artificial Sequence
  Description of Artificial Sequence: Synthetic oligonucleotide
ugccggguuacgucaccuaacauca

SEQ ID NO: 3289 - RNA, 25 nt, Artificial Sequence
  Description of Artificial Sequence: Synthetic oligonucleotide
acuguuacuuuaaaaaaguuuccac

SEQ ID NO: 3290 - RNA, 25 nt, Artificial Sequence
  Description of Artificial Sequence: Synthetic oligonucleotide
cuugacacuuugaucccugauggaa

SEQ ID NO: 3291 - RNA, 25 nt, Artificial Sequence
  Description of Artificial Sequence: Synthetic oligonucleotide
aaacgcauaaucugggacaguagaa

SEQ ID NO: 3292 - RNA, 25 nt, Artificial Sequence
  Description of Artificial Sequence: Synthetic oligonucleotide
aagggcuucaucauaucaaaugcaa

SEQ ID NO: 3293 - RNA, 25 nt, Artificial Sequence
  Description of Artificial Sequence: Synthetic oligonucleotide
acguacaaagaaauagggcuucuga

SEQ ID NO: 3294 - RNA, 25 nt, Artificial Sequence
  Description of Artificial Sequence: Synthetic oligonucleotide
accugugaagcaacagucaaugggc

SEQ ID NO: 3295 - RNA, 25 nt, Artificial Sequence
  Description of Artificial Sequence: Synthetic oligonucleotide
cauuuguauaagacaaacuaucuca

SEQ ID NO: 3296 - RNA, 25 nt, Artificial Sequence
  Description of Artificial Sequence: Synthetic oligonucleotide
acacaucgacaaaccaauacaauca

SEQ ID NO: 3297 - RNA, 25 nt, Artificial Sequence
  Description of Artificial Sequence: Synthetic oligonucleotide
auagauguccaaauaagcacaccac

SEQ ID NO: 3298 - RNA, 25 nt, Artificial Sequence
  Description of Artificial Sequence: Synthetic oligonucleotide
cgcccagucaaauuacuuagaggcc

SEQ ID NO: 3299 - RNA, 25 nt, Artificial Sequence
  Description of Artificial Sequence: Synthetic oligonucleotide
cauacucuuguccucaauuguacug

SEQ ID NO: 3300 - RNA, 25 nt, Artificial Sequence
  Description of Artificial Sequence: Synthetic oligonucleotide
gcuaccacucccuugaacacgagag

SEQ ID NO: 3301 - RNA, 25 nt, Artificial Sequence
  Description of Artificial Sequence: Synthetic oligonucleotide
guucaaaugaccuggaguuacccug

SEQ ID NO: 3302 - RNA, 25 nt, Artificial Sequence
  Description of Artificial Sequence: Synthetic oligonucleotide
gaugaaaaaaauaagagagcuuccg

SEQ ID NO: 3303 - RNA, 25 nt, Artificial Sequence
  Description of Artificial Sequence: Synthetic oligonucleotide
guaaggcgacgaauugaccaaagca

SEQ ID NO: 3304 - RNA, 25 nt, Artificial Sequence
  Description of Artificial Sequence: Synthetic oligonucleotide
aauucccaugccaacauauucuaca

SEQ ID NO: 3305 - RNA, 25 nt, Artificial Sequence
  Description of Artificial Sequence: Synthetic oligonucleotide
aguguucuuacuauugacaaaaugc

SEQ ID NO: 3306 - RNA, 25 nt, Artificial Sequence
  Description of Artificial Sequence: Synthetic oligonucleotide
cagaacaaagacaaaggacuuuaua

SEQ ID NO: 3307 - RNA, 25 nt, Artificial Sequence
  Description of Artificial Sequence: Synthetic oligonucleotide
acuugucguguaaggaguggaccau

SEQ ID NO: 3308 - RNA, 25 nt, Artificial Sequence
  Description of Artificial Sequence: Synthetic oligonucleotide
ucauucaaaucuguuaacaccucag

SEQ ID NO: 3309 - RNA, 25 nt, Artificial Sequence
  Description of Artificial Sequence: Synthetic oligonucleotide
gugcauauauaugauaaagcauuca

SEQ ID NO: 3310 - RNA, 25 nt, Artificial Sequence
  Description of Artificial Sequence: Synthetic oligonucleotide
aucacugugaaacaucgaaaacagc

SEQ ID NO: 3311 - RNA, 25 nt, Artificial Sequence
  Description of Artificial Sequence: Synthetic oligonucleotide
caggugcuugaaaccguagcuggca

SEQ ID NO: 3312 - RNA, 25 nt, Artificial Sequence
  Description of Artificial Sequence: Synthetic oligonucleotide
aagcggucuuaccggcucucuauga

SEQ ID NO: 3313 - RNA, 25 nt, Artificial Sequence
  Description of Artificial Sequence: Synthetic oligonucleotide
aaagugaaggcauuucccucgccgg

SEQ ID NO: 3314 - RNA, 25 nt, Artificial Sequence
  Description of Artificial Sequence: Synthetic oligonucleotide
gaaguuguaugguuaaaagaugggu

SEQ ID NO: 3315 - RNA, 25 nt, Artificial Sequence
  Description of Artificial Sequence: Synthetic oligonucleotide
uuaccugcgacugagaaaucugcuc

SEQ ID NO: 3316 - RNA, 25 nt, Artificial Sequence
  Description of Artificial Sequence: Synthetic oligonucleotide
cgcuauuugacucguggcuacucgu

SEQ ID NO: 3317 - RNA, 25 nt, Artificial Sequence
  Description of Artificial Sequence: Synthetic oligonucleotide
uuaauuaucaaggacguaacugaag

SEQ ID NO: 3318 - RNA, 25 nt, Artificial Sequence
  Description of Artificial Sequence: Synthetic oligonucleotide
gaggaugcagggaauuauacaaucu

SEQ ID NO: 3319 - RNA, 25 nt, Artificial Sequence
  Description of Artificial Sequence: Synthetic oligonucleotide
uugcugagcauaaaacagucaaaug

SEQ ID NO: 3320 - RNA, 25 nt, Artificial Sequence
  Description of Artificial Sequence: Synthetic oligonucleotide
guguuuaaaaaccucacugccacuc

SEQ ID NO: 3321 - RNA, 25 nt, Artificial Sequence
  Description of Artificial Sequence: Synthetic oligonucleotide
cuaauugucaaugugaaaccccaga

SEQ ID NO: 3322 - RNA, 25 nt, Artificial Sequence
  Description of Artificial Sequence: Synthetic oligonucleotide
auuuacgaaaaggccgugucaucgu

SEQ ID NO: 3323 - RNA, 25 nt, Artificial Sequence
  Description of Artificial Sequence: Synthetic oligonucleotide
uuuccagacccggcucucuacccac

SEQ ID NO: 3324 - RNA, 25 nt, Artificial Sequence
  Description of Artificial Sequence: Synthetic oligonucleotide
cugggcagcagacaaauccugacuu

SEQ ID NO: 3325 - RNA, 25 nt, Artificial Sequence
  Description of Artificial Sequence: Synthetic oligonucleotide
uguaccgcauaugguaucccucaac

SEQ ID NO: 3326 - RNA, 25 nt, Artificial Sequence
  Description of Artificial Sequence: Synthetic oligonucleotide
ccuacaaucaagugguucuggcacc

SEQ ID NO: 3327 - RNA, 25 nt, Artificial Sequence
  Description of Artificial Sequence: Synthetic oligonucleotide
cccuguaaccauaaucauuccgaag

SEQ ID NO: 3328 - RNA, 25 nt, Artificial Sequence
  Description of Artificial Sequence: Synthetic oligonucleotide
gcaaggugugacuuuuguuccaaua

SEQ ID NO: 3329 - RNA, 25 nt, Artificial Sequence
  Description of Artificial Sequence: Synthetic oligonucleotide
aaugaagaguccuuuauccuggaug

SEQ ID NO: 3330 - RNA, 25 nt, Artificial Sequence
  Description of Artificial Sequence: Synthetic oligonucleotide
gcugacagcaacaugggaaacagaa

SEQ ID NO: 3331 - RNA, 25 nt, Artificial Sequence
  Description of Artificial Sequence: Synthetic oligonucleotide
auugagagcaucacucagcgcaugg

SEQ ID NO: 3332 - RNA, 25 nt, Artificial Sequence
  Description of Artificial Sequence: Synthetic oligonucleotide
gcaauaauagaaggaaagaauaaga

SEQ ID NO: 3333 - RNA, 25 nt, Artificial Sequence
  Description of Artificial Sequence: Synthetic oligonucleotide
auggcuagcaccuugguuguggcug

SEQ ID NO: 3334 - RNA, 25 nt, Artificial Sequence
  Description of Artificial Sequence: Synthetic oligonucleotide
gacucuagaauuucuggaaucuaca

SEQ ID NO: 3335 - RNA, 25 nt, Artificial Sequence
  Description of Artificial Sequence: Synthetic oligonucleotide
auuugcauagcuuccaauaaaguug

SEQ ID NO: 3336 - RNA, 25 nt, Artificial Sequence
  Description of Artificial Sequence: Synthetic oligonucleotide
gggacugugggaagaaacauaagcu

SEQ ID NO: 3337 - RNA, 25 nt, Artificial Sequence
  Description of Artificial Sequence: Synthetic oligonucleotide
uuuuauaucacagaugugccaaaug

SEQ ID NO: 3338 - RNA, 25 nt, Artificial Sequence
  Description of Artificial Sequence: Synthetic oligonucleotide
ggguuucauguuaacuuggaaaaaa

SEQ ID NO: 3339 - RNA, 25 nt, Artificial Sequence
  Description of Artificial Sequence: Synthetic oligonucleotide
augccgacggaaggagaggaccuga

SEQ ID NO: 3340 - RNA, 25 nt, Artificial Sequence
  Description of Artificial Sequence: Synthetic oligonucleotide
aaacugucuugcacaguuaacaagu

SEQ ID NO: 3341 - RNA, 25 nt, Artificial Sequence
  Description of Artificial Sequence: Synthetic oligonucleotide
uucuuauacagagacguuacuugga

SEQ ID NO: 3342 - RNA, 25 nt, Artificial Sequence
  Description of Artificial Sequence: Synthetic oligonucleotide
auuuuacugcggacaguuaauaaca

SEQ ID NO: 3343 - RNA, 25 nt, Artificial Sequence
  Description of Artificial Sequence: Synthetic oligonucleotide
agaacaaugcacuacaguauuagca

SEQ ID NO: 3344 - RNA, 25 nt, Artificial Sequence
  Description of Artificial Sequence: Synthetic oligonucleotide
aagcaaaaaauggccaucacuaagg

SEQ ID NO: 3345 - RNA, 25 nt, Artificial Sequence
  Description of Artificial Sequence: Synthetic oligonucleotide
gagcacuccaucacucuuaaucuua

SEQ ID NO: 3346 - RNA, 25 nt, Artificial Sequence
  Description of Artificial Sequence: Synthetic oligonucleotide
accaucaugaauguuucccugcaag

SEQ ID NO: 3347 - RNA, 25 nt, Artificial Sequence
  Description of Artificial Sequence: Synthetic oligonucleotide
gauucaggcaccuaugccugcagag

SEQ ID NO: 3348 - RNA, 25 nt, Artificial Sequence
  Description of Artificial Sequence: Synthetic oligonucleotide
gccaggaauguauacacaggggaag

SEQ ID NO: 3349 - RNA, 25 nt, Artificial Sequence
  Description of Artificial Sequence: Synthetic oligonucleotide
gaaauccuccagaagaaagaaauua

SEQ ID NO: 3350 - RNA, 25 nt, Artificial Sequence
  Description of Artificial Sequence: Synthetic oligonucleotide
acaaucagagaucaggaagcaccau

SEQ ID NO: 3351 - RNA, 25 nt, Artificial Sequence
  Description of Artificial Sequence: Synthetic oligonucleotide
uaccuccugcgaaaccucagugauc

SEQ ID NO: 3352 - RNA, 25 nt, Artificial Sequence
  Description of Artificial Sequence: Synthetic oligonucleotide
cacacaguggccaucagcaguucca

SEQ ID NO: 3353 - RNA, 25 nt, Artificial Sequence
  Description of Artificial Sequence: Synthetic oligonucleotide
accacuuuagacugucaugcuaaug

SEQ ID NO: 3354 - RNA, 25 nt, Artificial Sequence
  Description of Artificial Sequence: Synthetic oligonucleotide
gguguccccgagccucagaucacuu

SEQ ID NO: 3355 - RNA, 25 nt, Artificial Sequence
  Description of Artificial Sequence: Synthetic oligonucleotide
ugguuuaaaaacaaccacaaaauac

SEQ ID NO: 3356 - RNA, 25 nt, Artificial Sequence
  Description of Artificial Sequence: Synthetic oligonucleotide
caacaagagccuggaauuauuuuag

SEQ ID NO: 3357 - RNA, 25 nt, Artificial Sequence
  Description of Artificial Sequence: Synthetic oligonucleotide
ggaccaggaagcagcacgcuguuua

SEQ ID NO: 3358 - RNA, 25 nt, Artificial Sequence
  Description of Artificial Sequence: Synthetic oligonucleotide
auugaaagagucacagaagaggaug

SEQ ID NO: 3359 - RNA, 25 nt, Artificial Sequence
  Description of Artificial Sequence: Synthetic oligonucleotide
gaaggugucuaucacugcaaagcca

SEQ ID NO: 3360 - RNA, 25 nt, Artificial Sequence
  Description of Artificial Sequence: Synthetic oligonucleotide
accaaccagaagggcucuguggaaa

SEQ ID NO: 3361 - RNA, 25 nt, Artificial Sequence
  Description of Artificial Sequence: Synthetic oligonucleotide
aguucagcauaccucacuguucaag

SEQ ID NO: 3362 - RNA, 25 nt, Artificial Sequence
  Description of Artificial Sequence: Synthetic oligonucleotide
ggaaccucggacaagucuaaucugg

SEQ ID NO: 3363 - RNA, 25 nt, Artificial Sequence
  Description of Artificial Sequence: Synthetic oligonucleotide
gagcugaucacucuaacaugcaccu

SEQ ID NO: 3364 - RNA, 25 nt, Artificial Sequence
  Description of Artificial Sequence: Synthetic oligonucleotide
uguguggcugcgacucucuucuggc

SEQ ID NO: 3365 - RNA, 25 nt, Artificial Sequence
  Description of Artificial Sequence: Synthetic oligonucleotide
cuccuauuaacccuccuuauccgaa

SEQ ID NO: 3366 - RNA, 25 nt, Artificial Sequence
  Description of Artificial Sequence: Synthetic oligonucleotide
aaaaugaaaaggucuucuucugaaa

SEQ ID NO: 3367 - RNA, 25 nt, Artificial Sequence
  Description of Artificial Sequence: Synthetic oligonucleotide
auaaagacugacuaccuaucaauua

SEQ ID NO: 3368 - RNA, 25 nt, Artificial Sequence
  Description of Artificial Sequence: Synthetic oligonucleotide
auaauggacccagaugaaguuccuu

SEQ ID NO: 3369 - RNA, 25 nt, Artificial Sequence
  Description of Artificial Sequence: Synthetic oligonucleotide
uuggaugagcagugugagcggcucc

SEQ ID NO: 3370 - RNA, 25 nt, Artificial Sequence
  Description of Artificial Sequence: Synthetic oligonucleotide
ccuuaugaugccagcaagugggagu

SEQ ID NO: 3371 - RNA, 25 nt, Artificial Sequence
  Description of Artificial Sequence: Synthetic oligonucleotide
uuugcccgggagagacuuaaacugg

SEQ ID NO: 3372 - RNA, 25 nt, Artificial Sequence
  Description of Artificial Sequence: Synthetic oligonucleotide
ggcaaaucacuuggaagaggggcuu

SEQ ID NO: 3373 - RNA, 25 nt, Artificial Sequence
  Description of Artificial Sequence: Synthetic oligonucleotide
uuuggaaaagugguucaagcaucag

SEQ ID NO: 3374 - RNA, 25 nt, Artificial Sequence
  Description of Artificial Sequence: Synthetic oligonucleotide
gcauuuggcauuaagaaaucaccua

SEQ ID NO: 3375 - RNA, 25 nt, Artificial Sequence
  Description of Artificial Sequence: Synthetic oligonucleotide
acgugccggacuguggcugugaaaa

SEQ ID NO: 3376 - RNA, 25 nt, Artificial Sequence
  Description of Artificial Sequence: Synthetic oligonucleotide
augcugaaagagggggccacggcca

SEQ ID NO: 3377 - RNA, 25 nt, Artificial Sequence
  Description of Artificial Sequence: Synthetic oligonucleotide
agcgaguacaaagcucugaugacug

SEQ ID NO: 3378 - RNA, 25 nt, Artificial Sequence
  Description of Artificial Sequence: Synthetic oligonucleotide
gagcuaaaaaucuugacccacauug

SEQ ID NO: 3379 - RNA, 25 nt, Artificial Sequence
  Description of Artificial Sequence: Synthetic oligonucleotide
ggccaccaucugaacgugguuaacc

SEQ ID NO: 3380 - RNA, 25 nt, Artificial Sequence
  Description of Artificial Sequence: Synthetic oligonucleotide
cugcugggagccugcaccaagcaag

SEQ ID NO: 3381 - RNA, 25 nt, Artificial Sequence
  Description of Artificial Sequence: Synthetic oligonucleotide
ggagggccucugauggugauuguug

SEQ ID NO: 3382 - RNA, 25 nt, Artificial Sequence
  Description of Artificial Sequence: Synthetic oligonucleotide
gaauacugcaaauauggaaaucucu

SEQ ID NO: 3383 - RNA, 25 nt, Artificial Sequence
  Description of Artificial Sequence: Synthetic oligonucleotide
uccaacuaccucaagagcaaacgug

SEQ ID NO: 3384 - RNA, 25 nt, Artificial Sequence
  Description of Artificial Sequence: Synthetic oligonucleotide
gacuuauuuuuucucaacaaggaug

SEQ ID NO: 3385 - RNA, 25 nt, Artificial Sequence
  Description of Artificial Sequence: Synthetic oligonucleotide
gcagcacuacacauggagccuaaga

SEQ ID NO: 3386 - RNA, 25 nt, Artificial Sequence
  Description of Artificial Sequence: Synthetic oligonucleotide
aaagaaaaaauggagccaggccugg

SEQ ID NO: 3387 - RNA, 25 nt, Artificial Sequence
  Description of Artificial Sequence: Synthetic oligonucleotide
gaacaaggcaagaaaccaagacuag

SEQ ID NO: 3388 - RNA, 25 nt, Artificial Sequence
  Description of Artificial Sequence: Synthetic oligonucleotide
gauagcgucaccagcagcgaaagcu

SEQ ID NO: 3389 - RNA, 25 nt, Artificial Sequence
  Description of Artificial Sequence: Synthetic oligonucleotide
uuugcgagcuccggcuuucaggaag

SEQ ID NO: 3390 - RNA, 25 nt, Artificial Sequence
  Description of Artificial Sequence: Synthetic oligonucleotide
gauaaaagucugagugauguugagg

SEQ ID NO: 3391 - RNA, 25 nt, Artificial Sequence
  Description of Artificial Sequence: Synthetic oligonucleotide
gaagaggaggauucugacgguuucu

SEQ ID NO: 3392 - RNA, 25 nt, Artificial Sequence
  Description of Artificial Sequence: Synthetic oligonucleotide
uacaaggagcccaucacuauggaag

SEQ ID NO: 3393 - RNA, 25 nt, Artificial Sequence
  Description of Artificial Sequence: Synthetic oligonucleotide
gaucugauuucuuacaguuuucaag

SEQ ID NO: 3394 - RNA, 25 nt, Artificial Sequence
  Description of Artificial Sequence: Synthetic oligonucleotide
guggccagaggcauggaguuccugu

SEQ ID NO: 3395 - RNA, 25 nt, Artificial Sequence
  Description of Artificial Sequence: Synthetic oligonucleotide
ucuuccagaaagugcauucaucggg

SEQ ID NO: 3396 - RNA, 25 nt, Artificial Sequence
  Description of Artificial Sequence: Synthetic oligonucleotide
gaccuggcagcgagaaacauucuuu

SEQ ID NO: 3397 - RNA, 25 nt, Artificial Sequence
  Description of Artificial Sequence: Synthetic oligonucleotide
uuaucugagaacaacguggugaaga

SEQ ID NO: 3398 - RNA, 25 nt, Artificial Sequence
  Description of Artificial Sequence: Synthetic oligonucleotide
auuugugauuuuggccuugcccggg

SEQ ID NO: 3399 - RNA, 25 nt, Artificial Sequence
  Description of Artificial Sequence: Synthetic oligonucleotide
gauauuuauaagaaccccgauuaug

SEQ ID NO: 3400 - RNA, 25 nt, Artificial Sequence
  Description of Artificial Sequence: Synthetic oligonucleotide
gugagaaaaggagauacucgacuuc

SEQ ID NO: 3401 - RNA, 25 nt, Artificial Sequence
  Description of Artificial Sequence: Synthetic oligonucleotide
ccucugaaauggauggcucccgaau

SEQ ID NO: 3402 - RNA, 25 nt, Artificial Sequence
  Description of Artificial Sequence: Synthetic oligonucleotide
ucuaucuuugacaaaaucuacagca

SEQ ID NO: 3403 - RNA, 25 nt, Artificial Sequence
  Description of Artificial Sequence: Synthetic oligonucleotide
accaagagcgacguguggucuuacg

SEQ ID NO: 3404 - RNA, 25 nt, Artificial Sequence
  Description of Artificial Sequence: Synthetic oligonucleotide
ggaguauugcugugggaaaucuucu

SEQ ID NO: 3405 - RNA, 25 nt, Artificial Sequence
  Description of Artificial Sequence: Synthetic oligonucleotide
uccuuaggugggucuccauacccag

SEQ ID NO: 3406 - RNA, 25 nt, Artificial Sequence
  Description of Artificial Sequence: Synthetic oligonucleotide
ggaguacaaauggaugaggacuuuu

SEQ ID NO: 3407 - RNA, 25 nt, Artificial Sequence
  Description of Artificial Sequence: Synthetic oligonucleotide
ugcagucgccugagggaaggcauga

SEQ ID NO: 3408 - RNA, 25 nt, Artificial Sequence
  Description of Artificial Sequence: Synthetic oligonucleotide
aggaugagagcuccugaguacucua

SEQ ID NO: 3409 - RNA, 25 nt, Artificial Sequence
  Description of Artificial Sequence: Synthetic oligonucleotide
acuccugaaaucuaucagaucaugc

SEQ ID NO: 3410 - RNA, 25 nt, Artificial Sequence
  Description of Artificial Sequence: Synthetic oligonucleotide
cuggacugcuggcacagagacccaa

SEQ ID NO: 3411 - RNA, 25 nt, Artificial Sequence
  Description of Artificial Sequence: Synthetic oligonucleotide
aaagaaaggccaagauuugcagaac

SEQ ID NO: 3412 - RNA, 25 nt, Artificial Sequence
  Description of Artificial Sequence: Synthetic oligonucleotide
cuuguggaaaaacuaggugauuugc

SEQ ID NO: 3413 - RNA, 25 nt, Artificial Sequence
  Description of Artificial Sequence: Synthetic oligonucleotide
cuucaagcaaauguacaacaggaug

SEQ ID NO: 3414 - RNA, 25 nt, Artificial Sequence
  Description of Artificial Sequence: Synthetic oligonucleotide
gguaaagacuacaucccaaucaaug

SEQ ID NO: 3415 - RNA, 25 nt, Artificial Sequence
  Description of Artificial Sequence: Synthetic oligonucleotide
gccauacugacaggaaauagugggu

SEQ ID NO: 3416 - RNA, 25 nt, Artificial Sequence
  Description of Artificial Sequence: Synthetic oligonucleotide
uuuacauacucaacuccugccuucu

SEQ ID NO: 3417 - RNA, 25 nt, Artificial Sequence
  Description of Artificial Sequence: Synthetic oligonucleotide
ucugaggacuucuucaaggaaagua

SEQ ID NO: 3418 - RNA, 25 nt, Artificial Sequence
  Description of Artificial Sequence: Synthetic oligonucleotide
auuucagcuccgaaguuuaauucag

SEQ ID NO: 3419 - RNA, 25 nt, Artificial Sequence
  Description of Artificial Sequence: Synthetic oligonucleotide
ggaagcucugaugaugucagauaug

SEQ ID NO: 3420 - RNA, 25 nt, Artificial Sequence
  Description of Artificial Sequence: Synthetic oligonucleotide
guaaaugcuuucaaguucaugagcc

SEQ ID NO: 3421 - RNA, 25 nt, Artificial Sequence
  Description of Artificial Sequence: Synthetic oligonucleotide
cuggaaagaaucaaaaccuuugaag

SEQ ID NO: 3422 - RNA, 25 nt, Artificial Sequence
  Description of Artificial Sequence: Synthetic oligonucleotide
gaacuuuuaccgaaugccaccucca

SEQ ID NO: 3423 - RNA, 25 nt, Artificial Sequence
  Description of Artificial Sequence: Synthetic oligonucleotide
auguuugaugacuaccagggcgaca

SEQ ID NO: 3424 - RNA, 25 nt, Artificial Sequence
  Description of Artificial Sequence: Synthetic oligonucleotide
agcagcacucuguuggccucuccca

SEQ ID NO: 3425 - RNA, 25 nt, Artificial Sequence
  Description of Artificial Sequence: Synthetic oligonucleotide
augcugaagcgcuucaccuggacug

SEQ ID NO: 3426 - RNA, 25 nt, Artificial Sequence
  Description of Artificial Sequence: Synthetic oligonucleotide
gacagcaaacccaaggccucgcuca

SEQ ID NO: 3427 - RNA, 25 nt, Artificial Sequence
  Description of Artificial Sequence: Synthetic oligonucleotide
aagauugacuugagaguaaccagua

SEQ ID NO: 3428 - RNA, 25 nt, Artificial Sequence
  Description of Artificial Sequence: Synthetic oligonucleotide
aaaaguaaggagucggggcugucug

SEQ ID NO: 3429 - RNA, 25 nt, Artificial Sequence
  Description of Artificial Sequence: Synthetic oligonucleotide
gaugucagcaggcccaguuucugcc

SEQ ID NO: 3430 - RNA, 25 nt, Artificial Sequence
  Description of Artificial Sequence: Synthetic oligonucleotide
cauuccagcugugggcacgucagcg

SEQ ID NO: 3431 - RNA, 25 nt, Artificial Sequence
  Description of Artificial Sequence: Synthetic oligonucleotide
gaaggcaagcgcagguucaccuacg

SEQ ID NO: 3432 - RNA, 25 nt, Artificial Sequence
  Description of Artificial Sequence: Synthetic oligonucleotide
gaccacgcugagcuggaaaggaaaa

SEQ ID NO: 3433 - RNA, 25 nt, Artificial Sequence
  Description of Artificial Sequence: Synthetic oligonucleotide
aucgcgugcugcuccccgcccccag

SEQ ID NO: 3434 - RNA, 25 nt, Artificial Sequence
  Description of Artificial Sequence: Synthetic oligonucleotide
gacuacaacucggugguccuguacu

SEQ ID NO: 3435 - RNA, 25 nt, Artificial Sequence
  Description of Artificial Sequence: Synthetic oligonucleotide
uccaccccacccaucuagaguuuga

SEQ ID NO: 3436 - RNA, 25 nt, Artificial Sequence
  Description of Artificial Sequence: Synthetic oligonucleotide
acacgaagccuuauuucuagaagca

SEQ ID NO: 3437 - RNA, 25 nt, Artificial Sequence
  Description of Artificial Sequence: Synthetic oligonucleotide
acauguguauuuauacccccaggaa

SEQ ID NO: 3438 - RNA, 25 nt, Artificial Sequence
  Description of Artificial Sequence: Synthetic oligonucleotide
aacuagcuuuugccaguauuaugca

SEQ ID NO: 3439 - RNA, 25 nt, Artificial Sequence
  Description of Artificial Sequence: Synthetic oligonucleotide
auauauaaguuuacaccuuuaucuu

SEQ ID NO: 3440 - RNA, 25 nt, Artificial Sequence
  Description of Artificial Sequence: Synthetic oligonucleotide
uuccaugggagccagcugcuuuuug

SEQ ID NO: 3441 - RNA, 25 nt, Artificial Sequence
  Description of Artificial Sequence: Synthetic oligonucleotide
gugauuuuuuuaauagugcuuuuuu

SEQ ID NO: 3442 - RNA, 25 nt, Artificial Sequence
  Description of Artificial Sequence: Synthetic oligonucleotide
uuuuuugacuaacaagaauguaacu

SEQ ID NO: 3443 - RNA, 25 nt, Artificial Sequence
  Description of Artificial Sequence: Synthetic oligonucleotide
uccagauagagaaauagugacaagu

SEQ ID NO: 3444 - RNA, 25 nt, Artificial Sequence
  Description of Artificial Sequence: Synthetic oligonucleotide
ugaagaacacuacugcuaaauccuc

SEQ ID NO: 3445 - RNA, 25 nt, Artificial Sequence
  Description of Artificial Sequence: Synthetic oligonucleotide
cauguuacucaguguuagagaaauc

SEQ ID NO: 3446 - RNA, 25 nt, Artificial Sequence
  Description of Artificial Sequence: Synthetic oligonucleotide
ccuuccuaaacccaaugacuucccu

SEQ ID NO: 3447 - RNA, 25 nt, Artificial Sequence
  Description of Artificial Sequence: Synthetic oligonucleotide
ugcuccaacccccgccaccucaggg

SEQ ID NO: 3448 - RNA, 25 nt, Artificial Sequence
  Description of Artificial Sequence: Synthetic oligonucleotide
gcacgcaggaccaguuugauugagg

SEQ ID NO: 3449 - RNA, 25 nt, Artificial Sequence
  Description of Artificial Sequence: Synthetic oligonucleotide
gagcugcacugaucacccaaugcau

SEQ ID NO: 3450 - RNA, 25 nt, Artificial Sequence
  Description of Artificial Sequence: Synthetic oligonucleotide
ucacguaccccacugggccagcccu

SEQ ID NO: 3451 - RNA, 25 nt, Artificial Sequence
  Description of Artificial Sequence: Synthetic oligonucleotide
ugcagcccaaaacccagggcaacaa

SEQ ID NO: 3452 - RNA, 25 nt, Artificial Sequence
  Description of Artificial Sequence: Synthetic oligonucleotide
agcccguuagccccaggggaucacu

SEQ ID NO: 3453 - RNA, 25 nt, Artificial Sequence
  Description of Artificial Sequence: Synthetic oligonucleotide
uggcuggccugagcaacaucucggg

SEQ ID NO: 3454 - RNA, 25 nt, Artificial Sequence
  Description of Artificial Sequence: Synthetic oligonucleotide
gaguccucuagcaggccuaagacau

SEQ ID NO: 3455 - RNA, 25 nt, Artificial Sequence
  Description of Artificial Sequence: Synthetic oligonucleotide
ugugaggaggaaaaggaaaaaaagc

SEQ ID NO: 3456 - RNA, 25 nt, Artificial Sequence
  Description of Artificial Sequence: Synthetic oligonucleotide
caaaaagcaagggagaaaagagaaa

SEQ ID NO: 3457 - RNA, 25 nt, Artificial Sequence
  Description of Artificial Sequence: Synthetic oligonucleotide
accgggagaaggcaugagaaagaau

SEQ ID NO: 3458 - RNA, 25 nt, Artificial Sequence
  Description of Artificial Sequence: Synthetic oligonucleotide
uuugagacgcaccaugugggcacgg

SEQ ID NO: 3459 - RNA, 25 nt, Artificial Sequence
  Description of Artificial Sequence: Synthetic oligonucleotide
gagggggacggggcucagcaaugcc

SEQ ID NO: 3460 - RNA, 25 nt, Artificial Sequence
  Description of Artificial Sequence: Synthetic oligonucleotide
cauuucaguggcuucccagcucuga

SEQ ID NO: 3461 - RNA, 25 nt, Artificial Sequence
  Description of Artificial Sequence: Synthetic oligonucleotide
acccuucuacauuugagggcccagc

SEQ ID NO: 3462 - RNA, 25 nt, Artificial Sequence
  Description of Artificial Sequence: Synthetic oligonucleotide
ccaggagcagauggacagcgaugag

SEQ ID NO: 3463 - RNA, 25 nt, Artificial Sequence
  Description of Artificial Sequence: Synthetic oligonucleotide
ggggacauuuucuggauucugggag

SEQ ID NO: 3464 - RNA, 25 nt, Artificial Sequence
  Description of Artificial Sequence: Synthetic oligonucleotide
ggcaagaaaaggacaaauaucuuuu

SEQ ID NO: 3465 - RNA, 25 nt, Artificial Sequence
  Description of Artificial Sequence: Synthetic oligonucleotide
uuuggaacuaaagcaaauuuuagac

SEQ ID NO: 3466 - RNA, 25 nt, Artificial Sequence
  Description of Artificial Sequence: Synthetic oligonucleotide
ccuuuaccuauggaagugguucuau

SEQ ID NO: 3467 - RNA, 25 nt, Artificial Sequence
  Description of Artificial Sequence: Synthetic oligonucleotide
uguccauucucauucguggcauguu

SEQ ID NO: 3468 - RNA, 25 nt, Artificial Sequence
  Description of Artificial Sequence: Synthetic oligonucleotide
uuugauuuguagcacugaggguggc

SEQ ID NO: 3469 - RNA, 25 nt, Artificial Sequence
  Description of Artificial Sequence: Synthetic oligonucleotide
cacucaacucugagcccauacuuuu

SEQ ID NO: 3470 - RNA, 25 nt, Artificial Sequence
  Description of Artificial Sequence: Synthetic oligonucleotide
uggcuccucuaguaagaugcacuga

SEQ ID NO: 3471 - RNA, 25 nt, Artificial Sequence
  Description of Artificial Sequence: Synthetic oligonucleotide
aaaacuuagccagaguuagguuguc

SEQ ID NO: 3472 - RNA, 25 nt, Artificial Sequence
  Description of Artificial Sequence: Synthetic oligonucleotide
cuccaggccaugauggccuuacacu

SEQ ID NO: 3473 - RNA, 25 nt, Artificial Sequence
  Description of Artificial Sequence: Synthetic oligonucleotide
ugaaaaugucacauucuauuuuggg

SEQ ID NO: 3474 - RNA, 25 nt, Artificial Sequence
  Description of Artificial Sequence: Synthetic oligonucleotide
guauuaauauauaguccagacacuu

SEQ ID NO: 3475 - RNA, 25 nt, Artificial Sequence
  Description of Artificial Sequence: Synthetic oligonucleotide
uaacucaauuucuugguauuauucu

SEQ ID NO: 3476 - RNA, 25 nt, Artificial Sequence
  Description of Artificial Sequence: Synthetic oligonucleotide
uguuuugcacaguuaguugugaaag

SEQ ID NO: 3477 - RNA, 25 nt, Artificial Sequence
  Description of Artificial Sequence: Synthetic oligonucleotide
gaaagcugagaagaaugaaaaugca

SEQ ID NO: 3478 - RNA, 25 nt, Artificial Sequence
  Description of Artificial Sequence: Synthetic oligonucleotide
aguccugaggagaguuuucuccaua

SEQ ID NO: 3479 - RNA, 25 nt, Artificial Sequence
  Description of Artificial Sequence: Synthetic oligonucleotide
aucaaaacgagggcugauggaggaa

SEQ ID NO: 3480 - RNA, 25 nt, Artificial Sequence
  Description of Artificial Sequence: Synthetic oligonucleotide
aaaaggucaauaaggucaagggaag

SEQ ID NO: 3481 - RNA, 25 nt, Artificial Sequence
  Description of Artificial Sequence: Synthetic oligonucleotide
gaccccgucucuauaccaaccaaac

SEQ ID NO: 3482 - RNA, 25 nt, Artificial Sequence
  Description of Artificial Sequence: Synthetic oligonucleotide
ccaauucaccaacacaguugggacc

SEQ ID NO: 3483 - RNA, 25 nt, Artificial Sequence
  Description of Artificial Sequence: Synthetic oligonucleotide
ccaaaacacaggaagucagucacgu

SEQ ID NO: 3484 - RNA, 25 nt, Artificial Sequence
  Description of Artificial Sequence: Synthetic oligonucleotide
uuuccuuuucauuuaauggggauuc

SEQ ID NO: 3485 - RNA, 25 nt, Artificial Sequence
  Description of Artificial Sequence: Synthetic oligonucleotide
ccacuaucucacacuaaucugaaag

SEQ ID NO: 3486 - RNA, 25 nt, Artificial Sequence
  Description of Artificial Sequence: Synthetic oligonucleotide
ggauguggaagagcauuagcuggcg

SEQ ID NO: 3487 - RNA, 25 nt, Artificial Sequence
  Description of Artificial Sequence: Synthetic oligonucleotide
gcauauuaagcacuuuaagcuccuu

SEQ ID NO: 3488 - RNA, 25 nt, Artificial Sequence
  Description of Artificial Sequence: Synthetic oligonucleotide
ugaguaaaaaggugguauguaauuu

SEQ ID NO: 3489 - RNA, 25 nt, Artificial Sequence
  Description of Artificial Sequence: Synthetic oligonucleotide
uaugcaagguauuucuccaguuggg

SEQ ID NO: 3490 - RNA, 25 nt, Artificial Sequence
  Description of Artificial Sequence: Synthetic oligonucleotide
gacucaggauauuaguuaaugagcc

SEQ ID NO: 3491 - RNA, 25 nt, Artificial Sequence
  Description of Artificial Sequence: Synthetic oligonucleotide
caucacuagaagaaaagcccauuuu

SEQ ID NO: 3492 - RNA, 25 nt, Artificial Sequence
  Description of Artificial Sequence: Synthetic oligonucleotide
ucaacugcuuugaaacuugccuggg

SEQ ID NO: 3493 - RNA, 25 nt, Artificial Sequence
  Description of Artificial Sequence: Synthetic oligonucleotide
ggucugagcaugaugggaauaggga

SEQ ID NO: 3494 - RNA, 25 nt, Artificial Sequence
  Description of Artificial Sequence: Synthetic oligonucleotide
agacaggguaggaaagggcgccuac

SEQ ID NO: 3495 - RNA, 25 nt, Artificial Sequence
  Description of Artificial Sequence: Synthetic oligonucleotide
cucuucagggucuaaagaucaagug

SEQ ID NO: 3496 - RNA, 25 nt, Artificial Sequence
  Description of Artificial Sequence: Synthetic oligonucleotide
gggccuuggaucgcuaagcuggcuc

SEQ ID NO: 3497 - RNA, 25 nt, Artificial Sequence
  Description of Artificial Sequence: Synthetic oligonucleotide
cuguuugaugcuauuuaugcaaguu

SEQ ID NO: 3498 - RNA, 25 nt, Artificial Sequence
  Description of Artificial Sequence: Synthetic oligonucleotide
augcaaguuagggucuauguauuua

SEQ ID NO: 3499 - RNA, 25 nt, Artificial Sequence
  Description of Artificial Sequence: Synthetic oligonucleotide
aucgagguccgcgggaggcucggag

SEQ ID NO: 3500 - RNA, 25 nt, Artificial Sequence
  Description of Artificial Sequence: Synthetic oligonucleotide
gcgcgccaggcggacacuccucucg

SEQ ID NO: 3501 - RNA, 25 nt, Artificial Sequence
  Description of Artificial Sequence: Synthetic oligonucleotide
ggcuccuccccggcagcggcggcgg

SEQ ID NO: 3502 - RNA, 25 nt, Artificial Sequence
  Description of Artificial Sequence: Synthetic oligonucleotide
gcucggagcgggcuccggggcucgg

SEQ ID NO: 3503 - RNA, 25 nt, Artificial Sequence
  Description of Artificial Sequence: Synthetic oligonucleotide
ggugcagcggccagcgggcgccugg

SEQ ID NO: 3504 - RNA, 25 nt, Artificial Sequence
  Description of Artificial Sequence: Synthetic oligonucleotide
gccagcgggcgccuggcggcgagga

SEQ ID NO: 3505 - RNA, 25 nt, Artificial Sequence
  Description of Artificial Sequence: Synthetic oligonucleotide
gcggcgaggauuacccggggaagug

SEQ ID NO: 3506 - RNA, 25 nt, Artificial Sequence
  Description of Artificial Sequence: Synthetic oligonucleotide
auuacccggggaagugguugucucc

SEQ ID NO: 3507 - RNA, 25 nt, Artificial Sequence
  Description of Artificial Sequence: Synthetic oligonucleotide
gguugucuccuggcuggagccgcga

SEQ ID NO: 3508 - RNA, 25 nt, Artificial Sequence
  Description of Artificial Sequence: Synthetic oligonucleotide
cuggcuggagccgcgagacgggcgc

SEQ ID NO: 3509 - RNA, 25 nt, Artificial Sequence
  Description of Artificial Sequence: Synthetic oligonucleotide
agacgggcgcucagggcgcggggcc

SEQ ID NO: 3510 - RNA, 25 nt, Artificial Sequence
  Description of Artificial Sequence: Synthetic oligonucleotide
cucagggcgcggggccggcggcggc

SEQ ID NO: 3511 - RNA, 25 nt, Artificial Sequence
  Description of Artificial Sequence: Synthetic oligonucleotide
cggcggcggcgaacgagaggacgga

SEQ ID NO: 3512 - RNA, 25 nt, Artificial Sequence
  Description of Artificial Sequence: Synthetic oligonucleotide
cgaacgagaggacggacucuggcgg

SEQ ID NO: 3513 - RNA, 25 nt, Artificial Sequence
  Description of Artificial Sequence: Synthetic oligonucleotide
acucuggcggccgggucguuggccg

SEQ ID NO: 3514 - RNA, 25 nt, Artificial Sequence
  Description of Artificial Sequence: Synthetic oligonucleotide
gccgggucguuggccgcggggagcg

SEQ ID NO: 3515 - RNA, 25 nt, Artificial Sequence
  Description of Artificial Sequence: Synthetic oligonucleotide
gcggggagcgcgggcaccgggcgag

SEQ ID NO: 3516 - RNA, 25 nt, Artificial Sequence
  Description of Artificial Sequence: Synthetic oligonucleotide
gcgggcaccgggcgagcaggccgcg

SEQ ID NO: 3517 - RNA, 25 nt, Artificial Sequence
  Description of Artificial Sequence: Synthetic oligonucleotide
gcaggccgcgucgcgcucaccaugg

SEQ ID NO: 3518 - RNA, 25 nt, Artificial Sequence
  Description of Artificial Sequence: Synthetic oligonucleotide
gucgcgcucaccauggucagcuacu

SEQ ID NO: 3519 - RNA, 25 nt, Artificial Sequence
  Description of Artificial Sequence: Synthetic oligonucleotide
gucagcuacugggacaccggggucc

SEQ ID NO: 3520 - RNA, 25 nt, Artificial Sequence
  Description of Artificial Sequence: Synthetic oligonucleotide
ugggacaccgggguccugcugugcg

SEQ ID NO: 3521 - RNA, 25 nt, Artificial Sequence
  Description of Artificial Sequence: Synthetic oligonucleotide
cugcugugcgcgcugcucagcuguc

SEQ ID NO: 3522 - RNA, 25 nt, Artificial Sequence
  Description of Artificial Sequence: Synthetic oligonucleotide
gcgcugcucagcugucugcuucuca

SEQ ID NO: 3523 - RNA, 25 nt, Artificial Sequence
  Description of Artificial Sequence: Synthetic oligonucleotide
cugcuucucacaggaucuaguucag

SEQ ID NO: 3524 - RNA, 25 nt, Artificial Sequence
  Description of Artificial Sequence: Synthetic oligonucleotide
acaggaucuaguucagguucaaaau

SEQ ID NO: 3525 - RNA, 25 nt, Artificial Sequence
  Description of Artificial Sequence: Synthetic oligonucleotide
gguucaaaauuaaaagauccugaac

SEQ ID NO: 3526 - RNA, 25 nt, Artificial Sequence
  Description of Artificial Sequence: Synthetic oligonucleotide
uuaaaagauccugaacugaguuuaa

SEQ ID NO: 3527 - RNA, 25 nt, Artificial Sequence
  Description of Artificial Sequence: Synthetic oligonucleotide
cugaguuuaaaaggcacccagcaca

SEQ ID NO: 3528 - RNA, 25 nt, Artificial Sequence
  Description of Artificial Sequence: Synthetic oligonucleotide
aaaggcacccagcacaucaugcaag

SEQ ID NO: 3529 - RNA, 25 nt, Artificial Sequence
  Description of Artificial Sequence: Synthetic oligonucleotide
aucaugcaagcaggccagacacugc

SEQ ID NO: 3530 - RNA, 25 nt, Artificial Sequence
  Description of Artificial Sequence: Synthetic oligonucleotide
gcaggccagacacugcaucuccaau

SEQ ID NO: 3531 - RNA, 25 nt, Artificial Sequence
  Description of Artificial Sequence: Synthetic oligonucleotide
caucuccaaugcaggggggaagcag

SEQ ID NO: 3532 - RNA, 25 nt, Artificial Sequence
  Description of Artificial Sequence: Synthetic oligonucleotide
ugcaggggggaagcagcccauaaau

SEQ ID NO: 3533 - RNA, 25 nt, Artificial Sequence
  Description of Artificial Sequence: Synthetic oligonucleotide
gcccauaaauggucuuugccugaaa

SEQ ID NO: 3534 - RNA, 25 nt, Artificial Sequence
  Description of Artificial Sequence: Synthetic oligonucleotide
uggucuuugccugaaauggugagua

SEQ ID NO: 3535 - RNA, 25 nt, Artificial Sequence
  Description of Artificial Sequence: Synthetic oligonucleotide
auggugaguaaggaaagcgaaaggc

SEQ ID NO: 3536 - RNA, 25 nt, Artificial Sequence
  Description of Artificial Sequence: Synthetic oligonucleotide
aaggaaagcgaaaggcugagcauaa

SEQ ID NO: 3537 - RNA, 25 nt, Artificial Sequence
  Description of Artificial Sequence: Synthetic oligonucleotide
cugagcauaacuaaaucugccugug

SEQ ID NO: 3538 - RNA, 25 nt, Artificial Sequence
  Description of Artificial Sequence: Synthetic oligonucleotide
acuaaaucugccuguggaagaaaug

SEQ ID NO: 3539 - RNA, 25 nt, Artificial Sequence
  Description of Artificial Sequence: Synthetic oligonucleotide
ggaagaaauggcaaacaauucugca

SEQ ID NO: 3540 - RNA, 25 nt, Artificial Sequence
  Description of Artificial Sequence: Synthetic oligonucleotide
ggcaaacaauucugcaguacuuuaa

SEQ ID NO: 3541 - RNA, 25 nt, Artificial Sequence
  Description of Artificial Sequence: Synthetic oligonucleotide
aguacuuuaaccuugaacacagcuc

SEQ ID NO: 3542 - RNA, 25 nt, Artificial Sequence
  Description of Artificial Sequence: Synthetic oligonucleotide
accuugaacacagcucaagcaaacc

SEQ ID NO: 3543 - RNA, 25 nt, Artificial Sequence
  Description of Artificial Sequence: Synthetic oligonucleotide
caagcaaaccacacuggcuucuaca

SEQ ID NO: 3544 - RNA, 25 nt, Artificial Sequence
  Description of Artificial Sequence: Synthetic oligonucleotide
cacacuggcuucuacagcugcaaau

SEQ ID NO: 3545 - RNA, 25 nt, Artificial Sequence
  Description of Artificial Sequence: Synthetic oligonucleotide
agcugcaaauaucuagcuguaccua

SEQ ID NO: 3546 - RNA, 25 nt, Artificial Sequence
  Description of Artificial Sequence: Synthetic oligonucleotide
uaucuagcuguaccuacuucaaaga

SEQ ID NO: 3547 - RNA, 25 nt, Artificial Sequence
  Description of Artificial Sequence: Synthetic oligonucleotide
acuucaaagaagaaggaaacagaau

SEQ ID NO: 3548 - RNA, 25 nt, Artificial Sequence
  Description of Artificial Sequence: Synthetic oligonucleotide
aagaaggaaacagaaucugcaaucu

SEQ ID NO: 3549 - RNA, 25 nt, Artificial Sequence
  Description of Artificial Sequence: Synthetic oligonucleotide
ucugcaaucuauauauuuauuagug

SEQ ID NO: 3550 - RNA, 25 nt, Artificial Sequence
  Description of Artificial Sequence: Synthetic oligonucleotide
uauauauuuauuagugauacaggua

SEQ ID NO: 3551 - RNA, 25 nt, Artificial Sequence
  Description of Artificial Sequence: Synthetic oligonucleotide
gauacagguagaccuuucguagaga

SEQ ID NO: 3552 - RNA, 25 nt, Artificial Sequence
  Description of Artificial Sequence: Synthetic oligonucleotide
agaccuuucguagagauguacagug

SEQ ID NO: 3553 - RNA, 25 nt, Artificial Sequence
  Description of Artificial Sequence: Synthetic oligonucleotide
auguacagugaaauccccgaaauua

SEQ ID NO: 3554 - RNA, 25 nt, Artificial Sequence
  Description of Artificial Sequence: Synthetic oligonucleotide
gaaauccccgaaauuauacacauga

SEQ ID NO: 3555 - RNA, 25 nt, Artificial Sequence
  Description of Artificial Sequence: Synthetic oligonucleotide
auacacaugacugaaggaagggagc

SEQ ID NO: 3556 - RNA, 25 nt, Artificial Sequence
  Description of Artificial Sequence: Synthetic oligonucleotide
acugaaggaagggagcucgucauuc

SEQ ID NO: 3557 - RNA, 25 nt, Artificial Sequence
  Description of Artificial Sequence: Synthetic oligonucleotide
cucgucauucccugccggguuacgu

SEQ ID NO: 3558 - RNA, 25 nt, Artificial Sequence
  Description of Artificial Sequence: Synthetic oligonucleotide
cccugccggguuacgucaccuaaca

SEQ ID NO: 3559 - RNA, 25 nt, Artificial Sequence
  Description of Artificial Sequence: Synthetic oligonucleotide
ucaccuaacaucacuguuacuuuaa

SEQ ID NO: 3560 - RNA, 25 nt, Artificial Sequence
  Description of Artificial Sequence: Synthetic oligonucleotide
aucacuguuacuuuaaaaaaguuuc

SEQ ID NO: 3561 - RNA, 25 nt, Artificial Sequence
  Description of Artificial Sequence: Synthetic oligonucleotide
aaaaaguuuccacuugacacuuuga

SEQ ID NO: 3562 - RNA, 25 nt, Artificial Sequence
  Description of Artificial Sequence: Synthetic oligonucleotide
ccacuugacacuuugaucccugaug

SEQ ID NO: 3563 - RNA, 25 nt, Artificial Sequence
  Description of Artificial Sequence: Synthetic oligonucleotide
aucccugauggaaaacgcauaaucu

SEQ ID NO: 3564 - RNA, 25 nt, Artificial Sequence
  Description of Artificial Sequence: Synthetic oligonucleotide
ggaaaacgcauaaucugggacagua

SEQ ID NO: 3565 - RNA, 25 nt, Artificial Sequence
  Description of Artificial Sequence: Synthetic oligonucleotide
ugggacaguagaaagggcuucauca

SEQ ID NO: 3566 - RNA, 25 nt, Artificial Sequence
  Description of Artificial Sequence: Synthetic oligonucleotide
agaaagggcuucaucauaucaaaug

SEQ ID NO: 3567 - RNA, 25 nt, Artificial Sequence
  Description of Artificial Sequence: Synthetic oligonucleotide
auaucaaaugcaacguacaaagaaa

SEQ ID NO: 3568 - RNA, 25 nt, Artificial Sequence
  Description of Artificial Sequence: Synthetic oligonucleotide
gcaacguacaaagaaauagggcuuc

SEQ ID NO: 3569 - RNA, 25 nt, Artificial Sequence
  Description of Artificial Sequence: Synthetic oligonucleotide
auagggcuucugaccugugaagcaa

SEQ ID NO: 3570 - RNA, 25 nt, Artificial Sequence
  Description of Artificial Sequence: Synthetic oligonucleotide
cugaccugugaagcaacagucaaug

SEQ ID NO: 3571 - RNA, 25 nt, Artificial Sequence
  Description of Artificial Sequence: Synthetic oligonucleotide
acagucaaugggcauuuguauaaga

SEQ ID NO: 3572 - RNA, 25 nt, Artificial Sequence
  Description of Artificial Sequence: Synthetic oligonucleotide
gggcauuuguauaagacaaacuauc

SEQ ID NO: 3573 - RNA, 25 nt, Artificial Sequence
  Description of Artificial Sequence: Synthetic oligonucleotide
acaaacuaucucacacaucgacaaa

SEQ ID NO: 3574 - RNA, 25 nt, Artificial Sequence
  Description of Artificial Sequence: Synthetic oligonucleotide
cucacacaucgacaaaccaauacaa

SEQ ID NO: 3575 - RNA, 25 nt, Artificial Sequence
  Description of Artificial Sequence: Synthetic oligonucleotide
accaauacaaucauagauguccaaa

SEQ ID NO: 3576 - RNA, 25 nt, Artificial Sequence
  Description of Artificial Sequence: Synthetic oligonucleotide
aucauagauguccaaauaagcacac

SEQ ID NO: 3577 - RNA, 25 nt, Artificial Sequence
  Description of Artificial Sequence: Synthetic oligonucleotide
auaagcacaccacgcccagucaaau

SEQ ID NO: 3578 - RNA, 25 nt, Artificial Sequence
  Description of Artificial Sequence: Synthetic oligonucleotide
ccacgcccagucaaauuacuuagag

SEQ ID NO: 3579 - RNA, 25 nt, Artificial Sequence
  Description of Artificial Sequence: Synthetic oligonucleotide
uuacuuagaggccauacucuugucc

SEQ ID NO: 3580 - RNA, 25 nt, Artificial Sequence
  Description of Artificial Sequence: Synthetic oligonucleotide
ggccauacucuuguccucaauugua

SEQ ID NO: 3581 - RNA, 25 nt, Artificial Sequence
  Description of Artificial Sequence: Synthetic oligonucleotide
cucaauuguacugcuaccacucccu

SEQ ID NO: 3582 - RNA, 25 nt, Artificial Sequence
  Description of Artificial Sequence: Synthetic oligonucleotide
acugcuaccacucccuugaacacga

SEQ ID NO: 3583 - RNA, 25 nt, Artificial Sequence
  Description of Artificial Sequence: Synthetic oligonucleotide
uugaacacgagaguucaaaugaccu

SEQ ID NO: 3584 - RNA, 25 nt, Artificial Sequence
  Description of Artificial Sequence: Synthetic oligonucleotide
agaguucaaaugaccuggaguuacc

SEQ ID NO: 3585 - RNA, 25 nt, Artificial Sequence
  Description of Artificial Sequence: Synthetic oligonucleotide
uggaguuacccugaugaaaaaaaua

SEQ ID NO: 3586 - RNA, 25 nt, Artificial Sequence
  Description of Artificial Sequence: Synthetic oligonucleotide
ccugaugaaaaaaauaagagagcuu

SEQ ID NO: 3587 - RNA, 25 nt, Artificial Sequence
  Description of Artificial Sequence: Synthetic oligonucleotide
aagagagcuuccguaaggcgacgaa

SEQ ID NO: 3588 - RNA, 25 nt, Artificial Sequence
  Description of Artificial Sequence: Synthetic oligonucleotide
uccguaaggcgacgaauugaccaaa

SEQ ID NO: 3589 - RNA, 25 nt, Artificial Sequence
  Description of Artificial Sequence: Synthetic oligonucleotide
auugaccaaagcaauucccaugcca

SEQ ID NO: 3590 - RNA, 25 nt, Artificial Sequence
  Description of Artificial Sequence: Synthetic oligonucleotide
agcaauucccaugccaacauauucu

SEQ ID NO: 3591 - RNA, 25 nt, Artificial Sequence
  Description of Artificial Sequence: Synthetic oligonucleotide
aacauauucuacaguguucuuacua

SEQ ID NO: 3592 - RNA, 25 nt, Artificial Sequence
  Description of Artificial Sequence: Synthetic oligonucleotide
uacaguguucuuacuauugacaaaa

SEQ ID NO: 3593 - RNA, 25 nt, Artificial Sequence
  Description of Artificial Sequence: Synthetic oligonucleotide
auugacaaaaugcagaacaaagaca

SEQ ID NO: 3594 - RNA, 25 nt, Artificial Sequence
  Description of Artificial Sequence: Synthetic oligonucleotide
augcagaacaaagacaaaggacuuu

SEQ ID NO: 3595 - RNA, 25 nt, Artificial Sequence
  Description of Artificial Sequence: Synthetic oligonucleotide
aaaggacuuuauacuugucguguaa

SEQ ID NO: 3596 - RNA, 25 nt, Artificial Sequence
  Description of Artificial Sequence: Synthetic oligonucleotide
uauacuugucguguaaggaguggac

SEQ ID NO: 3597 - RNA, 25 nt, Artificial Sequence
  Description of Artificial Sequence: Synthetic oligonucleotide
aggaguggaccaucauucaaaucug

SEQ ID NO: 3598 - RNA, 25 nt, Artificial Sequence
  Description of Artificial Sequence: Synthetic oligonucleotide
ccaucauucaaaucuguuaacaccu

SEQ ID NO: 3599 - RNA, 25 nt, Artificial Sequence
  Description of Artificial Sequence: Synthetic oligonucleotide
guuaacaccucagugcauauauaug

SEQ ID NO: 3600 - RNA, 25 nt, Artificial Sequence
  Description of Artificial Sequence: Synthetic oligonucleotide
ucagugcauauauaugauaaagcau

SEQ ID NO: 3601 - RNA, 25 nt, Artificial Sequence
  Description of Artificial Sequence: Synthetic oligonucleotide
gauaaagcauucaucacugugaaac

SEQ ID NO: 3602 - RNA, 25 nt, Artificial Sequence
  Description of Artificial Sequence: Synthetic oligonucleotide
uucaucacugugaaacaucgaaaac

SEQ ID NO: 3603 - RNA, 25 nt, Artificial Sequence
  Description of Artificial Sequence: Synthetic oligonucleotide
caucgaaaacagcaggugcuugaaa

SEQ ID NO: 3604 - RNA, 25 nt, Artificial Sequence
  Description of Artificial Sequence: Synthetic oligonucleotide
cagcaggugcuugaaaccguagcug

SEQ ID NO: 3605 - RNA, 25 nt, Artificial Sequence
  Description of Artificial Sequence: Synthetic oligonucleotide
accguagcuggcaagcggucuuacc

SEQ ID NO: 3606 - RNA, 25 nt, Artificial Sequence
  Description of Artificial Sequence: Synthetic oligonucleotide
ggcaagcggucuuaccggcucucua

SEQ ID NO: 3607 - RNA, 25 nt, Artificial Sequence
  Description of Artificial Sequence: Synthetic oligonucleotide
cggcucucuaugaaagugaaggcau

SEQ ID NO: 3608 - RNA, 25 nt, Artificial Sequence
  Description of Artificial Sequence: Synthetic oligonucleotide
augaaagugaaggcauuucccucgc

SEQ ID NO: 3609 - RNA, 25 nt, Artificial Sequence
  Description of Artificial Sequence: Synthetic oligonucleotide
uuucccucgccggaaguuguauggu

SEQ ID NO: 3610 - RNA, 25 nt, Artificial Sequence
  Description of Artificial Sequence: Synthetic oligonucleotide
ccggaaguuguaugguuaaaagaug

SEQ ID NO: 3611 - RNA, 25 nt, Artificial Sequence
  Description of Artificial Sequence: Synthetic oligonucleotide
uuaaaagauggguuaccugcgacug

SEQ ID NO: 3612 - RNA, 25 nt, Artificial Sequence
  Description of Artificial Sequence: Synthetic oligonucleotide
ggguuaccugcgacugagaaaucug

SEQ ID NO: 3613 - RNA, 25 nt, Artificial Sequence
  Description of Artificial Sequence: Synthetic oligonucleotide
gagaaaucugcucgcuauuugacuc

SEQ ID NO: 3614 - RNA, 25 nt, Artificial Sequence
  Description of Artificial Sequence: Synthetic oligonucleotide
gcucgcuauuugacucguggcuacu

SEQ ID NO: 3615 - RNA, 25 nt, Artificial Sequence
  Description of Artificial Sequence: Synthetic oligonucleotide
cguggcuacucguuaauuaucaagg

SEQ ID NO: 3616 - RNA, 25 nt, Artificial Sequence
  Description of Artificial Sequence: Synthetic oligonucleotide
ucguuaauuaucaaggacguaacug

SEQ ID NO: 3617 - RNA, 25 nt, Artificial Sequence
  Description of Artificial Sequence: Synthetic oligonucleotide
gacguaacugaagaggaugcaggga

SEQ ID NO: 3618 - RNA, 25 nt, Artificial Sequence
  Description of Artificial Sequence: Synthetic oligonucleotide
gaagaggaugcagggaauuauacaa

SEQ ID NO: 3619 - RNA, 25 nt, Artificial Sequence
  Description of Artificial Sequence: Synthetic oligonucleotide
aauuauacaaucuugcugagcauaa

SEQ ID NO: 3620 - RNA, 25 nt, Artificial Sequence
  Description of Artificial Sequence: Synthetic oligonucleotide
aucuugcugagcauaaaacagucaa

SEQ ID NO: 3621 - RNA, 25 nt, Artificial Sequence
  Description of Artificial Sequence: Synthetic oligonucleotide
aaacagucaaauguguuuaaaaacc

SEQ ID NO: 3622 - RNA, 25 nt, Artificial Sequence
  Description of Artificial Sequence: Synthetic oligonucleotide
aauguguuuaaaaaccucacugcca

SEQ ID NO: 3623 - RNA, 25 nt, Artificial Sequence
  Description of Artificial Sequence: Synthetic oligonucleotide
cucacugccacucuaauugucaaug

SEQ ID NO: 3624 - RNA, 25 nt, Artificial Sequence
  Description of Artificial Sequence: Synthetic oligonucleotide
acucuaauugucaaugugaaacccc

SEQ ID NO: 3625 - RNA, 25 nt, Artificial Sequence
  Description of Artificial Sequence: Synthetic oligonucleotide
gugaaaccccagauuuacgaaaagg

SEQ ID NO: 3626 - RNA, 25 nt, Artificial Sequence
  Description of Artificial Sequence: Synthetic oligonucleotide
cagauuuacgaaaaggccgugucau

SEQ ID NO: 3627 - RNA, 25 nt, Artificial Sequence
  Description of Artificial Sequence: Synthetic oligonucleotide
gccgugucaucguuuccagacccgg

SEQ ID NO: 3628 - RNA, 25 nt, Artificial Sequence
  Description of Artificial Sequence: Synthetic oligonucleotide
ucguuuccagacccggcucucuacc

SEQ ID NO: 3629 - RNA, 25 nt, Artificial Sequence
  Description of Artificial Sequence: Synthetic oligonucleotide
gcucucuacccacugggcagcagac

SEQ ID NO: 3630 - RNA, 25 nt, Artificial Sequence
  Description of Artificial Sequence: Synthetic oligonucleotide
ccacugggcagcagacaaauccuga

SEQ ID NO: 3631 - RNA, 25 nt, Artificial Sequence
  Description of Artificial Sequence: Synthetic oligonucleotide
caaauccugacuuguaccgcauaug

SEQ ID NO: 3632 - RNA, 25 nt, Artificial Sequence
  Description of Artificial Sequence: Synthetic oligonucleotide
acuuguaccgcauaugguaucccuc

SEQ ID NO: 3633 - RNA, 25 nt, Artificial Sequence
  Description of Artificial Sequence: Synthetic oligonucleotide
gguaucccucaaccuacaaucaagu

SEQ ID NO: 3634 - RNA, 25 nt, Artificial Sequence
  Description of Artificial Sequence: Synthetic oligonucleotide
caaccuacaaucaagugguucuggc

SEQ ID NO: 3635 - RNA, 25 nt, Artificial Sequence
  Description of Artificial Sequence: Synthetic oligonucleotide
ugguucuggcaccccuguaaccaua

SEQ ID NO: 3636 - RNA, 25 nt, Artificial Sequence
  Description of Artificial Sequence: Synthetic oligonucleotide
caccccuguaaccauaaucauuccg

SEQ ID NO: 3637 - RNA, 25 nt, Artificial Sequence
  Description of Artificial Sequence: Synthetic oligonucleotide
aaucauuccgaagcaaggugugacu

SEQ ID NO: 3638 - RNA, 25 nt, Artificial Sequence
  Description of Artificial Sequence: Synthetic oligonucleotide
gaagcaaggugugacuuuuguucca

SEQ ID NO: 3639 - RNA, 25 nt, Artificial Sequence
  Description of Artificial Sequence: Synthetic oligonucleotide
uuuuguuccaauaaugaagaguccu

SEQ ID NO: 3640 - RNA, 25 nt, Artificial Sequence
  Description of Artificial Sequence: Synthetic oligonucleotide
aauaaugaagaguccuuuauccugg

SEQ ID NO: 3641 - RNA, 25 nt, Artificial Sequence
  Description of Artificial Sequence: Synthetic oligonucleotide
uuuauccuggaugcugacagcaaca

SEQ ID NO: 3642 - RNA, 25 nt, Artificial Sequence
  Description of Artificial Sequence: Synthetic oligonucleotide
gaugcugacagcaacaugggaaaca

SEQ ID NO: 3643 - RNA, 25 nt, Artificial Sequence
  Description of Artificial Sequence: Synthetic oligonucleotide
augggaaacagaauugagagcauca

SEQ ID NO: 3644 - RNA, 25 nt, Artificial Sequence
  Description of Artificial Sequence: Synthetic oligonucleotide
agaauugagagcaucacucagcgca

SEQ ID NO: 3645 - RNA, 25 nt, Artificial Sequence
  Description of Artificial Sequence: Synthetic oligonucleotide
acucagcgcauggcaauaauagaag

SEQ ID NO: 3646 - RNA, 25 nt, Artificial Sequence
  Description of Artificial Sequence: Synthetic oligonucleotide
auggcaauaauagaaggaaagaaua

SEQ ID NO: 3647 - RNA, 25 nt, Artificial Sequence
  Description of Artificial Sequence: Synthetic oligonucleotide
ggaaagaauaagauggcuagcaccu

SEQ ID NO: 3648 - RNA, 25 nt, Artificial Sequence
  Description of Artificial Sequence: Synthetic oligonucleotide
aagauggcuagcaccuugguugugg

SEQ ID NO: 3649 - RNA, 25 nt, Artificial Sequence
  Description of Artificial Sequence: Synthetic oligonucleotide
uugguuguggcugacucuagaauuu

SEQ ID NO: 3650 - RNA, 25 nt, Artificial Sequence
  Description of Artificial Sequence: Synthetic oligonucleotide
gcugacucuagaauuucuggaaucu

SEQ ID NO: 3651 - RNA, 25 nt, Artificial Sequence
  Description of Artificial Sequence: Synthetic oligonucleotide
ucuggaaucuacauuugcauagcuu

SEQ ID NO: 3652 - RNA, 25 nt, Artificial Sequence
  Description of Artificial Sequence: Synthetic oligonucleotide
uacauuugcauagcuuccaauaaag

SEQ ID NO: 3653 - RNA, 25 nt, Artificial Sequence
  Description of Artificial Sequence: Synthetic oligonucleotide
uccaauaaaguugggacugugggaa

SEQ ID NO: 3654 - RNA, 25 nt, Artificial Sequence
  Description of Artificial Sequence: Synthetic oligonucleotide
guugggacugugggaagaaacauaa

SEQ ID NO: 3655 - RNA, 25 nt, Artificial Sequence
  Description of Artificial Sequence: Synthetic oligonucleotide
agaaacauaagcuuuuauaucacag

SEQ ID NO: 3656 - RNA, 25 nt, Artificial Sequence
  Description of Artificial Sequence: Synthetic oligonucleotide
agcuuuuauaucacagaugugccaa

SEQ ID NO: 3657 - RNA, 25 nt, Artificial Sequence
  Description of Artificial Sequence: Synthetic oligonucleotide
gaugugccaaauggguuucauguua

SEQ ID NO: 3658 - RNA, 25 nt, Artificial Sequence
  Description of Artificial Sequence: Synthetic oligonucleotide
aauggguuucauguuaacuuggaaa

SEQ ID NO: 3659 - RNA, 25 nt, Artificial Sequence
  Description of Artificial Sequence: Synthetic oligonucleotide
aacuuggaaaaaaugccgacggaag

SEQ ID NO: 3660 - RNA, 25 nt, Artificial Sequence
  Description of Artificial Sequence: Synthetic oligonucleotide
aaaaugccgacggaaggagaggacc

SEQ ID NO: 3661 - RNA, 25 nt, Artificial Sequence
  Description of Artificial Sequence: Synthetic oligonucleotide
ggagaggaccugaaacugucuugca

SEQ ID NO: 3662 - RNA, 25 nt, Artificial Sequence
  Description of Artificial Sequence: Synthetic oligonucleotide
cugaaacugucuugcacaguuaaca

SEQ ID NO: 3663 - RNA, 25 nt, Artificial Sequence
  Description of Artificial Sequence: Synthetic oligonucleotide
acaguuaacaaguucuuauacagag

SEQ ID NO: 3664 - RNA, 25 nt, Artificial Sequence
  Description of Artificial Sequence: Synthetic oligonucleotide
aaguucuuauacagagacguuacuu

SEQ ID NO: 3665 - RNA, 25 nt, Artificial Sequence
  Description of Artificial Sequence: Synthetic oligonucleotide
gacguuacuuggauuuuacugcgga

SEQ ID NO: 3666 - RNA, 25 nt, Artificial Sequence
  Description of Artificial Sequence: Synthetic oligonucleotide
uggauuuuacugcggacaguuaaua

SEQ ID NO: 3667 - RNA, 25 nt, Artificial Sequence
  Description of Artificial Sequence: Synthetic oligonucleotide
acaguuaauaacagaacaaugcacu

SEQ ID NO: 3668 - RNA, 25 nt, Artificial Sequence
  Description of Artificial Sequence: Synthetic oligonucleotide
aacagaacaaugcacuacaguauua

SEQ ID NO: 3669 - RNA, 25 nt, Artificial Sequence
  Description of Artificial Sequence: Synthetic oligonucleotide
uacaguauuagcaagcaaaaaaugg

SEQ ID NO: 3670 - RNA, 25 nt, Artificial Sequence
  Description of Artificial Sequence: Synthetic oligonucleotide
agcaagcaaaaaauggccaucacua

SEQ ID NO: 3671 - RNA, 25 nt, Artificial Sequence
  Description of Artificial Sequence: Synthetic oligonucleotide
gccaucacuaaggagcacuccauca

SEQ ID NO: 3672 - RNA, 25 nt, Artificial Sequence
  Description of Artificial Sequence: Synthetic oligonucleotide
aaggagcacuccaucacucuuaauc

SEQ ID NO: 3673 - RNA, 25 nt, Artificial Sequence
  Description of Artificial Sequence: Synthetic oligonucleotide
acucuuaaucuuaccaucaugaaug

SEQ ID NO: 3674 - RNA, 25 nt, Artificial Sequence
  Description of Artificial Sequence: Synthetic oligonucleotide
cuuaccaucaugaauguuucccugc

SEQ ID NO: 3675 - RNA, 25 nt, Artificial Sequence
  Description of Artificial Sequence: Synthetic oligonucleotide
guuucccugcaagauucaggcaccu

SEQ ID NO: 3676 - RNA, 25 nt, Artificial Sequence
  Description of Artificial Sequence: Synthetic oligonucleotide
caagauucaggcaccuaugccugca

SEQ ID NO: 3677 - RNA, 25 nt, Artificial Sequence
  Description of Artificial Sequence: Synthetic oligonucleotide
uaugccugcagagccaggaauguau

SEQ ID NO: 3678 - RNA, 25 nt, Artificial Sequence
  Description of Artificial Sequence: Synthetic oligonucleotide
agagccaggaauguauacacagggg

SEQ ID NO: 3679 - RNA, 25 nt, Artificial Sequence
  Description of Artificial Sequence: Synthetic oligonucleotide
uacacaggggaagaaauccuccaga

SEQ ID NO: 3680 - RNA, 25 nt, Artificial Sequence
  Description of Artificial Sequence: Synthetic oligonucleotide
gaagaaauccuccagaagaaagaaa

SEQ ID NO: 3681 - RNA, 25 nt, Artificial Sequence
  Description of Artificial Sequence: Synthetic oligonucleotide
aagaaagaaauuacaaucagagauc

SEQ ID NO: 3682 - RNA, 25 nt, Artificial Sequence
  Description of Artificial Sequence: Synthetic oligonucleotide
auuacaaucagagaucaggaagcac

SEQ ID NO: 3683 - RNA, 25 nt, Artificial Sequence
  Description of Artificial Sequence: Synthetic oligonucleotide
caggaagcaccauaccuccugcgaa

SEQ ID NO: 3684 - RNA, 25 nt, Artificial Sequence
  Description of Artificial Sequence: Synthetic oligonucleotide
ccauaccuccugcgaaaccucagug

SEQ ID NO: 3685 - RNA, 25 nt, Artificial Sequence
  Description of Artificial Sequence: Synthetic oligonucleotide
aaccucagugaucacacaguggcca

SEQ ID NO: 3686 - RNA, 25 nt, Artificial Sequence
  Description of Artificial Sequence: Synthetic oligonucleotide
gaucacacaguggccaucagcaguu

SEQ ID NO: 3687 - RNA, 25 nt, Artificial Sequence
  Description of Artificial Sequence: Synthetic oligonucleotide
aucagcaguuccaccacuuuagacu

SEQ ID NO: 3688 - RNA, 25 nt, Artificial Sequence
  Description of Artificial Sequence: Synthetic oligonucleotide
uccaccacuuuagacugucaugcua

SEQ ID NO: 3689 - RNA, 25 nt, Artificial Sequence
  Description of Artificial Sequence: Synthetic oligonucleotide
ugucaugcuaaugguguccccgagc

SEQ ID NO: 3690 - RNA, 25 nt, Artificial Sequence
  Description of Artificial Sequence: Synthetic oligonucleotide
aaugguguccccgagccucagauca

SEQ ID NO: 3691 - RNA, 25 nt, Artificial Sequence
  Description of Artificial Sequence: Synthetic oligonucleotide
ccucagaucacuugguuuaaaaaca

SEQ ID NO: 3692 - RNA, 25 nt, Artificial Sequence
  Description of Artificial Sequence: Synthetic oligonucleotide
acuugguuuaaaaacaaccacaaaa

SEQ ID NO: 3693 - RNA, 25 nt, Artificial Sequence
  Description of Artificial Sequence: Synthetic oligonucleotide
aaccacaaaauacaacaagagccug

SEQ ID NO: 3694 - RNA, 25 nt, Artificial Sequence
  Description of Artificial Sequence: Synthetic oligonucleotide
auacaacaagagccuggaauuauuu

SEQ ID NO: 3695 - RNA, 25 nt, Artificial Sequence
  Description of Artificial Sequence: Synthetic oligonucleotide
ggaauuauuuuaggaccaggaagca

SEQ ID NO: 3696 - RNA, 25 nt, Artificial Sequence
  Description of Artificial Sequence: Synthetic oligonucleotide
uuaggaccaggaagcagcacgcugu

SEQ ID NO: 3697 - RNA, 25 nt, Artificial Sequence
  Description of Artificial Sequence: Synthetic oligonucleotide
agcacgcuguuuauugaaagaguca

SEQ ID NO: 3698 - RNA, 25 nt, Artificial Sequence
  Description of Artificial Sequence: Synthetic oligonucleotide
uuuauugaaagagucacagaagagg

SEQ ID NO: 3699 - RNA, 25 nt, Artificial Sequence
  Description of Artificial Sequence: Synthetic oligonucleotide
acagaagaggaugaaggugucuauc

SEQ ID NO: 3700 - RNA, 25 nt, Artificial Sequence
  Description of Artificial Sequence: Synthetic oligonucleotide
gaugaaggugucuaucacugcaaag

SEQ ID NO: 3701 - RNA, 25 nt, Artificial Sequence
  Description of Artificial Sequence: Synthetic oligonucleotide
cacugcaaagccaccaaccagaagg

SEQ ID NO: 3702 - RNA, 25 nt, Artificial Sequence
  Description of Artificial Sequence: Synthetic oligonucleotide
gccaccaaccagaagggcucugugg

SEQ ID NO: 3703 - RNA, 25 nt, Artificial Sequence
  Description of Artificial Sequence: Synthetic oligonucleotide
ggcucuguggaaaguucagcauacc

SEQ ID NO: 3704 - RNA, 25 nt, Artificial Sequence
  Description of Artificial Sequence: Synthetic oligonucleotide
gaaaguucagcauaccucacuguuc

SEQ ID NO: 3705 - RNA, 25 nt, Artificial Sequence
  Description of Artificial Sequence: Synthetic oligonucleotide
cucacuguucaaggaaccucggaca

SEQ ID NO: 3706 - RNA, 25 nt, Artificial Sequence
  Description of Artificial Sequence: Synthetic oligonucleotide
caaggaaccucggacaagucuaauc

SEQ ID NO: 3707 - RNA, 25 nt, Artificial Sequence
  Description of Artificial Sequence: Synthetic oligonucleotide
aagucuaaucuggagcugaucacuc

SEQ ID NO: 3708 - RNA, 25 nt, Artificial Sequence
  Description of Artificial Sequence: Synthetic oligonucleotide
cuggagcugaucacucuaacaugca

SEQ ID NO: 3709 - RNA, 25 nt, Artificial Sequence
  Description of Artificial Sequence: Synthetic oligonucleotide
cuaacaugcaccuguguggcugcga

SEQ ID NO: 3710 - RNA, 25 nt, Artificial Sequence
  Description of Artificial Sequence: Synthetic oligonucleotide
accuguguggcugcgacucucuucu

SEQ ID NO: 3711 - RNA, 25 nt, Artificial Sequence
  Description of Artificial Sequence: Synthetic oligonucleotide
acucucuucuggcuccuauuaaccc

SEQ ID NO: 3712 - RNA, 25 nt, Artificial Sequence
  Description of Artificial Sequence: Synthetic oligonucleotide
uggcuccuauuaacccucuuuaucc

SEQ ID NO: 3713 - RNA, 25 nt, Artificial Sequence
  Description of Artificial Sequence: Synthetic oligonucleotide
cucuuuauccgaaaaaugaaaaggu

SEQ ID NO: 3714 - RNA, 25 nt, Artificial Sequence
  Description of Artificial Sequence: Synthetic oligonucleotide
cgaaaaaugaaaaggucuucuucug

SEQ ID NO: 3715 - RNA, 25 nt, Artificial Sequence
  Description of Artificial Sequence: Synthetic oligonucleotide
ucuucuucugaaauaaagacugacu

SEQ ID NO: 3716 - RNA, 25 nt, Artificial Sequence
  Description of Artificial Sequence: Synthetic oligonucleotide
gaaauaaagacugacuaccuaucaa

SEQ ID NO: 3717 - RNA, 25 nt, Artificial Sequence
  Description of Artificial Sequence: Synthetic oligonucleotide
uaccuaucaauuauaauggacccag

SEQ ID NO: 3718 - RNA, 25 nt, Artificial Sequence
  Description of Artificial Sequence: Synthetic oligonucleotide
auuauaauggacccagaugaaguuc

SEQ ID NO: 3719 - RNA, 25 nt, Artificial Sequence
  Description of Artificial Sequence: Synthetic oligonucleotide
gaugaaguuccuuuggaugagcagu

SEQ ID NO: 3720 - RNA, 25 nt, Artificial Sequence
  Description of Artificial Sequence: Synthetic oligonucleotide
ccuuuggaugagcagugugagcggc

SEQ ID NO: 3721 - RNA, 25 nt, Artificial Sequence
  Description of Artificial Sequence: Synthetic oligonucleotide
ugugagcggcucccuuaugaugcca

SEQ ID NO: 3722 - RNA, 25 nt, Artificial Sequence
  Description of Artificial Sequence: Synthetic oligonucleotide
cucccuuaugaugccagcaaguggg

SEQ ID NO: 3723 - RNA, 25 nt, Artificial Sequence
  Description of Artificial Sequence: Synthetic oligonucleotide
agcaagugggaguuugcccgggaga

SEQ ID NO: 3724 - RNA, 25 nt, Artificial Sequence
  Description of Artificial Sequence: Synthetic oligonucleotide
gaguuugcccgggagagacuuaaac

SEQ ID NO: 3725 - RNA, 25 nt, Artificial Sequence
  Description of Artificial Sequence: Synthetic oligonucleotide
agacuuaaacugggcaaaucacuug

SEQ ID NO: 3726 - RNA, 25 nt, Artificial Sequence
  Description of Artificial Sequence: Synthetic oligonucleotide
cugggcaaaucacuuggaagagggg

SEQ ID NO: 3727 - RNA, 25 nt, Artificial Sequence
  Description of Artificial Sequence: Synthetic oligonucleotide
ggaagaggggcuuuuggaaaagugg

SEQ ID NO: 3728 - RNA, 25 nt, Artificial Sequence
  Description of Artificial Sequence: Synthetic oligonucleotide
gcuuuuggaaaagugguucaagcau

SEQ ID NO: 3729 - RNA, 25 nt, Artificial Sequence
  Description of Artificial Sequence: Synthetic oligonucleotide
guucaagcaucagcauuuggcauua

SEQ ID NO: 3730 - RNA, 25 nt, Artificial Sequence
  Description of Artificial Sequence: Synthetic oligonucleotide
ucagcauuuggcauuaagaaaucac

SEQ ID NO: 3731 - RNA, 25 nt, Artificial Sequence
  Description of Artificial Sequence: Synthetic oligonucleotide
aagaaaucaccuacgugccggacug

SEQ ID NO: 3732 - RNA, 25 nt, Artificial Sequence
  Description of Artificial Sequence: Synthetic oligonucleotide
ccuacgugccggacuguggcuguga

SEQ ID NO: 3733 - RNA, 25 nt, Artificial Sequence
  Description of Artificial Sequence: Synthetic oligonucleotide
guggcugugaaaaugcugaaagagg

SEQ ID NO: 3734 - RNA, 25 nt, Artificial Sequence
  Description of Artificial Sequence: Synthetic oligonucleotide
aaaaugcugaaagagggggccacgg

SEQ ID NO: 3735 - RNA, 25 nt, Artificial Sequence
  Description of Artificial Sequence: Synthetic oligonucleotide
ggggccacggccagcgaguacaaag

SEQ ID NO: 3736 - RNA, 25 nt, Artificial Sequence
  Description of Artificial Sequence: Synthetic oligonucleotide
gccagcgaguacaaagcucugauga

SEQ ID NO: 3737 - RNA, 25 nt, Artificial Sequence
  Description of Artificial Sequence: Synthetic oligonucleotide
gcucugaugacugagcuaaaaaucu

SEQ ID NO: 3738 - RNA, 25 nt, Artificial Sequence
  Description of Artificial Sequence: Synthetic oligonucleotide
acugagcuaaaaaucuugacccaca

SEQ ID NO: 3739 - RNA, 25 nt, Artificial Sequence
  Description of Artificial Sequence: Synthetic oligonucleotide
uugacccacauuggccaccaucuga

SEQ ID NO: 3740 - RNA, 25 nt, Artificial Sequence
  Description of Artificial Sequence: Synthetic oligonucleotide
auuggccaccaucugaacgugguua

SEQ ID NO: 3741 - RNA, 25 nt, Artificial Sequence
  Description of Artificial Sequence: Synthetic oligonucleotide
aacgugguuaaccugcugggagccu

SEQ ID NO: 3742 - RNA, 25 nt, Artificial Sequence
  Description of Artificial Sequence: Synthetic oligonucleotide
aaccugcugggagccugcaccaagc

SEQ ID NO: 3743 - RNA, 25 nt, Artificial Sequence
  Description of Artificial Sequence: Synthetic oligonucleotide
ugcaccaagcaaggagggccucuga

SEQ ID NO: 3744 - RNA, 25 nt, Artificial Sequence
  Description of Artificial Sequence: Synthetic oligonucleotide
caaggagggccucugauggugauug

SEQ ID NO: 3745 - RNA, 25 nt, Artificial Sequence
  Description of Artificial Sequence: Synthetic oligonucleotide
auggugauuguugaauacugcaaau

SEQ ID NO: 3746 - RNA, 25 nt, Artificial Sequence
  Description of Artificial Sequence: Synthetic oligonucleotide
guugaauacugcaaauauggaaauc

SEQ ID NO: 3747 - RNA, 25 nt, Artificial Sequence
  Description of Artificial Sequence: Synthetic oligonucleotide
uauggaaaucucuccaacuaccuca

SEQ ID NO: 3748 - RNA, 25 nt, Artificial Sequence
  Description of Artificial Sequence: Synthetic oligonucleotide
cucuccaacuaccucaagagcaaac

SEQ ID NO: 3749 - RNA, 25 nt, Artificial Sequence
  Description of Artificial Sequence: Synthetic oligonucleotide
aagagcaaacgugacuuauuuuuuc

SEQ ID NO: 3750 - RNA, 25 nt, Artificial Sequence
  Description of Artificial Sequence: Synthetic oligonucleotide
cgugacuuauuuuuucucaacaagg

SEQ ID NO: 3751 - RNA, 25 nt, Artificial Sequence
  Description of Artificial Sequence: Synthetic oligonucleotide
cucaacaaggaugcagcacuacaca

SEQ ID NO: 3752 - RNA, 25 nt, Artificial Sequence
  Description of Artificial Sequence: Synthetic oligonucleotide
gaugcagcacuacacauggagccua

SEQ ID NO: 3753 - RNA, 25 nt, Artificial Sequence
  Description of Artificial Sequence: Synthetic oligonucleotide
auggagccuaagaaagaaaaaaugg

SEQ ID NO: 3754 - RNA, 25 nt, Artificial Sequence
  Description of Artificial Sequence: Synthetic oligonucleotide
aagaaagaaaaaauggagccaggcc

SEQ ID NO: 3755 - RNA, 25 nt, Artificial Sequence
  Description of Artificial Sequence: Synthetic oligonucleotide
gagccaggccuggaacaaggcaaga

SEQ ID NO: 3756 - RNA, 25 nt, Artificial Sequence
  Description of Artificial Sequence: Synthetic oligonucleotide
cuggaacaaggcaagaaaccaagac

SEQ ID NO: 3757 - RNA, 25 nt, Artificial Sequence
  Description of Artificial Sequence: Synthetic oligonucleotide
aaaccaagacuagauagcgucacca

SEQ ID NO: 3758 - RNA, 25 nt, Artificial Sequence
  Description of Artificial Sequence: Synthetic oligonucleotide
cuagauagcgucaccagcagcgaaa

SEQ ID NO: 3759 - RNA, 25 nt, Artificial Sequence
  Description of Artificial Sequence: Synthetic oligonucleotide
agcagcgaaagcuuugcgagcuccg

SEQ ID NO: 3760 - RNA, 25 nt, Artificial Sequence
  Description of Artificial Sequence: Synthetic oligonucleotide
agcuuugcgagcuccggcuuucagg

SEQ ID NO: 3761 - RNA, 25 nt, Artificial Sequence
  Description of Artificial Sequence: Synthetic oligonucleotide
ggcuuucaggaagauaaaagucuga

SEQ ID NO: 3762 - RNA, 25 nt, Artificial Sequence
  Description of Artificial Sequence: Synthetic oligonucleotide
gaagauaaaagucugagugauguug

SEQ ID NO: 3763 - RNA, 25 nt, Artificial Sequence
  Description of Artificial Sequence: Synthetic oligonucleotide
agugauguugaggaagaggaggauu

SEQ ID NO: 3764 - RNA, 25 nt, Artificial Sequence
  Description of Artificial Sequence: Synthetic oligonucleotide
gaggaagaggaggauucugacgguu

SEQ ID NO: 3765 - RNA, 25 nt, Artificial Sequence
  Description of Artificial Sequence: Synthetic oligonucleotide
ucugacgguuucuacaaggagccca

SEQ ID NO: 3766 - RNA, 25 nt, Artificial Sequence
  Description of Artificial Sequence: Synthetic oligonucleotide
uucuacaaggagcccaucacuaugg

SEQ ID NO: 3767 - RNA, 25 nt, Artificial Sequence
  Description of Artificial Sequence: Synthetic oligonucleotide
aucacuauggaagaucugauuucuu

SEQ ID NO: 3768 - RNA, 25 nt, Artificial Sequence
  Description of Artificial Sequence: Synthetic oligonucleotide
gaagaucugauuucuuacaguuuuc

SEQ ID NO: 3769 - RNA, 25 nt, Artificial Sequence
  Description of Artificial Sequence: Synthetic oligonucleotide
uacaguuuucaaguggccagaggca

SEQ ID NO: 3770 - RNA, 25 nt, Artificial Sequence
  Description of Artificial Sequence: Synthetic oligonucleotide
caaguggccagaggcauggaguucc

SEQ ID NO: 3771 - RNA, 25 nt, Artificial Sequence
  Description of Artificial Sequence: Synthetic oligonucleotide
auggaguuccugucuuccagaaagu

SEQ ID NO: 3772 - RNA, 25 nt, Artificial Sequence
  Description of Artificial Sequence: Synthetic oligonucleotide
cugucuuccagaaagugcauucauc

SEQ ID NO: 3773 - RNA, 25 nt, Artificial Sequence
  Description of Artificial Sequence: Synthetic oligonucleotide
ugcauucaucgggaccuggcagcga

SEQ ID NO: 3774 - RNA, 25 nt, Artificial Sequence
  Description of Artificial Sequence: Synthetic oligonucleotide
cgggaccuggcagcgagaaacauuc

SEQ ID NO: 3775 - RNA, 25 nt, Artificial Sequence
  Description of Artificial Sequence: Synthetic oligonucleotide
agaaacauucuuuuaucugagaaca

SEQ ID NO: 3776 - RNA, 25 nt, Artificial Sequence
  Description of Artificial Sequence: Synthetic oligonucleotide
cuuuuaucugagaacaacgugguga

SEQ ID NO: 3777 - RNA, 25 nt, Artificial Sequence
  Description of Artificial Sequence: Synthetic oligonucleotide
aacguggugaagauuugugauuuug

SEQ ID NO: 3778 - RNA, 25 nt, Artificial Sequence
  Description of Artificial Sequence: Synthetic oligonucleotide
aagauuugugauuuuggccuugccc

SEQ ID NO: 3779 - RNA, 25 nt, Artificial Sequence
  Description of Artificial Sequence: Synthetic oligonucleotide
ggccuugcccgggauauuuauaaga

SEQ ID NO: 3780 - RNA, 25 nt, Artificial Sequence
  Description of Artificial Sequence: Synthetic oligonucleotide
cgggauauuuauaagaaccccgauu

SEQ ID NO: 3781 - RNA, 25 nt, Artificial Sequence
  Description of Artificial Sequence: Synthetic oligonucleotide
aaccccgauuaugugagaaaaggag

SEQ ID NO: 3782 - RNA, 25 nt, Artificial Sequence
  Description of Artificial Sequence: Synthetic oligonucleotide
uaugugagaaaaggagauacucgac

SEQ ID NO: 3783 - RNA, 25 nt, Artificial Sequence
  Description of Artificial Sequence: Synthetic oligonucleotide
gauacucgacuuccucugaaaugga

SEQ ID NO: 3784 - RNA, 25 nt, Artificial Sequence
  Description of Artificial Sequence: Synthetic oligonucleotide
cuuccucugaaauggauggcuccug

SEQ ID NO: 3785 - RNA, 25 nt, Artificial Sequence
  Description of Artificial Sequence: Synthetic oligonucleotide
auggcuccugaaucuaucuuugaca

SEQ ID NO: 3786 - RNA, 25 nt, Artificial Sequence
  Description of Artificial Sequence: Synthetic oligonucleotide
gaaucuaucuuugacaaaaucuaca

SEQ ID NO: 3787 - RNA, 25 nt, Artificial Sequence
  Description of Artificial Sequence: Synthetic oligonucleotide
aaaaucuacagcaccaagagcgacg

SEQ ID NO: 3788 - RNA, 25 nt, Artificial Sequence
  Description of Artificial Sequence: Synthetic oligonucleotide
agcaccaagagcgacguguggucuu

SEQ ID NO: 3789 - RNA, 25 nt, Artificial Sequence
  Description of Artificial Sequence: Synthetic oligonucleotide
guguggucuuacggaguauugcugu

SEQ ID NO: 3790 - RNA, 25 nt, Artificial Sequence
  Description of Artificial Sequence: Synthetic oligonucleotide
uacggaguauugcugugggaaaucu

SEQ ID NO: 3791 - RNA, 25 nt, Artificial Sequence
  Description of Artificial Sequence: Synthetic oligonucleotide
ugggaaaucuucuccuuaggugggu

SEQ ID NO: 3792 - RNA, 25 nt, Artificial Sequence
  Description of Artificial Sequence: Synthetic oligonucleotide
uucuccuuaggugggucuccauacc

SEQ ID NO: 3793 - RNA, 25 nt, Artificial Sequence
  Description of Artificial Sequence: Synthetic oligonucleotide
ucuccauacccaggaguacaaaugg

SEQ ID NO: 3794 - RNA, 25 nt, Artificial Sequence
  Description of Artificial Sequence: Synthetic oligonucleotide
ccaggaguacaaauggaugaggacu

SEQ ID NO: 3795 - RNA, 25 nt, Artificial Sequence
  Description of Artificial Sequence: Synthetic oligonucleotide
gaugaggacuuuugcagucgccuga

SEQ ID NO: 3796 - RNA, 25 nt, Artificial Sequence
  Description of Artificial Sequence: Synthetic oligonucleotide
uuuugcagucgccugagggaaggca

SEQ ID NO: 3797 - RNA, 25 nt, Artificial Sequence
  Description of Artificial Sequence: Synthetic oligonucleotide
agggaaggcaugaggaugagagcuc

SEQ ID NO: 3798 - RNA, 25 nt, Artificial Sequence
  Description of Artificial Sequence: Synthetic oligonucleotide
augaggaugagagcuccugaguacu

SEQ ID NO: 3799 - RNA, 25 nt, Artificial Sequence
  Description of Artificial Sequence: Synthetic oligonucleotide
ccugaguacucuacuccugaaaucu

SEQ ID NO: 3800 - RNA, 25 nt, Artificial Sequence
  Description of Artificial Sequence: Synthetic oligonucleotide
ucuacuccugaaaucuaucagauca

SEQ ID NO: 3801 - RNA, 25 nt, Artificial Sequence
  Description of Artificial Sequence: Synthetic oligonucleotide
uaucagaucaugcuggacugcuggc

SEQ ID NO: 3802 - RNA, 25 nt, Artificial Sequence
  Description of Artificial Sequence: Synthetic oligonucleotide
augcuggacugcuggcacagagacc

SEQ ID NO: 3803 - RNA, 25 nt, Artificial Sequence
  Description of Artificial Sequence: Synthetic oligonucleotide
cacagagacccaaaagaaaggccaa

SEQ ID NO: 3804 - RNA, 25 nt, Artificial Sequence
  Description of Artificial Sequence: Synthetic oligonucleotide
ccaaaagaaaggccaagauuugcag

SEQ ID NO: 3805 - RNA, 25 nt, Artificial Sequence
  Description of Artificial Sequence: Synthetic oligonucleotide
agauuugcagaacuuguggaaaaac

SEQ ID NO: 3806 - RNA, 25 nt, Artificial Sequence
  Description of Artificial Sequence: Synthetic oligonucleotide
gaacuuguggaaaaacuaggugauu

SEQ ID NO: 3807 - RNA, 25 nt, Artificial Sequence
  Description of Artificial Sequence: Synthetic oligonucleotide
cuaggugauuugcuucaagcaaaug

SEQ ID NO: 3808 - RNA, 25 nt, Artificial Sequence
  Description of Artificial Sequence: Synthetic oligonucleotide
uugcuucaagcaaauguacaacagg

SEQ ID NO: 3809 - RNA, 25 nt, Artificial Sequence
  Description of Artificial Sequence: Synthetic oligonucleotide
guacaacaggaugguaaagacuaca

SEQ ID NO: 3810 - RNA, 25 nt, Artificial Sequence
  Description of Artificial Sequence: Synthetic oligonucleotide
gaugguaaagacuacaucccaauca

SEQ ID NO: 3811 - RNA, 25 nt, Artificial Sequence
  Description of Artificial Sequence: Synthetic oligonucleotide
aucccaaucaaugccauacugacag

SEQ ID NO: 3812 - RNA, 25 nt, Artificial Sequence
  Description of Artificial Sequence: Synthetic oligonucleotide
aaugccauacugacaggaaauagug

SEQ ID NO: 3813 - RNA, 25 nt, Artificial Sequence
  Description of Artificial Sequence: Synthetic oligonucleotide
ggaaauaguggguuuacauacucaa

SEQ ID NO: 3814 - RNA, 25 nt, Artificial Sequence
  Description of Artificial Sequence: Synthetic oligonucleotide
ggguuuacauacucaacuccugccu

SEQ ID NO: 3815 - RNA, 25 nt, Artificial Sequence
  Description of Artificial Sequence: Synthetic oligonucleotide
acuccugccuucucugaggacuucu

SEQ ID NO: 3816 - RNA, 25 nt, Artificial Sequence
  Description of Artificial Sequence: Synthetic oligonucleotide
uucucugaggacuucuucaaggaaa

SEQ ID NO: 3817 - RNA, 25 nt, Artificial Sequence
  Description of Artificial Sequence: Synthetic oligonucleotide
uucaaggaaaguauuucagcuccga

SEQ ID NO: 3818 - RNA, 25 nt, Artificial Sequence
  Description of Artificial Sequence: Synthetic oligonucleotide
aguauuucagcuccgaaguuuaauu

SEQ ID NO: 3819 - RNA, 25 nt, Artificial Sequence
  Description of Artificial Sequence: Synthetic oligonucleotide
aaguuuaauucaggaagcucugaug

SEQ ID NO: 3820 - RNA, 25 nt, Artificial Sequence
  Description of Artificial Sequence: Synthetic oligonucleotide
ucaggaagcucugaugaugucagau

SEQ ID NO: 3821 - RNA, 25 nt, Artificial Sequence
  Description of Artificial Sequence: Synthetic oligonucleotide
gaugucagauacguaaaugcuuuca

SEQ ID NO: 3822 - RNA, 25 nt, Artificial Sequence
  Description of Artificial Sequence: Synthetic oligonucleotide
uacguaaaugcuuucaaguucauga

SEQ ID NO: 3823 - RNA, 25 nt, Artificial Sequence
  Description of Artificial Sequence: Synthetic oligonucleotide
aaguucaugagccuggaaagaauca

SEQ ID NO: 3824 - RNA, 25 nt, Artificial Sequence
  Description of Artificial Sequence: Synthetic oligonucleotide
agccuggaaagaaucaaaaccuuug

SEQ ID NO: 3825 - RNA, 25 nt, Artificial Sequence
  Description of Artificial Sequence: Synthetic oligonucleotide
aaaaccuuugaagaacuuuuaccga

SEQ ID NO: 3826 - RNA, 25 nt, Artificial Sequence
  Description of Artificial Sequence: Synthetic oligonucleotide
gaagaacuuuuaccgaaugccaccu

SEQ ID NO: 3827 - RNA, 25 nt, Artificial Sequence
  Description of Artificial Sequence: Synthetic oligonucleotide
aaugccaccuccauguuugaugacu

SEQ ID NO: 3828 - RNA, 25 nt, Artificial Sequence
  Description of Artificial Sequence: Synthetic oligonucleotide
uccauguuugaugacuaccagggcg

SEQ ID NO: 3829 - RNA, 25 nt, Artificial Sequence
  Description of Artificial Sequence: Synthetic oligonucleotide
uaccagggcgacagcagcacucugu

SEQ ID NO: 3830 - RNA, 25 nt, Artificial Sequence
  Description of Artificial Sequence: Synthetic oligonucleotide
gacagcagcacucuguuggccucuc

SEQ ID NO: 3831 - RNA, 25 nt, Artificial Sequence
  Description of Artificial Sequence: Synthetic oligonucleotide
uuggccucucccaugcugaagcgcu

SEQ ID NO: 3832 - RNA, 25 nt, Artificial Sequence
  Description of Artificial Sequence: Synthetic oligonucleotide
cccaugcugaagcgcuucaccugga

SEQ ID NO: 3833 - RNA, 25 nt, Artificial Sequence
  Description of Artificial Sequence: Synthetic oligonucleotide
uucaccuggacugacagcaaaccca

SEQ ID NO: 3834 - RNA, 25 nt, Artificial Sequence
  Description of Artificial Sequence: Synthetic oligonucleotide
acugacagcaaacccaaggccucgc

SEQ ID NO: 3835 - RNA, 25 nt, Artificial Sequence
  Description of Artificial Sequence: Synthetic oligonucleotide
aaggccucgcucaagauugacuuga

SEQ ID NO: 3836 - RNA, 25 nt, Artificial Sequence
  Description of Artificial Sequence: Synthetic oligonucleotide
cucaagauugacuugagaguaacca

SEQ ID NO: 3837 - RNA, 25 nt, Artificial Sequence
  Description of Artificial Sequence: Synthetic oligonucleotide
agaguaaccaguaaaaguaaggagu

SEQ ID NO: 3838 - RNA, 25 nt, Artificial Sequence
  Description of Artificial Sequence: Synthetic oligonucleotide
aguaaaaguaaggagucggggcugu

SEQ ID NO: 3839 - RNA, 25 nt, Artificial Sequence
  Description of Artificial Sequence: Synthetic oligonucleotide
ucggggcugucugaugucagcaggc

SEQ ID NO: 3840 - RNA, 25 nt, Artificial Sequence
  Description of Artificial Sequence: Synthetic oligonucleotide
ucugaugucagcaggcccaguuucu

SEQ ID NO: 3841 - RNA, 25 nt, Artificial Sequence
  Description of Artificial Sequence: Synthetic oligonucleotide
cccaguuucugccauuccagcugug

SEQ ID NO: 3842 - RNA, 25 nt, Artificial Sequence
  Description of Artificial Sequence: Synthetic oligonucleotide
ugccauuccagcugugggcacguca

SEQ ID NO: 3843 - RNA, 25 nt, Artificial Sequence
  Description of Artificial Sequence: Synthetic oligonucleotide
gggcacgucagcgaaggcaagcgca

SEQ ID NO: 3844 - RNA, 25 nt, Artificial Sequence
  Description of Artificial Sequence: Synthetic oligonucleotide
agcgaaggcaagcgcagguucaccu

SEQ ID NO: 3845 - RNA, 25 nt, Artificial Sequence
  Description of Artificial Sequence: Synthetic oligonucleotide
agguucaccuacgaccacgcugagc

SEQ ID NO: 3846 - RNA, 25 nt, Artificial Sequence
  Description of Artificial Sequence: Synthetic oligonucleotide
uacgaccacgcugagcuggaaagga

SEQ ID NO: 3847 - RNA, 25 nt, Artificial Sequence
  Description of Artificial Sequence: Synthetic oligonucleotide
cuggaaaggaaaaucgcgugcugcu

SEQ ID NO: 3848 - RNA, 25 nt, Artificial Sequence
  Description of Artificial Sequence: Synthetic oligonucleotide
aaaaucgcgugcugcuccccgcccc

SEQ ID NO: 3849 - RNA, 25 nt, Artificial Sequence
  Description of Artificial Sequence: Synthetic oligonucleotide
uccccgcccccagacuacaacucgg

SEQ ID NO: 3850 - RNA, 25 nt, Artificial Sequence
  Description of Artificial Sequence: Synthetic oligonucleotide
ccagacuacaacucggugguccugu

SEQ ID NO: 3851 - RNA, 25 nt, Artificial Sequence
  Description of Artificial Sequence: Synthetic oligonucleotide
gugguccuguacuccaccccaccca

SEQ ID NO: 3852 - RNA, 25 nt, Artificial Sequence
  Description of Artificial Sequence: Synthetic oligonucleotide
uacuccaccccacccaucuagaguu

SEQ ID NO: 3853 - RNA, 25 nt, Artificial Sequence
  Description of Artificial Sequence: Synthetic oligonucleotide
aucuagaguuugacacgaagccuua

SEQ ID NO: 3854 - RNA, 25 nt, Artificial Sequence
  Description of Artificial Sequence: Synthetic oligonucleotide
uugacacgaagccuuauuucuagaa

SEQ ID NO: 3855 - RNA, 25 nt, Artificial Sequence
  Description of Artificial Sequence: Synthetic oligonucleotide
auuucuagaagcacauguguauuua

SEQ ID NO: 3856 - RNA, 25 nt, Artificial Sequence
  Description of Artificial Sequence: Synthetic oligonucleotide
agcacauguguauuuauacccccag

SEQ ID NO: 3857 - RNA, 25 nt, Artificial Sequence
  Description of Artificial Sequence: Synthetic oligonucleotide
auacccccaggaaacuagcuuuugc

SEQ ID NO: 3858 - RNA, 25 nt, Artificial Sequence
  Description of Artificial Sequence: Synthetic oligonucleotide
ggaaacuagcuuuugccaguauuau

SEQ ID NO: 3859 - RNA, 25 nt, Artificial Sequence
  Description of Artificial Sequence: Synthetic oligonucleotide
ccaguauuaugcauauauaaguuua

SEQ ID NO: 3860 - RNA, 25 nt, Artificial Sequence
  Description of Artificial Sequence: Synthetic oligonucleotide
ugcauauauaaguuuacaccuuuau

SEQ ID NO: 3861 - RNA, 25 nt, Artificial Sequence
  Description of Artificial Sequence: Synthetic oligonucleotide
acaccuuuaucuuuccaugggagcc

SEQ ID NO: 3862 - RNA, 25 nt, Artificial Sequence
  Description of Artificial Sequence: Synthetic oligonucleotide
ucuuuccaugggagccagcugcuuu

SEQ ID NO: 3863 - RNA, 25 nt, Artificial Sequence
  Description of Artificial Sequence: Synthetic oligonucleotide
cagcugcuuuuugugauuuuuuuaa

SEQ ID NO: 3864 - RNA, 25 nt, Artificial Sequence
  Description of Artificial Sequence: Synthetic oligonucleotide
uuugugauuuuuuuaauagugcuuu

SEQ ID NO: 3865 - RNA, 25 nt, Artificial Sequence
  Description of Artificial Sequence: Synthetic oligonucleotide
auagugcuuuuuuuuuuuugacuaa

SEQ ID NO: 3866 - RNA, 25 nt, Artificial Sequence
  Description of Artificial Sequence: Synthetic oligonucleotide
uuuuuuuuuugacuaacaagaaugu

SEQ ID NO: 3867 - RNA, 25 nt, Artificial Sequence
  Description of Artificial Sequence: Synthetic oligonucleotide
acaagaauguaacuccagauagaga

SEQ ID NO: 3868 - RNA, 25 nt, Artificial Sequence
  Description of Artificial Sequence: Synthetic oligonucleotide
uaacuccagauagagaaauagugac

SEQ ID NO: 3869 - RNA, 25 nt, Artificial Sequence
  Description of Artificial Sequence: Synthetic oligonucleotide
aaauagugacaagugaagaacacua

SEQ ID NO: 3870 - RNA, 25 nt, Artificial Sequence
  Description of Artificial Sequence: Synthetic oligonucleotide
caagugaagaacacuacugcuaaau

SEQ ID NO: 3871 - RNA, 25 nt, Artificial Sequence
  Description of Artificial Sequence: Synthetic oligonucleotide
acugcuaaauccucauguuacucag

SEQ ID NO: 3872 - RNA, 25 nt, Artificial Sequence
  Description of Artificial Sequence: Synthetic oligonucleotide
uccucauguuacucaguguuagaga

SEQ ID NO: 3873 - RNA, 25 nt, Artificial Sequence
  Description of Artificial Sequence: Synthetic oligonucleotide
guguuagagaaauccuuccuaaacc

SEQ ID NO: 3874 - RNA, 25 nt, Artificial Sequence
  Description of Artificial Sequence: Synthetic oligonucleotide
aaauccuuccuaaacccaaugacuu

SEQ ID NO: 3875 - RNA, 25 nt, Artificial Sequence
  Description of Artificial Sequence: Synthetic oligonucleotide
ccaaugacuucccugcuccaacccc

SEQ ID NO: 3876 - RNA, 25 nt, Artificial Sequence
  Description of Artificial Sequence: Synthetic oligonucleotide
ucccugcuccaacccccgccaccuc

SEQ ID NO: 3877 - RNA, 25 nt, Artificial Sequence
  Description of Artificial Sequence: Synthetic oligonucleotide
ccgccaccucagggcacgcaggacc

SEQ ID NO: 3878 - RNA, 25 nt, Artificial Sequence
  Description of Artificial Sequence: Synthetic oligonucleotide
cagggcacgcaggaccaguuugauu

SEQ ID NO: 3879 - RNA, 25 nt, Artificial Sequence
  Description of Artificial Sequence: Synthetic oligonucleotide
caguuugauugaggagcugcacuga

SEQ ID NO: 3880 - RNA, 25 nt, Artificial Sequence
  Description of Artificial Sequence: Synthetic oligonucleotide
ugaggagcugcacugaucacccaau

SEQ ID NO: 3881 - RNA, 25 nt, Artificial Sequence
  Description of Artificial Sequence: Synthetic oligonucleotide
aucacccaaugcaucacguacccca

SEQ ID NO: 3882 - RNA, 25 nt, Artificial Sequence
  Description of Artificial Sequence: Synthetic oligonucleotide
ugcaucacguaccccacugggccag

SEQ ID NO: 3883 - RNA, 25 nt, Artificial Sequence
  Description of Artificial Sequence: Synthetic oligonucleotide
acugggccagcccugcagcccaaaa

SEQ ID NO: 3884 - RNA, 25 nt, Artificial Sequence
  Description of Artificial Sequence: Synthetic oligonucleotide
gcccugcagcccaaaacccagggca

SEQ ID NO: 3885 - RNA, 25 nt, Artificial Sequence
  Description of Artificial Sequence: Synthetic oligonucleotide
acccagggcaacaagcccguuagcc

SEQ ID NO: 3886 - RNA, 25 nt, Artificial Sequence
  Description of Artificial Sequence: Synthetic oligonucleotide
aacaagcccguuagccccagggauc

SEQ ID NO: 3887 - RNA, 25 nt, Artificial Sequence
  Description of Artificial Sequence: Synthetic oligonucleotide
cccagggaucacuggcuggccugag

SEQ ID NO: 3888 - RNA, 25 nt, Artificial Sequence
  Description of Artificial Sequence: Synthetic oligonucleotide
cacuggcuggccugagcaacaucuc

SEQ ID NO: 3889 - RNA, 25 nt, Artificial Sequence
  Description of Artificial Sequence: Synthetic oligonucleotide
gcaacaucucgggaguccucuagca

SEQ ID NO: 3890 - RNA, 25 nt, Artificial Sequence
  Description of Artificial Sequence: Synthetic oligonucleotide
cgggaguccucuagcaggccuaaga

SEQ ID NO: 3891 - RNA, 25 nt, Artificial Sequence
  Description of Artificial Sequence: Synthetic oligonucleotide
aggccuaagacaugugaggaggaaa

SEQ ID NO: 3892 - RNA, 25 nt, Artificial Sequence
  Description of Artificial Sequence: Synthetic oligonucleotide
acaugugaggaggaaaaggaaaaaa

SEQ ID NO: 3893 - RNA, 25 nt, Artificial Sequence
  Description of Artificial Sequence: Synthetic oligonucleotide
aaggaaaaaaagcaaaaagcaaggg

SEQ ID NO: 3894 - RNA, 25 nt, Artificial Sequence
  Description of Artificial Sequence: Synthetic oligonucleotide
aagcaaaaagcaagggagaaaagag

SEQ ID NO: 3895 - RNA, 25 nt, Artificial Sequence
  Description of Artificial Sequence: Synthetic oligonucleotide
gagaaaagagaaaccgggagaaggc

SEQ ID NO: 3896 - RNA, 25 nt, Artificial Sequence
  Description of Artificial Sequence: Synthetic oligonucleotide
gaaaccgggagaaggcaugagaaag

SEQ ID NO: 3897 - RNA, 25 nt, Artificial Sequence
  Description of Artificial Sequence: Synthetic oligonucleotide
caugagaaagaauuugagacgcacc

SEQ ID NO: 3898 - RNA, 25 nt, Artificial Sequence
  Description of Artificial Sequence: Synthetic oligonucleotide
gaauuugagacgcaccaugugggca

SEQ ID NO: 3899 - RNA, 25 nt, Artificial Sequence
  Description of Artificial Sequence: Synthetic oligonucleotide
caugugggcacggagggggacgggg

SEQ ID NO: 3900 - RNA, 25 nt, Artificial Sequence
  Description of Artificial Sequence: Synthetic oligonucleotide
acggagggggacggggcucagcaau

SEQ ID NO: 3901 - RNA, 25 nt, Artificial Sequence
  Description of Artificial Sequence: Synthetic oligonucleotide
gcucagcaaugccauuucaguggcu

SEQ ID NO: 3902 - RNA, 25 nt, Artificial Sequence
  Description of Artificial Sequence: Synthetic oligonucleotide
ugccauuucaguggcuucccagcuc

SEQ ID NO: 3903 - RNA, 25 nt, Artificial Sequence
  Description of Artificial Sequence: Synthetic oligonucleotide
uucccagcucugacccuucuacauu

SEQ ID NO: 3904 - RNA, 25 nt, Artificial Sequence
  Description of Artificial Sequence: Synthetic oligonucleotide
cugacccuucuacauuugagggccc

SEQ ID NO: 3905 - RNA, 25 nt, Artificial Sequence
  Description of Artificial Sequence: Synthetic oligonucleotide
uugagggcccagccaggagcagaug

SEQ ID NO: 3906 - RNA, 25 nt, Artificial Sequence
  Description of Artificial Sequence: Synthetic oligonucleotide
cagccaggagcagauggacagcgau

SEQ ID NO: 3907 - RNA, 25 nt, Artificial Sequence
  Description of Artificial Sequence: Synthetic oligonucleotide
ggacagcgaugaggggacauuuucu

SEQ ID NO: 3908 - RNA, 25 nt, Artificial Sequence
  Description of Artificial Sequence: Synthetic oligonucleotide
ugaggggacauuuucuggauucugg

SEQ ID NO: 3909 - RNA, 25 nt, Artificial Sequence
  Description of Artificial Sequence: Synthetic oligonucleotide
uggauucugggaggcaagaaaagga

SEQ ID NO: 3910 - RNA, 25 nt, Artificial Sequence
  Description of Artificial Sequence: Synthetic oligonucleotide
ggaggcaagaaaaggacaaauaucu

SEQ ID NO: 3911 - RNA, 25 nt, Artificial Sequence
  Description of Artificial Sequence: Synthetic oligonucleotide
acaaauaucuuuuuuggaacuaaag

SEQ ID NO: 3912 - RNA, 25 nt, Artificial Sequence
  Description of Artificial Sequence: Synthetic oligonucleotide
uuuuuuggaacuaaagcaaauuuua

SEQ ID NO: 3913 - RNA, 25 nt, Artificial Sequence
  Description of Artificial Sequence: Synthetic oligonucleotide
gcaaauuuuagaacuuuaccuaugg

SEQ ID NO: 3914 - RNA, 25 nt, Artificial Sequence
  Description of Artificial Sequence: Synthetic oligonucleotide
agaacuuuaccuauggaagugguuc

SEQ ID NO: 3915 - RNA, 25 nt, Artificial Sequence
  Description of Artificial Sequence: Synthetic oligonucleotide
gaagugguucuauguccauucucau

SEQ ID NO: 3916 - RNA, 25 nt, Artificial Sequence
  Description of Artificial Sequence: Synthetic oligonucleotide
cuauguccauucucauucguggcau

SEQ ID NO: 3917 - RNA, 25 nt, Artificial Sequence
  Description of Artificial Sequence: Synthetic oligonucleotide
uucguggcauguuuugauuuguagc

SEQ ID NO: 3918 - RNA, 25 nt, Artificial Sequence
  Description of Artificial Sequence: Synthetic oligonucleotide
uguuuugauuuguagcacugagggu

SEQ ID NO: 3919 - RNA, 25 nt, Artificial Sequence
  Description of Artificial Sequence: Synthetic oligonucleotide
cacugaggguggcacucaacucuga

SEQ ID NO: 3920 - RNA, 25 nt, Artificial Sequence
  Description of Artificial Sequence: Synthetic oligonucleotide
uggcacucaacucugagcccauacu

SEQ ID NO: 3921 - RNA, 25 nt, Artificial Sequence
  Description of Artificial Sequence: Synthetic oligonucleotide
agcccauacuuuuggcuccucuagu

SEQ ID NO: 3922 - RNA, 25 nt, Artificial Sequence
  Description of Artificial Sequence: Synthetic oligonucleotide
uuuuggcuccucuaguaagaugcac

SEQ ID NO: 3923 - RNA, 25 nt, Artificial Sequence
  Description of Artificial Sequence: Synthetic oligonucleotide
uaagaugcacugaaaacuuagccag

SEQ ID NO: 3924 - RNA, 25 nt, Artificial Sequence
  Description of Artificial Sequence: Synthetic oligonucleotide
cugaaaacuuagccagaguuagguu

SEQ ID NO: 3925 - RNA, 25 nt, Artificial Sequence
  Description of Artificial Sequence: Synthetic oligonucleotide
gaguuagguugucuccaggccauga

SEQ ID NO: 3926 - RNA, 25 nt, Artificial Sequence
  Description of Artificial Sequence: Synthetic oligonucleotide
ugucuccaggccaugauggccuuac

SEQ ID NO: 3927 - RNA, 25 nt, Artificial Sequence
  Description of Artificial Sequence: Synthetic oligonucleotide
auggccuuacacugaaaaugucaca

SEQ ID NO: 3928 - RNA, 25 nt, Artificial Sequence
  Description of Artificial Sequence: Synthetic oligonucleotide
acacugaaaaugucacauucuauuu

SEQ ID NO: 3929 - RNA, 5830 nt, Homo sapiens
acugagucccgggaccccgggagagcggucaguguguggucgcugcguuuccucugccugcgccgggcaucacuugcgcgccgcagaaaguccgucuggcagccuggauauccucuccuaccggcacccgcagacgccccugcagccgccggucggcgcccgggcucccuagcccugugcgcucaacuguccugcgcugcggggugccgcgaguuccaccuccgcgccuccuucucuagacaggcgcugggagaaagaaccggcucccgaguucugggcauuucgcccggcucgaggugcaggaugcagagcaaggugcugcuggccgucgcccuguggcucugcguggagacccgggccgccucuguggguuugccuaguguuucucuugaucugcccaggcucagcauacaaaaagacauacuuacaauuaaggcuaauacaacucuucaaauuacuugcaggggacagagggacuuggacuggcuuuggcccaauaaucagaguggcagugagcaaaggguggaggugacugagugcagcgauggccucuucuguaagacacucacaauuccaaaagugaucggaaaugacacuggagccuacaagugcuucuaccgggaaacugacuuggccucggucauuuaugucuauguucaagauuacagaucuccauuuauugcuucuguuagugaccaacauggagucguguacauuacugagaacaaaaacaaaacuguggugauuccaugucucggguccauuucaaaucucaacgugucacuuugugcaagauacccagaaaagagauuuguuccugaugguaacagaauuuccugggacagcaagaagggcuuuacuauucccagcuacaugaucagcuaugcuggcauggucuucugugaagcaaaaauuaaugaugaaaguuaccagucuauuauguacauaguugucguuguaggguauaggauuuaugaugugguucugaguccgucucauggaauugaacuaucuguuggagaaaagcuugucuuaaauuguacagcaagaacugaacuaaauguggggauugacuucaacugggaauacccuucuucgaagcaucagcauaagaaacuuguaaaccgagaccuaaaaacccagucugggagugagaugaagaaauuuuugagcaccuuaacuauagaugguguaacccggagugaccaaggauuguacaccugugcagcauccagugggcugaugaccaagaagaacagcacauuugucaggguccaugaaaaaccuuuuguugcuuuuggaaguggcauggaaucucugguggaagccacggugggggagcgugucagaaucccugcgaaguaccuugguuacccacccccagaaauaaaaugguauaaaaauggaauaccccuugaguccaaucacacaauuaaagcggggcauguacugacgauuauggaagugagugaaagagacacaggaaauuacacugucauccuuaccaaucccauuucaaaggagaagcagagccauguggucucucugguuguguaugucccaccccagauuggugagaaaucucuaaucucuccuguggauuccuaccaguacggcaccacucaaacgcugacauguacggucuaugccauuccucccccgcaucacauccacugguauuggcaguuggaggaagagugcgccaacgagcccagccaagcugucucagugacaaacccauacccuugugaagaauggagaaguguggaggacuuccagggaggaaauaaaauugaaguuaauaaaaaucaauuugcucuaauugaaggaaaaaacaaaacuguaaguacccuuguuauccaagcggcaaaugugucagcuuuguacaaaugugaagcggucaacaaagucgggagaggagagagggugaucuccuuccacgugaccagggguccugaaauuacuuugcaaccugacaugcagcccacugagcaggagagcgugucuuuguggugcacugcagacagaucuacguuugagaaccucacaugguacaagcuuggcccacagccucugccaauccaugugggagaguugcccacaccuguuugcaagaacuuggauacucuuuggaaauugaaugccaccauguucucuaauagcacaaaugacauuuugaucauggagcuuaagaaugcauccuugcaggaccaaggagacuaugucugccuugcucaagacaggaagaccaagaaaagacauugcguggucaggcagcucacaguccuagagcguguggcacccacgaucacaggaaaccuggagaaucagacgacaaguauuggggaaagcaucgaagucucaugcacggcaucugggaaucccccuccacagaucaugugguuuaaagauaaugagacccuuguagaagacucaggcauuguauugaaggaugggaaccggaaccucacuauccgcagagugaggaaggaggacgaaggccucuacaccugccaggcaugcaguguucuuggcugugcaaaaguggaggcauuuuucauaauagaaggugcccaggaaaagacgaacuuggaaaucauuauucuaguaggcacggcggugauugccauguucuucuggcuacuucuugucaucauccuacggaccguuaagcgggccaauggaggggaacugaagacaggcuacuuguccaucgucauggauccagaugaacucccauuggaugaacauugugaacgacugccuuaugaugccagcaaaugggaauuccccagagaccggcugaagcuagguaagccucuuggccguggugccuuuggccaagugauugaagcagaugccuuuggaauugacaagacagcaacuugcaggacaguagcagucaaaauguugaaagaaggagcaacacacagugagcaucgagcucucaugucugaacucaagauccucauucauauuggucaccaucucaauguggucaaccuucuaggugccuguaccaagccaggagggccacucauggugauuguggaauucugcaaauuuggaaaccuguccacuuaccugaggagcaagagaaaugaauuuguccccuacaagaccaaaggggcacgauuccgucaagggaaagacuacguuggagcaaucccuguggaucugaaacggcgcuuggacagcaucaccaguagccagagcucagccagcucuggauuuguggaggagaagucccucagugauguagaagaagaggaagcuccugaagaucuguauaaggacuuccugaccuuggagcaucucaucuguuacagcuuccaaguggcuaagggcauggaguucuuggcaucgcgaaaguguauccacagggaccuggcggcacgaaauauccucuuaucggagaagaacgugguuaaaaucugugacuuuggcuuggcccgggauauuuauaaagauccagauuaugucagaaaaggagaugcucgccucccuuugaaauggauggccccagaaacaauuuuugacagaguguacacaauccagagugacgucuggucuuuugguguuuugcugugggaaauauuuuccuuaggugcuucuccauauccugggguaaagauugaugaagaauuuuguaggcgauugaaagaaggaacuagaaugagggccccugauuauacuacaccagaaauguaccagaccaugcuggacugcuggcacggggagcccagucagagacccacguuuucagaguugguggaacauuugggaaaucucuugcaagcuaaugcucagcaggauggcaaagacuacauuguucuuccgauaucagagacuuugagcauggaagaggauucuggacucucucugccuaccucaccuguuuccuguauggaggaggaggaaguaugugaccccaaauuccauuaugacaacacagcaggaaucagucaguaucugcagaacaguaagcgaaagagccggccugugaguguaaaaacauuugaagauaucccguuagaagaaccagaaguaaaaguaaucccagaugacaaccagacggacagugguaugguucuugccucagaagagcugaaaacuuuggaagacagaaccaaauuaucuccaucuuuugguggaauggugcccagcaaaagcagggagucuguggcaucugaaggcucaaaccagacaagcggcuaccaguccggauaucacuccgaugacacagacaccaccguguacuccagugaggaagcagaacuuuuaaagcugauagagauuggagugcaaaccgguagcacagcccagauucuccagccugacucggggaccacacugagcucuccuccuguuuaaaaggaagcauccacaccccaacucccggacaucacaugagaggucugcucagauuuugaaguguuguucuuuccaccagcaggaaguagccgcauuugauuuucauuucgacaacagaaaaaggaccucggacugcagggagccagucuucuaggcauauccuggaagaggcuugugacccaagaaugugucugugucuucucccaguguugaccugauccucuuuuuucauucauuuaaaaagcauuaucaugccccugcugcgggucucaccauggguuuagaacaaagagcuucaagcaauggccccauccucaaagaaguagcaguaccuggggagcugacacuucuguaaaacuagaagauaaaccaggcaacguaaguguucgagguguugaagaugggaaggauuugcagggcugagucuauccaagaggcuuuguuuaggacgugggucccaagccaagccuuaaguguggaauucggauugauagaaaggaagacuaacguuaccuugcuuuggagaguacuggagccugcaaaugcauuguguuugcucugguggaggugggcauggggucuguucugaaauguaaaggguucagacgggguuucugguuuuagaagguugcguguucuucgaguugggcuaaaguagaguucguugugcuguuucugacuccuaaugagaguuccuuccagaccguuagcugucuccuugccaagccccaggaagaaaaugaugcagcucuggcuccuugucucccaggcugauccuuuauucagaauaccacaaagaaaggacauucagcucaaggcucccugccguguugaagaguucugacugcacaaaccagcuucugguuucuucuggaaugaauacccucauaucuguccugaugugauaugucugagacugaaugcgggagguucaaugugaagcuguguguggugucaaaguuucaggaaggauuuuacccuuuuguucuucccccuguccccaacccacucucaccccgcaacccaucaguauuuuaguuauuuggccucuacuccaguaaaccugauuggguuuguucacucucugaaugauuauuagccagacuucaaaauuauuuuauagcccaaauuauaacaucuauuguauuauuuagacuuuuaacauauagagcuauuucuacugauuuuugcccuuguucuguccuuuuuuucaaaaaagaaaauguguuuuuuguuugguaccauagugugaaaugcugggaacaaugacuauaagacaugcuauggcacauauauuuauagucuguuuauguagaaacaaauguaauauauuaaagccuuauauauaaugaacuuuguacuauucacauuuuguaucaguauuauguagcauaacaaaggucauaaugcuuucagcaauugaugucauuuuauuaaagaacauugaaaaacuuga

SEQ ID NO: 3930 - RNA, 19 nt, Artificial Sequence
  Description of Artificial Sequence: Synthetic oligonucleotide
acugagucccgggaccccg

SEQ ID NO: 3931 - RNA, 19 nt, Artificial Sequence
  Description of Artificial Sequence: Synthetic oligonucleotide
gggagagcggucagugugu

SEQ ID NO: 3932 - RNA, 19 nt, Artificial Sequence
  Description of Artificial Sequence: Synthetic oligonucleotide
uggucgcugcguuuccucu

SEQ ID NO: 3933 - RNA, 19 nt, Artificial Sequence
  Description of Artificial Sequence: Synthetic oligonucleotide
ugccugcgccgggcaucac

SEQ ID NO: 3934 - RNA, 19 nt, Artificial Sequence
  Description of Artificial Sequence: Synthetic oligonucleotide
cuugcgcgccgcagaaagu

SEQ ID NO: 3935 - RNA, 19 nt, Artificial Sequence
  Description of Artificial Sequence: Synthetic oligonucleotide
uccgucuggcagccuggau

SEQ ID NO: 3936 - RNA, 19 nt, Artificial Sequence
  Description of Artificial Sequence: Synthetic oligonucleotide
uauccucuccuaccggcac

SEQ ID NO: 3937 - RNA, 19 nt, Artificial Sequence
  Description of Artificial Sequence: Synthetic oligonucleotide
cccgcagacgccccugcag

SEQ ID NO: 3938 - RNA, 19 nt, Artificial Sequence
  Description of Artificial Sequence: Synthetic oligonucleotide
gccgccggucggcgcccgg

SEQ ID NO: 3939 - RNA, 19 nt, Artificial Sequence
  Description of Artificial Sequence: Synthetic oligonucleotide
ggcucccuagcccugugcg

SEQ ID NO: 3940 - RNA, 19 nt, Artificial Sequence
  Description of Artificial Sequence: Synthetic oligonucleotide
gcucaacuguccugcgcug

SEQ ID NO: 3941 - RNA, 19 nt, Artificial Sequence
  Description of Artificial Sequence: Synthetic oligonucleotide
gcggggugccgcgaguucc

SEQ ID NO: 3942 - RNA, 19 nt, Artificial Sequence
  Description of Artificial Sequence: Synthetic oligonucleotide
caccuccgcgccuccuucu

SEQ ID NO: 3943 - RNA, 19 nt, Artificial Sequence
  Description of Artificial Sequence: Synthetic oligonucleotide
ucuagacaggcgcugggag

SEQ ID NO: 3944 - RNA, 19 nt, Artificial Sequence
  Description of Artificial Sequence: Synthetic oligonucleotide
gaaagaaccggcucccgag

SEQ ID NO: 3945 - RNA, 19 nt, Artificial Sequence
  Description of Artificial Sequence: Synthetic oligonucleotide
guucugggcauuucgcccg

SEQ ID NO: 3946 - RNA, 19 nt, Artificial Sequence
  Description of Artificial Sequence: Synthetic oligonucleotide
ggcucgaggugcaggaugc

SEQ ID NO: 3947 - RNA, 19 nt, Artificial Sequence
  Description of Artificial Sequence: Synthetic oligonucleotide
cagagcaaggugcugcugg

SEQ ID NO: 3948 - RNA, 19 nt, Artificial Sequence
  Description of Artificial Sequence: Synthetic oligonucleotide
gccgucgcccuguggcucu

SEQ ID NO: 3949 - RNA, 19 nt, Artificial Sequence
  Description of Artificial Sequence: Synthetic oligonucleotide
ugcguggagacccgggccg

SEQ ID NO: 3950 - RNA, 19 nt, Artificial Sequence
  Description of Artificial Sequence: Synthetic oligonucleotide
gccucuguggguuugccua

SEQ ID NO: 3951 - RNA, 19 nt, Artificial Sequence
  Description of Artificial Sequence: Synthetic oligonucleotide
aguguuucucuugaucugc

SEQ ID NO: 3952 - RNA, 19 nt, Artificial Sequence
  Description of Artificial Sequence: Synthetic oligonucleotide
cccaggcucagcauacaaa

SEQ ID NO: 3953 - RNA, 19 nt, Artificial Sequence
  Description of Artificial Sequence: Synthetic oligonucleotide
aaagacauacuuacaauua

SEQ ID NO: 3954 - RNA, 19 nt, Artificial Sequence
  Description of Artificial Sequence: Synthetic oligonucleotide
aaggcuaauacaacucuuc

SEQ ID NO: 3955 - RNA, 19 nt, Artificial Sequence
  Description of Artificial Sequence: Synthetic oligonucleotide
caaauuacuugcaggggac

SEQ ID NO: 3956 - RNA, 19 nt, Artificial Sequence
  Description of Artificial Sequence: Synthetic oligonucleotide
cagagggacuuggacuggc

SEQ ID NO: 3957 - RNA, 19 nt, Artificial Sequence
  Description of Artificial Sequence: Synthetic oligonucleotide
cuuuggcccaauaaucaga

SEQ ID NO: 3958 - RNA, 19 nt, Artificial Sequence
  Description of Artificial Sequence: Synthetic oligonucleotide
aguggcagugagcaaaggg

SEQ ID NO: 3959 - RNA, 19 nt, Artificial Sequence
  Description of Artificial Sequence: Synthetic oligonucleotide
guggaggugacugagugca

SEQ ID NO: 3960 - RNA, 19 nt, Artificial Sequence
  Description of Artificial Sequence: Synthetic oligonucleotide
agcgauggccucuucugua

SEQ ID NO: 3961 - RNA, 19 nt, Artificial Sequence
  Description of Artificial Sequence: Synthetic oligonucleotide
aagacacucacaauuccaa

SEQ ID NO: 3962 - RNA, 19 nt, Artificial Sequence
  Description of Artificial Sequence: Synthetic oligonucleotide
aaagugaucggaaaugaca

SEQ ID NO: 3963 - RNA, 19 nt, Artificial Sequence
  Description of Artificial Sequence: Synthetic oligonucleotide
acuggagccuacaagugcu

SEQ ID NO: 3964 - RNA, 19 nt, Artificial Sequence
  Description of Artificial Sequence: Synthetic oligonucleotide
uucuaccgggaaacugacu

SEQ ID NO: 3965 - RNA, 19 nt, Artificial Sequence
  Description of Artificial Sequence: Synthetic oligonucleotide
uuggccucggucauuuaug

SEQ ID NO: 3966 - RNA, 19 nt, Artificial Sequence
  Description of Artificial Sequence: Synthetic oligonucleotide
gucuauguucaagauuaca

SEQ ID NO: 3967 - RNA, 19 nt, Artificial Sequence
  Description of Artificial Sequence: Synthetic oligonucleotide
agaucuccauuuauugcuu

SEQ ID NO: 3968 - RNA, 19 nt, Artificial Sequence
  Description of Artificial Sequence: Synthetic oligonucleotide
ucuguuagugaccaacaug

SEQ ID NO: 3969 - RNA, 19 nt, Artificial Sequence
  Description of Artificial Sequence: Synthetic oligonucleotide
ggagucguguacauuacug

SEQ ID NO: 3970 - RNA, 19 nt, Artificial Sequence
  Description of Artificial Sequence: Synthetic oligonucleotide
gagaacaaaaacaaaacug

SEQ ID NO: 3971 - RNA, 19 nt, Artificial Sequence
  Description of Artificial Sequence: Synthetic oligonucleotide
guggugauuccaugucucg

SEQ ID NO: 3972 - RNA, 19 nt, Artificial Sequence
  Description of Artificial Sequence: Synthetic oligonucleotide
ggguccauuucaaaucuca

SEQ ID NO: 3973 - RNA, 19 nt, Artificial Sequence
  Description of Artificial Sequence: Synthetic oligonucleotide
aacgugucacuuugugcaa

SEQ ID NO: 3974 - RNA, 19 nt, Artificial Sequence
  Description of Artificial Sequence: Synthetic oligonucleotide
agauacccagaaaagagau

SEQ ID NO: 3975 - RNA, 19 nt, Artificial Sequence
  Description of Artificial Sequence: Synthetic oligonucleotide
uuuguuccugaugguaaca

SEQ ID NO: 3976 - RNA, 19 nt, Artificial Sequence
  Description of Artificial Sequence: Synthetic oligonucleotide
agaauuuccugggacagca

SEQ ID NO: 3977 - RNA, 19 nt, Artificial Sequence
  Description of Artificial Sequence: Synthetic oligonucleotide
aagaagggcuuuacuauuc

SEQ ID NO: 3978 - RNA, 19 nt, Artificial Sequence
  Description of Artificial Sequence: Synthetic oligonucleotide
cccagcuacaugaucagcu

SEQ ID NO: 3979 - RNA, 19 nt, Artificial Sequence
  Description of Artificial Sequence: Synthetic oligonucleotide
uaugcuggcauggucuucu

SEQ ID NO: 3980 - RNA, 19 nt, Artificial Sequence
  Description of Artificial Sequence: Synthetic oligonucleotide
ugugaagcaaaaauuaaug

SEQ ID NO: 3981 - RNA, 19 nt, Artificial Sequence
  Description of Artificial Sequence: Synthetic oligonucleotide
gaugaaaguuaccagucua

SEQ ID NO: 3982 - RNA, 19 nt, Artificial Sequence
  Description of Artificial Sequence: Synthetic oligonucleotide
auuauguacauaguugucg

SEQ ID NO: 3983 - RNA, 19 nt, Artificial Sequence
  Description of Artificial Sequence: Synthetic oligonucleotide
guuguaggguauaggauuu

SEQ ID NO: 3984 - RNA, 19 nt, Artificial Sequence
  Description of Artificial Sequence: Synthetic oligonucleotide
uaugaugugguucugaguc

SEQ ID NO: 3985 - RNA, 19 nt, Artificial Sequence
  Description of Artificial Sequence: Synthetic oligonucleotide
ccgucucauggaauugaac

SEQ ID NO: 3986 - RNA, 19 nt, Artificial Sequence
  Description of Artificial Sequence: Synthetic oligonucleotide
cuaucuguuggagaaaagc

SEQ ID NO: 3987 - RNA, 19 nt, Artificial Sequence
  Description of Artificial Sequence: Synthetic oligonucleotide
cuugucuuaaauuguacag

SEQ ID NO: 3988 - RNA, 19 nt, Artificial Sequence
  Description of Artificial Sequence: Synthetic oligonucleotide
gcaagaacugaacuaaaug

SEQ ID NO: 3989 - RNA, 19 nt, Artificial Sequence
  Description of Artificial Sequence: Synthetic oligonucleotide
guggggauugacuucaacu

SEQ ID NO: 3990 - RNA, 19 nt, Artificial Sequence
  Description of Artificial Sequence: Synthetic oligonucleotide
ugggaauacccuucuucga

SEQ ID NO: 3991 - RNA, 19 nt, Artificial Sequence
  Description of Artificial Sequence: Synthetic oligonucleotide
aagcaucagcauaagaaac

SEQ ID NO: 3992 - RNA, 19 nt, Artificial Sequence
  Description of Artificial Sequence: Synthetic oligonucleotide
cuuguaaaccgagaccuaa

SEQ ID NO: 3993 - RNA, 19 nt, Artificial Sequence
  Description of Artificial Sequence: Synthetic oligonucleotide
aaaacccagucugggagug

SEQ ID NO: 3994 - RNA, 19 nt, Artificial Sequence
  Description of Artificial Sequence: Synthetic oligonucleotide
gagaugaagaaauuuuuga

SEQ ID NO: 3995 - RNA, 19 nt, Artificial Sequence
  Description of Artificial Sequence: Synthetic oligonucleotide
agcaccuuaacuauagaug

SEQ ID NO: 3996 - RNA, 19 nt, Artificial Sequence
  Description of Artificial Sequence: Synthetic oligonucleotide
gguguaacccggagugacc

SEQ ID NO: 3997 - RNA, 19 nt, Artificial Sequence
  Description of Artificial Sequence: Synthetic oligonucleotide
caaggauuguacaccugug

SEQ ID NO: 3998 - RNA, 19 nt, Artificial Sequence
  Description of Artificial Sequence: Synthetic oligonucleotide
gcagcauccagugggcuga

SEQ ID NO: 3999 - RNA, 19 nt, Artificial Sequence
  Description of Artificial Sequence: Synthetic oligonucleotide
augaccaagaagaacagca

SEQ ID NO: 4000 - RNA, 19 nt, Artificial Sequence
  Description of Artificial Sequence: Synthetic oligonucleotide
acauuugucaggguccaug

SEQ ID NO: 4001 - RNA, 19 nt, Artificial Sequence
  Description of Artificial Sequence: Synthetic oligonucleotide
gaaaaaccuuuuguugcuu

SEQ ID NO: 4002 - RNA, 19 nt, Artificial Sequence
  Description of Artificial Sequence: Synthetic oligonucleotide
uuuggaaguggcauggaau

SEQ ID NO: 4003 - RNA, 19 nt, Artificial Sequence
  Description of Artificial Sequence: Synthetic oligonucleotide
ucucugguggaagccacgg

SEQ ID NO: 4004 - RNA, 19 nt, Artificial Sequence
  Description of Artificial Sequence: Synthetic oligonucleotide
gugggggagcgugucagaa

SEQ ID NO: 4005 - RNA, 19 nt, Artificial Sequence
  Description of Artificial Sequence: Synthetic oligonucleotide
aucccugcgaaguaccuug

SEQ ID NO: 4006 - RNA, 19 nt, Artificial Sequence
  Description of Artificial Sequence: Synthetic oligonucleotide
gguuacccacccccagaaa

SEQ ID NO: 4007 - RNA, 19 nt, Artificial Sequence
  Description of Artificial Sequence: Synthetic oligonucleotide
auaaaaugguauaaaaaug

SEQ ID NO: 4008 - RNA, 19 nt, Artificial Sequence
  Description of Artificial Sequence: Synthetic oligonucleotide
ggaauaccccuugagucca

SEQ ID NO: 4009 - RNA, 19 nt, Artificial Sequence
  Description of Artificial Sequence: Synthetic oligonucleotide
aaucacacaauuaaagcgg

SEQ ID NO: 4010 - RNA, 19 nt, Artificial Sequence
  Description of Artificial Sequence: Synthetic oligonucleotide
gggcauguacugacgauua

SEQ ID NO: 4011 - RNA, 19 nt, Artificial Sequence
  Description of Artificial Sequence: Synthetic oligonucleotide
auggaagugagugaaagag

SEQ ID NO: 4012 - RNA, 19 nt, Artificial Sequence
  Description of Artificial Sequence: Synthetic oligonucleotide
gacacaggaaauuacacug

SEQ ID NO: 4013 - RNA, 19 nt, Artificial Sequence
  Description of Artificial Sequence: Synthetic oligonucleotide
gucauccuuaccaauccca

SEQ ID NO: 4014 - RNA, 19 nt, Artificial Sequence
  Description of Artificial Sequence: Synthetic oligonucleotide
auuucaaaggagaagcaga

SEQ ID NO: 4015 - RNA, 19 nt, Artificial Sequence
  Description of Artificial Sequence: Synthetic oligonucleotide
agccauguggucucucugg

SEQ ID NO: 4016 - RNA, 19 nt, Artificial Sequence
  Description of Artificial Sequence: Synthetic oligonucleotide
guuguguaugucccacccc

SEQ ID NO: 4017 - RNA, 19 nt, Artificial Sequence
  Description of Artificial Sequence: Synthetic oligonucleotide
cagauuggugagaaaucuc

SEQ ID NO: 4018 - RNA, 19 nt, Artificial Sequence
  Description of Artificial Sequence: Synthetic oligonucleotide
cuaaucucuccuguggauu

SEQ ID NO: 4019 - RNA, 19 nt, Artificial Sequence
  Description of Artificial Sequence: Synthetic oligonucleotide
uccuaccaguacggcacca

SEQ ID NO: 4020 - RNA, 19 nt, Artificial Sequence
  Description of Artificial Sequence: Synthetic oligonucleotide
acucaaacgcugacaugua

SEQ ID NO: 4021 - RNA, 19 nt, Artificial Sequence
  Description of Artificial Sequence: Synthetic oligonucleotide
acggucuaugccauuccuc

SEQ ID NO: 4022 - RNA, 19 nt, Artificial Sequence
  Description of Artificial Sequence: Synthetic oligonucleotide
cccccgcaucacauccacu

SEQ ID NO: 4023 - RNA, 19 nt, Artificial Sequence
  Description of Artificial Sequence: Synthetic oligonucleotide
ugguauuggcaguuggagg

SEQ ID NO: 4024 - RNA, 19 nt, Artificial Sequence
  Description of Artificial Sequence: Synthetic oligonucleotide
gaagagugcgccaacgagc

SEQ ID NO: 4025 - RNA, 19 nt, Artificial Sequence
  Description of Artificial Sequence: Synthetic oligonucleotide
cccagccaagcugucucag

SEQ ID NO: 4026 - RNA, 19 nt, Artificial Sequence
  Description of Artificial Sequence: Synthetic oligonucleotide
gugacaaacccauacccuu

SEQ ID NO: 4027 - RNA, 19 nt, Artificial Sequence
  Description of Artificial Sequence: Synthetic oligonucleotide
ugugaagaauggagaagug

SEQ ID NO: 4028 - RNA, 19 nt, Artificial Sequence
  Description of Artificial Sequence: Synthetic oligonucleotide
guggaggacuuccagggag

SEQ ID NO: 4029 - RNA, 19 nt, Artificial Sequence
  Description of Artificial Sequence: Synthetic oligonucleotide
ggaaauaaaauugaaguua

SEQ ID NO: 4030 - RNA, 19 nt, Artificial Sequence
  Description of Artificial Sequence: Synthetic oligonucleotide
aauaaaaaucaauuugcuc

SEQ ID NO: 4031 - RNA, 19 nt, Artificial Sequence
  Description of Artificial Sequence: Synthetic oligonucleotide
cuaauugaaggaaaaaaca

SEQ ID NO: 4032 - RNA, 19 nt, Artificial Sequence
  Description of Artificial Sequence: Synthetic oligonucleotide
aaaacuguaaguacccuug

SEQ ID NO: 4033 - RNA, 19 nt, Artificial Sequence
  Description of Artificial Sequence: Synthetic oligonucleotide
guuauccaagcggcaaaug

SEQ ID NO: 4034 - RNA, 19 nt, Artificial Sequence
  Description of Artificial Sequence: Synthetic oligonucleotide
gugucagcuuuguacaaau

SEQ ID NO: 4035 - RNA, 19 nt, Artificial Sequence
  Description of Artificial Sequence: Synthetic oligonucleotide
ugugaagcggucaacaaag

SEQ ID NO: 4036 - RNA, 19 nt, Artificial Sequence
  Description of Artificial Sequence: Synthetic oligonucleotide
gucgggagaggagagaggg

SEQ ID NO: 4037 - RNA, 19 nt, Artificial Sequence
  Description of Artificial Sequence: Synthetic oligonucleotide
gugaucuccuuccacguga

SEQ ID NO: 4038 - RNA, 19 nt, Artificial Sequence
  Description of Artificial Sequence: Synthetic oligonucleotide
accagggguccugaaauua

SEQ ID NO: 4039 - RNA, 19 nt, Artificial Sequence
  Description of Artificial Sequence: Synthetic oligonucleotide
acuuugcaaccugacaugc

SEQ ID NO: 4040 - RNA, 19 nt, Artificial Sequence
  Description of Artificial Sequence: Synthetic oligonucleotide
cagcccacugagcaggaga

SEQ ID NO: 4041 - RNA, 19 nt, Artificial Sequence
  Description of Artificial Sequence: Synthetic oligonucleotide
agcgugucuuuguggugca

SEQ ID NO: 4042 - RNA, 19 nt, Artificial Sequence
  Description of Artificial Sequence: Synthetic oligonucleotide
acugcagacagaucuacgu

SEQ ID NO: 4043 - RNA, 19 nt, Artificial Sequence
  Description of Artificial Sequence: Synthetic oligonucleotide
uuugagaaccucacauggu

SEQ ID NO: 4044 - RNA, 19 nt, Artificial Sequence
  Description of Artificial Sequence: Synthetic oligonucleotide
uacaagcuuggcccacagc

SEQ ID NO: 4045 - RNA, 19 nt, Artificial Sequence
  Description of Artificial Sequence: Synthetic oligonucleotide
ccucugccaauccaugugg

SEQ ID NO: 4046 - RNA, 19 nt, Artificial Sequence
  Description of Artificial Sequence: Synthetic oligonucleotide
ggagaguugcccacaccug

SEQ ID NO: 4047 - RNA, 19 nt, Artificial Sequence
  Description of Artificial Sequence: Synthetic oligonucleotide
guuugcaagaacuuggaua

SEQ ID NO: 4048 - RNA, 19 nt, Artificial Sequence
  Description of Artificial Sequence: Synthetic oligonucleotide
acucuuuggaaauugaaug

SEQ ID NO: 4049 - RNA, 19 nt, Artificial Sequence
  Description of Artificial Sequence: Synthetic oligonucleotide
gccaccauguucucuaaua

SEQ ID NO: 4050 - RNA, 19 nt, Artificial Sequence
  Description of Artificial Sequence: Synthetic oligonucleotide
agcacaaaugacauuuuga

SEQ ID NO: 4051 - RNA, 19 nt, Artificial Sequence
  Description of Artificial Sequence: Synthetic oligonucleotide
aucauggagcuuaagaaug

SEQ ID NO: 4052 - RNA, 19 nt, Artificial Sequence
  Description of Artificial Sequence: Synthetic oligonucleotide
gcauccuugcaggaccaag

SEQ ID NO: 4053 - RNA, 19 nt, Artificial Sequence
  Description of Artificial Sequence: Synthetic oligonucleotide
ggagacuaugucugccuug

SEQ ID NO: 4054 - RNA, 19 nt, Artificial Sequence
  Description of Artificial Sequence: Synthetic oligonucleotide
gcucaagacaggaagacca

SEQ ID NO: 4055 - RNA, 19 nt, Artificial Sequence
  Description of Artificial Sequence: Synthetic oligonucleotide
aagaaaagacauugcgugg

SEQ ID NO: 4056 - RNA, 19 nt, Artificial Sequence
  Description of Artificial Sequence: Synthetic oligonucleotide
gucaggcagcucacagucc

SEQ ID NO: 4057 - RNA, 19 nt, Artificial Sequence
  Description of Artificial Sequence: Synthetic oligonucleotide
cuagagcguguggcaccca

SEQ ID NO: 4058 - RNA, 19 nt, Artificial Sequence
  Description of Artificial Sequence: Synthetic oligonucleotide
acgaucacaggaaaccugg

SEQ ID NO: 4059 - RNA, 19 nt, Artificial Sequence
  Description of Artificial Sequence: Synthetic oligonucleotide
gagaaucagacgacaagua

SEQ ID NO: 4060 - RNA, 19 nt, Artificial Sequence
  Description of Artificial Sequence: Synthetic oligonucleotide
auuggggaaagcaucgaag

SEQ ID NO: 4061 - RNA, 19 nt, Artificial Sequence
  Description of Artificial Sequence: Synthetic oligonucleotide
gucucaugcacggcaucug

SEQ ID NO: 4062 - RNA, 19 nt, Artificial Sequence
  Description of Artificial Sequence: Synthetic oligonucleotide
gggaaucccccuccacaga

SEQ ID NO: 4063 - RNA, 19 nt, Artificial Sequence
  Description of Artificial Sequence: Synthetic oligonucleotide
aucaugugguuuaaagaua

SEQ ID NO: 4064 - RNA, 19 nt, Artificial Sequence
  Description of Artificial Sequence: Synthetic oligonucleotide
aaugagacccuuguagaag

SEQ ID NO: 4065 - RNA, 19 nt, Artificial Sequence
  Description of Artificial Sequence: Synthetic oligonucleotide
gacucaggcauuguauuga

SEQ ID NO: 4066 - RNA, 19 nt, Artificial Sequence
  Description of Artificial Sequence: Synthetic oligonucleotide
aaggaugggaaccggaacc

SEQ ID NO: 4067 - RNA, 19 nt, Artificial Sequence
  Description of Artificial Sequence: Synthetic oligonucleotide
cucacuauccgcagaguga

SEQ ID NO: 4068 - RNA, 19 nt, Artificial Sequence
  Description of Artificial Sequence: Synthetic oligonucleotide
aggaaggaggacgaaggcc

SEQ ID NO: 4069 - RNA, 19 nt, Artificial Sequence
  Description of Artificial Sequence: Synthetic oligonucleotide
cucuacaccugccaggcau

SEQ ID NO: 4070 - RNA, 19 nt, Artificial Sequence
  Description of Artificial Sequence: Synthetic oligonucleotide
ugcaguguucuuggcugug

SEQ ID NO: 4071 - RNA, 19 nt, Artificial Sequence
  Description of Artificial Sequence: Synthetic oligonucleotide
gcaaaaguggaggcauuuu

SEQ ID NO: 4072 - RNA, 19 nt, Artificial Sequence
  Description of Artificial Sequence: Synthetic oligonucleotide
uucauaauagaaggugccc

SEQ ID NO: 4073 - RNA, 19 nt, Artificial Sequence
  Description of Artificial Sequence: Synthetic oligonucleotide
caggaaaagacgaacuugg

SEQ ID NO: 4074 - RNA, 19 nt, Artificial Sequence
  Description of Artificial Sequence: Synthetic oligonucleotide
gaaaucauuauucuaguag

SEQ ID NO: 4075 - RNA, 19 nt, Artificial Sequence
  Description of Artificial Sequence: Synthetic oligonucleotide
ggcacggcggugauugcca

SEQ ID NO: 4076 - RNA, 19 nt, Artificial Sequence
  Description of Artificial Sequence: Synthetic oligonucleotide
auguucuucuggcuacuuc

SEQ ID NO: 4077 - RNA, 19 nt, Artificial Sequence
  Description of Artificial Sequence: Synthetic oligonucleotide
cuugucaucauccuacgga

SEQ ID NO: 4078 - RNA, 19 nt, Artificial Sequence
  Description of Artificial Sequence: Synthetic oligonucleotide
accguuaagcgggccaaug

SEQ ID NO: 4079 - RNA, 19 nt, Artificial Sequence
  Description of Artificial Sequence: Synthetic oligonucleotide
ggaggggaacugaagacag

SEQ ID NO: 4080 - RNA, 19 nt, Artificial Sequence
  Description of Artificial Sequence: Synthetic oligonucleotide
ggcuacuuguccaucguca

SEQ ID NO: 4081 - RNA, 19 nt, Artificial Sequence
  Description of Artificial Sequence: Synthetic oligonucleotide
auggauccagaugaacucc

SEQ ID NO: 4082 - RNA, 19 nt, Artificial Sequence
  Description of Artificial Sequence: Synthetic oligonucleotide
ccauuggaugaacauugug

SEQ ID NO: 4083 - RNA, 19 nt, Artificial Sequence
  Description of Artificial Sequence: Synthetic oligonucleotide
gaacgacugccuuaugaug

SEQ ID NO: 4084 - RNA, 19 nt, Artificial Sequence
  Description of Artificial Sequence: Synthetic oligonucleotide
gccagcaaaugggaauucc

SEQ ID NO: 4085 - RNA, 19 nt, Artificial Sequence
  Description of Artificial Sequence: Synthetic oligonucleotide
cccagagaccggcugaagc

SEQ ID NO: 4086 - RNA, 19 nt, Artificial Sequence
  Description of Artificial Sequence: Synthetic oligonucleotide
cuagguaagccucuuggcc

SEQ ID NO: 4087 - RNA, 19 nt, Artificial Sequence
  Description of Artificial Sequence: Synthetic oligonucleotide
cguggugccuuuggccaag

SEQ ID NO: 4088 - RNA, 19 nt, Artificial Sequence
  Description of Artificial Sequence: Synthetic oligonucleotide
gugauugaagcagaugccu

SEQ ID NO: 4089 - RNA, 19 nt, Artificial Sequence
  Description of Artificial Sequence: Synthetic oligonucleotide
uuuggaauugacaagacag

SEQ ID NO: 4090 - RNA, 19 nt, Artificial Sequence
  Description of Artificial Sequence: Synthetic oligonucleotide
gcaacuugcaggacaguag

SEQ ID NO: 4091 - RNA, 19 nt, Artificial Sequence
  Description of Artificial Sequence: Synthetic oligonucleotide
gcagucaaaauguugaaag

SEQ ID NO: 4092 - RNA, 19 nt, Artificial Sequence
  Description of Artificial Sequence: Synthetic oligonucleotide
gaaggagcaacacacagug

SEQ ID NO: 4093 - RNA, 19 nt, Artificial Sequence
  Description of Artificial Sequence: Synthetic oligonucleotide
gagcaucgagcucucaugu

SEQ ID NO: 4094 - RNA, 19 nt, Artificial Sequence
  Description of Artificial Sequence: Synthetic oligonucleotide
ucugaacucaagauccuca

SEQ ID NO: 4095 - RNA, 19 nt, Artificial Sequence
  Description of Artificial Sequence: Synthetic oligonucleotide
auucauauuggucaccauc

SEQ ID NO: 4096 - RNA, 19 nt, Artificial Sequence
  Description of Artificial Sequence: Synthetic oligonucleotide
cucaauguggucaaccuuc

SEQ ID NO: 4097 - RNA, 19 nt, Artificial Sequence
  Description of Artificial Sequence: Synthetic oligonucleotide
cuaggugccuguaccaagc

SEQ ID NO: 4098 - RNA, 19 nt, Artificial Sequence
  Description of Artificial Sequence: Synthetic oligonucleotide
ccaggagggccacucaugg

SEQ ID NO: 4099 - RNA, 19 nt, Artificial Sequence
  Description of Artificial Sequence: Synthetic oligonucleotide
gugauuguggaauucugca

SEQ ID NO: 4100 - RNA, 19 nt, Artificial Sequence
  Description of Artificial Sequence: Synthetic oligonucleotide
aaauuuggaaaccugucca

SEQ ID NO: 4101 - RNA, 19 nt, Artificial Sequence
  Description of Artificial Sequence: Synthetic oligonucleotide
acuuaccugaggagcaaga

SEQ ID NO: 4102 - RNA, 19 nt, Artificial Sequence
  Description of Artificial Sequence: Synthetic oligonucleotide
agaaaugaauuuguccccu

SEQ ID NO: 4103 - RNA, 19 nt, Artificial Sequence
  Description of Artificial Sequence: Synthetic oligonucleotide
uacaagaccaaaggggcac

SEQ ID NO: 4104 - RNA, 19 nt, Artificial Sequence
  Description of Artificial Sequence: Synthetic oligonucleotide
cgauuccgucaagggaaag

SEQ ID NO: 4105 - RNA, 19 nt, Artificial Sequence
  Description of Artificial Sequence: Synthetic oligonucleotide
gacuacguuggagcaaucc

SEQ ID NO: 4106 - RNA, 19 nt, Artificial Sequence
  Description of Artificial Sequence: Synthetic oligonucleotide
ccuguggaucugaaacggc

SEQ ID NO: 4107 - RNA, 19 nt, Artificial Sequence
  Description of Artificial Sequence: Synthetic oligonucleotide
cgcuuggacagcaucacca

SEQ ID NO: 4108 - RNA, 19 nt, Artificial Sequence
  Description of Artificial Sequence: Synthetic oligonucleotide
aguagccagagcucagcca

SEQ ID NO: 4109 - RNA, 19 nt, Artificial Sequence
  Description of Artificial Sequence: Synthetic oligonucleotide
agcucuggauuuguggagg

SEQ ID NO: 4110 - RNA, 19 nt, Artificial Sequence
  Description of Artificial Sequence: Synthetic oligonucleotide
gagaagucccucagugaug

SEQ ID NO: 4111 - RNA, 19 nt, Artificial Sequence
  Description of Artificial Sequence: Synthetic oligonucleotide
guagaagaagaggaagcuc

SEQ ID NO: 4112 - RNA, 19 nt, Artificial Sequence
  Description of Artificial Sequence: Synthetic oligonucleotide
ccugaagaucuguauaagg

SEQ ID NO: 4113 - RNA, 19 nt, Artificial Sequence
  Description of Artificial Sequence: Synthetic oligonucleotide
gacuuccugaccuuggagc

SEQ ID NO: 4114 - RNA, 19 nt, Artificial Sequence
  Description of Artificial Sequence: Synthetic oligonucleotide
caucucaucuguuacagcu

SEQ ID NO: 4115 - RNA, 19 nt, Artificial Sequence
  Description of Artificial Sequence: Synthetic oligonucleotide
uuccaaguggcuaagggca

SEQ ID NO: 4116 - RNA, 19 nt, Artificial Sequence
  Description of Artificial Sequence: Synthetic oligonucleotide
auggaguucuuggcaucgc

SEQ ID NO: 4117 - RNA, 19 nt, Artificial Sequence
  Description of Artificial Sequence: Synthetic oligonucleotide
cgaaaguguauccacaggg

SEQ ID NO: 4118 - RNA, 19 nt, Artificial Sequence
  Description of Artificial Sequence: Synthetic oligonucleotide
gaccuggcggcacgaaaua

SEQ ID NO: 4119 - RNA, 19 nt, Artificial Sequence
  Description of Artificial Sequence: Synthetic oligonucleotide
auccucuuaucggagaaga

SEQ ID NO: 4120 - RNA, 19 nt, Artificial Sequence
  Description of Artificial Sequence: Synthetic oligonucleotide
aacgugguuaaaaucugug

SEQ ID NO: 4121 - RNA, 19 nt, Artificial Sequence
  Description of Artificial Sequence: Synthetic oligonucleotide
gacuuuggcuuggcccggg

SEQ ID NO: 4122 - RNA, 19 nt, Artificial Sequence
  Description of Artificial Sequence: Synthetic oligonucleotide
gauauuuauaaagauccag

SEQ ID NO: 4123 - RNA, 19 nt, Artificial Sequence
  Description of Artificial Sequence: Synthetic oligonucleotide
gauuaugucagaaaaggag

SEQ ID NO: 4124 - RNA, 19 nt, Artificial Sequence
  Description of Artificial Sequence: Synthetic oligonucleotide
gaugcucgccucccuuuga

SEQ ID NO: 4125 - RNA, 19 nt, Artificial Sequence
  Description of Artificial Sequence: Synthetic oligonucleotide
aaauggauggccccagaaa

SEQ ID NO: 4126 - RNA, 19 nt, Artificial Sequence
  Description of Artificial Sequence: Synthetic oligonucleotide
acaauuuuugacagagugu

SEQ ID NO: 4127 - RNA, 19 nt, Artificial Sequence
  Description of Artificial Sequence: Synthetic oligonucleotide
uacacaauccagagugacg

SEQ ID NO: 4128 - RNA, 19 nt, Artificial Sequence
  Description of Artificial Sequence: Synthetic oligonucleotide
gucuggucuuuugguguuu

SEQ ID NO: 4129 - RNA, 19 nt, Artificial Sequence
  Description of Artificial Sequence: Synthetic oligonucleotide
uugcugugggaaauauuuu

SEQ ID NO: 4130 - RNA, 19 nt, Artificial Sequence
  Description of Artificial Sequence: Synthetic oligonucleotide
uccuuaggugcuucuccau

SEQ ID NO: 4131 - RNA, 19 nt, Artificial Sequence
  Description of Artificial Sequence: Synthetic oligonucleotide
uauccugggguaaagauug

SEQ ID NO: 4132 - RNA, 19 nt, Artificial Sequence
  Description of Artificial Sequence: Synthetic oligonucleotide
gaugaagaauuuuguaggc

SEQ ID NO: 4133 - RNA, 19 nt, Artificial Sequence
  Description of Artificial Sequence: Synthetic oligonucleotide
cgauugaaagaaggaacua

SEQ ID NO: 4134 - RNA, 19 nt, Artificial Sequence
  Description of Artificial Sequence: Synthetic oligonucleotide
agaaugagggccccugauu

SEQ ID NO: 4135 - RNA, 19 nt, Artificial Sequence
  Description of Artificial Sequence: Synthetic oligonucleotide
uauacuacaccagaaaugu

SEQ ID NO: 4136 - RNA, 19 nt, Artificial Sequence
  Description of Artificial Sequence: Synthetic oligonucleotide
uaccagaccaugcuggacu

SEQ ID NO: 4137 - RNA, 19 nt, Artificial Sequence
  Description of Artificial Sequence: Synthetic oligonucleotide
ugcuggcacggggagccca

SEQ ID NO: 4138 - RNA, 19 nt, Artificial Sequence
  Description of Artificial Sequence: Synthetic oligonucleotide
agucagagacccacguuuu

SEQ ID NO: 4139 - RNA, 19 nt, Artificial Sequence
  Description of Artificial Sequence: Synthetic oligonucleotide
ucagaguugguggaacauu

SEQ ID NO: 4140 - RNA, 19 nt, Artificial Sequence
  Description of Artificial Sequence: Synthetic oligonucleotide
uugggaaaucucuugcaag

SEQ ID NO: 4141 - RNA, 19 nt, Artificial Sequence
  Description of Artificial Sequence: Synthetic oligonucleotide
gcuaaugcucagcaggaug

SEQ ID NO: 4142 - RNA, 19 nt, Artificial Sequence
  Description of Artificial Sequence: Synthetic oligonucleotide
ggcaaagacuacauuguuc

SEQ ID NO: 4143 - RNA, 19 nt, Artificial Sequence
  Description of Artificial Sequence: Synthetic oligonucleotide
cuuccgauaucagagacuu

SEQ ID NO: 4144 - RNA, 19 nt, Artificial Sequence
  Description of Artificial Sequence: Synthetic oligonucleotide
uugagcauggaagaggauu

SEQ ID NO: 4145 - RNA, 19 nt, Artificial Sequence
  Description of Artificial Sequence: Synthetic oligonucleotide
ucuggacucucucugccua

SEQ ID NO: 4146 - RNA, 19 nt, Artificial Sequence
  Description of Artificial Sequence: Synthetic oligonucleotide
accucaccuguuuccugua

SEQ ID NO: 4147 - RNA, 19 nt, Artificial Sequence
  Description of Artificial Sequence: Synthetic oligonucleotide
auggaggaggaggaaguau

SEQ ID NO: 4148 - RNA, 19 nt, Artificial Sequence
  Description of Artificial Sequence: Synthetic oligonucleotide
ugugaccccaaauuccauu

SEQ ID NO: 4149 - RNA, 19 nt, Artificial Sequence
  Description of Artificial Sequence: Synthetic oligonucleotide
uaugacaacacagcaggaa

SEQ ID NO: 4150 - RNA, 19 nt, Artificial Sequence
  Description of Artificial Sequence: Synthetic oligonucleotide
aucagucaguaucugcaga

SEQ ID NO: 4151 - RNA, 19 nt, Artificial Sequence
  Description of Artificial Sequence: Synthetic oligonucleotide
aacaguaagcgaaagagcc

SEQ ID NO: 4152 - RNA, 19 nt, Artificial Sequence
  Description of Artificial Sequence: Synthetic oligonucleotide
cggccugugaguguaaaaa

SEQ ID NO: 4153 - RNA, 19 nt, Artificial Sequence
  Description of Artificial Sequence: Synthetic oligonucleotide
acauuugaagauaucccgu

SEQ ID NO: 4154 - RNA, 19 nt, Artificial Sequence
  Description of Artificial Sequence: Synthetic oligonucleotide
uuagaagaaccagaaguaa

SEQ ID NO: 4155 - RNA, 19 nt, Artificial Sequence
  Description of Artificial Sequence: Synthetic oligonucleotide
aaaguaaucccagaugaca

SEQ ID NO: 4156 - RNA, 19 nt, Artificial Sequence
  Description of Artificial Sequence: Synthetic oligonucleotide
aaccagacggacaguggua

SEQ ID NO: 4157 - RNA, 19 nt, Artificial Sequence
  Description of Artificial Sequence: Synthetic oligonucleotide
augguucuugccucagaag

SEQ ID NO: 4158 - RNA, 19 nt, Artificial Sequence
  Description of Artificial Sequence: Synthetic oligonucleotide
gagcugaaaacuuuggaag

SEQ ID NO: 4159 - RNA, 19 nt, Artificial Sequence
  Description of Artificial Sequence: Synthetic oligonucleotide
gacagaaccaaauuaucuc

SEQ ID NO: 4160 - RNA, 19 nt, Artificial Sequence
  Description of Artificial Sequence: Synthetic oligonucleotide
ccaucuuuugguggaaugg

SEQ ID NO: 4161 - RNA, 19 nt, Artificial Sequence
  Description of Artificial Sequence: Synthetic oligonucleotide
gugcccagcaaaagcaggg

SEQ ID NO: 4162 - RNA, 19 nt, Artificial Sequence
  Description of Artificial Sequence: Synthetic oligonucleotide
gagucuguggcaucugaag

SEQ ID NO: 4163 - RNA, 19 nt, Artificial Sequence
  Description of Artificial Sequence: Synthetic oligonucleotide
ggcucaaaccagacaagcg

SEQ ID NO: 4164 - RNA, 19 nt, Artificial Sequence
  Description of Artificial Sequence: Synthetic oligonucleotide
ggcuaccaguccggauauc

SEQ ID NO: 4165 - RNA, 19 nt, Artificial Sequence
  Description of Artificial Sequence: Synthetic oligonucleotide
cacuccgaugacacagaca

SEQ ID NO: 4166 - RNA, 19 nt, Artificial Sequence
  Description of Artificial Sequence: Synthetic oligonucleotide
accaccguguacuccagug

SEQ ID NO: 4167 - RNA, 19 nt, Artificial Sequence
  Description of Artificial Sequence: Synthetic oligonucleotide
gaggaagcagaacuuuuaa

SEQ ID NO: 4168 - RNA, 19 nt, Artificial Sequence
  Description of Artificial Sequence: Synthetic oligonucleotide
aagcugauagagauuggag

SEQ ID NO: 4169 - RNA, 19 nt, Artificial Sequence
  Description of Artificial Sequence: Synthetic oligonucleotide
gugcaaaccgguagcacag

SEQ ID NO: 4170 - RNA, 19 nt, Artificial Sequence
  Description of Artificial Sequence: Synthetic oligonucleotide
gcccagauucuccagccug

SEQ ID NO: 4171 - RNA, 19 nt, Artificial Sequence
  Description of Artificial Sequence: Synthetic oligonucleotide
gacucggggaccacacuga

SEQ ID NO: 4172 - RNA, 19 nt, Artificial Sequence
  Description of Artificial Sequence: Synthetic oligonucleotide
agcucuccuccuguuuaaa

SEQ ID NO: 4173 - RNA, 19 nt, Artificial Sequence
  Description of Artificial Sequence: Synthetic oligonucleotide
aaggaagcauccacacccc

SEQ ID NO: 4174 - RNA, 19 nt, Artificial Sequence
  Description of Artificial Sequence: Synthetic oligonucleotide
caacucccggacaucacau

SEQ ID NO: 4175 - RNA, 19 nt, Artificial Sequence
  Description of Artificial Sequence: Synthetic oligonucleotide
ugagaggucugcucagauu

SEQ ID NO: 4176 - RNA, 19 nt, Artificial Sequence
  Description of Artificial Sequence: Synthetic oligonucleotide
uuugaaguguuguucuuuc

SEQ ID NO: 4177 - RNA, 19 nt, Artificial Sequence
  Description of Artificial Sequence: Synthetic oligonucleotide
ccaccagcaggaaguagcc

SEQ ID NO: 4178 - RNA, 19 nt, Artificial Sequence
  Description of Artificial Sequence: Synthetic oligonucleotide
cgcauuugauuuucauuuc

SEQ ID NO: 4179 - RNA, 19 nt, Artificial Sequence
  Description of Artificial Sequence: Synthetic oligonucleotide
cgacaacagaaaaaggacc

SEQ ID NO: 4180 - RNA, 19 nt, Artificial Sequence
  Description of Artificial Sequence: Synthetic oligonucleotide
cucggacugcagggagcca

SEQ ID NO: 4181 - RNA, 19 nt, Artificial Sequence
  Description of Artificial Sequence: Synthetic oligonucleotide
agucuucuaggcauauccu

SEQ ID NO: 4182 - RNA, 19 nt, Artificial Sequence
  Description of Artificial Sequence: Synthetic oligonucleotide
uggaagaggcuugugaccc

SEQ ID NO: 4183 - RNA, 19 nt, Artificial Sequence
  Description of Artificial Sequence: Synthetic oligonucleotide
caagaaugugucugugucu

SEQ ID NO: 4184 - RNA, 19 nt, Artificial Sequence
  Description of Artificial Sequence: Synthetic oligonucleotide
uucucccaguguugaccug

SEQ ID NO: 4185 - RNA, 19 nt, Artificial Sequence
  Description of Artificial Sequence: Synthetic oligonucleotide
gauccucuuuuuucauuca

SEQ ID NO: 4186 - RNA, 19 nt, Artificial Sequence
  Description of Artificial Sequence: Synthetic oligonucleotide
auuuaaaaagcauuaucau

SEQ ID NO: 4187 - RNA, 19 nt, Artificial Sequence
  Description of Artificial Sequence: Synthetic oligonucleotide
ugccccugcugcgggucuc

SEQ ID NO: 4188 - RNA, 19 nt, Artificial Sequence
  Description of Artificial Sequence: Synthetic oligonucleotide
caccauggguuuagaacaa

SEQ ID NO: 4189 - RNA, 19 nt, Artificial Sequence
  Description of Artificial Sequence: Synthetic oligonucleotide
aagagcuucaagcaauggc

SEQ ID NO: 4190 - RNA, 19 nt, Artificial Sequence
  Description of Artificial Sequence: Synthetic oligonucleotide
ccccauccucaaagaagua

SEQ ID NO: 4191 - RNA, 19 nt, Artificial Sequence
  Description of Artificial Sequence: Synthetic oligonucleotide
agcaguaccuggggagcug

SEQ ID NO: 4192 - RNA, 19 nt, Artificial Sequence
  Description of Artificial Sequence: Synthetic oligonucleotide
gacacuucuguaaaacuag

SEQ ID NO: 4193 - RNA, 19 nt, Artificial Sequence
  Description of Artificial Sequence: Synthetic oligonucleotide
gaagauaaaccaggcaacg

SEQ ID NO: 4194 - RNA, 19 nt, Artificial Sequence
  Description of Artificial Sequence: Synthetic oligonucleotide
guaaguguucgagguguug

SEQ ID NO: 4195 - RNA, 19 nt, Artificial Sequence
  Description of Artificial Sequence: Synthetic oligonucleotide
gaagaugggaaggauuugc

SEQ ID NO: 4196 - RNA, 19 nt, Artificial Sequence
  Description of Artificial Sequence: Synthetic oligonucleotide
cagggcugagucuauccaa

SEQ ID NO: 4197 - RNA, 19 nt, Artificial Sequence
  Description of Artificial Sequence: Synthetic oligonucleotide
agaggcuuuguuuaggacg

SEQ ID NO: 4198 - RNA, 19 nt, Artificial Sequence
  Description of Artificial Sequence: Synthetic oligonucleotide
gugggucccaagccaagcc

SEQ ID NO: 4199 - RNA, 19 nt, Artificial Sequence
  Description of Artificial Sequence: Synthetic oligonucleotide
cuuaaguguggaauucgga

SEQ ID NO: 4200 - RNA, 19 nt, Artificial Sequence
  Description of Artificial Sequence: Synthetic oligonucleotide
auugauagaaaggaagacu

SEQ ID NO: 4201 - RNA, 19 nt, Artificial Sequence
  Description of Artificial Sequence: Synthetic oligonucleotide
uaacguuaccuugcuuugg

SEQ ID NO: 4202 - RNA, 19 nt, Artificial Sequence
  Description of Artificial Sequence: Synthetic oligonucleotide
gagaguacuggagccugca

SEQ ID NO: 4203 - RNA, 19 nt, Artificial Sequence
  Description of Artificial Sequence: Synthetic oligonucleotide
aaaugcauuguguuugcuc

SEQ ID NO: 4204 - RNA, 19 nt, Artificial Sequence
  Description of Artificial Sequence: Synthetic oligonucleotide
cugguggaggugggcaugg

SEQ ID NO: 4205 - RNA, 19 nt, Artificial Sequence
  Description of Artificial Sequence: Synthetic oligonucleotide
gggucuguucugaaaugua

SEQ ID NO: 4206 - RNA, 19 nt, Artificial Sequence
  Description of Artificial Sequence: Synthetic oligonucleotide
aaaggguucagacgggguu

SEQ ID NO: 4207 - RNA, 19 nt, Artificial Sequence
  Description of Artificial Sequence: Synthetic oligonucleotide
uucugguuuuagaagguug

SEQ ID NO: 4208 - RNA, 19 nt, Artificial Sequence
  Description of Artificial Sequence: Synthetic oligonucleotide
gcguguucuucgaguuggg

SEQ ID NO: 4209 - RNA, 19 nt, Artificial Sequence
  Description of Artificial Sequence: Synthetic oligonucleotide
gcuaaaguagaguucguug

SEQ ID NO: 4210 - RNA, 19 nt, Artificial Sequence
  Description of Artificial Sequence: Synthetic oligonucleotide
gugcuguuucugacuccua

SEQ ID NO: 4211 - RNA, 19 nt, Artificial Sequence
  Description of Artificial Sequence: Synthetic oligonucleotide
aaugagaguuccuuccaga

SEQ ID NO: 4212 - RNA, 19 nt, Artificial Sequence
  Description of Artificial Sequence: Synthetic oligonucleotide
accguuagcugucuccuug

SEQ ID NO: 4213 - RNA, 19 nt, Artificial Sequence
  Description of Artificial Sequence: Synthetic oligonucleotide
gccaagccccaggaagaaa

SEQ ID NO: 4214 - RNA, 19 nt, Artificial Sequence
  Description of Artificial Sequence: Synthetic oligonucleotide
aaugaugcagcucuggcuc

SEQ ID NO: 4215 - RNA, 19 nt, Artificial Sequence
  Description of Artificial Sequence: Synthetic oligonucleotide
ccuugucucccaggcugau

SEQ ID NO: 4216 - RNA, 19 nt, Artificial Sequence
  Description of Artificial Sequence: Synthetic oligonucleotide
uccuuuauucagaauacca

SEQ ID NO: 4217 - RNA, 19 nt, Artificial Sequence
  Description of Artificial Sequence: Synthetic oligonucleotide
acaaagaaaggacauucag

SEQ ID NO: 4218 - RNA, 19 nt, Artificial Sequence
  Description of Artificial Sequence: Synthetic oligonucleotide
gcucaaggcucccugccgu

SEQ ID NO: 4219 - RNA, 19 nt, Artificial Sequence
  Description of Artificial Sequence: Synthetic oligonucleotide
uguugaagaguucugacug

SEQ ID NO: 4220 - RNA, 19 nt, Artificial Sequence
  Description of Artificial Sequence: Synthetic oligonucleotide
gcacaaaccagcuucuggu

SEQ ID NO: 4221 - RNA, 19 nt, Artificial Sequence
  Description of Artificial Sequence: Synthetic oligonucleotide
uuucuucuggaaugaauac

SEQ ID NO: 4222 - RNA, 19 nt, Artificial Sequence
  Description of Artificial Sequence: Synthetic oligonucleotide
cccucauaucuguccugau

SEQ ID NO: 4223 - RNA, 19 nt, Artificial Sequence
  Description of Artificial Sequence: Synthetic oligonucleotide
ugugauaugucugagacug

SEQ ID NO: 4224 - RNA, 19 nt, Artificial Sequence
  Description of Artificial Sequence: Synthetic oligonucleotide
gaaugcgggagguucaaug

SEQ ID NO: 4225 - RNA, 19 nt, Artificial Sequence
  Description of Artificial Sequence: Synthetic oligonucleotide
gugaagcuguguguggugu

SEQ ID NO: 4226 - RNA, 19 nt, Artificial Sequence
  Description of Artificial Sequence: Synthetic oligonucleotide
ucaaaguuucaggaaggau

SEQ ID NO: 4227 - RNA, 19 nt, Artificial Sequence
  Description of Artificial Sequence: Synthetic oligonucleotide
uuuuacccuuuuguucuuc

SEQ ID NO: 4228 - RNA, 19 nt, Artificial Sequence
  Description of Artificial Sequence: Synthetic oligonucleotide
cccccuguccccaacccac

SEQ ID NO: 4229 - RNA, 19 nt, Artificial Sequence
  Description of Artificial Sequence: Synthetic oligonucleotide
cucucaccccgcaacccau

SEQ ID NO: 4230 - RNA, 19 nt, Artificial Sequence
  Description of Artificial Sequence: Synthetic oligonucleotide
ucaguauuuuaguuauuug

SEQ ID NO: 4231 - RNA, 19 nt, Artificial Sequence
  Description of Artificial Sequence: Synthetic oligonucleotide
ggccucuacuccaguaaac

SEQ ID NO: 4232 - RNA, 19 nt, Artificial Sequence
  Description of Artificial Sequence: Synthetic oligonucleotide
ccugauuggguuuguucac

SEQ ID NO: 4233 - RNA, 19 nt, Artificial Sequence
  Description of Artificial Sequence: Synthetic oligonucleotide
cucucugaaugauuauuag

SEQ ID NO: 4234 - RNA, 19 nt, Artificial Sequence
  Description of Artificial Sequence: Synthetic oligonucleotide
gccagacuucaaaauuauu

SEQ ID NO: 4235 - RNA, 19 nt, Artificial Sequence
  Description of Artificial Sequence: Synthetic oligonucleotide
uuuauagcccaaauuauaa

SEQ ID NO: 4236 - RNA, 19 nt, Artificial Sequence
  Description of Artificial Sequence: Synthetic oligonucleotide
acaucuauuguauuauuua

SEQ ID NO: 4237 - RNA, 19 nt, Artificial Sequence
  Description of Artificial Sequence: Synthetic oligonucleotide
agacuuuuaacauauagag

SEQ ID NO: 4238 - RNA, 19 nt, Artificial Sequence
  Description of Artificial Sequence: Synthetic oligonucleotide
gcuauuucuacugauuuuu

SEQ ID NO: 4239 - RNA, 19 nt, Artificial Sequence
  Description of Artificial Sequence: Synthetic oligonucleotide
ugcccuuguucuguccuuu

SEQ ID NO: 4240 - RNA, 19 nt, Artificial Sequence
  Description of Artificial Sequence: Synthetic oligonucleotide
uuuuucaaaaaagaaaaug

SEQ ID NO: 4241 - RNA, 19 nt, Artificial Sequence
  Description of Artificial Sequence: Synthetic oligonucleotide
guguuuuuuguuugguacc

SEQ ID NO: 4242 - RNA, 19 nt, Artificial Sequence
  Description of Artificial Sequence: Synthetic oligonucleotide
cauagugugaaaugcuggg

SEQ ID NO: 4243 - RNA, 19 nt, Artificial Sequence
  Description of Artificial Sequence: Synthetic oligonucleotide
gaacaaugacuauaagaca

SEQ ID NO: 4244 - RNA, 19 nt, Artificial Sequence
  Description of Artificial Sequence: Synthetic oligonucleotide
augcuauggcacauauauu

SEQ ID NO: 4245 - RNA, 19 nt, Artificial Sequence
  Description of Artificial Sequence: Synthetic oligonucleotide
uuauagucuguuuauguag

SEQ ID NO: 4246 - RNA, 19 nt, Artificial Sequence
  Description of Artificial Sequence: Synthetic oligonucleotide
gaaacaaauguaauauauu

SEQ ID NO: 4247 - RNA, 19 nt, Artificial Sequence
  Description of Artificial Sequence: Synthetic oligonucleotide
uaaagccuuauauauaaug

SEQ ID NO: 4248 - RNA, 19 nt, Artificial Sequence
  Description of Artificial Sequence: Synthetic oligonucleotide
gaacuuuguacuauucaca

SEQ ID NO: 4249 - RNA, 19 nt, Artificial Sequence
  Description of Artificial Sequence: Synthetic oligonucleotide
auuuuguaucaguauuaug

SEQ ID NO: 4250 - RNA, 19 nt, Artificial Sequence
  Description of Artificial Sequence: Synthetic oligonucleotide
guagcauaacaaaggucau

SEQ ID NO: 4251 - RNA, 19 nt, Artificial Sequence
  Description of Artificial Sequence: Synthetic oligonucleotide
uaaugcuuucagcaauuga

SEQ ID NO: 4252 - RNA, 19 nt, Artificial Sequence
  Description of Artificial Sequence: Synthetic oligonucleotide
augucauuuuauuaaagaa

SEQ ID NO: 4253 - RNA, 19 nt, Artificial Sequence
  Description of Artificial Sequence: Synthetic oligonucleotide
agaacauugaaaaacuuga

SEQ ID NO: 4254 - RNA, 25 nt, Artificial Sequence
  Description of Artificial Sequence: Synthetic oligonucleotide
acugagucccgggaccccgggagag

SEQ ID NO: 4255 - RNA, 25 nt, Artificial Sequence
  Description of Artificial Sequence: Synthetic oligonucleotide
gcggucaguguguggucgcugcguu

SEQ ID NO: 4256 - RNA, 25 nt, Artificial Sequence
  Description of Artificial Sequence: Synthetic oligonucleotide
uuccucugccugcgccgggcaucac

SEQ ID NO: 4257 - RNA, 25 nt, Artificial Sequence
  Description of Artificial Sequence: Synthetic oligonucleotide
cuugcgcgccgcagaaaguccgucu

SEQ ID NO: 4258 - RNA, 25 nt, Artificial Sequence
  Description of Artificial Sequence: Synthetic oligonucleotide
uggcagccuggauauccucuccuac

SEQ ID NO: 4259 - RNA, 25 nt, Artificial Sequence
  Description of Artificial Sequence: Synthetic oligonucleotide
ccggcacccgcagacgccccugcag

SEQ ID NO: 4260 - RNA, 25 nt, Artificial Sequence
  Description of Artificial Sequence: Synthetic oligonucleotide
gccgccggucggcgcccgggcuccc

SEQ ID NO: 4261 - RNA, 25 nt, Artificial Sequence
  Description of Artificial Sequence: Synthetic oligonucleotide
cuagcccugugcgcucaacuguccu

SEQ ID NO: 4262 - RNA, 25 nt, Artificial Sequence
  Description of Artificial Sequence: Synthetic oligonucleotide
ugcgcugcggggugccgcgaguucc

SEQ ID NO: 4263 - RNA, 25 nt, Artificial Sequence
  Description of Artificial Sequence: Synthetic oligonucleotide
caccuccgcgccuccuucucuagac

SEQ ID NO: 4264 - RNA, 25 nt, Artificial Sequence
  Description of Artificial Sequence: Synthetic oligonucleotide
caggcgcugggagaaagaaccggcu

SEQ ID NO: 4265 - RNA, 25 nt, Artificial Sequence
  Description of Artificial Sequence: Synthetic oligonucleotide
ucccgaguucugggcauuucgcccg

SEQ ID NO: 4266 - RNA, 25 nt, Artificial Sequence
  Description of Artificial Sequence: Synthetic oligonucleotide
ggcucgaggugcaggaugcagagca

SEQ ID NO: 4267 - RNA, 25 nt, Artificial Sequence
  Description of Artificial Sequence: Synthetic oligonucleotide
aaggugcugcuggccgucgcccugu

SEQ ID NO: 4268 - RNA, 25 nt, Artificial Sequence
  Description of Artificial Sequence: Synthetic oligonucleotide
uggcucugcguggagacccgggccg

SEQ ID NO: 4269 - RNA, 25 nt, Artificial Sequence
  Description of Artificial Sequence: Synthetic oligonucleotide
gccucuguggguuugccuaguguuu

SEQ ID NO: 4270 - RNA, 25 nt, Artificial Sequence
  Description of Artificial Sequence: Synthetic oligonucleotide
ucucuugaucugcccaggcucagca

SEQ ID NO: 4271 - RNA, 25 nt, Artificial Sequence
  Description of Artificial Sequence: Synthetic oligonucleotide
auacaaaaagacauacuuacaauua

SEQ ID NO: 4272 - RNA, 25 nt, Artificial Sequence
  Description of Artificial Sequence: Synthetic oligonucleotide
aaggcuaauacaacucuucaaauua

SEQ ID NO: 4273 - RNA, 25 nt, Artificial Sequence
  Description of Artificial Sequence: Synthetic oligonucleotide
acuugcaggggacagagggacuugg

SEQ ID NO: 4274 - RNA, 25 nt, Artificial Sequence
  Description of Artificial Sequence: Synthetic oligonucleotide
gacuggcuuuggcccaauaaucaga

SEQ ID NO: 4275 - RNA, 25 nt, Artificial Sequence
  Description of Artificial Sequence: Synthetic oligonucleotide
aguggcagugagcaaaggguggagg

SEQ ID NO: 4276 - RNA, 25 nt, Artificial Sequence
  Description of Artificial Sequence: Synthetic oligonucleotide
gugacugagugcagcgauggccucu

SEQ ID NO: 4277 - RNA, 25 nt, Artificial Sequence
  Description of Artificial Sequence: Synthetic oligonucleotide
uucuguaagacacucacaauuccaa

SEQ ID NO: 4278 - RNA, 25 nt, Artificial Sequence
  Description of Artificial Sequence: Synthetic oligonucleotide
aaagugaucggaaaugacacuggag

SEQ ID NO: 4279 - RNA, 25 nt, Artificial Sequence
  Description of Artificial Sequence: Synthetic oligonucleotide
gccuacaagugcuucuaccgggaaa

SEQ ID NO: 4280 - RNA, 25 nt, Artificial Sequence
  Description of Artificial Sequence: Synthetic oligonucleotide
acugacuuggccucggucauuuaug

SEQ ID NO: 4281 - RNA, 25 nt, Artificial Sequence
  Description of Artificial Sequence: Synthetic oligonucleotide
gucuauguucaagauuacagaucuc

SEQ ID NO: 4282 - RNA, 25 nt, Artificial Sequence
  Description of Artificial Sequence: Synthetic oligonucleotide
ccauuuauugcuucuguuagugacc

SEQ ID NO: 4283 - RNA, 25 nt, Artificial Sequence
  Description of Artificial Sequence: Synthetic oligonucleotide
caacauggagucguguacauuacug

SEQ ID NO: 4284 - RNA, 25 nt, Artificial Sequence
  Description of Artificial Sequence: Synthetic oligonucleotide
gagaacaaaaacaaaacugugguga

SEQ ID NO: 4285 - RNA, 25 nt, Artificial Sequence
  Description of Artificial Sequence: Synthetic oligonucleotide
auuccaugucucggguccauuucaa

SEQ ID NO: 4286 - RNA, 25 nt, Artificial Sequence
  Description of Artificial Sequence: Synthetic oligonucleotide
aaucucaacgugucacuuugugcaa

SEQ ID NO: 4287 - RNA, 25 nt, Artificial Sequence
  Description of Artificial Sequence: Synthetic oligonucleotide
agauacccagaaaagagauuuguuc

SEQ ID NO: 4288 - RNA, 25 nt, Artificial Sequence
  Description of Artificial Sequence: Synthetic oligonucleotide
ccugaugguaacagaauuuccuggg

SEQ ID NO: 4289 - RNA, 25 nt, Artificial Sequence
  Description of Artificial Sequence: Synthetic oligonucleotide
gacagcaagaagggcuuuacuauuc

SEQ ID NO: 4290 - RNA, 25 nt, Artificial Sequence
  Description of Artificial Sequence: Synthetic oligonucleotide
cccagcuacaugaucagcuaugcug

SEQ ID NO: 4291 - RNA, 25 nt, Artificial Sequence
  Description of Artificial Sequence: Synthetic oligonucleotide
ggcauggucuucugugaagcaaaaa

SEQ ID NO: 4292 - RNA, 25 nt, Artificial Sequence
  Description of Artificial Sequence: Synthetic oligonucleotide
auuaaugaugaaaguuaccagucua

SEQ ID NO: 4293 - RNA, 25 nt, Artificial Sequence
  Description of Artificial Sequence: Synthetic oligonucleotide
auuauguacauaguugucguuguag

SEQ ID NO: 4294 - RNA, 25 nt, Artificial Sequence
  Description of Artificial Sequence: Synthetic oligonucleotide
ggguauaggauuuaugaugugguuc

SEQ ID NO: 4295 - RNA, 25 nt, Artificial Sequence
  Description of Artificial Sequence: Synthetic oligonucleotide
cugaguccgucucauggaauugaac

SEQ ID NO: 4296 - RNA, 25 nt, Artificial Sequence
  Description of Artificial Sequence: Synthetic oligonucleotide
cuaucuguuggagaaaagcuugucu

SEQ ID NO: 4297 - RNA, 25 nt, Artificial Sequence
  Description of Artificial Sequence: Synthetic oligonucleotide
uuaaauuguacagcaagaacugaac

SEQ ID NO: 4298 - RNA, 25 nt, Artificial Sequence
  Description of Artificial Sequence: Synthetic oligonucleotide
cuaaauguggggauugacuucaacu

SEQ ID NO: 4299 - RNA, 25 nt, Artificial Sequence
  Description of Artificial Sequence: Synthetic oligonucleotide
ugggaauacccuucuucgaagcauc

SEQ ID NO: 4300 - RNA, 25 nt, Artificial Sequence
  Description of Artificial Sequence: Synthetic oligonucleotide
cagcauaagaaacuuguaaaccgag

SEQ ID NO: 4301 - RNA, 25 nt, Artificial Sequence
  Description of Artificial Sequence: Synthetic oligonucleotide
gaccuaaaaacccagucugggagug

SEQ ID NO: 4302 - RNA, 25 nt, Artificial Sequence
  Description of Artificial Sequence: Synthetic oligonucleotide
gagaugaagaaauuuuugagcaccu

SEQ ID NO: 4303 - RNA, 25 nt, Artificial Sequence
  Description of Artificial Sequence: Synthetic oligonucleotide
uuaacuauagaugguguaacccgga

SEQ ID NO: 4304 - RNA, 25 nt, Artificial Sequence
  Description of Artificial Sequence: Synthetic oligonucleotide
agugaccaaggauuguacaccugug

SEQ ID NO: 4305 - RNA, 25 nt, Artificial Sequence
  Description of Artificial Sequence: Synthetic oligonucleotide
gcagcauccagugggcugaugacca

SEQ ID NO: 4306 - RNA, 25 nt, Artificial Sequence
  Description of Artificial Sequence: Synthetic oligonucleotide
aagaagaacagcacauuugucaggg

SEQ ID NO: 4307 - RNA, 25 nt, Artificial Sequence
  Description of Artificial Sequence: Synthetic oligonucleotide
guccaugaaaaaccuuuuguugcuu

SEQ ID NO: 4308 - RNA, 25 nt, Artificial Sequence
  Description of Artificial Sequence: Synthetic oligonucleotide
uuuggaaguggcauggaaucucugg

SEQ ID NO: 4309 - RNA, 25 nt, Artificial Sequence
  Description of Artificial Sequence: Synthetic oligonucleotide
guggaagccacggugggggagcgug

SEQ ID NO: 4310 - RNA, 25 nt, Artificial Sequence
  Description of Artificial Sequence: Synthetic oligonucleotide
gucagaaucccugcgaaguaccuug

SEQ ID NO: 4311 - RNA, 25 nt, Artificial Sequence
  Description of Artificial Sequence: Synthetic oligonucleotide
gguuacccacccccagaaauaaaau

SEQ ID NO: 4312 - RNA, 25 nt, Artificial Sequence
  Description of Artificial Sequence: Synthetic oligonucleotide
ugguauaaaaauggaauaccccuug

SEQ ID NO: 4313 - RNA, 25 nt, Artificial Sequence
  Description of Artificial Sequence: Synthetic oligonucleotide
gaguccaaucacacaauuaaagcgg

SEQ ID NO: 4314 - RNA, 25 nt, Artificial Sequence
  Description of Artificial Sequence: Synthetic oligonucleotide
gggcauguacugacgauuauggaag

SEQ ID NO: 4315 - RNA, 25 nt, Artificial Sequence
  Description of Artificial Sequence: Synthetic oligonucleotide
gugagugaaagagacacaggaaauu

SEQ ID NO: 4316 - RNA, 25 nt, Artificial Sequence
  Description of Artificial Sequence: Synthetic oligonucleotide
uacacugucauccuuaccaauccca

SEQ ID NO: 4317 - RNA, 25 nt, Artificial Sequence
  Description of Artificial Sequence: Synthetic oligonucleotide
auuucaaaggagaagcagagccaug

SEQ ID NO: 4318 - RNA, 25 nt, Artificial Sequence
  Description of Artificial Sequence: Synthetic oligonucleotide
guggucucucugguuguguaugucc

SEQ ID NO: 4319 - RNA, 25 nt, Artificial Sequence
  Description of Artificial Sequence: Synthetic oligonucleotide
ccaccccagauuggugagaaaucuc

SEQ ID NO: 4320 - RNA, 25 nt, Artificial Sequence
  Description of Artificial Sequence: Synthetic oligonucleotide
cuaaucucuccuguggauuccuacc

SEQ ID NO: 4321 - RNA, 25 nt, Artificial Sequence
  Description of Artificial Sequence: Synthetic oligonucleotide
caguacggcaccacucaaacgcuga

SEQ ID NO: 4322 - RNA, 25 nt, Artificial Sequence
  Description of Artificial Sequence: Synthetic oligonucleotide
acauguacggucuaugccauuccuc

SEQ ID NO: 4323 - RNA, 25 nt, Artificial Sequence
  Description of Artificial Sequence: Synthetic oligonucleotide
cccccgcaucacauccacugguauu

SEQ ID NO: 4324 - RNA, 25 nt, Artificial Sequence
  Description of Artificial Sequence: Synthetic oligonucleotide
uggcaguuggaggaagagugcgcca

SEQ ID NO: 4325 - RNA, 25 nt, Artificial Sequence
  Description of Artificial Sequence: Synthetic oligonucleotide
aacgagcccagccaagcugucucag

SEQ ID NO: 4326 - RNA, 25 nt, Artificial Sequence
  Description of Artificial Sequence: Synthetic oligonucleotide
gugacaaacccauacccuugugaag

SEQ ID NO: 4327 - RNA, 25 nt, Artificial Sequence
  Description of Artificial Sequence: Synthetic oligonucleotide
gaauggagaaguguggaggacuucc

SEQ ID NO: 4328 - RNA, 25 nt, Artificial Sequence
  Description of Artificial Sequence: Synthetic oligonucleotide
cagggaggaaauaaaauugaaguua

SEQ ID NO: 4329 - RNA, 25 nt, Artificial Sequence
  Description of Artificial Sequence: Synthetic oligonucleotide
aauaaaaaucaauuugcucuaauug

SEQ ID NO: 4330 - RNA, 25 nt, Artificial Sequence
  Description of Artificial Sequence: Synthetic oligonucleotide
gaaggaaaaaacaaaacuguaagua

SEQ ID NO: 4331 - RNA, 25 nt, Artificial Sequence
  Description of Artificial Sequence: Synthetic oligonucleotide
acccuuguuauccaagcggcaaaug

SEQ ID NO: 4332 - RNA, 25 nt, Artificial Sequence
  Description of Artificial Sequence: Synthetic oligonucleotide
gugucagcuuuguacaaaugugaag

SEQ ID NO: 4333 - RNA, 25 nt, Artificial Sequence
  Description of Artificial Sequence: Synthetic oligonucleotide
gcggucaacaaagucgggagaggag

SEQ ID NO: 4334 - RNA, 25 nt, Artificial Sequence
  Description of Artificial Sequence: Synthetic oligonucleotide
gagagggugaucuccuuccacguga

SEQ ID NO: 4335 - RNA, 25 nt, Artificial Sequence
  Description of Artificial Sequence: Synthetic oligonucleotide
accagggguccugaaauuacuuugc

SEQ ID NO: 4336 - RNA, 25 nt, Artificial Sequence
  Description of Artificial Sequence: Synthetic oligonucleotide
caaccugacaugcagcccacugagc

SEQ ID NO: 4337 - RNA, 25 nt, Artificial Sequence
  Description of Artificial Sequence: Synthetic oligonucleotide
caggagagcgugucuuuguggugca

SEQ ID NO: 4338 - RNA, 25 nt, Artificial Sequence
  Description of Artificial Sequence: Synthetic oligonucleotide
acugcagacagaucuacguuugaga

SEQ ID NO: 4339 - RNA, 25 nt, Artificial Sequence
  Description of Artificial Sequence: Synthetic oligonucleotide
aaccucacaugguacaagcuuggcc

SEQ ID NO: 4340 - RNA, 25 nt, Artificial Sequence
  Description of Artificial Sequence: Synthetic oligonucleotide
ccacagccucugccaauccaugugg

SEQ ID NO: 4341 - RNA, 25 nt, Artificial Sequence
  Description of Artificial Sequence: Synthetic oligonucleotide
ggagaguugcccacaccuguuugca

SEQ ID NO: 4342 - RNA, 25 nt, Artificial Sequence
  Description of Artificial Sequence: Synthetic oligonucleotide
aagaacuuggauacucuuuggaaau

SEQ ID NO: 4343 - RNA, 25 nt, Artificial Sequence
  Description of Artificial Sequence: Synthetic oligonucleotide
uugaaugccaccauguucucuaaua

SEQ ID NO: 4344 - RNA, 25 nt, Artificial Sequence
  Description of Artificial Sequence: Synthetic oligonucleotide
agcacaaaugacauuuugaucaugg

SEQ ID NO: 4345 - RNA, 25 nt, Artificial Sequence
  Description of Artificial Sequence: Synthetic oligonucleotide
gagcuuaagaaugcauccuugcagg

SEQ ID NO: 4346 - RNA, 25 nt, Artificial Sequence
  Description of Artificial Sequence: Synthetic oligonucleotide
gaccaaggagacuaugucugccuug

SEQ ID NO: 4347 - RNA, 25 nt, Artificial Sequence
  Description of Artificial Sequence: Synthetic oligonucleotide
gcucaagacaggaagaccaagaaaa

SEQ ID NO: 4348 - RNA, 25 nt, Artificial Sequence
  Description of Artificial Sequence: Synthetic oligonucleotide
agacauugcguggucaggcagcuca

SEQ ID NO: 4349 - RNA, 25 nt, Artificial Sequence
  Description of Artificial Sequence: Synthetic oligonucleotide
acaguccuagagcguguggcaccca

SEQ ID NO: 4350 - RNA, 25 nt, Artificial Sequence
  Description of Artificial Sequence: Synthetic oligonucleotide
acgaucacaggaaaccuggagaauc

SEQ ID NO: 4351 - RNA, 25 nt, Artificial Sequence
  Description of Artificial Sequence: Synthetic oligonucleotide
cagacgacaaguauuggggaaagca

SEQ ID NO: 4352 - RNA, 25 nt, Artificial Sequence
  Description of Artificial Sequence: Synthetic oligonucleotide
aucgaagucucaugcacggcaucug

SEQ ID NO: 4353 - RNA, 25 nt, Artificial Sequence
  Description of Artificial Sequence: Synthetic oligonucleotide
gggaaucccccuccacagaucaugu

SEQ ID NO: 4354 - RNA, 25 nt, Artificial Sequence
  Description of Artificial Sequence: Synthetic oligonucleotide
ugguuuaaagauaaugagacccuug

SEQ ID NO: 4355 - RNA, 25 nt, Artificial Sequence
  Description of Artificial Sequence: Synthetic oligonucleotide
guagaagacucaggcauuguauuga

SEQ ID NO: 4356 - RNA, 25 nt, Artificial Sequence
  Description of Artificial Sequence: Synthetic oligonucleotide
aaggaugggaaccggaaccucacua

SEQ ID NO: 4357 - RNA, 25 nt, Artificial Sequence
  Description of Artificial Sequence: Synthetic oligonucleotide
auccgcagagugaggaaggaggacg

SEQ ID NO: 4358 - RNA, 25 nt, Artificial Sequence
  Description of Artificial Sequence: Synthetic oligonucleotide
gaaggccucuacaccugccaggcau

SEQ ID NO: 4359 - RNA, 25 nt, Artificial Sequence
  Description of Artificial Sequence: Synthetic oligonucleotide
ugcaguguucuuggcugugcaaaag

SEQ ID NO: 4360 - RNA, 25 nt, Artificial Sequence
  Description of Artificial Sequence: Synthetic oligonucleotide
guggaggcauuuuucauaauagaag

SEQ ID NO: 4361 - RNA, 25 nt, Artificial Sequence
  Description of Artificial Sequence: Synthetic oligonucleotide
ggugcccaggaaaagacgaacuugg

SEQ ID NO: 4362 - RNA, 25 nt, Artificial Sequence
  Description of Artificial Sequence: Synthetic oligonucleotide
gaaaucauuauucuaguaggcacgg

SEQ ID NO: 4363 - RNA, 25 nt, Artificial Sequence
  Description of Artificial Sequence: Synthetic oligonucleotide
gcggugauugccauguucuucuggc

SEQ ID NO: 4364 - RNA, 25 nt, Artificial Sequence
  Description of Artificial Sequence: Synthetic oligonucleotide
cuacuucuugucaucauccuacgga

SEQ ID NO: 4365 - RNA, 25 nt, Artificial Sequence
  Description of Artificial Sequence: Synthetic oligonucleotide
accguuaagcgggccaauggagggg

SEQ ID NO: 4366 - RNA, 25 nt, Artificial Sequence
  Description of Artificial Sequence: Synthetic oligonucleotide
gaacugaagacaggcuacuugucca

SEQ ID NO: 4367 - RNA, 25 nt, Artificial Sequence
  Description of Artificial Sequence: Synthetic oligonucleotide
aucgucauggauccagaugaacucc

SEQ ID NO: 4368 - RNA, 25 nt, Artificial Sequence
  Description of Artificial Sequence: Synthetic oligonucleotide
ccauuggaugaacauugugaacgac

SEQ ID NO: 4369 - RNA, 25 nt, Artificial Sequence
  Description of Artificial Sequence: Synthetic oligonucleotide
cugccuuaugaugccagcaaauggg

SEQ ID NO: 4370 - RNA, 25 nt, Artificial Sequence
  Description of Artificial Sequence: Synthetic oligonucleotide
gaauuccccagagaccggcugaagc

SEQ ID NO: 4371 - RNA, 25 nt, Artificial Sequence
  Description of Artificial Sequence: Synthetic oligonucleotide
cuagguaagccucuuggccguggug

SEQ ID NO: 4372 - RNA, 25 nt, Artificial Sequence
  Description of Artificial Sequence: Synthetic oligonucleotide
gccuuuggccaagugauugaagcag

SEQ ID NO: 4373 - RNA, 25 nt, Artificial Sequence
  Description of Artificial Sequence: Synthetic oligonucleotide
gaugccuuuggaauugacaagacag

SEQ ID NO: 4374 - RNA, 25 nt, Artificial Sequence
  Description of Artificial Sequence: Synthetic oligonucleotide
gcaacuugcaggacaguagcaguca

SEQ ID NO: 4375 - RNA, 25 nt, Artificial Sequence
  Description of Artificial Sequence: Synthetic oligonucleotide
aaaauguugaaagaaggagcaacac

SEQ ID NO: 4376 - RNA, 25 nt, Artificial Sequence
  Description of Artificial Sequence: Synthetic oligonucleotide
cacagugagcaucgagcucucaugu

SEQ ID NO: 4377 - RNA, 25 nt, Artificial Sequence
  Description of Artificial Sequence: Synthetic oligonucleotide
ucugaacucaagauccucauucaua

SEQ ID NO: 4378 - RNA, 25 nt, Artificial Sequence
  Description of Artificial Sequence: Synthetic oligonucleotide
auuggucaccaucucaaugugguca

SEQ ID NO: 4379 - RNA, 25 nt, Artificial Sequence
  Description of Artificial Sequence: Synthetic oligonucleotide
aaccuucuaggugccuguaccaagc

SEQ ID NO: 4380 - RNA, 25 nt, Artificial Sequence
  Description of Artificial Sequence: Synthetic oligonucleotide
ccaggagggccacucauggugauug

SEQ ID NO: 4381 - RNA, 25 nt, Artificial Sequence
  Description of Artificial Sequence: Synthetic oligonucleotide
guggaauucugcaaauuuggaaacc

SEQ ID NO: 4382 - RNA, 25 nt, Artificial Sequence
  Description of Artificial Sequence: Synthetic oligonucleotide
cuguccacuuaccugaggagcaaga

SEQ ID NO: 4383 - RNA, 25 nt, Artificial Sequence
  Description of Artificial Sequence: Synthetic oligonucleotide
agaaaugaauuuguccccuacaaga

SEQ ID NO: 4384 - RNA, 25 nt, Artificial Sequence
  Description of Artificial Sequence: Synthetic oligonucleotide
accaaaggggcacgauuccgucaag

SEQ ID NO: 4385 - RNA, 25 nt, Artificial Sequence
  Description of Artificial Sequence: Synthetic oligonucleotide
gggaaagacuacguuggagcaaucc

SEQ ID NO: 4386 - RNA, 25 nt, Artificial Sequence
  Description of Artificial Sequence: Synthetic oligonucleotide
ccuguggaucugaaacggcgcuugg

SEQ ID NO: 4387 - RNA, 25 nt, Artificial Sequence
  Description of Artificial Sequence: Synthetic oligonucleotide
gacagcaucaccaguagccagagcu

SEQ ID NO: 4388 - RNA, 25 nt, Artificial Sequence
  Description of Artificial Sequence: Synthetic oligonucleotide
ucagccagcucuggauuuguggagg

SEQ ID NO: 4389 - RNA, 25 nt, Artificial Sequence
  Description of Artificial Sequence: Synthetic oligonucleotide
gagaagucccucagugauguagaag

SEQ ID NO: 4390 - RNA, 25 nt, Artificial Sequence
  Description of Artificial Sequence: Synthetic oligonucleotide
gaagaggaagcuccugaagaucugu

SEQ ID NO: 4391 - RNA, 25 nt, Artificial Sequence
  Description of Artificial Sequence: Synthetic oligonucleotide
uauaaggacuuccugaccuuggagc

SEQ ID NO: 4392 - RNA, 25 nt, Artificial Sequence
  Description of Artificial Sequence: Synthetic oligonucleotide
caucucaucuguuacagcuuccaag

SEQ ID NO: 4393 - RNA, 25 nt, Artificial Sequence
  Description of Artificial Sequence: Synthetic oligonucleotide
guggcuaagggcauggaguucuugg

SEQ ID NO: 4394 - RNA, 25 nt, Artificial Sequence
  Description of Artificial Sequence: Synthetic oligonucleotide
gcaucgcgaaaguguauccacaggg

SEQ ID NO: 4395 - RNA, 25 nt, Artificial Sequence
  Description of Artificial Sequence: Synthetic oligonucleotide
gaccuggcggcacgaaauauccucu

SEQ ID NO: 4396 - RNA, 25 nt, Artificial Sequence
  Description of Artificial Sequence: Synthetic oligonucleotide
uuaucggagaagaacgugguuaaaa

SEQ ID NO: 4397 - RNA, 25 nt, Artificial Sequence
  Description of Artificial Sequence: Synthetic oligonucleotide
aucugugacuuuggcuuggcccggg

SEQ ID NO: 4398 - RNA, 25 nt, Artificial Sequence
  Description of Artificial Sequence: Synthetic oligonucleotide
gauauuuauaaagauccagauuaug

SEQ ID NO: 4399 - RNA, 25 nt, Artificial Sequence
  Description of Artificial Sequence: Synthetic oligonucleotide
gucagaaaaggagaugcucgccucc

SEQ ID NO: 4400 - RNA, 25 nt, Artificial Sequence
  Description of Artificial Sequence: Synthetic oligonucleotide
ccuuugaaauggauggccccagaaa

SEQ ID NO: 4401 - RNA, 25 nt, Artificial Sequence
  Description of Artificial Sequence: Synthetic oligonucleotide
acaauuuuugacagaguguacacaa

SEQ ID NO: 4402 - RNA, 25 nt, Artificial Sequence
  Description of Artificial Sequence: Synthetic oligonucleotide
auccagagugacgucuggucuuuug

SEQ ID NO: 4403 - RNA, 25 nt, Artificial Sequence
  Description of Artificial Sequence: Synthetic oligonucleotide
gguguuuugcugugggaaauauuuu

SEQ ID NO: 4404 - RNA, 25 nt, Artificial Sequence
  Description of Artificial Sequence: Synthetic oligonucleotide
uccuuaggugcuucuccauauccug

SEQ ID NO: 4405 - RNA, 25 nt, Artificial Sequence
  Description of Artificial Sequence: Synthetic oligonucleotide
gggguaaagauugaugaagaauuuu

SEQ ID NO: 4406 - RNA, 25 nt, Artificial Sequence
  Description of Artificial Sequence: Synthetic oligonucleotide
uguaggcgauugaaagaaggaacua

SEQ ID NO: 4407 - RNA, 25 nt, Artificial Sequence
  Description of Artificial Sequence: Synthetic oligonucleotide
agaaugagggccccugauuauacua

SEQ ID NO: 4408 - RNA, 25 nt, Artificial Sequence
  Description of Artificial Sequence: Synthetic oligonucleotide
acaccagaaauguaccagaccaugc

SEQ ID NO: 4409 - RNA, 25 nt, Artificial Sequence
  Description of Artificial Sequence: Synthetic oligonucleotide
cuggacugcuggcacggggagccca

SEQ ID NO: 4410 - RNA, 25 nt, Artificial Sequence
  Description of Artificial Sequence: Synthetic oligonucleotide
agucagagacccacguuuucagagu

SEQ ID NO: 4411 - RNA, 25 nt, Artificial Sequence
  Description of Artificial Sequence: Synthetic oligonucleotide
uugguggaacauuugggaaaucucu

SEQ ID NO: 4412 - RNA, 25 nt, Artificial Sequence
  Description of Artificial Sequence: Synthetic oligonucleotide
uugcaagcuaaugcucagcaggaug

SEQ ID NO: 4413 - RNA, 25 nt, Artificial Sequence
  Description of Artificial Sequence: Synthetic oligonucleotide
ggcaaagacuacauuguucuuccga

SEQ ID NO: 4414 - RNA, 25 nt, Artificial Sequence
  Description of Artificial Sequence: Synthetic oligonucleotide
auaucagagacuuugagcauggaag

SEQ ID NO: 4415 - RNA, 25 nt, Artificial Sequence
  Description of Artificial Sequence: Synthetic oligonucleotide
gaggauucuggacucucucugccua

SEQ ID NO: 4416 - RNA, 25 nt, Artificial Sequence
  Description of Artificial Sequence: Synthetic oligonucleotide
accucaccuguuuccuguauggagg

SEQ ID NO: 4417 - RNA, 25 nt, Artificial Sequence
  Description of Artificial Sequence: Synthetic oligonucleotide
gaggaggaaguaugugaccccaaau

SEQ ID NO: 4418 - RNA, 25 nt, Artificial Sequence
  Description of Artificial Sequence: Synthetic oligonucleotide
uuccauuaugacaacacagcaggaa

SEQ ID NO: 4419 - RNA, 25 nt, Artificial Sequence
  Description of Artificial Sequence: Synthetic oligonucleotide
aucagucaguaucugcagaacagua

SEQ ID NO: 4420 - RNA, 25 nt, Artificial Sequence
  Description of Artificial Sequence: Synthetic oligonucleotide
aagcgaaagagccggccugugagug

SEQ ID NO: 4421 - RNA, 25 nt, Artificial Sequence
  Description of Artificial Sequence: Synthetic oligonucleotide
guaaaaacauuugaagauaucccgu

SEQ ID NO: 4422 - RNA, 25 nt, Artificial Sequence
  Description of Artificial Sequence: Synthetic oligonucleotide
uuagaagaaccagaaguaaaaguaa

SEQ ID NO: 4423 - RNA, 25 nt, Artificial Sequence
  Description of Artificial Sequence: Synthetic oligonucleotide
aucccagaugacaaccagacggaca

SEQ ID NO: 4424 - RNA, 25 nt, Artificial Sequence
  Description of Artificial Sequence: Synthetic oligonucleotide
agugguaugguucuugccucagaag

SEQ ID NO: 4425 - RNA, 25 nt, Artificial Sequence
  Description of Artificial Sequence: Synthetic oligonucleotide
gagcugaaaacuuuggaagacagaa

SEQ ID NO: 4426 - RNA, 25 nt, Artificial Sequence
  Description of Artificial Sequence: Synthetic oligonucleotide
accaaauuaucuccaucuuuuggug

SEQ ID NO: 4427 - RNA, 25 nt, Artificial Sequence
  Description of Artificial Sequence: Synthetic oligonucleotide
ggaauggugcccagcaaaagcaggg

SEQ ID NO: 4428 - RNA, 25 nt, Artificial Sequence
  Description of Artificial Sequence: Synthetic oligonucleotide
gagucuguggcaucugaaggcucaa

SEQ ID NO: 4429 - RNA, 25 nt, Artificial Sequence
  Description of Artificial Sequence: Synthetic oligonucleotide
aaccagacaagcggcuaccaguccg

SEQ ID NO: 4430 - RNA, 25 nt, Artificial Sequence
  Description of Artificial Sequence: Synthetic oligonucleotide
ggauaucacuccgaugacacagaca

SEQ ID NO: 4431 - RNA, 25 nt, Artificial Sequence
  Description of Artificial Sequence: Synthetic oligonucleotide
accaccguguacuccagugaggaag

SEQ ID NO: 4432 - RNA, 25 nt, Artificial Sequence
  Description of Artificial Sequence: Synthetic oligonucleotide
gcagaacuuuuaaagcugauagaga

SEQ ID NO: 4433 - RNA, 25 nt, Artificial Sequence
  Description of Artificial Sequence: Synthetic oligonucleotide
auuggagugcaaaccgguagcacag

SEQ ID NO: 4434 - RNA, 25 nt, Artificial Sequence
  Description of Artificial Sequence: Synthetic oligonucleotide
gcccagauucuccagccugacucgg

SEQ ID NO: 4435 - RNA, 25 nt, Artificial Sequence
  Description of Artificial Sequence: Synthetic oligonucleotide
gggaccacacugagcucuccuccug

SEQ ID NO: 4436 - RNA, 25 nt, Artificial Sequence
  Description of Artificial Sequence: Synthetic oligonucleotide
guuuaaaaggaagcauccacacccc

SEQ ID NO: 4437 - RNA, 25 nt, Artificial Sequence
  Description of Artificial Sequence: Synthetic oligonucleotide
caacucccggacaucacaugagagg

SEQ ID NO: 4438 - RNA, 25 nt, Artificial Sequence
  Description of Artificial Sequence: Synthetic oligonucleotide
gucugcucagauuuugaaguguugu

SEQ ID NO: 4439 - RNA, 25 nt, Artificial Sequence
  Description of Artificial Sequence: Synthetic oligonucleotide
uucuuuccaccagcaggaaguagcc

SEQ ID NO: 4440 - RNA, 25 nt, Artificial Sequence
  Description of Artificial Sequence: Synthetic oligonucleotide
cgcauuugauuuucauuucgacaac

SEQ ID NO: 4441 - RNA, 25 nt, Artificial Sequence
  Description of Artificial Sequence: Synthetic oligonucleotide
cagaaaaaggaccucggacugcagg

SEQ ID NO: 4442 - RNA, 25 nt, Artificial Sequence
  Description of Artificial Sequence: Synthetic oligonucleotide
ggagccagucuucuaggcauauccu

SEQ ID NO: 4443 - RNA, 25 nt, Artificial Sequence
  Description of Artificial Sequence: Synthetic oligonucleotide
uggaagaggcuugugacccaagaau

SEQ ID NO: 4444 - RNA, 25 nt, Artificial Sequence
  Description of Artificial Sequence: Synthetic oligonucleotide
ugugucugugucuucucccaguguu

SEQ ID NO: 4445 - RNA, 25 nt, Artificial Sequence
  Description of Artificial Sequence: Synthetic oligonucleotide
ugaccugauccucuuuuuucauuca

SEQ ID NO: 4446 - RNA, 25 nt, Artificial Sequence
  Description of Artificial Sequence: Synthetic oligonucleotide
auuuaaaaagcauuaucaugccccu

SEQ ID NO: 4447 - RNA, 25 nt, Artificial Sequence
  Description of Artificial Sequence: Synthetic oligonucleotide
ugcugcgggucucaccauggguuua

SEQ ID NO: 4448 - RNA, 25 nt, Artificial Sequence
  Description of Artificial Sequence: Synthetic oligonucleotide
agaacaaagagcuucaagcaauggc

SEQ ID NO: 4449 - RNA, 25 nt, Artificial Sequence
  Description of Artificial Sequence: Synthetic oligonucleotide
ccccauccucaaagaaguagcagua

SEQ ID NO: 4450 - RNA, 25 nt, Artificial Sequence
  Description of Artificial Sequence: Synthetic oligonucleotide
accuggggagcugacacuucuguaa

SEQ ID NO: 4451 - RNA, 25 nt, Artificial Sequence
  Description of Artificial Sequence: Synthetic oligonucleotide
aaacuagaagauaaaccaggcaacg

SEQ ID NO: 4452 - RNA, 25 nt, Artificial Sequence
  Description of Artificial Sequence: Synthetic oligonucleotide
guaaguguucgagguguugaagaug

SEQ ID NO: 4453 - RNA, 25 nt, Artificial Sequence
  Description of Artificial Sequence: Synthetic oligonucleotide
gggaaggauuugcagggcugagucu

SEQ ID NO: 4454 - RNA, 25 nt, Artificial Sequence
  Description of Artificial Sequence: Synthetic oligonucleotide
uauccaagaggcuuuguuuaggacg

SEQ ID NO: 4455 - RNA, 25 nt, Artificial Sequence
  Description of Artificial Sequence: Synthetic oligonucleotide
gugggucccaagccaagccuuaagu

SEQ ID NO: 4456 - RNA, 25 nt, Artificial Sequence
  Description of Artificial Sequence: Synthetic oligonucleotide
uguggaauucggauugauagaaagg

SEQ ID NO: 4457 - RNA, 25 nt, Artificial Sequence
  Description of Artificial Sequence: Synthetic oligonucleotide
gaagacuaacguuaccuugcuuugg

SEQ ID NO: 4458 - RNA, 25 nt, Artificial Sequence
  Description of Artificial Sequence: Synthetic oligonucleotide
gagaguacuggagccugcaaaugca

SEQ ID NO: 4459 - RNA, 25 nt, Artificial Sequence
  Description of Artificial Sequence: Synthetic oligonucleotide
auuguguuugcucugguggaggugg

SEQ ID NO: 4460 - RNA, 25 nt, Artificial Sequence
  Description of Artificial Sequence: Synthetic oligonucleotide
ggcauggggucuguucugaaaugua

SEQ ID NO: 4461 - RNA, 25 nt, Artificial Sequence
  Description of Artificial Sequence: Synthetic oligonucleotide
aaaggguucagacgggguuucuggu

SEQ ID NO: 4462 - RNA, 25 nt, Artificial Sequence
  Description of Artificial Sequence: Synthetic oligonucleotide
uuuuagaagguugcguguucuucga

SEQ ID NO: 4463 - RNA, 25 nt, Artificial Sequence
  Description of Artificial Sequence: Synthetic oligonucleotide
aguugggcuaaaguagaguucguug

SEQ ID NO: 4464 - RNA, 25 nt, Artificial Sequence
  Description of Artificial Sequence: Synthetic oligonucleotide
gugcuguuucugacuccuaaugaga

SEQ ID NO: 4465 - RNA, 25 nt, Artificial Sequence
  Description of Artificial Sequence: Synthetic oligonucleotide
aguuccuuccagaccguuagcuguc

SEQ ID NO: 4466 - RNA, 25 nt, Artificial Sequence
  Description of Artificial Sequence: Synthetic oligonucleotide
cuccuugccaagccccaggaagaaa

SEQ ID NO: 4467 - RNA, 25 nt, Artificial Sequence
  Description of Artificial Sequence: Synthetic oligonucleotide
aaugaugcagcucuggcuccuuguc

SEQ ID NO: 4468 - RNA, 25 nt, Artificial Sequence
  Description of Artificial Sequence: Synthetic oligonucleotide
cucccaggcugauccuuuauucaga

SEQ ID NO: 4469 - RNA, 25 nt, Artificial Sequence
  Description of Artificial Sequence: Synthetic oligonucleotide
aauaccacaaagaaaggacauucag

SEQ ID NO: 4470 - RNA, 25 nt, Artificial Sequence
  Description of Artificial Sequence: Synthetic oligonucleotide
gcucaaggcucccugccguguugaa

SEQ ID NO: 4471 - RNA, 25 nt, Artificial Sequence
  Description of Artificial Sequence: Synthetic oligonucleotide
agaguucugacugcacaaaccagcu

SEQ ID NO: 4472 - RNA, 25 nt, Artificial Sequence
  Description of Artificial Sequence: Synthetic oligonucleotide
uucugguuucuucuggaaugaauac

SEQ ID NO: 4473 - RNA, 25 nt, Artificial Sequence
  Description of Artificial Sequence: Synthetic oligonucleotide
cccucauaucuguccugaugugaua

SEQ ID NO: 4474 - RNA, 25 nt, Artificial Sequence
  Description of Artificial Sequence: Synthetic oligonucleotide
augucugagacugaaugcgggaggu

SEQ ID NO: 4475 - RNA, 25 nt, Artificial Sequence
  Description of Artificial Sequence: Synthetic oligonucleotide
uucaaugugaagcuguguguggugu

SEQ ID NO: 4476 - RNA, 25 nt, Artificial Sequence
  Description of Artificial Sequence: Synthetic oligonucleotide
ucaaaguuucaggaaggauuuuacc

SEQ ID NO: 4477 - RNA, 25 nt, Artificial Sequence
  Description of Artificial Sequence: Synthetic oligonucleotide
ccuuuuguucuucccccugucccca

SEQ ID NO: 4478 - RNA, 25 nt, Artificial Sequence
  Description of Artificial Sequence: Synthetic oligonucleotide
aacccacucucaccccgcaacccau

SEQ ID NO: 4479 - RNA, 25 nt, Artificial Sequence
  Description of Artificial Sequence: Synthetic oligonucleotide
ucaguauuuuaguuauuuggccucu

SEQ ID NO: 4480 - RNA, 25 nt, Artificial Sequence
  Description of Artificial Sequence: Synthetic oligonucleotide
uacuccaguaaaccugauuggguuu

SEQ ID NO: 4481 - RNA, 25 nt, Artificial Sequence
  Description of Artificial Sequence: Synthetic oligonucleotide
uguucacucucugaaugauuauuag

SEQ ID NO: 4482 - RNA, 25 nt, Artificial Sequence
  Description of Artificial Sequence: Synthetic oligonucleotide
gccagacuucaaaauuauuuuauag

SEQ ID NO: 4483 - RNA, 25 nt, Artificial Sequence
  Description of Artificial Sequence: Synthetic oligonucleotide
gcccaaauuauaacaucuauuguau

SEQ ID NO: 4484 - RNA, 25 nt, Artificial Sequence
  Description of Artificial Sequence: Synthetic oligonucleotide
uuauuuagacuuuuaacauauagag

SEQ ID NO: 4485 - RNA, 25 nt, Artificial Sequence
  Description of Artificial Sequence: Synthetic oligonucleotide
gcuauuucuacugauuuuugcccuu

SEQ ID NO: 4486 - RNA, 25 nt, Artificial Sequence
  Description of Artificial Sequence: Synthetic oligonucleotide
uguucuguccuuuuuuucaaaaaag

SEQ ID NO: 4487 - RNA, 25 nt, Artificial Sequence
  Description of Artificial Sequence: Synthetic oligonucleotide
gaaaauguguuuuuuguuugguacc

SEQ ID NO: 4488 - RNA, 25 nt, Artificial Sequence
  Description of Artificial Sequence: Synthetic oligonucleotide
cauagugugaaaugcugggaacaau

SEQ ID NO: 4489 - RNA, 25 nt, Artificial Sequence
  Description of Artificial Sequence: Synthetic oligonucleotide
ugacuauaagacaugcuauggcaca

SEQ ID NO: 4490 - RNA, 25 nt, Artificial Sequence
  Description of Artificial Sequence: Synthetic oligonucleotide
auauauuuauagucuguuuauguag

SEQ ID NO: 4491 - RNA, 25 nt, Artificial Sequence
  Description of Artificial Sequence: Synthetic oligonucleotide
gaaacaaauguaauauauuaaagcc

SEQ ID NO: 4492 - RNA, 25 nt, Artificial Sequence
  Description of Artificial Sequence: Synthetic oligonucleotide
cuuauauauaaugaacuuuguacua

SEQ ID NO: 4493 - RNA, 25 nt, Artificial Sequence
  Description of Artificial Sequence: Synthetic oligonucleotide
auucacauuuuguaucaguauuaug

SEQ ID NO: 4494 - RNA, 25 nt, Artificial Sequence
  Description of Artificial Sequence: Synthetic oligonucleotide
guagcauaacaaaggucauaaugcu

SEQ ID NO: 4495 - RNA, 25 nt, Artificial Sequence
  Description of Artificial Sequence: Synthetic oligonucleotide
uuucagcaauugaugucauuuuauu

SEQ ID NO: 4496 - RNA, 25 nt, Artificial Sequence
  Description of Artificial Sequence: Synthetic oligonucleotide
uauuaaagaacauugaaaaacuuga

SEQ ID NO: 4497 - RNA, 5833 nt, Homo sapiens
acuuucagccccgagccgcggccgcucgggucggacccacgcgcagcggccggagaugcagcggggcgccgcgcugugccugcgacuguggcucugccugggacuccuggacggccuggugaguggcuacuccaugacccccccgaccuugaacaucacggaggagucacacgucaucgacaccggugacagccuguccaucuccugcaggggacagcacccccucgagugggcuuggccaggagcucaggaggcgccagccaccggagacaaggacagcgaggacacggggguggugcgagacugcgagggcacagacgccaggcccuacugcaagguguugcugcugcacgagguacaugccaacgacacaggcagcuacgucugcuacuacaaguacaucaaggcacgcaucgagggcaccacggccgccagcuccuacguguucgugagagacuuugagcagccauucaucaacaagccugacacgcucuuggucaacaggaaggacgccaugugggugcccugucugguguccauccccggccucaaugucacgcugcgcucgcaaagcucggugcuguggccagacgggcaggagguggugugggaugaccggcggggcaugcucguguccacgccacugcugcacgaugcccuguaccugcagugcgagaccaccuggggagaccaggacuuccuuuccaaccccuuccuggugcacaucacaggcaacgagcucuaugacauccagcuguugcccaggaagucgcuggagcugcugguaggggagaagcugguccugaacugcaccgugugggcugaguuuaacucaggugucaccuuugacugggacuacccagggaagcaggcagagcgggguaagugggugcccgagcgacgcucccagcagacccacacagaacucuccagcauccugaccauccacaacgucagccagcacgaccugggcucguaugugugcaaggccaacaacggcauccagcgauuucgggagagcaccgaggucauugugcaugaaaaucccuucaucagcgucgaguggcucaaaggacccauccuggaggccacggcaggagacgagcuggugaagcugcccgugaagcuggcagcguaccccccgcccgaguuccagugguacaaggauggaaaggcacuguccgggcgccacaguccacaugcccuggugcucaaggaggugacagaggccagcacaggcaccuacacccucgcccuguggaacuccgcugcuggccugaggcgcaacaucagccuggagcugguggugaaugugcccccccagauacaugagaaggaggccuccucccccagcaucuacucgcgucacagccgccaggcccucaccugcacggccuacggggugccccugccucucagcauccaguggcacuggcggcccuggacacccugcaagauguuugcccagcguagucuccggcggcggcagcagcaagaccucaugccacagugccgugacuggagggcggugaccacgcaggaugccgugaaccccaucgagagccuggacaccuggaccgaguuuguggagggaaagaauaagacugugagcaagcuggugauccagaaugccaacgugucugccauguacaaguguguggucuccaacaaggugggccaggaugagcggcucaucuacuucuaugugaccaccauccccgacggcuucaccaucgaauccaagccauccgaggagcuacuagagggccagccggugcuccugagcugccaagccgacagcuacaaguacgagcaucugcgcugguaccgccucaaccuguccacgcugcacgaugcgcacgggaacccgcuucugcucgacugcaagaacgugcaucuguucgccaccccucuggccgccagccuggaggagguggcaccuggggcgcgccacgccacgcucagccugaguaucccccgcgucgcgcccgagcacgagggccacuaugugugcgaagugcaagaccggcgcagccaugacaagcacugccacaagaaguaccugucggugcaggcccuggaagccccucggcucacgcagaacuugaccgaccuccuggugaacgugagcgacucgcuggagaugcagugcuugguggccggagcgcacgcgcccagcaucgugugguacaaagacgagaggcugcuggaggaaaagucuggagucgacuuggcggacuccaaccagaagcugagcauccagcgcgugcgcgaggaggaugcgggacgcuaucugugcagcgugugcaacgccaagggcugcgucaacuccuccgccagcguggccguggaaggcuccgaggauaagggcagcauggagaucgugauccuugucgguaccggcgucaucgcugucuucuucuggguccuccuccuccucaucuucuguaacaugaggaggccggcccacgcagacaucaagacgggcuaccuguccaucaucauggaccccggggaggugccucuggaggagcaaugcgaauaccuguccuacgaugccagccagugggaauucccccgagagcggcugcaccuggggagagugcucggcuacggcgccuucgggaaggugguggaagccuccgcuuucggcauccacaagggcagcagcugugacaccguggccgugaaaaugcugaaagagggcgccacggccagcgagcaccgcgcgcugaugucggagcucaagauccucauucacaucggcaaccaccucaacguggucaaccuccucggggcgugcaccaagccgcagggcccccucauggugaucguggaguucugcaaguacggcaaccucuccaacuuccugcgcgccaagcgggacgccuucagccccugcgcggagaagucucccgagcagcgcggacgcuuccgcgccaugguggagcucgccaggcuggaucggaggcggccggggagcagcgacaggguccucuucgcgcgguucucgaagaccgagggcggagcgaggcgggcuucuccagaccaagaagcugaggaccuguggcugagcccgcugaccauggaagaucuugucugcuacagcuuccagguggccagagggauggaguuccuggcuucccgaaagugcauccacagagaccuggcugcucggaacauucugcugucggaaagcgacguggugaagaucugugacuuuggccuugcccgggacaucuacaaagaccccgacuacguccgcaagggcagugcccggcugccccugaaguggauggccccugaaagcaucuucgacaagguguacaccacgcagagugacgugugguccuuuggggugcuucucugggagaucuucucucugggggccuccccguacccuggggugcagaucaaugaggaguucugccagcggcugagagacggcacaaggaugagggccccggagcuggccacucccgccauacgccgcaucaugcugaacugcugguccggagaccccaaggcgagaccugcauucucggagcugguggagauccugggggaccugcuccagggcaggggccugcaagaggaagaggaggucugcauggccccgcgcagcucucagagcucagaagagggcagcuucucgcagguguccaccauggcccuacacaucgcccaggcugacgcugaggacagcccgccaagccugcagcgccacagccuggccgccagguauuacaacuggguguccuuucccgggugccuggccagaggggcugagacccgugguuccuccaggaugaagacauuugaggaauuccccaugaccccaacgaccuacaaaggcucuguggacaaccagacagacagugggauggugcuggccucggaggaguuugagcagauagagagcaggcauagacaagaaagcggcuucagcuguaaaggaccuggccagaauguggcugugaccagggcacacccugacucccaagggaggcggcggcggccugagcggggggcccgaggaggccagguguuuuacaacagcgaguauggggagcugucggagccaagcgaggaggaccacugcuccccgucugcccgcgugacuuucuucacagacaacagcuacuaagcagcaucggacaagacccccagcacuuggggguucaggcccggcagggcgggcagagggcuggaggcccaggcugggaacucaucugguugaacucugguggcacaggaguguccucuucccucucugcagacuucccagcuaggaagagcaggacuccaggcccaaggcucccggaauuccgucaccacgacuggccagggccacgcuccagcugccccggccccucccccugagauucagaugucauuuaguucagcauccgcaggugcuggucccggggccagcacuuccaugggaaugucucuuuggcgaccuccuuucaucacacugggugguggccuggucccuguuuucccacgaggaaucugugggucugggagucacacaguguuggagguuaaggcauacgagagcagaggucucccaaacgcccuuuccuccucaggcacacagcuacucuccccacgagggcuggcuggccucacccaccccugcacaguugaagggaggggcuguguuuccaucucaaagaaggcauuugcaggguccucuucugggccugaccaaacagccaacuagccccugggguggccaccaguaugacaguauuauacgcuggcaacacagaggcagcccgcacaccugcgccuggguguugagagccauccugcaagucuuuuucaacagaacuucacagacuguuagagcugcugagaagaauuugcuuuccgaauucagccuggaaggcgcccagggacagcuguacugagucuagaugacucugacccccgccccaggucaaggccagcagagcagucagugccucuggagaaggcccuugcucucccaccuggcccagacuccgaggagccugggucuggagcugccggucugguucuucccuuuagagcccggaucugccaccugcggccccucccaagccgugaaccagcucaugagagaugaacacugugggauccacucaggaaggcucggggcuggcacaaaggaccacccagcauugcccugugccacccagcacucaguggacauucuggggaccugccuucagccuuuuccugcccugugccugacaucagcacccuggcuggucagaaugccgcccucccagaggagcagccgagagauccccugaaggcuggaggcauucugcucaggaccccuaucccagcucacagugcccaaccaucucaccaggagaaagagccacauccccacguuaggaccacggagacugaccaccacccugaccccccaaacccacgcaccagacgcuugcaggacaggcgccgcgcagcgggcaggggcuugcccggccgacccuccccuccccaccucccccacugcgcguuacuccaggauaugccgagugcacguauaaggucaucuucgucguccccguggaccucccccuuccucugcacgucguccaacgugggacuggcgugucaggcuucccugggaggaucuggagguuguucucugcagagaaccagccuggcuccuggcgcgcaccucugcucccuucuccucacuacccacccacgcauguaccgggaaaaaaacuacuaugcccuucuagaccauguucugagaaaagaucgaaaauauuuaacaagagauaauaauaaaucugaugccggucuuuguguguguugcgga

SEQ ID NO: 4498 - RNA, 4510 nt, Homo sapiens
acuuucagccccgagccgcggccgcucgggucggacccacgcgcagcggccggagaugcagcggggcgccgcgcugugccugcgacuguggcucugccugggacuccuggacggccuggugaguggcuacuccaugacccccccgaccuugaacaucacggaggagucacacgucaucgacaccggugacagccuguccaucuccugcaggggacagcacccccucgagugggcuuggccaggagcucaggaggcgccagccaccggagacaaggacagcgaggacacggggguggugcgagacugcgagggcacagacgccaggcccuacugcaagguguugcugcugcacgagguacaugccaacgacacaggcagcuacgucugcuacuacaaguacaucaaggcacgcaucgagggcaccacggccgccagcuccuacguguucgugagagacuuugagcagccauucaucaacaagccugacacgcucuuggucaacaggaaggacgccaugugggugcccugucugguguccauccccggccucaaugucacgcugcgcucgcaaagcucggugcuguggccagacgggcaggagguggugugggaugaccggcggggcaugcucguguccacgccacugcugcacgaugcccuguaccugcagugcgagaccaccuggggagaccaggacuuccuuuccaaccccuuccuggugcacaucacaggcaacgagcucuaugacauccagcuguugcccaggaagucgcuggagcugcugguaggggagaagcugguccugaacugcaccgugugggcugaguuuaacucaggugucaccuuugacugggacuacccagggaagcaggcagagcgggguaagugggugcccgagcgacgcucccagcagacccacacagaacucuccagcauccugaccauccacaacgucagccagcacgaccugggcucguaugugugcaaggccaacaacggcauccagcgauuucgggagagcaccgaggucauugugcaugaaaaucccuucaucagcgucgaguggcucaaaggacccauccuggaggccacggcaggagacgagcuggugaagcugcccgugaagcuggcagcguaccccccgcccgaguuccagugguacaaggauggaaaggcacuguccgggcgccacaguccacaugcccuggugcucaaggaggugacagaggccagcacaggcaccuacacccucgcccuguggaacuccgcugcuggccugaggcgcaacaucagccuggagcugguggugaaugugcccccccagauacaugagaaggaggccuccucccccagcaucuacucgcgucacagccgccaggcccucaccugcacggccuacggggugccccugccucucagcauccaguggcacuggcggcccuggacacccugcaagauguuugcccagcguagucuccggcggcggcagcagcaagaccucaugccacagugccgugacuggagggcggugaccacgcaggaugccgugaaccccaucgagagccuggacaccuggaccgaguuuguggagggaaagaauaagacugugagcaagcuggugauccagaaugccaacgugucugccauguacaaguguguggucuccaacaaggugggccaggaugagcggcucaucuacuucuaugugaccaccauccccgacggcuucaccaucgaauccaagccauccgaggagcuacuagagggccagccggugcuccugagcugccaagccgacagcuacaaguacgagcaucugcgcugguaccgccucaaccuguccacgcugcacgaugcgcacgggaacccgcuucugcucgacugcaagaacgugcaucuguucgccaccccucuggccgccagccuggaggagguggcaccuggggcgcgccacgccacgcucagccugaguaucccccgcgucgcgcccgagcacgagggccacuaugugugcgaagugcaagaccggcgcagccaugacaagcacugccacaagaaguaccugucggugcaggcccuggaagccccucggcucacgcagaacuugaccgaccuccuggugaacgugagcgacucgcuggagaugcagugcuugguggccggagcgcacgcgcccagcaucgugugguacaaagacgagaggcugcuggaggaaaagucuggagucgacuuggcggacuccaaccagaagcugagcauccagcgcgugcgcgaggaggaugcgggacgcuaucugugcagcgugugcaacgccaagggcugcgucaacuccuccgccagcguggccguggaaggcuccgaggauaagggcagcauggagaucgugauccuugucgguaccggcgucaucgcugucuucuucuggguccuccuccuccucaucuucuguaacaugaggaggccggcccacgcagacaucaagacgggcuaccuguccaucaucauggaccccggggaggugccucuggaggagcaaugcgaauaccuguccuacgaugccagccagugggaauucccccgagagcggcugcaccuggggagagugcucggcuacggcgccuucgggaaggugguggaagccuccgcuuucggcauccacaagggcagcagcugugacaccguggccgugaaaaugcugaaagagggcgccacggccagcgagcaccgcgcgcugaugucggagcucaagauccucauucacaucggcaaccaccucaacguggucaaccuccucggggcgugcaccaagccgcagggcccccucauggugaucguggaguucugcaaguacggcaaccucuccaacuuccugcgcgccaagcgggacgccuucagccccugcgcggagaagucucccgagcagcgcggacgcuuccgcgccaugguggagcucgccaggcuggaucggaggcggccggggagcagcgacaggguccucuucgcgcgguucucgaagaccgagggcggagcgaggcgggcuucuccagaccaagaagcugaggaccuguggcugagcccgcugaccauggaagaucuugucugcuacagcuuccagguggccagagggauggaguuccuggcuucccgaaagugcauccacagagaccuggcugcucggaacauucugcugucggaaagcgacguggugaagaucugugacuuuggccuugcccgggacaucuacaaagaccccgacuacguccgcaagggcagugcccggcugccccugaaguggauggccccugaaagcaucuucgacaagguguacaccacgcagagugacgugugguccuuuggggugcuucucugggagaucuucucucugggggccuccccguacccuggggugcagaucaaugaggaguucugccagcggcugagagacggcacaaggaugagggccccggagcuggccacucccgccauacgccgcaucaugcugaacugcugguccggagaccccaaggcgagaccugcauucucggagcugguggagauccugggggaccugcuccagggcaggggccugcaagaggaagaggaggucugcauggccccgcgcagcucucagagcucagaagagggcagcuucucgcagguguccaccauggcccuacacaucgcccaggcugacgcugaggacagcccgccaagccugcagcgccacagccuggccgccagguauuacaacuggguguccuuucccgggugccuggccagaggggcugagacccgugguuccuccaggaugaagacauuugaggaauuccccaugaccccaacgaccuacaaaggcucuguggacaaccagacagacagugggauggugcuggccucggaggaguuugagcagauagagagcaggcauagacaagaaagcggcuucagguagcugaagcagagagagagaaggcagcauacgucagcauuuucuucucugcacuuauaagaaagaucaaagacuuuaagacuuucgcuauuucuucuacugcuaucuacuacaaacuucaaagaggaaccaggaggacaagaggagcaugaaaguggacaaggagugugaccacugaagcaccacagggagggguuaggccuccggaugacugcgggcaggccuggauaauauccagccucccacaagaagcugguggagcagaguguucccugacuccuccaaggaaagggagacgcccuuucauggucugcugaguaacaggugccuucccagacacuggcguuacugcuugaccaaagagcccucaagcggcccuuaugccagcgugacagagggcucaccucuugccuucuaggucacuucucacaaugucccuucagcaccugacccugugcccaccaguuauuccuugguaauaugaguaauacaucaaagaguaguauuaaaagcuaauuaaucauguuuauaaaaaaaaaaaaaaaaaaaaaaaaaaaaaaa

SEQ ID NO: 4499 - RNA, 19 nt, Artificial Sequence
  Description of Artificial Sequence: Synthetic oligonucleotide
acuuucagccccgagccgc

SEQ ID NO: 4500 - RNA, 19 nt, Artificial Sequence
  Description of Artificial Sequence: Synthetic oligonucleotide
cggccgcucgggucggacc

SEQ ID NO: 4501 - RNA, 19 nt, Artificial Sequence
  Description of Artificial Sequence: Synthetic oligonucleotide
ccacgcgcagcggccggag

SEQ ID NO: 4502 - RNA, 19 nt, Artificial Sequence
  Description of Artificial Sequence: Synthetic oligonucleotide
gaugcagcggggcgccgcg

SEQ ID NO: 4503 - RNA, 19 nt, Artificial Sequence
  Description of Artificial Sequence: Synthetic oligonucleotide
gcugugccugcgacugugg

SEQ ID NO: 4504 - RNA, 19 nt, Artificial Sequence
  Description of Artificial Sequence: Synthetic oligonucleotide
gcucugccugggacuccug

SEQ ID NO: 4505 - RNA, 19 nt, Artificial Sequence
  Description of Artificial Sequence: Synthetic oligonucleotide
ggacggccuggugaguggc

SEQ ID NO: 4506 - RNA, 19 nt, Artificial Sequence
  Description of Artificial Sequence: Synthetic oligonucleotide
cuacuccaugacccccccg

SEQ ID NO: 4507 - RNA, 19 nt, Artificial Sequence
  Description of Artificial Sequence: Synthetic oligonucleotide
gaccuugaacaucacggag

SEQ ID NO: 4508 - RNA, 19 nt, Artificial Sequence
  Description of Artificial Sequence: Synthetic oligonucleotide
ggagucacacgucaucgac

SEQ ID NO: 4509 - RNA, 19 nt, Artificial Sequence
  Description of Artificial Sequence: Synthetic oligonucleotide
caccggugacagccugucc

SEQ ID NO: 4510 - RNA, 19 nt, Artificial Sequence
  Description of Artificial Sequence: Synthetic oligonucleotide
caucuccugcaggggacag

SEQ ID NO: 4511 - RNA, 19 nt, Artificial Sequence
  Description of Artificial Sequence: Synthetic oligonucleotide
gcacccccucgagugggcu

SEQ ID NO: 4512 - RNA, 19 nt, Artificial Sequence
  Description of Artificial Sequence: Synthetic oligonucleotide
uuggccaggagcucaggag

SEQ ID NO: 4513 - RNA, 19 nt, Artificial Sequence
  Description of Artificial Sequence: Synthetic oligonucleotide
ggcgccagccaccggagac

SEQ ID NO: 4514 - RNA, 19 nt, Artificial Sequence
  Description of Artificial Sequence: Synthetic oligonucleotide
caaggacagcgaggacacg

SEQ ID NO: 4515 - RNA, 19 nt, Artificial Sequence
  Description of Artificial Sequence: Synthetic oligonucleotide
ggggguggugcgagacugc

SEQ ID NO: 4516 - RNA, 19 nt, Artificial Sequence
  Description of Artificial Sequence: Synthetic oligonucleotide
cgagggcacagacgccagg

SEQ ID NO: 4517 - RNA, 19 nt, Artificial Sequence
  Description of Artificial Sequence: Synthetic oligonucleotide
gcccuacugcaagguguug

SEQ ID NO: 4518 - RNA, 19 nt, Artificial Sequence
  Description of Artificial Sequence: Synthetic oligonucleotide
gcugcugcacgagguacau

SEQ ID NO: 4519 - RNA, 19 nt, Artificial Sequence
  Description of Artificial Sequence: Synthetic oligonucleotide
ugccaacgacacaggcagc

SEQ ID NO: 4520 - RNA, 19 nt, Artificial Sequence
  Description of Artificial Sequence: Synthetic oligonucleotide
cuacgucugcuacuacaag

SEQ ID NO: 4521 - RNA, 19 nt, Artificial Sequence
  Description of Artificial Sequence: Synthetic oligonucleotide
guacaucaaggcacgcauc

SEQ ID NO: 4522 - RNA, 19 nt, Artificial Sequence
  Description of Artificial Sequence: Synthetic oligonucleotide
cgagggcaccacggccgcc

SEQ ID NO: 4523 - RNA, 19 nt, Artificial Sequence
  Description of Artificial Sequence: Synthetic oligonucleotide
cagcuccuacguguucgug

SEQ ID NO: 4524 - RNA, 19 nt, Artificial Sequence
  Description of Artificial Sequence: Synthetic oligonucleotide
gagagacuuugagcagcca

SEQ ID NO: 4525 - RNA, 19 nt, Artificial Sequence
  Description of Artificial Sequence: Synthetic oligonucleotide
auucaucaacaagccugac

SEQ ID NO: 4526 - RNA, 19 nt, Artificial Sequence
  Description of Artificial Sequence: Synthetic oligonucleotide
cacgcucuuggucaacagg

SEQ ID NO: 4527 - RNA, 19 nt, Artificial Sequence
  Description of Artificial Sequence: Synthetic oligonucleotide
gaaggacgccaugugggug

SEQ ID NO: 4528 - RNA, 19 nt, Artificial Sequence
  Description of Artificial Sequence: Synthetic oligonucleotide
gcccugucugguguccauc

SEQ ID NO: 4529 - RNA, 19 nt, Artificial Sequence
  Description of Artificial Sequence: Synthetic oligonucleotide
ccccggccucaaugucacg

SEQ ID NO: 4530 - RNA, 19 nt, Artificial Sequence
  Description of Artificial Sequence: Synthetic oligonucleotide
gcugcgcucgcaaagcucg

SEQ ID NO: 4531 - RNA, 19 nt, Artificial Sequence
  Description of Artificial Sequence: Synthetic oligonucleotide
ggugcuguggccagacggg

SEQ ID NO: 4532 - RNA, 19 nt, Artificial Sequence
  Description of Artificial Sequence: Synthetic oligonucleotide
gcaggagguggugugggau

SEQ ID NO: 4533 - RNA, 19 nt, Artificial Sequence
  Description of Artificial Sequence: Synthetic oligonucleotide
ugaccggcggggcaugcuc

SEQ ID NO: 4534 - RNA, 19 nt, Artificial Sequence
  Description of Artificial Sequence: Synthetic oligonucleotide
cguguccacgccacugcug

SEQ ID NO: 4535 - RNA, 19 nt, Artificial Sequence
  Description of Artificial Sequence: Synthetic oligonucleotide
gcacgaugcccuguaccug

SEQ ID NO: 4536 - RNA, 19 nt, Artificial Sequence
  Description of Artificial Sequence: Synthetic oligonucleotide
gcagugcgagaccaccugg

SEQ ID NO: 4537 - RNA, 19 nt, Artificial Sequence
  Description of Artificial Sequence: Synthetic oligonucleotide
gggagaccaggacuuccuu

SEQ ID NO: 4538 - RNA, 19 nt, Artificial Sequence
  Description of Artificial Sequence: Synthetic oligonucleotide
uuccaaccccuuccuggug

SEQ ID NO: 4539 - RNA, 19 nt, Artificial Sequence
  Description of Artificial Sequence: Synthetic oligonucleotide
gcacaucacaggcaacgag

SEQ ID NO: 4540 - RNA, 19 nt, Artificial Sequence
  Description of Artificial Sequence: Synthetic oligonucleotide
gcucuaugacauccagcug

SEQ ID NO: 4541 - RNA, 19 nt, Artificial Sequence
  Description of Artificial Sequence: Synthetic oligonucleotide
guugcccaggaagucgcug

SEQ ID NO: 4542 - RNA, 19 nt, Artificial Sequence
  Description of Artificial Sequence: Synthetic oligonucleotide
ggagcugcugguaggggag

SEQ ID NO: 4543 - RNA, 19 nt, Artificial Sequence
  Description of Artificial Sequence: Synthetic oligonucleotide
gaagcugguccugaacugc

SEQ ID NO: 4544 - RNA, 19 nt, Artificial Sequence
  Description of Artificial Sequence: Synthetic oligonucleotide
caccgugugggcugaguuu

SEQ ID NO: 4545 - RNA, 19 nt, Artificial Sequence
  Description of Artificial Sequence: Synthetic oligonucleotide
uaacucaggugucaccuuu

SEQ ID NO: 4546 - RNA, 19 nt, Artificial Sequence
  Description of Artificial Sequence: Synthetic oligonucleotide
ugacugggacuacccaggg

SEQ ID NO: 4547 - RNA, 19 nt, Artificial Sequence
  Description of Artificial Sequence: Synthetic oligonucleotide
gaagcaggcagagcggggu

SEQ ID NO: 4548 - RNA, 19 nt, Artificial Sequence
  Description of Artificial Sequence: Synthetic oligonucleotide
uaagugggugcccgagcga

SEQ ID NO: 4549 - RNA, 19 nt, Artificial Sequence
  Description of Artificial Sequence: Synthetic oligonucleotide
acgcucccagcagacccac

SEQ ID NO: 4550 - RNA, 19 nt, Artificial Sequence
  Description of Artificial Sequence: Synthetic oligonucleotide
cacagaacucuccagcauc

SEQ ID NO: 4551 - RNA, 19 nt, Artificial Sequence
  Description of Artificial Sequence: Synthetic oligonucleotide
ccugaccauccacaacguc

SEQ ID NO: 4552 - RNA, 19 nt, Artificial Sequence
  Description of Artificial Sequence: Synthetic oligonucleotide
cagccagcacgaccugggc

SEQ ID NO: 4553 - RNA, 19 nt, Artificial Sequence
  Description of Artificial Sequence: Synthetic oligonucleotide
cucguaugugugcaaggcc

SEQ ID NO: 4554 - RNA, 19 nt, Artificial Sequence
  Description of Artificial Sequence: Synthetic oligonucleotide
caacaacggcauccagcga

SEQ ID NO: 4555 - RNA, 19 nt, Artificial Sequence
  Description of Artificial Sequence: Synthetic oligonucleotide
auuucgggagagcaccgag

SEQ ID NO: 4556 - RNA, 19 nt, Artificial Sequence
  Description of Artificial Sequence: Synthetic oligonucleotide
ggucauugugcaugaaaau

SEQ ID NO: 4557 - RNA, 19 nt, Artificial Sequence
  Description of Artificial Sequence: Synthetic oligonucleotide
ucccuucaucagcgucgag

SEQ ID NO: 4558 - RNA, 19 nt, Artificial Sequence
  Description of Artificial Sequence: Synthetic oligonucleotide
guggcucaaaggacccauc

SEQ ID NO: 4559 - RNA, 19 nt, Artificial Sequence
  Description of Artificial Sequence: Synthetic oligonucleotide
ccuggaggccacggcagga

SEQ ID NO: 4560 - RNA, 19 nt, Artificial Sequence
  Description of Artificial Sequence: Synthetic oligonucleotide
agacgagcuggugaagcug

SEQ ID NO: 4561 - RNA, 19 nt, Artificial Sequence
  Description of Artificial Sequence: Synthetic oligonucleotide
gcccgugaagcuggcagcg

SEQ ID NO: 4562 - RNA, 19 nt, Artificial Sequence
  Description of Artificial Sequence: Synthetic oligonucleotide
guaccccccgcccgaguuc

SEQ ID NO: 4563 - RNA, 19 nt, Artificial Sequence
  Description of Artificial Sequence: Synthetic oligonucleotide
ccagugguacaaggaugga

SEQ ID NO: 4564 - RNA, 19 nt, Artificial Sequence
  Description of Artificial Sequence: Synthetic oligonucleotide
aaaggcacuguccgggcgc

SEQ ID NO: 4565 - RNA, 19 nt, Artificial Sequence
  Description of Artificial Sequence: Synthetic oligonucleotide
ccacaguccacaugcccug

SEQ ID NO: 4566 - RNA, 19 nt, Artificial Sequence
  Description of Artificial Sequence: Synthetic oligonucleotide
ggugcucaaggaggugaca

SEQ ID NO: 4567 - RNA, 19 nt, Artificial Sequence
  Description of Artificial Sequence: Synthetic oligonucleotide
agaggccagcacaggcacc

SEQ ID NO: 4568 - RNA, 19 nt, Artificial Sequence
  Description of Artificial Sequence: Synthetic oligonucleotide
cuacacccucgcccugugg

SEQ ID NO: 4569 - RNA, 19 nt, Artificial Sequence
  Description of Artificial Sequence: Synthetic oligonucleotide
gaacuccgcugcuggccug

SEQ ID NO: 4570 - RNA, 19 nt, Artificial Sequence
  Description of Artificial Sequence: Synthetic oligonucleotide
gaggcgcaacaucagccug

SEQ ID NO: 4571 - RNA, 19 nt, Artificial Sequence
  Description of Artificial Sequence: Synthetic oligonucleotide
ggagcugguggugaaugug

SEQ ID NO: 4572 - RNA, 19 nt, Artificial Sequence
  Description of Artificial Sequence: Synthetic oligonucleotide
gcccccccagauacaugag

SEQ ID NO: 4573 - RNA, 19 nt, Artificial Sequence
  Description of Artificial Sequence: Synthetic oligonucleotide
gaaggaggccuccuccccc

SEQ ID NO: 4574 - RNA, 19 nt, Artificial Sequence
  Description of Artificial Sequence: Synthetic oligonucleotide
cagcaucuacucgcgucac

SEQ ID NO: 4575 - RNA, 19 nt, Artificial Sequence
  Description of Artificial Sequence: Synthetic oligonucleotide
cagccgccaggcccucacc

SEQ ID NO: 4576 - RNA, 19 nt, Artificial Sequence
  Description of Artificial Sequence: Synthetic oligonucleotide
cugcacggccuacggggug

SEQ ID NO: 4577 - RNA, 19 nt, Artificial Sequence
  Description of Artificial Sequence: Synthetic oligonucleotide
gccccugccucucagcauc

SEQ ID NO: 4578 - RNA, 19 nt, Artificial Sequence
  Description of Artificial Sequence: Synthetic oligonucleotide
ccaguggcacuggcggccc

SEQ ID NO: 4579 - RNA, 19 nt, Artificial Sequence
  Description of Artificial Sequence: Synthetic oligonucleotide
cuggacacccugcaagaug

SEQ ID NO: 4580 - RNA, 19 nt, Artificial Sequence
  Description of Artificial Sequence: Synthetic oligonucleotide
guuugcccagcguagucuc

SEQ ID NO: 4581 - RNA, 19 nt, Artificial Sequence
  Description of Artificial Sequence: Synthetic oligonucleotide
ccggcggcggcagcagcaa

SEQ ID NO: 4582 - RNA, 19 nt, Artificial Sequence
  Description of Artificial Sequence: Synthetic oligonucleotide
agaccucaugccacagugc

SEQ ID NO: 4583 - RNA, 19 nt, Artificial Sequence
  Description of Artificial Sequence: Synthetic oligonucleotide
ccgugacuggagggcggug

SEQ ID NO: 4584 - RNA, 19 nt, Artificial Sequence
  Description of Artificial Sequence: Synthetic oligonucleotide
gaccacgcaggaugccgug

SEQ ID NO: 4585 - RNA, 19 nt, Artificial Sequence
  Description of Artificial Sequence: Synthetic oligonucleotide
gaaccccaucgagagccug

SEQ ID NO: 4586 - RNA, 19 nt, Artificial Sequence
  Description of Artificial Sequence: Synthetic oligonucleotide
ggacaccuggaccgaguuu

SEQ ID NO: 4587 - RNA, 19 nt, Artificial Sequence
  Description of Artificial Sequence: Synthetic oligonucleotide
uguggagggaaagaauaag

SEQ ID NO: 4588 - RNA, 19 nt, Artificial Sequence
  Description of Artificial Sequence: Synthetic oligonucleotide
gacugugagcaagcuggug

SEQ ID NO: 4589 - RNA, 19 nt, Artificial Sequence
  Description of Artificial Sequence: Synthetic oligonucleotide
gauccagaaugccaacgug

SEQ ID NO: 4590 - RNA, 19 nt, Artificial Sequence
  Description of Artificial Sequence: Synthetic oligonucleotide
gucugccauguacaagugu

SEQ ID NO: 4591 - RNA, 19 nt, Artificial Sequence
  Description of Artificial Sequence: Synthetic oligonucleotide
uguggucuccaacaaggug

SEQ ID NO: 4592 - RNA, 19 nt, Artificial Sequence
  Description of Artificial Sequence: Synthetic oligonucleotide
gggccaggaugagcggcuc

SEQ ID NO: 4593 - RNA, 19 nt, Artificial Sequence
  Description of Artificial Sequence: Synthetic oligonucleotide
caucuacuucuaugugacc

SEQ ID NO: 4594 - RNA, 19 nt, Artificial Sequence
  Description of Artificial Sequence: Synthetic oligonucleotide
caccauccccgacggcuuc

SEQ ID NO: 4595 - RNA, 19 nt, Artificial Sequence
  Description of Artificial Sequence: Synthetic oligonucleotide
caccaucgaauccaagcca

SEQ ID NO: 4596 - RNA, 19 nt, Artificial Sequence
  Description of Artificial Sequence: Synthetic oligonucleotide
auccgaggagcuacuagag

SEQ ID NO: 4597 - RNA, 19 nt, Artificial Sequence
  Description of Artificial Sequence: Synthetic oligonucleotide
gggccagccggugcuccug

SEQ ID NO: 4598 - RNA, 19 nt, Artificial Sequence
  Description of Artificial Sequence: Synthetic oligonucleotide
gagcugccaagccgacagc

SEQ ID NO: 4599 - RNA, 19 nt, Artificial Sequence
  Description of Artificial Sequence: Synthetic oligonucleotide
cuacaaguacgagcaucug

SEQ ID NO: 4600 - RNA, 19 nt, Artificial Sequence
  Description of Artificial Sequence: Synthetic oligonucleotide
gcgcugguaccgccucaac

SEQ ID NO: 4601 - RNA, 19 nt, Artificial Sequence
  Description of Artificial Sequence: Synthetic oligonucleotide
ccuguccacgcugcacgau

SEQ ID NO: 4602 - RNA, 19 nt, Artificial Sequence
  Description of Artificial Sequence: Synthetic oligonucleotide
ugcgcacgggaacccgcuu

SEQ ID NO: 4603 - RNA, 19 nt, Artificial Sequence
  Description of Artificial Sequence: Synthetic oligonucleotide
ucugcucgacugcaagaac

SEQ ID NO: 4604 - RNA, 19 nt, Artificial Sequence
  Description of Artificial Sequence: Synthetic oligonucleotide
cgugcaucuguucgccacc

SEQ ID NO: 4605 - RNA, 19 nt, Artificial Sequence
  Description of Artificial Sequence: Synthetic oligonucleotide
cccucuggccgccagccug

SEQ ID NO: 4606 - RNA, 19 nt, Artificial Sequence
  Description of Artificial Sequence: Synthetic oligonucleotide
ggaggagguggcaccuggg

SEQ ID NO: 4607 - RNA, 19 nt, Artificial Sequence
  Description of Artificial Sequence: Synthetic oligonucleotide
ggcgcgccacgccacgcuc

SEQ ID NO: 4608 - RNA, 19 nt, Artificial Sequence
  Description of Artificial Sequence: Synthetic oligonucleotide
cagccugaguaucccccgc

SEQ ID NO: 4609 - RNA, 19 nt, Artificial Sequence
  Description of Artificial Sequence: Synthetic oligonucleotide
cgucgcgcccgagcacgag

SEQ ID NO: 4610 - RNA, 19 nt, Artificial Sequence
  Description of Artificial Sequence: Synthetic oligonucleotide
gggccacuaugugugcgaa

SEQ ID NO: 4611 - RNA, 19 nt, Artificial Sequence
  Description of Artificial Sequence: Synthetic oligonucleotide
agugcaagaccggcgcagc

SEQ ID NO: 4612 - RNA, 19 nt, Artificial Sequence
  Description of Artificial Sequence: Synthetic oligonucleotide
ccaugacaagcacugccac

SEQ ID NO: 4613 - RNA, 19 nt, Artificial Sequence
  Description of Artificial Sequence: Synthetic oligonucleotide
caagaaguaccugucggug

SEQ ID NO: 4614 - RNA, 19 nt, Artificial Sequence
  Description of Artificial Sequence: Synthetic oligonucleotide
gcaggcccuggaagccccu

SEQ ID NO: 4615 - RNA, 19 nt, Artificial Sequence
  Description of Artificial Sequence: Synthetic oligonucleotide
ucggcucacgcagaacuug

SEQ ID NO: 4616 - RNA, 19 nt, Artificial Sequence
  Description of Artificial Sequence: Synthetic oligonucleotide
gaccgaccuccuggugaac

SEQ ID NO: 4617 - RNA, 19 nt, Artificial Sequence
  Description of Artificial Sequence: Synthetic oligonucleotide
cgugagcgacucgcuggag

SEQ ID NO: 4618 - RNA, 19 nt, Artificial Sequence
  Description of Artificial Sequence: Synthetic oligonucleotide
gaugcagugcuugguggcc

SEQ ID NO: 4619 - RNA, 19 nt, Artificial Sequence
  Description of Artificial Sequence: Synthetic oligonucleotide
cggagcgcacgcgcccagc

SEQ ID NO: 4620 - RNA, 19 nt, Artificial Sequence
  Description of Artificial Sequence: Synthetic oligonucleotide
caucgugugguacaaagac

SEQ ID NO: 4621 - RNA, 19 nt, Artificial Sequence
  Description of Artificial Sequence: Synthetic oligonucleotide
cgagaggcugcuggaggaa

SEQ ID NO: 4622 - RNA, 19 nt, Artificial Sequence
  Description of Artificial Sequence: Synthetic oligonucleotide
aaagucuggagucgacuug

SEQ ID NO: 4623 - RNA, 19 nt, Artificial Sequence
  Description of Artificial Sequence: Synthetic oligonucleotide
ggcggacuccaaccagaag

SEQ ID NO: 4624 - RNA, 19 nt, Artificial Sequence
  Description of Artificial Sequence: Synthetic oligonucleotide
gcugagcauccagcgcgug

SEQ ID NO: 4625 - RNA, 19 nt, Artificial Sequence
  Description of Artificial Sequence: Synthetic oligonucleotide
gcgcgaggaggaugcggga

SEQ ID NO: 4626 - RNA, 19 nt, Artificial Sequence
  Description of Artificial Sequence: Synthetic oligonucleotide
acgcuaucugugcagcgug

SEQ ID NO: 4627 - RNA, 19 nt, Artificial Sequence
  Description of Artificial Sequence: Synthetic oligonucleotide
gugcaacgccaagggcugc

SEQ ID NO: 4628 - RNA, 19 nt, Artificial Sequence
  Description of Artificial Sequence: Synthetic oligonucleotide
cgucaacuccuccgccagc

SEQ ID NO: 4629 - RNA, 19 nt, Artificial Sequence
  Description of Artificial Sequence: Synthetic oligonucleotide
cguggccguggaaggcucc

SEQ ID NO: 4630 - RNA, 19 nt, Artificial Sequence
  Description of Artificial Sequence: Synthetic oligonucleotide
cgaggauaagggcagcaug

SEQ ID NO: 4631 - RNA, 19 nt, Artificial Sequence
  Description of Artificial Sequence: Synthetic oligonucleotide
ggagaucgugauccuuguc

SEQ ID NO: 4632 - RNA, 19 nt, Artificial Sequence
  Description of Artificial Sequence: Synthetic oligonucleotide
cgguaccggcgucaucgcu

SEQ ID NO: 4633 - RNA, 19 nt, Artificial Sequence
  Description of Artificial Sequence: Synthetic oligonucleotide
ugucuucuucuggguccuc

SEQ ID NO: 4634 - RNA, 19 nt, Artificial Sequence
  Description of Artificial Sequence: Synthetic oligonucleotide
ccuccuccucaucuucugu

SEQ ID NO: 4635 - RNA, 19 nt, Artificial Sequence
  Description of Artificial Sequence: Synthetic oligonucleotide
uaacaugaggaggccggcc

SEQ ID NO: 4636 - RNA, 19 nt, Artificial Sequence
  Description of Artificial Sequence: Synthetic oligonucleotide
ccacgcagacaucaagacg

SEQ ID NO: 4637 - RNA, 19 nt, Artificial Sequence
  Description of Artificial Sequence: Synthetic oligonucleotide
gggcuaccuguccaucauc

SEQ ID NO: 4638 - RNA, 19 nt, Artificial Sequence
  Description of Artificial Sequence: Synthetic oligonucleotide
cauggaccccggggaggug

SEQ ID NO: 4639 - RNA, 19 nt, Artificial Sequence
  Description of Artificial Sequence: Synthetic oligonucleotide
gccucuggaggagcaaugc

SEQ ID NO: 4640 - RNA, 19 nt, Artificial Sequence
  Description of Artificial Sequence: Synthetic oligonucleotide
cgaauaccuguccuacgau

SEQ ID NO: 4641 - RNA, 19 nt, Artificial Sequence
  Description of Artificial Sequence: Synthetic oligonucleotide
ugccagccagugggaauuc

SEQ ID NO: 4642 - RNA, 19 nt, Artificial Sequence
  Description of Artificial Sequence: Synthetic oligonucleotide
cccccgagagcggcugcac

SEQ ID NO: 4643 - RNA, 19 nt, Artificial Sequence
  Description of Artificial Sequence: Synthetic oligonucleotide
ccuggggagagugcucggc

SEQ ID NO: 4644 - RNA, 19 nt, Artificial Sequence
  Description of Artificial Sequence: Synthetic oligonucleotide
cuacggcgccuucgggaag

SEQ ID NO: 4645 - RNA, 19 nt, Artificial Sequence
  Description of Artificial Sequence: Synthetic oligonucleotide
ggugguggaagccuccgcu

SEQ ID NO: 4646 - RNA, 19 nt, Artificial Sequence
  Description of Artificial Sequence: Synthetic oligonucleotide
uuucggcauccacaagggc

SEQ ID NO: 4647 - RNA, 19 nt, Artificial Sequence
  Description of Artificial Sequence: Synthetic oligonucleotide
cagcagcugugacaccgug

SEQ ID NO: 4648 - RNA, 19 nt, Artificial Sequence
  Description of Artificial Sequence: Synthetic oligonucleotide
ggccgugaaaaugcugaaa

SEQ ID NO: 4649 - RNA, 19 nt, Artificial Sequence
  Description of Artificial Sequence: Synthetic oligonucleotide
agagggcgccacggccagc

SEQ ID NO: 4650 - RNA, 19 nt, Artificial Sequence
  Description of Artificial Sequence: Synthetic oligonucleotide
cgagcaccgcgcgcugaug

SEQ ID NO: 4651 - RNA, 19 nt, Artificial Sequence
  Description of Artificial Sequence: Synthetic oligonucleotide
gucggagcucaagauccuc

SEQ ID NO: 4652 - RNA, 19 nt, Artificial Sequence
  Description of Artificial Sequence: Synthetic oligonucleotide
cauucacaucggcaaccac

SEQ ID NO: 4653 - RNA, 19 nt, Artificial Sequence
  Description of Artificial Sequence: Synthetic oligonucleotide
ccucaacguggucaaccuc

SEQ ID NO: 4654 - RNA, 19 nt, Artificial Sequence
  Description of Artificial Sequence: Synthetic oligonucleotide
ccucggggcgugcaccaag

SEQ ID NO: 4655 - RNA, 19 nt, Artificial Sequence
  Description of Artificial Sequence: Synthetic oligonucleotide
gccgcagggcccccucaug

SEQ ID NO: 4656 - RNA, 19 nt, Artificial Sequence
  Description of Artificial Sequence: Synthetic oligonucleotide
ggugaucguggaguucugc

SEQ ID NO: 4657 - RNA, 19 nt, Artificial Sequence
  Description of Artificial Sequence: Synthetic oligonucleotide
caaguacggcaaccucucc

SEQ ID NO: 4658 - RNA, 19 nt, Artificial Sequence
  Description of Artificial Sequence: Synthetic oligonucleotide
caacuuccugcgcgccaag

SEQ ID NO: 4659 - RNA, 19 nt, Artificial Sequence
  Description of Artificial Sequence: Synthetic oligonucleotide
gcgggacgccuucagcccc

SEQ ID NO: 4660 - RNA, 19 nt, Artificial Sequence
  Description of Artificial Sequence: Synthetic oligonucleotide
cugcgcggagaagucuccc

SEQ ID NO: 4661 - RNA, 19 nt, Artificial Sequence
  Description of Artificial Sequence: Synthetic oligonucleotide
cgagcagcgcggacgcuuc

SEQ ID NO: 4662 - RNA, 19 nt, Artificial Sequence
  Description of Artificial Sequence: Synthetic oligonucleotide
ccgcgccaugguggagcuc

SEQ ID NO: 4663 - RNA, 19 nt, Artificial Sequence
  Description of Artificial Sequence: Synthetic oligonucleotide
cgccaggcuggaucggagg

SEQ ID NO: 4664 - RNA, 19 nt, Artificial Sequence
  Description of Artificial Sequence: Synthetic oligonucleotide
gcggccggggagcagcgac

SEQ ID NO: 4665 - RNA, 19 nt, Artificial Sequence
  Description of Artificial Sequence: Synthetic oligonucleotide
caggguccucuucgcgcgg

SEQ ID NO: 4666 - RNA, 19 nt, Artificial Sequence
  Description of Artificial Sequence: Synthetic oligonucleotide
guucucgaagaccgagggc

SEQ ID NO: 4667 - RNA, 19 nt, Artificial Sequence
  Description of Artificial Sequence: Synthetic oligonucleotide
cggagcgaggcgggcuucu

SEQ ID NO: 4668 - RNA, 19 nt, Artificial Sequence
  Description of Artificial Sequence: Synthetic oligonucleotide
uccagaccaagaagcugag

SEQ ID NO: 4669 - RNA, 19 nt, Artificial Sequence
  Description of Artificial Sequence: Synthetic oligonucleotide
ggaccuguggcugagcccg

SEQ ID NO: 4670 - RNA, 19 nt, Artificial Sequence
  Description of Artificial Sequence: Synthetic oligonucleotide
gcugaccauggaagaucuu

SEQ ID NO: 4671 - RNA, 19 nt, Artificial Sequence
  Description of Artificial Sequence: Synthetic oligonucleotide
ugucugcuacagcuuccag

SEQ ID NO: 4672 - RNA, 19 nt, Artificial Sequence
  Description of Artificial Sequence: Synthetic oligonucleotide
gguggccagagggauggag

SEQ ID NO: 4673 - RNA, 19 nt, Artificial Sequence
  Description of Artificial Sequence: Synthetic oligonucleotide
guuccuggcuucccgaaag

SEQ ID NO: 4674 - RNA, 19 nt, Artificial Sequence
  Description of Artificial Sequence: Synthetic oligonucleotide
gugcauccacagagaccug

SEQ ID NO: 4675 - RNA, 19 nt, Artificial Sequence
  Description of Artificial Sequence: Synthetic oligonucleotide
ggcugcucggaacauucug

SEQ ID NO: 4676 - RNA, 19 nt, Artificial Sequence
  Description of Artificial Sequence: Synthetic oligonucleotide
gcugucggaaagcgacgug

SEQ ID NO: 4677 - RNA, 19 nt, Artificial Sequence
  Description of Artificial Sequence: Synthetic oligonucleotide
ggugaagaucugugacuuu

SEQ ID NO: 4678 - RNA, 19 nt, Artificial Sequence
  Description of Artificial Sequence: Synthetic oligonucleotide
uggccuugcccgggacauc

SEQ ID NO: 4679 - RNA, 19 nt, Artificial Sequence
  Description of Artificial Sequence: Synthetic oligonucleotide
cuacaaagaccccgacuac

SEQ ID NO: 4680 - RNA, 19 nt, Artificial Sequence
  Description of Artificial Sequence: Synthetic oligonucleotide
cguccgcaagggcagugcc

SEQ ID NO: 4681 - RNA, 19 nt, Artificial Sequence
  Description of Artificial Sequence: Synthetic oligonucleotide
ccggcugccccugaagugg

SEQ ID NO: 4682 - RNA, 19 nt, Artificial Sequence
  Description of Artificial Sequence: Synthetic oligonucleotide
gauggccccugaaagcauc

SEQ ID NO: 4683 - RNA, 19 nt, Artificial Sequence
  Description of Artificial Sequence: Synthetic oligonucleotide
cuucgacaagguguacacc

SEQ ID NO: 4684 - RNA, 19 nt, Artificial Sequence
  Description of Artificial Sequence: Synthetic oligonucleotide
cacgcagagugacgugugg

SEQ ID NO: 4685 - RNA, 19 nt, Artificial Sequence
  Description of Artificial Sequence: Synthetic oligonucleotide
guccuuuggggugcuucuc

SEQ ID NO: 4686 - RNA, 19 nt, Artificial Sequence
  Description of Artificial Sequence: Synthetic oligonucleotide
cugggagaucuucucucug

SEQ ID NO: 4687 - RNA, 19 nt, Artificial Sequence
  Description of Artificial Sequence: Synthetic oligonucleotide
gggggccuccccguacccu

SEQ ID NO: 4688 - RNA, 19 nt, Artificial Sequence
  Description of Artificial Sequence: Synthetic oligonucleotide
uggggugcagaucaaugag

SEQ ID NO: 4689 - RNA, 19 nt, Artificial Sequence
  Description of Artificial Sequence: Synthetic oligonucleotide
ggaguucugccagcggcug

SEQ ID NO: 4690 - RNA, 19 nt, Artificial Sequence
  Description of Artificial Sequence: Synthetic oligonucleotide
gagagacggcacaaggaug

SEQ ID NO: 4691 - RNA, 19 nt, Artificial Sequence
  Description of Artificial Sequence: Synthetic oligonucleotide
gagggccccggagcuggcc

SEQ ID NO: 4692 - RNA, 19 nt, Artificial Sequence
  Description of Artificial Sequence: Synthetic oligonucleotide
cacucccgccauacgccgc

SEQ ID NO: 4693 - RNA, 19 nt, Artificial Sequence
  Description of Artificial Sequence: Synthetic oligonucleotide
caucaugcugaacugcugg

SEQ ID NO: 4694 - RNA, 19 nt, Artificial Sequence
  Description of Artificial Sequence: Synthetic oligonucleotide
guccggagaccccaaggcg

SEQ ID NO: 4695 - RNA, 19 nt, Artificial Sequence
  Description of Artificial Sequence: Synthetic oligonucleotide
gagaccugcauucucggag

SEQ ID NO: 4696 - RNA, 19 nt, Artificial Sequence
  Description of Artificial Sequence: Synthetic oligonucleotide
gcugguggagauccugggg

SEQ ID NO: 4697 - RNA, 19 nt, Artificial Sequence
  Description of Artificial Sequence: Synthetic oligonucleotide
ggaccugcuccagggcagg

SEQ ID NO: 4698 - RNA, 19 nt, Artificial Sequence
  Description of Artificial Sequence: Synthetic oligonucleotide
gggccugcaagaggaagag

SEQ ID NO: 4699 - RNA, 19 nt, Artificial Sequence
  Description of Artificial Sequence: Synthetic oligonucleotide
ggaggucugcauggccccg

SEQ ID NO: 4700 - RNA, 19 nt, Artificial Sequence
  Description of Artificial Sequence: Synthetic oligonucleotide
gcgcagcucucagagcuca

SEQ ID NO: 4701 - RNA, 19 nt, Artificial Sequence
  Description of Artificial Sequence: Synthetic oligonucleotide
agaagagggcagcuucucg

SEQ ID NO: 4702 - RNA, 19 nt, Artificial Sequence
  Description of Artificial Sequence: Synthetic oligonucleotide
gcagguguccaccauggcc

SEQ ID NO: 4703 - RNA, 19 nt, Artificial Sequence
  Description of Artificial Sequence: Synthetic oligonucleotide
ccuacacaucgcccaggcu

SEQ ID NO: 4704 - RNA, 19 nt, Artificial Sequence
  Description of Artificial Sequence: Synthetic oligonucleotide
ugacgcugaggacagcccg

SEQ ID NO: 4705 - RNA, 19 nt, Artificial Sequence
  Description of Artificial Sequence: Synthetic oligonucleotide
gccaagccugcagcgccac

SEQ ID NO: 4706 - RNA, 19 nt, Artificial Sequence
  Description of Artificial Sequence: Synthetic oligonucleotide
cagccuggccgccagguau

SEQ ID NO: 4707 - RNA, 19 nt, Artificial Sequence
  Description of Artificial Sequence: Synthetic oligonucleotide
uuacaacuggguguccuuu

SEQ ID NO: 4708 - RNA, 19 nt, Artificial Sequence
  Description of Artificial Sequence: Synthetic oligonucleotide
ucccgggugccuggccaga

SEQ ID NO: 4709 - RNA, 19 nt, Artificial Sequence
  Description of Artificial Sequence: Synthetic oligonucleotide
aggggcugagacccguggu

SEQ ID NO: 4710 - RNA, 19 nt, Artificial Sequence
  Description of Artificial Sequence: Synthetic oligonucleotide
uuccuccaggaugaagaca

SEQ ID NO: 4711 - RNA, 19 nt, Artificial Sequence
  Description of Artificial Sequence: Synthetic oligonucleotide
auuugaggaauuccccaug

SEQ ID NO: 4712 - RNA, 19 nt, Artificial Sequence
  Description of Artificial Sequence: Synthetic oligonucleotide
gaccccaacgaccuacaaa

SEQ ID NO: 4713 - RNA, 19 nt, Artificial Sequence
  Description of Artificial Sequence: Synthetic oligonucleotide
aggcucuguggacaaccag

SEQ ID NO: 4714 - RNA, 19 nt, Artificial Sequence
  Description of Artificial Sequence: Synthetic oligonucleotide
gacagacagugggauggug

SEQ ID NO: 4715 - RNA, 19 nt, Artificial Sequence
  Description of Artificial Sequence: Synthetic oligonucleotide
gcuggccucggaggaguuu

SEQ ID NO: 4716 - RNA, 19 nt, Artificial Sequence
  Description of Artificial Sequence: Synthetic oligonucleotide
ugagcagauagagagcagg

SEQ ID NO: 4717 - RNA, 19 nt, Artificial Sequence
  Description of Artificial Sequence: Synthetic oligonucleotide
gcauagacaagaaagcggc

SEQ ID NO: 4718 - RNA, 19 nt, Artificial Sequence
  Description of Artificial Sequence: Synthetic oligonucleotide
cuucagcuguaaaggaccu

SEQ ID NO: 4719 - RNA, 19 nt, Artificial Sequence
  Description of Artificial Sequence: Synthetic oligonucleotide
uggccagaauguggcugug

SEQ ID NO: 4720 - RNA, 19 nt, Artificial Sequence
  Description of Artificial Sequence: Synthetic oligonucleotide
gaccagggcacacccugac

SEQ ID NO: 4721 - RNA, 19 nt, Artificial Sequence
  Description of Artificial Sequence: Synthetic oligonucleotide
cucccaagggaggcggcgg

SEQ ID NO: 4722 - RNA, 19 nt, Artificial Sequence
  Description of Artificial Sequence: Synthetic oligonucleotide
gcggccugagcggggggcc

SEQ ID NO: 4723 - RNA, 19 nt, Artificial Sequence
  Description of Artificial Sequence: Synthetic oligonucleotide
ccgaggaggccagguguuu

SEQ ID NO: 4724 - RNA, 19 nt, Artificial Sequence
  Description of Artificial Sequence: Synthetic oligonucleotide
uuacaacagcgaguauggg

SEQ ID NO: 4725 - RNA, 19 nt, Artificial Sequence
  Description of Artificial Sequence: Synthetic oligonucleotide
ggagcugucggagccaagc

SEQ ID NO: 4726 - RNA, 19 nt, Artificial Sequence
  Description of Artificial Sequence: Synthetic oligonucleotide
cgaggaggaccacugcucc

SEQ ID NO: 4727 - RNA, 19 nt, Artificial Sequence
  Description of Artificial Sequence: Synthetic oligonucleotide
cccgucugcccgcgugacu

SEQ ID NO: 4728 - RNA, 19 nt, Artificial Sequence
  Description of Artificial Sequence: Synthetic oligonucleotide
uuucuucacagacaacagc

SEQ ID NO: 4729 - RNA, 19 nt, Artificial Sequence
  Description of Artificial Sequence: Synthetic oligonucleotide
cuacuaagcagcaucggac

SEQ ID NO: 4730 - RNA, 19 nt, Artificial Sequence
  Description of Artificial Sequence: Synthetic oligonucleotide
caagacccccagcacuugg

SEQ ID NO: 4731 - RNA, 19 nt, Artificial Sequence
  Description of Artificial Sequence: Synthetic oligonucleotide
gggguucaggcccggcagg

SEQ ID NO: 4732 - RNA, 19 nt, Artificial Sequence
  Description of Artificial Sequence: Synthetic oligonucleotide
ggcgggcagagggcuggag

SEQ ID NO: 4733 - RNA, 19 nt, Artificial Sequence
  Description of Artificial Sequence: Synthetic oligonucleotide
ggcccaggcugggaacuca

SEQ ID NO: 4734 - RNA, 19 nt, Artificial Sequence
  Description of Artificial Sequence: Synthetic oligonucleotide
aucugguugaacucuggug

SEQ ID NO: 4735 - RNA, 19 nt, Artificial Sequence
  Description of Artificial Sequence: Synthetic oligonucleotide
ggcacaggaguguccucuu

SEQ ID NO: 4736 - RNA, 19 nt, Artificial Sequence
  Description of Artificial Sequence: Synthetic oligonucleotide
ucccucucugcagacuucc

SEQ ID NO: 4737 - RNA, 19 nt, Artificial Sequence
  Description of Artificial Sequence: Synthetic oligonucleotide
ccagcuaggaagagcagga

SEQ ID NO: 4738 - RNA, 19 nt, Artificial Sequence
  Description of Artificial Sequence: Synthetic oligonucleotide
acuccaggcccaaggcucc

SEQ ID NO: 4739 - RNA, 19 nt, Artificial Sequence
  Description of Artificial Sequence: Synthetic oligonucleotide
ccggaauuccgucaccacg

SEQ ID NO: 4740 - RNA, 19 nt, Artificial Sequence
  Description of Artificial Sequence: Synthetic oligonucleotide
gacuggccagggccacgcu

SEQ ID NO: 4741 - RNA, 19 nt, Artificial Sequence
  Description of Artificial Sequence: Synthetic oligonucleotide
uccagcugccccggccccu

SEQ ID NO: 4742 - RNA, 19 nt, Artificial Sequence
  Description of Artificial Sequence: Synthetic oligonucleotide
ucccccugagauucagaug

SEQ ID NO: 4743 - RNA, 19 nt, Artificial Sequence
  Description of Artificial Sequence: Synthetic oligonucleotide
gucauuuaguucagcaucc

SEQ ID NO: 4744 - RNA, 19 nt, Artificial Sequence
  Description of Artificial Sequence: Synthetic oligonucleotide
cgcaggugcuggucccggg

SEQ ID NO: 4745 - RNA, 19 nt, Artificial Sequence
  Description of Artificial Sequence: Synthetic oligonucleotide
ggccagcacuuccauggga

SEQ ID NO: 4746 - RNA, 19 nt, Artificial Sequence
  Description of Artificial Sequence: Synthetic oligonucleotide
aaugucucuuuggcgaccu

SEQ ID NO: 4747 - RNA, 19 nt, Artificial Sequence
  Description of Artificial Sequence: Synthetic oligonucleotide
uccuuucaucacacugggu

SEQ ID NO: 4748 - RNA, 19 nt, Artificial Sequence
  Description of Artificial Sequence: Synthetic oligonucleotide
ugguggccuggucccuguu

SEQ ID NO: 4749 - RNA, 19 nt, Artificial Sequence
  Description of Artificial Sequence: Synthetic oligonucleotide
uuucccacgaggaaucugu

SEQ ID NO: 4750 - RNA, 19 nt, Artificial Sequence
  Description of Artificial Sequence: Synthetic oligonucleotide
ugggucugggagucacaca

SEQ ID NO: 4751 - RNA, 19 nt, Artificial Sequence
  Description of Artificial Sequence: Synthetic oligonucleotide
aguguuggagguuaaggca

SEQ ID NO: 4752 - RNA, 19 nt, Artificial Sequence
  Description of Artificial Sequence: Synthetic oligonucleotide
auacgagagcagaggucuc

SEQ ID NO: 4753 - RNA, 19 nt, Artificial Sequence
  Description of Artificial Sequence: Synthetic oligonucleotide
cccaaacgcccuuuccucc

SEQ ID NO: 4754 - RNA, 19 nt, Artificial Sequence
  Description of Artificial Sequence: Synthetic oligonucleotide
cucaggcacacagcuacuc

SEQ ID NO: 4755 - RNA, 19 nt, Artificial Sequence
  Description of Artificial Sequence: Synthetic oligonucleotide
cuccccacgagggcuggcu

SEQ ID NO: 4756 - RNA, 19 nt, Artificial Sequence
  Description of Artificial Sequence: Synthetic oligonucleotide
uggccucacccaccccugc

SEQ ID NO: 4757 - RNA, 19 nt, Artificial Sequence
  Description of Artificial Sequence: Synthetic oligonucleotide
cacaguugaagggaggggc

SEQ ID NO: 4758 - RNA, 19 nt, Artificial Sequence
  Description of Artificial Sequence: Synthetic oligonucleotide
cuguguuuccaucucaaag

SEQ ID NO: 4759 - RNA, 19 nt, Artificial Sequence
  Description of Artificial Sequence: Synthetic oligonucleotide
gaaggcauuugcagggucc

SEQ ID NO: 4760 - RNA, 19 nt, Artificial Sequence
  Description of Artificial Sequence: Synthetic oligonucleotide
cucuucugggccugaccaa

SEQ ID NO: 4761 - RNA, 19 nt, Artificial Sequence
  Description of Artificial Sequence: Synthetic oligonucleotide
aacagccaacuagccccug

SEQ ID NO: 4762 - RNA, 19 nt, Artificial Sequence
  Description of Artificial Sequence: Synthetic oligonucleotide
gggguggccaccaguauga

SEQ ID NO: 4763 - RNA, 19 nt, Artificial Sequence
  Description of Artificial Sequence: Synthetic oligonucleotide
acaguauuauacgcuggca

SEQ ID NO: 4764 - RNA, 19 nt, Artificial Sequence
  Description of Artificial Sequence: Synthetic oligonucleotide
aacacagaggcagcccgca

SEQ ID NO: 4765 - RNA, 19 nt, Artificial Sequence
  Description of Artificial Sequence: Synthetic oligonucleotide
acaccugcgccuggguguu

SEQ ID NO: 4766 - RNA, 19 nt, Artificial Sequence
  Description of Artificial Sequence: Synthetic oligonucleotide
ugagagccauccugcaagu

SEQ ID NO: 4767 - RNA, 19 nt, Artificial Sequence
  Description of Artificial Sequence: Synthetic oligonucleotide
ucuuuuucaacagaacuuc

SEQ ID NO: 4768 - RNA, 19 nt, Artificial Sequence
  Description of Artificial Sequence: Synthetic oligonucleotide
cacagacuguuagagcugc

SEQ ID NO: 4769 - RNA, 19 nt, Artificial Sequence
  Description of Artificial Sequence: Synthetic oligonucleotide
cugagaagaauuugcuuuc

SEQ ID NO: 4770 - RNA, 19 nt, Artificial Sequence
  Description of Artificial Sequence: Synthetic oligonucleotide
ccgaauucagccuggaagg

SEQ ID NO: 4771 - RNA, 19 nt, Artificial Sequence
  Description of Artificial Sequence: Synthetic oligonucleotide
gcgcccagggacagcugua

SEQ ID NO: 4772 - RNA, 19 nt, Artificial Sequence
  Description of Artificial Sequence: Synthetic oligonucleotide
acugagucuagaugacucu

SEQ ID NO: 4773 - RNA, 19 nt, Artificial Sequence
  Description of Artificial Sequence: Synthetic oligonucleotide
ugacccccgccccagguca

SEQ ID NO: 4774 - RNA, 19 nt, Artificial Sequence
  Description of Artificial Sequence: Synthetic oligonucleotide
aaggccagcagagcaguca

SEQ ID NO: 4775 - RNA, 19 nt, Artificial Sequence
  Description of Artificial Sequence: Synthetic oligonucleotide
agugccucuggagaaggcc

SEQ ID NO: 4776 - RNA, 19 nt, Artificial Sequence
  Description of Artificial Sequence: Synthetic oligonucleotide
ccuugcucucccaccuggc

SEQ ID NO: 4777 - RNA, 19 nt, Artificial Sequence
  Description of Artificial Sequence: Synthetic oligonucleotide
cccagacuccgaggagccu

SEQ ID NO: 4778 - RNA, 19 nt, Artificial Sequence
  Description of Artificial Sequence: Synthetic oligonucleotide
ugggucuggagcugccggu

SEQ ID NO: 4779 - RNA, 19 nt, Artificial Sequence
  Description of Artificial Sequence: Synthetic oligonucleotide
ucugguucuucccuuuaga

SEQ ID NO: 4780 - RNA, 19 nt, Artificial Sequence
  Description of Artificial Sequence: Synthetic oligonucleotide
agcccggaucugccaccug

SEQ ID NO: 4781 - RNA, 19 nt, Artificial Sequence
  Description of Artificial Sequence: Synthetic oligonucleotide
gcggccccucccaagccgu

SEQ ID NO: 4782 - RNA, 19 nt, Artificial Sequence
  Description of Artificial Sequence: Synthetic oligonucleotide
ugaaccagcucaugagaga

SEQ ID NO: 4783 - RNA, 19 nt, Artificial Sequence
  Description of Artificial Sequence: Synthetic oligonucleotide
augaacacugugggaucca

SEQ ID NO: 4784 - RNA, 19 nt, Artificial Sequence
  Description of Artificial Sequence: Synthetic oligonucleotide
acucaggaaggcucggggc

SEQ ID NO: 4785 - RNA, 19 nt, Artificial Sequence
  Description of Artificial Sequence: Synthetic oligonucleotide
cuggcacaaaggaccaccc

SEQ ID NO: 4786 - RNA, 19 nt, Artificial Sequence
  Description of Artificial Sequence: Synthetic oligonucleotide
cagcauugcccugugccac

SEQ ID NO: 4787 - RNA, 19 nt, Artificial Sequence
  Description of Artificial Sequence: Synthetic oligonucleotide
cccagcacucaguggacau

SEQ ID NO: 4788 - RNA, 19 nt, Artificial Sequence
  Description of Artificial Sequence: Synthetic oligonucleotide
uucuggggaccugccuuca

SEQ ID NO: 4789 - RNA, 19 nt, Artificial Sequence
  Description of Artificial Sequence: Synthetic oligonucleotide
agccuuuuccugcccugug

SEQ ID NO: 4790 - RNA, 19 nt, Artificial Sequence
  Description of Artificial Sequence: Synthetic oligonucleotide
gccugacaucagcacccug

SEQ ID NO: 4791 - RNA, 19 nt, Artificial Sequence
  Description of Artificial Sequence: Synthetic oligonucleotide
ggcuggucagaaugccgcc

SEQ ID NO: 4792 - RNA, 19 nt, Artificial Sequence
  Description of Artificial Sequence: Synthetic oligonucleotide
ccucccagaggagcagccg

SEQ ID NO: 4793 - RNA, 19 nt, Artificial Sequence
  Description of Artificial Sequence: Synthetic oligonucleotide
gagagauccccugaaggcu

SEQ ID NO: 4794 - RNA, 19 nt, Artificial Sequence
  Description of Artificial Sequence: Synthetic oligonucleotide
uggaggcauucugcucagg

SEQ ID NO: 4795 - RNA, 19 nt, Artificial Sequence
  Description of Artificial Sequence: Synthetic oligonucleotide
gaccccuaucccagcucac

SEQ ID NO: 4796 - RNA, 19 nt, Artificial Sequence
  Description of Artificial Sequence: Synthetic oligonucleotide
cagugcccaaccaucucac

SEQ ID NO: 4797 - RNA, 19 nt, Artificial Sequence
  Description of Artificial Sequence: Synthetic oligonucleotide
ccaggagaaagagccacau

SEQ ID NO: 4798 - RNA, 19 nt, Artificial Sequence
  Description of Artificial Sequence: Synthetic oligonucleotide
uccccacguuaggaccacg

SEQ ID NO: 4799 - RNA, 19 nt, Artificial Sequence
  Description of Artificial Sequence: Synthetic oligonucleotide
ggagacugaccaccacccu

SEQ ID NO: 4800 - RNA, 19 nt, Artificial Sequence
  Description of Artificial Sequence: Synthetic oligonucleotide
ugaccccccaaacccacgc

SEQ ID NO: 4801 - RNA, 19 nt, Artificial Sequence
  Description of Artificial Sequence: Synthetic oligonucleotide
caccagacgcuugcaggac

SEQ ID NO: 4802 - RNA, 19 nt, Artificial Sequence
  Description of Artificial Sequence: Synthetic oligonucleotide
caggcgccgcgcagcgggc

SEQ ID NO: 4803 - RNA, 19 nt, Artificial Sequence
  Description of Artificial Sequence: Synthetic oligonucleotide
caggggcuugcccggccga

SEQ ID NO: 4804 - RNA, 19 nt, Artificial Sequence
  Description of Artificial Sequence: Synthetic oligonucleotide
acccuccccuccccaccuc

SEQ ID NO: 4805 - RNA, 19 nt, Artificial Sequence
  Description of Artificial Sequence: Synthetic oligonucleotide
cccccacugcgcguuacuc

SEQ ID NO: 4806 - RNA, 19 nt, Artificial Sequence
  Description of Artificial Sequence: Synthetic oligonucleotide
ccaggauaugccgagugca

SEQ ID NO: 4807 - RNA, 19 nt, Artificial Sequence
  Description of Artificial Sequence: Synthetic oligonucleotide
acguauaaggucaucuucg

SEQ ID NO: 4808 - RNA, 19 nt, Artificial Sequence
  Description of Artificial Sequence: Synthetic oligonucleotide
gucguccccguggaccucc

SEQ ID NO: 4809 - RNA, 19 nt, Artificial Sequence
  Description of Artificial Sequence: Synthetic oligonucleotide
ccccuuccucugcacgucg

SEQ ID NO: 4810 - RNA, 19 nt, Artificial Sequence
  Description of Artificial Sequence: Synthetic oligonucleotide
guccaacgugggacuggcg

SEQ ID NO: 4811 - RNA, 19 nt, Artificial Sequence
  Description of Artificial Sequence: Synthetic oligonucleotide
gugucaggcuucccuggga

SEQ ID NO: 4812 - RNA, 19 nt, Artificial Sequence
  Description of Artificial Sequence: Synthetic oligonucleotide
aggaucuggagguuguucu

SEQ ID NO: 4813 - RNA, 19 nt, Artificial Sequence
  Description of Artificial Sequence: Synthetic oligonucleotide
ucugcagagaaccagccug

SEQ ID NO: 4814 - RNA, 19 nt, Artificial Sequence
  Description of Artificial Sequence: Synthetic oligonucleotide
ggcuccuggcgcgcaccuc

SEQ ID NO: 4815 - RNA, 19 nt, Artificial Sequence
  Description of Artificial Sequence: Synthetic oligonucleotide
cugcucccuucuccucacu

SEQ ID NO: 4816 - RNA, 19 nt, Artificial Sequence
  Description of Artificial Sequence: Synthetic oligonucleotide
uacccacccacgcauguac

SEQ ID NO: 4817 - RNA, 19 nt, Artificial Sequence
  Description of Artificial Sequence: Synthetic oligonucleotide
ccgggaaaaaaacuacuau

SEQ ID NO: 4818 - RNA, 19 nt, Artificial Sequence
  Description of Artificial Sequence: Synthetic oligonucleotide
ugcccuucuagaccauguu

SEQ ID NO: 4819 - RNA, 19 nt, Artificial Sequence
  Description of Artificial Sequence: Synthetic oligonucleotide
ucugagaaaagaucgaaaa

SEQ ID NO: 4820 - RNA, 19 nt, Artificial Sequence
  Description of Artificial Sequence: Synthetic oligonucleotide
auauuuaacaagagauaau

SEQ ID NO: 4821 - RNA, 19 nt, Artificial Sequence
  Description of Artificial Sequence: Synthetic oligonucleotide
uaauaaaucugaugccggu

SEQ ID NO: 4822 - RNA, 19 nt, Artificial Sequence
  Description of Artificial Sequence: Synthetic oligonucleotide
ucuuuguguguguugcgga

SEQ ID NO: 4823 - RNA, 19 nt, Artificial Sequence
  Description of Artificial Sequence: Synthetic oligonucleotide
cuucagguagcugaagcag

SEQ ID NO: 4824 - RNA, 19 nt, Artificial Sequence
  Description of Artificial Sequence: Synthetic oligonucleotide
gagagagagaaggcagcau

SEQ ID NO: 4825 - RNA, 19 nt, Artificial Sequence
  Description of Artificial Sequence: Synthetic oligonucleotide
uacgucagcauuuucuucu

SEQ ID NO: 4826 - RNA, 19 nt, Artificial Sequence
  Description of Artificial Sequence: Synthetic oligonucleotide
ucugcacuuauaagaaaga

SEQ ID NO: 4827 - RNA, 19 nt, Artificial Sequence
  Description of Artificial Sequence: Synthetic oligonucleotide
aucaaagacuuuaagacuu

SEQ ID NO: 4828 - RNA, 19 nt, Artificial Sequence
  Description of Artificial Sequence: Synthetic oligonucleotide
uucgcuauuucuucuacug

SEQ ID NO: 4829 - RNA, 19 nt, Artificial Sequence
  Description of Artificial Sequence: Synthetic oligonucleotide
gcuaucuacuacaaacuuc

SEQ ID NO: 4830 - RNA, 19 nt, Artificial Sequence
  Description of Artificial Sequence: Synthetic oligonucleotide
caaagaggaaccaggagga

SEQ ID NO: 4831 - RNA, 19 nt, Artificial Sequence
  Description of Artificial Sequence: Synthetic oligonucleotide
acaagaggagcaugaaagu

SEQ ID NO: 4832 - RNA, 19 nt, Artificial Sequence
  Description of Artificial Sequence: Synthetic oligonucleotide
uggacaaggagugugacca

SEQ ID NO: 4833 - RNA, 19 nt, Artificial Sequence
  Description of Artificial Sequence: Synthetic oligonucleotide
acugaagcaccacagggag

SEQ ID NO: 4834 - RNA, 19 nt, Artificial Sequence
  Description of Artificial Sequence: Synthetic oligonucleotide
gggguuaggccuccggaug

SEQ ID NO: 4835 - RNA, 19 nt, Artificial Sequence
  Description of Artificial Sequence: Synthetic oligonucleotide
gacugcgggcaggccugga

SEQ ID NO: 4836 - RNA, 19 nt, Artificial Sequence
  Description of Artificial Sequence: Synthetic oligonucleotide
auaauauccagccucccac

SEQ ID NO: 4837 - RNA, 19 nt, Artificial Sequence
  Description of Artificial Sequence: Synthetic oligonucleotide
caagaagcugguggagcag

SEQ ID NO: 4838 - RNA, 19 nt, Artificial Sequence
  Description of Artificial Sequence: Synthetic oligonucleotide
gaguguucccugacuccuc

SEQ ID NO: 4839 - RNA, 19 nt, Artificial Sequence
  Description of Artificial Sequence: Synthetic oligonucleotide
ccaaggaaagggagacgcc

SEQ ID NO: 4840 - RNA, 19 nt, Artificial Sequence
  Description of Artificial Sequence: Synthetic oligonucleotide
ccuuucauggucugcugag

SEQ ID NO: 4841 - RNA, 19 nt, Artificial Sequence
  Description of Artificial Sequence: Synthetic oligonucleotide
guaacaggugccuucccag

SEQ ID NO: 4842 - RNA, 19 nt, Artificial Sequence
  Description of Artificial Sequence: Synthetic oligonucleotide
gacacuggcguuacugcuu

SEQ ID NO: 4843 - RNA, 19 nt, Artificial Sequence
  Description of Artificial Sequence: Synthetic oligonucleotide
ugaccaaagagcccucaag

SEQ ID NO: 4844 - RNA, 19 nt, Artificial Sequence
  Description of Artificial Sequence: Synthetic oligonucleotide
gcggcccuuaugccagcgu

SEQ ID NO: 4845 - RNA, 19 nt, Artificial Sequence
  Description of Artificial Sequence: Synthetic oligonucleotide
ugacagagggcucaccucu

SEQ ID NO: 4846 - RNA, 19 nt, Artificial Sequence
  Description of Artificial Sequence: Synthetic oligonucleotide
uugccuucuaggucacuuc

SEQ ID NO: 4847 - RNA, 19 nt, Artificial Sequence
  Description of Artificial Sequence: Synthetic oligonucleotide
cucacaaugucccuucagc

SEQ ID NO: 4848 - RNA, 19 nt, Artificial Sequence
  Description of Artificial Sequence: Synthetic oligonucleotide
caccugacccugugcccac

SEQ ID NO: 4849 - RNA, 19 nt, Artificial Sequence
  Description of Artificial Sequence: Synthetic oligonucleotide
ccaguuauuccuugguaau

SEQ ID NO: 4850 - RNA, 19 nt, Artificial Sequence
  Description of Artificial Sequence: Synthetic oligonucleotide
uaugaguaauacaucaaag

SEQ ID NO: 4851 - RNA, 19 nt, Artificial Sequence
  Description of Artificial Sequence: Synthetic oligonucleotide
gaguaguauuaaaagcuaa

SEQ ID NO: 4852 - RNA, 19 nt, Artificial Sequence
  Description of Artificial Sequence: Synthetic oligonucleotide
auuaaucauguuuauaaaa

SEQ ID NO: 4853 - RNA, 25 nt, Artificial Sequence
  Description of Artificial Sequence: Synthetic oligonucleotide
acuuucagccccgagccgcggccgc

SEQ ID NO: 4854 - RNA, 25 nt, Artificial Sequence
  Description of Artificial Sequence: Synthetic oligonucleotide
cucgggucggacccacgcgcagcgg

SEQ ID NO: 4855 - RNA, 25 nt, Artificial Sequence
  Description of Artificial Sequence: Synthetic oligonucleotide
gccggagaugcagcggggcgccgcg

SEQ ID NO: 4856 - RNA, 25 nt, Artificial Sequence
  Description of Artificial Sequence: Synthetic oligonucleotide
gcugugccugcgacuguggcucugc

SEQ ID NO: 4857 - RNA, 25 nt, Artificial Sequence
  Description of Artificial Sequence: Synthetic oligonucleotide
ccugggacuccuggacggccuggug

SEQ ID NO: 4858 - RNA, 25 nt, Artificial Sequence
  Description of Artificial Sequence: Synthetic oligonucleotide
gaguggcuacuccaugacccccccg

SEQ ID NO: 4859 - RNA, 25 nt, Artificial Sequence
  Description of Artificial Sequence: Synthetic oligonucleotide
gaccuugaacaucacggaggaguca

SEQ ID NO: 4860 - RNA, 25 nt, Artificial Sequence
  Description of Artificial Sequence: Synthetic oligonucleotide
acacgucaucgacaccggugacagc

SEQ ID NO: 4861 - RNA, 25 nt, Artificial Sequence
  Description of Artificial Sequence: Synthetic oligonucleotide
ccuguccaucuccugcaggggacag

SEQ ID NO: 4862 - RNA, 25 nt, Artificial Sequence
  Description of Artificial Sequence: Synthetic oligonucleotide
gcacccccucgagugggcuuggcca

SEQ ID NO: 4863 - RNA, 25 nt, Artificial Sequence
  Description of Artificial Sequence: Synthetic oligonucleotide
aggagcucaggaggcgccagccacc

SEQ ID NO: 4864 - RNA, 25 nt, Artificial Sequence
  Description of Artificial Sequence: Synthetic oligonucleotide
cggagacaaggacagcgaggacacg

SEQ ID NO: 4865 - RNA, 25 nt, Artificial Sequence
  Description of Artificial Sequence: Synthetic oligonucleotide
ggggguggugcgagacugcgagggc

SEQ ID NO: 4866 - RNA, 25 nt, Artificial Sequence
  Description of Artificial Sequence: Synthetic oligonucleotide
cacagacgccaggcccuacugcaag

SEQ ID NO: 4867 - RNA, 25 nt, Artificial Sequence
  Description of Artificial Sequence: Synthetic oligonucleotide
gguguugcugcugcacgagguacau

SEQ ID NO: 4868 - RNA, 25 nt, Artificial Sequence
  Description of Artificial Sequence: Synthetic oligonucleotide
ugccaacgacacaggcagcuacguc

SEQ ID NO: 4869 - RNA, 25 nt, Artificial Sequence
  Description of Artificial Sequence: Synthetic oligonucleotide
cugcuacuacaaguacaucaaggca

SEQ ID NO: 4870 - RNA, 25 nt, Artificial Sequence
  Description of Artificial Sequence: Synthetic oligonucleotide
acgcaucgagggcaccacggccgcc

SEQ ID NO: 4871 - RNA, 25 nt, Artificial Sequence
  Description of Artificial Sequence: Synthetic oligonucleotide
cagcuccuacguguucgugagagac

SEQ ID NO: 4872 - RNA, 25 nt, Artificial Sequence
  Description of Artificial Sequence: Synthetic oligonucleotide
cuuugagcagccauucaucaacaag

SEQ ID NO: 4873 - RNA, 25 nt, Artificial Sequence
  Description of Artificial Sequence: Synthetic oligonucleotide
gccugacacgcucuuggucaacagg

SEQ ID NO: 4874 - RNA, 25 nt, Artificial Sequence
  Description of Artificial Sequence: Synthetic oligonucleotide
gaaggacgccaugugggugcccugu

SEQ ID NO: 4875 - RNA, 25 nt, Artificial Sequence
  Description of Artificial Sequence: Synthetic oligonucleotide
ucugguguccauccccggccucaau

SEQ ID NO: 4876 - RNA, 25 nt, Artificial Sequence
  Description of Artificial Sequence: Synthetic oligonucleotide
ugucacgcugcgcucgcaaagcucg

SEQ ID NO: 4877 - RNA, 25 nt, Artificial Sequence
  Description of Artificial Sequence: Synthetic oligonucleotide
ggugcuguggccagacgggcaggag

SEQ ID NO: 4878 - RNA, 25 nt, Artificial Sequence
  Description of Artificial Sequence: Synthetic oligonucleotide
gguggugugggaugaccggcggggc

SEQ ID NO: 4879 - RNA, 25 nt, Artificial Sequence
  Description of Artificial Sequence: Synthetic oligonucleotide
caugcucguguccacgccacugcug

SEQ ID NO: 4880 - RNA, 25 nt, Artificial Sequence
  Description of Artificial Sequence: Synthetic oligonucleotide
gcacgaugcccuguaccugcagugc

SEQ ID NO: 4881 - RNA, 25 nt, Artificial Sequence
  Description of Artificial Sequence: Synthetic oligonucleotide
cgagaccaccuggggagaccaggac

SEQ ID NO: 4882 - RNA, 25 nt, Artificial Sequence
  Description of Artificial Sequence: Synthetic oligonucleotide
cuuccuuuccaaccccuuccuggug

SEQ ID NO: 4883 - RNA, 25 nt, Artificial Sequence
  Description of Artificial Sequence: Synthetic oligonucleotide
gcacaucacaggcaacgagcucuau

SEQ ID NO: 4884 - RNA, 25 nt, Artificial Sequence
  Description of Artificial Sequence: Synthetic oligonucleotide
ugacauccagcuguugcccaggaag

SEQ ID NO: 4885 - RNA, 25 nt, Artificial Sequence
  Description of Artificial Sequence: Synthetic oligonucleotide
gucgcuggagcugcugguaggggag

SEQ ID NO: 4886 - RNA, 25 nt, Artificial Sequence
  Description of Artificial Sequence: Synthetic oligonucleotide
gaagcugguccugaacugcaccgug

SEQ ID NO: 4887 - RNA, 25 nt, Artificial Sequence
  Description of Artificial Sequence: Synthetic oligonucleotide
gugggcugaguuuaacucagguguc

SEQ ID NO: 4888 - RNA, 25 nt, Artificial Sequence
  Description of Artificial Sequence: Synthetic oligonucleotide
caccuuugacugggacuacccaggg

SEQ ID NO: 4889 - RNA, 25 nt, Artificial Sequence
  Description of Artificial Sequence: Synthetic oligonucleotide
gaagcaggcagagcgggguaagugg

SEQ ID NO: 4890 - RNA, 25 nt, Artificial Sequence
  Description of Artificial Sequence: Synthetic oligonucleotide
ggugcccgagcgacgcucccagcag

SEQ ID NO: 4891 - RNA, 25 nt, Artificial Sequence
  Description of Artificial Sequence: Synthetic oligonucleotide
gacccacacagaacucuccagcauc

SEQ ID NO: 4892 - RNA, 25 nt, Artificial Sequence
  Description of Artificial Sequence: Synthetic oligonucleotide
ccugaccauccacaacgucagccag

SEQ ID NO: 4893 - RNA, 25 nt, Artificial Sequence
  Description of Artificial Sequence: Synthetic oligonucleotide
gcacgaccugggcucguaugugugc

SEQ ID NO: 4894 - RNA, 25 nt, Artificial Sequence
  Description of Artificial Sequence: Synthetic oligonucleotide
caaggccaacaacggcauccagcga

SEQ ID NO: 4895 - RNA, 25 nt, Artificial Sequence
  Description of Artificial Sequence: Synthetic oligonucleotide
auuucgggagagcaccgaggucauu

SEQ ID NO: 4896 - RNA, 25 nt, Artificial Sequence
  Description of Artificial Sequence: Synthetic oligonucleotide
ugugcaugaaaaucccuucaucagc

SEQ ID NO: 4897 - RNA, 25 nt, Artificial Sequence
  Description of Artificial Sequence: Synthetic oligonucleotide
cgucgaguggcucaaaggacccauc

SEQ ID NO: 4898 - RNA, 25 nt, Artificial Sequence
  Description of Artificial Sequence: Synthetic oligonucleotide
ccuggaggccacggcaggagacgag

SEQ ID NO: 4899 - RNA, 25 nt, Artificial Sequence
  Description of Artificial Sequence: Synthetic oligonucleotide
gcuggugaagcugcccgugaagcug

SEQ ID NO: 4900 - RNA, 25 nt, Artificial Sequence
  Description of Artificial Sequence: Synthetic oligonucleotide
ggcagcguaccccccgcccgaguuc

SEQ ID NO: 4901 - RNA, 25 nt, Artificial Sequence
  Description of Artificial Sequence: Synthetic oligonucleotide
ccagugguacaaggauggaaaggca

SEQ ID NO: 4902 - RNA, 25 nt, Artificial Sequence
  Description of Artificial Sequence: Synthetic oligonucleotide
acuguccgggcgccacaguccacau

SEQ ID NO: 4903 - RNA, 25 nt, Artificial Sequence
  Description of Artificial Sequence: Synthetic oligonucleotide
ugcccuggugcucaaggaggugaca

SEQ ID NO: 4904 - RNA, 25 nt, Artificial Sequence
  Description of Artificial Sequence: Synthetic oligonucleotide
agaggccagcacaggcaccuacacc

SEQ ID NO: 4905 - RNA, 25 nt, Artificial Sequence
  Description of Artificial Sequence: Synthetic oligonucleotide
ccucgcccuguggaacuccgcugcu

SEQ ID NO: 4906 - RNA, 25 nt, Artificial Sequence
  Description of Artificial Sequence: Synthetic oligonucleotide
uggccugaggcgcaacaucagccug

SEQ ID NO: 4907 - RNA, 25 nt, Artificial Sequence
  Description of Artificial Sequence: Synthetic oligonucleotide
ggagcugguggugaaugugcccccc

SEQ ID NO: 4908 - RNA, 25 nt, Artificial Sequence
  Description of Artificial Sequence: Synthetic oligonucleotide
ccagauacaugagaaggaggccucc

SEQ ID NO: 4909 - RNA, 25 nt, Artificial Sequence
  Description of Artificial Sequence: Synthetic oligonucleotide
cucccccagcaucuacucgcgucac

SEQ ID NO: 4910 - RNA, 25 nt, Artificial Sequence
  Description of Artificial Sequence: Synthetic oligonucleotide
cagccgccaggcccucaccugcacg

SEQ ID NO: 4911 - RNA, 25 nt, Artificial Sequence
  Description of Artificial Sequence: Synthetic oligonucleotide
ggccuacggggugccccugccucuc

SEQ ID NO: 4912 - RNA, 25 nt, Artificial Sequence
  Description of Artificial Sequence: Synthetic oligonucleotide
cagcauccaguggcacuggcggccc

SEQ ID NO: 4913 - RNA, 25 nt, Artificial Sequence
  Description of Artificial Sequence: Synthetic oligonucleotide
cuggacacccugcaagauguuugcc

SEQ ID NO: 4914 - RNA, 25 nt, Artificial Sequence
  Description of Artificial Sequence: Synthetic oligonucleotide
ccagcguagucuccggcggcggcag

SEQ ID NO: 4915 - RNA, 25 nt, Artificial Sequence
  Description of Artificial Sequence: Synthetic oligonucleotide
gcagcaagaccucaugccacagugc

SEQ ID NO: 4916 - RNA, 25 nt, Artificial Sequence
  Description of Artificial Sequence: Synthetic oligonucleotide
ccgugacuggagggcggugaccacg

SEQ ID NO: 4917 - RNA, 25 nt, Artificial Sequence
  Description of Artificial Sequence: Synthetic oligonucleotide
gcaggaugccgugaaccccaucgag

SEQ ID NO: 4918 - RNA, 25 nt, Artificial Sequence
  Description of Artificial Sequence: Synthetic oligonucleotide
gagccuggacaccuggaccgaguuu

SEQ ID NO: 4919 - RNA, 25 nt, Artificial Sequence
  Description of Artificial Sequence: Synthetic oligonucleotide
uguggagggaaagaauaagacugug

SEQ ID NO: 4920 - RNA, 25 nt, Artificial Sequence
  Description of Artificial Sequence: Synthetic oligonucleotide
gagcaagcuggugauccagaaugcc

SEQ ID NO: 4921 - RNA, 25 nt, Artificial Sequence
  Description of Artificial Sequence: Synthetic oligonucleotide
caacgugucugccauguacaagugu

SEQ ID NO: 4922 - RNA, 25 nt, Artificial Sequence
  Description of Artificial Sequence: Synthetic oligonucleotide
uguggucuccaacaaggugggccag

SEQ ID NO: 4923 - RNA, 25 nt, Artificial Sequence
  Description of Artificial Sequence: Synthetic oligonucleotide
ggaugagcggcucaucuacuucuau

SEQ ID NO: 4924 - RNA, 25 nt, Artificial Sequence
  Description of Artificial Sequence: Synthetic oligonucleotide
ugugaccaccauccccgacggcuuc

SEQ ID NO: 4925 - RNA, 25 nt, Artificial Sequence
  Description of Artificial Sequence: Synthetic oligonucleotide
caccaucgaauccaagccauccgag

SEQ ID NO: 4926 - RNA, 25 nt, Artificial Sequence
  Description of Artificial Sequence: Synthetic oligonucleotide
ggagcuacuagagggccagccggug

SEQ ID NO: 4927 - RNA, 25 nt, Artificial Sequence
  Description of Artificial Sequence: Synthetic oligonucleotide
gcuccugagcugccaagccgacagc

SEQ ID NO: 4928 - RNA, 25 nt, Artificial Sequence
  Description of Artificial Sequence: Synthetic oligonucleotide
cuacaaguacgagcaucugcgcugg

SEQ ID NO: 4929 - RNA, 25 nt, Artificial Sequence
  Description of Artificial Sequence: Synthetic oligonucleotide
guaccgccucaaccuguccacgcug

SEQ ID NO: 4930 - RNA, 25 nt, Artificial Sequence
  Description of Artificial Sequence: Synthetic oligonucleotide
gcacgaugcgcacgggaacccgcuu

SEQ ID NO: 4931 - RNA, 25 nt, Artificial Sequence
  Description of Artificial Sequence: Synthetic oligonucleotide
ucugcucgacugcaagaacgugcau

SEQ ID NO: 4932 - RNA, 25 nt, Artificial Sequence
  Description of Artificial Sequence: Synthetic oligonucleotide
ucuguucgccaccccucuggccgcc

SEQ ID NO: 4933 - RNA, 25 nt, Artificial Sequence
  Description of Artificial Sequence: Synthetic oligonucleotide
cagccuggaggagguggcaccuggg

SEQ ID NO: 4934 - RNA, 25 nt, Artificial Sequence
  Description of Artificial Sequence: Synthetic oligonucleotide
ggcgcgccacgccacgcucagccug

SEQ ID NO: 4935 - RNA, 25 nt, Artificial Sequence
  Description of Artificial Sequence: Synthetic oligonucleotide
gaguaucccccgcgucgcgcccgag

SEQ ID NO: 4936 - RNA, 25 nt, Artificial Sequence
  Description of Artificial Sequence: Synthetic oligonucleotide
gcacgagggccacuaugugugcgaa

SEQ ID NO: 4937 - RNA, 25 nt, Artificial Sequence
  Description of Artificial Sequence: Synthetic oligonucleotide
agugcaagaccggcgcagccaugac

SEQ ID NO: 4938 - RNA, 25 nt, Artificial Sequence
  Description of Artificial Sequence: Synthetic oligonucleotide
caagcacugccacaagaaguaccug

SEQ ID NO: 4939 - RNA, 25 nt, Artificial Sequence
  Description of Artificial Sequence: Synthetic oligonucleotide
gucggugcaggcccuggaagccccu

SEQ ID NO: 4940 - RNA, 25 nt, Artificial Sequence
  Description of Artificial Sequence: Synthetic oligonucleotide
ucggcucacgcagaacuugaccgac

SEQ ID NO: 4941 - RNA, 25 nt, Artificial Sequence
  Description of Artificial Sequence: Synthetic oligonucleotide
ccuccuggugaacgugagcgacucg

SEQ ID NO: 4942 - RNA, 25 nt, Artificial Sequence
  Description of Artificial Sequence: Synthetic oligonucleotide
gcuggagaugcagugcuugguggcc

SEQ ID NO: 4943 - RNA, 25 nt, Artificial Sequence
  Description of Artificial Sequence: Synthetic oligonucleotide
cggagcgcacgcgcccagcaucgug

SEQ ID NO: 4944 - RNA, 25 nt, Artificial Sequence
  Description of Artificial Sequence: Synthetic oligonucleotide
gugguacaaagacgagaggcugcug

SEQ ID NO: 4945 - RNA, 25 nt, Artificial Sequence
  Description of Artificial Sequence: Synthetic oligonucleotide
ggaggaaaagucuggagucgacuug

SEQ ID NO: 4946 - RNA, 25 nt, Artificial Sequence
  Description of Artificial Sequence: Synthetic oligonucleotide
ggcggacuccaaccagaagcugagc

SEQ ID NO: 4947 - RNA, 25 nt, Artificial Sequence
  Description of Artificial Sequence: Synthetic oligonucleotide
cauccagcgcgugcgcgaggaggau

SEQ ID NO: 4948 - RNA, 25 nt, Artificial Sequence
  Description of Artificial Sequence: Synthetic oligonucleotide
ugcgggacgcuaucugugcagcgug

SEQ ID NO: 4949 - RNA, 25 nt, Artificial Sequence
  Description of Artificial Sequence: Synthetic oligonucleotide
gugcaacgccaagggcugcgucaac

SEQ ID NO: 4950 - RNA, 25 nt, Artificial Sequence
  Description of Artificial Sequence: Synthetic oligonucleotide
cuccuccgccagcguggccguggaa

SEQ ID NO: 4951 - RNA, 25 nt, Artificial Sequence
  Description of Artificial Sequence: Synthetic oligonucleotide
aggcuccgaggauaagggcagcaug

SEQ ID NO: 4952 - RNA, 25 nt, Artificial Sequence
  Description of Artificial Sequence: Synthetic oligonucleotide
ggagaucgugauccuugucgguacc

SEQ ID NO: 4953 - RNA, 25 nt, Artificial Sequence
  Description of Artificial Sequence: Synthetic oligonucleotide
cggcgucaucgcugucuucuucugg

SEQ ID NO: 4954 - RNA, 25 nt, Artificial Sequence
  Description of Artificial Sequence: Synthetic oligonucleotide
gguccuccuccuccucaucuucugu

SEQ ID NO: 4955 - RNA, 25 nt, Artificial Sequence
  Description of Artificial Sequence: Synthetic oligonucleotide
uaacaugaggaggccggcccacgca

SEQ ID NO: 4956 - RNA, 25 nt, Artificial Sequence
  Description of Artificial Sequence: Synthetic oligonucleotide
agacaucaagacgggcuaccugucc

SEQ ID NO: 4957 - RNA, 25 nt, Artificial Sequence
  Description of Artificial Sequence: Synthetic oligonucleotide
caucaucauggaccccggggaggug

SEQ ID NO: 4958 - RNA, 25 nt, Artificial Sequence
  Description of Artificial Sequence: Synthetic oligonucleotide
gccucuggaggagcaaugcgaauac

SEQ ID NO: 4959 - RNA, 25 nt, Artificial Sequence
  Description of Artificial Sequence: Synthetic oligonucleotide
ccuguccuacgaugccagccagugg

SEQ ID NO: 4960 - RNA, 25 nt, Artificial Sequence
  Description of Artificial Sequence: Synthetic oligonucleotide
ggaauucccccgagagcggcugcac

SEQ ID NO: 4961 - RNA, 25 nt, Artificial Sequence
  Description of Artificial Sequence: Synthetic oligonucleotide
ccuggggagagugcucggcuacggc

SEQ ID NO: 4962 - RNA, 25 nt, Artificial Sequence
  Description of Artificial Sequence: Synthetic oligonucleotide
cgccuucgggaaggugguggaagcc

SEQ ID NO: 4963 - RNA, 25 nt, Artificial Sequence
  Description of Artificial Sequence: Synthetic oligonucleotide
cuccgcuuucggcauccacaagggc

SEQ ID NO: 4964 - RNA, 25 nt, Artificial Sequence
  Description of Artificial Sequence: Synthetic oligonucleotide
cagcagcugugacaccguggccgug

SEQ ID NO: 4965 - RNA, 25 nt, Artificial Sequence
  Description of Artificial Sequence: Synthetic oligonucleotide
gaaaaugcugaaagagggcgccacg

SEQ ID NO: 4966 - RNA, 25 nt, Artificial Sequence
  Description of Artificial Sequence: Synthetic oligonucleotide
ggccagcgagcaccgcgcgcugaug

SEQ ID NO: 4967 - RNA, 25 nt, Artificial Sequence
  Description of Artificial Sequence: Synthetic oligonucleotide
gucggagcucaagauccucauucac

SEQ ID NO: 4968 - RNA, 25 nt, Artificial Sequence
  Description of Artificial Sequence: Synthetic oligonucleotide
caucggcaaccaccucaacgugguc

SEQ ID NO: 4969 - RNA, 25 nt, Artificial Sequence
  Description of Artificial Sequence: Synthetic oligonucleotide
caaccuccucggggcgugcaccaag

SEQ ID NO: 4970 - RNA, 25 nt, Artificial Sequence
  Description of Artificial Sequence: Synthetic oligonucleotide
gccgcagggcccccucauggugauc

SEQ ID NO: 4971 - RNA, 25 nt, Artificial Sequence
  Description of Artificial Sequence: Synthetic oligonucleotide
cguggaguucugcaaguacggcaac

SEQ ID NO: 4972 - RNA, 25 nt, Artificial Sequence
  Description of Artificial Sequence: Synthetic oligonucleotide
ccucuccaacuuccugcgcgccaag

SEQ ID NO: 4973 - RNA, 25 nt, Artificial Sequence
  Description of Artificial Sequence: Synthetic oligonucleotide
gcgggacgccuucagccccugcgcg

SEQ ID NO: 4974 - RNA, 25 nt, Artificial Sequence
  Description of Artificial Sequence: Synthetic oligonucleotide
ggagaagucucccgagcagcgcgga

SEQ ID NO: 4975 - RNA, 25 nt, Artificial Sequence
  Description of Artificial Sequence: Synthetic oligonucleotide
acgcuuccgcgccaugguggagcuc

SEQ ID NO: 4976 - RNA, 25 nt, Artificial Sequence
  Description of Artificial Sequence: Synthetic oligonucleotide
cgccaggcuggaucggaggcggccg

SEQ ID NO: 4977 - RNA, 25 nt, Artificial Sequence
  Description of Artificial Sequence: Synthetic oligonucleotide
ggggagcagcgacaggguccucuuc

SEQ ID NO: 4978 - RNA, 25 nt, Artificial Sequence
  Description of Artificial Sequence: Synthetic oligonucleotide
cgcgcgguucucgaagaccgagggc

SEQ ID NO: 4979 - RNA, 25 nt, Artificial Sequence
  Description of Artificial Sequence: Synthetic oligonucleotide
cggagcgaggcgggcuucuccagac

SEQ ID NO: 4980 - RNA, 25 nt, Artificial Sequence
  Description of Artificial Sequence: Synthetic oligonucleotide
ccaagaagcugaggaccuguggcug

SEQ ID NO: 4981 - RNA, 25 nt, Artificial Sequence
  Description of Artificial Sequence: Synthetic oligonucleotide
gagcccgcugaccauggaagaucuu

SEQ ID NO: 4982 - RNA, 25 nt, Artificial Sequence
  Description of Artificial Sequence: Synthetic oligonucleotide
ugucugcuacagcuuccagguggcc

SEQ ID NO: 4983 - RNA, 25 nt, Artificial Sequence
  Description of Artificial Sequence: Synthetic oligonucleotide
cagagggauggaguuccuggcuucc

SEQ ID NO: 4984 - RNA, 25 nt, Artificial Sequence
  Description of Artificial Sequence: Synthetic oligonucleotide
ccgaaagugcauccacagagaccug

SEQ ID NO: 4985 - RNA, 25 nt, Artificial Sequence
  Description of Artificial Sequence: Synthetic oligonucleotide
ggcugcucggaacauucugcugucg

SEQ ID NO: 4986 - RNA, 25 nt, Artificial Sequence
  Description of Artificial Sequence: Synthetic oligonucleotide
ggaaagcgacguggugaagaucugu

SEQ ID NO: 4987 - RNA, 25 nt, Artificial Sequence
  Description of Artificial Sequence: Synthetic oligonucleotide
ugacuuuggccuugcccgggacauc

SEQ ID NO: 4988 - RNA, 25 nt, Artificial Sequence
  Description of Artificial Sequence: Synthetic oligonucleotide
cuacaaagaccccgacuacguccgc

SEQ ID NO: 4989 - RNA, 25 nt, Artificial Sequence
  Description of Artificial Sequence: Synthetic oligonucleotide
caagggcagugcccggcugccccug

SEQ ID NO: 4990 - RNA, 25 nt, Artificial Sequence
  Description of Artificial Sequence: Synthetic oligonucleotide
gaaguggauggccccugaaagcauc

SEQ ID NO: 4991 - RNA, 25 nt, Artificial Sequence
  Description of Artificial Sequence: Synthetic oligonucleotide
cuucgacaagguguacaccacgcag

SEQ ID NO: 4992 - RNA, 25 nt, Artificial Sequence
  Description of Artificial Sequence: Synthetic oligonucleotide
gagugacgugugguccuuuggggug

SEQ ID NO: 4993 - RNA, 25 nt, Artificial Sequence
  Description of Artificial Sequence: Synthetic oligonucleotide
gcuucucugggagaucuucucucug

SEQ ID NO: 4994 - RNA, 25 nt, Artificial Sequence
  Description of Artificial Sequence: Synthetic oligonucleotide
gggggccuccccguacccuggggug

SEQ ID NO: 4995 - RNA, 25 nt, Artificial Sequence
  Description of Artificial Sequence: Synthetic oligonucleotide
gcagaucaaugaggaguucugccag

SEQ ID NO: 4996 - RNA, 25 nt, Artificial Sequence
  Description of Artificial Sequence: Synthetic oligonucleotide
gcggcugagagacggcacaaggaug

SEQ ID NO: 4997 - RNA, 25 nt, Artificial Sequence
  Description of Artificial Sequence: Synthetic oligonucleotide
gagggccccggagcuggccacuccc

SEQ ID NO: 4998 - RNA, 25 nt, Artificial Sequence
  Description of Artificial Sequence: Synthetic oligonucleotide
cgccauacgccgcaucaugcugaac

SEQ ID NO: 4999 - RNA, 25 nt, Artificial Sequence
  Description of Artificial Sequence: Synthetic oligonucleotide
cugcugguccggagaccccaaggcg

SEQ ID NO: 5000 - RNA, 25 nt, Artificial Sequence
  Description of Artificial Sequence: Synthetic oligonucleotide
gagaccugcauucucggagcuggug

SEQ ID NO: 5001 - RNA, 25 nt, Artificial Sequence
  Description of Artificial Sequence: Synthetic oligonucleotide
ggagauccugggggaccugcuccag

SEQ ID NO: 5002 - RNA, 25 nt, Artificial Sequence
  Description of Artificial Sequence: Synthetic oligonucleotide
gggcaggggccugcaagaggaagag

SEQ ID NO: 5003 - RNA, 25 nt, Artificial Sequence
  Description of Artificial Sequence: Synthetic oligonucleotide
ggaggucugcauggccccgcgcagc

SEQ ID NO: 5004 - RNA, 25 nt, Artificial Sequence
  Description of Artificial Sequence: Synthetic oligonucleotide
cucucagagcucagaagagggcagc

SEQ ID NO: 5005 - RNA, 25 nt, Artificial Sequence
  Description of Artificial Sequence: Synthetic oligonucleotide
cuucucgcagguguccaccauggcc

SEQ ID NO: 5006 - RNA, 25 nt, Artificial Sequence
  Description of Artificial Sequence: Synthetic oligonucleotide
ccuacacaucgcccaggcugacgcu

SEQ ID NO: 5007 - RNA, 25 nt, Artificial Sequence
  Description of Artificial Sequence: Synthetic oligonucleotide
ugaggacagcccgccaagccugcag

SEQ ID NO: 5008 - RNA, 25 nt, Artificial Sequence
  Description of Artificial Sequence: Synthetic oligonucleotide
gcgccacagccuggccgccagguau

SEQ ID NO: 5009 - RNA, 25 nt, Artificial Sequence
  Description of Artificial Sequence: Synthetic oligonucleotide
uuacaacuggguguccuuucccggg

SEQ ID NO: 5010 - RNA, 25 nt, Artificial Sequence
  Description of Artificial Sequence: Synthetic oligonucleotide
gugccuggccagaggggcugagacc

SEQ ID NO: 5011 - RNA, 25 nt, Artificial Sequence
  Description of Artificial Sequence: Synthetic oligonucleotide
ccgugguuccuccaggaugaagaca

SEQ ID NO: 5012 - RNA, 25 nt, Artificial Sequence
  Description of Artificial Sequence: Synthetic oligonucleotide
auuugaggaauuccccaugacccca

SEQ ID NO: 5013 - RNA, 25 nt, Artificial Sequence
  Description of Artificial Sequence: Synthetic oligonucleotide
aacgaccuacaaaggcucuguggac

SEQ ID NO: 5014 - RNA, 25 nt, Artificial Sequence
  Description of Artificial Sequence: Synthetic oligonucleotide
caaccagacagacagugggauggug

SEQ ID NO: 5015 - RNA, 25 nt, Artificial Sequence
  Description of Artificial Sequence: Synthetic oligonucleotide
gcuggccucggaggaguuugagcag

SEQ ID NO: 5016 - RNA, 25 nt, Artificial Sequence
  Description of Artificial Sequence: Synthetic oligonucleotide
gauagagagcaggcauagacaagaa

SEQ ID NO: 5017 - RNA, 25 nt, Artificial Sequence
  Description of Artificial Sequence: Synthetic oligonucleotide
aagcggcuucagcuguaaaggaccu

SEQ ID NO: 5018 - RNA, 25 nt, Artificial Sequence
  Description of Artificial Sequence: Synthetic oligonucleotide
uggccagaauguggcugugaccagg

SEQ ID NO: 5019 - RNA, 25 nt, Artificial Sequence
  Description of Artificial Sequence: Synthetic oligonucleotide
ggcacacccugacucccaagggagg

SEQ ID NO: 5020 - RNA, 25 nt, Artificial Sequence
  Description of Artificial Sequence: Synthetic oligonucleotide
gcggcggcggccugagcggggggcc

SEQ ID NO: 5021 - RNA, 25 nt, Artificial Sequence
  Description of Artificial Sequence: Synthetic oligonucleotide
ccgaggaggccagguguuuuacaac

SEQ ID NO: 5022 - RNA, 25 nt, Artificial Sequence
  Description of Artificial Sequence: Synthetic oligonucleotide
cagcgaguauggggagcugucggag

SEQ ID NO: 5023 - RNA, 25 nt, Artificial Sequence
  Description of Artificial Sequence: Synthetic oligonucleotide
gccaagcgaggaggaccacugcucc

SEQ ID NO: 5024 - RNA, 25 nt, Artificial Sequence
  Description of Artificial Sequence: Synthetic oligonucleotide
cccgucugcccgcgugacuuucuuc

SEQ ID NO: 5025 - RNA, 25 nt, Artificial Sequence
  Description of Artificial Sequence: Synthetic oligonucleotide
cacagacaacagcuacuaagcagca

SEQ ID NO: 5026 - RNA, 25 nt, Artificial Sequence
  Description of Artificial Sequence: Synthetic oligonucleotide
aucggacaagacccccagcacuugg

SEQ ID NO: 5027 - RNA, 25 nt, Artificial Sequence
  Description of Artificial Sequence: Synthetic oligonucleotide
gggguucaggcccggcagggcgggc

SEQ ID NO: 5028 - RNA, 25 nt, Artificial Sequence
  Description of Artificial Sequence: Synthetic oligonucleotide
cagagggcuggaggcccaggcuggg

SEQ ID NO: 5029 - RNA, 25 nt, Artificial Sequence
  Description of Artificial Sequence: Synthetic oligonucleotide
gaacucaucugguugaacucuggug

SEQ ID NO: 5030 - RNA, 25 nt, Artificial Sequence
  Description of Artificial Sequence: Synthetic oligonucleotide
ggcacaggaguguccucuucccucu

SEQ ID NO: 5031 - RNA, 25 nt, Artificial Sequence
  Description of Artificial Sequence: Synthetic oligonucleotide
ucugcagacuucccagcuaggaaga

SEQ ID NO: 5032 - RNA, 25 nt, Artificial Sequence
  Description of Artificial Sequence: Synthetic oligonucleotide
agcaggacuccaggcccaaggcucc

SEQ ID NO: 5033 - RNA, 25 nt, Artificial Sequence
  Description of Artificial Sequence: Synthetic oligonucleotide
ccggaauuccgucaccacgacuggc

SEQ ID NO: 5034 - RNA, 25 nt, Artificial Sequence
  Description of Artificial Sequence: Synthetic oligonucleotide
ccagggccacgcuccagcugccccg

SEQ ID NO: 5035 - RNA, 25 nt, Artificial Sequence
  Description of Artificial Sequence: Synthetic oligonucleotide
ggccccucccccugagauucagaug

SEQ ID NO: 5036 - RNA, 25 nt, Artificial Sequence
  Description of Artificial Sequence: Synthetic oligonucleotide
gucauuuaguucagcauccgcaggu

SEQ ID NO: 5037 - RNA, 25 nt, Artificial Sequence
  Description of Artificial Sequence: Synthetic oligonucleotide
ugcuggucccggggccagcacuucc

SEQ ID NO: 5038 - RNA, 25 nt, Artificial Sequence
  Description of Artificial Sequence: Synthetic oligonucleotide
caugggaaugucucuuuggcgaccu

SEQ ID NO: 5039 - RNA, 25 nt, Artificial Sequence
  Description of Artificial Sequence: Synthetic oligonucleotide
uccuuucaucacacugggugguggc

SEQ ID NO: 5040 - RNA, 25 nt, Artificial Sequence
  Description of Artificial Sequence: Synthetic oligonucleotide
ccuggucccuguuuucccacgagga

SEQ ID NO: 5041 - RNA, 25 nt, Artificial Sequence
  Description of Artificial Sequence: Synthetic oligonucleotide
aaucugugggucugggagucacaca

SEQ ID NO: 5042 - RNA, 25 nt, Artificial Sequence
  Description of Artificial Sequence: Synthetic oligonucleotide
aguguuggagguuaaggcauacgag

SEQ ID NO: 5043 - RNA, 25 nt, Artificial Sequence
  Description of Artificial Sequence: Synthetic oligonucleotide
gagcagaggucucccaaacgcccuu

SEQ ID NO: 5044 - RNA, 25 nt, Artificial Sequence
  Description of Artificial Sequence: Synthetic oligonucleotide
uuccuccucaggcacacagcuacuc

SEQ ID NO: 5045 - RNA, 25 nt, Artificial Sequence
  Description of Artificial Sequence: Synthetic oligonucleotide
cuccccacgagggcuggcuggccuc

SEQ ID NO: 5046 - RNA, 25 nt, Artificial Sequence
  Description of Artificial Sequence: Synthetic oligonucleotide
cacccaccccugcacaguugaaggg

SEQ ID NO: 5047 - RNA, 25 nt, Artificial Sequence
  Description of Artificial Sequence: Synthetic oligonucleotide
gaggggcuguguuuccaucucaaag

SEQ ID NO: 5048 - RNA, 25 nt, Artificial Sequence
  Description of Artificial Sequence: Synthetic oligonucleotide
gaaggcauuugcaggguccucuucu

SEQ ID NO: 5049 - RNA, 25 nt, Artificial Sequence
  Description of Artificial Sequence: Synthetic oligonucleotide
ugggccugaccaaacagccaacuag

SEQ ID NO: 5050 - RNA, 25 nt, Artificial Sequence
  Description of Artificial Sequence: Synthetic oligonucleotide
gccccugggguggccaccaguauga

SEQ ID NO: 5051 - RNA, 25 nt, Artificial Sequence
  Description of Artificial Sequence: Synthetic oligonucleotide
acaguauuauacgcuggcaacacag

SEQ ID NO: 5052 - RNA, 25 nt, Artificial Sequence
  Description of Artificial Sequence: Synthetic oligonucleotide
gaggcagcccgcacaccugcgccug

SEQ ID NO: 5053 - RNA, 25 nt, Artificial Sequence
  Description of Artificial Sequence: Synthetic oligonucleotide
ggguguugagagccauccugcaagu

SEQ ID NO: 5054 - RNA, 25 nt, Artificial Sequence
  Description of Artificial Sequence: Synthetic oligonucleotide
ucuuuuucaacagaacuucacagac

SEQ ID NO: 5055 - RNA, 25 nt, Artificial Sequence
  Description of Artificial Sequence: Synthetic oligonucleotide
cuguuagagcugcugagaagaauuu

SEQ ID NO: 5056 - RNA, 25 nt, Artificial Sequence
  Description of Artificial Sequence: Synthetic oligonucleotide
ugcuuuccgaauucagccuggaagg

SEQ ID NO: 5057 - RNA, 25 nt, Artificial Sequence
  Description of Artificial Sequence: Synthetic oligonucleotide
gcgcccagggacagcuguacugagu

SEQ ID NO: 5058 - RNA, 25 nt, Artificial Sequence
  Description of Artificial Sequence: Synthetic oligonucleotide
ucuagaugacucugacccccgcccc

SEQ ID NO: 5059 - RNA, 25 nt, Artificial Sequence
  Description of Artificial Sequence: Synthetic oligonucleotide
caggucaaggccagcagagcaguca

SEQ ID NO: 5060 - RNA, 25 nt, Artificial Sequence
  Description of Artificial Sequence: Synthetic oligonucleotide
agugccucuggagaaggcccuugcu

SEQ ID NO: 5061 - RNA, 25 nt, Artificial Sequence
  Description of Artificial Sequence: Synthetic oligonucleotide
ucucccaccuggcccagacuccgag

SEQ ID NO: 5062 - RNA, 25 nt, Artificial Sequence
  Description of Artificial Sequence: Synthetic oligonucleotide
ggagccugggucuggagcugccggu

SEQ ID NO: 5063 - RNA, 25 nt, Artificial Sequence
  Description of Artificial Sequence: Synthetic oligonucleotide
ucugguucuucccuuuagagcccgg

SEQ ID NO: 5064 - RNA, 25 nt, Artificial Sequence
  Description of Artificial Sequence: Synthetic oligonucleotide
gaucugccaccugcggccccuccca

SEQ ID NO: 5065 - RNA, 25 nt, Artificial Sequence
  Description of Artificial Sequence: Synthetic oligonucleotide
aagccgugaaccagcucaugagaga

SEQ ID NO: 5066 - RNA, 25 nt, Artificial Sequence
  Description of Artificial Sequence: Synthetic oligonucleotide
augaacacugugggauccacucagg

SEQ ID NO: 5067 - RNA, 25 nt, Artificial Sequence
  Description of Artificial Sequence: Synthetic oligonucleotide
gaaggcucggggcuggcacaaagga

SEQ ID NO: 5068 - RNA, 25 nt, Artificial Sequence
  Description of Artificial Sequence: Synthetic oligonucleotide
accacccagcauugcccugugccac

SEQ ID NO: 5069 - RNA, 25 nt, Artificial Sequence
  Description of Artificial Sequence: Synthetic oligonucleotide
cccagcacucaguggacauucuggg

SEQ ID NO: 5070 - RNA, 25 nt, Artificial Sequence
  Description of Artificial Sequence: Synthetic oligonucleotide
ggaccugccuucagccuuuuccugc

SEQ ID NO: 5071 - RNA, 25 nt, Artificial Sequence
  Description of Artificial Sequence: Synthetic oligonucleotide
cccugugccugacaucagcacccug

SEQ ID NO: 5072 - RNA, 25 nt, Artificial Sequence
  Description of Artificial Sequence: Synthetic oligonucleotide
ggcuggucagaaugccgcccuccca

SEQ ID NO: 5073 - RNA, 25 nt, Artificial Sequence
  Description of Artificial Sequence: Synthetic oligonucleotide
agaggagcagccgagagauccccug

SEQ ID NO: 5074 - RNA, 25 nt, Artificial Sequence
  Description of Artificial Sequence: Synthetic oligonucleotide
gaaggcuggaggcauucugcucagg

SEQ ID NO: 5075 - RNA, 25 nt, Artificial Sequence
  Description of Artificial Sequence: Synthetic oligonucleotide
gaccccuaucccagcucacagugcc

SEQ ID NO: 5076 - RNA, 25 nt, Artificial Sequence
  Description of Artificial Sequence: Synthetic oligonucleotide
ccaaccaucucaccaggagaaagag

SEQ ID NO: 5077 - RNA, 25 nt, Artificial Sequence
  Description of Artificial Sequence: Synthetic oligonucleotide
gccacauccccacguuaggaccacg

SEQ ID NO: 5078 - RNA, 25 nt, Artificial Sequence
  Description of Artificial Sequence: Synthetic oligonucleotide
ggagacugaccaccacccugacccc

SEQ ID NO: 5079 - RNA, 25 nt, Artificial Sequence
  Description of Artificial Sequence: Synthetic oligonucleotide
cccaaacccacgcaccagacgcuug

SEQ ID NO: 5080 - RNA, 25 nt, Artificial Sequence
  Description of Artificial Sequence: Synthetic oligonucleotide
gcaggacaggcgccgcgcagcgggc

SEQ ID NO: 5081 - RNA, 25 nt, Artificial Sequence
  Description of Artificial Sequence: Synthetic oligonucleotide
caggggcuugcccggccgacccucc

SEQ ID NO: 5082 - RNA, 25 nt, Artificial Sequence
  Description of Artificial Sequence: Synthetic oligonucleotide
cccuccccaccucccccacugcgcg

SEQ ID NO: 5083 - RNA, 25 nt, Artificial Sequence
  Description of Artificial Sequence: Synthetic oligonucleotide
guuacuccaggauaugccgagugca

SEQ ID NO: 5084 - RNA, 25 nt, Artificial Sequence
  Description of Artificial Sequence: Synthetic oligonucleotide
acguauaaggucaucuucgucgucc

SEQ ID NO: 5085 - RNA, 25 nt, Artificial Sequence
  Description of Artificial Sequence: Synthetic oligonucleotide
cccguggaccucccccuuccucugc

SEQ ID NO: 5086 - RNA, 25 nt, Artificial Sequence
  Description of Artificial Sequence: Synthetic oligonucleotide
cacgucguccaacgugggacuggcg

SEQ ID NO: 5087 - RNA, 25 nt, Artificial Sequence
  Description of Artificial Sequence: Synthetic oligonucleotide
gugucaggcuucccugggaggaucu

SEQ ID NO: 5088 - RNA, 25 nt, Artificial Sequence
  Description of Artificial Sequence: Synthetic oligonucleotide
uggagguuguucucugcagagaacc

SEQ ID NO: 5089 - RNA, 25 nt, Artificial Sequence
  Description of Artificial Sequence: Synthetic oligonucleotide
cagccuggcuccuggcgcgcaccuc

SEQ ID NO: 5090 - RNA, 25 nt, Artificial Sequence
  Description of Artificial Sequence: Synthetic oligonucleotide
cugcucccuucuccucacuacccac

SEQ ID NO: 5091 - RNA, 25 nt, Artificial Sequence
  Description of Artificial Sequence: Synthetic oligonucleotide
cccacgcauguaccgggaaaaaaac

SEQ ID NO: 5092 - RNA, 25 nt, Artificial Sequence
  Description of Artificial Sequence: Synthetic oligonucleotide
cuacuaugcccuucuagaccauguu

SEQ ID NO: 5093 - RNA, 25 nt, Artificial Sequence
  Description of Artificial Sequence: Synthetic oligonucleotide
ucugagaaaagaucgaaaauauuua

SEQ ID NO: 5094 - RNA, 25 nt, Artificial Sequence
  Description of Artificial Sequence: Synthetic oligonucleotide
aacaagagauaauaauaaaucugau

SEQ ID NO: 5095 - RNA, 25 nt, Artificial Sequence
  Description of Artificial Sequence: Synthetic oligonucleotide
ugccggucuuuguguguguugcgga

SEQ ID NO: 5096 - RNA, 25 nt, Artificial Sequence
  Description of Artificial Sequence: Synthetic oligonucleotide
aagcggcuucagguagcugaagcag

SEQ ID NO: 5097 - RNA, 25 nt, Artificial Sequence
  Description of Artificial Sequence: Synthetic oligonucleotide
gagagagagaaggcagcauacguca

SEQ ID NO: 5098 - RNA, 25 nt, Artificial Sequence
  Description of Artificial Sequence: Synthetic oligonucleotide
agcauuuucuucucugcacuuauaa

SEQ ID NO: 5099 - RNA, 25 nt, Artificial Sequence
  Description of Artificial Sequence: Synthetic oligonucleotide
agaaagaucaaagacuuuaagacuu

SEQ ID NO: 5100 - RNA, 25 nt, Artificial Sequence
  Description of Artificial Sequence: Synthetic oligonucleotide
uucgcuauuucuucuacugcuaucu

SEQ ID NO: 5101 - RNA, 25 nt, Artificial Sequence
  Description of Artificial Sequence: Synthetic oligonucleotide
uacuacaaacuucaaagaggaacca

SEQ ID NO: 5102 - RNA, 25 nt, Artificial Sequence
  Description of Artificial Sequence: Synthetic oligonucleotide
aggaggacaagaggagcaugaaagu

SEQ ID NO: 5103 - RNA, 25 nt, Artificial Sequence
  Description of Artificial Sequence: Synthetic oligonucleotide
uggacaaggagugugaccacugaag

SEQ ID NO: 5104 - RNA, 25 nt, Artificial Sequence
  Description of Artificial Sequence: Synthetic oligonucleotide
gcaccacagggagggguuaggccuc

SEQ ID NO: 5105 - RNA, 25 nt, Artificial Sequence
  Description of Artificial Sequence: Synthetic oligonucleotide
ccggaugacugcgggcaggccugga

SEQ ID NO: 5106 - RNA, 25 nt, Artificial Sequence
  Description of Artificial Sequence: Synthetic oligonucleotide
auaauauccagccucccacaagaag

SEQ ID NO: 5107 - RNA, 25 nt, Artificial Sequence
  Description of Artificial Sequence: Synthetic oligonucleotide
gcugguggagcagaguguucccuga

SEQ ID NO: 5108 - RNA, 25 nt, Artificial Sequence
  Description of Artificial Sequence: Synthetic oligonucleotide
acuccuccaaggaaagggagacgcc

SEQ ID NO: 5109 - RNA, 25 nt, Artificial Sequence
  Description of Artificial Sequence: Synthetic oligonucleotide
ccuuucauggucugcugaguaacag

SEQ ID NO: 5110 - RNA, 25 nt, Artificial Sequence
  Description of Artificial Sequence: Synthetic oligonucleotide
ggugccuucccagacacuggcguua

SEQ ID NO: 5111 - RNA, 25 nt, Artificial Sequence
  Description of Artificial Sequence: Synthetic oligonucleotide
acugcuugaccaaagagcccucaag

SEQ ID NO: 5112 - RNA, 25 nt, Artificial Sequence
  Description of Artificial Sequence: Synthetic oligonucleotide
gcggcccuuaugccagcgugacaga

SEQ ID NO: 5113 - RNA, 25 nt, Artificial Sequence
  Description of Artificial Sequence: Synthetic oligonucleotide
agggcucaccucuugccuucuaggu

SEQ ID NO: 5114 - RNA, 25 nt, Artificial Sequence
  Description of Artificial Sequence: Synthetic oligonucleotide
ucacuucucacaaugucccuucagc

SEQ ID NO: 5115 - RNA, 25 nt, Artificial Sequence
  Description of Artificial Sequence: Synthetic oligonucleotide
caccugacccugugcccaccaguua

SEQ ID NO: 5116 - RNA, 25 nt, Artificial Sequence
  Description of Artificial Sequence: Synthetic oligonucleotide
auuccuugguaauaugaguaauaca

SEQ ID NO: 5117 - RNA, 25 nt, Artificial Sequence
  Description of Artificial Sequence: Synthetic oligonucleotide
aucaaagaguaguauuaaaagcuaa

SEQ ID NO: 5118 - DNA, 21 bp, Artificial Sequence
  Description of Artificial Sequence: Synthetic oligonucleotide
  Description of Combined DNA/RNA Molecule: Synthetic oligonucleotide
cuacacaaaucagcgauuutt

SEQ ID NO: 5119 - DNA, 21 bp, Artificial Sequence
  Description of Artificial Sequence: Synthetic oligonucleotide
  Description of Combined DNA/RNA Molecule: Synthetic oligonucleotide
aaaucgcugauuuguguagtt

SEQ ID NO: 5120 - DNA, 25 bp, Artificial Sequence
  Description of Artificial Sequence: Synthetic oligonucleotide
  Description of Combined DNA/RNA Molecule: Synthetic oligonucleotide
cuacacaaaucagcgauuuccaugt

SEQ ID NO: 5121 - RNA, 27 nt, Artificial Sequence
  Description of Artificial Sequence: Synthetic oligonucleotide
acauggaaaucgcugauuuguguaguc

SEQ ID NO: 5122 - RNA, 13 nt, Artificial Sequence
  Description of Artificial Sequence: Synthetic oligonucleotide
cuacacaaaucag

SEQ ID NO: 5123 - DNA, 11 bp, Artificial Sequence
  Description of Artificial Sequence: Synthetic oligonucleotide
  Description of Combined DNA/RNA Molecule: Synthetic oligonucleotide
gauuuccaugt

SEQ ID NO: 5124 - DNA, 21 bp, Artificial Sequence
  Description of Artificial Sequence: Synthetic oligonucleotide
  Description of Combined DNA/RNA Molecule: Synthetic oligonucleotide
ggaucuuauuucuucggagtt

SEQ ID NO: 5125 - DNA, 21 bp, Artificial Sequence
  Description of Artificial Sequence: Synthetic oligonucleotide
  Description of Combined DNA/RNA Molecule: Synthetic oligonucleotide
cuccgaagaaauaagaucctt

SEQ ID NO: 5126 - RNA, 11 nt, Artificial Sequence
  Description of Artificial Sequence: Synthetic oligonucleotide
ggaucuuauuu

SEQ ID NO: 5127 - DNA, 10 bp, Artificial Sequence
  Description of Artificial Sequence: Synthetic oligonucleotide
  Description of Combined DNA/RNA Molecule: Synthetic oligonucleotide
cuucggagtt

SEQ ID NO: 5128 - RNA, 27 nt, Artificial Sequence
  Description of Artificial Sequence: Synthetic oligonucleotide
cauugucuccgaagaaauaagauccuu

SEQ ID NO: 5129 - RNA, 8 nt, Artificial Sequence
  Description of Artificial Sequence: Synthetic oligonucleotide
  modified_base (2): LNA-G
ggaucuua

SEQ ID NO: 5130 - DNA, 17 bp, Artificial Sequence
  Description of Artificial Sequence: Synthetic oligonucleotide
  Description of Combined DNA/RNA Molecule: Synthetic oligonucleotide
uuucuucggagacaatg

SEQ ID NO: 5131 - DNA, 16 bp, Artificial Sequence
  Description of Artificial Sequence: Synthetic oligonucleotide
  Description of Combined DNA/RNA Molecule: Synthetic oligonucleotide
uucuucggagacaatg

SEQ ID NO: 5132 - DNA, 15 bp, Artificial Sequence
  Description of Artificial Sequence: Synthetic oligonucleotide
  Description of Combined DNA/RNA Molecule: Synthetic oligonucleotide
ucuucggagacaatg

SEQ ID NO: 5133 - DNA, 14 bp, Artificial Sequence
  Description of Artificial Sequence: Synthetic oligonucleotide
  Description of Combined DNA/RNA Molecule: Synthetic oligonucleotide
cuucggagacaatg

SEQ ID NO: 5134 - DNA, 13 bp, Artificial Sequence
  Description of Artificial Sequence: Synthetic oligonucleotide
  Description of Combined DNA/RNA Molecule: Synthetic oligonucleotide
uucggagacaatg

SEQ ID NO: 5135 - DNA, 12 bp, Artificial Sequence
  Description of Artificial Sequence: Synthetic oligonucleotide
  Description of Combined DNA/RNA Molecule: Synthetic oligonucleotide
ucggagacaatg

SEQ ID NO: 5136 - DNA, 11 bp, Artificial Sequence
  Description of Artificial Sequence: Synthetic oligonucleotide
  Description of Combined DNA/RNA Molecule: Synthetic oligonucleotide
cggagacaatg

SEQ ID NO: 5137 - RNA, 9 nt, Artificial Sequence
  Description of Artificial Sequence: Synthetic oligonucleotide
  modified_base (2): LNA-G
ggaucuuau

SEQ ID NO: 5138 - RNA, 10 nt, Artificial Sequence
  Description of Artificial Sequence: Synthetic oligonucleotide
  modified_base (2): LNA-G
ggaucuuauu

SEQ ID NO: 5139 - RNA, 11 nt, Artificial Sequence
  Description of Artificial Sequence: Synthetic oligonucleotide
  modified_base (2): LNA-G
ggaucuuauuu

SEQ ID NO: 5140 - RNA, 12 nt, Artificial Sequence
  Description of Artificial Sequence: Synthetic oligonucleotide
  modified_base (2): LNA-G
ggaucuuauuuc

SEQ ID NO: 5141 - RNA, 8 nt, Artificial Sequence
  Description of Artificial Sequence: Synthetic oligonucleotide
  modified_base (3): LNA-A
cuacacaa

SEQ ID NO: 5142 - DNA, 13 bp, Artificial Sequence
  Description of Artificial Sequence: Synthetic oligonucleotide
  Description of Combined DNA/RNA Molecule: Synthetic oligonucleotide
  modified_base (8): LNA-A
aucagcgauuutt

SEQ ID NO: 5143 - DNA, 12 bp, Artificial Sequence
  Description of Artificial Sequence: Synthetic oligonucleotide
  Description of Combined DNA/RNA Molecule: Synthetic oligonucleotide
  modified_base (7): LNA-A
ucagcgauuutt

SEQ ID NO: 5144 - DNA, 11 bp, Artificial Sequence
  Description of Artificial Sequence: Synthetic oligonucleotide
  Description of Combined DNA/RNA Molecule: Synthetic oligonucleotide
  modified_base (6): LNA-A
cagcgauuutt

SEQ ID NO: 5145 - DNA, 10 bp, Artificial Sequence
  Description of Artificial Sequence: Synthetic oligonucleotide
  Description of Combined DNA/RNA Molecule: Synthetic oligonucleotide
  modified_base (5): LNA-A
agcgauuutt

SEQ ID NO: 5146 - DNA, 9 bp, Artificial Sequence
  Description of Artificial Sequence: Synthetic oligonucleotide
  Description of Combined DNA/RNA Molecule: Synthetic oligonucleotide
  modified_base (4): LNA-A
gcgauuutt

SEQ ID NO: 5147 - DNA, 8 bp, Artificial Sequence
  Description of Artificial Sequence: Synthetic oligonucleotide
  Description of Combined DNA/RNA Molecule: Synthetic oligonucleotide
  modified_base (3): LNA-A
cgauuutt

SEQ ID NO: 5148 - DNA, 7 bp, Artificial Sequence
  Description of Artificial Sequence: Synthetic oligonucleotide
  Description of Combined DNA/RNA Molecule: Synthetic oligonucleotide
  modified_base (2): LNA-A
gauuutt

SEQ ID NO: 5149 - RNA, 9 nt, Artificial Sequence
  Description of Artificial Sequence: Synthetic oligonucleotide
  modified_base (3): LNA-A
cuacacaaa

SEQ ID NO: 5150 - RNA, 10 nt, Artificial Sequence
  Description of Artificial Sequence: Synthetic oligonucleotide
  modified_base (3): LNA-A
cuacacaaau

SEQ ID NO: 5151 - RNA, 11 nt, Artificial Sequence
  Description of Artificial Sequence: Synthetic oligonucleotide
  modified_base (3): LNA-A
cuacacaaauc

SEQ ID NO: 5152 - RNA, 12 nt, Artificial Sequence
  Description of Artificial Sequence: Synthetic oligonucleotide
  modified_base (3): LNA-A
cuacacaaauca

SEQ ID NO: 5153 - RNA, 13 nt, Artificial Sequence
  Description of Artificial Sequence: Synthetic oligonucleotide
  modified_base (3): LNA-A
cuacacaaaucag

SEQ ID NO: 5154 - RNA, 14 nt, Artificial Sequence
  Description of Artificial Sequence: Synthetic oligonucleotide
  modified_base (3): LNA-A
cuacacaaaucagc

SEQ ID NO: 5155 - RNA, 13 nt, Artificial Sequence
  Description of Artificial Sequence: Synthetic oligonucleotide
  modified_base (2): LNA-G
ggaucuuauuucu

SEQ ID NO: 5156 - RNA, 14 nt, Artificial Sequence
  Description of Artificial Sequence: Synthetic oligonucleotide
  modified_base (2): LNA-G
ggaucuuauuucuu

SEQ ID NO: 5157 - RNA, 8 nt, Artificial Sequence
  Description of Artificial Sequence: Synthetic oligonucleotide
  modified_base (2): LNA-G
  modified_base (8): LNA-A
ggaucuua

SEQ ID NO: 5158 - RNA, 9 nt, Artificial Sequence
  Description of Artificial Sequence: Synthetic oligonucleotide
  modified_base (2): LNA-G
  modified_base (9): LNA-U
ggaucuuau

SEQ ID NO: 5159 - RNA, 10 nt, Artificial Sequence
  Description of Artificial Sequence: Synthetic oligonucleotide
  modified_base (2): LNA-G
  modified_base (10): LNA-U
ggaucuuauu

SEQ ID NO: 5160 - RNA, 11 nt, Artificial Sequence
  Description of Artificial Sequence: Synthetic oligonucleotide
  modified_base (2): LNA-G
  modified_base (11): LNA-U
ggaucuuauuu

SEQ ID NO: 5161 - RNA, 12 nt, Artificial Sequence
  Description of Artificial Sequence: Synthetic oligonucleotide
  modified_base (2): LNA-G
  modified_base (12): LNA-C
ggaucuuauuuc

SEQ ID NO: 5162 - RNA, 13 nt, Artificial Sequence
  Description of Artificial Sequence: Synthetic oligonucleotide
  modified_base (2): LNA-G
  modified_base (13): LNA-U
ggaucuuauuucu

SEQ ID NO: 5163 - RNA, 14 nt, Artificial Sequence
  Description of Artificial Sequence: Synthetic oligonucleotide
  modified_base (2): LNA-G
  modified_base (14): LNA-U
ggaucuuauuucuu

SEQ ID NO: 5164 - DNA, 13 bp, Artificial Sequence
  Description of Artificial Sequence: Synthetic oligonucleotide
  Description of Combined DNA/RNA Molecule: Synthetic oligonucleotide
  modified_base (8): LNA-G
uuucuucggagtt

SEQ ID NO: 5165 - DNA, 12 bp, Artificial Sequence
  Description of Artificial Sequence: Synthetic oligonucleotide
  Description of Combined DNA/RNA Molecule: Synthetic oligonucleotide
  modified_base (7): LNA-G
uucuucggagtt

SEQ ID NO: 5166 - DNA, 11 bp, Artificial Sequence
  Description of Artificial Sequence: Synthetic oligonucleotide
  Description of Combined DNA/RNA Molecule: Synthetic oligonucleotide
  modified_base (6): LNA-G
ucuucggagtt

SEQ ID NO: 5167 - DNA, 10 bp, Artificial Sequence
  Description of Artificial Sequence: Synthetic oligonucleotide
  Description of Combined DNA/RNA Molecule: Synthetic oligonucleotide
  modified_base (5): LNA-G
cuucggagtt

SEQ ID NO: 5168 - DNA, 9 bp, Artificial Sequence
  Description of Artificial Sequence: Synthetic oligonucleotide
  Description of Combined DNA/RNA Molecule: Synthetic oligonucleotide
  modified_base (4): LNA-G
uucggagtt

SEQ ID NO: 5169 - DNA, 8 bp, Artificial Sequence
  Description of Artificial Sequence: Synthetic oligonucleotide
  Description of Combined DNA/RNA Molecule: Synthetic oligonucleotide
  modified_base (3): LNA-G
ucggagtt

SEQ ID NO: 5170 - DNA, 7 bp, Artificial Sequence
  Description of Artificial Sequence: Synthetic oligonucleotide
  Description of Combined DNA/RNA Molecule: Synthetic oligonucleotide
  modified_base (2): LNA-G
cggagtt

SEQ ID NO: 5171 - DNA, 13 bp, Artificial Sequence
  Description of Artificial Sequence: Synthetic oligonucleotide
  Description of Combined DNA/RNA Molecule: Synthetic oligonucleotide
  modified_base (1): LNA-U
  modified_base (8): LNA-G
uuucuucggagtt

SEQ ID NO: 5172 - DNA, 12 bp, Artificial Sequence
  Description of Artificial Sequence: Synthetic oligonucleotide
  Description of Combined DNA/RNA Molecule: Synthetic oligonucleotide
  modified_base (1): LNA-U
  modified_base (7): LNA-G
uucuucggagtt

SEQ ID NO: 5173 - DNA, 11 bp, Artificial Sequence
  Description of Artificial Sequence: Synthetic oligonucleotide
  Description of Combined DNA/RNA Molecule: Synthetic oligonucleotide
  modified_base (1): LNA-U
  modified_base (6): LNA-G
ucuucggagtt

SEQ ID NO: 5174 - DNA, 10 bp, Artificial Sequence
  Description of Artificial Sequence: Synthetic oligonucleotide
  Description of Combined DNA/RNA Molecule: Synthetic oligonucleotide
  modified_base (1): LNA-C
  modified_base (5): LNA-G
cuucggagtt

SEQ ID NO: 5175 - DNA, 9 bp, Artificial Sequence
  Description of Artificial Sequence: Synthetic oligonucleotide
  Description of Combined DNA/RNA Molecule: Synthetic oligonucleotide
  modified_base (1): LNA-U
  modified_base (4): LNA-G
uucggagtt

SEQ ID NO: 5176 - DNA, 8 bp, Artificial Sequence
  Description of Artificial Sequence: Synthetic oligonucleotide
  Description of Combined DNA/RNA Molecule: Synthetic oligonucleotide
  modified_base (1): LNA-U
  modified_base (3): LNA-G
ucggagtt

SEQ ID NO: 5177 - DNA, 7 bp, Artificial Sequence
  Description of Artificial Sequence: Synthetic oligonucleotide
  Description of Combined DNA/RNA Molecule: Synthetic oligonucleotide
  modified_base (1): LNA-C
  modified_base (2): LNA-G
cggagtt

SEQ ID NO: 5178 - DNA, 21 bp, Artificial Sequence
  Description of Artificial Sequence: Synthetic oligonucleotide
  Description of Combined DNA/RNA Molecule: Synthetic oligonucleotide
  modified_base (2): LNA-G
  modified_base (16): LNA-G
ggaucuuauuucuucggagtt

SEQ ID NO: 5179 - DNA, 25 bp, Artificial Sequence
  Description of Artificial Sequence: Synthetic oligonucleotide
  Description of Combined DNA/RNA Molecule: Synthetic oligonucleotide
ggaucuuauuucuucggagacaatg

SEQ ID NO: 5180 - RNA, 25 nt, Artificial Sequence
  Description of Artificial Sequence: Synthetic oligonucleotide
uuaagcagaguucaaaagcccuuca

SEQ ID NO: 5181 - RNA, 25 nt, Artificial Sequence
  Description of Artificial Sequence: Synthetic oligonucleotide
uaagcagaguucaaaagcccuucag

SEQ ID NO: 5182 - RNA, 25 nt, Artificial Sequence
  Description of Artificial Sequence: Synthetic oligonucleotide
agcagaguucaaaagcccuucagcg

SEQ ID NO: 5183 - RNA, 25 nt, Artificial Sequence
  Description of Artificial Sequence: Synthetic oligonucleotide
cucagggucugagugaagccgcucg

SEQ ID NO: 5184 - RNA, 25 nt, Artificial Sequence
  Description of Artificial Sequence: Synthetic oligonucleotide
caagcaacuacaucacgccagucaa

SEQ ID NO: 5185 - RNA, 25 nt, Artificial Sequence
  Description of Artificial Sequence: Synthetic oligonucleotide
aucaauggcagcuucuuggugcgug

SEQ ID NO: 5186 - RNA, 25 nt, Artificial Sequence
  Description of Artificial Sequence: Synthetic oligonucleotide
uuccagcccacauuggauucaucag

SEQ ID NO: 5187 - RNA, 25 nt, Artificial Sequence
  Description of Artificial Sequence: Synthetic oligonucleotide
cagcugagaauguggaauaccuaag

SEQ ID NO: 5188 - RNA, 25 nt, Artificial Sequence
  Description of Artificial Sequence: Synthetic oligonucleotide
aacguaucuccuaauuugaggcuca

SEQ ID NO: 5189 - RNA, 25 nt, Artificial Sequence
  Description of Artificial Sequence: Synthetic oligonucleotide
ccuaaaauaauuucucuacaauugg

SEQ ID NO: 5190 - RNA, 25 nt, Artificial Sequence
  Description of Artificial Sequence: Synthetic oligonucleotide
uggaagauucagcuaguuaggagcc

SEQ ID NO: 5191 - RNA, 25 nt, Artificial Sequence
  Description of Artificial Sequence: Synthetic oligonucleotide
uuaaacucuccuagucaauauccac

SEQ ID NO: 5192 - RNA, 25 nt, Artificial Sequence
  Description of Artificial Sequence: Synthetic oligonucleotide
cagccuacaguuauguucagucaca

SEQ ID NO: 5193 - RNA, 25 nt, Artificial Sequence
  Description of Artificial Sequence: Synthetic oligonucleotide
guuauguucagucacacacacauac

SEQ ID NO: 5194 - RNA, 25 nt, Artificial Sequence
  Description of Artificial Sequence: Synthetic oligonucleotide
cacauacaaaauguuccuuuugcuu

SEQ ID NO: 5195 - RNA, 25 nt, Artificial Sequence
  Description of Artificial Sequence: Synthetic oligonucleotide
uccuuuugcuuuuaaaguaauuuuu

SEQ ID NO: 5196 - RNA, 25 nt, Artificial Sequence
  Description of Artificial Sequence: Synthetic oligonucleotide
ugaccugugaagcaacagucaaugg

SEQ ID NO: 5197 - RNA, 25 nt, Artificial Sequence
  Description of Artificial Sequence: Synthetic oligonucleotide
cuaucucacacaucgacaaaccaau

SEQ ID NO: 5198 - RNA, 25 nt, Artificial Sequence
  Description of Artificial Sequence: Synthetic oligonucleotide
uguccucaauuguacugcuaccacu

SEQ ID NO: 5199 - RNA, 25 nt, Artificial Sequence
  Description of Artificial Sequence: Synthetic oligonucleotide
aaaccguagcuggcaagcggucuua

SEQ ID NO: 5200 - RNA, 25 nt, Artificial Sequence
  Description of Artificial Sequence: Synthetic oligonucleotide
uagcuggcaagcggucuuaccggcu

SEQ ID NO: 5201 - RNA, 25 nt, Artificial Sequence
  Description of Artificial Sequence: Synthetic oligonucleotide
uuguaugguuaaaagauggguuacc

SEQ ID NO: 5202 - RNA, 25 nt, Artificial Sequence
  Description of Artificial Sequence: Synthetic oligonucleotide
ugguuaaaagauggguuaccugcga

SEQ ID NO: 5203 - RNA, 25 nt, Artificial Sequence
  Description of Artificial Sequence: Synthetic oligonucleotide
cagggaauuauacaaucuugcugag

SEQ ID NO: 5204 - RNA, 25 nt, Artificial Sequence
  Description of Artificial Sequence: Synthetic oligonucleotide
acaaucuugcugagcauaaaacagu

SEQ ID NO: 5205 - RNA, 25 nt, Artificial Sequence
  Description of Artificial Sequence: Synthetic oligonucleotide
ccaauaaugaagaguccuuuauccu

SEQ ID NO: 5206 - RNA, 25 nt, Artificial Sequence
  Description of Artificial Sequence: Synthetic oligonucleotide
acuuuggauguuccaacgcaaguug

SEQ ID NO: 5207 - RNA, 25 nt, Artificial Sequence
  Description of Artificial Sequence: Synthetic oligonucleotide
aaugcuuccacuaaacugaaaccau

SEQ ID NO: 5208 - RNA, 25 nt, Artificial Sequence
  Description of Artificial Sequence: Synthetic oligonucleotide
gagaaaguuugacuuuguuaaauau

SEQ ID NO: 5209 - RNA, 25 nt, Artificial Sequence
  Description of Artificial Sequence: Synthetic oligonucleotide
aaagaacuacuguauauuaaaaguu

SEQ ID NO: 5210 - RNA, 25 nt, Artificial Sequence
  Description of Artificial Sequence: Synthetic oligonucleotide
uuagaaauacggguuuugacuuaac

SEQ ID NO: 5211 - RNA, 25 nt, Artificial Sequence
  Description of Artificial Sequence: Synthetic oligonucleotide
aacauggguacagcaaacucagcac

SEQ ID NO: 5212 - RNA, 25 nt, Artificial Sequence
  Description of Artificial Sequence: Synthetic oligonucleotide
aaagacacagaagaugcugaccuca

SEQ ID NO: 5213 - RNA, 25 nt, Artificial Sequence
  Description of Artificial Sequence: Synthetic oligonucleotide
uaguagggagguuuauucagaucgc

SEQ ID NO: 5214 - RNA, 25 nt, Artificial Sequence
  Description of Artificial Sequence: Synthetic oligonucleotide
gccuucugcagcaggguucugggau

SEQ ID NO: 5215 - RNA, 25 nt, Artificial Sequence
  Description of Artificial Sequence: Synthetic oligonucleotide
ggucugguacauauuggaaauuaug

SEQ ID NO: 5216 - RNA, 25 nt, Artificial Sequence
  Description of Artificial Sequence: Synthetic oligonucleotide
cuaguccuuccgauggaagcacuag

SEQ ID NO: 5217 - RNA, 25 nt, Artificial Sequence
  Description of Artificial Sequence: Synthetic oligonucleotide
ccagugaauauuguuuuuaugugga

SEQ ID NO: 5218 - RNA, 25 nt, Artificial Sequence
  Description of Artificial Sequence: Synthetic oligonucleotide
augaauucaaguuggaauugguaga

SEQ ID NO: 5219 - RNA, 25 nt, Artificial Sequence
  Description of Artificial Sequence: Synthetic oligonucleotide
caggacacagauuuagacuuggaga

SEQ ID NO: 5220 - RNA, 25 nt, Artificial Sequence
  Description of Artificial Sequence: Synthetic oligonucleotide
cucaaagcacaguuacaguauucca

SEQ ID NO: 5221 - RNA, 25 nt, Artificial Sequence
  Description of Artificial Sequence: Synthetic oligonucleotide
accacugccaccacugaugaauuaa

SEQ ID NO: 5222 - RNA, 25 nt, Artificial Sequence
  Description of Artificial Sequence: Synthetic oligonucleotide
gaaacuacuagugccacaucaucac

SEQ ID NO: 5223 - RNA, 25 nt, Artificial Sequence
  Description of Artificial Sequence: Synthetic oligonucleotide
aagucggacagccucaccaaacaga

SEQ ID NO: 5224 - RNA, 25 nt, Artificial Sequence
  Description of Artificial Sequence: Synthetic oligonucleotide
gaaagcgaaaaauggaacaugaugg

SEQ ID NO: 5225 - RNA, 25 nt, Artificial Sequence
  Description of Artificial Sequence: Synthetic oligonucleotide
cccucugauuuagcauguagacugc

SEQ ID NO: 5226 - RNA, 25 nt, Artificial Sequence
  Description of Artificial Sequence: Synthetic oligonucleotide
ugagcuauuuaaggaucuauuuaug

SEQ ID NO: 5227 - RNA, 25 nt, Artificial Sequence
  Description of Artificial Sequence: Synthetic oligonucleotide
aaaaggugaaaaagcacuauuauca

SEQ ID NO: 5228 - RNA, 25 nt, Artificial Sequence
  Description of Artificial Sequence: Synthetic oligonucleotide
gaaaaagcacuauuaucaguucugc

SEQ ID NO: 5229 - RNA, 25 nt, Artificial Sequence
  Description of Artificial Sequence: Synthetic oligonucleotide
ggcugaaaagaaagauuaaaccuac

SEQ ID NO: 5230 - RNA, 25 nt, Artificial Sequence
  Description of Artificial Sequence: Synthetic oligonucleotide
uaaacccuuauaauaaaauccuucu

SEQ ID NO: 5231 - RNA, 25 nt, Artificial Sequence
  Description of Artificial Sequence: Synthetic oligonucleotide
cauacuauuagccaaugcuguagac

SEQ ID NO: 5232 - RNA, 25 nt, Artificial Sequence
  Description of Artificial Sequence: Synthetic oligonucleotide
gacagaagcauuuugauaggaauag

SEQ ID NO: 5233 - RNA, 25 nt, Artificial Sequence
  Description of Artificial Sequence: Synthetic oligonucleotide
agagcaaauaagauaauggcccuga

SEQ ID NO: 5234 - RNA, 25 nt, Artificial Sequence
  Description of Artificial Sequence: Synthetic oligonucleotide
ccaacauuuuucucuuccucaagca

SEQ ID NO: 5235 - RNA, 25 nt, Artificial Sequence
  Description of Artificial Sequence: Synthetic oligonucleotide
uuaaguaugagaaaaguucagccca

SEQ ID NO: 5236 - RNA, 25 nt, Artificial Sequence
  Description of Artificial Sequence: Synthetic oligonucleotide
caggaauaaagauggcugcugaacc

SEQ ID NO: 5237 - RNA, 25 nt, Artificial Sequence
  Description of Artificial Sequence: Synthetic oligonucleotide
aauuugaaugaccaaguucucuuca

SEQ ID NO: 5238 - RNA, 25 nt, Artificial Sequence
  Description of Artificial Sequence: Synthetic oligonucleotide
auguauaaagauagccagccuagag

SEQ ID NO: 5239 - RNA, 25 nt, Artificial Sequence
  Description of Artificial Sequence: Synthetic oligonucleotide
ggcuguaacuaucucugugaagugu

SEQ ID NO: 5240 - RNA, 25 nt, Artificial Sequence
  Description of Artificial Sequence: Synthetic oligonucleotide
ucugugaagugugagaaaauuucaa

SEQ ID NO: 5241 - RNA, 25 nt, Artificial Sequence
  Description of Artificial Sequence: Synthetic oligonucleotide
ccuuuaaggaaaugaauccuccuga

SEQ ID NO: 5242 - RNA, 25 nt, Artificial Sequence
  Description of Artificial Sequence: Synthetic oligonucleotide
aaggauacaaaaagugacaucauau

SEQ ID NO: 5243 - RNA, 25 nt, Artificial Sequence
  Description of Artificial Sequence: Synthetic oligonucleotide
agaugcaauuugaaucuucaucaua

SEQ ID NO: 5244 - RNA, 25 nt, Artificial Sequence
  Description of Artificial Sequence: Synthetic oligonucleotide
guucaaaacgaagacuagcuauuaa

SEQ ID NO: 5245 - RNA, 25 nt, Artificial Sequence
  Description of Artificial Sequence: Synthetic oligonucleotide
gugaaaccucaucucuacuaaaaau

SEQ ID NO: 5246 - RNA, 25 nt, Artificial Sequence
  Description of Artificial Sequence: Synthetic oligonucleotide
acgaaagagaagcucuaucucgccu

SEQ ID NO: 5247 - RNA, 25 nt, Artificial Sequence
  Description of Artificial Sequence: Synthetic oligonucleotide
cuccacaagcgccuucgguccaguu

SEQ ID NO: 5248 - RNA, 25 nt, Artificial Sequence
  Description of Artificial Sequence: Synthetic oligonucleotide
gagaagauuccaaagauguagccgc

SEQ ID NO: 5249 - RNA, 25 nt, Artificial Sequence
  Description of Artificial Sequence: Synthetic oligonucleotide
aaucuggauucaaugaggagacuug

SEQ ID NO: 5250 - RNA, 25 nt, Artificial Sequence
  Description of Artificial Sequence: Synthetic oligonucleotide
agaacagauuugagaguagugagga

SEQ ID NO: 5251 - RNA, 25 nt, Artificial Sequence
  Description of Artificial Sequence: Synthetic oligonucleotide
ccagagcugugcagaugaguacaaa

SEQ ID NO: 5252 - RNA, 25 nt, Artificial Sequence
  Description of Artificial Sequence: Synthetic oligonucleotide
ccucagauuguuguuguuaaugggc

SEQ ID NO: 5253 - RNA, 25 nt, Artificial Sequence
  Description of Artificial Sequence: Synthetic oligonucleotide
cuauuuuaauuauuuuuaauuuauu

SEQ ID NO: 5254 - RNA, 25 nt, Artificial Sequence
  Description of Artificial Sequence: Synthetic oligonucleotide
uuuaauuuauuaauauuuaaauaug

SEQ ID NO: 5255 - RNA, 25 nt, Artificial Sequence
  Description of Artificial Sequence: Synthetic oligonucleotide
augcaguuugaauauccuuuguuuc

SEQ ID NO: 5256 - RNA, 25 nt, Artificial Sequence
  Description of Artificial Sequence: Synthetic oligonucleotide
caugcugcuggcgucuaaguguuug

SEQ ID NO: 5257 - RNA, 25 nt, Artificial Sequence
  Description of Artificial Sequence: Synthetic oligonucleotide
agaugugcauuucaccugugacaaa

SEQ ID NO: 5258 - RNA, 25 nt, Artificial Sequence
  Description of Artificial Sequence: Synthetic oligonucleotide
ucaaaaccugugccaggcugaauua

SEQ ID NO: 5259 - RNA, 25 nt, Artificial Sequence
  Description of Artificial Sequence: Synthetic oligonucleotide
gaauguggguagucauucuuacaau

SEQ ID NO: 5260 - RNA, 25 nt, Artificial Sequence
  Description of Artificial Sequence: Synthetic oligonucleotide
auguggguagucauucuuacaauug

SEQ ID NO: 5261 - RNA, 25 nt, Artificial Sequence
  Description of Artificial Sequence: Synthetic oligonucleotide
ugaaaaugagcaucagagaguguac

SEQ ID NO: 5262 - RNA, 25 nt, Artificial Sequence
  Description of Artificial Sequence: Synthetic oligonucleotide
uugcuuuucauguagaacucagcag

SEQ ID NO: 5263 - RNA, 25 nt, Artificial Sequence
  Description of Artificial Sequence: Synthetic oligonucleotide
uguauuucuauauuuauuuucagua

SEQ ID NO: 5264 - RNA, 25 nt, Artificial Sequence
  Description of Artificial Sequence: Synthetic oligonucleotide
uuugauuaauguuucuuaaauggaa

SEQ ID NO: 5265 - RNA, 25 nt, Artificial Sequence
  Description of Artificial Sequence: Synthetic oligonucleotide
caacguguauagugccuaaaauugu

SEQ ID NO: 5266 - RNA, 25 nt, Artificial Sequence
  Description of Artificial Sequence: Synthetic oligonucleotide
cauauccuuggcuacuaacaucugg

SEQ ID NO: 5267 - RNA, 25 nt, Artificial Sequence
  Description of Artificial Sequence: Synthetic oligonucleotide
uacuaacaucuggagacugugagcu

SEQ ID NO: 5268 - RNA, 25 nt, Artificial Sequence
  Description of Artificial Sequence: Synthetic oligonucleotide
cauaaguugugugcuuuuuauuaau

SEQ ID NO: 5269 - RNA, 25 nt, Artificial Sequence
  Description of Artificial Sequence: Synthetic oligonucleotide
gcaucauuuuggcucuucuuacauu

SEQ ID NO: 5270 - RNA, 25 nt, Artificial Sequence
  Description of Artificial Sequence: Synthetic oligonucleotide
gcucuucuuacauuuguaaaaaugu

SEQ ID NO: 5271 - RNA, 25 nt, Artificial Sequence
  Description of Artificial Sequence: Synthetic oligonucleotide
agauuaggucaucuuaauucauauu

SEQ ID NO: 5272 - RNA, 25 nt, Artificial Sequence
  Description of Artificial Sequence: Synthetic oligonucleotide
auggaauugaaagaacuaaucauga

SEQ ID NO: 5273 - RNA, 25 nt, Artificial Sequence
  Description of Artificial Sequence: Synthetic oligonucleotide
cacacucauuccuucugcucuuggg

SEQ ID NO: 5274 - RNA, 25 nt, Artificial Sequence
  Description of Artificial Sequence: Synthetic oligonucleotide
uguagagguaaccaguagcuuugag

SEQ ID NO: 5275 - RNA, 25 nt, Artificial Sequence
  Description of Artificial Sequence: Synthetic oligonucleotide
caaccacaugccacguaauauuuca

SEQ ID NO: 5276 - RNA, 25 nt, Artificial Sequence
  Description of Artificial Sequence: Synthetic oligonucleotide
ucggaaacaaguuauucucuucacu

SEQ ID NO: 5277 - RNA, 25 nt, Artificial Sequence
  Description of Artificial Sequence: Synthetic oligonucleotide
acucccaauaacuaaugcuaagaaa

SEQ ID NO: 5278 - RNA, 25 nt, Artificial Sequence
  Description of Artificial Sequence: Synthetic oligonucleotide
aaugcuaagaaaugcugaaaaucaa

SEQ ID NO: 5279 - RNA, 25 nt, Artificial Sequence
  Description of Artificial Sequence: Synthetic oligonucleotide
gucuuucucuaaauaugauuacuuu

SEQ ID NO: 5280 - RNA, 25 nt, Artificial Sequence
  Description of Artificial Sequence: Synthetic oligonucleotide
ugaauuucaggcauuuuguucuaca

SEQ ID NO: 5281 - RNA, 25 nt, Artificial Sequence
  Description of Artificial Sequence: Synthetic oligonucleotide
cgauucccucucacccgggacucuc

SEQ ID NO: 5282 - RNA, 25 nt, Artificial Sequence
  Description of Artificial Sequence: Synthetic oligonucleotide
aggaaagugaaccuuuaaaguaaag

SEQ ID NO: 5283 - RNA, 25 nt, Artificial Sequence
  Description of Artificial Sequence: Synthetic oligonucleotide
gaggcugcaugcucuggaagccugg

SEQ ID NO: 5284 - RNA, 25 nt, Artificial Sequence
  Description of Artificial Sequence: Synthetic oligonucleotide
ucucugaacagaaaacaaaagagag

SEQ ID NO: 5285 - RNA, 25 nt, Artificial Sequence
  Description of Artificial Sequence: Synthetic oligonucleotide
aacuuggcuguaaucaguuaugccg

SEQ ID NO: 5286 - RNA, 25 nt, Artificial Sequence
  Description of Artificial Sequence: Synthetic oligonucleotide
agaagccaaaauuaaaagaagucca

SEQ ID NO: 5287 - RNA, 25 nt, Artificial Sequence
  Description of Artificial Sequence: Synthetic oligonucleotide
auuaaaagaaguccaggugagguua

SEQ ID NO: 5288 - RNA, 25 nt, Artificial Sequence
  Description of Artificial Sequence: Synthetic oligonucleotide
gaauccggauuaucgggaagaggac

SEQ ID NO: 5289 - RNA, 25 nt, Artificial Sequence
  Description of Artificial Sequence: Synthetic oligonucleotide
aaugugacaucaaagcaaguauugu

SEQ ID NO: 5290 - RNA, 25 nt, Artificial Sequence
  Description of Artificial Sequence: Synthetic oligonucleotide
caucaaagcaaguauuguagcacuc

SEQ ID NO: 5291 - RNA, 25 nt, Artificial Sequence
  Description of Artificial Sequence: Synthetic oligonucleotide
agagagagaaaacaaaaccacaaau

SEQ ID NO: 5292 - RNA, 25 nt, Artificial Sequence
  Description of Artificial Sequence: Synthetic oligonucleotide
ucgcuguaguauuuaagcccauaca

SEQ ID NO: 5293 - RNA, 25 nt, Artificial Sequence
  Description of Artificial Sequence: Synthetic oligonucleotide
cgcuguaguauuuaagcccauacag

SEQ ID NO: 5294 - RNA, 25 nt, Artificial Sequence
  Description of Artificial Sequence: Synthetic oligonucleotide
auuuaagcccauacagaaaccuucc

SEQ ID NO: 5295 - RNA, 25 nt, Artificial Sequence
  Description of Artificial Sequence: Synthetic oligonucleotide
auuaaaauaaacaugguauaccuac

SEQ ID NO: 5296 - RNA, 25 nt, Artificial Sequence
  Description of Artificial Sequence: Synthetic oligonucleotide
cuguucugaucggccaguuuucgga

SEQ ID NO: 5297 - RNA, 25 nt, Artificial Sequence
  Description of Artificial Sequence: Synthetic oligonucleotide
aaauaauuugaacuuuggaacaggg

SEQ ID NO: 5298 - RNA, 25 nt, Artificial Sequence
  Description of Artificial Sequence: Synthetic oligonucleotide
ugcgaccuuaauuuaacuuuccagu

SEQ ID NO: 5299 - RNA, 25 nt, Artificial Sequence
  Description of Artificial Sequence: Synthetic oligonucleotide
cugagaaagcuaaaguuugguuuug

SEQ ID NO: 5300 - RNA, 25 nt, Artificial Sequence
  Description of Artificial Sequence: Synthetic oligonucleotide
aguaaagaugcuacuucccacugua

SEQ ID NO: 5301 - RNA, 25 nt, Artificial Sequence
  Description of Artificial Sequence: Synthetic oligonucleotide
cugcuuaauugcugauaccauauga

SEQ ID NO: 5302 - RNA, 25 nt, Artificial Sequence
  Description of Artificial Sequence: Synthetic oligonucleotide
uaccauaugaaugaaacaugggcug

SEQ ID NO: 5303 - RNA, 25 nt, Artificial Sequence
  Description of Artificial Sequence: Synthetic oligonucleotide
aacuuucuuauccaacuuuuucaua

SEQ ID NO: 5304 - RNA, 25 nt, Artificial Sequence
  Description of Artificial Sequence: Synthetic oligonucleotide
ccuugcaugacaucaugaggccgga

SEQ ID NO: 5305 - RNA, 25 nt, Artificial Sequence
  Description of Artificial Sequence: Synthetic oligonucleotide
ugaauuuguauaugacugcauuugu

SEQ ID NO: 5306 - RNA, 25 nt, Artificial Sequence
  Description of Artificial Sequence: Synthetic oligonucleotide
gaauccuaguagaauguuuacuacc

SEQ ID NO: 5307 - RNA, 25 nt, Artificial Sequence
  Description of Artificial Sequence: Synthetic oligonucleotide
gaaagggaagaauuuuuugaugaaa

SEQ ID NO: 5308 - RNA, 25 nt, Artificial Sequence
  Description of Artificial Sequence: Synthetic oligonucleotide
uaucggcaugccagugugugaauuu

SEQ ID NO: 5309 - RNA, 25 nt, Artificial Sequence
  Description of Artificial Sequence: Synthetic oligonucleotide
caccucauaguagagcaauguaugu

SEQ ID NO: 5310 - RNA, 25 nt, Artificial Sequence
  Description of Artificial Sequence: Synthetic oligonucleotide
ccagaauugccaaagcacauauaua

SEQ ID NO: 5311 - RNA, 25 nt, Artificial Sequence
  Description of Artificial Sequence: Synthetic oligonucleotide
uggugaucuggguaauaguuucucc

SEQ ID NO: 5312 - RNA, 25 nt, Artificial Sequence
  Description of Artificial Sequence: Synthetic oligonucleotide
gaucuggguaauaguuucuccaaau

SEQ ID NO: 5313 - RNA, 25 nt, Artificial Sequence
  Description of Artificial Sequence: Synthetic oligonucleotide
ggaugugaugaauacuuccuagaaa

SEQ ID NO: 5314 - RNA, 25 nt, Artificial Sequence
  Description of Artificial Sequence: Synthetic oligonucleotide
cauuuccacagcuacaccauauaug

SEQ ID NO: 5315 - RNA, 25 nt, Artificial Sequence
  Description of Artificial Sequence: Synthetic oligonucleotide
acagcuacaccauauaugaauggag

SEQ ID NO: 5316 - RNA, 25 nt, Artificial Sequence
  Description of Artificial Sequence: Synthetic oligonucleotide
ugcaguucuuacacgagaagaagau

SEQ ID NO: 5317 - RNA, 25 nt, Artificial Sequence
  Description of Artificial Sequence: Synthetic oligonucleotide
acgagaagaagaucauuuacaggga

SEQ ID NO: 5318 - RNA, 25 nt, Artificial Sequence
  Description of Artificial Sequence: Synthetic oligonucleotide
cgagaagaagaucauuuacagggac

SEQ ID NO: 5319 - RNA, 25 nt, Artificial Sequence
  Description of Artificial Sequence: Synthetic oligonucleotide
aagaagaucauuuacagggaccuga

SEQ ID NO: 5320 - RNA, 25 nt, Artificial Sequence
  Description of Artificial Sequence: Synthetic oligonucleotide
agaggaagagguguuugacugcauc

SEQ ID NO: 5321 - RNA, 25 nt, Artificial Sequence
  Description of Artificial Sequence: Synthetic oligonucleotide
gaggaagagguguuugacugcaucg

SEQ ID NO: 5322 - RNA, 25 nt, Artificial Sequence
  Description of Artificial Sequence: Synthetic oligonucleotide
cuacuuugagggcgaguucacaggg

SEQ ID NO: 5323 - RNA, 25 nt, Artificial Sequence
  Description of Artificial Sequence: Synthetic oligonucleotide
agggcaucuccuggcaccucugucc

SEQ ID NO: 5324 - RNA, 25 nt, Artificial Sequence
  Description of Artificial Sequence: Synthetic oligonucleotide
ggagugauaugguuugucuuuuuaa

SEQ ID NO: 5325 - RNA, 25 nt, Artificial Sequence
  Description of Artificial Sequence: Synthetic oligonucleotide
gagugauaugguuugucuuuuuaag

SEQ ID NO: 5326 - RNA, 25 nt, Artificial Sequence
  Description of Artificial Sequence: Synthetic oligonucleotide
ugcaguaaagauccuaaagguuguc

SEQ ID NO: 5327 - RNA, 25 nt, Artificial Sequence
  Description of Artificial Sequence: Synthetic oligonucleotide
aguaaagauccuaaagguugucgac

SEQ ID NO: 5328 - RNA, 25 nt, Artificial Sequence
  Description of Artificial Sequence: Synthetic oligonucleotide
ugacaaaggacaaccuggcaauugu

SEQ ID NO: 5329 - RNA, 25 nt, Artificial Sequence
  Description of Artificial Sequence: Synthetic oligonucleotide
gcaauugugacccaguggugcgagg

SEQ ID NO: 5330 - RNA, 25 nt, Artificial Sequence
  Description of Artificial Sequence: Synthetic oligonucleotide
aacaucauccauagagacaugaaau

SEQ ID NO: 5331 - RNA, 25 nt, Artificial Sequence
  Description of Artificial Sequence: Synthetic oligonucleotide
ugaaauccaacaauauauuucucca

SEQ ID NO: 5332 - RNA, 25 nt, Artificial Sequence
  Description of Artificial Sequence: Synthetic oligonucleotide
aacaauauauuucuccaugaaggcu

SEQ ID NO: 5333 - RNA, 25 nt, Artificial Sequence
  Description of Artificial Sequence: Synthetic oligonucleotide
aacaguaaagucacgcuggaguggu

SEQ ID NO: 5334 - RNA, 25 nt, Artificial Sequence
  Description of Artificial Sequence: Synthetic oligonucleotide
ugugaagaaaguaaaggaagagagg

SEQ ID NO: 5335 - RNA, 25 nt, Artificial Sequence
  Description of Artificial Sequence: Synthetic oligonucleotide
cuuccgagccauccuugcaucgggc

SEQ ID NO: 5336 - RNA, 25 nt, Artificial Sequence
  Description of Artificial Sequence: Synthetic oligonucleotide
aauggagguugaauauccuacugug

SEQ ID NO: 5337 - RNA, 25 nt, Artificial Sequence
  Description of Artificial Sequence: Synthetic oligonucleotide
ggagguugaauauccuacuguguaa

SEQ ID NO: 5338 - RNA, 25 nt, Artificial Sequence
  Description of Artificial Sequence: Synthetic oligonucleotide
auuuugaguuuucccuuguagugua

SEQ ID NO: 5339 - RNA, 25 nt, Artificial Sequence
  Description of Artificial Sequence: Synthetic oligonucleotide
uauccuguuuguucuuuguugauug

SEQ ID NO: 5340 - RNA, 25 nt, Artificial Sequence
  Description of Artificial Sequence: Synthetic oligonucleotide
ccuguuuguucuuuguugauugaaa

SEQ ID NO: 5341 - RNA, 25 nt, Artificial Sequence
  Description of Artificial Sequence: Synthetic oligonucleotide
cucuacagccuucuuuuucuuccau

SEQ ID NO: 5342 - RNA, 25 nt, Artificial Sequence
  Description of Artificial Sequence: Synthetic oligonucleotide
ucuuccauagcuaaucuuccuucua

SEQ ID NO: 5343 - RNA, 25 nt, Artificial Sequence
  Description of Artificial Sequence: Synthetic oligonucleotide
auaaucuuccuguugaaugcuucau

SEQ ID NO: 5344 - RNA, 25 nt, Artificial Sequence
  Description of Artificial Sequence: Synthetic oligonucleotide
uaaucuuccuguugaaugcuucaug

SEQ ID NO: 5345 - RNA, 25 nt, Artificial Sequence
  Description of Artificial Sequence: Synthetic oligonucleotide
cuucaugacuugaauucuacuuuga

SEQ ID NO: 5346 - RNA, 25 nt, Artificial Sequence
  Description of Artificial Sequence: Synthetic oligonucleotide
aagagggagagaagcaacuacagac

SEQ ID NO: 5347 - RNA, 25 nt, Artificial Sequence
  Description of Artificial Sequence: Synthetic oligonucleotide
cgucuccuaccagaccaaggucaac

SEQ ID NO: 5348 - RNA, 25 nt, Artificial Sequence
  Description of Artificial Sequence: Synthetic oligonucleotide
gaucaaucggcccgacuaucucgac

SEQ ID NO: 5349 - RNA, 25 nt, Artificial Sequence
  Description of Artificial Sequence: Synthetic oligonucleotide
ggacgaacauccaaccuucccaaac

SEQ ID NO: 5350 - RNA, 25 nt, Artificial Sequence
  Description of Artificial Sequence: Synthetic oligonucleotide
agggucggaacccaagcuuagaacu

SEQ ID NO: 5351 - RNA, 25 nt, Artificial Sequence
  Description of Artificial Sequence: Synthetic oligonucleotide
ucggaacccaagcuuagaacuuuaa

SEQ ID NO: 5352 - RNA, 25 nt, Artificial Sequence
  Description of Artificial Sequence: Synthetic oligonucleotide
acccaagcuuagaacuuuaagcaac

SEQ ID NO: 5353 - RNA, 25 nt, Artificial Sequence
  Description of Artificial Sequence: Synthetic oligonucleotide
gaacuuuaagcaacaagaccaccac

SEQ ID NO: 5354 - RNA, 25 nt, Artificial Sequence
  Description of Artificial Sequence: Synthetic oligonucleotide
acuauucaguggcgagaaauaaagu

SEQ ID NO: 5355 - RNA, 25 nt, Artificial Sequence
  Description of Artificial Sequence: Synthetic oligonucleotide
cuauucaguggcgagaaauaaaguu

SEQ ID NO: 5356 - RNA, 25 nt, Artificial Sequence
  Description of Artificial Sequence: Synthetic oligonucleotide
aaacacagauaacaggaaaugaucc

SEQ ID NO: 5357 - RNA, 25 nt, Artificial Sequence
  Description of Artificial Sequence: Synthetic oligonucleotide
cuuaagaaaagagaagaaaugaaac

SEQ ID NO: 5358 - RNA, 25 nt, Artificial Sequence
  Description of Artificial Sequence: Synthetic oligonucleotide
cugaaggaguguguuuccauccucc

SEQ ID NO: 5359 - RNA, 25 nt, Artificial Sequence
  Description of Artificial Sequence: Synthetic oligonucleotide
ucaccgcgggacugaaaaucuuuga

SEQ ID NO: 5360 - RNA, 25 nt, Artificial Sequence
  Description of Artificial Sequence: Synthetic oligonucleotide
agcagaaauaagcgugccguucagg

SEQ ID NO: 5361 - RNA, 25 nt, Artificial Sequence
  Description of Artificial Sequence: Synthetic oligonucleotide
aagcgugccguucaggguccagaag

SEQ ID NO: 5362 - RNA, 25 nt, Artificial Sequence
  Description of Artificial Sequence: Synthetic oligonucleotide
agaaacagucacucaagacugcuug

SEQ ID NO: 5363 - RNA, 25 nt, Artificial Sequence
  Description of Artificial Sequence: Synthetic oligonucleotide
agaggaagaagguccaugucuuugg

SEQ ID NO: 5364 - RNA, 25 nt, Artificial Sequence
  Description of Artificial Sequence: Synthetic oligonucleotide
uguauucaaaauaugccugaaacac

SEQ ID NO: 5365 - RNA, 25 nt, Artificial Sequence
  Description of Artificial Sequence: Synthetic oligonucleotide
auuuuccucccuuucucuguaccuc

SEQ ID NO: 5366 - RNA, 25 nt, Artificial Sequence
  Description of Artificial Sequence: Synthetic oligonucleotide
caaagaaagauagagcaagacaaga

SEQ ID NO: 5367 - RNA, 25 nt, Artificial Sequence
  Description of Artificial Sequence: Synthetic oligonucleotide
aagaaagauagagcaagacaagaaa

SEQ ID NO: 5368 - RNA, 25 nt, Artificial Sequence
  Description of Artificial Sequence: Synthetic oligonucleotide
gaaagcauuuguuuguacaagaucc

SEQ ID NO: 5369 - RNA, 25 nt, Artificial Sequence
  Description of Artificial Sequence: Synthetic oligonucleotide
ugaguuaaacgaacguacuugcaga

SEQ ID NO: 5370 - RNA, 25 nt, Artificial Sequence
  Description of Artificial Sequence: Synthetic oligonucleotide
acugauacagaacgaucgauacaga

SEQ ID NO: 5371 - RNA, 25 nt, Artificial Sequence
  Description of Artificial Sequence: Synthetic oligonucleotide
auauuauauauauauaaaaauaaau

SEQ ID NO: 5372 - RNA, 25 nt, Artificial Sequence
  Description of Artificial Sequence: Synthetic oligonucleotide
auuauauauauauaaaaauaaauau

SEQ ID NO: 5373 - RNA, 25 nt, Artificial Sequence
  Description of Artificial Sequence: Synthetic oligonucleotide
ucacuggauguauuugacugcugug

SEQ ID NO: 5374 - RNA, 25 nt, Artificial Sequence
  Description of Artificial Sequence: Synthetic oligonucleotide
cagggaagaggaggagaugagagac

SEQ ID NO: 5375 - RNA, 25 nt, Artificial Sequence
  Description of Artificial Sequence: Synthetic oligonucleotide
augaucuuuuuuuugucccacuugg

SEQ ID NO: 5376 - RNA, 27 nt, Artificial Sequence
  Description of Artificial Sequence: Synthetic oligonucleotide
ggccgugaacuccucaucaaaauaccu

SEQ ID NO: 5377 - RNA, 27 nt, Artificial Sequence
  Description of Artificial Sequence: Synthetic oligonucleotide
uggugugauggugaucaucugggccgu

SEQ ID NO: 5378 - RNA, 27 nt, Artificial Sequence
  Description of Artificial Sequence: Synthetic oligonucleotide
aaacccgcaggauaguuuucuucccua

SEQ ID NO: 5379 - RNA, 27 nt, Artificial Sequence
  Description of Artificial Sequence: Synthetic oligonucleotide
caaacuggaugaaauaaauuaaaaccc

SEQ ID NO: 5380 - RNA, 27 nt, Artificial Sequence
  Description of Artificial Sequence: Synthetic oligonucleotide
agaaguccuuaacauuucccuacguga

SEQ ID NO: 5381 - RNA, 27 nt, Artificial Sequence
  Description of Artificial Sequence: Synthetic oligonucleotide
cucugucccacuggguaaacccuggcc

SEQ ID NO: 5382 - RNA, 27 nt, Artificial Sequence
  Description of Artificial Sequence: Synthetic oligonucleotide
cacaauaacaaauuuaaaccuugcucc

SEQ ID NO: 5383 - RNA, 27 nt, Artificial Sequence
  Description of Artificial Sequence: Synthetic oligonucleotide
aaaugcauuugaacaacauaauacaca

SEQ ID NO: 5384 - RNA, 27 nt, Artificial Sequence
  Description of Artificial Sequence: Synthetic oligonucleotide
ggcuuuccugucacaaagauuaaaaac

SEQ ID NO: 5385 - RNA, 27 nt, Artificial Sequence
  Description of Artificial Sequence: Synthetic oligonucleotide
agggcuuuccugucacaaagauuaaaa

SEQ ID NO: 5386 - RNA, 27 nt, Artificial Sequence
  Description of Artificial Sequence: Synthetic oligonucleotide
ggccaugcugggagacauaagcagcag

SEQ ID NO: 5387 - RNA, 27 nt, Artificial Sequence
  Description of Artificial Sequence: Synthetic oligonucleotide
ucagggagaagcuucugaaacacuucu

SEQ ID NO: 5388 - RNA, 27 nt, Artificial Sequence
  Description of Artificial Sequence: Synthetic oligonucleotide
aagggcuucuuccuuauugauggucag

SEQ ID NO: 5389 - RNA, 27 nt, Artificial Sequence
  Description of Artificial Sequence: Synthetic oligonucleotide
ugaagggcuucuuccuuauugaugguc

SEQ ID NO: 5390 - RNA, 27 nt, Artificial Sequence
  Description of Artificial Sequence: Synthetic oligonucleotide
cgcugaagggcuucuuccuuauugaug

SEQ ID NO: 5391 - RNA, 27 nt, Artificial Sequence
  Description of Artificial Sequence: Synthetic oligonucleotide
gccgcugaagggcuucuuccuuauuga

SEQ ID NO: 5392 - RNA, 27 nt, Artificial Sequence
  Description of Artificial Sequence: Synthetic oligonucleotide
acuggccgcugaagggcuucuuccuua

SEQ ID NO: 5393 - RNA, 27 nt, Artificial Sequence
  Description of Artificial Sequence: Synthetic oligonucleotide
cggagcuuuucaccuuuaguuaugcuu

SEQ ID NO: 5394 - RNA, 27 nt, Artificial Sequence
  Description of Artificial Sequence: Synthetic oligonucleotide
ccggagcuuuucaccuuuaguuaugcu

SEQ ID NO: 5395 - RNA, 27 nt, Artificial Sequence
  Description of Artificial Sequence: Synthetic oligonucleotide
cagacuguugacuggcgugauguaguu

SEQ ID NO: 5396 - RNA, 27 nt, Artificial Sequence
  Description of Artificial Sequence: Synthetic oligonucleotide
cuuuugaacucugcuuaaauccagugg

SEQ ID NO: 5397 - RNA, 27 nt, Artificial Sequence
  Description of Artificial Sequence: Synthetic oligonucleotide
gcuuuugaacucugcuuaaauccagug

SEQ ID NO: 5398 - RNA, 27 nt, Artificial Sequence
  Description of Artificial Sequence: Synthetic oligonucleotide
agggcuuuugaacucugcuuaaaucca

SEQ ID NO: 5399 - RNA, 27 nt, Artificial Sequence
  Description of Artificial Sequence: Synthetic oligonucleotide
aagggcuuuugaacucugcuuaaaucc

SEQ ID NO: 5400 - RNA, 27 nt, Artificial Sequence
  Description of Artificial Sequence: Synthetic oligonucleotide
ugaagggcuuuugaacucugcuuaaau

SEQ ID NO: 5401 - RNA, 27 nt, Artificial Sequence
  Description of Artificial Sequence: Synthetic oligonucleotide
cugaagggcuuuugaacucugcuuaaa

SEQ ID NO: 5402 - RNA, 27 nt, Artificial Sequence
  Description of Artificial Sequence: Synthetic oligonucleotide
cgcugaagggcuuuugaacucugcuua

SEQ ID NO: 5403 - RNA, 27 nt, Artificial Sequence
  Description of Artificial Sequence: Synthetic oligonucleotide
cgagcggcuucacucagacccugaggc

SEQ ID NO: 5404 - RNA, 27 nt, Artificial Sequence
  Description of Artificial Sequence: Synthetic oligonucleotide
uugacuggcgugauguaguugcuuggg

SEQ ID NO: 5405 - RNA, 27 nt, Artificial Sequence
  Description of Artificial Sequence: Synthetic oligonucleotide
cacgcaccaagaagcugccauugaucc

SEQ ID NO: 5406 - RNA, 27 nt, Artificial Sequence
  Description of Artificial Sequence: Synthetic oligonucleotide
cugaugaauccaaugugggcuggaauc

SEQ ID NO: 5407 - RNA, 27 nt, Artificial Sequence
  Description of Artificial Sequence: Synthetic oligonucleotide
cuuagguauuccacauucucagcugug

SEQ ID NO: 5408 - RNA, 27 nt, Artificial Sequence
  Description of Artificial Sequence: Synthetic oligonucleotide
ugagccucaaauuaggagauacguuuu

SEQ ID NO: 5409 - RNA, 27 nt, Artificial Sequence
  Description of Artificial Sequence: Synthetic oligonucleotide
ccaauuguagagaaauuauuuuaggaa

SEQ ID NO: 5410 - RNA, 27 nt, Artificial Sequence
  Description of Artificial Sequence: Synthetic oligonucleotide
ggcuccuaacuagcugaaucuuccaau

SEQ ID NO: 5411 - RNA, 27 nt, Artificial Sequence
  Description of Artificial Sequence: Synthetic oligonucleotide
guggauauugacuaggagaguuuaaaa

SEQ ID NO: 5412 - RNA, 27 nt, Artificial Sequence
  Description of Artificial Sequence: Synthetic oligonucleotide
ugugacugaacauaacuguaggcugaa

SEQ ID NO: 5413 - RNA, 27 nt, Artificial Sequence
  Description of Artificial Sequence: Synthetic oligonucleotide
guaugugugugugacugaacauaacug

SEQ ID NO: 5414 - RNA, 27 nt, Artificial Sequence
  Description of Artificial Sequence: Synthetic oligonucleotide
aagcaaaaggaacauuuuguaugugug

SEQ ID NO: 5415 - RNA, 27 nt, Artificial Sequence
  Description of Artificial Sequence: Synthetic oligonucleotide
aaaaauuacuuuaaaagcaaaaggaac

SEQ ID NO: 5416 - RNA, 27 nt, Artificial Sequence
  Description of Artificial Sequence: Synthetic oligonucleotide
ccauugacuguugcuucacaggucaga

SEQ ID NO: 5417 - RNA, 27 nt, Artificial Sequence
  Description of Artificial Sequence: Synthetic oligonucleotide
auugguuugucgaugugugagauaguu

SEQ ID NO: 5418 - RNA, 27 nt, Artificial Sequence
  Description of Artificial Sequence: Synthetic oligonucleotide
agugguagcaguacaauugaggacaag

SEQ ID NO: 5419 - RNA, 27 nt, Artificial Sequence
  Description of Artificial Sequence: Synthetic oligonucleotide
uaagaccgcuugccagcuacgguuuca

SEQ ID NO: 5420 - RNA, 27 nt, Artificial Sequence
  Description of Artificial Sequence: Synthetic oligonucleotide
agccgguaagaccgcuugccagcuacg

SEQ ID NO: 5421 - RNA, 27 nt, Artificial Sequence
  Description of Artificial Sequence: Synthetic oligonucleotide
gguaacccaucuuuuaaccauacaacu

SEQ ID NO: 5422 - RNA, 27 nt, Artificial Sequence
  Description of Artificial Sequence: Synthetic oligonucleotide
ucgcagguaacccaucuuuuaaccaua

SEQ ID NO: 5423 - RNA, 27 nt, Artificial Sequence
  Description of Artificial Sequence: Synthetic oligonucleotide
cucagcaagauuguauaauucccugca

SEQ ID NO: 5424 - RNA, 27 nt, Artificial Sequence
  Description of Artificial Sequence: Synthetic oligonucleotide
acuguuuuaugcucagcaagauuguau

SEQ ID NO: 5425 - RNA, 27 nt, Artificial Sequence
  Description of Artificial Sequence: Synthetic oligonucleotide
aggauaaaggacucuucauuauuggaa

SEQ ID NO: 5426 - RNA, 27 nt, Artificial Sequence
  Description of Artificial Sequence: Synthetic oligonucleotide
caacuugcguuggaacauccaaagugu

SEQ ID NO: 5427 - RNA, 27 nt, Artificial Sequence
  Description of Artificial Sequence: Synthetic oligonucleotide
augguuucaguuuaguggaagcauuua

SEQ ID NO: 5428 - RNA, 27 nt, Artificial Sequence
  Description of Artificial Sequence: Synthetic oligonucleotide
auauuuaacaaagucaaacuuucucac

SEQ ID NO: 5429 - RNA, 27 nt, Artificial Sequence
  Description of Artificial Sequence: Synthetic oligonucleotide
aacuuuuaauauacaguaguucuuuuc

SEQ ID NO: 5430 - RNA, 27 nt, Artificial Sequence
  Description of Artificial Sequence: Synthetic oligonucleotide
guuaagucaaaacccguauuucuaaag

SEQ ID NO: 5431 - RNA, 27 nt, Artificial Sequence
  Description of Artificial Sequence: Synthetic oligonucleotide
gugcugaguuugcuguacccauguuga

SEQ ID NO: 5432 - RNA, 27 nt, Artificial Sequence
  Description of Artificial Sequence: Synthetic oligonucleotide
ugaggucagcaucuucugugucuuuac

SEQ ID NO: 5433 - RNA, 27 nt, Artificial Sequence
  Description of Artificial Sequence: Synthetic oligonucleotide
gcgaucugaauaaaccucccuacuagc

SEQ ID NO: 5434 - RNA, 27 nt, Artificial Sequence
  Description of Artificial Sequence: Synthetic oligonucleotide
aucccagaacccugcugcagaaggcca

SEQ ID NO: 5435 - RNA, 27 nt, Artificial Sequence
  Description of Artificial Sequence: Synthetic oligonucleotide
cauaauuuccaauauguaccagaccuu

SEQ ID NO: 5436 - RNA, 27 nt, Artificial Sequence
  Description of Artificial Sequence: Synthetic oligonucleotide
cuagugcuuccaucggaaggacuaggu

SEQ ID NO: 5437 - RNA, 27 nt, Artificial Sequence
  Description of Artificial Sequence: Synthetic oligonucleotide
uccacauaaaaacaauauucacuggga

SEQ ID NO: 5438 - RNA, 27 nt, Artificial Sequence
  Description of Artificial Sequence: Synthetic oligonucleotide
ucuaccaauuccaacuugaauucauug

SEQ ID NO: 5439 - RNA, 27 nt, Artificial Sequence
  Description of Artificial Sequence: Synthetic oligonucleotide
ucuccaagucuaaaucuguguccugag

SEQ ID NO: 5440 - RNA, 27 nt, Artificial Sequence
  Description of Artificial Sequence: Synthetic oligonucleotide
uggaauacuguaacugugcuuugagga

SEQ ID NO: 5441 - RNA, 27 nt, Artificial Sequence
  Description of Artificial Sequence: Synthetic oligonucleotide
uuaauucaucagugguggcagugguag

SEQ ID NO: 5442 - RNA, 27 nt, Artificial Sequence
  Description of Artificial Sequence: Synthetic oligonucleotide
gugaugauguggcacuaguaguuucuu

SEQ ID NO: 5443 - RNA, 27 nt, Artificial Sequence
  Description of Artificial Sequence: Synthetic oligonucleotide
ucuguuuggugaggcuguccgacuuug

SEQ ID NO: 5444 - RNA, 27 nt, Artificial Sequence
  Description of Artificial Sequence: Synthetic oligonucleotide
ccaucauguuccauuuuucgcuuucuc

SEQ ID NO: 5445 - RNA, 27 nt, Artificial Sequence
  Description of Artificial Sequence: Synthetic oligonucleotide
gcagucuacaugcuaaaucagagggua

SEQ ID NO: 5446 - RNA, 27 nt, Artificial Sequence
  Description of Artificial Sequence: Synthetic oligonucleotide
cauaaauagauccuuaaauagcucaaa

SEQ ID NO: 5447 - RNA, 27 nt, Artificial Sequence
  Description of Artificial Sequence: Synthetic oligonucleotide
ugauaauagugcuuuuucaccuuuuuc

SEQ ID NO: 5448 - RNA, 27 nt, Artificial Sequence
  Description of Artificial Sequence: Synthetic oligonucleotide
gcagaacugauaauagugcuuuuucac

SEQ ID NO: 5449 - RNA, 27 nt, Artificial Sequence
  Description of Artificial Sequence: Synthetic oligonucleotide
guagguuuaaucuuucuuuucagccau

SEQ ID NO: 5450 - RNA, 27 nt, Artificial Sequence
  Description of Artificial Sequence: Synthetic oligonucleotide
agaaggauuuuauuauaaggguuuaau

SEQ ID NO: 5451 - RNA, 27 nt, Artificial Sequence
  Description of Artificial Sequence: Synthetic oligonucleotide
gucuacagcauuggcuaauaguaugaa

SEQ ID NO: 5452 - RNA, 27 nt, Artificial Sequence
  Description of Artificial Sequence: Synthetic oligonucleotide
cuauuccuaucaaaaugcuucugucua

SEQ ID NO: 5453 - RNA, 27 nt, Artificial Sequence
  Description of Artificial Sequence: Synthetic oligonucleotide
ucagggccauuaucuuauuugcucuau

SEQ ID NO: 5454 - RNA, 27 nt, Artificial Sequence
  Description of Artificial Sequence: Synthetic oligonucleotide
ugcuugaggaagagaaaaauguugguc

SEQ ID NO: 5455 - RNA, 27 nt, Artificial Sequence
  Description of Artificial Sequence: Synthetic oligonucleotide
ugggcugaacuuuucucauacuuaaag

SEQ ID NO: 5456 - RNA, 27 nt, Artificial Sequence
  Description of Artificial Sequence: Synthetic oligonucleotide
gguucagcagccaucuuuauuccugcg

SEQ ID NO: 5457 - RNA, 27 nt, Artificial Sequence
  Description of Artificial Sequence: Synthetic oligonucleotide
ugaagagaacuuggucauucaaauuuc

SEQ ID NO: 5458 - RNA, 27 nt, Artificial Sequence
  Description of Artificial Sequence: Synthetic oligonucleotide
cucuaggcuggcuaucuuuauacauac

SEQ ID NO: 5459 - RNA, 27 nt, Artificial Sequence
  Description of Artificial Sequence: Synthetic oligonucleotide
acacuucacagagauaguuacagccau

SEQ ID NO: 5460 - RNA, 27 nt, Artificial Sequence
  Description of Artificial Sequence: Synthetic oligonucleotide
uugaaauuuucucacacuucacagaga

SEQ ID NO: 5461 - RNA, 27 nt, Artificial Sequence
  Description of Artificial Sequence: Synthetic oligonucleotide
ucaggaggauucauuuccuuaaaggaa

SEQ ID NO: 5462 - RNA, 27 nt, Artificial Sequence
  Description of Artificial Sequence: Synthetic oligonucleotide
auaugaugucacuuuuuguauccuuga

SEQ ID NO: 5463 - RNA, 27 nt, Artificial Sequence
  Description of Artificial Sequence: Synthetic oligonucleotide
uaugaugaagauucaaauugcaucuua

SEQ ID NO: 5464 - RNA, 27 nt, Artificial Sequence
  Description of Artificial Sequence: Synthetic oligonucleotide
uuaauagcuagucuucguuuugaacag

SEQ ID NO: 5465 - RNA, 27 nt, Artificial Sequence
  Description of Artificial Sequence: Synthetic oligonucleotide
auuuuuaguagagaugagguuucacca

SEQ ID NO: 5466 - RNA, 27 nt, Artificial Sequence
  Description of Artificial Sequence: Synthetic oligonucleotide
aggcgagauagagcuucucuuucguuc

SEQ ID NO: 5467 - RNA, 27 nt, Artificial Sequence
  Description of Artificial Sequence: Synthetic oligonucleotide
aacuggaccgaaggcgcuuguggagaa

SEQ ID NO: 5468 - RNA, 27 nt, Artificial Sequence
  Description of Artificial Sequence: Synthetic oligonucleotide
gcggcuacaucuuuggaaucuucuccu

SEQ ID NO: 5469 - RNA, 27 nt, Artificial Sequence
  Description of Artificial Sequence: Synthetic oligonucleotide
caagucuccucauugaauccagauugg

SEQ ID NO: 5470 - RNA, 27 nt, Artificial Sequence
  Description of Artificial Sequence: Synthetic oligonucleotide
uccucacuacucucaaaucuguucugg

SEQ ID NO: 5471 - RNA, 27 nt, Artificial Sequence
  Description of Artificial Sequence: Synthetic oligonucleotide
uuuguacucaucugcacagcucuggcu

SEQ ID NO: 5472 - RNA, 27 nt, Artificial Sequence
  Description of Artificial Sequence: Synthetic oligonucleotide
gcccauuaacaacaacaaucugaggug

SEQ ID NO: 5473 - RNA, 27 nt, Artificial Sequence
  Description of Artificial Sequence: Synthetic oligonucleotide
aauaaauuaaaaauaauuaaaauagug

SEQ ID NO: 5474 - RNA, 27 nt, Artificial Sequence
  Description of Artificial Sequence: Synthetic oligonucleotide
cauauuuaaauauuaauaaauuaaaaa

SEQ ID NO: 5475 - RNA, 27 nt, Artificial Sequence
  Description of Artificial Sequence: Synthetic oligonucleotide
gaaacaaaggauauucaaacugcauag

SEQ ID NO: 5476 - RNA, 27 nt, Artificial Sequence
  Description of Artificial Sequence: Synthetic oligonucleotide
caaacacuuagacgccagcagcauggg

SEQ ID NO: 5477 - RNA, 27 nt, Artificial Sequence
  Description of Artificial Sequence: Synthetic oligonucleotide
uuugucacaggugaaaugcacaucuga

SEQ ID NO: 5478 - RNA, 27 nt, Artificial Sequence
  Description of Artificial Sequence: Synthetic oligonucleotide
uaauucagccuggcacagguuuugauc

SEQ ID NO: 5479 - RNA, 27 nt, Artificial Sequence
  Description of Artificial Sequence: Synthetic oligonucleotide
auuguaagaaugacuacccacauucac

SEQ ID NO: 5480 - RNA, 27 nt, Artificial Sequence
  Description of Artificial Sequence: Synthetic oligonucleotide
caauuguaagaaugacuacccacauuc

SEQ ID NO: 5481 - RNA, 27 nt, Artificial Sequence
  Description of Artificial Sequence: Synthetic oligonucleotide
guacacucucugaugcucauuuucaua

SEQ ID NO: 5482 - RNA, 27 nt, Artificial Sequence
  Description of Artificial Sequence: Synthetic oligonucleotide
cugcugaguucuacaugaaaagcaaau

SEQ ID NO: 5483 - RNA, 27 nt, Artificial Sequence
  Description of Artificial Sequence: Synthetic oligonucleotide
uacugaaaauaaauauagaaauacaac

SEQ ID NO: 5484 - RNA, 27 nt, Artificial Sequence
  Description of Artificial Sequence: Synthetic oligonucleotide
uuccauuuaagaaacauuaaucaaaac

SEQ ID NO: 5485 - RNA, 27 nt, Artificial Sequence
  Description of Artificial Sequence: Synthetic oligonucleotide
acaauuuuaggcacuauacacguuguu

SEQ ID NO: 5486 - RNA, 27 nt, Artificial Sequence
  Description of Artificial Sequence: Synthetic oligonucleotide
ccagauguuaguagccaaggauauggu

SEQ ID NO: 5487 - RNA, 27 nt, Artificial Sequence
  Description of Artificial Sequence: Synthetic oligonucleotide
agcucacagucuccagauguuaguagc

SEQ ID NO: 5488 - RNA, 27 nt, Artificial Sequence
  Description of Artificial Sequence: Synthetic oligonucleotide
auuaauaaaaagcacacaacuuauggc

SEQ ID NO: 5489 - RNA, 27 nt, Artificial Sequence
  Description of Artificial Sequence: Synthetic oligonucleotide
aauguaagaagagccaaaaugaugcau

SEQ ID NO: 5490 - RNA, 27 nt, Artificial Sequence
  Description of Artificial Sequence: Synthetic oligonucleotide
acauuuuuacaaauguaagaagagcca

SEQ ID NO: 5491 - RNA, 27 nt, Artificial Sequence
  Description of Artificial Sequence: Synthetic oligonucleotide
aauaugaauuaagaugaccuaaucugu

SEQ ID NO: 5492 - RNA, 27 nt, Artificial Sequence
  Description of Artificial Sequence: Synthetic oligonucleotide
ucaugauuaguucuuucaauuccaucc

SEQ ID NO: 5493 - RNA, 27 nt, Artificial Sequence
  Description of Artificial Sequence: Synthetic oligonucleotide
cccaagagcagaaggaaugagugugca

SEQ ID NO: 5494 - RNA, 27 nt, Artificial Sequence
  Description of Artificial Sequence: Synthetic oligonucleotide
cucaaagcuacugguuaccucuacacc

SEQ ID NO: 5495 - RNA, 27 nt, Artificial Sequence
  Description of Artificial Sequence: Synthetic oligonucleotide
ugaaauauuacguggcaugugguuggg

SEQ ID NO: 5496 - RNA, 27 nt, Artificial Sequence
  Description of Artificial Sequence: Synthetic oligonucleotide
agugaagagaauaacuuguuuccgaag

SEQ ID NO: 5497 - RNA, 27 nt, Artificial Sequence
  Description of Artificial Sequence: Synthetic oligonucleotide
uuucuuagcauuaguuauugggaguga

SEQ ID NO: 5498 - RNA, 27 nt, Artificial Sequence
  Description of Artificial Sequence: Synthetic oligonucleotide
uugauuuucagcauuucuuagcauuag

SEQ ID NO: 5499 - RNA, 27 nt, Artificial Sequence
  Description of Artificial Sequence: Synthetic oligonucleotide
aaaguaaucauauuuagagaaagacag

SEQ ID NO: 5500 - RNA, 27 nt, Artificial Sequence
  Description of Artificial Sequence: Synthetic oligonucleotide
uguagaacaaaaugccugaaauucagc

SEQ ID NO: 5501 - RNA, 27 nt, Artificial Sequence
  Description of Artificial Sequence: Synthetic oligonucleotide
gagagucccgggugagagggaaucgcc

SEQ ID NO: 5502 - RNA, 27 nt, Artificial Sequence
  Description of Artificial Sequence: Synthetic oligonucleotide
cuuuacuuuaaagguucacuuuccuug

SEQ ID NO: 5503 - RNA, 27 nt, Artificial Sequence
  Description of Artificial Sequence: Synthetic oligonucleotide
ccaggcuuccagagcaugcagccuccu

SEQ ID NO: 5504 - RNA, 27 nt, Artificial Sequence
  Description of Artificial Sequence: Synthetic oligonucleotide
cucucuuuuguuuucuguucagagaaa

SEQ ID NO: 5505 - RNA, 27 nt, Artificial Sequence
  Description of Artificial Sequence: Synthetic oligonucleotide
cggcauaacugauuacagccaaguuca

SEQ ID NO: 5506 - RNA, 27 nt, Artificial Sequence
  Description of Artificial Sequence: Synthetic oligonucleotide
uggacuucuuuuaauuuuggcuucuuc

SEQ ID NO: 5507 - RNA, 27 nt, Artificial Sequence
  Description of Artificial Sequence: Synthetic oligonucleotide
uaaccucaccuggacuucuuuuaauuu

SEQ ID NO: 5508 - RNA, 27 nt, Artificial Sequence
  Description of Artificial Sequence: Synthetic oligonucleotide
guccucuucccgauaauccggauucag

SEQ ID NO: 5509 - RNA, 27 nt, Artificial Sequence
  Description of Artificial Sequence: Synthetic oligonucleotide
acaauacuugcuuugaugucacauuaa

SEQ ID NO: 5510 - RNA, 27 nt, Artificial Sequence
  Description of Artificial Sequence: Synthetic oligonucleotide
gagugcuacaauacuugcuuugauguc

SEQ ID NO: 5511 - RNA, 27 nt, Artificial Sequence
  Description of Artificial Sequence: Synthetic oligonucleotide
auuugugguuuuguuuucucucucucu

SEQ ID NO: 5512 - RNA, 27 nt, Artificial Sequence
  Description of Artificial Sequence: Synthetic oligonucleotide
uguaugggcuuaaauacuacagcgagg

SEQ ID NO: 5513 - RNA, 27 nt, Artificial Sequence
  Description of Artificial Sequence: Synthetic oligonucleotide
cuguaugggcuuaaauacuacagcgag

SEQ ID NO: 5514 - RNA, 27 nt, Artificial Sequence
  Description of Artificial Sequence: Synthetic oligonucleotide
ggaagguuucuguaugggcuuaaauac

SEQ ID NO: 5515 - RNA, 27 nt, Artificial Sequence
  Description of Artificial Sequence: Synthetic oligonucleotide
guagguauaccauguuuauuuuaauac

SEQ ID NO: 5516 - RNA, 27 nt, Artificial Sequence
  Description of Artificial Sequence: Synthetic oligonucleotide
uccgaaaacuggccgaucagaacagcc

SEQ ID NO: 5517 - RNA, 27 nt, Artificial Sequence
  Description of Artificial Sequence: Synthetic oligonucleotide
cccuguuccaaaguucaaauuauuugu

SEQ ID NO: 5518 - RNA, 27 nt, Artificial Sequence
  Description of Artificial Sequence: Synthetic oligonucleotide
acuggaaaguuaaauuaaggucgcaau

SEQ ID NO: 5519 - RNA, 27 nt, Artificial Sequence
  Description of Artificial Sequence: Synthetic oligonucleotide
caaaaccaaacuuuagcuuucucagcc

SEQ ID NO: 5520 - RNA, 27 nt, Artificial Sequence
  Description of Artificial Sequence: Synthetic oligonucleotide
uacagugggaaguagcaucuuuacuuu

SEQ ID NO: 5521 - RNA, 27 nt, Artificial Sequence
  Description of Artificial Sequence: Synthetic oligonucleotide
ucauaugguaucagcaauuaagcagua

SEQ ID NO: 5522 - RNA, 27 nt, Artificial Sequence
  Description of Artificial Sequence: Synthetic oligonucleotide
cagcccauguuucauucauaugguauc

SEQ ID NO: 5523 - RNA, 27 nt, Artificial Sequence
  Description of Artificial Sequence: Synthetic oligonucleotide
uaugaaaaaguuggauaagaaaguugg

SEQ ID NO: 5524 - RNA, 27 nt, Artificial Sequence
  Description of Artificial Sequence: Synthetic oligonucleotide
uccggccucaugaugucaugcaaggcu

SEQ ID NO: 5525 - RNA, 27 nt, Artificial Sequence
  Description of Artificial Sequence: Synthetic oligonucleotide
acaaaugcagucauauacaaauucagg

SEQ ID NO: 5526 - RNA, 27 nt, Artificial Sequence
  Description of Artificial Sequence: Synthetic oligonucleotide
gguaguaaacauucuacuaggauucuu

SEQ ID NO: 5527 - RNA, 27 nt, Artificial Sequence
  Description of Artificial Sequence: Synthetic oligonucleotide
uuucaucaaaaaauucuucccuuucug

SEQ ID NO: 5528 - RNA, 27 nt, Artificial Sequence
  Description of Artificial Sequence: Synthetic oligonucleotide
aaauucacacacuggcaugccgauagc

SEQ ID NO: 5529 - RNA, 27 nt, Artificial Sequence
  Description of Artificial Sequence: Synthetic oligonucleotide
acauacauugcucuacuaugaggugaa

SEQ ID NO: 5530 - RNA, 27 nt, Artificial Sequence
  Description of Artificial Sequence: Synthetic oligonucleotide
uauauaugugcuuuggcaauucuggug

SEQ ID NO: 5531 - RNA, 27 nt, Artificial Sequence
  Description of Artificial Sequence: Synthetic oligonucleotide
ggagaaacuauuacccagaucaccacu

SEQ ID NO: 5532 - RNA, 27 nt, Artificial Sequence
  Description of Artificial Sequence: Synthetic oligonucleotide
auuuggagaaacuauuacccagaucac

SEQ ID NO: 5533 - RNA, 27 nt, Artificial Sequence
  Description of Artificial Sequence: Synthetic oligonucleotide
uuucuaggaaguauucaucacauccac

SEQ ID NO: 5534 - RNA, 27 nt, Artificial Sequence
  Description of Artificial Sequence: Synthetic oligonucleotide
cauauaugguguagcuguggaaaugcg

SEQ ID NO: 5535 - RNA, 27 nt, Artificial Sequence
  Description of Artificial Sequence: Synthetic oligonucleotide
cuccauucauauaugguguagcugugg

SEQ ID NO: 5536 - RNA, 27 nt, Artificial Sequence
  Description of Artificial Sequence: Synthetic oligonucleotide
aucuucuucucguguaagaacugcagc

SEQ ID NO: 5537 - RNA, 27 nt, Artificial Sequence
  Description of Artificial Sequence: Synthetic oligonucleotide
ucccuguaaaugaucuucuucucgugu

SEQ ID NO: 5538 - RNA, 27 nt, Artificial Sequence
  Description of Artificial Sequence: Synthetic oligonucleotide
gucccuguaaaugaucuucuucucgug

SEQ ID NO: 5539 - RNA, 27 nt, Artificial Sequence
  Description of Artificial Sequence: Synthetic oligonucleotide
ucaggucccuguaaaugaucuucuucu

SEQ ID NO: 5540 - RNA, 27 nt, Artificial Sequence
  Description of Artificial Sequence: Synthetic oligonucleotide
gaugcagucaaacaccucuuccucugu

SEQ ID NO: 5541 - RNA, 27 nt, Artificial Sequence
  Description of Artificial Sequence: Synthetic oligonucleotide
cgaugcagucaaacaccucuuccucug

SEQ ID NO: 5542 - RNA, 27 nt, Artificial Sequence
  Description of Artificial Sequence: Synthetic oligonucleotide
cccugugaacucgcccucaaaguagcg

SEQ ID NO: 5543 - RNA, 27 nt, Artificial Sequence
  Description of Artificial Sequence: Synthetic oligonucleotide
ggacagaggugccaggagaugcccuca

SEQ ID NO: 5544 - RNA, 27 nt, Artificial Sequence
  Description of Artificial Sequence: Synthetic oligonucleotide
uuaaaaagacaaaccauaucacuccuu

SEQ ID NO: 5545 - RNA, 27 nt, Artificial Sequence
  Description of Artificial Sequence: Synthetic oligonucleotide
cuuaaaaagacaaaccauaucacuccu

SEQ ID NO: 5546 - RNA, 27 nt, Artificial Sequence
  Description of Artificial Sequence: Synthetic oligonucleotide
gacaaccuuuaggaucuuuacugcaac

SEQ ID NO: 5547 - RNA, 27 nt, Artificial Sequence
  Description of Artificial Sequence: Synthetic oligonucleotide
gucgacaaccuuuaggaucuuuacugc

SEQ ID NO: 5548 - RNA, 27 nt, Artificial Sequence
  Description of Artificial Sequence: Synthetic oligonucleotide
acaauugccagguuguccuuugucaug

SEQ ID NO: 5549 - RNA, 27 nt, Artificial Sequence
  Description of Artificial Sequence: Synthetic oligonucleotide
ccucgcaccacugggucacaauugcca

SEQ ID NO: 5550 - RNA, 27 nt, Artificial Sequence
  Description of Artificial Sequence: Synthetic oligonucleotide
auuucaugucucuauggaugauguucu

SEQ ID NO: 5551 - RNA, 27 nt, Artificial Sequence
  Description of Artificial Sequence: Synthetic oligonucleotide
uggagaaauauauuguuggauuucaug

SEQ ID NO: 5552 - RNA, 27 nt, Artificial Sequence
  Description of Artificial Sequence: Synthetic oligonucleotide
agccuucauggagaaauauauuguugg

SEQ ID NO: 5553 - RNA, 27 nt, Artificial Sequence
  Description of Artificial Sequence: Synthetic oligonucleotide
accacuccagcgugacuuuacuguugc

SEQ ID NO: 5554 - RNA, 27 nt, Artificial Sequence
  Description of Artificial Sequence: Synthetic oligonucleotide
ccucucuuccuuuacuuucuucacaca

SEQ ID NO: 5555 - RNA, 27 nt, Artificial Sequence
  Description of Artificial Sequence: Synthetic oligonucleotide
gcccgaugcaaggauggcucggaagcg

SEQ ID NO: 5556 - RNA, 27 nt, Artificial Sequence
  Description of Artificial Sequence: Synthetic oligonucleotide
cacaguaggauauucaaccuccauuuc

SEQ ID NO: 5557 - RNA, 27 nt, Artificial Sequence
  Description of Artificial Sequence: Synthetic oligonucleotide
uuacacaguaggauauucaaccuccau

SEQ ID NO: 5558 - RNA, 27 nt, Artificial Sequence
  Description of Artificial Sequence: Synthetic oligonucleotide
uacacuacaagggaaaacucaaaaucu

SEQ ID NO: 5559 - RNA, 27 nt, Artificial Sequence
  Description of Artificial Sequence: Synthetic oligonucleotide
caaucaacaaagaacaaacaggauaaa

SEQ ID NO: 5560 - RNA, 27 nt, Artificial Sequence
  Description of Artificial Sequence: Synthetic oligonucleotide
uuucaaucaacaaagaacaaacaggau

SEQ ID NO: 5561 - RNA, 27 nt, Artificial Sequence
  Description of Artificial Sequence: Synthetic oligonucleotide
auggaagaaaaagaaggcuguagagaa

SEQ ID NO: 5562 - RNA, 27 nt, Artificial Sequence
  Description of Artificial Sequence: Synthetic oligonucleotide
uagaaggaagauuagcuauggaagaaa

SEQ ID NO: 5563 - RNA, 27 nt, Artificial Sequence
  Description of Artificial Sequence: Synthetic oligonucleotide
augaagcauucaacaggaagauuauuu

SEQ ID NO: 5564 - RNA, 27 nt, Artificial Sequence
  Description of Artificial Sequence: Synthetic oligonucleotide
caugaagcauucaacaggaagauuauu

SEQ ID NO: 5565 - RNA, 27 nt, Artificial Sequence
  Description of Artificial Sequence: Synthetic oligonucleotide
ucaaaguagaauucaagucaugaagca

SEQ ID NO: 5566 - RNA, 27 nt, Artificial Sequence
  Description of Artificial Sequence: Synthetic oligonucleotide
gucuguaguugcuucucucccucuuag

SEQ ID NO: 5567 - RNA, 27 nt, Artificial Sequence
  Description of Artificial Sequence: Synthetic oligonucleotide
guugaccuuggucugguaggagacggc

SEQ ID NO: 5568 - RNA, 27 nt, Artificial Sequence
  Description of Artificial Sequence: Synthetic oligonucleotide
gucgagauagucgggccgauugaucuc

SEQ ID NO: 5569 - RNA, 27 nt, Artificial Sequence
  Description of Artificial Sequence: Synthetic oligonucleotide
guuugggaagguuggauguucguccuc

SEQ ID NO: 5570 - RNA, 27 nt, Artificial Sequence
  Description of Artificial Sequence: Synthetic oligonucleotide
aguucuaagcuuggguuccgacccuaa

SEQ ID NO: 5571 - RNA, 27 nt, Artificial Sequence
  Description of Artificial Sequence: Synthetic oligonucleotide
uuaaaguucuaagcuuggguuccgacc

SEQ ID NO: 5572 - RNA, 27 nt, Artificial Sequence
  Description of Artificial Sequence: Synthetic oligonucleotide
guugcuuaaaguucuaagcuuggguuc

SEQ ID NO: 5573 - RNA, 27 nt, Artificial Sequence
  Description of Artificial Sequence: Synthetic oligonucleotide
gugguggucuuguugcuuaaaguucua

SEQ ID NO: 5574 - RNA, 27 nt, Artificial Sequence
  Description of Artificial Sequence: Synthetic oligonucleotide
acuuuauuucucgccacugaauaguag

SEQ ID NO: 5575 - RNA, 27 nt, Artificial Sequence
  Description of Artificial Sequence: Synthetic oligonucleotide
aacuuuauuucucgccacugaauagua

SEQ ID NO: 5576 - RNA, 27 nt, Artificial Sequence
  Description of Artificial Sequence: Synthetic oligonucleotide
ggaucauuuccuguuaucuguguuugu

SEQ ID NO: 5577 - RNA, 27 nt, Artificial Sequence
  Description of Artificial Sequence: Synthetic oligonucleotide
guuucauuucuucucuuuucuuaaggc

SEQ ID NO: 5578 - RNA, 27 nt, Artificial Sequence
  Description of Artificial Sequence: Synthetic oligonucleotide
ggaggauggaaacacacuccuucaguu

SEQ ID NO: 5579 - RNA, 27 nt, Artificial Sequence
  Description of Artificial Sequence: Synthetic oligonucleotide
ucaaagauuuucagucccgcggugaca

SEQ ID NO: 5580 - RNA, 27 nt, Artificial Sequence
  Description of Artificial Sequence: Synthetic oligonucleotide
ccugaacggcacgcuuauuucugcugu

SEQ ID NO: 5581 - RNA, 27 nt, Artificial Sequence
  Description of Artificial Sequence: Synthetic oligonucleotide
cuucuggacccugaacggcacgcuuau

SEQ ID NO: 5582 - RNA, 27 nt, Artificial Sequence
  Description of Artificial Sequence: Synthetic oligonucleotide
caagcagucuugagugacuguuucuuc

SEQ ID NO: 5583 - RNA, 27 nt, Artificial Sequence
  Description of Artificial Sequence: Synthetic oligonucleotide
ccaaagacauggaccuucuuccucuga

SEQ ID NO: 5584 - RNA, 27 nt, Artificial Sequence
  Description of Artificial Sequence: Synthetic oligonucleotide
guguuucaggcauauuuugaauacauc

SEQ ID NO: 5585 - RNA, 27 nt, Artificial Sequence
  Description of Artificial Sequence: Synthetic oligonucleotide
gagguacagagaaagggaggaaaauag

SEQ ID NO: 5586 - RNA, 27 nt, Artificial Sequence
  Description of Artificial Sequence: Synthetic oligonucleotide
ucuugucuugcucuaucuuucuuuggu

SEQ ID NO: 5587 - RNA, 27 nt, Artificial Sequence
  Description of Artificial Sequence: Synthetic oligonucleotide
uuucuugucuugcucuaucuuucuuug

SEQ ID NO: 5588 - RNA, 27 nt, Artificial Sequence
  Description of Artificial Sequence: Synthetic oligonucleotide
ggaucuuguacaaacaaaugcuuucuc

SEQ ID NO: 5589 - RNA, 27 nt, Artificial Sequence
  Description of Artificial Sequence: Synthetic oligonucleotide
ucugcaaguacguucguuuaacucaag

SEQ ID NO: 5590 - RNA, 27 nt, Artificial Sequence
  Description of Artificial Sequence: Synthetic oligonucleotide
ucuguaucgaucguucuguaucagucu

SEQ ID NO: 5591 - RNA, 27 nt, Artificial Sequence
  Description of Artificial Sequence: Synthetic oligonucleotide
auuuauuuuuauauauauauaauauau

SEQ ID NO: 5592 - RNA, 27 nt, Artificial Sequence
  Description of Artificial Sequence: Synthetic oligonucleotide
auauuuauuuuuauauauauauaauau

SEQ ID NO: 5593 - RNA, 27 nt, Artificial Sequence
  Description of Artificial Sequence: Synthetic oligonucleotide
cacagcagucaaauacauccagugaag

SEQ ID NO: 5594 - RNA, 27 nt, Artificial Sequence
  Description of Artificial Sequence: Synthetic oligonucleotide
gucucucaucuccuccucuucccuguc

SEQ ID NO: 5595 - RNA, 27 nt, Artificial Sequence
  Description of Artificial Sequence: Synthetic oligonucleotide
ccaagugggacaaaaaaaagaucaugc

SEQ ID NO: 5596 - RNA, 14 nt, Artificial Sequence
  Description of Artificial Sequence: Synthetic oligonucleotide
guauuuugaugagg

SEQ ID NO: 5597 - RNA, 12 nt, Artificial Sequence
  Description of Artificial Sequence: Synthetic oligonucleotide
ggcccagaugau

SEQ ID NO: 5598 - RNA, 14 nt, Artificial Sequence
  Description of Artificial Sequence: Synthetic oligonucleotide
gggaagaaaacuau

SEQ ID NO: 5599 - RNA, 15 nt, Artificial Sequence
  Description of Artificial Sequence: Synthetic oligonucleotide
guuuuaauuuauuuc

SEQ ID NO: 5600 - RNA, 12 nt, Artificial Sequence
  Description of Artificial Sequence: Synthetic oligonucleotide
acguagggaaau

SEQ ID NO: 5601 - RNA, 12 nt, Artificial Sequence
  Description of Artificial Sequence: Synthetic oligonucleotide
ccaggguuuacc

SEQ ID NO: 5602 - RNA, 11 nt, Artificial Sequence
  Description of Artificial Sequence: Synthetic oligonucleotide
agcaagguuua

SEQ ID NO: 5603 - RNA, 12 nt, Artificial Sequence
  Description of Artificial Sequence: Synthetic oligonucleotide
uguauuauguug

SEQ ID NO: 5604 - RNA, 15 nt, Artificial Sequence
  Description of Artificial Sequence: Synthetic oligonucleotide
uuuuaaucuuuguga

SEQ ID NO: 5605 - RNA, 14 nt, Artificial Sequence
  Description of Artificial Sequence: Synthetic oligonucleotide
uuaaucuuugugac

SEQ ID NO: 5606 - RNA, 13 nt, Artificial Sequence
  Description of Artificial Sequence: Synthetic oligonucleotide
gcugcuuaugucu

SEQ ID NO: 5607 - RNA, 14 nt, Artificial Sequence
  Description of Artificial Sequence: Synthetic oligonucleotide
aaguguuucagaag

SEQ ID NO: 5608 - RNA, 13 nt, Artificial Sequence
  Description of Artificial Sequence: Synthetic oligonucleotide
gaccaucaauaag

SEQ ID NO: 5609 - RNA, 13 nt, Artificial Sequence
  Description of Artificial Sequence: Synthetic oligonucleotide
ccaucaauaagga

SEQ ID NO: 5610 - RNA, 14 nt, Artificial Sequence
  Description of Artificial Sequence: Synthetic oligonucleotide
ucaauaaggaagaa

SEQ ID NO: 5611 - RNA, 14 nt, Artificial Sequence
  Description of Artificial Sequence: Synthetic oligonucleotide
aauaaggaagaagc

SEQ ID NO: 5612 - RNA, 13 nt, Artificial Sequence
  Description of Artificial Sequence: Synthetic oligonucleotide
aggaagaagcccu

SEQ ID NO: 5613 - RNA, 13 nt, Artificial Sequence
  Description of Artificial Sequence: Synthetic oligonucleotide
gcauaacuaaagg

SEQ ID NO: 5614 - RNA, 14 nt, Artificial Sequence
  Description of Artificial Sequence: Synthetic oligonucleotide
cauaacuaaaggug

SEQ ID NO: 5615 - RNA, 12 nt, Artificial Sequence
  Description of Artificial Sequence: Synthetic oligonucleotide
cuacaucacgcc

SEQ ID NO: 5616 - RNA, 12 nt, Artificial Sequence
  Description of Artificial Sequence: Synthetic oligonucleotide
acuggauuuaag

SEQ ID NO: 5617 - RNA, 12 nt, Artificial Sequence
  Description of Artificial Sequence: Synthetic oligonucleotide
cuggauuuaagc

SEQ ID NO: 5618 - RNA, 13 nt, Artificial Sequence
  Description of Artificial Sequence: Synthetic oligonucleotide
gauuuaagcagag

SEQ ID NO: 5619 - RNA, 13 nt, Artificial Sequence
  Description of Artificial Sequence: Synthetic oligonucleotide
auuuaagcagagu

SEQ ID NO: 5620 - RNA, 13 nt, Artificial Sequence
  Description of Artificial Sequence: Synthetic oligonucleotide
uuaagcagaguuc

SEQ ID NO: 5621 - RNA, 13 nt, Artificial Sequence
  Description of Artificial Sequence: Synthetic oligonucleotide
uaagcagaguuca

SEQ ID NO: 5622 - RNA, 14 nt, Artificial Sequence
  Description of Artificial Sequence: Synthetic oligonucleotide
agcagaguucaaaa

SEQ ID NO: 5623 - RNA, 12 nt, Artificial Sequence
  Description of Artificial Sequence: Synthetic oligonucleotide
cucagggucuga

SEQ ID NO: 5624 - RNA, 13 nt, Artificial Sequence
  Description of Artificial Sequence: Synthetic oligonucleotide
caagcaacuacau

SEQ ID NO: 5625 - RNA, 12 nt, Artificial Sequence
  Description of Artificial Sequence: Synthetic oligonucleotide
aucaauggcagc

SEQ ID NO: 5626 - RNA, 11 nt, Artificial Sequence
  Description of Artificial Sequence: Synthetic oligonucleotide
uuccagcccac

SEQ ID NO: 5627 - RNA, 12 nt, Artificial Sequence
  Description of Artificial Sequence: Synthetic oligonucleotide
cagcugagaaug

SEQ ID NO: 5628 - RNA, 13 nt, Artificial Sequence
  Description of Artificial Sequence: Synthetic oligonucleotide
aacguaucuccua

SEQ ID NO: 5629 - RNA, 14 nt, Artificial Sequence
  Description of Artificial Sequence: Synthetic oligonucleotide
ccuaaaauaauuuc

SEQ ID NO: 5630 - RNA, 13 nt, Artificial Sequence
  Description of Artificial Sequence: Synthetic oligonucleotide
uggaagauucagc

SEQ ID NO: 5631 - RNA, 12 nt, Artificial Sequence
  Description of Artificial Sequence: Synthetic oligonucleotide
uuaaacucuccu

SEQ ID NO: 5632 - RNA, 12 nt, Artificial Sequence
  Description of Artificial Sequence: Synthetic oligonucleotide
cagccuacaguu

SEQ ID NO: 5633 - RNA, 13 nt, Artificial Sequence
  Description of Artificial Sequence: Synthetic oligonucleotide
guuauguucaguc

SEQ ID NO: 5634 - RNA, 13 nt, Artificial Sequence
  Description of Artificial Sequence: Synthetic oligonucleotide
cacauacaaaaug

SEQ ID NO: 5635 - RNA, 9 nt, Artificial Sequence
  Description of Artificial Sequence: Synthetic oligonucleotide
uccuuuugc

SEQ ID NO: 5636 - RNA, 12 nt, Artificial Sequence
  Description of Artificial Sequence: Synthetic oligonucleotide
ugaccugugaag

SEQ ID NO: 5637 - RNA, 12 nt, Artificial Sequence
  Description of Artificial Sequence: Synthetic oligonucleotide
cuaucucacaca

SEQ ID NO: 5638 - RNA, 13 nt, Artificial Sequence
  Description of Artificial Sequence: Synthetic oligonucleotide
uguccucaauugu

SEQ ID NO: 5639 - RNA, 12 nt, Artificial Sequence
  Description of Artificial Sequence: Synthetic oligonucleotide
aaaccguagcug

SEQ ID NO: 5640 - RNA, 12 nt, Artificial Sequence
  Description of Artificial Sequence: Synthetic oligonucleotide
uagcuggcaagc

SEQ ID NO: 5641 - RNA, 14 nt, Artificial Sequence
  Description of Artificial Sequence: Synthetic oligonucleotide
uuguaugguuaaaa

SEQ ID NO: 5642 - RNA, 14 nt, Artificial Sequence
  Description of Artificial Sequence: Synthetic oligonucleotide
ugguuaaaagaugg

SEQ ID NO: 5643 - RNA, 13 nt, Artificial Sequence
  Description of Artificial Sequence: Synthetic oligonucleotide
cagggaauuauac

SEQ ID NO: 5644 - RNA, 12 nt, Artificial Sequence
  Description of Artificial Sequence: Synthetic oligonucleotide
acaaucuugcug

SEQ ID NO: 5645 - RNA, 13 nt, Artificial Sequence
  Description of Artificial Sequence: Synthetic oligonucleotide
ccaauaaugaaga

SEQ ID NO: 5646 - RNA, 13 nt, Artificial Sequence
  Description of Artificial Sequence: Synthetic oligonucleotide
acuuuggauguuc

SEQ ID NO: 5647 - RNA, 12 nt, Artificial Sequence
  Description of Artificial Sequence: Synthetic oligonucleotide
aaugcuuccacu

SEQ ID NO: 5648 - RNA, 11 nt, Artificial Sequence
  Description of Artificial Sequence: Synthetic oligonucleotide
gagaaaguuug

SEQ ID NO: 5649 - RNA, 11 nt, Artificial Sequence
  Description of Artificial Sequence: Synthetic oligonucleotide
aaagaacuacu

SEQ ID NO: 5650 - RNA, 12 nt, Artificial Sequence
  Description of Artificial Sequence: Synthetic oligonucleotide
uuagaaauacgg

SEQ ID NO: 5651 - RNA, 12 nt, Artificial Sequence
  Description of Artificial Sequence: Synthetic oligonucleotide
aacauggguaca

SEQ ID NO: 5652 - RNA, 14 nt, Artificial Sequence
  Description of Artificial Sequence: Synthetic oligonucleotide
aaagacacagaaga

SEQ ID NO: 5653 - RNA, 11 nt, Artificial Sequence
  Description of Artificial Sequence: Synthetic oligonucleotide
uaguagggagg

SEQ ID NO: 5654 - RNA, 12 nt, Artificial Sequence
  Description of Artificial Sequence: Synthetic oligonucleotide
gccuucugcagc

SEQ ID NO: 5655 - RNA, 10 nt, Artificial Sequence
  Description of Artificial Sequence: Synthetic oligonucleotide
ggucugguac

SEQ ID NO: 5656 - RNA, 12 nt, Artificial Sequence
  Description of Artificial Sequence: Synthetic oligonucleotide
cuaguccuuccg

SEQ ID NO: 5657 - RNA, 12 nt, Artificial Sequence
  Description of Artificial Sequence: Synthetic oligonucleotide
ccagugaauauu

SEQ ID NO: 5658 - RNA, 13 nt, Artificial Sequence
  Description of Artificial Sequence: Synthetic oligonucleotide
augaauucaaguu

SEQ ID NO: 5659 - RNA, 12 nt, Artificial Sequence
  Description of Artificial Sequence: Synthetic oligonucleotide
caggacacagau

SEQ ID NO: 5660 - RNA, 12 nt, Artificial Sequence
  Description of Artificial Sequence: Synthetic oligonucleotide
cucaaagcacag

SEQ ID NO: 5661 - RNA, 10 nt, Artificial Sequence
  Description of Artificial Sequence: Synthetic oligonucleotide
accacugcca

SEQ ID NO: 5662 - RNA, 13 nt, Artificial Sequence
  Description of Artificial Sequence: Synthetic oligonucleotide
gaaacuacuagug

SEQ ID NO: 5663 - RNA, 12 nt, Artificial Sequence
  Description of Artificial Sequence: Synthetic oligonucleotide
aagucggacagc

SEQ ID NO: 5664 - RNA, 13 nt, Artificial Sequence
  Description of Artificial Sequence: Synthetic oligonucleotide
gaaagcgaaaaau

SEQ ID NO: 5665 - RNA, 13 nt, Artificial Sequence
  Description of Artificial Sequence: Synthetic oligonucleotide
cccucugauuuag

SEQ ID NO: 5666 - RNA, 12 nt, Artificial Sequence
  Description of Artificial Sequence: Synthetic oligonucleotide
ugagcuauuuaa

SEQ ID NO: 5667 - RNA, 13 nt, Artificial Sequence
  Description of Artificial Sequence: Synthetic oligonucleotide
aaaaggugaaaaa

SEQ ID NO: 5668 - RNA, 14 nt, Artificial Sequence
  Description of Artificial Sequence: Synthetic oligonucleotide
gaaaaagcacuauu

SEQ ID NO: 5669 - RNA, 12 nt, Artificial Sequence
  Description of Artificial Sequence: Synthetic oligonucleotide
ggcugaaaagaa

SEQ ID NO: 5670 - RNA, 12 nt, Artificial Sequence
  Description of Artificial Sequence: Synthetic oligonucleotide
uaaacccuuaua

SEQ ID NO: 5671 - RNA, 13 nt, Artificial Sequence
  Description of Artificial Sequence: Synthetic oligonucleotide
cauacuauuagcc

SEQ ID NO: 5672 - RNA, 12 nt, Artificial Sequence
  Description of Artificial Sequence: Synthetic oligonucleotide
gacagaagcauu

SEQ ID NO: 5673 - RNA, 14 nt, Artificial Sequence
  Description of Artificial Sequence: Synthetic oligonucleotide
agagcaaauaagau

SEQ ID NO: 5674 - RNA, 14 nt, Artificial Sequence
  Description of Artificial Sequence: Synthetic oligonucleotide
ccaacauuuuucuc

SEQ ID NO: 5675 - RNA, 15 nt, Artificial Sequence
  Description of Artificial Sequence: Synthetic oligonucleotide
uuaaguaugagaaaa

SEQ ID NO: 5676 - RNA, 14 nt, Artificial Sequence
  Description of Artificial Sequence: Synthetic oligonucleotide
caggaauaaagaug

SEQ ID NO: 5677 - RNA, 13 nt, Artificial Sequence
  Description of Artificial Sequence: Synthetic oligonucleotide
aauuugaaugacc

SEQ ID NO: 5678 - RNA, 14 nt, Artificial Sequence
  Description of Artificial Sequence: Synthetic oligonucleotide
auguauaaagauag

SEQ ID NO: 5679 - RNA, 12 nt, Artificial Sequence
  Description of Artificial Sequence: Synthetic oligonucleotide
ggcuguaacuau

SEQ ID NO: 5680 - RNA, 11 nt, Artificial Sequence
  Description of Artificial Sequence: Synthetic oligonucleotide
ucugugaagug

SEQ ID NO: 5681 - RNA, 14 nt, Artificial Sequence
  Description of Artificial Sequence: Synthetic oligonucleotide
ccuuuaaggaaaug

SEQ ID NO: 5682 - RNA, 13 nt, Artificial Sequence
  Description of Artificial Sequence: Synthetic oligonucleotide
aaggauacaaaaa

SEQ ID NO: 5683 - RNA, 12 nt, Artificial Sequence
  Description of Artificial Sequence: Synthetic oligonucleotide
agaugcaauuug

SEQ ID NO: 5684 - RNA, 12 nt, Artificial Sequence
  Description of Artificial Sequence: Synthetic oligonucleotide
guucaaaacgaa

SEQ ID NO: 5685 - RNA, 11 nt, Artificial Sequence
  Description of Artificial Sequence: Synthetic oligonucleotide
gugaaaccuca

SEQ ID NO: 5686 - RNA, 13 nt, Artificial Sequence
  Description of Artificial Sequence: Synthetic oligonucleotide
acgaaagagaagc

SEQ ID NO: 5687 - RNA, 12 nt, Artificial Sequence
  Description of Artificial Sequence: Synthetic oligonucleotide
cuccacaagcgc

SEQ ID NO: 5688 - RNA, 14 nt, Artificial Sequence
  Description of Artificial Sequence: Synthetic oligonucleotide
gagaagauuccaaa

SEQ ID NO: 5689 - RNA, 13 nt, Artificial Sequence
  Description of Artificial Sequence: Synthetic oligonucleotide
aaucuggauucaa

SEQ ID NO: 5690 - RNA, 13 nt, Artificial Sequence
  Description of Artificial Sequence: Synthetic oligonucleotide
agaacagauuuga

SEQ ID NO: 5691 - RNA, 11 nt, Artificial Sequence
  Description of Artificial Sequence: Synthetic oligonucleotide
ccagagcugug

SEQ ID NO: 5692 - RNA, 12 nt, Artificial Sequence
  Description of Artificial Sequence: Synthetic oligonucleotide
ccucagauuguu

SEQ ID NO: 5693 - RNA, 12 nt, Artificial Sequence
  Description of Artificial Sequence: Synthetic oligonucleotide
cuauuuuaauua

SEQ ID NO: 5694 - RNA, 13 nt, Artificial Sequence
  Description of Artificial Sequence: Synthetic oligonucleotide
uuuaauuuauuaa

SEQ ID NO: 5695 - RNA, 12 nt, Artificial Sequence
  Description of Artificial Sequence: Synthetic oligonucleotide
augcaguuugaa

SEQ ID NO: 5696 - RNA, 11 nt, Artificial Sequence
  Description of Artificial Sequence: Synthetic oligonucleotide
caugcugcugg

SEQ ID NO: 5697 - RNA, 13 nt, Artificial Sequence
  Description of Artificial Sequence: Synthetic oligonucleotide
agaugugcauuuc

SEQ ID NO: 5698 - RNA, 12 nt, Artificial Sequence
  Description of Artificial Sequence: Synthetic oligonucleotide
ucaaaaccugug

SEQ ID NO: 5699 - RNA, 11 nt, Artificial Sequence
  Description of Artificial Sequence: Synthetic oligonucleotide
gaaugugggua

SEQ ID NO: 5700 - RNA, 10 nt, Artificial Sequence
  Description of Artificial Sequence: Synthetic oligonucleotide
auguggguag

SEQ ID NO: 5701 - RNA, 13 nt, Artificial Sequence
  Description of Artificial Sequence: Synthetic oligonucleotide
ugaaaaugagcau

SEQ ID NO: 5702 - RNA, 13 nt, Artificial Sequence
  Description of Artificial Sequence: Synthetic oligonucleotide
uugcuuuucaugu

SEQ ID NO: 5703 - RNA, 12 nt, Artificial Sequence
  Description of Artificial Sequence: Synthetic oligonucleotide
uguauuucuaua

SEQ ID NO: 5704 - RNA, 13 nt, Artificial Sequence
  Description of Artificial Sequence: Synthetic oligonucleotide
uuugauuaauguu

SEQ ID NO: 5705 - RNA, 12 nt, Artificial Sequence
  Description of Artificial Sequence: Synthetic oligonucleotide
caacguguauag

SEQ ID NO: 5706 - RNA, 12 nt, Artificial Sequence
  Description of Artificial Sequence: Synthetic oligonucleotide
cauauccuuggc

SEQ ID NO: 5707 - RNA, 13 nt, Artificial Sequence
  Description of Artificial Sequence: Synthetic oligonucleotide
uacuaacaucugg

SEQ ID NO: 5708 - RNA, 11 nt, Artificial Sequence
  Description of Artificial Sequence: Synthetic oligonucleotide
cauaaguugug

SEQ ID NO: 5709 - RNA, 12 nt, Artificial Sequence
  Description of Artificial Sequence: Synthetic oligonucleotide
gcaucauuuugg

SEQ ID NO: 5710 - RNA, 10 nt, Artificial Sequence
  Description of Artificial Sequence: Synthetic oligonucleotide
gcucuucuua

SEQ ID NO: 5711 - RNA, 10 nt, Artificial Sequence
  Description of Artificial Sequence: Synthetic oligonucleotide
agauuagguc

SEQ ID NO: 5712 - RNA, 12 nt, Artificial Sequence
  Description of Artificial Sequence: Synthetic oligonucleotide
auggaauugaaa

SEQ ID NO: 5713 - RNA, 13 nt, Artificial Sequence
  Description of Artificial Sequence: Synthetic oligonucleotide
cacacucauuccu

SEQ ID NO: 5714 - RNA, 12 nt, Artificial Sequence
  Description of Artificial Sequence: Synthetic oligonucleotide
uguagagguaac

SEQ ID NO: 5715 - RNA, 11 nt, Artificial Sequence
  Description of Artificial Sequence: Synthetic oligonucleotide
caaccacaugc

SEQ ID NO: 5716 - RNA, 12 nt, Artificial Sequence
  Description of Artificial Sequence: Synthetic oligonucleotide
ucggaaacaagu

SEQ ID NO: 5717 - RNA, 11 nt, Artificial Sequence
  Description of Artificial Sequence: Synthetic oligonucleotide
acucccaauaa

SEQ ID NO: 5718 - RNA, 13 nt, Artificial Sequence
  Description of Artificial Sequence: Synthetic oligonucleotide
aaugcuaagaaau

SEQ ID NO: 5719 - RNA, 11 nt, Artificial Sequence
  Description of Artificial Sequence: Synthetic oligonucleotide
gucuuucucua

SEQ ID NO: 5720 - RNA, 11 nt, Artificial Sequence
  Description of Artificial Sequence: Synthetic oligonucleotide
ugaauuucagg

SEQ ID NO: 5721 - RNA, 13 nt, Artificial Sequence
  Description of Artificial Sequence: Synthetic oligonucleotide
cgauucccucuca

SEQ ID NO: 5722 - RNA, 11 nt, Artificial Sequence
  Description of Artificial Sequence: Synthetic oligonucleotide
aggaaagugaa

SEQ ID NO: 5723 - RNA, 12 nt, Artificial Sequence
  Description of Artificial Sequence: Synthetic oligonucleotide
gaggcugcaugc

SEQ ID NO: 5724 - RNA, 11 nt, Artificial Sequence
  Description of Artificial Sequence: Synthetic oligonucleotide
ucucugaacag

SEQ ID NO: 5725 - RNA, 12 nt, Artificial Sequence
  Description of Artificial Sequence: Synthetic oligonucleotide
aacuuggcugua

SEQ ID NO: 5726 - RNA, 12 nt, Artificial Sequence
  Description of Artificial Sequence: Synthetic oligonucleotide
agaagccaaaau

SEQ ID NO: 5727 - RNA, 14 nt, Artificial Sequence
  Description of Artificial Sequence: Synthetic oligonucleotide
auuaaaagaagucc

SEQ ID NO: 5728 - RNA, 14 nt, Artificial Sequence
  Description of Artificial Sequence: Synthetic oligonucleotide
gaauccggauuauc

SEQ ID NO: 5729 - RNA, 12 nt, Artificial Sequence
  Description of Artificial Sequence: Synthetic oligonucleotide
aaugugacauca

SEQ ID NO: 5730 - RNA, 13 nt, Artificial Sequence
  Description of Artificial Sequence: Synthetic oligonucleotide
caucaaagcaagu

SEQ ID NO: 5731 - RNA, 11 nt, Artificial Sequence
  Description of Artificial Sequence: Synthetic oligonucleotide
agagagagaaa

SEQ ID NO: 5732 - RNA, 13 nt, Artificial Sequence
  Description of Artificial Sequence: Synthetic oligonucleotide
ucgcuguaguauu

SEQ ID NO: 5733 - RNA, 14 nt, Artificial Sequence
  Description of Artificial Sequence: Synthetic oligonucleotide
cgcuguaguauuua

SEQ ID NO: 5734 - RNA, 13 nt, Artificial Sequence
  Description of Artificial Sequence: Synthetic oligonucleotide
auuuaagcccaua

SEQ ID NO: 5735 - RNA, 15 nt, Artificial Sequence
  Description of Artificial Sequence: Synthetic oligonucleotide
auuaaaauaaacaug

SEQ ID NO: 5736 - RNA, 12 nt, Artificial Sequence
  Description of Artificial Sequence: Synthetic oligonucleotide
cuguucugaucg

SEQ ID NO: 5737 - RNA, 16 nt, Artificial Sequence
  Description of Artificial Sequence: Synthetic oligonucleotide
aaauaauuugaacuuu

SEQ ID NO: 5738 - RNA, 12 nt, Artificial Sequence
  Description of Artificial Sequence: Synthetic oligonucleotide
ugcgaccuuaau

SEQ ID NO: 5739 - RNA, 11 nt, Artificial Sequence
  Description of Artificial Sequence: Synthetic oligonucleotide
cugagaaagcu

SEQ ID NO: 5740 - RNA, 13 nt, Artificial Sequence
  Description of Artificial Sequence: Synthetic oligonucleotide
aguaaagaugcua

SEQ ID NO: 5741 - RNA, 12 nt, Artificial Sequence
  Description of Artificial Sequence: Synthetic oligonucleotide
cugcuuaauugc

SEQ ID NO: 5742 - RNA, 14 nt, Artificial Sequence
  Description of Artificial Sequence: Synthetic oligonucleotide
uaccauaugaauga

SEQ ID NO: 5743 - RNA, 12 nt, Artificial Sequence
  Description of Artificial Sequence: Synthetic oligonucleotide
aacuuucuuauc

SEQ ID NO: 5744 - RNA, 13 nt, Artificial Sequence
  Description of Artificial Sequence: Synthetic oligonucleotide
ccuugcaugacau

SEQ ID NO: 5745 - RNA, 14 nt, Artificial Sequence
  Description of Artificial Sequence: Synthetic oligonucleotide
ugaauuuguauaug

SEQ ID NO: 5746 - RNA, 12 nt, Artificial Sequence
  Description of Artificial Sequence: Synthetic oligonucleotide
gaauccuaguag

SEQ ID NO: 5747 - RNA, 10 nt, Artificial Sequence
  Description of Artificial Sequence: Synthetic oligonucleotide
gaaagggaag

SEQ ID NO: 5748 - RNA, 11 nt, Artificial Sequence
  Description of Artificial Sequence: Synthetic oligonucleotide
uaucggcaugc

SEQ ID NO: 5749 - RNA, 12 nt, Artificial Sequence
  Description of Artificial Sequence: Synthetic oligonucleotide
caccucauagua

SEQ ID NO: 5750 - RNA, 11 nt, Artificial Sequence
  Description of Artificial Sequence: Synthetic oligonucleotide
ccagaauugcc

SEQ ID NO: 5751 - RNA, 11 nt, Artificial Sequence
  Description of Artificial Sequence: Synthetic oligonucleotide
uggugaucugg

SEQ ID NO: 5752 - RNA, 12 nt, Artificial Sequence
  Description of Artificial Sequence: Synthetic oligonucleotide
gaucuggguaau

SEQ ID NO: 5753 - RNA, 12 nt, Artificial Sequence
  Description of Artificial Sequence: Synthetic oligonucleotide
ggaugugaugaa

SEQ ID NO: 5754 - RNA, 12 nt, Artificial Sequence
  Description of Artificial Sequence: Synthetic oligonucleotide
cauuuccacagc

SEQ ID NO: 5755 - RNA, 11 nt, Artificial Sequence
  Description of Artificial Sequence: Synthetic oligonucleotide
acagcuacacc

SEQ ID NO: 5756 - RNA, 12 nt, Artificial Sequence
  Description of Artificial Sequence: Synthetic oligonucleotide
ugcaguucuuac

SEQ ID NO: 5757 - RNA, 12 nt, Artificial Sequence
  Description of Artificial Sequence: Synthetic oligonucleotide
acgagaagaaga

SEQ ID NO: 5758 - RNA, 12 nt, Artificial Sequence
  Description of Artificial Sequence: Synthetic oligonucleotide
cgagaagaagau

SEQ ID NO: 5759 - RNA, 15 nt, Artificial Sequence
  Description of Artificial Sequence: Synthetic oligonucleotide
aagaagaucauuuac

SEQ ID NO: 5760 - RNA, 11 nt, Artificial Sequence
  Description of Artificial Sequence: Synthetic oligonucleotide
agaggaagagg

SEQ ID NO: 5761 - RNA, 12 nt, Artificial Sequence
  Description of Artificial Sequence: Synthetic oligonucleotide
gaggaagaggug

SEQ ID NO: 5762 - RNA, 13 nt, Artificial Sequence
  Description of Artificial Sequence: Synthetic oligonucleotide
cuacuuugagggc

SEQ ID NO: 5763 - RNA, 12 nt, Artificial Sequence
  Description of Artificial Sequence: Synthetic oligonucleotide
agggcaucuccu

SEQ ID NO: 5764 - RNA, 10 nt, Artificial Sequence
  Description of Artificial Sequence: Synthetic oligonucleotide
ggagugauau

SEQ ID NO: 5765 - RNA, 11 nt, Artificial Sequence
  Description of Artificial Sequence: Synthetic oligonucleotide
gagugauaugg

SEQ ID NO: 5766 - RNA, 12 nt, Artificial Sequence
  Description of Artificial Sequence: Synthetic oligonucleotide
ugcaguaaagau

SEQ ID NO: 5767 - RNA, 13 nt, Artificial Sequence
  Description of Artificial Sequence: Synthetic oligonucleotide
aguaaagauccua

SEQ ID NO: 5768 - RNA, 12 nt, Artificial Sequence
  Description of Artificial Sequence: Synthetic oligonucleotide
ugacaaaggaca

SEQ ID NO: 5769 - RNA, 13 nt, Artificial Sequence
  Description of Artificial Sequence: Synthetic oligonucleotide
gcaauugugaccc

SEQ ID NO: 5770 - RNA, 12 nt, Artificial Sequence
  Description of Artificial Sequence: Synthetic oligonucleotide
aacaucauccau

SEQ ID NO: 5771 - RNA, 12 nt, Artificial Sequence
  Description of Artificial Sequence: Synthetic oligonucleotide
ugaaauccaaca

SEQ ID NO: 5772 - RNA, 15 nt, Artificial Sequence
  Description of Artificial Sequence: Synthetic oligonucleotide
aacaauauauuucuc

SEQ ID NO: 5773 - RNA, 14 nt, Artificial Sequence
  Description of Artificial Sequence: Synthetic oligonucleotide
aacaguaaagucac

SEQ ID NO: 5774 - RNA, 14 nt, Artificial Sequence
  Description of Artificial Sequence: Synthetic oligonucleotide
ugugaagaaaguaa

SEQ ID NO: 5775 - RNA, 13 nt, Artificial Sequence
  Description of Artificial Sequence: Synthetic oligonucleotide
cuuccgagccauc

SEQ ID NO: 5776 - RNA, 12 nt, Artificial Sequence
  Description of Artificial Sequence: Synthetic oligonucleotide
aauggagguuga

SEQ ID NO: 5777 - RNA, 12 nt, Artificial Sequence
  Description of Artificial Sequence: Synthetic oligonucleotide
ggagguugaaua

SEQ ID NO: 5778 - RNA, 13 nt, Artificial Sequence
  Description of Artificial Sequence: Synthetic oligonucleotide
auuuugaguuuuc

SEQ ID NO: 5779 - RNA, 12 nt, Artificial Sequence
  Description of Artificial Sequence: Synthetic oligonucleotide
uauccuguuugu

SEQ ID NO: 5780 - RNA, 11 nt, Artificial Sequence
  Description of Artificial Sequence: Synthetic oligonucleotide
ccuguuuguuc

SEQ ID NO: 5781 - RNA, 10 nt, Artificial Sequence
  Description of Artificial Sequence: Synthetic oligonucleotide
cucuacagcc

SEQ ID NO: 5782 - RNA, 12 nt, Artificial Sequence
  Description of Artificial Sequence: Synthetic oligonucleotide
ucuuccauagcu

SEQ ID NO: 5783 - RNA, 12 nt, Artificial Sequence
  Description of Artificial Sequence: Synthetic oligonucleotide
auaaucuuccug

SEQ ID NO: 5784 - RNA, 12 nt, Artificial Sequence
  Description of Artificial Sequence: Synthetic oligonucleotide
uaaucuuccugu

SEQ ID NO: 5785 - RNA, 12 nt, Artificial Sequence
  Description of Artificial Sequence: Synthetic oligonucleotide
cuucaugacuug

SEQ ID NO: 5786 - RNA, 12 nt, Artificial Sequence
  Description of Artificial Sequence: Synthetic oligonucleotide
aagagggagaga

SEQ ID NO: 5787 - RNA, 12 nt, Artificial Sequence
  Description of Artificial Sequence: Synthetic oligonucleotide
cgucuccuacca

SEQ ID NO: 5788 - RNA, 12 nt, Artificial Sequence
  Description of Artificial Sequence: Synthetic oligonucleotide
gaucaaucggcc

SEQ ID NO: 5789 - RNA, 12 nt, Artificial Sequence
  Description of Artificial Sequence: Synthetic oligonucleotide
ggacgaacaucc

SEQ ID NO: 5790 - RNA, 11 nt, Artificial Sequence
  Description of Artificial Sequence: Synthetic oligonucleotide
agggucggaac

SEQ ID NO: 5791 - RNA, 10 nt, Artificial Sequence
  Description of Artificial Sequence: Synthetic oligonucleotide
ucggaaccca

SEQ ID NO: 5792 - RNA, 11 nt, Artificial Sequence
  Description of Artificial Sequence: Synthetic oligonucleotide
acccaagcuua

SEQ ID NO: 5793 - RNA, 14 nt, Artificial Sequence
  Description of Artificial Sequence: Synthetic oligonucleotide
gaacuuuaagcaac

SEQ ID NO: 5794 - RNA, 11 nt, Artificial Sequence
  Description of Artificial Sequence: Synthetic oligonucleotide
acuauucagug

SEQ ID NO: 5795 - RNA, 11 nt, Artificial Sequence
  Description of Artificial Sequence: Synthetic oligonucleotide
cuauucagugg

SEQ ID NO: 5796 - RNA, 13 nt, Artificial Sequence
  Description of Artificial Sequence: Synthetic oligonucleotide
aaacacagauaac

SEQ ID NO: 5797 - RNA, 12 nt, Artificial Sequence
  Description of Artificial Sequence: Synthetic oligonucleotide
cuuaagaaaaga

SEQ ID NO: 5798 - RNA, 12 nt, Artificial Sequence
  Description of Artificial Sequence: Synthetic oligonucleotide
cugaaggagugu

SEQ ID NO: 5799 - RNA, 10 nt, Artificial Sequence
  Description of Artificial Sequence: Synthetic oligonucleotide
ucaccgcggg

SEQ ID NO: 5800 - RNA, 14 nt, Artificial Sequence
  Description of Artificial Sequence: Synthetic oligonucleotide
agcagaaauaagcg

SEQ ID NO: 5801 - RNA, 12 nt, Artificial Sequence
  Description of Artificial Sequence: Synthetic oligonucleotide
aagcgugccguu

SEQ ID NO: 5802 - RNA, 12 nt, Artificial Sequence
  Description of Artificial Sequence: Synthetic oligonucleotide
agaaacagucac

SEQ ID NO: 5803 - RNA, 12 nt, Artificial Sequence
  Description of Artificial Sequence: Synthetic oligonucleotide
agaggaagaagg

SEQ ID NO: 5804 - RNA, 14 nt, Artificial Sequence
  Description of Artificial Sequence: Synthetic oligonucleotide
uguauucaaaauau

SEQ ID NO: 5805 - RNA, 13 nt, Artificial Sequence
  Description of Artificial Sequence: Synthetic oligonucleotide
auuuuccucccuu

SEQ ID NO: 5806 - RNA, 13 nt, Artificial Sequence
  Description of Artificial Sequence: Synthetic oligonucleotide
caaagaaagauag

SEQ ID NO: 5807 - RNA, 12 nt, Artificial Sequence
  Description of Artificial Sequence: Synthetic oligonucleotide
aagaaagauaga

SEQ ID NO: 5808 - RNA, 13 nt, Artificial Sequence
  Description of Artificial Sequence: Synthetic oligonucleotide
gaaagcauuuguu

SEQ ID NO: 5809 - RNA, 13 nt, Artificial Sequence
  Description of Artificial Sequence: Synthetic oligonucleotide
ugaguuaaacgaa

SEQ ID NO: 5810 - RNA, 12 nt, Artificial Sequence
  Description of Artificial Sequence: Synthetic oligonucleotide
acugauacagaa

SEQ ID NO: 5811 - RNA, 12 nt, Artificial Sequence
  Description of Artificial Sequence: Synthetic oligonucleotide
auauuauauaua

SEQ ID NO: 5812 - RNA, 12 nt, Artificial Sequence
  Description of Artificial Sequence: Synthetic oligonucleotide
auuauauauaua

SEQ ID NO: 5813 - RNA, 12 nt, Artificial Sequence
  Description of Artificial Sequence: Synthetic oligonucleotide
ucacuggaugua

SEQ ID NO: 5814 - RNA, 12 nt, Artificial Sequence
  Description of Artificial Sequence: Synthetic oligonucleotide
cagggaagagga

SEQ ID NO: 5815 - RNA, 15 nt, Artificial Sequence
  Description of Artificial Sequence: Synthetic oligonucleotide
augaucuuuuuuuug

SEQ ID NO: 5816 - RNA, 11 nt, Artificial Sequence
  Description of Artificial Sequence: Synthetic oligonucleotide
aguucacggcc

SEQ ID NO: 5817 - RNA, 13 nt, Artificial Sequence
  Description of Artificial Sequence: Synthetic oligonucleotide
caccaucacacca

SEQ ID NO: 5818 - RNA, 11 nt, Artificial Sequence
  Description of Artificial Sequence: Synthetic oligonucleotide
ccugcggguuu

SEQ ID NO: 5819 - RNA, 10 nt, Artificial Sequence
  Description of Artificial Sequence: Synthetic oligonucleotide
auccaguuug

SEQ ID NO: 5820 - RNA, 13 nt, Artificial Sequence
  Description of Artificial Sequence: Synthetic oligonucleotide
guuaaggacuucu

SEQ ID NO: 5821 - RNA, 13 nt, Artificial Sequence
  Description of Artificial Sequence: Synthetic oligonucleotide
cagugggacagag

SEQ ID NO: 5822 - RNA, 14 nt, Artificial Sequence
  Description of Artificial Sequence: Synthetic oligonucleotide
aauuuguuauugug

SEQ ID NO: 5823 - RNA, 13 nt, Artificial Sequence
  Description of Artificial Sequence: Synthetic oligonucleotide
uucaaaugcauuu

SEQ ID NO: 5824 - RNA, 10 nt, Artificial Sequence
  Description of Artificial Sequence: Synthetic oligonucleotide
caggaaagcc

SEQ ID NO: 5825 - RNA, 11 nt, Artificial Sequence
  Description of Artificial Sequence: Synthetic oligonucleotide
aggaaagcccu

SEQ ID NO: 5826 - RNA, 12 nt, Artificial Sequence
  Description of Artificial Sequence: Synthetic oligonucleotide
cccagcauggcc

SEQ ID NO: 5827 - RNA, 11 nt, Artificial Sequence
  Description of Artificial Sequence: Synthetic oligonucleotide
cuucucccuga

SEQ ID NO: 5828 - RNA, 12 nt, Artificial Sequence
  Description of Artificial Sequence: Synthetic oligonucleotide
gaagaagcccuu

SEQ ID NO: 5829 - RNA, 12 nt, Artificial Sequence
  Description of Artificial Sequence: Synthetic oligonucleotide
agaagcccuuca

SEQ ID NO: 5830 - RNA, 11 nt, Artificial Sequence
  Description of Artificial Sequence: Synthetic oligonucleotide
gcccuucagcg

SEQ ID NO: 5831 - RNA, 11 nt, Artificial Sequence
  Description of Artificial Sequence: Synthetic oligonucleotide
ccuucagcggc

SEQ ID NO: 5832 - RNA, 12 nt, Artificial Sequence
  Description of Artificial Sequence: Synthetic oligonucleotide
ucagcggccagu

SEQ ID NO: 5833 - RNA, 12 nt, Artificial Sequence
  Description of Artificial Sequence: Synthetic oligonucleotide
ugaaaagcuccg

SEQ ID NO: 5834 - RNA, 11 nt, Artificial Sequence
  Description of Artificial Sequence: Synthetic oligonucleotide
aaaagcuccgg

SEQ ID NO: 5835 - RNA, 13 nt, Artificial Sequence
  Description of Artificial Sequence: Synthetic oligonucleotide
agucaacagucug

SEQ ID NO: 5836 - RNA, 13 nt, Artificial Sequence
  Description of Artificial Sequence: Synthetic oligonucleotide
cagaguucaaaag

SEQ ID NO: 5837 - RNA, 13 nt, Artificial Sequence
  Description of Artificial Sequence: Synthetic oligonucleotide
agaguucaaaagc

SEQ ID NO: 5838 - RNA, 12 nt, Artificial Sequence
  Description of Artificial Sequence: Synthetic oligonucleotide
uucaaaagcccu

SEQ ID NO: 5839 - RNA, 12 nt, Artificial Sequence
  Description of Artificial Sequence: Synthetic oligonucleotide
ucaaaagcccuu

SEQ ID NO: 5840 - RNA, 12 nt, Artificial Sequence
  Description of Artificial Sequence: Synthetic oligonucleotide
aaaagcccuuca

SEQ ID NO: 5841 - RNA, 12 nt, Artificial Sequence
  Description of Artificial Sequence: Synthetic oligonucleotide
aaagcccuucag

SEQ ID NO: 5842 - RNA, 13 nt, Artificial Sequence
  Description of Artificial Sequence: Synthetic oligonucleotide
gugaagccgcucg

SEQ ID NO: 5843 - RNA, 12 nt, Artificial Sequence
  Description of Artificial Sequence: Synthetic oligonucleotide
cacgccagucaa

SEQ ID NO: 5844 - RNA, 13 nt, Artificial Sequence
  Description of Artificial Sequence: Synthetic oligonucleotide
uucuuggugcgug

SEQ ID NO: 5845 - RNA, 14 nt, Artificial Sequence
  Description of Artificial Sequence: Synthetic oligonucleotide
auuggauucaucag

SEQ ID NO: 5846 - RNA, 13 nt, Artificial Sequence
  Description of Artificial Sequence: Synthetic oligonucleotide
uggaauaccuaag

SEQ ID NO: 5847 - RNA, 12 nt, Artificial Sequence
  Description of Artificial Sequence: Synthetic oligonucleotide
auuugaggcuca

SEQ ID NO: 5848 - RNA, 11 nt, Artificial Sequence
  Description of Artificial Sequence: Synthetic oligonucleotide
ucuacaauugg

SEQ ID NO: 5849 - RNA, 12 nt, Artificial Sequence
  Description of Artificial Sequence: Synthetic oligonucleotide
uaguuaggagcc

SEQ ID NO: 5850 - RNA, 13 nt, Artificial Sequence
  Description of Artificial Sequence: Synthetic oligonucleotide
agucaauauccac

SEQ ID NO: 5851 - RNA, 13 nt, Artificial Sequence
  Description of Artificial Sequence: Synthetic oligonucleotide
auguucagucaca

SEQ ID NO: 5852 - RNA, 12 nt, Artificial Sequence
  Description of Artificial Sequence: Synthetic oligonucleotide
acacacacauac

SEQ ID NO: 5853 - RNA, 12 nt, Artificial Sequence
  Description of Artificial Sequence: Synthetic oligonucleotide
uuccuuuugcuu

SEQ ID NO: 5854 - RNA, 16 nt, Artificial Sequence
  Description of Artificial Sequence: Synthetic oligonucleotide
uuuuaaaguaauuuuu

SEQ ID NO: 5855 - RNA, 13 nt, Artificial Sequence
  Description of Artificial Sequence: Synthetic oligonucleotide
caacagucaaugg

SEQ ID NO: 5856 - RNA, 13 nt, Artificial Sequence
  Description of Artificial Sequence: Synthetic oligonucleotide
ucgacaaaccaau

SEQ ID NO: 5857 - RNA, 12 nt, Artificial Sequence
  Description of Artificial Sequence: Synthetic oligonucleotide
acugcuaccacu

SEQ ID NO: 5858 - RNA, 13 nt, Artificial Sequence
  Description of Artificial Sequence: Synthetic oligonucleotide
gcaagcggucuua

SEQ ID NO: 5859 - RNA, 13 nt, Artificial Sequence
  Description of Artificial Sequence: Synthetic oligonucleotide
ggucuuaccggcu

SEQ ID NO: 5860 - RNA, 11 nt, Artificial Sequence
  Description of Artificial Sequence: Synthetic oligonucleotide
gauggguuacc

SEQ ID NO: 5861 - RNA, 11 nt, Artificial Sequence
  Description of Artificial Sequence: Synthetic oligonucleotide
guuaccugcga

SEQ ID NO: 5862 - RNA, 12 nt, Artificial Sequence
  Description of Artificial Sequence: Synthetic oligonucleotide
aaucuugcugag

SEQ ID NO: 5863 - RNA, 13 nt, Artificial Sequence
  Description of Artificial Sequence: Synthetic oligonucleotide
agcauaaaacagu

SEQ ID NO: 5864 - RNA, 12 nt, Artificial Sequence
  Description of Artificial Sequence: Synthetic oligonucleotide
guccuuuauccu

SEQ ID NO: 5865 - RNA, 12 nt, Artificial Sequence
  Description of Artificial Sequence: Synthetic oligonucleotide
caacgcaaguug

SEQ ID NO: 5866 - RNA, 13 nt, Artificial Sequence
  Description of Artificial Sequence: Synthetic oligonucleotide
aaacugaaaccau

SEQ ID NO: 5867 - RNA, 14 nt, Artificial Sequence
  Description of Artificial Sequence: Synthetic oligonucleotide
acuuuguuaaauau

SEQ ID NO: 5868 - RNA, 14 nt, Artificial Sequence
  Description of Artificial Sequence: Synthetic oligonucleotide
guauauuaaaaguu

SEQ ID NO: 5869 - RNA, 13 nt, Artificial Sequence
  Description of Artificial Sequence: Synthetic oligonucleotide
guuuugacuuaac

SEQ ID NO: 5870 - RNA, 13 nt, Artificial Sequence
  Description of Artificial Sequence: Synthetic oligonucleotide
gcaaacucagcac

SEQ ID NO: 5871 - RNA, 11 nt, Artificial Sequence
  Description of Artificial Sequence: Synthetic oligonucleotide
ugcugaccuca

SEQ ID NO: 5872 - RNA, 14 nt, Artificial Sequence
  Description of Artificial Sequence: Synthetic oligonucleotide
uuuauucagaucgc

SEQ ID NO: 5873 - RNA, 13 nt, Artificial Sequence
  Description of Artificial Sequence: Synthetic oligonucleotide
aggguucugggau

SEQ ID NO: 5874 - RNA, 15 nt, Artificial Sequence
  Description of Artificial Sequence: Synthetic oligonucleotide
auauuggaaauuaug

SEQ ID NO: 5875 - RNA, 13 nt, Artificial Sequence
  Description of Artificial Sequence: Synthetic oligonucleotide
auggaagcacuag

SEQ ID NO: 5876 - RNA, 13 nt, Artificial Sequence
  Description of Artificial Sequence: Synthetic oligonucleotide
guuuuuaugugga

SEQ ID NO: 5877 - RNA, 12 nt, Artificial Sequence
  Description of Artificial Sequence: Synthetic oligonucleotide
ggaauugguaga

SEQ ID NO: 5878 - RNA, 13 nt, Artificial Sequence
  Description of Artificial Sequence: Synthetic oligonucleotide
uuagacuuggaga

SEQ ID NO: 5879 - RNA, 13 nt, Artificial Sequence
  Description of Artificial Sequence: Synthetic oligonucleotide
uuacaguauucca

SEQ ID NO: 5880 - RNA, 15 nt, Artificial Sequence
  Description of Artificial Sequence: Synthetic oligonucleotide
ccacugaugaauuaa

SEQ ID NO: 5881 - RNA, 12 nt, Artificial Sequence
  Description of Artificial Sequence: Synthetic oligonucleotide
ccacaucaucac

SEQ ID NO: 5882 - RNA, 13 nt, Artificial Sequence
  Description of Artificial Sequence: Synthetic oligonucleotide
cucaccaaacaga

SEQ ID NO: 5883 - RNA, 12 nt, Artificial Sequence
  Description of Artificial Sequence: Synthetic oligonucleotide
ggaacaugaugg

SEQ ID NO: 5884 - RNA, 12 nt, Artificial Sequence
  Description of Artificial Sequence: Synthetic oligonucleotide
cauguagacugc

SEQ ID NO: 5885 - RNA, 13 nt, Artificial Sequence
  Description of Artificial Sequence: Synthetic oligonucleotide
ggaucuauuuaug

SEQ ID NO: 5886 - RNA, 12 nt, Artificial Sequence
  Description of Artificial Sequence: Synthetic oligonucleotide
gcacuauuauca

SEQ ID NO: 5887 - RNA, 11 nt, Artificial Sequence
  Description of Artificial Sequence: Synthetic oligonucleotide
aucaguucugc

SEQ ID NO: 5888 - RNA, 13 nt, Artificial Sequence
  Description of Artificial Sequence: Synthetic oligonucleotide
agauuaaaccuac

SEQ ID NO: 5889 - RNA, 13 nt, Artificial Sequence
  Description of Artificial Sequence: Synthetic oligonucleotide
auaaaauccuucu

SEQ ID NO: 5890 - RNA, 12 nt, Artificial Sequence
  Description of Artificial Sequence: Synthetic oligonucleotide
aaugcuguagac

SEQ ID NO: 5891 - RNA, 13 nt, Artificial Sequence
  Description of Artificial Sequence: Synthetic oligonucleotide
uugauaggaauag

SEQ ID NO: 5892 - RNA, 11 nt, Artificial Sequence
  Description of Artificial Sequence: Synthetic oligonucleotide
aauggcccuga

SEQ ID NO: 5893 - RNA, 11 nt, Artificial Sequence
  Description of Artificial Sequence: Synthetic oligonucleotide
uuccucaagca

SEQ ID NO: 5894 - RNA, 10 nt, Artificial Sequence
  Description of Artificial Sequence: Synthetic oligonucleotide
guucagccca

SEQ ID NO: 5895 - RNA, 11 nt, Artificial Sequence
  Description of Artificial Sequence: Synthetic oligonucleotide
gcugcugaacc

SEQ ID NO: 5896 - RNA, 12 nt, Artificial Sequence
  Description of Artificial Sequence: Synthetic oligonucleotide
aaguucucuuca

SEQ ID NO: 5897 - RNA, 11 nt, Artificial Sequence
  Description of Artificial Sequence: Synthetic oligonucleotide
ccagccuagag

SEQ ID NO: 5898 - RNA, 13 nt, Artificial Sequence
  Description of Artificial Sequence: Synthetic oligonucleotide
cucugugaagugu

SEQ ID NO: 5899 - RNA, 14 nt, Artificial Sequence
  Description of Artificial Sequence: Synthetic oligonucleotide
ugagaaaauuucaa

SEQ ID NO: 5900 - RNA, 11 nt, Artificial Sequence
  Description of Artificial Sequence: Synthetic oligonucleotide
aauccuccuga

SEQ ID NO: 5901 - RNA, 12 nt, Artificial Sequence
  Description of Artificial Sequence: Synthetic oligonucleotide
gugacaucauau

SEQ ID NO: 5902 - RNA, 13 nt, Artificial Sequence
  Description of Artificial Sequence: Synthetic oligonucleotide
aaucuucaucaua

SEQ ID NO: 5903 - RNA, 13 nt, Artificial Sequence
  Description of Artificial Sequence: Synthetic oligonucleotide
gacuagcuauuaa

SEQ ID NO: 5904 - RNA, 14 nt, Artificial Sequence
  Description of Artificial Sequence: Synthetic oligonucleotide
ucucuacuaaaaau

SEQ ID NO: 5905 - RNA, 12 nt, Artificial Sequence
  Description of Artificial Sequence: Synthetic oligonucleotide
ucuaucucgccu

SEQ ID NO: 5906 - RNA, 13 nt, Artificial Sequence
  Description of Artificial Sequence: Synthetic oligonucleotide
cuucgguccaguu

SEQ ID NO: 5907 - RNA, 11 nt, Artificial Sequence
  Description of Artificial Sequence: Synthetic oligonucleotide
gauguagccgc

SEQ ID NO: 5908 - RNA, 12 nt, Artificial Sequence
  Description of Artificial Sequence: Synthetic oligonucleotide
ugaggagacuug

SEQ ID NO: 5909 - RNA, 12 nt, Artificial Sequence
  Description of Artificial Sequence: Synthetic oligonucleotide
gaguagugagga

SEQ ID NO: 5910 - RNA, 14 nt, Artificial Sequence
  Description of Artificial Sequence: Synthetic oligonucleotide
cagaugaguacaaa

SEQ ID NO: 5911 - RNA, 13 nt, Artificial Sequence
  Description of Artificial Sequence: Synthetic oligonucleotide
guuguuaaugggc

SEQ ID NO: 5912 - RNA, 13 nt, Artificial Sequence
  Description of Artificial Sequence: Synthetic oligonucleotide
uuuuuaauuuauu

SEQ ID NO: 5913 - RNA, 12 nt, Artificial Sequence
  Description of Artificial Sequence: Synthetic oligonucleotide
uauuuaaauaug

SEQ ID NO: 5914 - RNA, 13 nt, Artificial Sequence
  Description of Artificial Sequence: Synthetic oligonucleotide
uauccuuuguuuc

SEQ ID NO: 5915 - RNA, 14 nt, Artificial Sequence
  Description of Artificial Sequence: Synthetic oligonucleotide
cgucuaaguguuug

SEQ ID NO: 5916 - RNA, 12 nt, Artificial Sequence
  Description of Artificial Sequence: Synthetic oligonucleotide
accugugacaaa

SEQ ID NO: 5917 - RNA, 13 nt, Artificial Sequence
  Description of Artificial Sequence: Synthetic oligonucleotide
ccaggcugaauua

SEQ ID NO: 5918 - RNA, 14 nt, Artificial Sequence
  Description of Artificial Sequence: Synthetic oligonucleotide
gucauucuuacaau

SEQ ID NO: 5919 - RNA, 15 nt, Artificial Sequence
  Description of Artificial Sequence: Synthetic oligonucleotide
ucauucuuacaauug

SEQ ID NO: 5920 - RNA, 12 nt, Artificial Sequence
  Description of Artificial Sequence: Synthetic oligonucleotide
cagagaguguac

SEQ ID NO: 5921 - RNA, 12 nt, Artificial Sequence
  Description of Artificial Sequence: Synthetic oligonucleotide
agaacucagcag

SEQ ID NO: 5922 - RNA, 13 nt, Artificial Sequence
  Description of Artificial Sequence: Synthetic oligonucleotide
uuuauuuucagua

SEQ ID NO: 5923 - RNA, 12 nt, Artificial Sequence
  Description of Artificial Sequence: Synthetic oligonucleotide
ucuuaaauggaa

SEQ ID NO: 5924 - RNA, 13 nt, Artificial Sequence
  Description of Artificial Sequence: Synthetic oligonucleotide
ugccuaaaauugu

SEQ ID NO: 5925 - RNA, 12 nt, Artificial Sequence
  Description of Artificial Sequence: Synthetic oligonucleotide
agacugugagcu

SEQ ID NO: 5926 - RNA, 14 nt, Artificial Sequence
  Description of Artificial Sequence: Synthetic oligonucleotide
ugcuuuuuauuaau

SEQ ID NO: 5927 - RNA, 13 nt, Artificial Sequence
  Description of Artificial Sequence: Synthetic oligonucleotide
cucuucuuacauu

SEQ ID NO: 5928 - RNA, 15 nt, Artificial Sequence
  Description of Artificial Sequence: Synthetic oligonucleotide
cauuuguaaaaaugu

SEQ ID NO: 5929 - RNA, 15 nt, Artificial Sequence
  Description of Artificial Sequence: Synthetic oligonucleotide
aucuuaauucauauu

SEQ ID NO: 5930 - RNA, 13 nt, Artificial Sequence
  Description of Artificial Sequence: Synthetic oligonucleotide
gaacuaaucauga

SEQ ID NO: 5931 - RNA, 12 nt, Artificial Sequence
  Description of Artificial Sequence: Synthetic oligonucleotide
ucugcucuuggg

SEQ ID NO: 5932 - RNA, 13 nt, Artificial Sequence
  Description of Artificial Sequence: Synthetic oligonucleotide
caguagcuuugag

SEQ ID NO: 5933 - RNA, 14 nt, Artificial Sequence
  Description of Artificial Sequence: Synthetic oligonucleotide
cacguaauauuuca

SEQ ID NO: 5934 - RNA, 13 nt, Artificial Sequence
  Description of Artificial Sequence: Synthetic oligonucleotide
uauucucuucacu

SEQ ID NO: 5935 - RNA, 14 nt, Artificial Sequence
  Description of Artificial Sequence: Synthetic oligonucleotide
cuaaugcuaagaaa

SEQ ID NO: 5936 - RNA, 12 nt, Artificial Sequence
  Description of Artificial Sequence: Synthetic oligonucleotide
gcugaaaaucaa

SEQ ID NO: 5937 - RNA, 14 nt, Artificial Sequence
  Description of Artificial Sequence: Synthetic oligonucleotide
aauaugauuacuuu

SEQ ID NO: 5938 - RNA, 14 nt, Artificial Sequence
  Description of Artificial Sequence: Synthetic oligonucleotide
cauuuuguucuaca

SEQ ID NO: 5939 - RNA, 12 nt, Artificial Sequence
  Description of Artificial Sequence: Synthetic oligonucleotide
cccgggacucuc

SEQ ID NO: 5940 - RNA, 14 nt, Artificial Sequence
  Description of Artificial Sequence: Synthetic oligonucleotide
ccuuuaaaguaaag

SEQ ID NO: 5941 - RNA, 13 nt, Artificial Sequence
  Description of Artificial Sequence: Synthetic oligonucleotide
ucuggaagccugg

SEQ ID NO: 5942 - RNA, 14 nt, Artificial Sequence
  Description of Artificial Sequence: Synthetic oligonucleotide
aaaacaaaagagag

SEQ ID NO: 5943 - RNA, 13 nt, Artificial Sequence
  Description of Artificial Sequence: Synthetic oligonucleotide
aucaguuaugccg

SEQ ID NO: 5944 - RNA, 13 nt, Artificial Sequence
  Description of Artificial Sequence: Synthetic oligonucleotide
uaaaagaagucca

SEQ ID NO: 5945 - RNA, 11 nt, Artificial Sequence
  Description of Artificial Sequence: Synthetic oligonucleotide
aggugagguua

SEQ ID NO: 5946 - RNA, 11 nt, Artificial Sequence
  Description of Artificial Sequence: Synthetic oligonucleotide
gggaagaggac

SEQ ID NO: 5947 - RNA, 13 nt, Artificial Sequence
  Description of Artificial Sequence: Synthetic oligonucleotide
aagcaaguauugu

SEQ ID NO: 5948 - RNA, 12 nt, Artificial Sequence
  Description of Artificial Sequence: Synthetic oligonucleotide
auuguagcacuc

SEQ ID NO: 5949 - RNA, 14 nt, Artificial Sequence
  Description of Artificial Sequence: Synthetic oligonucleotide
acaaaaccacaaau

SEQ ID NO: 5950 - RNA, 12 nt, Artificial Sequence
  Description of Artificial Sequence: Synthetic oligonucleotide
uaagcccauaca

SEQ ID NO: 5951 - RNA, 11 nt, Artificial Sequence
  Description of Artificial Sequence: Synthetic oligonucleotide
agcccauacag

SEQ ID NO: 5952 - RNA, 12 nt, Artificial Sequence
  Description of Artificial Sequence: Synthetic oligonucleotide
cagaaaccuucc

SEQ ID NO: 5953 - RNA, 10 nt, Artificial Sequence
  Description of Artificial Sequence: Synthetic oligonucleotide
guauaccuac

SEQ ID NO: 5954 - RNA, 13 nt, Artificial Sequence
  Description of Artificial Sequence: Synthetic oligonucleotide
gccaguuuucgga

SEQ ID NO: 5955 - RNA, 9 nt, Artificial Sequence
  Description of Artificial Sequence: Synthetic oligonucleotide
ggaacaggg

SEQ ID NO: 5956 - RNA, 13 nt, Artificial Sequence
  Description of Artificial Sequence: Synthetic oligonucleotide
uuaacuuuccagu

SEQ ID NO: 5957 - RNA, 14 nt, Artificial Sequence
  Description of Artificial Sequence: Synthetic oligonucleotide
aaaguuugguuuug

SEQ ID NO: 5958 - RNA, 12 nt, Artificial Sequence
  Description of Artificial Sequence: Synthetic oligonucleotide
cuucccacugua

SEQ ID NO: 5959 - RNA, 13 nt, Artificial Sequence
  Description of Artificial Sequence: Synthetic oligonucleotide
ugauaccauauga

SEQ ID NO: 5960 - RNA, 11 nt, Artificial Sequence
  Description of Artificial Sequence: Synthetic oligonucleotide
aacaugggcug

SEQ ID NO: 5961 - RNA, 13 nt, Artificial Sequence
  Description of Artificial Sequence: Synthetic oligonucleotide
caacuuuuucaua

SEQ ID NO: 5962 - RNA, 12 nt, Artificial Sequence
  Description of Artificial Sequence: Synthetic oligonucleotide
caugaggccgga

SEQ ID NO: 5963 - RNA, 11 nt, Artificial Sequence
  Description of Artificial Sequence: Synthetic oligonucleotide
acugcauuugu

SEQ ID NO: 5964 - RNA, 13 nt, Artificial Sequence
  Description of Artificial Sequence: Synthetic oligonucleotide
aauguuuacuacc

SEQ ID NO: 5965 - RNA, 15 nt, Artificial Sequence
  Description of Artificial Sequence: Synthetic oligonucleotide
aauuuuuugaugaaa

SEQ ID NO: 5966 - RNA, 14 nt, Artificial Sequence
  Description of Artificial Sequence: Synthetic oligonucleotide
cagugugugaauuu

SEQ ID NO: 5967 - RNA, 13 nt, Artificial Sequence
  Description of Artificial Sequence: Synthetic oligonucleotide
gagcaauguaugu

SEQ ID NO: 5968 - RNA, 14 nt, Artificial Sequence
  Description of Artificial Sequence: Synthetic oligonucleotide
aaagcacauauaua

SEQ ID NO: 5969 - RNA, 14 nt, Artificial Sequence
  Description of Artificial Sequence: Synthetic oligonucleotide
guaauaguuucucc

SEQ ID NO: 5970 - RNA, 13 nt, Artificial Sequence
  Description of Artificial Sequence: Synthetic oligonucleotide
aguuucuccaaau

SEQ ID NO: 5971 - RNA, 13 nt, Artificial Sequence
  Description of Artificial Sequence: Synthetic oligonucleotide
uacuuccuagaaa

SEQ ID NO: 5972 - RNA, 13 nt, Artificial Sequence
  Description of Artificial Sequence: Synthetic oligonucleotide
uacaccauauaug

SEQ ID NO: 5973 - RNA, 14 nt, Artificial Sequence
  Description of Artificial Sequence: Synthetic oligonucleotide
auauaugaauggag

SEQ ID NO: 5974 - RNA, 13 nt, Artificial Sequence
  Description of Artificial Sequence: Synthetic oligonucleotide
acgagaagaagau

SEQ ID NO: 5975 - RNA, 13 nt, Artificial Sequence
  Description of Artificial Sequence: Synthetic oligonucleotide
ucauuuacaggga

SEQ ID NO: 5976 - RNA, 13 nt, Artificial Sequence
  Description of Artificial Sequence: Synthetic oligonucleotide
cauuuacagggac

SEQ ID NO: 5977 - RNA, 10 nt, Artificial Sequence
  Description of Artificial Sequence: Synthetic oligonucleotide
agggaccuga

SEQ ID NO: 5978 - RNA, 14 nt, Artificial Sequence
  Description of Artificial Sequence: Synthetic oligonucleotide
uguuugacugcauc

SEQ ID NO: 5979 - RNA, 13 nt, Artificial Sequence
  Description of Artificial Sequence: Synthetic oligonucleotide
uuugacugcaucg

SEQ ID NO: 5980 - RNA, 12 nt, Artificial Sequence
  Description of Artificial Sequence: Synthetic oligonucleotide
gaguucacaggg

SEQ ID NO: 5981 - RNA, 13 nt, Artificial Sequence
  Description of Artificial Sequence: Synthetic oligonucleotide
ggcaccucugucc

SEQ ID NO: 5982 - RNA, 15 nt, Artificial Sequence
  Description of Artificial Sequence: Synthetic oligonucleotide
gguuugucuuuuuaa

SEQ ID NO: 5983 - RNA, 14 nt, Artificial Sequence
  Description of Artificial Sequence: Synthetic oligonucleotide
uuugucuuuuuaag

SEQ ID NO: 5984 - RNA, 13 nt, Artificial Sequence
  Description of Artificial Sequence: Synthetic oligonucleotide
ccuaaagguuguc

SEQ ID NO: 5985 - RNA, 12 nt, Artificial Sequence
  Description of Artificial Sequence: Synthetic oligonucleotide
aagguugucgac

SEQ ID NO: 5986 - RNA, 13 nt, Artificial Sequence
  Description of Artificial Sequence: Synthetic oligonucleotide
accuggcaauugu

SEQ ID NO: 5987 - RNA, 12 nt, Artificial Sequence
  Description of Artificial Sequence: Synthetic oligonucleotide
aguggugcgagg

SEQ ID NO: 5988 - RNA, 13 nt, Artificial Sequence
  Description of Artificial Sequence: Synthetic oligonucleotide
agagacaugaaau

SEQ ID NO: 5989 - RNA, 13 nt, Artificial Sequence
  Description of Artificial Sequence: Synthetic oligonucleotide
auauauuucucca

SEQ ID NO: 5990 - RNA, 10 nt, Artificial Sequence
  Description of Artificial Sequence: Synthetic oligonucleotide
caugaaggcu

SEQ ID NO: 5991 - RNA, 11 nt, Artificial Sequence
  Description of Artificial Sequence: Synthetic oligonucleotide
gcuggaguggu

SEQ ID NO: 5992 - RNA, 11 nt, Artificial Sequence
  Description of Artificial Sequence: Synthetic oligonucleotide
aggaagagagg

SEQ ID NO: 5993 - RNA, 12 nt, Artificial Sequence
  Description of Artificial Sequence: Synthetic oligonucleotide
cuugcaucgggc

SEQ ID NO: 5994 - RNA, 13 nt, Artificial Sequence
  Description of Artificial Sequence: Synthetic oligonucleotide
auauccuacugug

SEQ ID NO: 5995 - RNA, 13 nt, Artificial Sequence
  Description of Artificial Sequence: Synthetic oligonucleotide
uccuacuguguaa

SEQ ID NO: 5996 - RNA, 12 nt, Artificial Sequence
  Description of Artificial Sequence: Synthetic oligonucleotide
ccuuguagugua

SEQ ID NO: 5997 - RNA, 13 nt, Artificial Sequence
  Description of Artificial Sequence: Synthetic oligonucleotide
ucuuuguugauug

SEQ ID NO: 5998 - RNA, 14 nt, Artificial Sequence
  Description of Artificial Sequence: Synthetic oligonucleotide
uuuguugauugaaa

SEQ ID NO: 5999 - RNA, 15 nt, Artificial Sequence
  Description of Artificial Sequence: Synthetic oligonucleotide
uucuuuuucuuccau

SEQ ID NO: 6000 - RNA, 13 nt, Artificial Sequence
  Description of Artificial Sequence: Synthetic oligonucleotide
aaucuuccuucua

SEQ ID NO: 6001 - RNA, 13 nt, Artificial Sequence
  Description of Artificial Sequence: Synthetic oligonucleotide
uugaaugcuucau

SEQ ID NO: 6002 - RNA, 13 nt, Artificial Sequence
  Description of Artificial Sequence: Synthetic oligonucleotide
ugaaugcuucaug

SEQ ID NO: 6003 - RNA, 13 nt, Artificial Sequence
  Description of Artificial Sequence: Synthetic oligonucleotide
aauucuacuuuga

SEQ ID NO: 6004 - RNA, 13 nt, Artificial Sequence
  Description of Artificial Sequence: Synthetic oligonucleotide
agcaacuacagac

SEQ ID NO: 6005 - RNA, 13 nt, Artificial Sequence
  Description of Artificial Sequence: Synthetic oligonucleotide
gaccaaggucaac

SEQ ID NO: 6006 - RNA, 13 nt, Artificial Sequence
  Description of Artificial Sequence: Synthetic oligonucleotide
cgacuaucucgac

SEQ ID NO: 6007 - RNA, 13 nt, Artificial Sequence
  Description of Artificial Sequence: Synthetic oligonucleotide
aaccuucccaaac

SEQ ID NO: 6008 - RNA, 14 nt, Artificial Sequence
  Description of Artificial Sequence: Synthetic oligonucleotide
ccaagcuuagaacu

SEQ ID NO: 6009 - RNA, 15 nt, Artificial Sequence
  Description of Artificial Sequence: Synthetic oligonucleotide
agcuuagaacuuuaa

SEQ ID NO: 6010 - RNA, 11 nt, Artificial Sequence
  Description of Artificial Sequence: Synthetic oligonucleotide
aagaccaccac

SEQ ID NO: 6011 - RNA, 14 nt, Artificial Sequence
  Description of Artificial Sequence: Synthetic oligonucleotide
gcgagaaauaaagu

SEQ ID NO: 6012 - RNA, 14 nt, Artificial Sequence
  Description of Artificial Sequence: Synthetic oligonucleotide
cgagaaauaaaguu

SEQ ID NO: 6013 - RNA, 12 nt, Artificial Sequence
  Description of Artificial Sequence: Synthetic oligonucleotide
aggaaaugaucc

SEQ ID NO: 6014 - RNA, 13 nt, Artificial Sequence
  Description of Artificial Sequence: Synthetic oligonucleotide
gaagaaaugaaac

SEQ ID NO: 6015 - RNA, 13 nt, Artificial Sequence
  Description of Artificial Sequence: Synthetic oligonucleotide
guuuccauccucc

SEQ ID NO: 6016 - RNA, 15 nt, Artificial Sequence
  Description of Artificial Sequence: Synthetic oligonucleotide
acugaaaaucuuuga

SEQ ID NO: 6017 - RNA, 11 nt, Artificial Sequence
  Description of Artificial Sequence: Synthetic oligonucleotide
ugccguucagg

SEQ ID NO: 6018 - RNA, 13 nt, Artificial Sequence
  Description of Artificial Sequence: Synthetic oligonucleotide
caggguccagaag

SEQ ID NO: 6019 - RNA, 13 nt, Artificial Sequence
  Description of Artificial Sequence: Synthetic oligonucleotide
ucaagacugcuug

SEQ ID NO: 6020 - RNA, 13 nt, Artificial Sequence
  Description of Artificial Sequence: Synthetic oligonucleotide
uccaugucuuugg

SEQ ID NO: 6021 - RNA, 11 nt, Artificial Sequence
  Description of Artificial Sequence: Synthetic oligonucleotide
gccugaaacac

SEQ ID NO: 6022 - RNA, 12 nt, Artificial Sequence
  Description of Artificial Sequence: Synthetic oligonucleotide
ucucuguaccuc

SEQ ID NO: 6023 - RNA, 12 nt, Artificial Sequence
  Description of Artificial Sequence: Synthetic oligonucleotide
agcaagacaaga

SEQ ID NO: 6024 - RNA, 13 nt, Artificial Sequence
  Description of Artificial Sequence: Synthetic oligonucleotide
gcaagacaagaaa

SEQ ID NO: 6025 - RNA, 12 nt, Artificial Sequence
  Description of Artificial Sequence: Synthetic oligonucleotide
uguacaagaucc

SEQ ID NO: 6026 - RNA, 12 nt, Artificial Sequence
  Description of Artificial Sequence: Synthetic oligonucleotide
cguacuugcaga

SEQ ID NO: 6027 - RNA, 13 nt, Artificial Sequence
  Description of Artificial Sequence: Synthetic oligonucleotide
cgaucgauacaga

SEQ ID NO: 6028 - RNA, 13 nt, Artificial Sequence
  Description of Artificial Sequence: Synthetic oligonucleotide
uauaaaaauaaau

SEQ ID NO: 6029 - RNA, 13 nt, Artificial Sequence
  Description of Artificial Sequence: Synthetic oligonucleotide
uaaaaauaaauau

SEQ ID NO: 6030 - RNA, 13 nt, Artificial Sequence
  Description of Artificial Sequence: Synthetic oligonucleotide
uuugacugcugug

SEQ ID NO: 6031 - RNA, 13 nt, Artificial Sequence
  Description of Artificial Sequence: Synthetic oligonucleotide
ggagaugagagac

SEQ ID NO: 6032 - RNA, 10 nt, Artificial Sequence
  Description of Artificial Sequence: Synthetic oligonucleotide
ucccacuugg

SEQ ID NO: 6033 - RNA, 10 nt, Artificial Sequence
  Description of Artificial Sequence: Synthetic oligonucleotide
guucacggcc

SEQ ID NO: 6034 - RNA, 12 nt, Artificial Sequence
  Description of Artificial Sequence: Synthetic oligonucleotide
accaucacacca

SEQ ID NO: 6035 - RNA, 10 nt, Artificial Sequence
  Description of Artificial Sequence: Synthetic oligonucleotide
cugcggguuu

SEQ ID NO: 6036 - RNA, 9 nt, Artificial Sequence
  Description of Artificial Sequence: Synthetic oligonucleotide
uccaguuug

SEQ ID NO: 6037 - RNA, 12 nt, Artificial Sequence
  Description of Artificial Sequence: Synthetic oligonucleotide
uuaaggacuucu

SEQ ID NO: 6038 - RNA, 12 nt, Artificial Sequence
  Description of Artificial Sequence: Synthetic oligonucleotide
agugggacagag

SEQ ID NO: 6039 - RNA, 13 nt, Artificial Sequence
  Description of Artificial Sequence: Synthetic oligonucleotide
auuuguuauugug

SEQ ID NO: 6040 - RNA, 12 nt, Artificial Sequence
  Description of Artificial Sequence: Synthetic oligonucleotide
ucaaaugcauuu

SEQ ID NO: 6041 - RNA, 9 nt, Artificial Sequence
  Description of Artificial Sequence: Synthetic oligonucleotide
aggaaagcc

SEQ ID NO: 6042 - RNA, 10 nt, Artificial Sequence
  Description of Artificial Sequence: Synthetic oligonucleotide
ggaaagcccu

SEQ ID NO: 6043 - RNA, 11 nt, Artificial Sequence
  Description of Artificial Sequence: Synthetic oligonucleotide
ccagcauggcc

SEQ ID NO: 6044 - RNA, 10 nt, Artificial Sequence
  Description of Artificial Sequence: Synthetic oligonucleotide
uucucccuga

SEQ ID NO: 6045 - RNA, 11 nt, Artificial Sequence
  Description of Artificial Sequence: Synthetic oligonucleotide
aagaagcccuu

SEQ ID NO: 6046 - RNA, 11 nt, Artificial Sequence
  Description of Artificial Sequence: Synthetic oligonucleotide
gaagcccuuca

SEQ ID NO: 6047 - RNA, 10 nt, Artificial Sequence
  Description of Artificial Sequence: Synthetic oligonucleotide
cccuucagcg

SEQ ID NO: 6048 - RNA, 10 nt, Artificial Sequence
  Description of Artificial Sequence: Synthetic oligonucleotide
cuucagcggc

SEQ ID NO: 6049 - RNA, 11 nt, Artificial Sequence
  Description of Artificial Sequence: Synthetic oligonucleotide
cagcggccagu

SEQ ID NO: 6050 - RNA, 11 nt, Artificial Sequence
  Description of Artificial Sequence: Synthetic oligonucleotide
gaaaagcuccg

SEQ ID NO: 6051 - RNA, 10 nt, Artificial Sequence
  Description of Artificial Sequence: Synthetic oligonucleotide
aaagcuccgg

SEQ ID NO: 6052 - RNA, 12 nt, Artificial Sequence
  Description of Artificial Sequence: Synthetic oligonucleotide
gucaacagucug

SEQ ID NO: 6053 - RNA, 12 nt, Artificial Sequence
  Description of Artificial Sequence: Synthetic oligonucleotide
agaguucaaaag

SEQ ID NO: 6054 - RNA, 12 nt, Artificial Sequence
  Description of Artificial Sequence: Synthetic oligonucleotide
gaguucaaaagc

SEQ ID NO: 6055 - RNA, 11 nt, Artificial Sequence
  Description of Artificial Sequence: Synthetic oligonucleotide
ucaaaagcccu

SEQ ID NO: 6056 - RNA, 11 nt, Artificial Sequence
  Description of Artificial Sequence: Synthetic oligonucleotide
caaaagcccuu

SEQ ID NO: 6057 - RNA, 11 nt, Artificial Sequence
  Description of Artificial Sequence: Synthetic oligonucleotide
aaagcccuuca

SEQ ID NO: 6058 - RNA, 11 nt, Artificial Sequence
  Description of Artificial Sequence: Synthetic oligonucleotide
aagcccuucag

SEQ ID NO: 6059 - RNA, 12 nt, Artificial Sequence
  Description of Artificial Sequence: Synthetic oligonucleotide
ugaagccgcucg

SEQ ID NO: 6060 - RNA, 11 nt, Artificial Sequence
  Description of Artificial Sequence: Synthetic oligonucleotide
acgccagucaa

SEQ ID NO: 6061 - RNA, 12 nt, Artificial Sequence
  Description of Artificial Sequence: Synthetic oligonucleotide
ucuuggugcgug

SEQ ID NO: 6062 - RNA, 13 nt, Artificial Sequence
  Description of Artificial Sequence: Synthetic oligonucleotide
uuggauucaucag

SEQ ID NO: 6063 - RNA, 12 nt, Artificial Sequence
  Description of Artificial Sequence: Synthetic oligonucleotide
ggaauaccuaag

SEQ ID NO: 6064 - RNA, 11 nt, Artificial Sequence
  Description of Artificial Sequence: Synthetic oligonucleotide
uuugaggcuca

SEQ ID NO: 6065 - RNA, 10 nt, Artificial Sequence
  Description of Artificial Sequence: Synthetic oligonucleotide
cuacaauugg

SEQ ID NO: 6066 - RNA, 11 nt, Artificial Sequence
  Description of Artificial Sequence: Synthetic oligonucleotide
aguuaggagcc

SEQ ID NO: 6067 - RNA, 12 nt, Artificial Sequence
  Description of Artificial Sequence: Synthetic oligonucleotide
gucaauauccac

SEQ ID NO: 6068 - RNA, 12 nt, Artificial Sequence
  Description of Artificial Sequence: Synthetic oligonucleotide
uguucagucaca

SEQ ID NO: 6069 - RNA, 11 nt, Artificial Sequence
  Description of Artificial Sequence: Synthetic oligonucleotide
cacacacauac

SEQ ID NO: 6070 - RNA, 11 nt, Artificial Sequence
  Description of Artificial Sequence: Synthetic oligonucleotide
uccuuuugcuu

SEQ ID NO: 6071 - RNA, 15 nt, Artificial Sequence
  Description of Artificial Sequence: Synthetic oligonucleotide
uuuaaaguaauuuuu

SEQ ID NO: 6072 - RNA, 12 nt, Artificial Sequence
  Description of Artificial Sequence: Synthetic oligonucleotide
aacagucaaugg

SEQ ID NO: 6073 - RNA, 12 nt, Artificial Sequence
  Description of Artificial Sequence: Synthetic oligonucleotide
cgacaaaccaau

SEQ ID NO: 6074 - RNA, 11 nt, Artificial Sequence
  Description of Artificial Sequence: Synthetic oligonucleotide
cugcuaccacu

SEQ ID NO: 6075 - RNA, 12 nt, Artificial Sequence
  Description of Artificial Sequence: Synthetic oligonucleotide
caagcggucuua

SEQ ID NO: 6076 - RNA, 12 nt, Artificial Sequence
  Description of Artificial Sequence: Synthetic oligonucleotide
gucuuaccggcu

SEQ ID NO: 6077 - RNA, 10 nt, Artificial Sequence
  Description of Artificial Sequence: Synthetic oligonucleotide
auggguuacc

SEQ ID NO: 6078 - RNA, 10 nt, Artificial Sequence
  Description of Artificial Sequence: Synthetic oligonucleotide
uuaccugcga

SEQ ID NO: 6079 - RNA, 11 nt, Artificial Sequence
  Description of Artificial Sequence: Synthetic oligonucleotide
aucuugcugag

SEQ ID NO: 6080 - RNA, 12 nt, Artificial Sequence
  Description of Artificial Sequence: Synthetic oligonucleotide
gcauaaaacagu

SEQ ID NO: 6081 - RNA, 11 nt, Artificial Sequence
  Description of Artificial Sequence: Synthetic oligonucleotide
uccuuuauccu

SEQ ID NO: 6082 - RNA, 11 nt, Artificial Sequence
  Description of Artificial Sequence: Synthetic oligonucleotide
aacgcaaguug

SEQ ID NO: 6083 - RNA, 12 nt, Artificial Sequence
  Description of Artificial Sequence: Synthetic oligonucleotide
aacugaaaccau

SEQ ID NO: 6084 - RNA, 13 nt, Artificial Sequence
  Description of Artificial Sequence: Synthetic oligonucleotide
cuuuguuaaauau

SEQ ID NO: 6085 - RNA, 13 nt, Artificial Sequence
  Description of Artificial Sequence: Synthetic oligonucleotide
uauauuaaaaguu

SEQ ID NO: 6086 - RNA, 12 nt, Artificial Sequence
  Description of Artificial Sequence: Synthetic oligonucleotide
uuuugacuuaac

SEQ ID NO: 6087 - RNA, 12 nt, Artificial Sequence
  Description of Artificial Sequence: Synthetic oligonucleotide
caaacucagcac

SEQ ID NO: 6088 - RNA, 10 nt, Artificial Sequence
  Description of Artificial Sequence: Synthetic oligonucleotide
gcugaccuca

SEQ ID NO: 6089 - RNA, 13 nt, Artificial Sequence
  Description of Artificial Sequence: Synthetic oligonucleotide
uuauucagaucgc

SEQ ID NO: 6090 - RNA, 12 nt, Artificial Sequence
  Description of Artificial Sequence: Synthetic oligonucleotide
ggguucugggau

SEQ ID NO: 6091 - RNA, 14 nt, Artificial Sequence
  Description of Artificial Sequence: Synthetic oligonucleotide
uauuggaaauuaug

SEQ ID NO: 6092 - RNA, 12 nt, Artificial Sequence
  Description of Artificial Sequence: Synthetic oligonucleotide
uggaagcacuag

SEQ ID NO: 6093 - RNA, 12 nt, Artificial Sequence
  Description of Artificial Sequence: Synthetic oligonucleotide
uuuuuaugugga

SEQ ID NO: 6094 - RNA, 11 nt, Artificial Sequence
  Description of Artificial Sequence: Synthetic oligonucleotide
gaauugguaga

SEQ ID NO: 6095 - RNA, 12 nt, Artificial Sequence
  Description of Artificial Sequence: Synthetic oligonucleotide
uagacuuggaga

SEQ ID NO: 6096 - RNA, 12 nt, Artificial Sequence
  Description of Artificial Sequence: Synthetic oligonucleotide
uacaguauucca

SEQ ID NO: 6097 - RNA, 14 nt, Artificial Sequence
  Description of Artificial Sequence: Synthetic oligonucleotide
cacugaugaauuaa

SEQ ID NO: 6098 - RNA, 11 nt, Artificial Sequence
  Description of Artificial Sequence: Synthetic oligonucleotide
cacaucaucac

SEQ ID NO: 6099 - RNA, 12 nt, Artificial Sequence
  Description of Artificial Sequence: Synthetic oligonucleotide
ucaccaaacaga

SEQ ID NO: 6100 - RNA, 11 nt, Artificial Sequence
  Description of Artificial Sequence: Synthetic oligonucleotide
gaacaugaugg

SEQ ID NO: 6101 - RNA, 11 nt, Artificial Sequence
  Description of Artificial Sequence: Synthetic oligonucleotide
auguagacugc

SEQ ID NO: 6102 - RNA, 12 nt, Artificial Sequence
  Description of Artificial Sequence: Synthetic oligonucleotide
gaucuauuuaug

SEQ ID NO: 6103 - RNA, 11 nt, Artificial Sequence
  Description of Artificial Sequence: Synthetic oligonucleotide
cacuauuauca

SEQ ID NO: 6104 - RNA, 10 nt, Artificial Sequence
  Description of Artificial Sequence: Synthetic oligonucleotide
ucaguucugc

SEQ ID NO: 6105 - RNA, 12 nt, Artificial Sequence
  Description of Artificial Sequence: Synthetic oligonucleotide
gauuaaaccuac

SEQ ID NO: 6106 - RNA, 12 nt, Artificial Sequence
  Description of Artificial Sequence: Synthetic oligonucleotide
uaaaauccuucu

SEQ ID NO: 6107 - RNA, 11 nt, Artificial Sequence
  Description of Artificial Sequence: Synthetic oligonucleotide
augcuguagac

SEQ ID NO: 6108 - RNA, 12 nt, Artificial Sequence
  Description of Artificial Sequence: Synthetic oligonucleotide
ugauaggaauag

SEQ ID NO: 6109 - RNA, 10 nt, Artificial Sequence
  Description of Artificial Sequence: Synthetic oligonucleotide
auggcccuga

SEQ ID NO: 6110 - RNA, 10 nt, Artificial Sequence
  Description of Artificial Sequence: Synthetic oligonucleotide
uccucaagca

SEQ ID NO: 6111 - RNA, 9 nt, Artificial Sequence
  Description of Artificial Sequence: Synthetic oligonucleotide
uucagccca

SEQ ID NO: 6112 - RNA, 10 nt, Artificial Sequence
  Description of Artificial Sequence: Synthetic oligonucleotide
cugcugaacc

SEQ ID NO: 6113 - RNA, 11 nt, Artificial Sequence
  Description of Artificial Sequence: Synthetic oligonucleotide
aguucucuuca

SEQ ID NO: 6114 - RNA, 10 nt, Artificial Sequence
  Description of Artificial Sequence: Synthetic oligonucleotide
cagccuagag

SEQ ID NO: 6115 - RNA, 12 nt, Artificial Sequence
  Description of Artificial Sequence: Synthetic oligonucleotide
ucugugaagugu

SEQ ID NO: 6116 - RNA, 13 nt, Artificial Sequence
  Description of Artificial Sequence: Synthetic oligonucleotide
gagaaaauuucaa

SEQ ID NO: 6117 - RNA, 10 nt, Artificial Sequence
  Description of Artificial Sequence: Synthetic oligonucleotide
auccuccuga

SEQ ID NO: 6118 - RNA, 11 nt, Artificial Sequence
  Description of Artificial Sequence: Synthetic oligonucleotide
ugacaucauau

SEQ ID NO: 6119 - RNA, 12 nt, Artificial Sequence
  Description of Artificial Sequence: Synthetic oligonucleotide
aucuucaucaua

SEQ ID NO: 6120 - RNA, 12 nt, Artificial Sequence
  Description of Artificial Sequence: Synthetic oligonucleotide
acuagcuauuaa

SEQ ID NO: 6121 - RNA, 13 nt, Artificial Sequence
  Description of Artificial Sequence: Synthetic oligonucleotide
cucuacuaaaaau

SEQ ID NO: 6122 - RNA, 11 nt, Artificial Sequence
  Description of Artificial Sequence: Synthetic oligonucleotide
cuaucucgccu

SEQ ID NO: 6123 - RNA, 12 nt, Artificial Sequence
  Description of Artificial Sequence: Synthetic oligonucleotide
uucgguccaguu

SEQ ID NO: 6124 - RNA, 10 nt, Artificial Sequence
  Description of Artificial Sequence: Synthetic oligonucleotide
auguagccgc

SEQ ID NO: 6125 - RNA, 11 nt, Artificial Sequence
  Description of Artificial Sequence: Synthetic oligonucleotide
gaggagacuug

SEQ ID NO: 6126 - RNA, 11 nt, Artificial Sequence
  Description of Artificial Sequence: Synthetic oligonucleotide
aguagugagga

SEQ ID NO: 6127 - RNA, 13 nt, Artificial Sequence
  Description of Artificial Sequence: Synthetic oligonucleotide
agaugaguacaaa

SEQ ID NO: 6128 - RNA, 12 nt, Artificial Sequence
  Description of Artificial Sequence: Synthetic oligonucleotide
uuguuaaugggc

SEQ ID NO: 6129 - RNA, 12 nt, Artificial Sequence
  Description of Artificial Sequence: Synthetic oligonucleotide
uuuuaauuuauu

SEQ ID NO: 6130 - RNA, 11 nt, Artificial Sequence
  Description of Artificial Sequence: Synthetic oligonucleotide
auuuaaauaug

SEQ ID NO: 6131 - RNA, 12 nt, Artificial Sequence
  Description of Artificial Sequence: Synthetic oligonucleotide
auccuuuguuuc

SEQ ID NO: 6132 - RNA, 13 nt, Artificial Sequence
  Description of Artificial Sequence: Synthetic oligonucleotide
gucuaaguguuug

SEQ ID NO: 6133 - RNA, 11 nt, Artificial Sequence
  Description of Artificial Sequence: Synthetic oligonucleotide
ccugugacaaa

SEQ ID NO: 6134 - RNA, 12 nt, Artificial Sequence
  Description of Artificial Sequence: Synthetic oligonucleotide
caggcugaauua

SEQ ID NO: 6135 - RNA, 13 nt, Artificial Sequence
  Description of Artificial Sequence: Synthetic oligonucleotide
ucauucuuacaau

SEQ ID NO: 6136 - RNA, 14 nt, Artificial Sequence
  Description of Artificial Sequence: Synthetic oligonucleotide
cauucuuacaauug

SEQ ID NO: 6137 - RNA, 11 nt, Artificial Sequence
  Description of Artificial Sequence: Synthetic oligonucleotide
agagaguguac

SEQ ID NO: 6138 - RNA, 11 nt, Artificial Sequence
  Description of Artificial Sequence: Synthetic oligonucleotide
gaacucagcag

SEQ ID NO: 6139 - RNA, 12 nt, Artificial Sequence
  Description of Artificial Sequence: Synthetic oligonucleotide
uuauuuucagua

SEQ ID NO: 6140 - RNA, 11 nt, Artificial Sequence
  Description of Artificial Sequence: Synthetic oligonucleotide
cuuaaauggaa

SEQ ID NO: 6141 - RNA, 12 nt, Artificial Sequence
  Description of Artificial Sequence: Synthetic oligonucleotide
gccuaaaauugu

SEQ ID NO: 6142 - RNA, 12 nt, Artificial Sequence
  Description of Artificial Sequence: Synthetic oligonucleotide
acuaacaucugg

SEQ ID NO: 6143 - RNA, 11 nt, Artificial Sequence
  Description of Artificial Sequence: Synthetic oligonucleotide
gacugugagcu

SEQ ID NO: 6144 - RNA, 13 nt, Artificial Sequence
  Description of Artificial Sequence: Synthetic oligonucleotide
gcuuuuuauuaau

SEQ ID NO: 6145 - RNA, 12 nt, Artificial Sequence
  Description of Artificial Sequence: Synthetic oligonucleotide
ucuucuuacauu

SEQ ID NO: 6146 - RNA, 14 nt, Artificial Sequence
  Description of Artificial Sequence: Synthetic oligonucleotide
auuuguaaaaaugu

SEQ ID NO: 6147 - RNA, 14 nt, Artificial Sequence
  Description of Artificial Sequence: Synthetic oligonucleotide
ucuuaauucauauu

SEQ ID NO: 6148 - RNA, 12 nt, Artificial Sequence
  Description of Artificial Sequence: Synthetic oligonucleotide
aacuaaucauga

SEQ ID NO: 6149 - RNA, 11 nt, Artificial Sequence
  Description of Artificial Sequence: Synthetic oligonucleotide
cugcucuuggg

SEQ ID NO: 6150 - RNA, 12 nt, Artificial Sequence
  Description of Artificial Sequence: Synthetic oligonucleotide
aguagcuuugag

SEQ ID NO: 6151 - RNA, 13 nt, Artificial Sequence
  Description of Artificial Sequence: Synthetic oligonucleotide
acguaauauuuca

SEQ ID NO: 6152 - RNA, 12 nt, Artificial Sequence
  Description of Artificial Sequence: Synthetic oligonucleotide
auucucuucacu

SEQ ID NO: 6153 - RNA, 13 nt, Artificial Sequence
  Description of Artificial Sequence: Synthetic oligonucleotide
uaaugcuaagaaa

SEQ ID NO: 6154 - RNA, 11 nt, Artificial Sequence
  Description of Artificial Sequence: Synthetic oligonucleotide
cugaaaaucaa

SEQ ID NO: 6155 - RNA, 13 nt, Artificial Sequence
  Description of Artificial Sequence: Synthetic oligonucleotide
auaugauuacuuu

SEQ ID NO: 6156 - RNA, 13 nt, Artificial Sequence
  Description of Artificial Sequence: Synthetic oligonucleotide
auuuuguucuaca

SEQ ID NO: 6157 - RNA, 11 nt, Artificial Sequence
  Description of Artificial Sequence: Synthetic oligonucleotide
ccgggacucuc

SEQ ID NO: 6158 - RNA, 13 nt, Artificial Sequence
  Description of Artificial Sequence: Synthetic oligonucleotide
cuuuaaaguaaag

SEQ ID NO: 6159 - RNA, 12 nt, Artificial Sequence
  Description of Artificial Sequence: Synthetic oligonucleotide
cuggaagccugg

SEQ ID NO: 6160 - RNA, 13 nt, Artificial Sequence
  Description of Artificial Sequence: Synthetic oligonucleotide
aaacaaaagagag

SEQ ID NO: 6161 - RNA, 12 nt, Artificial Sequence
  Description of Artificial Sequence: Synthetic oligonucleotide
ucaguuaugccg

SEQ ID NO: 6162 - RNA, 12 nt, Artificial Sequence
  Description of Artificial Sequence: Synthetic oligonucleotide
aaaagaagucca

SEQ ID NO: 6163 - RNA, 10 nt, Artificial Sequence
  Description of Artificial Sequence: Synthetic oligonucleotide
ggugagguua

SEQ ID NO: 6164 - RNA, 10 nt, Artificial Sequence
  Description of Artificial Sequence: Synthetic oligonucleotide
ggaagaggac

SEQ ID NO: 6165 - RNA, 12 nt, Artificial Sequence
  Description of Artificial Sequence: Synthetic oligonucleotide
agcaaguauugu

SEQ ID NO: 6166 - RNA, 11 nt, Artificial Sequence
  Description of Artificial Sequence: Synthetic oligonucleotide
uuguagcacuc

SEQ ID NO: 6167 - RNA, 13 nt, Artificial Sequence
  Description of Artificial Sequence: Synthetic oligonucleotide
caaaaccacaaau

SEQ ID NO: 6168 - RNA, 11 nt, Artificial Sequence
  Description of Artificial Sequence: Synthetic oligonucleotide
aagcccauaca

SEQ ID NO: 6169 - RNA, 10 nt, Artificial Sequence
  Description of Artificial Sequence: Synthetic oligonucleotide
gcccauacag

SEQ ID NO: 6170 - RNA, 11 nt, Artificial Sequence
  Description of Artificial Sequence: Synthetic oligonucleotide
agaaaccuucc

SEQ ID NO: 6171 - RNA, 9 nt, Artificial Sequence
  Description of Artificial Sequence: Synthetic oligonucleotide
uauaccuac

SEQ ID NO: 6172 - RNA, 12 nt, Artificial Sequence
  Description of Artificial Sequence: Synthetic oligonucleotide
ccaguuuucgga

SEQ ID NO: 6173 - RNA, 8 nt, Artificial Sequence
  Description of Artificial Sequence: Synthetic oligonucleotide
gaacaggg

SEQ ID NO: 6174 - RNA, 12 nt, Artificial Sequence
  Description of Artificial Sequence: Synthetic oligonucleotide
uaacuuuccagu

SEQ ID NO: 6175 - RNA, 13 nt, Artificial Sequence
  Description of Artificial Sequence: Synthetic oligonucleotide
aaguuugguuuug

SEQ ID NO: 6176 - RNA, 11 nt, Artificial Sequence
  Description of Artificial Sequence: Synthetic oligonucleotide
uucccacugua

SEQ ID NO: 6177 - RNA, 12 nt, Artificial Sequence
  Description of Artificial Sequence: Synthetic oligonucleotide
gauaccauauga

SEQ ID NO: 6178 - RNA, 10 nt, Artificial Sequence
  Description of Artificial Sequence: Synthetic oligonucleotide
acaugggcug

SEQ ID NO: 6179 - RNA, 12 nt, Artificial Sequence
  Description of Artificial Sequence: Synthetic oligonucleotide
aacuuuuucaua

SEQ ID NO: 6180 - RNA, 11 nt, Artificial Sequence
  Description of Artificial Sequence: Synthetic oligonucleotide
augaggccgga

SEQ ID NO: 6181 - RNA, 10 nt, Artificial Sequence
  Description of Artificial Sequence: Synthetic oligonucleotide
cugcauuugu

SEQ ID NO: 6182 - RNA, 12 nt, Artificial Sequence
  Description of Artificial Sequence: Synthetic oligonucleotide
auguuuacuacc

SEQ ID NO: 6183 - RNA, 14 nt, Artificial Sequence
  Description of Artificial Sequence: Synthetic oligonucleotide
auuuuuugaugaaa

SEQ ID NO: 6184 - RNA, 13 nt, Artificial Sequence
  Description of Artificial Sequence: Synthetic oligonucleotide
agugugugaauuu

SEQ ID NO: 6185 - RNA, 12 nt, Artificial Sequence
  Description of Artificial Sequence: Synthetic oligonucleotide
agcaauguaugu

SEQ ID NO: 6186 - RNA, 13 nt, Artificial Sequence
  Description of Artificial Sequence: Synthetic oligonucleotide
aagcacauauaua

SEQ ID NO: 6187 - RNA, 13 nt, Artificial Sequence
  Description of Artificial Sequence: Synthetic oligonucleotide
uaauaguuucucc

SEQ ID NO: 6188 - RNA, 12 nt, Artificial Sequence
  Description of Artificial Sequence: Synthetic oligonucleotide
guuucuccaaau

SEQ ID NO: 6189 - RNA, 12 nt, Artificial Sequence
  Description of Artificial Sequence: Synthetic oligonucleotide
acuuccuagaaa

SEQ ID NO: 6190 - RNA, 12 nt, Artificial Sequence
  Description of Artificial Sequence: Synthetic oligonucleotide
acaccauauaug

SEQ ID NO: 6191 - RNA, 13 nt, Artificial Sequence
  Description of Artificial Sequence: Synthetic oligonucleotide
uauaugaauggag

SEQ ID NO: 6192 - RNA, 12 nt, Artificial Sequence
  Description of Artificial Sequence: Synthetic oligonucleotide
cauuuacaggga

SEQ ID NO: 6193 - RNA, 12 nt, Artificial Sequence
  Description of Artificial Sequence: Synthetic oligonucleotide
auuuacagggac

SEQ ID NO: 6194 - RNA, 9 nt, Artificial Sequence
  Description of Artificial Sequence: Synthetic oligonucleotide
gggaccuga

SEQ ID NO: 6195 - RNA, 13 nt, Artificial Sequence
  Description of Artificial Sequence: Synthetic oligonucleotide
guuugacugcauc

SEQ ID NO: 6196 - RNA, 12 nt, Artificial Sequence
  Description of Artificial Sequence: Synthetic oligonucleotide
uugacugcaucg

SEQ ID NO: 6197 - RNA, 11 nt, Artificial Sequence
  Description of Artificial Sequence: Synthetic oligonucleotide
aguucacaggg

SEQ ID NO: 6198 - RNA, 12 nt, Artificial Sequence
  Description of Artificial Sequence: Synthetic oligonucleotide
gcaccucugucc

SEQ ID NO: 6199 - RNA, 14 nt, Artificial Sequence
  Description of Artificial Sequence: Synthetic oligonucleotide
guuugucuuuuuaa

SEQ ID NO: 6200 - RNA, 13 nt, Artificial Sequence
  Description of Artificial Sequence: Synthetic oligonucleotide
uugucuuuuuaag

SEQ ID NO: 6201 - RNA, 12 nt, Artificial Sequence
  Description of Artificial Sequence: Synthetic oligonucleotide
cuaaagguuguc

SEQ ID NO: 6202 - RNA, 11 nt, Artificial Sequence
  Description of Artificial Sequence: Synthetic oligonucleotide
agguugucgac

SEQ ID NO: 6203 - RNA, 12 nt, Artificial Sequence
  Description of Artificial Sequence: Synthetic oligonucleotide
ccuggcaauugu

SEQ ID NO: 6204 - RNA, 11 nt, Artificial Sequence
  Description of Artificial Sequence: Synthetic oligonucleotide
guggugcgagg

SEQ ID NO: 6205 - RNA, 12 nt, Artificial Sequence
  Description of Artificial Sequence: Synthetic oligonucleotide
gagacaugaaau

SEQ ID NO: 6206 - RNA, 12 nt, Artificial Sequence
  Description of Artificial Sequence: Synthetic oligonucleotide
uauauuucucca

SEQ ID NO: 6207 - RNA, 9 nt, Artificial Sequence
  Description of Artificial Sequence: Synthetic oligonucleotide
augaaggcu

SEQ ID NO: 6208 - RNA, 10 nt, Artificial Sequence
  Description of Artificial Sequence: Synthetic oligonucleotide
cuggaguggu

SEQ ID NO: 6209 - RNA, 10 nt, Artificial Sequence
  Description of Artificial Sequence: Synthetic oligonucleotide
ggaagagagg

SEQ ID NO: 6210 - RNA, 11 nt, Artificial Sequence
  Description of Artificial Sequence: Synthetic oligonucleotide
uugcaucgggc

SEQ ID NO: 6211 - RNA, 12 nt, Artificial Sequence
  Description of Artificial Sequence: Synthetic oligonucleotide
uauccuacugug

SEQ ID NO: 6212 - RNA, 12 nt, Artificial Sequence
  Description of Artificial Sequence: Synthetic oligonucleotide
ccuacuguguaa

SEQ ID NO: 6213 - RNA, 11 nt, Artificial Sequence
  Description of Artificial Sequence: Synthetic oligonucleotide
cuuguagugua

SEQ ID NO: 6214 - RNA, 12 nt, Artificial Sequence
  Description of Artificial Sequence: Synthetic oligonucleotide
cuuuguugauug

SEQ ID NO: 6215 - RNA, 13 nt, Artificial Sequence
  Description of Artificial Sequence: Synthetic oligonucleotide
uuguugauugaaa

SEQ ID NO: 6216 - RNA, 14 nt, Artificial Sequence
  Description of Artificial Sequence: Synthetic oligonucleotide
ucuuuuucuuccau

SEQ ID NO: 6217 - RNA, 12 nt, Artificial Sequence
  Description of Artificial Sequence: Synthetic oligonucleotide
aucuuccuucua

SEQ ID NO: 6218 - RNA, 12 nt, Artificial Sequence
  Description of Artificial Sequence: Synthetic oligonucleotide
ugaaugcuucau

SEQ ID NO: 6219 - RNA, 12 nt, Artificial Sequence
  Description of Artificial Sequence: Synthetic oligonucleotide
gaaugcuucaug

SEQ ID NO: 6220 - RNA, 12 nt, Artificial Sequence
  Description of Artificial Sequence: Synthetic oligonucleotide
auucuacuuuga

SEQ ID NO: 6221 - RNA, 12 nt, Artificial Sequence
  Description of Artificial Sequence: Synthetic oligonucleotide
gcaacuacagac

SEQ ID NO: 6222 - RNA, 12 nt, Artificial Sequence
  Description of Artificial Sequence: Synthetic oligonucleotide
accaaggucaac

SEQ ID NO: 6223 - RNA, 12 nt, Artificial Sequence
  Description of Artificial Sequence: Synthetic oligonucleotide
gacuaucucgac

SEQ ID NO: 6224 - RNA, 12 nt, Artificial Sequence
  Description of Artificial Sequence: Synthetic oligonucleotide
accuucccaaac

SEQ ID NO: 6225 - RNA, 13 nt, Artificial Sequence
  Description of Artificial Sequence: Synthetic oligonucleotide
caagcuuagaacu

SEQ ID NO: 6226 - RNA, 14 nt, Artificial Sequence
  Description of Artificial Sequence: Synthetic oligonucleotide
gcuuagaacuuuaa

SEQ ID NO: 6227 - RNA, 13 nt, Artificial Sequence
  Description of Artificial Sequence: Synthetic oligonucleotide
aacuuuaagcaac

SEQ ID NO: 6228 - RNA, 10 nt, Artificial Sequence
  Description of Artificial Sequence: Synthetic oligonucleotide
agaccaccac

SEQ ID NO: 6229 - RNA, 13 nt, Artificial Sequence
  Description of Artificial Sequence: Synthetic oligonucleotide
cgagaaauaaagu

SEQ ID NO: 6230 - RNA, 13 nt, Artificial Sequence
  Description of Artificial Sequence: Synthetic oligonucleotide
gagaaauaaaguu

SEQ ID NO: 6231 - RNA, 11 nt, Artificial Sequence
  Description of Artificial Sequence: Synthetic oligonucleotide
ggaaaugaucc

SEQ ID NO: 6232 - RNA, 12 nt, Artificial Sequence
  Description of Artificial Sequence: Synthetic oligonucleotide
aagaaaugaaac

SEQ ID NO: 6233 - RNA, 12 nt, Artificial Sequence
  Description of Artificial Sequence: Synthetic oligonucleotide
uuuccauccucc

SEQ ID NO: 6234 - RNA, 14 nt, Artificial Sequence
  Description of Artificial Sequence: Synthetic oligonucleotide
cugaaaaucuuuga

SEQ ID NO: 6235 - RNA, 10 nt, Artificial Sequence
  Description of Artificial Sequence: Synthetic oligonucleotide
gccguucagg

SEQ ID NO: 6236 - RNA, 12 nt, Artificial Sequence
  Description of Artificial Sequence: Synthetic oligonucleotide
aggguccagaag

SEQ ID NO: 6237 - RNA, 12 nt, Artificial Sequence
  Description of Artificial Sequence: Synthetic oligonucleotide
caagacugcuug

SEQ ID NO: 6238 - RNA, 12 nt, Artificial Sequence
  Description of Artificial Sequence: Synthetic oligonucleotide
ccaugucuuugg

SEQ ID NO: 6239 - RNA, 10 nt, Artificial Sequence
  Description of Artificial Sequence: Synthetic oligonucleotide
ccugaaacac

SEQ ID NO: 6240 - RNA, 11 nt, Artificial Sequence
  Description of Artificial Sequence: Synthetic oligonucleotide
cucuguaccuc

SEQ ID NO: 6241 - RNA, 11 nt, Artificial Sequence
  Description of Artificial Sequence: Synthetic oligonucleotide
gcaagacaaga

SEQ ID NO: 6242 - RNA, 12 nt, Artificial Sequence
  Description of Artificial Sequence: Synthetic oligonucleotide
caagacaagaaa

SEQ ID NO: 6243 - RNA, 11 nt, Artificial Sequence
  Description of Artificial Sequence: Synthetic oligonucleotide
guacaagaucc

SEQ ID NO: 6244 - RNA, 11 nt, Artificial Sequence
  Description of Artificial Sequence: Synthetic oligonucleotide
guacuugcaga

SEQ ID NO: 6245 - RNA, 12 nt, Artificial Sequence
  Description of Artificial Sequence: Synthetic oligonucleotide
gaucgauacaga

SEQ ID NO: 6246 - RNA, 12 nt, Artificial Sequence
  Description of Artificial Sequence: Synthetic oligonucleotide
auaaaaauaaau

SEQ ID NO: 6247 - RNA, 12 nt, Artificial Sequence
  Description of Artificial Sequence: Synthetic oligonucleotide
aaaaauaaauau

SEQ ID NO: 6248 - RNA, 12 nt, Artificial Sequence
  Description of Artificial Sequence: Synthetic oligonucleotide
uugacugcugug

SEQ ID NO: 6249 - RNA, 12 nt, Artificial Sequence
  Description of Artificial Sequence: Synthetic oligonucleotide
gagaugagagac

SEQ ID NO: 6250 - RNA, 9 nt, Artificial Sequence
  Description of Artificial Sequence: Synthetic oligonucleotide
cccacuugg

SEQ ID NO: 6251 - RNA, 3665 nt, Homo sapiens
ggcuuggggcagccggguagcucggaggucguggcgcugggggcuagcaccagcgcucugucgggaggcgcagcgguuagguggaccggucagcggacucaccggccagggcgcucggugcuggaauuugauauucauugauccggguuuuaucccucuucuuuuuucuuaaacauuuuuuuuuaaaacuguauuguuucucguuuuaauuuauuuuugcuugccauuccccacuugaaucgggccgacggcuuggggagauugcucuacuuccccaaaucacuguggauuuuggaaaccagcagaaagaggaaagagguagcaagagcuccagagagaagucgaggaagagagagacggggucagagagagcgcgcgggcgugcgagcagcgaaagcgacaggggcaaagugagugaccugcuuuugggggugaccgccggagcgcggcgugagcccucccccuugggaucccgcagcugaccagucgcgcugacggacagacagacagacaccgcccccagccccagcuaccaccuccuccccggccggcggcggacaguggacgcggcggcgagccgcgggcaggggccggagcccgcgcccggaggcgggguggagggggucggggcucgcggcgucgcacugaaacuuuucguccaacuucugggcuguucucgcuucggaggagccgugguccgcgcgggggaagccgagccgagcggagccgcgagaagugcuagcucgggccgggaggagccgcagccggaggagggggaggaggaagaagagaaggaagaggagagggggccgcaguggcgacucggcgcucggaagccgggcucauggacgggugaggcggcggugugcgcagacagugcuccagccgcgcgcgcuccccaggcccuggcccgggccucgggccggggaggaagaguagcucgccgaggcgccgaggagagcgggccgccccacagcccgagccggagagggagcgcgagccgcgccggccccggucgggccuccgaaaccaugaacuuucugcugucuugggugcauuggagccuugccuugcugcucuaccuccaccaugccaaguggucccaggcugcacccauggcagaaggaggagggcagaaucaucacgaaguggugaaguucauggaugucuaucagcgcagcuacugccauccaaucgagacccugguggacaucuuccaggaguacccugaugagaucgaguacaucuucaagccauccugugugccccugaugcgaugcgggggcugcugcaaugacgagggccuggagugugugcccacugaggaguccaacaucaccaugcagauuaugcggaucaaaccucaccaaggccagcacauaggagagaugagcuuccuacagcacaacaaaugugaaugcagaccaaagaaagauagagcaagacaagaaaaaaaaucaguucgaggaaagggaaaggggcaaaaacgaaagcgcaagaaaucccgguauaaguccuggagcguguacguuggugcccgcugcugucuaaugcccuggagccucccuggcccccaucccugugggccuugcucagagcggagaaagcauuuguuuguacaagauccgcagacguguaaauguuccugcaaaaacacagacucgcguugcaaggcgaggcagcuugaguuaaacgaacguacuugcagaugugacaagccgaggcggugagccgggcaggaggaaggagccucccucaggguuucgggaaccagaucucucaccaggaaagacugauacagaacgaucgauacagaaaccacgcugccgccaccacaccaucaccaucgacagaacaguccuuaauccagaaaccugaaaugaaggaagaggagacucugcgcagagcacuuuggguccggagggcgagacuccggcggaagcauucccgggcgggugacccagcacggucccucuuggaauuggauucgccauuuuauuuuucuugcugcuaaaucaccgagcccggaagauuagagaguuuuauuucugggauuccuguagacacacccacccacauacauacauuuauauauauauauauuauauauauauaaaaauaaauaucucuauuuuauauauauaaaauauauauauucuuuuuuuaaauuaacagugcuaauguuauuggugucuucacuggauguauuugacugcuguggacuugaguugggaggggaauguucccacucagauccugacagggaagaggaggagaugagagacucuggcaugaucuuuuuuuugucccacuugguggggccaggguccucuccccugcccaggaaugugcaaggccagggcaugggggcaaauaugacccaguuuugggaacaccgacaaacccagcccuggcgcugagccucucuaccccaggucagacggacagaaagacagaucacagguacagggaugaggacaccggcucugaccaggaguuuggggagcuucaggacauugcugugcuuuggggauucccuccacaugcugcacgcgcaucucgcccccaggggcacugccuggaagauucaggagccugggcggccuucgcuuacucucaccugcuucugaguugcccaggagaccacuggcagaugucccggcgaagagaagagacacauuguuggaagaagcagcccaugacagcuccccuuccugggacucgcccucauccucuuccugcuccccuuccuggggugcagccuaaaaggaccuauguccucacaccauugaaaccacuaguucuguccccccaggagaccugguugugugugugugagugguugaccuuccuccauccccugguccuucccuucccuucccgaggcacagagagacagggcaggauccacgugcccauuguggaggcagagaaaagagaaaguguuuuauauacgguacuuauuuaauaucccuuuuuaauuagaaauuaaaacaguuaauuuaauuaaagaguaggguuuuuuuucaguauucuugguuaauauuuaauuucaacuauuuaugagauguaucuuuugcucucucuugcucucuuauuuguaccgguuuuuguauauaaaauucauguuuccaaucucucucucccugaucggugacagucacuagcuuaucuugaacagauauuuaauuuugcuaacacucagcucugcccuccccgauccccuggcuccccagcacacauuccuuugaaauaagguuucaauauacaucuacauacuauauauauauuuggcaacuuguauuuguguguauauauauauauauauguuuauguauauaugugauucugauaaaauagacauugcuauucuguuuuuuauauguaaaaacaaaacaagaaaaaauagagaauucuacauacuaaaucucucuccuuuuuuaauuuuaauauuuguuaucauuuauuuauuggugcuacuguuuauccguaauaauuguggggaaaagauauuaacaucacgucuuugucucuagugcaguuuuucgagauauuccguaguacauauuuauuuuuaaacaacgacaaagaaauacagauauaucuuaaaaaaaaaaaagcauuuuguauuaaagaauuuaauucugaucucaaaaaaaaaaaaa

SEQ ID NO: 6252 - RNA, 3614 nt, Homo sapiens
ggcuuggggcagccggguagcucggaggucguggcgcugggggcuagcaccagcgcucugucgggaggcgcagcgguuagguggaccggucagcggacucaccggccagggcgcucggugcuggaauuugauauucauugauccggguuuuaucccucuucuuuuuucuuaaacauuuuuuuuuaaaacuguauuguuucucguuuuaauuuauuuuugcuugccauuccccacuugaaucgggccgacggcuuggggagauugcucuacuuccccaaaucacuguggauuuuggaaaccagcagaaagaggaaagagguagcaagagcuccagagagaagucgaggaagagagagacggggucagagagagcgcgcgggcgugcgagcagcgaaagcgacaggggcaaagugagugaccugcuuuugggggugaccgccggagcgcggcgugagcccucccccuugggaucccgcagcugaccagucgcgcugacggacagacagacagacaccgcccccagccccagcuaccaccuccuccccggccggcggcggacaguggacgcggcggcgagccgcgggcaggggccggagcccgcgcccggaggcgggguggagggggucggggcucgcggcgucgcacugaaacuuuucguccaacuucugggcuguucucgcuucggaggagccgugguccgcgcgggggaagccgagccgagcggagccgcgagaagugcuagcucgggccgggaggagccgcagccggaggagggggaggaggaagaagagaaggaagaggagagggggccgcaguggcgacucggcgcucggaagccgggcucauggacgggugaggcggcggugugcgcagacagugcuccagccgcgcgcgcuccccaggcccuggcccgggccucgggccggggaggaagaguagcucgccgaggcgccgaggagagcgggccgccccacagcccgagccggagagggagcgcgagccgcgccggccccggucgggccuccgaaaccaugaacuuucugcugucuugggugcauuggagccuugccuugcugcucuaccuccaccaugccaaguggucccaggcugcacccauggcagaaggaggagggcagaaucaucacgaaguggugaaguucauggaugucuaucagcgcagcuacugccauccaaucgagacccugguggacaucuuccaggaguacccugaugagaucgaguacaucuucaagccauccugugugccccugaugcgaugcgggggcugcugcaaugacgagggccuggagugugugcccacugaggaguccaacaucaccaugcagauuaugcggaucaaaccucaccaaggccagcacauaggagagaugagcuuccuacagcacaacaaaugugaaugcagaccaaagaaagauagagcaagacaagaaaaaaaaucaguucgaggaaagggaaaggggcaaaaacgaaagcgcaagaaaucccgguauaaguccuggagcguucccugugggccuugcucagagcggagaaagcauuuguuuguacaagauccgcagacguguaaauguuccugcaaaaacacagacucgcguugcaaggcgaggcagcuugaguuaaacgaacguacuugcagaugugacaagccgaggcggugagccgggcaggaggaaggagccucccucaggguuucgggaaccagaucucucaccaggaaagacugauacagaacgaucgauacagaaaccacgcugccgccaccacaccaucaccaucgacagaacaguccuuaauccagaaaccugaaaugaaggaagaggagacucugcgcagagcacuuuggguccggagggcgagacuccggcggaagcauucccgggcgggugacccagcacggucccucuuggaauuggauucgccauuuuauuuuucuugcugcuaaaucaccgagcccggaagauuagagaguuuuauuucugggauuccuguagacacacccacccacauacauacauuuauauauauauauauuauauauauauaaaaauaaauaucucuauuuuauauauauaaaauauauauauucuuuuuuuaaauuaacagugcuaauguuauuggugucuucacuggauguauuugacugcuguggacuugaguugggaggggaauguucccacucagauccugacagggaagaggaggagaugagagacucuggcaugaucuuuuuuuugucccacuugguggggccaggguccucuccccugcccaggaaugugcaaggccagggcaugggggcaaauaugacccaguuuugggaacaccgacaaacccagcccuggcgcugagccucucuaccccaggucagacggacagaaagacagaucacagguacagggaugaggacaccggcucugaccaggaguuuggggagcuucaggacauugcugugcuuuggggauucccuccacaugcugcacgcgcaucucgcccccaggggcacugccuggaagauucaggagccugggcggccuucgcuuacucucaccugcuucugaguugcccaggagaccacuggcagaugucccggcgaagagaagagacacauuguuggaagaagcagcccaugacagcuccccuuccugggacucgcccucauccucuuccugcuccccuuccuggggugcagccuaaaaggaccuauguccucacaccauugaaaccacuaguucuguccccccaggagaccugguugugugugugugagugguugaccuuccuccauccccugguccuucccuucccuucccgaggcacagagagacagggcaggauccacgugcccauuguggaggcagagaaaagagaaaguguuuuauauacgguacuuauuuaauaucccuuuuuaauuagaaauuaaaacaguuaauuuaauuaaagaguaggguuuuuuuucaguauucuugguuaauauuuaauuucaacuauuuaugagauguaucuuuugcucucucuugcucucuuauuuguaccgguuuuuguauauaaaauucauguuuccaaucucucucucccugaucggugacagucacuagcuuaucuugaacagauauuuaauuuugcuaacacucagcucugcccuccccgauccccuggcuccccagcacacauuccuuugaaauaagguuucaauauacaucuacauacuauauauauauuuggcaacuuguauuuguguguauauauauauauauauguuuauguauauaugugauucugauaaaauagacauugcuauucuguuuuuuauauguaaaaacaaaacaagaaaaaauagagaauucuacauacuaaaucucucuccuuuuuuaauuuuaauauuuguuaucauuuauuuauuggugcuacuguuuauccguaauaauuguggggaaaagauauuaacaucacgucuuugucucuagugcaguuuuucgagauauuccguaguacauauuuauuuuuaaacaacgacaaagaaauacagauauaucuuaaaaaaaaaaaagcauuuuguauuaaagaauuuaauucugaucucaaaaaaaaaaaaa

SEQ ID NO: 6253 - RNA, 3596 nt, Homo sapiens
ggcuuggggcagccggguagcucggaggucguggcgcugggggcuagcaccagcgcucugucgggaggcgcagcgguuagguggaccggucagcggacucaccggccagggcgcucggugcuggaauuugauauucauugauccggguuuuaucccucuucuuuuuucuuaaacauuuuuuuuuaaaacuguauuguuucucguuuuaauuuauuuuugcuugccauuccccacuugaaucgggccgacggcuuggggagauugcucuacuuccccaaaucacuguggauuuuggaaaccagcagaaagaggaaagagguagcaagagcuccagagagaagucgaggaagagagagacggggucagagagagcgcgcgggcgugcgagcagcgaaagcgacaggggcaaagugagugaccugcuuuugggggugaccgccggagcgcggcgugagcccucccccuugggaucccgcagcugaccagucgcgcugacggacagacagacagacaccgcccccagccccagcuaccaccuccuccccggccggcggcggacaguggacgcggcggcgagccgcgggcaggggccggagcccgcgcccggaggcgggguggagggggucggggcucgcggcgucgcacugaaacuuuucguccaacuucugggcuguucucgcuucggaggagccgugguccgcgcgggggaagccgagccgagcggagccgcgagaagugcuagcucgggccgggaggagccgcagccggaggagggggaggaggaagaagagaaggaagaggagagggggccgcaguggcgacucggcgcucggaagccgggcucauggacgggugaggcggcggugugcgcagacagugcuccagccgcgcgcgcuccccaggcccuggcccgggccucgggccggggaggaagaguagcucgccgaggcgccgaggagagcgggccgccccacagcccgagccggagagggagcgcgagccgcgccggccccggucgggccuccgaaaccaugaacuuucugcugucuugggugcauuggagccuugccuugcugcucuaccuccaccaugccaaguggucccaggcugcacccauggcagaaggaggagggcagaaucaucacgaaguggugaaguucauggaugucuaucagcgcagcuacugccauccaaucgagacccugguggacaucuuccaggaguacccugaugagaucgaguacaucuucaagccauccugugugccccugaugcgaugcgggggcugcugcaaugacgagggccuggagugugugcccacugaggaguccaacaucaccaugcagauuaugcggaucaaaccucaccaaggccagcacauaggagagaugagcuuccuacagcacaacaaaugugaaugcagaccaaagaaagauagagcaagacaagaaaaaaaaucaguucgaggaaagggaaaggggcaaaaacgaaagcgcaagaaaucccgucccugugggccuugcucagagcggagaaagcauuuguuuguacaagauccgcagacguguaaauguuccugcaaaaacacagacucgcguugcaaggcgaggcagcuugaguuaaacgaacguacuugcagaugugacaagccgaggcggugagccgggcaggaggaaggagccucccucaggguuucgggaaccagaucucucaccaggaaagacugauacagaacgaucgauacagaaaccacgcugccgccaccacaccaucaccaucgacagaacaguccuuaauccagaaaccugaaaugaaggaagaggagacucugcgcagagcacuuuggguccggagggcgagacuccggcggaagcauucccgggcgggugacccagcacggucccucuuggaauuggauucgccauuuuauuuuucuugcugcuaaaucaccgagcccggaagauuagagaguuuuauuucugggauuccuguagacacacccacccacauacauacauuuauauauauauauauuauauauauauaaaaauaaauaucucuauuuuauauauauaaaauauauauauucuuuuuuuaaauuaacagugcuaauguuauuggugucuucacuggauguauuugacugcuguggacuugaguugggaggggaauguucccacucagauccugacagggaagaggaggagaugagagacucuggcaugaucuuuuuuuugucccacuugguggggccaggguccucuccccugcccaggaaugugcaaggccagggcaugggggcaaauaugacccaguuuugggaacaccgacaaacccagcccuggcgcugagccucucuaccccaggucagacggacagaaagacagaucacagguacagggaugaggacaccggcucugaccaggaguuuggggagcuucaggacauugcugugcuuuggggauucccuccacaugcugcacgcgcaucucgcccccaggggcacugccuggaagauucaggagccugggcggccuucgcuuacucucaccugcuucugaguugcccaggagaccacuggcagaugucccggcgaagagaagagacacauuguuggaagaagcagcccaugacagcuccccuuccugggacucgcccucauccucuuccugcuccccuuccuggggugcagccuaaaaggaccuauguccucacaccauugaaaccacuaguucuguccccccaggagaccugguugugugugugugagugguugaccuuccuccauccccugguccuucccuucccuucccgaggcacagagagacagggcaggauccacgugcccauuguggaggcagagaaaagagaaaguguuuuauauacgguacuuauuuaauaucccuuuuuaauuagaaauuaaaacaguuaauuuaauuaaagaguaggguuuuuuuucaguauucuugguuaauauuuaauuucaacuauuuaugagauguaucuuuugcucucucuugcucucuuauuuguaccgguuuuuguauauaaaauucauguuuccaaucucucucucccugaucggugacagucacuagcuuaucuugaacagauauuuaauuuugcuaacacucagcucugcccuccccgauccccuggcuccccagcacacauuccuuugaaauaagguuucaauauacaucuacauacuauauauauauuuggcaacuuguauuuguguguauauauauauauauauguuuauguauauaugugauucugauaaaauagacauugcuauucuguuuuuuauauguaaaaacaaaacaagaaaaaauagagaauucuacauacuaaaucucucuccuuuuuuaauuuuaauauuuguuaucauuuauuuauuggugcuacuguuuauccguaauaauuguggggaaaagauauuaacaucacgucuuugucucuagugcaguuuuucgagauauuccguaguacauauuuauuuuuaaacaacgacaaagaaauacagauauaucuuaaaaaaaaaaaagcauuuuguauuaaagaauuuaauucugaucucaaaaaaaaaaaaa

SEQ ID NO: 6254 - RNA, 3542 nt, Homo sapiens
ggcuuggggcagccggguagcucggaggucguggcgcugggggcuagcaccagcgcucugucgggaggcgcagcgguuagguggaccggucagcggacucaccggccagggcgcucggugcuggaauuugauauucauugauccggguuuuaucccucuucuuuuuucuuaaacauuuuuuuuuaaaacuguauuguuucucguuuuaauuuauuuuugcuugccauuccccacuugaaucgggccgacggcuuggggagauugcucuacuuccccaaaucacuguggauuuuggaaaccagcagaaagaggaaagagguagcaagagcuccagagagaagucgaggaagagagagacggggucagagagagcgcgcgggcgugcgagcagcgaaagcgacaggggcaaagugagugaccugcuuuugggggugaccgccggagcgcggcgugagcccucccccuugggaucccgcagcugaccagucgcgcugacggacagacagacagacaccgcccccagccccagcuaccaccuccuccccggccggcggcggacaguggacgcggcggcgagccgcgggcaggggccggagcccgcgcccggaggcgggguggagggggucggggcucgcggcgucgcacugaaacuuuucguccaacuucugggcuguucucgcuucggaggagccgugguccgcgcgggggaagccgagccgagcggagccgcgagaagugcuagcucgggccgggaggagccgcagccggaggagggggaggaggaagaagagaaggaagaggagagggggccgcaguggcgacucggcgcucggaagccgggcucauggacgggugaggcggcggugugcgcagacagugcuccagccgcgcgcgcuccccaggcccuggcccgggccucgggccggggaggaagaguagcucgccgaggcgccgaggagagcgggccgccccacagcccgagccggagagggagcgcgagccgcgccggccccggucgggccuccgaaaccaugaacuuucugcugucuugggugcauuggagccuugccuugcugcucuaccuccaccaugccaaguggucccaggcugcacccauggcagaaggaggagggcagaaucaucacgaaguggugaaguucauggaugucuaucagcgcagcuacugccauccaaucgagacccugguggacaucuuccaggaguacccugaugagaucgaguacaucuucaagccauccugugugccccugaugcgaugcgggggcugcugcaaugacgagggccuggagugugugcccacugaggaguccaacaucaccaugcagauuaugcggaucaaaccucaccaaggccagcacauaggagagaugagcuuccuacagcacaacaaaugugaaugcagaccaaagaaagauagagcaagacaagaaaaucccugugggccuugcucagagcggagaaagcauuuguuuguacaagauccgcagacguguaaauguuccugcaaaaacacagacucgcguugcaaggcgaggcagcuugaguuaaacgaacguacuugcagaugugacaagccgaggcggugagccgggcaggaggaaggagccucccucaggguuucgggaaccagaucucucaccaggaaagacugauacagaacgaucgauacagaaaccacgcugccgccaccacaccaucaccaucgacagaacaguccuuaauccagaaaccugaaaugaaggaagaggagacucugcgcagagcacuuuggguccggagggcgagacuccggcggaagcauucccgggcgggugacccagcacggucccucuuggaauuggauucgccauuuuauuuuucuugcugcuaaaucaccgagcccggaagauuagagaguuuuauuucugggauuccuguagacacacccacccacauacauacauuuauauauauauauauuauauauauauaaaaauaaauaucucuauuuuauauauauaaaauauauauauucuuuuuuuaaauuaacagugcuaauguuauuggugucuucacuggauguauuugacugcuguggacuugaguugggaggggaauguucccacucagauccugacagggaagaggaggagaugagagacucuggcaugaucuuuuuuuugucccacuugguggggccaggguccucuccccugcccaggaaugugcaaggccagggcaugggggcaaauaugacccaguuuugggaacaccgacaaacccagcccuggcgcugagccucucuaccccaggucagacggacagaaagacagaucacagguacagggaugaggacaccggcucugaccaggaguuuggggagcuucaggacauugcugugcuuuggggauucccuccacaugcugcacgcgcaucucgcccccaggggcacugccuggaagauucaggagccugggcggccuucgcuuacucucaccugcuucugaguugcccaggagaccacuggcagaugucccggcgaagagaagagacacauuguuggaagaagcagcccaugacagcuccccuuccugggacucgcccucauccucuuccugcuccccuuccuggggugcagccuaaaaggaccuauguccucacaccauugaaaccacuaguucuguccccccaggagaccugguugugugugugugagugguugaccuuccuccauccccugguccuucccuucccuucccgaggcacagagagacagggcaggauccacgugcccauuguggaggcagagaaaagagaaaguguuuuauauacgguacuuauuuaauaucccuuuuuaauuagaaauuaaaacaguuaauuuaauuaaagaguaggguuuuuuuucaguauucuugguuaauauuuaauuucaacuauuuaugagauguaucuuuugcucucucuugcucucuuauuuguaccgguuuuuguauauaaaauucauguuuccaaucucucucucccugaucggugacagucacuagcuuaucuugaacagauauuuaauuuugcuaacacucagcucugcccuccccgauccccuggcuccccagcacacauuccuuugaaauaagguuucaauauacaucuacauacuauauauauauuuggcaacuuguauuuguguguauauauauauauauauguuuauguauauaugugauucugauaaaauagacauugcuauucuguuuuuuauauguaaaaacaaaacaagaaaaaauagagaauucuacauacuaaaucucucuccuuuuuuaauuuuaauauuuguuaucauuuauuuauuggugcuacuguuuauccguaauaauuguggggaaaagauauuaacaucacgucuuugucucuagugcaguuuuucgagauauuccguaguacauauuuauuuuuaaacaacgacaaagaaauacagauauaucuuaaaaaaaaaaaagcauuuuguauuaaagaauuuaauucugaucucaaaaaaaaaaaaa

SEQ ID NO: 6255 - RNA, 3507 nt, Homo sapiens
ggcuuggggcagccggguagcucggaggucguggcgcugggggcuagcaccagcgcucugucgggaggcgcagcgguuagguggaccggucagcggacucaccggccagggcgcucggugcuggaauuugauauucauugauccggguuuuaucccucuucuuuuuucuuaaacauuuuuuuuuaaaacuguauuguuucucguuuuaauuuauuuuugcuugccauuccccacuugaaucgggccgacggcuuggggagauugcucuacuuccccaaaucacuguggauuuuggaaaccagcagaaagaggaaagagguagcaagagcuccagagagaagucgaggaagagagagacggggucagagagagcgcgcgggcgugcgagcagcgaaagcgacaggggcaaagugagugaccugcuuuugggggugaccgccggagcgcggcgugagcccucccccuugggaucccgcagcugaccagucgcgcugacggacagacagacagacaccgcccccagccccagcuaccaccuccuccccggccggcggcggacaguggacgcggcggcgagccgcgggcaggggccggagcccgcgcccggaggcgggguggagggggucggggcucgcggcgucgcacugaaacuuuucguccaacuucugggcuguucucgcuucggaggagccgugguccgcgcgggggaagccgagccgagcggagccgcgagaagugcuagcucgggccgggaggagccgcagccggaggagggggaggaggaagaagagaaggaagaggagagggggccgcaguggcgacucggcgcucggaagccgggcucauggacgggugaggcggcggugugcgcagacagugcuccagccgcgcgcgcuccccaggcccuggcccgggccucgggccggggaggaagaguagcucgccgaggcgccgaggagagcgggccgccccacagcccgagccggagagggagcgcgagccgcgccggccccggucgggccuccgaaaccaugaacuuucugcugucuugggugcauuggagccuugccuugcugcucuaccuccaccaugccaaguggucccaggcugcacccauggcagaaggaggagggcagaaucaucacgaaguggugaaguucauggaugucuaucagcgcagcuacugccauccaaucgagacccugguggacaucuuccaggaguacccugaugagaucgaguacaucuucaagccauccugugugccccugaugcgaugcgggggcugcugcaaugacgagggccuggagugugugcccacugaggaguccaacaucaccaugcagauuaugcggaucaaaccucaccaaggccagcacauaggagagaugagcuuccuacagcacaacaaaugugaaugcagaccaaagaaagauagagcaagacaagaaaaucccugugggccuugcucagagcggagaaagcauuuguuuguacaagauccgcagacguguaaauguuccugcaaaaacacagacucgcguugcaagaugugacaagccgaggcggugagccgggcaggaggaaggagccucccucaggguuucgggaaccagaucucucaccaggaaagacugauacagaacgaucgauacagaaaccacgcugccgccaccacaccaucaccaucgacagaacaguccuuaauccagaaaccugaaaugaaggaagaggagacucugcgcagagcacuuuggguccggagggcgagacuccggcggaagcauucccgggcgggugacccagcacggucccucuuggaauuggauucgccauuuuauuuuucuugcugcuaaaucaccgagcccggaagauuagagaguuuuauuucugggauuccuguagacacacccacccacauacauacauuuauauauauauauauuauauauauauaaaaauaaauaucucuauuuuauauauauaaaauauauauauucuuuuuuuaaauuaacagugcuaauguuauuggugucuucacuggauguauuugacugcuguggacuugaguugggaggggaauguucccacucagauccugacagggaagaggaggagaugagagacucuggcaugaucuuuuuuuugucccacuugguggggccaggguccucuccccugcccaggaaugugcaaggccagggcaugggggcaaauaugacccaguuuugggaacaccgacaaacccagcccuggcgcugagccucucuaccccaggucagacggacagaaagacagaucacagguacagggaugaggacaccggcucugaccaggaguuuggggagcuucaggacauugcugugcuuuggggauucccuccacaugcugcacgcgcaucucgcccccaggggcacugccuggaagauucaggagccugggcggccuucgcuuacucucaccugcuucugaguugcccaggagaccacuggcagaugucccggcgaagagaagagacacauuguuggaagaagcagcccaugacagcuccccuuccugggacucgcccucauccucuuccugcuccccuuccuggggugcagccuaaaaggaccuauguccucacaccauugaaaccacuaguucuguccccccaggagaccugguugugugugugugagugguugaccuuccuccauccccugguccuucccuucccuucccgaggcacagagagacagggcaggauccacgugcccauuguggaggcagagaaaagagaaaguguuuuauauacgguacuuauuuaauaucccuuuuuaauuagaaauuaaaacaguuaauuuaauuaaagaguaggguuuuuuuucaguauucuugguuaauauuuaauuucaacuauuuaugagauguaucuuuugcucucucuugcucucuuauuuguaccgguuuuuguauauaaaauucauguuuccaaucucucucucccugaucggugacagucacuagcuuaucuugaacagauauuuaauuuugcuaacacucagcucugcccuccccgauccccuggcuccccagcacacauuccuuugaaauaagguuucaauauacaucuacauacuauauauauauuuggcaacuuguauuuguguguauauauauauauauauguuuauguauauaugugauucugauaaaauagacauugcuauucuguuuuuuauauguaaaaacaaaacaagaaaaaauagagaauucuacauacuaaaucucucuccuuuuuuaauuuuaauauuuguuaucauuuauuuauuggugcuacuguuuauccguaauaauuguggggaaaagauauuaacaucacgucuuugucucuagugcaguuuuucgagauauuccguaguacauauuuauuuuuaaacaacgacaaagaaauacagauauaucuuaaaaaaaaaaaagcauuuuguauuaaagaauuuaauucugaucucaaaaaaaaaaaaa

SEQ ID NO: 6256 - RNA, 3410 nt, Homo sapiens
ggcuuggggcagccggguagcucggaggucguggcgcugggggcuagcaccagcgcucugucgggaggcgcagcgguuagguggaccggucagcggacucaccggccagggcgcucggugcuggaauuugauauucauugauccggguuuuaucccucuucuuuuuucuuaaacauuuuuuuuuaaaacuguauuguuucucguuuuaauuuauuuuugcuugccauuccccacuugaaucgggccgacggcuuggggagauugcucuacuuccccaaaucacuguggauuuuggaaaccagcagaaagaggaaagagguagcaagagcuccagagagaagucgaggaagagagagacggggucagagagagcgcgcgggcgugcgagcagcgaaagcgacaggggcaaagugagugaccugcuuuugggggugaccgccggagcgcggcgugagcccucccccuugggaucccgcagcugaccagucgcgcugacggacagacagacagacaccgcccccagccccagcuaccaccuccuccccggccggcggcggacaguggacgcggcggcgagccgcgggcaggggccggagcccgcgcccggaggcgggguggagggggucggggcucgcggcgucgcacugaaacuuuucguccaacuucugggcuguucucgcuucggaggagccgugguccgcgcgggggaagccgagccgagcggagccgcgagaagugcuagcucgggccgggaggagccgcagccggaggagggggaggaggaagaagagaaggaagaggagagggggccgcaguggcgacucggcgcucggaagccgggcucauggacgggugaggcggcggugugcgcagacagugcuccagccgcgcgcgcuccccaggcccuggcccgggccucgggccggggaggaagaguagcucgccgaggcgccgaggagagcgggccgccccacagcccgagccggagagggagcgcgagccgcgccggccccggucgggccuccgaaaccaugaacuuucugcugucuugggugcauuggagccuugccuugcugcucuaccuccaccaugccaaguggucccaggcugcacccauggcagaaggaggagggcagaaucaucacgaaguggugaaguucauggaugucuaucagcgcagcuacugccauccaaucgagacccugguggacaucuuccaggaguacccugaugagaucgaguacaucuucaagccauccugugugccccugaugcgaugcgggggcugcugcaaugacgagggccuggagugugugcccacugaggaguccaacaucaccaugcagauuaugcggaucaaaccucaccaaggccagcacauaggagagaugagcuuccuacagcacaacaaaugugaaugcagaccaaagaaagauagagcaagacaagaaaaaugugacaagccgaggcggugagccgggcaggaggaaggagccucccucaggguuucgggaaccagaucucucaccaggaaagacugauacagaacgaucgauacagaaaccacgcugccgccaccacaccaucaccaucgacagaacaguccuuaauccagaaaccugaaaugaaggaagaggagacucugcgcagagcacuuuggguccggagggcgagacuccggcggaagcauucccgggcgggugacccagcacggucccucuuggaauuggauucgccauuuuauuuuucuugcugcuaaaucaccgagcccggaagauuagagaguuuuauuucugggauuccuguagacacacccacccacauacauacauuuauauauauauauauuauauauauauaaaaauaaauaucucuauuuuauauauauaaaauauauauauucuuuuuuuaaauuaacagugcuaauguuauuggugucuucacuggauguauuugacugcuguggacuugaguugggaggggaauguucccacucagauccugacagggaagaggaggagaugagagacucuggcaugaucuuuuuuuugucccacuugguggggccaggguccucuccccugcccaggaaugugcaaggccagggcaugggggcaaauaugacccaguuuugggaacaccgacaaacccagcccuggcgcugagccucucuaccccaggucagacggacagaaagacagaucacagguacagggaugaggacaccggcucugaccaggaguuuggggagcuucaggacauugcugugcuuuggggauucccuccacaugcugcacgcgcaucucgcccccaggggcacugccuggaagauucaggagccugggcggccuucgcuuacucucaccugcuucugaguugcccaggagaccacuggcagaugucccggcgaagagaagagacacauuguuggaagaagcagcccaugacagcuccccuuccugggacucgcccucauccucuuccugcuccccuuccuggggugcagccuaaaaggaccuauguccucacaccauugaaaccacuaguucuguccccccaggagaccugguugugugugugugagugguugaccuuccuccauccccugguccuucccuucccuucccgaggcacagagagacagggcaggauccacgugcccauuguggaggcagagaaaagagaaaguguuuuauauacgguacuuauuuaauaucccuuuuuaauuagaaauuaaaacaguuaauuuaauuaaagaguaggguuuuuuuucaguauucuugguuaauauuuaauuucaacuauuuaugagauguaucuuuugcucucucuugcucucuuauuuguaccgguuuuuguauauaaaauucauguuuccaaucucucucucccugaucggugacagucacuagcuuaucuugaacagauauuuaauuuugcuaacacucagcucugcccuccccgauccccuggcuccccagcacacauuccuuugaaauaagguuucaauauacaucuacauacuauauauauauuuggcaacuuguauuuguguguauauauauauauauauguuuauguauauaugugauucugauaaaauagacauugcuauucuguuuuuuauauguaaaaacaaaacaagaaaaaauagagaauucuacauacuaaaucucucuccuuuuuuaauuuuaauauuuguuaucauuuauuuauuggugcuacuguuuauccguaauaauuguggggaaaagauauuaacaucacgucuuugucucuagugcaguuuuucgagauauuccguaguacauauuuauuuuuaaacaacgacaaagaaauacagauauaucuuaaaaaaaaaaaagcauuuuguauuaaagaauuuaauucugaucucaaaaaaaaaaaaa

SEQ ID NO: 6257 - RNA, 3476 nt, Homo sapiens
ggcuuggggcagccggguagcucggaggucguggcgcugggggcuagcaccagcgcucugucgggaggcgcagcgguuagguggaccggucagcggacucaccggccagggcgcucggugcuggaauuugauauucauugauccggguuuuaucccucuucuuuuuucuuaaacauuuuuuuuuaaaacuguauuguuucucguuuuaauuuauuuuugcuugccauuccccacuugaaucgggccgacggcuuggggagauugcucuacuuccccaaaucacuguggauuuuggaaaccagcagaaagaggaaagagguagcaagagcuccagagagaagucgaggaagagagagacggggucagagagagcgcgcgggcgugcgagcagcgaaagcgacaggggcaaagugagugaccugcuuuugggggugaccgccggagcgcggcgugagcccucccccuugggaucccgcagcugaccagucgcgcugacggacagacagacagacaccgcccccagccccagcuaccaccuccuccccggccggcggcggacaguggacgcggcggcgagccgcgggcaggggccggagcccgcgcccggaggcgggguggagggggucggggcucgcggcgucgcacugaaacuuuucguccaacuucugggcuguucucgcuucggaggagccgugguccgcgcgggggaagccgagccgagcggagccgcgagaagugcuagcucgggccgggaggagccgcagccggaggagggggaggaggaagaagagaaggaagaggagagggggccgcaguggcgacucggcgcucggaagccgggcucauggacgggugaggcggcggugugcgcagacagugcuccagccgcgcgcgcuccccaggcccuggcccgggccucgggccggggaggaagaguagcucgccgaggcgccgaggagagcgggccgccccacagcccgagccggagagggagcgcgagccgcgccggccccggucgggccuccgaaaccaugaacuuucugcugucuugggugcauuggagccuugccuugcugcucuaccuccaccaugccaaguggucccaggcugcacccauggcagaaggaggagggcagaaucaucacgaaguggugaaguucauggaugucuaucagcgcagcuacugccauccaaucgagacccugguggacaucuuccaggaguacccugaugagaucgaguacaucuucaagccauccugugugccccugaugcgaugcgggggcugcugcaaugacgagggccuggagugugugcccacugaggaguccaacaucaccaugcagauuaugcggaucaaaccucaccaaggccagcacauaggagagaugagcuuccuacagcacaacaaaugugaaugcagaccaaagaaagauagagcaagacaagaaaaucccugugggccuugcucagagcggagaaagcauuuguuuguacaagauccgcagacguguaaauguuccugcaaaaacacagacucgcguugcaaggcgaggcagcuugaguuaaacgaacguacuugcagaucucucaccaggaaagacugauacagaacgaucgauacagaaaccacgcugccgccaccacaccaucaccaucgacagaacaguccuuaauccagaaaccugaaaugaaggaagaggagacucugcgcagagcacuuuggguccggagggcgagacuccggcggaagcauucccgggcgggugacccagcacggucccucuuggaauuggauucgccauuuuauuuuucuugcugcuaaaucaccgagcccggaagauuagagaguuuuauuucugggauuccuguagacacacccacccacauacauacauuuauauauauauauauuauauauauauaaaaauaaauaucucuauuuuauauauauaaaauauauauauucuuuuuuuaaauuaacagugcuaauguuauuggugucuucacuggauguauuugacugcuguggacuugaguugggaggggaauguucccacucagauccugacagggaagaggaggagaugagagacucuggcaugaucuuuuuuuugucccacuugguggggccaggguccucuccccugcccaggaaugugcaaggccagggcaugggggcaaauaugacccaguuuugggaacaccgacaaacccagcccuggcgcugagccucucuaccccaggucagacggacagaaagacagaucacagguacagggaugaggacaccggcucugaccaggaguuuggggagcuucaggacauugcugugcuuuggggauucccuccacaugcugcacgcgcaucucgcccccaggggcacugccuggaagauucaggagccugggcggccuucgcuuacucucaccugcuucugaguugcccaggagaccacuggcagaugucccggcgaagagaagagacacauuguuggaagaagcagcccaugacagcuccccuuccugggacucgcccucauccucuuccugcuccccuuccuggggugcagccuaaaaggaccuauguccucacaccauugaaaccacuaguucuguccccccaggagaccugguugugugugugugagugguugaccuuccuccauccccugguccuucccuucccuucccgaggcacagagagacagggcaggauccacgugcccauuguggaggcagagaaaagagaaaguguuuuauauacgguacuuauuuaauaucccuuuuuaauuagaaauuaaaacaguuaauuuaauuaaagaguaggguuuuuuuucaguauucuugguuaauauuuaauuucaacuauuuaugagauguaucuuuugcucucucuugcucucuuauuuguaccgguuuuuguauauaaaauucauguuuccaaucucucucucccugaucggugacagucacuagcuuaucuugaacagauauuuaauuuugcuaacacucagcucugcccuccccgauccccuggcuccccagcacacauuccuuugaaauaagguuucaauauacaucuacauacuauauauauauuuggcaacuuguauuuguguguauauauauauauauauguuuauguauauaugugauucugauaaaauagacauugcuauucuguuuuuuauauguaaaaacaaaacaagaaaaaauagagaauucuacauacuaaaucucucuccuuuuuuaauuuuaauauuuguuaucauuuauuuauuggugcuacuguuuauccguaauaauuguggggaaaagauauuaacaucacgucuuugucucuagugcaguuuuucgagauauuccguaguacauauuuauuuuuaaacaacgacaaagaaauacagauauaucuuaaaaaaaaaaaagcauuuuguauuaaagaauuuaauucugaucucaaaaaaaaaaaaa

SEQ ID NO: 6258 - RNA, 19 nt, Artificial Sequence
  Description of Artificial Sequence: Synthetic oligonucleotide
ggcuuggggcagccgggua

SEQ ID NO: 6259 - RNA, 19 nt, Artificial Sequence
  Description of Artificial Sequence: Synthetic oligonucleotide
agcucggaggucguggcgc

SEQ ID NO: 6260 - RNA, 19 nt, Artificial Sequence
  Description of Artificial Sequence: Synthetic oligonucleotide
cugggggcuagcaccagcg

SEQ ID NO: 6261 - RNA, 19 nt, Artificial Sequence
  Description of Artificial Sequence: Synthetic oligonucleotide
gcucugucgggaggcgcag

SEQ ID NO: 6262 - RNA, 19 nt, Artificial Sequence
  Description of Artificial Sequence: Synthetic oligonucleotide
gcgguuagguggaccgguc

SEQ ID NO: 6263 - RNA, 19 nt, Artificial Sequence
  Description of Artificial Sequence: Synthetic oligonucleotide
cagcggacucaccggccag

SEQ ID NO: 6264 - RNA, 19 nt, Artificial Sequence
  Description of Artificial Sequence: Synthetic oligonucleotide
gggcgcucggugcuggaau

SEQ ID NO: 6265 - RNA, 19 nt, Artificial Sequence
  Description of Artificial Sequence: Synthetic oligonucleotide
uuugauauucauugauccg

SEQ ID NO: 6266 - RNA, 19 nt, Artificial Sequence
  Description of Artificial Sequence: Synthetic oligonucleotide
ggguuuuaucccucuucuu

SEQ ID NO: 6267 - RNA, 19 nt, Artificial Sequence
  Description of Artificial Sequence: Synthetic oligonucleotide
uuuuucuuaaacauuuuuu

SEQ ID NO: 6268 - RNA, 19 nt, Artificial Sequence
  Description of Artificial Sequence: Synthetic oligonucleotide
uuuuaaaacuguauuguuu

SEQ ID NO: 6269 - RNA, 19 nt, Artificial Sequence
  Description of Artificial Sequence: Synthetic oligonucleotide
ucucguuuuaauuuauuuu

SEQ ID NO: 6270 - RNA, 19 nt, Artificial Sequence
  Description of Artificial Sequence: Synthetic oligonucleotide
uugcuugccauuccccacu

SEQ ID NO: 6271 - RNA, 19 nt, Artificial Sequence
  Description of Artificial Sequence: Synthetic oligonucleotide
uugaaucgggccgacggcu

SEQ ID NO: 6272 - RNA, 19 nt, Artificial Sequence
  Description of Artificial Sequence: Synthetic oligonucleotide
uuggggagauugcucuacu

SEQ ID NO: 6273 - RNA, 19 nt, Artificial Sequence
  Description of Artificial Sequence: Synthetic oligonucleotide
uuccccaaaucacugugga

SEQ ID NO: 6274 - RNA, 19 nt, Artificial Sequence
  Description of Artificial Sequence: Synthetic oligonucleotide
auuuuggaaaccagcagaa

SEQ ID NO: 6275 - RNA, 19 nt, Artificial Sequence
  Description of Artificial Sequence: Synthetic oligonucleotide
aagaggaaagagguagcaa

SEQ ID NO: 6276 - RNA, 19 nt, Artificial Sequence
  Description of Artificial Sequence: Synthetic oligonucleotide
agagcuccagagagaaguc

SEQ ID NO: 6277 - RNA, 19 nt, Artificial Sequence
  Description of Artificial Sequence: Synthetic oligonucleotide
cgaggaagagagagacggg

SEQ ID NO: 6278 - RNA, 19 nt, Artificial Sequence
  Description of Artificial Sequence: Synthetic oligonucleotide
ggucagagagagcgcgcgg

SEQ ID NO: 6279 - RNA, 19 nt, Artificial Sequence
  Description of Artificial Sequence: Synthetic oligonucleotide
ggcgugcgagcagcgaaag

SEQ ID NO: 6280 - RNA, 19 nt, Artificial Sequence
  Description of Artificial Sequence: Synthetic oligonucleotide
gcgacaggggcaaagugag

SEQ ID NO: 6281 - RNA, 19 nt, Artificial Sequence
  Description of Artificial Sequence: Synthetic oligonucleotide
gugaccugcuuuugggggu

SEQ ID NO: 6282 - RNA, 19 nt, Artificial Sequence
  Description of Artificial Sequence: Synthetic oligonucleotide
ugaccgccggagcgcggcg

SEQ ID NO: 6283 - RNA, 19 nt, Artificial Sequence
  Description of Artificial Sequence: Synthetic oligonucleotide
gugagcccucccccuuggg

SEQ ID NO: 6284 - RNA, 19 nt, Artificial Sequence
  Description of Artificial Sequence: Synthetic oligonucleotide
gaucccgcagcugaccagu

SEQ ID NO: 6285 - RNA, 19 nt, Artificial Sequence
  Description of Artificial Sequence: Synthetic oligonucleotide
ucgcgcugacggacagaca

SEQ ID NO: 6286 - RNA, 19 nt, Artificial Sequence
  Description of Artificial Sequence: Synthetic oligonucleotide
agacagacaccgcccccag

SEQ ID NO: 6287 - RNA, 19 nt, Artificial Sequence
  Description of Artificial Sequence: Synthetic oligonucleotide
gccccagcuaccaccuccu

SEQ ID NO: 6288 - RNA, 19 nt, Artificial Sequence
  Description of Artificial Sequence: Synthetic oligonucleotide
uccccggccggcggcggac

SEQ ID NO: 6289 - RNA, 19 nt, Artificial Sequence
  Description of Artificial Sequence: Synthetic oligonucleotide
caguggacgcggcggcgag

SEQ ID NO: 6290 - RNA, 19 nt, Artificial Sequence
  Description of Artificial Sequence: Synthetic oligonucleotide
gccgcgggcaggggccgga

SEQ ID NO: 6291 - RNA, 19 nt, Artificial Sequence
  Description of Artificial Sequence: Synthetic oligonucleotide
agcccgcgcccggaggcgg

SEQ ID NO: 6292 - RNA, 19 nt, Artificial Sequence
  Description of Artificial Sequence: Synthetic oligonucleotide
ggguggagggggucggggc

SEQ ID NO: 6293 - RNA, 19 nt, Artificial Sequence
  Description of Artificial Sequence: Synthetic oligonucleotide
cucgcggcgucgcacugaa

SEQ ID NO: 6294 - RNA, 19 nt, Artificial Sequence
  Description of Artificial Sequence: Synthetic oligonucleotide
aacuuuucguccaacuucu

SEQ ID NO: 6295 - RNA, 19 nt, Artificial Sequence
  Description of Artificial Sequence: Synthetic oligonucleotide
ugggcuguucucgcuucgg

SEQ ID NO: 6296 - RNA, 19 nt, Artificial Sequence
  Description of Artificial Sequence: Synthetic oligonucleotide
gaggagccgugguccgcgc

SEQ ID NO: 6297 - RNA, 19 nt, Artificial Sequence
  Description of Artificial Sequence: Synthetic oligonucleotide
cgggggaagccgagccgag

SEQ ID NO: 6298 - RNA, 19 nt, Artificial Sequence
  Description of Artificial Sequence: Synthetic oligonucleotide
gcggagccgcgagaagugc

SEQ ID NO: 6299 - RNA, 19 nt, Artificial Sequence
  Description of Artificial Sequence: Synthetic oligonucleotide
cuagcucgggccgggagga

SEQ ID NO: 6300 - RNA, 19 nt, Artificial Sequence
  Description of Artificial Sequence: Synthetic oligonucleotide
agccgcagccggaggaggg

SEQ ID NO: 6301 - RNA, 19 nt, Artificial Sequence
  Description of Artificial Sequence: Synthetic oligonucleotide
gggaggaggaagaagagaa

SEQ ID NO: 6302 - RNA, 19 nt, Artificial Sequence
  Description of Artificial Sequence: Synthetic oligonucleotide
aggaagaggagagggggcc

SEQ ID NO: 6303 - RNA, 19 nt, Artificial Sequence
  Description of Artificial Sequence: Synthetic oligonucleotide
cgcaguggcgacucggcgc

SEQ ID NO: 6304 - RNA, 19 nt, Artificial Sequence
  Description of Artificial Sequence: Synthetic oligonucleotide
cucggaagccgggcucaug

SEQ ID NO: 6305 - RNA, 19 nt, Artificial Sequence
  Description of Artificial Sequence: Synthetic oligonucleotide
ggacgggugaggcggcggu

SEQ ID NO: 6306 - RNA, 19 nt, Artificial Sequence
  Description of Artificial Sequence: Synthetic oligonucleotide
ugugcgcagacagugcucc

SEQ ID NO: 6307 - RNA, 19 nt, Artificial Sequence
  Description of Artificial Sequence: Synthetic oligonucleotide
cagccgcgcgcgcucccca

SEQ ID NO: 6308 - RNA, 19 nt, Artificial Sequence
  Description of Artificial Sequence: Synthetic oligonucleotide
aggcccuggcccgggccuc

SEQ ID NO: 6309 - RNA, 19 nt, Artificial Sequence
  Description of Artificial Sequence: Synthetic oligonucleotide
cgggccggggaggaagagu

SEQ ID NO: 6310 - RNA, 19 nt, Artificial Sequence
  Description of Artificial Sequence: Synthetic oligonucleotide
uagcucgccgaggcgccga

SEQ ID NO: 6311 - RNA, 19 nt, Artificial Sequence
  Description of Artificial Sequence: Synthetic oligonucleotide
aggagagcgggccgcccca

SEQ ID NO: 6312 - RNA, 19 nt, Artificial Sequence
  Description of Artificial Sequence: Synthetic oligonucleotide
acagcccgagccggagagg

SEQ ID NO: 6313 - RNA, 19 nt, Artificial Sequence
  Description of Artificial Sequence: Synthetic oligonucleotide
ggagcgcgagccgcgccgg

SEQ ID NO: 6314 - RNA, 19 nt, Artificial Sequence
  Description of Artificial Sequence: Synthetic oligonucleotide
gccccggucgggccuccga

SEQ ID NO: 6315 - RNA, 19 nt, Artificial Sequence
  Description of Artificial Sequence: Synthetic oligonucleotide
aaaccaugaacuuucugcu

SEQ ID NO: 6316 - RNA, 19 nt, Artificial Sequence
  Description of Artificial Sequence: Synthetic oligonucleotide
ugucuugggugcauuggag

SEQ ID NO: 6317 - RNA, 19 nt, Artificial Sequence
  Description of Artificial Sequence: Synthetic oligonucleotide
gccuugccuugcugcucua

SEQ ID NO: 6318 - RNA, 19 nt, Artificial Sequence
  Description of Artificial Sequence: Synthetic oligonucleotide
accuccaccaugccaagug

SEQ ID NO: 6319 - RNA, 19 nt, Artificial Sequence
  Description of Artificial Sequence: Synthetic oligonucleotide
ggucccaggcugcacccau

SEQ ID NO: 6320 - RNA, 19 nt, Artificial Sequence
  Description of Artificial Sequence: Synthetic oligonucleotide
uggcagaaggaggagggca

SEQ ID NO: 6321 - RNA, 19 nt, Artificial Sequence
  Description of Artificial Sequence: Synthetic oligonucleotide
agaaucaucacgaaguggu

SEQ ID NO: 6322 - RNA, 19 nt, Artificial Sequence
  Description of Artificial Sequence: Synthetic oligonucleotide
ugaaguucauggaugucua

SEQ ID NO: 6323 - RNA, 19 nt, Artificial Sequence
  Description of Artificial Sequence: Synthetic oligonucleotide
aucagcgcagcuacugcca

SEQ ID NO: 6324 - RNA, 19 nt, Artificial Sequence
  Description of Artificial Sequence: Synthetic oligonucleotide
auccaaucgagacccuggu

SEQ ID NO: 6325 - RNA, 19 nt, Artificial Sequence
  Description of Artificial Sequence: Synthetic oligonucleotide
uggacaucuuccaggagua

SEQ ID NO: 6326 - RNA, 19 nt, Artificial Sequence
  Description of Artificial Sequence: Synthetic oligonucleotide
acccugaugagaucgagua

SEQ ID NO: 6327 - RNA, 19 nt, Artificial Sequence
  Description of Artificial Sequence: Synthetic oligonucleotide
acaucuucaagccauccug

SEQ ID NO: 6328 - RNA, 19 nt, Artificial Sequence
  Description of Artificial Sequence: Synthetic oligonucleotide
gugugccccugaugcgaug

SEQ ID NO: 6329 - RNA, 19 nt, Artificial Sequence
  Description of Artificial Sequence: Synthetic oligonucleotide
gcgggggcugcugcaauga

SEQ ID NO: 6330 - RNA, 19 nt, Artificial Sequence
  Description of Artificial Sequence: Synthetic oligonucleotide
acgagggccuggagugugu

SEQ ID NO: 6331 - RNA, 19 nt, Artificial Sequence
  Description of Artificial Sequence: Synthetic oligonucleotide
ugcccacugaggaguccaa

SEQ ID NO: 6332 - RNA, 19 nt, Artificial Sequence
  Description of Artificial Sequence: Synthetic oligonucleotide
acaucaccaugcagauuau

SEQ ID NO: 6333 - RNA, 19 nt, Artificial Sequence
  Description of Artificial Sequence: Synthetic oligonucleotide
ugcggaucaaaccucacca

SEQ ID NO: 6334 - RNA, 19 nt, Artificial Sequence
  Description of Artificial Sequence: Synthetic oligonucleotide
aaggccagcacauaggaga

SEQ ID NO: 6335 - RNA, 19 nt, Artificial Sequence
  Description of Artificial Sequence: Synthetic oligonucleotide
agaugagcuuccuacagca

SEQ ID NO: 6336 - RNA, 19 nt, Artificial Sequence
  Description of Artificial Sequence: Synthetic oligonucleotide
acaacaaaugugaaugcag

SEQ ID NO: 6337 - RNA, 19 nt, Artificial Sequence
  Description of Artificial Sequence: Synthetic oligonucleotide
gaccaaagaaagauagagc

SEQ ID NO: 6338 - RNA, 19 nt, Artificial Sequence
  Description of Artificial Sequence: Synthetic oligonucleotide
caagacaagaaaaaaaauc

SEQ ID NO: 6339 - RNA, 19 nt, Artificial Sequence
  Description of Artificial Sequence: Synthetic oligonucleotide
caguucgaggaaagggaaa

SEQ ID NO: 6340 - RNA, 19 nt, Artificial Sequence
  Description of Artificial Sequence: Synthetic oligonucleotide
aggggcaaaaacgaaagcg

SEQ ID NO: 6341 - RNA, 19 nt, Artificial Sequence
  Description of Artificial Sequence: Synthetic oligonucleotide
gcaagaaaucccgguauaa

SEQ ID NO: 6342 - RNA, 19 nt, Artificial Sequence
  Description of Artificial Sequence: Synthetic oligonucleotide
aguccuggagcguucccug

SEQ ID NO: 6343 - RNA, 19 nt, Artificial Sequence
  Description of Artificial Sequence: Synthetic oligonucleotide
gugggccuugcucagagcg

SEQ ID NO: 6344 - RNA, 19 nt, Artificial Sequence
  Description of Artificial Sequence: Synthetic oligonucleotide
ggagaaagcauuuguuugu

SEQ ID NO: 6345 - RNA, 19 nt, Artificial Sequence
  Description of Artificial Sequence: Synthetic oligonucleotide
uacaagauccgcagacgug

SEQ ID NO: 6346 - RNA, 19 nt, Artificial Sequence
  Description of Artificial Sequence: Synthetic oligonucleotide
guaaauguuccugcaaaaa

SEQ ID NO: 6347 - RNA, 19 nt, Artificial Sequence
  Description of Artificial Sequence: Synthetic oligonucleotide
acacagacucgcguugcaa

SEQ ID NO: 6348 - RNA, 19 nt, Artificial Sequence
  Description of Artificial Sequence: Synthetic oligonucleotide
aggcgaggcagcuugaguu

SEQ ID NO: 6349 - RNA, 19 nt, Artificial Sequence
  Description of Artificial Sequence: Synthetic oligonucleotide
uaaacgaacguacuugcag

SEQ ID NO: 6350 - RNA, 19 nt, Artificial Sequence
  Description of Artificial Sequence: Synthetic oligonucleotide
gaugugacaagccgaggcg

SEQ ID NO: 6351 - RNA, 19 nt, Artificial Sequence
  Description of Artificial Sequence: Synthetic oligonucleotide
ggugagccgggcaggagga

SEQ ID NO: 6352 - RNA, 19 nt, Artificial Sequence
  Description of Artificial Sequence: Synthetic oligonucleotide
aaggagccucccucagggu

SEQ ID NO: 6353 - RNA, 19 nt, Artificial Sequence
  Description of Artificial Sequence: Synthetic oligonucleotide
uuucgggaaccagaucucu

SEQ ID NO: 6354 - RNA, 19 nt, Artificial Sequence
  Description of Artificial Sequence: Synthetic oligonucleotide
ucaccaggaaagacugaua

SEQ ID NO: 6355 - RNA, 19 nt, Artificial Sequence
  Description of Artificial Sequence: Synthetic oligonucleotide
acagaacgaucgauacaga

SEQ ID NO: 6356 - RNA, 19 nt, Artificial Sequence
  Description of Artificial Sequence: Synthetic oligonucleotide
aaaccacgcugccgccacc

SEQ ID NO: 6357 - RNA, 19 nt, Artificial Sequence
  Description of Artificial Sequence: Synthetic oligonucleotide
cacaccaucaccaucgaca

SEQ ID NO: 6358 - RNA, 19 nt, Artificial Sequence
  Description of Artificial Sequence: Synthetic oligonucleotide
agaacaguccuuaauccag

SEQ ID NO: 6359 - RNA, 19 nt, Artificial Sequence
  Description of Artificial Sequence: Synthetic oligonucleotide
gaaaccugaaaugaaggaa

SEQ ID NO: 6360 - RNA, 19 nt, Artificial Sequence
  Description of Artificial Sequence: Synthetic oligonucleotide
agaggagacucugcgcaga

SEQ ID NO: 6361 - RNA, 19 nt, Artificial Sequence
  Description of Artificial Sequence: Synthetic oligonucleotide
agcacuuuggguccggagg

SEQ ID NO: 6362 - RNA, 19 nt, Artificial Sequence
  Description of Artificial Sequence: Synthetic oligonucleotide
ggcgagacuccggcggaag

SEQ ID NO: 6363 - RNA, 19 nt, Artificial Sequence
  Description of Artificial Sequence: Synthetic oligonucleotide
gcauucccgggcgggugac

SEQ ID NO: 6364 - RNA, 19 nt, Artificial Sequence
  Description of Artificial Sequence: Synthetic oligonucleotide
cccagcacggucccucuug

SEQ ID NO: 6365 - RNA, 19 nt, Artificial Sequence
  Description of Artificial Sequence: Synthetic oligonucleotide
ggaauuggauucgccauuu

SEQ ID NO: 6366 - RNA, 19 nt, Artificial Sequence
  Description of Artificial Sequence: Synthetic oligonucleotide
uuauuuuucuugcugcuaa

SEQ ID NO: 6367 - RNA, 19 nt, Artificial Sequence
  Description of Artificial Sequence: Synthetic oligonucleotide
aaucaccgagcccggaaga

SEQ ID NO: 6368 - RNA, 19 nt, Artificial Sequence
  Description of Artificial Sequence: Synthetic oligonucleotide
auuagagaguuuuauuucu

SEQ ID NO: 6369 - RNA, 19 nt, Artificial Sequence
  Description of Artificial Sequence: Synthetic oligonucleotide
ugggauuccuguagacaca

SEQ ID NO: 6370 - RNA, 19 nt, Artificial Sequence
  Description of Artificial Sequence: Synthetic oligonucleotide
acccacccacauacauaca

SEQ ID NO: 6371 - RNA, 19 nt, Artificial Sequence
  Description of Artificial Sequence: Synthetic oligonucleotide
auuuauauauauauauauu

SEQ ID NO: 6372 - RNA, 19 nt, Artificial Sequence
  Description of Artificial Sequence: Synthetic oligonucleotide
uauauauauauaaaaauaa

SEQ ID NO: 6373 - RNA, 19 nt, Artificial Sequence
  Description of Artificial Sequence: Synthetic oligonucleotide
aauaucucuauuuuauaua

SEQ ID NO: 6374 - RNA, 19 nt, Artificial Sequence
  Description of Artificial Sequence: Synthetic oligonucleotide
auauaaaauauauauauuc

SEQ ID NO: 6375 - RNA, 19 nt, Artificial Sequence
  Description of Artificial Sequence: Synthetic oligonucleotide
cuuuuuuuaaauuaacagu

SEQ ID NO: 6376 - RNA, 19 nt, Artificial Sequence
  Description of Artificial Sequence: Synthetic oligonucleotide
ugcuaauguuauugguguc

SEQ ID NO: 6377 - RNA, 19 nt, Artificial Sequence
  Description of Artificial Sequence: Synthetic oligonucleotide
cuucacuggauguauuuga

SEQ ID NO: 6378 - RNA, 19 nt, Artificial Sequence
  Description of Artificial Sequence: Synthetic oligonucleotide
acugcuguggacuugaguu

SEQ ID NO: 6379 - RNA, 19 nt, Artificial Sequence
  Description of Artificial Sequence: Synthetic oligonucleotide
ugggaggggaauguuccca

SEQ ID NO: 6380 - RNA, 19 nt, Artificial Sequence
  Description of Artificial Sequence: Synthetic oligonucleotide
acucagauccugacaggga

SEQ ID NO: 6381 - RNA, 19 nt, Artificial Sequence
  Description of Artificial Sequence: Synthetic oligonucleotide
aagaggaggagaugagaga

SEQ ID NO: 6382 - RNA, 19 nt, Artificial Sequence
  Description of Artificial Sequence: Synthetic oligonucleotide
acucuggcaugaucuuuuu

SEQ ID NO: 6383 - RNA, 19 nt, Artificial Sequence
  Description of Artificial Sequence: Synthetic oligonucleotide
uuuugucccacuugguggg

SEQ ID NO: 6384 - RNA, 19 nt, Artificial Sequence
  Description of Artificial Sequence: Synthetic oligonucleotide
ggccaggguccucuccccu

SEQ ID NO: 6385 - RNA, 19 nt, Artificial Sequence
  Description of Artificial Sequence: Synthetic oligonucleotide
ugcccaggaaugugcaagg

SEQ ID NO: 6386 - RNA, 19 nt, Artificial Sequence
  Description of Artificial Sequence: Synthetic oligonucleotide
gccagggcaugggggcaaa

SEQ ID NO: 6387 - RNA, 19 nt, Artificial Sequence
  Description of Artificial Sequence: Synthetic oligonucleotide
auaugacccaguuuuggga

SEQ ID NO: 6388 - RNA, 19 nt, Artificial Sequence
  Description of Artificial Sequence: Synthetic oligonucleotide
aacaccgacaaacccagcc

SEQ ID NO: 6389 - RNA, 19 nt, Artificial Sequence
  Description of Artificial Sequence: Synthetic oligonucleotide
ccuggcgcugagccucucu

SEQ ID NO: 6390 - RNA, 19 nt, Artificial Sequence
  Description of Artificial Sequence: Synthetic oligonucleotide
uaccccaggucagacggac

SEQ ID NO: 6391 - RNA, 19 nt, Artificial Sequence
  Description of Artificial Sequence: Synthetic oligonucleotide
cagaaagacagaucacagg

SEQ ID NO: 6392 - RNA, 19 nt, Artificial Sequence
  Description of Artificial Sequence: Synthetic oligonucleotide
guacagggaugaggacacc

SEQ ID NO: 6393 - RNA, 19 nt, Artificial Sequence
  Description of Artificial Sequence: Synthetic oligonucleotide
cggcucugaccaggaguuu

SEQ ID NO: 6394 - RNA, 19 nt, Artificial Sequence
  Description of Artificial Sequence: Synthetic oligonucleotide
uggggagcuucaggacauu

SEQ ID NO: 6395 - RNA, 19 nt, Artificial Sequence
  Description of Artificial Sequence: Synthetic oligonucleotide
ugcugugcuuuggggauuc

SEQ ID NO: 6396 - RNA, 19 nt, Artificial Sequence
  Description of Artificial Sequence: Synthetic oligonucleotide
cccuccacaugcugcacgc

SEQ ID NO: 6397 - RNA, 19 nt, Artificial Sequence
  Description of Artificial Sequence: Synthetic oligonucleotide
cgcaucucgcccccagggg

SEQ ID NO: 6398 - RNA, 19 nt, Artificial Sequence
  Description of Artificial Sequence: Synthetic oligonucleotide
gcacugccuggaagauuca

SEQ ID NO: 6399 - RNA, 19 nt, Artificial Sequence
  Description of Artificial Sequence: Synthetic oligonucleotide
aggagccugggcggccuuc

SEQ ID NO: 6400 - RNA, 19 nt, Artificial Sequence
  Description of Artificial Sequence: Synthetic oligonucleotide
cgcuuacucucaccugcuu

SEQ ID NO: 6401 - RNA, 19 nt, Artificial Sequence
  Description of Artificial Sequence: Synthetic oligonucleotide
ucugaguugcccaggagac

SEQ ID NO: 6402 - RNA, 19 nt, Artificial Sequence
  Description of Artificial Sequence: Synthetic oligonucleotide
ccacuggcagaugucccgg

SEQ ID NO: 6403 - RNA, 19 nt, Artificial Sequence
  Description of Artificial Sequence: Synthetic oligonucleotide
gcgaagagaagagacacau

SEQ ID NO: 6404 - RNA, 19 nt, Artificial Sequence
  Description of Artificial Sequence: Synthetic oligonucleotide
uuguuggaagaagcagccc

SEQ ID NO: 6405 - RNA, 19 nt, Artificial Sequence
  Description of Artificial Sequence: Synthetic oligonucleotide
caugacagcuccccuuccu

SEQ ID NO: 6406 - RNA, 19 nt, Artificial Sequence
  Description of Artificial Sequence: Synthetic oligonucleotide
ugggacucgcccucauccu

SEQ ID NO: 6407 - RNA, 19 nt, Artificial Sequence
  Description of Artificial Sequence: Synthetic oligonucleotide
ucuuccugcuccccuuccu

SEQ ID NO: 6408 - RNA, 19 nt, Artificial Sequence
  Description of Artificial Sequence: Synthetic oligonucleotide
uggggugcagccuaaaagg

SEQ ID NO: 6409 - RNA, 19 nt, Artificial Sequence
  Description of Artificial Sequence: Synthetic oligonucleotide
gaccuauguccucacacca

SEQ ID NO: 6410 - RNA, 19 nt, Artificial Sequence
  Description of Artificial Sequence: Synthetic oligonucleotide
auugaaaccacuaguucug

SEQ ID NO: 6411 - RNA, 19 nt, Artificial Sequence
  Description of Artificial Sequence: Synthetic oligonucleotide
guccccccaggagaccugg

SEQ ID NO: 6412 - RNA, 19 nt, Artificial Sequence
  Description of Artificial Sequence: Synthetic oligonucleotide
guugugugugugugagugg

SEQ ID NO: 6413 - RNA, 19 nt, Artificial Sequence
  Description of Artificial Sequence: Synthetic oligonucleotide
guugaccuuccuccauccc

SEQ ID NO: 6414 - RNA, 19 nt, Artificial Sequence
  Description of Artificial Sequence: Synthetic oligonucleotide
ccugguccuucccuucccu

SEQ ID NO: 6415 - RNA, 19 nt, Artificial Sequence
  Description of Artificial Sequence: Synthetic oligonucleotide
uucccgaggcacagagaga

SEQ ID NO: 6416 - RNA, 19 nt, Artificial Sequence
  Description of Artificial Sequence: Synthetic oligonucleotide
acagggcaggauccacgug

SEQ ID NO: 6417 - RNA, 19 nt, Artificial Sequence
  Description of Artificial Sequence: Synthetic oligonucleotide
gcccauuguggaggcagag

SEQ ID NO: 6418 - RNA, 19 nt, Artificial Sequence
  Description of Artificial Sequence: Synthetic oligonucleotide
gaaaagagaaaguguuuua

SEQ ID NO: 6419 - RNA, 19 nt, Artificial Sequence
  Description of Artificial Sequence: Synthetic oligonucleotide
auauacgguacuuauuuaa

SEQ ID NO: 6420 - RNA, 19 nt, Artificial Sequence
  Description of Artificial Sequence: Synthetic oligonucleotide
auaucccuuuuuaauuaga

SEQ ID NO: 6421 - RNA, 19 nt, Artificial Sequence
  Description of Artificial Sequence: Synthetic oligonucleotide
aaauuaaaacaguuaauuu

SEQ ID NO: 6422 - RNA, 19 nt, Artificial Sequence
  Description of Artificial Sequence: Synthetic oligonucleotide
uaauuaaagaguaggguuu

SEQ ID NO: 6423 - RNA, 19 nt, Artificial Sequence
  Description of Artificial Sequence: Synthetic oligonucleotide
uuuuuucaguauucuuggu

SEQ ID NO: 6424 - RNA, 19 nt, Artificial Sequence
  Description of Artificial Sequence: Synthetic oligonucleotide
uuaauauuuaauuucaacu

SEQ ID NO: 6425 - RNA, 19 nt, Artificial Sequence
  Description of Artificial Sequence: Synthetic oligonucleotide
uauuuaugagauguaucuu

SEQ ID NO: 6426 - RNA, 19 nt, Artificial Sequence
  Description of Artificial Sequence: Synthetic oligonucleotide
uuugcucucucuugcucuc

SEQ ID NO: 6427 - RNA, 19 nt, Artificial Sequence
  Description of Artificial Sequence: Synthetic oligonucleotide
cuuauuuguaccgguuuuu

SEQ ID NO: 6428 - RNA, 19 nt, Artificial Sequence
  Description of Artificial Sequence: Synthetic oligonucleotide
uguauauaaaauucauguu

SEQ ID NO: 6429 - RNA, 19 nt, Artificial Sequence
  Description of Artificial Sequence: Synthetic oligonucleotide
uuccaaucucucucucccu

SEQ ID NO: 6430 - RNA, 19 nt, Artificial Sequence
  Description of Artificial Sequence: Synthetic oligonucleotide
ugaucggugacagucacua

SEQ ID NO: 6431 - RNA, 19 nt, Artificial Sequence
  Description of Artificial Sequence: Synthetic oligonucleotide
agcuuaucuugaacagaua

SEQ ID NO: 6432 - RNA, 19 nt, Artificial Sequence
  Description of Artificial Sequence: Synthetic oligonucleotide
auuuaauuuugcuaacacu

SEQ ID NO: 6433 - RNA, 19 nt, Artificial Sequence
  Description of Artificial Sequence: Synthetic oligonucleotide
ucagcucugcccuccccga

SEQ ID NO: 6434 - RNA, 19 nt, Artificial Sequence
  Description of Artificial Sequence: Synthetic oligonucleotide
auccccuggcuccccagca

SEQ ID NO: 6435 - RNA, 19 nt, Artificial Sequence
  Description of Artificial Sequence: Synthetic oligonucleotide
acacauuccuuugaaauaa

SEQ ID NO: 6436 - RNA, 19 nt, Artificial Sequence
  Description of Artificial Sequence: Synthetic oligonucleotide
agguuucaauauacaucua

SEQ ID NO: 6437 - RNA, 19 nt, Artificial Sequence
  Description of Artificial Sequence: Synthetic oligonucleotide
acauacuauauauauauuu

SEQ ID NO: 6438 - RNA, 19 nt, Artificial Sequence
  Description of Artificial Sequence: Synthetic oligonucleotide
uggcaacuuguauuugugu

SEQ ID NO: 6439 - RNA, 19 nt, Artificial Sequence
  Description of Artificial Sequence: Synthetic oligonucleotide
uguauauauauauauauau

SEQ ID NO: 6440 - RNA, 19 nt, Artificial Sequence
  Description of Artificial Sequence: Synthetic oligonucleotide
uguuuauguauauauguga

SEQ ID NO: 6441 - RNA, 19 nt, Artificial Sequence
  Description of Artificial Sequence: Synthetic oligonucleotide
auucugauaaaauagacau

SEQ ID NO: 6442 - RNA, 19 nt, Artificial Sequence
  Description of Artificial Sequence: Synthetic oligonucleotide
uugcuauucuguuuuuuau

SEQ ID NO: 6443 - RNA, 19 nt, Artificial Sequence
  Description of Artificial Sequence: Synthetic oligonucleotide
uauguaaaaacaaaacaag

SEQ ID NO: 6444 - RNA, 19 nt, Artificial Sequence
  Description of Artificial Sequence: Synthetic oligonucleotide
gaaaaaauagagaauucua

SEQ ID NO: 6445 - RNA, 19 nt, Artificial Sequence
  Description of Artificial Sequence: Synthetic oligonucleotide
acauacuaaaucucucucc

SEQ ID NO: 6446 - RNA, 19 nt, Artificial Sequence
  Description of Artificial Sequence: Synthetic oligonucleotide
cuuuuuuaauuuuaauauu

SEQ ID NO: 6447 - RNA, 19 nt, Artificial Sequence
  Description of Artificial Sequence: Synthetic oligonucleotide
uuguuaucauuuauuuauu

SEQ ID NO: 6448 - RNA, 19 nt, Artificial Sequence
  Description of Artificial Sequence: Synthetic oligonucleotide
uggugcuacuguuuauccg

SEQ ID NO: 6449 - RNA, 19 nt, Artificial Sequence
  Description of Artificial Sequence: Synthetic oligonucleotide
guaauaauuguggggaaaa

SEQ ID NO: 6450 - RNA, 19 nt, Artificial Sequence
  Description of Artificial Sequence: Synthetic oligonucleotide
agauauuaacaucacgucu

SEQ ID NO: 6451 - RNA, 19 nt, Artificial Sequence
  Description of Artificial Sequence: Synthetic oligonucleotide
uuugucucuagugcaguuu

SEQ ID NO: 6452 - RNA, 19 nt, Artificial Sequence
  Description of Artificial Sequence: Synthetic oligonucleotide
uuucgagauauuccguagu

SEQ ID NO: 6453 - RNA, 19 nt, Artificial Sequence
  Description of Artificial Sequence: Synthetic oligonucleotide
uacauauuuauuuuuaaac

SEQ ID NO: 6454 - RNA, 19 nt, Artificial Sequence
  Description of Artificial Sequence: Synthetic oligonucleotide
caacgacaaagaaauacag

SEQ ID NO: 6455 - RNA, 19 nt, Artificial Sequence
  Description of Artificial Sequence: Synthetic oligonucleotide
gauauaucuuaaaaaaaaa

SEQ ID NO: 6456 - RNA, 19 nt, Artificial Sequence
  Description of Artificial Sequence: Synthetic oligonucleotide
aaaagcauuuuguauuaaa

SEQ ID NO: 6457 - RNA, 19 nt, Artificial Sequence
  Description of Artificial Sequence: Synthetic oligonucleotide
agaauuuaauucugaucuc

SEQ ID NO: 6458 - RNA, 19 nt, Artificial Sequence
  Description of Artificial Sequence: Synthetic oligonucleotide
gcaagaaaucccgucccug

SEQ ID NO: 6459 - RNA, 19 nt, Artificial Sequence
  Description of Artificial Sequence: Synthetic oligonucleotide
caagacaagaaaaucccug

SEQ ID NO: 6460 - RNA, 19 nt, Artificial Sequence
  Description of Artificial Sequence: Synthetic oligonucleotide
gaucucucaccaggaaaga

SEQ ID NO: 6461 - RNA, 19 nt, Artificial Sequence
  Description of Artificial Sequence: Synthetic oligonucleotide
acugauacagaacgaucga

SEQ ID NO: 6462 - RNA, 19 nt, Artificial Sequence
  Description of Artificial Sequence: Synthetic oligonucleotide
auacagaaaccacgcugcc

SEQ ID NO: 6463 - RNA, 19 nt, Artificial Sequence
  Description of Artificial Sequence: Synthetic oligonucleotide
cgccaccacaccaucacca

SEQ ID NO: 6464 - RNA, 19 nt, Artificial Sequence
  Description of Artificial Sequence: Synthetic oligonucleotide
aucgacagaacaguccuua

SEQ ID NO: 6465 - RNA, 19 nt, Artificial Sequence
  Description of Artificial Sequence: Synthetic oligonucleotide
aauccagaaaccugaaaug

SEQ ID NO: 6466 - RNA, 19 nt, Artificial Sequence
  Description of Artificial Sequence: Synthetic oligonucleotide
gaaggaagaggagacucug

SEQ ID NO: 6467 - RNA, 19 nt, Artificial Sequence
  Description of Artificial Sequence: Synthetic oligonucleotide
gcgcagagcacuuuggguc

SEQ ID NO: 6468 - RNA, 19 nt, Artificial Sequence
  Description of Artificial Sequence: Synthetic oligonucleotide
ccggagggcgagacuccgg

SEQ ID NO: 6469 - RNA, 19 nt, Artificial Sequence
  Description of Artificial Sequence: Synthetic oligonucleotide
gcggaagcauucccgggcg

SEQ ID NO: 6470 - RNA, 19 nt, Artificial Sequence
  Description of Artificial Sequence: Synthetic oligonucleotide
gggugacccagcacggucc

SEQ ID NO: 6471 - RNA, 19 nt, Artificial Sequence
  Description of Artificial Sequence: Synthetic oligonucleotide
ccucuuggaauuggauucg

SEQ ID NO: 6472 - RNA, 19 nt, Artificial Sequence
  Description of Artificial Sequence: Synthetic oligonucleotide
gccauuuuauuuuucuugc

SEQ ID NO: 6473 - RNA, 19 nt, Artificial Sequence
  Description of Artificial Sequence: Synthetic oligonucleotide
cugcuaaaucaccgagccc

SEQ ID NO: 6474 - RNA, 19 nt, Artificial Sequence
  Description of Artificial Sequence: Synthetic oligonucleotide
cggaagauuagagaguuuu

SEQ ID NO: 6475 - RNA, 19 nt, Artificial Sequence
  Description of Artificial Sequence: Synthetic oligonucleotide
uauuucugggauuccugua

SEQ ID NO: 6476 - RNA, 19 nt, Artificial Sequence
  Description of Artificial Sequence: Synthetic oligonucleotide
agacacacccacccacaua

SEQ ID NO: 6477 - RNA, 19 nt, Artificial Sequence
  Description of Artificial Sequence: Synthetic oligonucleotide
acauacauuuauauauaua

SEQ ID NO: 6478 - RNA, 19 nt, Artificial Sequence
  Description of Artificial Sequence: Synthetic oligonucleotide
auauauuauauauauauaa

SEQ ID NO: 6479 - RNA, 19 nt, Artificial Sequence
  Description of Artificial Sequence: Synthetic oligonucleotide
aaaauaaauaucucuauuu

SEQ ID NO: 6480 - RNA, 19 nt, Artificial Sequence
  Description of Artificial Sequence: Synthetic oligonucleotide
uuauauauauaaaauauau

SEQ ID NO: 6481 - RNA, 19 nt, Artificial Sequence
  Description of Artificial Sequence: Synthetic oligonucleotide
uauauucuuuuuuuaaauu

SEQ ID NO: 6482 - RNA, 19 nt, Artificial Sequence
  Description of Artificial Sequence: Synthetic oligonucleotide
uaacagugcuaauguuauu

SEQ ID NO: 6483 - RNA, 19 nt, Artificial Sequence
  Description of Artificial Sequence: Synthetic oligonucleotide
uggugucuucacuggaugu

SEQ ID NO: 6484 - RNA, 19 nt, Artificial Sequence
  Description of Artificial Sequence: Synthetic oligonucleotide
uauuugacugcuguggacu

SEQ ID NO: 6485 - RNA, 19 nt, Artificial Sequence
  Description of Artificial Sequence: Synthetic oligonucleotide
uugaguugggaggggaaug

SEQ ID NO: 6486 - RNA, 19 nt, Artificial Sequence
  Description of Artificial Sequence: Synthetic oligonucleotide
guucccacucagauccuga

SEQ ID NO: 6487 - RNA, 19 nt, Artificial Sequence
  Description of Artificial Sequence: Synthetic oligonucleotide
acagggaagaggaggagau

SEQ ID NO: 6488 - RNA, 19 nt, Artificial Sequence
  Description of Artificial Sequence: Synthetic oligonucleotide
ugagagacucuggcaugau

SEQ ID NO: 6489 - RNA, 19 nt, Artificial Sequence
  Description of Artificial Sequence: Synthetic oligonucleotide
ucuuuuuuuugucccacuu

SEQ ID NO: 6490 - RNA, 19 nt, Artificial Sequence
  Description of Artificial Sequence: Synthetic oligonucleotide
ugguggggccaggguccuc

SEQ ID NO: 6491 - RNA, 19 nt, Artificial Sequence
  Description of Artificial Sequence: Synthetic oligonucleotide
cuccccugcccaggaaugu

SEQ ID NO: 6492 - RNA, 19 nt, Artificial Sequence
  Description of Artificial Sequence: Synthetic oligonucleotide
ugcaaggccagggcauggg

SEQ ID NO: 6493 - RNA, 19 nt, Artificial Sequence
  Description of Artificial Sequence: Synthetic oligonucleotide
gggcaaauaugacccaguu

SEQ ID NO: 6494 - RNA, 19 nt, Artificial Sequence
  Description of Artificial Sequence: Synthetic oligonucleotide
uuugggaacaccgacaaac

SEQ ID NO: 6495 - RNA, 19 nt, Artificial Sequence
  Description of Artificial Sequence: Synthetic oligonucleotide
cccagcccuggcgcugagc

SEQ ID NO: 6496 - RNA, 19 nt, Artificial Sequence
  Description of Artificial Sequence: Synthetic oligonucleotide
ccucucuaccccaggucag

SEQ ID NO: 6497 - RNA, 19 nt, Artificial Sequence
  Description of Artificial Sequence: Synthetic oligonucleotide
gacggacagaaagacagau

SEQ ID NO: 6498 - RNA, 19 nt, Artificial Sequence
  Description of Artificial Sequence: Synthetic oligonucleotide
ucacagguacagggaugag

SEQ ID NO: 6499 - RNA, 19 nt, Artificial Sequence
  Description of Artificial Sequence: Synthetic oligonucleotide
ggacaccggcucugaccag

SEQ ID NO: 6500 - RNA, 19 nt, Artificial Sequence
  Description of Artificial Sequence: Synthetic oligonucleotide
ggaguuuggggagcuucag

SEQ ID NO: 6501 - RNA, 19 nt, Artificial Sequence
  Description of Artificial Sequence: Synthetic oligonucleotide
ggacauugcugugcuuugg

SEQ ID NO: 6502 - RNA, 19 nt, Artificial Sequence
  Description of Artificial Sequence: Synthetic oligonucleotide
gggauucccuccacaugcu

SEQ ID NO: 6503 - RNA, 19 nt, Artificial Sequence
  Description of Artificial Sequence: Synthetic oligonucleotide
ugcacgcgcaucucgcccc

SEQ ID NO: 6504 - RNA, 19 nt, Artificial Sequence
  Description of Artificial Sequence: Synthetic oligonucleotide
ccaggggcacugccuggaa

SEQ ID NO: 6505 - RNA, 19 nt, Artificial Sequence
  Description of Artificial Sequence: Synthetic oligonucleotide
agauucaggagccugggcg

SEQ ID NO: 6506 - RNA, 19 nt, Artificial Sequence
  Description of Artificial Sequence: Synthetic oligonucleotide
ggccuucgcuuacucucac

SEQ ID NO: 6507 - RNA, 19 nt, Artificial Sequence
  Description of Artificial Sequence: Synthetic oligonucleotide
ccugcuucugaguugccca

SEQ ID NO: 6508 - RNA, 19 nt, Artificial Sequence
  Description of Artificial Sequence: Synthetic oligonucleotide
aggagaccacuggcagaug

SEQ ID NO: 6509 - RNA, 19 nt, Artificial Sequence
  Description of Artificial Sequence: Synthetic oligonucleotide
gucccggcgaagagaagag

SEQ ID NO: 6510 - RNA, 19 nt, Artificial Sequence
  Description of Artificial Sequence: Synthetic oligonucleotide
gacacauuguuggaagaag

SEQ ID NO: 6511 - RNA, 19 nt, Artificial Sequence
  Description of Artificial Sequence: Synthetic oligonucleotide
gcagcccaugacagcuccc

SEQ ID NO: 6512 - RNA, 19 nt, Artificial Sequence
  Description of Artificial Sequence: Synthetic oligonucleotide
ccuuccugggacucgcccu

SEQ ID NO: 6513 - RNA, 19 nt, Artificial Sequence
  Description of Artificial Sequence: Synthetic oligonucleotide
ucauccucuuccugcuccc

SEQ ID NO: 6514 - RNA, 19 nt, Artificial Sequence
  Description of Artificial Sequence: Synthetic oligonucleotide
ccuuccuggggugcagccu

SEQ ID NO: 6515 - RNA, 19 nt, Artificial Sequence
  Description of Artificial Sequence: Synthetic oligonucleotide
uaaaaggaccuauguccuc

SEQ ID NO: 6516 - RNA, 19 nt, Artificial Sequence
  Description of Artificial Sequence: Synthetic oligonucleotide
cacaccauugaaaccacua

SEQ ID NO: 6517 - RNA, 19 nt, Artificial Sequence
  Description of Artificial Sequence: Synthetic oligonucleotide
aguucuguccccccaggag

SEQ ID NO: 6518 - RNA, 19 nt, Artificial Sequence
  Description of Artificial Sequence: Synthetic oligonucleotide
gaccugguugugugugugu

SEQ ID NO: 6519 - RNA, 19 nt, Artificial Sequence
  Description of Artificial Sequence: Synthetic oligonucleotide
ugagugguugaccuuccuc

SEQ ID NO: 6520 - RNA, 19 nt, Artificial Sequence
  Description of Artificial Sequence: Synthetic oligonucleotide
ccauccccugguccuuccc

SEQ ID NO: 6521 - RNA, 19 nt, Artificial Sequence
  Description of Artificial Sequence: Synthetic oligonucleotide
cuucccuucccgaggcaca

SEQ ID NO: 6522 - RNA, 19 nt, Artificial Sequence
  Description of Artificial Sequence: Synthetic oligonucleotide
agagagacagggcaggauc

SEQ ID NO: 6523 - RNA, 19 nt, Artificial Sequence
  Description of Artificial Sequence: Synthetic oligonucleotide
ccacgugcccauuguggag

SEQ ID NO: 6524 - RNA, 19 nt, Artificial Sequence
  Description of Artificial Sequence: Synthetic oligonucleotide
ggcagagaaaagagaaagu

SEQ ID NO: 6525 - RNA, 19 nt, Artificial Sequence
  Description of Artificial Sequence: Synthetic oligonucleotide
uguuuuauauacgguacuu

SEQ ID NO: 6526 - RNA, 19 nt, Artificial Sequence
  Description of Artificial Sequence: Synthetic oligonucleotide
uauuuaauaucccuuuuua

SEQ ID NO: 6527 - RNA, 19 nt, Artificial Sequence
  Description of Artificial Sequence: Synthetic oligonucleotide
aauuagaaauuaaaacagu

SEQ ID NO: 6528 - RNA, 19 nt, Artificial Sequence
  Description of Artificial Sequence: Synthetic oligonucleotide
uuaauuuaauuaaagagua

SEQ ID NO: 6529 - RNA, 19 nt, Artificial Sequence
  Description of Artificial Sequence: Synthetic oligonucleotide
aggguuuuuuuucaguauu

SEQ ID NO: 6530 - RNA, 19 nt, Artificial Sequence
  Description of Artificial Sequence: Synthetic oligonucleotide
ucuugguuaauauuuaauu

SEQ ID NO: 6531 - RNA, 19 nt, Artificial Sequence
  Description of Artificial Sequence: Synthetic oligonucleotide
uucaacuauuuaugagaug

SEQ ID NO: 6532 - RNA, 19 nt, Artificial Sequence
  Description of Artificial Sequence: Synthetic oligonucleotide
guaucuuuugcucucucuu

SEQ ID NO: 6533 - RNA, 19 nt, Artificial Sequence
  Description of Artificial Sequence: Synthetic oligonucleotide
ugcucucuuauuuguaccg

SEQ ID NO: 6534 - RNA, 19 nt, Artificial Sequence
  Description of Artificial Sequence: Synthetic oligonucleotide
gguuuuuguauauaaaauu

SEQ ID NO: 6535 - RNA, 19 nt, Artificial Sequence
  Description of Artificial Sequence: Synthetic oligonucleotide
ucauguuuccaaucucucu

SEQ ID NO: 6536 - RNA, 19 nt, Artificial Sequence
  Description of Artificial Sequence: Synthetic oligonucleotide
ucucccugaucggugacag

SEQ ID NO: 6537 - RNA, 19 nt, Artificial Sequence
  Description of Artificial Sequence: Synthetic oligonucleotide
gucacuagcuuaucuugaa

SEQ ID NO: 6538 - RNA, 19 nt, Artificial Sequence
  Description of Artificial Sequence: Synthetic oligonucleotide
acagauauuuaauuuugcu

SEQ ID NO: 6539 - RNA, 19 nt, Artificial Sequence
  Description of Artificial Sequence: Synthetic oligonucleotide
uaacacucagcucugcccu

SEQ ID NO: 6540 - RNA, 19 nt, Artificial Sequence
  Description of Artificial Sequence: Synthetic oligonucleotide
uccccgauccccuggcucc

SEQ ID NO: 6541 - RNA, 19 nt, Artificial Sequence
  Description of Artificial Sequence: Synthetic oligonucleotide
cccagcacacauuccuuug

SEQ ID NO: 6542 - RNA, 19 nt, Artificial Sequence
  Description of Artificial Sequence: Synthetic oligonucleotide
gaaauaagguuucaauaua

SEQ ID NO: 6543 - RNA, 19 nt, Artificial Sequence
  Description of Artificial Sequence: Synthetic oligonucleotide
acaucuacauacuauauau

SEQ ID NO: 6544 - RNA, 19 nt, Artificial Sequence
  Description of Artificial Sequence: Synthetic oligonucleotide
uauauuuggcaacuuguau

SEQ ID NO: 6545 - RNA, 19 nt, Artificial Sequence
  Description of Artificial Sequence: Synthetic oligonucleotide
uuuguguguauauauauau

SEQ ID NO: 6546 - RNA, 19 nt, Artificial Sequence
  Description of Artificial Sequence: Synthetic oligonucleotide
uauauauguuuauguauau

SEQ ID NO: 6547 - RNA, 19 nt, Artificial Sequence
  Description of Artificial Sequence: Synthetic oligonucleotide
uaugugauucugauaaaau

SEQ ID NO: 6548 - RNA, 19 nt, Artificial Sequence
  Description of Artificial Sequence: Synthetic oligonucleotide
uagacauugcuauucuguu

SEQ ID NO: 6549 - RNA, 19 nt, Artificial Sequence
  Description of Artificial Sequence: Synthetic oligonucleotide
uuuuuauauguaaaaacaa

SEQ ID NO: 6550 - RNA, 19 nt, Artificial Sequence
  Description of Artificial Sequence: Synthetic oligonucleotide
aaacaagaaaaaauagaga

SEQ ID NO: 6551 - RNA, 19 nt, Artificial Sequence
  Description of Artificial Sequence: Synthetic oligonucleotide
aauucuacauacuaaaucu

SEQ ID NO: 6552 - RNA, 19 nt, Artificial Sequence
  Description of Artificial Sequence: Synthetic oligonucleotide
ucucuccuuuuuuaauuuu

SEQ ID NO: 6553 - RNA, 19 nt, Artificial Sequence
  Description of Artificial Sequence: Synthetic oligonucleotide
uaauauuuguuaucauuua

SEQ ID NO: 6554 - RNA, 19 nt, Artificial Sequence
  Description of Artificial Sequence: Synthetic oligonucleotide
auuuauuggugcuacuguu

SEQ ID NO: 6555 - RNA, 19 nt, Artificial Sequence
  Description of Artificial Sequence: Synthetic oligonucleotide
uuauccguaauaauugugg

SEQ ID NO: 6556 - RNA, 19 nt, Artificial Sequence
  Description of Artificial Sequence: Synthetic oligonucleotide
gggaaaagauauuaacauc

SEQ ID NO: 6557 - RNA, 19 nt, Artificial Sequence
  Description of Artificial Sequence: Synthetic oligonucleotide
cacgucuuugucucuagug

SEQ ID NO: 6558 - RNA, 19 nt, Artificial Sequence
  Description of Artificial Sequence: Synthetic oligonucleotide
gcaguuuuucgagauauuc

SEQ ID NO: 6559 - RNA, 19 nt, Artificial Sequence
  Description of Artificial Sequence: Synthetic oligonucleotide
ccguaguacauauuuauuu

SEQ ID NO: 6560 - RNA, 19 nt, Artificial Sequence
  Description of Artificial Sequence: Synthetic oligonucleotide
uuuaaacaacgacaaagaa

SEQ ID NO: 6561 - RNA, 19 nt, Artificial Sequence
  Description of Artificial Sequence: Synthetic oligonucleotide
aauacagauauaucuuaaa

SEQ ID NO: 6562 - RNA, 19 nt, Artificial Sequence
  Description of Artificial Sequence: Synthetic oligonucleotide
uauuaaagaauuuaauucu

SEQ ID NO: 6563 - RNA, 19 nt, Artificial Sequence
  Description of Artificial Sequence: Synthetic oligonucleotide
agaugugacaagccgaggc

SEQ ID NO: 6564 - RNA, 19 nt, Artificial Sequence
  Description of Artificial Sequence: Synthetic oligonucleotide
cggugagccgggcaggagg

SEQ ID NO: 6565 - RNA, 19 nt, Artificial Sequence
  Description of Artificial Sequence: Synthetic oligonucleotide
gaaggagccucccucaggg

SEQ ID NO: 6566 - RNA, 19 nt, Artificial Sequence
  Description of Artificial Sequence: Synthetic oligonucleotide
guuucgggaaccagaucuc

SEQ ID NO: 6567 - RNA, 19 nt, Artificial Sequence
  Description of Artificial Sequence: Synthetic oligonucleotide
cucaccaggaaagacugau

SEQ ID NO: 6568 - RNA, 19 nt, Artificial Sequence
  Description of Artificial Sequence: Synthetic oligonucleotide
uacagaacgaucgauacag

SEQ ID NO: 6569 - RNA, 19 nt, Artificial Sequence
  Description of Artificial Sequence: Synthetic oligonucleotide
gaaaccacgcugccgccac

SEQ ID NO: 6570 - RNA, 19 nt, Artificial Sequence
  Description of Artificial Sequence: Synthetic oligonucleotide
ccacaccaucaccaucgac

SEQ ID NO: 6571 - RNA, 19 nt, Artificial Sequence
  Description of Artificial Sequence: Synthetic oligonucleotide
cagaacaguccuuaaucca

SEQ ID NO: 6572 - RNA, 19 nt, Artificial Sequence
  Description of Artificial Sequence: Synthetic oligonucleotide
agaaaccugaaaugaagga

SEQ ID NO: 6573 - RNA, 19 nt, Artificial Sequence
  Description of Artificial Sequence: Synthetic oligonucleotide
aagaggagacucugcgcag

SEQ ID NO: 6574 - RNA, 19 nt, Artificial Sequence
  Description of Artificial Sequence: Synthetic oligonucleotide
gagcacuuuggguccggag

SEQ ID NO: 6575 - RNA, 19 nt, Artificial Sequence
  Description of Artificial Sequence: Synthetic oligonucleotide
gggcgagacuccggcggaa

SEQ ID NO: 6576 - RNA, 19 nt, Artificial Sequence
  Description of Artificial Sequence: Synthetic oligonucleotide
agcauucccgggcggguga

SEQ ID NO: 6577 - RNA, 19 nt, Artificial Sequence
  Description of Artificial Sequence: Synthetic oligonucleotide
acccagcacggucccucuu

SEQ ID NO: 6578 - RNA, 19 nt, Artificial Sequence
  Description of Artificial Sequence: Synthetic oligonucleotide
uggaauuggauucgccauu

SEQ ID NO: 6579 - RNA, 19 nt, Artificial Sequence
  Description of Artificial Sequence: Synthetic oligonucleotide
uuuauuuuucuugcugcua

SEQ ID NO: 6580 - RNA, 19 nt, Artificial Sequence
  Description of Artificial Sequence: Synthetic oligonucleotide
aaaucaccgagcccggaag

SEQ ID NO: 6581 - RNA, 19 nt, Artificial Sequence
  Description of Artificial Sequence: Synthetic oligonucleotide
gauuagagaguuuuauuuc

SEQ ID NO: 6582 - RNA, 19 nt, Artificial Sequence
  Description of Artificial Sequence: Synthetic oligonucleotide
cugggauuccuguagacac

SEQ ID NO: 6583 - RNA, 19 nt, Artificial Sequence
  Description of Artificial Sequence: Synthetic oligonucleotide
cacccacccacauacauac

SEQ ID NO: 6584 - RNA, 19 nt, Artificial Sequence
  Description of Artificial Sequence: Synthetic oligonucleotide
cauuuauauauauauauau

SEQ ID NO: 6585 - RNA, 19 nt, Artificial Sequence
  Description of Artificial Sequence: Synthetic oligonucleotide
uuauauauauauaaaaaua

SEQ ID NO: 6586 - RNA, 19 nt, Artificial Sequence
  Description of Artificial Sequence: Synthetic oligonucleotide
aaauaucucuauuuuauau

SEQ ID NO: 6587 - RNA, 19 nt, Artificial Sequence
  Description of Artificial Sequence: Synthetic oligonucleotide
uauauaaaauauauauauu

SEQ ID NO: 6588 - RNA, 19 nt, Artificial Sequence
  Description of Artificial Sequence: Synthetic oligonucleotide
ucuuuuuuuaaauuaacag

SEQ ID NO: 6589 - RNA, 19 nt, Artificial Sequence
  Description of Artificial Sequence: Synthetic oligonucleotide
gugcuaauguuauuggugu

SEQ ID NO: 6590 - RNA, 19 nt, Artificial Sequence
  Description of Artificial Sequence: Synthetic oligonucleotide
ucuucacuggauguauuug

SEQ ID NO: 6591 - RNA, 19 nt, Artificial Sequence
  Description of Artificial Sequence: Synthetic oligonucleotide
gacugcuguggacuugagu

SEQ ID NO: 6592 - RNA, 19 nt, Artificial Sequence
  Description of Artificial Sequence: Synthetic oligonucleotide
uugggaggggaauguuccc

SEQ ID NO: 6593 - RNA, 19 nt, Artificial Sequence
  Description of Artificial Sequence: Synthetic oligonucleotide
cacucagauccugacaggg

SEQ ID NO: 6594 - RNA, 19 nt, Artificial Sequence
  Description of Artificial Sequence: Synthetic oligonucleotide
gaagaggaggagaugagag

SEQ ID NO: 6595 - RNA, 19 nt, Artificial Sequence
  Description of Artificial Sequence: Synthetic oligonucleotide
gacucuggcaugaucuuuu

SEQ ID NO: 6596 - RNA, 19 nt, Artificial Sequence
  Description of Artificial Sequence: Synthetic oligonucleotide
uuuuugucccacuuggugg

SEQ ID NO: 6597 - RNA, 19 nt, Artificial Sequence
  Description of Artificial Sequence: Synthetic oligonucleotide
gggccaggguccucucccc

SEQ ID NO: 6598 - RNA, 19 nt, Artificial Sequence
  Description of Artificial Sequence: Synthetic oligonucleotide
cugcccaggaaugugcaag

SEQ ID NO: 6599 - RNA, 19 nt, Artificial Sequence
  Description of Artificial Sequence: Synthetic oligonucleotide
ggccagggcaugggggcaa

SEQ ID NO: 6600 - RNA, 19 nt, Artificial Sequence
  Description of Artificial Sequence: Synthetic oligonucleotide
aauaugacccaguuuuggg

SEQ ID NO: 6601 - RNA, 19 nt, Artificial Sequence
  Description of Artificial Sequence: Synthetic oligonucleotide
gaacaccgacaaacccagc

SEQ ID NO: 6602 - RNA, 19 nt, Artificial Sequence
  Description of Artificial Sequence: Synthetic oligonucleotide
cccuggcgcugagccucuc

SEQ ID NO: 6603 - RNA, 19 nt, Artificial Sequence
  Description of Artificial Sequence: Synthetic oligonucleotide
cuaccccaggucagacgga

SEQ ID NO: 6604 - RNA, 19 nt, Artificial Sequence
  Description of Artificial Sequence: Synthetic oligonucleotide
acagaaagacagaucacag

SEQ ID NO: 6605 - RNA, 19 nt, Artificial Sequence
  Description of Artificial Sequence: Synthetic oligonucleotide
gguacagggaugaggacac

SEQ ID NO: 6606 - RNA, 19 nt, Artificial Sequence
  Description of Artificial Sequence: Synthetic oligonucleotide
ccggcucugaccaggaguu

SEQ ID NO: 6607 - RNA, 19 nt, Artificial Sequence
  Description of Artificial Sequence: Synthetic oligonucleotide
uuggggagcuucaggacau

SEQ ID NO: 6608 - RNA, 19 nt, Artificial Sequence
  Description of Artificial Sequence: Synthetic oligonucleotide
uugcugugcuuuggggauu

SEQ ID NO: 6609 - RNA, 19 nt, Artificial Sequence
  Description of Artificial Sequence: Synthetic oligonucleotide
ucccuccacaugcugcacg

SEQ ID NO: 6610 - RNA, 19 nt, Artificial Sequence
  Description of Artificial Sequence: Synthetic oligonucleotide
gcgcaucucgcccccaggg

SEQ ID NO: 6611 - RNA, 19 nt, Artificial Sequence
  Description of Artificial Sequence: Synthetic oligonucleotide
ggcacugccuggaagauuc

SEQ ID NO: 6612 - RNA, 19 nt, Artificial Sequence
  Description of Artificial Sequence: Synthetic oligonucleotide
caggagccugggcggccuu

SEQ ID NO: 6613 - RNA, 19 nt, Artificial Sequence
  Description of Artificial Sequence: Synthetic oligonucleotide
ucgcuuacucucaccugcu

SEQ ID NO: 6614 - RNA, 19 nt, Artificial Sequence
  Description of Artificial Sequence: Synthetic oligonucleotide
uucugaguugcccaggaga

SEQ ID NO: 6615 - RNA, 19 nt, Artificial Sequence
  Description of Artificial Sequence: Synthetic oligonucleotide
accacuggcagaugucccg

SEQ ID NO: 6616 - RNA, 19 nt, Artificial Sequence
  Description of Artificial Sequence: Synthetic oligonucleotide
ggcgaagagaagagacaca

SEQ ID NO: 6617 - RNA, 19 nt, Artificial Sequence
  Description of Artificial Sequence: Synthetic oligonucleotide
auuguuggaagaagcagcc

SEQ ID NO: 6618 - RNA, 19 nt, Artificial Sequence
  Description of Artificial Sequence: Synthetic oligonucleotide
ccaugacagcuccccuucc

SEQ ID NO: 6619 - RNA, 19 nt, Artificial Sequence
  Description of Artificial Sequence: Synthetic oligonucleotide
cugggacucgcccucaucc

SEQ ID NO: 6620 - RNA, 19 nt, Artificial Sequence
  Description of Artificial Sequence: Synthetic oligonucleotide
cucuuccugcuccccuucc

SEQ ID NO: 6621 - RNA, 19 nt, Artificial Sequence
  Description of Artificial Sequence: Synthetic oligonucleotide
cuggggugcagccuaaaag

SEQ ID NO: 6622 - RNA, 19 nt, Artificial Sequence
  Description of Artificial Sequence: Synthetic oligonucleotide
ggaccuauguccucacacc

SEQ ID NO: 6623 - RNA, 19 nt, Artificial Sequence
  Description of Artificial Sequence: Synthetic oligonucleotide
cauugaaaccacuaguucu

SEQ ID NO: 6624 - RNA, 19 nt, Artificial Sequence
  Description of Artificial Sequence: Synthetic oligonucleotide
uguccccccaggagaccug

SEQ ID NO: 6625 - RNA, 19 nt, Artificial Sequence
  Description of Artificial Sequence: Synthetic oligonucleotide
gguugugugugugugagug

SEQ ID NO: 6626 - RNA, 19 nt, Artificial Sequence
  Description of Artificial Sequence: Synthetic oligonucleotide
gguugaccuuccuccaucc

SEQ ID NO: 6627 - RNA, 19 nt, Artificial Sequence
  Description of Artificial Sequence: Synthetic oligonucleotide
cccugguccuucccuuccc

SEQ ID NO: 6628 - RNA, 19 nt, Artificial Sequence
  Description of Artificial Sequence: Synthetic oligonucleotide
cuucccgaggcacagagag

SEQ ID NO: 6629 - RNA, 19 nt, Artificial Sequence
  Description of Artificial Sequence: Synthetic oligonucleotide
gacagggcaggauccacgu

SEQ ID NO: 6630 - RNA, 19 nt, Artificial Sequence
  Description of Artificial Sequence: Synthetic oligonucleotide
ugcccauuguggaggcaga

SEQ ID NO: 6631 - RNA, 19 nt, Artificial Sequence
  Description of Artificial Sequence: Synthetic oligonucleotide
agaaaagagaaaguguuuu

SEQ ID NO: 6632 - RNA, 19 nt, Artificial Sequence
  Description of Artificial Sequence: Synthetic oligonucleotide
uauauacgguacuuauuua

SEQ ID NO: 6633 - RNA, 19 nt, Artificial Sequence
  Description of Artificial Sequence: Synthetic oligonucleotide
aauaucccuuuuuaauuag

SEQ ID NO: 6634 - RNA, 19 nt, Artificial Sequence
  Description of Artificial Sequence: Synthetic oligonucleotide
gaaauuaaaacaguuaauu

SEQ ID NO: 6635 - RNA, 19 nt, Artificial Sequence
  Description of Artificial Sequence: Synthetic oligonucleotide
uuaauuaaagaguaggguu

SEQ ID NO: 6636 - RNA, 19 nt, Artificial Sequence
  Description of Artificial Sequence: Synthetic oligonucleotide
uuuuuuucaguauucuugg

SEQ ID NO: 6637 - RNA, 19 nt, Artificial Sequence
  Description of Artificial Sequence: Synthetic oligonucleotide
guuaauauuuaauuucaac

SEQ ID NO: 6638 - RNA, 19 nt, Artificial Sequence
  Description of Artificial Sequence: Synthetic oligonucleotide
cuauuuaugagauguaucu

SEQ ID NO: 6639 - RNA, 19 nt, Artificial Sequence
  Description of Artificial Sequence: Synthetic oligonucleotide
uuuugcucucucuugcucu

SEQ ID NO: 6640 - RNA, 19 nt, Artificial Sequence
  Description of Artificial Sequence: Synthetic oligonucleotide
ucuuauuuguaccgguuuu

SEQ ID NO: 6641 - RNA, 19 nt, Artificial Sequence
  Description of Artificial Sequence: Synthetic oligonucleotide
uuguauauaaaauucaugu

SEQ ID NO: 6642 - RNA, 19 nt, Artificial Sequence
  Description of Artificial Sequence: Synthetic oligonucleotide
uuuccaaucucucucuccc

SEQ ID NO: 6643 - RNA, 19 nt, Artificial Sequence
  Description of Artificial Sequence: Synthetic oligonucleotide
cugaucggugacagucacu

SEQ ID NO: 6644 - RNA, 19 nt, Artificial Sequence
  Description of Artificial Sequence: Synthetic oligonucleotide
uagcuuaucuugaacagau

SEQ ID NO: 6645 - RNA, 19 nt, Artificial Sequence
  Description of Artificial Sequence: Synthetic oligonucleotide
uauuuaauuuugcuaacac

SEQ ID NO: 6646 - RNA, 19 nt, Artificial Sequence
  Description of Artificial Sequence: Synthetic oligonucleotide
cucagcucugcccuccccg

SEQ ID NO: 6647 - RNA, 19 nt, Artificial Sequence
  Description of Artificial Sequence: Synthetic oligonucleotide
gauccccuggcuccccagc

SEQ ID NO: 6648 - RNA, 19 nt, Artificial Sequence
  Description of Artificial Sequence: Synthetic oligonucleotide
cacacauuccuuugaaaua

SEQ ID NO: 6649 - RNA, 19 nt, Artificial Sequence
  Description of Artificial Sequence: Synthetic oligonucleotide
aagguuucaauauacaucu

SEQ ID NO: 6650 - RNA, 19 nt, Artificial Sequence
  Description of Artificial Sequence: Synthetic oligonucleotide
uacauacuauauauauauu

SEQ ID NO: 6651 - RNA, 19 nt, Artificial Sequence
  Description of Artificial Sequence: Synthetic oligonucleotide
uuggcaacuuguauuugug

SEQ ID NO: 6652 - RNA, 19 nt, Artificial Sequence
  Description of Artificial Sequence: Synthetic oligonucleotide
guguauauauauauauaua

SEQ ID NO: 6653 - RNA, 19 nt, Artificial Sequence
  Description of Artificial Sequence: Synthetic oligonucleotide
auguuuauguauauaugug

SEQ ID NO: 6654 - RNA, 19 nt, Artificial Sequence
  Description of Artificial Sequence: Synthetic oligonucleotide
gauucugauaaaauagaca

SEQ ID NO: 6655 - RNA, 19 nt, Artificial Sequence
  Description of Artificial Sequence: Synthetic oligonucleotide
auugcuauucuguuuuuua

SEQ ID NO: 6656 - RNA, 19 nt, Artificial Sequence
  Description of Artificial Sequence: Synthetic oligonucleotide
auauguaaaaacaaaacaa

SEQ ID NO: 6657 - RNA, 19 nt, Artificial Sequence
  Description of Artificial Sequence: Synthetic oligonucleotide
agaaaaaauagagaauucu

SEQ ID NO: 6658 - RNA, 19 nt, Artificial Sequence
  Description of Artificial Sequence: Synthetic oligonucleotide
uacauacuaaaucucucuc

SEQ ID NO: 6659 - RNA, 19 nt, Artificial Sequence
  Description of Artificial Sequence: Synthetic oligonucleotide
ccuuuuuuaauuuuaauau

SEQ ID NO: 6660 - RNA, 19 nt, Artificial Sequence
  Description of Artificial Sequence: Synthetic oligonucleotide
uuuguuaucauuuauuuau

SEQ ID NO: 6661 - RNA, 19 nt, Artificial Sequence
  Description of Artificial Sequence: Synthetic oligonucleotide
uuggugcuacuguuuaucc

SEQ ID NO: 6662 - RNA, 19 nt, Artificial Sequence
  Description of Artificial Sequence: Synthetic oligonucleotide
cguaauaauuguggggaaa

SEQ ID NO: 6663 - RNA, 19 nt, Artificial Sequence
  Description of Artificial Sequence: Synthetic oligonucleotide
aagauauuaacaucacguc

SEQ ID NO: 6664 - RNA, 19 nt, Artificial Sequence
  Description of Artificial Sequence: Synthetic oligonucleotide
cuuugucucuagugcaguu

SEQ ID NO: 6665 - RNA, 19 nt, Artificial Sequence
  Description of Artificial Sequence: Synthetic oligonucleotide
uuuucgagauauuccguag

SEQ ID NO: 6666 - RNA, 19 nt, Artificial Sequence
  Description of Artificial Sequence: Synthetic oligonucleotide
guacauauuuauuuuuaaa

SEQ ID NO: 6667 - RNA, 19 nt, Artificial Sequence
  Description of Artificial Sequence: Synthetic oligonucleotide
acaacgacaaagaaauaca

SEQ ID NO: 6668 - RNA, 19 nt, Artificial Sequence
  Description of Artificial Sequence: Synthetic oligonucleotide
agauauaucuuaaaaaaaa

SEQ ID NO: 6669 - RNA, 19 nt, Artificial Sequence
  Description of Artificial Sequence: Synthetic oligonucleotide
aaaaagcauuuuguauuaa

SEQ ID NO: 6670 - RNA, 19 nt, Artificial Sequence
  Description of Artificial Sequence: Synthetic oligonucleotide
aagaauuuaauucugaucu

SEQ ID NO: 6671 - RNA, 19 nt, Artificial Sequence
  Description of Artificial Sequence: Synthetic oligonucleotide
aguccuggagcguguacgu

SEQ ID NO: 6672 - RNA, 19 nt, Artificial Sequence
  Description of Artificial Sequence: Synthetic oligonucleotide
uuggugcccgcugcugucu

SEQ ID NO: 6673 - RNA, 19 nt, Artificial Sequence
  Description of Artificial Sequence: Synthetic oligonucleotide
uaaugcccuggagccuccc

SEQ ID NO: 6674 - RNA, 19 nt, Artificial Sequence
  Description of Artificial Sequence: Synthetic oligonucleotide
cuggcccccaucccugugg

SEQ ID NO: 6675 - RNA, 19 nt, Artificial Sequence
  Description of Artificial Sequence: Synthetic oligonucleotide
ggccuugcucagagcggag

SEQ ID NO: 6676 - RNA, 19 nt, Artificial Sequence
  Description of Artificial Sequence: Synthetic oligonucleotide
gaaagcauuuguuuguaca

SEQ ID NO: 6677 - RNA, 19 nt, Artificial Sequence
  Description of Artificial Sequence: Synthetic oligonucleotide
aagauccgcagacguguaa

SEQ ID NO: 6678 - RNA, 19 nt, Artificial Sequence
  Description of Artificial Sequence: Synthetic oligonucleotide
aauguuccugcaaaaacac

SEQ ID NO: 6679 - RNA, 19 nt, Artificial Sequence
  Description of Artificial Sequence: Synthetic oligonucleotide
cagacucgcguugcaaggc

SEQ ID NO: 6680 - RNA, 19 nt, Artificial Sequence
  Description of Artificial Sequence: Synthetic oligonucleotide
cgaggcagcuugaguuaaa

SEQ ID NO: 6681 - RNA, 19 nt, Artificial Sequence
  Description of Artificial Sequence: Synthetic oligonucleotide
acgaacguacuugcagaug

SEQ ID NO: 6682 - RNA, 19 nt, Artificial Sequence
  Description of Artificial Sequence: Synthetic oligonucleotide
gugacaagccgaggcggug

SEQ ID NO: 6683 - RNA, 19 nt, Artificial Sequence
  Description of Artificial Sequence: Synthetic oligonucleotide
gagccgggcaggaggaagg

SEQ ID NO: 6684 - RNA, 19 nt, Artificial Sequence
  Description of Artificial Sequence: Synthetic oligonucleotide
gagccucccucaggguuuc

SEQ ID NO: 6685 - RNA, 19 nt, Artificial Sequence
  Description of Artificial Sequence: Synthetic oligonucleotide
cgggaaccagaucucucac

SEQ ID NO: 6686 - RNA, 19 nt, Artificial Sequence
  Description of Artificial Sequence: Synthetic oligonucleotide
ccaggaaagacugauacag

SEQ ID NO: 6687 - RNA, 19 nt, Artificial Sequence
  Description of Artificial Sequence: Synthetic oligonucleotide
gaacgaucgauacagaaac

SEQ ID NO: 6688 - RNA, 19 nt, Artificial Sequence
  Description of Artificial Sequence: Synthetic oligonucleotide
ccacgcugccgccaccaca

SEQ ID NO: 6689 - RNA, 19 nt, Artificial Sequence
  Description of Artificial Sequence: Synthetic oligonucleotide
accaucaccaucgacagaa

SEQ ID NO: 6690 - RNA, 19 nt, Artificial Sequence
  Description of Artificial Sequence: Synthetic oligonucleotide
acaguccuuaauccagaaa

SEQ ID NO: 6691 - RNA, 19 nt, Artificial Sequence
  Description of Artificial Sequence: Synthetic oligonucleotide
accugaaaugaaggaagag

SEQ ID NO: 6692 - RNA, 19 nt, Artificial Sequence
  Description of Artificial Sequence: Synthetic oligonucleotide
ggagacucugcgcagagca

SEQ ID NO: 6693 - RNA, 19 nt, Artificial Sequence
  Description of Artificial Sequence: Synthetic oligonucleotide
acuuuggguccggagggcg

SEQ ID NO: 6694 - RNA, 19 nt, Artificial Sequence
  Description of Artificial Sequence: Synthetic oligonucleotide
gagacuccggcggaagcau

SEQ ID NO: 6695 - RNA, 19 nt, Artificial Sequence
  Description of Artificial Sequence: Synthetic oligonucleotide
uucccgggcgggugaccca

SEQ ID NO: 6696 - RNA, 19 nt, Artificial Sequence
  Description of Artificial Sequence: Synthetic oligonucleotide
agcacggucccucuuggaa

SEQ ID NO: 6697 - RNA, 19 nt, Artificial Sequence
  Description of Artificial Sequence: Synthetic oligonucleotide
auuggauucgccauuuuau

SEQ ID NO: 6698 - RNA, 19 nt, Artificial Sequence
  Description of Artificial Sequence: Synthetic oligonucleotide
uuuuucuugcugcuaaauc

SEQ ID NO: 6699 - RNA, 19 nt, Artificial Sequence
  Description of Artificial Sequence: Synthetic oligonucleotide
caccgagcccggaagauua

SEQ ID NO: 6700 - RNA, 19 nt, Artificial Sequence
  Description of Artificial Sequence: Synthetic oligonucleotide
agagaguuuuauuucuggg

SEQ ID NO: 6701 - RNA, 19 nt, Artificial Sequence
  Description of Artificial Sequence: Synthetic oligonucleotide
gauuccuguagacacaccc

SEQ ID NO: 6702 - RNA, 19 nt, Artificial Sequence
  Description of Artificial Sequence: Synthetic oligonucleotide
cacccacauacauacauuu

SEQ ID NO: 6703 - RNA, 19 nt, Artificial Sequence
  Description of Artificial Sequence: Synthetic oligonucleotide
uauauauauauauauuaua

SEQ ID NO: 6704 - RNA, 19 nt, Artificial Sequence
  Description of Artificial Sequence: Synthetic oligonucleotide
auauauauaaaaauaaaua

SEQ ID NO: 6705 - RNA, 19 nt, Artificial Sequence
  Description of Artificial Sequence: Synthetic oligonucleotide
aucucuauuuuauauauau

SEQ ID NO: 6706 - RNA, 19 nt, Artificial Sequence
  Description of Artificial Sequence: Synthetic oligonucleotide
uaaaauauauauauucuuu

SEQ ID NO: 6707 - RNA, 19 nt, Artificial Sequence
  Description of Artificial Sequence: Synthetic oligonucleotide
uuuuuaaauuaacagugcu

SEQ ID NO: 6708 - RNA, 19 nt, Artificial Sequence
  Description of Artificial Sequence: Synthetic oligonucleotide
uaauguuauuggugucuuc

SEQ ID NO: 6709 - RNA, 19 nt, Artificial Sequence
  Description of Artificial Sequence: Synthetic oligonucleotide
cacuggauguauuugacug

SEQ ID NO: 6710 - RNA, 19 nt, Artificial Sequence
  Description of Artificial Sequence: Synthetic oligonucleotide
gcuguggacuugaguuggg

SEQ ID NO: 6711 - RNA, 19 nt, Artificial Sequence
  Description of Artificial Sequence: Synthetic oligonucleotide
gaggggaauguucccacuc

SEQ ID NO: 6712 - RNA, 19 nt, Artificial Sequence
  Description of Artificial Sequence: Synthetic oligonucleotide
cagauccugacagggaaga

SEQ ID NO: 6713 - RNA, 19 nt, Artificial Sequence
  Description of Artificial Sequence: Synthetic oligonucleotide
aggaggagaugagagacuc

SEQ ID NO: 6714 - RNA, 19 nt, Artificial Sequence
  Description of Artificial Sequence: Synthetic oligonucleotide
cuggcaugaucuuuuuuuu

SEQ ID NO: 6715 - RNA, 19 nt, Artificial Sequence
  Description of Artificial Sequence: Synthetic oligonucleotide
ugucccacuugguggggcc

SEQ ID NO: 6716 - RNA, 19 nt, Artificial Sequence
  Description of Artificial Sequence: Synthetic oligonucleotide
caggguccucuccccugcc

SEQ ID NO: 6717 - RNA, 19 nt, Artificial Sequence
  Description of Artificial Sequence: Synthetic oligonucleotide
ccaggaaugugcaaggcca

SEQ ID NO: 6718 - RNA, 19 nt, Artificial Sequence
  Description of Artificial Sequence: Synthetic oligonucleotide
agggcaugggggcaaauau

SEQ ID NO: 6719 - RNA, 19 nt, Artificial Sequence
  Description of Artificial Sequence: Synthetic oligonucleotide
ugacccaguuuugggaaca

SEQ ID NO: 6720 - RNA, 19 nt, Artificial Sequence
  Description of Artificial Sequence: Synthetic oligonucleotide
accgacaaacccagcccug

SEQ ID NO: 6721 - RNA, 19 nt, Artificial Sequence
  Description of Artificial Sequence: Synthetic oligonucleotide
ggcgcugagccucucuacc

SEQ ID NO: 6722 - RNA, 19 nt, Artificial Sequence
  Description of Artificial Sequence: Synthetic oligonucleotide
cccaggucagacggacaga

SEQ ID NO: 6723 - RNA, 19 nt, Artificial Sequence
  Description of Artificial Sequence: Synthetic oligonucleotide
aaagacagaucacagguac

SEQ ID NO: 6724 - RNA, 19 nt, Artificial Sequence
  Description of Artificial Sequence: Synthetic oligonucleotide
cagggaugaggacaccggc

SEQ ID NO: 6725 - RNA, 19 nt, Artificial Sequence
  Description of Artificial Sequence: Synthetic oligonucleotide
cucugaccaggaguuuggg

SEQ ID NO: 6726 - RNA, 19 nt, Artificial Sequence
  Description of Artificial Sequence: Synthetic oligonucleotide
ggagcuucaggacauugcu

SEQ ID NO: 6727 - RNA, 19 nt, Artificial Sequence
  Description of Artificial Sequence: Synthetic oligonucleotide
ugugcuuuggggauucccu

SEQ ID NO: 6728 - RNA, 19 nt, Artificial Sequence
  Description of Artificial Sequence: Synthetic oligonucleotide
uccacaugcugcacgcgca

SEQ ID NO: 6729 - RNA, 19 nt, Artificial Sequence
  Description of Artificial Sequence: Synthetic oligonucleotide
aucucgcccccaggggcac

SEQ ID NO: 6730 - RNA, 19 nt, Artificial Sequence
  Description of Artificial Sequence: Synthetic oligonucleotide
cugccuggaagauucagga

SEQ ID NO: 6731 - RNA, 19 nt, Artificial Sequence
  Description of Artificial Sequence: Synthetic oligonucleotide
agccugggcggccuucgcu

SEQ ID NO: 6732 - RNA, 19 nt, Artificial Sequence
  Description of Artificial Sequence: Synthetic oligonucleotide
uuacucucaccugcuucug

SEQ ID NO: 6733 - RNA, 19 nt, Artificial Sequence
  Description of Artificial Sequence: Synthetic oligonucleotide
gaguugcccaggagaccac

SEQ ID NO: 6734 - RNA, 19 nt, Artificial Sequence
  Description of Artificial Sequence: Synthetic oligonucleotide
cuggcagaugucccggcga

SEQ ID NO: 6735 - RNA, 19 nt, Artificial Sequence
  Description of Artificial Sequence: Synthetic oligonucleotide
aagagaagagacacauugu

SEQ ID NO: 6736 - RNA, 19 nt, Artificial Sequence
  Description of Artificial Sequence: Synthetic oligonucleotide
uuggaagaagcagcccaug

SEQ ID NO: 6737 - RNA, 19 nt, Artificial Sequence
  Description of Artificial Sequence: Synthetic oligonucleotide
gacagcuccccuuccuggg

SEQ ID NO: 6738 - RNA, 19 nt, Artificial Sequence
  Description of Artificial Sequence: Synthetic oligonucleotide
gacucgcccucauccucuu

SEQ ID NO: 6739 - RNA, 19 nt, Artificial Sequence
  Description of Artificial Sequence: Synthetic oligonucleotide
uccugcuccccuuccuggg

SEQ ID NO: 6740 - RNA, 19 nt, Artificial Sequence
  Description of Artificial Sequence: Synthetic oligonucleotide
ggugcagccuaaaaggacc

SEQ ID NO: 6741 - RNA, 19 nt, Artificial Sequence
  Description of Artificial Sequence: Synthetic oligonucleotide
cuauguccucacaccauug

SEQ ID NO: 6742 - RNA, 19 nt, Artificial Sequence
  Description of Artificial Sequence: Synthetic oligonucleotide
gaaaccacuaguucugucc

SEQ ID NO: 6743 - RNA, 19 nt, Artificial Sequence
  Description of Artificial Sequence: Synthetic oligonucleotide
cccccaggagaccugguug

SEQ ID NO: 6744 - RNA, 19 nt, Artificial Sequence
  Description of Artificial Sequence: Synthetic oligonucleotide
gugugugugugagugguug

SEQ ID NO: 6745 - RNA, 19 nt, Artificial Sequence
  Description of Artificial Sequence: Synthetic oligonucleotide
gaccuuccuccauccccug

SEQ ID NO: 6746 - RNA, 19 nt, Artificial Sequence
  Description of Artificial Sequence: Synthetic oligonucleotide
gguccuucccuucccuucc

SEQ ID NO: 6747 - RNA, 19 nt, Artificial Sequence
  Description of Artificial Sequence: Synthetic oligonucleotide
ccgaggcacagagagacag

SEQ ID NO: 6748 - RNA, 19 nt, Artificial Sequence
  Description of Artificial Sequence: Synthetic oligonucleotide
gggcaggauccacgugccc

SEQ ID NO: 6749 - RNA, 19 nt, Artificial Sequence
  Description of Artificial Sequence: Synthetic oligonucleotide
cauuguggaggcagagaaa

SEQ ID NO: 6750 - RNA, 19 nt, Artificial Sequence
  Description of Artificial Sequence: Synthetic oligonucleotide
aagagaaaguguuuuauau

SEQ ID NO: 6751 - RNA, 19 nt, Artificial Sequence
  Description of Artificial Sequence: Synthetic oligonucleotide
uacgguacuuauuuaauau

SEQ ID NO: 6752 - RNA, 19 nt, Artificial Sequence
  Description of Artificial Sequence: Synthetic oligonucleotide
ucccuuuuuaauuagaaau

SEQ ID NO: 6753 - RNA, 19 nt, Artificial Sequence
  Description of Artificial Sequence: Synthetic oligonucleotide
uuaaaacaguuaauuuaau

SEQ ID NO: 6754 - RNA, 19 nt, Artificial Sequence
  Description of Artificial Sequence: Synthetic oligonucleotide
uuaaagaguaggguuuuuu

SEQ ID NO: 6755 - RNA, 19 nt, Artificial Sequence
  Description of Artificial Sequence: Synthetic oligonucleotide
uuucaguauucuugguuaa

SEQ ID NO: 6756 - RNA, 19 nt, Artificial Sequence
  Description of Artificial Sequence: Synthetic oligonucleotide
auauuuaauuucaacuauu

SEQ ID NO: 6757 - RNA, 19 nt, Artificial Sequence
  Description of Artificial Sequence: Synthetic oligonucleotide
uuaugagauguaucuuuug

SEQ ID NO: 6758 - RNA, 19 nt, Artificial Sequence
  Description of Artificial Sequence: Synthetic oligonucleotide
gcucucucuugcucucuua

SEQ ID NO: 6759 - RNA, 19 nt, Artificial Sequence
  Description of Artificial Sequence: Synthetic oligonucleotide
auuuguaccgguuuuugua

SEQ ID NO: 6760 - RNA, 19 nt, Artificial Sequence
  Description of Artificial Sequence: Synthetic oligonucleotide
auauaaaauucauguuucc

SEQ ID NO: 6761 - RNA, 19 nt, Artificial Sequence
  Description of Artificial Sequence: Synthetic oligonucleotide
caaucucucucucccugau

SEQ ID NO: 6762 - RNA, 19 nt, Artificial Sequence
  Description of Artificial Sequence: Synthetic oligonucleotide
ucggugacagucacuagcu

SEQ ID NO: 6763 - RNA, 19 nt, Artificial Sequence
  Description of Artificial Sequence: Synthetic oligonucleotide
uuaucuugaacagauauuu

SEQ ID NO: 6764 - RNA, 19 nt, Artificial Sequence
  Description of Artificial Sequence: Synthetic oligonucleotide
uaauuuugcuaacacucag

SEQ ID NO: 6765 - RNA, 19 nt, Artificial Sequence
  Description of Artificial Sequence: Synthetic oligonucleotide
gcucugcccuccccgaucc

SEQ ID NO: 6766 - RNA, 19 nt, Artificial Sequence
  Description of Artificial Sequence: Synthetic oligonucleotide
cccuggcuccccagcacac

SEQ ID NO: 6767 - RNA, 19 nt, Artificial Sequence
  Description of Artificial Sequence: Synthetic oligonucleotide
cauuccuuugaaauaaggu

SEQ ID NO: 6768 - RNA, 19 nt, Artificial Sequence
  Description of Artificial Sequence: Synthetic oligonucleotide
uuucaauauacaucuacau

SEQ ID NO: 6769 - RNA, 19 nt, Artificial Sequence
  Description of Artificial Sequence: Synthetic oligonucleotide
uacuauauauauauuuggc

SEQ ID NO: 6770 - RNA, 19 nt, Artificial Sequence
  Description of Artificial Sequence: Synthetic oligonucleotide
caacuuguauuugugugua

SEQ ID NO: 6771 - RNA, 19 nt, Artificial Sequence
  Description of Artificial Sequence: Synthetic oligonucleotide
auauauauauauauauguu

SEQ ID NO: 6772 - RNA, 19 nt, Artificial Sequence
  Description of Artificial Sequence: Synthetic oligonucleotide
uuauguauauaugugauuc

SEQ ID NO: 6773 - RNA, 19 nt, Artificial Sequence
  Description of Artificial Sequence: Synthetic oligonucleotide
cugauaaaauagacauugc

SEQ ID NO: 6774 - RNA, 19 nt, Artificial Sequence
  Description of Artificial Sequence: Synthetic oligonucleotide
cuauucuguuuuuuauaug

SEQ ID NO: 6775 - RNA, 19 nt, Artificial Sequence
  Description of Artificial Sequence: Synthetic oligonucleotide
guaaaaacaaaacaagaaa

SEQ ID NO: 6776 - RNA, 19 nt, Artificial Sequence
  Description of Artificial Sequence: Synthetic oligonucleotide
aaaauagagaauucuacau

SEQ ID NO: 6777 - RNA, 19 nt, Artificial Sequence
  Description of Artificial Sequence: Synthetic oligonucleotide
uacuaaaucucucuccuuu

SEQ ID NO: 6778 - RNA, 19 nt, Artificial Sequence
  Description of Artificial Sequence: Synthetic oligonucleotide
uuuuaauuuuaauauuugu

SEQ ID NO: 6779 - RNA, 19 nt, Artificial Sequence
  Description of Artificial Sequence: Synthetic oligonucleotide
uuaucauuuauuuauuggu

SEQ ID NO: 6780 - RNA, 19 nt, Artificial Sequence
  Description of Artificial Sequence: Synthetic oligonucleotide
ugcuacuguuuauccguaa

SEQ ID NO: 6781 - RNA, 19 nt, Artificial Sequence
  Description of Artificial Sequence: Synthetic oligonucleotide
auaauuguggggaaaagau

SEQ ID NO: 6782 - RNA, 19 nt, Artificial Sequence
  Description of Artificial Sequence: Synthetic oligonucleotide
uauuaacaucacgucuuug

SEQ ID NO: 6783 - RNA, 19 nt, Artificial Sequence
  Description of Artificial Sequence: Synthetic oligonucleotide
gucucuagugcaguuuuuc

SEQ ID NO: 6784 - RNA, 19 nt, Artificial Sequence
  Description of Artificial Sequence: Synthetic oligonucleotide
cgagauauuccguaguaca

SEQ ID NO: 6785 - RNA, 19 nt, Artificial Sequence
  Description of Artificial Sequence: Synthetic oligonucleotide
auauuuauuuuuaaacaac

SEQ ID NO: 6786 - RNA, 19 nt, Artificial Sequence
  Description of Artificial Sequence: Synthetic oligonucleotide
cgacaaagaaauacagaua

SEQ ID NO: 6787 - RNA, 19 nt, Artificial Sequence
  Description of Artificial Sequence: Synthetic oligonucleotide
agcauuuuguauuaaagaa

SEQ ID NO: 6788 - RNA, 19 nt, Artificial Sequence
  Description of Artificial Sequence: Synthetic oligonucleotide
auuuaauucugaucucaaa

SEQ ID NO: 6789 - RNA, 19 nt, Artificial Sequence
  Description of Artificial Sequence: Synthetic oligonucleotide
caagacaagaaaaauguga

SEQ ID NO: 6790 - RNA, 19 nt, Artificial Sequence
  Description of Artificial Sequence: Synthetic oligonucleotide
acaagccgaggcggugagc

SEQ ID NO: 6791 - RNA, 19 nt, Artificial Sequence
  Description of Artificial Sequence: Synthetic oligonucleotide
ccgggcaggaggaaggagc

SEQ ID NO: 6792 - RNA, 19 nt, Artificial Sequence
  Description of Artificial Sequence: Synthetic oligonucleotide
ccucccucaggguuucggg

SEQ ID NO: 6793 - RNA, 19 nt, Artificial Sequence
  Description of Artificial Sequence: Synthetic oligonucleotide
gaaccagaucucucaccag

SEQ ID NO: 6794 - RNA, 19 nt, Artificial Sequence
  Description of Artificial Sequence: Synthetic oligonucleotide
ggaaagacugauacagaac

SEQ ID NO: 6795 - RNA, 19 nt, Artificial Sequence
  Description of Artificial Sequence: Synthetic oligonucleotide
cgaucgauacagaaaccac

SEQ ID NO: 6796 - RNA, 19 nt, Artificial Sequence
  Description of Artificial Sequence: Synthetic oligonucleotide
cgcugccgccaccacacca

SEQ ID NO: 6797 - RNA, 19 nt, Artificial Sequence
  Description of Artificial Sequence: Synthetic oligonucleotide
aucaccaucgacagaacag

SEQ ID NO: 6798 - RNA, 19 nt, Artificial Sequence
  Description of Artificial Sequence: Synthetic oligonucleotide
guccuuaauccagaaaccu

SEQ ID NO: 6799 - RNA, 19 nt, Artificial Sequence
  Description of Artificial Sequence: Synthetic oligonucleotide
ugaaaugaaggaagaggag

SEQ ID NO: 6800 - RNA, 19 nt, Artificial Sequence
  Description of Artificial Sequence: Synthetic oligonucleotide
gacucugcgcagagcacuu

SEQ ID NO: 6801 - RNA, 19 nt, Artificial Sequence
  Description of Artificial Sequence: Synthetic oligonucleotide
uuggguccggagggcgaga

SEQ ID NO: 6802 - RNA, 19 nt, Artificial Sequence
  Description of Artificial Sequence: Synthetic oligonucleotide
acuccggcggaagcauucc

SEQ ID NO: 6803 - RNA, 19 nt, Artificial Sequence
  Description of Artificial Sequence: Synthetic oligonucleotide
ccgggcgggugacccagca

SEQ ID NO: 6804 - RNA, 19 nt, Artificial Sequence
  Description of Artificial Sequence: Synthetic oligonucleotide
acggucccucuuggaauug

SEQ ID NO: 6805 - RNA, 19 nt, Artificial Sequence
  Description of Artificial Sequence: Synthetic oligonucleotide
ggauucgccauuuuauuuu

SEQ ID NO: 6806 - RNA, 19 nt, Artificial Sequence
  Description of Artificial Sequence: Synthetic oligonucleotide
uucuugcugcuaaaucacc

SEQ ID NO: 6807 - RNA, 19 nt, Artificial Sequence
  Description of Artificial Sequence: Synthetic oligonucleotide
cgagcccggaagauuagag

SEQ ID NO: 6808 - RNA, 19 nt, Artificial Sequence
  Description of Artificial Sequence: Synthetic oligonucleotide
gaguuuuauuucugggauu

SEQ ID NO: 6809 - RNA, 19 nt, Artificial Sequence
  Description of Artificial Sequence: Synthetic oligonucleotide
uccuguagacacacccacc

SEQ ID NO: 6810 - RNA, 19 nt, Artificial Sequence
  Description of Artificial Sequence: Synthetic oligonucleotide
ccacauacauacauuuaua

SEQ ID NO: 6811 - RNA, 19 nt, Artificial Sequence
  Description of Artificial Sequence: Synthetic oligonucleotide
auauauauauauuauauau

SEQ ID NO: 6812 - RNA, 19 nt, Artificial Sequence
  Description of Artificial Sequence: Synthetic oligonucleotide
uauauaaaaauaaauaucu

SEQ ID NO: 6813 - RNA, 19 nt, Artificial Sequence
  Description of Artificial Sequence: Synthetic oligonucleotide
ucuauuuuauauauauaaa

SEQ ID NO: 6814 - RNA, 19 nt, Artificial Sequence
  Description of Artificial Sequence: Synthetic oligonucleotide
aauauauauauucuuuuuu

SEQ ID NO: 6815 - RNA, 19 nt, Artificial Sequence
  Description of Artificial Sequence: Synthetic oligonucleotide
uuaaauuaacagugcuaau

SEQ ID NO: 6816 - RNA, 19 nt, Artificial Sequence
  Description of Artificial Sequence: Synthetic oligonucleotide
uguuauuggugucuucacu

SEQ ID NO: 6817 - RNA, 19 nt, Artificial Sequence
  Description of Artificial Sequence: Synthetic oligonucleotide
uggauguauuugacugcug

SEQ ID NO: 6818 - RNA, 19 nt, Artificial Sequence
  Description of Artificial Sequence: Synthetic oligonucleotide
guggacuugaguugggagg

SEQ ID NO: 6819 - RNA, 19 nt, Artificial Sequence
  Description of Artificial Sequence: Synthetic oligonucleotide
gggaauguucccacucaga

SEQ ID NO: 6820 - RNA, 19 nt, Artificial Sequence
  Description of Artificial Sequence: Synthetic oligonucleotide
auccugacagggaagagga

SEQ ID NO: 6821 - RNA, 19 nt, Artificial Sequence
  Description of Artificial Sequence: Synthetic oligonucleotide
aggagaugagagacucugg

SEQ ID NO: 6822 - RNA, 19 nt, Artificial Sequence
  Description of Artificial Sequence: Synthetic oligonucleotide
gcaugaucuuuuuuuuguc

SEQ ID NO: 6823 - RNA, 19 nt, Artificial Sequence
  Description of Artificial Sequence: Synthetic oligonucleotide
cccacuugguggggccagg

SEQ ID NO: 6824 - RNA, 19 nt, Artificial Sequence
  Description of Artificial Sequence: Synthetic oligonucleotide
gguccucuccccugcccag

SEQ ID NO: 6825 - RNA, 19 nt, Artificial Sequence
  Description of Artificial Sequence: Synthetic oligonucleotide
ggaaugugcaaggccaggg

SEQ ID NO: 6826 - RNA, 19 nt, Artificial Sequence
  Description of Artificial Sequence: Synthetic oligonucleotide
gcaugggggcaaauaugac

SEQ ID NO: 6827 - RNA, 19 nt, Artificial Sequence
  Description of Artificial Sequence: Synthetic oligonucleotide
cccaguuuugggaacaccg

SEQ ID NO: 6828 - RNA, 19 nt, Artificial Sequence
  Description of Artificial Sequence: Synthetic oligonucleotide
gacaaacccagcccuggcg

SEQ ID NO: 6829 - RNA, 19 nt, Artificial Sequence
  Description of Artificial Sequence: Synthetic oligonucleotide
gcugagccucucuacccca

SEQ ID NO: 6830 - RNA, 19 nt, Artificial Sequence
  Description of Artificial Sequence: Synthetic oligonucleotide
aggucagacggacagaaag

SEQ ID NO: 6831 - RNA, 19 nt, Artificial Sequence
  Description of Artificial Sequence: Synthetic oligonucleotide
gacagaucacagguacagg

SEQ ID NO: 6832 - RNA, 19 nt, Artificial Sequence
  Description of Artificial Sequence: Synthetic oligonucleotide
ggaugaggacaccggcucu

SEQ ID NO: 6833 - RNA, 19 nt, Artificial Sequence
  Description of Artificial Sequence: Synthetic oligonucleotide
ugaccaggaguuuggggag

SEQ ID NO: 6834 - RNA, 19 nt, Artificial Sequence
  Description of Artificial Sequence: Synthetic oligonucleotide
gcuucaggacauugcugug

SEQ ID NO: 6835 - RNA, 19 nt, Artificial Sequence
  Description of Artificial Sequence: Synthetic oligonucleotide
gcuuuggggauucccucca

SEQ ID NO: 6836 - RNA, 19 nt, Artificial Sequence
  Description of Artificial Sequence: Synthetic oligonucleotide
acaugcugcacgcgcaucu

SEQ ID NO: 6837 - RNA, 19 nt, Artificial Sequence
  Description of Artificial Sequence: Synthetic oligonucleotide
ucgcccccaggggcacugc

SEQ ID NO: 6838 - RNA, 19 nt, Artificial Sequence
  Description of Artificial Sequence: Synthetic oligonucleotide
ccuggaagauucaggagcc

SEQ ID NO: 6839 - RNA, 19 nt, Artificial Sequence
  Description of Artificial Sequence: Synthetic oligonucleotide
cugggcggccuucgcuuac

SEQ ID NO: 6840 - RNA, 19 nt, Artificial Sequence
  Description of Artificial Sequence: Synthetic oligonucleotide
cucucaccugcuucugagu

SEQ ID NO: 6841 - RNA, 19 nt, Artificial Sequence
  Description of Artificial Sequence: Synthetic oligonucleotide
uugcccaggagaccacugg

SEQ ID NO: 6842 - RNA, 19 nt, Artificial Sequence
  Description of Artificial Sequence: Synthetic oligonucleotide
gcagaugucccggcgaaga

SEQ ID NO: 6843 - RNA, 19 nt, Artificial Sequence
  Description of Artificial Sequence: Synthetic oligonucleotide
agaagagacacauuguugg

SEQ ID NO: 6844 - RNA, 19 nt, Artificial Sequence
  Description of Artificial Sequence: Synthetic oligonucleotide
gaagaagcagcccaugaca

SEQ ID NO: 6845 - RNA, 19 nt, Artificial Sequence
  Description of Artificial Sequence: Synthetic oligonucleotide
agcuccccuuccugggacu

SEQ ID NO: 6846 - RNA, 19 nt, Artificial Sequence
  Description of Artificial Sequence: Synthetic oligonucleotide
ucgcccucauccucuuccu

SEQ ID NO: 6847 - RNA, 19 nt, Artificial Sequence
  Description of Artificial Sequence: Synthetic oligonucleotide
ugcuccccuuccuggggug

SEQ ID NO: 6848 - RNA, 19 nt, Artificial Sequence
  Description of Artificial Sequence: Synthetic oligonucleotide
gcagccuaaaaggaccuau

SEQ ID NO: 6849 - RNA, 19 nt, Artificial Sequence
  Description of Artificial Sequence: Synthetic oligonucleotide
uguccucacaccauugaaa

SEQ ID NO: 6850 - RNA, 19 nt, Artificial Sequence
  Description of Artificial Sequence: Synthetic oligonucleotide
accacuaguucuguccccc

SEQ ID NO: 6851 - RNA, 19 nt, Artificial Sequence
  Description of Artificial Sequence: Synthetic oligonucleotide
ccaggagaccugguugugu

SEQ ID NO: 6852 - RNA, 19 nt, Artificial Sequence
  Description of Artificial Sequence: Synthetic oligonucleotide
ugugugugagugguugacc

SEQ ID NO: 6853 - RNA, 19 nt, Artificial Sequence
  Description of Artificial Sequence: Synthetic oligonucleotide
cuuccuccauccccugguc

SEQ ID NO: 6854 - RNA, 19 nt, Artificial Sequence
  Description of Artificial Sequence: Synthetic oligonucleotide
ccuucccuucccuucccga

SEQ ID NO: 6855 - RNA, 19 nt, Artificial Sequence
  Description of Artificial Sequence: Synthetic oligonucleotide
aggcacagagagacagggc

SEQ ID NO: 6856 - RNA, 19 nt, Artificial Sequence
  Description of Artificial Sequence: Synthetic oligonucleotide
caggauccacgugcccauu

SEQ ID NO: 6857 - RNA, 19 nt, Artificial Sequence
  Description of Artificial Sequence: Synthetic oligonucleotide
uguggaggcagagaaaaga

SEQ ID NO: 6858 - RNA, 19 nt, Artificial Sequence
  Description of Artificial Sequence: Synthetic oligonucleotide
agaaaguguuuuauauacg

SEQ ID NO: 6859 - RNA, 19 nt, Artificial Sequence
  Description of Artificial Sequence: Synthetic oligonucleotide
gguacuuauuuaauauccc

SEQ ID NO: 6860 - RNA, 19 nt, Artificial Sequence
  Description of Artificial Sequence: Synthetic oligonucleotide
cuuuuuaauuagaaauuaa

SEQ ID NO: 6861 - RNA, 19 nt, Artificial Sequence
  Description of Artificial Sequence: Synthetic oligonucleotide
aaacaguuaauuuaauuaa

SEQ ID NO: 6862 - RNA, 19 nt, Artificial Sequence
  Description of Artificial Sequence: Synthetic oligonucleotide
aagaguaggguuuuuuuuc

SEQ ID NO: 6863 - RNA, 19 nt, Artificial Sequence
  Description of Artificial Sequence: Synthetic oligonucleotide
caguauucuugguuaauau

SEQ ID NO: 6864 - RNA, 19 nt, Artificial Sequence
  Description of Artificial Sequence: Synthetic oligonucleotide
uuuaauuucaacuauuuau

SEQ ID NO: 6865 - RNA, 19 nt, Artificial Sequence
  Description of Artificial Sequence: Synthetic oligonucleotide
ugagauguaucuuuugcuc

SEQ ID NO: 6866 - RNA, 19 nt, Artificial Sequence
  Description of Artificial Sequence: Synthetic oligonucleotide
cucucuugcucucuuauuu

SEQ ID NO: 6867 - RNA, 19 nt, Artificial Sequence
  Description of Artificial Sequence: Synthetic oligonucleotide
uguaccgguuuuuguauau

SEQ ID NO: 6868 - RNA, 19 nt, Artificial Sequence
  Description of Artificial Sequence: Synthetic oligonucleotide
uaaaauucauguuuccaau

SEQ ID NO: 6869 - RNA, 19 nt, Artificial Sequence
  Description of Artificial Sequence: Synthetic oligonucleotide
ucucucucucccugaucgg

SEQ ID NO: 6870 - RNA, 19 nt, Artificial Sequence
  Description of Artificial Sequence: Synthetic oligonucleotide
gugacagucacuagcuuau

SEQ ID NO: 6871 - RNA, 19 nt, Artificial Sequence
  Description of Artificial Sequence: Synthetic oligonucleotide
ucuugaacagauauuuaau

SEQ ID NO: 6872 - RNA, 19 nt, Artificial Sequence
  Description of Artificial Sequence: Synthetic oligonucleotide
uuuugcuaacacucagcuc

SEQ ID NO: 6873 - RNA, 19 nt, Artificial Sequence
  Description of Artificial Sequence: Synthetic oligonucleotide
cugcccuccccgauccccu

SEQ ID NO: 6874 - RNA, 19 nt, Artificial Sequence
  Description of Artificial Sequence: Synthetic oligonucleotide
uggcuccccagcacacauu

SEQ ID NO: 6875 - RNA, 19 nt, Artificial Sequence
  Description of Artificial Sequence: Synthetic oligonucleotide
uccuuugaaauaagguuuc

SEQ ID NO: 6876 - RNA, 19 nt, Artificial Sequence
  Description of Artificial Sequence: Synthetic oligonucleotide
caauauacaucuacauacu

SEQ ID NO: 6877 - RNA, 19 nt, Artificial Sequence
  Description of Artificial Sequence: Synthetic oligonucleotide
uauauauauauuuggcaac

SEQ ID NO: 6878 - RNA, 19 nt, Artificial Sequence
  Description of Artificial Sequence: Synthetic oligonucleotide
cuuguauuuguguguauau

SEQ ID NO: 6879 - RNA, 19 nt, Artificial Sequence
  Description of Artificial Sequence: Synthetic oligonucleotide
uauauauauauauguuuau

SEQ ID NO: 6880 - RNA, 19 nt, Artificial Sequence
  Description of Artificial Sequence: Synthetic oligonucleotide
uguauauaugugauucuga

SEQ ID NO: 6881 - RNA, 19 nt, Artificial Sequence
  Description of Artificial Sequence: Synthetic oligonucleotide
auaaaauagacauugcuau

SEQ ID NO: 6882 - RNA, 19 nt, Artificial Sequence
  Description of Artificial Sequence: Synthetic oligonucleotide
uucuguuuuuuauauguaa

SEQ ID NO: 6883 - RNA, 19 nt, Artificial Sequence
  Description of Artificial Sequence: Synthetic oligonucleotide
aaaacaaaacaagaaaaaa

SEQ ID NO: 6884 - RNA, 19 nt, Artificial Sequence
  Description of Artificial Sequence: Synthetic oligonucleotide
auagagaauucuacauacu

SEQ ID NO: 6885 - RNA, 19 nt, Artificial Sequence
  Description of Artificial Sequence: Synthetic oligonucleotide
uaaaucucucuccuuuuuu

SEQ ID NO: 6886 - RNA, 19 nt, Artificial Sequence
  Description of Artificial Sequence: Synthetic oligonucleotide
uaauuuuaauauuuguuau

SEQ ID NO: 6887 - RNA, 19 nt, Artificial Sequence
  Description of Artificial Sequence: Synthetic oligonucleotide
ucauuuauuuauuggugcu

SEQ ID NO: 6888 - RNA, 19 nt, Artificial Sequence
  Description of Artificial Sequence: Synthetic oligonucleotide
uacuguuuauccguaauaa

SEQ ID NO: 6889 - RNA, 19 nt, Artificial Sequence
  Description of Artificial Sequence: Synthetic oligonucleotide
auuguggggaaaagauauu

SEQ ID NO: 6890 - RNA, 19 nt, Artificial Sequence
  Description of Artificial Sequence: Synthetic oligonucleotide
uaacaucacgucuuugucu

SEQ ID NO: 6891 - RNA, 19 nt, Artificial Sequence
  Description of Artificial Sequence: Synthetic oligonucleotide
ucuagugcaguuuuucgag

SEQ ID NO: 6892 - RNA, 19 nt, Artificial Sequence
  Description of Artificial Sequence: Synthetic oligonucleotide
gauauuccguaguacauau

SEQ ID NO: 6893 - RNA, 19 nt, Artificial Sequence
  Description of Artificial Sequence: Synthetic oligonucleotide
uuuauuuuuaaacaacgac

SEQ ID NO: 6894 - RNA, 19 nt, Artificial Sequence
  Description of Artificial Sequence: Synthetic oligonucleotide
caaagaaauacagauauau

SEQ ID NO: 6895 - RNA, 19 nt, Artificial Sequence
  Description of Artificial Sequence: Synthetic oligonucleotide
auuuuguauuaaagaauuu

SEQ ID NO: 6896 - RNA, 19 nt, Artificial Sequence
  Description of Artificial Sequence: Synthetic oligonucleotide
uaauucugaucucaaaaaa

SEQ ID NO: 6897 - RNA, 25 nt, Artificial Sequence
  Description of Artificial Sequence: Synthetic oligonucleotide
ggcuuggggcagccggguagcucgg

SEQ ID NO: 6898 - RNA, 25 nt, Artificial Sequence
  Description of Artificial Sequence: Synthetic oligonucleotide
gaggucguggcgcugggggcuagca

SEQ ID NO: 6899 - RNA, 25 nt, Artificial Sequence
  Description of Artificial Sequence: Synthetic oligonucleotide
accagcgcucugucgggaggcgcag

SEQ ID NO: 6900 - RNA, 25 nt, Artificial Sequence
  Description of Artificial Sequence: Synthetic oligonucleotide
gcgguuagguggaccggucagcgga

SEQ ID NO: 6901 - RNA, 25 nt, Artificial Sequence
  Description of Artificial Sequence: Synthetic oligonucleotide
acucaccggccagggcgcucggugc

SEQ ID NO: 6902 - RNA, 25 nt, Artificial Sequence
  Description of Artificial Sequence: Synthetic oligonucleotide
cuggaauuugauauucauugauccg

SEQ ID NO: 6903 - RNA, 25 nt, Artificial Sequence
  Description of Artificial Sequence: Synthetic oligonucleotide
ggguuuuaucccucuucuuuuuucu

SEQ ID NO: 6904 - RNA, 25 nt, Artificial Sequence
  Description of Artificial Sequence: Synthetic oligonucleotide
uuaaacauuuuuuuuuaaaacugua

SEQ ID NO: 6905 - RNA, 25 nt, Artificial Sequence
  Description of Artificial Sequence: Synthetic oligonucleotide
auuguuucucguuuuaauuuauuuu

SEQ ID NO: 6906 - RNA, 25 nt, Artificial Sequence
  Description of Artificial Sequence: Synthetic oligonucleotide
uugcuugccauuccccacuugaauc

SEQ ID NO: 6907 - RNA, 25 nt, Artificial Sequence
  Description of Artificial Sequence: Synthetic oligonucleotide
cgggccgacggcuuggggagauugc

SEQ ID NO: 6908 - RNA, 25 nt, Artificial Sequence
  Description of Artificial Sequence: Synthetic oligonucleotide
cucuacuuccccaaaucacugugga

SEQ ID NO: 6909 - RNA, 25 nt, Artificial Sequence
  Description of Artificial Sequence: Synthetic oligonucleotide
auuuuggaaaccagcagaaagagga

SEQ ID NO: 6910 - RNA, 25 nt, Artificial Sequence
  Description of Artificial Sequence: Synthetic oligonucleotide
aaagagguagcaagagcuccagaga

SEQ ID NO: 6911 - RNA, 25 nt, Artificial Sequence
  Description of Artificial Sequence: Synthetic oligonucleotide
agaagucgaggaagagagagacggg

SEQ ID NO: 6912 - RNA, 25 nt, Artificial Sequence
  Description of Artificial Sequence: Synthetic oligonucleotide
ggucagagagagcgcgcgggcgugc

SEQ ID NO: 6913 - RNA, 25 nt, Artificial Sequence
  Description of Artificial Sequence: Synthetic oligonucleotide
cgagcagcgaaagcgacaggggcaa

SEQ ID NO: 6914 - RNA, 25 nt, Artificial Sequence
  Description of Artificial Sequence: Synthetic oligonucleotide
aagugagugaccugcuuuugggggu

SEQ ID NO: 6915 - RNA, 25 nt, Artificial Sequence
  Description of Artificial Sequence: Synthetic oligonucleotide
ugaccgccggagcgcggcgugagcc

SEQ ID NO: 6916 - RNA, 25 nt, Artificial Sequence
  Description of Artificial Sequence: Synthetic oligonucleotide
ccucccccuugggaucccgcagcug

SEQ ID NO: 6917 - RNA, 25 nt, Artificial Sequence
  Description of Artificial Sequence: Synthetic oligonucleotide
gaccagucgcgcugacggacagaca

SEQ ID NO: 6918 - RNA, 25 nt, Artificial Sequence
  Description of Artificial Sequence: Synthetic oligonucleotide
agacagacaccgcccccagccccag

SEQ ID NO: 6919 - RNA, 25 nt, Artificial Sequence
  Description of Artificial Sequence: Synthetic oligonucleotide
gcuaccaccuccuccccggccggcg

SEQ ID NO: 6920 - RNA, 25 nt, Artificial Sequence
  Description of Artificial Sequence: Synthetic oligonucleotide
ggcggacaguggacgcggcggcgag

SEQ ID NO: 6921 - RNA, 25 nt, Artificial Sequence
  Description of Artificial Sequence: Synthetic oligonucleotide
gccgcgggcaggggccggagcccgc

SEQ ID NO: 6922 - RNA, 25 nt, Artificial Sequence
  Description of Artificial Sequence: Synthetic oligonucleotide
cgcccggaggcgggguggagggggu

SEQ ID NO: 6923 - RNA, 25 nt, Artificial Sequence
  Description of Artificial Sequence: Synthetic oligonucleotide
ucggggcucgcggcgucgcacugaa

SEQ ID NO: 6924 - RNA, 25 nt, Artificial Sequence
  Description of Artificial Sequence: Synthetic oligonucleotide
aacuuuucguccaacuucugggcug

SEQ ID NO: 6925 - RNA, 25 nt, Artificial Sequence
  Description of Artificial Sequence: Synthetic oligonucleotide
guucucgcuucggaggagccguggu

SEQ ID NO: 6926 - RNA, 25 nt, Artificial Sequence
  Description of Artificial Sequence: Synthetic oligonucleotide
uccgcgcgggggaagccgagccgag

SEQ ID NO: 6927 - RNA, 25 nt, Artificial Sequence
  Description of Artificial Sequence: Synthetic oligonucleotide
gcggagccgcgagaagugcuagcuc

SEQ ID NO: 6928 - RNA, 25 nt, Artificial Sequence
  Description of Artificial Sequence: Synthetic oligonucleotide
cgggccgggaggagccgcagccgga

SEQ ID NO: 6929 - RNA, 25 nt, Artificial Sequence
  Description of Artificial Sequence: Synthetic oligonucleotide
aggagggggaggaggaagaagagaa

SEQ ID NO: 6930 - RNA, 25 nt, Artificial Sequence
  Description of Artificial Sequence: Synthetic oligonucleotide
aggaagaggagagggggccgcagug

SEQ ID NO: 6931 - RNA, 25 nt, Artificial Sequence
  Description of Artificial Sequence: Synthetic oligonucleotide
ggcgacucggcgcucggaagccggg

SEQ ID NO: 6932 - RNA, 25 nt, Artificial Sequence
  Description of Artificial Sequence: Synthetic oligonucleotide
gcucauggacgggugaggcggcggu

SEQ ID NO: 6933 - RNA, 25 nt, Artificial Sequence
  Description of Artificial Sequence: Synthetic oligonucleotide
ugugcgcagacagugcuccagccgc

SEQ ID NO: 6934 - RNA, 25 nt, Artificial Sequence
  Description of Artificial Sequence: Synthetic oligonucleotide
cgcgcgcuccccaggcccuggcccg

SEQ ID NO: 6935 - RNA, 25 nt, Artificial Sequence
  Description of Artificial Sequence: Synthetic oligonucleotide
gggccucgggccggggaggaagagu

SEQ ID NO: 6936 - RNA, 25 nt, Artificial Sequence
  Description of Artificial Sequence: Synthetic oligonucleotide
uagcucgccgaggcgccgaggagag

SEQ ID NO: 6937 - RNA, 25 nt, Artificial Sequence
  Description of Artificial Sequence: Synthetic oligonucleotide
gcgggccgccccacagcccgagccg

SEQ ID NO: 6938 - RNA, 25 nt, Artificial Sequence
  Description of Artificial Sequence: Synthetic oligonucleotide
ggagagggagcgcgagccgcgccgg

SEQ ID NO: 6939 - RNA, 25 nt, Artificial Sequence
  Description of Artificial Sequence: Synthetic oligonucleotide
gccccggucgggccuccgaaaccau

SEQ ID NO: 6940 - RNA, 25 nt, Artificial Sequence
  Description of Artificial Sequence: Synthetic oligonucleotide
ugaacuuucugcugucuugggugca

SEQ ID NO: 6941 - RNA, 25 nt, Artificial Sequence
  Description of Artificial Sequence: Synthetic oligonucleotide
auuggagccuugccuugcugcucua

SEQ ID NO: 6942 - RNA, 25 nt, Artificial Sequence
  Description of Artificial Sequence: Synthetic oligonucleotide
accuccaccaugccaagugguccca

SEQ ID NO: 6943 - RNA, 25 nt, Artificial Sequence
  Description of Artificial Sequence: Synthetic oligonucleotide
aggcugcacccauggcagaaggagg

SEQ ID NO: 6944 - RNA, 25 nt, Artificial Sequence
  Description of Artificial Sequence: Synthetic oligonucleotide
gagggcagaaucaucacgaaguggu

SEQ ID NO: 6945 - RNA, 25 nt, Artificial Sequence
  Description of Artificial Sequence: Synthetic oligonucleotide
ugaaguucauggaugucuaucagcg

SEQ ID NO: 6946 - RNA, 25 nt, Artificial Sequence
  Description of Artificial Sequence: Synthetic oligonucleotide
gcagcuacugccauccaaucgagac

SEQ ID NO: 6947 - RNA, 25 nt, Artificial Sequence
  Description of Artificial Sequence: Synthetic oligonucleotide
cccugguggacaucuuccaggagua

SEQ ID NO: 6948 - RNA, 25 nt, Artificial Sequence
  Description of Artificial Sequence: Synthetic oligonucleotide
acccugaugagaucgaguacaucuu

SEQ ID NO: 6949 - RNA, 25 nt, Artificial Sequence
  Description of Artificial Sequence: Synthetic oligonucleotide
ucaagccauccugugugccccugau

SEQ ID NO: 6950 - RNA, 25 nt, Artificial Sequence
  Description of Artificial Sequence: Synthetic oligonucleotide
ugcgaugcgggggcugcugcaauga

SEQ ID NO: 6951 - RNA, 25 nt, Artificial Sequence
  Description of Artificial Sequence: Synthetic oligonucleotide
acgagggccuggagugugugcccac

SEQ ID NO: 6952 - RNA, 25 nt, Artificial Sequence
  Description of Artificial Sequence: Synthetic oligonucleotide
cugaggaguccaacaucaccaugca

SEQ ID NO: 6953 - RNA, 25 nt, Artificial Sequence
  Description of Artificial Sequence: Synthetic oligonucleotide
agauuaugcggaucaaaccucacca

SEQ ID NO: 6954 - RNA, 25 nt, Artificial Sequence
  Description of Artificial Sequence: Synthetic oligonucleotide
aaggccagcacauaggagagaugag

SEQ ID NO: 6955 - RNA, 25 nt, Artificial Sequence
  Description of Artificial Sequence: Synthetic oligonucleotide
gcuuccuacagcacaacaaauguga

SEQ ID NO: 6956 - RNA, 25 nt, Artificial Sequence
  Description of Artificial Sequence: Synthetic oligonucleotide
aaugcagaccaaagaaagauagagc

SEQ ID NO: 6957 - RNA, 25 nt, Artificial Sequence
  Description of Artificial Sequence: Synthetic oligonucleotide
caagacaagaaaaaaaaucaguucg

SEQ ID NO: 6958 - RNA, 25 nt, Artificial Sequence
  Description of Artificial Sequence: Synthetic oligonucleotide
gaggaaagggaaaggggcaaaaacg

SEQ ID NO: 6959 - RNA, 25 nt, Artificial Sequence
  Description of Artificial Sequence: Synthetic oligonucleotide
gaaagcgcaagaaaucccgguauaa

SEQ ID NO: 6960 - RNA, 25 nt, Artificial Sequence
  Description of Artificial Sequence: Synthetic oligonucleotide
aguccuggagcguucccugugggcc

SEQ ID NO: 6961 - RNA, 25 nt, Artificial Sequence
  Description of Artificial Sequence: Synthetic oligonucleotide
cuugcucagagcggagaaagcauuu

SEQ ID NO: 6962 - RNA, 25 nt, Artificial Sequence
  Description of Artificial Sequence: Synthetic oligonucleotide
uguuuguacaagauccgcagacgug

SEQ ID NO: 6963 - RNA, 25 nt, Artificial Sequence
  Description of Artificial Sequence: Synthetic oligonucleotide
guaaauguuccugcaaaaacacaga

SEQ ID NO: 6964 - RNA, 25 nt, Artificial Sequence
  Description of Artificial Sequence: Synthetic oligonucleotide
acucgcguugcaaggcgaggcagcu

SEQ ID NO: 6965 - RNA, 25 nt, Artificial Sequence
  Description of Artificial Sequence: Synthetic oligonucleotide
uugaguuaaacgaacguacuugcag

SEQ ID NO: 6966 - RNA, 25 nt, Artificial Sequence
  Description of Artificial Sequence: Synthetic oligonucleotide
gaugugacaagccgaggcggugagc

SEQ ID NO: 6967 - RNA, 25 nt, Artificial Sequence
  Description of Artificial Sequence: Synthetic oligonucleotide
ccgggcaggaggaaggagccucccu

SEQ ID NO: 6968 - RNA, 25 nt, Artificial Sequence
  Description of Artificial Sequence: Synthetic oligonucleotide
ucaggguuucgggaaccagaucucu

SEQ ID NO: 6969 - RNA, 25 nt, Artificial Sequence
  Description of Artificial Sequence: Synthetic oligonucleotide
ucaccaggaaagacugauacagaac

SEQ ID NO: 6970 - RNA, 25 nt, Artificial Sequence
  Description of Artificial Sequence: Synthetic oligonucleotide
cgaucgauacagaaaccacgcugcc

SEQ ID NO: 6971 - RNA, 25 nt, Artificial Sequence
  Description of Artificial Sequence: Synthetic oligonucleotide
cgccaccacaccaucaccaucgaca

SEQ ID NO: 6972 - RNA, 25 nt, Artificial Sequence
  Description of Artificial Sequence: Synthetic oligonucleotide
agaacaguccuuaauccagaaaccu

SEQ ID NO: 6973 - RNA, 25 nt, Artificial Sequence
  Description of Artificial Sequence: Synthetic oligonucleotide
ugaaaugaaggaagaggagacucug

SEQ ID NO: 6974 - RNA, 25 nt, Artificial Sequence
  Description of Artificial Sequence: Synthetic oligonucleotide
gcgcagagcacuuuggguccggagg

SEQ ID NO: 6975 - RNA, 25 nt, Artificial Sequence
  Description of Artificial Sequence: Synthetic oligonucleotide
ggcgagacuccggcggaagcauucc

SEQ ID NO: 6976 - RNA, 25 nt, Artificial Sequence
  Description of Artificial Sequence: Synthetic oligonucleotide
ccgggcgggugacccagcacggucc

SEQ ID NO: 6977 - RNA, 25 nt, Artificial Sequence
  Description of Artificial Sequence: Synthetic oligonucleotide
ccucuuggaauuggauucgccauuu

SEQ ID NO: 6978 - RNA, 25 nt, Artificial Sequence
  Description of Artificial Sequence: Synthetic oligonucleotide
uuauuuuucuugcugcuaaaucacc

SEQ ID NO: 6979 - RNA, 25 nt, Artificial Sequence
  Description of Artificial Sequence: Synthetic oligonucleotide
cgagcccggaagauuagagaguuuu

SEQ ID NO: 6980 - RNA, 25 nt, Artificial Sequence
  Description of Artificial Sequence: Synthetic oligonucleotide
uauuucugggauuccuguagacaca

SEQ ID NO: 6981 - RNA, 25 nt, Artificial Sequence
  Description of Artificial Sequence: Synthetic oligonucleotide
acccacccacauacauacauuuaua

SEQ ID NO: 6982 - RNA, 25 nt, Artificial Sequence
  Description of Artificial Sequence: Synthetic oligonucleotide
auauauauauauuauauauauauaa

SEQ ID NO: 6983 - RNA, 25 nt, Artificial Sequence
  Description of Artificial Sequence: Synthetic oligonucleotide
aaaauaaauaucucuauuuuauaua

SEQ ID NO: 6984 - RNA, 25 nt, Artificial Sequence
  Description of Artificial Sequence: Synthetic oligonucleotide
auauaaaauauauauauucuuuuuu

SEQ ID NO: 6985 - RNA, 25 nt, Artificial Sequence
  Description of Artificial Sequence: Synthetic oligonucleotide
uuaaauuaacagugcuaauguuauu

SEQ ID NO: 6986 - RNA, 25 nt, Artificial Sequence
  Description of Artificial Sequence: Synthetic oligonucleotide
uggugucuucacuggauguauuuga

SEQ ID NO: 6987 - RNA, 25 nt, Artificial Sequence
  Description of Artificial Sequence: Synthetic oligonucleotide
acugcuguggacuugaguugggagg

SEQ ID NO: 6988 - RNA, 25 nt, Artificial Sequence
  Description of Artificial Sequence: Synthetic oligonucleotide
gggaauguucccacucagauccuga

SEQ ID NO: 6989 - RNA, 25 nt, Artificial Sequence
  Description of Artificial Sequence: Synthetic oligonucleotide
acagggaagaggaggagaugagaga

SEQ ID NO: 6990 - RNA, 25 nt, Artificial Sequence
  Description of Artificial Sequence: Synthetic oligonucleotide
acucuggcaugaucuuuuuuuuguc

SEQ ID NO: 6991 - RNA, 25 nt, Artificial Sequence
  Description of Artificial Sequence: Synthetic oligonucleotide
cccacuugguggggccaggguccuc

SEQ ID NO: 6992 - RNA, 25 nt, Artificial Sequence
  Description of Artificial Sequence: Synthetic oligonucleotide
cuccccugcccaggaaugugcaagg

SEQ ID NO: 6993 - RNA, 25 nt, Artificial Sequence
  Description of Artificial Sequence: Synthetic oligonucleotide
gccagggcaugggggcaaauaugac

SEQ ID NO: 6994 - RNA, 25 nt, Artificial Sequence
  Description of Artificial Sequence: Synthetic oligonucleotide
cccaguuuugggaacaccgacaaac

SEQ ID NO: 6995 - RNA, 25 nt, Artificial Sequence
  Description of Artificial Sequence: Synthetic oligonucleotide
cccagcccuggcgcugagccucucu

SEQ ID NO: 6996 - RNA, 25 nt, Artificial Sequence
  Description of Artificial Sequence: Synthetic oligonucleotide
uaccccaggucagacggacagaaag

SEQ ID NO: 6997 - RNA, 25 nt, Artificial Sequence
  Description of Artificial Sequence: Synthetic oligonucleotide
gacagaucacagguacagggaugag

SEQ ID NO: 6998 - RNA, 25 nt, Artificial Sequence
  Description of Artificial Sequence: Synthetic oligonucleotide
ggacaccggcucugaccaggaguuu

SEQ ID NO: 6999 - RNA, 25 nt, Artificial Sequence
  Description of Artificial Sequence: Synthetic oligonucleotide
uggggagcuucaggacauugcugug

SEQ ID NO: 7000 - RNA, 25 nt, Artificial Sequence
  Description of Artificial Sequence: Synthetic oligonucleotide
gcuuuggggauucccuccacaugcu

SEQ ID NO: 7001 - RNA, 25 nt, Artificial Sequence
  Description of Artificial Sequence: Synthetic oligonucleotide
ugcacgcgcaucucgcccccagggg

SEQ ID NO: 7002 - RNA, 25 nt, Artificial Sequence
  Description of Artificial Sequence: Synthetic oligonucleotide
gcacugccuggaagauucaggagcc

SEQ ID NO: 7003 - RNA, 25 nt, Artificial Sequence
  Description of Artificial Sequence: Synthetic oligonucleotide
cugggcggccuucgcuuacucucac

SEQ ID NO: 7004 - RNA, 25 nt, Artificial Sequence
  Description of Artificial Sequence: Synthetic oligonucleotide
ccugcuucugaguugcccaggagac

SEQ ID NO: 7005 - RNA, 25 nt, Artificial Sequence
  Description of Artificial Sequence: Synthetic oligonucleotide
ccacuggcagaugucccggcgaaga

SEQ ID NO: 7006 - RNA, 25 nt, Artificial Sequence
  Description of Artificial Sequence: Synthetic oligonucleotide
agaagagacacauuguuggaagaag

SEQ ID NO: 7007 - RNA, 25 nt, Artificial Sequence
  Description of Artificial Sequence: Synthetic oligonucleotide
gcagcccaugacagcuccccuuccu

SEQ ID NO: 7008 - RNA, 25 nt, Artificial Sequence
  Description of Artificial Sequence: Synthetic oligonucleotide
ugggacucgcccucauccucuuccu

SEQ ID NO: 7009 - RNA, 25 nt, Artificial Sequence
  Description of Artificial Sequence: Synthetic oligonucleotide
ugcuccccuuccuggggugcagccu

SEQ ID NO: 7010 - RNA, 25 nt, Artificial Sequence
  Description of Artificial Sequence: Synthetic oligonucleotide
uaaaaggaccuauguccucacacca

SEQ ID NO: 7011 - RNA, 25 nt, Artificial Sequence
  Description of Artificial Sequence: Synthetic oligonucleotide
auugaaaccacuaguucuguccccc

SEQ ID NO: 7012 - RNA, 25 nt, Artificial Sequence
  Description of Artificial Sequence: Synthetic oligonucleotide
ccaggagaccugguugugugugugu

SEQ ID NO: 7013 - RNA, 25 nt, Artificial Sequence
  Description of Artificial Sequence: Synthetic oligonucleotide
ugagugguugaccuuccuccauccc

SEQ ID NO: 7014 - RNA, 25 nt, Artificial Sequence
  Description of Artificial Sequence: Synthetic oligonucleotide
ccugguccuucccuucccuucccga

SEQ ID NO: 7015 - RNA, 25 nt, Artificial Sequence
  Description of Artificial Sequence: Synthetic oligonucleotide
aggcacagagagacagggcaggauc

SEQ ID NO: 7016 - RNA, 25 nt, Artificial Sequence
  Description of Artificial Sequence: Synthetic oligonucleotide
ccacgugcccauuguggaggcagag

SEQ ID NO: 7017 - RNA, 25 nt, Artificial Sequence
  Description of Artificial Sequence: Synthetic oligonucleotide
gaaaagagaaaguguuuuauauacg

SEQ ID NO: 7018 - RNA, 25 nt, Artificial Sequence
  Description of Artificial Sequence: Synthetic oligonucleotide
gguacuuauuuaauaucccuuuuua

SEQ ID NO: 7019 - RNA, 25 nt, Artificial Sequence
  Description of Artificial Sequence: Synthetic oligonucleotide
aauuagaaauuaaaacaguuaauuu

SEQ ID NO: 7020 - RNA, 25 nt, Artificial Sequence
  Description of Artificial Sequence: Synthetic oligonucleotide
uaauuaaagaguaggguuuuuuuuc

SEQ ID NO: 7021 - RNA, 25 nt, Artificial Sequence
  Description of Artificial Sequence: Synthetic oligonucleotide
caguauucuugguuaauauuuaauu

SEQ ID NO: 7022 - RNA, 25 nt, Artificial Sequence
  Description of Artificial Sequence: Synthetic oligonucleotide
uucaacuauuuaugagauguaucuu

SEQ ID NO: 7023 - RNA, 25 nt, Artificial Sequence
  Description of Artificial Sequence: Synthetic oligonucleotide
uuugcucucucuugcucucuuauuu

SEQ ID NO: 7024 - RNA, 25 nt, Artificial Sequence
  Description of Artificial Sequence: Synthetic oligonucleotide
uguaccgguuuuuguauauaaaauu

SEQ ID NO: 7025 - RNA, 25 nt, Artificial Sequence
  Description of Artificial Sequence: Synthetic oligonucleotide
ucauguuuccaaucucucucucccu

SEQ ID NO: 7026 - RNA, 25 nt, Artificial Sequence
  Description of Artificial Sequence: Synthetic oligonucleotide
ugaucggugacagucacuagcuuau

SEQ ID NO: 7027 - RNA, 25 nt, Artificial Sequence
  Description of Artificial Sequence: Synthetic oligonucleotide
ucuugaacagauauuuaauuuugcu

SEQ ID NO: 7028 - RNA, 25 nt, Artificial Sequence
  Description of Artificial Sequence: Synthetic oligonucleotide
uaacacucagcucugcccuccccga

SEQ ID NO: 7029 - RNA, 25 nt, Artificial Sequence
  Description of Artificial Sequence: Synthetic oligonucleotide
auccccuggcuccccagcacacauu

SEQ ID NO: 7030 - RNA, 25 nt, Artificial Sequence
  Description of Artificial Sequence: Synthetic oligonucleotide
uccuuugaaauaagguuucaauaua

SEQ ID NO: 7031 - RNA, 25 nt, Artificial Sequence
  Description of Artificial Sequence: Synthetic oligonucleotide
acaucuacauacuauauauauauuu

SEQ ID NO: 7032 - RNA, 25 nt, Artificial Sequence
  Description of Artificial Sequence: Synthetic oligonucleotide
uggcaacuuguauuuguguguauau

SEQ ID NO: 7033 - RNA, 25 nt, Artificial Sequence
  Description of Artificial Sequence: Synthetic oligonucleotide
uauauauauauauguuuauguauau

SEQ ID NO: 7034 - RNA, 25 nt, Artificial Sequence
  Description of Artificial Sequence: Synthetic oligonucleotide
uaugugauucugauaaaauagacau

SEQ ID NO: 7035 - RNA, 25 nt, Artificial Sequence
  Description of Artificial Sequence: Synthetic oligonucleotide
uugcuauucuguuuuuuauauguaa

SEQ ID NO: 7036 - RNA, 25 nt, Artificial Sequence
  Description of Artificial Sequence: Synthetic oligonucleotide
aaaacaaaacaagaaaaaauagaga

SEQ ID NO: 7037 - RNA, 25 nt, Artificial Sequence
  Description of Artificial Sequence: Synthetic oligonucleotide
aauucuacauacuaaaucucucucc

SEQ ID NO: 7038 - RNA, 25 nt, Artificial Sequence
  Description of Artificial Sequence: Synthetic oligonucleotide
cuuuuuuaauuuuaauauuuguuau

SEQ ID NO: 7039 - RNA, 25 nt, Artificial Sequence
  Description of Artificial Sequence: Synthetic oligonucleotide
ucauuuauuuauuggugcuacuguu

SEQ ID NO: 7040 - RNA, 25 nt, Artificial Sequence
  Description of Artificial Sequence: Synthetic oligonucleotide
uuauccguaauaauuguggggaaaa

SEQ ID NO: 7041 - RNA, 25 nt, Artificial Sequence
  Description of Artificial Sequence: Synthetic oligonucleotide
agauauuaacaucacgucuuugucu

SEQ ID NO: 7042 - RNA, 25 nt, Artificial Sequence
  Description of Artificial Sequence: Synthetic oligonucleotide
ucuagugcaguuuuucgagauauuc

SEQ ID NO: 7043 - RNA, 25 nt, Artificial Sequence
  Description of Artificial Sequence: Synthetic oligonucleotide
ccguaguacauauuuauuuuuaaac

SEQ ID NO: 7044 - RNA, 25 nt, Artificial Sequence
  Description of Artificial Sequence: Synthetic oligonucleotide
caacgacaaagaaauacagauauau

SEQ ID NO: 7045 - RNA, 25 nt, Artificial Sequence
  Description of Artificial Sequence: Synthetic oligonucleotide
uauuaaagaauuuaauucugaucuc

SEQ ID NO: 7046 - RNA, 25 nt, Artificial Sequence
  Description of Artificial Sequence: Synthetic oligonucleotide
gaaagcgcaagaaaucccgucccug

SEQ ID NO: 7047 - RNA, 25 nt, Artificial Sequence
  Description of Artificial Sequence: Synthetic oligonucleotide
gugggccuugcucagagcggagaaa

SEQ ID NO: 7048 - RNA, 25 nt, Artificial Sequence
  Description of Artificial Sequence: Synthetic oligonucleotide
agcauuuguuuguacaagauccgca

SEQ ID NO: 7049 - RNA, 25 nt, Artificial Sequence
  Description of Artificial Sequence: Synthetic oligonucleotide
agacguguaaauguuccugcaaaaa

SEQ ID NO: 7050 - RNA, 25 nt, Artificial Sequence
  Description of Artificial Sequence: Synthetic oligonucleotide
acacagacucgcguugcaaggcgag

SEQ ID NO: 7051 - RNA, 25 nt, Artificial Sequence
  Description of Artificial Sequence: Synthetic oligonucleotide
ggcagcuugaguuaaacgaacguac

SEQ ID NO: 7052 - RNA, 25 nt, Artificial Sequence
  Description of Artificial Sequence: Synthetic oligonucleotide
cuugcagaugugacaagccgaggcg

SEQ ID NO: 7053 - RNA, 25 nt, Artificial Sequence
  Description of Artificial Sequence: Synthetic oligonucleotide
ggugagccgggcaggaggaaggagc

SEQ ID NO: 7054 - RNA, 25 nt, Artificial Sequence
  Description of Artificial Sequence: Synthetic oligonucleotide
ccucccucaggguuucgggaaccag

SEQ ID NO: 7055 - RNA, 25 nt, Artificial Sequence
  Description of Artificial Sequence: Synthetic oligonucleotide
gaucucucaccaggaaagacugaua

SEQ ID NO: 7056 - RNA, 25 nt, Artificial Sequence
  Description of Artificial Sequence: Synthetic oligonucleotide
acagaacgaucgauacagaaaccac

SEQ ID NO: 7057 - RNA, 25 nt, Artificial Sequence
  Description of Artificial Sequence: Synthetic oligonucleotide
cgcugccgccaccacaccaucacca

SEQ ID NO: 7058 - RNA, 25 nt, Artificial Sequence
  Description of Artificial Sequence: Synthetic oligonucleotide
aucgacagaacaguccuuaauccag

SEQ ID NO: 7059 - RNA, 25 nt, Artificial Sequence
  Description of Artificial Sequence: Synthetic oligonucleotide
gaaaccugaaaugaaggaagaggag

SEQ ID NO: 7060 - RNA, 25 nt, Artificial Sequence
  Description of Artificial Sequence: Synthetic oligonucleotide
gacucugcgcagagcacuuuggguc

SEQ ID NO: 7061 - RNA, 25 nt, Artificial Sequence
  Description of Artificial Sequence: Synthetic oligonucleotide
ccggagggcgagacuccggcggaag

SEQ ID NO: 7062 - RNA, 25 nt, Artificial Sequence
  Description of Artificial Sequence: Synthetic oligonucleotide
gcauucccgggcgggugacccagca

SEQ ID NO: 7063 - RNA, 25 nt, Artificial Sequence
  Description of Artificial Sequence: Synthetic oligonucleotide
acggucccucuuggaauuggauucg

SEQ ID NO: 7064 - RNA, 25 nt, Artificial Sequence
  Description of Artificial Sequence: Synthetic oligonucleotide
gccauuuuauuuuucuugcugcuaa

SEQ ID NO: 7065 - RNA, 25 nt, Artificial Sequence
  Description of Artificial Sequence: Synthetic oligonucleotide
aaucaccgagcccggaagauuagag

SEQ ID NO: 7066 - RNA, 25 nt, Artificial Sequence
  Description of Artificial Sequence: Synthetic oligonucleotide
gaguuuuauuucugggauuccugua

SEQ ID NO: 7067 - RNA, 25 nt, Artificial Sequence
  Description of Artificial Sequence: Synthetic oligonucleotide
agacacacccacccacauacauaca

SEQ ID NO: 7068 - RNA, 25 nt, Artificial Sequence
  Description of Artificial Sequence: Synthetic oligonucleotide
auuuauauauauauauauuauauau

SEQ ID NO: 7069 - RNA, 25 nt, Artificial Sequence
  Description of Artificial Sequence: Synthetic oligonucleotide
uauauaaaaauaaauaucucuauuu

SEQ ID NO: 7070 - RNA, 25 nt, Artificial Sequence
  Description of Artificial Sequence: Synthetic oligonucleotide
uuauauauauaaaauauauauauuc

SEQ ID NO: 7071 - RNA, 25 nt, Artificial Sequence
  Description of Artificial Sequence: Synthetic oligonucleotide
cuuuuuuuaaauuaacagugcuaau

SEQ ID NO: 7072 - RNA, 25 nt, Artificial Sequence
  Description of Artificial Sequence: Synthetic oligonucleotide
uguuauuggugucuucacuggaugu

SEQ ID NO: 7073 - RNA, 25 nt, Artificial Sequence
  Description of Artificial Sequence: Synthetic oligonucleotide
uauuugacugcuguggacuugaguu

SEQ ID NO: 7074 - RNA, 25 nt, Artificial Sequence
  Description of Artificial Sequence: Synthetic oligonucleotide
ugggaggggaauguucccacucaga

SEQ ID NO: 7075 - RNA, 25 nt, Artificial Sequence
  Description of Artificial Sequence: Synthetic oligonucleotide
auccugacagggaagaggaggagau

SEQ ID NO: 7076 - RNA, 25 nt, Artificial Sequence
  Description of Artificial Sequence: Synthetic oligonucleotide
ugagagacucuggcaugaucuuuuu

SEQ ID NO: 7077 - RNA, 25 nt, Artificial Sequence
  Description of Artificial Sequence: Synthetic oligonucleotide
uuuugucccacuugguggggccagg

SEQ ID NO: 7078 - RNA, 25 nt, Artificial Sequence
  Description of Artificial Sequence: Synthetic oligonucleotide
gguccucuccccugcccaggaaugu

SEQ ID NO: 7079 - RNA, 25 nt, Artificial Sequence
  Description of Artificial Sequence: Synthetic oligonucleotide
ugcaaggccagggcaugggggcaaa

SEQ ID NO: 7080 - RNA, 25 nt, Artificial Sequence
  Description of Artificial Sequence: Synthetic oligonucleotide
auaugacccaguuuugggaacaccg

SEQ ID NO: 7081 - RNA, 25 nt, Artificial Sequence
  Description of Artificial Sequence: Synthetic oligonucleotide
gacaaacccagcccuggcgcugagc

SEQ ID NO: 7082 - RNA, 25 nt, Artificial Sequence
  Description of Artificial Sequence: Synthetic oligonucleotide
ccucucuaccccaggucagacggac

SEQ ID NO: 7083 - RNA, 25 nt, Artificial Sequence
  Description of Artificial Sequence: Synthetic oligonucleotide
cagaaagacagaucacagguacagg

SEQ ID NO: 7084 - RNA, 25 nt, Artificial Sequence
  Description of Artificial Sequence: Synthetic oligonucleotide
ggaugaggacaccggcucugaccag

SEQ ID NO: 7085 - RNA, 25 nt, Artificial Sequence
  Description of Artificial Sequence: Synthetic oligonucleotide
ggaguuuggggagcuucaggacauu

SEQ ID NO: 7086 - RNA, 25 nt, Artificial Sequence
  Description of Artificial Sequence: Synthetic oligonucleotide
ugcugugcuuuggggauucccucca

SEQ ID NO: 7087 - RNA, 25 nt, Artificial Sequence
  Description of Artificial Sequence: Synthetic oligonucleotide
acaugcugcacgcgcaucucgcccc

SEQ ID NO: 7088 - RNA, 25 nt, Artificial Sequence
  Description of Artificial Sequence: Synthetic oligonucleotide
ccaggggcacugccuggaagauuca

SEQ ID NO: 7089 - RNA, 25 nt, Artificial Sequence
  Description of Artificial Sequence: Synthetic oligonucleotide
aggagccugggcggccuucgcuuac

SEQ ID NO: 7090 - RNA, 25 nt, Artificial Sequence
  Description of Artificial Sequence: Synthetic oligonucleotide
cucucaccugcuucugaguugccca

SEQ ID NO: 7091 - RNA, 25 nt, Artificial Sequence
  Description of Artificial Sequence: Synthetic oligonucleotide
aggagaccacuggcagaugucccgg

SEQ ID NO: 7092 - RNA, 25 nt, Artificial Sequence
  Description of Artificial Sequence: Synthetic oligonucleotide
gcgaagagaagagacacauuguugg

SEQ ID NO: 7093 - RNA, 25 nt, Artificial Sequence
  Description of Artificial Sequence: Synthetic oligonucleotide
gaagaagcagcccaugacagcuccc

SEQ ID NO: 7094 - RNA, 25 nt, Artificial Sequence
  Description of Artificial Sequence: Synthetic oligonucleotide
ccuuccugggacucgcccucauccu

SEQ ID NO: 7095 - RNA, 25 nt, Artificial Sequence
  Description of Artificial Sequence: Synthetic oligonucleotide
ucuuccugcuccccuuccuggggug

SEQ ID NO: 7096 - RNA, 25 nt, Artificial Sequence
  Description of Artificial Sequence: Synthetic oligonucleotide
gcagccuaaaaggaccuauguccuc

SEQ ID NO: 7097 - RNA, 25 nt, Artificial Sequence
  Description of Artificial Sequence: Synthetic oligonucleotide
cacaccauugaaaccacuaguucug

SEQ ID NO: 7098 - RNA, 25 nt, Artificial Sequence
  Description of Artificial Sequence: Synthetic oligonucleotide
guccccccaggagaccugguugugu

SEQ ID NO: 7099 - RNA, 25 nt, Artificial Sequence
  Description of Artificial Sequence: Synthetic oligonucleotide
ugugugugagugguugaccuuccuc

SEQ ID NO: 7100 - RNA, 25 nt, Artificial Sequence
  Description of Artificial Sequence: Synthetic oligonucleotide
ccauccccugguccuucccuucccu

SEQ ID NO: 7101 - RNA, 25 nt, Artificial Sequence
  Description of Artificial Sequence: Synthetic oligonucleotide
uucccgaggcacagagagacagggc

SEQ ID NO: 7102 - RNA, 25 nt, Artificial Sequence
  Description of Artificial Sequence: Synthetic oligonucleotide
caggauccacgugcccauuguggag

SEQ ID NO: 7103 - RNA, 25 nt, Artificial Sequence
  Description of Artificial Sequence: Synthetic oligonucleotide
ggcagagaaaagagaaaguguuuua

SEQ ID NO: 7104 - RNA, 25 nt, Artificial Sequence
  Description of Artificial Sequence: Synthetic oligonucleotide
auauacgguacuuauuuaauauccc

SEQ ID NO: 7105 - RNA, 25 nt, Artificial Sequence
  Description of Artificial Sequence: Synthetic oligonucleotide
cuuuuuaauuagaaauuaaaacagu

SEQ ID NO: 7106 - RNA, 25 nt, Artificial Sequence
  Description of Artificial Sequence: Synthetic oligonucleotide
uuaauuuaauuaaagaguaggguuu

SEQ ID NO: 7107 - RNA, 25 nt, Artificial Sequence
  Description of Artificial Sequence: Synthetic oligonucleotide
uuuuuucaguauucuugguuaauau

SEQ ID NO: 7108 - RNA, 25 nt, Artificial Sequence
  Description of Artificial Sequence: Synthetic oligonucleotide
uuuaauuucaacuauuuaugagaug

SEQ ID NO: 7109 - RNA, 25 nt, Artificial Sequence
  Description of Artificial Sequence: Synthetic oligonucleotide
guaucuuuugcucucucuugcucuc

SEQ ID NO: 7110 - RNA, 25 nt, Artificial Sequence
  Description of Artificial Sequence: Synthetic oligonucleotide
cuuauuuguaccgguuuuuguauau

SEQ ID NO: 7111 - RNA, 25 nt, Artificial Sequence
  Description of Artificial Sequence: Synthetic oligonucleotide
uaaaauucauguuuccaaucucucu

SEQ ID NO: 7112 - RNA, 25 nt, Artificial Sequence
  Description of Artificial Sequence: Synthetic oligonucleotide
ucucccugaucggugacagucacua

SEQ ID NO: 7113 - RNA, 25 nt, Artificial Sequence
  Description of Artificial Sequence: Synthetic oligonucleotide
agcuuaucuugaacagauauuuaau

SEQ ID NO: 7114 - RNA, 25 nt, Artificial Sequence
  Description of Artificial Sequence: Synthetic oligonucleotide
uuuugcuaacacucagcucugcccu

SEQ ID NO: 7115 - RNA, 25 nt, Artificial Sequence
  Description of Artificial Sequence: Synthetic oligonucleotide
uccccgauccccuggcuccccagca

SEQ ID NO: 7116 - RNA, 25 nt, Artificial Sequence
  Description of Artificial Sequence: Synthetic oligonucleotide
acacauuccuuugaaauaagguuuc

SEQ ID NO: 7117 - RNA, 25 nt, Artificial Sequence
  Description of Artificial Sequence: Synthetic oligonucleotide
caauauacaucuacauacuauauau

SEQ ID NO: 7118 - RNA, 25 nt, Artificial Sequence
  Description of Artificial Sequence: Synthetic oligonucleotide
uauauuuggcaacuuguauuugugu

SEQ ID NO: 7119 - RNA, 25 nt, Artificial Sequence
  Description of Artificial Sequence: Synthetic oligonucleotide
uguauauauauauauauauguuuau

SEQ ID NO: 7120 - RNA, 25 nt, Artificial Sequence
  Description of Artificial Sequence: Synthetic oligonucleotide
uguauauaugugauucugauaaaau

SEQ ID NO: 7121 - RNA, 25 nt, Artificial Sequence
  Description of Artificial Sequence: Synthetic oligonucleotide
uagacauugcuauucuguuuuuuau

SEQ ID NO: 7122 - RNA, 25 nt, Artificial Sequence
  Description of Artificial Sequence: Synthetic oligonucleotide
uauguaaaaacaaaacaagaaaaaa

SEQ ID NO: 7123 - RNA, 25 nt, Artificial Sequence
  Description of Artificial Sequence: Synthetic oligonucleotide
auagagaauucuacauacuaaaucu

SEQ ID NO: 7124 - RNA, 25 nt, Artificial Sequence
  Description of Artificial Sequence: Synthetic oligonucleotide
ucucuccuuuuuuaauuuuaauauu

SEQ ID NO: 7125 - RNA, 25 nt, Artificial Sequence
  Description of Artificial Sequence: Synthetic oligonucleotide
uuguuaucauuuauuuauuggugcu

SEQ ID NO: 7126 - RNA, 25 nt, Artificial Sequence
  Description of Artificial Sequence: Synthetic oligonucleotide
uacuguuuauccguaauaauugugg

SEQ ID NO: 7127 - RNA, 25 nt, Artificial Sequence
  Description of Artificial Sequence: Synthetic oligonucleotide
gggaaaagauauuaacaucacgucu

SEQ ID NO: 7128 - RNA, 25 nt, Artificial Sequence
  Description of Artificial Sequence: Synthetic oligonucleotide
uuugucucuagugcaguuuuucgag

SEQ ID NO: 7129 - RNA, 25 nt, Artificial Sequence
  Description of Artificial Sequence: Synthetic oligonucleotide
gauauuccguaguacauauuuauuu

SEQ ID NO: 7130 - RNA, 25 nt, Artificial Sequence
  Description of Artificial Sequence: Synthetic oligonucleotide
uuuaaacaacgacaaagaaauacag

SEQ ID NO: 7131 - RNA, 25 nt, Artificial Sequence
  Description of Artificial Sequence: Synthetic oligonucleotide
auuuuguauuaaagaauuuaauucu

SEQ ID NO: 7132 - RNA, 25 nt, Artificial Sequence
  Description of Artificial Sequence: Synthetic oligonucleotide
caagacaagaaaaucccugugggcc

SEQ ID NO: 7133 - RNA, 25 nt, Artificial Sequence
  Description of Artificial Sequence: Synthetic oligonucleotide
acucgcguugcaagaugugacaagc

SEQ ID NO: 7134 - RNA, 25 nt, Artificial Sequence
  Description of Artificial Sequence: Synthetic oligonucleotide
ccgaggcggugagccgggcaggagg

SEQ ID NO: 7135 - RNA, 25 nt, Artificial Sequence
  Description of Artificial Sequence: Synthetic oligonucleotide
gaaggagccucccucaggguuucgg

SEQ ID NO: 7136 - RNA, 25 nt, Artificial Sequence
  Description of Artificial Sequence: Synthetic oligonucleotide
ggaaccagaucucucaccaggaaag

SEQ ID NO: 7137 - RNA, 25 nt, Artificial Sequence
  Description of Artificial Sequence: Synthetic oligonucleotide
gacugauacagaacgaucgauacag

SEQ ID NO: 7138 - RNA, 25 nt, Artificial Sequence
  Description of Artificial Sequence: Synthetic oligonucleotide
gaaaccacgcugccgccaccacacc

SEQ ID NO: 7139 - RNA, 25 nt, Artificial Sequence
  Description of Artificial Sequence: Synthetic oligonucleotide
caucaccaucgacagaacaguccuu

SEQ ID NO: 7140 - RNA, 25 nt, Artificial Sequence
  Description of Artificial Sequence: Synthetic oligonucleotide
uaauccagaaaccugaaaugaagga

SEQ ID NO: 7141 - RNA, 25 nt, Artificial Sequence
  Description of Artificial Sequence: Synthetic oligonucleotide
aagaggagacucugcgcagagcacu

SEQ ID NO: 7142 - RNA, 25 nt, Artificial Sequence
  Description of Artificial Sequence: Synthetic oligonucleotide
uuuggguccggagggcgagacuccg

SEQ ID NO: 7143 - RNA, 25 nt, Artificial Sequence
  Description of Artificial Sequence: Synthetic oligonucleotide
ggcggaagcauucccgggcggguga

SEQ ID NO: 7144 - RNA, 25 nt, Artificial Sequence
  Description of Artificial Sequence: Synthetic oligonucleotide
acccagcacggucccucuuggaauu

SEQ ID NO: 7145 - RNA, 25 nt, Artificial Sequence
  Description of Artificial Sequence: Synthetic oligonucleotide
uggauucgccauuuuauuuuucuug

SEQ ID NO: 7146 - RNA, 25 nt, Artificial Sequence
  Description of Artificial Sequence: Synthetic oligonucleotide
gcugcuaaaucaccgagcccggaag

SEQ ID NO: 7147 - RNA, 25 nt, Artificial Sequence
  Description of Artificial Sequence: Synthetic oligonucleotide
gauuagagaguuuuauuucugggau

SEQ ID NO: 7148 - RNA, 25 nt, Artificial Sequence
  Description of Artificial Sequence: Synthetic oligonucleotide
uuccuguagacacacccacccacau

SEQ ID NO: 7149 - RNA, 25 nt, Artificial Sequence
  Description of Artificial Sequence: Synthetic oligonucleotide
uacauacauuuauauauauauauau

SEQ ID NO: 7150 - RNA, 25 nt, Artificial Sequence
  Description of Artificial Sequence: Synthetic oligonucleotide
uuauauauauauaaaaauaaauauc

SEQ ID NO: 7151 - RNA, 25 nt, Artificial Sequence
  Description of Artificial Sequence: Synthetic oligonucleotide
cucuauuuuauauauauaaaauaua

SEQ ID NO: 7152 - RNA, 25 nt, Artificial Sequence
  Description of Artificial Sequence: Synthetic oligonucleotide
auauauucuuuuuuuaaauuaacag

SEQ ID NO: 7153 - RNA, 25 nt, Artificial Sequence
  Description of Artificial Sequence: Synthetic oligonucleotide
gugcuaauguuauuggugucuucac

SEQ ID NO: 7154 - RNA, 25 nt, Artificial Sequence
  Description of Artificial Sequence: Synthetic oligonucleotide
cuggauguauuugacugcuguggac

SEQ ID NO: 7155 - RNA, 25 nt, Artificial Sequence
  Description of Artificial Sequence: Synthetic oligonucleotide
cuugaguugggaggggaauguuccc

SEQ ID NO: 7156 - RNA, 25 nt, Artificial Sequence
  Description of Artificial Sequence: Synthetic oligonucleotide
cacucagauccugacagggaagagg

SEQ ID NO: 7157 - RNA, 25 nt, Artificial Sequence
  Description of Artificial Sequence: Synthetic oligonucleotide
gaggagaugagagacucuggcauga

SEQ ID NO: 7158 - RNA, 25 nt, Artificial Sequence
  Description of Artificial Sequence: Synthetic oligonucleotide
aucuuuuuuuugucccacuuggugg

SEQ ID NO: 7159 - RNA, 25 nt, Artificial Sequence
  Description of Artificial Sequence: Synthetic oligonucleotide
gggccaggguccucuccccugccca

SEQ ID NO: 7160 - RNA, 25 nt, Artificial Sequence
  Description of Artificial Sequence: Synthetic oligonucleotide
aggaaugugcaaggccagggcaugg

SEQ ID NO: 7161 - RNA, 25 nt, Artificial Sequence
  Description of Artificial Sequence: Synthetic oligonucleotide
ggggcaaauaugacccaguuuuggg

SEQ ID NO: 7162 - RNA, 25 nt, Artificial Sequence
  Description of Artificial Sequence: Synthetic oligonucleotide
gaacaccgacaaacccagcccuggc

SEQ ID NO: 7163 - RNA, 25 nt, Artificial Sequence
  Description of Artificial Sequence: Synthetic oligonucleotide
cgcugagccucucuaccccagguca

SEQ ID NO: 7164 - RNA, 25 nt, Artificial Sequence
  Description of Artificial Sequence: Synthetic oligonucleotide
agacggacagaaagacagaucacag

SEQ ID NO: 7165 - RNA, 25 nt, Artificial Sequence
  Description of Artificial Sequence: Synthetic oligonucleotide
gguacagggaugaggacaccggcuc

SEQ ID NO: 7166 - RNA, 25 nt, Artificial Sequence
  Description of Artificial Sequence: Synthetic oligonucleotide
cugaccaggaguuuggggagcuuca

SEQ ID NO: 7167 - RNA, 25 nt, Artificial Sequence
  Description of Artificial Sequence: Synthetic oligonucleotide
aggacauugcugugcuuuggggauu

SEQ ID NO: 7168 - RNA, 25 nt, Artificial Sequence
  Description of Artificial Sequence: Synthetic oligonucleotide
ucccuccacaugcugcacgcgcauc

SEQ ID NO: 7169 - RNA, 25 nt, Artificial Sequence
  Description of Artificial Sequence: Synthetic oligonucleotide
cucgcccccaggggcacugccugga

SEQ ID NO: 7170 - RNA, 25 nt, Artificial Sequence
  Description of Artificial Sequence: Synthetic oligonucleotide
aagauucaggagccugggcggccuu

SEQ ID NO: 7171 - RNA, 25 nt, Artificial Sequence
  Description of Artificial Sequence: Synthetic oligonucleotide
ucgcuuacucucaccugcuucugag

SEQ ID NO: 7172 - RNA, 25 nt, Artificial Sequence
  Description of Artificial Sequence: Synthetic oligonucleotide
guugcccaggagaccacuggcagau

SEQ ID NO: 7173 - RNA, 25 nt, Artificial Sequence
  Description of Artificial Sequence: Synthetic oligonucleotide
ugucccggcgaagagaagagacaca

SEQ ID NO: 7174 - RNA, 25 nt, Artificial Sequence
  Description of Artificial Sequence: Synthetic oligonucleotide
auuguuggaagaagcagcccaugac

SEQ ID NO: 7175 - RNA, 25 nt, Artificial Sequence
  Description of Artificial Sequence: Synthetic oligonucleotide
cagcuccccuuccugggacucgccc

SEQ ID NO: 7176 - RNA, 25 nt, Artificial Sequence
  Description of Artificial Sequence: Synthetic oligonucleotide
cucauccucuuccugcuccccuucc

SEQ ID NO: 7177 - RNA, 25 nt, Artificial Sequence
  Description of Artificial Sequence: Synthetic oligonucleotide
cuggggugcagccuaaaaggaccua

SEQ ID NO: 7178 - RNA, 25 nt, Artificial Sequence
  Description of Artificial Sequence: Synthetic oligonucleotide
auguccucacaccauugaaaccacu

SEQ ID NO: 7179 - RNA, 25 nt, Artificial Sequence
  Description of Artificial Sequence: Synthetic oligonucleotide
uaguucuguccccccaggagaccug

SEQ ID NO: 7180 - RNA, 25 nt, Artificial Sequence
  Description of Artificial Sequence: Synthetic oligonucleotide
gguugugugugugugagugguugac

SEQ ID NO: 7181 - RNA, 25 nt, Artificial Sequence
  Description of Artificial Sequence: Synthetic oligonucleotide
ccuuccuccauccccugguccuucc

SEQ ID NO: 7182 - RNA, 25 nt, Artificial Sequence
  Description of Artificial Sequence: Synthetic oligonucleotide
ccuucccuucccgaggcacagagag

SEQ ID NO: 7183 - RNA, 25 nt, Artificial Sequence
  Description of Artificial Sequence: Synthetic oligonucleotide
gacagggcaggauccacgugcccau

SEQ ID NO: 7184 - RNA, 25 nt, Artificial Sequence
  Description of Artificial Sequence: Synthetic oligonucleotide
uuguggaggcagagaaaagagaaag

SEQ ID NO: 7185 - RNA, 25 nt, Artificial Sequence
  Description of Artificial Sequence: Synthetic oligonucleotide
guguuuuauauacgguacuuauuua

SEQ ID NO: 7186 - RNA, 25 nt, Artificial Sequence
  Description of Artificial Sequence: Synthetic oligonucleotide
aauaucccuuuuuaauuagaaauua

SEQ ID NO: 7187 - RNA, 25 nt, Artificial Sequence
  Description of Artificial Sequence: Synthetic oligonucleotide
aaaacaguuaauuuaauuaaagagu

SEQ ID NO: 7188 - RNA, 25 nt, Artificial Sequence
  Description of Artificial Sequence: Synthetic oligonucleotide
uaggguuuuuuuucaguauucuugg

SEQ ID NO: 7189 - RNA, 25 nt, Artificial Sequence
  Description of Artificial Sequence: Synthetic oligonucleotide
guuaauauuuaauuucaacuauuua

SEQ ID NO: 7190 - RNA, 25 nt, Artificial Sequence
  Description of Artificial Sequence: Synthetic oligonucleotide
augagauguaucuuuugcucucucu

SEQ ID NO: 7191 - RNA, 25 nt, Artificial Sequence
  Description of Artificial Sequence: Synthetic oligonucleotide
uugcucucuuauuuguaccgguuuu

SEQ ID NO: 7192 - RNA, 25 nt, Artificial Sequence
  Description of Artificial Sequence: Synthetic oligonucleotide
uuguauauaaaauucauguuuccaa

SEQ ID NO: 7193 - RNA, 25 nt, Artificial Sequence
  Description of Artificial Sequence: Synthetic oligonucleotide
aucucucucucccugaucggugaca

SEQ ID NO: 7194 - RNA, 25 nt, Artificial Sequence
  Description of Artificial Sequence: Synthetic oligonucleotide
agucacuagcuuaucuugaacagau

SEQ ID NO: 7195 - RNA, 25 nt, Artificial Sequence
  Description of Artificial Sequence: Synthetic oligonucleotide
uauuuaauuuugcuaacacucagcu

SEQ ID NO: 7196 - RNA, 25 nt, Artificial Sequence
  Description of Artificial Sequence: Synthetic oligonucleotide
ucugcccuccccgauccccuggcuc

SEQ ID NO: 7197 - RNA, 25 nt, Artificial Sequence
  Description of Artificial Sequence: Synthetic oligonucleotide
ccccagcacacauuccuuugaaaua

SEQ ID NO: 7198 - RNA, 25 nt, Artificial Sequence
  Description of Artificial Sequence: Synthetic oligonucleotide
aagguuucaauauacaucuacauac

SEQ ID NO: 7199 - RNA, 25 nt, Artificial Sequence
  Description of Artificial Sequence: Synthetic oligonucleotide
cuauauauauauuuggcaacuugua

SEQ ID NO: 7200 - RNA, 25 nt, Artificial Sequence
  Description of Artificial Sequence: Synthetic oligonucleotide
auuuguguguauauauauauauaua

SEQ ID NO: 7201 - RNA, 25 nt, Artificial Sequence
  Description of Artificial Sequence: Synthetic oligonucleotide
auguuuauguauauaugugauucug

SEQ ID NO: 7202 - RNA, 25 nt, Artificial Sequence
  Description of Artificial Sequence: Synthetic oligonucleotide
gauaaaauagacauugcuauucugu

SEQ ID NO: 7203 - RNA, 25 nt, Artificial Sequence
  Description of Artificial Sequence: Synthetic oligonucleotide
uuuuuuauauguaaaaacaaaacaa

SEQ ID NO: 7204 - RNA, 25 nt, Artificial Sequence
  Description of Artificial Sequence: Synthetic oligonucleotide
agaaaaaauagagaauucuacauac

SEQ ID NO: 7205 - RNA, 25 nt, Artificial Sequence
  Description of Artificial Sequence: Synthetic oligonucleotide
cuaaaucucucuccuuuuuuaauuu

SEQ ID NO: 7206 - RNA, 25 nt, Artificial Sequence
  Description of Artificial Sequence: Synthetic oligonucleotide
uuaauauuuguuaucauuuauuuau

SEQ ID NO: 7207 - RNA, 25 nt, Artificial Sequence
  Description of Artificial Sequence: Synthetic oligonucleotide
uuggugcuacuguuuauccguaaua

SEQ ID NO: 7208 - RNA, 25 nt, Artificial Sequence
  Description of Artificial Sequence: Synthetic oligonucleotide
aauuguggggaaaagauauuaacau

SEQ ID NO: 7209 - RNA, 25 nt, Artificial Sequence
  Description of Artificial Sequence: Synthetic oligonucleotide
ucacgucuuugucucuagugcaguu

SEQ ID NO: 7210 - RNA, 25 nt, Artificial Sequence
  Description of Artificial Sequence: Synthetic oligonucleotide
uuuucgagauauuccguaguacaua

SEQ ID NO: 7211 - RNA, 25 nt, Artificial Sequence
  Description of Artificial Sequence: Synthetic oligonucleotide
auuuauuuuuaaacaacgacaaaga

SEQ ID NO: 7212 - RNA, 25 nt, Artificial Sequence
  Description of Artificial Sequence: Synthetic oligonucleotide
aaauacagauauaucuuaaaaaaaa

SEQ ID NO: 7213 - RNA, 25 nt, Artificial Sequence
  Description of Artificial Sequence: Synthetic oligonucleotide
aaaaagcauuuuguauuaaagaauu

SEQ ID NO: 7214 - RNA, 25 nt, Artificial Sequence
  Description of Artificial Sequence: Synthetic oligonucleotide
aguccuggagcguguacguuggugc

SEQ ID NO: 7215 - RNA, 25 nt, Artificial Sequence
  Description of Artificial Sequence: Synthetic oligonucleotide
cccgcugcugucuaaugcccuggag

SEQ ID NO: 7216 - RNA, 25 nt, Artificial Sequence
  Description of Artificial Sequence: Synthetic oligonucleotide
gccucccuggcccccaucccugugg

SEQ ID NO: 7217 - RNA, 25 nt, Artificial Sequence
  Description of Artificial Sequence: Synthetic oligonucleotide
ggccuugcucagagcggagaaagca

SEQ ID NO: 7218 - RNA, 25 nt, Artificial Sequence
  Description of Artificial Sequence: Synthetic oligonucleotide
auuuguuuguacaagauccgcagac

SEQ ID NO: 7219 - RNA, 25 nt, Artificial Sequence
  Description of Artificial Sequence: Synthetic oligonucleotide
cguguaaauguuccugcaaaaacac

SEQ ID NO: 7220 - RNA, 25 nt, Artificial Sequence
  Description of Artificial Sequence: Synthetic oligonucleotide
cagacucgcguugcaaggcgaggca

SEQ ID NO: 7221 - RNA, 25 nt, Artificial Sequence
  Description of Artificial Sequence: Synthetic oligonucleotide
agcuugaguuaaacgaacguacuug

SEQ ID NO: 7222 - RNA, 25 nt, Artificial Sequence
  Description of Artificial Sequence: Synthetic oligonucleotide
gcagaugugacaagccgaggcggug

SEQ ID NO: 7223 - RNA, 25 nt, Artificial Sequence
  Description of Artificial Sequence: Synthetic oligonucleotide
gagccgggcaggaggaaggagccuc

SEQ ID NO: 7224 - RNA, 25 nt, Artificial Sequence
  Description of Artificial Sequence: Synthetic oligonucleotide
cccucaggguuucgggaaccagauc

SEQ ID NO: 7225 - RNA, 25 nt, Artificial Sequence
  Description of Artificial Sequence: Synthetic oligonucleotide
cucucaccaggaaagacugauacag

SEQ ID NO: 7226 - RNA, 25 nt, Artificial Sequence
  Description of Artificial Sequence: Synthetic oligonucleotide
gaacgaucgauacagaaaccacgcu

SEQ ID NO: 7227 - RNA, 25 nt, Artificial Sequence
  Description of Artificial Sequence: Synthetic oligonucleotide
ugccgccaccacaccaucaccaucg

SEQ ID NO: 7228 - RNA, 25 nt, Artificial Sequence
  Description of Artificial Sequence: Synthetic oligonucleotide
gacagaacaguccuuaauccagaaa

SEQ ID NO: 7229 - RNA, 25 nt, Artificial Sequence
  Description of Artificial Sequence: Synthetic oligonucleotide
accugaaaugaaggaagaggagacu

SEQ ID NO: 7230 - RNA, 25 nt, Artificial Sequence
  Description of Artificial Sequence: Synthetic oligonucleotide
ucugcgcagagcacuuuggguccgg

SEQ ID NO: 7231 - RNA, 25 nt, Artificial Sequence
  Description of Artificial Sequence: Synthetic oligonucleotide
gagggcgagacuccggcggaagcau

SEQ ID NO: 7232 - RNA, 25 nt, Artificial Sequence
  Description of Artificial Sequence: Synthetic oligonucleotide
uucccgggcgggugacccagcacgg

SEQ ID NO: 7233 - RNA, 25 nt, Artificial Sequence
  Description of Artificial Sequence: Synthetic oligonucleotide
gucccucuuggaauuggauucgcca

SEQ ID NO: 7234 - RNA, 25 nt, Artificial Sequence
  Description of Artificial Sequence: Synthetic oligonucleotide
auuuuauuuuucuugcugcuaaauc

SEQ ID NO: 7235 - RNA, 25 nt, Artificial Sequence
  Description of Artificial Sequence: Synthetic oligonucleotide
caccgagcccggaagauuagagagu

SEQ ID NO: 7236 - RNA, 25 nt, Artificial Sequence
  Description of Artificial Sequence: Synthetic oligonucleotide
uuuuauuucugggauuccuguagac

SEQ ID NO: 7237 - RNA, 25 nt, Artificial Sequence
  Description of Artificial Sequence: Synthetic oligonucleotide
cacacccacccacauacauacauuu

SEQ ID NO: 7238 - RNA, 25 nt, Artificial Sequence
  Description of Artificial Sequence: Synthetic oligonucleotide
uauauauauauauauuauauauaua

SEQ ID NO: 7239 - RNA, 25 nt, Artificial Sequence
  Description of Artificial Sequence: Synthetic oligonucleotide
auaaaaauaaauaucucuauuuuau

SEQ ID NO: 7240 - RNA, 25 nt, Artificial Sequence
  Description of Artificial Sequence: Synthetic oligonucleotide
uauauauaaaauauauauauucuuu

SEQ ID NO: 7241 - RNA, 25 nt, Artificial Sequence
  Description of Artificial Sequence: Synthetic oligonucleotide
uuuuuaaauuaacagugcuaauguu

SEQ ID NO: 7242 - RNA, 25 nt, Artificial Sequence
  Description of Artificial Sequence: Synthetic oligonucleotide
uauuggugucuucacuggauguauu

SEQ ID NO: 7243 - RNA, 25 nt, Artificial Sequence
  Description of Artificial Sequence: Synthetic oligonucleotide
uugacugcuguggacuugaguuggg

SEQ ID NO: 7244 - RNA, 25 nt, Artificial Sequence
  Description of Artificial Sequence: Synthetic oligonucleotide
gaggggaauguucccacucagaucc

SEQ ID NO: 7245 - RNA, 25 nt, Artificial Sequence
  Description of Artificial Sequence: Synthetic oligonucleotide
cugacagggaagaggaggagaugag

SEQ ID NO: 7246 - RNA, 25 nt, Artificial Sequence
  Description of Artificial Sequence: Synthetic oligonucleotide
gagacucuggcaugaucuuuuuuuu

SEQ ID NO: 7247 - RNA, 25 nt, Artificial Sequence
  Description of Artificial Sequence: Synthetic oligonucleotide
ugucccacuugguggggccaggguc

SEQ ID NO: 7248 - RNA, 25 nt, Artificial Sequence
  Description of Artificial Sequence: Synthetic oligonucleotide
ccucuccccugcccaggaaugugca

SEQ ID NO: 7249 - RNA, 25 nt, Artificial Sequence
  Description of Artificial Sequence: Synthetic oligonucleotide
aaggccagggcaugggggcaaauau

SEQ ID NO: 7250 - RNA, 25 nt, Artificial Sequence
  Description of Artificial Sequence: Synthetic oligonucleotide
ugacccaguuuugggaacaccgaca

SEQ ID NO: 7251 - RNA, 25 nt, Artificial Sequence
  Description of Artificial Sequence: Synthetic oligonucleotide
aaacccagcccuggcgcugagccuc

SEQ ID NO: 7252 - RNA, 25 nt, Artificial Sequence
  Description of Artificial Sequence: Synthetic oligonucleotide
cucuaccccaggucagacggacaga

SEQ ID NO: 7253 - RNA, 25 nt, Artificial Sequence
  Description of Artificial Sequence: Synthetic oligonucleotide
aaagacagaucacagguacagggau

SEQ ID NO: 7254 - RNA, 25 nt, Artificial Sequence
  Description of Artificial Sequence: Synthetic oligonucleotide
ugaggacaccggcucugaccaggag

SEQ ID NO: 7255 - RNA, 25 nt, Artificial Sequence
  Description of Artificial Sequence: Synthetic oligonucleotide
guuuggggagcuucaggacauugcu

SEQ ID NO: 7256 - RNA, 25 nt, Artificial Sequence
  Description of Artificial Sequence: Synthetic oligonucleotide
ugugcuuuggggauucccuccacau

SEQ ID NO: 7257 - RNA, 25 nt, Artificial Sequence
  Description of Artificial Sequence: Synthetic oligonucleotide
ugcugcacgcgcaucucgcccccag

SEQ ID NO: 7258 - RNA, 25 nt, Artificial Sequence
  Description of Artificial Sequence: Synthetic oligonucleotide
ggggcacugccuggaagauucagga

SEQ ID NO: 7259 - RNA, 25 nt, Artificial Sequence
  Description of Artificial Sequence: Synthetic oligonucleotide
agccugggcggccuucgcuuacucu

SEQ ID NO: 7260 - RNA, 25 nt, Artificial Sequence
  Description of Artificial Sequence: Synthetic oligonucleotide
ucaccugcuucugaguugcccagga

SEQ ID NO: 7261 - RNA, 25 nt, Artificial Sequence
  Description of Artificial Sequence: Synthetic oligonucleotide
agaccacuggcagaugucccggcga

SEQ ID NO: 7262 - RNA, 25 nt, Artificial Sequence
  Description of Artificial Sequence: Synthetic oligonucleotide
aagagaagagacacauuguuggaag

SEQ ID NO: 7263 - RNA, 25 nt, Artificial Sequence
  Description of Artificial Sequence: Synthetic oligonucleotide
gaagcagcccaugacagcuccccuu

SEQ ID NO: 7264 - RNA, 25 nt, Artificial Sequence
  Description of Artificial Sequence: Synthetic oligonucleotide
uccugggacucgcccucauccucuu

SEQ ID NO: 7265 - RNA, 25 nt, Artificial Sequence
  Description of Artificial Sequence: Synthetic oligonucleotide
uccugcuccccuuccuggggugcag

SEQ ID NO: 7266 - RNA, 25 nt, Artificial Sequence
  Description of Artificial Sequence: Synthetic oligonucleotide
gccuaaaaggaccuauguccucaca

SEQ ID NO: 7267 - RNA, 25 nt, Artificial Sequence
  Description of Artificial Sequence: Synthetic oligonucleotide
accauugaaaccacuaguucugucc

SEQ ID NO: 7268 - RNA, 25 nt, Artificial Sequence
  Description of Artificial Sequence: Synthetic oligonucleotide
cccccaggagaccugguugugugug

SEQ ID NO: 7269 - RNA, 25 nt, Artificial Sequence
  Description of Artificial Sequence: Synthetic oligonucleotide
gugugagugguugaccuuccuccau

SEQ ID NO: 7270 - RNA, 25 nt, Artificial Sequence
  Description of Artificial Sequence: Synthetic oligonucleotide
uccccugguccuucccuucccuucc

SEQ ID NO: 7271 - RNA, 25 nt, Artificial Sequence
  Description of Artificial Sequence: Synthetic oligonucleotide
ccgaggcacagagagacagggcagg

SEQ ID NO: 7272 - RNA, 25 nt, Artificial Sequence
  Description of Artificial Sequence: Synthetic oligonucleotide
gauccacgugcccauuguggaggca

SEQ ID NO: 7273 - RNA, 25 nt, Artificial Sequence
  Description of Artificial Sequence: Synthetic oligonucleotide
agagaaaagagaaaguguuuuauau

SEQ ID NO: 7274 - RNA, 25 nt, Artificial Sequence
  Description of Artificial Sequence: Synthetic oligonucleotide
uacgguacuuauuuaauaucccuuu

SEQ ID NO: 7275 - RNA, 25 nt, Artificial Sequence
  Description of Artificial Sequence: Synthetic oligonucleotide
uuuaauuagaaauuaaaacaguuaa

SEQ ID NO: 7276 - RNA, 25 nt, Artificial Sequence
  Description of Artificial Sequence: Synthetic oligonucleotide
auuuaauuaaagaguaggguuuuuu

SEQ ID NO: 7277 - RNA, 25 nt, Artificial Sequence
  Description of Artificial Sequence: Synthetic oligonucleotide
uuucaguauucuugguuaauauuua

SEQ ID NO: 7278 - RNA, 25 nt, Artificial Sequence
  Description of Artificial Sequence: Synthetic oligonucleotide
aauuucaacuauuuaugagauguau

SEQ ID NO: 7279 - RNA, 25 nt, Artificial Sequence
  Description of Artificial Sequence: Synthetic oligonucleotide
ucuuuugcucucucuugcucucuua

SEQ ID NO: 7280 - RNA, 25 nt, Artificial Sequence
  Description of Artificial Sequence: Synthetic oligonucleotide
auuuguaccgguuuuuguauauaaa

SEQ ID NO: 7281 - RNA, 25 nt, Artificial Sequence
  Description of Artificial Sequence: Synthetic oligonucleotide
aauucauguuuccaaucucucucuc

SEQ ID NO: 7282 - RNA, 25 nt, Artificial Sequence
  Description of Artificial Sequence: Synthetic oligonucleotide
cccugaucggugacagucacuagcu

SEQ ID NO: 7283 - RNA, 25 nt, Artificial Sequence
  Description of Artificial Sequence: Synthetic oligonucleotide
uuaucuugaacagauauuuaauuuu

SEQ ID NO: 7284 - RNA, 25 nt, Artificial Sequence
  Description of Artificial Sequence: Synthetic oligonucleotide
ugcuaacacucagcucugcccuccc

SEQ ID NO: 7285 - RNA, 25 nt, Artificial Sequence
  Description of Artificial Sequence: Synthetic oligonucleotide
ccgauccccuggcuccccagcacac

SEQ ID NO: 7286 - RNA, 25 nt, Artificial Sequence
  Description of Artificial Sequence: Synthetic oligonucleotide
cauuccuuugaaauaagguuucaau

SEQ ID NO: 7287 - RNA, 25 nt, Artificial Sequence
  Description of Artificial Sequence: Synthetic oligonucleotide
uauacaucuacauacuauauauaua

SEQ ID NO: 7288 - RNA, 25 nt, Artificial Sequence
  Description of Artificial Sequence: Synthetic oligonucleotide
auuuggcaacuuguauuugugugua

SEQ ID NO: 7289 - RNA, 25 nt, Artificial Sequence
  Description of Artificial Sequence: Synthetic oligonucleotide
auauauauauauauauguuuaugua

SEQ ID NO: 7290 - RNA, 25 nt, Artificial Sequence
  Description of Artificial Sequence: Synthetic oligonucleotide
auauaugugauucugauaaaauaga

SEQ ID NO: 7291 - RNA, 25 nt, Artificial Sequence
  Description of Artificial Sequence: Synthetic oligonucleotide
acauugcuauucuguuuuuuauaug

SEQ ID NO: 7292 - RNA, 25 nt, Artificial Sequence
  Description of Artificial Sequence: Synthetic oligonucleotide
guaaaaacaaaacaagaaaaaauag

SEQ ID NO: 7293 - RNA, 25 nt, Artificial Sequence
  Description of Artificial Sequence: Synthetic oligonucleotide
gagaauucuacauacuaaaucucuc

SEQ ID NO: 7294 - RNA, 25 nt, Artificial Sequence
  Description of Artificial Sequence: Synthetic oligonucleotide
cuccuuuuuuaauuuuaauauuugu

SEQ ID NO: 7295 - RNA, 25 nt, Artificial Sequence
  Description of Artificial Sequence: Synthetic oligonucleotide
uuaucauuuauuuauuggugcuacu

SEQ ID NO: 7296 - RNA, 25 nt, Artificial Sequence
  Description of Artificial Sequence: Synthetic oligonucleotide
uguuuauccguaauaauugugggga

SEQ ID NO: 7297 - RNA, 25 nt, Artificial Sequence
  Description of Artificial Sequence: Synthetic oligonucleotide
aaaagauauuaacaucacgucuuug

SEQ ID NO: 7298 - RNA, 25 nt, Artificial Sequence
  Description of Artificial Sequence: Synthetic oligonucleotide
gucucuagugcaguuuuucgagaua

SEQ ID NO: 7299 - RNA, 25 nt, Artificial Sequence
  Description of Artificial Sequence: Synthetic oligonucleotide
auuccguaguacauauuuauuuuua

SEQ ID NO: 7300 - RNA, 25 nt, Artificial Sequence
  Description of Artificial Sequence: Synthetic oligonucleotide
aaacaacgacaaagaaauacagaua

SEQ ID NO: 7301 - RNA, 25 nt, Artificial Sequence
  Description of Artificial Sequence: Synthetic oligonucleotide
uuguauuaaagaauuuaauucugau

SEQ ID NO: 7302 - RNA, 25 nt, Artificial Sequence
  Description of Artificial Sequence: Synthetic oligonucleotide
caagacaagaaaaaugugacaagcc

SEQ ID NO: 7303 - RNA, 25 nt, Artificial Sequence
  Description of Artificial Sequence: Synthetic oligonucleotide
cgaggcggugagccgggcaggagga

SEQ ID NO: 7304 - RNA, 25 nt, Artificial Sequence
  Description of Artificial Sequence: Synthetic oligonucleotide
aaggagccucccucaggguuucggg

SEQ ID NO: 7305 - RNA, 25 nt, Artificial Sequence
  Description of Artificial Sequence: Synthetic oligonucleotide
gaaccagaucucucaccaggaaaga

SEQ ID NO: 7306 - RNA, 25 nt, Artificial Sequence
  Description of Artificial Sequence: Synthetic oligonucleotide
aaaccacgcugccgccaccacacca

SEQ ID NO: 7307 - RNA, 25 nt, Artificial Sequence
  Description of Artificial Sequence: Synthetic oligonucleotide
aucaccaucgacagaacaguccuua

SEQ ID NO: 7308 - RNA, 25 nt, Artificial Sequence
  Description of Artificial Sequence: Synthetic oligonucleotide
aauccagaaaccugaaaugaaggaa

SEQ ID NO: 7309 - RNA, 25 nt, Artificial Sequence
  Description of Artificial Sequence: Synthetic oligonucleotide
agaggagacucugcgcagagcacuu

SEQ ID NO: 7310 - RNA, 25 nt, Artificial Sequence
  Description of Artificial Sequence: Synthetic oligonucleotide
uuggguccggagggcgagacuccgg

SEQ ID NO: 7311 - RNA, 25 nt, Artificial Sequence
  Description of Artificial Sequence: Synthetic oligonucleotide
gcggaagcauucccgggcgggugac

SEQ ID NO: 7312 - RNA, 25 nt, Artificial Sequence
  Description of Artificial Sequence: Synthetic oligonucleotide
cccagcacggucccucuuggaauug

SEQ ID NO: 7313 - RNA, 25 nt, Artificial Sequence
  Description of Artificial Sequence: Synthetic oligonucleotide
ggauucgccauuuuauuuuucuugc

SEQ ID NO: 7314 - RNA, 25 nt, Artificial Sequence
  Description of Artificial Sequence: Synthetic oligonucleotide
cugcuaaaucaccgagcccggaaga

SEQ ID NO: 7315 - RNA, 25 nt, Artificial Sequence
  Description of Artificial Sequence: Synthetic oligonucleotide
auuagagaguuuuauuucugggauu

SEQ ID NO: 7316 - RNA, 25 nt, Artificial Sequence
  Description of Artificial Sequence: Synthetic oligonucleotide
uccuguagacacacccacccacaua

SEQ ID NO: 7317 - RNA, 25 nt, Artificial Sequence
  Description of Artificial Sequence: Synthetic oligonucleotide
acauacauuuauauauauauauauu

SEQ ID NO: 7318 - RNA, 25 nt, Artificial Sequence
  Description of Artificial Sequence: Synthetic oligonucleotide
uauauauauauaaaaauaaauaucu

SEQ ID NO: 7319 - RNA, 25 nt, Artificial Sequence
  Description of Artificial Sequence: Synthetic oligonucleotide
ucuauuuuauauauauaaaauauau

SEQ ID NO: 7320 - RNA, 25 nt, Artificial Sequence
  Description of Artificial Sequence: Synthetic oligonucleotide
uauauucuuuuuuuaaauuaacagu

SEQ ID NO: 7321 - RNA, 25 nt, Artificial Sequence
  Description of Artificial Sequence: Synthetic oligonucleotide
ugcuaauguuauuggugucuucacu

SEQ ID NO: 7322 - RNA, 25 nt, Artificial Sequence
  Description of Artificial Sequence: Synthetic oligonucleotide
uggauguauuugacugcuguggacu

SEQ ID NO: 7323 - RNA, 25 nt, Artificial Sequence
  Description of Artificial Sequence: Synthetic oligonucleotide
uugaguugggaggggaauguuccca

SEQ ID NO: 7324 - RNA, 25 nt, Artificial Sequence
  Description of Artificial Sequence: Synthetic oligonucleotide
acucagauccugacagggaagagga

SEQ ID NO: 7325 - RNA, 25 nt, Artificial Sequence
  Description of Artificial Sequence: Synthetic oligonucleotide
aggagaugagagacucuggcaugau

SEQ ID NO: 7326 - RNA, 25 nt, Artificial Sequence
  Description of Artificial Sequence: Synthetic oligonucleotide
ucuuuuuuuugucccacuugguggg

SEQ ID NO: 7327 - RNA, 25 nt, Artificial Sequence
  Description of Artificial Sequence: Synthetic oligonucleotide
ggccaggguccucuccccugcccag

SEQ ID NO: 7328 - RNA, 25 nt, Artificial Sequence
  Description of Artificial Sequence: Synthetic oligonucleotide
ggaaugugcaaggccagggcauggg

SEQ ID NO: 7329 - RNA, 25 nt, Artificial Sequence
  Description of Artificial Sequence: Synthetic oligonucleotide
gggcaaauaugacccaguuuuggga

SEQ ID NO: 7330 - RNA, 25 nt, Artificial Sequence
  Description of Artificial Sequence: Synthetic oligonucleotide
aacaccgacaaacccagcccuggcg

SEQ ID NO: 7331 - RNA, 25 nt, Artificial Sequence
  Description of Artificial Sequence: Synthetic oligonucleotide
gcugagccucucuaccccaggucag

SEQ ID NO: 7332 - RNA, 25 nt, Artificial Sequence
  Description of Artificial Sequence: Synthetic oligonucleotide
gacggacagaaagacagaucacagg

SEQ ID NO: 7333 - RNA, 25 nt, Artificial Sequence
  Description of Artificial Sequence: Synthetic oligonucleotide
guacagggaugaggacaccggcucu

SEQ ID NO: 7334 - RNA, 25 nt, Artificial Sequence
  Description of Artificial Sequence: Synthetic oligonucleotide
ugaccaggaguuuggggagcuucag

SEQ ID NO: 7335 - RNA, 25 nt, Artificial Sequence
  Description of Artificial Sequence: Synthetic oligonucleotide
ggacauugcugugcuuuggggauuc

SEQ ID NO: 7336 - RNA, 25 nt, Artificial Sequence
  Description of Artificial Sequence: Synthetic oligonucleotide
cccuccacaugcugcacgcgcaucu

SEQ ID NO: 7337 - RNA, 25 nt, Artificial Sequence
  Description of Artificial Sequence: Synthetic oligonucleotide
ucgcccccaggggcacugccuggaa

SEQ ID NO: 7338 - RNA, 25 nt, Artificial Sequence
  Description of Artificial Sequence: Synthetic oligonucleotide
agauucaggagccugggcggccuuc

SEQ ID NO: 7339 - RNA, 25 nt, Artificial Sequence
  Description of Artificial Sequence: Synthetic oligonucleotide
cgcuuacucucaccugcuucugagu

SEQ ID NO: 7340 - RNA, 25 nt, Artificial Sequence
  Description of Artificial Sequence: Synthetic oligonucleotide
uugcccaggagaccacuggcagaug

SEQ ID NO: 7341 - RNA, 25 nt, Artificial Sequence
  Description of Artificial Sequence: Synthetic oligonucleotide
gucccggcgaagagaagagacacau

SEQ ID NO: 7342 - RNA, 25 nt, Artificial Sequence
  Description of Artificial Sequence: Synthetic oligonucleotide
uuguuggaagaagcagcccaugaca

SEQ ID NO: 7343 - RNA, 25 nt, Artificial Sequence
  Description of Artificial Sequence: Synthetic oligonucleotide
agcuccccuuccugggacucgcccu

SEQ ID NO: 7344 - RNA, 25 nt, Artificial Sequence
  Description of Artificial Sequence: Synthetic oligonucleotide
ucauccucuuccugcuccccuuccu

SEQ ID NO: 7345 - RNA, 25 nt, Artificial Sequence
  Description of Artificial Sequence: Synthetic oligonucleotide
uggggugcagccuaaaaggaccuau

SEQ ID NO: 7346 - RNA, 25 nt, Artificial Sequence
  Description of Artificial Sequence: Synthetic oligonucleotide
uguccucacaccauugaaaccacua

SEQ ID NO: 7347 - RNA, 25 nt, Artificial Sequence
  Description of Artificial Sequence: Synthetic oligonucleotide
aguucuguccccccaggagaccugg

SEQ ID NO: 7348 - RNA, 25 nt, Artificial Sequence
  Description of Artificial Sequence: Synthetic oligonucleotide
guugugugugugugagugguugacc

SEQ ID NO: 7349 - RNA, 25 nt, Artificial Sequence
  Description of Artificial Sequence: Synthetic oligonucleotide
cuuccuccauccccugguccuuccc

SEQ ID NO: 7350 - RNA, 25 nt, Artificial Sequence
  Description of Artificial Sequence: Synthetic oligonucleotide
cuucccuucccgaggcacagagaga

SEQ ID NO: 7351 - RNA, 25 nt, Artificial Sequence
  Description of Artificial Sequence: Synthetic oligonucleotide
acagggcaggauccacgugcccauu

SEQ ID NO: 7352 - RNA, 25 nt, Artificial Sequence
  Description of Artificial Sequence: Synthetic oligonucleotide
uguggaggcagagaaaagagaaagu

SEQ ID NO: 7353 - RNA, 25 nt, Artificial Sequence
  Description of Artificial Sequence: Synthetic oligonucleotide
uguuuuauauacgguacuuauuuaa

SEQ ID NO: 7354 - RNA, 25 nt, Artificial Sequence
  Description of Artificial Sequence: Synthetic oligonucleotide
auaucccuuuuuaauuagaaauuaa

SEQ ID NO: 7355 - RNA, 25 nt, Artificial Sequence
  Description of Artificial Sequence: Synthetic oligonucleotide
aaacaguuaauuuaauuaaagagua

SEQ ID NO: 7356 - RNA, 25 nt, Artificial Sequence
  Description of Artificial Sequence: Synthetic oligonucleotide
aggguuuuuuuucaguauucuuggu

SEQ ID NO: 7357 - RNA, 25 nt, Artificial Sequence
  Description of Artificial Sequence: Synthetic oligonucleotide
uuaauauuuaauuucaacuauuuau

SEQ ID NO: 7358 - RNA, 25 nt, Artificial Sequence
  Description of Artificial Sequence: Synthetic oligonucleotide
ugagauguaucuuuugcucucucuu

SEQ ID NO: 7359 - RNA, 25 nt, Artificial Sequence
  Description of Artificial Sequence: Synthetic oligonucleotide
ugcucucuuauuuguaccgguuuuu

SEQ ID NO: 7360 - RNA, 25 nt, Artificial Sequence
  Description of Artificial Sequence: Synthetic oligonucleotide
uguauauaaaauucauguuuccaau

SEQ ID NO: 7361 - RNA, 25 nt, Artificial Sequence
  Description of Artificial Sequence: Synthetic oligonucleotide
ucucucucucccugaucggugacag

SEQ ID NO: 7362 - RNA, 25 nt, Artificial Sequence
  Description of Artificial Sequence: Synthetic oligonucleotide
gucacuagcuuaucuugaacagaua

SEQ ID NO: 7363 - RNA, 25 nt, Artificial Sequence
  Description of Artificial Sequence: Synthetic oligonucleotide
auuuaauuuugcuaacacucagcuc

SEQ ID NO: 7364 - RNA, 25 nt, Artificial Sequence
  Description of Artificial Sequence: Synthetic oligonucleotide
cugcccuccccgauccccuggcucc

SEQ ID NO: 7365 - RNA, 25 nt, Artificial Sequence
  Description of Artificial Sequence: Synthetic oligonucleotide
cccagcacacauuccuuugaaauaa

SEQ ID NO: 7366 - RNA, 25 nt, Artificial Sequence
  Description of Artificial Sequence: Synthetic oligonucleotide
agguuucaauauacaucuacauacu

SEQ ID NO: 7367 - RNA, 25 nt, Artificial Sequence
  Description of Artificial Sequence: Synthetic oligonucleotide
uauauauauauuuggcaacuuguau

SEQ ID NO: 7368 - RNA, 25 nt, Artificial Sequence
  Description of Artificial Sequence: Synthetic oligonucleotide
uuuguguguauauauauauauauau

SEQ ID NO: 7369 - RNA, 25 nt, Artificial Sequence
  Description of Artificial Sequence: Synthetic oligonucleotide
uguuuauguauauaugugauucuga

SEQ ID NO: 7370 - RNA, 25 nt, Artificial Sequence
  Description of Artificial Sequence: Synthetic oligonucleotide
auaaaauagacauugcuauucuguu

SEQ ID NO: 7371 - RNA, 25 nt, Artificial Sequence
  Description of Artificial Sequence: Synthetic oligonucleotide
uuuuuauauguaaaaacaaaacaag

SEQ ID NO: 7372 - RNA, 25 nt, Artificial Sequence
  Description of Artificial Sequence: Synthetic oligonucleotide
gaaaaaauagagaauucuacauacu

SEQ ID NO: 7373 - RNA, 25 nt, Artificial Sequence
  Description of Artificial Sequence: Synthetic oligonucleotide
uaaaucucucuccuuuuuuaauuuu

SEQ ID NO: 7374 - RNA, 25 nt, Artificial Sequence
  Description of Artificial Sequence: Synthetic oligonucleotide
uaauauuuguuaucauuuauuuauu

SEQ ID NO: 7375 - RNA, 25 nt, Artificial Sequence
  Description of Artificial Sequence: Synthetic oligonucleotide
uggugcuacuguuuauccguaauaa

SEQ ID NO: 7376 - RNA, 25 nt, Artificial Sequence
  Description of Artificial Sequence: Synthetic oligonucleotide
auuguggggaaaagauauuaacauc

SEQ ID NO: 7377 - RNA, 25 nt, Artificial Sequence
  Description of Artificial Sequence: Synthetic oligonucleotide
cacgucuuugucucuagugcaguuu

SEQ ID NO: 7378 - RNA, 25 nt, Artificial Sequence
  Description of Artificial Sequence: Synthetic oligonucleotide
uuucgagauauuccguaguacauau

SEQ ID NO: 7379 - RNA, 25 nt, Artificial Sequence
  Description of Artificial Sequence: Synthetic oligonucleotide
uuuauuuuuaaacaacgacaaagaa

SEQ ID NO: 7380 - RNA, 25 nt, Artificial Sequence
  Description of Artificial Sequence: Synthetic oligonucleotide
aauacagauauaucuuaaaaaaaaa

SEQ ID NO: 7381 - RNA, 25 nt, Artificial Sequence
  Description of Artificial Sequence: Synthetic oligonucleotide
aaaagcauuuuguauuaaagaauuu

SEQ ID NO: 7382 - RNA, 1172 nt, Homo sapiens
gcgaugcgggcgcccccggcgggcggccccggcgggcaccaugagcccucugcuccgccgccugcugcucgccgcacuccugcagcuggcccccgcccaggccccugucucccagccugaugccccuggccaccagaggaaaguggugucauggauagauguguauacucgcgcuaccugccagccccgggaggugguggugcccuugacuguggagcucaugggcaccguggccaaacagcuggugcccagcugcgugacugugcagcgcugugguggcugcugcccugacgauggccuggagugugugcccacugggcagcaccaaguccggaugcagauccucaugauccgguacccgagcagucagcugggggagaugucccuggaagaacacagccagugugaaugcagaccuaaaaaaaaggacagugcugugaagccagacagggcugccacuccccaccaccguccccagccccguucuguuccgggcugggacucugcccccggagcacccuccccagcugacaucacccaucccacuccagccccaggccccucugcccacgcugcacccagcaccaccagcgcccugacccccggaccugccgcugccgcugccgacgccgcagcuuccuccguugccaagggcggggcuuagagcucaacccagacaccugcaggugccggaagcugcgaaggugacacauggcuuuucagacucagcagggugacuugccucagaggcuauaucccagugggggaacaaagaggagccugguaaaaaacagccaagcccccaagaccucagcccaggcagaagcugcucuaggaccugggccucucagagggcucuucugccaucccuugucucccugaggccaucaucaaacaggacagaguuggaagaggagacugggaggcagcaagaggggucacauaccagcucaggggagaauggaguacugucucaguuucuaaccacucugugcaaguaagcaucuuacaacuggcucuuccuccccucacuaagaagacccaaaccucugcauaaugggauuugggcuuugguacaagaacugugacccccaacccugauaaaagagauggaaggaaaaaaaaaaaaaaaaaaaaaaaaaaaaaaaaaaaaaaaaaaaaaaaaaaaaaaa

SEQ ID NO: 7383 - RNA, 19 nt, Artificial Sequence
  Description of Artificial Sequence: Synthetic oligonucleotide
gcgaugcgggcgcccccgg

SEQ ID NO: 7384 - RNA, 19 nt, Artificial Sequence
  Description of Artificial Sequence: Synthetic oligonucleotide
gcgggcggccccggcgggc

SEQ ID NO: 7385 - RNA, 19 nt, Artificial Sequence
  Description of Artificial Sequence: Synthetic oligonucleotide
caccaugagcccucugcuc

SEQ ID NO: 7386 - RNA, 19 nt, Artificial Sequence
  Description of Artificial Sequence: Synthetic oligonucleotide
ccgccgccugcugcucgcc

SEQ ID NO: 7387 - RNA, 19 nt, Artificial Sequence
  Description of Artificial Sequence: Synthetic oligonucleotide
cgcacuccugcagcuggcc

SEQ ID NO: 7388 - RNA, 19 nt, Artificial Sequence
  Description of Artificial Sequence: Synthetic oligonucleotide
ccccgcccaggccccuguc

SEQ ID NO: 7389 - RNA, 19 nt, Artificial Sequence
  Description of Artificial Sequence: Synthetic oligonucleotide
cucccagccugaugccccu

SEQ ID NO: 7390 - RNA, 19 nt, Artificial Sequence
  Description of Artificial Sequence: Synthetic oligonucleotide
uggccaccagaggaaagug

SEQ ID NO: 7391 - RNA, 19 nt, Artificial Sequence
  Description of Artificial Sequence: Synthetic oligonucleotide
ggugucauggauagaugug

SEQ ID NO: 7392 - RNA, 19 nt, Artificial Sequence
  Description of Artificial Sequence: Synthetic oligonucleotide
guauacucgcgcuaccugc

SEQ ID NO: 7393 - RNA, 19 nt, Artificial Sequence
  Description of Artificial Sequence: Synthetic oligonucleotide
ccagccccgggagguggug

SEQ ID NO: 7394 - RNA, 19 nt, Artificial Sequence
  Description of Artificial Sequence: Synthetic oligonucleotide
ggugcccuugacuguggag

SEQ ID NO: 7395 - RNA, 19 nt, Artificial Sequence
  Description of Artificial Sequence: Synthetic oligonucleotide
gcucaugggcaccguggcc

SEQ ID NO: 7396 - RNA, 19 nt, Artificial Sequence
  Description of Artificial Sequence: Synthetic oligonucleotide
caaacagcuggugcccagc

SEQ ID NO: 7397 - RNA, 19 nt, Artificial Sequence
  Description of Artificial Sequence: Synthetic oligonucleotide
cugcgugacugugcagcgc

SEQ ID NO: 7398 - RNA, 19 nt, Artificial Sequence
  Description of Artificial Sequence: Synthetic oligonucleotide
cugugguggcugcugcccu

SEQ ID NO: 7399 - RNA, 19 nt, Artificial Sequence
  Description of Artificial Sequence: Synthetic oligonucleotide
ugacgauggccuggagugu

SEQ ID NO: 7400 - RNA, 19 nt, Artificial Sequence
  Description of Artificial Sequence: Synthetic oligonucleotide
ugugcccacugggcagcac

SEQ ID NO: 7401 - RNA, 19 nt, Artificial Sequence
  Description of Artificial Sequence: Synthetic oligonucleotide
ccaaguccggaugcagauc

SEQ ID NO: 7402 - RNA, 19 nt, Artificial Sequence
  Description of Artificial Sequence: Synthetic oligonucleotide
ccucaugauccgguacccg

SEQ ID NO: 7403 - RNA, 19 nt, Artificial Sequence
  Description of Artificial Sequence: Synthetic oligonucleotide
gagcagucagcugggggag

SEQ ID NO: 7404 - RNA, 19 nt, Artificial Sequence
  Description of Artificial Sequence: Synthetic oligonucleotide
gaugucccuggaagaacac

SEQ ID NO: 7405 - RNA, 19 nt, Artificial Sequence
  Description of Artificial Sequence: Synthetic oligonucleotide
cagccagugugaaugcaga

SEQ ID NO: 7406 - RNA, 19 nt, Artificial Sequence
  Description of Artificial Sequence: Synthetic oligonucleotide
accuaaaaaaaaggacagu

SEQ ID NO: 7407 - RNA, 19 nt, Artificial Sequence
  Description of Artificial Sequence: Synthetic oligonucleotide
ugcugugaagccagacagg

SEQ ID NO: 7408 - RNA, 19 nt, Artificial Sequence
  Description of Artificial Sequence: Synthetic oligonucleotide
ggcugccacuccccaccac

SEQ ID NO: 7409 - RNA, 19 nt, Artificial Sequence
  Description of Artificial Sequence: Synthetic oligonucleotide
ccguccccagccccguucu

SEQ ID NO: 7410 - RNA, 19 nt, Artificial Sequence
  Description of Artificial Sequence: Synthetic oligonucleotide
uguuccgggcugggacucu

SEQ ID NO: 7411 - RNA, 19 nt, Artificial Sequence
  Description of Artificial Sequence: Synthetic oligonucleotide
ugcccccggagcacccucc

SEQ ID NO: 7412 - RNA, 19 nt, Artificial Sequence
  Description of Artificial Sequence: Synthetic oligonucleotide
cccagcugacaucacccau

SEQ ID NO: 7413 - RNA, 19 nt, Artificial Sequence
  Description of Artificial Sequence: Synthetic oligonucleotide
ucccacuccagccccaggc

SEQ ID NO: 7414 - RNA, 19 nt, Artificial Sequence
  Description of Artificial Sequence: Synthetic oligonucleotide
ccccucugcccacgcugca

SEQ ID NO: 7415 - RNA, 19 nt, Artificial Sequence
  Description of Artificial Sequence: Synthetic oligonucleotide
acccagcaccaccagcgcc

SEQ ID NO: 7416 - RNA, 19 nt, Artificial Sequence
  Description of Artificial Sequence: Synthetic oligonucleotide
ccugacccccggaccugcc

SEQ ID NO: 7417 - RNA, 19 nt, Artificial Sequence
  Description of Artificial Sequence: Synthetic oligonucleotide
cgcugccgcugccgacgcc

SEQ ID NO: 7418 - RNA, 19 nt, Artificial Sequence
  Description of Artificial Sequence: Synthetic oligonucleotide
cgcagcuuccuccguugcc

SEQ ID NO: 7419 - RNA, 19 nt, Artificial Sequence
  Description of Artificial Sequence: Synthetic oligonucleotide
caagggcggggcuuagagc

SEQ ID NO: 7420 - RNA, 19 nt, Artificial Sequence
  Description of Artificial Sequence: Synthetic oligonucleotide
cucaacccagacaccugca

SEQ ID NO: 7421 - RNA, 19 nt, Artificial Sequence
  Description of Artificial Sequence: Synthetic oligonucleotide
aggugccggaagcugcgaa

SEQ ID NO: 7422 - RNA, 19 nt, Artificial Sequence
  Description of Artificial Sequence: Synthetic oligonucleotide
aggugacacauggcuuuuc

SEQ ID NO: 7423 - RNA, 19 nt, Artificial Sequence
  Description of Artificial Sequence: Synthetic oligonucleotide
cagacucagcagggugacu

SEQ ID NO: 7424 - RNA, 19 nt, Artificial Sequence
  Description of Artificial Sequence: Synthetic oligonucleotide
uugccucagaggcuauauc

SEQ ID NO: 7425 - RNA, 19 nt, Artificial Sequence
  Description of Artificial Sequence: Synthetic oligonucleotide
cccagugggggaacaaaga

SEQ ID NO: 7426 - RNA, 19 nt, Artificial Sequence
  Description of Artificial Sequence: Synthetic oligonucleotide
aggagccugguaaaaaaca

SEQ ID NO: 7427 - RNA, 19 nt, Artificial Sequence
  Description of Artificial Sequence: Synthetic oligonucleotide
agccaagcccccaagaccu

SEQ ID NO: 7428 - RNA, 19 nt, Artificial Sequence
  Description of Artificial Sequence: Synthetic oligonucleotide
ucagcccaggcagaagcug

SEQ ID NO: 7429 - RNA, 19 nt, Artificial Sequence
  Description of Artificial Sequence: Synthetic oligonucleotide
gcucuaggaccugggccuc

SEQ ID NO: 7430 - RNA, 19 nt, Artificial Sequence
  Description of Artificial Sequence: Synthetic oligonucleotide
cucagagggcucuucugcc

SEQ ID NO: 7431 - RNA, 19 nt, Artificial Sequence
  Description of Artificial Sequence: Synthetic oligonucleotide
caucccuugucucccugag

SEQ ID NO: 7432 - RNA, 19 nt, Artificial Sequence
  Description of Artificial Sequence: Synthetic oligonucleotide
ggccaucaucaaacaggac

SEQ ID NO: 7433 - RNA, 19 nt, Artificial Sequence
  Description of Artificial Sequence: Synthetic oligonucleotide
cagaguuggaagaggagac

SEQ ID NO: 7434 - RNA, 19 nt, Artificial Sequence
  Description of Artificial Sequence: Synthetic oligonucleotide
cugggaggcagcaagaggg

SEQ ID NO: 7435 - RNA, 19 nt, Artificial Sequence
  Description of Artificial Sequence: Synthetic oligonucleotide
ggucacauaccagcucagg

SEQ ID NO: 7436 - RNA, 19 nt, Artificial Sequence
  Description of Artificial Sequence: Synthetic oligonucleotide
gggagaauggaguacuguc

SEQ ID NO: 7437 - RNA, 19 nt, Artificial Sequence
  Description of Artificial Sequence: Synthetic oligonucleotide
cucaguuucuaaccacucu

SEQ ID NO: 7438 - RNA, 19 nt, Artificial Sequence
  Description of Artificial Sequence: Synthetic oligonucleotide
ugugcaaguaagcaucuua

SEQ ID NO: 7439 - RNA, 19 nt, Artificial Sequence
  Description of Artificial Sequence: Synthetic oligonucleotide
acaacuggcucuuccuccc

SEQ ID NO: 7440 - RNA, 19 nt, Artificial Sequence
  Description of Artificial Sequence: Synthetic oligonucleotide
ccucacuaagaagacccaa

SEQ ID NO: 7441 - RNA, 19 nt, Artificial Sequence
  Description of Artificial Sequence: Synthetic oligonucleotide
aaccucugcauaaugggau

SEQ ID NO: 7442 - RNA, 19 nt, Artificial Sequence
  Description of Artificial Sequence: Synthetic oligonucleotide
uuugggcuuugguacaaga

SEQ ID NO: 7443 - RNA, 19 nt, Artificial Sequence
  Description of Artificial Sequence: Synthetic oligonucleotide
aacugugacccccaacccu

SEQ ID NO: 7444 - RNA, 19 nt, Artificial Sequence
  Description of Artificial Sequence: Synthetic oligonucleotide
ugauaaaagagauggaagg

SEQ ID NO: 7445 - RNA, 25 nt, Artificial Sequence
  Description of Artificial Sequence: Synthetic oligonucleotide
gcgaugcgggcgcccccggcgggcg

SEQ ID NO: 7446 - RNA, 25 nt, Artificial Sequence
  Description of Artificial Sequence: Synthetic oligonucleotide
ggccccggcgggcaccaugagcccu

SEQ ID NO: 7447 - RNA, 25 nt, Artificial Sequence
  Description of Artificial Sequence: Synthetic oligonucleotide
ucugcuccgccgccugcugcucgcc

SEQ ID NO: 7448 - RNA, 25 nt, Artificial Sequence
  Description of Artificial Sequence: Synthetic oligonucleotide
cgcacuccugcagcuggcccccgcc

SEQ ID NO: 7449 - RNA, 25 nt, Artificial Sequence
  Description of Artificial Sequence: Synthetic oligonucleotide
ccaggccccugucucccagccugau

SEQ ID NO: 7450 - RNA, 25 nt, Artificial Sequence
  Description of Artificial Sequence: Synthetic oligonucleotide
ugccccuggccaccagaggaaagug

SEQ ID NO: 7451 - RNA, 25 nt, Artificial Sequence
  Description of Artificial Sequence: Synthetic oligonucleotide
ggugucauggauagauguguauacu

SEQ ID NO: 7452 - RNA, 25 nt, Artificial Sequence
  Description of Artificial Sequence: Synthetic oligonucleotide
ucgcgcuaccugccagccccgggag

SEQ ID NO: 7453 - RNA, 25 nt, Artificial Sequence
  Description of Artificial Sequence: Synthetic oligonucleotide
ggugguggugcccuugacuguggag

SEQ ID NO: 7454 - RNA, 25 nt, Artificial Sequence
  Description of Artificial Sequence: Synthetic oligonucleotide
gcucaugggcaccguggccaaacag

SEQ ID NO: 7455 - RNA, 25 nt, Artificial Sequence
  Description of Artificial Sequence: Synthetic oligonucleotide
gcuggugcccagcugcgugacugug

SEQ ID NO: 7456 - RNA, 25 nt, Artificial Sequence
  Description of Artificial Sequence: Synthetic oligonucleotide
gcagcgcugugguggcugcugcccu

SEQ ID NO: 7457 - RNA, 25 nt, Artificial Sequence
  Description of Artificial Sequence: Synthetic oligonucleotide
ugacgauggccuggagugugugccc

SEQ ID NO: 7458 - RNA, 25 nt, Artificial Sequence
  Description of Artificial Sequence: Synthetic oligonucleotide
cacugggcagcaccaaguccggaug

SEQ ID NO: 7459 - RNA, 25 nt, Artificial Sequence
  Description of Artificial Sequence: Synthetic oligonucleotide
gcagauccucaugauccgguacccg

SEQ ID NO: 7460 - RNA, 25 nt, Artificial Sequence
  Description of Artificial Sequence: Synthetic oligonucleotide
gagcagucagcugggggagaugucc

SEQ ID NO: 7461 - RNA, 25 nt, Artificial Sequence
  Description of Artificial Sequence: Synthetic oligonucleotide
ccuggaagaacacagccagugugaa

SEQ ID NO: 7462 - RNA, 25 nt, Artificial Sequence
  Description of Artificial Sequence: Synthetic oligonucleotide
augcagaccuaaaaaaaaggacagu

SEQ ID NO: 7463 - RNA, 25 nt, Artificial Sequence
  Description of Artificial Sequence: Synthetic oligonucleotide
ugcugugaagccagacagggcugcc

SEQ ID NO: 7464 - RNA, 25 nt, Artificial Sequence
  Description of Artificial Sequence: Synthetic oligonucleotide
cacuccccaccaccguccccagccc

SEQ ID NO: 7465 - RNA, 25 nt, Artificial Sequence
  Description of Artificial Sequence: Synthetic oligonucleotide
ccguucuguuccgggcugggacucu

SEQ ID NO: 7466 - RNA, 25 nt, Artificial Sequence
  Description of Artificial Sequence: Synthetic oligonucleotide
ugcccccggagcacccuccccagcu

SEQ ID NO: 7467 - RNA, 25 nt, Artificial Sequence
  Description of Artificial Sequence: Synthetic oligonucleotide
ugacaucacccaucccacuccagcc

SEQ ID NO: 7468 - RNA, 25 nt, Artificial Sequence
  Description of Artificial Sequence: Synthetic oligonucleotide
cccaggccccucugcccacgcugca

SEQ ID NO: 7469 - RNA, 25 nt, Artificial Sequence
  Description of Artificial Sequence: Synthetic oligonucleotide
acccagcaccaccagcgcccugacc

SEQ ID NO: 7470 - RNA, 25 nt, Artificial Sequence
  Description of Artificial Sequence: Synthetic oligonucleotide
ccccggaccugccgcugccgcugcc

SEQ ID NO: 7471 - RNA, 25 nt, Artificial Sequence
  Description of Artificial Sequence: Synthetic oligonucleotide
cgacgccgcagcuuccuccguugcc

SEQ ID NO: 7472 - RNA, 25 nt, Artificial Sequence
  Description of Artificial Sequence: Synthetic oligonucleotide
caagggcggggcuuagagcucaacc

SEQ ID NO: 7473 - RNA, 25 nt, Artificial Sequence
  Description of Artificial Sequence: Synthetic oligonucleotide
ccagacaccugcaggugccggaagc

SEQ ID NO: 7474 - RNA, 25 nt, Artificial Sequence
  Description of Artificial Sequence: Synthetic oligonucleotide
cugcgaaggugacacauggcuuuuc

SEQ ID NO: 7475 - RNA, 25 nt, Artificial Sequence
  Description of Artificial Sequence: Synthetic oligonucleotide
cagacucagcagggugacuugccuc

SEQ ID NO: 7476 - RNA, 25 nt, Artificial Sequence
  Description of Artificial Sequence: Synthetic oligonucleotide
cagaggcuauaucccagugggggaa

SEQ ID NO: 7477 - RNA, 25 nt, Artificial Sequence
  Description of Artificial Sequence: Synthetic oligonucleotide
acaaagaggagccugguaaaaaaca

SEQ ID NO: 7478 - RNA, 25 nt, Artificial Sequence
  Description of Artificial Sequence: Synthetic oligonucleotide
agccaagcccccaagaccucagccc

SEQ ID NO: 7479 - RNA, 25 nt, Artificial Sequence
  Description of Artificial Sequence: Synthetic oligonucleotide
caggcagaagcugcucuaggaccug

SEQ ID NO: 7480 - RNA, 25 nt, Artificial Sequence
  Description of Artificial Sequence: Synthetic oligonucleotide
gggccucucagagggcucuucugcc

SEQ ID NO: 7481 - RNA, 25 nt, Artificial Sequence
  Description of Artificial Sequence: Synthetic oligonucleotide
caucccuugucucccugaggccauc

SEQ ID NO: 7482 - RNA, 25 nt, Artificial Sequence
  Description of Artificial Sequence: Synthetic oligonucleotide
caucaaacaggacagaguuggaaga

SEQ ID NO: 7483 - RNA, 25 nt, Artificial Sequence
  Description of Artificial Sequence: Synthetic oligonucleotide
aggagacugggaggcagcaagaggg

SEQ ID NO: 7484 - RNA, 25 nt, Artificial Sequence
  Description of Artificial Sequence: Synthetic oligonucleotide
ggucacauaccagcucaggggagaa

SEQ ID NO: 7485 - RNA, 25 nt, Artificial Sequence
  Description of Artificial Sequence: Synthetic oligonucleotide
auggaguacugucucaguuucuaac

SEQ ID NO: 7486 - RNA, 25 nt, Artificial Sequence
  Description of Artificial Sequence: Synthetic oligonucleotide
ccacucugugcaaguaagcaucuua

SEQ ID NO: 7487 - RNA, 25 nt, Artificial Sequence
  Description of Artificial Sequence: Synthetic oligonucleotide
acaacuggcucuuccuccccucacu

SEQ ID NO: 7488 - RNA, 25 nt, Artificial Sequence
  Description of Artificial Sequence: Synthetic oligonucleotide
uaagaagacccaaaccucugcauaa

SEQ ID NO: 7489 - RNA, 25 nt, Artificial Sequence
  Description of Artificial Sequence: Synthetic oligonucleotide
augggauuugggcuuugguacaaga

SEQ ID NO: 7490 - RNA, 25 nt, Artificial Sequence
  Description of Artificial Sequence: Synthetic oligonucleotide
aacugugacccccaacccugauaaa

SEQ ID NO: 7491 - RNA, 2076 nt, Homo sapiens
cggggaaggggagggaggagggggacgagggcucuggcggguuuggaggggcugaacaucgcgggguguucuggugucccccgccccgccucuccaaaaagcuacaccgacgcggaccgcggcggcguccucccucgcccucgcuucaccucgcgggcuccgaaugcggggagcucggauguccgguuuccugugaggcuuuuaccugacacccgccgccuuuccccggcacuggcugggagggcgcccugcaaaguugggaacgcggagccccggacccgcucccgccgccuccggcucgcccagggggggucgccgggaggagcccgggggagagggaccaggaggggcccgcggccucgcaggggcgcccgcgcccccaccccugcccccgccagcggaccggucccccacccccgguccuuccaccaugcacuugcugggcuucuucucuguggcguguucucugcucgccgcugcgcugcucccggguccucgcgaggcgcccgccgccgccgccgccuucgaguccggacucgaccucucggacgcggagcccgacgcgggcgaggccacggcuuaugcaagcaaagaucuggaggagcaguuacggucuguguccaguguagaugaacucaugacuguacucuacccagaauauuggaaaauguacaagugucagcuaaggaaaggaggcuggcaacauaacagagaacaggccaaccucaacucaaggacagaagagacuauaaaauuugcugcagcacauuauaauacagagaucuugaaaaguauugauaaugaguggagaaagacucaaugcaugccacgggagguguguauagauguggggaaggaguuuggagucgcgacaaacaccuucuuuaaaccuccauguguguccgucuacagauguggggguugcugcaauagugaggggcugcagugcaugaacaccagcacgagcuaccucagcaagacguuauuugaaauuacagugccucucucucaaggccccaaaccaguaacaaucaguuuugccaaucacacuuccugccgaugcaugucuaaacuggauguuuacagacaaguucauuccauuauuagacguucccugccagcaacacuaccacagugucaggcagcgaacaagaccugccccaccaauuacauguggaauaaucacaucugcagaugccuggcucaggaagauuuuauguuuuccucggaugcuggagaugacucaacagauggauuccaugacaucuguggaccaaacaaggagcuggaugaagagaccugucagugugucugcagagcggggcuucggccugccagcuguggaccccacaaagaacuagacagaaacucaugccagugugucuguaaaaacaaacucuuccccagccaauguggggccaaccgagaauuugaugaaaacacaugccaguguguauguaaaagaaccugccccagaaaucaaccccuaaauccuggaaaaugugccugugaauguacagaaaguccacagaaaugcuuguuaaaaggaaagaaguuccaccaccaaacaugcagcuguuacagacggccauguacgaaccgccagaaggcuugugagccaggauuuucauauagugaagaagugugucguugugucccuucauauuggaaaagaccacaaaugagcuaagauuguacuguuuuccaguucaucgauuuucuauuauggaaaacuguguugccacaguagaacugucugugaacagagagacccuuguggguccaugcuaacaaagacaaaagucugucuuuccugaaccauguggauaacuuuacagaaauggacuggagcucaucugcaaaaggccucuuguaaagacugguuuucugccaaugaccaaacagccaagauuuuccucuugugauuucuuuaaaagaaugacuauauaauuuauuuccacuaaaaauauuguuucugcauucauuuuuauagcaacaacaauugguaaaacucacugugaucaauauuuuuauaucaugcaaaauauguuuaaaauaaaaugaaaauuguauuau

SEQ ID NO: 7492 - RNA, 19 nt, Artificial Sequence
  Description of Artificial Sequence: Synthetic oligonucleotide
cggggaaggggagggagga

SEQ ID NO: 7493 - RNA, 19 nt, Artificial Sequence
  Description of Artificial Sequence: Synthetic oligonucleotide
agggggacgagggcucugg

SEQ ID NO: 7494 - RNA, 19 nt, Artificial Sequence
  Description of Artificial Sequence: Synthetic oligonucleotide
gcggguuuggaggggcuga

SEQ ID NO: 7495 - RNA, 19 nt, Artificial Sequence
  Description of Artificial Sequence: Synthetic oligonucleotide
aacaucgcgggguguucug

SEQ ID NO: 7496 - RNA, 19 nt, Artificial Sequence
  Description of Artificial Sequence: Synthetic oligonucleotide
ggugucccccgccccgccu

SEQ ID NO: 7497 - RNA, 19 nt, Artificial Sequence
  Description of Artificial Sequence: Synthetic oligonucleotide
ucuccaaaaagcuacaccg

SEQ ID NO: 7498 - RNA, 19 nt, Artificial Sequence
  Description of Artificial Sequence: Synthetic oligonucleotide
gacgcggaccgcggcggcg

SEQ ID NO: 7499 - RNA, 19 nt, Artificial Sequence
  Description of Artificial Sequence: Synthetic oligonucleotide
guccucccucgcccucgcu

SEQ ID NO: 7500 - RNA, 19 nt, Artificial Sequence
  Description of Artificial Sequence: Synthetic oligonucleotide
uucaccucgcgggcuccga

SEQ ID NO: 7501 - RNA, 19 nt, Artificial Sequence
  Description of Artificial Sequence: Synthetic oligonucleotide
aaugcggggagcucggaug

SEQ ID NO: 7502 - RNA, 19 nt, Artificial Sequence
  Description of Artificial Sequence: Synthetic oligonucleotide
guccgguuuccugugaggc

SEQ ID NO: 7503 - RNA, 19 nt, Artificial Sequence
  Description of Artificial Sequence: Synthetic oligonucleotide
cuuuuaccugacacccgcc

SEQ ID NO: 7504 - RNA, 19 nt, Artificial Sequence
  Description of Artificial Sequence: Synthetic oligonucleotide
cgccuuuccccggcacugg

SEQ ID NO: 7505 - RNA, 19 nt, Artificial Sequence
  Description of Artificial Sequence: Synthetic oligonucleotide
gcugggagggcgcccugca

SEQ ID NO: 7506 - RNA, 19 nt, Artificial Sequence
  Description of Artificial Sequence: Synthetic oligonucleotide
aaaguugggaacgcggagc

SEQ ID NO: 7507 - RNA, 19 nt, Artificial Sequence
  Description of Artificial Sequence: Synthetic oligonucleotide
ccccggacccgcucccgcc

SEQ ID NO: 7508 - RNA, 19 nt, Artificial Sequence
  Description of Artificial Sequence: Synthetic oligonucleotide
cgccuccggcucgcccagg

SEQ ID NO: 7509 - RNA, 19 nt, Artificial Sequence
  Description of Artificial Sequence: Synthetic oligonucleotide
ggggggucgccgggaggag

SEQ ID NO: 7510 - RNA, 19 nt, Artificial Sequence
  Description of Artificial Sequence: Synthetic oligonucleotide
gcccgggggagagggacca

SEQ ID NO: 7511 - RNA, 19 nt, Artificial Sequence
  Description of Artificial Sequence: Synthetic oligonucleotide
aggaggggcccgcggccuc

SEQ ID NO: 7512 - RNA, 19 nt, Artificial Sequence
  Description of Artificial Sequence: Synthetic oligonucleotide
cgcaggggcgcccgcgccc

SEQ ID NO: 7513 - RNA, 19 nt, Artificial Sequence
  Description of Artificial Sequence: Synthetic oligonucleotide
cccaccccugcccccgcca

SEQ ID NO: 7514 - RNA, 19 nt, Artificial Sequence
  Description of Artificial Sequence: Synthetic oligonucleotide
agcggaccggucccccacc

SEQ ID NO: 7515 - RNA, 19 nt, Artificial Sequence
  Description of Artificial Sequence: Synthetic oligonucleotide
ccccgguccuuccaccaug

SEQ ID NO: 7516 - RNA, 19 nt, Artificial Sequence
  Description of Artificial Sequence: Synthetic oligonucleotide
gcacuugcugggcuucuuc

SEQ ID NO: 7517 - RNA, 19 nt, Artificial Sequence
  Description of Artificial Sequence: Synthetic oligonucleotide
cucuguggcguguucucug

SEQ ID NO: 7518 - RNA, 19 nt, Artificial Sequence
  Description of Artificial Sequence: Synthetic oligonucleotide
gcucgccgcugcgcugcuc

SEQ ID NO: 7519 - RNA, 19 nt, Artificial Sequence
  Description of Artificial Sequence: Synthetic oligonucleotide
cccggguccucgcgaggcg

SEQ ID NO: 7520 - RNA, 19 nt, Artificial Sequence
  Description of Artificial Sequence: Synthetic oligonucleotide
gcccgccgccgccgccgcc

SEQ ID NO: 7521 - RNA, 19 nt, Artificial Sequence
  Description of Artificial Sequence: Synthetic oligonucleotide
cuucgaguccggacucgac

SEQ ID NO: 7522 - RNA, 19 nt, Artificial Sequence
  Description of Artificial Sequence: Synthetic oligonucleotide
ccucucggacgcggagccc

SEQ ID NO: 7523 - RNA, 19 nt, Artificial Sequence
  Description of Artificial Sequence: Synthetic oligonucleotide
cgacgcgggcgaggccacg

SEQ ID NO: 7524 - RNA, 19 nt, Artificial Sequence
  Description of Artificial Sequence: Synthetic oligonucleotide
ggcuuaugcaagcaaagau

SEQ ID NO: 7525 - RNA, 19 nt, Artificial Sequence
  Description of Artificial Sequence: Synthetic oligonucleotide
ucuggaggagcaguuacgg

SEQ ID NO: 7526 - RNA, 19 nt, Artificial Sequence
  Description of Artificial Sequence: Synthetic oligonucleotide
gucuguguccaguguagau

SEQ ID NO: 7527 - RNA, 19 nt, Artificial Sequence
  Description of Artificial Sequence: Synthetic oligonucleotide
ugaacucaugacuguacuc

SEQ ID NO: 7528 - RNA, 19 nt, Artificial Sequence
  Description of Artificial Sequence: Synthetic oligonucleotide
cuacccagaauauuggaaa

SEQ ID NO: 7529 - RNA, 19 nt, Artificial Sequence
  Description of Artificial Sequence: Synthetic oligonucleotide
aauguacaagugucagcua

SEQ ID NO: 7530 - RNA, 19 nt, Artificial Sequence
  Description of Artificial Sequence: Synthetic oligonucleotide
aaggaaaggaggcuggcaa

SEQ ID NO: 7531 - RNA, 19 nt, Artificial Sequence
  Description of Artificial Sequence: Synthetic oligonucleotide
acauaacagagaacaggcc

SEQ ID NO: 7532 - RNA, 19 nt, Artificial Sequence
  Description of Artificial Sequence: Synthetic oligonucleotide
caaccucaacucaaggaca

SEQ ID NO: 7533 - RNA, 19 nt, Artificial Sequence
  Description of Artificial Sequence: Synthetic oligonucleotide
agaagagacuauaaaauuu

SEQ ID NO: 7534 - RNA, 19 nt, Artificial Sequence
  Description of Artificial Sequence: Synthetic oligonucleotide
ugcugcagcacauuauaau

SEQ ID NO: 7535 - RNA, 19 nt, Artificial Sequence
  Description of Artificial Sequence: Synthetic oligonucleotide
uacagagaucuugaaaagu

SEQ ID NO: 7536 - RNA, 19 nt, Artificial Sequence
  Description of Artificial Sequence: Synthetic oligonucleotide
uauugauaaugaguggaga

SEQ ID NO: 7537 - RNA, 19 nt, Artificial Sequence
  Description of Artificial Sequence: Synthetic oligonucleotide
aaagacucaaugcaugcca

SEQ ID NO: 7538 - RNA, 19 nt, Artificial Sequence
  Description of Artificial Sequence: Synthetic oligonucleotide
acgggagguguguauagau

SEQ ID NO: 7539 - RNA, 19 nt, Artificial Sequence
  Description of Artificial Sequence: Synthetic oligonucleotide
uguggggaaggaguuugga

SEQ ID NO: 7540 - RNA, 19 nt, Artificial Sequence
  Description of Artificial Sequence: Synthetic oligonucleotide
agucgcgacaaacaccuuc

SEQ ID NO: 7541 - RNA, 19 nt, Artificial Sequence
  Description of Artificial Sequence: Synthetic oligonucleotide
cuuuaaaccuccaugugug

SEQ ID NO: 7542 - RNA, 19 nt, Artificial Sequence
  Description of Artificial Sequence: Synthetic oligonucleotide
guccgucuacagauguggg

SEQ ID NO: 7543 - RNA, 19 nt, Artificial Sequence
  Description of Artificial Sequence: Synthetic oligonucleotide
ggguugcugcaauagugag

SEQ ID NO: 7544 - RNA, 19 nt, Artificial Sequence
  Description of Artificial Sequence: Synthetic oligonucleotide
ggggcugcagugcaugaac

SEQ ID NO: 7545 - RNA, 19 nt, Artificial Sequence
  Description of Artificial Sequence: Synthetic oligonucleotide
caccagcacgagcuaccuc

SEQ ID NO: 7546 - RNA, 19 nt, Artificial Sequence
  Description of Artificial Sequence: Synthetic oligonucleotide
cagcaagacguuauuugaa

SEQ ID NO: 7547 - RNA, 19 nt, Artificial Sequence
  Description of Artificial Sequence: Synthetic oligonucleotide
aauuacagugccucucucu

SEQ ID NO: 7548 - RNA, 19 nt, Artificial Sequence
  Description of Artificial Sequence: Synthetic oligonucleotide
ucaaggccccaaaccagua

SEQ ID NO: 7549 - RNA, 19 nt, Artificial Sequence
  Description of Artificial Sequence: Synthetic oligonucleotide
aacaaucaguuuugccaau

SEQ ID NO: 7550 - RNA, 19 nt, Artificial Sequence
  Description of Artificial Sequence: Synthetic oligonucleotide
ucacacuuccugccgaugc

SEQ ID NO: 7551 - RNA, 19 nt, Artificial Sequence
  Description of Artificial Sequence: Synthetic oligonucleotide
caugucuaaacuggauguu

SEQ ID NO: 7552 - RNA, 19 nt, Artificial Sequence
  Description of Artificial Sequence: Synthetic oligonucleotide
uuacagacaaguucauucc

SEQ ID NO: 7553 - RNA, 19 nt, Artificial Sequence
  Description of Artificial Sequence: Synthetic oligonucleotide
cauuauuagacguucccug

SEQ ID NO: 7554 - RNA, 19 nt, Artificial Sequence
  Description of Artificial Sequence: Synthetic oligonucleotide
gccagcaacacuaccacag

SEQ ID NO: 7555 - RNA, 19 nt, Artificial Sequence
  Description of Artificial Sequence: Synthetic oligonucleotide
gugucaggcagcgaacaag

SEQ ID NO: 7556 - RNA, 19 nt, Artificial Sequence
  Description of Artificial Sequence: Synthetic oligonucleotide
gaccugccccaccaauuac

SEQ ID NO: 7557 - RNA, 19 nt, Artificial Sequence
  Description of Artificial Sequence: Synthetic oligonucleotide
cauguggaauaaucacauc

SEQ ID NO: 7558 - RNA, 19 nt, Artificial Sequence
  Description of Artificial Sequence: Synthetic oligonucleotide
cugcagaugccuggcucag

SEQ ID NO: 7559 - RNA, 19 nt, Artificial Sequence
  Description of Artificial Sequence: Synthetic oligonucleotide
ggaagauuuuauguuuucc

SEQ ID NO: 7560 - RNA, 19 nt, Artificial Sequence
  Description of Artificial Sequence: Synthetic oligonucleotide
cucggaugcuggagaugac

SEQ ID NO: 7561 - RNA, 19 nt, Artificial Sequence
  Description of Artificial Sequence: Synthetic oligonucleotide
cucaacagauggauuccau

SEQ ID NO: 7562 - RNA, 19 nt, Artificial Sequence
  Description of Artificial Sequence: Synthetic oligonucleotide
ugacaucuguggaccaaac

SEQ ID NO: 7563 - RNA, 19 nt, Artificial Sequence
  Description of Artificial Sequence: Synthetic oligonucleotide
caaggagcuggaugaagag

SEQ ID NO: 7564 - RNA, 19 nt, Artificial Sequence
  Description of Artificial Sequence: Synthetic oligonucleotide
gaccugucagugugucugc

SEQ ID NO: 7565 - RNA, 19 nt, Artificial Sequence
  Description of Artificial Sequence: Synthetic oligonucleotide
cagagcggggcuucggccu

SEQ ID NO: 7566 - RNA, 19 nt, Artificial Sequence
  Description of Artificial Sequence: Synthetic oligonucleotide
ugccagcuguggaccccac

SEQ ID NO: 7567 - RNA, 19 nt, Artificial Sequence
  Description of Artificial Sequence: Synthetic oligonucleotide
caaagaacuagacagaaac

SEQ ID NO: 7568 - RNA, 19 nt, Artificial Sequence
  Description of Artificial Sequence: Synthetic oligonucleotide
cucaugccagugugucugu

SEQ ID NO: 7569 - RNA, 19 nt, Artificial Sequence
  Description of Artificial Sequence: Synthetic oligonucleotide
uaaaaacaaacucuucccc

SEQ ID NO: 7570 - RNA, 19 nt, Artificial Sequence
  Description of Artificial Sequence: Synthetic oligonucleotide
cagccaauguggggccaac

SEQ ID NO: 7571 - RNA, 19 nt, Artificial Sequence
  Description of Artificial Sequence: Synthetic oligonucleotide
ccgagaauuugaugaaaac

SEQ ID NO: 7572 - RNA, 19 nt, Artificial Sequence
  Description of Artificial Sequence: Synthetic oligonucleotide
cacaugccaguguguaugu

SEQ ID NO: 7573 - RNA, 19 nt, Artificial Sequence
  Description of Artificial Sequence: Synthetic oligonucleotide
uaaaagaaccugccccaga

SEQ ID NO: 7574 - RNA, 19 nt, Artificial Sequence
  Description of Artificial Sequence: Synthetic oligonucleotide
aaaucaaccccuaaauccu

SEQ ID NO: 7575 - RNA, 19 nt, Artificial Sequence
  Description of Artificial Sequence: Synthetic oligonucleotide
uggaaaaugugccugugaa

SEQ ID NO: 7576 - RNA, 19 nt, Artificial Sequence
  Description of Artificial Sequence: Synthetic oligonucleotide
auguacagaaaguccacag

SEQ ID NO: 7577 - RNA, 19 nt, Artificial Sequence
  Description of Artificial Sequence: Synthetic oligonucleotide
gaaaugcuuguuaaaagga

SEQ ID NO: 7578 - RNA, 19 nt, Artificial Sequence
  Description of Artificial Sequence: Synthetic oligonucleotide
aaagaaguuccaccaccaa

SEQ ID NO: 7579 - RNA, 19 nt, Artificial Sequence
  Description of Artificial Sequence: Synthetic oligonucleotide
aacaugcagcuguuacaga

SEQ ID NO: 7580 - RNA, 19 nt, Artificial Sequence
  Description of Artificial Sequence: Synthetic oligonucleotide
acggccauguacgaaccgc

SEQ ID NO: 7581 - RNA, 19 nt, Artificial Sequence
  Description of Artificial Sequence: Synthetic oligonucleotide
ccagaaggcuugugagcca

SEQ ID NO: 7582 - RNA, 19 nt, Artificial Sequence
  Description of Artificial Sequence: Synthetic oligonucleotide
aggauuuucauauagugaa

SEQ ID NO: 7583 - RNA, 19 nt, Artificial Sequence
  Description of Artificial Sequence: Synthetic oligonucleotide
agaagugugucguuguguc

SEQ ID NO: 7584 - RNA, 19 nt, Artificial Sequence
  Description of Artificial Sequence: Synthetic oligonucleotide
cccuucauauuggaaaaga

SEQ ID NO: 7585 - RNA, 19 nt, Artificial Sequence
  Description of Artificial Sequence: Synthetic oligonucleotide
accacaaaugagcuaagau

SEQ ID NO: 7586 - RNA, 19 nt, Artificial Sequence
  Description of Artificial Sequence: Synthetic oligonucleotide
uuguacuguuuuccaguuc

SEQ ID NO: 7587 - RNA, 19 nt, Artificial Sequence
  Description of Artificial Sequence: Synthetic oligonucleotide
caucgauuuucuauuaugg

SEQ ID NO: 7588 - RNA, 19 nt, Artificial Sequence
  Description of Artificial Sequence: Synthetic oligonucleotide
gaaaacuguguugccacag

SEQ ID NO: 7589 - RNA, 19 nt, Artificial Sequence
  Description of Artificial Sequence: Synthetic oligonucleotide
guagaacugucugugaaca

SEQ ID NO: 7590 - RNA, 19 nt, Artificial Sequence
  Description of Artificial Sequence: Synthetic oligonucleotide
agagagacccuuguggguc

SEQ ID NO: 7591 - RNA, 19 nt, Artificial Sequence
  Description of Artificial Sequence: Synthetic oligonucleotide
ccaugcuaacaaagacaaa

SEQ ID NO: 7592 - RNA, 19 nt, Artificial Sequence
  Description of Artificial Sequence: Synthetic oligonucleotide
aagucugucuuuccugaac

SEQ ID NO: 7593 - RNA, 19 nt, Artificial Sequence
  Description of Artificial Sequence: Synthetic oligonucleotide
ccauguggauaacuuuaca

SEQ ID NO: 7594 - RNA, 19 nt, Artificial Sequence
  Description of Artificial Sequence: Synthetic oligonucleotide
agaaauggacuggagcuca

SEQ ID NO: 7595 - RNA, 19 nt, Artificial Sequence
  Description of Artificial Sequence: Synthetic oligonucleotide
aucugcaaaaggccucuug

SEQ ID NO: 7596 - RNA, 19 nt, Artificial Sequence
  Description of Artificial Sequence: Synthetic oligonucleotide
guaaagacugguuuucugc

SEQ ID NO: 7597 - RNA, 19 nt, Artificial Sequence
  Description of Artificial Sequence: Synthetic oligonucleotide
ccaaugaccaaacagccaa

SEQ ID NO: 7598 - RNA, 19 nt, Artificial Sequence
  Description of Artificial Sequence: Synthetic oligonucleotide
agauuuuccucuugugauu

SEQ ID NO: 7599 - RNA, 19 nt, Artificial Sequence
  Description of Artificial Sequence: Synthetic oligonucleotide
uucuuuaaaagaaugacua

SEQ ID NO: 7600 - RNA, 19 nt, Artificial Sequence
  Description of Artificial Sequence: Synthetic oligonucleotide
auauaauuuauuuccacua

SEQ ID NO: 7601 - RNA, 19 nt, Artificial Sequence
  Description of Artificial Sequence: Synthetic oligonucleotide
aaaaauauuguuucugcau

SEQ ID NO: 7602 - RNA, 19 nt, Artificial Sequence
  Description of Artificial Sequence: Synthetic oligonucleotide
uucauuuuuauagcaacaa

SEQ ID NO: 7603 - RNA, 19 nt, Artificial Sequence
  Description of Artificial Sequence: Synthetic oligonucleotide
acaauugguaaaacucacu

SEQ ID NO: 7604 - RNA, 19 nt, Artificial Sequence
  Description of Artificial Sequence: Synthetic oligonucleotide
ugugaucaauauuuuuaua

SEQ ID NO: 7605 - RNA, 19 nt, Artificial Sequence
  Description of Artificial Sequence: Synthetic oligonucleotide
aucaugcaaaauauguuua

SEQ ID NO: 7606 - RNA, 19 nt, Artificial Sequence
  Description of Artificial Sequence: Synthetic oligonucleotide
aaaauaaaaugaaaauugu

SEQ ID NO: 7607 - RNA, 19 nt, Artificial Sequence
  Description of Artificial Sequence: Synthetic oligonucleotide
aaaaugaaaauuguauuau

SEQ ID NO: 7608 - RNA, 25 nt, Artificial Sequence
  Description of Artificial Sequence: Synthetic oligonucleotide
cggggaaggggagggaggaggggga

SEQ ID NO: 7609 - RNA, 25 nt, Artificial Sequence
  Description of Artificial Sequence: Synthetic oligonucleotide
acgagggcucuggcggguuuggagg

SEQ ID NO: 7610 - RNA, 25 nt, Artificial Sequence
  Description of Artificial Sequence: Synthetic oligonucleotide
gggcugaacaucgcgggguguucug

SEQ ID NO: 7611 - RNA, 25 nt, Artificial Sequence
  Description of Artificial Sequence: Synthetic oligonucleotide
ggugucccccgccccgccucuccaa

SEQ ID NO: 7612 - RNA, 25 nt, Artificial Sequence
  Description of Artificial Sequence: Synthetic oligonucleotide
aaaagcuacaccgacgcggaccgcg

SEQ ID NO: 7613 - RNA, 25 nt, Artificial Sequence
  Description of Artificial Sequence: Synthetic oligonucleotide
ggcggcguccucccucgcccucgcu

SEQ ID NO: 7614 - RNA, 25 nt, Artificial Sequence
  Description of Artificial Sequence: Synthetic oligonucleotide
uucaccucgcgggcuccgaaugcgg

SEQ ID NO: 7615 - RNA, 25 nt, Artificial Sequence
  Description of Artificial Sequence: Synthetic oligonucleotide
gggagcucggauguccgguuuccug

SEQ ID NO: 7616 - RNA, 25 nt, Artificial Sequence
  Description of Artificial Sequence: Synthetic oligonucleotide
gugaggcuuuuaccugacacccgcc

SEQ ID NO: 7617 - RNA, 25 nt, Artificial Sequence
  Description of Artificial Sequence: Synthetic oligonucleotide
cgccuuuccccggcacuggcuggga

SEQ ID NO: 7618 - RNA, 25 nt, Artificial Sequence
  Description of Artificial Sequence: Synthetic oligonucleotide
agggcgcccugcaaaguugggaacg

SEQ ID NO: 7619 - RNA, 25 nt, Artificial Sequence
  Description of Artificial Sequence: Synthetic oligonucleotide
gcggagccccggacccgcucccgcc

SEQ ID NO: 7620 - RNA, 25 nt, Artificial Sequence
  Description of Artificial Sequence: Synthetic oligonucleotide
cgccuccggcucgcccagggggggu

SEQ ID NO: 7621 - RNA, 25 nt, Artificial Sequence
  Description of Artificial Sequence: Synthetic oligonucleotide
ucgccgggaggagcccgggggagag

SEQ ID NO: 7622 - RNA, 25 nt, Artificial Sequence
  Description of Artificial Sequence: Synthetic oligonucleotide
gggaccaggaggggcccgcggccuc

SEQ ID NO: 7623 - RNA, 25 nt, Artificial Sequence
  Description of Artificial Sequence: Synthetic oligonucleotide
cgcaggggcgcccgcgcccccaccc

SEQ ID NO: 7624 - RNA, 25 nt, Artificial Sequence
  Description of Artificial Sequence: Synthetic oligonucleotide
ccugcccccgccagcggaccggucc

SEQ ID NO: 7625 - RNA, 25 nt, Artificial Sequence
  Description of Artificial Sequence: Synthetic oligonucleotide
ccccacccccgguccuuccaccaug

SEQ ID NO: 7626 - RNA, 25 nt, Artificial Sequence
  Description of Artificial Sequence: Synthetic oligonucleotide
gcacuugcugggcuucuucucugug

SEQ ID NO: 7627 - RNA, 25 nt, Artificial Sequence
  Description of Artificial Sequence: Synthetic oligonucleotide
ggcguguucucugcucgccgcugcg

SEQ ID NO: 7628 - RNA, 25 nt, Artificial Sequence
  Description of Artificial Sequence: Synthetic oligonucleotide
gcugcucccggguccucgcgaggcg

SEQ ID NO: 7629 - RNA, 25 nt, Artificial Sequence
  Description of Artificial Sequence: Synthetic oligonucleotide
gcccgccgccgccgccgccuucgag

SEQ ID NO: 7630 - RNA, 25 nt, Artificial Sequence
  Description of Artificial Sequence: Synthetic oligonucleotide
guccggacucgaccucucggacgcg

SEQ ID NO: 7631 - RNA, 25 nt, Artificial Sequence
  Description of Artificial Sequence: Synthetic oligonucleotide
ggagcccgacgcgggcgaggccacg

SEQ ID NO: 7632 - RNA, 25 nt, Artificial Sequence
  Description of Artificial Sequence: Synthetic oligonucleotide
ggcuuaugcaagcaaagaucuggag

SEQ ID NO: 7633 - RNA, 25 nt, Artificial Sequence
  Description of Artificial Sequence: Synthetic oligonucleotide
ggagcaguuacggucuguguccagu

SEQ ID NO: 7634 - RNA, 25 nt, Artificial Sequence
  Description of Artificial Sequence: Synthetic oligonucleotide
uguagaugaacucaugacuguacuc

SEQ ID NO: 7635 - RNA, 25 nt, Artificial Sequence
  Description of Artificial Sequence: Synthetic oligonucleotide
cuacccagaauauuggaaaauguac

SEQ ID NO: 7636 - RNA, 25 nt, Artificial Sequence
  Description of Artificial Sequence: Synthetic oligonucleotide
caagugucagcuaaggaaaggaggc

SEQ ID NO: 7637 - RNA, 25 nt, Artificial Sequence
  Description of Artificial Sequence: Synthetic oligonucleotide
cuggcaacauaacagagaacaggcc

SEQ ID NO: 7638 - RNA, 25 nt, Artificial Sequence
  Description of Artificial Sequence: Synthetic oligonucleotide
caaccucaacucaaggacagaagag

SEQ ID NO: 7639 - RNA, 25 nt, Artificial Sequence
  Description of Artificial Sequence: Synthetic oligonucleotide
gacuauaaaauuugcugcagcacau

SEQ ID NO: 7640 - RNA, 25 nt, Artificial Sequence
  Description of Artificial Sequence: Synthetic oligonucleotide
uuauaauacagagaucuugaaaagu

SEQ ID NO: 7641 - RNA, 25 nt, Artificial Sequence
  Description of Artificial Sequence: Synthetic oligonucleotide
uauugauaaugaguggagaaagacu

SEQ ID NO: 7642 - RNA, 25 nt, Artificial Sequence
  Description of Artificial Sequence: Synthetic oligonucleotide
ucaaugcaugccacgggaggugugu

SEQ ID NO: 7643 - RNA, 25 nt, Artificial Sequence
  Description of Artificial Sequence: Synthetic oligonucleotide
uauagauguggggaaggaguuugga

SEQ ID NO: 7644 - RNA, 25 nt, Artificial Sequence
  Description of Artificial Sequence: Synthetic oligonucleotide
agucgcgacaaacaccuucuuuaaa

SEQ ID NO: 7645 - RNA, 25 nt, Artificial Sequence
  Description of Artificial Sequence: Synthetic oligonucleotide
accuccauguguguccgucuacaga

SEQ ID NO: 7646 - RNA, 25 nt, Artificial Sequence
  Description of Artificial Sequence: Synthetic oligonucleotide
auguggggguugcugcaauagugag

SEQ ID NO: 7647 - RNA, 25 nt, Artificial Sequence
  Description of Artificial Sequence: Synthetic oligonucleotide
ggggcugcagugcaugaacaccagc

SEQ ID NO: 7648 - RNA, 25 nt, Artificial Sequence
  Description of Artificial Sequence: Synthetic oligonucleotide
cacgagcuaccucagcaagacguua

SEQ ID NO: 7649 - RNA, 25 nt, Artificial Sequence
  Description of Artificial Sequence: Synthetic oligonucleotide
auuugaaauuacagugccucucucu

SEQ ID NO: 7650 - RNA, 25 nt, Artificial Sequence
  Description of Artificial Sequence: Synthetic oligonucleotide
ucaaggccccaaaccaguaacaauc

SEQ ID NO: 7651 - RNA, 25 nt, Artificial Sequence
  Description of Artificial Sequence: Synthetic oligonucleotide
caguuuugccaaucacacuuccugc

SEQ ID NO: 7652 - RNA, 25 nt, Artificial Sequence
  Description of Artificial Sequence: Synthetic oligonucleotide
ccgaugcaugucuaaacuggauguu

SEQ ID NO: 7653 - RNA, 25 nt, Artificial Sequence
  Description of Artificial Sequence: Synthetic oligonucleotide
uuacagacaaguucauuccauuauu

SEQ ID NO: 7654 - RNA, 25 nt, Artificial Sequence
  Description of Artificial Sequence: Synthetic oligonucleotide
uagacguucccugccagcaacacua

SEQ ID NO: 7655 - RNA, 25 nt, Artificial Sequence
  Description of Artificial Sequence: Synthetic oligonucleotide
accacagugucaggcagcgaacaag

SEQ ID NO: 7656 - RNA, 25 nt, Artificial Sequence
  Description of Artificial Sequence: Synthetic oligonucleotide
gaccugccccaccaauuacaugugg

SEQ ID NO: 7657 - RNA, 25 nt, Artificial Sequence
  Description of Artificial Sequence: Synthetic oligonucleotide
gaauaaucacaucugcagaugccug

SEQ ID NO: 7658 - RNA, 25 nt, Artificial Sequence
  Description of Artificial Sequence: Synthetic oligonucleotide
ggcucaggaagauuuuauguuuucc

SEQ ID NO: 7659 - RNA, 25 nt, Artificial Sequence
  Description of Artificial Sequence: Synthetic oligonucleotide
cucggaugcuggagaugacucaaca

SEQ ID NO: 7660 - RNA, 25 nt, Artificial Sequence
  Description of Artificial Sequence: Synthetic oligonucleotide
agauggauuccaugacaucugugga

SEQ ID NO: 7661 - RNA, 25 nt, Artificial Sequence
  Description of Artificial Sequence: Synthetic oligonucleotide
accaaacaaggagcuggaugaagag

SEQ ID NO: 7662 - RNA, 25 nt, Artificial Sequence
  Description of Artificial Sequence: Synthetic oligonucleotide
gaccugucagugugucugcagagcg

SEQ ID NO: 7663 - RNA, 25 nt, Artificial Sequence
  Description of Artificial Sequence: Synthetic oligonucleotide
ggggcuucggccugccagcugugga

SEQ ID NO: 7664 - RNA, 25 nt, Artificial Sequence
  Description of Artificial Sequence: Synthetic oligonucleotide
accccacaaagaacuagacagaaac

SEQ ID NO: 7665 - RNA, 25 nt, Artificial Sequence
  Description of Artificial Sequence: Synthetic oligonucleotide
cucaugccagugugucuguaaaaac

SEQ ID NO: 7666 - RNA, 25 nt, Artificial Sequence
  Description of Artificial Sequence: Synthetic oligonucleotide
caaacucuuccccagccaauguggg

SEQ ID NO: 7667 - RNA, 25 nt, Artificial Sequence
  Description of Artificial Sequence: Synthetic oligonucleotide
ggccaaccgagaauuugaugaaaac

SEQ ID NO: 7668 - RNA, 25 nt, Artificial Sequence
  Description of Artificial Sequence: Synthetic oligonucleotide
cacaugccaguguguauguaaaaga

SEQ ID NO: 7669 - RNA, 25 nt, Artificial Sequence
  Description of Artificial Sequence: Synthetic oligonucleotide
aaccugccccagaaaucaaccccua

SEQ ID NO: 7670 - RNA, 25 nt, Artificial Sequence
  Description of Artificial Sequence: Synthetic oligonucleotide
aaauccuggaaaaugugccugugaa

SEQ ID NO: 7671 - RNA, 25 nt, Artificial Sequence
  Description of Artificial Sequence: Synthetic oligonucleotide
auguacagaaaguccacagaaaugc

SEQ ID NO: 7672 - RNA, 25 nt, Artificial Sequence
  Description of Artificial Sequence: Synthetic oligonucleotide
cuuguuaaaaggaaagaaguuccac

SEQ ID NO: 7673 - RNA, 25 nt, Artificial Sequence
  Description of Artificial Sequence: Synthetic oligonucleotide
ccaccaaacaugcagcuguuacaga

SEQ ID NO: 7674 - RNA, 25 nt, Artificial Sequence
  Description of Artificial Sequence: Synthetic oligonucleotide
acggccauguacgaaccgccagaag

SEQ ID NO: 7675 - RNA, 25 nt, Artificial Sequence
  Description of Artificial Sequence: Synthetic oligonucleotide
ggcuugugagccaggauuuucauau

SEQ ID NO: 7676 - RNA, 25 nt, Artificial Sequence
  Description of Artificial Sequence: Synthetic oligonucleotide
uagugaagaagugugucguuguguc

SEQ ID NO: 7677 - RNA, 25 nt, Artificial Sequence
  Description of Artificial Sequence: Synthetic oligonucleotide
cccuucauauuggaaaagaccacaa

SEQ ID NO: 7678 - RNA, 25 nt, Artificial Sequence
  Description of Artificial Sequence: Synthetic oligonucleotide
aaugagcuaagauuguacuguuuuc

SEQ ID NO: 7679 - RNA, 25 nt, Artificial Sequence
  Description of Artificial Sequence: Synthetic oligonucleotide
ccaguucaucgauuuucuauuaugg

SEQ ID NO: 7680 - RNA, 25 nt, Artificial Sequence
  Description of Artificial Sequence: Synthetic oligonucleotide
gaaaacuguguugccacaguagaac

SEQ ID NO: 7681 - RNA, 25 nt, Artificial Sequence
  Description of Artificial Sequence: Synthetic oligonucleotide
cugucugugaacagagagacccuug

SEQ ID NO: 7682 - RNA, 25 nt, Artificial Sequence
  Description of Artificial Sequence: Synthetic oligonucleotide
guggguccaugcuaacaaagacaaa

SEQ ID NO: 7683 - RNA, 25 nt, Artificial Sequence
  Description of Artificial Sequence: Synthetic oligonucleotide
aagucugucuuuccugaaccaugug

SEQ ID NO: 7684 - RNA, 25 nt, Artificial Sequence
  Description of Artificial Sequence: Synthetic oligonucleotide
ggauaacuuuacagaaauggacugg

SEQ ID NO: 7685 - RNA, 25 nt, Artificial Sequence
  Description of Artificial Sequence: Synthetic oligonucleotide
gagcucaucugcaaaaggccucuug

SEQ ID NO: 7686 - RNA, 25 nt, Artificial Sequence
  Description of Artificial Sequence: Synthetic oligonucleotide
guaaagacugguuuucugccaauga

SEQ ID NO: 7687 - RNA, 25 nt, Artificial Sequence
  Description of Artificial Sequence: Synthetic oligonucleotide
accaaacagccaagauuuuccucuu

SEQ ID NO: 7688 - RNA, 25 nt, Artificial Sequence
  Description of Artificial Sequence: Synthetic oligonucleotide
ugugauuucuuuaaaagaaugacua

SEQ ID NO: 7689 - RNA, 25 nt, Artificial Sequence
  Description of Artificial Sequence: Synthetic oligonucleotide
auauaauuuauuuccacuaaaaaua

SEQ ID NO: 7690 - RNA, 25 nt, Artificial Sequence
  Description of Artificial Sequence: Synthetic oligonucleotide
auuguuucugcauucauuuuuauag

SEQ ID NO: 7691 - RNA, 25 nt, Artificial Sequence
  Description of Artificial Sequence: Synthetic oligonucleotide
gcaacaacaauugguaaaacucacu

SEQ ID NO: 7692 - RNA, 25 nt, Artificial Sequence
  Description of Artificial Sequence: Synthetic oligonucleotide
ugugaucaauauuuuuauaucaugc

SEQ ID NO: 7693 - RNA, 25 nt, Artificial Sequence
  Description of Artificial Sequence: Synthetic oligonucleotide
caaaauauguuuaaaauaaaaugaa

SEQ ID NO: 7694 - RNA, 25 nt, Artificial Sequence
  Description of Artificial Sequence: Synthetic oligonucleotide
uaaaauaaaaugaaaauuguauuau

SEQ ID NO: 7695 - RNA, 2128 nt, Homo sapiens
caagacuucucugcauuuucugccaaaaucugugucagauuuaagacacaugcuucugcaagcuuccaugaagguugugcaaaaaaguuucaauccagaguuggguuccagcuuucuguagcuguaagcauugguggccacaccaccuccuuacaaagcaacuagaaccugcggcauacauuggagagauuuuuuuaauuuucuggacaugaaguaaauuuagagugcuuucuaauuucagguagaagacauguccaccuucugauuauuuuuggagaacauuuugauuuuuuucaucucucucuccccaccccuaagauugugcaaaaaaagcguaccuugccuaauugaaauaauuucauuggauuuugaucagaacugauuauuugguuuucugugugaaguuuugagguuucaaacuuuccuucuggagaaugccuuuugaaacaauuuucucuagcugccugaugucaacugcuuaguaaucaguggauauugaaauauucaaaauguacagagaguggguaguggugaauguuuucaugauguuguacguccagcuggugcagggcuccaguaaugaacauggaccagugaagcgaucaucucaguccacauuggaacgaucugaacagcagaucagggcugcuucuaguuuggaggaacuacuucgaauuacucacucugaggacuggaagcuguggagaugcaggcugaggcucaaaaguuuuaccaguauggacucucgcucagcaucccaucgguccacuagguuugcggcaacuuucuaugacauugaaacacuaaaaguuauagaugaagaauggcaaagaacucagugcagcccuagagaaacgugcguggagguggccagugagcuggggaagaguaccaacacauucuucaagcccccuugugugaacguguuccgaugugguggcuguugcaaugaagagagccuuaucuguaugaacaccagcaccucguacauuuccaaacagcucuuugagauaucagugccuuugacaucaguaccugaauuagugccuguuaaaguugccaaucauacagguuguaagugcuugccaacagccccccgccauccauacucaauuaucagaagauccauccagaucccugaagaagaucgcuguucccauuccaagaaacucuguccuauugacaugcuaugggauagcaacaaauguaaauguguuuugcaggaggaaaauccacuugcuggaacagaagaccacucucaucuccaggaaccagcucucugugggccacacaugauguuugacgaagaucguugcgagugugucuguaaaacaccaugucccaaagaucuaauccagcaccccaaaaacugcaguugcuuugagugcaaagaaagucuggagaccugcugccagaagcacaagcuauuucacccagacaccugcagcugugaggacagaugccccuuucauaccagaccaugugcaaguggcaaaacagcaugugcaaagcauugccgcuuuccaaaggagaaaagggcugcccaggggccccacagccgaaagaauccuugauucagcguuccaaguuccccaucccugucauuuuuaacagcaugcugcuuugccaaguugcugucacuguuuuuuucccagguguuaaaaaaaaaauccauuuuacacagcaccacagugaauccagaccaaccuuccauucacaccagcuaaggagucccugguucauugauggaugucuucuagcugcagaugccucugcgcaccaaggaauggagaggaggggacccauguaauccuuuuguuuaguuuuguuuuuguuuuuuggugaaugagaaaggugugcuggucauggaauggcaggugucauaugacugauuacucagagcagaugaggaaaacuguagucucugaguccuuugcuaaucgcaacucuugugaauuauucugauucuuuuuuaugcagaauuugauucguaugaucaguacugacuuucugauuacuguccagcuuauagucuuccaguuuaaugaacuaccaucugauguuucauauuuaaguguauuuaaagaaaauaaacaccauuauucaagccaaaaaaaaaaaaaaaaaa

SEQ ID NO: 7696 - RNA, 19 nt, Artificial Sequence
  Description of Artificial Sequence: Synthetic oligonucleotide
caagacuucucugcauuuu

SEQ ID NO: 7697 - RNA, 19 nt, Artificial Sequence
  Description of Artificial Sequence: Synthetic oligonucleotide
ucugccaaaaucuguguca

SEQ ID NO: 7698 - RNA, 19 nt, Artificial Sequence
  Description of Artificial Sequence: Synthetic oligonucleotide
agauuuaagacacaugcuu

SEQ ID NO: 7699 - RNA, 19 nt, Artificial Sequence
  Description of Artificial Sequence: Synthetic oligonucleotide
ucugcaagcuuccaugaag

SEQ ID NO: 7700 - RNA, 19 nt, Artificial Sequence
  Description of Artificial Sequence: Synthetic oligonucleotide
gguugugcaaaaaaguuuc

SEQ ID NO: 7701 - RNA, 19 nt, Artificial Sequence
  Description of Artificial Sequence: Synthetic oligonucleotide
caauccagaguuggguucc

SEQ ID NO: 7702 - RNA, 19 nt, Artificial Sequence
  Description of Artificial Sequence: Synthetic oligonucleotide
cagcuuucuguagcuguaa

SEQ ID NO: 7703 - RNA, 19 nt, Artificial Sequence
  Description of Artificial Sequence: Synthetic oligonucleotide
agcauugguggccacacca

SEQ ID NO: 7704 - RNA, 19 nt, Artificial Sequence
  Description of Artificial Sequence: Synthetic oligonucleotide
accuccuuacaaagcaacu

SEQ ID NO: 7705 - RNA, 19 nt, Artificial Sequence
  Description of Artificial Sequence: Synthetic oligonucleotide
uagaaccugcggcauacau

SEQ ID NO: 7706 - RNA, 19 nt, Artificial Sequence
  Description of Artificial Sequence: Synthetic oligonucleotide
uuggagagauuuuuuuaau

SEQ ID NO: 7707 - RNA, 19 nt, Artificial Sequence
  Description of Artificial Sequence: Synthetic oligonucleotide
uuuucuggacaugaaguaa

SEQ ID NO: 7708 - RNA, 19 nt, Artificial Sequence
  Description of Artificial Sequence: Synthetic oligonucleotide
aauuuagagugcuuucuaa

SEQ ID NO: 7709 - RNA, 19 nt, Artificial Sequence
  Description of Artificial Sequence: Synthetic oligonucleotide
auuucagguagaagacaug

SEQ ID NO: 7710 - RNA, 19 nt, Artificial Sequence
  Description of Artificial Sequence: Synthetic oligonucleotide
guccaccuucugauuauuu

SEQ ID NO: 7711 - RNA, 19 nt, Artificial Sequence
  Description of Artificial Sequence: Synthetic oligonucleotide
uuuggagaacauuuugauu

SEQ ID NO: 7712 - RNA, 19 nt, Artificial Sequence
  Description of Artificial Sequence: Synthetic oligonucleotide
uuuuuucaucucucucucc

SEQ ID NO: 7713 - RNA, 19 nt, Artificial Sequence
  Description of Artificial Sequence: Synthetic oligonucleotide
cccaccccuaagauugugc

SEQ ID NO: 7714 - RNA, 19 nt, Artificial Sequence
  Description of Artificial Sequence: Synthetic oligonucleotide
caaaaaaagcguaccuugc

SEQ ID NO: 7715 - RNA, 19 nt, Artificial Sequence
  Description of Artificial Sequence: Synthetic oligonucleotide
ccuaauugaaauaauuuca

SEQ ID NO: 7716 - RNA, 19 nt, Artificial Sequence
  Description of Artificial Sequence: Synthetic oligonucleotide
auuggauuuugaucagaac

SEQ ID NO: 7717 - RNA, 19 nt, Artificial Sequence
  Description of Artificial Sequence: Synthetic oligonucleotide
cugauuauuugguuuucug

SEQ ID NO: 7718 - RNA, 19 nt, Artificial Sequence
  Description of Artificial Sequence: Synthetic oligonucleotide
gugugaaguuuugagguuu

SEQ ID NO: 7719 - RNA, 19 nt, Artificial Sequence
  Description of Artificial Sequence: Synthetic oligonucleotide
ucaaacuuuccuucuggag

SEQ ID NO: 7720 - RNA, 19 nt, Artificial Sequence
  Description of Artificial Sequence: Synthetic oligonucleotide
gaaugccuuuugaaacaau

SEQ ID NO: 7721 - RNA, 19 nt, Artificial Sequence
  Description of Artificial Sequence: Synthetic oligonucleotide
uuuucucuagcugccugau

SEQ ID NO: 7722 - RNA, 19 nt, Artificial Sequence
  Description of Artificial Sequence: Synthetic oligonucleotide
ugucaacugcuuaguaauc

SEQ ID NO: 7723 - RNA, 19 nt, Artificial Sequence
  Description of Artificial Sequence: Synthetic oligonucleotide
caguggauauugaaauauu

SEQ ID NO: 7724 - RNA, 19 nt, Artificial Sequence
  Description of Artificial Sequence: Synthetic oligonucleotide
ucaaaauguacagagagug

SEQ ID NO: 7725 - RNA, 19 nt, Artificial Sequence
  Description of Artificial Sequence: Synthetic oligonucleotide
ggguaguggugaauguuuu

SEQ ID NO: 7726 - RNA, 19 nt, Artificial Sequence
  Description of Artificial Sequence: Synthetic oligonucleotide
ucaugauguuguacgucca

SEQ ID NO: 7727 - RNA, 19 nt, Artificial Sequence
  Description of Artificial Sequence: Synthetic oligonucleotide
agcuggugcagggcuccag

SEQ ID NO: 7728 - RNA, 19 nt, Artificial Sequence
  Description of Artificial Sequence: Synthetic oligonucleotide
guaaugaacauggaccagu

SEQ ID NO: 7729 - RNA, 19 nt, Artificial Sequence
  Description of Artificial Sequence: Synthetic oligonucleotide
ugaagcgaucaucucaguc

SEQ ID NO: 7730 - RNA, 19 nt, Artificial Sequence
  Description of Artificial Sequence: Synthetic oligonucleotide
ccacauuggaacgaucuga

SEQ ID NO: 7731 - RNA, 19 nt, Artificial Sequence
  Description of Artificial Sequence: Synthetic oligonucleotide
aacagcagaucagggcugc

SEQ ID NO: 7732 - RNA, 19 nt, Artificial Sequence
  Description of Artificial Sequence: Synthetic oligonucleotide
cuucuaguuuggaggaacu

SEQ ID NO: 7733 - RNA, 19 nt, Artificial Sequence
  Description of Artificial Sequence: Synthetic oligonucleotide
uacuucgaauuacucacuc

SEQ ID NO: 7734 - RNA, 19 nt, Artificial Sequence
  Description of Artificial Sequence: Synthetic oligonucleotide
cugaggacuggaagcugug

SEQ ID NO: 7735 - RNA, 19 nt, Artificial Sequence
  Description of Artificial Sequence: Synthetic oligonucleotide
ggagaugcaggcugaggcu

SEQ ID NO: 7736 - RNA, 19 nt, Artificial Sequence
  Description of Artificial Sequence: Synthetic oligonucleotide
ucaaaaguuuuaccaguau

SEQ ID NO: 7737 - RNA, 19 nt, Artificial Sequence
  Description of Artificial Sequence: Synthetic oligonucleotide
uggacucucgcucagcauc

SEQ ID NO: 7738 - RNA, 19 nt, Artificial Sequence
  Description of Artificial Sequence: Synthetic oligonucleotide
cccaucgguccacuagguu

SEQ ID NO: 7739 - RNA, 19 nt, Artificial Sequence
  Description of Artificial Sequence: Synthetic oligonucleotide
uugcggcaacuuucuauga

SEQ ID NO: 7740 - RNA, 19 nt, Artificial Sequence
  Description of Artificial Sequence: Synthetic oligonucleotide
acauugaaacacuaaaagu

SEQ ID NO: 7741 - RNA, 19 nt, Artificial Sequence
  Description of Artificial Sequence: Synthetic oligonucleotide
uuauagaugaagaauggca

SEQ ID NO: 7742 - RNA, 19 nt, Artificial Sequence
  Description of Artificial Sequence: Synthetic oligonucleotide
aaagaacucagugcagccc

SEQ ID NO: 7743 - RNA, 19 nt, Artificial Sequence
  Description of Artificial Sequence: Synthetic oligonucleotide
cuagagaaacgugcgugga

SEQ ID NO: 7744 - RNA, 19 nt, Artificial Sequence
  Description of Artificial Sequence: Synthetic oligonucleotide
agguggccagugagcuggg

SEQ ID NO: 7745 - RNA, 19 nt, Artificial Sequence
  Description of Artificial Sequence: Synthetic oligonucleotide
ggaagaguaccaacacauu

SEQ ID NO: 7746 - RNA, 19 nt, Artificial Sequence
  Description of Artificial Sequence: Synthetic oligonucleotide
ucuucaagcccccuugugu

SEQ ID NO: 7747 - RNA, 19 nt, Artificial Sequence
  Description of Artificial Sequence: Synthetic oligonucleotide
ugaacguguuccgaugugg

SEQ ID NO: 7748 - RNA, 19 nt, Artificial Sequence
  Description of Artificial Sequence: Synthetic oligonucleotide
guggcuguugcaaugaaga

SEQ ID NO: 7749 - RNA, 19 nt, Artificial Sequence
  Description of Artificial Sequence: Synthetic oligonucleotide
agagccuuaucuguaugaa

SEQ ID NO: 7750 - RNA, 19 nt, Artificial Sequence
  Description of Artificial Sequence: Synthetic oligonucleotide
acaccagcaccucguacau

SEQ ID NO: 7751 - RNA, 19 nt, Artificial Sequence
  Description of Artificial Sequence: Synthetic oligonucleotide
uuuccaaacagcucuuuga

SEQ ID NO: 7752 - RNA, 19 nt, Artificial Sequence
  Description of Artificial Sequence: Synthetic oligonucleotide
agauaucagugccuuugac

SEQ ID NO: 7753 - RNA, 19 nt, Artificial Sequence
  Description of Artificial Sequence: Synthetic oligonucleotide
caucaguaccugaauuagu

SEQ ID NO: 7754 - RNA, 19 nt, Artificial Sequence
  Description of Artificial Sequence: Synthetic oligonucleotide
ugccuguuaaaguugccaa

SEQ ID NO: 7755 - RNA, 19 nt, Artificial Sequence
  Description of Artificial Sequence: Synthetic oligonucleotide
aucauacagguuguaagug

SEQ ID NO: 7756 - RNA, 19 nt, Artificial Sequence
  Description of Artificial Sequence: Synthetic oligonucleotide
gcuugccaacagccccccg

SEQ ID NO: 7757 - RNA, 19 nt, Artificial Sequence
  Description of Artificial Sequence: Synthetic oligonucleotide
gccauccauacucaauuau

SEQ ID NO: 7758 - RNA, 19 nt, Artificial Sequence
  Description of Artificial Sequence: Synthetic oligonucleotide
ucagaagauccauccagau

SEQ ID NO: 7759 - RNA, 19 nt, Artificial Sequence
  Description of Artificial Sequence: Synthetic oligonucleotide
ucccugaagaagaucgcug

SEQ ID NO: 7760 - RNA, 19 nt, Artificial Sequence
  Description of Artificial Sequence: Synthetic oligonucleotide
guucccauuccaagaaacu

SEQ ID NO: 7761 - RNA, 19 nt, Artificial Sequence
  Description of Artificial Sequence: Synthetic oligonucleotide
ucuguccuauugacaugcu

SEQ ID NO: 7762 - RNA, 19 nt, Artificial Sequence
  Description of Artificial Sequence: Synthetic oligonucleotide
uaugggauagcaacaaaug

SEQ ID NO: 7763 - RNA, 19 nt, Artificial Sequence
  Description of Artificial Sequence: Synthetic oligonucleotide
guaaauguguuuugcagga

SEQ ID NO: 7764 - RNA, 19 nt, Artificial Sequence
  Description of Artificial Sequence: Synthetic oligonucleotide
aggaaaauccacuugcugg

SEQ ID NO: 7765 - RNA, 19 nt, Artificial Sequence
  Description of Artificial Sequence: Synthetic oligonucleotide
gaacagaagaccacucuca

SEQ ID NO: 7766 - RNA, 19 nt, Artificial Sequence
  Description of Artificial Sequence: Synthetic oligonucleotide
aucuccaggaaccagcucu

SEQ ID NO: 7767 - RNA, 19 nt, Artificial Sequence
  Description of Artificial Sequence: Synthetic oligonucleotide
ucugugggccacacaugau

SEQ ID NO: 7768 - RNA, 19 nt, Artificial Sequence
  Description of Artificial Sequence: Synthetic oligonucleotide
uguuugacgaagaucguug

SEQ ID NO: 7769 - RNA, 19 nt, Artificial Sequence
  Description of Artificial Sequence: Synthetic oligonucleotide
gcgagugugucuguaaaac

SEQ ID NO: 7770 - RNA, 19 nt, Artificial Sequence
  Description of Artificial Sequence: Synthetic oligonucleotide
caccaugucccaaagaucu

SEQ ID NO: 7771 - RNA, 19 nt, Artificial Sequence
  Description of Artificial Sequence: Synthetic oligonucleotide
uaauccagcaccccaaaaa

SEQ ID NO: 7772 - RNA, 19 nt, Artificial Sequence
  Description of Artificial Sequence: Synthetic oligonucleotide
acugcaguugcuuugagug

SEQ ID NO: 7773 - RNA, 19 nt, Artificial Sequence
  Description of Artificial Sequence: Synthetic oligonucleotide
gcaaagaaagucuggagac

SEQ ID NO: 7774 - RNA, 19 nt, Artificial Sequence
  Description of Artificial Sequence: Synthetic oligonucleotide
ccugcugccagaagcacaa

SEQ ID NO: 7775 - RNA, 19 nt, Artificial Sequence
  Description of Artificial Sequence: Synthetic oligonucleotide
agcuauuucacccagacac

SEQ ID NO: 7776 - RNA, 19 nt, Artificial Sequence
  Description of Artificial Sequence: Synthetic oligonucleotide
ccugcagcugugaggacag

SEQ ID NO: 7777 - RNA, 19 nt, Artificial Sequence
  Description of Artificial Sequence: Synthetic oligonucleotide
gaugccccuuucauaccag

SEQ ID NO: 7778 - RNA, 19 nt, Artificial Sequence
  Description of Artificial Sequence: Synthetic oligonucleotide
gaccaugugcaaguggcaa

SEQ ID NO: 7779 - RNA, 19 nt, Artificial Sequence
  Description of Artificial Sequence: Synthetic oligonucleotide
aaacagcaugugcaaagca

SEQ ID NO: 7780 - RNA, 19 nt, Artificial Sequence
  Description of Artificial Sequence: Synthetic oligonucleotide
auugccgcuuuccaaagga

SEQ ID NO: 7781 - RNA, 19 nt, Artificial Sequence
  Description of Artificial Sequence: Synthetic oligonucleotide
agaaaagggcugcccaggg

SEQ ID NO: 7782 - RNA, 19 nt, Artificial Sequence
  Description of Artificial Sequence: Synthetic oligonucleotide
ggccccacagccgaaagaa

SEQ ID NO: 7783 - RNA, 19 nt, Artificial Sequence
  Description of Artificial Sequence: Synthetic oligonucleotide
auccuugauucagcguucc

SEQ ID NO: 7784 - RNA, 19 nt, Artificial Sequence
  Description of Artificial Sequence: Synthetic oligonucleotide
caaguuccccaucccuguc

SEQ ID NO: 7785 - RNA, 19 nt, Artificial Sequence
  Description of Artificial Sequence: Synthetic oligonucleotide
cauuuuuaacagcaugcug

SEQ ID NO: 7786 - RNA, 19 nt, Artificial Sequence
  Description of Artificial Sequence: Synthetic oligonucleotide
gcuuugccaaguugcuguc

SEQ ID NO: 7787 - RNA, 19 nt, Artificial Sequence
  Description of Artificial Sequence: Synthetic oligonucleotide
cacuguuuuuuucccaggu

SEQ ID NO: 7788 - RNA, 19 nt, Artificial Sequence
  Description of Artificial Sequence: Synthetic oligonucleotide
uuuuacacagcaccacagu

SEQ ID NO: 7789 - RNA, 19 nt, Artificial Sequence
  Description of Artificial Sequence: Synthetic oligonucleotide
ugaauccagaccaaccuuc

SEQ ID NO: 7790 - RNA, 19 nt, Artificial Sequence
  Description of Artificial Sequence: Synthetic oligonucleotide
ccauucacaccagcuaagg

SEQ ID NO: 7791 - RNA, 19 nt, Artificial Sequence
  Description of Artificial Sequence: Synthetic oligonucleotide
gagucccugguucauugau

SEQ ID NO: 7792 - RNA, 19 nt, Artificial Sequence
  Description of Artificial Sequence: Synthetic oligonucleotide
uggaugucuucuagcugca

SEQ ID NO: 7793 - RNA, 19 nt, Artificial Sequence
  Description of Artificial Sequence: Synthetic oligonucleotide
agaugccucugcgcaccaa

SEQ ID NO: 7794 - RNA, 19 nt, Artificial Sequence
  Description of Artificial Sequence: Synthetic oligonucleotide
aggaauggagaggagggga

SEQ ID NO: 7795 - RNA, 19 nt, Artificial Sequence
  Description of Artificial Sequence: Synthetic oligonucleotide
acccauguaauccuuuugu

SEQ ID NO: 7796 - RNA, 19 nt, Artificial Sequence
  Description of Artificial Sequence: Synthetic oligonucleotide
uuuaguuuuguuuuuguuu

SEQ ID NO: 7797 - RNA, 19 nt, Artificial Sequence
  Description of Artificial Sequence: Synthetic oligonucleotide
uuuuggugaaugagaaagg

SEQ ID NO: 7798 - RNA, 19 nt, Artificial Sequence
  Description of Artificial Sequence: Synthetic oligonucleotide
gugugcuggucauggaaug

SEQ ID NO: 7799 - RNA, 19 nt, Artificial Sequence
  Description of Artificial Sequence: Synthetic oligonucleotide
ggcaggugucauaugacug

SEQ ID NO: 7800 - RNA, 19 nt, Artificial Sequence
  Description of Artificial Sequence: Synthetic oligonucleotide
gauuacucagagcagauga

SEQ ID NO: 7801 - RNA, 19 nt, Artificial Sequence
  Description of Artificial Sequence: Synthetic oligonucleotide
aggaaaacuguagucucug

SEQ ID NO: 7802 - RNA, 19 nt, Artificial Sequence
  Description of Artificial Sequence: Synthetic oligonucleotide
gaguccuuugcuaaucgca

SEQ ID NO: 7803 - RNA, 19 nt, Artificial Sequence
  Description of Artificial Sequence: Synthetic oligonucleotide
aacucuugugaauuauucu

SEQ ID NO: 7804 - RNA, 19 nt, Artificial Sequence
  Description of Artificial Sequence: Synthetic oligonucleotide
ugauucuuuuuuaugcaga

SEQ ID NO: 7805 - RNA, 19 nt, Artificial Sequence
  Description of Artificial Sequence: Synthetic oligonucleotide
aauuugauucguaugauca

SEQ ID NO: 7806 - RNA, 19 nt, Artificial Sequence
  Description of Artificial Sequence: Synthetic oligonucleotide
aguacugacuuucugauua

SEQ ID NO: 7807 - RNA, 19 nt, Artificial Sequence
  Description of Artificial Sequence: Synthetic oligonucleotide
acuguccagcuuauagucu

SEQ ID NO: 7808 - RNA, 19 nt, Artificial Sequence
  Description of Artificial Sequence: Synthetic oligonucleotide
uuccaguuuaaugaacuac

SEQ ID NO: 7809 - RNA, 19 nt, Artificial Sequence
  Description of Artificial Sequence: Synthetic oligonucleotide
ccaucugauguuucauauu

SEQ ID NO: 7810 - RNA, 19 nt, Artificial Sequence
  Description of Artificial Sequence: Synthetic oligonucleotide
uuaaguguauuuaaagaaa

SEQ ID NO: 7811 - RNA, 19 nt, Artificial Sequence
  Description of Artificial Sequence: Synthetic oligonucleotide
aauaaacaccauuauucaa

SEQ ID NO: 7812 - RNA, 25 nt, Artificial Sequence
  Description of Artificial Sequence: Synthetic oligonucleotide
caagacuucucugcauuuucugcca

SEQ ID NO: 7813 - RNA, 25 nt, Artificial Sequence
  Description of Artificial Sequence: Synthetic oligonucleotide
aaaaucugugucagauuuaagacac

SEQ ID NO: 7814 - RNA, 25 nt, Artificial Sequence
  Description of Artificial Sequence: Synthetic oligonucleotide
caugcuucugcaagcuuccaugaag

SEQ ID NO: 7815 - RNA, 25 nt, Artificial Sequence
  Description of Artificial Sequence: Synthetic oligonucleotide
gguugugcaaaaaaguuucaaucca

SEQ ID NO: 7816 - RNA, 25 nt, Artificial Sequence
  Description of Artificial Sequence: Synthetic oligonucleotide
agaguuggguuccagcuuucuguag

SEQ ID NO: 7817 - RNA, 25 nt, Artificial Sequence
  Description of Artificial Sequence: Synthetic oligonucleotide
gcuguaagcauugguggccacacca

SEQ ID NO: 7818 - RNA, 25 nt, Artificial Sequence
  Description of Artificial Sequence: Synthetic oligonucleotide
accuccuuacaaagcaacuagaacc

SEQ ID NO: 7819 - RNA, 25 nt, Artificial Sequence
  Description of Artificial Sequence: Synthetic oligonucleotide
cugcggcauacauuggagagauuuu

SEQ ID NO: 7820 - RNA, 25 nt, Artificial Sequence
  Description of Artificial Sequence: Synthetic oligonucleotide
uuuuaauuuucuggacaugaaguaa

SEQ ID NO: 7821 - RNA, 25 nt, Artificial Sequence
  Description of Artificial Sequence: Synthetic oligonucleotide
aauuuagagugcuuucuaauuucag

SEQ ID NO: 7822 - RNA, 25 nt, Artificial Sequence
  Description of Artificial Sequence: Synthetic oligonucleotide
gguagaagacauguccaccuucuga

SEQ ID NO: 7823 - RNA, 25 nt, Artificial Sequence
  Description of Artificial Sequence: Synthetic oligonucleotide
auuauuuuuggagaacauuuugauu

SEQ ID NO: 7824 - RNA, 25 nt, Artificial Sequence
  Description of Artificial Sequence: Synthetic oligonucleotide
uuuuuucaucucucucuccccaccc

SEQ ID NO: 7825 - RNA, 25 nt, Artificial Sequence
  Description of Artificial Sequence: Synthetic oligonucleotide
ccuaagauugugcaaaaaaagcgua

SEQ ID NO: 7826 - RNA, 25 nt, Artificial Sequence
  Description of Artificial Sequence: Synthetic oligonucleotide
accuugccuaauugaaauaauuuca

SEQ ID NO: 7827 - RNA, 25 nt, Artificial Sequence
  Description of Artificial Sequence: Synthetic oligonucleotide
auuggauuuugaucagaacugauua

SEQ ID NO: 7828 - RNA, 25 nt, Artificial Sequence
  Description of Artificial Sequence: Synthetic oligonucleotide
auuugguuuucugugugaaguuuug

SEQ ID NO: 7829 - RNA, 25 nt, Artificial Sequence
  Description of Artificial Sequence: Synthetic oligonucleotide
gagguuucaaacuuuccuucuggag

SEQ ID NO: 7830 - RNA, 25 nt, Artificial Sequence
  Description of Artificial Sequence: Synthetic oligonucleotide
gaaugccuuuugaaacaauuuucuc

SEQ ID NO: 7831 - RNA, 25 nt, Artificial Sequence
  Description of Artificial Sequence: Synthetic oligonucleotide
cuagcugccugaugucaacugcuua

SEQ ID NO: 7832 - RNA, 25 nt, Artificial Sequence
  Description of Artificial Sequence: Synthetic oligonucleotide
aguaaucaguggauauugaaauauu

SEQ ID NO: 7833 - RNA, 25 nt, Artificial Sequence
  Description of Artificial Sequence: Synthetic oligonucleotide
ucaaaauguacagagaguggguagu

SEQ ID NO: 7834 - RNA, 25 nt, Artificial Sequence
  Description of Artificial Sequence: Synthetic oligonucleotide
uggugaauguuuucaugauguugua

SEQ ID NO: 7835 - RNA, 25 nt, Artificial Sequence
  Description of Artificial Sequence: Synthetic oligonucleotide
acguccagcuggugcagggcuccag

SEQ ID NO: 7836 - RNA, 25 nt, Artificial Sequence
  Description of Artificial Sequence: Synthetic oligonucleotide
guaaugaacauggaccagugaagcg

SEQ ID NO: 7837 - RNA, 25 nt, Artificial Sequence
  Description of Artificial Sequence: Synthetic oligonucleotide
gaucaucucaguccacauuggaacg

SEQ ID NO: 7838 - RNA, 25 nt, Artificial Sequence
  Description of Artificial Sequence: Synthetic oligonucleotide
gaucugaacagcagaucagggcugc

SEQ ID NO: 7839 - RNA, 25 nt, Artificial Sequence
  Description of Artificial Sequence: Synthetic oligonucleotide
cuucuaguuuggaggaacuacuucg

SEQ ID NO: 7840 - RNA, 25 nt, Artificial Sequence
  Description of Artificial Sequence: Synthetic oligonucleotide
gaauuacucacucugaggacuggaa

SEQ ID NO: 7841 - RNA, 25 nt, Artificial Sequence
  Description of Artificial Sequence: Synthetic oligonucleotide
agcuguggagaugcaggcugaggcu

SEQ ID NO: 7842 - RNA, 25 nt, Artificial Sequence
  Description of Artificial Sequence: Synthetic oligonucleotide
ucaaaaguuuuaccaguauggacuc

SEQ ID NO: 7843 - RNA, 25 nt, Artificial Sequence
  Description of Artificial Sequence: Synthetic oligonucleotide
cucgcucagcaucccaucgguccac

SEQ ID NO: 7844 - RNA, 25 nt, Artificial Sequence
  Description of Artificial Sequence: Synthetic oligonucleotide
cuagguuugcggcaacuuucuauga

SEQ ID NO: 7845 - RNA, 25 nt, Artificial Sequence
  Description of Artificial Sequence: Synthetic oligonucleotide
acauugaaacacuaaaaguuauaga

SEQ ID NO: 7846 - RNA, 25 nt, Artificial Sequence
  Description of Artificial Sequence: Synthetic oligonucleotide
augaagaauggcaaagaacucagug

SEQ ID NO: 7847 - RNA, 25 nt, Artificial Sequence
  Description of Artificial Sequence: Synthetic oligonucleotide
gcagcccuagagaaacgugcgugga

SEQ ID NO: 7848 - RNA, 25 nt, Artificial Sequence
  Description of Artificial Sequence: Synthetic oligonucleotide
agguggccagugagcuggggaagag

SEQ ID NO: 7849 - RNA, 25 nt, Artificial Sequence
  Description of Artificial Sequence: Synthetic oligonucleotide
guaccaacacauucuucaagccccc

SEQ ID NO: 7850 - RNA, 25 nt, Artificial Sequence
  Description of Artificial Sequence: Synthetic oligonucleotide
cuugugugaacguguuccgaugugg

SEQ ID NO: 7851 - RNA, 25 nt, Artificial Sequence
  Description of Artificial Sequence: Synthetic oligonucleotide
guggcuguugcaaugaagagagccu

SEQ ID NO: 7852 - RNA, 25 nt, Artificial Sequence
  Description of Artificial Sequence: Synthetic oligonucleotide
uuaucuguaugaacaccagcaccuc

SEQ ID NO: 7853 - RNA, 25 nt, Artificial Sequence
  Description of Artificial Sequence: Synthetic oligonucleotide
cguacauuuccaaacagcucuuuga

SEQ ID NO: 7854 - RNA, 25 nt, Artificial Sequence
  Description of Artificial Sequence: Synthetic oligonucleotide
agauaucagugccuuugacaucagu

SEQ ID NO: 7855 - RNA, 25 nt, Artificial Sequence
  Description of Artificial Sequence: Synthetic oligonucleotide
uaccugaauuagugccuguuaaagu

SEQ ID NO: 7856 - RNA, 25 nt, Artificial Sequence
  Description of Artificial Sequence: Synthetic oligonucleotide
uugccaaucauacagguuguaagug

SEQ ID NO: 7857 - RNA, 25 nt, Artificial Sequence
  Description of Artificial Sequence: Synthetic oligonucleotide
gcuugccaacagccccccgccaucc

SEQ ID NO: 7858 - RNA, 25 nt, Artificial Sequence
  Description of Artificial Sequence: Synthetic oligonucleotide
cauacucaauuaucagaagauccau

SEQ ID NO: 7859 - RNA, 25 nt, Artificial Sequence
  Description of Artificial Sequence: Synthetic oligonucleotide
uccagaucccugaagaagaucgcug

SEQ ID NO: 7860 - RNA, 25 nt, Artificial Sequence
  Description of Artificial Sequence: Synthetic oligonucleotide
guucccauuccaagaaacucugucc

SEQ ID NO: 7861 - RNA, 25 nt, Artificial Sequence
  Description of Artificial Sequence: Synthetic oligonucleotide
cuauugacaugcuaugggauagcaa

SEQ ID NO: 7862 - RNA, 25 nt, Artificial Sequence
  Description of Artificial Sequence: Synthetic oligonucleotide
acaaauguaaauguguuuugcagga

SEQ ID NO: 7863 - RNA, 25 nt, Artificial Sequence
  Description of Artificial Sequence: Synthetic oligonucleotide
aggaaaauccacuugcuggaacaga

SEQ ID NO: 7864 - RNA, 25 nt, Artificial Sequence
  Description of Artificial Sequence: Synthetic oligonucleotide
aagaccacucucaucuccaggaacc

SEQ ID NO: 7865 - RNA, 25 nt, Artificial Sequence
  Description of Artificial Sequence: Synthetic oligonucleotide
cagcucucugugggccacacaugau

SEQ ID NO: 7866 - RNA, 25 nt, Artificial Sequence
  Description of Artificial Sequence: Synthetic oligonucleotide
uguuugacgaagaucguugcgagug

SEQ ID NO: 7867 - RNA, 25 nt, Artificial Sequence
  Description of Artificial Sequence: Synthetic oligonucleotide
gugucuguaaaacaccaugucccaa

SEQ ID NO: 7868 - RNA, 25 nt, Artificial Sequence
  Description of Artificial Sequence: Synthetic oligonucleotide
aagaucuaauccagcaccccaaaaa

SEQ ID NO: 7869 - RNA, 25 nt, Artificial Sequence
  Description of Artificial Sequence: Synthetic oligonucleotide
acugcaguugcuuugagugcaaaga

SEQ ID NO: 7870 - RNA, 25 nt, Artificial Sequence
  Description of Artificial Sequence: Synthetic oligonucleotide
aaagucuggagaccugcugccagaa

SEQ ID NO: 7871 - RNA, 25 nt, Artificial Sequence
  Description of Artificial Sequence: Synthetic oligonucleotide
agcacaagcuauuucacccagacac

SEQ ID NO: 7872 - RNA, 25 nt, Artificial Sequence
  Description of Artificial Sequence: Synthetic oligonucleotide
ccugcagcugugaggacagaugccc

SEQ ID NO: 7873 - RNA, 25 nt, Artificial Sequence
  Description of Artificial Sequence: Synthetic oligonucleotide
ccuuucauaccagaccaugugcaag

SEQ ID NO: 7874 - RNA, 25 nt, Artificial Sequence
  Description of Artificial Sequence: Synthetic oligonucleotide
guggcaaaacagcaugugcaaagca

SEQ ID NO: 7875 - RNA, 25 nt, Artificial Sequence
  Description of Artificial Sequence: Synthetic oligonucleotide
auugccgcuuuccaaaggagaaaag

SEQ ID NO: 7876 - RNA, 25 nt, Artificial Sequence
  Description of Artificial Sequence: Synthetic oligonucleotide
gggcugcccaggggccccacagccg

SEQ ID NO: 7877 - RNA, 25 nt, Artificial Sequence
  Description of Artificial Sequence: Synthetic oligonucleotide
gaaagaauccuugauucagcguucc

SEQ ID NO: 7878 - RNA, 25 nt, Artificial Sequence
  Description of Artificial Sequence: Synthetic oligonucleotide
caaguuccccaucccugucauuuuu

SEQ ID NO: 7879 - RNA, 25 nt, Artificial Sequence
  Description of Artificial Sequence: Synthetic oligonucleotide
uaacagcaugcugcuuugccaaguu

SEQ ID NO: 7880 - RNA, 25 nt, Artificial Sequence
  Description of Artificial Sequence: Synthetic oligonucleotide
ugcugucacuguuuuuuucccaggu

SEQ ID NO: 7881 - RNA, 25 nt, Artificial Sequence
  Description of Artificial Sequence: Synthetic oligonucleotide
acagcaccacagugaauccagacca

SEQ ID NO: 7882 - RNA, 25 nt, Artificial Sequence
  Description of Artificial Sequence: Synthetic oligonucleotide
aaccuuccauucacaccagcuaagg

SEQ ID NO: 7883 - RNA, 25 nt, Artificial Sequence
  Description of Artificial Sequence: Synthetic oligonucleotide
gagucccugguucauugauggaugu

SEQ ID NO: 7884 - RNA, 25 nt, Artificial Sequence
  Description of Artificial Sequence: Synthetic oligonucleotide
ucuucuagcugcagaugccucugcg

SEQ ID NO: 7885 - RNA, 25 nt, Artificial Sequence
  Description of Artificial Sequence: Synthetic oligonucleotide
gcaccaaggaauggagaggagggga

SEQ ID NO: 7886 - RNA, 25 nt, Artificial Sequence
  Description of Artificial Sequence: Synthetic oligonucleotide
acccauguaauccuuuuguuuaguu

SEQ ID NO: 7887 - RNA, 25 nt, Artificial Sequence
  Description of Artificial Sequence: Synthetic oligonucleotide
uuuguuuuuguuuuuuggugaauga

SEQ ID NO: 7888 - RNA, 25 nt, Artificial Sequence
  Description of Artificial Sequence: Synthetic oligonucleotide
agaaaggugugcuggucauggaaug

SEQ ID NO: 7889 - RNA, 25 nt, Artificial Sequence
  Description of Artificial Sequence: Synthetic oligonucleotide
ggcaggugucauaugacugauuacu

SEQ ID NO: 7890 - RNA, 25 nt, Artificial Sequence
  Description of Artificial Sequence: Synthetic oligonucleotide
ucagagcagaugaggaaaacuguag

SEQ ID NO: 7891 - RNA, 25 nt, Artificial Sequence
  Description of Artificial Sequence: Synthetic oligonucleotide
gucucugaguccuuugcuaaucgca

SEQ ID NO: 7892 - RNA, 25 nt, Artificial Sequence
  Description of Artificial Sequence: Synthetic oligonucleotide
aacucuugugaauuauucugauucu

SEQ ID NO: 7893 - RNA, 25 nt, Artificial Sequence
  Description of Artificial Sequence: Synthetic oligonucleotide
uuuuuuaugcagaauuugauucgua

SEQ ID NO: 7894 - RNA, 25 nt, Artificial Sequence
  Description of Artificial Sequence: Synthetic oligonucleotide
augaucaguacugacuuucugauua

SEQ ID NO: 7895 - RNA, 25 nt, Artificial Sequence
  Description of Artificial Sequence: Synthetic oligonucleotide
acuguccagcuuauagucuuccagu

SEQ ID NO: 7896 - RNA, 25 nt, Artificial Sequence
  Description of Artificial Sequence: Synthetic oligonucleotide
uuuaaugaacuaccaucugauguuu

SEQ ID NO: 7897 - RNA, 25 nt, Artificial Sequence
  Description of Artificial Sequence: Synthetic oligonucleotide
ucauauuuaaguguauuuaaagaaa

SEQ ID NO: 7898 - RNA, 25 nt, Artificial Sequence
  Description of Artificial Sequence: Synthetic oligonucleotide
aauaaacaccauuauucaagccaaa

SEQ ID NO: 7899 - RNA, 1758 nt, Homo sapiens
cugcugucugcggaggaaacugcaucgacggacggccgcccagcuacgggaggaccuggaguggcacugggcgcccgacggaccauccccgggacccgccugccccucggcgccccgccccgccgggccgcuccccgucggguuccccagccacagccuuaccuacgggcuccugacuccgcaaggcuuccagaagaugcucgaaccaccggccggggccucggggcagcagugagggaggcguccagccccccacucagcucuucuccuccugugccaggggcuccccgggggaugagcauggugguuuucccucggagcccccuggcucgggacgucugagaagaugccggucaugaggcuguucccuugcuuccugcagcuccuggccgggcuggcgcugccugcugugcccccccagcagugggccuugucugcugggaacggcucgucagagguggaagugguacccuuccaggaaguguggggccgcagcuacugccgggcgcuggagaggcugguggacgucguguccgaguaccccagcgagguggagcacauguucagcccauccugugucucccugcugcgcugcaccggcugcugcggcgaugagaaucugcacugugugccgguggagacggccaaugucaccaugcagcuccuaaagauccguucuggggaccggcccuccuacguggagcugacguucucucagcacguucgcugcgaaugccggccucugcgggagaagaugaagccggaaaggaggagacccaagggcagggggaagaggaggagagagaagcagagacccacagacugccaccugugcggcgaugcuguuccccggagguaacccaccccuuggaggagagagaccccgcacccggcucguguauuuauuaccgucacacucuucagugacuccugcugguaccugcccucuauuuauuagccaacuguuucccugcugaaugccucgcucccuucaagacgaggggcagggaaggacaggacccucaggaauucagugccuucaacaacgugagagaaagagagaagccagccacagaccccugggagcuuccgcuuugaaagaagcaagacacguggccucgugaggggcaagcuaggccccagaggcccuggaggucuccaggggccugcagaaggaaagaagggggcccugcuaccuguucuugggccucaggcucugcacagacaagcagcccuugcuuucggagcuccuguccaaaguagggaugcggauccugcuggggccgccacggccuggcuggugggaaggccggcagcgggcggaggggauccagccacuucccccucuucuucugaagaucagaacauucagcucuggagaacagugguugccugggggcuuuugccacuccuugucccccgugaucuccccucacacuuugccauuugcuuguacugggacauuguucuuuccggccaaggugccaccacccugcccccccuaagagacacauacagagugggccccgggcuggagaaagagcugccuggaugagaaacagcucagccaguggggaugaggucaccaggggaggagccugugcgucccagcugaaggcaguggcaggggagcagguuccccaagggcccuggcacccccacaagcugucccugcagggccaucugacugccaagccagauucucuugaauaaaguauucuaguguggaaaaaaaaaaaaaaaaaaaaaaaaaaaaaa

SEQ ID NO: 7900 - RNA, 19 nt, Artificial Sequence
  Description of Artificial Sequence: Synthetic oligonucleotide
cugcugucugcggaggaaa

SEQ ID NO: 7901 - RNA, 19 nt, Artificial Sequence
  Description of Artificial Sequence: Synthetic oligonucleotide
acugcaucgacggacggcc

SEQ ID NO: 7902 - RNA, 19 nt, Artificial Sequence
  Description of Artificial Sequence: Synthetic oligonucleotide
cgcccagcuacgggaggac

SEQ ID NO: 7903 - RNA, 19 nt, Artificial Sequence
  Description of Artificial Sequence: Synthetic oligonucleotide
ccuggaguggcacugggcg

SEQ ID NO: 7904 - RNA, 19 nt, Artificial Sequence
  Description of Artificial Sequence: Synthetic oligonucleotide
gcccgacggaccauccccg

SEQ ID NO: 7905 - RNA, 19 nt, Artificial Sequence
  Description of Artificial Sequence: Synthetic oligonucleotide
gggacccgccugccccucg

SEQ ID NO: 7906 - RNA, 19 nt, Artificial Sequence
  Description of Artificial Sequence: Synthetic oligonucleotide
ggcgccccgccccgccggg

SEQ ID NO: 7907 - RNA, 19 nt, Artificial Sequence
  Description of Artificial Sequence: Synthetic oligonucleotide
gccgcuccccgucggguuc

SEQ ID NO: 7908 - RNA, 19 nt, Artificial Sequence
  Description of Artificial Sequence: Synthetic oligonucleotide
ccccagccacagccuuacc

SEQ ID NO: 7909 - RNA, 19 nt, Artificial Sequence
  Description of Artificial Sequence: Synthetic oligonucleotide
cuacgggcuccugacuccg

SEQ ID NO: 7910 - RNA, 19 nt, Artificial Sequence
  Description of Artificial Sequence: Synthetic oligonucleotide
gcaaggcuuccagaagaug

SEQ ID NO: 7911 - RNA, 19 nt, Artificial Sequence
  Description of Artificial Sequence: Synthetic oligonucleotide
gcucgaaccaccggccggg

SEQ ID NO: 7912 - RNA, 19 nt, Artificial Sequence
  Description of Artificial Sequence: Synthetic oligonucleotide
ggccucggggcagcaguga

SEQ ID NO: 7913 - RNA, 19 nt, Artificial Sequence
  Description of Artificial Sequence: Synthetic oligonucleotide
agggaggcguccagccccc

SEQ ID NO: 7914 - RNA, 19 nt, Artificial Sequence
  Description of Artificial Sequence: Synthetic oligonucleotide
ccacucagcucuucuccuc

SEQ ID NO: 7915 - RNA, 19 nt, Artificial Sequence
  Description of Artificial Sequence: Synthetic oligonucleotide
ccugugccaggggcucccc

SEQ ID NO: 7916 - RNA, 19 nt, Artificial Sequence
  Description of Artificial Sequence: Synthetic oligonucleotide
cgggggaugagcauggugg

SEQ ID NO: 7917 - RNA, 19 nt, Artificial Sequence
  Description of Artificial Sequence: Synthetic oligonucleotide
guuuucccucggagccccc

SEQ ID NO: 7918 - RNA, 19 nt, Artificial Sequence
  Description of Artificial Sequence: Synthetic oligonucleotide
cuggcucgggacgucugag

SEQ ID NO: 7919 - RNA, 19 nt, Artificial Sequence
  Description of Artificial Sequence: Synthetic oligonucleotide
gaagaugccggucaugagg

SEQ ID NO: 7920 - RNA, 19 nt, Artificial Sequence
  Description of Artificial Sequence: Synthetic oligonucleotide
gcuguucccuugcuuccug

SEQ ID NO: 7921 - RNA, 19 nt, Artificial Sequence
  Description of Artificial Sequence: Synthetic oligonucleotide
gcagcuccuggccgggcug

SEQ ID NO: 7922 - RNA, 19 nt, Artificial Sequence
  Description of Artificial Sequence: Synthetic oligonucleotide
ggcgcugccugcugugccc

SEQ ID NO: 7923 - RNA, 19 nt, Artificial Sequence
  Description of Artificial Sequence: Synthetic oligonucleotide
cccccagcagugggccuug

SEQ ID NO: 7924 - RNA, 19 nt, Artificial Sequence
  Description of Artificial Sequence: Synthetic oligonucleotide
gucugcugggaacggcucg

SEQ ID NO: 7925 - RNA, 19 nt, Artificial Sequence
  Description of Artificial Sequence: Synthetic oligonucleotide
gucagagguggaaguggua

SEQ ID NO: 7926 - RNA, 19 nt, Artificial Sequence
  Description of Artificial Sequence: Synthetic oligonucleotide
acccuuccaggaagugugg

SEQ ID NO: 7927 - RNA, 19 nt, Artificial Sequence
  Description of Artificial Sequence: Synthetic oligonucleotide
gggccgcagcuacugccgg

SEQ ID NO: 7928 - RNA, 19 nt, Artificial Sequence
  Description of Artificial Sequence: Synthetic oligonucleotide
ggcgcuggagaggcuggug

SEQ ID NO: 7929 - RNA, 19 nt, Artificial Sequence
  Description of Artificial Sequence: Synthetic oligonucleotide
ggacgucguguccgaguac

SEQ ID NO: 7930 - RNA, 19 nt, Artificial Sequence
  Description of Artificial Sequence: Synthetic oligonucleotide
ccccagcgagguggagcac

SEQ ID NO: 7931 - RNA, 19 nt, Artificial Sequence
  Description of Artificial Sequence: Synthetic oligonucleotide
cauguucagcccauccugu

SEQ ID NO: 7932 - RNA, 19 nt, Artificial Sequence
  Description of Artificial Sequence: Synthetic oligonucleotide
ugucucccugcugcgcugc

SEQ ID NO: 7933 - RNA, 19 nt, Artificial Sequence
  Description of Artificial Sequence: Synthetic oligonucleotide
caccggcugcugcggcgau

SEQ ID NO: 7934 - RNA, 19 nt, Artificial Sequence
  Description of Artificial Sequence: Synthetic oligonucleotide
ugagaaucugcacugugug

SEQ ID NO: 7935 - RNA, 19 nt, Artificial Sequence
  Description of Artificial Sequence: Synthetic oligonucleotide
gccgguggagacggccaau

SEQ ID NO: 7936 - RNA, 19 nt, Artificial Sequence
  Description of Artificial Sequence: Synthetic oligonucleotide
ugucaccaugcagcuccua

SEQ ID NO: 7937 - RNA, 19 nt, Artificial Sequence
  Description of Artificial Sequence: Synthetic oligonucleotide
aaagauccguucuggggac

SEQ ID NO: 7938 - RNA, 19 nt, Artificial Sequence
  Description of Artificial Sequence: Synthetic oligonucleotide
ccggcccuccuacguggag

SEQ ID NO: 7939 - RNA, 19 nt, Artificial Sequence
  Description of Artificial Sequence: Synthetic oligonucleotide
gcugacguucucucagcac

SEQ ID NO: 7940 - RNA, 19 nt, Artificial Sequence
  Description of Artificial Sequence: Synthetic oligonucleotide
cguucgcugcgaaugccgg

SEQ ID NO: 7941 - RNA, 19 nt, Artificial Sequence
  Description of Artificial Sequence: Synthetic oligonucleotide
gccucugcgggagaagaug

SEQ ID NO: 7942 - RNA, 19 nt, Artificial Sequence
  Description of Artificial Sequence: Synthetic oligonucleotide
gaagccggaaaggaggaga

SEQ ID NO: 7943 - RNA, 19 nt, Artificial Sequence
  Description of Artificial Sequence: Synthetic oligonucleotide
acccaagggcagggggaag

SEQ ID NO: 7944 - RNA, 19 nt, Artificial Sequence
  Description of Artificial Sequence: Synthetic oligonucleotide
gaggaggagagagaagcag

SEQ ID NO: 7945 - RNA, 19 nt, Artificial Sequence
  Description of Artificial Sequence: Synthetic oligonucleotide
gagacccacagacugccac

SEQ ID NO: 7946 - RNA, 19 nt, Artificial Sequence
  Description of Artificial Sequence: Synthetic oligonucleotide
ccugugcggcgaugcuguu

SEQ ID NO: 7947 - RNA, 19 nt, Artificial Sequence
  Description of Artificial Sequence: Synthetic oligonucleotide
uccccggagguaacccacc

SEQ ID NO: 7948 - RNA, 19 nt, Artificial Sequence
  Description of Artificial Sequence: Synthetic oligonucleotide
cccuuggaggagagagacc

SEQ ID NO: 7949 - RNA, 19 nt, Artificial Sequence
  Description of Artificial Sequence: Synthetic oligonucleotide
cccgcacccggcucgugua

SEQ ID NO: 7950 - RNA, 19 nt, Artificial Sequence
  Description of Artificial Sequence: Synthetic oligonucleotide
auuuauuaccgucacacuc

SEQ ID NO: 7951 - RNA, 19 nt, Artificial Sequence
  Description of Artificial Sequence: Synthetic oligonucleotide
cuucagugacuccugcugg

SEQ ID NO: 7952 - RNA, 19 nt, Artificial Sequence
  Description of Artificial Sequence: Synthetic oligonucleotide
guaccugcccucuauuuau

SEQ ID NO: 7953 - RNA, 19 nt, Artificial Sequence
  Description of Artificial Sequence: Synthetic oligonucleotide
uuagccaacuguuucccug

SEQ ID NO: 7954 - RNA, 19 nt, Artificial Sequence
  Description of Artificial Sequence: Synthetic oligonucleotide
gcugaaugccucgcucccu

SEQ ID NO: 7955 - RNA, 19 nt, Artificial Sequence
  Description of Artificial Sequence: Synthetic oligonucleotide
uucaagacgaggggcaggg

SEQ ID NO: 7956 - RNA, 19 nt, Artificial Sequence
  Description of Artificial Sequence: Synthetic oligonucleotide
gaaggacaggacccucagg

SEQ ID NO: 7957 - RNA, 19 nt, Artificial Sequence
  Description of Artificial Sequence: Synthetic oligonucleotide
gaauucagugccuucaaca

SEQ ID NO: 7958 - RNA, 19 nt, Artificial Sequence
  Description of Artificial Sequence: Synthetic oligonucleotide
aacgugagagaaagagaga

SEQ ID NO: 7959 - RNA, 19 nt, Artificial Sequence
  Description of Artificial Sequence: Synthetic oligonucleotide
aagccagccacagaccccu

SEQ ID NO: 7960 - RNA, 19 nt, Artificial Sequence
  Description of Artificial Sequence: Synthetic oligonucleotide
ugggagcuuccgcuuugaa

SEQ ID NO: 7961 - RNA, 19 nt, Artificial Sequence
  Description of Artificial Sequence: Synthetic oligonucleotide
aagaagcaagacacguggc

SEQ ID NO: 7962 - RNA, 19 nt, Artificial Sequence
  Description of Artificial Sequence: Synthetic oligonucleotide
ccucgugaggggcaagcua

SEQ ID NO: 7963 - RNA, 19 nt, Artificial Sequence
  Description of Artificial Sequence: Synthetic oligonucleotide
aggccccagaggcccugga

SEQ ID NO: 7964 - RNA, 19 nt, Artificial Sequence
  Description of Artificial Sequence: Synthetic oligonucleotide
aggucuccaggggccugca

SEQ ID NO: 7965 - RNA, 19 nt, Artificial Sequence
  Description of Artificial Sequence: Synthetic oligonucleotide
agaaggaaagaagggggcc

SEQ ID NO: 7966 - RNA, 19 nt, Artificial Sequence
  Description of Artificial Sequence: Synthetic oligonucleotide
ccugcuaccuguucuuggg

SEQ ID NO: 7967 - RNA, 19 nt, Artificial Sequence
  Description of Artificial Sequence: Synthetic oligonucleotide
gccucaggcucugcacaga

SEQ ID NO: 7968 - RNA, 19 nt, Artificial Sequence
  Description of Artificial Sequence: Synthetic oligonucleotide
acaagcagcccuugcuuuc

SEQ ID NO: 7969 - RNA, 19 nt, Artificial Sequence
  Description of Artificial Sequence: Synthetic oligonucleotide
cggagcuccuguccaaagu

SEQ ID NO: 7970 - RNA, 19 nt, Artificial Sequence
  Description of Artificial Sequence: Synthetic oligonucleotide
uagggaugcggauccugcu

SEQ ID NO: 7971 - RNA, 19 nt, Artificial Sequence
  Description of Artificial Sequence: Synthetic oligonucleotide
uggggccgccacggccugg

SEQ ID NO: 7972 - RNA, 19 nt, Artificial Sequence
  Description of Artificial Sequence: Synthetic oligonucleotide
gcuggugggaaggccggca

SEQ ID NO: 7973 - RNA, 19 nt, Artificial Sequence
  Description of Artificial Sequence: Synthetic oligonucleotide
agcgggcggaggggaucca

SEQ ID NO: 7974 - RNA, 19 nt, Artificial Sequence
  Description of Artificial Sequence: Synthetic oligonucleotide
agccacuucccccucuucu

SEQ ID NO: 7975 - RNA, 19 nt, Artificial Sequence
  Description of Artificial Sequence: Synthetic oligonucleotide
uucugaagaucagaacauu

SEQ ID NO: 7976 - RNA, 19 nt, Artificial Sequence
  Description of Artificial Sequence: Synthetic oligonucleotide
ucagcucuggagaacagug

SEQ ID NO: 7977 - RNA, 19 nt, Artificial Sequence
  Description of Artificial Sequence: Synthetic oligonucleotide
gguugccugggggcuuuug

SEQ ID NO: 7978 - RNA, 19 nt, Artificial Sequence
  Description of Artificial Sequence: Synthetic oligonucleotide
gccacuccuugucccccgu

SEQ ID NO: 7979 - RNA, 19 nt, Artificial Sequence
  Description of Artificial Sequence: Synthetic oligonucleotide
ugaucuccccucacacuuu

SEQ ID NO: 7980 - RNA, 19 nt, Artificial Sequence
  Description of Artificial Sequence: Synthetic oligonucleotide
ugccauuugcuuguacugg

SEQ ID NO: 7981 - RNA, 19 nt, Artificial Sequence
  Description of Artificial Sequence: Synthetic oligonucleotide
ggacauuguucuuuccggc

SEQ ID NO: 7982 - RNA, 19 nt, Artificial Sequence
  Description of Artificial Sequence: Synthetic oligonucleotide
ccaaggugccaccacccug

SEQ ID NO: 7983 - RNA, 19 nt, Artificial Sequence
  Description of Artificial Sequence: Synthetic oligonucleotide
gcccccccuaagagacaca

SEQ ID NO: 7984 - RNA, 19 nt, Artificial Sequence
  Description of Artificial Sequence: Synthetic oligonucleotide
auacagagugggccccggg

SEQ ID NO: 7985 - RNA, 19 nt, Artificial Sequence
  Description of Artificial Sequence: Synthetic oligonucleotide
gcuggagaaagagcugccu

SEQ ID NO: 7986 - RNA, 19 nt, Artificial Sequence
  Description of Artificial Sequence: Synthetic oligonucleotide
uggaugagaaacagcucag

SEQ ID NO: 7987 - RNA, 19 nt, Artificial Sequence
  Description of Artificial Sequence: Synthetic oligonucleotide
gccaguggggaugagguca

SEQ ID NO: 7988 - RNA, 19 nt, Artificial Sequence
  Description of Artificial Sequence: Synthetic oligonucleotide
accaggggaggagccugug

SEQ ID NO: 7989 - RNA, 19 nt, Artificial Sequence
  Description of Artificial Sequence: Synthetic oligonucleotide
gcgucccagcugaaggcag

SEQ ID NO: 7990 - RNA, 19 nt, Artificial Sequence
  Description of Artificial Sequence: Synthetic oligonucleotide
guggcaggggagcagguuc

SEQ ID NO: 7991 - RNA, 19 nt, Artificial Sequence
  Description of Artificial Sequence: Synthetic oligonucleotide
ccccaagggcccuggcacc

SEQ ID NO: 7992 - RNA, 19 nt, Artificial Sequence
  Description of Artificial Sequence: Synthetic oligonucleotide
ccccacaagcugucccugc

SEQ ID NO: 7993 - RNA, 19 nt, Artificial Sequence
  Description of Artificial Sequence: Synthetic oligonucleotide
cagggccaucugacugcca

SEQ ID NO: 7994 - RNA, 19 nt, Artificial Sequence
  Description of Artificial Sequence: Synthetic oligonucleotide
aagccagauucucuugaau

SEQ ID NO: 7995 - RNA, 19 nt, Artificial Sequence
  Description of Artificial Sequence: Synthetic oligonucleotide
uaaaguauucuagugugga

SEQ ID NO: 7996 - RNA, 25 nt, Artificial Sequence
  Description of Artificial Sequence: Synthetic oligonucleotide
cugcugucugcggaggaaacugcau

SEQ ID NO: 7997 - RNA, 25 nt, Artificial Sequence
  Description of Artificial Sequence: Synthetic oligonucleotide
ucgacggacggccgcccagcuacgg

SEQ ID NO: 7998 - RNA, 25 nt, Artificial Sequence
  Description of Artificial Sequence: Synthetic oligonucleotide
ggaggaccuggaguggcacugggcg

SEQ ID NO: 7999 - RNA, 25 nt, Artificial Sequence
  Description of Artificial Sequence: Synthetic oligonucleotide
gcccgacggaccauccccgggaccc

SEQ ID NO: 8000 - RNA, 25 nt, Artificial Sequence
  Description of Artificial Sequence: Synthetic oligonucleotide
cgccugccccucggcgccccgcccc

SEQ ID NO: 8001 - RNA, 25 nt, Artificial Sequence
  Description of Artificial Sequence: Synthetic oligonucleotide
cgccgggccgcuccccgucggguuc

SEQ ID NO: 8002 - RNA, 25 nt, Artificial Sequence
  Description of Artificial Sequence: Synthetic oligonucleotide
ccccagccacagccuuaccuacggg

SEQ ID NO: 8003 - RNA, 25 nt, Artificial Sequence
  Description of Artificial Sequence: Synthetic oligonucleotide
gcuccugacuccgcaaggcuuccag

SEQ ID NO: 8004 - RNA, 25 nt, Artificial Sequence
  Description of Artificial Sequence: Synthetic oligonucleotide
gaagaugcucgaaccaccggccggg

SEQ ID NO: 8005 - RNA, 25 nt, Artificial Sequence
  Description of Artificial Sequence: Synthetic oligonucleotide
ggccucggggcagcagugagggagg

SEQ ID NO: 8006 - RNA, 25 nt, Artificial Sequence
  Description of Artificial Sequence: Synthetic oligonucleotide
gcguccagccccccacucagcucuu

SEQ ID NO: 8007 - RNA, 25 nt, Artificial Sequence
  Description of Artificial Sequence: Synthetic oligonucleotide
ucuccuccugugccaggggcucccc

SEQ ID NO: 8008 - RNA, 25 nt, Artificial Sequence
  Description of Artificial Sequence: Synthetic oligonucleotide
cgggggaugagcauggugguuuucc

SEQ ID NO: 8009 - RNA, 25 nt, Artificial Sequence
  Description of Artificial Sequence: Synthetic oligonucleotide
ccucggagcccccuggcucgggacg

SEQ ID NO: 8010 - RNA, 25 nt, Artificial Sequence
  Description of Artificial Sequence: Synthetic oligonucleotide
gucugagaagaugccggucaugagg

SEQ ID NO: 8011 - RNA, 25 nt, Artificial Sequence
  Description of Artificial Sequence: Synthetic oligonucleotide
gcuguucccuugcuuccugcagcuc

SEQ ID NO: 8012 - RNA, 25 nt, Artificial Sequence
  Description of Artificial Sequence: Synthetic oligonucleotide
ccuggccgggcuggcgcugccugcu

SEQ ID NO: 8013 - RNA, 25 nt, Artificial Sequence
  Description of Artificial Sequence: Synthetic oligonucleotide
ugugcccccccagcagugggccuug

SEQ ID NO: 8014 - RNA, 25 nt, Artificial Sequence
  Description of Artificial Sequence: Synthetic oligonucleotide
gucugcugggaacggcucgucagag

SEQ ID NO: 8015 - RNA, 25 nt, Artificial Sequence
  Description of Artificial Sequence: Synthetic oligonucleotide
gguggaagugguacccuuccaggaa

SEQ ID NO: 8016 - RNA, 25 nt, Artificial Sequence
  Description of Artificial Sequence: Synthetic oligonucleotide
aguguggggccgcagcuacugccgg

SEQ ID NO: 8017 - RNA, 25 nt, Artificial Sequence
  Description of Artificial Sequence: Synthetic oligonucleotide
ggcgcuggagaggcugguggacguc

SEQ ID NO: 8018 - RNA, 25 nt, Artificial Sequence
  Description of Artificial Sequence: Synthetic oligonucleotide
cguguccgaguaccccagcgaggug

SEQ ID NO: 8019 - RNA, 25 nt, Artificial Sequence
  Description of Artificial Sequence: Synthetic oligonucleotide
ggagcacauguucagcccauccugu

SEQ ID NO: 8020 - RNA, 25 nt, Artificial Sequence
  Description of Artificial Sequence: Synthetic oligonucleotide
ugucucccugcugcgcugcaccggc

SEQ ID NO: 8021 - RNA, 25 nt, Artificial Sequence
  Description of Artificial Sequence: Synthetic oligonucleotide
cugcugcggcgaugagaaucugcac

SEQ ID NO: 8022 - RNA, 25 nt, Artificial Sequence
  Description of Artificial Sequence: Synthetic oligonucleotide
cugugugccgguggagacggccaau

SEQ ID NO: 8023 - RNA, 25 nt, Artificial Sequence
  Description of Artificial Sequence: Synthetic oligonucleotide
ugucaccaugcagcuccuaaagauc

SEQ ID NO: 8024 - RNA, 25 nt, Artificial Sequence
  Description of Artificial Sequence: Synthetic oligonucleotide
ccguucuggggaccggcccuccuac

SEQ ID NO: 8025 - RNA, 25 nt, Artificial Sequence
  Description of Artificial Sequence: Synthetic oligonucleotide
cguggagcugacguucucucagcac

SEQ ID NO: 8026 - RNA, 25 nt, Artificial Sequence
  Description of Artificial Sequence: Synthetic oligonucleotide
cguucgcugcgaaugccggccucug

SEQ ID NO: 8027 - RNA, 25 nt, Artificial Sequence
  Description of Artificial Sequence: Synthetic oligonucleotide
gcgggagaagaugaagccggaaagg

SEQ ID NO: 8028 - RNA, 25 nt, Artificial Sequence
  Description of Artificial Sequence: Synthetic oligonucleotide
gaggagacccaagggcagggggaag

SEQ ID NO: 8029 - RNA, 25 nt, Artificial Sequence
  Description of Artificial Sequence: Synthetic oligonucleotide
gaggaggagagagaagcagagaccc

SEQ ID NO: 8030 - RNA, 25 nt, Artificial Sequence
  Description of Artificial Sequence: Synthetic oligonucleotide
cacagacugccaccugugcggcgau

SEQ ID NO: 8031 - RNA, 25 nt, Artificial Sequence
  Description of Artificial Sequence: Synthetic oligonucleotide
ugcuguuccccggagguaacccacc

SEQ ID NO: 8032 - RNA, 25 nt, Artificial Sequence
  Description of Artificial Sequence: Synthetic oligonucleotide
cccuuggaggagagagaccccgcac

SEQ ID NO: 8033 - RNA, 25 nt, Artificial Sequence
  Description of Artificial Sequence: Synthetic oligonucleotide
cccggcucguguauuuauuaccguc

SEQ ID NO: 8034 - RNA, 25 nt, Artificial Sequence
  Description of Artificial Sequence: Synthetic oligonucleotide
cacacucuucagugacuccugcugg

SEQ ID NO: 8035 - RNA, 25 nt, Artificial Sequence
  Description of Artificial Sequence: Synthetic oligonucleotide
guaccugcccucuauuuauuagcca

SEQ ID NO: 8036 - RNA, 25 nt, Artificial Sequence
  Description of Artificial Sequence: Synthetic oligonucleotide
aacuguuucccugcugaaugccucg

SEQ ID NO: 8037 - RNA, 25 nt, Artificial Sequence
  Description of Artificial Sequence: Synthetic oligonucleotide
gcucccuucaagacgaggggcaggg

SEQ ID NO: 8038 - RNA, 25 nt, Artificial Sequence
  Description of Artificial Sequence: Synthetic oligonucleotide
gaaggacaggacccucaggaauuca

SEQ ID NO: 8039 - RNA, 25 nt, Artificial Sequence
  Description of Artificial Sequence: Synthetic oligonucleotide
agugccuucaacaacgugagagaaa

SEQ ID NO: 8040 - RNA, 25 nt, Artificial Sequence
  Description of Artificial Sequence: Synthetic oligonucleotide
agagagaagccagccacagaccccu

SEQ ID NO: 8041 - RNA, 25 nt, Artificial Sequence
  Description of Artificial Sequence: Synthetic oligonucleotide
ugggagcuuccgcuuugaaagaagc

SEQ ID NO: 8042 - RNA, 25 nt, Artificial Sequence
  Description of Artificial Sequence: Synthetic oligonucleotide
caagacacguggccucgugaggggc

SEQ ID NO: 8043 - RNA, 25 nt, Artificial Sequence
  Description of Artificial Sequence: Synthetic oligonucleotide
caagcuaggccccagaggcccugga

SEQ ID NO: 8044 - RNA, 25 nt, Artificial Sequence
  Description of Artificial Sequence: Synthetic oligonucleotide
aggucuccaggggccugcagaagga

SEQ ID NO: 8045 - RNA, 25 nt, Artificial Sequence
  Description of Artificial Sequence: Synthetic oligonucleotide
aaagaagggggcccugcuaccuguu

SEQ ID NO: 8046 - RNA, 25 nt, Artificial Sequence
  Description of Artificial Sequence: Synthetic oligonucleotide
ucuugggccucaggcucugcacaga

SEQ ID NO: 8047 - RNA, 25 nt, Artificial Sequence
  Description of Artificial Sequence: Synthetic oligonucleotide
acaagcagcccuugcuuucggagcu

SEQ ID NO: 8048 - RNA, 25 nt, Artificial Sequence
  Description of Artificial Sequence: Synthetic oligonucleotide
uccuguccaaaguagggaugcggau

SEQ ID NO: 8049 - RNA, 25 nt, Artificial Sequence
  Description of Artificial Sequence: Synthetic oligonucleotide
uccugcuggggccgccacggccugg

SEQ ID NO: 8050 - RNA, 25 nt, Artificial Sequence
  Description of Artificial Sequence: Synthetic oligonucleotide
gcuggugggaaggccggcagcgggc

SEQ ID NO: 8051 - RNA, 25 nt, Artificial Sequence
  Description of Artificial Sequence: Synthetic oligonucleotide
cggaggggauccagccacuuccccc

SEQ ID NO: 8052 - RNA, 25 nt, Artificial Sequence
  Description of Artificial Sequence: Synthetic oligonucleotide
cucuucuucugaagaucagaacauu

SEQ ID NO: 8053 - RNA, 25 nt, Artificial Sequence
  Description of Artificial Sequence: Synthetic oligonucleotide
ucagcucuggagaacagugguugcc

SEQ ID NO: 8054 - RNA, 25 nt, Artificial Sequence
  Description of Artificial Sequence: Synthetic oligonucleotide
cugggggcuuuugccacuccuuguc

SEQ ID NO: 8055 - RNA, 25 nt, Artificial Sequence
  Description of Artificial Sequence: Synthetic oligonucleotide
cccccgugaucuccccucacacuuu

SEQ ID NO: 8056 - RNA, 25 nt, Artificial Sequence
  Description of Artificial Sequence: Synthetic oligonucleotide
ugccauuugcuuguacugggacauu

SEQ ID NO: 8057 - RNA, 25 nt, Artificial Sequence
  Description of Artificial Sequence: Synthetic oligonucleotide
uguucuuuccggccaaggugccacc

SEQ ID NO: 8058 - RNA, 25 nt, Artificial Sequence
  Description of Artificial Sequence: Synthetic oligonucleotide
cacccugcccccccuaagagacaca

SEQ ID NO: 8059 - RNA, 25 nt, Artificial Sequence
  Description of Artificial Sequence: Synthetic oligonucleotide
auacagagugggccccgggcuggag

SEQ ID NO: 8060 - RNA, 25 nt, Artificial Sequence
  Description of Artificial Sequence: Synthetic oligonucleotide
gaaagagcugccuggaugagaaaca

SEQ ID NO: 8061 - RNA, 25 nt, Artificial Sequence
  Description of Artificial Sequence: Synthetic oligonucleotide
agcucagccaguggggaugagguca

SEQ ID NO: 8062 - RNA, 25 nt, Artificial Sequence
  Description of Artificial Sequence: Synthetic oligonucleotide
accaggggaggagccugugcguccc

SEQ ID NO: 8063 - RNA, 25 nt, Artificial Sequence
  Description of Artificial Sequence: Synthetic oligonucleotide
cagcugaaggcaguggcaggggagc

SEQ ID NO: 8064 - RNA, 25 nt, Artificial Sequence
  Description of Artificial Sequence: Synthetic oligonucleotide
cagguuccccaagggcccuggcacc

SEQ ID NO: 8065 - RNA, 25 nt, Artificial Sequence
  Description of Artificial Sequence: Synthetic oligonucleotide
ccccacaagcugucccugcagggcc

SEQ ID NO: 8066 - RNA, 25 nt, Artificial Sequence
  Description of Artificial Sequence: Synthetic oligonucleotide
caucugacugccaagccagauucuc

SEQ ID NO: 8067 - RNA, 25 nt, Artificial Sequence
  Description of Artificial Sequence: Synthetic oligonucleotide
cuugaauaaaguauucuagugugga

SEQ ID NO: 8068 - DNA, 21 bp, Artificial Sequence
  Description of Artificial Sequence: Synthetic oligonucleotide
  Description of Combined DNA/RNA Molecule: Synthetic oligonucleotide
cuacacaaaucagcgauuutt

SEQ ID NO: 8069 - DNA, 21 bp, Artificial Sequence
  Description of Artificial Sequence: Synthetic oligonucleotide
  Description of Combined DNA/RNA Molecule: Synthetic oligonucleotide
aaaucgcugauuuguguagtt

SEQ ID NO: 8070 - DNA, 25 bp, Artificial Sequence
  Description of Artificial Sequence: Synthetic oligonucleotide
  Description of Combined DNA/RNA Molecule: Synthetic oligonucleotide
cuacacaaaucagcgauuuccaugt

SEQ ID NO: 8071 - RNA, 27 nt, Artificial Sequence
  Description of Artificial Sequence: Synthetic oligonucleotide
acauggaaaucgcugauuuguguaguc

SEQ ID NO: 8072 - RNA, 13 nt, Artificial Sequence
  Description of Artificial Sequence: Synthetic oligonucleotide
cuacacaaaucag

SEQ ID NO: 8073 - DNA, 11 bp, Artificial Sequence
  Description of Artificial Sequence: Synthetic oligonucleotide
  Description of Combined DNA/RNA Molecule: Synthetic oligonucleotide
gauuuccaugt

SEQ ID NO: 8074 - DNA, 21 bp, Artificial Sequence
  Description of Artificial Sequence: Synthetic oligonucleotide
  Description of Combined DNA/RNA Molecule: Synthetic oligonucleotide
ggaucuuauuucuucggagtt

SEQ ID NO: 8075 - DNA, 21 bp, Artificial Sequence
  Description of Artificial Sequence: Synthetic oligonucleotide
  Description of Combined DNA/RNA Molecule: Synthetic oligonucleotide
cuccgaagaaauaagaucctt

SEQ ID NO: 8076 - RNA, 11 nt, Artificial Sequence
  Description of Artificial Sequence: Synthetic oligonucleotide
ggaucuuauuu

SEQ ID NO: 8077 - DNA, 10 bp, Artificial Sequence
  Description of Artificial Sequence: Synthetic oligonucleotide
  Description of Combined DNA/RNA Molecule: Synthetic oligonucleotide
cuucggagtt

SEQ ID NO: 8078 - RNA, 27 nt, Artificial Sequence
  Description of Artificial Sequence: Synthetic oligonucleotide
cauugucuccgaagaaauaagauccuu

SEQ ID NO: 8079 - RNA, 8 nt, Artificial Sequence
  Description of Artificial Sequence: Synthetic oligonucleotide
  modified_base (2): LNA-G
ggaucuua

SEQ ID NO: 8080 - DNA, 17 bp, Artificial Sequence
  Description of Artificial Sequence: Synthetic oligonucleotide
  Description of Combined DNA/RNA Molecule: Synthetic oligonucleotide
uuucuucggagacaatg

SEQ ID NO: 8081 - DNA, 16 bp, Artificial Sequence
  Description of Artificial Sequence: Synthetic oligonucleotide
  Description of Combined DNA/RNA Molecule: Synthetic oligonucleotide
uucuucggagacaatg

SEQ ID NO: 8082 - DNA, 15 bp, Artificial Sequence
  Description of Artificial Sequence: Synthetic oligonucleotide
  Description of Combined DNA/RNA Molecule: Synthetic oligonucleotide
ucuucggagacaatg

SEQ ID NO: 8083 - DNA, 14 bp, Artificial Sequence
  Description of Artificial Sequence: Synthetic oligonucleotide
  Description of Combined DNA/RNA Molecule: Synthetic oligonucleotide
cuucggagacaatg

SEQ ID NO: 8084 - DNA, 13 bp, Artificial Sequence
  Description of Artificial Sequence: Synthetic oligonucleotide
  Description of Combined DNA/RNA Molecule: Synthetic oligonucleotide
uucggagacaatg

SEQ ID NO: 8085 - DNA, 12 bp, Artificial Sequence
  Description of Artificial Sequence: Synthetic oligonucleotide
  Description of Combined DNA/RNA Molecule: Synthetic oligonucleotide
ucggagacaatg

SEQ ID NO: 8086 - DNA, 11 bp, Artificial Sequence
  Description of Artificial Sequence: Synthetic oligonucleotide
  Description of Combined DNA/RNA Molecule: Synthetic oligonucleotide
cggagacaatg

SEQ ID NO: 8087 - RNA, 9 nt, Artificial Sequence
  Description of Artificial Sequence: Synthetic oligonucleotide
  modified_base (2): LNA-G
ggaucuuau

SEQ ID NO: 8088 - RNA, 10 nt, Artificial Sequence
  Description of Artificial Sequence: Synthetic oligonucleotide
  modified_base (2): LNA-G
ggaucuuauu

SEQ ID NO: 8089 - RNA, 11 nt, Artificial Sequence
  Description of Artificial Sequence: Synthetic oligonucleotide
  modified_base (2): LNA-G
ggaucuuauuu

SEQ ID NO: 8090 - RNA, 12 nt, Artificial Sequence
  Description of Artificial Sequence: Synthetic oligonucleotide
  modified_base (2): LNA-G
ggaucuuauuuc

SEQ ID NO: 8091 - RNA, 8 nt, Artificial Sequence
  Description of Artificial Sequence: Synthetic oligonucleotide
  modified_base (3): LNA-A
cuacacaa

SEQ ID NO: 8092 - DNA, 13 bp, Artificial Sequence
  Description of Artificial Sequence: Synthetic oligonucleotide
  Description of Combined DNA/RNA Molecule: Synthetic oligonucleotide
  modified_base (8): LNA-A
aucagcgauuutt

SEQ ID NO: 8093 - DNA, 12 bp, Artificial Sequence
  Description of Artificial Sequence: Synthetic oligonucleotide
  Description of Combined DNA/RNA Molecule: Synthetic oligonucleotide
  modified_base (7): LNA-A
ucagcgauuutt

SEQ ID NO: 8094 - DNA, 11 bp, Artificial Sequence
  Description of Artificial Sequence: Synthetic oligonucleotide
  Description of Combined DNA/RNA Molecule: Synthetic oligonucleotide
  modified_base (6): LNA-A
cagcgauuutt

SEQ ID NO: 8095 - DNA, 10 bp, Artificial Sequence
  Description of Artificial Sequence: Synthetic oligonucleotide
  Description of Combined DNA/RNA Molecule: Synthetic oligonucleotide
  modified_base (5): LNA-A
agcgauuutt

SEQ ID NO: 8096 - DNA, 9 bp, Artificial Sequence
  Description of Artificial Sequence: Synthetic oligonucleotide
  Description of Combined DNA/RNA Molecule: Synthetic oligonucleotide
  modified_base (4): LNA-A
gcgauuutt

SEQ ID NO: 8097 - DNA, 8 bp, Artificial Sequence
  Description of Artificial Sequence: Synthetic oligonucleotide
  Description of Combined DNA/RNA Molecule: Synthetic oligonucleotide
  modified_base (3): LNA-A
cgauuutt

SEQ ID NO: 8098 - DNA, 7 bp, Artificial Sequence
  Description of Artificial Sequence: Synthetic oligonucleotide
  Description of Combined DNA/RNA Molecule: Synthetic oligonucleotide
  modified_base (2): LNA-A
gauuutt

SEQ ID NO: 8099 - RNA, 9 nt, Artificial Sequence
  Description of Artificial Sequence: Synthetic oligonucleotide
  modified_base (3): LNA-A
cuacacaaa

SEQ ID NO: 8100 - RNA, 10 nt, Artificial Sequence
  Description of Artificial Sequence: Synthetic oligonucleotide
  modified_base (3): LNA-A
cuacacaaau

SEQ ID NO: 8101 - RNA, 11 nt, Artificial Sequence
  Description of Artificial Sequence: Synthetic oligonucleotide
  modified_base (3): LNA-A
cuacacaaauc

SEQ ID NO: 8102 - RNA, 12 nt, Artificial Sequence
  Description of Artificial Sequence: Synthetic oligonucleotide
  modified_base (3): LNA-A
cuacacaaauca

SEQ ID NO: 8103 - RNA, 13 nt, Artificial Sequence
  Description of Artificial Sequence: Synthetic oligonucleotide
  modified_base (3): LNA-A
cuacacaaaucag

SEQ ID NO: 8104 - RNA, 14 nt, Artificial Sequence
  Description of Artificial Sequence: Synthetic oligonucleotide
  modified_base (3): LNA-A
cuacacaaaucagc

SEQ ID NO: 8105 - RNA, 13 nt, Artificial Sequence
  Description of Artificial Sequence: Synthetic oligonucleotide
  modified_base (2): LNA-G
ggaucuuauuucu

SEQ ID NO: 8106 - RNA, 14 nt, Artificial Sequence
  Description of Artificial Sequence: Synthetic oligonucleotide
  modified_base (2): LNA-G
ggaucuuauuucuu

SEQ ID NO: 8107 - RNA, 8 nt, Artificial Sequence
  Description of Artificial Sequence: Synthetic oligonucleotide
  modified_base (2): LNA-G
  modified_base (8): LNA-A
ggaucuua

SEQ ID NO: 8108 - RNA, 9 nt, Artificial Sequence
  Description of Artificial Sequence: Synthetic oligonucleotide
  modified_base (2): LNA-G
  modified_base (9): LNA-U
ggaucuuau

SEQ ID NO: 8109 - RNA, 10 nt, Artificial Sequence
  Description of Artificial Sequence: Synthetic oligonucleotide
  modified_base (2): LNA-G
  modified_base (10): LNA-U
ggaucuuauu

SEQ ID NO: 8110 - RNA, 11 nt, Artificial Sequence
  Description of Artificial Sequence: Synthetic oligonucleotide
  modified_base (2): LNA-G
  modified_base (11): LNA-U
ggaucuuauuu

SEQ ID NO: 8111 - RNA, 12 nt, Artificial Sequence
  Description of Artificial Sequence: Synthetic oligonucleotide
  modified_base (2): LNA-G
  modified_base (12): LNA-C
ggaucuuauuuc

SEQ ID NO: 8112 - RNA, 13 nt, Artificial Sequence
  Description of Artificial Sequence: Synthetic oligonucleotide
  modified_base (2): LNA-G
  modified_base (13): LNA-U
ggaucuuauuucu

SEQ ID NO: 8113 - RNA, 14 nt, Artificial Sequence
  Description of Artificial Sequence: Synthetic oligonucleotide
  modified_base (2): LNA-G
  modified_base (14): LNA-U
ggaucuuauuucuu

SEQ ID NO: 8114 - DNA, 13 bp, Artificial Sequence
  Description of Artificial Sequence: Synthetic oligonucleotide
  Description of Combined DNA/RNA Molecule: Synthetic oligonucleotide
  modified_base (8): LNA-G
uuucuucggagtt

SEQ ID NO: 8115 - DNA, 12 bp, Artificial Sequence
  Description of Artificial Sequence: Synthetic oligonucleotide
  Description of Combined DNA/RNA Molecule: Synthetic oligonucleotide
  modified_base (7): LNA-G
uucuucggagtt

SEQ ID NO: 8116 - DNA, 11 bp, Artificial Sequence
  Description of Artificial Sequence: Synthetic oligonucleotide
  Description of Combined DNA/RNA Molecule: Synthetic oligonucleotide
  modified_base (6): LNA-G
ucuucggagtt

SEQ ID NO: 8117 - DNA, 10 bp, Artificial Sequence
  Description of Artificial Sequence: Synthetic oligonucleotide
  Description of Combined DNA/RNA Molecule: Synthetic oligonucleotide
  modified_base (5): LNA-G
cuucggagtt

SEQ ID NO: 8118 - DNA, 9 bp, Artificial Sequence
  Description of Artificial Sequence: Synthetic oligonucleotide
  Description of Combined DNA/RNA Molecule: Synthetic oligonucleotide
  modified_base (4): LNA-G
uucggagtt

SEQ ID NO: 8119 - DNA, 8 bp, Artificial Sequence
  Description of Artificial Sequence: Synthetic oligonucleotide
  Description of Combined DNA/RNA Molecule: Synthetic oligonucleotide
  modified_base (3): LNA-G
ucggagtt

SEQ ID NO: 8120 - DNA, 7 bp, Artificial Sequence
  Description of Artificial Sequence: Synthetic oligonucleotide
  Description of Combined DNA/RNA Molecule: Synthetic oligonucleotide
  modified_base (2): LNA-G
cggagtt

SEQ ID NO: 8121 - DNA, 13 bp, Artificial Sequence
  Description of Artificial Sequence: Synthetic oligonucleotide
  Description of Combined DNA/RNA Molecule: Synthetic oligonucleotide
  modified_base (1): LNA-U
  modified_base (8): LNA-G
uuucuucggagtt

SEQ ID NO: 8122 - DNA, 12 bp, Artificial Sequence
  Description of Artificial Sequence: Synthetic oligonucleotide
  Description of Combined DNA/RNA Molecule: Synthetic oligonucleotide
  modified_base (1): LNA-U
  modified_base (7): LNA-G
uucuucggagtt

SEQ ID NO: 8123 - DNA, 11 bp, Artificial Sequence
  Description of Artificial Sequence: Synthetic oligonucleotide
  Description of Combined DNA/RNA Molecule: Synthetic oligonucleotide
  modified_base (1): LNA-U
  modified_base (6): LNA-G
ucuucggagtt

SEQ ID NO: 8124 - DNA, 10 bp, Artificial Sequence
  Description of Artificial Sequence: Synthetic oligonucleotide
  Description of Combined DNA/RNA Molecule: Synthetic oligonucleotide
  modified_base (1): LNA-C
  modified_base (5): LNA-G
cuucggagtt

SEQ ID NO: 8125 - DNA, 9 bp, Artificial Sequence
  Description of Artificial Sequence: Synthetic oligonucleotide
  Description of Combined DNA/RNA Molecule: Synthetic oligonucleotide
  modified_base (1): LNA-U
  modified_base (4): LNA-G
uucggagtt

SEQ ID NO: 8126 - DNA, 8 bp, Artificial Sequence
  Description of Artificial Sequence: Synthetic oligonucleotide
  Description of Combined DNA/RNA Molecule: Synthetic oligonucleotide
  modified_base (1): LNA-U
  modified_base (3): LNA-G
ucggagtt

SEQ ID NO: 8127 - DNA, 7 bp, Artificial Sequence
  Description of Artificial Sequence: Synthetic oligonucleotide
  Description of Combined DNA/RNA Molecule: Synthetic oligonucleotide
  modified_base (1): LNA-C
  modified_base (2): LNA-G
cggagtt

SEQ ID NO: 8128 - DNA, 21 bp, Artificial Sequence
  Description of Artificial Sequence: Synthetic oligonucleotide
  Description of Combined DNA/RNA Molecule: Synthetic oligonucleotide
  modified_base (2): LNA-G
  modified_base (16): LNA-G
ggaucuuauuucuucggagtt

SEQ ID NO: 8129 - DNA, 25 bp, Artificial Sequence
  Description of Artificial Sequence: Synthetic oligonucleotide
  Description of Combined DNA/RNA Molecule: Synthetic oligonucleotide
ggaucuuauuucuucggagacaatg

SEQ ID NO: 8130 - RNA, 25 nt, Artificial Sequence
  Description of Artificial Sequence: Synthetic oligonucleotide
guauuuugaugaggaguucacggcc

SEQ ID NO: 8131 - RNA, 25 nt, Artificial Sequence
  Description of Artificial Sequence: Synthetic oligonucleotide
ggcccagaugaucaccaucacacca

SEQ ID NO: 8132 - RNA, 25 nt, Artificial Sequence
  Description of Artificial Sequence: Synthetic oligonucleotide
gggaagaaaacuauccugcggguuu

SEQ ID NO: 8133 - RNA, 25 nt, Artificial Sequence
  Description of Artificial Sequence: Synthetic oligonucleotide
guuuuaauuuauuucauccaguuug

SEQ ID NO: 8134 - RNA, 25 nt, Artificial Sequence
  Description of Artificial Sequence: Synthetic oligonucleotide
acguagggaaauguuaaggacuucu

SEQ ID NO: 8135 - RNA, 25 nt, Artificial Sequence
  Description of Artificial Sequence: Synthetic oligonucleotide
ccaggguuuacccagugggacagag

SEQ ID NO: 8136 - RNA, 25 nt, Artificial Sequence
  Description of Artificial Sequence: Synthetic oligonucleotide
agcaagguuuaaauuuguuauugug

SEQ ID NO: 8137 - RNA, 25 nt, Artificial Sequence
  Description of Artificial Sequence: Synthetic oligonucleotide
uguauuauguuguucaaaugcauuu

SEQ ID NO: 8138 - RNA, 25 nt, Artificial Sequence
  Description of Artificial Sequence: Synthetic oligonucleotide
uuuuaaucuuugugacaggaaagcc

SEQ ID NO: 8139 - RNA, 25 nt, Artificial Sequence
  Description of Artificial Sequence: Synthetic oligonucleotide
uuaaucuuugugacaggaaagcccu

SEQ ID NO: 8140 - RNA, 25 nt, Artificial Sequence
  Description of Artificial Sequence: Synthetic oligonucleotide
gcugcuuaugucucccagcauggcc

SEQ ID NO: 8141 - RNA, 25 nt, Artificial Sequence
  Description of Artificial Sequence: Synthetic oligonucleotide
aaguguuucagaagcuucucccuga

SEQ ID NO: 8142 - RNA, 25 nt, Artificial Sequence
  Description of Artificial Sequence: Synthetic oligonucleotide
gaccaucaauaaggaagaagcccuu

SEQ ID NO: 8143 - RNA, 25 nt, Artificial Sequence
  Description of Artificial Sequence: Synthetic oligonucleotide
ccaucaauaaggaagaagcccuuca

SEQ ID NO: 8144 - RNA, 25 nt, Artificial Sequence
  Description of Artificial Sequence: Synthetic oligonucleotide
ucaauaaggaagaagcccuucagcg

SEQ ID NO: 8145 - RNA, 25 nt, Artificial Sequence
  Description of Artificial Sequence: Synthetic oligonucleotide
aauaaggaagaagcccuucagcggc

SEQ ID NO: 8146 - RNA, 25 nt, Artificial Sequence
  Description of Artificial Sequence: Synthetic oligonucleotide
aggaagaagcccuucagcggccagu

SEQ ID NO: 8147 - RNA, 25 nt, Artificial Sequence
  Description of Artificial Sequence: Synthetic oligonucleotide
gcauaacuaaaggugaaaagcuccg

SEQ ID NO: 8148 - RNA, 25 nt, Artificial Sequence
  Description of Artificial Sequence: Synthetic oligonucleotide
cauaacuaaaggugaaaagcuccgg

SEQ ID NO: 8149 - RNA, 25 nt, Artificial Sequence
  Description of Artificial Sequence: Synthetic oligonucleotide
cuacaucacgccagucaacagucug

SEQ ID NO: 8150 - RNA, 25 nt, Artificial Sequence
  Description of Artificial Sequence: Synthetic oligonucleotide
acuggauuuaagcagaguucaaaag

SEQ ID NO: 8151 - RNA, 25 nt, Artificial Sequence
  Description of Artificial Sequence: Synthetic oligonucleotide
cuggauuuaagcagaguucaaaagc

SEQ ID NO: 8152 - RNA, 25 nt, Artificial Sequence
  Description of Artificial Sequence: Synthetic oligonucleotide
gauuuaagcagaguucaaaagcccu

SEQ ID NO: 8153 - RNA, 25 nt, Artificial Sequence
  Description of Artificial Sequence: Synthetic oligonucleotide
auuuaagcagaguucaaaagcccuu

SEQ ID NO: 8154 - RNA, 25 nt, Artificial Sequence
  Description of Artificial Sequence: Synthetic oligonucleotide
uuaagcagaguucaaaagcccuuca

SEQ ID NO: 8155 - RNA, 25 nt, Artificial Sequence
  Description of Artificial Sequence: Synthetic oligonucleotide
uaagcagaguucaaaagcccuucag

SEQ ID NO: 8156 - RNA, 25 nt, Artificial Sequence
  Description of Artificial Sequence: Synthetic oligonucleotide
agcagaguucaaaagcccuucagcg

SEQ ID NO: 8157 - RNA, 25 nt, Artificial Sequence
  Description of Artificial Sequence: Synthetic oligonucleotide
cucagggucugagugaagccgcucg

SEQ ID NO: 8158 - RNA, 25 nt, Artificial Sequence
  Description of Artificial Sequence: Synthetic oligonucleotide
caagcaacuacaucacgccagucaa

SEQ ID NO: 8159 - RNA, 25 nt, Artificial Sequence
  Description of Artificial Sequence: Synthetic oligonucleotide
aucaauggcagcuucuuggugcgug

SEQ ID NO: 8160 - RNA, 25 nt, Artificial Sequence
  Description of Artificial Sequence: Synthetic oligonucleotide
uuccagcccacauuggauucaucag

SEQ ID NO: 8161 - RNA, 25 nt, Artificial Sequence
  Description of Artificial Sequence: Synthetic oligonucleotide
cagcugagaauguggaauaccuaag

SEQ ID NO: 8162 - RNA, 25 nt, Artificial Sequence
  Description of Artificial Sequence: Synthetic oligonucleotide
aacguaucuccuaauuugaggcuca

SEQ ID NO: 8163 - RNA, 25 nt, Artificial Sequence
  Description of Artificial Sequence: Synthetic oligonucleotide
ccuaaaauaauuucucuacaauugg

SEQ ID NO: 8164 - RNA, 25 nt, Artificial Sequence
  Description of Artificial Sequence: Synthetic oligonucleotide
uggaagauucagcuaguuaggagcc

SEQ ID NO: 8165 - RNA, 25 nt, Artificial Sequence
  Description of Artificial Sequence: Synthetic oligonucleotide
uuaaacucuccuagucaauauccac

SEQ ID NO: 8166 - RNA, 25 nt, Artificial Sequence
  Description of Artificial Sequence: Synthetic oligonucleotide
cagccuacaguuauguucagucaca

SEQ ID NO: 8167 - RNA, 25 nt, Artificial Sequence
  Description of Artificial Sequence: Synthetic oligonucleotide
guuauguucagucacacacacauac

SEQ ID NO: 8168 - RNA, 25 nt, Artificial Sequence
  Description of Artificial Sequence: Synthetic oligonucleotide
cacauacaaaauguuccuuuugcuu

SEQ ID NO: 8169 - RNA, 25 nt, Artificial Sequence
  Description of Artificial Sequence: Synthetic oligonucleotide
uccuuuugcuuuuaaaguaauuuuu

SEQ ID NO: 8170 - RNA, 25 nt, Artificial Sequence
  Description of Artificial Sequence: Synthetic oligonucleotide
ugaccugugaagcaacagucaaugg

SEQ ID NO: 8171 - RNA, 25 nt, Artificial Sequence
  Description of Artificial Sequence: Synthetic oligonucleotide
cuaucucacacaucgacaaaccaau

SEQ ID NO: 8172 - RNA, 25 nt, Artificial Sequence
  Description of Artificial Sequence: Synthetic oligonucleotide
uguccucaauuguacugcuaccacu

SEQ ID NO: 8173 - RNA, 25 nt, Artificial Sequence
  Description of Artificial Sequence: Synthetic oligonucleotide
aaaccguagcuggcaagcggucuua

SEQ ID NO: 8174 - RNA, 25 nt, Artificial Sequence
  Description of Artificial Sequence: Synthetic oligonucleotide
uagcuggcaagcggucuuaccggcu

SEQ ID NO: 8175 - RNA, 25 nt, Artificial Sequence
  Description of Artificial Sequence: Synthetic oligonucleotide
uuguaugguuaaaagauggguuacc

SEQ ID NO: 8176 - RNA, 25 nt, Artificial Sequence
  Description of Artificial Sequence: Synthetic oligonucleotide
ugguuaaaagauggguuaccugcga

SEQ ID NO: 8177 - RNA, 25 nt, Artificial Sequence
  Description of Artificial Sequence: Synthetic oligonucleotide
cagggaauuauacaaucuugcugag

SEQ ID NO: 8178 - RNA, 25 nt, Artificial Sequence
  Description of Artificial Sequence: Synthetic oligonucleotide
acaaucuugcugagcauaaaacagu

SEQ ID NO: 8179 - RNA, 25 nt, Artificial Sequence
  Description of Artificial Sequence: Synthetic oligonucleotide
ccaauaaugaagaguccuuuauccu

SEQ ID NO: 8180 - RNA, 25 nt, Artificial Sequence
  Description of Artificial Sequence: Synthetic oligonucleotide
acuuuggauguuccaacgcaaguug

SEQ ID NO: 8181 - RNA, 25 nt, Artificial Sequence
  Description of Artificial Sequence: Synthetic oligonucleotide
aaugcuuccacuaaacugaaaccau

SEQ ID NO: 8182 - RNA, 25 nt, Artificial Sequence
  Description of Artificial Sequence: Synthetic oligonucleotide
gagaaaguuugacuuuguuaaauau

SEQ ID NO: 8183 - RNA, 25 nt, Artificial Sequence
  Description of Artificial Sequence: Synthetic oligonucleotide
aaagaacuacuguauauuaaaaguu

SEQ ID NO: 8184 - RNA, 25 nt, Artificial Sequence
  Description of Artificial Sequence: Synthetic oligonucleotide
uuagaaauacggguuuugacuuaac

SEQ ID NO: 8185 - RNA, 25 nt, Artificial Sequence
  Description of Artificial Sequence: Synthetic oligonucleotide
aacauggguacagcaaacucagcac

SEQ ID NO: 8186 - RNA, 25 nt, Artificial Sequence
  Description of Artificial Sequence: Synthetic oligonucleotide
aaagacacagaagaugcugaccuca

SEQ ID NO: 8187 - RNA, 25 nt, Artificial Sequence
  Description of Artificial Sequence: Synthetic oligonucleotide
uaguagggagguuuauucagaucgc

SEQ ID NO: 8188 - RNA, 25 nt, Artificial Sequence
  Description of Artificial Sequence: Synthetic oligonucleotide
gccuucugcagcaggguucugggau

SEQ ID NO: 8189 - RNA, 25 nt, Artificial Sequence
  Description of Artificial Sequence: Synthetic oligonucleotide
ggucugguacauauuggaaauuaug

SEQ ID NO: 8190 - RNA, 25 nt, Artificial Sequence
  Description of Artificial Sequence: Synthetic oligonucleotide
cuaguccuuccgauggaagcacuag

SEQ ID NO: 8191 - RNA, 25 nt, Artificial Sequence
  Description of Artificial Sequence: Synthetic oligonucleotide
ccagugaauauuguuuuuaugugga

SEQ ID NO: 8192 - RNA, 25 nt, Artificial Sequence
  Description of Artificial Sequence: Synthetic oligonucleotide
augaauucaaguuggaauugguaga

SEQ ID NO: 8193 - RNA, 25 nt, Artificial Sequence
  Description of Artificial Sequence: Synthetic oligonucleotide
caggacacagauuuagacuuggaga

SEQ ID NO: 8194 - RNA, 25 nt, Artificial Sequence
  Description of Artificial Sequence: Synthetic oligonucleotide
cucaaagcacaguuacaguauucca

SEQ ID NO: 8195 - RNA, 25 nt, Artificial Sequence
  Description of Artificial Sequence: Synthetic oligonucleotide
accacugccaccacugaugaauuaa

SEQ ID NO: 8196 - RNA, 25 nt, Artificial Sequence
  Description of Artificial Sequence: Synthetic oligonucleotide
gaaacuacuagugccacaucaucac

SEQ ID NO: 8197 - RNA, 25 nt, Artificial Sequence
  Description of Artificial Sequence: Synthetic oligonucleotide
aagucggacagccucaccaaacaga

SEQ ID NO: 8198 - RNA, 25 nt, Artificial Sequence
  Description of Artificial Sequence: Synthetic oligonucleotide
gaaagcgaaaaauggaacaugaugg

SEQ ID NO: 8199 - RNA, 25 nt, Artificial Sequence
  Description of Artificial Sequence: Synthetic oligonucleotide
cccucugauuuagcauguagacugc

SEQ ID NO: 8200 - RNA, 25 nt, Artificial Sequence
  Description of Artificial Sequence: Synthetic oligonucleotide
ugagcuauuuaaggaucuauuuaug

SEQ ID NO: 8201 - RNA, 25 nt, Artificial Sequence
  Description of Artificial Sequence: Synthetic oligonucleotide
aaaaggugaaaaagcacuauuauca

SEQ ID NO: 8202 - RNA, 25 nt, Artificial Sequence
  Description of Artificial Sequence: Synthetic oligonucleotide
gaaaaagcacuauuaucaguucugc

SEQ ID NO: 8203 - RNA, 25 nt, Artificial Sequence
  Description of Artificial Sequence: Synthetic oligonucleotide
ggcugaaaagaaagauuaaaccuac

SEQ ID NO: 8204 - RNA, 25 nt, Artificial Sequence
  Description of Artificial Sequence: Synthetic oligonucleotide
uaaacccuuauaauaaaauccuucu

SEQ ID NO: 8205 - RNA, 25 nt, Artificial Sequence
  Description of Artificial Sequence: Synthetic oligonucleotide
cauacuauuagccaaugcuguagac

SEQ ID NO: 8206 - RNA, 25 nt, Artificial Sequence
  Description of Artificial Sequence: Synthetic oligonucleotide
gacagaagcauuuugauaggaauag

SEQ ID NO: 8207 - RNA, 25 nt, Artificial Sequence
  Description of Artificial Sequence: Synthetic oligonucleotide
agagcaaauaagauaauggcccuga

SEQ ID NO: 8208 - RNA, 25 nt, Artificial Sequence
  Description of Artificial Sequence: Synthetic oligonucleotide
ccaacauuuuucucuuccucaagca

SEQ ID NO: 8209 - RNA, 25 nt, Artificial Sequence
  Description of Artificial Sequence: Synthetic oligonucleotide
uuaaguaugagaaaaguucagccca

SEQ ID NO: 8210 - RNA, 25 nt, Artificial Sequence
  Description of Artificial Sequence: Synthetic oligonucleotide
caggaauaaagauggcugcugaacc

SEQ ID NO: 8211 - RNA, 25 nt, Artificial Sequence
  Description of Artificial Sequence: Synthetic oligonucleotide
aauuugaaugaccaaguucucuuca

SEQ ID NO: 8212 - RNA, 25 nt, Artificial Sequence
  Description of Artificial Sequence: Synthetic oligonucleotide
auguauaaagauagccagccuagag

SEQ ID NO: 8213 - RNA, 25 nt, Artificial Sequence
  Description of Artificial Sequence: Synthetic oligonucleotide
ggcuguaacuaucucugugaagugu

SEQ ID NO: 8214 - RNA, 25 nt, Artificial Sequence
  Description of Artificial Sequence: Synthetic oligonucleotide
ucugugaagugugagaaaauuucaa

SEQ ID NO: 8215 - RNA, 25 nt, Artificial Sequence
  Description of Artificial Sequence: Synthetic oligonucleotide
ccuuuaaggaaaugaauccuccuga

SEQ ID NO: 8216 - RNA, 25 nt, Artificial Sequence
  Description of Artificial Sequence: Synthetic oligonucleotide
aaggauacaaaaagugacaucauau

SEQ ID NO: 8217 - RNA, 25 nt, Artificial Sequence
  Description of Artificial Sequence: Synthetic oligonucleotide
agaugcaauuugaaucuucaucaua

SEQ ID NO: 8218 - RNA, 25 nt, Artificial Sequence
  Description of Artificial Sequence: Synthetic oligonucleotide
guucaaaacgaagacuagcuauuaa

SEQ ID NO: 8219 - RNA, 25 nt, Artificial Sequence
  Description of Artificial Sequence: Synthetic oligonucleotide
gugaaaccucaucucuacuaaaaau

SEQ ID NO: 8220 - RNA, 25 nt, Artificial Sequence
  Description of Artificial Sequence: Synthetic oligonucleotide
acgaaagagaagcucuaucucgccu

SEQ ID NO: 8221 - RNA, 25 nt, Artificial Sequence
  Description of Artificial Sequence: Synthetic oligonucleotide
cuccacaagcgccuucgguccaguu

SEQ ID NO: 8222 - RNA, 25 nt, Artificial Sequence
  Description of Artificial Sequence: Synthetic oligonucleotide
gagaagauuccaaagauguagccgc

SEQ ID NO: 8223 - RNA, 25 nt, Artificial Sequence
  Description of Artificial Sequence: Synthetic oligonucleotide
aaucuggauucaaugaggagacuug

SEQ ID NO: 8224 - RNA, 25 nt, Artificial Sequence
  Description of Artificial Sequence: Synthetic oligonucleotide
agaacagauuugagaguagugagga

SEQ ID NO: 8225 - RNA, 25 nt, Artificial Sequence
  Description of Artificial Sequence: Synthetic oligonucleotide
ccagagcugugcagaugaguacaaa

SEQ ID NO: 8226 - RNA, 25 nt, Artificial Sequence
  Description of Artificial Sequence: Synthetic oligonucleotide
ccucagauuguuguuguuaaugggc

SEQ ID NO: 8227 - RNA, 25 nt, Artificial Sequence
  Description of Artificial Sequence: Synthetic oligonucleotide
cuauuuuaauuauuuuuaauuuauu

SEQ ID NO: 8228 - RNA, 25 nt, Artificial Sequence
  Description of Artificial Sequence: Synthetic oligonucleotide
uuuaauuuauuaauauuuaaauaug

SEQ ID NO: 8229 - RNA, 25 nt, Artificial Sequence
  Description of Artificial Sequence: Synthetic oligonucleotide
augcaguuugaauauccuuuguuuc

SEQ ID NO: 8230 - RNA, 25 nt, Artificial Sequence
  Description of Artificial Sequence: Synthetic oligonucleotide
caugcugcuggcgucuaaguguuug

SEQ ID NO: 8231 - RNA, 25 nt, Artificial Sequence
  Description of Artificial Sequence: Synthetic oligonucleotide
agaugugcauuucaccugugacaaa

SEQ ID NO: 8232 - RNA, 25 nt, Artificial Sequence
  Description of Artificial Sequence: Synthetic oligonucleotide
ucaaaaccugugccaggcugaauua

SEQ ID NO: 8233 - RNA, 25 nt, Artificial Sequence
  Description of Artificial Sequence: Synthetic oligonucleotide
gaauguggguagucauucuuacaau

SEQ ID NO: 8234 - RNA, 25 nt, Artificial Sequence
  Description of Artificial Sequence: Synthetic oligonucleotide
auguggguagucauucuuacaauug

SEQ ID NO: 8235 - RNA, 25 nt, Artificial Sequence
  Description of Artificial Sequence: Synthetic oligonucleotide
ugaaaaugagcaucagagaguguac

SEQ ID NO: 8236 - RNA, 25 nt, Artificial Sequence
  Description of Artificial Sequence: Synthetic oligonucleotide
uugcuuuucauguagaacucagcag

SEQ ID NO: 8237 - RNA, 25 nt, Artificial Sequence
  Description of Artificial Sequence: Synthetic oligonucleotide
uguauuucuauauuuauuuucagua

SEQ ID NO: 8238 - RNA, 25 nt, Artificial Sequence
  Description of Artificial Sequence: Synthetic oligonucleotide
uuugauuaauguuucuuaaauggaa

SEQ ID NO: 8239 - RNA, 25 nt, Artificial Sequence
  Description of Artificial Sequence: Synthetic oligonucleotide
caacguguauagugccuaaaauugu

SEQ ID NO: 8240 - RNA, 25 nt, Artificial Sequence
  Description of Artificial Sequence: Synthetic oligonucleotide
cauauccuuggcuacuaacaucugg

SEQ ID NO: 8241 - RNA, 25 nt, Artificial Sequence
  Description of Artificial Sequence: Synthetic oligonucleotide
uacuaacaucuggagacugugagcu

SEQ ID NO: 8242 - RNA, 25 nt, Artificial Sequence
  Description of Artificial Sequence: Synthetic oligonucleotide
cauaaguugugugcuuuuuauuaau

SEQ ID NO: 8243 - RNA, 25 nt, Artificial Sequence
  Description of Artificial Sequence: Synthetic oligonucleotide
gcaucauuuuggcucuucuuacauu

SEQ ID NO: 8244 - RNA, 25 nt, Artificial Sequence
  Description of Artificial Sequence: Synthetic oligonucleotide
gcucuucuuacauuuguaaaaaugu

SEQ ID NO: 8245 - RNA, 25 nt, Artificial Sequence
  Description of Artificial Sequence: Synthetic oligonucleotide
agauuaggucaucuuaauucauauu

SEQ ID NO: 8246 - RNA, 25 nt, Artificial Sequence
  Description of Artificial Sequence: Synthetic oligonucleotide
auggaauugaaagaacuaaucauga

SEQ ID NO: 8247 - RNA, 25 nt, Artificial Sequence
  Description of Artificial Sequence: Synthetic oligonucleotide
cacacucauuccuucugcucuuggg

SEQ ID NO: 8248 - RNA, 25 nt, Artificial Sequence
  Description of Artificial Sequence: Synthetic oligonucleotide
uguagagguaaccaguagcuuugag

SEQ ID NO: 8249 - RNA, 25 nt, Artificial Sequence
  Description of Artificial Sequence: Synthetic oligonucleotide
caaccacaugccacguaauauuuca

SEQ ID NO: 8250 - RNA, 25 nt, Artificial Sequence
  Description of Artificial Sequence: Synthetic oligonucleotide
ucggaaacaaguuauucucuucacu

SEQ ID NO: 8251 - RNA, 25 nt, Artificial Sequence
  Description of Artificial Sequence: Synthetic oligonucleotide
acucccaauaacuaaugcuaagaaa

SEQ ID NO: 8252 - RNA, 25 nt, Artificial Sequence
  Description of Artificial Sequence: Synthetic oligonucleotide
aaugcuaagaaaugcugaaaaucaa

SEQ ID NO: 8253 - RNA, 25 nt, Artificial Sequence
  Description of Artificial Sequence: Synthetic oligonucleotide
gucuuucucuaaauaugauuacuuu

SEQ ID NO: 8254 - RNA, 25 nt, Artificial Sequence
  Description of Artificial Sequence: Synthetic oligonucleotide
ugaauuucaggcauuuuguucuaca

SEQ ID NO: 8255 - RNA, 25 nt, Artificial Sequence
  Description of Artificial Sequence: Synthetic oligonucleotide
cgauucccucucacccgggacucuc

SEQ ID NO: 8256 - RNA, 25 nt, Artificial Sequence
  Description of Artificial Sequence: Synthetic oligonucleotide
aggaaagugaaccuuuaaaguaaag

SEQ ID NO: 8257 - RNA, 25 nt, Artificial Sequence
  Description of Artificial Sequence: Synthetic oligonucleotide
gaggcugcaugcucuggaagccugg

SEQ ID NO: 8258 - RNA, 25 nt, Artificial Sequence
  Description of Artificial Sequence: Synthetic oligonucleotide
ucucugaacagaaaacaaaagagag

SEQ ID NO: 8259 - RNA, 25 nt, Artificial Sequence
  Description of Artificial Sequence: Synthetic oligonucleotide
aacuuggcuguaaucaguuaugccg

SEQ ID NO: 8260 - RNA, 25 nt, Artificial Sequence
  Description of Artificial Sequence: Synthetic oligonucleotide
agaagccaaaauuaaaagaagucca

SEQ ID NO: 8261 - RNA, 25 nt, Artificial Sequence
  Description of Artificial Sequence: Synthetic oligonucleotide
auuaaaagaaguccaggugagguua

SEQ ID NO: 8262 - RNA, 25 nt, Artificial Sequence
  Description of Artificial Sequence: Synthetic oligonucleotide
gaauccggauuaucgggaagaggac

SEQ ID NO: 8263 - RNA, 25 nt, Artificial Sequence
  Description of Artificial Sequence: Synthetic oligonucleotide
aaugugacaucaaagcaaguauugu

SEQ ID NO: 8264 - RNA, 25 nt, Artificial Sequence
  Description of Artificial Sequence: Synthetic oligonucleotide
caucaaagcaaguauuguagcacuc

SEQ ID NO: 8265 - RNA, 25 nt, Artificial Sequence
  Description of Artificial Sequence: Synthetic oligonucleotide
agagagagaaaacaaaaccacaaau

SEQ ID NO: 8266 - RNA, 25 nt, Artificial Sequence
  Description of Artificial Sequence: Synthetic oligonucleotide
ucgcuguaguauuuaagcccauaca

SEQ ID NO: 8267 - RNA, 25 nt, Artificial Sequence
  Description of Artificial Sequence: Synthetic oligonucleotide
cgcuguaguauuuaagcccauacag

SEQ ID NO: 8268 - RNA, 25 nt, Artificial Sequence
  Description of Artificial Sequence: Synthetic oligonucleotide
auuuaagcccauacagaaaccuucc

SEQ ID NO: 8269 - RNA, 25 nt, Artificial Sequence
  Description of Artificial Sequence: Synthetic oligonucleotide
auuaaaauaaacaugguauaccuac

SEQ ID NO: 8270 - RNA, 25 nt, Artificial Sequence
  Description of Artificial Sequence: Synthetic oligonucleotide
cuguucugaucggccaguuuucgga

SEQ ID NO: 8271 - RNA, 25 nt, Artificial Sequence
  Description of Artificial Sequence: Synthetic oligonucleotide
aaauaauuugaacuuuggaacaggg

SEQ ID NO: 8272 - RNA, 25 nt, Artificial Sequence
  Description of Artificial Sequence: Synthetic oligonucleotide
ugcgaccuuaauuuaacuuuccagu

SEQ ID NO: 8273 - RNA, 25 nt, Artificial Sequence
  Description of Artificial Sequence: Synthetic oligonucleotide
cugagaaagcuaaaguuugguuuug

SEQ ID NO: 8274 - RNA, 25 nt, Artificial Sequence
  Description of Artificial Sequence: Synthetic oligonucleotide
aguaaagaugcuacuucccacugua

SEQ ID NO: 8275 - RNA, 25 nt, Artificial Sequence
  Description of Artificial Sequence: Synthetic oligonucleotide
cugcuuaauugcugauaccauauga

SEQ ID NO: 8276 - RNA, 25 nt, Artificial Sequence
  Description of Artificial Sequence: Synthetic oligonucleotide
uaccauaugaaugaaacaugggcug

SEQ ID NO: 8277 - RNA, 25 nt, Artificial Sequence
  Description of Artificial Sequence: Synthetic oligonucleotide
aacuuucuuauccaacuuuuucaua

SEQ ID NO: 8278 - RNA, 25 nt, Artificial Sequence
  Description of Artificial Sequence: Synthetic oligonucleotide
ccuugcaugacaucaugaggccgga

SEQ ID NO: 8279 - RNA, 25 nt, Artificial Sequence
  Description of Artificial Sequence: Synthetic oligonucleotide
ugaauuuguauaugacugcauuugu

SEQ ID NO: 8280 - RNA, 25 nt, Artificial Sequence
  Description of Artificial Sequence: Synthetic oligonucleotide
gaauccuaguagaauguuuacuacc

SEQ ID NO: 8281 - RNA, 25 nt, Artificial Sequence
  Description of Artificial Sequence: Synthetic oligonucleotide
gaaagggaagaauuuuuugaugaaa

SEQ ID NO: 8282 - RNA, 25 nt, Artificial Sequence
  Description of Artificial Sequence: Synthetic oligonucleotide
uaucggcaugccagugugugaauuu

SEQ ID NO: 8283 - RNA, 25 nt, Artificial Sequence
  Description of Artificial Sequence: Synthetic oligonucleotide
caccucauaguagagcaauguaugu

SEQ ID NO: 8284 - RNA, 25 nt, Artificial Sequence
  Description of Artificial Sequence: Synthetic oligonucleotide
ccagaauugccaaagcacauauaua

SEQ ID NO: 8285 - RNA, 25 nt, Artificial Sequence
  Description of Artificial Sequence: Synthetic oligonucleotide
uggugaucuggguaauaguuucucc

SEQ ID NO: 8286 - RNA, 25 nt, Artificial Sequence
  Description of Artificial Sequence: Synthetic oligonucleotide
gaucuggguaauaguuucuccaaau

SEQ ID NO: 8287 - RNA, 25 nt, Artificial Sequence
  Description of Artificial Sequence: Synthetic oligonucleotide
ggaugugaugaauacuuccuagaaa

SEQ ID NO: 8288 - RNA, 25 nt, Artificial Sequence
  Description of Artificial Sequence: Synthetic oligonucleotide
cauuuccacagcuacaccauauaug

SEQ ID NO: 8289 - RNA, 25 nt, Artificial Sequence
  Description of Artificial Sequence: Synthetic oligonucleotide
acagcuacaccauauaugaauggag

SEQ ID NO: 8290 - RNA, 25 nt, Artificial Sequence
  Description of Artificial Sequence: Synthetic oligonucleotide
ugcaguucuuacacgagaagaagau

SEQ ID NO: 8291 - RNA, 25 nt, Artificial Sequence
  Description of Artificial Sequence: Synthetic oligonucleotide
acgagaagaagaucauuuacaggga

SEQ ID NO: 8292 - RNA, 25 nt, Artificial Sequence
  Description of Artificial Sequence: Synthetic oligonucleotide
cgagaagaagaucauuuacagggac

SEQ ID NO: 8293 - RNA, 25 nt, Artificial Sequence
  Description of Artificial Sequence: Synthetic oligonucleotide
aagaagaucauuuacagggaccuga

SEQ ID NO: 8294 - RNA, 25 nt, Artificial Sequence
  Description of Artificial Sequence: Synthetic oligonucleotide
agaggaagagguguuugacugcauc

SEQ ID NO: 8295 - RNA, 25 nt, Artificial Sequence
  Description of Artificial Sequence: Synthetic oligonucleotide
gaggaagagguguuugacugcaucg

SEQ ID NO: 8296 - RNA, 25 nt, Artificial Sequence
  Description of Artificial Sequence: Synthetic oligonucleotide
cuacuuugagggcgaguucacaggg

SEQ ID NO: 8297 - RNA, 25 nt, Artificial Sequence
  Description of Artificial Sequence: Synthetic oligonucleotide
agggcaucuccuggcaccucugucc

SEQ ID NO: 8298 - RNA, 25 nt, Artificial Sequence
  Description of Artificial Sequence: Synthetic oligonucleotide
ggagugauaugguuugucuuuuuaa

SEQ ID NO: 8299 - RNA, 25 nt, Artificial Sequence
  Description of Artificial Sequence: Synthetic oligonucleotide
gagugauaugguuugucuuuuuaag

SEQ ID NO: 8300 - RNA, 25 nt, Artificial Sequence
  Description of Artificial Sequence: Synthetic oligonucleotide
ugcaguaaagauccuaaagguuguc

SEQ ID NO: 8301 - RNA, 25 nt, Artificial Sequence
  Description of Artificial Sequence: Synthetic oligonucleotide
aguaaagauccuaaagguugucgac

SEQ ID NO: 8302 - RNA, 25 nt, Artificial Sequence
  Description of Artificial Sequence: Synthetic oligonucleotide
ugacaaaggacaaccuggcaauugu

SEQ ID NO: 8303 - RNA, 25 nt, Artificial Sequence
  Description of Artificial Sequence: Synthetic oligonucleotide
gcaauugugacccaguggugcgagg

SEQ ID NO: 8304 - RNA, 25 nt, Artificial Sequence
  Description of Artificial Sequence: Synthetic oligonucleotide
aacaucauccauagagacaugaaau

SEQ ID NO: 8305 - RNA, 25 nt, Artificial Sequence
  Description of Artificial Sequence: Synthetic oligonucleotide
ugaaauccaacaauauauuucucca

SEQ ID NO: 8306 - RNA, 25 nt, Artificial Sequence
  Description of Artificial Sequence: Synthetic oligonucleotide
aacaauauauuucuccaugaaggcu

SEQ ID NO: 8307 - RNA, 25 nt, Artificial Sequence
  Description of Artificial Sequence: Synthetic oligonucleotide
aacaguaaagucacgcuggaguggu

SEQ ID NO: 8308 - RNA, 25 nt, Artificial Sequence
  Description of Artificial Sequence: Synthetic oligonucleotide
ugugaagaaaguaaaggaagagagg

SEQ ID NO: 8309 - RNA, 25 nt, Artificial Sequence
  Description of Artificial Sequence: Synthetic oligonucleotide
cuuccgagccauccuugcaucgggc

SEQ ID NO: 8310 - RNA, 25 nt, Artificial Sequence
  Description of Artificial Sequence: Synthetic oligonucleotide
aauggagguugaauauccuacugug

SEQ ID NO: 8311 - RNA, 25 nt, Artificial Sequence
  Description of Artificial Sequence: Synthetic oligonucleotide
ggagguugaauauccuacuguguaa

SEQ ID NO: 8312 - RNA, 25 nt, Artificial Sequence
  Description of Artificial Sequence: Synthetic oligonucleotide
auuuugaguuuucccuuguagugua

SEQ ID NO: 8313 - RNA, 25 nt, Artificial Sequence
  Description of Artificial Sequence: Synthetic oligonucleotide
uauccuguuuguucuuuguugauug

SEQ ID NO: 8314 - RNA, 25 nt, Artificial Sequence
  Description of Artificial Sequence: Synthetic oligonucleotide
ccuguuuguucuuuguugauugaaa

SEQ ID NO: 8315 - RNA, 25 nt, Artificial Sequence
  Description of Artificial Sequence: Synthetic oligonucleotide
cucuacagccuucuuuuucuuccau

SEQ ID NO: 8316 - RNA, 25 nt, Artificial Sequence
  Description of Artificial Sequence: Synthetic oligonucleotide
ucuuccauagcuaaucuuccuucua

SEQ ID NO: 8317 - RNA, 25 nt, Artificial Sequence
  Description of Artificial Sequence: Synthetic oligonucleotide
auaaucuuccuguugaaugcuucau

SEQ ID NO: 8318 - RNA, 25 nt, Artificial Sequence
  Description of Artificial Sequence: Synthetic oligonucleotide
uaaucuuccuguugaaugcuucaug

SEQ ID NO: 8319 - RNA, 25 nt, Artificial Sequence
  Description of Artificial Sequence: Synthetic oligonucleotide
cuucaugacuugaauucuacuuuga

SEQ ID NO: 8320 - RNA, 25 nt, Artificial Sequence
  Description of Artificial Sequence: Synthetic oligonucleotide
aagagggagagaagcaacuacagac

SEQ ID NO: 8321 - RNA, 25 nt, Artificial Sequence
  Description of Artificial Sequence: Synthetic oligonucleotide
cgucuccuaccagaccaaggucaac

SEQ ID NO: 8322 - RNA, 25 nt, Artificial Sequence
  Description of Artificial Sequence: Synthetic oligonucleotide
gaucaaucggcccgacuaucucgac

SEQ ID NO: 8323 - RNA, 25 nt, Artificial Sequence
  Description of Artificial Sequence: Synthetic oligonucleotide
ggacgaacauccaaccuucccaaac

SEQ ID NO: 8324 - RNA, 25 nt, Artificial Sequence
  Description of Artificial Sequence: Synthetic oligonucleotide
agggucggaacccaagcuuagaacu

SEQ ID NO: 8325 - RNA, 25 nt, Artificial Sequence
  Description of Artificial Sequence: Synthetic oligonucleotide
ucggaacccaagcuuagaacuuuaa

SEQ ID NO: 8326 - RNA, 25 nt, Artificial Sequence
  Description of Artificial Sequence: Synthetic oligonucleotide
acccaagcuuagaacuuuaagcaac

SEQ ID NO: 8327 - RNA, 25 nt, Artificial Sequence
  Description of Artificial Sequence: Synthetic oligonucleotide
gaacuuuaagcaacaagaccaccac

SEQ ID NO: 8328 - RNA, 25 nt, Artificial Sequence
  Description of Artificial Sequence: Synthetic oligonucleotide
acuauucaguggcgagaaauaaagu

SEQ ID NO: 8329 - RNA, 25 nt, Artificial Sequence
  Description of Artificial Sequence: Synthetic oligonucleotide
cuauucaguggcgagaaauaaaguu

SEQ ID NO: 8330 - RNA, 25 nt, Artificial Sequence
  Description of Artificial Sequence: Synthetic oligonucleotide
aaacacagauaacaggaaaugaucc

SEQ ID NO: 8331 - RNA, 25 nt, Artificial Sequence
  Description of Artificial Sequence: Synthetic oligonucleotide
cuuaagaaaagagaagaaaugaaac

SEQ ID NO: 8332 - RNA, 25 nt, Artificial Sequence
  Description of Artificial Sequence: Synthetic oligonucleotide
cugaaggaguguguuuccauccucc

SEQ ID NO: 8333 - RNA, 25 nt, Artificial Sequence
  Description of Artificial Sequence: Synthetic oligonucleotide
ucaccgcgggacugaaaaucuuuga

SEQ ID NO: 8334 - RNA, 25 nt, Artificial Sequence
  Description of Artificial Sequence: Synthetic oligonucleotide
agcagaaauaagcgugccguucagg

SEQ ID NO: 8335 - RNA, 25 nt, Artificial Sequence
  Description of Artificial Sequence: Synthetic oligonucleotide
aagcgugccguucaggguccagaag

SEQ ID NO: 8336 - RNA, 25 nt, Artificial Sequence
  Description of Artificial Sequence: Synthetic oligonucleotide
agaaacagucacucaagacugcuug

SEQ ID NO: 8337 - RNA, 25 nt, Artificial Sequence
  Description of Artificial Sequence: Synthetic oligonucleotide
agaggaagaagguccaugucuuugg

SEQ ID NO: 8338 - RNA, 25 nt, Artificial Sequence
  Description of Artificial Sequence: Synthetic oligonucleotide
uguauucaaaauaugccugaaacac

SEQ ID NO: 8339 - RNA, 25 nt, Artificial Sequence
  Description of Artificial Sequence: Synthetic oligonucleotide
auuuuccucccuuucucuguaccuc

SEQ ID NO: 8340 - RNA, 25 nt, Artificial Sequence
  Description of Artificial Sequence: Synthetic oligonucleotide
caaagaaagauagagcaagacaaga

SEQ ID NO: 8341 - RNA, 25 nt, Artificial Sequence
  Description of Artificial Sequence: Synthetic oligonucleotide
aagaaagauagagcaagacaagaaa

SEQ ID NO: 8342 - RNA, 25 nt, Artificial Sequence
  Description of Artificial Sequence: Synthetic oligonucleotide
gaaagcauuuguuuguacaagaucc

SEQ ID NO: 8343 - RNA, 25 nt, Artificial Sequence
  Description of Artificial Sequence: Synthetic oligonucleotide
ugaguuaaacgaacguacuugcaga

SEQ ID NO: 8344 - RNA, 25 nt, Artificial Sequence
  Description of Artificial Sequence: Synthetic oligonucleotide
acugauacagaacgaucgauacaga

SEQ ID NO: 8345 - RNA, 25 nt, Artificial Sequence
  Description of Artificial Sequence: Synthetic oligonucleotide
auauuauauauauauaaaaauaaau

SEQ ID NO: 8346 - RNA, 25 nt, Artificial Sequence
  Description of Artificial Sequence: Synthetic oligonucleotide
auuauauauauauaaaaauaaauau

SEQ ID NO: 8347 - RNA, 25 nt, Artificial Sequence
  Description of Artificial Sequence: Synthetic oligonucleotide
ucacuggauguauuugacugcugug

SEQ ID NO: 8348 - RNA, 25 nt, Artificial Sequence
  Description of Artificial Sequence: Synthetic oligonucleotide
cagggaagaggaggagaugagagac

SEQ ID NO: 8349 - RNA, 25 nt, Artificial Sequence
  Description of Artificial Sequence: Synthetic oligonucleotide
augaucuuuuuuuugucccacuugg

SEQ ID NO: 8350 - RNA, 27 nt, Artificial Sequence
  Description of Artificial Sequence: Synthetic oligonucleotide
ggccgugaacuccucaucaaaauaccu

SEQ ID NO: 8351 - RNA, 27 nt, Artificial Sequence
  Description of Artificial Sequence: Synthetic oligonucleotide
uggugugauggugaucaucugggccgu

SEQ ID NO: 8352 - RNA, 27 nt, Artificial Sequence
  Description of Artificial Sequence: Synthetic oligonucleotide
aaacccgcaggauaguuuucuucccua

SEQ ID NO: 8353 - RNA, 27 nt, Artificial Sequence
  Description of Artificial Sequence: Synthetic oligonucleotide
caaacuggaugaaauaaauuaaaaccc

SEQ ID NO: 8354 - RNA, 27 nt, Artificial Sequence
  Description of Artificial Sequence: Synthetic oligonucleotide
agaaguccuuaacauuucccuacguga

SEQ ID NO: 8355 - RNA, 27 nt, Artificial Sequence
  Description of Artificial Sequence: Synthetic oligonucleotide
cucugucccacuggguaaacccuggcc

SEQ ID NO: 8356 - RNA, 27 nt, Artificial Sequence
  Description of Artificial Sequence: Synthetic oligonucleotide
cacaauaacaaauuuaaaccuugcucc

SEQ ID NO: 8357 - RNA, 27 nt, Artificial Sequence
  Description of Artificial Sequence: Synthetic oligonucleotide
aaaugcauuugaacaacauaauacaca

SEQ ID NO: 8358 - RNA, 27 nt, Artificial Sequence
  Description of Artificial Sequence: Synthetic oligonucleotide
ggcuuuccugucacaaagauuaaaaac

SEQ ID NO: 8359 - RNA, 27 nt, Artificial Sequence
  Description of Artificial Sequence: Synthetic oligonucleotide
agggcuuuccugucacaaagauuaaaa

SEQ ID NO: 8360 - RNA, 27 nt, Artificial Sequence
  Description of Artificial Sequence: Synthetic oligonucleotide
ggccaugcugggagacauaagcagcag

SEQ ID NO: 8361 - RNA, 27 nt, Artificial Sequence
  Description of Artificial Sequence: Synthetic oligonucleotide
ucagggagaagcuucugaaacacuucu

SEQ ID NO: 8362 - RNA, 27 nt, Artificial Sequence
  Description of Artificial Sequence: Synthetic oligonucleotide
aagggcuucuuccuuauugauggucag

SEQ ID NO: 8363 - RNA, 27 nt, Artificial Sequence
  Description of Artificial Sequence: Synthetic oligonucleotide
ugaagggcuucuuccuuauugaugguc

SEQ ID NO: 8364 - RNA, 27 nt, Artificial Sequence
  Description of Artificial Sequence: Synthetic oligonucleotide
cgcugaagggcuucuuccuuauugaug

SEQ ID NO: 8365 - RNA, 27 nt, Artificial Sequence
  Description of Artificial Sequence: Synthetic oligonucleotide
gccgcugaagggcuucuuccuuauuga

SEQ ID NO: 8366 - RNA, 27 nt, Artificial Sequence
  Description of Artificial Sequence: Synthetic oligonucleotide
acuggccgcugaagggcuucuuccuua

SEQ ID NO: 8367 - RNA, 27 nt, Artificial Sequence
  Description of Artificial Sequence: Synthetic oligonucleotide
cggagcuuuucaccuuuaguuaugcuu

SEQ ID NO: 8368 - RNA, 27 nt, Artificial Sequence
  Description of Artificial Sequence: Synthetic oligonucleotide
ccggagcuuuucaccuuuaguuaugcu

SEQ ID NO: 8369 - RNA, 27 nt, Artificial Sequence
  Description of Artificial Sequence: Synthetic oligonucleotide
cagacuguugacuggcgugauguaguu

SEQ ID NO: 8370 - RNA, 27 nt, Artificial Sequence
  Description of Artificial Sequence: Synthetic oligonucleotide
cuuuugaacucugcuuaaauccagugg

SEQ ID NO: 8371 - RNA, 27 nt, Artificial Sequence
  Description of Artificial Sequence: Synthetic oligonucleotide
gcuuuugaacucugcuuaaauccagug

SEQ ID NO: 8372 - RNA, 27 nt, Artificial Sequence
  Description of Artificial Sequence: Synthetic oligonucleotide
agggcuuuugaacucugcuuaaaucca

SEQ ID NO: 8373 - RNA, 27 nt, Artificial Sequence
  Description of Artificial Sequence: Synthetic oligonucleotide
aagggcuuuugaacucugcuuaaaucc

SEQ ID NO: 8374 - RNA, 27 nt, Artificial Sequence
  Description of Artificial Sequence: Synthetic oligonucleotide
ugaagggcuuuugaacucugcuuaaau

SEQ ID NO: 8375 - RNA, 27 nt, Artificial Sequence
  Description of Artificial Sequence: Synthetic oligonucleotide
cugaagggcuuuugaacucugcuuaaa

SEQ ID NO: 8376 - RNA, 27 nt, Artificial Sequence
  Description of Artificial Sequence: Synthetic oligonucleotide
cgcugaagggcuuuugaacucugcuua

SEQ ID NO: 8377 - RNA, 27 nt, Artificial Sequence
  Description of Artificial Sequence: Synthetic oligonucleotide
cgagcggcuucacucagacccugaggc

SEQ ID NO: 8378 - RNA, 27 nt, Artificial Sequence
  Description of Artificial Sequence: Synthetic oligonucleotide
uugacuggcgugauguaguugcuuggg

SEQ ID NO: 8379 - RNA, 27 nt, Artificial Sequence
  Description of Artificial Sequence: Synthetic oligonucleotide
cacgcaccaagaagcugccauugaucc

SEQ ID NO: 8380 - RNA, 27 nt, Artificial Sequence
  Description of Artificial Sequence: Synthetic oligonucleotide
cugaugaauccaaugugggcuggaauc

SEQ ID NO: 8381 - RNA, 27 nt, Artificial Sequence
  Description of Artificial Sequence: Synthetic oligonucleotide
cuuagguauuccacauucucagcugug

SEQ ID NO: 8382 - RNA, 27 nt, Artificial Sequence
  Description of Artificial Sequence: Synthetic oligonucleotide
ugagccucaaauuaggagauacguuuu

SEQ ID NO: 8383 - RNA, 27 nt, Artificial Sequence
  Description of Artificial Sequence: Synthetic oligonucleotide
ccaauuguagagaaauuauuuuaggaa

SEQ ID NO: 8384 - RNA, 27 nt, Artificial Sequence
  Description of Artificial Sequence: Synthetic oligonucleotide
ggcuccuaacuagcugaaucuuccaau

SEQ ID NO: 8385 - RNA, 27 nt, Artificial Sequence
  Description of Artificial Sequence: Synthetic oligonucleotide
guggauauugacuaggagaguuuaaaa

SEQ ID NO: 8386 - RNA, 27 nt, Artificial Sequence
  Description of Artificial Sequence: Synthetic oligonucleotide
ugugacugaacauaacuguaggcugaa

SEQ ID NO: 8387 - RNA, 27 nt, Artificial Sequence
  Description of Artificial Sequence: Synthetic oligonucleotide
guaugugugugugacugaacauaacug

SEQ ID NO: 8388 - RNA, 27 nt, Artificial Sequence
  Description of Artificial Sequence: Synthetic oligonucleotide
aagcaaaaggaacauuuuguaugugug

SEQ ID NO: 8389 - RNA, 27 nt, Artificial Sequence
  Description of Artificial Sequence: Synthetic oligonucleotide
aaaaauuacuuuaaaagcaaaaggaac

SEQ ID NO: 8390 - RNA, 27 nt, Artificial Sequence
  Description of Artificial Sequence: Synthetic oligonucleotide
ccauugacuguugcuucacaggucaga

SEQ ID NO: 8391 - RNA, 27 nt, Artificial Sequence
  Description of Artificial Sequence: Synthetic oligonucleotide
auugguuugucgaugugugagauaguu

SEQ ID NO: 8392 - RNA, 27 nt, Artificial Sequence
  Description of Artificial Sequence: Synthetic oligonucleotide
agugguagcaguacaauugaggacaag

SEQ ID NO: 8393 - RNA, 27 nt, Artificial Sequence
  Description of Artificial Sequence: Synthetic oligonucleotide
uaagaccgcuugccagcuacgguuuca

SEQ ID NO: 8394 - RNA, 27 nt, Artificial Sequence
  Description of Artificial Sequence: Synthetic oligonucleotide
agccgguaagaccgcuugccagcuacg

SEQ ID NO: 8395 - RNA, 27 nt, Artificial Sequence
  Description of Artificial Sequence: Synthetic oligonucleotide
gguaacccaucuuuuaaccauacaacu

SEQ ID NO: 8396 - RNA, 27 nt, Artificial Sequence
  Description of Artificial Sequence: Synthetic oligonucleotide
ucgcagguaacccaucuuuuaaccaua

SEQ ID NO: 8397 - RNA, 27 nt, Artificial Sequence
  Description of Artificial Sequence: Synthetic oligonucleotide
cucagcaagauuguauaauucccugca

SEQ ID NO: 8398 - RNA, 27 nt, Artificial Sequence
  Description of Artificial Sequence: Synthetic oligonucleotide
acuguuuuaugcucagcaagauuguau

SEQ ID NO: 8399 - RNA, 27 nt, Artificial Sequence
  Description of Artificial Sequence: Synthetic oligonucleotide
aggauaaaggacucuucauuauuggaa

SEQ ID NO: 8400 - RNA, 27 nt, Artificial Sequence
  Description of Artificial Sequence: Synthetic oligonucleotide
caacuugcguuggaacauccaaagugu

SEQ ID NO: 8401 - RNA, 27 nt, Artificial Sequence
  Description of Artificial Sequence: Synthetic oligonucleotide
augguuucaguuuaguggaagcauuua

SEQ ID NO: 8402 - RNA, 27 nt, Artificial Sequence
  Description of Artificial Sequence: Synthetic oligonucleotide
auauuuaacaaagucaaacuuucucac

SEQ ID NO: 8403 - RNA, 27 nt, Artificial Sequence
  Description of Artificial Sequence: Synthetic oligonucleotide
aacuuuuaauauacaguaguucuuuuc

SEQ ID NO: 8404 - RNA, 27 nt, Artificial Sequence
  Description of Artificial Sequence: Synthetic oligonucleotide
guuaagucaaaacccguauuucuaaag

SEQ ID NO: 8405 - RNA, 27 nt, Artificial Sequence
  Description of Artificial Sequence: Synthetic oligonucleotide
gugcugaguuugcuguacccauguuga

SEQ ID NO: 8406 - RNA, 27 nt, Artificial Sequence
  Description of Artificial Sequence: Synthetic oligonucleotide
ugaggucagcaucuucugugucuuuac

SEQ ID NO: 8407 - RNA, 27 nt, Artificial Sequence
  Description of Artificial Sequence: Synthetic oligonucleotide
gcgaucugaauaaaccucccuacuagc

SEQ ID NO: 8408 - RNA, 27 nt, Artificial Sequence
  Description of Artificial Sequence: Synthetic oligonucleotide
aucccagaacccugcugcagaaggcca

SEQ ID NO: 8409 - RNA, 27 nt, Artificial Sequence
  Description of Artificial Sequence: Synthetic oligonucleotide
cauaauuuccaauauguaccagaccuu

SEQ ID NO: 8410 - RNA, 27 nt, Artificial Sequence
  Description of Artificial Sequence: Synthetic oligonucleotide
cuagugcuuccaucggaaggacuaggu

SEQ ID NO: 8411 - RNA, 27 nt, Artificial Sequence
  Description of Artificial Sequence: Synthetic oligonucleotide
uccacauaaaaacaauauucacuggga

SEQ ID NO: 8412 - RNA, 27 nt, Artificial Sequence
  Description of Artificial Sequence: Synthetic oligonucleotide
ucuaccaauuccaacuugaauucauug

SEQ ID NO: 8413 - RNA, 27 nt, Artificial Sequence
  Description of Artificial Sequence: Synthetic oligonucleotide
ucuccaagucuaaaucuguguccugag

SEQ ID NO: 8414 - RNA, 27 nt, Artificial Sequence
  Description of Artificial Sequence: Synthetic oligonucleotide
uggaauacuguaacugugcuuugagga

SEQ ID NO: 8415 - RNA, 27 nt, Artificial Sequence
  Description of Artificial Sequence: Synthetic oligonucleotide
uuaauucaucagugguggcagugguag

SEQ ID NO: 8416 - RNA, 27 nt, Artificial Sequence
  Description of Artificial Sequence: Synthetic oligonucleotide
gugaugauguggcacuaguaguuucuu

SEQ ID NO: 8417 - RNA, 27 nt, Artificial Sequence
  Description of Artificial Sequence: Synthetic oligonucleotide
ucuguuuggugaggcuguccgacuuug

SEQ ID NO: 8418 - RNA, 27 nt, Artificial Sequence
  Description of Artificial Sequence: Synthetic oligonucleotide
ccaucauguuccauuuuucgcuuucuc

SEQ ID NO: 8419 - RNA, 27 nt, Artificial Sequence
  Description of Artificial Sequence: Synthetic oligonucleotide
gcagucuacaugcuaaaucagagggua

SEQ ID NO: 8420 - RNA, 27 nt, Artificial Sequence
  Description of Artificial Sequence: Synthetic oligonucleotide
cauaaauagauccuuaaauagcucaaa

SEQ ID NO: 8421 - RNA, 27 nt, Artificial Sequence
  Description of Artificial Sequence: Synthetic oligonucleotide
ugauaauagugcuuuuucaccuuuuuc

SEQ ID NO: 8422 - RNA, 27 nt, Artificial Sequence
  Description of Artificial Sequence: Synthetic oligonucleotide
gcagaacugauaauagugcuuuuucac

SEQ ID NO: 8423 - RNA, 27 nt, Artificial Sequence
  Description of Artificial Sequence: Synthetic oligonucleotide
guagguuuaaucuuucuuuucagccau

SEQ ID NO: 8424 - RNA, 27 nt, Artificial Sequence
  Description of Artificial Sequence: Synthetic oligonucleotide
agaaggauuuuauuauaaggguuuaau

SEQ ID NO: 8425 - RNA, 27 nt, Artificial Sequence
  Description of Artificial Sequence: Synthetic oligonucleotide
gucuacagcauuggcuaauaguaugaa

SEQ ID NO: 8426 - RNA, 27 nt, Artificial Sequence
  Description of Artificial Sequence: Synthetic oligonucleotide
cuauuccuaucaaaaugcuucugucua

SEQ ID NO: 8427 - RNA, 27 nt, Artificial Sequence
  Description of Artificial Sequence: Synthetic oligonucleotide
ucagggccauuaucuuauuugcucuau

SEQ ID NO: 8428 - RNA, 27 nt, Artificial Sequence
  Description of Artificial Sequence: Synthetic oligonucleotide
ugcuugaggaagagaaaaauguugguc

SEQ ID NO: 8429 - RNA, 27 nt, Artificial Sequence
  Description of Artificial Sequence: Synthetic oligonucleotide
ugggcugaacuuuucucauacuuaaag

SEQ ID NO: 8430 - RNA, 27 nt, Artificial Sequence
  Description of Artificial Sequence: Synthetic oligonucleotide
gguucagcagccaucuuuauuccugcg

SEQ ID NO: 8431 - RNA, 27 nt, Artificial Sequence
  Description of Artificial Sequence: Synthetic oligonucleotide
ugaagagaacuuggucauucaaauuuc

SEQ ID NO: 8432 - RNA, 27 nt, Artificial Sequence
  Description of Artificial Sequence: Synthetic oligonucleotide
cucuaggcuggcuaucuuuauacauac

SEQ ID NO: 8433 - RNA, 27 nt, Artificial Sequence
  Description of Artificial Sequence: Synthetic oligonucleotide
acacuucacagagauaguuacagccau

SEQ ID NO: 8434 - RNA, 27 nt, Artificial Sequence
  Description of Artificial Sequence: Synthetic oligonucleotide
uugaaauuuucucacacuucacagaga

SEQ ID NO: 8435 - RNA, 27 nt, Artificial Sequence
  Description of Artificial Sequence: Synthetic oligonucleotide
ucaggaggauucauuuccuuaaaggaa

SEQ ID NO: 8436 - RNA, 27 nt, Artificial Sequence
  Description of Artificial Sequence: Synthetic oligonucleotide
auaugaugucacuuuuuguauccuuga

SEQ ID NO: 8437 - RNA, 27 nt, Artificial Sequence
  Description of Artificial Sequence: Synthetic oligonucleotide
uaugaugaagauucaaauugcaucuua

SEQ ID NO: 8438 - RNA, 27 nt, Artificial Sequence
  Description of Artificial Sequence: Synthetic oligonucleotide
uuaauagcuagucuucguuuugaacag

SEQ ID NO: 8439 - RNA, 27 nt, Artificial Sequence
  Description of Artificial Sequence: Synthetic oligonucleotide
auuuuuaguagagaugagguuucacca

SEQ ID NO: 8440 - RNA, 27 nt, Artificial Sequence
  Description of Artificial Sequence: Synthetic oligonucleotide
aggcgagauagagcuucucuuucguuc

SEQ ID NO: 8441 - RNA, 27 nt, Artificial Sequence
  Description of Artificial Sequence: Synthetic oligonucleotide
aacuggaccgaaggcgcuuguggagaa

SEQ ID NO: 8442 - RNA, 27 nt, Artificial Sequence
  Description of Artificial Sequence: Synthetic oligonucleotide
gcggcuacaucuuuggaaucuucuccu

SEQ ID NO: 8443 - RNA, 27 nt, Artificial Sequence
  Description of Artificial Sequence: Synthetic oligonucleotide
caagucuccucauugaauccagauugg

SEQ ID NO: 8444 - RNA, 27 nt, Artificial Sequence
  Description of Artificial Sequence: Synthetic oligonucleotide
uccucacuacucucaaaucuguucugg

SEQ ID NO: 8445 - RNA, 27 nt, Artificial Sequence
  Description of Artificial Sequence: Synthetic oligonucleotide
uuuguacucaucugcacagcucuggcu

SEQ ID NO: 8446 - RNA, 27 nt, Artificial Sequence
  Description of Artificial Sequence: Synthetic oligonucleotide
gcccauuaacaacaacaaucugaggug

SEQ ID NO: 8447 - RNA, 27 nt, Artificial Sequence
  Description of Artificial Sequence: Synthetic oligonucleotide
aauaaauuaaaaauaauuaaaauagug

SEQ ID NO: 8448 - RNA, 27 nt, Artificial Sequence
  Description of Artificial Sequence: Synthetic oligonucleotide
cauauuuaaauauuaauaaauuaaaaa

SEQ ID NO: 8449 - RNA, 27 nt, Artificial Sequence
  Description of Artificial Sequence: Synthetic oligonucleotide
gaaacaaaggauauucaaacugcauag

SEQ ID NO: 8450 - RNA, 27 nt, Artificial Sequence
  Description of Artificial Sequence: Synthetic oligonucleotide
caaacacuuagacgccagcagcauggg

SEQ ID NO: 8451 - RNA, 27 nt, Artificial Sequence
  Description of Artificial Sequence: Synthetic oligonucleotide
uuugucacaggugaaaugcacaucuga

SEQ ID NO: 8452 - RNA, 27 nt, Artificial Sequence
  Description of Artificial Sequence: Synthetic oligonucleotide
uaauucagccuggcacagguuuugauc

SEQ ID NO: 8453 - RNA, 27 nt, Artificial Sequence
  Description of Artificial Sequence: Synthetic oligonucleotide
auuguaagaaugacuacccacauucac

SEQ ID NO: 8454 - RNA, 27 nt, Artificial Sequence
  Description of Artificial Sequence: Synthetic oligonucleotide
caauuguaagaaugacuacccacauuc

SEQ ID NO: 8455 - RNA, 27 nt, Artificial Sequence
  Description of Artificial Sequence: Synthetic oligonucleotide
guacacucucugaugcucauuuucaua

SEQ ID NO: 8456 - RNA, 27 nt, Artificial Sequence
  Description of Artificial Sequence: Synthetic oligonucleotide
cugcugaguucuacaugaaaagcaaau

SEQ ID NO: 8457 - RNA, 27 nt, Artificial Sequence
  Description of Artificial Sequence: Synthetic oligonucleotide
uacugaaaauaaauauagaaauacaac

SEQ ID NO: 8458 - RNA, 27 nt, Artificial Sequence
  Description of Artificial Sequence: Synthetic oligonucleotide
uuccauuuaagaaacauuaaucaaaac

SEQ ID NO: 8459 - RNA, 27 nt, Artificial Sequence
  Description of Artificial Sequence: Synthetic oligonucleotide
acaauuuuaggcacuauacacguuguu

SEQ ID NO: 8460 - RNA, 27 nt, Artificial Sequence
  Description of Artificial Sequence: Synthetic oligonucleotide
ccagauguuaguagccaaggauauggu

SEQ ID NO: 8461 - RNA, 27 nt, Artificial Sequence
  Description of Artificial Sequence: Synthetic oligonucleotide
agcucacagucuccagauguuaguagc

SEQ ID NO: 8462 - RNA, 27 nt, Artificial Sequence
  Description of Artificial Sequence: Synthetic oligonucleotide
auuaauaaaaagcacacaacuuauggc

SEQ ID NO: 8463 - RNA, 27 nt, Artificial Sequence
  Description of Artificial Sequence: Synthetic oligonucleotide
aauguaagaagagccaaaaugaugcau

SEQ ID NO: 8464 - RNA, 27 nt, Artificial Sequence
  Description of Artificial Sequence: Synthetic oligonucleotide
acauuuuuacaaauguaagaagagcca

SEQ ID NO: 8465 - RNA, 27 nt, Artificial Sequence
  Description of Artificial Sequence: Synthetic oligonucleotide
aauaugaauuaagaugaccuaaucugu

SEQ ID NO: 8466 - RNA, 27 nt, Artificial Sequence
  Description of Artificial Sequence: Synthetic oligonucleotide
ucaugauuaguucuuucaauuccaucc

SEQ ID NO: 8467 - RNA, 27 nt, Artificial Sequence
  Description of Artificial Sequence: Synthetic oligonucleotide
cccaagagcagaaggaaugagugugca

SEQ ID NO: 8468 - RNA, 27 nt, Artificial Sequence
  Description of Artificial Sequence: Synthetic oligonucleotide
cucaaagcuacugguuaccucuacacc

SEQ ID NO: 8469 - RNA, 27 nt, Artificial Sequence
  Description of Artificial Sequence: Synthetic oligonucleotide
ugaaauauuacguggcaugugguuggg

SEQ ID NO: 8470 - RNA, 27 nt, Artificial Sequence
  Description of Artificial Sequence: Synthetic oligonucleotide
agugaagagaauaacuuguuuccgaag

SEQ ID NO: 8471 - RNA, 27 nt, Artificial Sequence
  Description of Artificial Sequence: Synthetic oligonucleotide
uuucuuagcauuaguuauugggaguga

SEQ ID NO: 8472 - RNA, 27 nt, Artificial Sequence
  Description of Artificial Sequence: Synthetic oligonucleotide
uugauuuucagcauuucuuagcauuag

SEQ ID NO: 8473 - RNA, 27 nt, Artificial Sequence
  Description of Artificial Sequence: Synthetic oligonucleotide
aaaguaaucauauuuagagaaagacag

SEQ ID NO: 8474 - RNA, 27 nt, Artificial Sequence
  Description of Artificial Sequence: Synthetic oligonucleotide
uguagaacaaaaugccugaaauucagc

SEQ ID NO: 8475 - RNA, 27 nt, Artificial Sequence
  Description of Artificial Sequence: Synthetic oligonucleotide
gagagucccgggugagagggaaucgcc

SEQ ID NO: 8476 - RNA, 27 nt, Artificial Sequence
  Description of Artificial Sequence: Synthetic oligonucleotide
cuuuacuuuaaagguucacuuuccuug

SEQ ID NO: 8477 - RNA, 27 nt, Artificial Sequence
  Description of Artificial Sequence: Synthetic oligonucleotide
ccaggcuuccagagcaugcagccuccu

SEQ ID NO: 8478 - RNA, 27 nt, Artificial Sequence
  Description of Artificial Sequence: Synthetic oligonucleotide
cucucuuuuguuuucuguucagagaaa

SEQ ID NO: 8479 - RNA, 27 nt, Artificial Sequence
  Description of Artificial Sequence: Synthetic oligonucleotide
cggcauaacugauuacagccaaguuca

SEQ ID NO: 8480 - RNA, 27 nt, Artificial Sequence
  Description of Artificial Sequence: Synthetic oligonucleotide
uggacuucuuuuaauuuuggcuucuuc

SEQ ID NO: 8481 - RNA, 27 nt, Artificial Sequence
  Description of Artificial Sequence: Synthetic oligonucleotide
uaaccucaccuggacuucuuuuaauuu

SEQ ID NO: 8482 - RNA, 27 nt, Artificial Sequence
  Description of Artificial Sequence: Synthetic oligonucleotide
guccucuucccgauaauccggauucag

SEQ ID NO: 8483 - RNA, 27 nt, Artificial Sequence
  Description of Artificial Sequence: Synthetic oligonucleotide
acaauacuugcuuugaugucacauuaa

SEQ ID NO: 8484 - RNA, 27 nt, Artificial Sequence
  Description of Artificial Sequence: Synthetic oligonucleotide
gagugcuacaauacuugcuuugauguc

SEQ ID NO: 8485 - RNA, 27 nt, Artificial Sequence
  Description of Artificial Sequence: Synthetic oligonucleotide
auuugugguuuuguuuucucucucucu

SEQ ID NO: 8486 - RNA, 27 nt, Artificial Sequence
  Description of Artificial Sequence: Synthetic oligonucleotide
uguaugggcuuaaauacuacagcgagg

SEQ ID NO: 8487 - RNA, 27 nt, Artificial Sequence
  Description of Artificial Sequence: Synthetic oligonucleotide
cuguaugggcuuaaauacuacagcgag

SEQ ID NO: 8488 - RNA, 27 nt, Artificial Sequence
  Description of Artificial Sequence: Synthetic oligonucleotide
ggaagguuucuguaugggcuuaaauac

SEQ ID NO: 8489 - RNA, 27 nt, Artificial Sequence
  Description of Artificial Sequence: Synthetic oligonucleotide
guagguauaccauguuuauuuuaauac

SEQ ID NO: 8490 - RNA, 27 nt, Artificial Sequence
  Description of Artificial Sequence: Synthetic oligonucleotide
uccgaaaacuggccgaucagaacagcc

SEQ ID NO: 8491 - RNA, 27 nt, Artificial Sequence
  Description of Artificial Sequence: Synthetic oligonucleotide
cccuguuccaaaguucaaauuauuugu

SEQ ID NO: 8492 - RNA, 27 nt, Artificial Sequence
  Description of Artificial Sequence: Synthetic oligonucleotide
acuggaaaguuaaauuaaggucgcaau

SEQ ID NO: 8493 - RNA, 27 nt, Artificial Sequence
  Description of Artificial Sequence: Synthetic oligonucleotide
caaaaccaaacuuuagcuuucucagcc

SEQ ID NO: 8494 - RNA, 27 nt, Artificial Sequence
  Description of Artificial Sequence: Synthetic oligonucleotide
uacagugggaaguagcaucuuuacuuu

SEQ ID NO: 8495 - RNA, 27 nt, Artificial Sequence
  Description of Artificial Sequence: Synthetic oligonucleotide
ucauaugguaucagcaauuaagcagua

SEQ ID NO: 8496 - RNA, 27 nt, Artificial Sequence
  Description of Artificial Sequence: Synthetic oligonucleotide
cagcccauguuucauucauaugguauc

SEQ ID NO: 8497 - RNA, 27 nt, Artificial Sequence
  Description of Artificial Sequence: Synthetic oligonucleotide
uaugaaaaaguuggauaagaaaguugg

SEQ ID NO: 8498 - RNA, 27 nt, Artificial Sequence
  Description of Artificial Sequence: Synthetic oligonucleotide
uccggccucaugaugucaugcaaggcu

SEQ ID NO: 8499 - RNA, 27 nt, Artificial Sequence
  Description of Artificial Sequence: Synthetic oligonucleotide
acaaaugcagucauauacaaauucagg

SEQ ID NO: 8500 - RNA, 27 nt, Artificial Sequence
  Description of Artificial Sequence: Synthetic oligonucleotide
gguaguaaacauucuacuaggauucuu

SEQ ID NO: 8501 - RNA, 27 nt, Artificial Sequence
  Description of Artificial Sequence: Synthetic oligonucleotide
uuucaucaaaaaauucuucccuuucug

SEQ ID NO: 8502 - RNA, 27 nt, Artificial Sequence
  Description of Artificial Sequence: Synthetic oligonucleotide
aaauucacacacuggcaugccgauagc

SEQ ID NO: 8503 - RNA, 27 nt, Artificial Sequence
  Description of Artificial Sequence: Synthetic oligonucleotide
acauacauugcucuacuaugaggugaa

SEQ ID NO: 8504 - RNA, 27 nt, Artificial Sequence
  Description of Artificial Sequence: Synthetic oligonucleotide
uauauaugugcuuuggcaauucuggug

SEQ ID NO: 8505 - RNA, 27 nt, Artificial Sequence
  Description of Artificial Sequence: Synthetic oligonucleotide
ggagaaacuauuacccagaucaccacu

SEQ ID NO: 8506 - RNA, 27 nt, Artificial Sequence
  Description of Artificial Sequence: Synthetic oligonucleotide
auuuggagaaacuauuacccagaucac

SEQ ID NO: 8507 - RNA, 27 nt, Artificial Sequence
  Description of Artificial Sequence: Synthetic oligonucleotide
uuucuaggaaguauucaucacauccac

SEQ ID NO: 8508 - RNA, 27 nt, Artificial Sequence
  Description of Artificial Sequence: Synthetic oligonucleotide
cauauaugguguagcuguggaaaugcg

SEQ ID NO: 8509 - RNA, 27 nt, Artificial Sequence
  Description of Artificial Sequence: Synthetic oligonucleotide
cuccauucauauaugguguagcugugg

SEQ ID NO: 8510 - RNA, 27 nt, Artificial Sequence
  Description of Artificial Sequence: Synthetic oligonucleotide
aucuucuucucguguaagaacugcagc

SEQ ID NO: 8511 - RNA, 27 nt, Artificial Sequence
  Description of Artificial Sequence: Synthetic oligonucleotide
ucccuguaaaugaucuucuucucgugu

SEQ ID NO: 8512 - RNA, 27 nt, Artificial Sequence
  Description of Artificial Sequence: Synthetic oligonucleotide
gucccuguaaaugaucuucuucucgug

SEQ ID NO: 8513 - RNA, 27 nt, Artificial Sequence
  Description of Artificial Sequence: Synthetic oligonucleotide
ucaggucccuguaaaugaucuucuucu

SEQ ID NO: 8514 - RNA, 27 nt, Artificial Sequence
  Description of Artificial Sequence: Synthetic oligonucleotide
gaugcagucaaacaccucuuccucugu

SEQ ID NO: 8515 - RNA, 27 nt, Artificial Sequence
  Description of Artificial Sequence: Synthetic oligonucleotide
cgaugcagucaaacaccucuuccucug

SEQ ID NO: 8516 - RNA, 27 nt, Artificial Sequence
  Description of Artificial Sequence: Synthetic oligonucleotide
cccugugaacucgcccucaaaguagcg

SEQ ID NO: 8517 - RNA, 27 nt, Artificial Sequence
  Description of Artificial Sequence: Synthetic oligonucleotide
ggacagaggugccaggagaugcccuca

SEQ ID NO: 8518 - RNA, 27 nt, Artificial Sequence
  Description of Artificial Sequence: Synthetic oligonucleotide
uuaaaaagacaaaccauaucacuccuu

SEQ ID NO: 8519 - RNA, 27 nt, Artificial Sequence
  Description of Artificial Sequence: Synthetic oligonucleotide
cuuaaaaagacaaaccauaucacuccu

SEQ ID NO: 8520 - RNA, 27 nt, Artificial Sequence
  Description of Artificial Sequence: Synthetic oligonucleotide
gacaaccuuuaggaucuuuacugcaac

SEQ ID NO: 8521 - RNA, 27 nt, Artificial Sequence
  Description of Artificial Sequence: Synthetic oligonucleotide
gucgacaaccuuuaggaucuuuacugc

SEQ ID NO: 8522 - RNA, 27 nt, Artificial Sequence
  Description of Artificial Sequence: Synthetic oligonucleotide
acaauugccagguuguccuuugucaug

SEQ ID NO: 8523 - RNA, 27 nt, Artificial Sequence
  Description of Artificial Sequence: Synthetic oligonucleotide
ccucgcaccacugggucacaauugcca

SEQ ID NO: 8524 - RNA, 27 nt, Artificial Sequence
  Description of Artificial Sequence: Synthetic oligonucleotide
auuucaugucucuauggaugauguucu

SEQ ID NO: 8525 - RNA, 27 nt, Artificial Sequence
  Description of Artificial Sequence: Synthetic oligonucleotide
uggagaaauauauuguuggauuucaug

SEQ ID NO: 8526 - RNA, 27 nt, Artificial Sequence
  Description of Artificial Sequence: Synthetic oligonucleotide
agccuucauggagaaauauauuguugg

SEQ ID NO: 8527 - RNA, 27 nt, Artificial Sequence
  Description of Artificial Sequence: Synthetic oligonucleotide
accacuccagcgugacuuuacuguugc

SEQ ID NO: 8528 - RNA, 27 nt, Artificial Sequence
  Description of Artificial Sequence: Synthetic oligonucleotide
ccucucuuccuuuacuuucuucacaca

SEQ ID NO: 8529 - RNA, 27 nt, Artificial Sequence
  Description of Artificial Sequence: Synthetic oligonucleotide
gcccgaugcaaggauggcucggaagcg

SEQ ID NO: 8530 - RNA, 27 nt, Artificial Sequence
  Description of Artificial Sequence: Synthetic oligonucleotide
cacaguaggauauucaaccuccauuuc

SEQ ID NO: 8531 - RNA, 27 nt, Artificial Sequence
  Description of Artificial Sequence: Synthetic oligonucleotide
uuacacaguaggauauucaaccuccau

SEQ ID NO: 8532 - RNA, 27 nt, Artificial Sequence
  Description of Artificial Sequence: Synthetic oligonucleotide
uacacuacaagggaaaacucaaaaucu

SEQ ID NO: 8533 - RNA, 27 nt, Artificial Sequence
  Description of Artificial Sequence: Synthetic oligonucleotide
caaucaacaaagaacaaacaggauaaa

SEQ ID NO: 8534 - RNA, 27 nt, Artificial Sequence
  Description of Artificial Sequence: Synthetic oligonucleotide
uuucaaucaacaaagaacaaacaggau

SEQ ID NO: 8535 - RNA, 27 nt, Artificial Sequence
  Description of Artificial Sequence: Synthetic oligonucleotide
auggaagaaaaagaaggcuguagagaa

SEQ ID NO: 8536 - RNA, 27 nt, Artificial Sequence
  Description of Artificial Sequence: Synthetic oligonucleotide
uagaaggaagauuagcuauggaagaaa

SEQ ID NO: 8537 - RNA, 27 nt, Artificial Sequence
  Description of Artificial Sequence: Synthetic oligonucleotide
augaagcauucaacaggaagauuauuu

SEQ ID NO: 8538 - RNA, 27 nt, Artificial Sequence
  Description of Artificial Sequence: Synthetic oligonucleotide
caugaagcauucaacaggaagauuauu

SEQ ID NO: 8539 - RNA, 27 nt, Artificial Sequence
  Description of Artificial Sequence: Synthetic oligonucleotide
ucaaaguagaauucaagucaugaagca

SEQ ID NO: 8540 - RNA, 27 nt, Artificial Sequence
  Description of Artificial Sequence: Synthetic oligonucleotide
gucuguaguugcuucucucccucuuag

SEQ ID NO: 8541 - RNA, 27 nt, Artificial Sequence
  Description of Artificial Sequence: Synthetic oligonucleotide
guugaccuuggucugguaggagacggc

SEQ ID NO: 8542 - RNA, 27 nt, Artificial Sequence
  Description of Artificial Sequence: Synthetic oligonucleotide
gucgagauagucgggccgauugaucuc

SEQ ID NO: 8543 - RNA, 27 nt, Artificial Sequence
  Description of Artificial Sequence: Synthetic oligonucleotide
guuugggaagguuggauguucguccuc

SEQ ID NO: 8544 - RNA, 27 nt, Artificial Sequence
  Description of Artificial Sequence: Synthetic oligonucleotide
aguucuaagcuuggguuccgacccuaa

SEQ ID NO: 8545 - RNA, 27 nt, Artificial Sequence
  Description of Artificial Sequence: Synthetic oligonucleotide
uuaaaguucuaagcuuggguuccgacc

SEQ ID NO: 8546 - RNA, 27 nt, Artificial Sequence
  Description of Artificial Sequence: Synthetic oligonucleotide
guugcuuaaaguucuaagcuuggguuc

SEQ ID NO: 8547 - RNA, 27 nt, Artificial Sequence
  Description of Artificial Sequence: Synthetic oligonucleotide
gugguggucuuguugcuuaaaguucua

SEQ ID NO: 8548 - RNA, 27 nt, Artificial Sequence
  Description of Artificial Sequence: Synthetic oligonucleotide
acuuuauuucucgccacugaauaguag

SEQ ID NO: 8549 - RNA, 27 nt, Artificial Sequence
  Description of Artificial Sequence: Synthetic oligonucleotide
aacuuuauuucucgccacugaauagua

SEQ ID NO: 8550 - RNA, 27 nt, Artificial Sequence
  Description of Artificial Sequence: Synthetic oligonucleotide
ggaucauuuccuguuaucuguguuugu

SEQ ID NO: 8551 - RNA, 27 nt, Artificial Sequence
  Description of Artificial Sequence: Synthetic oligonucleotide
guuucauuucuucucuuuucuuaaggc

SEQ ID NO: 8552 - RNA, 27 nt, Artificial Sequence
  Description of Artificial Sequence: Synthetic oligonucleotide
ggaggauggaaacacacuccuucaguu

SEQ ID NO: 8553 - RNA, 27 nt, Artificial Sequence
  Description of Artificial Sequence: Synthetic oligonucleotide
ucaaagauuuucagucccgcggugaca

SEQ ID NO: 8554 - RNA, 27 nt, Artificial Sequence
  Description of Artificial Sequence: Synthetic oligonucleotide
ccugaacggcacgcuuauuucugcugu

SEQ ID NO: 8555 - RNA, 27 nt, Artificial Sequence
  Description of Artificial Sequence: Synthetic oligonucleotide
cuucuggacccugaacggcacgcuuau

SEQ ID NO: 8556 - RNA, 27 nt, Artificial Sequence
  Description of Artificial Sequence: Synthetic oligonucleotide
caagcagucuugagugacuguuucuuc

SEQ ID NO: 8557 - RNA, 27 nt, Artificial Sequence
  Description of Artificial Sequence: Synthetic oligonucleotide
ccaaagacauggaccuucuuccucuga

SEQ ID NO: 8558 - RNA, 27 nt, Artificial Sequence
  Description of Artificial Sequence: Synthetic oligonucleotide
guguuucaggcauauuuugaauacauc

SEQ ID NO: 8559 - RNA, 27 nt, Artificial Sequence
  Description of Artificial Sequence: Synthetic oligonucleotide
gagguacagagaaagggaggaaaauag

SEQ ID NO: 8560 - RNA, 27 nt, Artificial Sequence
  Description of Artificial Sequence: Synthetic oligonucleotide
ucuugucuugcucuaucuuucuuuggu

SEQ ID NO: 8561 - RNA, 27 nt, Artificial Sequence
  Description of Artificial Sequence: Synthetic oligonucleotide
uuucuugucuugcucuaucuuucuuug

SEQ ID NO: 8562 - RNA, 27 nt, Artificial Sequence
  Description of Artificial Sequence: Synthetic oligonucleotide
ggaucuuguacaaacaaaugcuuucuc

SEQ ID NO: 8563 - RNA, 27 nt, Artificial Sequence
  Description of Artificial Sequence: Synthetic oligonucleotide
ucugcaaguacguucguuuaacucaag

SEQ ID NO: 8564 - RNA, 27 nt, Artificial Sequence
  Description of Artificial Sequence: Synthetic oligonucleotide
ucuguaucgaucguucuguaucagucu

SEQ ID NO: 8565 - RNA, 27 nt, Artificial Sequence
  Description of Artificial Sequence: Synthetic oligonucleotide
auuuauuuuuauauauauauaauauau

SEQ ID NO: 8566 - RNA, 27 nt, Artificial Sequence
  Description of Artificial Sequence: Synthetic oligonucleotide
auauuuauuuuuauauauauauaauau

SEQ ID NO: 8567 - RNA, 27 nt, Artificial Sequence
  Description of Artificial Sequence: Synthetic oligonucleotide
cacagcagucaaauacauccagugaag

SEQ ID NO: 8568 - RNA, 27 nt, Artificial Sequence
  Description of Artificial Sequence: Synthetic oligonucleotide
gucucucaucuccuccucuucccuguc

SEQ ID NO: 8569 - RNA, 27 nt, Artificial Sequence
  Description of Artificial Sequence: Synthetic oligonucleotide
ccaagugggacaaaaaaaagaucaugc

SEQ ID NO: 8570 - RNA, 14 nt, Artificial Sequence
  Description of Artificial Sequence: Synthetic oligonucleotide
guauuuugaugagg

SEQ ID NO: 8571 - RNA, 12 nt, Artificial Sequence
  Description of Artificial Sequence: Synthetic oligonucleotide
ggcccagaugau

SEQ ID NO: 8572 - RNA, 14 nt, Artificial Sequence
  Description of Artificial Sequence: Synthetic oligonucleotide
gggaagaaaacuau

SEQ ID NO: 8573 - RNA, 15 nt, Artificial Sequence
  Description of Artificial Sequence: Synthetic oligonucleotide
guuuuaauuuauuuc

SEQ ID NO: 8574 - RNA, 12 nt, Artificial Sequence
  Description of Artificial Sequence: Synthetic oligonucleotide
acguagggaaau

SEQ ID NO: 8575 - RNA, 12 nt, Artificial Sequence
  Description of Artificial Sequence: Synthetic oligonucleotide
ccaggguuuacc

SEQ ID NO: 8576 - RNA, 11 nt, Artificial Sequence
  Description of Artificial Sequence: Synthetic oligonucleotide
agcaagguuua

SEQ ID NO: 8577 - RNA, 12 nt, Artificial Sequence
  Description of Artificial Sequence: Synthetic oligonucleotide
uguauuauguug

SEQ ID NO: 8578 - RNA, 15 nt, Artificial Sequence
  Description of Artificial Sequence: Synthetic oligonucleotide
uuuuaaucuuuguga

SEQ ID NO: 8579 - RNA, 14 nt, Artificial Sequence
  Description of Artificial Sequence: Synthetic oligonucleotide
uuaaucuuugugac

SEQ ID NO: 8580 - RNA, 13 nt, Artificial Sequence
  Description of Artificial Sequence: Synthetic oligonucleotide
gcugcuuaugucu

SEQ ID NO: 8581 - RNA, 14 nt, Artificial Sequence
  Description of Artificial Sequence: Synthetic oligonucleotide
aaguguuucagaag

SEQ ID NO: 8582 - RNA, 13 nt, Artificial Sequence
  Description of Artificial Sequence: Synthetic oligonucleotide
gaccaucaauaag

SEQ ID NO: 8583 - RNA, 13 nt, Artificial Sequence
  Description of Artificial Sequence: Synthetic oligonucleotide
ccaucaauaagga

SEQ ID NO: 8584 - RNA, 14 nt, Artificial Sequence
  Description of Artificial Sequence: Synthetic oligonucleotide
ucaauaaggaagaa

SEQ ID NO: 8585 - RNA, 14 nt, Artificial Sequence
  Description of Artificial Sequence: Synthetic oligonucleotide
aauaaggaagaagc

SEQ ID NO: 8586 - RNA, 13 nt, Artificial Sequence
  Description of Artificial Sequence: Synthetic oligonucleotide
aggaagaagcccu

SEQ ID NO: 8587 - RNA, 13 nt, Artificial Sequence
  Description of Artificial Sequence: Synthetic oligonucleotide
gcauaacuaaagg

SEQ ID NO: 8588 - RNA, 14 nt, Artificial Sequence
  Description of Artificial Sequence: Synthetic oligonucleotide
cauaacuaaaggug

SEQ ID NO: 8589 - RNA, 12 nt, Artificial Sequence
  Description of Artificial Sequence: Synthetic oligonucleotide
cuacaucacgcc

SEQ ID NO: 8590 - RNA, 12 nt, Artificial Sequence
  Description of Artificial Sequence: Synthetic oligonucleotide
acuggauuuaag

SEQ ID NO: 8591 - RNA, 12 nt, Artificial Sequence
  Description of Artificial Sequence: Synthetic oligonucleotide
cuggauuuaagc

SEQ ID NO: 8592 - RNA, 13 nt, Artificial Sequence
  Description of Artificial Sequence: Synthetic oligonucleotide
gauuuaagcagag

SEQ ID NO: 8593 - RNA, 13 nt, Artificial Sequence
  Description of Artificial Sequence: Synthetic oligonucleotide
auuuaagcagagu

SEQ ID NO: 8594 - RNA, 13 nt, Artificial Sequence
  Description of Artificial Sequence: Synthetic oligonucleotide
uuaagcagaguuc

SEQ ID NO: 8595 - RNA, 13 nt, Artificial Sequence
  Description of Artificial Sequence: Synthetic oligonucleotide
uaagcagaguuca

SEQ ID NO: 8596 - RNA, 14 nt, Artificial Sequence
  Description of Artificial Sequence: Synthetic oligonucleotide
agcagaguucaaaa

SEQ ID NO: 8597 - RNA, 12 nt, Artificial Sequence
  Description of Artificial Sequence: Synthetic oligonucleotide
cucagggucuga

SEQ ID NO: 8598 - RNA, 13 nt, Artificial Sequence
  Description of Artificial Sequence: Synthetic oligonucleotide
caagcaacuacau

SEQ ID NO: 8599 - RNA, 12 nt, Artificial Sequence
  Description of Artificial Sequence: Synthetic oligonucleotide
aucaauggcagc

SEQ ID NO: 8600 - RNA, 11 nt, Artificial Sequence
  Description of Artificial Sequence: Synthetic oligonucleotide
uuccagcccac

SEQ ID NO: 8601 - RNA, 12 nt, Artificial Sequence
  Description of Artificial Sequence: Synthetic oligonucleotide
cagcugagaaug

SEQ ID NO: 8602 - RNA, 13 nt, Artificial Sequence
  Description of Artificial Sequence: Synthetic oligonucleotide
aacguaucuccua

SEQ ID NO: 8603 - RNA, 14 nt, Artificial Sequence
  Description of Artificial Sequence: Synthetic oligonucleotide
ccuaaaauaauuuc

SEQ ID NO: 8604 - RNA, 13 nt, Artificial Sequence
  Description of Artificial Sequence: Synthetic oligonucleotide
uggaagauucagc

SEQ ID NO: 8605 - RNA, 12 nt, Artificial Sequence
  Description of Artificial Sequence: Synthetic oligonucleotide
uuaaacucuccu

SEQ ID NO: 8606 - RNA, 12 nt, Artificial Sequence
  Description of Artificial Sequence: Synthetic oligonucleotide
cagccuacaguu

SEQ ID NO: 8607 - RNA, 13 nt, Artificial Sequence
  Description of Artificial Sequence: Synthetic oligonucleotide
guuauguucaguc

SEQ ID NO: 8608 - RNA, 13 nt, Artificial Sequence
  Description of Artificial Sequence: Synthetic oligonucleotide
cacauacaaaaug

SEQ ID NO: 8609 - RNA, 9 nt, Artificial Sequence
  Description of Artificial Sequence: Synthetic oligonucleotide
uccuuuugc

SEQ ID NO: 8610 - RNA, 12 nt, Artificial Sequence
  Description of Artificial Sequence: Synthetic oligonucleotide
ugaccugugaag

SEQ ID NO: 8611 - RNA, 12 nt, Artificial Sequence
  Description of Artificial Sequence: Synthetic oligonucleotide
cuaucucacaca

SEQ ID NO: 8612 - RNA, 13 nt, Artificial Sequence
  Description of Artificial Sequence: Synthetic oligonucleotide
uguccucaauugu

SEQ ID NO: 8613 - RNA, 12 nt, Artificial Sequence
  Description of Artificial Sequence: Synthetic oligonucleotide
aaaccguagcug

SEQ ID NO: 8614 - RNA, 12 nt, Artificial Sequence
  Description of Artificial Sequence: Synthetic oligonucleotide
uagcuggcaagc

SEQ ID NO: 8615 - RNA, 14 nt, Artificial Sequence
  Description of Artificial Sequence: Synthetic oligonucleotide
uuguaugguuaaaa

SEQ ID NO: 8616 - RNA, 14 nt, Artificial Sequence
  Description of Artificial Sequence: Synthetic oligonucleotide
ugguuaaaagaugg

SEQ ID NO: 8617 - RNA, 13 nt, Artificial Sequence
  Description of Artificial Sequence: Synthetic oligonucleotide
cagggaauuauac

SEQ ID NO: 8618 - RNA, 12 nt, Artificial Sequence
  Description of Artificial Sequence: Synthetic oligonucleotide
acaaucuugcug

SEQ ID NO: 8619 - RNA, 13 nt, Artificial Sequence
  Description of Artificial Sequence: Synthetic oligonucleotide
ccaauaaugaaga

SEQ ID NO: 8620 - RNA, 13 nt, Artificial Sequence
  Description of Artificial Sequence: Synthetic oligonucleotide
acuuuggauguuc

SEQ ID NO: 8621 - RNA, 12 nt, Artificial Sequence
  Description of Artificial Sequence: Synthetic oligonucleotide
aaugcuuccacu

SEQ ID NO: 8622 - RNA, 11 nt, Artificial Sequence
  Description of Artificial Sequence: Synthetic oligonucleotide
gagaaaguuug

SEQ ID NO: 8623 - RNA, 11 nt, Artificial Sequence
  Description of Artificial Sequence: Synthetic oligonucleotide
aaagaacuacu

SEQ ID NO: 8624 - RNA, 12 nt, Artificial Sequence
  Description of Artificial Sequence: Synthetic oligonucleotide
uuagaaauacgg

SEQ ID NO: 8625 - RNA, 12 nt, Artificial Sequence
  Description of Artificial Sequence: Synthetic oligonucleotide
aacauggguaca

SEQ ID NO: 8626 - RNA, 14 nt, Artificial Sequence
  Description of Artificial Sequence: Synthetic oligonucleotide
aaagacacagaaga

SEQ ID NO: 8627 - RNA, 11 nt, Artificial Sequence
  Description of Artificial Sequence: Synthetic oligonucleotide
uaguagggagg

SEQ ID NO: 8628 - RNA, 12 nt, Artificial Sequence
  Description of Artificial Sequence: Synthetic oligonucleotide
gccuucugcagc

SEQ ID NO: 8629 - RNA, 10 nt, Artificial Sequence
  Description of Artificial Sequence: Synthetic oligonucleotide
ggucugguac

SEQ ID NO: 8630 - RNA, 12 nt, Artificial Sequence
  Description of Artificial Sequence: Synthetic oligonucleotide
cuaguccuuccg

SEQ ID NO: 8631 - RNA, 12 nt, Artificial Sequence
  Description of Artificial Sequence: Synthetic oligonucleotide
ccagugaauauu

SEQ ID NO: 8632 - RNA, 13 nt, Artificial Sequence
  Description of Artificial Sequence: Synthetic oligonucleotide
augaauucaaguu

SEQ ID NO: 8633 - RNA, 12 nt, Artificial Sequence
  Description of Artificial Sequence: Synthetic oligonucleotide
caggacacagau

SEQ ID NO: 8634 - RNA, 12 nt, Artificial Sequence
  Description of Artificial Sequence: Synthetic oligonucleotide
cucaaagcacag

SEQ ID NO: 8635 - RNA, 10 nt, Artificial Sequence
  Description of Artificial Sequence: Synthetic oligonucleotide
accacugcca

SEQ ID NO: 8636 - RNA, 13 nt, Artificial Sequence
  Description of Artificial Sequence: Synthetic oligonucleotide
gaaacuacuagug

SEQ ID NO: 8637 - RNA, 12 nt, Artificial Sequence
  Description of Artificial Sequence: Synthetic oligonucleotide
aagucggacagc

SEQ ID NO: 8638 - RNA, 13 nt, Artificial Sequence
  Description of Artificial Sequence: Synthetic oligonucleotide
gaaagcgaaaaau

SEQ ID NO: 8639 - RNA, 13 nt, Artificial Sequence
  Description of Artificial Sequence: Synthetic oligonucleotide
cccucugauuuag

SEQ ID NO: 8640 - RNA, 12 nt, Artificial Sequence
  Description of Artificial Sequence: Synthetic oligonucleotide
ugagcuauuuaa

SEQ ID NO: 8641 - RNA, 13 nt, Artificial Sequence
  Description of Artificial Sequence: Synthetic oligonucleotide
aaaaggugaaaaa

SEQ ID NO: 8642 - RNA, 14 nt, Artificial Sequence
  Description of Artificial Sequence: Synthetic oligonucleotide
gaaaaagcacuauu

SEQ ID NO: 8643 - RNA, 12 nt, Artificial Sequence
  Description of Artificial Sequence: Synthetic oligonucleotide
ggcugaaaagaa

SEQ ID NO: 8644 - RNA, 12 nt, Artificial Sequence
  Description of Artificial Sequence: Synthetic oligonucleotide
uaaacccuuaua

SEQ ID NO: 8645 - RNA, 13 nt, Artificial Sequence
  Description of Artificial Sequence: Synthetic oligonucleotide
cauacuauuagcc

SEQ ID NO: 8646 - RNA, 12 nt, Artificial Sequence
  Description of Artificial Sequence: Synthetic oligonucleotide
gacagaagcauu

SEQ ID NO: 8647 - RNA, 14 nt, Artificial Sequence
  Description of Artificial Sequence: Synthetic oligonucleotide
agagcaaauaagau

SEQ ID NO: 8648 - RNA, 14 nt, Artificial Sequence
  Description of Artificial Sequence: Synthetic oligonucleotide
ccaacauuuuucuc

SEQ ID NO: 8649 - RNA, 15 nt, Artificial Sequence
  Description of Artificial Sequence: Synthetic oligonucleotide
uuaaguaugagaaaa

SEQ ID NO: 8650 - RNA, 14 nt, Artificial Sequence
  Description of Artificial Sequence: Synthetic oligonucleotide
caggaauaaagaug

SEQ ID NO: 8651 - RNA, 13 nt, Artificial Sequence
  Description of Artificial Sequence: Synthetic oligonucleotide
aauuugaaugacc

SEQ ID NO: 8652 - RNA, 14 nt, Artificial Sequence
  Description of Artificial Sequence: Synthetic oligonucleotide
auguauaaagauag

SEQ ID NO: 8653 - RNA, 12 nt, Artificial Sequence
  Description of Artificial Sequence: Synthetic oligonucleotide
ggcuguaacuau

SEQ ID NO: 8654 - RNA, 11 nt, Artificial Sequence
  Description of Artificial Sequence: Synthetic oligonucleotide
ucugugaagug

SEQ ID NO: 8655 - RNA, 14 nt, Artificial Sequence
  Description of Artificial Sequence: Synthetic oligonucleotide
ccuuuaaggaaaug

SEQ ID NO: 8656 - RNA, 13 nt, Artificial Sequence
  Description of Artificial Sequence: Synthetic oligonucleotide
aaggauacaaaaa

SEQ ID NO: 8657 - RNA, 12 nt, Artificial Sequence
  Description of Artificial Sequence: Synthetic oligonucleotide
agaugcaauuug

SEQ ID NO: 8658 - RNA, 12 nt, Artificial Sequence
  Description of Artificial Sequence: Synthetic oligonucleotide
guucaaaacgaa

SEQ ID NO: 8659 - RNA, 11 nt, Artificial Sequence
  Description of Artificial Sequence: Synthetic oligonucleotide
gugaaaccuca

SEQ ID NO: 8660 - RNA, 13 nt, Artificial Sequence
  Description of Artificial Sequence: Synthetic oligonucleotide
acgaaagagaagc

SEQ ID NO: 8661 - RNA, 12 nt, Artificial Sequence
  Description of Artificial Sequence: Synthetic oligonucleotide
cuccacaagcgc

SEQ ID NO: 8662 - RNA, 14 nt, Artificial Sequence
  Description of Artificial Sequence: Synthetic oligonucleotide
gagaagauuccaaa

SEQ ID NO: 8663 - RNA, 13 nt, Artificial Sequence
  Description of Artificial Sequence: Synthetic oligonucleotide
aaucuggauucaa

SEQ ID NO: 8664 - RNA, 13 nt, Artificial Sequence
  Description of Artificial Sequence: Synthetic oligonucleotide
agaacagauuuga

SEQ ID NO: 8665 - RNA, 11 nt, Artificial Sequence
  Description of Artificial Sequence: Synthetic oligonucleotide
ccagagcugug

SEQ ID NO: 8666 - RNA, 12 nt, Artificial Sequence
  Description of Artificial Sequence: Synthetic oligonucleotide
ccucagauuguu

SEQ ID NO: 8667 - RNA, 12 nt, Artificial Sequence
  Description of Artificial Sequence: Synthetic oligonucleotide
cuauuuuaauua

SEQ ID NO: 8668 - RNA, 13 nt, Artificial Sequence
  Description of Artificial Sequence: Synthetic oligonucleotide
uuuaauuuauuaa

SEQ ID NO: 8669 - RNA, 12 nt, Artificial Sequence
  Description of Artificial Sequence: Synthetic oligonucleotide
augcaguuugaa

SEQ ID NO: 8670 - RNA, 11 nt, Artificial Sequence
  Description of Artificial Sequence: Synthetic oligonucleotide
caugcugcugg

SEQ ID NO: 8671 - RNA, 13 nt, Artificial Sequence
  Description of Artificial Sequence: Synthetic oligonucleotide
agaugugcauuuc

SEQ ID NO: 8672 - RNA, 12 nt, Artificial Sequence
  Description of Artificial Sequence: Synthetic oligonucleotide
ucaaaaccugug

SEQ ID NO: 8673 - RNA, 11 nt, Artificial Sequence
  Description of Artificial Sequence: Synthetic oligonucleotide
gaaugugggua

SEQ ID NO: 8674 - RNA, 10 nt, Artificial Sequence
  Description of Artificial Sequence: Synthetic oligonucleotide
auguggguag

SEQ ID NO: 8675 - RNA, 13 nt, Artificial Sequence
  Description of Artificial Sequence: Synthetic oligonucleotide
ugaaaaugagcau

SEQ ID NO: 8676 - RNA, 13 nt, Artificial Sequence
  Description of Artificial Sequence: Synthetic oligonucleotide
uugcuuuucaugu

SEQ ID NO: 8677 - RNA, 12 nt, Artificial Sequence
  Description of Artificial Sequence: Synthetic oligonucleotide
uguauuucuaua

SEQ ID NO: 8678 - RNA, 13 nt, Artificial Sequence
  Description of Artificial Sequence: Synthetic oligonucleotide
uuugauuaauguu

SEQ ID NO: 8679 - RNA, 12 nt, Artificial Sequence
  Description of Artificial Sequence: Synthetic oligonucleotide
caacguguauag

SEQ ID NO: 8680 - RNA, 12 nt, Artificial Sequence
  Description of Artificial Sequence: Synthetic oligonucleotide
cauauccuuggc

SEQ ID NO: 8681 - RNA, 13 nt, Artificial Sequence
  Description of Artificial Sequence: Synthetic oligonucleotide
uacuaacaucugg

SEQ ID NO: 8682 - RNA, 11 nt, Artificial Sequence
  Description of Artificial Sequence: Synthetic oligonucleotide
cauaaguugug

SEQ ID NO: 8683 - RNA, 12 nt, Artificial Sequence
  Description of Artificial Sequence: Synthetic oligonucleotide
gcaucauuuugg

SEQ ID NO: 8684 - RNA, 10 nt, Artificial Sequence
  Description of Artificial Sequence: Synthetic oligonucleotide
gcucuucuua

SEQ ID NO: 8685 - RNA, 10 nt, Artificial Sequence
  Description of Artificial Sequence: Synthetic oligonucleotide
agauuagguc

SEQ ID NO: 8686 - RNA, 12 nt, Artificial Sequence
  Description of Artificial Sequence: Synthetic oligonucleotide
auggaauugaaa

SEQ ID NO: 8687 - RNA, 13 nt, Artificial Sequence
  Description of Artificial Sequence: Synthetic oligonucleotide
cacacucauuccu

SEQ ID NO: 8688 - RNA, 12 nt, Artificial Sequence
  Description of Artificial Sequence: Synthetic oligonucleotide
uguagagguaac

SEQ ID NO: 8689 - RNA, 11 nt, Artificial Sequence
  Description of Artificial Sequence: Synthetic oligonucleotide
caaccacaugc

SEQ ID NO: 8690 - RNA, 12 nt, Artificial Sequence
  Description of Artificial Sequence: Synthetic oligonucleotide
ucggaaacaagu

SEQ ID NO: 8691 - RNA, 11 nt, Artificial Sequence
  Description of Artificial Sequence: Synthetic oligonucleotide
acucccaauaa

SEQ ID NO: 8692 - RNA, 13 nt, Artificial Sequence
  Description of Artificial Sequence: Synthetic oligonucleotide
aaugcuaagaaau

SEQ ID NO: 8693 - RNA, 11 nt, Artificial Sequence
  Description of Artificial Sequence: Synthetic oligonucleotide
gucuuucucua

SEQ ID NO: 8694 - RNA, 11 nt, Artificial Sequence
  Description of Artificial Sequence: Synthetic oligonucleotide
ugaauuucagg

SEQ ID NO: 8695 - RNA, 13 nt, Artificial Sequence
  Description of Artificial Sequence: Synthetic oligonucleotide
cgauucccucuca

SEQ ID NO: 8696 - RNA, 11 nt, Artificial Sequence
  Description of Artificial Sequence: Synthetic oligonucleotide
aggaaagugaa

SEQ ID NO: 8697 - RNA, 12 nt, Artificial Sequence
  Description of Artificial Sequence: Synthetic oligonucleotide
gaggcugcaugc

SEQ ID NO: 8698 - RNA, 11 nt, Artificial Sequence
  Description of Artificial Sequence: Synthetic oligonucleotide
ucucugaacag

SEQ ID NO: 8699 - RNA, 12 nt, Artificial Sequence
  Description of Artificial Sequence: Synthetic oligonucleotide
aacuuggcugua

SEQ ID NO: 8700 - RNA, 12 nt, Artificial Sequence
  Description of Artificial Sequence: Synthetic oligonucleotide
agaagccaaaau

SEQ ID NO: 8701 - RNA, 14 nt, Artificial Sequence
  Description of Artificial Sequence: Synthetic oligonucleotide
auuaaaagaagucc

SEQ ID NO: 8702 - RNA, 14 nt, Artificial Sequence
  Description of Artificial Sequence: Synthetic oligonucleotide
gaauccggauuauc

SEQ ID NO: 8703 - RNA, 12 nt, Artificial Sequence
  Description of Artificial Sequence: Synthetic oligonucleotide
aaugugacauca

SEQ ID NO: 8704 - RNA, 13 nt, Artificial Sequence
  Description of Artificial Sequence: Synthetic oligonucleotide
caucaaagcaagu

SEQ ID NO: 8705 - RNA, 11 nt, Artificial Sequence
  Description of Artificial Sequence: Synthetic oligonucleotide
agagagagaaa

SEQ ID NO: 8706 - RNA, 13 nt, Artificial Sequence
  Description of Artificial Sequence: Synthetic oligonucleotide
ucgcuguaguauu

SEQ ID NO: 8707 - RNA, 14 nt, Artificial Sequence
  Description of Artificial Sequence: Synthetic oligonucleotide
cgcuguaguauuua

SEQ ID NO: 8708 - RNA, 13 nt, Artificial Sequence
  Description of Artificial Sequence: Synthetic oligonucleotide
auuuaagcccaua

SEQ ID NO: 8709 - RNA, 15 nt, Artificial Sequence
  Description of Artificial Sequence: Synthetic oligonucleotide
auuaaaauaaacaug

SEQ ID NO: 8710 - RNA, 12 nt, Artificial Sequence
  Description of Artificial Sequence: Synthetic oligonucleotide
cuguucugaucg

SEQ ID NO: 8711 - RNA, 16 nt, Artificial Sequence
  Description of Artificial Sequence: Synthetic oligonucleotide
aaauaauuugaacuuu

SEQ ID NO: 8712 - RNA, 12 nt, Artificial Sequence
  Description of Artificial Sequence: Synthetic oligonucleotide
ugcgaccuuaau

SEQ ID NO: 8713 - RNA, 11 nt, Artificial Sequence
  Description of Artificial Sequence: Synthetic oligonucleotide
cugagaaagcu

SEQ ID NO: 8714 - RNA, 13 nt, Artificial Sequence
  Description of Artificial Sequence: Synthetic oligonucleotide
aguaaagaugcua

SEQ ID NO: 8715 - RNA, 12 nt, Artificial Sequence
  Description of Artificial Sequence: Synthetic oligonucleotide
cugcuuaauugc

SEQ ID NO: 8716 - RNA, 14 nt, Artificial Sequence
  Description of Artificial Sequence: Synthetic oligonucleotide
uaccauaugaauga

SEQ ID NO: 8717 - RNA, 12 nt, Artificial Sequence
  Description of Artificial Sequence: Synthetic oligonucleotide
aacuuucuuauc

SEQ ID NO: 8718 - RNA, 13 nt, Artificial Sequence
  Description of Artificial Sequence: Synthetic oligonucleotide
ccuugcaugacau

SEQ ID NO: 8719 - RNA, 14 nt, Artificial Sequence
  Description of Artificial Sequence: Synthetic oligonucleotide
ugaauuuguauaug

SEQ ID NO: 8720 - RNA, 12 nt, Artificial Sequence
  Description of Artificial Sequence: Synthetic oligonucleotide
gaauccuaguag

SEQ ID NO: 8721 - RNA, 10 nt, Artificial Sequence
  Description of Artificial Sequence: Synthetic oligonucleotide
gaaagggaag

SEQ ID NO: 8722 - RNA, 11 nt, Artificial Sequence
  Description of Artificial Sequence: Synthetic oligonucleotide
uaucggcaugc

SEQ ID NO: 8723 - RNA, 12 nt, Artificial Sequence
  Description of Artificial Sequence: Synthetic oligonucleotide
caccucauagua

SEQ ID NO: 8724 - RNA, 11 nt, Artificial Sequence
  Description of Artificial Sequence: Synthetic oligonucleotide
ccagaauugcc

SEQ ID NO: 8725 - RNA, 11 nt, Artificial Sequence
  Description of Artificial Sequence: Synthetic oligonucleotide
uggugaucugg

SEQ ID NO: 8726 - RNA, 12 nt, Artificial Sequence
  Description of Artificial Sequence: Synthetic oligonucleotide
gaucuggguaau

SEQ ID NO: 8727 - RNA, 12 nt, Artificial Sequence
  Description of Artificial Sequence: Synthetic oligonucleotide
ggaugugaugaa

SEQ ID NO: 8728 - RNA, 12 nt, Artificial Sequence
  Description of Artificial Sequence: Synthetic oligonucleotide
cauuuccacagc

SEQ ID NO: 8729 - RNA, 11 nt, Artificial Sequence
  Description of Artificial Sequence: Synthetic oligonucleotide
acagcuacacc

SEQ ID NO: 8730 - RNA, 12 nt, Artificial Sequence
  Description of Artificial Sequence: Synthetic oligonucleotide
ugcaguucuuac

SEQ ID NO: 8731 - RNA, 12 nt, Artificial Sequence
  Description of Artificial Sequence: Synthetic oligonucleotide
acgagaagaaga

SEQ ID NO: 8732 - RNA, 12 nt, Artificial Sequence
  Description of Artificial Sequence: Synthetic oligonucleotide
cgagaagaagau

SEQ ID NO: 8733 - RNA, 15 nt, Artificial Sequence
  Description of Artificial Sequence: Synthetic oligonucleotide
aagaagaucauuuac

SEQ ID NO: 8734 - RNA, 11 nt, Artificial Sequence
  Description of Artificial Sequence: Synthetic oligonucleotide
agaggaagagg

SEQ ID NO: 8735 - RNA, 12 nt, Artificial Sequence
  Description of Artificial Sequence: Synthetic oligonucleotide
gaggaagaggug

SEQ ID NO: 8736 - RNA, 13 nt, Artificial Sequence
  Description of Artificial Sequence: Synthetic oligonucleotide
cuacuuugagggc

SEQ ID NO: 8737 - RNA, 12 nt, Artificial Sequence
  Description of Artificial Sequence: Synthetic oligonucleotide
agggcaucuccu

SEQ ID NO: 8738 - RNA, 10 nt, Artificial Sequence
  Description of Artificial Sequence: Synthetic oligonucleotide
ggagugauau

SEQ ID NO: 8739 - RNA, 11 nt, Artificial Sequence
  Description of Artificial Sequence: Synthetic oligonucleotide
gagugauaugg

SEQ ID NO: 8740 - RNA, 12 nt, Artificial Sequence
  Description of Artificial Sequence: Synthetic oligonucleotide
ugcaguaaagau

SEQ ID NO: 8741 - RNA, 13 nt, Artificial Sequence
  Description of Artificial Sequence: Synthetic oligonucleotide
aguaaagauccua

SEQ ID NO: 8742 - RNA, 12 nt, Artificial Sequence
  Description of Artificial Sequence: Synthetic oligonucleotide
ugacaaaggaca

SEQ ID NO: 8743 - RNA, 13 nt, Artificial Sequence
  Description of Artificial Sequence: Synthetic oligonucleotide
gcaauugugaccc

SEQ ID NO: 8744 - RNA, 12 nt, Artificial Sequence
  Description of Artificial Sequence: Synthetic oligonucleotide
aacaucauccau

SEQ ID NO: 8745 - RNA, 12 nt, Artificial Sequence
  Description of Artificial Sequence: Synthetic oligonucleotide
ugaaauccaaca

SEQ ID NO: 8746 - RNA, 15 nt, Artificial Sequence
  Description of Artificial Sequence: Synthetic oligonucleotide
aacaauauauuucuc

SEQ ID NO: 8747 - RNA, 14 nt, Artificial Sequence
  Description of Artificial Sequence: Synthetic oligonucleotide
aacaguaaagucac

SEQ ID NO: 8748 - RNA, 14 nt, Artificial Sequence
  Description of Artificial Sequence: Synthetic oligonucleotide
ugugaagaaaguaa

SEQ ID NO: 8749 - RNA, 13 nt, Artificial Sequence
  Description of Artificial Sequence: Synthetic oligonucleotide
cuuccgagccauc

SEQ ID NO: 8750 - RNA, 12 nt, Artificial Sequence
  Description of Artificial Sequence: Synthetic oligonucleotide
aauggagguuga

SEQ ID NO: 8751 - RNA, 12 nt, Artificial Sequence
  Description of Artificial Sequence: Synthetic oligonucleotide
ggagguugaaua

SEQ ID NO: 8752 - RNA, 13 nt, Artificial Sequence
  Description of Artificial Sequence: Synthetic oligonucleotide
auuuugaguuuuc

SEQ ID NO: 8753 - RNA, 12 nt, Artificial Sequence
  Description of Artificial Sequence: Synthetic oligonucleotide
uauccuguuugu

SEQ ID NO: 8754 - RNA, 11 nt, Artificial Sequence
  Description of Artificial Sequence: Synthetic oligonucleotide
ccuguuuguuc

SEQ ID NO: 8755 - RNA, 10 nt, Artificial Sequence
  Description of Artificial Sequence: Synthetic oligonucleotide
cucuacagcc

SEQ ID NO: 8756 - RNA, 12 nt, Artificial Sequence
  Description of Artificial Sequence: Synthetic oligonucleotide
ucuuccauagcu

SEQ ID NO: 8757 - RNA, 12 nt, Artificial Sequence
  Description of Artificial Sequence: Synthetic oligonucleotide
auaaucuuccug

SEQ ID NO: 8758 - RNA, 12 nt, Artificial Sequence
  Description of Artificial Sequence: Synthetic oligonucleotide
uaaucuuccugu

SEQ ID NO: 8759 - RNA, 12 nt, Artificial Sequence
  Description of Artificial Sequence: Synthetic oligonucleotide
cuucaugacuug

SEQ ID NO: 8760 - RNA, 12 nt, Artificial Sequence
  Description of Artificial Sequence: Synthetic oligonucleotide
aagagggagaga

SEQ ID NO: 8761 - RNA, 12 nt, Artificial Sequence
  Description of Artificial Sequence: Synthetic oligonucleotide
cgucuccuacca

SEQ ID NO: 8762 - RNA, 12 nt, Artificial Sequence
  Description of Artificial Sequence: Synthetic oligonucleotide
gaucaaucggcc

SEQ ID NO: 8763 - RNA, 12 nt, Artificial Sequence
  Description of Artificial Sequence: Synthetic oligonucleotide
ggacgaacaucc

SEQ ID NO: 8764 - RNA, 11 nt, Artificial Sequence
  Description of Artificial Sequence: Synthetic oligonucleotide
agggucggaac

SEQ ID NO: 8765 - RNA, 10 nt, Artificial Sequence
  Description of Artificial Sequence: Synthetic oligonucleotide
ucggaaccca

SEQ ID NO: 8766 - RNA, 11 nt, Artificial Sequence
  Description of Artificial Sequence: Synthetic oligonucleotide
acccaagcuua

SEQ ID NO: 8767 - RNA, 14 nt, Artificial Sequence
  Description of Artificial Sequence: Synthetic oligonucleotide
gaacuuuaagcaac

SEQ ID NO: 8768 - RNA, 11 nt, Artificial Sequence
  Description of Artificial Sequence: Synthetic oligonucleotide
acuauucagug

SEQ ID NO: 8769 - RNA, 11 nt, Artificial Sequence
  Description of Artificial Sequence: Synthetic oligonucleotide
cuauucagugg

SEQ ID NO: 8770 - RNA, 13 nt, Artificial Sequence
  Description of Artificial Sequence: Synthetic oligonucleotide
aaacacagauaac

SEQ ID NO: 8771 - RNA, 12 nt, Artificial Sequence
  Description of Artificial Sequence: Synthetic oligonucleotide
cuuaagaaaaga

SEQ ID NO: 8772 - RNA, 12 nt, Artificial Sequence
  Description of Artificial Sequence: Synthetic oligonucleotide
cugaaggagugu

SEQ ID NO: 8773 - RNA, 10 nt, Artificial Sequence
  Description of Artificial Sequence: Synthetic oligonucleotide
ucaccgcggg

SEQ ID NO: 8774 - RNA, 14 nt, Artificial Sequence
  Description of Artificial Sequence: Synthetic oligonucleotide
agcagaaauaagcg

SEQ ID NO: 8775 - RNA, 12 nt, Artificial Sequence
  Description of Artificial Sequence: Synthetic oligonucleotide
aagcgugccguu

SEQ ID NO: 8776 - RNA, 12 nt, Artificial Sequence
  Description of Artificial Sequence: Synthetic oligonucleotide
agaaacagucac

SEQ ID NO: 8777 - RNA, 12 nt, Artificial Sequence
  Description of Artificial Sequence: Synthetic oligonucleotide
agaggaagaagg

SEQ ID NO: 8778 - RNA, 14 nt, Artificial Sequence
  Description of Artificial Sequence: Synthetic oligonucleotide
uguauucaaaauau

SEQ ID NO: 8779 - RNA, 13 nt, Artificial Sequence
  Description of Artificial Sequence: Synthetic oligonucleotide
auuuuccucccuu

SEQ ID NO: 8780 - RNA, 13 nt, Artificial Sequence
  Description of Artificial Sequence: Synthetic oligonucleotide
caaagaaagauag

SEQ ID NO: 8781 - RNA, 12 nt, Artificial Sequence
  Description of Artificial Sequence: Synthetic oligonucleotide
aagaaagauaga

SEQ ID NO: 8782 - RNA, 13 nt, Artificial Sequence
  Description of Artificial Sequence: Synthetic oligonucleotide
gaaagcauuuguu

SEQ ID NO: 8783 - RNA, 13 nt, Artificial Sequence
  Description of Artificial Sequence: Synthetic oligonucleotide
ugaguuaaacgaa

SEQ ID NO: 8784 - RNA, 12 nt, Artificial Sequence
  Description of Artificial Sequence: Synthetic oligonucleotide
acugauacagaa

SEQ ID NO: 8785 - RNA, 12 nt, Artificial Sequence
  Description of Artificial Sequence: Synthetic oligonucleotide
auauuauauaua

SEQ ID NO: 8786 - RNA, 12 nt, Artificial Sequence
  Description of Artificial Sequence: Synthetic oligonucleotide
auuauauauaua

SEQ ID NO: 8787 - RNA, 12 nt, Artificial Sequence
  Description of Artificial Sequence: Synthetic oligonucleotide
ucacuggaugua

SEQ ID NO: 8788 - RNA, 12 nt, Artificial Sequence
  Description of Artificial Sequence: Synthetic oligonucleotide
cagggaagagga

SEQ ID NO: 8789 - RNA, 15 nt, Artificial Sequence
  Description of Artificial Sequence: Synthetic oligonucleotide
augaucuuuuuuuug

SEQ ID NO: 8790 - RNA, 11 nt, Artificial Sequence
  Description of Artificial Sequence: Synthetic oligonucleotide
aguucacggcc

SEQ ID NO: 8791 - RNA, 13 nt, Artificial Sequence
  Description of Artificial Sequence: Synthetic oligonucleotide
caccaucacacca

SEQ ID NO: 8792 - RNA, 11 nt, Artificial Sequence
  Description of Artificial Sequence: Synthetic oligonucleotide
ccugcggguuu

SEQ ID NO: 8793 - RNA, 10 nt, Artificial Sequence
  Description of Artificial Sequence: Synthetic oligonucleotide
auccaguuug

SEQ ID NO: 8794 - RNA, 13 nt, Artificial Sequence
  Description of Artificial Sequence: Synthetic oligonucleotide
guuaaggacuucu

SEQ ID NO: 8795 - RNA, 13 nt, Artificial Sequence
  Description of Artificial Sequence: Synthetic oligonucleotide
cagugggacagag

SEQ ID NO: 8796 - RNA, 14 nt, Artificial Sequence
  Description of Artificial Sequence: Synthetic oligonucleotide
aauuuguuauugug

SEQ ID NO: 8797 - RNA, 13 nt, Artificial Sequence
  Description of Artificial Sequence: Synthetic oligonucleotide
uucaaaugcauuu

SEQ ID NO: 8798 - RNA, 10 nt, Artificial Sequence
  Description of Artificial Sequence: Synthetic oligonucleotide
caggaaagcc

SEQ ID NO: 8799 - RNA, 11 nt, Artificial Sequence
  Description of Artificial Sequence: Synthetic oligonucleotide
aggaaagcccu

SEQ ID NO: 8800 - RNA, 12 nt, Artificial Sequence
  Description of Artificial Sequence: Synthetic oligonucleotide
cccagcauggcc

SEQ ID NO: 8801 - RNA, 11 nt, Artificial Sequence
  Description of Artificial Sequence: Synthetic oligonucleotide
cuucucccuga

SEQ ID NO: 8802 - RNA, 12 nt, Artificial Sequence
  Description of Artificial Sequence: Synthetic oligonucleotide
gaagaagcccuu

SEQ ID NO: 8803 - RNA, 12 nt, Artificial Sequence
  Description of Artificial Sequence: Synthetic oligonucleotide
agaagcccuuca

SEQ ID NO: 8804 - RNA, 11 nt, Artificial Sequence
  Description of Artificial Sequence: Synthetic oligonucleotide
gcccuucagcg

SEQ ID NO: 8805 - RNA, 11 nt, Artificial Sequence
  Description of Artificial Sequence: Synthetic oligonucleotide
ccuucagcggc

SEQ ID NO: 8806 - RNA, 12 nt, Artificial Sequence
  Description of Artificial Sequence: Synthetic oligonucleotide
ucagcggccagu

SEQ ID NO: 8807 - RNA, 12 nt, Artificial Sequence
  Description of Artificial Sequence: Synthetic oligonucleotide
ugaaaagcuccg

SEQ ID NO: 8808 - RNA, 11 nt, Artificial Sequence
  Description of Artificial Sequence: Synthetic oligonucleotide
aaaagcuccgg

SEQ ID NO: 8809 - RNA, 13 nt, Artificial Sequence
  Description of Artificial Sequence: Synthetic oligonucleotide
agucaacagucug

SEQ ID NO: 8810 - RNA, 13 nt, Artificial Sequence
  Description of Artificial Sequence: Synthetic oligonucleotide
cagaguucaaaag

SEQ ID NO: 8811 - RNA, 13 nt, Artificial Sequence
  Description of Artificial Sequence: Synthetic oligonucleotide
agaguucaaaagc

SEQ ID NO: 8812 - RNA, 12 nt, Artificial Sequence
  Description of Artificial Sequence: Synthetic oligonucleotide
uucaaaagcccu

SEQ ID NO: 8813 - RNA, 12 nt, Artificial Sequence
  Description of Artificial Sequence: Synthetic oligonucleotide
ucaaaagcccuu

SEQ ID NO: 8814 - RNA, 12 nt, Artificial Sequence
  Description of Artificial Sequence: Synthetic oligonucleotide
aaaagcccuuca

SEQ ID NO: 8815 - RNA, 12 nt, Artificial Sequence
  Description of Artificial Sequence: Synthetic oligonucleotide
aaagcccuucag

SEQ ID NO: 8816 - RNA, 13 nt, Artificial Sequence
  Description of Artificial Sequence: Synthetic oligonucleotide
gugaagccgcucg

SEQ ID NO: 8817 - RNA, 12 nt, Artificial Sequence
  Description of Artificial Sequence: Synthetic oligonucleotide
cacgccagucaa

SEQ ID NO: 8818 - RNA, 13 nt, Artificial Sequence
  Description of Artificial Sequence: Synthetic oligonucleotide
uucuuggugcgug

SEQ ID NO: 8819 - RNA, 14 nt, Artificial Sequence
  Description of Artificial Sequence: Synthetic oligonucleotide
auuggauucaucag

SEQ ID NO: 8820 - RNA, 13 nt, Artificial Sequence
  Description of Artificial Sequence: Synthetic oligonucleotide
uggaauaccuaag

SEQ ID NO: 8821 - RNA, 12 nt, Artificial Sequence
  Description of Artificial Sequence: Synthetic oligonucleotide
auuugaggcuca

SEQ ID NO: 8822 - RNA, 11 nt, Artificial Sequence
  Description of Artificial Sequence: Synthetic oligonucleotide
ucuacaauugg

SEQ ID NO: 8823 - RNA, 12 nt, Artificial Sequence
  Description of Artificial Sequence: Synthetic oligonucleotide
uaguuaggagcc

SEQ ID NO: 8824 - RNA, 13 nt, Artificial Sequence
  Description of Artificial Sequence: Synthetic oligonucleotide
agucaauauccac

SEQ ID NO: 8825 - RNA, 13 nt, Artificial Sequence
  Description of Artificial Sequence: Synthetic oligonucleotide
auguucagucaca

SEQ ID NO: 8826 - RNA, 12 nt, Artificial Sequence
  Description of Artificial Sequence: Synthetic oligonucleotide
acacacacauac

SEQ ID NO: 8827 - RNA, 12 nt, Artificial Sequence
  Description of Artificial Sequence: Synthetic oligonucleotide
uuccuuuugcuu

SEQ ID NO: 8828 - RNA, 16 nt, Artificial Sequence
  Description of Artificial Sequence: Synthetic oligonucleotide
uuuuaaaguaauuuuu

SEQ ID NO: 8829 - RNA, 13 nt, Artificial Sequence
  Description of Artificial Sequence: Synthetic oligonucleotide
caacagucaaugg

SEQ ID NO: 8830 - RNA, 13 nt, Artificial Sequence
  Description of Artificial Sequence: Synthetic oligonucleotide
ucgacaaaccaau

SEQ ID NO: 8831 - RNA, 12 nt, Artificial Sequence
  Description of Artificial Sequence: Synthetic oligonucleotide
acugcuaccacu

SEQ ID NO: 8832 - RNA, 13 nt, Artificial Sequence
  Description of Artificial Sequence: Synthetic oligonucleotide
gcaagcggucuua

SEQ ID NO: 8833 - RNA, 13 nt, Artificial Sequence
  Description of Artificial Sequence: Synthetic oligonucleotide
ggucuuaccggcu

SEQ ID NO: 8834 - RNA, 11 nt, Artificial Sequence
  Description of Artificial Sequence: Synthetic oligonucleotide
gauggguuacc

SEQ ID NO: 8835 - RNA, 11 nt, Artificial Sequence
  Description of Artificial Sequence: Synthetic oligonucleotide
guuaccugcga

SEQ ID NO: 8836 - RNA, 12 nt, Artificial Sequence
  Description of Artificial Sequence: Synthetic oligonucleotide
aaucuugcugag

SEQ ID NO: 8837 - RNA, 13 nt, Artificial Sequence
  Description of Artificial Sequence: Synthetic oligonucleotide
agcauaaaacagu

SEQ ID NO: 8838 - RNA, 12 nt, Artificial Sequence
  Description of Artificial Sequence: Synthetic oligonucleotide
guccuuuauccu

SEQ ID NO: 8839 - RNA, 12 nt, Artificial Sequence
  Description of Artificial Sequence: Synthetic oligonucleotide
caacgcaaguug

SEQ ID NO: 8840 - RNA, 13 nt, Artificial Sequence
  Description of Artificial Sequence: Synthetic oligonucleotide
aaacugaaaccau

SEQ ID NO: 8841 - RNA, 14 nt, Artificial Sequence
  Description of Artificial Sequence: Synthetic oligonucleotide
acuuuguuaaauau

SEQ ID NO: 8842 - RNA, 14 nt, Artificial Sequence
  Description of Artificial Sequence: Synthetic oligonucleotide
guauauuaaaaguu

SEQ ID NO: 8843 - RNA, 13 nt, Artificial Sequence
  Description of Artificial Sequence: Synthetic oligonucleotide
guuuugacuuaac

SEQ ID NO: 8844 - RNA, 13 nt, Artificial Sequence
  Description of Artificial Sequence: Synthetic oligonucleotide
gcaaacucagcac

SEQ ID NO: 8845 - RNA, 11 nt, Artificial Sequence
  Description of Artificial Sequence: Synthetic oligonucleotide
ugcugaccuca

SEQ ID NO: 8846 - RNA, 14 nt, Artificial Sequence
  Description of Artificial Sequence: Synthetic oligonucleotide
uuuauucagaucgc

SEQ ID NO: 8847 - RNA, 13 nt, Artificial Sequence
  Description of Artificial Sequence: Synthetic oligonucleotide
aggguucugggau

SEQ ID NO: 8848 - RNA, 15 nt, Artificial Sequence
  Description of Artificial Sequence: Synthetic oligonucleotide
auauuggaaauuaug

SEQ ID NO: 8849 - RNA, 13 nt, Artificial Sequence
  Description of Artificial Sequence: Synthetic oligonucleotide
auggaagcacuag

SEQ ID NO: 8850 - RNA, 13 nt, Artificial Sequence
  Description of Artificial Sequence: Synthetic oligonucleotide
guuuuuaugugga

SEQ ID NO: 8851 - RNA, 12 nt, Artificial Sequence
  Description of Artificial Sequence: Synthetic oligonucleotide
ggaauugguaga

SEQ ID NO: 8852 - RNA, 13 nt, Artificial Sequence
  Description of Artificial Sequence: Synthetic oligonucleotide
uuagacuuggaga

SEQ ID NO: 8853 - RNA, 13 nt, Artificial Sequence
  Description of Artificial Sequence: Synthetic oligonucleotide
uuacaguauucca

SEQ ID NO: 8854 - RNA, 15 nt, Artificial Sequence
  Description of Artificial Sequence: Synthetic oligonucleotide
ccacugaugaauuaa

SEQ ID NO: 8855 - RNA, 12 nt, Artificial Sequence
  Description of Artificial Sequence: Synthetic oligonucleotide
ccacaucaucac

SEQ ID NO: 8856 - RNA, 13 nt, Artificial Sequence
  Description of Artificial Sequence: Synthetic oligonucleotide
cucaccaaacaga

SEQ ID NO: 8857 - RNA, 12 nt, Artificial Sequence
  Description of Artificial Sequence: Synthetic oligonucleotide
ggaacaugaugg

SEQ ID NO: 8858 - RNA, 12 nt, Artificial Sequence
  Description of Artificial Sequence: Synthetic oligonucleotide
cauguagacugc

SEQ ID NO: 8859 - RNA, 13 nt, Artificial Sequence
  Description of Artificial Sequence: Synthetic oligonucleotide
ggaucuauuuaug

SEQ ID NO: 8860 - RNA, 12 nt, Artificial Sequence
  Description of Artificial Sequence: Synthetic oligonucleotide
gcacuauuauca

SEQ ID NO: 8861 - RNA, 11 nt, Artificial Sequence
  Description of Artificial Sequence: Synthetic oligonucleotide
aucaguucugc

SEQ ID NO: 8862 - RNA, 13 nt, Artificial Sequence
  Description of Artificial Sequence: Synthetic oligonucleotide
agauuaaaccuac

SEQ ID NO: 8863 - RNA, 13 nt, Artificial Sequence
  Description of Artificial Sequence: Synthetic oligonucleotide
auaaaauccuucu

SEQ ID NO: 8864 - RNA, 12 nt, Artificial Sequence
  Description of Artificial Sequence: Synthetic oligonucleotide
aaugcuguagac

SEQ ID NO: 8865 - RNA, 13 nt, Artificial Sequence
  Description of Artificial Sequence: Synthetic oligonucleotide
uugauaggaauag

SEQ ID NO: 8866 - RNA, 11 nt, Artificial Sequence
  Description of Artificial Sequence: Synthetic oligonucleotide
aauggcccuga

SEQ ID NO: 8867 - RNA, 11 nt, Artificial Sequence
  Description of Artificial Sequence: Synthetic oligonucleotide
uuccucaagca

SEQ ID NO: 8868 - RNA, 10 nt, Artificial Sequence
  Description of Artificial Sequence: Synthetic oligonucleotide
guucagccca

SEQ ID NO: 8869 - RNA, 11 nt, Artificial Sequence
  Description of Artificial Sequence: Synthetic oligonucleotide
gcugcugaacc

SEQ ID NO: 8870 - RNA, 12 nt, Artificial Sequence
  Description of Artificial Sequence: Synthetic oligonucleotide
aaguucucuuca

SEQ ID NO: 8871 - RNA, 11 nt, Artificial Sequence
  Description of Artificial Sequence: Synthetic oligonucleotide
ccagccuagag

SEQ ID NO: 8872 - RNA, 13 nt, Artificial Sequence
  Description of Artificial Sequence: Synthetic oligonucleotide
cucugugaagugu

SEQ ID NO: 8873 - RNA, 14 nt, Artificial Sequence
  Description of Artificial Sequence: Synthetic oligonucleotide
ugagaaaauuucaa

SEQ ID NO: 8874 - RNA, 11 nt, Artificial Sequence
  Description of Artificial Sequence: Synthetic oligonucleotide
aauccuccuga

SEQ ID NO: 8875 - RNA, 12 nt, Artificial Sequence
  Description of Artificial Sequence: Synthetic oligonucleotide
gugacaucauau

SEQ ID NO: 8876 - RNA, 13 nt, Artificial Sequence
  Description of Artificial Sequence: Synthetic oligonucleotide
aaucuucaucaua

SEQ ID NO: 8877 - RNA, 13 nt, Artificial Sequence
  Description of Artificial Sequence: Synthetic oligonucleotide
gacuagcuauuaa

SEQ ID NO: 8878 - RNA, 14 nt, Artificial Sequence
  Description of Artificial Sequence: Synthetic oligonucleotide
ucucuacuaaaaau

SEQ ID NO: 8879 - RNA, 12 nt, Artificial Sequence
  Description of Artificial Sequence: Synthetic oligonucleotide
ucuaucucgccu

SEQ ID NO: 8880 - RNA, 13 nt, Artificial Sequence
  Description of Artificial Sequence: Synthetic oligonucleotide
cuucgguccaguu

SEQ ID NO: 8881 - RNA, 11 nt, Artificial Sequence
  Description of Artificial Sequence: Synthetic oligonucleotide
gauguagccgc

SEQ ID NO: 8882 - RNA, 12 nt, Artificial Sequence
  Description of Artificial Sequence: Synthetic oligonucleotide
ugaggagacuug

SEQ ID NO: 8883 - RNA, 12 nt, Artificial Sequence
  Description of Artificial Sequence: Synthetic oligonucleotide
gaguagugagga

SEQ ID NO: 8884 - RNA, 14 nt, Artificial Sequence
  Description of Artificial Sequence: Synthetic oligonucleotide
cagaugaguacaaa

SEQ ID NO: 8885 - RNA, 13 nt, Artificial Sequence
  Description of Artificial Sequence: Synthetic oligonucleotide
guuguuaaugggc

SEQ ID NO: 8886 - RNA, 13 nt, Artificial Sequence
  Description of Artificial Sequence: Synthetic oligonucleotide
uuuuuaauuuauu

SEQ ID NO: 8887 - RNA, 12 nt, Artificial Sequence
  Description of Artificial Sequence: Synthetic oligonucleotide
uauuuaaauaug

SEQ ID NO: 8888 - RNA, 13 nt, Artificial Sequence
  Description of Artificial Sequence: Synthetic oligonucleotide
uauccuuuguuuc

SEQ ID NO: 8889 - RNA, 14 nt, Artificial Sequence
  Description of Artificial Sequence: Synthetic oligonucleotide
cgucuaaguguuug

SEQ ID NO: 8890 - RNA, 12 nt, Artificial Sequence
  Description of Artificial Sequence: Synthetic oligonucleotide
accugugacaaa

SEQ ID NO: 8891 - RNA, 13 nt, Artificial Sequence
  Description of Artificial Sequence: Synthetic oligonucleotide
ccaggcugaauua

SEQ ID NO: 8892 - RNA, 14 nt, Artificial Sequence
  Description of Artificial Sequence: Synthetic oligonucleotide
gucauucuuacaau

SEQ ID NO: 8893 - RNA, 15 nt, Artificial Sequence
  Description of Artificial Sequence: Synthetic oligonucleotide
ucauucuuacaauug

SEQ ID NO: 8894 - RNA, 12 nt, Artificial Sequence
  Description of Artificial Sequence: Synthetic oligonucleotide
cagagaguguac

SEQ ID NO: 8895 - RNA, 12 nt, Artificial Sequence
  Description of Artificial Sequence: Synthetic oligonucleotide
agaacucagcag

SEQ ID NO: 8896 - RNA, 13 nt, Artificial Sequence
  Description of Artificial Sequence: Synthetic oligonucleotide
uuuauuuucagua

SEQ ID NO: 8897 - RNA, 12 nt, Artificial Sequence
  Description of Artificial Sequence: Synthetic oligonucleotide
ucuuaaauggaa

SEQ ID NO: 8898 - RNA, 13 nt, Artificial Sequence
  Description of Artificial Sequence: Synthetic oligonucleotide
ugccuaaaauugu

SEQ ID NO: 8899 - RNA, 12 nt, Artificial Sequence
  Description of Artificial Sequence: Synthetic oligonucleotide
agacugugagcu

SEQ ID NO: 8900 - RNA, 14 nt, Artificial Sequence
  Description of Artificial Sequence: Synthetic oligonucleotide
ugcuuuuuauuaau

SEQ ID NO: 8901 - RNA, 13 nt, Artificial Sequence
  Description of Artificial Sequence: Synthetic oligonucleotide
cucuucuuacauu

SEQ ID NO: 8902 - RNA, 15 nt, Artificial Sequence
  Description of Artificial Sequence: Synthetic oligonucleotide
cauuuguaaaaaugu

SEQ ID NO: 8903 - RNA, 15 nt, Artificial Sequence
  Description of Artificial Sequence: Synthetic oligonucleotide
aucuuaauucauauu

SEQ ID NO: 8904 - RNA, 13 nt, Artificial Sequence
  Description of Artificial Sequence: Synthetic oligonucleotide
gaacuaaucauga

SEQ ID NO: 8905 - RNA, 12 nt, Artificial Sequence
  Description of Artificial Sequence: Synthetic oligonucleotide
ucugcucuuggg

SEQ ID NO: 8906 - RNA, 13 nt, Artificial Sequence
  Description of Artificial Sequence: Synthetic oligonucleotide
caguagcuuugag

SEQ ID NO: 8907 - RNA, 14 nt, Artificial Sequence
  Description of Artificial Sequence: Synthetic oligonucleotide
cacguaauauuuca

SEQ ID NO: 8908 - RNA, 13 nt, Artificial Sequence
  Description of Artificial Sequence: Synthetic oligonucleotide
uauucucuucacu

SEQ ID NO: 8909 - RNA, 14 nt, Artificial Sequence
  Description of Artificial Sequence: Synthetic oligonucleotide
cuaaugcuaagaaa

SEQ ID NO: 8910 - RNA, 12 nt, Artificial Sequence
  Description of Artificial Sequence: Synthetic oligonucleotide
gcugaaaaucaa

SEQ ID NO: 8911 - RNA, 14 nt, Artificial Sequence
  Description of Artificial Sequence: Synthetic oligonucleotide
aauaugauuacuuu

SEQ ID NO: 8912 - RNA, 14 nt, Artificial Sequence
  Description of Artificial Sequence: Synthetic oligonucleotide
cauuuuguucuaca

SEQ ID NO: 8913 - RNA, 12 nt, Artificial Sequence
  Description of Artificial Sequence: Synthetic oligonucleotide
cccgggacucuc

SEQ ID NO: 8914 - RNA, 14 nt, Artificial Sequence
  Description of Artificial Sequence: Synthetic oligonucleotide
ccuuuaaaguaaag

SEQ ID NO: 8915 - RNA, 13 nt, Artificial Sequence
  Description of Artificial Sequence: Synthetic oligonucleotide
ucuggaagccugg

SEQ ID NO: 8916 - RNA, 14 nt, Artificial Sequence
  Description of Artificial Sequence: Synthetic oligonucleotide
aaaacaaaagagag

SEQ ID NO: 8917 - RNA, 13 nt, Artificial Sequence
  Description of Artificial Sequence: Synthetic oligonucleotide
aucaguuaugccg

SEQ ID NO: 8918 - RNA, 13 nt, Artificial Sequence
  Description of Artificial Sequence: Synthetic oligonucleotide
uaaaagaagucca

SEQ ID NO: 8919 - RNA, 11 nt, Artificial Sequence
  Description of Artificial Sequence: Synthetic oligonucleotide
aggugagguua

SEQ ID NO: 8920 - RNA, 11 nt, Artificial Sequence
  Description of Artificial Sequence: Synthetic oligonucleotide
gggaagaggac

SEQ ID NO: 8921 - RNA, 13 nt, Artificial Sequence
  Description of Artificial Sequence: Synthetic oligonucleotide
aagcaaguauugu

SEQ ID NO: 8922 - RNA, 12 nt, Artificial Sequence
  Description of Artificial Sequence: Synthetic oligonucleotide
auuguagcacuc

SEQ ID NO: 8923 - RNA, 14 nt, Artificial Sequence
  Description of Artificial Sequence: Synthetic oligonucleotide
acaaaaccacaaau

SEQ ID NO: 8924 - RNA, 12 nt, Artificial Sequence
  Description of Artificial Sequence: Synthetic oligonucleotide
uaagcccauaca

SEQ ID NO: 8925 - RNA, 11 nt, Artificial Sequence
  Description of Artificial Sequence: Synthetic oligonucleotide
agcccauacag

SEQ ID NO: 8926 - RNA, 12 nt, Artificial Sequence
  Description of Artificial Sequence: Synthetic oligonucleotide
cagaaaccuucc

SEQ ID NO: 8927 - RNA, 10 nt, Artificial Sequence
  Description of Artificial Sequence: Synthetic oligonucleotide
guauaccuac

SEQ ID NO: 8928 - RNA, 13 nt, Artificial Sequence
  Description of Artificial Sequence: Synthetic oligonucleotide
gccaguuuucgga

SEQ ID NO: 8929 - RNA, 9 nt, Artificial Sequence
  Description of Artificial Sequence: Synthetic oligonucleotide
ggaacaggg

SEQ ID NO: 8930 - RNA, 13 nt, Artificial Sequence
  Description of Artificial Sequence: Synthetic oligonucleotide
uuaacuuuccagu

SEQ ID NO: 8931 - RNA, 14 nt, Artificial Sequence
  Description of Artificial Sequence: Synthetic oligonucleotide
aaaguuugguuuug

SEQ ID NO: 8932 - RNA, 12 nt, Artificial Sequence
  Description of Artificial Sequence: Synthetic oligonucleotide
cuucccacugua

SEQ ID NO: 8933 - RNA, 13 nt, Artificial Sequence
  Description of Artificial Sequence: Synthetic oligonucleotide
ugauaccauauga

SEQ ID NO: 8934 - RNA, 11 nt, Artificial Sequence
  Description of Artificial Sequence: Synthetic oligonucleotide
aacaugggcug

SEQ ID NO: 8935 - RNA, 13 nt, Artificial Sequence
  Description of Artificial Sequence: Synthetic oligonucleotide
caacuuuuucaua

SEQ ID NO: 8936 - RNA, 12 nt, Artificial Sequence
  Description of Artificial Sequence: Synthetic oligonucleotide
caugaggccgga

SEQ ID NO: 8937 - RNA, 11 nt, Artificial Sequence
  Description of Artificial Sequence: Synthetic oligonucleotide
acugcauuugu

SEQ ID NO: 8938 - RNA, 13 nt, Artificial Sequence
  Description of Artificial Sequence: Synthetic oligonucleotide
aauguuuacuacc

SEQ ID NO: 8939 - RNA, 15 nt, Artificial Sequence
  Description of Artificial Sequence: Synthetic oligonucleotide
aauuuuuugaugaaa

SEQ ID NO: 8940 - RNA, 14 nt, Artificial Sequence
  Description of Artificial Sequence: Synthetic oligonucleotide
cagugugugaauuu

SEQ ID NO: 8941 - RNA, 13 nt, Artificial Sequence
  Description of Artificial Sequence: Synthetic oligonucleotide
gagcaauguaugu

SEQ ID NO: 8942 - RNA, 14 nt, Artificial Sequence
  Description of Artificial Sequence: Synthetic oligonucleotide
aaagcacauauaua

SEQ ID NO: 8943 - RNA, 14 nt, Artificial Sequence
  Description of Artificial Sequence: Synthetic oligonucleotide
guaauaguuucucc

SEQ ID NO: 8944 - RNA, 13 nt, Artificial Sequence
  Description of Artificial Sequence: Synthetic oligonucleotide
aguuucuccaaau

SEQ ID NO: 8945 - RNA, 13 nt, Artificial Sequence
  Description of Artificial Sequence: Synthetic oligonucleotide
uacuuccuagaaa

SEQ ID NO: 8946 - RNA, 13 nt, Artificial Sequence
  Description of Artificial Sequence: Synthetic oligonucleotide
uacaccauauaug

SEQ ID NO: 8947 - RNA, 14 nt, Artificial Sequence
  Description of Artificial Sequence: Synthetic oligonucleotide
auauaugaauggag

SEQ ID NO: 8948 - RNA, 13 nt, Artificial Sequence
  Description of Artificial Sequence: Synthetic oligonucleotide
acgagaagaagau

SEQ ID NO: 8949 - RNA, 13 nt, Artificial Sequence
  Description of Artificial Sequence: Synthetic oligonucleotide
ucauuuacaggga

SEQ ID NO: 8950 - RNA, 13 nt, Artificial Sequence
  Description of Artificial Sequence: Synthetic oligonucleotide
cauuuacagggac

SEQ ID NO: 8951 - RNA, 10 nt, Artificial Sequence
  Description of Artificial Sequence: Synthetic oligonucleotide
agggaccuga

SEQ ID NO: 8952 - RNA, 14 nt, Artificial Sequence
  Description of Artificial Sequence: Synthetic oligonucleotide
uguuugacugcauc

SEQ ID NO: 8953 - RNA, 13 nt, Artificial Sequence
  Description of Artificial Sequence: Synthetic oligonucleotide
uuugacugcaucg

SEQ ID NO: 8954 - RNA, 12 nt, Artificial Sequence
  Description of Artificial Sequence: Synthetic oligonucleotide
gaguucacaggg

SEQ ID NO: 8955 - RNA, 13 nt, Artificial Sequence
  Description of Artificial Sequence: Synthetic oligonucleotide
ggcaccucugucc

SEQ ID NO: 8956 - RNA, 15 nt, Artificial Sequence
  Description of Artificial Sequence: Synthetic oligonucleotide
gguuugucuuuuuaa

SEQ ID NO: 8957 - RNA, 14 nt, Artificial Sequence
  Description of Artificial Sequence: Synthetic oligonucleotide
uuugucuuuuuaag

SEQ ID NO: 8958 - RNA, 13 nt, Artificial Sequence
  Description of Artificial Sequence: Synthetic oligonucleotide
ccuaaagguuguc

SEQ ID NO: 8959 - RNA, 12 nt, Artificial Sequence
  Description of Artificial Sequence: Synthetic oligonucleotide
aagguugucgac

SEQ ID NO: 8960 - RNA, 13 nt, Artificial Sequence
  Description of Artificial Sequence: Synthetic oligonucleotide
accuggcaauugu

SEQ ID NO: 8961 - RNA, 12 nt, Artificial Sequence
  Description of Artificial Sequence: Synthetic oligonucleotide
aguggugcgagg

SEQ ID NO: 8962 - RNA, 13 nt, Artificial Sequence
  Description of Artificial Sequence: Synthetic oligonucleotide
agagacaugaaau

SEQ ID NO: 8963 - RNA, 13 nt, Artificial Sequence
  Description of Artificial Sequence: Synthetic oligonucleotide
auauauuucucca

SEQ ID NO: 8964 - RNA, 10 nt, Artificial Sequence
  Description of Artificial Sequence: Synthetic oligonucleotide
caugaaggcu

SEQ ID NO: 8965 - RNA, 11 nt, Artificial Sequence
  Description of Artificial Sequence: Synthetic oligonucleotide
gcuggaguggu

SEQ ID NO: 8966 - RNA, 11 nt, Artificial Sequence
  Description of Artificial Sequence: Synthetic oligonucleotide
aggaagagagg

SEQ ID NO: 8967 - RNA, 12 nt, Artificial Sequence
  Description of Artificial Sequence: Synthetic oligonucleotide
cuugcaucgggc

SEQ ID NO: 8968 - RNA, 13 nt, Artificial Sequence
  Description of Artificial Sequence: Synthetic oligonucleotide
auauccuacugug

SEQ ID NO: 8969 - RNA, 13 nt, Artificial Sequence
  Description of Artificial Sequence: Synthetic oligonucleotide
uccuacuguguaa

SEQ ID NO: 8970 - RNA, 12 nt, Artificial Sequence
  Description of Artificial Sequence: Synthetic oligonucleotide
ccuuguagugua

SEQ ID NO: 8971 - RNA, 13 nt, Artificial Sequence
  Description of Artificial Sequence: Synthetic oligonucleotide
ucuuuguugauug

SEQ ID NO: 8972 - RNA, 14 nt, Artificial Sequence
  Description of Artificial Sequence: Synthetic oligonucleotide
uuuguugauugaaa

SEQ ID NO: 8973 - RNA, 15 nt, Artificial Sequence
  Description of Artificial Sequence: Synthetic oligonucleotide
uucuuuuucuuccau

SEQ ID NO: 8974 - RNA, 13 nt, Artificial Sequence
  Description of Artificial Sequence: Synthetic oligonucleotide
aaucuuccuucua

SEQ ID NO: 8975 - RNA, 13 nt, Artificial Sequence
  Description of Artificial Sequence: Synthetic oligonucleotide
uugaaugcuucau

SEQ ID NO: 8976 - RNA, 13 nt, Artificial Sequence
  Description of Artificial Sequence: Synthetic oligonucleotide
ugaaugcuucaug

SEQ ID NO: 8977 - RNA, 13 nt, Artificial Sequence
  Description of Artificial Sequence: Synthetic oligonucleotide
aauucuacuuuga

SEQ ID NO: 8978 - RNA, 13 nt, Artificial Sequence
  Description of Artificial Sequence: Synthetic oligonucleotide
agcaacuacagac

SEQ ID NO: 8979 - RNA, 13 nt, Artificial Sequence
  Description of Artificial Sequence: Synthetic oligonucleotide
gaccaaggucaac

SEQ ID NO: 8980 - RNA, 13 nt, Artificial Sequence
  Description of Artificial Sequence: Synthetic oligonucleotide
cgacuaucucgac

SEQ ID NO: 8981 - RNA, 13 nt, Artificial Sequence
  Description of Artificial Sequence: Synthetic oligonucleotide
aaccuucccaaac

SEQ ID NO: 8982 - RNA, 14 nt, Artificial Sequence
  Description of Artificial Sequence: Synthetic oligonucleotide
ccaagcuuagaacu

SEQ ID NO: 8983 - RNA, 15 nt, Artificial Sequence
  Description of Artificial Sequence: Synthetic oligonucleotide
agcuuagaacuuuaa

SEQ ID NO: 8984 - RNA, 11 nt, Artificial Sequence
  Description of Artificial Sequence: Synthetic oligonucleotide
aagaccaccac

SEQ ID NO: 8985 - RNA, 14 nt, Artificial Sequence
  Description of Artificial Sequence: Synthetic oligonucleotide
gcgagaaauaaagu

SEQ ID NO: 8986 - RNA, 14 nt, Artificial Sequence
  Description of Artificial Sequence: Synthetic oligonucleotide
cgagaaauaaaguu

SEQ ID NO: 8987 - RNA, 12 nt, Artificial Sequence
  Description of Artificial Sequence: Synthetic oligonucleotide
aggaaaugaucc

SEQ ID NO: 8988 - RNA, 13 nt, Artificial Sequence
  Description of Artificial Sequence: Synthetic oligonucleotide
gaagaaaugaaac

SEQ ID NO: 8989 - RNA, 13 nt, Artificial Sequence
  Description of Artificial Sequence: Synthetic oligonucleotide
guuuccauccucc

SEQ ID NO: 8990 - RNA, 15 nt, Artificial Sequence
  Description of Artificial Sequence: Synthetic oligonucleotide
acugaaaaucuuuga

SEQ ID NO: 8991 - RNA, 11 nt, Artificial Sequence
  Description of Artificial Sequence: Synthetic oligonucleotide
ugccguucagg

SEQ ID NO: 8992 - RNA, 13 nt, Artificial Sequence
  Description of Artificial Sequence: Synthetic oligonucleotide
caggguccagaag

SEQ ID NO: 8993 - RNA, 13 nt, Artificial Sequence
  Description of Artificial Sequence: Synthetic oligonucleotide
ucaagacugcuug

SEQ ID NO: 8994 - RNA, 13 nt, Artificial Sequence
  Description of Artificial Sequence: Synthetic oligonucleotide
uccaugucuuugg

SEQ ID NO: 8995 - RNA, 11 nt, Artificial Sequence
  Description of Artificial Sequence: Synthetic oligonucleotide
gccugaaacac

SEQ ID NO: 8996 - RNA, 12 nt, Artificial Sequence
  Description of Artificial Sequence: Synthetic oligonucleotide
ucucuguaccuc

SEQ ID NO: 8997 - RNA, 12 nt, Artificial Sequence
  Description of Artificial Sequence: Synthetic oligonucleotide
agcaagacaaga

SEQ ID NO: 8998 - RNA, 13 nt, Artificial Sequence
  Description of Artificial Sequence: Synthetic oligonucleotide
gcaagacaagaaa

SEQ ID NO: 8999 - RNA, 12 nt, Artificial Sequence
  Description of Artificial Sequence: Synthetic oligonucleotide
uguacaagaucc

SEQ ID NO: 9000 - RNA, 12 nt, Artificial Sequence
  Description of Artificial Sequence: Synthetic oligonucleotide
cguacuugcaga

SEQ ID NO: 9001 - RNA, 13 nt, Artificial Sequence
  Description of Artificial Sequence: Synthetic oligonucleotide
cgaucgauacaga

SEQ ID NO: 9002 - RNA, 13 nt, Artificial Sequence
  Description of Artificial Sequence: Synthetic oligonucleotide
uauaaaaauaaau

SEQ ID NO: 9003 - RNA, 13 nt, Artificial Sequence
  Description of Artificial Sequence: Synthetic oligonucleotide
uaaaaauaaauau

SEQ ID NO: 9004 - RNA, 13 nt, Artificial Sequence
  Description of Artificial Sequence: Synthetic oligonucleotide
uuugacugcugug

SEQ ID NO: 9005 - RNA, 13 nt, Artificial Sequence
  Description of Artificial Sequence: Synthetic oligonucleotide
ggagaugagagac

SEQ ID NO: 9006 - RNA, 10 nt, Artificial Sequence
  Description of Artificial Sequence: Synthetic oligonucleotide
ucccacuugg

SEQ ID NO: 9007 - RNA, 10 nt, Artificial Sequence
  Description of Artificial Sequence: Synthetic oligonucleotide
guucacggcc

SEQ ID NO: 9008 - RNA, 12 nt, Artificial Sequence
  Description of Artificial Sequence: Synthetic oligonucleotide
accaucacacca

SEQ ID NO: 9009 - RNA, 10 nt, Artificial Sequence
  Description of Artificial Sequence: Synthetic oligonucleotide
cugcggguuu

SEQ ID NO: 9010 - RNA, 9 nt, Artificial Sequence
  Description of Artificial Sequence: Synthetic oligonucleotide
uccaguuug

SEQ ID NO: 9011 - RNA, 12 nt, Artificial Sequence
  Description of Artificial Sequence: Synthetic oligonucleotide
uuaaggacuucu

SEQ ID NO: 9012 - RNA, 12 nt, Artificial Sequence
  Description of Artificial Sequence: Synthetic oligonucleotide
agugggacagag

SEQ ID NO: 9013 - RNA, 13 nt, Artificial Sequence
  Description of Artificial Sequence: Synthetic oligonucleotide
auuuguuauugug

SEQ ID NO: 9014 - RNA, 12 nt, Artificial Sequence
  Description of Artificial Sequence: Synthetic oligonucleotide
ucaaaugcauuu

SEQ ID NO: 9015 - RNA, 9 nt, Artificial Sequence
  Description of Artificial Sequence: Synthetic oligonucleotide
aggaaagcc

SEQ ID NO: 9016 - RNA, 10 nt, Artificial Sequence
  Description of Artificial Sequence: Synthetic oligonucleotide
ggaaagcccu

SEQ ID NO: 9017 - RNA, 11 nt, Artificial Sequence
  Description of Artificial Sequence: Synthetic oligonucleotide
ccagcauggcc

SEQ ID NO: 9018 - RNA, 10 nt, Artificial Sequence
  Description of Artificial Sequence: Synthetic oligonucleotide
uucucccuga

SEQ ID NO: 9019 - RNA, 11 nt, Artificial Sequence
  Description of Artificial Sequence: Synthetic oligonucleotide
aagaagcccuu

SEQ ID NO: 9020 - RNA, 11 nt, Artificial Sequence
  Description of Artificial Sequence: Synthetic oligonucleotide
gaagcccuuca

SEQ ID NO: 9021 - RNA, 10 nt, Artificial Sequence
  Description of Artificial Sequence: Synthetic oligonucleotide
cccuucagcg

SEQ ID NO: 9022 - RNA, 10 nt, Artificial Sequence
  Description of Artificial Sequence: Synthetic oligonucleotide
cuucagcggc

SEQ ID NO: 9023 - RNA, 11 nt, Artificial Sequence
  Description of Artificial Sequence: Synthetic oligonucleotide
cagcggccagu

SEQ ID NO: 9024 - RNA, 11 nt, Artificial Sequence
  Description of Artificial Sequence: Synthetic oligonucleotide
gaaaagcuccg

SEQ ID NO: 9025 - RNA, 10 nt, Artificial Sequence
  Description of Artificial Sequence: Synthetic oligonucleotide
aaagcuccgg

SEQ ID NO: 9026 - RNA, 12 nt, Artificial Sequence
  Description of Artificial Sequence: Synthetic oligonucleotide
gucaacagucug

SEQ ID NO: 9027 - RNA, 12 nt, Artificial Sequence
  Description of Artificial Sequence: Synthetic oligonucleotide
agaguucaaaag

SEQ ID NO: 9028 - RNA, 12 nt, Artificial Sequence
  Description of Artificial Sequence: Synthetic oligonucleotide
gaguucaaaagc

SEQ ID NO: 9029 - RNA, 11 nt, Artificial Sequence
  Description of Artificial Sequence: Synthetic oligonucleotide
ucaaaagcccu

SEQ ID NO: 9030 - RNA, 11 nt, Artificial Sequence
  Description of Artificial Sequence: Synthetic oligonucleotide
caaaagcccuu

SEQ ID NO: 9031 - RNA, 11 nt, Artificial Sequence
  Description of Artificial Sequence: Synthetic oligonucleotide
aaagcccuuca

SEQ ID NO: 9032 - RNA, 11 nt, Artificial Sequence
  Description of Artificial Sequence: Synthetic oligonucleotide
aagcccuucag

SEQ ID NO: 9033 - RNA, 12 nt, Artificial Sequence
  Description of Artificial Sequence: Synthetic oligonucleotide
ugaagccgcucg

SEQ ID NO: 9034 - RNA, 11 nt, Artificial Sequence
  Description of Artificial Sequence: Synthetic oligonucleotide
acgccagucaa

SEQ ID NO: 9035 - RNA, 12 nt, Artificial Sequence
  Description of Artificial Sequence: Synthetic oligonucleotide
ucuuggugcgug

SEQ ID NO: 9036 - RNA, 13 nt, Artificial Sequence
  Description of Artificial Sequence: Synthetic oligonucleotide
uuggauucaucag

SEQ ID NO: 9037 - RNA, 12 nt, Artificial Sequence
  Description of Artificial Sequence: Synthetic oligonucleotide
ggaauaccuaag

SEQ ID NO: 9038 - RNA, 11 nt, Artificial Sequence
  Description of Artificial Sequence: Synthetic oligonucleotide
uuugaggcuca

SEQ ID NO: 9039 - RNA, 10 nt, Artificial Sequence
  Description of Artificial Sequence: Synthetic oligonucleotide
cuacaauugg

SEQ ID NO: 9040 - RNA, 11 nt, Artificial Sequence
  Description of Artificial Sequence: Synthetic oligonucleotide
aguuaggagcc

SEQ ID NO: 9041 - RNA, 12 nt, Artificial Sequence
  Description of Artificial Sequence: Synthetic oligonucleotide
gucaauauccac

SEQ ID NO: 9042 - RNA, 12 nt, Artificial Sequence
  Description of Artificial Sequence: Synthetic oligonucleotide
uguucagucaca

SEQ ID NO: 9043 - RNA, 11 nt, Artificial Sequence
  Description of Artificial Sequence: Synthetic oligonucleotide
cacacacauac

SEQ ID NO: 9044 - RNA, 11 nt, Artificial Sequence
  Description of Artificial Sequence: Synthetic oligonucleotide
uccuuuugcuu

SEQ ID NO: 9045 - RNA, 15 nt, Artificial Sequence
  Description of Artificial Sequence: Synthetic oligonucleotide
uuuaaaguaauuuuu

SEQ ID NO: 9046 - RNA, 12 nt, Artificial Sequence
  Description of Artificial Sequence: Synthetic oligonucleotide
aacagucaaugg

SEQ ID NO: 9047 - RNA, 12 nt, Artificial Sequence
  Description of Artificial Sequence: Synthetic oligonucleotide
cgacaaaccaau

SEQ ID NO: 9048 - RNA, 11 nt, Artificial Sequence
  Description of Artificial Sequence: Synthetic oligonucleotide
cugcuaccacu

SEQ ID NO: 9049 - RNA, 12 nt, Artificial Sequence
  Description of Artificial Sequence: Synthetic oligonucleotide
caagcggucuua

SEQ ID NO: 9050 - RNA, 12 nt, Artificial Sequence
  Description of Artificial Sequence: Synthetic oligonucleotide
gucuuaccggcu

SEQ ID NO: 9051 - RNA, 10 nt, Artificial Sequence
  Description of Artificial Sequence: Synthetic oligonucleotide
auggguuacc

SEQ ID NO: 9052 - RNA, 10 nt, Artificial Sequence
  Description of Artificial Sequence: Synthetic oligonucleotide
uuaccugcga

SEQ ID NO: 9053 - RNA, 11 nt, Artificial Sequence
  Description of Artificial Sequence: Synthetic oligonucleotide
aucuugcugag

SEQ ID NO: 9054 - RNA, 12 nt, Artificial Sequence
  Description of Artificial Sequence: Synthetic oligonucleotide
gcauaaaacagu

SEQ ID NO: 9055 - RNA, 11 nt, Artificial Sequence
  Description of Artificial Sequence: Synthetic oligonucleotide
uccuuuauccu

SEQ ID NO: 9056 - RNA, 11 nt, Artificial Sequence
  Description of Artificial Sequence: Synthetic oligonucleotide
aacgcaaguug

SEQ ID NO: 9057 - RNA, 12 nt, Artificial Sequence
  Description of Artificial Sequence: Synthetic oligonucleotide
aacugaaaccau

SEQ ID NO: 9058 - RNA, 13 nt, Artificial Sequence
  Description of Artificial Sequence: Synthetic oligonucleotide
cuuuguuaaauau

SEQ ID NO: 9059 - RNA, 13 nt, Artificial Sequence
  Description of Artificial Sequence: Synthetic oligonucleotide
uauauuaaaaguu

SEQ ID NO: 9060 - RNA, 12 nt, Artificial Sequence
  Description of Artificial Sequence: Synthetic oligonucleotide
uuuugacuuaac

SEQ ID NO: 9061 - RNA, 12 nt, Artificial Sequence
  Description of Artificial Sequence: Synthetic oligonucleotide
caaacucagcac

SEQ ID NO: 9062 - RNA, 10 nt, Artificial Sequence
  Description of Artificial Sequence: Synthetic oligonucleotide
gcugaccuca

SEQ ID NO: 9063 - RNA, 13 nt, Artificial Sequence
  Description of Artificial Sequence: Synthetic oligonucleotide
uuauucagaucgc

SEQ ID NO: 9064 - RNA, 12 nt, Artificial Sequence
  Description of Artificial Sequence: Synthetic oligonucleotide
ggguucugggau

SEQ ID NO: 9065 - RNA, 14 nt, Artificial Sequence
  Description of Artificial Sequence: Synthetic oligonucleotide
uauuggaaauuaug

SEQ ID NO: 9066 - RNA, 12 nt, Artificial Sequence
  Description of Artificial Sequence: Synthetic oligonucleotide
uggaagcacuag

SEQ ID NO: 9067 - RNA, 12 nt, Artificial Sequence
  Description of Artificial Sequence: Synthetic oligonucleotide
uuuuuaugugga

SEQ ID NO: 9068 - RNA, 11 nt, Artificial Sequence
  Description of Artificial Sequence: Synthetic oligonucleotide
gaauugguaga

SEQ ID NO: 9069 - RNA, 12 nt, Artificial Sequence
  Description of Artificial Sequence: Synthetic oligonucleotide
uagacuuggaga

SEQ ID NO: 9070 - RNA, 12 nt, Artificial Sequence
  Description of Artificial Sequence: Synthetic oligonucleotide
uacaguauucca

SEQ ID NO: 9071 - RNA, 14 nt, Artificial Sequence
  Description of Artificial Sequence: Synthetic oligonucleotide
cacugaugaauuaa

SEQ ID NO: 9072 - RNA, 11 nt, Artificial Sequence
  Description of Artificial Sequence: Synthetic oligonucleotide
cacaucaucac

SEQ ID NO: 9073 - RNA, 12 nt, Artificial Sequence
  Description of Artificial Sequence: Synthetic oligonucleotide
ucaccaaacaga

SEQ ID NO: 9074 - RNA, 11 nt, Artificial Sequence
  Description of Artificial Sequence: Synthetic oligonucleotide
gaacaugaugg

SEQ ID NO: 9075 - RNA, 11 nt, Artificial Sequence
  Description of Artificial Sequence: Synthetic oligonucleotide
auguagacugc

SEQ ID NO: 9076 - RNA, 12 nt, Artificial Sequence
  Description of Artificial Sequence: Synthetic oligonucleotide
gaucuauuuaug

SEQ ID NO: 9077 - RNA, 11 nt, Artificial Sequence
  Description of Artificial Sequence: Synthetic oligonucleotide
cacuauuauca

SEQ ID NO: 9078 - RNA, 10 nt, Artificial Sequence
  Description of Artificial Sequence: Synthetic oligonucleotide
ucaguucugc

SEQ ID NO: 9079 - RNA, 12 nt, Artificial Sequence
  Description of Artificial Sequence: Synthetic oligonucleotide
gauuaaaccuac

SEQ ID NO: 9080 - RNA, 12 nt, Artificial Sequence
  Description of Artificial Sequence: Synthetic oligonucleotide
uaaaauccuucu

SEQ ID NO: 9081 - RNA, 11 nt, Artificial Sequence
  Description of Artificial Sequence: Synthetic oligonucleotide
augcuguagac

SEQ ID NO: 9082 - RNA, 12 nt, Artificial Sequence
  Description of Artificial Sequence: Synthetic oligonucleotide
ugauaggaauag

SEQ ID NO: 9083 - RNA, 10 nt, Artificial Sequence
  Description of Artificial Sequence: Synthetic oligonucleotide
auggcccuga

SEQ ID NO: 9084 - RNA, 10 nt, Artificial Sequence
  Description of Artificial Sequence: Synthetic oligonucleotide
uccucaagca

SEQ ID NO: 9085 - RNA, 9 nt, Artificial Sequence
  Description of Artificial Sequence: Synthetic oligonucleotide
uucagccca

SEQ ID NO: 9086 - RNA, 10 nt, Artificial Sequence
  Description of Artificial Sequence: Synthetic oligonucleotide
cugcugaacc

SEQ ID NO: 9087 - RNA, 11 nt, Artificial Sequence
  Description of Artificial Sequence: Synthetic oligonucleotide
aguucucuuca

SEQ ID NO: 9088 - RNA, 10 nt, Artificial Sequence
  Description of Artificial Sequence: Synthetic oligonucleotide
cagccuagag

SEQ ID NO: 9089 - RNA, 12 nt, Artificial Sequence
  Description of Artificial Sequence: Synthetic oligonucleotide
ucugugaagugu

SEQ ID NO: 9090 - RNA, 13 nt, Artificial Sequence
  Description of Artificial Sequence: Synthetic oligonucleotide
gagaaaauuucaa

SEQ ID NO: 9091 - RNA, 10 nt, Artificial Sequence
  Description of Artificial Sequence: Synthetic oligonucleotide
auccuccuga

SEQ ID NO: 9092 - RNA, 11 nt, Artificial Sequence
  Description of Artificial Sequence: Synthetic oligonucleotide
ugacaucauau

SEQ ID NO: 9093 - RNA, 12 nt, Artificial Sequence
  Description of Artificial Sequence: Synthetic oligonucleotide
aucuucaucaua

SEQ ID NO: 9094 - RNA, 12 nt, Artificial Sequence
  Description of Artificial Sequence: Synthetic oligonucleotide
acuagcuauuaa

SEQ ID NO: 9095 - RNA, 13 nt, Artificial Sequence
  Description of Artificial Sequence: Synthetic oligonucleotide
cucuacuaaaaau

SEQ ID NO: 9096 - RNA, 11 nt, Artificial Sequence
  Description of Artificial Sequence: Synthetic oligonucleotide
cuaucucgccu

SEQ ID NO: 9097 - RNA, 12 nt, Artificial Sequence
  Description of Artificial Sequence: Synthetic oligonucleotide
uucgguccaguu

SEQ ID NO: 9098 - RNA, 10 nt, Artificial Sequence
  Description of Artificial Sequence: Synthetic oligonucleotide
auguagccgc

SEQ ID NO: 9099 - RNA, 11 nt, Artificial Sequence
  Description of Artificial Sequence: Synthetic oligonucleotide
gaggagacuug

SEQ ID NO: 9100 - RNA, 11 nt, Artificial Sequence
  Description of Artificial Sequence: Synthetic oligonucleotide
aguagugagga

SEQ ID NO: 9101 - RNA, 13 nt, Artificial Sequence
  Description of Artificial Sequence: Synthetic oligonucleotide
agaugaguacaaa

SEQ ID NO: 9102 - RNA, 12 nt, Artificial Sequence
  Description of Artificial Sequence: Synthetic oligonucleotide
uuguuaaugggc

SEQ ID NO: 9103 - RNA, 12 nt, Artificial Sequence
  Description of Artificial Sequence: Synthetic oligonucleotide
uuuuaauuuauu

SEQ ID NO: 9104 - RNA, 11 nt, Artificial Sequence
  Description of Artificial Sequence: Synthetic oligonucleotide
auuuaaauaug

SEQ ID NO: 9105 - RNA, 12 nt, Artificial Sequence
  Description of Artificial Sequence: Synthetic oligonucleotide
auccuuuguuuc

SEQ ID NO: 9106 - RNA, 13 nt, Artificial Sequence
  Description of Artificial Sequence: Synthetic oligonucleotide
gucuaaguguuug

SEQ ID NO: 9107 - RNA, 11 nt, Artificial Sequence
  Description of Artificial Sequence: Synthetic oligonucleotide
ccugugacaaa

SEQ ID NO: 9108 - RNA, 12 nt, Artificial Sequence
  Description of Artificial Sequence: Synthetic oligonucleotide
caggcugaauua

SEQ ID NO: 9109 - RNA, 13 nt, Artificial Sequence
  Description of Artificial Sequence: Synthetic oligonucleotide
ucauucuuacaau

SEQ ID NO: 9110 - RNA, 14 nt, Artificial Sequence
  Description of Artificial Sequence: Synthetic oligonucleotide
cauucuuacaauug

SEQ ID NO: 9111 - RNA, 11 nt, Artificial Sequence
  Description of Artificial Sequence: Synthetic oligonucleotide
agagaguguac

SEQ ID NO: 9112 - RNA, 11 nt, Artificial Sequence
  Description of Artificial Sequence: Synthetic oligonucleotide
gaacucagcag

SEQ ID NO: 9113 - RNA, 12 nt, Artificial Sequence
  Description of Artificial Sequence: Synthetic oligonucleotide
uuauuuucagua

SEQ ID NO: 9114 - RNA, 11 nt, Artificial Sequence
  Description of Artificial Sequence: Synthetic oligonucleotide
cuuaaauggaa

SEQ ID NO: 9115 - RNA, 12 nt, Artificial Sequence
  Description of Artificial Sequence: Synthetic oligonucleotide
gccuaaaauugu

SEQ ID NO: 9116 - RNA, 12 nt, Artificial Sequence
  Description of Artificial Sequence: Synthetic oligonucleotide
acuaacaucugg

SEQ ID NO: 9117 - RNA, 11 nt, Artificial Sequence
  Description of Artificial Sequence: Synthetic oligonucleotide
gacugugagcu

SEQ ID NO: 9118 - RNA, 13 nt, Artificial Sequence
  Description of Artificial Sequence: Synthetic oligonucleotide
gcuuuuuauuaau

SEQ ID NO: 9119 - RNA, 12 nt, Artificial Sequence
  Description of Artificial Sequence: Synthetic oligonucleotide
ucuucuuacauu

SEQ ID NO: 9120 - RNA, 14 nt, Artificial Sequence
  Description of Artificial Sequence: Synthetic oligonucleotide
auuuguaaaaaugu

SEQ ID NO: 9121 - RNA, 14 nt, Artificial Sequence
  Description of Artificial Sequence: Synthetic oligonucleotide
ucuuaauucauauu

SEQ ID NO: 9122 - RNA, 12 nt, Artificial Sequence
  Description of Artificial Sequence: Synthetic oligonucleotide
aacuaaucauga

SEQ ID NO: 9123 - RNA, 11 nt, Artificial Sequence
  Description of Artificial Sequence: Synthetic oligonucleotide
cugcucuuggg

SEQ ID NO: 9124 - RNA, 12 nt, Artificial Sequence
  Description of Artificial Sequence: Synthetic oligonucleotide
aguagcuuugag

SEQ ID NO: 9125 - RNA, 13 nt, Artificial Sequence
  Description of Artificial Sequence: Synthetic oligonucleotide
acguaauauuuca

SEQ ID NO: 9126 - RNA, 12 nt, Artificial Sequence
  Description of Artificial Sequence: Synthetic oligonucleotide
auucucuucacu

SEQ ID NO: 9127 - RNA, 13 nt, Artificial Sequence
  Description of Artificial Sequence: Synthetic oligonucleotide
uaaugcuaagaaa

SEQ ID NO: 9128 - RNA, 11 nt, Artificial Sequence
  Description of Artificial Sequence: Synthetic oligonucleotide
cugaaaaucaa

SEQ ID NO: 9129 - RNA, 13 nt, Artificial Sequence
  Description of Artificial Sequence: Synthetic oligonucleotide
auaugauuacuuu

SEQ ID NO: 9130 - RNA, 13 nt, Artificial Sequence
  Description of Artificial Sequence: Synthetic oligonucleotide
auuuuguucuaca

SEQ ID NO: 9131 - RNA, 11 nt, Artificial Sequence
  Description of Artificial Sequence: Synthetic oligonucleotide
ccgggacucuc

SEQ ID NO: 9132 - RNA, 13 nt, Artificial Sequence
  Description of Artificial Sequence: Synthetic oligonucleotide
cuuuaaaguaaag

SEQ ID NO: 9133 - RNA, 12 nt, Artificial Sequence
  Description of Artificial Sequence: Synthetic oligonucleotide
cuggaagccugg

SEQ ID NO: 9134 - RNA, 13 nt, Artificial Sequence
  Description of Artificial Sequence: Synthetic oligonucleotide
aaacaaaagagag

SEQ ID NO: 9135 - RNA, 12 nt, Artificial Sequence
  Description of Artificial Sequence: Synthetic oligonucleotide
ucaguuaugccg

SEQ ID NO: 9136 - RNA, 12 nt, Artificial Sequence
  Description of Artificial Sequence: Synthetic oligonucleotide
aaaagaagucca

SEQ ID NO: 9137 - RNA, 10 nt, Artificial Sequence
  Description of Artificial Sequence: Synthetic oligonucleotide
ggugagguua

SEQ ID NO: 9138 - RNA, 10 nt, Artificial Sequence
  Description of Artificial Sequence: Synthetic oligonucleotide
ggaagaggac

SEQ ID NO: 9139 - RNA, 12 nt, Artificial Sequence
  Description of Artificial Sequence: Synthetic oligonucleotide
agcaaguauugu

SEQ ID NO: 9140 - RNA, 11 nt, Artificial Sequence
  Description of Artificial Sequence: Synthetic oligonucleotide
uuguagcacuc

SEQ ID NO: 9141 - RNA, 13 nt, Artificial Sequence
  Description of Artificial Sequence: Synthetic oligonucleotide
caaaaccacaaau

SEQ ID NO: 9142 - RNA, 11 nt, Artificial Sequence
  Description of Artificial Sequence: Synthetic oligonucleotide
aagcccauaca

SEQ ID NO: 9143 - RNA, 10 nt, Artificial Sequence
  Description of Artificial Sequence: Synthetic oligonucleotide
gcccauacag

SEQ ID NO: 9144 - RNA, 11 nt, Artificial Sequence
  Description of Artificial Sequence: Synthetic oligonucleotide
agaaaccuucc

SEQ ID NO: 9145 - RNA, 9 nt, Artificial Sequence
  Description of Artificial Sequence: Synthetic oligonucleotide
uauaccuac

SEQ ID NO: 9146 - RNA, 12 nt, Artificial Sequence
  Description of Artificial Sequence: Synthetic oligonucleotide
ccaguuuucgga

SEQ ID NO: 9147 - RNA, 8 nt, Artificial Sequence
  Description of Artificial Sequence: Synthetic oligonucleotide
gaacaggg

SEQ ID NO: 9148 - RNA, 12 nt, Artificial Sequence
  Description of Artificial Sequence: Synthetic oligonucleotide
uaacuuuccagu

SEQ ID NO: 9149 - RNA, 13 nt, Artificial Sequence
  Description of Artificial Sequence: Synthetic oligonucleotide
aaguuugguuuug

SEQ ID NO: 9150 - RNA, 11 nt, Artificial Sequence
  Description of Artificial Sequence: Synthetic oligonucleotide
uucccacugua

SEQ ID NO: 9151 - RNA, 12 nt, Artificial Sequence
  Description of Artificial Sequence: Synthetic oligonucleotide
gauaccauauga

SEQ ID NO: 9152 - RNA, 10 nt, Artificial Sequence
  Description of Artificial Sequence: Synthetic oligonucleotide
acaugggcug

SEQ ID NO: 9153 - RNA, 12 nt, Artificial Sequence
  Description of Artificial Sequence: Synthetic oligonucleotide
aacuuuuucaua

SEQ ID NO: 9154 - RNA, 11 nt, Artificial Sequence
  Description of Artificial Sequence: Synthetic oligonucleotide
augaggccgga

SEQ ID NO: 9155 - RNA, 10 nt, Artificial Sequence
  Description of Artificial Sequence: Synthetic oligonucleotide
cugcauuugu

SEQ ID NO: 9156 - RNA, 12 nt, Artificial Sequence
  Description of Artificial Sequence: Synthetic oligonucleotide
auguuuacuacc

SEQ ID NO: 9157 - RNA, 14 nt, Artificial Sequence
  Description of Artificial Sequence: Synthetic oligonucleotide
auuuuuugaugaaa

SEQ ID NO: 9158 - RNA, 13 nt, Artificial Sequence
  Description of Artificial Sequence: Synthetic oligonucleotide
agugugugaauuu

SEQ ID NO: 9159 - RNA, 12 nt, Artificial Sequence
  Description of Artificial Sequence: Synthetic oligonucleotide
agcaauguaugu

SEQ ID NO: 9160 - RNA, 13 nt, Artificial Sequence
  Description of Artificial Sequence: Synthetic oligonucleotide
aagcacauauaua

SEQ ID NO: 9161 - RNA, 13 nt, Artificial Sequence
  Description of Artificial Sequence: Synthetic oligonucleotide
uaauaguuucucc

SEQ ID NO: 9162 - RNA, 12 nt, Artificial Sequence
  Description of Artificial Sequence: Synthetic oligonucleotide
guuucuccaaau

SEQ ID NO: 9163 - RNA, 12 nt, Artificial Sequence
  Description of Artificial Sequence: Synthetic oligonucleotide
acuuccuagaaa

SEQ ID NO: 9164 - RNA, 12 nt, Artificial Sequence
  Description of Artificial Sequence: Synthetic oligonucleotide
acaccauauaug

SEQ ID NO: 9165 - RNA, 13 nt, Artificial Sequence
  Description of Artificial Sequence: Synthetic oligonucleotide
uauaugaauggag

SEQ ID NO: 9166 - RNA, 12 nt, Artificial Sequence
  Description of Artificial Sequence: Synthetic oligonucleotide
cauuuacaggga

SEQ ID NO: 9167 - RNA, 12 nt, Artificial Sequence
  Description of Artificial Sequence: Synthetic oligonucleotide
auuuacagggac

SEQ ID NO: 9168 - RNA, 9 nt, Artificial Sequence
  Description of Artificial Sequence: Synthetic oligonucleotide
gggaccuga

SEQ ID NO: 9169 - RNA, 13 nt, Artificial Sequence
  Description of Artificial Sequence: Synthetic oligonucleotide
guuugacugcauc

SEQ ID NO: 9170 - RNA, 12 nt, Artificial Sequence
  Description of Artificial Sequence: Synthetic oligonucleotide
uugacugcaucg

SEQ ID NO: 9171 - RNA, 11 nt, Artificial Sequence
  Description of Artificial Sequence: Synthetic oligonucleotide
aguucacaggg

SEQ ID NO: 9172 - RNA, 12 nt, Artificial Sequence
  Description of Artificial Sequence: Synthetic oligonucleotide
gcaccucugucc

SEQ ID NO: 9173 - RNA, 14 nt, Artificial Sequence
  Description of Artificial Sequence: Synthetic oligonucleotide
guuugucuuuuuaa

SEQ ID NO: 9174 - RNA, 13 nt, Artificial Sequence
  Description of Artificial Sequence: Synthetic oligonucleotide
uugucuuuuuaag

SEQ ID NO: 9175 - RNA, 12 nt, Artificial Sequence
  Description of Artificial Sequence: Synthetic oligonucleotide
cuaaagguuguc

SEQ ID NO: 9176 - RNA, 11 nt, Artificial Sequence
  Description of Artificial Sequence: Synthetic oligonucleotide
agguugucgac

SEQ ID NO: 9177 - RNA, 12 nt, Artificial Sequence
  Description of Artificial Sequence: Synthetic oligonucleotide
ccuggcaauugu

SEQ ID NO: 9178 - RNA, 11 nt, Artificial Sequence
  Description of Artificial Sequence: Synthetic oligonucleotide
guggugcgagg

SEQ ID NO: 9179 - RNA, 12 nt, Artificial Sequence
  Description of Artificial Sequence: Synthetic oligonucleotide
gagacaugaaau

SEQ ID NO: 9180 - RNA, 12 nt, Artificial Sequence
  Description of Artificial Sequence: Synthetic oligonucleotide
uauauuucucca

SEQ ID NO: 9181 - RNA, 9 nt, Artificial Sequence
  Description of Artificial Sequence: Synthetic oligonucleotide
augaaggcu

SEQ ID NO: 9182 - RNA, 10 nt, Artificial Sequence
  Description of Artificial Sequence: Synthetic oligonucleotide
cuggaguggu

SEQ ID NO: 9183 - RNA, 10 nt, Artificial Sequence
  Description of Artificial Sequence: Synthetic oligonucleotide
ggaagagagg

SEQ ID NO: 9184 - RNA, 11 nt, Artificial Sequence
  Description of Artificial Sequence: Synthetic oligonucleotide
uugcaucgggc

SEQ ID NO: 9185 - RNA, 12 nt, Artificial Sequence
  Description of Artificial Sequence: Synthetic oligonucleotide
uauccuacugug

SEQ ID NO: 9186 - RNA, 12 nt, Artificial Sequence
  Description of Artificial Sequence: Synthetic oligonucleotide
ccuacuguguaa

SEQ ID NO: 9187 - RNA, 11 nt, Artificial Sequence
  Description of Artificial Sequence: Synthetic oligonucleotide
cuuguagugua

SEQ ID NO: 9188 - RNA, 12 nt, Artificial Sequence
  Description of Artificial Sequence: Synthetic oligonucleotide
cuuuguugauug

SEQ ID NO: 9189 - RNA, 13 nt, Artificial Sequence
  Description of Artificial Sequence: Synthetic oligonucleotide
uuguugauugaaa

SEQ ID NO: 9190 - RNA, 14 nt, Artificial Sequence
  Description of Artificial Sequence: Synthetic oligonucleotide
ucuuuuucuuccau

SEQ ID NO: 9191 - RNA, 12 nt, Artificial Sequence
  Description of Artificial Sequence: Synthetic oligonucleotide
aucuuccuucua

SEQ ID NO: 9192 - RNA, 12 nt, Artificial Sequence
  Description of Artificial Sequence: Synthetic oligonucleotide
ugaaugcuucau

SEQ ID NO: 9193 - RNA, 12 nt, Artificial Sequence
  Description of Artificial Sequence: Synthetic oligonucleotide
gaaugcuucaug

SEQ ID NO: 9194 - RNA, 12 nt, Artificial Sequence
  Description of Artificial Sequence: Synthetic oligonucleotide
auucuacuuuga

SEQ ID NO: 9195 - RNA, 12 nt, Artificial Sequence
  Description of Artificial Sequence: Synthetic oligonucleotide
gcaacuacagac

SEQ ID NO: 9196 - RNA, 12 nt, Artificial Sequence
  Description of Artificial Sequence: Synthetic oligonucleotide
accaaggucaac

SEQ ID NO: 9197 - RNA, 12 nt, Artificial Sequence
  Description of Artificial Sequence: Synthetic oligonucleotide
gacuaucucgac

SEQ ID NO: 9198 - RNA, 12 nt, Artificial Sequence
  Description of Artificial Sequence: Synthetic oligonucleotide
accuucccaaac

SEQ ID NO: 9199 - RNA, 13 nt, Artificial Sequence
  Description of Artificial Sequence: Synthetic oligonucleotide
caagcuuagaacu

SEQ ID NO: 9200 - RNA, 14 nt, Artificial Sequence
  Description of Artificial Sequence: Synthetic oligonucleotide
gcuuagaacuuuaa

SEQ ID NO: 9201 - RNA, 13 nt, Artificial Sequence
  Description of Artificial Sequence: Synthetic oligonucleotide
aacuuuaagcaac

SEQ ID NO: 9202 - RNA, 10 nt, Artificial Sequence
  Description of Artificial Sequence: Synthetic oligonucleotide
agaccaccac

SEQ ID NO: 9203 - RNA, 13 nt, Artificial Sequence
  Description of Artificial Sequence: Synthetic oligonucleotide
cgagaaauaaagu

SEQ ID NO: 9204 - RNA, 13 nt, Artificial Sequence
  Description of Artificial Sequence: Synthetic oligonucleotide
gagaaauaaaguu

SEQ ID NO: 9205 - RNA, 11 nt, Artificial Sequence
  Description of Artificial Sequence: Synthetic oligonucleotide
ggaaaugaucc

SEQ ID NO: 9206 - RNA, 12 nt, Artificial Sequence
  Description of Artificial Sequence: Synthetic oligonucleotide
aagaaaugaaac

SEQ ID NO: 9207 - RNA, 12 nt, Artificial Sequence
  Description of Artificial Sequence: Synthetic oligonucleotide
uuuccauccucc

SEQ ID NO: 9208 - RNA, 14 nt, Artificial Sequence
  Description of Artificial Sequence: Synthetic oligonucleotide
cugaaaaucuuuga

SEQ ID NO: 9209 - RNA, 10 nt, Artificial Sequence
  Description of Artificial Sequence: Synthetic oligonucleotide
gccguucagg

SEQ ID NO: 9210 - RNA, 12 nt, Artificial Sequence
  Description of Artificial Sequence: Synthetic oligonucleotide
aggguccagaag

SEQ ID NO: 9211 - RNA, 12 nt, Artificial Sequence
  Description of Artificial Sequence: Synthetic oligonucleotide
caagacugcuug

SEQ ID NO: 9212 - RNA, 12 nt, Artificial Sequence
  Description of Artificial Sequence: Synthetic oligonucleotide
ccaugucuuugg

SEQ ID NO: 9213 - RNA, 10 nt, Artificial Sequence
  Description of Artificial Sequence: Synthetic oligonucleotide
ccugaaacac

SEQ ID NO: 9214 - RNA, 11 nt, Artificial Sequence
  Description of Artificial Sequence: Synthetic oligonucleotide
cucuguaccuc

SEQ ID NO: 9215 - RNA, 11 nt, Artificial Sequence
  Description of Artificial Sequence: Synthetic oligonucleotide
gcaagacaaga

SEQ ID NO: 9216 - RNA, 12 nt, Artificial Sequence
  Description of Artificial Sequence: Synthetic oligonucleotide
caagacaagaaa

SEQ ID NO: 9217 - RNA, 11 nt, Artificial Sequence
  Description of Artificial Sequence: Synthetic oligonucleotide
guacaagaucc

SEQ ID NO: 9218 - RNA, 11 nt, Artificial Sequence
  Description of Artificial Sequence: Synthetic oligonucleotide
guacuugcaga

SEQ ID NO: 9219 - RNA, 12 nt, Artificial Sequence
  Description of Artificial Sequence: Synthetic oligonucleotide
gaucgauacaga

SEQ ID NO: 9220 - RNA, 12 nt, Artificial Sequence
  Description of Artificial Sequence: Synthetic oligonucleotide
auaaaaauaaau

SEQ ID NO: 9221 - RNA, 12 nt, Artificial Sequence
  Description of Artificial Sequence: Synthetic oligonucleotide
aaaaauaaauau

SEQ ID NO: 9222 - RNA, 12 nt, Artificial Sequence
  Description of Artificial Sequence: Synthetic oligonucleotide
uugacugcugug

SEQ ID NO: 9223 - RNA, 12 nt, Artificial Sequence
  Description of Artificial Sequence: Synthetic oligonucleotide
gagaugagagac

SEQ ID NO: 9224 - RNA, 9 nt, Artificial Sequence
  Description of Artificial Sequence: Synthetic oligonucleotide
cccacuugg

SEQ ID NO: 9225 - RNA, 3665 nt, Homo sapiens; identical to SEQ ID NO: 6251

SEQ ID NO: 9226 - RNA, 3614 nt, Homo sapiens; identical to SEQ ID NO: 6252

SEQ ID NO: 9227 - RNA, 3596 nt, Homo sapiens; identical to SEQ ID NO: 6253

SEQ ID NO: 9228 - RNA, 3542 nt, Homo sapiens; identical to SEQ ID NO: 6254

SEQ ID NO: 9229 - RNA, 3507 nt, Homo sapiens; identical to SEQ ID NO: 6255

SEQ ID NO: 9230 - RNA, 3410 nt, Homo sapiens; identical to SEQ ID NO: 6256

SEQ ID NO: 9231 - RNA, 3476 nt, Homo sapiens; identical to SEQ ID NO: 6257

SEQ ID NO: 9232 - RNA, 1172 nt, Homo sapiens; identical to SEQ ID NO: 7382

SEQ ID NO: 9233 - RNA, 2076 nt, Homo sapiens; identical to SEQ ID NO: 7491

SEQ ID NO: 9234 - RNA, 2128 nt, Homo sapiens; identical to SEQ ID NO: 7695

SEQ ID NO: 9235 - RNA, 1758 nt, Homo sapiens; identical to SEQ ID NO: 7899

SEQ ID NO: 9236 - RNA, 19 nt, Artificial Sequence
  Description of Artificial Sequence: Synthetic oligonucleotide
ggccuggagugugugccca

SEQ ID NO: 9237 - RNA, 19 nt, Artificial Sequence
  Description of Artificial Sequence: Synthetic oligonucleotide
gccuggagugugugcccac

SEQ ID NO: 9238 - RNA, 19 nt, Artificial Sequence
  Description of Artificial Sequence: Synthetic oligonucleotide
cuggagugugugcccacug

SEQ ID NO: 9239 - RNA, 19 nt, Artificial Sequence
  Description of Artificial Sequence: Synthetic oligonucleotide
ccuggagugugugcccacu

SEQ ID NO: 9240 - RNA, 19 nt, Artificial Sequence
  Description of Artificial Sequence: Synthetic oligonucleotide
uggagugugugcccacuga

SEQ ID NO: 9241 - RNA, 19 nt, Artificial Sequence
  Description of Artificial Sequence: Synthetic oligonucleotide
ggagugugugcccacugag

SEQ ID NO: 9242 - RNA, 19 nt, Artificial Sequence
  Description of Artificial Sequence: Synthetic oligonucleotide
acccagacaccugcagcug

SEQ ID NO: 9243 - RNA, 19 nt, Artificial Sequence
  Description of Artificial Sequence: Synthetic oligonucleotide
ugcgagugugucuguaaaa

SEQ ID NO: 9244 - RNA, 19 nt, Artificial Sequence
  Description of Artificial Sequence: Synthetic oligonucleotide
cgagggccuggagugugug

SEQ ID NO: 9245 - RNA, 19 nt, Artificial Sequence
  Description of Artificial Sequence: Synthetic oligonucleotide
gacgagggccuggagugug

SEQ ID NO: 9246 - RNA, 19 nt, Artificial Sequence
  Description of Artificial Sequence: Synthetic oligonucleotide
gagggccuggagugugugc

SEQ ID NO: 9247 - RNA, 19 nt, Artificial Sequence
  Description of Artificial Sequence: Synthetic oligonucleotide
acgagggccuggagugugu

SEQ ID NO: 9248 - RNA, 19 nt, Artificial Sequence
  Description of Artificial Sequence: Synthetic oligonucleotide
agggccuggagugugugcc

SEQ ID NO: 9249 - RNA, 19 nt, Artificial Sequence
  Description of Artificial Sequence: Synthetic oligonucleotide
gggccuggagugugugccc

SEQ ID NO: 9250 - RNA, 19 nt, Artificial Sequence
  Description of Artificial Sequence: Synthetic oligonucleotide
ugacgagggccuggagugu

SEQ ID NO: 9251 - RNA, 19 nt, Artificial Sequence
  Description of Artificial Sequence: Synthetic oligonucleotide
acccagacaccugcaggug

SEQ ID NO: 9252 - RNA, 19 nt, Artificial Sequence
  Description of Artificial Sequence: Synthetic oligonucleotide
ugacgauggccuggagugu

SEQ ID NO: 9253 - RNA, 19 nt, Artificial Sequence
  Description of Artificial Sequence: Synthetic oligonucleotide
gacgauggccuggagugug

SEQ ID NO: 9254 - RNA, 19 nt, Artificial Sequence
  Description of Artificial Sequence: Synthetic oligonucleotide
acgauggccuggagugugu

SEQ ID NO: 9255 - RNA, 19 nt, Artificial Sequence
  Description of Artificial Sequence: Synthetic oligonucleotide
cgauggccuggagugugug

SEQ ID NO: 9256 - RNA, 19 nt, Artificial Sequence
  Description of Artificial Sequence: Synthetic oligonucleotide
gauggccuggagugugugc

SEQ ID NO: 9257 - RNA, 19 nt, Artificial Sequence
  Description of Artificial Sequence: Synthetic oligonucleotide
auggccuggagugugugcc

SEQ ID NO: 9258 - RNA, 19 nt, Artificial Sequence
  Description of Artificial Sequence: Synthetic oligonucleotide
uggccuggagugugugccc

SEQ ID NO: 9259 - RNA, 19 nt, Artificial Sequence
  Description of Artificial Sequence: Synthetic oligonucleotide
uggagugugugcccacugg

SEQ ID NO: 9260 - RNA, 19 nt, Artificial Sequence
  Description of Artificial Sequence: Synthetic oligonucleotide
ggagugugugcccacuggg

SEQ ID NO: 9261 - RNA, 19 nt, Artificial Sequence
  Description of Artificial Sequence: Synthetic oligonucleotide
ugccagugugucuguaaaa

SEQ ID NO: 9262 - RNA, 19 nt, Artificial Sequence
  Description of Artificial Sequence: Synthetic oligonucleotide
augcgggggcugcugcaau

SEQ ID NO: 9263 - RNA, 19 nt, Artificial Sequence
  Description of Artificial Sequence: Synthetic oligonucleotide
gaugcgggggcugcugcaa

SEQ ID NO: 9264 - RNA, 19 nt, Artificial Sequence
  Description of Artificial Sequence: Synthetic oligonucleotide
gugugugcccacugaggag

SEQ ID NO: 9265 - RNA, 19 nt, Artificial Sequence
  Description of Artificial Sequence: Synthetic oligonucleotide
aaugugaaugcagaccaaa

SEQ ID NO: 9266 - RNA, 19 nt, Artificial Sequence
  Description of Artificial Sequence: Synthetic oligonucleotide
agugugugcccacugagga

SEQ ID NO: 9267 - RNA, 19 nt, Artificial Sequence
  Description of Artificial Sequence: Synthetic oligonucleotide
gagugugugcccacugagg

SEQ ID NO: 9268 - RNA, 19 nt, Artificial Sequence
  Description of Artificial Sequence: Synthetic oligonucleotide
ucaacccagacaccugcag

SEQ ID NO: 9269 - RNA, 19 nt, Artificial Sequence
  Description of Artificial Sequence: Synthetic oligonucleotide
cccagacaccugcaggugc

SEQ ID NO: 9270 - RNA, 19 nt, Artificial Sequence
  Description of Artificial Sequence: Synthetic oligonucleotide
ugugaaugcagaccuaaaa

SEQ ID NO: 9271 - RNA, 19 nt, Artificial Sequence
  Description of Artificial Sequence: Synthetic oligonucleotide
gugaaugcagaccuaaaaa

SEQ ID NO: 9272 - RNA, 19 nt, Artificial Sequence
  Description of Artificial Sequence: Synthetic oligonucleotide
ugaaugcagaccuaaaaaa

SEQ ID NO: 9273 - RNA, 19 nt, Artificial Sequence
  Description of Artificial Sequence: Synthetic oligonucleotide
uucacccagacaccugcag

SEQ ID NO: 9274 - RNA, 19 nt, Artificial Sequence
  Description of Artificial Sequence: Synthetic oligonucleotide
cacccagacaccugcagcu

SEQ ID NO: 9275 - RNA, 19 nt, Artificial Sequence
  Description of Artificial Sequence: Synthetic oligonucleotide
cccagacaccugcagcugu

SEQ ID NO: 9276 - RNA, 19 nt, Artificial Sequence
  Description of Artificial Sequence: Synthetic oligonucleotide
uugcgagugugucuguaaa

SEQ ID NO: 9277 - RNA, 19 nt, Artificial Sequence
  Description of Artificial Sequence: Synthetic oligonucleotide
gcgagugugucuguaaaac

SEQ ID NO: 9278 - RNA, 19 nt, Artificial Sequence
  Description of Artificial Sequence: Synthetic oligonucleotide
ugaaugcagaccaaagaaa

SEQ ID NO: 9279 - RNA, 19 nt, Artificial Sequence
  Description of Artificial Sequence: Synthetic oligonucleotide
augacgagggccuggagug

SEQ ID NO: 9280 - RNA, 19 nt, Artificial Sequence
  Description of Artificial Sequence: Synthetic oligonucleotide
gugaaugcagaccaaagaa

SEQ ID NO: 9281 - RNA, 19 nt, Artificial Sequence
  Description of Artificial Sequence: Synthetic oligonucleotide
ugugaaugcagaccaaaga

SEQ ID NO: 9282 - RNA, 19 nt, Artificial Sequence
  Description of Artificial Sequence: Synthetic oligonucleotide
aacccagacaccugcaggu

SEQ ID NO: 9283 - RNA, 19 nt, Artificial Sequence
  Description of Artificial Sequence: Synthetic oligonucleotide
cugacgauggccuggagug

SEQ ID NO: 9284 - RNA, 19 nt, Artificial Sequence
  Description of Artificial Sequence: Synthetic oligonucleotide
gagugugugcccacugggc

SEQ ID NO: 9285 - RNA, 19 nt, Artificial Sequence
  Description of Artificial Sequence: Synthetic oligonucleotide
agugugugcccacugggca

SEQ ID NO: 9286 - RNA, 19 nt, Artificial Sequence
  Description of Artificial Sequence: Synthetic oligonucleotide
gugugugcccacugggcag

SEQ ID NO: 9287 - RNA, 19 nt, Artificial Sequence
  Description of Artificial Sequence: Synthetic oligonucleotide
agugugaaugcagaccuaa

SEQ ID NO: 9288 - RNA, 19 nt, Artificial Sequence
  Description of Artificial Sequence: Synthetic oligonucleotide
ccgccgccugcugcucgcc

SEQ ID NO: 9289 - RNA, 19 nt, Artificial Sequence
  Description of Artificial Sequence: Synthetic oligonucleotide
augccagugugucuguaaa

SEQ ID NO: 9290 - RNA, 19 nt, Artificial Sequence
  Description of Artificial Sequence: Synthetic oligonucleotide
gccagugugucuguaaaaa

SEQ ID NO: 9291 - RNA, 19 nt, Artificial Sequence
  Description of Artificial Sequence: Synthetic oligonucleotide
ugccaguguguauguaaaa

SEQ ID NO: 9292 - RNA, 19 nt, Artificial Sequence
  Description of Artificial Sequence: Synthetic oligonucleotide
gauguggggguugcugcaa

SEQ ID NO: 9293 - RNA, 19 nt, Artificial Sequence
  Description of Artificial Sequence: Synthetic oligonucleotide
auguggggguugcugcaau

SEQ ID NO: 9294 - RNA, 19 nt, Artificial Sequence
  Description of Artificial Sequence: Synthetic oligonucleotide
ccgccgccuccggcucgcc

SEQ ID NO: 9295 - RNA, 19 nt, Artificial Sequence
  Description of Artificial Sequence: Synthetic oligonucleotide
ggaaaggaggagacccaag

SEQ ID NO: 9296 - RNA, 19 nt, Artificial Sequence
  Description of Artificial Sequence: Synthetic oligonucleotide
gcgggggcugcugcaauga

SEQ ID NO: 9297 - RNA, 19 nt, Artificial Sequence
  Description of Artificial Sequence: Synthetic oligonucleotide
uuuccaaucucucucuccc

SEQ ID NO: 9298 - RNA, 19 nt, Artificial Sequence
  Description of Artificial Sequence: Synthetic oligonucleotide
ugcgggggcugcugcaaug

SEQ ID NO: 9299 - RNA, 19 nt, Artificial Sequence
  Description of Artificial Sequence: Synthetic oligonucleotide
cgaugcgggggcugcugca

SEQ ID NO: 9300 - RNA, 19 nt, Artificial Sequence
  Description of Artificial Sequence: Synthetic oligonucleotide
ccaacaucaccaugcagau

SEQ ID NO: 9301 - RNA, 19 nt, Artificial Sequence
  Description of Artificial Sequence: Synthetic oligonucleotide
guccaacaucaccaugcag

SEQ ID NO: 9302 - RNA, 19 nt, Artificial Sequence
  Description of Artificial Sequence: Synthetic oligonucleotide
acaacaaaugugaaugcag

SEQ ID NO: 9303 - RNA, 19 nt, Artificial Sequence
  Description of Artificial Sequence: Synthetic oligonucleotide
caacaaaugugaaugcaga

SEQ ID NO: 9304 - RNA, 19 nt, Artificial Sequence
  Description of Artificial Sequence: Synthetic oligonucleotide
cacaacaaaugugaaugca

SEQ ID NO: 9305 - RNA, 19 nt, Artificial Sequence
  Description of Artificial Sequence: Synthetic oligonucleotide
acaaaugugaaugcagacc

SEQ ID NO: 9306 - RNA, 19 nt, Artificial Sequence
  Description of Artificial Sequence: Synthetic oligonucleotide
aacaaaugugaaugcagac

SEQ ID NO: 9307 - RNA, 19 nt, Artificial Sequence
  Description of Artificial Sequence: Synthetic oligonucleotide
cucaacccagacaccugca

SEQ ID NO: 9308 - RNA, 19 nt, Artificial Sequence
  Description of Artificial Sequence: Synthetic oligonucleotide
gaaugcagaccuaaaaaaa

SEQ ID NO: 9309 - RNA, 19 nt, Artificial Sequence
  Description of Artificial Sequence: Synthetic oligonucleotide
aaugcagaccuaaaaaaaa

SEQ ID NO: 9310 - RNA, 19 nt, Artificial Sequence
  Description of Artificial Sequence: Synthetic oligonucleotide
ucuucaagcccccuugugu

SEQ ID NO: 9311 - RNA, 19 nt, Artificial Sequence
  Description of Artificial Sequence: Synthetic oligonucleotide
cuucaagcccccuugugug

SEQ ID NO: 9312 - RNA, 19 nt, Artificial Sequence
  Description of Artificial Sequence: Synthetic oligonucleotide
ggcuguugcaaugaagaga

SEQ ID NO: 9313 - RNA, 19 nt, Artificial Sequence
  Description of Artificial Sequence: Synthetic oligonucleotide
gcuguugcaaugaagagag

SEQ ID NO: 9314 - RNA, 19 nt, Artificial Sequence
  Description of Artificial Sequence: Synthetic oligonucleotide
cuguugcaaugaagagagc

SEQ ID NO: 9315 - RNA, 19 nt, Artificial Sequence
  Description of Artificial Sequence: Synthetic oligonucleotide
uguugcaaugaagagagcc

SEQ ID NO: 9316 - RNA, 19 nt, Artificial Sequence
  Description of Artificial Sequence: Synthetic oligonucleotide
guugcaaugaagagagccu

SEQ ID NO: 9317 - RNA, 19 nt, Artificial Sequence
  Description of Artificial Sequence: Synthetic oligonucleotide
gaugugguggcuguugcaa

SEQ ID NO: 9318 - RNA, 19 nt, Artificial Sequence
  Description of Artificial Sequence: Synthetic oligonucleotide
augugguggcuguugcaau

SEQ ID NO: 9319 - RNA, 19 nt, Artificial Sequence
  Description of Artificial Sequence: Synthetic oligonucleotide
caccggccggggccucggg

SEQ ID NO: 9320 - RNA, 19 nt, Artificial Sequence
  Description of Artificial Sequence: Synthetic oligonucleotide
ccggccggggccucggggc

SEQ ID NO: 9321 - RNA, 19 nt, Artificial Sequence
  Description of Artificial Sequence: Synthetic oligonucleotide
ggccggggccucggggcag

SEQ ID NO: 9322 - RNA, 19 nt, Artificial Sequence
  Description of Artificial Sequence: Synthetic oligonucleotide
augugaaugcagaccaaag

SEQ ID NO: 9323 - RNA, 19 nt, Artificial Sequence
  Description of Artificial Sequence: Synthetic oligonucleotide
aaaugugaaugcagaccaa

SEQ ID NO: 9324 - RNA, 19 nt, Artificial Sequence
  Description of Artificial Sequence: Synthetic oligonucleotide
ugugugcccacugaggagu

SEQ ID NO: 9325 - RNA, 19 nt, Artificial Sequence
  Description of Artificial Sequence: Synthetic oligonucleotide
gcgaugcgggggcugcugc

SEQ ID NO: 9326 - RNA, 19 nt, Artificial Sequence
  Description of Artificial Sequence: Synthetic oligonucleotide
caaaugugaaugcagacca

SEQ ID NO: 9327 - RNA, 19 nt, Artificial Sequence
  Description of Artificial Sequence: Synthetic oligonucleotide
auguuccugcaaaaacaca

SEQ ID NO: 9328 - RNA, 19 nt, Artificial Sequence
  Description of Artificial Sequence: Synthetic oligonucleotide
uguuccugcaaaaacacag

SEQ ID NO: 9329 - RNA, 19 nt, Artificial Sequence
  Description of Artificial Sequence: Synthetic oligonucleotide
gcgcugugguggcugcugc

SEQ ID NO: 9330 - RNA, 19 nt, Artificial Sequence
  Description of Artificial Sequence: Synthetic oligonucleotide
cgcugugguggcugcugcc

SEQ ID NO: 9331 - RNA, 19 nt, Artificial Sequence
  Description of Artificial Sequence: Synthetic oligonucleotide
ugugguggcugcugcccug

SEQ ID NO: 9332 - RNA, 19 nt, Artificial Sequence
  Description of Artificial Sequence: Synthetic oligonucleotide
gugguggcugcugcccuga

SEQ ID NO: 9333 - RNA, 19 nt, Artificial Sequence
  Description of Artificial Sequence: Synthetic oligonucleotide
caacccagacaccugcagg

SEQ ID NO: 9334 - RNA, 19 nt, Artificial Sequence
  Description of Artificial Sequence: Synthetic oligonucleotide
ccagacaccugcaggugcc

SEQ ID NO: 9335 - RNA, 19 nt, Artificial Sequence
  Description of Artificial Sequence: Synthetic oligonucleotide
aaguccggaugcagauccu

SEQ ID NO: 9336 - RNA, 19 nt, Artificial Sequence
  Description of Artificial Sequence: Synthetic oligonucleotide
gccaucccuugucucccug

SEQ ID NO: 9337 - RNA, 19 nt, Artificial Sequence
  Description of Artificial Sequence: Synthetic oligonucleotide
ccaucccuugucucccuga

SEQ ID NO: 9338 - RNA, 19 nt, Artificial Sequence
  Description of Artificial Sequence: Synthetic oligonucleotide
ugugugcccacugggcagc

SEQ ID NO: 9339 - RNA, 19 nt, Artificial Sequence
  Description of Artificial Sequence: Synthetic oligonucleotide
augucccuggaagaacaca

SEQ ID NO: 9340 - RNA, 19 nt, Artificial Sequence
  Description of Artificial Sequence: Synthetic oligonucleotide
ugucccuggaagaacacag

SEQ ID NO: 9341 - RNA, 19 nt, Artificial Sequence
  Description of Artificial Sequence: Synthetic oligonucleotide
gugugaaugcagaccuaaa

SEQ ID NO: 9342 - RNA, 19 nt, Artificial Sequence
  Description of Artificial Sequence: Synthetic oligonucleotide
agugcaugaacaccagcac

SEQ ID NO: 9343 - RNA, 19 nt, Artificial Sequence
  Description of Artificial Sequence: Synthetic oligonucleotide
gugcaugaacaccagcacg

SEQ ID NO: 9344 - RNA, 19 nt, Artificial Sequence
  Description of Artificial Sequence: Synthetic oligonucleotide
ugcaugaacaccagcacga

SEQ ID NO: 9345 - RNA, 19 nt, Artificial Sequence
  Description of Artificial Sequence: Synthetic oligonucleotide
cucgccgcugcgcugcucc

SEQ ID NO: 9346 - RNA, 19 nt, Artificial Sequence
  Description of Artificial Sequence: Synthetic oligonucleotide
aggggcccgcggccucgca

SEQ ID NO: 9347 - RNA, 19 nt, Artificial Sequence
  Description of Artificial Sequence: Synthetic oligonucleotide
ggggcccgcggccucgcag

SEQ ID NO: 9348 - RNA, 19 nt, Artificial Sequence
  Description of Artificial Sequence: Synthetic oligonucleotide
uguggggguugcugcaaua

SEQ ID NO: 9349 - RNA, 19 nt, Artificial Sequence
  Description of Artificial Sequence: Synthetic oligonucleotide
cccgccgccuccggcucgc

SEQ ID NO: 9350 - RNA, 19 nt, Artificial Sequence
  Description of Artificial Sequence: Synthetic oligonucleotide
uuuuucaucucucucuccc

SEQ ID NO: 9351 - RNA, 19 nt, Artificial Sequence
  Description of Artificial Sequence: Synthetic oligonucleotide
cgaugugguggcuguugca

SEQ ID NO: 9352 - RNA, 19 nt, Artificial Sequence
  Description of Artificial Sequence: Synthetic oligonucleotide
ugugguggcuguugcaaug

SEQ ID NO: 9353 - RNA, 19 nt, Artificial Sequence
  Description of Artificial Sequence: Synthetic oligonucleotide
gugguggcuguugcaauga

SEQ ID NO: 9354 - RNA, 19 nt, Artificial Sequence
  Description of Artificial Sequence: Synthetic oligonucleotide
gguggcuguugcaaugaag

SEQ ID NO: 9355 - RNA, 19 nt, Artificial Sequence
  Description of Artificial Sequence: Synthetic oligonucleotide
guggcuguugcaaugaaga

SEQ ID NO: 9356 - RNA, 19 nt, Artificial Sequence
  Description of Artificial Sequence: Synthetic oligonucleotide
uggcuguugcaaugaagag

SEQ ID NO: 9357 - RNA, 19 nt, Artificial Sequence
  Description of Artificial Sequence: Synthetic oligonucleotide
uuaaaaaaaaaauccauuu

SEQ ID NO: 9358 - RNA, 19 nt, Artificial Sequence
  Description of Artificial Sequence: Synthetic oligonucleotide
uaaaaaaaaaauccauuuu

SEQ ID NO: 9359 - RNA, 19 nt, Artificial Sequence
  Description of Artificial Sequence: Synthetic oligonucleotide
ccgaugugguggcuguugc

SEQ ID NO: 9360 - RNA, 19 nt, Artificial Sequence
  Description of Artificial Sequence: Synthetic oligonucleotide
uuucacccagacaccugca

SEQ ID NO: 9361 - RNA, 19 nt, Artificial Sequence
  Description of Artificial Sequence: Synthetic oligonucleotide
ucacccagacaccugcagc

SEQ ID NO: 9362 - RNA, 19 nt, Artificial Sequence
  Description of Artificial Sequence: Synthetic oligonucleotide
ccagacaccugcagcugug

SEQ ID NO: 9363 - RNA, 19 nt, Artificial Sequence
  Description of Artificial Sequence: Synthetic oligonucleotide
guggcaaaacagcaugugc

SEQ ID NO: 9364 - RNA, 19 nt, Artificial Sequence
  Description of Artificial Sequence: Synthetic oligonucleotide
ucuguaugaacaccagcac

SEQ ID NO: 9365 - RNA, 19 nt, Artificial Sequence
  Description of Artificial Sequence: Synthetic oligonucleotide
cuguaugaacaccagcacc

SEQ ID NO: 9366 - RNA, 19 nt, Artificial Sequence
  Description of Artificial Sequence: Synthetic oligonucleotide
uguaugaacaccagcaccu

SEQ ID NO: 9367 - RNA, 19 nt, Artificial Sequence
  Description of Artificial Sequence: Synthetic oligonucleotide
guugcgagugugucuguaa

SEQ ID NO: 9368 - RNA, 19 nt, Artificial Sequence
  Description of Artificial Sequence: Synthetic oligonucleotide
agugugucuguaaaacacc

SEQ ID NO: 9369 - RNA, 19 nt, Artificial Sequence
  Description of Artificial Sequence: Synthetic oligonucleotide
guggaaaaaaaaaaaaaaa

SEQ ID NO: 9370 - RNA, 19 nt, Artificial Sequence
  Description of Artificial Sequence: Synthetic oligonucleotide
acauguucagcccauccug

SEQ ID NO: 9371 - RNA, 19 nt, Artificial Sequence
  Description of Artificial Sequence: Synthetic oligonucleotide
cauguucagcccauccugu

SEQ ID NO: 9372 - RNA, 19 nt, Artificial Sequence
  Description of Artificial Sequence: Synthetic oligonucleotide
auguucagcccauccugug

SEQ ID NO: 9373 - RNA, 19 nt, Artificial Sequence
  Description of Artificial Sequence: Synthetic oligonucleotide
uguucagcccauccugugu

SEQ ID NO: 9374 - RNA, 19 nt, Artificial Sequence
  Description of Artificial Sequence: Synthetic oligonucleotide
cccauccugugucucccug

SEQ ID NO: 9375 - RNA, 19 nt, Artificial Sequence
  Description of Artificial Sequence: Synthetic oligonucleotide
ccauccugugucucccugc

SEQ ID NO: 9376 - RNA, 19 nt, Artificial Sequence
  Description of Artificial Sequence: Synthetic oligonucleotide
cauccugugucucccugcu

SEQ ID NO: 9377 - RNA, 19 nt, Artificial Sequence
  Description of Artificial Sequence: Synthetic oligonucleotide
auccugugucucccugcug

SEQ ID NO: 9378 - RNA, 19 nt, Artificial Sequence
  Description of Artificial Sequence: Synthetic oligonucleotide
uccugugucucccugcugc

SEQ ID NO: 9379 - RNA, 19 nt, Artificial Sequence
  Description of Artificial Sequence: Synthetic oligonucleotide
ccugugucucccugcugcg

SEQ ID NO: 9380 - RNA, 19 nt, Artificial Sequence
  Description of Artificial Sequence: Synthetic oligonucleotide
ggccaaugucaccaugcag

SEQ ID NO: 9381 - RNA, 19 nt, Artificial Sequence
  Description of Artificial Sequence: Synthetic oligonucleotide
ccaaugucaccaugcagcu

SEQ ID NO: 9382 - RNA, 19 nt, Artificial Sequence
  Description of Artificial Sequence: Synthetic oligonucleotide
agggggaagaggaggagag

SEQ ID NO: 9383 - RNA, 19 nt, Artificial Sequence
  Description of Artificial Sequence: Synthetic oligonucleotide
augcagcuccuaaagaucc

SEQ ID NO: 9384 - RNA, 19 nt, Artificial Sequence
  Description of Artificial Sequence: Synthetic oligonucleotide
ugcagcuccuaaagauccg

SEQ ID NO: 9385 - RNA, 19 nt, Artificial Sequence
  Description of Artificial Sequence: Synthetic oligonucleotide
aaguagggaugcggauccu

SEQ ID NO: 9386 - RNA, 19 nt, Artificial Sequence
  Description of Artificial Sequence: Synthetic oligonucleotide
cucccugcugcgcugcacc

SEQ ID NO: 9387 - RNA, 19 nt, Artificial Sequence
  Description of Artificial Sequence: Synthetic oligonucleotide
uaaaaaaaaaaaagcauuu

SEQ ID NO: 9388 - RNA, 19 nt, Artificial Sequence
  Description of Artificial Sequence: Synthetic oligonucleotide
aaaaaaaaaaaagcauuuu

SEQ ID NO: 9389 - RNA, 19 nt, Artificial Sequence
  Description of Artificial Sequence: Synthetic oligonucleotide
aaaaaaaaaaagcauuuug

SEQ ID NO: 9390 - RNA, 19 nt, Artificial Sequence
  Description of Artificial Sequence: Synthetic oligonucleotide
cccuggcccgggccucggg

SEQ ID NO: 9391 - RNA, 19 nt, Artificial Sequence
  Description of Artificial Sequence: Synthetic oligonucleotide
cuggcccgggccucgggcc

SEQ ID NO: 9392 - RNA, 19 nt, Artificial Sequence
  Description of Artificial Sequence: Synthetic oligonucleotide
ggcccgggccucgggccgg

SEQ ID NO: 9393 - RNA, 19 nt, Artificial Sequence
  Description of Artificial Sequence: Synthetic oligonucleotide
gcugcaaugacgagggccu

SEQ ID NO: 9394 - RNA, 19 nt, Artificial Sequence
  Description of Artificial Sequence: Synthetic oligonucleotide
cugcaaugacgagggccug

SEQ ID NO: 9395 - RNA, 19 nt, Artificial Sequence
  Description of Artificial Sequence: Synthetic oligonucleotide
gaaugcagaccaaagaaag

SEQ ID NO: 9396 - RNA, 19 nt, Artificial Sequence
  Description of Artificial Sequence: Synthetic oligonucleotide
aaugcagaccaaagaaaga

SEQ ID NO: 9397 - RNA, 19 nt, Artificial Sequence
  Description of Artificial Sequence: Synthetic oligonucleotide
gcaaugacgagggccugga

SEQ ID NO: 9398 - RNA, 19 nt, Artificial Sequence
  Description of Artificial Sequence: Synthetic oligonucleotide
ggggcugcugcaaugacga

SEQ ID NO: 9399 - RNA, 19 nt, Artificial Sequence
  Description of Artificial Sequence: Synthetic oligonucleotide
ggcugcugcaaugacgagg

SEQ ID NO: 9400 - RNA, 19 nt, Artificial Sequence
  Description of Artificial Sequence: Synthetic oligonucleotide
ugcugcaaugacgagggcc

SEQ ID NO: 9401 - RNA, 19 nt, Artificial Sequence
  Description of Artificial Sequence: Synthetic oligonucleotide
aaugacgagggccuggagu

SEQ ID NO: 9402 - RNA, 19 nt, Artificial Sequence
  Description of Artificial Sequence: Synthetic oligonucleotide
cugcugcaaugacgagggc

SEQ ID NO: 9403 - RNA, 19 nt, Artificial Sequence
  Description of Artificial Sequence: Synthetic oligonucleotide
gcugcugcaaugacgaggg

SEQ ID NO: 9404 - RNA, 19 nt, Artificial Sequence
  Description of Artificial Sequence: Synthetic oligonucleotide
ugcaaugacgagggccugg

SEQ ID NO: 9405 - RNA, 19 nt, Artificial Sequence
  Description of Artificial Sequence: Synthetic oligonucleotide
caaugacgagggccuggag

SEQ ID NO: 9406 - RNA, 19 nt, Artificial Sequence
  Description of Artificial Sequence: Synthetic oligonucleotide
gggggcugcugcaaugacg

SEQ ID NO: 9407 - RNA, 19 nt, Artificial Sequence
  Description of Artificial Sequence: Synthetic oligonucleotide
ccggaggagggggaggagg

SEQ ID NO: 9408 - RNA, 19 nt, Artificial Sequence
  Description of Artificial Sequence: Synthetic oligonucleotide
cggggcucgcggcgucgca

SEQ ID NO: 9409 - RNA, 19 nt, Artificial Sequence
  Description of Artificial Sequence: Synthetic oligonucleotide
ggggcucgcggcgucgcac

SEQ ID NO: 9410 - RNA, 19 nt, Artificial Sequence
  Description of Artificial Sequence: Synthetic oligonucleotide
gccggaggagggggaggag

SEQ ID NO: 9411 - RNA, 19 nt, Artificial Sequence
  Description of Artificial Sequence: Synthetic oligonucleotide
guggccaaacagcuggugc

SEQ ID NO: 9412 - RNA, 19 nt, Artificial Sequence
  Description of Artificial Sequence: Synthetic oligonucleotide
augcagauccucaugaucc

SEQ ID NO: 9413 - RNA, 19 nt, Artificial Sequence
  Description of Artificial Sequence: Synthetic oligonucleotide
ugcagauccucaugauccg

SEQ ID NO: 9414 - RNA, 19 nt, Artificial Sequence
  Description of Artificial Sequence: Synthetic oligonucleotide
gguggcugcugcccugacg

SEQ ID NO: 9415 - RNA, 19 nt, Artificial Sequence
  Description of Artificial Sequence: Synthetic oligonucleotide
guggcugcugcccugacga

SEQ ID NO: 9416 - RNA, 19 nt, Artificial Sequence
  Description of Artificial Sequence: Synthetic oligonucleotide
ggcugcugcccugacgaug

SEQ ID NO: 9417 - RNA, 19 nt, Artificial Sequence
  Description of Artificial Sequence: Synthetic oligonucleotide
gcugcugcccugacgaugg

SEQ ID NO: 9418 - RNA, 19 nt, Artificial Sequence
  Description of Artificial Sequence: Synthetic oligonucleotide
cugcugcccugacgauggc

SEQ ID NO: 9419 - RNA, 19 nt, Artificial Sequence
  Description of Artificial Sequence: Synthetic oligonucleotide
ugcugcccugacgauggcc

SEQ ID NO: 9420 - RNA, 19 nt, Artificial Sequence
  Description of Artificial Sequence: Synthetic oligonucleotide
gcugcccugacgauggccu

SEQ ID NO: 9421 - RNA, 19 nt, Artificial Sequence
  Description of Artificial Sequence: Synthetic oligonucleotide
cugcccugacgauggccug

SEQ ID NO: 9422 - RNA, 19 nt, Artificial Sequence
  Description of Artificial Sequence: Synthetic oligonucleotide
ugcccugacgauggccugg

SEQ ID NO: 9423 - RNA, 19 nt, Artificial Sequence
  Description of Artificial Sequence: Synthetic oligonucleotide
gcccugacgauggccugga

SEQ ID NO: 9424 - RNA, 19 nt, Artificial Sequence
  Description of Artificial Sequence: Synthetic oligonucleotide
cccugacgauggccuggag

SEQ ID NO: 9425 - RNA, 19 nt, Artificial Sequence
  Description of Artificial Sequence: Synthetic oligonucleotide
ccugacgauggccuggagu

SEQ ID NO: 9426 - RNA, 19 nt, Artificial Sequence
  Description of Artificial Sequence: Synthetic oligonucleotide
cacagccagugugaaugca

SEQ ID NO: 9427 - RNA, 19 nt, Artificial Sequence
  Description of Artificial Sequence: Synthetic oligonucleotide
acagccagugugaaugcag

SEQ ID NO: 9428 - RNA, 19 nt, Artificial Sequence
  Description of Artificial Sequence: Synthetic oligonucleotide
cagccagugugaaugcaga

SEQ ID NO: 9429 - RNA, 19 nt, Artificial Sequence
  Description of Artificial Sequence: Synthetic oligonucleotide
agccagugugaaugcagac

SEQ ID NO: 9430 - RNA, 19 nt, Artificial Sequence
  Description of Artificial Sequence: Synthetic oligonucleotide
gccagugugaaugcagacc

SEQ ID NO: 9431 - RNA, 19 nt, Artificial Sequence
  Description of Artificial Sequence: Synthetic oligonucleotide
ccagugugaaugcagaccu

SEQ ID NO: 9432 - RNA, 19 nt, Artificial Sequence
  Description of Artificial Sequence: Synthetic oligonucleotide
cagugugaaugcagaccua

SEQ ID NO: 9433 - RNA, 19 nt, Artificial Sequence
  Description of Artificial Sequence: Synthetic oligonucleotide
uccgccgccugcugcucgc

SEQ ID NO: 9434 - RNA, 19 nt, Artificial Sequence
  Description of Artificial Sequence: Synthetic oligonucleotide
cgccgccugcugcucgccg

SEQ ID NO: 9435 - RNA, 19 nt, Artificial Sequence
  Description of Artificial Sequence: Synthetic oligonucleotide
caugccagugugucuguaa

SEQ ID NO: 9436 - RNA, 19 nt, Artificial Sequence
  Description of Artificial Sequence: Synthetic oligonucleotide
ccagugugucuguaaaaac

SEQ ID NO: 9437 - RNA, 19 nt, Artificial Sequence
  Description of Artificial Sequence: Synthetic oligonucleotide
augccaguguguauguaaa

SEQ ID NO: 9438 - RNA, 19 nt, Artificial Sequence
  Description of Artificial Sequence: Synthetic oligonucleotide
gccaguguguauguaaaag

SEQ ID NO: 9439 - RNA, 19 nt, Artificial Sequence
  Description of Artificial Sequence: Synthetic oligonucleotide
ccaguguguauguaaaaga

SEQ ID NO: 9440 - RNA, 19 nt, Artificial Sequence
  Description of Artificial Sequence: Synthetic oligonucleotide
aguguguauguaaaagaac

SEQ ID NO: 9441 - RNA, 19 nt, Artificial Sequence
  Description of Artificial Sequence: Synthetic oligonucleotide
gagggaggagggggacgag

SEQ ID NO: 9442 - RNA, 19 nt, Artificial Sequence
  Description of Artificial Sequence: Synthetic oligonucleotide
gggaggagggggacgaggg

SEQ ID NO: 9443 - RNA, 19 nt, Artificial Sequence
  Description of Artificial Sequence: Synthetic oligonucleotide
ggaggagggggacgagggc

SEQ ID NO: 9444 - RNA, 19 nt, Artificial Sequence
  Description of Artificial Sequence: Synthetic oligonucleotide
agauguggggguugcugca

SEQ ID NO: 9445 - RNA, 19 nt, Artificial Sequence
  Description of Artificial Sequence: Synthetic oligonucleotide
cgccgccuccggcucgccc

SEQ ID NO: 9446 - RNA, 19 nt, Artificial Sequence
  Description of Artificial Sequence: Synthetic oligonucleotide
ggagaggaggggacccaug

SEQ ID NO: 9447 - RNA, 19 nt, Artificial Sequence
  Description of Artificial Sequence: Synthetic oligonucleotide
ucuucaagccauccugugu

SEQ ID NO: 9448 - RNA, 19 nt, Artificial Sequence
  Description of Artificial Sequence: Synthetic oligonucleotide
cuucaagccauccugugug

SEQ ID NO: 9449 - RNA, 19 nt, Artificial Sequence
  Description of Artificial Sequence: Synthetic oligonucleotide
gggcugcugcaaugacgag

SEQ ID NO: 9450 - RNA, 19 nt, Artificial Sequence
  Description of Artificial Sequence: Synthetic oligonucleotide
gccaaaaaaaaaaaaaaaa

SEQ ID NO: 9451 - RNA, 19 nt, Artificial Sequence
  Description of Artificial Sequence: Synthetic oligonucleotide
acaucuucaagccauccug

SEQ ID NO: 9452 - RNA, 19 nt, Artificial Sequence
  Description of Artificial Sequence: Synthetic oligonucleotide
caucuucaagccauccugu

SEQ ID NO: 9453 - RNA, 19 nt, Artificial Sequence
  Description of Artificial Sequence: Synthetic oligonucleotide
aucuucaagccauccugug

SEQ ID NO: 9454 - RNA, 19 nt, Artificial Sequence
  Description of Artificial Sequence: Synthetic oligonucleotide
gccauccugugugccccug

SEQ ID NO: 9455 - RNA, 19 nt, Artificial Sequence
  Description of Artificial Sequence: Synthetic oligonucleotide
ccauccugugugccccuga

SEQ ID NO: 9456 - RNA, 19 nt, Artificial Sequence
  Description of Artificial Sequence: Synthetic oligonucleotide
cauccugugugccccugau

SEQ ID NO: 9457 - RNA, 19 nt, Artificial Sequence
  Description of Artificial Sequence: Synthetic oligonucleotide
auccugugugccccugaug

SEQ ID NO: 9458 - RNA, 19 nt, Artificial Sequence
  Description of Artificial Sequence: Synthetic oligonucleotide
uccugugugccccugaugc

SEQ ID NO: 9459 - RNA, 19 nt, Artificial Sequence
  Description of Artificial Sequence: Synthetic oligonucleotide
ccugugugccccugaugcg

SEQ ID NO: 9460 - RNA, 19 nt, Artificial Sequence
  Description of Artificial Sequence: Synthetic oligonucleotide
acagggaagaggaggagau

SEQ ID NO: 9461 - RNA, 19 nt, Artificial Sequence
  Description of Artificial Sequence: Synthetic oligonucleotide
aaaaaaaaaauccauuuua

SEQ ID NO: 9462 - RNA, 19 nt, Artificial Sequence
  Description of Artificial Sequence: Synthetic oligonucleotide
agggaggagggggacgagg

SEQ ID NO: 9463 - RNA, 19 nt, Artificial Sequence
  Description of Artificial Sequence: Synthetic oligonucleotide
cgagugugucuguaaaaca

SEQ ID NO: 9464 - RNA, 19 nt, Artificial Sequence
  Description of Artificial Sequence: Synthetic oligonucleotide
cggaggagggggaggagga

SEQ ID NO: 9465 - RNA, 19 nt, Artificial Sequence
  Description of Artificial Sequence: Synthetic oligonucleotide
ggaggagggggaggaggaa

SEQ ID NO: 9466 - DNA, 21 bp, Artificial Sequence
  Description of Artificial Sequence: Synthetic oligonucleotide
  Description of Combined DNA/RNA Molecule: Synthetic oligonucleotide
cuacacaaaucagcgauuutt

SEQ ID NO: 9467 - DNA, 21 bp, Artificial Sequence
  Description of Artificial Sequence: Synthetic oligonucleotide
  Description of Combined DNA/RNA Molecule: Synthetic oligonucleotide
aaaucgcugauuuguguagtt

SEQ ID NO: 9468 - DNA, 25 bp, Artificial Sequence
  Description of Artificial Sequence: Synthetic oligonucleotide
  Description of Combined DNA/RNA Molecule: Synthetic oligonucleotide
cuacacaaaucagcgauuuccaugt

SEQ ID NO: 9469 - RNA, 27 nt, Artificial Sequence
  Description of Artificial Sequence: Synthetic oligonucleotide
acauggaaaucgcugauuuguguaguc

SEQ ID NO: 9470 - RNA, 13 nt, Artificial Sequence
  Description of Artificial Sequence: Synthetic oligonucleotide
cuacacaaaucag

SEQ ID NO: 9471 - DNA, 11 bp, Artificial Sequence
  Description of Artificial Sequence: Synthetic oligonucleotide
  Description of Combined DNA/RNA Molecule: Synthetic oligonucleotide
gauuuccaugt

SEQ ID NO: 9472 - DNA, 21 bp, Artificial Sequence
  Description of Artificial Sequence: Synthetic oligonucleotide
  Description of Combined DNA/RNA Molecule: Synthetic oligonucleotide
ggaucuuauuucuucggagtt

SEQ ID NO: 9473 - DNA, 21 bp, Artificial Sequence
  Description of Artificial Sequence: Synthetic oligonucleotide
  Description of Combined DNA/RNA Molecule: Synthetic oligonucleotide
cuccgaagaaauaagaucctt

SEQ ID NO: 9474 - RNA, 11 nt, Artificial Sequence
  Description of Artificial Sequence: Synthetic oligonucleotide
ggaucuuauuu

SEQ ID NO: 9475 - DNA, 10 bp, Artificial Sequence
  Description of Artificial Sequence: Synthetic oligonucleotide
  Description of Combined DNA/RNA Molecule: Synthetic oligonucleotide
cuucggagtt

SEQ ID NO: 9476 - RNA, 27 nt, Artificial Sequence
  Description of Artificial Sequence: Synthetic oligonucleotide
cauugucuccgaagaaauaagauccuu

SEQ ID NO: 9477 - RNA, 8 nt, Artificial Sequence
  Description of Artificial Sequence: Synthetic oligonucleotide
  modified_base (2): LNA-G
ggaucuua

SEQ ID NO: 9478 - DNA, 17 bp, Artificial Sequence
  Description of Artificial Sequence: Synthetic oligonucleotide
  Description of Combined DNA/RNA Molecule: Synthetic oligonucleotide
uuucuucggagacaatg

SEQ ID NO: 9479 - DNA, 16 bp, Artificial Sequence
  Description of Artificial Sequence: Synthetic oligonucleotide
  Description of Combined DNA/RNA Molecule: Synthetic oligonucleotide
uucuucggagacaatg

SEQ ID NO: 9480 - DNA, 15 bp, Artificial Sequence
  Description of Artificial Sequence: Synthetic oligonucleotide
  Description of Combined DNA/RNA Molecule: Synthetic oligonucleotide
ucuucggagacaatg

SEQ ID NO: 9481 - DNA, 14 bp, Artificial Sequence
  Description of Artificial Sequence: Synthetic oligonucleotide
  Description of Combined DNA/RNA Molecule: Synthetic oligonucleotide
cuucggagacaatg

SEQ ID NO: 9482 - DNA, 13 bp, Artificial Sequence
  Description of Artificial Sequence: Synthetic oligonucleotide
  Description of Combined DNA/RNA Molecule: Synthetic oligonucleotide
uucggagacaatg

SEQ ID NO: 9483 - DNA, 12 bp, Artificial Sequence
  Description of Artificial Sequence: Synthetic oligonucleotide
  Description of Combined DNA/RNA Molecule: Synthetic oligonucleotide
ucggagacaatg

SEQ ID NO: 9484 - DNA, 11 bp, Artificial Sequence
  Description of Artificial Sequence: Synthetic oligonucleotide
  Description of Combined DNA/RNA Molecule: Synthetic oligonucleotide
cggagacaatg

SEQ ID NO: 9485 - RNA, 9 nt, Artificial Sequence
  Description of Artificial Sequence: Synthetic oligonucleotide
  modified_base (2): LNA-G
ggaucuuau

SEQ ID NO: 9486 - RNA, 10 nt, Artificial Sequence
  Description of Artificial Sequence: Synthetic oligonucleotide
  modified_base (2): LNA-G
ggaucuuauu

SEQ ID NO: 9487 - RNA, 11 nt, Artificial Sequence
  Description of Artificial Sequence: Synthetic oligonucleotide
  modified_base (2): LNA-G
ggaucuuauuu

SEQ ID NO: 9488 - RNA, 12 nt, Artificial Sequence
  Description of Artificial Sequence: Synthetic oligonucleotide
  modified_base (2): LNA-G
ggaucuuauuuc

SEQ ID NO: 9489 - RNA, 8 nt, Artificial Sequence
  Description of Artificial Sequence: Synthetic oligonucleotide
  modified_base (3): LNA-A
cuacacaa

SEQ ID NO: 9490 - DNA, 13 bp, Artificial Sequence
  Description of Artificial Sequence: Synthetic oligonucleotide
  Description of Combined DNA/RNA Molecule: Synthetic oligonucleotide
  modified_base (8): LNA-A
aucagcgauuutt

SEQ ID NO: 9491 - DNA, 12 bp, Artificial Sequence
  Description of Artificial Sequence: Synthetic oligonucleotide
  Description of Combined DNA/RNA Molecule: Synthetic oligonucleotide
  modified_base (7): LNA-A
ucagcgauuutt

SEQ ID NO: 9492 - DNA, 11 bp, Artificial Sequence
  Description of Artificial Sequence: Synthetic oligonucleotide
  Description of Combined DNA/RNA Molecule: Synthetic oligonucleotide
  modified_base (6): LNA-A
cagcgauuutt

SEQ ID NO: 9493 - DNA, 10 bp, Artificial Sequence
  Description of Artificial Sequence: Synthetic oligonucleotide
  Description of Combined DNA/RNA Molecule: Synthetic oligonucleotide
  modified_base (5): LNA-A
agcgauuutt

SEQ ID NO: 9494 - DNA, 9 bp, Artificial Sequence
  Description of Artificial Sequence: Synthetic oligonucleotide
  Description of Combined DNA/RNA Molecule: Synthetic oligonucleotide
  modified_base (4): LNA-A
gcgauuutt

SEQ ID NO: 9495 - DNA, 8 bp, Artificial Sequence
  Description of Artificial Sequence: Synthetic oligonucleotide
  Description of Combined DNA/RNA Molecule: Synthetic oligonucleotide
  modified_base (3): LNA-A
cgauuutt

SEQ ID NO: 9496 - DNA, 7 bp, Artificial Sequence
  Description of Artificial Sequence: Synthetic oligonucleotide
  Description of Combined DNA/RNA Molecule: Synthetic oligonucleotide
  modified_base (2): LNA-A
gauuutt

SEQ ID NO: 9497 - RNA, 9 nt, Artificial Sequence
  Description of Artificial Sequence: Synthetic oligonucleotide
  modified_base (3): LNA-A
cuacacaaa

SEQ ID NO: 9498 - RNA, 10 nt, Artificial Sequence
  Description of Artificial Sequence: Synthetic oligonucleotide
  modified_base (3): LNA-A
cuacacaaau

SEQ ID NO: 9499 - RNA, 11 nt, Artificial Sequence
  Description of Artificial Sequence: Synthetic oligonucleotide
  modified_base (3): LNA-A
cuacacaaauc

SEQ ID NO: 9500 - RNA, 12 nt, Artificial Sequence
  Description of Artificial Sequence: Synthetic oligonucleotide
  modified_base (3): LNA-A
cuacacaaauca

SEQ ID NO: 9501 - RNA, 13 nt, Artificial Sequence
  Description of Artificial Sequence: Synthetic oligonucleotide
  modified_base (3): LNA-A
cuacacaaaucag

SEQ ID NO: 9502 - RNA, 14 nt, Artificial Sequence
  Description of Artificial Sequence: Synthetic oligonucleotide
  modified_base (3): LNA-A
cuacacaaaucagc

SEQ ID NO: 9503 - RNA, 13 nt, Artificial Sequence
  Description of Artificial Sequence: Synthetic oligonucleotide
  modified_base (2): LNA-G
ggaucuuauuucu

SEQ ID NO: 9504 - RNA, 14 nt, Artificial Sequence
  Description of Artificial Sequence: Synthetic oligonucleotide
  modified_base (2): LNA-G
ggaucuuauuucuu

SEQ ID NO: 9505 - RNA, 8 nt, Artificial Sequence
  Description of Artificial Sequence: Synthetic oligonucleotide
  modified_base (2): LNA-G
  modified_base (8): LNA-A
ggaucuua

SEQ ID NO: 9506 - RNA, 9 nt, Artificial Sequence
  Description of Artificial Sequence: Synthetic oligonucleotide
  modified_base (2): LNA-G
  modified_base (9): LNA-U
ggaucuuau

SEQ ID NO: 9507 - RNA, 10 nt, Artificial Sequence
  Description of Artificial Sequence: Synthetic oligonucleotide
  modified_base (2): LNA-G
  modified_base (10): LNA-U
ggaucuuauu

SEQ ID NO: 9508 - RNA, 11 nt, Artificial Sequence
  Description of Artificial Sequence: Synthetic oligonucleotide
  modified_base (2): LNA-G
  modified_base (11): LNA-U
ggaucuuauuu

SEQ ID NO: 9509 - RNA, 12 nt, Artificial Sequence
  Description of Artificial Sequence: Synthetic oligonucleotide
  modified_base (2): LNA-G
  modified_base (12): LNA-C
ggaucuuauuuc

SEQ ID NO: 9510 - RNA, 13 nt, Artificial Sequence
  Description of Artificial Sequence: Synthetic oligonucleotide
  modified_base (2): LNA-G
  modified_base (13): LNA-U
ggaucuuauuucu

SEQ ID NO: 9511 - RNA, 14 nt, Artificial Sequence
  Description of Artificial Sequence: Synthetic oligonucleotide
  modified_base (2): LNA-G
  modified_base (14): LNA-U
ggaucuuauuucuu

SEQ ID NO: 9512 - DNA, 13 bp, Artificial Sequence
  Description of Artificial Sequence: Synthetic oligonucleotide
  Description of Combined DNA/RNA Molecule: Synthetic oligonucleotide
  modified_base (8): LNA-G
uuucuucggagtt

SEQ ID NO: 9513 - DNA, 12 bp, Artificial Sequence
  Description of Artificial Sequence: Synthetic oligonucleotide
  Description of Combined DNA/RNA Molecule: Synthetic oligonucleotide
  modified_base (7): LNA-G
uucuucggagtt

SEQ ID NO: 9514 - DNA, 11 bp, Artificial Sequence
  Description of Artificial Sequence: Synthetic oligonucleotide
  Description of Combined DNA/RNA Molecule: Synthetic oligonucleotide
  modified_base (6): LNA-G
ucuucggagtt

SEQ ID NO: 9515 - DNA, 10 bp, Artificial Sequence
  Description of Artificial Sequence: Synthetic oligonucleotide
  Description of Combined DNA/RNA Molecule: Synthetic oligonucleotide
  modified_base (5): LNA-G
cuucggagtt

SEQ ID NO: 9516 - DNA, 9 bp, Artificial Sequence
  Description of Artificial Sequence: Synthetic oligonucleotide
  Description of Combined DNA/RNA Molecule: Synthetic oligonucleotide
  modified_base (4): LNA-G
uucggagtt

SEQ ID NO: 9517 - DNA, 8 bp, Artificial Sequence
  Description of Artificial Sequence: Synthetic oligonucleotide
  Description of Combined DNA/RNA Molecule: Synthetic oligonucleotide
  modified_base (3): LNA-G
ucggagtt

SEQ ID NO: 9518 - DNA, 7 bp, Artificial Sequence
  Description of Artificial Sequence: Synthetic oligonucleotide
  Description of Combined DNA/RNA Molecule: Synthetic oligonucleotide
  modified_base (2): LNA-G
cggagtt

SEQ ID NO: 9519 - DNA, 13 bp, Artificial Sequence
  Description of Artificial Sequence: Synthetic oligonucleotide
  Description of Combined DNA/RNA Molecule: Synthetic oligonucleotide
  modified_base (1): LNA-U
  modified_base (8): LNA-G
uuucuucggagtt

SEQ ID NO: 9520 - DNA, 12 bp, Artificial Sequence
  Description of Artificial Sequence: Synthetic oligonucleotide
  Description of Combined DNA/RNA Molecule: Synthetic oligonucleotide
  modified_base (1): LNA-U
  modified_base (7): LNA-G
uucuucggagtt

SEQ ID NO: 9521 - DNA, 11 bp, Artificial Sequence
  Description of Artificial Sequence: Synthetic oligonucleotide
  Description of Combined DNA/RNA Molecule: Synthetic oligonucleotide
  modified_base (1): LNA-U
  modified_base (6): LNA-G
ucuucggagtt

SEQ ID NO: 9522 - DNA, 10 bp, Artificial Sequence
  Description of Artificial Sequence: Synthetic oligonucleotide
  Description of Combined DNA/RNA Molecule: Synthetic oligonucleotide
  modified_base (1): LNA-C
  modified_base (5): LNA-G
cuucggagtt

SEQ ID NO: 9523 - DNA, 9 bp, Artificial Sequence
  Description of Artificial Sequence: Synthetic oligonucleotide
  Description of Combined DNA/RNA Molecule: Synthetic oligonucleotide
  modified_base (1): LNA-U
  modified_base (4): LNA-G
uucggagtt

SEQ ID NO: 9524 - DNA, 8 bp, Artificial Sequence
  Description of Artificial Sequence: Synthetic oligonucleotide
  Description of Combined DNA/RNA Molecule: Synthetic oligonucleotide
  modified_base (1): LNA-U
  modified_base (3): LNA-G
ucggagtt

SEQ ID NO: 9525 - DNA, 7 bp, Artificial Sequence
  Description of Artificial Sequence: Synthetic oligonucleotide
  Description of Combined DNA/RNA Molecule: Synthetic oligonucleotide
  modified_base (1): LNA-C
  modified_base (2): LNA-G
cggagtt

SEQ ID NO: 9526 - DNA, 21 bp, Artificial Sequence
  Description of Artificial Sequence: Synthetic oligonucleotide
  Description of Combined DNA/RNA Molecule: Synthetic oligonucleotide
  modified_base (2): LNA-G
  modified_base (16): LNA-G
ggaucuuauuucuucggagtt

SEQ ID NO: 9527 - DNA, 25 bp, Artificial Sequence
  Description of Artificial Sequence: Synthetic oligonucleotide
  Description of Combined DNA/RNA Molecule: Synthetic oligonucleotide
ggaucuuauuucuucggagacaatg

SEQ ID NO: 9528 - RNA, 25 nt, Artificial Sequence
  Description of Artificial Sequence: Synthetic oligonucleotide
guauuuugaugaggaguucacggcc

SEQ ID NO: 9529 - RNA, 25 nt, Artificial Sequence
  Description of Artificial Sequence: Synthetic oligonucleotide
ggcccagaugaucaccaucacacca

SEQ ID NO: 9530 - RNA, 25 nt, Artificial Sequence
  Description of Artificial Sequence: Synthetic oligonucleotide
gggaagaaaacuauccugcggguuu

SEQ ID NO: 9531 - RNA, 25 nt, Artificial Sequence
  Description of Artificial Sequence: Synthetic oligonucleotide
guuuuaauuuauuucauccaguuug

SEQ ID NO: 9532 - RNA, 25 nt, Artificial Sequence
  Description of Artificial Sequence: Synthetic oligonucleotide
acguagggaaauguuaaggacuucu

SEQ ID NO: 9533 - RNA, 25 nt, Artificial Sequence
  Description of Artificial Sequence: Synthetic oligonucleotide
ccaggguuuacccagugggacagag

SEQ ID NO: 9534 - RNA, 25 nt, Artificial Sequence
  Description of Artificial Sequence: Synthetic oligonucleotide
agcaagguuuaaauuuguuauugug

SEQ ID NO: 9535 - RNA, 25 nt, Artificial Sequence
  Description of Artificial Sequence: Synthetic oligonucleotide
uguauuauguuguucaaaugcauuu

SEQ ID NO: 9536 - RNA, 25 nt, Artificial Sequence
  Description of Artificial Sequence: Synthetic oligonucleotide
uuuuaaucuuugugacaggaaagcc

SEQ ID NO: 9537 - RNA, 25 nt, Artificial Sequence
  Description of Artificial Sequence: Synthetic oligonucleotide
uuaaucuuugugacaggaaagcccu

SEQ ID NO: 9538 - RNA, 25 nt, Artificial Sequence
  Description of Artificial Sequence: Synthetic oligonucleotide
gcugcuuaugucucccagcauggcc

SEQ ID NO: 9539 - RNA, 25 nt, Artificial Sequence
  Description of Artificial Sequence: Synthetic oligonucleotide
aaguguuucagaagcuucucccuga

SEQ ID NO: 9540 - RNA, 25 nt, Artificial Sequence
  Description of Artificial Sequence: Synthetic oligonucleotide
gaccaucaauaaggaagaagcccuu

SEQ ID NO: 9541 - RNA, 25 nt, Artificial Sequence
  Description of Artificial Sequence: Synthetic oligonucleotide
ccaucaauaaggaagaagcccuuca

SEQ ID NO: 9542 - RNA, 25 nt, Artificial Sequence
  Description of Artificial Sequence: Synthetic oligonucleotide
ucaauaaggaagaagcccuucagcg

SEQ ID NO: 9543 - RNA, 25 nt, Artificial Sequence
  Description of Artificial Sequence: Synthetic oligonucleotide
aauaaggaagaagcccuucagcggc

SEQ ID NO: 9544 - RNA, 25 nt, Artificial Sequence
  Description of Artificial Sequence: Synthetic oligonucleotide
aggaagaagcccuucagcggccagu

SEQ ID NO: 9545 - RNA, 25 nt, Artificial Sequence
  Description of Artificial Sequence: Synthetic oligonucleotide
gcauaacuaaaggugaaaagcuccg

SEQ ID NO: 9546 - RNA, 25 nt, Artificial Sequence
  Description of Artificial Sequence: Synthetic oligonucleotide
cauaacuaaaggugaaaagcuccgg

SEQ ID NO: 9547 - RNA, 25 nt, Artificial Sequence
  Description of Artificial Sequence: Synthetic oligonucleotide
cuacaucacgccagucaacagucug

SEQ ID NO: 9548 - RNA, 25 nt, Artificial Sequence
  Description of Artificial Sequence: Synthetic oligonucleotide
acuggauuuaagcagaguucaaaag

SEQ ID NO: 9549 - RNA, 25 nt, Artificial Sequence
  Description of Artificial Sequence: Synthetic oligonucleotide
cuggauuuaagcagaguucaaaagc

SEQ ID NO: 9550 - RNA, 25 nt, Artificial Sequence
  Description of Artificial Sequence: Synthetic oligonucleotide
gauuuaagcagaguucaaaagcccu

SEQ ID NO: 9551 - RNA, 25 nt, Artificial Sequence
  Description of Artificial Sequence: Synthetic oligonucleotide
auuuaagcagaguucaaaagcccuu

SEQ ID NO: 9552 - RNA, 25 nt, Artificial Sequence
  Description of Artificial Sequence: Synthetic oligonucleotide
uuaagcagaguucaaaagcccuuca

SEQ ID NO: 9553 - RNA, 25 nt, Artificial Sequence
  Description of Artificial Sequence: Synthetic oligonucleotide
uaagcagaguucaaaagcccuucag

SEQ ID NO: 9554 - RNA, 25 nt, Artificial Sequence
  Description of Artificial Sequence: Synthetic oligonucleotide
agcagaguucaaaagcccuucagcg

SEQ ID NO: 9555 - RNA, 25 nt, Artificial Sequence
  Description of Artificial Sequence: Synthetic oligonucleotide
cucagggucugagugaagccgcucg

SEQ ID NO: 9556 - RNA, 25 nt, Artificial Sequence
  Description of Artificial Sequence: Synthetic oligonucleotide
caagcaacuacaucacgccagucaa

SEQ ID NO: 9557 - RNA, 25 nt, Artificial Sequence
  Description of Artificial Sequence: Synthetic oligonucleotide
aucaauggcagcuucuuggugcgug

SEQ ID NO: 9558 - RNA, 25 nt, Artificial Sequence
  Description of Artificial Sequence: Synthetic oligonucleotide
uuccagcccacauuggauucaucag

SEQ ID NO: 9559 - RNA, 25 nt, Artificial Sequence
  Description of Artificial Sequence: Synthetic oligonucleotide
cagcugagaauguggaauaccuaag

SEQ ID NO: 9560 - RNA, 25 nt, Artificial Sequence
  Description of Artificial Sequence: Synthetic oligonucleotide
aacguaucuccuaauuugaggcuca

SEQ ID NO: 9561 - RNA, 25 nt, Artificial Sequence
  Description of Artificial Sequence: Synthetic oligonucleotide
ccuaaaauaauuucucuacaauugg

SEQ ID NO: 9562 - RNA, 25 nt, Artificial Sequence
  Description of Artificial Sequence: Synthetic oligonucleotide
uggaagauucagcuaguuaggagcc

SEQ ID NO: 9563 - RNA, 25 nt, Artificial Sequence
  Description of Artificial Sequence: Synthetic oligonucleotide
uuaaacucuccuagucaauauccac

SEQ ID NO: 9564 - RNA, 25 nt, Artificial Sequence
  Description of Artificial Sequence: Synthetic oligonucleotide
cagccuacaguuauguucagucaca

SEQ ID NO: 9565 - RNA, 25 nt, Artificial Sequence
  Description of Artificial Sequence: Synthetic oligonucleotide
guuauguucagucacacacacauac

SEQ ID NO: 9566 - RNA, 25 nt, Artificial Sequence
  Description of Artificial Sequence: Synthetic oligonucleotide
cacauacaaaauguuccuuuugcuu

SEQ ID NO: 9567 - RNA, 25 nt, Artificial Sequence
  Description of Artificial Sequence: Synthetic oligonucleotide
uccuuuugcuuuuaaaguaauuuuu

SEQ ID NO: 9568 - RNA, 25 nt, Artificial Sequence
  Description of Artificial Sequence: Synthetic oligonucleotide
ugaccugugaagcaacagucaaugg

SEQ ID NO: 9569 - RNA, 25 nt, Artificial Sequence
  Description of Artificial Sequence: Synthetic oligonucleotide
cuaucucacacaucgacaaaccaau

SEQ ID NO: 9570 - RNA, 25 nt, Artificial Sequence
  Description of Artificial Sequence: Synthetic oligonucleotide
uguccucaauuguacugcuaccacu

SEQ ID NO: 9571 - RNA, 25 nt, Artificial Sequence
  Description of Artificial Sequence: Synthetic oligonucleotide
aaaccguagcuggcaagcggucuua

SEQ ID NO: 9572 - RNA, 25 nt, Artificial Sequence
  Description of Artificial Sequence: Synthetic oligonucleotide
uagcuggcaagcggucuuaccggcu

SEQ ID NO: 9573 - RNA, 25 nt, Artificial Sequence
  Description of Artificial Sequence: Synthetic oligonucleotide
uuguaugguuaaaagauggguuacc

SEQ ID NO: 9574 - RNA, 25 nt, Artificial Sequence
  Description of Artificial Sequence: Synthetic oligonucleotide
ugguuaaaagauggguuaccugcga

SEQ ID NO: 9575 - RNA, 25 nt, Artificial Sequence
  Description of Artificial Sequence: Synthetic oligonucleotide
cagggaauuauacaaucuugcugag

SEQ ID NO: 9576 - RNA, 25 nt, Artificial Sequence
  Description of Artificial Sequence: Synthetic oligonucleotide
acaaucuugcugagcauaaaacagu

SEQ ID NO: 9577 - RNA, 25 nt, Artificial Sequence
  Description of Artificial Sequence: Synthetic oligonucleotide
ccaauaaugaagaguccuuuauccu

SEQ ID NO: 9578 - RNA, 25 nt, Artificial Sequence
  Description of Artificial Sequence: Synthetic oligonucleotide
acuuuggauguuccaacgcaaguug

SEQ ID NO: 9579 - RNA, 25 nt, Artificial Sequence
  Description of Artificial Sequence: Synthetic oligonucleotide
aaugcuuccacuaaacugaaaccau

SEQ ID NO: 9580 - RNA, 25 nt, Artificial Sequence
  Description of Artificial Sequence: Synthetic oligonucleotide
gagaaaguuugacuuuguuaaauau

SEQ ID NO: 9581 - RNA, 25 nt, Artificial Sequence
  Description of Artificial Sequence: Synthetic oligonucleotide
aaagaacuacuguauauuaaaaguu

SEQ ID NO: 9582 - RNA, 25 nt, Artificial Sequence
  Description of Artificial Sequence: Synthetic oligonucleotide
uuagaaauacggguuuugacuuaac

SEQ ID NO: 9583 - RNA, 25 nt, Artificial Sequence
  Description of Artificial Sequence: Synthetic oligonucleotide
aacauggguacagcaaacucagcac

SEQ ID NO: 9584 - RNA, 25 nt, Artificial Sequence
  Description of Artificial Sequence: Synthetic oligonucleotide
aaagacacagaagaugcugaccuca

SEQ ID NO: 9585 - RNA, 25 nt, Artificial Sequence
  Description of Artificial Sequence: Synthetic oligonucleotide
uaguagggagguuuauucagaucgc

SEQ ID NO: 9586 - RNA, 25 nt, Artificial Sequence
  Description of Artificial Sequence: Synthetic oligonucleotide
gccuucugcagcaggguucugggau

SEQ ID NO: 9587 - RNA, 25 nt, Artificial Sequence
  Description of Artificial Sequence: Synthetic oligonucleotide
ggucugguacauauuggaaauuaug

SEQ ID NO: 9588 - RNA, 25 nt, Artificial Sequence
  Description of Artificial Sequence: Synthetic oligonucleotide
cuaguccuuccgauggaagcacuag

SEQ ID NO: 9589 - RNA, 25 nt, Artificial Sequence
  Description of Artificial Sequence: Synthetic oligonucleotide
ccagugaauauuguuuuuaugugga

SEQ ID NO: 9590 - RNA, 25 nt, Artificial Sequence
  Description of Artificial Sequence: Synthetic oligonucleotide
augaauucaaguuggaauugguaga

SEQ ID NO: 9591 - RNA, 25 nt, Artificial Sequence
  Description of Artificial Sequence: Synthetic oligonucleotide
caggacacagauuuagacuuggaga

SEQ ID NO: 9592 - RNA, 25 nt, Artificial Sequence
  Description of Artificial Sequence: Synthetic oligonucleotide
cucaaagcacaguuacaguauucca

SEQ ID NO: 9593 - RNA, 25 nt, Artificial Sequence
  Description of Artificial Sequence: Synthetic oligonucleotide
accacugccaccacugaugaauuaa

SEQ ID NO: 9594 - RNA, 25 nt, Artificial Sequence
  Description of Artificial Sequence: Synthetic oligonucleotide
gaaacuacuagugccacaucaucac

SEQ ID NO: 9595 - RNA, 25 nt, Artificial Sequence
  Description of Artificial Sequence: Synthetic oligonucleotide
aagucggacagccucaccaaacaga

SEQ ID NO: 9596 - RNA, 25 nt, Artificial Sequence
  Description of Artificial Sequence: Synthetic oligonucleotide
gaaagcgaaaaauggaacaugaugg

SEQ ID NO: 9597 - RNA, 25 nt, Artificial Sequence
  Description of Artificial Sequence: Synthetic oligonucleotide
cccucugauuuagcauguagacugc

SEQ ID NO: 9598 - RNA, 25 nt, Artificial Sequence
  Description of Artificial Sequence: Synthetic oligonucleotide
ugagcuauuuaaggaucuauuuaug

SEQ ID NO: 9599 - RNA, 25 nt, Artificial Sequence
  Description of Artificial Sequence: Synthetic oligonucleotide
aaaaggugaaaaagcacuauuauca

SEQ ID NO: 9600 - RNA, 25 nt, Artificial Sequence
  Description of Artificial Sequence: Synthetic oligonucleotide
gaaaaagcacuauuaucaguucugc

SEQ ID NO: 9601 - RNA, 25 nt, Artificial Sequence
  Description of Artificial Sequence: Synthetic oligonucleotide
ggcugaaaagaaagauuaaaccuac

SEQ ID NO: 9602 - RNA, 25 nt, Artificial Sequence
  Description of Artificial Sequence: Synthetic oligonucleotide
uaaacccuuauaauaaaauccuucu

SEQ ID NO: 9603 - RNA, 25 nt, Artificial Sequence
  Description of Artificial Sequence: Synthetic oligonucleotide
cauacuauuagccaaugcuguagac

SEQ ID NO: 9604 - RNA, 25 nt, Artificial Sequence
  Description of Artificial Sequence: Synthetic oligonucleotide
gacagaagcauuuugauaggaauag

SEQ ID NO: 9605 - RNA, 25 nt, Artificial Sequence
  Description of Artificial Sequence: Synthetic oligonucleotide
agagcaaauaagauaauggcccuga

SEQ ID NO: 9606 - RNA, 25 nt, Artificial Sequence
  Description of Artificial Sequence: Synthetic oligonucleotide
ccaacauuuuucucuuccucaagca

SEQ ID NO: 9607 - RNA, 25 nt, Artificial Sequence
  Description of Artificial Sequence: Synthetic oligonucleotide
uuaaguaugagaaaaguucagccca

SEQ ID NO: 9608 - RNA, 25 nt, Artificial Sequence
  Description of Artificial Sequence: Synthetic oligonucleotide
caggaauaaagauggcugcugaacc

SEQ ID NO: 9609 - RNA, 25 nt, Artificial Sequence
  Description of Artificial Sequence: Synthetic oligonucleotide
aauuugaaugaccaaguucucuuca

SEQ ID NO: 9610 - RNA, 25 nt, Artificial Sequence
  Description of Artificial Sequence: Synthetic oligonucleotide
auguauaaagauagccagccuagag

SEQ ID NO: 9611 - RNA, 25 nt, Artificial Sequence
  Description of Artificial Sequence: Synthetic oligonucleotide
ggcuguaacuaucucugugaagugu

SEQ ID NO: 9612 - RNA, 25 nt, Artificial Sequence
  Description of Artificial Sequence: Synthetic oligonucleotide
ucugugaagugugagaaaauuucaa

SEQ ID NO: 9613 - RNA, 25 nt, Artificial Sequence
  Description of Artificial Sequence: Synthetic oligonucleotide
ccuuuaaggaaaugaauccuccuga

SEQ ID NO: 9614 - RNA, 25 nt, Artificial Sequence
  Description of Artificial Sequence: Synthetic oligonucleotide
aaggauacaaaaagugacaucauau

SEQ ID NO: 9615 - RNA, 25 nt, Artificial Sequence
  Description of Artificial Sequence: Synthetic oligonucleotide
agaugcaauuugaaucuucaucaua

SEQ ID NO: 9616 - RNA, 25 nt, Artificial Sequence
  Description of Artificial Sequence: Synthetic oligonucleotide
guucaaaacgaagacuagcuauuaa

SEQ ID NO: 9617 - RNA, 25 nt, Artificial Sequence
  Description of Artificial Sequence: Synthetic oligonucleotide
gugaaaccucaucucuacuaaaaau

SEQ ID NO: 9618 - RNA, 25 nt, Artificial Sequence
  Description of Artificial Sequence: Synthetic oligonucleotide
acgaaagagaagcucuaucucgccu

SEQ ID NO: 9619 - RNA, 25 nt, Artificial Sequence
  Description of Artificial Sequence: Synthetic oligonucleotide
cuccacaagcgccuucgguccaguu

SEQ ID NO: 9620 - RNA, 25 nt, Artificial Sequence
  Description of Artificial Sequence: Synthetic oligonucleotide
gagaagauuccaaagauguagccgc

SEQ ID NO: 9621 - RNA, 25 nt, Artificial Sequence
  Description of Artificial Sequence: Synthetic oligonucleotide
aaucuggauucaaugaggagacuug

SEQ ID NO: 9622 - RNA, 25 nt, Artificial Sequence
  Description of Artificial Sequence: Synthetic oligonucleotide
agaacagauuugagaguagugagga

SEQ ID NO: 9623 - RNA, 25 nt, Artificial Sequence
  Description of Artificial Sequence: Synthetic oligonucleotide
ccagagcugugcagaugaguacaaa

SEQ ID NO: 9624 - RNA, 25 nt, Artificial Sequence
  Description of Artificial Sequence: Synthetic oligonucleotide
ccucagauuguuguuguuaaugggc

SEQ ID NO: 9625 - RNA, 25 nt, Artificial Sequence
  Description of Artificial Sequence: Synthetic oligonucleotide
cuauuuuaauuauuuuuaauuuauu

SEQ ID NO: 9626 - RNA, 25 nt, Artificial Sequence
  Description of Artificial Sequence: Synthetic oligonucleotide
uuuaauuuauuaauauuuaaauaug

SEQ ID NO: 9627 - RNA, 25 nt, Artificial Sequence
  Description of Artificial Sequence: Synthetic oligonucleotide
augcaguuugaauauccuuuguuuc

SEQ ID NO: 9628 - RNA, 25 nt, Artificial Sequence
  Description of Artificial Sequence: Synthetic oligonucleotide
caugcugcuggcgucuaaguguuug

SEQ ID NO: 9629 - RNA, 25 nt, Artificial Sequence
  Description of Artificial Sequence: Synthetic oligonucleotide
agaugugcauuucaccugugacaaa

SEQ ID NO: 9630 - RNA, 25 nt, Artificial Sequence
  Description of Artificial Sequence: Synthetic oligonucleotide
ucaaaaccugugccaggcugaauua

SEQ ID NO: 9631 - RNA, 25 nt, Artificial Sequence
  Description of Artificial Sequence: Synthetic oligonucleotide
gaauguggguagucauucuuacaau

SEQ ID NO: 9632 - RNA, 25 nt, Artificial Sequence
  Description of Artificial Sequence: Synthetic oligonucleotide
auguggguagucauucuuacaauug

SEQ ID NO: 9633 - RNA, 25 nt, Artificial Sequence
  Description of Artificial Sequence: Synthetic oligonucleotide
ugaaaaugagcaucagagaguguac

SEQ ID NO: 9634 - RNA, 25 nt, Artificial Sequence
  Description of Artificial Sequence: Synthetic oligonucleotide
uugcuuuucauguagaacucagcag

SEQ ID NO: 9635 - RNA, 25 nt, Artificial Sequence
  Description of Artificial Sequence: Synthetic oligonucleotide
uguauuucuauauuuauuuucagua

SEQ ID NO: 9636 - RNA, 25 nt, Artificial Sequence
  Description of Artificial Sequence: Synthetic oligonucleotide
uuugauuaauguuucuuaaauggaa

SEQ ID NO: 9637 - RNA, 25 nt, Artificial Sequence
  Description of Artificial Sequence: Synthetic oligonucleotide
caacguguauagugccuaaaauugu

SEQ ID NO: 9638 - RNA, 25 nt, Artificial Sequence
  Description of Artificial Sequence: Synthetic oligonucleotide
cauauccuuggcuacuaacaucugg

SEQ ID NO: 9639 - RNA, 25 nt, Artificial Sequence
  Description of Artificial Sequence: Synthetic oligonucleotide
uacuaacaucuggagacugugagcu

SEQ ID NO: 9640 - RNA, 25 nt, Artificial Sequence
  Description of Artificial Sequence: Synthetic oligonucleotide
cauaaguugugugcuuuuuauuaau

SEQ ID NO: 9641 - RNA, 25 nt, Artificial Sequence
  Description of Artificial Sequence: Synthetic oligonucleotide
gcaucauuuuggcucuucuuacauu

SEQ ID NO: 9642 - RNA, 25 nt, Artificial Sequence
  Description of Artificial Sequence: Synthetic oligonucleotide
gcucuucuuacauuuguaaaaaugu

SEQ ID NO: 9643 - RNA, 25 nt, Artificial Sequence
  Description of Artificial Sequence: Synthetic oligonucleotide
agauuaggucaucuuaauucauauu

SEQ ID NO: 9644 - RNA, 25 nt, Artificial Sequence
  Description of Artificial Sequence: Synthetic oligonucleotide
auggaauugaaagaacuaaucauga

SEQ ID NO: 9645 - RNA, 25 nt, Artificial Sequence
  Description of Artificial Sequence: Synthetic oligonucleotide
cacacucauuccuucugcucuuggg

SEQ ID NO: 9646 - RNA, 25 nt, Artificial Sequence
  Description of Artificial Sequence: Synthetic oligonucleotide
uguagagguaaccaguagcuuugag

SEQ ID NO: 9647 - RNA, 25 nt, Artificial Sequence
  Description of Artificial Sequence: Synthetic oligonucleotide
caaccacaugccacguaauauuuca

SEQ ID NO: 9648 - RNA, 25 nt, Artificial Sequence
  Description of Artificial Sequence: Synthetic oligonucleotide
ucggaaacaaguuauucucuucacu

SEQ ID NO: 9649 - RNA, 25 nt, Artificial Sequence
  Description of Artificial Sequence: Synthetic oligonucleotide
acucccaauaacuaaugcuaagaaa

SEQ ID NO: 9650 - RNA, 25 nt, Artificial Sequence
  Description of Artificial Sequence: Synthetic oligonucleotide
aaugcuaagaaaugcugaaaaucaa

SEQ ID NO: 9651 - RNA, 25 nt, Artificial Sequence
  Description of Artificial Sequence: Synthetic oligonucleotide
gucuuucucuaaauaugauuacuuu

SEQ ID NO: 9652 - RNA, 25 nt, Artificial Sequence
  Description of Artificial Sequence: Synthetic oligonucleotide
ugaauuucaggcauuuuguucuaca

SEQ ID NO: 9653 - RNA, 25 nt, Artificial Sequence
  Description of Artificial Sequence: Synthetic oligonucleotide
cgauucccucucacccgggacucuc

SEQ ID NO: 9654 - RNA, 25 nt, Artificial Sequence
  Description of Artificial Sequence: Synthetic oligonucleotide
aggaaagugaaccuuuaaaguaaag

SEQ ID NO: 9655 - RNA, 25 nt, Artificial Sequence
  Description of Artificial Sequence: Synthetic oligonucleotide
gaggcugcaugcucuggaagccugg

SEQ ID NO: 9656 - RNA, 25 nt, Artificial Sequence
  Description of Artificial Sequence: Synthetic oligonucleotide
ucucugaacagaaaacaaaagagag

SEQ ID NO: 9657 - RNA, 25 nt, Artificial Sequence
  Description of Artificial Sequence: Synthetic oligonucleotide
aacuuggcuguaaucaguuaugccg

SEQ ID NO: 9658 - RNA, 25 nt, Artificial Sequence
  Description of Artificial Sequence: Synthetic oligonucleotide
agaagccaaaauuaaaagaagucca

SEQ ID NO: 9659 - RNA, 25 nt, Artificial Sequence
  Description of Artificial Sequence: Synthetic oligonucleotide
auuaaaagaaguccaggugagguua

SEQ ID NO: 9660 - RNA, 25 nt, Artificial Sequence
  Description of Artificial Sequence: Synthetic oligonucleotide
gaauccggauuaucgggaagaggac

SEQ ID NO: 9661 - RNA, 25 nt, Artificial Sequence
  Description of Artificial Sequence: Synthetic oligonucleotide
aaugugacaucaaagcaaguauugu

SEQ ID NO: 9662 - RNA, 25 nt, Artificial Sequence
  Description of Artificial Sequence: Synthetic oligonucleotide
caucaaagcaaguauuguagcacuc

SEQ ID NO: 9663 - RNA, 25 nt, Artificial Sequence
  Description of Artificial Sequence: Synthetic oligonucleotide
agagagagaaaacaaaaccacaaau

SEQ ID NO: 9664 - RNA, 25 nt, Artificial Sequence
  Description of Artificial Sequence: Synthetic oligonucleotide
ucgcuguaguauuuaagcccauaca

SEQ ID NO: 9665 - RNA, 25 nt, Artificial Sequence
  Description of Artificial Sequence: Synthetic oligonucleotide
cgcuguaguauuuaagcccauacag

SEQ ID NO: 9666 - RNA, 25 nt, Artificial Sequence
  Description of Artificial Sequence: Synthetic oligonucleotide
auuuaagcccauacagaaaccuucc

SEQ ID NO: 9667 - RNA, 25 nt, Artificial Sequence
  Description of Artificial Sequence: Synthetic oligonucleotide
auuaaaauaaacaugguauaccuac

SEQ ID NO: 9668 - RNA, 25 nt, Artificial Sequence
  Description of Artificial Sequence: Synthetic oligonucleotide
cuguucugaucggccaguuuucgga

SEQ ID NO: 9669 - RNA, 25 nt, Artificial Sequence
  Description of Artificial Sequence: Synthetic oligonucleotide
aaauaauuugaacuuuggaacaggg

SEQ ID NO: 9670 - RNA, 25 nt, Artificial Sequence
  Description of Artificial Sequence: Synthetic oligonucleotide
ugcgaccuuaauuuaacuuuccagu

SEQ ID NO: 9671 - RNA, 25 nt, Artificial Sequence
  Description of Artificial Sequence: Synthetic oligonucleotide
cugagaaagcuaaaguuugguuuug

SEQ ID NO: 9672 - RNA, 25 nt, Artificial Sequence
  Description of Artificial Sequence: Synthetic oligonucleotide
aguaaagaugcuacuucccacugua

SEQ ID NO: 9673 - RNA, 25 nt, Artificial Sequence
  Description of Artificial Sequence: Synthetic oligonucleotide
cugcuuaauugcugauaccauauga

SEQ ID NO: 9674 - RNA, 25 nt, Artificial Sequence
  Description of Artificial Sequence: Synthetic oligonucleotide
uaccauaugaaugaaacaugggcug

SEQ ID NO: 9675 - RNA, 25 nt, Artificial Sequence
  Description of Artificial Sequence: Synthetic oligonucleotide
aacuuucuuauccaacuuuuucaua

SEQ ID NO: 9676 - RNA, 25 nt, Artificial Sequence
  Description of Artificial Sequence: Synthetic oligonucleotide
ccuugcaugacaucaugaggccgga

SEQ ID NO: 9677 - RNA, 25 nt, Artificial Sequence
  Description of Artificial Sequence: Synthetic oligonucleotide
ugaauuuguauaugacugcauuugu

SEQ ID NO: 9678 - RNA, 25 nt, Artificial Sequence
  Description of Artificial Sequence: Synthetic oligonucleotide
gaauccuaguagaauguuuacuacc

SEQ ID NO: 9679 - RNA, 25 nt, Artificial Sequence
  Description of Artificial Sequence: Synthetic oligonucleotide
gaaagggaagaauuuuuugaugaaa

SEQ ID NO: 9680 - RNA, 25 nt, Artificial Sequence
  Description of Artificial Sequence: Synthetic oligonucleotide
uaucggcaugccagugugugaauuu

SEQ ID NO: 9681 - RNA, 25 nt, Artificial Sequence
  Description of Artificial Sequence: Synthetic oligonucleotide
caccucauaguagagcaauguaugu

SEQ ID NO: 9682 - RNA, 25 nt, Artificial Sequence
  Description of Artificial Sequence: Synthetic oligonucleotide
ccagaauugccaaagcacauauaua

SEQ ID NO: 9683 - RNA, 25 nt, Artificial Sequence
  Description of Artificial Sequence: Synthetic oligonucleotide
uggugaucuggguaauaguuucucc

SEQ ID NO: 9684 - RNA, 25 nt, Artificial Sequence
  Description of Artificial Sequence: Synthetic oligonucleotide
gaucuggguaauaguuucuccaaau

SEQ ID NO: 9685 - RNA, 25 nt, Artificial Sequence
  Description of Artificial Sequence: Synthetic oligonucleotide
ggaugugaugaauacuuccuagaaa

SEQ ID NO: 9686 - RNA, 25 nt, Artificial Sequence
  Description of Artificial Sequence: Synthetic oligonucleotide
cauuuccacagcuacaccauauaug

SEQ ID NO: 9687 - RNA, 25 nt, Artificial Sequence
  Description of Artificial Sequence: Synthetic oligonucleotide
acagcuacaccauauaugaauggag

SEQ ID NO: 9688 - RNA, 25 nt, Artificial Sequence
  Description of Artificial Sequence: Synthetic oligonucleotide
ugcaguucuuacacgagaagaagau

SEQ ID NO: 9689 - RNA, 25 nt, Artificial Sequence
  Description of Artificial Sequence: Synthetic oligonucleotide
acgagaagaagaucauuuacaggga

SEQ ID NO: 9690 - RNA, 25 nt, Artificial Sequence
  Description of Artificial Sequence: Synthetic oligonucleotide
cgagaagaagaucauuuacagggac

SEQ ID NO: 9691 - RNA, 25 nt, Artificial Sequence
  Description of Artificial Sequence: Synthetic oligonucleotide
aagaagaucauuuacagggaccuga

SEQ ID NO: 9692 - RNA, 25 nt, Artificial Sequence
  Description of Artificial Sequence: Synthetic oligonucleotide
agaggaagagguguuugacugcauc

SEQ ID NO: 9693 - RNA, 25 nt, Artificial Sequence
  Description of Artificial Sequence: Synthetic oligonucleotide
gaggaagagguguuugacugcaucg

SEQ ID NO: 9694 - RNA, 25 nt, Artificial Sequence
  Description of Artificial Sequence: Synthetic oligonucleotide
cuacuuugagggcgaguucacaggg

SEQ ID NO: 9695 - RNA, 25 nt, Artificial Sequence
  Description of Artificial Sequence: Synthetic oligonucleotide
agggcaucuccuggcaccucugucc

SEQ ID NO: 9696 - RNA, 25 nt, Artificial Sequence
  Description of Artificial Sequence: Synthetic oligonucleotide
ggagugauaugguuugucuuuuuaa

SEQ ID NO: 9697 - RNA, 25 nt, Artificial Sequence
  Description of Artificial Sequence: Synthetic oligonucleotide
gagugauaugguuugucuuuuuaag

SEQ ID NO: 9698 - RNA, 25 nt, Artificial Sequence
  Description of Artificial Sequence: Synthetic oligonucleotide
ugcaguaaagauccuaaagguuguc

SEQ ID NO: 9699 - RNA, 25 nt, Artificial Sequence
  Description of Artificial Sequence: Synthetic oligonucleotide
aguaaagauccuaaagguugucgac

SEQ ID NO: 9700 - RNA, 25 nt, Artificial Sequence
  Description of Artificial Sequence: Synthetic oligonucleotide
ugacaaaggacaaccuggcaauugu

SEQ ID NO: 9701 - RNA, 25 nt, Artificial Sequence
  Description of Artificial Sequence: Synthetic oligonucleotide
gcaauugugacccaguggugcgagg

SEQ ID NO: 9702 - RNA, 25 nt, Artificial Sequence
  Description of Artificial Sequence: Synthetic oligonucleotide
aacaucauccauagagacaugaaau

SEQ ID NO: 9703 - RNA, 25 nt, Artificial Sequence
  Description of Artificial Sequence: Synthetic oligonucleotide
ugaaauccaacaauauauuucucca

SEQ ID NO: 9704 - RNA, 25 nt, Artificial Sequence
  Description of Artificial Sequence: Synthetic oligonucleotide
aacaauauauuucuccaugaaggcu

SEQ ID NO: 9705 - RNA, 25 nt, Artificial Sequence
  Description of Artificial Sequence: Synthetic oligonucleotide
aacaguaaagucacgcuggaguggu

SEQ ID NO: 9706 - RNA, 25 nt, Artificial Sequence
  Description of Artificial Sequence: Synthetic oligonucleotide
ugugaagaaaguaaaggaagagagg

SEQ ID NO: 9707 - RNA, 25 nt, Artificial Sequence
  Description of Artificial Sequence: Synthetic oligonucleotide
cuuccgagccauccuugcaucgggc

SEQ ID NO: 9708 - RNA, 25 nt, Artificial Sequence
  Description of Artificial Sequence: Synthetic oligonucleotide
aauggagguugaauauccuacugug

SEQ ID NO: 9709 - RNA, 25 nt, Artificial Sequence
  Description of Artificial Sequence: Synthetic oligonucleotide
ggagguugaauauccuacuguguaa

SEQ ID NO: 9710 - RNA, 25 nt, Artificial Sequence
  Description of Artificial Sequence: Synthetic oligonucleotide
auuuugaguuuucccuuguagugua

SEQ ID NO: 9711 - RNA, 25 nt, Artificial Sequence
  Description of Artificial Sequence: Synthetic oligonucleotide
uauccuguuuguucuuuguugauug

SEQ ID NO: 9712 - RNA, 25 nt, Artificial Sequence
  Description of Artificial Sequence: Synthetic oligonucleotide
ccuguuuguucuuuguugauugaaa

SEQ ID NO: 9713 - RNA, 25 nt, Artificial Sequence
  Description of Artificial Sequence: Synthetic oligonucleotide
cucuacagccuucuuuuucuuccau

SEQ ID NO: 9714 - RNA, 25 nt, Artificial Sequence
  Description of Artificial Sequence: Synthetic oligonucleotide
ucuuccauagcuaaucuuccuucua

SEQ ID NO: 9715 - RNA, 25 nt, Artificial Sequence
  Description of Artificial Sequence: Synthetic oligonucleotide
auaaucuuccuguugaaugcuucau

SEQ ID NO: 9716 - RNA, 25 nt, Artificial Sequence
  Description of Artificial Sequence: Synthetic oligonucleotide
uaaucuuccuguugaaugcuucaug

SEQ ID NO: 9717 - RNA, 25 nt, Artificial Sequence
  Description of Artificial Sequence: Synthetic oligonucleotide
cuucaugacuugaauucuacuuuga

SEQ ID NO: 9718 - RNA, 25 nt, Artificial Sequence
  Description of Artificial Sequence: Synthetic oligonucleotide
aagagggagagaagcaacuacagac

SEQ ID NO: 9719 - RNA, 25 nt, Artificial Sequence
  Description of Artificial Sequence: Synthetic oligonucleotide
cgucuccuaccagaccaaggucaac

SEQ ID NO: 9720 - RNA, 25 nt, Artificial Sequence
  Description of Artificial Sequence: Synthetic oligonucleotide
gaucaaucggcccgacuaucucgac

SEQ ID NO: 9721 - RNA, 25 nt, Artificial Sequence
  Description of Artificial Sequence: Synthetic oligonucleotide
ggacgaacauccaaccuucccaaac

SEQ ID NO: 9722 - RNA, 25 nt, Artificial Sequence
  Description of Artificial Sequence: Synthetic oligonucleotide
agggucggaacccaagcuuagaacu

SEQ ID NO: 9723 - RNA, 25 nt, Artificial Sequence
  Description of Artificial Sequence: Synthetic oligonucleotide
ucggaacccaagcuuagaacuuuaa

SEQ ID NO: 9724 - RNA, 25 nt, Artificial Sequence
  Description of Artificial Sequence: Synthetic oligonucleotide
acccaagcuuagaacuuuaagcaac

SEQ ID NO: 9725 - RNA, 25 nt, Artificial Sequence
  Description of Artificial Sequence: Synthetic oligonucleotide
gaacuuuaagcaacaagaccaccac

SEQ ID NO: 9726 - RNA, 25 nt, Artificial Sequence
  Description of Artificial Sequence: Synthetic oligonucleotide
acuauucaguggcgagaaauaaagu

SEQ ID NO: 9727 - RNA, 25 nt, Artificial Sequence
  Description of Artificial Sequence: Synthetic oligonucleotide
cuauucaguggcgagaaauaaaguu

SEQ ID NO: 9728 - RNA, 25 nt, Artificial Sequence
  Description of Artificial Sequence: Synthetic oligonucleotide
aaacacagauaacaggaaaugaucc

SEQ ID NO: 9729 - RNA, 25 nt, Artificial Sequence
  Description of Artificial Sequence: Synthetic oligonucleotide
cuuaagaaaagagaagaaaugaaac

SEQ ID NO: 9730 - RNA, 25 nt, Artificial Sequence
  Description of Artificial Sequence: Synthetic oligonucleotide
cugaaggaguguguuuccauccucc

SEQ ID NO: 9731 - RNA, 25 nt, Artificial Sequence
  Description of Artificial Sequence: Synthetic oligonucleotide
ucaccgcgggacugaaaaucuuuga

SEQ ID NO: 9732 - RNA, 25 nt, Artificial Sequence
  Description of Artificial Sequence: Synthetic oligonucleotide
agcagaaauaagcgugccguucagg

SEQ ID NO: 9733 - RNA, 25 nt, Artificial Sequence
  Description of Artificial Sequence: Synthetic oligonucleotide
aagcgugccguucaggguccagaag

SEQ ID NO: 9734 - RNA, 25 nt, Artificial Sequence
  Description of Artificial Sequence: Synthetic oligonucleotide
agaaacagucacucaagacugcuug

SEQ ID NO: 9735 - RNA, 25 nt, Artificial Sequence
  Description of Artificial Sequence: Synthetic oligonucleotide
agaggaagaagguccaugucuuugg

SEQ ID NO: 9736 - RNA, 25 nt, Artificial Sequence
  Description of Artificial Sequence: Synthetic oligonucleotide
uguauucaaaauaugccugaaacac

SEQ ID NO: 9737 - RNA, 25 nt, Artificial Sequence
  Description of Artificial Sequence: Synthetic oligonucleotide
auuuuccucccuuucucuguaccuc

SEQ ID NO: 9738 - RNA, 25 nt, Artificial Sequence
  Description of Artificial Sequence: Synthetic oligonucleotide
caaagaaagauagagcaagacaaga

SEQ ID NO: 9739 - RNA, 25 nt, Artificial Sequence
  Description of Artificial Sequence: Synthetic oligonucleotide
aagaaagauagagcaagacaagaaa

SEQ ID NO: 9740 - RNA, 25 nt, Artificial Sequence
  Description of Artificial Sequence: Synthetic oligonucleotide
gaaagcauuuguuuguacaagaucc

SEQ ID NO: 9741 - RNA, 25 nt, Artificial Sequence
  Description of Artificial Sequence: Synthetic oligonucleotide
ugaguuaaacgaacguacuugcaga

SEQ ID NO: 9742 - RNA, 25 nt, Artificial Sequence
  Description of Artificial Sequence: Synthetic oligonucleotide
acugauacagaacgaucgauacaga

SEQ ID NO: 9743 - RNA, 25 nt, Artificial Sequence
  Description of Artificial Sequence: Synthetic oligonucleotide
auauuauauauauauaaaaauaaau

SEQ ID NO: 9744 - RNA, 25 nt, Artificial Sequence
  Description of Artificial Sequence: Synthetic oligonucleotide
auuauauauauauaaaaauaaauau

SEQ ID NO: 9745 - RNA, 25 nt, Artificial Sequence
  Description of Artificial Sequence: Synthetic oligonucleotide
ucacuggauguauuugacugcugug

SEQ ID NO: 9746 - RNA, 25 nt, Artificial Sequence
  Description of Artificial Sequence: Synthetic oligonucleotide
cagggaagaggaggagaugagagac

SEQ ID NO: 9747 - RNA, 25 nt, Artificial Sequence
  Description of Artificial Sequence: Synthetic oligonucleotide
augaucuuuuuuuugucccacuugg

SEQ ID NO: 9748 - RNA, 27 nt, Artificial Sequence
  Description of Artificial Sequence: Synthetic oligonucleotide
ggccgugaacuccucaucaaaauaccu

SEQ ID NO: 9749 - RNA, 27 nt, Artificial Sequence
  Description of Artificial Sequence: Synthetic oligonucleotide
uggugugauggugaucaucugggccgu

SEQ ID NO: 9750 - RNA, 27 nt, Artificial Sequence
  Description of Artificial Sequence: Synthetic oligonucleotide
aaacccgcaggauaguuuucuucccua

SEQ ID NO: 9751 - RNA, 27 nt, Artificial Sequence
  Description of Artificial Sequence: Synthetic oligonucleotide
caaacuggaugaaauaaauuaaaaccc

SEQ ID NO: 9752 - RNA, 27 nt, Artificial Sequence
  Description of Artificial Sequence: Synthetic oligonucleotide
agaaguccuuaacauuucccuacguga

SEQ ID NO: 9753 - RNA, 27 nt, Artificial Sequence
  Description of Artificial Sequence: Synthetic oligonucleotide
cucugucccacuggguaaacccuggcc

SEQ ID NO: 9754 - RNA, 27 nt, Artificial Sequence
  Description of Artificial Sequence: Synthetic oligonucleotide
cacaauaacaaauuuaaaccuugcucc

SEQ ID NO: 9755 - RNA, 27 nt, Artificial Sequence
  Description of Artificial Sequence: Synthetic oligonucleotide
aaaugcauuugaacaacauaauacaca

SEQ ID NO: 9756 - RNA, 27 nt, Artificial Sequence
  Description of Artificial Sequence: Synthetic oligonucleotide
ggcuuuccugucacaaagauuaaaaac

SEQ ID NO: 9757 - RNA, 27 nt, Artificial Sequence
  Description of Artificial Sequence: Synthetic oligonucleotide
agggcuuuccugucacaaagauuaaaa

SEQ ID NO: 9758 - RNA, 27 nt, Artificial Sequence
  Description of Artificial Sequence: Synthetic oligonucleotide
ggccaugcugggagacauaagcagcag

SEQ ID NO: 9759 - RNA, 27 nt, Artificial Sequence
  Description of Artificial Sequence: Synthetic oligonucleotide
ucagggagaagcuucugaaacacuucu

SEQ ID NO: 9760 - RNA, 27 nt, Artificial Sequence
  Description of Artificial Sequence: Synthetic oligonucleotide
aagggcuucuuccuuauugauggucag

SEQ ID NO: 9761 - RNA, 27 nt, Artificial Sequence
  Description of Artificial Sequence: Synthetic oligonucleotide
ugaagggcuucuuccuuauugaugguc

SEQ ID NO: 9762 - RNA, 27 nt, Artificial Sequence
  Description of Artificial Sequence: Synthetic oligonucleotide
cgcugaagggcuucuuccuuauugaug

SEQ ID NO: 9763 - RNA, 27 nt, Artificial Sequence
  Description of Artificial Sequence: Synthetic oligonucleotide
gccgcugaagggcuucuuccuuauuga

SEQ ID NO: 9764 - RNA, 27 nt, Artificial Sequence
  Description of Artificial Sequence: Synthetic oligonucleotide
acuggccgcugaagggcuucuuccuua

SEQ ID NO: 9765 - RNA, 27 nt, Artificial Sequence
  Description of Artificial Sequence: Synthetic oligonucleotide
cggagcuuuucaccuuuaguuaugcuu

SEQ ID NO: 9766 - RNA, 27 nt, Artificial Sequence
  Description of Artificial Sequence: Synthetic oligonucleotide
ccggagcuuuucaccuuuaguuaugcu

SEQ ID NO: 9767 - RNA, 27 nt, Artificial Sequence
  Description of Artificial Sequence: Synthetic oligonucleotide
cagacuguugacuggcgugauguaguu

SEQ ID NO: 9768 - RNA, 27 nt, Artificial Sequence
  Description of Artificial Sequence: Synthetic oligonucleotide
cuuuugaacucugcuuaaauccagugg

SEQ ID NO: 9769 - RNA, 27 nt, Artificial Sequence
  Description of Artificial Sequence: Synthetic oligonucleotide
gcuuuugaacucugcuuaaauccagug

SEQ ID NO: 9770 - RNA, 27 nt, Artificial Sequence
  Description of Artificial Sequence: Synthetic oligonucleotide
agggcuuuugaacucugcuuaaaucca

SEQ ID NO: 9771 - RNA, 27 nt, Artificial Sequence
  Description of Artificial Sequence: Synthetic oligonucleotide
aagggcuuuugaacucugcuuaaaucc

SEQ ID NO: 9772 - RNA, 27 nt, Artificial Sequence
  Description of Artificial Sequence: Synthetic oligonucleotide
ugaagggcuuuugaacucugcuuaaau

SEQ ID NO: 9773 - RNA, 27 nt, Artificial Sequence
  Description of Artificial Sequence: Synthetic oligonucleotide
cugaagggcuuuugaacucugcuuaaa

SEQ ID NO: 9774 - RNA, 27 nt, Artificial Sequence
  Description of Artificial Sequence: Synthetic oligonucleotide
cgcugaagggcuuuugaacucugcuua

SEQ ID NO: 9775 - RNA, 27 nt, Artificial Sequence
  Description of Artificial Sequence: Synthetic oligonucleotide
cgagcggcuucacucagacccugaggc

SEQ ID NO: 9776 - RNA, 27 nt, Artificial Sequence
  Description of Artificial Sequence: Synthetic oligonucleotide
uugacuggcgugauguaguugcuuggg

SEQ ID NO: 9777 - RNA, 27 nt, Artificial Sequence
  Description of Artificial Sequence: Synthetic oligonucleotide
cacgcaccaagaagcugccauugaucc

SEQ ID NO: 9778 - RNA, 27 nt, Artificial Sequence
  Description of Artificial Sequence: Synthetic oligonucleotide
cugaugaauccaaugugggcuggaauc

SEQ ID NO: 9779 - RNA, 27 nt, Artificial Sequence
  Description of Artificial Sequence: Synthetic oligonucleotide
cuuagguauuccacauucucagcugug

SEQ ID NO: 9780 - RNA, 27 nt, Artificial Sequence
  Description of Artificial Sequence: Synthetic oligonucleotide
ugagccucaaauuaggagauacguuuu

SEQ ID NO: 9781 - RNA, 27 nt, Artificial Sequence
  Description of Artificial Sequence: Synthetic oligonucleotide
ccaauuguagagaaauuauuuuaggaa

SEQ ID NO: 9782 - RNA, 27 nt, Artificial Sequence
  Description of Artificial Sequence: Synthetic oligonucleotide
ggcuccuaacuagcugaaucuuccaau

SEQ ID NO: 9783 - RNA, 27 nt, Artificial Sequence
  Description of Artificial Sequence: Synthetic oligonucleotide
guggauauugacuaggagaguuuaaaa

SEQ ID NO: 9784 - RNA, 27 nt, Artificial Sequence
  Description of Artificial Sequence: Synthetic oligonucleotide
ugugacugaacauaacuguaggcugaa

SEQ ID NO: 9785 - RNA, 27 nt, Artificial Sequence
  Description of Artificial Sequence: Synthetic oligonucleotide
guaugugugugugacugaacauaacug

SEQ ID NO: 9786 - RNA, 27 nt, Artificial Sequence
  Description of Artificial Sequence: Synthetic oligonucleotide
aagcaaaaggaacauuuuguaugugug

SEQ ID NO: 9787 - RNA, 27 nt, Artificial Sequence
  Description of Artificial Sequence: Synthetic oligonucleotide
aaaaauuacuuuaaaagcaaaaggaac

SEQ ID NO: 9788 - RNA, 27 nt, Artificial Sequence
  Description of Artificial Sequence: Synthetic oligonucleotide
ccauugacuguugcuucacaggucaga

SEQ ID NO: 9789 - RNA, 27 nt, Artificial Sequence
  Description of Artificial Sequence: Synthetic oligonucleotide
auugguuugucgaugugugagauaguu

SEQ ID NO: 9790 - RNA, 27 nt, Artificial Sequence
  Description of Artificial Sequence: Synthetic oligonucleotide
agugguagcaguacaauugaggacaag

SEQ ID NO: 9791 - RNA, 27 nt, Artificial Sequence
  Description of Artificial Sequence: Synthetic oligonucleotide
uaagaccgcuugccagcuacgguuuca

SEQ ID NO: 9792 - RNA, 27 nt, Artificial Sequence
  Description of Artificial Sequence: Synthetic oligonucleotide
agccgguaagaccgcuugccagcuacg

SEQ ID NO: 9793 - RNA, 27 nt, Artificial Sequence
  Description of Artificial Sequence: Synthetic oligonucleotide
gguaacccaucuuuuaaccauacaacu

SEQ ID NO: 9794 - RNA, 27 nt, Artificial Sequence
  Description of Artificial Sequence: Synthetic oligonucleotide
ucgcagguaacccaucuuuuaaccaua

SEQ ID NO: 9795 - RNA, 27 nt, Artificial Sequence
  Description of Artificial Sequence: Synthetic oligonucleotide
cucagcaagauuguauaauucccugca

SEQ ID NO: 9796 - RNA, 27 nt, Artificial Sequence
  Description of Artificial Sequence: Synthetic oligonucleotide
acuguuuuaugcucagcaagauuguau

SEQ ID NO: 9797 - RNA, 27 nt, Artificial Sequence
  Description of Artificial Sequence: Synthetic oligonucleotide
aggauaaaggacucuucauuauuggaa

SEQ ID NO: 9798 - RNA, 27 nt, Artificial Sequence
  Description of Artificial Sequence: Synthetic oligonucleotide
caacuugcguuggaacauccaaagugu

SEQ ID NO: 9799 - RNA, 27 nt, Artificial Sequence
  Description of Artificial Sequence: Synthetic oligonucleotide
augguuucaguuuaguggaagcauuua

SEQ ID NO: 9800 - RNA, 27 nt, Artificial Sequence
  Description of Artificial Sequence: Synthetic oligonucleotide
auauuuaacaaagucaaacuuucucac

SEQ ID NO: 9801 - RNA, 27 nt, Artificial Sequence
  Description of Artificial Sequence: Synthetic oligonucleotide
aacuuuuaauauacaguaguucuuuuc

SEQ ID NO: 9802 - RNA, 27 nt, Artificial Sequence
  Description of Artificial Sequence: Synthetic oligonucleotide
guuaagucaaaacccguauuucuaaag

SEQ ID NO: 9803 - RNA, 27 nt, Artificial Sequence
  Description of Artificial Sequence: Synthetic oligonucleotide
gugcugaguuugcuguacccauguuga

SEQ ID NO: 9804 - RNA, 27 nt, Artificial Sequence
  Description of Artificial Sequence: Synthetic oligonucleotide
ugaggucagcaucuucugugucuuuac

SEQ ID NO: 9805 - RNA, 27 nt, Artificial Sequence
  Description of Artificial Sequence: Synthetic oligonucleotide
gcgaucugaauaaaccucccuacuagc

SEQ ID NO: 9806 - RNA, 27 nt, Artificial Sequence
  Description of Artificial Sequence: Synthetic oligonucleotide
aucccagaacccugcugcagaaggcca

SEQ ID NO: 9807 - RNA, 27 nt, Artificial Sequence
  Description of Artificial Sequence: Synthetic oligonucleotide
cauaauuuccaauauguaccagaccuu

SEQ ID NO: 9808 - RNA, 27 nt, Artificial Sequence
  Description of Artificial Sequence: Synthetic oligonucleotide
cuagugcuuccaucggaaggacuaggu

SEQ ID NO: 9809 - RNA, 27 nt, Artificial Sequence
  Description of Artificial Sequence: Synthetic oligonucleotide
uccacauaaaaacaauauucacuggga

SEQ ID NO: 9810 - RNA, 27 nt, Artificial Sequence
  Description of Artificial Sequence: Synthetic oligonucleotide
ucuaccaauuccaacuugaauucauug

SEQ ID NO: 9811 - RNA, 27 nt, Artificial Sequence
  Description of Artificial Sequence: Synthetic oligonucleotide
ucuccaagucuaaaucuguguccugag

SEQ ID NO: 9812 - RNA, 27 nt, Artificial Sequence
  Description of Artificial Sequence: Synthetic oligonucleotide
uggaauacuguaacugugcuuugagga

SEQ ID NO: 9813 - RNA, 27 nt, Artificial Sequence
  Description of Artificial Sequence: Synthetic oligonucleotide
uuaauucaucagugguggcagugguag

SEQ ID NO: 9814 - RNA, 27 nt, Artificial Sequence
  Description of Artificial Sequence: Synthetic oligonucleotide
gugaugauguggcacuaguaguuucuu

SEQ ID NO: 9815 - RNA, 27 nt, Artificial Sequence
  Description of Artificial Sequence: Synthetic oligonucleotide
ucuguuuggugaggcuguccgacuuug

SEQ ID NO: 9816 - RNA, 27 nt, Artificial Sequence
  Description of Artificial Sequence: Synthetic oligonucleotide
ccaucauguuccauuuuucgcuuucuc

SEQ ID NO: 9817 - RNA, 27 nt, Artificial Sequence
  Description of Artificial Sequence: Synthetic oligonucleotide
gcagucuacaugcuaaaucagagggua

SEQ ID NO: 9818 - RNA, 27 nt, Artificial Sequence
  Description of Artificial Sequence: Synthetic oligonucleotide
cauaaauagauccuuaaauagcucaaa

SEQ ID NO: 9819 - RNA, 27 nt, Artificial Sequence
  Description of Artificial Sequence: Synthetic oligonucleotide
ugauaauagugcuuuuucaccuuuuuc

SEQ ID NO: 9820 - RNA, 27 nt, Artificial Sequence
  Description of Artificial Sequence: Synthetic oligonucleotide
gcagaacugauaauagugcuuuuucac

SEQ ID NO: 9821 - RNA, 27 nt, Artificial Sequence
  Description of Artificial Sequence: Synthetic oligonucleotide
guagguuuaaucuuucuuuucagccau

SEQ ID NO: 9822 - RNA, 27 nt, Artificial Sequence
  Description of Artificial Sequence: Synthetic oligonucleotide
agaaggauuuuauuauaaggguuuaau

SEQ ID NO: 9823 - RNA, 27 nt, Artificial Sequence
  Description of Artificial Sequence: Synthetic oligonucleotide
gucuacagcauuggcuaauaguaugaa

SEQ ID NO: 9824 - RNA, 27 nt, Artificial Sequence
  Description of Artificial Sequence: Synthetic oligonucleotide
cuauuccuaucaaaaugcuucugucua

SEQ ID NO: 9825 - RNA, 27 nt, Artificial Sequence
  Description of Artificial Sequence: Synthetic oligonucleotide
ucagggccauuaucuuauuugcucuau

SEQ ID NO: 9826 - RNA, 27 nt, Artificial Sequence
  Description of Artificial Sequence: Synthetic oligonucleotide
ugcuugaggaagagaaaaauguugguc

SEQ ID NO: 9827 - RNA, 27 nt, Artificial Sequence
  Description of Artificial Sequence: Synthetic oligonucleotide
ugggcugaacuuuucucauacuuaaag

SEQ ID NO: 9828 - RNA, 27 nt, Artificial Sequence
  Description of Artificial Sequence: Synthetic oligonucleotide
gguucagcagccaucuuuauuccugcg

SEQ ID NO: 9829 - RNA, 27 nt, Artificial Sequence
  Description of Artificial Sequence: Synthetic oligonucleotide
ugaagagaacuuggucauucaaauuuc

SEQ ID NO: 9830 - RNA, 27 nt, Artificial Sequence
  Description of Artificial Sequence: Synthetic oligonucleotide
cucuaggcuggcuaucuuuauacauac

SEQ ID NO: 9831 - RNA, 27 nt, Artificial Sequence
  Description of Artificial Sequence: Synthetic oligonucleotide
acacuucacagagauaguuacagccau

SEQ ID NO: 9832 - RNA, 27 nt, Artificial Sequence
  Description of Artificial Sequence: Synthetic oligonucleotide
uugaaauuuucucacacuucacagaga

SEQ ID NO: 9833 - RNA, 27 nt, Artificial Sequence
  Description of Artificial Sequence: Synthetic oligonucleotide
ucaggaggauucauuuccuuaaaggaa

SEQ ID NO: 9834 - RNA, 27 nt, Artificial Sequence
  Description of Artificial Sequence: Synthetic oligonucleotide
auaugaugucacuuuuuguauccuuga

SEQ ID NO: 9835 - RNA, 27 nt, Artificial Sequence
  Description of Artificial Sequence: Synthetic oligonucleotide
uaugaugaagauucaaauugcaucuua

SEQ ID NO: 9836 - RNA, 27 nt, Artificial Sequence
  Description of Artificial Sequence: Synthetic oligonucleotide
uuaauagcuagucuucguuuugaacag

SEQ ID NO: 9837 - RNA, 27 nt, Artificial Sequence
  Description of Artificial Sequence: Synthetic oligonucleotide
auuuuuaguagagaugagguuucacca

SEQ ID NO: 9838 - RNA, 27 nt, Artificial Sequence
  Description of Artificial Sequence: Synthetic oligonucleotide
aggcgagauagagcuucucuuucguuc

SEQ ID NO: 9839 - RNA, 27 nt, Artificial Sequence
  Description of Artificial Sequence: Synthetic oligonucleotide
aacuggaccgaaggcgcuuguggagaa

SEQ ID NO: 9840 - RNA, 27 nt, Artificial Sequence
  Description of Artificial Sequence: Synthetic oligonucleotide
gcggcuacaucuuuggaaucuucuccu

SEQ ID NO: 9841 - RNA, 27 nt, Artificial Sequence
  Description of Artificial Sequence: Synthetic oligonucleotide
caagucuccucauugaauccagauugg

SEQ ID NO: 9842 - RNA, 27 nt, Artificial Sequence
  Description of Artificial Sequence: Synthetic oligonucleotide
uccucacuacucucaaaucuguucugg

SEQ ID NO: 9843 - RNA, 27 nt, Artificial Sequence
  Description of Artificial Sequence: Synthetic oligonucleotide
uuuguacucaucugcacagcucuggcu

SEQ ID NO: 9844 - RNA, 27 nt, Artificial Sequence
  Description of Artificial Sequence: Synthetic oligonucleotide
gcccauuaacaacaacaaucugaggug

SEQ ID NO: 9845 - RNA, 27 nt, Artificial Sequence
  Description of Artificial Sequence: Synthetic oligonucleotide
aauaaauuaaaaauaauuaaaauagug

SEQ ID NO: 9846 - RNA, 27 nt, Artificial Sequence
  Description of Artificial Sequence: Synthetic oligonucleotide
cauauuuaaauauuaauaaauuaaaaa

SEQ ID NO: 9847 - RNA, 27 nt, Artificial Sequence
  Description of Artificial Sequence: Synthetic oligonucleotide
gaaacaaaggauauucaaacugcauag

SEQ ID NO: 9848 - RNA, 27 nt, Artificial Sequence
  Description of Artificial Sequence: Synthetic oligonucleotide
caaacacuuagacgccagcagcauggg

SEQ ID NO: 9849 - RNA, 27 nt, Artificial Sequence
  Description of Artificial Sequence: Synthetic oligonucleotide
uuugucacaggugaaaugcacaucuga

SEQ ID NO: 9850 - RNA, 27 nt, Artificial Sequence
  Description of Artificial Sequence: Synthetic oligonucleotide
uaauucagccuggcacagguuuugauc

SEQ ID NO: 9851 - RNA, 27 nt, Artificial Sequence
  Description of Artificial Sequence: Synthetic oligonucleotide
auuguaagaaugacuacccacauucac

SEQ ID NO: 9852 - RNA, 27 nt, Artificial Sequence
  Description of Artificial Sequence: Synthetic oligonucleotide
caauuguaagaaugacuacccacauuc

SEQ ID NO: 9853 - RNA, 27 nt, Artificial Sequence
  Description of Artificial Sequence: Synthetic oligonucleotide
guacacucucugaugcucauuuucaua

SEQ ID NO: 9854 - RNA, 27 nt, Artificial Sequence
  Description of Artificial Sequence: Synthetic oligonucleotide
cugcugaguucuacaugaaaagcaaau

SEQ ID NO: 9855 - RNA, 27 nt, Artificial Sequence
  Description of Artificial Sequence: Synthetic oligonucleotide
uacugaaaauaaauauagaaauacaac

SEQ ID NO: 9856 - RNA, 27 nt, Artificial Sequence
  Description of Artificial Sequence: Synthetic oligonucleotide
uuccauuuaagaaacauuaaucaaaac

SEQ ID NO: 9857 - RNA, 27 nt, Artificial Sequence
  Description of Artificial Sequence: Synthetic oligonucleotide
acaauuuuaggcacuauacacguuguu

SEQ ID NO: 9858 - RNA, 27 nt, Artificial Sequence
  Description of Artificial Sequence: Synthetic oligonucleotide
ccagauguuaguagccaaggauauggu

SEQ ID NO: 9859 - RNA, 27 nt, Artificial Sequence
  Description of Artificial Sequence: Synthetic oligonucleotide
agcucacagucuccagauguuaguagc

SEQ ID NO: 9860 - RNA, 27 nt, Artificial Sequence
  Description of Artificial Sequence: Synthetic oligonucleotide
auuaauaaaaagcacacaacuuauggc

SEQ ID NO: 9861 - RNA, 27 nt, Artificial Sequence
  Description of Artificial Sequence: Synthetic oligonucleotide
aauguaagaagagccaaaaugaugcau

SEQ ID NO: 9862 - RNA, 27 nt, Artificial Sequence
  Description of Artificial Sequence: Synthetic oligonucleotide
acauuuuuacaaauguaagaagagcca

SEQ ID NO: 9863 - RNA, 27 nt, Artificial Sequence
  Description of Artificial Sequence: Synthetic oligonucleotide
aauaugaauuaagaugaccuaaucugu

SEQ ID NO: 9864 - RNA, 27 nt, Artificial Sequence
  Description of Artificial Sequence: Synthetic oligonucleotide
ucaugauuaguucuuucaauuccaucc

SEQ ID NO: 9865 - RNA, 27 nt, Artificial Sequence
  Description of Artificial Sequence: Synthetic oligonucleotide
cccaagagcagaaggaaugagugugca

SEQ ID NO: 9866 - RNA, 27 nt, Artificial Sequence
  Description of Artificial Sequence: Synthetic oligonucleotide
cucaaagcuacugguuaccucuacacc

SEQ ID NO: 9867 - RNA, 27 nt, Artificial Sequence
  Description of Artificial Sequence: Synthetic oligonucleotide
ugaaauauuacguggcaugugguuggg

SEQ ID NO: 9868 - RNA, 27 nt, Artificial Sequence
  Description of Artificial Sequence: Synthetic oligonucleotide
agugaagagaauaacuuguuuccgaag

SEQ ID NO: 9869 - RNA, 27 nt, Artificial Sequence
  Description of Artificial Sequence: Synthetic oligonucleotide
uuucuuagcauuaguuauugggaguga

SEQ ID NO: 9870 - RNA, 27 nt, Artificial Sequence
  Description of Artificial Sequence: Synthetic oligonucleotide
uugauuuucagcauuucuuagcauuag

SEQ ID NO: 9871 - RNA, 27 nt, Artificial Sequence
  Description of Artificial Sequence: Synthetic oligonucleotide
aaaguaaucauauuuagagaaagacag

SEQ ID NO: 9872 - RNA, 27 nt, Artificial Sequence
  Description of Artificial Sequence: Synthetic oligonucleotide
uguagaacaaaaugccugaaauucagc

SEQ ID NO: 9873 - RNA, 27 nt, Artificial Sequence
  Description of Artificial Sequence: Synthetic oligonucleotide
gagagucccgggugagagggaaucgcc

SEQ ID NO: 9874 - RNA, 27 nt, Artificial Sequence
  Description of Artificial Sequence: Synthetic oligonucleotide
cuuuacuuuaaagguucacuuuccuug

SEQ ID NO: 9875 - RNA, 27 nt, Artificial Sequence
  Description of Artificial Sequence: Synthetic oligonucleotide
ccaggcuuccagagcaugcagccuccu

SEQ ID NO: 9876 - RNA, 27 nt, Artificial Sequence
  Description of Artificial Sequence: Synthetic oligonucleotide
cucucuuuuguuuucuguucagagaaa

SEQ ID NO: 9877 - RNA, 27 nt, Artificial Sequence
  Description of Artificial Sequence: Synthetic oligonucleotide
cggcauaacugauuacagccaaguuca

SEQ ID NO: 9878 - RNA, 27 nt, Artificial Sequence
  Description of Artificial Sequence: Synthetic oligonucleotide
uggacuucuuuuaauuuuggcuucuuc

SEQ ID NO: 9879 - RNA, 27 nt, Artificial Sequence
  Description of Artificial Sequence: Synthetic oligonucleotide
uaaccucaccuggacuucuuuuaauuu

SEQ ID NO: 9880 - RNA, 27 nt, Artificial Sequence
  Description of Artificial Sequence: Synthetic oligonucleotide
guccucuucccgauaauccggauucag

SEQ ID NO: 9881 - RNA, 27 nt, Artificial Sequence
  Description of Artificial Sequence: Synthetic oligonucleotide
acaauacuugcuuugaugucacauuaa

SEQ ID NO: 9882 - RNA, 27 nt, Artificial Sequence
  Description of Artificial Sequence: Synthetic oligonucleotide
gagugcuacaauacuugcuuugauguc

SEQ ID NO: 9883 - RNA, 27 nt, Artificial Sequence
  Description of Artificial Sequence: Synthetic oligonucleotide
auuugugguuuuguuuucucucucucu

SEQ ID NO: 9884 - RNA, 27 nt, Artificial Sequence
  Description of Artificial Sequence: Synthetic oligonucleotide
uguaugggcuuaaauacuacagcgagg

SEQ ID NO: 9885 - RNA, 27 nt, Artificial Sequence
  Description of Artificial Sequence: Synthetic oligonucleotide
cuguaugggcuuaaauacuacagcgag

SEQ ID NO: 9886 - RNA, 27 nt, Artificial Sequence
  Description of Artificial Sequence: Synthetic oligonucleotide
ggaagguuucuguaugggcuuaaauac

SEQ ID NO: 9887 - RNA, 27 nt, Artificial Sequence
  Description of Artificial Sequence: Synthetic oligonucleotide
guagguauaccauguuuauuuuaauac

SEQ ID NO: 9888 - RNA, 27 nt, Artificial Sequence
  Description of Artificial Sequence: Synthetic oligonucleotide
uccgaaaacuggccgaucagaacagcc

SEQ ID NO: 9889 - RNA, 27 nt, Artificial Sequence
  Description of Artificial Sequence: Synthetic oligonucleotide
cccuguuccaaaguucaaauuauuugu

SEQ ID NO: 9890 - RNA, 27 nt, Artificial Sequence
  Description of Artificial Sequence: Synthetic oligonucleotide
acuggaaaguuaaauuaaggucgcaau

SEQ ID NO: 9891 - RNA, 27 nt, Artificial Sequence
  Description of Artificial Sequence: Synthetic oligonucleotide
caaaaccaaacuuuagcuuucucagcc

SEQ ID NO: 9892 - RNA, 27 nt, Artificial Sequence
  Description of Artificial Sequence: Synthetic oligonucleotide
uacagugggaaguagcaucuuuacuuu

SEQ ID NO: 9893 - RNA, 27 nt, Artificial Sequence
  Description of Artificial Sequence: Synthetic oligonucleotide
ucauaugguaucagcaauuaagcagua

SEQ ID NO: 9894 - RNA, 27 nt, Artificial Sequence
  Description of Artificial Sequence: Synthetic oligonucleotide
cagcccauguuucauucauaugguauc

SEQ ID NO: 9895 - RNA, 27 nt, Artificial Sequence
  Description of Artificial Sequence: Synthetic oligonucleotide
uaugaaaaaguuggauaagaaaguugg

SEQ ID NO: 9896 - RNA, 27 nt, Artificial Sequence
  Description of Artificial Sequence: Synthetic oligonucleotide
uccggccucaugaugucaugcaaggcu

SEQ ID NO: 9897 - RNA, 27 nt, Artificial Sequence
  Description of Artificial Sequence: Synthetic oligonucleotide
acaaaugcagucauauacaaauucagg

SEQ ID NO: 9898 - RNA, 27 nt, Artificial Sequence
  Description of Artificial Sequence: Synthetic oligonucleotide
gguaguaaacauucuacuaggauucuu

SEQ ID NO: 9899 - RNA, 27 nt, Artificial Sequence
  Description of Artificial Sequence: Synthetic oligonucleotide
uuucaucaaaaaauucuucccuuucug

SEQ ID NO: 9900 - RNA, 27 nt, Artificial Sequence
  Description of Artificial Sequence: Synthetic oligonucleotide
aaauucacacacuggcaugccgauagc

SEQ ID NO: 9901 - RNA, 27 nt, Artificial Sequence
  Description of Artificial Sequence: Synthetic oligonucleotide
acauacauugcucuacuaugaggugaa

SEQ ID NO: 9902 - RNA, 27 nt, Artificial Sequence
  Description of Artificial Sequence: Synthetic oligonucleotide
uauauaugugcuuuggcaauucuggug

SEQ ID NO: 9903 - RNA, 27 nt, Artificial Sequence
  Description of Artificial Sequence: Synthetic oligonucleotide
ggagaaacuauuacccagaucaccacu

SEQ ID NO: 9904 - RNA, 27 nt, Artificial Sequence
  Description of Artificial Sequence: Synthetic oligonucleotide
auuuggagaaacuauuacccagaucac

SEQ ID NO: 9905 - RNA, 27 nt, Artificial Sequence
  Description of Artificial Sequence: Synthetic oligonucleotide
uuucuaggaaguauucaucacauccac

SEQ ID NO: 9906 - RNA, 27 nt, Artificial Sequence
  Description of Artificial Sequence: Synthetic oligonucleotide
cauauaugguguagcuguggaaaugcg

SEQ ID NO: 9907 - RNA, 27 nt, Artificial Sequence
  Description of Artificial Sequence: Synthetic oligonucleotide
cuccauucauauaugguguagcugugg

SEQ ID NO: 9908 - RNA, 27 nt, Artificial Sequence
  Description of Artificial Sequence: Synthetic oligonucleotide
aucuucuucucguguaagaacugcagc

SEQ ID NO: 9909 - RNA, 27 nt, Artificial Sequence
  Description of Artificial Sequence: Synthetic oligonucleotide
ucccuguaaaugaucuucuucucgugu

SEQ ID NO: 9910 - RNA, 27 nt, Artificial Sequence
  Description of Artificial Sequence: Synthetic oligonucleotide
gucccuguaaaugaucuucuucucgug

SEQ ID NO: 9911 - RNA, 27 nt, Artificial Sequence
  Description of Artificial Sequence: Synthetic oligonucleotide
ucaggucccuguaaaugaucuucuucu

SEQ ID NO: 9912 - RNA, 27 nt, Artificial Sequence
  Description of Artificial Sequence: Synthetic oligonucleotide
gaugcagucaaacaccucuuccucugu

SEQ ID NO: 9913 - RNA, 27 nt, Artificial Sequence
  Description of Artificial Sequence: Synthetic oligonucleotide
cgaugcagucaaacaccucuuccucug

SEQ ID NO: 9914 - RNA, 27 nt, Artificial Sequence
  Description of Artificial Sequence: Synthetic oligonucleotide
cccugugaacucgcccucaaaguagcg

SEQ ID NO: 9915 - RNA, 27 nt, Artificial Sequence
  Description of Artificial Sequence: Synthetic oligonucleotide
ggacagaggugccaggagaugcccuca

SEQ ID NO: 9916 - RNA, 27 nt, Artificial Sequence
  Description of Artificial Sequence: Synthetic oligonucleotide
uuaaaaagacaaaccauaucacuccuu

SEQ ID NO: 9917 - RNA, 27 nt, Artificial Sequence
  Description of Artificial Sequence: Synthetic oligonucleotide
cuuaaaaagacaaaccauaucacuccu

SEQ ID NO: 9918 - RNA, 27 nt, Artificial Sequence
  Description of Artificial Sequence: Synthetic oligonucleotide
gacaaccuuuaggaucuuuacugcaac

SEQ ID NO: 9919 - RNA, 27 nt, Artificial Sequence
  Description of Artificial Sequence: Synthetic oligonucleotide
gucgacaaccuuuaggaucuuuacugc

SEQ ID NO: 9920 - RNA, 27 nt, Artificial Sequence
  Description of Artificial Sequence: Synthetic oligonucleotide
acaauugccagguuguccuuugucaug

SEQ ID NO: 9921 - RNA, 27 nt, Artificial Sequence
  Description of Artificial Sequence: Synthetic oligonucleotide
ccucgcaccacugggucacaauugcca

SEQ ID NO: 9922 - RNA, 27 nt, Artificial Sequence
  Description of Artificial Sequence: Synthetic oligonucleotide
auuucaugucucuauggaugauguucu

SEQ ID NO: 9923 - RNA, 27 nt, Artificial Sequence
  Description of Artificial Sequence: Synthetic oligonucleotide
uggagaaauauauuguuggauuucaug

SEQ ID NO: 9924 - RNA, 27 nt, Artificial Sequence
  Description of Artificial Sequence: Synthetic oligonucleotide
agccuucauggagaaauauauuguugg

SEQ ID NO: 9925 - RNA, 27 nt, Artificial Sequence
  Description of Artificial Sequence: Synthetic oligonucleotide
accacuccagcgugacuuuacuguugc

SEQ ID NO: 9926 - RNA, 27 nt, Artificial Sequence
  Description of Artificial Sequence: Synthetic oligonucleotide
ccucucuuccuuuacuuucuucacaca

SEQ ID NO: 9927 - RNA, 27 nt, Artificial Sequence
  Description of Artificial Sequence: Synthetic oligonucleotide
gcccgaugcaaggauggcucggaagcg

SEQ ID NO: 9928 - RNA, 27 nt, Artificial Sequence
  Description of Artificial Sequence: Synthetic oligonucleotide
cacaguaggauauucaaccuccauuuc

SEQ ID NO: 9929 - RNA, 27 nt, Artificial Sequence
  Description of Artificial Sequence: Synthetic oligonucleotide
uuacacaguaggauauucaaccuccau

SEQ ID NO: 9930 - RNA, 27 nt, Artificial Sequence
  Description of Artificial Sequence: Synthetic oligonucleotide
uacacuacaagggaaaacucaaaaucu

SEQ ID NO: 9931 - RNA, 27 nt, Artificial Sequence
  Description of Artificial Sequence: Synthetic oligonucleotide
caaucaacaaagaacaaacaggauaaa

SEQ ID NO: 9932 - RNA, 27 nt, Artificial Sequence
  Description of Artificial Sequence: Synthetic oligonucleotide
uuucaaucaacaaagaacaaacaggau

SEQ ID NO: 9933 - RNA, 27 nt, Artificial Sequence
  Description of Artificial Sequence: Synthetic oligonucleotide
auggaagaaaaagaaggcuguagagaa

SEQ ID NO: 9934 - RNA, 27 nt, Artificial Sequence
  Description of Artificial Sequence: Synthetic oligonucleotide
uagaaggaagauuagcuauggaagaaa

SEQ ID NO: 9935 - RNA, 27 nt, Artificial Sequence
  Description of Artificial Sequence: Synthetic oligonucleotide
augaagcauucaacaggaagauuauuu

SEQ ID NO: 9936 - RNA, 27 nt, Artificial Sequence
  Description of Artificial Sequence: Synthetic oligonucleotide
caugaagcauucaacaggaagauuauu

SEQ ID NO: 9937 - RNA, 27 nt, Artificial Sequence
  Description of Artificial Sequence: Synthetic oligonucleotide
ucaaaguagaauucaagucaugaagca

SEQ ID NO: 9938 - RNA, 27 nt, Artificial Sequence
  Description of Artificial Sequence: Synthetic oligonucleotide
gucuguaguugcuucucucccucuuag

SEQ ID NO: 9939 - RNA, 27 nt, Artificial Sequence
  Description of Artificial Sequence: Synthetic oligonucleotide
guugaccuuggucugguaggagacggc

SEQ ID NO: 9940 - RNA, 27 nt, Artificial Sequence
  Description of Artificial Sequence: Synthetic oligonucleotide
gucgagauagucgggccgauugaucuc

SEQ ID NO: 9941 - RNA, 27 nt, Artificial Sequence
  Description of Artificial Sequence: Synthetic oligonucleotide
guuugggaagguuggauguucguccuc

SEQ ID NO: 9942 - RNA, 27 nt, Artificial Sequence
  Description of Artificial Sequence: Synthetic oligonucleotide
aguucuaagcuuggguuccgacccuaa

SEQ ID NO: 9943 - RNA, 27 nt, Artificial Sequence
  Description of Artificial Sequence: Synthetic oligonucleotide
uuaaaguucuaagcuuggguuccgacc

SEQ ID NO: 9944 - RNA, 27 nt, Artificial Sequence
  Description of Artificial Sequence: Synthetic oligonucleotide
guugcuuaaaguucuaagcuuggguuc

SEQ ID NO: 9945 - RNA, 27 nt, Artificial Sequence
  Description of Artificial Sequence: Synthetic oligonucleotide
gugguggucuuguugcuuaaaguucua

SEQ ID NO: 9946 - RNA, 27 nt, Artificial Sequence
  Description of Artificial Sequence: Synthetic oligonucleotide
acuuuauuucucgccacugaauaguag

SEQ ID NO: 9947 - RNA, 27 nt, Artificial Sequence
  Description of Artificial Sequence: Synthetic oligonucleotide
aacuuuauuucucgccacugaauagua

SEQ ID NO: 9948 - RNA, 27 nt, Artificial Sequence
  Description of Artificial Sequence: Synthetic oligonucleotide
ggaucauuuccuguuaucuguguuugu

SEQ ID NO: 9949 - RNA, 27 nt, Artificial Sequence
  Description of Artificial Sequence: Synthetic oligonucleotide
guuucauuucuucucuuuucuuaaggc

SEQ ID NO: 9950 - RNA, 27 nt, Artificial Sequence
  Description of Artificial Sequence: Synthetic oligonucleotide
ggaggauggaaacacacuccuucaguu

SEQ ID NO: 9951 - RNA, 27 nt, Artificial Sequence
  Description of Artificial Sequence: Synthetic oligonucleotide
ucaaagauuuucagucccgcggugaca

SEQ ID NO: 9952 - RNA, 27 nt, Artificial Sequence
  Description of Artificial Sequence: Synthetic oligonucleotide
ccugaacggcacgcuuauuucugcugu

SEQ ID NO: 9953 - RNA, 27 nt, Artificial Sequence
  Description of Artificial Sequence: Synthetic oligonucleotide
cuucuggacccugaacggcacgcuuau

SEQ ID NO: 9954 - RNA, 27 nt, Artificial Sequence
  Description of Artificial Sequence: Synthetic oligonucleotide
caagcagucuugagugacuguuucuuc

SEQ ID NO: 9955 - RNA, 27 nt, Artificial Sequence
  Description of Artificial Sequence: Synthetic oligonucleotide
ccaaagacauggaccuucuuccucuga

SEQ ID NO: 9956 - RNA, 27 nt, Artificial Sequence
  Description of Artificial Sequence: Synthetic oligonucleotide
guguuucaggcauauuuugaauacauc

SEQ ID NO: 9957 - RNA, 27 nt, Artificial Sequence
  Description of Artificial Sequence: Synthetic oligonucleotide
gagguacagagaaagggaggaaaauag

SEQ ID NO: 9958 - RNA, 27 nt, Artificial Sequence
  Description of Artificial Sequence: Synthetic oligonucleotide
ucuugucuugcucuaucuuucuuuggu

SEQ ID NO: 9959 - RNA, 27 nt, Artificial Sequence
  Description of Artificial Sequence: Synthetic oligonucleotide
uuucuugucuugcucuaucuuucuuug

SEQ ID NO: 9960 - RNA, 27 nt, Artificial Sequence
  Description of Artificial Sequence: Synthetic oligonucleotide
ggaucuuguacaaacaaaugcuuucuc

SEQ ID NO: 9961 - RNA, 27 nt, Artificial Sequence
  Description of Artificial Sequence: Synthetic oligonucleotide
ucugcaaguacguucguuuaacucaag

SEQ ID NO: 9962 - RNA, 27 nt, Artificial Sequence
  Description of Artificial Sequence: Synthetic oligonucleotide
ucuguaucgaucguucuguaucagucu

SEQ ID NO: 9963 - RNA, 27 nt, Artificial Sequence
  Description of Artificial Sequence: Synthetic oligonucleotide
auuuauuuuuauauauauauaauauau

SEQ ID NO: 9964 - RNA, 27 nt, Artificial Sequence
  Description of Artificial Sequence: Synthetic oligonucleotide
auauuuauuuuuauauauauauaauau

SEQ ID NO: 9965 - RNA, 27 nt, Artificial Sequence
  Description of Artificial Sequence: Synthetic oligonucleotide
cacagcagucaaauacauccagugaag

SEQ ID NO: 9966 - RNA, 27 nt, Artificial Sequence
  Description of Artificial Sequence: Synthetic oligonucleotide
gucucucaucuccuccucuucccuguc

SEQ ID NO: 9967 - RNA, 27 nt, Artificial Sequence
  Description of Artificial Sequence: Synthetic oligonucleotide
ccaagugggacaaaaaaaagaucaugc

SEQ ID NO: 9968 - RNA, 14 nt, Artificial Sequence
  Description of Artificial Sequence: Synthetic oligonucleotide
guauuuugaugagg

SEQ ID NO: 9969 - RNA, 12 nt, Artificial Sequence
  Description of Artificial Sequence: Synthetic oligonucleotide
ggcccagaugau

SEQ ID NO: 9970 - RNA, 14 nt, Artificial Sequence
  Description of Artificial Sequence: Synthetic oligonucleotide
gggaagaaaacuau

SEQ ID NO: 9971 - RNA, 15 nt, Artificial Sequence
  Description of Artificial Sequence: Synthetic oligonucleotide
guuuuaauuuauuuc

SEQ ID NO: 9972 - RNA, 12 nt, Artificial Sequence
  Description of Artificial Sequence: Synthetic oligonucleotide
acguagggaaau

SEQ ID NO: 9973 - RNA, 12 nt, Artificial Sequence
  Description of Artificial Sequence: Synthetic oligonucleotide
ccaggguuuacc

SEQ ID NO: 9974 - RNA, 11 nt, Artificial Sequence
  Description of Artificial Sequence: Synthetic oligonucleotide
agcaagguuua

SEQ ID NO: 9975 - RNA, 12 nt, Artificial Sequence
  Description of Artificial Sequence: Synthetic oligonucleotide
uguauuauguug

SEQ ID NO: 9976 - RNA, 15 nt, Artificial Sequence
  Description of Artificial Sequence: Synthetic oligonucleotide
uuuuaaucuuuguga

SEQ ID NO: 9977 - RNA, 14 nt, Artificial Sequence
  Description of Artificial Sequence: Synthetic oligonucleotide
uuaaucuuugugac

SEQ ID NO: 9978 - RNA, 13 nt, Artificial Sequence
  Description of Artificial Sequence: Synthetic oligonucleotide
gcugcuuaugucu

SEQ ID NO: 9979 - RNA, 14 nt, Artificial Sequence
  Description of Artificial Sequence: Synthetic oligonucleotide
aaguguuucagaag

SEQ ID NO: 9980 - RNA, 13 nt, Artificial Sequence
  Description of Artificial Sequence: Synthetic oligonucleotide
gaccaucaauaag

SEQ ID NO: 9981 - RNA, 13 nt, Artificial Sequence
  Description of Artificial Sequence: Synthetic oligonucleotide
ccaucaauaagga

SEQ ID NO: 9982 - RNA, 14 nt, Artificial Sequence
  Description of Artificial Sequence: Synthetic oligonucleotide
ucaauaaggaagaa

SEQ ID NO: 9983 - RNA, 14 nt, Artificial Sequence
  Description of Artificial Sequence: Synthetic oligonucleotide
aauaaggaagaagc

SEQ ID NO: 9984 - RNA, 13 nt, Artificial Sequence
  Description of Artificial Sequence: Synthetic oligonucleotide
aggaagaagcccu

SEQ ID NO: 9985 - RNA, 13 nt, Artificial Sequence
  Description of Artificial Sequence: Synthetic oligonucleotide
gcauaacuaaagg

SEQ ID NO: 9986 - RNA, 14 nt, Artificial Sequence
  Description of Artificial Sequence: Synthetic oligonucleotide
cauaacuaaaggug

SEQ ID NO: 9987 - RNA, 12 nt, Artificial Sequence
  Description of Artificial Sequence: Synthetic oligonucleotide
cuacaucacgcc

SEQ ID NO: 9988 - RNA, 12 nt, Artificial Sequence
  Description of Artificial Sequence: Synthetic oligonucleotide
acuggauuuaag

SEQ ID NO: 9989 - RNA, 12 nt, Artificial Sequence
  Description of Artificial Sequence: Synthetic oligonucleotide
cuggauuuaagc

SEQ ID NO: 9990 - RNA, 13 nt, Artificial Sequence
  Description of Artificial Sequence: Synthetic oligonucleotide
gauuuaagcagag

SEQ ID NO: 9991 - RNA, 13 nt, Artificial Sequence
  Description of Artificial Sequence: Synthetic oligonucleotide
auuuaagcagagu

SEQ ID NO: 9992 - RNA, 13 nt, Artificial Sequence
  Description of Artificial Sequence: Synthetic oligonucleotide
uuaagcagaguuc

SEQ ID NO: 9993 - RNA, 13 nt, Artificial Sequence
  Description of Artificial Sequence: Synthetic oligonucleotide
uaagcagaguuca

SEQ ID NO: 9994 - RNA, 14 nt, Artificial Sequence
  Description of Artificial Sequence: Synthetic oligonucleotide
agcagaguucaaaa

SEQ ID NO: 9995 - RNA, 12 nt, Artificial Sequence
  Description of Artificial Sequence: Synthetic oligonucleotide
cucagggucuga

SEQ ID NO: 9996 - RNA, 13 nt, Artificial Sequence
  Description of Artificial Sequence: Synthetic oligonucleotide
caagcaacuacau

SEQ ID NO: 9997 - RNA, 12 nt, Artificial Sequence
  Description of Artificial Sequence: Synthetic oligonucleotide
aucaauggcagc

SEQ ID NO: 9998 - RNA, 11 nt, Artificial Sequence
  Description of Artificial Sequence: Synthetic oligonucleotide
uuccagcccac

SEQ ID NO: 9999 - RNA, 12 nt, Artificial Sequence
  Description of Artificial Sequence: Synthetic oligonucleotide
cagcugagaaug

SEQ ID NO: 10000 - RNA, 13 nt, Artificial Sequence
  Description of Artificial Sequence: Synthetic oligonucleotide
aacguaucuccua

SEQ ID NO: 10001 - RNA, 14 nt, Artificial Sequence
  Description of Artificial Sequence: Synthetic oligonucleotide
ccuaaaauaauuuc

SEQ ID NO: 10002 - RNA, 13 nt, Artificial Sequence
  Description of Artificial Sequence: Synthetic oligonucleotide
uggaagauucagc

SEQ ID NO: 10003 - RNA, 12 nt, Artificial Sequence
  Description of Artificial Sequence: Synthetic oligonucleotide
uuaaacucuccu

SEQ ID NO: 10004 - RNA, 12 nt, Artificial Sequence
  Description of Artificial Sequence: Synthetic oligonucleotide
cagccuacaguu

SEQ ID NO: 10005 - RNA, 13 nt, Artificial Sequence
  Description of Artificial Sequence: Synthetic oligonucleotide
guuauguucaguc

SEQ ID NO: 10006 - RNA, 13 nt, Artificial Sequence
  Description of Artificial Sequence: Synthetic oligonucleotide
cacauacaaaaug

SEQ ID NO: 10007 - RNA, 9 nt, Artificial Sequence
  Description of Artificial Sequence: Synthetic oligonucleotide
uccuuuugc

SEQ ID NO: 10008 - RNA, 12 nt, Artificial Sequence
  Description of Artificial Sequence: Synthetic oligonucleotide
ugaccugugaag

SEQ ID NO: 10009 - RNA, 12 nt, Artificial Sequence
  Description of Artificial Sequence: Synthetic oligonucleotide
cuaucucacaca

SEQ ID NO: 10010 - RNA, 13 nt, Artificial Sequence
  Description of Artificial Sequence: Synthetic oligonucleotide
uguccucaauugu

SEQ ID NO: 10011 - RNA, 12 nt, Artificial Sequence
  Description of Artificial Sequence: Synthetic oligonucleotide
aaaccguagcug

SEQ ID NO: 10012 - RNA, 12 nt, Artificial Sequence
  Description of Artificial Sequence: Synthetic oligonucleotide
uagcuggcaagc

SEQ ID NO: 10013 - RNA, 14 nt, Artificial Sequence
  Description of Artificial Sequence: Synthetic oligonucleotide
uuguaugguuaaaa

SEQ ID NO: 10014 - RNA, 14 nt, Artificial Sequence
  Description of Artificial Sequence: Synthetic oligonucleotide
ugguuaaaagaugg

SEQ ID NO: 10015 - RNA, 13 nt, Artificial Sequence
  Description of Artificial Sequence: Synthetic oligonucleotide
cagggaauuauac

SEQ ID NO: 10016 - RNA, 12 nt, Artificial Sequence
  Description of Artificial Sequence: Synthetic oligonucleotide
acaaucuugcug

SEQ ID NO: 10017 - RNA, 13 nt, Artificial Sequence
  Description of Artificial Sequence: Synthetic oligonucleotide
ccaauaaugaaga

SEQ ID NO: 10018 - RNA, 13 nt, Artificial Sequence
  Description of Artificial Sequence: Synthetic oligonucleotide
acuuuggauguuc

SEQ ID NO: 10019 - RNA, 12 nt, Artificial Sequence
  Description of Artificial Sequence: Synthetic oligonucleotide
aaugcuuccacu

SEQ ID NO: 10020 - RNA, 11 nt, Artificial Sequence
  Description of Artificial Sequence: Synthetic oligonucleotide
gagaaaguuug

SEQ ID NO: 10021 - RNA, 11 nt, Artificial Sequence
  Description of Artificial Sequence: Synthetic oligonucleotide
aaagaacuacu

SEQ ID NO: 10022 - RNA, 12 nt, Artificial Sequence
  Description of Artificial Sequence: Synthetic oligonucleotide
uuagaaauacgg

SEQ ID NO: 10023 - RNA, 12 nt, Artificial Sequence
  Description of Artificial Sequence: Synthetic oligonucleotide
aacauggguaca

SEQ ID NO: 10024 - RNA, 14 nt, Artificial Sequence
  Description of Artificial Sequence: Synthetic oligonucleotide
aaagacacagaaga

SEQ ID NO: 10025 - RNA, 11 nt, Artificial Sequence
  Description of Artificial Sequence: Synthetic oligonucleotide
uaguagggagg

SEQ ID NO: 10026 - RNA, 12 nt, Artificial Sequence
  Description of Artificial Sequence: Synthetic oligonucleotide
gccuucugcagc

SEQ ID NO: 10027 - RNA, 10 nt, Artificial Sequence
  Description of Artificial Sequence: Synthetic oligonucleotide
ggucugguac

SEQ ID NO: 10028 - RNA, 12 nt, Artificial Sequence
  Description of Artificial Sequence: Synthetic oligonucleotide
cuaguccuuccg

SEQ ID NO: 10029 - RNA, 12 nt, Artificial Sequence
  Description of Artificial Sequence: Synthetic oligonucleotide
ccagugaauauu

SEQ ID NO: 10030 - RNA, 13 nt, Artificial Sequence
  Description of Artificial Sequence: Synthetic oligonucleotide
augaauucaaguu

SEQ ID NO: 10031 - RNA, 12 nt, Artificial Sequence
  Description of Artificial Sequence: Synthetic oligonucleotide
caggacacagau

SEQ ID NO: 10032 - RNA, 12 nt, Artificial Sequence
  Description of Artificial Sequence: Synthetic oligonucleotide
cucaaagcacag

SEQ ID NO: 10033 - RNA, 10 nt, Artificial Sequence
  Description of Artificial Sequence: Synthetic oligonucleotide
accacugcca

SEQ ID NO: 10034 - RNA, 13 nt, Artificial Sequence
  Description of Artificial Sequence: Synthetic oligonucleotide
gaaacuacuagug

SEQ ID NO: 10035 - RNA, 12 nt, Artificial Sequence
  Description of Artificial Sequence: Synthetic oligonucleotide
aagucggacagc

SEQ ID NO: 10036 - RNA, 13 nt, Artificial Sequence
  Description of Artificial Sequence: Synthetic oligonucleotide
gaaagcgaaaaau

SEQ ID NO: 10037 - RNA, 13 nt, Artificial Sequence
  Description of Artificial Sequence: Synthetic oligonucleotide
cccucugauuuag

SEQ ID NO: 10038 - RNA, 12 nt, Artificial Sequence
  Description of Artificial Sequence: Synthetic oligonucleotide
ugagcuauuuaa

SEQ ID NO: 10039 - RNA, 13 nt, Artificial Sequence
  Description of Artificial Sequence: Synthetic oligonucleotide
aaaaggugaaaaa

SEQ ID NO: 10040 - RNA, 14 nt, Artificial Sequence
  Description of Artificial Sequence: Synthetic oligonucleotide
gaaaaagcacuauu

SEQ ID NO: 10041 - RNA, 12 nt, Artificial Sequence
  Description of Artificial Sequence: Synthetic oligonucleotide
ggcugaaaagaa

SEQ ID NO: 10042 - RNA, 12 nt, Artificial Sequence
  Description of Artificial Sequence: Synthetic oligonucleotide
uaaacccuuaua

SEQ ID NO: 10043 - RNA, 13 nt, Artificial Sequence
  Description of Artificial Sequence: Synthetic oligonucleotide
cauacuauuagcc

SEQ ID NO: 10044 - RNA, 12 nt, Artificial Sequence
  Description of Artificial Sequence: Synthetic oligonucleotide
gacagaagcauu

SEQ ID NO: 10045 - RNA, 14 nt, Artificial Sequence
  Description of Artificial Sequence: Synthetic oligonucleotide
agagcaaauaagau

SEQ ID NO: 10046 - RNA, 14 nt, Artificial Sequence
  Description of Artificial Sequence: Synthetic oligonucleotide
ccaacauuuuucuc

SEQ ID NO: 10047 - RNA, 15 nt, Artificial Sequence
  Description of Artificial Sequence: Synthetic oligonucleotide
uuaaguaugagaaaa

SEQ ID NO: 10048 - RNA, 14 nt, Artificial Sequence
  Description of Artificial Sequence: Synthetic oligonucleotide
caggaauaaagaug

SEQ ID NO: 10049 - RNA, 13 nt, Artificial Sequence
  Description of Artificial Sequence: Synthetic oligonucleotide
aauuugaaugacc

SEQ ID NO: 10050 - RNA, 14 nt, Artificial Sequence
  Description of Artificial Sequence: Synthetic oligonucleotide
auguauaaagauag

SEQ ID NO: 10051 - RNA, 12 nt, Artificial Sequence
  Description of Artificial Sequence: Synthetic oligonucleotide
ggcuguaacuau

SEQ ID NO: 10052 - RNA, 11 nt, Artificial Sequence
  Description of Artificial Sequence: Synthetic oligonucleotide
ucugugaagug

SEQ ID NO: 10053 - RNA, 14 nt, Artificial Sequence
  Description of Artificial Sequence: Synthetic oligonucleotide
ccuuuaaggaaaug

SEQ ID NO: 10054 - RNA, 13 nt, Artificial Sequence
  Description of Artificial Sequence: Synthetic oligonucleotide
aaggauacaaaaa

SEQ ID NO: 10055 - RNA, 12 nt, Artificial Sequence
  Description of Artificial Sequence: Synthetic oligonucleotide
agaugcaauuug

SEQ ID NO: 10056 - RNA, 12 nt, Artificial Sequence
  Description of Artificial Sequence: Synthetic oligonucleotide
guucaaaacgaa

SEQ ID NO: 10057 - RNA, 11 nt, Artificial Sequence
  Description of Artificial Sequence: Synthetic oligonucleotide
gugaaaccuca

SEQ ID NO: 10058 - RNA, 13 nt, Artificial Sequence
  Description of Artificial Sequence: Synthetic oligonucleotide
acgaaagagaagc

SEQ ID NO: 10059 - RNA, 12 nt, Artificial Sequence
  Description of Artificial Sequence: Synthetic oligonucleotide
cuccacaagcgc

SEQ ID NO: 10060 - RNA, 14 nt, Artificial Sequence
  Description of Artificial Sequence: Synthetic oligonucleotide
gagaagauuccaaa

SEQ ID NO: 10061 - RNA, 13 nt, Artificial Sequence
  Description of Artificial Sequence: Synthetic oligonucleotide
aaucuggauucaa

SEQ ID NO: 10062 - RNA, 13 nt, Artificial Sequence
  Description of Artificial Sequence: Synthetic oligonucleotide
agaacagauuuga

SEQ ID NO: 10063 - RNA, 11 nt, Artificial Sequence
  Description of Artificial Sequence: Synthetic oligonucleotide
ccagagcugug

SEQ ID NO: 10064 - RNA, 12 nt, Artificial Sequence
  Description of Artificial Sequence: Synthetic oligonucleotide
ccucagauuguu

SEQ ID NO: 10065 - RNA, 12 nt, Artificial Sequence
  Description of Artificial Sequence: Synthetic oligonucleotide
cuauuuuaauua

SEQ ID NO: 10066 - RNA, 13 nt, Artificial Sequence
  Description of Artificial Sequence: Synthetic oligonucleotide
uuuaauuuauuaa

SEQ ID NO: 10067 - RNA, 12 nt, Artificial Sequence
  Description of Artificial Sequence: Synthetic oligonucleotide
augcaguuugaa

SEQ ID NO: 10068 - RNA, 11 nt, Artificial Sequence
  Description of Artificial Sequence: Synthetic oligonucleotide
caugcugcugg

SEQ ID NO: 10069 - RNA, 13 nt, Artificial Sequence
  Description of Artificial Sequence: Synthetic oligonucleotide
agaugugcauuuc

SEQ ID NO: 10070 - RNA, 12 nt, Artificial Sequence
  Description of Artificial Sequence: Synthetic oligonucleotide
ucaaaaccugug

SEQ ID NO: 10071 - RNA, 11 nt, Artificial Sequence
  Description of Artificial Sequence: Synthetic oligonucleotide
gaaugugggua

SEQ ID NO: 10072 - RNA, 10 nt, Artificial Sequence
  Description of Artificial Sequence: Synthetic oligonucleotide
auguggguag

SEQ ID NO: 10073 - RNA, 13 nt, Artificial Sequence
  Description of Artificial Sequence: Synthetic oligonucleotide
ugaaaaugagcau

SEQ ID NO: 10074 - RNA, 13 nt, Artificial Sequence
  Description of Artificial Sequence: Synthetic oligonucleotide
uugcuuuucaugu

SEQ ID NO: 10075 - RNA, 12 nt, Artificial Sequence
  Description of Artificial Sequence: Synthetic oligonucleotide
uguauuucuaua

SEQ ID NO: 10076 - RNA, 13 nt, Artificial Sequence
  Description of Artificial Sequence: Synthetic oligonucleotide
uuugauuaauguu

SEQ ID NO: 10077 - RNA, 12 nt, Artificial Sequence
  Description of Artificial Sequence: Synthetic oligonucleotide
caacguguauag

SEQ ID NO: 10078 - RNA, 12 nt, Artificial Sequence
  Description of Artificial Sequence: Synthetic oligonucleotide
cauauccuuggc

SEQ ID NO: 10079 - RNA, 13 nt, Artificial Sequence
  Description of Artificial Sequence: Synthetic oligonucleotide
uacuaacaucugg

SEQ ID NO: 10080 - RNA, 11 nt, Artificial Sequence
  Description of Artificial Sequence: Synthetic oligonucleotide
cauaaguugug

SEQ ID NO: 10081 - RNA, 12 nt, Artificial Sequence
  Description of Artificial Sequence: Synthetic oligonucleotide
gcaucauuuugg

SEQ ID NO: 10082 - RNA, 10 nt, Artificial Sequence
  Description of Artificial Sequence: Synthetic oligonucleotide
gcucuucuua

SEQ ID NO: 10083 - RNA, 10 nt, Artificial Sequence
  Description of Artificial Sequence: Synthetic oligonucleotide
agauuagguc

SEQ ID NO: 10084 - RNA, 12 nt, Artificial Sequence
  Description of Artificial Sequence: Synthetic oligonucleotide
auggaauugaaa

SEQ ID NO: 10085 - RNA, 13 nt, Artificial Sequence
  Description of Artificial Sequence: Synthetic oligonucleotide
cacacucauuccu

SEQ ID NO: 10086 - RNA, 12 nt, Artificial Sequence
  Description of Artificial Sequence: Synthetic oligonucleotide
uguagagguaac

SEQ ID NO: 10087 - RNA, 11 nt, Artificial Sequence
  Description of Artificial Sequence: Synthetic oligonucleotide
caaccacaugc

SEQ ID NO: 10088 - RNA, 12 nt, Artificial Sequence
  Description of Artificial Sequence: Synthetic oligonucleotide
ucggaaacaagu

SEQ ID NO: 10089 - RNA, 11 nt, Artificial Sequence
  Description of Artificial Sequence: Synthetic oligonucleotide
acucccaauaa

SEQ ID NO: 10090 - RNA, 13 nt, Artificial Sequence
  Description of Artificial Sequence: Synthetic oligonucleotide
aaugcuaagaaau

SEQ ID NO: 10091 - RNA, 11 nt, Artificial Sequence
  Description of Artificial Sequence: Synthetic oligonucleotide
gucuuucucua

SEQ ID NO: 10092 - RNA, 11 nt, Artificial Sequence
  Description of Artificial Sequence: Synthetic oligonucleotide
ugaauuucagg

SEQ ID NO: 10093 - RNA, 13 nt, Artificial Sequence
  Description of Artificial Sequence: Synthetic oligonucleotide
cgauucccucuca

SEQ ID NO: 10094 - RNA, 11 nt, Artificial Sequence
  Description of Artificial Sequence: Synthetic oligonucleotide
aggaaagugaa

SEQ ID NO: 10095 - RNA, 12 nt, Artificial Sequence
  Description of Artificial Sequence: Synthetic oligonucleotide
gaggcugcaugc

SEQ ID NO: 10096 - RNA, 11 nt, Artificial Sequence
  Description of Artificial Sequence: Synthetic oligonucleotide
ucucugaacag

SEQ ID NO: 10097 - RNA, 12 nt, Artificial Sequence
  Description of Artificial Sequence: Synthetic oligonucleotide
aacuuggcugua

SEQ ID NO: 10098 - RNA, 12 nt, Artificial Sequence
  Description of Artificial Sequence: Synthetic oligonucleotide
agaagccaaaau

SEQ ID NO: 10099 - RNA, 14 nt, Artificial Sequence
  Description of Artificial Sequence: Synthetic oligonucleotide
auuaaaagaagucc

SEQ ID NO: 10100 - RNA, 14 nt, Artificial Sequence
  Description of Artificial Sequence: Synthetic oligonucleotide
gaauccggauuauc

SEQ ID NO: 10101 - RNA, 12 nt, Artificial Sequence
  Description of Artificial Sequence: Synthetic oligonucleotide
aaugugacauca

SEQ ID NO: 10102 - RNA, 13 nt, Artificial Sequence
  Description of Artificial Sequence: Synthetic oligonucleotide
caucaaagcaagu

SEQ ID NO: 10103 - RNA, 11 nt, Artificial Sequence
  Description of Artificial Sequence: Synthetic oligonucleotide
agagagagaaa

SEQ ID NO: 10104 - RNA, 13 nt, Artificial Sequence
  Description of Artificial Sequence: Synthetic oligonucleotide
ucgcuguaguauu

SEQ ID NO: 10105 - RNA, 14 nt, Artificial Sequence
  Description of Artificial Sequence: Synthetic oligonucleotide
cgcuguaguauuua

SEQ ID NO: 10106 - RNA, 13 nt, Artificial Sequence
  Description of Artificial Sequence: Synthetic oligonucleotide
auuuaagcccaua

SEQ ID NO: 10107 - RNA, 15 nt, Artificial Sequence
  Description of Artificial Sequence: Synthetic oligonucleotide
auuaaaauaaacaug

SEQ ID NO: 10108 - RNA, 12 nt, Artificial Sequence
  Description of Artificial Sequence: Synthetic oligonucleotide
cuguucugaucg

SEQ ID NO: 10109 - RNA, 16 nt, Artificial Sequence
  Description of Artificial Sequence: Synthetic oligonucleotide
aaauaauuugaacuuu

SEQ ID NO: 10110 - RNA, 12 nt, Artificial Sequence
  Description of Artificial Sequence: Synthetic oligonucleotide
ugcgaccuuaau

SEQ ID NO: 10111 - RNA, 11 nt, Artificial Sequence
  Description of Artificial Sequence: Synthetic oligonucleotide
cugagaaagcu

SEQ ID NO: 10112 - RNA, 13 nt, Artificial Sequence
  Description of Artificial Sequence: Synthetic oligonucleotide
aguaaagaugcua

SEQ ID NO: 10113 - RNA, 12 nt, Artificial Sequence
  Description of Artificial Sequence: Synthetic oligonucleotide
cugcuuaauugc

SEQ ID NO: 10114 - RNA, 14 nt, Artificial Sequence
  Description of Artificial Sequence: Synthetic oligonucleotide
uaccauaugaauga

SEQ ID NO: 10115 - RNA, 12 nt, Artificial Sequence
  Description of Artificial Sequence: Synthetic oligonucleotide
aacuuucuuauc

SEQ ID NO: 10116 - RNA, 13 nt, Artificial Sequence
  Description of Artificial Sequence: Synthetic oligonucleotide
ccuugcaugacau

SEQ ID NO: 10117 - RNA, 14 nt, Artificial Sequence
  Description of Artificial Sequence: Synthetic oligonucleotide
ugaauuuguauaug

SEQ ID NO: 10118 - RNA, 12 nt, Artificial Sequence
  Description of Artificial Sequence: Synthetic oligonucleotide
gaauccuaguag

SEQ ID NO: 10119 - RNA, 10 nt, Artificial Sequence
  Description of Artificial Sequence: Synthetic oligonucleotide
gaaagggaag

SEQ ID NO: 10120 - RNA, 11 nt, Artificial Sequence
  Description of Artificial Sequence: Synthetic oligonucleotide
uaucggcaugc

SEQ ID NO: 10121 - RNA, 12 nt, Artificial Sequence
  Description of Artificial Sequence: Synthetic oligonucleotide
caccucauagua

SEQ ID NO: 10122 - RNA, 11 nt, Artificial Sequence
  Description of Artificial Sequence: Synthetic oligonucleotide
ccagaauugcc

SEQ ID NO: 10123 - RNA, 11 nt, Artificial Sequence
  Description of Artificial Sequence: Synthetic oligonucleotide
uggugaucugg

SEQ ID NO: 10124 - RNA, 12 nt, Artificial Sequence
  Description of Artificial Sequence: Synthetic oligonucleotide
gaucuggguaau

SEQ ID NO: 10125 - RNA, 12 nt, Artificial Sequence
  Description of Artificial Sequence: Synthetic oligonucleotide
ggaugugaugaa

SEQ ID NO: 10126 - RNA, 12 nt, Artificial Sequence
  Description of Artificial Sequence: Synthetic oligonucleotide
cauuuccacagc

SEQ ID NO: 10127 - RNA, 11 nt, Artificial Sequence
  Description of Artificial Sequence: Synthetic oligonucleotide
acagcuacacc

SEQ ID NO: 10128 - RNA, 12 nt, Artificial Sequence
  Description of Artificial Sequence: Synthetic oligonucleotide
ugcaguucuuac

SEQ ID NO: 10129 - RNA, 12 nt, Artificial Sequence
  Description of Artificial Sequence: Synthetic oligonucleotide
acgagaagaaga

SEQ ID NO: 10130 - RNA, 12 nt, Artificial Sequence
  Description of Artificial Sequence: Synthetic oligonucleotide
cgagaagaagau

SEQ ID NO: 10131 - RNA, 15 nt, Artificial Sequence
  Description of Artificial Sequence: Synthetic oligonucleotide
aagaagaucauuuac

SEQ ID NO: 10132 - RNA, 11 nt, Artificial Sequence
  Description of Artificial Sequence: Synthetic oligonucleotide
agaggaagagg

SEQ ID NO: 10133 - RNA, 12 nt, Artificial Sequence
  Description of Artificial Sequence: Synthetic oligonucleotide
gaggaagaggug

SEQ ID NO: 10134 - RNA, 13 nt, Artificial Sequence
  Description of Artificial Sequence: Synthetic oligonucleotide
cuacuuugagggc

SEQ ID NO: 10135 - RNA, 12 nt, Artificial Sequence
  Description of Artificial Sequence: Synthetic oligonucleotide
agggcaucuccu

SEQ ID NO: 10136 - RNA, 10 nt, Artificial Sequence
  Description of Artificial Sequence: Synthetic oligonucleotide
ggagugauau

SEQ ID NO: 10137 - RNA, 11 nt, Artificial Sequence
  Description of Artificial Sequence: Synthetic oligonucleotide
gagugauaugg

SEQ ID NO: 10138 - RNA, 12 nt, Artificial Sequence
  Description of Artificial Sequence: Synthetic oligonucleotide
ugcaguaaagau

SEQ ID NO: 10139 - RNA, 13 nt, Artificial Sequence
  Description of Artificial Sequence: Synthetic oligonucleotide
aguaaagauccua

SEQ ID NO: 10140 - RNA, 12 nt, Artificial Sequence
  Description of Artificial Sequence: Synthetic oligonucleotide
ugacaaaggaca

SEQ ID NO: 10141 - RNA, 13 nt, Artificial Sequence
  Description of Artificial Sequence: Synthetic oligonucleotide
gcaauugugaccc

SEQ ID NO: 10142 - RNA, 12 nt, Artificial Sequence
  Description of Artificial Sequence: Synthetic oligonucleotide
aacaucauccau

SEQ ID NO: 10143 - RNA, 12 nt, Artificial Sequence
  Description of Artificial Sequence: Synthetic oligonucleotide
ugaaauccaaca

SEQ ID NO: 10144 - RNA, 15 nt, Artificial Sequence
  Description of Artificial Sequence: Synthetic oligonucleotide
aacaauauauuucuc

SEQ ID NO: 10145 - RNA, 14 nt, Artificial Sequence
  Description of Artificial Sequence: Synthetic oligonucleotide
aacaguaaagucac

SEQ ID NO: 10146 - RNA, 14 nt, Artificial Sequence
  Description of Artificial Sequence: Synthetic oligonucleotide
ugugaagaaaguaa

SEQ ID NO: 10147 - RNA, 13 nt, Artificial Sequence
  Description of Artificial Sequence: Synthetic oligonucleotide
cuuccgagccauc

SEQ ID NO: 10148 - RNA, 12 nt, Artificial Sequence
  Description of Artificial Sequence: Synthetic oligonucleotide
aauggagguuga

SEQ ID NO: 10149 - RNA, 12 nt, Artificial Sequence
  Description of Artificial Sequence: Synthetic oligonucleotide
ggagguugaaua

SEQ ID NO: 10150 - RNA, 13 nt, Artificial Sequence
  Description of Artificial Sequence: Synthetic oligonucleotide
auuuugaguuuuc

SEQ ID NO: 10151 - RNA, 12 nt, Artificial Sequence
  Description of Artificial Sequence: Synthetic oligonucleotide
uauccuguuugu

SEQ ID NO: 10152 - RNA, 11 nt, Artificial Sequence
  Description of Artificial Sequence: Synthetic oligonucleotide
ccuguuuguuc

SEQ ID NO: 10153 - RNA, 10 nt, Artificial Sequence
  Description of Artificial Sequence: Synthetic oligonucleotide
cucuacagcc

SEQ ID NO: 10154 - RNA, 12 nt, Artificial Sequence
  Description of Artificial Sequence: Synthetic oligonucleotide
ucuuccauagcu

SEQ ID NO: 10155 - RNA, 12 nt, Artificial Sequence
  Description of Artificial Sequence: Synthetic oligonucleotide
auaaucuuccug

SEQ ID NO: 10156 - RNA, 12 nt, Artificial Sequence
  Description of Artificial Sequence: Synthetic oligonucleotide
uaaucuuccugu

SEQ ID NO: 10157 - RNA, 12 nt, Artificial Sequence
  Description of Artificial Sequence: Synthetic oligonucleotide
cuucaugacuug

SEQ ID NO: 10158 - RNA, 12 nt, Artificial Sequence
  Description of Artificial Sequence: Synthetic oligonucleotide
aagagggagaga

SEQ ID NO: 10159 - RNA, 12 nt, Artificial Sequence
  Description of Artificial Sequence: Synthetic oligonucleotide
cgucuccuacca

SEQ ID NO: 10160 - RNA, 12 nt, Artificial Sequence
  Description of Artificial Sequence: Synthetic oligonucleotide
gaucaaucggcc

SEQ ID NO: 10161 - RNA, 12 nt, Artificial Sequence
  Description of Artificial Sequence: Synthetic oligonucleotide
ggacgaacaucc

SEQ ID NO: 10162 - RNA, 11 nt, Artificial Sequence
  Description of Artificial Sequence: Synthetic oligonucleotide
agggucggaac

SEQ ID NO: 10163 - RNA, 10 nt, Artificial Sequence
  Description of Artificial Sequence: Synthetic oligonucleotide
ucggaaccca

SEQ ID NO: 10164 - RNA, 11 nt, Artificial Sequence
  Description of Artificial Sequence: Synthetic oligonucleotide
acccaagcuua

SEQ ID NO: 10165 - RNA, 14 nt, Artificial Sequence
  Description of Artificial Sequence: Synthetic oligonucleotide
gaacuuuaagcaac

SEQ ID NO: 10166 - RNA, 11 nt, Artificial Sequence
  Description of Artificial Sequence: Synthetic oligonucleotide
acuauucagug

SEQ ID NO: 10167 - RNA, 11 nt, Artificial Sequence
  Description of Artificial Sequence: Synthetic oligonucleotide
cuauucagugg

SEQ ID NO: 10168 - RNA, 13 nt, Artificial Sequence
  Description of Artificial Sequence: Synthetic oligonucleotide
aaacacagauaac

SEQ ID NO: 10169 - RNA, 12 nt, Artificial Sequence
  Description of Artificial Sequence: Synthetic oligonucleotide
cuuaagaaaaga

SEQ ID NO: 10170 - RNA, 12 nt, Artificial Sequence
  Description of Artificial Sequence: Synthetic oligonucleotide
cugaaggagugu

SEQ ID NO: 10171 - RNA, 10 nt, Artificial Sequence
  Description of Artificial Sequence: Synthetic oligonucleotide
ucaccgcggg

SEQ ID NO: 10172 - RNA, 14 nt, Artificial Sequence
  Description of Artificial Sequence: Synthetic oligonucleotide
agcagaaauaagcg

SEQ ID NO: 10173 - RNA, 12 nt, Artificial Sequence
  Description of Artificial Sequence: Synthetic oligonucleotide
aagcgugccguu

SEQ ID NO: 10174 - RNA, 12 nt, Artificial Sequence
  Description of Artificial Sequence: Synthetic oligonucleotide
agaaacagucac

SEQ ID NO: 10175 - RNA, 12 nt, Artificial Sequence
  Description of Artificial Sequence: Synthetic oligonucleotide
agaggaagaagg

SEQ ID NO: 10176 - RNA, 14 nt, Artificial Sequence
  Description of Artificial Sequence: Synthetic oligonucleotide
uguauucaaaauau

SEQ ID NO: 10177 - RNA, 13 nt, Artificial Sequence
  Description of Artificial Sequence: Synthetic oligonucleotide
auuuuccucccuu

SEQ ID NO: 10178 - RNA, 13 nt, Artificial Sequence
  Description of Artificial Sequence: Synthetic oligonucleotide
caaagaaagauag

SEQ ID NO: 10179 - RNA, 12 nt, Artificial Sequence
  Description of Artificial Sequence: Synthetic oligonucleotide
aagaaagauaga

SEQ ID NO: 10180 - RNA, 13 nt, Artificial Sequence
  Description of Artificial Sequence: Synthetic oligonucleotide
gaaagcauuuguu

SEQ ID NO: 10181 - RNA, 13 nt, Artificial Sequence
  Description of Artificial Sequence: Synthetic oligonucleotide
ugaguuaaacgaa

SEQ ID NO: 10182 - RNA, 12 nt, Artificial Sequence
  Description of Artificial Sequence: Synthetic oligonucleotide
acugauacagaa

SEQ ID NO: 10183 - RNA, 12 nt, Artificial Sequence
  Description of Artificial Sequence: Synthetic oligonucleotide
auauuauauaua

SEQ ID NO: 10184 - RNA, 12 nt, Artificial Sequence
  Description of Artificial Sequence: Synthetic oligonucleotide
auuauauauaua

SEQ ID NO: 10185 - RNA, 12 nt, Artificial Sequence
  Description of Artificial Sequence: Synthetic oligonucleotide
ucacuggaugua

SEQ ID NO: 10186 - RNA, 12 nt, Artificial Sequence
  Description of Artificial Sequence: Synthetic oligonucleotide
cagggaagagga

SEQ ID NO: 10187 - RNA, 15 nt, Artificial Sequence
  Description of Artificial Sequence: Synthetic oligonucleotide
augaucuuuuuuuug

SEQ ID NO: 10188 - RNA, 11 nt, Artificial Sequence
  Description of Artificial Sequence: Synthetic oligonucleotide
aguucacggcc

SEQ ID NO: 10189 - RNA, 13 nt, Artificial Sequence
  Description of Artificial Sequence: Synthetic oligonucleotide
caccaucacacca

SEQ ID NO: 10190 - RNA, 11 nt, Artificial Sequence
  Description of Artificial Sequence: Synthetic oligonucleotide
ccugcggguuu

SEQ ID NO: 10191 - RNA, 10 nt, Artificial Sequence
  Description of Artificial Sequence: Synthetic oligonucleotide
auccaguuug

SEQ ID NO: 10192 - RNA, 13 nt, Artificial Sequence
  Description of Artificial Sequence: Synthetic oligonucleotide
guuaaggacuucu

SEQ ID NO: 10193 - RNA, 13 nt, Artificial Sequence
  Description of Artificial Sequence: Synthetic oligonucleotide
cagugggacagag

SEQ ID NO: 10194 - RNA, 14 nt, Artificial Sequence
  Description of Artificial Sequence: Synthetic oligonucleotide
aauuuguuauugug

SEQ ID NO: 10195 - RNA, 13 nt, Artificial Sequence
  Description of Artificial Sequence: Synthetic oligonucleotide
uucaaaugcauuu

SEQ ID NO: 10196 - RNA, 10 nt, Artificial Sequence
  Description of Artificial Sequence: Synthetic oligonucleotide
caggaaagcc

SEQ ID NO: 10197 - RNA, 11 nt, Artificial Sequence
  Description of Artificial Sequence: Synthetic oligonucleotide
aggaaagcccu

SEQ ID NO: 10198 - RNA, 12 nt, Artificial Sequence
  Description of Artificial Sequence: Synthetic oligonucleotide
cccagcauggcc

SEQ ID NO: 10199 - RNA, 11 nt, Artificial Sequence
  Description of Artificial Sequence: Synthetic oligonucleotide
cuucucccuga

SEQ ID NO: 10200 - RNA, 12 nt, Artificial Sequence
  Description of Artificial Sequence: Synthetic oligonucleotide
gaagaagcccuu

SEQ ID NO: 10201 - RNA, 12 nt, Artificial Sequence
  Description of Artificial Sequence: Synthetic oligonucleotide
agaagcccuuca

SEQ ID NO: 10202 - RNA, 11 nt, Artificial Sequence
  Description of Artificial Sequence: Synthetic oligonucleotide
gcccuucagcg

SEQ ID NO: 10203 - RNA, 11 nt, Artificial Sequence
  Description of Artificial Sequence: Synthetic oligonucleotide
ccuucagcggc

SEQ ID NO: 10204 - RNA, 12 nt, Artificial Sequence
  Description of Artificial Sequence: Synthetic oligonucleotide
ucagcggccagu

SEQ ID NO: 10205 - RNA, 12 nt, Artificial Sequence
  Description of Artificial Sequence: Synthetic oligonucleotide
ugaaaagcuccg

SEQ ID NO: 10206 - RNA, 11 nt, Artificial Sequence
  Description of Artificial Sequence: Synthetic oligonucleotide
aaaagcuccgg

SEQ ID NO: 10207 - RNA, 13 nt, Artificial Sequence
  Description of Artificial Sequence: Synthetic oligonucleotide
agucaacagucug

SEQ ID NO: 10208 - RNA, 13 nt, Artificial Sequence
  Description of Artificial Sequence: Synthetic oligonucleotide
cagaguucaaaag

SEQ ID NO: 10209 - RNA, 13 nt, Artificial Sequence
  Description of Artificial Sequence: Synthetic oligonucleotide
agaguucaaaagc

SEQ ID NO: 10210 - RNA, 12 nt, Artificial Sequence
  Description of Artificial Sequence: Synthetic oligonucleotide
uucaaaagcccu

SEQ ID NO: 10211 - RNA, 12 nt, Artificial Sequence
  Description of Artificial Sequence: Synthetic oligonucleotide
ucaaaagcccuu

SEQ ID NO: 10212 - RNA, 12 nt, Artificial Sequence
  Description of Artificial Sequence: Synthetic oligonucleotide
aaaagcccuuca

SEQ ID NO: 10213 - RNA, 12 nt, Artificial Sequence
  Description of Artificial Sequence: Synthetic oligonucleotide
aaagcccuucag

SEQ ID NO: 10214 - RNA, 13 nt, Artificial Sequence
  Description of Artificial Sequence: Synthetic oligonucleotide
gugaagccgcucg

SEQ ID NO: 10215 - RNA, 12 nt, Artificial Sequence
  Description of Artificial Sequence: Synthetic oligonucleotide
cacgccagucaa

SEQ ID NO: 10216 - RNA, 13 nt, Artificial Sequence
  Description of Artificial Sequence: Synthetic oligonucleotide
uucuuggugcgug

SEQ ID NO: 10217 - RNA, 14 nt, Artificial Sequence
  Description of Artificial Sequence: Synthetic oligonucleotide
auuggauucaucag

SEQ ID NO: 10218 - RNA, 13 nt, Artificial Sequence
  Description of Artificial Sequence: Synthetic oligonucleotide
uggaauaccuaag

SEQ ID NO: 10219 - RNA, 12 nt, Artificial Sequence
  Description of Artificial Sequence: Synthetic oligonucleotide
auuugaggcuca

SEQ ID NO: 10220 - RNA, 11 nt, Artificial Sequence
  Description of Artificial Sequence: Synthetic oligonucleotide
ucuacaauugg

SEQ ID NO: 10221 - RNA, 12 nt, Artificial Sequence
  Description of Artificial Sequence: Synthetic oligonucleotide
uaguuaggagcc

SEQ ID NO: 10222 - RNA, 13 nt, Artificial Sequence
  Description of Artificial Sequence: Synthetic oligonucleotide
agucaauauccac

SEQ ID NO: 10223 - RNA, 13 nt, Artificial Sequence
  Description of Artificial Sequence: Synthetic oligonucleotide
auguucagucaca

SEQ ID NO: 10224 - RNA, 12 nt, Artificial Sequence
  Description of Artificial Sequence: Synthetic oligonucleotide
acacacacauac

SEQ ID NO: 10225 - RNA, 12 nt, Artificial Sequence
  Description of Artificial Sequence: Synthetic oligonucleotide
uuccuuuugcuu

SEQ ID NO: 10226 - RNA, 16 nt, Artificial Sequence
  Description of Artificial Sequence: Synthetic oligonucleotide
uuuuaaaguaauuuuu

SEQ ID NO: 10227 - RNA, 13 nt, Artificial Sequence
  Description of Artificial Sequence: Synthetic oligonucleotide
caacagucaaugg

SEQ ID NO: 10228 - RNA, 13 nt, Artificial Sequence
  Description of Artificial Sequence: Synthetic oligonucleotide
ucgacaaaccaau

SEQ ID NO: 10229 - RNA, 12 nt, Artificial Sequence
  Description of Artificial Sequence: Synthetic oligonucleotide
acugcuaccacu

SEQ ID NO: 10230 - RNA, 13 nt, Artificial Sequence
  Description of Artificial Sequence: Synthetic oligonucleotide
gcaagcggucuua

SEQ ID NO: 10231 - RNA, 13 nt, Artificial Sequence
  Description of Artificial Sequence: Synthetic oligonucleotide
ggucuuaccggcu

SEQ ID NO: 10232 - RNA, 11 nt, Artificial Sequence
  Description of Artificial Sequence: Synthetic oligonucleotide
gauggguuacc

SEQ ID NO: 10233 - RNA, 11 nt, Artificial Sequence
  Description of Artificial Sequence: Synthetic oligonucleotide
guuaccugcga

SEQ ID NO: 10234 - RNA, 12 nt, Artificial Sequence
  Description of Artificial Sequence: Synthetic oligonucleotide
aaucuugcugag

SEQ ID NO: 10235 - RNA, 13 nt, Artificial Sequence
  Description of Artificial Sequence: Synthetic oligonucleotide
agcauaaaacagu

SEQ ID NO: 10236 - RNA, 12 nt, Artificial Sequence
  Description of Artificial Sequence: Synthetic oligonucleotide
guccuuuauccu

SEQ ID NO: 10237 - RNA, 12 nt, Artificial Sequence
  Description of Artificial Sequence: Synthetic oligonucleotide
caacgcaaguug

SEQ ID NO: 10238 - RNA, 13 nt, Artificial Sequence
  Description of Artificial Sequence: Synthetic oligonucleotide
aaacugaaaccau

SEQ ID NO: 10239 - RNA, 14 nt, Artificial Sequence
  Description of Artificial Sequence: Synthetic oligonucleotide
acuuuguuaaauau

SEQ ID NO: 10240 - RNA, 14 nt, Artificial Sequence
  Description of Artificial Sequence: Synthetic oligonucleotide
guauauuaaaaguu

SEQ ID NO: 10241 - RNA, 13 nt, Artificial Sequence
  Description of Artificial Sequence: Synthetic oligonucleotide
guuuugacuuaac

SEQ ID NO: 10242 - RNA, 13 nt, Artificial Sequence
  Description of Artificial Sequence: Synthetic oligonucleotide
gcaaacucagcac

SEQ ID NO: 10243 - RNA, 11 nt, Artificial Sequence
  Description of Artificial Sequence: Synthetic oligonucleotide
ugcugaccuca

SEQ ID NO: 10244 - RNA, 14 nt, Artificial Sequence
  Description of Artificial Sequence: Synthetic oligonucleotide
uuuauucagaucgc

SEQ ID NO: 10245 - RNA, 13 nt, Artificial Sequence
  Description of Artificial Sequence: Synthetic oligonucleotide
aggguucugggau

SEQ ID NO: 10246 - RNA, 15 nt, Artificial Sequence
  Description of Artificial Sequence: Synthetic oligonucleotide
auauuggaaauuaug

SEQ ID NO: 10247 - RNA, 13 nt, Artificial Sequence
  Description of Artificial Sequence: Synthetic oligonucleotide
auggaagcacuag

SEQ ID NO: 10248 - RNA, 13 nt, Artificial Sequence
  Description of Artificial Sequence: Synthetic oligonucleotide
guuuuuaugugga

SEQ ID NO: 10249 - RNA, 12 nt, Artificial Sequence
  Description of Artificial Sequence: Synthetic oligonucleotide
ggaauugguaga

SEQ ID NO: 10250 - RNA, 13 nt, Artificial Sequence
  Description of Artificial Sequence: Synthetic oligonucleotide
uuagacuuggaga

SEQ ID NO: 10251 - RNA, 13 nt, Artificial Sequence
  Description of Artificial Sequence: Synthetic oligonucleotide
uuacaguauucca

SEQ ID NO: 10252 - RNA, 15 nt, Artificial Sequence
  Description of Artificial Sequence: Synthetic oligonucleotide
ccacugaugaauuaa

SEQ ID NO: 10253 - RNA, 12 nt, Artificial Sequence
  Description of Artificial Sequence: Synthetic oligonucleotide
ccacaucaucac

SEQ ID NO: 10254 - RNA, 13 nt, Artificial Sequence
  Description of Artificial Sequence: Synthetic oligonucleotide
cucaccaaacaga

SEQ ID NO: 10255 - RNA, 12 nt, Artificial Sequence
  Description of Artificial Sequence: Synthetic oligonucleotide
ggaacaugaugg

SEQ ID NO: 10256 - RNA, 12 nt, Artificial Sequence
  Description of Artificial Sequence: Synthetic oligonucleotide
cauguagacugc

SEQ ID NO: 10257 - RNA, 13 nt, Artificial Sequence
  Description of Artificial Sequence: Synthetic oligonucleotide
ggaucuauuuaug

SEQ ID NO: 10258 - RNA, 12 nt, Artificial Sequence
  Description of Artificial Sequence: Synthetic oligonucleotide
gcacuauuauca

SEQ ID NO: 10259 - RNA, 11 nt, Artificial Sequence
  Description of Artificial Sequence: Synthetic oligonucleotide
aucaguucugc

SEQ ID NO: 10260 - RNA, 13 nt, Artificial Sequence
  Description of Artificial Sequence: Synthetic oligonucleotide
agauuaaaccuac

SEQ ID NO: 10261 - RNA, 13 nt, Artificial Sequence
  Description of Artificial Sequence: Synthetic oligonucleotide
auaaaauccuucu

SEQ ID NO: 10262 - RNA, 12 nt, Artificial Sequence
  Description of Artificial Sequence: Synthetic oligonucleotide
aaugcuguagac

SEQ ID NO: 10263 - RNA, 13 nt, Artificial Sequence
  Description of Artificial Sequence: Synthetic oligonucleotide
uugauaggaauag

SEQ ID NO: 10264 - RNA, 11 nt, Artificial Sequence
  Description of Artificial Sequence: Synthetic oligonucleotide
aauggcccuga

SEQ ID NO: 10265 - RNA, 11 nt, Artificial Sequence
  Description of Artificial Sequence: Synthetic oligonucleotide
uuccucaagca

SEQ ID NO: 10266 - RNA, 10 nt, Artificial Sequence
  Description of Artificial Sequence: Synthetic oligonucleotide
guucagccca

SEQ ID NO: 10267 - RNA, 11 nt, Artificial Sequence
  Description of Artificial Sequence: Synthetic oligonucleotide
gcugcugaacc

SEQ ID NO: 10268 - RNA, 12 nt, Artificial Sequence
  Description of Artificial Sequence: Synthetic oligonucleotide
aaguucucuuca

SEQ ID NO: 10269 - RNA, 11 nt, Artificial Sequence
  Description of Artificial Sequence: Synthetic oligonucleotide
ccagccuagag

SEQ ID NO: 10270 - RNA, 13 nt, Artificial Sequence
  Description of Artificial Sequence: Synthetic oligonucleotide
cucugugaagugu

SEQ ID NO: 10271 - RNA, 14 nt, Artificial Sequence
  Description of Artificial Sequence: Synthetic oligonucleotide
ugagaaaauuucaa

SEQ ID NO: 10272 - RNA, 11 nt, Artificial Sequence
  Description of Artificial Sequence: Synthetic oligonucleotide
aauccuccuga

SEQ ID NO: 10273 - RNA, 12 nt, Artificial Sequence
  Description of Artificial Sequence: Synthetic oligonucleotide
gugacaucauau

SEQ ID NO: 10274 - RNA, 13 nt, Artificial Sequence
  Description of Artificial Sequence: Synthetic oligonucleotide
aaucuucaucaua

SEQ ID NO: 10275 - RNA, 13 nt, Artificial Sequence
  Description of Artificial Sequence: Synthetic oligonucleotide
gacuagcuauuaa

SEQ ID NO: 10276 - RNA, 14 nt, Artificial Sequence
  Description of Artificial Sequence: Synthetic oligonucleotide
ucucuacuaaaaau

SEQ ID NO: 10277 - RNA, 12 nt, Artificial Sequence
  Description of Artificial Sequence: Synthetic oligonucleotide
ucuaucucgccu

SEQ ID NO: 10278 - RNA, 13 nt, Artificial Sequence
  Description of Artificial Sequence: Synthetic oligonucleotide
cuucgguccaguu

SEQ ID NO: 10279 - RNA, 11 nt, Artificial Sequence
  Description of Artificial Sequence: Synthetic oligonucleotide
gauguagccgc

SEQ ID NO: 10280 - RNA, 12 nt, Artificial Sequence
  Description of Artificial Sequence: Synthetic oligonucleotide
ugaggagacuug

SEQ ID NO: 10281 - RNA, 12 nt, Artificial Sequence
  Description of Artificial Sequence: Synthetic oligonucleotide
gaguagugagga

SEQ ID NO: 10282 - RNA, 14 nt, Artificial Sequence
  Description of Artificial Sequence: Synthetic oligonucleotide
cagaugaguacaaa

SEQ ID NO: 10283 - RNA, 13 nt, Artificial Sequence
  Description of Artificial Sequence: Synthetic oligonucleotide
guuguuaaugggc

SEQ ID NO: 10284 - RNA, 13 nt, Artificial Sequence
  Description of Artificial Sequence: Synthetic oligonucleotide
uuuuuaauuuauu

SEQ ID NO: 10285 - RNA, 12 nt, Artificial Sequence
  Description of Artificial Sequence: Synthetic oligonucleotide
uauuuaaauaug

SEQ ID NO: 10286 - RNA, 13 nt, Artificial Sequence
  Description of Artificial Sequence: Synthetic oligonucleotide
uauccuuuguuuc

SEQ ID NO: 10287 - RNA, 14 nt, Artificial Sequence
  Description of Artificial Sequence: Synthetic oligonucleotide
cgucuaaguguuug

SEQ ID NO: 10288 - RNA, 12 nt, Artificial Sequence
  Description of Artificial Sequence: Synthetic oligonucleotide
accugugacaaa

SEQ ID NO: 10289 - RNA, 13 nt, Artificial Sequence
  Description of Artificial Sequence: Synthetic oligonucleotide
ccaggcugaauua

SEQ ID NO: 10290 - RNA, 14 nt, Artificial Sequence
  Description of Artificial Sequence: Synthetic oligonucleotide
gucauucuuacaau

SEQ ID NO: 10291 - RNA, 15 nt, Artificial Sequence
  Description of Artificial Sequence: Synthetic oligonucleotide
ucauucuuacaauug

SEQ ID NO: 10292 - RNA, 12 nt, Artificial Sequence
  Description of Artificial Sequence: Synthetic oligonucleotide
cagagaguguac

SEQ ID NO: 10293 - RNA, 12 nt, Artificial Sequence
  Description of Artificial Sequence: Synthetic oligonucleotide
agaacucagcag

SEQ ID NO: 10294 - RNA, 13 nt, Artificial Sequence
  Description of Artificial Sequence: Synthetic oligonucleotide
uuuauuuucagua

SEQ ID NO: 10295 - RNA, 12 nt, Artificial Sequence
  Description of Artificial Sequence: Synthetic oligonucleotide
ucuuaaauggaa

SEQ ID NO: 10296 - RNA, 13 nt, Artificial Sequence
  Description of Artificial Sequence: Synthetic oligonucleotide
ugccuaaaauugu

SEQ ID NO: 10297 - RNA, 12 nt, Artificial Sequence
  Description of Artificial Sequence: Synthetic oligonucleotide
agacugugagcu

SEQ ID NO: 10298 - RNA, 14 nt, Artificial Sequence
  Description of Artificial Sequence: Synthetic oligonucleotide
ugcuuuuuauuaau

SEQ ID NO: 10299 - RNA, 13 nt, Artificial Sequence
  Description of Artificial Sequence: Synthetic oligonucleotide
cucuucuuacauu

SEQ ID NO: 10300 - RNA, 15 nt, Artificial Sequence
  Description of Artificial Sequence: Synthetic oligonucleotide
cauuuguaaaaaugu

SEQ ID NO: 10301 - RNA, 15 nt, Artificial Sequence
  Description of Artificial Sequence: Synthetic oligonucleotide
aucuuaauucauauu

SEQ ID NO: 10302 - RNA, 13 nt, Artificial Sequence
  Description of Artificial Sequence: Synthetic oligonucleotide
gaacuaaucauga

SEQ ID NO: 10303 - RNA, 12 nt, Artificial Sequence
  Description of Artificial Sequence: Synthetic oligonucleotide
ucugcucuuggg

SEQ ID NO: 10304 - RNA, 13 nt, Artificial Sequence
  Description of Artificial Sequence: Synthetic oligonucleotide
caguagcuuugag

SEQ ID NO: 10305 - RNA, 14 nt, Artificial Sequence
  Description of Artificial Sequence: Synthetic oligonucleotide
cacguaauauuuca

SEQ ID NO: 10306 - RNA, 13 nt, Artificial Sequence
  Description of Artificial Sequence: Synthetic oligonucleotide
uauucucuucacu

SEQ ID NO: 10307 - RNA, 14 nt, Artificial Sequence
  Description of Artificial Sequence: Synthetic oligonucleotide
cuaaugcuaagaaa

SEQ ID NO: 10308 - RNA, 12 nt, Artificial Sequence
  Description of Artificial Sequence: Synthetic oligonucleotide
gcugaaaaucaa

SEQ ID NO: 10309 - RNA, 14 nt, Artificial Sequence
  Description of Artificial Sequence: Synthetic oligonucleotide
aauaugauuacuuu

SEQ ID NO: 10310 - RNA, 14 nt, Artificial Sequence
  Description of Artificial Sequence: Synthetic oligonucleotide
cauuuuguucuaca

SEQ ID NO: 10311 - RNA, 12 nt, Artificial Sequence
  Description of Artificial Sequence: Synthetic oligonucleotide
cccgggacucuc

SEQ ID NO: 10312 - RNA, 14 nt, Artificial Sequence
  Description of Artificial Sequence: Synthetic oligonucleotide
ccuuuaaaguaaag

SEQ ID NO: 10313 - RNA, 13 nt, Artificial Sequence
  Description of Artificial Sequence: Synthetic oligonucleotide
ucuggaagccugg

SEQ ID NO: 10314 - RNA, 14 nt, Artificial Sequence
  Description of Artificial Sequence: Synthetic oligonucleotide
aaaacaaaagagag

SEQ ID NO: 10315 - RNA, 13 nt, Artificial Sequence
  Description of Artificial Sequence: Synthetic oligonucleotide
aucaguuaugccg

SEQ ID NO: 10316 - RNA, 13 nt, Artificial Sequence
  Description of Artificial Sequence: Synthetic oligonucleotide
uaaaagaagucca

SEQ ID NO: 10317 - RNA, 11 nt, Artificial Sequence
  Description of Artificial Sequence: Synthetic oligonucleotide
aggugagguua

SEQ ID NO: 10318 - RNA, 11 nt, Artificial Sequence
  Description of Artificial Sequence: Synthetic oligonucleotide
gggaagaggac

SEQ ID NO: 10319 - RNA, 13 nt, Artificial Sequence
  Description of Artificial Sequence: Synthetic oligonucleotide
aagcaaguauugu

SEQ ID NO: 10320 - RNA, 12 nt, Artificial Sequence
  Description of Artificial Sequence: Synthetic oligonucleotide
auuguagcacuc

SEQ ID NO: 10321 - RNA, 14 nt, Artificial Sequence
  Description of Artificial Sequence: Synthetic oligonucleotide
acaaaaccacaaau

SEQ ID NO: 10322 - RNA, 12 nt, Artificial Sequence
  Description of Artificial Sequence: Synthetic oligonucleotide
uaagcccauaca

SEQ ID NO: 10323 - RNA, 11 nt, Artificial Sequence
  Description of Artificial Sequence: Synthetic oligonucleotide
agcccauacag

SEQ ID NO: 10324 - RNA, 12 nt, Artificial Sequence
  Description of Artificial Sequence: Synthetic oligonucleotide
cagaaaccuucc

SEQ ID NO: 10325 - RNA, 10 nt, Artificial Sequence
  Description of Artificial Sequence: Synthetic oligonucleotide
guauaccuac

SEQ ID NO: 10326 - RNA, 13 nt, Artificial Sequence
  Description of Artificial Sequence: Synthetic oligonucleotide
gccaguuuucgga

SEQ ID NO: 10327 - RNA, 9 nt, Artificial Sequence
  Description of Artificial Sequence: Synthetic oligonucleotide
ggaacaggg

SEQ ID NO: 10328 - RNA, 13 nt, Artificial Sequence
  Description of Artificial Sequence: Synthetic oligonucleotide
uuaacuuuccagu

SEQ ID NO: 10329 - RNA, 14 nt, Artificial Sequence
  Description of Artificial Sequence: Synthetic oligonucleotide
aaaguuugguuuug

SEQ ID NO: 10330 - RNA, 12 nt, Artificial Sequence
  Description of Artificial Sequence: Synthetic oligonucleotide
cuucccacugua

SEQ ID NO: 10331 - RNA, 13 nt, Artificial Sequence
  Description of Artificial Sequence: Synthetic oligonucleotide
ugauaccauauga

SEQ ID NO: 10332 - RNA, 11 nt, Artificial Sequence
  Description of Artificial Sequence: Synthetic oligonucleotide
aacaugggcug

SEQ ID NO: 10333 - RNA, 13 nt, Artificial Sequence
  Description of Artificial Sequence: Synthetic oligonucleotide
caacuuuuucaua

SEQ ID NO: 10334 - RNA, 12 nt, Artificial Sequence
  Description of Artificial Sequence: Synthetic oligonucleotide
caugaggccgga

SEQ ID NO: 10335 - RNA, 11 nt, Artificial Sequence
  Description of Artificial Sequence: Synthetic oligonucleotide
acugcauuugu

SEQ ID NO: 10336 - RNA, 13 nt, Artificial Sequence
  Description of Artificial Sequence: Synthetic oligonucleotide
aauguuuacuacc

SEQ ID NO: 10337 - RNA, 15 nt, Artificial Sequence
  Description of Artificial Sequence: Synthetic oligonucleotide
aauuuuuugaugaaa

SEQ ID NO: 10338 - RNA, 14 nt, Artificial Sequence
  Description of Artificial Sequence: Synthetic oligonucleotide
cagugugugaauuu

SEQ ID NO: 10339 - RNA, 13 nt, Artificial Sequence
  Description of Artificial Sequence: Synthetic oligonucleotide
gagcaauguaugu

SEQ ID NO: 10340 - RNA, 14 nt, Artificial Sequence
  Description of Artificial Sequence: Synthetic oligonucleotide
aaagcacauauaua

SEQ ID NO: 10341 - RNA, 14 nt, Artificial Sequence
  Description of Artificial Sequence: Synthetic oligonucleotide
guaauaguuucucc

SEQ ID NO: 10342 - RNA, 13 nt, Artificial Sequence
  Description of Artificial Sequence: Synthetic oligonucleotide
aguuucuccaaau

SEQ ID NO: 10343 - RNA, 13 nt, Artificial Sequence
  Description of Artificial Sequence: Synthetic oligonucleotide
uacuuccuagaaa

SEQ ID NO: 10344 - RNA, 13 nt, Artificial Sequence
  Description of Artificial Sequence: Synthetic oligonucleotide
uacaccauauaug

SEQ ID NO: 10345 - RNA, 14 nt, Artificial Sequence
  Description of Artificial Sequence: Synthetic oligonucleotide
auauaugaauggag

SEQ ID NO: 10346 - RNA, 13 nt, Artificial Sequence
  Description of Artificial Sequence: Synthetic oligonucleotide
acgagaagaagau

SEQ ID NO: 10347 - RNA, 13 nt, Artificial Sequence
  Description of Artificial Sequence: Synthetic oligonucleotide
ucauuuacaggga

SEQ ID NO: 10348 - RNA, 13 nt, Artificial Sequence
  Description of Artificial Sequence: Synthetic oligonucleotide
cauuuacagggac

SEQ ID NO: 10349 - RNA, 10 nt, Artificial Sequence
  Description of Artificial Sequence: Synthetic oligonucleotide
agggaccuga

SEQ ID NO: 10350 - RNA, 14 nt, Artificial Sequence
  Description of Artificial Sequence: Synthetic oligonucleotide
uguuugacugcauc

SEQ ID NO: 10351 - RNA, 13 nt, Artificial Sequence
  Description of Artificial Sequence: Synthetic oligonucleotide
uuugacugcaucg

SEQ ID NO: 10352 - RNA, 12 nt, Artificial Sequence
  Description of Artificial Sequence: Synthetic oligonucleotide
gaguucacaggg

SEQ ID NO: 10353 - RNA, 13 nt, Artificial Sequence
  Description of Artificial Sequence: Synthetic oligonucleotide
ggcaccucugucc

SEQ ID NO: 10354 - RNA, 15 nt, Artificial Sequence
  Description of Artificial Sequence: Synthetic oligonucleotide
gguuugucuuuuuaa

SEQ ID NO: 10355 - RNA, 14 nt, Artificial Sequence
  Description of Artificial Sequence: Synthetic oligonucleotide
uuugucuuuuuaag

SEQ ID NO: 10356 - RNA, 13 nt, Artificial Sequence
  Description of Artificial Sequence: Synthetic oligonucleotide
ccuaaagguuguc

SEQ ID NO: 10357 - RNA, 12 nt, Artificial Sequence
  Description of Artificial Sequence: Synthetic oligonucleotide
aagguugucgac

SEQ ID NO: 10358 - RNA, 13 nt, Artificial Sequence
  Description of Artificial Sequence: Synthetic oligonucleotide
accuggcaauugu

SEQ ID NO: 10359 - RNA, 12 nt, Artificial Sequence
  Description of Artificial Sequence: Synthetic oligonucleotide
aguggugcgagg

SEQ ID NO: 10360 - RNA, 13 nt, Artificial Sequence
  Description of Artificial Sequence: Synthetic oligonucleotide
agagacaugaaau

SEQ ID NO: 10361 - RNA, 13 nt, Artificial Sequence
  Description of Artificial Sequence: Synthetic oligonucleotide
auauauuucucca

SEQ ID NO: 10362 - RNA, 10 nt, Artificial Sequence
  Description of Artificial Sequence: Synthetic oligonucleotide
caugaaggcu

SEQ ID NO: 10363 - RNA, 11 nt, Artificial Sequence
  Description of Artificial Sequence: Synthetic oligonucleotide
gcuggaguggu

SEQ ID NO: 10364 - RNA, 11 nt, Artificial Sequence
  Description of Artificial Sequence: Synthetic oligonucleotide
aggaagagagg

SEQ ID NO: 10365 - RNA, 12 nt, Artificial Sequence
  Description of Artificial Sequence: Synthetic oligonucleotide
cuugcaucgggc

SEQ ID NO: 10366 - RNA, 13 nt, Artificial Sequence
  Description of Artificial Sequence: Synthetic oligonucleotide
auauccuacugug

SEQ ID NO: 10367 - RNA, 13 nt, Artificial Sequence
  Description of Artificial Sequence: Synthetic oligonucleotide
uccuacuguguaa

SEQ ID NO: 10368 - RNA, 12 nt, Artificial Sequence
  Description of Artificial Sequence: Synthetic oligonucleotide
ccuuguagugua

SEQ ID NO: 10369 - RNA, 13 nt, Artificial Sequence
  Description of Artificial Sequence: Synthetic oligonucleotide
ucuuuguugauug

SEQ ID NO: 10370 - RNA, 14 nt, Artificial Sequence
  Description of Artificial Sequence: Synthetic oligonucleotide
uuuguugauugaaa

SEQ ID NO: 10371 - RNA, 15 nt, Artificial Sequence
  Description of Artificial Sequence: Synthetic oligonucleotide
uucuuuuucuuccau

SEQ ID NO: 10372 - RNA, 13 nt, Artificial Sequence
  Description of Artificial Sequence: Synthetic oligonucleotide
aaucuuccuucua

SEQ ID NO: 10373 - RNA, 13 nt, Artificial Sequence
  Description of Artificial Sequence: Synthetic oligonucleotide
uugaaugcuucau

SEQ ID NO: 10374 - RNA, 13 nt, Artificial Sequence
  Description of Artificial Sequence: Synthetic oligonucleotide
ugaaugcuucaug

SEQ ID NO: 10375 - RNA, 13 nt, Artificial Sequence
  Description of Artificial Sequence: Synthetic oligonucleotide
aauucuacuuuga

SEQ ID NO: 10376 - RNA, 13 nt, Artificial Sequence
  Description of Artificial Sequence: Synthetic oligonucleotide
agcaacuacagac

SEQ ID NO: 10377 - RNA, 13 nt, Artificial Sequence
  Description of Artificial Sequence: Synthetic oligonucleotide
gaccaaggucaac

SEQ ID NO: 10378 - RNA, 13 nt, Artificial Sequence
  Description of Artificial Sequence: Synthetic oligonucleotide
cgacuaucucgac

SEQ ID NO: 10379 - RNA, 13 nt, Artificial Sequence
  Description of Artificial Sequence: Synthetic oligonucleotide
aaccuucccaaac

SEQ ID NO: 10380 - RNA, 14 nt, Artificial Sequence
  Description of Artificial Sequence: Synthetic oligonucleotide
ccaagcuuagaacu

SEQ ID NO: 10381 - RNA, 15 nt, Artificial Sequence
  Description of Artificial Sequence: Synthetic oligonucleotide
agcuuagaacuuuaa

SEQ ID NO: 10382 - RNA, 11 nt, Artificial Sequence
  Description of Artificial Sequence: Synthetic oligonucleotide
aagaccaccac

SEQ ID NO: 10383 - RNA, 14 nt, Artificial Sequence
  Description of Artificial Sequence: Synthetic oligonucleotide
gcgagaaauaaagu

SEQ ID NO: 10384 - RNA, 14 nt, Artificial Sequence
  Description of Artificial Sequence: Synthetic oligonucleotide
cgagaaauaaaguu

SEQ ID NO: 10385 - RNA, 12 nt, Artificial Sequence
  Description of Artificial Sequence: Synthetic oligonucleotide
aggaaaugaucc

SEQ ID NO: 10386 - RNA, 13 nt, Artificial Sequence
  Description of Artificial Sequence: Synthetic oligonucleotide
gaagaaaugaaac

SEQ ID NO: 10387 - RNA, 13 nt, Artificial Sequence
  Description of Artificial Sequence: Synthetic oligonucleotide
guuuccauccucc

SEQ ID NO: 10388 - RNA, 15 nt, Artificial Sequence
  Description of Artificial Sequence: Synthetic oligonucleotide
acugaaaaucuuuga

SEQ ID NO: 10389 - RNA, 11 nt, Artificial Sequence
  Description of Artificial Sequence: Synthetic oligonucleotide
ugccguucagg

SEQ ID NO: 10390 - RNA, 13 nt, Artificial Sequence
  Description of Artificial Sequence: Synthetic oligonucleotide
caggguccagaag

SEQ ID NO: 10391 - RNA, 13 nt, Artificial Sequence
  Description of Artificial Sequence: Synthetic oligonucleotide
ucaagacugcuug

SEQ ID NO: 10392 - RNA, 13 nt, Artificial Sequence
  Description of Artificial Sequence: Synthetic oligonucleotide
uccaugucuuugg

SEQ ID NO: 10393 - RNA, 11 nt, Artificial Sequence
  Description of Artificial Sequence: Synthetic oligonucleotide
gccugaaacac

SEQ ID NO: 10394 - RNA, 12 nt, Artificial Sequence
  Description of Artificial Sequence: Synthetic oligonucleotide
ucucuguaccuc

SEQ ID NO: 10395 - RNA, 12 nt, Artificial Sequence
  Description of Artificial Sequence: Synthetic oligonucleotide
agcaagacaaga

SEQ ID NO: 10396 - RNA, 13 nt, Artificial Sequence
  Description of Artificial Sequence: Synthetic oligonucleotide
gcaagacaagaaa

SEQ ID NO: 10397 - RNA, 12 nt, Artificial Sequence
  Description of Artificial Sequence: Synthetic oligonucleotide
uguacaagaucc

SEQ ID NO: 10398 - RNA, 12 nt, Artificial Sequence
  Description of Artificial Sequence: Synthetic oligonucleotide
cguacuugcaga

SEQ ID NO: 10399 - RNA, 13 nt, Artificial Sequence
  Description of Artificial Sequence: Synthetic oligonucleotide
cgaucgauacaga

SEQ ID NO: 10400 - RNA, 13 nt, Artificial Sequence
  Description of Artificial Sequence: Synthetic oligonucleotide
uauaaaaauaaau

SEQ ID NO: 10401 - RNA, 13 nt, Artificial Sequence
  Description of Artificial Sequence: Synthetic oligonucleotide
uaaaaauaaauau

SEQ ID NO: 10402 - RNA, 13 nt, Artificial Sequence
  Description of Artificial Sequence: Synthetic oligonucleotide
uuugacugcugug

SEQ ID NO: 10403 - RNA, 13 nt, Artificial Sequence
  Description of Artificial Sequence: Synthetic oligonucleotide
ggagaugagagac

SEQ ID NO: 10404 - RNA, 10 nt, Artificial Sequence
  Description of Artificial Sequence: Synthetic oligonucleotide
ucccacuugg

SEQ ID NO: 10405 - RNA, 10 nt, Artificial Sequence
  Description of Artificial Sequence: Synthetic oligonucleotide
guucacggcc

SEQ ID NO: 10406 - RNA, 12 nt, Artificial Sequence
  Description of Artificial Sequence: Synthetic oligonucleotide
accaucacacca

SEQ ID NO: 10407 - RNA, 10 nt, Artificial Sequence
  Description of Artificial Sequence: Synthetic oligonucleotide
cugcggguuu

SEQ ID NO: 10408 - RNA, 9 nt, Artificial Sequence
  Description of Artificial Sequence: Synthetic oligonucleotide
uccaguuug

SEQ ID NO: 10409 - RNA, 12 nt, Artificial Sequence
  Description of Artificial Sequence: Synthetic oligonucleotide
uuaaggacuucu

SEQ ID NO: 10410 - RNA, 12 nt, Artificial Sequence
  Description of Artificial Sequence: Synthetic oligonucleotide
agugggacagag

SEQ ID NO: 10411 - RNA, 13 nt, Artificial Sequence
  Description of Artificial Sequence: Synthetic oligonucleotide
auuuguuauugug

SEQ ID NO: 10412 - RNA, 12 nt, Artificial Sequence
  Description of Artificial Sequence: Synthetic oligonucleotide
ucaaaugcauuu

SEQ ID NO: 10413 - RNA, 9 nt, Artificial Sequence
  Description of Artificial Sequence: Synthetic oligonucleotide
aggaaagcc

SEQ ID NO: 10414 - RNA, 10 nt, Artificial Sequence
  Description of Artificial Sequence: Synthetic oligonucleotide
ggaaagcccu

SEQ ID NO: 10415 - RNA, 11 nt, Artificial Sequence
  Description of Artificial Sequence: Synthetic oligonucleotide
ccagcauggcc

SEQ ID NO: 10416 - RNA, 10 nt, Artificial Sequence
  Description of Artificial Sequence: Synthetic oligonucleotide
uucucccuga

SEQ ID NO: 10417 - RNA, 11 nt, Artificial Sequence
  Description of Artificial Sequence: Synthetic oligonucleotide
aagaagcccuu

SEQ ID NO: 10418 - RNA, 11 nt, Artificial Sequence
  Description of Artificial Sequence: Synthetic oligonucleotide
gaagcccuuca

SEQ ID NO: 10419 - RNA, 10 nt, Artificial Sequence
  Description of Artificial Sequence: Synthetic oligonucleotide
cccuucagcg

SEQ ID NO: 10420 - RNA, 10 nt, Artificial Sequence
  Description of Artificial Sequence: Synthetic oligonucleotide
cuucagcggc

SEQ ID NO: 10421 - RNA, 11 nt, Artificial Sequence
  Description of Artificial Sequence: Synthetic oligonucleotide
cagcggccagu

SEQ ID NO: 10422 - RNA, 11 nt, Artificial Sequence
  Description of Artificial Sequence: Synthetic oligonucleotide
gaaaagcuccg

SEQ ID NO: 10423 - RNA, 10 nt, Artificial Sequence
  Description of Artificial Sequence: Synthetic oligonucleotide
aaagcuccgg

SEQ ID NO: 10424 - RNA, 12 nt, Artificial Sequence
  Description of Artificial Sequence: Synthetic oligonucleotide
gucaacagucug

SEQ ID NO: 10425 - RNA, 12 nt, Artificial Sequence
  Description of Artificial Sequence: Synthetic oligonucleotide
agaguucaaaag

SEQ ID NO: 10426 - RNA, 12 nt, Artificial Sequence
  Description of Artificial Sequence: Synthetic oligonucleotide
gaguucaaaagc

SEQ ID NO: 10427 - RNA, 11 nt, Artificial Sequence
  Description of Artificial Sequence: Synthetic oligonucleotide
ucaaaagcccu

SEQ ID NO: 10428 - RNA, 11 nt, Artificial Sequence
  Description of Artificial Sequence: Synthetic oligonucleotide
caaaagcccuu

SEQ ID NO: 10429 - RNA, 11 nt, Artificial Sequence
  Description of Artificial Sequence: Synthetic oligonucleotide
aaagcccuuca

SEQ ID NO: 10430 - RNA, 11 nt, Artificial Sequence
  Description of Artificial Sequence: Synthetic oligonucleotide
aagcccuucag

SEQ ID NO: 10431 - RNA, 12 nt, Artificial Sequence
  Description of Artificial Sequence: Synthetic oligonucleotide
ugaagccgcucg

SEQ ID NO: 10432 - RNA, 11 nt, Artificial Sequence
  Description of Artificial Sequence: Synthetic oligonucleotide
acgccagucaa

SEQ ID NO: 10433 - RNA, 12 nt, Artificial Sequence
  Description of Artificial Sequence: Synthetic oligonucleotide
ucuuggugcgug

SEQ ID NO: 10434 - RNA, 13 nt, Artificial Sequence
  Description of Artificial Sequence: Synthetic oligonucleotide
uuggauucaucag

SEQ ID NO: 10435 - RNA, 12 nt, Artificial Sequence
  Description of Artificial Sequence: Synthetic oligonucleotide
ggaauaccuaag

SEQ ID NO: 10436 - RNA, 11 nt, Artificial Sequence
  Description of Artificial Sequence: Synthetic oligonucleotide
uuugaggcuca

SEQ ID NO: 10437 - RNA, 10 nt, Artificial Sequence
  Description of Artificial Sequence: Synthetic oligonucleotide
cuacaauugg

SEQ ID NO: 10438 - RNA, 11 nt, Artificial Sequence
  Description of Artificial Sequence: Synthetic oligonucleotide
aguuaggagcc

SEQ ID NO: 10439 - RNA, 12 nt, Artificial Sequence
  Description of Artificial Sequence: Synthetic oligonucleotide
gucaauauccac

SEQ ID NO: 10440 - RNA, 12 nt, Artificial Sequence
  Description of Artificial Sequence: Synthetic oligonucleotide
uguucagucaca

SEQ ID NO: 10441 - RNA, 11 nt, Artificial Sequence
  Description of Artificial Sequence: Synthetic oligonucleotide
cacacacauac

SEQ ID NO: 10442 - RNA, 11 nt, Artificial Sequence
  Description of Artificial Sequence: Synthetic oligonucleotide
uccuuuugcuu

SEQ ID NO: 10443 - RNA, 15 nt, Artificial Sequence
  Description of Artificial Sequence: Synthetic oligonucleotide
uuuaaaguaauuuuu

SEQ ID NO: 10444 - RNA, 12 nt, Artificial Sequence
  Description of Artificial Sequence: Synthetic oligonucleotide
aacagucaaugg

SEQ ID NO: 10445 - RNA, 12 nt, Artificial Sequence
  Description of Artificial Sequence: Synthetic oligonucleotide
cgacaaaccaau

SEQ ID NO: 10446 - RNA, 11 nt, Artificial Sequence
  Description of Artificial Sequence: Synthetic oligonucleotide
cugcuaccacu

SEQ ID NO: 10447 - RNA, 12 nt, Artificial Sequence
  Description of Artificial Sequence: Synthetic oligonucleotide
caagcggucuua

SEQ ID NO: 10448 - RNA, 12 nt, Artificial Sequence
  Description of Artificial Sequence: Synthetic oligonucleotide
gucuuaccggcu

SEQ ID NO: 10449 - RNA, 10 nt, Artificial Sequence
  Description of Artificial Sequence: Synthetic oligonucleotide
auggguuacc

SEQ ID NO: 10450 - RNA, 10 nt, Artificial Sequence
  Description of Artificial Sequence: Synthetic oligonucleotide
uuaccugcga

SEQ ID NO: 10451 - RNA, 11 nt, Artificial Sequence
  Description of Artificial Sequence: Synthetic oligonucleotide
aucuugcugag

SEQ ID NO: 10452 - RNA, 12 nt, Artificial Sequence
  Description of Artificial Sequence: Synthetic oligonucleotide
gcauaaaacagu

SEQ ID NO: 10453 - RNA, 11 nt, Artificial Sequence
  Description of Artificial Sequence: Synthetic oligonucleotide
uccuuuauccu

SEQ ID NO: 10454 - RNA, 11 nt, Artificial Sequence
  Description of Artificial Sequence: Synthetic oligonucleotide
aacgcaaguug

SEQ ID NO: 10455 - RNA, 12 nt, Artificial Sequence
  Description of Artificial Sequence: Synthetic oligonucleotide
aacugaaaccau

SEQ ID NO: 10456 - RNA, 13 nt, Artificial Sequence
  Description of Artificial Sequence: Synthetic oligonucleotide
cuuuguuaaauau

SEQ ID NO: 10457 - RNA, 13 nt, Artificial Sequence
  Description of Artificial Sequence: Synthetic oligonucleotide
uauauuaaaaguu

SEQ ID NO: 10458 - RNA, 12 nt, Artificial Sequence
  Description of Artificial Sequence: Synthetic oligonucleotide
uuuugacuuaac

SEQ ID NO: 10459 - RNA, 12 nt, Artificial Sequence
  Description of Artificial Sequence: Synthetic oligonucleotide
caaacucagcac

SEQ ID NO: 10460 - RNA, 10 nt, Artificial Sequence
  Description of Artificial Sequence: Synthetic oligonucleotide
gcugaccuca

SEQ ID NO: 10461 - RNA, 13 nt, Artificial Sequence
  Description of Artificial Sequence: Synthetic oligonucleotide
uuauucagaucgc

SEQ ID NO: 10462 - RNA, 12 nt, Artificial Sequence
  Description of Artificial Sequence: Synthetic oligonucleotide
ggguucugggau

SEQ ID NO: 10463 - RNA, 14 nt, Artificial Sequence
  Description of Artificial Sequence: Synthetic oligonucleotide
uauuggaaauuaug

SEQ ID NO: 10464 - RNA, 12 nt, Artificial Sequence
  Description of Artificial Sequence: Synthetic oligonucleotide
uggaagcacuag

SEQ ID NO: 10465 - RNA, 12 nt, Artificial Sequence
  Description of Artificial Sequence: Synthetic oligonucleotide
uuuuuaugugga

SEQ ID NO: 10466 - RNA, 11 nt, Artificial Sequence
  Description of Artificial Sequence: Synthetic oligonucleotide
gaauugguaga

SEQ ID NO: 10467 - RNA, 12 nt, Artificial Sequence
  Description of Artificial Sequence: Synthetic oligonucleotide
uagacuuggaga

SEQ ID NO: 10468 - RNA, 12 nt, Artificial Sequence
  Description of Artificial Sequence: Synthetic oligonucleotide
uacaguauucca

SEQ ID NO: 10469 - RNA, 14 nt, Artificial Sequence
  Description of Artificial Sequence: Synthetic oligonucleotide
cacugaugaauuaa

SEQ ID NO: 10470 - RNA, 11 nt, Artificial Sequence
  Description of Artificial Sequence: Synthetic oligonucleotide
cacaucaucac

SEQ ID NO: 10471 - RNA, 12 nt, Artificial Sequence
  Description of Artificial Sequence: Synthetic oligonucleotide
ucaccaaacaga

SEQ ID NO: 10472 - RNA, 11 nt, Artificial Sequence
  Description of Artificial Sequence: Synthetic oligonucleotide
gaacaugaugg

SEQ ID NO: 10473 - RNA, 11 nt, Artificial Sequence
  Description of Artificial Sequence: Synthetic oligonucleotide
auguagacugc

SEQ ID NO: 10474 - RNA, 12 nt, Artificial Sequence
  Description of Artificial Sequence: Synthetic oligonucleotide
gaucuauuuaug

SEQ ID NO: 10475 - RNA, 11 nt, Artificial Sequence
  Description of Artificial Sequence: Synthetic oligonucleotide
cacuauuauca

SEQ ID NO: 10476 - RNA, 10 nt, Artificial Sequence
  Description of Artificial Sequence: Synthetic oligonucleotide
ucaguucugc

SEQ ID NO: 10477 - RNA, 12 nt, Artificial Sequence
  Description of Artificial Sequence: Synthetic oligonucleotide
gauuaaaccuac

SEQ ID NO: 10478 - RNA, 12 nt, Artificial Sequence
  Description of Artificial Sequence: Synthetic oligonucleotide
uaaaauccuucu

SEQ ID NO: 10479 - RNA, 11 nt, Artificial Sequence
  Description of Artificial Sequence: Synthetic oligonucleotide
augcuguagac

SEQ ID NO: 10480 - RNA, 12 nt, Artificial Sequence
  Description of Artificial Sequence: Synthetic oligonucleotide
ugauaggaauag

SEQ ID NO: 10481 - RNA, 10 nt, Artificial Sequence
  Description of Artificial Sequence: Synthetic oligonucleotide
auggcccuga

SEQ ID NO: 10482 - RNA, 10 nt, Artificial Sequence
  Description of Artificial Sequence: Synthetic oligonucleotide
uccucaagca

SEQ ID NO: 10483 - RNA, 9 nt, Artificial Sequence
  Description of Artificial Sequence: Synthetic oligonucleotide
uucagccca

SEQ ID NO: 10484 - RNA, 10 nt, Artificial Sequence
  Description of Artificial Sequence: Synthetic oligonucleotide
cugcugaacc

SEQ ID NO: 10485 - RNA, 11 nt, Artificial Sequence
  Description of Artificial Sequence: Synthetic oligonucleotide
aguucucuuca

SEQ ID NO: 10486 - RNA, 10 nt, Artificial Sequence
  Description of Artificial Sequence: Synthetic oligonucleotide
cagccuagag

SEQ ID NO: 10487 - RNA, 12 nt, Artificial Sequence
  Description of Artificial Sequence: Synthetic oligonucleotide
ucugugaagugu

SEQ ID NO: 10488 - RNA, 13 nt, Artificial Sequence
  Description of Artificial Sequence: Synthetic oligonucleotide
gagaaaauuucaa

SEQ ID NO: 10489 - RNA, 10 nt, Artificial Sequence
  Description of Artificial Sequence: Synthetic oligonucleotide
auccuccuga

SEQ ID NO: 10490 - RNA, 11 nt, Artificial Sequence
  Description of Artificial Sequence: Synthetic oligonucleotide
ugacaucauau

SEQ ID NO: 10491 - RNA, 12 nt, Artificial Sequence
  Description of Artificial Sequence: Synthetic oligonucleotide
aucuucaucaua

SEQ ID NO: 10492 - RNA, 12 nt, Artificial Sequence
  Description of Artificial Sequence: Synthetic oligonucleotide
acuagcuauuaa

SEQ ID NO: 10493 - RNA, 13 nt, Artificial Sequence
  Description of Artificial Sequence: Synthetic oligonucleotide
cucuacuaaaaau

SEQ ID NO: 10494 - RNA, 11 nt, Artificial Sequence
  Description of Artificial Sequence: Synthetic oligonucleotide
cuaucucgccu

SEQ ID NO: 10495 - RNA, 12 nt, Artificial Sequence
  Description of Artificial Sequence: Synthetic oligonucleotide
uucgguccaguu

SEQ ID NO: 10496 - RNA, 10 nt, Artificial Sequence
  Description of Artificial Sequence: Synthetic oligonucleotide
auguagccgc

SEQ ID NO: 10497 - RNA, 11 nt, Artificial Sequence
  Description of Artificial Sequence: Synthetic oligonucleotide
gaggagacuug

SEQ ID NO: 10498 - RNA, 11 nt, Artificial Sequence
  Description of Artificial Sequence: Synthetic oligonucleotide
aguagugagga

SEQ ID NO: 10499 - RNA, 13 nt, Artificial Sequence
  Description of Artificial Sequence: Synthetic oligonucleotide
agaugaguacaaa

SEQ ID NO: 10500 - RNA, 12 nt, Artificial Sequence
  Description of Artificial Sequence: Synthetic oligonucleotide
uuguuaaugggc

SEQ ID NO: 10501 - RNA, 12 nt, Artificial Sequence
  Description of Artificial Sequence: Synthetic oligonucleotide
uuuuaauuuauu

SEQ ID NO: 10502 - RNA, 11 nt, Artificial Sequence
  Description of Artificial Sequence: Synthetic oligonucleotide
auuuaaauaug

SEQ ID NO: 10503 - RNA, 12 nt, Artificial Sequence
  Description of Artificial Sequence: Synthetic oligonucleotide
auccuuuguuuc

SEQ ID NO: 10504 - RNA, 13 nt, Artificial Sequence
  Description of Artificial Sequence: Synthetic oligonucleotide
gucuaaguguuug

SEQ ID NO: 10505 - RNA, 11 nt, Artificial Sequence
  Description of Artificial Sequence: Synthetic oligonucleotide
ccugugacaaa

SEQ ID NO: 10506 - RNA, 12 nt, Artificial Sequence
  Description of Artificial Sequence: Synthetic oligonucleotide
caggcugaauua

SEQ ID NO: 10507 - RNA, 13 nt, Artificial Sequence
  Description of Artificial Sequence: Synthetic oligonucleotide
ucauucuuacaau

SEQ ID NO: 10508 - RNA, 14 nt, Artificial Sequence
  Description of Artificial Sequence: Synthetic oligonucleotide
cauucuuacaauug

SEQ ID NO: 10509 - RNA, 11 nt, Artificial Sequence
  Description of Artificial Sequence: Synthetic oligonucleotide
agagaguguac

SEQ ID NO: 10510 - RNA, 11 nt, Artificial Sequence
  Description of Artificial Sequence: Synthetic oligonucleotide
gaacucagcag

SEQ ID NO: 10511 - RNA, 12 nt, Artificial Sequence
  Description of Artificial Sequence: Synthetic oligonucleotide
uuauuuucagua

SEQ ID NO: 10512 - RNA, 11 nt, Artificial Sequence
  Description of Artificial Sequence: Synthetic oligonucleotide
cuuaaauggaa

SEQ ID NO: 10513 - RNA, 12 nt, Artificial Sequence
  Description of Artificial Sequence: Synthetic oligonucleotide
gccuaaaauugu

SEQ ID NO: 10514 - RNA, 12 nt, Artificial Sequence
  Description of Artificial Sequence: Synthetic oligonucleotide
acuaacaucugg

SEQ ID NO: 10515 - RNA, 11 nt, Artificial Sequence
  Description of Artificial Sequence: Synthetic oligonucleotide
gacugugagcu

SEQ ID NO: 10516 - RNA, 13 nt, Artificial Sequence
  Description of Artificial Sequence: Synthetic oligonucleotide
gcuuuuuauuaau

SEQ ID NO: 10517 - RNA, 12 nt, Artificial Sequence
  Description of Artificial Sequence: Synthetic oligonucleotide
ucuucuuacauu

SEQ ID NO: 10518 - RNA, 14 nt, Artificial Sequence
  Description of Artificial Sequence: Synthetic oligonucleotide
auuuguaaaaaugu

SEQ ID NO: 10519 - RNA, 14 nt, Artificial Sequence
  Description of Artificial Sequence: Synthetic oligonucleotide
ucuuaauucauauu

SEQ ID NO: 10520 - RNA, 12 nt, Artificial Sequence
  Description of Artificial Sequence: Synthetic oligonucleotide
aacuaaucauga

SEQ ID NO: 10521 - RNA, 11 nt, Artificial Sequence
  Description of Artificial Sequence: Synthetic oligonucleotide
cugcucuuggg

SEQ ID NO: 10522 - RNA, 12 nt, Artificial Sequence
  Description of Artificial Sequence: Synthetic oligonucleotide
aguagcuuugag

SEQ ID NO: 10523 - RNA, 13 nt, Artificial Sequence
  Description of Artificial Sequence: Synthetic oligonucleotide
acguaauauuuca

SEQ ID NO: 10524 - RNA, 12 nt, Artificial Sequence
  Description of Artificial Sequence: Synthetic oligonucleotide
auucucuucacu

SEQ ID NO: 10525 - RNA, 13 nt, Artificial Sequence
  Description of Artificial Sequence: Synthetic oligonucleotide
uaaugcuaagaaa

SEQ ID NO: 10526 - RNA, 11 nt, Artificial Sequence
  Description of Artificial Sequence: Synthetic oligonucleotide
cugaaaaucaa

SEQ ID NO: 10527 - RNA, 13 nt, Artificial Sequence
  Description of Artificial Sequence: Synthetic oligonucleotide
auaugauuacuuu

SEQ ID NO: 10528 - RNA, 13 nt, Artificial Sequence
  Description of Artificial Sequence: Synthetic oligonucleotide
auuuuguucuaca

SEQ ID NO: 10529 - RNA, 11 nt, Artificial Sequence
  Description of Artificial Sequence: Synthetic oligonucleotide
ccgggacucuc

SEQ ID NO: 10530 - RNA, 13 nt, Artificial Sequence
  Description of Artificial Sequence: Synthetic oligonucleotide
cuuuaaaguaaag

SEQ ID NO: 10531 - RNA, 12 nt, Artificial Sequence
  Description of Artificial Sequence: Synthetic oligonucleotide
cuggaagccugg

SEQ ID NO: 10532 - RNA, 13 nt, Artificial Sequence
  Description of Artificial Sequence: Synthetic oligonucleotide
aaacaaaagagag

SEQ ID NO: 10533 - RNA, 12 nt, Artificial Sequence
  Description of Artificial Sequence: Synthetic oligonucleotide
ucaguuaugccg

SEQ ID NO: 10534 - RNA, 12 nt, Artificial Sequence
  Description of Artificial Sequence: Synthetic oligonucleotide
aaaagaagucca

SEQ ID NO: 10535 - RNA, 10 nt, Artificial Sequence
  Description of Artificial Sequence: Synthetic oligonucleotide
ggugagguua

SEQ ID NO: 10536 - RNA, 10 nt, Artificial Sequence
  Description of Artificial Sequence: Synthetic oligonucleotide
ggaagaggac

SEQ ID NO: 10537 - RNA, 12 nt, Artificial Sequence
  Description of Artificial Sequence: Synthetic oligonucleotide
agcaaguauugu

SEQ ID NO: 10538 - RNA, 11 nt, Artificial Sequence
  Description of Artificial Sequence: Synthetic oligonucleotide
uuguagcacuc

SEQ ID NO: 10539 - RNA, 13 nt, Artificial Sequence
  Description of Artificial Sequence: Synthetic oligonucleotide
caaaaccacaaau

SEQ ID NO: 10540 - RNA, 11 nt, Artificial Sequence
  Description of Artificial Sequence: Synthetic oligonucleotide
aagcccauaca

SEQ ID NO: 10541 - RNA, 10 nt, Artificial Sequence
  Description of Artificial Sequence: Synthetic oligonucleotide
gcccauacag

SEQ ID NO: 10542 - RNA, 11 nt, Artificial Sequence
  Description of Artificial Sequence: Synthetic oligonucleotide
agaaaccuucc

SEQ ID NO: 10543 - RNA, 9 nt, Artificial Sequence
  Description of Artificial Sequence: Synthetic oligonucleotide
uauaccuac

SEQ ID NO: 10544 - RNA, 12 nt, Artificial Sequence
  Description of Artificial Sequence: Synthetic oligonucleotide
ccaguuuucgga

SEQ ID NO: 10545 - RNA, 8 nt, Artificial Sequence
  Description of Artificial Sequence: Synthetic oligonucleotide
gaacaggg

SEQ ID NO: 10546 - RNA, 12 nt, Artificial Sequence
  Description of Artificial Sequence: Synthetic oligonucleotide
uaacuuuccagu

SEQ ID NO: 10547 - RNA, 13 nt, Artificial Sequence
  Description of Artificial Sequence: Synthetic oligonucleotide
aaguuugguuuug

SEQ ID NO: 10548 - RNA, 11 nt, Artificial Sequence
  Description of Artificial Sequence: Synthetic oligonucleotide
uucccacugua

SEQ ID NO: 10549 - RNA, 12 nt, Artificial Sequence
  Description of Artificial Sequence: Synthetic oligonucleotide
gauaccauauga

SEQ ID NO: 10550 - RNA, 10 nt, Artificial Sequence
  Description of Artificial Sequence: Synthetic oligonucleotide
acaugggcug

SEQ ID NO: 10551 - RNA, 12 nt, Artificial Sequence
  Description of Artificial Sequence: Synthetic oligonucleotide
aacuuuuucaua

SEQ ID NO: 10552 - RNA, 11 nt, Artificial Sequence
  Description of Artificial Sequence: Synthetic oligonucleotide
augaggccgga

SEQ ID NO: 10553 - RNA, 10 nt, Artificial Sequence
  Description of Artificial Sequence: Synthetic oligonucleotide
cugcauuugu

SEQ ID NO: 10554 - RNA, 12 nt, Artificial Sequence
  Description of Artificial Sequence: Synthetic oligonucleotide
auguuuacuacc

SEQ ID NO: 10555 - RNA, 14 nt, Artificial Sequence
  Description of Artificial Sequence: Synthetic oligonucleotide
auuuuuugaugaaa

SEQ ID NO: 10556 - RNA, 13 nt, Artificial Sequence
  Description of Artificial Sequence: Synthetic oligonucleotide
agugugugaauuu

SEQ ID NO: 10557 - RNA, 12 nt, Artificial Sequence
  Description of Artificial Sequence: Synthetic oligonucleotide
agcaauguaugu

SEQ ID NO: 10558 - RNA, 13 nt, Artificial Sequence
  Description of Artificial Sequence: Synthetic oligonucleotide
aagcacauauaua

SEQ ID NO: 10559 - RNA, 13 nt, Artificial Sequence
  Description of Artificial Sequence: Synthetic oligonucleotide
uaauaguuucucc

SEQ ID NO: 10560 - RNA, 12 nt, Artificial Sequence
  Description of Artificial Sequence: Synthetic oligonucleotide
guuucuccaaau

SEQ ID NO: 10561 - RNA, 12 nt, Artificial Sequence
  Description of Artificial Sequence: Synthetic oligonucleotide
acuuccuagaaa

SEQ ID NO: 10562 - RNA, 12 nt, Artificial Sequence
  Description of Artificial Sequence: Synthetic oligonucleotide
acaccauauaug

SEQ ID NO: 10563 - RNA, 13 nt, Artificial Sequence
  Description of Artificial Sequence: Synthetic oligonucleotide
uauaugaauggag

SEQ ID NO: 10564 - RNA, 12 nt, Artificial Sequence
  Description of Artificial Sequence: Synthetic oligonucleotide
cauuuacaggga

SEQ ID NO: 10565 - RNA, 12 nt, Artificial Sequence
  Description of Artificial Sequence: Synthetic oligonucleotide
auuuacagggac

SEQ ID NO: 10566 - RNA, 9 nt, Artificial Sequence
  Description of Artificial Sequence: Synthetic oligonucleotide
gggaccuga

SEQ ID NO: 10567 - RNA, 13 nt, Artificial Sequence
  Description of Artificial Sequence: Synthetic oligonucleotide
guuugacugcauc

SEQ ID NO: 10568 - RNA, 12 nt, Artificial Sequence
  Description of Artificial Sequence: Synthetic oligonucleotide
uugacugcaucg

SEQ ID NO: 10569 - RNA, 11 nt, Artificial Sequence
  Description of Artificial Sequence: Synthetic oligonucleotide
aguucacaggg

SEQ ID NO: 10570 - RNA, 12 nt, Artificial Sequence
  Description of Artificial Sequence: Synthetic oligonucleotide
gcaccucugucc

SEQ ID NO: 10571 - RNA, 14 nt, Artificial Sequence
  Description of Artificial Sequence: Synthetic oligonucleotide
guuugucuuuuuaa

SEQ ID NO: 10572 - RNA, 13 nt, Artificial Sequence
  Description of Artificial Sequence: Synthetic oligonucleotide
uugucuuuuuaag

SEQ ID NO: 10573 - RNA, 12 nt, Artificial Sequence
  Description of Artificial Sequence: Synthetic oligonucleotide
cuaaagguuguc

SEQ ID NO: 10574 - RNA, 11 nt, Artificial Sequence
  Description of Artificial Sequence: Synthetic oligonucleotide
agguugucgac

SEQ ID NO: 10575 - RNA, 12 nt, Artificial Sequence
  Description of Artificial Sequence: Synthetic oligonucleotide
ccuggcaauugu

SEQ ID NO: 10576 - RNA, 11 nt, Artificial Sequence
  Description of Artificial Sequence: Synthetic oligonucleotide
guggugcgagg

SEQ ID NO: 10577 - RNA, 12 nt, Artificial Sequence
  Description of Artificial Sequence: Synthetic oligonucleotide
gagacaugaaau

SEQ ID NO: 10578 - RNA, 12 nt, Artificial Sequence
  Description of Artificial Sequence: Synthetic oligonucleotide
uauauuucucca

SEQ ID NO: 10579 - RNA, 9 nt, Artificial Sequence
  Description of Artificial Sequence: Synthetic oligonucleotide
augaaggcu

SEQ ID NO: 10580 - RNA, 10 nt, Artificial Sequence
  Description of Artificial Sequence: Synthetic oligonucleotide
cuggaguggu

SEQ ID NO: 10581 - RNA, 10 nt, Artificial Sequence
  Description of Artificial Sequence: Synthetic oligonucleotide
ggaagagagg

SEQ ID NO: 10582 - RNA, 11 nt, Artificial Sequence
  Description of Artificial Sequence: Synthetic oligonucleotide
uugcaucgggc

SEQ ID NO: 10583 - RNA, 12 nt, Artificial Sequence
  Description of Artificial Sequence: Synthetic oligonucleotide
uauccuacugug

SEQ ID NO: 10584 - RNA, 12 nt, Artificial Sequence
  Description of Artificial Sequence: Synthetic oligonucleotide
ccuacuguguaa

SEQ ID NO: 10585 - RNA, 11 nt, Artificial Sequence
  Description of Artificial Sequence: Synthetic oligonucleotide
cuuguagugua

SEQ ID NO: 10586 - RNA, 12 nt, Artificial Sequence
  Description of Artificial Sequence: Synthetic oligonucleotide
cuuuguugauug

SEQ ID NO: 10587 - RNA, 13 nt, Artificial Sequence
  Description of Artificial Sequence: Synthetic oligonucleotide
uuguugauugaaa

SEQ ID NO: 10588 - RNA, 14 nt, Artificial Sequence
  Description of Artificial Sequence: Synthetic oligonucleotide
ucuuuuucuuccau

SEQ ID NO: 10589 - RNA, 12 nt, Artificial Sequence
  Description of Artificial Sequence: Synthetic oligonucleotide
aucuuccuucua

SEQ ID NO: 10590 - RNA, 12 nt, Artificial Sequence
  Description of Artificial Sequence: Synthetic oligonucleotide
ugaaugcuucau

SEQ ID NO: 10591 - RNA, 12 nt, Artificial Sequence
  Description of Artificial Sequence: Synthetic oligonucleotide
gaaugcuucaug

SEQ ID NO: 10592 - RNA, 12 nt, Artificial Sequence
  Description of Artificial Sequence: Synthetic oligonucleotide
auucuacuuuga

SEQ ID NO: 10593 - RNA, 12 nt, Artificial Sequence
  Description of Artificial Sequence: Synthetic oligonucleotide
gcaacuacagac

SEQ ID NO: 10594 - RNA, 12 nt, Artificial Sequence
  Description of Artificial Sequence: Synthetic oligonucleotide
accaaggucaac

SEQ ID NO: 10595 - RNA, 12 nt, Artificial Sequence
  Description of Artificial Sequence: Synthetic oligonucleotide
gacuaucucgac

SEQ ID NO: 10596 - RNA, 12 nt, Artificial Sequence
  Description of Artificial Sequence: Synthetic oligonucleotide
accuucccaaac

SEQ ID NO: 10597 - RNA, 13 nt, Artificial Sequence
  Description of Artificial Sequence: Synthetic oligonucleotide
caagcuuagaacu

SEQ ID NO: 10598 - RNA, 14 nt, Artificial Sequence
  Description of Artificial Sequence: Synthetic oligonucleotide
gcuuagaacuuuaa

SEQ ID NO: 10599 - RNA, 13 nt, Artificial Sequence
  Description of Artificial Sequence: Synthetic oligonucleotide
aacuuuaagcaac

SEQ ID NO: 10600 - RNA, 10 nt, Artificial Sequence
  Description of Artificial Sequence: Synthetic oligonucleotide
agaccaccac

SEQ ID NO: 10601 - RNA, 13 nt, Artificial Sequence
  Description of Artificial Sequence: Synthetic oligonucleotide
cgagaaauaaagu

SEQ ID NO: 10602 - RNA, 13 nt, Artificial Sequence
  Description of Artificial Sequence: Synthetic oligonucleotide
gagaaauaaaguu

SEQ ID NO: 10603 - RNA, 11 nt, Artificial Sequence
  Description of Artificial Sequence: Synthetic oligonucleotide
ggaaaugaucc

SEQ ID NO: 10604 - RNA, 12 nt, Artificial Sequence
  Description of Artificial Sequence: Synthetic oligonucleotide
aagaaaugaaac

SEQ ID NO: 10605 - RNA, 12 nt, Artificial Sequence
  Description of Artificial Sequence: Synthetic oligonucleotide
uuuccauccucc

SEQ ID NO: 10606 - RNA, 14 nt, Artificial Sequence
  Description of Artificial Sequence: Synthetic oligonucleotide
cugaaaaucuuuga

SEQ ID NO: 10607 - RNA, 10 nt, Artificial Sequence
  Description of Artificial Sequence: Synthetic oligonucleotide
gccguucagg

SEQ ID NO: 10608 - RNA, 12 nt, Artificial Sequence
  Description of Artificial Sequence: Synthetic oligonucleotide
aggguccagaag

SEQ ID NO: 10609 - RNA, 12 nt, Artificial Sequence
  Description of Artificial Sequence: Synthetic oligonucleotide
caagacugcuug

SEQ ID NO: 10610 - RNA, 12 nt, Artificial Sequence
  Description of Artificial Sequence: Synthetic oligonucleotide
ccaugucuuugg

SEQ ID NO: 10611 - RNA, 10 nt, Artificial Sequence
  Description of Artificial Sequence: Synthetic oligonucleotide
ccugaaacac

SEQ ID NO: 10612 - RNA, 11 nt, Artificial Sequence
  Description of Artificial Sequence: Synthetic oligonucleotide
cucuguaccuc

SEQ ID NO: 10613 - RNA, 11 nt, Artificial Sequence
  Description of Artificial Sequence: Synthetic oligonucleotide
gcaagacaaga

SEQ ID NO: 10614 - RNA, 12 nt, Artificial Sequence
  Description of Artificial Sequence: Synthetic oligonucleotide
caagacaagaaa

SEQ ID NO: 10615 - RNA, 11 nt, Artificial Sequence
  Description of Artificial Sequence: Synthetic oligonucleotide
guacaagaucc

SEQ ID NO: 10616 - RNA, 11 nt, Artificial Sequence
  Description of Artificial Sequence: Synthetic oligonucleotide
guacuugcaga

SEQ ID NO: 10617 - RNA, 12 nt, Artificial Sequence
  Description of Artificial Sequence: Synthetic oligonucleotide
gaucgauacaga

SEQ ID NO: 10618 - RNA, 12 nt, Artificial Sequence
  Description of Artificial Sequence: Synthetic oligonucleotide
auaaaaauaaau

SEQ ID NO: 10619 - RNA, 12 nt, Artificial Sequence
  Description of Artificial Sequence: Synthetic oligonucleotide
aaaaauaaauau

SEQ ID NO: 10620 - RNA, 12 nt, Artificial Sequence
  Description of Artificial Sequence: Synthetic oligonucleotide
uugacugcugug

SEQ ID NO: 10621 - RNA, 12 nt, Artificial Sequence
  Description of Artificial Sequence: Synthetic oligonucleotide
gagaugagagac

SEQ ID NO: 10622 - RNA, 9 nt, Artificial Sequence
  Description of Artificial Sequence: Synthetic oligonucleotide
cccacuugg

SEQ ID NO: 10623 - RNA, 5777 nt, Homo sapiens; identical to SEQ ID NO: 2619

SEQ ID NO: 10624 - RNA, 5217 nt, Homo sapiens; identical to SEQ ID NO: 2620

SEQ ID NO: 10625 - RNA, 5830 nt, Homo sapiens; identical to SEQ ID NO: 3929

SEQ ID NO: 10626 - RNA, 5833 nt, Homo sapiens; identical to SEQ ID NO: 4497

SEQ ID NO: 10627 - RNA, 4510 nt, Homo sapiens; identical to SEQ ID NO: 4498

SEQ ID NO: 10628 - RNA, 19 nt, Artificial Sequence
  Description of Artificial Sequence: Synthetic oligonucleotide
gugaaaaugcugaaagagg

SEQ ID NO: 10629 - RNA, 19 nt, Artificial Sequence
  Description of Artificial Sequence: Synthetic oligonucleotide
ugaaaaugcugaaagaggg

SEQ ID NO: 10630 - RNA, 19 nt, Artificial Sequence
  Description of Artificial Sequence: Synthetic oligonucleotide
caugcuggacugcuggcac

SEQ ID NO: 10631 - RNA, 19 nt, Artificial Sequence
  Description of Artificial Sequence: Synthetic oligonucleotide
augcuggacugcuggcaca

SEQ ID NO: 10632 - RNA, 19 nt, Artificial Sequence
  Description of Artificial Sequence: Synthetic oligonucleotide
ugcuggacugcuggcacag

SEQ ID NO: 10633 - RNA, 19 nt, Artificial Sequence
  Description of Artificial Sequence: Synthetic oligonucleotide
gccgugaaaaugcugaaag

SEQ ID NO: 10634 - RNA, 19 nt, Artificial Sequence
  Description of Artificial Sequence: Synthetic oligonucleotide
acguggugaagaucuguga

SEQ ID NO: 10635 - RNA, 19 nt, Artificial Sequence
  Description of Artificial Sequence: Synthetic oligonucleotide
gugacuuuggccuugcccg

SEQ ID NO: 10636 - RNA, 19 nt, Artificial Sequence
  Description of Artificial Sequence: Synthetic oligonucleotide
ugacuuuggccuugcccgg

SEQ ID NO: 10637 - RNA, 19 nt, Artificial Sequence
  Description of Artificial Sequence: Synthetic oligonucleotide
uuggccuugcccgggacau

SEQ ID NO: 10638 - RNA, 19 nt, Artificial Sequence
  Description of Artificial Sequence: Synthetic oligonucleotide
uuuggccuugcccgggaca

SEQ ID NO: 10639 - RNA, 19 nt, Artificial Sequence
  Description of Artificial Sequence: Synthetic oligonucleotide
uggccgugaaaaugcugaa

SEQ ID NO: 10640 - RNA, 19 nt, Artificial Sequence
  Description of Artificial Sequence: Synthetic oligonucleotide
gacuuuggccuugcccggg

SEQ ID NO: 10641 - RNA, 19 nt, Artificial Sequence
  Description of Artificial Sequence: Synthetic oligonucleotide
cgugaaaaugcugaaagag

SEQ ID NO: 10642 - RNA, 19 nt, Artificial Sequence
  Description of Artificial Sequence: Synthetic oligonucleotide
ggccgugaaaaugcugaaa

SEQ ID NO: 10643 - RNA, 19 nt, Artificial Sequence
  Description of Artificial Sequence: Synthetic oligonucleotide
ccgugaaaaugcugaaaga

SEQ ID NO: 10644 - RNA, 19 nt, Artificial Sequence
  Description of Artificial Sequence: Synthetic oligonucleotide
ugugacuuuggccuugccc

SEQ ID NO: 10645 - RNA, 19 nt, Artificial Sequence
  Description of Artificial Sequence: Synthetic oligonucleotide
acuuuggccuugcccggga

SEQ ID NO: 10646 - RNA, 19 nt, Artificial Sequence
  Description of Artificial Sequence: Synthetic oligonucleotide
guggccgugaaaaugcuga

SEQ ID NO: 10647 - RNA, 19 nt, Artificial Sequence
  Description of Artificial Sequence: Synthetic oligonucleotide
cucaagauccucauucaca

SEQ ID NO: 10648 - RNA, 19 nt, Artificial Sequence
  Description of Artificial Sequence: Synthetic oligonucleotide
gacaaccagacagacagug

SEQ ID NO: 10649 - RNA, 19 nt, Artificial Sequence
  Description of Artificial Sequence: Synthetic oligonucleotide
acaaccagacagacagugg

SEQ ID NO: 10650 - RNA, 19 nt, Artificial Sequence
  Description of Artificial Sequence: Synthetic oligonucleotide
ucaagauccucauucacau

SEQ ID NO: 10651 - RNA, 19 nt, Artificial Sequence
  Description of Artificial Sequence: Synthetic oligonucleotide
ccuuaugaugccagcaaau

SEQ ID NO: 10652 - RNA, 19 nt, Artificial Sequence
  Description of Artificial Sequence: Synthetic oligonucleotide
cuuaugaugccagcaaaug

SEQ ID NO: 10653 - RNA, 19 nt, Artificial Sequence
  Description of Artificial Sequence: Synthetic oligonucleotide
uuaugaugccagcaaaugg

SEQ ID NO: 10654 - RNA, 19 nt, Artificial Sequence
  Description of Artificial Sequence: Synthetic oligonucleotide
uaugaugccagcaaauggg

SEQ ID NO: 10655 - RNA, 19 nt, Artificial Sequence
  Description of Artificial Sequence: Synthetic oligonucleotide
augaugccagcaaauggga

SEQ ID NO: 10656 - RNA, 19 nt, Artificial Sequence
  Description of Artificial Sequence: Synthetic oligonucleotide
cagaccaugcuggacugcu

SEQ ID NO: 10657 - RNA, 19 nt, Artificial Sequence
  Description of Artificial Sequence: Synthetic oligonucleotide
agaccaugcuggacugcug

SEQ ID NO: 10658 - RNA, 19 nt, Artificial Sequence
  Description of Artificial Sequence: Synthetic oligonucleotide
gaccaugcuggacugcugg

SEQ ID NO: 10659 - RNA, 19 nt, Artificial Sequence
  Description of Artificial Sequence: Synthetic oligonucleotide
accaugcuggacugcuggc

SEQ ID NO: 10660 - RNA, 19 nt, Artificial Sequence
  Description of Artificial Sequence: Synthetic oligonucleotide
ccaugcuggacugcuggca

SEQ ID NO: 10661 - RNA, 19 nt, Artificial Sequence
  Description of Artificial Sequence: Synthetic oligonucleotide
caggauggcaaagacuaca

SEQ ID NO: 10662 - RNA, 19 nt, Artificial Sequence
  Description of Artificial Sequence: Synthetic oligonucleotide
aggauggcaaagacuacau

SEQ ID NO: 10663 - RNA, 19 nt, Artificial Sequence
  Description of Artificial Sequence: Synthetic oligonucleotide
gaacucaagauccucauuc

SEQ ID NO: 10664 - RNA, 19 nt, Artificial Sequence
  Description of Artificial Sequence: Synthetic oligonucleotide
aacucaagauccucauuca

SEQ ID NO: 10665 - RNA, 19 nt, Artificial Sequence
  Description of Artificial Sequence: Synthetic oligonucleotide
gcuggacugcuggcacaga

SEQ ID NO: 10666 - RNA, 19 nt, Artificial Sequence
  Description of Artificial Sequence: Synthetic oligonucleotide
cuggacugcuggcacagag

SEQ ID NO: 10667 - RNA, 19 nt, Artificial Sequence
  Description of Artificial Sequence: Synthetic oligonucleotide
uggacugcuggcacagaga

SEQ ID NO: 10668 - RNA, 19 nt, Artificial Sequence
  Description of Artificial Sequence: Synthetic oligonucleotide
ggccuugcccgggacaucu

SEQ ID NO: 10669 - RNA, 19 nt, Artificial Sequence
  Description of Artificial Sequence: Synthetic oligonucleotide
cuuuggccuugcccgggac

SEQ ID NO: 10670 - RNA, 19 nt, Artificial Sequence
  Description of Artificial Sequence: Synthetic oligonucleotide
accguggccgugaaaaugc

SEQ ID NO: 10671 - RNA, 19 nt, Artificial Sequence
  Description of Artificial Sequence: Synthetic oligonucleotide
gaagaucugugacuuuggc

SEQ ID NO: 10672 - RNA, 19 nt, Artificial Sequence
  Description of Artificial Sequence: Synthetic oligonucleotide
ccguggccgugaaaaugcu

SEQ ID NO: 10673 - RNA, 19 nt, Artificial Sequence
  Description of Artificial Sequence: Synthetic oligonucleotide
gugaagaucugugacuuug

SEQ ID NO: 10674 - RNA, 19 nt, Artificial Sequence
  Description of Artificial Sequence: Synthetic oligonucleotide
gaucugugacuuuggccuu

SEQ ID NO: 10675 - RNA, 19 nt, Artificial Sequence
  Description of Artificial Sequence: Synthetic oligonucleotide
gccuugcccgggacaucua

SEQ ID NO: 10676 - RNA, 19 nt, Artificial Sequence
  Description of Artificial Sequence: Synthetic oligonucleotide
cugugacuuuggccuugcc

SEQ ID NO: 10677 - RNA, 19 nt, Artificial Sequence
  Description of Artificial Sequence: Synthetic oligonucleotide
ucugugacuuuggccuugc

SEQ ID NO: 10678 - RNA, 19 nt, Artificial Sequence
  Description of Artificial Sequence: Synthetic oligonucleotide
uggugaagaucugugacuu

SEQ ID NO: 10679 - RNA, 19 nt, Artificial Sequence
  Description of Artificial Sequence: Synthetic oligonucleotide
agaucugugacuuuggccu

SEQ ID NO: 10680 - RNA, 19 nt, Artificial Sequence
  Description of Artificial Sequence: Synthetic oligonucleotide
uggccuugcccgggacauc

SEQ ID NO: 10681 - RNA, 19 nt, Artificial Sequence
  Description of Artificial Sequence: Synthetic oligonucleotide
guggugaagaucugugacu

SEQ ID NO: 10682 - RNA, 19 nt, Artificial Sequence
  Description of Artificial Sequence: Synthetic oligonucleotide
ugaagaucugugacuuugg

SEQ ID NO: 10683 - RNA, 19 nt, Artificial Sequence
  Description of Artificial Sequence: Synthetic oligonucleotide
cguggccgugaaaaugcug

SEQ ID NO: 10684 - RNA, 19 nt, Artificial Sequence
  Description of Artificial Sequence: Synthetic oligonucleotide
aagaucugugacuuuggcc

SEQ ID NO: 10685 - RNA, 19 nt, Artificial Sequence
  Description of Artificial Sequence: Synthetic oligonucleotide
ggugaagaucugugacuuu

SEQ ID NO: 10686 - RNA, 19 nt, Artificial Sequence
  Description of Artificial Sequence: Synthetic oligonucleotide
aucugugacuuuggccuug

SEQ ID NO: 10687 - RNA, 19 nt, Artificial Sequence
  Description of Artificial Sequence: Synthetic oligonucleotide
cguggugaagaucugugac

SEQ ID NO: 10688 - RNA, 19 nt, Artificial Sequence
  Description of Artificial Sequence: Synthetic oligonucleotide
aaagugcauccacagagac

SEQ ID NO: 10689 - RNA, 19 nt, Artificial Sequence
  Description of Artificial Sequence: Synthetic oligonucleotide
gcauccacagagaccuggc

SEQ ID NO: 10690 - RNA, 19 nt, Artificial Sequence
  Description of Artificial Sequence: Synthetic oligonucleotide
gugcauccacagagaccug

SEQ ID NO: 10691 - RNA, 19 nt, Artificial Sequence
  Description of Artificial Sequence: Synthetic oligonucleotide
ggcuaccuguccaucauca

SEQ ID NO: 10692 - RNA, 19 nt, Artificial Sequence
  Description of Artificial Sequence: Synthetic oligonucleotide
cuaccuguccaucaucaug

SEQ ID NO: 10693 - RNA, 19 nt, Artificial Sequence
  Description of Artificial Sequence: Synthetic oligonucleotide
gaaagugcauccacagaga

SEQ ID NO: 10694 - RNA, 19 nt, Artificial Sequence
  Description of Artificial Sequence: Synthetic oligonucleotide
agugcauccacagagaccu

SEQ ID NO: 10695 - RNA, 19 nt, Artificial Sequence
  Description of Artificial Sequence: Synthetic oligonucleotide
uguccaucaucauggaccc

SEQ ID NO: 10696 - RNA, 19 nt, Artificial Sequence
  Description of Artificial Sequence: Synthetic oligonucleotide
cucaacguggucaaccucc

SEQ ID NO: 10697 - RNA, 19 nt, Artificial Sequence
  Description of Artificial Sequence: Synthetic oligonucleotide
aagugcauccacagagacc

SEQ ID NO: 10698 - RNA, 19 nt, Artificial Sequence
  Description of Artificial Sequence: Synthetic oligonucleotide
accuguccaucaucaugga

SEQ ID NO: 10699 - RNA, 19 nt, Artificial Sequence
  Description of Artificial Sequence: Synthetic oligonucleotide
ugcauccacagagaccugg

SEQ ID NO: 10700 - RNA, 19 nt, Artificial Sequence
  Description of Artificial Sequence: Synthetic oligonucleotide
caagauccucauucacauc

SEQ ID NO: 10701 - RNA, 19 nt, Artificial Sequence
  Description of Artificial Sequence: Synthetic oligonucleotide
ucaacguggucaaccuccu

SEQ ID NO: 10702 - RNA, 19 nt, Artificial Sequence
  Description of Artificial Sequence: Synthetic oligonucleotide
ccaccucaacguggucaac

SEQ ID NO: 10703 - RNA, 19 nt, Artificial Sequence
  Description of Artificial Sequence: Synthetic oligonucleotide
cgaaagugcauccacagag

SEQ ID NO: 10704 - RNA, 19 nt, Artificial Sequence
  Description of Artificial Sequence: Synthetic oligonucleotide
aagauccucauucacaucg

SEQ ID NO: 10705 - RNA, 19 nt, Artificial Sequence
  Description of Artificial Sequence: Synthetic oligonucleotide
gcuaccuguccaucaucau

SEQ ID NO: 10706 - RNA, 19 nt, Artificial Sequence
  Description of Artificial Sequence: Synthetic oligonucleotide
uaccuguccaucaucaugg

SEQ ID NO: 10707 - RNA, 19 nt, Artificial Sequence
  Description of Artificial Sequence: Synthetic oligonucleotide
accucaacguggucaaccu

SEQ ID NO: 10708 - RNA, 19 nt, Artificial Sequence
  Description of Artificial Sequence: Synthetic oligonucleotide
agauccucauucacaucgg

SEQ ID NO: 10709 - RNA, 19 nt, Artificial Sequence
  Description of Artificial Sequence: Synthetic oligonucleotide
accaccucaacguggucaa

SEQ ID NO: 10710 - RNA, 19 nt, Artificial Sequence
  Description of Artificial Sequence: Synthetic oligonucleotide
caccucaacguggucaacc

SEQ ID NO: 10711 - RNA, 19 nt, Artificial Sequence
  Description of Artificial Sequence: Synthetic oligonucleotide
ugaugccagcaaaugggaa

SEQ ID NO: 10712 - RNA, 19 nt, Artificial Sequence
  Description of Artificial Sequence: Synthetic oligonucleotide
gaugccagcaaaugggaau

SEQ ID NO: 10713 - RNA, 19 nt, Artificial Sequence
  Description of Artificial Sequence: Synthetic oligonucleotide
augccagcaaaugggaauu

SEQ ID NO: 10714 - RNA, 19 nt, Artificial Sequence
  Description of Artificial Sequence: Synthetic oligonucleotide
uaccagaccaugcuggacu

SEQ ID NO: 10715 - RNA, 19 nt, Artificial Sequence
  Description of Artificial Sequence: Synthetic oligonucleotide
accagaccaugcuggacug

SEQ ID NO: 10716 - RNA, 19 nt, Artificial Sequence
  Description of Artificial Sequence: Synthetic oligonucleotide
ccagaccaugcuggacugc

SEQ ID NO: 10717 - RNA, 19 nt, Artificial Sequence
  Description of Artificial Sequence: Synthetic oligonucleotide
auagaaggaaagaauaaga

SEQ ID NO: 10718 - RNA, 19 nt, Artificial Sequence
  Description of Artificial Sequence: Synthetic oligonucleotide
ccuugcccgggacaucuac

SEQ ID NO: 10719 - RNA, 19 nt, Artificial Sequence
  Description of Artificial Sequence: Synthetic oligonucleotide
cuugcccgggacaucuaca

SEQ ID NO: 10720 - RNA, 19 nt, Artificial Sequence
  Description of Artificial Sequence: Synthetic oligonucleotide
uugcccgggacaucuacaa

SEQ ID NO: 10721 - RNA, 19 nt, Artificial Sequence
  Description of Artificial Sequence: Synthetic oligonucleotide
ccucaacguggucaaccuc

SEQ ID NO: 10722 - RNA, 19 nt, Artificial Sequence
  Description of Artificial Sequence: Synthetic oligonucleotide
cuguccaucaucauggacc

SEQ ID NO: 10723 - RNA, 19 nt, Artificial Sequence
  Description of Artificial Sequence: Synthetic oligonucleotide
gauccucauucacaucggc

SEQ ID NO: 10724 - RNA, 19 nt, Artificial Sequence
  Description of Artificial Sequence: Synthetic oligonucleotide
ccuguccaucaucauggac

SEQ ID NO: 10725 - RNA, 19 nt, Artificial Sequence
  Description of Artificial Sequence: Synthetic oligonucleotide
cccgggacaucuacaaaga

SEQ ID NO: 10726 - RNA, 19 nt, Artificial Sequence
  Description of Artificial Sequence: Synthetic oligonucleotide
gcccgggacaucuacaaag

SEQ ID NO: 10727 - RNA, 19 nt, Artificial Sequence
  Description of Artificial Sequence: Synthetic oligonucleotide
ugccagcaaaugggaauuc

SEQ ID NO: 10728 - RNA, 19 nt, Artificial Sequence
  Description of Artificial Sequence: Synthetic oligonucleotide
guggcugugaaaaugcuga

SEQ ID NO: 10729 - RNA, 19 nt, Artificial Sequence
  Description of Artificial Sequence: Synthetic oligonucleotide
uggcugugaaaaugcugaa

SEQ ID NO: 10730 - RNA, 19 nt, Artificial Sequence
  Description of Artificial Sequence: Synthetic oligonucleotide
ggcugugaaaaugcugaaa

SEQ ID NO: 10731 - RNA, 19 nt, Artificial Sequence
  Description of Artificial Sequence: Synthetic oligonucleotide
gcugugaaaaugcugaaag

SEQ ID NO: 10732 - RNA, 19 nt, Artificial Sequence
  Description of Artificial Sequence: Synthetic oligonucleotide
cugugaaaaugcugaaaga

SEQ ID NO: 10733 - RNA, 19 nt, Artificial Sequence
  Description of Artificial Sequence: Synthetic oligonucleotide
ugugaaaaugcugaaagag

SEQ ID NO: 10734 - RNA, 19 nt, Artificial Sequence
  Description of Artificial Sequence: Synthetic oligonucleotide
gaaaaugcugaaagagggg

SEQ ID NO: 10735 - RNA, 19 nt, Artificial Sequence
  Description of Artificial Sequence: Synthetic oligonucleotide
aaaaugcugaaagaggggg

SEQ ID NO: 10736 - RNA, 19 nt, Artificial Sequence
  Description of Artificial Sequence: Synthetic oligonucleotide
aaaugcugaaagagggggc

SEQ ID NO: 10737 - RNA, 19 nt, Artificial Sequence
  Description of Artificial Sequence: Synthetic oligonucleotide
aaugcugaaagagggggcc

SEQ ID NO: 10738 - RNA, 19 nt, Artificial Sequence
  Description of Artificial Sequence: Synthetic oligonucleotide
augcugaaagagggggcca

SEQ ID NO: 10739 - RNA, 19 nt, Artificial Sequence
  Description of Artificial Sequence: Synthetic oligonucleotide
ugcugaaagagggggccac

SEQ ID NO: 10740 - RNA, 19 nt, Artificial Sequence
  Description of Artificial Sequence: Synthetic oligonucleotide
gcugaaagagggggccacg

SEQ ID NO: 10741 - RNA, 19 nt, Artificial Sequence
  Description of Artificial Sequence: Synthetic oligonucleotide
cugaaagagggggccacgg

SEQ ID NO: 10742 - RNA, 19 nt, Artificial Sequence
  Description of Artificial Sequence: Synthetic oligonucleotide
ugaaagagggggccacggc

SEQ ID NO: 10743 - RNA, 19 nt, Artificial Sequence
  Description of Artificial Sequence: Synthetic oligonucleotide
gaaagagggggccacggcc

SEQ ID NO: 10744 - RNA, 19 nt, Artificial Sequence
  Description of Artificial Sequence: Synthetic oligonucleotide
aaagagggggccacggcca

SEQ ID NO: 10745 - RNA, 19 nt, Artificial Sequence
  Description of Artificial Sequence: Synthetic oligonucleotide
aagagggggccacggccag

SEQ ID NO: 10746 - RNA, 19 nt, Artificial Sequence
  Description of Artificial Sequence: Synthetic oligonucleotide
agagggggccacggccagc

SEQ ID NO: 10747 - RNA, 19 nt, Artificial Sequence
  Description of Artificial Sequence: Synthetic oligonucleotide
gagggggccacggccagcg

SEQ ID NO: 10748 - RNA, 19 nt, Artificial Sequence
  Description of Artificial Sequence: Synthetic oligonucleotide
agggggccacggccagcga

SEQ ID NO: 10749 - RNA, 19 nt, Artificial Sequence
  Description of Artificial Sequence: Synthetic oligonucleotide
gggggccacggccagcgag

SEQ ID NO: 10750 - RNA, 19 nt, Artificial Sequence
  Description of Artificial Sequence: Synthetic oligonucleotide
guggccagaggcauggagu

SEQ ID NO: 10751 - RNA, 19 nt, Artificial Sequence
  Description of Artificial Sequence: Synthetic oligonucleotide
uggccagaggcauggaguu

SEQ ID NO: 10752 - RNA, 19 nt, Artificial Sequence
  Description of Artificial Sequence: Synthetic oligonucleotide
ggccagaggcauggaguuc

SEQ ID NO: 10753 - RNA, 19 nt, Artificial Sequence
  Description of Artificial Sequence: Synthetic oligonucleotide
gccagaggcauggaguucc

SEQ ID NO: 10754 - RNA, 19 nt, Artificial Sequence
  Description of Artificial Sequence: Synthetic oligonucleotide
ccagaggcauggaguuccu

SEQ ID NO: 10755 - RNA, 19 nt, Artificial Sequence
  Description of Artificial Sequence: Synthetic oligonucleotide
cagaggcauggaguuccug

SEQ ID NO: 10756 - RNA, 19 nt, Artificial Sequence
  Description of Artificial Sequence: Synthetic oligonucleotide
acguggugaagauuuguga

SEQ ID NO: 10757 - RNA, 19 nt, Artificial Sequence
  Description of Artificial Sequence: Synthetic oligonucleotide
ugugauuuuggccuugccc

SEQ ID NO: 10758 - RNA, 19 nt, Artificial Sequence
  Description of Artificial Sequence: Synthetic oligonucleotide
gugauuuuggccuugcccg

SEQ ID NO: 10759 - RNA, 19 nt, Artificial Sequence
  Description of Artificial Sequence: Synthetic oligonucleotide
ugauuuuggccuugcccgg

SEQ ID NO: 10760 - RNA, 19 nt, Artificial Sequence
  Description of Artificial Sequence: Synthetic oligonucleotide
gauuuuggccuugcccggg

SEQ ID NO: 10761 - RNA, 19 nt, Artificial Sequence
  Description of Artificial Sequence: Synthetic oligonucleotide
auuuuggccuugcccggga

SEQ ID NO: 10762 - RNA, 19 nt, Artificial Sequence
  Description of Artificial Sequence: Synthetic oligonucleotide
uuuggccuugcccgggaua

SEQ ID NO: 10763 - RNA, 19 nt, Artificial Sequence
  Description of Artificial Sequence: Synthetic oligonucleotide
uuggccuugcccgggauau

SEQ ID NO: 10764 - RNA, 19 nt, Artificial Sequence
  Description of Artificial Sequence: Synthetic oligonucleotide
cucccuuaugaugccagca

SEQ ID NO: 10765 - RNA, 19 nt, Artificial Sequence
  Description of Artificial Sequence: Synthetic oligonucleotide
ucccuuaugaugccagcaa

SEQ ID NO: 10766 - RNA, 19 nt, Artificial Sequence
  Description of Artificial Sequence: Synthetic oligonucleotide
ccuuaugaugccagcaagu

SEQ ID NO: 10767 - RNA, 19 nt, Artificial Sequence
  Description of Artificial Sequence: Synthetic oligonucleotide
cuuaugaugccagcaagug

SEQ ID NO: 10768 - RNA, 19 nt, Artificial Sequence
  Description of Artificial Sequence: Synthetic oligonucleotide
uuaugaugccagcaagugg

SEQ ID NO: 10769 - RNA, 19 nt, Artificial Sequence
  Description of Artificial Sequence: Synthetic oligonucleotide
uaugaugccagcaaguggg

SEQ ID NO: 10770 - RNA, 19 nt, Artificial Sequence
  Description of Artificial Sequence: Synthetic oligonucleotide
augaugccagcaaguggga

SEQ ID NO: 10771 - RNA, 19 nt, Artificial Sequence
  Description of Artificial Sequence: Synthetic oligonucleotide
uugcccgggauauuuauaa

SEQ ID NO: 10772 - RNA, 19 nt, Artificial Sequence
  Description of Artificial Sequence: Synthetic oligonucleotide
gauuaugugagaaaaggag

SEQ ID NO: 10773 - RNA, 19 nt, Artificial Sequence
  Description of Artificial Sequence: Synthetic oligonucleotide
auuaugugagaaaaggaga

SEQ ID NO: 10774 - RNA, 19 nt, Artificial Sequence
  Description of Artificial Sequence: Synthetic oligonucleotide
uuaugugagaaaaggagau

SEQ ID NO: 10775 - RNA, 19 nt, Artificial Sequence
  Description of Artificial Sequence: Synthetic oligonucleotide
cagaucaugcuggacugcu

SEQ ID NO: 10776 - RNA, 19 nt, Artificial Sequence
  Description of Artificial Sequence: Synthetic oligonucleotide
agaucaugcuggacugcug

SEQ ID NO: 10777 - RNA, 19 nt, Artificial Sequence
  Description of Artificial Sequence: Synthetic oligonucleotide
gaucaugcuggacugcugg

SEQ ID NO: 10778 - RNA, 19 nt, Artificial Sequence
  Description of Artificial Sequence: Synthetic oligonucleotide
aucaugcuggacugcuggc

SEQ ID NO: 10779 - RNA, 19 nt, Artificial Sequence
  Description of Artificial Sequence: Synthetic oligonucleotide
ucaugcuggacugcuggca

SEQ ID NO: 10780 - RNA, 19 nt, Artificial Sequence
  Description of Artificial Sequence: Synthetic oligonucleotide
caggaugguaaagacuaca

SEQ ID NO: 10781 - RNA, 19 nt, Artificial Sequence
  Description of Artificial Sequence: Synthetic oligonucleotide
aggaugguaaagacuacau

SEQ ID NO: 10782 - RNA, 19 nt, Artificial Sequence
  Description of Artificial Sequence: Synthetic oligonucleotide
gaaagagggcgccacggcc

SEQ ID NO: 10783 - RNA, 19 nt, Artificial Sequence
  Description of Artificial Sequence: Synthetic oligonucleotide
aagagggcgccacggccag

SEQ ID NO: 10784 - RNA, 19 nt, Artificial Sequence
  Description of Artificial Sequence: Synthetic oligonucleotide
guggccagagggauggagu

SEQ ID NO: 10785 - RNA, 19 nt, Artificial Sequence
  Description of Artificial Sequence: Synthetic oligonucleotide
gccagagggauggaguucc

SEQ ID NO: 10786 - RNA, 19 nt, Artificial Sequence
  Description of Artificial Sequence: Synthetic oligonucleotide
gcugaaagagggcgccacg

SEQ ID NO: 10787 - RNA, 19 nt, Artificial Sequence
  Description of Artificial Sequence: Synthetic oligonucleotide
aaaaugcugaaagagggcg

SEQ ID NO: 10788 - RNA, 19 nt, Artificial Sequence
  Description of Artificial Sequence: Synthetic oligonucleotide
aaaugcugaaagagggcgc

SEQ ID NO: 10789 - RNA, 19 nt, Artificial Sequence
  Description of Artificial Sequence: Synthetic oligonucleotide
ccagagggauggaguuccu

SEQ ID NO: 10790 - RNA, 19 nt, Artificial Sequence
  Description of Artificial Sequence: Synthetic oligonucleotide
gagggcgccacggccagcg

SEQ ID NO: 10791 - RNA, 19 nt, Artificial Sequence
  Description of Artificial Sequence: Synthetic oligonucleotide
ggccagagggauggaguuc

SEQ ID NO: 10792 - RNA, 19 nt, Artificial Sequence
  Description of Artificial Sequence: Synthetic oligonucleotide
uggccagagggauggaguu

SEQ ID NO: 10793 - RNA, 19 nt, Artificial Sequence
  Description of Artificial Sequence: Synthetic oligonucleotide
agagggcgccacggccagc

SEQ ID NO: 10794 - RNA, 19 nt, Artificial Sequence
  Description of Artificial Sequence: Synthetic oligonucleotide
gggcgccacggccagcgag

SEQ ID NO: 10795 - RNA, 19 nt, Artificial Sequence
  Description of Artificial Sequence: Synthetic oligonucleotide
ugaaagagggcgccacggc

SEQ ID NO: 10796 - RNA, 19 nt, Artificial Sequence
  Description of Artificial Sequence: Synthetic oligonucleotide
cagagggauggaguuccug

SEQ ID NO: 10797 - RNA, 19 nt, Artificial Sequence
  Description of Artificial Sequence: Synthetic oligonucleotide
agggcgccacggccagcga

SEQ ID NO: 10798 - RNA, 19 nt, Artificial Sequence
  Description of Artificial Sequence: Synthetic oligonucleotide
aaugcugaaagagggcgcc

SEQ ID NO: 10799 - RNA, 19 nt, Artificial Sequence
  Description of Artificial Sequence: Synthetic oligonucleotide
cugaaagagggcgccacgg

SEQ ID NO: 10800 - RNA, 19 nt, Artificial Sequence
  Description of Artificial Sequence: Synthetic oligonucleotide
aaagagggcgccacggcca

SEQ ID NO: 10801 - RNA, 19 nt, Artificial Sequence
  Description of Artificial Sequence: Synthetic oligonucleotide
gaaaaugcugaaagagggc

SEQ ID NO: 10802 - RNA, 19 nt, Artificial Sequence
  Description of Artificial Sequence: Synthetic oligonucleotide
augcugaaagagggcgcca

SEQ ID NO: 10803 - RNA, 19 nt, Artificial Sequence
  Description of Artificial Sequence: Synthetic oligonucleotide
ugcugaaagagggcgccac

SEQ ID NO: 10804 - RNA, 19 nt, Artificial Sequence
  Description of Artificial Sequence: Synthetic oligonucleotide
gagcucaagauccucauuc

SEQ ID NO: 10805 - RNA, 19 nt, Artificial Sequence
  Description of Artificial Sequence: Synthetic oligonucleotide
agcucaagauccucauuca

SEQ ID NO: 10806 - RNA, 19 nt, Artificial Sequence
  Description of Artificial Sequence: Synthetic oligonucleotide
cugccuuaugaugccagca

SEQ ID NO: 10807 - RNA, 19 nt, Artificial Sequence
  Description of Artificial Sequence: Synthetic oligonucleotide
ugccuuaugaugccagcaa

SEQ ID NO: 10808 - RNA, 19 nt, Artificial Sequence
  Description of Artificial Sequence: Synthetic oligonucleotide
uggcccgggauauuuauaa

SEQ ID NO: 10809 - RNA, 19 nt, Artificial Sequence
  Description of Artificial Sequence: Synthetic oligonucleotide
gauuaugucagaaaaggag

SEQ ID NO: 10810 - RNA, 19 nt, Artificial Sequence
  Description of Artificial Sequence: Synthetic oligonucleotide
auuaugucagaaaaggaga

SEQ ID NO: 10811 - RNA, 19 nt, Artificial Sequence
  Description of Artificial Sequence: Synthetic oligonucleotide
uuaugucagaaaaggagau

SEQ ID NO: 10812 - RNA, 19 nt, Artificial Sequence
  Description of Artificial Sequence: Synthetic oligonucleotide
augcuggacugcuggcacg

SEQ ID NO: 10813 - RNA, 19 nt, Artificial Sequence
  Description of Artificial Sequence: Synthetic oligonucleotide
ugcuggacugcuggcacgg

SEQ ID NO: 10814 - RNA, 19 nt, Artificial Sequence
  Description of Artificial Sequence: Synthetic oligonucleotide
cucaagauccucauucaua

SEQ ID NO: 10815 - RNA, 19 nt, Artificial Sequence
  Description of Artificial Sequence: Synthetic oligonucleotide
ucaagauccucauucauau

SEQ ID NO: 10816 - RNA, 19 nt, Artificial Sequence
  Description of Artificial Sequence: Synthetic oligonucleotide
gacaaccagacggacagug

SEQ ID NO: 10817 - RNA, 19 nt, Artificial Sequence
  Description of Artificial Sequence: Synthetic oligonucleotide
acaaccagacggacagugg

SEQ ID NO: 10818 - RNA, 19 nt, Artificial Sequence
  Description of Artificial Sequence: Synthetic oligonucleotide
caaguggccagaggcaugg

SEQ ID NO: 10819 - RNA, 19 nt, Artificial Sequence
  Description of Artificial Sequence: Synthetic oligonucleotide
aaguggccagaggcaugga

SEQ ID NO: 10820 - RNA, 19 nt, Artificial Sequence
  Description of Artificial Sequence: Synthetic oligonucleotide
aguggccagaggcauggag

SEQ ID NO: 10821 - RNA, 19 nt, Artificial Sequence
  Description of Artificial Sequence: Synthetic oligonucleotide
caacguggugaagauuugu

SEQ ID NO: 10822 - RNA, 19 nt, Artificial Sequence
  Description of Artificial Sequence: Synthetic oligonucleotide
aacguggugaagauuugug

SEQ ID NO: 10823 - RNA, 19 nt, Artificial Sequence
  Description of Artificial Sequence: Synthetic oligonucleotide
gccugcaccaagcaaggag

SEQ ID NO: 10824 - RNA, 19 nt, Artificial Sequence
  Description of Artificial Sequence: Synthetic oligonucleotide
ccugcaccaagcaaggagg

SEQ ID NO: 10825 - RNA, 19 nt, Artificial Sequence
  Description of Artificial Sequence: Synthetic oligonucleotide
cugcaccaagcaaggaggg

SEQ ID NO: 10826 - RNA, 19 nt, Artificial Sequence
  Description of Artificial Sequence: Synthetic oligonucleotide
ugcaccaagcaaggagggc

SEQ ID NO: 10827 - RNA, 19 nt, Artificial Sequence
  Description of Artificial Sequence: Synthetic oligonucleotide
gcaccaagcaaggagggcc

SEQ ID NO: 10828 - RNA, 19 nt, Artificial Sequence
  Description of Artificial Sequence: Synthetic oligonucleotide
uggccuugcccgggauauu

SEQ ID NO: 10829 - RNA, 19 nt, Artificial Sequence
  Description of Artificial Sequence: Synthetic oligonucleotide
ggccuugcccgggauauuu

SEQ ID NO: 10830 - RNA, 19 nt, Artificial Sequence
  Description of Artificial Sequence: Synthetic oligonucleotide
gccuugcccgggauauuua

SEQ ID NO: 10831 - RNA, 19 nt, Artificial Sequence
  Description of Artificial Sequence: Synthetic oligonucleotide
ccuugcccgggauauuuau

SEQ ID NO: 10832 - RNA, 19 nt, Artificial Sequence
  Description of Artificial Sequence: Synthetic oligonucleotide
cuugcccgggauauuuaua

SEQ ID NO: 10833 - RNA, 19 nt, Artificial Sequence
  Description of Artificial Sequence: Synthetic oligonucleotide
gcccgggauauuuauaaga

SEQ ID NO: 10834 - RNA, 19 nt, Artificial Sequence
  Description of Artificial Sequence: Synthetic oligonucleotide
cccgggauauuuauaagaa

SEQ ID NO: 10835 - RNA, 19 nt, Artificial Sequence
  Description of Artificial Sequence: Synthetic oligonucleotide
uaugugagaaaaggagaua

SEQ ID NO: 10836 - RNA, 19 nt, Artificial Sequence
  Description of Artificial Sequence: Synthetic oligonucleotide
augugagaaaaggagauac

SEQ ID NO: 10837 - RNA, 19 nt, Artificial Sequence
  Description of Artificial Sequence: Synthetic oligonucleotide
ugugagaaaaggagauacu

SEQ ID NO: 10838 - RNA, 19 nt, Artificial Sequence
  Description of Artificial Sequence: Synthetic oligonucleotide
gugagaaaaggagauacuc

SEQ ID NO: 10839 - RNA, 19 nt, Artificial Sequence
  Description of Artificial Sequence: Synthetic oligonucleotide
ugagaaaaggagauacucg

SEQ ID NO: 10840 - RNA, 19 nt, Artificial Sequence
  Description of Artificial Sequence: Synthetic oligonucleotide
agaaaaggagauacucgac

SEQ ID NO: 10841 - RNA, 19 nt, Artificial Sequence
  Description of Artificial Sequence: Synthetic oligonucleotide
gaaaaggagauacucgacu

SEQ ID NO: 10842 - RNA, 19 nt, Artificial Sequence
  Description of Artificial Sequence: Synthetic oligonucleotide
cuuccucugaaauggaugg

SEQ ID NO: 10843 - RNA, 19 nt, Artificial Sequence
  Description of Artificial Sequence: Synthetic oligonucleotide
uuccucugaaauggauggc

SEQ ID NO: 10844 - RNA, 19 nt, Artificial Sequence
  Description of Artificial Sequence: Synthetic oligonucleotide
ccucugaaauggauggcuc

SEQ ID NO: 10845 - RNA, 19 nt, Artificial Sequence
  Description of Artificial Sequence: Synthetic oligonucleotide
cucugaaauggauggcucc

SEQ ID NO: 10846 - RNA, 19 nt, Artificial Sequence
  Description of Artificial Sequence: Synthetic oligonucleotide
uugcugugggaaaucuucu

SEQ ID NO: 10847 - RNA, 19 nt, Artificial Sequence
  Description of Artificial Sequence: Synthetic oligonucleotide
ugcugugggaaaucuucuc

SEQ ID NO: 10848 - RNA, 19 nt, Artificial Sequence
  Description of Artificial Sequence: Synthetic oligonucleotide
gcugugggaaaucuucucc

SEQ ID NO: 10849 - RNA, 19 nt, Artificial Sequence
  Description of Artificial Sequence: Synthetic oligonucleotide
cugugggaaaucuucuccu

SEQ ID NO: 10850 - RNA, 19 nt, Artificial Sequence
  Description of Artificial Sequence: Synthetic oligonucleotide
ugugggaaaucuucuccuu

SEQ ID NO: 10851 - RNA, 19 nt, Artificial Sequence
  Description of Artificial Sequence: Synthetic oligonucleotide
gugggaaaucuucuccuua

SEQ ID NO: 10852 - RNA, 19 nt, Artificial Sequence
  Description of Artificial Sequence: Synthetic oligonucleotide
ugggaaaucuucuccuuag

SEQ ID NO: 10853 - RNA, 19 nt, Artificial Sequence
  Description of Artificial Sequence: Synthetic oligonucleotide
gggaaaucuucuccuuagg

SEQ ID NO: 10854 - RNA, 19 nt, Artificial Sequence
  Description of Artificial Sequence: Synthetic oligonucleotide
ggaaaucuucuccuuaggu

SEQ ID NO: 10855 - RNA, 19 nt, Artificial Sequence
  Description of Artificial Sequence: Synthetic oligonucleotide
gaaaucuucuccuuaggug

SEQ ID NO: 10856 - RNA, 19 nt, Artificial Sequence
  Description of Artificial Sequence: Synthetic oligonucleotide
caacaggaugguaaagacu

SEQ ID NO: 10857 - RNA, 19 nt, Artificial Sequence
  Description of Artificial Sequence: Synthetic oligonucleotide
aacaggaugguaaagacua

SEQ ID NO: 10858 - RNA, 19 nt, Artificial Sequence
  Description of Artificial Sequence: Synthetic oligonucleotide
acaggaugguaaagacuac

SEQ ID NO: 10859 - RNA, 19 nt, Artificial Sequence
  Description of Artificial Sequence: Synthetic oligonucleotide
ggaugguaaagacuacauc

SEQ ID NO: 10860 - RNA, 19 nt, Artificial Sequence
  Description of Artificial Sequence: Synthetic oligonucleotide
cgccacggccagcgagcac

SEQ ID NO: 10861 - RNA, 19 nt, Artificial Sequence
  Description of Artificial Sequence: Synthetic oligonucleotide
gaugccagccagugggaau

SEQ ID NO: 10862 - RNA, 19 nt, Artificial Sequence
  Description of Artificial Sequence: Synthetic oligonucleotide
acgaugccagccaguggga

SEQ ID NO: 10863 - RNA, 19 nt, Artificial Sequence
  Description of Artificial Sequence: Synthetic oligonucleotide
uacgaugccagccaguggg

SEQ ID NO: 10864 - RNA, 19 nt, Artificial Sequence
  Description of Artificial Sequence: Synthetic oligonucleotide
gcgccacggccagcgagca

SEQ ID NO: 10865 - RNA, 19 nt, Artificial Sequence
  Description of Artificial Sequence: Synthetic oligonucleotide
aucaugcugaacugcuggu

SEQ ID NO: 10866 - RNA, 19 nt, Artificial Sequence
  Description of Artificial Sequence: Synthetic oligonucleotide
cgacguggugaagaucugu

SEQ ID NO: 10867 - RNA, 19 nt, Artificial Sequence
  Description of Artificial Sequence: Synthetic oligonucleotide
gccacggccagcgagcacc

SEQ ID NO: 10868 - RNA, 19 nt, Artificial Sequence
  Description of Artificial Sequence: Synthetic oligonucleotide
cuucccgaaagugcaucca

SEQ ID NO: 10869 - RNA, 19 nt, Artificial Sequence
  Description of Artificial Sequence: Synthetic oligonucleotide
ggcgccacggccagcgagc

SEQ ID NO: 10870 - RNA, 19 nt, Artificial Sequence
  Description of Artificial Sequence: Synthetic oligonucleotide
gacguggugaagaucugug

SEQ ID NO: 10871 - RNA, 19 nt, Artificial Sequence
  Description of Artificial Sequence: Synthetic oligonucleotide
caucaugcugaacugcugg

SEQ ID NO: 10872 - RNA, 19 nt, Artificial Sequence
  Description of Artificial Sequence: Synthetic oligonucleotide
augccagccagugggaauu

SEQ ID NO: 10873 - RNA, 19 nt, Artificial Sequence
  Description of Artificial Sequence: Synthetic oligonucleotide
gacgggcuaccuguccauc

SEQ ID NO: 10874 - RNA, 19 nt, Artificial Sequence
  Description of Artificial Sequence: Synthetic oligonucleotide
ggugaucguggaguucugc

SEQ ID NO: 10875 - RNA, 19 nt, Artificial Sequence
  Description of Artificial Sequence: Synthetic oligonucleotide
gugacgugugguccuuugg

SEQ ID NO: 10876 - RNA, 19 nt, Artificial Sequence
  Description of Artificial Sequence: Synthetic oligonucleotide
agagugacgugugguccuu

SEQ ID NO: 10877 - RNA, 19 nt, Artificial Sequence
  Description of Artificial Sequence: Synthetic oligonucleotide
ugaucguggaguucugcaa

SEQ ID NO: 10878 - RNA, 19 nt, Artificial Sequence
  Description of Artificial Sequence: Synthetic oligonucleotide
auccacagagaccuggcug

SEQ ID NO: 10879 - RNA, 19 nt, Artificial Sequence
  Description of Artificial Sequence: Synthetic oligonucleotide
uggugaucguggaguucug

SEQ ID NO: 10880 - RNA, 19 nt, Artificial Sequence
  Description of Artificial Sequence: Synthetic oligonucleotide
ggacaaccagacagacagu

SEQ ID NO: 10881 - RNA, 19 nt, Artificial Sequence
  Description of Artificial Sequence: Synthetic oligonucleotide
accagacagacagugggau

SEQ ID NO: 10882 - RNA, 19 nt, Artificial Sequence
  Description of Artificial Sequence: Synthetic oligonucleotide
cucauggugaucguggagu

SEQ ID NO: 10883 - RNA, 19 nt, Artificial Sequence
  Description of Artificial Sequence: Synthetic oligonucleotide
auggugaucguggaguucu

SEQ ID NO: 10884 - RNA, 19 nt, Artificial Sequence
  Description of Artificial Sequence: Synthetic oligonucleotide
cccgaaagugcauccacag

SEQ ID NO: 10885 - RNA, 19 nt, Artificial Sequence
  Description of Artificial Sequence: Synthetic oligonucleotide
ucccgaaagugcauccaca

SEQ ID NO: 10886 - RNA, 19 nt, Artificial Sequence
  Description of Artificial Sequence: Synthetic oligonucleotide
caaccagacagacaguggg

SEQ ID NO: 10887 - RNA, 19 nt, Artificial Sequence
  Description of Artificial Sequence: Synthetic oligonucleotide
agacagacagugggauggu

SEQ ID NO: 10888 - RNA, 19 nt, Artificial Sequence
  Description of Artificial Sequence: Synthetic oligonucleotide
ccagacagacagugggaug

SEQ ID NO: 10889 - RNA, 19 nt, Artificial Sequence
  Description of Artificial Sequence: Synthetic oligonucleotide
agugacgugugguccuuug

SEQ ID NO: 10890 - RNA, 19 nt, Artificial Sequence
  Description of Artificial Sequence: Synthetic oligonucleotide
gcucaagauccucauucac

SEQ ID NO: 10891 - RNA, 19 nt, Artificial Sequence
  Description of Artificial Sequence: Synthetic oligonucleotide
cccucauggugaucgugga

SEQ ID NO: 10892 - RNA, 19 nt, Artificial Sequence
  Description of Artificial Sequence: Synthetic oligonucleotide
aagacgggcuaccugucca

SEQ ID NO: 10893 - RNA, 19 nt, Artificial Sequence
  Description of Artificial Sequence: Synthetic oligonucleotide
cauggugaucguggaguuc

SEQ ID NO: 10894 - RNA, 19 nt, Artificial Sequence
  Description of Artificial Sequence: Synthetic oligonucleotide
ugcuacagcuuccaggugg

SEQ ID NO: 10895 - RNA, 19 nt, Artificial Sequence
  Description of Artificial Sequence: Synthetic oligonucleotide
cagagugacgugugguccu

SEQ ID NO: 10896 - RNA, 19 nt, Artificial Sequence
  Description of Artificial Sequence: Synthetic oligonucleotide
agacgggcuaccuguccau

SEQ ID NO: 10897 - RNA, 19 nt, Artificial Sequence
  Description of Artificial Sequence: Synthetic oligonucleotide
aaccagacagacaguggga

SEQ ID NO: 10898 - RNA, 19 nt, Artificial Sequence
  Description of Artificial Sequence: Synthetic oligonucleotide
gagugacgugugguccuuu

SEQ ID NO: 10899 - RNA, 19 nt, Artificial Sequence
  Description of Artificial Sequence: Synthetic oligonucleotide
uacagcuuccagguggcca

SEQ ID NO: 10900 - RNA, 19 nt, Artificial Sequence
  Description of Artificial Sequence: Synthetic oligonucleotide
cagacagacagugggaugg

SEQ ID NO: 10901 - RNA, 19 nt, Artificial Sequence
  Description of Artificial Sequence: Synthetic oligonucleotide
ucugcuacagcuuccaggu

SEQ ID NO: 10902 - RNA, 19 nt, Artificial Sequence
  Description of Artificial Sequence: Synthetic oligonucleotide
cugcuacagcuuccaggug

SEQ ID NO: 10903 - RNA, 19 nt, Artificial Sequence
  Description of Artificial Sequence: Synthetic oligonucleotide
gcuacagcuuccagguggc

SEQ ID NO: 10904 - RNA, 19 nt, Artificial Sequence
  Description of Artificial Sequence: Synthetic oligonucleotide
ccccucauggugaucgugg

SEQ ID NO: 10905 - RNA, 19 nt, Artificial Sequence
  Description of Artificial Sequence: Synthetic oligonucleotide
gugaucguggaguucugca

SEQ ID NO: 10906 - RNA, 19 nt, Artificial Sequence
  Description of Artificial Sequence: Synthetic oligonucleotide
uccacagagaccuggcugc

SEQ ID NO: 10907 - RNA, 19 nt, Artificial Sequence
  Description of Artificial Sequence: Synthetic oligonucleotide
ucauggugaucguggaguu

SEQ ID NO: 10908 - RNA, 19 nt, Artificial Sequence
  Description of Artificial Sequence: Synthetic oligonucleotide
ccaagcgaggaggaccacu

SEQ ID NO: 10909 - RNA, 19 nt, Artificial Sequence
  Description of Artificial Sequence: Synthetic oligonucleotide
cgacugccuuaugaugcca

SEQ ID NO: 10910 - RNA, 19 nt, Artificial Sequence
  Description of Artificial Sequence: Synthetic oligonucleotide
gacugccuuaugaugccag

SEQ ID NO: 10911 - RNA, 19 nt, Artificial Sequence
  Description of Artificial Sequence: Synthetic oligonucleotide
acugccuuaugaugccagc

SEQ ID NO: 10912 - RNA, 19 nt, Artificial Sequence
  Description of Artificial Sequence: Synthetic oligonucleotide
gccuuaugaugccagcaaa

SEQ ID NO: 10913 - RNA, 19 nt, Artificial Sequence
  Description of Artificial Sequence: Synthetic oligonucleotide
agugauguagaagaagagg

SEQ ID NO: 10914 - RNA, 19 nt, Artificial Sequence
  Description of Artificial Sequence: Synthetic oligonucleotide
gugauguagaagaagagga

SEQ ID NO: 10915 - RNA, 19 nt, Artificial Sequence
  Description of Artificial Sequence: Synthetic oligonucleotide
ggcccgggauauuuauaaa

SEQ ID NO: 10916 - RNA, 19 nt, Artificial Sequence
  Description of Artificial Sequence: Synthetic oligonucleotide
gcccgggauauuuauaaag

SEQ ID NO: 10917 - RNA, 19 nt, Artificial Sequence
  Description of Artificial Sequence: Synthetic oligonucleotide
cccgggauauuuauaaaga

SEQ ID NO: 10918 - RNA, 19 nt, Artificial Sequence
  Description of Artificial Sequence: Synthetic oligonucleotide
cucccuuugaaauggaugg

SEQ ID NO: 10919 - RNA, 19 nt, Artificial Sequence
  Description of Artificial Sequence: Synthetic oligonucleotide
ucccuuugaaauggauggc

SEQ ID NO: 10920 - RNA, 19 nt, Artificial Sequence
  Description of Artificial Sequence: Synthetic oligonucleotide
ccuuugaaauggauggccc

SEQ ID NO: 10921 - RNA, 19 nt, Artificial Sequence
  Description of Artificial Sequence: Synthetic oligonucleotide
cuuugaaauggauggcccc

SEQ ID NO: 10922 - RNA, 19 nt, Artificial Sequence
  Description of Artificial Sequence: Synthetic oligonucleotide
ugaaauggauggccccaga

SEQ ID NO: 10923 - RNA, 19 nt, Artificial Sequence
  Description of Artificial Sequence: Synthetic oligonucleotide
gaaauggauggccccagaa

SEQ ID NO: 10924 - RNA, 19 nt, Artificial Sequence
  Description of Artificial Sequence: Synthetic oligonucleotide
cagcaggauggcaaagacu

SEQ ID NO: 10925 - RNA, 19 nt, Artificial Sequence
  Description of Artificial Sequence: Synthetic oligonucleotide
agcaggauggcaaagacua

SEQ ID NO: 10926 - RNA, 19 nt, Artificial Sequence
  Description of Artificial Sequence: Synthetic oligonucleotide
gcaggauggcaaagacuac

SEQ ID NO: 10927 - RNA, 19 nt, Artificial Sequence
  Description of Artificial Sequence: Synthetic oligonucleotide
ggauggcaaagacuacauu

SEQ ID NO: 10928 - RNA, 19 nt, Artificial Sequence
  Description of Artificial Sequence: Synthetic oligonucleotide
aagacaggcuacuugucca

SEQ ID NO: 10929 - RNA, 19 nt, Artificial Sequence
  Description of Artificial Sequence: Synthetic oligonucleotide
agacaggcuacuuguccau

SEQ ID NO: 10930 - RNA, 19 nt, Artificial Sequence
  Description of Artificial Sequence: Synthetic oligonucleotide
gacaggcuacuuguccauc

SEQ ID NO: 10931 - RNA, 19 nt, Artificial Sequence
  Description of Artificial Sequence: Synthetic oligonucleotide
gccagcaaaugggaauucc

SEQ ID NO: 10932 - RNA, 19 nt, Artificial Sequence
  Description of Artificial Sequence: Synthetic oligonucleotide
ccagcaaaugggaauuccc

SEQ ID NO: 10933 - RNA, 19 nt, Artificial Sequence
  Description of Artificial Sequence: Synthetic oligonucleotide
cagcaaaugggaauucccc

SEQ ID NO: 10934 - RNA, 19 nt, Artificial Sequence
  Description of Artificial Sequence: Synthetic oligonucleotide
aaugggaauuccccagaga

SEQ ID NO: 10935 - RNA, 19 nt, Artificial Sequence
  Description of Artificial Sequence: Synthetic oligonucleotide
augucugaacucaagaucc

SEQ ID NO: 10936 - RNA, 19 nt, Artificial Sequence
  Description of Artificial Sequence: Synthetic oligonucleotide
ugucugaacucaagauccu

SEQ ID NO: 10937 - RNA, 19 nt, Artificial Sequence
  Description of Artificial Sequence: Synthetic oligonucleotide
gucugaacucaagauccuc

SEQ ID NO: 10938 - RNA, 19 nt, Artificial Sequence
  Description of Artificial Sequence: Synthetic oligonucleotide
ucugaacucaagauccuca

SEQ ID NO: 10939 - RNA, 19 nt, Artificial Sequence
  Description of Artificial Sequence: Synthetic oligonucleotide
cugaacucaagauccucau

SEQ ID NO: 10940 - RNA, 19 nt, Artificial Sequence
  Description of Artificial Sequence: Synthetic oligonucleotide
ugaacucaagauccucauu

SEQ ID NO: 10941 - RNA, 19 nt, Artificial Sequence
  Description of Artificial Sequence: Synthetic oligonucleotide
acucaagauccucauucau

SEQ ID NO: 10942 - RNA, 19 nt, Artificial Sequence
  Description of Artificial Sequence: Synthetic oligonucleotide
cucauggugauuguggaau

SEQ ID NO: 10943 - RNA, 19 nt, Artificial Sequence
  Description of Artificial Sequence: Synthetic oligonucleotide
ucauggugauuguggaauu

SEQ ID NO: 10944 - RNA, 19 nt, Artificial Sequence
  Description of Artificial Sequence: Synthetic oligonucleotide
cauggugauuguggaauuc

SEQ ID NO: 10945 - RNA, 19 nt, Artificial Sequence
  Description of Artificial Sequence: Synthetic oligonucleotide
auggugauuguggaauucu

SEQ ID NO: 10946 - RNA, 19 nt, Artificial Sequence
  Description of Artificial Sequence: Synthetic oligonucleotide
uggugauuguggaauucug

SEQ ID NO: 10947 - RNA, 19 nt, Artificial Sequence
  Description of Artificial Sequence: Synthetic oligonucleotide
ggugauuguggaauucugc

SEQ ID NO: 10948 - RNA, 19 nt, Artificial Sequence
  Description of Artificial Sequence: Synthetic oligonucleotide
gugauuguggaauucugca

SEQ ID NO: 10949 - RNA, 19 nt, Artificial Sequence
  Description of Artificial Sequence: Synthetic oligonucleotide
ugauuguggaauucugcaa

SEQ ID NO: 10950 - RNA, 19 nt, Artificial Sequence
  Description of Artificial Sequence: Synthetic oligonucleotide
ucuguuacagcuuccaagu

SEQ ID NO: 10951 - RNA, 19 nt, Artificial Sequence
  Description of Artificial Sequence: Synthetic oligonucleotide
cuguuacagcuuccaagug

SEQ ID NO: 10952 - RNA, 19 nt, Artificial Sequence
  Description of Artificial Sequence: Synthetic oligonucleotide
uguuacagcuuccaagugg

SEQ ID NO: 10953 - RNA, 19 nt, Artificial Sequence
  Description of Artificial Sequence: Synthetic oligonucleotide
guuacagcuuccaaguggc

SEQ ID NO: 10954 - RNA, 19 nt, Artificial Sequence
  Description of Artificial Sequence: Synthetic oligonucleotide
uacagcuuccaaguggcua

SEQ ID NO: 10955 - RNA, 19 nt, Artificial Sequence
  Description of Artificial Sequence: Synthetic oligonucleotide
acgugguuaaaaucuguga

SEQ ID NO: 10956 - RNA, 19 nt, Artificial Sequence
  Description of Artificial Sequence: Synthetic oligonucleotide
cgugguuaaaaucugugac

SEQ ID NO: 10957 - RNA, 19 nt, Artificial Sequence
  Description of Artificial Sequence: Synthetic oligonucleotide
gugguuaaaaucugugacu

SEQ ID NO: 10958 - RNA, 19 nt, Artificial Sequence
  Description of Artificial Sequence: Synthetic oligonucleotide
ugguuaaaaucugugacuu

SEQ ID NO: 10959 - RNA, 19 nt, Artificial Sequence
  Description of Artificial Sequence: Synthetic oligonucleotide
gguuaaaaucugugacuuu

SEQ ID NO: 10960 - RNA, 19 nt, Artificial Sequence
  Description of Artificial Sequence: Synthetic oligonucleotide
guuaaaaucugugacuuug

SEQ ID NO: 10961 - RNA, 19 nt, Artificial Sequence
  Description of Artificial Sequence: Synthetic oligonucleotide
uuaaaaucugugacuuugg

SEQ ID NO: 10962 - RNA, 19 nt, Artificial Sequence
  Description of Artificial Sequence: Synthetic oligonucleotide
uaaaaucugugacuuuggc

SEQ ID NO: 10963 - RNA, 19 nt, Artificial Sequence
  Description of Artificial Sequence: Synthetic oligonucleotide
aaaaucugugacuuuggcu

SEQ ID NO: 10964 - RNA, 19 nt, Artificial Sequence
  Description of Artificial Sequence: Synthetic oligonucleotide
aaaucugugacuuuggcuu

SEQ ID NO: 10965 - RNA, 19 nt, Artificial Sequence
  Description of Artificial Sequence: Synthetic oligonucleotide
aaauggauggccccagaaa

SEQ ID NO: 10966 - RNA, 19 nt, Artificial Sequence
  Description of Artificial Sequence: Synthetic oligonucleotide
uagaaggaaagaauaagau

SEQ ID NO: 10967 - RNA, 19 nt, Artificial Sequence
  Description of Artificial Sequence: Synthetic oligonucleotide
gagaacaacguggugaaga

SEQ ID NO: 10968 - RNA, 19 nt, Artificial Sequence
  Description of Artificial Sequence: Synthetic oligonucleotide
agaacaacguggugaagau

SEQ ID NO: 10969 - RNA, 19 nt, Artificial Sequence
  Description of Artificial Sequence: Synthetic oligonucleotide
aacaacguggugaagauuu

SEQ ID NO: 10970 - RNA, 19 nt, Artificial Sequence
  Description of Artificial Sequence: Synthetic oligonucleotide
acaacguggugaagauuug

SEQ ID NO: 10971 - RNA, 19 nt, Artificial Sequence
  Description of Artificial Sequence: Synthetic oligonucleotide
cugaaauggauggcucccg

SEQ ID NO: 10972 - RNA, 19 nt, Artificial Sequence
  Description of Artificial Sequence: Synthetic oligonucleotide
ugaaauggauggcucccga

SEQ ID NO: 10973 - RNA, 19 nt, Artificial Sequence
  Description of Artificial Sequence: Synthetic oligonucleotide
gaaauggauggcucccgaa

SEQ ID NO: 10974 - RNA, 19 nt, Artificial Sequence
  Description of Artificial Sequence: Synthetic oligonucleotide
acugcuggcacagagaccc

SEQ ID NO: 10975 - RNA, 19 nt, Artificial Sequence
  Description of Artificial Sequence: Synthetic oligonucleotide
cagaucacuugguuuaaaa

SEQ ID NO: 10976 - RNA, 19 nt, Artificial Sequence
  Description of Artificial Sequence: Synthetic oligonucleotide
agaucacuugguuuaaaaa

SEQ ID NO: 10977 - RNA, 19 nt, Artificial Sequence
  Description of Artificial Sequence: Synthetic oligonucleotide
cacauuggccaccaucuga

SEQ ID NO: 10978 - RNA, 19 nt, Artificial Sequence
  Description of Artificial Sequence: Synthetic oligonucleotide
acauuggccaccaucugaa

SEQ ID NO: 10979 - RNA, 19 nt, Artificial Sequence
  Description of Artificial Sequence: Synthetic oligonucleotide
auuggccaccaucugaacg

SEQ ID NO: 10980 - RNA, 19 nt, Artificial Sequence
  Description of Artificial Sequence: Synthetic oligonucleotide
uuggccaccaucugaacgu

SEQ ID NO: 10981 - RNA, 19 nt, Artificial Sequence
  Description of Artificial Sequence: Synthetic oligonucleotide
uggccaccaucugaacgug

SEQ ID NO: 10982 - RNA, 19 nt, Artificial Sequence
  Description of Artificial Sequence: Synthetic oligonucleotide
ggccaccaucugaacgugg

SEQ ID NO: 10983 - RNA, 19 nt, Artificial Sequence
  Description of Artificial Sequence: Synthetic oligonucleotide
gccaccaucugaacguggu

SEQ ID NO: 10984 - RNA, 19 nt, Artificial Sequence
  Description of Artificial Sequence: Synthetic oligonucleotide
ccgggauauuuauaagaac

SEQ ID NO: 10985 - RNA, 19 nt, Artificial Sequence
  Description of Artificial Sequence: Synthetic oligonucleotide
cgggauauuuauaagaacc

SEQ ID NO: 10986 - RNA, 19 nt, Artificial Sequence
  Description of Artificial Sequence: Synthetic oligonucleotide
gggauauuuauaagaaccc

SEQ ID NO: 10987 - RNA, 19 nt, Artificial Sequence
  Description of Artificial Sequence: Synthetic oligonucleotide
ggacugcuggcacagagac

SEQ ID NO: 10988 - RNA, 19 nt, Artificial Sequence
  Description of Artificial Sequence: Synthetic oligonucleotide
gacugcuggcacagagacc

SEQ ID NO: 10989 - RNA, 19 nt, Artificial Sequence
  Description of Artificial Sequence: Synthetic oligonucleotide
uacggcaaccucuccaacu

SEQ ID NO: 10990 - RNA, 19 nt, Artificial Sequence
  Description of Artificial Sequence: Synthetic oligonucleotide
uucccgaaagugcauccac

SEQ ID NO: 10991 - RNA, 19 nt, Artificial Sequence
  Description of Artificial Sequence: Synthetic oligonucleotide
ugccagccagugggaauuc

SEQ ID NO: 10992 - RNA, 19 nt, Artificial Sequence
  Description of Artificial Sequence: Synthetic oligonucleotide
agcuuccagguggccagag

SEQ ID NO: 10993 - RNA, 19 nt, Artificial Sequence
  Description of Artificial Sequence: Synthetic oligonucleotide
ccuacgaugccagccagug

SEQ ID NO: 10994 - RNA, 19 nt, Artificial Sequence
  Description of Artificial Sequence: Synthetic oligonucleotide
cgaugccagccagugggaa

SEQ ID NO: 10995 - RNA, 19 nt, Artificial Sequence
  Description of Artificial Sequence: Synthetic oligonucleotide
cccugaaguggauggcccc

SEQ ID NO: 10996 - RNA, 19 nt, Artificial Sequence
  Description of Artificial Sequence: Synthetic oligonucleotide
cagcuuccagguggccaga

SEQ ID NO: 10997 - RNA, 19 nt, Artificial Sequence
  Description of Artificial Sequence: Synthetic oligonucleotide
acagcuuccagguggccag

SEQ ID NO: 10998 - RNA, 19 nt, Artificial Sequence
  Description of Artificial Sequence: Synthetic oligonucleotide
gcuuccagguggccagagg

SEQ ID NO: 10999 - RNA, 19 nt, Artificial Sequence
  Description of Artificial Sequence: Synthetic oligonucleotide
ccccugaaguggauggccc

SEQ ID NO: 11000 - RNA, 19 nt, Artificial Sequence
  Description of Artificial Sequence: Synthetic oligonucleotide
caccguggccgugaaaaug

SEQ ID NO: 11001 - RNA, 19 nt, Artificial Sequence
  Description of Artificial Sequence: Synthetic oligonucleotide
cuacgaugccagccagugg

SEQ ID NO: 11002 - RNA, 19 nt, Artificial Sequence
  Description of Artificial Sequence: Synthetic oligonucleotide
cuacagcuuccagguggcc

SEQ ID NO: 11003 - RNA, 19 nt, Artificial Sequence
  Description of Artificial Sequence: Synthetic oligonucleotide
ccgaaagugcauccacaga

SEQ ID NO: 11004 - RNA, 19 nt, Artificial Sequence
  Description of Artificial Sequence: Synthetic oligonucleotide
caacguggucaaccuccuc

SEQ ID NO: 11005 - RNA, 19 nt, Artificial Sequence
  Description of Artificial Sequence: Synthetic oligonucleotide
cgggcuaccuguccaucau

SEQ ID NO: 11006 - RNA, 19 nt, Artificial Sequence
  Description of Artificial Sequence: Synthetic oligonucleotide
acguggucaaccuccucgg

SEQ ID NO: 11007 - RNA, 19 nt, Artificial Sequence
  Description of Artificial Sequence: Synthetic oligonucleotide
guccaucaucauggacccc

SEQ ID NO: 11008 - RNA, 19 nt, Artificial Sequence
  Description of Artificial Sequence: Synthetic oligonucleotide
uccaucaucauggaccccg

SEQ ID NO: 11009 - RNA, 19 nt, Artificial Sequence
  Description of Artificial Sequence: Synthetic oligonucleotide
gggcuaccuguccaucauc

SEQ ID NO: 11010 - RNA, 19 nt, Artificial Sequence
  Description of Artificial Sequence: Synthetic oligonucleotide
aacguggucaaccuccucg

SEQ ID NO: 11011 - RNA, 19 nt, Artificial Sequence
  Description of Artificial Sequence: Synthetic oligonucleotide
aaccaccucaacgugguca

SEQ ID NO: 11012 - RNA, 19 nt, Artificial Sequence
  Description of Artificial Sequence: Synthetic oligonucleotide
acgggcuaccuguccauca

SEQ ID NO: 11013 - RNA, 19 nt, Artificial Sequence
  Description of Artificial Sequence: Synthetic oligonucleotide
cauccacagagaccuggcu

SEQ ID NO: 11014 - RNA, 19 nt, Artificial Sequence
  Description of Artificial Sequence: Synthetic oligonucleotide
cugggacagcaagaagggc

SEQ ID NO: 11015 - RNA, 19 nt, Artificial Sequence
  Description of Artificial Sequence: Synthetic oligonucleotide
ugggacagcaagaagggcu

SEQ ID NO: 11016 - RNA, 19 nt, Artificial Sequence
  Description of Artificial Sequence: Synthetic oligonucleotide
gggacagcaagaagggcuu

SEQ ID NO: 11017 - RNA, 19 nt, Artificial Sequence
  Description of Artificial Sequence: Synthetic oligonucleotide
uaauugaaggaaaaaacaa

SEQ ID NO: 11018 - RNA, 19 nt, Artificial Sequence
  Description of Artificial Sequence: Synthetic oligonucleotide
uuggaugaacauugugaac

SEQ ID NO: 11019 - RNA, 19 nt, Artificial Sequence
  Description of Artificial Sequence: Synthetic oligonucleotide
uggaugaacauugugaacg

SEQ ID NO: 11020 - RNA, 19 nt, Artificial Sequence
  Description of Artificial Sequence: Synthetic oligonucleotide
ugugaacgacugccuuaug

SEQ ID NO: 11021 - RNA, 19 nt, Artificial Sequence
  Description of Artificial Sequence: Synthetic oligonucleotide
gugaacgacugccuuauga

SEQ ID NO: 11022 - RNA, 19 nt, Artificial Sequence
  Description of Artificial Sequence: Synthetic oligonucleotide
ugaacgacugccuuaugau

SEQ ID NO: 11023 - RNA, 19 nt, Artificial Sequence
  Description of Artificial Sequence: Synthetic oligonucleotide
gaacgacugccuuaugaug

SEQ ID NO: 11024 - RNA, 19 nt, Artificial Sequence
  Description of Artificial Sequence: Synthetic oligonucleotide
aacgacugccuuaugaugc

SEQ ID NO: 11025 - RNA, 19 nt, Artificial Sequence
  Description of Artificial Sequence: Synthetic oligonucleotide
acgacugccuuaugaugcc

SEQ ID NO: 11026 - RNA, 19 nt, Artificial Sequence
  Description of Artificial Sequence: Synthetic oligonucleotide
aaaauguugaaagaaggag

SEQ ID NO: 11027 - RNA, 19 nt, Artificial Sequence
  Description of Artificial Sequence: Synthetic oligonucleotide
aaauguugaaagaaggagc

SEQ ID NO: 11028 - RNA, 19 nt, Artificial Sequence
  Description of Artificial Sequence: Synthetic oligonucleotide
ugauguagaagaagaggaa

SEQ ID NO: 11029 - RNA, 19 nt, Artificial Sequence
  Description of Artificial Sequence: Synthetic oligonucleotide
gauguagaagaagaggaag

SEQ ID NO: 11030 - RNA, 19 nt, Artificial Sequence
  Description of Artificial Sequence: Synthetic oligonucleotide
uuacagcuuccaaguggcu

SEQ ID NO: 11031 - RNA, 19 nt, Artificial Sequence
  Description of Artificial Sequence: Synthetic oligonucleotide
aacgugguuaaaaucugug

SEQ ID NO: 11032 - RNA, 19 nt, Artificial Sequence
  Description of Artificial Sequence: Synthetic oligonucleotide
cccuuugaaauggauggcc

SEQ ID NO: 11033 - RNA, 19 nt, Artificial Sequence
  Description of Artificial Sequence: Synthetic oligonucleotide
gaaauguaccagaccaugc

SEQ ID NO: 11034 - RNA, 19 nt, Artificial Sequence
  Description of Artificial Sequence: Synthetic oligonucleotide
aaauguaccagaccaugcu

SEQ ID NO: 11035 - RNA, 19 nt, Artificial Sequence
  Description of Artificial Sequence: Synthetic oligonucleotide
aauguaccagaccaugcug

SEQ ID NO: 11036 - RNA, 19 nt, Artificial Sequence
  Description of Artificial Sequence: Synthetic oligonucleotide
auguaccagaccaugcugg

SEQ ID NO: 11037 - RNA, 19 nt, Artificial Sequence
  Description of Artificial Sequence: Synthetic oligonucleotide
uguaccagaccaugcugga

SEQ ID NO: 11038 - RNA, 19 nt, Artificial Sequence
  Description of Artificial Sequence: Synthetic oligonucleotide
guaccagaccaugcuggac

SEQ ID NO: 11039 - RNA, 19 nt, Artificial Sequence
  Description of Artificial Sequence: Synthetic oligonucleotide
ccagcaaaagcagggaguc

SEQ ID NO: 11040 - RNA, 19 nt, Artificial Sequence
  Description of Artificial Sequence: Synthetic oligonucleotide
aucuccuuccacgugacca

SEQ ID NO: 11041 - RNA, 19 nt, Artificial Sequence
  Description of Artificial Sequence: Synthetic oligonucleotide
gauuguggaauucugcaaa

SEQ ID NO: 11042 - RNA, 19 nt, Artificial Sequence
  Description of Artificial Sequence: Synthetic oligonucleotide
auuguggaauucugcaaau

SEQ ID NO: 11043 - RNA, 19 nt, Artificial Sequence
  Description of Artificial Sequence: Synthetic oligonucleotide
aucucaucuguuacagcuu

SEQ ID NO: 11044 - RNA, 19 nt, Artificial Sequence
  Description of Artificial Sequence: Synthetic oligonucleotide
ucucaucuguuacagcuuc

SEQ ID NO: 11045 - RNA, 19 nt, Artificial Sequence
  Description of Artificial Sequence: Synthetic oligonucleotide
cucaucuguuacagcuucc

SEQ ID NO: 11046 - RNA, 19 nt, Artificial Sequence
  Description of Artificial Sequence: Synthetic oligonucleotide
ucaucuguuacagcuucca

SEQ ID NO: 11047 - RNA, 19 nt, Artificial Sequence
  Description of Artificial Sequence: Synthetic oligonucleotide
aucuguuacagcuuccaag

SEQ ID NO: 11048 - RNA, 19 nt, Artificial Sequence
  Description of Artificial Sequence: Synthetic oligonucleotide
acagcuuccaaguggcuaa

SEQ ID NO: 11049 - RNA, 19 nt, Artificial Sequence
  Description of Artificial Sequence: Synthetic oligonucleotide
gaugccagcaagugggagu

SEQ ID NO: 11050 - RNA, 19 nt, Artificial Sequence
  Description of Artificial Sequence: Synthetic oligonucleotide
augccagcaagugggaguu

SEQ ID NO: 11051 - RNA, 19 nt, Artificial Sequence
  Description of Artificial Sequence: Synthetic oligonucleotide
acuguggcugugaaaaugc

SEQ ID NO: 11052 - RNA, 19 nt, Artificial Sequence
  Description of Artificial Sequence: Synthetic oligonucleotide
cuguggcugugaaaaugcu

SEQ ID NO: 11053 - RNA, 19 nt, Artificial Sequence
  Description of Artificial Sequence: Synthetic oligonucleotide
uguggcugugaaaaugcug

SEQ ID NO: 11054 - RNA, 19 nt, Artificial Sequence
  Description of Artificial Sequence: Synthetic oligonucleotide
ggggccacggccagcgagu

SEQ ID NO: 11055 - RNA, 19 nt, Artificial Sequence
  Description of Artificial Sequence: Synthetic oligonucleotide
gggccacggccagcgagua

SEQ ID NO: 11056 - RNA, 19 nt, Artificial Sequence
  Description of Artificial Sequence: Synthetic oligonucleotide
ggccacggccagcgaguac

SEQ ID NO: 11057 - RNA, 19 nt, Artificial Sequence
  Description of Artificial Sequence: Synthetic oligonucleotide
gccacggccagcgaguaca

SEQ ID NO: 11058 - RNA, 19 nt, Artificial Sequence
  Description of Artificial Sequence: Synthetic oligonucleotide
agaggcauggaguuccugu

SEQ ID NO: 11059 - RNA, 19 nt, Artificial Sequence
  Description of Artificial Sequence: Synthetic oligonucleotide
gaggcauggaguuccuguc

SEQ ID NO: 11060 - RNA, 19 nt, Artificial Sequence
  Description of Artificial Sequence: Synthetic oligonucleotide
aggcauggaguuccugucu

SEQ ID NO: 11061 - RNA, 19 nt, Artificial Sequence
  Description of Artificial Sequence: Synthetic oligonucleotide
ggcauggaguuccugucuu

SEQ ID NO: 11062 - RNA, 19 nt, Artificial Sequence
  Description of Artificial Sequence: Synthetic oligonucleotide
gcauggaguuccugucuuc

SEQ ID NO: 11063 - RNA, 19 nt, Artificial Sequence
  Description of Artificial Sequence: Synthetic oligonucleotide
cauggaguuccugucuucc

SEQ ID NO: 11064 - RNA, 19 nt, Artificial Sequence
  Description of Artificial Sequence: Synthetic oligonucleotide
auggaguuccugucuucca

SEQ ID NO: 11065 - RNA, 19 nt, Artificial Sequence
  Description of Artificial Sequence: Synthetic oligonucleotide
uggaguuccugucuuccag

SEQ ID NO: 11066 - RNA, 19 nt, Artificial Sequence
  Description of Artificial Sequence: Synthetic oligonucleotide
ggaguuccugucuuccaga

SEQ ID NO: 11067 - RNA, 19 nt, Artificial Sequence
  Description of Artificial Sequence: Synthetic oligonucleotide
gaguuccugucuuccagaa

SEQ ID NO: 11068 - RNA, 19 nt, Artificial Sequence
  Description of Artificial Sequence: Synthetic oligonucleotide
aguuccugucuuccagaaa

SEQ ID NO: 11069 - RNA, 19 nt, Artificial Sequence
  Description of Artificial Sequence: Synthetic oligonucleotide
guuccugucuuccagaaag

SEQ ID NO: 11070 - RNA, 19 nt, Artificial Sequence
  Description of Artificial Sequence: Synthetic oligonucleotide
uuccugucuuccagaaagu

SEQ ID NO: 11071 - RNA, 19 nt, Artificial Sequence
  Description of Artificial Sequence: Synthetic oligonucleotide
uccugucuuccagaaagug

SEQ ID NO: 11072 - RNA, 19 nt, Artificial Sequence
  Description of Artificial Sequence: Synthetic oligonucleotide
ccugucuuccagaaagugc

SEQ ID NO: 11073 - RNA, 19 nt, Artificial Sequence
  Description of Artificial Sequence: Synthetic oligonucleotide
cugucuuccagaaagugca

SEQ ID NO: 11074 - RNA, 19 nt, Artificial Sequence
  Description of Artificial Sequence: Synthetic oligonucleotide
ugucuuccagaaagugcau

SEQ ID NO: 11075 - RNA, 19 nt, Artificial Sequence
  Description of Artificial Sequence: Synthetic oligonucleotide
cuuccagaaagugcauuca

SEQ ID NO: 11076 - RNA, 19 nt, Artificial Sequence
  Description of Artificial Sequence: Synthetic oligonucleotide
cguggugaagauuugugau

SEQ ID NO: 11077 - RNA, 19 nt, Artificial Sequence
  Description of Artificial Sequence: Synthetic oligonucleotide
guggugaagauuugugauu

SEQ ID NO: 11078 - RNA, 19 nt, Artificial Sequence
  Description of Artificial Sequence: Synthetic oligonucleotide
uggugaagauuugugauuu

SEQ ID NO: 11079 - RNA, 19 nt, Artificial Sequence
  Description of Artificial Sequence: Synthetic oligonucleotide
ggugaagauuugugauuuu

SEQ ID NO: 11080 - RNA, 19 nt, Artificial Sequence
  Description of Artificial Sequence: Synthetic oligonucleotide
gugaagauuugugauuuug

SEQ ID NO: 11081 - RNA, 19 nt, Artificial Sequence
  Description of Artificial Sequence: Synthetic oligonucleotide
ugaagauuugugauuuugg

SEQ ID NO: 11082 - RNA, 19 nt, Artificial Sequence
  Description of Artificial Sequence: Synthetic oligonucleotide
gaagauuugugauuuuggc

SEQ ID NO: 11083 - RNA, 19 nt, Artificial Sequence
  Description of Artificial Sequence: Synthetic oligonucleotide
aagauuugugauuuuggcc

SEQ ID NO: 11084 - RNA, 19 nt, Artificial Sequence
  Description of Artificial Sequence: Synthetic oligonucleotide
agauuugugauuuuggccu

SEQ ID NO: 11085 - RNA, 19 nt, Artificial Sequence
  Description of Artificial Sequence: Synthetic oligonucleotide
gauuugugauuuuggccuu

SEQ ID NO: 11086 - RNA, 19 nt, Artificial Sequence
  Description of Artificial Sequence: Synthetic oligonucleotide
auuugugauuuuggccuug

SEQ ID NO: 11087 - RNA, 19 nt, Artificial Sequence
  Description of Artificial Sequence: Synthetic oligonucleotide
uuugugauuuuggccuugc

SEQ ID NO: 11088 - RNA, 19 nt, Artificial Sequence
  Description of Artificial Sequence: Synthetic oligonucleotide
uugugauuuuggccuugcc

SEQ ID NO: 11089 - RNA, 19 nt, Artificial Sequence
  Description of Artificial Sequence: Synthetic oligonucleotide
uuuuggccuugcccgggau

SEQ ID NO: 11090 - RNA, 19 nt, Artificial Sequence
  Description of Artificial Sequence: Synthetic oligonucleotide
cggcucccuuaugaugcca

SEQ ID NO: 11091 - RNA, 19 nt, Artificial Sequence
  Description of Artificial Sequence: Synthetic oligonucleotide
ggcucccuuaugaugccag

SEQ ID NO: 11092 - RNA, 19 nt, Artificial Sequence
  Description of Artificial Sequence: Synthetic oligonucleotide
gcucccuuaugaugccagc

SEQ ID NO: 11093 - RNA, 19 nt, Artificial Sequence
  Description of Artificial Sequence: Synthetic oligonucleotide
cccuuaugaugccagcaag

SEQ ID NO: 11094 - RNA, 19 nt, Artificial Sequence
  Description of Artificial Sequence: Synthetic oligonucleotide
ugaugccagcaagugggag

SEQ ID NO: 11095 - RNA, 19 nt, Artificial Sequence
  Description of Artificial Sequence: Synthetic oligonucleotide
accaagcaaggagggccuc

SEQ ID NO: 11096 - RNA, 19 nt, Artificial Sequence
  Description of Artificial Sequence: Synthetic oligonucleotide
ccaagcaaggagggccucu

SEQ ID NO: 11097 - RNA, 19 nt, Artificial Sequence
  Description of Artificial Sequence: Synthetic oligonucleotide
aggagggccucugauggug

SEQ ID NO: 11098 - RNA, 19 nt, Artificial Sequence
  Description of Artificial Sequence: Synthetic oligonucleotide
ggagggccucugaugguga

SEQ ID NO: 11099 - RNA, 19 nt, Artificial Sequence
  Description of Artificial Sequence: Synthetic oligonucleotide
gagggccucugauggugau

SEQ ID NO: 11100 - RNA, 19 nt, Artificial Sequence
  Description of Artificial Sequence: Synthetic oligonucleotide
agggccucugauggugauu

SEQ ID NO: 11101 - RNA, 19 nt, Artificial Sequence
  Description of Artificial Sequence: Synthetic oligonucleotide
gggccucugauggugauug

SEQ ID NO: 11102 - RNA, 19 nt, Artificial Sequence
  Description of Artificial Sequence: Synthetic oligonucleotide
ggccucugauggugauugu

SEQ ID NO: 11103 - RNA, 19 nt, Artificial Sequence
  Description of Artificial Sequence: Synthetic oligonucleotide
cugauggugauuguugaau

SEQ ID NO: 11104 - RNA, 19 nt, Artificial Sequence
  Description of Artificial Sequence: Synthetic oligonucleotide
auggugauuguugaauacu

SEQ ID NO: 11105 - RNA, 19 nt, Artificial Sequence
  Description of Artificial Sequence: Synthetic oligonucleotide
uggugauuguugaauacug

SEQ ID NO: 11106 - RNA, 19 nt, Artificial Sequence
  Description of Artificial Sequence: Synthetic oligonucleotide
ggugauuguugaauacugc

SEQ ID NO: 11107 - RNA, 19 nt, Artificial Sequence
  Description of Artificial Sequence: Synthetic oligonucleotide
gugauuguugaauacugca

SEQ ID NO: 11108 - RNA, 19 nt, Artificial Sequence
  Description of Artificial Sequence: Synthetic oligonucleotide
ugauuguugaauacugcaa

SEQ ID NO: 11109 - RNA, 19 nt, Artificial Sequence
  Description of Artificial Sequence: Synthetic oligonucleotide
gauuguugaauacugcaaa

SEQ ID NO: 11110 - RNA, 19 nt, Artificial Sequence
  Description of Artificial Sequence: Synthetic oligonucleotide
auuguugaauacugcaaau

SEQ ID NO: 11111 - RNA, 19 nt, Artificial Sequence
  Description of Artificial Sequence: Synthetic oligonucleotide
gaauacugcaaauauggaa

SEQ ID NO: 11112 - RNA, 19 nt, Artificial Sequence
  Description of Artificial Sequence: Synthetic oligonucleotide
aauacugcaaauauggaaa

SEQ ID NO: 11113 - RNA, 19 nt, Artificial Sequence
  Description of Artificial Sequence: Synthetic oligonucleotide
agugauguugaggaagagg

SEQ ID NO: 11114 - RNA, 19 nt, Artificial Sequence
  Description of Artificial Sequence: Synthetic oligonucleotide
gugauguugaggaagagga

SEQ ID NO: 11115 - RNA, 19 nt, Artificial Sequence
  Description of Artificial Sequence: Synthetic oligonucleotide
uuaucugagaacaacgugg

SEQ ID NO: 11116 - RNA, 19 nt, Artificial Sequence
  Description of Artificial Sequence: Synthetic oligonucleotide
uaucugagaacaacguggu

SEQ ID NO: 11117 - RNA, 19 nt, Artificial Sequence
  Description of Artificial Sequence: Synthetic oligonucleotide
ugcccgggauauuuauaag

SEQ ID NO: 11118 - RNA, 19 nt, Artificial Sequence
  Description of Artificial Sequence: Synthetic oligonucleotide
cccgauuaugugagaaaag

SEQ ID NO: 11119 - RNA, 19 nt, Artificial Sequence
  Description of Artificial Sequence: Synthetic oligonucleotide
ccgauuaugugagaaaagg

SEQ ID NO: 11120 - RNA, 19 nt, Artificial Sequence
  Description of Artificial Sequence: Synthetic oligonucleotide
cgauuaugugagaaaagga

SEQ ID NO: 11121 - RNA, 19 nt, Artificial Sequence
  Description of Artificial Sequence: Synthetic oligonucleotide
ggaguauugcugugggaaa

SEQ ID NO: 11122 - RNA, 19 nt, Artificial Sequence
  Description of Artificial Sequence: Synthetic oligonucleotide
gaguauugcugugggaaau

SEQ ID NO: 11123 - RNA, 19 nt, Artificial Sequence
  Description of Artificial Sequence: Synthetic oligonucleotide
guauugcugugggaaaucu

SEQ ID NO: 11124 - RNA, 19 nt, Artificial Sequence
  Description of Artificial Sequence: Synthetic oligonucleotide
uauugcugugggaaaucuu

SEQ ID NO: 11125 - RNA, 19 nt, Artificial Sequence
  Description of Artificial Sequence: Synthetic oligonucleotide
uccuuaggugggucuccau

SEQ ID NO: 11126 - RNA, 19 nt, Artificial Sequence
  Description of Artificial Sequence: Synthetic oligonucleotide
ccuuaggugggucuccaua

SEQ ID NO: 11127 - RNA, 19 nt, Artificial Sequence
  Description of Artificial Sequence: Synthetic oligonucleotide
uaucagaucaugcuggacu

SEQ ID NO: 11128 - RNA, 19 nt, Artificial Sequence
  Description of Artificial Sequence: Synthetic oligonucleotide
aucagaucaugcuggacug

SEQ ID NO: 11129 - RNA, 19 nt, Artificial Sequence
  Description of Artificial Sequence: Synthetic oligonucleotide
ucagaucaugcuggacugc

SEQ ID NO: 11130 - RNA, 19 nt, Artificial Sequence
  Description of Artificial Sequence: Synthetic oligonucleotide
gggauggaguuccuggcuu

SEQ ID NO: 11131 - RNA, 19 nt, Artificial Sequence
  Description of Artificial Sequence: Synthetic oligonucleotide
gguggccagagggauggag

SEQ ID NO: 11132 - RNA, 19 nt, Artificial Sequence
  Description of Artificial Sequence: Synthetic oligonucleotide
agagggauggaguuccugg

SEQ ID NO: 11133 - RNA, 19 nt, Artificial Sequence
  Description of Artificial Sequence: Synthetic oligonucleotide
uccuggcuucccgaaagug

SEQ ID NO: 11134 - RNA, 19 nt, Artificial Sequence
  Description of Artificial Sequence: Synthetic oligonucleotide
uggaguuccuggcuucccg

SEQ ID NO: 11135 - RNA, 19 nt, Artificial Sequence
  Description of Artificial Sequence: Synthetic oligonucleotide
ccuggcuucccgaaagugc

SEQ ID NO: 11136 - RNA, 19 nt, Artificial Sequence
  Description of Artificial Sequence: Synthetic oligonucleotide
uggcuucccgaaagugcau

SEQ ID NO: 11137 - RNA, 19 nt, Artificial Sequence
  Description of Artificial Sequence: Synthetic oligonucleotide
uuccuggcuucccgaaagu

SEQ ID NO: 11138 - RNA, 19 nt, Artificial Sequence
  Description of Artificial Sequence: Synthetic oligonucleotide
gagggauggaguuccuggc

SEQ ID NO: 11139 - RNA, 19 nt, Artificial Sequence
  Description of Artificial Sequence: Synthetic oligonucleotide
ggaguuccuggcuucccga

SEQ ID NO: 11140 - RNA, 19 nt, Artificial Sequence
  Description of Artificial Sequence: Synthetic oligonucleotide
agguggccagagggaugga

SEQ ID NO: 11141 - RNA, 19 nt, Artificial Sequence
  Description of Artificial Sequence: Synthetic oligonucleotide
gauggaguuccuggcuucc

SEQ ID NO: 11142 - RNA, 19 nt, Artificial Sequence
  Description of Artificial Sequence: Synthetic oligonucleotide
aguuccuggcuucccgaaa

SEQ ID NO: 11143 - RNA, 19 nt, Artificial Sequence
  Description of Artificial Sequence: Synthetic oligonucleotide
auggaguuccuggcuuccc

SEQ ID NO: 11144 - RNA, 19 nt, Artificial Sequence
  Description of Artificial Sequence: Synthetic oligonucleotide
ggauggaguuccuggcuuc

SEQ ID NO: 11145 - RNA, 19 nt, Artificial Sequence
  Description of Artificial Sequence: Synthetic oligonucleotide
cuggcuucccgaaagugca

SEQ ID NO: 11146 - RNA, 19 nt, Artificial Sequence
  Description of Artificial Sequence: Synthetic oligonucleotide
cagguggccagagggaugg

SEQ ID NO: 11147 - RNA, 19 nt, Artificial Sequence
  Description of Artificial Sequence: Synthetic oligonucleotide
gaguuccuggcuucccgaa

SEQ ID NO: 11148 - RNA, 19 nt, Artificial Sequence
  Description of Artificial Sequence: Synthetic oligonucleotide
agggauggaguuccuggcu

SEQ ID NO: 11149 - RNA, 19 nt, Artificial Sequence
  Description of Artificial Sequence: Synthetic oligonucleotide
guuccuggcuucccgaaag

SEQ ID NO: 11150 - RNA, 19 nt, Artificial Sequence
  Description of Artificial Sequence: Synthetic oligonucleotide
gucggagcucaagauccuc

SEQ ID NO: 11151 - RNA, 19 nt, Artificial Sequence
  Description of Artificial Sequence: Synthetic oligonucleotide
gaaguggauggccccugaa

SEQ ID NO: 11152 - RNA, 19 nt, Artificial Sequence
  Description of Artificial Sequence: Synthetic oligonucleotide
ugaaguggauggccccuga

SEQ ID NO: 11153 - RNA, 19 nt, Artificial Sequence
  Description of Artificial Sequence: Synthetic oligonucleotide
augucggagcucaagaucc

SEQ ID NO: 11154 - RNA, 19 nt, Artificial Sequence
  Description of Artificial Sequence: Synthetic oligonucleotide
ggaauucccccgagagcgg

SEQ ID NO: 11155 - RNA, 19 nt, Artificial Sequence
  Description of Artificial Sequence: Synthetic oligonucleotide
gccagccagugggaauucc

SEQ ID NO: 11156 - RNA, 19 nt, Artificial Sequence
  Description of Artificial Sequence: Synthetic oligonucleotide
ugucggagcucaagauccu

SEQ ID NO: 11157 - RNA, 19 nt, Artificial Sequence
  Description of Artificial Sequence: Synthetic oligonucleotide
aaguggauggccccugaaa

SEQ ID NO: 11158 - RNA, 19 nt, Artificial Sequence
  Description of Artificial Sequence: Synthetic oligonucleotide
gggaauucccccgagagcg

SEQ ID NO: 11159 - RNA, 19 nt, Artificial Sequence
  Description of Artificial Sequence: Synthetic oligonucleotide
aauucccccgagagcggcu

SEQ ID NO: 11160 - RNA, 19 nt, Artificial Sequence
  Description of Artificial Sequence: Synthetic oligonucleotide
ccagccagugggaauuccc

SEQ ID NO: 11161 - RNA, 19 nt, Artificial Sequence
  Description of Artificial Sequence: Synthetic oligonucleotide
agugggaauucccccgaga

SEQ ID NO: 11162 - RNA, 19 nt, Artificial Sequence
  Description of Artificial Sequence: Synthetic oligonucleotide
gaauucccccgagagcggc

SEQ ID NO: 11163 - RNA, 19 nt, Artificial Sequence
  Description of Artificial Sequence: Synthetic oligonucleotide
cagccagugggaauucccc

SEQ ID NO: 11164 - RNA, 19 nt, Artificial Sequence
  Description of Artificial Sequence: Synthetic oligonucleotide
ggagcucaagauccucauu

SEQ ID NO: 11165 - RNA, 19 nt, Artificial Sequence
  Description of Artificial Sequence: Synthetic oligonucleotide
ucggagcucaagauccuca

SEQ ID NO: 11166 - RNA, 19 nt, Artificial Sequence
  Description of Artificial Sequence: Synthetic oligonucleotide
ugggaauucccccgagagc

SEQ ID NO: 11167 - RNA, 19 nt, Artificial Sequence
  Description of Artificial Sequence: Synthetic oligonucleotide
cggagcucaagauccucau

SEQ ID NO: 11168 - RNA, 19 nt, Artificial Sequence
  Description of Artificial Sequence: Synthetic oligonucleotide
auucccccgagagcggcug

SEQ ID NO: 11169 - RNA, 19 nt, Artificial Sequence
  Description of Artificial Sequence: Synthetic oligonucleotide
gccuguaccaagccaggag

SEQ ID NO: 11170 - RNA, 19 nt, Artificial Sequence
  Description of Artificial Sequence: Synthetic oligonucleotide
ccuguaccaagccaggagg

SEQ ID NO: 11171 - RNA, 19 nt, Artificial Sequence
  Description of Artificial Sequence: Synthetic oligonucleotide
cuguaccaagccaggaggg

SEQ ID NO: 11172 - RNA, 19 nt, Artificial Sequence
  Description of Artificial Sequence: Synthetic oligonucleotide
uguaccaagccaggagggc

SEQ ID NO: 11173 - RNA, 19 nt, Artificial Sequence
  Description of Artificial Sequence: Synthetic oligonucleotide
guaccaagccaggagggcc

SEQ ID NO: 11174 - RNA, 19 nt, Artificial Sequence
  Description of Artificial Sequence: Synthetic oligonucleotide
accaagccaggagggccac

SEQ ID NO: 11175 - RNA, 19 nt, Artificial Sequence
  Description of Artificial Sequence: Synthetic oligonucleotide
ccaagccaggagggccacu

SEQ ID NO: 11176 - RNA, 19 nt, Artificial Sequence
  Description of Artificial Sequence: Synthetic oligonucleotide
aggagggccacucauggug

SEQ ID NO: 11177 - RNA, 19 nt, Artificial Sequence
  Description of Artificial Sequence: Synthetic oligonucleotide
ggagggccacucaugguga

SEQ ID NO: 11178 - RNA, 19 nt, Artificial Sequence
  Description of Artificial Sequence: Synthetic oligonucleotide
gagggccacucauggugau

SEQ ID NO: 11179 - RNA, 19 nt, Artificial Sequence
  Description of Artificial Sequence: Synthetic oligonucleotide
agggccacucauggugauu

SEQ ID NO: 11180 - RNA, 19 nt, Artificial Sequence
  Description of Artificial Sequence: Synthetic oligonucleotide
gggccacucauggugauug

SEQ ID NO: 11181 - RNA, 19 nt, Artificial Sequence
  Description of Artificial Sequence: Synthetic oligonucleotide
ggccacucauggugauugu

SEQ ID NO: 11182 - RNA, 19 nt, Artificial Sequence
  Description of Artificial Sequence: Synthetic oligonucleotide
gaauucugcaaauuuggaa

SEQ ID NO: 11183 - RNA, 19 nt, Artificial Sequence
  Description of Artificial Sequence: Synthetic oligonucleotide
aauucugcaaauuuggaaa

SEQ ID NO: 11184 - RNA, 19 nt, Artificial Sequence
  Description of Artificial Sequence: Synthetic oligonucleotide
uuaucggagaagaacgugg

SEQ ID NO: 11185 - RNA, 19 nt, Artificial Sequence
  Description of Artificial Sequence: Synthetic oligonucleotide
uaucggagaagaacguggu

SEQ ID NO: 11186 - RNA, 19 nt, Artificial Sequence
  Description of Artificial Sequence: Synthetic oligonucleotide
uuuggcuuggcccgggaua

SEQ ID NO: 11187 - RNA, 19 nt, Artificial Sequence
  Description of Artificial Sequence: Synthetic oligonucleotide
uuggcuuggcccgggauau

SEQ ID NO: 11188 - RNA, 19 nt, Artificial Sequence
  Description of Artificial Sequence: Synthetic oligonucleotide
uggcuuggcccgggauauu

SEQ ID NO: 11189 - RNA, 19 nt, Artificial Sequence
  Description of Artificial Sequence: Synthetic oligonucleotide
ggcuuggcccgggauauuu

SEQ ID NO: 11190 - RNA, 19 nt, Artificial Sequence
  Description of Artificial Sequence: Synthetic oligonucleotide
gcuuggcccgggauauuua

SEQ ID NO: 11191 - RNA, 19 nt, Artificial Sequence
  Description of Artificial Sequence: Synthetic oligonucleotide
cuuggcccgggauauuuau

SEQ ID NO: 11192 - RNA, 19 nt, Artificial Sequence
  Description of Artificial Sequence: Synthetic oligonucleotide
uuggcccgggauauuuaua

SEQ ID NO: 11193 - RNA, 19 nt, Artificial Sequence
  Description of Artificial Sequence: Synthetic oligonucleotide
ccagauuaugucagaaaag

SEQ ID NO: 11194 - RNA, 19 nt, Artificial Sequence
  Description of Artificial Sequence: Synthetic oligonucleotide
cagauuaugucagaaaagg

SEQ ID NO: 11195 - RNA, 19 nt, Artificial Sequence
  Description of Artificial Sequence: Synthetic oligonucleotide
agauuaugucagaaaagga

SEQ ID NO: 11196 - RNA, 19 nt, Artificial Sequence
  Description of Artificial Sequence: Synthetic oligonucleotide
uaugucagaaaaggagaug

SEQ ID NO: 11197 - RNA, 19 nt, Artificial Sequence
  Description of Artificial Sequence: Synthetic oligonucleotide
augucagaaaaggagaugc

SEQ ID NO: 11198 - RNA, 19 nt, Artificial Sequence
  Description of Artificial Sequence: Synthetic oligonucleotide
ugucagaaaaggagaugcu

SEQ ID NO: 11199 - RNA, 19 nt, Artificial Sequence
  Description of Artificial Sequence: Synthetic oligonucleotide
gucagaaaaggagaugcuc

SEQ ID NO: 11200 - RNA, 19 nt, Artificial Sequence
  Description of Artificial Sequence: Synthetic oligonucleotide
ucagaaaaggagaugcucg

SEQ ID NO: 11201 - RNA, 19 nt, Artificial Sequence
  Description of Artificial Sequence: Synthetic oligonucleotide
agaaaaggagaugcucgcc

SEQ ID NO: 11202 - RNA, 19 nt, Artificial Sequence
  Description of Artificial Sequence: Synthetic oligonucleotide
gaaaaggagaugcucgccu

SEQ ID NO: 11203 - RNA, 19 nt, Artificial Sequence
  Description of Artificial Sequence: Synthetic oligonucleotide
gguguuuugcugugggaaa

SEQ ID NO: 11204 - RNA, 19 nt, Artificial Sequence
  Description of Artificial Sequence: Synthetic oligonucleotide
guguuuugcugugggaaau

SEQ ID NO: 11205 - RNA, 19 nt, Artificial Sequence
  Description of Artificial Sequence: Synthetic oligonucleotide
guuuugcugugggaaauau

SEQ ID NO: 11206 - RNA, 19 nt, Artificial Sequence
  Description of Artificial Sequence: Synthetic oligonucleotide
uuuugcugugggaaauauu

SEQ ID NO: 11207 - RNA, 19 nt, Artificial Sequence
  Description of Artificial Sequence: Synthetic oligonucleotide
uugcugugggaaauauuuu

SEQ ID NO: 11208 - RNA, 19 nt, Artificial Sequence
  Description of Artificial Sequence: Synthetic oligonucleotide
ugcugugggaaauauuuuc

SEQ ID NO: 11209 - RNA, 19 nt, Artificial Sequence
  Description of Artificial Sequence: Synthetic oligonucleotide
gcugugggaaauauuuucc

SEQ ID NO: 11210 - RNA, 19 nt, Artificial Sequence
  Description of Artificial Sequence: Synthetic oligonucleotide
cugugggaaauauuuuccu

SEQ ID NO: 11211 - RNA, 19 nt, Artificial Sequence
  Description of Artificial Sequence: Synthetic oligonucleotide
ugugggaaauauuuuccuu

SEQ ID NO: 11212 - RNA, 19 nt, Artificial Sequence
  Description of Artificial Sequence: Synthetic oligonucleotide
gugggaaauauuuuccuua

SEQ ID NO: 11213 - RNA, 19 nt, Artificial Sequence
  Description of Artificial Sequence: Synthetic oligonucleotide
ugggaaauauuuuccuuag

SEQ ID NO: 11214 - RNA, 19 nt, Artificial Sequence
  Description of Artificial Sequence: Synthetic oligonucleotide
gggaaauauuuuccuuagg

SEQ ID NO: 11215 - RNA, 19 nt, Artificial Sequence
  Description of Artificial Sequence: Synthetic oligonucleotide
ggaaauauuuuccuuaggu

SEQ ID NO: 11216 - RNA, 19 nt, Artificial Sequence
  Description of Artificial Sequence: Synthetic oligonucleotide
gaaauauuuuccuuaggug

SEQ ID NO: 11217 - RNA, 19 nt, Artificial Sequence
  Description of Artificial Sequence: Synthetic oligonucleotide
uccuuaggugcuucuccau

SEQ ID NO: 11218 - RNA, 19 nt, Artificial Sequence
  Description of Artificial Sequence: Synthetic oligonucleotide
ccuuaggugcuucuccaua

SEQ ID NO: 11219 - RNA, 19 nt, Artificial Sequence
  Description of Artificial Sequence: Synthetic oligonucleotide
gcuggacugcuggcacggg

SEQ ID NO: 11220 - RNA, 19 nt, Artificial Sequence
  Description of Artificial Sequence: Synthetic oligonucleotide
cuggacugcuggcacgggg

SEQ ID NO: 11221 - RNA, 19 nt, Artificial Sequence
  Description of Artificial Sequence: Synthetic oligonucleotide
uggacugcuggcacgggga

SEQ ID NO: 11222 - RNA, 19 nt, Artificial Sequence
  Description of Artificial Sequence: Synthetic oligonucleotide
ggcuacuuguccaucguca

SEQ ID NO: 11223 - RNA, 19 nt, Artificial Sequence
  Description of Artificial Sequence: Synthetic oligonucleotide
gcuacuuguccaucgucau

SEQ ID NO: 11224 - RNA, 19 nt, Artificial Sequence
  Description of Artificial Sequence: Synthetic oligonucleotide
cuacuuguccaucgucaug

SEQ ID NO: 11225 - RNA, 19 nt, Artificial Sequence
  Description of Artificial Sequence: Synthetic oligonucleotide
uacuuguccaucgucaugg

SEQ ID NO: 11226 - RNA, 19 nt, Artificial Sequence
  Description of Artificial Sequence: Synthetic oligonucleotide
acuuguccaucgucaugga

SEQ ID NO: 11227 - RNA, 19 nt, Artificial Sequence
  Description of Artificial Sequence: Synthetic oligonucleotide
uguccaucgucauggaucc

SEQ ID NO: 11228 - RNA, 19 nt, Artificial Sequence
  Description of Artificial Sequence: Synthetic oligonucleotide
ugggaauuccccagagacc

SEQ ID NO: 11229 - RNA, 19 nt, Artificial Sequence
  Description of Artificial Sequence: Synthetic oligonucleotide
gggaauuccccagagaccg

SEQ ID NO: 11230 - RNA, 19 nt, Artificial Sequence
  Description of Artificial Sequence: Synthetic oligonucleotide
ggaauuccccagagaccgg

SEQ ID NO: 11231 - RNA, 19 nt, Artificial Sequence
  Description of Artificial Sequence: Synthetic oligonucleotide
gaauuccccagagaccggc

SEQ ID NO: 11232 - RNA, 19 nt, Artificial Sequence
  Description of Artificial Sequence: Synthetic oligonucleotide
aauuccccagagaccggcu

SEQ ID NO: 11233 - RNA, 19 nt, Artificial Sequence
  Description of Artificial Sequence: Synthetic oligonucleotide
auuccccagagaccggcug

SEQ ID NO: 11234 - RNA, 19 nt, Artificial Sequence
  Description of Artificial Sequence: Synthetic oligonucleotide
caagauccucauucauauu

SEQ ID NO: 11235 - RNA, 19 nt, Artificial Sequence
  Description of Artificial Sequence: Synthetic oligonucleotide
aagauccucauucauauug

SEQ ID NO: 11236 - RNA, 19 nt, Artificial Sequence
  Description of Artificial Sequence: Synthetic oligonucleotide
agauccucauucauauugg

SEQ ID NO: 11237 - RNA, 19 nt, Artificial Sequence
  Description of Artificial Sequence: Synthetic oligonucleotide
accaucucaauguggucaa

SEQ ID NO: 11238 - RNA, 19 nt, Artificial Sequence
  Description of Artificial Sequence: Synthetic oligonucleotide
ccaucucaauguggucaac

SEQ ID NO: 11239 - RNA, 19 nt, Artificial Sequence
  Description of Artificial Sequence: Synthetic oligonucleotide
caucucaauguggucaacc

SEQ ID NO: 11240 - RNA, 19 nt, Artificial Sequence
  Description of Artificial Sequence: Synthetic oligonucleotide
aucucaauguggucaaccu

SEQ ID NO: 11241 - RNA, 19 nt, Artificial Sequence
  Description of Artificial Sequence: Synthetic oligonucleotide
cucaauguggucaaccuuc

SEQ ID NO: 11242 - RNA, 19 nt, Artificial Sequence
  Description of Artificial Sequence: Synthetic oligonucleotide
ucaauguggucaaccuucu

SEQ ID NO: 11243 - RNA, 19 nt, Artificial Sequence
  Description of Artificial Sequence: Synthetic oligonucleotide
ccacucauggugauugugg

SEQ ID NO: 11244 - RNA, 19 nt, Artificial Sequence
  Description of Artificial Sequence: Synthetic oligonucleotide
cacucauggugauugugga

SEQ ID NO: 11245 - RNA, 19 nt, Artificial Sequence
  Description of Artificial Sequence: Synthetic oligonucleotide
ucgcgaaaguguauccaca

SEQ ID NO: 11246 - RNA, 19 nt, Artificial Sequence
  Description of Artificial Sequence: Synthetic oligonucleotide
cgcgaaaguguauccacag

SEQ ID NO: 11247 - RNA, 19 nt, Artificial Sequence
  Description of Artificial Sequence: Synthetic oligonucleotide
cgaaaguguauccacaggg

SEQ ID NO: 11248 - RNA, 19 nt, Artificial Sequence
  Description of Artificial Sequence: Synthetic oligonucleotide
gaaaguguauccacaggga

SEQ ID NO: 11249 - RNA, 19 nt, Artificial Sequence
  Description of Artificial Sequence: Synthetic oligonucleotide
aaaguguauccacagggac

SEQ ID NO: 11250 - RNA, 19 nt, Artificial Sequence
  Description of Artificial Sequence: Synthetic oligonucleotide
aaguguauccacagggacc

SEQ ID NO: 11251 - RNA, 19 nt, Artificial Sequence
  Description of Artificial Sequence: Synthetic oligonucleotide
aguguauccacagggaccu

SEQ ID NO: 11252 - RNA, 19 nt, Artificial Sequence
  Description of Artificial Sequence: Synthetic oligonucleotide
guguauccacagggaccug

SEQ ID NO: 11253 - RNA, 19 nt, Artificial Sequence
  Description of Artificial Sequence: Synthetic oligonucleotide
uguauccacagggaccugg

SEQ ID NO: 11254 - RNA, 19 nt, Artificial Sequence
  Description of Artificial Sequence: Synthetic oligonucleotide
guauccacagggaccuggc

SEQ ID NO: 11255 - RNA, 19 nt, Artificial Sequence
  Description of Artificial Sequence: Synthetic oligonucleotide
auccacagggaccuggcgg

SEQ ID NO: 11256 - RNA, 19 nt, Artificial Sequence
  Description of Artificial Sequence: Synthetic oligonucleotide
uccacagggaccuggcggc

SEQ ID NO: 11257 - RNA, 19 nt, Artificial Sequence
  Description of Artificial Sequence: Synthetic oligonucleotide
aucugugacuuuggcuugg

SEQ ID NO: 11258 - RNA, 19 nt, Artificial Sequence
  Description of Artificial Sequence: Synthetic oligonucleotide
ucugugacuuuggcuuggc

SEQ ID NO: 11259 - RNA, 19 nt, Artificial Sequence
  Description of Artificial Sequence: Synthetic oligonucleotide
cugugacuuuggcuuggcc

SEQ ID NO: 11260 - RNA, 19 nt, Artificial Sequence
  Description of Artificial Sequence: Synthetic oligonucleotide
ugugacuuuggcuuggccc

SEQ ID NO: 11261 - RNA, 19 nt, Artificial Sequence
  Description of Artificial Sequence: Synthetic oligonucleotide
gugacuuuggcuuggcccg

SEQ ID NO: 11262 - RNA, 19 nt, Artificial Sequence
  Description of Artificial Sequence: Synthetic oligonucleotide
ugacuuuggcuuggcccgg

SEQ ID NO: 11263 - RNA, 19 nt, Artificial Sequence
  Description of Artificial Sequence: Synthetic oligonucleotide
gacuuuggcuuggcccggg

SEQ ID NO: 11264 - RNA, 19 nt, Artificial Sequence
  Description of Artificial Sequence: Synthetic oligonucleotide
acuuuggcuuggcccggga

SEQ ID NO: 11265 - RNA, 19 nt, Artificial Sequence
  Description of Artificial Sequence: Synthetic oligonucleotide
cagagugacgucuggucuu

SEQ ID NO: 11266 - RNA, 19 nt, Artificial Sequence
  Description of Artificial Sequence: Synthetic oligonucleotide
agagugacgucuggucuuu

SEQ ID NO: 11267 - RNA, 19 nt, Artificial Sequence
  Description of Artificial Sequence: Synthetic oligonucleotide
gagugacgucuggucuuuu

SEQ ID NO: 11268 - RNA, 19 nt, Artificial Sequence
  Description of Artificial Sequence: Synthetic oligonucleotide
agugacgucuggucuuuug

SEQ ID NO: 11269 - RNA, 19 nt, Artificial Sequence
  Description of Artificial Sequence: Synthetic oligonucleotide
gugacgucuggucuuuugg

SEQ ID NO: 11270 - RNA, 19 nt, Artificial Sequence
  Description of Artificial Sequence: Synthetic oligonucleotide
ugacaaccagacggacagu

SEQ ID NO: 11271 - RNA, 19 nt, Artificial Sequence
  Description of Artificial Sequence: Synthetic oligonucleotide
caaccagacggacaguggu

SEQ ID NO: 11272 - RNA, 19 nt, Artificial Sequence
  Description of Artificial Sequence: Synthetic oligonucleotide
aaccagacggacaguggua

SEQ ID NO: 11273 - RNA, 19 nt, Artificial Sequence
  Description of Artificial Sequence: Synthetic oligonucleotide
accagacggacagugguau

SEQ ID NO: 11274 - RNA, 19 nt, Artificial Sequence
  Description of Artificial Sequence: Synthetic oligonucleotide
ccagacggacagugguaug

SEQ ID NO: 11275 - RNA, 19 nt, Artificial Sequence
  Description of Artificial Sequence: Synthetic oligonucleotide
cagacggacagugguaugg

SEQ ID NO: 11276 - RNA, 19 nt, Artificial Sequence
  Description of Artificial Sequence: Synthetic oligonucleotide
agacggacagugguauggu

SEQ ID NO: 11277 - RNA, 19 nt, Artificial Sequence
  Description of Artificial Sequence: Synthetic oligonucleotide
gaaggaaagaauaagaugg

SEQ ID NO: 11278 - RNA, 19 nt, Artificial Sequence
  Description of Artificial Sequence: Synthetic oligonucleotide
ccacggccagcgaguacaa

SEQ ID NO: 11279 - RNA, 19 nt, Artificial Sequence
  Description of Artificial Sequence: Synthetic oligonucleotide
cugggagccugcaccaagc

SEQ ID NO: 11280 - RNA, 19 nt, Artificial Sequence
  Description of Artificial Sequence: Synthetic oligonucleotide
caagcaaggagggccucug

SEQ ID NO: 11281 - RNA, 19 nt, Artificial Sequence
  Description of Artificial Sequence: Synthetic oligonucleotide
uacaguuuucaaguggcca

SEQ ID NO: 11282 - RNA, 19 nt, Artificial Sequence
  Description of Artificial Sequence: Synthetic oligonucleotide
acaguuuucaaguggccag

SEQ ID NO: 11283 - RNA, 19 nt, Artificial Sequence
  Description of Artificial Sequence: Synthetic oligonucleotide
caguuuucaaguggccaga

SEQ ID NO: 11284 - RNA, 19 nt, Artificial Sequence
  Description of Artificial Sequence: Synthetic oligonucleotide
aguuuucaaguggccagag

SEQ ID NO: 11285 - RNA, 19 nt, Artificial Sequence
  Description of Artificial Sequence: Synthetic oligonucleotide
guuuucaaguggccagagg

SEQ ID NO: 11286 - RNA, 19 nt, Artificial Sequence
  Description of Artificial Sequence: Synthetic oligonucleotide
uuucaaguggccagaggca

SEQ ID NO: 11287 - RNA, 19 nt, Artificial Sequence
  Description of Artificial Sequence: Synthetic oligonucleotide
uucaaguggccagaggcau

SEQ ID NO: 11288 - RNA, 19 nt, Artificial Sequence
  Description of Artificial Sequence: Synthetic oligonucleotide
ucaaguggccagaggcaug

SEQ ID NO: 11289 - RNA, 19 nt, Artificial Sequence
  Description of Artificial Sequence: Synthetic oligonucleotide
caccaagagcgacgugugg

SEQ ID NO: 11290 - RNA, 19 nt, Artificial Sequence
  Description of Artificial Sequence: Synthetic oligonucleotide
accaagagcgacguguggu

SEQ ID NO: 11291 - RNA, 19 nt, Artificial Sequence
  Description of Artificial Sequence: Synthetic oligonucleotide
ccaagagcgacgugugguc

SEQ ID NO: 11292 - RNA, 19 nt, Artificial Sequence
  Description of Artificial Sequence: Synthetic oligonucleotide
aagagcgacguguggucuu

SEQ ID NO: 11293 - RNA, 19 nt, Artificial Sequence
  Description of Artificial Sequence: Synthetic oligonucleotide
agagcgacguguggucuua

SEQ ID NO: 11294 - RNA, 19 nt, Artificial Sequence
  Description of Artificial Sequence: Synthetic oligonucleotide
cugggacaguagaaagggc

SEQ ID NO: 11295 - RNA, 19 nt, Artificial Sequence
  Description of Artificial Sequence: Synthetic oligonucleotide
ugggacaguagaaagggcu

SEQ ID NO: 11296 - RNA, 19 nt, Artificial Sequence
  Description of Artificial Sequence: Synthetic oligonucleotide
gggacaguagaaagggcuu

SEQ ID NO: 11297 - RNA, 19 nt, Artificial Sequence
  Description of Artificial Sequence: Synthetic oligonucleotide
cugugaagcaacagucaau

SEQ ID NO: 11298 - RNA, 19 nt, Artificial Sequence
  Description of Artificial Sequence: Synthetic oligonucleotide
ugugaagcaacagucaaug

SEQ ID NO: 11299 - RNA, 19 nt, Artificial Sequence
  Description of Artificial Sequence: Synthetic oligonucleotide
cuuguccucaauuguacug

SEQ ID NO: 11300 - RNA, 19 nt, Artificial Sequence
  Description of Artificial Sequence: Synthetic oligonucleotide
uuguccucaauuguacugc

SEQ ID NO: 11301 - RNA, 19 nt, Artificial Sequence
  Description of Artificial Sequence: Synthetic oligonucleotide
ccucagaucacuugguuua

SEQ ID NO: 11302 - RNA, 19 nt, Artificial Sequence
  Description of Artificial Sequence: Synthetic oligonucleotide
cucagaucacuugguuuaa

SEQ ID NO: 11303 - RNA, 19 nt, Artificial Sequence
  Description of Artificial Sequence: Synthetic oligonucleotide
ucagaucacuugguuuaaa

SEQ ID NO: 11304 - RNA, 19 nt, Artificial Sequence
  Description of Artificial Sequence: Synthetic oligonucleotide
uaauggacccagaugaagu

SEQ ID NO: 11305 - RNA, 19 nt, Artificial Sequence
  Description of Artificial Sequence: Synthetic oligonucleotide
auggacccagaugaaguuc

SEQ ID NO: 11306 - RNA, 19 nt, Artificial Sequence
  Description of Artificial Sequence: Synthetic oligonucleotide
uggacccagaugaaguucc

SEQ ID NO: 11307 - RNA, 19 nt, Artificial Sequence
  Description of Artificial Sequence: Synthetic oligonucleotide
caccaucugaacgugguua

SEQ ID NO: 11308 - RNA, 19 nt, Artificial Sequence
  Description of Artificial Sequence: Synthetic oligonucleotide
accaucugaacgugguuaa

SEQ ID NO: 11309 - RNA, 19 nt, Artificial Sequence
  Description of Artificial Sequence: Synthetic oligonucleotide
ccaucugaacgugguuaac

SEQ ID NO: 11310 - RNA, 19 nt, Artificial Sequence
  Description of Artificial Sequence: Synthetic oligonucleotide
caucugaacgugguuaacc

SEQ ID NO: 11311 - RNA, 19 nt, Artificial Sequence
  Description of Artificial Sequence: Synthetic oligonucleotide
aucugaacgugguuaaccu

SEQ ID NO: 11312 - RNA, 19 nt, Artificial Sequence
  Description of Artificial Sequence: Synthetic oligonucleotide
ggagccugcaccaagcaag

SEQ ID NO: 11313 - RNA, 19 nt, Artificial Sequence
  Description of Artificial Sequence: Synthetic oligonucleotide
gagccugcaccaagcaagg

SEQ ID NO: 11314 - RNA, 19 nt, Artificial Sequence
  Description of Artificial Sequence: Synthetic oligonucleotide
agccugcaccaagcaagga

SEQ ID NO: 11315 - RNA, 19 nt, Artificial Sequence
  Description of Artificial Sequence: Synthetic oligonucleotide
caccaagcaaggagggccu

SEQ ID NO: 11316 - RNA, 19 nt, Artificial Sequence
  Description of Artificial Sequence: Synthetic oligonucleotide
cauggagccuaagaaagaa

SEQ ID NO: 11317 - RNA, 19 nt, Artificial Sequence
  Description of Artificial Sequence: Synthetic oligonucleotide
uuacaguuuucaaguggcc

SEQ ID NO: 11318 - RNA, 19 nt, Artificial Sequence
  Description of Artificial Sequence: Synthetic oligonucleotide
gggaccuggcagcgagaaa

SEQ ID NO: 11319 - RNA, 19 nt, Artificial Sequence
  Description of Artificial Sequence: Synthetic oligonucleotide
accccgauuaugugagaaa

SEQ ID NO: 11320 - RNA, 19 nt, Artificial Sequence
  Description of Artificial Sequence: Synthetic oligonucleotide
ccccgauuaugugagaaaa

SEQ ID NO: 11321 - RNA, 19 nt, Artificial Sequence
  Description of Artificial Sequence: Synthetic oligonucleotide
gagaaaaggagauacucga

SEQ ID NO: 11322 - RNA, 19 nt, Artificial Sequence
  Description of Artificial Sequence: Synthetic oligonucleotide
aaaaggagauacucgacuu

SEQ ID NO: 11323 - RNA, 19 nt, Artificial Sequence
  Description of Artificial Sequence: Synthetic oligonucleotide
aaaggagauacucgacuuc

SEQ ID NO: 11324 - RNA, 19 nt, Artificial Sequence
  Description of Artificial Sequence: Synthetic oligonucleotide
aaggagauacucgacuucc

SEQ ID NO: 11325 - RNA, 19 nt, Artificial Sequence
  Description of Artificial Sequence: Synthetic oligonucleotide
aggagauacucgacuuccu

SEQ ID NO: 11326 - RNA, 19 nt, Artificial Sequence
  Description of Artificial Sequence: Synthetic oligonucleotide
ucgacuuccucugaaaugg

SEQ ID NO: 11327 - RNA, 19 nt, Artificial Sequence
  Description of Artificial Sequence: Synthetic oligonucleotide
acuuccucugaaauggaug

SEQ ID NO: 11328 - RNA, 19 nt, Artificial Sequence
  Description of Artificial Sequence: Synthetic oligonucleotide
uccucugaaauggauggcu

SEQ ID NO: 11329 - RNA, 19 nt, Artificial Sequence
  Description of Artificial Sequence: Synthetic oligonucleotide
ucugaaauggauggcuccc

SEQ ID NO: 11330 - RNA, 19 nt, Artificial Sequence
  Description of Artificial Sequence: Synthetic oligonucleotide
caagagcgacguguggucu

SEQ ID NO: 11331 - RNA, 19 nt, Artificial Sequence
  Description of Artificial Sequence: Synthetic oligonucleotide
cggaguauugcugugggaa

SEQ ID NO: 11332 - RNA, 19 nt, Artificial Sequence
  Description of Artificial Sequence: Synthetic oligonucleotide
auugcugugggaaaucuuc

SEQ ID NO: 11333 - RNA, 19 nt, Artificial Sequence
  Description of Artificial Sequence: Synthetic oligonucleotide
aaaucuucuccuuaggugg

SEQ ID NO: 11334 - RNA, 19 nt, Artificial Sequence
  Description of Artificial Sequence: Synthetic oligonucleotide
uucuccuuaggugggucuc

SEQ ID NO: 11335 - RNA, 19 nt, Artificial Sequence
  Description of Artificial Sequence: Synthetic oligonucleotide
ucuccuuaggugggucucc

SEQ ID NO: 11336 - RNA, 19 nt, Artificial Sequence
  Description of Artificial Sequence: Synthetic oligonucleotide
cuccuuaggugggucucca

SEQ ID NO: 11337 - RNA, 19 nt, Artificial Sequence
  Description of Artificial Sequence: Synthetic oligonucleotide
cuuaggugggucuccauac

SEQ ID NO: 11338 - RNA, 19 nt, Artificial Sequence
  Description of Artificial Sequence: Synthetic oligonucleotide
uuaggugggucuccauacc

SEQ ID NO: 11339 - RNA, 19 nt, Artificial Sequence
  Description of Artificial Sequence: Synthetic oligonucleotide
uaggugggucuccauaccc

SEQ ID NO: 11340 - RNA, 19 nt, Artificial Sequence
  Description of Artificial Sequence: Synthetic oligonucleotide
acaacaggaugguaaagac

SEQ ID NO: 11341 - RNA, 19 nt, Artificial Sequence
  Description of Artificial Sequence: Synthetic oligonucleotide
gaugguaaagacuacaucc

SEQ ID NO: 11342 - RNA, 19 nt, Artificial Sequence
  Description of Artificial Sequence: Synthetic oligonucleotide
ccaguaaaaguaaggaguc

SEQ ID NO: 11343 - RNA, 19 nt, Artificial Sequence
  Description of Artificial Sequence: Synthetic oligonucleotide
cugaaguggauggccccug

SEQ ID NO: 11344 - RNA, 19 nt, Artificial Sequence
  Description of Artificial Sequence: Synthetic oligonucleotide
uccagguggccagagggau

SEQ ID NO: 11345 - RNA, 19 nt, Artificial Sequence
  Description of Artificial Sequence: Synthetic oligonucleotide
ggcaaccaccucaacgugg

SEQ ID NO: 11346 - RNA, 19 nt, Artificial Sequence
  Description of Artificial Sequence: Synthetic oligonucleotide
gaaagcgacguggugaaga

SEQ ID NO: 11347 - RNA, 19 nt, Artificial Sequence
  Description of Artificial Sequence: Synthetic oligonucleotide
agcgacguggugaagaucu

SEQ ID NO: 11348 - RNA, 19 nt, Artificial Sequence
  Description of Artificial Sequence: Synthetic oligonucleotide
ccacggccagcgagcaccg

SEQ ID NO: 11349 - RNA, 19 nt, Artificial Sequence
  Description of Artificial Sequence: Synthetic oligonucleotide
ccagguggccagagggaug

SEQ ID NO: 11350 - RNA, 19 nt, Artificial Sequence
  Description of Artificial Sequence: Synthetic oligonucleotide
gcaaccaccucaacguggu

SEQ ID NO: 11351 - RNA, 19 nt, Artificial Sequence
  Description of Artificial Sequence: Synthetic oligonucleotide
uuccagguggccagaggga

SEQ ID NO: 11352 - RNA, 19 nt, Artificial Sequence
  Description of Artificial Sequence: Synthetic oligonucleotide
ggcuucccgaaagugcauc

SEQ ID NO: 11353 - RNA, 19 nt, Artificial Sequence
  Description of Artificial Sequence: Synthetic oligonucleotide
aaagcgacguggugaagau

SEQ ID NO: 11354 - RNA, 19 nt, Artificial Sequence
  Description of Artificial Sequence: Synthetic oligonucleotide
ucaugcugaacugcugguc

SEQ ID NO: 11355 - RNA, 19 nt, Artificial Sequence
  Description of Artificial Sequence: Synthetic oligonucleotide
uggagggaaagaauaagac

SEQ ID NO: 11356 - RNA, 19 nt, Artificial Sequence
  Description of Artificial Sequence: Synthetic oligonucleotide
gagggaaagaauaagacug

SEQ ID NO: 11357 - RNA, 19 nt, Artificial Sequence
  Description of Artificial Sequence: Synthetic oligonucleotide
gcgacguggugaagaucug

SEQ ID NO: 11358 - RNA, 19 nt, Artificial Sequence
  Description of Artificial Sequence: Synthetic oligonucleotide
ggcaaccucuccaacuucc

SEQ ID NO: 11359 - RNA, 19 nt, Artificial Sequence
  Description of Artificial Sequence: Synthetic oligonucleotide
ugccccugaaguggauggc

SEQ ID NO: 11360 - RNA, 19 nt, Artificial Sequence
  Description of Artificial Sequence: Synthetic oligonucleotide
caugcugaacugcuggucc

SEQ ID NO: 11361 - RNA, 19 nt, Artificial Sequence
  Description of Artificial Sequence: Synthetic oligonucleotide
cgcaucaugcugaacugcu

SEQ ID NO: 11362 - RNA, 19 nt, Artificial Sequence
  Description of Artificial Sequence: Synthetic oligonucleotide
gcuucccgaaagugcaucc

SEQ ID NO: 11363 - RNA, 19 nt, Artificial Sequence
  Description of Artificial Sequence: Synthetic oligonucleotide
gcaaccucuccaacuuccu

SEQ ID NO: 11364 - RNA, 19 nt, Artificial Sequence
  Description of Artificial Sequence: Synthetic oligonucleotide
cugccccugaaguggaugg

SEQ ID NO: 11365 - RNA, 19 nt, Artificial Sequence
  Description of Artificial Sequence: Synthetic oligonucleotide
gcaucaugcugaacugcug

SEQ ID NO: 11366 - RNA, 19 nt, Artificial Sequence
  Description of Artificial Sequence: Synthetic oligonucleotide
gccagaauguggcugugac

SEQ ID NO: 11367 - RNA, 19 nt, Artificial Sequence
  Description of Artificial Sequence: Synthetic oligonucleotide
caagcgaggaggaccacug

SEQ ID NO: 11368 - RNA, 19 nt, Artificial Sequence
  Description of Artificial Sequence: Synthetic oligonucleotide
ggccagaauguggcuguga

SEQ ID NO: 11369 - RNA, 19 nt, Artificial Sequence
  Description of Artificial Sequence: Synthetic oligonucleotide
gucugcuacagcuuccagg

SEQ ID NO: 11370 - RNA, 19 nt, Artificial Sequence
  Description of Artificial Sequence: Synthetic oligonucleotide
cacagagaccuggcugcuc

SEQ ID NO: 11371 - RNA, 19 nt, Artificial Sequence
  Description of Artificial Sequence: Synthetic oligonucleotide
ggcccccucauggugaucg

SEQ ID NO: 11372 - RNA, 19 nt, Artificial Sequence
  Description of Artificial Sequence: Synthetic oligonucleotide
cccccucauggugaucgug

SEQ ID NO: 11373 - RNA, 19 nt, Artificial Sequence
  Description of Artificial Sequence: Synthetic oligonucleotide
ugacgugugguccuuuggg

SEQ ID NO: 11374 - RNA, 19 nt, Artificial Sequence
  Description of Artificial Sequence: Synthetic oligonucleotide
ucaagacgggcuaccuguc

SEQ ID NO: 11375 - RNA, 19 nt, Artificial Sequence
  Description of Artificial Sequence: Synthetic oligonucleotide
guggacaaccagacagaca

SEQ ID NO: 11376 - RNA, 19 nt, Artificial Sequence
  Description of Artificial Sequence: Synthetic oligonucleotide
caagacgggcuaccugucc

SEQ ID NO: 11377 - RNA, 19 nt, Artificial Sequence
  Description of Artificial Sequence: Synthetic oligonucleotide
guguacaccacgcagagug

SEQ ID NO: 11378 - RNA, 19 nt, Artificial Sequence
  Description of Artificial Sequence: Synthetic oligonucleotide
gaucguggaguucugcaag

SEQ ID NO: 11379 - RNA, 19 nt, Artificial Sequence
  Description of Artificial Sequence: Synthetic oligonucleotide
cagacagugggauggugcu

SEQ ID NO: 11380 - RNA, 19 nt, Artificial Sequence
  Description of Artificial Sequence: Synthetic oligonucleotide
gcagagugacguguggucc

SEQ ID NO: 11381 - RNA, 19 nt, Artificial Sequence
  Description of Artificial Sequence: Synthetic oligonucleotide
uggacaaccagacagacag

SEQ ID NO: 11382 - RNA, 19 nt, Artificial Sequence
  Description of Artificial Sequence: Synthetic oligonucleotide
acagacagugggauggugc

SEQ ID NO: 11383 - RNA, 19 nt, Artificial Sequence
  Description of Artificial Sequence: Synthetic oligonucleotide
acgugugguccuuuggggu

SEQ ID NO: 11384 - RNA, 19 nt, Artificial Sequence
  Description of Artificial Sequence: Synthetic oligonucleotide
augcugaacugcugguccg

SEQ ID NO: 11385 - RNA, 19 nt, Artificial Sequence
  Description of Artificial Sequence: Synthetic oligonucleotide
gacagacagugggauggug

SEQ ID NO: 11386 - RNA, 19 nt, Artificial Sequence
  Description of Artificial Sequence: Synthetic oligonucleotide
acaccacgcagagugacgu

SEQ ID NO: 11387 - RNA, 19 nt, Artificial Sequence
  Description of Artificial Sequence: Synthetic oligonucleotide
ucuugucugcuacagcuuc

SEQ ID NO: 11388 - RNA, 19 nt, Artificial Sequence
  Description of Artificial Sequence: Synthetic oligonucleotide
uacaccacgcagagugacg

SEQ ID NO: 11389 - RNA, 19 nt, Artificial Sequence
  Description of Artificial Sequence: Synthetic oligonucleotide
ugcugaacugcugguccgg

SEQ ID NO: 11390 - RNA, 19 nt, Artificial Sequence
  Description of Artificial Sequence: Synthetic oligonucleotide
gcccccucauggugaucgu

SEQ ID NO: 11391 - RNA, 19 nt, Artificial Sequence
  Description of Artificial Sequence: Synthetic oligonucleotide
acgcagagugacguguggu

SEQ ID NO: 11392 - RNA, 19 nt, Artificial Sequence
  Description of Artificial Sequence: Synthetic oligonucleotide
aucuugucugcuacagcuu

SEQ ID NO: 11393 - RNA, 19 nt, Artificial Sequence
  Description of Artificial Sequence: Synthetic oligonucleotide
gacgugugguccuuugggg

SEQ ID NO: 11394 - RNA, 19 nt, Artificial Sequence
  Description of Artificial Sequence: Synthetic oligonucleotide
guacaccacgcagagugac

SEQ ID NO: 11395 - RNA, 19 nt, Artificial Sequence
  Description of Artificial Sequence: Synthetic oligonucleotide
ccacagagaccuggcugcu

SEQ ID NO: 11396 - RNA, 19 nt, Artificial Sequence
  Description of Artificial Sequence: Synthetic oligonucleotide
acagagaccuggcugcucg

SEQ ID NO: 11397 - RNA, 19 nt, Artificial Sequence
  Description of Artificial Sequence: Synthetic oligonucleotide
ccucauggugaucguggag

SEQ ID NO: 11398 - RNA, 19 nt, Artificial Sequence
  Description of Artificial Sequence: Synthetic oligonucleotide
uguacaccacgcagaguga

SEQ ID NO: 11399 - RNA, 19 nt, Artificial Sequence
  Description of Artificial Sequence: Synthetic oligonucleotide
uggucaaccuccucggggc

SEQ ID NO: 11400 - RNA, 19 nt, Artificial Sequence
  Description of Artificial Sequence: Synthetic oligonucleotide
uugucugcuacagcuucca

SEQ ID NO: 11401 - RNA, 19 nt, Artificial Sequence
  Description of Artificial Sequence: Synthetic oligonucleotide
cuugucugcuacagcuucc

SEQ ID NO: 11402 - RNA, 19 nt, Artificial Sequence
  Description of Artificial Sequence: Synthetic oligonucleotide
cgcagagugacgugugguc

SEQ ID NO: 11403 - RNA, 19 nt, Artificial Sequence
  Description of Artificial Sequence: Synthetic oligonucleotide
guggucaaccuccucgggg

SEQ ID NO: 11404 - RNA, 19 nt, Artificial Sequence
  Description of Artificial Sequence: Synthetic oligonucleotide
aucguggaguucugcaagu

SEQ ID NO: 11405 - RNA, 19 nt, Artificial Sequence
  Description of Artificial Sequence: Synthetic oligonucleotide
gccaagcgaggaggaccac

SEQ ID NO: 11406 - RNA, 19 nt, Artificial Sequence
  Description of Artificial Sequence: Synthetic oligonucleotide
cugugaagcaaaaauuaau

SEQ ID NO: 11407 - RNA, 19 nt, Artificial Sequence
  Description of Artificial Sequence: Synthetic oligonucleotide
ugugaagcaaaaauuaaug

SEQ ID NO: 11408 - RNA, 19 nt, Artificial Sequence
  Description of Artificial Sequence: Synthetic oligonucleotide
auggauccagaugaacucc

SEQ ID NO: 11409 - RNA, 19 nt, Artificial Sequence
  Description of Artificial Sequence: Synthetic oligonucleotide
uggauccagaugaacuccc

SEQ ID NO: 11410 - RNA, 19 nt, Artificial Sequence
  Description of Artificial Sequence: Synthetic oligonucleotide
ccagaugaacucccauugg

SEQ ID NO: 11411 - RNA, 19 nt, Artificial Sequence
  Description of Artificial Sequence: Synthetic oligonucleotide
cagaugaacucccauugga

SEQ ID NO: 11412 - RNA, 19 nt, Artificial Sequence
  Description of Artificial Sequence: Synthetic oligonucleotide
agaugaacucccauuggau

SEQ ID NO: 11413 - RNA, 19 nt, Artificial Sequence
  Description of Artificial Sequence: Synthetic oligonucleotide
gaugaacucccauuggaug

SEQ ID NO: 11414 - RNA, 19 nt, Artificial Sequence
  Description of Artificial Sequence: Synthetic oligonucleotide
augaacucccauuggauga

SEQ ID NO: 11415 - RNA, 19 nt, Artificial Sequence
  Description of Artificial Sequence: Synthetic oligonucleotide
ccauuggaugaacauugug

SEQ ID NO: 11416 - RNA, 19 nt, Artificial Sequence
  Description of Artificial Sequence: Synthetic oligonucleotide
cauuggaugaacauuguga

SEQ ID NO: 11417 - RNA, 19 nt, Artificial Sequence
  Description of Artificial Sequence: Synthetic oligonucleotide
gucaaaauguugaaagaag

SEQ ID NO: 11418 - RNA, 19 nt, Artificial Sequence
  Description of Artificial Sequence: Synthetic oligonucleotide
ucaaaauguugaaagaagg

SEQ ID NO: 11419 - RNA, 19 nt, Artificial Sequence
  Description of Artificial Sequence: Synthetic oligonucleotide
caccaucucaaugugguca

SEQ ID NO: 11420 - RNA, 19 nt, Artificial Sequence
  Description of Artificial Sequence: Synthetic oligonucleotide
cuaggugccuguaccaagc

SEQ ID NO: 11421 - RNA, 19 nt, Artificial Sequence
  Description of Artificial Sequence: Synthetic oligonucleotide
auucugcaaauuuggaaac

SEQ ID NO: 11422 - RNA, 19 nt, Artificial Sequence
  Description of Artificial Sequence: Synthetic oligonucleotide
uucugcaaauuuggaaacc

SEQ ID NO: 11423 - RNA, 19 nt, Artificial Sequence
  Description of Artificial Sequence: Synthetic oligonucleotide
ucugcaaauuuggaaaccu

SEQ ID NO: 11424 - RNA, 19 nt, Artificial Sequence
  Description of Artificial Sequence: Synthetic oligonucleotide
cugcaaauuuggaaaccug

SEQ ID NO: 11425 - RNA, 19 nt, Artificial Sequence
  Description of Artificial Sequence: Synthetic oligonucleotide
ugcaaauuuggaaaccugu

SEQ ID NO: 11426 - RNA, 19 nt, Artificial Sequence
  Description of Artificial Sequence: Synthetic oligonucleotide
gcaaauuuggaaaccuguc

SEQ ID NO: 11427 - RNA, 19 nt, Artificial Sequence
  Description of Artificial Sequence: Synthetic oligonucleotide
caaauuuggaaaccugucc

SEQ ID NO: 11428 - RNA, 19 nt, Artificial Sequence
  Description of Artificial Sequence: Synthetic oligonucleotide
aaauuuggaaaccugucca

SEQ ID NO: 11429 - RNA, 19 nt, Artificial Sequence
  Description of Artificial Sequence: Synthetic oligonucleotide
cucagugauguagaagaag

SEQ ID NO: 11430 - RNA, 19 nt, Artificial Sequence
  Description of Artificial Sequence: Synthetic oligonucleotide
ucagugauguagaagaaga

SEQ ID NO: 11431 - RNA, 19 nt, Artificial Sequence
  Description of Artificial Sequence: Synthetic oligonucleotide
cagugauguagaagaagag

SEQ ID NO: 11432 - RNA, 19 nt, Artificial Sequence
  Description of Artificial Sequence: Synthetic oligonucleotide
caaguggcuaagggcaugg

SEQ ID NO: 11433 - RNA, 19 nt, Artificial Sequence
  Description of Artificial Sequence: Synthetic oligonucleotide
aaguggcuaagggcaugga

SEQ ID NO: 11434 - RNA, 19 nt, Artificial Sequence
  Description of Artificial Sequence: Synthetic oligonucleotide
aguggcuaagggcauggag

SEQ ID NO: 11435 - RNA, 19 nt, Artificial Sequence
  Description of Artificial Sequence: Synthetic oligonucleotide
guggcuaagggcauggagu

SEQ ID NO: 11436 - RNA, 19 nt, Artificial Sequence
  Description of Artificial Sequence: Synthetic oligonucleotide
uggcuaagggcauggaguu

SEQ ID NO: 11437 - RNA, 19 nt, Artificial Sequence
  Description of Artificial Sequence: Synthetic oligonucleotide
ggcuaagggcauggaguuc

SEQ ID NO: 11438 - RNA, 19 nt, Artificial Sequence
  Description of Artificial Sequence: Synthetic oligonucleotide
gggaccuggcggcacgaaa

SEQ ID NO: 11439 - RNA, 19 nt, Artificial Sequence
  Description of Artificial Sequence: Synthetic oligonucleotide
cucuuaucggagaagaacg

SEQ ID NO: 11440 - RNA, 19 nt, Artificial Sequence
  Description of Artificial Sequence: Synthetic oligonucleotide
ucuuaucggagaagaacgu

SEQ ID NO: 11441 - RNA, 19 nt, Artificial Sequence
  Description of Artificial Sequence: Synthetic oligonucleotide
cuuaucggagaagaacgug

SEQ ID NO: 11442 - RNA, 19 nt, Artificial Sequence
  Description of Artificial Sequence: Synthetic oligonucleotide
gagaagaacgugguuaaaa

SEQ ID NO: 11443 - RNA, 19 nt, Artificial Sequence
  Description of Artificial Sequence: Synthetic oligonucleotide
agaagaacgugguuaaaau

SEQ ID NO: 11444 - RNA, 19 nt, Artificial Sequence
  Description of Artificial Sequence: Synthetic oligonucleotide
cuuuggcuuggcccgggau

SEQ ID NO: 11445 - RNA, 19 nt, Artificial Sequence
  Description of Artificial Sequence: Synthetic oligonucleotide
ccgggauauuuauaaagau

SEQ ID NO: 11446 - RNA, 19 nt, Artificial Sequence
  Description of Artificial Sequence: Synthetic oligonucleotide
cgggauauuuauaaagauc

SEQ ID NO: 11447 - RNA, 19 nt, Artificial Sequence
  Description of Artificial Sequence: Synthetic oligonucleotide
gggauauuuauaaagaucc

SEQ ID NO: 11448 - RNA, 19 nt, Artificial Sequence
  Description of Artificial Sequence: Synthetic oligonucleotide
aaaaggagaugcucgccuc

SEQ ID NO: 11449 - RNA, 19 nt, Artificial Sequence
  Description of Artificial Sequence: Synthetic oligonucleotide
aaaggagaugcucgccucc

SEQ ID NO: 11450 - RNA, 19 nt, Artificial Sequence
  Description of Artificial Sequence: Synthetic oligonucleotide
aaggagaugcucgccuccc

SEQ ID NO: 11451 - RNA, 19 nt, Artificial Sequence
  Description of Artificial Sequence: Synthetic oligonucleotide
aggagaugcucgccucccu

SEQ ID NO: 11452 - RNA, 19 nt, Artificial Sequence
  Description of Artificial Sequence: Synthetic oligonucleotide
cucgccucccuuugaaaug

SEQ ID NO: 11453 - RNA, 19 nt, Artificial Sequence
  Description of Artificial Sequence: Synthetic oligonucleotide
ucgccucccuuugaaaugg

SEQ ID NO: 11454 - RNA, 19 nt, Artificial Sequence
  Description of Artificial Sequence: Synthetic oligonucleotide
cgccucccuuugaaaugga

SEQ ID NO: 11455 - RNA, 19 nt, Artificial Sequence
  Description of Artificial Sequence: Synthetic oligonucleotide
gccucccuuugaaauggau

SEQ ID NO: 11456 - RNA, 19 nt, Artificial Sequence
  Description of Artificial Sequence: Synthetic oligonucleotide
ccucccuuugaaauggaug

SEQ ID NO: 11457 - RNA, 19 nt, Artificial Sequence
  Description of Artificial Sequence: Synthetic oligonucleotide
uuugaaauggauggcccca

SEQ ID NO: 11458 - RNA, 19 nt, Artificial Sequence
  Description of Artificial Sequence: Synthetic oligonucleotide
uugaaauggauggccccag

SEQ ID NO: 11459 - RNA, 19 nt, Artificial Sequence
  Description of Artificial Sequence: Synthetic oligonucleotide
aauggauggccccagaaac

SEQ ID NO: 11460 - RNA, 19 nt, Artificial Sequence
  Description of Artificial Sequence: Synthetic oligonucleotide
ucagcaggauggcaaagac

SEQ ID NO: 11461 - RNA, 19 nt, Artificial Sequence
  Description of Artificial Sequence: Synthetic oligonucleotide
gauggcaaagacuacauug

SEQ ID NO: 11462 - RNA, 19 nt, Artificial Sequence
  Description of Artificial Sequence: Synthetic oligonucleotide
ugaagacaggcuacuuguc

SEQ ID NO: 11463 - RNA, 19 nt, Artificial Sequence
  Description of Artificial Sequence: Synthetic oligonucleotide
gaagacaggcuacuugucc

SEQ ID NO: 11464 - RNA, 19 nt, Artificial Sequence
  Description of Artificial Sequence: Synthetic oligonucleotide
acaggcuacuuguccaucg

SEQ ID NO: 11465 - RNA, 19 nt, Artificial Sequence
  Description of Artificial Sequence: Synthetic oligonucleotide
caggcuacuuguccaucgu

SEQ ID NO: 11466 - RNA, 19 nt, Artificial Sequence
  Description of Artificial Sequence: Synthetic oligonucleotide
aggcuacuuguccaucguc

SEQ ID NO: 11467 - RNA, 19 nt, Artificial Sequence
  Description of Artificial Sequence: Synthetic oligonucleotide
agcaaaugggaauucccca

SEQ ID NO: 11468 - RNA, 19 nt, Artificial Sequence
  Description of Artificial Sequence: Synthetic oligonucleotide
gcaaaugggaauuccccag

SEQ ID NO: 11469 - RNA, 19 nt, Artificial Sequence
  Description of Artificial Sequence: Synthetic oligonucleotide
caaaugggaauuccccaga

SEQ ID NO: 11470 - RNA, 19 nt, Artificial Sequence
  Description of Artificial Sequence: Synthetic oligonucleotide
aaaugggaauuccccagag

SEQ ID NO: 11471 - RNA, 19 nt, Artificial Sequence
  Description of Artificial Sequence: Synthetic oligonucleotide
augggaauuccccagagac

SEQ ID NO: 11472 - RNA, 19 nt, Artificial Sequence
  Description of Artificial Sequence: Synthetic oligonucleotide
cucaugucugaacucaaga

SEQ ID NO: 11473 - RNA, 19 nt, Artificial Sequence
  Description of Artificial Sequence: Synthetic oligonucleotide
ucaugucugaacucaagau

SEQ ID NO: 11474 - RNA, 19 nt, Artificial Sequence
  Description of Artificial Sequence: Synthetic oligonucleotide
caugucugaacucaagauc

SEQ ID NO: 11475 - RNA, 19 nt, Artificial Sequence
  Description of Artificial Sequence: Synthetic oligonucleotide
acucauggugauuguggaa

SEQ ID NO: 11476 - RNA, 19 nt, Artificial Sequence
  Description of Artificial Sequence: Synthetic oligonucleotide
aaucugugacuuuggcuug

SEQ ID NO: 11477 - RNA, 19 nt, Artificial Sequence
  Description of Artificial Sequence: Synthetic oligonucleotide
ggaacuagaaugagggccc

SEQ ID NO: 11478 - RNA, 19 nt, Artificial Sequence
  Description of Artificial Sequence: Synthetic oligonucleotide
gaacuagaaugagggcccc

SEQ ID NO: 11479 - RNA, 19 nt, Artificial Sequence
  Description of Artificial Sequence: Synthetic oligonucleotide
acuagaaugagggccccug

SEQ ID NO: 11480 - RNA, 19 nt, Artificial Sequence
  Description of Artificial Sequence: Synthetic oligonucleotide
cuagaaugagggccccuga

SEQ ID NO: 11481 - RNA, 19 nt, Artificial Sequence
  Description of Artificial Sequence: Synthetic oligonucleotide
ugccagcaagugggaguuu

SEQ ID NO: 11482 - RNA, 19 nt, Artificial Sequence
  Description of Artificial Sequence: Synthetic oligonucleotide
ugccggacuguggcuguga

SEQ ID NO: 11483 - RNA, 19 nt, Artificial Sequence
  Description of Artificial Sequence: Synthetic oligonucleotide
gccggacuguggcugugaa

SEQ ID NO: 11484 - RNA, 19 nt, Artificial Sequence
  Description of Artificial Sequence: Synthetic oligonucleotide
gacuguggcugugaaaaug

SEQ ID NO: 11485 - RNA, 19 nt, Artificial Sequence
  Description of Artificial Sequence: Synthetic oligonucleotide
cugaacgugguuaaccugc

SEQ ID NO: 11486 - RNA, 19 nt, Artificial Sequence
  Description of Artificial Sequence: Synthetic oligonucleotide
ugaacgugguuaaccugcu

SEQ ID NO: 11487 - RNA, 19 nt, Artificial Sequence
  Description of Artificial Sequence: Synthetic oligonucleotide
aacgugguuaaccugcugg

SEQ ID NO: 11488 - RNA, 19 nt, Artificial Sequence
  Description of Artificial Sequence: Synthetic oligonucleotide
acgugguuaaccugcuggg

SEQ ID NO: 11489 - RNA, 19 nt, Artificial Sequence
  Description of Artificial Sequence: Synthetic oligonucleotide
uauggaaaucucuccaacu

SEQ ID NO: 11490 - RNA, 19 nt, Artificial Sequence
  Description of Artificial Sequence: Synthetic oligonucleotide
ggaaaucucuccaacuacc

SEQ ID NO: 11491 - RNA, 19 nt, Artificial Sequence
  Description of Artificial Sequence: Synthetic oligonucleotide
gaaaucucuccaacuaccu

SEQ ID NO: 11492 - RNA, 19 nt, Artificial Sequence
  Description of Artificial Sequence: Synthetic oligonucleotide
gucuuccagaaagugcauu

SEQ ID NO: 11493 - RNA, 19 nt, Artificial Sequence
  Description of Artificial Sequence: Synthetic oligonucleotide
ucuuccagaaagugcauuc

SEQ ID NO: 11494 - RNA, 19 nt, Artificial Sequence
  Description of Artificial Sequence: Synthetic oligonucleotide
uuccagaaagugcauucau

SEQ ID NO: 11495 - RNA, 19 nt, Artificial Sequence
  Description of Artificial Sequence: Synthetic oligonucleotide
ggugguccuguacuccacc

SEQ ID NO: 11496 - RNA, 19 nt, Artificial Sequence
  Description of Artificial Sequence: Synthetic oligonucleotide
ccagaugaaguuccuuugg

SEQ ID NO: 11497 - RNA, 19 nt, Artificial Sequence
  Description of Artificial Sequence: Synthetic oligonucleotide
cagaugaaguuccuuugga

SEQ ID NO: 11498 - RNA, 19 nt, Artificial Sequence
  Description of Artificial Sequence: Synthetic oligonucleotide
agaugaaguuccuuuggau

SEQ ID NO: 11499 - RNA, 19 nt, Artificial Sequence
  Description of Artificial Sequence: Synthetic oligonucleotide
gaugaaguuccuuuggaug

SEQ ID NO: 11500 - RNA, 19 nt, Artificial Sequence
  Description of Artificial Sequence: Synthetic oligonucleotide
augaaguuccuuuggauga

SEQ ID NO: 11501 - RNA, 19 nt, Artificial Sequence
  Description of Artificial Sequence: Synthetic oligonucleotide
ccuuuggaugagcagugug

SEQ ID NO: 11502 - RNA, 19 nt, Artificial Sequence
  Description of Artificial Sequence: Synthetic oligonucleotide
cuuuggaugagcaguguga

SEQ ID NO: 11503 - RNA, 19 nt, Artificial Sequence
  Description of Artificial Sequence: Synthetic oligonucleotide
uuggaugagcagugugagc

SEQ ID NO: 11504 - RNA, 19 nt, Artificial Sequence
  Description of Artificial Sequence: Synthetic oligonucleotide
uggaugagcagugugagcg

SEQ ID NO: 11505 - RNA, 19 nt, Artificial Sequence
  Description of Artificial Sequence: Synthetic oligonucleotide
ugugagcggcucccuuaug

SEQ ID NO: 11506 - RNA, 19 nt, Artificial Sequence
  Description of Artificial Sequence: Synthetic oligonucleotide
gugagcggcucccuuauga

SEQ ID NO: 11507 - RNA, 19 nt, Artificial Sequence
  Description of Artificial Sequence: Synthetic oligonucleotide
ugagcggcucccuuaugau

SEQ ID NO: 11508 - RNA, 19 nt, Artificial Sequence
  Description of Artificial Sequence: Synthetic oligonucleotide
gagcggcucccuuaugaug

SEQ ID NO: 11509 - RNA, 19 nt, Artificial Sequence
  Description of Artificial Sequence: Synthetic oligonucleotide
agcggcucccuuaugaugc

SEQ ID NO: 11510 - RNA, 19 nt, Artificial Sequence
  Description of Artificial Sequence: Synthetic oligonucleotide
gcggcucccuuaugaugcc

SEQ ID NO: 11511 - RNA, 19 nt, Artificial Sequence
  Description of Artificial Sequence: Synthetic oligonucleotide
gggagagacuuaaacuggg

SEQ ID NO: 11512 - RNA, 19 nt, Artificial Sequence
  Description of Artificial Sequence: Synthetic oligonucleotide
aagcaaggagggccucuga

SEQ ID NO: 11513 - RNA, 19 nt, Artificial Sequence
  Description of Artificial Sequence: Synthetic oligonucleotide
agcaaggagggccucugau

SEQ ID NO: 11514 - RNA, 19 nt, Artificial Sequence
  Description of Artificial Sequence: Synthetic oligonucleotide
gcaaggagggccucugaug

SEQ ID NO: 11515 - RNA, 19 nt, Artificial Sequence
  Description of Artificial Sequence: Synthetic oligonucleotide
caaggagggccucugaugg

SEQ ID NO: 11516 - RNA, 19 nt, Artificial Sequence
  Description of Artificial Sequence: Synthetic oligonucleotide
aaggagggccucugauggu

SEQ ID NO: 11517 - RNA, 19 nt, Artificial Sequence
  Description of Artificial Sequence: Synthetic oligonucleotide
gccucugauggugauuguu

SEQ ID NO: 11518 - RNA, 19 nt, Artificial Sequence
  Description of Artificial Sequence: Synthetic oligonucleotide
ccucugauggugauuguug

SEQ ID NO: 11519 - RNA, 19 nt, Artificial Sequence
  Description of Artificial Sequence: Synthetic oligonucleotide
cucugauggugauuguuga

SEQ ID NO: 11520 - RNA, 19 nt, Artificial Sequence
  Description of Artificial Sequence: Synthetic oligonucleotide
ucugauggugauuguugaa

SEQ ID NO: 11521 - RNA, 19 nt, Artificial Sequence
  Description of Artificial Sequence: Synthetic oligonucleotide
ugauggugauuguugaaua

SEQ ID NO: 11522 - RNA, 19 nt, Artificial Sequence
  Description of Artificial Sequence: Synthetic oligonucleotide
gauggugauuguugaauac

SEQ ID NO: 11523 - RNA, 19 nt, Artificial Sequence
  Description of Artificial Sequence: Synthetic oligonucleotide
uuguugaauacugcaaaua

SEQ ID NO: 11524 - RNA, 19 nt, Artificial Sequence
  Description of Artificial Sequence: Synthetic oligonucleotide
uguugaauacugcaaauau

SEQ ID NO: 11525 - RNA, 19 nt, Artificial Sequence
  Description of Artificial Sequence: Synthetic oligonucleotide
guugaauacugcaaauaug

SEQ ID NO: 11526 - RNA, 19 nt, Artificial Sequence
  Description of Artificial Sequence: Synthetic oligonucleotide
uugaauacugcaaauaugg

SEQ ID NO: 11527 - RNA, 19 nt, Artificial Sequence
  Description of Artificial Sequence: Synthetic oligonucleotide
ugaauacugcaaauaugga

SEQ ID NO: 11528 - RNA, 19 nt, Artificial Sequence
  Description of Artificial Sequence: Synthetic oligonucleotide
auacugcaaauauggaaau

SEQ ID NO: 11529 - RNA, 19 nt, Artificial Sequence
  Description of Artificial Sequence: Synthetic oligonucleotide
uacugcaaauauggaaauc

SEQ ID NO: 11530 - RNA, 19 nt, Artificial Sequence
  Description of Artificial Sequence: Synthetic oligonucleotide
acugcaaauauggaaaucu

SEQ ID NO: 11531 - RNA, 19 nt, Artificial Sequence
  Description of Artificial Sequence: Synthetic oligonucleotide
cugcaaauauggaaaucuc

SEQ ID NO: 11532 - RNA, 19 nt, Artificial Sequence
  Description of Artificial Sequence: Synthetic oligonucleotide
ugcaaauauggaaaucucu

SEQ ID NO: 11533 - RNA, 19 nt, Artificial Sequence
  Description of Artificial Sequence: Synthetic oligonucleotide
gcaaauauggaaaucucuc

SEQ ID NO: 11534 - RNA, 19 nt, Artificial Sequence
  Description of Artificial Sequence: Synthetic oligonucleotide
caaauauggaaaucucucc

SEQ ID NO: 11535 - RNA, 19 nt, Artificial Sequence
  Description of Artificial Sequence: Synthetic oligonucleotide
aaauauggaaaucucucca

SEQ ID NO: 11536 - RNA, 19 nt, Artificial Sequence
  Description of Artificial Sequence: Synthetic oligonucleotide
cugagugauguugaggaag

SEQ ID NO: 11537 - RNA, 19 nt, Artificial Sequence
  Description of Artificial Sequence: Synthetic oligonucleotide
ugagugauguugaggaaga

SEQ ID NO: 11538 - RNA, 19 nt, Artificial Sequence
  Description of Artificial Sequence: Synthetic oligonucleotide
gagugauguugaggaagag

SEQ ID NO: 11539 - RNA, 19 nt, Artificial Sequence
  Description of Artificial Sequence: Synthetic oligonucleotide
ugauguugaggaagaggag

SEQ ID NO: 11540 - RNA, 19 nt, Artificial Sequence
  Description of Artificial Sequence: Synthetic oligonucleotide
gauguugaggaagaggagg

SEQ ID NO: 11541 - RNA, 19 nt, Artificial Sequence
  Description of Artificial Sequence: Synthetic oligonucleotide
ucuuacaguuuucaagugg

SEQ ID NO: 11542 - RNA, 19 nt, Artificial Sequence
  Description of Artificial Sequence: Synthetic oligonucleotide
cuuacaguuuucaaguggc

SEQ ID NO: 11543 - RNA, 19 nt, Artificial Sequence
  Description of Artificial Sequence: Synthetic oligonucleotide
cuuuuaucugagaacaacg

SEQ ID NO: 11544 - RNA, 19 nt, Artificial Sequence
  Description of Artificial Sequence: Synthetic oligonucleotide
uuuuaucugagaacaacgu

SEQ ID NO: 11545 - RNA, 19 nt, Artificial Sequence
  Description of Artificial Sequence: Synthetic oligonucleotide
uuuaucugagaacaacgug

SEQ ID NO: 11546 - RNA, 19 nt, Artificial Sequence
  Description of Artificial Sequence: Synthetic oligonucleotide
aucugagaacaacguggug

SEQ ID NO: 11547 - RNA, 19 nt, Artificial Sequence
  Description of Artificial Sequence: Synthetic oligonucleotide
ucugagaacaacgugguga

SEQ ID NO: 11548 - RNA, 19 nt, Artificial Sequence
  Description of Artificial Sequence: Synthetic oligonucleotide
cugagaacaacguggugaa

SEQ ID NO: 11549 - RNA, 19 nt, Artificial Sequence
  Description of Artificial Sequence: Synthetic oligonucleotide
aaauggauggcucccgaau

SEQ ID NO: 11550 - RNA, 19 nt, Artificial Sequence
  Description of Artificial Sequence: Synthetic oligonucleotide
aauggauggcucccgaauc

SEQ ID NO: 11551 - RNA, 19 nt, Artificial Sequence
  Description of Artificial Sequence: Synthetic oligonucleotide
aguauugcugugggaaauc

SEQ ID NO: 11552 - RNA, 19 nt, Artificial Sequence
  Description of Artificial Sequence: Synthetic oligonucleotide
gaaaucuaucagaucaugc

SEQ ID NO: 11553 - RNA, 19 nt, Artificial Sequence
  Description of Artificial Sequence: Synthetic oligonucleotide
aaaucuaucagaucaugcu

SEQ ID NO: 11554 - RNA, 19 nt, Artificial Sequence
  Description of Artificial Sequence: Synthetic oligonucleotide
aaucuaucagaucaugcug

SEQ ID NO: 11555 - RNA, 19 nt, Artificial Sequence
  Description of Artificial Sequence: Synthetic oligonucleotide
aucuaucagaucaugcugg

SEQ ID NO: 11556 - RNA, 19 nt, Artificial Sequence
  Description of Artificial Sequence: Synthetic oligonucleotide
ucuaucagaucaugcugga

SEQ ID NO: 11557 - RNA, 19 nt, Artificial Sequence
  Description of Artificial Sequence: Synthetic oligonucleotide
cuaucagaucaugcuggac

SEQ ID NO: 11558 - RNA, 19 nt, Artificial Sequence
  Description of Artificial Sequence: Synthetic oligonucleotide
cuagaagaaaagcccauuu

SEQ ID NO: 11559 - RNA, 19 nt, Artificial Sequence
  Description of Artificial Sequence: Synthetic oligonucleotide
uucucugggagaucuucuc

SEQ ID NO: 11560 - RNA, 19 nt, Artificial Sequence
  Description of Artificial Sequence: Synthetic oligonucleotide
acugcugguccggagaccc

SEQ ID NO: 11561 - RNA, 19 nt, Artificial Sequence
  Description of Artificial Sequence: Synthetic oligonucleotide
cacgcagagugacgugugg

SEQ ID NO: 11562 - RNA, 19 nt, Artificial Sequence
  Description of Artificial Sequence: Synthetic oligonucleotide
gcugguccugaacugcacc

SEQ ID NO: 11563 - RNA, 19 nt, Artificial Sequence
  Description of Artificial Sequence: Synthetic oligonucleotide
guggagggaaagaauaaga

SEQ ID NO: 11564 - RNA, 19 nt, Artificial Sequence
  Description of Artificial Sequence: Synthetic oligonucleotide
cucggggcgugcaccaagc

SEQ ID NO: 11565 - RNA, 19 nt, Artificial Sequence
  Description of Artificial Sequence: Synthetic oligonucleotide
uacaaacuucaaagaggaa

SEQ ID NO: 11566 - RNA, 19 nt, Artificial Sequence
  Description of Artificial Sequence: Synthetic oligonucleotide
agugggauggugcuggccu

SEQ ID NO: 11567 - RNA, 19 nt, Artificial Sequence
  Description of Artificial Sequence: Synthetic oligonucleotide
aguggauggccccugaaag

SEQ ID NO: 11568 - RNA, 19 nt, Artificial Sequence
  Description of Artificial Sequence: Synthetic oligonucleotide
ggaggugacagaggccagc

SEQ ID NO: 11569 - RNA, 19 nt, Artificial Sequence
  Description of Artificial Sequence: Synthetic oligonucleotide
uucccccgagagcggcugc

SEQ ID NO: 11570 - RNA, 19 nt, Artificial Sequence
  Description of Artificial Sequence: Synthetic oligonucleotide
gaugucggagcucaagauc

SEQ ID NO: 11571 - RNA, 19 nt, Artificial Sequence
  Description of Artificial Sequence: Synthetic oligonucleotide
ugaaugugcccccccagau

SEQ ID NO: 11572 - RNA, 19 nt, Artificial Sequence
  Description of Artificial Sequence: Synthetic oligonucleotide
ccagugggaauucccccga

SEQ ID NO: 11573 - RNA, 19 nt, Artificial Sequence
  Description of Artificial Sequence: Synthetic oligonucleotide
uggauggccccugaaagca

SEQ ID NO: 11574 - RNA, 19 nt, Artificial Sequence
  Description of Artificial Sequence: Synthetic oligonucleotide
gugaaugugcccccccaga

SEQ ID NO: 11575 - RNA, 19 nt, Artificial Sequence
  Description of Artificial Sequence: Synthetic oligonucleotide
acaaggaugagggccccgg

SEQ ID NO: 11576 - RNA, 19 nt, Artificial Sequence
  Description of Artificial Sequence: Synthetic oligonucleotide
acagugggauggugcuggc

SEQ ID NO: 11577 - RNA, 19 nt, Artificial Sequence
  Description of Artificial Sequence: Synthetic oligonucleotide
gugggaauucccccgagag

SEQ ID NO: 11578 - RNA, 19 nt, Artificial Sequence
  Description of Artificial Sequence: Synthetic oligonucleotide
ggcacaaggaugagggccc

SEQ ID NO: 11579 - RNA, 19 nt, Artificial Sequence
  Description of Artificial Sequence: Synthetic oligonucleotide
cagugggaauucccccgag

SEQ ID NO: 11580 - RNA, 19 nt, Artificial Sequence
  Description of Artificial Sequence: Synthetic oligonucleotide
ucccccgagagcggcugca

SEQ ID NO: 11581 - RNA, 19 nt, Artificial Sequence
  Description of Artificial Sequence: Synthetic oligonucleotide
gccagugggaauucccccg

SEQ ID NO: 11582 - RNA, 19 nt, Artificial Sequence
  Description of Artificial Sequence: Synthetic oligonucleotide
caaggaugagggccccgga

SEQ ID NO: 11583 - RNA, 19 nt, Artificial Sequence
  Description of Artificial Sequence: Synthetic oligonucleotide
gugggauggugcuggccuc

SEQ ID NO: 11584 - RNA, 19 nt, Artificial Sequence
  Description of Artificial Sequence: Synthetic oligonucleotide
agccagugggaauuccccc

SEQ ID NO: 11585 - RNA, 19 nt, Artificial Sequence
  Description of Artificial Sequence: Synthetic oligonucleotide
ggauggccccugaaagcau

SEQ ID NO: 11586 - RNA, 19 nt, Artificial Sequence
  Description of Artificial Sequence: Synthetic oligonucleotide
ugaugucggagcucaagau

SEQ ID NO: 11587 - RNA, 19 nt, Artificial Sequence
  Description of Artificial Sequence: Synthetic oligonucleotide
aucuacuucuaugugacca

SEQ ID NO: 11588 - RNA, 19 nt, Artificial Sequence
  Description of Artificial Sequence: Synthetic oligonucleotide
gacagugggauggugcugg

SEQ ID NO: 11589 - RNA, 19 nt, Artificial Sequence
  Description of Artificial Sequence: Synthetic oligonucleotide
cagugggauggugcuggcc

SEQ ID NO: 11590 - RNA, 19 nt, Artificial Sequence
  Description of Artificial Sequence: Synthetic oligonucleotide
gcacaaggaugagggcccc

SEQ ID NO: 11591 - RNA, 19 nt, Artificial Sequence
  Description of Artificial Sequence: Synthetic oligonucleotide
cuugucuuaaauuguacag

SEQ ID NO: 11592 - RNA, 19 nt, Artificial Sequence
  Description of Artificial Sequence: Synthetic oligonucleotide
uugucuuaaauuguacagc

SEQ ID NO: 11593 - RNA, 19 nt, Artificial Sequence
  Description of Artificial Sequence: Synthetic oligonucleotide
gggauugacuucaacuggg

SEQ ID NO: 11594 - RNA, 19 nt, Artificial Sequence
  Description of Artificial Sequence: Synthetic oligonucleotide
caagaagaacagcacauuu

SEQ ID NO: 11595 - RNA, 19 nt, Artificial Sequence
  Description of Artificial Sequence: Synthetic oligonucleotide
cauggagcuuaagaaugca

SEQ ID NO: 11596 - RNA, 19 nt, Artificial Sequence
  Description of Artificial Sequence: Synthetic oligonucleotide
ccacagaucaugugguuua

SEQ ID NO: 11597 - RNA, 19 nt, Artificial Sequence
  Description of Artificial Sequence: Synthetic oligonucleotide
cacagaucaugugguuuaa

SEQ ID NO: 11598 - RNA, 19 nt, Artificial Sequence
  Description of Artificial Sequence: Synthetic oligonucleotide
acagaucaugugguuuaaa

SEQ ID NO: 11599 - RNA, 19 nt, Artificial Sequence
  Description of Artificial Sequence: Synthetic oligonucleotide
cagaucaugugguuuaaag

SEQ ID NO: 11600 - RNA, 19 nt, Artificial Sequence
  Description of Artificial Sequence: Synthetic oligonucleotide
agaucaugugguuuaaaga

SEQ ID NO: 11601 - RNA, 19 nt, Artificial Sequence
  Description of Artificial Sequence: Synthetic oligonucleotide
ucauggauccagaugaacu

SEQ ID NO: 11602 - RNA, 19 nt, Artificial Sequence
  Description of Artificial Sequence: Synthetic oligonucleotide
gcagucaaaauguugaaag

SEQ ID NO: 11603 - RNA, 19 nt, Artificial Sequence
  Description of Artificial Sequence: Synthetic oligonucleotide
cagucaaaauguugaaaga

SEQ ID NO: 11604 - RNA, 19 nt, Artificial Sequence
  Description of Artificial Sequence: Synthetic oligonucleotide
cauauuggucaccaucuca

SEQ ID NO: 11605 - RNA, 19 nt, Artificial Sequence
  Description of Artificial Sequence: Synthetic oligonucleotide
auauuggucaccaucucaa

SEQ ID NO: 11606 - RNA, 19 nt, Artificial Sequence
  Description of Artificial Sequence: Synthetic oligonucleotide
auuggucaccaucucaaug

SEQ ID NO: 11607 - RNA, 19 nt, Artificial Sequence
  Description of Artificial Sequence: Synthetic oligonucleotide
uuggucaccaucucaaugu

SEQ ID NO: 11608 - RNA, 19 nt, Artificial Sequence
  Description of Artificial Sequence: Synthetic oligonucleotide
uggucaccaucucaaugug

SEQ ID NO: 11609 - RNA, 19 nt, Artificial Sequence
  Description of Artificial Sequence: Synthetic oligonucleotide
ggucaccaucucaaugugg

SEQ ID NO: 11610 - RNA, 19 nt, Artificial Sequence
  Description of Artificial Sequence: Synthetic oligonucleotide
gucaccaucucaauguggu

SEQ ID NO: 11611 - RNA, 19 nt, Artificial Sequence
  Description of Artificial Sequence: Synthetic oligonucleotide
ggugccuguaccaagccag

SEQ ID NO: 11612 - RNA, 19 nt, Artificial Sequence
  Description of Artificial Sequence: Synthetic oligonucleotide
gugccuguaccaagccagg

SEQ ID NO: 11613 - RNA, 19 nt, Artificial Sequence
  Description of Artificial Sequence: Synthetic oligonucleotide
ugccuguaccaagccagga

SEQ ID NO: 11614 - RNA, 19 nt, Artificial Sequence
  Description of Artificial Sequence: Synthetic oligonucleotide
uaccaagccaggagggcca

SEQ ID NO: 11615 - RNA, 19 nt, Artificial Sequence
  Description of Artificial Sequence: Synthetic oligonucleotide
caagccaggagggccacuc

SEQ ID NO: 11616 - RNA, 19 nt, Artificial Sequence
  Description of Artificial Sequence: Synthetic oligonucleotide
aagccaggagggccacuca

SEQ ID NO: 11617 - RNA, 19 nt, Artificial Sequence
  Description of Artificial Sequence: Synthetic oligonucleotide
agccaggagggccacucau

SEQ ID NO: 11618 - RNA, 19 nt, Artificial Sequence
  Description of Artificial Sequence: Synthetic oligonucleotide
gccaggagggccacucaug

SEQ ID NO: 11619 - RNA, 19 nt, Artificial Sequence
  Description of Artificial Sequence: Synthetic oligonucleotide
ccaggagggccacucaugg

SEQ ID NO: 11620 - RNA, 19 nt, Artificial Sequence
  Description of Artificial Sequence: Synthetic oligonucleotide
caggagggccacucauggu

SEQ ID NO: 11621 - RNA, 19 nt, Artificial Sequence
  Description of Artificial Sequence: Synthetic oligonucleotide
gccacucauggugauugug

SEQ ID NO: 11622 - RNA, 19 nt, Artificial Sequence
  Description of Artificial Sequence: Synthetic oligonucleotide
uuguggaauucugcaaauu

SEQ ID NO: 11623 - RNA, 19 nt, Artificial Sequence
  Description of Artificial Sequence: Synthetic oligonucleotide
uguggaauucugcaaauuu

SEQ ID NO: 11624 - RNA, 19 nt, Artificial Sequence
  Description of Artificial Sequence: Synthetic oligonucleotide
guggaauucugcaaauuug

SEQ ID NO: 11625 - RNA, 19 nt, Artificial Sequence
  Description of Artificial Sequence: Synthetic oligonucleotide
uggaauucugcaaauuugg

SEQ ID NO: 11626 - RNA, 19 nt, Artificial Sequence
  Description of Artificial Sequence: Synthetic oligonucleotide
ggaauucugcaaauuugga

SEQ ID NO: 11627 - RNA, 19 nt, Artificial Sequence
  Description of Artificial Sequence: Synthetic oligonucleotide
ggcauggaguucuuggcau

SEQ ID NO: 11628 - RNA, 19 nt, Artificial Sequence
  Description of Artificial Sequence: Synthetic oligonucleotide
gcauggaguucuuggcauc

SEQ ID NO: 11629 - RNA, 19 nt, Artificial Sequence
  Description of Artificial Sequence: Synthetic oligonucleotide
aucggagaagaacgugguu

SEQ ID NO: 11630 - RNA, 19 nt, Artificial Sequence
  Description of Artificial Sequence: Synthetic oligonucleotide
ucggagaagaacgugguua

SEQ ID NO: 11631 - RNA, 19 nt, Artificial Sequence
  Description of Artificial Sequence: Synthetic oligonucleotide
cggagaagaacgugguuaa

SEQ ID NO: 11632 - RNA, 19 nt, Artificial Sequence
  Description of Artificial Sequence: Synthetic oligonucleotide
auccagauuaugucagaaa

SEQ ID NO: 11633 - RNA, 19 nt, Artificial Sequence
  Description of Artificial Sequence: Synthetic oligonucleotide
uccagauuaugucagaaaa

SEQ ID NO: 11634 - RNA, 19 nt, Artificial Sequence
  Description of Artificial Sequence: Synthetic oligonucleotide
cagaaaaggagaugcucgc

SEQ ID NO: 11635 - RNA, 19 nt, Artificial Sequence
  Description of Artificial Sequence: Synthetic oligonucleotide
ccagagugacgucuggucu

SEQ ID NO: 11636 - RNA, 19 nt, Artificial Sequence
  Description of Artificial Sequence: Synthetic oligonucleotide
ugguguuuugcugugggaa

SEQ ID NO: 11637 - RNA, 19 nt, Artificial Sequence
  Description of Artificial Sequence: Synthetic oligonucleotide
uguuuugcugugggaaaua

SEQ ID NO: 11638 - RNA, 19 nt, Artificial Sequence
  Description of Artificial Sequence: Synthetic oligonucleotide
uuugcugugggaaauauuu

SEQ ID NO: 11639 - RNA, 19 nt, Artificial Sequence
  Description of Artificial Sequence: Synthetic oligonucleotide
aaauauuuuccuuaggugc

SEQ ID NO: 11640 - RNA, 19 nt, Artificial Sequence
  Description of Artificial Sequence: Synthetic oligonucleotide
uuuuccuuaggugcuucuc

SEQ ID NO: 11641 - RNA, 19 nt, Artificial Sequence
  Description of Artificial Sequence: Synthetic oligonucleotide
uuuccuuaggugcuucucc

SEQ ID NO: 11642 - RNA, 19 nt, Artificial Sequence
  Description of Artificial Sequence: Synthetic oligonucleotide
uuccuuaggugcuucucca

SEQ ID NO: 11643 - RNA, 19 nt, Artificial Sequence
  Description of Artificial Sequence: Synthetic oligonucleotide
cuuaggugcuucuccauau

SEQ ID NO: 11644 - RNA, 19 nt, Artificial Sequence
  Description of Artificial Sequence: Synthetic oligonucleotide
uuaggugcuucuccauauc

SEQ ID NO: 11645 - RNA, 19 nt, Artificial Sequence
  Description of Artificial Sequence: Synthetic oligonucleotide
uaggugcuucuccauaucc

SEQ ID NO: 11646 - RNA, 19 nt, Artificial Sequence
  Description of Artificial Sequence: Synthetic oligonucleotide
ggacugcuggcacggggag

SEQ ID NO: 11647 - RNA, 19 nt, Artificial Sequence
  Description of Artificial Sequence: Synthetic oligonucleotide
gacugcuggcacggggagc

SEQ ID NO: 11648 - RNA, 19 nt, Artificial Sequence
  Description of Artificial Sequence: Synthetic oligonucleotide
acugcuggcacggggagcc

SEQ ID NO: 11649 - RNA, 19 nt, Artificial Sequence
  Description of Artificial Sequence: Synthetic oligonucleotide
ggaggugacugagugcagc

SEQ ID NO: 11650 - RNA, 19 nt, Artificial Sequence
  Description of Artificial Sequence: Synthetic oligonucleotide
guguaugucccaccccaga

SEQ ID NO: 11651 - RNA, 19 nt, Artificial Sequence
  Description of Artificial Sequence: Synthetic oligonucleotide
cuuguccaucgucauggau

SEQ ID NO: 11652 - RNA, 19 nt, Artificial Sequence
  Description of Artificial Sequence: Synthetic oligonucleotide
uuguccaucgucauggauc

SEQ ID NO: 11653 - RNA, 19 nt, Artificial Sequence
  Description of Artificial Sequence: Synthetic oligonucleotide
guccaucgucauggaucca

SEQ ID NO: 11654 - RNA, 19 nt, Artificial Sequence
  Description of Artificial Sequence: Synthetic oligonucleotide
uccaucgucauggauccag

SEQ ID NO: 11655 - RNA, 19 nt, Artificial Sequence
  Description of Artificial Sequence: Synthetic oligonucleotide
uuccccagagaccggcuga

SEQ ID NO: 11656 - RNA, 19 nt, Artificial Sequence
  Description of Artificial Sequence: Synthetic oligonucleotide
uccccagagaccggcugaa

SEQ ID NO: 11657 - RNA, 19 nt, Artificial Sequence
  Description of Artificial Sequence: Synthetic oligonucleotide
gauccucauucauauuggu

SEQ ID NO: 11658 - RNA, 19 nt, Artificial Sequence
  Description of Artificial Sequence: Synthetic oligonucleotide
ucucaauguggucaaccuu

SEQ ID NO: 11659 - RNA, 19 nt, Artificial Sequence
  Description of Artificial Sequence: Synthetic oligonucleotide
caauguggucaaccuucua

SEQ ID NO: 11660 - RNA, 19 nt, Artificial Sequence
  Description of Artificial Sequence: Synthetic oligonucleotide
aauguggucaaccuucuag

SEQ ID NO: 11661 - RNA, 19 nt, Artificial Sequence
  Description of Artificial Sequence: Synthetic oligonucleotide
auguggucaaccuucuagg

SEQ ID NO: 11662 - RNA, 19 nt, Artificial Sequence
  Description of Artificial Sequence: Synthetic oligonucleotide
guggucaaccuucuaggug

SEQ ID NO: 11663 - RNA, 19 nt, Artificial Sequence
  Description of Artificial Sequence: Synthetic oligonucleotide
uggucaaccuucuaggugc

SEQ ID NO: 11664 - RNA, 19 nt, Artificial Sequence
  Description of Artificial Sequence: Synthetic oligonucleotide
auggaguucuuggcaucgc

SEQ ID NO: 11665 - RNA, 19 nt, Artificial Sequence
  Description of Artificial Sequence: Synthetic oligonucleotide
uggaguucuuggcaucgcg

SEQ ID NO: 11666 - RNA, 19 nt, Artificial Sequence
  Description of Artificial Sequence: Synthetic oligonucleotide
ggaguucuuggcaucgcga

SEQ ID NO: 11667 - RNA, 19 nt, Artificial Sequence
  Description of Artificial Sequence: Synthetic oligonucleotide
gaguucuuggcaucgcgaa

SEQ ID NO: 11668 - RNA, 19 nt, Artificial Sequence
  Description of Artificial Sequence: Synthetic oligonucleotide
aguucuuggcaucgcgaaa

SEQ ID NO: 11669 - RNA, 19 nt, Artificial Sequence
  Description of Artificial Sequence: Synthetic oligonucleotide
guucuuggcaucgcgaaag

SEQ ID NO: 11670 - RNA, 19 nt, Artificial Sequence
  Description of Artificial Sequence: Synthetic oligonucleotide
uucuuggcaucgcgaaagu

SEQ ID NO: 11671 - RNA, 19 nt, Artificial Sequence
  Description of Artificial Sequence: Synthetic oligonucleotide
ucuuggcaucgcgaaagug

SEQ ID NO: 11672 - RNA, 19 nt, Artificial Sequence
  Description of Artificial Sequence: Synthetic oligonucleotide
uggcaucgcgaaaguguau

SEQ ID NO: 11673 - RNA, 19 nt, Artificial Sequence
  Description of Artificial Sequence: Synthetic oligonucleotide
ggcaucgcgaaaguguauc

SEQ ID NO: 11674 - RNA, 19 nt, Artificial Sequence
  Description of Artificial Sequence: Synthetic oligonucleotide
gcaucgcgaaaguguaucc

SEQ ID NO: 11675 - RNA, 19 nt, Artificial Sequence
  Description of Artificial Sequence: Synthetic oligonucleotide
caucgcgaaaguguaucca

SEQ ID NO: 11676 - RNA, 19 nt, Artificial Sequence
  Description of Artificial Sequence: Synthetic oligonucleotide
aucgcgaaaguguauccac

SEQ ID NO: 11677 - RNA, 19 nt, Artificial Sequence
  Description of Artificial Sequence: Synthetic oligonucleotide
gcgaaaguguauccacagg

SEQ ID NO: 11678 - RNA, 19 nt, Artificial Sequence
  Description of Artificial Sequence: Synthetic oligonucleotide
uauccacagggaccuggcg

SEQ ID NO: 11679 - RNA, 19 nt, Artificial Sequence
  Description of Artificial Sequence: Synthetic oligonucleotide
ccacagggaccuggcggca

SEQ ID NO: 11680 - RNA, 19 nt, Artificial Sequence
  Description of Artificial Sequence: Synthetic oligonucleotide
cacagggaccuggcggcac

SEQ ID NO: 11681 - RNA, 19 nt, Artificial Sequence
  Description of Artificial Sequence: Synthetic oligonucleotide
acagggaccuggcggcacg

SEQ ID NO: 11682 - RNA, 19 nt, Artificial Sequence
  Description of Artificial Sequence: Synthetic oligonucleotide
ggauggccccagaaacaau

SEQ ID NO: 11683 - RNA, 19 nt, Artificial Sequence
  Description of Artificial Sequence: Synthetic oligonucleotide
guguacacaauccagagug

SEQ ID NO: 11684 - RNA, 19 nt, Artificial Sequence
  Description of Artificial Sequence: Synthetic oligonucleotide
uguacacaauccagaguga

SEQ ID NO: 11685 - RNA, 19 nt, Artificial Sequence
  Description of Artificial Sequence: Synthetic oligonucleotide
guacacaauccagagugac

SEQ ID NO: 11686 - RNA, 19 nt, Artificial Sequence
  Description of Artificial Sequence: Synthetic oligonucleotide
uacacaauccagagugacg

SEQ ID NO: 11687 - RNA, 19 nt, Artificial Sequence
  Description of Artificial Sequence: Synthetic oligonucleotide
acacaauccagagugacgu

SEQ ID NO: 11688 - RNA, 19 nt, Artificial Sequence
  Description of Artificial Sequence: Synthetic oligonucleotide
auccagagugacgucuggu

SEQ ID NO: 11689 - RNA, 19 nt, Artificial Sequence
  Description of Artificial Sequence: Synthetic oligonucleotide
uccagagugacgucugguc

SEQ ID NO: 11690 - RNA, 19 nt, Artificial Sequence
  Description of Artificial Sequence: Synthetic oligonucleotide
ugacgucuggucuuuuggu

SEQ ID NO: 11691 - RNA, 19 nt, Artificial Sequence
  Description of Artificial Sequence: Synthetic oligonucleotide
gacgucuggucuuuuggug

SEQ ID NO: 11692 - RNA, 19 nt, Artificial Sequence
  Description of Artificial Sequence: Synthetic oligonucleotide
acgucuggucuuuuggugu

SEQ ID NO: 11693 - RNA, 19 nt, Artificial Sequence
  Description of Artificial Sequence: Synthetic oligonucleotide
gaugacaaccagacggaca

SEQ ID NO: 11694 - RNA, 19 nt, Artificial Sequence
  Description of Artificial Sequence: Synthetic oligonucleotide
gacggacagugguaugguu

SEQ ID NO: 11695 - RNA, 19 nt, Artificial Sequence
  Description of Artificial Sequence: Synthetic oligonucleotide
acggacagugguaugguuc

SEQ ID NO: 11696 - RNA, 19 nt, Artificial Sequence
  Description of Artificial Sequence: Synthetic oligonucleotide
cggacagugguaugguucu

SEQ ID NO: 11697 - RNA, 19 nt, Artificial Sequence
  Description of Artificial Sequence: Synthetic oligonucleotide
gacagugguaugguucuug

SEQ ID NO: 11698 - RNA, 19 nt, Artificial Sequence
  Description of Artificial Sequence: Synthetic oligonucleotide
acagugguaugguucuugc

SEQ ID NO: 11699 - RNA, 19 nt, Artificial Sequence
  Description of Artificial Sequence: Synthetic oligonucleotide
cagugguaugguucuugcc

SEQ ID NO: 11700 - RNA, 19 nt, Artificial Sequence
  Description of Artificial Sequence: Synthetic oligonucleotide
agugguaugguucuugccu

SEQ ID NO: 11701 - RNA, 19 nt, Artificial Sequence
  Description of Artificial Sequence: Synthetic oligonucleotide
gugguaugguucuugccuc

SEQ ID NO: 11702 - RNA, 19 nt, Artificial Sequence
  Description of Artificial Sequence: Synthetic oligonucleotide
uaauagaaggaaagaauaa

SEQ ID NO: 11703 - RNA, 19 nt, Artificial Sequence
  Description of Artificial Sequence: Synthetic oligonucleotide
augacaaccagacggacag

SEQ ID NO: 11704 - RNA, 19 nt, Artificial Sequence
  Description of Artificial Sequence: Synthetic oligonucleotide
cucgacuuccucugaaaug

SEQ ID NO: 11705 - RNA, 19 nt, Artificial Sequence
  Description of Artificial Sequence: Synthetic oligonucleotide
cgacuuccucugaaaugga

SEQ ID NO: 11706 - RNA, 19 nt, Artificial Sequence
  Description of Artificial Sequence: Synthetic oligonucleotide
gacuuccucugaaauggau

SEQ ID NO: 11707 - RNA, 19 nt, Artificial Sequence
  Description of Artificial Sequence: Synthetic oligonucleotide
cugaugucggagcucaaga

SEQ ID NO: 11708 - RNA, 19 nt, Artificial Sequence
  Description of Artificial Sequence: Synthetic oligonucleotide
uaccuacuucaaagaagaa

SEQ ID NO: 11709 - RNA, 19 nt, Artificial Sequence
  Description of Artificial Sequence: Synthetic oligonucleotide
uguaugucccaccccagau

SEQ ID NO: 11710 - RNA, 19 nt, Artificial Sequence
  Description of Artificial Sequence: Synthetic oligonucleotide
uggauggccccagaaacaa

SEQ ID NO: 11711 - DNA, 21 bp, Artificial Sequence
  Description of Artificial Sequence: Synthetic oligonucleotide
  Description of Combined DNA/RNA Molecule: Synthetic oligonucleotide
cuacacaaaucagcgauuutt

SEQ ID NO: 11712 - DNA, 21 bp, Artificial Sequence
  Description of Artificial Sequence: Synthetic oligonucleotide
  Description of Combined DNA/RNA Molecule: Synthetic oligonucleotide
aaaucgcugauuuguguagtt

SEQ ID NO: 11713 - DNA, 25 bp, Artificial Sequence
  Description of Artificial Sequence: Synthetic oligonucleotide
  Description of Combined DNA/RNA Molecule: Synthetic oligonucleotide
cuacacaaaucagcgauuuccaugt

SEQ ID NO: 11714 - RNA, 27 nt, Artificial Sequence
  Description of Artificial Sequence: Synthetic oligonucleotide
acauggaaaucgcugauuuguguaguc

SEQ ID NO: 11715 - RNA, 13 nt, Artificial Sequence
  Description of Artificial Sequence: Synthetic oligonucleotide
cuacacaaaucag

SEQ ID NO: 11716 - DNA, 11 bp, Artificial Sequence
  Description of Artificial Sequence: Synthetic oligonucleotide
  Description of Combined DNA/RNA Molecule: Synthetic oligonucleotide
gauuuccaugt

SEQ ID NO: 11717 - DNA, 21 bp, Artificial Sequence
  Description of Artificial Sequence: Synthetic oligonucleotide
  Description of Combined DNA/RNA Molecule: Synthetic oligonucleotide
ggaucuuauuucuucggagtt

SEQ ID NO: 11718 - DNA, 21 bp, Artificial Sequence
  Description of Artificial Sequence: Synthetic oligonucleotide
  Description of Combined DNA/RNA Molecule: Synthetic oligonucleotide
cuccgaagaaauaagaucctt

SEQ ID NO: 11719 - RNA, 11 nt, Artificial Sequence
  Description of Artificial Sequence: Synthetic oligonucleotide
ggaucuuauuu

SEQ ID NO: 11720 - DNA, 10 bp, Artificial Sequence
  Description of Artificial Sequence: Synthetic oligonucleotide
  Description of Combined DNA/RNA Molecule: Synthetic oligonucleotide
cuucggagtt

SEQ ID NO: 11721 - RNA, 27 nt, Artificial Sequence
  Description of Artificial Sequence: Synthetic oligonucleotide
cauugucuccgaagaaauaagauccuu

SEQ ID NO: 11722 - RNA, 8 nt, Artificial Sequence
  Description of Artificial Sequence: Synthetic oligonucleotide
  modified_base (2): LNA-G
ggaucuua

SEQ ID NO: 11723 - DNA, 17 bp, Artificial Sequence
  Description of Artificial Sequence: Synthetic oligonucleotide
  Description of Combined DNA/RNA Molecule: Synthetic oligonucleotide
uuucuucggagacaatg

SEQ ID NO: 11724 - DNA, 16 bp, Artificial Sequence
  Description of Artificial Sequence: Synthetic oligonucleotide
  Description of Combined DNA/RNA Molecule: Synthetic oligonucleotide
uucuucggagacaatg

SEQ ID NO: 11725 - DNA, 15 bp, Artificial Sequence
  Description of Artificial Sequence: Synthetic oligonucleotide
  Description of Combined DNA/RNA Molecule: Synthetic oligonucleotide
ucuucggagacaatg

SEQ ID NO: 11726 - DNA, 14 bp, Artificial Sequence
  Description of Artificial Sequence: Synthetic oligonucleotide
  Description of Combined DNA/RNA Molecule: Synthetic oligonucleotide
cuucggagacaatg

SEQ ID NO: 11727 - DNA, 13 bp, Artificial Sequence
  Description of Artificial Sequence: Synthetic oligonucleotide
  Description of Combined DNA/RNA Molecule: Synthetic oligonucleotide
uucggagacaatg

SEQ ID NO: 11728 - DNA, 12 bp, Artificial Sequence
  Description of Artificial Sequence: Synthetic oligonucleotide
  Description of Combined DNA/RNA Molecule: Synthetic oligonucleotide
ucggagacaatg

SEQ ID NO: 11729 - DNA, 11 bp, Artificial Sequence
  Description of Artificial Sequence: Synthetic oligonucleotide
  Description of Combined DNA/RNA Molecule: Synthetic oligonucleotide
cggagacaatg

SEQ ID NO: 11730 - RNA, 9 nt, Artificial Sequence
  Description of Artificial Sequence: Synthetic oligonucleotide
  modified_base (2): LNA-G
ggaucuuau

SEQ ID NO: 11731 - RNA, 10 nt, Artificial Sequence
  Description of Artificial Sequence: Synthetic oligonucleotide
  modified_base (2): LNA-G
ggaucuuauu

SEQ ID NO: 11732 - RNA, 11 nt, Artificial Sequence
  Description of Artificial Sequence: Synthetic oligonucleotide
  modified_base (2): LNA-G
ggaucuuauuu

SEQ ID NO: 11733 - RNA, 12 nt, Artificial Sequence
  Description of Artificial Sequence: Synthetic oligonucleotide
  modified_base (2): LNA-G
ggaucuuauuuc

SEQ ID NO: 11734 - RNA, 8 nt, Artificial Sequence
  Description of Artificial Sequence: Synthetic oligonucleotide
  modified_base (3): LNA-A
cuacacaa

SEQ ID NO: 11735 - DNA, 13 bp, Artificial Sequence
  Description of Artificial Sequence: Synthetic oligonucleotide
  Description of Combined DNA/RNA Molecule: Synthetic oligonucleotide
  modified_base (8): LNA-A
aucagcgauuutt

SEQ ID NO: 11736 - DNA, 12 bp, Artificial Sequence
  Description of Artificial Sequence: Synthetic oligonucleotide
  Description of Combined DNA/RNA Molecule: Synthetic oligonucleotide
  modified_base (7): LNA-A
ucagcgauuutt

SEQ ID NO: 11737 - DNA, 11 bp, Artificial Sequence
  Description of Artificial Sequence: Synthetic oligonucleotide
  Description of Combined DNA/RNA Molecule: Synthetic oligonucleotide
  modified_base (6): LNA-A
cagcgauuutt

SEQ ID NO: 11738 - DNA, 10 bp, Artificial Sequence
  Description of Artificial Sequence: Synthetic oligonucleotide
  Description of Combined DNA/RNA Molecule: Synthetic oligonucleotide
  modified_base (5): LNA-A
agcgauuutt

SEQ ID NO: 11739 - DNA, 9 bp, Artificial Sequence
  Description of Artificial Sequence: Synthetic oligonucleotide
  Description of Combined DNA/RNA Molecule: Synthetic oligonucleotide
  modified_base (4): LNA-A
gcgauuutt

SEQ ID NO: 11740 - DNA, 8 bp, Artificial Sequence
  Description of Artificial Sequence: Synthetic oligonucleotide
  Description of Combined DNA/RNA Molecule: Synthetic oligonucleotide
  modified_base (3): LNA-A
cgauuutt

SEQ ID NO: 11741 - DNA, 7 bp, Artificial Sequence
  Description of Artificial Sequence: Synthetic oligonucleotide
  Description of Combined DNA/RNA Molecule: Synthetic oligonucleotide
  modified_base (2): LNA-A
gauuutt

SEQ ID NO: 11742 - RNA, 9 nt, Artificial Sequence
  Description of Artificial Sequence: Synthetic oligonucleotide
  modified_base (3): LNA-A
cuacacaaa

SEQ ID NO: 11743 - RNA, 10 nt, Artificial Sequence
  Description of Artificial Sequence: Synthetic oligonucleotide
  modified_base (3): LNA-A
cuacacaaau

SEQ ID NO: 11744 - RNA, 11 nt, Artificial Sequence
  Description of Artificial Sequence: Synthetic oligonucleotide
  modified_base (3): LNA-A
cuacacaaauc

SEQ ID NO: 11745 - RNA, 12 nt, Artificial Sequence
  Description of Artificial Sequence: Synthetic oligonucleotide
  modified_base (3): LNA-A
cuacacaaauca

SEQ ID NO: 11746 - RNA, 13 nt, Artificial Sequence
  Description of Artificial Sequence: Synthetic oligonucleotide
  modified_base (3): LNA-A
cuacacaaaucag

SEQ ID NO: 11747 - RNA, 14 nt, Artificial Sequence
  Description of Artificial Sequence: Synthetic oligonucleotide
  modified_base (3): LNA-A
cuacacaaaucagc

SEQ ID NO: 11748 - RNA, 13 nt, Artificial Sequence
  Description of Artificial Sequence: Synthetic oligonucleotide
  modified_base (2): LNA-G
ggaucuuauuucu

SEQ ID NO: 11749 - RNA, 14 nt, Artificial Sequence
  Description of Artificial Sequence: Synthetic oligonucleotide
  modified_base (2): LNA-G
ggaucuuauuucuu

SEQ ID NO: 11750 - RNA, 8 nt, Artificial Sequence
  Description of Artificial Sequence: Synthetic oligonucleotide
  modified_base (2): LNA-G
  modified_base (8): LNA-A
ggaucuua

SEQ ID NO: 11751 - RNA, 9 nt, Artificial Sequence
  Description of Artificial Sequence: Synthetic oligonucleotide
  modified_base (2): LNA-G
  modified_base (9): LNA-U
ggaucuuau

SEQ ID NO: 11752 - RNA, 10 nt, Artificial Sequence
  Description of Artificial Sequence: Synthetic oligonucleotide
  modified_base (2): LNA-G
  modified_base (10): LNA-U
ggaucuuauu

SEQ ID NO: 11753 - RNA, 11 nt, Artificial Sequence
  Description of Artificial Sequence: Synthetic oligonucleotide
  modified_base (2): LNA-G
  modified_base (11): LNA-U
ggaucuuauuu

SEQ ID NO: 11754 - RNA, 12 nt, Artificial Sequence
  Description of Artificial Sequence: Synthetic oligonucleotide
  modified_base (2): LNA-G
  modified_base (12): LNA-C
ggaucuuauuuc

SEQ ID NO: 11755 - RNA, 13 nt, Artificial Sequence
  Description of Artificial Sequence: Synthetic oligonucleotide
  modified_base (2): LNA-G
  modified_base (13): LNA-U
ggaucuuauuucu

SEQ ID NO: 11756 - RNA, 14 nt, Artificial Sequence
  Description of Artificial Sequence: Synthetic oligonucleotide
  modified_base (2): LNA-G
  modified_base (14): LNA-U
ggaucuuauuucuu

SEQ ID NO: 11757 - DNA, 13 bp, Artificial Sequence
  Description of Artificial Sequence: Synthetic oligonucleotide
  Description of Combined DNA/RNA Molecule: Synthetic oligonucleotide
  modified_base (8): LNA-G
uuucuucggagtt

SEQ ID NO: 11758 - DNA, 12 bp, Artificial Sequence
  Description of Artificial Sequence: Synthetic oligonucleotide
  Description of Combined DNA/RNA Molecule: Synthetic oligonucleotide
  modified_base (7): LNA-G
uucuucggagtt

SEQ ID NO: 11759 - DNA, 11 bp, Artificial Sequence
  Description of Artificial Sequence: Synthetic oligonucleotide
  Description of Combined DNA/RNA Molecule: Synthetic oligonucleotide
  modified_base (6): LNA-G
ucuucggagtt

SEQ ID NO: 11760 - DNA, 10 bp, Artificial Sequence
  Description of Artificial Sequence: Synthetic oligonucleotide
  Description of Combined DNA/RNA Molecule: Synthetic oligonucleotide
  modified_base (5): LNA-G
cuucggagtt

SEQ ID NO: 11761 - DNA, 9 bp, Artificial Sequence
  Description of Artificial Sequence: Synthetic oligonucleotide
  Description of Combined DNA/RNA Molecule: Synthetic oligonucleotide
  modified_base (4): LNA-G
uucggagtt

SEQ ID NO: 11762 - DNA, 8 bp, Artificial Sequence
  Description of Artificial Sequence: Synthetic oligonucleotide
  Description of Combined DNA/RNA Molecule: Synthetic oligonucleotide
  modified_base (3): LNA-G
ucggagtt

SEQ ID NO: 11763 - DNA, 7 bp, Artificial Sequence
  Description of Artificial Sequence: Synthetic oligonucleotide
  Description of Combined DNA/RNA Molecule: Synthetic oligonucleotide
  modified_base (2): LNA-G
cggagtt

SEQ ID NO: 11764 - DNA, 13 bp, Artificial Sequence
  Description of Artificial Sequence: Synthetic oligonucleotide
  Description of Combined DNA/RNA Molecule: Synthetic oligonucleotide
  modified_base (1): LNA-U
  modified_base (8): LNA-G
uuucuucggagtt

SEQ ID NO: 11765 - DNA, 12 bp, Artificial Sequence
  Description of Artificial Sequence: Synthetic oligonucleotide
  Description of Combined DNA/RNA Molecule: Synthetic oligonucleotide
  modified_base (1): LNA-U
  modified_base (7): LNA-G
uucuucggagtt

SEQ ID NO: 11766 - DNA, 11 bp, Artificial Sequence
  Description of Artificial Sequence: Synthetic oligonucleotide
  Description of Combined DNA/RNA Molecule: Synthetic oligonucleotide
  modified_base (1): LNA-U
  modified_base (6): LNA-G
ucuucggagtt

SEQ ID NO: 11767 - DNA, 10 bp, Artificial Sequence
  Description of Artificial Sequence: Synthetic oligonucleotide
  Description of Combined DNA/RNA Molecule: Synthetic oligonucleotide
  modified_base (1): LNA-C
  modified_base (5): LNA-G
cuucggagtt

SEQ ID NO: 11768 - DNA, 9 bp, Artificial Sequence
  Description of Artificial Sequence: Synthetic oligonucleotide
  Description of Combined DNA/RNA Molecule: Synthetic oligonucleotide
  modified_base (1): LNA-U
  modified_base (4): LNA-G
uucggagtt

SEQ ID NO: 11769 - DNA, 8 bp, Artificial Sequence
  Description of Artificial Sequence: Synthetic oligonucleotide
  Description of Combined DNA/RNA Molecule: Synthetic oligonucleotide
  modified_base (1): LNA-U
  modified_base (3): LNA-G
ucggagtt

SEQ ID NO: 11770 - DNA, 7 bp, Artificial Sequence
  Description of Artificial Sequence: Synthetic oligonucleotide
  Description of Combined DNA/RNA Molecule: Synthetic oligonucleotide
  modified_base (1): LNA-C
  modified_base (2): LNA-G
cggagtt

SEQ ID NO: 11771 - DNA, 21 bp, Artificial Sequence
  Description of Artificial Sequence: Synthetic oligonucleotide
  Description of Combined DNA/RNA Molecule: Synthetic oligonucleotide
  modified_base (2): LNA-G
  modified_base (16): LNA-G
ggaucuuauuucuucggagtt

SEQ ID NO: 11772 - DNA, 25 bp, Artificial Sequence
  Description of Artificial Sequence: Synthetic oligonucleotide
  Description of Combined DNA/RNA Molecule: Synthetic oligonucleotide
ggaucuuauuucuucggagacaatg

SEQ ID NO: 11773 - RNA, 25 nt, Artificial Sequence
  Description of Artificial Sequence: Synthetic oligonucleotide
uuaagcagaguucaaaagcccuuca

SEQ ID NO: 11774 - RNA, 25 nt, Artificial Sequence
  Description of Artificial Sequence: Synthetic oligonucleotide
uaagcagaguucaaaagcccuucag

SEQ ID NO: 11775 - RNA, 25 nt, Artificial Sequence
  Description of Artificial Sequence: Synthetic oligonucleotide
agcagaguucaaaagcccuucagcg

SEQ ID NO: 11776 - RNA, 25 nt, Artificial Sequence
  Description of Artificial Sequence: Synthetic oligonucleotide
cucagggucugagugaagccgcucg

SEQ ID NO: 11777 - RNA, 25 nt, Artificial Sequence
  Description of Artificial Sequence: Synthetic oligonucleotide
caagcaacuacaucacgccagucaa

SEQ ID NO: 11778 - RNA, 25 nt, Artificial Sequence
  Description of Artificial Sequence: Synthetic oligonucleotide
aucaauggcagcuucuuggugcgug

SEQ ID NO: 11779 - RNA, 25 nt, Artificial Sequence
  Description of Artificial Sequence: Synthetic oligonucleotide
uuccagcccacauuggauucaucag

SEQ ID NO: 11780 - RNA, 25 nt, Artificial Sequence
  Description of Artificial Sequence: Synthetic oligonucleotide
cagcugagaauguggaauaccuaag

SEQ ID NO: 11781 - RNA, 25 nt, Artificial Sequence
  Description of Artificial Sequence: Synthetic oligonucleotide
aacguaucuccuaauuugaggcuca

SEQ ID NO: 11782 - RNA, 25 nt, Artificial Sequence
  Description of Artificial Sequence: Synthetic oligonucleotide
ccuaaaauaauuucucuacaauugg

SEQ ID NO: 11783 - RNA, 25 nt, Artificial Sequence
  Description of Artificial Sequence: Synthetic oligonucleotide
uggaagauucagcuaguuaggagcc

SEQ ID NO: 11784 - RNA, 25 nt, Artificial Sequence
  Description of Artificial Sequence: Synthetic oligonucleotide
uuaaacucuccuagucaauauccac

SEQ ID NO: 11785 - RNA, 25 nt, Artificial Sequence
  Description of Artificial Sequence: Synthetic oligonucleotide
cagccuacaguuauguucagucaca

SEQ ID NO: 11786 - RNA, 25 nt, Artificial Sequence
  Description of Artificial Sequence: Synthetic oligonucleotide
guuauguucagucacacacacauac

SEQ ID NO: 11787 - RNA, 25 nt, Artificial Sequence
  Description of Artificial Sequence: Synthetic oligonucleotide
cacauacaaaauguuccuuuugcuu

SEQ ID NO: 11788 - RNA, 25 nt, Artificial Sequence
  Description of Artificial Sequence: Synthetic oligonucleotide
uccuuuugcuuuuaaaguaauuuuu

SEQ ID NO: 11789 - RNA, 25 nt, Artificial Sequence
  Description of Artificial Sequence: Synthetic oligonucleotide
ugaccugugaagcaacagucaaugg

SEQ ID NO: 11790 - RNA, 25 nt, Artificial Sequence
  Description of Artificial Sequence: Synthetic oligonucleotide
cuaucucacacaucgacaaaccaau

SEQ ID NO: 11791 - RNA, 25 nt, Artificial Sequence
  Description of Artificial Sequence: Synthetic oligonucleotide
uguccucaauuguacugcuaccacu

SEQ ID NO: 11792 - RNA, 25 nt, Artificial Sequence
  Description of Artificial Sequence: Synthetic oligonucleotide
aaaccguagcuggcaagcggucuua

SEQ ID NO: 11793 - RNA, 25 nt, Artificial Sequence
  Description of Artificial Sequence: Synthetic oligonucleotide
uagcuggcaagcggucuuaccggcu

SEQ ID NO: 11794 - RNA, 25 nt, Artificial Sequence
  Description of Artificial Sequence: Synthetic oligonucleotide
uuguaugguuaaaagauggguuacc

SEQ ID NO: 11795 - RNA, 25 nt, Artificial Sequence
  Description of Artificial Sequence: Synthetic oligonucleotide
ugguuaaaagauggguuaccugcga

SEQ ID NO: 11796 - RNA, 25 nt, Artificial Sequence
  Description of Artificial Sequence: Synthetic oligonucleotide
cagggaauuauacaaucuugcugag

SEQ ID NO: 11797 - RNA, 25 nt, Artificial Sequence
  Description of Artificial Sequence: Synthetic oligonucleotide
acaaucuugcugagcauaaaacagu

SEQ ID NO: 11798 - RNA, 25 nt, Artificial Sequence
  Description of Artificial Sequence: Synthetic oligonucleotide
ccaauaaugaagaguccuuuauccu

SEQ ID NO: 11799 - RNA, 25 nt, Artificial Sequence
  Description of Artificial Sequence: Synthetic oligonucleotide
acuuuggauguuccaacgcaaguug

SEQ ID NO: 11800 - RNA, 25 nt, Artificial Sequence
  Description of Artificial Sequence: Synthetic oligonucleotide
aaugcuuccacuaaacugaaaccau

SEQ ID NO: 11801 - RNA, 25 nt, Artificial Sequence
  Description of Artificial Sequence: Synthetic oligonucleotide
gagaaaguuugacuuuguuaaauau

SEQ ID NO: 11802 - RNA, 25 nt, Artificial Sequence
  Description of Artificial Sequence: Synthetic oligonucleotide
aaagaacuacuguauauuaaaaguu

SEQ ID NO: 11803 - RNA, 25 nt, Artificial Sequence
  Description of Artificial Sequence: Synthetic oligonucleotide
uuagaaauacggguuuugacuuaac

SEQ ID NO: 11804 - RNA, 25 nt, Artificial Sequence
  Description of Artificial Sequence: Synthetic oligonucleotide
aacauggguacagcaaacucagcac

SEQ ID NO: 11805 - RNA, 25 nt, Artificial Sequence
  Description of Artificial Sequence: Synthetic oligonucleotide
aaagacacagaagaugcugaccuca

SEQ ID NO: 11806 - RNA, 25 nt, Artificial Sequence
  Description of Artificial Sequence: Synthetic oligonucleotide
uaguagggagguuuauucagaucgc

SEQ ID NO: 11807 - RNA, 25 nt, Artificial Sequence
  Description of Artificial Sequence: Synthetic oligonucleotide
gccuucugcagcaggguucugggau

SEQ ID NO: 11808 - RNA, 25 nt, Artificial Sequence
  Description of Artificial Sequence: Synthetic oligonucleotide
ggucugguacauauuggaaauuaug

SEQ ID NO: 11809 - RNA, 25 nt, Artificial Sequence
  Description of Artificial Sequence: Synthetic oligonucleotide
cuaguccuuccgauggaagcacuag

SEQ ID NO: 11810 - RNA, 25 nt, Artificial Sequence
  Description of Artificial Sequence: Synthetic oligonucleotide
ccagugaauauuguuuuuaugugga

SEQ ID NO: 11811 - RNA, 25 nt, Artificial Sequence
  Description of Artificial Sequence: Synthetic oligonucleotide
augaauucaaguuggaauugguaga

SEQ ID NO: 11812 - RNA, 25 nt, Artificial Sequence
  Description of Artificial Sequence: Synthetic oligonucleotide
caggacacagauuuagacuuggaga

SEQ ID NO: 11813 - RNA, 25 nt, Artificial Sequence
  Description of Artificial Sequence: Synthetic oligonucleotide
cucaaagcacaguuacaguauucca

SEQ ID NO: 11814 - RNA, 25 nt, Artificial Sequence
  Description of Artificial Sequence: Synthetic oligonucleotide
accacugccaccacugaugaauuaa

SEQ ID NO: 11815 - RNA, 25 nt, Artificial Sequence
  Description of Artificial Sequence: Synthetic oligonucleotide
gaaacuacuagugccacaucaucac

SEQ ID NO: 11816 - RNA, 25 nt, Artificial Sequence
  Description of Artificial Sequence: Synthetic oligonucleotide
aagucggacagccucaccaaacaga

SEQ ID NO: 11817 - RNA, 25 nt, Artificial Sequence
  Description of Artificial Sequence: Synthetic oligonucleotide
gaaagcgaaaaauggaacaugaugg

SEQ ID NO: 11818 - RNA, 25 nt, Artificial Sequence
  Description of Artificial Sequence: Synthetic oligonucleotide
cccucugauuuagcauguagacugc

SEQ ID NO: 11819 - RNA, 25 nt, Artificial Sequence
  Description of Artificial Sequence: Synthetic oligonucleotide
ugagcuauuuaaggaucuauuuaug

SEQ ID NO: 11820 - RNA, 25 nt, Artificial Sequence
  Description of Artificial Sequence: Synthetic oligonucleotide
aaaaggugaaaaagcacuauuauca

SEQ ID NO: 11821 - RNA, 25 nt, Artificial Sequence
  Description of Artificial Sequence: Synthetic oligonucleotide
gaaaaagcacuauuaucaguucugc

SEQ ID NO: 11822 - RNA, 25 nt, Artificial Sequence
  Description of Artificial Sequence: Synthetic oligonucleotide
ggcugaaaagaaagauuaaaccuac

SEQ ID NO: 11823 - RNA, 25 nt, Artificial Sequence
  Description of Artificial Sequence: Synthetic oligonucleotide
uaaacccuuauaauaaaauccuucu

SEQ ID NO: 11824 - RNA, 25 nt, Artificial Sequence
  Description of Artificial Sequence: Synthetic oligonucleotide
cauacuauuagccaaugcuguagac

SEQ ID NO: 11825 - RNA, 25 nt, Artificial Sequence
  Description of Artificial Sequence: Synthetic oligonucleotide
gacagaagcauuuugauaggaauag

SEQ ID NO: 11826 - RNA, 25 nt, Artificial Sequence
  Description of Artificial Sequence: Synthetic oligonucleotide
agagcaaauaagauaauggcccuga

SEQ ID NO: 11827 - RNA, 25 nt, Artificial Sequence
  Description of Artificial Sequence: Synthetic oligonucleotide
ccaacauuuuucucuuccucaagca

SEQ ID NO: 11828 - RNA, 25 nt, Artificial Sequence
  Description of Artificial Sequence: Synthetic oligonucleotide
uuaaguaugagaaaaguucagccca

SEQ ID NO: 11829 - RNA, 25 nt, Artificial Sequence
  Description of Artificial Sequence: Synthetic oligonucleotide
caggaauaaagauggcugcugaacc

SEQ ID NO: 11830 - RNA, 25 nt, Artificial Sequence
  Description of Artificial Sequence: Synthetic oligonucleotide
aauuugaaugaccaaguucucuuca

SEQ ID NO: 11831 - RNA, 25 nt, Artificial Sequence
  Description of Artificial Sequence: Synthetic oligonucleotide
auguauaaagauagccagccuagag

SEQ ID NO: 11832 - RNA, 25 nt, Artificial Sequence
  Description of Artificial Sequence: Synthetic oligonucleotide
ggcuguaacuaucucugugaagugu

SEQ ID NO: 11833 - RNA, 25 nt, Artificial Sequence
  Description of Artificial Sequence: Synthetic oligonucleotide
ucugugaagugugagaaaauuucaa

SEQ ID NO: 11834 - RNA, 25 nt, Artificial Sequence
  Description of Artificial Sequence: Synthetic oligonucleotide
ccuuuaaggaaaugaauccuccuga

SEQ ID NO: 11835 - RNA, 25 nt, Artificial Sequence
  Description of Artificial Sequence: Synthetic oligonucleotide
aaggauacaaaaagugacaucauau

SEQ ID NO: 11836 - RNA, 25 nt, Artificial Sequence
  Description of Artificial Sequence: Synthetic oligonucleotide
agaugcaauuugaaucuucaucaua

SEQ ID NO: 11837 - RNA, 25 nt, Artificial Sequence
  Description of Artificial Sequence: Synthetic oligonucleotide
guucaaaacgaagacuagcuauuaa

SEQ ID NO: 11838 - RNA, 25 nt, Artificial Sequence
  Description of Artificial Sequence: Synthetic oligonucleotide
gugaaaccucaucucuacuaaaaau

SEQ ID NO: 11839 - RNA, 25 nt, Artificial Sequence
  Description of Artificial Sequence: Synthetic oligonucleotide
acgaaagagaagcucuaucucgccu

SEQ ID NO: 11840 - RNA, 25 nt, Artificial Sequence
  Description of Artificial Sequence: Synthetic oligonucleotide
cuccacaagcgccuucgguccaguu

SEQ ID NO: 11841 - RNA, 25 nt, Artificial Sequence
  Description of Artificial Sequence: Synthetic oligonucleotide
gagaagauuccaaagauguagccgc

SEQ ID NO: 11842 - RNA, 25 nt, Artificial Sequence
  Description of Artificial Sequence: Synthetic oligonucleotide
aaucuggauucaaugaggagacuug

SEQ ID NO: 11843 - RNA, 25 nt, Artificial Sequence
  Description of Artificial Sequence: Synthetic oligonucleotide
agaacagauuugagaguagugagga

SEQ ID NO: 11844 - RNA, 25 nt, Artificial Sequence
  Description of Artificial Sequence: Synthetic oligonucleotide
ccagagcugugcagaugaguacaaa

SEQ ID NO: 11845 - RNA, 25 nt, Artificial Sequence
  Description of Artificial Sequence: Synthetic oligonucleotide
ccucagauuguuguuguuaaugggc

SEQ ID NO: 11846 - RNA, 25 nt, Artificial Sequence
  Description of Artificial Sequence: Synthetic oligonucleotide
cuauuuuaauuauuuuuaauuuauu

SEQ ID NO: 11847 - RNA, 25 nt, Artificial Sequence
  Description of Artificial Sequence: Synthetic oligonucleotide
uuuaauuuauuaauauuuaaauaug

SEQ ID NO: 11848 - RNA, 25 nt, Artificial Sequence
  Description of Artificial Sequence: Synthetic oligonucleotide
augcaguuugaauauccuuuguuuc

SEQ ID NO: 11849 - RNA, 25 nt, Artificial Sequence
  Description of Artificial Sequence: Synthetic oligonucleotide
caugcugcuggcgucuaaguguuug

SEQ ID NO: 11850 - RNA, 25 nt, Artificial Sequence
  Description of Artificial Sequence: Synthetic oligonucleotide
agaugugcauuucaccugugacaaa

SEQ ID NO: 11851 - RNA, 25 nt, Artificial Sequence
  Description of Artificial Sequence: Synthetic oligonucleotide
ucaaaaccugugccaggcugaauua

SEQ ID NO: 11852 - RNA, 25 nt, Artificial Sequence
  Description of Artificial Sequence: Synthetic oligonucleotide
gaauguggguagucauucuuacaau

SEQ ID NO: 11853 - RNA, 25 nt, Artificial Sequence
  Description of Artificial Sequence: Synthetic oligonucleotide
auguggguagucauucuuacaauug

SEQ ID NO: 11854 - RNA, 25 nt, Artificial Sequence
  Description of Artificial Sequence: Synthetic oligonucleotide
ugaaaaugagcaucagagaguguac

SEQ ID NO: 11855 - RNA, 25 nt, Artificial Sequence
  Description of Artificial Sequence: Synthetic oligonucleotide
uugcuuuucauguagaacucagcag

SEQ ID NO: 11856 - RNA, 25 nt, Artificial Sequence
  Description of Artificial Sequence: Synthetic oligonucleotide
uguauuucuauauuuauuuucagua

SEQ ID NO: 11857 - RNA, 25 nt, Artificial Sequence
  Description of Artificial Sequence: Synthetic oligonucleotide
uuugauuaauguuucuuaaauggaa

SEQ ID NO: 11858 - RNA, 25 nt, Artificial Sequence
  Description of Artificial Sequence: Synthetic oligonucleotide
caacguguauagugccuaaaauugu

SEQ ID NO: 11859 - RNA, 25 nt, Artificial Sequence
  Description of Artificial Sequence: Synthetic oligonucleotide
cauauccuuggcuacuaacaucugg

SEQ ID NO: 11860 - RNA, 25 nt, Artificial Sequence
  Description of Artificial Sequence: Synthetic oligonucleotide
uacuaacaucuggagacugugagcu

SEQ ID NO: 11861 - RNA, 25 nt, Artificial Sequence
  Description of Artificial Sequence: Synthetic oligonucleotide
cauaaguugugugcuuuuuauuaau

SEQ ID NO: 11862 - RNA, 25 nt, Artificial Sequence
  Description of Artificial Sequence: Synthetic oligonucleotide
gcaucauuuuggcucuucuuacauu

SEQ ID NO: 11863 - RNA, 25 nt, Artificial Sequence
  Description of Artificial Sequence: Synthetic oligonucleotide
gcucuucuuacauuuguaaaaaugu

SEQ ID NO: 11864 - RNA, 25 nt, Artificial Sequence
  Description of Artificial Sequence: Synthetic oligonucleotide
agauuaggucaucuuaauucauauu

SEQ ID NO: 11865 - RNA, 25 nt, Artificial Sequence
  Description of Artificial Sequence: Synthetic oligonucleotide
auggaauugaaagaacuaaucauga

SEQ ID NO: 11866 - RNA, 25 nt, Artificial Sequence
  Description of Artificial Sequence: Synthetic oligonucleotide
cacacucauuccuucugcucuuggg

SEQ ID NO: 11867 - RNA, 25 nt, Artificial Sequence
  Description of Artificial Sequence: Synthetic oligonucleotide
uguagagguaaccaguagcuuugag

SEQ ID NO: 11868 - RNA, 25 nt, Artificial Sequence
  Description of Artificial Sequence: Synthetic oligonucleotide
caaccacaugccacguaauauuuca

SEQ ID NO: 11869 - RNA, 25 nt, Artificial Sequence
  Description of Artificial Sequence: Synthetic oligonucleotide
ucggaaacaaguuauucucuucacu

SEQ ID NO: 11870 - RNA, 25 nt, Artificial Sequence
  Description of Artificial Sequence: Synthetic oligonucleotide
acucccaauaacuaaugcuaagaaa

SEQ ID NO: 11871 - RNA, 25 nt, Artificial Sequence
  Description of Artificial Sequence: Synthetic oligonucleotide
aaugcuaagaaaugcugaaaaucaa

SEQ ID NO: 11872 - RNA, 25 nt, Artificial Sequence
  Description of Artificial Sequence: Synthetic oligonucleotide
gucuuucucuaaauaugauuacuuu

SEQ ID NO: 11873 - RNA, 25 nt, Artificial Sequence
  Description of Artificial Sequence: Synthetic oligonucleotide
ugaauuucaggcauuuuguucuaca

SEQ ID NO: 11874 - RNA, 25 nt, Artificial Sequence
  Description of Artificial Sequence: Synthetic oligonucleotide
cgauucccucucacccgggacucuc

SEQ ID NO: 11875 - RNA, 25 nt, Artificial Sequence
  Description of Artificial Sequence: Synthetic oligonucleotide
aggaaagugaaccuuuaaaguaaag

SEQ ID NO: 11876 - RNA, 25 nt, Artificial Sequence
  Description of Artificial Sequence: Synthetic oligonucleotide
gaggcugcaugcucuggaagccugg

SEQ ID NO: 11877 - RNA, 25 nt, Artificial Sequence
  Description of Artificial Sequence: Synthetic oligonucleotide
ucucugaacagaaaacaaaagagag

SEQ ID NO: 11878 - RNA, 25 nt, Artificial Sequence
  Description of Artificial Sequence: Synthetic oligonucleotide
aacuuggcuguaaucaguuaugccg

SEQ ID NO: 11879 - RNA, 25 nt, Artificial Sequence
  Description of Artificial Sequence: Synthetic oligonucleotide
agaagccaaaauuaaaagaagucca

SEQ ID NO: 11880 - RNA, 25 nt, Artificial Sequence
  Description of Artificial Sequence: Synthetic oligonucleotide
auuaaaagaaguccaggugagguua

SEQ ID NO: 11881 - RNA, 25 nt, Artificial Sequence
  Description of Artificial Sequence: Synthetic oligonucleotide
gaauccggauuaucgggaagaggac

SEQ ID NO: 11882 - RNA, 25 nt, Artificial Sequence
  Description of Artificial Sequence: Synthetic oligonucleotide
aaugugacaucaaagcaaguauugu

SEQ ID NO: 11883 - RNA, 25 nt, Artificial Sequence
  Description of Artificial Sequence: Synthetic oligonucleotide
caucaaagcaaguauuguagcacuc

SEQ ID NO: 11884 - RNA, 25 nt, Artificial Sequence
  Description of Artificial Sequence: Synthetic oligonucleotide
agagagagaaaacaaaaccacaaau

SEQ ID NO: 11885 - RNA, 25 nt, Artificial Sequence
  Description of Artificial Sequence: Synthetic oligonucleotide
ucgcuguaguauuuaagcccauaca

SEQ ID NO: 11886 - RNA, 25 nt, Artificial Sequence
  Description of Artificial Sequence: Synthetic oligonucleotide
cgcuguaguauuuaagcccauacag

SEQ ID NO: 11887 - RNA, 25 nt, Artificial Sequence
  Description of Artificial Sequence: Synthetic oligonucleotide
auuuaagcccauacagaaaccuucc

SEQ ID NO: 11888 - RNA, 25 nt, Artificial Sequence
  Description of Artificial Sequence: Synthetic oligonucleotide
auuaaaauaaacaugguauaccuac

SEQ ID NO: 11889 - RNA, 25 nt, Artificial Sequence
  Description of Artificial Sequence: Synthetic oligonucleotide
cuguucugaucggccaguuuucgga

SEQ ID NO: 11890 - RNA, 25 nt, Artificial Sequence
  Description of Artificial Sequence: Synthetic oligonucleotide
aaauaauuugaacuuuggaacaggg

SEQ ID NO: 11891 - RNA, 25 nt, Artificial Sequence
  Description of Artificial Sequence: Synthetic oligonucleotide
ugcgaccuuaauuuaacuuuccagu

SEQ ID NO: 11892 - RNA, 25 nt, Artificial Sequence
  Description of Artificial Sequence: Synthetic oligonucleotide
cugagaaagcuaaaguuugguuuug

SEQ ID NO: 11893 - RNA, 25 nt, Artificial Sequence
  Description of Artificial Sequence: Synthetic oligonucleotide
aguaaagaugcuacuucccacugua

SEQ ID NO: 11894 - RNA, 25 nt, Artificial Sequence
  Description of Artificial Sequence: Synthetic oligonucleotide
cugcuuaauugcugauaccauauga

SEQ ID NO: 11895 - RNA, 25 nt, Artificial Sequence
  Description of Artificial Sequence: Synthetic oligonucleotide
uaccauaugaaugaaacaugggcug

SEQ ID NO: 11896 - RNA, 25 nt, Artificial Sequence
  Description of Artificial Sequence: Synthetic oligonucleotide
aacuuucuuauccaacuuuuucaua

SEQ ID NO: 11897 - RNA, 25 nt, Artificial Sequence
  Description of Artificial Sequence: Synthetic oligonucleotide
ccuugcaugacaucaugaggccgga

SEQ ID NO: 11898 - RNA, 25 nt, Artificial Sequence
  Description of Artificial Sequence: Synthetic oligonucleotide
ugaauuuguauaugacugcauuugu

SEQ ID NO: 11899 - RNA, 25 nt, Artificial Sequence
  Description of Artificial Sequence: Synthetic oligonucleotide
gaauccuaguagaauguuuacuacc

SEQ ID NO: 11900 - RNA, 25 nt, Artificial Sequence
  Description of Artificial Sequence: Synthetic oligonucleotide
gaaagggaagaauuuuuugaugaaa

SEQ ID NO: 11901 - RNA, 25 nt, Artificial Sequence
  Description of Artificial Sequence: Synthetic oligonucleotide
uaucggcaugccagugugugaauuu

SEQ ID NO: 11902 - RNA, 25 nt, Artificial Sequence
  Description of Artificial Sequence: Synthetic oligonucleotide
caccucauaguagagcaauguaugu

SEQ ID NO: 11903 - RNA, 25 nt, Artificial Sequence
  Description of Artificial Sequence: Synthetic oligonucleotide
ccagaauugccaaagcacauauaua

SEQ ID NO: 11904 - RNA, 25 nt, Artificial Sequence
  Description of Artificial Sequence: Synthetic oligonucleotide
uggugaucuggguaauaguuucucc

SEQ ID NO: 11905 - RNA, 25 nt, Artificial Sequence
  Description of Artificial Sequence: Synthetic oligonucleotide
gaucuggguaauaguuucuccaaau

SEQ ID NO: 11906 - RNA, 25 nt, Artificial Sequence
  Description of Artificial Sequence: Synthetic oligonucleotide
ggaugugaugaauacuuccuagaaa

SEQ ID NO: 11907 - RNA, 25 nt, Artificial Sequence
  Description of Artificial Sequence: Synthetic oligonucleotide
cauuuccacagcuacaccauauaug

SEQ ID NO: 11908 - RNA, 25 nt, Artificial Sequence
  Description of Artificial Sequence: Synthetic oligonucleotide
acagcuacaccauauaugaauggag

SEQ ID NO: 11909 - RNA, 25 nt, Artificial Sequence
  Description of Artificial Sequence: Synthetic oligonucleotide
ugcaguucuuacacgagaagaagau

SEQ ID NO: 11910 - RNA, 25 nt, Artificial Sequence
  Description of Artificial Sequence: Synthetic oligonucleotide
acgagaagaagaucauuuacaggga

SEQ ID NO: 11911 - RNA, 25 nt, Artificial Sequence
  Description of Artificial Sequence: Synthetic oligonucleotide
cgagaagaagaucauuuacagggac

SEQ ID NO: 11912 - RNA, 25 nt, Artificial Sequence
  Description of Artificial Sequence: Synthetic oligonucleotide
aagaagaucauuuacagggaccuga

SEQ ID NO: 11913 - RNA, 25 nt, Artificial Sequence
  Description of Artificial Sequence: Synthetic oligonucleotide
agaggaagagguguuugacugcauc

SEQ ID NO: 11914 - RNA, 25 nt, Artificial Sequence
  Description of Artificial Sequence: Synthetic oligonucleotide
gaggaagagguguuugacugcaucg

SEQ ID NO: 11915 - RNA, 25 nt, Artificial Sequence
  Description of Artificial Sequence: Synthetic oligonucleotide
cuacuuugagggcgaguucacaggg

SEQ ID NO: 11916 - RNA, 25 nt, Artificial Sequence
  Description of Artificial Sequence: Synthetic oligonucleotide
agggcaucuccuggcaccucugucc

SEQ ID NO: 11917 - RNA, 25 nt, Artificial Sequence
  Description of Artificial Sequence: Synthetic oligonucleotide
ggagugauaugguuugucuuuuuaa

SEQ ID NO: 11918 - RNA, 25 nt, Artificial Sequence
  Description of Artificial Sequence: Synthetic oligonucleotide
gagugauaugguuugucuuuuuaag

SEQ ID NO: 11919 - RNA, 25 nt, Artificial Sequence
  Description of Artificial Sequence: Synthetic oligonucleotide
ugcaguaaagauccuaaagguuguc

SEQ ID NO: 11920 - RNA, 25 nt, Artificial Sequence
  Description of Artificial Sequence: Synthetic oligonucleotide
aguaaagauccuaaagguugucgac

SEQ ID NO: 11921 - RNA, 25 nt, Artificial Sequence
  Description of Artificial Sequence: Synthetic oligonucleotide
ugacaaaggacaaccuggcaauugu

SEQ ID NO: 11922 - RNA, 25 nt, Artificial Sequence
  Description of Artificial Sequence: Synthetic oligonucleotide
gcaauugugacccaguggugcgagg

SEQ ID NO: 11923 - RNA, 25 nt, Artificial Sequence
  Description of Artificial Sequence: Synthetic oligonucleotide
aacaucauccauagagacaugaaau

SEQ ID NO: 11924 - RNA, 25 nt, Artificial Sequence
  Description of Artificial Sequence: Synthetic oligonucleotide
ugaaauccaacaauauauuucucca

SEQ ID NO: 11925 - RNA, 25 nt, Artificial Sequence
  Description of Artificial Sequence: Synthetic oligonucleotide
aacaauauauuucuccaugaaggcu

SEQ ID NO: 11926 - RNA, 25 nt, Artificial Sequence
  Description of Artificial Sequence: Synthetic oligonucleotide
aacaguaaagucacgcuggaguggu

SEQ ID NO: 11927 - RNA, 25 nt, Artificial Sequence
  Description of Artificial Sequence: Synthetic oligonucleotide
ugugaagaaaguaaaggaagagagg

SEQ ID NO: 11928 - RNA, 25 nt, Artificial Sequence
  Description of Artificial Sequence: Synthetic oligonucleotide
cuuccgagccauccuugcaucgggc

SEQ ID NO: 11929 - RNA, 25 nt, Artificial Sequence
  Description of Artificial Sequence: Synthetic oligonucleotide
aauggagguugaauauccuacugug

SEQ ID NO: 11930 - RNA, 25 nt, Artificial Sequence
  Description of Artificial Sequence: Synthetic oligonucleotide
ggagguugaauauccuacuguguaa

SEQ ID NO: 11931 - RNA, 25 nt, Artificial Sequence
  Description of Artificial Sequence: Synthetic oligonucleotide
auuuugaguuuucccuuguagugua

SEQ ID NO: 11932 - RNA, 25 nt, Artificial Sequence
  Description of Artificial Sequence: Synthetic oligonucleotide
uauccuguuuguucuuuguugauug

SEQ ID NO: 11933 - RNA, 25 nt, Artificial Sequence
  Description of Artificial Sequence: Synthetic oligonucleotide
ccuguuuguucuuuguugauugaaa

SEQ ID NO: 11934 - RNA, 25 nt, Artificial Sequence
  Description of Artificial Sequence: Synthetic oligonucleotide
cucuacagccuucuuuuucuuccau

SEQ ID NO: 11935 - RNA, 25 nt, Artificial Sequence
  Description of Artificial Sequence: Synthetic oligonucleotide
ucuuccauagcuaaucuuccuucua

SEQ ID NO: 11936 - RNA, 25 nt, Artificial Sequence
  Description of Artificial Sequence: Synthetic oligonucleotide
auaaucuuccuguugaaugcuucau

SEQ ID NO: 11937 - RNA, 25 nt, Artificial Sequence
  Description of Artificial Sequence: Synthetic oligonucleotide
uaaucuuccuguugaaugcuucaug

SEQ ID NO: 11938 - RNA, 25 nt, Artificial Sequence
  Description of Artificial Sequence: Synthetic oligonucleotide
cuucaugacuugaauucuacuuuga

SEQ ID NO: 11939 - RNA, 25 nt, Artificial Sequence
  Description of Artificial Sequence: Synthetic oligonucleotide
aagagggagagaagcaacuacagac

SEQ ID NO: 11940 - RNA, 25 nt, Artificial Sequence
  Description of Artificial Sequence: Synthetic oligonucleotide
cgucuccuaccagaccaaggucaac

SEQ ID NO: 11941 - RNA, 25 nt, Artificial Sequence
  Description of Artificial Sequence: Synthetic oligonucleotide
gaucaaucggcccgacuaucucgac

SEQ ID NO: 11942 - RNA, 25 nt, Artificial Sequence
  Description of Artificial Sequence: Synthetic oligonucleotide
ggacgaacauccaaccuucccaaac

SEQ ID NO: 11943 - RNA, 25 nt, Artificial Sequence
  Description of Artificial Sequence: Synthetic oligonucleotide
agggucggaacccaagcuuagaacu

SEQ ID NO: 11944 - RNA, 25 nt, Artificial Sequence
  Description of Artificial Sequence: Synthetic oligonucleotide
ucggaacccaagcuuagaacuuuaa

SEQ ID NO: 11945 - RNA, 25 nt, Artificial Sequence
  Description of Artificial Sequence: Synthetic oligonucleotide
acccaagcuuagaacuuuaagcaac

SEQ ID NO: 11946 - RNA, 25 nt, Artificial Sequence
  Description of Artificial Sequence: Synthetic oligonucleotide
gaacuuuaagcaacaagaccaccac

SEQ ID NO: 11947 - RNA, 25 nt, Artificial Sequence
  Description of Artificial Sequence: Synthetic oligonucleotide
acuauucaguggcgagaaauaaagu

SEQ ID NO: 11948 - RNA, 25 nt, Artificial Sequence
  Description of Artificial Sequence: Synthetic oligonucleotide
cuauucaguggcgagaaauaaaguu

SEQ ID NO: 11949 - RNA, 25 nt, Artificial Sequence
  Description of Artificial Sequence: Synthetic oligonucleotide
aaacacagauaacaggaaaugaucc

SEQ ID NO: 11950 - RNA, 25 nt, Artificial Sequence
  Description of Artificial Sequence: Synthetic oligonucleotide
cuuaagaaaagagaagaaaugaaac

SEQ ID NO: 11951 - RNA, 25 nt, Artificial Sequence
  Description of Artificial Sequence: Synthetic oligonucleotide
cugaaggaguguguuuccauccucc

SEQ ID NO: 11952 - RNA, 25 nt, Artificial Sequence
  Description of Artificial Sequence: Synthetic oligonucleotide
ucaccgcgggacugaaaaucuuuga

SEQ ID NO: 11953 - RNA, 25 nt, Artificial Sequence
  Description of Artificial Sequence: Synthetic oligonucleotide
agcagaaauaagcgugccguucagg

SEQ ID NO: 11954 - RNA, 25 nt, Artificial Sequence
  Description of Artificial Sequence: Synthetic oligonucleotide
aagcgugccguucaggguccagaag

SEQ ID NO: 11955 - RNA, 25 nt, Artificial Sequence
  Description of Artificial Sequence: Synthetic oligonucleotide
agaaacagucacucaagacugcuug

SEQ ID NO: 11956 - RNA, 25 nt, Artificial Sequence
  Description of Artificial Sequence: Synthetic oligonucleotide
agaggaagaagguccaugucuuugg

SEQ ID NO: 11957 - RNA, 25 nt, Artificial Sequence
  Description of Artificial Sequence: Synthetic oligonucleotide
uguauucaaaauaugccugaaacac

SEQ ID NO: 11958 - RNA, 25 nt, Artificial Sequence
  Description of Artificial Sequence: Synthetic oligonucleotide
auuuuccucccuuucucuguaccuc

SEQ ID NO: 11959 - RNA, 25 nt, Artificial Sequence
  Description of Artificial Sequence: Synthetic oligonucleotide
caaagaaagauagagcaagacaaga

SEQ ID NO: 11960 - RNA, 25 nt, Artificial Sequence
  Description of Artificial Sequence: Synthetic oligonucleotide
aagaaagauagagcaagacaagaaa

SEQ ID NO: 11961 - RNA, 25 nt, Artificial Sequence
  Description of Artificial Sequence: Synthetic oligonucleotide
gaaagcauuuguuuguacaagaucc

SEQ ID NO: 11962 - RNA, 25 nt, Artificial Sequence
  Description of Artificial Sequence: Synthetic oligonucleotide
ugaguuaaacgaacguacuugcaga

SEQ ID NO: 11963 - RNA, 25 nt, Artificial Sequence
  Description of Artificial Sequence: Synthetic oligonucleotide
acugauacagaacgaucgauacaga

SEQ ID NO: 11964 - RNA, 25 nt, Artificial Sequence
  Description of Artificial Sequence: Synthetic oligonucleotide
auauuauauauauauaaaaauaaau

SEQ ID NO: 11965 - RNA, 25 nt, Artificial Sequence
  Description of Artificial Sequence: Synthetic oligonucleotide
auuauauauauauaaaaauaaauau

SEQ ID NO: 11966 - RNA, 25 nt, Artificial Sequence
  Description of Artificial Sequence: Synthetic oligonucleotide
ucacuggauguauuugacugcugug

SEQ ID NO: 11967 - RNA, 25 nt, Artificial Sequence
  Description of Artificial Sequence: Synthetic oligonucleotide
cagggaagaggaggagaugagagac

SEQ ID NO: 11968 - RNA, 25 nt, Artificial Sequence
  Description of Artificial Sequence: Synthetic oligonucleotide
augaucuuuuuuuugucccacuugg

SEQ ID NO: 11969 - RNA, 27 nt, Artificial Sequence
  Description of Artificial Sequence: Synthetic oligonucleotide
ggccgugaacuccucaucaaaauaccu

SEQ ID NO: 11970 - RNA, 27 nt, Artificial Sequence
  Description of Artificial Sequence: Synthetic oligonucleotide
uggugugauggugaucaucugggccgu

SEQ ID NO: 11971 - RNA, 27 nt, Artificial Sequence
  Description of Artificial Sequence: Synthetic oligonucleotide
aaacccgcaggauaguuuucuucccua

SEQ ID NO: 11972 - RNA, 27 nt, Artificial Sequence
  Description of Artificial Sequence: Synthetic oligonucleotide
caaacuggaugaaauaaauuaaaaccc

SEQ ID NO: 11973 - RNA, 27 nt, Artificial Sequence
  Description of Artificial Sequence: Synthetic oligonucleotide
agaaguccuuaacauuucccuacguga

SEQ ID NO: 11974 - RNA, 27 nt, Artificial Sequence
  Description of Artificial Sequence: Synthetic oligonucleotide
cucugucccacuggguaaacccuggcc

SEQ ID NO: 11975 - RNA, 27 nt, Artificial Sequence
  Description of Artificial Sequence: Synthetic oligonucleotide
cacaauaacaaauuuaaaccuugcucc

SEQ ID NO: 11976 - RNA, 27 nt, Artificial Sequence
  Description of Artificial Sequence: Synthetic oligonucleotide
aaaugcauuugaacaacauaauacaca

SEQ ID NO: 11977 - RNA, 27 nt, Artificial Sequence
  Description of Artificial Sequence: Synthetic oligonucleotide
ggcuuuccugucacaaagauuaaaaac

SEQ ID NO: 11978 - RNA, 27 nt, Artificial Sequence
  Description of Artificial Sequence: Synthetic oligonucleotide
agggcuuuccugucacaaagauuaaaa

SEQ ID NO: 11979 - RNA, 27 nt, Artificial Sequence
  Description of Artificial Sequence: Synthetic oligonucleotide
ggccaugcugggagacauaagcagcag

SEQ ID NO: 11980 - RNA, 27 nt, Artificial Sequence
  Description of Artificial Sequence: Synthetic oligonucleotide
ucagggagaagcuucugaaacacuucu

SEQ ID NO: 11981 - RNA, 27 nt, Artificial Sequence
  Description of Artificial Sequence: Synthetic oligonucleotide
aagggcuucuuccuuauugauggucag

SEQ ID NO: 11982 - RNA, 27 nt, Artificial Sequence
  Description of Artificial Sequence: Synthetic oligonucleotide
ugaagggcuucuuccuuauugaugguc

SEQ ID NO: 11983 - RNA, 27 nt, Artificial Sequence
  Description of Artificial Sequence: Synthetic oligonucleotide
cgcugaagggcuucuuccuuauugaug

SEQ ID NO: 11984 - RNA, 27 nt, Artificial Sequence
  Description of Artificial Sequence: Synthetic oligonucleotide
gccgcugaagggcuucuuccuuauuga

SEQ ID NO: 11985 - RNA, 27 nt, Artificial Sequence
  Description of Artificial Sequence: Synthetic oligonucleotide
acuggccgcugaagggcuucuuccuua

SEQ ID NO: 11986 - RNA, 27 nt, Artificial Sequence
  Description of Artificial Sequence: Synthetic oligonucleotide
cggagcuuuucaccuuuaguuaugcuu

SEQ ID NO: 11987 - RNA, 27 nt, Artificial Sequence
  Description of Artificial Sequence: Synthetic oligonucleotide
ccggagcuuuucaccuuuaguuaugcu

SEQ ID NO: 11988 - RNA, 27 nt, Artificial Sequence
  Description of Artificial Sequence: Synthetic oligonucleotide
cagacuguugacuggcgugauguaguu

SEQ ID NO: 11989 - RNA, 27 nt, Artificial Sequence
  Description of Artificial Sequence: Synthetic oligonucleotide
cuuuugaacucugcuuaaauccagugg

SEQ ID NO: 11990 - RNA, 27 nt, Artificial Sequence
  Description of Artificial Sequence: Synthetic oligonucleotide
gcuuuugaacucugcuuaaauccagug

SEQ ID NO: 11991 - RNA, 27 nt, Artificial Sequence
  Description of Artificial Sequence: Synthetic oligonucleotide
agggcuuuugaacucugcuuaaaucca

SEQ ID NO: 11992 - RNA, 27 nt, Artificial Sequence
  Description of Artificial Sequence: Synthetic oligonucleotide
aagggcuuuugaacucugcuuaaaucc

SEQ ID NO: 11993 - RNA, 27 nt, Artificial Sequence
  Description of Artificial Sequence: Synthetic oligonucleotide
ugaagggcuuuugaacucugcuuaaau

SEQ ID NO: 11994 - RNA, 27 nt, Artificial Sequence
  Description of Artificial Sequence: Synthetic oligonucleotide
cugaagggcuuuugaacucugcuuaaa

SEQ ID NO: 11995 - RNA, 27 nt, Artificial Sequence
  Description of Artificial Sequence: Synthetic oligonucleotide
cgcugaagggcuuuugaacucugcuua

SEQ ID NO: 11996 - RNA, 27 nt, Artificial Sequence
  Description of Artificial Sequence: Synthetic oligonucleotide
cgagcggcuucacucagacccugaggc

SEQ ID NO: 11997 - RNA, 27 nt, Artificial Sequence
  Description of Artificial Sequence: Synthetic oligonucleotide
uugacuggcgugauguaguugcuuggg

SEQ ID NO: 11998 - RNA, 27 nt, Artificial Sequence
  Description of Artificial Sequence: Synthetic oligonucleotide
cacgcaccaagaagcugccauugaucc

SEQ ID NO: 11999 - RNA, 27 nt, Artificial Sequence
  Description of Artificial Sequence: Synthetic oligonucleotide
cugaugaauccaaugugggcuggaauc

SEQ ID NO: 12000 - RNA, 27 nt, Artificial Sequence
  Description of Artificial Sequence: Synthetic oligonucleotide
cuuagguauuccacauucucagcugug

SEQ ID NO: 12001 - RNA, 27 nt, Artificial Sequence
  Description of Artificial Sequence: Synthetic oligonucleotide
ugagccucaaauuaggagauacguuuu

SEQ ID NO: 12002 - RNA, 27 nt, Artificial Sequence
  Description of Artificial Sequence: Synthetic oligonucleotide
ccaauuguagagaaauuauuuuaggaa

SEQ ID NO: 12003 - RNA, 27 nt, Artificial Sequence
  Description of Artificial Sequence: Synthetic oligonucleotide
ggcuccuaacuagcugaaucuuccaau

SEQ ID NO: 12004 - RNA, 27 nt, Artificial Sequence
  Description of Artificial Sequence: Synthetic oligonucleotide
guggauauugacuaggagaguuuaaaa

SEQ ID NO: 12005 - RNA, 27 nt, Artificial Sequence
  Description of Artificial Sequence: Synthetic oligonucleotide
ugugacugaacauaacuguaggcugaa

SEQ ID NO: 12006 - RNA, 27 nt, Artificial Sequence
  Description of Artificial Sequence: Synthetic oligonucleotide
guaugugugugugacugaacauaacug

SEQ ID NO: 12007 - RNA, 27 nt, Artificial Sequence
  Description of Artificial Sequence: Synthetic oligonucleotide
aagcaaaaggaacauuuuguaugugug

SEQ ID NO: 12008 - RNA, 27 nt, Artificial Sequence
  Description of Artificial Sequence: Synthetic oligonucleotide
aaaaauuacuuuaaaagcaaaaggaac

SEQ ID NO: 12009 - RNA, 27 nt, Artificial Sequence
  Description of Artificial Sequence: Synthetic oligonucleotide
ccauugacuguugcuucacaggucaga

SEQ ID NO: 12010 - RNA, 27 nt, Artificial Sequence
  Description of Artificial Sequence: Synthetic oligonucleotide
auugguuugucgaugugugagauaguu

SEQ ID NO: 12011 - RNA, 27 nt, Artificial Sequence
  Description of Artificial Sequence: Synthetic oligonucleotide
agugguagcaguacaauugaggacaag

SEQ ID NO: 12012 - RNA, 27 nt, Artificial Sequence
  Description of Artificial Sequence: Synthetic oligonucleotide
uaagaccgcuugccagcuacgguuuca

SEQ ID NO: 12013 - RNA, 27 nt, Artificial Sequence
  Description of Artificial Sequence: Synthetic oligonucleotide
agccgguaagaccgcuugccagcuacg

SEQ ID NO: 12014 - RNA, 27 nt, Artificial Sequence
  Description of Artificial Sequence: Synthetic oligonucleotide
gguaacccaucuuuuaaccauacaacu

SEQ ID NO: 12015 - RNA, 27 nt, Artificial Sequence
  Description of Artificial Sequence: Synthetic oligonucleotide
ucgcagguaacccaucuuuuaaccaua

SEQ ID NO: 12016 - RNA, 27 nt, Artificial Sequence
  Description of Artificial Sequence: Synthetic oligonucleotide
cucagcaagauuguauaauucccugca

SEQ ID NO: 12017 - RNA, 27 nt, Artificial Sequence
  Description of Artificial Sequence: Synthetic oligonucleotide
acuguuuuaugcucagcaagauuguau

SEQ ID NO: 12018 - RNA, 27 nt, Artificial Sequence
  Description of Artificial Sequence: Synthetic oligonucleotide
aggauaaaggacucuucauuauuggaa

SEQ ID NO: 12019 - RNA, 27 nt, Artificial Sequence
  Description of Artificial Sequence: Synthetic oligonucleotide
caacuugcguuggaacauccaaagugu

SEQ ID NO: 12020 - RNA, 27 nt, Artificial Sequence
  Description of Artificial Sequence: Synthetic oligonucleotide
augguuucaguuuaguggaagcauuua

SEQ ID NO: 12021 - RNA, 27 nt, Artificial Sequence
  Description of Artificial Sequence: Synthetic oligonucleotide
auauuuaacaaagucaaacuuucucac

SEQ ID NO: 12022 - RNA, 27 nt, Artificial Sequence
  Description of Artificial Sequence: Synthetic oligonucleotide
aacuuuuaauauacaguaguucuuuuc

SEQ ID NO: 12023 - RNA, 27 nt, Artificial Sequence
  Description of Artificial Sequence: Synthetic oligonucleotide
guuaagucaaaacccguauuucuaaag

SEQ ID NO: 12024 - RNA, 27 nt, Artificial Sequence
  Description of Artificial Sequence: Synthetic oligonucleotide
gugcugaguuugcuguacccauguuga

SEQ ID NO: 12025 - RNA, 27 nt, Artificial Sequence
  Description of Artificial Sequence: Synthetic oligonucleotide
ugaggucagcaucuucugugucuuuac

SEQ ID NO: 12026 - RNA, 27 nt, Artificial Sequence
  Description of Artificial Sequence: Synthetic oligonucleotide
gcgaucugaauaaaccucccuacuagc

SEQ ID NO: 12027 - RNA, 27 nt, Artificial Sequence
  Description of Artificial Sequence: Synthetic oligonucleotide
aucccagaacccugcugcagaaggcca

SEQ ID NO: 12028 - RNA, 27 nt, Artificial Sequence
  Description of Artificial Sequence: Synthetic oligonucleotide
cauaauuuccaauauguaccagaccuu

SEQ ID NO: 12029 - RNA, 27 nt, Artificial Sequence
  Description of Artificial Sequence: Synthetic oligonucleotide
cuagugcuuccaucggaaggacuaggu

SEQ ID NO: 12030 - RNA, 27 nt, Artificial Sequence
  Description of Artificial Sequence: Synthetic oligonucleotide
uccacauaaaaacaauauucacuggga

SEQ ID NO: 12031 - RNA, 27 nt, Artificial Sequence
  Description of Artificial Sequence: Synthetic oligonucleotide
ucuaccaauuccaacuugaauucauug

SEQ ID NO: 12032 - RNA, 27 nt, Artificial Sequence
  Description of Artificial Sequence: Synthetic oligonucleotide
ucuccaagucuaaaucuguguccugag

SEQ ID NO: 12033 - RNA, 27 nt, Artificial Sequence
  Description of Artificial Sequence: Synthetic oligonucleotide
uggaauacuguaacugugcuuugagga

SEQ ID NO: 12034 - RNA, 27 nt, Artificial Sequence
  Description of Artificial Sequence: Synthetic oligonucleotide
uuaauucaucagugguggcagugguag

SEQ ID NO: 12035 - RNA, 27 nt, Artificial Sequence
  Description of Artificial Sequence: Synthetic oligonucleotide
gugaugauguggcacuaguaguuucuu

SEQ ID NO: 12036 - RNA, 27 nt, Artificial Sequence
  Description of Artificial Sequence: Synthetic oligonucleotide
ucuguuuggugaggcuguccgacuuug

SEQ ID NO: 12037 - RNA, 27 nt, Artificial Sequence
  Description of Artificial Sequence: Synthetic oligonucleotide
ccaucauguuccauuuuucgcuuucuc

SEQ ID NO: 12038 - RNA, 27 nt, Artificial Sequence
  Description of Artificial Sequence: Synthetic oligonucleotide
gcagucuacaugcuaaaucagagggua

SEQ ID NO: 12039 - RNA, 27 nt, Artificial Sequence
  Description of Artificial Sequence: Synthetic oligonucleotide
cauaaauagauccuuaaauagcucaaa

SEQ ID NO: 12040 - RNA, 27 nt, Artificial Sequence
  Description of Artificial Sequence: Synthetic oligonucleotide
ugauaauagugcuuuuucaccuuuuuc

SEQ ID NO: 12041 - RNA, 27 nt, Artificial Sequence
  Description of Artificial Sequence: Synthetic oligonucleotide
gcagaacugauaauagugcuuuuucac

SEQ ID NO: 12042 - RNA, 27 nt, Artificial Sequence
  Description of Artificial Sequence: Synthetic oligonucleotide
guagguuuaaucuuucuuuucagccau

SEQ ID NO: 12043 - RNA, 27 nt, Artificial Sequence
  Description of Artificial Sequence: Synthetic oligonucleotide
agaaggauuuuauuauaaggguuuaau

SEQ ID NO: 12044 - RNA, 27 nt, Artificial Sequence
  Description of Artificial Sequence: Synthetic oligonucleotide
gucuacagcauuggcuaauaguaugaa

SEQ ID NO: 12045 - RNA, 27 nt, Artificial Sequence
  Description of Artificial Sequence: Synthetic oligonucleotide
cuauuccuaucaaaaugcuucugucua

SEQ ID NO: 12046 - RNA, 27 nt, Artificial Sequence
  Description of Artificial Sequence: Synthetic oligonucleotide
ucagggccauuaucuuauuugcucuau

SEQ ID NO: 12047 - RNA, 27 nt, Artificial Sequence
  Description of Artificial Sequence: Synthetic oligonucleotide
ugcuugaggaagagaaaaauguugguc

SEQ ID NO: 12048 - RNA, 27 nt, Artificial Sequence
  Description of Artificial Sequence: Synthetic oligonucleotide
ugggcugaacuuuucucauacuuaaag

SEQ ID NO: 12049 - RNA, 27 nt, Artificial Sequence
  Description of Artificial Sequence: Synthetic oligonucleotide
gguucagcagccaucuuuauuccugcg

SEQ ID NO: 12050 - RNA, 27 nt, Artificial Sequence
  Description of Artificial Sequence: Synthetic oligonucleotide
ugaagagaacuuggucauucaaauuuc

SEQ ID NO: 12051 - RNA, 27 nt, Artificial Sequence
  Description of Artificial Sequence: Synthetic oligonucleotide
cucuaggcuggcuaucuuuauacauac

SEQ ID NO: 12052 - RNA, 27 nt, Artificial Sequence
  Description of Artificial Sequence: Synthetic oligonucleotide
acacuucacagagauaguuacagccau

SEQ ID NO: 12053 - RNA, 27 nt, Artificial Sequence
  Description of Artificial Sequence: Synthetic oligonucleotide
uugaaauuuucucacacuucacagaga

SEQ ID NO: 12054 - RNA, 27 nt, Artificial Sequence
  Description of Artificial Sequence: Synthetic oligonucleotide
ucaggaggauucauuuccuuaaaggaa

SEQ ID NO: 12055 - RNA, 27 nt, Artificial Sequence
  Description of Artificial Sequence: Synthetic oligonucleotide
auaugaugucacuuuuuguauccuuga

SEQ ID NO: 12056 - RNA, 27 nt, Artificial Sequence
  Description of Artificial Sequence: Synthetic oligonucleotide
uaugaugaagauucaaauugcaucuua

SEQ ID NO: 12057 - RNA, 27 nt, Artificial Sequence
  Description of Artificial Sequence: Synthetic oligonucleotide
uuaauagcuagucuucguuuugaacag

SEQ ID NO: 12058 - RNA, 27 nt, Artificial Sequence
  Description of Artificial Sequence: Synthetic oligonucleotide
auuuuuaguagagaugagguuucacca

SEQ ID NO: 12059 - RNA, 27 nt, Artificial Sequence
  Description of Artificial Sequence: Synthetic oligonucleotide
aggcgagauagagcuucucuuucguuc

SEQ ID NO: 12060 - RNA, 27 nt, Artificial Sequence
  Description of Artificial Sequence: Synthetic oligonucleotide
aacuggaccgaaggcgcuuguggagaa

SEQ ID NO: 12061 - RNA, 27 nt, Artificial Sequence
  Description of Artificial Sequence: Synthetic oligonucleotide
gcggcuacaucuuuggaaucuucuccu

SEQ ID NO: 12062 - RNA, 27 nt, Artificial Sequence
  Description of Artificial Sequence: Synthetic oligonucleotide
caagucuccucauugaauccagauugg

SEQ ID NO: 12063 - RNA, 27 nt, Artificial Sequence
  Description of Artificial Sequence: Synthetic oligonucleotide
uccucacuacucucaaaucuguucugg

SEQ ID NO: 12064 - RNA, 27 nt, Artificial Sequence
  Description of Artificial Sequence: Synthetic oligonucleotide
uuuguacucaucugcacagcucuggcu

SEQ ID NO: 12065 - RNA, 27 nt, Artificial Sequence
  Description of Artificial Sequence: Synthetic oligonucleotide
gcccauuaacaacaacaaucugaggug

SEQ ID NO: 12066 - RNA, 27 nt, Artificial Sequence
  Description of Artificial Sequence: Synthetic oligonucleotide
aauaaauuaaaaauaauuaaaauagug

SEQ ID NO: 12067 - RNA, 27 nt, Artificial Sequence
  Description of Artificial Sequence: Synthetic oligonucleotide
cauauuuaaauauuaauaaauuaaaaa

SEQ ID NO: 12068 - RNA, 27 nt, Artificial Sequence
  Description of Artificial Sequence: Synthetic oligonucleotide
gaaacaaaggauauucaaacugcauag

SEQ ID NO: 12069 - RNA, 27 nt, Artificial Sequence
  Description of Artificial Sequence: Synthetic oligonucleotide
caaacacuuagacgccagcagcauggg

SEQ ID NO: 12070 - RNA, 27 nt, Artificial Sequence
  Description of Artificial Sequence: Synthetic oligonucleotide
uuugucacaggugaaaugcacaucuga

SEQ ID NO: 12071 - RNA, 27 nt, Artificial Sequence
  Description of Artificial Sequence: Synthetic oligonucleotide
uaauucagccuggcacagguuuugauc

SEQ ID NO: 12072 - RNA, 27 nt, Artificial Sequence
  Description of Artificial Sequence: Synthetic oligonucleotide
auuguaagaaugacuacccacauucac

SEQ ID NO: 12073 - RNA, 27 nt, Artificial Sequence
  Description of Artificial Sequence: Synthetic oligonucleotide
caauuguaagaaugacuacccacauuc

SEQ ID NO: 12074 - RNA, 27 nt, Artificial Sequence
  Description of Artificial Sequence: Synthetic oligonucleotide
guacacucucugaugcucauuuucaua

SEQ ID NO: 12075 - RNA, 27 nt, Artificial Sequence
  Description of Artificial Sequence: Synthetic oligonucleotide
cugcugaguucuacaugaaaagcaaau

SEQ ID NO: 12076 - RNA, 27 nt, Artificial Sequence
  Description of Artificial Sequence: Synthetic oligonucleotide
uacugaaaauaaauauagaaauacaac

SEQ ID NO: 12077 - RNA, 27 nt, Artificial Sequence
  Description of Artificial Sequence: Synthetic oligonucleotide
uuccauuuaagaaacauuaaucaaaac

SEQ ID NO: 12078 - RNA, 27 nt, Artificial Sequence
  Description of Artificial Sequence: Synthetic oligonucleotide
acaauuuuaggcacuauacacguuguu

SEQ ID NO: 12079 - RNA, 27 nt, Artificial Sequence
  Description of Artificial Sequence: Synthetic oligonucleotide
ccagauguuaguagccaaggauauggu

SEQ ID NO: 12080 - RNA, 27 nt, Artificial Sequence
  Description of Artificial Sequence: Synthetic oligonucleotide
agcucacagucuccagauguuaguagc

SEQ ID NO: 12081 - RNA, 27 nt, Artificial Sequence
  Description of Artificial Sequence: Synthetic oligonucleotide
auuaauaaaaagcacacaacuuauggc

SEQ ID NO: 12082 - RNA, 27 nt, Artificial Sequence
  Description of Artificial Sequence: Synthetic oligonucleotide
aauguaagaagagccaaaaugaugcau

SEQ ID NO: 12083 - RNA, 27 nt, Artificial Sequence
  Description of Artificial Sequence: Synthetic oligonucleotide
acauuuuuacaaauguaagaagagcca

SEQ ID NO: 12084 - RNA, 27 nt, Artificial Sequence
  Description of Artificial Sequence: Synthetic oligonucleotide
aauaugaauuaagaugaccuaaucugu

SEQ ID NO: 12085 - RNA, 27 nt, Artificial Sequence
  Description of Artificial Sequence: Synthetic oligonucleotide
ucaugauuaguucuuucaauuccaucc

SEQ ID NO: 12086 - RNA, 27 nt, Artificial Sequence
  Description of Artificial Sequence: Synthetic oligonucleotide
cccaagagcagaaggaaugagugugca

SEQ ID NO: 12087 - RNA, 27 nt, Artificial Sequence
  Description of Artificial Sequence: Synthetic oligonucleotide
cucaaagcuacugguuaccucuacacc

SEQ ID NO: 12088 - RNA, 27 nt, Artificial Sequence
  Description of Artificial Sequence: Synthetic oligonucleotide
ugaaauauuacguggcaugugguuggg

SEQ ID NO: 12089 - RNA, 27 nt, Artificial Sequence
  Description of Artificial Sequence: Synthetic oligonucleotide
agugaagagaauaacuuguuuccgaag

SEQ ID NO: 12090 - RNA, 27 nt, Artificial Sequence
  Description of Artificial Sequence: Synthetic oligonucleotide
uuucuuagcauuaguuauugggaguga

SEQ ID NO: 12091 - RNA, 27 nt, Artificial Sequence
  Description of Artificial Sequence: Synthetic oligonucleotide
uugauuuucagcauuucuuagcauuag

SEQ ID NO: 12092 - RNA, 27 nt, Artificial Sequence
  Description of Artificial Sequence: Synthetic oligonucleotide
aaaguaaucauauuuagagaaagacag

SEQ ID NO: 12093 - RNA, 27 nt, Artificial Sequence
  Description of Artificial Sequence: Synthetic oligonucleotide
uguagaacaaaaugccugaaauucagc

SEQ ID NO: 12094 - RNA, 27 nt, Artificial Sequence
  Description of Artificial Sequence: Synthetic oligonucleotide
gagagucccgggugagagggaaucgcc

SEQ ID NO: 12095 - RNA, 27 nt, Artificial Sequence
  Description of Artificial Sequence: Synthetic oligonucleotide
cuuuacuuuaaagguucacuuuccuug

SEQ ID NO: 12096 - RNA, 27 nt, Artificial Sequence
  Description of Artificial Sequence: Synthetic oligonucleotide
ccaggcuuccagagcaugcagccuccu

SEQ ID NO: 12097 - RNA, 27 nt, Artificial Sequence
  Description of Artificial Sequence: Synthetic oligonucleotide
cucucuuuuguuuucuguucagagaaa

SEQ ID NO: 12098 - RNA, 27 nt, Artificial Sequence
  Description of Artificial Sequence: Synthetic oligonucleotide
cggcauaacugauuacagccaaguuca

SEQ ID NO: 12099 - RNA, 27 nt, Artificial Sequence
  Description of Artificial Sequence: Synthetic oligonucleotide
uggacuucuuuuaauuuuggcuucuuc

SEQ ID NO: 12100 - RNA, 27 nt, Artificial Sequence
  Description of Artificial Sequence: Synthetic oligonucleotide
uaaccucaccuggacuucuuuuaauuu

SEQ ID NO: 12101 - RNA, 27 nt, Artificial Sequence
  Description of Artificial Sequence: Synthetic oligonucleotide
guccucuucccgauaauccggauucag

SEQ ID NO: 12102 - RNA, 27 nt, Artificial Sequence
  Description of Artificial Sequence: Synthetic oligonucleotide
acaauacuugcuuugaugucacauuaa

SEQ ID NO: 12103 - RNA, 27 nt, Artificial Sequence
  Description of Artificial Sequence: Synthetic oligonucleotide
gagugcuacaauacuugcuuugauguc

SEQ ID NO: 12104 - RNA, 27 nt, Artificial Sequence
  Description of Artificial Sequence: Synthetic oligonucleotide
auuugugguuuuguuuucucucucucu

SEQ ID NO: 12105 - RNA, 27 nt, Artificial Sequence
  Description of Artificial Sequence: Synthetic oligonucleotide
uguaugggcuuaaauacuacagcgagg

SEQ ID NO: 12106 - RNA, 27 nt, Artificial Sequence
  Description of Artificial Sequence: Synthetic oligonucleotide
cuguaugggcuuaaauacuacagcgag

SEQ ID NO: 12107 - RNA, 27 nt, Artificial Sequence
  Description of Artificial Sequence: Synthetic oligonucleotide
ggaagguuucuguaugggcuuaaauac

SEQ ID NO: 12108 - RNA, 27 nt, Artificial Sequence
  Description of Artificial Sequence: Synthetic oligonucleotide
guagguauaccauguuuauuuuaauac

SEQ ID NO: 12109 - RNA, 27 nt, Artificial Sequence
  Description of Artificial Sequence: Synthetic oligonucleotide
uccgaaaacuggccgaucagaacagcc

SEQ ID NO: 12110 - RNA, 27 nt, Artificial Sequence
  Description of Artificial Sequence: Synthetic oligonucleotide
cccuguuccaaaguucaaauuauuugu

SEQ ID NO: 12111 - RNA, 27 nt, Artificial Sequence
  Description of Artificial Sequence: Synthetic oligonucleotide
acuggaaaguuaaauuaaggucgcaau

SEQ ID NO: 12112 - RNA, 27 nt, Artificial Sequence
  Description of Artificial Sequence: Synthetic oligonucleotide
caaaaccaaacuuuagcuuucucagcc

SEQ ID NO: 12113 - RNA, 27 nt, Artificial Sequence
  Description of Artificial Sequence: Synthetic oligonucleotide
uacagugggaaguagcaucuuuacuuu

SEQ ID NO: 12114 - RNA, 27 nt, Artificial Sequence
  Description of Artificial Sequence: Synthetic oligonucleotide
ucauaugguaucagcaauuaagcagua

SEQ ID NO: 12115 - RNA, 27 nt, Artificial Sequence
  Description of Artificial Sequence: Synthetic oligonucleotide
cagcccauguuucauucauaugguauc

SEQ ID NO: 12116 - RNA, 27 nt, Artificial Sequence
  Description of Artificial Sequence: Synthetic oligonucleotide
uaugaaaaaguuggauaagaaaguugg

SEQ ID NO: 12117 - RNA, 27 nt, Artificial Sequence
  Description of Artificial Sequence: Synthetic oligonucleotide
uccggccucaugaugucaugcaaggcu

SEQ ID NO: 12118 - RNA, 27 nt, Artificial Sequence
  Description of Artificial Sequence: Synthetic oligonucleotide
acaaaugcagucauauacaaauucagg

SEQ ID NO: 12119 - RNA, 27 nt, Artificial Sequence
  Description of Artificial Sequence: Synthetic oligonucleotide
gguaguaaacauucuacuaggauucuu

SEQ ID NO: 12120 - RNA, 27 nt, Artificial Sequence
  Description of Artificial Sequence: Synthetic oligonucleotide
uuucaucaaaaaauucuucccuuucug

SEQ ID NO: 12121 - RNA, 27 nt, Artificial Sequence
  Description of Artificial Sequence: Synthetic oligonucleotide
aaauucacacacuggcaugccgauagc

SEQ ID NO: 12122 - RNA, 27 nt, Artificial Sequence
  Description of Artificial Sequence: Synthetic oligonucleotide
acauacauugcucuacuaugaggugaa

SEQ ID NO: 12123 - RNA, 27 nt, Artificial Sequence
  Description of Artificial Sequence: Synthetic oligonucleotide
uauauaugugcuuuggcaauucuggug

SEQ ID NO: 12124 - RNA, 27 nt, Artificial Sequence
  Description of Artificial Sequence: Synthetic oligonucleotide
ggagaaacuauuacccagaucaccacu

SEQ ID NO: 12125 - RNA, 27 nt, Artificial Sequence
  Description of Artificial Sequence: Synthetic oligonucleotide
auuuggagaaacuauuacccagaucac

SEQ ID NO: 12126 - RNA, 27 nt, Artificial Sequence
  Description of Artificial Sequence: Synthetic oligonucleotide
uuucuaggaaguauucaucacauccac

SEQ ID NO: 12127 - RNA, 27 nt, Artificial Sequence
  Description of Artificial Sequence: Synthetic oligonucleotide
cauauaugguguagcuguggaaaugcg

SEQ ID NO: 12128 - RNA, 27 nt, Artificial Sequence
  Description of Artificial Sequence: Synthetic oligonucleotide
cuccauucauauaugguguagcugugg

SEQ ID NO: 12129 - RNA, 27 nt, Artificial Sequence
  Description of Artificial Sequence: Synthetic oligonucleotide
aucuucuucucguguaagaacugcagc

SEQ ID NO: 12130 - RNA, 27 nt, Artificial Sequence
  Description of Artificial Sequence: Synthetic oligonucleotide
ucccuguaaaugaucuucuucucgugu

SEQ ID NO: 12131 - RNA, 27 nt, Artificial Sequence
  Description of Artificial Sequence: Synthetic oligonucleotide
gucccuguaaaugaucuucuucucgug

SEQ ID NO: 12132 - RNA, 27 nt, Artificial Sequence
  Description of Artificial Sequence: Synthetic oligonucleotide
ucaggucccuguaaaugaucuucuucu

SEQ ID NO: 12133 - RNA, 27 nt, Artificial Sequence
  Description of Artificial Sequence: Synthetic oligonucleotide
gaugcagucaaacaccucuuccucugu

SEQ ID NO: 12134 - RNA, 27 nt, Artificial Sequence
  Description of Artificial Sequence: Synthetic oligonucleotide
cgaugcagucaaacaccucuuccucug

SEQ ID NO: 12135 - RNA, 27 nt, Artificial Sequence
  Description of Artificial Sequence: Synthetic oligonucleotide
cccugugaacucgcccucaaaguagcg

SEQ ID NO: 12136 - RNA, 27 nt, Artificial Sequence
  Description of Artificial Sequence: Synthetic oligonucleotide
ggacagaggugccaggagaugcccuca

SEQ ID NO: 12137 - RNA, 27 nt, Artificial Sequence
  Description of Artificial Sequence: Synthetic oligonucleotide
uuaaaaagacaaaccauaucacuccuu

SEQ ID NO: 12138 - RNA, 27 nt, Artificial Sequence
  Description of Artificial Sequence: Synthetic oligonucleotide
cuuaaaaagacaaaccauaucacuccu

SEQ ID NO: 12139 - RNA, 27 nt, Artificial Sequence
  Description of Artificial Sequence: Synthetic oligonucleotide
gacaaccuuuaggaucuuuacugcaac

SEQ ID NO: 12140 - RNA, 27 nt, Artificial Sequence
  Description of Artificial Sequence: Synthetic oligonucleotide
gucgacaaccuuuaggaucuuuacugc

SEQ ID NO: 12141 - RNA, 27 nt, Artificial Sequence
  Description of Artificial Sequence: Synthetic oligonucleotide
acaauugccagguuguccuuugucaug

SEQ ID NO: 12142 - RNA, 27 nt, Artificial Sequence
  Description of Artificial Sequence: Synthetic oligonucleotide
ccucgcaccacugggucacaauugcca

SEQ ID NO: 12143 - RNA, 27 nt, Artificial Sequence
  Description of Artificial Sequence: Synthetic oligonucleotide
auuucaugucucuauggaugauguucu

SEQ ID NO: 12144 - RNA, 27 nt, Artificial Sequence
  Description of Artificial Sequence: Synthetic oligonucleotide
uggagaaauauauuguuggauuucaug

SEQ ID NO: 12145 - RNA, 27 nt, Artificial Sequence
  Description of Artificial Sequence: Synthetic oligonucleotide
agccuucauggagaaauauauuguugg

SEQ ID NO: 12146 - RNA, 27 nt, Artificial Sequence
  Description of Artificial Sequence: Synthetic oligonucleotide
accacuccagcgugacuuuacuguugc

SEQ ID NO: 12147 - RNA, 27 nt, Artificial Sequence
  Description of Artificial Sequence: Synthetic oligonucleotide
ccucucuuccuuuacuuucuucacaca

SEQ ID NO: 12148 - RNA, 27 nt, Artificial Sequence
  Description of Artificial Sequence: Synthetic oligonucleotide
gcccgaugcaaggauggcucggaagcg

SEQ ID NO: 12149 - RNA, 27 nt, Artificial Sequence
  Description of Artificial Sequence: Synthetic oligonucleotide
cacaguaggauauucaaccuccauuuc

SEQ ID NO: 12150 - RNA, 27 nt, Artificial Sequence
  Description of Artificial Sequence: Synthetic oligonucleotide
uuacacaguaggauauucaaccuccau

SEQ ID NO: 12151 - RNA, 27 nt, Artificial Sequence
  Description of Artificial Sequence: Synthetic oligonucleotide
uacacuacaagggaaaacucaaaaucu

SEQ ID NO: 12152 - RNA, 27 nt, Artificial Sequence
  Description of Artificial Sequence: Synthetic oligonucleotide
caaucaacaaagaacaaacaggauaaa

SEQ ID NO: 12153 - RNA, 27 nt, Artificial Sequence
  Description of Artificial Sequence: Synthetic oligonucleotide
uuucaaucaacaaagaacaaacaggau

SEQ ID NO: 12154 - RNA, 27 nt, Artificial Sequence
  Description of Artificial Sequence: Synthetic oligonucleotide
auggaagaaaaagaaggcuguagagaa

SEQ ID NO: 12155 - RNA, 27 nt, Artificial Sequence
  Description of Artificial Sequence: Synthetic oligonucleotide
uagaaggaagauuagcuauggaagaaa

SEQ ID NO: 12156 - RNA, 27 nt, Artificial Sequence
  Description of Artificial Sequence: Synthetic oligonucleotide
augaagcauucaacaggaagauuauuu

SEQ ID NO: 12157 - RNA, 27 nt, Artificial Sequence
  Description of Artificial Sequence: Synthetic oligonucleotide
caugaagcauucaacaggaagauuauu

SEQ ID NO: 12158 - RNA, 27 nt, Artificial Sequence
  Description of Artificial Sequence: Synthetic oligonucleotide
ucaaaguagaauucaagucaugaagca

SEQ ID NO: 12159 - RNA, 27 nt, Artificial Sequence
  Description of Artificial Sequence: Synthetic oligonucleotide
gucuguaguugcuucucucccucuuag

SEQ ID NO: 12160 - RNA, 27 nt, Artificial Sequence
  Description of Artificial Sequence: Synthetic oligonucleotide
guugaccuuggucugguaggagacggc

SEQ ID NO: 12161 - RNA, 27 nt, Artificial Sequence
  Description of Artificial Sequence: Synthetic oligonucleotide
gucgagauagucgggccgauugaucuc

SEQ ID NO: 12162 - RNA, 27 nt, Artificial Sequence
  Description of Artificial Sequence: Synthetic oligonucleotide
guuugggaagguuggauguucguccuc

SEQ ID NO: 12163 - RNA, 27 nt, Artificial Sequence
  Description of Artificial Sequence: Synthetic oligonucleotide
aguucuaagcuuggguuccgacccuaa

SEQ ID NO: 12164 - RNA, 27 nt, Artificial Sequence
  Description of Artificial Sequence: Synthetic oligonucleotide
uuaaaguucuaagcuuggguuccgacc

SEQ ID NO: 12165 - RNA, 27 nt, Artificial Sequence
  Description of Artificial Sequence: Synthetic oligonucleotide
guugcuuaaaguucuaagcuuggguuc

SEQ ID NO: 12166 - RNA, 27 nt, Artificial Sequence
  Description of Artificial Sequence: Synthetic oligonucleotide
gugguggucuuguugcuuaaaguucua

SEQ ID NO: 12167 - RNA, 27 nt, Artificial Sequence
  Description of Artificial Sequence: Synthetic oligonucleotide
acuuuauuucucgccacugaauaguag

SEQ ID NO: 12168 - RNA, 27 nt, Artificial Sequence
  Description of Artificial Sequence: Synthetic oligonucleotide
aacuuuauuucucgccacugaauagua

SEQ ID NO: 12169 - RNA, 27 nt, Artificial Sequence
  Description of Artificial Sequence: Synthetic oligonucleotide
ggaucauuuccuguuaucuguguuugu

SEQ ID NO: 12170 - RNA, 27 nt, Artificial Sequence
  Description of Artificial Sequence: Synthetic oligonucleotide
guuucauuucuucucuuuucuuaaggc

SEQ ID NO: 12171 - RNA, 27 nt, Artificial Sequence
  Description of Artificial Sequence: Synthetic oligonucleotide
ggaggauggaaacacacuccuucaguu

SEQ ID NO: 12172 - RNA, 27 nt, Artificial Sequence
  Description of Artificial Sequence: Synthetic oligonucleotide
ucaaagauuuucagucccgcggugaca

SEQ ID NO: 12173 - RNA, 27 nt, Artificial Sequence
  Description of Artificial Sequence: Synthetic oligonucleotide
ccugaacggcacgcuuauuucugcugu

SEQ ID NO: 12174 - RNA, 27 nt, Artificial Sequence
  Description of Artificial Sequence: Synthetic oligonucleotide
cuucuggacccugaacggcacgcuuau

SEQ ID NO: 12175 - RNA, 27 nt, Artificial Sequence
  Description of Artificial Sequence: Synthetic oligonucleotide
caagcagucuugagugacuguuucuuc

SEQ ID NO: 12176 - RNA, 27 nt, Artificial Sequence
  Description of Artificial Sequence: Synthetic oligonucleotide
ccaaagacauggaccuucuuccucuga

SEQ ID NO: 12177 - RNA, 27 nt, Artificial Sequence
  Description of Artificial Sequence: Synthetic oligonucleotide
guguuucaggcauauuuugaauacauc

SEQ ID NO: 12178 - RNA, 27 nt, Artificial Sequence
  Description of Artificial Sequence: Synthetic oligonucleotide
gagguacagagaaagggaggaaaauag

SEQ ID NO: 12179 - RNA, 27 nt, Artificial Sequence
  Description of Artificial Sequence: Synthetic oligonucleotide
ucuugucuugcucuaucuuucuuuggu

SEQ ID NO: 12180 - RNA, 27 nt, Artificial Sequence
  Description of Artificial Sequence: Synthetic oligonucleotide
uuucuugucuugcucuaucuuucuuug

SEQ ID NO: 12181 - RNA, 27 nt, Artificial Sequence
  Description of Artificial Sequence: Synthetic oligonucleotide
ggaucuuguacaaacaaaugcuuucuc

SEQ ID NO: 12182 - RNA, 27 nt, Artificial Sequence
  Description of Artificial Sequence: Synthetic oligonucleotide
ucugcaaguacguucguuuaacucaag

SEQ ID NO: 12183 - RNA, 27 nt, Artificial Sequence
  Description of Artificial Sequence: Synthetic oligonucleotide
ucuguaucgaucguucuguaucagucu

SEQ ID NO: 12184 - RNA, 27 nt, Artificial Sequence
  Description of Artificial Sequence: Synthetic oligonucleotide
auuuauuuuuauauauauauaauauau

SEQ ID NO: 12185 - RNA, 27 nt, Artificial Sequence
  Description of Artificial Sequence: Synthetic oligonucleotide
auauuuauuuuuauauauauauaauau

SEQ ID NO: 12186 - RNA, 27 nt, Artificial Sequence
  Description of Artificial Sequence: Synthetic oligonucleotide
cacagcagucaaauacauccagugaag

SEQ ID NO: 12187 - RNA, 27 nt, Artificial Sequence
  Description of Artificial Sequence: Synthetic oligonucleotide
gucucucaucuccuccucuucccuguc

SEQ ID NO: 12188 - RNA, 27 nt, Artificial Sequence
  Description of Artificial Sequence: Synthetic oligonucleotide
ccaagugggacaaaaaaaagaucaugc

SEQ ID NO: 12189 - RNA, 14 nt, Artificial Sequence
  Description of Artificial Sequence: Synthetic oligonucleotide
guauuuugaugagg

SEQ ID NO: 12190 - RNA, 12 nt, Artificial Sequence
  Description of Artificial Sequence: Synthetic oligonucleotide
ggcccagaugau

SEQ ID NO: 12191 - RNA, 14 nt, Artificial Sequence
  Description of Artificial Sequence: Synthetic oligonucleotide
gggaagaaaacuau

SEQ ID NO: 12192 - RNA, 15 nt, Artificial Sequence
  Description of Artificial Sequence: Synthetic oligonucleotide
guuuuaauuuauuuc

SEQ ID NO: 12193 - RNA, 12 nt, Artificial Sequence
  Description of Artificial Sequence: Synthetic oligonucleotide
acguagggaaau

SEQ ID NO: 12194 - RNA, 12 nt, Artificial Sequence
  Description of Artificial Sequence: Synthetic oligonucleotide
ccaggguuuacc

SEQ ID NO: 12195 - RNA, 11 nt, Artificial Sequence
  Description of Artificial Sequence: Synthetic oligonucleotide
agcaagguuua

SEQ ID NO: 12196 - RNA, 12 nt, Artificial Sequence
  Description of Artificial Sequence: Synthetic oligonucleotide
uguauuauguug

SEQ ID NO: 12197 - RNA, 15 nt, Artificial Sequence
  Description of Artificial Sequence: Synthetic oligonucleotide
uuuuaaucuuuguga

SEQ ID NO: 12198 - RNA, 14 nt, Artificial Sequence
  Description of Artificial Sequence: Synthetic oligonucleotide
uuaaucuuugugac

SEQ ID NO: 12199 - RNA, 13 nt, Artificial Sequence
  Description of Artificial Sequence: Synthetic oligonucleotide
gcugcuuaugucu

SEQ ID NO: 12200 - RNA, 14 nt, Artificial Sequence
  Description of Artificial Sequence: Synthetic oligonucleotide
aaguguuucagaag

SEQ ID NO: 12201 - RNA, 13 nt, Artificial Sequence
  Description of Artificial Sequence: Synthetic oligonucleotide
gaccaucaauaag

SEQ ID NO: 12202 - RNA, 13 nt, Artificial Sequence
  Description of Artificial Sequence: Synthetic oligonucleotide
ccaucaauaagga

SEQ ID NO: 12203 - RNA, 14 nt, Artificial Sequence
  Description of Artificial Sequence: Synthetic oligonucleotide
ucaauaaggaagaa

SEQ ID NO: 12204 - RNA, 14 nt, Artificial Sequence
  Description of Artificial Sequence: Synthetic oligonucleotide
aauaaggaagaagc

SEQ ID NO: 12205 - RNA, 13 nt, Artificial Sequence
  Description of Artificial Sequence: Synthetic oligonucleotide
aggaagaagcccu

SEQ ID NO: 12206 - RNA, 13 nt, Artificial Sequence
  Description of Artificial Sequence: Synthetic oligonucleotide
gcauaacuaaagg

SEQ ID NO: 12207 - RNA, 14 nt, Artificial Sequence
  Description of Artificial Sequence: Synthetic oligonucleotide
cauaacuaaaggug

SEQ ID NO: 12208 - RNA, 12 nt, Artificial Sequence
  Description of Artificial Sequence: Synthetic oligonucleotide
cuacaucacgcc

SEQ ID NO: 12209 - RNA, 12 nt, Artificial Sequence
  Description of Artificial Sequence: Synthetic oligonucleotide
acuggauuuaag

SEQ ID NO: 12210 - RNA, 12 nt, Artificial Sequence
  Description of Artificial Sequence: Synthetic oligonucleotide
cuggauuuaagc

SEQ ID NO: 12211 - RNA, 13 nt, Artificial Sequence
  Description of Artificial Sequence: Synthetic oligonucleotide
gauuuaagcagag

SEQ ID NO: 12212 - RNA, 13 nt, Artificial Sequence
  Description of Artificial Sequence: Synthetic oligonucleotide
auuuaagcagagu

SEQ ID NO: 12213 - RNA, 13 nt, Artificial Sequence
  Description of Artificial Sequence: Synthetic oligonucleotide
uuaagcagaguuc

SEQ ID NO: 12214 - RNA, 13 nt, Artificial Sequence
  Description of Artificial Sequence: Synthetic oligonucleotide
uaagcagaguuca

SEQ ID NO: 12215 - RNA, 14 nt, Artificial Sequence
  Description of Artificial Sequence: Synthetic oligonucleotide
agcagaguucaaaa

SEQ ID NO: 12216 - RNA, 12 nt, Artificial Sequence
  Description of Artificial Sequence: Synthetic oligonucleotide
cucagggucuga

SEQ ID NO: 12217 - RNA, 13 nt, Artificial Sequence
  Description of Artificial Sequence: Synthetic oligonucleotide
caagcaacuacau

SEQ ID NO: 12218 - RNA, 12 nt, Artificial Sequence
  Description of Artificial Sequence: Synthetic oligonucleotide
aucaauggcagc

SEQ ID NO: 12219 - RNA, 11 nt, Artificial Sequence
  Description of Artificial Sequence: Synthetic oligonucleotide
uuccagcccac

SEQ ID NO: 12220 - RNA, 12 nt, Artificial Sequence
  Description of Artificial Sequence: Synthetic oligonucleotide
cagcugagaaug

SEQ ID NO: 12221 - RNA, 13 nt, Artificial Sequence
  Description of Artificial Sequence: Synthetic oligonucleotide
aacguaucuccua

SEQ ID NO: 12222 - RNA, 14 nt, Artificial Sequence
  Description of Artificial Sequence: Synthetic oligonucleotide
ccuaaaauaauuuc

SEQ ID NO: 12223 - RNA, 13 nt, Artificial Sequence
  Description of Artificial Sequence: Synthetic oligonucleotide
uggaagauucagc

SEQ ID NO: 12224 - RNA, 12 nt, Artificial Sequence
  Description of Artificial Sequence: Synthetic oligonucleotide
uuaaacucuccu

SEQ ID NO: 12225 - RNA, 12 nt, Artificial Sequence
  Description of Artificial Sequence: Synthetic oligonucleotide
cagccuacaguu

SEQ ID NO: 12226 - RNA, 13 nt, Artificial Sequence
  Description of Artificial Sequence: Synthetic oligonucleotide
guuauguucaguc

SEQ ID NO: 12227 - RNA, 13 nt, Artificial Sequence
  Description of Artificial Sequence: Synthetic oligonucleotide
cacauacaaaaug

SEQ ID NO: 12228 - RNA, 9 nt, Artificial Sequence
  Description of Artificial Sequence: Synthetic oligonucleotide
uccuuuugc

SEQ ID NO: 12229 - RNA, 12 nt, Artificial Sequence
  Description of Artificial Sequence: Synthetic oligonucleotide
ugaccugugaag

SEQ ID NO: 12230 - RNA, 12 nt, Artificial Sequence
  Description of Artificial Sequence: Synthetic oligonucleotide
cuaucucacaca

SEQ ID NO: 12231 - RNA, 13 nt, Artificial Sequence
  Description of Artificial Sequence: Synthetic oligonucleotide
uguccucaauugu

SEQ ID NO: 12232 - RNA, 12 nt, Artificial Sequence
  Description of Artificial Sequence: Synthetic oligonucleotide
aaaccguagcug

SEQ ID NO: 12233 - RNA, 12 nt, Artificial Sequence
  Description of Artificial Sequence: Synthetic oligonucleotide
uagcuggcaagc

SEQ ID NO: 12234 - RNA, 14 nt, Artificial Sequence
  Description of Artificial Sequence: Synthetic oligonucleotide
uuguaugguuaaaa

SEQ ID NO: 12235 - RNA, 14 nt, Artificial Sequence
  Description of Artificial Sequence: Synthetic oligonucleotide
ugguuaaaagaugg

SEQ ID NO: 12236 - RNA, 13 nt, Artificial Sequence
  Description of Artificial Sequence: Synthetic oligonucleotide
cagggaauuauac

SEQ ID NO: 12237 - RNA, 12 nt, Artificial Sequence
  Description of Artificial Sequence: Synthetic oligonucleotide
acaaucuugcug

SEQ ID NO: 12238 - RNA, 13 nt, Artificial Sequence
  Description of Artificial Sequence: Synthetic oligonucleotide
ccaauaaugaaga

SEQ ID NO: 12239 - RNA, 13 nt, Artificial Sequence
  Description of Artificial Sequence: Synthetic oligonucleotide
acuuuggauguuc

SEQ ID NO: 12240 - RNA, 12 nt, Artificial Sequence
  Description of Artificial Sequence: Synthetic oligonucleotide
aaugcuuccacu

SEQ ID NO: 12241 - RNA, 11 nt, Artificial Sequence
  Description of Artificial Sequence: Synthetic oligonucleotide
gagaaaguuug

SEQ ID NO: 12242 - RNA, 11 nt, Artificial Sequence
  Description of Artificial Sequence: Synthetic oligonucleotide
aaagaacuacu

SEQ ID NO: 12243 - RNA, 12 nt, Artificial Sequence
  Description of Artificial Sequence: Synthetic oligonucleotide
uuagaaauacgg

SEQ ID NO: 12244 - RNA, 12 nt, Artificial Sequence
  Description of Artificial Sequence: Synthetic oligonucleotide
aacauggguaca

SEQ ID NO: 12245 - RNA, 14 nt, Artificial Sequence
  Description of Artificial Sequence: Synthetic oligonucleotide
aaagacacagaaga

SEQ ID NO: 12246 - RNA, 11 nt, Artificial Sequence
  Description of Artificial Sequence: Synthetic oligonucleotide
uaguagggagg

SEQ ID NO: 12247 - RNA, 12 nt, Artificial Sequence
  Description of Artificial Sequence: Synthetic oligonucleotide
gccuucugcagc

SEQ ID NO: 12248 - RNA, 10 nt, Artificial Sequence
  Description of Artificial Sequence: Synthetic oligonucleotide
ggucugguac

SEQ ID NO: 12249 - RNA, 12 nt, Artificial Sequence
  Description of Artificial Sequence: Synthetic oligonucleotide
cuaguccuuccg

SEQ ID NO: 12250 - RNA, 12 nt, Artificial Sequence
  Description of Artificial Sequence: Synthetic oligonucleotide
ccagugaauauu

SEQ ID NO: 12251 - RNA, 13 nt, Artificial Sequence
  Description of Artificial Sequence: Synthetic oligonucleotide
augaauucaaguu

SEQ ID NO: 12252 - RNA, 12 nt, Artificial Sequence
  Description of Artificial Sequence: Synthetic oligonucleotide
caggacacagau

SEQ ID NO: 12253 - RNA, 12 nt, Artificial Sequence
  Description of Artificial Sequence: Synthetic oligonucleotide
cucaaagcacag

SEQ ID NO: 12254 - RNA, 10 nt, Artificial Sequence
  Description of Artificial Sequence: Synthetic oligonucleotide
accacugcca

SEQ ID NO: 12255 - RNA, 13 nt, Artificial Sequence
  Description of Artificial Sequence: Synthetic oligonucleotide
gaaacuacuagug

SEQ ID NO: 12256 - RNA, 12 nt, Artificial Sequence
  Description of Artificial Sequence: Synthetic oligonucleotide
aagucggacagc

SEQ ID NO: 12257 - RNA, 13 nt, Artificial Sequence
  Description of Artificial Sequence: Synthetic oligonucleotide
gaaagcgaaaaau

SEQ ID NO: 12258 - RNA, 13 nt, Artificial Sequence
  Description of Artificial Sequence: Synthetic oligonucleotide
cccucugauuuag

SEQ ID NO: 12259 - RNA, 12 nt, Artificial Sequence
  Description of Artificial Sequence: Synthetic oligonucleotide
ugagcuauuuaa

SEQ ID NO: 12260 - RNA, 13 nt, Artificial Sequence
  Description of Artificial Sequence: Synthetic oligonucleotide
aaaaggugaaaaa

SEQ ID NO: 12261 - RNA, 14 nt, Artificial Sequence
  Description of Artificial Sequence: Synthetic oligonucleotide
gaaaaagcacuauu

SEQ ID NO: 12262 - RNA, 12 nt, Artificial Sequence
  Description of Artificial Sequence: Synthetic oligonucleotide
ggcugaaaagaa

SEQ ID NO: 12263 - RNA, 12 nt, Artificial Sequence
  Description of Artificial Sequence: Synthetic oligonucleotide
uaaacccuuaua

SEQ ID NO: 12264 - RNA, 13 nt, Artificial Sequence
  Description of Artificial Sequence: Synthetic oligonucleotide
cauacuauuagcc

SEQ ID NO: 12265 - RNA, 12 nt, Artificial Sequence
  Description of Artificial Sequence: Synthetic oligonucleotide
gacagaagcauu

SEQ ID NO: 12266 - RNA, 14 nt, Artificial Sequence
  Description of Artificial Sequence: Synthetic oligonucleotide
agagcaaauaagau

SEQ ID NO: 12267 - RNA, 14 nt, Artificial Sequence
  Description of Artificial Sequence: Synthetic oligonucleotide
ccaacauuuuucuc

SEQ ID NO: 12268 - RNA, 15 nt, Artificial Sequence
  Description of Artificial Sequence: Synthetic oligonucleotide
uuaaguaugagaaaa

SEQ ID NO: 12269 - RNA, 14 nt, Artificial Sequence
  Description of Artificial Sequence: Synthetic oligonucleotide
caggaauaaagaug

SEQ ID NO: 12270 - RNA, 13 nt, Artificial Sequence
  Description of Artificial Sequence: Synthetic oligonucleotide
aauuugaaugacc

SEQ ID NO: 12271 - RNA, 14 nt, Artificial Sequence
  Description of Artificial Sequence: Synthetic oligonucleotide
auguauaaagauag

SEQ ID NO: 12272 - RNA, 12 nt, Artificial Sequence
  Description of Artificial Sequence: Synthetic oligonucleotide
ggcuguaacuau

SEQ ID NO: 12273 - RNA, 11 nt, Artificial Sequence
  Description of Artificial Sequence: Synthetic oligonucleotide
ucugugaagug

SEQ ID NO: 12274 - RNA, 14 nt, Artificial Sequence
  Description of Artificial Sequence: Synthetic oligonucleotide
ccuuuaaggaaaug

SEQ ID NO: 12275 - RNA, 13 nt, Artificial Sequence
  Description of Artificial Sequence: Synthetic oligonucleotide
aaggauacaaaaa

SEQ ID NO: 12276 - RNA, 12 nt, Artificial Sequence
  Description of Artificial Sequence: Synthetic oligonucleotide
agaugcaauuug

SEQ ID NO: 12277 - RNA, 12 nt, Artificial Sequence
  Description of Artificial Sequence: Synthetic oligonucleotide
guucaaaacgaa

SEQ ID NO: 12278 - RNA, 11 nt, Artificial Sequence
  Description of Artificial Sequence: Synthetic oligonucleotide
gugaaaccuca

SEQ ID NO: 12279 - RNA, 13 nt, Artificial Sequence
  Description of Artificial Sequence: Synthetic oligonucleotide
acgaaagagaagc

SEQ ID NO: 12280 - RNA, 12 nt, Artificial Sequence
  Description of Artificial Sequence: Synthetic oligonucleotide
cuccacaagcgc

SEQ ID NO: 12281 - RNA, 14 nt, Artificial Sequence
  Description of Artificial Sequence: Synthetic oligonucleotide
gagaagauuccaaa

SEQ ID NO: 12282 - RNA, 13 nt, Artificial Sequence
  Description of Artificial Sequence: Synthetic oligonucleotide
aaucuggauucaa

SEQ ID NO: 12283 - RNA, 13 nt, Artificial Sequence
  Description of Artificial Sequence: Synthetic oligonucleotide
agaacagauuuga

SEQ ID NO: 12284 - RNA, 11 nt, Artificial Sequence
  Description of Artificial Sequence: Synthetic oligonucleotide
ccagagcugug

SEQ ID NO: 12285 - RNA, 12 nt, Artificial Sequence
  Description of Artificial Sequence: Synthetic oligonucleotide
ccucagauuguu

SEQ ID NO: 12286 - RNA, 12 nt, Artificial Sequence
  Description of Artificial Sequence: Synthetic oligonucleotide
cuauuuuaauua

SEQ ID NO: 12287 - RNA, 13 nt, Artificial Sequence
  Description of Artificial Sequence: Synthetic oligonucleotide
uuuaauuuauuaa

SEQ ID NO: 12288 - RNA, 12 nt, Artificial Sequence
  Description of Artificial Sequence: Synthetic oligonucleotide
augcaguuugaa

SEQ ID NO: 12289 - RNA, 11 nt, Artificial Sequence
  Description of Artificial Sequence: Synthetic oligonucleotide
caugcugcugg

SEQ ID NO: 12290 - RNA, 13 nt, Artificial Sequence
  Description of Artificial Sequence: Synthetic oligonucleotide
agaugugcauuuc

SEQ ID NO: 12291 - RNA, 12 nt, Artificial Sequence
  Description of Artificial Sequence: Synthetic oligonucleotide
ucaaaaccugug

SEQ ID NO: 12292 - RNA, 11 nt, Artificial Sequence
  Description of Artificial Sequence: Synthetic oligonucleotide
gaaugugggua

SEQ ID NO: 12293 - RNA, 10 nt, Artificial Sequence
  Description of Artificial Sequence: Synthetic oligonucleotide
auguggguag

SEQ ID NO: 12294 - RNA, 13 nt, Artificial Sequence
  Description of Artificial Sequence: Synthetic oligonucleotide
ugaaaaugagcau

SEQ ID NO: 12295 - RNA, 13 nt, Artificial Sequence
  Description of Artificial Sequence: Synthetic oligonucleotide
uugcuuuucaugu

SEQ ID NO: 12296 - RNA, 12 nt, Artificial Sequence
  Description of Artificial Sequence: Synthetic oligonucleotide
uguauuucuaua

SEQ ID NO: 12297 - RNA, 13 nt, Artificial Sequence
  Description of Artificial Sequence: Synthetic oligonucleotide
uuugauuaauguu

SEQ ID NO: 12298 - RNA, 12 nt, Artificial Sequence
  Description of Artificial Sequence: Synthetic oligonucleotide
caacguguauag

SEQ ID NO: 12299 - RNA, 12 nt, Artificial Sequence
  Description of Artificial Sequence: Synthetic oligonucleotide
cauauccuuggc

SEQ ID NO: 12300 - RNA, 13 nt, Artificial Sequence
  Description of Artificial Sequence: Synthetic oligonucleotide
uacuaacaucugg

SEQ ID NO: 12301 - RNA, 11 nt, Artificial Sequence
  Description of Artificial Sequence: Synthetic oligonucleotide
cauaaguugug

SEQ ID NO: 12302 - RNA, 12 nt, Artificial Sequence
  Description of Artificial Sequence: Synthetic oligonucleotide
gcaucauuuugg

SEQ ID NO: 12303 - RNA, 10 nt, Artificial Sequence
  Description of Artificial Sequence: Synthetic oligonucleotide
gcucuucuua

SEQ ID NO: 12304 - RNA, 10 nt, Artificial Sequence
  Description of Artificial Sequence: Synthetic oligonucleotide
agauuagguc

SEQ ID NO: 12305 - RNA, 12 nt, Artificial Sequence
  Description of Artificial Sequence: Synthetic oligonucleotide
auggaauugaaa

SEQ ID NO: 12306 - RNA, 13 nt, Artificial Sequence
  Description of Artificial Sequence: Synthetic oligonucleotide
cacacucauuccu

SEQ ID NO: 12307 - RNA, 12 nt, Artificial Sequence
  Description of Artificial Sequence: Synthetic oligonucleotide
uguagagguaac

SEQ ID NO: 12308 - RNA, 11 nt, Artificial Sequence
  Description of Artificial Sequence: Synthetic oligonucleotide
caaccacaugc

SEQ ID NO: 12309 - RNA, 12 nt, Artificial Sequence
  Description of Artificial Sequence: Synthetic oligonucleotide
ucggaaacaagu

SEQ ID NO: 12310 - RNA, 11 nt, Artificial Sequence
  Description of Artificial Sequence: Synthetic oligonucleotide
acucccaauaa

SEQ ID NO: 12311 - RNA, 13 nt, Artificial Sequence
  Description of Artificial Sequence: Synthetic oligonucleotide
aaugcuaagaaau

SEQ ID NO: 12312 - RNA, 11 nt, Artificial Sequence
  Description of Artificial Sequence: Synthetic oligonucleotide
gucuuucucua

SEQ ID NO: 12313 - RNA, 11 nt, Artificial Sequence
  Description of Artificial Sequence: Synthetic oligonucleotide
ugaauuucagg

SEQ ID NO: 12314 - RNA, 13 nt, Artificial Sequence
  Description of Artificial Sequence: Synthetic oligonucleotide
cgauucccucuca

SEQ ID NO: 12315 - RNA, 11 nt, Artificial Sequence
  Description of Artificial Sequence: Synthetic oligonucleotide
aggaaagugaa

SEQ ID NO: 12316 - RNA, 12 nt, Artificial Sequence
  Description of Artificial Sequence: Synthetic oligonucleotide
gaggcugcaugc

SEQ ID NO: 12317 - RNA, 11 nt, Artificial Sequence
  Description of Artificial Sequence: Synthetic oligonucleotide
ucucugaacag

SEQ ID NO: 12318 - RNA, 12 nt, Artificial Sequence
  Description of Artificial Sequence: Synthetic oligonucleotide
aacuuggcugua

SEQ ID NO: 12319 - RNA, 12 nt, Artificial Sequence
  Description of Artificial Sequence: Synthetic oligonucleotide
agaagccaaaau

SEQ ID NO: 12320 - RNA, 14 nt, Artificial Sequence
  Description of Artificial Sequence: Synthetic oligonucleotide
auuaaaagaagucc

SEQ ID NO: 12321 - RNA, 14 nt, Artificial Sequence
  Description of Artificial Sequence: Synthetic oligonucleotide
gaauccggauuauc

SEQ ID NO: 12322 - RNA, 12 nt, Artificial Sequence
  Description of Artificial Sequence: Synthetic oligonucleotide
aaugugacauca

SEQ ID NO: 12323 - RNA, 13 nt, Artificial Sequence
  Description of Artificial Sequence: Synthetic oligonucleotide
caucaaagcaagu

SEQ ID NO: 12324 - RNA, 11 nt, Artificial Sequence
  Description of Artificial Sequence: Synthetic oligonucleotide
agagagagaaa

SEQ ID NO: 12325 - RNA, 13 nt, Artificial Sequence
  Description of Artificial Sequence: Synthetic oligonucleotide
ucgcuguaguauu

SEQ ID NO: 12326 - RNA, 14 nt, Artificial Sequence
  Description of Artificial Sequence: Synthetic oligonucleotide
cgcuguaguauuua

SEQ ID NO: 12327 - RNA, 13 nt, Artificial Sequence
  Description of Artificial Sequence: Synthetic oligonucleotide
auuuaagcccaua

SEQ ID NO: 12328 - RNA, 15 nt, Artificial Sequence
  Description of Artificial Sequence: Synthetic oligonucleotide
auuaaaauaaacaug

SEQ ID NO: 12329 - RNA, 12 nt, Artificial Sequence
  Description of Artificial Sequence: Synthetic oligonucleotide
cuguucugaucg

SEQ ID NO: 12330 - RNA, 16 nt, Artificial Sequence
  Description of Artificial Sequence: Synthetic oligonucleotide
aaauaauuugaacuuu

SEQ ID NO: 12331 - RNA, 12 nt, Artificial Sequence
  Description of Artificial Sequence: Synthetic oligonucleotide
ugcgaccuuaau

SEQ ID NO: 12332 - RNA, 11 nt, Artificial Sequence
  Description of Artificial Sequence: Synthetic oligonucleotide
cugagaaagcu

SEQ ID NO: 12333 - RNA, 13 nt, Artificial Sequence
  Description of Artificial Sequence: Synthetic oligonucleotide
aguaaagaugcua

SEQ ID NO: 12334 - RNA, 12 nt, Artificial Sequence
  Description of Artificial Sequence: Synthetic oligonucleotide
cugcuuaauugc

SEQ ID NO: 12335 - RNA, 14 nt, Artificial Sequence
  Description of Artificial Sequence: Synthetic oligonucleotide
uaccauaugaauga

SEQ ID NO: 12336 - RNA, 12 nt, Artificial Sequence
  Description of Artificial Sequence: Synthetic oligonucleotide
aacuuucuuauc

SEQ ID NO: 12337 - RNA, 13 nt, Artificial Sequence
  Description of Artificial Sequence: Synthetic oligonucleotide
ccuugcaugacau

SEQ ID NO: 12338 - RNA, 14 nt, Artificial Sequence
  Description of Artificial Sequence: Synthetic oligonucleotide
ugaauuuguauaug

SEQ ID NO: 12339 - RNA, 12 nt, Artificial Sequence
  Description of Artificial Sequence: Synthetic oligonucleotide
gaauccuaguag

SEQ ID NO: 12340 - RNA, 10 nt, Artificial Sequence
  Description of Artificial Sequence: Synthetic oligonucleotide
gaaagggaag

SEQ ID NO: 12341 - RNA, 11 nt, Artificial Sequence
  Description of Artificial Sequence: Synthetic oligonucleotide
uaucggcaugc

SEQ ID NO: 12342 - RNA, 12 nt, Artificial Sequence
  Description of Artificial Sequence: Synthetic oligonucleotide
caccucauagua

SEQ ID NO: 12343 - RNA, 11 nt, Artificial Sequence
  Description of Artificial Sequence: Synthetic oligonucleotide
ccagaauugcc

SEQ ID NO: 12344 - RNA, 11 nt, Artificial Sequence
  Description of Artificial Sequence: Synthetic oligonucleotide
uggugaucugg

SEQ ID NO: 12345 - RNA, 12 nt, Artificial Sequence
  Description of Artificial Sequence: Synthetic oligonucleotide
gaucuggguaau

SEQ ID NO: 12346 - RNA, 12 nt, Artificial Sequence
  Description of Artificial Sequence: Synthetic oligonucleotide
ggaugugaugaa

SEQ ID NO: 12347 - RNA, 12 nt, Artificial Sequence
  Description of Artificial Sequence: Synthetic oligonucleotide
cauuuccacagc

SEQ ID NO: 12348 - RNA, 11 nt, Artificial Sequence
  Description of Artificial Sequence: Synthetic oligonucleotide
acagcuacacc

SEQ ID NO: 12349 - RNA, 12 nt, Artificial Sequence
  Description of Artificial Sequence: Synthetic oligonucleotide
ugcaguucuuac

SEQ ID NO: 12350 - RNA, 12 nt, Artificial Sequence
  Description of Artificial Sequence: Synthetic oligonucleotide
acgagaagaaga

SEQ ID NO: 12351 - RNA, 12 nt, Artificial Sequence
  Description of Artificial Sequence: Synthetic oligonucleotide
cgagaagaagau

SEQ ID NO: 12352 - RNA, 15 nt, Artificial Sequence
  Description of Artificial Sequence: Synthetic oligonucleotide
aagaagaucauuuac

SEQ ID NO: 12353 - RNA, 11 nt, Artificial Sequence
  Description of Artificial Sequence: Synthetic oligonucleotide
agaggaagagg

SEQ ID NO: 12354 - RNA, 12 nt, Artificial Sequence
  Description of Artificial Sequence: Synthetic oligonucleotide
gaggaagaggug

SEQ ID NO: 12355 - RNA, 13 nt, Artificial Sequence
  Description of Artificial Sequence: Synthetic oligonucleotide
cuacuuugagggc

SEQ ID NO: 12356 - RNA, 12 nt, Artificial Sequence
  Description of Artificial Sequence: Synthetic oligonucleotide
agggcaucuccu

SEQ ID NO: 12357 - RNA, 10 nt, Artificial Sequence
  Description of Artificial Sequence: Synthetic oligonucleotide
ggagugauau

SEQ ID NO: 12358 - RNA, 11 nt, Artificial Sequence
  Description of Artificial Sequence: Synthetic oligonucleotide
gagugauaugg

SEQ ID NO: 12359 - RNA, 12 nt, Artificial Sequence
  Description of Artificial Sequence: Synthetic oligonucleotide
ugcaguaaagau

SEQ ID NO: 12360 - RNA, 13 nt, Artificial Sequence
  Description of Artificial Sequence: Synthetic oligonucleotide
aguaaagauccua

SEQ ID NO: 12361 - RNA, 12 nt, Artificial Sequence
  Description of Artificial Sequence: Synthetic oligonucleotide
ugacaaaggaca

SEQ ID NO: 12362 - RNA, 13 nt, Artificial Sequence
  Description of Artificial Sequence: Synthetic oligonucleotide
gcaauugugaccc

SEQ ID NO: 12363 - RNA, 12 nt, Artificial Sequence
  Description of Artificial Sequence: Synthetic oligonucleotide
aacaucauccau

SEQ ID NO: 12364 - RNA, 12 nt, Artificial Sequence
  Description of Artificial Sequence: Synthetic oligonucleotide
ugaaauccaaca

SEQ ID NO: 12365 - RNA, 15 nt, Artificial Sequence
  Description of Artificial Sequence: Synthetic oligonucleotide
aacaauauauuucuc

SEQ ID NO: 12366 - RNA, 14 nt, Artificial Sequence
  Description of Artificial Sequence: Synthetic oligonucleotide
aacaguaaagucac

SEQ ID NO: 12367 - RNA, 14 nt, Artificial Sequence
  Description of Artificial Sequence: Synthetic oligonucleotide
ugugaagaaaguaa

SEQ ID NO: 12368 - RNA, 13 nt, Artificial Sequence
  Description of Artificial Sequence: Synthetic oligonucleotide
cuuccgagccauc

SEQ ID NO: 12369 - RNA, 12 nt, Artificial Sequence
  Description of Artificial Sequence: Synthetic oligonucleotide
aauggagguuga

SEQ ID NO: 12370 - RNA, 12 nt, Artificial Sequence
  Description of Artificial Sequence: Synthetic oligonucleotide
ggagguugaaua

SEQ ID NO: 12371 - RNA, 13 nt, Artificial Sequence
  Description of Artificial Sequence: Synthetic oligonucleotide
auuuugaguuuuc

SEQ ID NO: 12372 - RNA, 12 nt, Artificial Sequence
  Description of Artificial Sequence: Synthetic oligonucleotide
uauccuguuugu

SEQ ID NO: 12373 - RNA, 11 nt, Artificial Sequence
  Description of Artificial Sequence: Synthetic oligonucleotide
ccuguuuguuc

SEQ ID NO: 12374 - RNA, 10 nt, Artificial Sequence
  Description of Artificial Sequence: Synthetic oligonucleotide
cucuacagcc

SEQ ID NO: 12375 - RNA, 12 nt, Artificial Sequence
  Description of Artificial Sequence: Synthetic oligonucleotide
ucuuccauagcu

SEQ ID NO: 12376 - RNA, 12 nt, Artificial Sequence
  Description of Artificial Sequence: Synthetic oligonucleotide
auaaucuuccug

SEQ ID NO: 12377 - RNA, 12 nt, Artificial Sequence
  Description of Artificial Sequence: Synthetic oligonucleotide
uaaucuuccugu

SEQ ID NO: 12378 - RNA, 12 nt, Artificial Sequence
  Description of Artificial Sequence: Synthetic oligonucleotide
cuucaugacuug

SEQ ID NO: 12379 - RNA, 12 nt, Artificial Sequence
  Description of Artificial Sequence: Synthetic oligonucleotide
aagagggagaga

SEQ ID NO: 12380 - RNA, 12 nt, Artificial Sequence
  Description of Artificial Sequence: Synthetic oligonucleotide
cgucuccuacca

SEQ ID NO: 12381 - RNA, 12 nt, Artificial Sequence
  Description of Artificial Sequence: Synthetic oligonucleotide
gaucaaucggcc

SEQ ID NO: 12382 - RNA, 12 nt, Artificial Sequence
  Description of Artificial Sequence: Synthetic oligonucleotide
ggacgaacaucc

SEQ ID NO: 12383 - RNA, 11 nt, Artificial Sequence
  Description of Artificial Sequence: Synthetic oligonucleotide
agggucggaac

SEQ ID NO: 12384 - RNA, 10 nt, Artificial Sequence
  Description of Artificial Sequence: Synthetic oligonucleotide
ucggaaccca

SEQ ID NO: 12385 - RNA, 11 nt, Artificial Sequence
  Description of Artificial Sequence: Synthetic oligonucleotide
acccaagcuua

SEQ ID NO: 12386 - RNA, 14 nt, Artificial Sequence
  Description of Artificial Sequence: Synthetic oligonucleotide
gaacuuuaagcaac

SEQ ID NO: 12387 - RNA, 11 nt, Artificial Sequence
  Description of Artificial Sequence: Synthetic oligonucleotide
acuauucagug

SEQ ID NO: 12388 - RNA, 11 nt, Artificial Sequence
  Description of Artificial Sequence: Synthetic oligonucleotide
cuauucagugg

SEQ ID NO: 12389 - RNA, 13 nt, Artificial Sequence
  Description of Artificial Sequence: Synthetic oligonucleotide
aaacacagauaac

SEQ ID NO: 12390 - RNA, 12 nt, Artificial Sequence
  Description of Artificial Sequence: Synthetic oligonucleotide
cuuaagaaaaga

SEQ ID NO: 12391 - RNA, 12 nt, Artificial Sequence
  Description of Artificial Sequence: Synthetic oligonucleotide
cugaaggagugu

SEQ ID NO: 12392 - RNA, 10 nt, Artificial Sequence
  Description of Artificial Sequence: Synthetic oligonucleotide
ucaccgcggg

SEQ ID NO: 12393 - RNA, 14 nt, Artificial Sequence
  Description of Artificial Sequence: Synthetic oligonucleotide
agcagaaauaagcg

SEQ ID NO: 12394 - RNA, 12 nt, Artificial Sequence
  Description of Artificial Sequence: Synthetic oligonucleotide
aagcgugccguu

SEQ ID NO: 12395 - RNA, 12 nt, Artificial Sequence
  Description of Artificial Sequence: Synthetic oligonucleotide
agaaacagucac

SEQ ID NO: 12396 - RNA, 12 nt, Artificial Sequence
  Description of Artificial Sequence: Synthetic oligonucleotide
agaggaagaagg

SEQ ID NO: 12397 - RNA, 14 nt, Artificial Sequence
  Description of Artificial Sequence: Synthetic oligonucleotide
uguauucaaaauau

SEQ ID NO: 12398 - RNA, 13 nt, Artificial Sequence
  Description of Artificial Sequence: Synthetic oligonucleotide
auuuuccucccuu

SEQ ID NO: 12399 - RNA, 13 nt, Artificial Sequence
  Description of Artificial Sequence: Synthetic oligonucleotide
caaagaaagauag

SEQ ID NO: 12400 - RNA, 12 nt, Artificial Sequence
  Description of Artificial Sequence: Synthetic oligonucleotide
aagaaagauaga

SEQ ID NO: 12401 - RNA, 13 nt, Artificial Sequence
  Description of Artificial Sequence: Synthetic oligonucleotide
gaaagcauuuguu

SEQ ID NO: 12402 - RNA, 13 nt, Artificial Sequence
  Description of Artificial Sequence: Synthetic oligonucleotide
ugaguuaaacgaa

SEQ ID NO: 12403 - RNA, 12 nt, Artificial Sequence
  Description of Artificial Sequence: Synthetic oligonucleotide
acugauacagaa

SEQ ID NO: 12404 - RNA, 12 nt, Artificial Sequence
  Description of Artificial Sequence: Synthetic oligonucleotide
auauuauauaua

SEQ ID NO: 12405 - RNA, 12 nt, Artificial Sequence
  Description of Artificial Sequence: Synthetic oligonucleotide
auuauauauaua

SEQ ID NO: 12406 - RNA, 12 nt, Artificial Sequence
  Description of Artificial Sequence: Synthetic oligonucleotide
ucacuggaugua

SEQ ID NO: 12407 - RNA, 12 nt, Artificial Sequence
  Description of Artificial Sequence: Synthetic oligonucleotide
cagggaagagga

SEQ ID NO: 12408 - RNA, 15 nt, Artificial Sequence
  Description of Artificial Sequence: Synthetic oligonucleotide
augaucuuuuuuuug

SEQ ID NO: 12409 - RNA, 11 nt, Artificial Sequence
  Description of Artificial Sequence: Synthetic oligonucleotide
aguucacggcc

SEQ ID NO: 12410 - RNA, 13 nt, Artificial Sequence
  Description of Artificial Sequence: Synthetic oligonucleotide
caccaucacacca

SEQ ID NO: 12411 - RNA, 11 nt, Artificial Sequence
  Description of Artificial Sequence: Synthetic oligonucleotide
ccugcggguuu

SEQ ID NO: 12412 - RNA, 10 nt, Artificial Sequence
  Description of Artificial Sequence: Synthetic oligonucleotide
auccaguuug

SEQ ID NO: 12413 - RNA, 13 nt, Artificial Sequence
  Description of Artificial Sequence: Synthetic oligonucleotide
guuaaggacuucu

SEQ ID NO: 12414 - RNA, 13 nt, Artificial Sequence
  Description of Artificial Sequence: Synthetic oligonucleotide
cagugggacagag

SEQ ID NO: 12415 - RNA, 14 nt, Artificial Sequence
  Description of Artificial Sequence: Synthetic oligonucleotide
aauuuguuauugug

SEQ ID NO: 12416 - RNA, 13 nt, Artificial Sequence
  Description of Artificial Sequence: Synthetic oligonucleotide
uucaaaugcauuu

SEQ ID NO: 12417 - RNA, 10 nt, Artificial Sequence
  Description of Artificial Sequence: Synthetic oligonucleotide
caggaaagcc

SEQ ID NO: 12418 - RNA, 11 nt, Artificial Sequence
  Description of Artificial Sequence: Synthetic oligonucleotide
aggaaagcccu

SEQ ID NO: 12419 - RNA, 12 nt, Artificial Sequence
  Description of Artificial Sequence: Synthetic oligonucleotide
cccagcauggcc

SEQ ID NO: 12420 - RNA, 11 nt, Artificial Sequence
  Description of Artificial Sequence: Synthetic oligonucleotide
cuucucccuga

SEQ ID NO: 12421 - RNA, 12 nt, Artificial Sequence
  Description of Artificial Sequence: Synthetic oligonucleotide
gaagaagcccuu

SEQ ID NO: 12422 - RNA, 12 nt, Artificial Sequence
  Description of Artificial Sequence: Synthetic oligonucleotide
agaagcccuuca

SEQ ID NO: 12423 - RNA, 11 nt, Artificial Sequence
  Description of Artificial Sequence: Synthetic oligonucleotide
gcccuucagcg

SEQ ID NO: 12424 - RNA, 11 nt, Artificial Sequence
  Description of Artificial Sequence: Synthetic oligonucleotide
ccuucagcggc

SEQ ID NO: 12425 - RNA, 12 nt, Artificial Sequence
  Description of Artificial Sequence: Synthetic oligonucleotide
ucagcggccagu

SEQ ID NO: 12426 - RNA, 12 nt, Artificial Sequence
  Description of Artificial Sequence: Synthetic oligonucleotide
ugaaaagcuccg

SEQ ID NO: 12427 - RNA, 11 nt, Artificial Sequence
  Description of Artificial Sequence: Synthetic oligonucleotide
aaaagcuccgg

SEQ ID NO: 12428 - RNA, 13 nt, Artificial Sequence
  Description of Artificial Sequence: Synthetic oligonucleotide
agucaacagucug

SEQ ID NO: 12429 - RNA, 13 nt, Artificial Sequence
  Description of Artificial Sequence: Synthetic oligonucleotide
cagaguucaaaag

SEQ ID NO: 12430 - RNA, 13 nt, Artificial Sequence
  Description of Artificial Sequence: Synthetic oligonucleotide
agaguucaaaagc

SEQ ID NO: 12431 - RNA, 12 nt, Artificial Sequence
  Description of Artificial Sequence: Synthetic oligonucleotide
uucaaaagcccu

SEQ ID NO: 12432 - RNA, 12 nt, Artificial Sequence
  Description of Artificial Sequence: Synthetic oligonucleotide
ucaaaagcccuu

SEQ ID NO: 12433 - RNA, 12 nt, Artificial Sequence
  Description of Artificial Sequence: Synthetic oligonucleotide
aaaagcccuuca

SEQ ID NO: 12434 - RNA, 12 nt, Artificial Sequence
  Description of Artificial Sequence: Synthetic oligonucleotide
aaagcccuucag

SEQ ID NO: 12435 - RNA, 13 nt, Artificial Sequence
  Description of Artificial Sequence: Synthetic oligonucleotide
gugaagccgcucg

SEQ ID NO: 12436 - RNA, 12 nt, Artificial Sequence
  Description of Artificial Sequence: Synthetic oligonucleotide
cacgccagucaa

SEQ ID NO: 12437 - RNA, 13 nt, Artificial Sequence
  Description of Artificial Sequence: Synthetic oligonucleotide
uucuuggugcgug

SEQ ID NO: 12438 - RNA, 14 nt, Artificial Sequence
  Description of Artificial Sequence: Synthetic oligonucleotide
auuggauucaucag

SEQ ID NO: 12439 - RNA, 13 nt, Artificial Sequence
  Description of Artificial Sequence: Synthetic oligonucleotide
uggaauaccuaag

SEQ ID NO: 12440 - RNA, 12 nt, Artificial Sequence
  Description of Artificial Sequence: Synthetic oligonucleotide
auuugaggcuca

SEQ ID NO: 12441 - RNA, 11 nt, Artificial Sequence
  Description of Artificial Sequence: Synthetic oligonucleotide
ucuacaauugg

SEQ ID NO: 12442 - RNA, 12 nt, Artificial Sequence
  Description of Artificial Sequence: Synthetic oligonucleotide
uaguuaggagcc

SEQ ID NO: 12443 - RNA, 13 nt, Artificial Sequence
  Description of Artificial Sequence: Synthetic oligonucleotide
agucaauauccac

SEQ ID NO: 12444 - RNA, 13 nt, Artificial Sequence
  Description of Artificial Sequence: Synthetic oligonucleotide
auguucagucaca

SEQ ID NO: 12445 - RNA, 12 nt, Artificial Sequence
  Description of Artificial Sequence: Synthetic oligonucleotide
acacacacauac

SEQ ID NO: 12446 - RNA, 12 nt, Artificial Sequence
  Description of Artificial Sequence: Synthetic oligonucleotide
uuccuuuugcuu

SEQ ID NO: 12447 - RNA, 16 nt, Artificial Sequence
  Description of Artificial Sequence: Synthetic oligonucleotide
uuuuaaaguaauuuuu

SEQ ID NO: 12448 - RNA, 13 nt, Artificial Sequence
  Description of Artificial Sequence: Synthetic oligonucleotide
caacagucaaugg

SEQ ID NO: 12449 - RNA, 13 nt, Artificial Sequence
  Description of Artificial Sequence: Synthetic oligonucleotide
ucgacaaaccaau

SEQ ID NO: 12450 - RNA, 12 nt, Artificial Sequence
  Description of Artificial Sequence: Synthetic oligonucleotide
acugcuaccacu

SEQ ID NO: 12451 - RNA, 13 nt, Artificial Sequence
  Description of Artificial Sequence: Synthetic oligonucleotide
gcaagcggucuua

SEQ ID NO: 12452 - RNA, 13 nt, Artificial Sequence
  Description of Artificial Sequence: Synthetic oligonucleotide
ggucuuaccggcu

SEQ ID NO: 12453 - RNA, 11 nt, Artificial Sequence
  Description of Artificial Sequence: Synthetic oligonucleotide
gauggguuacc

SEQ ID NO: 12454 - RNA, 11 nt, Artificial Sequence
  Description of Artificial Sequence: Synthetic oligonucleotide
guuaccugcga

SEQ ID NO: 12455 - RNA, 12 nt, Artificial Sequence
  Description of Artificial Sequence: Synthetic oligonucleotide
aaucuugcugag

SEQ ID NO: 12456 - RNA, 13 nt, Artificial Sequence
  Description of Artificial Sequence: Synthetic oligonucleotide
agcauaaaacagu

SEQ ID NO: 12457 - RNA, 12 nt, Artificial Sequence
  Description of Artificial Sequence: Synthetic oligonucleotide
guccuuuauccu

SEQ ID NO: 12458 - RNA, 12 nt, Artificial Sequence
  Description of Artificial Sequence: Synthetic oligonucleotide
caacgcaaguug

SEQ ID NO: 12459 - RNA, 13 nt, Artificial Sequence
  Description of Artificial Sequence: Synthetic oligonucleotide
aaacugaaaccau

SEQ ID NO: 12460 - RNA, 14 nt, Artificial Sequence
  Description of Artificial Sequence: Synthetic oligonucleotide
acuuuguuaaauau

SEQ ID NO: 12461 - RNA, 14 nt, Artificial Sequence
  Description of Artificial Sequence: Synthetic oligonucleotide
guauauuaaaaguu

SEQ ID NO: 12462 - RNA, 13 nt, Artificial Sequence
  Description of Artificial Sequence: Synthetic oligonucleotide
guuuugacuuaac

SEQ ID NO: 12463 - RNA, 13 nt, Artificial Sequence
  Description of Artificial Sequence: Synthetic oligonucleotide
gcaaacucagcac

SEQ ID NO: 12464 - RNA, 11 nt, Artificial Sequence
  Description of Artificial Sequence: Synthetic oligonucleotide
ugcugaccuca

SEQ ID NO: 12465 - RNA, 14 nt, Artificial Sequence
  Description of Artificial Sequence: Synthetic oligonucleotide
uuuauucagaucgc

SEQ ID NO: 12466 - RNA, 13 nt, Artificial Sequence
  Description of Artificial Sequence: Synthetic oligonucleotide
aggguucugggau

SEQ ID NO: 12467 - RNA, 15 nt, Artificial Sequence
  Description of Artificial Sequence: Synthetic oligonucleotide
auauuggaaauuaug

SEQ ID NO: 12468 - RNA, 13 nt, Artificial Sequence
  Description of Artificial Sequence: Synthetic oligonucleotide
auggaagcacuag

SEQ ID NO: 12469 - RNA, 13 nt, Artificial Sequence
  Description of Artificial Sequence: Synthetic oligonucleotide
guuuuuaugugga

SEQ ID NO: 12470 - RNA, 12 nt, Artificial Sequence
  Description of Artificial Sequence: Synthetic oligonucleotide
ggaauugguaga

SEQ ID NO: 12471 - RNA, 13 nt, Artificial Sequence
  Description of Artificial Sequence: Synthetic oligonucleotide
uuagacuuggaga

SEQ ID NO: 12472 - RNA, 13 nt, Artificial Sequence
  Description of Artificial Sequence: Synthetic oligonucleotide
uuacaguauucca

SEQ ID NO: 12473 - RNA, 15 nt, Artificial Sequence
  Description of Artificial Sequence: Synthetic oligonucleotide
ccacugaugaauuaa

SEQ ID NO: 12474 - RNA, 12 nt, Artificial Sequence
  Description of Artificial Sequence: Synthetic oligonucleotide
ccacaucaucac

SEQ ID NO: 12475 - RNA, 13 nt, Artificial Sequence
  Description of Artificial Sequence: Synthetic oligonucleotide
cucaccaaacaga

SEQ ID NO: 12476 - RNA, 12 nt, Artificial Sequence
  Description of Artificial Sequence: Synthetic oligonucleotide
ggaacaugaugg

SEQ ID NO: 12477 - RNA, 12 nt, Artificial Sequence
  Description of Artificial Sequence: Synthetic oligonucleotide
cauguagacugc

SEQ ID NO: 12478 - RNA, 13 nt, Artificial Sequence
  Description of Artificial Sequence: Synthetic oligonucleotide
ggaucuauuuaug

SEQ ID NO: 12479 - RNA, 12 nt, Artificial Sequence
  Description of Artificial Sequence: Synthetic oligonucleotide
gcacuauuauca

SEQ ID NO: 12480 - RNA, 11 nt, Artificial Sequence
  Description of Artificial Sequence: Synthetic oligonucleotide
aucaguucugc

SEQ ID NO: 12481 - RNA, 13 nt, Artificial Sequence
  Description of Artificial Sequence: Synthetic oligonucleotide
agauuaaaccuac

SEQ ID NO: 12482 - RNA, 13 nt, Artificial Sequence
  Description of Artificial Sequence: Synthetic oligonucleotide
auaaaauccuucu

SEQ ID NO: 12483 - RNA, 12 nt, Artificial Sequence
  Description of Artificial Sequence: Synthetic oligonucleotide
aaugcuguagac

SEQ ID NO: 12484 - RNA, 13 nt, Artificial Sequence
  Description of Artificial Sequence: Synthetic oligonucleotide
uugauaggaauag

SEQ ID NO: 12485 - RNA, 11 nt, Artificial Sequence
  Description of Artificial Sequence: Synthetic oligonucleotide
aauggcccuga

SEQ ID NO: 12486 - RNA, 11 nt, Artificial Sequence
  Description of Artificial Sequence: Synthetic oligonucleotide
uuccucaagca

SEQ ID NO: 12487 - RNA, 10 nt, Artificial Sequence
  Description of Artificial Sequence: Synthetic oligonucleotide
guucagccca

SEQ ID NO: 12488 - RNA, 11 nt, Artificial Sequence
  Description of Artificial Sequence: Synthetic oligonucleotide
gcugcugaacc

SEQ ID NO: 12489 - RNA, 12 nt, Artificial Sequence
  Description of Artificial Sequence: Synthetic oligonucleotide
aaguucucuuca

SEQ ID NO: 12490 - RNA, 11 nt, Artificial Sequence
  Description of Artificial Sequence: Synthetic oligonucleotide
ccagccuagag

SEQ ID NO: 12491 - RNA, 13 nt, Artificial Sequence
  Description of Artificial Sequence: Synthetic oligonucleotide
cucugugaagugu

SEQ ID NO: 12492 - RNA, 14 nt, Artificial Sequence
  Description of Artificial Sequence: Synthetic oligonucleotide
ugagaaaauuucaa

SEQ ID NO: 12493 - RNA, 11 nt, Artificial Sequence
  Description of Artificial Sequence: Synthetic oligonucleotide
aauccuccuga

SEQ ID NO: 12494 - RNA, 12 nt, Artificial Sequence
  Description of Artificial Sequence: Synthetic oligonucleotide
gugacaucauau

SEQ ID NO: 12495 - RNA, 13 nt, Artificial Sequence
  Description of Artificial Sequence: Synthetic oligonucleotide
aaucuucaucaua

SEQ ID NO: 12496 - RNA, 13 nt, Artificial Sequence
  Description of Artificial Sequence: Synthetic oligonucleotide
gacuagcuauuaa

SEQ ID NO: 12497 - RNA, 14 nt, Artificial Sequence
  Description of Artificial Sequence: Synthetic oligonucleotide
ucucuacuaaaaau

SEQ ID NO: 12498 - RNA, 12 nt, Artificial Sequence
  Description of Artificial Sequence: Synthetic oligonucleotide
ucuaucucgccu

SEQ ID NO: 12499 - RNA, 13 nt, Artificial Sequence
  Description of Artificial Sequence: Synthetic oligonucleotide
cuucgguccaguu

SEQ ID NO: 12500 - RNA, 11 nt, Artificial Sequence
  Description of Artificial Sequence: Synthetic oligonucleotide
gauguagccgc

SEQ ID NO: 12501 - RNA, 12 nt, Artificial Sequence
  Description of Artificial Sequence: Synthetic oligonucleotide
ugaggagacuug

SEQ ID NO: 12502 - RNA, 12 nt, Artificial Sequence
  Description of Artificial Sequence: Synthetic oligonucleotide
gaguagugagga

SEQ ID NO: 12503 - RNA, 14 nt, Artificial Sequence
  Description of Artificial Sequence: Synthetic oligonucleotide
cagaugaguacaaa

SEQ ID NO: 12504 - RNA, 13 nt, Artificial Sequence
  Description of Artificial Sequence: Synthetic oligonucleotide
guuguuaaugggc

SEQ ID NO: 12505 - RNA, 13 nt, Artificial Sequence
  Description of Artificial Sequence: Synthetic oligonucleotide
uuuuuaauuuauu

SEQ ID NO: 12506 - RNA, 12 nt, Artificial Sequence
  Description of Artificial Sequence: Synthetic oligonucleotide
uauuuaaauaug

SEQ ID NO: 12507 - RNA, 13 nt, Artificial Sequence
  Description of Artificial Sequence: Synthetic oligonucleotide
uauccuuuguuuc

SEQ ID NO: 12508 - RNA, 14 nt, Artificial Sequence
  Description of Artificial Sequence: Synthetic oligonucleotide
cgucuaaguguuug

SEQ ID NO: 12509 - RNA, 12 nt, Artificial Sequence
  Description of Artificial Sequence: Synthetic oligonucleotide
accugugacaaa

SEQ ID NO: 12510 - RNA, 13 nt, Artificial Sequence
  Description of Artificial Sequence: Synthetic oligonucleotide
ccaggcugaauua

SEQ ID NO: 12511 - RNA, 14 nt, Artificial Sequence
  Description of Artificial Sequence: Synthetic oligonucleotide
gucauucuuacaau

SEQ ID NO: 12512 - RNA, 15 nt, Artificial Sequence
  Description of Artificial Sequence: Synthetic oligonucleotide
ucauucuuacaauug

SEQ ID NO: 12513 - RNA, 12 nt, Artificial Sequence
  Description of Artificial Sequence: Synthetic oligonucleotide
cagagaguguac

SEQ ID NO: 12514 - RNA, 12 nt, Artificial Sequence
  Description of Artificial Sequence: Synthetic oligonucleotide
agaacucagcag

SEQ ID NO: 12515 - RNA, 13 nt, Artificial Sequence
  Description of Artificial Sequence: Synthetic oligonucleotide
uuuauuuucagua

SEQ ID NO: 12516 - RNA, 12 nt, Artificial Sequence
  Description of Artificial Sequence: Synthetic oligonucleotide
ucuuaaauggaa

SEQ ID NO: 12517 - RNA, 13 nt, Artificial Sequence
  Description of Artificial Sequence: Synthetic oligonucleotide
ugccuaaaauugu

SEQ ID NO: 12518 - RNA, 12 nt, Artificial Sequence
  Description of Artificial Sequence: Synthetic oligonucleotide
agacugugagcu

SEQ ID NO: 12519 - RNA, 14 nt, Artificial Sequence
  Description of Artificial Sequence: Synthetic oligonucleotide
ugcuuuuuauuaau

SEQ ID NO: 12520 - RNA, 13 nt, Artificial Sequence
  Description of Artificial Sequence: Synthetic oligonucleotide
cucuucuuacauu

SEQ ID NO: 12521 - RNA, 15 nt, Artificial Sequence
  Description of Artificial Sequence: Synthetic oligonucleotide
cauuuguaaaaaugu

SEQ ID NO: 12522 - RNA, 15 nt, Artificial Sequence
  Description of Artificial Sequence: Synthetic oligonucleotide
aucuuaauucauauu

SEQ ID NO: 12523 - RNA, 13 nt, Artificial Sequence
  Description of Artificial Sequence: Synthetic oligonucleotide
gaacuaaucauga

SEQ ID NO: 12524 - RNA, 12 nt, Artificial Sequence
  Description of Artificial Sequence: Synthetic oligonucleotide
ucugcucuuggg

SEQ ID NO: 12525 - RNA, 13 nt, Artificial Sequence
  Description of Artificial Sequence: Synthetic oligonucleotide
caguagcuuugag

SEQ ID NO: 12526 - RNA, 14 nt, Artificial Sequence
  Description of Artificial Sequence: Synthetic oligonucleotide
cacguaauauuuca

SEQ ID NO: 12527 - RNA, 13 nt, Artificial Sequence
  Description of Artificial Sequence: Synthetic oligonucleotide
uauucucuucacu

SEQ ID NO: 12528 - RNA, 14 nt, Artificial Sequence
  Description of Artificial Sequence: Synthetic oligonucleotide
cuaaugcuaagaaa

SEQ ID NO: 12529 - RNA, 12 nt, Artificial Sequence
  Description of Artificial Sequence: Synthetic oligonucleotide
gcugaaaaucaa

SEQ ID NO: 12530 - RNA, 14 nt, Artificial Sequence
  Description of Artificial Sequence: Synthetic oligonucleotide
aauaugauuacuuu

SEQ ID NO: 12531 - RNA, 14 nt, Artificial Sequence
  Description of Artificial Sequence: Synthetic oligonucleotide
cauuuuguucuaca

SEQ ID NO: 12532 - RNA, 12 nt, Artificial Sequence
  Description of Artificial Sequence: Synthetic oligonucleotide
cccgggacucuc

SEQ ID NO: 12533 - RNA, 14 nt, Artificial Sequence
  Description of Artificial Sequence: Synthetic oligonucleotide
ccuuuaaaguaaag

SEQ ID NO: 12534 - RNA, 13 nt, Artificial Sequence
  Description of Artificial Sequence: Synthetic oligonucleotide
ucuggaagccugg

SEQ ID NO: 12535 - RNA, 14 nt, Artificial Sequence
  Description of Artificial Sequence: Synthetic oligonucleotide
aaaacaaaagagag

SEQ ID NO: 12536 - RNA, 13 nt, Artificial Sequence
  Description of Artificial Sequence: Synthetic oligonucleotide
aucaguuaugccg

SEQ ID NO: 12537 - RNA, 13 nt, Artificial Sequence
  Description of Artificial Sequence: Synthetic oligonucleotide
uaaaagaagucca

SEQ ID NO: 12538 - RNA, 11 nt, Artificial Sequence
  Description of Artificial Sequence: Synthetic oligonucleotide
aggugagguua

SEQ ID NO: 12539 - RNA, 11 nt, Artificial Sequence
  Description of Artificial Sequence: Synthetic oligonucleotide
gggaagaggac

SEQ ID NO: 12540 - RNA, 13 nt, Artificial Sequence
  Description of Artificial Sequence: Synthetic oligonucleotide
aagcaaguauugu

SEQ ID NO: 12541 - RNA, 12 nt, Artificial Sequence
  Description of Artificial Sequence: Synthetic oligonucleotide
auuguagcacuc

SEQ ID NO: 12542 - RNA, 14 nt, Artificial Sequence
  Description of Artificial Sequence: Synthetic oligonucleotide
acaaaaccacaaau

SEQ ID NO: 12543 - RNA, 12 nt, Artificial Sequence
  Description of Artificial Sequence: Synthetic oligonucleotide
uaagcccauaca

SEQ ID NO: 12544 - RNA, 11 nt, Artificial Sequence
  Description of Artificial Sequence: Synthetic oligonucleotide
agcccauacag

SEQ ID NO: 12545 - RNA, 12 nt, Artificial Sequence
  Description of Artificial Sequence: Synthetic oligonucleotide
cagaaaccuucc

SEQ ID NO: 12546 - RNA, 10 nt, Artificial Sequence
  Description of Artificial Sequence: Synthetic oligonucleotide
guauaccuac

SEQ ID NO: 12547 - RNA, 13 nt, Artificial Sequence
  Description of Artificial Sequence: Synthetic oligonucleotide
gccaguuuucgga

SEQ ID NO: 12548 - RNA, 9 nt, Artificial Sequence
  Description of Artificial Sequence: Synthetic oligonucleotide
ggaacaggg

SEQ ID NO: 12549 - RNA, 13 nt, Artificial Sequence
  Description of Artificial Sequence: Synthetic oligonucleotide
uuaacuuuccagu

SEQ ID NO: 12550 - RNA, 14 nt, Artificial Sequence
  Description of Artificial Sequence: Synthetic oligonucleotide
aaaguuugguuuug

SEQ ID NO: 12551 - RNA, 12 nt, Artificial Sequence
  Description of Artificial Sequence: Synthetic oligonucleotide
cuucccacugua

SEQ ID NO: 12552 - RNA, 13 nt, Artificial Sequence
  Description of Artificial Sequence: Synthetic oligonucleotide
ugauaccauauga

SEQ ID NO: 12553 - RNA, 11 nt, Artificial Sequence
  Description of Artificial Sequence: Synthetic oligonucleotide
aacaugggcug

SEQ ID NO: 12554 - RNA, 13 nt, Artificial Sequence
  Description of Artificial Sequence: Synthetic oligonucleotide
caacuuuuucaua

SEQ ID NO: 12555 - RNA, 12 nt, Artificial Sequence
  Description of Artificial Sequence: Synthetic oligonucleotide
caugaggccgga

SEQ ID NO: 12556 - RNA, 11 nt, Artificial Sequence
  Description of Artificial Sequence: Synthetic oligonucleotide
acugcauuugu

SEQ ID NO: 12557 - RNA, 13 nt, Artificial Sequence
  Description of Artificial Sequence: Synthetic oligonucleotide
aauguuuacuacc

SEQ ID NO: 12558 - RNA, 15 nt, Artificial Sequence
  Description of Artificial Sequence: Synthetic oligonucleotide
aauuuuuugaugaaa

SEQ ID NO: 12559 - RNA, 14 nt, Artificial Sequence
  Description of Artificial Sequence: Synthetic oligonucleotide
cagugugugaauuu

SEQ ID NO: 12560 - RNA, 13 nt, Artificial Sequence
  Description of Artificial Sequence: Synthetic oligonucleotide
gagcaauguaugu

SEQ ID NO: 12561 - RNA, 14 nt, Artificial Sequence
  Description of Artificial Sequence: Synthetic oligonucleotide
aaagcacauauaua

SEQ ID NO: 12562 - RNA, 14 nt, Artificial Sequence
  Description of Artificial Sequence: Synthetic oligonucleotide
guaauaguuucucc

SEQ ID NO: 12563 - RNA, 13 nt, Artificial Sequence
  Description of Artificial Sequence: Synthetic oligonucleotide
aguuucuccaaau

SEQ ID NO: 12564 - RNA, 13 nt, Artificial Sequence
  Description of Artificial Sequence: Synthetic oligonucleotide
uacuuccuagaaa

SEQ ID NO: 12565 - RNA, 13 nt, Artificial Sequence
  Description of Artificial Sequence: Synthetic oligonucleotide
uacaccauauaug

SEQ ID NO: 12566 - RNA, 14 nt, Artificial Sequence
  Description of Artificial Sequence: Synthetic oligonucleotide
auauaugaauggag

SEQ ID NO: 12567 - RNA, 13 nt, Artificial Sequence
  Description of Artificial Sequence: Synthetic oligonucleotide
acgagaagaagau

SEQ ID NO: 12568 - RNA, 13 nt, Artificial Sequence
  Description of Artificial Sequence: Synthetic oligonucleotide
ucauuuacaggga

SEQ ID NO: 12569 - RNA, 13 nt, Artificial Sequence
  Description of Artificial Sequence: Synthetic oligonucleotide
cauuuacagggac

SEQ ID NO: 12570 - RNA, 10 nt, Artificial Sequence
  Description of Artificial Sequence: Synthetic oligonucleotide
agggaccuga

SEQ ID NO: 12571 - RNA, 14 nt, Artificial Sequence
  Description of Artificial Sequence: Synthetic oligonucleotide
uguuugacugcauc

SEQ ID NO: 12572 - RNA, 13 nt, Artificial Sequence
  Description of Artificial Sequence: Synthetic oligonucleotide
uuugacugcaucg

SEQ ID NO: 12573 - RNA, 12 nt, Artificial Sequence
  Description of Artificial Sequence: Synthetic oligonucleotide
gaguucacaggg

SEQ ID NO: 12574 - RNA, 13 nt, Artificial Sequence
  Description of Artificial Sequence: Synthetic oligonucleotide
ggcaccucugucc

SEQ ID NO: 12575 - RNA, 15 nt, Artificial Sequence
  Description of Artificial Sequence: Synthetic oligonucleotide
gguuugucuuuuuaa

SEQ ID NO: 12576 - RNA, 14 nt, Artificial Sequence
  Description of Artificial Sequence: Synthetic oligonucleotide
uuugucuuuuuaag

SEQ ID NO: 12577 - RNA, 13 nt, Artificial Sequence
  Description of Artificial Sequence: Synthetic oligonucleotide
ccuaaagguuguc

SEQ ID NO: 12578 - RNA, 12 nt, Artificial Sequence
  Description of Artificial Sequence: Synthetic oligonucleotide
aagguugucgac

SEQ ID NO: 12579 - RNA, 13 nt, Artificial Sequence
  Description of Artificial Sequence: Synthetic oligonucleotide
accuggcaauugu

SEQ ID NO: 12580 - RNA, 12 nt, Artificial Sequence
  Description of Artificial Sequence: Synthetic oligonucleotide
aguggugcgagg

SEQ ID NO: 12581 - RNA, 13 nt, Artificial Sequence
  Description of Artificial Sequence: Synthetic oligonucleotide
agagacaugaaau

SEQ ID NO: 12582 - RNA, 13 nt, Artificial Sequence
  Description of Artificial Sequence: Synthetic oligonucleotide
auauauuucucca

SEQ ID NO: 12583 - RNA, 10 nt, Artificial Sequence
  Description of Artificial Sequence: Synthetic oligonucleotide
caugaaggcu

SEQ ID NO: 12584 - RNA, 11 nt, Artificial Sequence
  Description of Artificial Sequence: Synthetic oligonucleotide
gcuggaguggu

SEQ ID NO: 12585 - RNA, 11 nt, Artificial Sequence
  Description of Artificial Sequence: Synthetic oligonucleotide
aggaagagagg

SEQ ID NO: 12586 - RNA, 12 nt, Artificial Sequence
  Description of Artificial Sequence: Synthetic oligonucleotide
cuugcaucgggc

SEQ ID NO: 12587 - RNA, 13 nt, Artificial Sequence
  Description of Artificial Sequence: Synthetic oligonucleotide
auauccuacugug

SEQ ID NO: 12588 - RNA, 13 nt, Artificial Sequence
  Description of Artificial Sequence: Synthetic oligonucleotide
uccuacuguguaa

SEQ ID NO: 12589 - RNA, 12 nt, Artificial Sequence
  Description of Artificial Sequence: Synthetic oligonucleotide
ccuuguagugua

SEQ ID NO: 12590 - RNA, 13 nt, Artificial Sequence
  Description of Artificial Sequence: Synthetic oligonucleotide
ucuuuguugauug

SEQ ID NO: 12591 - RNA, 14 nt, Artificial Sequence
  Description of Artificial Sequence: Synthetic oligonucleotide
uuuguugauugaaa

SEQ ID NO: 12592 - RNA, 15 nt, Artificial Sequence
  Description of Artificial Sequence: Synthetic oligonucleotide
uucuuuuucuuccau

SEQ ID NO: 12593 - RNA, 13 nt, Artificial Sequence
  Description of Artificial Sequence: Synthetic oligonucleotide
aaucuuccuucua

SEQ ID NO: 12594 - RNA, 13 nt, Artificial Sequence
  Description of Artificial Sequence: Synthetic oligonucleotide
uugaaugcuucau

SEQ ID NO: 12595 - RNA, 13 nt, Artificial Sequence
  Description of Artificial Sequence: Synthetic oligonucleotide
ugaaugcuucaug

SEQ ID NO: 12596 - RNA, 13 nt, Artificial Sequence
  Description of Artificial Sequence: Synthetic oligonucleotide
aauucuacuuuga

SEQ ID NO: 12597 - RNA, 13 nt, Artificial Sequence
  Description of Artificial Sequence: Synthetic oligonucleotide
agcaacuacagac

SEQ ID NO: 12598 - RNA, 13 nt, Artificial Sequence
  Description of Artificial Sequence: Synthetic oligonucleotide
gaccaaggucaac

SEQ ID NO: 12599 - RNA, 13 nt, Artificial Sequence
  Description of Artificial Sequence: Synthetic oligonucleotide
cgacuaucucgac

SEQ ID NO: 12600 - RNA, 13 nt, Artificial Sequence
  Description of Artificial Sequence: Synthetic oligonucleotide
aaccuucccaaac

SEQ ID NO: 12601 - RNA, 14 nt, Artificial Sequence
  Description of Artificial Sequence: Synthetic oligonucleotide
ccaagcuuagaacu

SEQ ID NO: 12602 - RNA, 15 nt, Artificial Sequence
  Description of Artificial Sequence: Synthetic oligonucleotide
agcuuagaacuuuaa

SEQ ID NO: 12603 - RNA, 11 nt, Artificial Sequence
  Description of Artificial Sequence: Synthetic oligonucleotide
aagaccaccac

SEQ ID NO: 12604 - RNA, 14 nt, Artificial Sequence
  Description of Artificial Sequence: Synthetic oligonucleotide
gcgagaaauaaagu

SEQ ID NO: 12605 - RNA, 14 nt, Artificial Sequence
  Description of Artificial Sequence: Synthetic oligonucleotide
cgagaaauaaaguu

SEQ ID NO: 12606 - RNA, 12 nt, Artificial Sequence
  Description of Artificial Sequence: Synthetic oligonucleotide
aggaaaugaucc

SEQ ID NO: 12607 - RNA, 13 nt, Artificial Sequence
  Description of Artificial Sequence: Synthetic oligonucleotide
gaagaaaugaaac

SEQ ID NO: 12608 - RNA, 13 nt, Artificial Sequence
  Description of Artificial Sequence: Synthetic oligonucleotide
guuuccauccucc

SEQ ID NO: 12609 - RNA, 15 nt, Artificial Sequence
  Description of Artificial Sequence: Synthetic oligonucleotide
acugaaaaucuuuga

SEQ ID NO: 12610 - RNA, 11 nt, Artificial Sequence
  Description of Artificial Sequence: Synthetic oligonucleotide
ugccguucagg

SEQ ID NO: 12611 - RNA, 13 nt, Artificial Sequence
  Description of Artificial Sequence: Synthetic oligonucleotide
caggguccagaag

SEQ ID NO: 12612 - RNA, 13 nt, Artificial Sequence
  Description of Artificial Sequence: Synthetic oligonucleotide
ucaagacugcuug

SEQ ID NO: 12613 - RNA, 13 nt, Artificial Sequence
  Description of Artificial Sequence: Synthetic oligonucleotide
uccaugucuuugg

SEQ ID NO: 12614 - RNA, 11 nt, Artificial Sequence
  Description of Artificial Sequence: Synthetic oligonucleotide
gccugaaacac

SEQ ID NO: 12615 - RNA, 12 nt, Artificial Sequence
  Description of Artificial Sequence: Synthetic oligonucleotide
ucucuguaccuc

SEQ ID NO: 12616 - RNA, 12 nt, Artificial Sequence
  Description of Artificial Sequence: Synthetic oligonucleotide
agcaagacaaga

SEQ ID NO: 12617 - RNA, 13 nt, Artificial Sequence
  Description of Artificial Sequence: Synthetic oligonucleotide
gcaagacaagaaa

SEQ ID NO: 12618 - RNA, 12 nt, Artificial Sequence
  Description of Artificial Sequence: Synthetic oligonucleotide
uguacaagaucc

SEQ ID NO: 12619 - RNA, 12 nt, Artificial Sequence
  Description of Artificial Sequence: Synthetic oligonucleotide
cguacuugcaga

SEQ ID NO: 12620 - RNA, 13 nt, Artificial Sequence
  Description of Artificial Sequence: Synthetic oligonucleotide
cgaucgauacaga

SEQ ID NO: 12621 - RNA, 13 nt, Artificial Sequence
  Description of Artificial Sequence: Synthetic oligonucleotide
uauaaaaauaaau

SEQ ID NO: 12622 - RNA, 13 nt, Artificial Sequence
  Description of Artificial Sequence: Synthetic oligonucleotide
uaaaaauaaauau

SEQ ID NO: 12623 - RNA, 13 nt, Artificial Sequence
  Description of Artificial Sequence: Synthetic oligonucleotide
uuugacugcugug

SEQ ID NO: 12624 - RNA, 13 nt, Artificial Sequence
  Description of Artificial Sequence: Synthetic oligonucleotide
ggagaugagagac

SEQ ID NO: 12625 - RNA, 10 nt, Artificial Sequence
  Description of Artificial Sequence: Synthetic oligonucleotide
ucccacuugg

SEQ ID NO: 12626 - RNA, 10 nt, Artificial Sequence
  Description of Artificial Sequence: Synthetic oligonucleotide
guucacggcc

SEQ ID NO: 12627 - RNA, 12 nt, Artificial Sequence
  Description of Artificial Sequence: Synthetic oligonucleotide
accaucacacca

SEQ ID NO: 12628 - RNA, 10 nt, Artificial Sequence
  Description of Artificial Sequence: Synthetic oligonucleotide
cugcggguuu

SEQ ID NO: 12629 - RNA, 9 nt, Artificial Sequence
  Description of Artificial Sequence: Synthetic oligonucleotide
uccaguuug

SEQ ID NO: 12630 - RNA, 12 nt, Artificial Sequence
  Description of Artificial Sequence: Synthetic oligonucleotide
uuaaggacuucu

SEQ ID NO: 12631 - RNA, 12 nt, Artificial Sequence
  Description of Artificial Sequence: Synthetic oligonucleotide
agugggacagag

SEQ ID NO: 12632 - RNA, 13 nt, Artificial Sequence
  Description of Artificial Sequence: Synthetic oligonucleotide
auuuguuauugug

SEQ ID NO: 12633 - RNA, 12 nt, Artificial Sequence
  Description of Artificial Sequence: Synthetic oligonucleotide
ucaaaugcauuu

SEQ ID NO: 12634 - RNA, 9 nt, Artificial Sequence
  Description of Artificial Sequence: Synthetic oligonucleotide
aggaaagcc

SEQ ID NO: 12635 - RNA, 10 nt, Artificial Sequence
  Description of Artificial Sequence: Synthetic oligonucleotide
ggaaagcccu

SEQ ID NO: 12636 - RNA, 11 nt, Artificial Sequence
  Description of Artificial Sequence: Synthetic oligonucleotide
ccagcauggcc

SEQ ID NO: 12637 - RNA, 10 nt, Artificial Sequence
  Description of Artificial Sequence: Synthetic oligonucleotide
uucucccuga

SEQ ID NO: 12638 - RNA, 11 nt, Artificial Sequence
  Description of Artificial Sequence: Synthetic oligonucleotide
aagaagcccuu

SEQ ID NO: 12639 - RNA, 11 nt, Artificial Sequence
  Description of Artificial Sequence: Synthetic oligonucleotide
gaagcccuuca

SEQ ID NO: 12640 - RNA, 10 nt, Artificial Sequence
  Description of Artificial Sequence: Synthetic oligonucleotide
cccuucagcg

SEQ ID NO: 12641 - RNA, 10 nt, Artificial Sequence
  Description of Artificial Sequence: Synthetic oligonucleotide
cuucagcggc

SEQ ID NO: 12642 - RNA, 11 nt, Artificial Sequence
  Description of Artificial Sequence: Synthetic oligonucleotide
cagcggccagu

SEQ ID NO: 12643 - RNA, 11 nt, Artificial Sequence
  Description of Artificial Sequence: Synthetic oligonucleotide
gaaaagcuccg

SEQ ID NO: 12644 - RNA, 10 nt, Artificial Sequence
  Description of Artificial Sequence: Synthetic oligonucleotide
aaagcuccgg

SEQ ID NO: 12645 - RNA, 12 nt, Artificial Sequence
  Description of Artificial Sequence: Synthetic oligonucleotide
gucaacagucug

SEQ ID NO: 12646 - RNA, 12 nt, Artificial Sequence
  Description of Artificial Sequence: Synthetic oligonucleotide
agaguucaaaag

SEQ ID NO: 12647 - RNA, 12 nt, Artificial Sequence
  Description of Artificial Sequence: Synthetic oligonucleotide
gaguucaaaagc

SEQ ID NO: 12648 - RNA, 11 nt, Artificial Sequence
  Description of Artificial Sequence: Synthetic oligonucleotide
ucaaaagcccu

SEQ ID NO: 12649 - RNA, 11 nt, Artificial Sequence
  Description of Artificial Sequence: Synthetic oligonucleotide
caaaagcccuu

SEQ ID NO: 12650 - RNA, 11 nt, Artificial Sequence
  Description of Artificial Sequence: Synthetic oligonucleotide
aaagcccuuca

SEQ ID NO: 12651 - RNA, 11 nt, Artificial Sequence
  Description of Artificial Sequence: Synthetic oligonucleotide
aagcccuucag

SEQ ID NO: 12652 - RNA, 12 nt, Artificial Sequence
  Description of Artificial Sequence: Synthetic oligonucleotide
ugaagccgcucg

SEQ ID NO: 12653 - RNA, 11 nt, Artificial Sequence
  Description of Artificial Sequence: Synthetic oligonucleotide
acgccagucaa

SEQ ID NO: 12654 - RNA, 12 nt, Artificial Sequence
  Description of Artificial Sequence: Synthetic oligonucleotide
ucuuggugcgug

SEQ ID NO: 12655 - RNA, 13 nt, Artificial Sequence
  Description of Artificial Sequence: Synthetic oligonucleotide
uuggauucaucag

SEQ ID NO: 12656 - RNA, 12 nt, Artificial Sequence
  Description of Artificial Sequence: Synthetic oligonucleotide
ggaauaccuaag

SEQ ID NO: 12657 - RNA, 11 nt, Artificial Sequence
  Description of Artificial Sequence: Synthetic oligonucleotide
uuugaggcuca

SEQ ID NO: 12658 - RNA, 10 nt, Artificial Sequence
  Description of Artificial Sequence: Synthetic oligonucleotide
cuacaauugg

SEQ ID NO: 12659 - RNA, 11 nt, Artificial Sequence
  Description of Artificial Sequence: Synthetic oligonucleotide
aguuaggagcc

SEQ ID NO: 12660 - RNA, 12 nt, Artificial Sequence
  Description of Artificial Sequence: Synthetic oligonucleotide
gucaauauccac

SEQ ID NO: 12661 - RNA, 12 nt, Artificial Sequence
  Description of Artificial Sequence: Synthetic oligonucleotide
uguucagucaca

SEQ ID NO: 12662 - RNA, 11 nt, Artificial Sequence
  Description of Artificial Sequence: Synthetic oligonucleotide
cacacacauac

SEQ ID NO: 12663 - RNA, 11 nt, Artificial Sequence
  Description of Artificial Sequence: Synthetic oligonucleotide
uccuuuugcuu

SEQ ID NO: 12664 - RNA, 15 nt, Artificial Sequence
  Description of Artificial Sequence: Synthetic oligonucleotide
uuuaaaguaauuuuu

SEQ ID NO: 12665 - RNA, 12 nt, Artificial Sequence
  Description of Artificial Sequence: Synthetic oligonucleotide
aacagucaaugg

SEQ ID NO: 12666 - RNA, 12 nt, Artificial Sequence
  Description of Artificial Sequence: Synthetic oligonucleotide
cgacaaaccaau

SEQ ID NO: 12667 - RNA, 11 nt, Artificial Sequence
  Description of Artificial Sequence: Synthetic oligonucleotide
cugcuaccacu

SEQ ID NO: 12668 - RNA, 12 nt, Artificial Sequence
  Description of Artificial Sequence: Synthetic oligonucleotide
caagcggucuua

SEQ ID NO: 12669 - RNA, 12 nt, Artificial Sequence
  Description of Artificial Sequence: Synthetic oligonucleotide
gucuuaccggcu

SEQ ID NO: 12670 - RNA, 10 nt, Artificial Sequence
  Description of Artificial Sequence: Synthetic oligonucleotide
auggguuacc

SEQ ID NO: 12671 - RNA, 10 nt, Artificial Sequence
  Description of Artificial Sequence: Synthetic oligonucleotide
uuaccugcga

SEQ ID NO: 12672 - RNA, 11 nt, Artificial Sequence
  Description of Artificial Sequence: Synthetic oligonucleotide
aucuugcugag

SEQ ID NO: 12673 - RNA, 12 nt, Artificial Sequence
  Description of Artificial Sequence: Synthetic oligonucleotide
gcauaaaacagu

SEQ ID NO: 12674 - RNA, 11 nt, Artificial Sequence
  Description of Artificial Sequence: Synthetic oligonucleotide
uccuuuauccu

SEQ ID NO: 12675 - RNA, 11 nt, Artificial Sequence
  Description of Artificial Sequence: Synthetic oligonucleotide
aacgcaaguug

SEQ ID NO: 12676 - RNA, 12 nt, Artificial Sequence
  Description of Artificial Sequence: Synthetic oligonucleotide
aacugaaaccau

SEQ ID NO: 12677 - RNA, 13 nt, Artificial Sequence
  Description of Artificial Sequence: Synthetic oligonucleotide
cuuuguuaaauau

SEQ ID NO: 12678 - RNA, 13 nt, Artificial Sequence
  Description of Artificial Sequence: Synthetic oligonucleotide
uauauuaaaaguu

SEQ ID NO: 12679 - RNA, 12 nt, Artificial Sequence
  Description of Artificial Sequence: Synthetic oligonucleotide
uuuugacuuaac

SEQ ID NO: 12680 - RNA, 12 nt, Artificial Sequence
  Description of Artificial Sequence: Synthetic oligonucleotide
caaacucagcac

SEQ ID NO: 12681 - RNA, 10 nt, Artificial Sequence
  Description of Artificial Sequence: Synthetic oligonucleotide
gcugaccuca

SEQ ID NO: 12682 - RNA, 13 nt, Artificial Sequence
  Description of Artificial Sequence: Synthetic oligonucleotide
uuauucagaucgc

SEQ ID NO: 12683 - RNA, 12 nt, Artificial Sequence
  Description of Artificial Sequence: Synthetic oligonucleotide
ggguucugggau

SEQ ID NO: 12684 - RNA, 14 nt, Artificial Sequence
  Description of Artificial Sequence: Synthetic oligonucleotide
uauuggaaauuaug

SEQ ID NO: 12685 - RNA, 12 nt, Artificial Sequence
  Description of Artificial Sequence: Synthetic oligonucleotide
uggaagcacuag

SEQ ID NO: 12686 - RNA, 12 nt, Artificial Sequence
  Description of Artificial Sequence: Synthetic oligonucleotide
uuuuuaugugga

SEQ ID NO: 12687 - RNA, 11 nt, Artificial Sequence
  Description of Artificial Sequence: Synthetic oligonucleotide
gaauugguaga

SEQ ID NO: 12688 - RNA, 12 nt, Artificial Sequence
  Description of Artificial Sequence: Synthetic oligonucleotide
uagacuuggaga

SEQ ID NO: 12689 - RNA, 12 nt, Artificial Sequence
  Description of Artificial Sequence: Synthetic oligonucleotide
uacaguauucca

SEQ ID NO: 12690 - RNA, 14 nt, Artificial Sequence
  Description of Artificial Sequence: Synthetic oligonucleotide
cacugaugaauuaa

SEQ ID NO: 12691 - RNA, 11 nt, Artificial Sequence
  Description of Artificial Sequence: Synthetic oligonucleotide
cacaucaucac

SEQ ID NO: 12692 - RNA, 12 nt, Artificial Sequence
  Description of Artificial Sequence: Synthetic oligonucleotide
ucaccaaacaga

SEQ ID NO: 12693 - RNA, 11 nt, Artificial Sequence
  Description of Artificial Sequence: Synthetic oligonucleotide
gaacaugaugg

SEQ ID NO: 12694 - RNA, 11 nt, Artificial Sequence
  Description of Artificial Sequence: Synthetic oligonucleotide
auguagacugc

SEQ ID NO: 12695 - RNA, 12 nt, Artificial Sequence
  Description of Artificial Sequence: Synthetic oligonucleotide
gaucuauuuaug

SEQ ID NO: 12696 - RNA, 11 nt, Artificial Sequence
  Description of Artificial Sequence: Synthetic oligonucleotide
cacuauuauca

SEQ ID NO: 12697 - RNA, 10 nt, Artificial Sequence
  Description of Artificial Sequence: Synthetic oligonucleotide
ucaguucugc

SEQ ID NO: 12698 - RNA, 12 nt, Artificial Sequence
  Description of Artificial Sequence: Synthetic oligonucleotide
gauuaaaccuac

SEQ ID NO: 12699 - RNA, 12 nt, Artificial Sequence
  Description of Artificial Sequence: Synthetic oligonucleotide
uaaaauccuucu

SEQ ID NO: 12700 - RNA, 11 nt, Artificial Sequence
  Description of Artificial Sequence: Synthetic oligonucleotide
augcuguagac

SEQ ID NO: 12701 - RNA, 12 nt, Artificial Sequence
  Description of Artificial Sequence: Synthetic oligonucleotide
ugauaggaauag

SEQ ID NO: 12702 - RNA, 10 nt, Artificial Sequence
  Description of Artificial Sequence: Synthetic oligonucleotide
auggcccuga

SEQ ID NO: 12703 - RNA, 10 nt, Artificial Sequence
  Description of Artificial Sequence: Synthetic oligonucleotide
uccucaagca

SEQ ID NO: 12704 - RNA, 9 nt, Artificial Sequence
  Description of Artificial Sequence: Synthetic oligonucleotide
uucagccca

SEQ ID NO: 12705 - RNA, 10 nt, Artificial Sequence
  Description of Artificial Sequence: Synthetic oligonucleotide
cugcugaacc

SEQ ID NO: 12706 - RNA, 11 nt, Artificial Sequence
  Description of Artificial Sequence: Synthetic oligonucleotide
aguucucuuca

SEQ ID NO: 12707 - RNA, 10 nt, Artificial Sequence
  Description of Artificial Sequence: Synthetic oligonucleotide
cagccuagag

SEQ ID NO: 12708 - RNA, 12 nt, Artificial Sequence
  Description of Artificial Sequence: Synthetic oligonucleotide
ucugugaagugu

SEQ ID NO: 12709 - RNA, 13 nt, Artificial Sequence
  Description of Artificial Sequence: Synthetic oligonucleotide
gagaaaauuucaa

SEQ ID NO: 12710 - RNA, 10 nt, Artificial Sequence
  Description of Artificial Sequence: Synthetic oligonucleotide
auccuccuga

SEQ ID NO: 12711 - RNA, 11 nt, Artificial Sequence
  Description of Artificial Sequence: Synthetic oligonucleotide
ugacaucauau

SEQ ID NO: 12712 - RNA, 12 nt, Artificial Sequence
  Description of Artificial Sequence: Synthetic oligonucleotide
aucuucaucaua

SEQ ID NO: 12713 - RNA, 12 nt, Artificial Sequence
  Description of Artificial Sequence: Synthetic oligonucleotide
acuagcuauuaa

SEQ ID NO: 12714 - RNA, 13 nt, Artificial Sequence
  Description of Artificial Sequence: Synthetic oligonucleotide
cucuacuaaaaau

SEQ ID NO: 12715 - RNA, 11 nt, Artificial Sequence
  Description of Artificial Sequence: Synthetic oligonucleotide
cuaucucgccu

SEQ ID NO: 12716 - RNA, 12 nt, Artificial Sequence
  Description of Artificial Sequence: Synthetic oligonucleotide
uucgguccaguu

SEQ ID NO: 12717 - RNA, 10 nt, Artificial Sequence
  Description of Artificial Sequence: Synthetic oligonucleotide
auguagccgc

SEQ ID NO: 12718 - RNA, 11 nt, Artificial Sequence
  Description of Artificial Sequence: Synthetic oligonucleotide
gaggagacuug

SEQ ID NO: 12719 - RNA, 11 nt, Artificial Sequence
  Description of Artificial Sequence: Synthetic oligonucleotide
aguagugagga

SEQ ID NO: 12720 - RNA, 13 nt, Artificial Sequence
  Description of Artificial Sequence: Synthetic oligonucleotide
agaugaguacaaa

SEQ ID NO: 12721 - RNA, 12 nt, Artificial Sequence
  Description of Artificial Sequence: Synthetic oligonucleotide
uuguuaaugggc

SEQ ID NO: 12722 - RNA, 12 nt, Artificial Sequence
  Description of Artificial Sequence: Synthetic oligonucleotide
uuuuaauuuauu

SEQ ID NO: 12723 - RNA, 11 nt, Artificial Sequence
  Description of Artificial Sequence: Synthetic oligonucleotide
auuuaaauaug

SEQ ID NO: 12724 - RNA, 12 nt, Artificial Sequence
  Description of Artificial Sequence: Synthetic oligonucleotide
auccuuuguuuc

SEQ ID NO: 12725 - RNA, 13 nt, Artificial Sequence
  Description of Artificial Sequence: Synthetic oligonucleotide
gucuaaguguuug

SEQ ID NO: 12726 - RNA, 11 nt, Artificial Sequence
  Description of Artificial Sequence: Synthetic oligonucleotide
ccugugacaaa

SEQ ID NO: 12727 - RNA, 12 nt, Artificial Sequence
  Description of Artificial Sequence: Synthetic oligonucleotide
caggcugaauua

SEQ ID NO: 12728 - RNA, 13 nt, Artificial Sequence
  Description of Artificial Sequence: Synthetic oligonucleotide
ucauucuuacaau

SEQ ID NO: 12729 - RNA, 14 nt, Artificial Sequence
  Description of Artificial Sequence: Synthetic oligonucleotide
cauucuuacaauug

SEQ ID NO: 12730 - RNA, 11 nt, Artificial Sequence
  Description of Artificial Sequence: Synthetic oligonucleotide
agagaguguac

SEQ ID NO: 12731 - RNA, 11 nt, Artificial Sequence
  Description of Artificial Sequence: Synthetic oligonucleotide
gaacucagcag

SEQ ID NO: 12732 - RNA, 12 nt, Artificial Sequence
  Description of Artificial Sequence: Synthetic oligonucleotide
uuauuuucagua

SEQ ID NO: 12733 - RNA, 11 nt, Artificial Sequence
  Description of Artificial Sequence: Synthetic oligonucleotide
cuuaaauggaa

SEQ ID NO: 12734 - RNA, 12 nt, Artificial Sequence
  Description of Artificial Sequence: Synthetic oligonucleotide
gccuaaaauugu

SEQ ID NO: 12735 - RNA, 12 nt, Artificial Sequence
  Description of Artificial Sequence: Synthetic oligonucleotide
acuaacaucugg

SEQ ID NO: 12736 - RNA, 11 nt, Artificial Sequence
  Description of Artificial Sequence: Synthetic oligonucleotide
gacugugagcu

SEQ ID NO: 12737 - RNA, 13 nt, Artificial Sequence
  Description of Artificial Sequence: Synthetic oligonucleotide
gcuuuuuauuaau

SEQ ID NO: 12738 - RNA, 12 nt, Artificial Sequence
  Description of Artificial Sequence: Synthetic oligonucleotide
ucuucuuacauu

SEQ ID NO: 12739 - RNA, 14 nt, Artificial Sequence
  Description of Artificial Sequence: Synthetic oligonucleotide
auuuguaaaaaugu

SEQ ID NO: 12740 - RNA, 14 nt, Artificial Sequence
  Description of Artificial Sequence: Synthetic oligonucleotide
ucuuaauucauauu

SEQ ID NO: 12741 - RNA, 12 nt, Artificial Sequence
  Description of Artificial Sequence: Synthetic oligonucleotide
aacuaaucauga

SEQ ID NO: 12742 - RNA, 11 nt, Artificial Sequence
  Description of Artificial Sequence: Synthetic oligonucleotide
cugcucuuggg

SEQ ID NO: 12743 - RNA, 12 nt, Artificial Sequence
  Description of Artificial Sequence: Synthetic oligonucleotide
aguagcuuugag

SEQ ID NO: 12744 - RNA, 13 nt, Artificial Sequence
  Description of Artificial Sequence: Synthetic oligonucleotide
acguaauauuuca

SEQ ID NO: 12745 - RNA, 12 nt, Artificial Sequence
  Description of Artificial Sequence: Synthetic oligonucleotide
auucucuucacu

SEQ ID NO: 12746 - RNA, 13 nt, Artificial Sequence
  Description of Artificial Sequence: Synthetic oligonucleotide
uaaugcuaagaaa

SEQ ID NO: 12747 - RNA, 11 nt, Artificial Sequence
  Description of Artificial Sequence: Synthetic oligonucleotide
cugaaaaucaa

SEQ ID NO: 12748 - RNA, 13 nt, Artificial Sequence
  Description of Artificial Sequence: Synthetic oligonucleotide
auaugauuacuuu

SEQ ID NO: 12749 - RNA, 13 nt, Artificial Sequence
  Description of Artificial Sequence: Synthetic oligonucleotide
auuuuguucuaca

SEQ ID NO: 12750 - RNA, 11 nt, Artificial Sequence
  Description of Artificial Sequence: Synthetic oligonucleotide
ccgggacucuc

SEQ ID NO: 12751 - RNA, 13 nt, Artificial Sequence
  Description of Artificial Sequence: Synthetic oligonucleotide
cuuuaaaguaaag

SEQ ID NO: 12752 - RNA, 12 nt, Artificial Sequence
  Description of Artificial Sequence: Synthetic oligonucleotide
cuggaagccugg

SEQ ID NO: 12753 - RNA, 13 nt, Artificial Sequence
  Description of Artificial Sequence: Synthetic oligonucleotide
aaacaaaagagag

SEQ ID NO: 12754 - RNA, 12 nt, Artificial Sequence
  Description of Artificial Sequence: Synthetic oligonucleotide
ucaguuaugccg

SEQ ID NO: 12755 - RNA, 12 nt, Artificial Sequence
  Description of Artificial Sequence: Synthetic oligonucleotide
aaaagaagucca

SEQ ID NO: 12756 - RNA, 10 nt, Artificial Sequence
  Description of Artificial Sequence: Synthetic oligonucleotide
ggugagguua

SEQ ID NO: 12757 - RNA, 10 nt, Artificial Sequence
  Description of Artificial Sequence: Synthetic oligonucleotide
ggaagaggac

SEQ ID NO: 12758 - RNA, 12 nt, Artificial Sequence
  Description of Artificial Sequence: Synthetic oligonucleotide
agcaaguauugu

SEQ ID NO: 12759 - RNA, 11 nt, Artificial Sequence
  Description of Artificial Sequence: Synthetic oligonucleotide
uuguagcacuc

SEQ ID NO: 12760 - RNA, 13 nt, Artificial Sequence
  Description of Artificial Sequence: Synthetic oligonucleotide
caaaaccacaaau

SEQ ID NO: 12761 - RNA, 11 nt, Artificial Sequence
  Description of Artificial Sequence: Synthetic oligonucleotide
aagcccauaca

SEQ ID NO: 12762 - RNA, 10 nt, Artificial Sequence
  Description of Artificial Sequence: Synthetic oligonucleotide
gcccauacag

SEQ ID NO: 12763 - RNA, 11 nt, Artificial Sequence
  Description of Artificial Sequence: Synthetic oligonucleotide
agaaaccuucc

SEQ ID NO: 12764 - RNA, 9 nt, Artificial Sequence
  Description of Artificial Sequence: Synthetic oligonucleotide
uauaccuac

SEQ ID NO: 12765 - RNA, 12 nt, Artificial Sequence
  Description of Artificial Sequence: Synthetic oligonucleotide
ccaguuuucgga

SEQ ID NO: 12766 - RNA, 8 nt, Artificial Sequence
  Description of Artificial Sequence: Synthetic oligonucleotide
gaacaggg

SEQ ID NO: 12767 - RNA, 12 nt, Artificial Sequence
  Description of Artificial Sequence: Synthetic oligonucleotide
uaacuuuccagu

SEQ ID NO: 12768 - RNA, 13 nt, Artificial Sequence
  Description of Artificial Sequence: Synthetic oligonucleotide
aaguuugguuuug

SEQ ID NO: 12769 - RNA, 11 nt, Artificial Sequence
  Description of Artificial Sequence: Synthetic oligonucleotide
uucccacugua

SEQ ID NO: 12770 - RNA, 12 nt, Artificial Sequence
  Description of Artificial Sequence: Synthetic oligonucleotide
gauaccauauga

SEQ ID NO: 12771 - RNA, 10 nt, Artificial Sequence
  Description of Artificial Sequence: Synthetic oligonucleotide
acaugggcug

SEQ ID NO: 12772 - RNA, 12 nt, Artificial Sequence
  Description of Artificial Sequence: Synthetic oligonucleotide
aacuuuuucaua

SEQ ID NO: 12773 - RNA, 11 nt, Artificial Sequence
  Description of Artificial Sequence: Synthetic oligonucleotide
augaggccgga

SEQ ID NO: 12774 - RNA, 10 nt, Artificial Sequence
  Description of Artificial Sequence: Synthetic oligonucleotide
cugcauuugu

SEQ ID NO: 12775 - RNA, 12 nt, Artificial Sequence
  Description of Artificial Sequence: Synthetic oligonucleotide
auguuuacuacc

SEQ ID NO: 12776 - RNA, 14 nt, Artificial Sequence
  Description of Artificial Sequence: Synthetic oligonucleotide
auuuuuugaugaaa

SEQ ID NO: 12777 - RNA, 13 nt, Artificial Sequence
  Description of Artificial Sequence: Synthetic oligonucleotide
agugugugaauuu

SEQ ID NO: 12778 - RNA, 12 nt, Artificial Sequence
  Description of Artificial Sequence: Synthetic oligonucleotide
agcaauguaugu

SEQ ID NO: 12779 - RNA, 13 nt, Artificial Sequence
  Description of Artificial Sequence: Synthetic oligonucleotide
aagcacauauaua

SEQ ID NO: 12780 - RNA, 13 nt, Artificial Sequence
  Description of Artificial Sequence: Synthetic oligonucleotide
uaauaguuucucc

SEQ ID NO: 12781 - RNA, 12 nt, Artificial Sequence
  Description of Artificial Sequence: Synthetic oligonucleotide
guuucuccaaau

SEQ ID NO: 12782 - RNA, 12 nt, Artificial Sequence
  Description of Artificial Sequence: Synthetic oligonucleotide
acuuccuagaaa

SEQ ID NO: 12783 - RNA, 12 nt, Artificial Sequence
  Description of Artificial Sequence: Synthetic oligonucleotide
acaccauauaug

SEQ ID NO: 12784 - RNA, 13 nt, Artificial Sequence
  Description of Artificial Sequence: Synthetic oligonucleotide
uauaugaauggag

SEQ ID NO: 12785 - RNA, 12 nt, Artificial Sequence
  Description of Artificial Sequence: Synthetic oligonucleotide
cauuuacaggga

SEQ ID NO: 12786 - RNA, 12 nt, Artificial Sequence
  Description of Artificial Sequence: Synthetic oligonucleotide
auuuacagggac

SEQ ID NO: 12787 - RNA, 9 nt, Artificial Sequence
  Description of Artificial Sequence: Synthetic oligonucleotide
gggaccuga

SEQ ID NO: 12788 - RNA, 13 nt, Artificial Sequence
  Description of Artificial Sequence: Synthetic oligonucleotide
guuugacugcauc

SEQ ID NO: 12789 - RNA, 12 nt, Artificial Sequence
  Description of Artificial Sequence: Synthetic oligonucleotide
uugacugcaucg

SEQ ID NO: 12790 - RNA, 11 nt, Artificial Sequence
  Description of Artificial Sequence: Synthetic oligonucleotide
aguucacaggg

SEQ ID NO: 12791 - RNA, 12 nt, Artificial Sequence
  Description of Artificial Sequence: Synthetic oligonucleotide
gcaccucugucc

SEQ ID NO: 12792 - RNA, 14 nt, Artificial Sequence
  Description of Artificial Sequence: Synthetic oligonucleotide
guuugucuuuuuaa

SEQ ID NO: 12793 - RNA, 13 nt, Artificial Sequence
  Description of Artificial Sequence: Synthetic oligonucleotide
uugucuuuuuaag

SEQ ID NO: 12794 - RNA, 12 nt, Artificial Sequence
  Description of Artificial Sequence: Synthetic oligonucleotide
cuaaagguuguc

SEQ ID NO: 12795 - RNA, 11 nt, Artificial Sequence
  Description of Artificial Sequence: Synthetic oligonucleotide
agguugucgac

SEQ ID NO: 12796 - RNA, 12 nt, Artificial Sequence
  Description of Artificial Sequence: Synthetic oligonucleotide
ccuggcaauugu

SEQ ID NO: 12797 - RNA, 11 nt, Artificial Sequence
  Description of Artificial Sequence: Synthetic oligonucleotide
guggugcgagg

SEQ ID NO: 12798 - RNA, 12 nt, Artificial Sequence
  Description of Artificial Sequence: Synthetic oligonucleotide
gagacaugaaau

SEQ ID NO: 12799 - RNA, 12 nt, Artificial Sequence
  Description of Artificial Sequence: Synthetic oligonucleotide
uauauuucucca

SEQ ID NO: 12800 - RNA, 9 nt, Artificial Sequence
  Description of Artificial Sequence: Synthetic oligonucleotide
augaaggcu

SEQ ID NO: 12801 - RNA, 10 nt, Artificial Sequence
  Description of Artificial Sequence: Synthetic oligonucleotide
cuggaguggu

SEQ ID NO: 12802 - RNA, 10 nt, Artificial Sequence
  Description of Artificial Sequence: Synthetic oligonucleotide
ggaagagagg

SEQ ID NO: 12803 - RNA, 11 nt, Artificial Sequence
  Description of Artificial Sequence: Synthetic oligonucleotide
uugcaucgggc

SEQ ID NO: 12804 - RNA, 12 nt, Artificial Sequence
  Description of Artificial Sequence: Synthetic oligonucleotide
uauccuacugug

SEQ ID NO: 12805 - RNA, 12 nt, Artificial Sequence
  Description of Artificial Sequence: Synthetic oligonucleotide
ccuacuguguaa

SEQ ID NO: 12806 - RNA, 11 nt, Artificial Sequence
  Description of Artificial Sequence: Synthetic oligonucleotide
cuuguagugua

SEQ ID NO: 12807 - RNA, 12 nt, Artificial Sequence
  Description of Artificial Sequence: Synthetic oligonucleotide
cuuuguugauug

SEQ ID NO: 12808 - RNA, 13 nt, Artificial Sequence
  Description of Artificial Sequence: Synthetic oligonucleotide
uuguugauugaaa

SEQ ID NO: 12809 - RNA, 14 nt, Artificial Sequence
  Description of Artificial Sequence: Synthetic oligonucleotide
ucuuuuucuuccau

SEQ ID NO: 12810 - RNA, 12 nt, Artificial Sequence
  Description of Artificial Sequence: Synthetic oligonucleotide
aucuuccuucua

SEQ ID NO: 12811 - RNA, 12 nt, Artificial Sequence
  Description of Artificial Sequence: Synthetic oligonucleotide
ugaaugcuucau

SEQ ID NO: 12812 - RNA, 12 nt, Artificial Sequence
  Description of Artificial Sequence: Synthetic oligonucleotide
gaaugcuucaug

SEQ ID NO: 12813 - RNA, 12 nt, Artificial Sequence
  Description of Artificial Sequence: Synthetic oligonucleotide
auucuacuuuga

SEQ ID NO: 12814 - RNA, 12 nt, Artificial Sequence
  Description of Artificial Sequence: Synthetic oligonucleotide
gcaacuacagac

SEQ ID NO: 12815 - RNA, 12 nt, Artificial Sequence
  Description of Artificial Sequence: Synthetic oligonucleotide
accaaggucaac

SEQ ID NO: 12816 - RNA, 12 nt, Artificial Sequence
  Description of Artificial Sequence: Synthetic oligonucleotide
gacuaucucgac

SEQ ID NO: 12817 - RNA, 12 nt, Artificial Sequence
  Description of Artificial Sequence: Synthetic oligonucleotide
accuucccaaac

SEQ ID NO: 12818 - RNA, 13 nt, Artificial Sequence
  Description of Artificial Sequence: Synthetic oligonucleotide
caagcuuagaacu

SEQ ID NO: 12819 - RNA, 14 nt, Artificial Sequence
  Description of Artificial Sequence: Synthetic oligonucleotide
gcuuagaacuuuaa

SEQ ID NO: 12820 - RNA, 13 nt, Artificial Sequence
  Description of Artificial Sequence: Synthetic oligonucleotide
aacuuuaagcaac

SEQ ID NO: 12821 - RNA, 10 nt, Artificial Sequence
  Description of Artificial Sequence: Synthetic oligonucleotide
agaccaccac

SEQ ID NO: 12822 - RNA, 13 nt, Artificial Sequence
  Description of Artificial Sequence: Synthetic oligonucleotide
cgagaaauaaagu

SEQ ID NO: 12823 - RNA, 13 nt, Artificial Sequence
  Description of Artificial Sequence: Synthetic oligonucleotide
gagaaauaaaguu

SEQ ID NO: 12824 - RNA, 11 nt, Artificial Sequence
  Description of Artificial Sequence: Synthetic oligonucleotide
ggaaaugaucc

SEQ ID NO: 12825 - RNA, 12 nt, Artificial Sequence
  Description of Artificial Sequence: Synthetic oligonucleotide
aagaaaugaaac

SEQ ID NO: 12826 - RNA, 12 nt, Artificial Sequence
  Description of Artificial Sequence: Synthetic oligonucleotide
uuuccauccucc

SEQ ID NO: 12827 - RNA, 14 nt, Artificial Sequence
  Description of Artificial Sequence: Synthetic oligonucleotide
cugaaaaucuuuga

SEQ ID NO: 12828 - RNA, 10 nt, Artificial Sequence
  Description of Artificial Sequence: Synthetic oligonucleotide
gccguucagg

SEQ ID NO: 12829 - RNA, 12 nt, Artificial Sequence
  Description of Artificial Sequence: Synthetic oligonucleotide
aggguccagaag

SEQ ID NO: 12830 - RNA, 12 nt, Artificial Sequence
  Description of Artificial Sequence: Synthetic oligonucleotide
caagacugcuug

SEQ ID NO: 12831 - RNA, 12 nt, Artificial Sequence
  Description of Artificial Sequence: Synthetic oligonucleotide
ccaugucuuugg

SEQ ID NO: 12832 - RNA, 10 nt, Artificial Sequence
  Description of Artificial Sequence: Synthetic oligonucleotide
ccugaaacac

SEQ ID NO: 12833 - RNA, 11 nt, Artificial Sequence
  Description of Artificial Sequence: Synthetic oligonucleotide
cucuguaccuc

SEQ ID NO: 12834 - RNA, 11 nt, Artificial Sequence
  Description of Artificial Sequence: Synthetic oligonucleotide
gcaagacaaga

SEQ ID NO: 12835 - RNA, 12 nt, Artificial Sequence
  Description of Artificial Sequence: Synthetic oligonucleotide
caagacaagaaa

SEQ ID NO: 12836 - RNA, 11 nt, Artificial Sequence
  Description of Artificial Sequence: Synthetic oligonucleotide
guacaagaucc

SEQ ID NO: 12837 - RNA, 11 nt, Artificial Sequence
  Description of Artificial Sequence: Synthetic oligonucleotide
guacuugcaga

SEQ ID NO: 12838 - RNA, 12 nt, Artificial Sequence
  Description of Artificial Sequence: Synthetic oligonucleotide
gaucgauacaga

SEQ ID NO: 12839 - RNA, 12 nt, Artificial Sequence
  Description of Artificial Sequence: Synthetic oligonucleotide
auaaaaauaaau

SEQ ID NO: 12840 - RNA, 12 nt, Artificial Sequence
  Description of Artificial Sequence: Synthetic oligonucleotide
aaaaauaaauau

SEQ ID NO: 12841 - RNA, 12 nt, Artificial Sequence
  Description of Artificial Sequence: Synthetic oligonucleotide
uugacugcugug

SEQ ID NO: 12842 - RNA, 12 nt, Artificial Sequence
  Description of Artificial Sequence: Synthetic oligonucleotide
gagaugagagac

SEQ ID NO: 12843 - RNA, 9 nt, Artificial Sequence
  Description of Artificial Sequence: Synthetic oligonucleotide
cccacuugg

SEQ ID NO: 12844 - RNA, 5616 nt, Homo sapiens
ccccggcgcagcgcggccgcagcagccuccgccccccgcacggugugagcgcccgacgcggccgaggcggccggagucccgagcuagccccggcggccgccgccgcccagaccggacgacaggccaccucgucggcguccgcccgaguccccgccucgccgccaacgccacaaccaccgcgcacggcccccugacuccguccaguauugaucgggagagccggagcgagcucuucggggagcagcgaugcgacccuccgggacggccggggcagcgcuccuggcgcugcuggcugcgcucugcccggcgagucgggcucuggaggaaaagaaaguuugccaaggcacgaguaacaagcucacgcaguugggcacuuuugaagaucauuuucucagccuccagaggauguucaauaacugugaggugguccuugggaauuuggaaauuaccuaugugcagaggaauuaugaucuuuccuucuuaaagaccauccaggagguggcugguuauguccucauugcccucaacacaguggagcgaauuccuuuggaaaaccugcagaucaucagaggaaauauguacuacgaaaauuccuaugccuuagcagucuuaucuaacuaugaugcaaauaaaaccggacugaaggagcugcccaugagaaauuuacaggaaauccugcauggcgccgugcgguucagcaacaacccugcccugugcaacguggagagcauccaguggcgggacauagucagcagugacuuucucagcaacaugucgauggacuuccagaaccaccugggcagcugccaaaagugugauccaagcugucccaaugggagcugcuggggugcaggagaggagaacugccagaaacugaccaaaaucaucugugcccagcagugcuccgggcgcugccguggcaagucccccagugacugcugccacaaccagugugcugcaggcugcacaggcccccgggagagcgacugccuggucugccgcaaauuccgagacgaagccacgugcaaggacaccugccccccacucaugcucuacaaccccaccacguaccagauggaugugaaccccgagggcaaauacagcuuuggugccaccugcgugaagaaguguccccguaauuauguggugacagaucacggcucgugcguccgagccuguggggccgacagcuaugagauggaggaagacggcguccgcaaguguaagaagugcgaagggccuugccgcaaaguguguaacggaauagguauuggugaauuuaaagacucacucuccauaaaugcuacgaauauuaaacacuucaaaaacugcaccuccaucaguggcgaucuccacauccugccgguggcauuuaggggugacuccuucacacauacuccuccucuggauccacaggaacuggauauucugaaaaccguaaaggaaaucacaggguuuuugcugauucaggcuuggccugaaaacaggacggaccuccaugccuuugagaaccuagaaaucauacgcggcaggaccaagcaacauggucaguuuucucuugcagucgucagccugaacauaacauccuugggauuacgcucccucaaggagauaagugauggagaugugauaauuucaggaaacaaaaauuugugcuaugcaaauacaauaaacuggaaaaaacuguuugggaccuccggucagaaaaccaaaauuauaagcaacagaggugaaaacagcugcaaggccacaggccaggucugccaugccuugugcucccccgagggcugcuggggcccggagcccagggacugcgucucuugccggaaugucagccgaggcagggaaugcguggacaagugcaaccuucuggagggugagccaagggaguuuguggagaacucugagugcauacagugccacccagagugccugccucaggccaugaacaucaccugcacaggacggggaccagacaacuguauccagugugcccacuacauugacggcccccacugcgucaagaccugcccggcaggagucaugggagaaaacaacacccuggucuggaaguacgcagacgccggccaugugugccaccugugccauccaaacugcaccuacggaugcacugggccaggucuugaaggcuguccaacgaaugggccuaagaucccguccaucgccacugggauggugggggcccuccucuugcugcuggugguggcccuggggaucggccucuucaugcgaaggcgccacaucguucggaagcgcacgcugcggaggcugcugcaggagagggagcuuguggagccucuuacacccaguggagaagcucccaaccaagcucucuugaggaucuugaaggaaacugaauucaaaaagaucaaagugcugggcuccggugcguucggcacgguguauaagggacucuggaucccagaaggugagaaaguuaaaauucccgucgcuaucaaggaauuaagagaagcaacaucuccgaaagccaacaaggaaauccucgaugaagccuacgugauggccagcguggacaacccccacgugugccgccugcugggcaucugccucaccuccaccgugcagcucaucacgcagcucaugcccuucggcugccuccuggacuauguccgggaacacaaagacaauauuggcucccaguaccugcucaacuggugugugcagaucgcaaagggcaugaacuacuuggaggaccgucgcuuggugcaccgcgaccuggcagccaggaacguacuggugaaaacaccgcagcaugucaagaucacagauuuugggcuggccaaacugcugggugcggaagagaaagaauaccaugcagaaggaggcaaagugccuaucaaguggauggcauuggaaucaauuuuacacagaaucuauacccaccagagugaugucuggagcuacggggugaccguuugggaguugaugaccuuuggauccaagccauaugacggaaucccugccagcgagaucuccuccauccuggagaaaggagaacgccucccucagccacccauauguaccaucgaugucuacaugaucauggucaagugcuggaugauagacgcagauagucgcccaaaguuccgugaguugaucaucgaauucuccaaaauggcccgagacccccagcgcuaccuugucauucagggggaugaaagaaugcauuugccaaguccuacagacuccaacuucuaccgugcccugauggaugaagaagacauggacgacgugguggaugccgacgaguaccucaucccacagcagggcuucuucagcagccccuccacgucacggacuccccuccugagcucucugagugcaaccagcaacaauuccaccguggcuugcauugauagaaaugggcugcaaagcugucccaucaaggaagacagcuucuugcagcgauacagcucagaccccacaggcgccuugacugaggacagcauagacgacaccuuccucccagugccugaauacauaaaccaguccguucccaaaaggcccgcuggcucugugcagaauccugucuaucacaaucagccucugaaccccgcgcccagcagagacccacacuaccaggacccccacagcacugcagugggcaaccccgaguaucucaacacuguccagcccaccugugucaacagcacauucgacagcccugcccacugggcccagaaaggcagccaccaaauuagccuggacaacccugacuaccagcaggacuucuuucccaaggaagccaagccaaauggcaucuuuaagggcuccacagcugaaaaugcagaauaccuaagggucgcgccacaaagcagugaauuuauuggagcaugaccacggaggauaguaugagcccuaaaaauccagacucuuucgauacccaggaccaagccacagcagguccuccaucccaacagccaugcccgcauuagcucuuagacccacagacugguuuugcaacguuuacaccgacuagccaggaaguacuuccaccucgggcacauuuugggaaguugcauuccuuugucuucaaacugugaagcauuuacagaaacgcauccagcaagaauauugucccuuugagcagaaauuuaucuuucaaagagguauauuugaaaaaaaaaaaaaguauaugugaggauuuuuauugauuggggaucuuggaguuuuucauugucgcuauugauuuuuacuucaaugggcucuuccaacaaggaagaagcuugcugguagcacuugcuacccugaguucauccaggcccaacugugagcaaggagcacaagccacaagucuuccagaggaugcuugauuccagugguucugcuucaaggcuuccacugcaaaacacuaaagauccaagaaggccuucauggccccagcaggccggaucgguacuguaucaagucauggcagguacaguaggauaagccacucugucccuuccugggcaaagaagaaacggaggggauggaauucuuccuuagacuuacuuuuguaaaaauguccccacgguacuuacuccccacugauggaccagugguuuccagucaugagcguuagacugacuuguuugucuuccauuccauuguuuugaaacucaguaugcugccccugucuugcugucaugaaaucagcaagagaggaugacacaucaaauaauaacucggauuccagcccacauuggauucaucagcauuuggaccaauagcccacagcugagaauguggaauaccuaaggauagcaccgcuuuuguucucgcaaaaacguaucuccuaauuugaggcucagaugaaaugcaucagguccuuuggggcauagaucagaagacuacaaaaaugaagcugcucugaaaucuccuuuagccaucaccccaaccccccaaaauuaguuuguguuacuuauggaagauaguuuucuccuuuuacuucacuucaaaagcuuuuuacucaaagaguauauguucccuccaggucagcugcccccaaacccccuccuuacgcuuugucacacaaaaagugucucugccuugagucaucuauucaagcacuuacagcucuggccacaacagggcauuuuacaggugcgaaugacaguagcauuaugaguaguguggaauucagguaguaaauaugaaacuaggguuugaaauugauaaugcuuucacaacauuugcagauguuuuagaaggaaaaaaguuccuuccuaaaauaauuucucuacaauuggaagauuggaagauucagcuaguuaggagcccaccuuuuuuccuaaucugugugugcccuguaaccugacugguuaacagcaguccuuuguaaacaguguuuuaaacucuccuagucaauauccaccccauccaauuuaucaaggaagaaaugguucagaaaauauuuucagccuacaguuauguucagucacacacacauacaaaauguuccuuuugcuuuuaaaguaauuuuugacucccagaucagucagagccccuacagcauuguuaagaaaguauuugauuuuugucucaaugaaaauaaaacuauauucauuuccacucuaaaaaaaaaaaaaaaaa

SEQ ID NO: 12845 - RNA, 2239 nt, Homo sapiens
ccccggcgcagcgcggccgcagcagccuccgccccccgcacggugugagcgcccgacgcggccgaggcggccggagucccgagcuagccccggcggccgccgccgcccagaccggacgacaggccaccucgucggcguccgcccgaguccccgccucgccgccaacgccacaaccaccgcgcacggcccccugacuccguccaguauugaucgggagagccggagcgagcucuucggggagcagcgaugcgacccuccgggacggccggggcagcgcuccuggcgcugcuggcugcgcucugcccggcgagucgggcucuggaggaaaagaaaguuugccaaggcacgaguaacaagcucacgcaguugggcacuuuugaagaucauuuucucagccuccagaggauguucaauaacugugaggugguccuugggaauuuggaaauuaccuaugugcagaggaauuaugaucuuuccuucuuaaagaccauccaggagguggcugguuauguccucauugcccucaacacaguggagcgaauuccuuuggaaaaccugcagaucaucagaggaaauauguacuacgaaaauuccuaugccuuagcagucuuaucuaacuaugaugcaaauaaaaccggacugaaggagcugcccaugagaaauuuacaggaaauccugcauggcgccgugcgguucagcaacaacccugcccugugcaacguggagagcauccaguggcgggacauagucagcagugacuuucucagcaacaugucgauggacuuccagaaccaccugggcagcugccaaaagugugauccaagcugucccaaugggagcugcuggggugcaggagaggagaacugccagaaacugaccaaaaucaucugugcccagcagugcuccgggcgcugccguggcaagucccccagugacugcugccacaaccagugugcugcaggcugcacaggcccccgggagagcgacugccuggucugccgcaaauuccgagacgaagccacgugcaaggacaccugccccccacucaugcucuacaaccccaccacguaccagauggaugugaaccccgagggcaaauacagcuuuggugccaccugcgugaagaaguguccccguaauuauguggugacagaucacggcucgugcguccgagccuguggggccgacagcuaugagauggaggaagacggcguccgcaaguguaagaagugcgaagggccuugccgcaaaguguguaacggaauagguauuggugaauuuaaagacucacucuccauaaaugcuacgaauauuaaacacuucaaaaacugcaccuccaucaguggcgaucuccacauccugccgguggcauuuaggggugacuccuucacacauacuccuccucuggauccacaggaacuggauauucugaaaaccguaaaggaaaucacaggguuuuugcugauucaggcuuggccugaaaacaggacggaccuccaugccuuugagaaccuagaaaucauacgcggcaggaccaagcaacauggucaguuuucucuugcagucgucagccugaacauaacauccuugggauuacgcucccucaaggagauaagugauggagaugugauaauuucaggaaacaaaaauuugugcuaugcaaauacaauaaacuggaaaaaacuguuugggaccuccggucagaaaaccaaaauuauaagcaacagaggugaaaacagcugcaaggccacaggccaggucugccaugccuugugcucccccgagggcugcuggggcccggagcccagggacugcgucucuugccggaaugucagccgaggcagggaaugcguggacaagugcaaccuucuggagggugagccaagggaguuuguggagaacucugagugcauacagugccacccagagugccugccucaggccaugaacaucaccugcacaggacggggaccagacaacuguauccagugugcccacuacauugacggcccccacugcgucaagaccugcccggcaggagucaugggagaaaacaacacccuggucuggaaguacgcagacgccggccaugugugccaccugugccauccaaacugcaccuacggguccuaauaaaucuucacugucugacuuuagucucccacuaaaacugcauuuccuuucuacaauuucaauuucucccuuugcuucaaauaaaguccugacacuauucauuuga

SEQ ID NO: 12846 - RNA, 1595 nt, Homo sapiens
ccccggcgcagcgcggccgcagcagccuccgccccccgcacggugugagcgcccgacgcggccgaggcggccggagucccgagcuagccccggcggccgccgccgcccagaccggacgacaggccaccucgucggcguccgcccgaguccccgccucgccgccaacgccacaaccaccgcgcacggcccccugacuccguccaguauugaucgggagagccggagcgagcucuucggggagcagcgaugcgacccuccgggacggccggggcagcgcuccuggcgcugcuggcugcgcucugcccggcgagucgggcucuggaggaaaagaaaguuugccaaggcacgaguaacaagcucacgcaguugggcacuuuugaagaucauuuucucagccuccagaggauguucaauaacugugaggugguccuugggaauuuggaaauuaccuaugugcagaggaauuaugaucuuuccuucuuaaagaccauccaggagguggcugguuauguccucauugcccucaacacaguggagcgaauuccuuuggaaaaccugcagaucaucagaggaaauauguacuacgaaaauuccuaugccuuagcagucuuaucuaacuaugaugcaaauaaaaccggacugaaggagcugcccaugagaaauuuacaggaaauccugcauggcgccgugcgguucagcaacaacccugcccugugcaacguggagagcauccaguggcgggacauagucagcagugacuuucucagcaacaugucgauggacuuccagaaccaccugggcagcugccaaaagugugauccaagcugucccaaugggagcugcuggggugcaggagaggagaacugccagaaacugaccaaaaucaucugugcccagcagugcuccgggcgcugccguggcaagucccccagugacugcugccacaaccagugugcugcaggcugcacaggcccccgggagagcgacugccuggucugccgcaaauuccgagacgaagccacgugcaaggacaccugccccccacucaugcucuacaaccccaccacguaccagauggaugugaaccccgagggcaaauacagcuuuggugccaccugcgugaagaaguguccccguaauuauguggugacagaucacggcucgugcguccgagccuguggggccgacagcuaugagauggaggaagacggcguccgcaaguguaagaagugcgaagggccuugccgcaaaguguguaacggaauagguauuggugaauuuaaagacucacucuccauaaaugcuacgaauauuaaacacuucaaaaacugcaccuccaucaguggcgaucuccacauccugccgguggcauuuaggggugacuccuucacacauacuccuccucuggauccacaggaacuggauauucugaaaaccguaaaggaaaucacagguuugagcugaauuaucacaugaauauaaaugggaaaucaguguuuuagagagagaacuuuucgacauauuuccuguucccuuggaauaaaaacauuucuucugaaauuuuaccguuaaaaaaaaaaaaaaaaaaaaaaaaa

SEQ ID NO: 12847 - RNA, 2865 nt, Homo sapiens
ccccggcgcagcgcggccgcagcagccuccgccccccgcacggugugagcgcccgacgcggccgaggcggccggagucccgagcuagccccggcggccgccgccgcccagaccggacgacaggccaccucgucggcguccgcccgaguccccgccucgccgccaacgccacaaccaccgcgcacggcccccugacuccguccaguauugaucgggagagccggagcgagcucuucggggagcagcgaugcgacccuccgggacggccggggcagcgcuccuggcgcugcuggcugcgcucugcccggcgagucgggcucuggaggaaaagaaaguuugccaaggcacgaguaacaagcucacgcaguugggcacuuuugaagaucauuuucucagccuccagaggauguucaauaacugugaggugguccuugggaauuuggaaauuaccuaugugcagaggaauuaugaucuuuccuucuuaaagaccauccaggagguggcugguuauguccucauugcccucaacacaguggagcgaauuccuuuggaaaaccugcagaucaucagaggaaauauguacuacgaaaauuccuaugccuuagcagucuuaucuaacuaugaugcaaauaaaaccggacugaaggagcugcccaugagaaauuuacaggaaauccugcauggcgccgugcgguucagcaacaacccugcccugugcaacguggagagcauccaguggcgggacauagucagcagugacuuucucagcaacaugucgauggacuuccagaaccaccugggcagcugccaaaagugugauccaagcugucccaaugggagcugcuggggugcaggagaggagaacugccagaaacugaccaaaaucaucugugcccagcagugcuccgggcgcugccguggcaagucccccagugacugcugccacaaccagugugcugcaggcugcacaggcccccgggagagcgacugccuggucugccgcaaauuccgagacgaagccacgugcaaggacaccugccccccacucaugcucuacaaccccaccacguaccagauggaugugaaccccgagggcaaauacagcuuuggugccaccugcgugaagaaguguccccguaauuauguggugacagaucacggcucgugcguccgagccuguggggccgacagcuaugagauggaggaagacggcguccgcaaguguaagaagugcgaagggccuugccgcaaaguguguaacggaauagguauuggugaauuuaaagacucacucuccauaaaugcuacgaauauuaaacacuucaaaaacugcaccuccaucaguggcgaucuccacauccugccgguggcauuuaggggugacuccuucacacauacuccuccucuggauccacaggaacuggauauucugaaaaccguaaaggaaaucacaggguuuuugcugauucaggcuuggccugaaaacaggacggaccuccaugccuuugagaaccuagaaaucauacgcggcaggaccaagcaacauggucaguuuucucuugcagucgucagccugaacauaacauccuugggauuacgcucccucaaggagauaagugauggagaugugauaauuucaggaaacaaaaauuugugcuaugcaaauacaauaaacuggaaaaaacuguuugggaccuccggucagaaaaccaaaauuauaagcaacagaggugaaaacagcugcaaggccacaggccaggucugccaugccuugugcucccccgagggcugcuggggcccggagcccagggacugcgucucuugccggaaugucagccgaggcagggaaugcguggacaagugcaaccuucuggagggugagccaagggaguuuguggagaacucugagugcauacagugccacccagagugccugccucaggccaugaacaucaccugcacaggacggggaccagacaacuguauccagugugcccacuacauugacggcccccacugcgucaagaccugcccggcaggagucaugggagaaaacaacacccuggucuggaaguacgcagacgccggccaugugugccaccugugccauccaaacugcaccuacgggccaggaaaugagagucucaaagccauguuauucugccuuuuuaaacuaucauccuguaaucaaaguaaugauggcagcgugucccaccagagcgggagcccagcugcucaggagucaugcuuaggauggaucccuucucuucugccgucagaguuucagcuggguugggguggaugcagccaccuccaugccuggccuucugcaucugugaucaucacggccuccuccugccacugagccucaugccuucacgugucuguuccccccgcuuuuccuuucugccaccccugcacgugggccgccagguucccaagaguauccuacccauuuccuuccuuccacucccuuugccagugccucucaccccaacuaguagcuaaccaucacccccaggacugaccucuuccuccucgcugccagaugauuguucaaagcacagaauuugucagaaaccugcagggacuccaugcugccagccuucuccguaauuagcauggccccaguccaugcuucuagccuugguuccuucugccccucuguuugaaauucuagagccagcugugggacaauuaucugugucaaaagccagaugugaaaacaucucaauaacaaacuggcugcuuuguucaaugcuagaacaacgccugucacagaguagaaacucaaaaauauuugcugagugaaugaacaaaugaauaaaugcauaauaaauaauuaaccaccaauccaacauccaga

SEQ ID NO: 12848 - RNA, 19 nt, Artificial Sequence
  Description of Artificial Sequence: Synthetic oligonucleotide
ccccggcgcagcgcggccg

SEQ ID NO: 12849 - RNA, 19 nt, Artificial Sequence
  Description of Artificial Sequence: Synthetic oligonucleotide
gcagcagccuccgcccccc

SEQ ID NO: 12850 - RNA, 19 nt, Artificial Sequence
  Description of Artificial Sequence: Synthetic oligonucleotide
cgcacggugugagcgcccg

SEQ ID NO: 12851 - RNA, 19 nt, Artificial Sequence
  Description of Artificial Sequence: Synthetic oligonucleotide
gacgcggccgaggcggccg

SEQ ID NO: 12852 - RNA, 19 nt, Artificial Sequence
  Description of Artificial Sequence: Synthetic oligonucleotide
ggagucccgagcuagcccc

SEQ ID NO: 12853 - RNA, 19 nt, Artificial Sequence
  Description of Artificial Sequence: Synthetic oligonucleotide
cggcggccgccgccgccca

SEQ ID NO: 12854 - RNA, 19 nt, Artificial Sequence
  Description of Artificial Sequence: Synthetic oligonucleotide
agaccggacgacaggccac

SEQ ID NO: 12855 - RNA, 19 nt, Artificial Sequence
  Description of Artificial Sequence: Synthetic oligonucleotide
ccucgucggcguccgcccg

SEQ ID NO: 12856 - RNA, 19 nt, Artificial Sequence
  Description of Artificial Sequence: Synthetic oligonucleotide
gaguccccgccucgccgcc

SEQ ID NO: 12857 - RNA, 19 nt, Artificial Sequence
  Description of Artificial Sequence: Synthetic oligonucleotide
caacgccacaaccaccgcg

SEQ ID NO: 12858 - RNA, 19 nt, Artificial Sequence
  Description of Artificial Sequence: Synthetic oligonucleotide
gcacggcccccugacuccg

SEQ ID NO: 12859 - RNA, 19 nt, Artificial Sequence
  Description of Artificial Sequence: Synthetic oligonucleotide
guccaguauugaucgggag

SEQ ID NO: 12860 - RNA, 19 nt, Artificial Sequence
  Description of Artificial Sequence: Synthetic oligonucleotide
gagccggagcgagcucuuc

SEQ ID NO: 12861 - RNA, 19 nt, Artificial Sequence
  Description of Artificial Sequence: Synthetic oligonucleotide
cggggagcagcgaugcgac

SEQ ID NO: 12862 - RNA, 19 nt, Artificial Sequence
  Description of Artificial Sequence: Synthetic oligonucleotide
cccuccgggacggccgggg

SEQ ID NO: 12863 - RNA, 19 nt, Artificial Sequence
  Description of Artificial Sequence: Synthetic oligonucleotide
gcagcgcuccuggcgcugc

SEQ ID NO: 12864 - RNA, 19 nt, Artificial Sequence
  Description of Artificial Sequence: Synthetic oligonucleotide
cuggcugcgcucugcccgg

SEQ ID NO: 12865 - RNA, 19 nt, Artificial Sequence
  Description of Artificial Sequence: Synthetic oligonucleotide
gcgagucgggcucuggagg

SEQ ID NO: 12866 - RNA, 19 nt, Artificial Sequence
  Description of Artificial Sequence: Synthetic oligonucleotide
gaaaagaaaguuugccaag

SEQ ID NO: 12867 - RNA, 19 nt, Artificial Sequence
  Description of Artificial Sequence: Synthetic oligonucleotide
ggcacgaguaacaagcuca

SEQ ID NO: 12868 - RNA, 19 nt, Artificial Sequence
  Description of Artificial Sequence: Synthetic oligonucleotide
acgcaguugggcacuuuug

SEQ ID NO: 12869 - RNA, 19 nt, Artificial Sequence
  Description of Artificial Sequence: Synthetic oligonucleotide
gaagaucauuuucucagcc

SEQ ID NO: 12870 - RNA, 19 nt, Artificial Sequence
  Description of Artificial Sequence: Synthetic oligonucleotide
cuccagaggauguucaaua

SEQ ID NO: 12871 - RNA, 19 nt, Artificial Sequence
  Description of Artificial Sequence: Synthetic oligonucleotide
aacugugaggugguccuug

SEQ ID NO: 12872 - RNA, 19 nt, Artificial Sequence
  Description of Artificial Sequence: Synthetic oligonucleotide
gggaauuuggaaauuaccu

SEQ ID NO: 12873 - RNA, 19 nt, Artificial Sequence
  Description of Artificial Sequence: Synthetic oligonucleotide
uaugugcagaggaauuaug

SEQ ID NO: 12874 - RNA, 19 nt, Artificial Sequence
  Description of Artificial Sequence: Synthetic oligonucleotide
gaucuuuccuucuuaaaga

SEQ ID NO: 12875 - RNA, 19 nt, Artificial Sequence
  Description of Artificial Sequence: Synthetic oligonucleotide
accauccaggagguggcug

SEQ ID NO: 12876 - RNA, 19 nt, Artificial Sequence
  Description of Artificial Sequence: Synthetic oligonucleotide
gguuauguccucauugccc

SEQ ID NO: 12877 - RNA, 19 nt, Artificial Sequence
  Description of Artificial Sequence: Synthetic oligonucleotide
cucaacacaguggagcgaa

SEQ ID NO: 12878 - RNA, 19 nt, Artificial Sequence
  Description of Artificial Sequence: Synthetic oligonucleotide
auuccuuuggaaaaccugc

SEQ ID NO: 12879 - RNA, 19 nt, Artificial Sequence
  Description of Artificial Sequence: Synthetic oligonucleotide
cagaucaucagaggaaaua

SEQ ID NO: 12880 - RNA, 19 nt, Artificial Sequence
  Description of Artificial Sequence: Synthetic oligonucleotide
auguacuacgaaaauuccu

SEQ ID NO: 12881 - RNA, 19 nt, Artificial Sequence
  Description of Artificial Sequence: Synthetic oligonucleotide
uaugccuuagcagucuuau

SEQ ID NO: 12882 - RNA, 19 nt, Artificial Sequence
  Description of Artificial Sequence: Synthetic oligonucleotide
ucuaacuaugaugcaaaua

SEQ ID NO: 12883 - RNA, 19 nt, Artificial Sequence
  Description of Artificial Sequence: Synthetic oligonucleotide
aaaaccggacugaaggagc

SEQ ID NO: 12884 - RNA, 19 nt, Artificial Sequence
  Description of Artificial Sequence: Synthetic oligonucleotide
cugcccaugagaaauuuac

SEQ ID NO: 12885 - RNA, 19 nt, Artificial Sequence
  Description of Artificial Sequence: Synthetic oligonucleotide
caggaaauccugcauggcg

SEQ ID NO: 12886 - RNA, 19 nt, Artificial Sequence
  Description of Artificial Sequence: Synthetic oligonucleotide
gccgugcgguucagcaaca

SEQ ID NO: 12887 - RNA, 19 nt, Artificial Sequence
  Description of Artificial Sequence: Synthetic oligonucleotide
aacccugcccugugcaacg

SEQ ID NO: 12888 - RNA, 19 nt, Artificial Sequence
  Description of Artificial Sequence: Synthetic oligonucleotide
guggagagcauccaguggc

SEQ ID NO: 12889 - RNA, 19 nt, Artificial Sequence
  Description of Artificial Sequence: Synthetic oligonucleotide
cgggacauagucagcagug

SEQ ID NO: 12890 - RNA, 19 nt, Artificial Sequence
  Description of Artificial Sequence: Synthetic oligonucleotide
gacuuucucagcaacaugu

SEQ ID NO: 12891 - RNA, 19 nt, Artificial Sequence
  Description of Artificial Sequence: Synthetic oligonucleotide
ucgauggacuuccagaacc

SEQ ID NO: 12892 - RNA, 19 nt, Artificial Sequence
  Description of Artificial Sequence: Synthetic oligonucleotide
caccugggcagcugccaaa

SEQ ID NO: 12893 - RNA, 19 nt, Artificial Sequence
  Description of Artificial Sequence: Synthetic oligonucleotide
aagugugauccaagcuguc

SEQ ID NO: 12894 - RNA, 19 nt, Artificial Sequence
  Description of Artificial Sequence: Synthetic oligonucleotide
cccaaugggagcugcuggg

SEQ ID NO: 12895 - RNA, 19 nt, Artificial Sequence
  Description of Artificial Sequence: Synthetic oligonucleotide
ggugcaggagaggagaacu

SEQ ID NO: 12896 - RNA, 19 nt, Artificial Sequence
  Description of Artificial Sequence: Synthetic oligonucleotide
ugccagaaacugaccaaaa

SEQ ID NO: 12897 - RNA, 19 nt, Artificial Sequence
  Description of Artificial Sequence: Synthetic oligonucleotide
aucaucugugcccagcagu

SEQ ID NO: 12898 - RNA, 19 nt, Artificial Sequence
  Description of Artificial Sequence: Synthetic oligonucleotide
ugcuccgggcgcugccgug

SEQ ID NO: 12899 - RNA, 19 nt, Artificial Sequence
  Description of Artificial Sequence: Synthetic oligonucleotide
ggcaagucccccagugacu

SEQ ID NO: 12900 - RNA, 19 nt, Artificial Sequence
  Description of Artificial Sequence: Synthetic oligonucleotide
ugcugccacaaccagugug

SEQ ID NO: 12901 - RNA, 19 nt, Artificial Sequence
  Description of Artificial Sequence: Synthetic oligonucleotide
gcugcaggcugcacaggcc

SEQ ID NO: 12902 - RNA, 19 nt, Artificial Sequence
  Description of Artificial Sequence: Synthetic oligonucleotide
ccccgggagagcgacugcc

SEQ ID NO: 12903 - RNA, 19 nt, Artificial Sequence
  Description of Artificial Sequence: Synthetic oligonucleotide
cuggucugccgcaaauucc

SEQ ID NO: 12904 - RNA, 19 nt, Artificial Sequence
  Description of Artificial Sequence: Synthetic oligonucleotide
cgagacgaagccacgugca

SEQ ID NO: 12905 - RNA, 19 nt, Artificial Sequence
  Description of Artificial Sequence: Synthetic oligonucleotide
aaggacaccugccccccac

SEQ ID NO: 12906 - RNA, 19 nt, Artificial Sequence
  Description of Artificial Sequence: Synthetic oligonucleotide
cucaugcucuacaacccca

SEQ ID NO: 12907 - RNA, 19 nt, Artificial Sequence
  Description of Artificial Sequence: Synthetic oligonucleotide
accacguaccagauggaug

SEQ ID NO: 12908 - RNA, 19 nt, Artificial Sequence
  Description of Artificial Sequence: Synthetic oligonucleotide
gugaaccccgagggcaaau

SEQ ID NO: 12909 - RNA, 19 nt, Artificial Sequence
  Description of Artificial Sequence: Synthetic oligonucleotide
uacagcuuuggugccaccu

SEQ ID NO: 12910 - RNA, 19 nt, Artificial Sequence
  Description of Artificial Sequence: Synthetic oligonucleotide
ugcgugaagaagugucccc

SEQ ID NO: 12911 - RNA, 19 nt, Artificial Sequence
  Description of Artificial Sequence: Synthetic oligonucleotide
cguaauuauguggugacag

SEQ ID NO: 12912 - RNA, 19 nt, Artificial Sequence
  Description of Artificial Sequence: Synthetic oligonucleotide
gaucacggcucgugcgucc

SEQ ID NO: 12913 - RNA, 19 nt, Artificial Sequence
  Description of Artificial Sequence: Synthetic oligonucleotide
cgagccuguggggccgaca

SEQ ID NO: 12914 - RNA, 19 nt, Artificial Sequence
  Description of Artificial Sequence: Synthetic oligonucleotide
agcuaugagauggaggaag

SEQ ID NO: 12915 - RNA, 19 nt, Artificial Sequence
  Description of Artificial Sequence: Synthetic oligonucleotide
gacggcguccgcaagugua

SEQ ID NO: 12916 - RNA, 19 nt, Artificial Sequence
  Description of Artificial Sequence: Synthetic oligonucleotide
aagaagugcgaagggccuu

SEQ ID NO: 12917 - RNA, 19 nt, Artificial Sequence
  Description of Artificial Sequence: Synthetic oligonucleotide
ugccgcaaaguguguaacg

SEQ ID NO: 12918 - RNA, 19 nt, Artificial Sequence
  Description of Artificial Sequence: Synthetic oligonucleotide
ggaauagguauuggugaau

SEQ ID NO: 12919 - RNA, 19 nt, Artificial Sequence
  Description of Artificial Sequence: Synthetic oligonucleotide
uuuaaagacucacucucca

SEQ ID NO: 12920 - RNA, 19 nt, Artificial Sequence
  Description of Artificial Sequence: Synthetic oligonucleotide
auaaaugcuacgaauauua

SEQ ID NO: 12921 - RNA, 19 nt, Artificial Sequence
  Description of Artificial Sequence: Synthetic oligonucleotide
aaacacuucaaaaacugca

SEQ ID NO: 12922 - RNA, 19 nt, Artificial Sequence
  Description of Artificial Sequence: Synthetic oligonucleotide
accuccaucaguggcgauc

SEQ ID NO: 12923 - RNA, 19 nt, Artificial Sequence
  Description of Artificial Sequence: Synthetic oligonucleotide
cuccacauccugccggugg

SEQ ID NO: 12924 - RNA, 19 nt, Artificial Sequence
  Description of Artificial Sequence: Synthetic oligonucleotide
gcauuuaggggugacuccu

SEQ ID NO: 12925 - RNA, 19 nt, Artificial Sequence
  Description of Artificial Sequence: Synthetic oligonucleotide
uucacacauacuccuccuc

SEQ ID NO: 12926 - RNA, 19 nt, Artificial Sequence
  Description of Artificial Sequence: Synthetic oligonucleotide
cuggauccacaggaacugg

SEQ ID NO: 12927 - RNA, 19 nt, Artificial Sequence
  Description of Artificial Sequence: Synthetic oligonucleotide
gauauucugaaaaccguaa

SEQ ID NO: 12928 - RNA, 19 nt, Artificial Sequence
  Description of Artificial Sequence: Synthetic oligonucleotide
aaggaaaucacagguuuga

SEQ ID NO: 12929 - RNA, 19 nt, Artificial Sequence
  Description of Artificial Sequence: Synthetic oligonucleotide
agcugaauuaucacaugaa

SEQ ID NO: 12930 - RNA, 19 nt, Artificial Sequence
  Description of Artificial Sequence: Synthetic oligonucleotide
auauaaaugggaaaucagu

SEQ ID NO: 12931 - RNA, 19 nt, Artificial Sequence
  Description of Artificial Sequence: Synthetic oligonucleotide
uguuuuagagagagaacuu

SEQ ID NO: 12932 - RNA, 19 nt, Artificial Sequence
  Description of Artificial Sequence: Synthetic oligonucleotide
uuucgacauauuuccuguu

SEQ ID NO: 12933 - RNA, 19 nt, Artificial Sequence
  Description of Artificial Sequence: Synthetic oligonucleotide
ucccuuggaauaaaaacau

SEQ ID NO: 12934 - RNA, 19 nt, Artificial Sequence
  Description of Artificial Sequence: Synthetic oligonucleotide
uuucuucugaaauuuuacc

SEQ ID NO: 12935 - RNA, 19 nt, Artificial Sequence
  Description of Artificial Sequence: Synthetic oligonucleotide
aaggaaaucacaggguuuu

SEQ ID NO: 12936 - RNA, 19 nt, Artificial Sequence
  Description of Artificial Sequence: Synthetic oligonucleotide
uugcugauucaggcuuggc

SEQ ID NO: 12937 - RNA, 19 nt, Artificial Sequence
  Description of Artificial Sequence: Synthetic oligonucleotide
ccugaaaacaggacggacc

SEQ ID NO: 12938 - RNA, 19 nt, Artificial Sequence
  Description of Artificial Sequence: Synthetic oligonucleotide
cuccaugccuuugagaacc

SEQ ID NO: 12939 - RNA, 19 nt, Artificial Sequence
  Description of Artificial Sequence: Synthetic oligonucleotide
cuagaaaucauacgcggca

SEQ ID NO: 12940 - RNA, 19 nt, Artificial Sequence
  Description of Artificial Sequence: Synthetic oligonucleotide
aggaccaagcaacaugguc

SEQ ID NO: 12941 - RNA, 19 nt, Artificial Sequence
  Description of Artificial Sequence: Synthetic oligonucleotide
caguuuucucuugcagucg

SEQ ID NO: 12942 - RNA, 19 nt, Artificial Sequence
  Description of Artificial Sequence: Synthetic oligonucleotide
gucagccugaacauaacau

SEQ ID NO: 12943 - RNA, 19 nt, Artificial Sequence
  Description of Artificial Sequence: Synthetic oligonucleotide
uccuugggauuacgcuccc

SEQ ID NO: 12944 - RNA, 19 nt, Artificial Sequence
  Description of Artificial Sequence: Synthetic oligonucleotide
cucaaggagauaagugaug

SEQ ID NO: 12945 - RNA, 19 nt, Artificial Sequence
  Description of Artificial Sequence: Synthetic oligonucleotide
ggagaugugauaauuucag

SEQ ID NO: 12946 - RNA, 19 nt, Artificial Sequence
  Description of Artificial Sequence: Synthetic oligonucleotide
ggaaacaaaaauuugugcu

SEQ ID NO: 12947 - RNA, 19 nt, Artificial Sequence
  Description of Artificial Sequence: Synthetic oligonucleotide
uaugcaaauacaauaaacu

SEQ ID NO: 12948 - RNA, 19 nt, Artificial Sequence
  Description of Artificial Sequence: Synthetic oligonucleotide
uggaaaaaacuguuuggga

SEQ ID NO: 12949 - RNA, 19 nt, Artificial Sequence
  Description of Artificial Sequence: Synthetic oligonucleotide
accuccggucagaaaacca

SEQ ID NO: 12950 - RNA, 19 nt, Artificial Sequence
  Description of Artificial Sequence: Synthetic oligonucleotide
aaaauuauaagcaacagag

SEQ ID NO: 12951 - RNA, 19 nt, Artificial Sequence
  Description of Artificial Sequence: Synthetic oligonucleotide
ggugaaaacagcugcaagg

SEQ ID NO: 12952 - RNA, 19 nt, Artificial Sequence
  Description of Artificial Sequence: Synthetic oligonucleotide
gccacaggccaggucugcc

SEQ ID NO: 12953 - RNA, 19 nt, Artificial Sequence
  Description of Artificial Sequence: Synthetic oligonucleotide
caugccuugugcucccccg

SEQ ID NO: 12954 - RNA, 19 nt, Artificial Sequence
  Description of Artificial Sequence: Synthetic oligonucleotide
gagggcugcuggggcccgg

SEQ ID NO: 12955 - RNA, 19 nt, Artificial Sequence
  Description of Artificial Sequence: Synthetic oligonucleotide
gagcccagggacugcgucu

SEQ ID NO: 12956 - RNA, 19 nt, Artificial Sequence
  Description of Artificial Sequence: Synthetic oligonucleotide
ucuugccggaaugucagcc

SEQ ID NO: 12957 - RNA, 19 nt, Artificial Sequence
  Description of Artificial Sequence: Synthetic oligonucleotide
cgaggcagggaaugcgugg

SEQ ID NO: 12958 - RNA, 19 nt, Artificial Sequence
  Description of Artificial Sequence: Synthetic oligonucleotide
gacaagugcaaccuucugg

SEQ ID NO: 12959 - RNA, 19 nt, Artificial Sequence
  Description of Artificial Sequence: Synthetic oligonucleotide
gagggugagccaagggagu

SEQ ID NO: 12960 - RNA, 19 nt, Artificial Sequence
  Description of Artificial Sequence: Synthetic oligonucleotide
uuuguggagaacucugagu

SEQ ID NO: 12961 - RNA, 19 nt, Artificial Sequence
  Description of Artificial Sequence: Synthetic oligonucleotide
ugcauacagugccacccag

SEQ ID NO: 12962 - RNA, 19 nt, Artificial Sequence
  Description of Artificial Sequence: Synthetic oligonucleotide
gagugccugccucaggcca

SEQ ID NO: 12963 - RNA, 19 nt, Artificial Sequence
  Description of Artificial Sequence: Synthetic oligonucleotide
augaacaucaccugcacag

SEQ ID NO: 12964 - RNA, 19 nt, Artificial Sequence
  Description of Artificial Sequence: Synthetic oligonucleotide
ggacggggaccagacaacu

SEQ ID NO: 12965 - RNA, 19 nt, Artificial Sequence
  Description of Artificial Sequence: Synthetic oligonucleotide
uguauccagugugcccacu

SEQ ID NO: 12966 - RNA, 19 nt, Artificial Sequence
  Description of Artificial Sequence: Synthetic oligonucleotide
uacauugacggcccccacu

SEQ ID NO: 12967 - RNA, 19 nt, Artificial Sequence
  Description of Artificial Sequence: Synthetic oligonucleotide
ugcgucaagaccugcccgg

SEQ ID NO: 12968 - RNA, 19 nt, Artificial Sequence
  Description of Artificial Sequence: Synthetic oligonucleotide
gcaggagucaugggagaaa

SEQ ID NO: 12969 - RNA, 19 nt, Artificial Sequence
  Description of Artificial Sequence: Synthetic oligonucleotide
aacaacacccuggucugga

SEQ ID NO: 12970 - RNA, 19 nt, Artificial Sequence
  Description of Artificial Sequence: Synthetic oligonucleotide
aaguacgcagacgccggcc

SEQ ID NO: 12971 - RNA, 19 nt, Artificial Sequence
  Description of Artificial Sequence: Synthetic oligonucleotide
caugugugccaccugugcc

SEQ ID NO: 12972 - RNA, 19 nt, Artificial Sequence
  Description of Artificial Sequence: Synthetic oligonucleotide
cauccaaacugcaccuacg

SEQ ID NO: 12973 - RNA, 19 nt, Artificial Sequence
  Description of Artificial Sequence: Synthetic oligonucleotide
ggguccuaauaaaucuuca

SEQ ID NO: 12974 - RNA, 19 nt, Artificial Sequence
  Description of Artificial Sequence: Synthetic oligonucleotide
acugucugacuuuagucuc

SEQ ID NO: 12975 - RNA, 19 nt, Artificial Sequence
  Description of Artificial Sequence: Synthetic oligonucleotide
cccacuaaaacugcauuuc

SEQ ID NO: 12976 - RNA, 19 nt, Artificial Sequence
  Description of Artificial Sequence: Synthetic oligonucleotide
ccuuucuacaauuucaauu

SEQ ID NO: 12977 - RNA, 19 nt, Artificial Sequence
  Description of Artificial Sequence: Synthetic oligonucleotide
uucucccuuugcuucaaau

SEQ ID NO: 12978 - RNA, 19 nt, Artificial Sequence
  Description of Artificial Sequence: Synthetic oligonucleotide
uaaaguccugacacuauuc

SEQ ID NO: 12979 - RNA, 19 nt, Artificial Sequence
  Description of Artificial Sequence: Synthetic oligonucleotide
ccugacacuauucauuuga

SEQ ID NO: 12980 - RNA, 19 nt, Artificial Sequence
  Description of Artificial Sequence: Synthetic oligonucleotide
ggaugcacugggccagguc

SEQ ID NO: 12981 - RNA, 19 nt, Artificial Sequence
  Description of Artificial Sequence: Synthetic oligonucleotide
cuugaaggcuguccaacga

SEQ ID NO: 12982 - RNA, 19 nt, Artificial Sequence
  Description of Artificial Sequence: Synthetic oligonucleotide
aaugggccuaagaucccgu

SEQ ID NO: 12983 - RNA, 19 nt, Artificial Sequence
  Description of Artificial Sequence: Synthetic oligonucleotide
uccaucgccacugggaugg

SEQ ID NO: 12984 - RNA, 19 nt, Artificial Sequence
  Description of Artificial Sequence: Synthetic oligonucleotide
gugggggcccuccucuugc

SEQ ID NO: 12985 - RNA, 19 nt, Artificial Sequence
  Description of Artificial Sequence: Synthetic oligonucleotide
cugcuggugguggcccugg

SEQ ID NO: 12986 - RNA, 19 nt, Artificial Sequence
  Description of Artificial Sequence: Synthetic oligonucleotide
gggaucggccucuucaugc

SEQ ID NO: 12987 - RNA, 19 nt, Artificial Sequence
  Description of Artificial Sequence: Synthetic oligonucleotide
cgaaggcgccacaucguuc

SEQ ID NO: 12988 - RNA, 19 nt, Artificial Sequence
  Description of Artificial Sequence: Synthetic oligonucleotide
cggaagcgcacgcugcgga

SEQ ID NO: 12989 - RNA, 19 nt, Artificial Sequence
  Description of Artificial Sequence: Synthetic oligonucleotide
aggcugcugcaggagaggg

SEQ ID NO: 12990 - RNA, 19 nt, Artificial Sequence
  Description of Artificial Sequence: Synthetic oligonucleotide
gagcuuguggagccucuua

SEQ ID NO: 12991 - RNA, 19 nt, Artificial Sequence
  Description of Artificial Sequence: Synthetic oligonucleotide
acacccaguggagaagcuc

SEQ ID NO: 12992 - RNA, 19 nt, Artificial Sequence
  Description of Artificial Sequence: Synthetic oligonucleotide
cccaaccaagcucucuuga

SEQ ID NO: 12993 - RNA, 19 nt, Artificial Sequence
  Description of Artificial Sequence: Synthetic oligonucleotide
aggaucuugaaggaaacug

SEQ ID NO: 12994 - RNA, 19 nt, Artificial Sequence
  Description of Artificial Sequence: Synthetic oligonucleotide
gaauucaaaaagaucaaag

SEQ ID NO: 12995 - RNA, 19 nt, Artificial Sequence
  Description of Artificial Sequence: Synthetic oligonucleotide
gugcugggcuccggugcgu

SEQ ID NO: 12996 - RNA, 19 nt, Artificial Sequence
  Description of Artificial Sequence: Synthetic oligonucleotide
uucggcacgguguauaagg

SEQ ID NO: 12997 - RNA, 19 nt, Artificial Sequence
  Description of Artificial Sequence: Synthetic oligonucleotide
ggacucuggaucccagaag

SEQ ID NO: 12998 - RNA, 19 nt, Artificial Sequence
  Description of Artificial Sequence: Synthetic oligonucleotide
ggugagaaaguuaaaauuc

SEQ ID NO: 12999 - RNA, 19 nt, Artificial Sequence
  Description of Artificial Sequence: Synthetic oligonucleotide
cccgucgcuaucaaggaau

SEQ ID NO: 13000 - RNA, 19 nt, Artificial Sequence
  Description of Artificial Sequence: Synthetic oligonucleotide
uuaagagaagcaacaucuc

SEQ ID NO: 13001 - RNA, 19 nt, Artificial Sequence
  Description of Artificial Sequence: Synthetic oligonucleotide
ccgaaagccaacaaggaaa

SEQ ID NO: 13002 - RNA, 19 nt, Artificial Sequence
  Description of Artificial Sequence: Synthetic oligonucleotide
auccucgaugaagccuacg

SEQ ID NO: 13003 - RNA, 19 nt, Artificial Sequence
  Description of Artificial Sequence: Synthetic oligonucleotide
gugauggccagcguggaca

SEQ ID NO: 13004 - RNA, 19 nt, Artificial Sequence
  Description of Artificial Sequence: Synthetic oligonucleotide
aacccccacgugugccgcc

SEQ ID NO: 13005 - RNA, 19 nt, Artificial Sequence
  Description of Artificial Sequence: Synthetic oligonucleotide
cugcugggcaucugccuca

SEQ ID NO: 13006 - RNA, 19 nt, Artificial Sequence
  Description of Artificial Sequence: Synthetic oligonucleotide
accuccaccgugcagcuca

SEQ ID NO: 13007 - RNA, 19 nt, Artificial Sequence
  Description of Artificial Sequence: Synthetic oligonucleotide
aucacgcagcucaugcccu

SEQ ID NO: 13008 - RNA, 19 nt, Artificial Sequence
  Description of Artificial Sequence: Synthetic oligonucleotide
uucggcugccuccuggacu

SEQ ID NO: 13009 - RNA, 19 nt, Artificial Sequence
  Description of Artificial Sequence: Synthetic oligonucleotide
uauguccgggaacacaaag

SEQ ID NO: 13010 - RNA, 19 nt, Artificial Sequence
  Description of Artificial Sequence: Synthetic oligonucleotide
gacaauauuggcucccagu

SEQ ID NO: 13011 - RNA, 19 nt, Artificial Sequence
  Description of Artificial Sequence: Synthetic oligonucleotide
uaccugcucaacuggugug

SEQ ID NO: 13012 - RNA, 19 nt, Artificial Sequence
  Description of Artificial Sequence: Synthetic oligonucleotide
gugcagaucgcaaagggca

SEQ ID NO: 13013 - RNA, 19 nt, Artificial Sequence
  Description of Artificial Sequence: Synthetic oligonucleotide
augaacuacuuggaggacc

SEQ ID NO: 13014 - RNA, 19 nt, Artificial Sequence
  Description of Artificial Sequence: Synthetic oligonucleotide
cgucgcuuggugcaccgcg

SEQ ID NO: 13015 - RNA, 19 nt, Artificial Sequence
  Description of Artificial Sequence: Synthetic oligonucleotide
gaccuggcagccaggaacg

SEQ ID NO: 13016 - RNA, 19 nt, Artificial Sequence
  Description of Artificial Sequence: Synthetic oligonucleotide
guacuggugaaaacaccgc

SEQ ID NO: 13017 - RNA, 19 nt, Artificial Sequence
  Description of Artificial Sequence: Synthetic oligonucleotide
cagcaugucaagaucacag

SEQ ID NO: 13018 - RNA, 19 nt, Artificial Sequence
  Description of Artificial Sequence: Synthetic oligonucleotide
gauuuugggcuggccaaac

SEQ ID NO: 13019 - RNA, 19 nt, Artificial Sequence
  Description of Artificial Sequence: Synthetic oligonucleotide
cugcugggugcggaagaga

SEQ ID NO: 13020 - RNA, 19 nt, Artificial Sequence
  Description of Artificial Sequence: Synthetic oligonucleotide
aaagaauaccaugcagaag

SEQ ID NO: 13021 - RNA, 19 nt, Artificial Sequence
  Description of Artificial Sequence: Synthetic oligonucleotide
ggaggcaaagugccuauca

SEQ ID NO: 13022 - RNA, 19 nt, Artificial Sequence
  Description of Artificial Sequence: Synthetic oligonucleotide
aaguggauggcauuggaau

SEQ ID NO: 13023 - RNA, 19 nt, Artificial Sequence
  Description of Artificial Sequence: Synthetic oligonucleotide
ucaauuuuacacagaaucu

SEQ ID NO: 13024 - RNA, 19 nt, Artificial Sequence
  Description of Artificial Sequence: Synthetic oligonucleotide
uauacccaccagagugaug

SEQ ID NO: 13025 - RNA, 19 nt, Artificial Sequence
  Description of Artificial Sequence: Synthetic oligonucleotide
gucuggagcuacgggguga

SEQ ID NO: 13026 - RNA, 19 nt, Artificial Sequence
  Description of Artificial Sequence: Synthetic oligonucleotide
accguuugggaguugauga

SEQ ID NO: 13027 - RNA, 19 nt, Artificial Sequence
  Description of Artificial Sequence: Synthetic oligonucleotide
accuuuggauccaagccau

SEQ ID NO: 13028 - RNA, 19 nt, Artificial Sequence
  Description of Artificial Sequence: Synthetic oligonucleotide
uaugacggaaucccugcca

SEQ ID NO: 13029 - RNA, 19 nt, Artificial Sequence
  Description of Artificial Sequence: Synthetic oligonucleotide
agcgagaucuccuccaucc

SEQ ID NO: 13030 - RNA, 19 nt, Artificial Sequence
  Description of Artificial Sequence: Synthetic oligonucleotide
cuggagaaaggagaacgcc

SEQ ID NO: 13031 - RNA, 19 nt, Artificial Sequence
  Description of Artificial Sequence: Synthetic oligonucleotide
cucccucagccacccauau

SEQ ID NO: 13032 - RNA, 19 nt, Artificial Sequence
  Description of Artificial Sequence: Synthetic oligonucleotide
uguaccaucgaugucuaca

SEQ ID NO: 13033 - RNA, 19 nt, Artificial Sequence
  Description of Artificial Sequence: Synthetic oligonucleotide
augaucauggucaagugcu

SEQ ID NO: 13034 - RNA, 19 nt, Artificial Sequence
  Description of Artificial Sequence: Synthetic oligonucleotide
uggaugauagacgcagaua

SEQ ID NO: 13035 - RNA, 19 nt, Artificial Sequence
  Description of Artificial Sequence: Synthetic oligonucleotide
agucgcccaaaguuccgug

SEQ ID NO: 13036 - RNA, 19 nt, Artificial Sequence
  Description of Artificial Sequence: Synthetic oligonucleotide
gaguugaucaucgaauucu

SEQ ID NO: 13037 - RNA, 19 nt, Artificial Sequence
  Description of Artificial Sequence: Synthetic oligonucleotide
uccaaaauggcccgagacc

SEQ ID NO: 13038 - RNA, 19 nt, Artificial Sequence
  Description of Artificial Sequence: Synthetic oligonucleotide
ccccagcgcuaccuuguca

SEQ ID NO: 13039 - RNA, 19 nt, Artificial Sequence
  Description of Artificial Sequence: Synthetic oligonucleotide
auucagggggaugaaagaa

SEQ ID NO: 13040 - RNA, 19 nt, Artificial Sequence
  Description of Artificial Sequence: Synthetic oligonucleotide
augcauuugccaaguccua

SEQ ID NO: 13041 - RNA, 19 nt, Artificial Sequence
  Description of Artificial Sequence: Synthetic oligonucleotide
acagacuccaacuucuacc

SEQ ID NO: 13042 - RNA, 19 nt, Artificial Sequence
  Description of Artificial Sequence: Synthetic oligonucleotide
cgugcccugauggaugaag

SEQ ID NO: 13043 - RNA, 19 nt, Artificial Sequence
  Description of Artificial Sequence: Synthetic oligonucleotide
gaagacauggacgacgugg

SEQ ID NO: 13044 - RNA, 19 nt, Artificial Sequence
  Description of Artificial Sequence: Synthetic oligonucleotide
guggaugccgacgaguacc

SEQ ID NO: 13045 - RNA, 19 nt, Artificial Sequence
  Description of Artificial Sequence: Synthetic oligonucleotide
cucaucccacagcagggcu

SEQ ID NO: 13046 - RNA, 19 nt, Artificial Sequence
  Description of Artificial Sequence: Synthetic oligonucleotide
uucuucagcagccccucca

SEQ ID NO: 13047 - RNA, 19 nt, Artificial Sequence
  Description of Artificial Sequence: Synthetic oligonucleotide
acgucacggacuccccucc

SEQ ID NO: 13048 - RNA, 19 nt, Artificial Sequence
  Description of Artificial Sequence: Synthetic oligonucleotide
cugagcucucugagugcaa

SEQ ID NO: 13049 - RNA, 19 nt, Artificial Sequence
  Description of Artificial Sequence: Synthetic oligonucleotide
accagcaacaauuccaccg

SEQ ID NO: 13050 - RNA, 19 nt, Artificial Sequence
  Description of Artificial Sequence: Synthetic oligonucleotide
guggcuugcauugauagaa

SEQ ID NO: 13051 - RNA, 19 nt, Artificial Sequence
  Description of Artificial Sequence: Synthetic oligonucleotide
aaugggcugcaaagcuguc

SEQ ID NO: 13052 - RNA, 19 nt, Artificial Sequence
  Description of Artificial Sequence: Synthetic oligonucleotide
cccaucaaggaagacagcu

SEQ ID NO: 13053 - RNA, 19 nt, Artificial Sequence
  Description of Artificial Sequence: Synthetic oligonucleotide
uucuugcagcgauacagcu

SEQ ID NO: 13054 - RNA, 19 nt, Artificial Sequence
  Description of Artificial Sequence: Synthetic oligonucleotide
ucagaccccacaggcgccu

SEQ ID NO: 13055 - RNA, 19 nt, Artificial Sequence
  Description of Artificial Sequence: Synthetic oligonucleotide
uugacugaggacagcauag

SEQ ID NO: 13056 - RNA, 19 nt, Artificial Sequence
  Description of Artificial Sequence: Synthetic oligonucleotide
gacgacaccuuccucccag

SEQ ID NO: 13057 - RNA, 19 nt, Artificial Sequence
  Description of Artificial Sequence: Synthetic oligonucleotide
gugccugaauacauaaacc

SEQ ID NO: 13058 - RNA, 19 nt, Artificial Sequence
  Description of Artificial Sequence: Synthetic oligonucleotide
caguccguucccaaaaggc

SEQ ID NO: 13059 - RNA, 19 nt, Artificial Sequence
  Description of Artificial Sequence: Synthetic oligonucleotide
cccgcuggcucugugcaga

SEQ ID NO: 13060 - RNA, 19 nt, Artificial Sequence
  Description of Artificial Sequence: Synthetic oligonucleotide
aauccugucuaucacaauc

SEQ ID NO: 13061 - RNA, 19 nt, Artificial Sequence
  Description of Artificial Sequence: Synthetic oligonucleotide
cagccucugaaccccgcgc

SEQ ID NO: 13062 - RNA, 19 nt, Artificial Sequence
  Description of Artificial Sequence: Synthetic oligonucleotide
cccagcagagacccacacu

SEQ ID NO: 13063 - RNA, 19 nt, Artificial Sequence
  Description of Artificial Sequence: Synthetic oligonucleotide
uaccaggacccccacagca

SEQ ID NO: 13064 - RNA, 19 nt, Artificial Sequence
  Description of Artificial Sequence: Synthetic oligonucleotide
acugcagugggcaaccccg

SEQ ID NO: 13065 - RNA, 19 nt, Artificial Sequence
  Description of Artificial Sequence: Synthetic oligonucleotide
gaguaucucaacacugucc

SEQ ID NO: 13066 - RNA, 19 nt, Artificial Sequence
  Description of Artificial Sequence: Synthetic oligonucleotide
cagcccaccugugucaaca

SEQ ID NO: 13067 - RNA, 19 nt, Artificial Sequence
  Description of Artificial Sequence: Synthetic oligonucleotide
agcacauucgacagcccug

SEQ ID NO: 13068 - RNA, 19 nt, Artificial Sequence
  Description of Artificial Sequence: Synthetic oligonucleotide
gcccacugggcccagaaag

SEQ ID NO: 13069 - RNA, 19 nt, Artificial Sequence
  Description of Artificial Sequence: Synthetic oligonucleotide
ggcagccaccaaauuagcc

SEQ ID NO: 13070 - RNA, 19 nt, Artificial Sequence
  Description of Artificial Sequence: Synthetic oligonucleotide
cuggacaacccugacuacc

SEQ ID NO: 13071 - RNA, 19 nt, Artificial Sequence
  Description of Artificial Sequence: Synthetic oligonucleotide
cagcaggacuucuuuccca

SEQ ID NO: 13072 - RNA, 19 nt, Artificial Sequence
  Description of Artificial Sequence: Synthetic oligonucleotide
aaggaagccaagccaaaug

SEQ ID NO: 13073 - RNA, 19 nt, Artificial Sequence
  Description of Artificial Sequence: Synthetic oligonucleotide
ggcaucuuuaagggcucca

SEQ ID NO: 13074 - RNA, 19 nt, Artificial Sequence
  Description of Artificial Sequence: Synthetic oligonucleotide
acagcugaaaaugcagaau

SEQ ID NO: 13075 - RNA, 19 nt, Artificial Sequence
  Description of Artificial Sequence: Synthetic oligonucleotide
uaccuaagggucgcgccac

SEQ ID NO: 13076 - RNA, 19 nt, Artificial Sequence
  Description of Artificial Sequence: Synthetic oligonucleotide
caaagcagugaauuuauug

SEQ ID NO: 13077 - RNA, 19 nt, Artificial Sequence
  Description of Artificial Sequence: Synthetic oligonucleotide
ggagcaugaccacggagga

SEQ ID NO: 13078 - RNA, 19 nt, Artificial Sequence
  Description of Artificial Sequence: Synthetic oligonucleotide
auaguaugagcccuaaaaa

SEQ ID NO: 13079 - RNA, 19 nt, Artificial Sequence
  Description of Artificial Sequence: Synthetic oligonucleotide
auccagacucuuucgauac

SEQ ID NO: 13080 - RNA, 19 nt, Artificial Sequence
  Description of Artificial Sequence: Synthetic oligonucleotide
cccaggaccaagccacagc

SEQ ID NO: 13081 - RNA, 19 nt, Artificial Sequence
  Description of Artificial Sequence: Synthetic oligonucleotide
cagguccuccaucccaaca

SEQ ID NO: 13082 - RNA, 19 nt, Artificial Sequence
  Description of Artificial Sequence: Synthetic oligonucleotide
agccaugcccgcauuagcu

SEQ ID NO: 13083 - RNA, 19 nt, Artificial Sequence
  Description of Artificial Sequence: Synthetic oligonucleotide
ucuuagacccacagacugg

SEQ ID NO: 13084 - RNA, 19 nt, Artificial Sequence
  Description of Artificial Sequence: Synthetic oligonucleotide
guuuugcaacguuuacacc

SEQ ID NO: 13085 - RNA, 19 nt, Artificial Sequence
  Description of Artificial Sequence: Synthetic oligonucleotide
cgacuagccaggaaguacu

SEQ ID NO: 13086 - RNA, 19 nt, Artificial Sequence
  Description of Artificial Sequence: Synthetic oligonucleotide
uuccaccucgggcacauuu

SEQ ID NO: 13087 - RNA, 19 nt, Artificial Sequence
  Description of Artificial Sequence: Synthetic oligonucleotide
uugggaaguugcauuccuu

SEQ ID NO: 13088 - RNA, 19 nt, Artificial Sequence
  Description of Artificial Sequence: Synthetic oligonucleotide
uugucuucaaacugugaag

SEQ ID NO: 13089 - RNA, 19 nt, Artificial Sequence
  Description of Artificial Sequence: Synthetic oligonucleotide
gcauuuacagaaacgcauc

SEQ ID NO: 13090 - RNA, 19 nt, Artificial Sequence
  Description of Artificial Sequence: Synthetic oligonucleotide
ccagcaagaauauuguccc

SEQ ID NO: 13091 - RNA, 19 nt, Artificial Sequence
  Description of Artificial Sequence: Synthetic oligonucleotide
cuuugagcagaaauuuauc

SEQ ID NO: 13092 - RNA, 19 nt, Artificial Sequence
  Description of Artificial Sequence: Synthetic oligonucleotide
cuuucaaagagguauauuu

SEQ ID NO: 13093 - RNA, 19 nt, Artificial Sequence
  Description of Artificial Sequence: Synthetic oligonucleotide
uaugugaggauuuuuauug

SEQ ID NO: 13094 - RNA, 19 nt, Artificial Sequence
  Description of Artificial Sequence: Synthetic oligonucleotide
gauuggggaucuuggaguu

SEQ ID NO: 13095 - RNA, 19 nt, Artificial Sequence
  Description of Artificial Sequence: Synthetic oligonucleotide
uuuucauugucgcuauuga

SEQ ID NO: 13096 - RNA, 19 nt, Artificial Sequence
  Description of Artificial Sequence: Synthetic oligonucleotide
auuuuuacuucaaugggcu

SEQ ID NO: 13097 - RNA, 19 nt, Artificial Sequence
  Description of Artificial Sequence: Synthetic oligonucleotide
ucuuccaacaaggaagaag

SEQ ID NO: 13098 - RNA, 19 nt, Artificial Sequence
  Description of Artificial Sequence: Synthetic oligonucleotide
gcuugcugguagcacuugc

SEQ ID NO: 13099 - RNA, 19 nt, Artificial Sequence
  Description of Artificial Sequence: Synthetic oligonucleotide
cuacccugaguucauccag

SEQ ID NO: 13100 - RNA, 19 nt, Artificial Sequence
  Description of Artificial Sequence: Synthetic oligonucleotide
ggcccaacugugagcaagg

SEQ ID NO: 13101 - RNA, 19 nt, Artificial Sequence
  Description of Artificial Sequence: Synthetic oligonucleotide
gagcacaagccacaagucu

SEQ ID NO: 13102 - RNA, 19 nt, Artificial Sequence
  Description of Artificial Sequence: Synthetic oligonucleotide
uuccagaggaugcuugauu

SEQ ID NO: 13103 - RNA, 19 nt, Artificial Sequence
  Description of Artificial Sequence: Synthetic oligonucleotide
uccagugguucugcuucaa

SEQ ID NO: 13104 - RNA, 19 nt, Artificial Sequence
  Description of Artificial Sequence: Synthetic oligonucleotide
aggcuuccacugcaaaaca

SEQ ID NO: 13105 - RNA, 19 nt, Artificial Sequence
  Description of Artificial Sequence: Synthetic oligonucleotide
acuaaagauccaagaaggc

SEQ ID NO: 13106 - RNA, 19 nt, Artificial Sequence
  Description of Artificial Sequence: Synthetic oligonucleotide
ccuucauggccccagcagg

SEQ ID NO: 13107 - RNA, 19 nt, Artificial Sequence
  Description of Artificial Sequence: Synthetic oligonucleotide
gccggaucgguacuguauc

SEQ ID NO: 13108 - RNA, 19 nt, Artificial Sequence
  Description of Artificial Sequence: Synthetic oligonucleotide
caagucauggcagguacag

SEQ ID NO: 13109 - RNA, 19 nt, Artificial Sequence
  Description of Artificial Sequence: Synthetic oligonucleotide
guaggauaagccacucugu

SEQ ID NO: 13110 - RNA, 19 nt, Artificial Sequence
  Description of Artificial Sequence: Synthetic oligonucleotide
ucccuuccugggcaaagaa

SEQ ID NO: 13111 - RNA, 19 nt, Artificial Sequence
  Description of Artificial Sequence: Synthetic oligonucleotide
agaaacggaggggauggaa

SEQ ID NO: 13112 - RNA, 19 nt, Artificial Sequence
  Description of Artificial Sequence: Synthetic oligonucleotide
auucuuccuuagacuuacu

SEQ ID NO: 13113 - RNA, 19 nt, Artificial Sequence
  Description of Artificial Sequence: Synthetic oligonucleotide
uuuuguaaaaaugucccca

SEQ ID NO: 13114 - RNA, 19 nt, Artificial Sequence
  Description of Artificial Sequence: Synthetic oligonucleotide
acgguacuuacuccccacu

SEQ ID NO: 13115 - RNA, 19 nt, Artificial Sequence
  Description of Artificial Sequence: Synthetic oligonucleotide
ugauggaccagugguuucc

SEQ ID NO: 13116 - RNA, 19 nt, Artificial Sequence
  Description of Artificial Sequence: Synthetic oligonucleotide
cagucaugagcguuagacu

SEQ ID NO: 13117 - RNA, 19 nt, Artificial Sequence
  Description of Artificial Sequence: Synthetic oligonucleotide
ugacuuguuugucuuccau

SEQ ID NO: 13118 - RNA, 19 nt, Artificial Sequence
  Description of Artificial Sequence: Synthetic oligonucleotide
uuccauuguuuugaaacuc

SEQ ID NO: 13119 - RNA, 19 nt, Artificial Sequence
  Description of Artificial Sequence: Synthetic oligonucleotide
caguaugcugccccugucu

SEQ ID NO: 13120 - RNA, 19 nt, Artificial Sequence
  Description of Artificial Sequence: Synthetic oligonucleotide
uugcugucaugaaaucagc

SEQ ID NO: 13121 - RNA, 19 nt, Artificial Sequence
  Description of Artificial Sequence: Synthetic oligonucleotide
caagagaggaugacacauc

SEQ ID NO: 13122 - RNA, 19 nt, Artificial Sequence
  Description of Artificial Sequence: Synthetic oligonucleotide
caaauaauaacucggauuc

SEQ ID NO: 13123 - RNA, 19 nt, Artificial Sequence
  Description of Artificial Sequence: Synthetic oligonucleotide
ccagcccacauuggauuca

SEQ ID NO: 13124 - RNA, 19 nt, Artificial Sequence
  Description of Artificial Sequence: Synthetic oligonucleotide
aucagcauuuggaccaaua

SEQ ID NO: 13125 - RNA, 19 nt, Artificial Sequence
  Description of Artificial Sequence: Synthetic oligonucleotide
agcccacagcugagaaugu

SEQ ID NO: 13126 - RNA, 19 nt, Artificial Sequence
  Description of Artificial Sequence: Synthetic oligonucleotide
uggaauaccuaaggauagc

SEQ ID NO: 13127 - RNA, 19 nt, Artificial Sequence
  Description of Artificial Sequence: Synthetic oligonucleotide
caccgcuuuuguucucgca

SEQ ID NO: 13128 - RNA, 19 nt, Artificial Sequence
  Description of Artificial Sequence: Synthetic oligonucleotide
aaaaacguaucuccuaauu

SEQ ID NO: 13129 - RNA, 19 nt, Artificial Sequence
  Description of Artificial Sequence: Synthetic oligonucleotide
uugaggcucagaugaaaug

SEQ ID NO: 13130 - RNA, 19 nt, Artificial Sequence
  Description of Artificial Sequence: Synthetic oligonucleotide
gcaucagguccuuuggggc

SEQ ID NO: 13131 - RNA, 19 nt, Artificial Sequence
  Description of Artificial Sequence: Synthetic oligonucleotide
cauagaucagaagacuaca

SEQ ID NO: 13132 - RNA, 19 nt, Artificial Sequence
  Description of Artificial Sequence: Synthetic oligonucleotide
aaaaaugaagcugcucuga

SEQ ID NO: 13133 - RNA, 19 nt, Artificial Sequence
  Description of Artificial Sequence: Synthetic oligonucleotide
aaaucuccuuuagccauca

SEQ ID NO: 13134 - RNA, 19 nt, Artificial Sequence
  Description of Artificial Sequence: Synthetic oligonucleotide
accccaaccccccaaaauu

SEQ ID NO: 13135 - RNA, 19 nt, Artificial Sequence
  Description of Artificial Sequence: Synthetic oligonucleotide
uaguuuguguuacuuaugg

SEQ ID NO: 13136 - RNA, 19 nt, Artificial Sequence
  Description of Artificial Sequence: Synthetic oligonucleotide
gaagauaguuuucuccuuu

SEQ ID NO: 13137 - RNA, 19 nt, Artificial Sequence
  Description of Artificial Sequence: Synthetic oligonucleotide
uuacuucacuucaaaagcu

SEQ ID NO: 13138 - RNA, 19 nt, Artificial Sequence
  Description of Artificial Sequence: Synthetic oligonucleotide
uuuuuacucaaagaguaua

SEQ ID NO: 13139 - RNA, 19 nt, Artificial Sequence
  Description of Artificial Sequence: Synthetic oligonucleotide
auguucccuccaggucagc

SEQ ID NO: 13140 - RNA, 19 nt, Artificial Sequence
  Description of Artificial Sequence: Synthetic oligonucleotide
cugcccccaaacccccucc

SEQ ID NO: 13141 - RNA, 19 nt, Artificial Sequence
  Description of Artificial Sequence: Synthetic oligonucleotide
cuuacgcuuugucacacaa

SEQ ID NO: 13142 - RNA, 19 nt, Artificial Sequence
  Description of Artificial Sequence: Synthetic oligonucleotide
aaaagugucucugccuuga

SEQ ID NO: 13143 - RNA, 19 nt, Artificial Sequence
  Description of Artificial Sequence: Synthetic oligonucleotide
agucaucuauucaagcacu

SEQ ID NO: 13144 - RNA, 19 nt, Artificial Sequence
  Description of Artificial Sequence: Synthetic oligonucleotide
uuacagcucuggccacaac

SEQ ID NO: 13145 - RNA, 19 nt, Artificial Sequence
  Description of Artificial Sequence: Synthetic oligonucleotide
cagggcauuuuacaggugc

SEQ ID NO: 13146 - RNA, 19 nt, Artificial Sequence
  Description of Artificial Sequence: Synthetic oligonucleotide
cgaaugacaguagcauuau

SEQ ID NO: 13147 - RNA, 19 nt, Artificial Sequence
  Description of Artificial Sequence: Synthetic oligonucleotide
ugaguaguguggaauucag

SEQ ID NO: 13148 - RNA, 19 nt, Artificial Sequence
  Description of Artificial Sequence: Synthetic oligonucleotide
gguaguaaauaugaaacua

SEQ ID NO: 13149 - RNA, 19 nt, Artificial Sequence
  Description of Artificial Sequence: Synthetic oligonucleotide
aggguuugaaauugauaau

SEQ ID NO: 13150 - RNA, 19 nt, Artificial Sequence
  Description of Artificial Sequence: Synthetic oligonucleotide
ugcuuucacaacauuugca

SEQ ID NO: 13151 - RNA, 19 nt, Artificial Sequence
  Description of Artificial Sequence: Synthetic oligonucleotide
agauguuuuagaaggaaaa

SEQ ID NO: 13152 - RNA, 19 nt, Artificial Sequence
  Description of Artificial Sequence: Synthetic oligonucleotide
aaaguuccuuccuaaaaua

SEQ ID NO: 13153 - RNA, 19 nt, Artificial Sequence
  Description of Artificial Sequence: Synthetic oligonucleotide
aauuucucuacaauuggaa

SEQ ID NO: 13154 - RNA, 19 nt, Artificial Sequence
  Description of Artificial Sequence: Synthetic oligonucleotide
agauuggaagauucagcua

SEQ ID NO: 13155 - RNA, 19 nt, Artificial Sequence
  Description of Artificial Sequence: Synthetic oligonucleotide
aguuaggagcccaccuuuu

SEQ ID NO: 13156 - RNA, 19 nt, Artificial Sequence
  Description of Artificial Sequence: Synthetic oligonucleotide
uuuccuaaucugugugugc

SEQ ID NO: 13157 - RNA, 19 nt, Artificial Sequence
  Description of Artificial Sequence: Synthetic oligonucleotide
cccuguaaccugacugguu

SEQ ID NO: 13158 - RNA, 19 nt, Artificial Sequence
  Description of Artificial Sequence: Synthetic oligonucleotide
uaacagcaguccuuuguaa

SEQ ID NO: 13159 - RNA, 19 nt, Artificial Sequence
  Description of Artificial Sequence: Synthetic oligonucleotide
aacaguguuuuaaacucuc

SEQ ID NO: 13160 - RNA, 19 nt, Artificial Sequence
  Description of Artificial Sequence: Synthetic oligonucleotide
ccuagucaauauccacccc

SEQ ID NO: 13161 - RNA, 19 nt, Artificial Sequence
  Description of Artificial Sequence: Synthetic oligonucleotide
cauccaauuuaucaaggaa

SEQ ID NO: 13162 - RNA, 19 nt, Artificial Sequence
  Description of Artificial Sequence: Synthetic oligonucleotide
agaaaugguucagaaaaua

SEQ ID NO: 13163 - RNA, 19 nt, Artificial Sequence
  Description of Artificial Sequence: Synthetic oligonucleotide
auuuucagccuacaguuau

SEQ ID NO: 13164 - RNA, 19 nt, Artificial Sequence
  Description of Artificial Sequence: Synthetic oligonucleotide
uguucagucacacacacau

SEQ ID NO: 13165 - RNA, 19 nt, Artificial Sequence
  Description of Artificial Sequence: Synthetic oligonucleotide
uacaaaauguuccuuuugc

SEQ ID NO: 13166 - RNA, 19 nt, Artificial Sequence
  Description of Artificial Sequence: Synthetic oligonucleotide
cuuuuaaaguaauuuuuga

SEQ ID NO: 13167 - RNA, 19 nt, Artificial Sequence
  Description of Artificial Sequence: Synthetic oligonucleotide
acucccagaucagucagag

SEQ ID NO: 13168 - RNA, 19 nt, Artificial Sequence
  Description of Artificial Sequence: Synthetic oligonucleotide
gccccuacagcauuguuaa

SEQ ID NO: 13169 - RNA, 19 nt, Artificial Sequence
  Description of Artificial Sequence: Synthetic oligonucleotide
agaaaguauuugauuuuug

SEQ ID NO: 13170 - RNA, 19 nt, Artificial Sequence
  Description of Artificial Sequence: Synthetic oligonucleotide
gucucaaugaaaauaaaac

SEQ ID NO: 13171 - RNA, 19 nt, Artificial Sequence
  Description of Artificial Sequence: Synthetic oligonucleotide
cuauauucauuuccacucu

SEQ ID NO: 13172 - RNA, 19 nt, Artificial Sequence
  Description of Artificial Sequence: Synthetic oligonucleotide
gggccaggaaaugagaguc

SEQ ID NO: 13173 - RNA, 19 nt, Artificial Sequence
  Description of Artificial Sequence: Synthetic oligonucleotide
cucaaagccauguuauucu

SEQ ID NO: 13174 - RNA, 19 nt, Artificial Sequence
  Description of Artificial Sequence: Synthetic oligonucleotide
ugccuuuuuaaacuaucau

SEQ ID NO: 13175 - RNA, 19 nt, Artificial Sequence
  Description of Artificial Sequence: Synthetic oligonucleotide
uccuguaaucaaaguaaug

SEQ ID NO: 13176 - RNA, 19 nt, Artificial Sequence
  Description of Artificial Sequence: Synthetic oligonucleotide
gauggcagcgugucccacc

SEQ ID NO: 13177 - RNA, 19 nt, Artificial Sequence
  Description of Artificial Sequence: Synthetic oligonucleotide
cagagcgggagcccagcug

SEQ ID NO: 13178 - RNA, 19 nt, Artificial Sequence
  Description of Artificial Sequence: Synthetic oligonucleotide
gcucaggagucaugcuuag

SEQ ID NO: 13179 - RNA, 19 nt, Artificial Sequence
  Description of Artificial Sequence: Synthetic oligonucleotide
ggauggaucccuucucuuc

SEQ ID NO: 13180 - RNA, 19 nt, Artificial Sequence
  Description of Artificial Sequence: Synthetic oligonucleotide
cugccgucagaguuucagc

SEQ ID NO: 13181 - RNA, 19 nt, Artificial Sequence
  Description of Artificial Sequence: Synthetic oligonucleotide
cuggguugggguggaugca

SEQ ID NO: 13182 - RNA, 19 nt, Artificial Sequence
  Description of Artificial Sequence: Synthetic oligonucleotide
agccaccuccaugccuggc

SEQ ID NO: 13183 - RNA, 19 nt, Artificial Sequence
  Description of Artificial Sequence: Synthetic oligonucleotide
ccuucugcaucugugauca

SEQ ID NO: 13184 - RNA, 19 nt, Artificial Sequence
  Description of Artificial Sequence: Synthetic oligonucleotide
aucacggccuccuccugcc

SEQ ID NO: 13185 - RNA, 19 nt, Artificial Sequence
  Description of Artificial Sequence: Synthetic oligonucleotide
cacugagccucaugccuuc

SEQ ID NO: 13186 - RNA, 19 nt, Artificial Sequence
  Description of Artificial Sequence: Synthetic oligonucleotide
cacgugucuguuccccccg

SEQ ID NO: 13187 - RNA, 19 nt, Artificial Sequence
  Description of Artificial Sequence: Synthetic oligonucleotide
gcuuuuccuuucugccacc

SEQ ID NO: 13188 - RNA, 19 nt, Artificial Sequence
  Description of Artificial Sequence: Synthetic oligonucleotide
cccugcacgugggccgcca

SEQ ID NO: 13189 - RNA, 19 nt, Artificial Sequence
  Description of Artificial Sequence: Synthetic oligonucleotide
agguucccaagaguauccu

SEQ ID NO: 13190 - RNA, 19 nt, Artificial Sequence
  Description of Artificial Sequence: Synthetic oligonucleotide
uacccauuuccuuccuucc

SEQ ID NO: 13191 - RNA, 19 nt, Artificial Sequence
  Description of Artificial Sequence: Synthetic oligonucleotide
cacucccuuugccagugcc

SEQ ID NO: 13192 - RNA, 19 nt, Artificial Sequence
  Description of Artificial Sequence: Synthetic oligonucleotide
cucucaccccaacuaguag

SEQ ID NO: 13193 - RNA, 19 nt, Artificial Sequence
  Description of Artificial Sequence: Synthetic oligonucleotide
gcuaaccaucacccccagg

SEQ ID NO: 13194 - RNA, 19 nt, Artificial Sequence
  Description of Artificial Sequence: Synthetic oligonucleotide
gacugaccucuuccuccuc

SEQ ID NO: 13195 - RNA, 19 nt, Artificial Sequence
  Description of Artificial Sequence: Synthetic oligonucleotide
cgcugccagaugauuguuc

SEQ ID NO: 13196 - RNA, 19 nt, Artificial Sequence
  Description of Artificial Sequence: Synthetic oligonucleotide
caaagcacagaauuuguca

SEQ ID NO: 13197 - RNA, 19 nt, Artificial Sequence
  Description of Artificial Sequence: Synthetic oligonucleotide
agaaaccugcagggacucc

SEQ ID NO: 13198 - RNA, 19 nt, Artificial Sequence
  Description of Artificial Sequence: Synthetic oligonucleotide
caugcugccagccuucucc

SEQ ID NO: 13199 - RNA, 19 nt, Artificial Sequence
  Description of Artificial Sequence: Synthetic oligonucleotide
cguaauuagcauggcccca

SEQ ID NO: 13200 - RNA, 19 nt, Artificial Sequence
  Description of Artificial Sequence: Synthetic oligonucleotide
aguccaugcuucuagccuu

SEQ ID NO: 13201 - RNA, 19 nt, Artificial Sequence
  Description of Artificial Sequence: Synthetic oligonucleotide
ugguuccuucugccccucu

SEQ ID NO: 13202 - RNA, 19 nt, Artificial Sequence
  Description of Artificial Sequence: Synthetic oligonucleotide
uguuugaaauucuagagcc

SEQ ID NO: 13203 - RNA, 19 nt, Artificial Sequence
  Description of Artificial Sequence: Synthetic oligonucleotide
cagcugugggacaauuauc

SEQ ID NO: 13204 - RNA, 19 nt, Artificial Sequence
  Description of Artificial Sequence: Synthetic oligonucleotide
cugugucaaaagccagaug

SEQ ID NO: 13205 - RNA, 19 nt, Artificial Sequence
  Description of Artificial Sequence: Synthetic oligonucleotide
gugaaaacaucucaauaac

SEQ ID NO: 13206 - RNA, 19 nt, Artificial Sequence
  Description of Artificial Sequence: Synthetic oligonucleotide
caaacuggcugcuuuguuc

SEQ ID NO: 13207 - RNA, 19 nt, Artificial Sequence
  Description of Artificial Sequence: Synthetic oligonucleotide
caaugcuagaacaacgccu

SEQ ID NO: 13208 - RNA, 19 nt, Artificial Sequence
  Description of Artificial Sequence: Synthetic oligonucleotide
ugucacagaguagaaacuc

SEQ ID NO: 13209 - RNA, 19 nt, Artificial Sequence
  Description of Artificial Sequence: Synthetic oligonucleotide
caaaaauauuugcugagug

SEQ ID NO: 13210 - RNA, 19 nt, Artificial Sequence
  Description of Artificial Sequence: Synthetic oligonucleotide
gaaugaacaaaugaauaaa

SEQ ID NO: 13211 - RNA, 19 nt, Artificial Sequence
  Description of Artificial Sequence: Synthetic oligonucleotide
augcauaauaaauaauuaa

SEQ ID NO: 13212 - RNA, 19 nt, Artificial Sequence
  Description of Artificial Sequence: Synthetic oligonucleotide
accaccaauccaacaucca

SEQ ID NO: 13213 - RNA, 19 nt, Artificial Sequence
  Description of Artificial Sequence: Synthetic oligonucleotide
caccaauccaacauccaga

SEQ ID NO: 13214 - RNA, 25 nt, Artificial Sequence
  Description of Artificial Sequence: Synthetic oligonucleotide
ccccggcgcagcgcggccgcagcag

SEQ ID NO: 13215 - RNA, 25 nt, Artificial Sequence
  Description of Artificial Sequence: Synthetic oligonucleotide
gccuccgccccccgcacggugugag

SEQ ID NO: 13216 - RNA, 25 nt, Artificial Sequence
  Description of Artificial Sequence: Synthetic oligonucleotide
gcgcccgacgcggccgaggcggccg

SEQ ID NO: 13217 - RNA, 25 nt, Artificial Sequence
  Description of Artificial Sequence: Synthetic oligonucleotide
ggagucccgagcuagccccggcggc

SEQ ID NO: 13218 - RNA, 25 nt, Artificial Sequence
  Description of Artificial Sequence: Synthetic oligonucleotide
ccgccgccgcccagaccggacgaca

SEQ ID NO: 13219 - RNA, 25 nt, Artificial Sequence
  Description of Artificial Sequence: Synthetic oligonucleotide
aggccaccucgucggcguccgcccg

SEQ ID NO: 13220 - RNA, 25 nt, Artificial Sequence
  Description of Artificial Sequence: Synthetic oligonucleotide
gaguccccgccucgccgccaacgcc

SEQ ID NO: 13221 - RNA, 25 nt, Artificial Sequence
  Description of Artificial Sequence: Synthetic oligonucleotide
cacaaccaccgcgcacggcccccug

SEQ ID NO: 13222 - RNA, 25 nt, Artificial Sequence
  Description of Artificial Sequence: Synthetic oligonucleotide
gacuccguccaguauugaucgggag

SEQ ID NO: 13223 - RNA, 25 nt, Artificial Sequence
  Description of Artificial Sequence: Synthetic oligonucleotide
gagccggagcgagcucuucggggag

SEQ ID NO: 13224 - RNA, 25 nt, Artificial Sequence
  Description of Artificial Sequence: Synthetic oligonucleotide
gcagcgaugcgacccuccgggacgg

SEQ ID NO: 13225 - RNA, 25 nt, Artificial Sequence
  Description of Artificial Sequence: Synthetic oligonucleotide
gccggggcagcgcuccuggcgcugc

SEQ ID NO: 13226 - RNA, 25 nt, Artificial Sequence
  Description of Artificial Sequence: Synthetic oligonucleotide
cuggcugcgcucugcccggcgaguc

SEQ ID NO: 13227 - RNA, 25 nt, Artificial Sequence
  Description of Artificial Sequence: Synthetic oligonucleotide
cgggcucuggaggaaaagaaaguuu

SEQ ID NO: 13228 - RNA, 25 nt, Artificial Sequence
  Description of Artificial Sequence: Synthetic oligonucleotide
ugccaaggcacgaguaacaagcuca

SEQ ID NO: 13229 - RNA, 25 nt, Artificial Sequence
  Description of Artificial Sequence: Synthetic oligonucleotide
acgcaguugggcacuuuugaagauc

SEQ ID NO: 13230 - RNA, 25 nt, Artificial Sequence
  Description of Artificial Sequence: Synthetic oligonucleotide
cauuuucucagccuccagaggaugu

SEQ ID NO: 13231 - RNA, 25 nt, Artificial Sequence
  Description of Artificial Sequence: Synthetic oligonucleotide
uucaauaacugugaggugguccuug

SEQ ID NO: 13232 - RNA, 25 nt, Artificial Sequence
  Description of Artificial Sequence: Synthetic oligonucleotide
gggaauuuggaaauuaccuaugugc

SEQ ID NO: 13233 - RNA, 25 nt, Artificial Sequence
  Description of Artificial Sequence: Synthetic oligonucleotide
cagaggaauuaugaucuuuccuucu

SEQ ID NO: 13234 - RNA, 25 nt, Artificial Sequence
  Description of Artificial Sequence: Synthetic oligonucleotide
uuaaagaccauccaggagguggcug

SEQ ID NO: 13235 - RNA, 25 nt, Artificial Sequence
  Description of Artificial Sequence: Synthetic oligonucleotide
gguuauguccucauugcccucaaca

SEQ ID NO: 13236 - RNA, 25 nt, Artificial Sequence
  Description of Artificial Sequence: Synthetic oligonucleotide
acaguggagcgaauuccuuuggaaa

SEQ ID NO: 13237 - RNA, 25 nt, Artificial Sequence
  Description of Artificial Sequence: Synthetic oligonucleotide
aaccugcagaucaucagaggaaaua

SEQ ID NO: 13238 - RNA, 25 nt, Artificial Sequence
  Description of Artificial Sequence: Synthetic oligonucleotide
auguacuacgaaaauuccuaugccu

SEQ ID NO: 13239 - RNA, 25 nt, Artificial Sequence
  Description of Artificial Sequence: Synthetic oligonucleotide
uuagcagucuuaucuaacuaugaug

SEQ ID NO: 13240 - RNA, 25 nt, Artificial Sequence
  Description of Artificial Sequence: Synthetic oligonucleotide
gcaaauaaaaccggacugaaggagc

SEQ ID NO: 13241 - RNA, 25 nt, Artificial Sequence
  Description of Artificial Sequence: Synthetic oligonucleotide
cugcccaugagaaauuuacaggaaa

SEQ ID NO: 13242 - RNA, 25 nt, Artificial Sequence
  Description of Artificial Sequence: Synthetic oligonucleotide
auccugcauggcgccgugcgguuca

SEQ ID NO: 13243 - RNA, 25 nt, Artificial Sequence
  Description of Artificial Sequence: Synthetic oligonucleotide
agcaacaacccugcccugugcaacg

SEQ ID NO: 13244 - RNA, 25 nt, Artificial Sequence
  Description of Artificial Sequence: Synthetic oligonucleotide
guggagagcauccaguggcgggaca

SEQ ID NO: 13245 - RNA, 25 nt, Artificial Sequence
  Description of Artificial Sequence: Synthetic oligonucleotide
auagucagcagugacuuucucagca

SEQ ID NO: 13246 - RNA, 25 nt, Artificial Sequence
  Description of Artificial Sequence: Synthetic oligonucleotide
aacaugucgauggacuuccagaacc

SEQ ID NO: 13247 - RNA, 25 nt, Artificial Sequence
  Description of Artificial Sequence: Synthetic oligonucleotide
caccugggcagcugccaaaagugug

SEQ ID NO: 13248 - RNA, 25 nt, Artificial Sequence
  Description of Artificial Sequence: Synthetic oligonucleotide
gauccaagcugucccaaugggagcu

SEQ ID NO: 13249 - RNA, 25 nt, Artificial Sequence
  Description of Artificial Sequence: Synthetic oligonucleotide
ugcuggggugcaggagaggagaacu

SEQ ID NO: 13250 - RNA, 25 nt, Artificial Sequence
  Description of Artificial Sequence: Synthetic oligonucleotide
ugccagaaacugaccaaaaucaucu

SEQ ID NO: 13251 - RNA, 25 nt, Artificial Sequence
  Description of Artificial Sequence: Synthetic oligonucleotide
ugugcccagcagugcuccgggcgcu

SEQ ID NO: 13252 - RNA, 25 nt, Artificial Sequence
  Description of Artificial Sequence: Synthetic oligonucleotide
ugccguggcaagucccccagugacu

SEQ ID NO: 13253 - RNA, 25 nt, Artificial Sequence
  Description of Artificial Sequence: Synthetic oligonucleotide
ugcugccacaaccagugugcugcag

SEQ ID NO: 13254 - RNA, 25 nt, Artificial Sequence
  Description of Artificial Sequence: Synthetic oligonucleotide
ggcugcacaggcccccgggagagcg

SEQ ID NO: 13255 - RNA, 25 nt, Artificial Sequence
  Description of Artificial Sequence: Synthetic oligonucleotide
gacugccuggucugccgcaaauucc

SEQ ID NO: 13256 - RNA, 25 nt, Artificial Sequence
  Description of Artificial Sequence: Synthetic oligonucleotide
cgagacgaagccacgugcaaggaca

SEQ ID NO: 13257 - RNA, 25 nt, Artificial Sequence
  Description of Artificial Sequence: Synthetic oligonucleotide
accugccccccacucaugcucuaca

SEQ ID NO: 13258 - RNA, 25 nt, Artificial Sequence
  Description of Artificial Sequence: Synthetic oligonucleotide
aaccccaccacguaccagauggaug

SEQ ID NO: 13259 - RNA, 25 nt, Artificial Sequence
  Description of Artificial Sequence: Synthetic oligonucleotide
gugaaccccgagggcaaauacagcu

SEQ ID NO: 13260 - RNA, 25 nt, Artificial Sequence
  Description of Artificial Sequence: Synthetic oligonucleotide
uuuggugccaccugcgugaagaagu

SEQ ID NO: 13261 - RNA, 25 nt, Artificial Sequence
  Description of Artificial Sequence: Synthetic oligonucleotide
uguccccguaauuauguggugacag

SEQ ID NO: 13262 - RNA, 25 nt, Artificial Sequence
  Description of Artificial Sequence: Synthetic oligonucleotide
gaucacggcucgugcguccgagccu

SEQ ID NO: 13263 - RNA, 25 nt, Artificial Sequence
  Description of Artificial Sequence: Synthetic oligonucleotide
uguggggccgacagcuaugagaugg

SEQ ID NO: 13264 - RNA, 25 nt, Artificial Sequence
  Description of Artificial Sequence: Synthetic oligonucleotide
gaggaagacggcguccgcaagugua

SEQ ID NO: 13265 - RNA, 25 nt, Artificial Sequence
  Description of Artificial Sequence: Synthetic oligonucleotide
aagaagugcgaagggccuugccgca

SEQ ID NO: 13266 - RNA, 25 nt, Artificial Sequence
  Description of Artificial Sequence: Synthetic oligonucleotide
aaaguguguaacggaauagguauug

SEQ ID NO: 13267 - RNA, 25 nt, Artificial Sequence
  Description of Artificial Sequence: Synthetic oligonucleotide
ggugaauuuaaagacucacucucca

SEQ ID NO: 13268 - RNA, 25 nt, Artificial Sequence
  Description of Artificial Sequence: Synthetic oligonucleotide
auaaaugcuacgaauauuaaacacu

SEQ ID NO: 13269 - RNA, 25 nt, Artificial Sequence
  Description of Artificial Sequence: Synthetic oligonucleotide
uucaaaaacugcaccuccaucagug

SEQ ID NO: 13270 - RNA, 25 nt, Artificial Sequence
  Description of Artificial Sequence: Synthetic oligonucleotide
ggcgaucuccacauccugccggugg

SEQ ID NO: 13271 - RNA, 25 nt, Artificial Sequence
  Description of Artificial Sequence: Synthetic oligonucleotide
gcauuuaggggugacuccuucacac

SEQ ID NO: 13272 - RNA, 25 nt, Artificial Sequence
  Description of Artificial Sequence: Synthetic oligonucleotide
cauacuccuccucuggauccacagg

SEQ ID NO: 13273 - RNA, 25 nt, Artificial Sequence
  Description of Artificial Sequence: Synthetic oligonucleotide
gaacuggauauucugaaaaccguaa

SEQ ID NO: 13274 - RNA, 25 nt, Artificial Sequence
  Description of Artificial Sequence: Synthetic oligonucleotide
aaggaaaucacagguuugagcugaa

SEQ ID NO: 13275 - RNA, 25 nt, Artificial Sequence
  Description of Artificial Sequence: Synthetic oligonucleotide
auuaucacaugaauauaaaugggaa

SEQ ID NO: 13276 - RNA, 25 nt, Artificial Sequence
  Description of Artificial Sequence: Synthetic oligonucleotide
aaucaguguuuuagagagagaacuu

SEQ ID NO: 13277 - RNA, 25 nt, Artificial Sequence
  Description of Artificial Sequence: Synthetic oligonucleotide
uuucgacauauuuccuguucccuug

SEQ ID NO: 13278 - RNA, 25 nt, Artificial Sequence
  Description of Artificial Sequence: Synthetic oligonucleotide
ggaauaaaaacauuucuucugaaau

SEQ ID NO: 13279 - RNA, 25 nt, Artificial Sequence
  Description of Artificial Sequence: Synthetic oligonucleotide
aaggaaaucacaggguuuuugcuga

SEQ ID NO: 13280 - RNA, 25 nt, Artificial Sequence
  Description of Artificial Sequence: Synthetic oligonucleotide
auucaggcuuggccugaaaacagga

SEQ ID NO: 13281 - RNA, 25 nt, Artificial Sequence
  Description of Artificial Sequence: Synthetic oligonucleotide
acggaccuccaugccuuugagaacc

SEQ ID NO: 13282 - RNA, 25 nt, Artificial Sequence
  Description of Artificial Sequence: Synthetic oligonucleotide
cuagaaaucauacgcggcaggacca

SEQ ID NO: 13283 - RNA, 25 nt, Artificial Sequence
  Description of Artificial Sequence: Synthetic oligonucleotide
aagcaacauggucaguuuucucuug

SEQ ID NO: 13284 - RNA, 25 nt, Artificial Sequence
  Description of Artificial Sequence: Synthetic oligonucleotide
gcagucgucagccugaacauaacau

SEQ ID NO: 13285 - RNA, 25 nt, Artificial Sequence
  Description of Artificial Sequence: Synthetic oligonucleotide
uccuugggauuacgcucccucaagg

SEQ ID NO: 13286 - RNA, 25 nt, Artificial Sequence
  Description of Artificial Sequence: Synthetic oligonucleotide
gagauaagugauggagaugugauaa

SEQ ID NO: 13287 - RNA, 25 nt, Artificial Sequence
  Description of Artificial Sequence: Synthetic oligonucleotide
auuucaggaaacaaaaauuugugcu

SEQ ID NO: 13288 - RNA, 25 nt, Artificial Sequence
  Description of Artificial Sequence: Synthetic oligonucleotide
uaugcaaauacaauaaacuggaaaa

SEQ ID NO: 13289 - RNA, 25 nt, Artificial Sequence
  Description of Artificial Sequence: Synthetic oligonucleotide
aaacuguuugggaccuccggucaga

SEQ ID NO: 13290 - RNA, 25 nt, Artificial Sequence
  Description of Artificial Sequence: Synthetic oligonucleotide
aaaaccaaaauuauaagcaacagag

SEQ ID NO: 13291 - RNA, 25 nt, Artificial Sequence
  Description of Artificial Sequence: Synthetic oligonucleotide
ggugaaaacagcugcaaggccacag

SEQ ID NO: 13292 - RNA, 25 nt, Artificial Sequence
  Description of Artificial Sequence: Synthetic oligonucleotide
ggccaggucugccaugccuugugcu

SEQ ID NO: 13293 - RNA, 25 nt, Artificial Sequence
  Description of Artificial Sequence: Synthetic oligonucleotide
ucccccgagggcugcuggggcccgg

SEQ ID NO: 13294 - RNA, 25 nt, Artificial Sequence
  Description of Artificial Sequence: Synthetic oligonucleotide
gagcccagggacugcgucucuugcc

SEQ ID NO: 13295 - RNA, 25 nt, Artificial Sequence
  Description of Artificial Sequence: Synthetic oligonucleotide
cggaaugucagccgaggcagggaau

SEQ ID NO: 13296 - RNA, 25 nt, Artificial Sequence
  Description of Artificial Sequence: Synthetic oligonucleotide
ugcguggacaagugcaaccuucugg

SEQ ID NO: 13297 - RNA, 25 nt, Artificial Sequence
  Description of Artificial Sequence: Synthetic oligonucleotide
gagggugagccaagggaguuugugg

SEQ ID NO: 13298 - RNA, 25 nt, Artificial Sequence
  Description of Artificial Sequence: Synthetic oligonucleotide
gagaacucugagugcauacagugcc

SEQ ID NO: 13299 - RNA, 25 nt, Artificial Sequence
  Description of Artificial Sequence: Synthetic oligonucleotide
cacccagagugccugccucaggcca

SEQ ID NO: 13300 - RNA, 25 nt, Artificial Sequence
  Description of Artificial Sequence: Synthetic oligonucleotide
augaacaucaccugcacaggacggg

SEQ ID NO: 13301 - RNA, 25 nt, Artificial Sequence
  Description of Artificial Sequence: Synthetic oligonucleotide
ggaccagacaacuguauccagugug

SEQ ID NO: 13302 - RNA, 25 nt, Artificial Sequence
  Description of Artificial Sequence: Synthetic oligonucleotide
gcccacuacauugacggcccccacu

SEQ ID NO: 13303 - RNA, 25 nt, Artificial Sequence
  Description of Artificial Sequence: Synthetic oligonucleotide
ugcgucaagaccugcccggcaggag

SEQ ID NO: 13304 - RNA, 25 nt, Artificial Sequence
  Description of Artificial Sequence: Synthetic oligonucleotide
gucaugggagaaaacaacacccugg

SEQ ID NO: 13305 - RNA, 25 nt, Artificial Sequence
  Description of Artificial Sequence: Synthetic oligonucleotide
gucuggaaguacgcagacgccggcc

SEQ ID NO: 13306 - RNA, 25 nt, Artificial Sequence
  Description of Artificial Sequence: Synthetic oligonucleotide
caugugugccaccugugccauccaa

SEQ ID NO: 13307 - RNA, 25 nt, Artificial Sequence
  Description of Artificial Sequence: Synthetic oligonucleotide
aacugcaccuacggguccuaauaaa

SEQ ID NO: 13308 - RNA, 25 nt, Artificial Sequence
  Description of Artificial Sequence: Synthetic oligonucleotide
aucuucacugucugacuuuagucuc

SEQ ID NO: 13309 - RNA, 25 nt, Artificial Sequence
  Description of Artificial Sequence: Synthetic oligonucleotide
cccacuaaaacugcauuuccuuucu

SEQ ID NO: 13310 - RNA, 25 nt, Artificial Sequence
  Description of Artificial Sequence: Synthetic oligonucleotide
uacaauuucaauuucucccuuugcu

SEQ ID NO: 13311 - RNA, 25 nt, Artificial Sequence
  Description of Artificial Sequence: Synthetic oligonucleotide
uucaaauaaaguccugacacuauuc

SEQ ID NO: 13312 - RNA, 25 nt, Artificial Sequence
  Description of Artificial Sequence: Synthetic oligonucleotide
uaaaguccugacacuauucauuuga

SEQ ID NO: 13313 - RNA, 25 nt, Artificial Sequence
  Description of Artificial Sequence: Synthetic oligonucleotide
aacugcaccuacggaugcacugggc

SEQ ID NO: 13314 - RNA, 25 nt, Artificial Sequence
  Description of Artificial Sequence: Synthetic oligonucleotide
ccaggucuugaaggcuguccaacga

SEQ ID NO: 13315 - RNA, 25 nt, Artificial Sequence
  Description of Artificial Sequence: Synthetic oligonucleotide
aaugggccuaagaucccguccaucg

SEQ ID NO: 13316 - RNA, 25 nt, Artificial Sequence
  Description of Artificial Sequence: Synthetic oligonucleotide
gccacugggauggugggggcccucc

SEQ ID NO: 13317 - RNA, 25 nt, Artificial Sequence
  Description of Artificial Sequence: Synthetic oligonucleotide
cucuugcugcuggugguggcccugg

SEQ ID NO: 13318 - RNA, 25 nt, Artificial Sequence
  Description of Artificial Sequence: Synthetic oligonucleotide
gggaucggccucuucaugcgaaggc

SEQ ID NO: 13319 - RNA, 25 nt, Artificial Sequence
  Description of Artificial Sequence: Synthetic oligonucleotide
cgccacaucguucggaagcgcacgc

SEQ ID NO: 13320 - RNA, 25 nt, Artificial Sequence
  Description of Artificial Sequence: Synthetic oligonucleotide
cugcggaggcugcugcaggagaggg

SEQ ID NO: 13321 - RNA, 25 nt, Artificial Sequence
  Description of Artificial Sequence: Synthetic oligonucleotide
gagcuuguggagccucuuacaccca

SEQ ID NO: 13322 - RNA, 25 nt, Artificial Sequence
  Description of Artificial Sequence: Synthetic oligonucleotide
aguggagaagcucccaaccaagcuc

SEQ ID NO: 13323 - RNA, 25 nt, Artificial Sequence
  Description of Artificial Sequence: Synthetic oligonucleotide
cucuugaggaucuugaaggaaacug

SEQ ID NO: 13324 - RNA, 25 nt, Artificial Sequence
  Description of Artificial Sequence: Synthetic oligonucleotide
gaauucaaaaagaucaaagugcugg

SEQ ID NO: 13325 - RNA, 25 nt, Artificial Sequence
  Description of Artificial Sequence: Synthetic oligonucleotide
ggcuccggugcguucggcacggugu

SEQ ID NO: 13326 - RNA, 25 nt, Artificial Sequence
  Description of Artificial Sequence: Synthetic oligonucleotide
uauaagggacucuggaucccagaag

SEQ ID NO: 13327 - RNA, 25 nt, Artificial Sequence
  Description of Artificial Sequence: Synthetic oligonucleotide
ggugagaaaguuaaaauucccgucg

SEQ ID NO: 13328 - RNA, 25 nt, Artificial Sequence
  Description of Artificial Sequence: Synthetic oligonucleotide
gcuaucaaggaauuaagagaagcaa

SEQ ID NO: 13329 - RNA, 25 nt, Artificial Sequence
  Description of Artificial Sequence: Synthetic oligonucleotide
acaucuccgaaagccaacaaggaaa

SEQ ID NO: 13330 - RNA, 25 nt, Artificial Sequence
  Description of Artificial Sequence: Synthetic oligonucleotide
auccucgaugaagccuacgugaugg

SEQ ID NO: 13331 - RNA, 25 nt, Artificial Sequence
  Description of Artificial Sequence: Synthetic oligonucleotide
gccagcguggacaacccccacgugu

SEQ ID NO: 13332 - RNA, 25 nt, Artificial Sequence
  Description of Artificial Sequence: Synthetic oligonucleotide
ugccgccugcugggcaucugccuca

SEQ ID NO: 13333 - RNA, 25 nt, Artificial Sequence
  Description of Artificial Sequence: Synthetic oligonucleotide
accuccaccgugcagcucaucacgc

SEQ ID NO: 13334 - RNA, 25 nt, Artificial Sequence
  Description of Artificial Sequence: Synthetic oligonucleotide
cagcucaugcccuucggcugccucc

SEQ ID NO: 13335 - RNA, 25 nt, Artificial Sequence
  Description of Artificial Sequence: Synthetic oligonucleotide
cuggacuauguccgggaacacaaag

SEQ ID NO: 13336 - RNA, 25 nt, Artificial Sequence
  Description of Artificial Sequence: Synthetic oligonucleotide
gacaauauuggcucccaguaccugc

SEQ ID NO: 13337 - RNA, 25 nt, Artificial Sequence
  Description of Artificial Sequence: Synthetic oligonucleotide
cucaacuggugugugcagaucgcaa

SEQ ID NO: 13338 - RNA, 25 nt, Artificial Sequence
  Description of Artificial Sequence: Synthetic oligonucleotide
aagggcaugaacuacuuggaggacc

SEQ ID NO: 13339 - RNA, 25 nt, Artificial Sequence
  Description of Artificial Sequence: Synthetic oligonucleotide
cgucgcuuggugcaccgcgaccugg

SEQ ID NO: 13340 - RNA, 25 nt, Artificial Sequence
  Description of Artificial Sequence: Synthetic oligonucleotide
gcagccaggaacguacuggugaaaa

SEQ ID NO: 13341 - RNA, 25 nt, Artificial Sequence
  Description of Artificial Sequence: Synthetic oligonucleotide
acaccgcagcaugucaagaucacag

SEQ ID NO: 13342 - RNA, 25 nt, Artificial Sequence
  Description of Artificial Sequence: Synthetic oligonucleotide
gauuuugggcuggccaaacugcugg

SEQ ID NO: 13343 - RNA, 25 nt, Artificial Sequence
  Description of Artificial Sequence: Synthetic oligonucleotide
ggugcggaagagaaagaauaccaug

SEQ ID NO: 13344 - RNA, 25 nt, Artificial Sequence
  Description of Artificial Sequence: Synthetic oligonucleotide
gcagaaggaggcaaagugccuauca

SEQ ID NO: 13345 - RNA, 25 nt, Artificial Sequence
  Description of Artificial Sequence: Synthetic oligonucleotide
aaguggauggcauuggaaucaauuu

SEQ ID NO: 13346 - RNA, 25 nt, Artificial Sequence
  Description of Artificial Sequence: Synthetic oligonucleotide
uuacacagaaucuauacccaccaga

SEQ ID NO: 13347 - RNA, 25 nt, Artificial Sequence
  Description of Artificial Sequence: Synthetic oligonucleotide
agugaugucuggagcuacgggguga

SEQ ID NO: 13348 - RNA, 25 nt, Artificial Sequence
  Description of Artificial Sequence: Synthetic oligonucleotide
accguuugggaguugaugaccuuug

SEQ ID NO: 13349 - RNA, 25 nt, Artificial Sequence
  Description of Artificial Sequence: Synthetic oligonucleotide
ggauccaagccauaugacggaaucc

SEQ ID NO: 13350 - RNA, 25 nt, Artificial Sequence
  Description of Artificial Sequence: Synthetic oligonucleotide
ccugccagcgagaucuccuccaucc

SEQ ID NO: 13351 - RNA, 25 nt, Artificial Sequence
  Description of Artificial Sequence: Synthetic oligonucleotide
cuggagaaaggagaacgccucccuc

SEQ ID NO: 13352 - RNA, 25 nt, Artificial Sequence
  Description of Artificial Sequence: Synthetic oligonucleotide
cagccacccauauguaccaucgaug

SEQ ID NO: 13353 - RNA, 25 nt, Artificial Sequence
  Description of Artificial Sequence: Synthetic oligonucleotide
gucuacaugaucauggucaagugcu

SEQ ID NO: 13354 - RNA, 25 nt, Artificial Sequence
  Description of Artificial Sequence: Synthetic oligonucleotide
uggaugauagacgcagauagucgcc

SEQ ID NO: 13355 - RNA, 25 nt, Artificial Sequence
  Description of Artificial Sequence: Synthetic oligonucleotide
ccaaaguuccgugaguugaucaucg

SEQ ID NO: 13356 - RNA, 25 nt, Artificial Sequence
  Description of Artificial Sequence: Synthetic oligonucleotide
gaauucuccaaaauggcccgagacc

SEQ ID NO: 13357 - RNA, 25 nt, Artificial Sequence
  Description of Artificial Sequence: Synthetic oligonucleotide
ccccagcgcuaccuugucauucagg

SEQ ID NO: 13358 - RNA, 25 nt, Artificial Sequence
  Description of Artificial Sequence: Synthetic oligonucleotide
ggggaugaaagaaugcauuugccaa

SEQ ID NO: 13359 - RNA, 25 nt, Artificial Sequence
  Description of Artificial Sequence: Synthetic oligonucleotide
aguccuacagacuccaacuucuacc

SEQ ID NO: 13360 - RNA, 25 nt, Artificial Sequence
  Description of Artificial Sequence: Synthetic oligonucleotide
cgugcccugauggaugaagaagaca

SEQ ID NO: 13361 - RNA, 25 nt, Artificial Sequence
  Description of Artificial Sequence: Synthetic oligonucleotide
auggacgacgugguggaugccgacg

SEQ ID NO: 13362 - RNA, 25 nt, Artificial Sequence
  Description of Artificial Sequence: Synthetic oligonucleotide
gaguaccucaucccacagcagggcu

SEQ ID NO: 13363 - RNA, 25 nt, Artificial Sequence
  Description of Artificial Sequence: Synthetic oligonucleotide
uucuucagcagccccuccacgucac

SEQ ID NO: 13364 - RNA, 25 nt, Artificial Sequence
  Description of Artificial Sequence: Synthetic oligonucleotide
cggacuccccuccugagcucucuga

SEQ ID NO: 13365 - RNA, 25 nt, Artificial Sequence
  Description of Artificial Sequence: Synthetic oligonucleotide
agugcaaccagcaacaauuccaccg

SEQ ID NO: 13366 - RNA, 25 nt, Artificial Sequence
  Description of Artificial Sequence: Synthetic oligonucleotide
guggcuugcauugauagaaaugggc

SEQ ID NO: 13367 - RNA, 25 nt, Artificial Sequence
  Description of Artificial Sequence: Synthetic oligonucleotide
cugcaaagcugucccaucaaggaag

SEQ ID NO: 13368 - RNA, 25 nt, Artificial Sequence
  Description of Artificial Sequence: Synthetic oligonucleotide
gacagcuucuugcagcgauacagcu

SEQ ID NO: 13369 - RNA, 25 nt, Artificial Sequence
  Description of Artificial Sequence: Synthetic oligonucleotide
ucagaccccacaggcgccuugacug

SEQ ID NO: 13370 - RNA, 25 nt, Artificial Sequence
  Description of Artificial Sequence: Synthetic oligonucleotide
gaggacagcauagacgacaccuucc

SEQ ID NO: 13371 - RNA, 25 nt, Artificial Sequence
  Description of Artificial Sequence: Synthetic oligonucleotide
cucccagugccugaauacauaaacc

SEQ ID NO: 13372 - RNA, 25 nt, Artificial Sequence
  Description of Artificial Sequence: Synthetic oligonucleotide
caguccguucccaaaaggcccgcug

SEQ ID NO: 13373 - RNA, 25 nt, Artificial Sequence
  Description of Artificial Sequence: Synthetic oligonucleotide
ggcucugugcagaauccugucuauc

SEQ ID NO: 13374 - RNA, 25 nt, Artificial Sequence
  Description of Artificial Sequence: Synthetic oligonucleotide
cacaaucagccucugaaccccgcgc

SEQ ID NO: 13375 - RNA, 25 nt, Artificial Sequence
  Description of Artificial Sequence: Synthetic oligonucleotide
cccagcagagacccacacuaccagg

SEQ ID NO: 13376 - RNA, 25 nt, Artificial Sequence
  Description of Artificial Sequence: Synthetic oligonucleotide
gacccccacagcacugcagugggca

SEQ ID NO: 13377 - RNA, 25 nt, Artificial Sequence
  Description of Artificial Sequence: Synthetic oligonucleotide
aaccccgaguaucucaacacugucc

SEQ ID NO: 13378 - RNA, 25 nt, Artificial Sequence
  Description of Artificial Sequence: Synthetic oligonucleotide
cagcccaccugugucaacagcacau

SEQ ID NO: 13379 - RNA, 25 nt, Artificial Sequence
  Description of Artificial Sequence: Synthetic oligonucleotide
uucgacagcccugcccacugggccc

SEQ ID NO: 13380 - RNA, 25 nt, Artificial Sequence
  Description of Artificial Sequence: Synthetic oligonucleotide
cagaaaggcagccaccaaauuagcc

SEQ ID NO: 13381 - RNA, 25 nt, Artificial Sequence
  Description of Artificial Sequence: Synthetic oligonucleotide
cuggacaacccugacuaccagcagg

SEQ ID NO: 13382 - RNA, 25 nt, Artificial Sequence
  Description of Artificial Sequence: Synthetic oligonucleotide
gacuucuuucccaaggaagccaagc

SEQ ID NO: 13383 - RNA, 25 nt, Artificial Sequence
  Description of Artificial Sequence: Synthetic oligonucleotide
ccaaauggcaucuuuaagggcucca

SEQ ID NO: 13384 - RNA, 25 nt, Artificial Sequence
  Description of Artificial Sequence: Synthetic oligonucleotide
acagcugaaaaugcagaauaccuaa

SEQ ID NO: 13385 - RNA, 25 nt, Artificial Sequence
  Description of Artificial Sequence: Synthetic oligonucleotide
agggucgcgccacaaagcagugaau

SEQ ID NO: 13386 - RNA, 25 nt, Artificial Sequence
  Description of Artificial Sequence: Synthetic oligonucleotide
uuuauuggagcaugaccacggagga

SEQ ID NO: 13387 - RNA, 25 nt, Artificial Sequence
  Description of Artificial Sequence: Synthetic oligonucleotide
auaguaugagcccuaaaaauccaga

SEQ ID NO: 13388 - RNA, 25 nt, Artificial Sequence
  Description of Artificial Sequence: Synthetic oligonucleotide
acucuuucgauacccaggaccaagc

SEQ ID NO: 13389 - RNA, 25 nt, Artificial Sequence
  Description of Artificial Sequence: Synthetic oligonucleotide
ccacagcagguccuccaucccaaca

SEQ ID NO: 13390 - RNA, 25 nt, Artificial Sequence
  Description of Artificial Sequence: Synthetic oligonucleotide
agccaugcccgcauuagcucuuaga

SEQ ID NO: 13391 - RNA, 25 nt, Artificial Sequence
  Description of Artificial Sequence: Synthetic oligonucleotide
acccacagacugguuuugcaacguu

SEQ ID NO: 13392 - RNA, 25 nt, Artificial Sequence
  Description of Artificial Sequence: Synthetic oligonucleotide
uuacaccgacuagccaggaaguacu

SEQ ID NO: 13393 - RNA, 25 nt, Artificial Sequence
  Description of Artificial Sequence: Synthetic oligonucleotide
uuccaccucgggcacauuuugggaa

SEQ ID NO: 13394 - RNA, 25 nt, Artificial Sequence
  Description of Artificial Sequence: Synthetic oligonucleotide
aguugcauuccuuugucuucaaacu

SEQ ID NO: 13395 - RNA, 25 nt, Artificial Sequence
  Description of Artificial Sequence: Synthetic oligonucleotide
ugugaagcauuuacagaaacgcauc

SEQ ID NO: 13396 - RNA, 25 nt, Artificial Sequence
  Description of Artificial Sequence: Synthetic oligonucleotide
ccagcaagaauauugucccuuugag

SEQ ID NO: 13397 - RNA, 25 nt, Artificial Sequence
  Description of Artificial Sequence: Synthetic oligonucleotide
gcagaaauuuaucuuucaaagaggu

SEQ ID NO: 13398 - RNA, 25 nt, Artificial Sequence
  Description of Artificial Sequence: Synthetic oligonucleotide
uaugugaggauuuuuauugauuggg

SEQ ID NO: 13399 - RNA, 25 nt, Artificial Sequence
  Description of Artificial Sequence: Synthetic oligonucleotide
ggaucuuggaguuuuucauugucgc

SEQ ID NO: 13400 - RNA, 25 nt, Artificial Sequence
  Description of Artificial Sequence: Synthetic oligonucleotide
cuauugauuuuuacuucaaugggcu

SEQ ID NO: 13401 - RNA, 25 nt, Artificial Sequence
  Description of Artificial Sequence: Synthetic oligonucleotide
ucuuccaacaaggaagaagcuugcu

SEQ ID NO: 13402 - RNA, 25 nt, Artificial Sequence
  Description of Artificial Sequence: Synthetic oligonucleotide
ugguagcacuugcuacccugaguuc

SEQ ID NO: 13403 - RNA, 25 nt, Artificial Sequence
  Description of Artificial Sequence: Synthetic oligonucleotide
cauccaggcccaacugugagcaagg

SEQ ID NO: 13404 - RNA, 25 nt, Artificial Sequence
  Description of Artificial Sequence: Synthetic oligonucleotide
gagcacaagccacaagucuuccaga

SEQ ID NO: 13405 - RNA, 25 nt, Artificial Sequence
  Description of Artificial Sequence: Synthetic oligonucleotide
aggaugcuugauuccagugguucug

SEQ ID NO: 13406 - RNA, 25 nt, Artificial Sequence
  Description of Artificial Sequence: Synthetic oligonucleotide
gcuucaaggcuuccacugcaaaaca

SEQ ID NO: 13407 - RNA, 25 nt, Artificial Sequence
  Description of Artificial Sequence: Synthetic oligonucleotide
acuaaagauccaagaaggccuucau

SEQ ID NO: 13408 - RNA, 25 nt, Artificial Sequence
  Description of Artificial Sequence: Synthetic oligonucleotide
uggccccagcaggccggaucgguac

SEQ ID NO: 13409 - RNA, 25 nt, Artificial Sequence
  Description of Artificial Sequence: Synthetic oligonucleotide
cuguaucaagucauggcagguacag

SEQ ID NO: 13410 - RNA, 25 nt, Artificial Sequence
  Description of Artificial Sequence: Synthetic oligonucleotide
guaggauaagccacucugucccuuc

SEQ ID NO: 13411 - RNA, 25 nt, Artificial Sequence
  Description of Artificial Sequence: Synthetic oligonucleotide
ccugggcaaagaagaaacggagggg

SEQ ID NO: 13412 - RNA, 25 nt, Artificial Sequence
  Description of Artificial Sequence: Synthetic oligonucleotide
gauggaauucuuccuuagacuuacu

SEQ ID NO: 13413 - RNA, 25 nt, Artificial Sequence
  Description of Artificial Sequence: Synthetic oligonucleotide
uuuuguaaaaauguccccacgguac

SEQ ID NO: 13414 - RNA, 25 nt, Artificial Sequence
  Description of Artificial Sequence: Synthetic oligonucleotide
cuuacuccccacugauggaccagug

SEQ ID NO: 13415 - RNA, 25 nt, Artificial Sequence
  Description of Artificial Sequence: Synthetic oligonucleotide
gguuuccagucaugagcguuagacu

SEQ ID NO: 13416 - RNA, 25 nt, Artificial Sequence
  Description of Artificial Sequence: Synthetic oligonucleotide
ugacuuguuugucuuccauuccauu

SEQ ID NO: 13417 - RNA, 25 nt, Artificial Sequence
  Description of Artificial Sequence: Synthetic oligonucleotide
uguuuugaaacucaguaugcugccc

SEQ ID NO: 13418 - RNA, 25 nt, Artificial Sequence
  Description of Artificial Sequence: Synthetic oligonucleotide
ccugucuugcugucaugaaaucagc

SEQ ID NO: 13419 - RNA, 25 nt, Artificial Sequence
  Description of Artificial Sequence: Synthetic oligonucleotide
caagagaggaugacacaucaaauaa

SEQ ID NO: 13420 - RNA, 25 nt, Artificial Sequence
  Description of Artificial Sequence: Synthetic oligonucleotide
auaacucggauuccagcccacauug

SEQ ID NO: 13421 - RNA, 25 nt, Artificial Sequence
  Description of Artificial Sequence: Synthetic oligonucleotide
ggauucaucagcauuuggaccaaua

SEQ ID NO: 13422 - RNA, 25 nt, Artificial Sequence
  Description of Artificial Sequence: Synthetic oligonucleotide
agcccacagcugagaauguggaaua

SEQ ID NO: 13423 - RNA, 25 nt, Artificial Sequence
  Description of Artificial Sequence: Synthetic oligonucleotide
accuaaggauagcaccgcuuuuguu

SEQ ID NO: 13424 - RNA, 25 nt, Artificial Sequence
  Description of Artificial Sequence: Synthetic oligonucleotide
ucucgcaaaaacguaucuccuaauu

SEQ ID NO: 13425 - RNA, 25 nt, Artificial Sequence
  Description of Artificial Sequence: Synthetic oligonucleotide
uugaggcucagaugaaaugcaucag

SEQ ID NO: 13426 - RNA, 25 nt, Artificial Sequence
  Description of Artificial Sequence: Synthetic oligonucleotide
gguccuuuggggcauagaucagaag

SEQ ID NO: 13427 - RNA, 25 nt, Artificial Sequence
  Description of Artificial Sequence: Synthetic oligonucleotide
gacuacaaaaaugaagcugcucuga

SEQ ID NO: 13428 - RNA, 25 nt, Artificial Sequence
  Description of Artificial Sequence: Synthetic oligonucleotide
aaaucuccuuuagccaucaccccaa

SEQ ID NO: 13429 - RNA, 25 nt, Artificial Sequence
  Description of Artificial Sequence: Synthetic oligonucleotide
accccccaaaauuaguuuguguuac

SEQ ID NO: 13430 - RNA, 25 nt, Artificial Sequence
  Description of Artificial Sequence: Synthetic oligonucleotide
cuuauggaagauaguuuucuccuuu

SEQ ID NO: 13431 - RNA, 25 nt, Artificial Sequence
  Description of Artificial Sequence: Synthetic oligonucleotide
uuacuucacuucaaaagcuuuuuac

SEQ ID NO: 13432 - RNA, 25 nt, Artificial Sequence
  Description of Artificial Sequence: Synthetic oligonucleotide
cucaaagaguauauguucccuccag

SEQ ID NO: 13433 - RNA, 25 nt, Artificial Sequence
  Description of Artificial Sequence: Synthetic oligonucleotide
ggucagcugcccccaaacccccucc

SEQ ID NO: 13434 - RNA, 25 nt, Artificial Sequence
  Description of Artificial Sequence: Synthetic oligonucleotide
cuuacgcuuugucacacaaaaagug

SEQ ID NO: 13435 - RNA, 25 nt, Artificial Sequence
  Description of Artificial Sequence: Synthetic oligonucleotide
gucucugccuugagucaucuauuca

SEQ ID NO: 13436 - RNA, 25 nt, Artificial Sequence
  Description of Artificial Sequence: Synthetic oligonucleotide
aagcacuuacagcucuggccacaac

SEQ ID NO: 13437 - RNA, 25 nt, Artificial Sequence
  Description of Artificial Sequence: Synthetic oligonucleotide
cagggcauuuuacaggugcgaauga

SEQ ID NO: 13438 - RNA, 25 nt, Artificial Sequence
  Description of Artificial Sequence: Synthetic oligonucleotide
acaguagcauuaugaguagugugga

SEQ ID NO: 13439 - RNA, 25 nt, Artificial Sequence
  Description of Artificial Sequence: Synthetic oligonucleotide
aauucagguaguaaauaugaaacua

SEQ ID NO: 13440 - RNA, 25 nt, Artificial Sequence
  Description of Artificial Sequence: Synthetic oligonucleotide
aggguuugaaauugauaaugcuuuc

SEQ ID NO: 13441 - RNA, 25 nt, Artificial Sequence
  Description of Artificial Sequence: Synthetic oligonucleotide
cacaacauuugcagauguuuuagaa

SEQ ID NO: 13442 - RNA, 25 nt, Artificial Sequence
  Description of Artificial Sequence: Synthetic oligonucleotide
aggaaaaaaguuccuuccuaaaaua

SEQ ID NO: 13443 - RNA, 25 nt, Artificial Sequence
  Description of Artificial Sequence: Synthetic oligonucleotide
aauuucucuacaauuggaagauugg

SEQ ID NO: 13444 - RNA, 25 nt, Artificial Sequence
  Description of Artificial Sequence: Synthetic oligonucleotide
gaagauucagcuaguuaggagccca

SEQ ID NO: 13445 - RNA, 25 nt, Artificial Sequence
  Description of Artificial Sequence: Synthetic oligonucleotide
accuuuuuuccuaaucugugugugc

SEQ ID NO: 13446 - RNA, 25 nt, Artificial Sequence
  Description of Artificial Sequence: Synthetic oligonucleotide
cccuguaaccugacugguuaacagc

SEQ ID NO: 13447 - RNA, 25 nt, Artificial Sequence
  Description of Artificial Sequence: Synthetic oligonucleotide
caguccuuuguaaacaguguuuuaa

SEQ ID NO: 13448 - RNA, 25 nt, Artificial Sequence
  Description of Artificial Sequence: Synthetic oligonucleotide
aacucuccuagucaauauccacccc

SEQ ID NO: 13449 - RNA, 25 nt, Artificial Sequence
  Description of Artificial Sequence: Synthetic oligonucleotide
cauccaauuuaucaaggaagaaaug

SEQ ID NO: 13450 - RNA, 25 nt, Artificial Sequence
  Description of Artificial Sequence: Synthetic oligonucleotide
gguucagaaaauauuuucagccuac

SEQ ID NO: 13451 - RNA, 25 nt, Artificial Sequence
  Description of Artificial Sequence: Synthetic oligonucleotide
caguuauguucagucacacacacau

SEQ ID NO: 13452 - RNA, 25 nt, Artificial Sequence
  Description of Artificial Sequence: Synthetic oligonucleotide
uacaaaauguuccuuuugcuuuuaa

SEQ ID NO: 13453 - RNA, 25 nt, Artificial Sequence
  Description of Artificial Sequence: Synthetic oligonucleotide
aaguaauuuuugacucccagaucag

SEQ ID NO: 13454 - RNA, 25 nt, Artificial Sequence
  Description of Artificial Sequence: Synthetic oligonucleotide
gucagagccccuacagcauuguuaa

SEQ ID NO: 13455 - RNA, 25 nt, Artificial Sequence
  Description of Artificial Sequence: Synthetic oligonucleotide
agaaaguauuugauuuuugucucaa

SEQ ID NO: 13456 - RNA, 25 nt, Artificial Sequence
  Description of Artificial Sequence: Synthetic oligonucleotide
augaaaauaaaacuauauucauuuc

SEQ ID NO: 13457 - RNA, 25 nt, Artificial Sequence
  Description of Artificial Sequence: Synthetic oligonucleotide
aacugcaccuacgggccaggaaaug

SEQ ID NO: 13458 - RNA, 25 nt, Artificial Sequence
  Description of Artificial Sequence: Synthetic oligonucleotide
gagagucucaaagccauguuauucu

SEQ ID NO: 13459 - RNA, 25 nt, Artificial Sequence
  Description of Artificial Sequence: Synthetic oligonucleotide
ugccuuuuuaaacuaucauccugua

SEQ ID NO: 13460 - RNA, 25 nt, Artificial Sequence
  Description of Artificial Sequence: Synthetic oligonucleotide
aaucaaaguaaugauggcagcgugu

SEQ ID NO: 13461 - RNA, 25 nt, Artificial Sequence
  Description of Artificial Sequence: Synthetic oligonucleotide
ucccaccagagcgggagcccagcug

SEQ ID NO: 13462 - RNA, 25 nt, Artificial Sequence
  Description of Artificial Sequence: Synthetic oligonucleotide
gcucaggagucaugcuuaggaugga

SEQ ID NO: 13463 - RNA, 25 nt, Artificial Sequence
  Description of Artificial Sequence: Synthetic oligonucleotide
aucccuucucuucugccgucagagu

SEQ ID NO: 13464 - RNA, 25 nt, Artificial Sequence
  Description of Artificial Sequence: Synthetic oligonucleotide
uuucagcuggguugggguggaugca

SEQ ID NO: 13465 - RNA, 25 nt, Artificial Sequence
  Description of Artificial Sequence: Synthetic oligonucleotide
agccaccuccaugccuggccuucug

SEQ ID NO: 13466 - RNA, 25 nt, Artificial Sequence
  Description of Artificial Sequence: Synthetic oligonucleotide
gcaucugugaucaucacggccuccu

SEQ ID NO: 13467 - RNA, 25 nt, Artificial Sequence
  Description of Artificial Sequence: Synthetic oligonucleotide
uccugccacugagccucaugccuuc

SEQ ID NO: 13468 - RNA, 25 nt, Artificial Sequence
  Description of Artificial Sequence: Synthetic oligonucleotide
cacgugucuguuccccccgcuuuuc

SEQ ID NO: 13469 - RNA, 25 nt, Artificial Sequence
  Description of Artificial Sequence: Synthetic oligonucleotide
ccuuucugccaccccugcacguggg

SEQ ID NO: 13470 - RNA, 25 nt, Artificial Sequence
  Description of Artificial Sequence: Synthetic oligonucleotide
gccgccagguucccaagaguauccu

SEQ ID NO: 13471 - RNA, 25 nt, Artificial Sequence
  Description of Artificial Sequence: Synthetic oligonucleotide
uacccauuuccuuccuuccacuccc

SEQ ID NO: 13472 - RNA, 25 nt, Artificial Sequence
  Description of Artificial Sequence: Synthetic oligonucleotide
cuuugccagugccucucaccccaac

SEQ ID NO: 13473 - RNA, 25 nt, Artificial Sequence
  Description of Artificial Sequence: Synthetic oligonucleotide
cuaguagcuaaccaucacccccagg

SEQ ID NO: 13474 - RNA, 25 nt, Artificial Sequence
  Description of Artificial Sequence: Synthetic oligonucleotide
gacugaccucuuccuccucgcugcc

SEQ ID NO: 13475 - RNA, 25 nt, Artificial Sequence
  Description of Artificial Sequence: Synthetic oligonucleotide
cagaugauuguucaaagcacagaau

SEQ ID NO: 13476 - RNA, 25 nt, Artificial Sequence
  Description of Artificial Sequence: Synthetic oligonucleotide
uuugucagaaaccugcagggacucc

SEQ ID NO: 13477 - RNA, 25 nt, Artificial Sequence
  Description of Artificial Sequence: Synthetic oligonucleotide
caugcugccagccuucuccguaauu

SEQ ID NO: 13478 - RNA, 25 nt, Artificial Sequence
  Description of Artificial Sequence: Synthetic oligonucleotide
uagcauggccccaguccaugcuucu

SEQ ID NO: 13479 - RNA, 25 nt, Artificial Sequence
  Description of Artificial Sequence: Synthetic oligonucleotide
uagccuugguuccuucugccccucu

SEQ ID NO: 13480 - RNA, 25 nt, Artificial Sequence
  Description of Artificial Sequence: Synthetic oligonucleotide
uguuugaaauucuagagccagcugu

SEQ ID NO: 13481 - RNA, 25 nt, Artificial Sequence
  Description of Artificial Sequence: Synthetic oligonucleotide
ugggacaauuaucugugucaaaagc

SEQ ID NO: 13482 - RNA, 25 nt, Artificial Sequence
  Description of Artificial Sequence: Synthetic oligonucleotide
ccagaugugaaaacaucucaauaac

SEQ ID NO: 13483 - RNA, 25 nt, Artificial Sequence
  Description of Artificial Sequence: Synthetic oligonucleotide
caaacuggcugcuuuguucaaugcu

SEQ ID NO: 13484 - RNA, 25 nt, Artificial Sequence
  Description of Artificial Sequence: Synthetic oligonucleotide
uagaacaacgccugucacagaguag

SEQ ID NO: 13485 - RNA, 25 nt, Artificial Sequence
  Description of Artificial Sequence: Synthetic oligonucleotide
gaaacucaaaaauauuugcugagug

SEQ ID NO: 13486 - RNA, 25 nt, Artificial Sequence
  Description of Artificial Sequence: Synthetic oligonucleotide
gaaugaacaaaugaauaaaugcaua

SEQ ID NO: 13487 - RNA, 25 nt, Artificial Sequence
  Description of Artificial Sequence: Synthetic oligonucleotide
aauaaauaauuaaccaccaauccaa

SEQ ID NO: 13488 - RNA, 25 nt, Artificial Sequence
  Description of Artificial Sequence: Synthetic oligonucleotide
auuaaccaccaauccaacauccaga

SEQ ID NO: 13489 - RNA, 4624 nt, Homo sapiens
ggaggagguggaggaggagggcugcuugaggaaguauaagaaugaaguugugaagcugagauuccccuccauugggaccggagaaaccaggggagccccccgggcagccgcgcgccccuucccacggggcccuuuacugcgccgcgcgcccggcccccaccccucgcagcaccccgcgccccgcgcccucccagccggguccagccggagccauggggccggagccgcagugagcaccauggagcuggcggccuugugccgcugggggcuccuccucgcccucuugccccccggagccgcgagcacccaagugugcaccggcacagacaugaagcugcggcucccugccagucccgagacccaccuggacaugcuccgccaccucuaccagggcugccagguggugcagggaaaccuggaacucaccuaccugcccaccaaugccagccuguccuuccugcaggauauccaggaggugcagggcuacgugcucaucgcucacaaccaagugaggcaggucccacugcagaggcugcggauugugcgaggcacccagcucuuugaggacaacuaugcccuggccgugcuagacaauggagacccgcugaacaauaccaccccugucacaggggccuccccaggaggccugcgggagcugcagcuucgaagccucacagagaucuugaaaggaggggucuugauccagcggaacccccagcucugcuaccaggacacgauuuuguggaaggacaucuuccacaagaacaaccagcuggcucucacacugauagacaccaaccgcucucgggccugccaccccuguucuccgauguguaagggcucccgcugcuggggagagaguucugaggauugucagagccugacgcgcacugucugugccgguggcugugcccgcugcaaggggccacugcccacugacugcugccaugagcagugugcugccggcugcacgggccccaagcacucugacugccuggccugccuccacuucaaccacaguggcaucugugagcugcacugcccagcccuggucaccuacaacacagacacguuugaguccaugcccaaucccgagggccgguauacauucggcgccagcugugugacugccugucccuacaacuaccuuucuacggacgugggauccugcacccucgucugcccccugcacaaccaagaggugacagcagaggauggaacacagcggugugagaagugcagcaagcccugugcccgagugugcuauggucugggcauggagcacuugcgagaggugagggcaguuaccagugccaauauccaggaguuugcuggcugcaagaagaucuuugggagccuggcauuucugccggagagcuuugauggggacccagccuccaacacugccccgcuccagccagagcagcuccaaguguuugagacucuggaagagaucacagguuaccuauacaucucagcauggccggacagccugccugaccucagcgucuuccagaaccugcaaguaauccggggacgaauucugcacaauggcgccuacucgcugacccugcaagggcugggcaucagcuggcuggggcugcgcucacugagggaacugggcaguggacuggcccucauccaccauaacacccaccucugcuucgugcacacggugcccugggaccagcucuuucggaacccgcaccaagcucugcuccacacugccaaccggccagaggacgagugugugggcgagggccuggccugccaccagcugugcgcccgagggcacugcugggguccagggcccacccagugugucaacugcagccaguuccuucggggccaggagugcguggaggaaugccgaguacugcaggggcuccccagggaguaugugaaugccaggcacuguuugccgugccacccugagugucagccccagaauggcucagugaccuguuuuggaccggaggcugaccaguguguggccugugcccacuauaaggacccucccuucugcguggcccgcugccccagcggugugaaaccugaccucuccuacaugcccaucuggaaguuuccagaugaggagggcgcaugccagccuugccccaucaacugcacccacuccuguguggaccuggaugacaagggcugccccgccgagcagagagccagcccucugacguccaucaucucugcggugguuggcauucugcuggucguggucuuggggguggucuuugggauccucaucaagcgacggcagcagaagauccggaaguacacgaugcggagacugcugcaggaaacggagcugguggagccgcugacaccuagcggagcgaugcccaaccaggcgcagaugcggauccugaaagagacggagcugaggaaggugaaggugcuuggaucuggcgcuuuuggcacagucuacaagggcaucuggaucccugauggggagaaugugaaaauuccaguggccaucaaaguguugagggaaaacacaucccccaaagccaacaaagaaaucuuagacgaagcauacgugauggcuggugugggcuccccauaugucucccgccuucugggcaucugccugacauccacggugcagcuggugacacagcuuaugcccuauggcugccucuuagaccauguccgggaaaaccgcggacgccugggcucccaggaccugcugaacugguguaugcagauugccaaggggaugagcuaccuggaggaugugcggcucguacacagggacuuggccgcucggaacgugcuggucaagagucccaaccaugucaaaauuacagacuucgggcuggcucggcugcuggacauugacgagacagaguaccaugcagaugggggcaaggugcccaucaaguggauggcgcuggaguccauucuccgccggcgguucacccaccagagugauguguggaguuauggugugacugugugggagcugaugacuuuuggggccaaaccuuacgaugggaucccagcccgggagaucccugaccugcuggaaaagggggagcggcugccccagccccccaucugcaccauugaugucuacaugaucauggucaaauguuggaugauugacucugaaugucggccaagauuccgggaguuggugucugaauucucccgcauggccagggacccccagcgcuuuguggucauccagaaugaggacuugggcccagccagucccuuggacagcaccuucuaccgcucacugcuggaggacgaugacaugggggaccugguggaugcugaggaguaucugguaccccagcagggcuucuucuguccagacccugccccgggcgcugggggcaugguccaccacaggcaccgcagcucaucuaccaggaguggcgguggggaccugacacuagggcuggagcccucugaagaggaggcccccaggucuccacuggcacccuccgaaggggcuggcuccgauguauuugauggugaccugggaaugggggcagccaaggggcugcaaagccuccccacacaugaccccagcccucuacagcgguacagugaggaccccacaguaccccugcccucugagacugauggcuacguugccccccugaccugcagcccccagccugaauaugugaaccagccagauguucggccccagcccccuucgccccgagagggcccucugccugcugcccgaccugcuggugccacucuggaaaggcccaagacucucuccccagggaagaauggggucgucaaagacguuuuugccuuugggggugccguggagaaccccgaguacuugacaccccagggaggagcugccccucagccccacccuccuccugccuucagcccagccuucgacaaccucuauuacugggaccaggacccaccagagcggggggcuccacccagcaccuucaaagggacaccuacggcagagaacccagaguaccugggucuggacgugccagugugaaccagaaggccaaguccgcagaagcccugauguguccucagggagcagggaaggccugacuucugcuggcaucaagaggugggagggcccuccgaccacuuccaggggaaccugccaugccaggaaccuguccuaaggaaccuuccuuccugcuugaguucccagauggcuggaagggguccagccucguuggaagaggaacagcacuggggagucuuuguggauucugaggcccugcccaaugagacucuaggguccaguggaugccacagcccagcuuggcccuuuccuuccagauccuggguacugaaagccuuagggaagcuggccugagaggggaagcggcccuaagggagugucuaagaacaaaagcgacccauucagagacugucccugaaaccuaguacugccccccaugaggaaggaacagcaauggugucaguauccaggcuuuguacagagugcuuuucuguuuaguuuuuacuuuuuuuguuuuguuuuuuuaaagaugaaauaaagacccagggggagaauggguguuguauggggaggcaagugugggggguccuucuccacacccacuuuguccauuugcaaauauauuuuggaaaacagcua

SEQ ID NO: 13490 - RNA, 4816 nt, Homo sapiens
guucccggauuuuugugggcgccugccccgccccucgucccccugcuguguccauauaucgaggcgauaggguuaagggaaggcggacgccugauggguuaaugagcaaacugaaguguuuuccaugaucuuuuuugagucgcaauugaaguaccaccucccgagggugauugcuuccccaugcgggguagaaccuuugcuguccuguucaccacucuaccuccagcacagaauuuggcuuaugccuacucaaugugaagaugaugaggaugaaaaccuuugugaugauccacuuccacuuaaugaaugguggcaaagcaaagcuauauucaagaccacaugcaaagcuacucccugagcaaagagucacagauaaaacgggggcaccaguagaauggccaggacaaacgcagugcagcacagagacucagacccuggcagccaugccugcgcaggcagugaugagagugacauguacuguuguggacaugcacaaaagugagugugcaccggcacagacaugaagcugcggcucccugccagucccgagacccaccuggacaugcuccgccaccucuaccagggcugccagguggugcagggaaaccuggaacucaccuaccugcccaccaaugccagccuguccuuccugcaggauauccaggaggugcagggcuacgugcucaucgcucacaaccaagugaggcaggucccacugcagaggcugcggauugugcgaggcacccagcucuuugaggacaacuaugcccuggccgugcuagacaauggagacccgcugaacaauaccaccccugucacaggggccuccccaggaggccugcgggagcugcagcuucgaagccucacagagaucuugaaaggaggggucuugauccagcggaacccccagcucugcuaccaggacacgauuuuguggaaggacaucuuccacaagaacaaccagcuggcucucacacugauagacaccaaccgcucucgggccugccaccccuguucuccgauguguaagggcucccgcugcuggggagagaguucugaggauugucagagccugacgcgcacugucugugccgguggcugugcccgcugcaaggggccacugcccacugacugcugccaugagcagugugcugccggcugcacgggccccaagcacucugacugccuggccugccuccacuucaaccacaguggcaucugugagcugcacugcccagcccuggucaccuacaacacagacacguuugaguccaugcccaaucccgagggccgguauacauucggcgccagcugugugacugccugucccuacaacuaccuuucuacggacgugggauccugcacccucgucugcccccugcacaaccaagaggugacagcagaggauggaacacagcggugugagaagugcagcaagcccugugcccgagugugcuauggucugggcauggagcacuugcgagaggugagggcaguuaccagugccaauauccaggaguuugcuggcugcaagaagaucuuugggagccuggcauuucugccggagagcuuugauggggacccagccuccaacacugccccgcuccagccagagcagcuccaaguguuugagacucuggaagagaucacagguuaccuauacaucucagcauggccggacagccugccugaccucagcgucuuccagaaccugcaaguaauccggggacgaauucugcacaauggcgccuacucgcugacccugcaagggcugggcaucagcuggcuggggcugcgcucacugagggaacugggcaguggacuggcccucauccaccauaacacccaccucugcuucgugcacacggugcccugggaccagcucuuucggaacccgcaccaagcucugcuccacacugccaaccggccagaggacgagugugugggcgagggccuggccugccaccagcugugcgcccgagggcacugcugggguccagggcccacccagugugucaacugcagccaguuccuucggggccaggagugcguggaggaaugccgaguacugcaggggcuccccagggaguaugugaaugccaggcacuguuugccgugccacccugagugucagccccagaauggcucagugaccuguuuuggaccggaggcugaccaguguguggccugugcccacuauaaggacccucccuucugcguggcccgcugccccagcggugugaaaccugaccucuccuacaugcccaucuggaaguuuccagaugaggagggcgcaugccagccuugccccaucaacugcacccacuccuguguggaccuggaugacaagggcugccccgccgagcagagagccagcccucugacguccaucaucucugcggugguuggcauucugcuggucguggucuuggggguggucuuugggauccucaucaagcgacggcagcagaagauccggaaguacacgaugcggagacugcugcaggaaacggagcugguggagccgcugacaccuagcggagcgaugcccaaccaggcgcagaugcggauccugaaagagacggagcugaggaaggugaaggugcuuggaucuggcgcuuuuggcacagucuacaagggcaucuggaucccugauggggagaaugugaaaauuccaguggccaucaaaguguugagggaaaacacaucccccaaagccaacaaagaaaucuuagacgaagcauacgugauggcuggugugggcuccccauaugucucccgccuucugggcaucugccugacauccacggugcagcuggugacacagcuuaugcccuauggcugccucuuagaccauguccgggaaaaccgcggacgccugggcucccaggaccugcugaacugguguaugcagauugccaaggggaugagcuaccuggaggaugugcggcucguacacagggacuuggccgcucggaacgugcuggucaagagucccaaccaugucaaaauuacagacuucgggcuggcucggcugcuggacauugacgagacagaguaccaugcagaugggggcaaggugcccaucaaguggauggcgcuggaguccauucuccgccggcgguucacccaccagagugauguguggaguuauggugugacugugugggagcugaugacuuuuggggccaaaccuuacgaugggaucccagcccgggagaucccugaccugcuggaaaagggggagcggcugccccagccccccaucugcaccauugaugucuacaugaucauggucaaauguuggaugauugacucugaaugucggccaagauuccgggaguuggugucugaauucucccgcauggccagggacccccagcgcuuuguggucauccagaaugaggacuugggcccagccagucccuuggacagcaccuucuaccgcucacugcuggaggacgaugacaugggggaccugguggaugcugaggaguaucugguaccccagcagggcuucuucuguccagacccugccccgggcgcugggggcaugguccaccacaggcaccgcagcucaucuaccaggaguggcgguggggaccugacacuagggcuggagcccucugaagaggaggcccccaggucuccacuggcacccuccgaaggggcuggcuccgauguauuugauggugaccugggaaugggggcagccaaggggcugcaaagccuccccacacaugaccccagcccucuacagcgguacagugaggaccccacaguaccccugcccucugagacugauggcuacguugccccccugaccugcagcccccagccugaauaugugaaccagccagauguucggccccagcccccuucgccccgagagggcccucugccugcugcccgaccugcuggugccacucuggaaaggcccaagacucucuccccagggaagaauggggucgucaaagacguuuuugccuuugggggugccguggagaaccccgaguacuugacaccccagggaggagcugccccucagccccacccuccuccugccuucagcccagccuucgacaaccucuauuacugggaccaggacccaccagagcggggggcuccacccagcaccuucaaagggacaccuacggcagagaacccagaguaccugggucuggacgugccagugugaaccagaaggccaaguccgcagaagcccugauguguccucagggagcagggaaggccugacuucugcuggcaucaagaggugggagggcccuccgaccacuuccaggggaaccugccaugccaggaaccuguccuaaggaaccuuccuuccugcuugaguucccagauggcuggaagggguccagccucguuggaagaggaacagcacuggggagucuuuguggauucugaggcccugcccaaugagacucuaggguccaguggaugccacagcccagcuuggcccuuuccuuccagauccuggguacugaaagccuuagggaagcuggccugagaggggaagcggcccuaagggagugucuaagaacaaaagcgacccauucagagacugucccugaaaccuaguacugccccccaugaggaaggaacagcaauggugucaguauccaggcuuuguacagagugcuuuucuguuuaguuuuuacuuuuuuuguuuuguuuuuuuaaagaugaaauaaagacccagggggagaauggguguuguauggggaggcaagugugggggguccuucuccacacccacuuuguccauuugcaaauauauuuuggaaaacagcua

SEQ ID NO: 13491 - RNA, 19 nt, Artificial Sequence
  Description of Artificial Sequence: Synthetic oligonucleotide
guucccggauuuuuguggg

SEQ ID NO: 13492 - RNA, 19 nt, Artificial Sequence
  Description of Artificial Sequence: Synthetic oligonucleotide
gcgccugccccgccccucg

SEQ ID NO: 13493 - RNA, 19 nt, Artificial Sequence
  Description of Artificial Sequence: Synthetic oligonucleotide
gucccccugcuguguccau

SEQ ID NO: 13494 - RNA, 19 nt, Artificial Sequence
  Description of Artificial Sequence: Synthetic oligonucleotide
uauaucgaggcgauagggu

SEQ ID NO: 13495 - RNA, 19 nt, Artificial Sequence
  Description of Artificial Sequence: Synthetic oligonucleotide
uuaagggaaggcggacgcc

SEQ ID NO: 13496 - RNA, 19 nt, Artificial Sequence
  Description of Artificial Sequence: Synthetic oligonucleotide
cugauggguuaaugagcaa

SEQ ID NO: 13497 - RNA, 19 nt, Artificial Sequence
  Description of Artificial Sequence: Synthetic oligonucleotide
aacugaaguguuuuccaug

SEQ ID NO: 13498 - RNA, 19 nt, Artificial Sequence
  Description of Artificial Sequence: Synthetic oligonucleotide
gaucuuuuuugagucgcaa

SEQ ID NO: 13499 - RNA, 19 nt, Artificial Sequence
  Description of Artificial Sequence: Synthetic oligonucleotide
auugaaguaccaccucccg

SEQ ID NO: 13500 - RNA, 19 nt, Artificial Sequence
  Description of Artificial Sequence: Synthetic oligonucleotide
gagggugauugcuucccca

SEQ ID NO: 13501 - RNA, 19 nt, Artificial Sequence
  Description of Artificial Sequence: Synthetic oligonucleotide
augcgggguagaaccuuug

SEQ ID NO: 13502 - RNA, 19 nt, Artificial Sequence
  Description of Artificial Sequence: Synthetic oligonucleotide
gcuguccuguucaccacuc

SEQ ID NO: 13503 - RNA, 19 nt, Artificial Sequence
  Description of Artificial Sequence: Synthetic oligonucleotide
cuaccuccagcacagaauu

SEQ ID NO: 13504 - RNA, 19 nt, Artificial Sequence
  Description of Artificial Sequence: Synthetic oligonucleotide
uuggcuuaugccuacucaa

SEQ ID NO: 13505 - RNA, 19 nt, Artificial Sequence
  Description of Artificial Sequence: Synthetic oligonucleotide
augugaagaugaugaggau

SEQ ID NO: 13506 - RNA, 19 nt, Artificial Sequence
  Description of Artificial Sequence: Synthetic oligonucleotide
ugaaaaccuuugugaugau

SEQ ID NO: 13507 - RNA, 19 nt, Artificial Sequence
  Description of Artificial Sequence: Synthetic oligonucleotide
uccacuuccacuuaaugaa

SEQ ID NO: 13508 - RNA, 19 nt, Artificial Sequence
  Description of Artificial Sequence: Synthetic oligonucleotide
augguggcaaagcaaagcu

SEQ ID NO: 13509 - RNA, 19 nt, Artificial Sequence
  Description of Artificial Sequence: Synthetic oligonucleotide
uauauucaagaccacaugc

SEQ ID NO: 13510 - RNA, 19 nt, Artificial Sequence
  Description of Artificial Sequence: Synthetic oligonucleotide
caaagcuacucccugagca

SEQ ID NO: 13511 - RNA, 19 nt, Artificial Sequence
  Description of Artificial Sequence: Synthetic oligonucleotide
aaagagucacagauaaaac

SEQ ID NO: 13512 - RNA, 19 nt, Artificial Sequence
  Description of Artificial Sequence: Synthetic oligonucleotide
cgggggcaccaguagaaug

SEQ ID NO: 13513 - RNA, 19 nt, Artificial Sequence
  Description of Artificial Sequence: Synthetic oligonucleotide
ggccaggacaaacgcagug

SEQ ID NO: 13514 - RNA, 19 nt, Artificial Sequence
  Description of Artificial Sequence: Synthetic oligonucleotide
gcagcacagagacucagac

SEQ ID NO: 13515 - RNA, 19 nt, Artificial Sequence
  Description of Artificial Sequence: Synthetic oligonucleotide
cccuggcagccaugccugc

SEQ ID NO: 13516 - RNA, 19 nt, Artificial Sequence
  Description of Artificial Sequence: Synthetic oligonucleotide
cgcaggcagugaugagagu

SEQ ID NO: 13517 - RNA, 19 nt, Artificial Sequence
  Description of Artificial Sequence: Synthetic oligonucleotide
ugacauguacuguugugga

SEQ ID NO: 13518 - RNA, 19 nt, Artificial Sequence
  Description of Artificial Sequence: Synthetic oligonucleotide
acaugcacaaaagugagug

SEQ ID NO: 13519 - RNA, 19 nt, Artificial Sequence
  Description of Artificial Sequence: Synthetic oligonucleotide
gugcaccggcacagacaug

SEQ ID NO: 13520 - RNA, 19 nt, Artificial Sequence
  Description of Artificial Sequence: Synthetic oligonucleotide
gaagcugcggcucccugcc

SEQ ID NO: 13521 - RNA, 19 nt, Artificial Sequence
  Description of Artificial Sequence: Synthetic oligonucleotide
cagucccgagacccaccug

SEQ ID NO: 13522 - RNA, 19 nt, Artificial Sequence
  Description of Artificial Sequence: Synthetic oligonucleotide
ggacaugcuccgccaccuc

SEQ ID NO: 13523 - RNA, 19 nt, Artificial Sequence
  Description of Artificial Sequence: Synthetic oligonucleotide
cuaccagggcugccaggug

SEQ ID NO: 13524 - RNA, 19 nt, Artificial Sequence
  Description of Artificial Sequence: Synthetic oligonucleotide
ggugcagggaaaccuggaa

SEQ ID NO: 13525 - RNA, 19 nt, Artificial Sequence
  Description of Artificial Sequence: Synthetic oligonucleotide
acucaccuaccugcccacc

SEQ ID NO: 13526 - RNA, 19 nt, Artificial Sequence
  Description of Artificial Sequence: Synthetic oligonucleotide
caaugccagccuguccuuc

SEQ ID NO: 13527 - RNA, 19 nt, Artificial Sequence
  Description of Artificial Sequence: Synthetic oligonucleotide
ccugcaggauauccaggag

SEQ ID NO: 13528 - RNA, 19 nt, Artificial Sequence
  Description of Artificial Sequence: Synthetic oligonucleotide
ggugcagggcuacgugcuc

SEQ ID NO: 13529 - RNA, 19 nt, Artificial Sequence
  Description of Artificial Sequence: Synthetic oligonucleotide
caucgcucacaaccaagug

SEQ ID NO: 13530 - RNA, 19 nt, Artificial Sequence
  Description of Artificial Sequence: Synthetic oligonucleotide
gaggcaggucccacugcag

SEQ ID NO: 13531 - RNA, 19 nt, Artificial Sequence
  Description of Artificial Sequence: Synthetic oligonucleotide
gaggcugcggauugugcga

SEQ ID NO: 13532 - RNA, 19 nt, Artificial Sequence
  Description of Artificial Sequence: Synthetic oligonucleotide
aggcacccagcucuuugag

SEQ ID NO: 13533 - RNA, 19 nt, Artificial Sequence
  Description of Artificial Sequence: Synthetic oligonucleotide
ggacaacuaugcccuggcc

SEQ ID NO: 13534 - RNA, 19 nt, Artificial Sequence
  Description of Artificial Sequence: Synthetic oligonucleotide
cgugcuagacaauggagac

SEQ ID NO: 13535 - RNA, 19 nt, Artificial Sequence
  Description of Artificial Sequence: Synthetic oligonucleotide
cccgcugaacaauaccacc

SEQ ID NO: 13536 - RNA, 19 nt, Artificial Sequence
  Description of Artificial Sequence: Synthetic oligonucleotide
cccugucacaggggccucc

SEQ ID NO: 13537 - RNA, 19 nt, Artificial Sequence
  Description of Artificial Sequence: Synthetic oligonucleotide
cccaggaggccugcgggag

SEQ ID NO: 13538 - RNA, 19 nt, Artificial Sequence
  Description of Artificial Sequence: Synthetic oligonucleotide
gcugcagcuucgaagccuc

SEQ ID NO: 13539 - RNA, 19 nt, Artificial Sequence
  Description of Artificial Sequence: Synthetic oligonucleotide
cacagagaucuugaaagga

SEQ ID NO: 13540 - RNA, 19 nt, Artificial Sequence
  Description of Artificial Sequence: Synthetic oligonucleotide
aggggucuugauccagcgg

SEQ ID NO: 13541 - RNA, 19 nt, Artificial Sequence
  Description of Artificial Sequence: Synthetic oligonucleotide
gaacccccagcucugcuac

SEQ ID NO: 13542 - RNA, 19 nt, Artificial Sequence
  Description of Artificial Sequence: Synthetic oligonucleotide
ccaggacacgauuuugugg

SEQ ID NO: 13543 - RNA, 19 nt, Artificial Sequence
  Description of Artificial Sequence: Synthetic oligonucleotide
gaaggacaucuuccacaag

SEQ ID NO: 13544 - RNA, 19 nt, Artificial Sequence
  Description of Artificial Sequence: Synthetic oligonucleotide
gaacaaccagcuggcucuc

SEQ ID NO: 13545 - RNA, 19 nt, Artificial Sequence
  Description of Artificial Sequence: Synthetic oligonucleotide
cacacugauagacaccaac

SEQ ID NO: 13546 - RNA, 19 nt, Artificial Sequence
  Description of Artificial Sequence: Synthetic oligonucleotide
ccgcucucgggccugccac

SEQ ID NO: 13547 - RNA, 19 nt, Artificial Sequence
  Description of Artificial Sequence: Synthetic oligonucleotide
ccccuguucuccgaugugu

SEQ ID NO: 13548 - RNA, 19 nt, Artificial Sequence
  Description of Artificial Sequence: Synthetic oligonucleotide
uaagggcucccgcugcugg

SEQ ID NO: 13549 - RNA, 19 nt, Artificial Sequence
  Description of Artificial Sequence: Synthetic oligonucleotide
gggagagaguucugaggau

SEQ ID NO: 13550 - RNA, 19 nt, Artificial Sequence
  Description of Artificial Sequence: Synthetic oligonucleotide
uugucagagccugacgcgc

SEQ ID NO: 13551 - RNA, 19 nt, Artificial Sequence
  Description of Artificial Sequence: Synthetic oligonucleotide
cacugucugugccgguggc

SEQ ID NO: 13552 - RNA, 19 nt, Artificial Sequence
  Description of Artificial Sequence: Synthetic oligonucleotide
cugugcccgcugcaagggg

SEQ ID NO: 13553 - RNA, 19 nt, Artificial Sequence
  Description of Artificial Sequence: Synthetic oligonucleotide
gccacugcccacugacugc

SEQ ID NO: 13554 - RNA, 19 nt, Artificial Sequence
  Description of Artificial Sequence: Synthetic oligonucleotide
cugccaugagcagugugcu

SEQ ID NO: 13555 - RNA, 19 nt, Artificial Sequence
  Description of Artificial Sequence: Synthetic oligonucleotide
ugccggcugcacgggcccc

SEQ ID NO: 13556 - RNA, 19 nt, Artificial Sequence
  Description of Artificial Sequence: Synthetic oligonucleotide
caagcacucugacugccug

SEQ ID NO: 13557 - RNA, 19 nt, Artificial Sequence
  Description of Artificial Sequence: Synthetic oligonucleotide
ggccugccuccacuucaac

SEQ ID NO: 13558 - RNA, 19 nt, Artificial Sequence
  Description of Artificial Sequence: Synthetic oligonucleotide
ccacaguggcaucugugag

SEQ ID NO: 13559 - RNA, 19 nt, Artificial Sequence
  Description of Artificial Sequence: Synthetic oligonucleotide
gcugcacugcccagcccug

SEQ ID NO: 13560 - RNA, 19 nt, Artificial Sequence
  Description of Artificial Sequence: Synthetic oligonucleotide
ggucaccuacaacacagac

SEQ ID NO: 13561 - RNA, 19 nt, Artificial Sequence
  Description of Artificial Sequence: Synthetic oligonucleotide
cacguuugaguccaugccc

SEQ ID NO: 13562 - RNA, 19 nt, Artificial Sequence
  Description of Artificial Sequence: Synthetic oligonucleotide
caaucccgagggccgguau

SEQ ID NO: 13563 - RNA, 19 nt, Artificial Sequence
  Description of Artificial Sequence: Synthetic oligonucleotide
uacauucggcgccagcugu

SEQ ID NO: 13564 - RNA, 19 nt, Artificial Sequence
  Description of Artificial Sequence: Synthetic oligonucleotide
ugugacugccugucccuac

SEQ ID NO: 13565 - RNA, 19 nt, Artificial Sequence
  Description of Artificial Sequence: Synthetic oligonucleotide
caacuaccuuucuacggac

SEQ ID NO: 13566 - RNA, 19 nt, Artificial Sequence
  Description of Artificial Sequence: Synthetic oligonucleotide
cgugggauccugcacccuc

SEQ ID NO: 13567 - RNA, 19 nt, Artificial Sequence
  Description of Artificial Sequence: Synthetic oligonucleotide
cgucugcccccugcacaac

SEQ ID NO: 13568 - RNA, 19 nt, Artificial Sequence
  Description of Artificial Sequence: Synthetic oligonucleotide
ccaagaggugacagcagag

SEQ ID NO: 13569 - RNA, 19 nt, Artificial Sequence
  Description of Artificial Sequence: Synthetic oligonucleotide
ggauggaacacagcggugu

SEQ ID NO: 13570 - RNA, 19 nt, Artificial Sequence
  Description of Artificial Sequence: Synthetic oligonucleotide
ugagaagugcagcaagccc

SEQ ID NO: 13571 - RNA, 19 nt, Artificial Sequence
  Description of Artificial Sequence: Synthetic oligonucleotide
cugugcccgagugugcuau

SEQ ID NO: 13572 - RNA, 19 nt, Artificial Sequence
  Description of Artificial Sequence: Synthetic oligonucleotide
uggucugggcauggagcac

SEQ ID NO: 13573 - RNA, 19 nt, Artificial Sequence
  Description of Artificial Sequence: Synthetic oligonucleotide
cuugcgagaggugagggca

SEQ ID NO: 13574 - RNA, 19 nt, Artificial Sequence
  Description of Artificial Sequence: Synthetic oligonucleotide
aguuaccagugccaauauc

SEQ ID NO: 13575 - RNA, 19 nt, Artificial Sequence
  Description of Artificial Sequence: Synthetic oligonucleotide
ccaggaguuugcuggcugc

SEQ ID NO: 13576 - RNA, 19 nt, Artificial Sequence
  Description of Artificial Sequence: Synthetic oligonucleotide
caagaagaucuuugggagc

SEQ ID NO: 13577 - RNA, 19 nt, Artificial Sequence
  Description of Artificial Sequence: Synthetic oligonucleotide
ccuggcauuucugccggag

SEQ ID NO: 13578 - RNA, 19 nt, Artificial Sequence
  Description of Artificial Sequence: Synthetic oligonucleotide
gagcuuugauggggaccca

SEQ ID NO: 13579 - RNA, 19 nt, Artificial Sequence
  Description of Artificial Sequence: Synthetic oligonucleotide
agccuccaacacugccccg

SEQ ID NO: 13580 - RNA, 19 nt, Artificial Sequence
  Description of Artificial Sequence: Synthetic oligonucleotide
gcuccagccagagcagcuc

SEQ ID NO: 13581 - RNA, 19 nt, Artificial Sequence
  Description of Artificial Sequence: Synthetic oligonucleotide
ccaaguguuugagacucug

SEQ ID NO: 13582 - RNA, 19 nt, Artificial Sequence
  Description of Artificial Sequence: Synthetic oligonucleotide
ggaagagaucacagguuac

SEQ ID NO: 13583 - RNA, 19 nt, Artificial Sequence
  Description of Artificial Sequence: Synthetic oligonucleotide
ccuauacaucucagcaugg

SEQ ID NO: 13584 - RNA, 19 nt, Artificial Sequence
  Description of Artificial Sequence: Synthetic oligonucleotide
gccggacagccugccugac

SEQ ID NO: 13585 - RNA, 19 nt, Artificial Sequence
  Description of Artificial Sequence: Synthetic oligonucleotide
ccucagcgucuuccagaac

SEQ ID NO: 13586 - RNA, 19 nt, Artificial Sequence
  Description of Artificial Sequence: Synthetic oligonucleotide
ccugcaaguaauccgggga

SEQ ID NO: 13587 - RNA, 19 nt, Artificial Sequence
  Description of Artificial Sequence: Synthetic oligonucleotide
acgaauucugcacaauggc

SEQ ID NO: 13588 - RNA, 19 nt, Artificial Sequence
  Description of Artificial Sequence: Synthetic oligonucleotide
cgccuacucgcugacccug

SEQ ID NO: 13589 - RNA, 19 nt, Artificial Sequence
  Description of Artificial Sequence: Synthetic oligonucleotide
gcaagggcugggcaucagc

SEQ ID NO: 13590 - RNA, 19 nt, Artificial Sequence
  Description of Artificial Sequence: Synthetic oligonucleotide
cuggcuggggcugcgcuca

SEQ ID NO: 13591 - RNA, 19 nt, Artificial Sequence
  Description of Artificial Sequence: Synthetic oligonucleotide
acugagggaacugggcagu

SEQ ID NO: 13592 - RNA, 19 nt, Artificial Sequence
  Description of Artificial Sequence: Synthetic oligonucleotide
uggacuggcccucauccac

SEQ ID NO: 13593 - RNA, 19 nt, Artificial Sequence
  Description of Artificial Sequence: Synthetic oligonucleotide
ccauaacacccaccucugc

SEQ ID NO: 13594 - RNA, 19 nt, Artificial Sequence
  Description of Artificial Sequence: Synthetic oligonucleotide
cuucgugcacacggugccc

SEQ ID NO: 13595 - RNA, 19 nt, Artificial Sequence
  Description of Artificial Sequence: Synthetic oligonucleotide
cugggaccagcucuuucgg

SEQ ID NO: 13596 - RNA, 19 nt, Artificial Sequence
  Description of Artificial Sequence: Synthetic oligonucleotide
gaacccgcaccaagcucug

SEQ ID NO: 13597 - RNA, 19 nt, Artificial Sequence
  Description of Artificial Sequence: Synthetic oligonucleotide
gcuccacacugccaaccgg

SEQ ID NO: 13598 - RNA, 19 nt, Artificial Sequence
  Description of Artificial Sequence: Synthetic oligonucleotide
gccagaggacgagugugug

SEQ ID NO: 13599 - RNA, 19 nt, Artificial Sequence
  Description of Artificial Sequence: Synthetic oligonucleotide
gggcgagggccuggccugc

SEQ ID NO: 13600 - RNA, 19 nt, Artificial Sequence
  Description of Artificial Sequence: Synthetic oligonucleotide
ccaccagcugugcgcccga

SEQ ID NO: 13601 - RNA, 19 nt, Artificial Sequence
  Description of Artificial Sequence: Synthetic oligonucleotide
agggcacugcuggggucca

SEQ ID NO: 13602 - RNA, 19 nt, Artificial Sequence
  Description of Artificial Sequence: Synthetic oligonucleotide
agggcccacccaguguguc

SEQ ID NO: 13603 - RNA, 19 nt, Artificial Sequence
  Description of Artificial Sequence: Synthetic oligonucleotide
caacugcagccaguuccuu

SEQ ID NO: 13604 - RNA, 19 nt, Artificial Sequence
  Description of Artificial Sequence: Synthetic oligonucleotide
ucggggccaggagugcgug

SEQ ID NO: 13605 - RNA, 19 nt, Artificial Sequence
  Description of Artificial Sequence: Synthetic oligonucleotide
ggaggaaugccgaguacug

SEQ ID NO: 13606 - RNA, 19 nt, Artificial Sequence
  Description of Artificial Sequence: Synthetic oligonucleotide
gcaggggcuccccagggag

SEQ ID NO: 13607 - RNA, 19 nt, Artificial Sequence
  Description of Artificial Sequence: Synthetic oligonucleotide
guaugugaaugccaggcac

SEQ ID NO: 13608 - RNA, 19 nt, Artificial Sequence
  Description of Artificial Sequence: Synthetic oligonucleotide
cuguuugccgugccacccu

SEQ ID NO: 13609 - RNA, 19 nt, Artificial Sequence
  Description of Artificial Sequence: Synthetic oligonucleotide
ugagugucagccccagaau

SEQ ID NO: 13610 - RNA, 19 nt, Artificial Sequence
  Description of Artificial Sequence: Synthetic oligonucleotide
uggcucagugaccuguuuu

SEQ ID NO: 13611 - RNA, 19 nt, Artificial Sequence
  Description of Artificial Sequence: Synthetic oligonucleotide
uggaccggaggcugaccag

SEQ ID NO: 13612 - RNA, 19 nt, Artificial Sequence
  Description of Artificial Sequence: Synthetic oligonucleotide
guguguggccugugcccac

SEQ ID NO: 13613 - RNA, 19 nt, Artificial Sequence
  Description of Artificial Sequence: Synthetic oligonucleotide
cuauaaggacccucccuuc

SEQ ID NO: 13614 - RNA, 19 nt, Artificial Sequence
  Description of Artificial Sequence: Synthetic oligonucleotide
cugcguggcccgcugcccc

SEQ ID NO: 13615 - RNA, 19 nt, Artificial Sequence
  Description of Artificial Sequence: Synthetic oligonucleotide
cagcggugugaaaccugac

SEQ ID NO: 13616 - RNA, 19 nt, Artificial Sequence
  Description of Artificial Sequence: Synthetic oligonucleotide
ccucuccuacaugcccauc

SEQ ID NO: 13617 - RNA, 19 nt, Artificial Sequence
  Description of Artificial Sequence: Synthetic oligonucleotide
cuggaaguuuccagaugag

SEQ ID NO: 13618 - RNA, 19 nt, Artificial Sequence
  Description of Artificial Sequence: Synthetic oligonucleotide
ggagggcgcaugccagccu

SEQ ID NO: 13619 - RNA, 19 nt, Artificial Sequence
  Description of Artificial Sequence: Synthetic oligonucleotide
uugccccaucaacugcacc

SEQ ID NO: 13620 - RNA, 19 nt, Artificial Sequence
  Description of Artificial Sequence: Synthetic oligonucleotide
ccacuccuguguggaccug

SEQ ID NO: 13621 - RNA, 19 nt, Artificial Sequence
  Description of Artificial Sequence: Synthetic oligonucleotide
ggaugacaagggcugcccc

SEQ ID NO: 13622 - RNA, 19 nt, Artificial Sequence
  Description of Artificial Sequence: Synthetic oligonucleotide
cgccgagcagagagccagc

SEQ ID NO: 13623 - RNA, 19 nt, Artificial Sequence
  Description of Artificial Sequence: Synthetic oligonucleotide
cccucugacguccaucauc

SEQ ID NO: 13624 - RNA, 19 nt, Artificial Sequence
  Description of Artificial Sequence: Synthetic oligonucleotide
cucugcggugguuggcauu

SEQ ID NO: 13625 - RNA, 19 nt, Artificial Sequence
  Description of Artificial Sequence: Synthetic oligonucleotide
ucugcuggucguggucuug

SEQ ID NO: 13626 - RNA, 19 nt, Artificial Sequence
  Description of Artificial Sequence: Synthetic oligonucleotide
ggggguggucuuugggauc

SEQ ID NO: 13627 - RNA, 19 nt, Artificial Sequence
  Description of Artificial Sequence: Synthetic oligonucleotide
ccucaucaagcgacggcag

SEQ ID NO: 13628 - RNA, 19 nt, Artificial Sequence
  Description of Artificial Sequence: Synthetic oligonucleotide
gcagaagauccggaaguac

SEQ ID NO: 13629 - RNA, 19 nt, Artificial Sequence
  Description of Artificial Sequence: Synthetic oligonucleotide
cacgaugcggagacugcug

SEQ ID NO: 13630 - RNA, 19 nt, Artificial Sequence
  Description of Artificial Sequence: Synthetic oligonucleotide
gcaggaaacggagcuggug

SEQ ID NO: 13631 - RNA, 19 nt, Artificial Sequence
  Description of Artificial Sequence: Synthetic oligonucleotide
ggagccgcugacaccuagc

SEQ ID NO: 13632 - RNA, 19 nt, Artificial Sequence
  Description of Artificial Sequence: Synthetic oligonucleotide
cggagcgaugcccaaccag

SEQ ID NO: 13633 - RNA, 19 nt, Artificial Sequence
  Description of Artificial Sequence: Synthetic oligonucleotide
ggcgcagaugcggauccug

SEQ ID NO: 13634 - RNA, 19 nt, Artificial Sequence
  Description of Artificial Sequence: Synthetic oligonucleotide
gaaagagacggagcugagg

SEQ ID NO: 13635 - RNA, 19 nt, Artificial Sequence
  Description of Artificial Sequence: Synthetic oligonucleotide
gaaggugaaggugcuugga

SEQ ID NO: 13636 - RNA, 19 nt, Artificial Sequence
  Description of Artificial Sequence: Synthetic oligonucleotide
aucuggcgcuuuuggcaca

SEQ ID NO: 13637 - RNA, 19 nt, Artificial Sequence
  Description of Artificial Sequence: Synthetic oligonucleotide
agucuacaagggcaucugg

SEQ ID NO: 13638 - RNA, 19 nt, Artificial Sequence
  Description of Artificial Sequence: Synthetic oligonucleotide
gaucccugauggggagaau

SEQ ID NO: 13639 - RNA, 19 nt, Artificial Sequence
  Description of Artificial Sequence: Synthetic oligonucleotide
ugugaaaauuccaguggcc

SEQ ID NO: 13640 - RNA, 19 nt, Artificial Sequence
  Description of Artificial Sequence: Synthetic oligonucleotide
caucaaaguguugagggaa

SEQ ID NO: 13641 - RNA, 19 nt, Artificial Sequence
  Description of Artificial Sequence: Synthetic oligonucleotide
aaacacaucccccaaagcc

SEQ ID NO: 13642 - RNA, 19 nt, Artificial Sequence
  Description of Artificial Sequence: Synthetic oligonucleotide
caacaaagaaaucuuagac

SEQ ID NO: 13643 - RNA, 19 nt, Artificial Sequence
  Description of Artificial Sequence: Synthetic oligonucleotide
cgaagcauacgugauggcu

SEQ ID NO: 13644 - RNA, 19 nt, Artificial Sequence
  Description of Artificial Sequence: Synthetic oligonucleotide
uggugugggcuccccauau

SEQ ID NO: 13645 - RNA, 19 nt, Artificial Sequence
  Description of Artificial Sequence: Synthetic oligonucleotide
ugucucccgccuucugggc

SEQ ID NO: 13646 - RNA, 19 nt, Artificial Sequence
  Description of Artificial Sequence: Synthetic oligonucleotide
caucugccugacauccacg

SEQ ID NO: 13647 - RNA, 19 nt, Artificial Sequence
  Description of Artificial Sequence: Synthetic oligonucleotide
ggugcagcuggugacacag

SEQ ID NO: 13648 - RNA, 19 nt, Artificial Sequence
  Description of Artificial Sequence: Synthetic oligonucleotide
gcuuaugcccuauggcugc

SEQ ID NO: 13649 - RNA, 19 nt, Artificial Sequence
  Description of Artificial Sequence: Synthetic oligonucleotide
ccucuuagaccauguccgg

SEQ ID NO: 13650 - RNA, 19 nt, Artificial Sequence
  Description of Artificial Sequence: Synthetic oligonucleotide
ggaaaaccgcggacgccug

SEQ ID NO: 13651 - RNA, 19 nt, Artificial Sequence
  Description of Artificial Sequence: Synthetic oligonucleotide
gggcucccaggaccugcug

SEQ ID NO: 13652 - RNA, 19 nt, Artificial Sequence
  Description of Artificial Sequence: Synthetic oligonucleotide
gaacugguguaugcagauu

SEQ ID NO: 13653 - RNA, 19 nt, Artificial Sequence
  Description of Artificial Sequence: Synthetic oligonucleotide
ugccaaggggaugagcuac

SEQ ID NO: 13654 - RNA, 19 nt, Artificial Sequence
  Description of Artificial Sequence: Synthetic oligonucleotide
ccuggaggaugugcggcuc

SEQ ID NO: 13655 - RNA, 19 nt, Artificial Sequence
  Description of Artificial Sequence: Synthetic oligonucleotide
cguacacagggacuuggcc

SEQ ID NO: 13656 - RNA, 19 nt, Artificial Sequence
  Description of Artificial Sequence: Synthetic oligonucleotide
cgcucggaacgugcugguc

SEQ ID NO: 13657 - RNA, 19 nt, Artificial Sequence
  Description of Artificial Sequence: Synthetic oligonucleotide
caagagucccaaccauguc

SEQ ID NO: 13658 - RNA, 19 nt, Artificial Sequence
  Description of Artificial Sequence: Synthetic oligonucleotide
caaaauuacagacuucggg

SEQ ID NO: 13659 - RNA, 19 nt, Artificial Sequence
  Description of Artificial Sequence: Synthetic oligonucleotide
gcuggcucggcugcuggac

SEQ ID NO: 13660 - RNA, 19 nt, Artificial Sequence
  Description of Artificial Sequence: Synthetic oligonucleotide
cauugacgagacagaguac

SEQ ID NO: 13661 - RNA, 19 nt, Artificial Sequence
  Description of Artificial Sequence: Synthetic oligonucleotide
ccaugcagaugggggcaag

SEQ ID NO: 13662 - RNA, 19 nt, Artificial Sequence
  Description of Artificial Sequence: Synthetic oligonucleotide
ggugcccaucaaguggaug

SEQ ID NO: 13663 - RNA, 19 nt, Artificial Sequence
  Description of Artificial Sequence: Synthetic oligonucleotide
ggcgcuggaguccauucuc

SEQ ID NO: 13664 - RNA, 19 nt, Artificial Sequence
  Description of Artificial Sequence: Synthetic oligonucleotide
ccgccggcgguucacccac

SEQ ID NO: 13665 - RNA, 19 nt, Artificial Sequence
  Description of Artificial Sequence: Synthetic oligonucleotide
ccagagugauguguggagu

SEQ ID NO: 13666 - RNA, 19 nt, Artificial Sequence
  Description of Artificial Sequence: Synthetic oligonucleotide
uuauggugugacugugugg

SEQ ID NO: 13667 - RNA, 19 nt, Artificial Sequence
  Description of Artificial Sequence: Synthetic oligonucleotide
ggagcugaugacuuuuggg

SEQ ID NO: 13668 - RNA, 19 nt, Artificial Sequence
  Description of Artificial Sequence: Synthetic oligonucleotide
ggccaaaccuuacgauggg

SEQ ID NO: 13669 - RNA, 19 nt, Artificial Sequence
  Description of Artificial Sequence: Synthetic oligonucleotide
gaucccagcccgggagauc

SEQ ID NO: 13670 - RNA, 19 nt, Artificial Sequence
  Description of Artificial Sequence: Synthetic oligonucleotide
cccugaccugcuggaaaag

SEQ ID NO: 13671 - RNA, 19 nt, Artificial Sequence
  Description of Artificial Sequence: Synthetic oligonucleotide
gggggagcggcugccccag

SEQ ID NO: 13672 - RNA, 19 nt, Artificial Sequence
  Description of Artificial Sequence: Synthetic oligonucleotide
gccccccaucugcaccauu

SEQ ID NO: 13673 - RNA, 19 nt, Artificial Sequence
  Description of Artificial Sequence: Synthetic oligonucleotide
ugaugucuacaugaucaug

SEQ ID NO: 13674 - RNA, 19 nt, Artificial Sequence
  Description of Artificial Sequence: Synthetic oligonucleotide
ggucaaauguuggaugauu

SEQ ID NO: 13675 - RNA, 19 nt, Artificial Sequence
  Description of Artificial Sequence: Synthetic oligonucleotide
ugacucugaaugucggcca

SEQ ID NO: 13676 - RNA, 19 nt, Artificial Sequence
  Description of Artificial Sequence: Synthetic oligonucleotide
aagauuccgggaguuggug

SEQ ID NO: 13677 - RNA, 19 nt, Artificial Sequence
  Description of Artificial Sequence: Synthetic oligonucleotide
gucugaauucucccgcaug

SEQ ID NO: 13678 - RNA, 19 nt, Artificial Sequence
  Description of Artificial Sequence: Synthetic oligonucleotide
ggccagggacccccagcgc

SEQ ID NO: 13679 - RNA, 19 nt, Artificial Sequence
  Description of Artificial Sequence: Synthetic oligonucleotide
cuuuguggucauccagaau

SEQ ID NO: 13680 - RNA, 19 nt, Artificial Sequence
  Description of Artificial Sequence: Synthetic oligonucleotide
ugaggacuugggcccagcc

SEQ ID NO: 13681 - RNA, 19 nt, Artificial Sequence
  Description of Artificial Sequence: Synthetic oligonucleotide
cagucccuuggacagcacc

SEQ ID NO: 13682 - RNA, 19 nt, Artificial Sequence
  Description of Artificial Sequence: Synthetic oligonucleotide
cuucuaccgcucacugcug

SEQ ID NO: 13683 - RNA, 19 nt, Artificial Sequence
  Description of Artificial Sequence: Synthetic oligonucleotide
ggaggacgaugacaugggg

SEQ ID NO: 13684 - RNA, 19 nt, Artificial Sequence
  Description of Artificial Sequence: Synthetic oligonucleotide
ggaccugguggaugcugag

SEQ ID NO: 13685 - RNA, 19 nt, Artificial Sequence
  Description of Artificial Sequence: Synthetic oligonucleotide
ggaguaucugguaccccag

SEQ ID NO: 13686 - RNA, 19 nt, Artificial Sequence
  Description of Artificial Sequence: Synthetic oligonucleotide
gcagggcuucuucugucca

SEQ ID NO: 13687 - RNA, 19 nt, Artificial Sequence
  Description of Artificial Sequence: Synthetic oligonucleotide
agacccugccccgggcgcu

SEQ ID NO: 13688 - RNA, 19 nt, Artificial Sequence
  Description of Artificial Sequence: Synthetic oligonucleotide
ugggggcaugguccaccac

SEQ ID NO: 13689 - RNA, 19 nt, Artificial Sequence
  Description of Artificial Sequence: Synthetic oligonucleotide
caggcaccgcagcucaucu

SEQ ID NO: 13690 - RNA, 19 nt, Artificial Sequence
  Description of Artificial Sequence: Synthetic oligonucleotide
uaccaggaguggcgguggg

SEQ ID NO: 13691 - RNA, 19 nt, Artificial Sequence
  Description of Artificial Sequence: Synthetic oligonucleotide
ggaccugacacuagggcug

SEQ ID NO: 13692 - RNA, 19 nt, Artificial Sequence
  Description of Artificial Sequence: Synthetic oligonucleotide
ggagcccucugaagaggag

SEQ ID NO: 13693 - RNA, 19 nt, Artificial Sequence
  Description of Artificial Sequence: Synthetic oligonucleotide
ggcccccaggucuccacug

SEQ ID NO: 13694 - RNA, 19 nt, Artificial Sequence
  Description of Artificial Sequence: Synthetic oligonucleotide
ggcacccuccgaaggggcu

SEQ ID NO: 13695 - RNA, 19 nt, Artificial Sequence
  Description of Artificial Sequence: Synthetic oligonucleotide
uggcuccgauguauuugau

SEQ ID NO: 13696 - RNA, 19 nt, Artificial Sequence
  Description of Artificial Sequence: Synthetic oligonucleotide
uggugaccugggaaugggg

SEQ ID NO: 13697 - RNA, 19 nt, Artificial Sequence
  Description of Artificial Sequence: Synthetic oligonucleotide
ggcagccaaggggcugcaa

SEQ ID NO: 13698 - RNA, 19 nt, Artificial Sequence
  Description of Artificial Sequence: Synthetic oligonucleotide
aagccuccccacacaugac

SEQ ID NO: 13699 - RNA, 19 nt, Artificial Sequence
  Description of Artificial Sequence: Synthetic oligonucleotide
ccccagcccucuacagcgg

SEQ ID NO: 13700 - RNA, 19 nt, Artificial Sequence
  Description of Artificial Sequence: Synthetic oligonucleotide
guacagugaggaccccaca

SEQ ID NO: 13701 - RNA, 19 nt, Artificial Sequence
  Description of Artificial Sequence: Synthetic oligonucleotide
aguaccccugcccucugag

SEQ ID NO: 13702 - RNA, 19 nt, Artificial Sequence
  Description of Artificial Sequence: Synthetic oligonucleotide
gacugauggcuacguugcc

SEQ ID NO: 13703 - RNA, 19 nt, Artificial Sequence
  Description of Artificial Sequence: Synthetic oligonucleotide
cccccugaccugcagcccc

SEQ ID NO: 13704 - RNA, 19 nt, Artificial Sequence
  Description of Artificial Sequence: Synthetic oligonucleotide
ccagccugaauaugugaac

SEQ ID NO: 13705 - RNA, 19 nt, Artificial Sequence
  Description of Artificial Sequence: Synthetic oligonucleotide
ccagccagauguucggccc

SEQ ID NO: 13706 - RNA, 19 nt, Artificial Sequence
  Description of Artificial Sequence: Synthetic oligonucleotide
ccagcccccuucgccccga

SEQ ID NO: 13707 - RNA, 19 nt, Artificial Sequence
  Description of Artificial Sequence: Synthetic oligonucleotide
agagggcccucugccugcu

SEQ ID NO: 13708 - RNA, 19 nt, Artificial Sequence
  Description of Artificial Sequence: Synthetic oligonucleotide
ugcccgaccugcuggugcc

SEQ ID NO: 13709 - RNA, 19 nt, Artificial Sequence
  Description of Artificial Sequence: Synthetic oligonucleotide
cacucuggaaaggcccaag

SEQ ID NO: 13710 - RNA, 19 nt, Artificial Sequence
  Description of Artificial Sequence: Synthetic oligonucleotide
gacucucuccccagggaag

SEQ ID NO: 13711 - RNA, 19 nt, Artificial Sequence
  Description of Artificial Sequence: Synthetic oligonucleotide
gaauggggucgucaaagac

SEQ ID NO: 13712 - RNA, 19 nt, Artificial Sequence
  Description of Artificial Sequence: Synthetic oligonucleotide
cguuuuugccuuugggggu

SEQ ID NO: 13713 - RNA, 19 nt, Artificial Sequence
  Description of Artificial Sequence: Synthetic oligonucleotide
ugccguggagaaccccgag

SEQ ID NO: 13714 - RNA, 19 nt, Artificial Sequence
  Description of Artificial Sequence: Synthetic oligonucleotide
guacuugacaccccaggga

SEQ ID NO: 13715 - RNA, 19 nt, Artificial Sequence
  Description of Artificial Sequence: Synthetic oligonucleotide
aggagcugccccucagccc

SEQ ID NO: 13716 - RNA, 19 nt, Artificial Sequence
  Description of Artificial Sequence: Synthetic oligonucleotide
ccacccuccuccugccuuc

SEQ ID NO: 13717 - RNA, 19 nt, Artificial Sequence
  Description of Artificial Sequence: Synthetic oligonucleotide
cagcccagccuucgacaac

SEQ ID NO: 13718 - RNA, 19 nt, Artificial Sequence
  Description of Artificial Sequence: Synthetic oligonucleotide
ccucuauuacugggaccag

SEQ ID NO: 13719 - RNA, 19 nt, Artificial Sequence
  Description of Artificial Sequence: Synthetic oligonucleotide
ggacccaccagagcggggg

SEQ ID NO: 13720 - RNA, 19 nt, Artificial Sequence
  Description of Artificial Sequence: Synthetic oligonucleotide
ggcuccacccagcaccuuc

SEQ ID NO: 13721 - RNA, 19 nt, Artificial Sequence
  Description of Artificial Sequence: Synthetic oligonucleotide
caaagggacaccuacggca

SEQ ID NO: 13722 - RNA, 19 nt, Artificial Sequence
  Description of Artificial Sequence: Synthetic oligonucleotide
agagaacccagaguaccug

SEQ ID NO: 13723 - RNA, 19 nt, Artificial Sequence
  Description of Artificial Sequence: Synthetic oligonucleotide
gggucuggacgugccagug

SEQ ID NO: 13724 - RNA, 19 nt, Artificial Sequence
  Description of Artificial Sequence: Synthetic oligonucleotide
gugaaccagaaggccaagu

SEQ ID NO: 13725 - RNA, 19 nt, Artificial Sequence
  Description of Artificial Sequence: Synthetic oligonucleotide
uccgcagaagcccugaugu

SEQ ID NO: 13726 - RNA, 19 nt, Artificial Sequence
  Description of Artificial Sequence: Synthetic oligonucleotide
uguccucagggagcaggga

SEQ ID NO: 13727 - RNA, 19 nt, Artificial Sequence
  Description of Artificial Sequence: Synthetic oligonucleotide
aaggccugacuucugcugg

SEQ ID NO: 13728 - RNA, 19 nt, Artificial Sequence
  Description of Artificial Sequence: Synthetic oligonucleotide
gcaucaagaggugggaggg

SEQ ID NO: 13729 - RNA, 19 nt, Artificial Sequence
  Description of Artificial Sequence: Synthetic oligonucleotide
gcccuccgaccacuuccag

SEQ ID NO: 13730 - RNA, 19 nt, Artificial Sequence
  Description of Artificial Sequence: Synthetic oligonucleotide
ggggaaccugccaugccag

SEQ ID NO: 13731 - RNA, 19 nt, Artificial Sequence
  Description of Artificial Sequence: Synthetic oligonucleotide
ggaaccuguccuaaggaac

SEQ ID NO: 13732 - RNA, 19 nt, Artificial Sequence
  Description of Artificial Sequence: Synthetic oligonucleotide
ccuuccuuccugcuugagu

SEQ ID NO: 13733 - RNA, 19 nt, Artificial Sequence
  Description of Artificial Sequence: Synthetic oligonucleotide
uucccagauggcuggaagg

SEQ ID NO: 13734 - RNA, 19 nt, Artificial Sequence
  Description of Artificial Sequence: Synthetic oligonucleotide
ggguccagccucguuggaa

SEQ ID NO: 13735 - RNA, 19 nt, Artificial Sequence
  Description of Artificial Sequence: Synthetic oligonucleotide
agaggaacagcacugggga

SEQ ID NO: 13736 - RNA, 19 nt, Artificial Sequence
  Description of Artificial Sequence: Synthetic oligonucleotide
agucuuuguggauucugag

SEQ ID NO: 13737 - RNA, 19 nt, Artificial Sequence
  Description of Artificial Sequence: Synthetic oligonucleotide
ggcccugcccaaugagacu

SEQ ID NO: 13738 - RNA, 19 nt, Artificial Sequence
  Description of Artificial Sequence: Synthetic oligonucleotide
ucuaggguccaguggaugc

SEQ ID NO: 13739 - RNA, 19 nt, Artificial Sequence
  Description of Artificial Sequence: Synthetic oligonucleotide
ccacagcccagcuuggccc

SEQ ID NO: 13740 - RNA, 19 nt, Artificial Sequence
  Description of Artificial Sequence: Synthetic oligonucleotide
cuuuccuuccagauccugg

SEQ ID NO: 13741 - RNA, 19 nt, Artificial Sequence
  Description of Artificial Sequence: Synthetic oligonucleotide
gguacugaaagccuuaggg

SEQ ID NO: 13742 - RNA, 19 nt, Artificial Sequence
  Description of Artificial Sequence: Synthetic oligonucleotide
gaagcuggccugagagggg

SEQ ID NO: 13743 - RNA, 19 nt, Artificial Sequence
  Description of Artificial Sequence: Synthetic oligonucleotide
gaagcggcccuaagggagu

SEQ ID NO: 13744 - RNA, 19 nt, Artificial Sequence
  Description of Artificial Sequence: Synthetic oligonucleotide
ugucuaagaacaaaagcga

SEQ ID NO: 13745 - RNA, 19 nt, Artificial Sequence
  Description of Artificial Sequence: Synthetic oligonucleotide
acccauucagagacugucc

SEQ ID NO: 13746 - RNA, 19 nt, Artificial Sequence
  Description of Artificial Sequence: Synthetic oligonucleotide
ccugaaaccuaguacugcc

SEQ ID NO: 13747 - RNA, 19 nt, Artificial Sequence
  Description of Artificial Sequence: Synthetic oligonucleotide
cccccaugaggaaggaaca

SEQ ID NO: 13748 - RNA, 19 nt, Artificial Sequence
  Description of Artificial Sequence: Synthetic oligonucleotide
agcaauggugucaguaucc

SEQ ID NO: 13749 - RNA, 19 nt, Artificial Sequence
  Description of Artificial Sequence: Synthetic oligonucleotide
caggcuuuguacagagugc

SEQ ID NO: 13750 - RNA, 19 nt, Artificial Sequence
  Description of Artificial Sequence: Synthetic oligonucleotide
cuuuucuguuuaguuuuua

SEQ ID NO: 13751 - RNA, 19 nt, Artificial Sequence
  Description of Artificial Sequence: Synthetic oligonucleotide
acuuuuuuuguuuuguuuu

SEQ ID NO: 13752 - RNA, 19 nt, Artificial Sequence
  Description of Artificial Sequence: Synthetic oligonucleotide
uuuuaaagaugaaauaaag

SEQ ID NO: 13753 - RNA, 19 nt, Artificial Sequence
  Description of Artificial Sequence: Synthetic oligonucleotide
gacccagggggagaauggg

SEQ ID NO: 13754 - RNA, 19 nt, Artificial Sequence
  Description of Artificial Sequence: Synthetic oligonucleotide
guguuguauggggaggcaa

SEQ ID NO: 13755 - RNA, 19 nt, Artificial Sequence
  Description of Artificial Sequence: Synthetic oligonucleotide
agugugggggguccuucuc

SEQ ID NO: 13756 - RNA, 19 nt, Artificial Sequence
  Description of Artificial Sequence: Synthetic oligonucleotide
ccacacccacuuuguccau

SEQ ID NO: 13757 - RNA, 19 nt, Artificial Sequence
  Description of Artificial Sequence: Synthetic oligonucleotide
uuugcaaauauauuuugga

SEQ ID NO: 13758 - RNA, 19 nt, Artificial Sequence
  Description of Artificial Sequence: Synthetic oligonucleotide
auauuuuggaaaacagcua

SEQ ID NO: 13759 - RNA, 19 nt, Artificial Sequence
  Description of Artificial Sequence: Synthetic oligonucleotide
ggaggagguggaggaggag

SEQ ID NO: 13760 - RNA, 19 nt, Artificial Sequence
  Description of Artificial Sequence: Synthetic oligonucleotide
gggcugcuugaggaaguau

SEQ ID NO: 13761 - RNA, 19 nt, Artificial Sequence
  Description of Artificial Sequence: Synthetic oligonucleotide
uaagaaugaaguugugaag

SEQ ID NO: 13762 - RNA, 19 nt, Artificial Sequence
  Description of Artificial Sequence: Synthetic oligonucleotide
gcugagauuccccuccauu

SEQ ID NO: 13763 - RNA, 19 nt, Artificial Sequence
  Description of Artificial Sequence: Synthetic oligonucleotide
ugggaccggagaaaccagg

SEQ ID NO: 13764 - RNA, 19 nt, Artificial Sequence
  Description of Artificial Sequence: Synthetic oligonucleotide
gggagccccccgggcagcc

SEQ ID NO: 13765 - RNA, 19 nt, Artificial Sequence
  Description of Artificial Sequence: Synthetic oligonucleotide
cgcgcgccccuucccacgg

SEQ ID NO: 13766 - RNA, 19 nt, Artificial Sequence
  Description of Artificial Sequence: Synthetic oligonucleotide
gggcccuuuacugcgccgc

SEQ ID NO: 13767 - RNA, 19 nt, Artificial Sequence
  Description of Artificial Sequence: Synthetic oligonucleotide
cgcgcccggcccccacccc

SEQ ID NO: 13768 - RNA, 19 nt, Artificial Sequence
  Description of Artificial Sequence: Synthetic oligonucleotide
cucgcagcaccccgcgccc

SEQ ID NO: 13769 - RNA, 19 nt, Artificial Sequence
  Description of Artificial Sequence: Synthetic oligonucleotide
ccgcgcccucccagccggg

SEQ ID NO: 13770 - RNA, 19 nt, Artificial Sequence
  Description of Artificial Sequence: Synthetic oligonucleotide
guccagccggagccauggg

SEQ ID NO: 13771 - RNA, 19 nt, Artificial Sequence
  Description of Artificial Sequence: Synthetic oligonucleotide
ggccggagccgcagugagc

SEQ ID NO: 13772 - RNA, 19 nt, Artificial Sequence
  Description of Artificial Sequence: Synthetic oligonucleotide
caccauggagcuggcggcc

SEQ ID NO: 13773 - RNA, 19 nt, Artificial Sequence
  Description of Artificial Sequence: Synthetic oligonucleotide
cuugugccgcugggggcuc

SEQ ID NO: 13774 - RNA, 19 nt, Artificial Sequence
  Description of Artificial Sequence: Synthetic oligonucleotide
ccuccucgcccucuugccc

SEQ ID NO: 13775 - RNA, 19 nt, Artificial Sequence
  Description of Artificial Sequence: Synthetic oligonucleotide
ccccggagccgcgagcacc

SEQ ID NO: 13776 - RNA, 19 nt, Artificial Sequence
  Description of Artificial Sequence: Synthetic oligonucleotide
ccaagugugcaccggcaca

SEQ ID NO: 13777 - RNA, 19 nt, Artificial Sequence
  Description of Artificial Sequence: Synthetic oligonucleotide
agacaugaagcugcggcuc

SEQ ID NO: 13778 - RNA, 19 nt, Artificial Sequence
  Description of Artificial Sequence: Synthetic oligonucleotide
cccugccagucccgagacc

SEQ ID NO: 13779 - RNA, 19 nt, Artificial Sequence
  Description of Artificial Sequence: Synthetic oligonucleotide
ccaccuggacaugcuccgc

SEQ ID NO: 13780 - RNA, 19 nt, Artificial Sequence
  Description of Artificial Sequence: Synthetic oligonucleotide
ccaccucuaccagggcugc

SEQ ID NO: 13781 - RNA, 19 nt, Artificial Sequence
  Description of Artificial Sequence: Synthetic oligonucleotide
ccagguggugcagggaaac

SEQ ID NO: 13782 - RNA, 19 nt, Artificial Sequence
  Description of Artificial Sequence: Synthetic oligonucleotide
ccuggaacucaccuaccug

SEQ ID NO: 13783 - RNA, 19 nt, Artificial Sequence
  Description of Artificial Sequence: Synthetic oligonucleotide
gcccaccaaugccagccug

SEQ ID NO: 13784 - RNA, 19 nt, Artificial Sequence
  Description of Artificial Sequence: Synthetic oligonucleotide
guccuuccugcaggauauc

SEQ ID NO: 13785 - RNA, 19 nt, Artificial Sequence
  Description of Artificial Sequence: Synthetic oligonucleotide
ccaggaggugcagggcuac

SEQ ID NO: 13786 - RNA, 19 nt, Artificial Sequence
  Description of Artificial Sequence: Synthetic oligonucleotide
cgugcucaucgcucacaac

SEQ ID NO: 13787 - RNA, 19 nt, Artificial Sequence
  Description of Artificial Sequence: Synthetic oligonucleotide
ccaagugaggcagguccca

SEQ ID NO: 13788 - RNA, 19 nt, Artificial Sequence
  Description of Artificial Sequence: Synthetic oligonucleotide
acugcagaggcugcggauu

SEQ ID NO: 13789 - RNA, 19 nt, Artificial Sequence
  Description of Artificial Sequence: Synthetic oligonucleotide
ugugcgaggcacccagcuc

SEQ ID NO: 13790 - RNA, 19 nt, Artificial Sequence
  Description of Artificial Sequence: Synthetic oligonucleotide
cuuugaggacaacuaugcc

SEQ ID NO: 13791 - RNA, 19 nt, Artificial Sequence
  Description of Artificial Sequence: Synthetic oligonucleotide
ccuggccgugcuagacaau

SEQ ID NO: 13792 - RNA, 19 nt, Artificial Sequence
  Description of Artificial Sequence: Synthetic oligonucleotide
uggagacccgcugaacaau

SEQ ID NO: 13793 - RNA, 19 nt, Artificial Sequence
  Description of Artificial Sequence: Synthetic oligonucleotide
uaccaccccugucacaggg

SEQ ID NO: 13794 - RNA, 19 nt, Artificial Sequence
  Description of Artificial Sequence: Synthetic oligonucleotide
ggccuccccaggaggccug

SEQ ID NO: 13795 - RNA, 19 nt, Artificial Sequence
  Description of Artificial Sequence: Synthetic oligonucleotide
gcgggagcugcagcuucga

SEQ ID NO: 13796 - RNA, 19 nt, Artificial Sequence
  Description of Artificial Sequence: Synthetic oligonucleotide
aagccucacagagaucuug

SEQ ID NO: 13797 - RNA, 19 nt, Artificial Sequence
  Description of Artificial Sequence: Synthetic oligonucleotide
gaaaggaggggucuugauc

SEQ ID NO: 13798 - RNA, 19 nt, Artificial Sequence
  Description of Artificial Sequence: Synthetic oligonucleotide
ccagcggaacccccagcuc

SEQ ID NO: 13799 - RNA, 19 nt, Artificial Sequence
  Description of Artificial Sequence: Synthetic oligonucleotide
cugcuaccaggacacgauu

SEQ ID NO: 13800 - RNA, 19 nt, Artificial Sequence
  Description of Artificial Sequence: Synthetic oligonucleotide
uuuguggaaggacaucuuc

SEQ ID NO: 13801 - RNA, 19 nt, Artificial Sequence
  Description of Artificial Sequence: Synthetic oligonucleotide
ccacaagaacaaccagcug

SEQ ID NO: 13802 - RNA, 19 nt, Artificial Sequence
  Description of Artificial Sequence: Synthetic oligonucleotide
ggcucucacacugauagac

SEQ ID NO: 13803 - RNA, 19 nt, Artificial Sequence
  Description of Artificial Sequence: Synthetic oligonucleotide
caccaaccgcucucgggcc

SEQ ID NO: 13804 - RNA, 19 nt, Artificial Sequence
  Description of Artificial Sequence: Synthetic oligonucleotide
cugccaccccuguucuccg

SEQ ID NO: 13805 - RNA, 19 nt, Artificial Sequence
  Description of Artificial Sequence: Synthetic oligonucleotide
gauguguaagggcucccgc

SEQ ID NO: 13806 - RNA, 19 nt, Artificial Sequence
  Description of Artificial Sequence: Synthetic oligonucleotide
cugcuggggagagaguucu

SEQ ID NO: 13807 - RNA, 19 nt, Artificial Sequence
  Description of Artificial Sequence: Synthetic oligonucleotide
ugaggauugucagagccug

SEQ ID NO: 13808 - RNA, 19 nt, Artificial Sequence
  Description of Artificial Sequence: Synthetic oligonucleotide
gacgcgcacugucugugcc

SEQ ID NO: 13809 - RNA, 19 nt, Artificial Sequence
  Description of Artificial Sequence: Synthetic oligonucleotide
cgguggcugugcccgcugc

SEQ ID NO: 13810 - RNA, 19 nt, Artificial Sequence
  Description of Artificial Sequence: Synthetic oligonucleotide
caaggggccacugcccacu

SEQ ID NO: 13811 - RNA, 19 nt, Artificial Sequence
  Description of Artificial Sequence: Synthetic oligonucleotide
ugacugcugccaugagcag

SEQ ID NO: 13812 - RNA, 19 nt, Artificial Sequence
  Description of Artificial Sequence: Synthetic oligonucleotide
gugugcugccggcugcacg

SEQ ID NO: 13813 - RNA, 19 nt, Artificial Sequence
  Description of Artificial Sequence: Synthetic oligonucleotide
gggccccaagcacucugac

SEQ ID NO: 13814 - RNA, 19 nt, Artificial Sequence
  Description of Artificial Sequence: Synthetic oligonucleotide
cugccuggccugccuccac

SEQ ID NO: 13815 - RNA, 19 nt, Artificial Sequence
  Description of Artificial Sequence: Synthetic oligonucleotide
cuucaaccacaguggcauc

SEQ ID NO: 13816 - RNA, 19 nt, Artificial Sequence
  Description of Artificial Sequence: Synthetic oligonucleotide
cugugagcugcacugccca

SEQ ID NO: 13817 - RNA, 19 nt, Artificial Sequence
  Description of Artificial Sequence: Synthetic oligonucleotide
agcccuggucaccuacaac

SEQ ID NO: 13818 - RNA, 19 nt, Artificial Sequence
  Description of Artificial Sequence: Synthetic oligonucleotide
cacagacacguuugagucc

SEQ ID NO: 13819 - RNA, 19 nt, Artificial Sequence
  Description of Artificial Sequence: Synthetic oligonucleotide
caugcccaaucccgagggc

SEQ ID NO: 13820 - RNA, 19 nt, Artificial Sequence
  Description of Artificial Sequence: Synthetic oligonucleotide
ccgguauacauucggcgcc

SEQ ID NO: 13821 - RNA, 19 nt, Artificial Sequence
  Description of Artificial Sequence: Synthetic oligonucleotide
cagcugugugacugccugu

SEQ ID NO: 13822 - RNA, 19 nt, Artificial Sequence
  Description of Artificial Sequence: Synthetic oligonucleotide
ucccuacaacuaccuuucu

SEQ ID NO: 13823 - RNA, 19 nt, Artificial Sequence
  Description of Artificial Sequence: Synthetic oligonucleotide
uacggacgugggauccugc

SEQ ID NO: 13824 - RNA, 19 nt, Artificial Sequence
  Description of Artificial Sequence: Synthetic oligonucleotide
cacccucgucugcccccug

SEQ ID NO: 13825 - RNA, 19 nt, Artificial Sequence
  Description of Artificial Sequence: Synthetic oligonucleotide
gcacaaccaagaggugaca

SEQ ID NO: 13826 - RNA, 19 nt, Artificial Sequence
  Description of Artificial Sequence: Synthetic oligonucleotide
agcagaggauggaacacag

SEQ ID NO: 13827 - RNA, 19 nt, Artificial Sequence
  Description of Artificial Sequence: Synthetic oligonucleotide
gcggugugagaagugcagc

SEQ ID NO: 13828 - RNA, 19 nt, Artificial Sequence
  Description of Artificial Sequence: Synthetic oligonucleotide
caagcccugugcccgagug

SEQ ID NO: 13829 - RNA, 19 nt, Artificial Sequence
  Description of Artificial Sequence: Synthetic oligonucleotide
gugcuauggucugggcaug

SEQ ID NO: 13830 - RNA, 19 nt, Artificial Sequence
  Description of Artificial Sequence: Synthetic oligonucleotide
ggagcacuugcgagaggug

SEQ ID NO: 13831 - RNA, 19 nt, Artificial Sequence
  Description of Artificial Sequence: Synthetic oligonucleotide
gagggcaguuaccagugcc

SEQ ID NO: 13832 - RNA, 19 nt, Artificial Sequence
  Description of Artificial Sequence: Synthetic oligonucleotide
caauauccaggaguuugcu

SEQ ID NO: 13833 - RNA, 19 nt, Artificial Sequence
  Description of Artificial Sequence: Synthetic oligonucleotide
uggcugcaagaagaucuuu

SEQ ID NO: 13834 - RNA, 19 nt, Artificial Sequence
  Description of Artificial Sequence: Synthetic oligonucleotide
ugggagccuggcauuucug

SEQ ID NO: 13835 - RNA, 19 nt, Artificial Sequence
  Description of Artificial Sequence: Synthetic oligonucleotide
gccggagagcuuugauggg

SEQ ID NO: 13836 - RNA, 19 nt, Artificial Sequence
  Description of Artificial Sequence: Synthetic oligonucleotide
ggacccagccuccaacacu

SEQ ID NO: 13837 - RNA, 19 nt, Artificial Sequence
  Description of Artificial Sequence: Synthetic oligonucleotide
ugccccgcuccagccagag

SEQ ID NO: 13838 - RNA, 19 nt, Artificial Sequence
  Description of Artificial Sequence: Synthetic oligonucleotide
gcagcuccaaguguuugag

SEQ ID NO: 13839 - RNA, 19 nt, Artificial Sequence
  Description of Artificial Sequence: Synthetic oligonucleotide
gacucuggaagagaucaca

SEQ ID NO: 13840 - RNA, 19 nt, Artificial Sequence
  Description of Artificial Sequence: Synthetic oligonucleotide
agguuaccuauacaucuca

SEQ ID NO: 13841 - RNA, 19 nt, Artificial Sequence
  Description of Artificial Sequence: Synthetic oligonucleotide
agcauggccggacagccug

SEQ ID NO: 13842 - RNA, 19 nt, Artificial Sequence
  Description of Artificial Sequence: Synthetic oligonucleotide
gccugaccucagcgucuuc

SEQ ID NO: 13843 - RNA, 19 nt, Artificial Sequence
  Description of Artificial Sequence: Synthetic oligonucleotide
ccagaaccugcaaguaauc

SEQ ID NO: 13844 - RNA, 19 nt, Artificial Sequence
  Description of Artificial Sequence: Synthetic oligonucleotide
ccggggacgaauucugcac

SEQ ID NO: 13845 - RNA, 19 nt, Artificial Sequence
  Description of Artificial Sequence: Synthetic oligonucleotide
caauggcgccuacucgcug

SEQ ID NO: 13846 - RNA, 19 nt, Artificial Sequence
  Description of Artificial Sequence: Synthetic oligonucleotide
gacccugcaagggcugggc

SEQ ID NO: 13847 - RNA, 19 nt, Artificial Sequence
  Description of Artificial Sequence: Synthetic oligonucleotide
caucagcuggcuggggcug

SEQ ID NO: 13848 - RNA, 19 nt, Artificial Sequence
  Description of Artificial Sequence: Synthetic oligonucleotide
gcgcucacugagggaacug

SEQ ID NO: 13849 - RNA, 19 nt, Artificial Sequence
  Description of Artificial Sequence: Synthetic oligonucleotide
gggcaguggacuggcccuc

SEQ ID NO: 13850 - RNA, 19 nt, Artificial Sequence
  Description of Artificial Sequence: Synthetic oligonucleotide
cauccaccauaacacccac

SEQ ID NO: 13851 - RNA, 19 nt, Artificial Sequence
  Description of Artificial Sequence: Synthetic oligonucleotide
ccucugcuucgugcacacg

SEQ ID NO: 13852 - RNA, 19 nt, Artificial Sequence
  Description of Artificial Sequence: Synthetic oligonucleotide
ggugcccugggaccagcuc

SEQ ID NO: 13853 - RNA, 19 nt, Artificial Sequence
  Description of Artificial Sequence: Synthetic oligonucleotide
cuuucggaacccgcaccaa

SEQ ID NO: 13854 - RNA, 19 nt, Artificial Sequence
  Description of Artificial Sequence: Synthetic oligonucleotide
agcucugcuccacacugcc

SEQ ID NO: 13855 - RNA, 19 nt, Artificial Sequence
  Description of Artificial Sequence: Synthetic oligonucleotide
caaccggccagaggacgag

SEQ ID NO: 13856 - RNA, 19 nt, Artificial Sequence
  Description of Artificial Sequence: Synthetic oligonucleotide
gugugugggcgagggccug

SEQ ID NO: 13857 - RNA, 19 nt, Artificial Sequence
  Description of Artificial Sequence: Synthetic oligonucleotide
ggccugccaccagcugugc

SEQ ID NO: 13858 - RNA, 19 nt, Artificial Sequence
  Description of Artificial Sequence: Synthetic oligonucleotide
cgcccgagggcacugcugg

SEQ ID NO: 13859 - RNA, 19 nt, Artificial Sequence
  Description of Artificial Sequence: Synthetic oligonucleotide
ggguccagggcccacccag

SEQ ID NO: 13860 - RNA, 19 nt, Artificial Sequence
  Description of Artificial Sequence: Synthetic oligonucleotide
gugugucaacugcagccag

SEQ ID NO: 13861 - RNA, 19 nt, Artificial Sequence
  Description of Artificial Sequence: Synthetic oligonucleotide
guuccuucggggccaggag

SEQ ID NO: 13862 - RNA, 19 nt, Artificial Sequence
  Description of Artificial Sequence: Synthetic oligonucleotide
gugcguggaggaaugccga

SEQ ID NO: 13863 - RNA, 19 nt, Artificial Sequence
  Description of Artificial Sequence: Synthetic oligonucleotide
aguacugcaggggcucccc

SEQ ID NO: 13864 - RNA, 19 nt, Artificial Sequence
  Description of Artificial Sequence: Synthetic oligonucleotide
cagggaguaugugaaugcc

SEQ ID NO: 13865 - RNA, 19 nt, Artificial Sequence
  Description of Artificial Sequence: Synthetic oligonucleotide
caggcacuguuugccgugc

SEQ ID NO: 13866 - RNA, 19 nt, Artificial Sequence
  Description of Artificial Sequence: Synthetic oligonucleotide
ccacccugagugucagccc

SEQ ID NO: 13867 - RNA, 19 nt, Artificial Sequence
  Description of Artificial Sequence: Synthetic oligonucleotide
ccagaauggcucagugacc

SEQ ID NO: 13868 - RNA, 19 nt, Artificial Sequence
  Description of Artificial Sequence: Synthetic oligonucleotide
cuguuuuggaccggaggcu

SEQ ID NO: 13869 - RNA, 19 nt, Artificial Sequence
  Description of Artificial Sequence: Synthetic oligonucleotide
ugaccaguguguggccugu

SEQ ID NO: 13870 - RNA, 19 nt, Artificial Sequence
  Description of Artificial Sequence: Synthetic oligonucleotide
ugcccacuauaaggacccu

SEQ ID NO: 13871 - RNA, 19 nt, Artificial Sequence
  Description of Artificial Sequence: Synthetic oligonucleotide
ucccuucugcguggcccgc

SEQ ID NO: 13872 - RNA, 19 nt, Artificial Sequence
  Description of Artificial Sequence: Synthetic oligonucleotide
cugccccagcggugugaaa

SEQ ID NO: 13873 - RNA, 19 nt, Artificial Sequence
  Description of Artificial Sequence: Synthetic oligonucleotide
accugaccucuccuacaug

SEQ ID NO: 13874 - RNA, 19 nt, Artificial Sequence
  Description of Artificial Sequence: Synthetic oligonucleotide
gcccaucuggaaguuucca

SEQ ID NO: 13875 - RNA, 19 nt, Artificial Sequence
  Description of Artificial Sequence: Synthetic oligonucleotide
agaugaggagggcgcaugc

SEQ ID NO: 13876 - RNA, 19 nt, Artificial Sequence
  Description of Artificial Sequence: Synthetic oligonucleotide
ccagccuugccccaucaac

SEQ ID NO: 13877 - RNA, 19 nt, Artificial Sequence
  Description of Artificial Sequence: Synthetic oligonucleotide
cugcacccacuccugugug

SEQ ID NO: 13878 - RNA, 19 nt, Artificial Sequence
  Description of Artificial Sequence: Synthetic oligonucleotide
ggaccuggaugacaagggc

SEQ ID NO: 13879 - RNA, 19 nt, Artificial Sequence
  Description of Artificial Sequence: Synthetic oligonucleotide
cugccccgccgagcagaga

SEQ ID NO: 13880 - RNA, 19 nt, Artificial Sequence
  Description of Artificial Sequence: Synthetic oligonucleotide
agccagcccucugacgucc

SEQ ID NO: 13881 - RNA, 19 nt, Artificial Sequence
  Description of Artificial Sequence: Synthetic oligonucleotide
caucaucucugcggugguu

SEQ ID NO: 13882 - RNA, 19 nt, Artificial Sequence
  Description of Artificial Sequence: Synthetic oligonucleotide
uggcauucugcuggucgug

SEQ ID NO: 13883 - RNA, 19 nt, Artificial Sequence
  Description of Artificial Sequence: Synthetic oligonucleotide
ggucuuggggguggucuuu

SEQ ID NO: 13884 - RNA, 19 nt, Artificial Sequence
  Description of Artificial Sequence: Synthetic oligonucleotide
ugggauccucaucaagcga

SEQ ID NO: 13885 - RNA, 19 nt, Artificial Sequence
  Description of Artificial Sequence: Synthetic oligonucleotide
acggcagcagaagauccgg

SEQ ID NO: 13886 - RNA, 19 nt, Artificial Sequence
  Description of Artificial Sequence: Synthetic oligonucleotide
gaaguacacgaugcggaga

SEQ ID NO: 13887 - RNA, 19 nt, Artificial Sequence
  Description of Artificial Sequence: Synthetic oligonucleotide
acugcugcaggaaacggag

SEQ ID NO: 13888 - RNA, 19 nt, Artificial Sequence
  Description of Artificial Sequence: Synthetic oligonucleotide
gcugguggagccgcugaca

SEQ ID NO: 13889 - RNA, 19 nt, Artificial Sequence
  Description of Artificial Sequence: Synthetic oligonucleotide
accuagcggagcgaugccc

SEQ ID NO: 13890 - RNA, 19 nt, Artificial Sequence
  Description of Artificial Sequence: Synthetic oligonucleotide
caaccaggcgcagaugcgg

SEQ ID NO: 13891 - RNA, 19 nt, Artificial Sequence
  Description of Artificial Sequence: Synthetic oligonucleotide
gauccugaaagagacggag

SEQ ID NO: 13892 - RNA, 19 nt, Artificial Sequence
  Description of Artificial Sequence: Synthetic oligonucleotide
gcugaggaaggugaaggug

SEQ ID NO: 13893 - RNA, 19 nt, Artificial Sequence
  Description of Artificial Sequence: Synthetic oligonucleotide
gcuuggaucuggcgcuuuu

SEQ ID NO: 13894 - RNA, 19 nt, Artificial Sequence
  Description of Artificial Sequence: Synthetic oligonucleotide
uggcacagucuacaagggc

SEQ ID NO: 13895 - RNA, 19 nt, Artificial Sequence
  Description of Artificial Sequence: Synthetic oligonucleotide
caucuggaucccugauggg

SEQ ID NO: 13896 - RNA, 19 nt, Artificial Sequence
  Description of Artificial Sequence: Synthetic oligonucleotide
ggagaaugugaaaauucca

SEQ ID NO: 13897 - RNA, 19 nt, Artificial Sequence
  Description of Artificial Sequence: Synthetic oligonucleotide
aguggccaucaaaguguug

SEQ ID NO: 13898 - RNA, 19 nt, Artificial Sequence
  Description of Artificial Sequence: Synthetic oligonucleotide
gagggaaaacacauccccc

SEQ ID NO: 13899 - RNA, 19 nt, Artificial Sequence
  Description of Artificial Sequence: Synthetic oligonucleotide
caaagccaacaaagaaauc

SEQ ID NO: 13900 - RNA, 19 nt, Artificial Sequence
  Description of Artificial Sequence: Synthetic oligonucleotide
cuuagacgaagcauacgug

SEQ ID NO: 13901 - RNA, 19 nt, Artificial Sequence
  Description of Artificial Sequence: Synthetic oligonucleotide
gauggcuggugugggcucc

SEQ ID NO: 13902 - RNA, 19 nt, Artificial Sequence
  Description of Artificial Sequence: Synthetic oligonucleotide
cccauaugucucccgccuu

SEQ ID NO: 13903 - RNA, 19 nt, Artificial Sequence
  Description of Artificial Sequence: Synthetic oligonucleotide
ucugggcaucugccugaca

SEQ ID NO: 13904 - RNA, 19 nt, Artificial Sequence
  Description of Artificial Sequence: Synthetic oligonucleotide
auccacggugcagcuggug

SEQ ID NO: 13905 - RNA, 19 nt, Artificial Sequence
  Description of Artificial Sequence: Synthetic oligonucleotide
gacacagcuuaugcccuau

SEQ ID NO: 13906 - RNA, 19 nt, Artificial Sequence
  Description of Artificial Sequence: Synthetic oligonucleotide
uggcugccucuuagaccau

SEQ ID NO: 13907 - RNA, 19 nt, Artificial Sequence
  Description of Artificial Sequence: Synthetic oligonucleotide
uguccgggaaaaccgcgga

SEQ ID NO: 13908 - RNA, 19 nt, Artificial Sequence
  Description of Artificial Sequence: Synthetic oligonucleotide
acgccugggcucccaggac

SEQ ID NO: 13909 - RNA, 19 nt, Artificial Sequence
  Description of Artificial Sequence: Synthetic oligonucleotide
ccugcugaacugguguaug

SEQ ID NO: 13910 - RNA, 19 nt, Artificial Sequence
  Description of Artificial Sequence: Synthetic oligonucleotide
gcagauugccaaggggaug

SEQ ID NO: 13911 - RNA, 19 nt, Artificial Sequence
  Description of Artificial Sequence: Synthetic oligonucleotide
gagcuaccuggaggaugug

SEQ ID NO: 13912 - RNA, 19 nt, Artificial Sequence
  Description of Artificial Sequence: Synthetic oligonucleotide
gcggcucguacacagggac

SEQ ID NO: 13913 - RNA, 19 nt, Artificial Sequence
  Description of Artificial Sequence: Synthetic oligonucleotide
cuuggccgcucggaacgug

SEQ ID NO: 13914 - RNA, 19 nt, Artificial Sequence
  Description of Artificial Sequence: Synthetic oligonucleotide
gcuggucaagagucccaac

SEQ ID NO: 13915 - RNA, 19 nt, Artificial Sequence
  Description of Artificial Sequence: Synthetic oligonucleotide
ccaugucaaaauuacagac

SEQ ID NO: 13916 - RNA, 19 nt, Artificial Sequence
  Description of Artificial Sequence: Synthetic oligonucleotide
cuucgggcuggcucggcug

SEQ ID NO: 13917 - RNA, 19 nt, Artificial Sequence
  Description of Artificial Sequence: Synthetic oligonucleotide
gcuggacauugacgagaca

SEQ ID NO: 13918 - RNA, 19 nt, Artificial Sequence
  Description of Artificial Sequence: Synthetic oligonucleotide
agaguaccaugcagauggg

SEQ ID NO: 13919 - RNA, 19 nt, Artificial Sequence
  Description of Artificial Sequence: Synthetic oligonucleotide
gggcaaggugcccaucaag

SEQ ID NO: 13920 - RNA, 19 nt, Artificial Sequence
  Description of Artificial Sequence: Synthetic oligonucleotide
guggauggcgcuggagucc

SEQ ID NO: 13921 - RNA, 19 nt, Artificial Sequence
  Description of Artificial Sequence: Synthetic oligonucleotide
cauucuccgccggcgguuc

SEQ ID NO: 13922 - RNA, 19 nt, Artificial Sequence
  Description of Artificial Sequence: Synthetic oligonucleotide
cacccaccagagugaugug

SEQ ID NO: 13923 - RNA, 19 nt, Artificial Sequence
  Description of Artificial Sequence: Synthetic oligonucleotide
guggaguuauggugugacu

SEQ ID NO: 13924 - RNA, 19 nt, Artificial Sequence
  Description of Artificial Sequence: Synthetic oligonucleotide
ugugugggagcugaugacu

SEQ ID NO: 13925 - RNA, 19 nt, Artificial Sequence
  Description of Artificial Sequence: Synthetic oligonucleotide
uuuuggggccaaaccuuac

SEQ ID NO: 13926 - RNA, 19 nt, Artificial Sequence
  Description of Artificial Sequence: Synthetic oligonucleotide
cgaugggaucccagcccgg

SEQ ID NO: 13927 - RNA, 19 nt, Artificial Sequence
  Description of Artificial Sequence: Synthetic oligonucleotide
ggagaucccugaccugcug

SEQ ID NO: 13928 - RNA, 19 nt, Artificial Sequence
  Description of Artificial Sequence: Synthetic oligonucleotide
ggaaaagggggagcggcug

SEQ ID NO: 13929 - RNA, 19 nt, Artificial Sequence
  Description of Artificial Sequence: Synthetic oligonucleotide
gccccagccccccaucugc

SEQ ID NO: 13930 - RNA, 19 nt, Artificial Sequence
  Description of Artificial Sequence: Synthetic oligonucleotide
caccauugaugucuacaug

SEQ ID NO: 13931 - RNA, 19 nt, Artificial Sequence
  Description of Artificial Sequence: Synthetic oligonucleotide
gaucauggucaaauguugg

SEQ ID NO: 13932 - RNA, 19 nt, Artificial Sequence
  Description of Artificial Sequence: Synthetic oligonucleotide
gaugauugacucugaaugu

SEQ ID NO: 13933 - RNA, 19 nt, Artificial Sequence
  Description of Artificial Sequence: Synthetic oligonucleotide
ucggccaagauuccgggag

SEQ ID NO: 13934 - RNA, 19 nt, Artificial Sequence
  Description of Artificial Sequence: Synthetic oligonucleotide
guuggugucugaauucucc

SEQ ID NO: 13935 - RNA, 19 nt, Artificial Sequence
  Description of Artificial Sequence: Synthetic oligonucleotide
ccgcauggccagggacccc

SEQ ID NO: 13936 - RNA, 19 nt, Artificial Sequence
  Description of Artificial Sequence: Synthetic oligonucleotide
ccagcgcuuuguggucauc

SEQ ID NO: 13937 - RNA, 19 nt, Artificial Sequence
  Description of Artificial Sequence: Synthetic oligonucleotide
ccagaaugaggacuugggc

SEQ ID NO: 13938 - RNA, 19 nt, Artificial Sequence
  Description of Artificial Sequence: Synthetic oligonucleotide
cccagccagucccuuggac

SEQ ID NO: 13939 - RNA, 19 nt, Artificial Sequence
  Description of Artificial Sequence: Synthetic oligonucleotide
cagcaccuucuaccgcuca

SEQ ID NO: 13940 - RNA, 19 nt, Artificial Sequence
  Description of Artificial Sequence: Synthetic oligonucleotide
acugcuggaggacgaugac

SEQ ID NO: 13941 - RNA, 19 nt, Artificial Sequence
  Description of Artificial Sequence: Synthetic oligonucleotide
caugggggaccugguggau

SEQ ID NO: 13942 - RNA, 19 nt, Artificial Sequence
  Description of Artificial Sequence: Synthetic oligonucleotide
ugcugaggaguaucuggua

SEQ ID NO: 13943 - RNA, 19 nt, Artificial Sequence
  Description of Artificial Sequence: Synthetic oligonucleotide
accccagcagggcuucuuc

SEQ ID NO: 13944 - RNA, 19 nt, Artificial Sequence
  Description of Artificial Sequence: Synthetic oligonucleotide
cuguccagacccugccccg

SEQ ID NO: 13945 - RNA, 19 nt, Artificial Sequence
  Description of Artificial Sequence: Synthetic oligonucleotide
gggcgcugggggcaugguc

SEQ ID NO: 13946 - RNA, 19 nt, Artificial Sequence
  Description of Artificial Sequence: Synthetic oligonucleotide
ccaccacaggcaccgcagc

SEQ ID NO: 13947 - RNA, 19 nt, Artificial Sequence
  Description of Artificial Sequence: Synthetic oligonucleotide
cucaucuaccaggaguggc

SEQ ID NO: 13948 - RNA, 19 nt, Artificial Sequence
  Description of Artificial Sequence: Synthetic oligonucleotide
cgguggggaccugacacua

SEQ ID NO: 13949 - RNA, 19 nt, Artificial Sequence
  Description of Artificial Sequence: Synthetic oligonucleotide
agggcuggagcccucugaa

SEQ ID NO: 13950 - RNA, 19 nt, Artificial Sequence
  Description of Artificial Sequence: Synthetic oligonucleotide
agaggaggcccccaggucu

SEQ ID NO: 13951 - RNA, 19 nt, Artificial Sequence
  Description of Artificial Sequence: Synthetic oligonucleotide
uccacuggcacccuccgaa

SEQ ID NO: 13952 - RNA, 19 nt, Artificial Sequence
  Description of Artificial Sequence: Synthetic oligonucleotide
aggggcuggcuccgaugua

SEQ ID NO: 13953 - RNA, 19 nt, Artificial Sequence
  Description of Artificial Sequence: Synthetic oligonucleotide
auuugauggugaccuggga

SEQ ID NO: 13954 - RNA, 19 nt, Artificial Sequence
  Description of Artificial Sequence: Synthetic oligonucleotide
aaugggggcagccaagggg

SEQ ID NO: 13955 - RNA, 19 nt, Artificial Sequence
  Description of Artificial Sequence: Synthetic oligonucleotide
gcugcaaagccuccccaca

SEQ ID NO: 13956 - RNA, 19 nt, Artificial Sequence
  Description of Artificial Sequence: Synthetic oligonucleotide
acaugaccccagcccucua

SEQ ID NO: 13957 - RNA, 19 nt, Artificial Sequence
  Description of Artificial Sequence: Synthetic oligonucleotide
acagcgguacagugaggac

SEQ ID NO: 13958 - RNA, 19 nt, Artificial Sequence
  Description of Artificial Sequence: Synthetic oligonucleotide
ccccacaguaccccugccc

SEQ ID NO: 13959 - RNA, 19 nt, Artificial Sequence
  Description of Artificial Sequence: Synthetic oligonucleotide
cucugagacugauggcuac

SEQ ID NO: 13960 - RNA, 19 nt, Artificial Sequence
  Description of Artificial Sequence: Synthetic oligonucleotide
cguugccccccugaccugc

SEQ ID NO: 13961 - RNA, 19 nt, Artificial Sequence
  Description of Artificial Sequence: Synthetic oligonucleotide
cagcccccagccugaauau

SEQ ID NO: 13962 - RNA, 19 nt, Artificial Sequence
  Description of Artificial Sequence: Synthetic oligonucleotide
ugugaaccagccagauguu

SEQ ID NO: 13963 - RNA, 19 nt, Artificial Sequence
  Description of Artificial Sequence: Synthetic oligonucleotide
ucggccccagcccccuucg

SEQ ID NO: 13964 - RNA, 19 nt, Artificial Sequence
  Description of Artificial Sequence: Synthetic oligonucleotide
gccccgagagggcccucug

SEQ ID NO: 13965 - RNA, 19 nt, Artificial Sequence
  Description of Artificial Sequence: Synthetic oligonucleotide
gccugcugcccgaccugcu

SEQ ID NO: 13966 - RNA, 19 nt, Artificial Sequence
  Description of Artificial Sequence: Synthetic oligonucleotide
uggugccacucuggaaagg

SEQ ID NO: 13967 - RNA, 19 nt, Artificial Sequence
  Description of Artificial Sequence: Synthetic oligonucleotide
gcccaagacucucucccca

SEQ ID NO: 13968 - RNA, 19 nt, Artificial Sequence
  Description of Artificial Sequence: Synthetic oligonucleotide
agggaagaauggggucguc

SEQ ID NO: 13969 - RNA, 19 nt, Artificial Sequence
  Description of Artificial Sequence: Synthetic oligonucleotide
caaagacguuuuugccuuu

SEQ ID NO: 13970 - RNA, 19 nt, Artificial Sequence
  Description of Artificial Sequence: Synthetic oligonucleotide
ugggggugccguggagaac

SEQ ID NO: 13971 - RNA, 19 nt, Artificial Sequence
  Description of Artificial Sequence: Synthetic oligonucleotide
ccccgaguacuugacaccc

SEQ ID NO: 13972 - RNA, 19 nt, Artificial Sequence
  Description of Artificial Sequence: Synthetic oligonucleotide
ccagggaggagcugccccu

SEQ ID NO: 13973 - RNA, 19 nt, Artificial Sequence
  Description of Artificial Sequence: Synthetic oligonucleotide
ucagccccacccuccuccu

SEQ ID NO: 13974 - RNA, 19 nt, Artificial Sequence
  Description of Artificial Sequence: Synthetic oligonucleotide
ugccuucagcccagccuuc

SEQ ID NO: 13975 - RNA, 19 nt, Artificial Sequence
  Description of Artificial Sequence: Synthetic oligonucleotide
cgacaaccucuauuacugg

SEQ ID NO: 13976 - RNA, 19 nt, Artificial Sequence
  Description of Artificial Sequence: Synthetic oligonucleotide
ggaccaggacccaccagag

SEQ ID NO: 13977 - RNA, 19 nt, Artificial Sequence
  Description of Artificial Sequence: Synthetic oligonucleotide
gcggggggcuccacccagc

SEQ ID NO: 13978 - RNA, 19 nt, Artificial Sequence
  Description of Artificial Sequence: Synthetic oligonucleotide
caccuucaaagggacaccu

SEQ ID NO: 13979 - RNA, 19 nt, Artificial Sequence
  Description of Artificial Sequence: Synthetic oligonucleotide
uacggcagagaacccagag

SEQ ID NO: 13980 - RNA, 19 nt, Artificial Sequence
  Description of Artificial Sequence: Synthetic oligonucleotide
guaccugggucuggacgug

SEQ ID NO: 13981 - RNA, 19 nt, Artificial Sequence
  Description of Artificial Sequence: Synthetic oligonucleotide
gccagugugaaccagaagg

SEQ ID NO: 13982 - RNA, 19 nt, Artificial Sequence
  Description of Artificial Sequence: Synthetic oligonucleotide
gccaaguccgcagaagccc

SEQ ID NO: 13983 - RNA, 19 nt, Artificial Sequence
  Description of Artificial Sequence: Synthetic oligonucleotide
cugauguguccucagggag

SEQ ID NO: 13984 - RNA, 19 nt, Artificial Sequence
  Description of Artificial Sequence: Synthetic oligonucleotide
gcagggaaggccugacuuc

SEQ ID NO: 13985 - RNA, 19 nt, Artificial Sequence
  Description of Artificial Sequence: Synthetic oligonucleotide
cugcuggcaucaagaggug

SEQ ID NO: 13986 - RNA, 19 nt, Artificial Sequence
  Description of Artificial Sequence: Synthetic oligonucleotide
gggagggcccuccgaccac

SEQ ID NO: 13987 - RNA, 19 nt, Artificial Sequence
  Description of Artificial Sequence: Synthetic oligonucleotide
cuuccaggggaaccugcca

SEQ ID NO: 13988 - RNA, 19 nt, Artificial Sequence
  Description of Artificial Sequence: Synthetic oligonucleotide
augccaggaaccuguccua

SEQ ID NO: 13989 - RNA, 19 nt, Artificial Sequence
  Description of Artificial Sequence: Synthetic oligonucleotide
aaggaaccuuccuuccugc

SEQ ID NO: 13990 - RNA, 19 nt, Artificial Sequence
  Description of Artificial Sequence: Synthetic oligonucleotide
cuugaguucccagauggcu

SEQ ID NO: 13991 - RNA, 19 nt, Artificial Sequence
  Description of Artificial Sequence: Synthetic oligonucleotide
uggaagggguccagccucg

SEQ ID NO: 13992 - RNA, 19 nt, Artificial Sequence
  Description of Artificial Sequence: Synthetic oligonucleotide
guuggaagaggaacagcac

SEQ ID NO: 13993 - RNA, 19 nt, Artificial Sequence
  Description of Artificial Sequence: Synthetic oligonucleotide
cuggggagucuuuguggau

SEQ ID NO: 13994 - RNA, 19 nt, Artificial Sequence
  Description of Artificial Sequence: Synthetic oligonucleotide
uucugaggcccugcccaau

SEQ ID NO: 13995 - RNA, 19 nt, Artificial Sequence
  Description of Artificial Sequence: Synthetic oligonucleotide
ugagacucuaggguccagu

SEQ ID NO: 13996 - RNA, 19 nt, Artificial Sequence
  Description of Artificial Sequence: Synthetic oligonucleotide
uggaugccacagcccagcu

SEQ ID NO: 13997 - RNA, 19 nt, Artificial Sequence
  Description of Artificial Sequence: Synthetic oligonucleotide
uuggcccuuuccuuccaga

SEQ ID NO: 13998 - RNA, 19 nt, Artificial Sequence
  Description of Artificial Sequence: Synthetic oligonucleotide
auccuggguacugaaagcc

SEQ ID NO: 13999 - RNA, 19 nt, Artificial Sequence
  Description of Artificial Sequence: Synthetic oligonucleotide
cuuagggaagcuggccuga

SEQ ID NO: 14000 - RNA, 19 nt, Artificial Sequence
  Description of Artificial Sequence: Synthetic oligonucleotide
agaggggaagcggcccuaa

SEQ ID NO: 14001 - RNA, 19 nt, Artificial Sequence
  Description of Artificial Sequence: Synthetic oligonucleotide
agggagugucuaagaacaa

SEQ ID NO: 14002 - RNA, 19 nt, Artificial Sequence
  Description of Artificial Sequence: Synthetic oligonucleotide
aaagcgacccauucagaga

SEQ ID NO: 14003 - RNA, 19 nt, Artificial Sequence
  Description of Artificial Sequence: Synthetic oligonucleotide
acugucccugaaaccuagu

SEQ ID NO: 14004 - RNA, 19 nt, Artificial Sequence
  Description of Artificial Sequence: Synthetic oligonucleotide
uacugccccccaugaggaa

SEQ ID NO: 14005 - RNA, 19 nt, Artificial Sequence
  Description of Artificial Sequence: Synthetic oligonucleotide
aggaacagcaaugguguca

SEQ ID NO: 14006 - RNA, 19 nt, Artificial Sequence
  Description of Artificial Sequence: Synthetic oligonucleotide
aguauccaggcuuuguaca

SEQ ID NO: 14007 - RNA, 19 nt, Artificial Sequence
  Description of Artificial Sequence: Synthetic oligonucleotide
agagugcuuuucuguuuag

SEQ ID NO: 14008 - RNA, 19 nt, Artificial Sequence
  Description of Artificial Sequence: Synthetic oligonucleotide
guuuuuacuuuuuuuguuu

SEQ ID NO: 14009 - RNA, 19 nt, Artificial Sequence
  Description of Artificial Sequence: Synthetic oligonucleotide
uuguuuuuuuaaagaugaa

SEQ ID NO: 14010 - RNA, 19 nt, Artificial Sequence
  Description of Artificial Sequence: Synthetic oligonucleotide
aauaaagacccagggggag

SEQ ID NO: 14011 - RNA, 19 nt, Artificial Sequence
  Description of Artificial Sequence: Synthetic oligonucleotide
gaauggguguuguaugggg

SEQ ID NO: 14012 - RNA, 19 nt, Artificial Sequence
  Description of Artificial Sequence: Synthetic oligonucleotide
gaggcaagugugggggguc

SEQ ID NO: 14013 - RNA, 19 nt, Artificial Sequence
  Description of Artificial Sequence: Synthetic oligonucleotide
ccuucuccacacccacuuu

SEQ ID NO: 14014 - RNA, 19 nt, Artificial Sequence
  Description of Artificial Sequence: Synthetic oligonucleotide
uguccauuugcaaauauau

SEQ ID NO: 14015 - RNA, 25 nt, Artificial Sequence
  Description of Artificial Sequence: Synthetic oligonucleotide
guucccggauuuuugugggcgccug

SEQ ID NO: 14016 - RNA, 25 nt, Artificial Sequence
  Description of Artificial Sequence: Synthetic oligonucleotide
gccccgccccucgucccccugcugu

SEQ ID NO: 14017 - RNA, 25 nt, Artificial Sequence
  Description of Artificial Sequence: Synthetic oligonucleotide
uguccauauaucgaggcgauagggu

SEQ ID NO: 14018 - RNA, 25 nt, Artificial Sequence
  Description of Artificial Sequence: Synthetic oligonucleotide
uuaagggaaggcggacgccugaugg

SEQ ID NO: 14019 - RNA, 25 nt, Artificial Sequence
  Description of Artificial Sequence: Synthetic oligonucleotide
gguuaaugagcaaacugaaguguuu

SEQ ID NO: 14020 - RNA, 25 nt, Artificial Sequence
  Description of Artificial Sequence: Synthetic oligonucleotide
uuccaugaucuuuuuugagucgcaa

SEQ ID NO: 14021 - RNA, 25 nt, Artificial Sequence
  Description of Artificial Sequence: Synthetic oligonucleotide
auugaaguaccaccucccgagggug

SEQ ID NO: 14022 - RNA, 25 nt, Artificial Sequence
  Description of Artificial Sequence: Synthetic oligonucleotide
gauugcuuccccaugcgggguagaa

SEQ ID NO: 14023 - RNA, 25 nt, Artificial Sequence
  Description of Artificial Sequence: Synthetic oligonucleotide
accuuugcuguccuguucaccacuc

SEQ ID NO: 14024 - RNA, 25 nt, Artificial Sequence
  Description of Artificial Sequence: Synthetic oligonucleotide
cuaccuccagcacagaauuuggcuu

SEQ ID NO: 14025 - RNA, 25 nt, Artificial Sequence
  Description of Artificial Sequence: Synthetic oligonucleotide
uaugccuacucaaugugaagaugau

SEQ ID NO: 14026 - RNA, 25 nt, Artificial Sequence
  Description of Artificial Sequence: Synthetic oligonucleotide
ugaggaugaaaaccuuugugaugau

SEQ ID NO: 14027 - RNA, 25 nt, Artificial Sequence
  Description of Artificial Sequence: Synthetic oligonucleotide
uccacuuccacuuaaugaauggugg

SEQ ID NO: 14028 - RNA, 25 nt, Artificial Sequence
  Description of Artificial Sequence: Synthetic oligonucleotide
gcaaagcaaagcuauauucaagacc

SEQ ID NO: 14029 - RNA, 25 nt, Artificial Sequence
  Description of Artificial Sequence: Synthetic oligonucleotide
cacaugcaaagcuacucccugagca

SEQ ID NO: 14030 - RNA, 25 nt, Artificial Sequence
  Description of Artificial Sequence: Synthetic oligonucleotide
aaagagucacagauaaaacgggggc

SEQ ID NO: 14031 - RNA, 25 nt, Artificial Sequence
  Description of Artificial Sequence: Synthetic oligonucleotide
caccaguagaauggccaggacaaac

SEQ ID NO: 14032 - RNA, 25 nt, Artificial Sequence
  Description of Artificial Sequence: Synthetic oligonucleotide
cgcagugcagcacagagacucagac

SEQ ID NO: 14033 - RNA, 25 nt, Artificial Sequence
  Description of Artificial Sequence: Synthetic oligonucleotide
cccuggcagccaugccugcgcaggc

SEQ ID NO: 14034 - RNA, 25 nt, Artificial Sequence
  Description of Artificial Sequence: Synthetic oligonucleotide
cagugaugagagugacauguacugu

SEQ ID NO: 14035 - RNA, 25 nt, Artificial Sequence
  Description of Artificial Sequence: Synthetic oligonucleotide
uuguggacaugcacaaaagugagug

SEQ ID NO: 14036 - RNA, 25 nt, Artificial Sequence
  Description of Artificial Sequence: Synthetic oligonucleotide
gugcaccggcacagacaugaagcug

SEQ ID NO: 14037 - RNA, 25 nt, Artificial Sequence
  Description of Artificial Sequence: Synthetic oligonucleotide
gcggcucccugccagucccgagacc

SEQ ID NO: 14038 - RNA, 25 nt, Artificial Sequence
  Description of Artificial Sequence: Synthetic oligonucleotide
ccaccuggacaugcuccgccaccuc

SEQ ID NO: 14039 - RNA, 25 nt, Artificial Sequence
  Description of Artificial Sequence: Synthetic oligonucleotide
cuaccagggcugccagguggugcag

SEQ ID NO: 14040 - RNA, 25 nt, Artificial Sequence
  Description of Artificial Sequence: Synthetic oligonucleotide
gggaaaccuggaacucaccuaccug

SEQ ID NO: 14041 - RNA, 25 nt, Artificial Sequence
  Description of Artificial Sequence: Synthetic oligonucleotide
gcccaccaaugccagccuguccuuc

SEQ ID NO: 14042 - RNA, 25 nt, Artificial Sequence
  Description of Artificial Sequence: Synthetic oligonucleotide
ccugcaggauauccaggaggugcag

SEQ ID NO: 14043 - RNA, 25 nt, Artificial Sequence
  Description of Artificial Sequence: Synthetic oligonucleotide
gggcuacgugcucaucgcucacaac

SEQ ID NO: 14044 - RNA, 25 nt, Artificial Sequence
  Description of Artificial Sequence: Synthetic oligonucleotide
ccaagugaggcaggucccacugcag

SEQ ID NO: 14045 - RNA, 25 nt, Artificial Sequence
  Description of Artificial Sequence: Synthetic oligonucleotide
gaggcugcggauugugcgaggcacc

SEQ ID NO: 14046 - RNA, 25 nt, Artificial Sequence
  Description of Artificial Sequence: Synthetic oligonucleotide
ccagcucuuugaggacaacuaugcc

SEQ ID NO: 14047 - RNA, 25 nt, Artificial Sequence
  Description of Artificial Sequence: Synthetic oligonucleotide
ccuggccgugcuagacaauggagac

SEQ ID NO: 14048 - RNA, 25 nt, Artificial Sequence
  Description of Artificial Sequence: Synthetic oligonucleotide
cccgcugaacaauaccaccccuguc

SEQ ID NO: 14049 - RNA, 25 nt, Artificial Sequence
  Description of Artificial Sequence: Synthetic oligonucleotide
cacaggggccuccccaggaggccug

SEQ ID NO: 14050 - RNA, 25 nt, Artificial Sequence
  Description of Artificial Sequence: Synthetic oligonucleotide
gcgggagcugcagcuucgaagccuc

SEQ ID NO: 14051 - RNA, 25 nt, Artificial Sequence
  Description of Artificial Sequence: Synthetic oligonucleotide
cacagagaucuugaaaggagggguc

SEQ ID NO: 14052 - RNA, 25 nt, Artificial Sequence
  Description of Artificial Sequence: Synthetic oligonucleotide
cuugauccagcggaacccccagcuc

SEQ ID NO: 14053 - RNA, 25 nt, Artificial Sequence
  Description of Artificial Sequence: Synthetic oligonucleotide
cugcuaccaggacacgauuuugugg

SEQ ID NO: 14054 - RNA, 25 nt, Artificial Sequence
  Description of Artificial Sequence: Synthetic oligonucleotide
gaaggacaucuuccacaagaacaac

SEQ ID NO: 14055 - RNA, 25 nt, Artificial Sequence
  Description of Artificial Sequence: Synthetic oligonucleotide
ccagcuggcucucacacugauagac

SEQ ID NO: 14056 - RNA, 25 nt, Artificial Sequence
  Description of Artificial Sequence: Synthetic oligonucleotide
caccaaccgcucucgggccugccac

SEQ ID NO: 14057 - RNA, 25 nt, Artificial Sequence
  Description of Artificial Sequence: Synthetic oligonucleotide
ccccuguucuccgauguguaagggc

SEQ ID NO: 14058 - RNA, 25 nt, Artificial Sequence
  Description of Artificial Sequence: Synthetic oligonucleotide
cucccgcugcuggggagagaguucu

SEQ ID NO: 14059 - RNA, 25 nt, Artificial Sequence
  Description of Artificial Sequence: Synthetic oligonucleotide
ugaggauugucagagccugacgcgc

SEQ ID NO: 14060 - RNA, 25 nt, Artificial Sequence
  Description of Artificial Sequence: Synthetic oligonucleotide
cacugucugugccgguggcugugcc

SEQ ID NO: 14061 - RNA, 25 nt, Artificial Sequence
  Description of Artificial Sequence: Synthetic oligonucleotide
ccgcugcaaggggccacugcccacu

SEQ ID NO: 14062 - RNA, 25 nt, Artificial Sequence
  Description of Artificial Sequence: Synthetic oligonucleotide
ugacugcugccaugagcagugugcu

SEQ ID NO: 14063 - RNA, 25 nt, Artificial Sequence
  Description of Artificial Sequence: Synthetic oligonucleotide
ugccggcugcacgggccccaagcac

SEQ ID NO: 14064 - RNA, 25 nt, Artificial Sequence
  Description of Artificial Sequence: Synthetic oligonucleotide
cucugacugccuggccugccuccac

SEQ ID NO: 14065 - RNA, 25 nt, Artificial Sequence
  Description of Artificial Sequence: Synthetic oligonucleotide
cuucaaccacaguggcaucugugag

SEQ ID NO: 14066 - RNA, 25 nt, Artificial Sequence
  Description of Artificial Sequence: Synthetic oligonucleotide
gcugcacugcccagcccuggucacc

SEQ ID NO: 14067 - RNA, 25 nt, Artificial Sequence
  Description of Artificial Sequence: Synthetic oligonucleotide
cuacaacacagacacguuugagucc

SEQ ID NO: 14068 - RNA, 25 nt, Artificial Sequence
  Description of Artificial Sequence: Synthetic oligonucleotide
caugcccaaucccgagggccgguau

SEQ ID NO: 14069 - RNA, 25 nt, Artificial Sequence
  Description of Artificial Sequence: Synthetic oligonucleotide
uacauucggcgccagcugugugacu

SEQ ID NO: 14070 - RNA, 25 nt, Artificial Sequence
  Description of Artificial Sequence: Synthetic oligonucleotide
ugccugucccuacaacuaccuuucu

SEQ ID NO: 14071 - RNA, 25 nt, Artificial Sequence
  Description of Artificial Sequence: Synthetic oligonucleotide
uacggacgugggauccugcacccuc

SEQ ID NO: 14072 - RNA, 25 nt, Artificial Sequence
  Description of Artificial Sequence: Synthetic oligonucleotide
cgucugcccccugcacaaccaagag

SEQ ID NO: 14073 - RNA, 25 nt, Artificial Sequence
  Description of Artificial Sequence: Synthetic oligonucleotide
ggugacagcagaggauggaacacag

SEQ ID NO: 14074 - RNA, 25 nt, Artificial Sequence
  Description of Artificial Sequence: Synthetic oligonucleotide
gcggugugagaagugcagcaagccc

SEQ ID NO: 14075 - RNA, 25 nt, Artificial Sequence
  Description of Artificial Sequence: Synthetic oligonucleotide
cugugcccgagugugcuauggucug

SEQ ID NO: 14076 - RNA, 25 nt, Artificial Sequence
  Description of Artificial Sequence: Synthetic oligonucleotide
gggcauggagcacuugcgagaggug

SEQ ID NO: 14077 - RNA, 25 nt, Artificial Sequence
  Description of Artificial Sequence: Synthetic oligonucleotide
gagggcaguuaccagugccaauauc

SEQ ID NO: 14078 - RNA, 25 nt, Artificial Sequence
  Description of Artificial Sequence: Synthetic oligonucleotide
ccaggaguuugcuggcugcaagaag

SEQ ID NO: 14079 - RNA, 25 nt, Artificial Sequence
  Description of Artificial Sequence: Synthetic oligonucleotide
gaucuuugggagccuggcauuucug

SEQ ID NO: 14080 - RNA, 25 nt, Artificial Sequence
  Description of Artificial Sequence: Synthetic oligonucleotide
gccggagagcuuugauggggaccca

SEQ ID NO: 14081 - RNA, 25 nt, Artificial Sequence
  Description of Artificial Sequence: Synthetic oligonucleotide
agccuccaacacugccccgcuccag

SEQ ID NO: 14082 - RNA, 25 nt, Artificial Sequence
  Description of Artificial Sequence: Synthetic oligonucleotide
gccagagcagcuccaaguguuugag

SEQ ID NO: 14083 - RNA, 25 nt, Artificial Sequence
  Description of Artificial Sequence: Synthetic oligonucleotide
gacucuggaagagaucacagguuac

SEQ ID NO: 14084 - RNA, 25 nt, Artificial Sequence
  Description of Artificial Sequence: Synthetic oligonucleotide
ccuauacaucucagcauggccggac

SEQ ID NO: 14085 - RNA, 25 nt, Artificial Sequence
  Description of Artificial Sequence: Synthetic oligonucleotide
cagccugccugaccucagcgucuuc

SEQ ID NO: 14086 - RNA, 25 nt, Artificial Sequence
  Description of Artificial Sequence: Synthetic oligonucleotide
ccagaaccugcaaguaauccgggga

SEQ ID NO: 14087 - RNA, 25 nt, Artificial Sequence
  Description of Artificial Sequence: Synthetic oligonucleotide
acgaauucugcacaauggcgccuac

SEQ ID NO: 14088 - RNA, 25 nt, Artificial Sequence
  Description of Artificial Sequence: Synthetic oligonucleotide
cucgcugacccugcaagggcugggc

SEQ ID NO: 14089 - RNA, 25 nt, Artificial Sequence
  Description of Artificial Sequence: Synthetic oligonucleotide
caucagcuggcuggggcugcgcuca

SEQ ID NO: 14090 - RNA, 25 nt, Artificial Sequence
  Description of Artificial Sequence: Synthetic oligonucleotide
acugagggaacugggcaguggacug

SEQ ID NO: 14091 - RNA, 25 nt, Artificial Sequence
  Description of Artificial Sequence: Synthetic oligonucleotide
ggcccucauccaccauaacacccac

SEQ ID NO: 14092 - RNA, 25 nt, Artificial Sequence
  Description of Artificial Sequence: Synthetic oligonucleotide
ccucugcuucgugcacacggugccc

SEQ ID NO: 14093 - RNA, 25 nt, Artificial Sequence
  Description of Artificial Sequence: Synthetic oligonucleotide
cugggaccagcucuuucggaacccg

SEQ ID NO: 14094 - RNA, 25 nt, Artificial Sequence
  Description of Artificial Sequence: Synthetic oligonucleotide
gcaccaagcucugcuccacacugcc

SEQ ID NO: 14095 - RNA, 25 nt, Artificial Sequence
  Description of Artificial Sequence: Synthetic oligonucleotide
caaccggccagaggacgagugugug

SEQ ID NO: 14096 - RNA, 25 nt, Artificial Sequence
  Description of Artificial Sequence: Synthetic oligonucleotide
gggcgagggccuggccugccaccag

SEQ ID NO: 14097 - RNA, 25 nt, Artificial Sequence
  Description of Artificial Sequence: Synthetic oligonucleotide
gcugugcgcccgagggcacugcugg

SEQ ID NO: 14098 - RNA, 25 nt, Artificial Sequence
  Description of Artificial Sequence: Synthetic oligonucleotide
ggguccagggcccacccaguguguc

SEQ ID NO: 14099 - RNA, 25 nt, Artificial Sequence
  Description of Artificial Sequence: Synthetic oligonucleotide
caacugcagccaguuccuucggggc

SEQ ID NO: 14100 - RNA, 25 nt, Artificial Sequence
  Description of Artificial Sequence: Synthetic oligonucleotide
ccaggagugcguggaggaaugccga

SEQ ID NO: 14101 - RNA, 25 nt, Artificial Sequence
  Description of Artificial Sequence: Synthetic oligonucleotide
aguacugcaggggcuccccagggag

SEQ ID NO: 14102 - RNA, 25 nt, Artificial Sequence
  Description of Artificial Sequence: Synthetic oligonucleotide
guaugugaaugccaggcacuguuug

SEQ ID NO: 14103 - RNA, 25 nt, Artificial Sequence
  Description of Artificial Sequence: Synthetic oligonucleotide
gccgugccacccugagugucagccc

SEQ ID NO: 14104 - RNA, 25 nt, Artificial Sequence
  Description of Artificial Sequence: Synthetic oligonucleotide
ccagaauggcucagugaccuguuuu

SEQ ID NO: 14105 - RNA, 25 nt, Artificial Sequence
  Description of Artificial Sequence: Synthetic oligonucleotide
uggaccggaggcugaccagugugug

SEQ ID NO: 14106 - RNA, 25 nt, Artificial Sequence
  Description of Artificial Sequence: Synthetic oligonucleotide
ggccugugcccacuauaaggacccu

SEQ ID NO: 14107 - RNA, 25 nt, Artificial Sequence
  Description of Artificial Sequence: Synthetic oligonucleotide
ucccuucugcguggcccgcugcccc

SEQ ID NO: 14108 - RNA, 25 nt, Artificial Sequence
  Description of Artificial Sequence: Synthetic oligonucleotide
cagcggugugaaaccugaccucucc

SEQ ID NO: 14109 - RNA, 25 nt, Artificial Sequence
  Description of Artificial Sequence: Synthetic oligonucleotide
cuacaugcccaucuggaaguuucca

SEQ ID NO: 14110 - RNA, 25 nt, Artificial Sequence
  Description of Artificial Sequence: Synthetic oligonucleotide
agaugaggagggcgcaugccagccu

SEQ ID NO: 14111 - RNA, 25 nt, Artificial Sequence
  Description of Artificial Sequence: Synthetic oligonucleotide
uugccccaucaacugcacccacucc

SEQ ID NO: 14112 - RNA, 25 nt, Artificial Sequence
  Description of Artificial Sequence: Synthetic oligonucleotide
cuguguggaccuggaugacaagggc

SEQ ID NO: 14113 - RNA, 25 nt, Artificial Sequence
  Description of Artificial Sequence: Synthetic oligonucleotide
cugccccgccgagcagagagccagc

SEQ ID NO: 14114 - RNA, 25 nt, Artificial Sequence
  Description of Artificial Sequence: Synthetic oligonucleotide
cccucugacguccaucaucucugcg

SEQ ID NO: 14115 - RNA, 25 nt, Artificial Sequence
  Description of Artificial Sequence: Synthetic oligonucleotide
ggugguuggcauucugcuggucgug

SEQ ID NO: 14116 - RNA, 25 nt, Artificial Sequence
  Description of Artificial Sequence: Synthetic oligonucleotide
ggucuuggggguggucuuugggauc

SEQ ID NO: 14117 - RNA, 25 nt, Artificial Sequence
  Description of Artificial Sequence: Synthetic oligonucleotide
ccucaucaagcgacggcagcagaag

SEQ ID NO: 14118 - RNA, 25 nt, Artificial Sequence
  Description of Artificial Sequence: Synthetic oligonucleotide
gauccggaaguacacgaugcggaga

SEQ ID NO: 14119 - RNA, 25 nt, Artificial Sequence
  Description of Artificial Sequence: Synthetic oligonucleotide
acugcugcaggaaacggagcuggug

SEQ ID NO: 14120 - RNA, 25 nt, Artificial Sequence
  Description of Artificial Sequence: Synthetic oligonucleotide
ggagccgcugacaccuagcggagcg

SEQ ID NO: 14121 - RNA, 25 nt, Artificial Sequence
  Description of Artificial Sequence: Synthetic oligonucleotide
gaugcccaaccaggcgcagaugcgg

SEQ ID NO: 14122 - RNA, 25 nt, Artificial Sequence
  Description of Artificial Sequence: Synthetic oligonucleotide
gauccugaaagagacggagcugagg

SEQ ID NO: 14123 - RNA, 25 nt, Artificial Sequence
  Description of Artificial Sequence: Synthetic oligonucleotide
gaaggugaaggugcuuggaucuggc

SEQ ID NO: 14124 - RNA, 25 nt, Artificial Sequence
  Description of Artificial Sequence: Synthetic oligonucleotide
cgcuuuuggcacagucuacaagggc

SEQ ID NO: 14125 - RNA, 25 nt, Artificial Sequence
  Description of Artificial Sequence: Synthetic oligonucleotide
caucuggaucccugauggggagaau

SEQ ID NO: 14126 - RNA, 25 nt, Artificial Sequence
  Description of Artificial Sequence: Synthetic oligonucleotide
ugugaaaauuccaguggccaucaaa

SEQ ID NO: 14127 - RNA, 25 nt, Artificial Sequence
  Description of Artificial Sequence: Synthetic oligonucleotide
aguguugagggaaaacacauccccc

SEQ ID NO: 14128 - RNA, 25 nt, Artificial Sequence
  Description of Artificial Sequence: Synthetic oligonucleotide
caaagccaacaaagaaaucuuagac

SEQ ID NO: 14129 - RNA, 25 nt, Artificial Sequence
  Description of Artificial Sequence: Synthetic oligonucleotide
cgaagcauacgugauggcuggugug

SEQ ID NO: 14130 - RNA, 25 nt, Artificial Sequence
  Description of Artificial Sequence: Synthetic oligonucleotide
gggcuccccauaugucucccgccuu

SEQ ID NO: 14131 - RNA, 25 nt, Artificial Sequence
  Description of Artificial Sequence: Synthetic oligonucleotide
ucugggcaucugccugacauccacg

SEQ ID NO: 14132 - RNA, 25 nt, Artificial Sequence
  Description of Artificial Sequence: Synthetic oligonucleotide
ggugcagcuggugacacagcuuaug

SEQ ID NO: 14133 - RNA, 25 nt, Artificial Sequence
  Description of Artificial Sequence: Synthetic oligonucleotide
gcccuauggcugccucuuagaccau

SEQ ID NO: 14134 - RNA, 25 nt, Artificial Sequence
  Description of Artificial Sequence: Synthetic oligonucleotide
uguccgggaaaaccgcggacgccug

SEQ ID NO: 14135 - RNA, 25 nt, Artificial Sequence
  Description of Artificial Sequence: Synthetic oligonucleotide
gggcucccaggaccugcugaacugg

SEQ ID NO: 14136 - RNA, 25 nt, Artificial Sequence
  Description of Artificial Sequence: Synthetic oligonucleotide
guguaugcagauugccaaggggaug

SEQ ID NO: 14137 - RNA, 25 nt, Artificial Sequence
  Description of Artificial Sequence: Synthetic oligonucleotide
gagcuaccuggaggaugugcggcuc

SEQ ID NO: 14138 - RNA, 25 nt, Artificial Sequence
  Description of Artificial Sequence: Synthetic oligonucleotide
cguacacagggacuuggccgcucgg

SEQ ID NO: 14139 - RNA, 25 nt, Artificial Sequence
  Description of Artificial Sequence: Synthetic oligonucleotide
gaacgugcuggucaagagucccaac

SEQ ID NO: 14140 - RNA, 25 nt, Artificial Sequence
  Description of Artificial Sequence: Synthetic oligonucleotide
ccaugucaaaauuacagacuucggg

SEQ ID NO: 14141 - RNA, 25 nt, Artificial Sequence
  Description of Artificial Sequence: Synthetic oligonucleotide
gcuggcucggcugcuggacauugac

SEQ ID NO: 14142 - RNA, 25 nt, Artificial Sequence
  Description of Artificial Sequence: Synthetic oligonucleotide
cgagacagaguaccaugcagauggg

SEQ ID NO: 14143 - RNA, 25 nt, Artificial Sequence
  Description of Artificial Sequence: Synthetic oligonucleotide
gggcaaggugcccaucaaguggaug

SEQ ID NO: 14144 - RNA, 25 nt, Artificial Sequence
  Description of Artificial Sequence: Synthetic oligonucleotide
ggcgcuggaguccauucuccgccgg

SEQ ID NO: 14145 - RNA, 25 nt, Artificial Sequence
  Description of Artificial Sequence: Synthetic oligonucleotide
gcgguucacccaccagagugaugug

SEQ ID NO: 14146 - RNA, 25 nt, Artificial Sequence
  Description of Artificial Sequence: Synthetic oligonucleotide
guggaguuauggugugacugugugg

SEQ ID NO: 14147 - RNA, 25 nt, Artificial Sequence
  Description of Artificial Sequence: Synthetic oligonucleotide
ggagcugaugacuuuuggggccaaa

SEQ ID NO: 14148 - RNA, 25 nt, Artificial Sequence
  Description of Artificial Sequence: Synthetic oligonucleotide
accuuacgaugggaucccagcccgg

SEQ ID NO: 14149 - RNA, 25 nt, Artificial Sequence
  Description of Artificial Sequence: Synthetic oligonucleotide
ggagaucccugaccugcuggaaaag

SEQ ID NO: 14150 - RNA, 25 nt, Artificial Sequence
  Description of Artificial Sequence: Synthetic oligonucleotide
gggggagcggcugccccagcccccc

SEQ ID NO: 14151 - RNA, 25 nt, Artificial Sequence
  Description of Artificial Sequence: Synthetic oligonucleotide
caucugcaccauugaugucuacaug

SEQ ID NO: 14152 - RNA, 25 nt, Artificial Sequence
  Description of Artificial Sequence: Synthetic oligonucleotide
gaucauggucaaauguuggaugauu

SEQ ID NO: 14153 - RNA, 25 nt, Artificial Sequence
  Description of Artificial Sequence: Synthetic oligonucleotide
ugacucugaaugucggccaagauuc

SEQ ID NO: 14154 - RNA, 25 nt, Artificial Sequence
  Description of Artificial Sequence: Synthetic oligonucleotide
ccgggaguuggugucugaauucucc

SEQ ID NO: 14155 - RNA, 25 nt, Artificial Sequence
  Description of Artificial Sequence: Synthetic oligonucleotide
ccgcauggccagggacccccagcgc

SEQ ID NO: 14156 - RNA, 25 nt, Artificial Sequence
  Description of Artificial Sequence: Synthetic oligonucleotide
cuuuguggucauccagaaugaggac

SEQ ID NO: 14157 - RNA, 25 nt, Artificial Sequence
  Description of Artificial Sequence: Synthetic oligonucleotide
cuugggcccagccagucccuuggac

SEQ ID NO: 14158 - RNA, 25 nt, Artificial Sequence
  Description of Artificial Sequence: Synthetic oligonucleotide
cagcaccuucuaccgcucacugcug

SEQ ID NO: 14159 - RNA, 25 nt, Artificial Sequence
  Description of Artificial Sequence: Synthetic oligonucleotide
ggaggacgaugacaugggggaccug

SEQ ID NO: 14160 - RNA, 25 nt, Artificial Sequence
  Description of Artificial Sequence: Synthetic oligonucleotide
gguggaugcugaggaguaucuggua

SEQ ID NO: 14161 - RNA, 25 nt, Artificial Sequence
  Description of Artificial Sequence: Synthetic oligonucleotide
accccagcagggcuucuucugucca

SEQ ID NO: 14162 - RNA, 25 nt, Artificial Sequence
  Description of Artificial Sequence: Synthetic oligonucleotide
agacccugccccgggcgcugggggc

SEQ ID NO: 14163 - RNA, 25 nt, Artificial Sequence
  Description of Artificial Sequence: Synthetic oligonucleotide
caugguccaccacaggcaccgcagc

SEQ ID NO: 14164 - RNA, 25 nt, Artificial Sequence
  Description of Artificial Sequence: Synthetic oligonucleotide
cucaucuaccaggaguggcgguggg

SEQ ID NO: 14165 - RNA, 25 nt, Artificial Sequence
  Description of Artificial Sequence: Synthetic oligonucleotide
ggaccugacacuagggcuggagccc

SEQ ID NO: 14166 - RNA, 25 nt, Artificial Sequence
  Description of Artificial Sequence: Synthetic oligonucleotide
cucugaagaggaggcccccaggucu

SEQ ID NO: 14167 - RNA, 25 nt, Artificial Sequence
  Description of Artificial Sequence: Synthetic oligonucleotide
uccacuggcacccuccgaaggggcu

SEQ ID NO: 14168 - RNA, 25 nt, Artificial Sequence
  Description of Artificial Sequence: Synthetic oligonucleotide
uggcuccgauguauuugauggugac

SEQ ID NO: 14169 - RNA, 25 nt, Artificial Sequence
  Description of Artificial Sequence: Synthetic oligonucleotide
ccugggaaugggggcagccaagggg

SEQ ID NO: 14170 - RNA, 25 nt, Artificial Sequence
  Description of Artificial Sequence: Synthetic oligonucleotide
gcugcaaagccuccccacacaugac

SEQ ID NO: 14171 - RNA, 25 nt, Artificial Sequence
  Description of Artificial Sequence: Synthetic oligonucleotide
ccccagcccucuacagcgguacagu

SEQ ID NO: 14172 - RNA, 25 nt, Artificial Sequence
  Description of Artificial Sequence: Synthetic oligonucleotide
ugaggaccccacaguaccccugccc

SEQ ID NO: 14173 - RNA, 25 nt, Artificial Sequence
  Description of Artificial Sequence: Synthetic oligonucleotide
cucugagacugauggcuacguugcc

SEQ ID NO: 14174 - RNA, 25 nt, Artificial Sequence
  Description of Artificial Sequence: Synthetic oligonucleotide
cccccugaccugcagcccccagccu

SEQ ID NO: 14175 - RNA, 25 nt, Artificial Sequence
  Description of Artificial Sequence: Synthetic oligonucleotide
ugaauaugugaaccagccagauguu

SEQ ID NO: 14176 - RNA, 25 nt, Artificial Sequence
  Description of Artificial Sequence: Synthetic oligonucleotide
ucggccccagcccccuucgccccga

SEQ ID NO: 14177 - RNA, 25 nt, Artificial Sequence
  Description of Artificial Sequence: Synthetic oligonucleotide
agagggcccucugccugcugcccga

SEQ ID NO: 14178 - RNA, 25 nt, Artificial Sequence
  Description of Artificial Sequence: Synthetic oligonucleotide
accugcuggugccacucuggaaagg

SEQ ID NO: 14179 - RNA, 25 nt, Artificial Sequence
  Description of Artificial Sequence: Synthetic oligonucleotide
gcccaagacucucuccccagggaag

SEQ ID NO: 14180 - RNA, 25 nt, Artificial Sequence
  Description of Artificial Sequence: Synthetic oligonucleotide
gaauggggucgucaaagacguuuuu

SEQ ID NO: 14181 - RNA, 25 nt, Artificial Sequence
  Description of Artificial Sequence: Synthetic oligonucleotide
ugccuuugggggugccguggagaac

SEQ ID NO: 14182 - RNA, 25 nt, Artificial Sequence
  Description of Artificial Sequence: Synthetic oligonucleotide
ccccgaguacuugacaccccaggga

SEQ ID NO: 14183 - RNA, 25 nt, Artificial Sequence
  Description of Artificial Sequence: Synthetic oligonucleotide
aggagcugccccucagccccacccu

SEQ ID NO: 14184 - RNA, 25 nt, Artificial Sequence
  Description of Artificial Sequence: Synthetic oligonucleotide
uccuccugccuucagcccagccuuc

SEQ ID NO: 14185 - RNA, 25 nt, Artificial Sequence
  Description of Artificial Sequence: Synthetic oligonucleotide
cgacaaccucuauuacugggaccag

SEQ ID NO: 14186 - RNA, 25 nt, Artificial Sequence
  Description of Artificial Sequence: Synthetic oligonucleotide
ggacccaccagagcggggggcucca

SEQ ID NO: 14187 - RNA, 25 nt, Artificial Sequence
  Description of Artificial Sequence: Synthetic oligonucleotide
acccagcaccuucaaagggacaccu

SEQ ID NO: 14188 - RNA, 25 nt, Artificial Sequence
  Description of Artificial Sequence: Synthetic oligonucleotide
uacggcagagaacccagaguaccug

SEQ ID NO: 14189 - RNA, 25 nt, Artificial Sequence
  Description of Artificial Sequence: Synthetic oligonucleotide
gggucuggacgugccagugugaacc

SEQ ID NO: 14190 - RNA, 25 nt, Artificial Sequence
  Description of Artificial Sequence: Synthetic oligonucleotide
cagaaggccaaguccgcagaagccc

SEQ ID NO: 14191 - RNA, 25 nt, Artificial Sequence
  Description of Artificial Sequence: Synthetic oligonucleotide
cugauguguccucagggagcaggga

SEQ ID NO: 14192 - RNA, 25 nt, Artificial Sequence
  Description of Artificial Sequence: Synthetic oligonucleotide
aaggccugacuucugcuggcaucaa

SEQ ID NO: 14193 - RNA, 25 nt, Artificial Sequence
  Description of Artificial Sequence: Synthetic oligonucleotide
agaggugggagggcccuccgaccac

SEQ ID NO: 14194 - RNA, 25 nt, Artificial Sequence
  Description of Artificial Sequence: Synthetic oligonucleotide
cuuccaggggaaccugccaugccag

SEQ ID NO: 14195 - RNA, 25 nt, Artificial Sequence
  Description of Artificial Sequence: Synthetic oligonucleotide
ggaaccuguccuaaggaaccuuccu

SEQ ID NO: 14196 - RNA, 25 nt, Artificial Sequence
  Description of Artificial Sequence: Synthetic oligonucleotide
uuccugcuugaguucccagauggcu

SEQ ID NO: 14197 - RNA, 25 nt, Artificial Sequence
  Description of Artificial Sequence: Synthetic oligonucleotide
uggaagggguccagccucguuggaa

SEQ ID NO: 14198 - RNA, 25 nt, Artificial Sequence
  Description of Artificial Sequence: Synthetic oligonucleotide
agaggaacagcacuggggagucuuu

SEQ ID NO: 14199 - RNA, 25 nt, Artificial Sequence
  Description of Artificial Sequence: Synthetic oligonucleotide
uguggauucugaggcccugcccaau

SEQ ID NO: 14200 - RNA, 25 nt, Artificial Sequence
  Description of Artificial Sequence: Synthetic oligonucleotide
ugagacucuaggguccaguggaugc

SEQ ID NO: 14201 - RNA, 25 nt, Artificial Sequence
  Description of Artificial Sequence: Synthetic oligonucleotide
ccacagcccagcuuggcccuuuccu

SEQ ID NO: 14202 - RNA, 25 nt, Artificial Sequence
  Description of Artificial Sequence: Synthetic oligonucleotide
uuccagauccuggguacugaaagcc

SEQ ID NO: 14203 - RNA, 25 nt, Artificial Sequence
  Description of Artificial Sequence: Synthetic oligonucleotide
cuuagggaagcuggccugagagggg

SEQ ID NO: 14204 - RNA, 25 nt, Artificial Sequence
  Description of Artificial Sequence: Synthetic oligonucleotide
gaagcggcccuaagggagugucuaa

SEQ ID NO: 14205 - RNA, 25 nt, Artificial Sequence
  Description of Artificial Sequence: Synthetic oligonucleotide
agaacaaaagcgacccauucagaga

SEQ ID NO: 14206 - RNA, 25 nt, Artificial Sequence
  Description of Artificial Sequence: Synthetic oligonucleotide
acugucccugaaaccuaguacugcc

SEQ ID NO: 14207 - RNA, 25 nt, Artificial Sequence
  Description of Artificial Sequence: Synthetic oligonucleotide
cccccaugaggaaggaacagcaaug

SEQ ID NO: 14208 - RNA, 25 nt, Artificial Sequence
  Description of Artificial Sequence: Synthetic oligonucleotide
ggugucaguauccaggcuuuguaca

SEQ ID NO: 14209 - RNA, 25 nt, Artificial Sequence
  Description of Artificial Sequence: Synthetic oligonucleotide
agagugcuuuucuguuuaguuuuua

SEQ ID NO: 14210 - RNA, 25 nt, Artificial Sequence
  Description of Artificial Sequence: Synthetic oligonucleotide
acuuuuuuuguuuuguuuuuuuaaa

SEQ ID NO: 14211 - RNA, 25 nt, Artificial Sequence
  Description of Artificial Sequence: Synthetic oligonucleotide
agaugaaauaaagacccagggggag

SEQ ID NO: 14212 - RNA, 25 nt, Artificial Sequence
  Description of Artificial Sequence: Synthetic oligonucleotide
gaauggguguuguauggggaggcaa

SEQ ID NO: 14213 - RNA, 25 nt, Artificial Sequence
  Description of Artificial Sequence: Synthetic oligonucleotide
agugugggggguccuucuccacacc

SEQ ID NO: 14214 - RNA, 25 nt, Artificial Sequence
  Description of Artificial Sequence: Synthetic oligonucleotide
ccacuuuguccauuugcaaauauau

SEQ ID NO: 14215 - RNA, 25 nt, Artificial Sequence
  Description of Artificial Sequence: Synthetic oligonucleotide
gcaaauauauuuuggaaaacagcua

SEQ ID NO: 14216 - RNA, 25 nt, Artificial Sequence
  Description of Artificial Sequence: Synthetic oligonucleotide
ggaggagguggaggaggagggcugc

SEQ ID NO: 14217 - RNA, 25 nt, Artificial Sequence
  Description of Artificial Sequence: Synthetic oligonucleotide
cuugaggaaguauaagaaugaaguu

SEQ ID NO: 14218 - RNA, 25 nt, Artificial Sequence
  Description of Artificial Sequence: Synthetic oligonucleotide
ugugaagcugagauuccccuccauu

SEQ ID NO: 14219 - RNA, 25 nt, Artificial Sequence
  Description of Artificial Sequence: Synthetic oligonucleotide
ugggaccggagaaaccaggggagcc

SEQ ID NO: 14220 - RNA, 25 nt, Artificial Sequence
  Description of Artificial Sequence: Synthetic oligonucleotide
cccccgggcagccgcgcgccccuuc

SEQ ID NO: 14221 - RNA, 25 nt, Artificial Sequence
  Description of Artificial Sequence: Synthetic oligonucleotide
cccacggggcccuuuacugcgccgc

SEQ ID NO: 14222 - RNA, 25 nt, Artificial Sequence
  Description of Artificial Sequence: Synthetic oligonucleotide
cgcgcccggcccccaccccucgcag

SEQ ID NO: 14223 - RNA, 25 nt, Artificial Sequence
  Description of Artificial Sequence: Synthetic oligonucleotide
gcaccccgcgccccgcgcccuccca

SEQ ID NO: 14224 - RNA, 25 nt, Artificial Sequence
  Description of Artificial Sequence: Synthetic oligonucleotide
agccggguccagccggagccauggg

SEQ ID NO: 14225 - RNA, 25 nt, Artificial Sequence
  Description of Artificial Sequence: Synthetic oligonucleotide
ggccggagccgcagugagcaccaug

SEQ ID NO: 14226 - RNA, 25 nt, Artificial Sequence
  Description of Artificial Sequence: Synthetic oligonucleotide
ggagcuggcggccuugugccgcugg

SEQ ID NO: 14227 - RNA, 25 nt, Artificial Sequence
  Description of Artificial Sequence: Synthetic oligonucleotide
ggggcuccuccucgcccucuugccc

SEQ ID NO: 14228 - RNA, 25 nt, Artificial Sequence
  Description of Artificial Sequence: Synthetic oligonucleotide
ccccggagccgcgagcacccaagug

SEQ ID NO: 14229 - RNA, 5511 nt, Homo sapiens
acacacacacaccccuccccugccaucccuccccggacuccggcuccggcuccgauugcaauuugcaaccuccgcugccgucgccgcagcagccaccaauucgccagcgguucagguggcucuugccucgauguccuagccuaggggcccccgggccggacuuggcugggcucccuucacccucugcggagucaugagggcgaacgacgcucugcaggugcugggcuugcuuuucagccuggcccggggcuccgaggugggcaacucucaggcaguguguccugggacucugaauggccugagugugaccggcgaugcugagaaccaauaccagacacuguacaagcucuacgagaggugugagguggugauggggaaccuugagauugugcucacgggacacaaugccgaccucuccuuccugcaguggauucgagaagugacaggcuauguccucguggccaugaaugaauucucuacucuaccauugcccaaccuccgcguggugcgagggacccaggucuacgaugggaaguuugccaucuucgucauguugaacuauaacaccaacuccagccacgcucugcgccagcuccgcuugacucagcucaccgagauucugucaggggguguuuauauugagaagaacgauaagcuuugucacauggacacaauugacuggagggacaucgugagggaccgagaugcugagauaguggugaaggacaauggcagaagcuguccccccugucaugagguuugcaaggggcgaugcugggguccuggaucagaagacugccagacauugaccaagaccaucugugcuccucaguguaauggucacugcuuugggcccaaccccaaccagugcugccaugaugagugugccgggggcugcucaggcccucaggacacagacugcuuugccugccggcacuucaaugacaguggagccuguguaccucgcuguccacagccucuugucuacaacaagcuaacuuuccagcuggaacccaauccccacaccaaguaucaguauggaggaguuuguguagccagcuguccccauaacuuugugguggaucaaacauccugugucagggccuguccuccugacaagauggaaguagauaaaaaugggcucaagaugugugagccuugugggggacuaugucccaaagccugugagggaacaggcucugggagccgcuuccagacuguggacucgagcaacauugauggauuugugaacugcaccaagauccugggcaaccuggacuuucugaucaccggccucaauggagaccccuggcacaagaucccugcccuggacccagagaagcucaaugucuuccggacaguacgggagaucacagguuaccugaacauccaguccuggccgccccacaugcacaacuucaguguuuuuuccaauuugacaaccauuggaggcagaagccucuacaaccggggcuucucauuguugaucaugaagaacuugaaugucacaucucugggcuuccgaucccugaaggaaauuagugcugggcguaucuauauaagugccaauaggcagcucugcuaccaccacucuuugaacuggaccaaggugcuucgggggccuacggaagagcgacuagacaucaagcauaaucggccgcgcagagacugcguggcagagggcaaagugugugacccacugugcuccucugggggaugcuggggcccaggcccuggucagugcuuguccugucgaaauuauagccgaggaggugucugugugacccacugcaacuuucugaauggggagccucgagaauuugcccaugaggccgaaugcuucuccugccacccggaaugccaacccauggagggcacugccacaugcaauggcucgggcucugauacuugugcucaaugugcccauuuucgagaugggccccacugugugagcagcugcccccauggaguccuaggugccaagggcccaaucuacaaguacccagauguucagaaugaaugucggcccugccaugagaacugcacccagggguguaaaggaccagagcuucaagacuguuuaggacaaacacuggugcugaucggcaaaacccaucugacaauggcuuugacagugauagcaggauugguagugauuuucaugaugcugggcggcacuuuucucuacuggcgugggcgccggauucagaauaaaagggcuaugaggcgauacuuggaacggggugagagcauagagccucuggaccccagugagaaggcuaacaaagucuuggccagaaucuucaaagagacagagcuaaggaagcuuaaagugcuuggcucgggugucuuuggaacugugcacaaaggaguguggaucccugagggugaaucaaucaagauuccagucugcauuaaagucauugaggacaagaguggacggcagaguuuucaagcugugacagaucauaugcuggccauuggcagccuggaccaugcccacauuguaaggcugcugggacuaugcccagggucaucucugcagcuugucacucaauauuugccucuggguucucugcuggaucaugugagacaacaccggggggcacuggggccacagcugcugcucaacuggggaguacaaauugccaagggaauguacuaccuugaggaacaugguauggugcauagaaaccuggcugcccgaaacgugcuacucaagucacccagucagguucagguggcagauuuugguguggcugaccugcugccuccugaugauaagcagcugcuauacagugaggccaagacuccaauuaaguggauggcccuugagaguauccacuuugggaaauacacacaccagagugaugucuggagcuauggugugacaguuugggaguugaugaccuucggggcagagcccuaugcagggcuacgauuggcugaaguaccagaccugcuagagaagggggagcgguuggcacagccccagaucugcacaauugaugucuacauggugauggucaaguguuggaugauugaugagaacauucgcccaaccuuuaaagaacuagccaaugaguucaccaggauggcccgagacccaccacgguaucuggucauaaagagagagagugggccuggaauagccccugggccagagccccauggucugacaaacaagaagcuagaggaaguagagcuggagccagaacuagaccuagaccuagacuuggaagcagaggaggacaaccuggcaaccaccacacugggcuccgcccucagccuaccaguuggaacacuuaaucggccacgugggagccagagccuuuuaaguccaucaucuggauacaugcccaugaaccaggguaaucuuggggagucuugccaggagucugcaguuucugggagcagugaacggugcccccguccagucucucuacacccaaugccacggggaugccuggcaucagagucaucagaggggcauguaacaggcucugaggcugagcuccaggagaaagugucaauguguaggagccggagcaggagccggagcccacggccacgcggagauagcgccuaccauucccagcgccacagucugcugacuccuguuaccccacucuccccacccggguuagaggaagaggaugucaacgguuaugucaugccagauacacaccucaaagguacucccuccucccgggaaggcacccuuucuucagugggucucaguucuguccuggguacugaagaagaagaugaagaugaggaguaugaauacaugaaccggaggagaaggcacaguccaccucaucccccuaggccaaguucccuugaggagcuggguuaugaguacauggauguggggucagaccucagugccucucugggcagcacacagaguugcccacuccacccuguacccaucaugcccacugcaggcacaacuccagaugaagacuaugaauauaugaaucggcaacgagauggaggugguccugggggugauuaugcagccaugggggccugcccagcaucugagcaaggguaugaagagaugagagcuuuucaggggccuggacaucaggccccccauguccauuaugcccgccuaaaaacucuacguagcuuagaggcuacagacucugccuuugauaacccugauuacuggcauagcaggcuuuuccccaaggcuaaugcccagagaacguaacuccugcucccuguggcacucagggagcauuuaauggcagcuagugccuuuagaggguaccgucuucucccuauucccucucucucccaggucccagccccuuuuccccagucccagacaauuccauucaaucuuuggaggcuuuuaaacauuuugacacaaaauucuuaugguauguagccagcugugcacuuucuucucuuucccaaccccaggaaagguuuuccuuauuuugugugcuuucccagucccauuccucagcuucuucacaggcacuccuggagauaugaaggauuacucuccauaucccuuccucucaggcucuugacuacuuggaacuaggcucuuaugugugccuuuguuucccaucagacugucaagaagaggaaagggaggaaaccuagcagaggaaaguguaauuuugguuuaugacucuuaacccccuagaaagacagaagcuuaaaaucugugaagaaagagguuaggaguagauauugauuacuaucauaauucagcacuuaacuaugagccaggcaucauacuaaacuucaccuacauuaucucacuuaguccuuuaucauccuuaaaacaauucugugacauacauauuaucucauuuuacacaaagggaagucgggcaugguggcucaugccuguaaucucagcacuuugggaggcugaggcagaaggauuaccugaggcaaggaguuugagaccagcuuagccaacauaguaagacccccaucucuuuaaaaaaaaaaaaaaaaaaaaaaaaaaaacuuuagaacugggugcaguggcucaugccuguaaucccagccagcacuuugggaggcugagaugggaagaucacuugagcccagaauuagagauaagccuauggaaacauagcaagacacugucucuacaggggaaaaaaaaaaaagaaacugagccuuaaagagaugaaauaaauuaagcaguagauccaggaugcaaaauccucccaauuccugugcaugugcucuuauuguaaggugccaagaaaaacugauuuaaguuacagcccuuguuuaaggggcacuguuucuuguuuuugcacugaaucaagucuaaccccaacagccacauccuccuauaccuagacaucucaucucaggaaguggugguggggguagucagaaggaaaaauaacuggacaucuuuguguaaaccauaauccacaugugccguaaaugaucuucacuccuuauccgagggcaaauucacaaggauccccaagauccacuuuuagaagccauucucaucca

SEQ ID NO: 14230 - RNA, 1050 nt, Homo sapiens
acacacacacaccccuccccugccaucccuccccggacuccggcuccggcuccgauugcaauuugcaaccuccgcugccgucgccgcagcagccaccaauucgccagcgguucagguggcucuugccucgauguccuagccuaggggcccccgggccggacuuggcugggcucccuucacccucugcggagucaugagggcgaacgacgcucugcaggugcugggcuugcuuuucagccuggcccggggcuccgaggugggcaacucucaggcaguguguccugggacucugaauggccugagugugaccggcgaugcugagaaccaauaccagacacuguacaagcucuacgagaggugugagguggugauggggaaccuugagauugugcucacgggacacaaugccgaccucuccuuccugcaguggauucgagaagugacaggcuauguccucguggccaugaaugaauucucuacucuaccauugcccaaccuccgcguggugcgagggacccaggucuacgaugggaaguuugccaucuucgucauguugaacuauaacaccaacuccagccacgcucugcgccagcuccgcuugacucagcucaccggucaguucccgaugguuccuucuggccucaccccucagccagcccaagacugguaccuccuugaugaugacccaagacugcucacucuaagugccucuuccaaggugccugucaccuuggccgcugucuaaagguccauugcucccuaagcaauagagggcccccaguagggggagcuaggggcaucugcuccagggaaaggaacccuguguccuuguggggcuggagucagagcuggaucuguuaaccguuuuucuaauuucaaaguacaguguaccggaggccaggccugauggcuuacaccuguaaucccagcauuuugggaggccaaggagggcagaucacuugagaucaggaguuugagaccagccuggccaacauggcgaaacccugucucuacuaaaaauacaaaaaaauaaaauaaaauaaaaaauua

SEQ ID NO: 14231 - RNA, 19 nt, Artificial Sequence
  Description of Artificial Sequence: Synthetic oligonucleotide
acacacacacaccccuccc

SEQ ID NO: 14232 - RNA, 19 nt, Artificial Sequence
  Description of Artificial Sequence: Synthetic oligonucleotide
ccugccaucccuccccgga

SEQ ID NO: 14233 - RNA, 19 nt, Artificial Sequence
  Description of Artificial Sequence: Synthetic oligonucleotide
acuccggcuccggcuccga

SEQ ID NO: 14234 - RNA, 19 nt, Artificial Sequence
  Description of Artificial Sequence: Synthetic oligonucleotide
auugcaauuugcaaccucc

SEQ ID NO: 14235 - RNA, 19 nt, Artificial Sequence
  Description of Artificial Sequence: Synthetic oligonucleotide
cgcugccgucgccgcagca

SEQ ID NO: 14236 - RNA, 19 nt, Artificial Sequence
  Description of Artificial Sequence: Synthetic oligonucleotide
agccaccaauucgccagcg

SEQ ID NO: 14237 - RNA, 19 nt, Artificial Sequence
  Description of Artificial Sequence: Synthetic oligonucleotide
gguucagguggcucuugcc

SEQ ID NO: 14238 - RNA, 19 nt, Artificial Sequence
  Description of Artificial Sequence: Synthetic oligonucleotide
cucgauguccuagccuagg

SEQ ID NO: 14239 - RNA, 19 nt, Artificial Sequence
  Description of Artificial Sequence: Synthetic oligonucleotide
gggcccccgggccggacuu

SEQ ID NO: 14240 - RNA, 19 nt, Artificial Sequence
  Description of Artificial Sequence: Synthetic oligonucleotide
uggcugggcucccuucacc

SEQ ID NO: 14241 - RNA, 19 nt, Artificial Sequence
  Description of Artificial Sequence: Synthetic oligonucleotide
ccucugcggagucaugagg

SEQ ID NO: 14242 - RNA, 19 nt, Artificial Sequence
  Description of Artificial Sequence: Synthetic oligonucleotide
ggcgaacgacgcucugcag

SEQ ID NO: 14243 - RNA, 19 nt, Artificial Sequence
  Description of Artificial Sequence: Synthetic oligonucleotide
ggugcugggcuugcuuuuc

SEQ ID NO: 14244 - RNA, 19 nt, Artificial Sequence
  Description of Artificial Sequence: Synthetic oligonucleotide
cagccuggcccggggcucc

SEQ ID NO: 14245 - RNA, 19 nt, Artificial Sequence
  Description of Artificial Sequence: Synthetic oligonucleotide
cgaggugggcaacucucag

SEQ ID NO: 14246 - RNA, 19 nt, Artificial Sequence
  Description of Artificial Sequence: Synthetic oligonucleotide
ggcaguguguccugggacu

SEQ ID NO: 14247 - RNA, 19 nt, Artificial Sequence
  Description of Artificial Sequence: Synthetic oligonucleotide
ucugaauggccugagugug

SEQ ID NO: 14248 - RNA, 19 nt, Artificial Sequence
  Description of Artificial Sequence: Synthetic oligonucleotide
gaccggcgaugcugagaac

SEQ ID NO: 14249 - RNA, 19 nt, Artificial Sequence
  Description of Artificial Sequence: Synthetic oligonucleotide
ccaauaccagacacuguac

SEQ ID NO: 14250 - RNA, 19 nt, Artificial Sequence
  Description of Artificial Sequence: Synthetic oligonucleotide
caagcucuacgagaggugu

SEQ ID NO: 14251 - RNA, 19 nt, Artificial Sequence
  Description of Artificial Sequence: Synthetic oligonucleotide
ugagguggugauggggaac

SEQ ID NO: 14252 - RNA, 19 nt, Artificial Sequence
  Description of Artificial Sequence: Synthetic oligonucleotide
ccuugagauugugcucacg

SEQ ID NO: 14253 - RNA, 19 nt, Artificial Sequence
  Description of Artificial Sequence: Synthetic oligonucleotide
gggacacaaugccgaccuc

SEQ ID NO: 14254 - RNA, 19 nt, Artificial Sequence
  Description of Artificial Sequence: Synthetic oligonucleotide
cuccuuccugcaguggauu

SEQ ID NO: 14255 - RNA, 19 nt, Artificial Sequence
  Description of Artificial Sequence: Synthetic oligonucleotide
ucgagaagugacaggcuau

SEQ ID NO: 14256 - RNA, 19 nt, Artificial Sequence
  Description of Artificial Sequence: Synthetic oligonucleotide
uguccucguggccaugaau

SEQ ID NO: 14257 - RNA, 19 nt, Artificial Sequence
  Description of Artificial Sequence: Synthetic oligonucleotide
ugaauucucuacucuacca

SEQ ID NO: 14258 - RNA, 19 nt, Artificial Sequence
  Description of Artificial Sequence: Synthetic oligonucleotide
auugcccaaccuccgcgug

SEQ ID NO: 14259 - RNA, 19 nt, Artificial Sequence
  Description of Artificial Sequence: Synthetic oligonucleotide
ggugcgagggacccagguc

SEQ ID NO: 14260 - RNA, 19 nt, Artificial Sequence
  Description of Artificial Sequence: Synthetic oligonucleotide
cuacgaugggaaguuugcc

SEQ ID NO: 14261 - RNA, 19 nt, Artificial Sequence
  Description of Artificial Sequence: Synthetic oligonucleotide
caucuucgucauguugaac

SEQ ID NO: 14262 - RNA, 19 nt, Artificial Sequence
  Description of Artificial Sequence: Synthetic oligonucleotide
cuauaacaccaacuccagc

SEQ ID NO: 14263 - RNA, 19 nt, Artificial Sequence
  Description of Artificial Sequence: Synthetic oligonucleotide
ccacgcucugcgccagcuc

SEQ ID NO: 14264 - RNA, 19 nt, Artificial Sequence
  Description of Artificial Sequence: Synthetic oligonucleotide
ccgcuugacucagcucacc

SEQ ID NO: 14265 - RNA, 19 nt, Artificial Sequence
  Description of Artificial Sequence: Synthetic oligonucleotide
cggucaguucccgaugguu

SEQ ID NO: 14266 - RNA, 19 nt, Artificial Sequence
  Description of Artificial Sequence: Synthetic oligonucleotide
uccuucuggccucaccccu

SEQ ID NO: 14267 - RNA, 19 nt, Artificial Sequence
  Description of Artificial Sequence: Synthetic oligonucleotide
ucagccagcccaagacugg

SEQ ID NO: 14268 - RNA, 19 nt, Artificial Sequence
  Description of Artificial Sequence: Synthetic oligonucleotide
guaccuccuugaugaugac

SEQ ID NO: 14269 - RNA, 19 nt, Artificial Sequence
  Description of Artificial Sequence: Synthetic oligonucleotide
cccaagacugcucacucua

SEQ ID NO: 14270 - RNA, 19 nt, Artificial Sequence
  Description of Artificial Sequence: Synthetic oligonucleotide
aagugccucuuccaaggug

SEQ ID NO: 14271 - RNA, 19 nt, Artificial Sequence
  Description of Artificial Sequence: Synthetic oligonucleotide
gccugucaccuuggccgcu

SEQ ID NO: 14272 - RNA, 19 nt, Artificial Sequence
  Description of Artificial Sequence: Synthetic oligonucleotide
ugucuaaagguccauugcu

SEQ ID NO: 14273 - RNA, 19 nt, Artificial Sequence
  Description of Artificial Sequence: Synthetic oligonucleotide
ucccuaagcaauagagggc

SEQ ID NO: 14274 - RNA, 19 nt, Artificial Sequence
  Description of Artificial Sequence: Synthetic oligonucleotide
cccccaguagggggagcua

SEQ ID NO: 14275 - RNA, 19 nt, Artificial Sequence
  Description of Artificial Sequence: Synthetic oligonucleotide
aggggcaucugcuccaggg

SEQ ID NO: 14276 - RNA, 19 nt, Artificial Sequence
  Description of Artificial Sequence: Synthetic oligonucleotide
gaaaggaacccuguguccu

SEQ ID NO: 14277 - RNA, 19 nt, Artificial Sequence
  Description of Artificial Sequence: Synthetic oligonucleotide
uuguggggcuggagucaga

SEQ ID NO: 14278 - RNA, 19 nt, Artificial Sequence
  Description of Artificial Sequence: Synthetic oligonucleotide
agcuggaucuguuaaccgu

SEQ ID NO: 14279 - RNA, 19 nt, Artificial Sequence
  Description of Artificial Sequence: Synthetic oligonucleotide
uuuuucuaauuucaaagua

SEQ ID NO: 14280 - RNA, 19 nt, Artificial Sequence
  Description of Artificial Sequence: Synthetic oligonucleotide
acaguguaccggaggccag

SEQ ID NO: 14281 - RNA, 19 nt, Artificial Sequence
  Description of Artificial Sequence: Synthetic oligonucleotide
ggccugauggcuuacaccu

SEQ ID NO: 14282 - RNA, 19 nt, Artificial Sequence
  Description of Artificial Sequence: Synthetic oligonucleotide
uguaaucccagcauuuugg

SEQ ID NO: 14283 - RNA, 19 nt, Artificial Sequence
  Description of Artificial Sequence: Synthetic oligonucleotide
ggaggccaaggagggcaga

SEQ ID NO: 14284 - RNA, 19 nt, Artificial Sequence
  Description of Artificial Sequence: Synthetic oligonucleotide
aucacuugagaucaggagu

SEQ ID NO: 14285 - RNA, 19 nt, Artificial Sequence
  Description of Artificial Sequence: Synthetic oligonucleotide
uuugagaccagccuggcca

SEQ ID NO: 14286 - RNA, 19 nt, Artificial Sequence
  Description of Artificial Sequence: Synthetic oligonucleotide
aacauggcgaaacccuguc

SEQ ID NO: 14287 - RNA, 19 nt, Artificial Sequence
  Description of Artificial Sequence: Synthetic oligonucleotide
cucuacuaaaaauacaaaa

SEQ ID NO: 14288 - RNA, 19 nt, Artificial Sequence
  Description of Artificial Sequence: Synthetic oligonucleotide
aaaauaaaauaaaauaaaa

SEQ ID NO: 14289 - RNA, 19 nt, Artificial Sequence
  Description of Artificial Sequence: Synthetic oligonucleotide
aaaauaaaauaaaaaauua

SEQ ID NO: 14290 - RNA, 19 nt, Artificial Sequence
  Description of Artificial Sequence: Synthetic oligonucleotide
cgagauucugucagggggu

SEQ ID NO: 14291 - RNA, 19 nt, Artificial Sequence
  Description of Artificial Sequence: Synthetic oligonucleotide
uguuuauauugagaagaac

SEQ ID NO: 14292 - RNA, 19 nt, Artificial Sequence
  Description of Artificial Sequence: Synthetic oligonucleotide
cgauaagcuuugucacaug

SEQ ID NO: 14293 - RNA, 19 nt, Artificial Sequence
  Description of Artificial Sequence: Synthetic oligonucleotide
ggacacaauugacuggagg

SEQ ID NO: 14294 - RNA, 19 nt, Artificial Sequence
  Description of Artificial Sequence: Synthetic oligonucleotide
ggacaucgugagggaccga

SEQ ID NO: 14295 - RNA, 19 nt, Artificial Sequence
  Description of Artificial Sequence: Synthetic oligonucleotide
agaugcugagauaguggug

SEQ ID NO: 14296 - RNA, 19 nt, Artificial Sequence
  Description of Artificial Sequence: Synthetic oligonucleotide
gaaggacaauggcagaagc

SEQ ID NO: 14297 - RNA, 19 nt, Artificial Sequence
  Description of Artificial Sequence: Synthetic oligonucleotide
cuguccccccugucaugag

SEQ ID NO: 14298 - RNA, 19 nt, Artificial Sequence
  Description of Artificial Sequence: Synthetic oligonucleotide
gguuugcaaggggcgaugc

SEQ ID NO: 14299 - RNA, 19 nt, Artificial Sequence
  Description of Artificial Sequence: Synthetic oligonucleotide
cugggguccuggaucagaa

SEQ ID NO: 14300 - RNA, 19 nt, Artificial Sequence
  Description of Artificial Sequence: Synthetic oligonucleotide
agacugccagacauugacc

SEQ ID NO: 14301 - RNA, 19 nt, Artificial Sequence
  Description of Artificial Sequence: Synthetic oligonucleotide
caagaccaucugugcuccu

SEQ ID NO: 14302 - RNA, 19 nt, Artificial Sequence
  Description of Artificial Sequence: Synthetic oligonucleotide
ucaguguaauggucacugc

SEQ ID NO: 14303 - RNA, 19 nt, Artificial Sequence
  Description of Artificial Sequence: Synthetic oligonucleotide
cuuugggcccaaccccaac

SEQ ID NO: 14304 - RNA, 19 nt, Artificial Sequence
  Description of Artificial Sequence: Synthetic oligonucleotide
ccagugcugccaugaugag

SEQ ID NO: 14305 - RNA, 19 nt, Artificial Sequence
  Description of Artificial Sequence: Synthetic oligonucleotide
gugugccgggggcugcuca

SEQ ID NO: 14306 - RNA, 19 nt, Artificial Sequence
  Description of Artificial Sequence: Synthetic oligonucleotide
aggcccucaggacacagac

SEQ ID NO: 14307 - RNA, 19 nt, Artificial Sequence
  Description of Artificial Sequence: Synthetic oligonucleotide
cugcuuugccugccggcac

SEQ ID NO: 14308 - RNA, 19 nt, Artificial Sequence
  Description of Artificial Sequence: Synthetic oligonucleotide
cuucaaugacaguggagcc

SEQ ID NO: 14309 - RNA, 19 nt, Artificial Sequence
  Description of Artificial Sequence: Synthetic oligonucleotide
cuguguaccucgcugucca

SEQ ID NO: 14310 - RNA, 19 nt, Artificial Sequence
  Description of Artificial Sequence: Synthetic oligonucleotide
acagccucuugucuacaac

SEQ ID NO: 14311 - RNA, 19 nt, Artificial Sequence
  Description of Artificial Sequence: Synthetic oligonucleotide
caagcuaacuuuccagcug

SEQ ID NO: 14312 - RNA, 19 nt, Artificial Sequence
  Description of Artificial Sequence: Synthetic oligonucleotide
ggaacccaauccccacacc

SEQ ID NO: 14313 - RNA, 19 nt, Artificial Sequence
  Description of Artificial Sequence: Synthetic oligonucleotide
caaguaucaguauggagga

SEQ ID NO: 14314 - RNA, 19 nt, Artificial Sequence
  Description of Artificial Sequence: Synthetic oligonucleotide
aguuuguguagccagcugu

SEQ ID NO: 14315 - RNA, 19 nt, Artificial Sequence
  Description of Artificial Sequence: Synthetic oligonucleotide
uccccauaacuuuguggug

SEQ ID NO: 14316 - RNA, 19 nt, Artificial Sequence
  Description of Artificial Sequence: Synthetic oligonucleotide
ggaucaaacauccuguguc

SEQ ID NO: 14317 - RNA, 19 nt, Artificial Sequence
  Description of Artificial Sequence: Synthetic oligonucleotide
cagggccuguccuccugac

SEQ ID NO: 14318 - RNA, 19 nt, Artificial Sequence
  Description of Artificial Sequence: Synthetic oligonucleotide
caagauggaaguagauaaa

SEQ ID NO: 14319 - RNA, 19 nt, Artificial Sequence
  Description of Artificial Sequence: Synthetic oligonucleotide
aaaugggcucaagaugugu

SEQ ID NO: 14320 - RNA, 19 nt, Artificial Sequence
  Description of Artificial Sequence: Synthetic oligonucleotide
ugagccuugugggggacua

SEQ ID NO: 14321 - RNA, 19 nt, Artificial Sequence
  Description of Artificial Sequence: Synthetic oligonucleotide
augucccaaagccugugag

SEQ ID NO: 14322 - RNA, 19 nt, Artificial Sequence
  Description of Artificial Sequence: Synthetic oligonucleotide
gggaacaggcucugggagc

SEQ ID NO: 14323 - RNA, 19 nt, Artificial Sequence
  Description of Artificial Sequence: Synthetic oligonucleotide
ccgcuuccagacuguggac

SEQ ID NO: 14324 - RNA, 19 nt, Artificial Sequence
  Description of Artificial Sequence: Synthetic oligonucleotide
cucgagcaacauugaugga

SEQ ID NO: 14325 - RNA, 19 nt, Artificial Sequence
  Description of Artificial Sequence: Synthetic oligonucleotide
auuugugaacugcaccaag

SEQ ID NO: 14326 - RNA, 19 nt, Artificial Sequence
  Description of Artificial Sequence: Synthetic oligonucleotide
gauccugggcaaccuggac

SEQ ID NO: 14327 - RNA, 19 nt, Artificial Sequence
  Description of Artificial Sequence: Synthetic oligonucleotide
cuuucugaucaccggccuc

SEQ ID NO: 14328 - RNA, 19 nt, Artificial Sequence
  Description of Artificial Sequence: Synthetic oligonucleotide
caauggagaccccuggcac

SEQ ID NO: 14329 - RNA, 19 nt, Artificial Sequence
  Description of Artificial Sequence: Synthetic oligonucleotide
caagaucccugcccuggac

SEQ ID NO: 14330 - RNA, 19 nt, Artificial Sequence
  Description of Artificial Sequence: Synthetic oligonucleotide
cccagagaagcucaauguc

SEQ ID NO: 14331 - RNA, 19 nt, Artificial Sequence
  Description of Artificial Sequence: Synthetic oligonucleotide
cuuccggacaguacgggag

SEQ ID NO: 14332 - RNA, 19 nt, Artificial Sequence
  Description of Artificial Sequence: Synthetic oligonucleotide
gaucacagguuaccugaac

SEQ ID NO: 14333 - RNA, 19 nt, Artificial Sequence
  Description of Artificial Sequence: Synthetic oligonucleotide
cauccaguccuggccgccc

SEQ ID NO: 14334 - RNA, 19 nt, Artificial Sequence
  Description of Artificial Sequence: Synthetic oligonucleotide
ccacaugcacaacuucagu

SEQ ID NO: 14335 - RNA, 19 nt, Artificial Sequence
  Description of Artificial Sequence: Synthetic oligonucleotide
uguuuuuuccaauuugaca

SEQ ID NO: 14336 - RNA, 19 nt, Artificial Sequence
  Description of Artificial Sequence: Synthetic oligonucleotide
aaccauuggaggcagaagc

SEQ ID NO: 14337 - RNA, 19 nt, Artificial Sequence
  Description of Artificial Sequence: Synthetic oligonucleotide
ccucuacaaccggggcuuc

SEQ ID NO: 14338 - RNA, 19 nt, Artificial Sequence
  Description of Artificial Sequence: Synthetic oligonucleotide
cucauuguugaucaugaag

SEQ ID NO: 14339 - RNA, 19 nt, Artificial Sequence
  Description of Artificial Sequence: Synthetic oligonucleotide
gaacuugaaugucacaucu

SEQ ID NO: 14340 - RNA, 19 nt, Artificial Sequence
  Description of Artificial Sequence: Synthetic oligonucleotide
ucugggcuuccgaucccug

SEQ ID NO: 14341 - RNA, 19 nt, Artificial Sequence
  Description of Artificial Sequence: Synthetic oligonucleotide
gaaggaaauuagugcuggg

SEQ ID NO: 14342 - RNA, 19 nt, Artificial Sequence
  Description of Artificial Sequence: Synthetic oligonucleotide
gcguaucuauauaagugcc

SEQ ID NO: 14343 - RNA, 19 nt, Artificial Sequence
  Description of Artificial Sequence: Synthetic oligonucleotide
caauaggcagcucugcuac

SEQ ID NO: 14344 - RNA, 19 nt, Artificial Sequence
  Description of Artificial Sequence: Synthetic oligonucleotide
ccaccacucuuugaacugg

SEQ ID NO: 14345 - RNA, 19 nt, Artificial Sequence
  Description of Artificial Sequence: Synthetic oligonucleotide
gaccaaggugcuucggggg

SEQ ID NO: 14346 - RNA, 19 nt, Artificial Sequence
  Description of Artificial Sequence: Synthetic oligonucleotide
gccuacggaagagcgacua

SEQ ID NO: 14347 - RNA, 19 nt, Artificial Sequence
  Description of Artificial Sequence: Synthetic oligonucleotide
agacaucaagcauaaucgg

SEQ ID NO: 14348 - RNA, 19 nt, Artificial Sequence
  Description of Artificial Sequence: Synthetic oligonucleotide
gccgcgcagagacugcgug

SEQ ID NO: 14349 - RNA, 19 nt, Artificial Sequence
  Description of Artificial Sequence: Synthetic oligonucleotide
ggcagagggcaaagugugu

SEQ ID NO: 14350 - RNA, 19 nt, Artificial Sequence
  Description of Artificial Sequence: Synthetic oligonucleotide
ugacccacugugcuccucu

SEQ ID NO: 14351 - RNA, 19 nt, Artificial Sequence
  Description of Artificial Sequence: Synthetic oligonucleotide
ugggggaugcuggggccca

SEQ ID NO: 14352 - RNA, 19 nt, Artificial Sequence
  Description of Artificial Sequence: Synthetic oligonucleotide
aggcccuggucagugcuug

SEQ ID NO: 14353 - RNA, 19 nt, Artificial Sequence
  Description of Artificial Sequence: Synthetic oligonucleotide
guccugucgaaauuauagc

SEQ ID NO: 14354 - RNA, 19 nt, Artificial Sequence
  Description of Artificial Sequence: Synthetic oligonucleotide
ccgaggaggugucugugug

SEQ ID NO: 14355 - RNA, 19 nt, Artificial Sequence
  Description of Artificial Sequence: Synthetic oligonucleotide
gacccacugcaacuuucug

SEQ ID NO: 14356 - RNA, 19 nt, Artificial Sequence
  Description of Artificial Sequence: Synthetic oligonucleotide
gaauggggagccucgagaa

SEQ ID NO: 14357 - RNA, 19 nt, Artificial Sequence
  Description of Artificial Sequence: Synthetic oligonucleotide
auuugcccaugaggccgaa

SEQ ID NO: 14358 - RNA, 19 nt, Artificial Sequence
  Description of Artificial Sequence: Synthetic oligonucleotide
augcuucuccugccacccg

SEQ ID NO: 14359 - RNA, 19 nt, Artificial Sequence
  Description of Artificial Sequence: Synthetic oligonucleotide
ggaaugccaacccauggag

SEQ ID NO: 14360 - RNA, 19 nt, Artificial Sequence
  Description of Artificial Sequence: Synthetic oligonucleotide
gggcacugccacaugcaau

SEQ ID NO: 14361 - RNA, 19 nt, Artificial Sequence
  Description of Artificial Sequence: Synthetic oligonucleotide
uggcucgggcucugauacu

SEQ ID NO: 14362 - RNA, 19 nt, Artificial Sequence
  Description of Artificial Sequence: Synthetic oligonucleotide
uugugcucaaugugcccau

SEQ ID NO: 14363 - RNA, 19 nt, Artificial Sequence
  Description of Artificial Sequence: Synthetic oligonucleotide
uuuucgagaugggccccac

SEQ ID NO: 14364 - RNA, 19 nt, Artificial Sequence
  Description of Artificial Sequence: Synthetic oligonucleotide
cugugugagcagcugcccc

SEQ ID NO: 14365 - RNA, 19 nt, Artificial Sequence
  Description of Artificial Sequence: Synthetic oligonucleotide
ccauggaguccuaggugcc

SEQ ID NO: 14366 - RNA, 19 nt, Artificial Sequence
  Description of Artificial Sequence: Synthetic oligonucleotide
caagggcccaaucuacaag

SEQ ID NO: 14367 - RNA, 19 nt, Artificial Sequence
  Description of Artificial Sequence: Synthetic oligonucleotide
guacccagauguucagaau

SEQ ID NO: 14368 - RNA, 19 nt, Artificial Sequence
  Description of Artificial Sequence: Synthetic oligonucleotide
ugaaugucggcccugccau

SEQ ID NO: 14369 - RNA, 19 nt, Artificial Sequence
  Description of Artificial Sequence: Synthetic oligonucleotide
ugagaacugcacccagggg

SEQ ID NO: 14370 - RNA, 19 nt, Artificial Sequence
  Description of Artificial Sequence: Synthetic oligonucleotide
guguaaaggaccagagcuu

SEQ ID NO: 14371 - RNA, 19 nt, Artificial Sequence
  Description of Artificial Sequence: Synthetic oligonucleotide
ucaagacuguuuaggacaa

SEQ ID NO: 14372 - RNA, 19 nt, Artificial Sequence
  Description of Artificial Sequence: Synthetic oligonucleotide
aacacuggugcugaucggc

SEQ ID NO: 14373 - RNA, 19 nt, Artificial Sequence
  Description of Artificial Sequence: Synthetic oligonucleotide
caaaacccaucugacaaug

SEQ ID NO: 14374 - RNA, 19 nt, Artificial Sequence
  Description of Artificial Sequence: Synthetic oligonucleotide
ggcuuugacagugauagca

SEQ ID NO: 14375 - RNA, 19 nt, Artificial Sequence
  Description of Artificial Sequence: Synthetic oligonucleotide
aggauugguagugauuuuc

SEQ ID NO: 14376 - RNA, 19 nt, Artificial Sequence
  Description of Artificial Sequence: Synthetic oligonucleotide
caugaugcugggcggcacu

SEQ ID NO: 14377 - RNA, 19 nt, Artificial Sequence
  Description of Artificial Sequence: Synthetic oligonucleotide
uuuucucuacuggcguggg

SEQ ID NO: 14378 - RNA, 19 nt, Artificial Sequence
  Description of Artificial Sequence: Synthetic oligonucleotide
gcgccggauucagaauaaa

SEQ ID NO: 14379 - RNA, 19 nt, Artificial Sequence
  Description of Artificial Sequence: Synthetic oligonucleotide
aagggcuaugaggcgauac

SEQ ID NO: 14380 - RNA, 19 nt, Artificial Sequence
  Description of Artificial Sequence: Synthetic oligonucleotide
cuuggaacggggugagagc

SEQ ID NO: 14381 - RNA, 19 nt, Artificial Sequence
  Description of Artificial Sequence: Synthetic oligonucleotide
cauagagccucuggacccc

SEQ ID NO: 14382 - RNA, 19 nt, Artificial Sequence
  Description of Artificial Sequence: Synthetic oligonucleotide
cagugagaaggcuaacaaa

SEQ ID NO: 14383 - RNA, 19 nt, Artificial Sequence
  Description of Artificial Sequence: Synthetic oligonucleotide
agucuuggccagaaucuuc

SEQ ID NO: 14384 - RNA, 19 nt, Artificial Sequence
  Description of Artificial Sequence: Synthetic oligonucleotide
caaagagacagagcuaagg

SEQ ID NO: 14385 - RNA, 19 nt, Artificial Sequence
  Description of Artificial Sequence: Synthetic oligonucleotide
gaagcuuaaagugcuuggc

SEQ ID NO: 14386 - RNA, 19 nt, Artificial Sequence
  Description of Artificial Sequence: Synthetic oligonucleotide
cucgggugucuuuggaacu

SEQ ID NO: 14387 - RNA, 19 nt, Artificial Sequence
  Description of Artificial Sequence: Synthetic oligonucleotide
ugugcacaaaggagugugg

SEQ ID NO: 14388 - RNA, 19 nt, Artificial Sequence
  Description of Artificial Sequence: Synthetic oligonucleotide
gaucccugagggugaauca

SEQ ID NO: 14389 - RNA, 19 nt, Artificial Sequence
  Description of Artificial Sequence: Synthetic oligonucleotide
aaucaagauuccagucugc

SEQ ID NO: 14390 - RNA, 19 nt, Artificial Sequence
  Description of Artificial Sequence: Synthetic oligonucleotide
cauuaaagucauugaggac

SEQ ID NO: 14391 - RNA, 19 nt, Artificial Sequence
  Description of Artificial Sequence: Synthetic oligonucleotide
caagaguggacggcagagu

SEQ ID NO: 14392 - RNA, 19 nt, Artificial Sequence
  Description of Artificial Sequence: Synthetic oligonucleotide
uuuucaagcugugacagau

SEQ ID NO: 14393 - RNA, 19 nt, Artificial Sequence
  Description of Artificial Sequence: Synthetic oligonucleotide
ucauaugcuggccauuggc

SEQ ID NO: 14394 - RNA, 19 nt, Artificial Sequence
  Description of Artificial Sequence: Synthetic oligonucleotide
cagccuggaccaugcccac

SEQ ID NO: 14395 - RNA, 19 nt, Artificial Sequence
  Description of Artificial Sequence: Synthetic oligonucleotide
cauuguaaggcugcuggga

SEQ ID NO: 14396 - RNA, 19 nt, Artificial Sequence
  Description of Artificial Sequence: Synthetic oligonucleotide
acuaugcccagggucaucu

SEQ ID NO: 14397 - RNA, 19 nt, Artificial Sequence
  Description of Artificial Sequence: Synthetic oligonucleotide
ucugcagcuugucacucaa

SEQ ID NO: 14398 - RNA, 19 nt, Artificial Sequence
  Description of Artificial Sequence: Synthetic oligonucleotide
auauuugccucuggguucu

SEQ ID NO: 14399 - RNA, 19 nt, Artificial Sequence
  Description of Artificial Sequence: Synthetic oligonucleotide
ucugcuggaucaugugaga

SEQ ID NO: 14400 - RNA, 19 nt, Artificial Sequence
  Description of Artificial Sequence: Synthetic oligonucleotide
acaacaccggggggcacug

SEQ ID NO: 14401 - RNA, 19 nt, Artificial Sequence
  Description of Artificial Sequence: Synthetic oligonucleotide
ggggccacagcugcugcuc

SEQ ID NO: 14402 - RNA, 19 nt, Artificial Sequence
  Description of Artificial Sequence: Synthetic oligonucleotide
caacuggggaguacaaauu

SEQ ID NO: 14403 - RNA, 19 nt, Artificial Sequence
  Description of Artificial Sequence: Synthetic oligonucleotide
ugccaagggaauguacuac

SEQ ID NO: 14404 - RNA, 19 nt, Artificial Sequence
  Description of Artificial Sequence: Synthetic oligonucleotide
ccuugaggaacaugguaug

SEQ ID NO: 14405 - RNA, 19 nt, Artificial Sequence
  Description of Artificial Sequence: Synthetic oligonucleotide
ggugcauagaaaccuggcu

SEQ ID NO: 14406 - RNA, 19 nt, Artificial Sequence
  Description of Artificial Sequence: Synthetic oligonucleotide
ugcccgaaacgugcuacuc

SEQ ID NO: 14407 - RNA, 19 nt, Artificial Sequence
  Description of Artificial Sequence: Synthetic oligonucleotide
caagucacccagucagguu

SEQ ID NO: 14408 - RNA, 19 nt, Artificial Sequence
  Description of Artificial Sequence: Synthetic oligonucleotide
ucagguggcagauuuuggu

SEQ ID NO: 14409 - RNA, 19 nt, Artificial Sequence
  Description of Artificial Sequence: Synthetic oligonucleotide
uguggcugaccugcugccu

SEQ ID NO: 14410 - RNA, 19 nt, Artificial Sequence
  Description of Artificial Sequence: Synthetic oligonucleotide
uccugaugauaagcagcug

SEQ ID NO: 14411 - RNA, 19 nt, Artificial Sequence
  Description of Artificial Sequence: Synthetic oligonucleotide
gcuauacagugaggccaag

SEQ ID NO: 14412 - RNA, 19 nt, Artificial Sequence
  Description of Artificial Sequence: Synthetic oligonucleotide
gacuccaauuaaguggaug

SEQ ID NO: 14413 - RNA, 19 nt, Artificial Sequence
  Description of Artificial Sequence: Synthetic oligonucleotide
ggcccuugagaguauccac

SEQ ID NO: 14414 - RNA, 19 nt, Artificial Sequence
  Description of Artificial Sequence: Synthetic oligonucleotide
cuuugggaaauacacacac

SEQ ID NO: 14415 - RNA, 19 nt, Artificial Sequence
  Description of Artificial Sequence: Synthetic oligonucleotide
ccagagugaugucuggagc

SEQ ID NO: 14416 - RNA, 19 nt, Artificial Sequence
  Description of Artificial Sequence: Synthetic oligonucleotide
cuauggugugacaguuugg

SEQ ID NO: 14417 - RNA, 19 nt, Artificial Sequence
  Description of Artificial Sequence: Synthetic oligonucleotide
ggaguugaugaccuucggg

SEQ ID NO: 14418 - RNA, 19 nt, Artificial Sequence
  Description of Artificial Sequence: Synthetic oligonucleotide
ggcagagcccuaugcaggg

SEQ ID NO: 14419 - RNA, 19 nt, Artificial Sequence
  Description of Artificial Sequence: Synthetic oligonucleotide
gcuacgauuggcugaagua

SEQ ID NO: 14420 - RNA, 19 nt, Artificial Sequence
  Description of Artificial Sequence: Synthetic oligonucleotide
accagaccugcuagagaag

SEQ ID NO: 14421 - RNA, 19 nt, Artificial Sequence
  Description of Artificial Sequence: Synthetic oligonucleotide
gggggagcgguuggcacag

SEQ ID NO: 14422 - RNA, 19 nt, Artificial Sequence
  Description of Artificial Sequence: Synthetic oligonucleotide
gccccagaucugcacaauu

SEQ ID NO: 14423 - RNA, 19 nt, Artificial Sequence
  Description of Artificial Sequence: Synthetic oligonucleotide
ugaugucuacauggugaug

SEQ ID NO: 14424 - RNA, 19 nt, Artificial Sequence
  Description of Artificial Sequence: Synthetic oligonucleotide
ggucaaguguuggaugauu

SEQ ID NO: 14425 - RNA, 19 nt, Artificial Sequence
  Description of Artificial Sequence: Synthetic oligonucleotide
ugaugagaacauucgccca

SEQ ID NO: 14426 - RNA, 19 nt, Artificial Sequence
  Description of Artificial Sequence: Synthetic oligonucleotide
aaccuuuaaagaacuagcc

SEQ ID NO: 14427 - RNA, 19 nt, Artificial Sequence
  Description of Artificial Sequence: Synthetic oligonucleotide
caaugaguucaccaggaug

SEQ ID NO: 14428 - RNA, 19 nt, Artificial Sequence
  Description of Artificial Sequence: Synthetic oligonucleotide
ggcccgagacccaccacgg

SEQ ID NO: 14429 - RNA, 19 nt, Artificial Sequence
  Description of Artificial Sequence: Synthetic oligonucleotide
guaucuggucauaaagaga

SEQ ID NO: 14430 - RNA, 19 nt, Artificial Sequence
  Description of Artificial Sequence: Synthetic oligonucleotide
agagagugggccuggaaua

SEQ ID NO: 14431 - RNA, 19 nt, Artificial Sequence
  Description of Artificial Sequence: Synthetic oligonucleotide
agccccugggccagagccc

SEQ ID NO: 14432 - RNA, 19 nt, Artificial Sequence
  Description of Artificial Sequence: Synthetic oligonucleotide
ccauggucugacaaacaag

SEQ ID NO: 14433 - RNA, 19 nt, Artificial Sequence
  Description of Artificial Sequence: Synthetic oligonucleotide
gaagcuagaggaaguagag

SEQ ID NO: 14434 - RNA, 19 nt, Artificial Sequence
  Description of Artificial Sequence: Synthetic oligonucleotide
gcuggagccagaacuagac

SEQ ID NO: 14435 - RNA, 19 nt, Artificial Sequence
  Description of Artificial Sequence: Synthetic oligonucleotide
ccuagaccuagacuuggaa

SEQ ID NO: 14436 - RNA, 19 nt, Artificial Sequence
  Description of Artificial Sequence: Synthetic oligonucleotide
agcagaggaggacaaccug

SEQ ID NO: 14437 - RNA, 19 nt, Artificial Sequence
  Description of Artificial Sequence: Synthetic oligonucleotide
ggcaaccaccacacugggc

SEQ ID NO: 14438 - RNA, 19 nt, Artificial Sequence
  Description of Artificial Sequence: Synthetic oligonucleotide
cuccgcccucagccuacca

SEQ ID NO: 14439 - RNA, 19 nt, Artificial Sequence
  Description of Artificial Sequence: Synthetic oligonucleotide
aguuggaacacuuaaucgg

SEQ ID NO: 14440 - RNA, 19 nt, Artificial Sequence
  Description of Artificial Sequence: Synthetic oligonucleotide
gccacgugggagccagagc

SEQ ID NO: 14441 - RNA, 19 nt, Artificial Sequence
  Description of Artificial Sequence: Synthetic oligonucleotide
ccuuuuaaguccaucaucu

SEQ ID NO: 14442 - RNA, 19 nt, Artificial Sequence
  Description of Artificial Sequence: Synthetic oligonucleotide
uggauacaugcccaugaac

SEQ ID NO: 14443 - RNA, 19 nt, Artificial Sequence
  Description of Artificial Sequence: Synthetic oligonucleotide
ccaggguaaucuuggggag

SEQ ID NO: 14444 - RNA, 19 nt, Artificial Sequence
  Description of Artificial Sequence: Synthetic oligonucleotide
gucuugccaggagucugca

SEQ ID NO: 14445 - RNA, 19 nt, Artificial Sequence
  Description of Artificial Sequence: Synthetic oligonucleotide
aguuucugggagcagugaa

SEQ ID NO: 14446 - RNA, 19 nt, Artificial Sequence
  Description of Artificial Sequence: Synthetic oligonucleotide
acggugcccccguccaguc

SEQ ID NO: 14447 - RNA, 19 nt, Artificial Sequence
  Description of Artificial Sequence: Synthetic oligonucleotide
cucucuacacccaaugcca

SEQ ID NO: 14448 - RNA, 19 nt, Artificial Sequence
  Description of Artificial Sequence: Synthetic oligonucleotide
acggggaugccuggcauca

SEQ ID NO: 14449 - RNA, 19 nt, Artificial Sequence
  Description of Artificial Sequence: Synthetic oligonucleotide
agagucaucagaggggcau

SEQ ID NO: 14450 - RNA, 19 nt, Artificial Sequence
  Description of Artificial Sequence: Synthetic oligonucleotide
uguaacaggcucugaggcu

SEQ ID NO: 14451 - RNA, 19 nt, Artificial Sequence
  Description of Artificial Sequence: Synthetic oligonucleotide
ugagcuccaggagaaagug

SEQ ID NO: 14452 - RNA, 19 nt, Artificial Sequence
  Description of Artificial Sequence: Synthetic oligonucleotide
gucaauguguaggagccgg

SEQ ID NO: 14453 - RNA, 19 nt, Artificial Sequence
  Description of Artificial Sequence: Synthetic oligonucleotide
gagcaggagccggagccca

SEQ ID NO: 14454 - RNA, 19 nt, Artificial Sequence
  Description of Artificial Sequence: Synthetic oligonucleotide
acggccacgcggagauagc

SEQ ID NO: 14455 - RNA, 19 nt, Artificial Sequence
  Description of Artificial Sequence: Synthetic oligonucleotide
cgccuaccauucccagcgc

SEQ ID NO: 14456 - RNA, 19 nt, Artificial Sequence
  Description of Artificial Sequence: Synthetic oligonucleotide
ccacagucugcugacuccu

SEQ ID NO: 14457 - RNA, 19 nt, Artificial Sequence
  Description of Artificial Sequence: Synthetic oligonucleotide
uguuaccccacucucccca

SEQ ID NO: 14458 - RNA, 19 nt, Artificial Sequence
  Description of Artificial Sequence: Synthetic oligonucleotide
acccggguuagaggaagag

SEQ ID NO: 14459 - RNA, 19 nt, Artificial Sequence
  Description of Artificial Sequence: Synthetic oligonucleotide
ggaugucaacgguuauguc

SEQ ID NO: 14460 - RNA, 19 nt, Artificial Sequence
  Description of Artificial Sequence: Synthetic oligonucleotide
caugccagauacacaccuc

SEQ ID NO: 14461 - RNA, 19 nt, Artificial Sequence
  Description of Artificial Sequence: Synthetic oligonucleotide
caaagguacucccuccucc

SEQ ID NO: 14462 - RNA, 19 nt, Artificial Sequence
  Description of Artificial Sequence: Synthetic oligonucleotide
ccgggaaggcacccuuucu

SEQ ID NO: 14463 - RNA, 19 nt, Artificial Sequence
  Description of Artificial Sequence: Synthetic oligonucleotide
uucagugggucucaguucu

SEQ ID NO: 14464 - RNA, 19 nt, Artificial Sequence
  Description of Artificial Sequence: Synthetic oligonucleotide
uguccuggguacugaagaa

SEQ ID NO: 14465 - RNA, 19 nt, Artificial Sequence
  Description of Artificial Sequence: Synthetic oligonucleotide
agaagaugaagaugaggag

SEQ ID NO: 14466 - RNA, 19 nt, Artificial Sequence
  Description of Artificial Sequence: Synthetic oligonucleotide
guaugaauacaugaaccgg

SEQ ID NO: 14467 - RNA, 19 nt, Artificial Sequence
  Description of Artificial Sequence: Synthetic oligonucleotide
gaggagaaggcacagucca

SEQ ID NO: 14468 - RNA, 19 nt, Artificial Sequence
  Description of Artificial Sequence: Synthetic oligonucleotide
accucaucccccuaggcca

SEQ ID NO: 14469 - RNA, 19 nt, Artificial Sequence
  Description of Artificial Sequence: Synthetic oligonucleotide
aaguucccuugaggagcug

SEQ ID NO: 14470 - RNA, 19 nt, Artificial Sequence
  Description of Artificial Sequence: Synthetic oligonucleotide
ggguuaugaguacauggau

SEQ ID NO: 14471 - RNA, 19 nt, Artificial Sequence
  Description of Artificial Sequence: Synthetic oligonucleotide
uguggggucagaccucagu

SEQ ID NO: 14472 - RNA, 19 nt, Artificial Sequence
  Description of Artificial Sequence: Synthetic oligonucleotide
ugccucucugggcagcaca

SEQ ID NO: 14473 - RNA, 19 nt, Artificial Sequence
  Description of Artificial Sequence: Synthetic oligonucleotide
acagaguugcccacuccac

SEQ ID NO: 14474 - RNA, 19 nt, Artificial Sequence
  Description of Artificial Sequence: Synthetic oligonucleotide
cccuguacccaucaugccc

SEQ ID NO: 14475 - RNA, 19 nt, Artificial Sequence
  Description of Artificial Sequence: Synthetic oligonucleotide
cacugcaggcacaacucca

SEQ ID NO: 14476 - RNA, 19 nt, Artificial Sequence
  Description of Artificial Sequence: Synthetic oligonucleotide
agaugaagacuaugaauau

SEQ ID NO: 14477 - RNA, 19 nt, Artificial Sequence
  Description of Artificial Sequence: Synthetic oligonucleotide
uaugaaucggcaacgagau

SEQ ID NO: 14478 - RNA, 19 nt, Artificial Sequence
  Description of Artificial Sequence: Synthetic oligonucleotide
uggaggugguccugggggu

SEQ ID NO: 14479 - RNA, 19 nt, Artificial Sequence
  Description of Artificial Sequence: Synthetic oligonucleotide
ugauuaugcagccaugggg

SEQ ID NO: 14480 - RNA, 19 nt, Artificial Sequence
  Description of Artificial Sequence: Synthetic oligonucleotide
ggccugcccagcaucugag

SEQ ID NO: 14481 - RNA, 19 nt, Artificial Sequence
  Description of Artificial Sequence: Synthetic oligonucleotide
gcaaggguaugaagagaug

SEQ ID NO: 14482 - RNA, 19 nt, Artificial Sequence
  Description of Artificial Sequence: Synthetic oligonucleotide
gagagcuuuucaggggccu

SEQ ID NO: 14483 - RNA, 19 nt, Artificial Sequence
  Description of Artificial Sequence: Synthetic oligonucleotide
uggacaucaggccccccau

SEQ ID NO: 14484 - RNA, 19 nt, Artificial Sequence
  Description of Artificial Sequence: Synthetic oligonucleotide
uguccauuaugcccgccua

SEQ ID NO: 14485 - RNA, 19 nt, Artificial Sequence
  Description of Artificial Sequence: Synthetic oligonucleotide
aaaaacucuacguagcuua

SEQ ID NO: 14486 - RNA, 19 nt, Artificial Sequence
  Description of Artificial Sequence: Synthetic oligonucleotide
agaggcuacagacucugcc

SEQ ID NO: 14487 - RNA, 19 nt, Artificial Sequence
  Description of Artificial Sequence: Synthetic oligonucleotide
cuuugauaacccugauuac

SEQ ID NO: 14488 - RNA, 19 nt, Artificial Sequence
  Description of Artificial Sequence: Synthetic oligonucleotide
cuggcauagcaggcuuuuc

SEQ ID NO: 14489 - RNA, 19 nt, Artificial Sequence
  Description of Artificial Sequence: Synthetic oligonucleotide
ccccaaggcuaaugcccag

SEQ ID NO: 14490 - RNA, 19 nt, Artificial Sequence
  Description of Artificial Sequence: Synthetic oligonucleotide
gagaacguaacuccugcuc

SEQ ID NO: 14491 - RNA, 19 nt, Artificial Sequence
  Description of Artificial Sequence: Synthetic oligonucleotide
cccuguggcacucagggag

SEQ ID NO: 14492 - RNA, 19 nt, Artificial Sequence
  Description of Artificial Sequence: Synthetic oligonucleotide
gcauuuaauggcagcuagu

SEQ ID NO: 14493 - RNA, 19 nt, Artificial Sequence
  Description of Artificial Sequence: Synthetic oligonucleotide
ugccuuuagaggguaccgu

SEQ ID NO: 14494 - RNA, 19 nt, Artificial Sequence
  Description of Artificial Sequence: Synthetic oligonucleotide
ucuucucccuauucccucu

SEQ ID NO: 14495 - RNA, 19 nt, Artificial Sequence
  Description of Artificial Sequence: Synthetic oligonucleotide
ucucucccaggucccagcc

SEQ ID NO: 14496 - RNA, 19 nt, Artificial Sequence
  Description of Artificial Sequence: Synthetic oligonucleotide
cccuuuuccccagucccag

SEQ ID NO: 14497 - RNA, 19 nt, Artificial Sequence
  Description of Artificial Sequence: Synthetic oligonucleotide
gacaauuccauucaaucuu

SEQ ID NO: 14498 - RNA, 19 nt, Artificial Sequence
  Description of Artificial Sequence: Synthetic oligonucleotide
uuggaggcuuuuaaacauu

SEQ ID NO: 14499 - RNA, 19 nt, Artificial Sequence
  Description of Artificial Sequence: Synthetic oligonucleotide
uuugacacaaaauucuuau

SEQ ID NO: 14500 - RNA, 19 nt, Artificial Sequence
  Description of Artificial Sequence: Synthetic oligonucleotide
ugguauguagccagcugug

SEQ ID NO: 14501 - RNA, 19 nt, Artificial Sequence
  Description of Artificial Sequence: Synthetic oligonucleotide
gcacuuucuucucuuuccc

SEQ ID NO: 14502 - RNA, 19 nt, Artificial Sequence
  Description of Artificial Sequence: Synthetic oligonucleotide
caaccccaggaaagguuuu

SEQ ID NO: 14503 - RNA, 19 nt, Artificial Sequence
  Description of Artificial Sequence: Synthetic oligonucleotide
uccuuauuuugugugcuuu

SEQ ID NO: 14504 - RNA, 19 nt, Artificial Sequence
  Description of Artificial Sequence: Synthetic oligonucleotide
ucccagucccauuccucag

SEQ ID NO: 14505 - RNA, 19 nt, Artificial Sequence
  Description of Artificial Sequence: Synthetic oligonucleotide
gcuucuucacaggcacucc

SEQ ID NO: 14506 - RNA, 19 nt, Artificial Sequence
  Description of Artificial Sequence: Synthetic oligonucleotide
cuggagauaugaaggauua

SEQ ID NO: 14507 - RNA, 19 nt, Artificial Sequence
  Description of Artificial Sequence: Synthetic oligonucleotide
acucuccauaucccuuccu

SEQ ID NO: 14508 - RNA, 19 nt, Artificial Sequence
  Description of Artificial Sequence: Synthetic oligonucleotide
ucucaggcucuugacuacu

SEQ ID NO: 14509 - RNA, 19 nt, Artificial Sequence
  Description of Artificial Sequence: Synthetic oligonucleotide
uuggaacuaggcucuuaug

SEQ ID NO: 14510 - RNA, 19 nt, Artificial Sequence
  Description of Artificial Sequence: Synthetic oligonucleotide
gugugccuuuguuucccau

SEQ ID NO: 14511 - RNA, 19 nt, Artificial Sequence
  Description of Artificial Sequence: Synthetic oligonucleotide
ucagacugucaagaagagg

SEQ ID NO: 14512 - RNA, 19 nt, Artificial Sequence
  Description of Artificial Sequence: Synthetic oligonucleotide
gaaagggaggaaaccuagc

SEQ ID NO: 14513 - RNA, 19 nt, Artificial Sequence
  Description of Artificial Sequence: Synthetic oligonucleotide
cagaggaaaguguaauuuu

SEQ ID NO: 14514 - RNA, 19 nt, Artificial Sequence
  Description of Artificial Sequence: Synthetic oligonucleotide
ugguuuaugacucuuaacc

SEQ ID NO: 14515 - RNA, 19 nt, Artificial Sequence
  Description of Artificial Sequence: Synthetic oligonucleotide
ccccuagaaagacagaagc

SEQ ID NO: 14516 - RNA, 19 nt, Artificial Sequence
  Description of Artificial Sequence: Synthetic oligonucleotide
cuuaaaaucugugaagaaa

SEQ ID NO: 14517 - RNA, 19 nt, Artificial Sequence
  Description of Artificial Sequence: Synthetic oligonucleotide
agagguuaggaguagauau

SEQ ID NO: 14518 - RNA, 19 nt, Artificial Sequence
  Description of Artificial Sequence: Synthetic oligonucleotide
uugauuacuaucauaauuc

SEQ ID NO: 14519 - RNA, 19 nt, Artificial Sequence
  Description of Artificial Sequence: Synthetic oligonucleotide
cagcacuuaacuaugagcc

SEQ ID NO: 14520 - RNA, 19 nt, Artificial Sequence
  Description of Artificial Sequence: Synthetic oligonucleotide
caggcaucauacuaaacuu

SEQ ID NO: 14521 - RNA, 19 nt, Artificial Sequence
  Description of Artificial Sequence: Synthetic oligonucleotide
ucaccuacauuaucucacu

SEQ ID NO: 14522 - RNA, 19 nt, Artificial Sequence
  Description of Artificial Sequence: Synthetic oligonucleotide
uuaguccuuuaucauccuu

SEQ ID NO: 14523 - RNA, 19 nt, Artificial Sequence
  Description of Artificial Sequence: Synthetic oligonucleotide
uaaaacaauucugugacau

SEQ ID NO: 14524 - RNA, 19 nt, Artificial Sequence
  Description of Artificial Sequence: Synthetic oligonucleotide
uacauauuaucucauuuua

SEQ ID NO: 14525 - RNA, 19 nt, Artificial Sequence
  Description of Artificial Sequence: Synthetic oligonucleotide
acacaaagggaagucgggc

SEQ ID NO: 14526 - RNA, 19 nt, Artificial Sequence
  Description of Artificial Sequence: Synthetic oligonucleotide
caugguggcucaugccugu

SEQ ID NO: 14527 - RNA, 19 nt, Artificial Sequence
  Description of Artificial Sequence: Synthetic oligonucleotide
uaaucucagcacuuuggga

SEQ ID NO: 14528 - RNA, 19 nt, Artificial Sequence
  Description of Artificial Sequence: Synthetic oligonucleotide
aggcugaggcagaaggauu

SEQ ID NO: 14529 - RNA, 19 nt, Artificial Sequence
  Description of Artificial Sequence: Synthetic oligonucleotide
uaccugaggcaaggaguuu

SEQ ID NO: 14530 - RNA, 19 nt, Artificial Sequence
  Description of Artificial Sequence: Synthetic oligonucleotide
ugagaccagcuuagccaac

SEQ ID NO: 14531 - RNA, 19 nt, Artificial Sequence
  Description of Artificial Sequence: Synthetic oligonucleotide
cauaguaagacccccaucu

SEQ ID NO: 14532 - RNA, 19 nt, Artificial Sequence
  Description of Artificial Sequence: Synthetic oligonucleotide
uagaacugggugcaguggc

SEQ ID NO: 14533 - RNA, 19 nt, Artificial Sequence
  Description of Artificial Sequence: Synthetic oligonucleotide
cucaugccuguaaucccag

SEQ ID NO: 14534 - RNA, 19 nt, Artificial Sequence
  Description of Artificial Sequence: Synthetic oligonucleotide
gccagcacuuugggaggcu

SEQ ID NO: 14535 - RNA, 19 nt, Artificial Sequence
  Description of Artificial Sequence: Synthetic oligonucleotide
ugagaugggaagaucacuu

SEQ ID NO: 14536 - RNA, 19 nt, Artificial Sequence
  Description of Artificial Sequence: Synthetic oligonucleotide
ugagcccagaauuagagau

SEQ ID NO: 14537 - RNA, 19 nt, Artificial Sequence
  Description of Artificial Sequence: Synthetic oligonucleotide
uaagccuauggaaacauag

SEQ ID NO: 14538 - RNA, 19 nt, Artificial Sequence
  Description of Artificial Sequence: Synthetic oligonucleotide
gcaagacacugucucuaca

SEQ ID NO: 14539 - RNA, 19 nt, Artificial Sequence
  Description of Artificial Sequence: Synthetic oligonucleotide
aaacugagccuuaaagaga

SEQ ID NO: 14540 - RNA, 19 nt, Artificial Sequence
  Description of Artificial Sequence: Synthetic oligonucleotide
augaaauaaauuaagcagu

SEQ ID NO: 14541 - RNA, 19 nt, Artificial Sequence
  Description of Artificial Sequence: Synthetic oligonucleotide
uagauccaggaugcaaaau

SEQ ID NO: 14542 - RNA, 19 nt, Artificial Sequence
  Description of Artificial Sequence: Synthetic oligonucleotide
uccucccaauuccugugca

SEQ ID NO: 14543 - RNA, 19 nt, Artificial Sequence
  Description of Artificial Sequence: Synthetic oligonucleotide
augugcucuuauuguaagg

SEQ ID NO: 14544 - RNA, 19 nt, Artificial Sequence
  Description of Artificial Sequence: Synthetic oligonucleotide
gugccaagaaaaacugauu

SEQ ID NO: 14545 - RNA, 19 nt, Artificial Sequence
  Description of Artificial Sequence: Synthetic oligonucleotide
uuaaguuacagcccuuguu

SEQ ID NO: 14546 - RNA, 19 nt, Artificial Sequence
  Description of Artificial Sequence: Synthetic oligonucleotide
uuaaggggcacuguuucuu

SEQ ID NO: 14547 - RNA, 19 nt, Artificial Sequence
  Description of Artificial Sequence: Synthetic oligonucleotide
uguuuuugcacugaaucaa

SEQ ID NO: 14548 - RNA, 19 nt, Artificial Sequence
  Description of Artificial Sequence: Synthetic oligonucleotide
agucuaaccccaacagcca

SEQ ID NO: 14549 - RNA, 19 nt, Artificial Sequence
  Description of Artificial Sequence: Synthetic oligonucleotide
acauccuccuauaccuaga

SEQ ID NO: 14550 - RNA, 19 nt, Artificial Sequence
  Description of Artificial Sequence: Synthetic oligonucleotide
acaucucaucucaggaagu

SEQ ID NO: 14551 - RNA, 19 nt, Artificial Sequence
  Description of Artificial Sequence: Synthetic oligonucleotide
uggugguggggguagucag

SEQ ID NO: 14552 - RNA, 19 nt, Artificial Sequence
  Description of Artificial Sequence: Synthetic oligonucleotide
gaaggaaaaauaacuggac

SEQ ID NO: 14553 - RNA, 19 nt, Artificial Sequence
  Description of Artificial Sequence: Synthetic oligonucleotide
caucuuuguguaaaccaua

SEQ ID NO: 14554 - RNA, 19 nt, Artificial Sequence
  Description of Artificial Sequence: Synthetic oligonucleotide
aauccacaugugccguaaa

SEQ ID NO: 14555 - RNA, 19 nt, Artificial Sequence
  Description of Artificial Sequence: Synthetic oligonucleotide
augaucuucacuccuuauc

SEQ ID NO: 14556 - RNA, 19 nt, Artificial Sequence
  Description of Artificial Sequence: Synthetic oligonucleotide
ccgagggcaaauucacaag

SEQ ID NO: 14557 - RNA, 19 nt, Artificial Sequence
  Description of Artificial Sequence: Synthetic oligonucleotide
ggauccccaagauccacuu

SEQ ID NO: 14558 - RNA, 19 nt, Artificial Sequence
  Description of Artificial Sequence: Synthetic oligonucleotide
uuuagaagccauucucauc

SEQ ID NO: 14559 - RNA, 19 nt, Artificial Sequence
  Description of Artificial Sequence: Synthetic oligonucleotide
uagaagccauucucaucca

SEQ ID NO: 14560 - RNA, 25 nt, Artificial Sequence
  Description of Artificial Sequence: Synthetic oligonucleotide
acacacacacaccccuccccugcca

SEQ ID NO: 14561 - RNA, 25 nt, Artificial Sequence
  Description of Artificial Sequence: Synthetic oligonucleotide
aucccuccccggacuccggcuccgg

SEQ ID NO: 14562 - RNA, 25 nt, Artificial Sequence
  Description of Artificial Sequence: Synthetic oligonucleotide
gcuccgauugcaauuugcaaccucc

SEQ ID NO: 14563 - RNA, 25 nt, Artificial Sequence
  Description of Artificial Sequence: Synthetic oligonucleotide
cgcugccgucgccgcagcagccacc

SEQ ID NO: 14564 - RNA, 25 nt, Artificial Sequence
  Description of Artificial Sequence: Synthetic oligonucleotide
caauucgccagcgguucagguggcu

SEQ ID NO: 14565 - RNA, 25 nt, Artificial Sequence
  Description of Artificial Sequence: Synthetic oligonucleotide
ucuugccucgauguccuagccuagg

SEQ ID NO: 14566 - RNA, 25 nt, Artificial Sequence
  Description of Artificial Sequence: Synthetic oligonucleotide
gggcccccgggccggacuuggcugg

SEQ ID NO: 14567 - RNA, 25 nt, Artificial Sequence
  Description of Artificial Sequence: Synthetic oligonucleotide
ggcucccuucacccucugcggaguc

SEQ ID NO: 14568 - RNA, 25 nt, Artificial Sequence
  Description of Artificial Sequence: Synthetic oligonucleotide
caugagggcgaacgacgcucugcag

SEQ ID NO: 14569 - RNA, 25 nt, Artificial Sequence
  Description of Artificial Sequence: Synthetic oligonucleotide
ggugcugggcuugcuuuucagccug

SEQ ID NO: 14570 - RNA, 25 nt, Artificial Sequence
  Description of Artificial Sequence: Synthetic oligonucleotide
ggcccggggcuccgaggugggcaac

SEQ ID NO: 14571 - RNA, 25 nt, Artificial Sequence
  Description of Artificial Sequence: Synthetic oligonucleotide
cucucaggcaguguguccugggacu

SEQ ID NO: 14572 - RNA, 25 nt, Artificial Sequence
  Description of Artificial Sequence: Synthetic oligonucleotide
ucugaauggccugagugugaccggc

SEQ ID NO: 14573 - RNA, 25 nt, Artificial Sequence
  Description of Artificial Sequence: Synthetic oligonucleotide
cgaugcugagaaccaauaccagaca

SEQ ID NO: 14574 - RNA, 25 nt, Artificial Sequence
  Description of Artificial Sequence: Synthetic oligonucleotide
acuguacaagcucuacgagaggugu

SEQ ID NO: 14575 - RNA, 25 nt, Artificial Sequence
  Description of Artificial Sequence: Synthetic oligonucleotide
ugagguggugauggggaaccuugag

SEQ ID NO: 14576 - RNA, 25 nt, Artificial Sequence
  Description of Artificial Sequence: Synthetic oligonucleotide
gauugugcucacgggacacaaugcc

SEQ ID NO: 14577 - RNA, 25 nt, Artificial Sequence
  Description of Artificial Sequence: Synthetic oligonucleotide
cgaccucuccuuccugcaguggauu

SEQ ID NO: 14578 - RNA, 25 nt, Artificial Sequence
  Description of Artificial Sequence: Synthetic oligonucleotide
ucgagaagugacaggcuauguccuc

SEQ ID NO: 14579 - RNA, 25 nt, Artificial Sequence
  Description of Artificial Sequence: Synthetic oligonucleotide
cguggccaugaaugaauucucuacu

SEQ ID NO: 14580 - RNA, 25 nt, Artificial Sequence
  Description of Artificial Sequence: Synthetic oligonucleotide
ucuaccauugcccaaccuccgcgug

SEQ ID NO: 14581 - RNA, 25 nt, Artificial Sequence
  Description of Artificial Sequence: Synthetic oligonucleotide
ggugcgagggacccaggucuacgau

SEQ ID NO: 14582 - RNA, 25 nt, Artificial Sequence
  Description of Artificial Sequence: Synthetic oligonucleotide
ugggaaguuugccaucuucgucaug

SEQ ID NO: 14583 - RNA, 25 nt, Artificial Sequence
  Description of Artificial Sequence: Synthetic oligonucleotide
guugaacuauaacaccaacuccagc

SEQ ID NO: 14584 - RNA, 25 nt, Artificial Sequence
  Description of Artificial Sequence: Synthetic oligonucleotide
ccacgcucugcgccagcuccgcuug

SEQ ID NO: 14585 - RNA, 25 nt, Artificial Sequence
  Description of Artificial Sequence: Synthetic oligonucleotide
gacucagcucaccggucaguucccg

SEQ ID NO: 14586 - RNA, 25 nt, Artificial Sequence
  Description of Artificial Sequence: Synthetic oligonucleotide
gaugguuccuucuggccucaccccu

SEQ ID NO: 14587 - RNA, 25 nt, Artificial Sequence
  Description of Artificial Sequence: Synthetic oligonucleotide
ucagccagcccaagacugguaccuc

SEQ ID NO: 14588 - RNA, 25 nt, Artificial Sequence
  Description of Artificial Sequence: Synthetic oligonucleotide
ccuugaugaugacccaagacugcuc

SEQ ID NO: 14589 - RNA, 25 nt, Artificial Sequence
  Description of Artificial Sequence: Synthetic oligonucleotide
cacucuaagugccucuuccaaggug

SEQ ID NO: 14590 - RNA, 25 nt, Artificial Sequence
  Description of Artificial Sequence: Synthetic oligonucleotide
gccugucaccuuggccgcugucuaa

SEQ ID NO: 14591 - RNA, 25 nt, Artificial Sequence
  Description of Artificial Sequence: Synthetic oligonucleotide
aagguccauugcucccuaagcaaua

SEQ ID NO: 14592 - RNA, 25 nt, Artificial Sequence
  Description of Artificial Sequence: Synthetic oligonucleotide
agagggcccccaguagggggagcua

SEQ ID NO: 14593 - RNA, 25 nt, Artificial Sequence
  Description of Artificial Sequence: Synthetic oligonucleotide
aggggcaucugcuccagggaaagga

SEQ ID NO: 14594 - RNA, 25 nt, Artificial Sequence
  Description of Artificial Sequence: Synthetic oligonucleotide
aacccuguguccuuguggggcugga

SEQ ID NO: 14595 - RNA, 25 nt, Artificial Sequence
  Description of Artificial Sequence: Synthetic oligonucleotide
agucagagcuggaucuguuaaccgu

SEQ ID NO: 14596 - RNA, 25 nt, Artificial Sequence
  Description of Artificial Sequence: Synthetic oligonucleotide
uuuuucuaauuucaaaguacagugu

SEQ ID NO: 14597 - RNA, 25 nt, Artificial Sequence
  Description of Artificial Sequence: Synthetic oligonucleotide
uaccggaggccaggccugauggcuu

SEQ ID NO: 14598 - RNA, 25 nt, Artificial Sequence
  Description of Artificial Sequence: Synthetic oligonucleotide
uacaccuguaaucccagcauuuugg

SEQ ID NO: 14599 - RNA, 25 nt, Artificial Sequence
  Description of Artificial Sequence: Synthetic oligonucleotide
ggaggccaaggagggcagaucacuu

SEQ ID NO: 14600 - RNA, 25 nt, Artificial Sequence
  Description of Artificial Sequence: Synthetic oligonucleotide
ugagaucaggaguuugagaccagcc

SEQ ID NO: 14601 - RNA, 25 nt, Artificial Sequence
  Description of Artificial Sequence: Synthetic oligonucleotide
cuggccaacauggcgaaacccuguc

SEQ ID NO: 14602 - RNA, 25 nt, Artificial Sequence
  Description of Artificial Sequence: Synthetic oligonucleotide
cucuacuaaaaauacaaaaaaauaa

SEQ ID NO: 14603 - RNA, 25 nt, Artificial Sequence
  Description of Artificial Sequence: Synthetic oligonucleotide
aaaaauaaaauaaaauaaaaaauua

SEQ ID NO: 14604 - RNA, 25 nt, Artificial Sequence
  Description of Artificial Sequence: Synthetic oligonucleotide
gacucagcucaccgagauucuguca

SEQ ID NO: 14605 - RNA, 25 nt, Artificial Sequence
  Description of Artificial Sequence: Synthetic oligonucleotide
aggggguguuuauauugagaagaac

SEQ ID NO: 14606 - RNA, 25 nt, Artificial Sequence
  Description of Artificial Sequence: Synthetic oligonucleotide
cgauaagcuuugucacauggacaca

SEQ ID NO: 14607 - RNA, 25 nt, Artificial Sequence
  Description of Artificial Sequence: Synthetic oligonucleotide
aauugacuggagggacaucgugagg

SEQ ID NO: 14608 - RNA, 25 nt, Artificial Sequence
  Description of Artificial Sequence: Synthetic oligonucleotide
ggaccgagaugcugagauaguggug

SEQ ID NO: 14609 - RNA, 25 nt, Artificial Sequence
  Description of Artificial Sequence: Synthetic oligonucleotide
gaaggacaauggcagaagcuguccc

SEQ ID NO: 14610 - RNA, 25 nt, Artificial Sequence
  Description of Artificial Sequence: Synthetic oligonucleotide
ccccugucaugagguuugcaagggg

SEQ ID NO: 14611 - RNA, 25 nt, Artificial Sequence
  Description of Artificial Sequence: Synthetic oligonucleotide
gcgaugcugggguccuggaucagaa

SEQ ID NO: 14612 - RNA, 25 nt, Artificial Sequence
  Description of Artificial Sequence: Synthetic oligonucleotide
agacugccagacauugaccaagacc

SEQ ID NO: 14613 - RNA, 25 nt, Artificial Sequence
  Description of Artificial Sequence: Synthetic oligonucleotide
caucugugcuccucaguguaauggu

SEQ ID NO: 14614 - RNA, 25 nt, Artificial Sequence
  Description of Artificial Sequence: Synthetic oligonucleotide
ucacugcuuugggcccaaccccaac

SEQ ID NO: 14615 - RNA, 25 nt, Artificial Sequence
  Description of Artificial Sequence: Synthetic oligonucleotide
ccagugcugccaugaugagugugcc

SEQ ID NO: 14616 - RNA, 25 nt, Artificial Sequence
  Description of Artificial Sequence: Synthetic oligonucleotide
cgggggcugcucaggcccucaggac

SEQ ID NO: 14617 - RNA, 25 nt, Artificial Sequence
  Description of Artificial Sequence: Synthetic oligonucleotide
cacagacugcuuugccugccggcac

SEQ ID NO: 14618 - RNA, 25 nt, Artificial Sequence
  Description of Artificial Sequence: Synthetic oligonucleotide
cuucaaugacaguggagccugugua

SEQ ID NO: 14619 - RNA, 25 nt, Artificial Sequence
  Description of Artificial Sequence: Synthetic oligonucleotide
accucgcuguccacagccucuuguc

SEQ ID NO: 14620 - RNA, 25 nt, Artificial Sequence
  Description of Artificial Sequence: Synthetic oligonucleotide
cuacaacaagcuaacuuuccagcug

SEQ ID NO: 14621 - RNA, 25 nt, Artificial Sequence
  Description of Artificial Sequence: Synthetic oligonucleotide
ggaacccaauccccacaccaaguau

SEQ ID NO: 14622 - RNA, 25 nt, Artificial Sequence
  Description of Artificial Sequence: Synthetic oligonucleotide
ucaguauggaggaguuuguguagcc

SEQ ID NO: 14623 - RNA, 25 nt, Artificial Sequence
  Description of Artificial Sequence: Synthetic oligonucleotide
cagcuguccccauaacuuuguggug

SEQ ID NO: 14624 - RNA, 25 nt, Artificial Sequence
  Description of Artificial Sequence: Synthetic oligonucleotide
ggaucaaacauccugugucagggcc

SEQ ID NO: 14625 - RNA, 25 nt, Artificial Sequence
  Description of Artificial Sequence: Synthetic oligonucleotide
cuguccuccugacaagauggaagua

SEQ ID NO: 14626 - RNA, 25 nt, Artificial Sequence
  Description of Artificial Sequence: Synthetic oligonucleotide
agauaaaaaugggcucaagaugugu

SEQ ID NO: 14627 - RNA, 25 nt, Artificial Sequence
  Description of Artificial Sequence: Synthetic oligonucleotide
ugagccuugugggggacuauguccc

SEQ ID NO: 14628 - RNA, 25 nt, Artificial Sequence
  Description of Artificial Sequence: Synthetic oligonucleotide
caaagccugugagggaacaggcucu

SEQ ID NO: 14629 - RNA, 25 nt, Artificial Sequence
  Description of Artificial Sequence: Synthetic oligonucleotide
ugggagccgcuuccagacuguggac

SEQ ID NO: 14630 - RNA, 25 nt, Artificial Sequence
  Description of Artificial Sequence: Synthetic oligonucleotide
cucgagcaacauugauggauuugug

SEQ ID NO: 14631 - RNA, 25 nt, Artificial Sequence
  Description of Artificial Sequence: Synthetic oligonucleotide
gaacugcaccaagauccugggcaac

SEQ ID NO: 14632 - RNA, 25 nt, Artificial Sequence
  Description of Artificial Sequence: Synthetic oligonucleotide
ccuggacuuucugaucaccggccuc

SEQ ID NO: 14633 - RNA, 25 nt, Artificial Sequence
  Description of Artificial Sequence: Synthetic oligonucleotide
caauggagaccccuggcacaagauc

SEQ ID NO: 14634 - RNA, 25 nt, Artificial Sequence
  Description of Artificial Sequence: Synthetic oligonucleotide
cccugcccuggacccagagaagcuc

SEQ ID NO: 14635 - RNA, 25 nt, Artificial Sequence
  Description of Artificial Sequence: Synthetic oligonucleotide
caaugucuuccggacaguacgggag

SEQ ID NO: 14636 - RNA, 25 nt, Artificial Sequence
  Description of Artificial Sequence: Synthetic oligonucleotide
gaucacagguuaccugaacauccag

SEQ ID NO: 14637 - RNA, 25 nt, Artificial Sequence
  Description of Artificial Sequence: Synthetic oligonucleotide
guccuggccgccccacaugcacaac

SEQ ID NO: 14638 - RNA, 25 nt, Artificial Sequence
  Description of Artificial Sequence: Synthetic oligonucleotide
cuucaguguuuuuuccaauuugaca

SEQ ID NO: 14639 - RNA, 25 nt, Artificial Sequence
  Description of Artificial Sequence: Synthetic oligonucleotide
aaccauuggaggcagaagccucuac

SEQ ID NO: 14640 - RNA, 25 nt, Artificial Sequence
  Description of Artificial Sequence: Synthetic oligonucleotide
caaccggggcuucucauuguugauc

SEQ ID NO: 14641 - RNA, 25 nt, Artificial Sequence
  Description of Artificial Sequence: Synthetic oligonucleotide
caugaagaacuugaaugucacaucu

SEQ ID NO: 14642 - RNA, 25 nt, Artificial Sequence
  Description of Artificial Sequence: Synthetic oligonucleotide
ucugggcuuccgaucccugaaggaa

SEQ ID NO: 14643 - RNA, 25 nt, Artificial Sequence
  Description of Artificial Sequence: Synthetic oligonucleotide
aauuagugcugggcguaucuauaua

SEQ ID NO: 14644 - RNA, 25 nt, Artificial Sequence
  Description of Artificial Sequence: Synthetic oligonucleotide
aagugccaauaggcagcucugcuac

SEQ ID NO: 14645 - RNA, 25 nt, Artificial Sequence
  Description of Artificial Sequence: Synthetic oligonucleotide
ccaccacucuuugaacuggaccaag

SEQ ID NO: 14646 - RNA, 25 nt, Artificial Sequence
  Description of Artificial Sequence: Synthetic oligonucleotide
ggugcuucgggggccuacggaagag

SEQ ID NO: 14647 - RNA, 25 nt, Artificial Sequence
  Description of Artificial Sequence: Synthetic oligonucleotide
gcgacuagacaucaagcauaaucgg

SEQ ID NO: 14648 - RNA, 25 nt, Artificial Sequence
  Description of Artificial Sequence: Synthetic oligonucleotide
gccgcgcagagacugcguggcagag

SEQ ID NO: 14649 - RNA, 25 nt, Artificial Sequence
  Description of Artificial Sequence: Synthetic oligonucleotide
gggcaaagugugugacccacugugc

SEQ ID NO: 14650 - RNA, 25 nt, Artificial Sequence
  Description of Artificial Sequence: Synthetic oligonucleotide
cuccucugggggaugcuggggccca

SEQ ID NO: 14651 - RNA, 25 nt, Artificial Sequence
  Description of Artificial Sequence: Synthetic oligonucleotide
aggcccuggucagugcuuguccugu

SEQ ID NO: 14652 - RNA, 25 nt, Artificial Sequence
  Description of Artificial Sequence: Synthetic oligonucleotide
ucgaaauuauagccgaggagguguc

SEQ ID NO: 14653 - RNA, 25 nt, Artificial Sequence
  Description of Artificial Sequence: Synthetic oligonucleotide
cugugugacccacugcaacuuucug

SEQ ID NO: 14654 - RNA, 25 nt, Artificial Sequence
  Description of Artificial Sequence: Synthetic oligonucleotide
gaauggggagccucgagaauuugcc

SEQ ID NO: 14655 - RNA, 25 nt, Artificial Sequence
  Description of Artificial Sequence: Synthetic oligonucleotide
ccaugaggccgaaugcuucuccugc

SEQ ID NO: 14656 - RNA, 25 nt, Artificial Sequence
  Description of Artificial Sequence: Synthetic oligonucleotide
ccacccggaaugccaacccauggag

SEQ ID NO: 14657 - RNA, 25 nt, Artificial Sequence
  Description of Artificial Sequence: Synthetic oligonucleotide
gggcacugccacaugcaauggcucg

SEQ ID NO: 14658 - RNA, 25 nt, Artificial Sequence
  Description of Artificial Sequence: Synthetic oligonucleotide
gggcucugauacuugugcucaaugu

SEQ ID NO: 14659 - RNA, 25 nt, Artificial Sequence
  Description of Artificial Sequence: Synthetic oligonucleotide
ugcccauuuucgagaugggccccac

SEQ ID NO: 14660 - RNA, 25 nt, Artificial Sequence
  Description of Artificial Sequence: Synthetic oligonucleotide
cugugugagcagcugcccccaugga

SEQ ID NO: 14661 - RNA, 25 nt, Artificial Sequence
  Description of Artificial Sequence: Synthetic oligonucleotide
aguccuaggugccaagggcccaauc

SEQ ID NO: 14662 - RNA, 25 nt, Artificial Sequence
  Description of Artificial Sequence: Synthetic oligonucleotide
cuacaaguacccagauguucagaau

SEQ ID NO: 14663 - RNA, 25 nt, Artificial Sequence
  Description of Artificial Sequence: Synthetic oligonucleotide
ugaaugucggcccugccaugagaac

SEQ ID NO: 14664 - RNA, 25 nt, Artificial Sequence
  Description of Artificial Sequence: Synthetic oligonucleotide
cugcacccagggguguaaaggacca

SEQ ID NO: 14665 - RNA, 25 nt, Artificial Sequence
  Description of Artificial Sequence: Synthetic oligonucleotide
agagcuucaagacuguuuaggacaa

SEQ ID NO: 14666 - RNA, 25 nt, Artificial Sequence
  Description of Artificial Sequence: Synthetic oligonucleotide
aacacuggugcugaucggcaaaacc

SEQ ID NO: 14667 - RNA, 25 nt, Artificial Sequence
  Description of Artificial Sequence: Synthetic oligonucleotide
ccaucugacaauggcuuugacagug

SEQ ID NO: 14668 - RNA, 25 nt, Artificial Sequence
  Description of Artificial Sequence: Synthetic oligonucleotide
gauagcaggauugguagugauuuuc

SEQ ID NO: 14669 - RNA, 25 nt, Artificial Sequence
  Description of Artificial Sequence: Synthetic oligonucleotide
caugaugcugggcggcacuuuucuc

SEQ ID NO: 14670 - RNA, 25 nt, Artificial Sequence
  Description of Artificial Sequence: Synthetic oligonucleotide
cuacuggcgugggcgccggauucag

SEQ ID NO: 14671 - RNA, 25 nt, Artificial Sequence
  Description of Artificial Sequence: Synthetic oligonucleotide
gaauaaaagggcuaugaggcgauac

SEQ ID NO: 14672 - RNA, 25 nt, Artificial Sequence
  Description of Artificial Sequence: Synthetic oligonucleotide
cuuggaacggggugagagcauagag

SEQ ID NO: 14673 - RNA, 25 nt, Artificial Sequence
  Description of Artificial Sequence: Synthetic oligonucleotide
gccucuggaccccagugagaaggcu

SEQ ID NO: 14674 - RNA, 25 nt, Artificial Sequence
  Description of Artificial Sequence: Synthetic oligonucleotide
uaacaaagucuuggccagaaucuuc

SEQ ID NO: 14675 - RNA, 25 nt, Artificial Sequence
  Description of Artificial Sequence: Synthetic oligonucleotide
caaagagacagagcuaaggaagcuu

SEQ ID NO: 14676 - RNA, 25 nt, Artificial Sequence
  Description of Artificial Sequence: Synthetic oligonucleotide
uaaagugcuuggcucgggugucuuu

SEQ ID NO: 14677 - RNA, 25 nt, Artificial Sequence
  Description of Artificial Sequence: Synthetic oligonucleotide
uggaacugugcacaaaggagugugg

SEQ ID NO: 14678 - RNA, 25 nt, Artificial Sequence
  Description of Artificial Sequence: Synthetic oligonucleotide
gaucccugagggugaaucaaucaag

SEQ ID NO: 14679 - RNA, 25 nt, Artificial Sequence
  Description of Artificial Sequence: Synthetic oligonucleotide
gauuccagucugcauuaaagucauu

SEQ ID NO: 14680 - RNA, 25 nt, Artificial Sequence
  Description of Artificial Sequence: Synthetic oligonucleotide
ugaggacaagaguggacggcagagu

SEQ ID NO: 14681 - RNA, 25 nt, Artificial Sequence
  Description of Artificial Sequence: Synthetic oligonucleotide
uuuucaagcugugacagaucauaug

SEQ ID NO: 14682 - RNA, 25 nt, Artificial Sequence
  Description of Artificial Sequence: Synthetic oligonucleotide
gcuggccauuggcagccuggaccau

SEQ ID NO: 14683 - RNA, 25 nt, Artificial Sequence
  Description of Artificial Sequence: Synthetic oligonucleotide
ugcccacauuguaaggcugcuggga

SEQ ID NO: 14684 - RNA, 25 nt, Artificial Sequence
  Description of Artificial Sequence: Synthetic oligonucleotide
acuaugcccagggucaucucugcag

SEQ ID NO: 14685 - RNA, 25 nt, Artificial Sequence
  Description of Artificial Sequence: Synthetic oligonucleotide
gcuugucacucaauauuugccucug

SEQ ID NO: 14686 - RNA, 25 nt, Artificial Sequence
  Description of Artificial Sequence: Synthetic oligonucleotide
ggguucucugcuggaucaugugaga

SEQ ID NO: 14687 - RNA, 25 nt, Artificial Sequence
  Description of Artificial Sequence: Synthetic oligonucleotide
acaacaccggggggcacuggggcca

SEQ ID NO: 14688 - RNA, 25 nt, Artificial Sequence
  Description of Artificial Sequence: Synthetic oligonucleotide
acagcugcugcucaacuggggagua

SEQ ID NO: 14689 - RNA, 25 nt, Artificial Sequence
  Description of Artificial Sequence: Synthetic oligonucleotide
acaaauugccaagggaauguacuac

SEQ ID NO: 14690 - RNA, 25 nt, Artificial Sequence
  Description of Artificial Sequence: Synthetic oligonucleotide
ccuugaggaacaugguauggugcau

SEQ ID NO: 14691 - RNA, 25 nt, Artificial Sequence
  Description of Artificial Sequence: Synthetic oligonucleotide
uagaaaccuggcugcccgaaacgug

SEQ ID NO: 14692 - RNA, 25 nt, Artificial Sequence
  Description of Artificial Sequence: Synthetic oligonucleotide
gcuacucaagucacccagucagguu

SEQ ID NO: 14693 - RNA, 25 nt, Artificial Sequence
  Description of Artificial Sequence: Synthetic oligonucleotide
ucagguggcagauuuugguguggcu

SEQ ID NO: 14694 - RNA, 25 nt, Artificial Sequence
  Description of Artificial Sequence: Synthetic oligonucleotide
ugaccugcugccuccugaugauaag

SEQ ID NO: 14695 - RNA, 25 nt, Artificial Sequence
  Description of Artificial Sequence: Synthetic oligonucleotide
gcagcugcuauacagugaggccaag

SEQ ID NO: 14696 - RNA, 25 nt, Artificial Sequence
  Description of Artificial Sequence: Synthetic oligonucleotide
gacuccaauuaaguggauggcccuu

SEQ ID NO: 14697 - RNA, 25 nt, Artificial Sequence
  Description of Artificial Sequence: Synthetic oligonucleotide
ugagaguauccacuuugggaaauac

SEQ ID NO: 14698 - RNA, 25 nt, Artificial Sequence
  Description of Artificial Sequence: Synthetic oligonucleotide
cacacaccagagugaugucuggagc

SEQ ID NO: 14699 - RNA, 25 nt, Artificial Sequence
  Description of Artificial Sequence: Synthetic oligonucleotide
cuauggugugacaguuugggaguug

SEQ ID NO: 14700 - RNA, 25 nt, Artificial Sequence
  Description of Artificial Sequence: Synthetic oligonucleotide
gaugaccuucggggcagagcccuau

SEQ ID NO: 14701 - RNA, 25 nt, Artificial Sequence
  Description of Artificial Sequence: Synthetic oligonucleotide
ugcagggcuacgauuggcugaagua

SEQ ID NO: 14702 - RNA, 25 nt, Artificial Sequence
  Description of Artificial Sequence: Synthetic oligonucleotide
accagaccugcuagagaagggggag

SEQ ID NO: 14703 - RNA, 25 nt, Artificial Sequence
  Description of Artificial Sequence: Synthetic oligonucleotide
gcgguuggcacagccccagaucugc

SEQ ID NO: 14704 - RNA, 25 nt, Artificial Sequence
  Description of Artificial Sequence: Synthetic oligonucleotide
cacaauugaugucuacauggugaug

SEQ ID NO: 14705 - RNA, 25 nt, Artificial Sequence
  Description of Artificial Sequence: Synthetic oligonucleotide
ggucaaguguuggaugauugaugag

SEQ ID NO: 14706 - RNA, 25 nt, Artificial Sequence
  Description of Artificial Sequence: Synthetic oligonucleotide
gaacauucgcccaaccuuuaaagaa

SEQ ID NO: 14707 - RNA, 25 nt, Artificial Sequence
  Description of Artificial Sequence: Synthetic oligonucleotide
acuagccaaugaguucaccaggaug

SEQ ID NO: 14708 - RNA, 25 nt, Artificial Sequence
  Description of Artificial Sequence: Synthetic oligonucleotide
ggcccgagacccaccacgguaucug

SEQ ID NO: 14709 - RNA, 25 nt, Artificial Sequence
  Description of Artificial Sequence: Synthetic oligonucleotide
ggucauaaagagagagagugggccu

SEQ ID NO: 14710 - RNA, 25 nt, Artificial Sequence
  Description of Artificial Sequence: Synthetic oligonucleotide
uggaauagccccugggccagagccc

SEQ ID NO: 14711 - RNA, 25 nt, Artificial Sequence
  Description of Artificial Sequence: Synthetic oligonucleotide
ccauggucugacaaacaagaagcua

SEQ ID NO: 14712 - RNA, 25 nt, Artificial Sequence
  Description of Artificial Sequence: Synthetic oligonucleotide
agaggaaguagagcuggagccagaa

SEQ ID NO: 14713 - RNA, 25 nt, Artificial Sequence
  Description of Artificial Sequence: Synthetic oligonucleotide
acuagaccuagaccuagacuuggaa

SEQ ID NO: 14714 - RNA, 25 nt, Artificial Sequence
  Description of Artificial Sequence: Synthetic oligonucleotide
agcagaggaggacaaccuggcaacc

SEQ ID NO: 14715 - RNA, 25 nt, Artificial Sequence
  Description of Artificial Sequence: Synthetic oligonucleotide
caccacacugggcuccgcccucagc

SEQ ID NO: 14716 - RNA, 25 nt, Artificial Sequence
  Description of Artificial Sequence: Synthetic oligonucleotide
ccuaccaguuggaacacuuaaucgg

SEQ ID NO: 14717 - RNA, 25 nt, Artificial Sequence
  Description of Artificial Sequence: Synthetic oligonucleotide
gccacgugggagccagagccuuuua

SEQ ID NO: 14718 - RNA, 25 nt, Artificial Sequence
  Description of Artificial Sequence: Synthetic oligonucleotide
aaguccaucaucuggauacaugccc

SEQ ID NO: 14719 - RNA, 25 nt, Artificial Sequence
  Description of Artificial Sequence: Synthetic oligonucleotide
caugaaccaggguaaucuuggggag

SEQ ID NO: 14720 - RNA, 25 nt, Artificial Sequence
  Description of Artificial Sequence: Synthetic oligonucleotide
gucuugccaggagucugcaguuucu

SEQ ID NO: 14721 - RNA, 25 nt, Artificial Sequence
  Description of Artificial Sequence: Synthetic oligonucleotide
ugggagcagugaacggugcccccgu

SEQ ID NO: 14722 - RNA, 25 nt, Artificial Sequence
  Description of Artificial Sequence: Synthetic oligonucleotide
uccagucucucuacacccaaugcca

SEQ ID NO: 14723 - RNA, 25 nt, Artificial Sequence
  Description of Artificial Sequence: Synthetic oligonucleotide
acggggaugccuggcaucagaguca

SEQ ID NO: 14724 - RNA, 25 nt, Artificial Sequence
  Description of Artificial Sequence: Synthetic oligonucleotide
aucagaggggcauguaacaggcucu

SEQ ID NO: 14725 - RNA, 25 nt, Artificial Sequence
  Description of Artificial Sequence: Synthetic oligonucleotide
ugaggcugagcuccaggagaaagug

SEQ ID NO: 14726 - RNA, 25 nt, Artificial Sequence
  Description of Artificial Sequence: Synthetic oligonucleotide
gucaauguguaggagccggagcagg

SEQ ID NO: 14727 - RNA, 25 nt, Artificial Sequence
  Description of Artificial Sequence: Synthetic oligonucleotide
gagccggagcccacggccacgcgga

SEQ ID NO: 14728 - RNA, 25 nt, Artificial Sequence
  Description of Artificial Sequence: Synthetic oligonucleotide
agauagcgccuaccauucccagcgc

SEQ ID NO: 14729 - RNA, 25 nt, Artificial Sequence
  Description of Artificial Sequence: Synthetic oligonucleotide
ccacagucugcugacuccuguuacc

SEQ ID NO: 14730 - RNA, 25 nt, Artificial Sequence
  Description of Artificial Sequence: Synthetic oligonucleotide
cccacucuccccacccggguuagag

SEQ ID NO: 14731 - RNA, 25 nt, Artificial Sequence
  Description of Artificial Sequence: Synthetic oligonucleotide
ggaagaggaugucaacgguuauguc

SEQ ID NO: 14732 - RNA, 25 nt, Artificial Sequence
  Description of Artificial Sequence: Synthetic oligonucleotide
caugccagauacacaccucaaaggu

SEQ ID NO: 14733 - RNA, 25 nt, Artificial Sequence
  Description of Artificial Sequence: Synthetic oligonucleotide
uacucccuccucccgggaaggcacc

SEQ ID NO: 14734 - RNA, 25 nt, Artificial Sequence
  Description of Artificial Sequence: Synthetic oligonucleotide
ccuuucuucagugggucucaguucu

SEQ ID NO: 14735 - RNA, 25 nt, Artificial Sequence
  Description of Artificial Sequence: Synthetic oligonucleotide
uguccuggguacugaagaagaagau

SEQ ID NO: 14736 - RNA, 25 nt, Artificial Sequence
  Description of Artificial Sequence: Synthetic oligonucleotide
ugaagaugaggaguaugaauacaug

SEQ ID NO: 14737 - RNA, 25 nt, Artificial Sequence
  Description of Artificial Sequence: Synthetic oligonucleotide
gaaccggaggagaaggcacagucca

SEQ ID NO: 14738 - RNA, 25 nt, Artificial Sequence
  Description of Artificial Sequence: Synthetic oligonucleotide
accucaucccccuaggccaaguucc

SEQ ID NO: 14739 - RNA, 25 nt, Artificial Sequence
  Description of Artificial Sequence: Synthetic oligonucleotide
ccuugaggagcuggguuaugaguac

SEQ ID NO: 14740 - RNA, 25 nt, Artificial Sequence
  Description of Artificial Sequence: Synthetic oligonucleotide
cauggauguggggucagaccucagu

SEQ ID NO: 14741 - RNA, 25 nt, Artificial Sequence
  Description of Artificial Sequence: Synthetic oligonucleotide
ugccucucugggcagcacacagagu

SEQ ID NO: 14742 - RNA, 25 nt, Artificial Sequence
  Description of Artificial Sequence: Synthetic oligonucleotide
uugcccacuccacccuguacccauc

SEQ ID NO: 14743 - RNA, 25 nt, Artificial Sequence
  Description of Artificial Sequence: Synthetic oligonucleotide
caugcccacugcaggcacaacucca

SEQ ID NO: 14744 - RNA, 25 nt, Artificial Sequence
  Description of Artificial Sequence: Synthetic oligonucleotide
agaugaagacuaugaauauaugaau

SEQ ID NO: 14745 - RNA, 25 nt, Artificial Sequence
  Description of Artificial Sequence: Synthetic oligonucleotide
ucggcaacgagauggaggugguccu

SEQ ID NO: 14746 - RNA, 25 nt, Artificial Sequence
  Description of Artificial Sequence: Synthetic oligonucleotide
ugggggugauuaugcagccaugggg

SEQ ID NO: 14747 - RNA, 25 nt, Artificial Sequence
  Description of Artificial Sequence: Synthetic oligonucleotide
ggccugcccagcaucugagcaaggg

SEQ ID NO: 14748 - RNA, 25 nt, Artificial Sequence
  Description of Artificial Sequence: Synthetic oligonucleotide
guaugaagagaugagagcuuuucag

SEQ ID NO: 14749 - RNA, 25 nt, Artificial Sequence
  Description of Artificial Sequence: Synthetic oligonucleotide
ggggccuggacaucaggccccccau

SEQ ID NO: 14750 - RNA, 25 nt, Artificial Sequence
  Description of Artificial Sequence: Synthetic oligonucleotide
uguccauuaugcccgccuaaaaacu

SEQ ID NO: 14751 - RNA, 25 nt, Artificial Sequence
  Description of Artificial Sequence: Synthetic oligonucleotide
ucuacguagcuuagaggcuacagac

SEQ ID NO: 14752 - RNA, 25 nt, Artificial Sequence
  Description of Artificial Sequence: Synthetic oligonucleotide
cucugccuuugauaacccugauuac

SEQ ID NO: 14753 - RNA, 25 nt, Artificial Sequence
  Description of Artificial Sequence: Synthetic oligonucleotide
cuggcauagcaggcuuuuccccaag

SEQ ID NO: 14754 - RNA, 25 nt, Artificial Sequence
  Description of Artificial Sequence: Synthetic oligonucleotide
ggcuaaugcccagagaacguaacuc

SEQ ID NO: 14755 - RNA, 25 nt, Artificial Sequence
  Description of Artificial Sequence: Synthetic oligonucleotide
ccugcucccuguggcacucagggag

SEQ ID NO: 14756 - RNA, 25 nt, Artificial Sequence
  Description of Artificial Sequence: Synthetic oligonucleotide
gcauuuaauggcagcuagugccuuu

SEQ ID NO: 14757 - RNA, 25 nt, Artificial Sequence
  Description of Artificial Sequence: Synthetic oligonucleotide
uagaggguaccgucuucucccuauu

SEQ ID NO: 14758 - RNA, 25 nt, Artificial Sequence
  Description of Artificial Sequence: Synthetic oligonucleotide
ucccucucucucccaggucccagcc

SEQ ID NO: 14759 - RNA, 25 nt, Artificial Sequence
  Description of Artificial Sequence: Synthetic oligonucleotide
cccuuuuccccagucccagacaauu

SEQ ID NO: 14760 - RNA, 25 nt, Artificial Sequence
  Description of Artificial Sequence: Synthetic oligonucleotide
uccauucaaucuuuggaggcuuuua

SEQ ID NO: 14761 - RNA, 25 nt, Artificial Sequence
  Description of Artificial Sequence: Synthetic oligonucleotide
aaacauuuugacacaaaauucuuau

SEQ ID NO: 14762 - RNA, 25 nt, Artificial Sequence
  Description of Artificial Sequence: Synthetic oligonucleotide
ugguauguagccagcugugcacuuu

SEQ ID NO: 14763 - RNA, 25 nt, Artificial Sequence
  Description of Artificial Sequence: Synthetic oligonucleotide
ucuucucuuucccaaccccaggaaa

SEQ ID NO: 14764 - RNA, 25 nt, Artificial Sequence
  Description of Artificial Sequence: Synthetic oligonucleotide
agguuuuccuuauuuugugugcuuu

SEQ ID NO: 14765 - RNA, 25 nt, Artificial Sequence
  Description of Artificial Sequence: Synthetic oligonucleotide
ucccagucccauuccucagcuucuu

SEQ ID NO: 14766 - RNA, 25 nt, Artificial Sequence
  Description of Artificial Sequence: Synthetic oligonucleotide
ucacaggcacuccuggagauaugaa

SEQ ID NO: 14767 - RNA, 25 nt, Artificial Sequence
  Description of Artificial Sequence: Synthetic oligonucleotide
aggauuacucuccauaucccuuccu

SEQ ID NO: 14768 - RNA, 25 nt, Artificial Sequence
  Description of Artificial Sequence: Synthetic oligonucleotide
ucucaggcucuugacuacuuggaac

SEQ ID NO: 14769 - RNA, 25 nt, Artificial Sequence
  Description of Artificial Sequence: Synthetic oligonucleotide
cuaggcucuuaugugugccuuuguu

SEQ ID NO: 14770 - RNA, 25 nt, Artificial Sequence
  Description of Artificial Sequence: Synthetic oligonucleotide
uucccaucagacugucaagaagagg

SEQ ID NO: 14771 - RNA, 25 nt, Artificial Sequence
  Description of Artificial Sequence: Synthetic oligonucleotide
gaaagggaggaaaccuagcagagga

SEQ ID NO: 14772 - RNA, 25 nt, Artificial Sequence
  Description of Artificial Sequence: Synthetic oligonucleotide
aaaguguaauuuugguuuaugacuc

SEQ ID NO: 14773 - RNA, 25 nt, Artificial Sequence
  Description of Artificial Sequence: Synthetic oligonucleotide
cuuaacccccuagaaagacagaagc

SEQ ID NO: 14774 - RNA, 25 nt, Artificial Sequence
  Description of Artificial Sequence: Synthetic oligonucleotide
cuuaaaaucugugaagaaagagguu

SEQ ID NO: 14775 - RNA, 25 nt, Artificial Sequence
  Description of Artificial Sequence: Synthetic oligonucleotide
uaggaguagauauugauuacuauca

SEQ ID NO: 14776 - RNA, 25 nt, Artificial Sequence
  Description of Artificial Sequence: Synthetic oligonucleotide
auaauucagcacuuaacuaugagcc

SEQ ID NO: 14777 - RNA, 25 nt, Artificial Sequence
  Description of Artificial Sequence: Synthetic oligonucleotide
caggcaucauacuaaacuucaccua

SEQ ID NO: 14778 - RNA, 25 nt, Artificial Sequence
  Description of Artificial Sequence: Synthetic oligonucleotide
acauuaucucacuuaguccuuuauc

SEQ ID NO: 14779 - RNA, 25 nt, Artificial Sequence
  Description of Artificial Sequence: Synthetic oligonucleotide
cauccuuaaaacaauucugugacau

SEQ ID NO: 14780 - RNA, 25 nt, Artificial Sequence
  Description of Artificial Sequence: Synthetic oligonucleotide
uacauauuaucucauuuuacacaaa

SEQ ID NO: 14781 - RNA, 25 nt, Artificial Sequence
  Description of Artificial Sequence: Synthetic oligonucleotide
agggaagucgggcaugguggcucau

SEQ ID NO: 14782 - RNA, 25 nt, Artificial Sequence
  Description of Artificial Sequence: Synthetic oligonucleotide
ugccuguaaucucagcacuuuggga

SEQ ID NO: 14783 - RNA, 25 nt, Artificial Sequence
  Description of Artificial Sequence: Synthetic oligonucleotide
aggcugaggcagaaggauuaccuga

SEQ ID NO: 14784 - RNA, 25 nt, Artificial Sequence
  Description of Artificial Sequence: Synthetic oligonucleotide
aggcaaggaguuugagaccagcuua

SEQ ID NO: 14785 - RNA, 25 nt, Artificial Sequence
  Description of Artificial Sequence: Synthetic oligonucleotide
agccaacauaguaagacccccaucu

SEQ ID NO: 14786 - RNA, 25 nt, Artificial Sequence
  Description of Artificial Sequence: Synthetic oligonucleotide
aaaaaaaaacuuuagaacugggugc

SEQ ID NO: 14787 - RNA, 25 nt, Artificial Sequence
  Description of Artificial Sequence: Synthetic oligonucleotide
caguggcucaugccuguaaucccag

SEQ ID NO: 14788 - RNA, 25 nt, Artificial Sequence
  Description of Artificial Sequence: Synthetic oligonucleotide
gccagcacuuugggaggcugagaug

SEQ ID NO: 14789 - RNA, 25 nt, Artificial Sequence
  Description of Artificial Sequence: Synthetic oligonucleotide
gggaagaucacuugagcccagaauu

SEQ ID NO: 14790 - RNA, 25 nt, Artificial Sequence
  Description of Artificial Sequence: Synthetic oligonucleotide
uagagauaagccuauggaaacauag

SEQ ID NO: 14791 - RNA, 25 nt, Artificial Sequence
  Description of Artificial Sequence: Synthetic oligonucleotide
gcaagacacugucucuacaggggaa

SEQ ID NO: 14792 - RNA, 25 nt, Artificial Sequence
  Description of Artificial Sequence: Synthetic oligonucleotide
aaagagaugaaauaaauuaagcagu

SEQ ID NO: 14793 - RNA, 25 nt, Artificial Sequence
  Description of Artificial Sequence: Synthetic oligonucleotide
uagauccaggaugcaaaauccuccc

SEQ ID NO: 14794 - RNA, 25 nt, Artificial Sequence
  Description of Artificial Sequence: Synthetic oligonucleotide
caauuccugugcaugugcucuuauu

SEQ ID NO: 14795 - RNA, 25 nt, Artificial Sequence
  Description of Artificial Sequence: Synthetic oligonucleotide
uguaaggugccaagaaaaacugauu

SEQ ID NO: 14796 - RNA, 25 nt, Artificial Sequence
  Description of Artificial Sequence: Synthetic oligonucleotide
uuaaguuacagcccuuguuuaaggg

SEQ ID NO: 14797 - RNA, 25 nt, Artificial Sequence
  Description of Artificial Sequence: Synthetic oligonucleotide
ggcacuguuucuuguuuuugcacug

SEQ ID NO: 14798 - RNA, 25 nt, Artificial Sequence
  Description of Artificial Sequence: Synthetic oligonucleotide
gaaucaagucuaaccccaacagcca

SEQ ID NO: 14799 - RNA, 25 nt, Artificial Sequence
  Description of Artificial Sequence: Synthetic oligonucleotide
acauccuccuauaccuagacaucuc

SEQ ID NO: 14800 - RNA, 25 nt, Artificial Sequence
  Description of Artificial Sequence: Synthetic oligonucleotide
caucucaggaagugguggugggggu

SEQ ID NO: 14801 - RNA, 25 nt, Artificial Sequence
  Description of Artificial Sequence: Synthetic oligonucleotide
uagucagaaggaaaaauaacuggac

SEQ ID NO: 14802 - RNA, 25 nt, Artificial Sequence
  Description of Artificial Sequence: Synthetic oligonucleotide
caucuuuguguaaaccauaauccac

SEQ ID NO: 14803 - RNA, 25 nt, Artificial Sequence
  Description of Artificial Sequence: Synthetic oligonucleotide
caugugccguaaaugaucuucacuc

SEQ ID NO: 14804 - RNA, 25 nt, Artificial Sequence
  Description of Artificial Sequence: Synthetic oligonucleotide
ccuuauccgagggcaaauucacaag

SEQ ID NO: 14805 - RNA, 25 nt, Artificial Sequence
  Description of Artificial Sequence: Synthetic oligonucleotide
ggauccccaagauccacuuuuagaa

SEQ ID NO: 14806 - RNA, 25 nt, Artificial Sequence
  Description of Artificial Sequence: Synthetic oligonucleotide
cacuuuuagaagccauucucaucca

SEQ ID NO: 14807 - RNA, 11941 nt, Homo sapiens
cacgcgcgcccggcugggggaucuccuccgcgugcccgaaagggggauaugccauuuggacauguaauugucagcacgggaucugagacuuccaaaaaaugaagccggcgacaggacuuugggucugggugagccuucucguggcggcggggaccguccagcccagcgauucucagucagugugugcaggaacggagaauaaacugagcucucucucugaccuggaacagcaguaccgagccuugcgcaaguacuaugaaaacugugagguugucaugggcaaccuggagauaaccagcauugagcacaaccgggaccucuccuuccugcggucuguucgagaagucacaggcuacguguuaguggcucuuaaucaguuucguuaccugccucuggagaauuuacgcauuauucgugggacaaaacuuuaugaggaucgauaugccuuggcaauauuuuuaaacuacagaaaagauggaaacuuuggacuucaagaacuuggauuaaagaacuugacagaaauccuaaaugguggagucuauguagaccagaacaaauuccuuuguuaugcagacaccauucauuggcaagauauuguucggaacccauggccuuccaacuugacucuugugucaacaaaugguaguucaggauguggacguugccauaaguccuguacuggccguugcuggggacccacagaaaaucauugccagacuuugacaaggacggugugugcagaacaaugugacggcagaugcuacggaccuuacgucagugacugcugccaucgagaaugugcuggaggcugcucaggaccuaaggacacagacugcuuugccugcaugaauuucaaugacaguggagcauguguuacucaguguccccaaaccuuugucuacaauccaaccaccuuucaacuggagcacaauuucaaugcaaaguacacauauggagcauucugugucaagaaauguccacauaacuuugugguagauuccaguucuugugugcgugccugcccuaguuccaagauggaaguagaagaaaaugggauuaaaauguguaaaccuugcacugacauuugcccaaaagcuugugauggcauuggcacaggaucauugaugucagcucagacuguggauuccaguaacauugacaaauucauaaacuguaccaagaucaaugggaauuugaucuuucuagucacugguauucauggggacccuuacaaugcaauugaagccauagacccagagaaacugaacgucuuucggacagucagagagauaacagguuuccugaacauacagucauggccaccaaacaugacugacuucaguguuuuuucuaaccuggugaccauugguggaagaguacucuauaguggccuguccuugcuuauccucaagcaacagggcaucaccucucuacaguuccagucccugaaggaaaucagcgcaggaaacaucuauauuacugacaacagcaaccuguguuauuaucauaccauuaacuggacaacacucuucagcacaaucaaccagagaauaguaauccgggacaacagaaaagcugaaaauuguacugcugaaggaauggugugcaaccaucuguguuccagugauggcuguuggggaccugggccagaccaaugucugucgugucgccgcuucaguagaggaaggaucugcauagagucuuguaaccucuaugauggugaauuucgggaguuugagaauggcuccaucuguguggagugugacccccagugugagaagauggaagauggccuccucacaugccauggaccggguccugacaacuguacaaagugcucucauuuuaaagauggcccaaacuguguggaaaaauguccagauggcuuacagggggcaaacaguuucauuuucaaguaugcugauccagaucgggagugccacccaugccauccaaacugcacccaaggguguaacggucccacuagucaugacugcauuuacuacccauggacgggccauuccacuuuaccacaacaugcuagaacuccccugauugcagcuggaguaauuggugggcucuucauucuggucauugugggucugacauuugcuguuuauguuagaaggaagagcaucaaaaagaaaagagccuugagaagauucuuggaaacagaguugguggaaccauuaacucccaguggcacagcacccaaucaagcucaacuucguauuuugaaagaaacugagcugaagaggguaaaaguccuuggcucaggugcuuuuggaacgguuuauaaagguauuuggguaccugaaggagaaacugugaagauuccuguggcuauuaagauucuuaaugagacaacuggucccaaggcaaauguggaguucauggaugaagcucugaucauggcaaguauggaucauccacaccuaguccgguugcugggugugugucugagcccaaccauccagcugguuacucaacuuaugccccauggcugccuguuggaguauguccacgagcacaaggauaacauuggaucacaacugcugcuuaacugguguguccagauagcuaagggaaugauguaccuggaagaaagacgacucguucaucgggauuuggcagcccguaaugucuuagugaaaucuccaaaccaugugaaaaucacagauuuugggcuagccagacucuuggaaggagaugaaaaagaguacaaugcugauggaggaaagaugccaauuaaauggauggcucuggaguguauacauuacaggaaauucacccaucagagugacguuuggagcuauggaguuacuauaugggaacugaugaccuuuggaggaaaacccuaugauggaauuccaacgcgagaaaucccugauuuauuagagaaaggagaacguuugccucagccucccaucugcacuauugacguuuacauggucauggucaaauguuggaugauugaugcugacaguagaccuaaauuuaaggaacuggcugcugaguuuucaaggauggcucgagacccucaaagauaccuaguuauucagggugaugaucguaugaagcuucccaguccaaaugacagcaaguucuuucagaaucucuuggaugaagaggauuuggaagauaugauggaugcugaggaguacuuggucccucaggcuuucaacaucccaccucccaucuauacuuccagagcaagaauugacucgaauaggagugaaauuggacacagcccuccuccugccuacacccccaugucaggaaaccaguuuguauaccgagauggagguuuugcugcugaacaaggagugucugugcccuacagagccccaacuagcacaauuccagaagcuccuguggcacagggugcuacugcugagauuuuugaugacuccugcuguaauggcacccuacgcaagccaguggcaccccauguccaagaggacaguagcacccagagguacagugcugaccccaccguguuugccccagaacggagcccacgaggagagcuggaugaggaagguuacaugacuccuaugcgagacaaacccaaacaagaauaccugaauccaguggaggagaacccuuuuguuucucggagaaaaaauggagaccuucaagcauuggauaaucccgaauaucacaaugcauccaaugguccacccaaggccgaggaugaguaugugaaugagccacuguaccucaacaccuuugccaacaccuugggaaaagcugaguaccugaagaacaacauacugucaaugccagagaaggccaagaaagcguuugacaacccugacuacuggaaccacagccugccaccucggagcacccuucagcacccagacuaccugcaggaguacagcacaaaauauuuuuauaaacagaaugggcggauccggccuauuguggcagagaauccugaauaccucucugaguucucccugaagccaggcacugugcugccgccuccaccuuacagacaccggaauacugugguguaagcucaguugugguuuuuuagguggagagacacaccugcuccaauuuccccaccccccucucuuucucugguggucuuccuucuaccccaaggccaguaguuuugacacuucccaguggaagauacagagaugcaaugauaguuaugugcuuaccuaacuugaacauuagagggaaagacugaaagagaaagauaggaggaaccacaauguuucuucauuucucugcauggguuggucaggagaaugaaacagcuagagaaggaccagaaaauguaaggcaaugcugccuacuaucaaacuagcugucacuuuuuuucuuuuucuuuuucuuucuuuguuucuuucuuccucuucuuuuuuuuuuuuuuuuuuaaagcagaugguugaaacacccaugcuaucuguuccuaucugcaggaacugaugugugcauauuuagcaucccuggaaaucauaauaaaguuuccauuagaacaaaagaauaacauuuucuauaacauaugauggugucugaaauugagaauccaguuucuuuccccagcaguuucuguccuagcaaguaagaauggccaacucaacuuucauaauuuaaaaaucuccauuaaaguuauaacuaguaauuauguuuucaacacuuuuugguuuuuuucauuuuguuuugcucugaccgauuccuuuauauuugcuccccuauuuuuggcuuuaauuucuaauugcaaagauguuuacaucaaagcuucuucacagaauuuaagcaagaaauauuuuaauauagugaaauggccacuacuuuaaguauacaaucuuuaaaauaagaaagggaggcuaauauuuuucaugcuaucaaauuaucuucacccucauccuuuacauuuuucaacauuuuuuuuucuccauaaaugacacuacuugauaggccguugguugucugaagaguagaagggaaacuaagagacaguucucugugguucaggaaaacuacugauacuuucagggguggcccaaugagggaauccauugaacuggaagaaacacacuggauuggguaugucuaccuggcagauacucagaaauguaguuugcacuuaagcuguaauuuuauuuguucuuuuucugaacuccauuuuggauuuugaaucaagcaauauggaagcaaccagcaaauuaacuaauuuaaguacauuuuuaaaaaaagagcuaagauaaagacuguggaaaugccaaaccaagcaaauuaggaaccuugcaacgguauccagggacuaugaugagaggccagcacauuaucuucauaugucaccuuugcuacgcaaggaaauuuguucaguucguauacuucguaagaaggaaugcgaguaaggauuggcuugaauuccauggaauuucuaguaugagacuauuuauaugaaguagaagguaacucuuugcacauaaauugguauaauaaaaagaaaaacacaaacauucaaagcuuagggauagguccuugggucaaaaguuguaaauaaaugugaaacaucuucucaugcaauuauuuuauuauccaacacacuaaucuuuugauacuuuauauaauucccuuucuucauauacugcauccaguacuagaaccaucauuauuauguaucauuuugaaagaauaccugaugagaugaaggaugagaacaaaugacagagaugagucuccaaguaaagggggccucacaucaauaauuaggaaacuuagauauaagucgcccuuuucugaaaauucuaccccaagucauuuagauuuuuaaaaaauauuucuaauguuaaaauauugggaccaaauuagaaucaauaguauaagauuaauuaauuagaguaaaaauaucuauuaaggcagagaaaguuuagagaaaaaaauccaaagaaauuuguguuucuuccuauucugaacaaguaaauccauccauccauccauccaaaccuccuuuaucuaacugugucuacuaaaagcaccauguuuuguggggaacacucagauaaauggaauaucauccucaacuucaaaauucuaugaucuaggagauuuaauuaaaaugacauuuuaauuuuucuaugcguuccaacaaucagauugcauagucucuuuugugaauagcugucauauaaucaguuguacuguaagauaucuccuuuaaacucauuugggauauaaguuaaacauccuucaaauuguugauguugacaaacaggauaauuucaauaauauuauucaaacauaaacuggucuaggagaauauugcaucacugacuaauuagccuaucuagagucuaacuucaccauuaaaccaaaagcagauggugguccuuggccaagaauauuggagacauuggaguugguuuuuuucuaagcuauaagaagugaggcgagcugaaaaaguaugguagagcaggagaaggguuugugagauuccuucuagugaaguucacccucaaacuuuucagggguaaagacacagagugauucaggggccacaaucuaauagcucagggcucuccuauccauucagagaagucucuaggaaaagggaucucauaucaguacuuaugaaaaauugaauauaagccucccuuucuaaauaaaucugcaucgagucaucacagcccucuuuuuggauacuauaccuugauuuuuuuuuucugauuuacaauaugcauaugguuucuacugggcuauagaaagcagaaucacucauuuuggagaaggaaaaaaugaauaguuaaaacaaacuuuuaacuguuaagguaacagaaauguauuuagugaaugucucuuuccuccuaagaacacaagacuucuacauguuggguaauaccuagagaugcauguaggaauaauccaaaaugacccaaaugcuuuauaauagcaccacuuuauaauucuuuugaaugauuucuguaguauauaauugacuucaguuguuugaguguuuuuuguuuuauuuuuguccccccugggaaaacauauuucagcauguauaagagggagaaaaaaaguuucauuccuuccagagaauaacuuauuuaguccaguaggguagaauuuuaaaaugucaguuaaagucuucaaagugcuuggggggauaucagauuccagaggccaauuguagcaauugaaauuugcagaaucaauuauguaaaucugagacaaauuaguauuaaaauuacacggaguauauuuuuuaaaucacccaacuuuguagauuauaccuauuuugggcagguauggaaaaauuuugcaguuaaaugauugccuaaagaaagugguaaacaggugaggaaagauggccucugaucuaggauagauccagaaccacaaagcaucugcaccacaaaagguguuagacuaccaagcagcuccugguuuucugcauaguauuaguagcacagcuuaggaugagaauccuuucuccaguaacauucuuaaaauagcaugaaaaacaacgcaaaacucaaauuucuauuaaaacacacaaacuaaaaucaagugauucuuuuuuguagauuagggagaaggacugaauaucuaauuuaagagaaggaauaguguuuaaguguuauagugugugagcuaauaccuucuaaaggaaagacauggcaugaagauugugcauacuuacaaugcuaaggaaaaaucaagaaaaggacugugugaggcucugcuacuagaugaaguuggaaggacuauuaaugugcuucuugaaguaucaaaaaugaaaagaaaauuaaaauuguuuaagccugacagggaaggauguaaauacaaguuuuucuagagcucucuaaccuuuauuucaaaacuggaauuauucauccaucuguaauuguugauaauuuaacuaguauauguaguucauaagguaauagaaaaggugaucaugaaagcauguauauaacuggacagaaccacgauaaugcuauaagauguagauuuaguuagguuaucagauguuaaaugauuuuaauauuauuaaauaaaucaaacuagaaaacuaaccacaaguauaauguaacaaaguuaaaugcaggauauaaaaauguaggauggauuuugcauaguaaaaagauaaguuugccauuuaaaauuguuguuuguuggguuuagcugaaaguaggcauauaugguuccacuugggaaaacuugcuuuaaagcauuacaaugaacaauuuuuucucauucucuuauuccuuuaucacuuuuuaaauguaaagaaaauuguauuuauuuauuuuuuuaaauaaacaccaccuugcagaauuuaauaggcaaacauguuacauaugacuaaguaagggucuucaagaugaaguaaagaaaauguaaauguucuauuaccuuaugcagagacaaaaaaaaaaaggaguggugucauuuagcuagcaaacaaacaaaauacaguuaauuggugauauguccuuucuuuucucacuaugcccucuugccuccaaaaaugacaacaaagaaucacaauuuuucugauaaauaaaugcuaaaccaagcguuucaaacuauugcauugccauucuuuuggacuuuaguuauuagaaugaugauuguuauagggcaaaugagaaauccaugugcaucagcuucuaguuguuaaaaaaaccagauaaauuaacuucuacuguauacugugggcagaggauccuagagcugauccuacaacaucagcuucuaguuguuaaaaaaaaaaaaagaaacagauaaauuaacuucuacuguauauacugugggcagaggaucuuacugugccucuguuuguguacauggacuucgguguguaucaguuugaaggacagccuugccccauguaaacauauaaaugcagauugguaucgccugguugcuauuugcuuaagaacaaauauuauacagaugagaucaggcauaauuuuaaaagaucauuaucaguggagaccucauuauuacugauauuacaauggggccaguuuuuauacuucuggguagaauuaauaaaauuuuucugaucccagagaucugaguucucucugcaguuggaaacaagaagcuguugugggcauugugucgggccaggggcccuuguguuugugugggcaaauaucuuuuagcagugugagcugcuuuuuucuuuucauuaaaagucucucuaaaauaauagaaauuucagauacucgguucaagucucacugauuuuguagagguccaaaaauguaggaucugucacuuuugcaggccccugccucaccuaauuccuggccaggugacauuuugggcagaaguaaaugcuucuauagucacaagcuaaaaugacucuaagccccaauuucacgggggguauucacaugcuuccucuggaaaauacucuuugacagucagcuuugcaaguaagugauuaccuuguuaggaaucaaagaaaaauguauuucucucugaccuuuagaggaaaauagaauccuucccuuuuuugcccauugacacaacuggcacugcucucuucccuuucuaccacccugguucaaaguagucccccgaugcuguccuguuccuuucuuaagccauaguggaucucugagauccuacaccccacuuugugaaacacugacuucaucuuugcccucgaaugccugauuuuuucauaagagauucuagcaauuuggacacuguuuaagugaacuaucaaacuaccgcauagagaauauuuaagcuauuaaaauuaugguuucccaugaagaucaauucucuguguccuucccuauaggaauuugagacgaguuagcccugugaugaaucuugaaacucacauauguccacauacacuugguagaacuucgauuuaaucuuuacauaaaagcuguacauauaaccaagaaguuauuuuugccaguaaauuaacuuauuugcuuuauucaucuuauuugguuccuaaucguaaauauuuuguagcugcuguaaauuuuuuucucccaaaugaggagucuuauuaucauaaagguaaaggcuauucagcuuugauaaccaccugcaauucuuuuuuggaucauucauccaucuaacaaauacauaaugaggacaguucauguuaaugaaaauccauguuguuuaauagaaugccauccuuuaccuacuuuugcucuuuauggacguuuuucuuuucaugcucuagugagcuuucccuauaucaugagaagugguuauauuugugcaaauauacaaauauaggaaaacaaagauucauaccuguaggcaauagucuaacuuguccaaaccacuuugccuuuacugcuauuuuuauccccaaugcguagauauuucccccaggccuauagccuuugugaaggaaagcaaaucauaccuccuguauauugacacgaaucugguuuucaaaugucauuuccagauuuuuuaguuaauuggggguuguccuuuucccuuaaugugagagucauuuuccuguauauuucuggaucucucaggggcugggaggggggagugaggggacuacaaccauagcacuccaagaacccuuuugggauuacuccaguaaucaacuacgaaaguuauuuucuaaauguagauauguaagguguucuuuuaaaguaagguacuuugaaauauguagcauaaacugguacugcuguuaaaugggucgauuauuaaacggagcagcugugugagggcagcuaacuuugaaugccugucucccuggcuggugugucuccuucucauguugagagcaccagggauugcguggcugcaugcugaaaccgcauuuucccaugguguaugacuaguucaucucuuucuugagcaccauuacaagaagaucaaaugaaaaugagaucaauguggaagacaauucauagcacaaaaaaagucaucuuaaaucuacucucaaacauucaucuuauacaugcaucaaaguaauuuacugacaucaguuugggugagagagggagucacuuuacugaaaaggcagaggcuuaagguguauacauuuguacucacuuccuuauuuucuuaacuuguaagcagaaaacaagcccucucucuugugaaguaucuucaaaggauuggggugcaaaaauaccuugcugguaagccaucaauguuuuauuuaaaucccugcauucaaaguuagcugccuuuuugaaauaaacaaacaaaaaauacuacuguauguuugaaaaugugaauaguauuuuuauagcuuguuaaagacauggcuaguugcauuuguaaauaaguauaauguugcuuugauuuucuuuuguggacaucuuuauuuggaacauaauugucuuuaggguugauuuguauauaaguaauuggccugugauuguuucuuuuuugguuggaaguuaucauuuugacauuacuugugauucuguguucagcacuauugugauguguucaaccucugcacucgcuuacacaauaggauaugccaauugugugugguguaauguuauuuugauuuuuuuccauguuauugaugaaggaucaugcaccuaacacauacuaacuuuuuuaauguuaggcauauuuuuaguauacuuucucuuauucuuucuucuccuccaaccuuuuacccauccuccuuccuuucccucauuccuguuguuauuugagaaugagggagaaacaguauuuuacauuuauguaauuaggcuuuuccguuaguucucaaggauccucuuuuggcucuugggaaagaauuguaccuguacaaggcaauuauagaaugcgaacugcuuugccucauuccauacugaucaucccagcugaacaauuugaaaacuguucugccuuuuuguuacaugaaucugucagaaauauauuuuuaauuuaauauaaaugaaauucaauaaaauaugaaacaaacguuaaaaaaaaaaaaaaaaaa

SEQ ID NO: 14808 - RNA, 19 nt, Artificial Sequence
  Description of Artificial Sequence: Synthetic oligonucleotide
cacgcgcgcccggcugggg

SEQ ID NO: 14809 - RNA, 19 nt, Artificial Sequence
  Description of Artificial Sequence: Synthetic oligonucleotide
ggaucuccuccgcgugccc

SEQ ID NO: 14810 - RNA, 19 nt, Artificial Sequence
  Description of Artificial Sequence: Synthetic oligonucleotide
cgaaagggggauaugccau

SEQ ID NO: 14811 - RNA, 19 nt, Artificial Sequence
  Description of Artificial Sequence: Synthetic oligonucleotide
uuuggacauguaauuguca

SEQ ID NO: 14812 - RNA, 19 nt, Artificial Sequence
  Description of Artificial Sequence: Synthetic oligonucleotide
agcacgggaucugagacuu

SEQ ID NO: 14813 - RNA, 19 nt, Artificial Sequence
  Description of Artificial Sequence: Synthetic oligonucleotide
uccaaaaaaugaagccggc

SEQ ID NO: 14814 - RNA, 19 nt, Artificial Sequence
  Description of Artificial Sequence: Synthetic oligonucleotide
cgacaggacuuugggucug

SEQ ID NO: 14815 - RNA, 19 nt, Artificial Sequence
  Description of Artificial Sequence: Synthetic oligonucleotide
gggugagccuucucguggc

SEQ ID NO: 14816 - RNA, 19 nt, Artificial Sequence
  Description of Artificial Sequence: Synthetic oligonucleotide
cggcggggaccguccagcc

SEQ ID NO: 14817 - RNA, 19 nt, Artificial Sequence
  Description of Artificial Sequence: Synthetic oligonucleotide
ccagcgauucucagucagu

SEQ ID NO: 14818 - RNA, 19 nt, Artificial Sequence
  Description of Artificial Sequence: Synthetic oligonucleotide
ugugugcaggaacggagaa

SEQ ID NO: 14819 - RNA, 19 nt, Artificial Sequence
  Description of Artificial Sequence: Synthetic oligonucleotide
auaaacugagcucucucuc

SEQ ID NO: 14820 - RNA, 19 nt, Artificial Sequence
  Description of Artificial Sequence: Synthetic oligonucleotide
cugaccuggaacagcagua

SEQ ID NO: 14821 - RNA, 19 nt, Artificial Sequence
  Description of Artificial Sequence: Synthetic oligonucleotide
accgagccuugcgcaagua

SEQ ID NO: 14822 - RNA, 19 nt, Artificial Sequence
  Description of Artificial Sequence: Synthetic oligonucleotide
acuaugaaaacugugaggu

SEQ ID NO: 14823 - RNA, 19 nt, Artificial Sequence
  Description of Artificial Sequence: Synthetic oligonucleotide
uugucaugggcaaccugga

SEQ ID NO: 14824 - RNA, 19 nt, Artificial Sequence
  Description of Artificial Sequence: Synthetic oligonucleotide
agauaaccagcauugagca

SEQ ID NO: 14825 - RNA, 19 nt, Artificial Sequence
  Description of Artificial Sequence: Synthetic oligonucleotide
acaaccgggaccucuccuu

SEQ ID NO: 14826 - RNA, 19 nt, Artificial Sequence
  Description of Artificial Sequence: Synthetic oligonucleotide
uccugcggucuguucgaga

SEQ ID NO: 14827 - RNA, 19 nt, Artificial Sequence
  Description of Artificial Sequence: Synthetic oligonucleotide
aagucacaggcuacguguu

SEQ ID NO: 14828 - RNA, 19 nt, Artificial Sequence
  Description of Artificial Sequence: Synthetic oligonucleotide
uaguggcucuuaaucaguu

SEQ ID NO: 14829 - RNA, 19 nt, Artificial Sequence
  Description of Artificial Sequence: Synthetic oligonucleotide
uucguuaccugccucugga

SEQ ID NO: 14830 - RNA, 19 nt, Artificial Sequence
  Description of Artificial Sequence: Synthetic oligonucleotide
agaauuuacgcauuauucg

SEQ ID NO: 14831 - RNA, 19 nt, Artificial Sequence
  Description of Artificial Sequence: Synthetic oligonucleotide
gugggacaaaacuuuauga

SEQ ID NO: 14832 - RNA, 19 nt, Artificial Sequence
  Description of Artificial Sequence: Synthetic oligonucleotide
aggaucgauaugccuuggc

SEQ ID NO: 14833 - RNA, 19 nt, Artificial Sequence
  Description of Artificial Sequence: Synthetic oligonucleotide
caauauuuuuaaacuacag

SEQ ID NO: 14834 - RNA, 19 nt, Artificial Sequence
  Description of Artificial Sequence: Synthetic oligonucleotide
gaaaagauggaaacuuugg

SEQ ID NO: 14835 - RNA, 19 nt, Artificial Sequence
  Description of Artificial Sequence: Synthetic oligonucleotide
gacuucaagaacuuggauu

SEQ ID NO: 14836 - RNA, 19 nt, Artificial Sequence
  Description of Artificial Sequence: Synthetic oligonucleotide
uaaagaacuugacagaaau

SEQ ID NO: 14837 - RNA, 19 nt, Artificial Sequence
  Description of Artificial Sequence: Synthetic oligonucleotide
uccuaaaugguggagucua

SEQ ID NO: 14838 - RNA, 19 nt, Artificial Sequence
  Description of Artificial Sequence: Synthetic oligonucleotide
auguagaccagaacaaauu

SEQ ID NO: 14839 - RNA, 19 nt, Artificial Sequence
  Description of Artificial Sequence: Synthetic oligonucleotide
uccuuuguuaugcagacac

SEQ ID NO: 14840 - RNA, 19 nt, Artificial Sequence
  Description of Artificial Sequence: Synthetic oligonucleotide
ccauucauuggcaagauau

SEQ ID NO: 14841 - RNA, 19 nt, Artificial Sequence
  Description of Artificial Sequence: Synthetic oligonucleotide
uuguucggaacccauggcc

SEQ ID NO: 14842 - RNA, 19 nt, Artificial Sequence
  Description of Artificial Sequence: Synthetic oligonucleotide
cuuccaacuugacucuugu

SEQ ID NO: 14843 - RNA, 19 nt, Artificial Sequence
  Description of Artificial Sequence: Synthetic oligonucleotide
ugucaacaaaugguaguuc

SEQ ID NO: 14844 - RNA, 19 nt, Artificial Sequence
  Description of Artificial Sequence: Synthetic oligonucleotide
caggauguggacguugcca

SEQ ID NO: 14845 - RNA, 19 nt, Artificial Sequence
  Description of Artificial Sequence: Synthetic oligonucleotide
auaaguccuguacuggccg

SEQ ID NO: 14846 - RNA, 19 nt, Artificial Sequence
  Description of Artificial Sequence: Synthetic oligonucleotide
guugcuggggacccacaga

SEQ ID NO: 14847 - RNA, 19 nt, Artificial Sequence
  Description of Artificial Sequence: Synthetic oligonucleotide
aaaaucauugccagacuuu

SEQ ID NO: 14848 - RNA, 19 nt, Artificial Sequence
  Description of Artificial Sequence: Synthetic oligonucleotide
ugacaaggacggugugugc

SEQ ID NO: 14849 - RNA, 19 nt, Artificial Sequence
  Description of Artificial Sequence: Synthetic oligonucleotide
cagaacaaugugacggcag

SEQ ID NO: 14850 - RNA, 19 nt, Artificial Sequence
  Description of Artificial Sequence: Synthetic oligonucleotide
gaugcuacggaccuuacgu

SEQ ID NO: 14851 - RNA, 19 nt, Artificial Sequence
  Description of Artificial Sequence: Synthetic oligonucleotide
ucagugacugcugccaucg

SEQ ID NO: 14852 - RNA, 19 nt, Artificial Sequence
  Description of Artificial Sequence: Synthetic oligonucleotide
gagaaugugcuggaggcug

SEQ ID NO: 14853 - RNA, 19 nt, Artificial Sequence
  Description of Artificial Sequence: Synthetic oligonucleotide
gcucaggaccuaaggacac

SEQ ID NO: 14854 - RNA, 19 nt, Artificial Sequence
  Description of Artificial Sequence: Synthetic oligonucleotide
cagacugcuuugccugcau

SEQ ID NO: 14855 - RNA, 19 nt, Artificial Sequence
  Description of Artificial Sequence: Synthetic oligonucleotide
ugaauuucaaugacagugg

SEQ ID NO: 14856 - RNA, 19 nt, Artificial Sequence
  Description of Artificial Sequence: Synthetic oligonucleotide
gagcauguguuacucagug

SEQ ID NO: 14857 - RNA, 19 nt, Artificial Sequence
  Description of Artificial Sequence: Synthetic oligonucleotide
guccccaaaccuuugucua

SEQ ID NO: 14858 - RNA, 19 nt, Artificial Sequence
  Description of Artificial Sequence: Synthetic oligonucleotide
acaauccaaccaccuuuca

SEQ ID NO: 14859 - RNA, 19 nt, Artificial Sequence
  Description of Artificial Sequence: Synthetic oligonucleotide
aacuggagcacaauuucaa

SEQ ID NO: 14860 - RNA, 19 nt, Artificial Sequence
  Description of Artificial Sequence: Synthetic oligonucleotide
augcaaaguacacauaugg

SEQ ID NO: 14861 - RNA, 19 nt, Artificial Sequence
  Description of Artificial Sequence: Synthetic oligonucleotide
gagcauucugugucaagaa

SEQ ID NO: 14862 - RNA, 19 nt, Artificial Sequence
  Description of Artificial Sequence: Synthetic oligonucleotide
aauguccacauaacuuugu

SEQ ID NO: 14863 - RNA, 19 nt, Artificial Sequence
  Description of Artificial Sequence: Synthetic oligonucleotide
ugguagauuccaguucuug

SEQ ID NO: 14864 - RNA, 19 nt, Artificial Sequence
  Description of Artificial Sequence: Synthetic oligonucleotide
gugugcgugccugcccuag

SEQ ID NO: 14865 - RNA, 19 nt, Artificial Sequence
  Description of Artificial Sequence: Synthetic oligonucleotide
guuccaagauggaaguaga

SEQ ID NO: 14866 - RNA, 19 nt, Artificial Sequence
  Description of Artificial Sequence: Synthetic oligonucleotide
aagaaaaugggauuaaaau

SEQ ID NO: 14867 - RNA, 19 nt, Artificial Sequence
  Description of Artificial Sequence: Synthetic oligonucleotide
uguguaaaccuugcacuga

SEQ ID NO: 14868 - RNA, 19 nt, Artificial Sequence
  Description of Artificial Sequence: Synthetic oligonucleotide
acauuugcccaaaagcuug

SEQ ID NO: 14869 - RNA, 19 nt, Artificial Sequence
  Description of Artificial Sequence: Synthetic oligonucleotide
gugauggcauuggcacagg

SEQ ID NO: 14870 - RNA, 19 nt, Artificial Sequence
  Description of Artificial Sequence: Synthetic oligonucleotide
gaucauugaugucagcuca

SEQ ID NO: 14871 - RNA, 19 nt, Artificial Sequence
  Description of Artificial Sequence: Synthetic oligonucleotide
agacuguggauuccaguaa

SEQ ID NO: 14872 - RNA, 19 nt, Artificial Sequence
  Description of Artificial Sequence: Synthetic oligonucleotide
acauugacaaauucauaaa

SEQ ID NO: 14873 - RNA, 19 nt, Artificial Sequence
  Description of Artificial Sequence: Synthetic oligonucleotide
acuguaccaagaucaaugg

SEQ ID NO: 14874 - RNA, 19 nt, Artificial Sequence
  Description of Artificial Sequence: Synthetic oligonucleotide
ggaauuugaucuuucuagu

SEQ ID NO: 14875 - RNA, 19 nt, Artificial Sequence
  Description of Artificial Sequence: Synthetic oligonucleotide
ucacugguauucaugggga

SEQ ID NO: 14876 - RNA, 19 nt, Artificial Sequence
  Description of Artificial Sequence: Synthetic oligonucleotide
acccuuacaaugcaauuga

SEQ ID NO: 14877 - RNA, 19 nt, Artificial Sequence
  Description of Artificial Sequence: Synthetic oligonucleotide
aagccauagacccagagaa

SEQ ID NO: 14878 - RNA, 19 nt, Artificial Sequence
  Description of Artificial Sequence: Synthetic oligonucleotide
aacugaacgucuuucggac

SEQ ID NO: 14879 - RNA, 19 nt, Artificial Sequence
  Description of Artificial Sequence: Synthetic oligonucleotide
cagucagagagauaacagg

SEQ ID NO: 14880 - RNA, 19 nt, Artificial Sequence
  Description of Artificial Sequence: Synthetic oligonucleotide
guuuccugaacauacaguc

SEQ ID NO: 14881 - RNA, 19 nt, Artificial Sequence
  Description of Artificial Sequence: Synthetic oligonucleotide
cauggccaccaaacaugac

SEQ ID NO: 14882 - RNA, 19 nt, Artificial Sequence
  Description of Artificial Sequence: Synthetic oligonucleotide
cugacuucaguguuuuuuc

SEQ ID NO: 14883 - RNA, 19 nt, Artificial Sequence
  Description of Artificial Sequence: Synthetic oligonucleotide
cuaaccuggugaccauugg

SEQ ID NO: 14884 - RNA, 19 nt, Artificial Sequence
  Description of Artificial Sequence: Synthetic oligonucleotide
guggaagaguacucuauag

SEQ ID NO: 14885 - RNA, 19 nt, Artificial Sequence
  Description of Artificial Sequence: Synthetic oligonucleotide
guggccuguccuugcuuau

SEQ ID NO: 14886 - RNA, 19 nt, Artificial Sequence
  Description of Artificial Sequence: Synthetic oligonucleotide
uccucaagcaacagggcau

SEQ ID NO: 14887 - RNA, 19 nt, Artificial Sequence
  Description of Artificial Sequence: Synthetic oligonucleotide
ucaccucucuacaguucca

SEQ ID NO: 14888 - RNA, 19 nt, Artificial Sequence
  Description of Artificial Sequence: Synthetic oligonucleotide
agucccugaaggaaaucag

SEQ ID NO: 14889 - RNA, 19 nt, Artificial Sequence
  Description of Artificial Sequence: Synthetic oligonucleotide
gcgcaggaaacaucuauau

SEQ ID NO: 14890 - RNA, 19 nt, Artificial Sequence
  Description of Artificial Sequence: Synthetic oligonucleotide
uuacugacaacagcaaccu

SEQ ID NO: 14891 - RNA, 19 nt, Artificial Sequence
  Description of Artificial Sequence: Synthetic oligonucleotide
uguguuauuaucauaccau

SEQ ID NO: 14892 - RNA, 19 nt, Artificial Sequence
  Description of Artificial Sequence: Synthetic oligonucleotide
uuaacuggacaacacucuu

SEQ ID NO: 14893 - RNA, 19 nt, Artificial Sequence
  Description of Artificial Sequence: Synthetic oligonucleotide
ucagcacaaucaaccagag

SEQ ID NO: 14894 - RNA, 19 nt, Artificial Sequence
  Description of Artificial Sequence: Synthetic oligonucleotide
gaauaguaauccgggacaa

SEQ ID NO: 14895 - RNA, 19 nt, Artificial Sequence
  Description of Artificial Sequence: Synthetic oligonucleotide
acagaaaagcugaaaauug

SEQ ID NO: 14896 - RNA, 19 nt, Artificial Sequence
  Description of Artificial Sequence: Synthetic oligonucleotide
guacugcugaaggaauggu

SEQ ID NO: 14897 - RNA, 19 nt, Artificial Sequence
  Description of Artificial Sequence: Synthetic oligonucleotide
ugugcaaccaucuguguuc

SEQ ID NO: 14898 - RNA, 19 nt, Artificial Sequence
  Description of Artificial Sequence: Synthetic oligonucleotide
ccagugauggcuguugggg

SEQ ID NO: 14899 - RNA, 19 nt, Artificial Sequence
  Description of Artificial Sequence: Synthetic oligonucleotide
gaccugggccagaccaaug

SEQ ID NO: 14900 - RNA, 19 nt, Artificial Sequence
  Description of Artificial Sequence: Synthetic oligonucleotide
gucugucgugucgccgcuu

SEQ ID NO: 14901 - RNA, 19 nt, Artificial Sequence
  Description of Artificial Sequence: Synthetic oligonucleotide
ucaguagaggaaggaucug

SEQ ID NO: 14902 - RNA, 19 nt, Artificial Sequence
  Description of Artificial Sequence: Synthetic oligonucleotide
gcauagagucuuguaaccu

SEQ ID NO: 14903 - RNA, 19 nt, Artificial Sequence
  Description of Artificial Sequence: Synthetic oligonucleotide
ucuaugauggugaauuucg

SEQ ID NO: 14904 - RNA, 19 nt, Artificial Sequence
  Description of Artificial Sequence: Synthetic oligonucleotide
gggaguuugagaauggcuc

SEQ ID NO: 14905 - RNA, 19 nt, Artificial Sequence
  Description of Artificial Sequence: Synthetic oligonucleotide
ccaucuguguggaguguga

SEQ ID NO: 14906 - RNA, 19 nt, Artificial Sequence
  Description of Artificial Sequence: Synthetic oligonucleotide
acccccagugugagaagau

SEQ ID NO: 14907 - RNA, 19 nt, Artificial Sequence
  Description of Artificial Sequence: Synthetic oligonucleotide
uggaagauggccuccucac

SEQ ID NO: 14908 - RNA, 19 nt, Artificial Sequence
  Description of Artificial Sequence: Synthetic oligonucleotide
caugccauggaccgggucc

SEQ ID NO: 14909 - RNA, 19 nt, Artificial Sequence
  Description of Artificial Sequence: Synthetic oligonucleotide
cugacaacuguacaaagug

SEQ ID NO: 14910 - RNA, 19 nt, Artificial Sequence
  Description of Artificial Sequence: Synthetic oligonucleotide
gcucucauuuuaaagaugg

SEQ ID NO: 14911 - RNA, 19 nt, Artificial Sequence
  Description of Artificial Sequence: Synthetic oligonucleotide
gcccaaacuguguggaaaa

SEQ ID NO: 14912 - RNA, 19 nt, Artificial Sequence
  Description of Artificial Sequence: Synthetic oligonucleotide
aauguccagauggcuuaca

SEQ ID NO: 14913 - RNA, 19 nt, Artificial Sequence
  Description of Artificial Sequence: Synthetic oligonucleotide
agggggcaaacaguuucau

SEQ ID NO: 14914 - RNA, 19 nt, Artificial Sequence
  Description of Artificial Sequence: Synthetic oligonucleotide
uuuucaaguaugcugaucc

SEQ ID NO: 14915 - RNA, 19 nt, Artificial Sequence
  Description of Artificial Sequence: Synthetic oligonucleotide
cagaucgggagugccaccc

SEQ ID NO: 14916 - RNA, 19 nt, Artificial Sequence
  Description of Artificial Sequence: Synthetic oligonucleotide
caugccauccaaacugcac

SEQ ID NO: 14917 - RNA, 19 nt, Artificial Sequence
  Description of Artificial Sequence: Synthetic oligonucleotide
cccaaggguguaacggucc

SEQ ID NO: 14918 - RNA, 19 nt, Artificial Sequence
  Description of Artificial Sequence: Synthetic oligonucleotide
ccacuagucaugacugcau

SEQ ID NO: 14919 - RNA, 19 nt, Artificial Sequence
  Description of Artificial Sequence: Synthetic oligonucleotide
uuuacuacccauggacggg

SEQ ID NO: 14920 - RNA, 19 nt, Artificial Sequence
  Description of Artificial Sequence: Synthetic oligonucleotide
gccauuccacuuuaccaca

SEQ ID NO: 14921 - RNA, 19 nt, Artificial Sequence
  Description of Artificial Sequence: Synthetic oligonucleotide
aacaugcuagaacuccccu

SEQ ID NO: 14922 - RNA, 19 nt, Artificial Sequence
  Description of Artificial Sequence: Synthetic oligonucleotide
ugauugcagcuggaguaau

SEQ ID NO: 14923 - RNA, 19 nt, Artificial Sequence
  Description of Artificial Sequence: Synthetic oligonucleotide
uuggugggcucuucauucu

SEQ ID NO: 14924 - RNA, 19 nt, Artificial Sequence
  Description of Artificial Sequence: Synthetic oligonucleotide
uggucauugugggucugac

SEQ ID NO: 14925 - RNA, 19 nt, Artificial Sequence
  Description of Artificial Sequence: Synthetic oligonucleotide
cauuugcuguuuauguuag

SEQ ID NO: 14926 - RNA, 19 nt, Artificial Sequence
  Description of Artificial Sequence: Synthetic oligonucleotide
gaaggaagagcaucaaaaa

SEQ ID NO: 14927 - RNA, 19 nt, Artificial Sequence
  Description of Artificial Sequence: Synthetic oligonucleotide
agaaaagagccuugagaag

SEQ ID NO: 14928 - RNA, 19 nt, Artificial Sequence
  Description of Artificial Sequence: Synthetic oligonucleotide
gauucuuggaaacagaguu

SEQ ID NO: 14929 - RNA, 19 nt, Artificial Sequence
  Description of Artificial Sequence: Synthetic oligonucleotide
ugguggaaccauuaacucc

SEQ ID NO: 14930 - RNA, 19 nt, Artificial Sequence
  Description of Artificial Sequence: Synthetic oligonucleotide
ccaguggcacagcacccaa

SEQ ID NO: 14931 - RNA, 19 nt, Artificial Sequence
  Description of Artificial Sequence: Synthetic oligonucleotide
aucaagcucaacuucguau

SEQ ID NO: 14932 - RNA, 19 nt, Artificial Sequence
  Description of Artificial Sequence: Synthetic oligonucleotide
uuuugaaagaaacugagcu

SEQ ID NO: 14933 - RNA, 19 nt, Artificial Sequence
  Description of Artificial Sequence: Synthetic oligonucleotide
ugaagaggguaaaaguccu

SEQ ID NO: 14934 - RNA, 19 nt, Artificial Sequence
  Description of Artificial Sequence: Synthetic oligonucleotide
uuggcucaggugcuuuugg

SEQ ID NO: 14935 - RNA, 19 nt, Artificial Sequence
  Description of Artificial Sequence: Synthetic oligonucleotide
gaacgguuuauaaagguau

SEQ ID NO: 14936 - RNA, 19 nt, Artificial Sequence
  Description of Artificial Sequence: Synthetic oligonucleotide
uuuggguaccugaaggaga

SEQ ID NO: 14937 - RNA, 19 nt, Artificial Sequence
  Description of Artificial Sequence: Synthetic oligonucleotide
aaacugugaagauuccugu

SEQ ID NO: 14938 - RNA, 19 nt, Artificial Sequence
  Description of Artificial Sequence: Synthetic oligonucleotide
uggcuauuaagauucuuaa

SEQ ID NO: 14939 - RNA, 19 nt, Artificial Sequence
  Description of Artificial Sequence: Synthetic oligonucleotide
augagacaacuggucccaa

SEQ ID NO: 14940 - RNA, 19 nt, Artificial Sequence
  Description of Artificial Sequence: Synthetic oligonucleotide
aggcaaauguggaguucau

SEQ ID NO: 14941 - RNA, 19 nt, Artificial Sequence
  Description of Artificial Sequence: Synthetic oligonucleotide
uggaugaagcucugaucau

SEQ ID NO: 14942 - RNA, 19 nt, Artificial Sequence
  Description of Artificial Sequence: Synthetic oligonucleotide
uggcaaguauggaucaucc

SEQ ID NO: 14943 - RNA, 19 nt, Artificial Sequence
  Description of Artificial Sequence: Synthetic oligonucleotide
cacaccuaguccgguugcu

SEQ ID NO: 14944 - RNA, 19 nt, Artificial Sequence
  Description of Artificial Sequence: Synthetic oligonucleotide
ugggugugugucugagccc

SEQ ID NO: 14945 - RNA, 19 nt, Artificial Sequence
  Description of Artificial Sequence: Synthetic oligonucleotide
caaccauccagcugguuac

SEQ ID NO: 14946 - RNA, 19 nt, Artificial Sequence
  Description of Artificial Sequence: Synthetic oligonucleotide
cucaacuuaugccccaugg

SEQ ID NO: 14947 - RNA, 19 nt, Artificial Sequence
  Description of Artificial Sequence: Synthetic oligonucleotide
gcugccuguuggaguaugu

SEQ ID NO: 14948 - RNA, 19 nt, Artificial Sequence
  Description of Artificial Sequence: Synthetic oligonucleotide
uccacgagcacaaggauaa

SEQ ID NO: 14949 - RNA, 19 nt, Artificial Sequence
  Description of Artificial Sequence: Synthetic oligonucleotide
acauuggaucacaacugcu

SEQ ID NO: 14950 - RNA, 19 nt, Artificial Sequence
  Description of Artificial Sequence: Synthetic oligonucleotide
ugcuuaacuggugugucca

SEQ ID NO: 14951 - RNA, 19 nt, Artificial Sequence
  Description of Artificial Sequence: Synthetic oligonucleotide
agauagcuaagggaaugau

SEQ ID NO: 14952 - RNA, 19 nt, Artificial Sequence
  Description of Artificial Sequence: Synthetic oligonucleotide
uguaccuggaagaaagacg

SEQ ID NO: 14953 - RNA, 19 nt, Artificial Sequence
  Description of Artificial Sequence: Synthetic oligonucleotide
gacucguucaucgggauuu

SEQ ID NO: 14954 - RNA, 19 nt, Artificial Sequence
  Description of Artificial Sequence: Synthetic oligonucleotide
uggcagcccguaaugucuu

SEQ ID NO: 14955 - RNA, 19 nt, Artificial Sequence
  Description of Artificial Sequence: Synthetic oligonucleotide
uagugaaaucuccaaacca

SEQ ID NO: 14956 - RNA, 19 nt, Artificial Sequence
  Description of Artificial Sequence: Synthetic oligonucleotide
augugaaaaucacagauuu

SEQ ID NO: 14957 - RNA, 19 nt, Artificial Sequence
  Description of Artificial Sequence: Synthetic oligonucleotide
uugggcuagccagacucuu

SEQ ID NO: 14958 - RNA, 19 nt, Artificial Sequence
  Description of Artificial Sequence: Synthetic oligonucleotide
uggaaggagaugaaaaaga

SEQ ID NO: 14959 - RNA, 19 nt, Artificial Sequence
  Description of Artificial Sequence: Synthetic oligonucleotide
aguacaaugcugauggagg

SEQ ID NO: 14960 - RNA, 19 nt, Artificial Sequence
  Description of Artificial Sequence: Synthetic oligonucleotide
gaaagaugccaauuaaaug

SEQ ID NO: 14961 - RNA, 19 nt, Artificial Sequence
  Description of Artificial Sequence: Synthetic oligonucleotide
ggauggcucuggaguguau

SEQ ID NO: 14962 - RNA, 19 nt, Artificial Sequence
  Description of Artificial Sequence: Synthetic oligonucleotide
uacauuacaggaaauucac

SEQ ID NO: 14963 - RNA, 19 nt, Artificial Sequence
  Description of Artificial Sequence: Synthetic oligonucleotide
cccaucagagugacguuug

SEQ ID NO: 14964 - RNA, 19 nt, Artificial Sequence
  Description of Artificial Sequence: Synthetic oligonucleotide
ggagcuauggaguuacuau

SEQ ID NO: 14965 - RNA, 19 nt, Artificial Sequence
  Description of Artificial Sequence: Synthetic oligonucleotide
uaugggaacugaugaccuu

SEQ ID NO: 14966 - RNA, 19 nt, Artificial Sequence
  Description of Artificial Sequence: Synthetic oligonucleotide
uuggaggaaaacccuauga

SEQ ID NO: 14967 - RNA, 19 nt, Artificial Sequence
  Description of Artificial Sequence: Synthetic oligonucleotide
auggaauuccaacgcgaga

SEQ ID NO: 14968 - RNA, 19 nt, Artificial Sequence
  Description of Artificial Sequence: Synthetic oligonucleotide
aaaucccugauuuauuaga

SEQ ID NO: 14969 - RNA, 19 nt, Artificial Sequence
  Description of Artificial Sequence: Synthetic oligonucleotide
agaaaggagaacguuugcc

SEQ ID NO: 14970 - RNA, 19 nt, Artificial Sequence
  Description of Artificial Sequence: Synthetic oligonucleotide
cucagccucccaucugcac

SEQ ID NO: 14971 - RNA, 19 nt, Artificial Sequence
  Description of Artificial Sequence: Synthetic oligonucleotide
cuauugacguuuacauggu

SEQ ID NO: 14972 - RNA, 19 nt, Artificial Sequence
  Description of Artificial Sequence: Synthetic oligonucleotide
ucauggucaaauguuggau

SEQ ID NO: 14973 - RNA, 19 nt, Artificial Sequence
  Description of Artificial Sequence: Synthetic oligonucleotide
ugauugaugcugacaguag

SEQ ID NO: 14974 - RNA, 19 nt, Artificial Sequence
  Description of Artificial Sequence: Synthetic oligonucleotide
gaccuaaauuuaaggaacu

SEQ ID NO: 14975 - RNA, 19 nt, Artificial Sequence
  Description of Artificial Sequence: Synthetic oligonucleotide
uggcugcugaguuuucaag

SEQ ID NO: 14976 - RNA, 19 nt, Artificial Sequence
  Description of Artificial Sequence: Synthetic oligonucleotide
ggauggcucgagacccuca

SEQ ID NO: 14977 - RNA, 19 nt, Artificial Sequence
  Description of Artificial Sequence: Synthetic oligonucleotide
aaagauaccuaguuauuca

SEQ ID NO: 14978 - RNA, 19 nt, Artificial Sequence
  Description of Artificial Sequence: Synthetic oligonucleotide
agggugaugaucguaugaa

SEQ ID NO: 14979 - RNA, 19 nt, Artificial Sequence
  Description of Artificial Sequence: Synthetic oligonucleotide
agcuucccaguccaaauga

SEQ ID NO: 14980 - RNA, 19 nt, Artificial Sequence
  Description of Artificial Sequence: Synthetic oligonucleotide
acagcaaguucuuucagaa

SEQ ID NO: 14981 - RNA, 19 nt, Artificial Sequence
  Description of Artificial Sequence: Synthetic oligonucleotide
aucucuuggaugaagagga

SEQ ID NO: 14982 - RNA, 19 nt, Artificial Sequence
  Description of Artificial Sequence: Synthetic oligonucleotide
auuuggaagauaugaugga

SEQ ID NO: 14983 - RNA, 19 nt, Artificial Sequence
  Description of Artificial Sequence: Synthetic oligonucleotide
augcugaggaguacuuggu

SEQ ID NO: 14984 - RNA, 19 nt, Artificial Sequence
  Description of Artificial Sequence: Synthetic oligonucleotide
ucccucaggcuuucaacau

SEQ ID NO: 14985 - RNA, 19 nt, Artificial Sequence
  Description of Artificial Sequence: Synthetic oligonucleotide
ucccaccucccaucuauac

SEQ ID NO: 14986 - RNA, 19 nt, Artificial Sequence
  Description of Artificial Sequence: Synthetic oligonucleotide
cuuccagagcaagaauuga

SEQ ID NO: 14987 - RNA, 19 nt, Artificial Sequence
  Description of Artificial Sequence: Synthetic oligonucleotide
acucgaauaggagugaaau

SEQ ID NO: 14988 - RNA, 19 nt, Artificial Sequence
  Description of Artificial Sequence: Synthetic oligonucleotide
uuggacacagcccuccucc

SEQ ID NO: 14989 - RNA, 19 nt, Artificial Sequence
  Description of Artificial Sequence: Synthetic oligonucleotide
cugccuacacccccauguc

SEQ ID NO: 14990 - RNA, 19 nt, Artificial Sequence
  Description of Artificial Sequence: Synthetic oligonucleotide
caggaaaccaguuuguaua

SEQ ID NO: 14991 - RNA, 19 nt, Artificial Sequence
  Description of Artificial Sequence: Synthetic oligonucleotide
accgagauggagguuuugc

SEQ ID NO: 14992 - RNA, 19 nt, Artificial Sequence
  Description of Artificial Sequence: Synthetic oligonucleotide
cugcugaacaaggaguguc

SEQ ID NO: 14993 - RNA, 19 nt, Artificial Sequence
  Description of Artificial Sequence: Synthetic oligonucleotide
cugugcccuacagagcccc

SEQ ID NO: 14994 - RNA, 19 nt, Artificial Sequence
  Description of Artificial Sequence: Synthetic oligonucleotide
caacuagcacaauuccaga

SEQ ID NO: 14995 - RNA, 19 nt, Artificial Sequence
  Description of Artificial Sequence: Synthetic oligonucleotide
aagcuccuguggcacaggg

SEQ ID NO: 14996 - RNA, 19 nt, Artificial Sequence
  Description of Artificial Sequence: Synthetic oligonucleotide
gugcuacugcugagauuuu

SEQ ID NO: 14997 - RNA, 19 nt, Artificial Sequence
  Description of Artificial Sequence: Synthetic oligonucleotide
uugaugacuccugcuguaa

SEQ ID NO: 14998 - RNA, 19 nt, Artificial Sequence
  Description of Artificial Sequence: Synthetic oligonucleotide
auggcacccuacgcaagcc

SEQ ID NO: 14999 - RNA, 19 nt, Artificial Sequence
  Description of Artificial Sequence: Synthetic oligonucleotide
caguggcaccccaugucca

SEQ ID NO: 15000 - RNA, 19 nt, Artificial Sequence
  Description of Artificial Sequence: Synthetic oligonucleotide
aagaggacaguagcaccca

SEQ ID NO: 15001 - RNA, 19 nt, Artificial Sequence
  Description of Artificial Sequence: Synthetic oligonucleotide
agagguacagugcugaccc

SEQ ID NO: 15002 - RNA, 19 nt, Artificial Sequence
  Description of Artificial Sequence: Synthetic oligonucleotide
ccaccguguuugccccaga

SEQ ID NO: 15003 - RNA, 19 nt, Artificial Sequence
  Description of Artificial Sequence: Synthetic oligonucleotide
aacggagcccacgaggaga

SEQ ID NO: 15004 - RNA, 19 nt, Artificial Sequence
  Description of Artificial Sequence: Synthetic oligonucleotide
agcuggaugaggaagguua

SEQ ID NO: 15005 - RNA, 19 nt, Artificial Sequence
  Description of Artificial Sequence: Synthetic oligonucleotide
acaugacuccuaugcgaga

SEQ ID NO: 15006 - RNA, 19 nt, Artificial Sequence
  Description of Artificial Sequence: Synthetic oligonucleotide
acaaacccaaacaagaaua

SEQ ID NO: 15007 - RNA, 19 nt, Artificial Sequence
  Description of Artificial Sequence: Synthetic oligonucleotide
accugaauccaguggagga

SEQ ID NO: 15008 - RNA, 19 nt, Artificial Sequence
  Description of Artificial Sequence: Synthetic oligonucleotide
agaacccuuuuguuucucg

SEQ ID NO: 15009 - RNA, 19 nt, Artificial Sequence
  Description of Artificial Sequence: Synthetic oligonucleotide
ggagaaaaaauggagaccu

SEQ ID NO: 15010 - RNA, 19 nt, Artificial Sequence
  Description of Artificial Sequence: Synthetic oligonucleotide
uucaagcauuggauaaucc

SEQ ID NO: 15011 - RNA, 19 nt, Artificial Sequence
  Description of Artificial Sequence: Synthetic oligonucleotide
ccgaauaucacaaugcauc

SEQ ID NO: 15012 - RNA, 19 nt, Artificial Sequence
  Description of Artificial Sequence: Synthetic oligonucleotide
ccaaugguccacccaaggc

SEQ ID NO: 15013 - RNA, 19 nt, Artificial Sequence
  Description of Artificial Sequence: Synthetic oligonucleotide
ccgaggaugaguaugugaa

SEQ ID NO: 15014 - RNA, 19 nt, Artificial Sequence
  Description of Artificial Sequence: Synthetic oligonucleotide
augagccacuguaccucaa

SEQ ID NO: 15015 - RNA, 19 nt, Artificial Sequence
  Description of Artificial Sequence: Synthetic oligonucleotide
acaccuuugccaacaccuu

SEQ ID NO: 15016 - RNA, 19 nt, Artificial Sequence
  Description of Artificial Sequence: Synthetic oligonucleotide
ugggaaaagcugaguaccu

SEQ ID NO: 15017 - RNA, 19 nt, Artificial Sequence
  Description of Artificial Sequence: Synthetic oligonucleotide
ugaagaacaacauacuguc

SEQ ID NO: 15018 - RNA, 19 nt, Artificial Sequence
  Description of Artificial Sequence: Synthetic oligonucleotide
caaugccagagaaggccaa

SEQ ID NO: 15019 - RNA, 19 nt, Artificial Sequence
  Description of Artificial Sequence: Synthetic oligonucleotide
agaaagcguuugacaaccc

SEQ ID NO: 15020 - RNA, 19 nt, Artificial Sequence
  Description of Artificial Sequence: Synthetic oligonucleotide
cugacuacuggaaccacag

SEQ ID NO: 15021 - RNA, 19 nt, Artificial Sequence
  Description of Artificial Sequence: Synthetic oligonucleotide
gccugccaccucggagcac

SEQ ID NO: 15022 - RNA, 19 nt, Artificial Sequence
  Description of Artificial Sequence: Synthetic oligonucleotide
cccuucagcacccagacua

SEQ ID NO: 15023 - RNA, 19 nt, Artificial Sequence
  Description of Artificial Sequence: Synthetic oligonucleotide
accugcaggaguacagcac

SEQ ID NO: 15024 - RNA, 19 nt, Artificial Sequence
  Description of Artificial Sequence: Synthetic oligonucleotide
caaaauauuuuuauaaaca

SEQ ID NO: 15025 - RNA, 19 nt, Artificial Sequence
  Description of Artificial Sequence: Synthetic oligonucleotide
agaaugggcggauccggcc

SEQ ID NO: 15026 - RNA, 19 nt, Artificial Sequence
  Description of Artificial Sequence: Synthetic oligonucleotide
cuauuguggcagagaaucc

SEQ ID NO: 15027 - RNA, 19 nt, Artificial Sequence
  Description of Artificial Sequence: Synthetic oligonucleotide
cugaauaccucucugaguu

SEQ ID NO: 15028 - RNA, 19 nt, Artificial Sequence
  Description of Artificial Sequence: Synthetic oligonucleotide
ucucccugaagccaggcac

SEQ ID NO: 15029 - RNA, 19 nt, Artificial Sequence
  Description of Artificial Sequence: Synthetic oligonucleotide
cugugcugccgccuccacc

SEQ ID NO: 15030 - RNA, 19 nt, Artificial Sequence
  Description of Artificial Sequence: Synthetic oligonucleotide
cuuacagacaccggaauac

SEQ ID NO: 15031 - RNA, 19 nt, Artificial Sequence
  Description of Artificial Sequence: Synthetic oligonucleotide
cugugguguaagcucaguu

SEQ ID NO: 15032 - RNA, 19 nt, Artificial Sequence
  Description of Artificial Sequence: Synthetic oligonucleotide
ugugguuuuuuagguggag

SEQ ID NO: 15033 - RNA, 19 nt, Artificial Sequence
  Description of Artificial Sequence: Synthetic oligonucleotide
gagacacaccugcuccaau

SEQ ID NO: 15034 - RNA, 19 nt, Artificial Sequence
  Description of Artificial Sequence: Synthetic oligonucleotide
uuuccccaccccccucucu

SEQ ID NO: 15035 - RNA, 19 nt, Artificial Sequence
  Description of Artificial Sequence: Synthetic oligonucleotide
uuucucugguggucuuccu

SEQ ID NO: 15036 - RNA, 19 nt, Artificial Sequence
  Description of Artificial Sequence: Synthetic oligonucleotide
uucuaccccaaggccagua

SEQ ID NO: 15037 - RNA, 19 nt, Artificial Sequence
  Description of Artificial Sequence: Synthetic oligonucleotide
aguuuugacacuucccagu

SEQ ID NO: 15038 - RNA, 19 nt, Artificial Sequence
  Description of Artificial Sequence: Synthetic oligonucleotide
uggaagauacagagaugca

SEQ ID NO: 15039 - RNA, 19 nt, Artificial Sequence
  Description of Artificial Sequence: Synthetic oligonucleotide
aaugauaguuaugugcuua

SEQ ID NO: 15040 - RNA, 19 nt, Artificial Sequence
  Description of Artificial Sequence: Synthetic oligonucleotide
accuaacuugaacauuaga

SEQ ID NO: 15041 - RNA, 19 nt, Artificial Sequence
  Description of Artificial Sequence: Synthetic oligonucleotide
agggaaagacugaaagaga

SEQ ID NO: 15042 - RNA, 19 nt, Artificial Sequence
  Description of Artificial Sequence: Synthetic oligonucleotide
aaagauaggaggaaccaca

SEQ ID NO: 15043 - RNA, 19 nt, Artificial Sequence
  Description of Artificial Sequence: Synthetic oligonucleotide
aauguuucuucauuucucu

SEQ ID NO: 15044 - RNA, 19 nt, Artificial Sequence
  Description of Artificial Sequence: Synthetic oligonucleotide
ugcauggguuggucaggag

SEQ ID NO: 15045 - RNA, 19 nt, Artificial Sequence
  Description of Artificial Sequence: Synthetic oligonucleotide
gaaugaaacagcuagagaa

SEQ ID NO: 15046 - RNA, 19 nt, Artificial Sequence
  Description of Artificial Sequence: Synthetic oligonucleotide
aggaccagaaaauguaagg

SEQ ID NO: 15047 - RNA, 19 nt, Artificial Sequence
  Description of Artificial Sequence: Synthetic oligonucleotide
gcaaugcugccuacuauca

SEQ ID NO: 15048 - RNA, 19 nt, Artificial Sequence
  Description of Artificial Sequence: Synthetic oligonucleotide
aaacuagcugucacuuuuu

SEQ ID NO: 15049 - RNA, 19 nt, Artificial Sequence
  Description of Artificial Sequence: Synthetic oligonucleotide
uuucuuuuucuuuuucuuu

SEQ ID NO: 15050 - RNA, 19 nt, Artificial Sequence
  Description of Artificial Sequence: Synthetic oligonucleotide
ucuuuguuucuuucuuccu

SEQ ID NO: 15051 - RNA, 19 nt, Artificial Sequence
  Description of Artificial Sequence: Synthetic oligonucleotide
uuuuuaaagcagaugguug

SEQ ID NO: 15052 - RNA, 19 nt, Artificial Sequence
  Description of Artificial Sequence: Synthetic oligonucleotide
gaaacacccaugcuaucug

SEQ ID NO: 15053 - RNA, 19 nt, Artificial Sequence
  Description of Artificial Sequence: Synthetic oligonucleotide
guuccuaucugcaggaacu

SEQ ID NO: 15054 - RNA, 19 nt, Artificial Sequence
  Description of Artificial Sequence: Synthetic oligonucleotide
ugaugugugcauauuuagc

SEQ ID NO: 15055 - RNA, 19 nt, Artificial Sequence
  Description of Artificial Sequence: Synthetic oligonucleotide
caucccuggaaaucauaau

SEQ ID NO: 15056 - RNA, 19 nt, Artificial Sequence
  Description of Artificial Sequence: Synthetic oligonucleotide
uaaaguuuccauuagaaca

SEQ ID NO: 15057 - RNA, 19 nt, Artificial Sequence
  Description of Artificial Sequence: Synthetic oligonucleotide
aaaagaauaacauuuucua

SEQ ID NO: 15058 - RNA, 19 nt, Artificial Sequence
  Description of Artificial Sequence: Synthetic oligonucleotide
auaacauaugauggugucu

SEQ ID NO: 15059 - RNA, 19 nt, Artificial Sequence
  Description of Artificial Sequence: Synthetic oligonucleotide
ugaaauugagaauccaguu

SEQ ID NO: 15060 - RNA, 19 nt, Artificial Sequence
  Description of Artificial Sequence: Synthetic oligonucleotide
uucuuuccccagcaguuuc

SEQ ID NO: 15061 - RNA, 19 nt, Artificial Sequence
  Description of Artificial Sequence: Synthetic oligonucleotide
cuguccuagcaaguaagaa

SEQ ID NO: 15062 - RNA, 19 nt, Artificial Sequence
  Description of Artificial Sequence: Synthetic oligonucleotide
auggccaacucaacuuuca

SEQ ID NO: 15063 - RNA, 19 nt, Artificial Sequence
  Description of Artificial Sequence: Synthetic oligonucleotide
auaauuuaaaaaucuccau

SEQ ID NO: 15064 - RNA, 19 nt, Artificial Sequence
  Description of Artificial Sequence: Synthetic oligonucleotide
uuaaaguuauaacuaguaa

SEQ ID NO: 15065 - RNA, 19 nt, Artificial Sequence
  Description of Artificial Sequence: Synthetic oligonucleotide
auuauguuuucaacacuuu

SEQ ID NO: 15066 - RNA, 19 nt, Artificial Sequence
  Description of Artificial Sequence: Synthetic oligonucleotide
uuugguuuuuuucauuuug

SEQ ID NO: 15067 - RNA, 19 nt, Artificial Sequence
  Description of Artificial Sequence: Synthetic oligonucleotide
guuuugcucugaccgauuc

SEQ ID NO: 15068 - RNA, 19 nt, Artificial Sequence
  Description of Artificial Sequence: Synthetic oligonucleotide
ccuuuauauuugcuccccu

SEQ ID NO: 15069 - RNA, 19 nt, Artificial Sequence
  Description of Artificial Sequence: Synthetic oligonucleotide
uauuuuuggcuuuaauuuc

SEQ ID NO: 15070 - RNA, 19 nt, Artificial Sequence
  Description of Artificial Sequence: Synthetic oligonucleotide
cuaauugcaaagauguuua

SEQ ID NO: 15071 - RNA, 19 nt, Artificial Sequence
  Description of Artificial Sequence: Synthetic oligonucleotide
acaucaaagcuucuucaca

SEQ ID NO: 15072 - RNA, 19 nt, Artificial Sequence
  Description of Artificial Sequence: Synthetic oligonucleotide
agaauuuaagcaagaaaua

SEQ ID NO: 15073 - RNA, 19 nt, Artificial Sequence
  Description of Artificial Sequence: Synthetic oligonucleotide
auuuuaauauagugaaaug

SEQ ID NO: 15074 - RNA, 19 nt, Artificial Sequence
  Description of Artificial Sequence: Synthetic oligonucleotide
ggccacuacuuuaaguaua

SEQ ID NO: 15075 - RNA, 19 nt, Artificial Sequence
  Description of Artificial Sequence: Synthetic oligonucleotide
acaaucuuuaaaauaagaa

SEQ ID NO: 15076 - RNA, 19 nt, Artificial Sequence
  Description of Artificial Sequence: Synthetic oligonucleotide
aagggaggcuaauauuuuu

SEQ ID NO: 15077 - RNA, 19 nt, Artificial Sequence
  Description of Artificial Sequence: Synthetic oligonucleotide
ucaugcuaucaaauuaucu

SEQ ID NO: 15078 - RNA, 19 nt, Artificial Sequence
  Description of Artificial Sequence: Synthetic oligonucleotide
uucacccucauccuuuaca

SEQ ID NO: 15079 - RNA, 19 nt, Artificial Sequence
  Description of Artificial Sequence: Synthetic oligonucleotide
auuuuucaacauuuuuuuu

SEQ ID NO: 15080 - RNA, 19 nt, Artificial Sequence
  Description of Artificial Sequence: Synthetic oligonucleotide
uucuccauaaaugacacua

SEQ ID NO: 15081 - RNA, 19 nt, Artificial Sequence
  Description of Artificial Sequence: Synthetic oligonucleotide
acuugauaggccguugguu

SEQ ID NO: 15082 - RNA, 19 nt, Artificial Sequence
  Description of Artificial Sequence: Synthetic oligonucleotide
ugucugaagaguagaaggg

SEQ ID NO: 15083 - RNA, 19 nt, Artificial Sequence
  Description of Artificial Sequence: Synthetic oligonucleotide
gaaacuaagagacaguucu

SEQ ID NO: 15084 - RNA, 19 nt, Artificial Sequence
  Description of Artificial Sequence: Synthetic oligonucleotide
ucugugguucaggaaaacu

SEQ ID NO: 15085 - RNA, 19 nt, Artificial Sequence
  Description of Artificial Sequence: Synthetic oligonucleotide
uacugauacuuucaggggu

SEQ ID NO: 15086 - RNA, 19 nt, Artificial Sequence
  Description of Artificial Sequence: Synthetic oligonucleotide
uggcccaaugagggaaucc

SEQ ID NO: 15087 - RNA, 19 nt, Artificial Sequence
  Description of Artificial Sequence: Synthetic oligonucleotide
cauugaacuggaagaaaca

SEQ ID NO: 15088 - RNA, 19 nt, Artificial Sequence
  Description of Artificial Sequence: Synthetic oligonucleotide
acacuggauuggguauguc

SEQ ID NO: 15089 - RNA, 19 nt, Artificial Sequence
  Description of Artificial Sequence: Synthetic oligonucleotide
cuaccuggcagauacucag

SEQ ID NO: 15090 - RNA, 19 nt, Artificial Sequence
  Description of Artificial Sequence: Synthetic oligonucleotide
gaaauguaguuugcacuua

SEQ ID NO: 15091 - RNA, 19 nt, Artificial Sequence
  Description of Artificial Sequence: Synthetic oligonucleotide
aagcuguaauuuuauuugu

SEQ ID NO: 15092 - RNA, 19 nt, Artificial Sequence
  Description of Artificial Sequence: Synthetic oligonucleotide
uucuuuuucugaacuccau

SEQ ID NO: 15093 - RNA, 19 nt, Artificial Sequence
  Description of Artificial Sequence: Synthetic oligonucleotide
uuuuggauuuugaaucaag

SEQ ID NO: 15094 - RNA, 19 nt, Artificial Sequence
  Description of Artificial Sequence: Synthetic oligonucleotide
gcaauauggaagcaaccag

SEQ ID NO: 15095 - RNA, 19 nt, Artificial Sequence
  Description of Artificial Sequence: Synthetic oligonucleotide
gcaaauuaacuaauuuaag

SEQ ID NO: 15096 - RNA, 19 nt, Artificial Sequence
  Description of Artificial Sequence: Synthetic oligonucleotide
guacauuuuuaaaaaaaga

SEQ ID NO: 15097 - RNA, 19 nt, Artificial Sequence
  Description of Artificial Sequence: Synthetic oligonucleotide
agcuaagauaaagacugug

SEQ ID NO: 15098 - RNA, 19 nt, Artificial Sequence
  Description of Artificial Sequence: Synthetic oligonucleotide
ggaaaugccaaaccaagca

SEQ ID NO: 15099 - RNA, 19 nt, Artificial Sequence
  Description of Artificial Sequence: Synthetic oligonucleotide
aaauuaggaaccuugcaac

SEQ ID NO: 15100 - RNA, 19 nt, Artificial Sequence
  Description of Artificial Sequence: Synthetic oligonucleotide
cgguauccagggacuauga

SEQ ID NO: 15101 - RNA, 19 nt, Artificial Sequence
  Description of Artificial Sequence: Synthetic oligonucleotide
augagaggccagcacauua

SEQ ID NO: 15102 - RNA, 19 nt, Artificial Sequence
  Description of Artificial Sequence: Synthetic oligonucleotide
aucuucauaugucaccuuu

SEQ ID NO: 15103 - RNA, 19 nt, Artificial Sequence
  Description of Artificial Sequence: Synthetic oligonucleotide
ugcuacgcaaggaaauuug

SEQ ID NO: 15104 - RNA, 19 nt, Artificial Sequence
  Description of Artificial Sequence: Synthetic oligonucleotide
guucaguucguauacuucg

SEQ ID NO: 15105 - RNA, 19 nt, Artificial Sequence
  Description of Artificial Sequence: Synthetic oligonucleotide
guaagaaggaaugcgagua

SEQ ID NO: 15106 - RNA, 19 nt, Artificial Sequence
  Description of Artificial Sequence: Synthetic oligonucleotide
aaggauuggcuugaauucc

SEQ ID NO: 15107 - RNA, 19 nt, Artificial Sequence
  Description of Artificial Sequence: Synthetic oligonucleotide
cauggaauuucuaguauga

SEQ ID NO: 15108 - RNA, 19 nt, Artificial Sequence
  Description of Artificial Sequence: Synthetic oligonucleotide
agacuauuuauaugaagua

SEQ ID NO: 15109 - RNA, 19 nt, Artificial Sequence
  Description of Artificial Sequence: Synthetic oligonucleotide
agaagguaacucuuugcac

SEQ ID NO: 15110 - RNA, 19 nt, Artificial Sequence
  Description of Artificial Sequence: Synthetic oligonucleotide
cauaaauugguauaauaaa

SEQ ID NO: 15111 - RNA, 19 nt, Artificial Sequence
  Description of Artificial Sequence: Synthetic oligonucleotide
aaagaaaaacacaaacauu

SEQ ID NO: 15112 - RNA, 19 nt, Artificial Sequence
  Description of Artificial Sequence: Synthetic oligonucleotide
ucaaagcuuagggauaggu

SEQ ID NO: 15113 - RNA, 19 nt, Artificial Sequence
  Description of Artificial Sequence: Synthetic oligonucleotide
uccuugggucaaaaguugu

SEQ ID NO: 15114 - RNA, 19 nt, Artificial Sequence
  Description of Artificial Sequence: Synthetic oligonucleotide
uaaauaaaugugaaacauc

SEQ ID NO: 15115 - RNA, 19 nt, Artificial Sequence
  Description of Artificial Sequence: Synthetic oligonucleotide
cuucucaugcaauuauuuu

SEQ ID NO: 15116 - RNA, 19 nt, Artificial Sequence
  Description of Artificial Sequence: Synthetic oligonucleotide
uauuauccaacacacuaau

SEQ ID NO: 15117 - RNA, 19 nt, Artificial Sequence
  Description of Artificial Sequence: Synthetic oligonucleotide
ucuuuugauacuuuauaua

SEQ ID NO: 15118 - RNA, 19 nt, Artificial Sequence
  Description of Artificial Sequence: Synthetic oligonucleotide
aauucccuuucuucauaua

SEQ ID NO: 15119 - RNA, 19 nt, Artificial Sequence
  Description of Artificial Sequence: Synthetic oligonucleotide
acugcauccaguacuagaa

SEQ ID NO: 15120 - RNA, 19 nt, Artificial Sequence
  Description of Artificial Sequence: Synthetic oligonucleotide
accaucauuauuauguauc

SEQ ID NO: 15121 - RNA, 19 nt, Artificial Sequence
  Description of Artificial Sequence: Synthetic oligonucleotide
cauuuugaaagaauaccug

SEQ ID NO: 15122 - RNA, 19 nt, Artificial Sequence
  Description of Artificial Sequence: Synthetic oligonucleotide
gaugagaugaaggaugaga

SEQ ID NO: 15123 - RNA, 19 nt, Artificial Sequence
  Description of Artificial Sequence: Synthetic oligonucleotide
aacaaaugacagagaugag

SEQ ID NO: 15124 - RNA, 19 nt, Artificial Sequence
  Description of Artificial Sequence: Synthetic oligonucleotide
gucuccaaguaaagggggc

SEQ ID NO: 15125 - RNA, 19 nt, Artificial Sequence
  Description of Artificial Sequence: Synthetic oligonucleotide
ccucacaucaauaauuagg

SEQ ID NO: 15126 - RNA, 19 nt, Artificial Sequence
  Description of Artificial Sequence: Synthetic oligonucleotide
gaaacuuagauauaagucg

SEQ ID NO: 15127 - RNA, 19 nt, Artificial Sequence
  Description of Artificial Sequence: Synthetic oligonucleotide
gcccuuuucugaaaauucu

SEQ ID NO: 15128 - RNA, 19 nt, Artificial Sequence
  Description of Artificial Sequence: Synthetic oligonucleotide
uaccccaagucauuuagau

SEQ ID NO: 15129 - RNA, 19 nt, Artificial Sequence
  Description of Artificial Sequence: Synthetic oligonucleotide
uuuuuaaaaaauauuucua

SEQ ID NO: 15130 - RNA, 19 nt, Artificial Sequence
  Description of Artificial Sequence: Synthetic oligonucleotide
aauguuaaaauauugggac

SEQ ID NO: 15131 - RNA, 19 nt, Artificial Sequence
  Description of Artificial Sequence: Synthetic oligonucleotide
ccaaauuagaaucaauagu

SEQ ID NO: 15132 - RNA, 19 nt, Artificial Sequence
  Description of Artificial Sequence: Synthetic oligonucleotide
uauaagauuaauuaauuag

SEQ ID NO: 15133 - RNA, 19 nt, Artificial Sequence
  Description of Artificial Sequence: Synthetic oligonucleotide
gaguaaaaauaucuauuaa

SEQ ID NO: 15134 - RNA, 19 nt, Artificial Sequence
  Description of Artificial Sequence: Synthetic oligonucleotide
aggcagagaaaguuuagag

SEQ ID NO: 15135 - RNA, 19 nt, Artificial Sequence
  Description of Artificial Sequence: Synthetic oligonucleotide
gaaaaaaauccaaagaaau

SEQ ID NO: 15136 - RNA, 19 nt, Artificial Sequence
  Description of Artificial Sequence: Synthetic oligonucleotide
uuuguguuucuuccuauuc

SEQ ID NO: 15137 - RNA, 19 nt, Artificial Sequence
  Description of Artificial Sequence: Synthetic oligonucleotide
cugaacaaguaaauccauc

SEQ ID NO: 15138 - RNA, 19 nt, Artificial Sequence
  Description of Artificial Sequence: Synthetic oligonucleotide
ccauccauccauccaaacc

SEQ ID NO: 15139 - RNA, 19 nt, Artificial Sequence
  Description of Artificial Sequence: Synthetic oligonucleotide
cuccuuuaucuaacugugu

SEQ ID NO: 15140 - RNA, 19 nt, Artificial Sequence
  Description of Artificial Sequence: Synthetic oligonucleotide
ucuacuaaaagcaccaugu

SEQ ID NO: 15141 - RNA, 19 nt, Artificial Sequence
  Description of Artificial Sequence: Synthetic oligonucleotide
uuuuguggggaacacucag

SEQ ID NO: 15142 - RNA, 19 nt, Artificial Sequence
  Description of Artificial Sequence: Synthetic oligonucleotide
gauaaauggaauaucaucc

SEQ ID NO: 15143 - RNA, 19 nt, Artificial Sequence
  Description of Artificial Sequence: Synthetic oligonucleotide
cucaacuucaaaauucuau

SEQ ID NO: 15144 - RNA, 19 nt, Artificial Sequence
  Description of Artificial Sequence: Synthetic oligonucleotide
ugaucuaggagauuuaauu

SEQ ID NO: 15145 - RNA, 19 nt, Artificial Sequence
  Description of Artificial Sequence: Synthetic oligonucleotide
uaaaaugacauuuuaauuu

SEQ ID NO: 15146 - RNA, 19 nt, Artificial Sequence
  Description of Artificial Sequence: Synthetic oligonucleotide
uuucuaugcguuccaacaa

SEQ ID NO: 15147 - RNA, 19 nt, Artificial Sequence
  Description of Artificial Sequence: Synthetic oligonucleotide
aucagauugcauagucucu

SEQ ID NO: 15148 - RNA, 19 nt, Artificial Sequence
  Description of Artificial Sequence: Synthetic oligonucleotide
uuuugugaauagcugucau

SEQ ID NO: 15149 - RNA, 19 nt, Artificial Sequence
  Description of Artificial Sequence: Synthetic oligonucleotide
uauaaucaguuguacugua

SEQ ID NO: 15150 - RNA, 19 nt, Artificial Sequence
  Description of Artificial Sequence: Synthetic oligonucleotide
aagauaucuccuuuaaacu

SEQ ID NO: 15151 - RNA, 19 nt, Artificial Sequence
  Description of Artificial Sequence: Synthetic oligonucleotide
ucauuugggauauaaguua

SEQ ID NO: 15152 - RNA, 19 nt, Artificial Sequence
  Description of Artificial Sequence: Synthetic oligonucleotide
aaacauccuucaaauuguu

SEQ ID NO: 15153 - RNA, 19 nt, Artificial Sequence
  Description of Artificial Sequence: Synthetic oligonucleotide
ugauguugacaaacaggau

SEQ ID NO: 15154 - RNA, 19 nt, Artificial Sequence
  Description of Artificial Sequence: Synthetic oligonucleotide
uaauuucaauaauauuauu

SEQ ID NO: 15155 - RNA, 19 nt, Artificial Sequence
  Description of Artificial Sequence: Synthetic oligonucleotide
ucaaacauaaacuggucua

SEQ ID NO: 15156 - RNA, 19 nt, Artificial Sequence
  Description of Artificial Sequence: Synthetic oligonucleotide
aggagaauauugcaucacu

SEQ ID NO: 15157 - RNA, 19 nt, Artificial Sequence
  Description of Artificial Sequence: Synthetic oligonucleotide
ugacuaauuagccuaucua

SEQ ID NO: 15158 - RNA, 19 nt, Artificial Sequence
  Description of Artificial Sequence: Synthetic oligonucleotide
agagucuaacuucaccauu

SEQ ID NO: 15159 - RNA, 19 nt, Artificial Sequence
  Description of Artificial Sequence: Synthetic oligonucleotide
uaaaccaaaagcagauggu

SEQ ID NO: 15160 - RNA, 19 nt, Artificial Sequence
  Description of Artificial Sequence: Synthetic oligonucleotide
ugguccuuggccaagaaua

SEQ ID NO: 15161 - RNA, 19 nt, Artificial Sequence
  Description of Artificial Sequence: Synthetic oligonucleotide
auuggagacauuggaguug

SEQ ID NO: 15162 - RNA, 19 nt, Artificial Sequence
  Description of Artificial Sequence: Synthetic oligonucleotide
gguuuuuuucuaagcuaua

SEQ ID NO: 15163 - RNA, 19 nt, Artificial Sequence
  Description of Artificial Sequence: Synthetic oligonucleotide
aagaagugaggcgagcuga

SEQ ID NO: 15164 - RNA, 19 nt, Artificial Sequence
  Description of Artificial Sequence: Synthetic oligonucleotide
aaaaaguaugguagagcag

SEQ ID NO: 15165 - RNA, 19 nt, Artificial Sequence
  Description of Artificial Sequence: Synthetic oligonucleotide
ggagaaggguuugugagau

SEQ ID NO: 15166 - RNA, 19 nt, Artificial Sequence
  Description of Artificial Sequence: Synthetic oligonucleotide
uuccuucuagugaaguuca

SEQ ID NO: 15167 - RNA, 19 nt, Artificial Sequence
  Description of Artificial Sequence: Synthetic oligonucleotide
acccucaaacuuuucaggg

SEQ ID NO: 15168 - RNA, 19 nt, Artificial Sequence
  Description of Artificial Sequence: Synthetic oligonucleotide
gguaaagacacagagugau

SEQ ID NO: 15169 - RNA, 19 nt, Artificial Sequence
  Description of Artificial Sequence: Synthetic oligonucleotide
uucaggggccacaaucuaa

SEQ ID NO: 15170 - RNA, 19 nt, Artificial Sequence
  Description of Artificial Sequence: Synthetic oligonucleotide
auagcucagggcucuccua

SEQ ID NO: 15171 - RNA, 19 nt, Artificial Sequence
  Description of Artificial Sequence: Synthetic oligonucleotide
auccauucagagaagucuc

SEQ ID NO: 15172 - RNA, 19 nt, Artificial Sequence
  Description of Artificial Sequence: Synthetic oligonucleotide
cuaggaaaagggaucucau

SEQ ID NO: 15173 - RNA, 19 nt, Artificial Sequence
  Description of Artificial Sequence: Synthetic oligonucleotide
uaucaguacuuaugaaaaa

SEQ ID NO: 15174 - RNA, 19 nt, Artificial Sequence
  Description of Artificial Sequence: Synthetic oligonucleotide
auugaauauaagccucccu

SEQ ID NO: 15175 - RNA, 19 nt, Artificial Sequence
  Description of Artificial Sequence: Synthetic oligonucleotide
uuucuaaauaaaucugcau

SEQ ID NO: 15176 - RNA, 19 nt, Artificial Sequence
  Description of Artificial Sequence: Synthetic oligonucleotide
ucgagucaucacagcccuc

SEQ ID NO: 15177 - RNA, 19 nt, Artificial Sequence
  Description of Artificial Sequence: Synthetic oligonucleotide
cuuuuuggauacuauaccu

SEQ ID NO: 15178 - RNA, 19 nt, Artificial Sequence
  Description of Artificial Sequence: Synthetic oligonucleotide
uuuacaauaugcauauggu

SEQ ID NO: 15179 - RNA, 19 nt, Artificial Sequence
  Description of Artificial Sequence: Synthetic oligonucleotide
uuucuacugggcuauagaa

SEQ ID NO: 15180 - RNA, 19 nt, Artificial Sequence
  Description of Artificial Sequence: Synthetic oligonucleotide
aagcagaaucacucauuuu

SEQ ID NO: 15181 - RNA, 19 nt, Artificial Sequence
  Description of Artificial Sequence: Synthetic oligonucleotide
uggagaaggaaaaaaugaa

SEQ ID NO: 15182 - RNA, 19 nt, Artificial Sequence
  Description of Artificial Sequence: Synthetic oligonucleotide
auaguuaaaacaaacuuuu

SEQ ID NO: 15183 - RNA, 19 nt, Artificial Sequence
  Description of Artificial Sequence: Synthetic oligonucleotide
uaacuguuaagguaacaga

SEQ ID NO: 15184 - RNA, 19 nt, Artificial Sequence
  Description of Artificial Sequence: Synthetic oligonucleotide
aaauguauuuagugaaugu

SEQ ID NO: 15185 - RNA, 19 nt, Artificial Sequence
  Description of Artificial Sequence: Synthetic oligonucleotide
ucucuuuccuccuaagaac

SEQ ID NO: 15186 - RNA, 19 nt, Artificial Sequence
  Description of Artificial Sequence: Synthetic oligonucleotide
cacaagacuucuacauguu

SEQ ID NO: 15187 - RNA, 19 nt, Artificial Sequence
  Description of Artificial Sequence: Synthetic oligonucleotide
uggguaauaccuagagaug

SEQ ID NO: 15188 - RNA, 19 nt, Artificial Sequence
  Description of Artificial Sequence: Synthetic oligonucleotide
gcauguaggaauaauccaa

SEQ ID NO: 15189 - RNA, 19 nt, Artificial Sequence
  Description of Artificial Sequence: Synthetic oligonucleotide
aaaugacccaaaugcuuua

SEQ ID NO: 15190 - RNA, 19 nt, Artificial Sequence
  Description of Artificial Sequence: Synthetic oligonucleotide
auaauagcaccacuuuaua

SEQ ID NO: 15191 - RNA, 19 nt, Artificial Sequence
  Description of Artificial Sequence: Synthetic oligonucleotide
aauucuuuugaaugauuuc

SEQ ID NO: 15192 - RNA, 19 nt, Artificial Sequence
  Description of Artificial Sequence: Synthetic oligonucleotide
cuguaguauauaauugacu

SEQ ID NO: 15193 - RNA, 19 nt, Artificial Sequence
  Description of Artificial Sequence: Synthetic oligonucleotide
uucaguuguuugaguguuu

SEQ ID NO: 15194 - RNA, 19 nt, Artificial Sequence
  Description of Artificial Sequence: Synthetic oligonucleotide
uuuuguuuuauuuuugucc

SEQ ID NO: 15195 - RNA, 19 nt, Artificial Sequence
  Description of Artificial Sequence: Synthetic oligonucleotide
cccccugggaaaacauauu

SEQ ID NO: 15196 - RNA, 19 nt, Artificial Sequence
  Description of Artificial Sequence: Synthetic oligonucleotide
uucagcauguauaagaggg

SEQ ID NO: 15197 - RNA, 19 nt, Artificial Sequence
  Description of Artificial Sequence: Synthetic oligonucleotide
gagaaaaaaaguuucauuc

SEQ ID NO: 15198 - RNA, 19 nt, Artificial Sequence
  Description of Artificial Sequence: Synthetic oligonucleotide
ccuuccagagaauaacuua

SEQ ID NO: 15199 - RNA, 19 nt, Artificial Sequence
  Description of Artificial Sequence: Synthetic oligonucleotide
auuuaguccaguaggguag

SEQ ID NO: 15200 - RNA, 19 nt, Artificial Sequence
  Description of Artificial Sequence: Synthetic oligonucleotide
gaauuuuaaaaugucaguu

SEQ ID NO: 15201 - RNA, 19 nt, Artificial Sequence
  Description of Artificial Sequence: Synthetic oligonucleotide
uaaagucuucaaagugcuu

SEQ ID NO: 15202 - RNA, 19 nt, Artificial Sequence
  Description of Artificial Sequence: Synthetic oligonucleotide
uggggggauaucagauucc

SEQ ID NO: 15203 - RNA, 19 nt, Artificial Sequence
  Description of Artificial Sequence: Synthetic oligonucleotide
cagaggccaauuguagcaa

SEQ ID NO: 15204 - RNA, 19 nt, Artificial Sequence
  Description of Artificial Sequence: Synthetic oligonucleotide
auugaaauuugcagaauca

SEQ ID NO: 15205 - RNA, 19 nt, Artificial Sequence
  Description of Artificial Sequence: Synthetic oligonucleotide
aauuauguaaaucugagac

SEQ ID NO: 15206 - RNA, 19 nt, Artificial Sequence
  Description of Artificial Sequence: Synthetic oligonucleotide
caaauuaguauuaaaauua

SEQ ID NO: 15207 - RNA, 19 nt, Artificial Sequence
  Description of Artificial Sequence: Synthetic oligonucleotide
acacggaguauauuuuuua

SEQ ID NO: 15208 - RNA, 19 nt, Artificial Sequence
  Description of Artificial Sequence: Synthetic oligonucleotide
aaaucacccaacuuuguag

SEQ ID NO: 15209 - RNA, 19 nt, Artificial Sequence
  Description of Artificial Sequence: Synthetic oligonucleotide
gauuauaccuauuuugggc

SEQ ID NO: 15210 - RNA, 19 nt, Artificial Sequence
  Description of Artificial Sequence: Synthetic oligonucleotide
cagguauggaaaaauuuug

SEQ ID NO: 15211 - RNA, 19 nt, Artificial Sequence
  Description of Artificial Sequence: Synthetic oligonucleotide
gcaguuaaaugauugccua

SEQ ID NO: 15212 - RNA, 19 nt, Artificial Sequence
  Description of Artificial Sequence: Synthetic oligonucleotide
aaagaaagugguaaacagg

SEQ ID NO: 15213 - RNA, 19 nt, Artificial Sequence
  Description of Artificial Sequence: Synthetic oligonucleotide
gugaggaaagauggccucu

SEQ ID NO: 15214 - RNA, 19 nt, Artificial Sequence
  Description of Artificial Sequence: Synthetic oligonucleotide
ugaucuaggauagauccag

SEQ ID NO: 15215 - RNA, 19 nt, Artificial Sequence
  Description of Artificial Sequence: Synthetic oligonucleotide
gaaccacaaagcaucugca

SEQ ID NO: 15216 - RNA, 19 nt, Artificial Sequence
  Description of Artificial Sequence: Synthetic oligonucleotide
accacaaaagguguuagac

SEQ ID NO: 15217 - RNA, 19 nt, Artificial Sequence
  Description of Artificial Sequence: Synthetic oligonucleotide
cuaccaagcagcuccuggu

SEQ ID NO: 15218 - RNA, 19 nt, Artificial Sequence
  Description of Artificial Sequence: Synthetic oligonucleotide
uuuucugcauaguauuagu

SEQ ID NO: 15219 - RNA, 19 nt, Artificial Sequence
  Description of Artificial Sequence: Synthetic oligonucleotide
uagcacagcuuaggaugag

SEQ ID NO: 15220 - RNA, 19 nt, Artificial Sequence
  Description of Artificial Sequence: Synthetic oligonucleotide
gaauccuuucuccaguaac

SEQ ID NO: 15221 - RNA, 19 nt, Artificial Sequence
  Description of Artificial Sequence: Synthetic oligonucleotide
cauucuuaaaauagcauga

SEQ ID NO: 15222 - RNA, 19 nt, Artificial Sequence
  Description of Artificial Sequence: Synthetic oligonucleotide
aaaaacaacgcaaaacuca

SEQ ID NO: 15223 - RNA, 19 nt, Artificial Sequence
  Description of Artificial Sequence: Synthetic oligonucleotide
aaauuucuauuaaaacaca

SEQ ID NO: 15224 - RNA, 19 nt, Artificial Sequence
  Description of Artificial Sequence: Synthetic oligonucleotide
acaaacuaaaaucaaguga

SEQ ID NO: 15225 - RNA, 19 nt, Artificial Sequence
  Description of Artificial Sequence: Synthetic oligonucleotide
auucuuuuuuguagauuag

SEQ ID NO: 15226 - RNA, 19 nt, Artificial Sequence
  Description of Artificial Sequence: Synthetic oligonucleotide
gggagaaggacugaauauc

SEQ ID NO: 15227 - RNA, 19 nt, Artificial Sequence
  Description of Artificial Sequence: Synthetic oligonucleotide
cuaauuuaagagaaggaau

SEQ ID NO: 15228 - RNA, 19 nt, Artificial Sequence
  Description of Artificial Sequence: Synthetic oligonucleotide
uaguguuuaaguguuauag

SEQ ID NO: 15229 - RNA, 19 nt, Artificial Sequence
  Description of Artificial Sequence: Synthetic oligonucleotide
gugugugagcuaauaccuu

SEQ ID NO: 15230 - RNA, 19 nt, Artificial Sequence
  Description of Artificial Sequence: Synthetic oligonucleotide
ucuaaaggaaagacauggc

SEQ ID NO: 15231 - RNA, 19 nt, Artificial Sequence
  Description of Artificial Sequence: Synthetic oligonucleotide
caugaagauugugcauacu

SEQ ID NO: 15232 - RNA, 19 nt, Artificial Sequence
  Description of Artificial Sequence: Synthetic oligonucleotide
uuacaaugcuaaggaaaaa

SEQ ID NO: 15233 - RNA, 19 nt, Artificial Sequence
  Description of Artificial Sequence: Synthetic oligonucleotide
aucaagaaaaggacugugu

SEQ ID NO: 15234 - RNA, 19 nt, Artificial Sequence
  Description of Artificial Sequence: Synthetic oligonucleotide
ugaggcucugcuacuagau

SEQ ID NO: 15235 - RNA, 19 nt, Artificial Sequence
  Description of Artificial Sequence: Synthetic oligonucleotide
ugaaguuggaaggacuauu

SEQ ID NO: 15236 - RNA, 19 nt, Artificial Sequence
  Description of Artificial Sequence: Synthetic oligonucleotide
uaaugugcuucuugaagua

SEQ ID NO: 15237 - RNA, 19 nt, Artificial Sequence
  Description of Artificial Sequence: Synthetic oligonucleotide
aucaaaaaugaaaagaaaa

SEQ ID NO: 15238 - RNA, 19 nt, Artificial Sequence
  Description of Artificial Sequence: Synthetic oligonucleotide
auuaaaauuguuuaagccu

SEQ ID NO: 15239 - RNA, 19 nt, Artificial Sequence
  Description of Artificial Sequence: Synthetic oligonucleotide
ugacagggaaggauguaaa

SEQ ID NO: 15240 - RNA, 19 nt, Artificial Sequence
  Description of Artificial Sequence: Synthetic oligonucleotide
auacaaguuuuucuagagc

SEQ ID NO: 15241 - RNA, 19 nt, Artificial Sequence
  Description of Artificial Sequence: Synthetic oligonucleotide
cucucuaaccuuuauuuca

SEQ ID NO: 15242 - RNA, 19 nt, Artificial Sequence
  Description of Artificial Sequence: Synthetic oligonucleotide
aaaacuggaauuauucauc

SEQ ID NO: 15243 - RNA, 19 nt, Artificial Sequence
  Description of Artificial Sequence: Synthetic oligonucleotide
ccaucuguaauuguugaua

SEQ ID NO: 15244 - RNA, 19 nt, Artificial Sequence
  Description of Artificial Sequence: Synthetic oligonucleotide
aauuuaacuaguauaugua

SEQ ID NO: 15245 - RNA, 19 nt, Artificial Sequence
  Description of Artificial Sequence: Synthetic oligonucleotide
aguucauaagguaauagaa

SEQ ID NO: 15246 - RNA, 19 nt, Artificial Sequence
  Description of Artificial Sequence: Synthetic oligonucleotide
aaaggugaucaugaaagca

SEQ ID NO: 15247 - RNA, 19 nt, Artificial Sequence
  Description of Artificial Sequence: Synthetic oligonucleotide
auguauauaacuggacaga

SEQ ID NO: 15248 - RNA, 19 nt, Artificial Sequence
  Description of Artificial Sequence: Synthetic oligonucleotide
aaccacgauaaugcuauaa

SEQ ID NO: 15249 - RNA, 19 nt, Artificial Sequence
  Description of Artificial Sequence: Synthetic oligonucleotide
agauguagauuuaguuagg

SEQ ID NO: 15250 - RNA, 19 nt, Artificial Sequence
  Description of Artificial Sequence: Synthetic oligonucleotide
guuaucagauguuaaauga

SEQ ID NO: 15251 - RNA, 19 nt, Artificial Sequence
  Description of Artificial Sequence: Synthetic oligonucleotide
auuuuaauauuauuaaaua

SEQ ID NO: 15252 - RNA, 19 nt, Artificial Sequence
  Description of Artificial Sequence: Synthetic oligonucleotide
aaaucaaacuagaaaacua

SEQ ID NO: 15253 - RNA, 19 nt, Artificial Sequence
  Description of Artificial Sequence: Synthetic oligonucleotide
aaccacaaguauaauguaa

SEQ ID NO: 15254 - RNA, 19 nt, Artificial Sequence
  Description of Artificial Sequence: Synthetic oligonucleotide
acaaaguuaaaugcaggau

SEQ ID NO: 15255 - RNA, 19 nt, Artificial Sequence
  Description of Artificial Sequence: Synthetic oligonucleotide
uauaaaaauguaggaugga

SEQ ID NO: 15256 - RNA, 19 nt, Artificial Sequence
  Description of Artificial Sequence: Synthetic oligonucleotide
auuuugcauaguaaaaaga

SEQ ID NO: 15257 - RNA, 19 nt, Artificial Sequence
  Description of Artificial Sequence: Synthetic oligonucleotide
auaaguuugccauuuaaaa

SEQ ID NO: 15258 - RNA, 19 nt, Artificial Sequence
  Description of Artificial Sequence: Synthetic oligonucleotide
auuguuguuuguuggguuu

SEQ ID NO: 15259 - RNA, 19 nt, Artificial Sequence
  Description of Artificial Sequence: Synthetic oligonucleotide
uagcugaaaguaggcauau

SEQ ID NO: 15260 - RNA, 19 nt, Artificial Sequence
  Description of Artificial Sequence: Synthetic oligonucleotide
uaugguuccacuugggaaa

SEQ ID NO: 15261 - RNA, 19 nt, Artificial Sequence
  Description of Artificial Sequence: Synthetic oligonucleotide
aacuugcuuuaaagcauua

SEQ ID NO: 15262 - RNA, 19 nt, Artificial Sequence
  Description of Artificial Sequence: Synthetic oligonucleotide
acaaugaacaauuuuuucu

SEQ ID NO: 15263 - RNA, 19 nt, Artificial Sequence
  Description of Artificial Sequence: Synthetic oligonucleotide
ucauucucuuauuccuuua

SEQ ID NO: 15264 - RNA, 19 nt, Artificial Sequence
  Description of Artificial Sequence: Synthetic oligonucleotide
aucacuuuuuaaauguaaa

SEQ ID NO: 15265 - RNA, 19 nt, Artificial Sequence
  Description of Artificial Sequence: Synthetic oligonucleotide
agaaaauuguauuuauuua

SEQ ID NO: 15266 - RNA, 19 nt, Artificial Sequence
  Description of Artificial Sequence: Synthetic oligonucleotide
auuuuuuuaaauaaacacc

SEQ ID NO: 15267 - RNA, 19 nt, Artificial Sequence
  Description of Artificial Sequence: Synthetic oligonucleotide
caccuugcagaauuuaaua

SEQ ID NO: 15268 - RNA, 19 nt, Artificial Sequence
  Description of Artificial Sequence: Synthetic oligonucleotide
aggcaaacauguuacauau

SEQ ID NO: 15269 - RNA, 19 nt, Artificial Sequence
  Description of Artificial Sequence: Synthetic oligonucleotide
ugacuaaguaagggucuuc

SEQ ID NO: 15270 - RNA, 19 nt, Artificial Sequence
  Description of Artificial Sequence: Synthetic oligonucleotide
caagaugaaguaaagaaaa

SEQ ID NO: 15271 - RNA, 19 nt, Artificial Sequence
  Description of Artificial Sequence: Synthetic oligonucleotide
auguaaauguucuauuacc

SEQ ID NO: 15272 - RNA, 19 nt, Artificial Sequence
  Description of Artificial Sequence: Synthetic oligonucleotide
cuuaugcagagacaaaaaa

SEQ ID NO: 15273 - RNA, 19 nt, Artificial Sequence
  Description of Artificial Sequence: Synthetic oligonucleotide
aaaaaaggaguggugucau

SEQ ID NO: 15274 - RNA, 19 nt, Artificial Sequence
  Description of Artificial Sequence: Synthetic oligonucleotide
uuuagcuagcaaacaaaca

SEQ ID NO: 15275 - RNA, 19 nt, Artificial Sequence
  Description of Artificial Sequence: Synthetic oligonucleotide
aaaauacaguuaauuggug

SEQ ID NO: 15276 - RNA, 19 nt, Artificial Sequence
  Description of Artificial Sequence: Synthetic oligonucleotide
gauauguccuuucuuuucu

SEQ ID NO: 15277 - RNA, 19 nt, Artificial Sequence
  Description of Artificial Sequence: Synthetic oligonucleotide
ucacuaugcccucuugccu

SEQ ID NO: 15278 - RNA, 19 nt, Artificial Sequence
  Description of Artificial Sequence: Synthetic oligonucleotide
uccaaaaaugacaacaaag

SEQ ID NO: 15279 - RNA, 19 nt, Artificial Sequence
  Description of Artificial Sequence: Synthetic oligonucleotide
gaaucacaauuuuucugau

SEQ ID NO: 15280 - RNA, 19 nt, Artificial Sequence
  Description of Artificial Sequence: Synthetic oligonucleotide
uaaauaaaugcuaaaccaa

SEQ ID NO: 15281 - RNA, 19 nt, Artificial Sequence
  Description of Artificial Sequence: Synthetic oligonucleotide
agcguuucaaacuauugca

SEQ ID NO: 15282 - RNA, 19 nt, Artificial Sequence
  Description of Artificial Sequence: Synthetic oligonucleotide
auugccauucuuuuggacu

SEQ ID NO: 15283 - RNA, 19 nt, Artificial Sequence
  Description of Artificial Sequence: Synthetic oligonucleotide
uuuaguuauuagaaugaug

SEQ ID NO: 15284 - RNA, 19 nt, Artificial Sequence
  Description of Artificial Sequence: Synthetic oligonucleotide
gauuguuauagggcaaaug

SEQ ID NO: 15285 - RNA, 19 nt, Artificial Sequence
  Description of Artificial Sequence: Synthetic oligonucleotide
gagaaauccaugugcauca

SEQ ID NO: 15286 - RNA, 19 nt, Artificial Sequence
  Description of Artificial Sequence: Synthetic oligonucleotide
agcuucuaguuguuaaaaa

SEQ ID NO: 15287 - RNA, 19 nt, Artificial Sequence
  Description of Artificial Sequence: Synthetic oligonucleotide
aaaccagauaaauuaacuu

SEQ ID NO: 15288 - RNA, 19 nt, Artificial Sequence
  Description of Artificial Sequence: Synthetic oligonucleotide
ucuacuguauacugugggc

SEQ ID NO: 15289 - RNA, 19 nt, Artificial Sequence
  Description of Artificial Sequence: Synthetic oligonucleotide
cagaggauccuagagcuga

SEQ ID NO: 15290 - RNA, 19 nt, Artificial Sequence
  Description of Artificial Sequence: Synthetic oligonucleotide
auccuacaacaucagcuuc

SEQ ID NO: 15291 - RNA, 19 nt, Artificial Sequence
  Description of Artificial Sequence: Synthetic oligonucleotide
aaaagaaacagauaaauua

SEQ ID NO: 15292 - RNA, 19 nt, Artificial Sequence
  Description of Artificial Sequence: Synthetic oligonucleotide
aacuucuacuguauauacu

SEQ ID NO: 15293 - RNA, 19 nt, Artificial Sequence
  Description of Artificial Sequence: Synthetic oligonucleotide
ugugggcagaggaucuuac

SEQ ID NO: 15294 - RNA, 19 nt, Artificial Sequence
  Description of Artificial Sequence: Synthetic oligonucleotide
cugugccucuguuugugua

SEQ ID NO: 15295 - RNA, 19 nt, Artificial Sequence
  Description of Artificial Sequence: Synthetic oligonucleotide
acauggacuucggugugua

SEQ ID NO: 15296 - RNA, 19 nt, Artificial Sequence
  Description of Artificial Sequence: Synthetic oligonucleotide
aucaguuugaaggacagcc

SEQ ID NO: 15297 - RNA, 19 nt, Artificial Sequence
  Description of Artificial Sequence: Synthetic oligonucleotide
cuugccccauguaaacaua

SEQ ID NO: 15298 - RNA, 19 nt, Artificial Sequence
  Description of Artificial Sequence: Synthetic oligonucleotide
auaaaugcagauugguauc

SEQ ID NO: 15299 - RNA, 19 nt, Artificial Sequence
  Description of Artificial Sequence: Synthetic oligonucleotide
cgccugguugcuauuugcu

SEQ ID NO: 15300 - RNA, 19 nt, Artificial Sequence
  Description of Artificial Sequence: Synthetic oligonucleotide
uuaagaacaaauauuauac

SEQ ID NO: 15301 - RNA, 19 nt, Artificial Sequence
  Description of Artificial Sequence: Synthetic oligonucleotide
cagaugagaucaggcauaa

SEQ ID NO: 15302 - RNA, 19 nt, Artificial Sequence
  Description of Artificial Sequence: Synthetic oligonucleotide
auuuuaaaagaucauuauc

SEQ ID NO: 15303 - RNA, 19 nt, Artificial Sequence
  Description of Artificial Sequence: Synthetic oligonucleotide
caguggagaccucauuauu

SEQ ID NO: 15304 - RNA, 19 nt, Artificial Sequence
  Description of Artificial Sequence: Synthetic oligonucleotide
uacugauauuacaaugggg

SEQ ID NO: 15305 - RNA, 19 nt, Artificial Sequence
  Description of Artificial Sequence: Synthetic oligonucleotide
gccaguuuuuauacuucug

SEQ ID NO: 15306 - RNA, 19 nt, Artificial Sequence
  Description of Artificial Sequence: Synthetic oligonucleotide
ggguagaauuaauaaaauu

SEQ ID NO: 15307 - RNA, 19 nt, Artificial Sequence
  Description of Artificial Sequence: Synthetic oligonucleotide
uuuucugaucccagagauc

SEQ ID NO: 15308 - RNA, 19 nt, Artificial Sequence
  Description of Artificial Sequence: Synthetic oligonucleotide
cugaguucucucugcaguu

SEQ ID NO: 15309 - RNA, 19 nt, Artificial Sequence
  Description of Artificial Sequence: Synthetic oligonucleotide
uggaaacaagaagcuguug

SEQ ID NO: 15310 - RNA, 19 nt, Artificial Sequence
  Description of Artificial Sequence: Synthetic oligonucleotide
gugggcauugugucgggcc

SEQ ID NO: 15311 - RNA, 19 nt, Artificial Sequence
  Description of Artificial Sequence: Synthetic oligonucleotide
caggggcccuuguguuugu

SEQ ID NO: 15312 - RNA, 19 nt, Artificial Sequence
  Description of Artificial Sequence: Synthetic oligonucleotide
ugugggcaaauaucuuuua

SEQ ID NO: 15313 - RNA, 19 nt, Artificial Sequence
  Description of Artificial Sequence: Synthetic oligonucleotide
agcagugugagcugcuuuu

SEQ ID NO: 15314 - RNA, 19 nt, Artificial Sequence
  Description of Artificial Sequence: Synthetic oligonucleotide
uuucuuuucauuaaaaguc

SEQ ID NO: 15315 - RNA, 19 nt, Artificial Sequence
  Description of Artificial Sequence: Synthetic oligonucleotide
cucucuaaaauaauagaaa

SEQ ID NO: 15316 - RNA, 19 nt, Artificial Sequence
  Description of Artificial Sequence: Synthetic oligonucleotide
auuucagauacucgguuca

SEQ ID NO: 15317 - RNA, 19 nt, Artificial Sequence
  Description of Artificial Sequence: Synthetic oligonucleotide
aagucucacugauuuugua

SEQ ID NO: 15318 - RNA, 19 nt, Artificial Sequence
  Description of Artificial Sequence: Synthetic oligonucleotide
agagguccaaaaauguagg

SEQ ID NO: 15319 - RNA, 19 nt, Artificial Sequence
  Description of Artificial Sequence: Synthetic oligonucleotide
gaucugucacuuuugcagg

SEQ ID NO: 15320 - RNA, 19 nt, Artificial Sequence
  Description of Artificial Sequence: Synthetic oligonucleotide
gccccugccucaccuaauu

SEQ ID NO: 15321 - RNA, 19 nt, Artificial Sequence
  Description of Artificial Sequence: Synthetic oligonucleotide
uccuggccaggugacauuu

SEQ ID NO: 15322 - RNA, 19 nt, Artificial Sequence
  Description of Artificial Sequence: Synthetic oligonucleotide
uugggcagaaguaaaugcu

SEQ ID NO: 15323 - RNA, 19 nt, Artificial Sequence
  Description of Artificial Sequence: Synthetic oligonucleotide
uucuauagucacaagcuaa

SEQ ID NO: 15324 - RNA, 19 nt, Artificial Sequence
  Description of Artificial Sequence: Synthetic oligonucleotide
aaaugacucuaagccccaa

SEQ ID NO: 15325 - RNA, 19 nt, Artificial Sequence
  Description of Artificial Sequence: Synthetic oligonucleotide
auuucacgggggguauuca

SEQ ID NO: 15326 - RNA, 19 nt, Artificial Sequence
  Description of Artificial Sequence: Synthetic oligonucleotide
acaugcuuccucuggaaaa

SEQ ID NO: 15327 - RNA, 19 nt, Artificial Sequence
  Description of Artificial Sequence: Synthetic oligonucleotide
auacucuuugacagucagc

SEQ ID NO: 15328 - RNA, 19 nt, Artificial Sequence
  Description of Artificial Sequence: Synthetic oligonucleotide
cuuugcaaguaagugauua

SEQ ID NO: 15329 - RNA, 19 nt, Artificial Sequence
  Description of Artificial Sequence: Synthetic oligonucleotide
accuuguuaggaaucaaag

SEQ ID NO: 15330 - RNA, 19 nt, Artificial Sequence
  Description of Artificial Sequence: Synthetic oligonucleotide
gaaaaauguauuucucucu

SEQ ID NO: 15331 - RNA, 19 nt, Artificial Sequence
  Description of Artificial Sequence: Synthetic oligonucleotide
ugaccuuuagaggaaaaua

SEQ ID NO: 15332 - RNA, 19 nt, Artificial Sequence
  Description of Artificial Sequence: Synthetic oligonucleotide
agaauccuucccuuuuuug

SEQ ID NO: 15333 - RNA, 19 nt, Artificial Sequence
  Description of Artificial Sequence: Synthetic oligonucleotide
gcccauugacacaacuggc

SEQ ID NO: 15334 - RNA, 19 nt, Artificial Sequence
  Description of Artificial Sequence: Synthetic oligonucleotide
cacugcucucuucccuuuc

SEQ ID NO: 15335 - RNA, 19 nt, Artificial Sequence
  Description of Artificial Sequence: Synthetic oligonucleotide
cuaccacccugguucaaag

SEQ ID NO: 15336 - RNA, 19 nt, Artificial Sequence
  Description of Artificial Sequence: Synthetic oligonucleotide
guagucccccgaugcuguc

SEQ ID NO: 15337 - RNA, 19 nt, Artificial Sequence
  Description of Artificial Sequence: Synthetic oligonucleotide
ccuguuccuuucuuaagcc

SEQ ID NO: 15338 - RNA, 19 nt, Artificial Sequence
  Description of Artificial Sequence: Synthetic oligonucleotide
cauaguggaucucugagau

SEQ ID NO: 15339 - RNA, 19 nt, Artificial Sequence
  Description of Artificial Sequence: Synthetic oligonucleotide
uccuacaccccacuuugug

SEQ ID NO: 15340 - RNA, 19 nt, Artificial Sequence
  Description of Artificial Sequence: Synthetic oligonucleotide
gaaacacugacuucaucuu

SEQ ID NO: 15341 - RNA, 19 nt, Artificial Sequence
  Description of Artificial Sequence: Synthetic oligonucleotide
uugcccucgaaugccugau

SEQ ID NO: 15342 - RNA, 19 nt, Artificial Sequence
  Description of Artificial Sequence: Synthetic oligonucleotide
uuuuuucauaagagauucu

SEQ ID NO: 15343 - RNA, 19 nt, Artificial Sequence
  Description of Artificial Sequence: Synthetic oligonucleotide
uagcaauuuggacacuguu

SEQ ID NO: 15344 - RNA, 19 nt, Artificial Sequence
  Description of Artificial Sequence: Synthetic oligonucleotide
uuaagugaacuaucaaacu

SEQ ID NO: 15345 - RNA, 19 nt, Artificial Sequence
  Description of Artificial Sequence: Synthetic oligonucleotide
uaccgcauagagaauauuu

SEQ ID NO: 15346 - RNA, 19 nt, Artificial Sequence
  Description of Artificial Sequence: Synthetic oligonucleotide
uaagcuauuaaaauuaugg

SEQ ID NO: 15347 - RNA, 19 nt, Artificial Sequence
  Description of Artificial Sequence: Synthetic oligonucleotide
guuucccaugaagaucaau

SEQ ID NO: 15348 - RNA, 19 nt, Artificial Sequence
  Description of Artificial Sequence: Synthetic oligonucleotide
uucucuguguccuucccua

SEQ ID NO: 15349 - RNA, 19 nt, Artificial Sequence
  Description of Artificial Sequence: Synthetic oligonucleotide
auaggaauuugagacgagu

SEQ ID NO: 15350 - RNA, 19 nt, Artificial Sequence
  Description of Artificial Sequence: Synthetic oligonucleotide
uuagcccugugaugaaucu

SEQ ID NO: 15351 - RNA, 19 nt, Artificial Sequence
  Description of Artificial Sequence: Synthetic oligonucleotide
uugaaacucacauaugucc

SEQ ID NO: 15352 - RNA, 19 nt, Artificial Sequence
  Description of Artificial Sequence: Synthetic oligonucleotide
cacauacacuugguagaac

SEQ ID NO: 15353 - RNA, 19 nt, Artificial Sequence
  Description of Artificial Sequence: Synthetic oligonucleotide
cuucgauuuaaucuuuaca

SEQ ID NO: 15354 - RNA, 19 nt, Artificial Sequence
  Description of Artificial Sequence: Synthetic oligonucleotide
auaaaagcuguacauauaa

SEQ ID NO: 15355 - RNA, 19 nt, Artificial Sequence
  Description of Artificial Sequence: Synthetic oligonucleotide
accaagaaguuauuuuugc

SEQ ID NO: 15356 - RNA, 19 nt, Artificial Sequence
  Description of Artificial Sequence: Synthetic oligonucleotide
ccaguaaauuaacuuauuu

SEQ ID NO: 15357 - RNA, 19 nt, Artificial Sequence
  Description of Artificial Sequence: Synthetic oligonucleotide
ugcuuuauucaucuuauuu

SEQ ID NO: 15358 - RNA, 19 nt, Artificial Sequence
  Description of Artificial Sequence: Synthetic oligonucleotide
ugguuccuaaucguaaaua

SEQ ID NO: 15359 - RNA, 19 nt, Artificial Sequence
  Description of Artificial Sequence: Synthetic oligonucleotide
auuuuguagcugcuguaaa

SEQ ID NO: 15360 - RNA, 19 nt, Artificial Sequence
  Description of Artificial Sequence: Synthetic oligonucleotide
auuuuuuucucccaaauga

SEQ ID NO: 15361 - RNA, 19 nt, Artificial Sequence
  Description of Artificial Sequence: Synthetic oligonucleotide
aggagucuuauuaucauaa

SEQ ID NO: 15362 - RNA, 19 nt, Artificial Sequence
  Description of Artificial Sequence: Synthetic oligonucleotide
aagguaaaggcuauucagc

SEQ ID NO: 15363 - RNA, 19 nt, Artificial Sequence
  Description of Artificial Sequence: Synthetic oligonucleotide
cuuugauaaccaccugcaa

SEQ ID NO: 15364 - RNA, 19 nt, Artificial Sequence
  Description of Artificial Sequence: Synthetic oligonucleotide
auucuuuuuuggaucauuc

SEQ ID NO: 15365 - RNA, 19 nt, Artificial Sequence
  Description of Artificial Sequence: Synthetic oligonucleotide
cauccaucuaacaaauaca

SEQ ID NO: 15366 - RNA, 19 nt, Artificial Sequence
  Description of Artificial Sequence: Synthetic oligonucleotide
auaaugaggacaguucaug

SEQ ID NO: 15367 - RNA, 19 nt, Artificial Sequence
  Description of Artificial Sequence: Synthetic oligonucleotide
guuaaugaaaauccauguu

SEQ ID NO: 15368 - RNA, 19 nt, Artificial Sequence
  Description of Artificial Sequence: Synthetic oligonucleotide
uguuuaauagaaugccauc

SEQ ID NO: 15369 - RNA, 19 nt, Artificial Sequence
  Description of Artificial Sequence: Synthetic oligonucleotide
ccuuuaccuacuuuugcuc

SEQ ID NO: 15370 - RNA, 19 nt, Artificial Sequence
  Description of Artificial Sequence: Synthetic oligonucleotide
cuuuauggacguuuuucuu

SEQ ID NO: 15371 - RNA, 19 nt, Artificial Sequence
  Description of Artificial Sequence: Synthetic oligonucleotide
uuucaugcucuagugagcu

SEQ ID NO: 15372 - RNA, 19 nt, Artificial Sequence
  Description of Artificial Sequence: Synthetic oligonucleotide
uuucccuauaucaugagaa

SEQ ID NO: 15373 - RNA, 19 nt, Artificial Sequence
  Description of Artificial Sequence: Synthetic oligonucleotide
agugguuauauuugugcaa

SEQ ID NO: 15374 - RNA, 19 nt, Artificial Sequence
  Description of Artificial Sequence: Synthetic oligonucleotide
aauauacaaauauaggaaa

SEQ ID NO: 15375 - RNA, 19 nt, Artificial Sequence
  Description of Artificial Sequence: Synthetic oligonucleotide
aacaaagauucauaccugu

SEQ ID NO: 15376 - RNA, 19 nt, Artificial Sequence
  Description of Artificial Sequence: Synthetic oligonucleotide
uaggcaauagucuaacuug

SEQ ID NO: 15377 - RNA, 19 nt, Artificial Sequence
  Description of Artificial Sequence: Synthetic oligonucleotide
guccaaaccacuuugccuu

SEQ ID NO: 15378 - RNA, 19 nt, Artificial Sequence
  Description of Artificial Sequence: Synthetic oligonucleotide
uuacugcuauuuuuauccc

SEQ ID NO: 15379 - RNA, 19 nt, Artificial Sequence
  Description of Artificial Sequence: Synthetic oligonucleotide
ccaaugcguagauauuucc

SEQ ID NO: 15380 - RNA, 19 nt, Artificial Sequence
  Description of Artificial Sequence: Synthetic oligonucleotide
ccccaggccuauagccuuu

SEQ ID NO: 15381 - RNA, 19 nt, Artificial Sequence
  Description of Artificial Sequence: Synthetic oligonucleotide
ugugaaggaaagcaaauca

SEQ ID NO: 15382 - RNA, 19 nt, Artificial Sequence
  Description of Artificial Sequence: Synthetic oligonucleotide
auaccuccuguauauugac

SEQ ID NO: 15383 - RNA, 19 nt, Artificial Sequence
  Description of Artificial Sequence: Synthetic oligonucleotide
cacgaaucugguuuucaaa

SEQ ID NO: 15384 - RNA, 19 nt, Artificial Sequence
  Description of Artificial Sequence: Synthetic oligonucleotide
augucauuuccagauuuuu

SEQ ID NO: 15385 - RNA, 19 nt, Artificial Sequence
  Description of Artificial Sequence: Synthetic oligonucleotide
uuaguuaauuggggguugu

SEQ ID NO: 15386 - RNA, 19 nt, Artificial Sequence
  Description of Artificial Sequence: Synthetic oligonucleotide
uccuuuucccuuaauguga

SEQ ID NO: 15387 - RNA, 19 nt, Artificial Sequence
  Description of Artificial Sequence: Synthetic oligonucleotide
agagucauuuuccuguaua

SEQ ID NO: 15388 - RNA, 19 nt, Artificial Sequence
  Description of Artificial Sequence: Synthetic oligonucleotide
auuucuggaucucucaggg

SEQ ID NO: 15389 - RNA, 19 nt, Artificial Sequence
  Description of Artificial Sequence: Synthetic oligonucleotide
ggcugggaggggggaguga

SEQ ID NO: 15390 - RNA, 19 nt, Artificial Sequence
  Description of Artificial Sequence: Synthetic oligonucleotide
aggggacuacaaccauagc

SEQ ID NO: 15391 - RNA, 19 nt, Artificial Sequence
  Description of Artificial Sequence: Synthetic oligonucleotide
cacuccaagaacccuuuug

SEQ ID NO: 15392 - RNA, 19 nt, Artificial Sequence
  Description of Artificial Sequence: Synthetic oligonucleotide
gggauuacuccaguaauca

SEQ ID NO: 15393 - RNA, 19 nt, Artificial Sequence
  Description of Artificial Sequence: Synthetic oligonucleotide
aacuacgaaaguuauuuuc

SEQ ID NO: 15394 - RNA, 19 nt, Artificial Sequence
  Description of Artificial Sequence: Synthetic oligonucleotide
cuaaauguagauauguaag

SEQ ID NO: 15395 - RNA, 19 nt, Artificial Sequence
  Description of Artificial Sequence: Synthetic oligonucleotide
gguguucuuuuaaaguaag

SEQ ID NO: 15396 - RNA, 19 nt, Artificial Sequence
  Description of Artificial Sequence: Synthetic oligonucleotide
gguacuuugaaauauguag

SEQ ID NO: 15397 - RNA, 19 nt, Artificial Sequence
  Description of Artificial Sequence: Synthetic oligonucleotide
gcauaaacugguacugcug

SEQ ID NO: 15398 - RNA, 19 nt, Artificial Sequence
  Description of Artificial Sequence: Synthetic oligonucleotide
guuaaaugggucgauuauu

SEQ ID NO: 15399 - RNA, 19 nt, Artificial Sequence
  Description of Artificial Sequence: Synthetic oligonucleotide
uaaacggagcagcugugug

SEQ ID NO: 15400 - RNA, 19 nt, Artificial Sequence
  Description of Artificial Sequence: Synthetic oligonucleotide
gagggcagcuaacuuugaa

SEQ ID NO: 15401 - RNA, 19 nt, Artificial Sequence
  Description of Artificial Sequence: Synthetic oligonucleotide
augccugucucccuggcug

SEQ ID NO: 15402 - RNA, 19 nt, Artificial Sequence
  Description of Artificial Sequence: Synthetic oligonucleotide
ggugugucuccuucucaug

SEQ ID NO: 15403 - RNA, 19 nt, Artificial Sequence
  Description of Artificial Sequence: Synthetic oligonucleotide
guugagagcaccagggauu

SEQ ID NO: 15404 - RNA, 19 nt, Artificial Sequence
  Description of Artificial Sequence: Synthetic oligonucleotide
ugcguggcugcaugcugaa

SEQ ID NO: 15405 - RNA, 19 nt, Artificial Sequence
  Description of Artificial Sequence: Synthetic oligonucleotide
aaccgcauuuucccauggu

SEQ ID NO: 15406 - RNA, 19 nt, Artificial Sequence
  Description of Artificial Sequence: Synthetic oligonucleotide
uguaugacuaguucaucuc

SEQ ID NO: 15407 - RNA, 19 nt, Artificial Sequence
  Description of Artificial Sequence: Synthetic oligonucleotide
cuuucuugagcaccauuac

SEQ ID NO: 15408 - RNA, 19 nt, Artificial Sequence
  Description of Artificial Sequence: Synthetic oligonucleotide
caagaagaucaaaugaaaa

SEQ ID NO: 15409 - RNA, 19 nt, Artificial Sequence
  Description of Artificial Sequence: Synthetic oligonucleotide
augagaucaauguggaaga

SEQ ID NO: 15410 - RNA, 19 nt, Artificial Sequence
  Description of Artificial Sequence: Synthetic oligonucleotide
acaauucauagcacaaaaa

SEQ ID NO: 15411 - RNA, 19 nt, Artificial Sequence
  Description of Artificial Sequence: Synthetic oligonucleotide
aaagucaucuuaaaucuac

SEQ ID NO: 15412 - RNA, 19 nt, Artificial Sequence
  Description of Artificial Sequence: Synthetic oligonucleotide
cucucaaacauucaucuua

SEQ ID NO: 15413 - RNA, 19 nt, Artificial Sequence
  Description of Artificial Sequence: Synthetic oligonucleotide
auacaugcaucaaaguaau

SEQ ID NO: 15414 - RNA, 19 nt, Artificial Sequence
  Description of Artificial Sequence: Synthetic oligonucleotide
uuuacugacaucaguuugg

SEQ ID NO: 15415 - RNA, 19 nt, Artificial Sequence
  Description of Artificial Sequence: Synthetic oligonucleotide
ggugagagagggagucacu

SEQ ID NO: 15416 - RNA, 19 nt, Artificial Sequence
  Description of Artificial Sequence: Synthetic oligonucleotide
uuuacugaaaaggcagagg

SEQ ID NO: 15417 - RNA, 19 nt, Artificial Sequence
  Description of Artificial Sequence: Synthetic oligonucleotide
gcuuaagguguauacauuu

SEQ ID NO: 15418 - RNA, 19 nt, Artificial Sequence
  Description of Artificial Sequence: Synthetic oligonucleotide
uguacucacuuccuuauuu

SEQ ID NO: 15419 - RNA, 19 nt, Artificial Sequence
  Description of Artificial Sequence: Synthetic oligonucleotide
uucuuaacuuguaagcaga

SEQ ID NO: 15420 - RNA, 19 nt, Artificial Sequence
  Description of Artificial Sequence: Synthetic oligonucleotide
aaaacaagcccucucucuu

SEQ ID NO: 15421 - RNA, 19 nt, Artificial Sequence
  Description of Artificial Sequence: Synthetic oligonucleotide
ugugaaguaucuucaaagg

SEQ ID NO: 15422 - RNA, 19 nt, Artificial Sequence
  Description of Artificial Sequence: Synthetic oligonucleotide
gauuggggugcaaaaauac

SEQ ID NO: 15423 - RNA, 19 nt, Artificial Sequence
  Description of Artificial Sequence: Synthetic oligonucleotide
ccuugcugguaagccauca

SEQ ID NO: 15424 - RNA, 19 nt, Artificial Sequence
  Description of Artificial Sequence: Synthetic oligonucleotide
aauguuuuauuuaaauccc

SEQ ID NO: 15425 - RNA, 19 nt, Artificial Sequence
  Description of Artificial Sequence: Synthetic oligonucleotide
cugcauucaaaguuagcug

SEQ ID NO: 15426 - RNA, 19 nt, Artificial Sequence
  Description of Artificial Sequence: Synthetic oligonucleotide
gccuuuuugaaauaaacaa

SEQ ID NO: 15427 - RNA, 19 nt, Artificial Sequence
  Description of Artificial Sequence: Synthetic oligonucleotide
aacaaaaaauacuacugua

SEQ ID NO: 15428 - RNA, 19 nt, Artificial Sequence
  Description of Artificial Sequence: Synthetic oligonucleotide
auguuugaaaaugugaaua

SEQ ID NO: 15429 - RNA, 19 nt, Artificial Sequence
  Description of Artificial Sequence: Synthetic oligonucleotide
aguauuuuuauagcuuguu

SEQ ID NO: 15430 - RNA, 19 nt, Artificial Sequence
  Description of Artificial Sequence: Synthetic oligonucleotide
uaaagacauggcuaguugc

SEQ ID NO: 15431 - RNA, 19 nt, Artificial Sequence
  Description of Artificial Sequence: Synthetic oligonucleotide
cauuuguaaauaaguauaa

SEQ ID NO: 15432 - RNA, 19 nt, Artificial Sequence
  Description of Artificial Sequence: Synthetic oligonucleotide
auguugcuuugauuuucuu

SEQ ID NO: 15433 - RNA, 19 nt, Artificial Sequence
  Description of Artificial Sequence: Synthetic oligonucleotide
uuuguggacaucuuuauuu

SEQ ID NO: 15434 - RNA, 19 nt, Artificial Sequence
  Description of Artificial Sequence: Synthetic oligonucleotide
uggaacauaauugucuuua

SEQ ID NO: 15435 - RNA, 19 nt, Artificial Sequence
  Description of Artificial Sequence: Synthetic oligonucleotide
aggguugauuuguauauaa

SEQ ID NO: 15436 - RNA, 19 nt, Artificial Sequence
  Description of Artificial Sequence: Synthetic oligonucleotide
aguaauuggccugugauug

SEQ ID NO: 15437 - RNA, 19 nt, Artificial Sequence
  Description of Artificial Sequence: Synthetic oligonucleotide
guuucuuuuuugguuggaa

SEQ ID NO: 15438 - RNA, 19 nt, Artificial Sequence
  Description of Artificial Sequence: Synthetic oligonucleotide
aguuaucauuuugacauua

SEQ ID NO: 15439 - RNA, 19 nt, Artificial Sequence
  Description of Artificial Sequence: Synthetic oligonucleotide
acuugugauucuguguuca

SEQ ID NO: 15440 - RNA, 19 nt, Artificial Sequence
  Description of Artificial Sequence: Synthetic oligonucleotide
agcacuauugugauguguu

SEQ ID NO: 15441 - RNA, 19 nt, Artificial Sequence
  Description of Artificial Sequence: Synthetic oligonucleotide
ucaaccucugcacucgcuu

SEQ ID NO: 15442 - RNA, 19 nt, Artificial Sequence
  Description of Artificial Sequence: Synthetic oligonucleotide
uacacaauaggauaugcca

SEQ ID NO: 15443 - RNA, 19 nt, Artificial Sequence
  Description of Artificial Sequence: Synthetic oligonucleotide
aauugugugugguguaaug

SEQ ID NO: 15444 - RNA, 19 nt, Artificial Sequence
  Description of Artificial Sequence: Synthetic oligonucleotide
guuauuuugauuuuuuucc

SEQ ID NO: 15445 - RNA, 19 nt, Artificial Sequence
  Description of Artificial Sequence: Synthetic oligonucleotide
cauguuauugaugaaggau

SEQ ID NO: 15446 - RNA, 19 nt, Artificial Sequence
  Description of Artificial Sequence: Synthetic oligonucleotide
ucaugcaccuaacacauac

SEQ ID NO: 15447 - RNA, 19 nt, Artificial Sequence
  Description of Artificial Sequence: Synthetic oligonucleotide
cuaacuuuuuuaauguuag

SEQ ID NO: 15448 - RNA, 19 nt, Artificial Sequence
  Description of Artificial Sequence: Synthetic oligonucleotide
ggcauauuuuuaguauacu

SEQ ID NO: 15449 - RNA, 19 nt, Artificial Sequence
  Description of Artificial Sequence: Synthetic oligonucleotide
uuucucuuauucuuucuuc

SEQ ID NO: 15450 - RNA, 19 nt, Artificial Sequence
  Description of Artificial Sequence: Synthetic oligonucleotide
cuccuccaaccuuuuaccc

SEQ ID NO: 15451 - RNA, 19 nt, Artificial Sequence
  Description of Artificial Sequence: Synthetic oligonucleotide
cauccuccuuccuuucccu

SEQ ID NO: 15452 - RNA, 19 nt, Artificial Sequence
  Description of Artificial Sequence: Synthetic oligonucleotide
ucauuccuguuguuauuug

SEQ ID NO: 15453 - RNA, 19 nt, Artificial Sequence
  Description of Artificial Sequence: Synthetic oligonucleotide
gagaaugagggagaaacag

SEQ ID NO: 15454 - RNA, 19 nt, Artificial Sequence
  Description of Artificial Sequence: Synthetic oligonucleotide
guauuuuacauuuauguaa

SEQ ID NO: 15455 - RNA, 19 nt, Artificial Sequence
  Description of Artificial Sequence: Synthetic oligonucleotide
auuaggcuuuuccguuagu

SEQ ID NO: 15456 - RNA, 19 nt, Artificial Sequence
  Description of Artificial Sequence: Synthetic oligonucleotide
uucucaaggauccucuuuu

SEQ ID NO: 15457 - RNA, 19 nt, Artificial Sequence
  Description of Artificial Sequence: Synthetic oligonucleotide
uggcucuugggaaagaauu

SEQ ID NO: 15458 - RNA, 19 nt, Artificial Sequence
  Description of Artificial Sequence: Synthetic oligonucleotide
uguaccuguacaaggcaau

SEQ ID NO: 15459 - RNA, 19 nt, Artificial Sequence
  Description of Artificial Sequence: Synthetic oligonucleotide
uuauagaaugcgaacugcu

SEQ ID NO: 15460 - RNA, 19 nt, Artificial Sequence
  Description of Artificial Sequence: Synthetic oligonucleotide
uuugccucauuccauacug

SEQ ID NO: 15461 - RNA, 19 nt, Artificial Sequence
  Description of Artificial Sequence: Synthetic oligonucleotide
gaucaucccagcugaacaa

SEQ ID NO: 15462 - RNA, 19 nt, Artificial Sequence
  Description of Artificial Sequence: Synthetic oligonucleotide
auuugaaaacuguucugcc

SEQ ID NO: 15463 - RNA, 19 nt, Artificial Sequence
  Description of Artificial Sequence: Synthetic oligonucleotide
cuuuuuguuacaugaaucu

SEQ ID NO: 15464 - RNA, 19 nt, Artificial Sequence
  Description of Artificial Sequence: Synthetic oligonucleotide
ugucagaaauauauuuuua

SEQ ID NO: 15465 - RNA, 19 nt, Artificial Sequence
  Description of Artificial Sequence: Synthetic oligonucleotide
aauuuaauauaaaugaaau

SEQ ID NO: 15466 - RNA, 19 nt, Artificial Sequence
  Description of Artificial Sequence: Synthetic oligonucleotide
uucaauaaaauaugaaaca

SEQ ID NO: 15467 - RNA, 25 nt, Artificial Sequence
  Description of Artificial Sequence: Synthetic oligonucleotide
cacgcgcgcccggcugggggaucuc

SEQ ID NO: 15468 - RNA, 25 nt, Artificial Sequence
  Description of Artificial Sequence: Synthetic oligonucleotide
ccuccgcgugcccgaaagggggaua

SEQ ID NO: 15469 - RNA, 25 nt, Artificial Sequence
  Description of Artificial Sequence: Synthetic oligonucleotide
augccauuuggacauguaauuguca

SEQ ID NO: 15470 - RNA, 25 nt, Artificial Sequence
  Description of Artificial Sequence: Synthetic oligonucleotide
agcacgggaucugagacuuccaaaa

SEQ ID NO: 15471 - RNA, 25 nt, Artificial Sequence
  Description of Artificial Sequence: Synthetic oligonucleotide
aaaugaagccggcgacaggacuuug

SEQ ID NO: 15472 - RNA, 25 nt, Artificial Sequence
  Description of Artificial Sequence: Synthetic oligonucleotide
gggucugggugagccuucucguggc

SEQ ID NO: 15473 - RNA, 25 nt, Artificial Sequence
  Description of Artificial Sequence: Synthetic oligonucleotide
cggcggggaccguccagcccagcga

SEQ ID NO: 15474 - RNA, 25 nt, Artificial Sequence
  Description of Artificial Sequence: Synthetic oligonucleotide
auucucagucagugugugcaggaac

SEQ ID NO: 15475 - RNA, 25 nt, Artificial Sequence
  Description of Artificial Sequence: Synthetic oligonucleotide
cggagaauaaacugagcucucucuc

SEQ ID NO: 15476 - RNA, 25 nt, Artificial Sequence
  Description of Artificial Sequence: Synthetic oligonucleotide
cugaccuggaacagcaguaccgagc

SEQ ID NO: 15477 - RNA, 25 nt, Artificial Sequence
  Description of Artificial Sequence: Synthetic oligonucleotide
ccuugcgcaaguacuaugaaaacug

SEQ ID NO: 15478 - RNA, 25 nt, Artificial Sequence
  Description of Artificial Sequence: Synthetic oligonucleotide
gugagguugucaugggcaaccugga

SEQ ID NO: 15479 - RNA, 25 nt, Artificial Sequence
  Description of Artificial Sequence: Synthetic oligonucleotide
agauaaccagcauugagcacaaccg

SEQ ID NO: 15480 - RNA, 25 nt, Artificial Sequence
  Description of Artificial Sequence: Synthetic oligonucleotide
gggaccucuccuuccugcggucugu

SEQ ID NO: 15481 - RNA, 25 nt, Artificial Sequence
  Description of Artificial Sequence: Synthetic oligonucleotide
uucgagaagucacaggcuacguguu

SEQ ID NO: 15482 - RNA, 25 nt, Artificial Sequence
  Description of Artificial Sequence: Synthetic oligonucleotide
uaguggcucuuaaucaguuucguua

SEQ ID NO: 15483 - RNA, 25 nt, Artificial Sequence
  Description of Artificial Sequence: Synthetic oligonucleotide
accugccucuggagaauuuacgcau

SEQ ID NO: 15484 - RNA, 25 nt, Artificial Sequence
  Description of Artificial Sequence: Synthetic oligonucleotide
uuauucgugggacaaaacuuuauga

SEQ ID NO: 15485 - RNA, 25 nt, Artificial Sequence
  Description of Artificial Sequence: Synthetic oligonucleotide
aggaucgauaugccuuggcaauauu

SEQ ID NO: 15486 - RNA, 25 nt, Artificial Sequence
  Description of Artificial Sequence: Synthetic oligonucleotide
uuuuaaacuacagaaaagauggaaa

SEQ ID NO: 15487 - RNA, 25 nt, Artificial Sequence
  Description of Artificial Sequence: Synthetic oligonucleotide
acuuuggacuucaagaacuuggauu

SEQ ID NO: 15488 - RNA, 25 nt, Artificial Sequence
  Description of Artificial Sequence: Synthetic oligonucleotide
uaaagaacuugacagaaauccuaaa

SEQ ID NO: 15489 - RNA, 25 nt, Artificial Sequence
  Description of Artificial Sequence: Synthetic oligonucleotide
augguggagucuauguagaccagaa

SEQ ID NO: 15490 - RNA, 25 nt, Artificial Sequence
  Description of Artificial Sequence: Synthetic oligonucleotide
acaaauuccuuuguuaugcagacac

SEQ ID NO: 15491 - RNA, 25 nt, Artificial Sequence
  Description of Artificial Sequence: Synthetic oligonucleotide
ccauucauuggcaagauauuguucg

SEQ ID NO: 15492 - RNA, 25 nt, Artificial Sequence
  Description of Artificial Sequence: Synthetic oligonucleotide
ggaacccauggccuuccaacuugac

SEQ ID NO: 15493 - RNA, 25 nt, Artificial Sequence
  Description of Artificial Sequence: Synthetic oligonucleotide
cucuugugucaacaaaugguaguuc

SEQ ID NO: 15494 - RNA, 25 nt, Artificial Sequence
  Description of Artificial Sequence: Synthetic oligonucleotide
caggauguggacguugccauaaguc

SEQ ID NO: 15495 - RNA, 25 nt, Artificial Sequence
  Description of Artificial Sequence: Synthetic oligonucleotide
ccuguacuggccguugcuggggacc

SEQ ID NO: 15496 - RNA, 25 nt, Artificial Sequence
  Description of Artificial Sequence: Synthetic oligonucleotide
ccacagaaaaucauugccagacuuu

SEQ ID NO: 15497 - RNA, 25 nt, Artificial Sequence
  Description of Artificial Sequence: Synthetic oligonucleotide
ugacaaggacggugugugcagaaca

SEQ ID NO: 15498 - RNA, 25 nt, Artificial Sequence
  Description of Artificial Sequence: Synthetic oligonucleotide
aaugugacggcagaugcuacggacc

SEQ ID NO: 15499 - RNA, 25 nt, Artificial Sequence
  Description of Artificial Sequence: Synthetic oligonucleotide
cuuacgucagugacugcugccaucg

SEQ ID NO: 15500 - RNA, 25 nt, Artificial Sequence
  Description of Artificial Sequence: Synthetic oligonucleotide
gagaaugugcuggaggcugcucagg

SEQ ID NO: 15501 - RNA, 25 nt, Artificial Sequence
  Description of Artificial Sequence: Synthetic oligonucleotide
gaccuaaggacacagacugcuuugc

SEQ ID NO: 15502 - RNA, 25 nt, Artificial Sequence
  Description of Artificial Sequence: Synthetic oligonucleotide
ccugcaugaauuucaaugacagugg

SEQ ID NO: 15503 - RNA, 25 nt, Artificial Sequence
  Description of Artificial Sequence: Synthetic oligonucleotide
gagcauguguuacucagugucccca

SEQ ID NO: 15504 - RNA, 25 nt, Artificial Sequence
  Description of Artificial Sequence: Synthetic oligonucleotide
aaaccuuugucuacaauccaaccac

SEQ ID NO: 15505 - RNA, 25 nt, Artificial Sequence
  Description of Artificial Sequence: Synthetic oligonucleotide
ccuuucaacuggagcacaauuucaa

SEQ ID NO: 15506 - RNA, 25 nt, Artificial Sequence
  Description of Artificial Sequence: Synthetic oligonucleotide
augcaaaguacacauauggagcauu

SEQ ID NO: 15507 - RNA, 25 nt, Artificial Sequence
  Description of Artificial Sequence: Synthetic oligonucleotide
ucugugucaagaaauguccacauaa

SEQ ID NO: 15508 - RNA, 25 nt, Artificial Sequence
  Description of Artificial Sequence: Synthetic oligonucleotide
acuuugugguagauuccaguucuug

SEQ ID NO: 15509 - RNA, 25 nt, Artificial Sequence
  Description of Artificial Sequence: Synthetic oligonucleotide
gugugcgugccugcccuaguuccaa

SEQ ID NO: 15510 - RNA, 25 nt, Artificial Sequence
  Description of Artificial Sequence: Synthetic oligonucleotide
agauggaaguagaagaaaaugggau

SEQ ID NO: 15511 - RNA, 25 nt, Artificial Sequence
  Description of Artificial Sequence: Synthetic oligonucleotide
uuaaaauguguaaaccuugcacuga

SEQ ID NO: 15512 - RNA, 25 nt, Artificial Sequence
  Description of Artificial Sequence: Synthetic oligonucleotide
acauuugcccaaaagcuugugaugg

SEQ ID NO: 15513 - RNA, 25 nt, Artificial Sequence
  Description of Artificial Sequence: Synthetic oligonucleotide
gcauuggcacaggaucauugauguc

SEQ ID NO: 15514 - RNA, 25 nt, Artificial Sequence
  Description of Artificial Sequence: Synthetic oligonucleotide
cagcucagacuguggauuccaguaa

SEQ ID NO: 15515 - RNA, 25 nt, Artificial Sequence
  Description of Artificial Sequence: Synthetic oligonucleotide
acauugacaaauucauaaacuguac

SEQ ID NO: 15516 - RNA, 25 nt, Artificial Sequence
  Description of Artificial Sequence: Synthetic oligonucleotide
ccaagaucaaugggaauuugaucuu

SEQ ID NO: 15517 - RNA, 25 nt, Artificial Sequence
  Description of Artificial Sequence: Synthetic oligonucleotide
uucuagucacugguauucaugggga

SEQ ID NO: 15518 - RNA, 25 nt, Artificial Sequence
  Description of Artificial Sequence: Synthetic oligonucleotide
acccuuacaaugcaauugaagccau

SEQ ID NO: 15519 - RNA, 25 nt, Artificial Sequence
  Description of Artificial Sequence: Synthetic oligonucleotide
uagacccagagaaacugaacgucuu

SEQ ID NO: 15520 - RNA, 25 nt, Artificial Sequence
  Description of Artificial Sequence: Synthetic oligonucleotide
uucggacagucagagagauaacagg

SEQ ID NO: 15521 - RNA, 25 nt, Artificial Sequence
  Description of Artificial Sequence: Synthetic oligonucleotide
guuuccugaacauacagucauggcc

SEQ ID NO: 15522 - RNA, 25 nt, Artificial Sequence
  Description of Artificial Sequence: Synthetic oligonucleotide
caccaaacaugacugacuucagugu

SEQ ID NO: 15523 - RNA, 25 nt, Artificial Sequence
  Description of Artificial Sequence: Synthetic oligonucleotide
uuuuuucuaaccuggugaccauugg

SEQ ID NO: 15524 - RNA, 25 nt, Artificial Sequence
  Description of Artificial Sequence: Synthetic oligonucleotide
guggaagaguacucuauaguggccu

SEQ ID NO: 15525 - RNA, 25 nt, Artificial Sequence
  Description of Artificial Sequence: Synthetic oligonucleotide
uguccuugcuuauccucaagcaaca

SEQ ID NO: 15526 - RNA, 25 nt, Artificial Sequence
  Description of Artificial Sequence: Synthetic oligonucleotide
agggcaucaccucucuacaguucca

SEQ ID NO: 15527 - RNA, 25 nt, Artificial Sequence
  Description of Artificial Sequence: Synthetic oligonucleotide
agucccugaaggaaaucagcgcagg

SEQ ID NO: 15528 - RNA, 25 nt, Artificial Sequence
  Description of Artificial Sequence: Synthetic oligonucleotide
gaaacaucuauauuacugacaacag

SEQ ID NO: 15529 - RNA, 25 nt, Artificial Sequence
  Description of Artificial Sequence: Synthetic oligonucleotide
gcaaccuguguuauuaucauaccau

SEQ ID NO: 15530 - RNA, 25 nt, Artificial Sequence
  Description of Artificial Sequence: Synthetic oligonucleotide
uuaacuggacaacacucuucagcac

SEQ ID NO: 15531 - RNA, 25 nt, Artificial Sequence
  Description of Artificial Sequence: Synthetic oligonucleotide
caaucaaccagagaauaguaauccg

SEQ ID NO: 15532 - RNA, 25 nt, Artificial Sequence
  Description of Artificial Sequence: Synthetic oligonucleotide
gggacaacagaaaagcugaaaauug

SEQ ID NO: 15533 - RNA, 25 nt, Artificial Sequence
  Description of Artificial Sequence: Synthetic oligonucleotide
guacugcugaaggaauggugugcaa

SEQ ID NO: 15534 - RNA, 25 nt, Artificial Sequence
  Description of Artificial Sequence: Synthetic oligonucleotide
accaucuguguuccagugauggcug

SEQ ID NO: 15535 - RNA, 25 nt, Artificial Sequence
  Description of Artificial Sequence: Synthetic oligonucleotide
guuggggaccugggccagaccaaug

SEQ ID NO: 15536 - RNA, 25 nt, Artificial Sequence
  Description of Artificial Sequence: Synthetic oligonucleotide
gucugucgugucgccgcuucaguag

SEQ ID NO: 15537 - RNA, 25 nt, Artificial Sequence
  Description of Artificial Sequence: Synthetic oligonucleotide
gaggaaggaucugcauagagucuug

SEQ ID NO: 15538 - RNA, 25 nt, Artificial Sequence
  Description of Artificial Sequence: Synthetic oligonucleotide
guaaccucuaugauggugaauuucg

SEQ ID NO: 15539 - RNA, 25 nt, Artificial Sequence
  Description of Artificial Sequence: Synthetic oligonucleotide
gggaguuugagaauggcuccaucug

SEQ ID NO: 15540 - RNA, 25 nt, Artificial Sequence
  Description of Artificial Sequence: Synthetic oligonucleotide
guguggagugugacccccaguguga

SEQ ID NO: 15541 - RNA, 25 nt, Artificial Sequence
  Description of Artificial Sequence: Synthetic oligonucleotide
agaagauggaagauggccuccucac

SEQ ID NO: 15542 - RNA, 25 nt, Artificial Sequence
  Description of Artificial Sequence: Synthetic oligonucleotide
caugccauggaccggguccugacaa

SEQ ID NO: 15543 - RNA, 25 nt, Artificial Sequence
  Description of Artificial Sequence: Synthetic oligonucleotide
acuguacaaagugcucucauuuuaa

SEQ ID NO: 15544 - RNA, 25 nt, Artificial Sequence
  Description of Artificial Sequence: Synthetic oligonucleotide
aagauggcccaaacuguguggaaaa

SEQ ID NO: 15545 - RNA, 25 nt, Artificial Sequence
  Description of Artificial Sequence: Synthetic oligonucleotide
aauguccagauggcuuacagggggc

SEQ ID NO: 15546 - RNA, 25 nt, Artificial Sequence
  Description of Artificial Sequence: Synthetic oligonucleotide
caaacaguuucauuuucaaguaugc

SEQ ID NO: 15547 - RNA, 25 nt, Artificial Sequence
  Description of Artificial Sequence: Synthetic oligonucleotide
cugauccagaucgggagugccaccc

SEQ ID NO: 15548 - RNA, 25 nt, Artificial Sequence
  Description of Artificial Sequence: Synthetic oligonucleotide
caugccauccaaacugcacccaagg

SEQ ID NO: 15549 - RNA, 25 nt, Artificial Sequence
  Description of Artificial Sequence: Synthetic oligonucleotide
gguguaacggucccacuagucauga

SEQ ID NO: 15550 - RNA, 25 nt, Artificial Sequence
  Description of Artificial Sequence: Synthetic oligonucleotide
acugcauuuacuacccauggacggg

SEQ ID NO: 15551 - RNA, 25 nt, Artificial Sequence
  Description of Artificial Sequence: Synthetic oligonucleotide
gccauuccacuuuaccacaacaugc

SEQ ID NO: 15552 - RNA, 25 nt, Artificial Sequence
  Description of Artificial Sequence: Synthetic oligonucleotide
cuagaacuccccugauugcagcugg

SEQ ID NO: 15553 - RNA, 25 nt, Artificial Sequence
  Description of Artificial Sequence: Synthetic oligonucleotide
gaguaauuggugggcucuucauucu

SEQ ID NO: 15554 - RNA, 25 nt, Artificial Sequence
  Description of Artificial Sequence: Synthetic oligonucleotide
uggucauugugggucugacauuugc

SEQ ID NO: 15555 - RNA, 25 nt, Artificial Sequence
  Description of Artificial Sequence: Synthetic oligonucleotide
cuguuuauguuagaaggaagagcau

SEQ ID NO: 15556 - RNA, 25 nt, Artificial Sequence
  Description of Artificial Sequence: Synthetic oligonucleotide
ucaaaaagaaaagagccuugagaag

SEQ ID NO: 15557 - RNA, 25 nt, Artificial Sequence
  Description of Artificial Sequence: Synthetic oligonucleotide
gauucuuggaaacagaguuggugga

SEQ ID NO: 15558 - RNA, 25 nt, Artificial Sequence
  Description of Artificial Sequence: Synthetic oligonucleotide
aaccauuaacucccaguggcacagc

SEQ ID NO: 15559 - RNA, 25 nt, Artificial Sequence
  Description of Artificial Sequence: Synthetic oligonucleotide
cacccaaucaagcucaacuucguau

SEQ ID NO: 15560 - RNA, 25 nt, Artificial Sequence
  Description of Artificial Sequence: Synthetic oligonucleotide
uuuugaaagaaacugagcugaagag

SEQ ID NO: 15561 - RNA, 25 nt, Artificial Sequence
  Description of Artificial Sequence: Synthetic oligonucleotide
ggguaaaaguccuuggcucaggugc

SEQ ID NO: 15562 - RNA, 25 nt, Artificial Sequence
  Description of Artificial Sequence: Synthetic oligonucleotide
cuuuuggaacgguuuauaaagguau

SEQ ID NO: 15563 - RNA, 25 nt, Artificial Sequence
  Description of Artificial Sequence: Synthetic oligonucleotide
uuuggguaccugaaggagaaacugu

SEQ ID NO: 15564 - RNA, 25 nt, Artificial Sequence
  Description of Artificial Sequence: Synthetic oligonucleotide
ugaagauuccuguggcuauuaagau

SEQ ID NO: 15565 - RNA, 25 nt, Artificial Sequence
  Description of Artificial Sequence: Synthetic oligonucleotide
uucuuaaugagacaacuggucccaa

SEQ ID NO: 15566 - RNA, 25 nt, Artificial Sequence
  Description of Artificial Sequence: Synthetic oligonucleotide
aggcaaauguggaguucauggauga

SEQ ID NO: 15567 - RNA, 25 nt, Artificial Sequence
  Description of Artificial Sequence: Synthetic oligonucleotide
aagcucugaucauggcaaguaugga

SEQ ID NO: 15568 - RNA, 25 nt, Artificial Sequence
  Description of Artificial Sequence: Synthetic oligonucleotide
aucauccacaccuaguccgguugcu

SEQ ID NO: 15569 - RNA, 25 nt, Artificial Sequence
  Description of Artificial Sequence: Synthetic oligonucleotide
ugggugugugucugagcccaaccau

SEQ ID NO: 15570 - RNA, 25 nt, Artificial Sequence
  Description of Artificial Sequence: Synthetic oligonucleotide
uccagcugguuacucaacuuaugcc

SEQ ID NO: 15571 - RNA, 25 nt, Artificial Sequence
  Description of Artificial Sequence: Synthetic oligonucleotide
cccauggcugccuguuggaguaugu

SEQ ID NO: 15572 - RNA, 25 nt, Artificial Sequence
  Description of Artificial Sequence: Synthetic oligonucleotide
uccacgagcacaaggauaacauugg

SEQ ID NO: 15573 - RNA, 25 nt, Artificial Sequence
  Description of Artificial Sequence: Synthetic oligonucleotide
gaucacaacugcugcuuaacuggug

SEQ ID NO: 15574 - RNA, 25 nt, Artificial Sequence
  Description of Artificial Sequence: Synthetic oligonucleotide
guguccagauagcuaagggaaugau

SEQ ID NO: 15575 - RNA, 25 nt, Artificial Sequence
  Description of Artificial Sequence: Synthetic oligonucleotide
uguaccuggaagaaagacgacucgu

SEQ ID NO: 15576 - RNA, 25 nt, Artificial Sequence
  Description of Artificial Sequence: Synthetic oligonucleotide
uucaucgggauuuggcagcccguaa

SEQ ID NO: 15577 - RNA, 25 nt, Artificial Sequence
  Description of Artificial Sequence: Synthetic oligonucleotide
augucuuagugaaaucuccaaacca

SEQ ID NO: 15578 - RNA, 25 nt, Artificial Sequence
  Description of Artificial Sequence: Synthetic oligonucleotide
augugaaaaucacagauuuugggcu

SEQ ID NO: 15579 - RNA, 25 nt, Artificial Sequence
  Description of Artificial Sequence: Synthetic oligonucleotide
uagccagacucuuggaaggagauga

SEQ ID NO: 15580 - RNA, 25 nt, Artificial Sequence
  Description of Artificial Sequence: Synthetic oligonucleotide
aaaaagaguacaaugcugauggagg

SEQ ID NO: 15581 - RNA, 25 nt, Artificial Sequence
  Description of Artificial Sequence: Synthetic oligonucleotide
gaaagaugccaauuaaauggauggc

SEQ ID NO: 15582 - RNA, 25 nt, Artificial Sequence
  Description of Artificial Sequence: Synthetic oligonucleotide
cucuggaguguauacauuacaggaa

SEQ ID NO: 15583 - RNA, 25 nt, Artificial Sequence
  Description of Artificial Sequence: Synthetic oligonucleotide
aauucacccaucagagugacguuug

SEQ ID NO: 15584 - RNA, 25 nt, Artificial Sequence
  Description of Artificial Sequence: Synthetic oligonucleotide
ggagcuauggaguuacuauauggga

SEQ ID NO: 15585 - RNA, 25 nt, Artificial Sequence
  Description of Artificial Sequence: Synthetic oligonucleotide
aacugaugaccuuuggaggaaaacc

SEQ ID NO: 15586 - RNA, 25 nt, Artificial Sequence
  Description of Artificial Sequence: Synthetic oligonucleotide
ccuaugauggaauuccaacgcgaga

SEQ ID NO: 15587 - RNA, 25 nt, Artificial Sequence
  Description of Artificial Sequence: Synthetic oligonucleotide
aaaucccugauuuauuagagaaagg

SEQ ID NO: 15588 - RNA, 25 nt, Artificial Sequence
  Description of Artificial Sequence: Synthetic oligonucleotide
gagaacguuugccucagccucccau

SEQ ID NO: 15589 - RNA, 25 nt, Artificial Sequence
  Description of Artificial Sequence: Synthetic oligonucleotide
ucugcacuauugacguuuacauggu

SEQ ID NO: 15590 - RNA, 25 nt, Artificial Sequence
  Description of Artificial Sequence: Synthetic oligonucleotide
ucauggucaaauguuggaugauuga

SEQ ID NO: 15591 - RNA, 25 nt, Artificial Sequence
  Description of Artificial Sequence: Synthetic oligonucleotide
augcugacaguagaccuaaauuuaa

SEQ ID NO: 15592 - RNA, 25 nt, Artificial Sequence
  Description of Artificial Sequence: Synthetic oligonucleotide
aggaacuggcugcugaguuuucaag

SEQ ID NO: 15593 - RNA, 25 nt, Artificial Sequence
  Description of Artificial Sequence: Synthetic oligonucleotide
ggauggcucgagacccucaaagaua

SEQ ID NO: 15594 - RNA, 25 nt, Artificial Sequence
  Description of Artificial Sequence: Synthetic oligonucleotide
accuaguuauucagggugaugaucg

SEQ ID NO: 15595 - RNA, 25 nt, Artificial Sequence
  Description of Artificial Sequence: Synthetic oligonucleotide
guaugaagcuucccaguccaaauga

SEQ ID NO: 15596 - RNA, 25 nt, Artificial Sequence
  Description of Artificial Sequence: Synthetic oligonucleotide
acagcaaguucuuucagaaucucuu

SEQ ID NO: 15597 - RNA, 25 nt, Artificial Sequence
  Description of Artificial Sequence: Synthetic oligonucleotide
uggaugaagaggauuuggaagauau

SEQ ID NO: 15598 - RNA, 25 nt, Artificial Sequence
  Description of Artificial Sequence: Synthetic oligonucleotide
ugauggaugcugaggaguacuuggu

SEQ ID NO: 15599 - RNA, 25 nt, Artificial Sequence
  Description of Artificial Sequence: Synthetic oligonucleotide
ucccucaggcuuucaacaucccacc

SEQ ID NO: 15600 - RNA, 25 nt, Artificial Sequence
  Description of Artificial Sequence: Synthetic oligonucleotide
cucccaucuauacuuccagagcaag

SEQ ID NO: 15601 - RNA, 25 nt, Artificial Sequence
  Description of Artificial Sequence: Synthetic oligonucleotide
gaauugacucgaauaggagugaaau

SEQ ID NO: 15602 - RNA, 25 nt, Artificial Sequence
  Description of Artificial Sequence: Synthetic oligonucleotide
uuggacacagcccuccuccugccua

SEQ ID NO: 15603 - RNA, 25 nt, Artificial Sequence
  Description of Artificial Sequence: Synthetic oligonucleotide
acacccccaugucaggaaaccaguu

SEQ ID NO: 15604 - RNA, 25 nt, Artificial Sequence
  Description of Artificial Sequence: Synthetic oligonucleotide
uuguauaccgagauggagguuuugc

SEQ ID NO: 15605 - RNA, 25 nt, Artificial Sequence
  Description of Artificial Sequence: Synthetic oligonucleotide
cugcugaacaaggagugucugugcc

SEQ ID NO: 15606 - RNA, 25 nt, Artificial Sequence
  Description of Artificial Sequence: Synthetic oligonucleotide
ccuacagagccccaacuagcacaau

SEQ ID NO: 15607 - RNA, 25 nt, Artificial Sequence
  Description of Artificial Sequence: Synthetic oligonucleotide
uuccagaagcuccuguggcacaggg

SEQ ID NO: 15608 - RNA, 25 nt, Artificial Sequence
  Description of Artificial Sequence: Synthetic oligonucleotide
gugcuacugcugagauuuuugauga

SEQ ID NO: 15609 - RNA, 25 nt, Artificial Sequence
  Description of Artificial Sequence: Synthetic oligonucleotide
acuccugcuguaauggcacccuacg

SEQ ID NO: 15610 - RNA, 25 nt, Artificial Sequence
  Description of Artificial Sequence: Synthetic oligonucleotide
gcaagccaguggcaccccaugucca

SEQ ID NO: 15611 - RNA, 25 nt, Artificial Sequence
  Description of Artificial Sequence: Synthetic oligonucleotide
aagaggacaguagcacccagaggua

SEQ ID NO: 15612 - RNA, 25 nt, Artificial Sequence
  Description of Artificial Sequence: Synthetic oligonucleotide
acagugcugaccccaccguguuugc

SEQ ID NO: 15613 - RNA, 25 nt, Artificial Sequence
  Description of Artificial Sequence: Synthetic oligonucleotide
ccccagaacggagcccacgaggaga

SEQ ID NO: 15614 - RNA, 25 nt, Artificial Sequence
  Description of Artificial Sequence: Synthetic oligonucleotide
agcuggaugaggaagguuacaugac

SEQ ID NO: 15615 - RNA, 25 nt, Artificial Sequence
  Description of Artificial Sequence: Synthetic oligonucleotide
cuccuaugcgagacaaacccaaaca

SEQ ID NO: 15616 - RNA, 25 nt, Artificial Sequence
  Description of Artificial Sequence: Synthetic oligonucleotide
aagaauaccugaauccaguggagga

SEQ ID NO: 15617 - RNA, 25 nt, Artificial Sequence
  Description of Artificial Sequence: Synthetic oligonucleotide
agaacccuuuuguuucucggagaaa

SEQ ID NO: 15618 - RNA, 25 nt, Artificial Sequence
  Description of Artificial Sequence: Synthetic oligonucleotide
aaaauggagaccuucaagcauugga

SEQ ID NO: 15619 - RNA, 25 nt, Artificial Sequence
  Description of Artificial Sequence: Synthetic oligonucleotide
auaaucccgaauaucacaaugcauc

SEQ ID NO: 15620 - RNA, 25 nt, Artificial Sequence
  Description of Artificial Sequence: Synthetic oligonucleotide
ccaaugguccacccaaggccgagga

SEQ ID NO: 15621 - RNA, 25 nt, Artificial Sequence
  Description of Artificial Sequence: Synthetic oligonucleotide
augaguaugugaaugagccacugua

SEQ ID NO: 15622 - RNA, 25 nt, Artificial Sequence
  Description of Artificial Sequence: Synthetic oligonucleotide
accucaacaccuuugccaacaccuu

SEQ ID NO: 15623 - RNA, 25 nt, Artificial Sequence
  Description of Artificial Sequence: Synthetic oligonucleotide
ugggaaaagcugaguaccugaagaa

SEQ ID NO: 15624 - RNA, 25 nt, Artificial Sequence
  Description of Artificial Sequence: Synthetic oligonucleotide
acaacauacugucaaugccagagaa

SEQ ID NO: 15625 - RNA, 25 nt, Artificial Sequence
  Description of Artificial Sequence: Synthetic oligonucleotide
aggccaagaaagcguuugacaaccc

SEQ ID NO: 15626 - RNA, 25 nt, Artificial Sequence
  Description of Artificial Sequence: Synthetic oligonucleotide
cugacuacuggaaccacagccugcc

SEQ ID NO: 15627 - RNA, 25 nt, Artificial Sequence
  Description of Artificial Sequence: Synthetic oligonucleotide
caccucggagcacccuucagcaccc

SEQ ID NO: 15628 - RNA, 25 nt, Artificial Sequence
  Description of Artificial Sequence: Synthetic oligonucleotide
cagacuaccugcaggaguacagcac

SEQ ID NO: 15629 - RNA, 25 nt, Artificial Sequence
  Description of Artificial Sequence: Synthetic oligonucleotide
caaaauauuuuuauaaacagaaugg

SEQ ID NO: 15630 - RNA, 25 nt, Artificial Sequence
  Description of Artificial Sequence: Synthetic oligonucleotide
ggcggauccggccuauuguggcaga

SEQ ID NO: 15631 - RNA, 25 nt, Artificial Sequence
  Description of Artificial Sequence: Synthetic oligonucleotide
agaauccugaauaccucucugaguu

SEQ ID NO: 15632 - RNA, 25 nt, Artificial Sequence
  Description of Artificial Sequence: Synthetic oligonucleotide
ucucccugaagccaggcacugugcu

SEQ ID NO: 15633 - RNA, 25 nt, Artificial Sequence
  Description of Artificial Sequence: Synthetic oligonucleotide
ugccgccuccaccuuacagacaccg

SEQ ID NO: 15634 - RNA, 25 nt, Artificial Sequence
  Description of Artificial Sequence: Synthetic oligonucleotide
ggaauacugugguguaagcucaguu

SEQ ID NO: 15635 - RNA, 25 nt, Artificial Sequence
  Description of Artificial Sequence: Synthetic oligonucleotide
ugugguuuuuuagguggagagacac

SEQ ID NO: 15636 - RNA, 25 nt, Artificial Sequence
  Description of Artificial Sequence: Synthetic oligonucleotide
caccugcuccaauuuccccaccccc

SEQ ID NO: 15637 - RNA, 25 nt, Artificial Sequence
  Description of Artificial Sequence: Synthetic oligonucleotide
ccucucuuucucugguggucuuccu

SEQ ID NO: 15638 - RNA, 25 nt, Artificial Sequence
  Description of Artificial Sequence: Synthetic oligonucleotide
uucuaccccaaggccaguaguuuug

SEQ ID NO: 15639 - RNA, 25 nt, Artificial Sequence
  Description of Artificial Sequence: Synthetic oligonucleotide
gacacuucccaguggaagauacaga

SEQ ID NO: 15640 - RNA, 25 nt, Artificial Sequence
  Description of Artificial Sequence: Synthetic oligonucleotide
agaugcaaugauaguuaugugcuua

SEQ ID NO: 15641 - RNA, 25 nt, Artificial Sequence
  Description of Artificial Sequence: Synthetic oligonucleotide
accuaacuugaacauuagagggaaa

SEQ ID NO: 15642 - RNA, 25 nt, Artificial Sequence
  Description of Artificial Sequence: Synthetic oligonucleotide
agacugaaagagaaagauaggagga

SEQ ID NO: 15643 - RNA, 25 nt, Artificial Sequence
  Description of Artificial Sequence: Synthetic oligonucleotide
aaccacaauguuucuucauuucucu

SEQ ID NO: 15644 - RNA, 25 nt, Artificial Sequence
  Description of Artificial Sequence: Synthetic oligonucleotide
ugcauggguuggucaggagaaugaa

SEQ ID NO: 15645 - RNA, 25 nt, Artificial Sequence
  Description of Artificial Sequence: Synthetic oligonucleotide
aacagcuagagaaggaccagaaaau

SEQ ID NO: 15646 - RNA, 25 nt, Artificial Sequence
  Description of Artificial Sequence: Synthetic oligonucleotide
uguaaggcaaugcugccuacuauca

SEQ ID NO: 15647 - RNA, 25 nt, Artificial Sequence
  Description of Artificial Sequence: Synthetic oligonucleotide
aaacuagcugucacuuuuuuucuuu

SEQ ID NO: 15648 - RNA, 25 nt, Artificial Sequence
  Description of Artificial Sequence: Synthetic oligonucleotide
uuucuuuuucuuucuuuguuucuuu

SEQ ID NO: 15649 - RNA, 25 nt, Artificial Sequence
  Description of Artificial Sequence: Synthetic oligonucleotide
uuuuuaaagcagaugguugaaacac

SEQ ID NO: 15650 - RNA, 25 nt, Artificial Sequence
  Description of Artificial Sequence: Synthetic oligonucleotide
cccaugcuaucuguuccuaucugca

SEQ ID NO: 15651 - RNA, 25 nt, Artificial Sequence
  Description of Artificial Sequence: Synthetic oligonucleotide
aggaacugaugugugcauauuuagc

SEQ ID NO: 15652 - RNA, 25 nt, Artificial Sequence
  Description of Artificial Sequence: Synthetic oligonucleotide
caucccuggaaaucauaauaaaguu

SEQ ID NO: 15653 - RNA, 25 nt, Artificial Sequence
  Description of Artificial Sequence: Synthetic oligonucleotide
uuccauuagaacaaaagaauaacau

SEQ ID NO: 15654 - RNA, 25 nt, Artificial Sequence
  Description of Artificial Sequence: Synthetic oligonucleotide
uuuucuauaacauaugauggugucu

SEQ ID NO: 15655 - RNA, 25 nt, Artificial Sequence
  Description of Artificial Sequence: Synthetic oligonucleotide
ugaaauugagaauccaguuucuuuc

SEQ ID NO: 15656 - RNA, 25 nt, Artificial Sequence
  Description of Artificial Sequence: Synthetic oligonucleotide
ccccagcaguuucuguccuagcaag

SEQ ID NO: 15657 - RNA, 25 nt, Artificial Sequence
  Description of Artificial Sequence: Synthetic oligonucleotide
guaagaauggccaacucaacuuuca

SEQ ID NO: 15658 - RNA, 25 nt, Artificial Sequence
  Description of Artificial Sequence: Synthetic oligonucleotide
auaauuuaaaaaucuccauuaaagu

SEQ ID NO: 15659 - RNA, 25 nt, Artificial Sequence
  Description of Artificial Sequence: Synthetic oligonucleotide
uuauaacuaguaauuauguuuucaa

SEQ ID NO: 15660 - RNA, 25 nt, Artificial Sequence
  Description of Artificial Sequence: Synthetic oligonucleotide
acacuuuuugguuuuuuucauuuug

SEQ ID NO: 15661 - RNA, 25 nt, Artificial Sequence
  Description of Artificial Sequence: Synthetic oligonucleotide
guuuugcucugaccgauuccuuuau

SEQ ID NO: 15662 - RNA, 25 nt, Artificial Sequence
  Description of Artificial Sequence: Synthetic oligonucleotide
uauuugcuccccuauuuuuggcuuu

SEQ ID NO: 15663 - RNA, 25 nt, Artificial Sequence
  Description of Artificial Sequence: Synthetic oligonucleotide
uaauuucuaauugcaaagauguuua

SEQ ID NO: 15664 - RNA, 25 nt, Artificial Sequence
  Description of Artificial Sequence: Synthetic oligonucleotide
acaucaaagcuucuucacagaauuu

SEQ ID NO: 15665 - RNA, 25 nt, Artificial Sequence
  Description of Artificial Sequence: Synthetic oligonucleotide
uaagcaagaaauauuuuaauauagu

SEQ ID NO: 15666 - RNA, 25 nt, Artificial Sequence
  Description of Artificial Sequence: Synthetic oligonucleotide
ugaaauggccacuacuuuaaguaua

SEQ ID NO: 15667 - RNA, 25 nt, Artificial Sequence
  Description of Artificial Sequence: Synthetic oligonucleotide
acaaucuuuaaaauaagaaagggag

SEQ ID NO: 15668 - RNA, 25 nt, Artificial Sequence
  Description of Artificial Sequence: Synthetic oligonucleotide
ggcuaauauuuuucaugcuaucaaa

SEQ ID NO: 15669 - RNA, 25 nt, Artificial Sequence
  Description of Artificial Sequence: Synthetic oligonucleotide
auuaucuucacccucauccuuuaca

SEQ ID NO: 15670 - RNA, 25 nt, Artificial Sequence
  Description of Artificial Sequence: Synthetic oligonucleotide
auuuuucaacauuuuuuuuucucca

SEQ ID NO: 15671 - RNA, 25 nt, Artificial Sequence
  Description of Artificial Sequence: Synthetic oligonucleotide
auaaaugacacuacuugauaggccg

SEQ ID NO: 15672 - RNA, 25 nt, Artificial Sequence
  Description of Artificial Sequence: Synthetic oligonucleotide
guugguugucugaagaguagaaggg

SEQ ID NO: 15673 - RNA, 25 nt, Artificial Sequence
  Description of Artificial Sequence: Synthetic oligonucleotide
gaaacuaagagacaguucucugugg

SEQ ID NO: 15674 - RNA, 25 nt, Artificial Sequence
  Description of Artificial Sequence: Synthetic oligonucleotide
guucaggaaaacuacugauacuuuc

SEQ ID NO: 15675 - RNA, 25 nt, Artificial Sequence
  Description of Artificial Sequence: Synthetic oligonucleotide
cagggguggcccaaugagggaaucc

SEQ ID NO: 15676 - RNA, 25 nt, Artificial Sequence
  Description of Artificial Sequence: Synthetic oligonucleotide
cauugaacuggaagaaacacacugg

SEQ ID NO: 15677 - RNA, 25 nt, Artificial Sequence
  Description of Artificial Sequence: Synthetic oligonucleotide
gauuggguaugucuaccuggcagau

SEQ ID NO: 15678 - RNA, 25 nt, Artificial Sequence
  Description of Artificial Sequence: Synthetic oligonucleotide
uacucagaaauguaguuugcacuua

SEQ ID NO: 15679 - RNA, 25 nt, Artificial Sequence
  Description of Artificial Sequence: Synthetic oligonucleotide
aagcuguaauuuuauuuguucuuuu

SEQ ID NO: 15680 - RNA, 25 nt, Artificial Sequence
  Description of Artificial Sequence: Synthetic oligonucleotide
uucugaacuccauuuuggauuuuga

SEQ ID NO: 15681 - RNA, 25 nt, Artificial Sequence
  Description of Artificial Sequence: Synthetic oligonucleotide
aaucaagcaauauggaagcaaccag

SEQ ID NO: 15682 - RNA, 25 nt, Artificial Sequence
  Description of Artificial Sequence: Synthetic oligonucleotide
gcaaauuaacuaauuuaaguacauu

SEQ ID NO: 15683 - RNA, 25 nt, Artificial Sequence
  Description of Artificial Sequence: Synthetic oligonucleotide
uuuuaaaaaaagagcuaagauaaag

SEQ ID NO: 15684 - RNA, 25 nt, Artificial Sequence
  Description of Artificial Sequence: Synthetic oligonucleotide
gacuguggaaaugccaaaccaagca

SEQ ID NO: 15685 - RNA, 25 nt, Artificial Sequence
  Description of Artificial Sequence: Synthetic oligonucleotide
aaauuaggaaccuugcaacgguauc

SEQ ID NO: 15686 - RNA, 25 nt, Artificial Sequence
  Description of Artificial Sequence: Synthetic oligonucleotide
ccagggacuaugaugagaggccagc

SEQ ID NO: 15687 - RNA, 25 nt, Artificial Sequence
  Description of Artificial Sequence: Synthetic oligonucleotide
cacauuaucuucauaugucaccuuu

SEQ ID NO: 15688 - RNA, 25 nt, Artificial Sequence
  Description of Artificial Sequence: Synthetic oligonucleotide
ugcuacgcaaggaaauuuguucagu

SEQ ID NO: 15689 - RNA, 25 nt, Artificial Sequence
  Description of Artificial Sequence: Synthetic oligonucleotide
uucguauacuucguaagaaggaaug

SEQ ID NO: 15690 - RNA, 25 nt, Artificial Sequence
  Description of Artificial Sequence: Synthetic oligonucleotide
gcgaguaaggauuggcuugaauucc

SEQ ID NO: 15691 - RNA, 25 nt, Artificial Sequence
  Description of Artificial Sequence: Synthetic oligonucleotide
cauggaauuucuaguaugagacuau

SEQ ID NO: 15692 - RNA, 25 nt, Artificial Sequence
  Description of Artificial Sequence: Synthetic oligonucleotide
uuuauaugaaguagaagguaacucu

SEQ ID NO: 15693 - RNA, 25 nt, Artificial Sequence
  Description of Artificial Sequence: Synthetic oligonucleotide
uuugcacauaaauugguauaauaaa

SEQ ID NO: 15694 - RNA, 25 nt, Artificial Sequence
  Description of Artificial Sequence: Synthetic oligonucleotide
aaagaaaaacacaaacauucaaagc

SEQ ID NO: 15695 - RNA, 25 nt, Artificial Sequence
  Description of Artificial Sequence: Synthetic oligonucleotide
cuuagggauagguccuugggucaaa

SEQ ID NO: 15696 - RNA, 25 nt, Artificial Sequence
  Description of Artificial Sequence: Synthetic oligonucleotide
aaguuguaaauaaaugugaaacauc

SEQ ID NO: 15697 - RNA, 25 nt, Artificial Sequence
  Description of Artificial Sequence: Synthetic oligonucleotide
cuucucaugcaauuauuuuauuauc

SEQ ID NO: 15698 - RNA, 25 nt, Artificial Sequence
  Description of Artificial Sequence: Synthetic oligonucleotide
ccaacacacuaaucuuuugauacuu

SEQ ID NO: 15699 - RNA, 25 nt, Artificial Sequence
  Description of Artificial Sequence: Synthetic oligonucleotide
uuauauaauucccuuucuucauaua

SEQ ID NO: 15700 - RNA, 25 nt, Artificial Sequence
  Description of Artificial Sequence: Synthetic oligonucleotide
acugcauccaguacuagaaccauca

SEQ ID NO: 15701 - RNA, 25 nt, Artificial Sequence
  Description of Artificial Sequence: Synthetic oligonucleotide
auuauuauguaucauuuugaaagaa

SEQ ID NO: 15702 - RNA, 25 nt, Artificial Sequence
  Description of Artificial Sequence: Synthetic oligonucleotide
auaccugaugagaugaaggaugaga

SEQ ID NO: 15703 - RNA, 25 nt, Artificial Sequence
  Description of Artificial Sequence: Synthetic oligonucleotide
aacaaaugacagagaugagucucca

SEQ ID NO: 15704 - RNA, 25 nt, Artificial Sequence
  Description of Artificial Sequence: Synthetic oligonucleotide
aaguaaagggggccucacaucaaua

SEQ ID NO: 15705 - RNA, 25 nt, Artificial Sequence
  Description of Artificial Sequence: Synthetic oligonucleotide
aauuaggaaacuuagauauaagucg

SEQ ID NO: 15706 - RNA, 25 nt, Artificial Sequence
  Description of Artificial Sequence: Synthetic oligonucleotide
gcccuuuucugaaaauucuacccca

SEQ ID NO: 15707 - RNA, 25 nt, Artificial Sequence
  Description of Artificial Sequence: Synthetic oligonucleotide
aagucauuuagauuuuuaaaaaaua

SEQ ID NO: 15708 - RNA, 25 nt, Artificial Sequence
  Description of Artificial Sequence: Synthetic oligonucleotide
auuucuaauguuaaaauauugggac

SEQ ID NO: 15709 - RNA, 25 nt, Artificial Sequence
  Description of Artificial Sequence: Synthetic oligonucleotide
ccaaauuagaaucaauaguauaaga

SEQ ID NO: 15710 - RNA, 25 nt, Artificial Sequence
  Description of Artificial Sequence: Synthetic oligonucleotide
auuaauuaauuagaguaaaaauauc

SEQ ID NO: 15711 - RNA, 25 nt, Artificial Sequence
  Description of Artificial Sequence: Synthetic oligonucleotide
cuauuaaggcagagaaaguuuagag

SEQ ID NO: 15712 - RNA, 25 nt, Artificial Sequence
  Description of Artificial Sequence: Synthetic oligonucleotide
gaaaaaaauccaaagaaauuugugu

SEQ ID NO: 15713 - RNA, 25 nt, Artificial Sequence
  Description of Artificial Sequence: Synthetic oligonucleotide
uuucuuccuauucugaacaaguaaa

SEQ ID NO: 15714 - RNA, 25 nt, Artificial Sequence
  Description of Artificial Sequence: Synthetic oligonucleotide
auccauccauccauccauccaaacc

SEQ ID NO: 15715 - RNA, 25 nt, Artificial Sequence
  Description of Artificial Sequence: Synthetic oligonucleotide
cuccuuuaucuaacugugucuacua

SEQ ID NO: 15716 - RNA, 25 nt, Artificial Sequence
  Description of Artificial Sequence: Synthetic oligonucleotide
aaaagcaccauguuuuguggggaac

SEQ ID NO: 15717 - RNA, 25 nt, Artificial Sequence
  Description of Artificial Sequence: Synthetic oligonucleotide
cacucagauaaauggaauaucaucc

SEQ ID NO: 15718 - RNA, 25 nt, Artificial Sequence
  Description of Artificial Sequence: Synthetic oligonucleotide
cucaacuucaaaauucuaugaucua

SEQ ID NO: 15719 - RNA, 25 nt, Artificial Sequence
  Description of Artificial Sequence: Synthetic oligonucleotide
aggagauuuaauuaaaaugacauuu

SEQ ID NO: 15720 - RNA, 25 nt, Artificial Sequence
  Description of Artificial Sequence: Synthetic oligonucleotide
uuaauuuuucuaugcguuccaacaa

SEQ ID NO: 15721 - RNA, 25 nt, Artificial Sequence
  Description of Artificial Sequence: Synthetic oligonucleotide
aucagauugcauagucucuuuugug

SEQ ID NO: 15722 - RNA, 25 nt, Artificial Sequence
  Description of Artificial Sequence: Synthetic oligonucleotide
gaauagcugucauauaaucaguugu

SEQ ID NO: 15723 - RNA, 25 nt, Artificial Sequence
  Description of Artificial Sequence: Synthetic oligonucleotide
uacuguaagauaucuccuuuaaacu

SEQ ID NO: 15724 - RNA, 25 nt, Artificial Sequence
  Description of Artificial Sequence: Synthetic oligonucleotide
ucauuugggauauaaguuaaacauc

SEQ ID NO: 15725 - RNA, 25 nt, Artificial Sequence
  Description of Artificial Sequence: Synthetic oligonucleotide
ccuucaaauuguugauguugacaaa

SEQ ID NO: 15726 - RNA, 25 nt, Artificial Sequence
  Description of Artificial Sequence: Synthetic oligonucleotide
acaggauaauuucaauaauauuauu

SEQ ID NO: 15727 - RNA, 25 nt, Artificial Sequence
  Description of Artificial Sequence: Synthetic oligonucleotide
ucaaacauaaacuggucuaggagaa

SEQ ID NO: 15728 - RNA, 25 nt, Artificial Sequence
  Description of Artificial Sequence: Synthetic oligonucleotide
auauugcaucacugacuaauuagcc

SEQ ID NO: 15729 - RNA, 25 nt, Artificial Sequence
  Description of Artificial Sequence: Synthetic oligonucleotide
cuaucuagagucuaacuucaccauu

SEQ ID NO: 15730 - RNA, 25 nt, Artificial Sequence
  Description of Artificial Sequence: Synthetic oligonucleotide
uaaaccaaaagcagauggugguccu

SEQ ID NO: 15731 - RNA, 25 nt, Artificial Sequence
  Description of Artificial Sequence: Synthetic oligonucleotide
uuggccaagaauauuggagacauug

SEQ ID NO: 15732 - RNA, 25 nt, Artificial Sequence
  Description of Artificial Sequence: Synthetic oligonucleotide
ggaguugguuuuuuucuaagcuaua

SEQ ID NO: 15733 - RNA, 25 nt, Artificial Sequence
  Description of Artificial Sequence: Synthetic oligonucleotide
aagaagugaggcgagcugaaaaagu

SEQ ID NO: 15734 - RNA, 25 nt, Artificial Sequence
  Description of Artificial Sequence: Synthetic oligonucleotide
uaugguagagcaggagaaggguuug

SEQ ID NO: 15735 - RNA, 25 nt, Artificial Sequence
  Description of Artificial Sequence: Synthetic oligonucleotide
gugagauuccuucuagugaaguuca

SEQ ID NO: 15736 - RNA, 25 nt, Artificial Sequence
  Description of Artificial Sequence: Synthetic oligonucleotide
acccucaaacuuuucagggguaaag

SEQ ID NO: 15737 - RNA, 25 nt, Artificial Sequence
  Description of Artificial Sequence: Synthetic oligonucleotide
gacacagagugauucaggggccaca

SEQ ID NO: 15738 - RNA, 25 nt, Artificial Sequence
  Description of Artificial Sequence: Synthetic oligonucleotide
aaucuaauagcucagggcucuccua

SEQ ID NO: 15739 - RNA, 25 nt, Artificial Sequence
  Description of Artificial Sequence: Synthetic oligonucleotide
auccauucagagaagucucuaggaa

SEQ ID NO: 15740 - RNA, 25 nt, Artificial Sequence
  Description of Artificial Sequence: Synthetic oligonucleotide
aaagggaucucauaucaguacuuau

SEQ ID NO: 15741 - RNA, 25 nt, Artificial Sequence
  Description of Artificial Sequence: Synthetic oligonucleotide
ugaaaaauugaauauaagccucccu

SEQ ID NO: 15742 - RNA, 25 nt, Artificial Sequence
  Description of Artificial Sequence: Synthetic oligonucleotide
uuucuaaauaaaucugcaucgaguc

SEQ ID NO: 15743 - RNA, 25 nt, Artificial Sequence
  Description of Artificial Sequence: Synthetic oligonucleotide
caucacagcccucuuuuuggauacu

SEQ ID NO: 15744 - RNA, 25 nt, Artificial Sequence
  Description of Artificial Sequence: Synthetic oligonucleotide
uuuacaauaugcauaugguuucuac

SEQ ID NO: 15745 - RNA, 25 nt, Artificial Sequence
  Description of Artificial Sequence: Synthetic oligonucleotide
cugggcuauagaaagcagaaucacu

SEQ ID NO: 15746 - RNA, 25 nt, Artificial Sequence
  Description of Artificial Sequence: Synthetic oligonucleotide
ucauuuuggagaaggaaaaaaugaa

SEQ ID NO: 15747 - RNA, 25 nt, Artificial Sequence
  Description of Artificial Sequence: Synthetic oligonucleotide
auaguuaaaacaaacuuuuaacugu

SEQ ID NO: 15748 - RNA, 25 nt, Artificial Sequence
  Description of Artificial Sequence: Synthetic oligonucleotide
uuaagguaacagaaauguauuuagu

SEQ ID NO: 15749 - RNA, 25 nt, Artificial Sequence
  Description of Artificial Sequence: Synthetic oligonucleotide
ugaaugucucuuuccuccuaagaac

SEQ ID NO: 15750 - RNA, 25 nt, Artificial Sequence
  Description of Artificial Sequence: Synthetic oligonucleotide
cacaagacuucuacauguuggguaa

SEQ ID NO: 15751 - RNA, 25 nt, Artificial Sequence
  Description of Artificial Sequence: Synthetic oligonucleotide
auaccuagagaugcauguaggaaua

SEQ ID NO: 15752 - RNA, 25 nt, Artificial Sequence
  Description of Artificial Sequence: Synthetic oligonucleotide
aauccaaaaugacccaaaugcuuua

SEQ ID NO: 15753 - RNA, 25 nt, Artificial Sequence
  Description of Artificial Sequence: Synthetic oligonucleotide
auaauagcaccacuuuauaauucuu

SEQ ID NO: 15754 - RNA, 25 nt, Artificial Sequence
  Description of Artificial Sequence: Synthetic oligonucleotide
uuugaaugauuucuguaguauauaa

SEQ ID NO: 15755 - RNA, 25 nt, Artificial Sequence
  Description of Artificial Sequence: Synthetic oligonucleotide
auugacuucaguuguuugaguguuu

SEQ ID NO: 15756 - RNA, 25 nt, Artificial Sequence
  Description of Artificial Sequence: Synthetic oligonucleotide
uuuuguuuuauuuuuguccccccug

SEQ ID NO: 15757 - RNA, 25 nt, Artificial Sequence
  Description of Artificial Sequence: Synthetic oligonucleotide
gggaaaacauauuucagcauguaua

SEQ ID NO: 15758 - RNA, 25 nt, Artificial Sequence
  Description of Artificial Sequence: Synthetic oligonucleotide
aagagggagaaaaaaaguuucauuc

SEQ ID NO: 15759 - RNA, 25 nt, Artificial Sequence
  Description of Artificial Sequence: Synthetic oligonucleotide
ccuuccagagaauaacuuauuuagu

SEQ ID NO: 15760 - RNA, 25 nt, Artificial Sequence
  Description of Artificial Sequence: Synthetic oligonucleotide
uccaguaggguagaauuuuaaaaug

SEQ ID NO: 15761 - RNA, 25 nt, Artificial Sequence
  Description of Artificial Sequence: Synthetic oligonucleotide
gucaguuaaagucuucaaagugcuu

SEQ ID NO: 15762 - RNA, 25 nt, Artificial Sequence
  Description of Artificial Sequence: Synthetic oligonucleotide
uggggggauaucagauuccagaggc

SEQ ID NO: 15763 - RNA, 25 nt, Artificial Sequence
  Description of Artificial Sequence: Synthetic oligonucleotide
ccaauuguagcaauugaaauuugca

SEQ ID NO: 15764 - RNA, 25 nt, Artificial Sequence
  Description of Artificial Sequence: Synthetic oligonucleotide
agaaucaauuauguaaaucugagac

SEQ ID NO: 15765 - RNA, 25 nt, Artificial Sequence
  Description of Artificial Sequence: Synthetic oligonucleotide
caaauuaguauuaaaauuacacgga

SEQ ID NO: 15766 - RNA, 25 nt, Artificial Sequence
  Description of Artificial Sequence: Synthetic oligonucleotide
aguauauuuuuuaaaucacccaacu

SEQ ID NO: 15767 - RNA, 25 nt, Artificial Sequence
  Description of Artificial Sequence: Synthetic oligonucleotide
uuuguagauuauaccuauuuugggc

SEQ ID NO: 15768 - RNA, 25 nt, Artificial Sequence
  Description of Artificial Sequence: Synthetic oligonucleotide
cagguauggaaaaauuuugcaguua

SEQ ID NO: 15769 - RNA, 25 nt, Artificial Sequence
  Description of Artificial Sequence: Synthetic oligonucleotide
aaaugauugccuaaagaaaguggua

SEQ ID NO: 15770 - RNA, 25 nt, Artificial Sequence
  Description of Artificial Sequence: Synthetic oligonucleotide
aaacaggugaggaaagauggccucu

SEQ ID NO: 15771 - RNA, 25 nt, Artificial Sequence
  Description of Artificial Sequence: Synthetic oligonucleotide
ugaucuaggauagauccagaaccac

SEQ ID NO: 15772 - RNA, 25 nt, Artificial Sequence
  Description of Artificial Sequence: Synthetic oligonucleotide
caaagcaucugcaccacaaaaggug

SEQ ID NO: 15773 - RNA, 25 nt, Artificial Sequence
  Description of Artificial Sequence: Synthetic oligonucleotide
guuagacuaccaagcagcuccuggu

SEQ ID NO: 15774 - RNA, 25 nt, Artificial Sequence
  Description of Artificial Sequence: Synthetic oligonucleotide
uuuucugcauaguauuaguagcaca

SEQ ID NO: 15775 - RNA, 25 nt, Artificial Sequence
  Description of Artificial Sequence: Synthetic oligonucleotide
agcuuaggaugagaauccuuucucc

SEQ ID NO: 15776 - RNA, 25 nt, Artificial Sequence
  Description of Artificial Sequence: Synthetic oligonucleotide
caguaacauucuuaaaauagcauga

SEQ ID NO: 15777 - RNA, 25 nt, Artificial Sequence
  Description of Artificial Sequence: Synthetic oligonucleotide
aaaaacaacgcaaaacucaaauuuc

SEQ ID NO: 15778 - RNA, 25 nt, Artificial Sequence
  Description of Artificial Sequence: Synthetic oligonucleotide
cuauuaaaacacacaaacuaaaauc

SEQ ID NO: 15779 - RNA, 25 nt, Artificial Sequence
  Description of Artificial Sequence: Synthetic oligonucleotide
caagugauucuuuuuuguagauuag

SEQ ID NO: 15780 - RNA, 25 nt, Artificial Sequence
  Description of Artificial Sequence: Synthetic oligonucleotide
gggagaaggacugaauaucuaauuu

SEQ ID NO: 15781 - RNA, 25 nt, Artificial Sequence
  Description of Artificial Sequence: Synthetic oligonucleotide
uaagagaaggaauaguguuuaagug

SEQ ID NO: 15782 - RNA, 25 nt, Artificial Sequence
  Description of Artificial Sequence: Synthetic oligonucleotide
guuauagugugugagcuaauaccuu

SEQ ID NO: 15783 - RNA, 25 nt, Artificial Sequence
  Description of Artificial Sequence: Synthetic oligonucleotide
ucuaaaggaaagacauggcaugaag

SEQ ID NO: 15784 - RNA, 25 nt, Artificial Sequence
  Description of Artificial Sequence: Synthetic oligonucleotide
gauugugcauacuuacaaugcuaag

SEQ ID NO: 15785 - RNA, 25 nt, Artificial Sequence
  Description of Artificial Sequence: Synthetic oligonucleotide
ggaaaaaucaagaaaaggacugugu

SEQ ID NO: 15786 - RNA, 25 nt, Artificial Sequence
  Description of Artificial Sequence: Synthetic oligonucleotide
ugaggcucugcuacuagaugaaguu

SEQ ID NO: 15787 - RNA, 25 nt, Artificial Sequence
  Description of Artificial Sequence: Synthetic oligonucleotide
uggaaggacuauuaaugugcuucuu

SEQ ID NO: 15788 - RNA, 25 nt, Artificial Sequence
  Description of Artificial Sequence: Synthetic oligonucleotide
ugaaguaucaaaaaugaaaagaaaa

SEQ ID NO: 15789 - RNA, 25 nt, Artificial Sequence
  Description of Artificial Sequence: Synthetic oligonucleotide
auuaaaauuguuuaagccugacagg

SEQ ID NO: 15790 - RNA, 25 nt, Artificial Sequence
  Description of Artificial Sequence: Synthetic oligonucleotide
ggaaggauguaaauacaaguuuuuc

SEQ ID NO: 15791 - RNA, 25 nt, Artificial Sequence
  Description of Artificial Sequence: Synthetic oligonucleotide
cuagagcucucuaaccuuuauuuca

SEQ ID NO: 15792 - RNA, 25 nt, Artificial Sequence
  Description of Artificial Sequence: Synthetic oligonucleotide
aaaacuggaauuauucauccaucug

SEQ ID NO: 15793 - RNA, 25 nt, Artificial Sequence
  Description of Artificial Sequence: Synthetic oligonucleotide
guaauuguugauaauuuaacuagua

SEQ ID NO: 15794 - RNA, 25 nt, Artificial Sequence
  Description of Artificial Sequence: Synthetic oligonucleotide
auauguaguucauaagguaauagaa

SEQ ID NO: 15795 - RNA, 25 nt, Artificial Sequence
  Description of Artificial Sequence: Synthetic oligonucleotide
aaaggugaucaugaaagcauguaua

SEQ ID NO: 15796 - RNA, 25 nt, Artificial Sequence
  Description of Artificial Sequence: Synthetic oligonucleotide
auaacuggacagaaccacgauaaug

SEQ ID NO: 15797 - RNA, 25 nt, Artificial Sequence
  Description of Artificial Sequence: Synthetic oligonucleotide
gcuauaagauguagauuuaguuagg

SEQ ID NO: 15798 - RNA, 25 nt, Artificial Sequence
  Description of Artificial Sequence: Synthetic oligonucleotide
guuaucagauguuaaaugauuuuaa

SEQ ID NO: 15799 - RNA, 25 nt, Artificial Sequence
  Description of Artificial Sequence: Synthetic oligonucleotide
auauuauuaaauaaaucaaacuaga

SEQ ID NO: 15800 - RNA, 25 nt, Artificial Sequence
  Description of Artificial Sequence: Synthetic oligonucleotide
aaaacuaaccacaaguauaauguaa

SEQ ID NO: 15801 - RNA, 25 nt, Artificial Sequence
  Description of Artificial Sequence: Synthetic oligonucleotide
acaaaguuaaaugcaggauauaaaa

SEQ ID NO: 15802 - RNA, 25 nt, Artificial Sequence
  Description of Artificial Sequence: Synthetic oligonucleotide
aauguaggauggauuuugcauagua

SEQ ID NO: 15803 - RNA, 25 nt, Artificial Sequence
  Description of Artificial Sequence: Synthetic oligonucleotide
aaaaagauaaguuugccauuuaaaa

SEQ ID NO: 15804 - RNA, 25 nt, Artificial Sequence
  Description of Artificial Sequence: Synthetic oligonucleotide
auuguuguuuguuggguuuagcuga

SEQ ID NO: 15805 - RNA, 25 nt, Artificial Sequence
  Description of Artificial Sequence: Synthetic oligonucleotide
aaaguaggcauauaugguuccacuu

SEQ ID NO: 15806 - RNA, 25 nt, Artificial Sequence
  Description of Artificial Sequence: Synthetic oligonucleotide
ugggaaaacuugcuuuaaagcauua

SEQ ID NO: 15807 - RNA, 25 nt, Artificial Sequence
  Description of Artificial Sequence: Synthetic oligonucleotide
acaaugaacaauuuuuucucauucu

SEQ ID NO: 15808 - RNA, 25 nt, Artificial Sequence
  Description of Artificial Sequence: Synthetic oligonucleotide
ucuuauuccuuuaucacuuuuuaaa

SEQ ID NO: 15809 - RNA, 25 nt, Artificial Sequence
  Description of Artificial Sequence: Synthetic oligonucleotide
auguaaagaaaauuguauuuauuua

SEQ ID NO: 15810 - RNA, 25 nt, Artificial Sequence
  Description of Artificial Sequence: Synthetic oligonucleotide
auuuuuuuaaauaaacaccaccuug

SEQ ID NO: 15811 - RNA, 25 nt, Artificial Sequence
  Description of Artificial Sequence: Synthetic oligonucleotide
gcagaauuuaauaggcaaacauguu

SEQ ID NO: 15812 - RNA, 25 nt, Artificial Sequence
  Description of Artificial Sequence: Synthetic oligonucleotide
uacauaugacuaaguaagggucuuc

SEQ ID NO: 15813 - RNA, 25 nt, Artificial Sequence
  Description of Artificial Sequence: Synthetic oligonucleotide
caagaugaaguaaagaaaauguaaa

SEQ ID NO: 15814 - RNA, 25 nt, Artificial Sequence
  Description of Artificial Sequence: Synthetic oligonucleotide
auguucuauuaccuuaugcagagac

SEQ ID NO: 15815 - RNA, 25 nt, Artificial Sequence
  Description of Artificial Sequence: Synthetic oligonucleotide
uuuagcuagcaaacaaacaaaauac

SEQ ID NO: 15816 - RNA, 25 nt, Artificial Sequence
  Description of Artificial Sequence: Synthetic oligonucleotide
caguuaauuggugauauguccuuuc

SEQ ID NO: 15817 - RNA, 25 nt, Artificial Sequence
  Description of Artificial Sequence: Synthetic oligonucleotide
cuuuucucacuaugcccucuugccu

SEQ ID NO: 15818 - RNA, 25 nt, Artificial Sequence
  Description of Artificial Sequence: Synthetic oligonucleotide
uccaaaaaugacaacaaagaaucac

SEQ ID NO: 15819 - RNA, 25 nt, Artificial Sequence
  Description of Artificial Sequence: Synthetic oligonucleotide
caauuuuucugauaaauaaaugcua

SEQ ID NO: 15820 - RNA, 25 nt, Artificial Sequence
  Description of Artificial Sequence: Synthetic oligonucleotide
aaaccaagcguuucaaacuauugca

SEQ ID NO: 15821 - RNA, 25 nt, Artificial Sequence
  Description of Artificial Sequence: Synthetic oligonucleotide
auugccauucuuuuggacuuuaguu

SEQ ID NO: 15822 - RNA, 25 nt, Artificial Sequence
  Description of Artificial Sequence: Synthetic oligonucleotide
uauuagaaugaugauuguuauaggg

SEQ ID NO: 15823 - RNA, 25 nt, Artificial Sequence
  Description of Artificial Sequence: Synthetic oligonucleotide
gcaaaugagaaauccaugugcauca

SEQ ID NO: 15824 - RNA, 25 nt, Artificial Sequence
  Description of Artificial Sequence: Synthetic oligonucleotide
agcuucuaguuguuaaaaaaaccag

SEQ ID NO: 15825 - RNA, 25 nt, Artificial Sequence
  Description of Artificial Sequence: Synthetic oligonucleotide
gauaaauuaacuucuacuguauacu

SEQ ID NO: 15826 - RNA, 25 nt, Artificial Sequence
  Description of Artificial Sequence: Synthetic oligonucleotide
ugugggcagaggauccuagagcuga

SEQ ID NO: 15827 - RNA, 25 nt, Artificial Sequence
  Description of Artificial Sequence: Synthetic oligonucleotide
auccuacaacaucagcuucuaguug

SEQ ID NO: 15828 - RNA, 25 nt, Artificial Sequence
  Description of Artificial Sequence: Synthetic oligonucleotide
uaaauuaacuucuacuguauauacu

SEQ ID NO: 15829 - RNA, 25 nt, Artificial Sequence
  Description of Artificial Sequence: Synthetic oligonucleotide
ugugggcagaggaucuuacugugcc

SEQ ID NO: 15830 - RNA, 25 nt, Artificial Sequence
  Description of Artificial Sequence: Synthetic oligonucleotide
cucuguuuguguacauggacuucgg

SEQ ID NO: 15831 - RNA, 25 nt, Artificial Sequence
  Description of Artificial Sequence: Synthetic oligonucleotide
guguguaucaguuugaaggacagcc

SEQ ID NO: 15832 - RNA, 25 nt, Artificial Sequence
  Description of Artificial Sequence: Synthetic oligonucleotide
cuugccccauguaaacauauaaaug

SEQ ID NO: 15833 - RNA, 25 nt, Artificial Sequence
  Description of Artificial Sequence: Synthetic oligonucleotide
gcagauugguaucgccugguugcua

SEQ ID NO: 15834 - RNA, 25 nt, Artificial Sequence
  Description of Artificial Sequence: Synthetic oligonucleotide
auuugcuuaagaacaaauauuauac

SEQ ID NO: 15835 - RNA, 25 nt, Artificial Sequence
  Description of Artificial Sequence: Synthetic oligonucleotide
cagaugagaucaggcauaauuuuaa

SEQ ID NO: 15836 - RNA, 25 nt, Artificial Sequence
  Description of Artificial Sequence: Synthetic oligonucleotide
aaagaucauuaucaguggagaccuc

SEQ ID NO: 15837 - RNA, 25 nt, Artificial Sequence
  Description of Artificial Sequence: Synthetic oligonucleotide
cauuauuacugauauuacaaugggg

SEQ ID NO: 15838 - RNA, 25 nt, Artificial Sequence
  Description of Artificial Sequence: Synthetic oligonucleotide
gccaguuuuuauacuucuggguaga

SEQ ID NO: 15839 - RNA, 25 nt, Artificial Sequence
  Description of Artificial Sequence: Synthetic oligonucleotide
aauuaauaaaauuuuucugauccca

SEQ ID NO: 15840 - RNA, 25 nt, Artificial Sequence
  Description of Artificial Sequence: Synthetic oligonucleotide
agagaucugaguucucucugcaguu

SEQ ID NO: 15841 - RNA, 25 nt, Artificial Sequence
  Description of Artificial Sequence: Synthetic oligonucleotide
uggaaacaagaagcuguugugggca

SEQ ID NO: 15842 - RNA, 25 nt, Artificial Sequence
  Description of Artificial Sequence: Synthetic oligonucleotide
auugugucgggccaggggcccuugu

SEQ ID NO: 15843 - RNA, 25 nt, Artificial Sequence
  Description of Artificial Sequence: Synthetic oligonucleotide
uguuugugugggcaaauaucuuuua

SEQ ID NO: 15844 - RNA, 25 nt, Artificial Sequence
  Description of Artificial Sequence: Synthetic oligonucleotide
agcagugugagcugcuuuuuucuuu

SEQ ID NO: 15845 - RNA, 25 nt, Artificial Sequence
  Description of Artificial Sequence: Synthetic oligonucleotide
uucauuaaaagucucucuaaaauaa

SEQ ID NO: 15846 - RNA, 25 nt, Artificial Sequence
  Description of Artificial Sequence: Synthetic oligonucleotide
auagaaauuucagauacucgguuca

SEQ ID NO: 15847 - RNA, 25 nt, Artificial Sequence
  Description of Artificial Sequence: Synthetic oligonucleotide
aagucucacugauuuuguagagguc

SEQ ID NO: 15848 - RNA, 25 nt, Artificial Sequence
  Description of Artificial Sequence: Synthetic oligonucleotide
ccaaaaauguaggaucugucacuuu

SEQ ID NO: 15849 - RNA, 25 nt, Artificial Sequence
  Description of Artificial Sequence: Synthetic oligonucleotide
uugcaggccccugccucaccuaauu

SEQ ID NO: 15850 - RNA, 25 nt, Artificial Sequence
  Description of Artificial Sequence: Synthetic oligonucleotide
uccuggccaggugacauuuugggca

SEQ ID NO: 15851 - RNA, 25 nt, Artificial Sequence
  Description of Artificial Sequence: Synthetic oligonucleotide
agaaguaaaugcuucuauagucaca

SEQ ID NO: 15852 - RNA, 25 nt, Artificial Sequence
  Description of Artificial Sequence: Synthetic oligonucleotide
aagcuaaaaugacucuaagccccaa

SEQ ID NO: 15853 - RNA, 25 nt, Artificial Sequence
  Description of Artificial Sequence: Synthetic oligonucleotide
auuucacgggggguauucacaugcu

SEQ ID NO: 15854 - RNA, 25 nt, Artificial Sequence
  Description of Artificial Sequence: Synthetic oligonucleotide
uuccucuggaaaauacucuuugaca

SEQ ID NO: 15855 - RNA, 25 nt, Artificial Sequence
  Description of Artificial Sequence: Synthetic oligonucleotide
agucagcuuugcaaguaagugauua

SEQ ID NO: 15856 - RNA, 25 nt, Artificial Sequence
  Description of Artificial Sequence: Synthetic oligonucleotide
accuuguuaggaaucaaagaaaaau

SEQ ID NO: 15857 - RNA, 25 nt, Artificial Sequence
  Description of Artificial Sequence: Synthetic oligonucleotide
uguauuucucucugaccuuuagagg

SEQ ID NO: 15858 - RNA, 25 nt, Artificial Sequence
  Description of Artificial Sequence: Synthetic oligonucleotide
gaaaauagaauccuucccuuuuuug

SEQ ID NO: 15859 - RNA, 25 nt, Artificial Sequence
  Description of Artificial Sequence: Synthetic oligonucleotide
gcccauugacacaacuggcacugcu

SEQ ID NO: 15860 - RNA, 25 nt, Artificial Sequence
  Description of Artificial Sequence: Synthetic oligonucleotide
ucucuucccuuucuaccacccuggu

SEQ ID NO: 15861 - RNA, 25 nt, Artificial Sequence
  Description of Artificial Sequence: Synthetic oligonucleotide
uucaaaguagucccccgaugcuguc

SEQ ID NO: 15862 - RNA, 25 nt, Artificial Sequence
  Description of Artificial Sequence: Synthetic oligonucleotide
ccuguuccuuucuuaagccauagug

SEQ ID NO: 15863 - RNA, 25 nt, Artificial Sequence
  Description of Artificial Sequence: Synthetic oligonucleotide
ggaucucugagauccuacaccccac

SEQ ID NO: 15864 - RNA, 25 nt, Artificial Sequence
  Description of Artificial Sequence: Synthetic oligonucleotide
cuuugugaaacacugacuucaucuu

SEQ ID NO: 15865 - RNA, 25 nt, Artificial Sequence
  Description of Artificial Sequence: Synthetic oligonucleotide
uugcccucgaaugccugauuuuuuc

SEQ ID NO: 15866 - RNA, 25 nt, Artificial Sequence
  Description of Artificial Sequence: Synthetic oligonucleotide
cauaagagauucuagcaauuuggac

SEQ ID NO: 15867 - RNA, 25 nt, Artificial Sequence
  Description of Artificial Sequence: Synthetic oligonucleotide
cacuguuuaagugaacuaucaaacu

SEQ ID NO: 15868 - RNA, 25 nt, Artificial Sequence
  Description of Artificial Sequence: Synthetic oligonucleotide
uaccgcauagagaauauuuaagcua

SEQ ID NO: 15869 - RNA, 25 nt, Artificial Sequence
  Description of Artificial Sequence: Synthetic oligonucleotide
auuaaaauuaugguuucccaugaag

SEQ ID NO: 15870 - RNA, 25 nt, Artificial Sequence
  Description of Artificial Sequence: Synthetic oligonucleotide
gaucaauucucuguguccuucccua

SEQ ID NO: 15871 - RNA, 25 nt, Artificial Sequence
  Description of Artificial Sequence: Synthetic oligonucleotide
auaggaauuugagacgaguuagccc

SEQ ID NO: 15872 - RNA, 25 nt, Artificial Sequence
  Description of Artificial Sequence: Synthetic oligonucleotide
cugugaugaaucuugaaacucacau

SEQ ID NO: 15873 - RNA, 25 nt, Artificial Sequence
  Description of Artificial Sequence: Synthetic oligonucleotide
uauguccacauacacuugguagaac

SEQ ID NO: 15874 - RNA, 25 nt, Artificial Sequence
  Description of Artificial Sequence: Synthetic oligonucleotide
cuucgauuuaaucuuuacauaaaag

SEQ ID NO: 15875 - RNA, 25 nt, Artificial Sequence
  Description of Artificial Sequence: Synthetic oligonucleotide
gcuguacauauaaccaagaaguuau

SEQ ID NO: 15876 - RNA, 25 nt, Artificial Sequence
  Description of Artificial Sequence: Synthetic oligonucleotide
uuuuugccaguaaauuaacuuauuu

SEQ ID NO: 15877 - RNA, 25 nt, Artificial Sequence
  Description of Artificial Sequence: Synthetic oligonucleotide
ugcuuuauucaucuuauuugguucc

SEQ ID NO: 15878 - RNA, 25 nt, Artificial Sequence
  Description of Artificial Sequence: Synthetic oligonucleotide
cuaaucguaaauauuuuguagcugc

SEQ ID NO: 15879 - RNA, 25 nt, Artificial Sequence
  Description of Artificial Sequence: Synthetic oligonucleotide
cuguaaauuuuuuucucccaaauga

SEQ ID NO: 15880 - RNA, 25 nt, Artificial Sequence
  Description of Artificial Sequence: Synthetic oligonucleotide
aggagucuuauuaucauaaagguaa

SEQ ID NO: 15881 - RNA, 25 nt, Artificial Sequence
  Description of Artificial Sequence: Synthetic oligonucleotide
aaggcuauucagcuuugauaaccac

SEQ ID NO: 15882 - RNA, 25 nt, Artificial Sequence
  Description of Artificial Sequence: Synthetic oligonucleotide
ccugcaauucuuuuuuggaucauuc

SEQ ID NO: 15883 - RNA, 25 nt, Artificial Sequence
  Description of Artificial Sequence: Synthetic oligonucleotide
cauccaucuaacaaauacauaauga

SEQ ID NO: 15884 - RNA, 25 nt, Artificial Sequence
  Description of Artificial Sequence: Synthetic oligonucleotide
aggacaguucauguuaaugaaaauc

SEQ ID NO: 15885 - RNA, 25 nt, Artificial Sequence
  Description of Artificial Sequence: Synthetic oligonucleotide
ccauguuguuuaauagaaugccauc

SEQ ID NO: 15886 - RNA, 25 nt, Artificial Sequence
  Description of Artificial Sequence: Synthetic oligonucleotide
ccuuuaccuacuuuugcucuuuaug

SEQ ID NO: 15887 - RNA, 25 nt, Artificial Sequence
  Description of Artificial Sequence: Synthetic oligonucleotide
ggacguuuuucuuuucaugcucuag

SEQ ID NO: 15888 - RNA, 25 nt, Artificial Sequence
  Description of Artificial Sequence: Synthetic oligonucleotide
gugagcuuucccuauaucaugagaa

SEQ ID NO: 15889 - RNA, 25 nt, Artificial Sequence
  Description of Artificial Sequence: Synthetic oligonucleotide
agugguuauauuugugcaaauauac

SEQ ID NO: 15890 - RNA, 25 nt, Artificial Sequence
  Description of Artificial Sequence: Synthetic oligonucleotide
caaauauaggaaaacaaagauucau

SEQ ID NO: 15891 - RNA, 25 nt, Artificial Sequence
  Description of Artificial Sequence: Synthetic oligonucleotide
uaccuguaggcaauagucuaacuug

SEQ ID NO: 15892 - RNA, 25 nt, Artificial Sequence
  Description of Artificial Sequence: Synthetic oligonucleotide
guccaaaccacuuugccuuuacugc

SEQ ID NO: 15893 - RNA, 25 nt, Artificial Sequence
  Description of Artificial Sequence: Synthetic oligonucleotide
cuauuuuuauccccaaugcguagau

SEQ ID NO: 15894 - RNA, 25 nt, Artificial Sequence
  Description of Artificial Sequence: Synthetic oligonucleotide
uauuucccccaggccuauagccuuu

SEQ ID NO: 15895 - RNA, 25 nt, Artificial Sequence
  Description of Artificial Sequence: Synthetic oligonucleotide
ugugaaggaaagcaaaucauaccuc

SEQ ID NO: 15896 - RNA, 25 nt, Artificial Sequence
  Description of Artificial Sequence: Synthetic oligonucleotide
ccuguauauugacacgaaucugguu

SEQ ID NO: 15897 - RNA, 25 nt, Artificial Sequence
  Description of Artificial Sequence: Synthetic oligonucleotide
uuucaaaugucauuuccagauuuuu

SEQ ID NO: 15898 - RNA, 25 nt, Artificial Sequence
  Description of Artificial Sequence: Synthetic oligonucleotide
uuaguuaauuggggguuguccuuuu

SEQ ID NO: 15899 - RNA, 25 nt, Artificial Sequence
  Description of Artificial Sequence: Synthetic oligonucleotide
ucccuuaaugugagagucauuuucc

SEQ ID NO: 15900 - RNA, 25 nt, Artificial Sequence
  Description of Artificial Sequence: Synthetic oligonucleotide
cuguauauuucuggaucucucaggg

SEQ ID NO: 15901 - RNA, 25 nt, Artificial Sequence
  Description of Artificial Sequence: Synthetic oligonucleotide
ggcugggaggggggagugaggggac

SEQ ID NO: 15902 - RNA, 25 nt, Artificial Sequence
  Description of Artificial Sequence: Synthetic oligonucleotide
cuacaaccauagcacuccaagaacc

SEQ ID NO: 15903 - RNA, 25 nt, Artificial Sequence
  Description of Artificial Sequence: Synthetic oligonucleotide
ccuuuugggauuacuccaguaauca

SEQ ID NO: 15904 - RNA, 25 nt, Artificial Sequence
  Description of Artificial Sequence: Synthetic oligonucleotide
aacuacgaaaguuauuuucuaaaug

SEQ ID NO: 15905 - RNA, 25 nt, Artificial Sequence
  Description of Artificial Sequence: Synthetic oligonucleotide
guagauauguaagguguucuuuuaa

SEQ ID NO: 15906 - RNA, 25 nt, Artificial Sequence
  Description of Artificial Sequence: Synthetic oligonucleotide
aaguaagguacuuugaaauauguag

SEQ ID NO: 15907 - RNA, 25 nt, Artificial Sequence
  Description of Artificial Sequence: Synthetic oligonucleotide
gcauaaacugguacugcuguuaaau

SEQ ID NO: 15908 - RNA, 25 nt, Artificial Sequence
  Description of Artificial Sequence: Synthetic oligonucleotide
ugggucgauuauuaaacggagcagc

SEQ ID NO: 15909 - RNA, 25 nt, Artificial Sequence
  Description of Artificial Sequence: Synthetic oligonucleotide
cugugugagggcagcuaacuuugaa

SEQ ID NO: 15910 - RNA, 25 nt, Artificial Sequence
  Description of Artificial Sequence: Synthetic oligonucleotide
augccugucucccuggcuggugugu

SEQ ID NO: 15911 - RNA, 25 nt, Artificial Sequence
  Description of Artificial Sequence: Synthetic oligonucleotide
ucuccuucucauguugagagcacca

SEQ ID NO: 15912 - RNA, 25 nt, Artificial Sequence
  Description of Artificial Sequence: Synthetic oligonucleotide
agggauugcguggcugcaugcugaa

SEQ ID NO: 15913 - RNA, 25 nt, Artificial Sequence
  Description of Artificial Sequence: Synthetic oligonucleotide
aaccgcauuuucccaugguguauga

SEQ ID NO: 15914 - RNA, 25 nt, Artificial Sequence
  Description of Artificial Sequence: Synthetic oligonucleotide
acuaguucaucucuuucuugagcac

SEQ ID NO: 15915 - RNA, 25 nt, Artificial Sequence
  Description of Artificial Sequence: Synthetic oligonucleotide
ccauuacaagaagaucaaaugaaaa

SEQ ID NO: 15916 - RNA, 25 nt, Artificial Sequence
  Description of Artificial Sequence: Synthetic oligonucleotide
augagaucaauguggaagacaauuc

SEQ ID NO: 15917 - RNA, 25 nt, Artificial Sequence
  Description of Artificial Sequence: Synthetic oligonucleotide
cauagcacaaaaaaagucaucuuaa

SEQ ID NO: 15918 - RNA, 25 nt, Artificial Sequence
  Description of Artificial Sequence: Synthetic oligonucleotide
aaucuacucucaaacauucaucuua

SEQ ID NO: 15919 - RNA, 25 nt, Artificial Sequence
  Description of Artificial Sequence: Synthetic oligonucleotide
auacaugcaucaaaguaauuuacug

SEQ ID NO: 15920 - RNA, 25 nt, Artificial Sequence
  Description of Artificial Sequence: Synthetic oligonucleotide
gacaucaguuugggugagagaggga

SEQ ID NO: 15921 - RNA, 25 nt, Artificial Sequence
  Description of Artificial Sequence: Synthetic oligonucleotide
agucacuuuacugaaaaggcagagg

SEQ ID NO: 15922 - RNA, 25 nt, Artificial Sequence
  Description of Artificial Sequence: Synthetic oligonucleotide
gcuuaagguguauacauuuguacuc

SEQ ID NO: 15923 - RNA, 25 nt, Artificial Sequence
  Description of Artificial Sequence: Synthetic oligonucleotide
cacuuccuuauuuucuuaacuugua

SEQ ID NO: 15924 - RNA, 25 nt, Artificial Sequence
  Description of Artificial Sequence: Synthetic oligonucleotide
aagcagaaaacaagcccucucucuu

SEQ ID NO: 15925 - RNA, 25 nt, Artificial Sequence
  Description of Artificial Sequence: Synthetic oligonucleotide
ugugaaguaucuucaaaggauuggg

SEQ ID NO: 15926 - RNA, 25 nt, Artificial Sequence
  Description of Artificial Sequence: Synthetic oligonucleotide
ggugcaaaaauaccuugcugguaag

SEQ ID NO: 15927 - RNA, 25 nt, Artificial Sequence
  Description of Artificial Sequence: Synthetic oligonucleotide
gccaucaauguuuuauuuaaauccc

SEQ ID NO: 15928 - RNA, 25 nt, Artificial Sequence
  Description of Artificial Sequence: Synthetic oligonucleotide
cugcauucaaaguuagcugccuuuu

SEQ ID NO: 15929 - RNA, 25 nt, Artificial Sequence
  Description of Artificial Sequence: Synthetic oligonucleotide
uugaaauaaacaaacaaaaaauacu

SEQ ID NO: 15930 - RNA, 25 nt, Artificial Sequence
  Description of Artificial Sequence: Synthetic oligonucleotide
uacuguauguuugaaaaugugaaua

SEQ ID NO: 15931 - RNA, 25 nt, Artificial Sequence
  Description of Artificial Sequence: Synthetic oligonucleotide
aguauuuuuauagcuuguuaaagac

SEQ ID NO: 15932 - RNA, 25 nt, Artificial Sequence
  Description of Artificial Sequence: Synthetic oligonucleotide
cauggcuaguugcauuuguaaauaa

SEQ ID NO: 15933 - RNA, 25 nt, Artificial Sequence
  Description of Artificial Sequence: Synthetic oligonucleotide
aguauaauguugcuuugauuuucuu

SEQ ID NO: 15934 - RNA, 25 nt, Artificial Sequence
  Description of Artificial Sequence: Synthetic oligonucleotide
uuuguggacaucuuuauuuggaaca

SEQ ID NO: 15935 - RNA, 25 nt, Artificial Sequence
  Description of Artificial Sequence: Synthetic oligonucleotide
auaauugucuuuaggguugauuugu

SEQ ID NO: 15936 - RNA, 25 nt, Artificial Sequence
  Description of Artificial Sequence: Synthetic oligonucleotide
uauauaaguaauuggccugugauug

SEQ ID NO: 15937 - RNA, 25 nt, Artificial Sequence
  Description of Artificial Sequence: Synthetic oligonucleotide
guuucuuuuuugguuggaaguuauc

SEQ ID NO: 15938 - RNA, 25 nt, Artificial Sequence
  Description of Artificial Sequence: Synthetic oligonucleotide
cauuuugacauuacuugugauucug

SEQ ID NO: 15939 - RNA, 25 nt, Artificial Sequence
  Description of Artificial Sequence: Synthetic oligonucleotide
guguucagcacuauugugauguguu

SEQ ID NO: 15940 - RNA, 25 nt, Artificial Sequence
  Description of Artificial Sequence: Synthetic oligonucleotide
ucaaccucugcacucgcuuacacaa

SEQ ID NO: 15941 - RNA, 25 nt, Artificial Sequence
  Description of Artificial Sequence: Synthetic oligonucleotide
auaggauaugccaauuguguguggu

SEQ ID NO: 15942 - RNA, 25 nt, Artificial Sequence
  Description of Artificial Sequence: Synthetic oligonucleotide
uguaauguuauuuugauuuuuuucc

SEQ ID NO: 15943 - RNA, 25 nt, Artificial Sequence
  Description of Artificial Sequence: Synthetic oligonucleotide
cauguuauugaugaaggaucaugca

SEQ ID NO: 15944 - RNA, 25 nt, Artificial Sequence
  Description of Artificial Sequence: Synthetic oligonucleotide
accuaacacauacuaacuuuuuuaa

SEQ ID NO: 15945 - RNA, 25 nt, Artificial Sequence
  Description of Artificial Sequence: Synthetic oligonucleotide
auguuaggcauauuuuuaguauacu

SEQ ID NO: 15946 - RNA, 25 nt, Artificial Sequence
  Description of Artificial Sequence: Synthetic oligonucleotide
uuucucuuauucuuucuucuccucc

SEQ ID NO: 15947 - RNA, 25 nt, Artificial Sequence
  Description of Artificial Sequence: Synthetic oligonucleotide
caaccuuuuacccauccuccuuccu

SEQ ID NO: 15948 - RNA, 25 nt, Artificial Sequence
  Description of Artificial Sequence: Synthetic oligonucleotide
uuucccucauuccuguuguuauuug

SEQ ID NO: 15949 - RNA, 25 nt, Artificial Sequence
  Description of Artificial Sequence: Synthetic oligonucleotide
gagaaugagggagaaacaguauuuu

SEQ ID NO: 15950 - RNA, 25 nt, Artificial Sequence
  Description of Artificial Sequence: Synthetic oligonucleotide
uacauuuauguaauuaggcuuuucc

SEQ ID NO: 15951 - RNA, 25 nt, Artificial Sequence
  Description of Artificial Sequence: Synthetic oligonucleotide
cguuaguucucaaggauccucuuuu

SEQ ID NO: 15952 - RNA, 25 nt, Artificial Sequence
  Description of Artificial Sequence: Synthetic oligonucleotide
uggcucuugggaaagaauuguaccu

SEQ ID NO: 15953 - RNA, 25 nt, Artificial Sequence
  Description of Artificial Sequence: Synthetic oligonucleotide
uguacaaggcaauuauagaaugcga

SEQ ID NO: 15954 - RNA, 25 nt, Artificial Sequence
  Description of Artificial Sequence: Synthetic oligonucleotide
aacugcuuugccucauuccauacug

SEQ ID NO: 15955 - RNA, 25 nt, Artificial Sequence
  Description of Artificial Sequence: Synthetic oligonucleotide
gaucaucccagcugaacaauuugaa

SEQ ID NO: 15956 - RNA, 25 nt, Artificial Sequence
  Description of Artificial Sequence: Synthetic oligonucleotide
aaacuguucugccuuuuuguuacau

SEQ ID NO: 15957 - RNA, 25 nt, Artificial Sequence
  Description of Artificial Sequence: Synthetic oligonucleotide
ugaaucugucagaaauauauuuuua

SEQ ID NO: 15958 - RNA, 25 nt, Artificial Sequence
  Description of Artificial Sequence: Synthetic oligonucleotide
aauuuaauauaaaugaaauucaaua

SEQ ID NO: 15959 - RNA, 25 nt, Artificial Sequence
  Description of Artificial Sequence: Synthetic oligonucleotide
aaaauaugaaacaaacguuaaaaaa

SEQ ID NO: 15960 - DNA, 21 bp, Artificial Sequence
  Description of Artificial Sequence: Synthetic oligonucleotide
  Description of Combined DNA/RNA Molecule: Synthetic oligonucleotide
cuacacaaaucagcgauuutt

SEQ ID NO: 15961 - DNA, 21 bp, Artificial Sequence
  Description of Artificial Sequence: Synthetic oligonucleotide
  Description of Combined DNA/RNA Molecule: Synthetic oligonucleotide
aaaucgcugauuuguguagtt

SEQ ID NO: 15962 - DNA, 25 bp, Artificial Sequence
  Description of Artificial Sequence: Synthetic oligonucleotide
  Description of Combined DNA/RNA Molecule: Synthetic oligonucleotide
cuacacaaaucagcgauuuccaugt

SEQ ID NO: 15963 - RNA, 27 nt, Artificial Sequence
  Description of Artificial Sequence: Synthetic oligonucleotide
acauggaaaucgcugauuuguguaguc

SEQ ID NO: 15964 - RNA, 13 nt, Artificial Sequence
  Description of Artificial Sequence: Synthetic oligonucleotide
cuacacaaaucag

SEQ ID NO: 15965 - DNA, 11 bp, Artificial Sequence
  Description of Artificial Sequence: Synthetic oligonucleotide
  Description of Combined DNA/RNA Molecule: Synthetic oligonucleotide
gauuuccaugt

SEQ ID NO: 15966 - DNA, 21 bp, Artificial Sequence
  Description of Artificial Sequence: Synthetic oligonucleotide
  Description of Combined DNA/RNA Molecule: Synthetic oligonucleotide
ggaucuuauuucuucggagtt

SEQ ID NO: 15967 - DNA, 21 bp, Artificial Sequence
  Description of Artificial Sequence: Synthetic oligonucleotide
  Description of Combined DNA/RNA Molecule: Synthetic oligonucleotide
cuccgaagaaauaagaucctt

SEQ ID NO: 15968 - RNA, 11 nt, Artificial Sequence
  Description of Artificial Sequence: Synthetic oligonucleotide
ggaucuuauuu

SEQ ID NO: 15969 - DNA, 10 bp, Artificial Sequence
  Description of Artificial Sequence: Synthetic oligonucleotide
  Description of Combined DNA/RNA Molecule: Synthetic oligonucleotide
cuucggagtt

SEQ ID NO: 15970 - RNA, 27 nt, Artificial Sequence
  Description of Artificial Sequence: Synthetic oligonucleotide
cauugucuccgaagaaauaagauccuu

SEQ ID NO: 15971 - RNA, 8 nt, Artificial Sequence
  Description of Artificial Sequence: Synthetic oligonucleotide
  modified_base (2): LNA-G
ggaucuua

SEQ ID NO: 15972 - DNA, 17 bp, Artificial Sequence
  Description of Artificial Sequence: Synthetic oligonucleotide
  Description of Combined DNA/RNA Molecule: Synthetic oligonucleotide
uuucuucggagacaatg

SEQ ID NO: 15973 - DNA, 16 bp, Artificial Sequence
  Description of Artificial Sequence: Synthetic oligonucleotide
  Description of Combined DNA/RNA Molecule: Synthetic oligonucleotide
uucuucggagacaatg

SEQ ID NO: 15974 - DNA, 15 bp, Artificial Sequence
  Description of Artificial Sequence: Synthetic oligonucleotide
  Description of Combined DNA/RNA Molecule: Synthetic oligonucleotide
ucuucggagacaatg

SEQ ID NO: 15975 - DNA, 14 bp, Artificial Sequence
  Description of Artificial Sequence: Synthetic oligonucleotide
  Description of Combined DNA/RNA Molecule: Synthetic oligonucleotide
cuucggagacaatg

SEQ ID NO: 15976 - DNA, 13 bp, Artificial Sequence
  Description of Artificial Sequence: Synthetic oligonucleotide
  Description of Combined DNA/RNA Molecule: Synthetic oligonucleotide
uucggagacaatg

SEQ ID NO: 15977 - DNA, 12 bp, Artificial Sequence
  Description of Artificial Sequence: Synthetic oligonucleotide
  Description of Combined DNA/RNA Molecule: Synthetic oligonucleotide
ucggagacaatg

SEQ ID NO: 15978 - DNA, 11 bp, Artificial Sequence
  Description of Artificial Sequence: Synthetic oligonucleotide
  Description of Combined DNA/RNA Molecule: Synthetic oligonucleotide
cggagacaatg

SEQ ID NO: 15979 - RNA, 9 nt, Artificial Sequence
  Description of Artificial Sequence: Synthetic oligonucleotide
  modified_base (2): LNA-G
ggaucuuau

SEQ ID NO: 15980 - RNA, 10 nt, Artificial Sequence
  Description of Artificial Sequence: Synthetic oligonucleotide
  modified_base (2): LNA-G
ggaucuuauu

SEQ ID NO: 15981 - RNA, 11 nt, Artificial Sequence
  Description of Artificial Sequence: Synthetic oligonucleotide
  modified_base (2): LNA-G
ggaucuuauuu

SEQ ID NO: 15982 - RNA, 12 nt, Artificial Sequence
  Description of Artificial Sequence: Synthetic oligonucleotide
  modified_base (2): LNA-G
ggaucuuauuuc

SEQ ID NO: 15983 - RNA, 8 nt, Artificial Sequence
  Description of Artificial Sequence: Synthetic oligonucleotide
  modified_base (3): LNA-A
cuacacaa

SEQ ID NO: 15984 - DNA, 13 bp, Artificial Sequence
  Description of Artificial Sequence: Synthetic oligonucleotide
  Description of Combined DNA/RNA Molecule: Synthetic oligonucleotide
  modified_base (8): LNA-A
aucagcgauuutt

SEQ ID NO: 15985 - DNA, 12 bp, Artificial Sequence
  Description of Artificial Sequence: Synthetic oligonucleotide
  Description of Combined DNA/RNA Molecule: Synthetic oligonucleotide
  modified_base (7): LNA-A
ucagcgauuutt

SEQ ID NO: 15986 - DNA, 11 bp, Artificial Sequence
  Description of Artificial Sequence: Synthetic oligonucleotide
  Description of Combined DNA/RNA Molecule: Synthetic oligonucleotide
  modified_base (6): LNA-A
cagcgauuutt

SEQ ID NO: 15987 - DNA, 10 bp, Artificial Sequence
  Description of Artificial Sequence: Synthetic oligonucleotide
  Description of Combined DNA/RNA Molecule: Synthetic oligonucleotide
  modified_base (5): LNA-A
agcgauuutt

SEQ ID NO: 15988 - DNA, 9 bp, Artificial Sequence
  Description of Artificial Sequence: Synthetic oligonucleotide
  Description of Combined DNA/RNA Molecule: Synthetic oligonucleotide
  modified_base (4): LNA-A
gcgauuutt

SEQ ID NO: 15989 - DNA, 8 bp, Artificial Sequence
  Description of Artificial Sequence: Synthetic oligonucleotide
  Description of Combined DNA/RNA Molecule: Synthetic oligonucleotide
  modified_base (3): LNA-A
cgauuutt

SEQ ID NO: 15990 - DNA, 7 bp, Artificial Sequence
  Description of Artificial Sequence: Synthetic oligonucleotide
  Description of Combined DNA/RNA Molecule: Synthetic oligonucleotide
  modified_base (2): LNA-A
gauuutt

SEQ ID NO: 15991 - RNA, 9 nt, Artificial Sequence
  Description of Artificial Sequence: Synthetic oligonucleotide
  modified_base (3): LNA-A
cuacacaaa

SEQ ID NO: 15992 - RNA, 10 nt, Artificial Sequence
  Description of Artificial Sequence: Synthetic oligonucleotide
  modified_base (3): LNA-A
cuacacaaau

SEQ ID NO: 15993 - RNA, 11 nt, Artificial Sequence
  Description of Artificial Sequence: Synthetic oligonucleotide
  modified_base (3): LNA-A
cuacacaaauc

SEQ ID NO: 15994 - RNA, 12 nt, Artificial Sequence
  Description of Artificial Sequence: Synthetic oligonucleotide
  modified_base (3): LNA-A
cuacacaaauca

SEQ ID NO: 15995 - RNA, 13 nt, Artificial Sequence
  Description of Artificial Sequence: Synthetic oligonucleotide
  modified_base (3): LNA-A
cuacacaaaucag

SEQ ID NO: 15996 - RNA, 14 nt, Artificial Sequence
  Description of Artificial Sequence: Synthetic oligonucleotide
  modified_base (3): LNA-A
cuacacaaaucagc

SEQ ID NO: 15997 - RNA, 13 nt, Artificial Sequence
  Description of Artificial Sequence: Synthetic oligonucleotide
  modified_base (2): LNA-G
ggaucuuauuucu

SEQ ID NO: 15998 - RNA, 14 nt, Artificial Sequence
  Description of Artificial Sequence: Synthetic oligonucleotide
  modified_base (2): LNA-G
ggaucuuauuucuu

SEQ ID NO: 15999 - RNA, 8 nt, Artificial Sequence
  Description of Artificial Sequence: Synthetic oligonucleotide
  modified_base (2): LNA-G
  modified_base (8): LNA-A
ggaucuua

SEQ ID NO: 16000 - RNA, 9 nt, Artificial Sequence
  Description of Artificial Sequence: Synthetic oligonucleotide
  modified_base (2): LNA-G
  modified_base (9): LNA-U
ggaucuuau

SEQ ID NO: 16001 - RNA, 10 nt, Artificial Sequence
  Description of Artificial Sequence: Synthetic oligonucleotide
  modified_base (2): LNA-G
  modified_base (10): LNA-U
ggaucuuauu

SEQ ID NO: 16002 - RNA, 11 nt, Artificial Sequence
  Description of Artificial Sequence: Synthetic oligonucleotide
  modified_base (2): LNA-G
  modified_base (11): LNA-U
ggaucuuauuu

SEQ ID NO: 16003 - RNA, 12 nt, Artificial Sequence
  Description of Artificial Sequence: Synthetic oligonucleotide
  modified_base (2): LNA-G
  modified_base (12): LNA-C
ggaucuuauuuc

SEQ ID NO: 16004 - RNA, 13 nt, Artificial Sequence
  Description of Artificial Sequence: Synthetic oligonucleotide
  modified_base (2): LNA-G
  modified_base (13): LNA-U
ggaucuuauuucu

SEQ ID NO: 16005 - RNA, 14 nt, Artificial Sequence
  Description of Artificial Sequence: Synthetic oligonucleotide
  modified_base (2): LNA-G
  modified_base (14): LNA-U
ggaucuuauuucuu

SEQ ID NO: 16006 - DNA, 13 bp, Artificial Sequence
  Description of Artificial Sequence: Synthetic oligonucleotide
  Description of Combined DNA/RNA Molecule: Synthetic oligonucleotide
  modified_base (8): LNA-G
uuucuucggagtt

SEQ ID NO: 16007 - DNA, 12 bp, Artificial Sequence
  Description of Artificial Sequence: Synthetic oligonucleotide
  Description of Combined DNA/RNA Molecule: Synthetic oligonucleotide
  modified_base (7): LNA-G
uucuucggagtt

SEQ ID NO: 16008 - DNA, 11 bp, Artificial Sequence
  Description of Artificial Sequence: Synthetic oligonucleotide
  Description of Combined DNA/RNA Molecule: Synthetic oligonucleotide
  modified_base (6): LNA-G
ucuucggagtt

SEQ ID NO: 16009 - DNA, 10 bp, Artificial Sequence
  Description of Artificial Sequence: Synthetic oligonucleotide
  Description of Combined DNA/RNA Molecule: Synthetic oligonucleotide
  modified_base (5): LNA-G
cuucggagtt

SEQ ID NO: 16010 - DNA, 9 bp, Artificial Sequence
  Description of Artificial Sequence: Synthetic oligonucleotide
  Description of Combined DNA/RNA Molecule: Synthetic oligonucleotide
  modified_base (4): LNA-G
uucggagtt

SEQ ID NO: 16011 - DNA, 8 bp, Artificial Sequence
  Description of Artificial Sequence: Synthetic oligonucleotide
  Description of Combined DNA/RNA Molecule: Synthetic oligonucleotide
  modified_base (3): LNA-G
ucggagtt

SEQ ID NO: 16012 - DNA, 7 bp, Artificial Sequence
  Description of Artificial Sequence: Synthetic oligonucleotide
  Description of Combined DNA/RNA Molecule: Synthetic oligonucleotide
  modified_base (2): LNA-G
cggagtt

SEQ ID NO: 16013 - DNA, 13 bp, Artificial Sequence
  Description of Artificial Sequence: Synthetic oligonucleotide
  Description of Combined DNA/RNA Molecule: Synthetic oligonucleotide
  modified_base (1): LNA-U
  modified_base (8): LNA-G
uuucuucggagtt

SEQ ID NO: 16014 - DNA, 12 bp, Artificial Sequence
  Description of Artificial Sequence: Synthetic oligonucleotide
  Description of Combined DNA/RNA Molecule: Synthetic oligonucleotide
  modified_base (1): LNA-U
  modified_base (7): LNA-G
uucuucggagtt

SEQ ID NO: 16015 - DNA, 11 bp, Artificial Sequence
  Description of Artificial Sequence: Synthetic oligonucleotide
  Description of Combined DNA/RNA Molecule: Synthetic oligonucleotide
  modified_base (1): LNA-U
  modified_base (6): LNA-G
ucuucggagtt

SEQ ID NO: 16016 - DNA, 10 bp, Artificial Sequence
  Description of Artificial Sequence: Synthetic oligonucleotide
  Description of Combined DNA/RNA Molecule: Synthetic oligonucleotide
  modified_base (1): LNA-C
  modified_base (5): LNA-G
cuucggagtt

SEQ ID NO: 16017 - DNA, 9 bp, Artificial Sequence
  Description of Artificial Sequence: Synthetic oligonucleotide
  Description of Combined DNA/RNA Molecule: Synthetic oligonucleotide
  modified_base (1): LNA-U
  modified_base (4): LNA-G
uucggagtt

SEQ ID NO: 16018 - DNA, 8 bp, Artificial Sequence
  Description of Artificial Sequence: Synthetic oligonucleotide
  Description of Combined DNA/RNA Molecule: Synthetic oligonucleotide
  modified_base (1): LNA-U
  modified_base (3): LNA-G
ucggagtt

SEQ ID NO: 16019 - DNA, 7 bp, Artificial Sequence
  Description of Artificial Sequence: Synthetic oligonucleotide
  modified_base (1): LNA-C
  modified_base (2): LNA-G
cggagtt

SEQ ID NO: 16020 - DNA, 21 bp, Artificial Sequence
  Description of Artificial Sequence: Synthetic oligonucleotide
  Description of Combined DNA/RNA Molecule: Synthetic oligonucleotide
  modified_base (2): LNA-G
  modified_base (16): LNA-G
ggaucuuauuucuucggagtt

SEQ ID NO: 16021 - DNA, 25 bp, Artificial Sequence
  Description of Artificial Sequence: Synthetic oligonucleotide
  Description of Combined DNA/RNA Molecule: Synthetic oligonucleotide
ggaucuuauuucuucggagacaatg

SEQ ID NO: 16022 - RNA, 25 nt, Artificial Sequence
  Description of Artificial Sequence: Synthetic oligonucleotide
guauuuugaugaggaguucacggcc

SEQ ID NO: 16023 - RNA, 25 nt, Artificial Sequence
  Description of Artificial Sequence: Synthetic oligonucleotide
ggcccagaugaucaccaucacacca

SEQ ID NO: 16024 - RNA, 25 nt, Artificial Sequence
  Description of Artificial Sequence: Synthetic oligonucleotide
gggaagaaaacuauccugcggguuu

SEQ ID NO: 16025 - RNA, 25 nt, Artificial Sequence
  Description of Artificial Sequence: Synthetic oligonucleotide
guuuuaauuuauuucauccaguuug

SEQ ID NO: 16026 - RNA, 25 nt, Artificial Sequence
  Description of Artificial Sequence: Synthetic oligonucleotide
acguagggaaauguuaaggacuucu

SEQ ID NO: 16027 - RNA, 25 nt, Artificial Sequence
  Description of Artificial Sequence: Synthetic oligonucleotide
ccaggguuuacccagugggacagag

SEQ ID NO: 16028 - RNA, 25 nt, Artificial Sequence
  Description of Artificial Sequence: Synthetic oligonucleotide
agcaagguuuaaauuuguuauugug

SEQ ID NO: 16029 - RNA, 25 nt, Artificial Sequence
  Description of Artificial Sequence: Synthetic oligonucleotide
uguauuauguuguucaaaugcauuu

SEQ ID NO: 16030 - RNA, 25 nt, Artificial Sequence
  Description of Artificial Sequence: Synthetic oligonucleotide
uuuuaaucuuugugacaggaaagcc

SEQ ID NO: 16031 - RNA, 25 nt, Artificial Sequence
  Description of Artificial Sequence: Synthetic oligonucleotide
uuaaucuuugugacaggaaagcccu

SEQ ID NO: 16032 - RNA, 25 nt, Artificial Sequence
  Description of Artificial Sequence: Synthetic oligonucleotide
gcugcuuaugucucccagcauggcc

SEQ ID NO: 16033 - RNA, 25 nt, Artificial Sequence
  Description of Artificial Sequence: Synthetic oligonucleotide
aaguguuucagaagcuucucccuga

SEQ ID NO: 16034 - RNA, 25 nt, Artificial Sequence
  Description of Artificial Sequence: Synthetic oligonucleotide
gaccaucaauaaggaagaagcccuu

SEQ ID NO: 16035 - RNA, 25 nt, Artificial Sequence
  Description of Artificial Sequence: Synthetic oligonucleotide
ccaucaauaaggaagaagcccuuca

SEQ ID NO: 16036 - RNA, 25 nt, Artificial Sequence
  Description of Artificial Sequence: Synthetic oligonucleotide
ucaauaaggaagaagcccuucagcg

SEQ ID NO: 16037 - RNA, 25 nt, Artificial Sequence
  Description of Artificial Sequence: Synthetic oligonucleotide
aauaaggaagaagcccuucagcggc

SEQ ID NO: 16038 - RNA, 25 nt, Artificial Sequence
  Description of Artificial Sequence: Synthetic oligonucleotide
aggaagaagcccuucagcggccagu

SEQ ID NO: 16039 - RNA, 25 nt, Artificial Sequence
  Description of Artificial Sequence: Synthetic oligonucleotide
gcauaacuaaaggugaaaagcuccg

SEQ ID NO: 16040 - RNA, 25 nt, Artificial Sequence
  Description of Artificial Sequence: Synthetic oligonucleotide
cauaacuaaaggugaaaagcuccgg

SEQ ID NO: 16041 - RNA, 25 nt, Artificial Sequence
  Description of Artificial Sequence: Synthetic oligonucleotide
cuacaucacgccagucaacagucug

SEQ ID NO: 16042 - RNA, 25 nt, Artificial Sequence
  Description of Artificial Sequence: Synthetic oligonucleotide
acuggauuuaagcagaguucaaaag

SEQ ID NO: 16043 - RNA, 25 nt, Artificial Sequence
  Description of Artificial Sequence: Synthetic oligonucleotide
cuggauuuaagcagaguucaaaagc

SEQ ID NO: 16044 - RNA, 25 nt, Artificial Sequence
  Description of Artificial Sequence: Synthetic oligonucleotide
gauuuaagcagaguucaaaagcccu

SEQ ID NO: 16045 - RNA, 25 nt, Artificial Sequence
  Description of Artificial Sequence: Synthetic oligonucleotide
auuuaagcagaguucaaaagcccuu

SEQ ID NO: 16046 - RNA, 25 nt, Artificial Sequence
  Description of Artificial Sequence: Synthetic oligonucleotide
uuaagcagaguucaaaagcccuuca

SEQ ID NO: 16047 - RNA, 25 nt, Artificial Sequence
  Description of Artificial Sequence: Synthetic oligonucleotide
uaagcagaguucaaaagcccuucag

SEQ ID NO: 16048 - RNA, 25 nt, Artificial Sequence
  Description of Artificial Sequence: Synthetic oligonucleotide
agcagaguucaaaagcccuucagcg

SEQ ID NO: 16049 - RNA, 25 nt, Artificial Sequence
  Description of Artificial Sequence: Synthetic oligonucleotide
cucagggucugagugaagccgcucg

SEQ ID NO: 16050 - RNA, 25 nt, Artificial Sequence
  Description of Artificial Sequence: Synthetic oligonucleotide
caagcaacuacaucacgccagucaa

SEQ ID NO: 16051 - RNA, 25 nt, Artificial Sequence
  Description of Artificial Sequence: Synthetic oligonucleotide
aucaauggcagcuucuuggugcgug

SEQ ID NO: 16052 - RNA, 25 nt, Artificial Sequence
  Description of Artificial Sequence: Synthetic oligonucleotide
uuccagcccacauuggauucaucag

SEQ ID NO: 16053 - RNA, 25 nt, Artificial Sequence
  Description of Artificial Sequence: Synthetic oligonucleotide
cagcugagaauguggaauaccuaag

SEQ ID NO: 16054 - RNA, 25 nt, Artificial Sequence
  Description of Artificial Sequence: Synthetic oligonucleotide
aacguaucuccuaauuugaggcuca

SEQ ID NO: 16055 - RNA, 25 nt, Artificial Sequence
  Description of Artificial Sequence: Synthetic oligonucleotide
ccuaaaauaauuucucuacaauugg

SEQ ID NO: 16056 - RNA, 25 nt, Artificial Sequence
  Description of Artificial Sequence: Synthetic oligonucleotide
uggaagauucagcuaguuaggagcc

SEQ ID NO: 16057 - RNA, 25 nt, Artificial Sequence
  Description of Artificial Sequence: Synthetic oligonucleotide
uuaaacucuccuagucaauauccac

SEQ ID NO: 16058 - RNA, 25 nt, Artificial Sequence
  Description of Artificial Sequence: Synthetic oligonucleotide
cagccuacaguuauguucagucaca

SEQ ID NO: 16059 - RNA, 25 nt, Artificial Sequence
  Description of Artificial Sequence: Synthetic oligonucleotide
guuauguucagucacacacacauac

SEQ ID NO: 16060 - RNA, 25 nt, Artificial Sequence
  Description of Artificial Sequence: Synthetic oligonucleotide
cacauacaaaauguuccuuuugcuu

SEQ ID NO: 16061 - RNA, 25 nt, Artificial Sequence
  Description of Artificial Sequence: Synthetic oligonucleotide
uccuuuugcuuuuaaaguaauuuuu

SEQ ID NO: 16062 - RNA, 25 nt, Artificial Sequence
  Description of Artificial Sequence: Synthetic oligonucleotide
ugaccugugaagcaacagucaaugg

SEQ ID NO: 16063 - RNA, 25 nt, Artificial Sequence
  Description of Artificial Sequence: Synthetic oligonucleotide
cuaucucacacaucgacaaaccaau

SEQ ID NO: 16064 - RNA, 25 nt, Artificial Sequence
  Description of Artificial Sequence: Synthetic oligonucleotide
uguccucaauuguacugcuaccacu

SEQ ID NO: 16065 - RNA, 25 nt, Artificial Sequence
  Description of Artificial Sequence: Synthetic oligonucleotide
aaaccguagcuggcaagcggucuua

SEQ ID NO: 16066 - RNA, 25 nt, Artificial Sequence
  Description of Artificial Sequence: Synthetic oligonucleotide
uagcuggcaagcggucuuaccggcu

SEQ ID NO: 16067 - RNA, 25 nt, Artificial Sequence
  Description of Artificial Sequence: Synthetic oligonucleotide
uuguaugguuaaaagauggguuacc

SEQ ID NO: 16068 - RNA, 25 nt, Artificial Sequence
  Description of Artificial Sequence: Synthetic oligonucleotide
ugguuaaaagauggguuaccugcga

SEQ ID NO: 16069 - RNA, 25 nt, Artificial Sequence
  Description of Artificial Sequence: Synthetic oligonucleotide
cagggaauuauacaaucuugcugag

SEQ ID NO: 16070 - RNA, 25 nt, Artificial Sequence
  Description of Artificial Sequence: Synthetic oligonucleotide
acaaucuugcugagcauaaaacagu

SEQ ID NO: 16071 - RNA, 25 nt, Artificial Sequence
  Description of Artificial Sequence: Synthetic oligonucleotide
ccaauaaugaagaguccuuuauccu

SEQ ID NO: 16072 - RNA, 25 nt, Artificial Sequence
  Description of Artificial Sequence: Synthetic oligonucleotide
acuuuggauguuccaacgcaaguug

SEQ ID NO: 16073 - RNA, 25 nt, Artificial Sequence
  Description of Artificial Sequence: Synthetic oligonucleotide
aaugcuuccacuaaacugaaaccau

SEQ ID NO: 16074 - RNA, 25 nt, Artificial Sequence
  Description of Artificial Sequence: Synthetic oligonucleotide
gagaaaguuugacuuuguuaaauau

SEQ ID NO: 16075 - RNA, 25 nt, Artificial Sequence
  Description of Artificial Sequence: Synthetic oligonucleotide
aaagaacuacuguauauuaaaaguu

SEQ ID NO: 16076 - RNA, 25 nt, Artificial Sequence
  Description of Artificial Sequence: Synthetic oligonucleotide
uuagaaauacggguuuugacuuaac

SEQ ID NO: 16077 - RNA, 25 nt, Artificial Sequence
  Description of Artificial Sequence: Synthetic oligonucleotide
aacauggguacagcaaacucagcac

SEQ ID NO: 16078 - RNA, 25 nt, Artificial Sequence
  Description of Artificial Sequence: Synthetic oligonucleotide
aaagacacagaagaugcugaccuca

SEQ ID NO: 16079 - RNA, 25 nt, Artificial Sequence
  Description of Artificial Sequence: Synthetic oligonucleotide
uaguagggagguuuauucagaucgc

SEQ ID NO: 16080 - RNA, 25 nt, Artificial Sequence
  Description of Artificial Sequence: Synthetic oligonucleotide
gccuucugcagcaggguucugggau

SEQ ID NO: 16081 - RNA, 25 nt, Artificial Sequence
  Description of Artificial Sequence: Synthetic oligonucleotide
ggucugguacauauuggaaauuaug

SEQ ID NO: 16082 - RNA, 25 nt, Artificial Sequence
  Description of Artificial Sequence: Synthetic oligonucleotide
cuaguccuuccgauggaagcacuag

SEQ ID NO: 16083 - RNA, 25 nt, Artificial Sequence
  Description of Artificial Sequence: Synthetic oligonucleotide
ccagugaauauuguuuuuaugugga

SEQ ID NO: 16084 - RNA, 25 nt, Artificial Sequence
  Description of Artificial Sequence: Synthetic oligonucleotide
augaauucaaguuggaauugguaga

SEQ ID NO: 16085 - RNA, 25 nt, Artificial Sequence
  Description of Artificial Sequence: Synthetic oligonucleotide
caggacacagauuuagacuuggaga

SEQ ID NO: 16086 - RNA, 25 nt, Artificial Sequence
  Description of Artificial Sequence: Synthetic oligonucleotide
cucaaagcacaguuacaguauucca

SEQ ID NO: 16087 - RNA, 25 nt, Artificial Sequence
  Description of Artificial Sequence: Synthetic oligonucleotide
accacugccaccacugaugaauuaa

SEQ ID NO: 16088 - RNA, 25 nt, Artificial Sequence
  Description of Artificial Sequence: Synthetic oligonucleotide
gaaacuacuagugccacaucaucac

SEQ ID NO: 16089 - RNA, 25 nt, Artificial Sequence
  Description of Artificial Sequence: Synthetic oligonucleotide
aagucggacagccucaccaaacaga

SEQ ID NO: 16090 - RNA, 25 nt, Artificial Sequence
  Description of Artificial Sequence: Synthetic oligonucleotide
gaaagcgaaaaauggaacaugaugg

SEQ ID NO: 16091 - RNA, 25 nt, Artificial Sequence
  Description of Artificial Sequence: Synthetic oligonucleotide
cccucugauuuagcauguagacugc

SEQ ID NO: 16092 - RNA, 25 nt, Artificial Sequence
  Description of Artificial Sequence: Synthetic oligonucleotide
ugagcuauuuaaggaucuauuuaug

SEQ ID NO: 16093 - RNA, 25 nt, Artificial Sequence
  Description of Artificial Sequence: Synthetic oligonucleotide
aaaaggugaaaaagcacuauuauca

SEQ ID NO: 16094 - RNA, 25 nt, Artificial Sequence
  Description of Artificial Sequence: Synthetic oligonucleotide
gaaaaagcacuauuaucaguucugc

SEQ ID NO: 16095 - RNA, 25 nt, Artificial Sequence
  Description of Artificial Sequence: Synthetic oligonucleotide
ggcugaaaagaaagauuaaaccuac

SEQ ID NO: 16096 - RNA, 25 nt, Artificial Sequence
  Description of Artificial Sequence: Synthetic oligonucleotide
uaaacccuuauaauaaaauccuucu

SEQ ID NO: 16097 - RNA, 25 nt, Artificial Sequence
  Description of Artificial Sequence: Synthetic oligonucleotide
cauacuauuagccaaugcuguagac

SEQ ID NO: 16098 - RNA, 25 nt, Artificial Sequence
  Description of Artificial Sequence: Synthetic oligonucleotide
gacagaagcauuuugauaggaauag

SEQ ID NO: 16099 - RNA, 25 nt, Artificial Sequence
  Description of Artificial Sequence: Synthetic oligonucleotide
agagcaaauaagauaauggcccuga

SEQ ID NO: 16100 - RNA, 25 nt, Artificial Sequence
  Description of Artificial Sequence: Synthetic oligonucleotide
ccaacauuuuucucuuccucaagca

SEQ ID NO: 16101 - RNA, 25 nt, Artificial Sequence
  Description of Artificial Sequence: Synthetic oligonucleotide
uuaaguaugagaaaaguucagccca

SEQ ID NO: 16102 - RNA, 25 nt, Artificial Sequence
  Description of Artificial Sequence: Synthetic oligonucleotide
caggaauaaagauggcugcugaacc

SEQ ID NO: 16103 - RNA, 25 nt, Artificial Sequence
  Description of Artificial Sequence: Synthetic oligonucleotide
aauuugaaugaccaaguucucuuca

SEQ ID NO: 16104 - RNA, 25 nt, Artificial Sequence
  Description of Artificial Sequence: Synthetic oligonucleotide
auguauaaagauagccagccuagag

SEQ ID NO: 16105 - RNA, 25 nt, Artificial Sequence
  Description of Artificial Sequence: Synthetic oligonucleotide
ggcuguaacuaucucugugaagugu

SEQ ID NO: 16106 - RNA, 25 nt, Artificial Sequence
  Description of Artificial Sequence: Synthetic oligonucleotide
ucugugaagugugagaaaauuucaa

SEQ ID NO: 16107 - RNA, 25 nt, Artificial Sequence
  Description of Artificial Sequence: Synthetic oligonucleotide
ccuuuaaggaaaugaauccuccuga

SEQ ID NO: 16108 - RNA, 25 nt, Artificial Sequence
  Description of Artificial Sequence: Synthetic oligonucleotide
aaggauacaaaaagugacaucauau

SEQ ID NO: 16109 - RNA, 25 nt, Artificial Sequence
  Description of Artificial Sequence: Synthetic oligonucleotide
agaugcaauuugaaucuucaucaua

SEQ ID NO: 16110 - RNA, 25 nt, Artificial Sequence
  Description of Artificial Sequence: Synthetic oligonucleotide
guucaaaacgaagacuagcuauuaa

SEQ ID NO: 16111 - RNA, 25 nt, Artificial Sequence
  Description of Artificial Sequence: Synthetic oligonucleotide
gugaaaccucaucucuacuaaaaau

SEQ ID NO: 16112 - RNA, 25 nt, Artificial Sequence
  Description of Artificial Sequence: Synthetic oligonucleotide
acgaaagagaagcucuaucucgccu

SEQ ID NO: 16113 - RNA, 25 nt, Artificial Sequence
  Description of Artificial Sequence: Synthetic oligonucleotide
cuccacaagcgccuucgguccaguu

SEQ ID NO: 16114 - RNA, 25 nt, Artificial Sequence
  Description of Artificial Sequence: Synthetic oligonucleotide
gagaagauuccaaagauguagccgc

SEQ ID NO: 16115 - RNA, 25 nt, Artificial Sequence
  Description of Artificial Sequence: Synthetic oligonucleotide
aaucuggauucaaugaggagacuug

SEQ ID NO: 16116 - RNA, 25 nt, Artificial Sequence
  Description of Artificial Sequence: Synthetic oligonucleotide
agaacagauuugagaguagugagga

SEQ ID NO: 16117 - RNA, 25 nt, Artificial Sequence
  Description of Artificial Sequence: Synthetic oligonucleotide
ccagagcugugcagaugaguacaaa

SEQ ID NO: 16118 - RNA, 25 nt, Artificial Sequence
  Description of Artificial Sequence: Synthetic oligonucleotide
ccucagauuguuguuguuaaugggc

SEQ ID NO: 16119 - RNA, 25 nt, Artificial Sequence
  Description of Artificial Sequence: Synthetic oligonucleotide
cuauuuuaauuauuuuuaauuuauu

SEQ ID NO: 16120 - RNA, 25 nt, Artificial Sequence
  Description of Artificial Sequence: Synthetic oligonucleotide
uuuaauuuauuaauauuuaaauaug

SEQ ID NO: 16121 - RNA, 25 nt, Artificial Sequence
  Description of Artificial Sequence: Synthetic oligonucleotide
augcaguuugaauauccuuuguuuc

SEQ ID NO: 16122 - RNA, 25 nt, Artificial Sequence
  Description of Artificial Sequence: Synthetic oligonucleotide
caugcugcuggcgucuaaguguuug

SEQ ID NO: 16123 - RNA, 25 nt, Artificial Sequence
  Description of Artificial Sequence: Synthetic oligonucleotide
agaugugcauuucaccugugacaaa

SEQ ID NO: 16124 - RNA, 25 nt, Artificial Sequence
  Description of Artificial Sequence: Synthetic oligonucleotide
ucaaaaccugugccaggcugaauua

SEQ ID NO: 16125 - RNA, 25 nt, Artificial Sequence
  Description of Artificial Sequence: Synthetic oligonucleotide
gaauguggguagucauucuuacaau

SEQ ID NO: 16126 - RNA, 25 nt, Artificial Sequence
  Description of Artificial Sequence: Synthetic oligonucleotide
auguggguagucauucuuacaauug

SEQ ID NO: 16127 - RNA, 25 nt, Artificial Sequence
  Description of Artificial Sequence: Synthetic oligonucleotide
ugaaaaugagcaucagagaguguac

SEQ ID NO: 16128 - RNA, 25 nt, Artificial Sequence
  Description of Artificial Sequence: Synthetic oligonucleotide
uugcuuuucauguagaacucagcag

SEQ ID NO: 16129 - RNA, 25 nt, Artificial Sequence
  Description of Artificial Sequence: Synthetic oligonucleotide
uguauuucuauauuuauuuucagua

SEQ ID NO: 16130 - RNA, 25 nt, Artificial Sequence
  Description of Artificial Sequence: Synthetic oligonucleotide
uuugauuaauguuucuuaaauggaa

SEQ ID NO: 16131 - RNA, 25 nt, Artificial Sequence
  Description of Artificial Sequence: Synthetic oligonucleotide
caacguguauagugccuaaaauugu

SEQ ID NO: 16132 - RNA, 25 nt, Artificial Sequence
  Description of Artificial Sequence: Synthetic oligonucleotide
cauauccuuggcuacuaacaucugg

SEQ ID NO: 16133 - RNA, 25 nt, Artificial Sequence
  Description of Artificial Sequence: Synthetic oligonucleotide
uacuaacaucuggagacugugagcu

SEQ ID NO: 16134 - RNA, 25 nt, Artificial Sequence
  Description of Artificial Sequence: Synthetic oligonucleotide
cauaaguugugugcuuuuuauuaau

SEQ ID NO: 16135 - RNA, 25 nt, Artificial Sequence
  Description of Artificial Sequence: Synthetic oligonucleotide
gcaucauuuuggcucuucuuacauu

SEQ ID NO: 16136 - RNA, 25 nt, Artificial Sequence
  Description of Artificial Sequence: Synthetic oligonucleotide
gcucuucuuacauuuguaaaaaugu

SEQ ID NO: 16137 - RNA, 25 nt, Artificial Sequence
  Description of Artificial Sequence: Synthetic oligonucleotide
agauuaggucaucuuaauucauauu

SEQ ID NO: 16138 - RNA, 25 nt, Artificial Sequence
  Description of Artificial Sequence: Synthetic oligonucleotide
auggaauugaaagaacuaaucauga

SEQ ID NO: 16139 - RNA, 25 nt, Artificial Sequence
  Description of Artificial Sequence: Synthetic oligonucleotide
cacacucauuccuucugcucuuggg

SEQ ID NO: 16140 - RNA, 25 nt, Artificial Sequence
  Description of Artificial Sequence: Synthetic oligonucleotide
uguagagguaaccaguagcuuugag

SEQ ID NO: 16141 - RNA, 25 nt, Artificial Sequence
  Description of Artificial Sequence: Synthetic oligonucleotide
caaccacaugccacguaauauuuca

SEQ ID NO: 16142 - RNA, 25 nt, Artificial Sequence
  Description of Artificial Sequence: Synthetic oligonucleotide
ucggaaacaaguuauucucuucacu

SEQ ID NO: 16143 - RNA, 25 nt, Artificial Sequence
  Description of Artificial Sequence: Synthetic oligonucleotide
acucccaauaacuaaugcuaagaaa

SEQ ID NO: 16144 - RNA, 25 nt, Artificial Sequence
  Description of Artificial Sequence: Synthetic oligonucleotide
aaugcuaagaaaugcugaaaaucaa

SEQ ID NO: 16145 - RNA, 25 nt, Artificial Sequence
  Description of Artificial Sequence: Synthetic oligonucleotide
gucuuucucuaaauaugauuacuuu

SEQ ID NO: 16146 - RNA, 25 nt, Artificial Sequence
  Description of Artificial Sequence: Synthetic oligonucleotide
ugaauuucaggcauuuuguucuaca

SEQ ID NO: 16147 - RNA, 25 nt, Artificial Sequence
  Description of Artificial Sequence: Synthetic oligonucleotide
cgauucccucucacccgggacucuc

SEQ ID NO: 16148 - RNA, 25 nt, Artificial Sequence
  Description of Artificial Sequence: Synthetic oligonucleotide
aggaaagugaaccuuuaaaguaaag

SEQ ID NO: 16149 - RNA, 25 nt, Artificial Sequence
  Description of Artificial Sequence: Synthetic oligonucleotide
gaggcugcaugcucuggaagccugg

SEQ ID NO: 16150 - RNA, 25 nt, Artificial Sequence
  Description of Artificial Sequence: Synthetic oligonucleotide
ucucugaacagaaaacaaaagagag

SEQ ID NO: 16151 - RNA, 25 nt, Artificial Sequence
  Description of Artificial Sequence: Synthetic oligonucleotide
aacuuggcuguaaucaguuaugccg

SEQ ID NO: 16152 - RNA, 25 nt, Artificial Sequence
  Description of Artificial Sequence: Synthetic oligonucleotide
agaagccaaaauuaaaagaagucca

SEQ ID NO: 16153 - RNA, 25 nt, Artificial Sequence
  Description of Artificial Sequence: Synthetic oligonucleotide
auuaaaagaaguccaggugagguua

SEQ ID NO: 16154 - RNA, 25 nt, Artificial Sequence
  Description of Artificial Sequence: Synthetic oligonucleotide
gaauccggauuaucgggaagaggac

SEQ ID NO: 16155 - RNA, 25 nt, Artificial Sequence
  Description of Artificial Sequence: Synthetic oligonucleotide
aaugugacaucaaagcaaguauugu

SEQ ID NO: 16156 - RNA, 25 nt, Artificial Sequence
  Description of Artificial Sequence: Synthetic oligonucleotide
caucaaagcaaguauuguagcacuc

SEQ ID NO: 16157 - RNA, 25 nt, Artificial Sequence
  Description of Artificial Sequence: Synthetic oligonucleotide
agagagagaaaacaaaaccacaaau

SEQ ID NO: 16158 - RNA, 25 nt, Artificial Sequence
  Description of Artificial Sequence: Synthetic oligonucleotide
ucgcuguaguauuuaagcccauaca

SEQ ID NO: 16159 - RNA, 25 nt, Artificial Sequence
  Description of Artificial Sequence: Synthetic oligonucleotide
cgcuguaguauuuaagcccauacag

SEQ ID NO: 16160 - RNA, 25 nt, Artificial Sequence
  Description of Artificial Sequence: Synthetic oligonucleotide
auuuaagcccauacagaaaccuucc

SEQ ID NO: 16161 - RNA, 25 nt, Artificial Sequence
  Description of Artificial Sequence: Synthetic oligonucleotide
auuaaaauaaacaugguauaccuac

SEQ ID NO: 16162 - RNA, 25 nt, Artificial Sequence
  Description of Artificial Sequence: Synthetic oligonucleotide
cuguucugaucggccaguuuucgga

SEQ ID NO: 16163 - RNA, 25 nt, Artificial Sequence
  Description of Artificial Sequence: Synthetic oligonucleotide
aaauaauuugaacuuuggaacaggg

SEQ ID NO: 16164 - RNA, 25 nt, Artificial Sequence
  Description of Artificial Sequence: Synthetic oligonucleotide
ugcgaccuuaauuuaacuuuccagu

SEQ ID NO: 16165 - RNA, 25 nt, Artificial Sequence
  Description of Artificial Sequence: Synthetic oligonucleotide
cugagaaagcuaaaguuugguuuug

SEQ ID NO: 16166 - RNA, 25 nt, Artificial Sequence
  Description of Artificial Sequence: Synthetic oligonucleotide
aguaaagaugcuacuucccacugua

SEQ ID NO: 16167 - RNA, 25 nt, Artificial Sequence
  Description of Artificial Sequence: Synthetic oligonucleotide
cugcuuaauugcugauaccauauga

SEQ ID NO: 16168 - RNA, 25 nt, Artificial Sequence
  Description of Artificial Sequence: Synthetic oligonucleotide
uaccauaugaaugaaacaugggcug

SEQ ID NO: 16169 - RNA, 25 nt, Artificial Sequence
  Description of Artificial Sequence: Synthetic oligonucleotide
aacuuucuuauccaacuuuuucaua

SEQ ID NO: 16170 - RNA, 25 nt, Artificial Sequence
  Description of Artificial Sequence: Synthetic oligonucleotide
ccuugcaugacaucaugaggccgga

SEQ ID NO: 16171 - RNA, 25 nt, Artificial Sequence
  Description of Artificial Sequence: Synthetic oligonucleotide
ugaauuuguauaugacugcauuugu

SEQ ID NO: 16172 - RNA, 25 nt, Artificial Sequence
  Description of Artificial Sequence: Synthetic oligonucleotide
gaauccuaguagaauguuuacuacc

SEQ ID NO: 16173 - RNA, 25 nt, Artificial Sequence
  Description of Artificial Sequence: Synthetic oligonucleotide
gaaagggaagaauuuuuugaugaaa

SEQ ID NO: 16174 - RNA, 25 nt, Artificial Sequence
  Description of Artificial Sequence: Synthetic oligonucleotide
uaucggcaugccagugugugaauuu

SEQ ID NO: 16175 - RNA, 25 nt, Artificial Sequence
  Description of Artificial Sequence: Synthetic oligonucleotide
caccucauaguagagcaauguaugu

SEQ ID NO: 16176 - RNA, 25 nt, Artificial Sequence
  Description of Artificial Sequence: Synthetic oligonucleotide
ccagaauugccaaagcacauauaua

SEQ ID NO: 16177 - RNA, 25 nt, Artificial Sequence
  Description of Artificial Sequence: Synthetic oligonucleotide
uggugaucuggguaauaguuucucc

SEQ ID NO: 16178 - RNA, 25 nt, Artificial Sequence
  Description of Artificial Sequence: Synthetic oligonucleotide
gaucuggguaauaguuucuccaaau

SEQ ID NO: 16179 - RNA, 25 nt, Artificial Sequence
  Description of Artificial Sequence: Synthetic oligonucleotide
ggaugugaugaauacuuccuagaaa

SEQ ID NO: 16180 - RNA, 25 nt, Artificial Sequence
  Description of Artificial Sequence: Synthetic oligonucleotide
cauuuccacagcuacaccauauaug

SEQ ID NO: 16181 - RNA, 25 nt, Artificial Sequence
  Description of Artificial Sequence: Synthetic oligonucleotide
acagcuacaccauauaugaauggag

SEQ ID NO: 16182 - RNA, 25 nt, Artificial Sequence
  Description of Artificial Sequence: Synthetic oligonucleotide
ugcaguucuuacacgagaagaagau

SEQ ID NO: 16183 - RNA, 25 nt, Artificial Sequence
  Description of Artificial Sequence: Synthetic oligonucleotide
acgagaagaagaucauuuacaggga

SEQ ID NO: 16184 - RNA, 25 nt, Artificial Sequence
  Description of Artificial Sequence: Synthetic oligonucleotide
cgagaagaagaucauuuacagggac

SEQ ID NO: 16185 - RNA, 25 nt, Artificial Sequence
  Description of Artificial Sequence: Synthetic oligonucleotide
aagaagaucauuuacagggaccuga

SEQ ID NO: 16186 - RNA, 25 nt, Artificial Sequence
  Description of Artificial Sequence: Synthetic oligonucleotide
agaggaagagguguuugacugcauc

SEQ ID NO: 16187 - RNA, 25 nt, Artificial Sequence
  Description of Artificial Sequence: Synthetic oligonucleotide
gaggaagagguguuugacugcaucg

SEQ ID NO: 16188 - RNA, 25 nt, Artificial Sequence
  Description of Artificial Sequence: Synthetic oligonucleotide
cuacuuugagggcgaguucacaggg

SEQ ID NO: 16189 - RNA, 25 nt, Artificial Sequence
  Description of Artificial Sequence: Synthetic oligonucleotide
agggcaucuccuggcaccucugucc

SEQ ID NO: 16190 - RNA, 25 nt, Artificial Sequence
  Description of Artificial Sequence: Synthetic oligonucleotide
ggagugauaugguuugucuuuuuaa

SEQ ID NO: 16191 - RNA, 25 nt, Artificial Sequence
  Description of Artificial Sequence: Synthetic oligonucleotide
gagugauaugguuugucuuuuuaag

SEQ ID NO: 16192 - RNA, 25 nt, Artificial Sequence
  Description of Artificial Sequence: Synthetic oligonucleotide
ugcaguaaagauccuaaagguuguc

SEQ ID NO: 16193 - RNA, 25 nt, Artificial Sequence
  Description of Artificial Sequence: Synthetic oligonucleotide
aguaaagauccuaaagguugucgac

SEQ ID NO: 16194 - RNA, 25 nt, Artificial Sequence
  Description of Artificial Sequence: Synthetic oligonucleotide
ugacaaaggacaaccuggcaauugu

SEQ ID NO: 16195 - RNA, 25 nt, Artificial Sequence
  Description of Artificial Sequence: Synthetic oligonucleotide
gcaauugugacccaguggugcgagg

SEQ ID NO: 16196 - RNA, 25 nt, Artificial Sequence
  Description of Artificial Sequence: Synthetic oligonucleotide
aacaucauccauagagacaugaaau

SEQ ID NO: 16197 - RNA, 25 nt, Artificial Sequence
  Description of Artificial Sequence: Synthetic oligonucleotide
ugaaauccaacaauauauuucucca

SEQ ID NO: 16198 - RNA, 25 nt, Artificial Sequence
  Description of Artificial Sequence: Synthetic oligonucleotide
aacaauauauuucuccaugaaggcu

SEQ ID NO: 16199 - RNA, 25 nt, Artificial Sequence
  Description of Artificial Sequence: Synthetic oligonucleotide
aacaguaaagucacgcuggaguggu

SEQ ID NO: 16200 - RNA, 25 nt, Artificial Sequence
  Description of Artificial Sequence: Synthetic oligonucleotide
ugugaagaaaguaaaggaagagagg

SEQ ID NO: 16201 - RNA, 25 nt, Artificial Sequence
  Description of Artificial Sequence: Synthetic oligonucleotide
cuuccgagccauccuugcaucgggc

SEQ ID NO: 16202 - RNA, 25 nt, Artificial Sequence
  Description of Artificial Sequence: Synthetic oligonucleotide
aauggagguugaauauccuacugug

SEQ ID NO: 16203 - RNA, 25 nt, Artificial Sequence
  Description of Artificial Sequence: Synthetic oligonucleotide
ggagguugaauauccuacuguguaa

SEQ ID NO: 16204 - RNA, 25 nt, Artificial Sequence
  Description of Artificial Sequence: Synthetic oligonucleotide
auuuugaguuuucccuuguagugua

SEQ ID NO: 16205 - RNA, 25 nt, Artificial Sequence
  Description of Artificial Sequence: Synthetic oligonucleotide
uauccuguuuguucuuuguugauug

SEQ ID NO: 16206 - RNA, 25 nt, Artificial Sequence
  Description of Artificial Sequence: Synthetic oligonucleotide
ccuguuuguucuuuguugauugaaa

SEQ ID NO: 16207 - RNA, 25 nt, Artificial Sequence
  Description of Artificial Sequence: Synthetic oligonucleotide
cucuacagccuucuuuuucuuccau

SEQ ID NO: 16208 - RNA, 25 nt, Artificial Sequence
  Description of Artificial Sequence: Synthetic oligonucleotide
ucuuccauagcuaaucuuccuucua

SEQ ID NO: 16209 - RNA, 25 nt, Artificial Sequence
  Description of Artificial Sequence: Synthetic oligonucleotide
auaaucuuccuguugaaugcuucau

SEQ ID NO: 16210 - RNA, 25 nt, Artificial Sequence
  Description of Artificial Sequence: Synthetic oligonucleotide
uaaucuuccuguugaaugcuucaug

SEQ ID NO: 16211 - RNA, 25 nt, Artificial Sequence
  Description of Artificial Sequence: Synthetic oligonucleotide
cuucaugacuugaauucuacuuuga

SEQ ID NO: 16212 - RNA, 25 nt, Artificial Sequence
  Description of Artificial Sequence: Synthetic oligonucleotide
aagagggagagaagcaacuacagac

SEQ ID NO: 16213 - RNA, 25 nt, Artificial Sequence
  Description of Artificial Sequence: Synthetic oligonucleotide
cgucuccuaccagaccaaggucaac

SEQ ID NO: 16214 - RNA, 25 nt, Artificial Sequence
  Description of Artificial Sequence: Synthetic oligonucleotide
gaucaaucggcccgacuaucucgac

SEQ ID NO: 16215 - RNA, 25 nt, Artificial Sequence
  Description of Artificial Sequence: Synthetic oligonucleotide
ggacgaacauccaaccuucccaaac

SEQ ID NO: 16216 - RNA, 25 nt, Artificial Sequence
  Description of Artificial Sequence: Synthetic oligonucleotide
agggucggaacccaagcuuagaacu

SEQ ID NO: 16217 - RNA, 25 nt, Artificial Sequence
  Description of Artificial Sequence: Synthetic oligonucleotide
ucggaacccaagcuuagaacuuuaa

SEQ ID NO: 16218 - RNA, 25 nt, Artificial Sequence
  Description of Artificial Sequence: Synthetic oligonucleotide
acccaagcuuagaacuuuaagcaac

SEQ ID NO: 16219 - RNA, 25 nt, Artificial Sequence
  Description of Artificial Sequence: Synthetic oligonucleotide
gaacuuuaagcaacaagaccaccac

SEQ ID NO: 16220 - RNA, 25 nt, Artificial Sequence
  Description of Artificial Sequence: Synthetic oligonucleotide
acuauucaguggcgagaaauaaagu

SEQ ID NO: 16221 - RNA, 25 nt, Artificial Sequence
  Description of Artificial Sequence: Synthetic oligonucleotide
cuauucaguggcgagaaauaaaguu

SEQ ID NO: 16222 - RNA, 25 nt, Artificial Sequence
  Description of Artificial Sequence: Synthetic oligonucleotide
aaacacagauaacaggaaaugaucc

SEQ ID NO: 16223 - RNA, 25 nt, Artificial Sequence
  Description of Artificial Sequence: Synthetic oligonucleotide
cuuaagaaaagagaagaaaugaaac

SEQ ID NO: 16224 - RNA, 25 nt, Artificial Sequence
  Description of Artificial Sequence: Synthetic oligonucleotide
cugaaggaguguguuuccauccucc

SEQ ID NO: 16225 - RNA, 25 nt, Artificial Sequence
  Description of Artificial Sequence: Synthetic oligonucleotide
ucaccgcgggacugaaaaucuuuga

SEQ ID NO: 16226 - RNA, 25 nt, Artificial Sequence
  Description of Artificial Sequence: Synthetic oligonucleotide
agcagaaauaagcgugccguucagg

SEQ ID NO: 16227 - RNA, 25 nt, Artificial Sequence
  Description of Artificial Sequence: Synthetic oligonucleotide
aagcgugccguucaggguccagaag

SEQ ID NO: 16228 - RNA, 25 nt, Artificial Sequence
  Description of Artificial Sequence: Synthetic oligonucleotide
agaaacagucacucaagacugcuug

SEQ ID NO: 16229 - RNA, 25 nt, Artificial Sequence
  Description of Artificial Sequence: Synthetic oligonucleotide
agaggaagaagguccaugucuuugg

SEQ ID NO: 16230 - RNA, 25 nt, Artificial Sequence
  Description of Artificial Sequence: Synthetic oligonucleotide
uguauucaaaauaugccugaaacac

SEQ ID NO: 16231 - RNA, 25 nt, Artificial Sequence
  Description of Artificial Sequence: Synthetic oligonucleotide
auuuuccucccuuucucuguaccuc

SEQ ID NO: 16232 - RNA, 25 nt, Artificial Sequence
  Description of Artificial Sequence: Synthetic oligonucleotide
caaagaaagauagagcaagacaaga

SEQ ID NO: 16233 - RNA, 25 nt, Artificial Sequence
  Description of Artificial Sequence: Synthetic oligonucleotide
aagaaagauagagcaagacaagaaa

SEQ ID NO: 16234 - RNA, 25 nt, Artificial Sequence
  Description of Artificial Sequence: Synthetic oligonucleotide
gaaagcauuuguuuguacaagaucc

SEQ ID NO: 16235 - RNA, 25 nt, Artificial Sequence
  Description of Artificial Sequence: Synthetic oligonucleotide
ugaguuaaacgaacguacuugcaga

SEQ ID NO: 16236 - RNA, 25 nt, Artificial Sequence
  Description of Artificial Sequence: Synthetic oligonucleotide
acugauacagaacgaucgauacaga

SEQ ID NO: 16237 - RNA, 25 nt, Artificial Sequence
  Description of Artificial Sequence: Synthetic oligonucleotide
auauuauauauauauaaaaauaaau

SEQ ID NO: 16238 - RNA, 25 nt, Artificial Sequence
  Description of Artificial Sequence: Synthetic oligonucleotide
auuauauauauauaaaaauaaauau

SEQ ID NO: 16239 - RNA, 25 nt, Artificial Sequence
  Description of Artificial Sequence: Synthetic oligonucleotide
ucacuggauguauuugacugcugug

SEQ ID NO: 16240 - RNA, 25 nt, Artificial Sequence
  Description of Artificial Sequence: Synthetic oligonucleotide
cagggaagaggaggagaugagagac

SEQ ID NO: 16241 - RNA, 25 nt, Artificial Sequence
  Description of Artificial Sequence: Synthetic oligonucleotide
augaucuuuuuuuugucccacuugg

SEQ ID NO: 16242 - RNA, 27 nt, Artificial Sequence
  Description of Artificial Sequence: Synthetic oligonucleotide
ggccgugaacuccucaucaaaauaccu

SEQ ID NO: 16243 - RNA, 27 nt, Artificial Sequence
  Description of Artificial Sequence: Synthetic oligonucleotide
uggugugauggugaucaucugggccgu

SEQ ID NO: 16244 - RNA, 27 nt, Artificial Sequence
  Description of Artificial Sequence: Synthetic oligonucleotide
aaacccgcaggauaguuuucuucccua

SEQ ID NO: 16245 - RNA, 27 nt, Artificial Sequence
  Description of Artificial Sequence: Synthetic oligonucleotide
caaacuggaugaaauaaauuaaaaccc

SEQ ID NO: 16246 - RNA, 27 nt, Artificial Sequence
  Description of Artificial Sequence: Synthetic oligonucleotide
agaaguccuuaacauuucccuacguga

SEQ ID NO: 16247 - RNA, 27 nt, Artificial Sequence
  Description of Artificial Sequence: Synthetic oligonucleotide
cucugucccacuggguaaacccuggcc

SEQ ID NO: 16248 - RNA, 27 nt, Artificial Sequence
  Description of Artificial Sequence: Synthetic oligonucleotide
cacaauaacaaauuuaaaccuugcucc

SEQ ID NO: 16249 - RNA, 27 nt, Artificial Sequence
  Description of Artificial Sequence: Synthetic oligonucleotide
aaaugcauuugaacaacauaauacaca

SEQ ID NO: 16250 - RNA, 27 nt, Artificial Sequence
  Description of Artificial Sequence: Synthetic oligonucleotide
ggcuuuccugucacaaagauuaaaaac

SEQ ID NO: 16251 - RNA, 27 nt, Artificial Sequence
  Description of Artificial Sequence: Synthetic oligonucleotide
agggcuuuccugucacaaagauuaaaa

SEQ ID NO: 16252 - RNA, 27 nt, Artificial Sequence
  Description of Artificial Sequence: Synthetic oligonucleotide
ggccaugcugggagacauaagcagcag

SEQ ID NO: 16253 - RNA, 27 nt, Artificial Sequence
  Description of Artificial Sequence: Synthetic oligonucleotide
ucagggagaagcuucugaaacacuucu

SEQ ID NO: 16254 - RNA, 27 nt, Artificial Sequence
  Description of Artificial Sequence: Synthetic oligonucleotide
aagggcuucuuccuuauugauggucag

SEQ ID NO: 16255 - RNA, 27 nt, Artificial Sequence
  Description of Artificial Sequence: Synthetic oligonucleotide
ugaagggcuucuuccuuauugaugguc

SEQ ID NO: 16256 - RNA, 27 nt, Artificial Sequence
  Description of Artificial Sequence: Synthetic oligonucleotide
cgcugaagggcuucuuccuuauugaug

SEQ ID NO: 16257 - RNA, 27 nt, Artificial Sequence
  Description of Artificial Sequence: Synthetic oligonucleotide
gccgcugaagggcuucuuccuuauuga

SEQ ID NO: 16258 - RNA, 27 nt, Artificial Sequence
  Description of Artificial Sequence: Synthetic oligonucleotide
acuggccgcugaagggcuucuuccuua

SEQ ID NO: 16259 - RNA, 27 nt, Artificial Sequence
  Description of Artificial Sequence: Synthetic oligonucleotide
cggagcuuuucaccuuuaguuaugcuu

SEQ ID NO: 16260 - RNA, 27 nt, Artificial Sequence
  Description of Artificial Sequence: Synthetic oligonucleotide
ccggagcuuuucaccuuuaguuaugcu

SEQ ID NO: 16261 - RNA, 27 nt, Artificial Sequence
  Description of Artificial Sequence: Synthetic oligonucleotide
cagacuguugacuggcgugauguaguu

SEQ ID NO: 16262 - RNA, 27 nt, Artificial Sequence
  Description of Artificial Sequence: Synthetic oligonucleotide
cuuuugaacucugcuuaaauccagugg

SEQ ID NO: 16263 - RNA, 27 nt, Artificial Sequence
  Description of Artificial Sequence: Synthetic oligonucleotide
gcuuuugaacucugcuuaaauccagug

SEQ ID NO: 16264 - RNA, 27 nt, Artificial Sequence
  Description of Artificial Sequence: Synthetic oligonucleotide
agggcuuuugaacucugcuuaaaucca

SEQ ID NO: 16265 - RNA, 27 nt, Artificial Sequence
  Description of Artificial Sequence: Synthetic oligonucleotide
aagggcuuuugaacucugcuuaaaucc

SEQ ID NO: 16266 - RNA, 27 nt, Artificial Sequence
  Description of Artificial Sequence: Synthetic oligonucleotide
ugaagggcuuuugaacucugcuuaaau

SEQ ID NO: 16267 - RNA, 27 nt, Artificial Sequence
  Description of Artificial Sequence: Synthetic oligonucleotide
cugaagggcuuuugaacucugcuuaaa

SEQ ID NO: 16268 - RNA, 27 nt, Artificial Sequence
  Description of Artificial Sequence: Synthetic oligonucleotide
cgcugaagggcuuuugaacucugcuua

SEQ ID NO: 16269 - RNA, 27 nt, Artificial Sequence
  Description of Artificial Sequence: Synthetic oligonucleotide
cgagcggcuucacucagacccugaggc

SEQ ID NO: 16270 - RNA, 27 nt, Artificial Sequence
  Description of Artificial Sequence: Synthetic oligonucleotide
uugacuggcgugauguaguugcuuggg

SEQ ID NO: 16271 - RNA, 27 nt, Artificial Sequence
  Description of Artificial Sequence: Synthetic oligonucleotide
cacgcaccaagaagcugccauugaucc

SEQ ID NO: 16272 - RNA, 27 nt, Artificial Sequence
  Description of Artificial Sequence: Synthetic oligonucleotide
cugaugaauccaaugugggcuggaauc

SEQ ID NO: 16273 - RNA, 27 nt, Artificial Sequence
  Description of Artificial Sequence: Synthetic oligonucleotide
cuuagguauuccacauucucagcugug

SEQ ID NO: 16274 - RNA, 27 nt, Artificial Sequence
  Description of Artificial Sequence: Synthetic oligonucleotide
ugagccucaaauuaggagauacguuuu

SEQ ID NO: 16275 - RNA, 27 nt, Artificial Sequence
  Description of Artificial Sequence: Synthetic oligonucleotide
ccaauuguagagaaauuauuuuaggaa

SEQ ID NO: 16276 - RNA, 27 nt, Artificial Sequence
  Description of Artificial Sequence: Synthetic oligonucleotide
ggcuccuaacuagcugaaucuuccaau

SEQ ID NO: 16277 - RNA, 27 nt, Artificial Sequence
  Description of Artificial Sequence: Synthetic oligonucleotide
guggauauugacuaggagaguuuaaaa

SEQ ID NO: 16278 - RNA, 27 nt, Artificial Sequence
  Description of Artificial Sequence: Synthetic oligonucleotide
ugugacugaacauaacuguaggcugaa

SEQ ID NO: 16279 - RNA, 27 nt, Artificial Sequence
  Description of Artificial Sequence: Synthetic oligonucleotide
guaugugugugugacugaacauaacug

SEQ ID NO: 16280 - RNA, 27 nt, Artificial Sequence
  Description of Artificial Sequence: Synthetic oligonucleotide
aagcaaaaggaacauuuuguaugugug

SEQ ID NO: 16281 - RNA, 27 nt, Artificial Sequence
  Description of Artificial Sequence: Synthetic oligonucleotide
aaaaauuacuuuaaaagcaaaaggaac

SEQ ID NO: 16282 - RNA, 27 nt, Artificial Sequence
  Description of Artificial Sequence: Synthetic oligonucleotide
ccauugacuguugcuucacaggucaga

SEQ ID NO: 16283 - RNA, 27 nt, Artificial Sequence
  Description of Artificial Sequence: Synthetic oligonucleotide
auugguuugucgaugugugagauaguu

SEQ ID NO: 16284 - RNA, 27 nt, Artificial Sequence
  Description of Artificial Sequence: Synthetic oligonucleotide
agugguagcaguacaauugaggacaag

SEQ ID NO: 16285 - RNA, 27 nt, Artificial Sequence
  Description of Artificial Sequence: Synthetic oligonucleotide
uaagaccgcuugccagcuacgguuuca

SEQ ID NO: 16286 - RNA, 27 nt, Artificial Sequence
  Description of Artificial Sequence: Synthetic oligonucleotide
agccgguaagaccgcuugccagcuacg

SEQ ID NO: 16287 - RNA, 27 nt, Artificial Sequence
  Description of Artificial Sequence: Synthetic oligonucleotide
gguaacccaucuuuuaaccauacaacu

SEQ ID NO: 16288 - RNA, 27 nt, Artificial Sequence
  Description of Artificial Sequence: Synthetic oligonucleotide
ucgcagguaacccaucuuuuaaccaua

SEQ ID NO: 16289 - RNA, 27 nt, Artificial Sequence
  Description of Artificial Sequence: Synthetic oligonucleotide
cucagcaagauuguauaauucccugca

SEQ ID NO: 16290 - RNA, 27 nt, Artificial Sequence
  Description of Artificial Sequence: Synthetic oligonucleotide
acuguuuuaugcucagcaagauuguau

SEQ ID NO: 16291 - RNA, 27 nt, Artificial Sequence
  Description of Artificial Sequence: Synthetic oligonucleotide
aggauaaaggacucuucauuauuggaa

SEQ ID NO: 16292 - RNA, 27 nt, Artificial Sequence
  Description of Artificial Sequence: Synthetic oligonucleotide
caacuugcguuggaacauccaaagugu

SEQ ID NO: 16293 - RNA, 27 nt, Artificial Sequence
  Description of Artificial Sequence: Synthetic oligonucleotide
augguuucaguuuaguggaagcauuua

SEQ ID NO: 16294 - RNA, 27 nt, Artificial Sequence
  Description of Artificial Sequence: Synthetic oligonucleotide
auauuuaacaaagucaaacuuucucac

SEQ ID NO: 16295 - RNA, 27 nt, Artificial Sequence
  Description of Artificial Sequence: Synthetic oligonucleotide
aacuuuuaauauacaguaguucuuuuc

SEQ ID NO: 16296 - RNA, 27 nt, Artificial Sequence
  Description of Artificial Sequence: Synthetic oligonucleotide
guuaagucaaaacccguauuucuaaag

SEQ ID NO: 16297 - RNA, 27 nt, Artificial Sequence
  Description of Artificial Sequence: Synthetic oligonucleotide
gugcugaguuugcuguacccauguuga

SEQ ID NO: 16298 - RNA, 27 nt, Artificial Sequence
  Description of Artificial Sequence: Synthetic oligonucleotide
ugaggucagcaucuucugugucuuuac

SEQ ID NO: 16299 - RNA, 27 nt, Artificial Sequence
  Description of Artificial Sequence: Synthetic oligonucleotide
gcgaucugaauaaaccucccuacuagc

SEQ ID NO: 16300 - RNA, 27 nt, Artificial Sequence
  Description of Artificial Sequence: Synthetic oligonucleotide
aucccagaacccugcugcagaaggcca

SEQ ID NO: 16301 - RNA, 27 nt, Artificial Sequence
  Description of Artificial Sequence: Synthetic oligonucleotide
cauaauuuccaauauguaccagaccuu

SEQ ID NO: 16302 - RNA, 27 nt, Artificial Sequence
  Description of Artificial Sequence: Synthetic oligonucleotide
cuagugcuuccaucggaaggacuaggu

SEQ ID NO: 16303 - RNA, 27 nt, Artificial Sequence
  Description of Artificial Sequence: Synthetic oligonucleotide
uccacauaaaaacaauauucacuggga

SEQ ID NO: 16304 - RNA, 27 nt, Artificial Sequence
  Description of Artificial Sequence: Synthetic oligonucleotide
ucuaccaauuccaacuugaauucauug

SEQ ID NO: 16305 - RNA, 27 nt, Artificial Sequence
  Description of Artificial Sequence: Synthetic oligonucleotide
ucuccaagucuaaaucuguguccugag

SEQ ID NO: 16306 - RNA, 27 nt, Artificial Sequence
  Description of Artificial Sequence: Synthetic oligonucleotide
uggaauacuguaacugugcuuugagga

SEQ ID NO: 16307 - RNA, 27 nt, Artificial Sequence
  Description of Artificial Sequence: Synthetic oligonucleotide
uuaauucaucagugguggcagugguag

SEQ ID NO: 16308 - RNA, 27 nt, Artificial Sequence
  Description of Artificial Sequence: Synthetic oligonucleotide
gugaugauguggcacuaguaguuucuu

SEQ ID NO: 16309 - RNA, 27 nt, Artificial Sequence
  Description of Artificial Sequence: Synthetic oligonucleotide
ucuguuuggugaggcuguccgacuuug

SEQ ID NO: 16310 - RNA, 27 nt, Artificial Sequence
  Description of Artificial Sequence: Synthetic oligonucleotide
ccaucauguuccauuuuucgcuuucuc

SEQ ID NO: 16311 - RNA, 27 nt, Artificial Sequence
  Description of Artificial Sequence: Synthetic oligonucleotide
gcagucuacaugcuaaaucagagggua

SEQ ID NO: 16312 - RNA, 27 nt, Artificial Sequence
  Description of Artificial Sequence: Synthetic oligonucleotide
cauaaauagauccuuaaauagcucaaa

SEQ ID NO: 16313 - RNA, 27 nt, Artificial Sequence
  Description of Artificial Sequence: Synthetic oligonucleotide
ugauaauagugcuuuuucaccuuuuuc

SEQ ID NO: 16314 - RNA, 27 nt, Artificial Sequence
  Description of Artificial Sequence: Synthetic oligonucleotide
gcagaacugauaauagugcuuuuucac

SEQ ID NO: 16315 - RNA, 27 nt, Artificial Sequence
  Description of Artificial Sequence: Synthetic oligonucleotide
guagguuuaaucuuucuuuucagccau

SEQ ID NO: 16316 - RNA, 27 nt, Artificial Sequence
  Description of Artificial Sequence: Synthetic oligonucleotide
agaaggauuuuauuauaaggguuuaau

SEQ ID NO: 16317 - RNA, 27 nt, Artificial Sequence
  Description of Artificial Sequence: Synthetic oligonucleotide
gucuacagcauuggcuaauaguaugaa

SEQ ID NO: 16318 - RNA, 27 nt, Artificial Sequence
  Description of Artificial Sequence: Synthetic oligonucleotide
cuauuccuaucaaaaugcuucugucua

SEQ ID NO: 16319 - RNA, 27 nt, Artificial Sequence
  Description of Artificial Sequence: Synthetic oligonucleotide
ucagggccauuaucuuauuugcucuau

SEQ ID NO: 16320 - RNA, 27 nt, Artificial Sequence
  Description of Artificial Sequence: Synthetic oligonucleotide
ugcuugaggaagagaaaaauguugguc

SEQ ID NO: 16321 - RNA, 27 nt, Artificial Sequence
  Description of Artificial Sequence: Synthetic oligonucleotide
ugggcugaacuuuucucauacuuaaag

SEQ ID NO: 16322 - RNA, 27 nt, Artificial Sequence
  Description of Artificial Sequence: Synthetic oligonucleotide
gguucagcagccaucuuuauuccugcg

SEQ ID NO: 16323 - RNA, 27 nt, Artificial Sequence
  Description of Artificial Sequence: Synthetic oligonucleotide
ugaagagaacuuggucauucaaauuuc

SEQ ID NO: 16324 - RNA, 27 nt, Artificial Sequence
  Description of Artificial Sequence: Synthetic oligonucleotide
cucuaggcuggcuaucuuuauacauac

SEQ ID NO: 16325 - RNA, 27 nt, Artificial Sequence
  Description of Artificial Sequence: Synthetic oligonucleotide
acacuucacagagauaguuacagccau

SEQ ID NO: 16326 - RNA, 27 nt, Artificial Sequence
  Description of Artificial Sequence: Synthetic oligonucleotide
uugaaauuuucucacacuucacagaga

SEQ ID NO: 16327 - RNA, 27 nt, Artificial Sequence
  Description of Artificial Sequence: Synthetic oligonucleotide
ucaggaggauucauuuccuuaaaggaa

SEQ ID NO: 16328 - RNA, 27 nt, Artificial Sequence
  Description of Artificial Sequence: Synthetic oligonucleotide
auaugaugucacuuuuuguauccuuga

SEQ ID NO: 16329 - RNA, 27 nt, Artificial Sequence
  Description of Artificial Sequence: Synthetic oligonucleotide
uaugaugaagauucaaauugcaucuua

SEQ ID NO: 16330 - RNA, 27 nt, Artificial Sequence
  Description of Artificial Sequence: Synthetic oligonucleotide
uuaauagcuagucuucguuuugaacag

SEQ ID NO: 16331 - RNA, 27 nt, Artificial Sequence
  Description of Artificial Sequence: Synthetic oligonucleotide
auuuuuaguagagaugagguuucacca

SEQ ID NO: 16332 - RNA, 27 nt, Artificial Sequence
  Description of Artificial Sequence: Synthetic oligonucleotide
aggcgagauagagcuucucuuucguuc

SEQ ID NO: 16333 - RNA, 27 nt, Artificial Sequence
  Description of Artificial Sequence: Synthetic oligonucleotide
aacuggaccgaaggcgcuuguggagaa

SEQ ID NO: 16334 - RNA, 27 nt, Artificial Sequence
  Description of Artificial Sequence: Synthetic oligonucleotide
gcggcuacaucuuuggaaucuucuccu

SEQ ID NO: 16335 - RNA, 27 nt, Artificial Sequence
  Description of Artificial Sequence: Synthetic oligonucleotide
caagucuccucauugaauccagauugg

SEQ ID NO: 16336 - RNA, 27 nt, Artificial Sequence
  Description of Artificial Sequence: Synthetic oligonucleotide
uccucacuacucucaaaucuguucugg

SEQ ID NO: 16337 - RNA, 27 nt, Artificial Sequence
  Description of Artificial Sequence: Synthetic oligonucleotide
uuuguacucaucugcacagcucuggcu

SEQ ID NO: 16338 - RNA, 27 nt, Artificial Sequence
  Description of Artificial Sequence: Synthetic oligonucleotide
gcccauuaacaacaacaaucugaggug

SEQ ID NO: 16339 - RNA, 27 nt, Artificial Sequence
  Description of Artificial Sequence: Synthetic oligonucleotide
aauaaauuaaaaauaauuaaaauagug

SEQ ID NO: 16340 - RNA, 27 nt, Artificial Sequence
  Description of Artificial Sequence: Synthetic oligonucleotide
cauauuuaaauauuaauaaauuaaaaa

SEQ ID NO: 16341 - RNA, 27 nt, Artificial Sequence
  Description of Artificial Sequence: Synthetic oligonucleotide
gaaacaaaggauauucaaacugcauag

SEQ ID NO: 16342 - RNA, 27 nt, Artificial Sequence
  Description of Artificial Sequence: Synthetic oligonucleotide
caaacacuuagacgccagcagcauggg

SEQ ID NO: 16343 - RNA, 27 nt, Artificial Sequence
  Description of Artificial Sequence: Synthetic oligonucleotide
uuugucacaggugaaaugcacaucuga

SEQ ID NO: 16344 - RNA, 27 nt, Artificial Sequence
  Description of Artificial Sequence: Synthetic oligonucleotide
uaauucagccuggcacagguuuugauc

SEQ ID NO: 16345 - RNA, 27 nt, Artificial Sequence
  Description of Artificial Sequence: Synthetic oligonucleotide
auuguaagaaugacuacccacauucac

SEQ ID NO: 16346 - RNA, 27 nt, Artificial Sequence
  Description of Artificial Sequence: Synthetic oligonucleotide
caauuguaagaaugacuacccacauuc

SEQ ID NO: 16347 - RNA, 27 nt, Artificial Sequence
  Description of Artificial Sequence: Synthetic oligonucleotide
guacacucucugaugcucauuuucaua

SEQ ID NO: 16348 - RNA, 27 nt, Artificial Sequence
  Description of Artificial Sequence: Synthetic oligonucleotide
cugcugaguucuacaugaaaagcaaau

SEQ ID NO: 16349 - RNA, 27 nt, Artificial Sequence
  Description of Artificial Sequence: Synthetic oligonucleotide
uacugaaaauaaauauagaaauacaac

SEQ ID NO: 16350 - RNA, 27 nt, Artificial Sequence
  Description of Artificial Sequence: Synthetic oligonucleotide
uuccauuuaagaaacauuaaucaaaac

SEQ ID NO: 16351 - RNA, 27 nt, Artificial Sequence
  Description of Artificial Sequence: Synthetic oligonucleotide
acaauuuuaggcacuauacacguuguu

SEQ ID NO: 16352 - RNA, 27 nt, Artificial Sequence
  Description of Artificial Sequence: Synthetic oligonucleotide
ccagauguuaguagccaaggauauggu

SEQ ID NO: 16353 - RNA, 27 nt, Artificial Sequence
  Description of Artificial Sequence: Synthetic oligonucleotide
agcucacagucuccagauguuaguagc

SEQ ID NO: 16354 - RNA, 27 nt, Artificial Sequence
  Description of Artificial Sequence: Synthetic oligonucleotide
auuaauaaaaagcacacaacuuauggc

SEQ ID NO: 16355 - RNA, 27 nt, Artificial Sequence
  Description of Artificial Sequence: Synthetic oligonucleotide
aauguaagaagagccaaaaugaugcau

SEQ ID NO: 16356 - RNA, 27 nt, Artificial Sequence
  Description of Artificial Sequence: Synthetic oligonucleotide
acauuuuuacaaauguaagaagagcca

SEQ ID NO: 16357 - RNA, 27 nt, Artificial Sequence
  Description of Artificial Sequence: Synthetic oligonucleotide
aauaugaauuaagaugaccuaaucugu

SEQ ID NO: 16358 - RNA, 27 nt, Artificial Sequence
  Description of Artificial Sequence: Synthetic oligonucleotide
ucaugauuaguucuuucaauuccaucc

SEQ ID NO: 16359 - RNA, 27 nt, Artificial Sequence
  Description of Artificial Sequence: Synthetic oligonucleotide
cccaagagcagaaggaaugagugugca

SEQ ID NO: 16360 - RNA, 27 nt, Artificial Sequence
  Description of Artificial Sequence: Synthetic oligonucleotide
cucaaagcuacugguuaccucuacacc

SEQ ID NO: 16361 - RNA, 27 nt, Artificial Sequence
  Description of Artificial Sequence: Synthetic oligonucleotide
ugaaauauuacguggcaugugguuggg

SEQ ID NO: 16362 - RNA, 27 nt, Artificial Sequence
  Description of Artificial Sequence: Synthetic oligonucleotide
agugaagagaauaacuuguuuccgaag

SEQ ID NO: 16363 - RNA, 27 nt, Artificial Sequence
  Description of Artificial Sequence: Synthetic oligonucleotide
uuucuuagcauuaguuauugggaguga

SEQ ID NO: 16364 - RNA, 27 nt, Artificial Sequence
  Description of Artificial Sequence: Synthetic oligonucleotide
uugauuuucagcauuucuuagcauuag

SEQ ID NO: 16365 - RNA, 27 nt, Artificial Sequence
  Description of Artificial Sequence: Synthetic oligonucleotide
aaaguaaucauauuuagagaaagacag

SEQ ID NO: 16366 - RNA, 27 nt, Artificial Sequence
  Description of Artificial Sequence: Synthetic oligonucleotide
uguagaacaaaaugccugaaauucagc

SEQ ID NO: 16367 - RNA, 27 nt, Artificial Sequence
  Description of Artificial Sequence: Synthetic oligonucleotide
gagagucccgggugagagggaaucgcc

SEQ ID NO: 16368 - RNA, 27 nt, Artificial Sequence
  Description of Artificial Sequence: Synthetic oligonucleotide
cuuuacuuuaaagguucacuuuccuug

SEQ ID NO: 16369 - RNA, 27 nt, Artificial Sequence
  Description of Artificial Sequence: Synthetic oligonucleotide
ccaggcuuccagagcaugcagccuccu

SEQ ID NO: 16370 - RNA, 27 nt, Artificial Sequence
  Description of Artificial Sequence: Synthetic oligonucleotide
cucucuuuuguuuucuguucagagaaa

SEQ ID NO: 16371 - RNA, 27 nt, Artificial Sequence
  Description of Artificial Sequence: Synthetic oligonucleotide
cggcauaacugauuacagccaaguuca

SEQ ID NO: 16372 - RNA, 27 nt, Artificial Sequence
  Description of Artificial Sequence: Synthetic oligonucleotide
uggacuucuuuuaauuuuggcuucuuc

SEQ ID NO: 16373 - RNA, 27 nt, Artificial Sequence
  Description of Artificial Sequence: Synthetic oligonucleotide
uaaccucaccuggacuucuuuuaauuu

SEQ ID NO: 16374 - RNA, 27 nt, Artificial Sequence
  Description of Artificial Sequence: Synthetic oligonucleotide
guccucuucccgauaauccggauucag

SEQ ID NO: 16375 - RNA, 27 nt, Artificial Sequence
  Description of Artificial Sequence: Synthetic oligonucleotide
acaauacuugcuuugaugucacauuaa

SEQ ID NO: 16376 - RNA, 27 nt, Artificial Sequence
  Description of Artificial Sequence: Synthetic oligonucleotide
gagugcuacaauacuugcuuugauguc

SEQ ID NO: 16377 - RNA, 27 nt, Artificial Sequence
  Description of Artificial Sequence: Synthetic oligonucleotide
auuugugguuuuguuuucucucucucu

SEQ ID NO: 16378 - RNA, 27 nt, Artificial Sequence
  Description of Artificial Sequence: Synthetic oligonucleotide
uguaugggcuuaaauacuacagcgagg

SEQ ID NO: 16379 - RNA, 27 nt, Artificial Sequence
  Description of Artificial Sequence: Synthetic oligonucleotide
cuguaugggcuuaaauacuacagcgag

SEQ ID NO: 16380 - RNA, 27 nt, Artificial Sequence
  Description of Artificial Sequence: Synthetic oligonucleotide
ggaagguuucuguaugggcuuaaauac

SEQ ID NO: 16381 - RNA, 27 nt, Artificial Sequence
  Description of Artificial Sequence: Synthetic oligonucleotide
guagguauaccauguuuauuuuaauac

SEQ ID NO: 16382 - RNA, 27 nt, Artificial Sequence
  Description of Artificial Sequence: Synthetic oligonucleotide
uccgaaaacuggccgaucagaacagcc

SEQ ID NO: 16383 - RNA, 27 nt, Artificial Sequence
  Description of Artificial Sequence: Synthetic oligonucleotide
cccuguuccaaaguucaaauuauuugu

SEQ ID NO: 16384 - RNA, 27 nt, Artificial Sequence
  Description of Artificial Sequence: Synthetic oligonucleotide
acuggaaaguuaaauuaaggucgcaau

SEQ ID NO: 16385 - RNA, 27 nt, Artificial Sequence
  Description of Artificial Sequence: Synthetic oligonucleotide
caaaaccaaacuuuagcuuucucagcc

SEQ ID NO: 16386 - RNA, 27 nt, Artificial Sequence
  Description of Artificial Sequence: Synthetic oligonucleotide
uacagugggaaguagcaucuuuacuuu

SEQ ID NO: 16387 - RNA, 27 nt, Artificial Sequence
  Description of Artificial Sequence: Synthetic oligonucleotide
ucauaugguaucagcaauuaagcagua

SEQ ID NO: 16388 - RNA, 27 nt, Artificial Sequence
  Description of Artificial Sequence: Synthetic oligonucleotide
cagcccauguuucauucauaugguauc

SEQ ID NO: 16389 - RNA, 27 nt, Artificial Sequence
  Description of Artificial Sequence: Synthetic oligonucleotide
uaugaaaaaguuggauaagaaaguugg

SEQ ID NO: 16390 - RNA, 27 nt, Artificial Sequence
  Description of Artificial Sequence: Synthetic oligonucleotide
uccggccucaugaugucaugcaaggcu

SEQ ID NO: 16391 - RNA, 27 nt, Artificial Sequence
  Description of Artificial Sequence: Synthetic oligonucleotide
acaaaugcagucauauacaaauucagg

SEQ ID NO: 16392 - RNA, 27 nt, Artificial Sequence
  Description of Artificial Sequence: Synthetic oligonucleotide
gguaguaaacauucuacuaggauucuu

SEQ ID NO: 16393 - RNA, 27 nt, Artificial Sequence
  Description of Artificial Sequence: Synthetic oligonucleotide
uuucaucaaaaaauucuucccuuucug

SEQ ID NO: 16394 - RNA, 27 nt, Artificial Sequence
  Description of Artificial Sequence: Synthetic oligonucleotide
aaauucacacacuggcaugccgauagc

SEQ ID NO: 16395 - RNA, 27 nt, Artificial Sequence
  Description of Artificial Sequence: Synthetic oligonucleotide
acauacauugcucuacuaugaggugaa

SEQ ID NO: 16396 - RNA, 27 nt, Artificial Sequence
  Description of Artificial Sequence: Synthetic oligonucleotide
uauauaugugcuuuggcaauucuggug

SEQ ID NO: 16397 - RNA, 27 nt, Artificial Sequence
  Description of Artificial Sequence: Synthetic oligonucleotide
ggagaaacuauuacccagaucaccacu

SEQ ID NO: 16398 - RNA, 27 nt, Artificial Sequence
  Description of Artificial Sequence: Synthetic oligonucleotide
auuuggagaaacuauuacccagaucac

SEQ ID NO: 16399 - RNA, 27 nt, Artificial Sequence
  Description of Artificial Sequence: Synthetic oligonucleotide
uuucuaggaaguauucaucacauccac

SEQ ID NO: 16400 - RNA, 27 nt, Artificial Sequence
  Description of Artificial Sequence: Synthetic oligonucleotide
cauauaugguguagcuguggaaaugcg

SEQ ID NO: 16401 - RNA, 27 nt, Artificial Sequence
  Description of Artificial Sequence: Synthetic oligonucleotide
cuccauucauauaugguguagcugugg

SEQ ID NO: 16402 - RNA, 27 nt, Artificial Sequence
  Description of Artificial Sequence: Synthetic oligonucleotide
aucuucuucucguguaagaacugcagc

SEQ ID NO: 16403 - RNA, 27 nt, Artificial Sequence
  Description of Artificial Sequence: Synthetic oligonucleotide
ucccuguaaaugaucuucuucucgugu

SEQ ID NO: 16404 - RNA, 27 nt, Artificial Sequence
  Description of Artificial Sequence: Synthetic oligonucleotide
gucccuguaaaugaucuucuucucgug

SEQ ID NO: 16405 - RNA, 27 nt, Artificial Sequence
  Description of Artificial Sequence: Synthetic oligonucleotide
ucaggucccuguaaaugaucuucuucu

SEQ ID NO: 16406 - RNA, 27 nt, Artificial Sequence
  Description of Artificial Sequence: Synthetic oligonucleotide
gaugcagucaaacaccucuuccucugu

SEQ ID NO: 16407 - RNA, 27 nt, Artificial Sequence
  Description of Artificial Sequence: Synthetic oligonucleotide
cgaugcagucaaacaccucuuccucug

SEQ ID NO: 16408 - RNA, 27 nt, Artificial Sequence
  Description of Artificial Sequence: Synthetic oligonucleotide
cccugugaacucgcccucaaaguagcg

SEQ ID NO: 16409 - RNA, 27 nt, Artificial Sequence
  Description of Artificial Sequence: Synthetic oligonucleotide
ggacagaggugccaggagaugcccuca

SEQ ID NO: 16410 - RNA, 27 nt, Artificial Sequence
  Description of Artificial Sequence: Synthetic oligonucleotide
uuaaaaagacaaaccauaucacuccuu

SEQ ID NO: 16411 - RNA, 27 nt, Artificial Sequence
  Description of Artificial Sequence: Synthetic oligonucleotide
cuuaaaaagacaaaccauaucacuccu

SEQ ID NO: 16412 - RNA, 27 nt, Artificial Sequence
  Description of Artificial Sequence: Synthetic oligonucleotide
gacaaccuuuaggaucuuuacugcaac

SEQ ID NO: 16413 - RNA, 27 nt, Artificial Sequence
  Description of Artificial Sequence: Synthetic oligonucleotide
gucgacaaccuuuaggaucuuuacugc

SEQ ID NO: 16414 - RNA, 27 nt, Artificial Sequence
  Description of Artificial Sequence: Synthetic oligonucleotide
acaauugccagguuguccuuugucaug

SEQ ID NO: 16415 - RNA, 27 nt, Artificial Sequence
  Description of Artificial Sequence: Synthetic oligonucleotide
ccucgcaccacugggucacaauugcca

SEQ ID NO: 16416 - RNA, 27 nt, Artificial Sequence
  Description of Artificial Sequence: Synthetic oligonucleotide
auuucaugucucuauggaugauguucu

SEQ ID NO: 16417 - RNA, 27 nt, Artificial Sequence
  Description of Artificial Sequence: Synthetic oligonucleotide
uggagaaauauauuguuggauuucaug

SEQ ID NO: 16418 - RNA, 27 nt, Artificial Sequence
  Description of Artificial Sequence: Synthetic oligonucleotide
agccuucauggagaaauauauuguugg

SEQ ID NO: 16419 - RNA, 27 nt, Artificial Sequence
  Description of Artificial Sequence: Synthetic oligonucleotide
accacuccagcgugacuuuacuguugc

SEQ ID NO: 16420 - RNA, 27 nt, Artificial Sequence
  Description of Artificial Sequence: Synthetic oligonucleotide
ccucucuuccuuuacuuucuucacaca

SEQ ID NO: 16421 - RNA, 27 nt, Artificial Sequence
  Description of Artificial Sequence: Synthetic oligonucleotide
gcccgaugcaaggauggcucggaagcg

SEQ ID NO: 16422 - RNA, 27 nt, Artificial Sequence
  Description of Artificial Sequence: Synthetic oligonucleotide
cacaguaggauauucaaccuccauuuc

SEQ ID NO: 16423 - RNA, 27 nt, Artificial Sequence
  Description of Artificial Sequence: Synthetic oligonucleotide
uuacacaguaggauauucaaccuccau

SEQ ID NO: 16424 - RNA, 27 nt, Artificial Sequence
  Description of Artificial Sequence: Synthetic oligonucleotide
uacacuacaagggaaaacucaaaaucu

SEQ ID NO: 16425 - RNA, 27 nt, Artificial Sequence
  Description of Artificial Sequence: Synthetic oligonucleotide
caaucaacaaagaacaaacaggauaaa

SEQ ID NO: 16426 - RNA, 27 nt, Artificial Sequence
  Description of Artificial Sequence: Synthetic oligonucleotide
uuucaaucaacaaagaacaaacaggau

SEQ ID NO: 16427 - RNA, 27 nt, Artificial Sequence
  Description of Artificial Sequence: Synthetic oligonucleotide
auggaagaaaaagaaggcuguagagaa

SEQ ID NO: 16428 - RNA, 27 nt, Artificial Sequence
  Description of Artificial Sequence: Synthetic oligonucleotide
uagaaggaagauuagcuauggaagaaa

SEQ ID NO: 16429 - RNA, 27 nt, Artificial Sequence
  Description of Artificial Sequence: Synthetic oligonucleotide
augaagcauucaacaggaagauuauuu

SEQ ID NO: 16430 - RNA, 27 nt, Artificial Sequence
  Description of Artificial Sequence: Synthetic oligonucleotide
caugaagcauucaacaggaagauuauu

SEQ ID NO: 16431 - RNA, 27 nt, Artificial Sequence
  Description of Artificial Sequence: Synthetic oligonucleotide
ucaaaguagaauucaagucaugaagca

SEQ ID NO: 16432 - RNA, 27 nt, Artificial Sequence
  Description of Artificial Sequence: Synthetic oligonucleotide
gucuguaguugcuucucucccucuuag

SEQ ID NO: 16433 - RNA, 27 nt, Artificial Sequence
  Description of Artificial Sequence: Synthetic oligonucleotide
guugaccuuggucugguaggagacggc

SEQ ID NO: 16434 - RNA, 27 nt, Artificial Sequence
  Description of Artificial Sequence: Synthetic oligonucleotide
gucgagauagucgggccgauugaucuc

SEQ ID NO: 16435 - RNA, 27 nt, Artificial Sequence
  Description of Artificial Sequence: Synthetic oligonucleotide
guuugggaagguuggauguucguccuc

SEQ ID NO: 16436 - RNA, 27 nt, Artificial Sequence
  Description of Artificial Sequence: Synthetic oligonucleotide
aguucuaagcuuggguuccgacccuaa

SEQ ID NO: 16437 - RNA, 27 nt, Artificial Sequence
  Description of Artificial Sequence: Synthetic oligonucleotide
uuaaaguucuaagcuuggguuccgacc

SEQ ID NO: 16438 - RNA, 27 nt, Artificial Sequence
  Description of Artificial Sequence: Synthetic oligonucleotide
guugcuuaaaguucuaagcuuggguuc

SEQ ID NO: 16439 - RNA, 27 nt, Artificial Sequence
  Description of Artificial Sequence: Synthetic oligonucleotide
gugguggucuuguugcuuaaaguucua

SEQ ID NO: 16440 - RNA, 27 nt, Artificial Sequence
  Description of Artificial Sequence: Synthetic oligonucleotide
acuuuauuucucgccacugaauaguag

SEQ ID NO: 16441 - RNA, 27 nt, Artificial Sequence
  Description of Artificial Sequence: Synthetic oligonucleotide
aacuuuauuucucgccacugaauagua

SEQ ID NO: 16442 - RNA, 27 nt, Artificial Sequence
  Description of Artificial Sequence: Synthetic oligonucleotide
ggaucauuuccuguuaucuguguuugu

SEQ ID NO: 16443 - RNA, 27 nt, Artificial Sequence
  Description of Artificial Sequence: Synthetic oligonucleotide
guuucauuucuucucuuuucuuaaggc

SEQ ID NO: 16444 - RNA, 27 nt, Artificial Sequence
  Description of Artificial Sequence: Synthetic oligonucleotide
ggaggauggaaacacacuccuucaguu

SEQ ID NO: 16445 - RNA, 27 nt, Artificial Sequence
  Description of Artificial Sequence: Synthetic oligonucleotide
ucaaagauuuucagucccgcggugaca

SEQ ID NO: 16446 - RNA, 27 nt, Artificial Sequence
  Description of Artificial Sequence: Synthetic oligonucleotide
ccugaacggcacgcuuauuucugcugu

SEQ ID NO: 16447 - RNA, 27 nt, Artificial Sequence
  Description of Artificial Sequence: Synthetic oligonucleotide
cuucuggacccugaacggcacgcuuau

SEQ ID NO: 16448 - RNA, 27 nt, Artificial Sequence
  Description of Artificial Sequence: Synthetic oligonucleotide
caagcagucuugagugacuguuucuuc

SEQ ID NO: 16449 - RNA, 27 nt, Artificial Sequence
  Description of Artificial Sequence: Synthetic oligonucleotide
ccaaagacauggaccuucuuccucuga

SEQ ID NO: 16450 - RNA, 27 nt, Artificial Sequence
  Description of Artificial Sequence: Synthetic oligonucleotide
guguuucaggcauauuuugaauacauc

SEQ ID NO: 16451 - RNA, 27 nt, Artificial Sequence
  Description of Artificial Sequence: Synthetic oligonucleotide
gagguacagagaaagggaggaaaauag

SEQ ID NO: 16452 - RNA, 27 nt, Artificial Sequence
  Description of Artificial Sequence: Synthetic oligonucleotide
ucuugucuugcucuaucuuucuuuggu

SEQ ID NO: 16453 - RNA, 27 nt, Artificial Sequence
  Description of Artificial Sequence: Synthetic oligonucleotide
uuucuugucuugcucuaucuuucuuug

SEQ ID NO: 16454 - RNA, 27 nt, Artificial Sequence
  Description of Artificial Sequence: Synthetic oligonucleotide
ggaucuuguacaaacaaaugcuuucuc

SEQ ID NO: 16455 - RNA, 27 nt, Artificial Sequence
  Description of Artificial Sequence: Synthetic oligonucleotide
ucugcaaguacguucguuuaacucaag

SEQ ID NO: 16456 - RNA, 27 nt, Artificial Sequence
  Description of Artificial Sequence: Synthetic oligonucleotide
ucuguaucgaucguucuguaucagucu

SEQ ID NO: 16457 - RNA, 27 nt, Artificial Sequence
  Description of Artificial Sequence: Synthetic oligonucleotide
auuuauuuuuauauauauauaauauau

SEQ ID NO: 16458 - RNA, 27 nt, Artificial Sequence
  Description of Artificial Sequence: Synthetic oligonucleotide
auauuuauuuuuauauauauauaauau

SEQ ID NO: 16459 - RNA, 27 nt, Artificial Sequence
  Description of Artificial Sequence: Synthetic oligonucleotide
cacagcagucaaauacauccagugaag

SEQ ID NO: 16460 - RNA, 27 nt, Artificial Sequence
  Description of Artificial Sequence: Synthetic oligonucleotide
gucucucaucuccuccucuucccuguc

SEQ ID NO: 16461 - RNA, 27 nt, Artificial Sequence
  Description of Artificial Sequence: Synthetic oligonucleotide
ccaagugggacaaaaaaaagaucaugc

SEQ ID NO: 16462 - RNA, 14 nt, Artificial Sequence
  Description of Artificial Sequence: Synthetic oligonucleotide
guauuuugaugagg

SEQ ID NO: 16463 - RNA, 12 nt, Artificial Sequence
  Description of Artificial Sequence: Synthetic oligonucleotide
ggcccagaugau

SEQ ID NO: 16464 - RNA, 14 nt, Artificial Sequence
  Description of Artificial Sequence: Synthetic oligonucleotide
gggaagaaaacuau

SEQ ID NO: 16465 - RNA, 15 nt, Artificial Sequence
  Description of Artificial Sequence: Synthetic oligonucleotide
guuuuaauuuauuuc

SEQ ID NO: 16466 - RNA, 12 nt, Artificial Sequence
  Description of Artificial Sequence: Synthetic oligonucleotide
acguagggaaau

SEQ ID NO: 16467 - RNA, 12 nt, Artificial Sequence
  Description of Artificial Sequence: Synthetic oligonucleotide
ccaggguuuacc

SEQ ID NO: 16468 - RNA, 11 nt, Artificial Sequence
  Description of Artificial Sequence: Synthetic oligonucleotide
agcaagguuua

SEQ ID NO: 16469 - RNA, 12 nt, Artificial Sequence
  Description of Artificial Sequence: Synthetic oligonucleotide
uguauuauguug

SEQ ID NO: 16470 - RNA, 15 nt, Artificial Sequence
  Description of Artificial Sequence: Synthetic oligonucleotide
uuuuaaucuuuguga

SEQ ID NO: 16471 - RNA, 14 nt, Artificial Sequence
  Description of Artificial Sequence: Synthetic oligonucleotide
uuaaucuuugugac

SEQ ID NO: 16472 - RNA, 13 nt, Artificial Sequence
  Description of Artificial Sequence: Synthetic oligonucleotide
gcugcuuaugucu

SEQ ID NO: 16473 - RNA, 14 nt, Artificial Sequence
  Description of Artificial Sequence: Synthetic oligonucleotide
aaguguuucagaag

SEQ ID NO: 16474 - RNA, 13 nt, Artificial Sequence
  Description of Artificial Sequence: Synthetic oligonucleotide
gaccaucaauaag

SEQ ID NO: 16475 - RNA, 13 nt, Artificial Sequence
  Description of Artificial Sequence: Synthetic oligonucleotide
ccaucaauaagga

SEQ ID NO: 16476 - RNA, 14 nt, Artificial Sequence
  Description of Artificial Sequence: Synthetic oligonucleotide
ucaauaaggaagaa

SEQ ID NO: 16477 - RNA, 14 nt, Artificial Sequence
  Description of Artificial Sequence: Synthetic oligonucleotide
aauaaggaagaagc

SEQ ID NO: 16478 - RNA, 13 nt, Artificial Sequence
  Description of Artificial Sequence: Synthetic oligonucleotide
aggaagaagcccu

SEQ ID NO: 16479 - RNA, 13 nt, Artificial Sequence
  Description of Artificial Sequence: Synthetic oligonucleotide
gcauaacuaaagg

SEQ ID NO: 16480 - RNA, 14 nt, Artificial Sequence
  Description of Artificial Sequence: Synthetic oligonucleotide
cauaacuaaaggug

SEQ ID NO: 16481 - RNA, 12 nt, Artificial Sequence
  Description of Artificial Sequence: Synthetic oligonucleotide
cuacaucacgcc

SEQ ID NO: 16482 - RNA, 12 nt, Artificial Sequence
  Description of Artificial Sequence: Synthetic oligonucleotide
acuggauuuaag

SEQ ID NO: 16483 - RNA, 12 nt, Artificial Sequence
  Description of Artificial Sequence: Synthetic oligonucleotide
cuggauuuaagc

SEQ ID NO: 16484 - RNA, 13 nt, Artificial Sequence
  Description of Artificial Sequence: Synthetic oligonucleotide
gauuuaagcagag

SEQ ID NO: 16485 - RNA, 13 nt, Artificial Sequence
  Description of Artificial Sequence: Synthetic oligonucleotide
auuuaagcagagu

SEQ ID NO: 16486 - RNA, 13 nt, Artificial Sequence
  Description of Artificial Sequence: Synthetic oligonucleotide
uuaagcagaguuc

SEQ ID NO: 16487 - RNA, 13 nt, Artificial Sequence
  Description of Artificial Sequence: Synthetic oligonucleotide
uaagcagaguuca

SEQ ID NO: 16488 - RNA, 14 nt, Artificial Sequence
  Description of Artificial Sequence: Synthetic oligonucleotide
agcagaguucaaaa

SEQ ID NO: 16489 - RNA, 12 nt, Artificial Sequence
  Description of Artificial Sequence: Synthetic oligonucleotide
cucagggucuga

SEQ ID NO: 16490 - RNA, 13 nt, Artificial Sequence
  Description of Artificial Sequence: Synthetic oligonucleotide
caagcaacuacau

SEQ ID NO: 16491 - RNA, 12 nt, Artificial Sequence
  Description of Artificial Sequence: Synthetic oligonucleotide
aucaauggcagc

SEQ ID NO: 16492 - RNA, 11 nt, Artificial Sequence
  Description of Artificial Sequence: Synthetic oligonucleotide
uuccagcccac

SEQ ID NO: 16493 - RNA, 12 nt, Artificial Sequence
  Description of Artificial Sequence: Synthetic oligonucleotide
cagcugagaaug

SEQ ID NO: 16494 - RNA, 13 nt, Artificial Sequence
  Description of Artificial Sequence: Synthetic oligonucleotide
aacguaucuccua

SEQ ID NO: 16495 - RNA, 14 nt, Artificial Sequence
  Description of Artificial Sequence: Synthetic oligonucleotide
ccuaaaauaauuuc

SEQ ID NO: 16496 - RNA, 13 nt, Artificial Sequence
  Description of Artificial Sequence: Synthetic oligonucleotide
uggaagauucagc

SEQ ID NO: 16497 - RNA, 12 nt, Artificial Sequence
  Description of Artificial Sequence: Synthetic oligonucleotide
uuaaacucuccu

SEQ ID NO: 16498 - RNA, 12 nt, Artificial Sequence
  Description of Artificial Sequence: Synthetic oligonucleotide
cagccuacaguu

SEQ ID NO: 16499 - RNA, 13 nt, Artificial Sequence
  Description of Artificial Sequence: Synthetic oligonucleotide
guuauguucaguc

SEQ ID NO: 16500 - RNA, 13 nt, Artificial Sequence
  Description of Artificial Sequence: Synthetic oligonucleotide
cacauacaaaaug

SEQ ID NO: 16501 - RNA, 9 nt, Artificial Sequence
  Description of Artificial Sequence: Synthetic oligonucleotide
uccuuuugc

SEQ ID NO: 16502 - RNA, 12 nt, Artificial Sequence
  Description of Artificial Sequence: Synthetic oligonucleotide
ugaccugugaag

SEQ ID NO: 16503 - RNA, 12 nt, Artificial Sequence
  Description of Artificial Sequence: Synthetic oligonucleotide
cuaucucacaca

SEQ ID NO: 16504 - RNA, 13 nt, Artificial Sequence
  Description of Artificial Sequence: Synthetic oligonucleotide
uguccucaauugu

SEQ ID NO: 16505 - RNA, 12 nt, Artificial Sequence
  Description of Artificial Sequence: Synthetic oligonucleotide
aaaccguagcug

SEQ ID NO: 16506 - RNA, 12 nt, Artificial Sequence
  Description of Artificial Sequence: Synthetic oligonucleotide
uagcuggcaagc

SEQ ID NO: 16507 - RNA, 14 nt, Artificial Sequence
  Description of Artificial Sequence: Synthetic oligonucleotide
uuguaugguuaaaa

SEQ ID NO: 16508 - RNA, 14 nt, Artificial Sequence
  Description of Artificial Sequence: Synthetic oligonucleotide
ugguuaaaagaugg

SEQ ID NO: 16509 - RNA, 13 nt, Artificial Sequence
  Description of Artificial Sequence: Synthetic oligonucleotide
cagggaauuauac

SEQ ID NO: 16510 - RNA, 12 nt, Artificial Sequence
  Description of Artificial Sequence: Synthetic oligonucleotide
acaaucuugcug

SEQ ID NO: 16511 - RNA, 13 nt, Artificial Sequence
  Description of Artificial Sequence: Synthetic oligonucleotide
ccaauaaugaaga

SEQ ID NO: 16512 - RNA, 13 nt, Artificial Sequence
  Description of Artificial Sequence: Synthetic oligonucleotide
acuuuggauguuc

SEQ ID NO: 16513 - RNA, 12 nt, Artificial Sequence
  Description of Artificial Sequence: Synthetic oligonucleotide
aaugcuuccacu

SEQ ID NO: 16514 - RNA, 11 nt, Artificial Sequence
  Description of Artificial Sequence: Synthetic oligonucleotide
gagaaaguuug

SEQ ID NO: 16515 - RNA, 11 nt, Artificial Sequence
  Description of Artificial Sequence: Synthetic oligonucleotide
aaagaacuacu

SEQ ID NO: 16516 - RNA, 12 nt, Artificial Sequence
  Description of Artificial Sequence: Synthetic oligonucleotide
uuagaaauacgg

SEQ ID NO: 16517 - RNA, 12 nt, Artificial Sequence
  Description of Artificial Sequence: Synthetic oligonucleotide
aacauggguaca

SEQ ID NO: 16518 - RNA, 14 nt, Artificial Sequence
  Description of Artificial Sequence: Synthetic oligonucleotide
aaagacacagaaga

SEQ ID NO: 16519 - RNA, 11 nt, Artificial Sequence
  Description of Artificial Sequence: Synthetic oligonucleotide
uaguagggagg

SEQ ID NO: 16520 - RNA, 12 nt, Artificial Sequence
  Description of Artificial Sequence: Synthetic oligonucleotide
gccuucugcagc

SEQ ID NO: 16521 - RNA, 10 nt, Artificial Sequence
  Description of Artificial Sequence: Synthetic oligonucleotide
ggucugguac

SEQ ID NO: 16522 - RNA, 12 nt, Artificial Sequence
  Description of Artificial Sequence: Synthetic oligonucleotide
cuaguccuuccg

SEQ ID NO: 16523 - RNA, 12 nt, Artificial Sequence
  Description of Artificial Sequence: Synthetic oligonucleotide
ccagugaauauu

SEQ ID NO: 16524 - RNA, 13 nt, Artificial Sequence
  Description of Artificial Sequence: Synthetic oligonucleotide
augaauucaaguu

SEQ ID NO: 16525 - RNA, 12 nt, Artificial Sequence
  Description of Artificial Sequence: Synthetic oligonucleotide
caggacacagau

SEQ ID NO: 16526 - RNA, 12 nt, Artificial Sequence
  Description of Artificial Sequence: Synthetic oligonucleotide
cucaaagcacag

SEQ ID NO: 16527 - RNA, 10 nt, Artificial Sequence
  Description of Artificial Sequence: Synthetic oligonucleotide
accacugcca

SEQ ID NO: 16528 - RNA, 13 nt, Artificial Sequence
  Description of Artificial Sequence: Synthetic oligonucleotide
gaaacuacuagug

SEQ ID NO: 16529 - RNA, 12 nt, Artificial Sequence
  Description of Artificial Sequence: Synthetic oligonucleotide
aagucggacagc

SEQ ID NO: 16530 - RNA, 13 nt, Artificial Sequence
  Description of Artificial Sequence: Synthetic oligonucleotide
gaaagcgaaaaau

SEQ ID NO: 16531 - RNA, 13 nt, Artificial Sequence
  Description of Artificial Sequence: Synthetic oligonucleotide
cccucugauuuag

SEQ ID NO: 16532 - RNA, 12 nt, Artificial Sequence
  Description of Artificial Sequence: Synthetic oligonucleotide
ugagcuauuuaa

SEQ ID NO: 16533 - RNA, 13 nt, Artificial Sequence
  Description of Artificial Sequence: Synthetic oligonucleotide
aaaaggugaaaaa

SEQ ID NO: 16534 - RNA, 14 nt, Artificial Sequence
  Description of Artificial Sequence: Synthetic oligonucleotide
gaaaaagcacuauu

SEQ ID NO: 16535 - RNA, 12 nt, Artificial Sequence
  Description of Artificial Sequence: Synthetic oligonucleotide
ggcugaaaagaa

SEQ ID NO: 16536 - RNA, 12 nt, Artificial Sequence
  Description of Artificial Sequence: Synthetic oligonucleotide
uaaacccuuaua

SEQ ID NO: 16537 - RNA, 13 nt, Artificial Sequence
  Description of Artificial Sequence: Synthetic oligonucleotide
cauacuauuagcc

SEQ ID NO: 16538 - RNA, 12 nt, Artificial Sequence
  Description of Artificial Sequence: Synthetic oligonucleotide
gacagaagcauu

SEQ ID NO: 16539 - RNA, 14 nt, Artificial Sequence
  Description of Artificial Sequence: Synthetic oligonucleotide
agagcaaauaagau

SEQ ID NO: 16540 - RNA, 14 nt, Artificial Sequence
  Description of Artificial Sequence: Synthetic oligonucleotide
ccaacauuuuucuc

SEQ ID NO: 16541 - RNA, 15 nt, Artificial Sequence
  Description of Artificial Sequence: Synthetic oligonucleotide
uuaaguaugagaaaa

SEQ ID NO: 16542 - RNA, 14 nt, Artificial Sequence
  Description of Artificial Sequence: Synthetic oligonucleotide
caggaauaaagaug

SEQ ID NO: 16543 - RNA, 13 nt, Artificial Sequence
  Description of Artificial Sequence: Synthetic oligonucleotide
aauuugaaugacc

SEQ ID NO: 16544 - RNA, 14 nt, Artificial Sequence
  Description of Artificial Sequence: Synthetic oligonucleotide
auguauaaagauag

SEQ ID NO: 16545 - RNA, 12 nt, Artificial Sequence
  Description of Artificial Sequence: Synthetic oligonucleotide
ggcuguaacuau

SEQ ID NO: 16546 - RNA, 11 nt, Artificial Sequence
  Description of Artificial Sequence: Synthetic oligonucleotide
ucugugaagug

SEQ ID NO: 16547 - RNA, 14 nt, Artificial Sequence
  Description of Artificial Sequence: Synthetic oligonucleotide
ccuuuaaggaaaug

SEQ ID NO: 16548 - RNA, 13 nt, Artificial Sequence
  Description of Artificial Sequence: Synthetic oligonucleotide
aaggauacaaaaa

SEQ ID NO: 16549 - RNA, 12 nt, Artificial Sequence
  Description of Artificial Sequence: Synthetic oligonucleotide
agaugcaauuug

SEQ ID NO: 16550 - RNA, 12 nt, Artificial Sequence
  Description of Artificial Sequence: Synthetic oligonucleotide
guucaaaacgaa

SEQ ID NO: 16551 - RNA, 11 nt, Artificial Sequence
  Description of Artificial Sequence: Synthetic oligonucleotide
gugaaaccuca

SEQ ID NO: 16552 - RNA, 13 nt, Artificial Sequence
  Description of Artificial Sequence: Synthetic oligonucleotide
acgaaagagaagc

SEQ ID NO: 16553 - RNA, 12 nt, Artificial Sequence
  Description of Artificial Sequence: Synthetic oligonucleotide
cuccacaagcgc

SEQ ID NO: 16554 - RNA, 14 nt, Artificial Sequence
  Description of Artificial Sequence: Synthetic oligonucleotide
gagaagauuccaaa

SEQ ID NO: 16555 - RNA, 13 nt, Artificial Sequence
  Description of Artificial Sequence: Synthetic oligonucleotide
aaucuggauucaa

SEQ ID NO: 16556 - RNA, 13 nt, Artificial Sequence
  Description of Artificial Sequence: Synthetic oligonucleotide
agaacagauuuga

SEQ ID NO: 16557 - RNA, 11 nt, Artificial Sequence
  Description of Artificial Sequence: Synthetic oligonucleotide
ccagagcugug

SEQ ID NO: 16558 - RNA, 12 nt, Artificial Sequence
  Description of Artificial Sequence: Synthetic oligonucleotide
ccucagauuguu

SEQ ID NO: 16559 - RNA, 12 nt, Artificial Sequence
  Description of Artificial Sequence: Synthetic oligonucleotide
cuauuuuaauua

SEQ ID NO: 16560 - RNA, 13 nt, Artificial Sequence
  Description of Artificial Sequence: Synthetic oligonucleotide
uuuaauuuauuaa

SEQ ID NO: 16561 - RNA, 12 nt, Artificial Sequence
  Description of Artificial Sequence: Synthetic oligonucleotide
augcaguuugaa

SEQ ID NO: 16562 - RNA, 11 nt, Artificial Sequence
  Description of Artificial Sequence: Synthetic oligonucleotide
caugcugcugg

SEQ ID NO: 16563 - RNA, 13 nt, Artificial Sequence
  Description of Artificial Sequence: Synthetic oligonucleotide
agaugugcauuuc

SEQ ID NO: 16564 - RNA, 12 nt, Artificial Sequence
  Description of Artificial Sequence: Synthetic oligonucleotide
ucaaaaccugug

SEQ ID NO: 16565 - RNA, 11 nt, Artificial Sequence
  Description of Artificial Sequence: Synthetic oligonucleotide
gaaugugggua

SEQ ID NO: 16566 - RNA, 10 nt, Artificial Sequence
  Description of Artificial Sequence: Synthetic oligonucleotide
auguggguag

SEQ ID NO: 16567 - RNA, 13 nt, Artificial Sequence
  Description of Artificial Sequence: Synthetic oligonucleotide
ugaaaaugagcau

SEQ ID NO: 16568 - RNA, 13 nt, Artificial Sequence
  Description of Artificial Sequence: Synthetic oligonucleotide
uugcuuuucaugu

SEQ ID NO: 16569 - RNA, 12 nt, Artificial Sequence
  Description of Artificial Sequence: Synthetic oligonucleotide
uguauuucuaua

SEQ ID NO: 16570 - RNA, 13 nt, Artificial Sequence
  Description of Artificial Sequence: Synthetic oligonucleotide
uuugauuaauguu

SEQ ID NO: 16571 - RNA, 12 nt, Artificial Sequence
  Description of Artificial Sequence: Synthetic oligonucleotide
caacguguauag

SEQ ID NO: 16572 - RNA, 12 nt, Artificial Sequence
  Description of Artificial Sequence: Synthetic oligonucleotide
cauauccuuggc

SEQ ID NO: 16573 - RNA, 13 nt, Artificial Sequence
  Description of Artificial Sequence: Synthetic oligonucleotide
uacuaacaucugg

SEQ ID NO: 16574 - RNA, 11 nt, Artificial Sequence
  Description of Artificial Sequence: Synthetic oligonucleotide
cauaaguugug

SEQ ID NO: 16575 - RNA, 12 nt, Artificial Sequence
  Description of Artificial Sequence: Synthetic oligonucleotide
gcaucauuuugg

SEQ ID NO: 16576 - RNA, 10 nt, Artificial Sequence
  Description of Artificial Sequence: Synthetic oligonucleotide
gcucuucuua

SEQ ID NO: 16577 - RNA, 10 nt, Artificial Sequence
  Description of Artificial Sequence: Synthetic oligonucleotide
agauuagguc

SEQ ID NO: 16578 - RNA, 12 nt, Artificial Sequence
  Description of Artificial Sequence: Synthetic oligonucleotide
auggaauugaaa

SEQ ID NO: 16579 - RNA, 13 nt, Artificial Sequence
  Description of Artificial Sequence: Synthetic oligonucleotide
cacacucauuccu

SEQ ID NO: 16580 - RNA, 12 nt, Artificial Sequence
  Description of Artificial Sequence: Synthetic oligonucleotide
uguagagguaac

SEQ ID NO: 16581 - RNA, 11 nt, Artificial Sequence
  Description of Artificial Sequence: Synthetic oligonucleotide
caaccacaugc

SEQ ID NO: 16582 - RNA, 12 nt, Artificial Sequence
  Description of Artificial Sequence: Synthetic oligonucleotide
ucggaaacaagu

SEQ ID NO: 16583 - RNA, 11 nt, Artificial Sequence
  Description of Artificial Sequence: Synthetic oligonucleotide
acucccaauaa

SEQ ID NO: 16584 - RNA, 13 nt, Artificial Sequence
  Description of Artificial Sequence: Synthetic oligonucleotide
aaugcuaagaaau

SEQ ID NO: 16585 - RNA, 11 nt, Artificial Sequence
  Description of Artificial Sequence: Synthetic oligonucleotide
gucuuucucua

SEQ ID NO: 16586 - RNA, 11 nt, Artificial Sequence
  Description of Artificial Sequence: Synthetic oligonucleotide
ugaauuucagg

SEQ ID NO: 16587 - RNA, 13 nt, Artificial Sequence
  Description of Artificial Sequence: Synthetic oligonucleotide
cgauucccucuca

SEQ ID NO: 16588 - RNA, 11 nt, Artificial Sequence
  Description of Artificial Sequence: Synthetic oligonucleotide
aggaaagugaa

SEQ ID NO: 16589 - RNA, 12 nt, Artificial Sequence
  Description of Artificial Sequence: Synthetic oligonucleotide
gaggcugcaugc

SEQ ID NO: 16590 - RNA, 11 nt, Artificial Sequence
  Description of Artificial Sequence: Synthetic oligonucleotide
ucucugaacag

SEQ ID NO: 16591 - RNA, 12 nt, Artificial Sequence
  Description of Artificial Sequence: Synthetic oligonucleotide
aacuuggcugua

SEQ ID NO: 16592 - RNA, 12 nt, Artificial Sequence
  Description of Artificial Sequence: Synthetic oligonucleotide
agaagccaaaau

SEQ ID NO: 16593 - RNA, 14 nt, Artificial Sequence
  Description of Artificial Sequence: Synthetic oligonucleotide
auuaaaagaagucc

SEQ ID NO: 16594 - RNA, 14 nt, Artificial Sequence
  Description of Artificial Sequence: Synthetic oligonucleotide
gaauccggauuauc

SEQ ID NO: 16595 - RNA, 12 nt, Artificial Sequence
  Description of Artificial Sequence: Synthetic oligonucleotide
aaugugacauca

SEQ ID NO: 16596 - RNA, 13 nt, Artificial Sequence
  Description of Artificial Sequence: Synthetic oligonucleotide
caucaaagcaagu

SEQ ID NO: 16597 - RNA, 11 nt, Artificial Sequence
  Description of Artificial Sequence: Synthetic oligonucleotide
agagagagaaa

SEQ ID NO: 16598 - RNA, 13 nt, Artificial Sequence
  Description of Artificial Sequence: Synthetic oligonucleotide
ucgcuguaguauu

SEQ ID NO: 16599 - RNA, 14 nt, Artificial Sequence
  Description of Artificial Sequence: Synthetic oligonucleotide
cgcuguaguauuua

SEQ ID NO: 16600 - RNA, 13 nt, Artificial Sequence
  Description of Artificial Sequence: Synthetic oligonucleotide
auuuaagcccaua

SEQ ID NO: 16601 - RNA, 15 nt, Artificial Sequence
  Description of Artificial Sequence: Synthetic oligonucleotide
auuaaaauaaacaug

SEQ ID NO: 16602 - RNA, 12 nt, Artificial Sequence
  Description of Artificial Sequence: Synthetic oligonucleotide
cuguucugaucg

SEQ ID NO: 16603 - RNA, 16 nt, Artificial Sequence
  Description of Artificial Sequence: Synthetic oligonucleotide
aaauaauuugaacuuu

SEQ ID NO: 16604 - RNA, 12 nt, Artificial Sequence
  Description of Artificial Sequence: Synthetic oligonucleotide
ugcgaccuuaau

SEQ ID NO: 16605 - RNA, 11 nt, Artificial Sequence
  Description of Artificial Sequence: Synthetic oligonucleotide
cugagaaagcu

SEQ ID NO: 16606 - RNA, 13 nt, Artificial Sequence
  Description of Artificial Sequence: Synthetic oligonucleotide
aguaaagaugcua

SEQ ID NO: 16607 - RNA, 12 nt, Artificial Sequence
  Description of Artificial Sequence: Synthetic oligonucleotide
cugcuuaauugc

SEQ ID NO: 16608 - RNA, 14 nt, Artificial Sequence
  Description of Artificial Sequence: Synthetic oligonucleotide
uaccauaugaauga

SEQ ID NO: 16609 - RNA, 12 nt, Artificial Sequence
  Description of Artificial Sequence: Synthetic oligonucleotide
aacuuucuuauc

SEQ ID NO: 16610 - RNA, 13 nt, Artificial Sequence
  Description of Artificial Sequence: Synthetic oligonucleotide
ccuugcaugacau

SEQ ID NO: 16611 - RNA, 14 nt, Artificial Sequence
  Description of Artificial Sequence: Synthetic oligonucleotide
ugaauuuguauaug

SEQ ID NO: 16612 - RNA, 12 nt, Artificial Sequence
  Description of Artificial Sequence: Synthetic oligonucleotide
gaauccuaguag

SEQ ID NO: 16613 - RNA, 10 nt, Artificial Sequence
  Description of Artificial Sequence: Synthetic oligonucleotide
gaaagggaag

SEQ ID NO: 16614 - RNA, 11 nt, Artificial Sequence
  Description of Artificial Sequence: Synthetic oligonucleotide
uaucggcaugc

SEQ ID NO: 16615 - RNA, 12 nt, Artificial Sequence
  Description of Artificial Sequence: Synthetic oligonucleotide
caccucauagua

SEQ ID NO: 16616 - RNA, 11 nt, Artificial Sequence
  Description of Artificial Sequence: Synthetic oligonucleotide
ccagaauugcc

SEQ ID NO: 16617 - RNA, 11 nt, Artificial Sequence
  Description of Artificial Sequence: Synthetic oligonucleotide
uggugaucugg

SEQ ID NO: 16618 - RNA, 12 nt, Artificial Sequence
  Description of Artificial Sequence: Synthetic oligonucleotide
gaucuggguaau

SEQ ID NO: 16619 - RNA, 12 nt, Artificial Sequence
  Description of Artificial Sequence: Synthetic oligonucleotide
ggaugugaugaa

SEQ ID NO: 16620 - RNA, 12 nt, Artificial Sequence
  Description of Artificial Sequence: Synthetic oligonucleotide
cauuuccacagc

SEQ ID NO: 16621 - RNA, 11 nt, Artificial Sequence
  Description of Artificial Sequence: Synthetic oligonucleotide
acagcuacacc

SEQ ID NO: 16622 - RNA, 12 nt, Artificial Sequence
  Description of Artificial Sequence: Synthetic oligonucleotide
ugcaguucuuac

SEQ ID NO: 16623 - RNA, 12 nt, Artificial Sequence
  Description of Artificial Sequence: Synthetic oligonucleotide
acgagaagaaga

SEQ ID NO: 16624 - RNA, 12 nt, Artificial Sequence
  Description of Artificial Sequence: Synthetic oligonucleotide
cgagaagaagau

SEQ ID NO: 16625 - RNA, 15 nt, Artificial Sequence
  Description of Artificial Sequence: Synthetic oligonucleotide
aagaagaucauuuac

SEQ ID NO: 16626 - RNA, 11 nt, Artificial Sequence
  Description of Artificial Sequence: Synthetic oligonucleotide
agaggaagagg

SEQ ID NO: 16627 - RNA, 12 nt, Artificial Sequence
  Description of Artificial Sequence: Synthetic oligonucleotide
gaggaagaggug

SEQ ID NO: 16628 - RNA, 13 nt, Artificial Sequence
  Description of Artificial Sequence: Synthetic oligonucleotide
cuacuuugagggc

SEQ ID NO: 16629 - RNA, 12 nt, Artificial Sequence
  Description of Artificial Sequence: Synthetic oligonucleotide
agggcaucuccu

SEQ ID NO: 16630 - RNA, 10 nt, Artificial Sequence
  Description of Artificial Sequence: Synthetic oligonucleotide
ggagugauau

SEQ ID NO: 16631 - RNA, 11 nt, Artificial Sequence
  Description of Artificial Sequence: Synthetic oligonucleotide
gagugauaugg

SEQ ID NO: 16632 - RNA, 12 nt, Artificial Sequence
  Description of Artificial Sequence: Synthetic oligonucleotide
ugcaguaaagau

SEQ ID NO: 16633 - RNA, 13 nt, Artificial Sequence
  Description of Artificial Sequence: Synthetic oligonucleotide
aguaaagauccua

SEQ ID NO: 16634 - RNA, 12 nt, Artificial Sequence
  Description of Artificial Sequence: Synthetic oligonucleotide
ugacaaaggaca

SEQ ID NO: 16635 - RNA, 13 nt, Artificial Sequence
  Description of Artificial Sequence: Synthetic oligonucleotide
gcaauugugaccc

SEQ ID NO: 16636 - RNA, 12 nt, Artificial Sequence
  Description of Artificial Sequence: Synthetic oligonucleotide
aacaucauccau

SEQ ID NO: 16637 - RNA, 12 nt, Artificial Sequence
  Description of Artificial Sequence: Synthetic oligonucleotide
ugaaauccaaca

SEQ ID NO: 16638 - RNA, 15 nt, Artificial Sequence
  Description of Artificial Sequence: Synthetic oligonucleotide
aacaauauauuucuc

SEQ ID NO: 16639 - RNA, 14 nt, Artificial Sequence
  Description of Artificial Sequence: Synthetic oligonucleotide
aacaguaaagucac

SEQ ID NO: 16640 - RNA, 14 nt, Artificial Sequence
  Description of Artificial Sequence: Synthetic oligonucleotide
ugugaagaaaguaa

SEQ ID NO: 16641 - RNA, 13 nt, Artificial Sequence
  Description of Artificial Sequence: Synthetic oligonucleotide
cuuccgagccauc

SEQ ID NO: 16642 - RNA, 12 nt, Artificial Sequence
  Description of Artificial Sequence: Synthetic oligonucleotide
aauggagguuga

SEQ ID NO: 16643 - RNA, 12 nt, Artificial Sequence
  Description of Artificial Sequence: Synthetic oligonucleotide
ggagguugaaua

SEQ ID NO: 16644 - RNA, 13 nt, Artificial Sequence
  Description of Artificial Sequence: Synthetic oligonucleotide
auuuugaguuuuc

SEQ ID NO: 16645 - RNA, 12 nt, Artificial Sequence
  Description of Artificial Sequence: Synthetic oligonucleotide
uauccuguuugu

SEQ ID NO: 16646 - RNA, 11 nt, Artificial Sequence
  Description of Artificial Sequence: Synthetic oligonucleotide
ccuguuuguuc

SEQ ID NO: 16647 - RNA, 10 nt, Artificial Sequence
  Description of Artificial Sequence: Synthetic oligonucleotide
cucuacagcc

SEQ ID NO: 16648 - RNA, 12 nt, Artificial Sequence
  Description of Artificial Sequence: Synthetic oligonucleotide
ucuuccauagcu

SEQ ID NO: 16649 - RNA, 12 nt, Artificial Sequence
  Description of Artificial Sequence: Synthetic oligonucleotide
auaaucuuccug

SEQ ID NO: 16650 - RNA, 12 nt, Artificial Sequence
  Description of Artificial Sequence: Synthetic oligonucleotide
uaaucuuccugu

SEQ ID NO: 16651 - RNA, 12 nt, Artificial Sequence
  Description of Artificial Sequence: Synthetic oligonucleotide
cuucaugacuug

SEQ ID NO: 16652 - RNA, 12 nt, Artificial Sequence
  Description of Artificial Sequence: Synthetic oligonucleotide
aagagggagaga

SEQ ID NO: 16653 - RNA, 12 nt, Artificial Sequence
  Description of Artificial Sequence: Synthetic oligonucleotide
cgucuccuacca

SEQ ID NO: 16654 - RNA, 12 nt, Artificial Sequence
  Description of Artificial Sequence: Synthetic oligonucleotide
gaucaaucggcc

SEQ ID NO: 16655 - RNA, 12 nt, Artificial Sequence
  Description of Artificial Sequence: Synthetic oligonucleotide
ggacgaacaucc

SEQ ID NO: 16656 - RNA, 11 nt, Artificial Sequence
  Description of Artificial Sequence: Synthetic oligonucleotide
agggucggaac

SEQ ID NO: 16657 - RNA, 10 nt, Artificial Sequence
  Description of Artificial Sequence: Synthetic oligonucleotide
ucggaaccca

SEQ ID NO: 16658 - RNA, 11 nt, Artificial Sequence
  Description of Artificial Sequence: Synthetic oligonucleotide
acccaagcuua

SEQ ID NO: 16659 - RNA, 14 nt, Artificial Sequence
  Description of Artificial Sequence: Synthetic oligonucleotide
gaacuuuaagcaac

SEQ ID NO: 16660 - RNA, 11 nt, Artificial Sequence
  Description of Artificial Sequence: Synthetic oligonucleotide
acuauucagug

SEQ ID NO: 16661 - RNA, 11 nt, Artificial Sequence
  Description of Artificial Sequence: Synthetic oligonucleotide
cuauucagugg

SEQ ID NO: 16662 - RNA, 13 nt, Artificial Sequence
  Description of Artificial Sequence: Synthetic oligonucleotide
aaacacagauaac

SEQ ID NO: 16663 - RNA, 12 nt, Artificial Sequence
  Description of Artificial Sequence: Synthetic oligonucleotide
cuuaagaaaaga

SEQ ID NO: 16664 - RNA, 12 nt, Artificial Sequence
  Description of Artificial Sequence: Synthetic oligonucleotide
cugaaggagugu

SEQ ID NO: 16665 - RNA, 10 nt, Artificial Sequence
  Description of Artificial Sequence: Synthetic oligonucleotide
ucaccgcggg

SEQ ID NO: 16666 - RNA, 14 nt, Artificial Sequence
  Description of Artificial Sequence: Synthetic oligonucleotide
agcagaaauaagcg

SEQ ID NO: 16667 - RNA, 12 nt, Artificial Sequence
  Description of Artificial Sequence: Synthetic oligonucleotide
aagcgugccguu

SEQ ID NO: 16668 - RNA, 12 nt, Artificial Sequence
  Description of Artificial Sequence: Synthetic oligonucleotide
agaaacagucac

SEQ ID NO: 16669 - RNA, 12 nt, Artificial Sequence
  Description of Artificial Sequence: Synthetic oligonucleotide
agaggaagaagg

SEQ ID NO: 16670 - RNA, 14 nt, Artificial Sequence
  Description of Artificial Sequence: Synthetic oligonucleotide
uguauucaaaauau

SEQ ID NO: 16671 - RNA, 13 nt, Artificial Sequence
  Description of Artificial Sequence: Synthetic oligonucleotide
auuuuccucccuu

SEQ ID NO: 16672 - RNA, 13 nt, Artificial Sequence
  Description of Artificial Sequence: Synthetic oligonucleotide
caaagaaagauag

SEQ ID NO: 16673 - RNA, 12 nt, Artificial Sequence
  Description of Artificial Sequence: Synthetic oligonucleotide
aagaaagauaga

SEQ ID NO: 16674 - RNA, 13 nt, Artificial Sequence
  Description of Artificial Sequence: Synthetic oligonucleotide
gaaagcauuuguu

SEQ ID NO: 16675 - RNA, 13 nt, Artificial Sequence
  Description of Artificial Sequence: Synthetic oligonucleotide
ugaguuaaacgaa

SEQ ID NO: 16676 - RNA, 12 nt, Artificial Sequence
  Description of Artificial Sequence: Synthetic oligonucleotide
acugauacagaa

SEQ ID NO: 16677 - RNA, 12 nt, Artificial Sequence
  Description of Artificial Sequence: Synthetic oligonucleotide
auauuauauaua

SEQ ID NO: 16678 - RNA, 12 nt, Artificial Sequence
  Description of Artificial Sequence: Synthetic oligonucleotide
auuauauauaua

SEQ ID NO: 16679 - RNA, 12 nt, Artificial Sequence
  Description of Artificial Sequence: Synthetic oligonucleotide
ucacuggaugua

SEQ ID NO: 16680 - RNA, 12 nt, Artificial Sequence
  Description of Artificial Sequence: Synthetic oligonucleotide
cagggaagagga

SEQ ID NO: 16681 - RNA, 15 nt, Artificial Sequence
  Description of Artificial Sequence: Synthetic oligonucleotide
augaucuuuuuuuug

SEQ ID NO: 16682 - RNA, 11 nt, Artificial Sequence
  Description of Artificial Sequence: Synthetic oligonucleotide
aguucacggcc

SEQ ID NO: 16683 - RNA, 13 nt, Artificial Sequence
  Description of Artificial Sequence: Synthetic oligonucleotide
caccaucacacca

SEQ ID NO: 16684 - RNA, 11 nt, Artificial Sequence
  Description of Artificial Sequence: Synthetic oligonucleotide
ccugcggguuu

SEQ ID NO: 16685 - RNA, 10 nt, Artificial Sequence
  Description of Artificial Sequence: Synthetic oligonucleotide
auccaguuug

SEQ ID NO: 16686 - RNA, 13 nt, Artificial Sequence
  Description of Artificial Sequence: Synthetic oligonucleotide
guuaaggacuucu

SEQ ID NO: 16687 - RNA, 13 nt, Artificial Sequence
  Description of Artificial Sequence: Synthetic oligonucleotide
cagugggacagag

SEQ ID NO: 16688 - RNA, 14 nt, Artificial Sequence
  Description of Artificial Sequence: Synthetic oligonucleotide
aauuuguuauugug

SEQ ID NO: 16689 - RNA, 13 nt, Artificial Sequence
  Description of Artificial Sequence: Synthetic oligonucleotide
uucaaaugcauuu

SEQ ID NO: 16690 - RNA, 10 nt, Artificial Sequence
  Description of Artificial Sequence: Synthetic oligonucleotide
caggaaagcc

SEQ ID NO: 16691 - RNA, 11 nt, Artificial Sequence
  Description of Artificial Sequence: Synthetic oligonucleotide
aggaaagcccu

SEQ ID NO: 16692 - RNA, 12 nt, Artificial Sequence
  Description of Artificial Sequence: Synthetic oligonucleotide
cccagcauggcc

SEQ ID NO: 16693 - RNA, 11 nt, Artificial Sequence
  Description of Artificial Sequence: Synthetic oligonucleotide
cuucucccuga

SEQ ID NO: 16694 - RNA, 12 nt, Artificial Sequence
  Description of Artificial Sequence: Synthetic oligonucleotide
gaagaagcccuu

SEQ ID NO: 16695 - RNA, 12 nt, Artificial Sequence
  Description of Artificial Sequence: Synthetic oligonucleotide
agaagcccuuca

SEQ ID NO: 16696 - RNA, 11 nt, Artificial Sequence
  Description of Artificial Sequence: Synthetic oligonucleotide
gcccuucagcg

SEQ ID NO: 16697 - RNA, 11 nt, Artificial Sequence
  Description of Artificial Sequence: Synthetic oligonucleotide
ccuucagcggc

SEQ ID NO: 16698 - RNA, 12 nt, Artificial Sequence
  Description of Artificial Sequence: Synthetic oligonucleotide
ucagcggccagu

SEQ ID NO: 16699 - RNA, 12 nt, Artificial Sequence
  Description of Artificial Sequence: Synthetic oligonucleotide
ugaaaagcuccg

SEQ ID NO: 16700 - RNA, 11 nt, Artificial Sequence
  Description of Artificial Sequence: Synthetic oligonucleotide
aaaagcuccgg

SEQ ID NO: 16701 - RNA, 13 nt, Artificial Sequence
  Description of Artificial Sequence: Synthetic oligonucleotide
agucaacagucug

SEQ ID NO: 16702 - RNA, 13 nt, Artificial Sequence
  Description of Artificial Sequence: Synthetic oligonucleotide
cagaguucaaaag

SEQ ID NO: 16703 - RNA, 13 nt, Artificial Sequence
  Description of Artificial Sequence: Synthetic oligonucleotide
agaguucaaaagc

SEQ ID NO: 16704 - RNA, 12 nt, Artificial Sequence
  Description of Artificial Sequence: Synthetic oligonucleotide
uucaaaagcccu

SEQ ID NO: 16705 - RNA, 12 nt, Artificial Sequence
  Description of Artificial Sequence: Synthetic oligonucleotide
ucaaaagcccuu

SEQ ID NO: 16706 - RNA, 12 nt, Artificial Sequence
  Description of Artificial Sequence: Synthetic oligonucleotide
aaaagcccuuca

SEQ ID NO: 16707 - RNA, 12 nt, Artificial Sequence
  Description of Artificial Sequence: Synthetic oligonucleotide
aaagcccuucag

SEQ ID NO: 16708 - RNA, 13 nt, Artificial Sequence
  Description of Artificial Sequence: Synthetic oligonucleotide
gugaagccgcucg

SEQ ID NO: 16709 - RNA, 12 nt, Artificial Sequence
  Description of Artificial Sequence: Synthetic oligonucleotide
cacgccagucaa

SEQ ID NO: 16710 - RNA, 13 nt, Artificial Sequence
  Description of Artificial Sequence: Synthetic oligonucleotide
uucuuggugcgug

SEQ ID NO: 16711 - RNA, 14 nt, Artificial Sequence
  Description of Artificial Sequence: Synthetic oligonucleotide
auuggauucaucag

SEQ ID NO: 16712 - RNA, 13 nt, Artificial Sequence
  Description of Artificial Sequence: Synthetic oligonucleotide
uggaauaccuaag

SEQ ID NO: 16713 - RNA, 12 nt, Artificial Sequence
  Description of Artificial Sequence: Synthetic oligonucleotide
auuugaggcuca

SEQ ID NO: 16714 - RNA, 11 nt, Artificial Sequence
  Description of Artificial Sequence: Synthetic oligonucleotide
ucuacaauugg

SEQ ID NO: 16715 - RNA, 12 nt, Artificial Sequence
  Description of Artificial Sequence: Synthetic oligonucleotide
uaguuaggagcc

SEQ ID NO: 16716 - RNA, 13 nt, Artificial Sequence
  Description of Artificial Sequence: Synthetic oligonucleotide
agucaauauccac

SEQ ID NO: 16717 - RNA, 13 nt, Artificial Sequence
  Description of Artificial Sequence: Synthetic oligonucleotide
auguucagucaca

SEQ ID NO: 16718 - RNA, 12 nt, Artificial Sequence
  Description of Artificial Sequence: Synthetic oligonucleotide
acacacacauac

SEQ ID NO: 16719 - RNA, 12 nt, Artificial Sequence
  Description of Artificial Sequence: Synthetic oligonucleotide
uuccuuuugcuu

SEQ ID NO: 16720 - RNA, 16 nt, Artificial Sequence
  Description of Artificial Sequence: Synthetic oligonucleotide
uuuuaaaguaauuuuu

SEQ ID NO: 16721 - RNA, 13 nt, Artificial Sequence
  Description of Artificial Sequence: Synthetic oligonucleotide
caacagucaaugg

SEQ ID NO: 16722 - RNA, 13 nt, Artificial Sequence
  Description of Artificial Sequence: Synthetic oligonucleotide
ucgacaaaccaau

SEQ ID NO: 16723 - RNA, 12 nt, Artificial Sequence
  Description of Artificial Sequence: Synthetic oligonucleotide
acugcuaccacu

SEQ ID NO: 16724 - RNA, 13 nt, Artificial Sequence
  Description of Artificial Sequence: Synthetic oligonucleotide
gcaagcggucuua

SEQ ID NO: 16725 - RNA, 13 nt, Artificial Sequence
  Description of Artificial Sequence: Synthetic oligonucleotide
ggucuuaccggcu

SEQ ID NO: 16726 - RNA, 11 nt, Artificial Sequence
  Description of Artificial Sequence: Synthetic oligonucleotide
gauggguuacc

SEQ ID NO: 16727 - RNA, 11 nt, Artificial Sequence
  Description of Artificial Sequence: Synthetic oligonucleotide
guuaccugcga

SEQ ID NO: 16728 - RNA, 12 nt, Artificial Sequence
  Description of Artificial Sequence: Synthetic oligonucleotide
aaucuugcugag

SEQ ID NO: 16729 - RNA, 13 nt, Artificial Sequence
  Description of Artificial Sequence: Synthetic oligonucleotide
agcauaaaacagu

SEQ ID NO: 16730 - RNA, 12 nt, Artificial Sequence
  Description of Artificial Sequence: Synthetic oligonucleotide
guccuuuauccu

SEQ ID NO: 16731 - RNA, 12 nt, Artificial Sequence
  Description of Artificial Sequence: Synthetic oligonucleotide
caacgcaaguug

SEQ ID NO: 16732 - RNA, 13 nt, Artificial Sequence
  Description of Artificial Sequence: Synthetic oligonucleotide
aaacugaaaccau

SEQ ID NO: 16733 - RNA, 14 nt, Artificial Sequence
  Description of Artificial Sequence: Synthetic oligonucleotide
acuuuguuaaauau

SEQ ID NO: 16734 - RNA, 14 nt, Artificial Sequence
  Description of Artificial Sequence: Synthetic oligonucleotide
guauauuaaaaguu

SEQ ID NO: 16735 - RNA, 13 nt, Artificial Sequence
  Description of Artificial Sequence: Synthetic oligonucleotide
guuuugacuuaac

SEQ ID NO: 16736 - RNA, 13 nt, Artificial Sequence
  Description of Artificial Sequence: Synthetic oligonucleotide
gcaaacucagcac

SEQ ID NO: 16737 - RNA, 11 nt, Artificial Sequence
  Description of Artificial Sequence: Synthetic oligonucleotide
ugcugaccuca

SEQ ID NO: 16738 - RNA, 14 nt, Artificial Sequence
  Description of Artificial Sequence: Synthetic oligonucleotide
uuuauucagaucgc

SEQ ID NO: 16739 - RNA, 13 nt, Artificial Sequence
  Description of Artificial Sequence: Synthetic oligonucleotide
aggguucugggau

SEQ ID NO: 16740 - RNA, 15 nt, Artificial Sequence
  Description of Artificial Sequence: Synthetic oligonucleotide
auauuggaaauuaug

SEQ ID NO: 16741 - RNA, 13 nt, Artificial Sequence
  Description of Artificial Sequence: Synthetic oligonucleotide
auggaagcacuag

SEQ ID NO: 16742 - RNA, 13 nt, Artificial Sequence
  Description of Artificial Sequence: Synthetic oligonucleotide
guuuuuaugugga

SEQ ID NO: 16743 - RNA, 12 nt, Artificial Sequence
  Description of Artificial Sequence: Synthetic oligonucleotide
ggaauugguaga

SEQ ID NO: 16744 - RNA, 13 nt, Artificial Sequence
  Description of Artificial Sequence: Synthetic oligonucleotide
uuagacuuggaga

SEQ ID NO: 16745 - RNA, 13 nt, Artificial Sequence
  Description of Artificial Sequence: Synthetic oligonucleotide
uuacaguauucca

SEQ ID NO: 16746 - RNA, 15 nt, Artificial Sequence
  Description of Artificial Sequence: Synthetic oligonucleotide
ccacugaugaauuaa

SEQ ID NO: 16747 - RNA, 12 nt, Artificial Sequence
  Description of Artificial Sequence: Synthetic oligonucleotide
ccacaucaucac

SEQ ID NO: 16748 - RNA, 13 nt, Artificial Sequence
  Description of Artificial Sequence: Synthetic oligonucleotide
cucaccaaacaga

SEQ ID NO: 16749 - RNA, 12 nt, Artificial Sequence
  Description of Artificial Sequence: Synthetic oligonucleotide
ggaacaugaugg

SEQ ID NO: 16750 - RNA, 12 nt, Artificial Sequence
  Description of Artificial Sequence: Synthetic oligonucleotide
cauguagacugc

SEQ ID NO: 16751 - RNA, 13 nt, Artificial Sequence
  Description of Artificial Sequence: Synthetic oligonucleotide
ggaucuauuuaug

SEQ ID NO: 16752 - RNA, 12 nt, Artificial Sequence
  Description of Artificial Sequence: Synthetic oligonucleotide
gcacuauuauca

SEQ ID NO: 16753 - RNA, 11 nt, Artificial Sequence
  Description of Artificial Sequence: Synthetic oligonucleotide
aucaguucugc

SEQ ID NO: 16754 - RNA, 13 nt, Artificial Sequence
  Description of Artificial Sequence: Synthetic oligonucleotide
agauuaaaccuac

SEQ ID NO: 16755 - RNA, 13 nt, Artificial Sequence
  Description of Artificial Sequence: Synthetic oligonucleotide
auaaaauccuucu

SEQ ID NO: 16756 - RNA, 12 nt, Artificial Sequence
  Description of Artificial Sequence: Synthetic oligonucleotide
aaugcuguagac

SEQ ID NO: 16757 - RNA, 13 nt, Artificial Sequence
  Description of Artificial Sequence: Synthetic oligonucleotide
uugauaggaauag

SEQ ID NO: 16758 - RNA, 11 nt, Artificial Sequence
  Description of Artificial Sequence: Synthetic oligonucleotide
aauggcccuga

SEQ ID NO: 16759 - RNA, 11 nt, Artificial Sequence
  Description of Artificial Sequence: Synthetic oligonucleotide
uuccucaagca

SEQ ID NO: 16760 - RNA, 10 nt, Artificial Sequence
  Description of Artificial Sequence: Synthetic oligonucleotide
guucagccca

SEQ ID NO: 16761 - RNA, 11 nt, Artificial Sequence
  Description of Artificial Sequence: Synthetic oligonucleotide
gcugcugaacc

SEQ ID NO: 16762 - RNA, 12 nt, Artificial Sequence
  Description of Artificial Sequence: Synthetic oligonucleotide
aaguucucuuca

SEQ ID NO: 16763 - RNA, 11 nt, Artificial Sequence
  Description of Artificial Sequence: Synthetic oligonucleotide
ccagccuagag

SEQ ID NO: 16764 - RNA, 13 nt, Artificial Sequence
  Description of Artificial Sequence: Synthetic oligonucleotide
cucugugaagugu

SEQ ID NO: 16765 - RNA, 14 nt, Artificial Sequence
  Description of Artificial Sequence: Synthetic oligonucleotide
ugagaaaauuucaa

SEQ ID NO: 16766 - RNA, 11 nt, Artificial Sequence
  Description of Artificial Sequence: Synthetic oligonucleotide
aauccuccuga

SEQ ID NO: 16767 - RNA, 12 nt, Artificial Sequence
  Description of Artificial Sequence: Synthetic oligonucleotide
gugacaucauau

SEQ ID NO: 16768 - RNA, 13 nt, Artificial Sequence
  Description of Artificial Sequence: Synthetic oligonucleotide
aaucuucaucaua

SEQ ID NO: 16769 - RNA, 13 nt, Artificial Sequence
  Description of Artificial Sequence: Synthetic oligonucleotide
gacuagcuauuaa

SEQ ID NO: 16770 - RNA, 14 nt, Artificial Sequence
  Description of Artificial Sequence: Synthetic oligonucleotide
ucucuacuaaaaau

SEQ ID NO: 16771 - RNA, 12 nt, Artificial Sequence
  Description of Artificial Sequence: Synthetic oligonucleotide
ucuaucucgccu

SEQ ID NO: 16772 - RNA, 13 nt, Artificial Sequence
  Description of Artificial Sequence: Synthetic oligonucleotide
cuucgguccaguu

SEQ ID NO: 16773 - RNA, 11 nt, Artificial Sequence
  Description of Artificial Sequence: Synthetic oligonucleotide
gauguagccgc

SEQ ID NO: 16774 - RNA, 12 nt, Artificial Sequence
  Description of Artificial Sequence: Synthetic oligonucleotide
ugaggagacuug

SEQ ID NO: 16775 - RNA, 12 nt, Artificial Sequence
  Description of Artificial Sequence: Synthetic oligonucleotide
gaguagugagga

SEQ ID NO: 16776 - RNA, 14 nt, Artificial Sequence
  Description of Artificial Sequence: Synthetic oligonucleotide
cagaugaguacaaa

SEQ ID NO: 16777 - RNA, 13 nt, Artificial Sequence
  Description of Artificial Sequence: Synthetic oligonucleotide
guuguuaaugggc

SEQ ID NO: 16778 - RNA, 13 nt, Artificial Sequence
  Description of Artificial Sequence: Synthetic oligonucleotide
uuuuuaauuuauu

SEQ ID NO: 16779 - RNA, 12 nt, Artificial Sequence
  Description of Artificial Sequence: Synthetic oligonucleotide
uauuuaaauaug

SEQ ID NO: 16780 - RNA, 13 nt, Artificial Sequence
  Description of Artificial Sequence: Synthetic oligonucleotide
uauccuuuguuuc

SEQ ID NO: 16781 - RNA, 14 nt, Artificial Sequence
  Description of Artificial Sequence: Synthetic oligonucleotide
cgucuaaguguuug

SEQ ID NO: 16782 - RNA, 12 nt, Artificial Sequence
  Description of Artificial Sequence: Synthetic oligonucleotide
accugugacaaa

SEQ ID NO: 16783 - RNA, 13 nt, Artificial Sequence
  Description of Artificial Sequence: Synthetic oligonucleotide
ccaggcugaauua

SEQ ID NO: 16784 - RNA, 14 nt, Artificial Sequence
  Description of Artificial Sequence: Synthetic oligonucleotide
gucauucuuacaau

SEQ ID NO: 16785 - RNA, 15 nt, Artificial Sequence
  Description of Artificial Sequence: Synthetic oligonucleotide
ucauucuuacaauug

SEQ ID NO: 16786 - RNA, 12 nt, Artificial Sequence
  Description of Artificial Sequence: Synthetic oligonucleotide
cagagaguguac

SEQ ID NO: 16787 - RNA, 12 nt, Artificial Sequence
  Description of Artificial Sequence: Synthetic oligonucleotide
agaacucagcag

SEQ ID NO: 16788 - RNA, 13 nt, Artificial Sequence
  Description of Artificial Sequence: Synthetic oligonucleotide
uuuauuuucagua

SEQ ID NO: 16789 - RNA, 12 nt, Artificial Sequence
  Description of Artificial Sequence: Synthetic oligonucleotide
ucuuaaauggaa

SEQ ID NO: 16790 - RNA, 13 nt, Artificial Sequence
  Description of Artificial Sequence: Synthetic oligonucleotide
ugccuaaaauugu

SEQ ID NO: 16791 - RNA, 12 nt, Artificial Sequence
  Description of Artificial Sequence: Synthetic oligonucleotide
agacugugagcu

SEQ ID NO: 16792 - RNA, 14 nt, Artificial Sequence
  Description of Artificial Sequence: Synthetic oligonucleotide
ugcuuuuuauuaau

SEQ ID NO: 16793 - RNA, 13 nt, Artificial Sequence
  Description of Artificial Sequence: Synthetic oligonucleotide
cucuucuuacauu

SEQ ID NO: 16794 - RNA, 15 nt, Artificial Sequence
  Description of Artificial Sequence: Synthetic oligonucleotide
cauuuguaaaaaugu

SEQ ID NO: 16795 - RNA, 15 nt, Artificial Sequence
  Description of Artificial Sequence: Synthetic oligonucleotide
aucuuaauucauauu

SEQ ID NO: 16796 - RNA, 13 nt, Artificial Sequence
  Description of Artificial Sequence: Synthetic oligonucleotide
gaacuaaucauga

SEQ ID NO: 16797 - RNA, 12 nt, Artificial Sequence
  Description of Artificial Sequence: Synthetic oligonucleotide
ucugcucuuggg

SEQ ID NO: 16798 - RNA, 13 nt, Artificial Sequence
  Description of Artificial Sequence: Synthetic oligonucleotide
caguagcuuugag

SEQ ID NO: 16799 - RNA, 14 nt, Artificial Sequence
  Description of Artificial Sequence: Synthetic oligonucleotide
cacguaauauuuca

SEQ ID NO: 16800 - RNA, 13 nt, Artificial Sequence
  Description of Artificial Sequence: Synthetic oligonucleotide
uauucucuucacu

SEQ ID NO: 16801 - RNA, 14 nt, Artificial Sequence
  Description of Artificial Sequence: Synthetic oligonucleotide
cuaaugcuaagaaa

SEQ ID NO: 16802 - RNA, 12 nt, Artificial Sequence
  Description of Artificial Sequence: Synthetic oligonucleotide
gcugaaaaucaa

SEQ ID NO: 16803 - RNA, 14 nt, Artificial Sequence
  Description of Artificial Sequence: Synthetic oligonucleotide
aauaugauuacuuu

SEQ ID NO: 16804 - RNA, 14 nt, Artificial Sequence
  Description of Artificial Sequence: Synthetic oligonucleotide
cauuuuguucuaca

SEQ ID NO: 16805 - RNA, 12 nt, Artificial Sequence
  Description of Artificial Sequence: Synthetic oligonucleotide
cccgggacucuc

SEQ ID NO: 16806 - RNA, 14 nt, Artificial Sequence
  Description of Artificial Sequence: Synthetic oligonucleotide
ccuuuaaaguaaag

SEQ ID NO: 16807 - RNA, 13 nt, Artificial Sequence
  Description of Artificial Sequence: Synthetic oligonucleotide
ucuggaagccugg

SEQ ID NO: 16808 - RNA, 14 nt, Artificial Sequence
  Description of Artificial Sequence: Synthetic oligonucleotide
aaaacaaaagagag

SEQ ID NO: 16809 - RNA, 13 nt, Artificial Sequence
  Description of Artificial Sequence: Synthetic oligonucleotide
aucaguuaugccg

SEQ ID NO: 16810 - RNA, 13 nt, Artificial Sequence
  Description of Artificial Sequence: Synthetic oligonucleotide
uaaaagaagucca

SEQ ID NO: 16811 - RNA, 11 nt, Artificial Sequence
  Description of Artificial Sequence: Synthetic oligonucleotide
aggugagguua

SEQ ID NO: 16812 - RNA, 11 nt, Artificial Sequence
  Description of Artificial Sequence: Synthetic oligonucleotide
gggaagaggac

SEQ ID NO: 16813 - RNA, 13 nt, Artificial Sequence
  Description of Artificial Sequence: Synthetic oligonucleotide
aagcaaguauugu

SEQ ID NO: 16814 - RNA, 12 nt, Artificial Sequence
  Description of Artificial Sequence: Synthetic oligonucleotide
auuguagcacuc

SEQ ID NO: 16815 - RNA, 14 nt, Artificial Sequence
  Description of Artificial Sequence: Synthetic oligonucleotide
acaaaaccacaaau

SEQ ID NO: 16816 - RNA, 12 nt, Artificial Sequence
  Description of Artificial Sequence: Synthetic oligonucleotide
uaagcccauaca

SEQ ID NO: 16817 - RNA, 11 nt, Artificial Sequence
  Description of Artificial Sequence: Synthetic oligonucleotide
agcccauacag

SEQ ID NO: 16818 - RNA, 12 nt, Artificial Sequence
  Description of Artificial Sequence: Synthetic oligonucleotide
cagaaaccuucc

SEQ ID NO: 16819 - RNA, 10 nt, Artificial Sequence
  Description of Artificial Sequence: Synthetic oligonucleotide
guauaccuac

SEQ ID NO: 16820 - RNA, 13 nt, Artificial Sequence
  Description of Artificial Sequence: Synthetic oligonucleotide
gccaguuuucgga

SEQ ID NO: 16821 - RNA, 9 nt, Artificial Sequence
  Description of Artificial Sequence: Synthetic oligonucleotide
ggaacaggg

SEQ ID NO: 16822 - RNA, 13 nt, Artificial Sequence
  Description of Artificial Sequence: Synthetic oligonucleotide
uuaacuuuccagu

SEQ ID NO: 16823 - RNA, 14 nt, Artificial Sequence
  Description of Artificial Sequence: Synthetic oligonucleotide
aaaguuugguuuug

SEQ ID NO: 16824 - RNA, 12 nt, Artificial Sequence
  Description of Artificial Sequence: Synthetic oligonucleotide
cuucccacugua

SEQ ID NO: 16825 - RNA, 13 nt, Artificial Sequence
  Description of Artificial Sequence: Synthetic oligonucleotide
ugauaccauauga

SEQ ID NO: 16826 - RNA, 11 nt, Artificial Sequence
  Description of Artificial Sequence: Synthetic oligonucleotide
aacaugggcug

SEQ ID NO: 16827 - RNA, 13 nt, Artificial Sequence
  Description of Artificial Sequence: Synthetic oligonucleotide
caacuuuuucaua

SEQ ID NO: 16828 - RNA, 12 nt, Artificial Sequence
  Description of Artificial Sequence: Synthetic oligonucleotide
caugaggccgga

SEQ ID NO: 16829 - RNA, 11 nt, Artificial Sequence
  Description of Artificial Sequence: Synthetic oligonucleotide
acugcauuugu

SEQ ID NO: 16830 - RNA, 13 nt, Artificial Sequence
  Description of Artificial Sequence: Synthetic oligonucleotide
aauguuuacuacc

SEQ ID NO: 16831 - RNA, 15 nt, Artificial Sequence
  Description of Artificial Sequence: Synthetic oligonucleotide
aauuuuuugaugaaa

SEQ ID NO: 16832 - RNA, 14 nt, Artificial Sequence
  Description of Artificial Sequence: Synthetic oligonucleotide
cagugugugaauuu

SEQ ID NO: 16833 - RNA, 13 nt, Artificial Sequence
  Description of Artificial Sequence: Synthetic oligonucleotide
gagcaauguaugu

SEQ ID NO: 16834 - RNA, 14 nt, Artificial Sequence
  Description of Artificial Sequence: Synthetic oligonucleotide
aaagcacauauaua

SEQ ID NO: 16835 - RNA, 14 nt, Artificial Sequence
  Description of Artificial Sequence: Synthetic oligonucleotide
guaauaguuucucc

SEQ ID NO: 16836 - RNA, 13 nt, Artificial Sequence
  Description of Artificial Sequence: Synthetic oligonucleotide
aguuucuccaaau

SEQ ID NO: 16837 - RNA, 13 nt, Artificial Sequence
  Description of Artificial Sequence: Synthetic oligonucleotide
uacuuccuagaaa

SEQ ID NO: 16838 - RNA, 13 nt, Artificial Sequence
  Description of Artificial Sequence: Synthetic oligonucleotide
uacaccauauaug

SEQ ID NO: 16839 - RNA, 14 nt, Artificial Sequence
  Description of Artificial Sequence: Synthetic oligonucleotide
auauaugaauggag

SEQ ID NO: 16840 - RNA, 13 nt, Artificial Sequence
  Description of Artificial Sequence: Synthetic oligonucleotide
acgagaagaagau

SEQ ID NO: 16841 - RNA, 13 nt, Artificial Sequence
  Description of Artificial Sequence: Synthetic oligonucleotide
ucauuuacaggga

SEQ ID NO: 16842 - RNA, 13 nt, Artificial Sequence
  Description of Artificial Sequence: Synthetic oligonucleotide
cauuuacagggac

SEQ ID NO: 16843 - RNA, 10 nt, Artificial Sequence
  Description of Artificial Sequence: Synthetic oligonucleotide
agggaccuga

SEQ ID NO: 16844 - RNA, 14 nt, Artificial Sequence
  Description of Artificial Sequence: Synthetic oligonucleotide
uguuugacugcauc

SEQ ID NO: 16845 - RNA, 13 nt, Artificial Sequence
  Description of Artificial Sequence: Synthetic oligonucleotide
uuugacugcaucg

SEQ ID NO: 16846 - RNA, 12 nt, Artificial Sequence
  Description of Artificial Sequence: Synthetic oligonucleotide
gaguucacaggg

SEQ ID NO: 16847 - RNA, 13 nt, Artificial Sequence
  Description of Artificial Sequence: Synthetic oligonucleotide
ggcaccucugucc

SEQ ID NO: 16848 - RNA, 15 nt, Artificial Sequence
  Description of Artificial Sequence: Synthetic oligonucleotide
gguuugucuuuuuaa

SEQ ID NO: 16849 - RNA, 14 nt, Artificial Sequence
  Description of Artificial Sequence: Synthetic oligonucleotide
uuugucuuuuuaag

SEQ ID NO: 16850 - RNA, 13 nt, Artificial Sequence
  Description of Artificial Sequence: Synthetic oligonucleotide
ccuaaagguuguc

SEQ ID NO: 16851 - RNA, 12 nt, Artificial Sequence
  Description of Artificial Sequence: Synthetic oligonucleotide
aagguugucgac

SEQ ID NO: 16852 - RNA, 13 nt, Artificial Sequence
  Description of Artificial Sequence: Synthetic oligonucleotide
accuggcaauugu

SEQ ID NO: 16853 - RNA, 12 nt, Artificial Sequence
  Description of Artificial Sequence: Synthetic oligonucleotide
aguggugcgagg

SEQ ID NO: 16854 - RNA, 13 nt, Artificial Sequence
  Description of Artificial Sequence: Synthetic oligonucleotide
agagacaugaaau

SEQ ID NO: 16855 - RNA, 13 nt, Artificial Sequence
  Description of Artificial Sequence: Synthetic oligonucleotide
auauauuucucca

SEQ ID NO: 16856 - RNA, 10 nt, Artificial Sequence
  Description of Artificial Sequence: Synthetic oligonucleotide
caugaaggcu

SEQ ID NO: 16857 - RNA, 11 nt, Artificial Sequence
  Description of Artificial Sequence: Synthetic oligonucleotide
gcuggaguggu

SEQ ID NO: 16858 - RNA, 11 nt, Artificial Sequence
  Description of Artificial Sequence: Synthetic oligonucleotide
aggaagagagg

SEQ ID NO: 16859 - RNA, 12 nt, Artificial Sequence
  Description of Artificial Sequence: Synthetic oligonucleotide
cuugcaucgggc

SEQ ID NO: 16860 - RNA, 13 nt, Artificial Sequence
  Description of Artificial Sequence: Synthetic oligonucleotide
auauccuacugug

SEQ ID NO: 16861 - RNA, 13 nt, Artificial Sequence
  Description of Artificial Sequence: Synthetic oligonucleotide
uccuacuguguaa

SEQ ID NO: 16862 - RNA, 12 nt, Artificial Sequence
  Description of Artificial Sequence: Synthetic oligonucleotide
ccuuguagugua

SEQ ID NO: 16863 - RNA, 13 nt, Artificial Sequence
  Description of Artificial Sequence: Synthetic oligonucleotide
ucuuuguugauug

SEQ ID NO: 16864 - RNA, 14 nt, Artificial Sequence
  Description of Artificial Sequence: Synthetic oligonucleotide
uuuguugauugaaa

SEQ ID NO: 16865 - RNA, 15 nt, Artificial Sequence
  Description of Artificial Sequence: Synthetic oligonucleotide
uucuuuuucuuccau

SEQ ID NO: 16866 - RNA, 13 nt, Artificial Sequence
  Description of Artificial Sequence: Synthetic oligonucleotide
aaucuuccuucua

SEQ ID NO: 16867 - RNA, 13 nt, Artificial Sequence
  Description of Artificial Sequence: Synthetic oligonucleotide
uugaaugcuucau

SEQ ID NO: 16868 - RNA, 13 nt, Artificial Sequence
  Description of Artificial Sequence: Synthetic oligonucleotide
ugaaugcuucaug

SEQ ID NO: 16869 - RNA, 13 nt, Artificial Sequence
  Description of Artificial Sequence: Synthetic oligonucleotide
aauucuacuuuga

SEQ ID NO: 16870 - RNA, 13 nt, Artificial Sequence
  Description of Artificial Sequence: Synthetic oligonucleotide
agcaacuacagac

SEQ ID NO: 16871 - RNA, 13 nt, Artificial Sequence
  Description of Artificial Sequence: Synthetic oligonucleotide
gaccaaggucaac

SEQ ID NO: 16872 - RNA, 13 nt, Artificial Sequence
  Description of Artificial Sequence: Synthetic oligonucleotide
cgacuaucucgac

SEQ ID NO: 16873 - RNA, 13 nt, Artificial Sequence
  Description of Artificial Sequence: Synthetic oligonucleotide
aaccuucccaaac

SEQ ID NO: 16874 - RNA, 14 nt, Artificial Sequence
  Description of Artificial Sequence: Synthetic oligonucleotide
ccaagcuuagaacu

SEQ ID NO: 16875 - RNA, 15 nt, Artificial Sequence
  Description of Artificial Sequence: Synthetic oligonucleotide
agcuuagaacuuuaa

SEQ ID NO: 16876 - RNA, 11 nt, Artificial Sequence
  Description of Artificial Sequence: Synthetic oligonucleotide
aagaccaccac

SEQ ID NO: 16877 - RNA, 14 nt, Artificial Sequence
  Description of Artificial Sequence: Synthetic oligonucleotide
gcgagaaauaaagu

SEQ ID NO: 16878 - RNA, 14 nt, Artificial Sequence
  Description of Artificial Sequence: Synthetic oligonucleotide
cgagaaauaaaguu

SEQ ID NO: 16879 - RNA, 12 nt, Artificial Sequence
  Description of Artificial Sequence: Synthetic oligonucleotide
aggaaaugaucc

SEQ ID NO: 16880 - RNA, 13 nt, Artificial Sequence
  Description of Artificial Sequence: Synthetic oligonucleotide
gaagaaaugaaac

SEQ ID NO: 16881 - RNA, 13 nt, Artificial Sequence
  Description of Artificial Sequence: Synthetic oligonucleotide
guuuccauccucc

SEQ ID NO: 16882 - RNA, 15 nt, Artificial Sequence
  Description of Artificial Sequence: Synthetic oligonucleotide
acugaaaaucuuuga

SEQ ID NO: 16883 - RNA, 11 nt, Artificial Sequence
  Description of Artificial Sequence: Synthetic oligonucleotide
ugccguucagg

SEQ ID NO: 16884 - RNA, 13 nt, Artificial Sequence
  Description of Artificial Sequence: Synthetic oligonucleotide
caggguccagaag

SEQ ID NO: 16885 - RNA, 13 nt, Artificial Sequence
  Description of Artificial Sequence: Synthetic oligonucleotide
ucaagacugcuug

SEQ ID NO: 16886 - RNA, 13 nt, Artificial Sequence
  Description of Artificial Sequence: Synthetic oligonucleotide
uccaugucuuugg

SEQ ID NO: 16887 - RNA, 11 nt, Artificial Sequence
  Description of Artificial Sequence: Synthetic oligonucleotide
gccugaaacac

SEQ ID NO: 16888 - RNA, 12 nt, Artificial Sequence
  Description of Artificial Sequence: Synthetic oligonucleotide
ucucuguaccuc

SEQ ID NO: 16889 - RNA, 12 nt, Artificial Sequence
  Description of Artificial Sequence: Synthetic oligonucleotide
agcaagacaaga

SEQ ID NO: 16890 - RNA, 13 nt, Artificial Sequence
  Description of Artificial Sequence: Synthetic oligonucleotide
gcaagacaagaaa

SEQ ID NO: 16891 - RNA, 12 nt, Artificial Sequence
  Description of Artificial Sequence: Synthetic oligonucleotide
uguacaagaucc

SEQ ID NO: 16892 - RNA, 12 nt, Artificial Sequence
  Description of Artificial Sequence: Synthetic oligonucleotide
cguacuugcaga

SEQ ID NO: 16893 - RNA, 13 nt, Artificial Sequence
  Description of Artificial Sequence: Synthetic oligonucleotide
cgaucgauacaga

SEQ ID NO: 16894 - RNA, 13 nt, Artificial Sequence
  Description of Artificial Sequence: Synthetic oligonucleotide
uauaaaaauaaau

SEQ ID NO: 16895 - RNA, 13 nt, Artificial Sequence
  Description of Artificial Sequence: Synthetic oligonucleotide
uaaaaauaaauau

SEQ ID NO: 16896 - RNA, 13 nt, Artificial Sequence
  Description of Artificial Sequence: Synthetic oligonucleotide
uuugacugcugug

SEQ ID NO: 16897 - RNA, 13 nt, Artificial Sequence
  Description of Artificial Sequence: Synthetic oligonucleotide
ggagaugagagac

SEQ ID NO: 16898 - RNA, 10 nt, Artificial Sequence
  Description of Artificial Sequence: Synthetic oligonucleotide
ucccacuugg

SEQ ID NO: 16899 - RNA, 10 nt, Artificial Sequence
  Description of Artificial Sequence: Synthetic oligonucleotide
guucacggcc

SEQ ID NO: 16900 - RNA, 12 nt, Artificial Sequence
  Description of Artificial Sequence: Synthetic oligonucleotide
accaucacacca

SEQ ID NO: 16901 - RNA, 10 nt, Artificial Sequence
  Description of Artificial Sequence: Synthetic oligonucleotide
cugcggguuu

SEQ ID NO: 16902 - RNA, 9 nt, Artificial Sequence
  Description of Artificial Sequence: Synthetic oligonucleotide
uccaguuug

SEQ ID NO: 16903 - RNA, 12 nt, Artificial Sequence
  Description of Artificial Sequence: Synthetic oligonucleotide
uuaaggacuucu

SEQ ID NO: 16904 - RNA, 12 nt, Artificial Sequence
  Description of Artificial Sequence: Synthetic oligonucleotide
agugggacagag

SEQ ID NO: 16905 - RNA, 13 nt, Artificial Sequence
  Description of Artificial Sequence: Synthetic oligonucleotide
auuuguuauugug

SEQ ID NO: 16906 - RNA, 12 nt, Artificial Sequence
  Description of Artificial Sequence: Synthetic oligonucleotide
ucaaaugcauuu

SEQ ID NO: 16907 - RNA, 9 nt, Artificial Sequence
  Description of Artificial Sequence: Synthetic oligonucleotide
aggaaagcc

SEQ ID NO: 16908 - RNA, 10 nt, Artificial Sequence
  Description of Artificial Sequence: Synthetic oligonucleotide
ggaaagcccu

SEQ ID NO: 16909 - RNA, 11 nt, Artificial Sequence
  Description of Artificial Sequence: Synthetic oligonucleotide
ccagcauggcc

SEQ ID NO: 16910 - RNA, 10 nt, Artificial Sequence
  Description of Artificial Sequence: Synthetic oligonucleotide
uucucccuga

SEQ ID NO: 16911 - RNA, 11 nt, Artificial Sequence
  Description of Artificial Sequence: Synthetic oligonucleotide
aagaagcccuu

SEQ ID NO: 16912 - RNA, 11 nt, Artificial Sequence
  Description of Artificial Sequence: Synthetic oligonucleotide
gaagcccuuca

SEQ ID NO: 16913 - RNA, 10 nt, Artificial Sequence
  Description of Artificial Sequence: Synthetic oligonucleotide
cccuucagcg

SEQ ID NO: 16914 - RNA, 10 nt, Artificial Sequence
  Description of Artificial Sequence: Synthetic oligonucleotide
cuucagcggc

SEQ ID NO: 16915 - RNA, 11 nt, Artificial Sequence
  Description of Artificial Sequence: Synthetic oligonucleotide
cagcggccagu

SEQ ID NO: 16916 - RNA, 11 nt, Artificial Sequence
  Description of Artificial Sequence: Synthetic oligonucleotide
gaaaagcuccg

SEQ ID NO: 16917 - RNA, 10 nt, Artificial Sequence
  Description of Artificial Sequence: Synthetic oligonucleotide
aaagcuccgg

SEQ ID NO: 16918 - RNA, 12 nt, Artificial Sequence
  Description of Artificial Sequence: Synthetic oligonucleotide
gucaacagucug

SEQ ID NO: 16919 - RNA, 12 nt, Artificial Sequence
  Description of Artificial Sequence: Synthetic oligonucleotide
agaguucaaaag

SEQ ID NO: 16920 - RNA, 12 nt, Artificial Sequence
  Description of Artificial Sequence: Synthetic oligonucleotide
gaguucaaaagc

SEQ ID NO: 16921 - RNA, 11 nt, Artificial Sequence
  Description of Artificial Sequence: Synthetic oligonucleotide
ucaaaagcccu

SEQ ID NO: 16922 - RNA, 11 nt, Artificial Sequence
  Description of Artificial Sequence: Synthetic oligonucleotide
caaaagcccuu

SEQ ID NO: 16923 - RNA, 11 nt, Artificial Sequence
  Description of Artificial Sequence: Synthetic oligonucleotide
aaagcccuuca

SEQ ID NO: 16924 - RNA, 11 nt, Artificial Sequence
  Description of Artificial Sequence: Synthetic oligonucleotide
aagcccuucag

SEQ ID NO: 16925 - RNA, 12 nt, Artificial Sequence
  Description of Artificial Sequence: Synthetic oligonucleotide
ugaagccgcucg

SEQ ID NO: 16926 - RNA, 11 nt, Artificial Sequence
  Description of Artificial Sequence: Synthetic oligonucleotide
acgccagucaa

SEQ ID NO: 16927 - RNA, 12 nt, Artificial Sequence
  Description of Artificial Sequence: Synthetic oligonucleotide
ucuuggugcgug

SEQ ID NO: 16928 - RNA, 13 nt, Artificial Sequence
  Description of Artificial Sequence: Synthetic oligonucleotide
uuggauucaucag

SEQ ID NO: 16929 - RNA, 12 nt, Artificial Sequence
  Description of Artificial Sequence: Synthetic oligonucleotide
ggaauaccuaag

SEQ ID NO: 16930 - RNA, 11 nt, Artificial Sequence
  Description of Artificial Sequence: Synthetic oligonucleotide
uuugaggcuca

SEQ ID NO: 16931 - RNA, 10 nt, Artificial Sequence
  Description of Artificial Sequence: Synthetic oligonucleotide
cuacaauugg

SEQ ID NO: 16932 - RNA, 11 nt, Artificial Sequence
  Description of Artificial Sequence: Synthetic oligonucleotide
aguuaggagcc

SEQ ID NO: 16933 - RNA, 12 nt, Artificial Sequence
  Description of Artificial Sequence: Synthetic oligonucleotide
gucaauauccac

SEQ ID NO: 16934 - RNA, 12 nt, Artificial Sequence
  Description of Artificial Sequence: Synthetic oligonucleotide
uguucagucaca

SEQ ID NO: 16935 - RNA, 11 nt, Artificial Sequence
  Description of Artificial Sequence: Synthetic oligonucleotide
cacacacauac

SEQ ID NO: 16936 - RNA, 11 nt, Artificial Sequence
  Description of Artificial Sequence: Synthetic oligonucleotide
uccuuuugcuu

SEQ ID NO: 16937 - RNA, 15 nt, Artificial Sequence
  Description of Artificial Sequence: Synthetic oligonucleotide
uuuaaaguaauuuuu

SEQ ID NO: 16938 - RNA, 12 nt, Artificial Sequence
  Description of Artificial Sequence: Synthetic oligonucleotide
aacagucaaugg

SEQ ID NO: 16939 - RNA, 12 nt, Artificial Sequence
  Description of Artificial Sequence: Synthetic oligonucleotide
cgacaaaccaau

SEQ ID NO: 16940 - RNA, 11 nt, Artificial Sequence
  Description of Artificial Sequence: Synthetic oligonucleotide
cugcuaccacu

SEQ ID NO: 16941 - RNA, 12 nt, Artificial Sequence
  Description of Artificial Sequence: Synthetic oligonucleotide
caagcggucuua

SEQ ID NO: 16942 - RNA, 12 nt, Artificial Sequence
  Description of Artificial Sequence: Synthetic oligonucleotide
gucuuaccggcu

SEQ ID NO: 16943 - RNA, 10 nt, Artificial Sequence
  Description of Artificial Sequence: Synthetic oligonucleotide
auggguuacc

SEQ ID NO: 16944 - RNA, 10 nt, Artificial Sequence
  Description of Artificial Sequence: Synthetic oligonucleotide
uuaccugcga

SEQ ID NO: 16945 - RNA, 11 nt, Artificial Sequence
  Description of Artificial Sequence: Synthetic oligonucleotide
aucuugcugag

SEQ ID NO: 16946 - RNA, 12 nt, Artificial Sequence
  Description of Artificial Sequence: Synthetic oligonucleotide
gcauaaaacagu

SEQ ID NO: 16947 - RNA, 11 nt, Artificial Sequence
  Description of Artificial Sequence: Synthetic oligonucleotide
uccuuuauccu

SEQ ID NO: 16948 - RNA, 11 nt, Artificial Sequence
  Description of Artificial Sequence: Synthetic oligonucleotide
aacgcaaguug

SEQ ID NO: 16949 - RNA, 12 nt, Artificial Sequence
  Description of Artificial Sequence: Synthetic oligonucleotide
aacugaaaccau

SEQ ID NO: 16950 - RNA, 13 nt, Artificial Sequence
  Description of Artificial Sequence: Synthetic oligonucleotide
cuuuguuaaauau

SEQ ID NO: 16951 - RNA, 13 nt, Artificial Sequence
  Description of Artificial Sequence: Synthetic oligonucleotide
uauauuaaaaguu

SEQ ID NO: 16952 - RNA, 12 nt, Artificial Sequence
  Description of Artificial Sequence: Synthetic oligonucleotide
uuuugacuuaac

SEQ ID NO: 16953 - RNA, 12 nt, Artificial Sequence
  Description of Artificial Sequence: Synthetic oligonucleotide
caaacucagcac

SEQ ID NO: 16954 - RNA, 10 nt, Artificial Sequence
  Description of Artificial Sequence: Synthetic oligonucleotide
gcugaccuca

SEQ ID NO: 16955 - RNA, 13 nt, Artificial Sequence
  Description of Artificial Sequence: Synthetic oligonucleotide
uuauucagaucgc

SEQ ID NO: 16956 - RNA, 12 nt, Artificial Sequence
  Description of Artificial Sequence: Synthetic oligonucleotide
ggguucugggau

SEQ ID NO: 16957 - RNA, 14 nt, Artificial Sequence
  Description of Artificial Sequence: Synthetic oligonucleotide
uauuggaaauuaug

SEQ ID NO: 16958 - RNA, 12 nt, Artificial Sequence
  Description of Artificial Sequence: Synthetic oligonucleotide
uggaagcacuag

SEQ ID NO: 16959 - RNA, 12 nt, Artificial Sequence
  Description of Artificial Sequence: Synthetic oligonucleotide
uuuuuaugugga

SEQ ID NO: 16960 - RNA, 11 nt, Artificial Sequence
  Description of Artificial Sequence: Synthetic oligonucleotide
gaauugguaga

SEQ ID NO: 16961 - RNA, 12 nt, Artificial Sequence
  Description of Artificial Sequence: Synthetic oligonucleotide
uagacuuggaga

SEQ ID NO: 16962 - RNA, 12 nt, Artificial Sequence
  Description of Artificial Sequence: Synthetic oligonucleotide
uacaguauucca

SEQ ID NO: 16963 - RNA, 14 nt, Artificial Sequence
  Description of Artificial Sequence: Synthetic oligonucleotide
cacugaugaauuaa

SEQ ID NO: 16964 - RNA, 11 nt, Artificial Sequence
  Description of Artificial Sequence: Synthetic oligonucleotide
cacaucaucac

SEQ ID NO: 16965 - RNA, 12 nt, Artificial Sequence
  Description of Artificial Sequence: Synthetic oligonucleotide
ucaccaaacaga

SEQ ID NO: 16966 - RNA, 11 nt, Artificial Sequence
  Description of Artificial Sequence: Synthetic oligonucleotide
gaacaugaugg

SEQ ID NO: 16967 - RNA, 11 nt, Artificial Sequence
  Description of Artificial Sequence: Synthetic oligonucleotide
auguagacugc

SEQ ID NO: 16968 - RNA, 12 nt, Artificial Sequence
  Description of Artificial Sequence: Synthetic oligonucleotide
gaucuauuuaug

SEQ ID NO: 16969 - RNA, 11 nt, Artificial Sequence
  Description of Artificial Sequence: Synthetic oligonucleotide
cacuauuauca

SEQ ID NO: 16970 - RNA, 10 nt, Artificial Sequence
  Description of Artificial Sequence: Synthetic oligonucleotide
ucaguucugc

SEQ ID NO: 16971 - RNA, 12 nt, Artificial Sequence
  Description of Artificial Sequence: Synthetic oligonucleotide
gauuaaaccuac

SEQ ID NO: 16972 - RNA, 12 nt, Artificial Sequence
  Description of Artificial Sequence: Synthetic oligonucleotide
uaaaauccuucu

SEQ ID NO: 16973 - RNA, 11 nt, Artificial Sequence
  Description of Artificial Sequence: Synthetic oligonucleotide
augcuguagac

SEQ ID NO: 16974 - RNA, 12 nt, Artificial Sequence
  Description of Artificial Sequence: Synthetic oligonucleotide
ugauaggaauag

SEQ ID NO: 16975 - RNA, 10 nt, Artificial Sequence
  Description of Artificial Sequence: Synthetic oligonucleotide
auggcccuga

SEQ ID NO: 16976 - RNA, 10 nt, Artificial Sequence
  Description of Artificial Sequence: Synthetic oligonucleotide
uccucaagca

SEQ ID NO: 16977 - RNA, 9 nt, Artificial Sequence
  Description of Artificial Sequence: Synthetic oligonucleotide
uucagccca

SEQ ID NO: 16978 - RNA, 10 nt, Artificial Sequence
  Description of Artificial Sequence: Synthetic oligonucleotide
cugcugaacc

SEQ ID NO: 16979 - RNA, 11 nt, Artificial Sequence
  Description of Artificial Sequence: Synthetic oligonucleotide
aguucucuuca

SEQ ID NO: 16980 - RNA, 10 nt, Artificial Sequence
  Description of Artificial Sequence: Synthetic oligonucleotide
cagccuagag

SEQ ID NO: 16981 - RNA, 12 nt, Artificial Sequence
  Description of Artificial Sequence: Synthetic oligonucleotide
ucugugaagugu

SEQ ID NO: 16982 - RNA, 13 nt, Artificial Sequence
  Description of Artificial Sequence: Synthetic oligonucleotide
gagaaaauuucaa

SEQ ID NO: 16983 - RNA, 10 nt, Artificial Sequence
  Description of Artificial Sequence: Synthetic oligonucleotide
auccuccuga

SEQ ID NO: 16984 - RNA, 11 nt, Artificial Sequence
  Description of Artificial Sequence: Synthetic oligonucleotide
ugacaucauau

SEQ ID NO: 16985 - RNA, 12 nt, Artificial Sequence
  Description of Artificial Sequence: Synthetic oligonucleotide
aucuucaucaua

SEQ ID NO: 16986 - RNA, 12 nt, Artificial Sequence
  Description of Artificial Sequence: Synthetic oligonucleotide
acuagcuauuaa

SEQ ID NO: 16987 - RNA, 13 nt, Artificial Sequence
  Description of Artificial Sequence: Synthetic oligonucleotide
cucuacuaaaaau

SEQ ID NO: 16988 - RNA, 11 nt, Artificial Sequence
  Description of Artificial Sequence: Synthetic oligonucleotide
cuaucucgccu

SEQ ID NO: 16989 - RNA, 12 nt, Artificial Sequence
  Description of Artificial Sequence: Synthetic oligonucleotide
uucgguccaguu

SEQ ID NO: 16990 - RNA, 10 nt, Artificial Sequence
  Description of Artificial Sequence: Synthetic oligonucleotide
auguagccgc

SEQ ID NO: 16991 - RNA, 11 nt, Artificial Sequence
  Description of Artificial Sequence: Synthetic oligonucleotide
gaggagacuug

SEQ ID NO: 16992 - RNA, 11 nt, Artificial Sequence
  Description of Artificial Sequence: Synthetic oligonucleotide
aguagugagga

SEQ ID NO: 16993 - RNA, 13 nt, Artificial Sequence
  Description of Artificial Sequence: Synthetic oligonucleotide
agaugaguacaaa

SEQ ID NO: 16994 - RNA, 12 nt, Artificial Sequence
  Description of Artificial Sequence: Synthetic oligonucleotide
uuguuaaugggc

SEQ ID NO: 16995 - RNA, 12 nt, Artificial Sequence
  Description of Artificial Sequence: Synthetic oligonucleotide
uuuuaauuuauu

SEQ ID NO: 16996 - RNA, 11 nt, Artificial Sequence
  Description of Artificial Sequence: Synthetic oligonucleotide
auuuaaauaug

SEQ ID NO: 16997 - RNA, 12 nt, Artificial Sequence
  Description of Artificial Sequence: Synthetic oligonucleotide
auccuuuguuuc

SEQ ID NO: 16998 - RNA, 13 nt, Artificial Sequence
  Description of Artificial Sequence: Synthetic oligonucleotide
gucuaaguguuug

SEQ ID NO: 16999 - RNA, 11 nt, Artificial Sequence
  Description of Artificial Sequence: Synthetic oligonucleotide
ccugugacaaa

SEQ ID NO: 17000 - RNA, 12 nt, Artificial Sequence
  Description of Artificial Sequence: Synthetic oligonucleotide
caggcugaauua

SEQ ID NO: 17001 - RNA, 13 nt, Artificial Sequence
  Description of Artificial Sequence: Synthetic oligonucleotide
ucauucuuacaau

SEQ ID NO: 17002 - RNA, 14 nt, Artificial Sequence
  Description of Artificial Sequence: Synthetic oligonucleotide
cauucuuacaauug

SEQ ID NO: 17003 - RNA, 11 nt, Artificial Sequence
  Description of Artificial Sequence: Synthetic oligonucleotide
agagaguguac

SEQ ID NO: 17004 - RNA, 11 nt, Artificial Sequence
  Description of Artificial Sequence: Synthetic oligonucleotide
gaacucagcag

SEQ ID NO: 17005 - RNA, 12 nt, Artificial Sequence
  Description of Artificial Sequence: Synthetic oligonucleotide
uuauuuucagua

SEQ ID NO: 17006 - RNA, 11 nt, Artificial Sequence
  Description of Artificial Sequence: Synthetic oligonucleotide
cuuaaauggaa

SEQ ID NO: 17007 - RNA, 12 nt, Artificial Sequence
  Description of Artificial Sequence: Synthetic oligonucleotide
gccuaaaauugu

SEQ ID NO: 17008 - RNA, 12 nt, Artificial Sequence
  Description of Artificial Sequence: Synthetic oligonucleotide
acuaacaucugg

SEQ ID NO: 17009 - RNA, 11 nt, Artificial Sequence
  Description of Artificial Sequence: Synthetic oligonucleotide
gacugugagcu

SEQ ID NO: 17010 - RNA, 13 nt, Artificial Sequence
  Description of Artificial Sequence: Synthetic oligonucleotide
gcuuuuuauuaau

SEQ ID NO: 17011 - RNA, 12 nt, Artificial Sequence
  Description of Artificial Sequence: Synthetic oligonucleotide
ucuucuuacauu

SEQ ID NO: 17012 - RNA, 14 nt, Artificial Sequence
  Description of Artificial Sequence: Synthetic oligonucleotide
auuuguaaaaaugu

SEQ ID NO: 17013 - RNA, 14 nt, Artificial Sequence
  Description of Artificial Sequence: Synthetic oligonucleotide
ucuuaauucauauu

SEQ ID NO: 17014 - RNA, 12 nt, Artificial Sequence
  Description of Artificial Sequence: Synthetic oligonucleotide
aacuaaucauga

SEQ ID NO: 17015 - RNA, 11 nt, Artificial Sequence
  Description of Artificial Sequence: Synthetic oligonucleotide
cugcucuuggg

SEQ ID NO: 17016 - RNA, 12 nt, Artificial Sequence
  Description of Artificial Sequence: Synthetic oligonucleotide
aguagcuuugag

SEQ ID NO: 17017 - RNA, 13 nt, Artificial Sequence
  Description of Artificial Sequence: Synthetic oligonucleotide
acguaauauuuca

SEQ ID NO: 17018 - RNA, 12 nt, Artificial Sequence
  Description of Artificial Sequence: Synthetic oligonucleotide
auucucuucacu

SEQ ID NO: 17019 - RNA, 13 nt, Artificial Sequence
  Description of Artificial Sequence: Synthetic oligonucleotide
uaaugcuaagaaa

SEQ ID NO: 17020 - RNA, 11 nt, Artificial Sequence
  Description of Artificial Sequence: Synthetic oligonucleotide
cugaaaaucaa

SEQ ID NO: 17021 - RNA, 13 nt, Artificial Sequence
  Description of Artificial Sequence: Synthetic oligonucleotide
auaugauuacuuu

SEQ ID NO: 17022 - RNA, 13 nt, Artificial Sequence
  Description of Artificial Sequence: Synthetic oligonucleotide
auuuuguucuaca

SEQ ID NO: 17023 - RNA, 11 nt, Artificial Sequence
  Description of Artificial Sequence: Synthetic oligonucleotide
ccgggacucuc

SEQ ID NO: 17024 - RNA, 13 nt, Artificial Sequence
  Description of Artificial Sequence: Synthetic oligonucleotide
cuuuaaaguaaag

SEQ ID NO: 17025 - RNA, 12 nt, Artificial Sequence
  Description of Artificial Sequence: Synthetic oligonucleotide
cuggaagccugg

SEQ ID NO: 17026 - RNA, 13 nt, Artificial Sequence
  Description of Artificial Sequence: Synthetic oligonucleotide
aaacaaaagagag

SEQ ID NO: 17027 - RNA, 12 nt, Artificial Sequence
  Description of Artificial Sequence: Synthetic oligonucleotide
ucaguuaugccg

SEQ ID NO: 17028 - RNA, 12 nt, Artificial Sequence
  Description of Artificial Sequence: Synthetic oligonucleotide
aaaagaagucca

SEQ ID NO: 17029 - RNA, 10 nt, Artificial Sequence
  Description of Artificial Sequence: Synthetic oligonucleotide
ggugagguua

SEQ ID NO: 17030 - RNA, 10 nt, Artificial Sequence
  Description of Artificial Sequence: Synthetic oligonucleotide
ggaagaggac

SEQ ID NO: 17031 - RNA, 12 nt, Artificial Sequence
  Description of Artificial Sequence: Synthetic oligonucleotide
agcaaguauugu

SEQ ID NO: 17032 - RNA, 11 nt, Artificial Sequence
  Description of Artificial Sequence: Synthetic oligonucleotide
uuguagcacuc

SEQ ID NO: 17033 - RNA, 13 nt, Artificial Sequence
  Description of Artificial Sequence: Synthetic oligonucleotide
caaaaccacaaau

SEQ ID NO: 17034 - RNA, 11 nt, Artificial Sequence
  Description of Artificial Sequence: Synthetic oligonucleotide
aagcccauaca

SEQ ID NO: 17035 - RNA, 10 nt, Artificial Sequence
  Description of Artificial Sequence: Synthetic oligonucleotide
gcccauacag

SEQ ID NO: 17036 - RNA, 11 nt, Artificial Sequence
  Description of Artificial Sequence: Synthetic oligonucleotide
agaaaccuucc

SEQ ID NO: 17037 - RNA, 9 nt, Artificial Sequence
  Description of Artificial Sequence: Synthetic oligonucleotide
uauaccuac

SEQ ID NO: 17038 - RNA, 12 nt, Artificial Sequence
  Description of Artificial Sequence: Synthetic oligonucleotide
ccaguuuucgga

SEQ ID NO: 17039 - RNA, 8 nt, Artificial Sequence
  Description of Artificial Sequence: Synthetic oligonucleotide
gaacaggg

SEQ ID NO: 17040 - RNA, 12 nt, Artificial Sequence
  Description of Artificial Sequence: Synthetic oligonucleotide
uaacuuuccagu

SEQ ID NO: 17041 - RNA, 13 nt, Artificial Sequence
  Description of Artificial Sequence: Synthetic oligonucleotide
aaguuugguuuug

SEQ ID NO: 17042 - RNA, 11 nt, Artificial Sequence
  Description of Artificial Sequence: Synthetic oligonucleotide
uucccacugua

SEQ ID NO: 17043 - RNA, 12 nt, Artificial Sequence
  Description of Artificial Sequence: Synthetic oligonucleotide
gauaccauauga

SEQ ID NO: 17044 - RNA, 10 nt, Artificial Sequence
  Description of Artificial Sequence: Synthetic oligonucleotide
acaugggcug

SEQ ID NO: 17045 - RNA, 12 nt, Artificial Sequence
  Description of Artificial Sequence: Synthetic oligonucleotide
aacuuuuucaua

SEQ ID NO: 17046 - RNA, 11 nt, Artificial Sequence
  Description of Artificial Sequence: Synthetic oligonucleotide
augaggccgga

SEQ ID NO: 17047 - RNA, 10 nt, Artificial Sequence
  Description of Artificial Sequence: Synthetic oligonucleotide
cugcauuugu

SEQ ID NO: 17048 - RNA, 12 nt, Artificial Sequence
  Description of Artificial Sequence: Synthetic oligonucleotide
auguuuacuacc

SEQ ID NO: 17049 - RNA, 14 nt, Artificial Sequence
  Description of Artificial Sequence: Synthetic oligonucleotide
auuuuuugaugaaa

SEQ ID NO: 17050 - RNA, 13 nt, Artificial Sequence
  Description of Artificial Sequence: Synthetic oligonucleotide
agugugugaauuu

SEQ ID NO: 17051 - RNA, 12 nt, Artificial Sequence
  Description of Artificial Sequence: Synthetic oligonucleotide
agcaauguaugu

SEQ ID NO: 17052 - RNA, 13 nt, Artificial Sequence
  Description of Artificial Sequence: Synthetic oligonucleotide
aagcacauauaua

SEQ ID NO: 17053 - RNA, 13 nt, Artificial Sequence
  Description of Artificial Sequence: Synthetic oligonucleotide
uaauaguuucucc

SEQ ID NO: 17054 - RNA, 12 nt, Artificial Sequence
  Description of Artificial Sequence: Synthetic oligonucleotide
guuucuccaaau

SEQ ID NO: 17055 - RNA, 12 nt, Artificial Sequence
  Description of Artificial Sequence: Synthetic oligonucleotide
acuuccuagaaa

SEQ ID NO: 17056 - RNA, 12 nt, Artificial Sequence
  Description of Artificial Sequence: Synthetic oligonucleotide
acaccauauaug

SEQ ID NO: 17057 - RNA, 13 nt, Artificial Sequence
  Description of Artificial Sequence: Synthetic oligonucleotide
uauaugaauggag

SEQ ID NO: 17058 - RNA, 12 nt, Artificial Sequence
  Description of Artificial Sequence: Synthetic oligonucleotide
cauuuacaggga

SEQ ID NO: 17059 - RNA, 12 nt, Artificial Sequence
  Description of Artificial Sequence: Synthetic oligonucleotide
auuuacagggac

SEQ ID NO: 17060 - RNA, 9 nt, Artificial Sequence
  Description of Artificial Sequence: Synthetic oligonucleotide
gggaccuga

SEQ ID NO: 17061 - RNA, 13 nt, Artificial Sequence
  Description of Artificial Sequence: Synthetic oligonucleotide
guuugacugcauc

SEQ ID NO: 17062 - RNA, 12 nt, Artificial Sequence
  Description of Artificial Sequence: Synthetic oligonucleotide
uugacugcaucg

SEQ ID NO: 17063 - RNA, 11 nt, Artificial Sequence
  Description of Artificial Sequence: Synthetic oligonucleotide
aguucacaggg

SEQ ID NO: 17064 - RNA, 12 nt, Artificial Sequence
  Description of Artificial Sequence: Synthetic oligonucleotide
gcaccucugucc

SEQ ID NO: 17065 - RNA, 14 nt, Artificial Sequence
  Description of Artificial Sequence: Synthetic oligonucleotide
guuugucuuuuuaa

SEQ ID NO: 17066 - RNA, 13 nt, Artificial Sequence
  Description of Artificial Sequence: Synthetic oligonucleotide
uugucuuuuuaag

SEQ ID NO: 17067 - RNA, 12 nt, Artificial Sequence
  Description of Artificial Sequence: Synthetic oligonucleotide
cuaaagguuguc

SEQ ID NO: 17068 - RNA, 11 nt, Artificial Sequence
  Description of Artificial Sequence: Synthetic oligonucleotide
agguugucgac

SEQ ID NO: 17069 - RNA, 12 nt, Artificial Sequence
  Description of Artificial Sequence: Synthetic oligonucleotide
ccuggcaauugu

SEQ ID NO: 17070 - RNA, 11 nt, Artificial Sequence
  Description of Artificial Sequence: Synthetic oligonucleotide
guggugcgagg

SEQ ID NO: 17071 - RNA, 12 nt, Artificial Sequence
  Description of Artificial Sequence: Synthetic oligonucleotide
gagacaugaaau

SEQ ID NO: 17072 - RNA, 12 nt, Artificial Sequence
  Description of Artificial Sequence: Synthetic oligonucleotide
uauauuucucca

SEQ ID NO: 17073 - RNA, 9 nt, Artificial Sequence
  Description of Artificial Sequence: Synthetic oligonucleotide
augaaggcu

SEQ ID NO: 17074 - RNA, 10 nt, Artificial Sequence
  Description of Artificial Sequence: Synthetic oligonucleotide
cuggaguggu

SEQ ID NO: 17075 - RNA, 10 nt, Artificial Sequence
  Description of Artificial Sequence: Synthetic oligonucleotide
ggaagagagg

SEQ ID NO: 17076 - RNA, 11 nt, Artificial Sequence
  Description of Artificial Sequence: Synthetic oligonucleotide
uugcaucgggc

SEQ ID NO: 17077 - RNA, 12 nt, Artificial Sequence
  Description of Artificial Sequence: Synthetic oligonucleotide
uauccuacugug

SEQ ID NO: 17078 - RNA, 12 nt, Artificial Sequence
  Description of Artificial Sequence: Synthetic oligonucleotide
ccuacuguguaa

SEQ ID NO: 17079 - RNA, 11 nt, Artificial Sequence
  Description of Artificial Sequence: Synthetic oligonucleotide
cuuguagugua

SEQ ID NO: 17080 - RNA, 12 nt, Artificial Sequence
  Description of Artificial Sequence: Synthetic oligonucleotide
cuuuguugauug

SEQ ID NO: 17081 - RNA, 13 nt, Artificial Sequence
  Description of Artificial Sequence: Synthetic oligonucleotide
uuguugauugaaa

SEQ ID NO: 17082 - RNA, 14 nt, Artificial Sequence
  Description of Artificial Sequence: Synthetic oligonucleotide
ucuuuuucuuccau

SEQ ID NO: 17083 - RNA, 12 nt, Artificial Sequence
  Description of Artificial Sequence: Synthetic oligonucleotide
aucuuccuucua

SEQ ID NO: 17084 - RNA, 12 nt, Artificial Sequence
  Description of Artificial Sequence: Synthetic oligonucleotide
ugaaugcuucau

SEQ ID NO: 17085 - RNA, 12 nt, Artificial Sequence
  Description of Artificial Sequence: Synthetic oligonucleotide
gaaugcuucaug

SEQ ID NO: 17086 - RNA, 12 nt, Artificial Sequence
  Description of Artificial Sequence: Synthetic oligonucleotide
auucuacuuuga

SEQ ID NO: 17087 - RNA, 12 nt, Artificial Sequence
  Description of Artificial Sequence: Synthetic oligonucleotide
gcaacuacagac

SEQ ID NO: 17088 - RNA, 12 nt, Artificial Sequence
  Description of Artificial Sequence: Synthetic oligonucleotide
accaaggucaac

SEQ ID NO: 17089 - RNA, 12 nt, Artificial Sequence
  Description of Artificial Sequence: Synthetic oligonucleotide
gacuaucucgac

SEQ ID NO: 17090 - RNA, 12 nt, Artificial Sequence
  Description of Artificial Sequence: Synthetic oligonucleotide
accuucccaaac

SEQ ID NO: 17091 - RNA, 13 nt, Artificial Sequence
  Description of Artificial Sequence: Synthetic oligonucleotide
caagcuuagaacu

SEQ ID NO: 17092 - RNA, 14 nt, Artificial Sequence
  Description of Artificial Sequence: Synthetic oligonucleotide
gcuuagaacuuuaa

SEQ ID NO: 17093 - RNA, 13 nt, Artificial Sequence
  Description of Artificial Sequence: Synthetic oligonucleotide
aacuuuaagcaac

SEQ ID NO: 17094 - RNA, 10 nt, Artificial Sequence
  Description of Artificial Sequence: Synthetic oligonucleotide
agaccaccac

SEQ ID NO: 17095 - RNA, 13 nt, Artificial Sequence
  Description of Artificial Sequence: Synthetic oligonucleotide
cgagaaauaaagu

SEQ ID NO: 17096 - RNA, 13 nt, Artificial Sequence
  Description of Artificial Sequence: Synthetic oligonucleotide
gagaaauaaaguu

SEQ ID NO: 17097 - RNA, 11 nt, Artificial Sequence
  Description of Artificial Sequence: Synthetic oligonucleotide
ggaaaugaucc

SEQ ID NO: 17098 - RNA, 12 nt, Artificial Sequence
  Description of Artificial Sequence: Synthetic oligonucleotide
aagaaaugaaac

SEQ ID NO: 17099 - RNA, 12 nt, Artificial Sequence
  Description of Artificial Sequence: Synthetic oligonucleotide
uuuccauccucc

SEQ ID NO: 17100 - RNA, 14 nt, Artificial Sequence
  Description of Artificial Sequence: Synthetic oligonucleotide
cugaaaaucuuuga

SEQ ID NO: 17101 - RNA, 10 nt, Artificial Sequence
  Description of Artificial Sequence: Synthetic oligonucleotide
gccguucagg

SEQ ID NO: 17102 - RNA, 12 nt, Artificial Sequence
  Description of Artificial Sequence: Synthetic oligonucleotide
aggguccagaag

SEQ ID NO: 17103 - RNA, 12 nt, Artificial Sequence
  Description of Artificial Sequence: Synthetic oligonucleotide
caagacugcuug

SEQ ID NO: 17104 - RNA, 12 nt, Artificial Sequence
  Description of Artificial Sequence: Synthetic oligonucleotide
ccaugucuuugg

SEQ ID NO: 17105 - RNA, 10 nt, Artificial Sequence
  Description of Artificial Sequence: Synthetic oligonucleotide
ccugaaacac

SEQ ID NO: 17106 - RNA, 11 nt, Artificial Sequence
  Description of Artificial Sequence: Synthetic oligonucleotide
cucuguaccuc

SEQ ID NO: 17107 - RNA, 11 nt, Artificial Sequence
  Description of Artificial Sequence: Synthetic oligonucleotide
gcaagacaaga

SEQ ID NO: 17108 - RNA, 12 nt, Artificial Sequence
  Description of Artificial Sequence: Synthetic oligonucleotide
caagacaagaaa

SEQ ID NO: 17109 - RNA, 11 nt, Artificial Sequence
  Description of Artificial Sequence: Synthetic oligonucleotide
guacaagaucc

SEQ ID NO: 17110 - RNA, 11 nt, Artificial Sequence
  Description of Artificial Sequence: Synthetic oligonucleotide
guacuugcaga

SEQ ID NO: 17111 - RNA, 12 nt, Artificial Sequence
  Description of Artificial Sequence: Synthetic oligonucleotide
gaucgauacaga

SEQ ID NO: 17112 - RNA, 12 nt, Artificial Sequence
  Description of Artificial Sequence: Synthetic oligonucleotide
auaaaaauaaau

SEQ ID NO: 17113 - RNA, 12 nt, Artificial Sequence
  Description of Artificial Sequence: Synthetic oligonucleotide
aaaaauaaauau

SEQ ID NO: 17114 - RNA, 12 nt, Artificial Sequence
  Description of Artificial Sequence: Synthetic oligonucleotide
uugacugcugug

SEQ ID NO: 17115 - RNA, 12 nt, Artificial Sequence
  Description of Artificial Sequence: Synthetic oligonucleotide
gagaugagagac

SEQ ID NO: 17116 - RNA, 9 nt, Artificial Sequence
  Description of Artificial Sequence: Synthetic oligonucleotide
cccacuugg

SEQ ID NO: 17117 - RNA, 5616 nt, Homo sapiens; identical to SEQ ID NO: 12844

SEQ ID NO: 17118 - RNA, 2239 nt, Homo sapiens; identical to SEQ ID NO: 12845

SEQ ID NO: 17119 - RNA, 1595 nt, Homo sapiens; identical to SEQ ID NO: 12846

SEQ ID NO: 17120 - RNA, 2865 nt, Homo sapiens; identical to SEQ ID NO: 12847

SEQ ID NO: 17121 - RNA, 4624 nt, Homo sapiens; identical to SEQ ID NO: 13489

SEQ ID NO: 17122 - RNA, 4816 nt, Homo sapiens; identical to SEQ ID NO: 13490

SEQ ID NO: 17123 - RNA, 5511 nt, Homo sapiens; identical to SEQ ID NO: 14229

SEQ ID NO: 17124 - RNA, 1050 nt, Homo sapiens; identical to SEQ ID NO: 14230

SEQ ID NO: 17125 - RNA, 11941 nt, Homo sapiens; identical to SEQ ID NO: 14807

SEQ ID NO: 17126 - RNA, 19 nt, Artificial Sequence
  Description of Artificial Sequence: Synthetic oligonucleotide
augucuacaugaucauggu

SEQ ID NO: 17127 - RNA, 19 nt, Artificial Sequence
  Description of Artificial Sequence: Synthetic oligonucleotide
gaugucuacaugaucaugg

SEQ ID NO: 17128 - RNA, 19 nt, Artificial Sequence
  Description of Artificial Sequence: Synthetic oligonucleotide
gucuacaugaucaugguca

SEQ ID NO: 17129 - RNA, 19 nt, Artificial Sequence
  Description of Artificial Sequence: Synthetic oligonucleotide
ucuacaugaucauggucaa

SEQ ID NO: 17130 - RNA, 19 nt, Artificial Sequence
  Description of Artificial Sequence: Synthetic oligonucleotide
ugucuacaugaucaugguc

SEQ ID NO: 17131 - RNA, 19 nt, Artificial Sequence
  Description of Artificial Sequence: Synthetic oligonucleotide
accagagugaugucuggag

SEQ ID NO: 17132 - RNA, 19 nt, Artificial Sequence
  Description of Artificial Sequence: Synthetic oligonucleotide
agagugaugucuggagcua

SEQ ID NO: 17133 - RNA, 19 nt, Artificial Sequence
  Description of Artificial Sequence: Synthetic oligonucleotide
caccagagugaugucugga

SEQ ID NO: 17134 - RNA, 19 nt, Artificial Sequence
  Description of Artificial Sequence: Synthetic oligonucleotide
cagagugaugucuggagcu

SEQ ID NO: 17135 - RNA, 19 nt, Artificial Sequence
  Description of Artificial Sequence: Synthetic oligonucleotide
ccagagugaugucuggagc

SEQ ID NO: 17136 - RNA, 19 nt, Artificial Sequence
  Description of Artificial Sequence: Synthetic oligonucleotide
guuugggaguugaugaccu

SEQ ID NO: 17137 - RNA, 19 nt, Artificial Sequence
  Description of Artificial Sequence: Synthetic oligonucleotide
uuugggaguugaugaccuu

SEQ ID NO: 17138 - RNA, 19 nt, Artificial Sequence
  Description of Artificial Sequence: Synthetic oligonucleotide
auggucaaauguuggauga

SEQ ID NO: 17139 - RNA, 19 nt, Artificial Sequence
  Description of Artificial Sequence: Synthetic oligonucleotide
cauggucaaauguuggaug

SEQ ID NO: 17140 - RNA, 19 nt, Artificial Sequence
  Description of Artificial Sequence: Synthetic oligonucleotide
ggucaaauguuggaugauu

SEQ ID NO: 17141 - RNA, 19 nt, Artificial Sequence
  Description of Artificial Sequence: Synthetic oligonucleotide
gucaaauguuggaugauug

SEQ ID NO: 17142 - RNA, 19 nt, Artificial Sequence
  Description of Artificial Sequence: Synthetic oligonucleotide
ucaaauguuggaugauuga

SEQ ID NO: 17143 - RNA, 19 nt, Artificial Sequence
  Description of Artificial Sequence: Synthetic oligonucleotide
ucauggucaaauguuggau

SEQ ID NO: 17144 - RNA, 19 nt, Artificial Sequence
  Description of Artificial Sequence: Synthetic oligonucleotide
uggucaaauguuggaugau

SEQ ID NO: 17145 - RNA, 19 nt, Artificial Sequence
  Description of Artificial Sequence: Synthetic oligonucleotide
acacagacugcuuugccug

SEQ ID NO: 17146 - RNA, 19 nt, Artificial Sequence
  Description of Artificial Sequence: Synthetic oligonucleotide
cacagacugcuuugccugc

SEQ ID NO: 17147 - RNA, 19 nt, Artificial Sequence
  Description of Artificial Sequence: Synthetic oligonucleotide
ggacacagacugcuuugcc

SEQ ID NO: 17148 - RNA, 19 nt, Artificial Sequence
  Description of Artificial Sequence: Synthetic oligonucleotide
aggacacagacugcuuugc

SEQ ID NO: 17149 - RNA, 19 nt, Artificial Sequence
  Description of Artificial Sequence: Synthetic oligonucleotide
gacacagacugcuuugccu

SEQ ID NO: 17150 - RNA, 19 nt, Artificial Sequence
  Description of Artificial Sequence: Synthetic oligonucleotide
accaucgaugucuacauga

SEQ ID NO: 17151 - RNA, 19 nt, Artificial Sequence
  Description of Artificial Sequence: Synthetic oligonucleotide
aucgaugucuacaugauca

SEQ ID NO: 17152 - RNA, 19 nt, Artificial Sequence
  Description of Artificial Sequence: Synthetic oligonucleotide
caucgaugucuacaugauc

SEQ ID NO: 17153 - RNA, 19 nt, Artificial Sequence
  Description of Artificial Sequence: Synthetic oligonucleotide
ccaucgaugucuacaugau

SEQ ID NO: 17154 - RNA, 19 nt, Artificial Sequence
  Description of Artificial Sequence: Synthetic oligonucleotide
cgaugucuacaugaucaug

SEQ ID NO: 17155 - RNA, 19 nt, Artificial Sequence
  Description of Artificial Sequence: Synthetic oligonucleotide
ucgaugucuacaugaucau

SEQ ID NO: 17156 - RNA, 19 nt, Artificial Sequence
  Description of Artificial Sequence: Synthetic oligonucleotide
agugaugucuggagcuacg

SEQ ID NO: 17157 - RNA, 19 nt, Artificial Sequence
  Description of Artificial Sequence: Synthetic oligonucleotide
auggucaagugcuggauga

SEQ ID NO: 17158 - RNA, 19 nt, Artificial Sequence
  Description of Artificial Sequence: Synthetic oligonucleotide
gagugaugucuggagcuac

SEQ ID NO: 17159 - RNA, 19 nt, Artificial Sequence
  Description of Artificial Sequence: Synthetic oligonucleotide
gugaugucuggagcuacgg

SEQ ID NO: 17160 - RNA, 19 nt, Artificial Sequence
  Description of Artificial Sequence: Synthetic oligonucleotide
uggucaagugcuggaugau

SEQ ID NO: 17161 - RNA, 19 nt, Artificial Sequence
  Description of Artificial Sequence: Synthetic oligonucleotide
acaugaucauggucaaaug

SEQ ID NO: 17162 - RNA, 19 nt, Artificial Sequence
  Description of Artificial Sequence: Synthetic oligonucleotide
cuacaugaucauggucaaa

SEQ ID NO: 17163 - RNA, 19 nt, Artificial Sequence
  Description of Artificial Sequence: Synthetic oligonucleotide
gugcccaucaaguggaugg

SEQ ID NO: 17164 - RNA, 19 nt, Artificial Sequence
  Description of Artificial Sequence: Synthetic oligonucleotide
uacaugaucauggucaaau

SEQ ID NO: 17165 - RNA, 19 nt, Artificial Sequence
  Description of Artificial Sequence: Synthetic oligonucleotide
ugcccaucaaguggauggc

SEQ ID NO: 17166 - RNA, 19 nt, Artificial Sequence
  Description of Artificial Sequence: Synthetic oligonucleotide
ugcggagacugcugcagga

SEQ ID NO: 17167 - RNA, 19 nt, Artificial Sequence
  Description of Artificial Sequence: Synthetic oligonucleotide
aucauggucaaauguugga

SEQ ID NO: 17168 - RNA, 19 nt, Artificial Sequence
  Description of Artificial Sequence: Synthetic oligonucleotide
augaucauggucaaauguu

SEQ ID NO: 17169 - RNA, 19 nt, Artificial Sequence
  Description of Artificial Sequence: Synthetic oligonucleotide
caaauguuggaugauugac

SEQ ID NO: 17170 - RNA, 19 nt, Artificial Sequence
  Description of Artificial Sequence: Synthetic oligonucleotide
caugaucauggucaaaugu

SEQ ID NO: 17171 - RNA, 19 nt, Artificial Sequence
  Description of Artificial Sequence: Synthetic oligonucleotide
gaucauggucaaauguugg

SEQ ID NO: 17172 - RNA, 19 nt, Artificial Sequence
  Description of Artificial Sequence: Synthetic oligonucleotide
ugaucauggucaaauguug

SEQ ID NO: 17173 - RNA, 19 nt, Artificial Sequence
  Description of Artificial Sequence: Synthetic oligonucleotide
gggaguugaugaccuucgg

SEQ ID NO: 17174 - RNA, 19 nt, Artificial Sequence
  Description of Artificial Sequence: Synthetic oligonucleotide
ugggaguugaugaccuucg

SEQ ID NO: 17175 - RNA, 19 nt, Artificial Sequence
  Description of Artificial Sequence: Synthetic oligonucleotide
uugggaguugaugaccuuc

SEQ ID NO: 17176 - RNA, 19 nt, Artificial Sequence
  Description of Artificial Sequence: Synthetic oligonucleotide
acuucaaugacaguggagc

SEQ ID NO: 17177 - RNA, 19 nt, Artificial Sequence
  Description of Artificial Sequence: Synthetic oligonucleotide
gaccucuccuuccugcagu

SEQ ID NO: 17178 - RNA, 19 nt, Artificial Sequence
  Description of Artificial Sequence: Synthetic oligonucleotide
aaaaucacagauuuugggc

SEQ ID NO: 17179 - RNA, 19 nt, Artificial Sequence
  Description of Artificial Sequence: Synthetic oligonucleotide
aaaucacagauuuugggcu

SEQ ID NO: 17180 - RNA, 19 nt, Artificial Sequence
  Description of Artificial Sequence: Synthetic oligonucleotide
acagauuuugggcuagcca

SEQ ID NO: 17181 - RNA, 19 nt, Artificial Sequence
  Description of Artificial Sequence: Synthetic oligonucleotide
aucacagauuuugggcuag

SEQ ID NO: 17182 - RNA, 19 nt, Artificial Sequence
  Description of Artificial Sequence: Synthetic oligonucleotide
augccauccaaacugcacc

SEQ ID NO: 17183 - RNA, 19 nt, Artificial Sequence
  Description of Artificial Sequence: Synthetic oligonucleotide
cacagauuuugggcuagcc

SEQ ID NO: 17184 - RNA, 19 nt, Artificial Sequence
  Description of Artificial Sequence: Synthetic oligonucleotide
gccauccaaacugcaccca

SEQ ID NO: 17185 - RNA, 19 nt, Artificial Sequence
  Description of Artificial Sequence: Synthetic oligonucleotide
ucacagauuuugggcuagc

SEQ ID NO: 17186 - RNA, 19 nt, Artificial Sequence
  Description of Artificial Sequence: Synthetic oligonucleotide
ugccauccaaacugcaccc

SEQ ID NO: 17187 - RNA, 19 nt, Artificial Sequence
  Description of Artificial Sequence: Synthetic oligonucleotide
cuuaugccccauggcugcc

SEQ ID NO: 17188 - RNA, 19 nt, Artificial Sequence
  Description of Artificial Sequence: Synthetic oligonucleotide
ugauggaugcugaggagua

SEQ ID NO: 17189 - RNA, 19 nt, Artificial Sequence
  Description of Artificial Sequence: Synthetic oligonucleotide
uuaugccccauggcugccu

SEQ ID NO: 17190 - RNA, 19 nt, Artificial Sequence
  Description of Artificial Sequence: Synthetic oligonucleotide
aaauguuggaugauugaug

SEQ ID NO: 17191 - RNA, 19 nt, Artificial Sequence
  Description of Artificial Sequence: Synthetic oligonucleotide
aacugcacccaagggugua

SEQ ID NO: 17192 - RNA, 19 nt, Artificial Sequence
  Description of Artificial Sequence: Synthetic oligonucleotide
acugcacccaaggguguaa

SEQ ID NO: 17193 - RNA, 19 nt, Artificial Sequence
  Description of Artificial Sequence: Synthetic oligonucleotide
caaauguuggaugauugau

SEQ ID NO: 17194 - RNA, 19 nt, Artificial Sequence
  Description of Artificial Sequence: Synthetic oligonucleotide
acaugaucauggucaagug

SEQ ID NO: 17195 - RNA, 19 nt, Artificial Sequence
  Description of Artificial Sequence: Synthetic oligonucleotide
acccaccagagugaugucu

SEQ ID NO: 17196 - RNA, 19 nt, Artificial Sequence
  Description of Artificial Sequence: Synthetic oligonucleotide
agugugcugcaggcugcac

SEQ ID NO: 17197 - RNA, 19 nt, Artificial Sequence
  Description of Artificial Sequence: Synthetic oligonucleotide
cagugugcugcaggcugca

SEQ ID NO: 17198 - RNA, 19 nt, Artificial Sequence
  Description of Artificial Sequence: Synthetic oligonucleotide
ccaccagagugaugucugg

SEQ ID NO: 17199 - RNA, 19 nt, Artificial Sequence
  Description of Artificial Sequence: Synthetic oligonucleotide
cccaccagagugaugucug

SEQ ID NO: 17200 - RNA, 19 nt, Artificial Sequence
  Description of Artificial Sequence: Synthetic oligonucleotide
ccgccugcugggcaucugc

SEQ ID NO: 17201 - RNA, 19 nt, Artificial Sequence
  Description of Artificial Sequence: Synthetic oligonucleotide
cgccugcugggcaucugcc

SEQ ID NO: 17202 - RNA, 19 nt, Artificial Sequence
  Description of Artificial Sequence: Synthetic oligonucleotide
cuacaugaucauggucaag

SEQ ID NO: 17203 - RNA, 19 nt, Artificial Sequence
  Description of Artificial Sequence: Synthetic oligonucleotide
gccugcugggcaucugccu

SEQ ID NO: 17204 - RNA, 19 nt, Artificial Sequence
  Description of Artificial Sequence: Synthetic oligonucleotide
gugccuaucaaguggaugg

SEQ ID NO: 17205 - RNA, 19 nt, Artificial Sequence
  Description of Artificial Sequence: Synthetic oligonucleotide
uacaugaucauggucaagu

SEQ ID NO: 17206 - RNA, 19 nt, Artificial Sequence
  Description of Artificial Sequence: Synthetic oligonucleotide
ugccuaucaaguggauggc

SEQ ID NO: 17207 - RNA, 19 nt, Artificial Sequence
  Description of Artificial Sequence: Synthetic oligonucleotide
ugcggaggcugcugcagga

SEQ ID NO: 17208 - RNA, 19 nt, Artificial Sequence
  Description of Artificial Sequence: Synthetic oligonucleotide
accguuugggaguugauga

SEQ ID NO: 17209 - RNA, 19 nt, Artificial Sequence
  Description of Artificial Sequence: Synthetic oligonucleotide
ccguuugggaguugaugac

SEQ ID NO: 17210 - RNA, 19 nt, Artificial Sequence
  Description of Artificial Sequence: Synthetic oligonucleotide
cguuugggaguugaugacc

SEQ ID NO: 17211 - RNA, 19 nt, Artificial Sequence
  Description of Artificial Sequence: Synthetic oligonucleotide
gaccguuugggaguugaug

SEQ ID NO: 17212 - RNA, 19 nt, Artificial Sequence
  Description of Artificial Sequence: Synthetic oligonucleotide
gggaguugaugaccuuugg

SEQ ID NO: 17213 - RNA, 19 nt, Artificial Sequence
  Description of Artificial Sequence: Synthetic oligonucleotide
gugaccguuugggaguuga

SEQ ID NO: 17214 - RNA, 19 nt, Artificial Sequence
  Description of Artificial Sequence: Synthetic oligonucleotide
ugaccguuugggaguugau

SEQ ID NO: 17215 - RNA, 19 nt, Artificial Sequence
  Description of Artificial Sequence: Synthetic oligonucleotide
ugggaguugaugaccuuug

SEQ ID NO: 17216 - RNA, 19 nt, Artificial Sequence
  Description of Artificial Sequence: Synthetic oligonucleotide
uugggaguugaugaccuuu

SEQ ID NO: 17217 - RNA, 19 nt, Artificial Sequence
  Description of Artificial Sequence: Synthetic oligonucleotide
aagaucacagauuuugggc

SEQ ID NO: 17218 - RNA, 19 nt, Artificial Sequence
  Description of Artificial Sequence: Synthetic oligonucleotide
acagauuuugggcuggcca

SEQ ID NO: 17219 - RNA, 19 nt, Artificial Sequence
  Description of Artificial Sequence: Synthetic oligonucleotide
agaucacagauuuugggcu

SEQ ID NO: 17220 - RNA, 19 nt, Artificial Sequence
  Description of Artificial Sequence: Synthetic oligonucleotide
aucacagauuuugggcugg

SEQ ID NO: 17221 - RNA, 19 nt, Artificial Sequence
  Description of Artificial Sequence: Synthetic oligonucleotide
cacagauuuugggcuggcc

SEQ ID NO: 17222 - RNA, 19 nt, Artificial Sequence
  Description of Artificial Sequence: Synthetic oligonucleotide
gccauccaaacugcaccua

SEQ ID NO: 17223 - RNA, 19 nt, Artificial Sequence
  Description of Artificial Sequence: Synthetic oligonucleotide
gugccauccaaacugcacc

SEQ ID NO: 17224 - RNA, 19 nt, Artificial Sequence
  Description of Artificial Sequence: Synthetic oligonucleotide
ucacagauuuugggcuggc

SEQ ID NO: 17225 - RNA, 19 nt, Artificial Sequence
  Description of Artificial Sequence: Synthetic oligonucleotide
ugccauccaaacugcaccu

SEQ ID NO: 17226 - RNA, 19 nt, Artificial Sequence
  Description of Artificial Sequence: Synthetic oligonucleotide
accagagugauguguggag

SEQ ID NO: 17227 - RNA, 19 nt, Artificial Sequence
  Description of Artificial Sequence: Synthetic oligonucleotide
accauugaugucuacauga

SEQ ID NO: 17228 - RNA, 19 nt, Artificial Sequence
  Description of Artificial Sequence: Synthetic oligonucleotide
acccaccagagugaugugu

SEQ ID NO: 17229 - RNA, 19 nt, Artificial Sequence
  Description of Artificial Sequence: Synthetic oligonucleotide
agugugcugccggcugcac

SEQ ID NO: 17230 - RNA, 19 nt, Artificial Sequence
  Description of Artificial Sequence: Synthetic oligonucleotide
auugaugucuacaugauca

SEQ ID NO: 17231 - RNA, 19 nt, Artificial Sequence
  Description of Artificial Sequence: Synthetic oligonucleotide
caccagagugaugugugga

SEQ ID NO: 17232 - RNA, 19 nt, Artificial Sequence
  Description of Artificial Sequence: Synthetic oligonucleotide
cagugugcugccggcugca

SEQ ID NO: 17233 - RNA, 19 nt, Artificial Sequence
  Description of Artificial Sequence: Synthetic oligonucleotide
cauugaugucuacaugauc

SEQ ID NO: 17234 - RNA, 19 nt, Artificial Sequence
  Description of Artificial Sequence: Synthetic oligonucleotide
ccaccagagugaugugugg

SEQ ID NO: 17235 - RNA, 19 nt, Artificial Sequence
  Description of Artificial Sequence: Synthetic oligonucleotide
ccauugaugucuacaugau

SEQ ID NO: 17236 - RNA, 19 nt, Artificial Sequence
  Description of Artificial Sequence: Synthetic oligonucleotide
cccaccagagugaugugug

SEQ ID NO: 17237 - RNA, 19 nt, Artificial Sequence
  Description of Artificial Sequence: Synthetic oligonucleotide
ccgccuucugggcaucugc

SEQ ID NO: 17238 - RNA, 19 nt, Artificial Sequence
  Description of Artificial Sequence: Synthetic oligonucleotide
cgccuucugggcaucugcc

SEQ ID NO: 17239 - RNA, 19 nt, Artificial Sequence
  Description of Artificial Sequence: Synthetic oligonucleotide
gccuucugggcaucugccu

SEQ ID NO: 17240 - RNA, 19 nt, Artificial Sequence
  Description of Artificial Sequence: Synthetic oligonucleotide
ugaugucuacaugaucaug

SEQ ID NO: 17241 - RNA, 19 nt, Artificial Sequence
  Description of Artificial Sequence: Synthetic oligonucleotide
uugaugucuacaugaucau

SEQ ID NO: 17242 - RNA, 19 nt, Artificial Sequence
  Description of Artificial Sequence: Synthetic oligonucleotide
aucugcaccauugaugucu

SEQ ID NO: 17243 - RNA, 19 nt, Artificial Sequence
  Description of Artificial Sequence: Synthetic oligonucleotide
caccauugaugucuacaug

SEQ ID NO: 17244 - RNA, 19 nt, Artificial Sequence
  Description of Artificial Sequence: Synthetic oligonucleotide
cugcaccauugaugucuac

SEQ ID NO: 17245 - RNA, 19 nt, Artificial Sequence
  Description of Artificial Sequence: Synthetic oligonucleotide
gcaccauugaugucuacau

SEQ ID NO: 17246 - RNA, 19 nt, Artificial Sequence
  Description of Artificial Sequence: Synthetic oligonucleotide
ucugcaccauugaugucua

SEQ ID NO: 17247 - RNA, 19 nt, Artificial Sequence
  Description of Artificial Sequence: Synthetic oligonucleotide
ugcaccauugaugucuaca

SEQ ID NO: 17248 - RNA, 19 nt, Artificial Sequence
  Description of Artificial Sequence: Synthetic oligonucleotide
cuuaugcccuauggcugcc

SEQ ID NO: 17249 - RNA, 19 nt, Artificial Sequence
  Description of Artificial Sequence: Synthetic oligonucleotide
ugguggaugcugaggagua

SEQ ID NO: 17250 - RNA, 19 nt, Artificial Sequence
  Description of Artificial Sequence: Synthetic oligonucleotide
uuaugcccuauggcugccu

SEQ ID NO: 17251 - RNA, 19 nt, Artificial Sequence
  Description of Artificial Sequence: Synthetic oligonucleotide
acacaccagagugaugucu

SEQ ID NO: 17252 - RNA, 19 nt, Artificial Sequence
  Description of Artificial Sequence: Synthetic oligonucleotide
acaccagagugaugucugg

SEQ ID NO: 17253 - RNA, 19 nt, Artificial Sequence
  Description of Artificial Sequence: Synthetic oligonucleotide
acaguuugggaguugauga

SEQ ID NO: 17254 - RNA, 19 nt, Artificial Sequence
  Description of Artificial Sequence: Synthetic oligonucleotide
agugaugucuggagcuaug

SEQ ID NO: 17255 - RNA, 19 nt, Artificial Sequence
  Description of Artificial Sequence: Synthetic oligonucleotide
aguuugggaguugaugacc

SEQ ID NO: 17256 - RNA, 19 nt, Artificial Sequence
  Description of Artificial Sequence: Synthetic oligonucleotide
auggucaaguguuggauga

SEQ ID NO: 17257 - RNA, 19 nt, Artificial Sequence
  Description of Artificial Sequence: Synthetic oligonucleotide
cacaccagagugaugucug

SEQ ID NO: 17258 - RNA, 19 nt, Artificial Sequence
  Description of Artificial Sequence: Synthetic oligonucleotide
caguuugggaguugaugac

SEQ ID NO: 17259 - RNA, 19 nt, Artificial Sequence
  Description of Artificial Sequence: Synthetic oligonucleotide
gacaguuugggaguugaug

SEQ ID NO: 17260 - RNA, 19 nt, Artificial Sequence
  Description of Artificial Sequence: Synthetic oligonucleotide
gagugaugucuggagcuau

SEQ ID NO: 17261 - RNA, 19 nt, Artificial Sequence
  Description of Artificial Sequence: Synthetic oligonucleotide
gugacaguuugggaguuga

SEQ ID NO: 17262 - RNA, 19 nt, Artificial Sequence
  Description of Artificial Sequence: Synthetic oligonucleotide
gugaugucuggagcuaugg

SEQ ID NO: 17263 - RNA, 19 nt, Artificial Sequence
  Description of Artificial Sequence: Synthetic oligonucleotide
ugacaguuugggaguugau

SEQ ID NO: 17264 - RNA, 19 nt, Artificial Sequence
  Description of Artificial Sequence: Synthetic oligonucleotide
uggucaaguguuggaugau

SEQ ID NO: 17265 - RNA, 19 nt, Artificial Sequence
  Description of Artificial Sequence: Synthetic oligonucleotide
aucugcacaauugaugucu

SEQ ID NO: 17266 - RNA, 19 nt, Artificial Sequence
  Description of Artificial Sequence: Synthetic oligonucleotide
cacaauugaugucuacaug

SEQ ID NO: 17267 - RNA, 19 nt, Artificial Sequence
  Description of Artificial Sequence: Synthetic oligonucleotide
cugcacaauugaugucuac

SEQ ID NO: 17268 - RNA, 19 nt, Artificial Sequence
  Description of Artificial Sequence: Synthetic oligonucleotide
gcacaauugaugucuacau

SEQ ID NO: 17269 - RNA, 19 nt, Artificial Sequence
  Description of Artificial Sequence: Synthetic oligonucleotide
ggucaaguguuggaugauu

SEQ ID NO: 17270 - RNA, 19 nt, Artificial Sequence
  Description of Artificial Sequence: Synthetic oligonucleotide
gucaaguguuggaugauug

SEQ ID NO: 17271 - RNA, 19 nt, Artificial Sequence
  Description of Artificial Sequence: Synthetic oligonucleotide
ucaaguguuggaugauuga

SEQ ID NO: 17272 - RNA, 19 nt, Artificial Sequence
  Description of Artificial Sequence: Synthetic oligonucleotide
ucugcacaauugaugucua

SEQ ID NO: 17273 - RNA, 19 nt, Artificial Sequence
  Description of Artificial Sequence: Synthetic oligonucleotide
ugcacaauugaugucuaca

SEQ ID NO: 17274 - RNA, 19 nt, Artificial Sequence
  Description of Artificial Sequence: Synthetic oligonucleotide
aaguguuggaugauugaug

SEQ ID NO: 17275 - RNA, 19 nt, Artificial Sequence
  Description of Artificial Sequence: Synthetic oligonucleotide
acagacugcuuugccugcc

SEQ ID NO: 17276 - RNA, 19 nt, Artificial Sequence
  Description of Artificial Sequence: Synthetic oligonucleotide
augacaguggagccugugu

SEQ ID NO: 17277 - RNA, 19 nt, Artificial Sequence
  Description of Artificial Sequence: Synthetic oligonucleotide
caaguguuggaugauugau

SEQ ID NO: 17278 - RNA, 19 nt, Artificial Sequence
  Description of Artificial Sequence: Synthetic oligonucleotide
caaugacaguggagccugu

SEQ ID NO: 17279 - RNA, 19 nt, Artificial Sequence
  Description of Artificial Sequence: Synthetic oligonucleotide
ccucaggacacagacugcu

SEQ ID NO: 17280 - RNA, 19 nt, Artificial Sequence
  Description of Artificial Sequence: Synthetic oligonucleotide
cucaggacacagacugcuu

SEQ ID NO: 17281 - RNA, 19 nt, Artificial Sequence
  Description of Artificial Sequence: Synthetic oligonucleotide
uucgagaagugacaggcua

SEQ ID NO: 17282 - RNA, 19 nt, Artificial Sequence
  Description of Artificial Sequence: Synthetic oligonucleotide
acauggucauggucaaaug

SEQ ID NO: 17283 - RNA, 19 nt, Artificial Sequence
  Description of Artificial Sequence: Synthetic oligonucleotide
auggucauggucaaauguu

SEQ ID NO: 17284 - RNA, 19 nt, Artificial Sequence
  Description of Artificial Sequence: Synthetic oligonucleotide
cauggucauggucaaaugu

SEQ ID NO: 17285 - RNA, 19 nt, Artificial Sequence
  Description of Artificial Sequence: Synthetic oligonucleotide
ggucauggucaaauguugg

SEQ ID NO: 17286 - RNA, 19 nt, Artificial Sequence
  Description of Artificial Sequence: Synthetic oligonucleotide
gucauggucaaauguugga

SEQ ID NO: 17287 - RNA, 19 nt, Artificial Sequence
  Description of Artificial Sequence: Synthetic oligonucleotide
uacauggucauggucaaau

SEQ ID NO: 17288 - RNA, 19 nt, Artificial Sequence
  Description of Artificial Sequence: Synthetic oligonucleotide
uggucauggucaaauguug

SEQ ID NO: 17289 - RNA, 19 nt, Artificial Sequence
  Description of Artificial Sequence: Synthetic oligonucleotide
aaggacacagacugcuuug

SEQ ID NO: 17290 - RNA, 19 nt, Artificial Sequence
  Description of Artificial Sequence: Synthetic oligonucleotide
aaugacaguggagcaugug

SEQ ID NO: 17291 - RNA, 19 nt, Artificial Sequence
  Description of Artificial Sequence: Synthetic oligonucleotide
acagacugcuuugccugca

SEQ ID NO: 17292 - RNA, 19 nt, Artificial Sequence
  Description of Artificial Sequence: Synthetic oligonucleotide
acuucaguguuuuuucuaa

SEQ ID NO: 17293 - RNA, 19 nt, Artificial Sequence
  Description of Artificial Sequence: Synthetic oligonucleotide
augacaguggagcaugugu

SEQ ID NO: 17294 - RNA, 19 nt, Artificial Sequence
  Description of Artificial Sequence: Synthetic oligonucleotide
auuucaaugacaguggagc

SEQ ID NO: 17295 - RNA, 19 nt, Artificial Sequence
  Description of Artificial Sequence: Synthetic oligonucleotide
caaugacaguggagcaugu

SEQ ID NO: 17296 - RNA, 19 nt, Artificial Sequence
  Description of Artificial Sequence: Synthetic oligonucleotide
ccuaaggacacagacugcu

SEQ ID NO: 17297 - RNA, 19 nt, Artificial Sequence
  Description of Artificial Sequence: Synthetic oligonucleotide
cuaaggacacagacugcuu

SEQ ID NO: 17298 - RNA, 19 nt, Artificial Sequence
  Description of Artificial Sequence: Synthetic oligonucleotide
gaccucuccuuccugcggu

SEQ ID NO: 17299 - RNA, 19 nt, Artificial Sequence
  Description of Artificial Sequence: Synthetic oligonucleotide
guccacauaacuuuguggu

SEQ ID NO: 17300 - RNA, 19 nt, Artificial Sequence
  Description of Artificial Sequence: Synthetic oligonucleotide
uaaggacacagacugcuuu

SEQ ID NO: 17301 - RNA, 19 nt, Artificial Sequence
  Description of Artificial Sequence: Synthetic oligonucleotide
ucaaugacaguggagcaug

SEQ ID NO: 17302 - RNA, 19 nt, Artificial Sequence
  Description of Artificial Sequence: Synthetic oligonucleotide
uguccacauaacuuugugg

SEQ ID NO: 17303 - RNA, 19 nt, Artificial Sequence
  Description of Artificial Sequence: Synthetic oligonucleotide
uucaaugacaguggagcau

SEQ ID NO: 17304 - RNA, 19 nt, Artificial Sequence
  Description of Artificial Sequence: Synthetic oligonucleotide
uucgagaagucacaggcua

SEQ ID NO: 17305 - RNA, 19 nt, Artificial Sequence
  Description of Artificial Sequence: Synthetic oligonucleotide
ccaaaauggcccgagaccc

SEQ ID NO: 17306 - RNA, 19 nt, Artificial Sequence
  Description of Artificial Sequence: Synthetic oligonucleotide
cggagacugcugcaggaaa

SEQ ID NO: 17307 - RNA, 19 nt, Artificial Sequence
  Description of Artificial Sequence: Synthetic oligonucleotide
gcggagacugcugcaggaa

SEQ ID NO: 17308 - RNA, 19 nt, Artificial Sequence
  Description of Artificial Sequence: Synthetic oligonucleotide
aagagaucacagguuaccu

SEQ ID NO: 17309 - RNA, 19 nt, Artificial Sequence
  Description of Artificial Sequence: Synthetic oligonucleotide
agagaucacagguuaccua

SEQ ID NO: 17310 - RNA, 19 nt, Artificial Sequence
  Description of Artificial Sequence: Synthetic oligonucleotide
agccccccaucugcaccau

SEQ ID NO: 17311 - RNA, 19 nt, Artificial Sequence
  Description of Artificial Sequence: Synthetic oligonucleotide
cagccccccaucugcacca

SEQ ID NO: 17312 - RNA, 19 nt, Artificial Sequence
  Description of Artificial Sequence: Synthetic oligonucleotide
cccagccccccaucugcac

SEQ ID NO: 17313 - RNA, 19 nt, Artificial Sequence
  Description of Artificial Sequence: Synthetic oligonucleotide
ccccagccccccaucugca

SEQ ID NO: 17314 - RNA, 19 nt, Artificial Sequence
  Description of Artificial Sequence: Synthetic oligonucleotide
cccccaucugcaccauuga

SEQ ID NO: 17315 - RNA, 19 nt, Artificial Sequence
  Description of Artificial Sequence: Synthetic oligonucleotide
ccccccaucugcaccauug

SEQ ID NO: 17316 - RNA, 19 nt, Artificial Sequence
  Description of Artificial Sequence: Synthetic oligonucleotide
gccccagccccccaucugc

SEQ ID NO: 17317 - RNA, 19 nt, Artificial Sequence
  Description of Artificial Sequence: Synthetic oligonucleotide
gccccccaucugcaccauu

SEQ ID NO: 17318 - RNA, 19 nt, Artificial Sequence
  Description of Artificial Sequence: Synthetic oligonucleotide
ugccccagccccccaucug

SEQ ID NO: 17319 - RNA, 19 nt, Artificial Sequence
  Description of Artificial Sequence: Synthetic oligonucleotide
aaagagacagagcuaagga

SEQ ID NO: 17320 - RNA, 19 nt, Artificial Sequence
  Description of Artificial Sequence: Synthetic oligonucleotide
aagagacagagcuaaggaa

SEQ ID NO: 17321 - RNA, 19 nt, Artificial Sequence
  Description of Artificial Sequence: Synthetic oligonucleotide
agagacagagcuaaggaag

SEQ ID NO: 17322 - RNA, 19 nt, Artificial Sequence
  Description of Artificial Sequence: Synthetic oligonucleotide
aacuucaguguuuuuucca

SEQ ID NO: 17323 - RNA, 19 nt, Artificial Sequence
  Description of Artificial Sequence: Synthetic oligonucleotide
aaucacagauuuugggcua

SEQ ID NO: 17324 - RNA, 19 nt, Artificial Sequence
  Description of Artificial Sequence: Synthetic oligonucleotide
acccaugccauccaaacug

SEQ ID NO: 17325 - RNA, 19 nt, Artificial Sequence
  Description of Artificial Sequence: Synthetic oligonucleotide
cacccaugccauccaaacu

SEQ ID NO: 17326 - RNA, 19 nt, Artificial Sequence
  Description of Artificial Sequence: Synthetic oligonucleotide
caugccauccaaacugcac

SEQ ID NO: 17327 - RNA, 19 nt, Artificial Sequence
  Description of Artificial Sequence: Synthetic oligonucleotide
ccacccaugccauccaaac

SEQ ID NO: 17328 - RNA, 19 nt, Artificial Sequence
  Description of Artificial Sequence: Synthetic oligonucleotide
ccaugccauccaaacugca

SEQ ID NO: 17329 - RNA, 19 nt, Artificial Sequence
  Description of Artificial Sequence: Synthetic oligonucleotide
cccaugccauccaaacugc

SEQ ID NO: 17330 - RNA, 19 nt, Artificial Sequence
  Description of Artificial Sequence: Synthetic oligonucleotide
gccacccaugccauccaaa

SEQ ID NO: 17331 - RNA, 19 nt, Artificial Sequence
  Description of Artificial Sequence: Synthetic oligonucleotide
ggaacugaugaccuuugga

SEQ ID NO: 17332 - RNA, 19 nt, Artificial Sequence
  Description of Artificial Sequence: Synthetic oligonucleotide
gggaacugaugaccuuugg

SEQ ID NO: 17333 - RNA, 19 nt, Artificial Sequence
  Description of Artificial Sequence: Synthetic oligonucleotide
gugccacccaugccaucca

SEQ ID NO: 17334 - RNA, 19 nt, Artificial Sequence
  Description of Artificial Sequence: Synthetic oligonucleotide
ugccacccaugccauccaa

SEQ ID NO: 17335 - RNA, 19 nt, Artificial Sequence
  Description of Artificial Sequence: Synthetic oligonucleotide
ugggaacugaugaccuuug

SEQ ID NO: 17336 - RNA, 19 nt, Artificial Sequence
  Description of Artificial Sequence: Synthetic oligonucleotide
aacuuaugccccauggcug

SEQ ID NO: 17337 - RNA, 19 nt, Artificial Sequence
  Description of Artificial Sequence: Synthetic oligonucleotide
acuuaugccccauggcugc

SEQ ID NO: 17338 - RNA, 19 nt, Artificial Sequence
  Description of Artificial Sequence: Synthetic oligonucleotide
caacuuaugccccauggcu

SEQ ID NO: 17339 - RNA, 19 nt, Artificial Sequence
  Description of Artificial Sequence: Synthetic oligonucleotide
gauggaugcugaggaguac

SEQ ID NO: 17340 - RNA, 19 nt, Artificial Sequence
  Description of Artificial Sequence: Synthetic oligonucleotide
aaacugcacccaagggugu

SEQ ID NO: 17341 - RNA, 19 nt, Artificial Sequence
  Description of Artificial Sequence: Synthetic oligonucleotide
cccugaaggaaaucagcgc

SEQ ID NO: 17342 - RNA, 19 nt, Artificial Sequence
  Description of Artificial Sequence: Synthetic oligonucleotide
ucccugaaggaaaucagcg

SEQ ID NO: 17343 - RNA, 19 nt, Artificial Sequence
  Description of Artificial Sequence: Synthetic oligonucleotide
ugacaacccugacuacugg

SEQ ID NO: 17344 - RNA, 19 nt, Artificial Sequence
  Description of Artificial Sequence: Synthetic oligonucleotide
uugacaacccugacuacug

SEQ ID NO: 17345 - RNA, 19 nt, Artificial Sequence
  Description of Artificial Sequence: Synthetic oligonucleotide
uuugacaacccugacuacu

SEQ ID NO: 17346 - RNA, 19 nt, Artificial Sequence
  Description of Artificial Sequence: Synthetic oligonucleotide
aaagccaacaaggaaaucc

SEQ ID NO: 17347 - RNA, 19 nt, Artificial Sequence
  Description of Artificial Sequence: Synthetic oligonucleotide
aaagugccuaucaagugga

SEQ ID NO: 17348 - RNA, 19 nt, Artificial Sequence
  Description of Artificial Sequence: Synthetic oligonucleotide
aacuggugugugcagaucg

SEQ ID NO: 17349 - RNA, 19 nt, Artificial Sequence
  Description of Artificial Sequence: Synthetic oligonucleotide
aagccaacaaggaaauccu

SEQ ID NO: 17350 - RNA, 19 nt, Artificial Sequence
  Description of Artificial Sequence: Synthetic oligonucleotide
aagugccuaucaaguggau

SEQ ID NO: 17351 - RNA, 19 nt, Artificial Sequence
  Description of Artificial Sequence: Synthetic oligonucleotide
accaugcagaaggaggcaa

SEQ ID NO: 17352 - RNA, 19 nt, Artificial Sequence
  Description of Artificial Sequence: Synthetic oligonucleotide
acuggugugugcagaucgc

SEQ ID NO: 17353 - RNA, 19 nt, Artificial Sequence
  Description of Artificial Sequence: Synthetic oligonucleotide
agaaagaauaccaugcaga

SEQ ID NO: 17354 - RNA, 19 nt, Artificial Sequence
  Description of Artificial Sequence: Synthetic oligonucleotide
agugccuaucaaguggaug

SEQ ID NO: 17355 - RNA, 19 nt, Artificial Sequence
  Description of Artificial Sequence: Synthetic oligonucleotide
aucaaguggauggcauugg

SEQ ID NO: 17356 - RNA, 19 nt, Artificial Sequence
  Description of Artificial Sequence: Synthetic oligonucleotide
aucauggucaagugcugga

SEQ ID NO: 17357 - RNA, 19 nt, Artificial Sequence
  Description of Artificial Sequence: Synthetic oligonucleotide
augaucauggucaagugcu

SEQ ID NO: 17358 - RNA, 19 nt, Artificial Sequence
  Description of Artificial Sequence: Synthetic oligonucleotide
auggcccgagacccccagc

SEQ ID NO: 17359 - RNA, 19 nt, Artificial Sequence
  Description of Artificial Sequence: Synthetic oligonucleotide
caaagugccuaucaagugg

SEQ ID NO: 17360 - RNA, 19 nt, Artificial Sequence
  Description of Artificial Sequence: Synthetic oligonucleotide
caugaucauggucaagugc

SEQ ID NO: 17361 - RNA, 19 nt, Artificial Sequence
  Description of Artificial Sequence: Synthetic oligonucleotide
cauggucaagugcuggaug

SEQ ID NO: 17362 - RNA, 19 nt, Artificial Sequence
  Description of Artificial Sequence: Synthetic oligonucleotide
cugcaggcugcacaggccc

SEQ ID NO: 17363 - RNA, 19 nt, Artificial Sequence
  Description of Artificial Sequence: Synthetic oligonucleotide
gagaaagaauaccaugcag

SEQ ID NO: 17364 - RNA, 19 nt, Artificial Sequence
  Description of Artificial Sequence: Synthetic oligonucleotide
gaucauggucaagugcugg

SEQ ID NO: 17365 - RNA, 19 nt, Artificial Sequence
  Description of Artificial Sequence: Synthetic oligonucleotide
gcaaagugccuaucaagug

SEQ ID NO: 17366 - RNA, 19 nt, Artificial Sequence
  Description of Artificial Sequence: Synthetic oligonucleotide
gcccgagacccccagcgcu

SEQ ID NO: 17367 - RNA, 19 nt, Artificial Sequence
  Description of Artificial Sequence: Synthetic oligonucleotide
gccuaucaaguggauggca

SEQ ID NO: 17368 - RNA, 19 nt, Artificial Sequence
  Description of Artificial Sequence: Synthetic oligonucleotide
gcugcaggcugcacaggcc

SEQ ID NO: 17369 - RNA, 19 nt, Artificial Sequence
  Description of Artificial Sequence: Synthetic oligonucleotide
ggcaaagugccuaucaagu

SEQ ID NO: 17370 - RNA, 19 nt, Artificial Sequence
  Description of Artificial Sequence: Synthetic oligonucleotide
ggcccgagacccccagcgc

SEQ ID NO: 17371 - RNA, 19 nt, Artificial Sequence
  Description of Artificial Sequence: Synthetic oligonucleotide
guaccaucgaugucuacau

SEQ ID NO: 17372 - RNA, 19 nt, Artificial Sequence
  Description of Artificial Sequence: Synthetic oligonucleotide
gugcugcaggcugcacagg

SEQ ID NO: 17373 - RNA, 19 nt, Artificial Sequence
  Description of Artificial Sequence: Synthetic oligonucleotide
gugugcugcaggcugcaca

SEQ ID NO: 17374 - RNA, 19 nt, Artificial Sequence
  Description of Artificial Sequence: Synthetic oligonucleotide
uaccaucgaugucuacaug

SEQ ID NO: 17375 - RNA, 19 nt, Artificial Sequence
  Description of Artificial Sequence: Synthetic oligonucleotide
uaccaugcagaaggaggca

SEQ ID NO: 17376 - RNA, 19 nt, Artificial Sequence
  Description of Artificial Sequence: Synthetic oligonucleotide
ucaaguggauggcauugga

SEQ ID NO: 17377 - RNA, 19 nt, Artificial Sequence
  Description of Artificial Sequence: Synthetic oligonucleotide
ucauggucaagugcuggau

SEQ ID NO: 17378 - RNA, 19 nt, Artificial Sequence
  Description of Artificial Sequence: Synthetic oligonucleotide
ugaucauggucaagugcug

SEQ ID NO: 17379 - RNA, 19 nt, Artificial Sequence
  Description of Artificial Sequence: Synthetic oligonucleotide
ugcaggcugcacaggcccc

SEQ ID NO: 17380 - RNA, 19 nt, Artificial Sequence
  Description of Artificial Sequence: Synthetic oligonucleotide
ugcugcaggcugcacaggc

SEQ ID NO: 17381 - RNA, 19 nt, Artificial Sequence
  Description of Artificial Sequence: Synthetic oligonucleotide
uggcccgagacccccagcg

SEQ ID NO: 17382 - RNA, 19 nt, Artificial Sequence
  Description of Artificial Sequence: Synthetic oligonucleotide
ugguggaugccgacgagua

SEQ ID NO: 17383 - RNA, 19 nt, Artificial Sequence
  Description of Artificial Sequence: Synthetic oligonucleotide
uguaccaucgaugucuaca

SEQ ID NO: 17384 - RNA, 19 nt, Artificial Sequence
  Description of Artificial Sequence: Synthetic oligonucleotide
ugugcugcaggcugcacag

SEQ ID NO: 17385 - RNA, 19 nt, Artificial Sequence
  Description of Artificial Sequence: Synthetic oligonucleotide
acugccagaaacugaccaa

SEQ ID NO: 17386 - RNA, 19 nt, Artificial Sequence
  Description of Artificial Sequence: Synthetic oligonucleotide
augucuggagcuacggggu

SEQ ID NO: 17387 - RNA, 19 nt, Artificial Sequence
  Description of Artificial Sequence: Synthetic oligonucleotide
gaugucuggagcuacgggg

SEQ ID NO: 17388 - RNA, 19 nt, Artificial Sequence
  Description of Artificial Sequence: Synthetic oligonucleotide
ggaguugaugaccuuugga

SEQ ID NO: 17389 - RNA, 19 nt, Artificial Sequence
  Description of Artificial Sequence: Synthetic oligonucleotide
ggucaagugcuggaugaua

SEQ ID NO: 17390 - RNA, 19 nt, Artificial Sequence
  Description of Artificial Sequence: Synthetic oligonucleotide
gucaagugcuggaugauag

SEQ ID NO: 17391 - RNA, 19 nt, Artificial Sequence
  Description of Artificial Sequence: Synthetic oligonucleotide
gucuggagcuacgggguga

SEQ ID NO: 17392 - RNA, 19 nt, Artificial Sequence
  Description of Artificial Sequence: Synthetic oligonucleotide
ucaagugcuggaugauaga

SEQ ID NO: 17393 - RNA, 19 nt, Artificial Sequence
  Description of Artificial Sequence: Synthetic oligonucleotide
ucuggagcuacggggugac

SEQ ID NO: 17394 - RNA, 19 nt, Artificial Sequence
  Description of Artificial Sequence: Synthetic oligonucleotide
ugaccaaaaucaucugugc

SEQ ID NO: 17395 - RNA, 19 nt, Artificial Sequence
  Description of Artificial Sequence: Synthetic oligonucleotide
ugaugucuggagcuacggg

SEQ ID NO: 17396 - RNA, 19 nt, Artificial Sequence
  Description of Artificial Sequence: Synthetic oligonucleotide
ugucuggagcuacggggug

SEQ ID NO: 17397 - RNA, 19 nt, Artificial Sequence
  Description of Artificial Sequence: Synthetic oligonucleotide
agauuuugggcuggccaaa

SEQ ID NO: 17398 - RNA, 19 nt, Artificial Sequence
  Description of Artificial Sequence: Synthetic oligonucleotide
auuuugggcuggccaaacu

SEQ ID NO: 17399 - RNA, 19 nt, Artificial Sequence
  Description of Artificial Sequence: Synthetic oligonucleotide
cagauuuugggcuggccaa

SEQ ID NO: 17400 - RNA, 19 nt, Artificial Sequence
  Description of Artificial Sequence: Synthetic oligonucleotide
cucaacuggugugugcaga

SEQ ID NO: 17401 - RNA, 19 nt, Artificial Sequence
  Description of Artificial Sequence: Synthetic oligonucleotide
cugcucaacuggugugugc

SEQ ID NO: 17402 - RNA, 19 nt, Artificial Sequence
  Description of Artificial Sequence: Synthetic oligonucleotide
gauuuugggcuggccaaac

SEQ ID NO: 17403 - RNA, 19 nt, Artificial Sequence
  Description of Artificial Sequence: Synthetic oligonucleotide
gcucaacuggugugugcag

SEQ ID NO: 17404 - RNA, 19 nt, Artificial Sequence
  Description of Artificial Sequence: Synthetic oligonucleotide
ucaacuggugugugcagau

SEQ ID NO: 17405 - RNA, 19 nt, Artificial Sequence
  Description of Artificial Sequence: Synthetic oligonucleotide
ugcucaacuggugugugca

SEQ ID NO: 17406 - RNA, 19 nt, Artificial Sequence
  Description of Artificial Sequence: Synthetic oligonucleotide
aaagccaacaaagaaaucu

SEQ ID NO: 17407 - RNA, 19 nt, Artificial Sequence
  Description of Artificial Sequence: Synthetic oligonucleotide
aacugguguaugcagauug

SEQ ID NO: 17408 - RNA, 19 nt, Artificial Sequence
  Description of Artificial Sequence: Synthetic oligonucleotide
aagccaacaaagaaaucuu

SEQ ID NO: 17409 - RNA, 19 nt, Artificial Sequence
  Description of Artificial Sequence: Synthetic oligonucleotide
aaggugcccaucaagugga

SEQ ID NO: 17410 - RNA, 19 nt, Artificial Sequence
  Description of Artificial Sequence: Synthetic oligonucleotide
acaucccccaaagccaaca

SEQ ID NO: 17411 - RNA, 19 nt, Artificial Sequence
  Description of Artificial Sequence: Synthetic oligonucleotide
accugcugaacugguguau

SEQ ID NO: 17412 - RNA, 19 nt, Artificial Sequence
  Description of Artificial Sequence: Synthetic oligonucleotide
acgaagcauacgugauggc

SEQ ID NO: 17413 - RNA, 19 nt, Artificial Sequence
  Description of Artificial Sequence: Synthetic oligonucleotide
acgaugcggagacugcugc

SEQ ID NO: 17414 - RNA, 19 nt, Artificial Sequence
  Description of Artificial Sequence: Synthetic oligonucleotide
acugguguaugcagauugc

SEQ ID NO: 17415 - RNA, 19 nt, Artificial Sequence
  Description of Artificial Sequence: Synthetic oligonucleotide
aggugcccaucaaguggau

SEQ ID NO: 17416 - RNA, 19 nt, Artificial Sequence
  Description of Artificial Sequence: Synthetic oligonucleotide
aucaaguggauggcgcugg

SEQ ID NO: 17417 - RNA, 19 nt, Artificial Sequence
  Description of Artificial Sequence: Synthetic oligonucleotide
augcggagacugcugcagg

SEQ ID NO: 17418 - RNA, 19 nt, Artificial Sequence
  Description of Artificial Sequence: Synthetic oligonucleotide
caaagccaacaaagaaauc

SEQ ID NO: 17419 - RNA, 19 nt, Artificial Sequence
  Description of Artificial Sequence: Synthetic oligonucleotide
caaggugcccaucaagugg

SEQ ID NO: 17420 - RNA, 19 nt, Artificial Sequence
  Description of Artificial Sequence: Synthetic oligonucleotide
cacccaccagagugaugug

SEQ ID NO: 17421 - RNA, 19 nt, Artificial Sequence
  Description of Artificial Sequence: Synthetic oligonucleotide
cacgaugcggagacugcug

SEQ ID NO: 17422 - RNA, 19 nt, Artificial Sequence
  Description of Artificial Sequence: Synthetic oligonucleotide
caucccccaaagccaacaa

SEQ ID NO: 17423 - RNA, 19 nt, Artificial Sequence
  Description of Artificial Sequence: Synthetic oligonucleotide
ccaaagccaacaaagaaau

SEQ ID NO: 17424 - RNA, 19 nt, Artificial Sequence
  Description of Artificial Sequence: Synthetic oligonucleotide
cccaaagccaacaaagaaa

SEQ ID NO: 17425 - RNA, 19 nt, Artificial Sequence
  Description of Artificial Sequence: Synthetic oligonucleotide
ccugcugaacugguguaug

SEQ ID NO: 17426 - RNA, 19 nt, Artificial Sequence
  Description of Artificial Sequence: Synthetic oligonucleotide
cgaugcggagacugcugca

SEQ ID NO: 17427 - RNA, 19 nt, Artificial Sequence
  Description of Artificial Sequence: Synthetic oligonucleotide
cugaacugguguaugcaga

SEQ ID NO: 17428 - RNA, 19 nt, Artificial Sequence
  Description of Artificial Sequence: Synthetic oligonucleotide
cugcugaacugguguaugc

SEQ ID NO: 17429 - RNA, 19 nt, Artificial Sequence
  Description of Artificial Sequence: Synthetic oligonucleotide
cugcugcaggaaacggagc

SEQ ID NO: 17430 - RNA, 19 nt, Artificial Sequence
  Description of Artificial Sequence: Synthetic oligonucleotide
gacgaagcauacgugaugg

SEQ ID NO: 17431 - RNA, 19 nt, Artificial Sequence
  Description of Artificial Sequence: Synthetic oligonucleotide
gaugcggagacugcugcag

SEQ ID NO: 17432 - RNA, 19 nt, Artificial Sequence
  Description of Artificial Sequence: Synthetic oligonucleotide
gcaaggugcccaucaagug

SEQ ID NO: 17433 - RNA, 19 nt, Artificial Sequence
  Description of Artificial Sequence: Synthetic oligonucleotide
gcccaucaaguggauggcg

SEQ ID NO: 17434 - RNA, 19 nt, Artificial Sequence
  Description of Artificial Sequence: Synthetic oligonucleotide
gcugaacugguguaugcag

SEQ ID NO: 17435 - RNA, 19 nt, Artificial Sequence
  Description of Artificial Sequence: Synthetic oligonucleotide
ggcaaggugcccaucaagu

SEQ ID NO: 17436 - RNA, 19 nt, Artificial Sequence
  Description of Artificial Sequence: Synthetic oligonucleotide
gggagcugaugacuuuugg

SEQ ID NO: 17437 - RNA, 19 nt, Artificial Sequence
  Description of Artificial Sequence: Synthetic oligonucleotide
ggugcccaucaaguggaug

SEQ ID NO: 17438 - RNA, 19 nt, Artificial Sequence
  Description of Artificial Sequence: Synthetic oligonucleotide
ucaaguggauggcgcugga

SEQ ID NO: 17439 - RNA, 19 nt, Artificial Sequence
  Description of Artificial Sequence: Synthetic oligonucleotide
ucacccaccagagugaugu

SEQ ID NO: 17440 - RNA, 19 nt, Artificial Sequence
  Description of Artificial Sequence: Synthetic oligonucleotide
ugaacugguguaugcagau

SEQ ID NO: 17441 - RNA, 19 nt, Artificial Sequence
  Description of Artificial Sequence: Synthetic oligonucleotide
ugcugaacugguguaugca

SEQ ID NO: 17442 - RNA, 19 nt, Artificial Sequence
  Description of Artificial Sequence: Synthetic oligonucleotide
ugcugcaggaaacggagcu

SEQ ID NO: 17443 - RNA, 19 nt, Artificial Sequence
  Description of Artificial Sequence: Synthetic oligonucleotide
ugggagcugaugacuuuug

SEQ ID NO: 17444 - RNA, 19 nt, Artificial Sequence
  Description of Artificial Sequence: Synthetic oligonucleotide
uucacccaccagagugaug

SEQ ID NO: 17445 - RNA, 19 nt, Artificial Sequence
  Description of Artificial Sequence: Synthetic oligonucleotide
accugcuggaaaaggggga

SEQ ID NO: 17446 - RNA, 19 nt, Artificial Sequence
  Description of Artificial Sequence: Synthetic oligonucleotide
agaucacagguuaccuaua

SEQ ID NO: 17447 - RNA, 19 nt, Artificial Sequence
  Description of Artificial Sequence: Synthetic oligonucleotide
aucacagguuaccuauaca

SEQ ID NO: 17448 - RNA, 19 nt, Artificial Sequence
  Description of Artificial Sequence: Synthetic oligonucleotide
cacagguuaccuauacauc

SEQ ID NO: 17449 - RNA, 19 nt, Artificial Sequence
  Description of Artificial Sequence: Synthetic oligonucleotide
ccugcuggaaaagggggag

SEQ ID NO: 17450 - RNA, 19 nt, Artificial Sequence
  Description of Artificial Sequence: Synthetic oligonucleotide
cugcuggaaaagggggagc

SEQ ID NO: 17451 - RNA, 19 nt, Artificial Sequence
  Description of Artificial Sequence: Synthetic oligonucleotide
gaccugcuggaaaaggggg

SEQ ID NO: 17452 - RNA, 19 nt, Artificial Sequence
  Description of Artificial Sequence: Synthetic oligonucleotide
gagaucacagguuaccuau

SEQ ID NO: 17453 - RNA, 19 nt, Artificial Sequence
  Description of Artificial Sequence: Synthetic oligonucleotide
gaucacagguuaccuauac

SEQ ID NO: 17454 - RNA, 19 nt, Artificial Sequence
  Description of Artificial Sequence: Synthetic oligonucleotide
gcuggaaaagggggagcgg

SEQ ID NO: 17455 - RNA, 19 nt, Artificial Sequence
  Description of Artificial Sequence: Synthetic oligonucleotide
ucacagguuaccuauacau

SEQ ID NO: 17456 - RNA, 19 nt, Artificial Sequence
  Description of Artificial Sequence: Synthetic oligonucleotide
ugcuggaaaagggggagcg

SEQ ID NO: 17457 - RNA, 19 nt, Artificial Sequence
  Description of Artificial Sequence: Synthetic oligonucleotide
aaauguuggaugauugacu

SEQ ID NO: 17458 - RNA, 19 nt, Artificial Sequence
  Description of Artificial Sequence: Synthetic oligonucleotide
aauguuggaugauugacuc

SEQ ID NO: 17459 - RNA, 19 nt, Artificial Sequence
  Description of Artificial Sequence: Synthetic oligonucleotide
augcugaggaguaucuggu

SEQ ID NO: 17460 - RNA, 19 nt, Artificial Sequence
  Description of Artificial Sequence: Synthetic oligonucleotide
auguuggaugauugacucu

SEQ ID NO: 17461 - RNA, 19 nt, Artificial Sequence
  Description of Artificial Sequence: Synthetic oligonucleotide
ccaucugcaccauugaugu

SEQ ID NO: 17462 - RNA, 19 nt, Artificial Sequence
  Description of Artificial Sequence: Synthetic oligonucleotide
cccaucugcaccauugaug

SEQ ID NO: 17463 - RNA, 19 nt, Artificial Sequence
  Description of Artificial Sequence: Synthetic oligonucleotide
gaugcugaggaguaucugg

SEQ ID NO: 17464 - RNA, 19 nt, Artificial Sequence
  Description of Artificial Sequence: Synthetic oligonucleotide
ggaugcugaggaguaucug

SEQ ID NO: 17465 - RNA, 19 nt, Artificial Sequence
  Description of Artificial Sequence: Synthetic oligonucleotide
guuggaugauugacucuga

SEQ ID NO: 17466 - RNA, 19 nt, Artificial Sequence
  Description of Artificial Sequence: Synthetic oligonucleotide
uggaugcugaggaguaucu

SEQ ID NO: 17467 - RNA, 19 nt, Artificial Sequence
  Description of Artificial Sequence: Synthetic oligonucleotide
uguuggaugauugacucug

SEQ ID NO: 17468 - RNA, 19 nt, Artificial Sequence
  Description of Artificial Sequence: Synthetic oligonucleotide
acacacaccagagugaugu

SEQ ID NO: 17469 - RNA, 19 nt, Artificial Sequence
  Description of Artificial Sequence: Synthetic oligonucleotide
cacacaccagagugauguc

SEQ ID NO: 17470 - RNA, 19 nt, Artificial Sequence
  Description of Artificial Sequence: Synthetic oligonucleotide
ggaguugaugaccuucggg

SEQ ID NO: 17471 - RNA, 19 nt, Artificial Sequence
  Description of Artificial Sequence: Synthetic oligonucleotide
uacacacaccagagugaug

SEQ ID NO: 17472 - RNA, 19 nt, Artificial Sequence
  Description of Artificial Sequence: Synthetic oligonucleotide
ugaccaagaccaucugugc

SEQ ID NO: 17473 - RNA, 19 nt, Artificial Sequence
  Description of Artificial Sequence: Synthetic oligonucleotide
accugcuagagaaggggga

SEQ ID NO: 17474 - RNA, 19 nt, Artificial Sequence
  Description of Artificial Sequence: Synthetic oligonucleotide
augucuggagcuauggugu

SEQ ID NO: 17475 - RNA, 19 nt, Artificial Sequence
  Description of Artificial Sequence: Synthetic oligonucleotide
ccugcuagagaagggggag

SEQ ID NO: 17476 - RNA, 19 nt, Artificial Sequence
  Description of Artificial Sequence: Synthetic oligonucleotide
cugcuagagaagggggagc

SEQ ID NO: 17477 - RNA, 19 nt, Artificial Sequence
  Description of Artificial Sequence: Synthetic oligonucleotide
gaccugcuagagaaggggg

SEQ ID NO: 17478 - RNA, 19 nt, Artificial Sequence
  Description of Artificial Sequence: Synthetic oligonucleotide
gaugucuggagcuauggug

SEQ ID NO: 17479 - RNA, 19 nt, Artificial Sequence
  Description of Artificial Sequence: Synthetic oligonucleotide
gcuagagaagggggagcgg

SEQ ID NO: 17480 - RNA, 19 nt, Artificial Sequence
  Description of Artificial Sequence: Synthetic oligonucleotide
ggagcuauggugugacagu

SEQ ID NO: 17481 - RNA, 19 nt, Artificial Sequence
  Description of Artificial Sequence: Synthetic oligonucleotide
gucuggagcuaugguguga

SEQ ID NO: 17482 - RNA, 19 nt, Artificial Sequence
  Description of Artificial Sequence: Synthetic oligonucleotide
ucuggagcuauggugugac

SEQ ID NO: 17483 - RNA, 19 nt, Artificial Sequence
  Description of Artificial Sequence: Synthetic oligonucleotide
ugaugucuggagcuauggu

SEQ ID NO: 17484 - RNA, 19 nt, Artificial Sequence
  Description of Artificial Sequence: Synthetic oligonucleotide
ugcuagagaagggggagcg

SEQ ID NO: 17485 - RNA, 19 nt, Artificial Sequence
  Description of Artificial Sequence: Synthetic oligonucleotide
uggagcuauggugugacag

SEQ ID NO: 17486 - RNA, 19 nt, Artificial Sequence
  Description of Artificial Sequence: Synthetic oligonucleotide
ugucuggagcuauggugug

SEQ ID NO: 17487 - RNA, 19 nt, Artificial Sequence
  Description of Artificial Sequence: Synthetic oligonucleotide
aagauggaaguagauaaaa

SEQ ID NO: 17488 - RNA, 19 nt, Artificial Sequence
  Description of Artificial Sequence: Synthetic oligonucleotide
accucuccuuccugcagug

SEQ ID NO: 17489 - RNA, 19 nt, Artificial Sequence
  Description of Artificial Sequence: Synthetic oligonucleotide
caagauggaaguagauaaa

SEQ ID NO: 17490 - RNA, 19 nt, Artificial Sequence
  Description of Artificial Sequence: Synthetic oligonucleotide
caauuaaguggauggcccu

SEQ ID NO: 17491 - RNA, 19 nt, Artificial Sequence
  Description of Artificial Sequence: Synthetic oligonucleotide
cacagcugcugcucaacug

SEQ ID NO: 17492 - RNA, 19 nt, Artificial Sequence
  Description of Artificial Sequence: Synthetic oligonucleotide
cacuucaaugacaguggag

SEQ ID NO: 17493 - RNA, 19 nt, Artificial Sequence
  Description of Artificial Sequence: Synthetic oligonucleotide
ccaggauggcccgagaccc

SEQ ID NO: 17494 - RNA, 19 nt, Artificial Sequence
  Description of Artificial Sequence: Synthetic oligonucleotide
cgaccucuccuuccugcag

SEQ ID NO: 17495 - RNA, 19 nt, Artificial Sequence
  Description of Artificial Sequence: Synthetic oligonucleotide
gauggaaguagauaaaaau

SEQ ID NO: 17496 - RNA, 19 nt, Artificial Sequence
  Description of Artificial Sequence: Synthetic oligonucleotide
gcacuucaaugacagugga

SEQ ID NO: 17497 - RNA, 19 nt, Artificial Sequence
  Description of Artificial Sequence: Synthetic oligonucleotide
ggaaguagauaaaaauggg

SEQ ID NO: 17498 - RNA, 19 nt, Artificial Sequence
  Description of Artificial Sequence: Synthetic oligonucleotide
gucuacauggugaugguca

SEQ ID NO: 17499 - RNA, 19 nt, Artificial Sequence
  Description of Artificial Sequence: Synthetic oligonucleotide
uccgaucccugaaggaaau

SEQ ID NO: 17500 - RNA, 19 nt, Artificial Sequence
  Description of Artificial Sequence: Synthetic oligonucleotide
ucuacauggugauggucaa

SEQ ID NO: 17501 - RNA, 19 nt, Artificial Sequence
  Description of Artificial Sequence: Synthetic oligonucleotide
uggaaguagauaaaaaugg

SEQ ID NO: 17502 - RNA, 19 nt, Artificial Sequence
  Description of Artificial Sequence: Synthetic oligonucleotide
ugugccgggggcugcucag

SEQ ID NO: 17503 - RNA, 19 nt, Artificial Sequence
  Description of Artificial Sequence: Synthetic oligonucleotide
agagugacguuuggagcua

SEQ ID NO: 17504 - RNA, 19 nt, Artificial Sequence
  Description of Artificial Sequence: Synthetic oligonucleotide
agauuuugggcuagccaga

SEQ ID NO: 17505 - RNA, 19 nt, Artificial Sequence
  Description of Artificial Sequence: Synthetic oligonucleotide
auccaaacugcacccaagg

SEQ ID NO: 17506 - RNA, 19 nt, Artificial Sequence
  Description of Artificial Sequence: Synthetic oligonucleotide
augugaaaaucacagauuu

SEQ ID NO: 17507 - RNA, 19 nt, Artificial Sequence
  Description of Artificial Sequence: Synthetic oligonucleotide
auuuugggcuagccagacu

SEQ ID NO: 17508 - RNA, 19 nt, Artificial Sequence
  Description of Artificial Sequence: Synthetic oligonucleotide
cagagugacguuuggagcu

SEQ ID NO: 17509 - RNA, 19 nt, Artificial Sequence
  Description of Artificial Sequence: Synthetic oligonucleotide
cagauuuugggcuagccag

SEQ ID NO: 17510 - RNA, 19 nt, Artificial Sequence
  Description of Artificial Sequence: Synthetic oligonucleotide
cauccaaacugcacccaag

SEQ ID NO: 17511 - RNA, 19 nt, Artificial Sequence
  Description of Artificial Sequence: Synthetic oligonucleotide
caugugaaaaucacagauu

SEQ ID NO: 17512 - RNA, 19 nt, Artificial Sequence
  Description of Artificial Sequence: Synthetic oligonucleotide
ccaaacugcacccaagggu

SEQ ID NO: 17513 - RNA, 19 nt, Artificial Sequence
  Description of Artificial Sequence: Synthetic oligonucleotide
ccauccaaacugcacccaa

SEQ ID NO: 17514 - RNA, 19 nt, Artificial Sequence
  Description of Artificial Sequence: Synthetic oligonucleotide
gaaaaucacagauuuuggg

SEQ ID NO: 17515 - RNA, 19 nt, Artificial Sequence
  Description of Artificial Sequence: Synthetic oligonucleotide
gauuuugggcuagccagac

SEQ ID NO: 17516 - RNA, 19 nt, Artificial Sequence
  Description of Artificial Sequence: Synthetic oligonucleotide
gugaaaaucacagauuuug

SEQ ID NO: 17517 - RNA, 19 nt, Artificial Sequence
  Description of Artificial Sequence: Synthetic oligonucleotide
uccaaacugcacccaaggg

SEQ ID NO: 17518 - RNA, 19 nt, Artificial Sequence
  Description of Artificial Sequence: Synthetic oligonucleotide
ugaaaaucacagauuuugg

SEQ ID NO: 17519 - RNA, 19 nt, Artificial Sequence
  Description of Artificial Sequence: Synthetic oligonucleotide
ugugaaaaucacagauuuu

SEQ ID NO: 17520 - RNA, 19 nt, Artificial Sequence
  Description of Artificial Sequence: Synthetic oligonucleotide
aaauggauggcucuggagu

SEQ ID NO: 17521 - RNA, 19 nt, Artificial Sequence
  Description of Artificial Sequence: Synthetic oligonucleotide
aaccaugugaaaaucacag

SEQ ID NO: 17522 - RNA, 19 nt, Artificial Sequence
  Description of Artificial Sequence: Synthetic oligonucleotide
accaugugaaaaucacaga

SEQ ID NO: 17523 - RNA, 19 nt, Artificial Sequence
  Description of Artificial Sequence: Synthetic oligonucleotide
augauggaugcugaggagu

SEQ ID NO: 17524 - RNA, 19 nt, Artificial Sequence
  Description of Artificial Sequence: Synthetic oligonucleotide
augccccauggcugccugu

SEQ ID NO: 17525 - RNA, 19 nt, Artificial Sequence
  Description of Artificial Sequence: Synthetic oligonucleotide
augcugaggaguacuuggu

SEQ ID NO: 17526 - RNA, 19 nt, Artificial Sequence
  Description of Artificial Sequence: Synthetic oligonucleotide
ccaucugcacuauugacgu

SEQ ID NO: 17527 - RNA, 19 nt, Artificial Sequence
  Description of Artificial Sequence: Synthetic oligonucleotide
cccaucugcacuauugacg

SEQ ID NO: 17528 - RNA, 19 nt, Artificial Sequence
  Description of Artificial Sequence: Synthetic oligonucleotide
gaugcugaggaguacuugg

SEQ ID NO: 17529 - RNA, 19 nt, Artificial Sequence
  Description of Artificial Sequence: Synthetic oligonucleotide
ggaugcugaggaguacuug

SEQ ID NO: 17530 - RNA, 19 nt, Artificial Sequence
  Description of Artificial Sequence: Synthetic oligonucleotide
uaugccccauggcugccug

SEQ ID NO: 17531 - RNA, 19 nt, Artificial Sequence
  Description of Artificial Sequence: Synthetic oligonucleotide
ucacccaucagagugacgu

SEQ ID NO: 17532 - RNA, 19 nt, Artificial Sequence
  Description of Artificial Sequence: Synthetic oligonucleotide
ugccccauggcugccuguu

SEQ ID NO: 17533 - RNA, 19 nt, Artificial Sequence
  Description of Artificial Sequence: Synthetic oligonucleotide
uggaugcugaggaguacuu

SEQ ID NO: 17534 - RNA, 19 nt, Artificial Sequence
  Description of Artificial Sequence: Synthetic oligonucleotide
uucacccaucagagugacg

SEQ ID NO: 17535 - RNA, 19 nt, Artificial Sequence
  Description of Artificial Sequence: Synthetic oligonucleotide
uuuuuuguuuuauuuuugu

SEQ ID NO: 17536 - RNA, 19 nt, Artificial Sequence
  Description of Artificial Sequence: Synthetic oligonucleotide
aaaguccuuggcucaggug

SEQ ID NO: 17537 - RNA, 19 nt, Artificial Sequence
  Description of Artificial Sequence: Synthetic oligonucleotide
aauguuggaugauugaugc

SEQ ID NO: 17538 - RNA, 19 nt, Artificial Sequence
  Description of Artificial Sequence: Synthetic oligonucleotide
acaacugcugcuuaacugg

SEQ ID NO: 17539 - RNA, 19 nt, Artificial Sequence
  Description of Artificial Sequence: Synthetic oligonucleotide
acauaacuuugugguagau

SEQ ID NO: 17540 - RNA, 19 nt, Artificial Sequence
  Description of Artificial Sequence: Synthetic oligonucleotide
agugacguuuggagcuaug

SEQ ID NO: 17541 - RNA, 19 nt, Artificial Sequence
  Description of Artificial Sequence: Synthetic oligonucleotide
caauuaaauggauggcucu

SEQ ID NO: 17542 - RNA, 19 nt, Artificial Sequence
  Description of Artificial Sequence: Synthetic oligonucleotide
cacaacugcugcuuaacug

SEQ ID NO: 17543 - RNA, 19 nt, Artificial Sequence
  Description of Artificial Sequence: Synthetic oligonucleotide
cacauaacuuugugguaga

SEQ ID NO: 17544 - RNA, 19 nt, Artificial Sequence
  Description of Artificial Sequence: Synthetic oligonucleotide
cauaacuuugugguagauu

SEQ ID NO: 17545 - RNA, 19 nt, Artificial Sequence
  Description of Artificial Sequence: Synthetic oligonucleotide
ccaauuaaauggauggcuc

SEQ ID NO: 17546 - RNA, 19 nt, Artificial Sequence
  Description of Artificial Sequence: Synthetic oligonucleotide
ccacauaacuuugugguag

SEQ ID NO: 17547 - RNA, 19 nt, Artificial Sequence
  Description of Artificial Sequence: Synthetic oligonucleotide
cgagaagucacaggcuacg

SEQ ID NO: 17548 - RNA, 19 nt, Artificial Sequence
  Description of Artificial Sequence: Synthetic oligonucleotide
cugcacccaaggguguaac

SEQ ID NO: 17549 - RNA, 19 nt, Artificial Sequence
  Description of Artificial Sequence: Synthetic oligonucleotide
cuucaguguuuuuucuaac

SEQ ID NO: 17550 - RNA, 19 nt, Artificial Sequence
  Description of Artificial Sequence: Synthetic oligonucleotide
gagaagucacaggcuacgu

SEQ ID NO: 17551 - RNA, 19 nt, Artificial Sequence
  Description of Artificial Sequence: Synthetic oligonucleotide
gagugacguuuggagcuau

SEQ ID NO: 17552 - RNA, 19 nt, Artificial Sequence
  Description of Artificial Sequence: Synthetic oligonucleotide
gcacccaaggguguaacgg

SEQ ID NO: 17553 - RNA, 19 nt, Artificial Sequence
  Description of Artificial Sequence: Synthetic oligonucleotide
gugacguuuggagcuaugg

SEQ ID NO: 17554 - RNA, 19 nt, Artificial Sequence
  Description of Artificial Sequence: Synthetic oligonucleotide
gugcuggaggcugcucagg

SEQ ID NO: 17555 - RNA, 19 nt, Artificial Sequence
  Description of Artificial Sequence: Synthetic oligonucleotide
uccacauaacuuuguggua

SEQ ID NO: 17556 - RNA, 19 nt, Artificial Sequence
  Description of Artificial Sequence: Synthetic oligonucleotide
uccagucccugaaggaaau

SEQ ID NO: 17557 - RNA, 19 nt, Artificial Sequence
  Description of Artificial Sequence: Synthetic oligonucleotide
ucgagaagucacaggcuac

SEQ ID NO: 17558 - RNA, 19 nt, Artificial Sequence
  Description of Artificial Sequence: Synthetic oligonucleotide
ugcacccaaggguguaacg

SEQ ID NO: 17559 - RNA, 19 nt, Artificial Sequence
  Description of Artificial Sequence: Synthetic oligonucleotide
ugugcuggaggcugcucag

SEQ ID NO: 17560 - RNA, 19 nt, Artificial Sequence
  Description of Artificial Sequence: Synthetic oligonucleotide
uuccagucccugaaggaaa

SEQ ID NO: 17561 - RNA, 19 nt, Artificial Sequence
  Description of Artificial Sequence: Synthetic oligonucleotide
acaucuccgaaagccaaca

SEQ ID NO: 17562 - RNA, 19 nt, Artificial Sequence
  Description of Artificial Sequence: Synthetic oligonucleotide
accagugugcugcaggcug

SEQ ID NO: 17563 - RNA, 19 nt, Artificial Sequence
  Description of Artificial Sequence: Synthetic oligonucleotide
accugcucaacuggugugu

SEQ ID NO: 17564 - RNA, 19 nt, Artificial Sequence
  Description of Artificial Sequence: Synthetic oligonucleotide
acgcugcggaggcugcugc

SEQ ID NO: 17565 - RNA, 19 nt, Artificial Sequence
  Description of Artificial Sequence: Synthetic oligonucleotide
aguaccugcucaacuggug

SEQ ID NO: 17566 - RNA, 19 nt, Artificial Sequence
  Description of Artificial Sequence: Synthetic oligonucleotide
auacccaccagagugaugu

SEQ ID NO: 17567 - RNA, 19 nt, Artificial Sequence
  Description of Artificial Sequence: Synthetic oligonucleotide
augaagccuacgugauggc

SEQ ID NO: 17568 - RNA, 19 nt, Artificial Sequence
  Description of Artificial Sequence: Synthetic oligonucleotide
cacagcagggcuucuucag

SEQ ID NO: 17569 - RNA, 19 nt, Artificial Sequence
  Description of Artificial Sequence: Synthetic oligonucleotide
cacgcugcggaggcugcug

SEQ ID NO: 17570 - RNA, 19 nt, Artificial Sequence
  Description of Artificial Sequence: Synthetic oligonucleotide
caguaccugcucaacuggu

SEQ ID NO: 17571 - RNA, 19 nt, Artificial Sequence
  Description of Artificial Sequence: Synthetic oligonucleotide
caucuccgaaagccaacaa

SEQ ID NO: 17572 - RNA, 19 nt, Artificial Sequence
  Description of Artificial Sequence: Synthetic oligonucleotide
ccacagcagggcuucuuca

SEQ ID NO: 17573 - RNA, 19 nt, Artificial Sequence
  Description of Artificial Sequence: Synthetic oligonucleotide
ccaguaccugcucaacugg

SEQ ID NO: 17574 - RNA, 19 nt, Artificial Sequence
  Description of Artificial Sequence: Synthetic oligonucleotide
ccagugugcugcaggcugc

SEQ ID NO: 17575 - RNA, 19 nt, Artificial Sequence
  Description of Artificial Sequence: Synthetic oligonucleotide
cccacagcagggcuucuuc

SEQ ID NO: 17576 - RNA, 19 nt, Artificial Sequence
  Description of Artificial Sequence: Synthetic oligonucleotide
cccaguaccugcucaacug

SEQ ID NO: 17577 - RNA, 19 nt, Artificial Sequence
  Description of Artificial Sequence: Synthetic oligonucleotide
ccgaaagccaacaaggaaa

SEQ ID NO: 17578 - RNA, 19 nt, Artificial Sequence
  Description of Artificial Sequence: Synthetic oligonucleotide
ccugcucaacuggugugug

SEQ ID NO: 17579 - RNA, 19 nt, Artificial Sequence
  Description of Artificial Sequence: Synthetic oligonucleotide
ccugcugggcaucugccuc

SEQ ID NO: 17580 - RNA, 19 nt, Artificial Sequence
  Description of Artificial Sequence: Synthetic oligonucleotide
cgaaagccaacaaggaaau

SEQ ID NO: 17581 - RNA, 19 nt, Artificial Sequence
  Description of Artificial Sequence: Synthetic oligonucleotide
cgcugcggaggcugcugca

SEQ ID NO: 17582 - RNA, 19 nt, Artificial Sequence
  Description of Artificial Sequence: Synthetic oligonucleotide
cggaggcugcugcaggaga

SEQ ID NO: 17583 - RNA, 19 nt, Artificial Sequence
  Description of Artificial Sequence: Synthetic oligonucleotide
cucccaguaccugcucaac

SEQ ID NO: 17584 - RNA, 19 nt, Artificial Sequence
  Description of Artificial Sequence: Synthetic oligonucleotide
cugcggaggcugcugcagg

SEQ ID NO: 17585 - RNA, 19 nt, Artificial Sequence
  Description of Artificial Sequence: Synthetic oligonucleotide
cugcugcaggagagggagc

SEQ ID NO: 17586 - RNA, 19 nt, Artificial Sequence
  Description of Artificial Sequence: Synthetic oligonucleotide
cugcugggcaucugccuca

SEQ ID NO: 17587 - RNA, 19 nt, Artificial Sequence
  Description of Artificial Sequence: Synthetic oligonucleotide
cugggcaucugccucaccu

SEQ ID NO: 17588 - RNA, 19 nt, Artificial Sequence
  Description of Artificial Sequence: Synthetic oligonucleotide
gaaagccaacaaggaaauc

SEQ ID NO: 17589 - RNA, 19 nt, Artificial Sequence
  Description of Artificial Sequence: Synthetic oligonucleotide
gaugaagccuacgugaugg

SEQ ID NO: 17590 - RNA, 19 nt, Artificial Sequence
  Description of Artificial Sequence: Synthetic oligonucleotide
gcaucugccucaccuccac

SEQ ID NO: 17591 - RNA, 19 nt, Artificial Sequence
  Description of Artificial Sequence: Synthetic oligonucleotide
gccgccugcugggcaucug

SEQ ID NO: 17592 - RNA, 19 nt, Artificial Sequence
  Description of Artificial Sequence: Synthetic oligonucleotide
gcggaggcugcugcaggag

SEQ ID NO: 17593 - RNA, 19 nt, Artificial Sequence
  Description of Artificial Sequence: Synthetic oligonucleotide
gcucccaguaccugcucaa

SEQ ID NO: 17594 - RNA, 19 nt, Artificial Sequence
  Description of Artificial Sequence: Synthetic oligonucleotide
gcugcggaggcugcugcag

SEQ ID NO: 17595 - RNA, 19 nt, Artificial Sequence
  Description of Artificial Sequence: Synthetic oligonucleotide
ggcaucugccucaccucca

SEQ ID NO: 17596 - RNA, 19 nt, Artificial Sequence
  Description of Artificial Sequence: Synthetic oligonucleotide
ggcucccaguaccugcuca

SEQ ID NO: 17597 - RNA, 19 nt, Artificial Sequence
  Description of Artificial Sequence: Synthetic oligonucleotide
gggcaucugccucaccucc

SEQ ID NO: 17598 - RNA, 19 nt, Artificial Sequence
  Description of Artificial Sequence: Synthetic oligonucleotide
guaccugcucaacuggugu

SEQ ID NO: 17599 - RNA, 19 nt, Artificial Sequence
  Description of Artificial Sequence: Synthetic oligonucleotide
uacccaccagagugauguc

SEQ ID NO: 17600 - RNA, 19 nt, Artificial Sequence
  Description of Artificial Sequence: Synthetic oligonucleotide
uauacccaccagagugaug

SEQ ID NO: 17601 - RNA, 19 nt, Artificial Sequence
  Description of Artificial Sequence: Synthetic oligonucleotide
ucccacagcagggcuucuu

SEQ ID NO: 17602 - RNA, 19 nt, Artificial Sequence
  Description of Artificial Sequence: Synthetic oligonucleotide
ucccaguaccugcucaacu

SEQ ID NO: 17603 - RNA, 19 nt, Artificial Sequence
  Description of Artificial Sequence: Synthetic oligonucleotide
ugccgccugcugggcaucu

SEQ ID NO: 17604 - RNA, 19 nt, Artificial Sequence
  Description of Artificial Sequence: Synthetic oligonucleotide
ugcugcaggagagggagcu

SEQ ID NO: 17605 - RNA, 19 nt, Artificial Sequence
  Description of Artificial Sequence: Synthetic oligonucleotide
ugcugggcaucugccucac

SEQ ID NO: 17606 - RNA, 19 nt, Artificial Sequence
  Description of Artificial Sequence: Synthetic oligonucleotide
ugggcaucugccucaccuc

SEQ ID NO: 17607 - RNA, 19 nt, Artificial Sequence
  Description of Artificial Sequence: Synthetic oligonucleotide
uuggcucccaguaccugcu

SEQ ID NO: 17608 - RNA, 19 nt, Artificial Sequence
  Description of Artificial Sequence: Synthetic oligonucleotide
aaagugcugggcuccggug

SEQ ID NO: 17609 - RNA, 19 nt, Artificial Sequence
  Description of Artificial Sequence: Synthetic oligonucleotide
ggggugaccguuugggagu

SEQ ID NO: 17610 - RNA, 19 nt, Artificial Sequence
  Description of Artificial Sequence: Synthetic oligonucleotide
gggugaccguuugggaguu

SEQ ID NO: 17611 - RNA, 19 nt, Artificial Sequence
  Description of Artificial Sequence: Synthetic oligonucleotide
ggugaccguuugggaguug

SEQ ID NO: 17612 - RNA, 19 nt, Artificial Sequence
  Description of Artificial Sequence: Synthetic oligonucleotide
acccugacuaccagcagga

SEQ ID NO: 17613 - RNA, 19 nt, Artificial Sequence
  Description of Artificial Sequence: Synthetic oligonucleotide
accugugccauccaaacug

SEQ ID NO: 17614 - RNA, 19 nt, Artificial Sequence
  Description of Artificial Sequence: Synthetic oligonucleotide
auccaaacugcaccuacgg

SEQ ID NO: 17615 - RNA, 19 nt, Artificial Sequence
  Description of Artificial Sequence: Synthetic oligonucleotide
augucaagaucacagauuu

SEQ ID NO: 17616 - RNA, 19 nt, Artificial Sequence
  Description of Artificial Sequence: Synthetic oligonucleotide
caagaucacagauuuuggg

SEQ ID NO: 17617 - RNA, 19 nt, Artificial Sequence
  Description of Artificial Sequence: Synthetic oligonucleotide
caccugugccauccaaacu

SEQ ID NO: 17618 - RNA, 19 nt, Artificial Sequence
  Description of Artificial Sequence: Synthetic oligonucleotide
cauccaaacugcaccuacg

SEQ ID NO: 17619 - RNA, 19 nt, Artificial Sequence
  Description of Artificial Sequence: Synthetic oligonucleotide
caugucaagaucacagauu

SEQ ID NO: 17620 - RNA, 19 nt, Artificial Sequence
  Description of Artificial Sequence: Synthetic oligonucleotide
ccaaacugcaccuacgggu

SEQ ID NO: 17621 - RNA, 19 nt, Artificial Sequence
  Description of Artificial Sequence: Synthetic oligonucleotide
ccaccugugccauccaaac

SEQ ID NO: 17622 - RNA, 19 nt, Artificial Sequence
  Description of Artificial Sequence: Synthetic oligonucleotide
ccauccaaacugcaccuac

SEQ ID NO: 17623 - RNA, 19 nt, Artificial Sequence
  Description of Artificial Sequence: Synthetic oligonucleotide
ccugugccauccaaacugc

SEQ ID NO: 17624 - RNA, 19 nt, Artificial Sequence
  Description of Artificial Sequence: Synthetic oligonucleotide
cugugccauccaaacugca

SEQ ID NO: 17625 - RNA, 19 nt, Artificial Sequence
  Description of Artificial Sequence: Synthetic oligonucleotide
gaucacagauuuugggcug

SEQ ID NO: 17626 - RNA, 19 nt, Artificial Sequence
  Description of Artificial Sequence: Synthetic oligonucleotide
gccaccugugccauccaaa

SEQ ID NO: 17627 - RNA, 19 nt, Artificial Sequence
  Description of Artificial Sequence: Synthetic oligonucleotide
gucaagaucacagauuuug

SEQ ID NO: 17628 - RNA, 19 nt, Artificial Sequence
  Description of Artificial Sequence: Synthetic oligonucleotide
gugccaccugugccaucca

SEQ ID NO: 17629 - RNA, 19 nt, Artificial Sequence
  Description of Artificial Sequence: Synthetic oligonucleotide
ucaagaucacagauuuugg

SEQ ID NO: 17630 - RNA, 19 nt, Artificial Sequence
  Description of Artificial Sequence: Synthetic oligonucleotide
uccaaacugcaccuacggg

SEQ ID NO: 17631 - RNA, 19 nt, Artificial Sequence
  Description of Artificial Sequence: Synthetic oligonucleotide
ugccaccugugccauccaa

SEQ ID NO: 17632 - RNA, 19 nt, Artificial Sequence
  Description of Artificial Sequence: Synthetic oligonucleotide
ugucaagaucacagauuuu

SEQ ID NO: 17633 - RNA, 19 nt, Artificial Sequence
  Description of Artificial Sequence: Synthetic oligonucleotide
ugugccauccaaacugcac

SEQ ID NO: 17634 - RNA, 19 nt, Artificial Sequence
  Description of Artificial Sequence: Synthetic oligonucleotide
accaugcagaugggggcaa

SEQ ID NO: 17635 - RNA, 19 nt, Artificial Sequence
  Description of Artificial Sequence: Synthetic oligonucleotide
accccagcagggcuucuuc

SEQ ID NO: 17636 - RNA, 19 nt, Artificial Sequence
  Description of Artificial Sequence: Synthetic oligonucleotide
agacagaguaccaugcaga

SEQ ID NO: 17637 - RNA, 19 nt, Artificial Sequence
  Description of Artificial Sequence: Synthetic oligonucleotide
agagugauguguggaguua

SEQ ID NO: 17638 - RNA, 19 nt, Artificial Sequence
  Description of Artificial Sequence: Synthetic oligonucleotide
agcagugugcugccggcug

SEQ ID NO: 17639 - RNA, 19 nt, Artificial Sequence
  Description of Artificial Sequence: Synthetic oligonucleotide
aggaccugcugaacuggug

SEQ ID NO: 17640 - RNA, 19 nt, Artificial Sequence
  Description of Artificial Sequence: Synthetic oligonucleotide
auggccagggacccccagc

SEQ ID NO: 17641 - RNA, 19 nt, Artificial Sequence
  Description of Artificial Sequence: Synthetic oligonucleotide
cagagugauguguggaguu

SEQ ID NO: 17642 - RNA, 19 nt, Artificial Sequence
  Description of Artificial Sequence: Synthetic oligonucleotide
caggaccugcugaacuggu

SEQ ID NO: 17643 - RNA, 19 nt, Artificial Sequence
  Description of Artificial Sequence: Synthetic oligonucleotide
ccagagugauguguggagu

SEQ ID NO: 17644 - RNA, 19 nt, Artificial Sequence
  Description of Artificial Sequence: Synthetic oligonucleotide
ccaggaccugcugaacugg

SEQ ID NO: 17645 - RNA, 19 nt, Artificial Sequence
  Description of Artificial Sequence: Synthetic oligonucleotide
cccagcagggcuucuucug

SEQ ID NO: 17646 - RNA, 19 nt, Artificial Sequence
  Description of Artificial Sequence: Synthetic oligonucleotide
cccaggaccugcugaacug

SEQ ID NO: 17647 - RNA, 19 nt, Artificial Sequence
  Description of Artificial Sequence: Synthetic oligonucleotide
ccccagcagggcuucuucu

SEQ ID NO: 17648 - RNA, 19 nt, Artificial Sequence
  Description of Artificial Sequence: Synthetic oligonucleotide
cccgccuucugggcaucug

SEQ ID NO: 17649 - RNA, 19 nt, Artificial Sequence
  Description of Artificial Sequence: Synthetic oligonucleotide
ccuucugggcaucugccug

SEQ ID NO: 17650 - RNA, 19 nt, Artificial Sequence
  Description of Artificial Sequence: Synthetic oligonucleotide
cucccaggaccugcugaac

SEQ ID NO: 17651 - RNA, 19 nt, Artificial Sequence
  Description of Artificial Sequence: Synthetic oligonucleotide
cugccggcugcacgggccc

SEQ ID NO: 17652 - RNA, 19 nt, Artificial Sequence
  Description of Artificial Sequence: Synthetic oligonucleotide
cugggcaucugccugacau

SEQ ID NO: 17653 - RNA, 19 nt, Artificial Sequence
  Description of Artificial Sequence: Synthetic oligonucleotide
cuucugggcaucugccuga

SEQ ID NO: 17654 - RNA, 19 nt, Artificial Sequence
  Description of Artificial Sequence: Synthetic oligonucleotide
gagacagaguaccaugcag

SEQ ID NO: 17655 - RNA, 19 nt, Artificial Sequence
  Description of Artificial Sequence: Synthetic oligonucleotide
gcagugugcugccggcugc

SEQ ID NO: 17656 - RNA, 19 nt, Artificial Sequence
  Description of Artificial Sequence: Synthetic oligonucleotide
gcaucugccugacauccac

SEQ ID NO: 17657 - RNA, 19 nt, Artificial Sequence
  Description of Artificial Sequence: Synthetic oligonucleotide
gccagggacccccagcgcu

SEQ ID NO: 17658 - RNA, 19 nt, Artificial Sequence
  Description of Artificial Sequence: Synthetic oligonucleotide
gcucccaggaccugcugaa

SEQ ID NO: 17659 - RNA, 19 nt, Artificial Sequence
  Description of Artificial Sequence: Synthetic oligonucleotide
gcugccggcugcacgggcc

SEQ ID NO: 17660 - RNA, 19 nt, Artificial Sequence
  Description of Artificial Sequence: Synthetic oligonucleotide
ggaccugcugaacuggugu

SEQ ID NO: 17661 - RNA, 19 nt, Artificial Sequence
  Description of Artificial Sequence: Synthetic oligonucleotide
ggcaucugccugacaucca

SEQ ID NO: 17662 - RNA, 19 nt, Artificial Sequence
  Description of Artificial Sequence: Synthetic oligonucleotide
ggccagggacccccagcgc

SEQ ID NO: 17663 - RNA, 19 nt, Artificial Sequence
  Description of Artificial Sequence: Synthetic oligonucleotide
ggcucccaggaccugcuga

SEQ ID NO: 17664 - RNA, 19 nt, Artificial Sequence
  Description of Artificial Sequence: Synthetic oligonucleotide
gggcaucugccugacaucc

SEQ ID NO: 17665 - RNA, 19 nt, Artificial Sequence
  Description of Artificial Sequence: Synthetic oligonucleotide
gugcugccggcugcacggg

SEQ ID NO: 17666 - RNA, 19 nt, Artificial Sequence
  Description of Artificial Sequence: Synthetic oligonucleotide
gugugcugccggcugcacg

SEQ ID NO: 17667 - RNA, 19 nt, Artificial Sequence
  Description of Artificial Sequence: Synthetic oligonucleotide
uaccaugcagaugggggca

SEQ ID NO: 17668 - RNA, 19 nt, Artificial Sequence
  Description of Artificial Sequence: Synthetic oligonucleotide
uaccccagcagggcuucuu

SEQ ID NO: 17669 - RNA, 19 nt, Artificial Sequence
  Description of Artificial Sequence: Synthetic oligonucleotide
ucccaggaccugcugaacu

SEQ ID NO: 17670 - RNA, 19 nt, Artificial Sequence
  Description of Artificial Sequence: Synthetic oligonucleotide
ucccgccuucugggcaucu

SEQ ID NO: 17671 - RNA, 19 nt, Artificial Sequence
  Description of Artificial Sequence: Synthetic oligonucleotide
ugccggcugcacgggcccc

SEQ ID NO: 17672 - RNA, 19 nt, Artificial Sequence
  Description of Artificial Sequence: Synthetic oligonucleotide
ugcugccggcugcacgggc

SEQ ID NO: 17673 - RNA, 19 nt, Artificial Sequence
  Description of Artificial Sequence: Synthetic oligonucleotide
uggccagggacccccagcg

SEQ ID NO: 17674 - RNA, 19 nt, Artificial Sequence
  Description of Artificial Sequence: Synthetic oligonucleotide
ugggcaucugccugacauc

SEQ ID NO: 17675 - RNA, 19 nt, Artificial Sequence
  Description of Artificial Sequence: Synthetic oligonucleotide
ugggcucccaggaccugcu

SEQ ID NO: 17676 - RNA, 19 nt, Artificial Sequence
  Description of Artificial Sequence: Synthetic oligonucleotide
ugugcugccggcugcacgg

SEQ ID NO: 17677 - RNA, 19 nt, Artificial Sequence
  Description of Artificial Sequence: Synthetic oligonucleotide
uucugggcaucugccugac

SEQ ID NO: 17678 - RNA, 19 nt, Artificial Sequence
  Description of Artificial Sequence: Synthetic oligonucleotide
aaagagacggagcugagga

SEQ ID NO: 17679 - RNA, 19 nt, Artificial Sequence
  Description of Artificial Sequence: Synthetic oligonucleotide
aagagacggagcugaggaa

SEQ ID NO: 17680 - RNA, 19 nt, Artificial Sequence
  Description of Artificial Sequence: Synthetic oligonucleotide
agagacggagcugaggaag

SEQ ID NO: 17681 - RNA, 19 nt, Artificial Sequence
  Description of Artificial Sequence: Synthetic oligonucleotide
agugauguguggaguuaug

SEQ ID NO: 17682 - RNA, 19 nt, Artificial Sequence
  Description of Artificial Sequence: Synthetic oligonucleotide
auggugugacuguguggga

SEQ ID NO: 17683 - RNA, 19 nt, Artificial Sequence
  Description of Artificial Sequence: Synthetic oligonucleotide
auguguggaguuauggugu

SEQ ID NO: 17684 - RNA, 19 nt, Artificial Sequence
  Description of Artificial Sequence: Synthetic oligonucleotide
caucugcaccauugauguc

SEQ ID NO: 17685 - RNA, 19 nt, Artificial Sequence
  Description of Artificial Sequence: Synthetic oligonucleotide
gagugauguguggaguuau

SEQ ID NO: 17686 - RNA, 19 nt, Artificial Sequence
  Description of Artificial Sequence: Synthetic oligonucleotide
gauguguggaguuauggug

SEQ ID NO: 17687 - RNA, 19 nt, Artificial Sequence
  Description of Artificial Sequence: Synthetic oligonucleotide
gcugccaugagcagugugc

SEQ ID NO: 17688 - RNA, 19 nt, Artificial Sequence
  Description of Artificial Sequence: Synthetic oligonucleotide
ggaguuauggugugacugu

SEQ ID NO: 17689 - RNA, 19 nt, Artificial Sequence
  Description of Artificial Sequence: Synthetic oligonucleotide
gugauguguggaguuaugg

SEQ ID NO: 17690 - RNA, 19 nt, Artificial Sequence
  Description of Artificial Sequence: Synthetic oligonucleotide
gugcgaggcacccagcucu

SEQ ID NO: 17691 - RNA, 19 nt, Artificial Sequence
  Description of Artificial Sequence: Synthetic oligonucleotide
guguggaguuaugguguga

SEQ ID NO: 17692 - RNA, 19 nt, Artificial Sequence
  Description of Artificial Sequence: Synthetic oligonucleotide
uauggugugacuguguggg

SEQ ID NO: 17693 - RNA, 19 nt, Artificial Sequence
  Description of Artificial Sequence: Synthetic oligonucleotide
ugaagaugaugaggaugaa

SEQ ID NO: 17694 - RNA, 19 nt, Artificial Sequence
  Description of Artificial Sequence: Synthetic oligonucleotide
ugauguguggaguuauggu

SEQ ID NO: 17695 - RNA, 19 nt, Artificial Sequence
  Description of Artificial Sequence: Synthetic oligonucleotide
ugcugccaugagcagugug

SEQ ID NO: 17696 - RNA, 19 nt, Artificial Sequence
  Description of Artificial Sequence: Synthetic oligonucleotide
uggaguuauggugugacug

SEQ ID NO: 17697 - RNA, 19 nt, Artificial Sequence
  Description of Artificial Sequence: Synthetic oligonucleotide
uggugugacugugugggag

SEQ ID NO: 17698 - RNA, 19 nt, Artificial Sequence
  Description of Artificial Sequence: Synthetic oligonucleotide
uguggaguuauggugugac

SEQ ID NO: 17699 - RNA, 19 nt, Artificial Sequence
  Description of Artificial Sequence: Synthetic oligonucleotide
uguguggaguuauggugug

SEQ ID NO: 17700 - RNA, 19 nt, Artificial Sequence
  Description of Artificial Sequence: Synthetic oligonucleotide
aaccaugucaaaauuacag

SEQ ID NO: 17701 - RNA, 19 nt, Artificial Sequence
  Description of Artificial Sequence: Synthetic oligonucleotide
aaguggauggcgcuggagu

SEQ ID NO: 17702 - RNA, 19 nt, Artificial Sequence
  Description of Artificial Sequence: Synthetic oligonucleotide
accaugucaaaauuacaga

SEQ ID NO: 17703 - RNA, 19 nt, Artificial Sequence
  Description of Artificial Sequence: Synthetic oligonucleotide
agcuuaugcccuauggcug

SEQ ID NO: 17704 - RNA, 19 nt, Artificial Sequence
  Description of Artificial Sequence: Synthetic oligonucleotide
augcccuauggcugccucu

SEQ ID NO: 17705 - RNA, 19 nt, Artificial Sequence
  Description of Artificial Sequence: Synthetic oligonucleotide
cagcuuaugcccuauggcu

SEQ ID NO: 17706 - RNA, 19 nt, Artificial Sequence
  Description of Artificial Sequence: Synthetic oligonucleotide
cccuccuccugccuucagc

SEQ ID NO: 17707 - RNA, 19 nt, Artificial Sequence
  Description of Artificial Sequence: Synthetic oligonucleotide
ccuccuccugccuucagcc

SEQ ID NO: 17708 - RNA, 19 nt, Artificial Sequence
  Description of Artificial Sequence: Synthetic oligonucleotide
cuccuccugccuucagccc

SEQ ID NO: 17709 - RNA, 19 nt, Artificial Sequence
  Description of Artificial Sequence: Synthetic oligonucleotide
cugguggaugcugaggagu

SEQ ID NO: 17710 - RNA, 19 nt, Artificial Sequence
  Description of Artificial Sequence: Synthetic oligonucleotide
cuuuuuuuguuuuguuuuu

SEQ ID NO: 17711 - RNA, 19 nt, Artificial Sequence
  Description of Artificial Sequence: Synthetic oligonucleotide
gcuuaugcccuauggcugc

SEQ ID NO: 17712 - RNA, 19 nt, Artificial Sequence
  Description of Artificial Sequence: Synthetic oligonucleotide
gguacagugaggaccccac

SEQ ID NO: 17713 - RNA, 19 nt, Artificial Sequence
  Description of Artificial Sequence: Synthetic oligonucleotide
gguggaugcugaggaguau

SEQ ID NO: 17714 - RNA, 19 nt, Artificial Sequence
  Description of Artificial Sequence: Synthetic oligonucleotide
uaugcccuauggcugccuc

SEQ ID NO: 17715 - RNA, 19 nt, Artificial Sequence
  Description of Artificial Sequence: Synthetic oligonucleotide
ugcccuauggcugccucuu

SEQ ID NO: 17716 - RNA, 19 nt, Artificial Sequence
  Description of Artificial Sequence: Synthetic oligonucleotide
uuguuuuguuuuuuuaaag

SEQ ID NO: 17717 - RNA, 19 nt, Artificial Sequence
  Description of Artificial Sequence: Synthetic oligonucleotide
uuuguuuuguuuuuuuaaa

SEQ ID NO: 17718 - RNA, 19 nt, Artificial Sequence
  Description of Artificial Sequence: Synthetic oligonucleotide
uuuuguuuuguuuuuuuaa

SEQ ID NO: 17719 - RNA, 19 nt, Artificial Sequence
  Description of Artificial Sequence: Synthetic oligonucleotide
uuuuuguuuuguuuuuuua

SEQ ID NO: 17720 - RNA, 19 nt, Artificial Sequence
  Description of Artificial Sequence: Synthetic oligonucleotide
uuuuuuguuuuguuuuuuu

SEQ ID NO: 17721 - RNA, 19 nt, Artificial Sequence
  Description of Artificial Sequence: Synthetic oligonucleotide
aaagugcuuggcucgggug

SEQ ID NO: 17722 - RNA, 19 nt, Artificial Sequence
  Description of Artificial Sequence: Synthetic oligonucleotide
acauggugauggucaagug

SEQ ID NO: 17723 - RNA, 19 nt, Artificial Sequence
  Description of Artificial Sequence: Synthetic oligonucleotide
acugccagacauugaccaa

SEQ ID NO: 17724 - RNA, 19 nt, Artificial Sequence
  Description of Artificial Sequence: Synthetic oligonucleotide
augucuacauggugauggu

SEQ ID NO: 17725 - RNA, 19 nt, Artificial Sequence
  Description of Artificial Sequence: Synthetic oligonucleotide
cuacauggugauggucaag

SEQ ID NO: 17726 - RNA, 19 nt, Artificial Sequence
  Description of Artificial Sequence: Synthetic oligonucleotide
gauggucaaguguuggaug

SEQ ID NO: 17727 - RNA, 19 nt, Artificial Sequence
  Description of Artificial Sequence: Synthetic oligonucleotide
gaugucuacauggugaugg

SEQ ID NO: 17728 - RNA, 19 nt, Artificial Sequence
  Description of Artificial Sequence: Synthetic oligonucleotide
ggugugacaguuugggagu

SEQ ID NO: 17729 - RNA, 19 nt, Artificial Sequence
  Description of Artificial Sequence: Synthetic oligonucleotide
gugugacaguuugggaguu

SEQ ID NO: 17730 - RNA, 19 nt, Artificial Sequence
  Description of Artificial Sequence: Synthetic oligonucleotide
uacauggugauggucaagu

SEQ ID NO: 17731 - RNA, 19 nt, Artificial Sequence
  Description of Artificial Sequence: Synthetic oligonucleotide
ugauggucaaguguuggau

SEQ ID NO: 17732 - RNA, 19 nt, Artificial Sequence
  Description of Artificial Sequence: Synthetic oligonucleotide
ugucuacauggugaugguc

SEQ ID NO: 17733 - RNA, 19 nt, Artificial Sequence
  Description of Artificial Sequence: Synthetic oligonucleotide
ugugacaguuugggaguug

SEQ ID NO: 17734 - RNA, 19 nt, Artificial Sequence
  Description of Artificial Sequence: Synthetic oligonucleotide
acaauugaugucuacaugg

SEQ ID NO: 17735 - RNA, 19 nt, Artificial Sequence
  Description of Artificial Sequence: Synthetic oligonucleotide
agaucacagguuaccugaa

SEQ ID NO: 17736 - RNA, 19 nt, Artificial Sequence
  Description of Artificial Sequence: Synthetic oligonucleotide
aucacagguuaccugaaca

SEQ ID NO: 17737 - RNA, 19 nt, Artificial Sequence
  Description of Artificial Sequence: Synthetic oligonucleotide
auggugugacaguuuggga

SEQ ID NO: 17738 - RNA, 19 nt, Artificial Sequence
  Description of Artificial Sequence: Synthetic oligonucleotide
auugaugucuacaugguga

SEQ ID NO: 17739 - RNA, 19 nt, Artificial Sequence
  Description of Artificial Sequence: Synthetic oligonucleotide
caauugaugucuacauggu

SEQ ID NO: 17740 - RNA, 19 nt, Artificial Sequence
  Description of Artificial Sequence: Synthetic oligonucleotide
cacagguuaccugaacauc

SEQ ID NO: 17741 - RNA, 19 nt, Artificial Sequence
  Description of Artificial Sequence: Synthetic oligonucleotide
gagaucacagguuaccuga

SEQ ID NO: 17742 - RNA, 19 nt, Artificial Sequence
  Description of Artificial Sequence: Synthetic oligonucleotide
gaucacagguuaccugaac

SEQ ID NO: 17743 - RNA, 19 nt, Artificial Sequence
  Description of Artificial Sequence: Synthetic oligonucleotide
gaucugcacaauugauguc

SEQ ID NO: 17744 - RNA, 19 nt, Artificial Sequence
  Description of Artificial Sequence: Synthetic oligonucleotide
gcugccaugaugagugugc

SEQ ID NO: 17745 - RNA, 19 nt, Artificial Sequence
  Description of Artificial Sequence: Synthetic oligonucleotide
ggagaucacagguuaccug

SEQ ID NO: 17746 - RNA, 19 nt, Artificial Sequence
  Description of Artificial Sequence: Synthetic oligonucleotide
gggagaucacagguuaccu

SEQ ID NO: 17747 - RNA, 19 nt, Artificial Sequence
  Description of Artificial Sequence: Synthetic oligonucleotide
gugcgagggacccaggucu

SEQ ID NO: 17748 - RNA, 19 nt, Artificial Sequence
  Description of Artificial Sequence: Synthetic oligonucleotide
uauggugugacaguuuggg

SEQ ID NO: 17749 - RNA, 19 nt, Artificial Sequence
  Description of Artificial Sequence: Synthetic oligonucleotide
ucacagguuaccugaacau

SEQ ID NO: 17750 - RNA, 19 nt, Artificial Sequence
  Description of Artificial Sequence: Synthetic oligonucleotide
ugaagaugaggaguaugaa

SEQ ID NO: 17751 - RNA, 19 nt, Artificial Sequence
  Description of Artificial Sequence: Synthetic oligonucleotide
ugaugucuacauggugaug

SEQ ID NO: 17752 - RNA, 19 nt, Artificial Sequence
  Description of Artificial Sequence: Synthetic oligonucleotide
ugcugccaugaugagugug

SEQ ID NO: 17753 - RNA, 19 nt, Artificial Sequence
  Description of Artificial Sequence: Synthetic oligonucleotide
uggugugacaguuugggag

SEQ ID NO: 17754 - RNA, 19 nt, Artificial Sequence
  Description of Artificial Sequence: Synthetic oligonucleotide
uugaugucuacauggugau

SEQ ID NO: 17755 - RNA, 19 nt, Artificial Sequence
  Description of Artificial Sequence: Synthetic oligonucleotide
acagguuaccugaacaucc

SEQ ID NO: 17756 - RNA, 19 nt, Artificial Sequence
  Description of Artificial Sequence: Synthetic oligonucleotide
agacugcuuugccugccgg

SEQ ID NO: 17757 - RNA, 19 nt, Artificial Sequence
  Description of Artificial Sequence: Synthetic oligonucleotide
agguuaccugaacauccag

SEQ ID NO: 17758 - RNA, 19 nt, Artificial Sequence
  Description of Artificial Sequence: Synthetic oligonucleotide
auggugauggucaaguguu

SEQ ID NO: 17759 - RNA, 19 nt, Artificial Sequence
  Description of Artificial Sequence: Synthetic oligonucleotide
cagacugcuuugccugccg

SEQ ID NO: 17760 - RNA, 19 nt, Artificial Sequence
  Description of Artificial Sequence: Synthetic oligonucleotide
caggcccucaggacacaga

SEQ ID NO: 17761 - RNA, 19 nt, Artificial Sequence
  Description of Artificial Sequence: Synthetic oligonucleotide
ccauaacuuugugguggau

SEQ ID NO: 17762 - RNA, 19 nt, Artificial Sequence
  Description of Artificial Sequence: Synthetic oligonucleotide
ccccauaacuuuguggugg

SEQ ID NO: 17763 - RNA, 19 nt, Artificial Sequence
  Description of Artificial Sequence: Synthetic oligonucleotide
ccugaacauccaguccugg

SEQ ID NO: 17764 - RNA, 19 nt, Artificial Sequence
  Description of Artificial Sequence: Synthetic oligonucleotide
cucaggcccucaggacaca

SEQ ID NO: 17765 - RNA, 19 nt, Artificial Sequence
  Description of Artificial Sequence: Synthetic oligonucleotide
cugcucaggcccucaggac

SEQ ID NO: 17766 - RNA, 19 nt, Artificial Sequence
  Description of Artificial Sequence: Synthetic oligonucleotide
gagaagugacaggcuaugu

SEQ ID NO: 17767 - RNA, 19 nt, Artificial Sequence
  Description of Artificial Sequence: Synthetic oligonucleotide
gcucaggcccucaggacac

SEQ ID NO: 17768 - RNA, 19 nt, Artificial Sequence
  Description of Artificial Sequence: Synthetic oligonucleotide
gcugcucaggcccucagga

SEQ ID NO: 17769 - RNA, 19 nt, Artificial Sequence
  Description of Artificial Sequence: Synthetic oligonucleotide
ggcccucaggacacagacu

SEQ ID NO: 17770 - RNA, 19 nt, Artificial Sequence
  Description of Artificial Sequence: Synthetic oligonucleotide
ggcugcucaggcccucagg

SEQ ID NO: 17771 - RNA, 19 nt, Artificial Sequence
  Description of Artificial Sequence: Synthetic oligonucleotide
gguuaccugaacauccagu

SEQ ID NO: 17772 - RNA, 19 nt, Artificial Sequence
  Description of Artificial Sequence: Synthetic oligonucleotide
gugauggucaaguguugga

SEQ ID NO: 17773 - RNA, 19 nt, Artificial Sequence
  Description of Artificial Sequence: Synthetic oligonucleotide
ucaggcccucaggacacag

SEQ ID NO: 17774 - RNA, 19 nt, Artificial Sequence
  Description of Artificial Sequence: Synthetic oligonucleotide
ucccugaaggaaauuagug

SEQ ID NO: 17775 - RNA, 19 nt, Artificial Sequence
  Description of Artificial Sequence: Synthetic oligonucleotide
ugaacauccaguccuggcc

SEQ ID NO: 17776 - RNA, 19 nt, Artificial Sequence
  Description of Artificial Sequence: Synthetic oligonucleotide
ugacaguggagccugugua

SEQ ID NO: 17777 - RNA, 19 nt, Artificial Sequence
  Description of Artificial Sequence: Synthetic oligonucleotide
ugcacccagggguguaaag

SEQ ID NO: 17778 - RNA, 19 nt, Artificial Sequence
  Description of Artificial Sequence: Synthetic oligonucleotide
uggugauggucaaguguug

SEQ ID NO: 17779 - RNA, 19 nt, Artificial Sequence
  Description of Artificial Sequence: Synthetic oligonucleotide
uugauaacccugauuacug

SEQ ID NO: 17780 - RNA, 19 nt, Artificial Sequence
  Description of Artificial Sequence: Synthetic oligonucleotide
uuugauaacccugauuacu

SEQ ID NO: 17781 - RNA, 19 nt, Artificial Sequence
  Description of Artificial Sequence: Synthetic oligonucleotide
aacugguguguccagauag

SEQ ID NO: 17782 - RNA, 19 nt, Artificial Sequence
  Description of Artificial Sequence: Synthetic oligonucleotide
acccagacuaccugcagga

SEQ ID NO: 17783 - RNA, 19 nt, Artificial Sequence
  Description of Artificial Sequence: Synthetic oligonucleotide
acugguguguccagauagc

SEQ ID NO: 17784 - RNA, 19 nt, Artificial Sequence
  Description of Artificial Sequence: Synthetic oligonucleotide
cugcuuaacuggugugucc

SEQ ID NO: 17785 - RNA, 19 nt, Artificial Sequence
  Description of Artificial Sequence: Synthetic oligonucleotide
cuuaacugguguguccaga

SEQ ID NO: 17786 - RNA, 19 nt, Artificial Sequence
  Description of Artificial Sequence: Synthetic oligonucleotide
gcuuaacugguguguccag

SEQ ID NO: 17787 - RNA, 19 nt, Artificial Sequence
  Description of Artificial Sequence: Synthetic oligonucleotide
guuuacauggucaugguca

SEQ ID NO: 17788 - RNA, 19 nt, Artificial Sequence
  Description of Artificial Sequence: Synthetic oligonucleotide
ugcuuaacuggugugucca

SEQ ID NO: 17789 - RNA, 19 nt, Artificial Sequence
  Description of Artificial Sequence: Synthetic oligonucleotide
uuaacugguguguccagau

SEQ ID NO: 17790 - RNA, 19 nt, Artificial Sequence
  Description of Artificial Sequence: Synthetic oligonucleotide
uuuacauggucauggucaa

SEQ ID NO: 17791 - RNA, 19 nt, Artificial Sequence
  Description of Artificial Sequence: Synthetic oligonucleotide
agccucccaucugcacuau

SEQ ID NO: 17792 - RNA, 19 nt, Artificial Sequence
  Description of Artificial Sequence: Synthetic oligonucleotide
auguuggaugauugaugcu

SEQ ID NO: 17793 - RNA, 19 nt, Artificial Sequence
  Description of Artificial Sequence: Synthetic oligonucleotide
cagccucccaucugcacua

SEQ ID NO: 17794 - RNA, 19 nt, Artificial Sequence
  Description of Artificial Sequence: Synthetic oligonucleotide
cccuccuccugccuacacc

SEQ ID NO: 17795 - RNA, 19 nt, Artificial Sequence
  Description of Artificial Sequence: Synthetic oligonucleotide
ccucagccucccaucugca

SEQ ID NO: 17796 - RNA, 19 nt, Artificial Sequence
  Description of Artificial Sequence: Synthetic oligonucleotide
ccucccaucugcacuauug

SEQ ID NO: 17797 - RNA, 19 nt, Artificial Sequence
  Description of Artificial Sequence: Synthetic oligonucleotide
ccuccuccugccuacaccc

SEQ ID NO: 17798 - RNA, 19 nt, Artificial Sequence
  Description of Artificial Sequence: Synthetic oligonucleotide
cucagccucccaucugcac

SEQ ID NO: 17799 - RNA, 19 nt, Artificial Sequence
  Description of Artificial Sequence: Synthetic oligonucleotide
cucccaucugcacuauuga

SEQ ID NO: 17800 - RNA, 19 nt, Artificial Sequence
  Description of Artificial Sequence: Synthetic oligonucleotide
cuccuccugccuacacccc

SEQ ID NO: 17801 - RNA, 19 nt, Artificial Sequence
  Description of Artificial Sequence: Synthetic oligonucleotide
gccucagccucccaucugc

SEQ ID NO: 17802 - RNA, 19 nt, Artificial Sequence
  Description of Artificial Sequence: Synthetic oligonucleotide
gccucccaucugcacuauu

SEQ ID NO: 17803 - RNA, 19 nt, Artificial Sequence
  Description of Artificial Sequence: Synthetic oligonucleotide
gguacagugcugaccccac

SEQ ID NO: 17804 - RNA, 19 nt, Artificial Sequence
  Description of Artificial Sequence: Synthetic oligonucleotide
guuggaugauugaugcuga

SEQ ID NO: 17805 - RNA, 19 nt, Artificial Sequence
  Description of Artificial Sequence: Synthetic oligonucleotide
ugccucagccucccaucug

SEQ ID NO: 17806 - RNA, 19 nt, Artificial Sequence
  Description of Artificial Sequence: Synthetic oligonucleotide
uguuggaugauugaugcug

SEQ ID NO: 17807 - RNA, 19 nt, Artificial Sequence
  Description of Artificial Sequence: Synthetic oligonucleotide
uuacauggucauggucaaa

SEQ ID NO: 17808 - RNA, 19 nt, Artificial Sequence
  Description of Artificial Sequence: Synthetic oligonucleotide
aagauggaaguagaagaaa

SEQ ID NO: 17809 - RNA, 19 nt, Artificial Sequence
  Description of Artificial Sequence: Synthetic oligonucleotide
aauuucaaugacaguggag

SEQ ID NO: 17810 - RNA, 19 nt, Artificial Sequence
  Description of Artificial Sequence: Synthetic oligonucleotide
acagguuuccugaacauac

SEQ ID NO: 17811 - RNA, 19 nt, Artificial Sequence
  Description of Artificial Sequence: Synthetic oligonucleotide
accuaaggacacagacugc

SEQ ID NO: 17812 - RNA, 19 nt, Artificial Sequence
  Description of Artificial Sequence: Synthetic oligonucleotide
accucuccuuccugcgguc

SEQ ID NO: 17813 - RNA, 19 nt, Artificial Sequence
  Description of Artificial Sequence: Synthetic oligonucleotide
agacugcuuugccugcaug

SEQ ID NO: 17814 - RNA, 19 nt, Artificial Sequence
  Description of Artificial Sequence: Synthetic oligonucleotide
agauaacagguuuccugaa

SEQ ID NO: 17815 - RNA, 19 nt, Artificial Sequence
  Description of Artificial Sequence: Synthetic oligonucleotide
agauggaaguagaagaaaa

SEQ ID NO: 17816 - RNA, 19 nt, Artificial Sequence
  Description of Artificial Sequence: Synthetic oligonucleotide
aggaccuaaggacacagac

SEQ ID NO: 17817 - RNA, 19 nt, Artificial Sequence
  Description of Artificial Sequence: Synthetic oligonucleotide
aggauggcucgagacccuc

SEQ ID NO: 17818 - RNA, 19 nt, Artificial Sequence
  Description of Artificial Sequence: Synthetic oligonucleotide
agguuuccugaacauacag

SEQ ID NO: 17819 - RNA, 19 nt, Artificial Sequence
  Description of Artificial Sequence: Synthetic oligonucleotide
auaacagguuuccugaaca

SEQ ID NO: 17820 - RNA, 19 nt, Artificial Sequence
  Description of Artificial Sequence: Synthetic oligonucleotide
auggaaguagaagaaaaug

SEQ ID NO: 17821 - RNA, 19 nt, Artificial Sequence
  Description of Artificial Sequence: Synthetic oligonucleotide
auguccacauaacuuugug

SEQ ID NO: 17822 - RNA, 19 nt, Artificial Sequence
  Description of Artificial Sequence: Synthetic oligonucleotide
caagauggaaguagaagaa

SEQ ID NO: 17823 - RNA, 19 nt, Artificial Sequence
  Description of Artificial Sequence: Synthetic oligonucleotide
caaggauggcucgagaccc

SEQ ID NO: 17824 - RNA, 19 nt, Artificial Sequence
  Description of Artificial Sequence: Synthetic oligonucleotide
cagacugcuuugccugcau

SEQ ID NO: 17825 - RNA, 19 nt, Artificial Sequence
  Description of Artificial Sequence: Synthetic oligonucleotide
caggaccuaaggacacaga

SEQ ID NO: 17826 - RNA, 19 nt, Artificial Sequence
  Description of Artificial Sequence: Synthetic oligonucleotide
cagguuuccugaacauaca

SEQ ID NO: 17827 - RNA, 19 nt, Artificial Sequence
  Description of Artificial Sequence: Synthetic oligonucleotide
ccugaacauacagucaugg

SEQ ID NO: 17828 - RNA, 19 nt, Artificial Sequence
  Description of Artificial Sequence: Synthetic oligonucleotide
cucaggaccuaaggacaca

SEQ ID NO: 17829 - RNA, 19 nt, Artificial Sequence
  Description of Artificial Sequence: Synthetic oligonucleotide
cugaacauacagucauggc

SEQ ID NO: 17830 - RNA, 19 nt, Artificial Sequence
  Description of Artificial Sequence: Synthetic oligonucleotide
cugcucaggaccuaaggac

SEQ ID NO: 17831 - RNA, 19 nt, Artificial Sequence
  Description of Artificial Sequence: Synthetic oligonucleotide
gaauuucaaugacagugga

SEQ ID NO: 17832 - RNA, 19 nt, Artificial Sequence
  Description of Artificial Sequence: Synthetic oligonucleotide
gaccuaaggacacagacug

SEQ ID NO: 17833 - RNA, 19 nt, Artificial Sequence
  Description of Artificial Sequence: Synthetic oligonucleotide
gacuucaguguuuuuucua

SEQ ID NO: 17834 - RNA, 19 nt, Artificial Sequence
  Description of Artificial Sequence: Synthetic oligonucleotide
gagauaacagguuuccuga

SEQ ID NO: 17835 - RNA, 19 nt, Artificial Sequence
  Description of Artificial Sequence: Synthetic oligonucleotide
gauaacagguuuccugaac

SEQ ID NO: 17836 - RNA, 19 nt, Artificial Sequence
  Description of Artificial Sequence: Synthetic oligonucleotide
gauggaaguagaagaaaau

SEQ ID NO: 17837 - RNA, 19 nt, Artificial Sequence
  Description of Artificial Sequence: Synthetic oligonucleotide
gcucaggaccuaaggacac

SEQ ID NO: 17838 - RNA, 19 nt, Artificial Sequence
  Description of Artificial Sequence: Synthetic oligonucleotide
gcugcucaggaccuaagga

SEQ ID NO: 17839 - RNA, 19 nt, Artificial Sequence
  Description of Artificial Sequence: Synthetic oligonucleotide
ggaaguagaagaaaauggg

SEQ ID NO: 17840 - RNA, 19 nt, Artificial Sequence
  Description of Artificial Sequence: Synthetic oligonucleotide
ggaccuaaggacacagacu

SEQ ID NO: 17841 - RNA, 19 nt, Artificial Sequence
  Description of Artificial Sequence: Synthetic oligonucleotide
ggaccucuccuuccugcgg

SEQ ID NO: 17842 - RNA, 19 nt, Artificial Sequence
  Description of Artificial Sequence: Synthetic oligonucleotide
ggcugcucaggaccuaagg

SEQ ID NO: 17843 - RNA, 19 nt, Artificial Sequence
  Description of Artificial Sequence: Synthetic oligonucleotide
gguuuccugaacauacagu

SEQ ID NO: 17844 - RNA, 19 nt, Artificial Sequence
  Description of Artificial Sequence: Synthetic oligonucleotide
guucgagaagucacaggcu

SEQ ID NO: 17845 - RNA, 19 nt, Artificial Sequence
  Description of Artificial Sequence: Synthetic oligonucleotide
guuuccugaacauacaguc

SEQ ID NO: 17846 - RNA, 19 nt, Artificial Sequence
  Description of Artificial Sequence: Synthetic oligonucleotide
uaacagguuuccugaacau

SEQ ID NO: 17847 - RNA, 19 nt, Artificial Sequence
  Description of Artificial Sequence: Synthetic oligonucleotide
ucaggaccuaaggacacag

SEQ ID NO: 17848 - RNA, 19 nt, Artificial Sequence
  Description of Artificial Sequence: Synthetic oligonucleotide
ugaacauacagucauggcc

SEQ ID NO: 17849 - RNA, 19 nt, Artificial Sequence
  Description of Artificial Sequence: Synthetic oligonucleotide
ugacaguggagcauguguu

SEQ ID NO: 17850 - RNA, 19 nt, Artificial Sequence
  Description of Artificial Sequence: Synthetic oligonucleotide
ugcucaggaccuaaggaca

SEQ ID NO: 17851 - RNA, 19 nt, Artificial Sequence
  Description of Artificial Sequence: Synthetic oligonucleotide
uggaaguagaagaaaaugg

SEQ ID NO: 17852 - RNA, 19 nt, Artificial Sequence
  Description of Artificial Sequence: Synthetic oligonucleotide
uuucaaugacaguggagca

SEQ ID NO: 17853 - RNA, 19 nt, Artificial Sequence
  Description of Artificial Sequence: Synthetic oligonucleotide
gccugaauacauaaaccag

SEQ ID NO: 17854 - RNA, 19 nt, Artificial Sequence
  Description of Artificial Sequence: Synthetic oligonucleotide
uacgugauggccagcgugg

SEQ ID NO: 17855 - RNA, 19 nt, Artificial Sequence
  Description of Artificial Sequence: Synthetic oligonucleotide
ccagccccccaucugcacc

SEQ ID NO: 17856 - RNA, 19 nt, Artificial Sequence
  Description of Artificial Sequence: Synthetic oligonucleotide
cugccccagccccccaucu

SEQ ID NO: 17857 - RNA, 19 nt, Artificial Sequence
  Description of Artificial Sequence: Synthetic oligonucleotide
cacacacaccccuccccug

SEQ ID NO: 17858 - RNA, 19 nt, Artificial Sequence
  Description of Artificial Sequence: Synthetic oligonucleotide
acaaauugccaagggaaug

SEQ ID NO: 17859 - RNA, 19 nt, Artificial Sequence
  Description of Artificial Sequence: Synthetic oligonucleotide
uacaaauugccaagggaau

SEQ ID NO: 17860 - RNA, 19 nt, Artificial Sequence
  Description of Artificial Sequence: Synthetic oligonucleotide
caacuucaguguuuuuucc

SEQ ID NO: 17861 - RNA, 19 nt, Artificial Sequence
  Description of Artificial Sequence: Synthetic oligonucleotide
acuauaugggaacugauga

SEQ ID NO: 17862 - RNA, 19 nt, Artificial Sequence
  Description of Artificial Sequence: Synthetic oligonucleotide
augggaacugaugaccuuu

SEQ ID NO: 17863 - RNA, 19 nt, Artificial Sequence
  Description of Artificial Sequence: Synthetic oligonucleotide
cuauaugggaacugaugac

SEQ ID NO: 17864 - RNA, 19 nt, Artificial Sequence
  Description of Artificial Sequence: Synthetic oligonucleotide
gaacugaugaccuuuggag

SEQ ID NO: 17865 - RNA, 19 nt, Artificial Sequence
  Description of Artificial Sequence: Synthetic oligonucleotide
uaugggaacugaugaccuu

SEQ ID NO: 17866 - RNA, 19 nt, Artificial Sequence
  Description of Artificial Sequence: Synthetic oligonucleotide
aagccuacgugauggccag

SEQ ID NO: 17867 - RNA, 19 nt, Artificial Sequence
  Description of Artificial Sequence: Synthetic oligonucleotide
aaguggauggcauuggaau

SEQ ID NO: 17868 - RNA, 19 nt, Artificial Sequence
  Description of Artificial Sequence: Synthetic oligonucleotide
aauaccaugcagaaggagg

SEQ ID NO: 17869 - RNA, 19 nt, Artificial Sequence
  Description of Artificial Sequence: Synthetic oligonucleotide
acugcugccacaaccagug

SEQ ID NO: 17870 - RNA, 19 nt, Artificial Sequence
  Description of Artificial Sequence: Synthetic oligonucleotide
agaauaccaugcagaagga

SEQ ID NO: 17871 - RNA, 19 nt, Artificial Sequence
  Description of Artificial Sequence: Synthetic oligonucleotide
agcucaugcccuucggcug

SEQ ID NO: 17872 - RNA, 19 nt, Artificial Sequence
  Description of Artificial Sequence: Synthetic oligonucleotide
aggcaaagugccuaucaag

SEQ ID NO: 17873 - RNA, 19 nt, Artificial Sequence
  Description of Artificial Sequence: Synthetic oligonucleotide
aguggauggcauuggaauc

SEQ ID NO: 17874 - RNA, 19 nt, Artificial Sequence
  Description of Artificial Sequence: Synthetic oligonucleotide
auaccaugcagaaggaggc

SEQ ID NO: 17875 - RNA, 19 nt, Artificial Sequence
  Description of Artificial Sequence: Synthetic oligonucleotide
augcagaaggaggcaaagu

SEQ ID NO: 17876 - RNA, 19 nt, Artificial Sequence
  Description of Artificial Sequence: Synthetic oligonucleotide
augcccuucggcugccucc

SEQ ID NO: 17877 - RNA, 19 nt, Artificial Sequence
  Description of Artificial Sequence: Synthetic oligonucleotide
caaguggauggcauuggaa

SEQ ID NO: 17878 - RNA, 19 nt, Artificial Sequence
  Description of Artificial Sequence: Synthetic oligonucleotide
cagaaggaggcaaagugcc

SEQ ID NO: 17879 - RNA, 19 nt, Artificial Sequence
  Description of Artificial Sequence: Synthetic oligonucleotide
cagcucaugcccuucggcu

SEQ ID NO: 17880 - RNA, 19 nt, Artificial Sequence
  Description of Artificial Sequence: Synthetic oligonucleotide
caugcagaaggaggcaaag

SEQ ID NO: 17881 - RNA, 19 nt, Artificial Sequence
  Description of Artificial Sequence: Synthetic oligonucleotide
caugcccuucggcugccuc

SEQ ID NO: 17882 - RNA, 19 nt, Artificial Sequence
  Description of Artificial Sequence: Synthetic oligonucleotide
ccagugacugcugccacaa

SEQ ID NO: 17883 - RNA, 19 nt, Artificial Sequence
  Description of Artificial Sequence: Synthetic oligonucleotide
ccaugcagaaggaggcaaa

SEQ ID NO: 17884 - RNA, 19 nt, Artificial Sequence
  Description of Artificial Sequence: Synthetic oligonucleotide
cccaccagagcgggagccc

SEQ ID NO: 17885 - RNA, 19 nt, Artificial Sequence
  Description of Artificial Sequence: Synthetic oligonucleotide
cccagugacugcugccaca

SEQ ID NO: 17886 - RNA, 19 nt, Artificial Sequence
  Description of Artificial Sequence: Synthetic oligonucleotide
cucaugcccuucggcugcc

SEQ ID NO: 17887 - RNA, 19 nt, Artificial Sequence
  Description of Artificial Sequence: Synthetic oligonucleotide
cugccacaaccagugugcu

SEQ ID NO: 17888 - RNA, 19 nt, Artificial Sequence
  Description of Artificial Sequence: Synthetic oligonucleotide
cugcugccacaaccagugu

SEQ ID NO: 17889 - RNA, 19 nt, Artificial Sequence
  Description of Artificial Sequence: Synthetic oligonucleotide
cugcuggggcccggagccc

SEQ ID NO: 17890 - RNA, 19 nt, Artificial Sequence
  Description of Artificial Sequence: Synthetic oligonucleotide
cugcuggugguggcccugg

SEQ ID NO: 17891 - RNA, 19 nt, Artificial Sequence
  Description of Artificial Sequence: Synthetic oligonucleotide
gaagccuacgugauggcca

SEQ ID NO: 17892 - RNA, 19 nt, Artificial Sequence
  Description of Artificial Sequence: Synthetic oligonucleotide
gaauaccaugcagaaggag

SEQ ID NO: 17893 - RNA, 19 nt, Artificial Sequence
  Description of Artificial Sequence: Synthetic oligonucleotide
gacugcugccacaaccagu

SEQ ID NO: 17894 - RNA, 19 nt, Artificial Sequence
  Description of Artificial Sequence: Synthetic oligonucleotide
gaggcaaagugccuaucaa

SEQ ID NO: 17895 - RNA, 19 nt, Artificial Sequence
  Description of Artificial Sequence: Synthetic oligonucleotide
gcagaaggaggcaaagugc

SEQ ID NO: 17896 - RNA, 19 nt, Artificial Sequence
  Description of Artificial Sequence: Synthetic oligonucleotide
gccacaaccagugugcugc

SEQ ID NO: 17897 - RNA, 19 nt, Artificial Sequence
  Description of Artificial Sequence: Synthetic oligonucleotide
gcucaugcccuucggcugc

SEQ ID NO: 17898 - RNA, 19 nt, Artificial Sequence
  Description of Artificial Sequence: Synthetic oligonucleotide
gcugccacaaccagugugc

SEQ ID NO: 17899 - RNA, 19 nt, Artificial Sequence
  Description of Artificial Sequence: Synthetic oligonucleotide
gcuggugguggcccugggg

SEQ ID NO: 17900 - RNA, 19 nt, Artificial Sequence
  Description of Artificial Sequence: Synthetic oligonucleotide
ggaggcaaagugccuauca

SEQ ID NO: 17901 - RNA, 19 nt, Artificial Sequence
  Description of Artificial Sequence: Synthetic oligonucleotide
gguggaugccgacgaguac

SEQ ID NO: 17902 - RNA, 19 nt, Artificial Sequence
  Description of Artificial Sequence: Synthetic oligonucleotide
guggaugccgacgaguacc

SEQ ID NO: 17903 - RNA, 19 nt, Artificial Sequence
  Description of Artificial Sequence: Synthetic oligonucleotide
ucaugcccuucggcugccu

SEQ ID NO: 17904 - RNA, 19 nt, Artificial Sequence
  Description of Artificial Sequence: Synthetic oligonucleotide
ugacugcugccacaaccag

SEQ ID NO: 17905 - RNA, 19 nt, Artificial Sequence
  Description of Artificial Sequence: Synthetic oligonucleotide
ugaugaccuuuggauccaa

SEQ ID NO: 17906 - RNA, 19 nt, Artificial Sequence
  Description of Artificial Sequence: Synthetic oligonucleotide
ugcagaaggaggcaaagug

SEQ ID NO: 17907 - RNA, 19 nt, Artificial Sequence
  Description of Artificial Sequence: Synthetic oligonucleotide
ugccacaaccagugugcug

SEQ ID NO: 17908 - RNA, 19 nt, Artificial Sequence
  Description of Artificial Sequence: Synthetic oligonucleotide
ugcccuucggcugccuccu

SEQ ID NO: 17909 - RNA, 19 nt, Artificial Sequence
  Description of Artificial Sequence: Synthetic oligonucleotide
ugcugccacaaccagugug

SEQ ID NO: 17910 - RNA, 19 nt, Artificial Sequence
  Description of Artificial Sequence: Synthetic oligonucleotide
ugcuggggcccggagccca

SEQ ID NO: 17911 - RNA, 19 nt, Artificial Sequence
  Description of Artificial Sequence: Synthetic oligonucleotide
ugcuggugguggcccuggg

SEQ ID NO: 17912 - RNA, 19 nt, Artificial Sequence
  Description of Artificial Sequence: Synthetic oligonucleotide
uggaugccgacgaguaccu

SEQ ID NO: 17913 - RNA, 19 nt, Artificial Sequence
  Description of Artificial Sequence: Synthetic oligonucleotide
aaaauggcccgagaccccc

SEQ ID NO: 17914 - RNA, 19 nt, Artificial Sequence
  Description of Artificial Sequence: Synthetic oligonucleotide
aacugccagaaacugacca

SEQ ID NO: 17915 - RNA, 19 nt, Artificial Sequence
  Description of Artificial Sequence: Synthetic oligonucleotide
aagugcuggaugauagacg

SEQ ID NO: 17916 - RNA, 19 nt, Artificial Sequence
  Description of Artificial Sequence: Synthetic oligonucleotide
accaaaaucaucugugccc

SEQ ID NO: 17917 - RNA, 19 nt, Artificial Sequence
  Description of Artificial Sequence: Synthetic oligonucleotide
acugaccaaaaucaucugu

SEQ ID NO: 17918 - RNA, 19 nt, Artificial Sequence
  Description of Artificial Sequence: Synthetic oligonucleotide
caaaauggcccgagacccc

SEQ ID NO: 17919 - RNA, 19 nt, Artificial Sequence
  Description of Artificial Sequence: Synthetic oligonucleotide
caagugcuggaugauagac

SEQ ID NO: 17920 - RNA, 19 nt, Artificial Sequence
  Description of Artificial Sequence: Synthetic oligonucleotide
ccgagggcugcuggggccc

SEQ ID NO: 17921 - RNA, 19 nt, Artificial Sequence
  Description of Artificial Sequence: Synthetic oligonucleotide
cuccaaaauggcccgagac

SEQ ID NO: 17922 - RNA, 19 nt, Artificial Sequence
  Description of Artificial Sequence: Synthetic oligonucleotide
cugaccaaaaucaucugug

SEQ ID NO: 17923 - RNA, 19 nt, Artificial Sequence
  Description of Artificial Sequence: Synthetic oligonucleotide
cugccagaaacugaccaaa

SEQ ID NO: 17924 - RNA, 19 nt, Artificial Sequence
  Description of Artificial Sequence: Synthetic oligonucleotide
gaccaaaaucaucugugcc

SEQ ID NO: 17925 - RNA, 19 nt, Artificial Sequence
  Description of Artificial Sequence: Synthetic oligonucleotide
guaaaggaaaucacagguu

SEQ ID NO: 17926 - RNA, 19 nt, Artificial Sequence
  Description of Artificial Sequence: Synthetic oligonucleotide
uccaaaauggcccgagacc

SEQ ID NO: 17927 - RNA, 19 nt, Artificial Sequence
  Description of Artificial Sequence: Synthetic oligonucleotide
ucuccaaaauggcccgaga

SEQ ID NO: 17928 - RNA, 19 nt, Artificial Sequence
  Description of Artificial Sequence: Synthetic oligonucleotide
ugccagaaacugaccaaaa

SEQ ID NO: 17929 - RNA, 19 nt, Artificial Sequence
  Description of Artificial Sequence: Synthetic oligonucleotide
uggugguggcccuggggau

SEQ ID NO: 17930 - RNA, 19 nt, Artificial Sequence
  Description of Artificial Sequence: Synthetic oligonucleotide
uucuccaaaauggcccgag

SEQ ID NO: 17931 - RNA, 19 nt, Artificial Sequence
  Description of Artificial Sequence: Synthetic oligonucleotide
aaaggagaacgccucccuc

SEQ ID NO: 17932 - RNA, 19 nt, Artificial Sequence
  Description of Artificial Sequence: Synthetic oligonucleotide
aaggagaacgccucccuca

SEQ ID NO: 17933 - RNA, 19 nt, Artificial Sequence
  Description of Artificial Sequence: Synthetic oligonucleotide
acaacccugacuaccagca

SEQ ID NO: 17934 - RNA, 19 nt, Artificial Sequence
  Description of Artificial Sequence: Synthetic oligonucleotide
agaaaggagaacgccuccc

SEQ ID NO: 17935 - RNA, 19 nt, Artificial Sequence
  Description of Artificial Sequence: Synthetic oligonucleotide
aggagaacgccucccucag

SEQ ID NO: 17936 - RNA, 19 nt, Artificial Sequence
  Description of Artificial Sequence: Synthetic oligonucleotide
ccccagugacugcugccac

SEQ ID NO: 17937 - RNA, 19 nt, Artificial Sequence
  Description of Artificial Sequence: Synthetic oligonucleotide
cuggacaacccugacuacc

SEQ ID NO: 17938 - RNA, 19 nt, Artificial Sequence
  Description of Artificial Sequence: Synthetic oligonucleotide
gaaaggagaacgccucccu

SEQ ID NO: 17939 - RNA, 19 nt, Artificial Sequence
  Description of Artificial Sequence: Synthetic oligonucleotide
gacaacccugacuaccagc

SEQ ID NO: 17940 - RNA, 19 nt, Artificial Sequence
  Description of Artificial Sequence: Synthetic oligonucleotide
gagaaaggagaacgccucc

SEQ ID NO: 17941 - RNA, 19 nt, Artificial Sequence
  Description of Artificial Sequence: Synthetic oligonucleotide
gagaacgccucccucagcc

SEQ ID NO: 17942 - RNA, 19 nt, Artificial Sequence
  Description of Artificial Sequence: Synthetic oligonucleotide
ggacaacccugacuaccag

SEQ ID NO: 17943 - RNA, 19 nt, Artificial Sequence
  Description of Artificial Sequence: Synthetic oligonucleotide
ggagaacgccucccucagc

SEQ ID NO: 17944 - RNA, 19 nt, Artificial Sequence
  Description of Artificial Sequence: Synthetic oligonucleotide
uggacaacccugacuacca

SEQ ID NO: 17945 - RNA, 19 nt, Artificial Sequence
  Description of Artificial Sequence: Synthetic oligonucleotide
uggagaaaggagaacgccu

SEQ ID NO: 17946 - RNA, 19 nt, Artificial Sequence
  Description of Artificial Sequence: Synthetic oligonucleotide
uggaugaagaagacaugga

SEQ ID NO: 17947 - RNA, 19 nt, Artificial Sequence
  Description of Artificial Sequence: Synthetic oligonucleotide
acacgaugcggagacugcu

SEQ ID NO: 17948 - RNA, 19 nt, Artificial Sequence
  Description of Artificial Sequence: Synthetic oligonucleotide
acugcugcaggaaacggag

SEQ ID NO: 17949 - RNA, 19 nt, Artificial Sequence
  Description of Artificial Sequence: Synthetic oligonucleotide
agaccauguccgggaaaac

SEQ ID NO: 17950 - RNA, 19 nt, Artificial Sequence
  Description of Artificial Sequence: Synthetic oligonucleotide
agacugcugcaggaaacgg

SEQ ID NO: 17951 - RNA, 19 nt, Artificial Sequence
  Description of Artificial Sequence: Synthetic oligonucleotide
aucccccaaagccaacaaa

SEQ ID NO: 17952 - RNA, 19 nt, Artificial Sequence
  Description of Artificial Sequence: Synthetic oligonucleotide
augucaaaauuacagacuu

SEQ ID NO: 17953 - RNA, 19 nt, Artificial Sequence
  Description of Artificial Sequence: Synthetic oligonucleotide
auuacagacuucgggcugg

SEQ ID NO: 17954 - RNA, 19 nt, Artificial Sequence
  Description of Artificial Sequence: Synthetic oligonucleotide
caucaaguggauggcgcug

SEQ ID NO: 17955 - RNA, 19 nt, Artificial Sequence
  Description of Artificial Sequence: Synthetic oligonucleotide
caugucaaaauuacagacu

SEQ ID NO: 17956 - RNA, 19 nt, Artificial Sequence
  Description of Artificial Sequence: Synthetic oligonucleotide
ccaucaaguggauggcgcu

SEQ ID NO: 17957 - RNA, 19 nt, Artificial Sequence
  Description of Artificial Sequence: Synthetic oligonucleotide
cccaucaaguggauggcgc

SEQ ID NO: 17958 - RNA, 19 nt, Artificial Sequence
  Description of Artificial Sequence: Synthetic oligonucleotide
ccccaaagccaacaaagaa

SEQ ID NO: 17959 - RNA, 19 nt, Artificial Sequence
  Description of Artificial Sequence: Synthetic oligonucleotide
cccccaaagccaacaaaga

SEQ ID NO: 17960 - RNA, 19 nt, Artificial Sequence
  Description of Artificial Sequence: Synthetic oligonucleotide
ccucuuagaccauguccgg

SEQ ID NO: 17961 - RNA, 19 nt, Artificial Sequence
  Description of Artificial Sequence: Synthetic oligonucleotide
cucuuagaccauguccggg

SEQ ID NO: 17962 - RNA, 19 nt, Artificial Sequence
  Description of Artificial Sequence: Synthetic oligonucleotide
cugccucuuagaccauguc

SEQ ID NO: 17963 - RNA, 19 nt, Artificial Sequence
  Description of Artificial Sequence: Synthetic oligonucleotide
cuuagaccauguccgggaa

SEQ ID NO: 17964 - RNA, 19 nt, Artificial Sequence
  Description of Artificial Sequence: Synthetic oligonucleotide
gacugcugcaggaaacgga

SEQ ID NO: 17965 - RNA, 19 nt, Artificial Sequence
  Description of Artificial Sequence: Synthetic oligonucleotide
gagacugcugcaggaaacg

SEQ ID NO: 17966 - RNA, 19 nt, Artificial Sequence
  Description of Artificial Sequence: Synthetic oligonucleotide
gccucuuagaccauguccg

SEQ ID NO: 17967 - RNA, 19 nt, Artificial Sequence
  Description of Artificial Sequence: Synthetic oligonucleotide
gcugccucuuagaccaugu

SEQ ID NO: 17968 - RNA, 19 nt, Artificial Sequence
  Description of Artificial Sequence: Synthetic oligonucleotide
ggagacugcugcaggaaac

SEQ ID NO: 17969 - RNA, 19 nt, Artificial Sequence
  Description of Artificial Sequence: Synthetic oligonucleotide
ggcugccucuuagaccaug

SEQ ID NO: 17970 - RNA, 19 nt, Artificial Sequence
  Description of Artificial Sequence: Synthetic oligonucleotide
gggcugcaaagccucccca

SEQ ID NO: 17971 - RNA, 19 nt, Artificial Sequence
  Description of Artificial Sequence: Synthetic oligonucleotide
uagaccauguccgggaaaa

SEQ ID NO: 17972 - RNA, 19 nt, Artificial Sequence
  Description of Artificial Sequence: Synthetic oligonucleotide
ucccccaaagccaacaaag

SEQ ID NO: 17973 - RNA, 19 nt, Artificial Sequence
  Description of Artificial Sequence: Synthetic oligonucleotide
ucuuagaccauguccggga

SEQ ID NO: 17974 - RNA, 19 nt, Artificial Sequence
  Description of Artificial Sequence: Synthetic oligonucleotide
ugccucuuagaccaugucc

SEQ ID NO: 17975 - RNA, 19 nt, Artificial Sequence
  Description of Artificial Sequence: Synthetic oligonucleotide
uuacagacuucgggcuggc

SEQ ID NO: 17976 - RNA, 19 nt, Artificial Sequence
  Description of Artificial Sequence: Synthetic oligonucleotide
aaaagggggagcggcugcc

SEQ ID NO: 17977 - RNA, 19 nt, Artificial Sequence
  Description of Artificial Sequence: Synthetic oligonucleotide
cuggaaaagggggagcggc

SEQ ID NO: 17978 - RNA, 19 nt, Artificial Sequence
  Description of Artificial Sequence: Synthetic oligonucleotide
gaaaagggggagcggcugc

SEQ ID NO: 17979 - RNA, 19 nt, Artificial Sequence
  Description of Artificial Sequence: Synthetic oligonucleotide
gaagagaucacagguuacc

SEQ ID NO: 17980 - RNA, 19 nt, Artificial Sequence
  Description of Artificial Sequence: Synthetic oligonucleotide
ggaaaagggggagcggcug

SEQ ID NO: 17981 - RNA, 19 nt, Artificial Sequence
  Description of Artificial Sequence: Synthetic oligonucleotide
uggaaaagggggagcggcu

SEQ ID NO: 17982 - RNA, 19 nt, Artificial Sequence
  Description of Artificial Sequence: Synthetic oligonucleotide
aaaauuacagacuucgggc

SEQ ID NO: 17983 - RNA, 19 nt, Artificial Sequence
  Description of Artificial Sequence: Synthetic oligonucleotide
aaauuacagacuucgggcu

SEQ ID NO: 17984 - RNA, 19 nt, Artificial Sequence
  Description of Artificial Sequence: Synthetic oligonucleotide
ccccaucugcaccauugau

SEQ ID NO: 17985 - RNA, 19 nt, Artificial Sequence
  Description of Artificial Sequence: Synthetic oligonucleotide
gugaaaauuccaguggcca

SEQ ID NO: 17986 - RNA, 19 nt, Artificial Sequence
  Description of Artificial Sequence: Synthetic oligonucleotide
ugaaaauuccaguggccau

SEQ ID NO: 17987 - RNA, 19 nt, Artificial Sequence
  Description of Artificial Sequence: Synthetic oligonucleotide
ugaauaugugaaccagcca

SEQ ID NO: 17988 - RNA, 19 nt, Artificial Sequence
  Description of Artificial Sequence: Synthetic oligonucleotide
ugugaaaauuccaguggcc

SEQ ID NO: 17989 - RNA, 19 nt, Artificial Sequence
  Description of Artificial Sequence: Synthetic oligonucleotide
guccccauaacuuuguggu

SEQ ID NO: 17990 - RNA, 19 nt, Artificial Sequence
  Description of Artificial Sequence: Synthetic oligonucleotide
uccccauaacuuuguggug

SEQ ID NO: 17991 - RNA, 19 nt, Artificial Sequence
  Description of Artificial Sequence: Synthetic oligonucleotide
uguccccauaacuuugugg

SEQ ID NO: 17992 - RNA, 19 nt, Artificial Sequence
  Description of Artificial Sequence: Synthetic oligonucleotide
agacagagcuaaggaagcu

SEQ ID NO: 17993 - RNA, 19 nt, Artificial Sequence
  Description of Artificial Sequence: Synthetic oligonucleotide
aguugaugaccuucggggc

SEQ ID NO: 17994 - RNA, 19 nt, Artificial Sequence
  Description of Artificial Sequence: Synthetic oligonucleotide
auggugcauagaaaccugg

SEQ ID NO: 17995 - RNA, 19 nt, Artificial Sequence
  Description of Artificial Sequence: Synthetic oligonucleotide
auugccaagggaauguacu

SEQ ID NO: 17996 - RNA, 19 nt, Artificial Sequence
  Description of Artificial Sequence: Synthetic oligonucleotide
caaagagacagagcuaagg

SEQ ID NO: 17997 - RNA, 19 nt, Artificial Sequence
  Description of Artificial Sequence: Synthetic oligonucleotide
caaauugccaagggaaugu

SEQ ID NO: 17998 - RNA, 19 nt, Artificial Sequence
  Description of Artificial Sequence: Synthetic oligonucleotide
ccaagggaauguacuaccu

SEQ ID NO: 17999 - RNA, 19 nt, Artificial Sequence
  Description of Artificial Sequence: Synthetic oligonucleotide
gagacagagcuaaggaagc

SEQ ID NO: 18000 - RNA, 19 nt, Artificial Sequence
  Description of Artificial Sequence: Synthetic oligonucleotide
gaguugaugaccuucgggg

SEQ ID NO: 18001 - RNA, 19 nt, Artificial Sequence
  Description of Artificial Sequence: Synthetic oligonucleotide
gccaagggaauguacuacc

SEQ ID NO: 18002 - RNA, 19 nt, Artificial Sequence
  Description of Artificial Sequence: Synthetic oligonucleotide
ucaaagagacagagcuaag

SEQ ID NO: 18003 - RNA, 19 nt, Artificial Sequence
  Description of Artificial Sequence: Synthetic oligonucleotide
ugccaagggaauguacuac

SEQ ID NO: 18004 - RNA, 19 nt, Artificial Sequence
  Description of Artificial Sequence: Synthetic oligonucleotide
uggcugcccgaaacgugcu

SEQ ID NO: 18005 - RNA, 19 nt, Artificial Sequence
  Description of Artificial Sequence: Synthetic oligonucleotide
uugccaagggaauguacua

SEQ ID NO: 18006 - RNA, 19 nt, Artificial Sequence
  Description of Artificial Sequence: Synthetic oligonucleotide
acuguggacucgagcaaca

SEQ ID NO: 18007 - RNA, 19 nt, Artificial Sequence
  Description of Artificial Sequence: Synthetic oligonucleotide
caacucucaggcagugugu

SEQ ID NO: 18008 - RNA, 19 nt, Artificial Sequence
  Description of Artificial Sequence: Synthetic oligonucleotide
cagacuguggacucgagca

SEQ ID NO: 18009 - RNA, 19 nt, Artificial Sequence
  Description of Artificial Sequence: Synthetic oligonucleotide
ccacagcugcugcucaacu

SEQ ID NO: 18010 - RNA, 19 nt, Artificial Sequence
  Description of Artificial Sequence: Synthetic oligonucleotide
gacuguggacucgagcaac

SEQ ID NO: 18011 - RNA, 19 nt, Artificial Sequence
  Description of Artificial Sequence: Synthetic oligonucleotide
gcaacucucaggcagugug

SEQ ID NO: 18012 - RNA, 19 nt, Artificial Sequence
  Description of Artificial Sequence: Synthetic oligonucleotide
uggacucgagcaacauuga

SEQ ID NO: 18013 - RNA, 19 nt, Artificial Sequence
  Description of Artificial Sequence: Synthetic oligonucleotide
uguggacucgagcaacauu

SEQ ID NO: 18014 - RNA, 19 nt, Artificial Sequence
  Description of Artificial Sequence: Synthetic oligonucleotide
agugccacccaugccaucc

SEQ ID NO: 18015 - RNA, 19 nt, Artificial Sequence
  Description of Artificial Sequence: Synthetic oligonucleotide
gagugccacccaugccauc

SEQ ID NO: 18016 - RNA, 19 nt, Artificial Sequence
  Description of Artificial Sequence: Synthetic oligonucleotide
aaacagaguugguggaacc

SEQ ID NO: 18017 - RNA, 19 nt, Artificial Sequence
  Description of Artificial Sequence: Synthetic oligonucleotide
aaagaaacugagcugaaga

SEQ ID NO: 18018 - RNA, 19 nt, Artificial Sequence
  Description of Artificial Sequence: Synthetic oligonucleotide
aauucacccaucagaguga

SEQ ID NO: 18019 - RNA, 19 nt, Artificial Sequence
  Description of Artificial Sequence: Synthetic oligonucleotide
acucaacuuaugccccaug

SEQ ID NO: 18020 - RNA, 19 nt, Artificial Sequence
  Description of Artificial Sequence: Synthetic oligonucleotide
agcagaaaacaagcccucu

SEQ ID NO: 18021 - RNA, 19 nt, Artificial Sequence
  Description of Artificial Sequence: Synthetic oligonucleotide
auggaugcugaggaguacu

SEQ ID NO: 18022 - RNA, 19 nt, Artificial Sequence
  Description of Artificial Sequence: Synthetic oligonucleotide
auucacccaucagagugac

SEQ ID NO: 18023 - RNA, 19 nt, Artificial Sequence
  Description of Artificial Sequence: Synthetic oligonucleotide
cucaacuuaugccccaugg

SEQ ID NO: 18024 - RNA, 19 nt, Artificial Sequence
  Description of Artificial Sequence: Synthetic oligonucleotide
gaaacagaguugguggaac

SEQ ID NO: 18025 - RNA, 19 nt, Artificial Sequence
  Description of Artificial Sequence: Synthetic oligonucleotide
gaaagaaacugagcugaag

SEQ ID NO: 18026 - RNA, 19 nt, Artificial Sequence
  Description of Artificial Sequence: Synthetic oligonucleotide
ggaaacagaguugguggaa

SEQ ID NO: 18027 - RNA, 19 nt, Artificial Sequence
  Description of Artificial Sequence: Synthetic oligonucleotide
ucaacuuaugccccauggc

SEQ ID NO: 18028 - RNA, 19 nt, Artificial Sequence
  Description of Artificial Sequence: Synthetic oligonucleotide
ugaaagaaacugagcugaa

SEQ ID NO: 18029 - RNA, 19 nt, Artificial Sequence
  Description of Artificial Sequence: Synthetic oligonucleotide
aaguccuuggcucaggugc

SEQ ID NO: 18030 - RNA, 19 nt, Artificial Sequence
  Description of Artificial Sequence: Synthetic oligonucleotide
aaugugcuggaggcugcuc

SEQ ID NO: 18031 - RNA, 19 nt, Artificial Sequence
  Description of Artificial Sequence: Synthetic oligonucleotide
acaacccugacuacuggaa

SEQ ID NO: 18032 - RNA, 19 nt, Artificial Sequence
  Description of Artificial Sequence: Synthetic oligonucleotide
acaaccgggaccucuccuu

SEQ ID NO: 18033 - RNA, 19 nt, Artificial Sequence
  Description of Artificial Sequence: Synthetic oligonucleotide
acccagagaaacugaacgu

SEQ ID NO: 18034 - RNA, 19 nt, Artificial Sequence
  Description of Artificial Sequence: Synthetic oligonucleotide
agucccugaaggaaaucag

SEQ ID NO: 18035 - RNA, 19 nt, Artificial Sequence
  Description of Artificial Sequence: Synthetic oligonucleotide
agugaaauggccacuacuu

SEQ ID NO: 18036 - RNA, 19 nt, Artificial Sequence
  Description of Artificial Sequence: Synthetic oligonucleotide
augugcuggaggcugcuca

SEQ ID NO: 18037 - RNA, 19 nt, Artificial Sequence
  Description of Artificial Sequence: Synthetic oligonucleotide
caaacugcacccaagggug

SEQ ID NO: 18038 - RNA, 19 nt, Artificial Sequence
  Description of Artificial Sequence: Synthetic oligonucleotide
cagagaaacugaacgucuu

SEQ ID NO: 18039 - RNA, 19 nt, Artificial Sequence
  Description of Artificial Sequence: Synthetic oligonucleotide
cagucccugaaggaaauca

SEQ ID NO: 18040 - RNA, 19 nt, Artificial Sequence
  Description of Artificial Sequence: Synthetic oligonucleotide
caguguuuuuucuaaccug

SEQ ID NO: 18041 - RNA, 19 nt, Artificial Sequence
  Description of Artificial Sequence: Synthetic oligonucleotide
ccagagaaacugaacgucu

SEQ ID NO: 18042 - RNA, 19 nt, Artificial Sequence
  Description of Artificial Sequence: Synthetic oligonucleotide
ccagucccugaaggaaauc

SEQ ID NO: 18043 - RNA, 19 nt, Artificial Sequence
  Description of Artificial Sequence: Synthetic oligonucleotide
ccauagacccagagaaacu

SEQ ID NO: 18044 - RNA, 19 nt, Artificial Sequence
  Description of Artificial Sequence: Synthetic oligonucleotide
cccagagaaacugaacguc

SEQ ID NO: 18045 - RNA, 19 nt, Artificial Sequence
  Description of Artificial Sequence: Synthetic oligonucleotide
ccugaaggaaaucagcgca

SEQ ID NO: 18046 - RNA, 19 nt, Artificial Sequence
  Description of Artificial Sequence: Synthetic oligonucleotide
cguuugacaacccugacua

SEQ ID NO: 18047 - RNA, 19 nt, Artificial Sequence
  Description of Artificial Sequence: Synthetic oligonucleotide
cugaaggaaaucagcgcag

SEQ ID NO: 18048 - RNA, 19 nt, Artificial Sequence
  Description of Artificial Sequence: Synthetic oligonucleotide
cuuggcucaggugcuuuug

SEQ ID NO: 18049 - RNA, 19 nt, Artificial Sequence
  Description of Artificial Sequence: Synthetic oligonucleotide
gaaugugcuggaggcugcu

SEQ ID NO: 18050 - RNA, 19 nt, Artificial Sequence
  Description of Artificial Sequence: Synthetic oligonucleotide
gacaacccugacuacugga

SEQ ID NO: 18051 - RNA, 19 nt, Artificial Sequence
  Description of Artificial Sequence: Synthetic oligonucleotide
gacccagagaaacugaacg

SEQ ID NO: 18052 - RNA, 19 nt, Artificial Sequence
  Description of Artificial Sequence: Synthetic oligonucleotide
gccauagacccagagaaac

SEQ ID NO: 18053 - RNA, 19 nt, Artificial Sequence
  Description of Artificial Sequence: Synthetic oligonucleotide
gcguuugacaacccugacu

SEQ ID NO: 18054 - RNA, 19 nt, Artificial Sequence
  Description of Artificial Sequence: Synthetic oligonucleotide
gcucaggugcuuuuggaac

SEQ ID NO: 18055 - RNA, 19 nt, Artificial Sequence
  Description of Artificial Sequence: Synthetic oligonucleotide
ggcucaggugcuuuuggaa

SEQ ID NO: 18056 - RNA, 19 nt, Artificial Sequence
  Description of Artificial Sequence: Synthetic oligonucleotide
gucccugaaggaaaucagc

SEQ ID NO: 18057 - RNA, 19 nt, Artificial Sequence
  Description of Artificial Sequence: Synthetic oligonucleotide
gugaaauggccacuacuuu

SEQ ID NO: 18058 - RNA, 19 nt, Artificial Sequence
  Description of Artificial Sequence: Synthetic oligonucleotide
guuugacaacccugacuac

SEQ ID NO: 18059 - RNA, 19 nt, Artificial Sequence
  Description of Artificial Sequence: Synthetic oligonucleotide
uagacccagagaaacugaa

SEQ ID NO: 18060 - RNA, 19 nt, Artificial Sequence
  Description of Artificial Sequence: Synthetic oligonucleotide
ucaguguuuuuucuaaccu

SEQ ID NO: 18061 - RNA, 19 nt, Artificial Sequence
  Description of Artificial Sequence: Synthetic oligonucleotide
ugaaggaaaucagcgcagg

SEQ ID NO: 18062 - RNA, 19 nt, Artificial Sequence
  Description of Artificial Sequence: Synthetic oligonucleotide
uggcucaggugcuuuugga

SEQ ID NO: 18063 - RNA, 19 nt, Artificial Sequence
  Description of Artificial Sequence: Synthetic oligonucleotide
uucaguguuuuuucuaacc

SEQ ID NO: 18064 - RNA, 19 nt, Artificial Sequence
  Description of Artificial Sequence: Synthetic oligonucleotide
uuggcucaggugcuuuugg

SEQ ID NO: 18065 - RNA, 19 nt, Artificial Sequence
  Description of Artificial Sequence: Synthetic oligonucleotide
aaagaauaccaugcagaag

SEQ ID NO: 18066 - RNA, 19 nt, Artificial Sequence
  Description of Artificial Sequence: Synthetic oligonucleotide
aaccagugugcugcaggcu

SEQ ID NO: 18067 - RNA, 19 nt, Artificial Sequence
  Description of Artificial Sequence: Synthetic oligonucleotide
aagaauaccaugcagaagg

SEQ ID NO: 18068 - RNA, 19 nt, Artificial Sequence
  Description of Artificial Sequence: Synthetic oligonucleotide
aagagaaagaauaccaugc

SEQ ID NO: 18069 - RNA, 19 nt, Artificial Sequence
  Description of Artificial Sequence: Synthetic oligonucleotide
aagggcaugaacuacuugg

SEQ ID NO: 18070 - RNA, 19 nt, Artificial Sequence
  Description of Artificial Sequence: Synthetic oligonucleotide
aauggcccgagacccccag

SEQ ID NO: 18071 - RNA, 19 nt, Artificial Sequence
  Description of Artificial Sequence: Synthetic oligonucleotide
acagcagggcuucuucagc

SEQ ID NO: 18072 - RNA, 19 nt, Artificial Sequence
  Description of Artificial Sequence: Synthetic oligonucleotide
acauggacgacguggugga

SEQ ID NO: 18073 - RNA, 19 nt, Artificial Sequence
  Description of Artificial Sequence: Synthetic oligonucleotide
acgugguggaugccgacga

SEQ ID NO: 18074 - RNA, 19 nt, Artificial Sequence
  Description of Artificial Sequence: Synthetic oligonucleotide
agagaaagaauaccaugca

SEQ ID NO: 18075 - RNA, 19 nt, Artificial Sequence
  Description of Artificial Sequence: Synthetic oligonucleotide
agcaugucaagaucacaga

SEQ ID NO: 18076 - RNA, 19 nt, Artificial Sequence
  Description of Artificial Sequence: Synthetic oligonucleotide
agccaacaaggaaauccuc

SEQ ID NO: 18077 - RNA, 19 nt, Artificial Sequence
  Description of Artificial Sequence: Synthetic oligonucleotide
agggcaugaacuacuugga

SEQ ID NO: 18078 - RNA, 19 nt, Artificial Sequence
  Description of Artificial Sequence: Synthetic oligonucleotide
auauguaccaucgaugucu

SEQ ID NO: 18079 - RNA, 19 nt, Artificial Sequence
  Description of Artificial Sequence: Synthetic oligonucleotide
aucccacagcagggcuucu

SEQ ID NO: 18080 - RNA, 19 nt, Artificial Sequence
  Description of Artificial Sequence: Synthetic oligonucleotide
auggacgacgugguggaug

SEQ ID NO: 18081 - RNA, 19 nt, Artificial Sequence
  Description of Artificial Sequence: Synthetic oligonucleotide
auguaccaucgaugucuac

SEQ ID NO: 18082 - RNA, 19 nt, Artificial Sequence
  Description of Artificial Sequence: Synthetic oligonucleotide
caacuggugugugcagauc

SEQ ID NO: 18083 - RNA, 19 nt, Artificial Sequence
  Description of Artificial Sequence: Synthetic oligonucleotide
cagaucgcaaagggcauga

SEQ ID NO: 18084 - RNA, 19 nt, Artificial Sequence
  Description of Artificial Sequence: Synthetic oligonucleotide
cagcagggcuucuucagca

SEQ ID NO: 18085 - RNA, 19 nt, Artificial Sequence
  Description of Artificial Sequence: Synthetic oligonucleotide
cagugccacccagagugcc

SEQ ID NO: 18086 - RNA, 19 nt, Artificial Sequence
  Description of Artificial Sequence: Synthetic oligonucleotide
cauauguaccaucgauguc

SEQ ID NO: 18087 - RNA, 19 nt, Artificial Sequence
  Description of Artificial Sequence: Synthetic oligonucleotide
cauggacgacgugguggau

SEQ ID NO: 18088 - RNA, 19 nt, Artificial Sequence
  Description of Artificial Sequence: Synthetic oligonucleotide
ccaacaaggaaauccucga

SEQ ID NO: 18089 - RNA, 19 nt, Artificial Sequence
  Description of Artificial Sequence: Synthetic oligonucleotide
ccauauguaccaucgaugu

SEQ ID NO: 18090 - RNA, 19 nt, Artificial Sequence
  Description of Artificial Sequence: Synthetic oligonucleotide
cccauauguaccaucgaug

SEQ ID NO: 18091 - RNA, 19 nt, Artificial Sequence
  Description of Artificial Sequence: Synthetic oligonucleotide
cccccagugacugcugcca

SEQ ID NO: 18092 - RNA, 19 nt, Artificial Sequence
  Description of Artificial Sequence: Synthetic oligonucleotide
cccgagacccccagcgcua

SEQ ID NO: 18093 - RNA, 19 nt, Artificial Sequence
  Description of Artificial Sequence: Synthetic oligonucleotide
ccuaucaaguggauggcau

SEQ ID NO: 18094 - RNA, 19 nt, Artificial Sequence
  Description of Artificial Sequence: Synthetic oligonucleotide
ccuccuggacuauguccgg

SEQ ID NO: 18095 - RNA, 19 nt, Artificial Sequence
  Description of Artificial Sequence: Synthetic oligonucleotide
ccuggacuauguccgggaa

SEQ ID NO: 18096 - RNA, 19 nt, Artificial Sequence
  Description of Artificial Sequence: Synthetic oligonucleotide
cgacugccuggucugccgc

SEQ ID NO: 18097 - RNA, 19 nt, Artificial Sequence
  Description of Artificial Sequence: Synthetic oligonucleotide
cggaagcgcacgcugcgga

SEQ ID NO: 18098 - RNA, 19 nt, Artificial Sequence
  Description of Artificial Sequence: Synthetic oligonucleotide
cgugguggaugccgacgag

SEQ ID NO: 18099 - RNA, 19 nt, Artificial Sequence
  Description of Artificial Sequence: Synthetic oligonucleotide
cuaucaaguggauggcauu

SEQ ID NO: 18100 - RNA, 19 nt, Artificial Sequence
  Description of Artificial Sequence: Synthetic oligonucleotide
cuccuggacuauguccggg

SEQ ID NO: 18101 - RNA, 19 nt, Artificial Sequence
  Description of Artificial Sequence: Synthetic oligonucleotide
cugccuccuggacuauguc

SEQ ID NO: 18102 - RNA, 19 nt, Artificial Sequence
  Description of Artificial Sequence: Synthetic oligonucleotide
cuggugugugcagaucgca

SEQ ID NO: 18103 - RNA, 19 nt, Artificial Sequence
  Description of Artificial Sequence: Synthetic oligonucleotide
gaaagaauaccaugcagaa

SEQ ID NO: 18104 - RNA, 19 nt, Artificial Sequence
  Description of Artificial Sequence: Synthetic oligonucleotide
gaagagaaagaauaccaug

SEQ ID NO: 18105 - RNA, 19 nt, Artificial Sequence
  Description of Artificial Sequence: Synthetic oligonucleotide
gacauggacgacguggugg

SEQ ID NO: 18106 - RNA, 19 nt, Artificial Sequence
  Description of Artificial Sequence: Synthetic oligonucleotide
gacgugguggaugccgacg

SEQ ID NO: 18107 - RNA, 19 nt, Artificial Sequence
  Description of Artificial Sequence: Synthetic oligonucleotide
gcagaucgcaaagggcaug

SEQ ID NO: 18108 - RNA, 19 nt, Artificial Sequence
  Description of Artificial Sequence: Synthetic oligonucleotide
gcaggcugcacaggccccc

SEQ ID NO: 18109 - RNA, 19 nt, Artificial Sequence
  Description of Artificial Sequence: Synthetic oligonucleotide
gcaugaacuacuuggagga

SEQ ID NO: 18110 - RNA, 19 nt, Artificial Sequence
  Description of Artificial Sequence: Synthetic oligonucleotide
gccaacaaggaaauccucg

SEQ ID NO: 18111 - RNA, 19 nt, Artificial Sequence
  Description of Artificial Sequence: Synthetic oligonucleotide
gccacccagagugccugcc

SEQ ID NO: 18112 - RNA, 19 nt, Artificial Sequence
  Description of Artificial Sequence: Synthetic oligonucleotide
gccuccuggacuauguccg

SEQ ID NO: 18113 - RNA, 19 nt, Artificial Sequence
  Description of Artificial Sequence: Synthetic oligonucleotide
gcugccuccuggacuaugu

SEQ ID NO: 18114 - RNA, 19 nt, Artificial Sequence
  Description of Artificial Sequence: Synthetic oligonucleotide
ggaagcgcacgcugcggag

SEQ ID NO: 18115 - RNA, 19 nt, Artificial Sequence
  Description of Artificial Sequence: Synthetic oligonucleotide
ggcaugaacuacuuggagg

SEQ ID NO: 18116 - RNA, 19 nt, Artificial Sequence
  Description of Artificial Sequence: Synthetic oligonucleotide
ggcugccuccuggacuaug

SEQ ID NO: 18117 - RNA, 19 nt, Artificial Sequence
  Description of Artificial Sequence: Synthetic oligonucleotide
gggcaugaacuacuuggag

SEQ ID NO: 18118 - RNA, 19 nt, Artificial Sequence
  Description of Artificial Sequence: Synthetic oligonucleotide
ggugugugcagaucgcaaa

SEQ ID NO: 18119 - RNA, 19 nt, Artificial Sequence
  Description of Artificial Sequence: Synthetic oligonucleotide
gucccaccagagcgggagc

SEQ ID NO: 18120 - RNA, 19 nt, Artificial Sequence
  Description of Artificial Sequence: Synthetic oligonucleotide
gugccacccagagugccug

SEQ ID NO: 18121 - RNA, 19 nt, Artificial Sequence
  Description of Artificial Sequence: Synthetic oligonucleotide
guggagccucuuacaccca

SEQ ID NO: 18122 - RNA, 19 nt, Artificial Sequence
  Description of Artificial Sequence: Synthetic oligonucleotide
gugguggaugccgacgagu

SEQ ID NO: 18123 - RNA, 19 nt, Artificial Sequence
  Description of Artificial Sequence: Synthetic oligonucleotide
gugugcagaucgcaaaggg

SEQ ID NO: 18124 - RNA, 19 nt, Artificial Sequence
  Description of Artificial Sequence: Synthetic oligonucleotide
gugugugcagaucgcaaag

SEQ ID NO: 18125 - RNA, 19 nt, Artificial Sequence
  Description of Artificial Sequence: Synthetic oligonucleotide
uacagugccacccagagug

SEQ ID NO: 18126 - RNA, 19 nt, Artificial Sequence
  Description of Artificial Sequence: Synthetic oligonucleotide
uaucaaguggauggcauug

SEQ ID NO: 18127 - RNA, 19 nt, Artificial Sequence
  Description of Artificial Sequence: Synthetic oligonucleotide
uauguaccaucgaugucua

SEQ ID NO: 18128 - RNA, 19 nt, Artificial Sequence
  Description of Artificial Sequence: Synthetic oligonucleotide
ucccaccagagcgggagcc

SEQ ID NO: 18129 - RNA, 19 nt, Artificial Sequence
  Description of Artificial Sequence: Synthetic oligonucleotide
uccuggacuauguccggga

SEQ ID NO: 18130 - RNA, 19 nt, Artificial Sequence
  Description of Artificial Sequence: Synthetic oligonucleotide
ugaagccuacgugauggcc

SEQ ID NO: 18131 - RNA, 19 nt, Artificial Sequence
  Description of Artificial Sequence: Synthetic oligonucleotide
ugcagaucgcaaagggcau

SEQ ID NO: 18132 - RNA, 19 nt, Artificial Sequence
  Description of Artificial Sequence: Synthetic oligonucleotide
ugccacccagagugccugc

SEQ ID NO: 18133 - RNA, 19 nt, Artificial Sequence
  Description of Artificial Sequence: Synthetic oligonucleotide
ugccuccuggacuaugucc

SEQ ID NO: 18134 - RNA, 19 nt, Artificial Sequence
  Description of Artificial Sequence: Synthetic oligonucleotide
uggacgacgugguggaugc

SEQ ID NO: 18135 - RNA, 19 nt, Artificial Sequence
  Description of Artificial Sequence: Synthetic oligonucleotide
uggagccucuuacacccag

SEQ ID NO: 18136 - RNA, 19 nt, Artificial Sequence
  Description of Artificial Sequence: Synthetic oligonucleotide
uggugugugcagaucgcaa

SEQ ID NO: 18137 - RNA, 19 nt, Artificial Sequence
  Description of Artificial Sequence: Synthetic oligonucleotide
ugucccaccagagcgggag

SEQ ID NO: 18138 - RNA, 19 nt, Artificial Sequence
  Description of Artificial Sequence: Synthetic oligonucleotide
ugugugcagaucgcaaagg

SEQ ID NO: 18139 - RNA, 19 nt, Artificial Sequence
  Description of Artificial Sequence: Synthetic oligonucleotide
aagaucaaagugcugggcu

SEQ ID NO: 18140 - RNA, 19 nt, Artificial Sequence
  Description of Artificial Sequence: Synthetic oligonucleotide
aagugcugggcuccggugc

SEQ ID NO: 18141 - RNA, 19 nt, Artificial Sequence
  Description of Artificial Sequence: Synthetic oligonucleotide
acggggugaccguuuggga

SEQ ID NO: 18142 - RNA, 19 nt, Artificial Sequence
  Description of Artificial Sequence: Synthetic oligonucleotide
agaucaaagugcugggcuc

SEQ ID NO: 18143 - RNA, 19 nt, Artificial Sequence
  Description of Artificial Sequence: Synthetic oligonucleotide
agcuacggggugaccguuu

SEQ ID NO: 18144 - RNA, 19 nt, Artificial Sequence
  Description of Artificial Sequence: Synthetic oligonucleotide
aguugaugaccuuuggauc

SEQ ID NO: 18145 - RNA, 19 nt, Artificial Sequence
  Description of Artificial Sequence: Synthetic oligonucleotide
caaagugcugggcuccggu

SEQ ID NO: 18146 - RNA, 19 nt, Artificial Sequence
  Description of Artificial Sequence: Synthetic oligonucleotide
caagcucucuugaggaucu

SEQ ID NO: 18147 - RNA, 19 nt, Artificial Sequence
  Description of Artificial Sequence: Synthetic oligonucleotide
ccaagcucucuugaggauc

SEQ ID NO: 18148 - RNA, 19 nt, Artificial Sequence
  Description of Artificial Sequence: Synthetic oligonucleotide
cgcggccgcagcagccucc

SEQ ID NO: 18149 - RNA, 19 nt, Artificial Sequence
  Description of Artificial Sequence: Synthetic oligonucleotide
cggggugaccguuugggag

SEQ ID NO: 18150 - RNA, 19 nt, Artificial Sequence
  Description of Artificial Sequence: Synthetic oligonucleotide
cuacggggugaccguuugg

SEQ ID NO: 18151 - RNA, 19 nt, Artificial Sequence
  Description of Artificial Sequence: Synthetic oligonucleotide
cuggagcuacggggugacc

SEQ ID NO: 18152 - RNA, 19 nt, Artificial Sequence
  Description of Artificial Sequence: Synthetic oligonucleotide
gagcuacggggugaccguu

SEQ ID NO: 18153 - RNA, 19 nt, Artificial Sequence
  Description of Artificial Sequence: Synthetic oligonucleotide
gagggcugcuggggcccgg

SEQ ID NO: 18154 - RNA, 19 nt, Artificial Sequence
  Description of Artificial Sequence: Synthetic oligonucleotide
gaguugaugaccuuuggau

SEQ ID NO: 18155 - RNA, 19 nt, Artificial Sequence
  Description of Artificial Sequence: Synthetic oligonucleotide
gcuacggggugaccguuug

SEQ ID NO: 18156 - RNA, 19 nt, Artificial Sequence
  Description of Artificial Sequence: Synthetic oligonucleotide
gcugcacaggcccccggga

SEQ ID NO: 18157 - RNA, 19 nt, Artificial Sequence
  Description of Artificial Sequence: Synthetic oligonucleotide
ggagcuacggggugaccgu

SEQ ID NO: 18158 - RNA, 19 nt, Artificial Sequence
  Description of Artificial Sequence: Synthetic oligonucleotide
ggcccccgggagagcgacu

SEQ ID NO: 18159 - RNA, 19 nt, Artificial Sequence
  Description of Artificial Sequence: Synthetic oligonucleotide
ggcugcacaggcccccggg

SEQ ID NO: 18160 - RNA, 19 nt, Artificial Sequence
  Description of Artificial Sequence: Synthetic oligonucleotide
gggcauagaucagaagacu

SEQ ID NO: 18161 - RNA, 19 nt, Artificial Sequence
  Description of Artificial Sequence: Synthetic oligonucleotide
ggggcauagaucagaagac

SEQ ID NO: 18162 - RNA, 19 nt, Artificial Sequence
  Description of Artificial Sequence: Synthetic oligonucleotide
uacggggugaccguuuggg

SEQ ID NO: 18163 - RNA, 19 nt, Artificial Sequence
  Description of Artificial Sequence: Synthetic oligonucleotide
ucaaagugcugggcuccgg

SEQ ID NO: 18164 - RNA, 19 nt, Artificial Sequence
  Description of Artificial Sequence: Synthetic oligonucleotide
ucuggaucccagaagguga

SEQ ID NO: 18165 - RNA, 19 nt, Artificial Sequence
  Description of Artificial Sequence: Synthetic oligonucleotide
uggagcuacggggugaccg

SEQ ID NO: 18166 - RNA, 19 nt, Artificial Sequence
  Description of Artificial Sequence: Synthetic oligonucleotide
accuugucauucaggggga

SEQ ID NO: 18167 - RNA, 19 nt, Artificial Sequence
  Description of Artificial Sequence: Synthetic oligonucleotide
caaacugcaccuacggaug

SEQ ID NO: 18168 - RNA, 19 nt, Artificial Sequence
  Description of Artificial Sequence: Synthetic oligonucleotide
ccaaacugcaccuacggau

SEQ ID NO: 18169 - RNA, 19 nt, Artificial Sequence
  Description of Artificial Sequence: Synthetic oligonucleotide
ccaaacugcaccuacgggc

SEQ ID NO: 18170 - RNA, 19 nt, Artificial Sequence
  Description of Artificial Sequence: Synthetic oligonucleotide
ccuggacaacccugacuac

SEQ ID NO: 18171 - RNA, 19 nt, Artificial Sequence
  Description of Artificial Sequence: Synthetic oligonucleotide
ccuugucauucagggggau

SEQ ID NO: 18172 - RNA, 19 nt, Artificial Sequence
  Description of Artificial Sequence: Synthetic oligonucleotide
cuugucauucagggggaug

SEQ ID NO: 18173 - RNA, 19 nt, Artificial Sequence
  Description of Artificial Sequence: Synthetic oligonucleotide
gcuaccuugucauucaggg

SEQ ID NO: 18174 - RNA, 19 nt, Artificial Sequence
  Description of Artificial Sequence: Synthetic oligonucleotide
gcuuccacugcaaaacacu

SEQ ID NO: 18175 - RNA, 19 nt, Artificial Sequence
  Description of Artificial Sequence: Synthetic oligonucleotide
ggaucuugaaggaaacuga

SEQ ID NO: 18176 - RNA, 19 nt, Artificial Sequence
  Description of Artificial Sequence: Synthetic oligonucleotide
uaccuugucauucaggggg

SEQ ID NO: 18177 - RNA, 19 nt, Artificial Sequence
  Description of Artificial Sequence: Synthetic oligonucleotide
uccaaacugcaccuacgga

SEQ ID NO: 18178 - RNA, 19 nt, Artificial Sequence
  Description of Artificial Sequence: Synthetic oligonucleotide
ucccccagugacugcugcc

SEQ ID NO: 18179 - RNA, 19 nt, Artificial Sequence
  Description of Artificial Sequence: Synthetic oligonucleotide
uccuggagaaaggagaacg

SEQ ID NO: 18180 - RNA, 19 nt, Artificial Sequence
  Description of Artificial Sequence: Synthetic oligonucleotide
uugucauucagggggauga

SEQ ID NO: 18181 - RNA, 19 nt, Artificial Sequence
  Description of Artificial Sequence: Synthetic oligonucleotide
uuuugggcuggccaaacug

SEQ ID NO: 18182 - RNA, 19 nt, Artificial Sequence
  Description of Artificial Sequence: Synthetic oligonucleotide
aaaauuccaguggccauca

SEQ ID NO: 18183 - RNA, 19 nt, Artificial Sequence
  Description of Artificial Sequence: Synthetic oligonucleotide
aaacggagcugguggagcc

SEQ ID NO: 18184 - RNA, 19 nt, Artificial Sequence
  Description of Artificial Sequence: Synthetic oligonucleotide
aaauuccaguggccaucaa

SEQ ID NO: 18185 - RNA, 19 nt, Artificial Sequence
  Description of Artificial Sequence: Synthetic oligonucleotide
aaggggaugagcuaccugg

SEQ ID NO: 18186 - RNA, 19 nt, Artificial Sequence
  Description of Artificial Sequence: Synthetic oligonucleotide
acaagggcaucuggauccc

SEQ ID NO: 18187 - RNA, 19 nt, Artificial Sequence
  Description of Artificial Sequence: Synthetic oligonucleotide
acugccuggccugccucca

SEQ ID NO: 18188 - RNA, 19 nt, Artificial Sequence
  Description of Artificial Sequence: Synthetic oligonucleotide
acugugugggagcugauga

SEQ ID NO: 18189 - RNA, 19 nt, Artificial Sequence
  Description of Artificial Sequence: Synthetic oligonucleotide
agacgaagcauacgugaug

SEQ ID NO: 18190 - RNA, 19 nt, Artificial Sequence
  Description of Artificial Sequence: Synthetic oligonucleotide
agccaacaaagaaaucuua

SEQ ID NO: 18191 - RNA, 19 nt, Artificial Sequence
  Description of Artificial Sequence: Synthetic oligonucleotide
aggaaacggagcuggugga

SEQ ID NO: 18192 - RNA, 19 nt, Artificial Sequence
  Description of Artificial Sequence: Synthetic oligonucleotide
aggggaugagcuaccugga

SEQ ID NO: 18193 - RNA, 19 nt, Artificial Sequence
  Description of Artificial Sequence: Synthetic oligonucleotide
aguggauggcgcuggaguc

SEQ ID NO: 18194 - RNA, 19 nt, Artificial Sequence
  Description of Artificial Sequence: Synthetic oligonucleotide
auccaggaguuugcuggcu

SEQ ID NO: 18195 - RNA, 19 nt, Artificial Sequence
  Description of Artificial Sequence: Synthetic oligonucleotide
caaguggauggcgcuggag

SEQ ID NO: 18196 - RNA, 19 nt, Artificial Sequence
  Description of Artificial Sequence: Synthetic oligonucleotide
cacaucccccaaagccaac

SEQ ID NO: 18197 - RNA, 19 nt, Artificial Sequence
  Description of Artificial Sequence: Synthetic oligonucleotide
caggaaacggagcuggugg

SEQ ID NO: 18198 - RNA, 19 nt, Artificial Sequence
  Description of Artificial Sequence: Synthetic oligonucleotide
caggacccaccagagcggg

SEQ ID NO: 18199 - RNA, 19 nt, Artificial Sequence
  Description of Artificial Sequence: Synthetic oligonucleotide
ccaacaaagaaaucuuaga

SEQ ID NO: 18200 - RNA, 19 nt, Artificial Sequence
  Description of Artificial Sequence: Synthetic oligonucleotide
cgaagcauacgugauggcu

SEQ ID NO: 18201 - RNA, 19 nt, Artificial Sequence
  Description of Artificial Sequence: Synthetic oligonucleotide
cggaaguacacgaugcgga

SEQ ID NO: 18202 - RNA, 19 nt, Artificial Sequence
  Description of Artificial Sequence: Synthetic oligonucleotide
cugcaggaaacggagcugg

SEQ ID NO: 18203 - RNA, 19 nt, Artificial Sequence
  Description of Artificial Sequence: Synthetic oligonucleotide
cugcugggguccagggccc

SEQ ID NO: 18204 - RNA, 19 nt, Artificial Sequence
  Description of Artificial Sequence: Synthetic oligonucleotide
cugguguaugcagauugcc

SEQ ID NO: 18205 - RNA, 19 nt, Artificial Sequence
  Description of Artificial Sequence: Synthetic oligonucleotide
cugugugggagcugaugac

SEQ ID NO: 18206 - RNA, 19 nt, Artificial Sequence
  Description of Artificial Sequence: Synthetic oligonucleotide
gaaacggagcugguggagc

SEQ ID NO: 18207 - RNA, 19 nt, Artificial Sequence
  Description of Artificial Sequence: Synthetic oligonucleotide
gaacugguguaugcagauu

SEQ ID NO: 18208 - RNA, 19 nt, Artificial Sequence
  Description of Artificial Sequence: Synthetic oligonucleotide
gaccauguccgggaaaacc

SEQ ID NO: 18209 - RNA, 19 nt, Artificial Sequence
  Description of Artificial Sequence: Synthetic oligonucleotide
gaccugcugaacuggugua

SEQ ID NO: 18210 - RNA, 19 nt, Artificial Sequence
  Description of Artificial Sequence: Synthetic oligonucleotide
gacugccuggccugccucc

SEQ ID NO: 18211 - RNA, 19 nt, Artificial Sequence
  Description of Artificial Sequence: Synthetic oligonucleotide
gacugugugggagcugaug

SEQ ID NO: 18212 - RNA, 19 nt, Artificial Sequence
  Description of Artificial Sequence: Synthetic oligonucleotide
gcaggaaacggagcuggug

SEQ ID NO: 18213 - RNA, 19 nt, Artificial Sequence
  Description of Artificial Sequence: Synthetic oligonucleotide
gccaacaaagaaaucuuag

SEQ ID NO: 18214 - RNA, 19 nt, Artificial Sequence
  Description of Artificial Sequence: Synthetic oligonucleotide
gcugcaggaaacggagcug

SEQ ID NO: 18215 - RNA, 19 nt, Artificial Sequence
  Description of Artificial Sequence: Synthetic oligonucleotide
ggaaacggagcugguggag

SEQ ID NO: 18216 - RNA, 19 nt, Artificial Sequence
  Description of Artificial Sequence: Synthetic oligonucleotide
ggaaguacacgaugcggag

SEQ ID NO: 18217 - RNA, 19 nt, Artificial Sequence
  Description of Artificial Sequence: Synthetic oligonucleotide
ggagcugaugacuuuuggg

SEQ ID NO: 18218 - RNA, 19 nt, Artificial Sequence
  Description of Artificial Sequence: Synthetic oligonucleotide
ggaugagcuaccuggagga

SEQ ID NO: 18219 - RNA, 19 nt, Artificial Sequence
  Description of Artificial Sequence: Synthetic oligonucleotide
ggcacugcugggguccagg

SEQ ID NO: 18220 - RNA, 19 nt, Artificial Sequence
  Description of Artificial Sequence: Synthetic oligonucleotide
gggaugagcuaccuggagg

SEQ ID NO: 18221 - RNA, 19 nt, Artificial Sequence
  Description of Artificial Sequence: Synthetic oligonucleotide
gggcaaggugcccaucaag

SEQ ID NO: 18222 - RNA, 19 nt, Artificial Sequence
  Description of Artificial Sequence: Synthetic oligonucleotide
gggcacugcugggguccag

SEQ ID NO: 18223 - RNA, 19 nt, Artificial Sequence
  Description of Artificial Sequence: Synthetic oligonucleotide
ggggaugagcuaccuggag

SEQ ID NO: 18224 - RNA, 19 nt, Artificial Sequence
  Description of Artificial Sequence: Synthetic oligonucleotide
ggggcaaggugcccaucaa

SEQ ID NO: 18225 - RNA, 19 nt, Artificial Sequence
  Description of Artificial Sequence: Synthetic oligonucleotide
gggggcaaggugcccauca

SEQ ID NO: 18226 - RNA, 19 nt, Artificial Sequence
  Description of Artificial Sequence: Synthetic oligonucleotide
gguguaugcagauugccaa

SEQ ID NO: 18227 - RNA, 19 nt, Artificial Sequence
  Description of Artificial Sequence: Synthetic oligonucleotide
guaugcagauugccaaggg

SEQ ID NO: 18228 - RNA, 19 nt, Artificial Sequence
  Description of Artificial Sequence: Synthetic oligonucleotide
gugacugugugggagcuga

SEQ ID NO: 18229 - RNA, 19 nt, Artificial Sequence
  Description of Artificial Sequence: Synthetic oligonucleotide
gugggagcugaugacuuuu

SEQ ID NO: 18230 - RNA, 19 nt, Artificial Sequence
  Description of Artificial Sequence: Synthetic oligonucleotide
guguaugcagauugccaag

SEQ ID NO: 18231 - RNA, 19 nt, Artificial Sequence
  Description of Artificial Sequence: Synthetic oligonucleotide
gugugggagcugaugacuu

SEQ ID NO: 18232 - RNA, 19 nt, Artificial Sequence
  Description of Artificial Sequence: Synthetic oligonucleotide
guucacccaccagagugau

SEQ ID NO: 18233 - RNA, 19 nt, Artificial Sequence
  Description of Artificial Sequence: Synthetic oligonucleotide
uacaagggcaucuggaucc

SEQ ID NO: 18234 - RNA, 19 nt, Artificial Sequence
  Description of Artificial Sequence: Synthetic oligonucleotide
uagacgaagcauacgugau

SEQ ID NO: 18235 - RNA, 19 nt, Artificial Sequence
  Description of Artificial Sequence: Synthetic oligonucleotide
ugacugccuggccugccuc

SEQ ID NO: 18236 - RNA, 19 nt, Artificial Sequence
  Description of Artificial Sequence: Synthetic oligonucleotide
ugacugugugggagcugau

SEQ ID NO: 18237 - RNA, 19 nt, Artificial Sequence
  Description of Artificial Sequence: Synthetic oligonucleotide
ugcaggaaacggagcuggu

SEQ ID NO: 18238 - RNA, 19 nt, Artificial Sequence
  Description of Artificial Sequence: Synthetic oligonucleotide
ugccguggagaaccccgag

SEQ ID NO: 18239 - RNA, 19 nt, Artificial Sequence
  Description of Artificial Sequence: Synthetic oligonucleotide
ugcugggguccagggccca

SEQ ID NO: 18240 - RNA, 19 nt, Artificial Sequence
  Description of Artificial Sequence: Synthetic oligonucleotide
ugguguaugcagauugcca

SEQ ID NO: 18241 - RNA, 19 nt, Artificial Sequence
  Description of Artificial Sequence: Synthetic oligonucleotide
uguaugcagauugccaagg

SEQ ID NO: 18242 - RNA, 19 nt, Artificial Sequence
  Description of Artificial Sequence: Synthetic oligonucleotide
ugugggagcugaugacuuu

SEQ ID NO: 18243 - RNA, 19 nt, Artificial Sequence
  Description of Artificial Sequence: Synthetic oligonucleotide
aagggggagcggcugcccc

SEQ ID NO: 18244 - RNA, 19 nt, Artificial Sequence
  Description of Artificial Sequence: Synthetic oligonucleotide
aaugccagccuguccuucc

SEQ ID NO: 18245 - RNA, 19 nt, Artificial Sequence
  Description of Artificial Sequence: Synthetic oligonucleotide
acagguuaccuauacaucu

SEQ ID NO: 18246 - RNA, 19 nt, Artificial Sequence
  Description of Artificial Sequence: Synthetic oligonucleotide
agcugaugacuuuuggggc

SEQ ID NO: 18247 - RNA, 19 nt, Artificial Sequence
  Description of Artificial Sequence: Synthetic oligonucleotide
agggggagcggcugcccca

SEQ ID NO: 18248 - RNA, 19 nt, Artificial Sequence
  Description of Artificial Sequence: Synthetic oligonucleotide
agguggugcagggaaaccu

SEQ ID NO: 18249 - RNA, 19 nt, Artificial Sequence
  Description of Artificial Sequence: Synthetic oligonucleotide
auccugaaagagacggagc

SEQ ID NO: 18250 - RNA, 19 nt, Artificial Sequence
  Description of Artificial Sequence: Synthetic oligonucleotide
augccagccuguccuuccu

SEQ ID NO: 18251 - RNA, 19 nt, Artificial Sequence
  Description of Artificial Sequence: Synthetic oligonucleotide
caaugccagccuguccuuc

SEQ ID NO: 18252 - RNA, 19 nt, Artificial Sequence
  Description of Artificial Sequence: Synthetic oligonucleotide
cagcaccuucaaagggaca

SEQ ID NO: 18253 - RNA, 19 nt, Artificial Sequence
  Description of Artificial Sequence: Synthetic oligonucleotide
cagccuguccuuccugcag

SEQ ID NO: 18254 - RNA, 19 nt, Artificial Sequence
  Description of Artificial Sequence: Synthetic oligonucleotide
ccagcaccuucaaagggac

SEQ ID NO: 18255 - RNA, 19 nt, Artificial Sequence
  Description of Artificial Sequence: Synthetic oligonucleotide
ccagccuguccuuccugca

SEQ ID NO: 18256 - RNA, 19 nt, Artificial Sequence
  Description of Artificial Sequence: Synthetic oligonucleotide
ccucugacguccaucaucu

SEQ ID NO: 18257 - RNA, 19 nt, Artificial Sequence
  Description of Artificial Sequence: Synthetic oligonucleotide
ccugaccugcuggaaaagg

SEQ ID NO: 18258 - RNA, 19 nt, Artificial Sequence
  Description of Artificial Sequence: Synthetic oligonucleotide
cugaccugcuggaaaaggg

SEQ ID NO: 18259 - RNA, 19 nt, Artificial Sequence
  Description of Artificial Sequence: Synthetic oligonucleotide
gagcggcugccccagcccc

SEQ ID NO: 18260 - RNA, 19 nt, Artificial Sequence
  Description of Artificial Sequence: Synthetic oligonucleotide
gagcugaugacuuuugggg

SEQ ID NO: 18261 - RNA, 19 nt, Artificial Sequence
  Description of Artificial Sequence: Synthetic oligonucleotide
gccagccuguccuuccugc

SEQ ID NO: 18262 - RNA, 19 nt, Artificial Sequence
  Description of Artificial Sequence: Synthetic oligonucleotide
ggagcggcugccccagccc

SEQ ID NO: 18263 - RNA, 19 nt, Artificial Sequence
  Description of Artificial Sequence: Synthetic oligonucleotide
gggagcggcugccccagcc

SEQ ID NO: 18264 - RNA, 19 nt, Artificial Sequence
  Description of Artificial Sequence: Synthetic oligonucleotide
ggggagcggcugccccagc

SEQ ID NO: 18265 - RNA, 19 nt, Artificial Sequence
  Description of Artificial Sequence: Synthetic oligonucleotide
gggggagcggcugccccag

SEQ ID NO: 18266 - RNA, 19 nt, Artificial Sequence
  Description of Artificial Sequence: Synthetic oligonucleotide
ggugugacugugugggagc

SEQ ID NO: 18267 - RNA, 19 nt, Artificial Sequence
  Description of Artificial Sequence: Synthetic oligonucleotide
gugugacugugugggagcu

SEQ ID NO: 18268 - RNA, 19 nt, Artificial Sequence
  Description of Artificial Sequence: Synthetic oligonucleotide
uccugaaagagacggagcu

SEQ ID NO: 18269 - RNA, 19 nt, Artificial Sequence
  Description of Artificial Sequence: Synthetic oligonucleotide
ugaccugcuggaaaagggg

SEQ ID NO: 18270 - RNA, 19 nt, Artificial Sequence
  Description of Artificial Sequence: Synthetic oligonucleotide
ugccagccuguccuuccug

SEQ ID NO: 18271 - RNA, 19 nt, Artificial Sequence
  Description of Artificial Sequence: Synthetic oligonucleotide
uggccgcucggaacgugcu

SEQ ID NO: 18272 - RNA, 19 nt, Artificial Sequence
  Description of Artificial Sequence: Synthetic oligonucleotide
ugugacugugugggagcug

SEQ ID NO: 18273 - RNA, 19 nt, Artificial Sequence
  Description of Artificial Sequence: Synthetic oligonucleotide
aaugugaaaauuccagugg

SEQ ID NO: 18274 - RNA, 19 nt, Artificial Sequence
  Description of Artificial Sequence: Synthetic oligonucleotide
acccuccuccugccuucag

SEQ ID NO: 18275 - RNA, 19 nt, Artificial Sequence
  Description of Artificial Sequence: Synthetic oligonucleotide
accugguggaugcugagga

SEQ ID NO: 18276 - RNA, 19 nt, Artificial Sequence
  Description of Artificial Sequence: Synthetic oligonucleotide
augugaaaauuccaguggc

SEQ ID NO: 18277 - RNA, 19 nt, Artificial Sequence
  Description of Artificial Sequence: Synthetic oligonucleotide
cacccuccuccugccuuca

SEQ ID NO: 18278 - RNA, 19 nt, Artificial Sequence
  Description of Artificial Sequence: Synthetic oligonucleotide
cagagaacccagaguaccu

SEQ ID NO: 18279 - RNA, 19 nt, Artificial Sequence
  Description of Artificial Sequence: Synthetic oligonucleotide
cagauugccaaggggauga

SEQ ID NO: 18280 - RNA, 19 nt, Artificial Sequence
  Description of Artificial Sequence: Synthetic oligonucleotide
ccacccuccuccugccuuc

SEQ ID NO: 18281 - RNA, 19 nt, Artificial Sequence
  Description of Artificial Sequence: Synthetic oligonucleotide
ccaugucaaaauuacagac

SEQ ID NO: 18282 - RNA, 19 nt, Artificial Sequence
  Description of Artificial Sequence: Synthetic oligonucleotide
ccccacccuccuccugccu

SEQ ID NO: 18283 - RNA, 19 nt, Artificial Sequence
  Description of Artificial Sequence: Synthetic oligonucleotide
cccuauggcugccucuuag

SEQ ID NO: 18284 - RNA, 19 nt, Artificial Sequence
  Description of Artificial Sequence: Synthetic oligonucleotide
ccuauggcugccucuuaga

SEQ ID NO: 18285 - RNA, 19 nt, Artificial Sequence
  Description of Artificial Sequence: Synthetic oligonucleotide
ccugguggaugcugaggag

SEQ ID NO: 18286 - RNA, 19 nt, Artificial Sequence
  Description of Artificial Sequence: Synthetic oligonucleotide
cugaaagagacggagcuga

SEQ ID NO: 18287 - RNA, 19 nt, Artificial Sequence
  Description of Artificial Sequence: Synthetic oligonucleotide
cugaggaguaucugguacc

SEQ ID NO: 18288 - RNA, 19 nt, Artificial Sequence
  Description of Artificial Sequence: Synthetic oligonucleotide
cuuggaucuggcgcuuuug

SEQ ID NO: 18289 - RNA, 19 nt, Artificial Sequence
  Description of Artificial Sequence: Synthetic oligonucleotide
gaccugguggaugcugagg

SEQ ID NO: 18290 - RNA, 19 nt, Artificial Sequence
  Description of Artificial Sequence: Synthetic oligonucleotide
gcacccaagugugcaccgg

SEQ ID NO: 18291 - RNA, 19 nt, Artificial Sequence
  Description of Artificial Sequence: Synthetic oligonucleotide
gcagagaacccagaguacc

SEQ ID NO: 18292 - RNA, 19 nt, Artificial Sequence
  Description of Artificial Sequence: Synthetic oligonucleotide
gcccuauggcugccucuua

SEQ ID NO: 18293 - RNA, 19 nt, Artificial Sequence
  Description of Artificial Sequence: Synthetic oligonucleotide
gcugaggaguaucugguac

SEQ ID NO: 18294 - RNA, 19 nt, Artificial Sequence
  Description of Artificial Sequence: Synthetic oligonucleotide
ggauggcgcuggaguccau

SEQ ID NO: 18295 - RNA, 19 nt, Artificial Sequence
  Description of Artificial Sequence: Synthetic oligonucleotide
ggcagagaacccagaguac

SEQ ID NO: 18296 - RNA, 19 nt, Artificial Sequence
  Description of Artificial Sequence: Synthetic oligonucleotide
gguucacccaccagaguga

SEQ ID NO: 18297 - RNA, 19 nt, Artificial Sequence
  Description of Artificial Sequence: Synthetic oligonucleotide
guggaugcugaggaguauc

SEQ ID NO: 18298 - RNA, 19 nt, Artificial Sequence
  Description of Artificial Sequence: Synthetic oligonucleotide
ugcugaggaguaucuggua

SEQ ID NO: 18299 - RNA, 19 nt, Artificial Sequence
  Description of Artificial Sequence: Synthetic oligonucleotide
uggauggcgcuggagucca

SEQ ID NO: 18300 - RNA, 19 nt, Artificial Sequence
  Description of Artificial Sequence: Synthetic oligonucleotide
uuaaagaugaaauaaagac

SEQ ID NO: 18301 - RNA, 19 nt, Artificial Sequence
  Description of Artificial Sequence: Synthetic oligonucleotide
uuggaucuggcgcuuuugg

SEQ ID NO: 18302 - RNA, 19 nt, Artificial Sequence
  Description of Artificial Sequence: Synthetic oligonucleotide
uuggaugauugacucugaa

SEQ ID NO: 18303 - RNA, 19 nt, Artificial Sequence
  Description of Artificial Sequence: Synthetic oligonucleotide
uuuaaagaugaaauaaaga

SEQ ID NO: 18304 - RNA, 19 nt, Artificial Sequence
  Description of Artificial Sequence: Synthetic oligonucleotide
uuuuaaagaugaaauaaag

SEQ ID NO: 18305 - RNA, 19 nt, Artificial Sequence
  Description of Artificial Sequence: Synthetic oligonucleotide
accaagaccaucugugcuc

SEQ ID NO: 18306 - RNA, 19 nt, Artificial Sequence
  Description of Artificial Sequence: Synthetic oligonucleotide
accuggcugcccgaaacgu

SEQ ID NO: 18307 - RNA, 19 nt, Artificial Sequence
  Description of Artificial Sequence: Synthetic oligonucleotide
auacacacaccagagugau

SEQ ID NO: 18308 - RNA, 19 nt, Artificial Sequence
  Description of Artificial Sequence: Synthetic oligonucleotide
auggcccgagacccaccac

SEQ ID NO: 18309 - RNA, 19 nt, Artificial Sequence
  Description of Artificial Sequence: Synthetic oligonucleotide
auugaccaagaccaucugu

SEQ ID NO: 18310 - RNA, 19 nt, Artificial Sequence
  Description of Artificial Sequence: Synthetic oligonucleotide
caaguucccuugaggagcu

SEQ ID NO: 18311 - RNA, 19 nt, Artificial Sequence
  Description of Artificial Sequence: Synthetic oligonucleotide
ccaaguucccuugaggagc

SEQ ID NO: 18312 - RNA, 19 nt, Artificial Sequence
  Description of Artificial Sequence: Synthetic oligonucleotide
ccgggggcugcucaggccc

SEQ ID NO: 18313 - RNA, 19 nt, Artificial Sequence
  Description of Artificial Sequence: Synthetic oligonucleotide
cugcucaacuggggaguac

SEQ ID NO: 18314 - RNA, 19 nt, Artificial Sequence
  Description of Artificial Sequence: Synthetic oligonucleotide
gaccaagaccaucugugcu

SEQ ID NO: 18315 - RNA, 19 nt, Artificial Sequence
  Description of Artificial Sequence: Synthetic oligonucleotide
ggccuacggaagagcgacu

SEQ ID NO: 18316 - RNA, 19 nt, Artificial Sequence
  Description of Artificial Sequence: Synthetic oligonucleotide
gggggaugcuggggcccag

SEQ ID NO: 18317 - RNA, 19 nt, Artificial Sequence
  Description of Artificial Sequence: Synthetic oligonucleotide
ugcucaacuggggaguaca

SEQ ID NO: 18318 - RNA, 19 nt, Artificial Sequence
  Description of Artificial Sequence: Synthetic oligonucleotide
uggcccgagacccaccacg

SEQ ID NO: 18319 - RNA, 19 nt, Artificial Sequence
  Description of Artificial Sequence: Synthetic oligonucleotide
uugaccaagaccaucugug

SEQ ID NO: 18320 - RNA, 19 nt, Artificial Sequence
  Description of Artificial Sequence: Synthetic oligonucleotide
aaugccgaccucuccuucc

SEQ ID NO: 18321 - RNA, 19 nt, Artificial Sequence
  Description of Artificial Sequence: Synthetic oligonucleotide
accccaaccagugcugcca

SEQ ID NO: 18322 - RNA, 19 nt, Artificial Sequence
  Description of Artificial Sequence: Synthetic oligonucleotide
agaccugcuagagaagggg

SEQ ID NO: 18323 - RNA, 19 nt, Artificial Sequence
  Description of Artificial Sequence: Synthetic oligonucleotide
agagaagggggagcgguug

SEQ ID NO: 18324 - RNA, 19 nt, Artificial Sequence
  Description of Artificial Sequence: Synthetic oligonucleotide
agcuauggugugacaguuu

SEQ ID NO: 18325 - RNA, 19 nt, Artificial Sequence
  Description of Artificial Sequence: Synthetic oligonucleotide
aggaagcuuaaagugcuug

SEQ ID NO: 18326 - RNA, 19 nt, Artificial Sequence
  Description of Artificial Sequence: Synthetic oligonucleotide
aucuucaaagagacagagc

SEQ ID NO: 18327 - RNA, 19 nt, Artificial Sequence
  Description of Artificial Sequence: Synthetic oligonucleotide
augaagaugaggaguauga

SEQ ID NO: 18328 - RNA, 19 nt, Artificial Sequence
  Description of Artificial Sequence: Synthetic oligonucleotide
augccgaccucuccuuccu

SEQ ID NO: 18329 - RNA, 19 nt, Artificial Sequence
  Description of Artificial Sequence: Synthetic oligonucleotide
caaugccgaccucuccuuc

SEQ ID NO: 18330 - RNA, 19 nt, Artificial Sequence
  Description of Artificial Sequence: Synthetic oligonucleotide
cagaaucuucaaagagaca

SEQ ID NO: 18331 - RNA, 19 nt, Artificial Sequence
  Description of Artificial Sequence: Synthetic oligonucleotide
cagaccugcuagagaaggg

SEQ ID NO: 18332 - RNA, 19 nt, Artificial Sequence
  Description of Artificial Sequence: Synthetic oligonucleotide
ccagaaucuucaaagagac

SEQ ID NO: 18333 - RNA, 19 nt, Artificial Sequence
  Description of Artificial Sequence: Synthetic oligonucleotide
ccagaccugcuagagaagg

SEQ ID NO: 18334 - RNA, 19 nt, Artificial Sequence
  Description of Artificial Sequence: Synthetic oligonucleotide
ccgaccucuccuuccugca

SEQ ID NO: 18335 - RNA, 19 nt, Artificial Sequence
  Description of Artificial Sequence: Synthetic oligonucleotide
cuagagaagggggagcggu

SEQ ID NO: 18336 - RNA, 19 nt, Artificial Sequence
  Description of Artificial Sequence: Synthetic oligonucleotide
cuauggugugacaguuugg

SEQ ID NO: 18337 - RNA, 19 nt, Artificial Sequence
  Description of Artificial Sequence: Synthetic oligonucleotide
cugccaugaugagugugcc

SEQ ID NO: 18338 - RNA, 19 nt, Artificial Sequence
  Description of Artificial Sequence: Synthetic oligonucleotide
cuggagcuauggugugaca

SEQ ID NO: 18339 - RNA, 19 nt, Artificial Sequence
  Description of Artificial Sequence: Synthetic oligonucleotide
gagcuauggugugacaguu

SEQ ID NO: 18340 - RNA, 19 nt, Artificial Sequence
  Description of Artificial Sequence: Synthetic oligonucleotide
gccgaccucuccuuccugc

SEQ ID NO: 18341 - RNA, 19 nt, Artificial Sequence
  Description of Artificial Sequence: Synthetic oligonucleotide
gcuauggugugacaguuug

SEQ ID NO: 18342 - RNA, 19 nt, Artificial Sequence
  Description of Artificial Sequence: Synthetic oligonucleotide
ggaagcuuaaagugcuugg

SEQ ID NO: 18343 - RNA, 19 nt, Artificial Sequence
  Description of Artificial Sequence: Synthetic oligonucleotide
ggaggugguccugggggug

SEQ ID NO: 18344 - RNA, 19 nt, Artificial Sequence
  Description of Artificial Sequence: Synthetic oligonucleotide
uagagaagggggagcgguu

SEQ ID NO: 18345 - RNA, 19 nt, Artificial Sequence
  Description of Artificial Sequence: Synthetic oligonucleotide
ucuucaaagagacagagcu

SEQ ID NO: 18346 - RNA, 19 nt, Artificial Sequence
  Description of Artificial Sequence: Synthetic oligonucleotide
ugccaugaugagugugccg

SEQ ID NO: 18347 - RNA, 19 nt, Artificial Sequence
  Description of Artificial Sequence: Synthetic oligonucleotide
ugccgaccucuccuuccug

SEQ ID NO: 18348 - RNA, 19 nt, Artificial Sequence
  Description of Artificial Sequence: Synthetic oligonucleotide
uggaggugguccugggggu

SEQ ID NO: 18349 - RNA, 19 nt, Artificial Sequence
  Description of Artificial Sequence: Synthetic oligonucleotide
uggugcauagaaaccuggc

SEQ ID NO: 18350 - RNA, 19 nt, Artificial Sequence
  Description of Artificial Sequence: Synthetic oligonucleotide
aaaaugggcucaagaugug

SEQ ID NO: 18351 - RNA, 19 nt, Artificial Sequence
  Description of Artificial Sequence: Synthetic oligonucleotide
aagacuccaauuaagugga

SEQ ID NO: 18352 - RNA, 19 nt, Artificial Sequence
  Description of Artificial Sequence: Synthetic oligonucleotide
acuccaauuaaguggaugg

SEQ ID NO: 18353 - RNA, 19 nt, Artificial Sequence
  Description of Artificial Sequence: Synthetic oligonucleotide
acucucaggcagugugucc

SEQ ID NO: 18354 - RNA, 19 nt, Artificial Sequence
  Description of Artificial Sequence: Synthetic oligonucleotide
agacuccaauuaaguggau

SEQ ID NO: 18355 - RNA, 19 nt, Artificial Sequence
  Description of Artificial Sequence: Synthetic oligonucleotide
agcugcugcucaacugggg

SEQ ID NO: 18356 - RNA, 19 nt, Artificial Sequence
  Description of Artificial Sequence: Synthetic oligonucleotide
auaacuuugugguggauca

SEQ ID NO: 18357 - RNA, 19 nt, Artificial Sequence
  Description of Artificial Sequence: Synthetic oligonucleotide
auuaaguggauggcccuug

SEQ ID NO: 18358 - RNA, 19 nt, Artificial Sequence
  Description of Artificial Sequence: Synthetic oligonucleotide
cagcugcugcucaacuggg

SEQ ID NO: 18359 - RNA, 19 nt, Artificial Sequence
  Description of Artificial Sequence: Synthetic oligonucleotide
caggauggcccgagaccca

SEQ ID NO: 18360 - RNA, 19 nt, Artificial Sequence
  Description of Artificial Sequence: Synthetic oligonucleotide
caguguuuuuuccaauuug

SEQ ID NO: 18361 - RNA, 19 nt, Artificial Sequence
  Description of Artificial Sequence: Synthetic oligonucleotide
cgaucccugaaggaaauua

SEQ ID NO: 18362 - RNA, 19 nt, Artificial Sequence
  Description of Artificial Sequence: Synthetic oligonucleotide
cucacuuaguccuuuauca

SEQ ID NO: 18363 - RNA, 19 nt, Artificial Sequence
  Description of Artificial Sequence: Synthetic oligonucleotide
cugcugcucaacuggggag

SEQ ID NO: 18364 - RNA, 19 nt, Artificial Sequence
  Description of Artificial Sequence: Synthetic oligonucleotide
gaaauacacacaccagagu

SEQ ID NO: 18365 - RNA, 19 nt, Artificial Sequence
  Description of Artificial Sequence: Synthetic oligonucleotide
gaaguagauaaaaaugggc

SEQ ID NO: 18366 - RNA, 19 nt, Artificial Sequence
  Description of Artificial Sequence: Synthetic oligonucleotide
gacuccaauuaaguggaug

SEQ ID NO: 18367 - RNA, 19 nt, Artificial Sequence
  Description of Artificial Sequence: Synthetic oligonucleotide
gauggcccgagacccacca

SEQ ID NO: 18368 - RNA, 19 nt, Artificial Sequence
  Description of Artificial Sequence: Synthetic oligonucleotide
gauucgagaagugacaggc

SEQ ID NO: 18369 - RNA, 19 nt, Artificial Sequence
  Description of Artificial Sequence: Synthetic oligonucleotide
gccagacauugaccaagac

SEQ ID NO: 18370 - RNA, 19 nt, Artificial Sequence
  Description of Artificial Sequence: Synthetic oligonucleotide
ggaaauacacacaccagag

SEQ ID NO: 18371 - RNA, 19 nt, Artificial Sequence
  Description of Artificial Sequence: Synthetic oligonucleotide
ggauggcccgagacccacc

SEQ ID NO: 18372 - RNA, 19 nt, Artificial Sequence
  Description of Artificial Sequence: Synthetic oligonucleotide
ggauggcccuugagaguau

SEQ ID NO: 18373 - RNA, 19 nt, Artificial Sequence
  Description of Artificial Sequence: Synthetic oligonucleotide
guuggaugauugaugagaa

SEQ ID NO: 18374 - RNA, 19 nt, Artificial Sequence
  Description of Artificial Sequence: Synthetic oligonucleotide
uaaguggauggcccuugag

SEQ ID NO: 18375 - RNA, 19 nt, Artificial Sequence
  Description of Artificial Sequence: Synthetic oligonucleotide
uccaauuaaguggauggcc

SEQ ID NO: 18376 - RNA, 19 nt, Artificial Sequence
  Description of Artificial Sequence: Synthetic oligonucleotide
ugccgggggcugcucaggc

SEQ ID NO: 18377 - RNA, 19 nt, Artificial Sequence
  Description of Artificial Sequence: Synthetic oligonucleotide
ugcugcucaacuggggagu

SEQ ID NO: 18378 - RNA, 19 nt, Artificial Sequence
  Description of Artificial Sequence: Synthetic oligonucleotide
uggauggcccuugagagua

SEQ ID NO: 18379 - RNA, 19 nt, Artificial Sequence
  Description of Artificial Sequence: Synthetic oligonucleotide
uguuggaugauugaugaga

SEQ ID NO: 18380 - RNA, 19 nt, Artificial Sequence
  Description of Artificial Sequence: Synthetic oligonucleotide
uucaguguuuuuuccaauu

SEQ ID NO: 18381 - RNA, 19 nt, Artificial Sequence
  Description of Artificial Sequence: Synthetic oligonucleotide
uuggcucgggugucuuugg

SEQ ID NO: 18382 - RNA, 19 nt, Artificial Sequence
  Description of Artificial Sequence: Synthetic oligonucleotide
acccaucagagugacguuu

SEQ ID NO: 18383 - RNA, 19 nt, Artificial Sequence
  Description of Artificial Sequence: Synthetic oligonucleotide
acguuuacauggucauggu

SEQ ID NO: 18384 - RNA, 19 nt, Artificial Sequence
  Description of Artificial Sequence: Synthetic oligonucleotide
aucagagugacguuuggag

SEQ ID NO: 18385 - RNA, 19 nt, Artificial Sequence
  Description of Artificial Sequence: Synthetic oligonucleotide
caucagagugacguuugga

SEQ ID NO: 18386 - RNA, 19 nt, Artificial Sequence
  Description of Artificial Sequence: Synthetic oligonucleotide
ccaucagagugacguuugg

SEQ ID NO: 18387 - RNA, 19 nt, Artificial Sequence
  Description of Artificial Sequence: Synthetic oligonucleotide
ccaugugaaaaucacagau

SEQ ID NO: 18388 - RNA, 19 nt, Artificial Sequence
  Description of Artificial Sequence: Synthetic oligonucleotide
cccaucagagugacguuug

SEQ ID NO: 18389 - RNA, 19 nt, Artificial Sequence
  Description of Artificial Sequence: Synthetic oligonucleotide
cguuuacauggucaugguc

SEQ ID NO: 18390 - RNA, 19 nt, Artificial Sequence
  Description of Artificial Sequence: Synthetic oligonucleotide
gaauaauccaaaaugaccc

SEQ ID NO: 18391 - RNA, 19 nt, Artificial Sequence
  Description of Artificial Sequence: Synthetic oligonucleotide
gacguuuacauggucaugg

SEQ ID NO: 18392 - RNA, 19 nt, Artificial Sequence
  Description of Artificial Sequence: Synthetic oligonucleotide
guauuuugaaagaaacuga

SEQ ID NO: 18393 - RNA, 19 nt, Artificial Sequence
  Description of Artificial Sequence: Synthetic oligonucleotide
uagagaaaggagaacguuu

SEQ ID NO: 18394 - RNA, 19 nt, Artificial Sequence
  Description of Artificial Sequence: Synthetic oligonucleotide
uauuagagaaaggagaacg

SEQ ID NO: 18395 - RNA, 19 nt, Artificial Sequence
  Description of Artificial Sequence: Synthetic oligonucleotide
ucagagugacguuuggagc

SEQ ID NO: 18396 - RNA, 19 nt, Artificial Sequence
  Description of Artificial Sequence: Synthetic oligonucleotide
ugccaauuaaauggauggc

SEQ ID NO: 18397 - RNA, 19 nt, Artificial Sequence
  Description of Artificial Sequence: Synthetic oligonucleotide
uuuugggcuagccagacuc

SEQ ID NO: 18398 - RNA, 19 nt, Artificial Sequence
  Description of Artificial Sequence: Synthetic oligonucleotide
aaaccaugugaaaaucaca

SEQ ID NO: 18399 - RNA, 19 nt, Artificial Sequence
  Description of Artificial Sequence: Synthetic oligonucleotide
aagggaaugauguaccugg

SEQ ID NO: 18400 - RNA, 19 nt, Artificial Sequence
  Description of Artificial Sequence: Synthetic oligonucleotide
aauggauggcucuggagug

SEQ ID NO: 18401 - RNA, 19 nt, Artificial Sequence
  Description of Artificial Sequence: Synthetic oligonucleotide
acuuuuuuucuuuuucuuu

SEQ ID NO: 18402 - RNA, 19 nt, Artificial Sequence
  Description of Artificial Sequence: Synthetic oligonucleotide
agaguacaaugcugaugga

SEQ ID NO: 18403 - RNA, 19 nt, Artificial Sequence
  Description of Artificial Sequence: Synthetic oligonucleotide
agcugguuacucaacuuau

SEQ ID NO: 18404 - RNA, 19 nt, Artificial Sequence
  Description of Artificial Sequence: Synthetic oligonucleotide
aggagagcuggaugaggaa

SEQ ID NO: 18405 - RNA, 19 nt, Artificial Sequence
  Description of Artificial Sequence: Synthetic oligonucleotide
agggaaugauguaccugga

SEQ ID NO: 18406 - RNA, 19 nt, Artificial Sequence
  Description of Artificial Sequence: Synthetic oligonucleotide
aguacaaugcugauggagg

SEQ ID NO: 18407 - RNA, 19 nt, Artificial Sequence
  Description of Artificial Sequence: Synthetic oligonucleotide
auaugauggaugcugagga

SEQ ID NO: 18408 - RNA, 19 nt, Artificial Sequence
  Description of Artificial Sequence: Synthetic oligonucleotide
aucugcacuauugacguuu

SEQ ID NO: 18409 - RNA, 19 nt, Artificial Sequence
  Description of Artificial Sequence: Synthetic oligonucleotide
auuaaauggauggcucugg

SEQ ID NO: 18410 - RNA, 19 nt, Artificial Sequence
  Description of Artificial Sequence: Synthetic oligonucleotide
auugacguuuacaugguca

SEQ ID NO: 18411 - RNA, 19 nt, Artificial Sequence
  Description of Artificial Sequence: Synthetic oligonucleotide
caaaccaugugaaaaucac

SEQ ID NO: 18412 - RNA, 19 nt, Artificial Sequence
  Description of Artificial Sequence: Synthetic oligonucleotide
cacccaucagagugacguu

SEQ ID NO: 18413 - RNA, 19 nt, Artificial Sequence
  Description of Artificial Sequence: Synthetic oligonucleotide
cacuauugacguuuacaug

SEQ ID NO: 18414 - RNA, 19 nt, Artificial Sequence
  Description of Artificial Sequence: Synthetic oligonucleotide
cagagaauccugaauaccu

SEQ ID NO: 18415 - RNA, 19 nt, Artificial Sequence
  Description of Artificial Sequence: Synthetic oligonucleotide
cagauagcuaagggaauga

SEQ ID NO: 18416 - RNA, 19 nt, Artificial Sequence
  Description of Artificial Sequence: Synthetic oligonucleotide
cagcugguuacucaacuua

SEQ ID NO: 18417 - RNA, 19 nt, Artificial Sequence
  Description of Artificial Sequence: Synthetic oligonucleotide
caucugcacuauugacguu

SEQ ID NO: 18418 - RNA, 19 nt, Artificial Sequence
  Description of Artificial Sequence: Synthetic oligonucleotide
ccaaaccaugugaaaauca

SEQ ID NO: 18419 - RNA, 19 nt, Artificial Sequence
  Description of Artificial Sequence: Synthetic oligonucleotide
cccauggcugccuguugga

SEQ ID NO: 18420 - RNA, 19 nt, Artificial Sequence
  Description of Artificial Sequence: Synthetic oligonucleotide
ccccauggcugccuguugg

SEQ ID NO: 18421 - RNA, 19 nt, Artificial Sequence
  Description of Artificial Sequence: Synthetic oligonucleotide
cugaggaguacuugguccc

SEQ ID NO: 18422 - RNA, 19 nt, Artificial Sequence
  Description of Artificial Sequence: Synthetic oligonucleotide
cugcacuauugacguuuac

SEQ ID NO: 18423 - RNA, 19 nt, Artificial Sequence
  Description of Artificial Sequence: Synthetic oligonucleotide
cugguuacucaacuuaugc

SEQ ID NO: 18424 - RNA, 19 nt, Artificial Sequence
  Description of Artificial Sequence: Synthetic oligonucleotide
cuucaagaugaaguaaaga

SEQ ID NO: 18425 - RNA, 19 nt, Artificial Sequence
  Description of Artificial Sequence: Synthetic oligonucleotide
cuuuuuuucuuuuucuuuu

SEQ ID NO: 18426 - RNA, 19 nt, Artificial Sequence
  Description of Artificial Sequence: Synthetic oligonucleotide
gaacugaugugugcauauu

SEQ ID NO: 18427 - RNA, 19 nt, Artificial Sequence
  Description of Artificial Sequence: Synthetic oligonucleotide
gaggagagcuggaugagga

SEQ ID NO: 18428 - RNA, 19 nt, Artificial Sequence
  Description of Artificial Sequence: Synthetic oligonucleotide
gaguacaaugcugauggag

SEQ ID NO: 18429 - RNA, 19 nt, Artificial Sequence
  Description of Artificial Sequence: Synthetic oligonucleotide
gauaugauggaugcugagg

SEQ ID NO: 18430 - RNA, 19 nt, Artificial Sequence
  Description of Artificial Sequence: Synthetic oligonucleotide
gcacuauugacguuuacau

SEQ ID NO: 18431 - RNA, 19 nt, Artificial Sequence
  Description of Artificial Sequence: Synthetic oligonucleotide
gcagagaauccugaauacc

SEQ ID NO: 18432 - RNA, 19 nt, Artificial Sequence
  Description of Artificial Sequence: Synthetic oligonucleotide
gccccauggcugccuguug

SEQ ID NO: 18433 - RNA, 19 nt, Artificial Sequence
  Description of Artificial Sequence: Synthetic oligonucleotide
gcugaggaguacuuggucc

SEQ ID NO: 18434 - RNA, 19 nt, Artificial Sequence
  Description of Artificial Sequence: Synthetic oligonucleotide
gcugguuacucaacuuaug

SEQ ID NO: 18435 - RNA, 19 nt, Artificial Sequence
  Description of Artificial Sequence: Synthetic oligonucleotide
ggagagcuggaugaggaag

SEQ ID NO: 18436 - RNA, 19 nt, Artificial Sequence
  Description of Artificial Sequence: Synthetic oligonucleotide
ggcagagaauccugaauac

SEQ ID NO: 18437 - RNA, 19 nt, Artificial Sequence
  Description of Artificial Sequence: Synthetic oligonucleotide
gguuacucaacuuaugccc

SEQ ID NO: 18438 - RNA, 19 nt, Artificial Sequence
  Description of Artificial Sequence: Synthetic oligonucleotide
guuuuuuguuuuauuuuug

SEQ ID NO: 18439 - RNA, 19 nt, Artificial Sequence
  Description of Artificial Sequence: Synthetic oligonucleotide
uaaauggauggcucuggag

SEQ ID NO: 18440 - RNA, 19 nt, Artificial Sequence
  Description of Artificial Sequence: Synthetic oligonucleotide
uaugauggaugcugaggag

SEQ ID NO: 18441 - RNA, 19 nt, Artificial Sequence
  Description of Artificial Sequence: Synthetic oligonucleotide
uccaaaccaugugaaaauc

SEQ ID NO: 18442 - RNA, 19 nt, Artificial Sequence
  Description of Artificial Sequence: Synthetic oligonucleotide
ucccaucugcacuauugac

SEQ ID NO: 18443 - RNA, 19 nt, Artificial Sequence
  Description of Artificial Sequence: Synthetic oligonucleotide
ucugcacuauugacguuua

SEQ ID NO: 18444 - RNA, 19 nt, Artificial Sequence
  Description of Artificial Sequence: Synthetic oligonucleotide
ucuucaagaugaaguaaag

SEQ ID NO: 18445 - RNA, 19 nt, Artificial Sequence
  Description of Artificial Sequence: Synthetic oligonucleotide
ugacguuuacauggucaug

SEQ ID NO: 18446 - RNA, 19 nt, Artificial Sequence
  Description of Artificial Sequence: Synthetic oligonucleotide
ugcacuauugacguuuaca

SEQ ID NO: 18447 - RNA, 19 nt, Artificial Sequence
  Description of Artificial Sequence: Synthetic oligonucleotide
ugcugaggaguacuugguc

SEQ ID NO: 18448 - RNA, 19 nt, Artificial Sequence
  Description of Artificial Sequence: Synthetic oligonucleotide
uggaaacagaguuggugga

SEQ ID NO: 18449 - RNA, 19 nt, Artificial Sequence
  Description of Artificial Sequence: Synthetic oligonucleotide
ugguuacucaacuuaugcc

SEQ ID NO: 18450 - RNA, 19 nt, Artificial Sequence
  Description of Artificial Sequence: Synthetic oligonucleotide
uguuuuuuguuuuauuuuu

SEQ ID NO: 18451 - RNA, 19 nt, Artificial Sequence
  Description of Artificial Sequence: Synthetic oligonucleotide
uuaaauggauggcucugga

SEQ ID NO: 18452 - RNA, 19 nt, Artificial Sequence
  Description of Artificial Sequence: Synthetic oligonucleotide
uugaaagaaacugagcuga

SEQ ID NO: 18453 - RNA, 19 nt, Artificial Sequence
  Description of Artificial Sequence: Synthetic oligonucleotide
uugacguuuacauggucau

SEQ ID NO: 18454 - RNA, 19 nt, Artificial Sequence
  Description of Artificial Sequence: Synthetic oligonucleotide
uuuuuguuuuauuuuuguc

SEQ ID NO: 18455 - RNA, 19 nt, Artificial Sequence
  Description of Artificial Sequence: Synthetic oligonucleotide
uuuuuuucuuuuucuuuuu

SEQ ID NO: 18456 - RNA, 19 nt, Artificial Sequence
  Description of Artificial Sequence: Synthetic oligonucleotide
aaaaguccuuggcucaggu

SEQ ID NO: 18457 - RNA, 19 nt, Artificial Sequence
  Description of Artificial Sequence: Synthetic oligonucleotide
aaaaugggauuaaaaugug

SEQ ID NO: 18458 - RNA, 19 nt, Artificial Sequence
  Description of Artificial Sequence: Synthetic oligonucleotide
aaaugggauuaaaaugugu

SEQ ID NO: 18459 - RNA, 19 nt, Artificial Sequence
  Description of Artificial Sequence: Synthetic oligonucleotide
aaauguccacauaacuuug

SEQ ID NO: 18460 - RNA, 19 nt, Artificial Sequence
  Description of Artificial Sequence: Synthetic oligonucleotide
aacauacagucauggccac

SEQ ID NO: 18461 - RNA, 19 nt, Artificial Sequence
  Description of Artificial Sequence: Synthetic oligonucleotide
aacugcugcuuaacuggug

SEQ ID NO: 18462 - RNA, 19 nt, Artificial Sequence
  Description of Artificial Sequence: Synthetic oligonucleotide
aagaugccaauuaaaugga

SEQ ID NO: 18463 - RNA, 19 nt, Artificial Sequence
  Description of Artificial Sequence: Synthetic oligonucleotide
aauguccacauaacuuugu

SEQ ID NO: 18464 - RNA, 19 nt, Artificial Sequence
  Description of Artificial Sequence: Synthetic oligonucleotide
aauuaaauggauggcucug

SEQ ID NO: 18465 - RNA, 19 nt, Artificial Sequence
  Description of Artificial Sequence: Synthetic oligonucleotide
acauacagucauggccacc

SEQ ID NO: 18466 - RNA, 19 nt, Artificial Sequence
  Description of Artificial Sequence: Synthetic oligonucleotide
acccaaggguguaacgguc

SEQ ID NO: 18467 - RNA, 19 nt, Artificial Sequence
  Description of Artificial Sequence: Synthetic oligonucleotide
acguuuggagcuauggagu

SEQ ID NO: 18468 - RNA, 19 nt, Artificial Sequence
  Description of Artificial Sequence: Synthetic oligonucleotide
acuauugacguuuacaugg

SEQ ID NO: 18469 - RNA, 19 nt, Artificial Sequence
  Description of Artificial Sequence: Synthetic oligonucleotide
agaagucacaggcuacgug

SEQ ID NO: 18470 - RNA, 19 nt, Artificial Sequence
  Description of Artificial Sequence: Synthetic oligonucleotide
agagauaacagguuuccug

SEQ ID NO: 18471 - RNA, 19 nt, Artificial Sequence
  Description of Artificial Sequence: Synthetic oligonucleotide
agaugccaauuaaauggau

SEQ ID NO: 18472 - RNA, 19 nt, Artificial Sequence
  Description of Artificial Sequence: Synthetic oligonucleotide
aggcugcucaggaccuaag

SEQ ID NO: 18473 - RNA, 19 nt, Artificial Sequence
  Description of Artificial Sequence: Synthetic oligonucleotide
auaacuuugugguagauuc

SEQ ID NO: 18474 - RNA, 19 nt, Artificial Sequence
  Description of Artificial Sequence: Synthetic oligonucleotide
augccaauuaaauggaugg

SEQ ID NO: 18475 - RNA, 19 nt, Artificial Sequence
  Description of Artificial Sequence: Synthetic oligonucleotide
caacugcugcuuaacuggu

SEQ ID NO: 18476 - RNA, 19 nt, Artificial Sequence
  Description of Artificial Sequence: Synthetic oligonucleotide
cacccaaggguguaacggu

SEQ ID NO: 18477 - RNA, 19 nt, Artificial Sequence
  Description of Artificial Sequence: Synthetic oligonucleotide
cccaaggguguaacggucc

SEQ ID NO: 18478 - RNA, 19 nt, Artificial Sequence
  Description of Artificial Sequence: Synthetic oligonucleotide
cuauugacguuuacauggu

SEQ ID NO: 18479 - RNA, 19 nt, Artificial Sequence
  Description of Artificial Sequence: Synthetic oligonucleotide
cugaacgucuuucggacag

SEQ ID NO: 18480 - RNA, 19 nt, Artificial Sequence
  Description of Artificial Sequence: Synthetic oligonucleotide
cuggaggcugcucaggacc

SEQ ID NO: 18481 - RNA, 19 nt, Artificial Sequence
  Description of Artificial Sequence: Synthetic oligonucleotide
cugugucuacuaaaagcac

SEQ ID NO: 18482 - RNA, 19 nt, Artificial Sequence
  Description of Artificial Sequence: Synthetic oligonucleotide
gaacauacagucauggcca

SEQ ID NO: 18483 - RNA, 19 nt, Artificial Sequence
  Description of Artificial Sequence: Synthetic oligonucleotide
gacguuuggagcuauggag

SEQ ID NO: 18484 - RNA, 19 nt, Artificial Sequence
  Description of Artificial Sequence: Synthetic oligonucleotide
gagagauaacagguuuccu

SEQ ID NO: 18485 - RNA, 19 nt, Artificial Sequence
  Description of Artificial Sequence: Synthetic oligonucleotide
gaggcugcucaggaccuaa

SEQ ID NO: 18486 - RNA, 19 nt, Artificial Sequence
  Description of Artificial Sequence: Synthetic oligonucleotide
gaugccaauuaaauggaug

SEQ ID NO: 18487 - RNA, 19 nt, Artificial Sequence
  Description of Artificial Sequence: Synthetic oligonucleotide
gccaauuaaauggauggcu

SEQ ID NO: 18488 - RNA, 19 nt, Artificial Sequence
  Description of Artificial Sequence: Synthetic oligonucleotide
gcuggaggcugcucaggac

SEQ ID NO: 18489 - RNA, 19 nt, Artificial Sequence
  Description of Artificial Sequence: Synthetic oligonucleotide
ggaggcugcucaggaccua

SEQ ID NO: 18490 - RNA, 19 nt, Artificial Sequence
  Description of Artificial Sequence: Synthetic oligonucleotide
guuccagucccugaaggaa

SEQ ID NO: 18491 - RNA, 19 nt, Artificial Sequence
  Description of Artificial Sequence: Synthetic oligonucleotide
uaaaaguccuuggcucagg

SEQ ID NO: 18492 - RNA, 19 nt, Artificial Sequence
  Description of Artificial Sequence: Synthetic oligonucleotide
ucacaacugcugcuuaacu

SEQ ID NO: 18493 - RNA, 19 nt, Artificial Sequence
  Description of Artificial Sequence: Synthetic oligonucleotide
ucucuuauuccuuuaucac

SEQ ID NO: 18494 - RNA, 19 nt, Artificial Sequence
  Description of Artificial Sequence: Synthetic oligonucleotide
ugaacgucuuucggacagu

SEQ ID NO: 18495 - RNA, 19 nt, Artificial Sequence
  Description of Artificial Sequence: Synthetic oligonucleotide
ugacguuuggagcuaugga

SEQ ID NO: 18496 - RNA, 19 nt, Artificial Sequence
  Description of Artificial Sequence: Synthetic oligonucleotide
ugcuggaggcugcucagga

SEQ ID NO: 18497 - RNA, 19 nt, Artificial Sequence
  Description of Artificial Sequence: Synthetic oligonucleotide
uggaggcugcucaggaccu

SEQ ID NO: 18498 - RNA, 19 nt, Artificial Sequence
  Description of Artificial Sequence: Synthetic oligonucleotide
aaaauucccgucgcuauca

SEQ ID NO: 18499 - RNA, 19 nt, Artificial Sequence
  Description of Artificial Sequence: Synthetic oligonucleotide
aaauucccgucgcuaucaa

SEQ ID NO: 18500 - RNA, 19 nt, Artificial Sequence
  Description of Artificial Sequence: Synthetic oligonucleotide
aacaucuccgaaagccaac

SEQ ID NO: 18501 - RNA, 19 nt, Artificial Sequence
  Description of Artificial Sequence: Synthetic oligonucleotide
aagggacucuggaucccag

SEQ ID NO: 18502 - RNA, 19 nt, Artificial Sequence
  Description of Artificial Sequence: Synthetic oligonucleotide
acugccuggucugccgcaa

SEQ ID NO: 18503 - RNA, 19 nt, Artificial Sequence
  Description of Artificial Sequence: Synthetic oligonucleotide
agaaaguuaaaauucccgu

SEQ ID NO: 18504 - RNA, 19 nt, Artificial Sequence
  Description of Artificial Sequence: Synthetic oligonucleotide
agagggagcuuguggagcc

SEQ ID NO: 18505 - RNA, 19 nt, Artificial Sequence
  Description of Artificial Sequence: Synthetic oligonucleotide
agccacccauauguaccau

SEQ ID NO: 18506 - RNA, 19 nt, Artificial Sequence
  Description of Artificial Sequence: Synthetic oligonucleotide
agcuuguggagccucuuac

SEQ ID NO: 18507 - RNA, 19 nt, Artificial Sequence
  Description of Artificial Sequence: Synthetic oligonucleotide
aggagagggagcuugugga

SEQ ID NO: 18508 - RNA, 19 nt, Artificial Sequence
  Description of Artificial Sequence: Synthetic oligonucleotide
aggcugcugcaggagaggg

SEQ ID NO: 18509 - RNA, 19 nt, Artificial Sequence
  Description of Artificial Sequence: Synthetic oligonucleotide
agggacucuggaucccaga

SEQ ID NO: 18510 - RNA, 19 nt, Artificial Sequence
  Description of Artificial Sequence: Synthetic oligonucleotide
agggagcuuguggagccuc

SEQ ID NO: 18511 - RNA, 19 nt, Artificial Sequence
  Description of Artificial Sequence: Synthetic oligonucleotide
auaagggacucuggauccc

SEQ ID NO: 18512 - RNA, 19 nt, Artificial Sequence
  Description of Artificial Sequence: Synthetic oligonucleotide
auccaggagguggcugguu

SEQ ID NO: 18513 - RNA, 19 nt, Artificial Sequence
  Description of Artificial Sequence: Synthetic oligonucleotide
aucuccgaaagccaacaag

SEQ ID NO: 18514 - RNA, 19 nt, Artificial Sequence
  Description of Artificial Sequence: Synthetic oligonucleotide
aucugccucaccuccaccg

SEQ ID NO: 18515 - RNA, 19 nt, Artificial Sequence
  Description of Artificial Sequence: Synthetic oligonucleotide
auuggcucccaguaccugc

SEQ ID NO: 18516 - RNA, 19 nt, Artificial Sequence
  Description of Artificial Sequence: Synthetic oligonucleotide
cagccacccauauguacca

SEQ ID NO: 18517 - RNA, 19 nt, Artificial Sequence
  Description of Artificial Sequence: Synthetic oligonucleotide
caggagagggagcuugugg

SEQ ID NO: 18518 - RNA, 19 nt, Artificial Sequence
  Description of Artificial Sequence: Synthetic oligonucleotide
cagugggcaaccccgagua

SEQ ID NO: 18519 - RNA, 19 nt, Artificial Sequence
  Description of Artificial Sequence: Synthetic oligonucleotide
ccgcgcccagcagagaccc

SEQ ID NO: 18520 - RNA, 19 nt, Artificial Sequence
  Description of Artificial Sequence: Synthetic oligonucleotide
ccucaccuccaccgugcag

SEQ ID NO: 18521 - RNA, 19 nt, Artificial Sequence
  Description of Artificial Sequence: Synthetic oligonucleotide
cgaugaagccuacgugaug

SEQ ID NO: 18522 - RNA, 19 nt, Artificial Sequence
  Description of Artificial Sequence: Synthetic oligonucleotide
cgcgcccagcagagaccca

SEQ ID NO: 18523 - RNA, 19 nt, Artificial Sequence
  Description of Artificial Sequence: Synthetic oligonucleotide
cgugucccaccagagcggg

SEQ ID NO: 18524 - RNA, 19 nt, Artificial Sequence
  Description of Artificial Sequence: Synthetic oligonucleotide
cuauacccaccagagugau

SEQ ID NO: 18525 - RNA, 19 nt, Artificial Sequence
  Description of Artificial Sequence: Synthetic oligonucleotide
cucaccuccaccgugcagc

SEQ ID NO: 18526 - RNA, 19 nt, Artificial Sequence
  Description of Artificial Sequence: Synthetic oligonucleotide
cuccgaaagccaacaagga

SEQ ID NO: 18527 - RNA, 19 nt, Artificial Sequence
  Description of Artificial Sequence: Synthetic oligonucleotide
cugcaggagagggagcuug

SEQ ID NO: 18528 - RNA, 19 nt, Artificial Sequence
  Description of Artificial Sequence: Synthetic oligonucleotide
cugccucaccuccaccgug

SEQ ID NO: 18529 - RNA, 19 nt, Artificial Sequence
  Description of Artificial Sequence: Synthetic oligonucleotide
cuggaucccagaaggugag

SEQ ID NO: 18530 - RNA, 19 nt, Artificial Sequence
  Description of Artificial Sequence: Synthetic oligonucleotide
cuuguggagccucuuacac

SEQ ID NO: 18531 - RNA, 19 nt, Artificial Sequence
  Description of Artificial Sequence: Synthetic oligonucleotide
gaauucuccaaaauggccc

SEQ ID NO: 18532 - RNA, 19 nt, Artificial Sequence
  Description of Artificial Sequence: Synthetic oligonucleotide
gacuauguccgggaacaca

SEQ ID NO: 18533 - RNA, 19 nt, Artificial Sequence
  Description of Artificial Sequence: Synthetic oligonucleotide
gacugccuggucugccgca

SEQ ID NO: 18534 - RNA, 19 nt, Artificial Sequence
  Description of Artificial Sequence: Synthetic oligonucleotide
gagaaaguuaaaauucccg

SEQ ID NO: 18535 - RNA, 19 nt, Artificial Sequence
  Description of Artificial Sequence: Synthetic oligonucleotide
gagagggagcuuguggagc

SEQ ID NO: 18536 - RNA, 19 nt, Artificial Sequence
  Description of Artificial Sequence: Synthetic oligonucleotide
gagcuuguggagccucuua

SEQ ID NO: 18537 - RNA, 19 nt, Artificial Sequence
  Description of Artificial Sequence: Synthetic oligonucleotide
gaggcugcugcaggagagg

SEQ ID NO: 18538 - RNA, 19 nt, Artificial Sequence
  Description of Artificial Sequence: Synthetic oligonucleotide
gcacgcugcggaggcugcu

SEQ ID NO: 18539 - RNA, 19 nt, Artificial Sequence
  Description of Artificial Sequence: Synthetic oligonucleotide
gcaggagagggagcuugug

SEQ ID NO: 18540 - RNA, 19 nt, Artificial Sequence
  Description of Artificial Sequence: Synthetic oligonucleotide
gcagugggcaaccccgagu

SEQ ID NO: 18541 - RNA, 19 nt, Artificial Sequence
  Description of Artificial Sequence: Synthetic oligonucleotide
gccucaccuccaccgugca

SEQ ID NO: 18542 - RNA, 19 nt, Artificial Sequence
  Description of Artificial Sequence: Synthetic oligonucleotide
gcugcaggagagggagcuu

SEQ ID NO: 18543 - RNA, 19 nt, Artificial Sequence
  Description of Artificial Sequence: Synthetic oligonucleotide
gcugcugcaggagagggag

SEQ ID NO: 18544 - RNA, 19 nt, Artificial Sequence
  Description of Artificial Sequence: Synthetic oligonucleotide
gcugggcaucugccucacc

SEQ ID NO: 18545 - RNA, 19 nt, Artificial Sequence
  Description of Artificial Sequence: Synthetic oligonucleotide
gcuuguggagccucuuaca

SEQ ID NO: 18546 - RNA, 19 nt, Artificial Sequence
  Description of Artificial Sequence: Synthetic oligonucleotide
ggacuauguccgggaacac

SEQ ID NO: 18547 - RNA, 19 nt, Artificial Sequence
  Description of Artificial Sequence: Synthetic oligonucleotide
ggagagggagcuuguggag

SEQ ID NO: 18548 - RNA, 19 nt, Artificial Sequence
  Description of Artificial Sequence: Synthetic oligonucleotide
ggagcugcuggggugcagg

SEQ ID NO: 18549 - RNA, 19 nt, Artificial Sequence
  Description of Artificial Sequence: Synthetic oligonucleotide
ggagcuuguggagccucuu

SEQ ID NO: 18550 - RNA, 19 nt, Artificial Sequence
  Description of Artificial Sequence: Synthetic oligonucleotide
ggaggcugcugcaggagag

SEQ ID NO: 18551 - RNA, 19 nt, Artificial Sequence
  Description of Artificial Sequence: Synthetic oligonucleotide
ggaucccagaaggugagaa

SEQ ID NO: 18552 - RNA, 19 nt, Artificial Sequence
  Description of Artificial Sequence: Synthetic oligonucleotide
ggcugcugcaggagaggga

SEQ ID NO: 18553 - RNA, 19 nt, Artificial Sequence
  Description of Artificial Sequence: Synthetic oligonucleotide
gggagcugcuggggugcag

SEQ ID NO: 18554 - RNA, 19 nt, Artificial Sequence
  Description of Artificial Sequence: Synthetic oligonucleotide
gggagcuuguggagccucu

SEQ ID NO: 18555 - RNA, 19 nt, Artificial Sequence
  Description of Artificial Sequence: Synthetic oligonucleotide
gggcugcaaagcuguccca

SEQ ID NO: 18556 - RNA, 19 nt, Artificial Sequence
  Description of Artificial Sequence: Synthetic oligonucleotide
ggugagaaaguuaaaauuc

SEQ ID NO: 18557 - RNA, 19 nt, Artificial Sequence
  Description of Artificial Sequence: Synthetic oligonucleotide
gugagaaaguuaaaauucc

SEQ ID NO: 18558 - RNA, 19 nt, Artificial Sequence
  Description of Artificial Sequence: Synthetic oligonucleotide
gugccgccugcugggcauc

SEQ ID NO: 18559 - RNA, 19 nt, Artificial Sequence
  Description of Artificial Sequence: Synthetic oligonucleotide
gugugccgccugcugggca

SEQ ID NO: 18560 - RNA, 19 nt, Artificial Sequence
  Description of Artificial Sequence: Synthetic oligonucleotide
uaccugcucaacuggugug

SEQ ID NO: 18561 - RNA, 19 nt, Artificial Sequence
  Description of Artificial Sequence: Synthetic oligonucleotide
uauaagggacucuggaucc

SEQ ID NO: 18562 - RNA, 19 nt, Artificial Sequence
  Description of Artificial Sequence: Synthetic oligonucleotide
ucaccuccaccgugcagcu

SEQ ID NO: 18563 - RNA, 19 nt, Artificial Sequence
  Description of Artificial Sequence: Synthetic oligonucleotide
uccgaaagccaacaaggaa

SEQ ID NO: 18564 - RNA, 19 nt, Artificial Sequence
  Description of Artificial Sequence: Synthetic oligonucleotide
ucgaauucuccaaaauggc

SEQ ID NO: 18565 - RNA, 19 nt, Artificial Sequence
  Description of Artificial Sequence: Synthetic oligonucleotide
ucgaugaagccuacgugau

SEQ ID NO: 18566 - RNA, 19 nt, Artificial Sequence
  Description of Artificial Sequence: Synthetic oligonucleotide
ucuccgaaagccaacaagg

SEQ ID NO: 18567 - RNA, 19 nt, Artificial Sequence
  Description of Artificial Sequence: Synthetic oligonucleotide
ugcaggagagggagcuugu

SEQ ID NO: 18568 - RNA, 19 nt, Artificial Sequence
  Description of Artificial Sequence: Synthetic oligonucleotide
ugcagugggcaaccccgag

SEQ ID NO: 18569 - RNA, 19 nt, Artificial Sequence
  Description of Artificial Sequence: Synthetic oligonucleotide
ugccucaccuccaccgugc

SEQ ID NO: 18570 - RNA, 19 nt, Artificial Sequence
  Description of Artificial Sequence: Synthetic oligonucleotide
uggacuauguccgggaaca

SEQ ID NO: 18571 - RNA, 19 nt, Artificial Sequence
  Description of Artificial Sequence: Synthetic oligonucleotide
uggaucccagaaggugaga

SEQ ID NO: 18572 - RNA, 19 nt, Artificial Sequence
  Description of Artificial Sequence: Synthetic oligonucleotide
uggcucccaguaccugcuc

SEQ ID NO: 18573 - RNA, 19 nt, Artificial Sequence
  Description of Artificial Sequence: Synthetic oligonucleotide
ugugccgccugcugggcau

SEQ ID NO: 18574 - RNA, 19 nt, Artificial Sequence
  Description of Artificial Sequence: Synthetic oligonucleotide
uuguggagccucuuacacc

SEQ ID NO: 18575 - RNA, 19 nt, Artificial Sequence
  Description of Artificial Sequence: Synthetic oligonucleotide
accuggcagccaggaacgu

SEQ ID NO: 18576 - RNA, 19 nt, Artificial Sequence
  Description of Artificial Sequence: Synthetic oligonucleotide
caaugggagcugcuggggu

SEQ ID NO: 18577 - RNA, 19 nt, Artificial Sequence
  Description of Artificial Sequence: Synthetic oligonucleotide
cacacauacuccuccucug

SEQ ID NO: 18578 - RNA, 19 nt, Artificial Sequence
  Description of Artificial Sequence: Synthetic oligonucleotide
guccccguaauuauguggu

SEQ ID NO: 18579 - RNA, 19 nt, Artificial Sequence
  Description of Artificial Sequence: Synthetic oligonucleotide
gugaggugguccuugggaa

SEQ ID NO: 18580 - RNA, 19 nt, Artificial Sequence
  Description of Artificial Sequence: Synthetic oligonucleotide
uccccguaauuauguggug

SEQ ID NO: 18581 - RNA, 19 nt, Artificial Sequence
  Description of Artificial Sequence: Synthetic oligonucleotide
uguccccguaauuaugugg

SEQ ID NO: 18582 - RNA, 19 nt, Artificial Sequence
  Description of Artificial Sequence: Synthetic oligonucleotide
ugugaggugguccuuggga

SEQ ID NO: 18583 - RNA, 19 nt, Artificial Sequence
  Description of Artificial Sequence: Synthetic oligonucleotide
aacccugacuaccagcagg

SEQ ID NO: 18584 - RNA, 19 nt, Artificial Sequence
  Description of Artificial Sequence: Synthetic oligonucleotide
aacugugaggugguccuug

SEQ ID NO: 18585 - RNA, 19 nt, Artificial Sequence
  Description of Artificial Sequence: Synthetic oligonucleotide
acauuugcagauguuuuag

SEQ ID NO: 18586 - RNA, 19 nt, Artificial Sequence
  Description of Artificial Sequence: Synthetic oligonucleotide
acggggaccagacaacugu

SEQ ID NO: 18587 - RNA, 19 nt, Artificial Sequence
  Description of Artificial Sequence: Synthetic oligonucleotide
acugugaggugguccuugg

SEQ ID NO: 18588 - RNA, 19 nt, Artificial Sequence
  Description of Artificial Sequence: Synthetic oligonucleotide
auaacugugaggugguccu

SEQ ID NO: 18589 - RNA, 19 nt, Artificial Sequence
  Description of Artificial Sequence: Synthetic oligonucleotide
caaacugcaccuacggguc

SEQ ID NO: 18590 - RNA, 19 nt, Artificial Sequence
  Description of Artificial Sequence: Synthetic oligonucleotide
cauuugcagauguuuuaga

SEQ ID NO: 18591 - RNA, 19 nt, Artificial Sequence
  Description of Artificial Sequence: Synthetic oligonucleotide
cccugacuaccagcaggac

SEQ ID NO: 18592 - RNA, 19 nt, Artificial Sequence
  Description of Artificial Sequence: Synthetic oligonucleotide
ccugacuaccagcaggacu

SEQ ID NO: 18593 - RNA, 19 nt, Artificial Sequence
  Description of Artificial Sequence: Synthetic oligonucleotide
cggggaccagacaacugua

SEQ ID NO: 18594 - RNA, 19 nt, Artificial Sequence
  Description of Artificial Sequence: Synthetic oligonucleotide
cucagccacccauauguac

SEQ ID NO: 18595 - RNA, 19 nt, Artificial Sequence
  Description of Artificial Sequence: Synthetic oligonucleotide
gacggggaccagacaacug

SEQ ID NO: 18596 - RNA, 19 nt, Artificial Sequence
  Description of Artificial Sequence: Synthetic oligonucleotide
gcaugucaagaucacagau

SEQ ID NO: 18597 - RNA, 19 nt, Artificial Sequence
  Description of Artificial Sequence: Synthetic oligonucleotide
ggacggggaccagacaacu

SEQ ID NO: 18598 - RNA, 19 nt, Artificial Sequence
  Description of Artificial Sequence: Synthetic oligonucleotide
gugugccaccugugccauc

SEQ ID NO: 18599 - RNA, 19 nt, Artificial Sequence
  Description of Artificial Sequence: Synthetic oligonucleotide
ucccucagccacccauaug

SEQ ID NO: 18600 - RNA, 19 nt, Artificial Sequence
  Description of Artificial Sequence: Synthetic oligonucleotide
ugugccaccugugccaucc

SEQ ID NO: 18601 - RNA, 19 nt, Artificial Sequence
  Description of Artificial Sequence: Synthetic oligonucleotide
aagcauacgugauggcugg

SEQ ID NO: 18602 - RNA, 19 nt, Artificial Sequence
  Description of Artificial Sequence: Synthetic oligonucleotide
aagggcaucuggaucccug

SEQ ID NO: 18603 - RNA, 19 nt, Artificial Sequence
  Description of Artificial Sequence: Synthetic oligonucleotide
acagaguaccaugcagaug

SEQ ID NO: 18604 - RNA, 19 nt, Artificial Sequence
  Description of Artificial Sequence: Synthetic oligonucleotide
acaugggggaccuggugga

SEQ ID NO: 18605 - RNA, 19 nt, Artificial Sequence
  Description of Artificial Sequence: Synthetic oligonucleotide
acccaccagagcggggggc

SEQ ID NO: 18606 - RNA, 19 nt, Artificial Sequence
  Description of Artificial Sequence: Synthetic oligonucleotide
acgaauucugcacaauggc

SEQ ID NO: 18607 - RNA, 19 nt, Artificial Sequence
  Description of Artificial Sequence: Synthetic oligonucleotide
acgagacagaguaccaugc

SEQ ID NO: 18608 - RNA, 19 nt, Artificial Sequence
  Description of Artificial Sequence: Synthetic oligonucleotide
acggagcugguggagccgc

SEQ ID NO: 18609 - RNA, 19 nt, Artificial Sequence
  Description of Artificial Sequence: Synthetic oligonucleotide
acugcugccaugagcagug

SEQ ID NO: 18610 - RNA, 19 nt, Artificial Sequence
  Description of Artificial Sequence: Synthetic oligonucleotide
agaaugugaaaauuccagu

SEQ ID NO: 18611 - RNA, 19 nt, Artificial Sequence
  Description of Artificial Sequence: Synthetic oligonucleotide
agaguaccaugcagauggg

SEQ ID NO: 18612 - RNA, 19 nt, Artificial Sequence
  Description of Artificial Sequence: Synthetic oligonucleotide
agcugguggagccgcugac

SEQ ID NO: 18613 - RNA, 19 nt, Artificial Sequence
  Description of Artificial Sequence: Synthetic oligonucleotide
agggcaucuggaucccuga

SEQ ID NO: 18614 - RNA, 19 nt, Artificial Sequence
  Description of Artificial Sequence: Synthetic oligonucleotide
aguaccaugcagauggggg

SEQ ID NO: 18615 - RNA, 19 nt, Artificial Sequence
  Description of Artificial Sequence: Synthetic oligonucleotide
aucugccugacauccacgg

SEQ ID NO: 18616 - RNA, 19 nt, Artificial Sequence
  Description of Artificial Sequence: Synthetic oligonucleotide
augcagaugggggcaaggu

SEQ ID NO: 18617 - RNA, 19 nt, Artificial Sequence
  Description of Artificial Sequence: Synthetic oligonucleotide
augggggaccugguggaug

SEQ ID NO: 18618 - RNA, 19 nt, Artificial Sequence
  Description of Artificial Sequence: Synthetic oligonucleotide
cagaguaccaugcagaugg

SEQ ID NO: 18619 - RNA, 19 nt, Artificial Sequence
  Description of Artificial Sequence: Synthetic oligonucleotide
cagaugggggcaaggugcc

SEQ ID NO: 18620 - RNA, 19 nt, Artificial Sequence
  Description of Artificial Sequence: Synthetic oligonucleotide
cagcagggcuucuucuguc

SEQ ID NO: 18621 - RNA, 19 nt, Artificial Sequence
  Description of Artificial Sequence: Synthetic oligonucleotide
caucugccugacauccacg

SEQ ID NO: 18622 - RNA, 19 nt, Artificial Sequence
  Description of Artificial Sequence: Synthetic oligonucleotide
caugcagaugggggcaagg

SEQ ID NO: 18623 - RNA, 19 nt, Artificial Sequence
  Description of Artificial Sequence: Synthetic oligonucleotide
cauggccagggacccccag

SEQ ID NO: 18624 - RNA, 19 nt, Artificial Sequence
  Description of Artificial Sequence: Synthetic oligonucleotide
caugggggaccugguggau

SEQ ID NO: 18625 - RNA, 19 nt, Artificial Sequence
  Description of Artificial Sequence: Synthetic oligonucleotide
ccacugacugcugccauga

SEQ ID NO: 18626 - RNA, 19 nt, Artificial Sequence
  Description of Artificial Sequence: Synthetic oligonucleotide
ccagcagggcuucuucugu

SEQ ID NO: 18627 - RNA, 19 nt, Artificial Sequence
  Description of Artificial Sequence: Synthetic oligonucleotide
ccagggacccccagcgcuu

SEQ ID NO: 18628 - RNA, 19 nt, Artificial Sequence
  Description of Artificial Sequence: Synthetic oligonucleotide
ccaugcagaugggggcaag

SEQ ID NO: 18629 - RNA, 19 nt, Artificial Sequence
  Description of Artificial Sequence: Synthetic oligonucleotide
cccaccagagcggggggcu

SEQ ID NO: 18630 - RNA, 19 nt, Artificial Sequence
  Description of Artificial Sequence: Synthetic oligonucleotide
cccacugacugcugccaug

SEQ ID NO: 18631 - RNA, 19 nt, Artificial Sequence
  Description of Artificial Sequence: Synthetic oligonucleotide
ccccgccgagcagagagcc

SEQ ID NO: 18632 - RNA, 19 nt, Artificial Sequence
  Description of Artificial Sequence: Synthetic oligonucleotide
cccgccgagcagagagcca

SEQ ID NO: 18633 - RNA, 19 nt, Artificial Sequence
  Description of Artificial Sequence: Synthetic oligonucleotide
ccgugccacccugaguguc

SEQ ID NO: 18634 - RNA, 19 nt, Artificial Sequence
  Description of Artificial Sequence: Synthetic oligonucleotide
ccugacauccacggugcag

SEQ ID NO: 18635 - RNA, 19 nt, Artificial Sequence
  Description of Artificial Sequence: Synthetic oligonucleotide
cgaauucugcacaauggcg

SEQ ID NO: 18636 - RNA, 19 nt, Artificial Sequence
  Description of Artificial Sequence: Synthetic oligonucleotide
cgagacagaguaccaugca

SEQ ID NO: 18637 - RNA, 19 nt, Artificial Sequence
  Description of Artificial Sequence: Synthetic oligonucleotide
cggagcugguggagccgcu

SEQ ID NO: 18638 - RNA, 19 nt, Artificial Sequence
  Description of Artificial Sequence: Synthetic oligonucleotide
cucccgccuucugggcauc

SEQ ID NO: 18639 - RNA, 19 nt, Artificial Sequence
  Description of Artificial Sequence: Synthetic oligonucleotide
cugacauccacggugcagc

SEQ ID NO: 18640 - RNA, 19 nt, Artificial Sequence
  Description of Artificial Sequence: Synthetic oligonucleotide
cugccaugagcagugugcu

SEQ ID NO: 18641 - RNA, 19 nt, Artificial Sequence
  Description of Artificial Sequence: Synthetic oligonucleotide
cugccugacauccacggug

SEQ ID NO: 18642 - RNA, 19 nt, Artificial Sequence
  Description of Artificial Sequence: Synthetic oligonucleotide
cugcugccaugagcagugu

SEQ ID NO: 18643 - RNA, 19 nt, Artificial Sequence
  Description of Artificial Sequence: Synthetic oligonucleotide
cugcuggucguggucuugg

SEQ ID NO: 18644 - RNA, 19 nt, Artificial Sequence
  Description of Artificial Sequence: Synthetic oligonucleotide
cuggaucccugauggggag

SEQ ID NO: 18645 - RNA, 19 nt, Artificial Sequence
  Description of Artificial Sequence: Synthetic oligonucleotide
cugggcucccaggaccugc

SEQ ID NO: 18646 - RNA, 19 nt, Artificial Sequence
  Description of Artificial Sequence: Synthetic oligonucleotide
cugguggagccgcugacac

SEQ ID NO: 18647 - RNA, 19 nt, Artificial Sequence
  Description of Artificial Sequence: Synthetic oligonucleotide
gaagcauacgugauggcug

SEQ ID NO: 18648 - RNA, 19 nt, Artificial Sequence
  Description of Artificial Sequence: Synthetic oligonucleotide
gaauucugcacaauggcgc

SEQ ID NO: 18649 - RNA, 19 nt, Artificial Sequence
  Description of Artificial Sequence: Synthetic oligonucleotide
gacagaguaccaugcagau

SEQ ID NO: 18650 - RNA, 19 nt, Artificial Sequence
  Description of Artificial Sequence: Synthetic oligonucleotide
gacaugggggaccuggugg

SEQ ID NO: 18651 - RNA, 19 nt, Artificial Sequence
  Description of Artificial Sequence: Synthetic oligonucleotide
gacccaccagagcgggggg

SEQ ID NO: 18652 - RNA, 19 nt, Artificial Sequence
  Description of Artificial Sequence: Synthetic oligonucleotide
gacgagacagaguaccaug

SEQ ID NO: 18653 - RNA, 19 nt, Artificial Sequence
  Description of Artificial Sequence: Synthetic oligonucleotide
gacugcugccaugagcagu

SEQ ID NO: 18654 - RNA, 19 nt, Artificial Sequence
  Description of Artificial Sequence: Synthetic oligonucleotide
gagcagugugcugccggcu

SEQ ID NO: 18655 - RNA, 19 nt, Artificial Sequence
  Description of Artificial Sequence: Synthetic oligonucleotide
gagcugguggagccgcuga

SEQ ID NO: 18656 - RNA, 19 nt, Artificial Sequence
  Description of Artificial Sequence: Synthetic oligonucleotide
gaguaccaugcagaugggg

SEQ ID NO: 18657 - RNA, 19 nt, Artificial Sequence
  Description of Artificial Sequence: Synthetic oligonucleotide
gcagaugggggcaaggugc

SEQ ID NO: 18658 - RNA, 19 nt, Artificial Sequence
  Description of Artificial Sequence: Synthetic oligonucleotide
gcagauugccaaggggaug

SEQ ID NO: 18659 - RNA, 19 nt, Artificial Sequence
  Description of Artificial Sequence: Synthetic oligonucleotide
gccacccugagugucagcc

SEQ ID NO: 18660 - RNA, 19 nt, Artificial Sequence
  Description of Artificial Sequence: Synthetic oligonucleotide
gccaugagcagugugcugc

SEQ ID NO: 18661 - RNA, 19 nt, Artificial Sequence
  Description of Artificial Sequence: Synthetic oligonucleotide
gcccacugacugcugccau

SEQ ID NO: 18662 - RNA, 19 nt, Artificial Sequence
  Description of Artificial Sequence: Synthetic oligonucleotide
gccggcugcacgggcccca

SEQ ID NO: 18663 - RNA, 19 nt, Artificial Sequence
  Description of Artificial Sequence: Synthetic oligonucleotide
gccugaauaugugaaccag

SEQ ID NO: 18664 - RNA, 19 nt, Artificial Sequence
  Description of Artificial Sequence: Synthetic oligonucleotide
gccugacauccacggugca

SEQ ID NO: 18665 - RNA, 19 nt, Artificial Sequence
  Description of Artificial Sequence: Synthetic oligonucleotide
gcuggucguggucuugggg

SEQ ID NO: 18666 - RNA, 19 nt, Artificial Sequence
  Description of Artificial Sequence: Synthetic oligonucleotide
gcugguggagccgcugaca

SEQ ID NO: 18667 - RNA, 19 nt, Artificial Sequence
  Description of Artificial Sequence: Synthetic oligonucleotide
ggacccaccagagcggggg

SEQ ID NO: 18668 - RNA, 19 nt, Artificial Sequence
  Description of Artificial Sequence: Synthetic oligonucleotide
ggagcugguggagccgcug

SEQ ID NO: 18669 - RNA, 19 nt, Artificial Sequence
  Description of Artificial Sequence: Synthetic oligonucleotide
ggaucccugauggggagaa

SEQ ID NO: 18670 - RNA, 19 nt, Artificial Sequence
  Description of Artificial Sequence: Synthetic oligonucleotide
gggagaaugugaaaauucc

SEQ ID NO: 18671 - RNA, 19 nt, Artificial Sequence
  Description of Artificial Sequence: Synthetic oligonucleotide
gggcucccaggaccugcug

SEQ ID NO: 18672 - RNA, 19 nt, Artificial Sequence
  Description of Artificial Sequence: Synthetic oligonucleotide
ggggagaaugugaaaauuc

SEQ ID NO: 18673 - RNA, 19 nt, Artificial Sequence
  Description of Artificial Sequence: Synthetic oligonucleotide
guaccaugcagaugggggc

SEQ ID NO: 18674 - RNA, 19 nt, Artificial Sequence
  Description of Artificial Sequence: Synthetic oligonucleotide
guaccccagcagggcuucu

SEQ ID NO: 18675 - RNA, 19 nt, Artificial Sequence
  Description of Artificial Sequence: Synthetic oligonucleotide
gucucccgccuucugggca

SEQ ID NO: 18676 - RNA, 19 nt, Artificial Sequence
  Description of Artificial Sequence: Synthetic oligonucleotide
gugccacccugagugucag

SEQ ID NO: 18677 - RNA, 19 nt, Artificial Sequence
  Description of Artificial Sequence: Synthetic oligonucleotide
guggagccgcugacaccua

SEQ ID NO: 18678 - RNA, 19 nt, Artificial Sequence
  Description of Artificial Sequence: Synthetic oligonucleotide
uacgugauggcuggugugg

SEQ ID NO: 18679 - RNA, 19 nt, Artificial Sequence
  Description of Artificial Sequence: Synthetic oligonucleotide
ucucccgccuucugggcau

SEQ ID NO: 18680 - RNA, 19 nt, Artificial Sequence
  Description of Artificial Sequence: Synthetic oligonucleotide
ucugccugacauccacggu

SEQ ID NO: 18681 - RNA, 19 nt, Artificial Sequence
  Description of Artificial Sequence: Synthetic oligonucleotide
ucuggaucccugaugggga

SEQ ID NO: 18682 - RNA, 19 nt, Artificial Sequence
  Description of Artificial Sequence: Synthetic oligonucleotide
ucugggcaucugccugaca

SEQ ID NO: 18683 - RNA, 19 nt, Artificial Sequence
  Description of Artificial Sequence: Synthetic oligonucleotide
ugacauccacggugcagcu

SEQ ID NO: 18684 - RNA, 19 nt, Artificial Sequence
  Description of Artificial Sequence: Synthetic oligonucleotide
ugacugcugccaugagcag

SEQ ID NO: 18685 - RNA, 19 nt, Artificial Sequence
  Description of Artificial Sequence: Synthetic oligonucleotide
ugaugacuuuuggggccaa

SEQ ID NO: 18686 - RNA, 19 nt, Artificial Sequence
  Description of Artificial Sequence: Synthetic oligonucleotide
ugcagaugggggcaaggug

SEQ ID NO: 18687 - RNA, 19 nt, Artificial Sequence
  Description of Artificial Sequence: Synthetic oligonucleotide
ugcagauugccaaggggau

SEQ ID NO: 18688 - RNA, 19 nt, Artificial Sequence
  Description of Artificial Sequence: Synthetic oligonucleotide
ugccacccugagugucagc

SEQ ID NO: 18689 - RNA, 19 nt, Artificial Sequence
  Description of Artificial Sequence: Synthetic oligonucleotide
ugccaugagcagugugcug

SEQ ID NO: 18690 - RNA, 19 nt, Artificial Sequence
  Description of Artificial Sequence: Synthetic oligonucleotide
ugcccacugacugcugcca

SEQ ID NO: 18691 - RNA, 19 nt, Artificial Sequence
  Description of Artificial Sequence: Synthetic oligonucleotide
ugccgugccacccugagug

SEQ ID NO: 18692 - RNA, 19 nt, Artificial Sequence
  Description of Artificial Sequence: Synthetic oligonucleotide
ugccugacauccacggugc

SEQ ID NO: 18693 - RNA, 19 nt, Artificial Sequence
  Description of Artificial Sequence: Synthetic oligonucleotide
ugcuggucguggucuuggg

SEQ ID NO: 18694 - RNA, 19 nt, Artificial Sequence
  Description of Artificial Sequence: Synthetic oligonucleotide
uggagccgcugacaccuag

SEQ ID NO: 18695 - RNA, 19 nt, Artificial Sequence
  Description of Artificial Sequence: Synthetic oligonucleotide
uggaucccugauggggaga

SEQ ID NO: 18696 - RNA, 19 nt, Artificial Sequence
  Description of Artificial Sequence: Synthetic oligonucleotide
ugggggaccugguggaugc

SEQ ID NO: 18697 - RNA, 19 nt, Artificial Sequence
  Description of Artificial Sequence: Synthetic oligonucleotide
ugguggagccgcugacacc

SEQ ID NO: 18698 - RNA, 19 nt, Artificial Sequence
  Description of Artificial Sequence: Synthetic oligonucleotide
accucuaccagggcugcca

SEQ ID NO: 18699 - RNA, 19 nt, Artificial Sequence
  Description of Artificial Sequence: Synthetic oligonucleotide
agacggagcugaggaaggu

SEQ ID NO: 18700 - RNA, 19 nt, Artificial Sequence
  Description of Artificial Sequence: Synthetic oligonucleotide
agaugaugaggaugaaaac

SEQ ID NO: 18701 - RNA, 19 nt, Artificial Sequence
  Description of Artificial Sequence: Synthetic oligonucleotide
agcucugcuaccaggacac

SEQ ID NO: 18702 - RNA, 19 nt, Artificial Sequence
  Description of Artificial Sequence: Synthetic oligonucleotide
aggaaggugaaggugcuug

SEQ ID NO: 18703 - RNA, 19 nt, Artificial Sequence
  Description of Artificial Sequence: Synthetic oligonucleotide
aguuauggugugacugugu

SEQ ID NO: 18704 - RNA, 19 nt, Artificial Sequence
  Description of Artificial Sequence: Synthetic oligonucleotide
auugccaaggggaugagcu

SEQ ID NO: 18705 - RNA, 19 nt, Artificial Sequence
  Description of Artificial Sequence: Synthetic oligonucleotide
cagcucugcuaccaggaca

SEQ ID NO: 18706 - RNA, 19 nt, Artificial Sequence
  Description of Artificial Sequence: Synthetic oligonucleotide
ccaaggggaugagcuaccu

SEQ ID NO: 18707 - RNA, 19 nt, Artificial Sequence
  Description of Artificial Sequence: Synthetic oligonucleotide
ccagcucugcuaccaggac

SEQ ID NO: 18708 - RNA, 19 nt, Artificial Sequence
  Description of Artificial Sequence: Synthetic oligonucleotide
cccaccucugcuucgugca

SEQ ID NO: 18709 - RNA, 19 nt, Artificial Sequence
  Description of Artificial Sequence: Synthetic oligonucleotide
gaaagagacggagcugagg

SEQ ID NO: 18710 - RNA, 19 nt, Artificial Sequence
  Description of Artificial Sequence: Synthetic oligonucleotide
gagacggagcugaggaagg

SEQ ID NO: 18711 - RNA, 19 nt, Artificial Sequence
  Description of Artificial Sequence: Synthetic oligonucleotide
gaguuauggugugacugug

SEQ ID NO: 18712 - RNA, 19 nt, Artificial Sequence
  Description of Artificial Sequence: Synthetic oligonucleotide
gccaaggggaugagcuacc

SEQ ID NO: 18713 - RNA, 19 nt, Artificial Sequence
  Description of Artificial Sequence: Synthetic oligonucleotide
ggaaggugaaggugcuugg

SEQ ID NO: 18714 - RNA, 19 nt, Artificial Sequence
  Description of Artificial Sequence: Synthetic oligonucleotide
ggucguggucuugggggug

SEQ ID NO: 18715 - RNA, 19 nt, Artificial Sequence
  Description of Artificial Sequence: Synthetic oligonucleotide
gugaagaugaugaggauga

SEQ ID NO: 18716 - RNA, 19 nt, Artificial Sequence
  Description of Artificial Sequence: Synthetic oligonucleotide
guggaguuauggugugacu

SEQ ID NO: 18717 - RNA, 19 nt, Artificial Sequence
  Description of Artificial Sequence: Synthetic oligonucleotide
guggugcagggaaaccugg

SEQ ID NO: 18718 - RNA, 19 nt, Artificial Sequence
  Description of Artificial Sequence: Synthetic oligonucleotide
guuauggugugacugugug

SEQ ID NO: 18719 - RNA, 19 nt, Artificial Sequence
  Description of Artificial Sequence: Synthetic oligonucleotide
ugaaagagacggagcugag

SEQ ID NO: 18720 - RNA, 19 nt, Artificial Sequence
  Description of Artificial Sequence: Synthetic oligonucleotide
ugccaaggggaugagcuac

SEQ ID NO: 18721 - RNA, 19 nt, Artificial Sequence
  Description of Artificial Sequence: Synthetic oligonucleotide
ugcgaggcacccagcucuu

SEQ ID NO: 18722 - RNA, 19 nt, Artificial Sequence
  Description of Artificial Sequence: Synthetic oligonucleotide
uggccugccuccacuucaa

SEQ ID NO: 18723 - RNA, 19 nt, Artificial Sequence
  Description of Artificial Sequence: Synthetic oligonucleotide
uggucguggucuugggggu

SEQ ID NO: 18724 - RNA, 19 nt, Artificial Sequence
  Description of Artificial Sequence: Synthetic oligonucleotide
uggugcagggaaaccugga

SEQ ID NO: 18725 - RNA, 19 nt, Artificial Sequence
  Description of Artificial Sequence: Synthetic oligonucleotide
ugugcgaggcacccagcuc

SEQ ID NO: 18726 - RNA, 19 nt, Artificial Sequence
  Description of Artificial Sequence: Synthetic oligonucleotide
uuauggugugacugugugg

SEQ ID NO: 18727 - RNA, 19 nt, Artificial Sequence
  Description of Artificial Sequence: Synthetic oligonucleotide
uugccaaggggaugagcua

SEQ ID NO: 18728 - RNA, 19 nt, Artificial Sequence
  Description of Artificial Sequence: Synthetic oligonucleotide
uugugcgaggcacccagcu

SEQ ID NO: 18729 - RNA, 19 nt, Artificial Sequence
  Description of Artificial Sequence: Synthetic oligonucleotide
acacagcuuaugcccuaug

SEQ ID NO: 18730 - RNA, 19 nt, Artificial Sequence
  Description of Artificial Sequence: Synthetic oligonucleotide
acagcuuaugcccuauggc

SEQ ID NO: 18731 - RNA, 19 nt, Artificial Sequence
  Description of Artificial Sequence: Synthetic oligonucleotide
acagugaggaccccacagu

SEQ ID NO: 18732 - RNA, 19 nt, Artificial Sequence
  Description of Artificial Sequence: Synthetic oligonucleotide
agcagagagccagcccucu

SEQ ID NO: 18733 - RNA, 19 nt, Artificial Sequence
  Description of Artificial Sequence: Synthetic oligonucleotide
agcgguacagugaggaccc

SEQ ID NO: 18734 - RNA, 19 nt, Artificial Sequence
  Description of Artificial Sequence: Synthetic oligonucleotide
agcuggugacacagcuuau

SEQ ID NO: 18735 - RNA, 19 nt, Artificial Sequence
  Description of Artificial Sequence: Synthetic oligonucleotide
aggagggcugcuugaggaa

SEQ ID NO: 18736 - RNA, 19 nt, Artificial Sequence
  Description of Artificial Sequence: Synthetic oligonucleotide
augccagccuugccccauc

SEQ ID NO: 18737 - RNA, 19 nt, Artificial Sequence
  Description of Artificial Sequence: Synthetic oligonucleotide
caaccaugucaaaauuaca

SEQ ID NO: 18738 - RNA, 19 nt, Artificial Sequence
  Description of Artificial Sequence: Synthetic oligonucleotide
cacagcuuaugcccuaugg

SEQ ID NO: 18739 - RNA, 19 nt, Artificial Sequence
  Description of Artificial Sequence: Synthetic oligonucleotide
cagcgguacagugaggacc

SEQ ID NO: 18740 - RNA, 19 nt, Artificial Sequence
  Description of Artificial Sequence: Synthetic oligonucleotide
cagcuggugacacagcuua

SEQ ID NO: 18741 - RNA, 19 nt, Artificial Sequence
  Description of Artificial Sequence: Synthetic oligonucleotide
caugccagccuugccccau

SEQ ID NO: 18742 - RNA, 19 nt, Artificial Sequence
  Description of Artificial Sequence: Synthetic oligonucleotide
ccaaccaugucaaaauuac

SEQ ID NO: 18743 - RNA, 19 nt, Artificial Sequence
  Description of Artificial Sequence: Synthetic oligonucleotide
cccaaccaugucaaaauua

SEQ ID NO: 18744 - RNA, 19 nt, Artificial Sequence
  Description of Artificial Sequence: Synthetic oligonucleotide
cgguacagugaggacccca

SEQ ID NO: 18745 - RNA, 19 nt, Artificial Sequence
  Description of Artificial Sequence: Synthetic oligonucleotide
cuggugacacagcuuaugc

SEQ ID NO: 18746 - RNA, 19 nt, Artificial Sequence
  Description of Artificial Sequence: Synthetic oligonucleotide
gaggagggcugcuugagga

SEQ ID NO: 18747 - RNA, 19 nt, Artificial Sequence
  Description of Artificial Sequence: Synthetic oligonucleotide
gcaugccagccuugcccca

SEQ ID NO: 18748 - RNA, 19 nt, Artificial Sequence
  Description of Artificial Sequence: Synthetic oligonucleotide
gccagccuugccccaucaa

SEQ ID NO: 18749 - RNA, 19 nt, Artificial Sequence
  Description of Artificial Sequence: Synthetic oligonucleotide
gcgguacagugaggacccc

SEQ ID NO: 18750 - RNA, 19 nt, Artificial Sequence
  Description of Artificial Sequence: Synthetic oligonucleotide
gcuggugacacagcuuaug

SEQ ID NO: 18751 - RNA, 19 nt, Artificial Sequence
  Description of Artificial Sequence: Synthetic oligonucleotide
ggagggcugcuugaggaag

SEQ ID NO: 18752 - RNA, 19 nt, Artificial Sequence
  Description of Artificial Sequence: Synthetic oligonucleotide
ggugacacagcuuaugccc

SEQ ID NO: 18753 - RNA, 19 nt, Artificial Sequence
  Description of Artificial Sequence: Synthetic oligonucleotide
guacagugaggaccccaca

SEQ ID NO: 18754 - RNA, 19 nt, Artificial Sequence
  Description of Artificial Sequence: Synthetic oligonucleotide
gucccaaccaugucaaaau

SEQ ID NO: 18755 - RNA, 19 nt, Artificial Sequence
  Description of Artificial Sequence: Synthetic oligonucleotide
uacagugaggaccccacag

SEQ ID NO: 18756 - RNA, 19 nt, Artificial Sequence
  Description of Artificial Sequence: Synthetic oligonucleotide
uacuuuuuuuguuuuguuu

SEQ ID NO: 18757 - RNA, 19 nt, Artificial Sequence
  Description of Artificial Sequence: Synthetic oligonucleotide
ucccaaccaugucaaaauu

SEQ ID NO: 18758 - RNA, 19 nt, Artificial Sequence
  Description of Artificial Sequence: Synthetic oligonucleotide
uccuccugccuucagccca

SEQ ID NO: 18759 - RNA, 19 nt, Artificial Sequence
  Description of Artificial Sequence: Synthetic oligonucleotide
uggugacacagcuuaugcc

SEQ ID NO: 18760 - RNA, 19 nt, Artificial Sequence
  Description of Artificial Sequence: Synthetic oligonucleotide
uguuuuguuuuuuuaaaga

SEQ ID NO: 18761 - RNA, 19 nt, Artificial Sequence
  Description of Artificial Sequence: Synthetic oligonucleotide
uuuguuuuuuuaaagauga

SEQ ID NO: 18762 - RNA, 19 nt, Artificial Sequence
  Description of Artificial Sequence: Synthetic oligonucleotide
uuuuguuuuuuuaaagaug

SEQ ID NO: 18763 - RNA, 19 nt, Artificial Sequence
  Description of Artificial Sequence: Synthetic oligonucleotide
uuuuuuuguuuuguuuuuu

SEQ ID NO: 18764 - RNA, 19 nt, Artificial Sequence
  Description of Artificial Sequence: Synthetic oligonucleotide
aaaaaaauaaaauaaaaua

SEQ ID NO: 18765 - RNA, 19 nt, Artificial Sequence
  Description of Artificial Sequence: Synthetic oligonucleotide
aaaaaauaaaauaaaauaa

SEQ ID NO: 18766 - RNA, 19 nt, Artificial Sequence
  Description of Artificial Sequence: Synthetic oligonucleotide
aaaaauaaaauaaaauaaa

SEQ ID NO: 18767 - RNA, 19 nt, Artificial Sequence
  Description of Artificial Sequence: Synthetic oligonucleotide
aaaauaaaauaaaauaaaa

SEQ ID NO: 18768 - RNA, 19 nt, Artificial Sequence
  Description of Artificial Sequence: Synthetic oligonucleotide
aaauaaaauaaaauaaaaa

SEQ ID NO: 18769 - RNA, 19 nt, Artificial Sequence
  Description of Artificial Sequence: Synthetic oligonucleotide
aagcuuaaagugcuuggcu

SEQ ID NO: 18770 - RNA, 19 nt, Artificial Sequence
  Description of Artificial Sequence: Synthetic oligonucleotide
aagugcuuggcucgggugu

SEQ ID NO: 18771 - RNA, 19 nt, Artificial Sequence
  Description of Artificial Sequence: Synthetic oligonucleotide
aauaaaauaaaauaaaaaa

SEQ ID NO: 18772 - RNA, 19 nt, Artificial Sequence
  Description of Artificial Sequence: Synthetic oligonucleotide
acaaaaaaauaaaauaaaa

SEQ ID NO: 18773 - RNA, 19 nt, Artificial Sequence
  Description of Artificial Sequence: Synthetic oligonucleotide
accaggauggcccgagacc

SEQ ID NO: 18774 - RNA, 19 nt, Artificial Sequence
  Description of Artificial Sequence: Synthetic oligonucleotide
agcuuaaagugcuuggcuc

SEQ ID NO: 18775 - RNA, 19 nt, Artificial Sequence
  Description of Artificial Sequence: Synthetic oligonucleotide
aggauggcccgagacccac

SEQ ID NO: 18776 - RNA, 19 nt, Artificial Sequence
  Description of Artificial Sequence: Synthetic oligonucleotide
caaggggcgaugcuggggu

SEQ ID NO: 18777 - RNA, 19 nt, Artificial Sequence
  Description of Artificial Sequence: Synthetic oligonucleotide
caccaggauggcccgagac

SEQ ID NO: 18778 - RNA, 19 nt, Artificial Sequence
  Description of Artificial Sequence: Synthetic oligonucleotide
cauggugauggucaagugu

SEQ ID NO: 18779 - RNA, 19 nt, Artificial Sequence
  Description of Artificial Sequence: Synthetic oligonucleotide
cgucgccgcagcagccacc

SEQ ID NO: 18780 - RNA, 19 nt, Artificial Sequence
  Description of Artificial Sequence: Synthetic oligonucleotide
cugccagacauugaccaag

SEQ ID NO: 18781 - RNA, 19 nt, Artificial Sequence
  Description of Artificial Sequence: Synthetic oligonucleotide
cugggggaugcuggggccc

SEQ ID NO: 18782 - RNA, 19 nt, Artificial Sequence
  Description of Artificial Sequence: Synthetic oligonucleotide
gacugccagacauugacca

SEQ ID NO: 18783 - RNA, 19 nt, Artificial Sequence
  Description of Artificial Sequence: Synthetic oligonucleotide
gauggaggugguccugggg

SEQ ID NO: 18784 - RNA, 19 nt, Artificial Sequence
  Description of Artificial Sequence: Synthetic oligonucleotide
ggguccuggaucagaagac

SEQ ID NO: 18785 - RNA, 19 nt, Artificial Sequence
  Description of Artificial Sequence: Synthetic oligonucleotide
gguccuggaucagaagacu

SEQ ID NO: 18786 - RNA, 19 nt, Artificial Sequence
  Description of Artificial Sequence: Synthetic oligonucleotide
ggugauggucaaguguugg

SEQ ID NO: 18787 - RNA, 19 nt, Artificial Sequence
  Description of Artificial Sequence: Synthetic oligonucleotide
guacgggagaucacagguu

SEQ ID NO: 18788 - RNA, 19 nt, Artificial Sequence
  Description of Artificial Sequence: Synthetic oligonucleotide
gugagguggugauggggaa

SEQ ID NO: 18789 - RNA, 19 nt, Artificial Sequence
  Description of Artificial Sequence: Synthetic oligonucleotide
uaaaaauacaaaaaaauaa

SEQ ID NO: 18790 - RNA, 19 nt, Artificial Sequence
  Description of Artificial Sequence: Synthetic oligonucleotide
uaaagugcuuggcucgggu

SEQ ID NO: 18791 - RNA, 19 nt, Artificial Sequence
  Description of Artificial Sequence: Synthetic oligonucleotide
uacaaaaaaauaaaauaaa

SEQ ID NO: 18792 - RNA, 19 nt, Artificial Sequence
  Description of Artificial Sequence: Synthetic oligonucleotide
ucaccaggauggcccgaga

SEQ ID NO: 18793 - RNA, 19 nt, Artificial Sequence
  Description of Artificial Sequence: Synthetic oligonucleotide
ugccagacauugaccaaga

SEQ ID NO: 18794 - RNA, 19 nt, Artificial Sequence
  Description of Artificial Sequence: Synthetic oligonucleotide
ugugagguggugaugggga

SEQ ID NO: 18795 - RNA, 19 nt, Artificial Sequence
  Description of Artificial Sequence: Synthetic oligonucleotide
uguggaucccugaggguga

SEQ ID NO: 18796 - RNA, 19 nt, Artificial Sequence
  Description of Artificial Sequence: Synthetic oligonucleotide
uuaaagugcuuggcucggg

SEQ ID NO: 18797 - RNA, 19 nt, Artificial Sequence
  Description of Artificial Sequence: Synthetic oligonucleotide
uucaccaggauggcccgag

SEQ ID NO: 18798 - RNA, 19 nt, Artificial Sequence
  Description of Artificial Sequence: Synthetic oligonucleotide
aagaugaggaguaugaaua

SEQ ID NO: 18799 - RNA, 19 nt, Artificial Sequence
  Description of Artificial Sequence: Synthetic oligonucleotide
aagggggagcgguuggcac

SEQ ID NO: 18800 - RNA, 19 nt, Artificial Sequence
  Description of Artificial Sequence: Synthetic oligonucleotide
aaguggauggcccuugaga

SEQ ID NO: 18801 - RNA, 19 nt, Artificial Sequence
  Description of Artificial Sequence: Synthetic oligonucleotide
aauugaugucuacauggug

SEQ ID NO: 18802 - RNA, 19 nt, Artificial Sequence
  Description of Artificial Sequence: Synthetic oligonucleotide
agaagggggagcgguuggc

SEQ ID NO: 18803 - RNA, 19 nt, Artificial Sequence
  Description of Artificial Sequence: Synthetic oligonucleotide
agaucugcacaauugaugu

SEQ ID NO: 18804 - RNA, 19 nt, Artificial Sequence
  Description of Artificial Sequence: Synthetic oligonucleotide
agaugaggaguaugaauac

SEQ ID NO: 18805 - RNA, 19 nt, Artificial Sequence
  Description of Artificial Sequence: Synthetic oligonucleotide
agccccagaucugcacaau

SEQ ID NO: 18806 - RNA, 19 nt, Artificial Sequence
  Description of Artificial Sequence: Synthetic oligonucleotide
agcucugcuaccaccacuc

SEQ ID NO: 18807 - RNA, 19 nt, Artificial Sequence
  Description of Artificial Sequence: Synthetic oligonucleotide
agggggagcgguuggcaca

SEQ ID NO: 18808 - RNA, 19 nt, Artificial Sequence
  Description of Artificial Sequence: Synthetic oligonucleotide
agguggugauggggaaccu

SEQ ID NO: 18809 - RNA, 19 nt, Artificial Sequence
  Description of Artificial Sequence: Synthetic oligonucleotide
agugcugccaugaugagug

SEQ ID NO: 18810 - RNA, 19 nt, Artificial Sequence
  Description of Artificial Sequence: Synthetic oligonucleotide
cacagccccagaucugcac

SEQ ID NO: 18811 - RNA, 19 nt, Artificial Sequence
  Description of Artificial Sequence: Synthetic oligonucleotide
cagaucugcacaauugaug

SEQ ID NO: 18812 - RNA, 19 nt, Artificial Sequence
  Description of Artificial Sequence: Synthetic oligonucleotide
cagccccagaucugcacaa

SEQ ID NO: 18813 - RNA, 19 nt, Artificial Sequence
  Description of Artificial Sequence: Synthetic oligonucleotide
cagcucugcuaccaccacu

SEQ ID NO: 18814 - RNA, 19 nt, Artificial Sequence
  Description of Artificial Sequence: Synthetic oligonucleotide
ccaauuaaguggauggccc

SEQ ID NO: 18815 - RNA, 19 nt, Artificial Sequence
  Description of Artificial Sequence: Synthetic oligonucleotide
ccagaucugcacaauugau

SEQ ID NO: 18816 - RNA, 19 nt, Artificial Sequence
  Description of Artificial Sequence: Synthetic oligonucleotide
cccagaucugcacaauuga

SEQ ID NO: 18817 - RNA, 19 nt, Artificial Sequence
  Description of Artificial Sequence: Synthetic oligonucleotide
ccccagaucugcacaauug

SEQ ID NO: 18818 - RNA, 19 nt, Artificial Sequence
  Description of Artificial Sequence: Synthetic oligonucleotide
ccuuuuaaguccaucaucu

SEQ ID NO: 18819 - RNA, 19 nt, Artificial Sequence
  Description of Artificial Sequence: Synthetic oligonucleotide
cgggagaucacagguuacc

SEQ ID NO: 18820 - RNA, 19 nt, Artificial Sequence
  Description of Artificial Sequence: Synthetic oligonucleotide
gaagaugaggaguaugaau

SEQ ID NO: 18821 - RNA, 19 nt, Artificial Sequence
  Description of Artificial Sequence: Synthetic oligonucleotide
gagaagggggagcgguugg

SEQ ID NO: 18822 - RNA, 19 nt, Artificial Sequence
  Description of Artificial Sequence: Synthetic oligonucleotide
gagcgguuggcacagcccc

SEQ ID NO: 18823 - RNA, 19 nt, Artificial Sequence
  Description of Artificial Sequence: Synthetic oligonucleotide
gcagcucugcuaccaccac

SEQ ID NO: 18824 - RNA, 19 nt, Artificial Sequence
  Description of Artificial Sequence: Synthetic oligonucleotide
gccccagaucugcacaauu

SEQ ID NO: 18825 - RNA, 19 nt, Artificial Sequence
  Description of Artificial Sequence: Synthetic oligonucleotide
ggagcgguuggcacagccc

SEQ ID NO: 18826 - RNA, 19 nt, Artificial Sequence
  Description of Artificial Sequence: Synthetic oligonucleotide
ggcgaugcugggguccugg

SEQ ID NO: 18827 - RNA, 19 nt, Artificial Sequence
  Description of Artificial Sequence: Synthetic oligonucleotide
gggagcgguuggcacagcc

SEQ ID NO: 18828 - RNA, 19 nt, Artificial Sequence
  Description of Artificial Sequence: Synthetic oligonucleotide
gggcgaugcugggguccug

SEQ ID NO: 18829 - RNA, 19 nt, Artificial Sequence
  Description of Artificial Sequence: Synthetic oligonucleotide
ggggagcgguuggcacagc

SEQ ID NO: 18830 - RNA, 19 nt, Artificial Sequence
  Description of Artificial Sequence: Synthetic oligonucleotide
gggggagcgguuggcacag

SEQ ID NO: 18831 - RNA, 19 nt, Artificial Sequence
  Description of Artificial Sequence: Synthetic oligonucleotide
ggugcgagggacccagguc

SEQ ID NO: 18832 - RNA, 19 nt, Artificial Sequence
  Description of Artificial Sequence: Synthetic oligonucleotide
gugcugccaugaugagugu

SEQ ID NO: 18833 - RNA, 19 nt, Artificial Sequence
  Description of Artificial Sequence: Synthetic oligonucleotide
ugcgagggacccaggucua

SEQ ID NO: 18834 - RNA, 19 nt, Artificial Sequence
  Description of Artificial Sequence: Synthetic oligonucleotide
uggugcgagggacccaggu

SEQ ID NO: 18835 - RNA, 19 nt, Artificial Sequence
  Description of Artificial Sequence: Synthetic oligonucleotide
uuaaguggauggcccuuga

SEQ ID NO: 18836 - RNA, 19 nt, Artificial Sequence
  Description of Artificial Sequence: Synthetic oligonucleotide
uugccugccggcacuucaa

SEQ ID NO: 18837 - RNA, 19 nt, Artificial Sequence
  Description of Artificial Sequence: Synthetic oligonucleotide
aacauccaguccuggccgc

SEQ ID NO: 18838 - RNA, 19 nt, Artificial Sequence
  Description of Artificial Sequence: Synthetic oligonucleotide
acaaccggggcuucucauu

SEQ ID NO: 18839 - RNA, 19 nt, Artificial Sequence
  Description of Artificial Sequence: Synthetic oligonucleotide
acaguggagccuguguacc

SEQ ID NO: 18840 - RNA, 19 nt, Artificial Sequence
  Description of Artificial Sequence: Synthetic oligonucleotide
acccagagaagcucaaugu

SEQ ID NO: 18841 - RNA, 19 nt, Artificial Sequence
  Description of Artificial Sequence: Synthetic oligonucleotide
accugaacauccaguccug

SEQ ID NO: 18842 - RNA, 19 nt, Artificial Sequence
  Description of Artificial Sequence: Synthetic oligonucleotide
acugcuuugccugccggca

SEQ ID NO: 18843 - RNA, 19 nt, Artificial Sequence
  Description of Artificial Sequence: Synthetic oligonucleotide
agaagugacaggcuauguc

SEQ ID NO: 18844 - RNA, 19 nt, Artificial Sequence
  Description of Artificial Sequence: Synthetic oligonucleotide
agaugggccccacugugug

SEQ ID NO: 18845 - RNA, 19 nt, Artificial Sequence
  Description of Artificial Sequence: Synthetic oligonucleotide
agcuguccccauaacuuug

SEQ ID NO: 18846 - RNA, 19 nt, Artificial Sequence
  Description of Artificial Sequence: Synthetic oligonucleotide
cacccagggguguaaagga

SEQ ID NO: 18847 - RNA, 19 nt, Artificial Sequence
  Description of Artificial Sequence: Synthetic oligonucleotide
ccagagaagcucaaugucu

SEQ ID NO: 18848 - RNA, 19 nt, Artificial Sequence
  Description of Artificial Sequence: Synthetic oligonucleotide
cccagggguguaaaggacc

SEQ ID NO: 18849 - RNA, 19 nt, Artificial Sequence
  Description of Artificial Sequence: Synthetic oligonucleotide
ccuuugauaacccugauua

SEQ ID NO: 18850 - RNA, 19 nt, Artificial Sequence
  Description of Artificial Sequence: Synthetic oligonucleotide
cgagauggaggugguccug

SEQ ID NO: 18851 - RNA, 19 nt, Artificial Sequence
  Description of Artificial Sequence: Synthetic oligonucleotide
cugaaggaaauuagugcug

SEQ ID NO: 18852 - RNA, 19 nt, Artificial Sequence
  Description of Artificial Sequence: Synthetic oligonucleotide
gaacauccaguccuggccg

SEQ ID NO: 18853 - RNA, 19 nt, Artificial Sequence
  Description of Artificial Sequence: Synthetic oligonucleotide
gacaguggagccuguguac

SEQ ID NO: 18854 - RNA, 19 nt, Artificial Sequence
  Description of Artificial Sequence: Synthetic oligonucleotide
gacugcuuugccugccggc

SEQ ID NO: 18855 - RNA, 19 nt, Artificial Sequence
  Description of Artificial Sequence: Synthetic oligonucleotide
gauaacccugauuacuggc

SEQ ID NO: 18856 - RNA, 19 nt, Artificial Sequence
  Description of Artificial Sequence: Synthetic oligonucleotide
gcuguccccauaacuuugu

SEQ ID NO: 18857 - RNA, 19 nt, Artificial Sequence
  Description of Artificial Sequence: Synthetic oligonucleotide
gggggcugcucaggcccuc

SEQ ID NO: 18858 - RNA, 19 nt, Artificial Sequence
  Description of Artificial Sequence: Synthetic oligonucleotide
guguaauggucacugcuuu

SEQ ID NO: 18859 - RNA, 19 nt, Artificial Sequence
  Description of Artificial Sequence: Synthetic oligonucleotide
uaccugaacauccaguccu

SEQ ID NO: 18860 - RNA, 19 nt, Artificial Sequence
  Description of Artificial Sequence: Synthetic oligonucleotide
uccugggcaaccuggacuu

SEQ ID NO: 18861 - RNA, 19 nt, Artificial Sequence
  Description of Artificial Sequence: Synthetic oligonucleotide
ugaaggaaauuagugcugg

SEQ ID NO: 18862 - RNA, 19 nt, Artificial Sequence
  Description of Artificial Sequence: Synthetic oligonucleotide
ugauggggaaccuugagau

SEQ ID NO: 18863 - RNA, 19 nt, Artificial Sequence
  Description of Artificial Sequence: Synthetic oligonucleotide
uggacccagagaagcucaa

SEQ ID NO: 18864 - RNA, 19 nt, Artificial Sequence
  Description of Artificial Sequence: Synthetic oligonucleotide
aaaacugugagguugucau

SEQ ID NO: 18865 - RNA, 19 nt, Artificial Sequence
  Description of Artificial Sequence: Synthetic oligonucleotide
aaaggagaacguuugccuc

SEQ ID NO: 18866 - RNA, 19 nt, Artificial Sequence
  Description of Artificial Sequence: Synthetic oligonucleotide
aacugugagguugucaugg

SEQ ID NO: 18867 - RNA, 19 nt, Artificial Sequence
  Description of Artificial Sequence: Synthetic oligonucleotide
aaggagaacguuugccuca

SEQ ID NO: 18868 - RNA, 19 nt, Artificial Sequence
  Description of Artificial Sequence: Synthetic oligonucleotide
accggguccugacaacugu

SEQ ID NO: 18869 - RNA, 19 nt, Artificial Sequence
  Description of Artificial Sequence: Synthetic oligonucleotide
accuaguuauucaggguga

SEQ ID NO: 18870 - RNA, 19 nt, Artificial Sequence
  Description of Artificial Sequence: Synthetic oligonucleotide
acgucagugacugcugcca

SEQ ID NO: 18871 - RNA, 19 nt, Artificial Sequence
  Description of Artificial Sequence: Synthetic oligonucleotide
acugugagguugucauggg

SEQ ID NO: 18872 - RNA, 19 nt, Artificial Sequence
  Description of Artificial Sequence: Synthetic oligonucleotide
agaaaggagaacguuugcc

SEQ ID NO: 18873 - RNA, 19 nt, Artificial Sequence
  Description of Artificial Sequence: Synthetic oligonucleotide
aggagaacguuugccucag

SEQ ID NO: 18874 - RNA, 19 nt, Artificial Sequence
  Description of Artificial Sequence: Synthetic oligonucleotide
auuuuggagaaggaaaaaa

SEQ ID NO: 18875 - RNA, 19 nt, Artificial Sequence
  Description of Artificial Sequence: Synthetic oligonucleotide
cacccagacuaccugcagg

SEQ ID NO: 18876 - RNA, 19 nt, Artificial Sequence
  Description of Artificial Sequence: Synthetic oligonucleotide
cauuuccagauuuuuuagu

SEQ ID NO: 18877 - RNA, 19 nt, Artificial Sequence
  Description of Artificial Sequence: Synthetic oligonucleotide
ccagacuaccugcaggagu

SEQ ID NO: 18878 - RNA, 19 nt, Artificial Sequence
  Description of Artificial Sequence: Synthetic oligonucleotide
cccagacuaccugcaggag

SEQ ID NO: 18879 - RNA, 19 nt, Artificial Sequence
  Description of Artificial Sequence: Synthetic oligonucleotide
ccggguccugacaacugua

SEQ ID NO: 18880 - RNA, 19 nt, Artificial Sequence
  Description of Artificial Sequence: Synthetic oligonucleotide
ccuaguuauucagggugau

SEQ ID NO: 18881 - RNA, 19 nt, Artificial Sequence
  Description of Artificial Sequence: Synthetic oligonucleotide
cgucagugacugcugccau

SEQ ID NO: 18882 - RNA, 19 nt, Artificial Sequence
  Description of Artificial Sequence: Synthetic oligonucleotide
cuaguuauucagggugaug

SEQ ID NO: 18883 - RNA, 19 nt, Artificial Sequence
  Description of Artificial Sequence: Synthetic oligonucleotide
cugccuguuggaguauguc

SEQ ID NO: 18884 - RNA, 19 nt, Artificial Sequence
  Description of Artificial Sequence: Synthetic oligonucleotide
cugguguguccagauagcu

SEQ ID NO: 18885 - RNA, 19 nt, Artificial Sequence
  Description of Artificial Sequence: Synthetic oligonucleotide
gaaaggagaacguuugccu

SEQ ID NO: 18886 - RNA, 19 nt, Artificial Sequence
  Description of Artificial Sequence: Synthetic oligonucleotide
gaccggguccugacaacug

SEQ ID NO: 18887 - RNA, 19 nt, Artificial Sequence
  Description of Artificial Sequence: Synthetic oligonucleotide
gagaaaggagaacguuugc

SEQ ID NO: 18888 - RNA, 19 nt, Artificial Sequence
  Description of Artificial Sequence: Synthetic oligonucleotide
gagaacguuugccucagcc

SEQ ID NO: 18889 - RNA, 19 nt, Artificial Sequence
  Description of Artificial Sequence: Synthetic oligonucleotide
gagaaggaaaaaaugaaua

SEQ ID NO: 18890 - RNA, 19 nt, Artificial Sequence
  Description of Artificial Sequence: Synthetic oligonucleotide
gauaccuaguuauucaggg

SEQ ID NO: 18891 - RNA, 19 nt, Artificial Sequence
  Description of Artificial Sequence: Synthetic oligonucleotide
gcugccuguuggaguaugu

SEQ ID NO: 18892 - RNA, 19 nt, Artificial Sequence
  Description of Artificial Sequence: Synthetic oligonucleotide
gcugcuuaacugguguguc

SEQ ID NO: 18893 - RNA, 19 nt, Artificial Sequence
  Description of Artificial Sequence: Synthetic oligonucleotide
gcuuccucuggaaaauacu

SEQ ID NO: 18894 - RNA, 19 nt, Artificial Sequence
  Description of Artificial Sequence: Synthetic oligonucleotide
ggaccggguccugacaacu

SEQ ID NO: 18895 - RNA, 19 nt, Artificial Sequence
  Description of Artificial Sequence: Synthetic oligonucleotide
ggagaacguuugccucagc

SEQ ID NO: 18896 - RNA, 19 nt, Artificial Sequence
  Description of Artificial Sequence: Synthetic oligonucleotide
ggcugccuguuggaguaug

SEQ ID NO: 18897 - RNA, 19 nt, Artificial Sequence
  Description of Artificial Sequence: Synthetic oligonucleotide
gguguguccagauagcuaa

SEQ ID NO: 18898 - RNA, 19 nt, Artificial Sequence
  Description of Artificial Sequence: Synthetic oligonucleotide
guguccagauagcuaaggg

SEQ ID NO: 18899 - RNA, 19 nt, Artificial Sequence
  Description of Artificial Sequence: Synthetic oligonucleotide
guguguccagauagcuaag

SEQ ID NO: 18900 - RNA, 19 nt, Artificial Sequence
  Description of Artificial Sequence: Synthetic oligonucleotide
uaacugguguguccagaua

SEQ ID NO: 18901 - RNA, 19 nt, Artificial Sequence
  Description of Artificial Sequence: Synthetic oligonucleotide
uaccuaguuauucagggug

SEQ ID NO: 18902 - RNA, 19 nt, Artificial Sequence
  Description of Artificial Sequence: Synthetic oligonucleotide
uacgucagugacugcugcc

SEQ ID NO: 18903 - RNA, 19 nt, Artificial Sequence
  Description of Artificial Sequence: Synthetic oligonucleotide
uaguuauucagggugauga

SEQ ID NO: 18904 - RNA, 19 nt, Artificial Sequence
  Description of Artificial Sequence: Synthetic oligonucleotide
ucauuuccagauuuuuuag

SEQ ID NO: 18905 - RNA, 19 nt, Artificial Sequence
  Description of Artificial Sequence: Synthetic oligonucleotide
ugaugaccuuuggaggaaa

SEQ ID NO: 18906 - RNA, 19 nt, Artificial Sequence
  Description of Artificial Sequence: Synthetic oligonucleotide
ugccuguuggaguaugucc

SEQ ID NO: 18907 - RNA, 19 nt, Artificial Sequence
  Description of Artificial Sequence: Synthetic oligonucleotide
ugcugcuuaacuggugugu

SEQ ID NO: 18908 - RNA, 19 nt, Artificial Sequence
  Description of Artificial Sequence: Synthetic oligonucleotide
uggaugaagaggauuugga

SEQ ID NO: 18909 - RNA, 19 nt, Artificial Sequence
  Description of Artificial Sequence: Synthetic oligonucleotide
ugguguguccagauagcua

SEQ ID NO: 18910 - RNA, 19 nt, Artificial Sequence
  Description of Artificial Sequence: Synthetic oligonucleotide
uguguccagauagcuaagg

SEQ ID NO: 18911 - RNA, 19 nt, Artificial Sequence
  Description of Artificial Sequence: Synthetic oligonucleotide
aaagaguacaaugcugaug

SEQ ID NO: 18912 - RNA, 19 nt, Artificial Sequence
  Description of Artificial Sequence: Synthetic oligonucleotide
aagaguacaaugcugaugg

SEQ ID NO: 18913 - RNA, 19 nt, Artificial Sequence
  Description of Artificial Sequence: Synthetic oligonucleotide
aaggacagccuugccccau

SEQ ID NO: 18914 - RNA, 19 nt, Artificial Sequence
  Description of Artificial Sequence: Synthetic oligonucleotide
acagugcugaccccaccgu

SEQ ID NO: 18915 - RNA, 19 nt, Artificial Sequence
  Description of Artificial Sequence: Synthetic oligonucleotide
acugugaagauuccugugg

SEQ ID NO: 18916 - RNA, 19 nt, Artificial Sequence
  Description of Artificial Sequence: Synthetic oligonucleotide
acugugcugccgccuccac

SEQ ID NO: 18917 - RNA, 19 nt, Artificial Sequence
  Description of Artificial Sequence: Synthetic oligonucleotide
agagguacagugcugaccc

SEQ ID NO: 18918 - RNA, 19 nt, Artificial Sequence
  Description of Artificial Sequence: Synthetic oligonucleotide
agcccuccuccugccuaca

SEQ ID NO: 18919 - RNA, 19 nt, Artificial Sequence
  Description of Artificial Sequence: Synthetic oligonucleotide
aggacagccuugccccaug

SEQ ID NO: 18920 - RNA, 19 nt, Artificial Sequence
  Description of Artificial Sequence: Synthetic oligonucleotide
agguacagugcugacccca

SEQ ID NO: 18921 - RNA, 19 nt, Artificial Sequence
  Description of Artificial Sequence: Synthetic oligonucleotide
cacagcccuccuccugccu

SEQ ID NO: 18922 - RNA, 19 nt, Artificial Sequence
  Description of Artificial Sequence: Synthetic oligonucleotide
cacugugcugccgccucca

SEQ ID NO: 18923 - RNA, 19 nt, Artificial Sequence
  Description of Artificial Sequence: Synthetic oligonucleotide
cagagguacagugcugacc

SEQ ID NO: 18924 - RNA, 19 nt, Artificial Sequence
  Description of Artificial Sequence: Synthetic oligonucleotide
cagcccuccuccugccuac

SEQ ID NO: 18925 - RNA, 19 nt, Artificial Sequence
  Description of Artificial Sequence: Synthetic oligonucleotide
cuccaaaccaugugaaaau

SEQ ID NO: 18926 - RNA, 19 nt, Artificial Sequence
  Description of Artificial Sequence: Synthetic oligonucleotide
cugugaagauuccuguggc

SEQ ID NO: 18927 - RNA, 19 nt, Artificial Sequence
  Description of Artificial Sequence: Synthetic oligonucleotide
gaaggacagccuugcccca

SEQ ID NO: 18928 - RNA, 19 nt, Artificial Sequence
  Description of Artificial Sequence: Synthetic oligonucleotide
gacagccuugccccaugua

SEQ ID NO: 18929 - RNA, 19 nt, Artificial Sequence
  Description of Artificial Sequence: Synthetic oligonucleotide
gagguacagugcugacccc

SEQ ID NO: 18930 - RNA, 19 nt, Artificial Sequence
  Description of Artificial Sequence: Synthetic oligonucleotide
gcacugugcugccgccucc

SEQ ID NO: 18931 - RNA, 19 nt, Artificial Sequence
  Description of Artificial Sequence: Synthetic oligonucleotide
gcccuccuccugccuacac

SEQ ID NO: 18932 - RNA, 19 nt, Artificial Sequence
  Description of Artificial Sequence: Synthetic oligonucleotide
ggauggcucuggaguguau

SEQ ID NO: 18933 - RNA, 19 nt, Artificial Sequence
  Description of Artificial Sequence: Synthetic oligonucleotide
guacagugcugaccccacc

SEQ ID NO: 18934 - RNA, 19 nt, Artificial Sequence
  Description of Artificial Sequence: Synthetic oligonucleotide
gugaagauuccuguggcua

SEQ ID NO: 18935 - RNA, 19 nt, Artificial Sequence
  Description of Artificial Sequence: Synthetic oligonucleotide
uacagugcugaccccaccg

SEQ ID NO: 18936 - RNA, 19 nt, Artificial Sequence
  Description of Artificial Sequence: Synthetic oligonucleotide
ucagccucccaucugcacu

SEQ ID NO: 18937 - RNA, 19 nt, Artificial Sequence
  Description of Artificial Sequence: Synthetic oligonucleotide
ugaagauuccuguggcuau

SEQ ID NO: 18938 - RNA, 19 nt, Artificial Sequence
  Description of Artificial Sequence: Synthetic oligonucleotide
ugaguaugugaaugagcca

SEQ ID NO: 18939 - RNA, 19 nt, Artificial Sequence
  Description of Artificial Sequence: Synthetic oligonucleotide
uggauggcucuggagugua

SEQ ID NO: 18940 - RNA, 19 nt, Artificial Sequence
  Description of Artificial Sequence: Synthetic oligonucleotide
ugugaagauuccuguggcu

SEQ ID NO: 18941 - RNA, 19 nt, Artificial Sequence
  Description of Artificial Sequence: Synthetic oligonucleotide
uucaagaugaaguaaagaa

SEQ ID NO: 18942 - RNA, 19 nt, Artificial Sequence
  Description of Artificial Sequence: Synthetic oligonucleotide
uugccucagccucccaucu

SEQ ID NO: 18943 - RNA, 19 nt, Artificial Sequence
  Description of Artificial Sequence: Synthetic oligonucleotide
uuggaugauugaugcugac

SEQ ID NO: 18944 - RNA, 19 nt, Artificial Sequence
  Description of Artificial Sequence: Synthetic oligonucleotide
aaauucacccaucagagug

SEQ ID NO: 18945 - RNA, 19 nt, Artificial Sequence
  Description of Artificial Sequence: Synthetic oligonucleotide
aacagguuuccugaacaua

SEQ ID NO: 18946 - RNA, 19 nt, Artificial Sequence
  Description of Artificial Sequence: Synthetic oligonucleotide
aaggauggcucgagacccu

SEQ ID NO: 18947 - RNA, 19 nt, Artificial Sequence
  Description of Artificial Sequence: Synthetic oligonucleotide
aaguagaagaaaaugggau

SEQ ID NO: 18948 - RNA, 19 nt, Artificial Sequence
  Description of Artificial Sequence: Synthetic oligonucleotide
acaguggagcauguguuac

SEQ ID NO: 18949 - RNA, 19 nt, Artificial Sequence
  Description of Artificial Sequence: Synthetic oligonucleotide
acugcuuugccugcaugaa

SEQ ID NO: 18950 - RNA, 19 nt, Artificial Sequence
  Description of Artificial Sequence: Synthetic oligonucleotide
acuguggauuccaguaaca

SEQ ID NO: 18951 - RNA, 19 nt, Artificial Sequence
  Description of Artificial Sequence: Synthetic oligonucleotide
agacuguggauuccaguaa

SEQ ID NO: 18952 - RNA, 19 nt, Artificial Sequence
  Description of Artificial Sequence: Synthetic oligonucleotide
agauggcccaaacugugug

SEQ ID NO: 18953 - RNA, 19 nt, Artificial Sequence
  Description of Artificial Sequence: Synthetic oligonucleotide
agguugucaugggcaaccu

SEQ ID NO: 18954 - RNA, 19 nt, Artificial Sequence
  Description of Artificial Sequence: Synthetic oligonucleotide
aguggagcauguguuacuc

SEQ ID NO: 18955 - RNA, 19 nt, Artificial Sequence
  Description of Artificial Sequence: Synthetic oligonucleotide
auucucagucagugugugc

SEQ ID NO: 18956 - RNA, 19 nt, Artificial Sequence
  Description of Artificial Sequence: Synthetic oligonucleotide
cagacuguggauuccagua

SEQ ID NO: 18957 - RNA, 19 nt, Artificial Sequence
  Description of Artificial Sequence: Synthetic oligonucleotide
caguggagcauguguuacu

SEQ ID NO: 18958 - RNA, 19 nt, Artificial Sequence
  Description of Artificial Sequence: Synthetic oligonucleotide
ccaagauggaaguagaaga

SEQ ID NO: 18959 - RNA, 19 nt, Artificial Sequence
  Description of Artificial Sequence: Synthetic oligonucleotide
ccucuccuuccugcggucu

SEQ ID NO: 18960 - RNA, 19 nt, Artificial Sequence
  Description of Artificial Sequence: Synthetic oligonucleotide
cgagauggagguuuugcug

SEQ ID NO: 18961 - RNA, 19 nt, Artificial Sequence
  Description of Artificial Sequence: Synthetic oligonucleotide
cgauucucagucagugugu

SEQ ID NO: 18962 - RNA, 19 nt, Artificial Sequence
  Description of Artificial Sequence: Synthetic oligonucleotide
cgggaccucuccuuccugc

SEQ ID NO: 18963 - RNA, 19 nt, Artificial Sequence
  Description of Artificial Sequence: Synthetic oligonucleotide
cucagucagugugugcagg

SEQ ID NO: 18964 - RNA, 19 nt, Artificial Sequence
  Description of Artificial Sequence: Synthetic oligonucleotide
cugacuucaguguuuuuuc

SEQ ID NO: 18965 - RNA, 19 nt, Artificial Sequence
  Description of Artificial Sequence: Synthetic oligonucleotide
cugcugcuuaacuggugug

SEQ ID NO: 18966 - RNA, 19 nt, Artificial Sequence
  Description of Artificial Sequence: Synthetic oligonucleotide
cuguggauuccaguaacau

SEQ ID NO: 18967 - RNA, 19 nt, Artificial Sequence
  Description of Artificial Sequence: Synthetic oligonucleotide
gaaauucacccaucagagu

SEQ ID NO: 18968 - RNA, 19 nt, Artificial Sequence
  Description of Artificial Sequence: Synthetic oligonucleotide
gaaguagaagaaaauggga

SEQ ID NO: 18969 - RNA, 19 nt, Artificial Sequence
  Description of Artificial Sequence: Synthetic oligonucleotide
gacaguggagcauguguua

SEQ ID NO: 18970 - RNA, 19 nt, Artificial Sequence
  Description of Artificial Sequence: Synthetic oligonucleotide
gacugcuuugccugcauga

SEQ ID NO: 18971 - RNA, 19 nt, Artificial Sequence
  Description of Artificial Sequence: Synthetic oligonucleotide
gacuguggauuccaguaac

SEQ ID NO: 18972 - RNA, 19 nt, Artificial Sequence
  Description of Artificial Sequence: Synthetic oligonucleotide
gagguugucaugggcaacc

SEQ ID NO: 18973 - RNA, 19 nt, Artificial Sequence
  Description of Artificial Sequence: Synthetic oligonucleotide
gauggcucgagacccucaa

SEQ ID NO: 18974 - RNA, 19 nt, Artificial Sequence
  Description of Artificial Sequence: Synthetic oligonucleotide
gccagacuuugacaaggac

SEQ ID NO: 18975 - RNA, 19 nt, Artificial Sequence
  Description of Artificial Sequence: Synthetic oligonucleotide
gcgauucucagucagugug

SEQ ID NO: 18976 - RNA, 19 nt, Artificial Sequence
  Description of Artificial Sequence: Synthetic oligonucleotide
ggaaauucacccaucagag

SEQ ID NO: 18977 - RNA, 19 nt, Artificial Sequence
  Description of Artificial Sequence: Synthetic oligonucleotide
ggauggcucgagacccuca

SEQ ID NO: 18978 - RNA, 19 nt, Artificial Sequence
  Description of Artificial Sequence: Synthetic oligonucleotide
gggaccucuccuuccugcg

SEQ ID NO: 18979 - RNA, 19 nt, Artificial Sequence
  Description of Artificial Sequence: Synthetic oligonucleotide
gucaugggcaaccuggaga

SEQ ID NO: 18980 - RNA, 19 nt, Artificial Sequence
  Description of Artificial Sequence: Synthetic oligonucleotide
gugagguugucaugggcaa

SEQ ID NO: 18981 - RNA, 19 nt, Artificial Sequence
  Description of Artificial Sequence: Synthetic oligonucleotide
guggauuccaguaacauug

SEQ ID NO: 18982 - RNA, 19 nt, Artificial Sequence
  Description of Artificial Sequence: Synthetic oligonucleotide
guuccaagauggaaguaga

SEQ ID NO: 18983 - RNA, 19 nt, Artificial Sequence
  Description of Artificial Sequence: Synthetic oligonucleotide
guuuggagcuauggaguua

SEQ ID NO: 18984 - RNA, 19 nt, Artificial Sequence
  Description of Artificial Sequence: Synthetic oligonucleotide
ucaaggauggcucgagacc

SEQ ID NO: 18985 - RNA, 19 nt, Artificial Sequence
  Description of Artificial Sequence: Synthetic oligonucleotide
ucaugggcaaccuggagau

SEQ ID NO: 18986 - RNA, 19 nt, Artificial Sequence
  Description of Artificial Sequence: Synthetic oligonucleotide
uccugaacauacagucaug

SEQ ID NO: 18987 - RNA, 19 nt, Artificial Sequence
  Description of Artificial Sequence: Synthetic oligonucleotide
ucucagucagugugugcag

SEQ ID NO: 18988 - RNA, 19 nt, Artificial Sequence
  Description of Artificial Sequence: Synthetic oligonucleotide
ugaauuucaaugacagugg

SEQ ID NO: 18989 - RNA, 19 nt, Artificial Sequence
  Description of Artificial Sequence: Synthetic oligonucleotide
ugacuucaguguuuuuucu

SEQ ID NO: 18990 - RNA, 19 nt, Artificial Sequence
  Description of Artificial Sequence: Synthetic oligonucleotide
ugagguugucaugggcaac

SEQ ID NO: 18991 - RNA, 19 nt, Artificial Sequence
  Description of Artificial Sequence: Synthetic oligonucleotide
ugccagacuuugacaagga

SEQ ID NO: 18992 - RNA, 19 nt, Artificial Sequence
  Description of Artificial Sequence: Synthetic oligonucleotide
uggaugauugaugcugaca

SEQ ID NO: 18993 - RNA, 19 nt, Artificial Sequence
  Description of Artificial Sequence: Synthetic oligonucleotide
uggauuccaguaacauuga

SEQ ID NO: 18994 - RNA, 19 nt, Artificial Sequence
  Description of Artificial Sequence: Synthetic oligonucleotide
ugugagguugucaugggca

SEQ ID NO: 18995 - RNA, 19 nt, Artificial Sequence
  Description of Artificial Sequence: Synthetic oligonucleotide
uguggauuccaguaacauu

SEQ ID NO: 18996 - RNA, 19 nt, Artificial Sequence
  Description of Artificial Sequence: Synthetic oligonucleotide
uguucgagaagucacaggc

SEQ ID NO: 18997 - RNA, 19 nt, Artificial Sequence
  Description of Artificial Sequence: Synthetic oligonucleotide
uuccaagauggaaguagaa

SEQ ID NO: 18998 - RNA, 19 nt, Artificial Sequence
  Description of Artificial Sequence: Synthetic oligonucleotide
uuccugaacauacagucau

SEQ ID NO: 18999 - RNA, 19 nt, Artificial Sequence
  Description of Artificial Sequence: Synthetic oligonucleotide
uucucuuauuccuuuauca

SEQ ID NO: 19000 - RNA, 19 nt, Artificial Sequence
  Description of Artificial Sequence: Synthetic oligonucleotide
uuuccugaacauacaguca

SEQ ID NO: 19001 - RNA, 19 nt, Artificial Sequence
  Description of Artificial Sequence: Synthetic oligonucleotide
uuuggagcuauggaguuac

SEQ ID NO: 19002 - RNA, 19 nt, Artificial Sequence
  Description of Artificial Sequence: Synthetic oligonucleotide
uuuucucacuaugcccucu

SEQ ID NO: 19003 - RNA, 19 nt, Artificial Sequence
  Description of Artificial Sequence: Synthetic oligonucleotide
aacugcacccaggggugua

SEQ ID NO: 19004 - RNA, 19 nt, Artificial Sequence
  Description of Artificial Sequence: Synthetic oligonucleotide
acugcacccagggguguaa

SEQ ID NO: 19005 - RNA, 19 nt, Artificial Sequence
  Description of Artificial Sequence: Synthetic oligonucleotide
caggacacagacugcuuug

SEQ ID NO: 19006 - RNA, 19 nt, Artificial Sequence
  Description of Artificial Sequence: Synthetic oligonucleotide
aaugacaguggagccugug

SEQ ID NO: 19007 - RNA, 19 nt, Artificial Sequence
  Description of Artificial Sequence: Synthetic oligonucleotide
acuucaguguuuuuuccaa

SEQ ID NO: 19008 - RNA, 19 nt, Artificial Sequence
  Description of Artificial Sequence: Synthetic oligonucleotide
ucaggacacagacugcuuu

SEQ ID NO: 19009 - RNA, 19 nt, Artificial Sequence
  Description of Artificial Sequence: Synthetic oligonucleotide
ucaaugacaguggagccug

SEQ ID NO: 19010 - RNA, 19 nt, Artificial Sequence
  Description of Artificial Sequence: Synthetic oligonucleotide
uucaaugacaguggagccu

SEQ ID NO: 19011 - RNA, 19 nt, Artificial Sequence
  Description of Artificial Sequence: Synthetic oligonucleotide
gaacugcacccaggggugu

SEQ ID NO: 19012 - RNA, 19 nt, Artificial Sequence
  Description of Artificial Sequence: Synthetic oligonucleotide
cccugaaggaaauuagugc

SEQ ID NO: 19013 - RNA, 19 nt, Artificial Sequence
  Description of Artificial Sequence: Synthetic oligonucleotide
ugauaacccugauuacugg

SEQ ID NO: 19014 - RNA, 19 nt, Artificial Sequence
  Description of Artificial Sequence: Synthetic oligonucleotide
aguguuggaugauugauga

SEQ ID NO: 19015 - RNA, 19 nt, Artificial Sequence
  Description of Artificial Sequence: Synthetic oligonucleotide
acagcugcugcucaacugg

SEQ ID NO: 19016 - RNA, 19 nt, Artificial Sequence
  Description of Artificial Sequence: Synthetic oligonucleotide
cccauaacuuuguggugga

SEQ ID NO: 19017 - RNA, 19 nt, Artificial Sequence
  Description of Artificial Sequence: Synthetic oligonucleotide
cauaacuuugugguggauc

SEQ ID NO: 19018 - RNA, 19 nt, Artificial Sequence
  Description of Artificial Sequence: Synthetic oligonucleotide
cgagaagugacaggcuaug

SEQ ID NO: 19019 - RNA, 19 nt, Artificial Sequence
  Description of Artificial Sequence: Synthetic oligonucleotide
cugcacccagggguguaaa

SEQ ID NO: 19020 - RNA, 19 nt, Artificial Sequence
  Description of Artificial Sequence: Synthetic oligonucleotide
cuucaguguuuuuuccaau

SEQ ID NO: 19021 - RNA, 19 nt, Artificial Sequence
  Description of Artificial Sequence: Synthetic oligonucleotide
gcacccagggguguaaagg

SEQ ID NO: 19022 - RNA, 19 nt, Artificial Sequence
  Description of Artificial Sequence: Synthetic oligonucleotide
gugccgggggcugcucagg

SEQ ID NO: 19023 - RNA, 19 nt, Artificial Sequence
  Description of Artificial Sequence: Synthetic oligonucleotide
ucgagaagugacaggcuau

SEQ ID NO: 19024 - RNA, 19 nt, Artificial Sequence
  Description of Artificial Sequence: Synthetic oligonucleotide
uuccgaucccugaaggaaa

SEQ ID NO: 19025 - RNA, 19 nt, Artificial Sequence
  Description of Artificial Sequence: Synthetic oligonucleotide
cuuuuuuuuuuuuuuuuuu

SEQ ID NO: 19026 - RNA, 19 nt, Artificial Sequence
  Description of Artificial Sequence: Synthetic oligonucleotide
uuuuuuuuuuuuuuuaaag

SEQ ID NO: 19027 - RNA, 19 nt, Artificial Sequence
  Description of Artificial Sequence: Synthetic oligonucleotide
uuuuuuuuuuuuuuuuaaa

SEQ ID NO: 19028 - RNA, 19 nt, Artificial Sequence
  Description of Artificial Sequence: Synthetic oligonucleotide
uuuuuuuuuuuuuuuuuaa

SEQ ID NO: 19029 - RNA, 19 nt, Artificial Sequence
  Description of Artificial Sequence: Synthetic oligonucleotide
uuuuuuuuuuuuuuuuuua

SEQ ID NO: 19030 - RNA, 19 nt, Artificial Sequence
  Description of Artificial Sequence: Synthetic oligonucleotide
cccucaggacacagacugc

SEQ ID NO: 19031 - RNA, 19 nt, Artificial Sequence
  Description of Artificial Sequence: Synthetic oligonucleotide
agauggaaguagauaaaaa

SEQ ID NO: 19032 - RNA, 19 nt, Artificial Sequence
  Description of Artificial Sequence: Synthetic oligonucleotide
aggcccucaggacacagac

SEQ ID NO: 19033 - RNA, 19 nt, Artificial Sequence
  Description of Artificial Sequence: Synthetic oligonucleotide
auggaaguagauaaaaaug

SEQ ID NO: 19034 - RNA, 19 nt, Artificial Sequence
  Description of Artificial Sequence: Synthetic oligonucleotide
cuguccccauaacuuugug

SEQ ID NO: 19035 - RNA, 19 nt, Artificial Sequence
  Description of Artificial Sequence: Synthetic oligonucleotide
cagguuaccugaacaucca

SEQ ID NO: 19036 - RNA, 19 nt, Artificial Sequence
  Description of Artificial Sequence: Synthetic oligonucleotide
cugaacauccaguccuggc

SEQ ID NO: 19037 - RNA, 19 nt, Artificial Sequence
  Description of Artificial Sequence: Synthetic oligonucleotide
gcccucaggacacagacug

SEQ ID NO: 19038 - RNA, 19 nt, Artificial Sequence
  Description of Artificial Sequence: Synthetic oligonucleotide
auucgagaagugacaggcu

SEQ ID NO: 19039 - RNA, 19 nt, Artificial Sequence
  Description of Artificial Sequence: Synthetic oligonucleotide
guuaccugaacauccaguc

SEQ ID NO: 19040 - RNA, 19 nt, Artificial Sequence
  Description of Artificial Sequence: Synthetic oligonucleotide
ugcucaggcccucaggaca

SEQ ID NO: 19041 - RNA, 19 nt, Artificial Sequence
  Description of Artificial Sequence: Synthetic oligonucleotide
cuucaaugacaguggagcc

SEQ ID NO: 19042 - RNA, 19 nt, Artificial Sequence
  Description of Artificial Sequence: Synthetic oligonucleotide
agugugccgggggcugcuc

SEQ ID NO: 19043 - RNA, 19 nt, Artificial Sequence
  Description of Artificial Sequence: Synthetic oligonucleotide
auaacccugauuacuggca

SEQ ID NO: 19044 - RNA, 19 nt, Artificial Sequence
  Description of Artificial Sequence: Synthetic oligonucleotide
gaucccugaaggaaauuag

SEQ ID NO: 19045 - RNA, 19 nt, Artificial Sequence
  Description of Artificial Sequence: Synthetic oligonucleotide
aguguaauggucacugcuu

SEQ ID NO: 19046 - RNA, 19 nt, Artificial Sequence
  Description of Artificial Sequence: Synthetic oligonucleotide
gugugccgggggcugcuca

SEQ ID NO: 19047 - RNA, 19 nt, Artificial Sequence
  Description of Artificial Sequence: Synthetic oligonucleotide
agaacugcacccaggggug

SEQ ID NO: 19048 - RNA, 19 nt, Artificial Sequence
  Description of Artificial Sequence: Synthetic oligonucleotide
cagagaagcucaaugucuu

SEQ ID NO: 19049 - RNA, 19 nt, Artificial Sequence
  Description of Artificial Sequence: Synthetic oligonucleotide
ccgaucccugaaggaaauu

SEQ ID NO: 19050 - RNA, 19 nt, Artificial Sequence
  Description of Artificial Sequence: Synthetic oligonucleotide
cccuggacccagagaagcu

SEQ ID NO: 19051 - RNA, 19 nt, Artificial Sequence
  Description of Artificial Sequence: Synthetic oligonucleotide
cccagagaagcucaauguc

SEQ ID NO: 19052 - RNA, 19 nt, Artificial Sequence
  Description of Artificial Sequence: Synthetic oligonucleotide
ccugaaggaaauuagugcu

SEQ ID NO: 19053 - RNA, 19 nt, Artificial Sequence
  Description of Artificial Sequence: Synthetic oligonucleotide
cuuggcucgggugucuuug

SEQ ID NO: 19054 - RNA, 19 nt, Artificial Sequence
  Description of Artificial Sequence: Synthetic oligonucleotide
gagugugccgggggcugcu

SEQ ID NO: 19055 - RNA, 19 nt, Artificial Sequence
  Description of Artificial Sequence: Synthetic oligonucleotide
gacccagagaagcucaaug

SEQ ID NO: 19056 - RNA, 19 nt, Artificial Sequence
  Description of Artificial Sequence: Synthetic oligonucleotide
gcccuggacccagagaagc

SEQ ID NO: 19057 - RNA, 19 nt, Artificial Sequence
  Description of Artificial Sequence: Synthetic oligonucleotide
gccuuugauaacccugauu

SEQ ID NO: 19058 - RNA, 19 nt, Artificial Sequence
  Description of Artificial Sequence: Synthetic oligonucleotide
gcucgggugucuuuggaac

SEQ ID NO: 19059 - RNA, 19 nt, Artificial Sequence
  Description of Artificial Sequence: Synthetic oligonucleotide
ggcucgggugucuuuggaa

SEQ ID NO: 19060 - RNA, 19 nt, Artificial Sequence
  Description of Artificial Sequence: Synthetic oligonucleotide
aucccugaaggaaauuagu

SEQ ID NO: 19061 - RNA, 19 nt, Artificial Sequence
  Description of Artificial Sequence: Synthetic oligonucleotide
cuuugauaacccugauuac

SEQ ID NO: 19062 - RNA, 19 nt, Artificial Sequence
  Description of Artificial Sequence: Synthetic oligonucleotide
ucaguguuuuuuccaauuu

SEQ ID NO: 19063 - RNA, 19 nt, Artificial Sequence
  Description of Artificial Sequence: Synthetic oligonucleotide
uggcucgggugucuuugga

SEQ ID NO: 19064 - RNA, 19 nt, Artificial Sequence
  Description of Artificial Sequence: Synthetic oligonucleotide
ucccucaaggagauaagug

SEQ ID NO: 19065 - RNA, 19 nt, Artificial Sequence
  Description of Artificial Sequence: Synthetic oligonucleotide
ccucagccacccauaugua

SEQ ID NO: 19066 - RNA, 19 nt, Artificial Sequence
  Description of Artificial Sequence: Synthetic oligonucleotide
acuuuuuuuguuuuguuuu

SEQ ID NO: 19067 - RNA, 19 nt, Artificial Sequence
  Description of Artificial Sequence: Synthetic oligonucleotide
aaaugggcucaagaugugu

SEQ ID NO: 19068 - RNA, 19 nt, Artificial Sequence
  Description of Artificial Sequence: Synthetic oligonucleotide
aauuaaguggauggcccuu

SEQ ID NO: 19069 - RNA, 19 nt, Artificial Sequence
  Description of Artificial Sequence: Synthetic oligonucleotide
acauccaguccuggccgcc

SEQ ID NO: 19070 - RNA, 19 nt, Artificial Sequence
  Description of Artificial Sequence: Synthetic oligonucleotide
acccagggguguaaaggac

SEQ ID NO: 19071 - RNA, 19 nt, Artificial Sequence
  Description of Artificial Sequence: Synthetic oligonucleotide
gggcugcucaggcccucag

SEQ ID NO: 19072 - RNA, 19 nt, Artificial Sequence
  Description of Artificial Sequence: Synthetic oligonucleotide
guguuggaugauugaugag

SEQ ID NO: 19073 - RNA, 19 nt, Artificial Sequence
  Description of Artificial Sequence: Synthetic oligonucleotide
cucaaugucuuccggacag

SEQ ID NO: 19074 - RNA, 19 nt, Artificial Sequence
  Description of Artificial Sequence: Synthetic oligonucleotide
cugucucuacuaaaaauac

SEQ ID NO: 19075 - RNA, 19 nt, Artificial Sequence
  Description of Artificial Sequence: Synthetic oligonucleotide
ggggcugcucaggcccuca

SEQ ID NO: 19076 - RNA, 19 nt, Artificial Sequence
  Description of Artificial Sequence: Synthetic oligonucleotide
gccaugagaacugcaccca

SEQ ID NO: 19077 - RNA, 19 nt, Artificial Sequence
  Description of Artificial Sequence: Synthetic oligonucleotide
gccgggggcugcucaggcc

SEQ ID NO: 19078 - RNA, 19 nt, Artificial Sequence
  Description of Artificial Sequence: Synthetic oligonucleotide
cuuccgaucccugaaggaa

SEQ ID NO: 19079 - RNA, 19 nt, Artificial Sequence
  Description of Artificial Sequence: Synthetic oligonucleotide
ucacuuaguccuuuaucau

SEQ ID NO: 19080 - RNA, 19 nt, Artificial Sequence
  Description of Artificial Sequence: Synthetic oligonucleotide
ucaaugucuuccggacagu

SEQ ID NO: 19081 - RNA, 19 nt, Artificial Sequence
  Description of Artificial Sequence: Synthetic oligonucleotide
cuccaauuaaguggauggc

SEQ ID NO: 19082 - RNA, 19 nt, Artificial Sequence
  Description of Artificial Sequence: Synthetic oligonucleotide
ugccaugagaacugcaccc

SEQ ID NO: 19083 - RNA, 19 nt, Artificial Sequence
  Description of Artificial Sequence: Synthetic oligonucleotide
cgggggcugcucaggcccu

SEQ ID NO: 19084 - RNA, 19 nt, Artificial Sequence
  Description of Artificial Sequence: Synthetic oligonucleotide
ccguggagaaccccgagua

SEQ ID NO: 19085 - RNA, 19 nt, Artificial Sequence
  Description of Artificial Sequence: Synthetic oligonucleotide
gagaaugugaaaauuccag

SEQ ID NO: 19086 - RNA, 19 nt, Artificial Sequence
  Description of Artificial Sequence: Synthetic oligonucleotide
gccguggagaaccccgagu

SEQ ID NO: 19087 - RNA, 19 nt, Artificial Sequence
  Description of Artificial Sequence: Synthetic oligonucleotide
caucugccucaccuccacc

SEQ ID NO: 19088 - RNA, 19 nt, Artificial Sequence
  Description of Artificial Sequence: Synthetic oligonucleotide
cgaauucuccaaaauggcc

SEQ ID NO: 19089 - RNA, 19 nt, Artificial Sequence
  Description of Artificial Sequence: Synthetic oligonucleotide
ucugccucaccuccaccgu

SEQ ID NO: 19090 - RNA, 19 nt, Artificial Sequence
  Description of Artificial Sequence: Synthetic oligonucleotide
uucuuuuuuuuuuuuuuuu

SEQ ID NO: 19091 - RNA, 19 nt, Artificial Sequence
  Description of Artificial Sequence: Synthetic oligonucleotide
uccuccugccuacaccccc

SEQ ID NO: 19092 - RNA, 19 nt, Artificial Sequence
  Description of Artificial Sequence: Synthetic oligonucleotide
uuuuuuuuuuuuuuaaagc

SEQ ID NO: 19093 - RNA, 19 nt, Artificial Sequence
  Description of Artificial Sequence: Synthetic oligonucleotide
uuuuuuuuuuuaaagcaga

SEQ ID NO: 19094 - RNA, 19 nt, Artificial Sequence
  Description of Artificial Sequence: Synthetic oligonucleotide
uuuuuuuuuuuuaaagcag

SEQ ID NO: 19095 - RNA, 19 nt, Artificial Sequence
  Description of Artificial Sequence: Synthetic oligonucleotide
aaaaaaaaaaaaaaaaaaa

SEQ ID NO: 19096 - RNA, 19 nt, Artificial Sequence
  Description of Artificial Sequence: Synthetic oligonucleotide
uaaaaaaaaaaaaaaaaaa

SEQ ID NO: 19097 - RNA, 19 nt, Artificial Sequence
  Description of Artificial Sequence: Synthetic oligonucleotide
aagaugaugaggaugaaaa

SEQ ID NO: 19098 - RNA, 19 nt, Artificial Sequence
  Description of Artificial Sequence: Synthetic oligonucleotide
gaagaugaugaggaugaaa

SEQ ID NO: 19099 - RNA, 19 nt, Artificial Sequence
  Description of Artificial Sequence: Synthetic oligonucleotide
auguuuuagaaggaaaaaa

SEQ ID NO: 19100 - RNA, 19 nt, Artificial Sequence
  Description of Artificial Sequence: Synthetic oligonucleotide
gugaaugaacaaaugaaua

SEQ ID NO: 19101 - RNA, 19 nt, Artificial Sequence
  Description of Artificial Sequence: Synthetic oligonucleotide
aaauacacacaccagagug

SEQ ID NO: 19102 - RNA, 19 nt, Artificial Sequence
  Description of Artificial Sequence: Synthetic oligonucleotide
aaguagauaaaaaugggcu

SEQ ID NO: 19103 - RNA, 19 nt, Artificial Sequence
  Description of Artificial Sequence: Synthetic oligonucleotide
aauacacacaccagaguga

SEQ ID NO: 19104 - RNA, 19 nt, Artificial Sequence
  Description of Artificial Sequence: Synthetic oligonucleotide
agacuguggacucgagcaa

SEQ ID NO: 19105 - RNA, 19 nt, Artificial Sequence
  Description of Artificial Sequence: Synthetic oligonucleotide
aguggagccuguguaccuc

SEQ ID NO: 19106 - RNA, 19 nt, Artificial Sequence
  Description of Artificial Sequence: Synthetic oligonucleotide
caguggagccuguguaccu

SEQ ID NO: 19107 - RNA, 19 nt, Artificial Sequence
  Description of Artificial Sequence: Synthetic oligonucleotide
acaagauggaaguagauaa

SEQ ID NO: 19108 - RNA, 19 nt, Artificial Sequence
  Description of Artificial Sequence: Synthetic oligonucleotide
ccucuccuuccugcagugg

SEQ ID NO: 19109 - RNA, 19 nt, Artificial Sequence
  Description of Artificial Sequence: Synthetic oligonucleotide
cucaggcaguguguccugg

SEQ ID NO: 19110 - RNA, 19 nt, Artificial Sequence
  Description of Artificial Sequence: Synthetic oligonucleotide
acaacuucaguguuuuuuc

SEQ ID NO: 19111 - RNA, 19 nt, Artificial Sequence
  Description of Artificial Sequence: Synthetic oligonucleotide
cuguggacucgagcaacau

SEQ ID NO: 19112 - RNA, 19 nt, Artificial Sequence
  Description of Artificial Sequence: Synthetic oligonucleotide
gagguggugauggggaacc

SEQ ID NO: 19113 - RNA, 19 nt, Artificial Sequence
  Description of Artificial Sequence: Synthetic oligonucleotide
gugauggggaaccuugaga

SEQ ID NO: 19114 - RNA, 19 nt, Artificial Sequence
  Description of Artificial Sequence: Synthetic oligonucleotide
guggacucgagcaacauug

SEQ ID NO: 19115 - RNA, 19 nt, Artificial Sequence
  Description of Artificial Sequence: Synthetic oligonucleotide
cugacaagauggaaguaga

SEQ ID NO: 19116 - RNA, 19 nt, Artificial Sequence
  Description of Artificial Sequence: Synthetic oligonucleotide
ucucaggcaguguguccug

SEQ ID NO: 19117 - RNA, 19 nt, Artificial Sequence
  Description of Artificial Sequence: Synthetic oligonucleotide
ggcacuucaaugacagugg

SEQ ID NO: 19118 - RNA, 19 nt, Artificial Sequence
  Description of Artificial Sequence: Synthetic oligonucleotide
ugagguggugauggggaac

SEQ ID NO: 19119 - RNA, 19 nt, Artificial Sequence
  Description of Artificial Sequence: Synthetic oligonucleotide
uggaugauugaugagaaca

SEQ ID NO: 19120 - RNA, 19 nt, Artificial Sequence
  Description of Artificial Sequence: Synthetic oligonucleotide
ugacaagauggaaguagau

SEQ ID NO: 19121 - RNA, 19 nt, Artificial Sequence
  Description of Artificial Sequence: Synthetic oligonucleotide
uuggaugauugaugagaac

SEQ ID NO: 19122 - RNA, 19 nt, Artificial Sequence
  Description of Artificial Sequence: Synthetic oligonucleotide
uuaccugaacauccagucc

SEQ ID NO: 19123 - RNA, 19 nt, Artificial Sequence
  Description of Artificial Sequence: Synthetic oligonucleotide
ucuucucccuauucccucu

SEQ ID NO: 19124 - DNA, 21 bp, Artificial Sequence
  Description of Artificial Sequence: Synthetic oligonucleotide
  Description of Combined DNA/RNA Molecule: Synthetic oligonucleotide
cuacacaaaucagcgauuutt

SEQ ID NO: 19125 - DNA, 21 bp, Artificial Sequence
  Description of Artificial Sequence: Synthetic oligonucleotide
  Description of Combined DNA/RNA Molecule: Synthetic oligonucleotide
aaaucgcugauuuguguagtt

SEQ ID NO: 19126 - DNA, 25 bp, Artificial Sequence
  Description of Artificial Sequence: Synthetic oligonucleotide
  Description of Combined DNA/RNA Molecule: Synthetic oligonucleotide
cuacacaaaucagcgauuuccaugt

SEQ ID NO: 19127 - RNA, 27 nt, Artificial Sequence
  Description of Artificial Sequence: Synthetic oligonucleotide
acauggaaaucgcugauuuguguaguc

SEQ ID NO: 19128 - RNA, 13 nt, Artificial Sequence
  Description of Artificial Sequence: Synthetic oligonucleotide
cuacacaaaucag

SEQ ID NO: 19129 - DNA, 11 bp, Artificial Sequence
  Description of Artificial Sequence: Synthetic oligonucleotide
  Description of Combined DNA/RNA Molecule: Synthetic oligonucleotide
gauuuccaugt

SEQ ID NO: 19130 - DNA, 21 bp, Artificial Sequence
  Description of Artificial Sequence: Synthetic oligonucleotide
  Description of Combined DNA/RNA Molecule: Synthetic oligonucleotide
ggaucuuauuucuucggagtt

SEQ ID NO: 19131 - DNA, 21 bp, Artificial Sequence
  Description of Artificial Sequence: Synthetic oligonucleotide
  Description of Combined DNA/RNA Molecule: Synthetic oligonucleotide
cuccgaagaaauaagaucctt

SEQ ID NO: 19132 - RNA, 11 nt, Artificial Sequence
  Description of Artificial Sequence: Synthetic oligonucleotide
ggaucuuauuu

SEQ ID NO: 19133 - DNA, 10 bp, Artificial Sequence
  Description of Artificial Sequence: Synthetic oligonucleotide
  Description of Combined DNA/RNA Molecule: Synthetic oligonucleotide
cuucggagtt

SEQ ID NO: 19134 - RNA, 27 nt, Artificial Sequence
  Description of Artificial Sequence: Synthetic oligonucleotide
cauugucuccgaagaaauaagauccuu

SEQ ID NO: 19135 - RNA, 8 nt, Artificial Sequence
  Description of Artificial Sequence: Synthetic oligonucleotide
  modified_base (2): LNA-G
ggaucuua

SEQ ID NO: 19136 - DNA, 17 bp, Artificial Sequence
  Description of Artificial Sequence: Synthetic oligonucleotide
  Description of Combined DNA/RNA Molecule: Synthetic oligonucleotide
uuucuucggagacaatg

SEQ ID NO: 19137 - DNA, 16 bp, Artificial Sequence
  Description of Artificial Sequence: Synthetic oligonucleotide
  Description of Combined DNA/RNA Molecule: Synthetic oligonucleotide
uucuucggagacaatg

SEQ ID NO: 19138 - DNA, 15 bp, Artificial Sequence
  Description of Artificial Sequence: Synthetic oligonucleotide
  Description of Combined DNA/RNA Molecule: Synthetic oligonucleotide
ucuucggagacaatg

SEQ ID NO: 19139 - DNA, 14 bp, Artificial Sequence
  Description of Artificial Sequence: Synthetic oligonucleotide
  Description of Combined DNA/RNA Molecule: Synthetic oligonucleotide
cuucggagacaatg

SEQ ID NO: 19140 - DNA, 13 bp, Artificial Sequence
  Description of Artificial Sequence: Synthetic oligonucleotide
  Description of Combined DNA/RNA Molecule: Synthetic oligonucleotide
uucggagacaatg

SEQ ID NO: 19141 - DNA, 12 bp, Artificial Sequence
  Description of Artificial Sequence: Synthetic oligonucleotide
  Description of Combined DNA/RNA Molecule: Synthetic oligonucleotide
ucggagacaatg

SEQ ID NO: 19142 - DNA, 11 bp, Artificial Sequence
  Description of Artificial Sequence: Synthetic oligonucleotide
  Description of Combined DNA/RNA Molecule: Synthetic oligonucleotide
cggagacaatg

SEQ ID NO: 19143 - RNA, 9 nt, Artificial Sequence
  Description of Artificial Sequence: Synthetic oligonucleotide
  modified_base (2): LNA-G
ggaucuuau

SEQ ID NO: 19144 - RNA, 10 nt, Artificial Sequence
  Description of Artificial Sequence: Synthetic oligonucleotide
  modified_base (2): LNA-G
ggaucuuauu

SEQ ID NO: 19145 - RNA, 11 nt, Artificial Sequence
  Description of Artificial Sequence: Synthetic oligonucleotide
  modified_base (2): LNA-G
ggaucuuauuu

SEQ ID NO: 19146 - RNA, 12 nt, Artificial Sequence
  Description of Artificial Sequence: Synthetic oligonucleotide
  modified_base (2): LNA-G
ggaucuuauuuc

SEQ ID NO: 19147 - RNA, 8 nt, Artificial Sequence
  Description of Artificial Sequence: Synthetic oligonucleotide
  modified_base (3): LNA-A
cuacacaa

SEQ ID NO: 19148 - DNA, 13 bp, Artificial Sequence
  Description of Artificial Sequence: Synthetic oligonucleotide
  Description of Combined DNA/RNA Molecule: Synthetic oligonucleotide
  modified_base (8): LNA-A
aucagcgauuutt

SEQ ID NO: 19149 - DNA, 12 bp, Artificial Sequence
  Description of Artificial Sequence: Synthetic oligonucleotide
  Description of Combined DNA/RNA Molecule: Synthetic oligonucleotide
  modified_base (7): LNA-A
ucagcgauuutt

SEQ ID NO: 19150 - DNA, 11 bp, Artificial Sequence
  Description of Artificial Sequence: Synthetic oligonucleotide
  Description of Combined DNA/RNA Molecule: Synthetic oligonucleotide
  modified_base (6): LNA-A
cagcgauuutt

SEQ ID NO: 19151 - DNA, 10 bp, Artificial Sequence
  Description of Artificial Sequence: Synthetic oligonucleotide
  Description of Combined DNA/RNA Molecule: Synthetic oligonucleotide
  modified_base (5): LNA-A
agcgauuutt

SEQ ID NO: 19152 - DNA, 9 bp, Artificial Sequence
  Description of Artificial Sequence: Synthetic oligonucleotide
  Description of Combined DNA/RNA Molecule: Synthetic oligonucleotide
  modified_base (4): LNA-A
gcgauuutt

SEQ ID NO: 19153 - DNA, 8 bp, Artificial Sequence
  Description of Artificial Sequence: Synthetic oligonucleotide
  Description of Combined DNA/RNA Molecule: Synthetic oligonucleotide
  modified_base (3): LNA-A
cgauuutt

SEQ ID NO: 19154 - DNA, 7 bp, Artificial Sequence
  Description of Artificial Sequence: Synthetic oligonucleotide
  Description of Combined DNA/RNA Molecule: Synthetic oligonucleotide
  modified_base (2): LNA-A
gauuutt

SEQ ID NO: 19155 - RNA, 9 nt, Artificial Sequence
  Description of Artificial Sequence: Synthetic oligonucleotide
  modified_base (3): LNA-A
cuacacaaa

SEQ ID NO: 19156 - RNA, 10 nt, Artificial Sequence
  Description of Artificial Sequence: Synthetic oligonucleotide
  modified_base (3): LNA-A
cuacacaaau

SEQ ID NO: 19157 - RNA, 11 nt, Artificial Sequence
  Description of Artificial Sequence: Synthetic oligonucleotide
  modified_base (3): LNA-A
cuacacaaauc

SEQ ID NO: 19158 - RNA, 12 nt, Artificial Sequence
  Description of Artificial Sequence: Synthetic oligonucleotide
  modified_base (3): LNA-A
cuacacaaauca

SEQ ID NO: 19159 - RNA, 13 nt, Artificial Sequence
  Description of Artificial Sequence: Synthetic oligonucleotide
  modified_base (3): LNA-A
cuacacaaaucag

SEQ ID NO: 19160 - RNA, 14 nt, Artificial Sequence
  Description of Artificial Sequence: Synthetic oligonucleotide
  modified_base (3): LNA-A
cuacacaaaucagc

SEQ ID NO: 19161 - RNA, 13 nt, Artificial Sequence
  Description of Artificial Sequence: Synthetic oligonucleotide
  modified_base (2): LNA-G
ggaucuuauuucu

SEQ ID NO: 19162 - RNA, 14 nt, Artificial Sequence
  Description of Artificial Sequence: Synthetic oligonucleotide
  modified_base (2): LNA-G
ggaucuuauuucuu

SEQ ID NO: 19163 - RNA, 8 nt, Artificial Sequence
  Description of Artificial Sequence: Synthetic oligonucleotide
  modified_base (2): LNA-G
  modified_base (8): LNA-A
ggaucuua

SEQ ID NO: 19164 - RNA, 9 nt, Artificial Sequence
  Description of Artificial Sequence: Synthetic oligonucleotide
  modified_base (2): LNA-G
  modified_base (9): LNA-U
ggaucuuau

SEQ ID NO: 19165 - RNA, 10 nt, Artificial Sequence
  Description of Artificial Sequence: Synthetic oligonucleotide
  modified_base (2): LNA-G
  modified_base (10): LNA-U
ggaucuuauu

SEQ ID NO: 19166 - RNA, 11 nt, Artificial Sequence
  Description of Artificial Sequence: Synthetic oligonucleotide
  modified_base (2): LNA-G
  modified_base (11): LNA-U
ggaucuuauuu

SEQ ID NO: 19167 - RNA, 12 nt, Artificial Sequence
  Description of Artificial Sequence: Synthetic oligonucleotide
  modified_base (2): LNA-G
  modified_base (12): LNA-C
ggaucuuauuuc

SEQ ID NO: 19168 - RNA, 13 nt, Artificial Sequence
  Description of Artificial Sequence: Synthetic oligonucleotide
  modified_base (2): LNA-G
  modified_base (13): LNA-U
ggaucuuauuucu

SEQ ID NO: 19169 - RNA, 14 nt, Artificial Sequence
  Description of Artificial Sequence: Synthetic oligonucleotide
  modified_base (2): LNA-G
  modified_base (14): LNA-U
ggaucuuauuucuu

SEQ ID NO: 19170 - DNA, 13 bp, Artificial Sequence
  Description of Artificial Sequence: Synthetic oligonucleotide
  Description of Combined DNA/RNA Molecule: Synthetic oligonucleotide
  modified_base (8): LNA-G
uuucuucggagtt

SEQ ID NO: 19171 - DNA, 12 bp, Artificial Sequence
  Description of Artificial Sequence: Synthetic oligonucleotide
  Description of Combined DNA/RNA Molecule: Synthetic oligonucleotide
  modified_base (7): LNA-G
uucuucggagtt

SEQ ID NO: 19172 - DNA, 11 bp, Artificial Sequence
  Description of Artificial Sequence: Synthetic oligonucleotide
  Description of Combined DNA/RNA Molecule: Synthetic oligonucleotide
  modified_base (6): LNA-G
ucuucggagtt

SEQ ID NO: 19173 - DNA, 10 bp, Artificial Sequence
  Description of Artificial Sequence: Synthetic oligonucleotide
  Description of Combined DNA/RNA Molecule: Synthetic oligonucleotide
  modified_base (5): LNA-G
cuucggagtt

SEQ ID NO: 19174 - DNA, 9 bp, Artificial Sequence
  Description of Artificial Sequence: Synthetic oligonucleotide
  Description of Combined DNA/RNA Molecule: Synthetic oligonucleotide
  modified_base (4): LNA-G
uucggagtt

SEQ ID NO: 19175 - DNA, 8 bp, Artificial Sequence
  Description of Artificial Sequence: Synthetic oligonucleotide
  Description of Combined DNA/RNA Molecule: Synthetic oligonucleotide
  modified_base (3): LNA-G
ucggagtt

SEQ ID NO: 19176 - DNA, 7 bp, Artificial Sequence
  Description of Artificial Sequence: Synthetic oligonucleotide
  Description of Combined DNA/RNA Molecule: Synthetic oligonucleotide
  modified_base (2): LNA-G
cggagtt

SEQ ID NO: 19177 - DNA, 13 bp, Artificial Sequence
  Description of Artificial Sequence: Synthetic oligonucleotide
  Description of Combined DNA/RNA Molecule: Synthetic oligonucleotide
  modified_base (1): LNA-U
  modified_base (8): LNA-G
uuucuucggagtt

SEQ ID NO: 19178 - DNA, 12 bp, Artificial Sequence
  Description of Artificial Sequence: Synthetic oligonucleotide
  Description of Combined DNA/RNA Molecule: Synthetic oligonucleotide
  modified_base (1): LNA-U
  modified_base (7): LNA-G
uucuucggagtt

SEQ ID NO: 19179 - DNA, 11 bp, Artificial Sequence
  Description of Artificial Sequence: Synthetic oligonucleotide
  Description of Combined DNA/RNA Molecule: Synthetic oligonucleotide
  modified_base (1): LNA-U
  modified_base (6): LNA-G
ucuucggagtt

SEQ ID NO: 19180 - DNA, 10 bp, Artificial Sequence
  Description of Artificial Sequence: Synthetic oligonucleotide
  Description of Combined DNA/RNA Molecule: Synthetic oligonucleotide
  modified_base (1): LNA-C
  modified_base (5): LNA-G
cuucggagtt

SEQ ID NO: 19181 - DNA, 9 bp, Artificial Sequence
  Description of Artificial Sequence: Synthetic oligonucleotide
  Description of Combined DNA/RNA Molecule: Synthetic oligonucleotide
  modified_base (1): LNA-U
  modified_base (4): LNA-G
uucggagtt

SEQ ID NO: 19182 - DNA, 8 bp, Artificial Sequence
  Description of Artificial Sequence: Synthetic oligonucleotide
  Description of Combined DNA/RNA Molecule: Synthetic oligonucleotide
  modified_base (1): LNA-U
  modified_base (3): LNA-G
ucggagtt

SEQ ID NO: 19183 - DNA, 7 bp, Artificial Sequence
  Description of Artificial Sequence: Synthetic oligonucleotide
  Description of Combined DNA/RNA Molecule: Synthetic oligonucleotide
  modified_base (1): LNA-C
  modified_base (2): LNA-G
cggagtt

SEQ ID NO: 19184 - DNA, 21 bp, Artificial Sequence
  Description of Artificial Sequence: Synthetic oligonucleotide
  Description of Combined DNA/RNA Molecule: Synthetic oligonucleotide
  modified_base (2): LNA-G
  modified_base (16): LNA-G
ggaucuuauuucuucggagtt

SEQ ID NO: 19185 - DNA, 25 bp, Artificial Sequence
  Description of Artificial Sequence: Synthetic oligonucleotide
  Description of Combined DNA/RNA Molecule: Synthetic oligonucleotide
ggaucuuauuucuucggagacaatg

SEQ ID NO: 19186 - RNA, 25 nt, Artificial Sequence
  Description of Artificial Sequence: Synthetic oligonucleotide
uuaagcagaguucaaaagcccuuca

SEQ ID NO: 19187 - RNA, 25 nt, Artificial Sequence
  Description of Artificial Sequence: Synthetic oligonucleotide
uaagcagaguucaaaagcccuucag

SEQ ID NO: 19188 - RNA, 25 nt, Artificial Sequence
  Description of Artificial Sequence: Synthetic oligonucleotide
agcagaguucaaaagcccuucagcg

SEQ ID NO: 19189 - RNA, 25 nt, Artificial Sequence
  Description of Artificial Sequence: Synthetic oligonucleotide
cucagggucugagugaagccgcucg

SEQ ID NO: 19190 - RNA, 25 nt, Artificial Sequence
  Description of Artificial Sequence: Synthetic oligonucleotide
caagcaacuacaucacgccagucaa

SEQ ID NO: 19191 - RNA, 25 nt, Artificial Sequence
  Description of Artificial Sequence: Synthetic oligonucleotide
aucaauggcagcuucuuggugcgug

SEQ ID NO: 19192 - RNA, 25 nt, Artificial Sequence
  Description of Artificial Sequence: Synthetic oligonucleotide
uuccagcccacauuggauucaucag

SEQ ID NO: 19193 - RNA, 25 nt, Artificial Sequence
  Description of Artificial Sequence: Synthetic oligonucleotide
cagcugagaauguggaauaccuaag

SEQ ID NO: 19194 - RNA, 25 nt, Artificial Sequence
  Description of Artificial Sequence: Synthetic oligonucleotide
aacguaucuccuaauuugaggcuca

SEQ ID NO: 19195 - RNA, 25 nt, Artificial Sequence
  Description of Artificial Sequence: Synthetic oligonucleotide
ccuaaaauaauuucucuacaauugg

SEQ ID NO: 19196 - RNA, 25 nt, Artificial Sequence
  Description of Artificial Sequence: Synthetic oligonucleotide
uggaagauucagcuaguuaggagcc

SEQ ID NO: 19197 - RNA, 25 nt, Artificial Sequence
  Description of Artificial Sequence: Synthetic oligonucleotide
uuaaacucuccuagucaauauccac

SEQ ID NO: 19198 - RNA, 25 nt, Artificial Sequence
  Description of Artificial Sequence: Synthetic oligonucleotide
cagccuacaguuauguucagucaca

SEQ ID NO: 19199 - RNA, 25 nt, Artificial Sequence
  Description of Artificial Sequence: Synthetic oligonucleotide
guuauguucagucacacacacauac

SEQ ID NO: 19200 - RNA, 25 nt, Artificial Sequence
  Description of Artificial Sequence: Synthetic oligonucleotide
cacauacaaaauguuccuuuugcuu

SEQ ID NO: 19201 - RNA, 25 nt, Artificial Sequence
  Description of Artificial Sequence: Synthetic oligonucleotide
uccuuuugcuuuuaaaguaauuuuu

SEQ ID NO: 19202 - RNA, 25 nt, Artificial Sequence
  Description of Artificial Sequence: Synthetic oligonucleotide
ugaccugugaagcaacagucaaugg

SEQ ID NO: 19203 - RNA, 25 nt, Artificial Sequence
  Description of Artificial Sequence: Synthetic oligonucleotide
cuaucucacacaucgacaaaccaau

SEQ ID NO: 19204 - RNA, 25 nt, Artificial Sequence
  Description of Artificial Sequence: Synthetic oligonucleotide
uguccucaauuguacugcuaccacu

SEQ ID NO: 19205 - RNA, 25 nt, Artificial Sequence
  Description of Artificial Sequence: Synthetic oligonucleotide
aaaccguagcuggcaagcggucuua

SEQ ID NO: 19206 - RNA, 25 nt, Artificial Sequence
  Description of Artificial Sequence: Synthetic oligonucleotide
uagcuggcaagcggucuuaccggcu

SEQ ID NO: 19207 - RNA, 25 nt, Artificial Sequence
  Description of Artificial Sequence: Synthetic oligonucleotide
uuguaugguuaaaagauggguuacc

SEQ ID NO: 19208 - RNA, 25 nt, Artificial Sequence
  Description of Artificial Sequence: Synthetic oligonucleotide
ugguuaaaagauggguuaccugcga

SEQ ID NO: 19209 - RNA, 25 nt, Artificial Sequence
  Description of Artificial Sequence: Synthetic oligonucleotide
cagggaauuauacaaucuugcugag

SEQ ID NO: 19210 - RNA, 25 nt, Artificial Sequence
  Description of Artificial Sequence: Synthetic oligonucleotide
acaaucuugcugagcauaaaacagu

SEQ ID NO: 19211 - RNA, 25 nt, Artificial Sequence
  Description of Artificial Sequence: Synthetic oligonucleotide
ccaauaaugaagaguccuuuauccu

SEQ ID NO: 19212 - RNA, 25 nt, Artificial Sequence
  Description of Artificial Sequence: Synthetic oligonucleotide
acuuuggauguuccaacgcaaguug

SEQ ID NO: 19213 - RNA, 25 nt, Artificial Sequence
  Description of Artificial Sequence: Synthetic oligonucleotide
aaugcuuccacuaaacugaaaccau

SEQ ID NO: 19214 - RNA, 25 nt, Artificial Sequence
  Description of Artificial Sequence: Synthetic oligonucleotide
gagaaaguuugacuuuguuaaauau

SEQ ID NO: 19215 - RNA, 25 nt, Artificial Sequence
  Description of Artificial Sequence: Synthetic oligonucleotide
aaagaacuacuguauauuaaaaguu

SEQ ID NO: 19216 - RNA, 25 nt, Artificial Sequence
  Description of Artificial Sequence: Synthetic oligonucleotide
uuagaaauacggguuuugacuuaac

SEQ ID NO: 19217 - RNA, 25 nt, Artificial Sequence
  Description of Artificial Sequence: Synthetic oligonucleotide
aacauggguacagcaaacucagcac

SEQ ID NO: 19218 - RNA, 25 nt, Artificial Sequence
  Description of Artificial Sequence: Synthetic oligonucleotide
aaagacacagaagaugcugaccuca

SEQ ID NO: 19219 - RNA, 25 nt, Artificial Sequence
  Description of Artificial Sequence: Synthetic oligonucleotide
uaguagggagguuuauucagaucgc

SEQ ID NO: 19220 - RNA, 25 nt, Artificial Sequence
  Description of Artificial Sequence: Synthetic oligonucleotide
gccuucugcagcaggguucugggau

SEQ ID NO: 19221 - RNA, 25 nt, Artificial Sequence
  Description of Artificial Sequence: Synthetic oligonucleotide
ggucugguacauauuggaaauuaug

SEQ ID NO: 19222 - RNA, 25 nt, Artificial Sequence
  Description of Artificial Sequence: Synthetic oligonucleotide
cuaguccuuccgauggaagcacuag

SEQ ID NO: 19223 - RNA, 25 nt, Artificial Sequence
  Description of Artificial Sequence: Synthetic oligonucleotide
ccagugaauauuguuuuuaugugga

SEQ ID NO: 19224 - RNA, 25 nt, Artificial Sequence
  Description of Artificial Sequence: Synthetic oligonucleotide
augaauucaaguuggaauugguaga

SEQ ID NO: 19225 - RNA, 25 nt, Artificial Sequence
  Description of Artificial Sequence: Synthetic oligonucleotide
caggacacagauuuagacuuggaga

SEQ ID NO: 19226 - RNA, 25 nt, Artificial Sequence
  Description of Artificial Sequence: Synthetic oligonucleotide
cucaaagcacaguuacaguauucca

SEQ ID NO: 19227 - RNA, 25 nt, Artificial Sequence
  Description of Artificial Sequence: Synthetic oligonucleotide
accacugccaccacugaugaauuaa

SEQ ID NO: 19228 - RNA, 25 nt, Artificial Sequence
  Description of Artificial Sequence: Synthetic oligonucleotide
gaaacuacuagugccacaucaucac

SEQ ID NO: 19229 - RNA, 25 nt, Artificial Sequence
  Description of Artificial Sequence: Synthetic oligonucleotide
aagucggacagccucaccaaacaga

SEQ ID NO: 19230 - RNA, 25 nt, Artificial Sequence
  Description of Artificial Sequence: Synthetic oligonucleotide
gaaagcgaaaaauggaacaugaugg

SEQ ID NO: 19231 - RNA, 25 nt, Artificial Sequence
  Description of Artificial Sequence: Synthetic oligonucleotide
cccucugauuuagcauguagacugc

SEQ ID NO: 19232 - RNA, 25 nt, Artificial Sequence
  Description of Artificial Sequence: Synthetic oligonucleotide
ugagcuauuuaaggaucuauuuaug

SEQ ID NO: 19233 - RNA, 25 nt, Artificial Sequence
  Description of Artificial Sequence: Synthetic oligonucleotide
aaaaggugaaaaagcacuauuauca

SEQ ID NO: 19234 - RNA, 25 nt, Artificial Sequence
  Description of Artificial Sequence: Synthetic oligonucleotide
gaaaaagcacuauuaucaguucugc

SEQ ID NO: 19235 - RNA, 25 nt, Artificial Sequence
  Description of Artificial Sequence: Synthetic oligonucleotide
ggcugaaaagaaagauuaaaccuac

SEQ ID NO: 19236 - RNA, 25 nt, Artificial Sequence
  Description of Artificial Sequence: Synthetic oligonucleotide
uaaacccuuauaauaaaauccuucu

SEQ ID NO: 19237 - RNA, 25 nt, Artificial Sequence
  Description of Artificial Sequence: Synthetic oligonucleotide
cauacuauuagccaaugcuguagac

SEQ ID NO: 19238 - RNA, 25 nt, Artificial Sequence
  Description of Artificial Sequence: Synthetic oligonucleotide
gacagaagcauuuugauaggaauag

SEQ ID NO: 19239 - RNA, 25 nt, Artificial Sequence
  Description of Artificial Sequence: Synthetic oligonucleotide
agagcaaauaagauaauggcccuga

SEQ ID NO: 19240 - RNA, 25 nt, Artificial Sequence
  Description of Artificial Sequence: Synthetic oligonucleotide
ccaacauuuuucucuuccucaagca

SEQ ID NO: 19241 - RNA, 25 nt, Artificial Sequence
  Description of Artificial Sequence: Synthetic oligonucleotide
uuaaguaugagaaaaguucagccca

SEQ ID NO: 19242 - RNA, 25 nt, Artificial Sequence
  Description of Artificial Sequence: Synthetic oligonucleotide
caggaauaaagauggcugcugaacc

SEQ ID NO: 19243 - RNA, 25 nt, Artificial Sequence
  Description of Artificial Sequence: Synthetic oligonucleotide
aauuugaaugaccaaguucucuuca

SEQ ID NO: 19244 - RNA, 25 nt, Artificial Sequence
  Description of Artificial Sequence: Synthetic oligonucleotide
auguauaaagauagccagccuagag

SEQ ID NO: 19245 - RNA, 25 nt, Artificial Sequence
  Description of Artificial Sequence: Synthetic oligonucleotide
ggcuguaacuaucucugugaagugu

SEQ ID NO: 19246 - RNA, 25 nt, Artificial Sequence
  Description of Artificial Sequence: Synthetic oligonucleotide
ucugugaagugugagaaaauuucaa

SEQ ID NO: 19247 - RNA, 25 nt, Artificial Sequence
  Description of Artificial Sequence: Synthetic oligonucleotide
ccuuuaaggaaaugaauccuccuga

SEQ ID NO: 19248 - RNA, 25 nt, Artificial Sequence
  Description of Artificial Sequence: Synthetic oligonucleotide
aaggauacaaaaagugacaucauau

SEQ ID NO: 19249 - RNA, 25 nt, Artificial Sequence
  Description of Artificial Sequence: Synthetic oligonucleotide
agaugcaauuugaaucuucaucaua

SEQ ID NO: 19250 - RNA, 25 nt, Artificial Sequence
  Description of Artificial Sequence: Synthetic oligonucleotide
guucaaaacgaagacuagcuauuaa

SEQ ID NO: 19251 - RNA, 25 nt, Artificial Sequence
  Description of Artificial Sequence: Synthetic oligonucleotide
gugaaaccucaucucuacuaaaaau

SEQ ID NO: 19252 - RNA, 25 nt, Artificial Sequence
  Description of Artificial Sequence: Synthetic oligonucleotide
acgaaagagaagcucuaucucgccu

SEQ ID NO: 19253 - RNA, 25 nt, Artificial Sequence
  Description of Artificial Sequence: Synthetic oligonucleotide
cuccacaagcgccuucgguccaguu

SEQ ID NO: 19254 - RNA, 25 nt, Artificial Sequence
  Description of Artificial Sequence: Synthetic oligonucleotide
gagaagauuccaaagauguagccgc

SEQ ID NO: 19255 - RNA, 25 nt, Artificial Sequence
  Description of Artificial Sequence: Synthetic oligonucleotide
aaucuggauucaaugaggagacuug

SEQ ID NO: 19256 - RNA, 25 nt, Artificial Sequence
  Description of Artificial Sequence: Synthetic oligonucleotide
agaacagauuugagaguagugagga

SEQ ID NO: 19257 - RNA, 25 nt, Artificial Sequence
  Description of Artificial Sequence: Synthetic oligonucleotide
ccagagcugugcagaugaguacaaa

SEQ ID NO: 19258 - RNA, 25 nt, Artificial Sequence
  Description of Artificial Sequence: Synthetic oligonucleotide
ccucagauuguuguuguuaaugggc

SEQ ID NO: 19259 - RNA, 25 nt, Artificial Sequence
  Description of Artificial Sequence: Synthetic oligonucleotide
cuauuuuaauuauuuuuaauuuauu

SEQ ID NO: 19260 - RNA, 25 nt, Artificial Sequence
  Description of Artificial Sequence: Synthetic oligonucleotide
uuuaauuuauuaauauuuaaauaug

SEQ ID NO: 19261 - RNA, 25 nt, Artificial Sequence
  Description of Artificial Sequence: Synthetic oligonucleotide
augcaguuugaauauccuuuguuuc

SEQ ID NO: 19262 - RNA, 25 nt, Artificial Sequence
  Description of Artificial Sequence: Synthetic oligonucleotide
caugcugcuggcgucuaaguguuug

SEQ ID NO: 19263 - RNA, 25 nt, Artificial Sequence
  Description of Artificial Sequence: Synthetic oligonucleotide
agaugugcauuucaccugugacaaa

SEQ ID NO: 19264 - RNA, 25 nt, Artificial Sequence
  Description of Artificial Sequence: Synthetic oligonucleotide
ucaaaaccugugccaggcugaauua

SEQ ID NO: 19265 - RNA, 25 nt, Artificial Sequence
  Description of Artificial Sequence: Synthetic oligonucleotide
gaauguggguagucauucuuacaau

SEQ ID NO: 19266 - RNA, 25 nt, Artificial Sequence
  Description of Artificial Sequence: Synthetic oligonucleotide
auguggguagucauucuuacaauug

SEQ ID NO: 19267 - RNA, 25 nt, Artificial Sequence
  Description of Artificial Sequence: Synthetic oligonucleotide
ugaaaaugagcaucagagaguguac

SEQ ID NO: 19268 - RNA, 25 nt, Artificial Sequence
  Description of Artificial Sequence: Synthetic oligonucleotide
uugcuuuucauguagaacucagcag

SEQ ID NO: 19269 - RNA, 25 nt, Artificial Sequence
  Description of Artificial Sequence: Synthetic oligonucleotide
uguauuucuauauuuauuuucagua

SEQ ID NO: 19270 - RNA, 25 nt, Artificial Sequence
  Description of Artificial Sequence: Synthetic oligonucleotide
uuugauuaauguuucuuaaauggaa

SEQ ID NO: 19271 - RNA, 25 nt, Artificial Sequence
  Description of Artificial Sequence: Synthetic oligonucleotide
caacguguauagugccuaaaauugu

SEQ ID NO: 19272 - RNA, 25 nt, Artificial Sequence
  Description of Artificial Sequence: Synthetic oligonucleotide
cauauccuuggcuacuaacaucugg

SEQ ID NO: 19273 - RNA, 25 nt, Artificial Sequence
  Description of Artificial Sequence: Synthetic oligonucleotide
uacuaacaucuggagacugugagcu

SEQ ID NO: 19274 - RNA, 25 nt, Artificial Sequence
  Description of Artificial Sequence: Synthetic oligonucleotide
cauaaguugugugcuuuuuauuaau

SEQ ID NO: 19275 - RNA, 25 nt, Artificial Sequence
  Description of Artificial Sequence: Synthetic oligonucleotide
gcaucauuuuggcucuucuuacauu

SEQ ID NO: 19276 - RNA, 25 nt, Artificial Sequence
  Description of Artificial Sequence: Synthetic oligonucleotide
gcucuucuuacauuuguaaaaaugu

SEQ ID NO: 19277 - RNA, 25 nt, Artificial Sequence
  Description of Artificial Sequence: Synthetic oligonucleotide
agauuaggucaucuuaauucauauu

SEQ ID NO: 19278 - RNA, 25 nt, Artificial Sequence
  Description of Artificial Sequence: Synthetic oligonucleotide
auggaauugaaagaacuaaucauga

SEQ ID NO: 19279 - RNA, 25 nt, Artificial Sequence
  Description of Artificial Sequence: Synthetic oligonucleotide
cacacucauuccuucugcucuuggg

SEQ ID NO: 19280 - RNA, 25 nt, Artificial Sequence
  Description of Artificial Sequence: Synthetic oligonucleotide
uguagagguaaccaguagcuuugag

SEQ ID NO: 19281 - RNA, 25 nt, Artificial Sequence
  Description of Artificial Sequence: Synthetic oligonucleotide
caaccacaugccacguaauauuuca

SEQ ID NO: 19282 - RNA, 25 nt, Artificial Sequence
  Description of Artificial Sequence: Synthetic oligonucleotide
ucggaaacaaguuauucucuucacu

SEQ ID NO: 19283 - RNA, 25 nt, Artificial Sequence
  Description of Artificial Sequence: Synthetic oligonucleotide
acucccaauaacuaaugcuaagaaa

SEQ ID NO: 19284 - RNA, 25 nt, Artificial Sequence
  Description of Artificial Sequence: Synthetic oligonucleotide
aaugcuaagaaaugcugaaaaucaa

SEQ ID NO: 19285 - RNA, 25 nt, Artificial Sequence
  Description of Artificial Sequence: Synthetic oligonucleotide
gucuuucucuaaauaugauuacuuu

SEQ ID NO: 19286 - RNA, 25 nt, Artificial Sequence
  Description of Artificial Sequence: Synthetic oligonucleotide
ugaauuucaggcauuuuguucuaca

SEQ ID NO: 19287 - RNA, 25 nt, Artificial Sequence
  Description of Artificial Sequence: Synthetic oligonucleotide
cgauucccucucacccgggacucuc

SEQ ID NO: 19288 - RNA, 25 nt, Artificial Sequence
  Description of Artificial Sequence: Synthetic oligonucleotide
aggaaagugaaccuuuaaaguaaag

SEQ ID NO: 19289 - RNA, 25 nt, Artificial Sequence
  Description of Artificial Sequence: Synthetic oligonucleotide
gaggcugcaugcucuggaagccugg

SEQ ID NO: 19290 - RNA, 25 nt, Artificial Sequence
  Description of Artificial Sequence: Synthetic oligonucleotide
ucucugaacagaaaacaaaagagag

SEQ ID NO: 19291 - RNA, 25 nt, Artificial Sequence
  Description of Artificial Sequence: Synthetic oligonucleotide
aacuuggcuguaaucaguuaugccg

SEQ ID NO: 19292 - RNA, 25 nt, Artificial Sequence
  Description of Artificial Sequence: Synthetic oligonucleotide
agaagccaaaauuaaaagaagucca

SEQ ID NO: 19293 - RNA, 25 nt, Artificial Sequence
  Description of Artificial Sequence: Synthetic oligonucleotide
auuaaaagaaguccaggugagguua

SEQ ID NO: 19294 - RNA, 25 nt, Artificial Sequence
  Description of Artificial Sequence: Synthetic oligonucleotide
gaauccggauuaucgggaagaggac

SEQ ID NO: 19295 - RNA, 25 nt, Artificial Sequence
  Description of Artificial Sequence: Synthetic oligonucleotide
aaugugacaucaaagcaaguauugu

SEQ ID NO: 19296 - RNA, 25 nt, Artificial Sequence
  Description of Artificial Sequence: Synthetic oligonucleotide
caucaaagcaaguauuguagcacuc

SEQ ID NO: 19297 - RNA, 25 nt, Artificial Sequence
  Description of Artificial Sequence: Synthetic oligonucleotide
agagagagaaaacaaaaccacaaau

SEQ ID NO: 19298 - RNA, 25 nt, Artificial Sequence
  Description of Artificial Sequence: Synthetic oligonucleotide
ucgcuguaguauuuaagcccauaca

SEQ ID NO: 19299 - RNA, 25 nt, Artificial Sequence
  Description of Artificial Sequence: Synthetic oligonucleotide
cgcuguaguauuuaagcccauacag

SEQ ID NO: 19300 - RNA, 25 nt, Artificial Sequence
  Description of Artificial Sequence: Synthetic oligonucleotide
auuuaagcccauacagaaaccuucc

SEQ ID NO: 19301 - RNA, 25 nt, Artificial Sequence
  Description of Artificial Sequence: Synthetic oligonucleotide
auuaaaauaaacaugguauaccuac

SEQ ID NO: 19302 - RNA, 25 nt, Artificial Sequence
  Description of Artificial Sequence: Synthetic oligonucleotide
cuguucugaucggccaguuuucgga

SEQ ID NO: 19303 - RNA, 25 nt, Artificial Sequence
  Description of Artificial Sequence: Synthetic oligonucleotide
aaauaauuugaacuuuggaacaggg

SEQ ID NO: 19304 - RNA, 25 nt, Artificial Sequence
  Description of Artificial Sequence: Synthetic oligonucleotide
ugcgaccuuaauuuaacuuuccagu

SEQ ID NO: 19305 - RNA, 25 nt, Artificial Sequence
  Description of Artificial Sequence: Synthetic oligonucleotide
cugagaaagcuaaaguuugguuuug

SEQ ID NO: 19306 - RNA, 25 nt, Artificial Sequence
  Description of Artificial Sequence: Synthetic oligonucleotide
aguaaagaugcuacuucccacugua

SEQ ID NO: 19307 - RNA, 25 nt, Artificial Sequence
  Description of Artificial Sequence: Synthetic oligonucleotide
cugcuuaauugcugauaccauauga

SEQ ID NO: 19308 - RNA, 25 nt, Artificial Sequence
  Description of Artificial Sequence: Synthetic oligonucleotide
uaccauaugaaugaaacaugggcug

SEQ ID NO: 19309 - RNA, 25 nt, Artificial Sequence
  Description of Artificial Sequence: Synthetic oligonucleotide
aacuuucuuauccaacuuuuucaua

SEQ ID NO: 19310 - RNA, 25 nt, Artificial Sequence
  Description of Artificial Sequence: Synthetic oligonucleotide
ccuugcaugacaucaugaggccgga

SEQ ID NO: 19311 - RNA, 25 nt, Artificial Sequence
  Description of Artificial Sequence: Synthetic oligonucleotide
ugaauuuguauaugacugcauuugu

SEQ ID NO: 19312 - RNA, 25 nt, Artificial Sequence
  Description of Artificial Sequence: Synthetic oligonucleotide
gaauccuaguagaauguuuacuacc

SEQ ID NO: 19313 - RNA, 25 nt, Artificial Sequence
  Description of Artificial Sequence: Synthetic oligonucleotide
gaaagggaagaauuuuuugaugaaa

SEQ ID NO: 19314 - RNA, 25 nt, Artificial Sequence
  Description of Artificial Sequence: Synthetic oligonucleotide
uaucggcaugccagugugugaauuu

SEQ ID NO: 19315 - RNA, 25 nt, Artificial Sequence
  Description of Artificial Sequence: Synthetic oligonucleotide
caccucauaguagagcaauguaugu

SEQ ID NO: 19316 - RNA, 25 nt, Artificial Sequence
  Description of Artificial Sequence: Synthetic oligonucleotide
ccagaauugccaaagcacauauaua

SEQ ID NO: 19317 - RNA, 25 nt, Artificial Sequence
  Description of Artificial Sequence: Synthetic oligonucleotide
uggugaucuggguaauaguuucucc

SEQ ID NO: 19318 - RNA, 25 nt, Artificial Sequence
  Description of Artificial Sequence: Synthetic oligonucleotide
gaucuggguaauaguuucuccaaau

SEQ ID NO: 19319 - RNA, 25 nt, Artificial Sequence
  Description of Artificial Sequence: Synthetic oligonucleotide
ggaugugaugaauacuuccuagaaa

SEQ ID NO: 19320 - RNA, 25 nt, Artificial Sequence
  Description of Artificial Sequence: Synthetic oligonucleotide
cauuuccacagcuacaccauauaug

SEQ ID NO: 19321 - RNA, 25 nt, Artificial Sequence
  Description of Artificial Sequence: Synthetic oligonucleotide
acagcuacaccauauaugaauggag

SEQ ID NO: 19322 - RNA, 25 nt, Artificial Sequence
  Description of Artificial Sequence: Synthetic oligonucleotide
ugcaguucuuacacgagaagaagau

SEQ ID NO: 19323 - RNA, 25 nt, Artificial Sequence
  Description of Artificial Sequence: Synthetic oligonucleotide
acgagaagaagaucauuuacaggga

SEQ ID NO: 19324 - RNA, 25 nt, Artificial Sequence
  Description of Artificial Sequence: Synthetic oligonucleotide
cgagaagaagaucauuuacagggac

SEQ ID NO: 19325 - RNA, 25 nt, Artificial Sequence
  Description of Artificial Sequence: Synthetic oligonucleotide
aagaagaucauuuacagggaccuga

SEQ ID NO: 19326 - RNA, 25 nt, Artificial Sequence
  Description of Artificial Sequence: Synthetic oligonucleotide
agaggaagagguguuugacugcauc

SEQ ID NO: 19327 - RNA, 25 nt, Artificial Sequence
  Description of Artificial Sequence: Synthetic oligonucleotide
gaggaagagguguuugacugcaucg

SEQ ID NO: 19328 - RNA, 25 nt, Artificial Sequence
  Description of Artificial Sequence: Synthetic oligonucleotide
cuacuuugagggcgaguucacaggg

SEQ ID NO: 19329 - RNA, 25 nt, Artificial Sequence
  Description of Artificial Sequence: Synthetic oligonucleotide
agggcaucuccuggcaccucugucc

SEQ ID NO: 19330 - RNA, 25 nt, Artificial Sequence
  Description of Artificial Sequence: Synthetic oligonucleotide
ggagugauaugguuugucuuuuuaa

SEQ ID NO: 19331 - RNA, 25 nt, Artificial Sequence
  Description of Artificial Sequence: Synthetic oligonucleotide
gagugauaugguuugucuuuuuaag

SEQ ID NO: 19332 - RNA, 25 nt, Artificial Sequence
  Description of Artificial Sequence: Synthetic oligonucleotide
ugcaguaaagauccuaaagguuguc

SEQ ID NO: 19333 - RNA, 25 nt, Artificial Sequence
  Description of Artificial Sequence: Synthetic oligonucleotide
aguaaagauccuaaagguugucgac

SEQ ID NO: 19334 - RNA, 25 nt, Artificial Sequence
  Description of Artificial Sequence: Synthetic oligonucleotide
ugacaaaggacaaccuggcaauugu

SEQ ID NO: 19335 - RNA, 25 nt, Artificial Sequence
  Description of Artificial Sequence: Synthetic oligonucleotide
gcaauugugacccaguggugcgagg

SEQ ID NO: 19336 - RNA, 25 nt, Artificial Sequence
  Description of Artificial Sequence: Synthetic oligonucleotide
aacaucauccauagagacaugaaau

SEQ ID NO: 19337 - RNA, 25 nt, Artificial Sequence
  Description of Artificial Sequence: Synthetic oligonucleotide
ugaaauccaacaauauauuucucca

SEQ ID NO: 19338 - RNA, 25 nt, Artificial Sequence
  Description of Artificial Sequence: Synthetic oligonucleotide
aacaauauauuucuccaugaaggcu

SEQ ID NO: 19339 - RNA, 25 nt, Artificial Sequence
  Description of Artificial Sequence: Synthetic oligonucleotide
aacaguaaagucacgcuggaguggu

SEQ ID NO: 19340 - RNA, 25 nt, Artificial Sequence
  Description of Artificial Sequence: Synthetic oligonucleotide
ugugaagaaaguaaaggaagagagg

SEQ ID NO: 19341 - RNA, 25 nt, Artificial Sequence
  Description of Artificial Sequence: Synthetic oligonucleotide
cuuccgagccauccuugcaucgggc

SEQ ID NO: 19342 - RNA, 25 nt, Artificial Sequence
  Description of Artificial Sequence: Synthetic oligonucleotide
aauggagguugaauauccuacugug

SEQ ID NO: 19343 - RNA, 25 nt, Artificial Sequence
  Description of Artificial Sequence: Synthetic oligonucleotide
ggagguugaauauccuacuguguaa

SEQ ID NO: 19344 - RNA, 25 nt, Artificial Sequence
  Description of Artificial Sequence: Synthetic oligonucleotide
auuuugaguuuucccuuguagugua

SEQ ID NO: 19345 - RNA, 25 nt, Artificial Sequence
  Description of Artificial Sequence: Synthetic oligonucleotide
uauccuguuuguucuuuguugauug

SEQ ID NO: 19346 - RNA, 25 nt, Artificial Sequence
  Description of Artificial Sequence: Synthetic oligonucleotide
ccuguuuguucuuuguugauugaaa

SEQ ID NO: 19347 - RNA, 25 nt, Artificial Sequence
  Description of Artificial Sequence: Synthetic oligonucleotide
cucuacagccuucuuuuucuuccau

SEQ ID NO: 19348 - RNA, 25 nt, Artificial Sequence
  Description of Artificial Sequence: Synthetic oligonucleotide
ucuuccauagcuaaucuuccuucua

SEQ ID NO: 19349 - RNA, 25 nt, Artificial Sequence
  Description of Artificial Sequence: Synthetic oligonucleotide
auaaucuuccuguugaaugcuucau

SEQ ID NO: 19350 - RNA, 25 nt, Artificial Sequence
  Description of Artificial Sequence: Synthetic oligonucleotide
uaaucuuccuguugaaugcuucaug

SEQ ID NO: 19351 - RNA, 25 nt, Artificial Sequence
  Description of Artificial Sequence: Synthetic oligonucleotide
cuucaugacuugaauucuacuuuga

SEQ ID NO: 19352 - RNA, 25 nt, Artificial Sequence
  Description of Artificial Sequence: Synthetic oligonucleotide
aagagggagagaagcaacuacagac

SEQ ID NO: 19353 - RNA, 25 nt, Artificial Sequence
  Description of Artificial Sequence: Synthetic oligonucleotide
cgucuccuaccagaccaaggucaac

SEQ ID NO: 19354 - RNA, 25 nt, Artificial Sequence
  Description of Artificial Sequence: Synthetic oligonucleotide
gaucaaucggcccgacuaucucgac

SEQ ID NO: 19355 - RNA, 25 nt, Artificial Sequence
  Description of Artificial Sequence: Synthetic oligonucleotide
ggacgaacauccaaccuucccaaac

SEQ ID NO: 19356 - RNA, 25 nt, Artificial Sequence
  Description of Artificial Sequence: Synthetic oligonucleotide
agggucggaacccaagcuuagaacu

SEQ ID NO: 19357 - RNA, 25 nt, Artificial Sequence
  Description of Artificial Sequence: Synthetic oligonucleotide
ucggaacccaagcuuagaacuuuaa

SEQ ID NO: 19358 - RNA, 25 nt, Artificial Sequence
  Description of Artificial Sequence: Synthetic oligonucleotide
acccaagcuuagaacuuuaagcaac

SEQ ID NO: 19359 - RNA, 25 nt, Artificial Sequence
  Description of Artificial Sequence: Synthetic oligonucleotide
gaacuuuaagcaacaagaccaccac

SEQ ID NO: 19360 - RNA, 25 nt, Artificial Sequence
  Description of Artificial Sequence: Synthetic oligonucleotide
acuauucaguggcgagaaauaaagu

SEQ ID NO: 19361 - RNA, 25 nt, Artificial Sequence
  Description of Artificial Sequence: Synthetic oligonucleotide
cuauucaguggcgagaaauaaaguu

SEQ ID NO: 19362 - RNA, 25 nt, Artificial Sequence
  Description of Artificial Sequence: Synthetic oligonucleotide
aaacacagauaacaggaaaugaucc

SEQ ID NO: 19363 - RNA, 25 nt, Artificial Sequence
  Description of Artificial Sequence: Synthetic oligonucleotide
cuuaagaaaagagaagaaaugaaac

SEQ ID NO: 19364 - RNA, 25 nt, Artificial Sequence
  Description of Artificial Sequence: Synthetic oligonucleotide
cugaaggaguguguuuccauccucc

SEQ ID NO: 19365 - RNA, 25 nt, Artificial Sequence
  Description of Artificial Sequence: Synthetic oligonucleotide
ucaccgcgggacugaaaaucuuuga

SEQ ID NO: 19366 - RNA, 25 nt, Artificial Sequence
  Description of Artificial Sequence: Synthetic oligonucleotide
agcagaaauaagcgugccguucagg

SEQ ID NO: 19367 - RNA, 25 nt, Artificial Sequence
  Description of Artificial Sequence: Synthetic oligonucleotide
aagcgugccguucaggguccagaag

SEQ ID NO: 19368 - RNA, 25 nt, Artificial Sequence
  Description of Artificial Sequence: Synthetic oligonucleotide
agaaacagucacucaagacugcuug

SEQ ID NO: 19369 - RNA, 25 nt, Artificial Sequence
  Description of Artificial Sequence: Synthetic oligonucleotide
agaggaagaagguccaugucuuugg

SEQ ID NO: 19370 - RNA, 25 nt, Artificial Sequence
  Description of Artificial Sequence: Synthetic oligonucleotide
uguauucaaaauaugccugaaacac

SEQ ID NO: 19371 - RNA, 25 nt, Artificial Sequence
  Description of Artificial Sequence: Synthetic oligonucleotide
auuuuccucccuuucucuguaccuc

SEQ ID NO: 19372 - RNA, 25 nt, Artificial Sequence
  Description of Artificial Sequence: Synthetic oligonucleotide
caaagaaagauagagcaagacaaga

SEQ ID NO: 19373 - RNA, 25 nt, Artificial Sequence
  Description of Artificial Sequence: Synthetic oligonucleotide
aagaaagauagagcaagacaagaaa

SEQ ID NO: 19374 - RNA, 25 nt, Artificial Sequence
  Description of Artificial Sequence: Synthetic oligonucleotide
gaaagcauuuguuuguacaagaucc

SEQ ID NO: 19375 - RNA, 25 nt, Artificial Sequence
  Description of Artificial Sequence: Synthetic oligonucleotide
ugaguuaaacgaacguacuugcaga

SEQ ID NO: 19376 - RNA, 25 nt, Artificial Sequence
  Description of Artificial Sequence: Synthetic oligonucleotide
acugauacagaacgaucgauacaga

SEQ ID NO: 19377 - RNA, 25 nt, Artificial Sequence
  Description of Artificial Sequence: Synthetic oligonucleotide
auauuauauauauauaaaaauaaau

SEQ ID NO: 19378 - RNA, 25 nt, Artificial Sequence
  Description of Artificial Sequence: Synthetic oligonucleotide
auuauauauauauaaaaauaaauau

SEQ ID NO: 19379 - RNA, 25 nt, Artificial Sequence
  Description of Artificial Sequence: Synthetic oligonucleotide
ucacuggauguauuugacugcugug

SEQ ID NO: 19380 - RNA, 25 nt, Artificial Sequence
  Description of Artificial Sequence: Synthetic oligonucleotide
cagggaagaggaggagaugagagac

SEQ ID NO: 19381 - RNA, 25 nt, Artificial Sequence
  Description of Artificial Sequence: Synthetic oligonucleotide
augaucuuuuuuuugucccacuugg

SEQ ID NO: 19382 - RNA, 27 nt, Artificial Sequence
  Description of Artificial Sequence: Synthetic oligonucleotide
ggccgugaacuccucaucaaaauaccu

SEQ ID NO: 19383 - RNA, 27 nt, Artificial Sequence
  Description of Artificial Sequence: Synthetic oligonucleotide
uggugugauggugaucaucugggccgu

SEQ ID NO: 19384 - RNA, 27 nt, Artificial Sequence
  Description of Artificial Sequence: Synthetic oligonucleotide
aaacccgcaggauaguuuucuucccua

SEQ ID NO: 19385 - RNA, 27 nt, Artificial Sequence
  Description of Artificial Sequence: Synthetic oligonucleotide
caaacuggaugaaauaaauuaaaaccc

SEQ ID NO: 19386 - RNA, 27 nt, Artificial Sequence
  Description of Artificial Sequence: Synthetic oligonucleotide
agaaguccuuaacauuucccuacguga

SEQ ID NO: 19387 - RNA, 27 nt, Artificial Sequence
  Description of Artificial Sequence: Synthetic oligonucleotide
cucugucccacuggguaaacccuggcc

SEQ ID NO: 19388 - RNA, 27 nt, Artificial Sequence
  Description of Artificial Sequence: Synthetic oligonucleotide
cacaauaacaaauuuaaaccuugcucc

SEQ ID NO: 19389 - RNA, 27 nt, Artificial Sequence
  Description of Artificial Sequence: Synthetic oligonucleotide
aaaugcauuugaacaacauaauacaca

SEQ ID NO: 19390 - RNA, 27 nt, Artificial Sequence
  Description of Artificial Sequence: Synthetic oligonucleotide
ggcuuuccugucacaaagauuaaaaac

SEQ ID NO: 19391 - RNA, 27 nt, Artificial Sequence
  Description of Artificial Sequence: Synthetic oligonucleotide
agggcuuuccugucacaaagauuaaaa

SEQ ID NO: 19392 - RNA, 27 nt, Artificial Sequence
  Description of Artificial Sequence: Synthetic oligonucleotide
ggccaugcugggagacauaagcagcag

SEQ ID NO: 19393 - RNA, 27 nt, Artificial Sequence
  Description of Artificial Sequence: Synthetic oligonucleotide
ucagggagaagcuucugaaacacuucu

SEQ ID NO: 19394 - RNA, 27 nt, Artificial Sequence
  Description of Artificial Sequence: Synthetic oligonucleotide
aagggcuucuuccuuauugauggucag

SEQ ID NO: 19395 - RNA, 27 nt, Artificial Sequence
  Description of Artificial Sequence: Synthetic oligonucleotide
ugaagggcuucuuccuuauugaugguc

SEQ ID NO: 19396 - RNA, 27 nt, Artificial Sequence
  Description of Artificial Sequence: Synthetic oligonucleotide
cgcugaagggcuucuuccuuauugaug

SEQ ID NO: 19397 - RNA, 27 nt, Artificial Sequence
  Description of Artificial Sequence: Synthetic oligonucleotide
gccgcugaagggcuucuuccuuauuga

SEQ ID NO: 19398 - RNA, 27 nt, Artificial Sequence
  Description of Artificial Sequence: Synthetic oligonucleotide
acuggccgcugaagggcuucuuccuua

SEQ ID NO: 19399 - RNA, 27 nt, Artificial Sequence
  Description of Artificial Sequence: Synthetic oligonucleotide
cggagcuuuucaccuuuaguuaugcuu

SEQ ID NO: 19400 - RNA, 27 nt, Artificial Sequence
  Description of Artificial Sequence: Synthetic oligonucleotide
ccggagcuuuucaccuuuaguuaugcu

SEQ ID NO: 19401 - RNA, 27 nt, Artificial Sequence
  Description of Artificial Sequence: Synthetic oligonucleotide
cagacuguugacuggcgugauguaguu

SEQ ID NO: 19402 - RNA, 27 nt, Artificial Sequence
  Description of Artificial Sequence: Synthetic oligonucleotide
cuuuugaacucugcuuaaauccagugg

SEQ ID NO: 19403 - RNA, 27 nt, Artificial Sequence
  Description of Artificial Sequence: Synthetic oligonucleotide
gcuuuugaacucugcuuaaauccagug

SEQ ID NO: 19404 - RNA, 27 nt, Artificial Sequence
  Description of Artificial Sequence: Synthetic oligonucleotide
agggcuuuugaacucugcuuaaaucca

SEQ ID NO: 19405 - RNA, 27 nt, Artificial Sequence
  Description of Artificial Sequence: Synthetic oligonucleotide
aagggcuuuugaacucugcuuaaaucc

SEQ ID NO: 19406 - RNA, 27 nt, Artificial Sequence
  Description of Artificial Sequence: Synthetic oligonucleotide
ugaagggcuuuugaacucugcuuaaau

SEQ ID NO: 19407 - RNA, 27 nt, Artificial Sequence
  Description of Artificial Sequence: Synthetic oligonucleotide
cugaagggcuuuugaacucugcuuaaa

SEQ ID NO: 19408 - RNA, 27 nt, Artificial Sequence
  Description of Artificial Sequence: Synthetic oligonucleotide
cgcugaagggcuuuugaacucugcuua

SEQ ID NO: 19409 - RNA, 27 nt, Artificial Sequence
  Description of Artificial Sequence: Synthetic oligonucleotide
cgagcggcuucacucagacccugaggc

SEQ ID NO: 19410 - RNA, 27 nt, Artificial Sequence
  Description of Artificial Sequence: Synthetic oligonucleotide
uugacuggcgugauguaguugcuuggg

SEQ ID NO: 19411 - RNA, 27 nt, Artificial Sequence
  Description of Artificial Sequence: Synthetic oligonucleotide
cacgcaccaagaagcugccauugaucc

SEQ ID NO: 19412 - RNA, 27 nt, Artificial Sequence
  Description of Artificial Sequence: Synthetic oligonucleotide
cugaugaauccaaugugggcuggaauc

SEQ ID NO: 19413 - RNA, 27 nt, Artificial Sequence
  Description of Artificial Sequence: Synthetic oligonucleotide
cuuagguauuccacauucucagcugug

SEQ ID NO: 19414 - RNA, 27 nt, Artificial Sequence
  Description of Artificial Sequence: Synthetic oligonucleotide
ugagccucaaauuaggagauacguuuu

SEQ ID NO: 19415 - RNA, 27 nt, Artificial Sequence
  Description of Artificial Sequence: Synthetic oligonucleotide
ccaauuguagagaaauuauuuuaggaa

SEQ ID NO: 19416 - RNA, 27 nt, Artificial Sequence
  Description of Artificial Sequence: Synthetic oligonucleotide
ggcuccuaacuagcugaaucuuccaau

SEQ ID NO: 19417 - RNA, 27 nt, Artificial Sequence
  Description of Artificial Sequence: Synthetic oligonucleotide
guggauauugacuaggagaguuuaaaa

SEQ ID NO: 19418 - RNA, 27 nt, Artificial Sequence
  Description of Artificial Sequence: Synthetic oligonucleotide
ugugacugaacauaacuguaggcugaa

SEQ ID NO: 19419 - RNA, 27 nt, Artificial Sequence
  Description of Artificial Sequence: Synthetic oligonucleotide
guaugugugugugacugaacauaacug

SEQ ID NO: 19420 - RNA, 27 nt, Artificial Sequence
  Description of Artificial Sequence: Synthetic oligonucleotide
aagcaaaaggaacauuuuguaugugug

SEQ ID NO: 19421 - RNA, 27 nt, Artificial Sequence
  Description of Artificial Sequence: Synthetic oligonucleotide
aaaaauuacuuuaaaagcaaaaggaac

SEQ ID NO: 19422 - RNA, 27 nt, Artificial Sequence
  Description of Artificial Sequence: Synthetic oligonucleotide
ccauugacuguugcuucacaggucaga

SEQ ID NO: 19423 - RNA, 27 nt, Artificial Sequence
  Description of Artificial Sequence: Synthetic oligonucleotide
auugguuugucgaugugugagauaguu

SEQ ID NO: 19424 - RNA, 27 nt, Artificial Sequence
  Description of Artificial Sequence: Synthetic oligonucleotide
agugguagcaguacaauugaggacaag

SEQ ID NO: 19425 - RNA, 27 nt, Artificial Sequence
  Description of Artificial Sequence: Synthetic oligonucleotide
uaagaccgcuugccagcuacgguuuca

SEQ ID NO: 19426 - RNA, 27 nt, Artificial Sequence
  Description of Artificial Sequence: Synthetic oligonucleotide
agccgguaagaccgcuugccagcuacg

SEQ ID NO: 19427 - RNA, 27 nt, Artificial Sequence
  Description of Artificial Sequence: Synthetic oligonucleotide
gguaacccaucuuuuaaccauacaacu

SEQ ID NO: 19428 - RNA, 27 nt, Artificial Sequence
  Description of Artificial Sequence: Synthetic oligonucleotide
ucgcagguaacccaucuuuuaaccaua

SEQ ID NO: 19429 - RNA, 27 nt, Artificial Sequence
  Description of Artificial Sequence: Synthetic oligonucleotide
cucagcaagauuguauaauucccugca

SEQ ID NO: 19430 - RNA, 27 nt, Artificial Sequence
  Description of Artificial Sequence: Synthetic oligonucleotide
acuguuuuaugcucagcaagauuguau

SEQ ID NO: 19431 - RNA, 27 nt, Artificial Sequence
  Description of Artificial Sequence: Synthetic oligonucleotide
aggauaaaggacucuucauuauuggaa

SEQ ID NO: 19432 - RNA, 27 nt, Artificial Sequence
  Description of Artificial Sequence: Synthetic oligonucleotide
caacuugcguuggaacauccaaagugu

SEQ ID NO: 19433 - RNA, 27 nt, Artificial Sequence
  Description of Artificial Sequence: Synthetic oligonucleotide
augguuucaguuuaguggaagcauuua

SEQ ID NO: 19434 - RNA, 27 nt, Artificial Sequence
  Description of Artificial Sequence: Synthetic oligonucleotide
auauuuaacaaagucaaacuuucucac

SEQ ID NO: 19435 - RNA, 27 nt, Artificial Sequence
  Description of Artificial Sequence: Synthetic oligonucleotide
aacuuuuaauauacaguaguucuuuuc

SEQ ID NO: 19436 - RNA, 27 nt, Artificial Sequence
  Description of Artificial Sequence: Synthetic oligonucleotide
guuaagucaaaacccguauuucuaaag

SEQ ID NO: 19437 - RNA, 27 nt, Artificial Sequence
  Description of Artificial Sequence: Synthetic oligonucleotide
gugcugaguuugcuguacccauguuga

SEQ ID NO: 19438 - RNA, 27 nt, Artificial Sequence
  Description of Artificial Sequence: Synthetic oligonucleotide
ugaggucagcaucuucugugucuuuac

SEQ ID NO: 19439 - RNA, 27 nt, Artificial Sequence
  Description of Artificial Sequence: Synthetic oligonucleotide
gcgaucugaauaaaccucccuacuagc

SEQ ID NO: 19440 - RNA, 27 nt, Artificial Sequence
  Description of Artificial Sequence: Synthetic oligonucleotide
aucccagaacccugcugcagaaggcca

SEQ ID NO: 19441 - RNA, 27 nt, Artificial Sequence
  Description of Artificial Sequence: Synthetic oligonucleotide
cauaauuuccaauauguaccagaccuu

SEQ ID NO: 19442 - RNA, 27 nt, Artificial Sequence
  Description of Artificial Sequence: Synthetic oligonucleotide
cuagugcuuccaucggaaggacuaggu

SEQ ID NO: 19443 - RNA, 27 nt, Artificial Sequence
  Description of Artificial Sequence: Synthetic oligonucleotide
uccacauaaaaacaauauucacuggga

SEQ ID NO: 19444 - RNA, 27 nt, Artificial Sequence
  Description of Artificial Sequence: Synthetic oligonucleotide
ucuaccaauuccaacuugaauucauug

SEQ ID NO: 19445 - RNA, 27 nt, Artificial Sequence
  Description of Artificial Sequence: Synthetic oligonucleotide
ucuccaagucuaaaucuguguccugag

SEQ ID NO: 19446 - RNA, 27 nt, Artificial Sequence
  Description of Artificial Sequence: Synthetic oligonucleotide
uggaauacuguaacugugcuuugagga

SEQ ID NO: 19447 - RNA, 27 nt, Artificial Sequence
  Description of Artificial Sequence: Synthetic oligonucleotide
uuaauucaucagugguggcagugguag

SEQ ID NO: 19448 - RNA, 27 nt, Artificial Sequence
  Description of Artificial Sequence: Synthetic oligonucleotide
gugaugauguggcacuaguaguuucuu

SEQ ID NO: 19449 - RNA, 27 nt, Artificial Sequence
  Description of Artificial Sequence: Synthetic oligonucleotide
ucuguuuggugaggcuguccgacuuug

SEQ ID NO: 19450 - RNA, 27 nt, Artificial Sequence
  Description of Artificial Sequence: Synthetic oligonucleotide
ccaucauguuccauuuuucgcuuucuc

SEQ ID NO: 19451 - RNA, 27 nt, Artificial Sequence
  Description of Artificial Sequence: Synthetic oligonucleotide
gcagucuacaugcuaaaucagagggua

SEQ ID NO: 19452 - RNA, 27 nt, Artificial Sequence
  Description of Artificial Sequence: Synthetic oligonucleotide
cauaaauagauccuuaaauagcucaaa

SEQ ID NO: 19453 - RNA, 27 nt, Artificial Sequence
  Description of Artificial Sequence: Synthetic oligonucleotide
ugauaauagugcuuuuucaccuuuuuc

SEQ ID NO: 19454 - RNA, 27 nt, Artificial Sequence
  Description of Artificial Sequence: Synthetic oligonucleotide
gcagaacugauaauagugcuuuuucac

SEQ ID NO: 19455 - RNA, 27 nt, Artificial Sequence
  Description of Artificial Sequence: Synthetic oligonucleotide
guagguuuaaucuuucuuuucagccau

SEQ ID NO: 19456 - RNA, 27 nt, Artificial Sequence
  Description of Artificial Sequence: Synthetic oligonucleotide
agaaggauuuuauuauaaggguuuaau

SEQ ID NO: 19457 - RNA, 27 nt, Artificial Sequence
  Description of Artificial Sequence: Synthetic oligonucleotide
gucuacagcauuggcuaauaguaugaa

SEQ ID NO: 19458 - RNA, 27 nt, Artificial Sequence
  Description of Artificial Sequence: Synthetic oligonucleotide
cuauuccuaucaaaaugcuucugucua

SEQ ID NO: 19459 - RNA, 27 nt, Artificial Sequence
  Description of Artificial Sequence: Synthetic oligonucleotide
ucagggccauuaucuuauuugcucuau

SEQ ID NO: 19460 - RNA, 27 nt, Artificial Sequence
  Description of Artificial Sequence: Synthetic oligonucleotide
ugcuugaggaagagaaaaauguugguc

SEQ ID NO: 19461 - RNA, 27 nt, Artificial Sequence
  Description of Artificial Sequence: Synthetic oligonucleotide
ugggcugaacuuuucucauacuuaaag

SEQ ID NO: 19462 - RNA, 27 nt, Artificial Sequence
  Description of Artificial Sequence: Synthetic oligonucleotide
gguucagcagccaucuuuauuccugcg

SEQ ID NO: 19463 - RNA, 27 nt, Artificial Sequence
  Description of Artificial Sequence: Synthetic oligonucleotide
ugaagagaacuuggucauucaaauuuc

SEQ ID NO: 19464 - RNA, 27 nt, Artificial Sequence
  Description of Artificial Sequence: Synthetic oligonucleotide
cucuaggcuggcuaucuuuauacauac

SEQ ID NO: 19465 - RNA, 27 nt, Artificial Sequence
  Description of Artificial Sequence: Synthetic oligonucleotide
acacuucacagagauaguuacagccau

SEQ ID NO: 19466 - RNA, 27 nt, Artificial Sequence
  Description of Artificial Sequence: Synthetic oligonucleotide
uugaaauuuucucacacuucacagaga

SEQ ID NO: 19467 - RNA, 27 nt, Artificial Sequence
  Description of Artificial Sequence: Synthetic oligonucleotide
ucaggaggauucauuuccuuaaaggaa

SEQ ID NO: 19468 - RNA, 27 nt, Artificial Sequence
  Description of Artificial Sequence: Synthetic oligonucleotide
auaugaugucacuuuuuguauccuuga

SEQ ID NO: 19469 - RNA, 27 nt, Artificial Sequence
  Description of Artificial Sequence: Synthetic oligonucleotide
uaugaugaagauucaaauugcaucuua

SEQ ID NO: 19470 - RNA, 27 nt, Artificial Sequence
  Description of Artificial Sequence: Synthetic oligonucleotide
uuaauagcuagucuucguuuugaacag

SEQ ID NO: 19471 - RNA, 27 nt, Artificial Sequence
  Description of Artificial Sequence: Synthetic oligonucleotide
auuuuuaguagagaugagguuucacca

SEQ ID NO: 19472 - RNA, 27 nt, Artificial Sequence
  Description of Artificial Sequence: Synthetic oligonucleotide
aggcgagauagagcuucucuuucguuc

SEQ ID NO: 19473 - RNA, 27 nt, Artificial Sequence
  Description of Artificial Sequence: Synthetic oligonucleotide
aacuggaccgaaggcgcuuguggagaa

SEQ ID NO: 19474 - RNA, 27 nt, Artificial Sequence
  Description of Artificial Sequence: Synthetic oligonucleotide
gcggcuacaucuuuggaaucuucuccu

SEQ ID NO: 19475 - RNA, 27 nt, Artificial Sequence
  Description of Artificial Sequence: Synthetic oligonucleotide
caagucuccucauugaauccagauugg

SEQ ID NO: 19476 - RNA, 27 nt, Artificial Sequence
  Description of Artificial Sequence: Synthetic oligonucleotide
uccucacuacucucaaaucuguucugg

SEQ ID NO: 19477 - RNA, 27 nt, Artificial Sequence
  Description of Artificial Sequence: Synthetic oligonucleotide
uuuguacucaucugcacagcucuggcu

SEQ ID NO: 19478 - RNA, 27 nt, Artificial Sequence
  Description of Artificial Sequence: Synthetic oligonucleotide
gcccauuaacaacaacaaucugaggug

SEQ ID NO: 19479 - RNA, 27 nt, Artificial Sequence
  Description of Artificial Sequence: Synthetic oligonucleotide
aauaaauuaaaaauaauuaaaauagug

SEQ ID NO: 19480 - RNA, 27 nt, Artificial Sequence
  Description of Artificial Sequence: Synthetic oligonucleotide
cauauuuaaauauuaauaaauuaaaaa

SEQ ID NO: 19481 - RNA, 27 nt, Artificial Sequence
  Description of Artificial Sequence: Synthetic oligonucleotide
gaaacaaaggauauucaaacugcauag

SEQ ID NO: 19482 - RNA, 27 nt, Artificial Sequence
  Description of Artificial Sequence: Synthetic oligonucleotide
caaacacuuagacgccagcagcauggg

SEQ ID NO: 19483 - RNA, 27 nt, Artificial Sequence
  Description of Artificial Sequence: Synthetic oligonucleotide
uuugucacaggugaaaugcacaucuga

SEQ ID NO: 19484 - RNA, 27 nt, Artificial Sequence
  Description of Artificial Sequence: Synthetic oligonucleotide
uaauucagccuggcacagguuuugauc

SEQ ID NO: 19485 - RNA, 27 nt, Artificial Sequence
  Description of Artificial Sequence: Synthetic oligonucleotide
auuguaagaaugacuacccacauucac

SEQ ID NO: 19486 - RNA, 27 nt, Artificial Sequence
  Description of Artificial Sequence: Synthetic oligonucleotide
caauuguaagaaugacuacccacauuc

SEQ ID NO: 19487 - RNA, 27 nt, Artificial Sequence
  Description of Artificial Sequence: Synthetic oligonucleotide
guacacucucugaugcucauuuucaua

SEQ ID NO: 19488 - RNA, 27 nt, Artificial Sequence
  Description of Artificial Sequence: Synthetic oligonucleotide
cugcugaguucuacaugaaaagcaaau

SEQ ID NO: 19489 - RNA, 27 nt, Artificial Sequence
  Description of Artificial Sequence: Synthetic oligonucleotide
uacugaaaauaaauauagaaauacaac

SEQ ID NO: 19490 - RNA, 27 nt, Artificial Sequence
  Description of Artificial Sequence: Synthetic oligonucleotide
uuccauuuaagaaacauuaaucaaaac

SEQ ID NO: 19491 - RNA, 27 nt, Artificial Sequence
  Description of Artificial Sequence: Synthetic oligonucleotide
acaauuuuaggcacuauacacguuguu

SEQ ID NO: 19492 - RNA, 27 nt, Artificial Sequence
  Description of Artificial Sequence: Synthetic oligonucleotide
ccagauguuaguagccaaggauauggu

SEQ ID NO: 19493 - RNA, 27 nt, Artificial Sequence
  Description of Artificial Sequence: Synthetic oligonucleotide
agcucacagucuccagauguuaguagc

SEQ ID NO: 19494 - RNA, 27 nt, Artificial Sequence
  Description of Artificial Sequence: Synthetic oligonucleotide
auuaauaaaaagcacacaacuuauggc

SEQ ID NO: 19495 - RNA, 27 nt, Artificial Sequence
  Description of Artificial Sequence: Synthetic oligonucleotide
aauguaagaagagccaaaaugaugcau

SEQ ID NO: 19496 - RNA, 27 nt, Artificial Sequence
  Description of Artificial Sequence: Synthetic oligonucleotide
acauuuuuacaaauguaagaagagcca

SEQ ID NO: 19497 - RNA, 27 nt, Artificial Sequence
  Description of Artificial Sequence: Synthetic oligonucleotide
aauaugaauuaagaugaccuaaucugu

SEQ ID NO: 19498 - RNA, 27 nt, Artificial Sequence
  Description of Artificial Sequence: Synthetic oligonucleotide
ucaugauuaguucuuucaauuccaucc

SEQ ID NO: 19499 - RNA, 27 nt, Artificial Sequence
  Description of Artificial Sequence: Synthetic oligonucleotide
cccaagagcagaaggaaugagugugca

SEQ ID NO: 19500 - RNA, 27 nt, Artificial Sequence
  Description of Artificial Sequence: Synthetic oligonucleotide
cucaaagcuacugguuaccucuacacc

SEQ ID NO: 19501 - RNA, 27 nt, Artificial Sequence
  Description of Artificial Sequence: Synthetic oligonucleotide
ugaaauauuacguggcaugugguuggg

SEQ ID NO: 19502 - RNA, 27 nt, Artificial Sequence
  Description of Artificial Sequence: Synthetic oligonucleotide
agugaagagaauaacuuguuuccgaag

SEQ ID NO: 19503 - RNA, 27 nt, Artificial Sequence
  Description of Artificial Sequence: Synthetic oligonucleotide
uuucuuagcauuaguuauugggaguga

SEQ ID NO: 19504 - RNA, 27 nt, Artificial Sequence
  Description of Artificial Sequence: Synthetic oligonucleotide
uugauuuucagcauuucuuagcauuag

SEQ ID NO: 19505 - RNA, 27 nt, Artificial Sequence
  Description of Artificial Sequence: Synthetic oligonucleotide
aaaguaaucauauuuagagaaagacag

SEQ ID NO: 19506 - RNA, 27 nt, Artificial Sequence
  Description of Artificial Sequence: Synthetic oligonucleotide
uguagaacaaaaugccugaaauucagc

SEQ ID NO: 19507 - RNA, 27 nt, Artificial Sequence
  Description of Artificial Sequence: Synthetic oligonucleotide
gagagucccgggugagagggaaucgcc

SEQ ID NO: 19508 - RNA, 27 nt, Artificial Sequence
  Description of Artificial Sequence: Synthetic oligonucleotide
cuuuacuuuaaagguucacuuuccuug

SEQ ID NO: 19509 - RNA, 27 nt, Artificial Sequence
  Description of Artificial Sequence: Synthetic oligonucleotide
ccaggcuuccagagcaugcagccuccu

SEQ ID NO: 19510 - RNA, 27 nt, Artificial Sequence
  Description of Artificial Sequence: Synthetic oligonucleotide
cucucuuuuguuuucuguucagagaaa

SEQ ID NO: 19511 - RNA, 27 nt, Artificial Sequence
  Description of Artificial Sequence: Synthetic oligonucleotide
cggcauaacugauuacagccaaguuca

SEQ ID NO: 19512 - RNA, 27 nt, Artificial Sequence
  Description of Artificial Sequence: Synthetic oligonucleotide
uggacuucuuuuaauuuuggcuucuuc

SEQ ID NO: 19513 - RNA, 27 nt, Artificial Sequence
  Description of Artificial Sequence: Synthetic oligonucleotide
uaaccucaccuggacuucuuuuaauuu

SEQ ID NO: 19514 - RNA, 27 nt, Artificial Sequence
  Description of Artificial Sequence: Synthetic oligonucleotide
guccucuucccgauaauccggauucag

SEQ ID NO: 19515 - RNA, 27 nt, Artificial Sequence
  Description of Artificial Sequence: Synthetic oligonucleotide
acaauacuugcuuugaugucacauuaa

SEQ ID NO: 19516 - RNA, 27 nt, Artificial Sequence
  Description of Artificial Sequence: Synthetic oligonucleotide
gagugcuacaauacuugcuuugauguc

SEQ ID NO: 19517 - RNA, 27 nt, Artificial Sequence
  Description of Artificial Sequence: Synthetic oligonucleotide
auuugugguuuuguuuucucucucucu

SEQ ID NO: 19518 - RNA, 27 nt, Artificial Sequence
  Description of Artificial Sequence: Synthetic oligonucleotide
uguaugggcuuaaauacuacagcgagg

SEQ ID NO: 19519 - RNA, 27 nt, Artificial Sequence
  Description of Artificial Sequence: Synthetic oligonucleotide
cuguaugggcuuaaauacuacagcgag

SEQ ID NO: 19520 - RNA, 27 nt, Artificial Sequence
  Description of Artificial Sequence: Synthetic oligonucleotide
ggaagguuucuguaugggcuuaaauac

SEQ ID NO: 19521 - RNA, 27 nt, Artificial Sequence
  Description of Artificial Sequence: Synthetic oligonucleotide
guagguauaccauguuuauuuuaauac

SEQ ID NO: 19522 - RNA, 27 nt, Artificial Sequence
  Description of Artificial Sequence: Synthetic oligonucleotide
uccgaaaacuggccgaucagaacagcc

SEQ ID NO: 19523 - RNA, 27 nt, Artificial Sequence
  Description of Artificial Sequence: Synthetic oligonucleotide
cccuguuccaaaguucaaauuauuugu

SEQ ID NO: 19524 - RNA, 27 nt, Artificial Sequence
  Description of Artificial Sequence: Synthetic oligonucleotide
acuggaaaguuaaauuaaggucgcaau

SEQ ID NO: 19525 - RNA, 27 nt, Artificial Sequence
  Description of Artificial Sequence: Synthetic oligonucleotide
caaaaccaaacuuuagcuuucucagcc

SEQ ID NO: 19526 - RNA, 27 nt, Artificial Sequence
  Description of Artificial Sequence: Synthetic oligonucleotide
uacagugggaaguagcaucuuuacuuu

SEQ ID NO: 19527 - RNA, 27 nt, Artificial Sequence
  Description of Artificial Sequence: Synthetic oligonucleotide
ucauaugguaucagcaauuaagcagua

SEQ ID NO: 19528 - RNA, 27 nt, Artificial Sequence
  Description of Artificial Sequence: Synthetic oligonucleotide
cagcccauguuucauucauaugguauc

SEQ ID NO: 19529 - RNA, 27 nt, Artificial Sequence
  Description of Artificial Sequence: Synthetic oligonucleotide
uaugaaaaaguuggauaagaaaguugg

SEQ ID NO: 19530 - RNA, 27 nt, Artificial Sequence
  Description of Artificial Sequence: Synthetic oligonucleotide
uccggccucaugaugucaugcaaggcu

SEQ ID NO: 19531 - RNA, 27 nt, Artificial Sequence
  Description of Artificial Sequence: Synthetic oligonucleotide
acaaaugcagucauauacaaauucagg

SEQ ID NO: 19532 - RNA, 27 nt, Artificial Sequence
  Description of Artificial Sequence: Synthetic oligonucleotide
gguaguaaacauucuacuaggauucuu

SEQ ID NO: 19533 - RNA, 27 nt, Artificial Sequence
  Description of Artificial Sequence: Synthetic oligonucleotide
uuucaucaaaaaauucuucccuuucug

SEQ ID NO: 19534 - RNA, 27 nt, Artificial Sequence
  Description of Artificial Sequence: Synthetic oligonucleotide
aaauucacacacuggcaugccgauagc

SEQ ID NO: 19535 - RNA, 27 nt, Artificial Sequence
  Description of Artificial Sequence: Synthetic oligonucleotide
acauacauugcucuacuaugaggugaa

SEQ ID NO: 19536 - RNA, 27 nt, Artificial Sequence
  Description of Artificial Sequence: Synthetic oligonucleotide
uauauaugugcuuuggcaauucuggug

SEQ ID NO: 19537 - RNA, 27 nt, Artificial Sequence
  Description of Artificial Sequence: Synthetic oligonucleotide
ggagaaacuauuacccagaucaccacu

SEQ ID NO: 19538 - RNA, 27 nt, Artificial Sequence
  Description of Artificial Sequence: Synthetic oligonucleotide
auuuggagaaacuauuacccagaucac

SEQ ID NO: 19539 - RNA, 27 nt, Artificial Sequence
  Description of Artificial Sequence: Synthetic oligonucleotide
uuucuaggaaguauucaucacauccac

SEQ ID NO: 19540 - RNA, 27 nt, Artificial Sequence
  Description of Artificial Sequence: Synthetic oligonucleotide
cauauaugguguagcuguggaaaugcg

SEQ ID NO: 19541 - RNA, 27 nt, Artificial Sequence
  Description of Artificial Sequence: Synthetic oligonucleotide
cuccauucauauaugguguagcugugg

SEQ ID NO: 19542 - RNA, 27 nt, Artificial Sequence
  Description of Artificial Sequence: Synthetic oligonucleotide
aucuucuucucguguaagaacugcagc

SEQ ID NO: 19543 - RNA, 27 nt, Artificial Sequence
  Description of Artificial Sequence: Synthetic oligonucleotide
ucccuguaaaugaucuucuucucgugu

SEQ ID NO: 19544 - RNA, 27 nt, Artificial Sequence
  Description of Artificial Sequence: Synthetic oligonucleotide
gucccuguaaaugaucuucuucucgug

SEQ ID NO: 19545 - RNA, 27 nt, Artificial Sequence
  Description of Artificial Sequence: Synthetic oligonucleotide
ucaggucccuguaaaugaucuucuucu

SEQ ID NO: 19546 - RNA, 27 nt, Artificial Sequence
  Description of Artificial Sequence: Synthetic oligonucleotide
gaugcagucaaacaccucuuccucugu

SEQ ID NO: 19547 - RNA, 27 nt, Artificial Sequence
  Description of Artificial Sequence: Synthetic oligonucleotide
cgaugcagucaaacaccucuuccucug

SEQ ID NO: 19548 - RNA, 27 nt, Artificial Sequence
  Description of Artificial Sequence: Synthetic oligonucleotide
cccugugaacucgcccucaaaguagcg

SEQ ID NO: 19549 - RNA, 27 nt, Artificial Sequence
  Description of Artificial Sequence: Synthetic oligonucleotide
ggacagaggugccaggagaugcccuca

SEQ ID NO: 19550 - RNA, 27 nt, Artificial Sequence
  Description of Artificial Sequence: Synthetic oligonucleotide
uuaaaaagacaaaccauaucacuccuu

SEQ ID NO: 19551 - RNA, 27 nt, Artificial Sequence
  Description of Artificial Sequence: Synthetic oligonucleotide
cuuaaaaagacaaaccauaucacuccu

SEQ ID NO: 19552 - RNA, 27 nt, Artificial Sequence
  Description of Artificial Sequence: Synthetic oligonucleotide
gacaaccuuuaggaucuuuacugcaac

SEQ ID NO: 19553 - RNA, 27 nt, Artificial Sequence
  Description of Artificial Sequence: Synthetic oligonucleotide
gucgacaaccuuuaggaucuuuacugc

SEQ ID NO: 19554 - RNA, 27 nt, Artificial Sequence
  Description of Artificial Sequence: Synthetic oligonucleotide
acaauugccagguuguccuuugucaug

SEQ ID NO: 19555 - RNA, 27 nt, Artificial Sequence
  Description of Artificial Sequence: Synthetic oligonucleotide
ccucgcaccacugggucacaauugcca

SEQ ID NO: 19556 - RNA, 27 nt, Artificial Sequence
  Description of Artificial Sequence: Synthetic oligonucleotide
auuucaugucucuauggaugauguucu

SEQ ID NO: 19557 - RNA, 27 nt, Artificial Sequence
  Description of Artificial Sequence: Synthetic oligonucleotide
uggagaaauauauuguuggauuucaug

SEQ ID NO: 19558 - RNA, 27 nt, Artificial Sequence
  Description of Artificial Sequence: Synthetic oligonucleotide
agccuucauggagaaauauauuguugg

SEQ ID NO: 19559 - RNA, 27 nt, Artificial Sequence
  Description of Artificial Sequence: Synthetic oligonucleotide
accacuccagcgugacuuuacuguugc

SEQ ID NO: 19560 - RNA, 27 nt, Artificial Sequence
  Description of Artificial Sequence: Synthetic oligonucleotide
ccucucuuccuuuacuuucuucacaca

SEQ ID NO: 19561 - RNA, 27 nt, Artificial Sequence
  Description of Artificial Sequence: Synthetic oligonucleotide
gcccgaugcaaggauggcucggaagcg

SEQ ID NO: 19562 - RNA, 27 nt, Artificial Sequence
  Description of Artificial Sequence: Synthetic oligonucleotide
cacaguaggauauucaaccuccauuuc

SEQ ID NO: 19563 - RNA, 27 nt, Artificial Sequence
  Description of Artificial Sequence: Synthetic oligonucleotide
uuacacaguaggauauucaaccuccau

SEQ ID NO: 19564 - RNA, 27 nt, Artificial Sequence
  Description of Artificial Sequence: Synthetic oligonucleotide
uacacuacaagggaaaacucaaaaucu

SEQ ID NO: 19565 - RNA, 27 nt, Artificial Sequence
  Description of Artificial Sequence: Synthetic oligonucleotide
caaucaacaaagaacaaacaggauaaa

SEQ ID NO: 19566 - RNA, 27 nt, Artificial Sequence
  Description of Artificial Sequence: Synthetic oligonucleotide
uuucaaucaacaaagaacaaacaggau

SEQ ID NO: 19567 - RNA, 27 nt, Artificial Sequence
  Description of Artificial Sequence: Synthetic oligonucleotide
auggaagaaaaagaaggcuguagagaa

SEQ ID NO: 19568 - RNA, 27 nt, Artificial Sequence
  Description of Artificial Sequence: Synthetic oligonucleotide
uagaaggaagauuagcuauggaagaaa

SEQ ID NO: 19569 - RNA, 27 nt, Artificial Sequence
  Description of Artificial Sequence: Synthetic oligonucleotide
augaagcauucaacaggaagauuauuu

SEQ ID NO: 19570 - RNA, 27 nt, Artificial Sequence
  Description of Artificial Sequence: Synthetic oligonucleotide
caugaagcauucaacaggaagauuauu

SEQ ID NO: 19571 - RNA, 27 nt, Artificial Sequence
  Description of Artificial Sequence: Synthetic oligonucleotide
ucaaaguagaauucaagucaugaagca

SEQ ID NO: 19572 - RNA, 27 nt, Artificial Sequence
  Description of Artificial Sequence: Synthetic oligonucleotide
gucuguaguugcuucucucccucuuag

SEQ ID NO: 19573 - RNA, 27 nt, Artificial Sequence
  Description of Artificial Sequence: Synthetic oligonucleotide
guugaccuuggucugguaggagacggc

SEQ ID NO: 19574 - RNA, 27 nt, Artificial Sequence
  Description of Artificial Sequence: Synthetic oligonucleotide
gucgagauagucgggccgauugaucuc

SEQ ID NO: 19575 - RNA, 27 nt, Artificial Sequence
  Description of Artificial Sequence: Synthetic oligonucleotide
guuugggaagguuggauguucguccuc

SEQ ID NO: 19576 - RNA, 27 nt, Artificial Sequence
  Description of Artificial Sequence: Synthetic oligonucleotide
aguucuaagcuuggguuccgacccuaa

SEQ ID NO: 19577 - RNA, 27 nt, Artificial Sequence
  Description of Artificial Sequence: Synthetic oligonucleotide
uuaaaguucuaagcuuggguuccgacc

SEQ ID NO: 19578 - RNA, 27 nt, Artificial Sequence
  Description of Artificial Sequence: Synthetic oligonucleotide
guugcuuaaaguucuaagcuuggguuc

SEQ ID NO: 19579 - RNA, 27 nt, Artificial Sequence
  Description of Artificial Sequence: Synthetic oligonucleotide
gugguggucuuguugcuuaaaguucua

SEQ ID NO: 19580 - RNA, 27 nt, Artificial Sequence
  Description of Artificial Sequence: Synthetic oligonucleotide
acuuuauuucucgccacugaauaguag

SEQ ID NO: 19581 - RNA, 27 nt, Artificial Sequence
  Description of Artificial Sequence: Synthetic oligonucleotide
aacuuuauuucucgccacugaauagua

SEQ ID NO: 19582 - RNA, 27 nt, Artificial Sequence
  Description of Artificial Sequence: Synthetic oligonucleotide
ggaucauuuccuguuaucuguguuugu

SEQ ID NO: 19583 - RNA, 27 nt, Artificial Sequence
  Description of Artificial Sequence: Synthetic oligonucleotide
guuucauuucuucucuuuucuuaaggc

SEQ ID NO: 19584 - RNA, 27 nt, Artificial Sequence
  Description of Artificial Sequence: Synthetic oligonucleotide
ggaggauggaaacacacuccuucaguu

SEQ ID NO: 19585 - RNA, 27 nt, Artificial Sequence
  Description of Artificial Sequence: Synthetic oligonucleotide
ucaaagauuuucagucccgcggugaca

SEQ ID NO: 19586 - RNA, 27 nt, Artificial Sequence
  Description of Artificial Sequence: Synthetic oligonucleotide
ccugaacggcacgcuuauuucugcugu

SEQ ID NO: 19587 - RNA, 27 nt, Artificial Sequence
  Description of Artificial Sequence: Synthetic oligonucleotide
cuucuggacccugaacggcacgcuuau

SEQ ID NO: 19588 - RNA, 27 nt, Artificial Sequence
  Description of Artificial Sequence: Synthetic oligonucleotide
caagcagucuugagugacuguuucuuc

SEQ ID NO: 19589 - RNA, 27 nt, Artificial Sequence
  Description of Artificial Sequence: Synthetic oligonucleotide
ccaaagacauggaccuucuuccucuga

SEQ ID NO: 19590 - RNA, 27 nt, Artificial Sequence
  Description of Artificial Sequence: Synthetic oligonucleotide
guguuucaggcauauuuugaauacauc

SEQ ID NO: 19591 - RNA, 27 nt, Artificial Sequence
  Description of Artificial Sequence: Synthetic oligonucleotide
gagguacagagaaagggaggaaaauag

SEQ ID NO: 19592 - RNA, 27 nt, Artificial Sequence
  Description of Artificial Sequence: Synthetic oligonucleotide
ucuugucuugcucuaucuuucuuuggu

SEQ ID NO: 19593 - RNA, 27 nt, Artificial Sequence
  Description of Artificial Sequence: Synthetic oligonucleotide
uuucuugucuugcucuaucuuucuuug

SEQ ID NO: 19594 - RNA, 27 nt, Artificial Sequence
  Description of Artificial Sequence: Synthetic oligonucleotide
ggaucuuguacaaacaaaugcuuucuc

SEQ ID NO: 19595 - RNA, 27 nt, Artificial Sequence
  Description of Artificial Sequence: Synthetic oligonucleotide
ucugcaaguacguucguuuaacucaag

SEQ ID NO: 19596 - RNA, 27 nt, Artificial Sequence
  Description of Artificial Sequence: Synthetic oligonucleotide
ucuguaucgaucguucuguaucagucu

SEQ ID NO: 19597 - RNA, 27 nt, Artificial Sequence
  Description of Artificial Sequence: Synthetic oligonucleotide
auuuauuuuuauauauauauaauauau

SEQ ID NO: 19598 - RNA, 27 nt, Artificial Sequence
  Description of Artificial Sequence: Synthetic oligonucleotide
auauuuauuuuuauauauauauaauau

SEQ ID NO: 19599 - RNA, 27 nt, Artificial Sequence
  Description of Artificial Sequence: Synthetic oligonucleotide
cacagcagucaaauacauccagugaag

SEQ ID NO: 19600 - RNA, 27 nt, Artificial Sequence
  Description of Artificial Sequence: Synthetic oligonucleotide
gucucucaucuccuccucuucccuguc

SEQ ID NO: 19601 - RNA, 27 nt, Artificial Sequence
  Description of Artificial Sequence: Synthetic oligonucleotide
ccaagugggacaaaaaaaagaucaugc

SEQ ID NO: 19602 - RNA, 14 nt, Artificial Sequence
  Description of Artificial Sequence: Synthetic oligonucleotide
guauuuugaugagg

SEQ ID NO: 19603 - RNA, 12 nt, Artificial Sequence
  Description of Artificial Sequence: Synthetic oligonucleotide
ggcccagaugau

SEQ ID NO: 19604 - RNA, 14 nt, Artificial Sequence
  Description of Artificial Sequence: Synthetic oligonucleotide
gggaagaaaacuau

SEQ ID NO: 19605 - RNA, 15 nt, Artificial Sequence
  Description of Artificial Sequence: Synthetic oligonucleotide
guuuuaauuuauuuc

SEQ ID NO: 19606 - RNA, 12 nt, Artificial Sequence
  Description of Artificial Sequence: Synthetic oligonucleotide
acguagggaaau

SEQ ID NO: 19607 - RNA, 12 nt, Artificial Sequence
  Description of Artificial Sequence: Synthetic oligonucleotide
ccaggguuuacc

SEQ ID NO: 19608 - RNA, 11 nt, Artificial Sequence
  Description of Artificial Sequence: Synthetic oligonucleotide
agcaagguuua

SEQ ID NO: 19609 - RNA, 12 nt, Artificial Sequence
  Description of Artificial Sequence: Synthetic oligonucleotide
uguauuauguug

SEQ ID NO: 19610 - RNA, 15 nt, Artificial Sequence
  Description of Artificial Sequence: Synthetic oligonucleotide
uuuuaaucuuuguga

SEQ ID NO: 19611 - RNA, 14 nt, Artificial Sequence
  Description of Artificial Sequence: Synthetic oligonucleotide
uuaaucuuugugac

SEQ ID NO: 19612 - RNA, 13 nt, Artificial Sequence
  Description of Artificial Sequence: Synthetic oligonucleotide
gcugcuuaugucu

SEQ ID NO: 19613 - RNA, 14 nt, Artificial Sequence
  Description of Artificial Sequence: Synthetic oligonucleotide
aaguguuucagaag

SEQ ID NO: 19614 - RNA, 13 nt, Artificial Sequence
  Description of Artificial Sequence: Synthetic oligonucleotide
gaccaucaauaag

SEQ ID NO: 19615 - RNA, 13 nt, Artificial Sequence
  Description of Artificial Sequence: Synthetic oligonucleotide
ccaucaauaagga

SEQ ID NO: 19616 - RNA, 14 nt, Artificial Sequence
  Description of Artificial Sequence: Synthetic oligonucleotide
ucaauaaggaagaa

SEQ ID NO: 19617 - RNA, 14 nt, Artificial Sequence
  Description of Artificial Sequence: Synthetic oligonucleotide
aauaaggaagaagc

SEQ ID NO: 19618 - RNA, 13 nt, Artificial Sequence
  Description of Artificial Sequence: Synthetic oligonucleotide
aggaagaagcccu

SEQ ID NO: 19619 - RNA, 13 nt, Artificial Sequence
  Description of Artificial Sequence: Synthetic oligonucleotide
gcauaacuaaagg

SEQ ID NO: 19620 - RNA, 14 nt, Artificial Sequence
  Description of Artificial Sequence: Synthetic oligonucleotide
cauaacuaaaggug

SEQ ID NO: 19621 - RNA, 12 nt, Artificial Sequence
  Description of Artificial Sequence: Synthetic oligonucleotide
cuacaucacgcc

SEQ ID NO: 19622 - RNA, 12 nt, Artificial Sequence
  Description of Artificial Sequence: Synthetic oligonucleotide
acuggauuuaag

SEQ ID NO: 19623 - RNA, 12 nt, Artificial Sequence
  Description of Artificial Sequence: Synthetic oligonucleotide
cuggauuuaagc

SEQ ID NO: 19624 - RNA, 13 nt, Artificial Sequence
  Description of Artificial Sequence: Synthetic oligonucleotide
gauuuaagcagag

SEQ ID NO: 19625 - RNA, 13 nt, Artificial Sequence
  Description of Artificial Sequence: Synthetic oligonucleotide
auuuaagcagagu

SEQ ID NO: 19626 - RNA, 13 nt, Artificial Sequence
  Description of Artificial Sequence: Synthetic oligonucleotide
uuaagcagaguuc

SEQ ID NO: 19627 - RNA, 13 nt, Artificial Sequence
  Description of Artificial Sequence: Synthetic oligonucleotide
uaagcagaguuca

SEQ ID NO: 19628 - RNA, 14 nt, Artificial Sequence
  Description of Artificial Sequence: Synthetic oligonucleotide
agcagaguucaaaa

SEQ ID NO: 19629 - RNA, 12 nt, Artificial Sequence
  Description of Artificial Sequence: Synthetic oligonucleotide
cucagggucuga

SEQ ID NO: 19630 - RNA, 13 nt, Artificial Sequence
  Description of Artificial Sequence: Synthetic oligonucleotide
caagcaacuacau

SEQ ID NO: 19631 - RNA, 12 nt, Artificial Sequence
  Description of Artificial Sequence: Synthetic oligonucleotide
aucaauggcagc

SEQ ID NO: 19632 - RNA, 11 nt, Artificial Sequence
  Description of Artificial Sequence: Synthetic oligonucleotide
uuccagcccac

SEQ ID NO: 19633 - RNA, 12 nt, Artificial Sequence
  Description of Artificial Sequence: Synthetic oligonucleotide
cagcugagaaug

SEQ ID NO: 19634 - RNA, 13 nt, Artificial Sequence
  Description of Artificial Sequence: Synthetic oligonucleotide
aacguaucuccua

SEQ ID NO: 19635 - RNA, 14 nt, Artificial Sequence
  Description of Artificial Sequence: Synthetic oligonucleotide
ccuaaaauaauuuc

SEQ ID NO: 19636 - RNA, 13 nt, Artificial Sequence
  Description of Artificial Sequence: Synthetic oligonucleotide
uggaagauucagc

SEQ ID NO: 19637 - RNA, 12 nt, Artificial Sequence
  Description of Artificial Sequence: Synthetic oligonucleotide
uuaaacucuccu

SEQ ID NO: 19638 - RNA, 12 nt, Artificial Sequence
  Description of Artificial Sequence: Synthetic oligonucleotide
cagccuacaguu

SEQ ID NO: 19639 - RNA, 13 nt, Artificial Sequence
  Description of Artificial Sequence: Synthetic oligonucleotide
guuauguucaguc

SEQ ID NO: 19640 - RNA, 13 nt, Artificial Sequence
  Description of Artificial Sequence: Synthetic oligonucleotide
cacauacaaaaug

SEQ ID NO: 19641 - RNA, 9 nt, Artificial Sequence
  Description of Artificial Sequence: Synthetic oligonucleotide
uccuuuugc

SEQ ID NO: 19642 - RNA, 12 nt, Artificial Sequence
  Description of Artificial Sequence: Synthetic oligonucleotide
ugaccugugaag

SEQ ID NO: 19643 - RNA, 12 nt, Artificial Sequence
  Description of Artificial Sequence: Synthetic oligonucleotide
cuaucucacaca

SEQ ID NO: 19644 - RNA, 13 nt, Artificial Sequence
  Description of Artificial Sequence: Synthetic oligonucleotide
uguccucaauugu

SEQ ID NO: 19645 - RNA, 12 nt, Artificial Sequence
  Description of Artificial Sequence: Synthetic oligonucleotide
aaaccguagcug

SEQ ID NO: 19646 - RNA, 12 nt, Artificial Sequence
  Description of Artificial Sequence: Synthetic oligonucleotide
uagcuggcaagc

SEQ ID NO: 19647 - RNA, 14 nt, Artificial Sequence
  Description of Artificial Sequence: Synthetic oligonucleotide
uuguaugguuaaaa

SEQ ID NO: 19648 - RNA, 14 nt, Artificial Sequence
  Description of Artificial Sequence: Synthetic oligonucleotide
ugguuaaaagaugg

SEQ ID NO: 19649 - RNA, 13 nt, Artificial Sequence
  Description of Artificial Sequence: Synthetic oligonucleotide
cagggaauuauac

SEQ ID NO: 19650 - RNA, 12 nt, Artificial Sequence
  Description of Artificial Sequence: Synthetic oligonucleotide
acaaucuugcug

SEQ ID NO: 19651 - RNA, 13 nt, Artificial Sequence
  Description of Artificial Sequence: Synthetic oligonucleotide
ccaauaaugaaga

SEQ ID NO: 19652 - RNA, 13 nt, Artificial Sequence
  Description of Artificial Sequence: Synthetic oligonucleotide
acuuuggauguuc

SEQ ID NO: 19653 - RNA, 12 nt, Artificial Sequence
  Description of Artificial Sequence: Synthetic oligonucleotide
aaugcuuccacu

SEQ ID NO: 19654 - RNA, 11 nt, Artificial Sequence
  Description of Artificial Sequence: Synthetic oligonucleotide
gagaaaguuug

SEQ ID NO: 19655 - RNA, 11 nt, Artificial Sequence
  Description of Artificial Sequence: Synthetic oligonucleotide
aaagaacuacu

SEQ ID NO: 19656 - RNA, 12 nt, Artificial Sequence
  Description of Artificial Sequence: Synthetic oligonucleotide
uuagaaauacgg

SEQ ID NO: 19657 - RNA, 12 nt, Artificial Sequence
  Description of Artificial Sequence: Synthetic oligonucleotide
aacauggguaca

SEQ ID NO: 19658 - RNA, 14 nt, Artificial Sequence
  Description of Artificial Sequence: Synthetic oligonucleotide
aaagacacagaaga

SEQ ID NO: 19659 - RNA, 11 nt, Artificial Sequence
  Description of Artificial Sequence: Synthetic oligonucleotide
uaguagggagg

SEQ ID NO: 19660 - RNA, 12 nt, Artificial Sequence
  Description of Artificial Sequence: Synthetic oligonucleotide
gccuucugcagc

SEQ ID NO: 19661 - RNA, 10 nt, Artificial Sequence
  Description of Artificial Sequence: Synthetic oligonucleotide
ggucugguac

SEQ ID NO: 19662 - RNA, 12 nt, Artificial Sequence
  Description of Artificial Sequence: Synthetic oligonucleotide
cuaguccuuccg

SEQ ID NO: 19663 - RNA, 12 nt, Artificial Sequence
  Description of Artificial Sequence: Synthetic oligonucleotide
ccagugaauauu

SEQ ID NO: 19664 - RNA, 13 nt, Artificial Sequence
  Description of Artificial Sequence: Synthetic oligonucleotide
augaauucaaguu

SEQ ID NO: 19665 - RNA, 12 nt, Artificial Sequence
  Description of Artificial Sequence: Synthetic oligonucleotide
caggacacagau

SEQ ID NO: 19666 - RNA, 12 nt, Artificial Sequence
  Description of Artificial Sequence: Synthetic oligonucleotide
cucaaagcacag

SEQ ID NO: 19667 - RNA, 10 nt, Artificial Sequence
  Description of Artificial Sequence: Synthetic oligonucleotide
accacugcca

SEQ ID NO: 19668 - RNA, 13 nt, Artificial Sequence
  Description of Artificial Sequence: Synthetic oligonucleotide
gaaacuacuagug

SEQ ID NO: 19669 - RNA, 12 nt, Artificial Sequence
  Description of Artificial Sequence: Synthetic oligonucleotide
aagucggacagc

SEQ ID NO: 19670 - RNA, 13 nt, Artificial Sequence
  Description of Artificial Sequence: Synthetic oligonucleotide
gaaagcgaaaaau

SEQ ID NO: 19671 - RNA, 13 nt, Artificial Sequence
  Description of Artificial Sequence: Synthetic oligonucleotide
cccucugauuuag

SEQ ID NO: 19672 - RNA, 12 nt, Artificial Sequence
  Description of Artificial Sequence: Synthetic oligonucleotide
ugagcuauuuaa

SEQ ID NO: 19673 - RNA, 13 nt, Artificial Sequence
  Description of Artificial Sequence: Synthetic oligonucleotide
aaaaggugaaaaa

SEQ ID NO: 19674 - RNA, 14 nt, Artificial Sequence
  Description of Artificial Sequence: Synthetic oligonucleotide
gaaaaagcacuauu

SEQ ID NO: 19675 - RNA, 12 nt, Artificial Sequence
  Description of Artificial Sequence: Synthetic oligonucleotide
ggcugaaaagaa

SEQ ID NO: 19676 - RNA, 12 nt, Artificial Sequence
  Description of Artificial Sequence: Synthetic oligonucleotide
uaaacccuuaua

SEQ ID NO: 19677 - RNA, 13 nt, Artificial Sequence
  Description of Artificial Sequence: Synthetic oligonucleotide
cauacuauuagcc

SEQ ID NO: 19678 - RNA, 12 nt, Artificial Sequence
  Description of Artificial Sequence: Synthetic oligonucleotide
gacagaagcauu

SEQ ID NO: 19679 - RNA, 14 nt, Artificial Sequence
  Description of Artificial Sequence: Synthetic oligonucleotide
agagcaaauaagau

SEQ ID NO: 19680 - RNA, 14 nt, Artificial Sequence
  Description of Artificial Sequence: Synthetic oligonucleotide
ccaacauuuuucuc

SEQ ID NO: 19681 - RNA, 15 nt, Artificial Sequence
  Description of Artificial Sequence: Synthetic oligonucleotide
uuaaguaugagaaaa

SEQ ID NO: 19682 - RNA, 14 nt, Artificial Sequence
  Description of Artificial Sequence: Synthetic oligonucleotide
caggaauaaagaug

SEQ ID NO: 19683 - RNA, 13 nt, Artificial Sequence
  Description of Artificial Sequence: Synthetic oligonucleotide
aauuugaaugacc

SEQ ID NO: 19684 - RNA, 14 nt, Artificial Sequence
  Description of Artificial Sequence: Synthetic oligonucleotide
auguauaaagauag

SEQ ID NO: 19685 - RNA, 12 nt, Artificial Sequence
  Description of Artificial Sequence: Synthetic oligonucleotide
ggcuguaacuau

SEQ ID NO: 19686 - RNA, 11 nt, Artificial Sequence
  Description of Artificial Sequence: Synthetic oligonucleotide
ucugugaagug

SEQ ID NO: 19687 - RNA, 14 nt, Artificial Sequence
  Description of Artificial Sequence: Synthetic oligonucleotide
ccuuuaaggaaaug

SEQ ID NO: 19688 - RNA, 13 nt, Artificial Sequence
  Description of Artificial Sequence: Synthetic oligonucleotide
aaggauacaaaaa

SEQ ID NO: 19689 - RNA, 12 nt, Artificial Sequence
  Description of Artificial Sequence: Synthetic oligonucleotide
agaugcaauuug

SEQ ID NO: 19690 - RNA, 12 nt, Artificial Sequence
  Description of Artificial Sequence: Synthetic oligonucleotide
guucaaaacgaa

SEQ ID NO: 19691 - RNA, 11 nt, Artificial Sequence
  Description of Artificial Sequence: Synthetic oligonucleotide
gugaaaccuca

SEQ ID NO: 19692 - RNA, 13 nt, Artificial Sequence
  Description of Artificial Sequence: Synthetic oligonucleotide
acgaaagagaagc

SEQ ID NO: 19693 - RNA, 12 nt, Artificial Sequence
  Description of Artificial Sequence: Synthetic oligonucleotide
cuccacaagcgc

SEQ ID NO: 19694 - RNA, 14 nt, Artificial Sequence
  Description of Artificial Sequence: Synthetic oligonucleotide
gagaagauuccaaa

SEQ ID NO: 19695 - RNA, 13 nt, Artificial Sequence
  Description of Artificial Sequence: Synthetic oligonucleotide
aaucuggauucaa

SEQ ID NO: 19696 - RNA, 13 nt, Artificial Sequence
  Description of Artificial Sequence: Synthetic oligonucleotide
agaacagauuuga

SEQ ID NO: 19697 - RNA, 11 nt, Artificial Sequence
  Description of Artificial Sequence: Synthetic oligonucleotide
ccagagcugug

SEQ ID NO: 19698 - RNA, 12 nt, Artificial Sequence
  Description of Artificial Sequence: Synthetic oligonucleotide
ccucagauuguu

SEQ ID NO: 19699 - RNA, 12 nt, Artificial Sequence
  Description of Artificial Sequence: Synthetic oligonucleotide
cuauuuuaauua

SEQ ID NO: 19700 - RNA, 13 nt, Artificial Sequence
  Description of Artificial Sequence: Synthetic oligonucleotide
uuuaauuuauuaa

SEQ ID NO: 19701 - RNA, 12 nt, Artificial Sequence
  Description of Artificial Sequence: Synthetic oligonucleotide
augcaguuugaa

SEQ ID NO: 19702 - RNA, 11 nt, Artificial Sequence
  Description of Artificial Sequence: Synthetic oligonucleotide
caugcugcugg

SEQ ID NO: 19703 - RNA, 13 nt, Artificial Sequence
  Description of Artificial Sequence: Synthetic oligonucleotide
agaugugcauuuc

SEQ ID NO: 19704 - RNA, 12 nt, Artificial Sequence
  Description of Artificial Sequence: Synthetic oligonucleotide
ucaaaaccugug

SEQ ID NO: 19705 - RNA, 11 nt, Artificial Sequence
  Description of Artificial Sequence: Synthetic oligonucleotide
gaaugugggua

SEQ ID NO: 19706 - RNA, 10 nt, Artificial Sequence
  Description of Artificial Sequence: Synthetic oligonucleotide
auguggguag

SEQ ID NO: 19707 - RNA, 13 nt, Artificial Sequence
  Description of Artificial Sequence: Synthetic oligonucleotide
ugaaaaugagcau

SEQ ID NO: 19708 - RNA, 13 nt, Artificial Sequence
  Description of Artificial Sequence: Synthetic oligonucleotide
uugcuuuucaugu

SEQ ID NO: 19709 - RNA, 12 nt, Artificial Sequence
  Description of Artificial Sequence: Synthetic oligonucleotide
uguauuucuaua

SEQ ID NO: 19710 - RNA, 13 nt, Artificial Sequence
  Description of Artificial Sequence: Synthetic oligonucleotide
uuugauuaauguu

SEQ ID NO: 19711 - RNA, 12 nt, Artificial Sequence
  Description of Artificial Sequence: Synthetic oligonucleotide
caacguguauag

SEQ ID NO: 19712 - RNA, 12 nt, Artificial Sequence
  Description of Artificial Sequence: Synthetic oligonucleotide
cauauccuuggc

SEQ ID NO: 19713 - RNA, 13 nt, Artificial Sequence
  Description of Artificial Sequence: Synthetic oligonucleotide
uacuaacaucugg

SEQ ID NO: 19714 - RNA, 11 nt, Artificial Sequence
  Description of Artificial Sequence: Synthetic oligonucleotide
cauaaguugug

SEQ ID NO: 19715 - RNA, 12 nt, Artificial Sequence
  Description of Artificial Sequence: Synthetic oligonucleotide
gcaucauuuugg

SEQ ID NO: 19716 - RNA, 10 nt, Artificial Sequence
  Description of Artificial Sequence: Synthetic oligonucleotide
gcucuucuua

SEQ ID NO: 19717 - RNA, 10 nt, Artificial Sequence
  Description of Artificial Sequence: Synthetic oligonucleotide
agauuagguc

SEQ ID NO: 19718 - RNA, 12 nt, Artificial Sequence
  Description of Artificial Sequence: Synthetic oligonucleotide
auggaauugaaa

SEQ ID NO: 19719 - RNA, 13 nt, Artificial Sequence
  Description of Artificial Sequence: Synthetic oligonucleotide
cacacucauuccu

SEQ ID NO: 19720 - RNA, 12 nt, Artificial Sequence
  Description of Artificial Sequence: Synthetic oligonucleotide
uguagagguaac

SEQ ID NO: 19721 - RNA, 11 nt, Artificial Sequence
  Description of Artificial Sequence: Synthetic oligonucleotide
caaccacaugc

SEQ ID NO: 19722 - RNA, 12 nt, Artificial Sequence
  Description of Artificial Sequence: Synthetic oligonucleotide
ucggaaacaagu

SEQ ID NO: 19723 - RNA, 11 nt, Artificial Sequence
  Description of Artificial Sequence: Synthetic oligonucleotide
acucccaauaa

SEQ ID NO: 19724 - RNA, 13 nt, Artificial Sequence
  Description of Artificial Sequence: Synthetic oligonucleotide
aaugcuaagaaau

SEQ ID NO: 19725 - RNA, 11 nt, Artificial Sequence
  Description of Artificial Sequence: Synthetic oligonucleotide
gucuuucucua

SEQ ID NO: 19726 - RNA, 11 nt, Artificial Sequence
  Description of Artificial Sequence: Synthetic oligonucleotide
ugaauuucagg

SEQ ID NO: 19727 - RNA, 13 nt, Artificial Sequence
  Description of Artificial Sequence: Synthetic oligonucleotide
cgauucccucuca

SEQ ID NO: 19728 - RNA, 11 nt, Artificial Sequence
  Description of Artificial Sequence: Synthetic oligonucleotide
aggaaagugaa

SEQ ID NO: 19729 - RNA, 12 nt, Artificial Sequence
  Description of Artificial Sequence: Synthetic oligonucleotide
gaggcugcaugc

SEQ ID NO: 19730 - RNA, 11 nt, Artificial Sequence
  Description of Artificial Sequence: Synthetic oligonucleotide
ucucugaacag

SEQ ID NO: 19731 - RNA, 12 nt, Artificial Sequence
  Description of Artificial Sequence: Synthetic oligonucleotide
aacuuggcugua

SEQ ID NO: 19732 - RNA, 12 nt, Artificial Sequence
  Description of Artificial Sequence: Synthetic oligonucleotide
agaagccaaaau

SEQ ID NO: 19733 - RNA, 14 nt, Artificial Sequence
  Description of Artificial Sequence: Synthetic oligonucleotide
auuaaaagaagucc

SEQ ID NO: 19734 - RNA, 14 nt, Artificial Sequence
  Description of Artificial Sequence: Synthetic oligonucleotide
gaauccggauuauc

SEQ ID NO: 19735 - RNA, 12 nt, Artificial Sequence
  Description of Artificial Sequence: Synthetic oligonucleotide
aaugugacauca

SEQ ID NO: 19736 - RNA, 13 nt, Artificial Sequence
  Description of Artificial Sequence: Synthetic oligonucleotide
caucaaagcaagu

SEQ ID NO: 19737 - RNA, 11 nt, Artificial Sequence
  Description of Artificial Sequence: Synthetic oligonucleotide
agagagagaaa

SEQ ID NO: 19738 - RNA, 13 nt, Artificial Sequence
  Description of Artificial Sequence: Synthetic oligonucleotide
ucgcuguaguauu

SEQ ID NO: 19739 - RNA, 14 nt, Artificial Sequence
  Description of Artificial Sequence: Synthetic oligonucleotide
cgcuguaguauuua

SEQ ID NO: 19740 - RNA, 13 nt, Artificial Sequence
  Description of Artificial Sequence: Synthetic oligonucleotide
auuuaagcccaua

SEQ ID NO: 19741 - RNA, 15 nt, Artificial Sequence
  Description of Artificial Sequence: Synthetic oligonucleotide
auuaaaauaaacaug

SEQ ID NO: 19742 - RNA, 12 nt, Artificial Sequence
  Description of Artificial Sequence: Synthetic oligonucleotide
cuguucugaucg

SEQ ID NO: 19743 - RNA, 16 nt, Artificial Sequence
  Description of Artificial Sequence: Synthetic oligonucleotide
aaauaauuugaacuuu

SEQ ID NO: 19744 - RNA, 12 nt, Artificial Sequence
  Description of Artificial Sequence: Synthetic oligonucleotide
ugcgaccuuaau

SEQ ID NO: 19745 - RNA, 11 nt, Artificial Sequence
  Description of Artificial Sequence: Synthetic oligonucleotide
cugagaaagcu

SEQ ID NO: 19746 - RNA, 13 nt, Artificial Sequence
  Description of Artificial Sequence: Synthetic oligonucleotide
aguaaagaugcua

SEQ ID NO: 19747 - RNA, 12 nt, Artificial Sequence
  Description of Artificial Sequence: Synthetic oligonucleotide
cugcuuaauugc

SEQ ID NO: 19748 - RNA, 14 nt, Artificial Sequence
  Description of Artificial Sequence: Synthetic oligonucleotide
uaccauaugaauga

SEQ ID NO: 19749 - RNA, 12 nt, Artificial Sequence
  Description of Artificial Sequence: Synthetic oligonucleotide
aacuuucuuauc

SEQ ID NO: 19750 - RNA, 13 nt, Artificial Sequence
  Description of Artificial Sequence: Synthetic oligonucleotide
ccuugcaugacau

SEQ ID NO: 19751 - RNA, 14 nt, Artificial Sequence
  Description of Artificial Sequence: Synthetic oligonucleotide
ugaauuuguauaug

SEQ ID NO: 19752 - RNA, 12 nt, Artificial Sequence
  Description of Artificial Sequence: Synthetic oligonucleotide
gaauccuaguag

SEQ ID NO: 19753 - RNA, 10 nt, Artificial Sequence
  Description of Artificial Sequence: Synthetic oligonucleotide
gaaagggaag

SEQ ID NO: 19754 - RNA, 11 nt, Artificial Sequence
  Description of Artificial Sequence: Synthetic oligonucleotide
uaucggcaugc

SEQ ID NO: 19755 - RNA, 12 nt, Artificial Sequence
  Description of Artificial Sequence: Synthetic oligonucleotide
caccucauagua

SEQ ID NO: 19756 - RNA, 11 nt, Artificial Sequence
  Description of Artificial Sequence: Synthetic oligonucleotide
ccagaauugcc

SEQ ID NO: 19757 - RNA, 11 nt, Artificial Sequence
  Description of Artificial Sequence: Synthetic oligonucleotide
uggugaucugg

SEQ ID NO: 19758 - RNA, 12 nt, Artificial Sequence
  Description of Artificial Sequence: Synthetic oligonucleotide
gaucuggguaau

SEQ ID NO: 19759 - RNA, 12 nt, Artificial Sequence
  Description of Artificial Sequence: Synthetic oligonucleotide
ggaugugaugaa

SEQ ID NO: 19760 - RNA, 12 nt, Artificial Sequence
  Description of Artificial Sequence: Synthetic oligonucleotide
cauuuccacagc

SEQ ID NO: 19761 - RNA, 11 nt, Artificial Sequence
  Description of Artificial Sequence: Synthetic oligonucleotide
acagcuacacc

SEQ ID NO: 19762 - RNA, 12 nt, Artificial Sequence
  Description of Artificial Sequence: Synthetic oligonucleotide
ugcaguucuuac

SEQ ID NO: 19763 - RNA, 12 nt, Artificial Sequence
  Description of Artificial Sequence: Synthetic oligonucleotide
acgagaagaaga

SEQ ID NO: 19764 - RNA, 12 nt, Artificial Sequence
  Description of Artificial Sequence: Synthetic oligonucleotide
cgagaagaagau

SEQ ID NO: 19765 - RNA, 15 nt, Artificial Sequence
  Description of Artificial Sequence: Synthetic oligonucleotide
aagaagaucauuuac

SEQ ID NO: 19766 - RNA, 11 nt, Artificial Sequence
  Description of Artificial Sequence: Synthetic oligonucleotide
agaggaagagg

SEQ ID NO: 19767 - RNA, 12 nt, Artificial Sequence
  Description of Artificial Sequence: Synthetic oligonucleotide
gaggaagaggug

SEQ ID NO: 19768 - RNA, 13 nt, Artificial Sequence
  Description of Artificial Sequence: Synthetic oligonucleotide
cuacuuugagggc

SEQ ID NO: 19769 - RNA, 12 nt, Artificial Sequence
  Description of Artificial Sequence: Synthetic oligonucleotide
agggcaucuccu

SEQ ID NO: 19770 - RNA, 10 nt, Artificial Sequence
  Description of Artificial Sequence: Synthetic oligonucleotide
ggagugauau

SEQ ID NO: 19771 - RNA, 11 nt, Artificial Sequence
  Description of Artificial Sequence: Synthetic oligonucleotide
gagugauaugg

SEQ ID NO: 19772 - RNA, 12 nt, Artificial Sequence
  Description of Artificial Sequence: Synthetic oligonucleotide
ugcaguaaagau

SEQ ID NO: 19773 - RNA, 13 nt, Artificial Sequence
  Description of Artificial Sequence: Synthetic oligonucleotide
aguaaagauccua

SEQ ID NO: 19774 - RNA, 12 nt, Artificial Sequence
  Description of Artificial Sequence: Synthetic oligonucleotide
ugacaaaggaca

SEQ ID NO: 19775 - RNA, 13 nt, Artificial Sequence
  Description of Artificial Sequence: Synthetic oligonucleotide
gcaauugugaccc

SEQ ID NO: 19776 - RNA, 12 nt, Artificial Sequence
  Description of Artificial Sequence: Synthetic oligonucleotide
aacaucauccau

SEQ ID NO: 19777 - RNA, 12 nt, Artificial Sequence
  Description of Artificial Sequence: Synthetic oligonucleotide
ugaaauccaaca

SEQ ID NO: 19778 - RNA, 15 nt, Artificial Sequence
  Description of Artificial Sequence: Synthetic oligonucleotide
aacaauauauuucuc

SEQ ID NO: 19779 - RNA, 14 nt, Artificial Sequence
  Description of Artificial Sequence: Synthetic oligonucleotide
aacaguaaagucac

SEQ ID NO: 19780 - RNA, 14 nt, Artificial Sequence
  Description of Artificial Sequence: Synthetic oligonucleotide
ugugaagaaaguaa

SEQ ID NO: 19781 - RNA, 13 nt, Artificial Sequence
  Description of Artificial Sequence: Synthetic oligonucleotide
cuuccgagccauc

SEQ ID NO: 19782 - RNA, 12 nt, Artificial Sequence
  Description of Artificial Sequence: Synthetic oligonucleotide
aauggagguuga

SEQ ID NO: 19783 - RNA, 12 nt, Artificial Sequence
  Description of Artificial Sequence: Synthetic oligonucleotide
ggagguugaaua

SEQ ID NO: 19784 - RNA, 13 nt, Artificial Sequence
  Description of Artificial Sequence: Synthetic oligonucleotide
auuuugaguuuuc

SEQ ID NO: 19785 - RNA, 12 nt, Artificial Sequence
  Description of Artificial Sequence: Synthetic oligonucleotide
uauccuguuugu

SEQ ID NO: 19786 - RNA, 11 nt, Artificial Sequence
  Description of Artificial Sequence: Synthetic oligonucleotide
ccuguuuguuc

SEQ ID NO: 19787 - RNA, 10 nt, Artificial Sequence
  Description of Artificial Sequence: Synthetic oligonucleotide
cucuacagcc

SEQ ID NO: 19788 - RNA, 12 nt, Artificial Sequence
  Description of Artificial Sequence: Synthetic oligonucleotide
ucuuccauagcu

SEQ ID NO: 19789 - RNA, 12 nt, Artificial Sequence
  Description of Artificial Sequence: Synthetic oligonucleotide
auaaucuuccug

SEQ ID NO: 19790 - RNA, 12 nt, Artificial Sequence
  Description of Artificial Sequence: Synthetic oligonucleotide
uaaucuuccugu

SEQ ID NO: 19791 - RNA, 12 nt, Artificial Sequence
  Description of Artificial Sequence: Synthetic oligonucleotide
cuucaugacuug

SEQ ID NO: 19792 - RNA, 12 nt, Artificial Sequence
  Description of Artificial Sequence: Synthetic oligonucleotide
aagagggagaga

SEQ ID NO: 19793 - RNA, 12 nt, Artificial Sequence
  Description of Artificial Sequence: Synthetic oligonucleotide
cgucuccuacca

SEQ ID NO: 19794 - RNA, 12 nt, Artificial Sequence
  Description of Artificial Sequence: Synthetic oligonucleotide
gaucaaucggcc

SEQ ID NO: 19795 - RNA, 12 nt, Artificial Sequence
  Description of Artificial Sequence: Synthetic oligonucleotide
ggacgaacaucc

SEQ ID NO: 19796 - RNA, 11 nt, Artificial Sequence
  Description of Artificial Sequence: Synthetic oligonucleotide
agggucggaac

SEQ ID NO: 19797 - RNA, 10 nt, Artificial Sequence
  Description of Artificial Sequence: Synthetic oligonucleotide
ucggaaccca

SEQ ID NO: 19798 - RNA, 11 nt, Artificial Sequence
  Description of Artificial Sequence: Synthetic oligonucleotide
acccaagcuua

SEQ ID NO: 19799 - RNA, 14 nt, Artificial Sequence
  Description of Artificial Sequence: Synthetic oligonucleotide
gaacuuuaagcaac

SEQ ID NO: 19800 - RNA, 11 nt, Artificial Sequence
  Description of Artificial Sequence: Synthetic oligonucleotide
acuauucagug

SEQ ID NO: 19801 - RNA, 11 nt, Artificial Sequence
  Description of Artificial Sequence: Synthetic oligonucleotide
cuauucagugg

SEQ ID NO: 19802 - RNA, 13 nt, Artificial Sequence
  Description of Artificial Sequence: Synthetic oligonucleotide
aaacacagauaac

SEQ ID NO: 19803 - RNA, 12 nt, Artificial Sequence
  Description of Artificial Sequence: Synthetic oligonucleotide
cuuaagaaaaga

SEQ ID NO: 19804 - RNA, 12 nt, Artificial Sequence
  Description of Artificial Sequence: Synthetic oligonucleotide
cugaaggagugu

SEQ ID NO: 19805 - RNA, 10 nt, Artificial Sequence
  Description of Artificial Sequence: Synthetic oligonucleotide
ucaccgcggg

SEQ ID NO: 19806 - RNA, 14 nt, Artificial Sequence
  Description of Artificial Sequence: Synthetic oligonucleotide
agcagaaauaagcg

SEQ ID NO: 19807 - RNA, 12 nt, Artificial Sequence
  Description of Artificial Sequence: Synthetic oligonucleotide
aagcgugccguu

SEQ ID NO: 19808 - RNA, 12 nt, Artificial Sequence
  Description of Artificial Sequence: Synthetic oligonucleotide
agaaacagucac

SEQ ID NO: 19809 - RNA, 12 nt, Artificial Sequence
  Description of Artificial Sequence: Synthetic oligonucleotide
agaggaagaagg

SEQ ID NO: 19810 - RNA, 14 nt, Artificial Sequence
  Description of Artificial Sequence: Synthetic oligonucleotide
uguauucaaaauau

SEQ ID NO: 19811 - RNA, 13 nt, Artificial Sequence
  Description of Artificial Sequence: Synthetic oligonucleotide
auuuuccucccuu

SEQ ID NO: 19812 - RNA, 13 nt, Artificial Sequence
  Description of Artificial Sequence: Synthetic oligonucleotide
caaagaaagauag

SEQ ID NO: 19813 - RNA, 12 nt, Artificial Sequence
  Description of Artificial Sequence: Synthetic oligonucleotide
aagaaagauaga

SEQ ID NO: 19814 - RNA, 13 nt, Artificial Sequence
  Description of Artificial Sequence: Synthetic oligonucleotide
gaaagcauuuguu

SEQ ID NO: 19815 - RNA, 13 nt, Artificial Sequence
  Description of Artificial Sequence: Synthetic oligonucleotide
ugaguuaaacgaa

SEQ ID NO: 19816 - RNA, 12 nt, Artificial Sequence
  Description of Artificial Sequence: Synthetic oligonucleotide
acugauacagaa

SEQ ID NO: 19817 - RNA, 12 nt, Artificial Sequence
  Description of Artificial Sequence: Synthetic oligonucleotide
auauuauauaua

SEQ ID NO: 19818 - RNA, 12 nt, Artificial Sequence
  Description of Artificial Sequence: Synthetic oligonucleotide
auuauauauaua

SEQ ID NO: 19819 - RNA, 12 nt, Artificial Sequence
  Description of Artificial Sequence: Synthetic oligonucleotide
ucacuggaugua

SEQ ID NO: 19820 - RNA, 12 nt, Artificial Sequence
  Description of Artificial Sequence: Synthetic oligonucleotide
cagggaagagga

SEQ ID NO: 19821 - RNA, 15 nt, Artificial Sequence
  Description of Artificial Sequence: Synthetic oligonucleotide
augaucuuuuuuuug

SEQ ID NO: 19822 - RNA, 11 nt, Artificial Sequence
  Description of Artificial Sequence: Synthetic oligonucleotide
aguucacggcc

SEQ ID NO: 19823 - RNA, 13 nt, Artificial Sequence
  Description of Artificial Sequence: Synthetic oligonucleotide
caccaucacacca

SEQ ID NO: 19824 - RNA, 11 nt, Artificial Sequence
  Description of Artificial Sequence: Synthetic oligonucleotide
ccugcggguuu

SEQ ID NO: 19825 - RNA, 10 nt, Artificial Sequence
  Description of Artificial Sequence: Synthetic oligonucleotide
auccaguuug

SEQ ID NO: 19826 - RNA, 13 nt, Artificial Sequence
  Description of Artificial Sequence: Synthetic oligonucleotide
guuaaggacuucu

SEQ ID NO: 19827 - RNA, 13 nt, Artificial Sequence
  Description of Artificial Sequence: Synthetic oligonucleotide
cagugggacagag

SEQ ID NO: 19828 - RNA, 14 nt, Artificial Sequence
  Description of Artificial Sequence: Synthetic oligonucleotide
aauuuguuauugug

SEQ ID NO: 19829 - RNA, 13 nt, Artificial Sequence
  Description of Artificial Sequence: Synthetic oligonucleotide
uucaaaugcauuu

SEQ ID NO: 19830 - RNA, 10 nt, Artificial Sequence
  Description of Artificial Sequence: Synthetic oligonucleotide
caggaaagcc

SEQ ID NO: 19831 - RNA, 11 nt, Artificial Sequence
  Description of Artificial Sequence: Synthetic oligonucleotide
aggaaagcccu

SEQ ID NO: 19832 - RNA, 12 nt, Artificial Sequence
  Description of Artificial Sequence: Synthetic oligonucleotide
cccagcauggcc

SEQ ID NO: 19833 - RNA, 11 nt, Artificial Sequence
  Description of Artificial Sequence: Synthetic oligonucleotide
cuucucccuga

SEQ ID NO: 19834 - RNA, 12 nt, Artificial Sequence
  Description of Artificial Sequence: Synthetic oligonucleotide
gaagaagcccuu

SEQ ID NO: 19835 - RNA, 12 nt, Artificial Sequence
  Description of Artificial Sequence: Synthetic oligonucleotide
agaagcccuuca

SEQ ID NO: 19836 - RNA, 11 nt, Artificial Sequence
  Description of Artificial Sequence: Synthetic oligonucleotide
gcccuucagcg

SEQ ID NO: 19837 - RNA, 11 nt, Artificial Sequence
  Description of Artificial Sequence: Synthetic oligonucleotide
ccuucagcggc

SEQ ID NO: 19838 - RNA, 12 nt, Artificial Sequence
  Description of Artificial Sequence: Synthetic oligonucleotide
ucagcggccagu

SEQ ID NO: 19839 - RNA, 12 nt, Artificial Sequence
  Description of Artificial Sequence: Synthetic oligonucleotide
ugaaaagcuccg

SEQ ID NO: 19840 - RNA, 11 nt, Artificial Sequence
  Description of Artificial Sequence: Synthetic oligonucleotide
aaaagcuccgg

SEQ ID NO: 19841 - RNA, 13 nt, Artificial Sequence
  Description of Artificial Sequence: Synthetic oligonucleotide
agucaacagucug

SEQ ID NO: 19842 - RNA, 13 nt, Artificial Sequence
  Description of Artificial Sequence: Synthetic oligonucleotide
cagaguucaaaag

SEQ ID NO: 19843 - RNA, 13 nt, Artificial Sequence
  Description of Artificial Sequence: Synthetic oligonucleotide
agaguucaaaagc

SEQ ID NO: 19844 - RNA, 12 nt, Artificial Sequence
  Description of Artificial Sequence: Synthetic oligonucleotide
uucaaaagcccu

SEQ ID NO: 19845 - RNA, 12 nt, Artificial Sequence
  Description of Artificial Sequence: Synthetic oligonucleotide
ucaaaagcccuu

SEQ ID NO: 19846 - RNA, 12 nt, Artificial Sequence
  Description of Artificial Sequence: Synthetic oligonucleotide
aaaagcccuuca

SEQ ID NO: 19847 - RNA, 12 nt, Artificial Sequence
  Description of Artificial Sequence: Synthetic oligonucleotide
aaagcccuucag

SEQ ID NO: 19848 - RNA, 13 nt, Artificial Sequence
  Description of Artificial Sequence: Synthetic oligonucleotide
gugaagccgcucg

SEQ ID NO: 19849 - RNA, 12 nt, Artificial Sequence
  Description of Artificial Sequence: Synthetic oligonucleotide
cacgccagucaa

SEQ ID NO: 19850 - RNA, 13 nt, Artificial Sequence
  Description of Artificial Sequence: Synthetic oligonucleotide
uucuuggugcgug

SEQ ID NO: 19851 - RNA, 14 nt, Artificial Sequence
  Description of Artificial Sequence: Synthetic oligonucleotide
auuggauucaucag

SEQ ID NO: 19852 - RNA, 13 nt, Artificial Sequence
  Description of Artificial Sequence: Synthetic oligonucleotide
uggaauaccuaag

SEQ ID NO: 19853 - RNA, 12 nt, Artificial Sequence
  Description of Artificial Sequence: Synthetic oligonucleotide
auuugaggcuca

SEQ ID NO: 19854 - RNA, 11 nt, Artificial Sequence
  Description of Artificial Sequence: Synthetic oligonucleotide
ucuacaauugg

SEQ ID NO: 19855 - RNA, 12 nt, Artificial Sequence
  Description of Artificial Sequence: Synthetic oligonucleotide
uaguuaggagcc

SEQ ID NO: 19856 - RNA, 13 nt, Artificial Sequence
  Description of Artificial Sequence: Synthetic oligonucleotide
agucaauauccac

SEQ ID NO: 19857 - RNA, 13 nt, Artificial Sequence
  Description of Artificial Sequence: Synthetic oligonucleotide
auguucagucaca

SEQ ID NO: 19858 - RNA, 12 nt, Artificial Sequence
  Description of Artificial Sequence: Synthetic oligonucleotide
acacacacauac

SEQ ID NO: 19859 - RNA, 12 nt, Artificial Sequence
  Description of Artificial Sequence: Synthetic oligonucleotide
uuccuuuugcuu

SEQ ID NO: 19860 - RNA, 16 nt, Artificial Sequence
  Description of Artificial Sequence: Synthetic oligonucleotide
uuuuaaaguaauuuuu

SEQ ID NO: 19861 - RNA, 13 nt, Artificial Sequence
  Description of Artificial Sequence: Synthetic oligonucleotide
caacagucaaugg

SEQ ID NO: 19862 - RNA, 13 nt, Artificial Sequence
  Description of Artificial Sequence: Synthetic oligonucleotide
ucgacaaaccaau

SEQ ID NO: 19863 - RNA, 12 nt, Artificial Sequence
  Description of Artificial Sequence: Synthetic oligonucleotide
acugcuaccacu

SEQ ID NO: 19864 - RNA, 13 nt, Artificial Sequence
  Description of Artificial Sequence: Synthetic oligonucleotide
gcaagcggucuua

SEQ ID NO: 19865 - RNA, 13 nt, Artificial Sequence
  Description of Artificial Sequence: Synthetic oligonucleotide
ggucuuaccggcu

SEQ ID NO: 19866 - RNA, 11 nt, Artificial Sequence
  Description of Artificial Sequence: Synthetic oligonucleotide
gauggguuacc

SEQ ID NO: 19867 - RNA, 11 nt, Artificial Sequence
  Description of Artificial Sequence: Synthetic oligonucleotide
guuaccugcga

SEQ ID NO: 19868 - RNA, 12 nt, Artificial Sequence
  Description of Artificial Sequence: Synthetic oligonucleotide
aaucuugcugag

SEQ ID NO: 19869 - RNA, 13 nt, Artificial Sequence
  Description of Artificial Sequence: Synthetic oligonucleotide
agcauaaaacagu

SEQ ID NO: 19870 - RNA, 12 nt, Artificial Sequence
  Description of Artificial Sequence: Synthetic oligonucleotide
guccuuuauccu

SEQ ID NO: 19871 - RNA, 12 nt, Artificial Sequence
  Description of Artificial Sequence: Synthetic oligonucleotide
caacgcaaguug

SEQ ID NO: 19872 - RNA, 13 nt, Artificial Sequence
  Description of Artificial Sequence: Synthetic oligonucleotide
aaacugaaaccau

SEQ ID NO: 19873 - RNA, 14 nt, Artificial Sequence
  Description of Artificial Sequence: Synthetic oligonucleotide
acuuuguuaaauau

SEQ ID NO: 19874 - RNA, 14 nt, Artificial Sequence
  Description of Artificial Sequence: Synthetic oligonucleotide
guauauuaaaaguu

SEQ ID NO: 19875 - RNA, 13 nt, Artificial Sequence
  Description of Artificial Sequence: Synthetic oligonucleotide
guuuugacuuaac

SEQ ID NO: 19876 - RNA, 13 nt, Artificial Sequence
  Description of Artificial Sequence: Synthetic oligonucleotide
gcaaacucagcac

SEQ ID NO: 19877 - RNA, 11 nt, Artificial Sequence
  Description of Artificial Sequence: Synthetic oligonucleotide
ugcugaccuca

SEQ ID NO: 19878 - RNA, 14 nt, Artificial Sequence
  Description of Artificial Sequence: Synthetic oligonucleotide
uuuauucagaucgc

SEQ ID NO: 19879 - RNA, 13 nt, Artificial Sequence
  Description of Artificial Sequence: Synthetic oligonucleotide
aggguucugggau

SEQ ID NO: 19880 - RNA, 15 nt, Artificial Sequence
  Description of Artificial Sequence: Synthetic oligonucleotide
auauuggaaauuaug

SEQ ID NO: 19881 - RNA, 13 nt, Artificial Sequence
  Description of Artificial Sequence: Synthetic oligonucleotide
auggaagcacuag

SEQ ID NO: 19882 - RNA, 13 nt, Artificial Sequence
  Description of Artificial Sequence: Synthetic oligonucleotide
guuuuuaugugga

SEQ ID NO: 19883 - RNA, 12 nt, Artificial Sequence
  Description of Artificial Sequence: Synthetic oligonucleotide
ggaauugguaga

SEQ ID NO: 19884 - RNA, 13 nt, Artificial Sequence
  Description of Artificial Sequence: Synthetic oligonucleotide
uuagacuuggaga

SEQ ID NO: 19885 - RNA, 13 nt, Artificial Sequence
  Description of Artificial Sequence: Synthetic oligonucleotide
uuacaguauucca

SEQ ID NO: 19886 - RNA, 15 nt, Artificial Sequence
  Description of Artificial Sequence: Synthetic oligonucleotide
ccacugaugaauuaa

SEQ ID NO: 19887 - RNA, 12 nt, Artificial Sequence
  Description of Artificial Sequence: Synthetic oligonucleotide
ccacaucaucac

SEQ ID NO: 19888 - RNA, 13 nt, Artificial Sequence
  Description of Artificial Sequence: Synthetic oligonucleotide
cucaccaaacaga

SEQ ID NO: 19889 - RNA, 12 nt, Artificial Sequence
  Description of Artificial Sequence: Synthetic oligonucleotide
ggaacaugaugg

SEQ ID NO: 19890 - RNA, 12 nt, Artificial Sequence
  Description of Artificial Sequence: Synthetic oligonucleotide
cauguagacugc

SEQ ID NO: 19891 - RNA, 13 nt, Artificial Sequence
  Description of Artificial Sequence: Synthetic oligonucleotide
ggaucuauuuaug

SEQ ID NO: 19892 - RNA, 12 nt, Artificial Sequence
  Description of Artificial Sequence: Synthetic oligonucleotide
gcacuauuauca

SEQ ID NO: 19893 - RNA, 11 nt, Artificial Sequence
  Description of Artificial Sequence: Synthetic oligonucleotide
aucaguucugc

SEQ ID NO: 19894 - RNA, 13 nt, Artificial Sequence
  Description of Artificial Sequence: Synthetic oligonucleotide
agauuaaaccuac

SEQ ID NO: 19895 - RNA, 13 nt, Artificial Sequence
  Description of Artificial Sequence: Synthetic oligonucleotide
auaaaauccuucu

SEQ ID NO: 19896 - RNA, 12 nt, Artificial Sequence
  Description of Artificial Sequence: Synthetic oligonucleotide
aaugcuguagac

SEQ ID NO: 19897 - RNA, 13 nt, Artificial Sequence
  Description of Artificial Sequence: Synthetic oligonucleotide
uugauaggaauag

SEQ ID NO: 19898 - RNA, 11 nt, Artificial Sequence
  Description of Artificial Sequence: Synthetic oligonucleotide
aauggcccuga

SEQ ID NO: 19899 - RNA, 11 nt, Artificial Sequence
  Description of Artificial Sequence: Synthetic oligonucleotide
uuccucaagca

SEQ ID NO: 19900 - RNA, 10 nt, Artificial Sequence
  Description of Artificial Sequence: Synthetic oligonucleotide
guucagccca

SEQ ID NO: 19901 - RNA, 11 nt, Artificial Sequence
  Description of Artificial Sequence: Synthetic oligonucleotide
gcugcugaacc

SEQ ID NO: 19902 - RNA, 12 nt, Artificial Sequence
  Description of Artificial Sequence: Synthetic oligonucleotide
aaguucucuuca

SEQ ID NO: 19903 - RNA, 11 nt, Artificial Sequence
  Description of Artificial Sequence: Synthetic oligonucleotide
ccagccuagag

SEQ ID NO: 19904 - RNA, 13 nt, Artificial Sequence
  Description of Artificial Sequence: Synthetic oligonucleotide
cucugugaagugu

SEQ ID NO: 19905 - RNA, 14 nt, Artificial Sequence
  Description of Artificial Sequence: Synthetic oligonucleotide
ugagaaaauuucaa

SEQ ID NO: 19906 - RNA, 11 nt, Artificial Sequence
  Description of Artificial Sequence: Synthetic oligonucleotide
aauccuccuga

SEQ ID NO: 19907 - RNA, 12 nt, Artificial Sequence
  Description of Artificial Sequence: Synthetic oligonucleotide
gugacaucauau

SEQ ID NO: 19908 - RNA, 13 nt, Artificial Sequence
  Description of Artificial Sequence: Synthetic oligonucleotide
aaucuucaucaua

SEQ ID NO: 19909 - RNA, 13 nt, Artificial Sequence
  Description of Artificial Sequence: Synthetic oligonucleotide
gacuagcuauuaa

SEQ ID NO: 19910 - RNA, 14 nt, Artificial Sequence
  Description of Artificial Sequence: Synthetic oligonucleotide
ucucuacuaaaaau

SEQ ID NO: 19911 - RNA, 12 nt, Artificial Sequence
  Description of Artificial Sequence: Synthetic oligonucleotide
ucuaucucgccu

SEQ ID NO: 19912 - RNA, 13 nt, Artificial Sequence
  Description of Artificial Sequence: Synthetic oligonucleotide
cuucgguccaguu

SEQ ID NO: 19913 - RNA, 11 nt, Artificial Sequence
  Description of Artificial Sequence: Synthetic oligonucleotide
gauguagccgc

SEQ ID NO: 19914 - RNA, 12 nt, Artificial Sequence
  Description of Artificial Sequence: Synthetic oligonucleotide
ugaggagacuug

SEQ ID NO: 19915 - RNA, 12 nt, Artificial Sequence
  Description of Artificial Sequence: Synthetic oligonucleotide
gaguagugagga

SEQ ID NO: 19916 - RNA, 14 nt, Artificial Sequence
  Description of Artificial Sequence: Synthetic oligonucleotide
cagaugaguacaaa

SEQ ID NO: 19917 - RNA, 13 nt, Artificial Sequence
  Description of Artificial Sequence: Synthetic oligonucleotide
guuguuaaugggc

SEQ ID NO: 19918 - RNA, 13 nt, Artificial Sequence
  Description of Artificial Sequence: Synthetic oligonucleotide
uuuuuaauuuauu

SEQ ID NO: 19919 - RNA, 12 nt, Artificial Sequence
  Description of Artificial Sequence: Synthetic oligonucleotide
uauuuaaauaug

SEQ ID NO: 19920 - RNA, 13 nt, Artificial Sequence
  Description of Artificial Sequence: Synthetic oligonucleotide
uauccuuuguuuc

SEQ ID NO: 19921 - RNA, 14 nt, Artificial Sequence
  Description of Artificial Sequence: Synthetic oligonucleotide
cgucuaaguguuug

SEQ ID NO: 19922 - RNA, 12 nt, Artificial Sequence
  Description of Artificial Sequence: Synthetic oligonucleotide
accugugacaaa

SEQ ID NO: 19923 - RNA, 13 nt, Artificial Sequence
  Description of Artificial Sequence: Synthetic oligonucleotide
ccaggcugaauua

SEQ ID NO: 19924 - RNA, 14 nt, Artificial Sequence
  Description of Artificial Sequence: Synthetic oligonucleotide
gucauucuuacaau

SEQ ID NO: 19925 - RNA, 15 nt, Artificial Sequence
  Description of Artificial Sequence: Synthetic oligonucleotide
ucauucuuacaauug

SEQ ID NO: 19926 - RNA, 12 nt, Artificial Sequence
  Description of Artificial Sequence: Synthetic oligonucleotide
cagagaguguac

SEQ ID NO: 19927 - RNA, 12 nt, Artificial Sequence
  Description of Artificial Sequence: Synthetic oligonucleotide
agaacucagcag

SEQ ID NO: 19928 - RNA, 13 nt, Artificial Sequence
  Description of Artificial Sequence: Synthetic oligonucleotide
uuuauuuucagua

SEQ ID NO: 19929 - RNA, 12 nt, Artificial Sequence
  Description of Artificial Sequence: Synthetic oligonucleotide
ucuuaaauggaa

SEQ ID NO: 19930 - RNA, 13 nt, Artificial Sequence
  Description of Artificial Sequence: Synthetic oligonucleotide
ugccuaaaauugu

SEQ ID NO: 19931 - RNA, 12 nt, Artificial Sequence
  Description of Artificial Sequence: Synthetic oligonucleotide
agacugugagcu

SEQ ID NO: 19932 - RNA, 14 nt, Artificial Sequence
  Description of Artificial Sequence: Synthetic oligonucleotide
ugcuuuuuauuaau

SEQ ID NO: 19933 - RNA, 13 nt, Artificial Sequence
  Description of Artificial Sequence: Synthetic oligonucleotide
cucuucuuacauu

SEQ ID NO: 19934 - RNA, 15 nt, Artificial Sequence
  Description of Artificial Sequence: Synthetic oligonucleotide
cauuuguaaaaaugu

SEQ ID NO: 19935 - RNA, 15 nt, Artificial Sequence
  Description of Artificial Sequence: Synthetic oligonucleotide
aucuuaauucauauu

SEQ ID NO: 19936 - RNA, 13 nt, Artificial Sequence
  Description of Artificial Sequence: Synthetic oligonucleotide
gaacuaaucauga

SEQ ID NO: 19937 - RNA, 12 nt, Artificial Sequence
  Description of Artificial Sequence: Synthetic oligonucleotide
ucugcucuuggg

SEQ ID NO: 19938 - RNA, 13 nt, Artificial Sequence
  Description of Artificial Sequence: Synthetic oligonucleotide
caguagcuuugag

SEQ ID NO: 19939 - RNA, 14 nt, Artificial Sequence
  Description of Artificial Sequence: Synthetic oligonucleotide
cacguaauauuuca

SEQ ID NO: 19940 - RNA, 13 nt, Artificial Sequence
  Description of Artificial Sequence: Synthetic oligonucleotide
uauucucuucacu

SEQ ID NO: 19941 - RNA, 14 nt, Artificial Sequence
  Description of Artificial Sequence: Synthetic oligonucleotide
cuaaugcuaagaaa

SEQ ID NO: 19942 - RNA, 12 nt, Artificial Sequence
  Description of Artificial Sequence: Synthetic oligonucleotide
gcugaaaaucaa

SEQ ID NO: 19943 - RNA, 14 nt, Artificial Sequence
  Description of Artificial Sequence: Synthetic oligonucleotide
aauaugauuacuuu

SEQ ID NO: 19944 - RNA, 14 nt, Artificial Sequence
  Description of Artificial Sequence: Synthetic oligonucleotide
cauuuuguucuaca

SEQ ID NO: 19945 - RNA, 12 nt, Artificial Sequence
  Description of Artificial Sequence: Synthetic oligonucleotide
cccgggacucuc

SEQ ID NO: 19946 - RNA, 14 nt, Artificial Sequence
  Description of Artificial Sequence: Synthetic oligonucleotide
ccuuuaaaguaaag

SEQ ID NO: 19947 - RNA, 13 nt, Artificial Sequence
  Description of Artificial Sequence: Synthetic oligonucleotide
ucuggaagccugg

SEQ ID NO: 19948 - RNA, 14 nt, Artificial Sequence
  Description of Artificial Sequence: Synthetic oligonucleotide
aaaacaaaagagag

SEQ ID NO: 19949 - RNA, 13 nt, Artificial Sequence
  Description of Artificial Sequence: Synthetic oligonucleotide
aucaguuaugccg

SEQ ID NO: 19950 - RNA, 13 nt, Artificial Sequence
  Description of Artificial Sequence: Synthetic oligonucleotide
uaaaagaagucca

SEQ ID NO: 19951 - RNA, 11 nt, Artificial Sequence
  Description of Artificial Sequence: Synthetic oligonucleotide
aggugagguua

SEQ ID NO: 19952 - RNA, 11 nt, Artificial Sequence
  Description of Artificial Sequence: Synthetic oligonucleotide
gggaagaggac

SEQ ID NO: 19953 - RNA, 13 nt, Artificial Sequence
  Description of Artificial Sequence: Synthetic oligonucleotide
aagcaaguauugu

SEQ ID NO: 19954 - RNA, 12 nt, Artificial Sequence
  Description of Artificial Sequence: Synthetic oligonucleotide
auuguagcacuc

SEQ ID NO: 19955 - RNA, 14 nt, Artificial Sequence
  Description of Artificial Sequence: Synthetic oligonucleotide
acaaaaccacaaau

SEQ ID NO: 19956 - RNA, 12 nt, Artificial Sequence
  Description of Artificial Sequence: Synthetic oligonucleotide
uaagcccauaca

SEQ ID NO: 19957 - RNA, 11 nt, Artificial Sequence
  Description of Artificial Sequence: Synthetic oligonucleotide
agcccauacag

SEQ ID NO: 19958 - RNA, 12 nt, Artificial Sequence
  Description of Artificial Sequence: Synthetic oligonucleotide
cagaaaccuucc

SEQ ID NO: 19959 - RNA, 10 nt, Artificial Sequence
  Description of Artificial Sequence: Synthetic oligonucleotide
guauaccuac

SEQ ID NO: 19960 - RNA, 13 nt, Artificial Sequence
  Description of Artificial Sequence: Synthetic oligonucleotide
gccaguuuucgga

SEQ ID NO: 19961 - RNA, 9 nt, Artificial Sequence
  Description of Artificial Sequence: Synthetic oligonucleotide
ggaacaggg

SEQ ID NO: 19962 - RNA, 13 nt, Artificial Sequence
  Description of Artificial Sequence: Synthetic oligonucleotide
uuaacuuuccagu

SEQ ID NO: 19963 - RNA, 14 nt, Artificial Sequence
  Description of Artificial Sequence: Synthetic oligonucleotide
aaaguuugguuuug

SEQ ID NO: 19964 - RNA, 12 nt, Artificial Sequence
  Description of Artificial Sequence: Synthetic oligonucleotide
cuucccacugua

SEQ ID NO: 19965 - RNA, 13 nt, Artificial Sequence
  Description of Artificial Sequence: Synthetic oligonucleotide
ugauaccauauga

SEQ ID NO: 19966 - RNA, 11 nt, Artificial Sequence
  Description of Artificial Sequence: Synthetic oligonucleotide
aacaugggcug

SEQ ID NO: 19967 - RNA, 13 nt, Artificial Sequence
  Description of Artificial Sequence: Synthetic oligonucleotide
caacuuuuucaua

SEQ ID NO: 19968 - RNA, 12 nt, Artificial Sequence
  Description of Artificial Sequence: Synthetic oligonucleotide
caugaggccgga

SEQ ID NO: 19969 - RNA, 11 nt, Artificial Sequence
  Description of Artificial Sequence: Synthetic oligonucleotide
acugcauuugu

SEQ ID NO: 19970 - RNA, 13 nt, Artificial Sequence
  Description of Artificial Sequence: Synthetic oligonucleotide
aauguuuacuacc

SEQ ID NO: 19971 - RNA, 15 nt, Artificial Sequence
  Description of Artificial Sequence: Synthetic oligonucleotide
aauuuuuugaugaaa

SEQ ID NO: 19972 - RNA, 14 nt, Artificial Sequence
  Description of Artificial Sequence: Synthetic oligonucleotide
cagugugugaauuu

SEQ ID NO: 19973 - RNA, 13 nt, Artificial Sequence
  Description of Artificial Sequence: Synthetic oligonucleotide
gagcaauguaugu

SEQ ID NO: 19974 - RNA, 14 nt, Artificial Sequence
  Description of Artificial Sequence: Synthetic oligonucleotide
aaagcacauauaua

SEQ ID NO: 19975 - RNA, 14 nt, Artificial Sequence
  Description of Artificial Sequence: Synthetic oligonucleotide
guaauaguuucucc

SEQ ID NO: 19976 - RNA, 13 nt, Artificial Sequence
  Description of Artificial Sequence: Synthetic oligonucleotide
aguuucuccaaau

SEQ ID NO: 19977 - RNA, 13 nt, Artificial Sequence
  Description of Artificial Sequence: Synthetic oligonucleotide
uacuuccuagaaa

SEQ ID NO: 19978 - RNA, 13 nt, Artificial Sequence
  Description of Artificial Sequence: Synthetic oligonucleotide
uacaccauauaug

SEQ ID NO: 19979 - RNA, 14 nt, Artificial Sequence
  Description of Artificial Sequence: Synthetic oligonucleotide
auauaugaauggag

SEQ ID NO: 19980 - RNA, 13 nt, Artificial Sequence
  Description of Artificial Sequence: Synthetic oligonucleotide
acgagaagaagau

SEQ ID NO: 19981 - RNA, 13 nt, Artificial Sequence
  Description of Artificial Sequence: Synthetic oligonucleotide
ucauuuacaggga

SEQ ID NO: 19982 - RNA, 13 nt, Artificial Sequence
  Description of Artificial Sequence: Synthetic oligonucleotide
cauuuacagggac

SEQ ID NO: 19983 - RNA, 10 nt, Artificial Sequence
  Description of Artificial Sequence: Synthetic oligonucleotide
agggaccuga

SEQ ID NO: 19984 - RNA, 14 nt, Artificial Sequence
  Description of Artificial Sequence: Synthetic oligonucleotide
uguuugacugcauc

SEQ ID NO: 19985 - RNA, 13 nt, Artificial Sequence
  Description of Artificial Sequence: Synthetic oligonucleotide
uuugacugcaucg

SEQ ID NO: 19986 - RNA, 12 nt, Artificial Sequence
  Description of Artificial Sequence: Synthetic oligonucleotide
gaguucacaggg

SEQ ID NO: 19987 - RNA, 13 nt, Artificial Sequence
  Description of Artificial Sequence: Synthetic oligonucleotide
ggcaccucugucc

SEQ ID NO: 19988 - RNA, 15 nt, Artificial Sequence
  Description of Artificial Sequence: Synthetic oligonucleotide
gguuugucuuuuuaa

SEQ ID NO: 19989 - RNA, 14 nt, Artificial Sequence
  Description of Artificial Sequence: Synthetic oligonucleotide
uuugucuuuuuaag

SEQ ID NO: 19990 - RNA, 13 nt, Artificial Sequence
  Description of Artificial Sequence: Synthetic oligonucleotide
ccuaaagguuguc

SEQ ID NO: 19991 - RNA, 12 nt, Artificial Sequence
  Description of Artificial Sequence: Synthetic oligonucleotide
aagguugucgac

SEQ ID NO: 19992 - RNA, 13 nt, Artificial Sequence
  Description of Artificial Sequence: Synthetic oligonucleotide
accuggcaauugu

SEQ ID NO: 19993 - RNA, 12 nt, Artificial Sequence
  Description of Artificial Sequence: Synthetic oligonucleotide
aguggugcgagg

SEQ ID NO: 19994 - RNA, 13 nt, Artificial Sequence
  Description of Artificial Sequence: Synthetic oligonucleotide
agagacaugaaau

SEQ ID NO: 19995 - RNA, 13 nt, Artificial Sequence
  Description of Artificial Sequence: Synthetic oligonucleotide
auauauuucucca

SEQ ID NO: 19996 - RNA, 10 nt, Artificial Sequence
  Description of Artificial Sequence: Synthetic oligonucleotide
caugaaggcu

SEQ ID NO: 19997 - RNA, 11 nt, Artificial Sequence
  Description of Artificial Sequence: Synthetic oligonucleotide
gcuggaguggu

SEQ ID NO: 19998 - RNA, 11 nt, Artificial Sequence
  Description of Artificial Sequence: Synthetic oligonucleotide
aggaagagagg

SEQ ID NO: 19999 - RNA, 12 nt, Artificial Sequence
  Description of Artificial Sequence: Synthetic oligonucleotide
cuugcaucgggc

SEQ ID NO: 20000 - RNA, 13 nt, Artificial Sequence
  Description of Artificial Sequence: Synthetic oligonucleotide
auauccuacugug

SEQ ID NO: 20001 - RNA, 13 nt, Artificial Sequence
  Description of Artificial Sequence: Synthetic oligonucleotide
uccuacuguguaa

SEQ ID NO: 20002 - RNA, 12 nt, Artificial Sequence
  Description of Artificial Sequence: Synthetic oligonucleotide
ccuuguagugua

SEQ ID NO: 20003 - RNA, 13 nt, Artificial Sequence
  Description of Artificial Sequence: Synthetic oligonucleotide
ucuuuguugauug

SEQ ID NO: 20004 - RNA, 14 nt, Artificial Sequence
  Description of Artificial Sequence: Synthetic oligonucleotide
uuuguugauugaaa

SEQ ID NO: 20005 - RNA, 15 nt, Artificial Sequence
  Description of Artificial Sequence: Synthetic oligonucleotide
uucuuuuucuuccau

SEQ ID NO: 20006 - RNA, 13 nt, Artificial Sequence
  Description of Artificial Sequence: Synthetic oligonucleotide
aaucuuccuucua

SEQ ID NO: 20007 - RNA, 13 nt, Artificial Sequence
  Description of Artificial Sequence: Synthetic oligonucleotide
uugaaugcuucau

SEQ ID NO: 20008 - RNA, 13 nt, Artificial Sequence
  Description of Artificial Sequence: Synthetic oligonucleotide
ugaaugcuucaug

SEQ ID NO: 20009 - RNA, 13 nt, Artificial Sequence
  Description of Artificial Sequence: Synthetic oligonucleotide
aauucuacuuuga

SEQ ID NO: 20010 - RNA, 13 nt, Artificial Sequence
  Description of Artificial Sequence: Synthetic oligonucleotide
agcaacuacagac

SEQ ID NO: 20011 - RNA, 13 nt, Artificial Sequence
  Description of Artificial Sequence: Synthetic oligonucleotide
gaccaaggucaac

SEQ ID NO: 20012 - RNA, 13 nt, Artificial Sequence
  Description of Artificial Sequence: Synthetic oligonucleotide
cgacuaucucgac

SEQ ID NO: 20013 - RNA, 13 nt, Artificial Sequence
  Description of Artificial Sequence: Synthetic oligonucleotide
aaccuucccaaac

SEQ ID NO: 20014 - RNA, 14 nt, Artificial Sequence
  Description of Artificial Sequence: Synthetic oligonucleotide
ccaagcuuagaacu

SEQ ID NO: 20015 - RNA, 15 nt, Artificial Sequence
  Description of Artificial Sequence: Synthetic oligonucleotide
agcuuagaacuuuaa

SEQ ID NO: 20016 - RNA, 11 nt, Artificial Sequence
  Description of Artificial Sequence: Synthetic oligonucleotide
aagaccaccac

SEQ ID NO: 20017 - RNA, 14 nt, Artificial Sequence
  Description of Artificial Sequence: Synthetic oligonucleotide
gcgagaaauaaagu

SEQ ID NO: 20018 - RNA, 14 nt, Artificial Sequence
  Description of Artificial Sequence: Synthetic oligonucleotide
cgagaaauaaaguu

SEQ ID NO: 20019 - RNA, 12 nt, Artificial Sequence
  Description of Artificial Sequence: Synthetic oligonucleotide
aggaaaugaucc

SEQ ID NO: 20020 - RNA, 13 nt, Artificial Sequence
  Description of Artificial Sequence: Synthetic oligonucleotide
gaagaaaugaaac

SEQ ID NO: 20021 - RNA, 13 nt, Artificial Sequence
  Description of Artificial Sequence: Synthetic oligonucleotide
guuuccauccucc

SEQ ID NO: 20022 - RNA, 15 nt, Artificial Sequence
  Description of Artificial Sequence: Synthetic oligonucleotide
acugaaaaucuuuga

SEQ ID NO: 20023 - RNA, 11 nt, Artificial Sequence
  Description of Artificial Sequence: Synthetic oligonucleotide
ugccguucagg

SEQ ID NO: 20024 - RNA, 13 nt, Artificial Sequence
  Description of Artificial Sequence: Synthetic oligonucleotide
caggguccagaag

SEQ ID NO: 20025 - RNA, 13 nt, Artificial Sequence
  Description of Artificial Sequence: Synthetic oligonucleotide
ucaagacugcuug

SEQ ID NO: 20026 - RNA, 13 nt, Artificial Sequence
  Description of Artificial Sequence: Synthetic oligonucleotide
uccaugucuuugg

SEQ ID NO: 20027 - RNA, 11 nt, Artificial Sequence
  Description of Artificial Sequence: Synthetic oligonucleotide
gccugaaacac

SEQ ID NO: 20028 - RNA, 12 nt, Artificial Sequence
  Description of Artificial Sequence: Synthetic oligonucleotide
ucucuguaccuc

SEQ ID NO: 20029 - RNA, 12 nt, Artificial Sequence
  Description of Artificial Sequence: Synthetic oligonucleotide
agcaagacaaga

SEQ ID NO: 20030 - RNA, 13 nt, Artificial Sequence
  Description of Artificial Sequence: Synthetic oligonucleotide
gcaagacaagaaa

SEQ ID NO: 20031 - RNA, 12 nt, Artificial Sequence
  Description of Artificial Sequence: Synthetic oligonucleotide
uguacaagaucc

SEQ ID NO: 20032 - RNA, 12 nt, Artificial Sequence
  Description of Artificial Sequence: Synthetic oligonucleotide
cguacuugcaga

SEQ ID NO: 20033 - RNA, 13 nt, Artificial Sequence
  Description of Artificial Sequence: Synthetic oligonucleotide
cgaucgauacaga

SEQ ID NO: 20034 - RNA, 13 nt, Artificial Sequence
  Description of Artificial Sequence: Synthetic oligonucleotide
uauaaaaauaaau

SEQ ID NO: 20035 - RNA, 13 nt, Artificial Sequence
  Description of Artificial Sequence: Synthetic oligonucleotide
uaaaaauaaauau

SEQ ID NO: 20036 - RNA, 13 nt, Artificial Sequence
  Description of Artificial Sequence: Synthetic oligonucleotide
uuugacugcugug

SEQ ID NO: 20037 - RNA, 13 nt, Artificial Sequence
  Description of Artificial Sequence: Synthetic oligonucleotide
ggagaugagagac

SEQ ID NO: 20038 - RNA, 10 nt, Artificial Sequence
  Description of Artificial Sequence: Synthetic oligonucleotide
ucccacuugg

SEQ ID NO: 20039 - RNA, 10 nt, Artificial Sequence
  Description of Artificial Sequence: Synthetic oligonucleotide
guucacggcc

SEQ ID NO: 20040 - RNA, 12 nt, Artificial Sequence
  Description of Artificial Sequence: Synthetic oligonucleotide
accaucacacca

SEQ ID NO: 20041 - RNA, 10 nt, Artificial Sequence
  Description of Artificial Sequence: Synthetic oligonucleotide
cugcggguuu

SEQ ID NO: 20042 - RNA, 9 nt, Artificial Sequence
  Description of Artificial Sequence: Synthetic oligonucleotide
uccaguuug

SEQ ID NO: 20043 - RNA, 12 nt, Artificial Sequence
  Description of Artificial Sequence: Synthetic oligonucleotide
uuaaggacuucu

SEQ ID NO: 20044 - RNA, 12 nt, Artificial Sequence
  Description of Artificial Sequence: Synthetic oligonucleotide
agugggacagag

SEQ ID NO: 20045 - RNA, 13 nt, Artificial Sequence
  Description of Artificial Sequence: Synthetic oligonucleotide
auuuguuauugug

SEQ ID NO: 20046 - RNA, 12 nt, Artificial Sequence
  Description of Artificial Sequence: Synthetic oligonucleotide
ucaaaugcauuu

SEQ ID NO: 20047 - RNA, 9 nt, Artificial Sequence
  Description of Artificial Sequence: Synthetic oligonucleotide
aggaaagcc

SEQ ID NO: 20048 - RNA, 10 nt, Artificial Sequence
  Description of Artificial Sequence: Synthetic oligonucleotide
ggaaagcccu

SEQ ID NO: 20049 - RNA, 11 nt, Artificial Sequence
  Description of Artificial Sequence: Synthetic oligonucleotide
ccagcauggcc

SEQ ID NO: 20050 - RNA, 10 nt, Artificial Sequence
  Description of Artificial Sequence: Synthetic oligonucleotide
uucucccuga

SEQ ID NO: 20051 - RNA, 11 nt, Artificial Sequence
  Description of Artificial Sequence: Synthetic oligonucleotide
aagaagcccuu

SEQ ID NO: 20052 - RNA, 11 nt, Artificial Sequence
  Description of Artificial Sequence: Synthetic oligonucleotide
gaagcccuuca

SEQ ID NO: 20053 - RNA, 10 nt, Artificial Sequence
  Description of Artificial Sequence: Synthetic oligonucleotide
cccuucagcg

SEQ ID NO: 20054 - RNA, 10 nt, Artificial Sequence
  Description of Artificial Sequence: Synthetic oligonucleotide
cuucagcggc

SEQ ID NO: 20055 - RNA, 11 nt, Artificial Sequence
  Description of Artificial Sequence: Synthetic oligonucleotide
cagcggccagu

SEQ ID NO: 20056 - RNA, 11 nt, Artificial Sequence
  Description of Artificial Sequence: Synthetic oligonucleotide
gaaaagcuccg

SEQ ID NO: 20057 - RNA, 10 nt, Artificial Sequence
  Description of Artificial Sequence: Synthetic oligonucleotide
aaagcuccgg

SEQ ID NO: 20058 - RNA, 12 nt, Artificial Sequence
  Description of Artificial Sequence: Synthetic oligonucleotide
gucaacagucug

SEQ ID NO: 20059 - RNA, 12 nt, Artificial Sequence
  Description of Artificial Sequence: Synthetic oligonucleotide
agaguucaaaag

SEQ ID NO: 20060 - RNA, 12 nt, Artificial Sequence
  Description of Artificial Sequence: Synthetic oligonucleotide
gaguucaaaagc

SEQ ID NO: 20061 - RNA, 11 nt, Artificial Sequence
  Description of Artificial Sequence: Synthetic oligonucleotide
ucaaaagcccu

SEQ ID NO: 20062 - RNA, 11 nt, Artificial Sequence
  Description of Artificial Sequence: Synthetic oligonucleotide
caaaagcccuu

SEQ ID NO: 20063 - RNA, 11 nt, Artificial Sequence
  Description of Artificial Sequence: Synthetic oligonucleotide
aaagcccuuca

SEQ ID NO: 20064 - RNA, 11 nt, Artificial Sequence
  Description of Artificial Sequence: Synthetic oligonucleotide
aagcccuucag

SEQ ID NO: 20065 - RNA, 12 nt, Artificial Sequence
  Description of Artificial Sequence: Synthetic oligonucleotide
ugaagccgcucg

SEQ ID NO: 20066 - RNA, 11 nt, Artificial Sequence
  Description of Artificial Sequence: Synthetic oligonucleotide
acgccagucaa

SEQ ID NO: 20067 - RNA, 12 nt, Artificial Sequence
  Description of Artificial Sequence: Synthetic oligonucleotide
ucuuggugcgug

SEQ ID NO: 20068 - RNA, 13 nt, Artificial Sequence
  Description of Artificial Sequence: Synthetic oligonucleotide
uuggauucaucag

SEQ ID NO: 20069 - RNA, 12 nt, Artificial Sequence
  Description of Artificial Sequence: Synthetic oligonucleotide
ggaauaccuaag

SEQ ID NO: 20070 - RNA, 11 nt, Artificial Sequence
  Description of Artificial Sequence: Synthetic oligonucleotide
uuugaggcuca

SEQ ID NO: 20071 - RNA, 10 nt, Artificial Sequence
  Description of Artificial Sequence: Synthetic oligonucleotide
cuacaauugg

SEQ ID NO: 20072 - RNA, 11 nt, Artificial Sequence
  Description of Artificial Sequence: Synthetic oligonucleotide
aguuaggagcc

SEQ ID NO: 20073 - RNA, 12 nt, Artificial Sequence
  Description of Artificial Sequence: Synthetic oligonucleotide
gucaauauccac

SEQ ID NO: 20074 - RNA, 12 nt, Artificial Sequence
  Description of Artificial Sequence: Synthetic oligonucleotide
uguucagucaca

SEQ ID NO: 20075 - RNA, 11 nt, Artificial Sequence
  Description of Artificial Sequence: Synthetic oligonucleotide
cacacacauac

SEQ ID NO: 20076 - RNA, 11 nt, Artificial Sequence
  Description of Artificial Sequence: Synthetic oligonucleotide
uccuuuugcuu

SEQ ID NO: 20077 - RNA, 15 nt, Artificial Sequence
  Description of Artificial Sequence: Synthetic oligonucleotide
uuuaaaguaauuuuu

SEQ ID NO: 20078 - RNA, 12 nt, Artificial Sequence
  Description of Artificial Sequence: Synthetic oligonucleotide
aacagucaaugg

SEQ ID NO: 20079 - RNA, 12 nt, Artificial Sequence
  Description of Artificial Sequence: Synthetic oligonucleotide
cgacaaaccaau

SEQ ID NO: 20080 - RNA, 11 nt, Artificial Sequence
  Description of Artificial Sequence: Synthetic oligonucleotide
cugcuaccacu

SEQ ID NO: 20081 - RNA, 12 nt, Artificial Sequence
  Description of Artificial Sequence: Synthetic oligonucleotide
caagcggucuua

SEQ ID NO: 20082 - RNA, 12 nt, Artificial Sequence
  Description of Artificial Sequence: Synthetic oligonucleotide
gucuuaccggcu

SEQ ID NO: 20083 - RNA, 10 nt, Artificial Sequence
  Description of Artificial Sequence: Synthetic oligonucleotide
auggguuacc

SEQ ID NO: 20084 - RNA, 10 nt, Artificial Sequence
  Description of Artificial Sequence: Synthetic oligonucleotide
uuaccugcga

SEQ ID NO: 20085 - RNA, 11 nt, Artificial Sequence
  Description of Artificial Sequence: Synthetic oligonucleotide
aucuugcugag

SEQ ID NO: 20086 - RNA, 12 nt, Artificial Sequence
  Description of Artificial Sequence: Synthetic oligonucleotide
gcauaaaacagu

SEQ ID NO: 20087 - RNA, 11 nt, Artificial Sequence
  Description of Artificial Sequence: Synthetic oligonucleotide
uccuuuauccu

SEQ ID NO: 20088 - RNA, 11 nt, Artificial Sequence
  Description of Artificial Sequence: Synthetic oligonucleotide
aacgcaaguug

SEQ ID NO: 20089 - RNA, 12 nt, Artificial Sequence
  Description of Artificial Sequence: Synthetic oligonucleotide
aacugaaaccau

SEQ ID NO: 20090 - RNA, 13 nt, Artificial Sequence
  Description of Artificial Sequence: Synthetic oligonucleotide
cuuuguuaaauau

SEQ ID NO: 20091 - RNA, 13 nt, Artificial Sequence
  Description of Artificial Sequence: Synthetic oligonucleotide
uauauuaaaaguu

SEQ ID NO: 20092 - RNA, 12 nt, Artificial Sequence
  Description of Artificial Sequence: Synthetic oligonucleotide
uuuugacuuaac

SEQ ID NO: 20093 - RNA, 12 nt, Artificial Sequence
  Description of Artificial Sequence: Synthetic oligonucleotide
caaacucagcac

SEQ ID NO: 20094 - RNA, 10 nt, Artificial Sequence
  Description of Artificial Sequence: Synthetic oligonucleotide
gcugaccuca

SEQ ID NO: 20095 - RNA, 13 nt, Artificial Sequence
  Description of Artificial Sequence: Synthetic oligonucleotide
uuauucagaucgc

SEQ ID NO: 20096 - RNA, 12 nt, Artificial Sequence
  Description of Artificial Sequence: Synthetic oligonucleotide
ggguucugggau

SEQ ID NO: 20097 - RNA, 14 nt, Artificial Sequence
  Description of Artificial Sequence: Synthetic oligonucleotide
uauuggaaauuaug

SEQ ID NO: 20098 - RNA, 12 nt, Artificial Sequence
  Description of Artificial Sequence: Synthetic oligonucleotide
uggaagcacuag

SEQ ID NO: 20099 - RNA, 12 nt, Artificial Sequence
  Description of Artificial Sequence: Synthetic oligonucleotide
uuuuuaugugga

SEQ ID NO: 20100 - RNA, 11 nt, Artificial Sequence
  Description of Artificial Sequence: Synthetic oligonucleotide
gaauugguaga

SEQ ID NO: 20101 - RNA, 12 nt, Artificial Sequence
  Description of Artificial Sequence: Synthetic oligonucleotide
uagacuuggaga

SEQ ID NO: 20102 - RNA, 12 nt, Artificial Sequence
  Description of Artificial Sequence: Synthetic oligonucleotide
uacaguauucca

SEQ ID NO: 20103 - RNA, 14 nt, Artificial Sequence
  Description of Artificial Sequence: Synthetic oligonucleotide
cacugaugaauuaa

SEQ ID NO: 20104 - RNA, 11 nt, Artificial Sequence
  Description of Artificial Sequence: Synthetic oligonucleotide
cacaucaucac

SEQ ID NO: 20105 - RNA, 12 nt, Artificial Sequence
  Description of Artificial Sequence: Synthetic oligonucleotide
ucaccaaacaga

SEQ ID NO: 20106 - RNA, 11 nt, Artificial Sequence
  Description of Artificial Sequence: Synthetic oligonucleotide
gaacaugaugg

SEQ ID NO: 20107 - RNA, 11 nt, Artificial Sequence
  Description of Artificial Sequence: Synthetic oligonucleotide
auguagacugc

SEQ ID NO: 20108 - RNA, 12 nt, Artificial Sequence
  Description of Artificial Sequence: Synthetic oligonucleotide
gaucuauuuaug

SEQ ID NO: 20109 - RNA, 11 nt, Artificial Sequence
  Description of Artificial Sequence: Synthetic oligonucleotide
cacuauuauca

SEQ ID NO: 20110 - RNA, 10 nt, Artificial Sequence
  Description of Artificial Sequence: Synthetic oligonucleotide
ucaguucugc

SEQ ID NO: 20111 - RNA, 12 nt, Artificial Sequence
  Description of Artificial Sequence: Synthetic oligonucleotide
gauuaaaccuac

SEQ ID NO: 20112 - RNA, 12 nt, Artificial Sequence
  Description of Artificial Sequence: Synthetic oligonucleotide
uaaaauccuucu

SEQ ID NO: 20113 - RNA, 11 nt, Artificial Sequence
  Description of Artificial Sequence: Synthetic oligonucleotide
augcuguagac

SEQ ID NO: 20114 - RNA, 12 nt, Artificial Sequence
  Description of Artificial Sequence: Synthetic oligonucleotide
ugauaggaauag

SEQ ID NO: 20115 - RNA, 10 nt, Artificial Sequence
  Description of Artificial Sequence: Synthetic oligonucleotide
auggcccuga

SEQ ID NO: 20116 - RNA, 10 nt, Artificial Sequence
  Description of Artificial Sequence: Synthetic oligonucleotide
uccucaagca

SEQ ID NO: 20117 - RNA, 9 nt, Artificial Sequence
  Description of Artificial Sequence: Synthetic oligonucleotide
uucagccca

SEQ ID NO: 20118 - RNA, 10 nt, Artificial Sequence
  Description of Artificial Sequence: Synthetic oligonucleotide
cugcugaacc

SEQ ID NO: 20119 - RNA, 11 nt, Artificial Sequence
  Description of Artificial Sequence: Synthetic oligonucleotide
aguucucuuca

SEQ ID NO: 20120 - RNA, 10 nt, Artificial Sequence
  Description of Artificial Sequence: Synthetic oligonucleotide
cagccuagag

SEQ ID NO: 20121 - RNA, 12 nt, Artificial Sequence
  Description of Artificial Sequence: Synthetic oligonucleotide
ucugugaagugu

SEQ ID NO: 20122 - RNA, 13 nt, Artificial Sequence
  Description of Artificial Sequence: Synthetic oligonucleotide
gagaaaauuucaa

SEQ ID NO: 20123 - RNA, 10 nt, Artificial Sequence
  Description of Artificial Sequence: Synthetic oligonucleotide
auccuccuga

SEQ ID NO: 20124 - RNA, 11 nt, Artificial Sequence
  Description of Artificial Sequence: Synthetic oligonucleotide
ugacaucauau

SEQ ID NO: 20125 - RNA, 12 nt, Artificial Sequence
  Description of Artificial Sequence: Synthetic oligonucleotide
aucuucaucaua

SEQ ID NO: 20126 - RNA, 12 nt, Artificial Sequence
  Description of Artificial Sequence: Synthetic oligonucleotide
acuagcuauuaa

SEQ ID NO: 20127 - RNA, 13 nt, Artificial Sequence
  Description of Artificial Sequence: Synthetic oligonucleotide
cucuacuaaaaau

SEQ ID NO: 20128 - RNA, 11 nt, Artificial Sequence
  Description of Artificial Sequence: Synthetic oligonucleotide
cuaucucgccu

SEQ ID NO: 20129 - RNA, 12 nt, Artificial Sequence
  Description of Artificial Sequence: Synthetic oligonucleotide
uucgguccaguu

SEQ ID NO: 20130 - RNA, 10 nt, Artificial Sequence
  Description of Artificial Sequence: Synthetic oligonucleotide
auguagccgc

SEQ ID NO: 20131 - RNA, 11 nt, Artificial Sequence
  Description of Artificial Sequence: Synthetic oligonucleotide
gaggagacuug

SEQ ID NO: 20132 - RNA, 11 nt, Artificial Sequence
  Description of Artificial Sequence: Synthetic oligonucleotide
aguagugagga

SEQ ID NO: 20133 - RNA, 13 nt, Artificial Sequence
  Description of Artificial Sequence: Synthetic oligonucleotide
agaugaguacaaa

SEQ ID NO: 20134 - RNA, 12 nt, Artificial Sequence
  Description of Artificial Sequence: Synthetic oligonucleotide
uuguuaaugggc

SEQ ID NO: 20135 - RNA, 12 nt, Artificial Sequence
  Description of Artificial Sequence: Synthetic oligonucleotide
uuuuaauuuauu

SEQ ID NO: 20136 - RNA, 11 nt, Artificial Sequence
  Description of Artificial Sequence: Synthetic oligonucleotide
auuuaaauaug

SEQ ID NO: 20137 - RNA, 12 nt, Artificial Sequence
  Description of Artificial Sequence: Synthetic oligonucleotide
auccuuuguuuc

SEQ ID NO: 20138 - RNA, 13 nt, Artificial Sequence
  Description of Artificial Sequence: Synthetic oligonucleotide
gucuaaguguuug

SEQ ID NO: 20139 - RNA, 11 nt, Artificial Sequence
  Description of Artificial Sequence: Synthetic oligonucleotide
ccugugacaaa

SEQ ID NO: 20140 - RNA, 12 nt, Artificial Sequence
  Description of Artificial Sequence: Synthetic oligonucleotide
caggcugaauua

SEQ ID NO: 20141 - RNA, 13 nt, Artificial Sequence
  Description of Artificial Sequence: Synthetic oligonucleotide
ucauucuuacaau

SEQ ID NO: 20142 - RNA, 14 nt, Artificial Sequence
  Description of Artificial Sequence: Synthetic oligonucleotide
cauucuuacaauug

SEQ ID NO: 20143 - RNA, 11 nt, Artificial Sequence
  Description of Artificial Sequence: Synthetic oligonucleotide
agagaguguac

SEQ ID NO: 20144 - RNA, 11 nt, Artificial Sequence
  Description of Artificial Sequence: Synthetic oligonucleotide
gaacucagcag

SEQ ID NO: 20145 - RNA, 12 nt, Artificial Sequence
  Description of Artificial Sequence: Synthetic oligonucleotide
uuauuuucagua

SEQ ID NO: 20146 - RNA, 11 nt, Artificial Sequence
  Description of Artificial Sequence: Synthetic oligonucleotide
cuuaaauggaa

SEQ ID NO: 20147 - RNA, 12 nt, Artificial Sequence
  Description of Artificial Sequence: Synthetic oligonucleotide
gccuaaaauugu

SEQ ID NO: 20148 - RNA, 12 nt, Artificial Sequence
  Description of Artificial Sequence: Synthetic oligonucleotide
acuaacaucugg

SEQ ID NO: 20149 - RNA, 11 nt, Artificial Sequence
  Description of Artificial Sequence: Synthetic oligonucleotide
gacugugagcu

SEQ ID NO: 20150 - RNA, 13 nt, Artificial Sequence
  Description of Artificial Sequence: Synthetic oligonucleotide
gcuuuuuauuaau

SEQ ID NO: 20151 - RNA, 12 nt, Artificial Sequence
  Description of Artificial Sequence: Synthetic oligonucleotide
ucuucuuacauu

SEQ ID NO: 20152 - RNA, 14 nt, Artificial Sequence
  Description of Artificial Sequence: Synthetic oligonucleotide
auuuguaaaaaugu

SEQ ID NO: 20153 - RNA, 14 nt, Artificial Sequence
  Description of Artificial Sequence: Synthetic oligonucleotide
ucuuaauucauauu

SEQ ID NO: 20154 - RNA, 12 nt, Artificial Sequence
  Description of Artificial Sequence: Synthetic oligonucleotide
aacuaaucauga

SEQ ID NO: 20155 - RNA, 11 nt, Artificial Sequence
  Description of Artificial Sequence: Synthetic oligonucleotide
cugcucuuggg

SEQ ID NO: 20156 - RNA, 12 nt, Artificial Sequence
  Description of Artificial Sequence: Synthetic oligonucleotide
aguagcuuugag

SEQ ID NO: 20157 - RNA, 13 nt, Artificial Sequence
  Description of Artificial Sequence: Synthetic oligonucleotide
acguaauauuuca

SEQ ID NO: 20158 - RNA, 12 nt, Artificial Sequence
  Description of Artificial Sequence: Synthetic oligonucleotide
auucucuucacu

SEQ ID NO: 20159 - RNA, 13 nt, Artificial Sequence
  Description of Artificial Sequence: Synthetic oligonucleotide
uaaugcuaagaaa

SEQ ID NO: 20160 - RNA, 11 nt, Artificial Sequence
  Description of Artificial Sequence: Synthetic oligonucleotide
cugaaaaucaa

SEQ ID NO: 20161 - RNA, 13 nt, Artificial Sequence
  Description of Artificial Sequence: Synthetic oligonucleotide
auaugauuacuuu

SEQ ID NO: 20162 - RNA, 13 nt, Artificial Sequence
  Description of Artificial Sequence: Synthetic oligonucleotide
auuuuguucuaca

SEQ ID NO: 20163 - RNA, 11 nt, Artificial Sequence
  Description of Artificial Sequence: Synthetic oligonucleotide
ccgggacucuc

SEQ ID NO: 20164 - RNA, 13 nt, Artificial Sequence
  Description of Artificial Sequence: Synthetic oligonucleotide
cuuuaaaguaaag

SEQ ID NO: 20165 - RNA, 12 nt, Artificial Sequence
  Description of Artificial Sequence: Synthetic oligonucleotide
cuggaagccugg

SEQ ID NO: 20166 - RNA, 13 nt, Artificial Sequence
  Description of Artificial Sequence: Synthetic oligonucleotide
aaacaaaagagag

SEQ ID NO: 20167 - RNA, 12 nt, Artificial Sequence
  Description of Artificial Sequence: Synthetic oligonucleotide
ucaguuaugccg

SEQ ID NO: 20168 - RNA, 12 nt, Artificial Sequence
  Description of Artificial Sequence: Synthetic oligonucleotide
aaaagaagucca

SEQ ID NO: 20169 - RNA, 10 nt, Artificial Sequence
  Description of Artificial Sequence: Synthetic oligonucleotide
ggugagguua

SEQ ID NO: 20170 - RNA, 10 nt, Artificial Sequence
  Description of Artificial Sequence: Synthetic oligonucleotide
ggaagaggac

SEQ ID NO: 20171 - RNA, 12 nt, Artificial Sequence
  Description of Artificial Sequence: Synthetic oligonucleotide
agcaaguauugu

SEQ ID NO: 20172 - RNA, 11 nt, Artificial Sequence
  Description of Artificial Sequence: Synthetic oligonucleotide
uuguagcacuc

SEQ ID NO: 20173 - RNA, 13 nt, Artificial Sequence
  Description of Artificial Sequence: Synthetic oligonucleotide
caaaaccacaaau

SEQ ID NO: 20174 - RNA, 11 nt, Artificial Sequence
  Description of Artificial Sequence: Synthetic oligonucleotide
aagcccauaca

SEQ ID NO: 20175 - RNA, 10 nt, Artificial Sequence
  Description of Artificial Sequence: Synthetic oligonucleotide
gcccauacag

SEQ ID NO: 20176 - RNA, 11 nt, Artificial Sequence
  Description of Artificial Sequence: Synthetic oligonucleotide
agaaaccuucc

SEQ ID NO: 20177 - RNA, 9 nt, Artificial Sequence
  Description of Artificial Sequence: Synthetic oligonucleotide
uauaccuac

SEQ ID NO: 20178 - RNA, 12 nt, Artificial Sequence
  Description of Artificial Sequence: Synthetic oligonucleotide
ccaguuuucgga

SEQ ID NO: 20179 - RNA, 8 nt, Artificial Sequence
  Description of Artificial Sequence: Synthetic oligonucleotide
gaacaggg

SEQ ID NO: 20180 - RNA, 12 nt, Artificial Sequence
  Description of Artificial Sequence: Synthetic oligonucleotide
uaacuuuccagu

SEQ ID NO: 20181 - RNA, 13 nt, Artificial Sequence
  Description of Artificial Sequence: Synthetic oligonucleotide
aaguuugguuuug

SEQ ID NO: 20182 - RNA, 11 nt, Artificial Sequence
  Description of Artificial Sequence: Synthetic oligonucleotide
uucccacugua

SEQ ID NO: 20183 - RNA, 12 nt, Artificial Sequence
  Description of Artificial Sequence: Synthetic oligonucleotide
gauaccauauga

SEQ ID NO: 20184 - RNA, 10 nt, Artificial Sequence
  Description of Artificial Sequence: Synthetic oligonucleotide
acaugggcug

SEQ ID NO: 20185 - RNA, 12 nt, Artificial Sequence
  Description of Artificial Sequence: Synthetic oligonucleotide
aacuuuuucaua

SEQ ID NO: 20186 - RNA, 11 nt, Artificial Sequence
  Description of Artificial Sequence: Synthetic oligonucleotide
augaggccgga

SEQ ID NO: 20187 - RNA, 10 nt, Artificial Sequence
  Description of Artificial Sequence: Synthetic oligonucleotide
cugcauuugu

SEQ ID NO: 20188 - RNA, 12 nt, Artificial Sequence
  Description of Artificial Sequence: Synthetic oligonucleotide
auguuuacuacc

SEQ ID NO: 20189 - RNA, 14 nt, Artificial Sequence
  Description of Artificial Sequence: Synthetic oligonucleotide
auuuuuugaugaaa

SEQ ID NO: 20190 - RNA, 13 nt, Artificial Sequence
  Description of Artificial Sequence: Synthetic oligonucleotide
agugugugaauuu

SEQ ID NO: 20191 - RNA, 12 nt, Artificial Sequence
  Description of Artificial Sequence: Synthetic oligonucleotide
agcaauguaugu

SEQ ID NO: 20192 - RNA, 13 nt, Artificial Sequence
  Description of Artificial Sequence: Synthetic oligonucleotide
aagcacauauaua

SEQ ID NO: 20193 - RNA, 13 nt, Artificial Sequence
  Description of Artificial Sequence: Synthetic oligonucleotide
uaauaguuucucc

SEQ ID NO: 20194 - RNA, 12 nt, Artificial Sequence
  Description of Artificial Sequence: Synthetic oligonucleotide
guuucuccaaau

SEQ ID NO: 20195 - RNA, 12 nt, Artificial Sequence
  Description of Artificial Sequence: Synthetic oligonucleotide
acuuccuagaaa

SEQ ID NO: 20196 - RNA, 12 nt, Artificial Sequence
  Description of Artificial Sequence: Synthetic oligonucleotide
acaccauauaug

SEQ ID NO: 20197 - RNA, 13 nt, Artificial Sequence
  Description of Artificial Sequence: Synthetic oligonucleotide
uauaugaauggag

SEQ ID NO: 20198 - RNA, 12 nt, Artificial Sequence
  Description of Artificial Sequence: Synthetic oligonucleotide
cauuuacaggga

SEQ ID NO: 20199 - RNA, 12 nt, Artificial Sequence
  Description of Artificial Sequence: Synthetic oligonucleotide
auuuacagggac

SEQ ID NO: 20200 - RNA, 9 nt, Artificial Sequence
  Description of Artificial Sequence: Synthetic oligonucleotide
gggaccuga

SEQ ID NO: 20201 - RNA, 13 nt, Artificial Sequence
  Description of Artificial Sequence: Synthetic oligonucleotide
guuugacugcauc

SEQ ID NO: 20202 - RNA, 12 nt, Artificial Sequence
  Description of Artificial Sequence: Synthetic oligonucleotide
uugacugcaucg

SEQ ID NO: 20203 - RNA, 11 nt, Artificial Sequence
  Description of Artificial Sequence: Synthetic oligonucleotide
aguucacaggg

SEQ ID NO: 20204 - RNA, 12 nt, Artificial Sequence
  Description of Artificial Sequence: Synthetic oligonucleotide
gcaccucugucc

SEQ ID NO: 20205 - RNA, 14 nt, Artificial Sequence
  Description of Artificial Sequence: Synthetic oligonucleotide
guuugucuuuuuaa

SEQ ID NO: 20206 - RNA, 13 nt, Artificial Sequence
  Description of Artificial Sequence: Synthetic oligonucleotide
uugucuuuuuaag

SEQ ID NO: 20207 - RNA, 12 nt, Artificial Sequence
  Description of Artificial Sequence: Synthetic oligonucleotide
cuaaagguuguc

SEQ ID NO: 20208 - RNA, 11 nt, Artificial Sequence
  Description of Artificial Sequence: Synthetic oligonucleotide
agguugucgac

SEQ ID NO: 20209 - RNA, 12 nt, Artificial Sequence
  Description of Artificial Sequence: Synthetic oligonucleotide
ccuggcaauugu

SEQ ID NO: 20210 - RNA, 11 nt, Artificial Sequence
  Description of Artificial Sequence: Synthetic oligonucleotide
guggugcgagg

SEQ ID NO: 20211 - RNA, 12 nt, Artificial Sequence
  Description of Artificial Sequence: Synthetic oligonucleotide
gagacaugaaau

SEQ ID NO: 20212 - RNA, 12 nt, Artificial Sequence
  Description of Artificial Sequence: Synthetic oligonucleotide
uauauuucucca

SEQ ID NO: 20213 - RNA, 9 nt, Artificial Sequence
  Description of Artificial Sequence: Synthetic oligonucleotide
augaaggcu

SEQ ID NO: 20214 - RNA, 10 nt, Artificial Sequence
  Description of Artificial Sequence: Synthetic oligonucleotide
cuggaguggu

SEQ ID NO: 20215 - RNA, 10 nt, Artificial Sequence
  Description of Artificial Sequence: Synthetic oligonucleotide
ggaagagagg

SEQ ID NO: 20216 - RNA, 11 nt, Artificial Sequence
  Description of Artificial Sequence: Synthetic oligonucleotide
uugcaucgggc

SEQ ID NO: 20217 - RNA, 12 nt, Artificial Sequence
  Description of Artificial Sequence: Synthetic oligonucleotide
uauccuacugug

SEQ ID NO: 20218 - RNA, 12 nt, Artificial Sequence
  Description of Artificial Sequence: Synthetic oligonucleotide
ccuacuguguaa

SEQ ID NO: 20219 - RNA, 11 nt, Artificial Sequence
  Description of Artificial Sequence: Synthetic oligonucleotide
cuuguagugua

SEQ ID NO: 20220 - RNA, 12 nt, Artificial Sequence
  Description of Artificial Sequence: Synthetic oligonucleotide
cuuuguugauug

SEQ ID NO: 20221 - RNA, 13 nt, Artificial Sequence
  Description of Artificial Sequence: Synthetic oligonucleotide
uuguugauugaaa

SEQ ID NO: 20222 - RNA, 14 nt, Artificial Sequence
  Description of Artificial Sequence: Synthetic oligonucleotide
ucuuuuucuuccau

SEQ ID NO: 20223 - RNA, 12 nt, Artificial Sequence
  Description of Artificial Sequence: Synthetic oligonucleotide
aucuuccuucua

SEQ ID NO: 20224 - RNA, 12 nt, Artificial Sequence
  Description of Artificial Sequence: Synthetic oligonucleotide
ugaaugcuucau

SEQ ID NO: 20225 - RNA, 12 nt, Artificial Sequence
  Description of Artificial Sequence: Synthetic oligonucleotide
gaaugcuucaug

SEQ ID NO: 20226 - RNA, 12 nt, Artificial Sequence
  Description of Artificial Sequence: Synthetic oligonucleotide
auucuacuuuga

SEQ ID NO: 20227 - RNA, 12 nt, Artificial Sequence
  Description of Artificial Sequence: Synthetic oligonucleotide
gcaacuacagac

SEQ ID NO: 20228 - RNA, 12 nt, Artificial Sequence
  Description of Artificial Sequence: Synthetic oligonucleotide
accaaggucaac

SEQ ID NO: 20229 - RNA, 12 nt, Artificial Sequence
  Description of Artificial Sequence: Synthetic oligonucleotide
gacuaucucgac

SEQ ID NO: 20230 - RNA, 12 nt, Artificial Sequence
  Description of Artificial Sequence: Synthetic oligonucleotide
accuucccaaac

SEQ ID NO: 20231 - RNA, 13 nt, Artificial Sequence
  Description of Artificial Sequence: Synthetic oligonucleotide
caagcuuagaacu

SEQ ID NO: 20232 - RNA, 14 nt, Artificial Sequence
  Description of Artificial Sequence: Synthetic oligonucleotide
gcuuagaacuuuaa

SEQ ID NO: 20233 - RNA, 13 nt, Artificial Sequence
  Description of Artificial Sequence: Synthetic oligonucleotide
aacuuuaagcaac

SEQ ID NO: 20234 - RNA, 10 nt, Artificial Sequence
  Description of Artificial Sequence: Synthetic oligonucleotide
agaccaccac

SEQ ID NO: 20235 - RNA, 13 nt, Artificial Sequence
  Description of Artificial Sequence: Synthetic oligonucleotide
cgagaaauaaagu

SEQ ID NO: 20236 - RNA, 13 nt, Artificial Sequence
  Description of Artificial Sequence: Synthetic oligonucleotide
gagaaauaaaguu

SEQ ID NO: 20237 - RNA, 11 nt, Artificial Sequence
  Description of Artificial Sequence: Synthetic oligonucleotide
ggaaaugaucc

SEQ ID NO: 20238 - RNA, 12 nt, Artificial Sequence
  Description of Artificial Sequence: Synthetic oligonucleotide
aagaaaugaaac

SEQ ID NO: 20239 - RNA, 12 nt, Artificial Sequence
  Description of Artificial Sequence: Synthetic oligonucleotide
uuuccauccucc

SEQ ID NO: 20240 - RNA, 14 nt, Artificial Sequence
  Description of Artificial Sequence: Synthetic oligonucleotide
cugaaaaucuuuga

SEQ ID NO: 20241 - RNA, 10 nt, Artificial Sequence
  Description of Artificial Sequence: Synthetic oligonucleotide
gccguucagg

SEQ ID NO: 20242 - RNA, 12 nt, Artificial Sequence
  Description of Artificial Sequence: Synthetic oligonucleotide
aggguccagaag

SEQ ID NO: 20243 - RNA, 12 nt, Artificial Sequence
  Description of Artificial Sequence: Synthetic oligonucleotide
caagacugcuug

SEQ ID NO: 20244 - RNA, 12 nt, Artificial Sequence
  Description of Artificial Sequence: Synthetic oligonucleotide
ccaugucuuugg

SEQ ID NO: 20245 - RNA, 10 nt, Artificial Sequence
  Description of Artificial Sequence: Synthetic oligonucleotide
ccugaaacac

SEQ ID NO: 20246 - RNA, 11 nt, Artificial Sequence
  Description of Artificial Sequence: Synthetic oligonucleotide
cucuguaccuc

SEQ ID NO: 20247 - RNA, 11 nt, Artificial Sequence
  Description of Artificial Sequence: Synthetic oligonucleotide
gcaagacaaga

SEQ ID NO: 20248 - RNA, 12 nt, Artificial Sequence
  Description of Artificial Sequence: Synthetic oligonucleotide
caagacaagaaa

SEQ ID NO: 20249 - RNA, 11 nt, Artificial Sequence
  Description of Artificial Sequence: Synthetic oligonucleotide
guacaagaucc

SEQ ID NO: 20250 - RNA, 11 nt, Artificial Sequence
  Description of Artificial Sequence: Synthetic oligonucleotide
guacuugcaga

SEQ ID NO: 20251 - RNA, 12 nt, Artificial Sequence
  Description of Artificial Sequence: Synthetic oligonucleotide
gaucgauacaga

SEQ ID NO: 20252 - RNA, 12 nt, Artificial Sequence
  Description of Artificial Sequence: Synthetic oligonucleotide
auaaaaauaaau

SEQ ID NO: 20253 - RNA, 12 nt, Artificial Sequence
  Description of Artificial Sequence: Synthetic oligonucleotide
aaaaauaaauau

SEQ ID NO: 20254 - RNA, 12 nt, Artificial Sequence
  Description of Artificial Sequence: Synthetic oligonucleotide
uugacugcugug

SEQ ID NO: 20255 - RNA, 12 nt, Artificial Sequence
  Description of Artificial Sequence: Synthetic oligonucleotide
gagaugagagac

SEQ ID NO: 20256 - RNA, 9 nt, Artificial Sequence
  Description of Artificial Sequence: Synthetic oligonucleotide
cccacuugg

SEQ ID NO: 20257 - RNA, 2818 nt, Homo sapiens
acgcgcgcccugcggagcccgcccaacuccggcgagccgggccugcgccuacuccuccuccuccucucccggcggcggcugcggcggaggcgccgacucggccuugcgcccgcccucaggcccgcgcgggcggcgcagcgaggccccgggcggcgggugguggcugccaggcggcucggccgcgggcgcugcccggccccggcgagcggagggcggagcgcggcgccggagccgagggcgcgccgcggagggggugcugggccgcgcugugcccggccgggcggcggcugcaagaggaggccggaggcgagcgcggggccggcggugggcgcgcagggcggcucgcagcucgcagccggggccgggccaggcguucaggcaggugaucgguguggcggcggcggcggcggcggccccagacucccuccggaguucuucuuggggcugauguccgcaaauaugcagaauuaccggccgggucgcuccugaagccagcgcggggagcgagcgcggcggcggccagcaccgggaacgcaccgaggaagaagcccagcccccgcccuccgccccuuccguccccacccccuacccggcggcccaggaggcuccccgcgcugcgggcgcgcacucccuguuucuccuccuccuggcuggcgcugccugccucuccgcacucacugcucgcgccgggcgcgcuccgccagcuccgugcuccccgcgccacccuccuccgggccgcgcucccuaagggaugguacugaauuucgccgccacaggagaccggcuggagcgcccgccccgcggccucgccucuccuccgagcagccagcgccucgggacgcgaugaggaccuuggcuugccugcugcuccucggcugcggauaccucgcccauguucuggccgaggaagccgagaucccccgcgaggugaucgagaggcuggcccgcagucagauccacagcauccgggaccuccagcgacuccuggagauagacuccguagggagugaggauucuuuggacaccagccugagagcucacgggguccaugccacuaagcaugugcccgagaagcggccccugcccauucggaggaagagaagcaucgaggaagcuguccccgcugucugcaagaccaggacggucauuuacgagauuccucggagucaggucgaccccacguccgccaacuuccugaucuggcccccgugcguggaggugaaacgcugcaccggcugcugcaacacgagcagugucaagugccagcccucccgcguccaccaccgcagcgucaagguggccaagguggaauacgucaggaagaagccaaaauuaaaagaaguccaggugagguuagaggagcauuuggagugcgccugcgcgaccacaagccugaauccggauuaucgggaagaggacacgggaaggccuagggagucagguaaaaaacggaaaagaaaaagguuaaaacccaccuaaagcagccaaccagaugugaggugaggaugagccgcagcccuuuccugggacauggauguacauggcguguuacauuccugaaccuacuauguacggugcuuuauugccagugugcggucuuuguucuccuccgugaaaaacuguguccgagaacacucgggagaacaaagagacagugcacauuuguuuaaugugacaucaaagcaaguauuguagcacucggugaagcaguaagaagcuuccuugucaaaaagagagagagagagagagagagagaaaacaaaaccacaaaugacaaaaacaaaacggacucacaaaaauaucuaaacucgaugagauggagggucgccccgugggauggaagugcagaggucucagcagacuggauuucuguccggguggucacaggugcuuuuuugccgaggaugcagagccugcuuugggaacgacuccagaggggugcuggugggcucugcaggggcccgcaggaagcaggaaugucuuggaaaccgccacgcgaacuuuagaaaccacaccuccucgcuguaguauuuaagcccauacagaaaccuuccugagagccuuaagugguuuuuuuuuuuuguuuuuguuuuguuuuuuuuuuuuuuguuuuuuuuuuuuuuuuuuuuacaccauaaagugauuauuaagcuuuccuuuuuacucuuuggcuagcuuuuuuuuuuuuuuuuuuuaauuaucucuuggaugacauuuacaccgauaacacacaggcugcuguaacugucaggacagugcgacgguauuuuuccuagcaagaugcaaacuaaugagauguauuaaaauaaacaugguauaccuaccuaugcaucauuuccuaaauguuucuggcuuuguguuucucccuuacccugcuuuauuuguuaauuuaagccauuuugaaagaacuaugcgucaaccaaucguacgccgucccugcggcaccugccccagagcccguuuguggcugagugacaacuuguuccccgcagugcacaccuagaaugcuguguucccacgcggcacgugagaugcauugccgcuucugucuguguuguuggugugcccuggugccgugguggcggucacucccucugcugccaguguuuggacagaacccaaauucuuuauuuuugguaagauauugugcuuuaccuguauuaacagaaaugugugugugugguuuguuuuuuuguaaaggugaaguuuguauguuuacuuaauauuaccuguuuuguauaccugagagccugcuauguucuuuuuuuguugauccaaaauuaaaaaaaaaaauaccaccaacaaaaaaaaaaaaaaa

SEQ ID NO: 20258 - RNA, 2749 nt, Homo sapiens
acgcgcgcccugcggagcccgcccaacuccggcgagccgggccugcgccuacuccuccuccuccucucccggcggcggcugcggcggaggcgccgacucggccuugcgcccgcccucaggcccgcgcgggcggcgcagcgaggccccgggcggcgggugguggcugccaggcggcucggccgcgggcgcugcccggccccggcgagcggagggcggagcgcggcgccggagccgagggcgcgccgcggagggggugcugggccgcgcugugcccggccgggcggcggcugcaagaggaggccggaggcgagcgcggggccggcggugggcgcgcagggcggcucgcagcucgcagccggggccgggccaggcguucaggcaggugaucgguguggcggcggcggcggcggcggccccagacucccuccggaguucuucuuggggcugauguccgcaaauaugcagaauuaccggccgggucgcuccugaagccagcgcggggagcgagcgcggcggcggccagcaccgggaacgcaccgaggaagaagcccagcccccgcccuccgccccuuccguccccacccccuacccggcggcccaggaggcuccccgcgcugcgggcgcgcacucccuguuucuccuccuccuggcuggcgcugccugccucuccgcacucacugcucgcgccgggcgcgcuccgccagcuccgugcuccccgcgccacccuccuccgggccgcgcucccuaagggaugguacugaauuucgccgccacaggagaccggcuggagcgcccgccccgcggccucgccucuccuccgagcagccagcgccucgggacgcgaugaggaccuuggcuugccugcugcuccucggcugcggauaccucgcccauguucuggccgaggaagccgagaucccccgcgaggugaucgagaggcuggcccgcagucagauccacagcauccgggaccuccagcgacuccuggagauagacuccguagggagugaggauucuuuggacaccagccugagagcucacgggguccaugccacuaagcaugugcccgagaagcggccccugcccauucggaggaagagaagcaucgaggaagcuguccccgcugucugcaagaccaggacggucauuuacgagauuccucggagucaggucgaccccacguccgccaacuuccugaucuggcccccgugcguggaggugaaacgcugcaccggcugcugcaacacgagcagugucaagugccagcccucccgcguccaccaccgcagcgucaagguggccaagguggaauacgucaggaagaagccaaaauuaaaagaaguccaggugagguuagaggagcauuuggagugcgccugcgcgaccacaagccugaauccggauuaucgggaagaggacacggaugugaggugaggaugagccgcagcccuuuccugggacauggauguacauggcguguuacauuccugaaccuacuauguacggugcuuuauugccagugugcggucuuuguucuccuccgugaaaaacuguguccgagaacacucgggagaacaaagagacagugcacauuuguuuaaugugacaucaaagcaaguauuguagcacucggugaagcaguaagaagcuuccuugucaaaaagagagagagagagagagagagagaaaacaaaaccacaaaugacaaaaacaaaacggacucacaaaaauaucuaaacucgaugagauggagggucgccccgugggauggaagugcagaggucucagcagacuggauuucuguccggguggucacaggugcuuuuuugccgaggaugcagagccugcuuugggaacgacuccagaggggugcuggugggcucugcaggggcccgcaggaagcaggaaugucuuggaaaccgccacgcgaacuuuagaaaccacaccuccucgcuguaguauuuaagcccauacagaaaccuuccugagagccuuaagugguuuuuuuuuuuuguuuuuguuuuguuuuuuuuuuuuuuguuuuuuuuuuuuuuuuuuuuacaccauaaagugauuauuaagcuuuccuuuuuacucuuuggcuagcuuuuuuuuuuuuuuuuuuuaauuaucucuuggaugacauuuacaccgauaacacacaggcugcuguaacugucaggacagugcgacgguauuuuuccuagcaagaugcaaacuaaugagauguauuaaaauaaacaugguauaccuaccuaugcaucauuuccuaaauguuucuggcuuuguguuucucccuuacccugcuuuauuuguuaauuuaagccauuuugaaagaacuaugcgucaaccaaucguacgccgucccugcggcaccugccccagagcccguuuguggcugagugacaacuuguuccccgcagugcacaccuagaaugcuguguucccacgcggcacgugagaugcauugccgcuucugucuguguuguuggugugcccuggugccgugguggcggucacucccucugcugccaguguuuggacagaacccaaauucuuuauuuuugguaagauauugugcuuuaccuguauuaacagaaaugugugugugugguuuguuuuuuuguaaaggugaaguuuguauguuuacuuaauauuaccuguuuuguauaccugagagccugcuauguucuuuuuuuguugauccaaaauuaaaaaaaaaaauaccaccaacaaaaaaaaaaaaaaa

SEQ ID NO: 20259 - RNA, 19 nt, Artificial Sequence
  Description of Artificial Sequence: Synthetic oligonucleotide
acgcgcgcccugcggagcc

SEQ ID NO: 20260 - RNA, 19 nt, Artificial Sequence
  Description of Artificial Sequence: Synthetic oligonucleotide
ccgcccaacuccggcgagc

SEQ ID NO: 20261 - RNA, 19 nt, Artificial Sequence
  Description of Artificial Sequence: Synthetic oligonucleotide
ccgggccugcgccuacucc

SEQ ID NO: 20262 - RNA, 19 nt, Artificial Sequence
  Description of Artificial Sequence: Synthetic oligonucleotide
cuccuccuccucucccggc

SEQ ID NO: 20263 - RNA, 19 nt, Artificial Sequence
  Description of Artificial Sequence: Synthetic oligonucleotide
cggcggcugcggcggaggc

SEQ ID NO: 20264 - RNA, 19 nt, Artificial Sequence
  Description of Artificial Sequence: Synthetic oligonucleotide
cgccgacucggccuugcgc

SEQ ID NO: 20265 - RNA, 19 nt, Artificial Sequence
  Description of Artificial Sequence: Synthetic oligonucleotide
cccgcccucaggcccgcgc

SEQ ID NO: 20266 - RNA, 19 nt, Artificial Sequence
  Description of Artificial Sequence: Synthetic oligonucleotide
cgggcggcgcagcgaggcc

SEQ ID NO: 20267 - RNA, 19 nt, Artificial Sequence
  Description of Artificial Sequence: Synthetic oligonucleotide
cccgggcggcggguggugg

SEQ ID NO: 20268 - RNA, 19 nt, Artificial Sequence
  Description of Artificial Sequence: Synthetic oligonucleotide
gcugccaggcggcucggcc

SEQ ID NO: 20269 - RNA, 19 nt, Artificial Sequence
  Description of Artificial Sequence: Synthetic oligonucleotide
cgcgggcgcugcccggccc

SEQ ID NO: 20270 - RNA, 19 nt, Artificial Sequence
  Description of Artificial Sequence: Synthetic oligonucleotide
ccggcgagcggagggcgga

SEQ ID NO: 20271 - RNA, 19 nt, Artificial Sequence
  Description of Artificial Sequence: Synthetic oligonucleotide
agcgcggcgccggagccga

SEQ ID NO: 20272 - RNA, 19 nt, Artificial Sequence
  Description of Artificial Sequence: Synthetic oligonucleotide
agggcgcgccgcggagggg

SEQ ID NO: 20273 - RNA, 19 nt, Artificial Sequence
  Description of Artificial Sequence: Synthetic oligonucleotide
ggugcugggccgcgcugug

SEQ ID NO: 20274 - RNA, 19 nt, Artificial Sequence
  Description of Artificial Sequence: Synthetic oligonucleotide
gcccggccgggcggcggcu

SEQ ID NO: 20275 - RNA, 19 nt, Artificial Sequence
  Description of Artificial Sequence: Synthetic oligonucleotide
ugcaagaggaggccggagg

SEQ ID NO: 20276 - RNA, 19 nt, Artificial Sequence
  Description of Artificial Sequence: Synthetic oligonucleotide
gcgagcgcggggccggcgg

SEQ ID NO: 20277 - RNA, 19 nt, Artificial Sequence
  Description of Artificial Sequence: Synthetic oligonucleotide
gugggcgcgcagggcggcu

SEQ ID NO: 20278 - RNA, 19 nt, Artificial Sequence
  Description of Artificial Sequence: Synthetic oligonucleotide
ucgcagcucgcagccgggg

SEQ ID NO: 20279 - RNA, 19 nt, Artificial Sequence
  Description of Artificial Sequence: Synthetic oligonucleotide
gccgggccaggcguucagg

SEQ ID NO: 20280 - RNA, 19 nt, Artificial Sequence
  Description of Artificial Sequence: Synthetic oligonucleotide
gcaggugaucgguguggcg

SEQ ID NO: 20281 - RNA, 19 nt, Artificial Sequence
  Description of Artificial Sequence: Synthetic oligonucleotide
ggcggcggcggcggcggcc

SEQ ID NO: 20282 - RNA, 19 nt, Artificial Sequence
  Description of Artificial Sequence: Synthetic oligonucleotide
cccagacucccuccggagu

SEQ ID NO: 20283 - RNA, 19 nt, Artificial Sequence
  Description of Artificial Sequence: Synthetic oligonucleotide
uucuucuuggggcugaugu

SEQ ID NO: 20284 - RNA, 19 nt, Artificial Sequence
  Description of Artificial Sequence: Synthetic oligonucleotide
uccgcaaauaugcagaauu

SEQ ID NO: 20285 - RNA, 19 nt, Artificial Sequence
  Description of Artificial Sequence: Synthetic oligonucleotide
uaccggccgggucgcuccu

SEQ ID NO: 20286 - RNA, 19 nt, Artificial Sequence
  Description of Artificial Sequence: Synthetic oligonucleotide
ugaagccagcgcggggagc

SEQ ID NO: 20287 - RNA, 19 nt, Artificial Sequence
  Description of Artificial Sequence: Synthetic oligonucleotide
cgagcgcggcggcggccag

SEQ ID NO: 20288 - RNA, 19 nt, Artificial Sequence
  Description of Artificial Sequence: Synthetic oligonucleotide
gcaccgggaacgcaccgag

SEQ ID NO: 20289 - RNA, 19 nt, Artificial Sequence
  Description of Artificial Sequence: Synthetic oligonucleotide
ggaagaagcccagcccccg

SEQ ID NO: 20290 - RNA, 19 nt, Artificial Sequence
  Description of Artificial Sequence: Synthetic oligonucleotide
gcccuccgccccuuccguc

SEQ ID NO: 20291 - RNA, 19 nt, Artificial Sequence
  Description of Artificial Sequence: Synthetic oligonucleotide
ccccacccccuacccggcg

SEQ ID NO: 20292 - RNA, 19 nt, Artificial Sequence
  Description of Artificial Sequence: Synthetic oligonucleotide
ggcccaggaggcuccccgc

SEQ ID NO: 20293 - RNA, 19 nt, Artificial Sequence
  Description of Artificial Sequence: Synthetic oligonucleotide
cgcugcgggcgcgcacucc

SEQ ID NO: 20294 - RNA, 19 nt, Artificial Sequence
  Description of Artificial Sequence: Synthetic oligonucleotide
ccuguuucuccuccuccug

SEQ ID NO: 20295 - RNA, 19 nt, Artificial Sequence
  Description of Artificial Sequence: Synthetic oligonucleotide
ggcuggcgcugccugccuc

SEQ ID NO: 20296 - RNA, 19 nt, Artificial Sequence
  Description of Artificial Sequence: Synthetic oligonucleotide
cuccgcacucacugcucgc

SEQ ID NO: 20297 - RNA, 19 nt, Artificial Sequence
  Description of Artificial Sequence: Synthetic oligonucleotide
cgccgggcgcgcuccgcca

SEQ ID NO: 20298 - RNA, 19 nt, Artificial Sequence
  Description of Artificial Sequence: Synthetic oligonucleotide
agcuccgugcuccccgcgc

SEQ ID NO: 20299 - RNA, 19 nt, Artificial Sequence
  Description of Artificial Sequence: Synthetic oligonucleotide
ccacccuccuccgggccgc

SEQ ID NO: 20300 - RNA, 19 nt, Artificial Sequence
  Description of Artificial Sequence: Synthetic oligonucleotide
cgcucccuaagggauggua

SEQ ID NO: 20301 - RNA, 19 nt, Artificial Sequence
  Description of Artificial Sequence: Synthetic oligonucleotide
acugaauuucgccgccaca

SEQ ID NO: 20302 - RNA, 19 nt, Artificial Sequence
  Description of Artificial Sequence: Synthetic oligonucleotide
aggagaccggcuggagcgc

SEQ ID NO: 20303 - RNA, 19 nt, Artificial Sequence
  Description of Artificial Sequence: Synthetic oligonucleotide
cccgccccgcggccucgcc

SEQ ID NO: 20304 - RNA, 19 nt, Artificial Sequence
  Description of Artificial Sequence: Synthetic oligonucleotide
cucuccuccgagcagccag

SEQ ID NO: 20305 - RNA, 19 nt, Artificial Sequence
  Description of Artificial Sequence: Synthetic oligonucleotide
gcgccucgggacgcgauga

SEQ ID NO: 20306 - RNA, 19 nt, Artificial Sequence
  Description of Artificial Sequence: Synthetic oligonucleotide
aggaccuuggcuugccugc

SEQ ID NO: 20307 - RNA, 19 nt, Artificial Sequence
  Description of Artificial Sequence: Synthetic oligonucleotide
cugcuccucggcugcggau

SEQ ID NO: 20308 - RNA, 19 nt, Artificial Sequence
  Description of Artificial Sequence: Synthetic oligonucleotide
uaccucgcccauguucugg

SEQ ID NO: 20309 - RNA, 19 nt, Artificial Sequence
  Description of Artificial Sequence: Synthetic oligonucleotide
gccgaggaagccgagaucc

SEQ ID NO: 20310 - RNA, 19 nt, Artificial Sequence
  Description of Artificial Sequence: Synthetic oligonucleotide
ccccgcgaggugaucgaga

SEQ ID NO: 20311 - RNA, 19 nt, Artificial Sequence
  Description of Artificial Sequence: Synthetic oligonucleotide
aggcuggcccgcagucaga

SEQ ID NO: 20312 - RNA, 19 nt, Artificial Sequence
  Description of Artificial Sequence: Synthetic oligonucleotide
auccacagcauccgggacc

SEQ ID NO: 20313 - RNA, 19 nt, Artificial Sequence
  Description of Artificial Sequence: Synthetic oligonucleotide
cuccagcgacuccuggaga

SEQ ID NO: 20314 - RNA, 19 nt, Artificial Sequence
  Description of Artificial Sequence: Synthetic oligonucleotide
auagacuccguagggagug

SEQ ID NO: 20315 - RNA, 19 nt, Artificial Sequence
  Description of Artificial Sequence: Synthetic oligonucleotide
gaggauucuuuggacacca

SEQ ID NO: 20316 - RNA, 19 nt, Artificial Sequence
  Description of Artificial Sequence: Synthetic oligonucleotide
agccugagagcucacgggg

SEQ ID NO: 20317 - RNA, 19 nt, Artificial Sequence
  Description of Artificial Sequence: Synthetic oligonucleotide
guccaugccacuaagcaug

SEQ ID NO: 20318 - RNA, 19 nt, Artificial Sequence
  Description of Artificial Sequence: Synthetic oligonucleotide
gugcccgagaagcggcccc

SEQ ID NO: 20319 - RNA, 19 nt, Artificial Sequence
  Description of Artificial Sequence: Synthetic oligonucleotide
cugcccauucggaggaaga

SEQ ID NO: 20320 - RNA, 19 nt, Artificial Sequence
  Description of Artificial Sequence: Synthetic oligonucleotide
agaagcaucgaggaagcug

SEQ ID NO: 20321 - RNA, 19 nt, Artificial Sequence
  Description of Artificial Sequence: Synthetic oligonucleotide
guccccgcugucugcaaga

SEQ ID NO: 20322 - RNA, 19 nt, Artificial Sequence
  Description of Artificial Sequence: Synthetic oligonucleotide
accaggacggucauuuacg

SEQ ID NO: 20323 - RNA, 19 nt, Artificial Sequence
  Description of Artificial Sequence: Synthetic oligonucleotide
gagauuccucggagucagg

SEQ ID NO: 20324 - RNA, 19 nt, Artificial Sequence
  Description of Artificial Sequence: Synthetic oligonucleotide
gucgaccccacguccgcca

SEQ ID NO: 20325 - RNA, 19 nt, Artificial Sequence
  Description of Artificial Sequence: Synthetic oligonucleotide
aacuuccugaucuggcccc

SEQ ID NO: 20326 - RNA, 19 nt, Artificial Sequence
  Description of Artificial Sequence: Synthetic oligonucleotide
ccgugcguggaggugaaac

SEQ ID NO: 20327 - RNA, 19 nt, Artificial Sequence
  Description of Artificial Sequence: Synthetic oligonucleotide
cgcugcaccggcugcugca

SEQ ID NO: 20328 - RNA, 19 nt, Artificial Sequence
  Description of Artificial Sequence: Synthetic oligonucleotide
aacacgagcagugucaagu

SEQ ID NO: 20329 - RNA, 19 nt, Artificial Sequence
  Description of Artificial Sequence: Synthetic oligonucleotide
ugccagcccucccgcgucc

SEQ ID NO: 20330 - RNA, 19 nt, Artificial Sequence
  Description of Artificial Sequence: Synthetic oligonucleotide
caccaccgcagcgucaagg

SEQ ID NO: 20331 - RNA, 19 nt, Artificial Sequence
  Description of Artificial Sequence: Synthetic oligonucleotide
guggccaagguggaauacg

SEQ ID NO: 20332 - RNA, 19 nt, Artificial Sequence
  Description of Artificial Sequence: Synthetic oligonucleotide
gucaggaagaagccaaaau

SEQ ID NO: 20333 - RNA, 19 nt, Artificial Sequence
  Description of Artificial Sequence: Synthetic oligonucleotide
uuaaaagaaguccagguga

SEQ ID NO: 20334 - RNA, 19 nt, Artificial Sequence
  Description of Artificial Sequence: Synthetic oligonucleotide
agguuagaggagcauuugg

SEQ ID NO: 20335 - RNA, 19 nt, Artificial Sequence
  Description of Artificial Sequence: Synthetic oligonucleotide
gagugcgccugcgcgacca

SEQ ID NO: 20336 - RNA, 19 nt, Artificial Sequence
  Description of Artificial Sequence: Synthetic oligonucleotide
acaagccugaauccggauu

SEQ ID NO: 20337 - RNA, 19 nt, Artificial Sequence
  Description of Artificial Sequence: Synthetic oligonucleotide
uaucgggaagaggacacgg

SEQ ID NO: 20338 - RNA, 19 nt, Artificial Sequence
  Description of Artificial Sequence: Synthetic oligonucleotide
gaugugaggugaggaugag

SEQ ID NO: 20339 - RNA, 19 nt, Artificial Sequence
  Description of Artificial Sequence: Synthetic oligonucleotide
gccgcagcccuuuccuggg

SEQ ID NO: 20340 - RNA, 19 nt, Artificial Sequence
  Description of Artificial Sequence: Synthetic oligonucleotide
gacauggauguacauggcg

SEQ ID NO: 20341 - RNA, 19 nt, Artificial Sequence
  Description of Artificial Sequence: Synthetic oligonucleotide
guguuacauuccugaaccu

SEQ ID NO: 20342 - RNA, 19 nt, Artificial Sequence
  Description of Artificial Sequence: Synthetic oligonucleotide
uacuauguacggugcuuua

SEQ ID NO: 20343 - RNA, 19 nt, Artificial Sequence
  Description of Artificial Sequence: Synthetic oligonucleotide
auugccagugugcggucuu

SEQ ID NO: 20344 - RNA, 19 nt, Artificial Sequence
  Description of Artificial Sequence: Synthetic oligonucleotide
uuguucuccuccgugaaaa

SEQ ID NO: 20345 - RNA, 19 nt, Artificial Sequence
  Description of Artificial Sequence: Synthetic oligonucleotide
aacuguguccgagaacacu

SEQ ID NO: 20346 - RNA, 19 nt, Artificial Sequence
  Description of Artificial Sequence: Synthetic oligonucleotide
ucgggagaacaaagagaca

SEQ ID NO: 20347 - RNA, 19 nt, Artificial Sequence
  Description of Artificial Sequence: Synthetic oligonucleotide
agugcacauuuguuuaaug

SEQ ID NO: 20348 - RNA, 19 nt, Artificial Sequence
  Description of Artificial Sequence: Synthetic oligonucleotide
gugacaucaaagcaaguau

SEQ ID NO: 20349 - RNA, 19 nt, Artificial Sequence
  Description of Artificial Sequence: Synthetic oligonucleotide
uuguagcacucggugaagc

SEQ ID NO: 20350 - RNA, 19 nt, Artificial Sequence
  Description of Artificial Sequence: Synthetic oligonucleotide
caguaagaagcuuccuugu

SEQ ID NO: 20351 - RNA, 19 nt, Artificial Sequence
  Description of Artificial Sequence: Synthetic oligonucleotide
ucaaaaagagagagagaga

SEQ ID NO: 20352 - RNA, 19 nt, Artificial Sequence
  Description of Artificial Sequence: Synthetic oligonucleotide
agagagagagagaaaacaa

SEQ ID NO: 20353 - RNA, 19 nt, Artificial Sequence
  Description of Artificial Sequence: Synthetic oligonucleotide
aaaccacaaaugacaaaaa

SEQ ID NO: 20354 - RNA, 19 nt, Artificial Sequence
  Description of Artificial Sequence: Synthetic oligonucleotide
acaaaacggacucacaaaa

SEQ ID NO: 20355 - RNA, 19 nt, Artificial Sequence
  Description of Artificial Sequence: Synthetic oligonucleotide
aauaucuaaacucgaugag

SEQ ID NO: 20356 - RNA, 19 nt, Artificial Sequence
  Description of Artificial Sequence: Synthetic oligonucleotide
gauggagggucgccccgug

SEQ ID NO: 20357 - RNA, 19 nt, Artificial Sequence
  Description of Artificial Sequence: Synthetic oligonucleotide
gggauggaagugcagaggu

SEQ ID NO: 20358 - RNA, 19 nt, Artificial Sequence
  Description of Artificial Sequence: Synthetic oligonucleotide
ucucagcagacuggauuuc

SEQ ID NO: 20359 - RNA, 19 nt, Artificial Sequence
  Description of Artificial Sequence: Synthetic oligonucleotide
cuguccggguggucacagg

SEQ ID NO: 20360 - RNA, 19 nt, Artificial Sequence
  Description of Artificial Sequence: Synthetic oligonucleotide
gugcuuuuuugccgaggau

SEQ ID NO: 20361 - RNA, 19 nt, Artificial Sequence
  Description of Artificial Sequence: Synthetic oligonucleotide
ugcagagccugcuuuggga

SEQ ID NO: 20362 - RNA, 19 nt, Artificial Sequence
  Description of Artificial Sequence: Synthetic oligonucleotide
aacgacuccagaggggugc

SEQ ID NO: 20363 - RNA, 19 nt, Artificial Sequence
  Description of Artificial Sequence: Synthetic oligonucleotide
cuggugggcucugcagggg

SEQ ID NO: 20364 - RNA, 19 nt, Artificial Sequence
  Description of Artificial Sequence: Synthetic oligonucleotide
gcccgcaggaagcaggaau

SEQ ID NO: 20365 - RNA, 19 nt, Artificial Sequence
  Description of Artificial Sequence: Synthetic oligonucleotide
ugucuuggaaaccgccacg

SEQ ID NO: 20366 - RNA, 19 nt, Artificial Sequence
  Description of Artificial Sequence: Synthetic oligonucleotide
gcgaacuuuagaaaccaca

SEQ ID NO: 20367 - RNA, 19 nt, Artificial Sequence
  Description of Artificial Sequence: Synthetic oligonucleotide
accuccucgcuguaguauu

SEQ ID NO: 20368 - RNA, 19 nt, Artificial Sequence
  Description of Artificial Sequence: Synthetic oligonucleotide
uuaagcccauacagaaacc

SEQ ID NO: 20369 - RNA, 19 nt, Artificial Sequence
  Description of Artificial Sequence: Synthetic oligonucleotide
cuuccugagagccuuaagu

SEQ ID NO: 20370 - RNA, 19 nt, Artificial Sequence
  Description of Artificial Sequence: Synthetic oligonucleotide
uuuuuuuuacaccauaaag

SEQ ID NO: 20371 - RNA, 19 nt, Artificial Sequence
  Description of Artificial Sequence: Synthetic oligonucleotide
gugauuauuaagcuuuccu

SEQ ID NO: 20372 - RNA, 19 nt, Artificial Sequence
  Description of Artificial Sequence: Synthetic oligonucleotide
uuuuuacucuuuggcuagc

SEQ ID NO: 20373 - RNA, 19 nt, Artificial Sequence
  Description of Artificial Sequence: Synthetic oligonucleotide
uuaauuaucucuuggauga

SEQ ID NO: 20374 - RNA, 19 nt, Artificial Sequence
  Description of Artificial Sequence: Synthetic oligonucleotide
acauuuacaccgauaacac

SEQ ID NO: 20375 - RNA, 19 nt, Artificial Sequence
  Description of Artificial Sequence: Synthetic oligonucleotide
cacaggcugcuguaacugu

SEQ ID NO: 20376 - RNA, 19 nt, Artificial Sequence
  Description of Artificial Sequence: Synthetic oligonucleotide
ucaggacagugcgacggua

SEQ ID NO: 20377 - RNA, 19 nt, Artificial Sequence
  Description of Artificial Sequence: Synthetic oligonucleotide
auuuuuccuagcaagaugc

SEQ ID NO: 20378 - RNA, 19 nt, Artificial Sequence
  Description of Artificial Sequence: Synthetic oligonucleotide
caaacuaaugagauguauu

SEQ ID NO: 20379 - RNA, 19 nt, Artificial Sequence
  Description of Artificial Sequence: Synthetic oligonucleotide
uaaaauaaacaugguauac

SEQ ID NO: 20380 - RNA, 19 nt, Artificial Sequence
  Description of Artificial Sequence: Synthetic oligonucleotide
ccuaccuaugcaucauuuc

SEQ ID NO: 20381 - RNA, 19 nt, Artificial Sequence
  Description of Artificial Sequence: Synthetic oligonucleotide
ccuaaauguuucuggcuuu

SEQ ID NO: 20382 - RNA, 19 nt, Artificial Sequence
  Description of Artificial Sequence: Synthetic oligonucleotide
uguguuucucccuuacccu

SEQ ID NO: 20383 - RNA, 19 nt, Artificial Sequence
  Description of Artificial Sequence: Synthetic oligonucleotide
ugcuuuauuuguuaauuua

SEQ ID NO: 20384 - RNA, 19 nt, Artificial Sequence
  Description of Artificial Sequence: Synthetic oligonucleotide
aagccauuuugaaagaacu

SEQ ID NO: 20385 - RNA, 19 nt, Artificial Sequence
  Description of Artificial Sequence: Synthetic oligonucleotide
uaugcgucaaccaaucgua

SEQ ID NO: 20386 - RNA, 19 nt, Artificial Sequence
  Description of Artificial Sequence: Synthetic oligonucleotide
acgccgucccugcggcacc

SEQ ID NO: 20387 - RNA, 19 nt, Artificial Sequence
  Description of Artificial Sequence: Synthetic oligonucleotide
cugccccagagcccguuug

SEQ ID NO: 20388 - RNA, 19 nt, Artificial Sequence
  Description of Artificial Sequence: Synthetic oligonucleotide
guggcugagugacaacuug

SEQ ID NO: 20389 - RNA, 19 nt, Artificial Sequence
  Description of Artificial Sequence: Synthetic oligonucleotide
guuccccgcagugcacacc

SEQ ID NO: 20390 - RNA, 19 nt, Artificial Sequence
  Description of Artificial Sequence: Synthetic oligonucleotide
cuagaaugcuguguuccca

SEQ ID NO: 20391 - RNA, 19 nt, Artificial Sequence
  Description of Artificial Sequence: Synthetic oligonucleotide
acgcggcacgugagaugca

SEQ ID NO: 20392 - RNA, 19 nt, Artificial Sequence
  Description of Artificial Sequence: Synthetic oligonucleotide
auugccgcuucugucugug

SEQ ID NO: 20393 - RNA, 19 nt, Artificial Sequence
  Description of Artificial Sequence: Synthetic oligonucleotide
guuguuggugugcccuggu

SEQ ID NO: 20394 - RNA, 19 nt, Artificial Sequence
  Description of Artificial Sequence: Synthetic oligonucleotide
ugccgugguggcggucacu

SEQ ID NO: 20395 - RNA, 19 nt, Artificial Sequence
  Description of Artificial Sequence: Synthetic oligonucleotide
ucccucugcugccaguguu

SEQ ID NO: 20396 - RNA, 19 nt, Artificial Sequence
  Description of Artificial Sequence: Synthetic oligonucleotide
uuggacagaacccaaauuc

SEQ ID NO: 20397 - RNA, 19 nt, Artificial Sequence
  Description of Artificial Sequence: Synthetic oligonucleotide
cuuuauuuuugguaagaua

SEQ ID NO: 20398 - RNA, 19 nt, Artificial Sequence
  Description of Artificial Sequence: Synthetic oligonucleotide
auugugcuuuaccuguauu

SEQ ID NO: 20399 - RNA, 19 nt, Artificial Sequence
  Description of Artificial Sequence: Synthetic oligonucleotide
uaacagaaaugugugugug

SEQ ID NO: 20400 - RNA, 19 nt, Artificial Sequence
  Description of Artificial Sequence: Synthetic oligonucleotide
gugguuuguuuuuuuguaa

SEQ ID NO: 20401 - RNA, 19 nt, Artificial Sequence
  Description of Artificial Sequence: Synthetic oligonucleotide
aaggugaaguuuguauguu

SEQ ID NO: 20402 - RNA, 19 nt, Artificial Sequence
  Description of Artificial Sequence: Synthetic oligonucleotide
uuacuuaauauuaccuguu

SEQ ID NO: 20403 - RNA, 19 nt, Artificial Sequence
  Description of Artificial Sequence: Synthetic oligonucleotide
uuuguauaccugagagccu

SEQ ID NO: 20404 - RNA, 19 nt, Artificial Sequence
  Description of Artificial Sequence: Synthetic oligonucleotide
ugcuauguucuuuuuuugu

SEQ ID NO: 20405 - RNA, 19 nt, Artificial Sequence
  Description of Artificial Sequence: Synthetic oligonucleotide
uugauccaaaauuaaaaaa

SEQ ID NO: 20406 - RNA, 19 nt, Artificial Sequence
  Description of Artificial Sequence: Synthetic oligonucleotide
aaaaaauaccaccaacaaa

SEQ ID NO: 20407 - RNA, 19 nt, Artificial Sequence
  Description of Artificial Sequence: Synthetic oligonucleotide
ggaaggccuagggagucag

SEQ ID NO: 20408 - RNA, 19 nt, Artificial Sequence
  Description of Artificial Sequence: Synthetic oligonucleotide
gguaaaaaacggaaaagaa

SEQ ID NO: 20409 - RNA, 19 nt, Artificial Sequence
  Description of Artificial Sequence: Synthetic oligonucleotide
aaaagguuaaaacccaccu

SEQ ID NO: 20410 - RNA, 19 nt, Artificial Sequence
  Description of Artificial Sequence: Synthetic oligonucleotide
uaaagcagccaaccagaug

SEQ ID NO: 20411 - RNA, 19 nt, Artificial Sequence
  Description of Artificial Sequence: Synthetic oligonucleotide
gugaggugaggaugagccg

SEQ ID NO: 20412 - RNA, 19 nt, Artificial Sequence
  Description of Artificial Sequence: Synthetic oligonucleotide
gcagcccuuuccugggaca

SEQ ID NO: 20413 - RNA, 19 nt, Artificial Sequence
  Description of Artificial Sequence: Synthetic oligonucleotide
auggauguacauggcgugu

SEQ ID NO: 20414 - RNA, 19 nt, Artificial Sequence
  Description of Artificial Sequence: Synthetic oligonucleotide
uuacauuccugaaccuacu

SEQ ID NO: 20415 - RNA, 19 nt, Artificial Sequence
  Description of Artificial Sequence: Synthetic oligonucleotide
uauguacggugcuuuauug

SEQ ID NO: 20416 - RNA, 19 nt, Artificial Sequence
  Description of Artificial Sequence: Synthetic oligonucleotide
gccagugugcggucuuugu

SEQ ID NO: 20417 - RNA, 19 nt, Artificial Sequence
  Description of Artificial Sequence: Synthetic oligonucleotide
uucuccuccgugaaaaacu

SEQ ID NO: 20418 - RNA, 19 nt, Artificial Sequence
  Description of Artificial Sequence: Synthetic oligonucleotide
uguguccgagaacacucgg

SEQ ID NO: 20419 - RNA, 19 nt, Artificial Sequence
  Description of Artificial Sequence: Synthetic oligonucleotide
ggagaacaaagagacagug

SEQ ID NO: 20420 - RNA, 19 nt, Artificial Sequence
  Description of Artificial Sequence: Synthetic oligonucleotide
gcacauuuguuuaauguga

SEQ ID NO: 20421 - RNA, 19 nt, Artificial Sequence
  Description of Artificial Sequence: Synthetic oligonucleotide
acaucaaagcaaguauugu

SEQ ID NO: 20422 - RNA, 19 nt, Artificial Sequence
  Description of Artificial Sequence: Synthetic oligonucleotide
uagcacucggugaagcagu

SEQ ID NO: 20423 - RNA, 19 nt, Artificial Sequence
  Description of Artificial Sequence: Synthetic oligonucleotide
uaagaagcuuccuugucaa

SEQ ID NO: 20424 - RNA, 19 nt, Artificial Sequence
  Description of Artificial Sequence: Synthetic oligonucleotide
aaaagagagagagagagag

SEQ ID NO: 20425 - RNA, 19 nt, Artificial Sequence
  Description of Artificial Sequence: Synthetic oligonucleotide
gagagagagaaaacaaaac

SEQ ID NO: 20426 - RNA, 19 nt, Artificial Sequence
  Description of Artificial Sequence: Synthetic oligonucleotide
ccacaaaugacaaaaacaa

SEQ ID NO: 20427 - RNA, 19 nt, Artificial Sequence
  Description of Artificial Sequence: Synthetic oligonucleotide
aaacggacucacaaaaaua

SEQ ID NO: 20428 - RNA, 19 nt, Artificial Sequence
  Description of Artificial Sequence: Synthetic oligonucleotide
aucuaaacucgaugagaug

SEQ ID NO: 20429 - RNA, 19 nt, Artificial Sequence
  Description of Artificial Sequence: Synthetic oligonucleotide
ggagggucgccccguggga

SEQ ID NO: 20430 - RNA, 19 nt, Artificial Sequence
  Description of Artificial Sequence: Synthetic oligonucleotide
auggaagugcagaggucuc

SEQ ID NO: 20431 - RNA, 19 nt, Artificial Sequence
  Description of Artificial Sequence: Synthetic oligonucleotide
cagcagacuggauuucugu

SEQ ID NO: 20432 - RNA, 19 nt, Artificial Sequence
  Description of Artificial Sequence: Synthetic oligonucleotide
uccggguggucacaggugc

SEQ ID NO: 20433 - RNA, 19 nt, Artificial Sequence
  Description of Artificial Sequence: Synthetic oligonucleotide
cuuuuuugccgaggaugca

SEQ ID NO: 20434 - RNA, 19 nt, Artificial Sequence
  Description of Artificial Sequence: Synthetic oligonucleotide
agagccugcuuugggaacg

SEQ ID NO: 20435 - RNA, 19 nt, Artificial Sequence
  Description of Artificial Sequence: Synthetic oligonucleotide
gacuccagaggggugcugg

SEQ ID NO: 20436 - RNA, 19 nt, Artificial Sequence
  Description of Artificial Sequence: Synthetic oligonucleotide
gugggcucugcaggggccc

SEQ ID NO: 20437 - RNA, 19 nt, Artificial Sequence
  Description of Artificial Sequence: Synthetic oligonucleotide
cgcaggaagcaggaauguc

SEQ ID NO: 20438 - RNA, 19 nt, Artificial Sequence
  Description of Artificial Sequence: Synthetic oligonucleotide
cuuggaaaccgccacgcga

SEQ ID NO: 20439 - RNA, 19 nt, Artificial Sequence
  Description of Artificial Sequence: Synthetic oligonucleotide
aacuuuagaaaccacaccu

SEQ ID NO: 20440 - RNA, 19 nt, Artificial Sequence
  Description of Artificial Sequence: Synthetic oligonucleotide
uccucgcuguaguauuuaa

SEQ ID NO: 20441 - RNA, 19 nt, Artificial Sequence
  Description of Artificial Sequence: Synthetic oligonucleotide
agcccauacagaaaccuuc

SEQ ID NO: 20442 - RNA, 19 nt, Artificial Sequence
  Description of Artificial Sequence: Synthetic oligonucleotide
ccugagagccuuaaguggu

SEQ ID NO: 20443 - RNA, 19 nt, Artificial Sequence
  Description of Artificial Sequence: Synthetic oligonucleotide
uuuuuacaccauaaaguga

SEQ ID NO: 20444 - RNA, 19 nt, Artificial Sequence
  Description of Artificial Sequence: Synthetic oligonucleotide
auuauuaagcuuuccuuuu

SEQ ID NO: 20445 - RNA, 19 nt, Artificial Sequence
  Description of Artificial Sequence: Synthetic oligonucleotide
uuacucuuuggcuagcuuu

SEQ ID NO: 20446 - RNA, 19 nt, Artificial Sequence
  Description of Artificial Sequence: Synthetic oligonucleotide
auuaucucuuggaugacau

SEQ ID NO: 20447 - RNA, 19 nt, Artificial Sequence
  Description of Artificial Sequence: Synthetic oligonucleotide
uuuacaccgauaacacaca

SEQ ID NO: 20448 - RNA, 19 nt, Artificial Sequence
  Description of Artificial Sequence: Synthetic oligonucleotide
aggcugcuguaacugucag

SEQ ID NO: 20449 - RNA, 19 nt, Artificial Sequence
  Description of Artificial Sequence: Synthetic oligonucleotide
ggacagugcgacgguauuu

SEQ ID NO: 20450 - RNA, 19 nt, Artificial Sequence
  Description of Artificial Sequence: Synthetic oligonucleotide
uuuccuagcaagaugcaaa

SEQ ID NO: 20451 - RNA, 19 nt, Artificial Sequence
  Description of Artificial Sequence: Synthetic oligonucleotide
acuaaugagauguauuaaa

SEQ ID NO: 20452 - RNA, 19 nt, Artificial Sequence
  Description of Artificial Sequence: Synthetic oligonucleotide
aauaaacaugguauaccua

SEQ ID NO: 20453 - RNA, 19 nt, Artificial Sequence
  Description of Artificial Sequence: Synthetic oligonucleotide
accuaugcaucauuuccua

SEQ ID NO: 20454 - RNA, 19 nt, Artificial Sequence
  Description of Artificial Sequence: Synthetic oligonucleotide
aaauguuucuggcuuugug

SEQ ID NO: 20455 - RNA, 19 nt, Artificial Sequence
  Description of Artificial Sequence: Synthetic oligonucleotide
guuucucccuuacccugcu

SEQ ID NO: 20456 - RNA, 19 nt, Artificial Sequence
  Description of Artificial Sequence: Synthetic oligonucleotide
uuuauuuguuaauuuaagc

SEQ ID NO: 20457 - RNA, 19 nt, Artificial Sequence
  Description of Artificial Sequence: Synthetic oligonucleotide
ccauuuugaaagaacuaug

SEQ ID NO: 20458 - RNA, 19 nt, Artificial Sequence
  Description of Artificial Sequence: Synthetic oligonucleotide
gcgucaaccaaucguacgc

SEQ ID NO: 20459 - RNA, 19 nt, Artificial Sequence
  Description of Artificial Sequence: Synthetic oligonucleotide
ccgucccugcggcaccugc

SEQ ID NO: 20460 - RNA, 19 nt, Artificial Sequence
  Description of Artificial Sequence: Synthetic oligonucleotide
ccccagagcccguuugugg

SEQ ID NO: 20461 - RNA, 19 nt, Artificial Sequence
  Description of Artificial Sequence: Synthetic oligonucleotide
gcugagugacaacuuguuc

SEQ ID NO: 20462 - RNA, 19 nt, Artificial Sequence
  Description of Artificial Sequence: Synthetic oligonucleotide
ccccgcagugcacaccuag

SEQ ID NO: 20463 - RNA, 19 nt, Artificial Sequence
  Description of Artificial Sequence: Synthetic oligonucleotide
gaaugcuguguucccacgc

SEQ ID NO: 20464 - RNA, 19 nt, Artificial Sequence
  Description of Artificial Sequence: Synthetic oligonucleotide
cggcacgugagaugcauug

SEQ ID NO: 20465 - RNA, 19 nt, Artificial Sequence
  Description of Artificial Sequence: Synthetic oligonucleotide
gccgcuucugucuguguug

SEQ ID NO: 20466 - RNA, 19 nt, Artificial Sequence
  Description of Artificial Sequence: Synthetic oligonucleotide
guuggugugcccuggugcc

SEQ ID NO: 20467 - RNA, 19 nt, Artificial Sequence
  Description of Artificial Sequence: Synthetic oligonucleotide
cgugguggcggucacuccc

SEQ ID NO: 20468 - RNA, 19 nt, Artificial Sequence
  Description of Artificial Sequence: Synthetic oligonucleotide
cucugcugccaguguuugg

SEQ ID NO: 20469 - RNA, 19 nt, Artificial Sequence
  Description of Artificial Sequence: Synthetic oligonucleotide
gacagaacccaaauucuuu

SEQ ID NO: 20470 - RNA, 19 nt, Artificial Sequence
  Description of Artificial Sequence: Synthetic oligonucleotide
uauuuuugguaagauauug

SEQ ID NO: 20471 - RNA, 19 nt, Artificial Sequence
  Description of Artificial Sequence: Synthetic oligonucleotide
gugcuuuaccuguauuaac

SEQ ID NO: 20472 - RNA, 19 nt, Artificial Sequence
  Description of Artificial Sequence: Synthetic oligonucleotide
cagaaaugugugugugugg

SEQ ID NO: 20473 - RNA, 19 nt, Artificial Sequence
  Description of Artificial Sequence: Synthetic oligonucleotide
guuuguuuuuuuguaaagg

SEQ ID NO: 20474 - RNA, 19 nt, Artificial Sequence
  Description of Artificial Sequence: Synthetic oligonucleotide
gugaaguuuguauguuuac

SEQ ID NO: 20475 - RNA, 19 nt, Artificial Sequence
  Description of Artificial Sequence: Synthetic oligonucleotide
cuuaauauuaccuguuuug

SEQ ID NO: 20476 - RNA, 19 nt, Artificial Sequence
  Description of Artificial Sequence: Synthetic oligonucleotide
guauaccugagagccugcu

SEQ ID NO: 20477 - RNA, 19 nt, Artificial Sequence
  Description of Artificial Sequence: Synthetic oligonucleotide
uauguucuuuuuuuguuga

SEQ ID NO: 20478 - RNA, 19 nt, Artificial Sequence
  Description of Artificial Sequence: Synthetic oligonucleotide
auccaaaauuaaaaaaaaa

SEQ ID NO: 20479 - RNA, 19 nt, Artificial Sequence
  Description of Artificial Sequence: Synthetic oligonucleotide
aaauaccaccaacaaaaaa

SEQ ID NO: 20480 - RNA, 25 nt, Artificial Sequence
  Description of Artificial Sequence: Synthetic oligonucleotide
acgcgcgcccugcggagcccgccca

SEQ ID NO: 20481 - RNA, 25 nt, Artificial Sequence
  Description of Artificial Sequence: Synthetic oligonucleotide
aacuccggcgagccgggccugcgcc

SEQ ID NO: 20482 - RNA, 25 nt, Artificial Sequence
  Description of Artificial Sequence: Synthetic oligonucleotide
cuacuccuccuccuccucucccggc

SEQ ID NO: 20483 - RNA, 25 nt, Artificial Sequence
  Description of Artificial Sequence: Synthetic oligonucleotide
cggcggcugcggcggaggcgccgac

SEQ ID NO: 20484 - RNA, 25 nt, Artificial Sequence
  Description of Artificial Sequence: Synthetic oligonucleotide
cucggccuugcgcccgcccucaggc

SEQ ID NO: 20485 - RNA, 25 nt, Artificial Sequence
  Description of Artificial Sequence: Synthetic oligonucleotide
cccgcgcgggcggcgcagcgaggcc

SEQ ID NO: 20486 - RNA, 25 nt, Artificial Sequence
  Description of Artificial Sequence: Synthetic oligonucleotide
cccgggcggcgggugguggcugcca

SEQ ID NO: 20487 - RNA, 25 nt, Artificial Sequence
  Description of Artificial Sequence: Synthetic oligonucleotide
aggcggcucggccgcgggcgcugcc

SEQ ID NO: 20488 - RNA, 25 nt, Artificial Sequence
  Description of Artificial Sequence: Synthetic oligonucleotide
ccggccccggcgagcggagggcgga

SEQ ID NO: 20489 - RNA, 25 nt, Artificial Sequence
  Description of Artificial Sequence: Synthetic oligonucleotide
agcgcggcgccggagccgagggcgc

SEQ ID NO: 20490 - RNA, 25 nt, Artificial Sequence
  Description of Artificial Sequence: Synthetic oligonucleotide
cgccgcggagggggugcugggccgc

SEQ ID NO: 20491 - RNA, 25 nt, Artificial Sequence
  Description of Artificial Sequence: Synthetic oligonucleotide
cgcugugcccggccgggcggcggcu

SEQ ID NO: 20492 - RNA, 25 nt, Artificial Sequence
  Description of Artificial Sequence: Synthetic oligonucleotide
ugcaagaggaggccggaggcgagcg

SEQ ID NO: 20493 - RNA, 25 nt, Artificial Sequence
  Description of Artificial Sequence: Synthetic oligonucleotide
gcggggccggcggugggcgcgcagg

SEQ ID NO: 20494 - RNA, 25 nt, Artificial Sequence
  Description of Artificial Sequence: Synthetic oligonucleotide
ggcggcucgcagcucgcagccgggg

SEQ ID NO: 20495 - RNA, 25 nt, Artificial Sequence
  Description of Artificial Sequence: Synthetic oligonucleotide
gccgggccaggcguucaggcaggug

SEQ ID NO: 20496 - RNA, 25 nt, Artificial Sequence
  Description of Artificial Sequence: Synthetic oligonucleotide
gaucgguguggcggcggcggcggcg

SEQ ID NO: 20497 - RNA, 25 nt, Artificial Sequence
  Description of Artificial Sequence: Synthetic oligonucleotide
ggcggccccagacucccuccggagu

SEQ ID NO: 20498 - RNA, 25 nt, Artificial Sequence
  Description of Artificial Sequence: Synthetic oligonucleotide
uucuucuuggggcugauguccgcaa

SEQ ID NO: 20499 - RNA, 25 nt, Artificial Sequence
  Description of Artificial Sequence: Synthetic oligonucleotide
aauaugcagaauuaccggccggguc

SEQ ID NO: 20500 - RNA, 25 nt, Artificial Sequence
  Description of Artificial Sequence: Synthetic oligonucleotide
cgcuccugaagccagcgcggggagc

SEQ ID NO: 20501 - RNA, 25 nt, Artificial Sequence
  Description of Artificial Sequence: Synthetic oligonucleotide
cgagcgcggcggcggccagcaccgg

SEQ ID NO: 20502 - RNA, 25 nt, Artificial Sequence
  Description of Artificial Sequence: Synthetic oligonucleotide
ggaacgcaccgaggaagaagcccag

SEQ ID NO: 20503 - RNA, 25 nt, Artificial Sequence
  Description of Artificial Sequence: Synthetic oligonucleotide
gcccccgcccuccgccccuuccguc

SEQ ID NO: 20504 - RNA, 25 nt, Artificial Sequence
  Description of Artificial Sequence: Synthetic oligonucleotide
ccccacccccuacccggcggcccag

SEQ ID NO: 20505 - RNA, 25 nt, Artificial Sequence
  Description of Artificial Sequence: Synthetic oligonucleotide
ggaggcuccccgcgcugcgggcgcg

SEQ ID NO: 20506 - RNA, 25 nt, Artificial Sequence
  Description of Artificial Sequence: Synthetic oligonucleotide
gcacucccuguuucuccuccuccug

SEQ ID NO: 20507 - RNA, 25 nt, Artificial Sequence
  Description of Artificial Sequence: Synthetic oligonucleotide
ggcuggcgcugccugccucuccgca

SEQ ID NO: 20508 - RNA, 25 nt, Artificial Sequence
  Description of Artificial Sequence: Synthetic oligonucleotide
acucacugcucgcgccgggcgcgcu

SEQ ID NO: 20509 - RNA, 25 nt, Artificial Sequence
  Description of Artificial Sequence: Synthetic oligonucleotide
uccgccagcuccgugcuccccgcgc

SEQ ID NO: 20510 - RNA, 25 nt, Artificial Sequence
  Description of Artificial Sequence: Synthetic oligonucleotide
ccacccuccuccgggccgcgcuccc

SEQ ID NO: 20511 - RNA, 25 nt, Artificial Sequence
  Description of Artificial Sequence: Synthetic oligonucleotide
cuaagggaugguacugaauuucgcc

SEQ ID NO: 20512 - RNA, 25 nt, Artificial Sequence
  Description of Artificial Sequence: Synthetic oligonucleotide
cgccacaggagaccggcuggagcgc

SEQ ID NO: 20513 - RNA, 25 nt, Artificial Sequence
  Description of Artificial Sequence: Synthetic oligonucleotide
cccgccccgcggccucgccucuccu

SEQ ID NO: 20514 - RNA, 25 nt, Artificial Sequence
  Description of Artificial Sequence: Synthetic oligonucleotide
uccgagcagccagcgccucgggacg

SEQ ID NO: 20515 - RNA, 25 nt, Artificial Sequence
  Description of Artificial Sequence: Synthetic oligonucleotide
gcgaugaggaccuuggcuugccugc

SEQ ID NO: 20516 - RNA, 25 nt, Artificial Sequence
  Description of Artificial Sequence: Synthetic oligonucleotide
cugcuccucggcugcggauaccucg

SEQ ID NO: 20517 - RNA, 25 nt, Artificial Sequence
  Description of Artificial Sequence: Synthetic oligonucleotide
gcccauguucuggccgaggaagccg

SEQ ID NO: 20518 - RNA, 25 nt, Artificial Sequence
  Description of Artificial Sequence: Synthetic oligonucleotide
gagaucccccgcgaggugaucgaga

SEQ ID NO: 20519 - RNA, 25 nt, Artificial Sequence
  Description of Artificial Sequence: Synthetic oligonucleotide
aggcuggcccgcagucagauccaca

SEQ ID NO: 20520 - RNA, 25 nt, Artificial Sequence
  Description of Artificial Sequence: Synthetic oligonucleotide
agcauccgggaccuccagcgacucc

SEQ ID NO: 20521 - RNA, 25 nt, Artificial Sequence
  Description of Artificial Sequence: Synthetic oligonucleotide
cuggagauagacuccguagggagug

SEQ ID NO: 20522 - RNA, 25 nt, Artificial Sequence
  Description of Artificial Sequence: Synthetic oligonucleotide
gaggauucuuuggacaccagccuga

SEQ ID NO: 20523 - RNA, 25 nt, Artificial Sequence
  Description of Artificial Sequence: Synthetic oligonucleotide
agagcucacgggguccaugccacua

SEQ ID NO: 20524 - RNA, 25 nt, Artificial Sequence
  Description of Artificial Sequence: Synthetic oligonucleotide
aagcaugugcccgagaagcggcccc

SEQ ID NO: 20525 - RNA, 25 nt, Artificial Sequence
  Description of Artificial Sequence: Synthetic oligonucleotide
cugcccauucggaggaagagaagca

SEQ ID NO: 20526 - RNA, 25 nt, Artificial Sequence
  Description of Artificial Sequence: Synthetic oligonucleotide
aucgaggaagcuguccccgcugucu

SEQ ID NO: 20527 - RNA, 25 nt, Artificial Sequence
  Description of Artificial Sequence: Synthetic oligonucleotide
ugcaagaccaggacggucauuuacg

SEQ ID NO: 20528 - RNA, 25 nt, Artificial Sequence
  Description of Artificial Sequence: Synthetic oligonucleotide
gagauuccucggagucaggucgacc

SEQ ID NO: 20529 - RNA, 25 nt, Artificial Sequence
  Description of Artificial Sequence: Synthetic oligonucleotide
cccacguccgccaacuuccugaucu

SEQ ID NO: 20530 - RNA, 25 nt, Artificial Sequence
  Description of Artificial Sequence: Synthetic oligonucleotide
uggcccccgugcguggaggugaaac

SEQ ID NO: 20531 - RNA, 25 nt, Artificial Sequence
  Description of Artificial Sequence: Synthetic oligonucleotide
cgcugcaccggcugcugcaacacga

SEQ ID NO: 20532 - RNA, 25 nt, Artificial Sequence
  Description of Artificial Sequence: Synthetic oligonucleotide
agcagugucaagugccagcccuccc

SEQ ID NO: 20533 - RNA, 25 nt, Artificial Sequence
  Description of Artificial Sequence: Synthetic oligonucleotide
cgcguccaccaccgcagcgucaagg

SEQ ID NO: 20534 - RNA, 25 nt, Artificial Sequence
  Description of Artificial Sequence: Synthetic oligonucleotide
guggccaagguggaauacgucagga

SEQ ID NO: 20535 - RNA, 25 nt, Artificial Sequence
  Description of Artificial Sequence: Synthetic oligonucleotide
aagaagccaaaauuaaaagaagucc

SEQ ID NO: 20536 - RNA, 25 nt, Artificial Sequence
  Description of Artificial Sequence: Synthetic oligonucleotide
caggugagguuagaggagcauuugg

SEQ ID NO: 20537 - RNA, 25 nt, Artificial Sequence
  Description of Artificial Sequence: Synthetic oligonucleotide
gagugcgccugcgcgaccacaagcc

SEQ ID NO: 20538 - RNA, 25 nt, Artificial Sequence
  Description of Artificial Sequence: Synthetic oligonucleotide
cugaauccggauuaucgggaagagg

SEQ ID NO: 20539 - RNA, 25 nt, Artificial Sequence
  Description of Artificial Sequence: Synthetic oligonucleotide
gacacggaugugaggugaggaugag

SEQ ID NO: 20540 - RNA, 25 nt, Artificial Sequence
  Description of Artificial Sequence: Synthetic oligonucleotide
gccgcagcccuuuccugggacaugg

SEQ ID NO: 20541 - RNA, 25 nt, Artificial Sequence
  Description of Artificial Sequence: Synthetic oligonucleotide
gauguacauggcguguuacauuccu

SEQ ID NO: 20542 - RNA, 25 nt, Artificial Sequence
  Description of Artificial Sequence: Synthetic oligonucleotide
ugaaccuacuauguacggugcuuua

SEQ ID NO: 20543 - RNA, 25 nt, Artificial Sequence
  Description of Artificial Sequence: Synthetic oligonucleotide
auugccagugugcggucuuuguucu

SEQ ID NO: 20544 - RNA, 25 nt, Artificial Sequence
  Description of Artificial Sequence: Synthetic oligonucleotide
uccuccgugaaaaacuguguccgag

SEQ ID NO: 20545 - RNA, 25 nt, Artificial Sequence
  Description of Artificial Sequence: Synthetic oligonucleotide
gaacacucgggagaacaaagagaca

SEQ ID NO: 20546 - RNA, 25 nt, Artificial Sequence
  Description of Artificial Sequence: Synthetic oligonucleotide
agugcacauuuguuuaaugugacau

SEQ ID NO: 20547 - RNA, 25 nt, Artificial Sequence
  Description of Artificial Sequence: Synthetic oligonucleotide
ucaaagcaaguauuguagcacucgg

SEQ ID NO: 20548 - RNA, 25 nt, Artificial Sequence
  Description of Artificial Sequence: Synthetic oligonucleotide
gugaagcaguaagaagcuuccuugu

SEQ ID NO: 20549 - RNA, 25 nt, Artificial Sequence
  Description of Artificial Sequence: Synthetic oligonucleotide
ucaaaaagagagagagagagagaga

SEQ ID NO: 20550 - RNA, 25 nt, Artificial Sequence
  Description of Artificial Sequence: Synthetic oligonucleotide
agagagaaaacaaaaccacaaauga

SEQ ID NO: 20551 - RNA, 25 nt, Artificial Sequence
  Description of Artificial Sequence: Synthetic oligonucleotide
acaaaaacaaaacggacucacaaaa

SEQ ID NO: 20552 - RNA, 25 nt, Artificial Sequence
  Description of Artificial Sequence: Synthetic oligonucleotide
aauaucuaaacucgaugagauggag

SEQ ID NO: 20553 - RNA, 25 nt, Artificial Sequence
  Description of Artificial Sequence: Synthetic oligonucleotide
gggucgccccgugggauggaagugc

SEQ ID NO: 20554 - RNA, 25 nt, Artificial Sequence
  Description of Artificial Sequence: Synthetic oligonucleotide
cagaggucucagcagacuggauuuc

SEQ ID NO: 20555 - RNA, 25 nt, Artificial Sequence
  Description of Artificial Sequence: Synthetic oligonucleotide
cuguccggguggucacaggugcuuu

SEQ ID NO: 20556 - RNA, 25 nt, Artificial Sequence
  Description of Artificial Sequence: Synthetic oligonucleotide
uuuugccgaggaugcagagccugcu

SEQ ID NO: 20557 - RNA, 25 nt, Artificial Sequence
  Description of Artificial Sequence: Synthetic oligonucleotide
uuugggaacgacuccagaggggugc

SEQ ID NO: 20558 - RNA, 25 nt, Artificial Sequence
  Description of Artificial Sequence: Synthetic oligonucleotide
cuggugggcucugcaggggcccgca

SEQ ID NO: 20559 - RNA, 25 nt, Artificial Sequence
  Description of Artificial Sequence: Synthetic oligonucleotide
aggaagcaggaaugucuuggaaacc

SEQ ID NO: 20560 - RNA, 25 nt, Artificial Sequence
  Description of Artificial Sequence: Synthetic oligonucleotide
cgccacgcgaacuuuagaaaccaca

SEQ ID NO: 20561 - RNA, 25 nt, Artificial Sequence
  Description of Artificial Sequence: Synthetic oligonucleotide
accuccucgcuguaguauuuaagcc

SEQ ID NO: 20562 - RNA, 25 nt, Artificial Sequence
  Description of Artificial Sequence: Synthetic oligonucleotide
ccauacagaaaccuuccugagagcc

SEQ ID NO: 20563 - RNA, 25 nt, Artificial Sequence
  Description of Artificial Sequence: Synthetic oligonucleotide
cauaaagugauuauuaagcuuuccu

SEQ ID NO: 20564 - RNA, 25 nt, Artificial Sequence
  Description of Artificial Sequence: Synthetic oligonucleotide
uuuuuacucuuuggcuagcuuuuuu

SEQ ID NO: 20565 - RNA, 25 nt, Artificial Sequence
  Description of Artificial Sequence: Synthetic oligonucleotide
uggaugacauuuacaccgauaacac

SEQ ID NO: 20566 - RNA, 25 nt, Artificial Sequence
  Description of Artificial Sequence: Synthetic oligonucleotide
cacaggcugcuguaacugucaggac

SEQ ID NO: 20567 - RNA, 25 nt, Artificial Sequence
  Description of Artificial Sequence: Synthetic oligonucleotide
cagugcgacgguauuuuuccuagca

SEQ ID NO: 20568 - RNA, 25 nt, Artificial Sequence
  Description of Artificial Sequence: Synthetic oligonucleotide
aagaugcaaacuaaugagauguauu

SEQ ID NO: 20569 - RNA, 25 nt, Artificial Sequence
  Description of Artificial Sequence: Synthetic oligonucleotide
uaaaauaaacaugguauaccuaccu

SEQ ID NO: 20570 - RNA, 25 nt, Artificial Sequence
  Description of Artificial Sequence: Synthetic oligonucleotide
uaugcaucauuuccuaaauguuucu

SEQ ID NO: 20571 - RNA, 25 nt, Artificial Sequence
  Description of Artificial Sequence: Synthetic oligonucleotide
uggcuuuguguuucucccuuacccu

SEQ ID NO: 20572 - RNA, 25 nt, Artificial Sequence
  Description of Artificial Sequence: Synthetic oligonucleotide
ugcuuuauuuguuaauuuaagccau

SEQ ID NO: 20573 - RNA, 25 nt, Artificial Sequence
  Description of Artificial Sequence: Synthetic oligonucleotide
uuuugaaagaacuaugcgucaacca

SEQ ID NO: 20574 - RNA, 25 nt, Artificial Sequence
  Description of Artificial Sequence: Synthetic oligonucleotide
aaucguacgccgucccugcggcacc

SEQ ID NO: 20575 - RNA, 25 nt, Artificial Sequence
  Description of Artificial Sequence: Synthetic oligonucleotide
cugccccagagcccguuuguggcug

SEQ ID NO: 20576 - RNA, 25 nt, Artificial Sequence
  Description of Artificial Sequence: Synthetic oligonucleotide
gagugacaacuuguuccccgcagug

SEQ ID NO: 20577 - RNA, 25 nt, Artificial Sequence
  Description of Artificial Sequence: Synthetic oligonucleotide
gcacaccuagaaugcuguguuccca

SEQ ID NO: 20578 - RNA, 25 nt, Artificial Sequence
  Description of Artificial Sequence: Synthetic oligonucleotide
acgcggcacgugagaugcauugccg

SEQ ID NO: 20579 - RNA, 25 nt, Artificial Sequence
  Description of Artificial Sequence: Synthetic oligonucleotide
gcuucugucuguguuguuggugugc

SEQ ID NO: 20580 - RNA, 25 nt, Artificial Sequence
  Description of Artificial Sequence: Synthetic oligonucleotide
cccuggugccgugguggcggucacu

SEQ ID NO: 20581 - RNA, 25 nt, Artificial Sequence
  Description of Artificial Sequence: Synthetic oligonucleotide
ucccucugcugccaguguuuggaca

SEQ ID NO: 20582 - RNA, 25 nt, Artificial Sequence
  Description of Artificial Sequence: Synthetic oligonucleotide
agaacccaaauucuuuauuuuuggu

SEQ ID NO: 20583 - RNA, 25 nt, Artificial Sequence
  Description of Artificial Sequence: Synthetic oligonucleotide
uaagauauugugcuuuaccuguauu

SEQ ID NO: 20584 - RNA, 25 nt, Artificial Sequence
  Description of Artificial Sequence: Synthetic oligonucleotide
uaacagaaaugugugugugugguuu

SEQ ID NO: 20585 - RNA, 25 nt, Artificial Sequence
  Description of Artificial Sequence: Synthetic oligonucleotide
uguuuuuuuguaaaggugaaguuug

SEQ ID NO: 20586 - RNA, 25 nt, Artificial Sequence
  Description of Artificial Sequence: Synthetic oligonucleotide
guauguuuacuuaauauuaccuguu

SEQ ID NO: 20587 - RNA, 25 nt, Artificial Sequence
  Description of Artificial Sequence: Synthetic oligonucleotide
uuuguauaccugagagccugcuaug

SEQ ID NO: 20588 - RNA, 25 nt, Artificial Sequence
  Description of Artificial Sequence: Synthetic oligonucleotide
guucuuuuuuuguugauccaaaauu

SEQ ID NO: 20589 - RNA, 25 nt, Artificial Sequence
  Description of Artificial Sequence: Synthetic oligonucleotide
gacacgggaaggccuagggagucag

SEQ ID NO: 20590 - RNA, 25 nt, Artificial Sequence
  Description of Artificial Sequence: Synthetic oligonucleotide
gguaaaaaacggaaaagaaaaaggu

SEQ ID NO: 20591 - RNA, 25 nt, Artificial Sequence
  Description of Artificial Sequence: Synthetic oligonucleotide
uuaaaacccaccuaaagcagccaac

SEQ ID NO: 20592 - RNA, 25 nt, Artificial Sequence
  Description of Artificial Sequence: Synthetic oligonucleotide
ccagaugugaggugaggaugagccg

SEQ ID NO: 20593 - RNA, 25 nt, Artificial Sequence
  Description of Artificial Sequence: Synthetic oligonucleotide
gcagcccuuuccugggacauggaug

SEQ ID NO: 20594 - RNA, 25 nt, Artificial Sequence
  Description of Artificial Sequence: Synthetic oligonucleotide
guacauggcguguuacauuccugaa

SEQ ID NO: 20595 - RNA, 25 nt, Artificial Sequence
  Description of Artificial Sequence: Synthetic oligonucleotide
accuacuauguacggugcuuuauug

SEQ ID NO: 20596 - RNA, 25 nt, Artificial Sequence
  Description of Artificial Sequence: Synthetic oligonucleotide
gccagugugcggucuuuguucuccu

SEQ ID NO: 20597 - RNA, 25 nt, Artificial Sequence
  Description of Artificial Sequence: Synthetic oligonucleotide
uccgugaaaaacuguguccgagaac

SEQ ID NO: 20598 - RNA, 25 nt, Artificial Sequence
  Description of Artificial Sequence: Synthetic oligonucleotide
cacucgggagaacaaagagacagug

SEQ ID NO: 20599 - RNA, 25 nt, Artificial Sequence
  Description of Artificial Sequence: Synthetic oligonucleotide
gcacauuuguuuaaugugacaucaa

SEQ ID NO: 20600 - RNA, 25 nt, Artificial Sequence
  Description of Artificial Sequence: Synthetic oligonucleotide
aagcaaguauuguagcacucgguga

SEQ ID NO: 20601 - RNA, 25 nt, Artificial Sequence
  Description of Artificial Sequence: Synthetic oligonucleotide
aagcaguaagaagcuuccuugucaa

SEQ ID NO: 20602 - RNA, 25 nt, Artificial Sequence
  Description of Artificial Sequence: Synthetic oligonucleotide
aaaagagagagagagagagagagag

SEQ ID NO: 20603 - RNA, 25 nt, Artificial Sequence
  Description of Artificial Sequence: Synthetic oligonucleotide
gagaaaacaaaaccacaaaugacaa

SEQ ID NO: 20604 - RNA, 25 nt, Artificial Sequence
  Description of Artificial Sequence: Synthetic oligonucleotide
aaaacaaaacggacucacaaaaaua

SEQ ID NO: 20605 - RNA, 25 nt, Artificial Sequence
  Description of Artificial Sequence: Synthetic oligonucleotide
aucuaaacucgaugagauggagggu

SEQ ID NO: 20606 - RNA, 25 nt, Artificial Sequence
  Description of Artificial Sequence: Synthetic oligonucleotide
ucgccccgugggauggaagugcaga

SEQ ID NO: 20607 - RNA, 25 nt, Artificial Sequence
  Description of Artificial Sequence: Synthetic oligonucleotide
aggucucagcagacuggauuucugu

SEQ ID NO: 20608 - RNA, 25 nt, Artificial Sequence
  Description of Artificial Sequence: Synthetic oligonucleotide
uccggguggucacaggugcuuuuuu

SEQ ID NO: 20609 - RNA, 25 nt, Artificial Sequence
  Description of Artificial Sequence: Synthetic oligonucleotide
ugccgaggaugcagagccugcuuug

SEQ ID NO: 20610 - RNA, 25 nt, Artificial Sequence
  Description of Artificial Sequence: Synthetic oligonucleotide
gggaacgacuccagaggggugcugg

SEQ ID NO: 20611 - RNA, 25 nt, Artificial Sequence
  Description of Artificial Sequence: Synthetic oligonucleotide
gugggcucugcaggggcccgcagga

SEQ ID NO: 20612 - RNA, 25 nt, Artificial Sequence
  Description of Artificial Sequence: Synthetic oligonucleotide
aagcaggaaugucuuggaaaccgcc

SEQ ID NO: 20613 - RNA, 25 nt, Artificial Sequence
  Description of Artificial Sequence: Synthetic oligonucleotide
cacgcgaacuuuagaaaccacaccu

SEQ ID NO: 20614 - RNA, 25 nt, Artificial Sequence
  Description of Artificial Sequence: Synthetic oligonucleotide
uccucgcuguaguauuuaagcccau

SEQ ID NO: 20615 - RNA, 25 nt, Artificial Sequence
  Description of Artificial Sequence: Synthetic oligonucleotide
uacagaaaccuuccugagagccuua

SEQ ID NO: 20616 - RNA, 25 nt, Artificial Sequence
  Description of Artificial Sequence: Synthetic oligonucleotide
aaagugauuauuaagcuuuccuuuu

SEQ ID NO: 20617 - RNA, 25 nt, Artificial Sequence
  Description of Artificial Sequence: Synthetic oligonucleotide
uuacucuuuggcuagcuuuuuuuuu

SEQ ID NO: 20618 - RNA, 25 nt, Artificial Sequence
  Description of Artificial Sequence: Synthetic oligonucleotide
augacauuuacaccgauaacacaca

SEQ ID NO: 20619 - RNA, 25 nt, Artificial Sequence
  Description of Artificial Sequence: Synthetic oligonucleotide
aggcugcuguaacugucaggacagu

SEQ ID NO: 20620 - RNA, 25 nt, Artificial Sequence
  Description of Artificial Sequence: Synthetic oligonucleotide
ugcgacgguauuuuuccuagcaaga

SEQ ID NO: 20621 - RNA, 25 nt, Artificial Sequence
  Description of Artificial Sequence: Synthetic oligonucleotide
augcaaacuaaugagauguauuaaa

SEQ ID NO: 20622 - RNA, 25 nt, Artificial Sequence
  Description of Artificial Sequence: Synthetic oligonucleotide
aauaaacaugguauaccuaccuaug

SEQ ID NO: 20623 - RNA, 25 nt, Artificial Sequence
  Description of Artificial Sequence: Synthetic oligonucleotide
gcaucauuuccuaaauguuucuggc

SEQ ID NO: 20624 - RNA, 25 nt, Artificial Sequence
  Description of Artificial Sequence: Synthetic oligonucleotide
cuuuguguuucucccuuacccugcu

SEQ ID NO: 20625 - RNA, 25 nt, Artificial Sequence
  Description of Artificial Sequence: Synthetic oligonucleotide
uuuauuuguuaauuuaagccauuuu

SEQ ID NO: 20626 - RNA, 25 nt, Artificial Sequence
  Description of Artificial Sequence: Synthetic oligonucleotide
ugaaagaacuaugcgucaaccaauc

SEQ ID NO: 20627 - RNA, 25 nt, Artificial Sequence
  Description of Artificial Sequence: Synthetic oligonucleotide
cguacgccgucccugcggcaccugc

SEQ ID NO: 20628 - RNA, 25 nt, Artificial Sequence
  Description of Artificial Sequence: Synthetic oligonucleotide
ccccagagcccguuuguggcugagu

SEQ ID NO: 20629 - RNA, 25 nt, Artificial Sequence
  Description of Artificial Sequence: Synthetic oligonucleotide
ugacaacuuguuccccgcagugcac

SEQ ID NO: 20630 - RNA, 25 nt, Artificial Sequence
  Description of Artificial Sequence: Synthetic oligonucleotide
caccuagaaugcuguguucccacgc

SEQ ID NO: 20631 - RNA, 25 nt, Artificial Sequence
  Description of Artificial Sequence: Synthetic oligonucleotide
cggcacgugagaugcauugccgcuu

SEQ ID NO: 20632 - RNA, 25 nt, Artificial Sequence
  Description of Artificial Sequence: Synthetic oligonucleotide
ucugucuguguuguuggugugcccu

SEQ ID NO: 20633 - RNA, 25 nt, Artificial Sequence
  Description of Artificial Sequence: Synthetic oligonucleotide
uggugccgugguggcggucacuccc

SEQ ID NO: 20634 - RNA, 25 nt, Artificial Sequence
  Description of Artificial Sequence: Synthetic oligonucleotide
cucugcugccaguguuuggacagaa

SEQ ID NO: 20635 - RNA, 25 nt, Artificial Sequence
  Description of Artificial Sequence: Synthetic oligonucleotide
acccaaauucuuuauuuuugguaag

SEQ ID NO: 20636 - RNA, 25 nt, Artificial Sequence
  Description of Artificial Sequence: Synthetic oligonucleotide
gauauugugcuuuaccuguauuaac

SEQ ID NO: 20637 - RNA, 25 nt, Artificial Sequence
  Description of Artificial Sequence: Synthetic oligonucleotide
cagaaaugugugugugugguuuguu

SEQ ID NO: 20638 - RNA, 25 nt, Artificial Sequence
  Description of Artificial Sequence: Synthetic oligonucleotide
uuuuuuguaaaggugaaguuuguau

SEQ ID NO: 20639 - RNA, 25 nt, Artificial Sequence
  Description of Artificial Sequence: Synthetic oligonucleotide
uguuuacuuaauauuaccuguuuug

SEQ ID NO: 20640 - RNA, 25 nt, Artificial Sequence
  Description of Artificial Sequence: Synthetic oligonucleotide
guauaccugagagccugcuauguuc

SEQ ID NO: 20641 - RNA, 25 nt, Artificial Sequence
  Description of Artificial Sequence: Synthetic oligonucleotide
cuuuuuuuguugauccaaaauuaaa

SEQ ID NO: 20642 - RNA, 25 nt, Artificial Sequence
  Description of Artificial Sequence: Synthetic oligonucleotide
aaaaaaaaauaccaccaacaaaaaa

SEQ ID NO: 20643 - RNA, 3373 nt, Homo sapiens
gguggcaacuucuccuccugcggccgggagcggccugccugccucccugcgcacccgcagccucccccgcugccucccuagggcuccccuccggccgccagcgcccauuuuucauucccuagauagagauacuuugcgcgcacacacauacauacgcgcgcaaaaaggaaaaaaaaaaaaaaaagcccacccuccagccucgcugcaaagagaaaaccggagcagccgcagcucgcagcucgcagcucgcagcccgcagcccgcagaggacgcccagagcggcgagcaggcgggcagacggaccgacggacucgcgccgcguccaccugucggccgggcccagccgagcgcgcagcgggcacgccgcgcgcgcggagcagccgugcccgccgcccgggcccgccgccagggcgcacacgcucccgccccccuacccggcccgggcgggaguuugcaccucucccugcccgggugcucgagcugccguugcaaagccaacuuuggaaaaaguuuuuugggggagacuugggccuugaggugcccagcuccgcgcuuuccgauuuugggggccuuuccagaaaauguugcaaaaaagcuaagccggcgggcagaggaaaacgccuguagccggcgagugaagacgaaccaucgacugccguguuccuuuuccucuuggagguuggaguccccugggcgcccccacacggcuagacgccucggcugguucgcgacgcagccccccggccguggaugcugcacucgggcucgggauccgcccagguagccggccucggacccagguccugcgcccagguccuccccugccccccagcgacggagccggggccgggggcggcggcgccgggggcaugcgggugagccgcggcugcagaggccugagcgccugaucgccgcggaccugagccgagcccaccccccuccccagccccccacccuggccgcgggggcggcgcgcucgaucuacgcguccggggccccgcggggccgggcccggagucggcaugaaucgcugcugggcgcucuuccugucucucugcugcuaccugcgucuggucagcgccgagggggaccccauucccgaggagcuuuaugagaugcugagugaccacucgauccgcuccuuugaugaucuccaacgccugcugcacggagaccccggagaggaagauggggccgaguuggaccugaacaugacccgcucccacucuggaggcgagcuggagagcuuggcucguggaagaaggagccuggguucccugaccauugcugagccggccaugaucgccgagugcaagacgcgcaccgagguguucgagaucucccggcgccucauagaccgcaccaacgccaacuuccugguguggccgcccuguguggaggugcagcgcugcuccggcugcugcaacaaccgcaacgugcagugccgccccacccaggugcagcugcgaccuguccaggugagaaagaucgagauugugcggaagaagccaaucuuuaagaaggccacggugacgcuggaagaccaccuggcaugcaagugugagacaguggcagcugcacggccugugacccgaagcccgggggguucccaggagcagcgagccaaaacgccccaaacucgggugaccauucggacggugcgaguccgccggccccccaagggcaagcaccggaaauucaagcacacgcaugacaagacggcacugaaggagacccuuggagccuaggggcaucggcaggagagugugugggcaggguuauuuaauaugguauuugcuguauugcccccaugggguccuuggagugauaauauuguuucccucguccgucugucucgaugccugauucggacggccaauggugcuucccccaccccuccacguguccguccacccuuccaucagcgggucuccucccagcggccuccggucuugcccagcagcucaaagaagaaaaagaaggacugaacuccaucgccaucuucuucccuuaacuccaagaacuugggauaagagugugagagagacugauggggucgcucuuugggggaaacggguuccuuccccugcaccuggccugggccacaccugagcgcuguggacuguccugaggagcccugaggaccucucagcauagccugccugaucccugaaccccuggccagcucugaggggaggcaccuccaggcaggccaggcugccucggacuccauggcuaagaccacagacgggcacacagacuggagaaaaccccucccacggugcccaaacaccagucaccucgucucccuggugccucugugcacaguggcuucuuuucguuuucguuuugaagacguggacuccucuugguggguguggccagcacaccaaguggcugggugcccucucagguggguuagagauggaguuugcuguugaggugguguagauggugaccuggguauccccugccuccugccaccccuuccuccccauacuccacucugauucaccucuuccucugguuccuuucaucucucuaccuccacccugcauuuuccucuuguccuggcccuucagucugcuccaccaaggggcucuugaaccccuuauuaaggccccagaugaccccagucacuccucucuagggcagaagacuagaggccagggcagcaagggaccugcucaucauauuccaacccagccacgacugccauguaagguugugcaggguguguacugcacaaggacauuguaugcagggagcacuguucacaucauagauaaagcugauuuguauauuuauuaugacaauuucuggcagauguagguaaagaggaaaaggauccuuuuccuaauucacacaaagacuccuuguggacuggcugugccccugaugcagccuguggcuggaguggccaaauaggagggagacugugguaggggcagggaggcaacacugcuguccacaugaccuccauuucccaaaguccucugcuccagcaacugcccuuccaggugggugugggacaccugggagaaggucuccaagggagggugcagcccucuugcccgcaccccucccugcuugcacacuuccccaucuuugauccuucugagcuccaccucugguggcuccuccuaggaaaccagcucgugggcugggaaugggggagagaagggaaaagauccccaagacccccuggggugggaucugagcucccaccucccuucccaccuacugcacuuucccccuucccgccuuccaaaaccugcuuccuucaguuuguaaagucggugauuauauuuuugggggcuuuccuuuuauuuuuuaaauguaaaauuuauuuauauuccguauuuaaaguugu

SEQ ID NO: 20644 - RNA, 2378 nt, Homo sapiens
gugugugugugugugcgcgcgcaucugagagagagagagagagagagagacugacugagcaggaauggugagauguuuaucaugggccucggggaccccauucccgaggagcuuuaugagaugcugagugaccacucgauccgcuccuuugaugaucuccaacgccugcugcacggagaccccggagaggaagauggggccgaguuggaccugaacaugacccgcucccacucuggaggcgagcuggagagcuuggcucguggaagaaggagccuggguucccugaccauugcugagccggccaugaucgccgagugcaagacgcgcaccgagguguucgagaucucccggcgccucauagaccgcaccaacgccaacuuccugguguggccgcccuguguggaggugcagcgcugcuccggcugcugcaacaaccgcaacgugcagugccgccccacccaggugcagcugcgaccuguccaggugagaaagaucgagauugugcggaagaagccaaucuuuaagaaggccacggugacgcuggaagaccaccuggcaugcaagugugagacaguggcagcugcacggccugugacccgaagcccgggggguucccaggagcagcgagccaaaacgccccaaacucgggugaccauucggacggugcgaguccgccggccccccaagggcaagcaccggaaauucaagcacacgcaugacaagacggcacugaaggagacccuuggagccuaggggcaucggcaggagagugugugggcaggguuauuuaauaugguauuugcuguauugcccccaugggguccuuggagugauaauauuguuucccucguccgucugucucgaugccugauucggacggccaauggugcuucccccaccccuccacguguccguccacccuuccaucagcgggucuccucccagcggccuccggucuugcccagcagcucaaagaagaaaaagaaggacugaacuccaucgccaucuucuucccuuaacuccaagaacuugggauaagagugugagagagacugauggggucgcucuuugggggaaacggguuccuuccccugcaccuggccugggccacaccugagcgcuguggacuguccugaggagcccugaggaccucucagcauagccugccugaucccugaaccccuggccagcucugaggggaggcaccuccaggcaggccaggcugccucggacuccauggcuaagaccacagacgggcacacagacuggagaaaaccccucccacggugcccaaacaccagucaccucgucucccuggugccucugugcacaguggcuucuuuucguuuucguuuugaagacguggacuccucuugguggguguggccagcacaccaaguggcugggugcccucucagguggguuagagauggaguuugcuguugaggugguguagauggugaccuggguauccccugccuccugccaccccuuccuccccauacuccacucugauucaccucuuccucugguuccuuucaucucucuaccuccacccugcauuuuccucuuguccuggcccuucagucugcuccaccaaggggcucuugaaccccuuauuaaggccccagaugaccccagucacuccucucuagggcagaagacuagaggccagggcagcaagggaccugcucaucauauuccaacccagccacgacugccauguaagguugugcaggguguguacugcacaaggacauuguaugcagggagcacuguucacaucauagauaaagcugauuuguauauuuauuaugacaauuucuggcagauguagguaaagaggaaaaggauccuuuuccuaauucacacaaagacuccuuguggacuggcugugccccugaugcagccuguggcuggaguggccaaauaggagggagacugugguaggggcagggaggcaacacugcuguccacaugaccuccauuucccaaaguccucugcuccagcaacugcccuuccaggugggugugggacaccugggagaaggucuccaagggagggugcagcccucuugcccgcaccccucccugcuugcacacuuccccaucuuugauccuucugagcuccaccucugguggcuccuccuaggaaaccagcucgugggcugggaaugggggagagaagggaaaagauccccaagacccccuggggugggaucugagcucccaccucccuucccaccuacugcacuuucccccuucccgccuuccaaaaccugcuuccuucaguuuguaaagucggugauuauauuuuugggggcuuuccuuuuauuuuuuaaauguaaaauuuauuuauauuccguauuuaaaguugu

SEQ ID NO: 20645 - RNA, 19 nt, Artificial Sequence
  Description of Artificial Sequence: Synthetic oligonucleotide
gugugugugugugugcgcg

SEQ ID NO: 20646 - RNA, 19 nt, Artificial Sequence
  Description of Artificial Sequence: Synthetic oligonucleotide
gcgcaucugagagagagag

SEQ ID NO: 20647 - RNA, 19 nt, Artificial Sequence
  Description of Artificial Sequence: Synthetic oligonucleotide
gagagagagagagacugac

SEQ ID NO: 20648 - RNA, 19 nt, Artificial Sequence
  Description of Artificial Sequence: Synthetic oligonucleotide
cugagcaggaauggugaga

SEQ ID NO: 20649 - RNA, 19 nt, Artificial Sequence
  Description of Artificial Sequence: Synthetic oligonucleotide
auguuuaucaugggccucg

SEQ ID NO: 20650 - RNA, 19 nt, Artificial Sequence
  Description of Artificial Sequence: Synthetic oligonucleotide
ggggaccccauucccgagg

SEQ ID NO: 20651 - RNA, 19 nt, Artificial Sequence
  Description of Artificial Sequence: Synthetic oligonucleotide
gagcuuuaugagaugcuga

SEQ ID NO: 20652 - RNA, 19 nt, Artificial Sequence
  Description of Artificial Sequence: Synthetic oligonucleotide
agugaccacucgauccgcu

SEQ ID NO: 20653 - RNA, 19 nt, Artificial Sequence
  Description of Artificial Sequence: Synthetic oligonucleotide
uccuuugaugaucuccaac

SEQ ID NO: 20654 - RNA, 19 nt, Artificial Sequence
  Description of Artificial Sequence: Synthetic oligonucleotide
cgccugcugcacggagacc

SEQ ID NO: 20655 - RNA, 19 nt, Artificial Sequence
  Description of Artificial Sequence: Synthetic oligonucleotide
cccggagaggaagaugggg

SEQ ID NO: 20656 - RNA, 19 nt, Artificial Sequence
  Description of Artificial Sequence: Synthetic oligonucleotide
gccgaguuggaccugaaca

SEQ ID NO: 20657 - RNA, 19 nt, Artificial Sequence
  Description of Artificial Sequence: Synthetic oligonucleotide
augacccgcucccacucug

SEQ ID NO: 20658 - RNA, 19 nt, Artificial Sequence
  Description of Artificial Sequence: Synthetic oligonucleotide
ggaggcgagcuggagagcu

SEQ ID NO: 20659 - RNA, 19 nt, Artificial Sequence
  Description of Artificial Sequence: Synthetic oligonucleotide
uuggcucguggaagaagga

SEQ ID NO: 20660 - RNA, 19 nt, Artificial Sequence
  Description of Artificial Sequence: Synthetic oligonucleotide
agccuggguucccugacca

SEQ ID NO: 20661 - RNA, 19 nt, Artificial Sequence
  Description of Artificial Sequence: Synthetic oligonucleotide
auugcugagccggccauga

SEQ ID NO: 20662 - RNA, 19 nt, Artificial Sequence
  Description of Artificial Sequence: Synthetic oligonucleotide
aucgccgagugcaagacgc

SEQ ID NO: 20663 - RNA, 19 nt, Artificial Sequence
  Description of Artificial Sequence: Synthetic oligonucleotide
cgcaccgagguguucgaga

SEQ ID NO: 20664 - RNA, 19 nt, Artificial Sequence
  Description of Artificial Sequence: Synthetic oligonucleotide
aucucccggcgccucauag

SEQ ID NO: 20665 - RNA, 19 nt, Artificial Sequence
  Description of Artificial Sequence: Synthetic oligonucleotide
gaccgcaccaacgccaacu

SEQ ID NO: 20666 - RNA, 19 nt, Artificial Sequence
  Description of Artificial Sequence: Synthetic oligonucleotide
uuccugguguggccgcccu

SEQ ID NO: 20667 - RNA, 19 nt, Artificial Sequence
  Description of Artificial Sequence: Synthetic oligonucleotide
uguguggaggugcagcgcu

SEQ ID NO: 20668 - RNA, 19 nt, Artificial Sequence
  Description of Artificial Sequence: Synthetic oligonucleotide
ugcuccggcugcugcaaca

SEQ ID NO: 20669 - RNA, 19 nt, Artificial Sequence
  Description of Artificial Sequence: Synthetic oligonucleotide
aaccgcaacgugcagugcc

SEQ ID NO: 20670 - RNA, 19 nt, Artificial Sequence
  Description of Artificial Sequence: Synthetic oligonucleotide
cgccccacccaggugcagc

SEQ ID NO: 20671 - RNA, 19 nt, Artificial Sequence
  Description of Artificial Sequence: Synthetic oligonucleotide
cugcgaccuguccagguga

SEQ ID NO: 20672 - RNA, 19 nt, Artificial Sequence
  Description of Artificial Sequence: Synthetic oligonucleotide
agaaagaucgagauugugc

SEQ ID NO: 20673 - RNA, 19 nt, Artificial Sequence
  Description of Artificial Sequence: Synthetic oligonucleotide
cggaagaagccaaucuuua

SEQ ID NO: 20674 - RNA, 19 nt, Artificial Sequence
  Description of Artificial Sequence: Synthetic oligonucleotide
aagaaggccacggugacgc

SEQ ID NO: 20675 - RNA, 19 nt, Artificial Sequence
  Description of Artificial Sequence: Synthetic oligonucleotide
cuggaagaccaccuggcau

SEQ ID NO: 20676 - RNA, 19 nt, Artificial Sequence
  Description of Artificial Sequence: Synthetic oligonucleotide
ugcaagugugagacagugg

SEQ ID NO: 20677 - RNA, 19 nt, Artificial Sequence
  Description of Artificial Sequence: Synthetic oligonucleotide
gcagcugcacggccuguga

SEQ ID NO: 20678 - RNA, 19 nt, Artificial Sequence
  Description of Artificial Sequence: Synthetic oligonucleotide
acccgaagcccgggggguu

SEQ ID NO: 20679 - RNA, 19 nt, Artificial Sequence
  Description of Artificial Sequence: Synthetic oligonucleotide
ucccaggagcagcgagcca

SEQ ID NO: 20680 - RNA, 19 nt, Artificial Sequence
  Description of Artificial Sequence: Synthetic oligonucleotide
aaaacgccccaaacucggg

SEQ ID NO: 20681 - RNA, 19 nt, Artificial Sequence
  Description of Artificial Sequence: Synthetic oligonucleotide
gugaccauucggacggugc

SEQ ID NO: 20682 - RNA, 19 nt, Artificial Sequence
  Description of Artificial Sequence: Synthetic oligonucleotide
cgaguccgccggcccccca

SEQ ID NO: 20683 - RNA, 19 nt, Artificial Sequence
  Description of Artificial Sequence: Synthetic oligonucleotide
aagggcaagcaccggaaau

SEQ ID NO: 20684 - RNA, 19 nt, Artificial Sequence
  Description of Artificial Sequence: Synthetic oligonucleotide
uucaagcacacgcaugaca

SEQ ID NO: 20685 - RNA, 19 nt, Artificial Sequence
  Description of Artificial Sequence: Synthetic oligonucleotide
aagacggcacugaaggaga

SEQ ID NO: 20686 - RNA, 19 nt, Artificial Sequence
  Description of Artificial Sequence: Synthetic oligonucleotide
acccuuggagccuaggggc

SEQ ID NO: 20687 - RNA, 19 nt, Artificial Sequence
  Description of Artificial Sequence: Synthetic oligonucleotide
caucggcaggagagugugu

SEQ ID NO: 20688 - RNA, 19 nt, Artificial Sequence
  Description of Artificial Sequence: Synthetic oligonucleotide
ugggcaggguuauuuaaua

SEQ ID NO: 20689 - RNA, 19 nt, Artificial Sequence
  Description of Artificial Sequence: Synthetic oligonucleotide
augguauuugcuguauugc

SEQ ID NO: 20690 - RNA, 19 nt, Artificial Sequence
  Description of Artificial Sequence: Synthetic oligonucleotide
cccccaugggguccuugga

SEQ ID NO: 20691 - RNA, 19 nt, Artificial Sequence
  Description of Artificial Sequence: Synthetic oligonucleotide
agugauaauauuguuuccc

SEQ ID NO: 20692 - RNA, 19 nt, Artificial Sequence
  Description of Artificial Sequence: Synthetic oligonucleotide
cucguccgucugucucgau

SEQ ID NO: 20693 - RNA, 19 nt, Artificial Sequence
  Description of Artificial Sequence: Synthetic oligonucleotide
ugccugauucggacggcca

SEQ ID NO: 20694 - RNA, 19 nt, Artificial Sequence
  Description of Artificial Sequence: Synthetic oligonucleotide
aauggugcuucccccaccc

SEQ ID NO: 20695 - RNA, 19 nt, Artificial Sequence
  Description of Artificial Sequence: Synthetic oligonucleotide
ccuccacguguccguccac

SEQ ID NO: 20696 - RNA, 19 nt, Artificial Sequence
  Description of Artificial Sequence: Synthetic oligonucleotide
cccuuccaucagcgggucu

SEQ ID NO: 20697 - RNA, 19 nt, Artificial Sequence
  Description of Artificial Sequence: Synthetic oligonucleotide
uccucccagcggccuccgg

SEQ ID NO: 20698 - RNA, 19 nt, Artificial Sequence
  Description of Artificial Sequence: Synthetic oligonucleotide
gucuugcccagcagcucaa

SEQ ID NO: 20699 - RNA, 19 nt, Artificial Sequence
  Description of Artificial Sequence: Synthetic oligonucleotide
aagaagaaaaagaaggacu

SEQ ID NO: 20700 - RNA, 19 nt, Artificial Sequence
  Description of Artificial Sequence: Synthetic oligonucleotide
ugaacuccaucgccaucuu

SEQ ID NO: 20701 - RNA, 19 nt, Artificial Sequence
  Description of Artificial Sequence: Synthetic oligonucleotide
ucuucccuuaacuccaaga

SEQ ID NO: 20702 - RNA, 19 nt, Artificial Sequence
  Description of Artificial Sequence: Synthetic oligonucleotide
aacuugggauaagagugug

SEQ ID NO: 20703 - RNA, 19 nt, Artificial Sequence
  Description of Artificial Sequence: Synthetic oligonucleotide
gagagagacugaugggguc

SEQ ID NO: 20704 - RNA, 19 nt, Artificial Sequence
  Description of Artificial Sequence: Synthetic oligonucleotide
cgcucuuugggggaaacgg

SEQ ID NO: 20705 - RNA, 19 nt, Artificial Sequence
  Description of Artificial Sequence: Synthetic oligonucleotide
gguuccuuccccugcaccu

SEQ ID NO: 20706 - RNA, 19 nt, Artificial Sequence
  Description of Artificial Sequence: Synthetic oligonucleotide
uggccugggccacaccuga

SEQ ID NO: 20707 - RNA, 19 nt, Artificial Sequence
  Description of Artificial Sequence: Synthetic oligonucleotide
agcgcuguggacuguccug

SEQ ID NO: 20708 - RNA, 19 nt, Artificial Sequence
  Description of Artificial Sequence: Synthetic oligonucleotide
gaggagcccugaggaccuc

SEQ ID NO: 20709 - RNA, 19 nt, Artificial Sequence
  Description of Artificial Sequence: Synthetic oligonucleotide
cucagcauagccugccuga

SEQ ID NO: 20710 - RNA, 19 nt, Artificial Sequence
  Description of Artificial Sequence: Synthetic oligonucleotide
aucccugaaccccuggcca

SEQ ID NO: 20711 - RNA, 19 nt, Artificial Sequence
  Description of Artificial Sequence: Synthetic oligonucleotide
agcucugaggggaggcacc

SEQ ID NO: 20712 - RNA, 19 nt, Artificial Sequence
  Description of Artificial Sequence: Synthetic oligonucleotide
cuccaggcaggccaggcug

SEQ ID NO: 20713 - RNA, 19 nt, Artificial Sequence
  Description of Artificial Sequence: Synthetic oligonucleotide
gccucggacuccauggcua

SEQ ID NO: 20714 - RNA, 19 nt, Artificial Sequence
  Description of Artificial Sequence: Synthetic oligonucleotide
aagaccacagacgggcaca

SEQ ID NO: 20715 - RNA, 19 nt, Artificial Sequence
  Description of Artificial Sequence: Synthetic oligonucleotide
acagacuggagaaaacccc

SEQ ID NO: 20716 - RNA, 19 nt, Artificial Sequence
  Description of Artificial Sequence: Synthetic oligonucleotide
cucccacggugcccaaaca

SEQ ID NO: 20717 - RNA, 19 nt, Artificial Sequence
  Description of Artificial Sequence: Synthetic oligonucleotide
accagucaccucgucuccc

SEQ ID NO: 20718 - RNA, 19 nt, Artificial Sequence
  Description of Artificial Sequence: Synthetic oligonucleotide
cuggugccucugugcacag

SEQ ID NO: 20719 - RNA, 19 nt, Artificial Sequence
  Description of Artificial Sequence: Synthetic oligonucleotide
guggcuucuuuucguuuuc

SEQ ID NO: 20720 - RNA, 19 nt, Artificial Sequence
  Description of Artificial Sequence: Synthetic oligonucleotide
cguuuugaagacguggacu

SEQ ID NO: 20721 - RNA, 19 nt, Artificial Sequence
  Description of Artificial Sequence: Synthetic oligonucleotide
uccucuugguggguguggc

SEQ ID NO: 20722 - RNA, 19 nt, Artificial Sequence
  Description of Artificial Sequence: Synthetic oligonucleotide
ccagcacaccaaguggcug

SEQ ID NO: 20723 - RNA, 19 nt, Artificial Sequence
  Description of Artificial Sequence: Synthetic oligonucleotide
gggugcccucucagguggg

SEQ ID NO: 20724 - RNA, 19 nt, Artificial Sequence
  Description of Artificial Sequence: Synthetic oligonucleotide
guuagagauggaguuugcu

SEQ ID NO: 20725 - RNA, 19 nt, Artificial Sequence
  Description of Artificial Sequence: Synthetic oligonucleotide
uguugaggugguguagaug

SEQ ID NO: 20726 - RNA, 19 nt, Artificial Sequence
  Description of Artificial Sequence: Synthetic oligonucleotide
ggugaccuggguauccccu

SEQ ID NO: 20727 - RNA, 19 nt, Artificial Sequence
  Description of Artificial Sequence: Synthetic oligonucleotide
ugccuccugccaccccuuc

SEQ ID NO: 20728 - RNA, 19 nt, Artificial Sequence
  Description of Artificial Sequence: Synthetic oligonucleotide
ccuccccauacuccacucu

SEQ ID NO: 20729 - RNA, 19 nt, Artificial Sequence
  Description of Artificial Sequence: Synthetic oligonucleotide
ugauucaccucuuccucug

SEQ ID NO: 20730 - RNA, 19 nt, Artificial Sequence
  Description of Artificial Sequence: Synthetic oligonucleotide
gguuccuuucaucucucua

SEQ ID NO: 20731 - RNA, 19 nt, Artificial Sequence
  Description of Artificial Sequence: Synthetic oligonucleotide
accuccacccugcauuuuc

SEQ ID NO: 20732 - RNA, 19 nt, Artificial Sequence
  Description of Artificial Sequence: Synthetic oligonucleotide
ccucuuguccuggcccuuc

SEQ ID NO: 20733 - RNA, 19 nt, Artificial Sequence
  Description of Artificial Sequence: Synthetic oligonucleotide
cagucugcuccaccaaggg

SEQ ID NO: 20734 - RNA, 19 nt, Artificial Sequence
  Description of Artificial Sequence: Synthetic oligonucleotide
ggcucuugaaccccuuauu

SEQ ID NO: 20735 - RNA, 19 nt, Artificial Sequence
  Description of Artificial Sequence: Synthetic oligonucleotide
uaaggccccagaugacccc

SEQ ID NO: 20736 - RNA, 19 nt, Artificial Sequence
  Description of Artificial Sequence: Synthetic oligonucleotide
cagucacuccucucuaggg

SEQ ID NO: 20737 - RNA, 19 nt, Artificial Sequence
  Description of Artificial Sequence: Synthetic oligonucleotide
gcagaagacuagaggccag

SEQ ID NO: 20738 - RNA, 19 nt, Artificial Sequence
  Description of Artificial Sequence: Synthetic oligonucleotide
gggcagcaagggaccugcu

SEQ ID NO: 20739 - RNA, 19 nt, Artificial Sequence
  Description of Artificial Sequence: Synthetic oligonucleotide
ucaucauauuccaacccag

SEQ ID NO: 20740 - RNA, 19 nt, Artificial Sequence
  Description of Artificial Sequence: Synthetic oligonucleotide
gccacgacugccauguaag

SEQ ID NO: 20741 - RNA, 19 nt, Artificial Sequence
  Description of Artificial Sequence: Synthetic oligonucleotide
gguugugcaggguguguac

SEQ ID NO: 20742 - RNA, 19 nt, Artificial Sequence
  Description of Artificial Sequence: Synthetic oligonucleotide
cugcacaaggacauuguau

SEQ ID NO: 20743 - RNA, 19 nt, Artificial Sequence
  Description of Artificial Sequence: Synthetic oligonucleotide
ugcagggagcacuguucac

SEQ ID NO: 20744 - RNA, 19 nt, Artificial Sequence
  Description of Artificial Sequence: Synthetic oligonucleotide
caucauagauaaagcugau

SEQ ID NO: 20745 - RNA, 19 nt, Artificial Sequence
  Description of Artificial Sequence: Synthetic oligonucleotide
uuuguauauuuauuaugac

SEQ ID NO: 20746 - RNA, 19 nt, Artificial Sequence
  Description of Artificial Sequence: Synthetic oligonucleotide
caauuucuggcagauguag

SEQ ID NO: 20747 - RNA, 19 nt, Artificial Sequence
  Description of Artificial Sequence: Synthetic oligonucleotide
gguaaagaggaaaaggauc

SEQ ID NO: 20748 - RNA, 19 nt, Artificial Sequence
  Description of Artificial Sequence: Synthetic oligonucleotide
ccuuuuccuaauucacaca

SEQ ID NO: 20749 - RNA, 19 nt, Artificial Sequence
  Description of Artificial Sequence: Synthetic oligonucleotide
aaagacuccuuguggacug

SEQ ID NO: 20750 - RNA, 19 nt, Artificial Sequence
  Description of Artificial Sequence: Synthetic oligonucleotide
ggcugugccccugaugcag

SEQ ID NO: 20751 - RNA, 19 nt, Artificial Sequence
  Description of Artificial Sequence: Synthetic oligonucleotide
gccuguggcuggaguggcc

SEQ ID NO: 20752 - RNA, 19 nt, Artificial Sequence
  Description of Artificial Sequence: Synthetic oligonucleotide
caaauaggagggagacugu

SEQ ID NO: 20753 - RNA, 19 nt, Artificial Sequence
  Description of Artificial Sequence: Synthetic oligonucleotide
ugguaggggcagggaggca

SEQ ID NO: 20754 - RNA, 19 nt, Artificial Sequence
  Description of Artificial Sequence: Synthetic oligonucleotide
aacacugcuguccacauga

SEQ ID NO: 20755 - RNA, 19 nt, Artificial Sequence
  Description of Artificial Sequence: Synthetic oligonucleotide
accuccauuucccaaaguc

SEQ ID NO: 20756 - RNA, 19 nt, Artificial Sequence
  Description of Artificial Sequence: Synthetic oligonucleotide
ccucugcuccagcaacugc

SEQ ID NO: 20757 - RNA, 19 nt, Artificial Sequence
  Description of Artificial Sequence: Synthetic oligonucleotide
cccuuccaggugggugugg

SEQ ID NO: 20758 - RNA, 19 nt, Artificial Sequence
  Description of Artificial Sequence: Synthetic oligonucleotide
ggacaccugggagaagguc

SEQ ID NO: 20759 - RNA, 19 nt, Artificial Sequence
  Description of Artificial Sequence: Synthetic oligonucleotide
cuccaagggagggugcagc

SEQ ID NO: 20760 - RNA, 19 nt, Artificial Sequence
  Description of Artificial Sequence: Synthetic oligonucleotide
cccucuugcccgcaccccu

SEQ ID NO: 20761 - RNA, 19 nt, Artificial Sequence
  Description of Artificial Sequence: Synthetic oligonucleotide
ucccugcuugcacacuucc

SEQ ID NO: 20762 - RNA, 19 nt, Artificial Sequence
  Description of Artificial Sequence: Synthetic oligonucleotide
cccaucuuugauccuucug

SEQ ID NO: 20763 - RNA, 19 nt, Artificial Sequence
  Description of Artificial Sequence: Synthetic oligonucleotide
gagcuccaccucugguggc

SEQ ID NO: 20764 - RNA, 19 nt, Artificial Sequence
  Description of Artificial Sequence: Synthetic oligonucleotide
cuccuccuaggaaaccagc

SEQ ID NO: 20765 - RNA, 19 nt, Artificial Sequence
  Description of Artificial Sequence: Synthetic oligonucleotide
cucgugggcugggaauggg

SEQ ID NO: 20766 - RNA, 19 nt, Artificial Sequence
  Description of Artificial Sequence: Synthetic oligonucleotide
gggagagaagggaaaagau

SEQ ID NO: 20767 - RNA, 19 nt, Artificial Sequence
  Description of Artificial Sequence: Synthetic oligonucleotide
uccccaagacccccugggg

SEQ ID NO: 20768 - RNA, 19 nt, Artificial Sequence
  Description of Artificial Sequence: Synthetic oligonucleotide
gugggaucugagcucccac

SEQ ID NO: 20769 - RNA, 19 nt, Artificial Sequence
  Description of Artificial Sequence: Synthetic oligonucleotide
ccucccuucccaccuacug

SEQ ID NO: 20770 - RNA, 19 nt, Artificial Sequence
  Description of Artificial Sequence: Synthetic oligonucleotide
gcacuuucccccuucccgc

SEQ ID NO: 20771 - RNA, 19 nt, Artificial Sequence
  Description of Artificial Sequence: Synthetic oligonucleotide
ccuuccaaaaccugcuucc

SEQ ID NO: 20772 - RNA, 19 nt, Artificial Sequence
  Description of Artificial Sequence: Synthetic oligonucleotide
cuucaguuuguaaagucgg

SEQ ID NO: 20773 - RNA, 19 nt, Artificial Sequence
  Description of Artificial Sequence: Synthetic oligonucleotide
gugauuauauuuuuggggg

SEQ ID NO: 20774 - RNA, 19 nt, Artificial Sequence
  Description of Artificial Sequence: Synthetic oligonucleotide
gcuuuccuuuuauuuuuua

SEQ ID NO: 20775 - RNA, 19 nt, Artificial Sequence
  Description of Artificial Sequence: Synthetic oligonucleotide
aaauguaaaauuuauuuau

SEQ ID NO: 20776 - RNA, 19 nt, Artificial Sequence
  Description of Artificial Sequence: Synthetic oligonucleotide
uauuccguauuuaaaguug

SEQ ID NO: 20777 - RNA, 19 nt, Artificial Sequence
  Description of Artificial Sequence: Synthetic oligonucleotide
auuccguauuuaaaguugu

SEQ ID NO: 20778 - RNA, 19 nt, Artificial Sequence
  Description of Artificial Sequence: Synthetic oligonucleotide
gguggcaacuucuccuccu

SEQ ID NO: 20779 - RNA, 19 nt, Artificial Sequence
  Description of Artificial Sequence: Synthetic oligonucleotide
ugcggccgggagcggccug

SEQ ID NO: 20780 - RNA, 19 nt, Artificial Sequence
  Description of Artificial Sequence: Synthetic oligonucleotide
gccugccucccugcgcacc

SEQ ID NO: 20781 - RNA, 19 nt, Artificial Sequence
  Description of Artificial Sequence: Synthetic oligonucleotide
ccgcagccucccccgcugc

SEQ ID NO: 20782 - RNA, 19 nt, Artificial Sequence
  Description of Artificial Sequence: Synthetic oligonucleotide
ccucccuagggcuccccuc

SEQ ID NO: 20783 - RNA, 19 nt, Artificial Sequence
  Description of Artificial Sequence: Synthetic oligonucleotide
ccggccgccagcgcccauu

SEQ ID NO: 20784 - RNA, 19 nt, Artificial Sequence
  Description of Artificial Sequence: Synthetic oligonucleotide
uuuucauucccuagauaga

SEQ ID NO: 20785 - RNA, 19 nt, Artificial Sequence
  Description of Artificial Sequence: Synthetic oligonucleotide
agauacuuugcgcgcacac

SEQ ID NO: 20786 - RNA, 19 nt, Artificial Sequence
  Description of Artificial Sequence: Synthetic oligonucleotide
cacauacauacgcgcgcaa

SEQ ID NO: 20787 - RNA, 19 nt, Artificial Sequence
  Description of Artificial Sequence: Synthetic oligonucleotide
aaaagcccacccuccagcc

SEQ ID NO: 20788 - RNA, 19 nt, Artificial Sequence
  Description of Artificial Sequence: Synthetic oligonucleotide
cucgcugcaaagagaaaac

SEQ ID NO: 20789 - RNA, 19 nt, Artificial Sequence
  Description of Artificial Sequence: Synthetic oligonucleotide
ccggagcagccgcagcucg

SEQ ID NO: 20790 - RNA, 19 nt, Artificial Sequence
  Description of Artificial Sequence: Synthetic oligonucleotide
gcagcucgcagcucgcagc

SEQ ID NO: 20791 - RNA, 19 nt, Artificial Sequence
  Description of Artificial Sequence: Synthetic oligonucleotide
cccgcagcccgcagaggac

SEQ ID NO: 20792 - RNA, 19 nt, Artificial Sequence
  Description of Artificial Sequence: Synthetic oligonucleotide
cgcccagagcggcgagcag

SEQ ID NO: 20793 - RNA, 19 nt, Artificial Sequence
  Description of Artificial Sequence: Synthetic oligonucleotide
ggcgggcagacggaccgac

SEQ ID NO: 20794 - RNA, 19 nt, Artificial Sequence
  Description of Artificial Sequence: Synthetic oligonucleotide
cggacucgcgccgcgucca

SEQ ID NO: 20795 - RNA, 19 nt, Artificial Sequence
  Description of Artificial Sequence: Synthetic oligonucleotide
accugucggccgggcccag

SEQ ID NO: 20796 - RNA, 19 nt, Artificial Sequence
  Description of Artificial Sequence: Synthetic oligonucleotide
gccgagcgcgcagcgggca

SEQ ID NO: 20797 - RNA, 19 nt, Artificial Sequence
  Description of Artificial Sequence: Synthetic oligonucleotide
acgccgcgcgcgcggagca

SEQ ID NO: 20798 - RNA, 19 nt, Artificial Sequence
  Description of Artificial Sequence: Synthetic oligonucleotide
agccgugcccgccgcccgg

SEQ ID NO: 20799 - RNA, 19 nt, Artificial Sequence
  Description of Artificial Sequence: Synthetic oligonucleotide
ggcccgccgccagggcgca

SEQ ID NO: 20800 - RNA, 19 nt, Artificial Sequence
  Description of Artificial Sequence: Synthetic oligonucleotide
acacgcucccgccccccua

SEQ ID NO: 20801 - RNA, 19 nt, Artificial Sequence
  Description of Artificial Sequence: Synthetic oligonucleotide
acccggcccgggcgggagu

SEQ ID NO: 20802 - RNA, 19 nt, Artificial Sequence
  Description of Artificial Sequence: Synthetic oligonucleotide
uuugcaccucucccugccc

SEQ ID NO: 20803 - RNA, 19 nt, Artificial Sequence
  Description of Artificial Sequence: Synthetic oligonucleotide
cgggugcucgagcugccgu

SEQ ID NO: 20804 - RNA, 19 nt, Artificial Sequence
  Description of Artificial Sequence: Synthetic oligonucleotide
uugcaaagccaacuuugga

SEQ ID NO: 20805 - RNA, 19 nt, Artificial Sequence
  Description of Artificial Sequence: Synthetic oligonucleotide
aaaaaguuuuuugggggag

SEQ ID NO: 20806 - RNA, 19 nt, Artificial Sequence
  Description of Artificial Sequence: Synthetic oligonucleotide
gacuugggccuugaggugc

SEQ ID NO: 20807 - RNA, 19 nt, Artificial Sequence
  Description of Artificial Sequence: Synthetic oligonucleotide
cccagcuccgcgcuuuccg

SEQ ID NO: 20808 - RNA, 19 nt, Artificial Sequence
  Description of Artificial Sequence: Synthetic oligonucleotide
gauuuugggggccuuucca

SEQ ID NO: 20809 - RNA, 19 nt, Artificial Sequence
  Description of Artificial Sequence: Synthetic oligonucleotide
agaaaauguugcaaaaaag

SEQ ID NO: 20810 - RNA, 19 nt, Artificial Sequence
  Description of Artificial Sequence: Synthetic oligonucleotide
gcuaagccggcgggcagag

SEQ ID NO: 20811 - RNA, 19 nt, Artificial Sequence
  Description of Artificial Sequence: Synthetic oligonucleotide
ggaaaacgccuguagccgg

SEQ ID NO: 20812 - RNA, 19 nt, Artificial Sequence
  Description of Artificial Sequence: Synthetic oligonucleotide
gcgagugaagacgaaccau

SEQ ID NO: 20813 - RNA, 19 nt, Artificial Sequence
  Description of Artificial Sequence: Synthetic oligonucleotide
ucgacugccguguuccuuu

SEQ ID NO: 20814 - RNA, 19 nt, Artificial Sequence
  Description of Artificial Sequence: Synthetic oligonucleotide
uuccucuuggagguuggag

SEQ ID NO: 20815 - RNA, 19 nt, Artificial Sequence
  Description of Artificial Sequence: Synthetic oligonucleotide
guccccugggcgcccccac

SEQ ID NO: 20816 - RNA, 19 nt, Artificial Sequence
  Description of Artificial Sequence: Synthetic oligonucleotide
cacggcuagacgccucggc

SEQ ID NO: 20817 - RNA, 19 nt, Artificial Sequence
  Description of Artificial Sequence: Synthetic oligonucleotide
cugguucgcgacgcagccc

SEQ ID NO: 20818 - RNA, 19 nt, Artificial Sequence
  Description of Artificial Sequence: Synthetic oligonucleotide
ccccggccguggaugcugc

SEQ ID NO: 20819 - RNA, 19 nt, Artificial Sequence
  Description of Artificial Sequence: Synthetic oligonucleotide
cacucgggcucgggauccg

SEQ ID NO: 20820 - RNA, 19 nt, Artificial Sequence
  Description of Artificial Sequence: Synthetic oligonucleotide
gcccagguagccggccucg

SEQ ID NO: 20821 - RNA, 19 nt, Artificial Sequence
  Description of Artificial Sequence: Synthetic oligonucleotide
ggacccagguccugcgccc

SEQ ID NO: 20822 - RNA, 19 nt, Artificial Sequence
  Description of Artificial Sequence: Synthetic oligonucleotide
cagguccuccccugccccc

SEQ ID NO: 20823 - RNA, 19 nt, Artificial Sequence
  Description of Artificial Sequence: Synthetic oligonucleotide
ccagcgacggagccggggc

SEQ ID NO: 20824 - RNA, 19 nt, Artificial Sequence
  Description of Artificial Sequence: Synthetic oligonucleotide
ccgggggcggcggcgccgg

SEQ ID NO: 20825 - RNA, 19 nt, Artificial Sequence
  Description of Artificial Sequence: Synthetic oligonucleotide
ggggcaugcgggugagccg

SEQ ID NO: 20826 - RNA, 19 nt, Artificial Sequence
  Description of Artificial Sequence: Synthetic oligonucleotide
gcggcugcagaggccugag

SEQ ID NO: 20827 - RNA, 19 nt, Artificial Sequence
  Description of Artificial Sequence: Synthetic oligonucleotide
gcgccugaucgccgcggac

SEQ ID NO: 20828 - RNA, 19 nt, Artificial Sequence
  Description of Artificial Sequence: Synthetic oligonucleotide
ccugagccgagcccacccc

SEQ ID NO: 20829 - RNA, 19 nt, Artificial Sequence
  Description of Artificial Sequence: Synthetic oligonucleotide
cccuccccagccccccacc

SEQ ID NO: 20830 - RNA, 19 nt, Artificial Sequence
  Description of Artificial Sequence: Synthetic oligonucleotide
ccuggccgcgggggcggcg

SEQ ID NO: 20831 - RNA, 19 nt, Artificial Sequence
  Description of Artificial Sequence: Synthetic oligonucleotide
gcgcucgaucuacgcgucc

SEQ ID NO: 20832 - RNA, 19 nt, Artificial Sequence
  Description of Artificial Sequence: Synthetic oligonucleotide
cggggccccgcggggccgg

SEQ ID NO: 20833 - RNA, 19 nt, Artificial Sequence
  Description of Artificial Sequence: Synthetic oligonucleotide
ggcccggagucggcaugaa

SEQ ID NO: 20834 - RNA, 19 nt, Artificial Sequence
  Description of Artificial Sequence: Synthetic oligonucleotide
aucgcugcugggcgcucuu

SEQ ID NO: 20835 - RNA, 19 nt, Artificial Sequence
  Description of Artificial Sequence: Synthetic oligonucleotide
uccugucucucugcugcua

SEQ ID NO: 20836 - RNA, 19 nt, Artificial Sequence
  Description of Artificial Sequence: Synthetic oligonucleotide
accugcgucuggucagcgc

SEQ ID NO: 20837 - RNA, 19 nt, Artificial Sequence
  Description of Artificial Sequence: Synthetic oligonucleotide
ccgagggggaccccauucc

SEQ ID NO: 20838 - RNA, 19 nt, Artificial Sequence
  Description of Artificial Sequence: Synthetic oligonucleotide
ccgaggagcuuuaugagau

SEQ ID NO: 20839 - RNA, 19 nt, Artificial Sequence
  Description of Artificial Sequence: Synthetic oligonucleotide
ugcugagugaccacucgau

SEQ ID NO: 20840 - RNA, 19 nt, Artificial Sequence
  Description of Artificial Sequence: Synthetic oligonucleotide
uccgcuccuuugaugaucu

SEQ ID NO: 20841 - RNA, 19 nt, Artificial Sequence
  Description of Artificial Sequence: Synthetic oligonucleotide
uccaacgccugcugcacgg

SEQ ID NO: 20842 - RNA, 19 nt, Artificial Sequence
  Description of Artificial Sequence: Synthetic oligonucleotide
gagaccccggagaggaaga

SEQ ID NO: 20843 - RNA, 19 nt, Artificial Sequence
  Description of Artificial Sequence: Synthetic oligonucleotide
auggggccgaguuggaccu

SEQ ID NO: 20844 - RNA, 19 nt, Artificial Sequence
  Description of Artificial Sequence: Synthetic oligonucleotide
ugaacaugacccgcuccca

SEQ ID NO: 20845 - RNA, 19 nt, Artificial Sequence
  Description of Artificial Sequence: Synthetic oligonucleotide
acucuggaggcgagcugga

SEQ ID NO: 20846 - RNA, 19 nt, Artificial Sequence
  Description of Artificial Sequence: Synthetic oligonucleotide
agagcuuggcucguggaag

SEQ ID NO: 20847 - RNA, 19 nt, Artificial Sequence
  Description of Artificial Sequence: Synthetic oligonucleotide
gaaggagccuggguucccu

SEQ ID NO: 20848 - RNA, 19 nt, Artificial Sequence
  Description of Artificial Sequence: Synthetic oligonucleotide
ugaccauugcugagccggc

SEQ ID NO: 20849 - RNA, 19 nt, Artificial Sequence
  Description of Artificial Sequence: Synthetic oligonucleotide
ccaugaucgccgagugcaa

SEQ ID NO: 20850 - RNA, 19 nt, Artificial Sequence
  Description of Artificial Sequence: Synthetic oligonucleotide
agacgcgcaccgagguguu

SEQ ID NO: 20851 - RNA, 19 nt, Artificial Sequence
  Description of Artificial Sequence: Synthetic oligonucleotide
ucgagaucucccggcgccu

SEQ ID NO: 20852 - RNA, 19 nt, Artificial Sequence
  Description of Artificial Sequence: Synthetic oligonucleotide
ucauagaccgcaccaacgc

SEQ ID NO: 20853 - RNA, 19 nt, Artificial Sequence
  Description of Artificial Sequence: Synthetic oligonucleotide
ccaacuuccugguguggcc

SEQ ID NO: 20854 - RNA, 19 nt, Artificial Sequence
  Description of Artificial Sequence: Synthetic oligonucleotide
cgcccuguguggaggugca

SEQ ID NO: 20855 - RNA, 19 nt, Artificial Sequence
  Description of Artificial Sequence: Synthetic oligonucleotide
agcgcugcuccggcugcug

SEQ ID NO: 20856 - RNA, 19 nt, Artificial Sequence
  Description of Artificial Sequence: Synthetic oligonucleotide
gcaacaaccgcaacgugca

SEQ ID NO: 20857 - RNA, 19 nt, Artificial Sequence
  Description of Artificial Sequence: Synthetic oligonucleotide
agugccgccccacccaggu

SEQ ID NO: 20858 - RNA, 19 nt, Artificial Sequence
  Description of Artificial Sequence: Synthetic oligonucleotide
ugcagcugcgaccugucca

SEQ ID NO: 20859 - RNA, 19 nt, Artificial Sequence
  Description of Artificial Sequence: Synthetic oligonucleotide
aggugagaaagaucgagau

SEQ ID NO: 20860 - RNA, 19 nt, Artificial Sequence
  Description of Artificial Sequence: Synthetic oligonucleotide
uugugcggaagaagccaau

SEQ ID NO: 20861 - RNA, 19 nt, Artificial Sequence
  Description of Artificial Sequence: Synthetic oligonucleotide
ucuuuaagaaggccacggu

SEQ ID NO: 20862 - RNA, 19 nt, Artificial Sequence
  Description of Artificial Sequence: Synthetic oligonucleotide
ugacgcuggaagaccaccu

SEQ ID NO: 20863 - RNA, 19 nt, Artificial Sequence
  Description of Artificial Sequence: Synthetic oligonucleotide
uggcaugcaagugugagac

SEQ ID NO: 20864 - RNA, 19 nt, Artificial Sequence
  Description of Artificial Sequence: Synthetic oligonucleotide
caguggcagcugcacggcc

SEQ ID NO: 20865 - RNA, 19 nt, Artificial Sequence
  Description of Artificial Sequence: Synthetic oligonucleotide
cugugacccgaagcccggg

SEQ ID NO: 20866 - RNA, 19 nt, Artificial Sequence
  Description of Artificial Sequence: Synthetic oligonucleotide
gggguucccaggagcagcg

SEQ ID NO: 20867 - RNA, 19 nt, Artificial Sequence
  Description of Artificial Sequence: Synthetic oligonucleotide
gagccaaaacgccccaaac

SEQ ID NO: 20868 - RNA, 19 nt, Artificial Sequence
  Description of Artificial Sequence: Synthetic oligonucleotide
cucgggugaccauucggac

SEQ ID NO: 20869 - RNA, 19 nt, Artificial Sequence
  Description of Artificial Sequence: Synthetic oligonucleotide
cggugcgaguccgccggcc

SEQ ID NO: 20870 - RNA, 19 nt, Artificial Sequence
  Description of Artificial Sequence: Synthetic oligonucleotide
cccccaagggcaagcaccg

SEQ ID NO: 20871 - RNA, 19 nt, Artificial Sequence
  Description of Artificial Sequence: Synthetic oligonucleotide
ggaaauucaagcacacgca

SEQ ID NO: 20872 - RNA, 19 nt, Artificial Sequence
  Description of Artificial Sequence: Synthetic oligonucleotide
augacaagacggcacugaa

SEQ ID NO: 20873 - RNA, 19 nt, Artificial Sequence
  Description of Artificial Sequence: Synthetic oligonucleotide
aggagacccuuggagccua

SEQ ID NO: 20874 - RNA, 19 nt, Artificial Sequence
  Description of Artificial Sequence: Synthetic oligonucleotide
aggggcaucggcaggagag

SEQ ID NO: 20875 - RNA, 19 nt, Artificial Sequence
  Description of Artificial Sequence: Synthetic oligonucleotide
gugugugggcaggguuauu

SEQ ID NO: 20876 - RNA, 19 nt, Artificial Sequence
  Description of Artificial Sequence: Synthetic oligonucleotide
uuaauaugguauuugcugu

SEQ ID NO: 20877 - RNA, 19 nt, Artificial Sequence
  Description of Artificial Sequence: Synthetic oligonucleotide
uauugcccccauggggucc

SEQ ID NO: 20878 - RNA, 19 nt, Artificial Sequence
  Description of Artificial Sequence: Synthetic oligonucleotide
cuuggagugauaauauugu

SEQ ID NO: 20879 - RNA, 19 nt, Artificial Sequence
  Description of Artificial Sequence: Synthetic oligonucleotide
uuucccucguccgucuguc

SEQ ID NO: 20880 - RNA, 19 nt, Artificial Sequence
  Description of Artificial Sequence: Synthetic oligonucleotide
cucgaugccugauucggac

SEQ ID NO: 20881 - RNA, 19 nt, Artificial Sequence
  Description of Artificial Sequence: Synthetic oligonucleotide
cggccaauggugcuucccc

SEQ ID NO: 20882 - RNA, 19 nt, Artificial Sequence
  Description of Artificial Sequence: Synthetic oligonucleotide
ccaccccuccacguguccg

SEQ ID NO: 20883 - RNA, 19 nt, Artificial Sequence
  Description of Artificial Sequence: Synthetic oligonucleotide
guccacccuuccaucagcg

SEQ ID NO: 20884 - RNA, 19 nt, Artificial Sequence
  Description of Artificial Sequence: Synthetic oligonucleotide
gggucuccucccagcggcc

SEQ ID NO: 20885 - RNA, 19 nt, Artificial Sequence
  Description of Artificial Sequence: Synthetic oligonucleotide
cuccggucuugcccagcag

SEQ ID NO: 20886 - RNA, 19 nt, Artificial Sequence
  Description of Artificial Sequence: Synthetic oligonucleotide
gcucaaagaagaaaaagaa

SEQ ID NO: 20887 - RNA, 19 nt, Artificial Sequence
  Description of Artificial Sequence: Synthetic oligonucleotide
aggacugaacuccaucgcc

SEQ ID NO: 20888 - RNA, 19 nt, Artificial Sequence
  Description of Artificial Sequence: Synthetic oligonucleotide
caucuucuucccuuaacuc

SEQ ID NO: 20889 - RNA, 19 nt, Artificial Sequence
  Description of Artificial Sequence: Synthetic oligonucleotide
ccaagaacuugggauaaga

SEQ ID NO: 20890 - RNA, 19 nt, Artificial Sequence
  Description of Artificial Sequence: Synthetic oligonucleotide
agugugagagagacugaug

SEQ ID NO: 20891 - RNA, 19 nt, Artificial Sequence
  Description of Artificial Sequence: Synthetic oligonucleotide
ggggucgcucuuuggggga

SEQ ID NO: 20892 - RNA, 19 nt, Artificial Sequence
  Description of Artificial Sequence: Synthetic oligonucleotide
aaacggguuccuuccccug

SEQ ID NO: 20893 - RNA, 19 nt, Artificial Sequence
  Description of Artificial Sequence: Synthetic oligonucleotide
gcaccuggccugggccaca

SEQ ID NO: 20894 - RNA, 19 nt, Artificial Sequence
  Description of Artificial Sequence: Synthetic oligonucleotide
accugagcgcuguggacug

SEQ ID NO: 20895 - RNA, 19 nt, Artificial Sequence
  Description of Artificial Sequence: Synthetic oligonucleotide
guccugaggagcccugagg

SEQ ID NO: 20896 - RNA, 19 nt, Artificial Sequence
  Description of Artificial Sequence: Synthetic oligonucleotide
gaccucucagcauagccug

SEQ ID NO: 20897 - RNA, 19 nt, Artificial Sequence
  Description of Artificial Sequence: Synthetic oligonucleotide
gccugaucccugaaccccu

SEQ ID NO: 20898 - RNA, 19 nt, Artificial Sequence
  Description of Artificial Sequence: Synthetic oligonucleotide
uggccagcucugaggggag

SEQ ID NO: 20899 - RNA, 19 nt, Artificial Sequence
  Description of Artificial Sequence: Synthetic oligonucleotide
ggcaccuccaggcaggcca

SEQ ID NO: 20900 - RNA, 19 nt, Artificial Sequence
  Description of Artificial Sequence: Synthetic oligonucleotide
aggcugccucggacuccau

SEQ ID NO: 20901 - RNA, 19 nt, Artificial Sequence
  Description of Artificial Sequence: Synthetic oligonucleotide
uggcuaagaccacagacgg

SEQ ID NO: 20902 - RNA, 19 nt, Artificial Sequence
  Description of Artificial Sequence: Synthetic oligonucleotide
ggcacacagacuggagaaa

SEQ ID NO: 20903 - RNA, 19 nt, Artificial Sequence
  Description of Artificial Sequence: Synthetic oligonucleotide
aaccccucccacggugccc

SEQ ID NO: 20904 - RNA, 19 nt, Artificial Sequence
  Description of Artificial Sequence: Synthetic oligonucleotide
caaacaccagucaccucgu

SEQ ID NO: 20905 - RNA, 19 nt, Artificial Sequence
  Description of Artificial Sequence: Synthetic oligonucleotide
ucucccuggugccucugug

SEQ ID NO: 20906 - RNA, 19 nt, Artificial Sequence
  Description of Artificial Sequence: Synthetic oligonucleotide
gcacaguggcuucuuuucg

SEQ ID NO: 20907 - RNA, 19 nt, Artificial Sequence
  Description of Artificial Sequence: Synthetic oligonucleotide
guuuucguuuugaagacgu

SEQ ID NO: 20908 - RNA, 19 nt, Artificial Sequence
  Description of Artificial Sequence: Synthetic oligonucleotide
uggacuccucuuggugggu

SEQ ID NO: 20909 - RNA, 19 nt, Artificial Sequence
  Description of Artificial Sequence: Synthetic oligonucleotide
uguggccagcacaccaagu

SEQ ID NO: 20910 - RNA, 19 nt, Artificial Sequence
  Description of Artificial Sequence: Synthetic oligonucleotide
uggcugggugcccucucag

SEQ ID NO: 20911 - RNA, 19 nt, Artificial Sequence
  Description of Artificial Sequence: Synthetic oligonucleotide
gguggguuagagauggagu

SEQ ID NO: 20912 - RNA, 19 nt, Artificial Sequence
  Description of Artificial Sequence: Synthetic oligonucleotide
uuugcuguugagguggugu

SEQ ID NO: 20913 - RNA, 19 nt, Artificial Sequence
  Description of Artificial Sequence: Synthetic oligonucleotide
uagauggugaccuggguau

SEQ ID NO: 20914 - RNA, 19 nt, Artificial Sequence
  Description of Artificial Sequence: Synthetic oligonucleotide
uccccugccuccugccacc

SEQ ID NO: 20915 - RNA, 19 nt, Artificial Sequence
  Description of Artificial Sequence: Synthetic oligonucleotide
cccuuccuccccauacucc

SEQ ID NO: 20916 - RNA, 19 nt, Artificial Sequence
  Description of Artificial Sequence: Synthetic oligonucleotide
cacucugauucaccucuuc

SEQ ID NO: 20917 - RNA, 19 nt, Artificial Sequence
  Description of Artificial Sequence: Synthetic oligonucleotide
ccucugguuccuuucaucu

SEQ ID NO: 20918 - RNA, 19 nt, Artificial Sequence
  Description of Artificial Sequence: Synthetic oligonucleotide
ucucuaccuccacccugca

SEQ ID NO: 20919 - RNA, 19 nt, Artificial Sequence
  Description of Artificial Sequence: Synthetic oligonucleotide
auuuuccucuuguccuggc

SEQ ID NO: 20920 - RNA, 19 nt, Artificial Sequence
  Description of Artificial Sequence: Synthetic oligonucleotide
cccuucagucugcuccacc

SEQ ID NO: 20921 - RNA, 19 nt, Artificial Sequence
  Description of Artificial Sequence: Synthetic oligonucleotide
caaggggcucuugaacccc

SEQ ID NO: 20922 - RNA, 19 nt, Artificial Sequence
  Description of Artificial Sequence: Synthetic oligonucleotide
cuuauuaaggccccagaug

SEQ ID NO: 20923 - RNA, 19 nt, Artificial Sequence
  Description of Artificial Sequence: Synthetic oligonucleotide
gaccccagucacuccucuc

SEQ ID NO: 20924 - RNA, 19 nt, Artificial Sequence
  Description of Artificial Sequence: Synthetic oligonucleotide
cuagggcagaagacuagag

SEQ ID NO: 20925 - RNA, 19 nt, Artificial Sequence
  Description of Artificial Sequence: Synthetic oligonucleotide
ggccagggcagcaagggac

SEQ ID NO: 20926 - RNA, 19 nt, Artificial Sequence
  Description of Artificial Sequence: Synthetic oligonucleotide
ccugcucaucauauuccaa

SEQ ID NO: 20927 - RNA, 19 nt, Artificial Sequence
  Description of Artificial Sequence: Synthetic oligonucleotide
acccagccacgacugccau

SEQ ID NO: 20928 - RNA, 19 nt, Artificial Sequence
  Description of Artificial Sequence: Synthetic oligonucleotide
uguaagguugugcagggug

SEQ ID NO: 20929 - RNA, 19 nt, Artificial Sequence
  Description of Artificial Sequence: Synthetic oligonucleotide
guguacugcacaaggacau

SEQ ID NO: 20930 - RNA, 19 nt, Artificial Sequence
  Description of Artificial Sequence: Synthetic oligonucleotide
uuguaugcagggagcacug

SEQ ID NO: 20931 - RNA, 19 nt, Artificial Sequence
  Description of Artificial Sequence: Synthetic oligonucleotide
guucacaucauagauaaag

SEQ ID NO: 20932 - RNA, 19 nt, Artificial Sequence
  Description of Artificial Sequence: Synthetic oligonucleotide
gcugauuuguauauuuauu

SEQ ID NO: 20933 - RNA, 19 nt, Artificial Sequence
  Description of Artificial Sequence: Synthetic oligonucleotide
uaugacaauuucuggcaga

SEQ ID NO: 20934 - RNA, 19 nt, Artificial Sequence
  Description of Artificial Sequence: Synthetic oligonucleotide
auguagguaaagaggaaaa

SEQ ID NO: 20935 - RNA, 19 nt, Artificial Sequence
  Description of Artificial Sequence: Synthetic oligonucleotide
aggauccuuuuccuaauuc

SEQ ID NO: 20936 - RNA, 19 nt, Artificial Sequence
  Description of Artificial Sequence: Synthetic oligonucleotide
cacacaaagacuccuugug

SEQ ID NO: 20937 - RNA, 19 nt, Artificial Sequence
  Description of Artificial Sequence: Synthetic oligonucleotide
ggacuggcugugccccuga

SEQ ID NO: 20938 - RNA, 19 nt, Artificial Sequence
  Description of Artificial Sequence: Synthetic oligonucleotide
augcagccuguggcuggag

SEQ ID NO: 20939 - RNA, 19 nt, Artificial Sequence
  Description of Artificial Sequence: Synthetic oligonucleotide
guggccaaauaggagggag

SEQ ID NO: 20940 - RNA, 19 nt, Artificial Sequence
  Description of Artificial Sequence: Synthetic oligonucleotide
gacugugguaggggcaggg

SEQ ID NO: 20941 - RNA, 19 nt, Artificial Sequence
  Description of Artificial Sequence: Synthetic oligonucleotide
gaggcaacacugcugucca

SEQ ID NO: 20942 - RNA, 19 nt, Artificial Sequence
  Description of Artificial Sequence: Synthetic oligonucleotide
acaugaccuccauuuccca

SEQ ID NO: 20943 - RNA, 19 nt, Artificial Sequence
  Description of Artificial Sequence: Synthetic oligonucleotide
aaaguccucugcuccagca

SEQ ID NO: 20944 - RNA, 19 nt, Artificial Sequence
  Description of Artificial Sequence: Synthetic oligonucleotide
aacugcccuuccagguggg

SEQ ID NO: 20945 - RNA, 19 nt, Artificial Sequence
  Description of Artificial Sequence: Synthetic oligonucleotide
gugugggacaccugggaga

SEQ ID NO: 20946 - RNA, 19 nt, Artificial Sequence
  Description of Artificial Sequence: Synthetic oligonucleotide
aaggucuccaagggagggu

SEQ ID NO: 20947 - RNA, 19 nt, Artificial Sequence
  Description of Artificial Sequence: Synthetic oligonucleotide
ugcagcccucuugcccgca

SEQ ID NO: 20948 - RNA, 19 nt, Artificial Sequence
  Description of Artificial Sequence: Synthetic oligonucleotide
accccucccugcuugcaca

SEQ ID NO: 20949 - RNA, 19 nt, Artificial Sequence
  Description of Artificial Sequence: Synthetic oligonucleotide
acuuccccaucuuugaucc

SEQ ID NO: 20950 - RNA, 19 nt, Artificial Sequence
  Description of Artificial Sequence: Synthetic oligonucleotide
cuucugagcuccaccucug

SEQ ID NO: 20951 - RNA, 19 nt, Artificial Sequence
  Description of Artificial Sequence: Synthetic oligonucleotide
gguggcuccuccuaggaaa

SEQ ID NO: 20952 - RNA, 19 nt, Artificial Sequence
  Description of Artificial Sequence: Synthetic oligonucleotide
accagcucgugggcuggga

SEQ ID NO: 20953 - RNA, 19 nt, Artificial Sequence
  Description of Artificial Sequence: Synthetic oligonucleotide
aaugggggagagaagggaa

SEQ ID NO: 20954 - RNA, 19 nt, Artificial Sequence
  Description of Artificial Sequence: Synthetic oligonucleotide
aaagauccccaagaccccc

SEQ ID NO: 20955 - RNA, 19 nt, Artificial Sequence
  Description of Artificial Sequence: Synthetic oligonucleotide
cuggggugggaucugagcu

SEQ ID NO: 20956 - RNA, 19 nt, Artificial Sequence
  Description of Artificial Sequence: Synthetic oligonucleotide
ucccaccucccuucccacc

SEQ ID NO: 20957 - RNA, 19 nt, Artificial Sequence
  Description of Artificial Sequence: Synthetic oligonucleotide
cuacugcacuuucccccuu

SEQ ID NO: 20958 - RNA, 19 nt, Artificial Sequence
  Description of Artificial Sequence: Synthetic oligonucleotide
ucccgccuuccaaaaccug

SEQ ID NO: 20959 - RNA, 19 nt, Artificial Sequence
  Description of Artificial Sequence: Synthetic oligonucleotide
gcuuccuucaguuuguaaa

SEQ ID NO: 20960 - RNA, 19 nt, Artificial Sequence
  Description of Artificial Sequence: Synthetic oligonucleotide
agucggugauuauauuuuu

SEQ ID NO: 20961 - RNA, 19 nt, Artificial Sequence
  Description of Artificial Sequence: Synthetic oligonucleotide
ugggggcuuuccuuuuauu

SEQ ID NO: 20962 - RNA, 19 nt, Artificial Sequence
  Description of Artificial Sequence: Synthetic oligonucleotide
uuuuuaaauguaaaauuua

SEQ ID NO: 20963 - RNA, 19 nt, Artificial Sequence
  Description of Artificial Sequence: Synthetic oligonucleotide
auuuauauuccguauuuaa

SEQ ID NO: 20964 - RNA, 25 nt, Artificial Sequence
  Description of Artificial Sequence: Synthetic oligonucleotide
gugugugugugugugcgcgcgcauc

SEQ ID NO: 20965 - RNA, 25 nt, Artificial Sequence
  Description of Artificial Sequence: Synthetic oligonucleotide
cugagagagagagagagagagagag

SEQ ID NO: 20966 - RNA, 25 nt, Artificial Sequence
  Description of Artificial Sequence: Synthetic oligonucleotide
gacugacugagcaggaauggugaga

SEQ ID NO: 20967 - RNA, 25 nt, Artificial Sequence
  Description of Artificial Sequence: Synthetic oligonucleotide
auguuuaucaugggccucggggacc

SEQ ID NO: 20968 - RNA, 25 nt, Artificial Sequence
  Description of Artificial Sequence: Synthetic oligonucleotide
cccauucccgaggagcuuuaugaga

SEQ ID NO: 20969 - RNA, 25 nt, Artificial Sequence
  Description of Artificial Sequence: Synthetic oligonucleotide
augcugagugaccacucgauccgcu

SEQ ID NO: 20970 - RNA, 25 nt, Artificial Sequence
  Description of Artificial Sequence: Synthetic oligonucleotide
uccuuugaugaucuccaacgccugc

SEQ ID NO: 20971 - RNA, 25 nt, Artificial Sequence
  Description of Artificial Sequence: Synthetic oligonucleotide
cugcacggagaccccggagaggaag

SEQ ID NO: 20972 - RNA, 25 nt, Artificial Sequence
  Description of Artificial Sequence: Synthetic oligonucleotide
gauggggccgaguuggaccugaaca

SEQ ID NO: 20973 - RNA, 25 nt, Artificial Sequence
  Description of Artificial Sequence: Synthetic oligonucleotide
augacccgcucccacucuggaggcg

SEQ ID NO: 20974 - RNA, 25 nt, Artificial Sequence
  Description of Artificial Sequence: Synthetic oligonucleotide
gagcuggagagcuuggcucguggaa

SEQ ID NO: 20975 - RNA, 25 nt, Artificial Sequence
  Description of Artificial Sequence: Synthetic oligonucleotide
agaaggagccuggguucccugacca

SEQ ID NO: 20976 - RNA, 25 nt, Artificial Sequence
  Description of Artificial Sequence: Synthetic oligonucleotide
auugcugagccggccaugaucgccg

SEQ ID NO: 20977 - RNA, 25 nt, Artificial Sequence
  Description of Artificial Sequence: Synthetic oligonucleotide
gagugcaagacgcgcaccgaggugu

SEQ ID NO: 20978 - RNA, 25 nt, Artificial Sequence
  Description of Artificial Sequence: Synthetic oligonucleotide
uucgagaucucccggcgccucauag

SEQ ID NO: 20979 - RNA, 25 nt, Artificial Sequence
  Description of Artificial Sequence: Synthetic oligonucleotide
gaccgcaccaacgccaacuuccugg

SEQ ID NO: 20980 - RNA, 25 nt, Artificial Sequence
  Description of Artificial Sequence: Synthetic oligonucleotide
guguggccgcccuguguggaggugc

SEQ ID NO: 20981 - RNA, 25 nt, Artificial Sequence
  Description of Artificial Sequence: Synthetic oligonucleotide
cagcgcugcuccggcugcugcaaca

SEQ ID NO: 20982 - RNA, 25 nt, Artificial Sequence
  Description of Artificial Sequence: Synthetic oligonucleotide
aaccgcaacgugcagugccgcccca

SEQ ID NO: 20983 - RNA, 25 nt, Artificial Sequence
  Description of Artificial Sequence: Synthetic oligonucleotide
acccaggugcagcugcgaccugucc

SEQ ID NO: 20984 - RNA, 25 nt, Artificial Sequence
  Description of Artificial Sequence: Synthetic oligonucleotide
caggugagaaagaucgagauugugc

SEQ ID NO: 20985 - RNA, 25 nt, Artificial Sequence
  Description of Artificial Sequence: Synthetic oligonucleotide
cggaagaagccaaucuuuaagaagg

SEQ ID NO: 20986 - RNA, 25 nt, Artificial Sequence
  Description of Artificial Sequence: Synthetic oligonucleotide
gccacggugacgcuggaagaccacc

SEQ ID NO: 20987 - RNA, 25 nt, Artificial Sequence
  Description of Artificial Sequence: Synthetic oligonucleotide
cuggcaugcaagugugagacagugg

SEQ ID NO: 20988 - RNA, 25 nt, Artificial Sequence
  Description of Artificial Sequence: Synthetic oligonucleotide
gcagcugcacggccugugacccgaa

SEQ ID NO: 20989 - RNA, 25 nt, Artificial Sequence
  Description of Artificial Sequence: Synthetic oligonucleotide
agcccgggggguucccaggagcagc

SEQ ID NO: 20990 - RNA, 25 nt, Artificial Sequence
  Description of Artificial Sequence: Synthetic oligonucleotide
cgagccaaaacgccccaaacucggg

SEQ ID NO: 20991 - RNA, 25 nt, Artificial Sequence
  Description of Artificial Sequence: Synthetic oligonucleotide
gugaccauucggacggugcgagucc

SEQ ID NO: 20992 - RNA, 25 nt, Artificial Sequence
  Description of Artificial Sequence: Synthetic oligonucleotide
cgccggccccccaagggcaagcacc

SEQ ID NO: 20993 - RNA, 25 nt, Artificial Sequence
  Description of Artificial Sequence: Synthetic oligonucleotide
cggaaauucaagcacacgcaugaca

SEQ ID NO: 20994 - RNA, 25 nt, Artificial Sequence
  Description of Artificial Sequence: Synthetic oligonucleotide
aagacggcacugaaggagacccuug

SEQ ID NO: 20995 - RNA, 25 nt, Artificial Sequence
  Description of Artificial Sequence: Synthetic oligonucleotide
ggagccuaggggcaucggcaggaga

SEQ ID NO: 20996 - RNA, 25 nt, Artificial Sequence
  Description of Artificial Sequence: Synthetic oligonucleotide
agugugugggcaggguuauuuaaua

SEQ ID NO: 20997 - RNA, 25 nt, Artificial Sequence
  Description of Artificial Sequence: Synthetic oligonucleotide
augguauuugcuguauugcccccau

SEQ ID NO: 20998 - RNA, 25 nt, Artificial Sequence
  Description of Artificial Sequence: Synthetic oligonucleotide
ugggguccuuggagugauaauauug

SEQ ID NO: 20999 - RNA, 25 nt, Artificial Sequence
  Description of Artificial Sequence: Synthetic oligonucleotide
guuucccucguccgucugucucgau

SEQ ID NO: 21000 - RNA, 25 nt, Artificial Sequence
  Description of Artificial Sequence: Synthetic oligonucleotide
ugccugauucggacggccaauggug

SEQ ID NO: 21001 - RNA, 25 nt, Artificial Sequence
  Description of Artificial Sequence: Synthetic oligonucleotide
gcuucccccaccccuccacgugucc

SEQ ID NO: 21002 - RNA, 25 nt, Artificial Sequence
  Description of Artificial Sequence: Synthetic oligonucleotide
cguccacccuuccaucagcgggucu

SEQ ID NO: 21003 - RNA, 25 nt, Artificial Sequence
  Description of Artificial Sequence: Synthetic oligonucleotide
uccucccagcggccuccggucuugc

SEQ ID NO: 21004 - RNA, 25 nt, Artificial Sequence
  Description of Artificial Sequence: Synthetic oligonucleotide
cccagcagcucaaagaagaaaaaga

SEQ ID NO: 21005 - RNA, 25 nt, Artificial Sequence
  Description of Artificial Sequence: Synthetic oligonucleotide
aaggacugaacuccaucgccaucuu

SEQ ID NO: 21006 - RNA, 25 nt, Artificial Sequence
  Description of Artificial Sequence: Synthetic oligonucleotide
ucuucccuuaacuccaagaacuugg

SEQ ID NO: 21007 - RNA, 25 nt, Artificial Sequence
  Description of Artificial Sequence: Synthetic oligonucleotide
ggauaagagugugagagagacugau

SEQ ID NO: 21008 - RNA, 25 nt, Artificial Sequence
  Description of Artificial Sequence: Synthetic oligonucleotide
uggggucgcucuuugggggaaacgg

SEQ ID NO: 21009 - RNA, 25 nt, Artificial Sequence
  Description of Artificial Sequence: Synthetic oligonucleotide
gguuccuuccccugcaccuggccug

SEQ ID NO: 21010 - RNA, 25 nt, Artificial Sequence
  Description of Artificial Sequence: Synthetic oligonucleotide
gggccacaccugagcgcuguggacu

SEQ ID NO: 21011 - RNA, 25 nt, Artificial Sequence
  Description of Artificial Sequence: Synthetic oligonucleotide
uguccugaggagcccugaggaccuc

SEQ ID NO: 21012 - RNA, 25 nt, Artificial Sequence
  Description of Artificial Sequence: Synthetic oligonucleotide
cucagcauagccugccugaucccug

SEQ ID NO: 21013 - RNA, 25 nt, Artificial Sequence
  Description of Artificial Sequence: Synthetic oligonucleotide
gaaccccuggccagcucugagggga

SEQ ID NO: 21014 - RNA, 25 nt, Artificial Sequence
  Description of Artificial Sequence: Synthetic oligonucleotide
aggcaccuccaggcaggccaggcug

SEQ ID NO: 21015 - RNA, 25 nt, Artificial Sequence
  Description of Artificial Sequence: Synthetic oligonucleotide
gccucggacuccauggcuaagacca

SEQ ID NO: 21016 - RNA, 25 nt, Artificial Sequence
  Description of Artificial Sequence: Synthetic oligonucleotide
acagacgggcacacagacuggagaa

SEQ ID NO: 21017 - RNA, 25 nt, Artificial Sequence
  Description of Artificial Sequence: Synthetic oligonucleotide
aaaccccucccacggugcccaaaca

SEQ ID NO: 21018 - RNA, 25 nt, Artificial Sequence
  Description of Artificial Sequence: Synthetic oligonucleotide
accagucaccucgucucccuggugc

SEQ ID NO: 21019 - RNA, 25 nt, Artificial Sequence
  Description of Artificial Sequence: Synthetic oligonucleotide
ccucugugcacaguggcuucuuuuc

SEQ ID NO: 21020 - RNA, 25 nt, Artificial Sequence
  Description of Artificial Sequence: Synthetic oligonucleotide
cguuuucguuuugaagacguggacu

SEQ ID NO: 21021 - RNA, 25 nt, Artificial Sequence
  Description of Artificial Sequence: Synthetic oligonucleotide
uccucuugguggguguggccagcac

SEQ ID NO: 21022 - RNA, 25 nt, Artificial Sequence
  Description of Artificial Sequence: Synthetic oligonucleotide
caccaaguggcugggugcccucuca

SEQ ID NO: 21023 - RNA, 25 nt, Artificial Sequence
  Description of Artificial Sequence: Synthetic oligonucleotide
agguggguuagagauggaguuugcu

SEQ ID NO: 21024 - RNA, 25 nt, Artificial Sequence
  Description of Artificial Sequence: Synthetic oligonucleotide
uguugaggugguguagauggugacc

SEQ ID NO: 21025 - RNA, 25 nt, Artificial Sequence
  Description of Artificial Sequence: Synthetic oligonucleotide
cuggguauccccugccuccugccac

SEQ ID NO: 21026 - RNA, 25 nt, Artificial Sequence
  Description of Artificial Sequence: Synthetic oligonucleotide
ccccuuccuccccauacuccacucu

SEQ ID NO: 21027 - RNA, 25 nt, Artificial Sequence
  Description of Artificial Sequence: Synthetic oligonucleotide
ugauucaccucuuccucugguuccu

SEQ ID NO: 21028 - RNA, 25 nt, Artificial Sequence
  Description of Artificial Sequence: Synthetic oligonucleotide
uuucaucucucuaccuccacccugc

SEQ ID NO: 21029 - RNA, 25 nt, Artificial Sequence
  Description of Artificial Sequence: Synthetic oligonucleotide
cauuuuccucuuguccuggcccuuc

SEQ ID NO: 21030 - RNA, 25 nt, Artificial Sequence
  Description of Artificial Sequence: Synthetic oligonucleotide
cagucugcuccaccaaggggcucuu

SEQ ID NO: 21031 - RNA, 25 nt, Artificial Sequence
  Description of Artificial Sequence: Synthetic oligonucleotide
ugaaccccuuauuaaggccccagau

SEQ ID NO: 21032 - RNA, 25 nt, Artificial Sequence
  Description of Artificial Sequence: Synthetic oligonucleotide
ugaccccagucacuccucucuaggg

SEQ ID NO: 21033 - RNA, 25 nt, Artificial Sequence
  Description of Artificial Sequence: Synthetic oligonucleotide
gcagaagacuagaggccagggcagc

SEQ ID NO: 21034 - RNA, 25 nt, Artificial Sequence
  Description of Artificial Sequence: Synthetic oligonucleotide
caagggaccugcucaucauauucca

SEQ ID NO: 21035 - RNA, 25 nt, Artificial Sequence
  Description of Artificial Sequence: Synthetic oligonucleotide
aacccagccacgacugccauguaag

SEQ ID NO: 21036 - RNA, 25 nt, Artificial Sequence
  Description of Artificial Sequence: Synthetic oligonucleotide
gguugugcaggguguguacugcaca

SEQ ID NO: 21037 - RNA, 25 nt, Artificial Sequence
  Description of Artificial Sequence: Synthetic oligonucleotide
aaggacauuguaugcagggagcacu

SEQ ID NO: 21038 - RNA, 25 nt, Artificial Sequence
  Description of Artificial Sequence: Synthetic oligonucleotide
uguucacaucauagauaaagcugau

SEQ ID NO: 21039 - RNA, 25 nt, Artificial Sequence
  Description of Artificial Sequence: Synthetic oligonucleotide
uuuguauauuuauuaugacaauuuc

SEQ ID NO: 21040 - RNA, 25 nt, Artificial Sequence
  Description of Artificial Sequence: Synthetic oligonucleotide
cuggcagauguagguaaagaggaaa

SEQ ID NO: 21041 - RNA, 25 nt, Artificial Sequence
  Description of Artificial Sequence: Synthetic oligonucleotide
aaggauccuuuuccuaauucacaca

SEQ ID NO: 21042 - RNA, 25 nt, Artificial Sequence
  Description of Artificial Sequence: Synthetic oligonucleotide
aaagacuccuuguggacuggcugug

SEQ ID NO: 21043 - RNA, 25 nt, Artificial Sequence
  Description of Artificial Sequence: Synthetic oligonucleotide
gccccugaugcagccuguggcugga

SEQ ID NO: 21044 - RNA, 25 nt, Artificial Sequence
  Description of Artificial Sequence: Synthetic oligonucleotide
aguggccaaauaggagggagacugu

SEQ ID NO: 21045 - RNA, 25 nt, Artificial Sequence
  Description of Artificial Sequence: Synthetic oligonucleotide
ugguaggggcagggaggcaacacug

SEQ ID NO: 21046 - RNA, 25 nt, Artificial Sequence
  Description of Artificial Sequence: Synthetic oligonucleotide
gcuguccacaugaccuccauuuccc

SEQ ID NO: 21047 - RNA, 25 nt, Artificial Sequence
  Description of Artificial Sequence: Synthetic oligonucleotide
caaaguccucugcuccagcaacugc

SEQ ID NO: 21048 - RNA, 25 nt, Artificial Sequence
  Description of Artificial Sequence: Synthetic oligonucleotide
cccuuccaggugggugugggacacc

SEQ ID NO: 21049 - RNA, 25 nt, Artificial Sequence
  Description of Artificial Sequence: Synthetic oligonucleotide
cugggagaaggucuccaagggaggg

SEQ ID NO: 21050 - RNA, 25 nt, Artificial Sequence
  Description of Artificial Sequence: Synthetic oligonucleotide
gugcagcccucuugcccgcaccccu

SEQ ID NO: 21051 - RNA, 25 nt, Artificial Sequence
  Description of Artificial Sequence: Synthetic oligonucleotide
ucccugcuugcacacuuccccaucu

SEQ ID NO: 21052 - RNA, 25 nt, Artificial Sequence
  Description of Artificial Sequence: Synthetic oligonucleotide
uuugauccuucugagcuccaccucu

SEQ ID NO: 21053 - RNA, 25 nt, Artificial Sequence
  Description of Artificial Sequence: Synthetic oligonucleotide
ugguggcuccuccuaggaaaccagc

SEQ ID NO: 21054 - RNA, 25 nt, Artificial Sequence
  Description of Artificial Sequence: Synthetic oligonucleotide
cucgugggcugggaaugggggagag

SEQ ID NO: 21055 - RNA, 25 nt, Artificial Sequence
  Description of Artificial Sequence: Synthetic oligonucleotide
gaagggaaaagauccccaagacccc

SEQ ID NO: 21056 - RNA, 25 nt, Artificial Sequence
  Description of Artificial Sequence: Synthetic oligonucleotide
ccuggggugggaucugagcucccac

SEQ ID NO: 21057 - RNA, 25 nt, Artificial Sequence
  Description of Artificial Sequence: Synthetic oligonucleotide
ccucccuucccaccuacugcacuuu

SEQ ID NO: 21058 - RNA, 25 nt, Artificial Sequence
  Description of Artificial Sequence: Synthetic oligonucleotide
ucccccuucccgccuuccaaaaccu

SEQ ID NO: 21059 - RNA, 25 nt, Artificial Sequence
  Description of Artificial Sequence: Synthetic oligonucleotide
ugcuuccuucaguuuguaaagucgg

SEQ ID NO: 21060 - RNA, 25 nt, Artificial Sequence
  Description of Artificial Sequence: Synthetic oligonucleotide
gugauuauauuuuugggggcuuucc

SEQ ID NO: 21061 - RNA, 25 nt, Artificial Sequence
  Description of Artificial Sequence: Synthetic oligonucleotide
cuuuuauuuuuuaaauguaaaauuu

SEQ ID NO: 21062 - RNA, 25 nt, Artificial Sequence
  Description of Artificial Sequence: Synthetic oligonucleotide
uauuuauauuccguauuuaaaguug

SEQ ID NO: 21063 - RNA, 25 nt, Artificial Sequence
  Description of Artificial Sequence: Synthetic oligonucleotide
auuuauauuccguauuuaaaguugu

SEQ ID NO: 21064 - RNA, 25 nt, Artificial Sequence
  Description of Artificial Sequence: Synthetic oligonucleotide
gguggcaacuucuccuccugcggcc

SEQ ID NO: 21065 - RNA, 25 nt, Artificial Sequence
  Description of Artificial Sequence: Synthetic oligonucleotide
cgggagcggccugccugccucccug

SEQ ID NO: 21066 - RNA, 25 nt, Artificial Sequence
  Description of Artificial Sequence: Synthetic oligonucleotide
gcgcacccgcagccucccccgcugc

SEQ ID NO: 21067 - RNA, 25 nt, Artificial Sequence
  Description of Artificial Sequence: Synthetic oligonucleotide
ccucccuagggcuccccuccggccg

SEQ ID NO: 21068 - RNA, 25 nt, Artificial Sequence
  Description of Artificial Sequence: Synthetic oligonucleotide
gccagcgcccauuuuucauucccua

SEQ ID NO: 21069 - RNA, 25 nt, Artificial Sequence
  Description of Artificial Sequence: Synthetic oligonucleotide
agauagagauacuuugcgcgcacac

SEQ ID NO: 21070 - RNA, 25 nt, Artificial Sequence
  Description of Artificial Sequence: Synthetic oligonucleotide
cacauacauacgcgcgcaaaaagga

SEQ ID NO: 21071 - RNA, 25 nt, Artificial Sequence
  Description of Artificial Sequence: Synthetic oligonucleotide
uccagccucgcugcaaagagaaaac

SEQ ID NO: 21072 - RNA, 25 nt, Artificial Sequence
  Description of Artificial Sequence: Synthetic oligonucleotide
ccggagcagccgcagcucgcagcuc

SEQ ID NO: 21073 - RNA, 25 nt, Artificial Sequence
  Description of Artificial Sequence: Synthetic oligonucleotide
cgcagcucgcagcccgcagcccgca

SEQ ID NO: 21074 - RNA, 25 nt, Artificial Sequence
  Description of Artificial Sequence: Synthetic oligonucleotide
agaggacgcccagagcggcgagcag

SEQ ID NO: 21075 - RNA, 25 nt, Artificial Sequence
  Description of Artificial Sequence: Synthetic oligonucleotide
ggcgggcagacggaccgacggacuc

SEQ ID NO: 21076 - RNA, 25 nt, Artificial Sequence
  Description of Artificial Sequence: Synthetic oligonucleotide
cgcgccgcguccaccugucggccgg

SEQ ID NO: 21077 - RNA, 25 nt, Artificial Sequence
  Description of Artificial Sequence: Synthetic oligonucleotide
ggcccagccgagcgcgcagcgggca

SEQ ID NO: 21078 - RNA, 25 nt, Artificial Sequence
  Description of Artificial Sequence: Synthetic oligonucleotide
acgccgcgcgcgcggagcagccgug

SEQ ID NO: 21079 - RNA, 25 nt, Artificial Sequence
  Description of Artificial Sequence: Synthetic oligonucleotide
gcccgccgcccgggcccgccgccag

SEQ ID NO: 21080 - RNA, 25 nt, Artificial Sequence
  Description of Artificial Sequence: Synthetic oligonucleotide
gggcgcacacgcucccgccccccua

SEQ ID NO: 21081 - RNA, 25 nt, Artificial Sequence
  Description of Artificial Sequence: Synthetic oligonucleotide
acccggcccgggcgggaguuugcac

SEQ ID NO: 21082 - RNA, 25 nt, Artificial Sequence
  Description of Artificial Sequence: Synthetic oligonucleotide
ccucucccugcccgggugcucgagc

SEQ ID NO: 21083 - RNA, 25 nt, Artificial Sequence
  Description of Artificial Sequence: Synthetic oligonucleotide
cugccguugcaaagccaacuuugga

SEQ ID NO: 21084 - RNA, 25 nt, Artificial Sequence
  Description of Artificial Sequence: Synthetic oligonucleotide
aaaaaguuuuuugggggagacuugg

SEQ ID NO: 21085 - RNA, 25 nt, Artificial Sequence
  Description of Artificial Sequence: Synthetic oligonucleotide
ggccuugaggugcccagcuccgcgc

SEQ ID NO: 21086 - RNA, 25 nt, Artificial Sequence
  Description of Artificial Sequence: Synthetic oligonucleotide
cuuuccgauuuugggggccuuucca

SEQ ID NO: 21087 - RNA, 25 nt, Artificial Sequence
  Description of Artificial Sequence: Synthetic oligonucleotide
agaaaauguugcaaaaaagcuaagc

SEQ ID NO: 21088 - RNA, 25 nt, Artificial Sequence
  Description of Artificial Sequence: Synthetic oligonucleotide
ccggcgggcagaggaaaacgccugu

SEQ ID NO: 21089 - RNA, 25 nt, Artificial Sequence
  Description of Artificial Sequence: Synthetic oligonucleotide
uagccggcgagugaagacgaaccau

SEQ ID NO: 21090 - RNA, 25 nt, Artificial Sequence
  Description of Artificial Sequence: Synthetic oligonucleotide
ucgacugccguguuccuuuuccucu

SEQ ID NO: 21091 - RNA, 25 nt, Artificial Sequence
  Description of Artificial Sequence: Synthetic oligonucleotide
uuggagguuggaguccccugggcgc

SEQ ID NO: 21092 - RNA, 25 nt, Artificial Sequence
  Description of Artificial Sequence: Synthetic oligonucleotide
cccccacacggcuagacgccucggc

SEQ ID NO: 21093 - RNA, 25 nt, Artificial Sequence
  Description of Artificial Sequence: Synthetic oligonucleotide
cugguucgcgacgcagccccccggc

SEQ ID NO: 21094 - RNA, 25 nt, Artificial Sequence
  Description of Artificial Sequence: Synthetic oligonucleotide
ccguggaugcugcacucgggcucgg

SEQ ID NO: 21095 - RNA, 25 nt, Artificial Sequence
  Description of Artificial Sequence: Synthetic oligonucleotide
ggauccgcccagguagccggccucg

SEQ ID NO: 21096 - RNA, 25 nt, Artificial Sequence
  Description of Artificial Sequence: Synthetic oligonucleotide
ggacccagguccugcgcccaggucc

SEQ ID NO: 21097 - RNA, 25 nt, Artificial Sequence
  Description of Artificial Sequence: Synthetic oligonucleotide
cuccccugccccccagcgacggagc

SEQ ID NO: 21098 - RNA, 25 nt, Artificial Sequence
  Description of Artificial Sequence: Synthetic oligonucleotide
ccggggccgggggcggcggcgccgg

SEQ ID NO: 21099 - RNA, 25 nt, Artificial Sequence
  Description of Artificial Sequence: Synthetic oligonucleotide
ggggcaugcgggugagccgcggcug

SEQ ID NO: 21100 - RNA, 25 nt, Artificial Sequence
  Description of Artificial Sequence: Synthetic oligonucleotide
gcagaggccugagcgccugaucgcc

SEQ ID NO: 21101 - RNA, 25 nt, Artificial Sequence
  Description of Artificial Sequence: Synthetic oligonucleotide
cgcggaccugagccgagcccacccc

SEQ ID NO: 21102 - RNA, 25 nt, Artificial Sequence
  Description of Artificial Sequence: Synthetic oligonucleotide
cccuccccagccccccacccuggcc

SEQ ID NO: 21103 - RNA, 25 nt, Artificial Sequence
  Description of Artificial Sequence: Synthetic oligonucleotide
cgcgggggcggcgcgcucgaucuac

SEQ ID NO: 21104 - RNA, 25 nt, Artificial Sequence
  Description of Artificial Sequence: Synthetic oligonucleotide
cgcguccggggccccgcggggccgg

SEQ ID NO: 21105 - RNA, 25 nt, Artificial Sequence
  Description of Artificial Sequence: Synthetic oligonucleotide
ggcccggagucggcaugaaucgcug

SEQ ID NO: 21106 - RNA, 25 nt, Artificial Sequence
  Description of Artificial Sequence: Synthetic oligonucleotide
gcugggcgcucuuccugucucucug

SEQ ID NO: 21107 - RNA, 25 nt, Artificial Sequence
  Description of Artificial Sequence: Synthetic oligonucleotide
gcugcuaccugcgucuggucagcgc

SEQ ID NO: 21108 - RNA, 25 nt, Artificial Sequence
  Description of Artificial Sequence: Synthetic oligonucleotide
ccgagggggaccccauucccgagga

SEQ ID NO: 21109 - RNA, 25 nt, Artificial Sequence
  Description of Artificial Sequence: Synthetic oligonucleotide
agcuuuaugagaugcugagugacca

SEQ ID NO: 21110 - RNA, 25 nt, Artificial Sequence
  Description of Artificial Sequence: Synthetic oligonucleotide
acucgauccgcuccuuugaugaucu

SEQ ID NO: 21111 - RNA, 25 nt, Artificial Sequence
  Description of Artificial Sequence: Synthetic oligonucleotide
uccaacgccugcugcacggagaccc

SEQ ID NO: 21112 - RNA, 25 nt, Artificial Sequence
  Description of Artificial Sequence: Synthetic oligonucleotide
ccggagaggaagauggggccgaguu

SEQ ID NO: 21113 - RNA, 25 nt, Artificial Sequence
  Description of Artificial Sequence: Synthetic oligonucleotide
uggaccugaacaugacccgcuccca

SEQ ID NO: 21114 - RNA, 25 nt, Artificial Sequence
  Description of Artificial Sequence: Synthetic oligonucleotide
acucuggaggcgagcuggagagcuu

SEQ ID NO: 21115 - RNA, 25 nt, Artificial Sequence
  Description of Artificial Sequence: Synthetic oligonucleotide
uggcucguggaagaaggagccuggg

SEQ ID NO: 21116 - RNA, 25 nt, Artificial Sequence
  Description of Artificial Sequence: Synthetic oligonucleotide
guucccugaccauugcugagccggc

SEQ ID NO: 21117 - RNA, 25 nt, Artificial Sequence
  Description of Artificial Sequence: Synthetic oligonucleotide
ccaugaucgccgagugcaagacgcg

SEQ ID NO: 21118 - RNA, 25 nt, Artificial Sequence
  Description of Artificial Sequence: Synthetic oligonucleotide
gcaccgagguguucgagaucucccg

SEQ ID NO: 21119 - RNA, 25 nt, Artificial Sequence
  Description of Artificial Sequence: Synthetic oligonucleotide
ggcgccucauagaccgcaccaacgc

SEQ ID NO: 21120 - RNA, 25 nt, Artificial Sequence
  Description of Artificial Sequence: Synthetic oligonucleotide
ccaacuuccugguguggccgcccug

SEQ ID NO: 21121 - RNA, 25 nt, Artificial Sequence
  Description of Artificial Sequence: Synthetic oligonucleotide
guguggaggugcagcgcugcuccgg

SEQ ID NO: 21122 - RNA, 25 nt, Artificial Sequence
  Description of Artificial Sequence: Synthetic oligonucleotide
gcugcugcaacaaccgcaacgugca

SEQ ID NO: 21123 - RNA, 25 nt, Artificial Sequence
  Description of Artificial Sequence: Synthetic oligonucleotide
agugccgccccacccaggugcagcu

SEQ ID NO: 21124 - RNA, 25 nt, Artificial Sequence
  Description of Artificial Sequence: Synthetic oligonucleotide
ugcgaccuguccaggugagaaagau

SEQ ID NO: 21125 - RNA, 25 nt, Artificial Sequence
  Description of Artificial Sequence: Synthetic oligonucleotide
ucgagauugugcggaagaagccaau

SEQ ID NO: 21126 - RNA, 25 nt, Artificial Sequence
  Description of Artificial Sequence: Synthetic oligonucleotide
ucuuuaagaaggccacggugacgcu

SEQ ID NO: 21127 - RNA, 25 nt, Artificial Sequence
  Description of Artificial Sequence: Synthetic oligonucleotide
uggaagaccaccuggcaugcaagug

SEQ ID NO: 21128 - RNA, 25 nt, Artificial Sequence
  Description of Artificial Sequence: Synthetic oligonucleotide
gugagacaguggcagcugcacggcc

SEQ ID NO: 21129 - RNA, 25 nt, Artificial Sequence
  Description of Artificial Sequence: Synthetic oligonucleotide
cugugacccgaagcccgggggguuc

SEQ ID NO: 21130 - RNA, 25 nt, Artificial Sequence
  Description of Artificial Sequence: Synthetic oligonucleotide
cccaggagcagcgagccaaaacgcc

SEQ ID NO: 21131 - RNA, 25 nt, Artificial Sequence
  Description of Artificial Sequence: Synthetic oligonucleotide
cccaaacucgggugaccauucggac

SEQ ID NO: 21132 - RNA, 25 nt, Artificial Sequence
  Description of Artificial Sequence: Synthetic oligonucleotide
cggugcgaguccgccggccccccaa

SEQ ID NO: 21133 - RNA, 25 nt, Artificial Sequence
  Description of Artificial Sequence: Synthetic oligonucleotide
agggcaagcaccggaaauucaagca

SEQ ID NO: 21134 - RNA, 25 nt, Artificial Sequence
  Description of Artificial Sequence: Synthetic oligonucleotide
acacgcaugacaagacggcacugaa

SEQ ID NO: 21135 - RNA, 25 nt, Artificial Sequence
  Description of Artificial Sequence: Synthetic oligonucleotide
aggagacccuuggagccuaggggca

SEQ ID NO: 21136 - RNA, 25 nt, Artificial Sequence
  Description of Artificial Sequence: Synthetic oligonucleotide
aucggcaggagagugugugggcagg

SEQ ID NO: 21137 - RNA, 25 nt, Artificial Sequence
  Description of Artificial Sequence: Synthetic oligonucleotide
gguuauuuaauaugguauuugcugu

SEQ ID NO: 21138 - RNA, 25 nt, Artificial Sequence
  Description of Artificial Sequence: Synthetic oligonucleotide
uauugcccccaugggguccuuggag

SEQ ID NO: 21139 - RNA, 25 nt, Artificial Sequence
  Description of Artificial Sequence: Synthetic oligonucleotide
gugauaauauuguuucccucguccg

SEQ ID NO: 21140 - RNA, 25 nt, Artificial Sequence
  Description of Artificial Sequence: Synthetic oligonucleotide
gucugucucgaugccugauucggac

SEQ ID NO: 21141 - RNA, 25 nt, Artificial Sequence
  Description of Artificial Sequence: Synthetic oligonucleotide
cggccaauggugcuucccccacccc

SEQ ID NO: 21142 - RNA, 25 nt, Artificial Sequence
  Description of Artificial Sequence: Synthetic oligonucleotide
cuccacguguccguccacccuucca

SEQ ID NO: 21143 - RNA, 25 nt, Artificial Sequence
  Description of Artificial Sequence: Synthetic oligonucleotide
aucagcgggucuccucccagcggcc

SEQ ID NO: 21144 - RNA, 25 nt, Artificial Sequence
  Description of Artificial Sequence: Synthetic oligonucleotide
cuccggucuugcccagcagcucaaa

SEQ ID NO: 21145 - RNA, 25 nt, Artificial Sequence
  Description of Artificial Sequence: Synthetic oligonucleotide
agaagaaaaagaaggacugaacucc

SEQ ID NO: 21146 - RNA, 25 nt, Artificial Sequence
  Description of Artificial Sequence: Synthetic oligonucleotide
caucgccaucuucuucccuuaacuc

SEQ ID NO: 21147 - RNA, 25 nt, Artificial Sequence
  Description of Artificial Sequence: Synthetic oligonucleotide
ccaagaacuugggauaagaguguga

SEQ ID NO: 21148 - RNA, 25 nt, Artificial Sequence
  Description of Artificial Sequence: Synthetic oligonucleotide
agagagacugauggggucgcucuuu

SEQ ID NO: 21149 - RNA, 25 nt, Artificial Sequence
  Description of Artificial Sequence: Synthetic oligonucleotide
ugggggaaacggguuccuuccccug

SEQ ID NO: 21150 - RNA, 25 nt, Artificial Sequence
  Description of Artificial Sequence: Synthetic oligonucleotide
gcaccuggccugggccacaccugag

SEQ ID NO: 21151 - RNA, 25 nt, Artificial Sequence
  Description of Artificial Sequence: Synthetic oligonucleotide
gcgcuguggacuguccugaggagcc

SEQ ID NO: 21152 - RNA, 25 nt, Artificial Sequence
  Description of Artificial Sequence: Synthetic oligonucleotide
ccugaggaccucucagcauagccug

SEQ ID NO: 21153 - RNA, 25 nt, Artificial Sequence
  Description of Artificial Sequence: Synthetic oligonucleotide
gccugaucccugaaccccuggccag

SEQ ID NO: 21154 - RNA, 25 nt, Artificial Sequence
  Description of Artificial Sequence: Synthetic oligonucleotide
gcucugaggggaggcaccuccaggc

SEQ ID NO: 21155 - RNA, 25 nt, Artificial Sequence
  Description of Artificial Sequence: Synthetic oligonucleotide
caggccaggcugccucggacuccau

SEQ ID NO: 21156 - RNA, 25 nt, Artificial Sequence
  Description of Artificial Sequence: Synthetic oligonucleotide
uggcuaagaccacagacgggcacac

SEQ ID NO: 21157 - RNA, 25 nt, Artificial Sequence
  Description of Artificial Sequence: Synthetic oligonucleotide
cagacuggagaaaaccccucccacg

SEQ ID NO: 21158 - RNA, 25 nt, Artificial Sequence
  Description of Artificial Sequence: Synthetic oligonucleotide
ggugcccaaacaccagucaccucgu

SEQ ID NO: 21159 - RNA, 25 nt, Artificial Sequence
  Description of Artificial Sequence: Synthetic oligonucleotide
ucucccuggugccucugugcacagu

SEQ ID NO: 21160 - RNA, 25 nt, Artificial Sequence
  Description of Artificial Sequence: Synthetic oligonucleotide
uggcuucuuuucguuuucguuuuga

SEQ ID NO: 21161 - RNA, 25 nt, Artificial Sequence
  Description of Artificial Sequence: Synthetic oligonucleotide
aagacguggacuccucuuggugggu

SEQ ID NO: 21162 - RNA, 25 nt, Artificial Sequence
  Description of Artificial Sequence: Synthetic oligonucleotide
uguggccagcacaccaaguggcugg

SEQ ID NO: 21163 - RNA, 25 nt, Artificial Sequence
  Description of Artificial Sequence: Synthetic oligonucleotide
ggugcccucucagguggguuagaga

SEQ ID NO: 21164 - RNA, 25 nt, Artificial Sequence
  Description of Artificial Sequence: Synthetic oligonucleotide
auggaguuugcuguugagguggugu

SEQ ID NO: 21165 - RNA, 25 nt, Artificial Sequence
  Description of Artificial Sequence: Synthetic oligonucleotide
uagauggugaccuggguauccccug

SEQ ID NO: 21166 - RNA, 25 nt, Artificial Sequence
  Description of Artificial Sequence: Synthetic oligonucleotide
gccuccugccaccccuuccucccca

SEQ ID NO: 21167 - RNA, 25 nt, Artificial Sequence
  Description of Artificial Sequence: Synthetic oligonucleotide
auacuccacucugauucaccucuuc

SEQ ID NO: 21168 - RNA, 25 nt, Artificial Sequence
  Description of Artificial Sequence: Synthetic oligonucleotide
ccucugguuccuuucaucucucuac

SEQ ID NO: 21169 - RNA, 25 nt, Artificial Sequence
  Description of Artificial Sequence: Synthetic oligonucleotide
ccuccacccugcauuuuccucuugu

SEQ ID NO: 21170 - RNA, 25 nt, Artificial Sequence
  Description of Artificial Sequence: Synthetic oligonucleotide
uccuggcccuucagucugcuccacc

SEQ ID NO: 21171 - RNA, 25 nt, Artificial Sequence
  Description of Artificial Sequence: Synthetic oligonucleotide
caaggggcucuugaaccccuuauua

SEQ ID NO: 21172 - RNA, 25 nt, Artificial Sequence
  Description of Artificial Sequence: Synthetic oligonucleotide
aaggccccagaugaccccagucacu

SEQ ID NO: 21173 - RNA, 25 nt, Artificial Sequence
  Description of Artificial Sequence: Synthetic oligonucleotide
uccucucuagggcagaagacuagag

SEQ ID NO: 21174 - RNA, 25 nt, Artificial Sequence
  Description of Artificial Sequence: Synthetic oligonucleotide
ggccagggcagcaagggaccugcuc

SEQ ID NO: 21175 - RNA, 25 nt, Artificial Sequence
  Description of Artificial Sequence: Synthetic oligonucleotide
caucauauuccaacccagccacgac

SEQ ID NO: 21176 - RNA, 25 nt, Artificial Sequence
  Description of Artificial Sequence: Synthetic oligonucleotide
cugccauguaagguugugcagggug

SEQ ID NO: 21177 - RNA, 25 nt, Artificial Sequence
  Description of Artificial Sequence: Synthetic oligonucleotide
guguacugcacaaggacauuguaug

SEQ ID NO: 21178 - RNA, 25 nt, Artificial Sequence
  Description of Artificial Sequence: Synthetic oligonucleotide
gcagggagcacuguucacaucauag

SEQ ID NO: 21179 - RNA, 25 nt, Artificial Sequence
  Description of Artificial Sequence: Synthetic oligonucleotide
gauaaagcugauuuguauauuuauu

SEQ ID NO: 21180 - RNA, 25 nt, Artificial Sequence
  Description of Artificial Sequence: Synthetic oligonucleotide
uaugacaauuucuggcagauguagg

SEQ ID NO: 21181 - RNA, 25 nt, Artificial Sequence
  Description of Artificial Sequence: Synthetic oligonucleotide
guaaagaggaaaaggauccuuuucc

SEQ ID NO: 21182 - RNA, 25 nt, Artificial Sequence
  Description of Artificial Sequence: Synthetic oligonucleotide
cuaauucacacaaagacuccuugug

SEQ ID NO: 21183 - RNA, 25 nt, Artificial Sequence
  Description of Artificial Sequence: Synthetic oligonucleotide
ggacuggcugugccccugaugcagc

SEQ ID NO: 21184 - RNA, 25 nt, Artificial Sequence
  Description of Artificial Sequence: Synthetic oligonucleotide
ccuguggcuggaguggccaaauagg

SEQ ID NO: 21185 - RNA, 25 nt, Artificial Sequence
  Description of Artificial Sequence: Synthetic oligonucleotide
gagggagacugugguaggggcaggg

SEQ ID NO: 21186 - RNA, 25 nt, Artificial Sequence
  Description of Artificial Sequence: Synthetic oligonucleotide
gaggcaacacugcuguccacaugac

SEQ ID NO: 21187 - RNA, 25 nt, Artificial Sequence
  Description of Artificial Sequence: Synthetic oligonucleotide
ccuccauuucccaaaguccucugcu

SEQ ID NO: 21188 - RNA, 25 nt, Artificial Sequence
  Description of Artificial Sequence: Synthetic oligonucleotide
uccagcaacugcccuuccagguggg

SEQ ID NO: 21189 - RNA, 25 nt, Artificial Sequence
  Description of Artificial Sequence: Synthetic oligonucleotide
gugugggacaccugggagaaggucu

SEQ ID NO: 21190 - RNA, 25 nt, Artificial Sequence
  Description of Artificial Sequence: Synthetic oligonucleotide
uccaagggagggugcagcccucuug

SEQ ID NO: 21191 - RNA, 25 nt, Artificial Sequence
  Description of Artificial Sequence: Synthetic oligonucleotide
gcccgcaccccucccugcuugcaca

SEQ ID NO: 21192 - RNA, 25 nt, Artificial Sequence
  Description of Artificial Sequence: Synthetic oligonucleotide
acuuccccaucuuugauccuucuga

SEQ ID NO: 21193 - RNA, 25 nt, Artificial Sequence
  Description of Artificial Sequence: Synthetic oligonucleotide
agcuccaccucugguggcuccuccu

SEQ ID NO: 21194 - RNA, 25 nt, Artificial Sequence
  Description of Artificial Sequence: Synthetic oligonucleotide
uaggaaaccagcucgugggcuggga

SEQ ID NO: 21195 - RNA, 25 nt, Artificial Sequence
  Description of Artificial Sequence: Synthetic oligonucleotide
aaugggggagagaagggaaaagauc

SEQ ID NO: 21196 - RNA, 25 nt, Artificial Sequence
  Description of Artificial Sequence: Synthetic oligonucleotide
ccccaagacccccuggggugggauc

SEQ ID NO: 21197 - RNA, 25 nt, Artificial Sequence
  Description of Artificial Sequence: Synthetic oligonucleotide
cugagcucccaccucccuucccacc

SEQ ID NO: 21198 - RNA, 25 nt, Artificial Sequence
  Description of Artificial Sequence: Synthetic oligonucleotide
cuacugcacuuucccccuucccgcc

SEQ ID NO: 21199 - RNA, 25 nt, Artificial Sequence
  Description of Artificial Sequence: Synthetic oligonucleotide
cuuccaaaaccugcuuccuucaguu

SEQ ID NO: 21200 - RNA, 25 nt, Artificial Sequence
  Description of Artificial Sequence: Synthetic oligonucleotide
uuguaaagucggugauuauauuuuu

SEQ ID NO: 21201 - RNA, 25 nt, Artificial Sequence
  Description of Artificial Sequence: Synthetic oligonucleotide
ugggggcuuuccuuuuauuuuuuaa

SEQ ID NO: 21202 - RNA, 25 nt, Artificial Sequence
  Description of Artificial Sequence: Synthetic oligonucleotide
aauguaaaauuuauuuauauuccgu

SEQ ID NO: 21203 - RNA, 3007 nt, Homo sapiens
gcccggagagccgcaucuauuggcagcuuuguuauugaucagaaacugcucgccgccgacuuggcuuccagucuggcugcgggcaacccuugaguuuucgccucuguccugucccccgaacugacaggugcucccagcaacuugcuggggacuucucgccgcucccccgcguccccacccccucauuccucccucgccuucacccccacccccaccacuucgccacagcucaggauuuguuuaaaccuugggaaacugguucagguccagguuuugcuuugauccuuuucaaaaacuggagacacagaagagggcucuaggaaaaaguuuuggaugggauuauguggaaacuacccugcgauucucugcugccagagcaggcucggcgcuuccaccccagugcagccuuccccuggcgguggugaaagagacucgggagucgcugcuuccaaagugcccgccgugagugagcucucaccccagucagccaaaugagccucuucgggcuucuccugcugacaucugcccuggccggccagagacaggggacucaggcggaauccaaccugaguaguaaauuccaguuuuccagcaacaaggaacagaacggaguacaagauccucagcaugagagaauuauuacugugucuacuaauggaaguauucacagcccaagguuuccucauacuuauccaagaaauacggucuugguauggagauuaguagcaguagaggaaaauguauggauacaacuuacguuugaugaaagauuugggcuugaagacccagaagaugacauaugcaaguaugauuuuguagaaguugaggaacccagugauggaacuauauuagggcgcuggugugguucugguacuguaccaggaaaacagauuucuaaaggaaaucaaauuaggauaagauuuguaucugaugaauauuuuccuucugaaccaggguucugcauccacuacaacauugucaugccacaauucacagaagcugugaguccuucagugcuacccccuucagcuuugccacuggaccugcuuaauaaugcuauaacugccuuuaguaccuuggaagaccuuauucgauaucuugaaccagagagauggcaguuggacuuagaagaucuauauaggccaacuuggcaacuucuuggcaaggcuuuuguuuuuggaagaaaauccagagugguggaucugaaccuucuaacagaggagguaagauuauacagcugcacaccucguaacuucucaguguccauaagggaagaacuaaagagaaccgauaccauuuucuggccagguugucuccugguuaaacgcuguggugggaacugugccuguugucuccacaauugcaaugaaugucaaugugucccaagcaaaguuacuaaaaaauaccacgagguccuucaguugagaccaaagaccggugucaggggauugcacaaaucacucaccgacguggcccuggagcaccaugaggagugugacugugugugcagagggagcacaggaggauagccgcaucaccaccagcagcucuugcccagagcugugcagugcaguggcugauucuauuagagaacguaugcguuaucuccauccuuaaucucaguuguuugcuucaaggaccuuucaucuucaggauuuacagugcauucugaaagaggagacaucaaacagaauuaggaguugugcaacagcucuuuugagaggaggccuaaaggacaggagaaaaggucuucaaucguggaaagaaaauuaaauguuguauuaaauagaucaccagcuaguuucagaguuaccauguacguauuccacuagcuggguucuguauuucaguucuuucgauacggcuuaggguaaugucaguacaggaaaaaaacugugcaagugagcaccugauuccguugccuugcuuaacucuaaagcuccauguccugggccuaaaaucguauaaaaucuggauuuuuuuuuuuuuuuuugcucauauucacauauguaaaccagaacauucuauguacuacaaaccugguuuuuaaaaaggaacuauguugcuaugaauuaaacuugugucgugcugauaggacagacuggauuuuucauauuucuuauuaaaauuucugccauuuagaagaagagaacuacauucaugguuuggaagagauaaaccugaaaagaagaguggccuuaucuucacuuuaucgauaagucaguuuauuuguuucauuguguacauuuuuauauucuccuuuugacauuauaacuguuggcuuuucuaaucuuguuaaauauaucuauuuuuaccaaagguauuuaauauucuuuuuuaugacaacuuagaucaacuauuuuuagcuugguaaauuuuucuaaacacaauuguuauagccagaggaacaaagaugauauaaaauauuguugcucugacaaaaauacauguauuucauucucguauggugcuagaguuagauuaaucugcauuuuaaaaaacugaauuggaauagaauugguaaguugcaaagacuuuuugaaaauaauuaaauuaucauaucuuccauuccuguuauuggagaugaaaauaaaaagcaacuuaugaaaguagacauucagauccagccauuacuaaccuauuccuuuuuuggggaaaucugagccuagcucagaaaaacauaaagcaccuugaaaaagacuuggcagcuuccugauaaagcgugcugugcugugcaguaggaacacauccuauuuauugugauguugugguuuuauuaucuuaaacucuguuccauacacuuguauaaauacauggauauuuuuauguacagaaguaugucucuuaaccaguucacuuauuguacucuggcaauuuaaaagaaaaucaguaaaauauuuugcuuguaaaaugcuuaauaucgugccuagguuauguggugacuauuugaaucaaaaauguauugaaucaucaaauaaaagaauguggcuauuuuggggagaaaauu

SEQ ID NO: 21204 - RNA, 19 nt, Artificial Sequence
  Description of Artificial Sequence: Synthetic oligonucleotide
gcccggagagccgcaucua

SEQ ID NO: 21205 - RNA, 19 nt, Artificial Sequence
  Description of Artificial Sequence: Synthetic oligonucleotide
auuggcagcuuuguuauug

SEQ ID NO: 21206 - RNA, 19 nt, Artificial Sequence
  Description of Artificial Sequence: Synthetic oligonucleotide
gaucagaaacugcucgccg

SEQ ID NO: 21207 - RNA, 19 nt, Artificial Sequence
  Description of Artificial Sequence: Synthetic oligonucleotide
gccgacuuggcuuccaguc

SEQ ID NO: 21208 - RNA, 19 nt, Artificial Sequence
  Description of Artificial Sequence: Synthetic oligonucleotide
cuggcugcgggcaacccuu

SEQ ID NO: 21209 - RNA, 19 nt, Artificial Sequence
  Description of Artificial Sequence: Synthetic oligonucleotide
ugaguuuucgccucugucc

SEQ ID NO: 21210 - RNA, 19 nt, Artificial Sequence
  Description of Artificial Sequence: Synthetic oligonucleotide
cugucccccgaacugacag

SEQ ID NO: 21211 - RNA, 19 nt, Artificial Sequence
  Description of Artificial Sequence: Synthetic oligonucleotide
ggugcucccagcaacuugc

SEQ ID NO: 21212 - RNA, 19 nt, Artificial Sequence
  Description of Artificial Sequence: Synthetic oligonucleotide
cuggggacuucucgccgcu

SEQ ID NO: 21213 - RNA, 19 nt, Artificial Sequence
  Description of Artificial Sequence: Synthetic oligonucleotide
ucccccgcguccccacccc

SEQ ID NO: 21214 - RNA, 19 nt, Artificial Sequence
  Description of Artificial Sequence: Synthetic oligonucleotide
ccucauuccucccucgccu

SEQ ID NO: 21215 - RNA, 19 nt, Artificial Sequence
  Description of Artificial Sequence: Synthetic oligonucleotide
uucacccccacccccacca

SEQ ID NO: 21216 - RNA, 19 nt, Artificial Sequence
  Description of Artificial Sequence: Synthetic oligonucleotide
acuucgccacagcucagga

SEQ ID NO: 21217 - RNA, 19 nt, Artificial Sequence
  Description of Artificial Sequence: Synthetic oligonucleotide
auuuguuuaaaccuuggga

SEQ ID NO: 21218 - RNA, 19 nt, Artificial Sequence
  Description of Artificial Sequence: Synthetic oligonucleotide
aaacugguucagguccagg

SEQ ID NO: 21219 - RNA, 19 nt, Artificial Sequence
  Description of Artificial Sequence: Synthetic oligonucleotide
guuuugcuuugauccuuuu

SEQ ID NO: 21220 - RNA, 19 nt, Artificial Sequence
  Description of Artificial Sequence: Synthetic oligonucleotide
ucaaaaacuggagacacag

SEQ ID NO: 21221 - RNA, 19 nt, Artificial Sequence
  Description of Artificial Sequence: Synthetic oligonucleotide
gaagagggcucuaggaaaa

SEQ ID NO: 21222 - RNA, 19 nt, Artificial Sequence
  Description of Artificial Sequence: Synthetic oligonucleotide
aaguuuuggaugggauuau

SEQ ID NO: 21223 - RNA, 19 nt, Artificial Sequence
  Description of Artificial Sequence: Synthetic oligonucleotide
uguggaaacuacccugcga

SEQ ID NO: 21224 - RNA, 19 nt, Artificial Sequence
  Description of Artificial Sequence: Synthetic oligonucleotide
auucucugcugccagagca

SEQ ID NO: 21225 - RNA, 19 nt, Artificial Sequence
  Description of Artificial Sequence: Synthetic oligonucleotide
aggcucggcgcuuccaccc

SEQ ID NO: 21226 - RNA, 19 nt, Artificial Sequence
  Description of Artificial Sequence: Synthetic oligonucleotide
ccagugcagccuuccccug

SEQ ID NO: 21227 - RNA, 19 nt, Artificial Sequence
  Description of Artificial Sequence: Synthetic oligonucleotide
ggcgguggugaaagagacu

SEQ ID NO: 21228 - RNA, 19 nt, Artificial Sequence
  Description of Artificial Sequence: Synthetic oligonucleotide
ucgggagucgcugcuucca

SEQ ID NO: 21229 - RNA, 19 nt, Artificial Sequence
  Description of Artificial Sequence: Synthetic oligonucleotide
aaagugcccgccgugagug

SEQ ID NO: 21230 - RNA, 19 nt, Artificial Sequence
  Description of Artificial Sequence: Synthetic oligonucleotide
gagcucucaccccagucag

SEQ ID NO: 21231 - RNA, 19 nt, Artificial Sequence
  Description of Artificial Sequence: Synthetic oligonucleotide
gccaaaugagccucuucgg

SEQ ID NO: 21232 - RNA, 19 nt, Artificial Sequence
  Description of Artificial Sequence: Synthetic oligonucleotide
ggcuucuccugcugacauc

SEQ ID NO: 21233 - RNA, 19 nt, Artificial Sequence
  Description of Artificial Sequence: Synthetic oligonucleotide
cugcccuggccggccagag

SEQ ID NO: 21234 - RNA, 19 nt, Artificial Sequence
  Description of Artificial Sequence: Synthetic oligonucleotide
gacaggggacucaggcgga

SEQ ID NO: 21235 - RNA, 19 nt, Artificial Sequence
  Description of Artificial Sequence: Synthetic oligonucleotide
aauccaaccugaguaguaa

SEQ ID NO: 21236 - RNA, 19 nt, Artificial Sequence
  Description of Artificial Sequence: Synthetic oligonucleotide
aauuccaguuuuccagcaa

SEQ ID NO: 21237 - RNA, 19 nt, Artificial Sequence
  Description of Artificial Sequence: Synthetic oligonucleotide
acaaggaacagaacggagu

SEQ ID NO: 21238 - RNA, 19 nt, Artificial Sequence
  Description of Artificial Sequence: Synthetic oligonucleotide
uacaagauccucagcauga

SEQ ID NO: 21239 - RNA, 19 nt, Artificial Sequence
  Description of Artificial Sequence: Synthetic oligonucleotide
agagaauuauuacuguguc

SEQ ID NO: 21240 - RNA, 19 nt, Artificial Sequence
  Description of Artificial Sequence: Synthetic oligonucleotide
cuacuaauggaaguauuca

SEQ ID NO: 21241 - RNA, 19 nt, Artificial Sequence
  Description of Artificial Sequence: Synthetic oligonucleotide
acagcccaagguuuccuca

SEQ ID NO: 21242 - RNA, 19 nt, Artificial Sequence
  Description of Artificial Sequence: Synthetic oligonucleotide
auacuuauccaagaaauac

SEQ ID NO: 21243 - RNA, 19 nt, Artificial Sequence
  Description of Artificial Sequence: Synthetic oligonucleotide
cggucuugguauggagauu

SEQ ID NO: 21244 - RNA, 19 nt, Artificial Sequence
  Description of Artificial Sequence: Synthetic oligonucleotide
uaguagcaguagaggaaaa

SEQ ID NO: 21245 - RNA, 19 nt, Artificial Sequence
  Description of Artificial Sequence: Synthetic oligonucleotide
auguauggauacaacuuac

SEQ ID NO: 21246 - RNA, 19 nt, Artificial Sequence
  Description of Artificial Sequence: Synthetic oligonucleotide
cguuugaugaaagauuugg

SEQ ID NO: 21247 - RNA, 19 nt, Artificial Sequence
  Description of Artificial Sequence: Synthetic oligonucleotide
ggcuugaagacccagaaga

SEQ ID NO: 21248 - RNA, 19 nt, Artificial Sequence
  Description of Artificial Sequence: Synthetic oligonucleotide
augacauaugcaaguauga

SEQ ID NO: 21249 - RNA, 19 nt, Artificial Sequence
  Description of Artificial Sequence: Synthetic oligonucleotide
auuuuguagaaguugagga

SEQ ID NO: 21250 - RNA, 19 nt, Artificial Sequence
  Description of Artificial Sequence: Synthetic oligonucleotide
aacccagugauggaacuau

SEQ ID NO: 21251 - RNA, 19 nt, Artificial Sequence
  Description of Artificial Sequence: Synthetic oligonucleotide
uauuagggcgcuggugugg

SEQ ID NO: 21252 - RNA, 19 nt, Artificial Sequence
  Description of Artificial Sequence: Synthetic oligonucleotide
guucugguacuguaccagg

SEQ ID NO: 21253 - RNA, 19 nt, Artificial Sequence
  Description of Artificial Sequence: Synthetic oligonucleotide
gaaaacagauuucuaaagg

SEQ ID NO: 21254 - RNA, 19 nt, Artificial Sequence
  Description of Artificial Sequence: Synthetic oligonucleotide
gaaaucaaauuaggauaag

SEQ ID NO: 21255 - RNA, 19 nt, Artificial Sequence
  Description of Artificial Sequence: Synthetic oligonucleotide
gauuuguaucugaugaaua

SEQ ID NO: 21256 - RNA, 19 nt, Artificial Sequence
  Description of Artificial Sequence: Synthetic oligonucleotide
auuuuccuucugaaccagg

SEQ ID NO: 21257 - RNA, 19 nt, Artificial Sequence
  Description of Artificial Sequence: Synthetic oligonucleotide
gguucugcauccacuacaa

SEQ ID NO: 21258 - RNA, 19 nt, Artificial Sequence
  Description of Artificial Sequence: Synthetic oligonucleotide
acauugucaugccacaauu

SEQ ID NO: 21259 - RNA, 19 nt, Artificial Sequence
  Description of Artificial Sequence: Synthetic oligonucleotide
ucacagaagcugugagucc

SEQ ID NO: 21260 - RNA, 19 nt, Artificial Sequence
  Description of Artificial Sequence: Synthetic oligonucleotide
cuucagugcuacccccuuc

SEQ ID NO: 21261 - RNA, 19 nt, Artificial Sequence
  Description of Artificial Sequence: Synthetic oligonucleotide
cagcuuugccacuggaccu

SEQ ID NO: 21262 - RNA, 19 nt, Artificial Sequence
  Description of Artificial Sequence: Synthetic oligonucleotide
ugcuuaauaaugcuauaac

SEQ ID NO: 21263 - RNA, 19 nt, Artificial Sequence
  Description of Artificial Sequence: Synthetic oligonucleotide
cugccuuuaguaccuugga

SEQ ID NO: 21264 - RNA, 19 nt, Artificial Sequence
  Description of Artificial Sequence: Synthetic oligonucleotide
aagaccuuauucgauaucu

SEQ ID NO: 21265 - RNA, 19 nt, Artificial Sequence
  Description of Artificial Sequence: Synthetic oligonucleotide
uugaaccagagagauggca

SEQ ID NO: 21266 - RNA, 19 nt, Artificial Sequence
  Description of Artificial Sequence: Synthetic oligonucleotide
aguuggacuuagaagaucu

SEQ ID NO: 21267 - RNA, 19 nt, Artificial Sequence
  Description of Artificial Sequence: Synthetic oligonucleotide
uauauaggccaacuuggca

SEQ ID NO: 21268 - RNA, 19 nt, Artificial Sequence
  Description of Artificial Sequence: Synthetic oligonucleotide
aacuucuuggcaaggcuuu

SEQ ID NO: 21269 - RNA, 19 nt, Artificial Sequence
  Description of Artificial Sequence: Synthetic oligonucleotide
uuguuuuuggaagaaaauc

SEQ ID NO: 21270 - RNA, 19 nt, Artificial Sequence
  Description of Artificial Sequence: Synthetic oligonucleotide
ccagagugguggaucugaa

SEQ ID NO: 21271 - RNA, 19 nt, Artificial Sequence
  Description of Artificial Sequence: Synthetic oligonucleotide
accuucuaacagaggaggu

SEQ ID NO: 21272 - RNA, 19 nt, Artificial Sequence
  Description of Artificial Sequence: Synthetic oligonucleotide
uaagauuauacagcugcac

SEQ ID NO: 21273 - RNA, 19 nt, Artificial Sequence
  Description of Artificial Sequence: Synthetic oligonucleotide
caccucguaacuucucagu

SEQ ID NO: 21274 - RNA, 19 nt, Artificial Sequence
  Description of Artificial Sequence: Synthetic oligonucleotide
uguccauaagggaagaacu

SEQ ID NO: 21275 - RNA, 19 nt, Artificial Sequence
  Description of Artificial Sequence: Synthetic oligonucleotide
uaaagagaaccgauaccau

SEQ ID NO: 21276 - RNA, 19 nt, Artificial Sequence
  Description of Artificial Sequence: Synthetic oligonucleotide
uuuucuggccagguugucu

SEQ ID NO: 21277 - RNA, 19 nt, Artificial Sequence
  Description of Artificial Sequence: Synthetic oligonucleotide
uccugguuaaacgcugugg

SEQ ID NO: 21278 - RNA, 19 nt, Artificial Sequence
  Description of Artificial Sequence: Synthetic oligonucleotide
gugggaacugugccuguug

SEQ ID NO: 21279 - RNA, 19 nt, Artificial Sequence
  Description of Artificial Sequence: Synthetic oligonucleotide
gucuccacaauugcaauga

SEQ ID NO: 21280 - RNA, 19 nt, Artificial Sequence
  Description of Artificial Sequence: Synthetic oligonucleotide
aaugucaaugugucccaag

SEQ ID NO: 21281 - RNA, 19 nt, Artificial Sequence
  Description of Artificial Sequence: Synthetic oligonucleotide
gcaaaguuacuaaaaaaua

SEQ ID NO: 21282 - RNA, 19 nt, Artificial Sequence
  Description of Artificial Sequence: Synthetic oligonucleotide
accacgagguccuucaguu

SEQ ID NO: 21283 - RNA, 19 nt, Artificial Sequence
  Description of Artificial Sequence: Synthetic oligonucleotide
ugagaccaaagaccggugu

SEQ ID NO: 21284 - RNA, 19 nt, Artificial Sequence
  Description of Artificial Sequence: Synthetic oligonucleotide
ucaggggauugcacaaauc

SEQ ID NO: 21285 - RNA, 19 nt, Artificial Sequence
  Description of Artificial Sequence: Synthetic oligonucleotide
cacucaccgacguggcccu

SEQ ID NO: 21286 - RNA, 19 nt, Artificial Sequence
  Description of Artificial Sequence: Synthetic oligonucleotide
uggagcaccaugaggagug

SEQ ID NO: 21287 - RNA, 19 nt, Artificial Sequence
  Description of Artificial Sequence: Synthetic oligonucleotide
gugacugugugugcagagg

SEQ ID NO: 21288 - RNA, 19 nt, Artificial Sequence
  Description of Artificial Sequence: Synthetic oligonucleotide
ggagcacaggaggauagcc

SEQ ID NO: 21289 - RNA, 19 nt, Artificial Sequence
  Description of Artificial Sequence: Synthetic oligonucleotide
cgcaucaccaccagcagcu

SEQ ID NO: 21290 - RNA, 19 nt, Artificial Sequence
  Description of Artificial Sequence: Synthetic oligonucleotide
ucuugcccagagcugugca

SEQ ID NO: 21291 - RNA, 19 nt, Artificial Sequence
  Description of Artificial Sequence: Synthetic oligonucleotide
agugcaguggcugauucua

SEQ ID NO: 21292 - RNA, 19 nt, Artificial Sequence
  Description of Artificial Sequence: Synthetic oligonucleotide
auuagagaacguaugcguu

SEQ ID NO: 21293 - RNA, 19 nt, Artificial Sequence
  Description of Artificial Sequence: Synthetic oligonucleotide
uaucuccauccuuaaucuc

SEQ ID NO: 21294 - RNA, 19 nt, Artificial Sequence
  Description of Artificial Sequence: Synthetic oligonucleotide
caguuguuugcuucaagga

SEQ ID NO: 21295 - RNA, 19 nt, Artificial Sequence
  Description of Artificial Sequence: Synthetic oligonucleotide
accuuucaucuucaggauu

SEQ ID NO: 21296 - RNA, 19 nt, Artificial Sequence
  Description of Artificial Sequence: Synthetic oligonucleotide
uuacagugcauucugaaag

SEQ ID NO: 21297 - RNA, 19 nt, Artificial Sequence
  Description of Artificial Sequence: Synthetic oligonucleotide
gaggagacaucaaacagaa

SEQ ID NO: 21298 - RNA, 19 nt, Artificial Sequence
  Description of Artificial Sequence: Synthetic oligonucleotide
auuaggaguugugcaacag

SEQ ID NO: 21299 - RNA, 19 nt, Artificial Sequence
  Description of Artificial Sequence: Synthetic oligonucleotide
gcucuuuugagaggaggcc

SEQ ID NO: 21300 - RNA, 19 nt, Artificial Sequence
  Description of Artificial Sequence: Synthetic oligonucleotide
cuaaaggacaggagaaaag

SEQ ID NO: 21301 - RNA, 19 nt, Artificial Sequence
  Description of Artificial Sequence: Synthetic oligonucleotide
ggucuucaaucguggaaag

SEQ ID NO: 21302 - RNA, 19 nt, Artificial Sequence
  Description of Artificial Sequence: Synthetic oligonucleotide
gaaaauuaaauguuguauu

SEQ ID NO: 21303 - RNA, 19 nt, Artificial Sequence
  Description of Artificial Sequence: Synthetic oligonucleotide
uaaauagaucaccagcuag

SEQ ID NO: 21304 - RNA, 19 nt, Artificial Sequence
  Description of Artificial Sequence: Synthetic oligonucleotide
guuucagaguuaccaugua

SEQ ID NO: 21305 - RNA, 19 nt, Artificial Sequence
  Description of Artificial Sequence: Synthetic oligonucleotide
acguauuccacuagcuggg

SEQ ID NO: 21306 - RNA, 19 nt, Artificial Sequence
  Description of Artificial Sequence: Synthetic oligonucleotide
guucuguauuucaguucuu

SEQ ID NO: 21307 - RNA, 19 nt, Artificial Sequence
  Description of Artificial Sequence: Synthetic oligonucleotide
uucgauacggcuuagggua

SEQ ID NO: 21308 - RNA, 19 nt, Artificial Sequence
  Description of Artificial Sequence: Synthetic oligonucleotide
aaugucaguacaggaaaaa

SEQ ID NO: 21309 - RNA, 19 nt, Artificial Sequence
  Description of Artificial Sequence: Synthetic oligonucleotide
aaacugugcaagugagcac

SEQ ID NO: 21310 - RNA, 19 nt, Artificial Sequence
  Description of Artificial Sequence: Synthetic oligonucleotide
ccugauuccguugccuugc

SEQ ID NO: 21311 - RNA, 19 nt, Artificial Sequence
  Description of Artificial Sequence: Synthetic oligonucleotide
cuuaacucuaaagcuccau

SEQ ID NO: 21312 - RNA, 19 nt, Artificial Sequence
  Description of Artificial Sequence: Synthetic oligonucleotide
uguccugggccuaaaaucg

SEQ ID NO: 21313 - RNA, 19 nt, Artificial Sequence
  Description of Artificial Sequence: Synthetic oligonucleotide
guauaaaaucuggauuuuu

SEQ ID NO: 21314 - RNA, 19 nt, Artificial Sequence
  Description of Artificial Sequence: Synthetic oligonucleotide
uauucacauauguaaacca

SEQ ID NO: 21315 - RNA, 19 nt, Artificial Sequence
  Description of Artificial Sequence: Synthetic oligonucleotide
agaacauucuauguacuac

SEQ ID NO: 21316 - RNA, 19 nt, Artificial Sequence
  Description of Artificial Sequence: Synthetic oligonucleotide
caaaccugguuuuuaaaaa

SEQ ID NO: 21317 - RNA, 19 nt, Artificial Sequence
  Description of Artificial Sequence: Synthetic oligonucleotide
aggaacuauguugcuauga

SEQ ID NO: 21318 - RNA, 19 nt, Artificial Sequence
  Description of Artificial Sequence: Synthetic oligonucleotide
aauuaaacuugugucgugc

SEQ ID NO: 21319 - RNA, 19 nt, Artificial Sequence
  Description of Artificial Sequence: Synthetic oligonucleotide
cugauaggacagacuggau

SEQ ID NO: 21320 - RNA, 19 nt, Artificial Sequence
  Description of Artificial Sequence: Synthetic oligonucleotide
uuuuucauauuucuuauua

SEQ ID NO: 21321 - RNA, 19 nt, Artificial Sequence
  Description of Artificial Sequence: Synthetic oligonucleotide
aaaauuucugccauuuaga

SEQ ID NO: 21322 - RNA, 19 nt, Artificial Sequence
  Description of Artificial Sequence: Synthetic oligonucleotide
aagaagagaacuacauuca

SEQ ID NO: 21323 - RNA, 19 nt, Artificial Sequence
  Description of Artificial Sequence: Synthetic oligonucleotide
augguuuggaagagauaaa

SEQ ID NO: 21324 - RNA, 19 nt, Artificial Sequence
  Description of Artificial Sequence: Synthetic oligonucleotide
accugaaaagaagaguggc

SEQ ID NO: 21325 - RNA, 19 nt, Artificial Sequence
  Description of Artificial Sequence: Synthetic oligonucleotide
ccuuaucuucacuuuaucg

SEQ ID NO: 21326 - RNA, 19 nt, Artificial Sequence
  Description of Artificial Sequence: Synthetic oligonucleotide
gauaagucaguuuauuugu

SEQ ID NO: 21327 - RNA, 19 nt, Artificial Sequence
  Description of Artificial Sequence: Synthetic oligonucleotide
uuucauuguguacauuuuu

SEQ ID NO: 21328 - RNA, 19 nt, Artificial Sequence
  Description of Artificial Sequence: Synthetic oligonucleotide
uauauucuccuuuugacau

SEQ ID NO: 21329 - RNA, 19 nt, Artificial Sequence
  Description of Artificial Sequence: Synthetic oligonucleotide
uuauaacuguuggcuuuuc

SEQ ID NO: 21330 - RNA, 19 nt, Artificial Sequence
  Description of Artificial Sequence: Synthetic oligonucleotide
cuaaucuuguuaaauauau

SEQ ID NO: 21331 - RNA, 19 nt, Artificial Sequence
  Description of Artificial Sequence: Synthetic oligonucleotide
ucuauuuuuaccaaaggua

SEQ ID NO: 21332 - RNA, 19 nt, Artificial Sequence
  Description of Artificial Sequence: Synthetic oligonucleotide
auuuaauauucuuuuuuau

SEQ ID NO: 21333 - RNA, 19 nt, Artificial Sequence
  Description of Artificial Sequence: Synthetic oligonucleotide
ugacaacuuagaucaacua

SEQ ID NO: 21334 - RNA, 19 nt, Artificial Sequence
  Description of Artificial Sequence: Synthetic oligonucleotide
auuuuuagcuugguaaauu

SEQ ID NO: 21335 - RNA, 19 nt, Artificial Sequence
  Description of Artificial Sequence: Synthetic oligonucleotide
uuuucuaaacacaauuguu

SEQ ID NO: 21336 - RNA, 19 nt, Artificial Sequence
  Description of Artificial Sequence: Synthetic oligonucleotide
uauagccagaggaacaaag

SEQ ID NO: 21337 - RNA, 19 nt, Artificial Sequence
  Description of Artificial Sequence: Synthetic oligonucleotide
gaugauauaaaauauuguu

SEQ ID NO: 21338 - RNA, 19 nt, Artificial Sequence
  Description of Artificial Sequence: Synthetic oligonucleotide
ugcucugacaaaaauacau

SEQ ID NO: 21339 - RNA, 19 nt, Artificial Sequence
  Description of Artificial Sequence: Synthetic oligonucleotide
uguauuucauucucguaug

SEQ ID NO: 21340 - RNA, 19 nt, Artificial Sequence
  Description of Artificial Sequence: Synthetic oligonucleotide
ggugcuagaguuagauuaa

SEQ ID NO: 21341 - RNA, 19 nt, Artificial Sequence
  Description of Artificial Sequence: Synthetic oligonucleotide
aucugcauuuuaaaaaacu

SEQ ID NO: 21342 - RNA, 19 nt, Artificial Sequence
  Description of Artificial Sequence: Synthetic oligonucleotide
ugaauuggaauagaauugg

SEQ ID NO: 21343 - RNA, 19 nt, Artificial Sequence
  Description of Artificial Sequence: Synthetic oligonucleotide
guaaguugcaaagacuuuu

SEQ ID NO: 21344 - RNA, 19 nt, Artificial Sequence
  Description of Artificial Sequence: Synthetic oligonucleotide
uugaaaauaauuaaauuau

SEQ ID NO: 21345 - RNA, 19 nt, Artificial Sequence
  Description of Artificial Sequence: Synthetic oligonucleotide
ucauaucuuccauuccugu

SEQ ID NO: 21346 - RNA, 19 nt, Artificial Sequence
  Description of Artificial Sequence: Synthetic oligonucleotide
uuauuggagaugaaaauaa

SEQ ID NO: 21347 - RNA, 19 nt, Artificial Sequence
  Description of Artificial Sequence: Synthetic oligonucleotide
aaaagcaacuuaugaaagu

SEQ ID NO: 21348 - RNA, 19 nt, Artificial Sequence
  Description of Artificial Sequence: Synthetic oligonucleotide
uagacauucagauccagcc

SEQ ID NO: 21349 - RNA, 19 nt, Artificial Sequence
  Description of Artificial Sequence: Synthetic oligonucleotide
cauuacuaaccuauuccuu

SEQ ID NO: 21350 - RNA, 19 nt, Artificial Sequence
  Description of Artificial Sequence: Synthetic oligonucleotide
uuuuuggggaaaucugagc

SEQ ID NO: 21351 - RNA, 19 nt, Artificial Sequence
  Description of Artificial Sequence: Synthetic oligonucleotide
ccuagcucagaaaaacaua

SEQ ID NO: 21352 - RNA, 19 nt, Artificial Sequence
  Description of Artificial Sequence: Synthetic oligonucleotide
aaagcaccuugaaaaagac

SEQ ID NO: 21353 - RNA, 19 nt, Artificial Sequence
  Description of Artificial Sequence: Synthetic oligonucleotide
cuuggcagcuuccugauaa

SEQ ID NO: 21354 - RNA, 19 nt, Artificial Sequence
  Description of Artificial Sequence: Synthetic oligonucleotide
aagcgugcugugcugugca

SEQ ID NO: 21355 - RNA, 19 nt, Artificial Sequence
  Description of Artificial Sequence: Synthetic oligonucleotide
aguaggaacacauccuauu

SEQ ID NO: 21356 - RNA, 19 nt, Artificial Sequence
  Description of Artificial Sequence: Synthetic oligonucleotide
uuauugugauguugugguu

SEQ ID NO: 21357 - RNA, 19 nt, Artificial Sequence
  Description of Artificial Sequence: Synthetic oligonucleotide
uuuauuaucuuaaacucug

SEQ ID NO: 21358 - RNA, 19 nt, Artificial Sequence
  Description of Artificial Sequence: Synthetic oligonucleotide
guuccauacacuuguauaa

SEQ ID NO: 21359 - RNA, 19 nt, Artificial Sequence
  Description of Artificial Sequence: Synthetic oligonucleotide
aauacauggauauuuuuau

SEQ ID NO: 21360 - RNA, 19 nt, Artificial Sequence
  Description of Artificial Sequence: Synthetic oligonucleotide
uguacagaaguaugucucu

SEQ ID NO: 21361 - RNA, 19 nt, Artificial Sequence
  Description of Artificial Sequence: Synthetic oligonucleotide
uuaaccaguucacuuauug

SEQ ID NO: 21362 - RNA, 19 nt, Artificial Sequence
  Description of Artificial Sequence: Synthetic oligonucleotide
guacucuggcaauuuaaaa

SEQ ID NO: 21363 - RNA, 19 nt, Artificial Sequence
  Description of Artificial Sequence: Synthetic oligonucleotide
agaaaaucaguaaaauauu

SEQ ID NO: 21364 - RNA, 19 nt, Artificial Sequence
  Description of Artificial Sequence: Synthetic oligonucleotide
uuugcuuguaaaaugcuua

SEQ ID NO: 21365 - RNA, 19 nt, Artificial Sequence
  Description of Artificial Sequence: Synthetic oligonucleotide
aauaucgugccuagguuau

SEQ ID NO: 21366 - RNA, 19 nt, Artificial Sequence
  Description of Artificial Sequence: Synthetic oligonucleotide
uguggugacuauuugaauc

SEQ ID NO: 21367 - RNA, 19 nt, Artificial Sequence
  Description of Artificial Sequence: Synthetic oligonucleotide
caaaaauguauugaaucau

SEQ ID NO: 21368 - RNA, 19 nt, Artificial Sequence
  Description of Artificial Sequence: Synthetic oligonucleotide
ucaaauaaaagaauguggc

SEQ ID NO: 21369 - RNA, 19 nt, Artificial Sequence
  Description of Artificial Sequence: Synthetic oligonucleotide
cuauuuuggggagaaaauu

SEQ ID NO: 21370 - RNA, 25 nt, Artificial Sequence
  Description of Artificial Sequence: Synthetic oligonucleotide
gcccggagagccgcaucuauuggca

SEQ ID NO: 21371 - RNA, 25 nt, Artificial Sequence
  Description of Artificial Sequence: Synthetic oligonucleotide
agcuuuguuauugaucagaaacugc

SEQ ID NO: 21372 - RNA, 25 nt, Artificial Sequence
  Description of Artificial Sequence: Synthetic oligonucleotide
cucgccgccgacuuggcuuccaguc

SEQ ID NO: 21373 - RNA, 25 nt, Artificial Sequence
  Description of Artificial Sequence: Synthetic oligonucleotide
cuggcugcgggcaacccuugaguuu

SEQ ID NO: 21374 - RNA, 25 nt, Artificial Sequence
  Description of Artificial Sequence: Synthetic oligonucleotide
uucgccucuguccugucccccgaac

SEQ ID NO: 21375 - RNA, 25 nt, Artificial Sequence
  Description of Artificial Sequence: Synthetic oligonucleotide
cugacaggugcucccagcaacuugc

SEQ ID NO: 21376 - RNA, 25 nt, Artificial Sequence
  Description of Artificial Sequence: Synthetic oligonucleotide
cuggggacuucucgccgcucccccg

SEQ ID NO: 21377 - RNA, 25 nt, Artificial Sequence
  Description of Artificial Sequence: Synthetic oligonucleotide
gcguccccacccccucauuccuccc

SEQ ID NO: 21378 - RNA, 25 nt, Artificial Sequence
  Description of Artificial Sequence: Synthetic oligonucleotide
cucgccuucacccccacccccacca

SEQ ID NO: 21379 - RNA, 25 nt, Artificial Sequence
  Description of Artificial Sequence: Synthetic oligonucleotide
acuucgccacagcucaggauuuguu

SEQ ID NO: 21380 - RNA, 25 nt, Artificial Sequence
  Description of Artificial Sequence: Synthetic oligonucleotide
uuaaaccuugggaaacugguucagg

SEQ ID NO: 21381 - RNA, 25 nt, Artificial Sequence
  Description of Artificial Sequence: Synthetic oligonucleotide
guccagguuuugcuuugauccuuuu

SEQ ID NO: 21382 - RNA, 25 nt, Artificial Sequence
  Description of Artificial Sequence: Synthetic oligonucleotide
ucaaaaacuggagacacagaagagg

SEQ ID NO: 21383 - RNA, 25 nt, Artificial Sequence
  Description of Artificial Sequence: Synthetic oligonucleotide
ggcucuaggaaaaaguuuuggaugg

SEQ ID NO: 21384 - RNA, 25 nt, Artificial Sequence
  Description of Artificial Sequence: Synthetic oligonucleotide
ggauuauguggaaacuacccugcga

SEQ ID NO: 21385 - RNA, 25 nt, Artificial Sequence
  Description of Artificial Sequence: Synthetic oligonucleotide
auucucugcugccagagcaggcucg

SEQ ID NO: 21386 - RNA, 25 nt, Artificial Sequence
  Description of Artificial Sequence: Synthetic oligonucleotide
ggcgcuuccaccccagugcagccuu

SEQ ID NO: 21387 - RNA, 25 nt, Artificial Sequence
  Description of Artificial Sequence: Synthetic oligonucleotide
uccccuggcgguggugaaagagacu

SEQ ID NO: 21388 - RNA, 25 nt, Artificial Sequence
  Description of Artificial Sequence: Synthetic oligonucleotide
ucgggagucgcugcuuccaaagugc

SEQ ID NO: 21389 - RNA, 25 nt, Artificial Sequence
  Description of Artificial Sequence: Synthetic oligonucleotide
cccgccgugagugagcucucacccc

SEQ ID NO: 21390 - RNA, 25 nt, Artificial Sequence
  Description of Artificial Sequence: Synthetic oligonucleotide
cagucagccaaaugagccucuucgg

SEQ ID NO: 21391 - RNA, 25 nt, Artificial Sequence
  Description of Artificial Sequence: Synthetic oligonucleotide
ggcuucuccugcugacaucugcccu

SEQ ID NO: 21392 - RNA, 25 nt, Artificial Sequence
  Description of Artificial Sequence: Synthetic oligonucleotide
uggccggccagagacaggggacuca

SEQ ID NO: 21393 - RNA, 25 nt, Artificial Sequence
  Description of Artificial Sequence: Synthetic oligonucleotide
aggcggaauccaaccugaguaguaa

SEQ ID NO: 21394 - RNA, 25 nt, Artificial Sequence
  Description of Artificial Sequence: Synthetic oligonucleotide
aauuccaguuuuccagcaacaagga

SEQ ID NO: 21395 - RNA, 25 nt, Artificial Sequence
  Description of Artificial Sequence: Synthetic oligonucleotide
aacagaacggaguacaagauccuca

SEQ ID NO: 21396 - RNA, 25 nt, Artificial Sequence
  Description of Artificial Sequence: Synthetic oligonucleotide
agcaugagagaauuauuacuguguc

SEQ ID NO: 21397 - RNA, 25 nt, Artificial Sequence
  Description of Artificial Sequence: Synthetic oligonucleotide
cuacuaauggaaguauucacagccc

SEQ ID NO: 21398 - RNA, 25 nt, Artificial Sequence
  Description of Artificial Sequence: Synthetic oligonucleotide
caagguuuccucauacuuauccaag

SEQ ID NO: 21399 - RNA, 25 nt, Artificial Sequence
  Description of Artificial Sequence: Synthetic oligonucleotide
gaaauacggucuugguauggagauu

SEQ ID NO: 21400 - RNA, 25 nt, Artificial Sequence
  Description of Artificial Sequence: Synthetic oligonucleotide
uaguagcaguagaggaaaauguaug

SEQ ID NO: 21401 - RNA, 25 nt, Artificial Sequence
  Description of Artificial Sequence: Synthetic oligonucleotide
ggauacaacuuacguuugaugaaag

SEQ ID NO: 21402 - RNA, 25 nt, Artificial Sequence
  Description of Artificial Sequence: Synthetic oligonucleotide
gauuugggcuugaagacccagaaga

SEQ ID NO: 21403 - RNA, 25 nt, Artificial Sequence
  Description of Artificial Sequence: Synthetic oligonucleotide
augacauaugcaaguaugauuuugu

SEQ ID NO: 21404 - RNA, 25 nt, Artificial Sequence
  Description of Artificial Sequence: Synthetic oligonucleotide
uagaaguugaggaacccagugaugg

SEQ ID NO: 21405 - RNA, 25 nt, Artificial Sequence
  Description of Artificial Sequence: Synthetic oligonucleotide
gaacuauauuagggcgcuggugugg

SEQ ID NO: 21406 - RNA, 25 nt, Artificial Sequence
  Description of Artificial Sequence: Synthetic oligonucleotide
guucugguacuguaccaggaaaaca

SEQ ID NO: 21407 - RNA, 25 nt, Artificial Sequence
  Description of Artificial Sequence: Synthetic oligonucleotide
agauuucuaaaggaaaucaaauuag

SEQ ID NO: 21408 - RNA, 25 nt, Artificial Sequence
  Description of Artificial Sequence: Synthetic oligonucleotide
ggauaagauuuguaucugaugaaua

SEQ ID NO: 21409 - RNA, 25 nt, Artificial Sequence
  Description of Artificial Sequence: Synthetic oligonucleotide
auuuuccuucugaaccaggguucug

SEQ ID NO: 21410 - RNA, 25 nt, Artificial Sequence
  Description of Artificial Sequence: Synthetic oligonucleotide
gcauccacuacaacauugucaugcc

SEQ ID NO: 21411 - RNA, 25 nt, Artificial Sequence
  Description of Artificial Sequence: Synthetic oligonucleotide
cacaauucacagaagcugugagucc

SEQ ID NO: 21412 - RNA, 25 nt, Artificial Sequence
  Description of Artificial Sequence: Synthetic oligonucleotide
cuucagugcuacccccuucagcuuu

SEQ ID NO: 21413 - RNA, 25 nt, Artificial Sequence
  Description of Artificial Sequence: Synthetic oligonucleotide
ugccacuggaccugcuuaauaaugc

SEQ ID NO: 21414 - RNA, 25 nt, Artificial Sequence
  Description of Artificial Sequence: Synthetic oligonucleotide
cuauaacugccuuuaguaccuugga

SEQ ID NO: 21415 - RNA, 25 nt, Artificial Sequence
  Description of Artificial Sequence: Synthetic oligonucleotide
aagaccuuauucgauaucuugaacc

SEQ ID NO: 21416 - RNA, 25 nt, Artificial Sequence
  Description of Artificial Sequence: Synthetic oligonucleotide
cagagagauggcaguuggacuuaga

SEQ ID NO: 21417 - RNA, 25 nt, Artificial Sequence
  Description of Artificial Sequence: Synthetic oligonucleotide
aagaucuauauaggccaacuuggca

SEQ ID NO: 21418 - RNA, 25 nt, Artificial Sequence
  Description of Artificial Sequence: Synthetic oligonucleotide
aacuucuuggcaaggcuuuuguuuu

SEQ ID NO: 21419 - RNA, 25 nt, Artificial Sequence
  Description of Artificial Sequence: Synthetic oligonucleotide
uuggaagaaaauccagaguggugga

SEQ ID NO: 21420 - RNA, 25 nt, Artificial Sequence
  Description of Artificial Sequence: Synthetic oligonucleotide
aucugaaccuucuaacagaggaggu

SEQ ID NO: 21421 - RNA, 25 nt, Artificial Sequence
  Description of Artificial Sequence: Synthetic oligonucleotide
uaagauuauacagcugcacaccucg

SEQ ID NO: 21422 - RNA, 25 nt, Artificial Sequence
  Description of Artificial Sequence: Synthetic oligonucleotide
guaacuucucaguguccauaaggga

SEQ ID NO: 21423 - RNA, 25 nt, Artificial Sequence
  Description of Artificial Sequence: Synthetic oligonucleotide
aagaacuaaagagaaccgauaccau

SEQ ID NO: 21424 - RNA, 25 nt, Artificial Sequence
  Description of Artificial Sequence: Synthetic oligonucleotide
uuuucuggccagguugucuccuggu

SEQ ID NO: 21425 - RNA, 25 nt, Artificial Sequence
  Description of Artificial Sequence: Synthetic oligonucleotide
uuaaacgcuguggugggaacugugc

SEQ ID NO: 21426 - RNA, 25 nt, Artificial Sequence
  Description of Artificial Sequence: Synthetic oligonucleotide
ccuguugucuccacaauugcaauga

SEQ ID NO: 21427 - RNA, 25 nt, Artificial Sequence
  Description of Artificial Sequence: Synthetic oligonucleotide
aaugucaaugugucccaagcaaagu

SEQ ID NO: 21428 - RNA, 25 nt, Artificial Sequence
  Description of Artificial Sequence: Synthetic oligonucleotide
uuacuaaaaaauaccacgagguccu

SEQ ID NO: 21429 - RNA, 25 nt, Artificial Sequence
  Description of Artificial Sequence: Synthetic oligonucleotide
uucaguugagaccaaagaccggugu

SEQ ID NO: 21430 - RNA, 25 nt, Artificial Sequence
  Description of Artificial Sequence: Synthetic oligonucleotide
ucaggggauugcacaaaucacucac

SEQ ID NO: 21431 - RNA, 25 nt, Artificial Sequence
  Description of Artificial Sequence: Synthetic oligonucleotide
ccgacguggcccuggagcaccauga

SEQ ID NO: 21432 - RNA, 25 nt, Artificial Sequence
  Description of Artificial Sequence: Synthetic oligonucleotide
aggagugugacugugugugcagagg

SEQ ID NO: 21433 - RNA, 25 nt, Artificial Sequence
  Description of Artificial Sequence: Synthetic oligonucleotide
ggagcacaggaggauagccgcauca

SEQ ID NO: 21434 - RNA, 25 nt, Artificial Sequence
  Description of Artificial Sequence: Synthetic oligonucleotide
accaccagcagcucuugcccagagc

SEQ ID NO: 21435 - RNA, 25 nt, Artificial Sequence
  Description of Artificial Sequence: Synthetic oligonucleotide
cugugcagugcaguggcugauucua

SEQ ID NO: 21436 - RNA, 25 nt, Artificial Sequence
  Description of Artificial Sequence: Synthetic oligonucleotide
auuagagaacguaugcguuaucucc

SEQ ID NO: 21437 - RNA, 25 nt, Artificial Sequence
  Description of Artificial Sequence: Synthetic oligonucleotide
cauccuuaaucucaguuguuugcuu

SEQ ID NO: 21438 - RNA, 25 nt, Artificial Sequence
  Description of Artificial Sequence: Synthetic oligonucleotide
ucaaggaccuuucaucuucaggauu

SEQ ID NO: 21439 - RNA, 25 nt, Artificial Sequence
  Description of Artificial Sequence: Synthetic oligonucleotide
uuacagugcauucugaaagaggaga

SEQ ID NO: 21440 - RNA, 25 nt, Artificial Sequence
  Description of Artificial Sequence: Synthetic oligonucleotide
acaucaaacagaauuaggaguugug

SEQ ID NO: 21441 - RNA, 25 nt, Artificial Sequence
  Description of Artificial Sequence: Synthetic oligonucleotide
gcaacagcucuuuugagaggaggcc

SEQ ID NO: 21442 - RNA, 25 nt, Artificial Sequence
  Description of Artificial Sequence: Synthetic oligonucleotide
cuaaaggacaggagaaaaggucuuc

SEQ ID NO: 21443 - RNA, 25 nt, Artificial Sequence
  Description of Artificial Sequence: Synthetic oligonucleotide
caaucguggaaagaaaauuaaaugu

SEQ ID NO: 21444 - RNA, 25 nt, Artificial Sequence
  Description of Artificial Sequence: Synthetic oligonucleotide
uuguauuaaauagaucaccagcuag

SEQ ID NO: 21445 - RNA, 25 nt, Artificial Sequence
  Description of Artificial Sequence: Synthetic oligonucleotide
guuucagaguuaccauguacguauu

SEQ ID NO: 21446 - RNA, 25 nt, Artificial Sequence
  Description of Artificial Sequence: Synthetic oligonucleotide
uccacuagcuggguucuguauuuca

SEQ ID NO: 21447 - RNA, 25 nt, Artificial Sequence
  Description of Artificial Sequence: Synthetic oligonucleotide
aguucuuucgauacggcuuagggua

SEQ ID NO: 21448 - RNA, 25 nt, Artificial Sequence
  Description of Artificial Sequence: Synthetic oligonucleotide
aaugucaguacaggaaaaaaacugu

SEQ ID NO: 21449 - RNA, 25 nt, Artificial Sequence
  Description of Artificial Sequence: Synthetic oligonucleotide
ugcaagugagcaccugauuccguug

SEQ ID NO: 21450 - RNA, 25 nt, Artificial Sequence
  Description of Artificial Sequence: Synthetic oligonucleotide
gccuugcuuaacucuaaagcuccau

SEQ ID NO: 21451 - RNA, 25 nt, Artificial Sequence
  Description of Artificial Sequence: Synthetic oligonucleotide
uguccugggccuaaaaucguauaaa

SEQ ID NO: 21452 - RNA, 25 nt, Artificial Sequence
  Description of Artificial Sequence: Synthetic oligonucleotide
ugcucauauucacauauguaaacca

SEQ ID NO: 21453 - RNA, 25 nt, Artificial Sequence
  Description of Artificial Sequence: Synthetic oligonucleotide
agaacauucuauguacuacaaaccu

SEQ ID NO: 21454 - RNA, 25 nt, Artificial Sequence
  Description of Artificial Sequence: Synthetic oligonucleotide
ugguuuuuaaaaaggaacuauguug

SEQ ID NO: 21455 - RNA, 25 nt, Artificial Sequence
  Description of Artificial Sequence: Synthetic oligonucleotide
gcuaugaauuaaacuugugucgugc

SEQ ID NO: 21456 - RNA, 25 nt, Artificial Sequence
  Description of Artificial Sequence: Synthetic oligonucleotide
cugauaggacagacuggauuuuuca

SEQ ID NO: 21457 - RNA, 25 nt, Artificial Sequence
  Description of Artificial Sequence: Synthetic oligonucleotide
auauuucuuauuaaaauuucugcca

SEQ ID NO: 21458 - RNA, 25 nt, Artificial Sequence
  Description of Artificial Sequence: Synthetic oligonucleotide
auuuagaagaagagaacuacauuca

SEQ ID NO: 21459 - RNA, 25 nt, Artificial Sequence
  Description of Artificial Sequence: Synthetic oligonucleotide
augguuuggaagagauaaaccugaa

SEQ ID NO: 21460 - RNA, 25 nt, Artificial Sequence
  Description of Artificial Sequence: Synthetic oligonucleotide
aaagaagaguggccuuaucuucacu

SEQ ID NO: 21461 - RNA, 25 nt, Artificial Sequence
  Description of Artificial Sequence: Synthetic oligonucleotide
uuuaucgauaagucaguuuauuugu

SEQ ID NO: 21462 - RNA, 25 nt, Artificial Sequence
  Description of Artificial Sequence: Synthetic oligonucleotide
uuucauuguguacauuuuuauauuc

SEQ ID NO: 21463 - RNA, 25 nt, Artificial Sequence
  Description of Artificial Sequence: Synthetic oligonucleotide
cuccuuuugacauuauaacuguugg

SEQ ID NO: 21464 - RNA, 25 nt, Artificial Sequence
  Description of Artificial Sequence: Synthetic oligonucleotide
gcuuuucuaaucuuguuaaauauau

SEQ ID NO: 21465 - RNA, 25 nt, Artificial Sequence
  Description of Artificial Sequence: Synthetic oligonucleotide
ucuauuuuuaccaaagguauuuaau

SEQ ID NO: 21466 - RNA, 25 nt, Artificial Sequence
  Description of Artificial Sequence: Synthetic oligonucleotide
uauucuuuuuuaugacaacuuagau

SEQ ID NO: 21467 - RNA, 25 nt, Artificial Sequence
  Description of Artificial Sequence: Synthetic oligonucleotide
ucaacuauuuuuagcuugguaaauu

SEQ ID NO: 21468 - RNA, 25 nt, Artificial Sequence
  Description of Artificial Sequence: Synthetic oligonucleotide
uuuucuaaacacaauuguuauagcc

SEQ ID NO: 21469 - RNA, 25 nt, Artificial Sequence
  Description of Artificial Sequence: Synthetic oligonucleotide
cagaggaacaaagaugauauaaaau

SEQ ID NO: 21470 - RNA, 25 nt, Artificial Sequence
  Description of Artificial Sequence: Synthetic oligonucleotide
uauuguugcucugacaaaaauacau

SEQ ID NO: 21471 - RNA, 25 nt, Artificial Sequence
  Description of Artificial Sequence: Synthetic oligonucleotide
uguauuucauucucguauggugcua

SEQ ID NO: 21472 - RNA, 25 nt, Artificial Sequence
  Description of Artificial Sequence: Synthetic oligonucleotide
agaguuagauuaaucugcauuuuaa

SEQ ID NO: 21473 - RNA, 25 nt, Artificial Sequence
  Description of Artificial Sequence: Synthetic oligonucleotide
aaaaacugaauuggaauagaauugg

SEQ ID NO: 21474 - RNA, 25 nt, Artificial Sequence
  Description of Artificial Sequence: Synthetic oligonucleotide
guaaguugcaaagacuuuuugaaaa

SEQ ID NO: 21475 - RNA, 25 nt, Artificial Sequence
  Description of Artificial Sequence: Synthetic oligonucleotide
auaauuaaauuaucauaucuuccau

SEQ ID NO: 21476 - RNA, 25 nt, Artificial Sequence
  Description of Artificial Sequence: Synthetic oligonucleotide
uuccuguuauuggagaugaaaauaa

SEQ ID NO: 21477 - RNA, 25 nt, Artificial Sequence
  Description of Artificial Sequence: Synthetic oligonucleotide
aaaagcaacuuaugaaaguagacau

SEQ ID NO: 21478 - RNA, 25 nt, Artificial Sequence
  Description of Artificial Sequence: Synthetic oligonucleotide
uucagauccagccauuacuaaccua

SEQ ID NO: 21479 - RNA, 25 nt, Artificial Sequence
  Description of Artificial Sequence: Synthetic oligonucleotide
auuccuuuuuuggggaaaucugagc

SEQ ID NO: 21480 - RNA, 25 nt, Artificial Sequence
  Description of Artificial Sequence: Synthetic oligonucleotide
ccuagcucagaaaaacauaaagcac

SEQ ID NO: 21481 - RNA, 25 nt, Artificial Sequence
  Description of Artificial Sequence: Synthetic oligonucleotide
ccuugaaaaagacuuggcagcuucc

SEQ ID NO: 21482 - RNA, 25 nt, Artificial Sequence
  Description of Artificial Sequence: Synthetic oligonucleotide
cugauaaagcgugcugugcugugca

SEQ ID NO: 21483 - RNA, 25 nt, Artificial Sequence
  Description of Artificial Sequence: Synthetic oligonucleotide
aguaggaacacauccuauuuauugu

SEQ ID NO: 21484 - RNA, 25 nt, Artificial Sequence
  Description of Artificial Sequence: Synthetic oligonucleotide
ugauguugugguuuuauuaucuuaa

SEQ ID NO: 21485 - RNA, 25 nt, Artificial Sequence
  Description of Artificial Sequence: Synthetic oligonucleotide
aacucuguuccauacacuuguauaa

SEQ ID NO: 21486 - RNA, 25 nt, Artificial Sequence
  Description of Artificial Sequence: Synthetic oligonucleotide
aauacauggauauuuuuauguacag

SEQ ID NO: 21487 - RNA, 25 nt, Artificial Sequence
  Description of Artificial Sequence: Synthetic oligonucleotide
gaaguaugucucuuaaccaguucac

SEQ ID NO: 21488 - RNA, 25 nt, Artificial Sequence
  Description of Artificial Sequence: Synthetic oligonucleotide
cuuauuguacucuggcaauuuaaaa

SEQ ID NO: 21489 - RNA, 25 nt, Artificial Sequence
  Description of Artificial Sequence: Synthetic oligonucleotide
agaaaaucaguaaaauauuuugcuu

SEQ ID NO: 21490 - RNA, 25 nt, Artificial Sequence
  Description of Artificial Sequence: Synthetic oligonucleotide
uguaaaaugcuuaauaucgugccua

SEQ ID NO: 21491 - RNA, 25 nt, Artificial Sequence
  Description of Artificial Sequence: Synthetic oligonucleotide
agguuauguggugacuauuugaauc

SEQ ID NO: 21492 - RNA, 25 nt, Artificial Sequence
  Description of Artificial Sequence: Synthetic oligonucleotide
caaaaauguauugaaucaucaaaua

SEQ ID NO: 21493 - RNA, 25 nt, Artificial Sequence
  Description of Artificial Sequence: Synthetic oligonucleotide
aaaagaauguggcuauuuuggggag

SEQ ID NO: 21494 - RNA, 25 nt, Artificial Sequence
  Description of Artificial Sequence: Synthetic oligonucleotide
auguggcuauuuuggggagaaaauu

SEQ ID NO: 21495 - RNA, 3997 nt, Homo sapiens
ucucaggggccgcggccggggcuggagaacgcugcugcuccgcucgccugccccgcuagauucggcgcugcccgcccccugcagccugugcugcagcugccggccaccggagggggcgaacaaacaaacgucaaccuguuguuugucccgucaccauuuaucagcucagcaccacaaggaagugcggcacccacacgcgcucggaaaguucagcaugcaggaaguuuggggagagcucggcgauuagcacagcgacccgggccagcgcagggcgagcgcaggcggcgagagcgcagggcggcgcggcgucggucccgggagcagaacccggcuuuuucuuggagcgacgcugucucuagucgcugaucccaaaugcaccggcucaucuuugucuacacucuaaucugcgcaaacuuuugcagcugucgggacacuucugcaaccccgcagagcgcauccaucaaagcuuugcgcaacgccaaccucaggcgagaugagagcaaucaccucacagacuuguaccgaagagaugagaccauccaggugaaaggaaacggcuacgugcagaguccuagauucccgaacagcuaccccaggaaccugcuccugacauggcggcuucacucucaggagaauacacggauacagcuaguguuugacaaucaguuuggauuagaggaagcagaaaaugauaucuguagguaugauuuuguggaaguugaagauauauccgaaaccaguaccauuauuagaggacgaugguguggacacaaggaaguuccuccaaggauaaaaucaagaacgaaccaaauuaaaaucacauucaaguccgaugacuacuuuguggcuaaaccuggauucaagauuuauuauucuuugcuggaagauuuccaacccgcagcagcuucagagaccaacugggaaucugucacaagcucuauuucagggguauccuauaacucuccaucaguaacggaucccacucugauugcggaugcucuggacaaaaaaauugcagaauuugauacaguggaagaucugcucaaguacuucaauccagagucauggcaagaagaucuugagaauauguaucuggacaccccucgguaucgaggcaggucauaccaugaccggaagucaaaaguugaccuggauaggcucaaugaugaugccaagcguuacaguugcacucccaggaauuacucggucaauauaagagaagagcugaaguuggccaauguggucuucuuuccacguugccuccucgugcagcgcuguggaggaaauuguggcuguggaacugucaacuggagguccugcacaugcaauucagggaaaaccgugaaaaaguaucaugagguauuacaguuugagccuggccacaucaagaggagggguagagcuaagaccauggcucuaguugacauccaguuggaucaccaugaacgaugugauuguaucugcagcucaagaccaccucgauaagagaaugugcacauccuuacauuaagccugaaagaaccuuuaguuuaaggagggugagauaagagacccuuuuccuaccagcaaccaaacuuacuacuagccugcaaugcaaugaacacaagugguugcugagucucagccuugcuuuguuaaugccauggcaaguagaaagguauaucaucaacuucuauaccuaagaauauaggauugcauuuaauaauaguguuugagguuauauaugcacaaacacacacagaaauauauucaugucuauguguauauagaucaaauguuuuuuuugguauauauaaccagguacaccagagcuuacauauguuugaguuagacucuuaaaauccuuugccaaaauaagggauggucaaauauaugaaacaugucuuuagaaaauuuaggagauaaauuuauuuuuaaauuuugaaacacaaaacaauuuugaaucuugcucucuuaaagaaagcaucuuguauauuaaaaaucaaaagaugaggcuuucuuacauauacaucuuaguugauuauuaaaaaaggaaaaauaugguuuccagagaaaaggccaauaccuaagcauuuuuuccaugagaagcacugcauacuuaccuauguggacuauaauaaccugucuccaaaaccaugccauaauaauauaagugcuuuagaaauuaaaucauuguguuuuuuaugcauuuugcugaggcaugcuuauucauuuaacaccuaucucaaaaacuuacuuagaagguuuuuuauuauaguccuacaaaagacaauguauaagcuguaacagaauuuugaauuguuuuucuuugcaaaaccccuccacaaaagcaaauccuuucaagaauggcaugggcauucuguaugaaccuuuccagaugguguucagugaaagauguggguaguugagaacuuaaaaagugaacauugaaacaucgacguaacuggaaauuaggugggauauuugauaggauccauaucuaauaauggauucgaacucuccaaacuacaccaauuaauuuaauguaucuugcuuuuguguucccgucuuuuugaaauauagacauggauuuauaauggcauuuuauauuuggcaggccaucauagauuauuuacaaccuaaaagcuuuuguguaucaaaaaaaucacauuuuauuaauguaaauuucuaaucguauacuugcucacuguucugauuuccuguuucugaaccaaguaaaaucaguccuagaggcuaugguucuuaaucuauggagcuugcuuuaagaagccaguugucaauugugguaacacaaguuuggcccugcuguccuacuguuuaauagaaaacuguuuuacauugguuaaugguauuuagaguaauuuuuucucucugccuccuuugugucuguuuuaaaggagacuaacuccaggaguaggaaaugauucaucauccuccaaagcaagaggcuuaagagagaaacaccgaaauucagauagcucagggacugcuaacagagaacuacauuuuucuuauugccuugaaaguuaaaaggaaagcagauuucuucagugacuuugugguccuacuaacuacaaccaguuugggugacagggcugguaaagucccaguguuagaugagugaccuaaauauacuuagauuucuaaguauggugcucucagguccaaguucaacuauucuuaagcagugcaauucuucccaguuauuugagaugaaagaucucugcuuauugaagauguaccuucuaaaacuuuccuaaaagugucugauguuuuuacucaagaggggagugguaaaauuaaauacucuauuguucaauucucuaaaaucccagaacacaaucagaaauagcucaggcagacacuaauaauuaagaacgcucuuccucuucauaacugcuuugcaaguuuccugugaaaacaucaguuuccuguaccaaagucaaaaugaacguuacaucacucuaaccugaacagcucacaauguagcuguaaauauaaaaaaugagaguguucuacccaguuuucaauaaaccuuccaggcugcaauaaccagcaagguuuucaguuaaagcccuaucugcacuuuuuauuuauuagcugaaauguaagcaggcauauucacucacuuuucuuugccuuuccugagaguuuuauuaaaacuucucccuugguuaccuguuaucuuuugcacuucuaacauguagccaauaaaucuauuugauagccaucaaaggaauaaaaagcuggccguacaaauuacauuucaaaacaaacccuaauaaauccacauuuccgcauggcucauucaccuggaauaaugccuuuuauugaauauguucuuauagggcaaaacacuuucauaaguagaguuuuuuauguuuuuugucauaucgguaacaugcagcuuuuuccucucauagcauuuucuauagcgaauguaauaugccucuuaucuucaugaaaaauaaauauugcuuuugaacaaaacuaaaaa

SEQ ID NO: 21496 - RNA, 3979 nt, Homo sapiens
ucucaggggccgcggccggggcuggagaacgcugcugcuccgcucgccugccccgcuagauucggcgcugcccgcccccugcagccugugcugcagcugccggccaccggagggggcgaacaaacaaacgucaaccuguuguuugucccgucaccauuuaucagcucagcaccacaaggaagugcggcacccacacgcgcucggaaaguucagcaugcaggaaguuuggggagagcucggcgauuagcacagcgacccgggccagcgcagggcgagcgcaggcggcgagagcgcagggcggcgcggcgucggucccgggagcagaacccggcuuuuucuuggagcgacgcugucucuagucgcugaucccaaaugcaccggcucaucuuugucuacacucuaaucugcgcaaacuuuugcagcugucgggacacuucugcaaccccgcagagcgcauccaucaaagcuuugcgcaacgccaaccucaggcgagaugacuuguaccgaagagaugagaccauccaggugaaaggaaacggcuacgugcagaguccuagauucccgaacagcuaccccaggaaccugcuccugacauggcggcuucacucucaggagaauacacggauacagcuaguguuugacaaucaguuuggauuagaggaagcagaaaaugauaucuguagguaugauuuuguggaaguugaagauauauccgaaaccaguaccauuauuagaggacgaugguguggacacaaggaaguuccuccaaggauaaaaucaagaacgaaccaaauuaaaaucacauucaaguccgaugacuacuuuguggcuaaaccuggauucaagauuuauuauucuuugcuggaagauuuccaacccgcagcagcuucagagaccaacugggaaucugucacaagcucuauuucagggguauccuauaacucuccaucaguaacggaucccacucugauugcggaugcucuggacaaaaaaauugcagaauuugauacaguggaagaucugcucaaguacuucaauccagagucauggcaagaagaucuugagaauauguaucuggacaccccucgguaucgaggcaggucauaccaugaccggaagucaaaaguugaccuggauaggcucaaugaugaugccaagcguuacaguugcacucccaggaauuacucggucaauauaagagaagagcugaaguuggccaauguggucuucuuuccacguugccuccucgugcagcgcuguggaggaaauuguggcuguggaacugucaacuggagguccugcacaugcaauucagggaaaaccgugaaaaaguaucaugagguauuacaguuugagccuggccacaucaagaggagggguagagcuaagaccauggcucuaguugacauccaguuggaucaccaugaacgaugugauuguaucugcagcucaagaccaccucgauaagagaaugugcacauccuuacauuaagccugaaagaaccuuuaguuuaaggagggugagauaagagacccuuuuccuaccagcaaccaaacuuacuacuagccugcaaugcaaugaacacaagugguugcugagucucagccuugcuuuguuaaugccauggcaaguagaaagguauaucaucaacuucuauaccuaagaauauaggauugcauuuaauaauaguguuugagguuauauaugcacaaacacacacagaaauauauucaugucuauguguauauagaucaaauguuuuuuuugguauauauaaccagguacaccagagcuuacauauguuugaguuagacucuuaaaauccuuugccaaaauaagggauggucaaauauaugaaacaugucuuuagaaaauuuaggagauaaauuuauuuuuaaauuuugaaacacaaaacaauuuugaaucuugcucucuuaaagaaagcaucuuguauauuaaaaaucaaaagaugaggcuuucuuacauauacaucuuaguugauuauuaaaaaaggaaaaauaugguuuccagagaaaaggccaauaccuaagcauuuuuuccaugagaagcacugcauacuuaccuauguggacuauaauaaccugucuccaaaaccaugccauaauaauauaagugcuuuagaaauuaaaucauuguguuuuuuaugcauuuugcugaggcaugcuuauucauuuaacaccuaucucaaaaacuuacuuagaagguuuuuuauuauaguccuacaaaagacaauguauaagcuguaacagaauuuugaauuguuuuucuuugcaaaaccccuccacaaaagcaaauccuuucaagaauggcaugggcauucuguaugaaccuuuccagaugguguucagugaaagauguggguaguugagaacuuaaaaagugaacauugaaacaucgacguaacuggaaauuaggugggauauuugauaggauccauaucuaauaauggauucgaacucuccaaacuacaccaauuaauuuaauguaucuugcuuuuguguucccgucuuuuugaaauauagacauggauuuauaauggcauuuuauauuuggcaggccaucauagauuauuuacaaccuaaaagcuuuuguguaucaaaaaaaucacauuuuauuaauguaaauuucuaaucguauacuugcucacuguucugauuuccuguuucugaaccaaguaaaaucaguccuagaggcuaugguucuuaaucuauggagcuugcuuuaagaagccaguugucaauugugguaacacaaguuuggcccugcuguccuacuguuuaauagaaaacuguuuuacauugguuaaugguauuuagaguaauuuuuucucucugccuccuuugugucuguuuuaaaggagacuaacuccaggaguaggaaaugauucaucauccuccaaagcaagaggcuuaagagagaaacaccgaaauucagauagcucagggacugcuaacagagaacuacauuuuucuuauugccuugaaaguuaaaaggaaagcagauuucuucagugacuuugugguccuacuaacuacaaccaguuugggugacagggcugguaaagucccaguguuagaugagugaccuaaauauacuuagauuucuaaguauggugcucucagguccaaguucaacuauucuuaagcagugcaauucuucccaguuauuugagaugaaagaucucugcuuauugaagauguaccuucuaaaacuuuccuaaaagugucugauguuuuuacucaagaggggagugguaaaauuaaauacucuauuguucaauucucuaaaaucccagaacacaaucagaaauagcucaggcagacacuaauaauuaagaacgcucuuccucuucauaacugcuuugcaaguuuccugugaaaacaucaguuuccuguaccaaagucaaaaugaacguuacaucacucuaaccugaacagcucacaauguagcuguaaauauaaaaaaugagaguguucuacccaguuuucaauaaaccuuccaggcugcaauaaccagcaagguuuucaguuaaagcccuaucugcacuuuuuauuuauuagcugaaauguaagcaggcauauucacucacuuuucuuugccuuuccugagaguuuuauuaaaacuucucccuugguuaccuguuaucuuuugcacuucuaacauguagccaauaaaucuauuugauagccaucaaaggaauaaaaagcuggccguacaaauuacauuucaaaacaaacccuaauaaauccacauuuccgcauggcucauucaccuggaauaaugccuuuuauugaauauguucuuauagggcaaaacacuuucauaaguagaguuuuuuauguuuuuugucauaucgguaacaugcagcuuuuuccucucauagcauuuucuauagcgaauguaauaugccucuuaucuucaugaaaaauaaauauugcuuuugaacaaaacuaaaaa

SEQ ID NO: 21497 - RNA, 19 nt, Artificial Sequence
  Description of Artificial Sequence: Synthetic oligonucleotide
ucucaggggccgcggccgg

SEQ ID NO: 21498 - RNA, 19 nt, Artificial Sequence
  Description of Artificial Sequence: Synthetic oligonucleotide
gggcuggagaacgcugcug

SEQ ID NO: 21499 - RNA, 19 nt, Artificial Sequence
  Description of Artificial Sequence: Synthetic oligonucleotide
gcuccgcucgccugccccg

SEQ ID NO: 21500 - RNA, 19 nt, Artificial Sequence
  Description of Artificial Sequence: Synthetic oligonucleotide
gcuagauucggcgcugccc

SEQ ID NO: 21501 - RNA, 19 nt, Artificial Sequence
  Description of Artificial Sequence: Synthetic oligonucleotide
cgcccccugcagccugugc

SEQ ID NO: 21502 - RNA, 19 nt, Artificial Sequence
  Description of Artificial Sequence: Synthetic oligonucleotide
cugcagcugccggccaccg

SEQ ID NO: 21503 - RNA, 19 nt, Artificial Sequence
  Description of Artificial Sequence: Synthetic oligonucleotide
ggagggggcgaacaaacaa

SEQ ID NO: 21504 - RNA, 19 nt, Artificial Sequence
  Description of Artificial Sequence: Synthetic oligonucleotide
aacgucaaccuguuguuug

SEQ ID NO: 21505 - RNA, 19 nt, Artificial Sequence
  Description of Artificial Sequence: Synthetic oligonucleotide
gucccgucaccauuuauca

SEQ ID NO: 21506 - RNA, 19 nt, Artificial Sequence
  Description of Artificial Sequence: Synthetic oligonucleotide
agcucagcaccacaaggaa

SEQ ID NO: 21507 - RNA, 19 nt, Artificial Sequence
  Description of Artificial Sequence: Synthetic oligonucleotide
agugcggcacccacacgcg

SEQ ID NO: 21508 - RNA, 19 nt, Artificial Sequence
  Description of Artificial Sequence: Synthetic oligonucleotide
gcucggaaaguucagcaug

SEQ ID NO: 21509 - RNA, 19 nt, Artificial Sequence
  Description of Artificial Sequence: Synthetic oligonucleotide
gcaggaaguuuggggagag

SEQ ID NO: 21510 - RNA, 19 nt, Artificial Sequence
  Description of Artificial Sequence: Synthetic oligonucleotide
gcucggcgauuagcacagc

SEQ ID NO: 21511 - RNA, 19 nt, Artificial Sequence
  Description of Artificial Sequence: Synthetic oligonucleotide
cgacccgggccagcgcagg

SEQ ID NO: 21512 - RNA, 19 nt, Artificial Sequence
  Description of Artificial Sequence: Synthetic oligonucleotide
ggcgagcgcaggcggcgag

SEQ ID NO: 21513 - RNA, 19 nt, Artificial Sequence
  Description of Artificial Sequence: Synthetic oligonucleotide
gagcgcagggcggcgcggc

SEQ ID NO: 21514 - RNA, 19 nt, Artificial Sequence
  Description of Artificial Sequence: Synthetic oligonucleotide
cgucggucccgggagcaga

SEQ ID NO: 21515 - RNA, 19 nt, Artificial Sequence
  Description of Artificial Sequence: Synthetic oligonucleotide
aacccggcuuuuucuugga

SEQ ID NO: 21516 - RNA, 19 nt, Artificial Sequence
  Description of Artificial Sequence: Synthetic oligonucleotide
agcgacgcugucucuaguc

SEQ ID NO: 21517 - RNA, 19 nt, Artificial Sequence
  Description of Artificial Sequence: Synthetic oligonucleotide
cgcugaucccaaaugcacc

SEQ ID NO: 21518 - RNA, 19 nt, Artificial Sequence
  Description of Artificial Sequence: Synthetic oligonucleotide
cggcucaucuuugucuaca

SEQ ID NO: 21519 - RNA, 19 nt, Artificial Sequence
  Description of Artificial Sequence: Synthetic oligonucleotide
acucuaaucugcgcaaacu

SEQ ID NO: 21520 - RNA, 19 nt, Artificial Sequence
  Description of Artificial Sequence: Synthetic oligonucleotide
uuuugcagcugucgggaca

SEQ ID NO: 21521 - RNA, 19 nt, Artificial Sequence
  Description of Artificial Sequence: Synthetic oligonucleotide
acuucugcaaccccgcaga

SEQ ID NO: 21522 - RNA, 19 nt, Artificial Sequence
  Description of Artificial Sequence: Synthetic oligonucleotide
agcgcauccaucaaagcuu

SEQ ID NO: 21523 - RNA, 19 nt, Artificial Sequence
  Description of Artificial Sequence: Synthetic oligonucleotide
uugcgcaacgccaaccuca

SEQ ID NO: 21524 - RNA, 19 nt, Artificial Sequence
  Description of Artificial Sequence: Synthetic oligonucleotide
aggcgagaugagagcaauc

SEQ ID NO: 21525 - RNA, 19 nt, Artificial Sequence
  Description of Artificial Sequence: Synthetic oligonucleotide
caccucacagacuuguacc

SEQ ID NO: 21526 - RNA, 19 nt, Artificial Sequence
  Description of Artificial Sequence: Synthetic oligonucleotide
cgaagagaugagaccaucc

SEQ ID NO: 21527 - RNA, 19 nt, Artificial Sequence
  Description of Artificial Sequence: Synthetic oligonucleotide
caggugaaaggaaacggcu

SEQ ID NO: 21528 - RNA, 19 nt, Artificial Sequence
  Description of Artificial Sequence: Synthetic oligonucleotide
uacgugcagaguccuagau

SEQ ID NO: 21529 - RNA, 19 nt, Artificial Sequence
  Description of Artificial Sequence: Synthetic oligonucleotide
uucccgaacagcuacccca

SEQ ID NO: 21530 - RNA, 19 nt, Artificial Sequence
  Description of Artificial Sequence: Synthetic oligonucleotide
aggaaccugcuccugacau

SEQ ID NO: 21531 - RNA, 19 nt, Artificial Sequence
  Description of Artificial Sequence: Synthetic oligonucleotide
uggcggcuucacucucagg

SEQ ID NO: 21532 - RNA, 19 nt, Artificial Sequence
  Description of Artificial Sequence: Synthetic oligonucleotide
gagaauacacggauacagc

SEQ ID NO: 21533 - RNA, 19 nt, Artificial Sequence
  Description of Artificial Sequence: Synthetic oligonucleotide
cuaguguuugacaaucagu

SEQ ID NO: 21534 - RNA, 19 nt, Artificial Sequence
  Description of Artificial Sequence: Synthetic oligonucleotide
uuuggauuagaggaagcag

SEQ ID NO: 21535 - RNA, 19 nt, Artificial Sequence
  Description of Artificial Sequence: Synthetic oligonucleotide
gaaaaugauaucuguaggu

SEQ ID NO: 21536 - RNA, 19 nt, Artificial Sequence
  Description of Artificial Sequence: Synthetic oligonucleotide
uaugauuuuguggaaguug

SEQ ID NO: 21537 - RNA, 19 nt, Artificial Sequence
  Description of Artificial Sequence: Synthetic oligonucleotide
gaagauauauccgaaacca

SEQ ID NO: 21538 - RNA, 19 nt, Artificial Sequence
  Description of Artificial Sequence: Synthetic oligonucleotide
aguaccauuauuagaggac

SEQ ID NO: 21539 - RNA, 19 nt, Artificial Sequence
  Description of Artificial Sequence: Synthetic oligonucleotide
cgaugguguggacacaagg

SEQ ID NO: 21540 - RNA, 19 nt, Artificial Sequence
  Description of Artificial Sequence: Synthetic oligonucleotide
gaaguuccuccaaggauaa

SEQ ID NO: 21541 - RNA, 19 nt, Artificial Sequence
  Description of Artificial Sequence: Synthetic oligonucleotide
aaaucaagaacgaaccaaa

SEQ ID NO: 21542 - RNA, 19 nt, Artificial Sequence
  Description of Artificial Sequence: Synthetic oligonucleotide
auuaaaaucacauucaagu

SEQ ID NO: 21543 - RNA, 19 nt, Artificial Sequence
  Description of Artificial Sequence: Synthetic oligonucleotide
uccgaugacuacuuugugg

SEQ ID NO: 21544 - RNA, 19 nt, Artificial Sequence
  Description of Artificial Sequence: Synthetic oligonucleotide
gcuaaaccuggauucaaga

SEQ ID NO: 21545 - RNA, 19 nt, Artificial Sequence
  Description of Artificial Sequence: Synthetic oligonucleotide
auuuauuauucuuugcugg

SEQ ID NO: 21546 - RNA, 19 nt, Artificial Sequence
  Description of Artificial Sequence: Synthetic oligonucleotide
gaagauuuccaacccgcag

SEQ ID NO: 21547 - RNA, 19 nt, Artificial Sequence
  Description of Artificial Sequence: Synthetic oligonucleotide
gcagcuucagagaccaacu

SEQ ID NO: 21548 - RNA, 19 nt, Artificial Sequence
  Description of Artificial Sequence: Synthetic oligonucleotide
ugggaaucugucacaagcu

SEQ ID NO: 21549 - RNA, 19 nt, Artificial Sequence
  Description of Artificial Sequence: Synthetic oligonucleotide
ucuauuucagggguauccu

SEQ ID NO: 21550 - RNA, 19 nt, Artificial Sequence
  Description of Artificial Sequence: Synthetic oligonucleotide
uauaacucuccaucaguaa

SEQ ID NO: 21551 - RNA, 19 nt, Artificial Sequence
  Description of Artificial Sequence: Synthetic oligonucleotide
acggaucccacucugauug

SEQ ID NO: 21552 - RNA, 19 nt, Artificial Sequence
  Description of Artificial Sequence: Synthetic oligonucleotide
gcggaugcucuggacaaaa

SEQ ID NO: 21553 - RNA, 19 nt, Artificial Sequence
  Description of Artificial Sequence: Synthetic oligonucleotide
aaaauugcagaauuugaua

SEQ ID NO: 21554 - RNA, 19 nt, Artificial Sequence
  Description of Artificial Sequence: Synthetic oligonucleotide
acaguggaagaucugcuca

SEQ ID NO: 21555 - RNA, 19 nt, Artificial Sequence
  Description of Artificial Sequence: Synthetic oligonucleotide
aaguacuucaauccagagu

SEQ ID NO: 21556 - RNA, 19 nt, Artificial Sequence
  Description of Artificial Sequence: Synthetic oligonucleotide
ucauggcaagaagaucuug

SEQ ID NO: 21557 - RNA, 19 nt, Artificial Sequence
  Description of Artificial Sequence: Synthetic oligonucleotide
gagaauauguaucuggaca

SEQ ID NO: 21558 - RNA, 19 nt, Artificial Sequence
  Description of Artificial Sequence: Synthetic oligonucleotide
accccucgguaucgaggca

SEQ ID NO: 21559 - RNA, 19 nt, Artificial Sequence
  Description of Artificial Sequence: Synthetic oligonucleotide
aggucauaccaugaccgga

SEQ ID NO: 21560 - RNA, 19 nt, Artificial Sequence
  Description of Artificial Sequence: Synthetic oligonucleotide
aagucaaaaguugaccugg

SEQ ID NO: 21561 - RNA, 19 nt, Artificial Sequence
  Description of Artificial Sequence: Synthetic oligonucleotide
gauaggcucaaugaugaug

SEQ ID NO: 21562 - RNA, 19 nt, Artificial Sequence
  Description of Artificial Sequence: Synthetic oligonucleotide
gccaagcguuacaguugca

SEQ ID NO: 21563 - RNA, 19 nt, Artificial Sequence
  Description of Artificial Sequence: Synthetic oligonucleotide
acucccaggaauuacucgg

SEQ ID NO: 21564 - RNA, 19 nt, Artificial Sequence
  Description of Artificial Sequence: Synthetic oligonucleotide
gucaauauaagagaagagc

SEQ ID NO: 21565 - RNA, 19 nt, Artificial Sequence
  Description of Artificial Sequence: Synthetic oligonucleotide
cugaaguuggccaaugugg

SEQ ID NO: 21566 - RNA, 19 nt, Artificial Sequence
  Description of Artificial Sequence: Synthetic oligonucleotide
gucuucuuuccacguugcc

SEQ ID NO: 21567 - RNA, 19 nt, Artificial Sequence
  Description of Artificial Sequence: Synthetic oligonucleotide
cuccucgugcagcgcugug

SEQ ID NO: 21568 - RNA, 19 nt, Artificial Sequence
  Description of Artificial Sequence: Synthetic oligonucleotide
ggaggaaauuguggcugug

SEQ ID NO: 21569 - RNA, 19 nt, Artificial Sequence
  Description of Artificial Sequence: Synthetic oligonucleotide
ggaacugucaacuggaggu

SEQ ID NO: 21570 - RNA, 19 nt, Artificial Sequence
  Description of Artificial Sequence: Synthetic oligonucleotide
uccugcacaugcaauucag

SEQ ID NO: 21571 - RNA, 19 nt, Artificial Sequence
  Description of Artificial Sequence: Synthetic oligonucleotide
gggaaaaccgugaaaaagu

SEQ ID NO: 21572 - RNA, 19 nt, Artificial Sequence
  Description of Artificial Sequence: Synthetic oligonucleotide
uaucaugagguauuacagu

SEQ ID NO: 21573 - RNA, 19 nt, Artificial Sequence
  Description of Artificial Sequence: Synthetic oligonucleotide
uuugagccuggccacauca

SEQ ID NO: 21574 - RNA, 19 nt, Artificial Sequence
  Description of Artificial Sequence: Synthetic oligonucleotide
aagaggagggguagagcua

SEQ ID NO: 21575 - RNA, 19 nt, Artificial Sequence
  Description of Artificial Sequence: Synthetic oligonucleotide
aagaccauggcucuaguug

SEQ ID NO: 21576 - RNA, 19 nt, Artificial Sequence
  Description of Artificial Sequence: Synthetic oligonucleotide
gacauccaguuggaucacc

SEQ ID NO: 21577 - RNA, 19 nt, Artificial Sequence
  Description of Artificial Sequence: Synthetic oligonucleotide
caugaacgaugugauugua

SEQ ID NO: 21578 - RNA, 19 nt, Artificial Sequence
  Description of Artificial Sequence: Synthetic oligonucleotide
aucugcagcucaagaccac

SEQ ID NO: 21579 - RNA, 19 nt, Artificial Sequence
  Description of Artificial Sequence: Synthetic oligonucleotide
ccucgauaagagaaugugc

SEQ ID NO: 21580 - RNA, 19 nt, Artificial Sequence
  Description of Artificial Sequence: Synthetic oligonucleotide
cacauccuuacauuaagcc

SEQ ID NO: 21581 - RNA, 19 nt, Artificial Sequence
  Description of Artificial Sequence: Synthetic oligonucleotide
cugaaagaaccuuuaguuu

SEQ ID NO: 21582 - RNA, 19 nt, Artificial Sequence
  Description of Artificial Sequence: Synthetic oligonucleotide
uaaggagggugagauaaga

SEQ ID NO: 21583 - RNA, 19 nt, Artificial Sequence
  Description of Artificial Sequence: Synthetic oligonucleotide
agacccuuuuccuaccagc

SEQ ID NO: 21584 - RNA, 19 nt, Artificial Sequence
  Description of Artificial Sequence: Synthetic oligonucleotide
caaccaaacuuacuacuag

SEQ ID NO: 21585 - RNA, 19 nt, Artificial Sequence
  Description of Artificial Sequence: Synthetic oligonucleotide
gccugcaaugcaaugaaca

SEQ ID NO: 21586 - RNA, 19 nt, Artificial Sequence
  Description of Artificial Sequence: Synthetic oligonucleotide
acaagugguugcugagucu

SEQ ID NO: 21587 - RNA, 19 nt, Artificial Sequence
  Description of Artificial Sequence: Synthetic oligonucleotide
ucagccuugcuuuguuaau

SEQ ID NO: 21588 - RNA, 19 nt, Artificial Sequence
  Description of Artificial Sequence: Synthetic oligonucleotide
ugccauggcaaguagaaag

SEQ ID NO: 21589 - RNA, 19 nt, Artificial Sequence
  Description of Artificial Sequence: Synthetic oligonucleotide
gguauaucaucaacuucua

SEQ ID NO: 21590 - RNA, 19 nt, Artificial Sequence
  Description of Artificial Sequence: Synthetic oligonucleotide
auaccuaagaauauaggau

SEQ ID NO: 21591 - RNA, 19 nt, Artificial Sequence
  Description of Artificial Sequence: Synthetic oligonucleotide
uugcauuuaauaauagugu

SEQ ID NO: 21592 - RNA, 19 nt, Artificial Sequence
  Description of Artificial Sequence: Synthetic oligonucleotide
uuugagguuauauaugcac

SEQ ID NO: 21593 - RNA, 19 nt, Artificial Sequence
  Description of Artificial Sequence: Synthetic oligonucleotide
caaacacacacagaaauau

SEQ ID NO: 21594 - RNA, 19 nt, Artificial Sequence
  Description of Artificial Sequence: Synthetic oligonucleotide
uauucaugucuauguguau

SEQ ID NO: 21595 - RNA, 19 nt, Artificial Sequence
  Description of Artificial Sequence: Synthetic oligonucleotide
uauagaucaaauguuuuuu

SEQ ID NO: 21596 - RNA, 19 nt, Artificial Sequence
  Description of Artificial Sequence: Synthetic oligonucleotide
uuugguauauauaaccagg

SEQ ID NO: 21597 - RNA, 19 nt, Artificial Sequence
  Description of Artificial Sequence: Synthetic oligonucleotide
guacaccagagcuuacaua

SEQ ID NO: 21598 - RNA, 19 nt, Artificial Sequence
  Description of Artificial Sequence: Synthetic oligonucleotide
auguuugaguuagacucuu

SEQ ID NO: 21599 - RNA, 19 nt, Artificial Sequence
  Description of Artificial Sequence: Synthetic oligonucleotide
uaaaauccuuugccaaaau

SEQ ID NO: 21600 - RNA, 19 nt, Artificial Sequence
  Description of Artificial Sequence: Synthetic oligonucleotide
uaagggauggucaaauaua

SEQ ID NO: 21601 - RNA, 19 nt, Artificial Sequence
  Description of Artificial Sequence: Synthetic oligonucleotide
augaaacaugucuuuagaa

SEQ ID NO: 21602 - RNA, 19 nt, Artificial Sequence
  Description of Artificial Sequence: Synthetic oligonucleotide
aaauuuaggagauaaauuu

SEQ ID NO: 21603 - RNA, 19 nt, Artificial Sequence
  Description of Artificial Sequence: Synthetic oligonucleotide
uauuuuuaaauuuugaaac

SEQ ID NO: 21604 - RNA, 19 nt, Artificial Sequence
  Description of Artificial Sequence: Synthetic oligonucleotide
cacaaaacaauuuugaauc

SEQ ID NO: 21605 - RNA, 19 nt, Artificial Sequence
  Description of Artificial Sequence: Synthetic oligonucleotide
cuugcucucuuaaagaaag

SEQ ID NO: 21606 - RNA, 19 nt, Artificial Sequence
  Description of Artificial Sequence: Synthetic oligonucleotide
gcaucuuguauauuaaaaa

SEQ ID NO: 21607 - RNA, 19 nt, Artificial Sequence
  Description of Artificial Sequence: Synthetic oligonucleotide
aucaaaagaugaggcuuuc

SEQ ID NO: 21608 - RNA, 19 nt, Artificial Sequence
  Description of Artificial Sequence: Synthetic oligonucleotide
cuuacauauacaucuuagu

SEQ ID NO: 21609 - RNA, 19 nt, Artificial Sequence
  Description of Artificial Sequence: Synthetic oligonucleotide
uugauuauuaaaaaaggaa

SEQ ID NO: 21610 - RNA, 19 nt, Artificial Sequence
  Description of Artificial Sequence: Synthetic oligonucleotide
aaaauaugguuuccagaga

SEQ ID NO: 21611 - RNA, 19 nt, Artificial Sequence
  Description of Artificial Sequence: Synthetic oligonucleotide
aaaaggccaauaccuaagc

SEQ ID NO: 21612 - RNA, 19 nt, Artificial Sequence
  Description of Artificial Sequence: Synthetic oligonucleotide
cauuuuuuccaugagaagc

SEQ ID NO: 21613 - RNA, 19 nt, Artificial Sequence
  Description of Artificial Sequence: Synthetic oligonucleotide
cacugcauacuuaccuaug

SEQ ID NO: 21614 - RNA, 19 nt, Artificial Sequence
  Description of Artificial Sequence: Synthetic oligonucleotide
guggacuauaauaaccugu

SEQ ID NO: 21615 - RNA, 19 nt, Artificial Sequence
  Description of Artificial Sequence: Synthetic oligonucleotide
ucuccaaaaccaugccaua

SEQ ID NO: 21616 - RNA, 19 nt, Artificial Sequence
  Description of Artificial Sequence: Synthetic oligonucleotide
aauaauauaagugcuuuag

SEQ ID NO: 21617 - RNA, 19 nt, Artificial Sequence
  Description of Artificial Sequence: Synthetic oligonucleotide
gaaauuaaaucauuguguu

SEQ ID NO: 21618 - RNA, 19 nt, Artificial Sequence
  Description of Artificial Sequence: Synthetic oligonucleotide
uuuuuaugcauuuugcuga

SEQ ID NO: 21619 - RNA, 19 nt, Artificial Sequence
  Description of Artificial Sequence: Synthetic oligonucleotide
aggcaugcuuauucauuua

SEQ ID NO: 21620 - RNA, 19 nt, Artificial Sequence
  Description of Artificial Sequence: Synthetic oligonucleotide
aacaccuaucucaaaaacu

SEQ ID NO: 21621 - RNA, 19 nt, Artificial Sequence
  Description of Artificial Sequence: Synthetic oligonucleotide
uuacuuagaagguuuuuua

SEQ ID NO: 21622 - RNA, 19 nt, Artificial Sequence
  Description of Artificial Sequence: Synthetic oligonucleotide
auuauaguccuacaaaaga

SEQ ID NO: 21623 - RNA, 19 nt, Artificial Sequence
  Description of Artificial Sequence: Synthetic oligonucleotide
acaauguauaagcuguaac

SEQ ID NO: 21624 - RNA, 19 nt, Artificial Sequence
  Description of Artificial Sequence: Synthetic oligonucleotide
cagaauuuugaauuguuuu

SEQ ID NO: 21625 - RNA, 19 nt, Artificial Sequence
  Description of Artificial Sequence: Synthetic oligonucleotide
uucuuugcaaaaccccucc

SEQ ID NO: 21626 - RNA, 19 nt, Artificial Sequence
  Description of Artificial Sequence: Synthetic oligonucleotide
cacaaaagcaaauccuuuc

SEQ ID NO: 21627 - RNA, 19 nt, Artificial Sequence
  Description of Artificial Sequence: Synthetic oligonucleotide
caagaauggcaugggcauu

SEQ ID NO: 21628 - RNA, 19 nt, Artificial Sequence
  Description of Artificial Sequence: Synthetic oligonucleotide
ucuguaugaaccuuuccag

SEQ ID NO: 21629 - RNA, 19 nt, Artificial Sequence
  Description of Artificial Sequence: Synthetic oligonucleotide
gaugguguucagugaaaga

SEQ ID NO: 21630 - RNA, 19 nt, Artificial Sequence
  Description of Artificial Sequence: Synthetic oligonucleotide
auguggguaguugagaacu

SEQ ID NO: 21631 - RNA, 19 nt, Artificial Sequence
  Description of Artificial Sequence: Synthetic oligonucleotide
uuaaaaagugaacauugaa

SEQ ID NO: 21632 - RNA, 19 nt, Artificial Sequence
  Description of Artificial Sequence: Synthetic oligonucleotide
aacaucgacguaacuggaa

SEQ ID NO: 21633 - RNA, 19 nt, Artificial Sequence
  Description of Artificial Sequence: Synthetic oligonucleotide
aauuaggugggauauuuga

SEQ ID NO: 21634 - RNA, 19 nt, Artificial Sequence
  Description of Artificial Sequence: Synthetic oligonucleotide
auaggauccauaucuaaua

SEQ ID NO: 21635 - RNA, 19 nt, Artificial Sequence
  Description of Artificial Sequence: Synthetic oligonucleotide
aauggauucgaacucucca

SEQ ID NO: 21636 - RNA, 19 nt, Artificial Sequence
  Description of Artificial Sequence: Synthetic oligonucleotide
aaacuacaccaauuaauuu

SEQ ID NO: 21637 - RNA, 19 nt, Artificial Sequence
  Description of Artificial Sequence: Synthetic oligonucleotide
uaauguaucuugcuuuugu

SEQ ID NO: 21638 - RNA, 19 nt, Artificial Sequence
  Description of Artificial Sequence: Synthetic oligonucleotide
uguucccgucuuuuugaaa

SEQ ID NO: 21639 - RNA, 19 nt, Artificial Sequence
  Description of Artificial Sequence: Synthetic oligonucleotide
auauagacauggauuuaua

SEQ ID NO: 21640 - RNA, 19 nt, Artificial Sequence
  Description of Artificial Sequence: Synthetic oligonucleotide
aauggcauuuuauauuugg

SEQ ID NO: 21641 - RNA, 19 nt, Artificial Sequence
  Description of Artificial Sequence: Synthetic oligonucleotide
gcaggccaucauagauuau

SEQ ID NO: 21642 - RNA, 19 nt, Artificial Sequence
  Description of Artificial Sequence: Synthetic oligonucleotide
uuuacaaccuaaaagcuuu

SEQ ID NO: 21643 - RNA, 19 nt, Artificial Sequence
  Description of Artificial Sequence: Synthetic oligonucleotide
uuguguaucaaaaaaauca

SEQ ID NO: 21644 - RNA, 19 nt, Artificial Sequence
  Description of Artificial Sequence: Synthetic oligonucleotide
acauuuuauuaauguaaau

SEQ ID NO: 21645 - RNA, 19 nt, Artificial Sequence
  Description of Artificial Sequence: Synthetic oligonucleotide
uuucuaaucguauacuugc

SEQ ID NO: 21646 - RNA, 19 nt, Artificial Sequence
  Description of Artificial Sequence: Synthetic oligonucleotide
cucacuguucugauuuccu

SEQ ID NO: 21647 - RNA, 19 nt, Artificial Sequence
  Description of Artificial Sequence: Synthetic oligonucleotide
uguuucugaaccaaguaaa

SEQ ID NO: 21648 - RNA, 19 nt, Artificial Sequence
  Description of Artificial Sequence: Synthetic oligonucleotide
aaucaguccuagaggcuau

SEQ ID NO: 21649 - RNA, 19 nt, Artificial Sequence
  Description of Artificial Sequence: Synthetic oligonucleotide
ugguucuuaaucuauggag

SEQ ID NO: 21650 - RNA, 19 nt, Artificial Sequence
  Description of Artificial Sequence: Synthetic oligonucleotide
gcuugcuuuaagaagccag

SEQ ID NO: 21651 - RNA, 19 nt, Artificial Sequence
  Description of Artificial Sequence: Synthetic oligonucleotide
guugucaauugugguaaca

SEQ ID NO: 21652 - RNA, 19 nt, Artificial Sequence
  Description of Artificial Sequence: Synthetic oligonucleotide
acaaguuuggcccugcugu

SEQ ID NO: 21653 - RNA, 19 nt, Artificial Sequence
  Description of Artificial Sequence: Synthetic oligonucleotide
uccuacuguuuaauagaaa

SEQ ID NO: 21654 - RNA, 19 nt, Artificial Sequence
  Description of Artificial Sequence: Synthetic oligonucleotide
aacuguuuuacauugguua

SEQ ID NO: 21655 - RNA, 19 nt, Artificial Sequence
  Description of Artificial Sequence: Synthetic oligonucleotide
aaugguauuuagaguaauu

SEQ ID NO: 21656 - RNA, 19 nt, Artificial Sequence
  Description of Artificial Sequence: Synthetic oligonucleotide
uuuuucucucugccuccuu

SEQ ID NO: 21657 - RNA, 19 nt, Artificial Sequence
  Description of Artificial Sequence: Synthetic oligonucleotide
uugugucuguuuuaaagga

SEQ ID NO: 21658 - RNA, 19 nt, Artificial Sequence
  Description of Artificial Sequence: Synthetic oligonucleotide
agacuaacuccaggaguag

SEQ ID NO: 21659 - RNA, 19 nt, Artificial Sequence
  Description of Artificial Sequence: Synthetic oligonucleotide
ggaaaugauucaucauccu

SEQ ID NO: 21660 - RNA, 19 nt, Artificial Sequence
  Description of Artificial Sequence: Synthetic oligonucleotide
uccaaagcaagaggcuuaa

SEQ ID NO: 21661 - RNA, 19 nt, Artificial Sequence
  Description of Artificial Sequence: Synthetic oligonucleotide
agagagaaacaccgaaauu

SEQ ID NO: 21662 - RNA, 19 nt, Artificial Sequence
  Description of Artificial Sequence: Synthetic oligonucleotide
ucagauagcucagggacug

SEQ ID NO: 21663 - RNA, 19 nt, Artificial Sequence
  Description of Artificial Sequence: Synthetic oligonucleotide
gcuaacagagaacuacauu

SEQ ID NO: 21664 - RNA, 19 nt, Artificial Sequence
  Description of Artificial Sequence: Synthetic oligonucleotide
uuuucuuauugccuugaaa

SEQ ID NO: 21665 - RNA, 19 nt, Artificial Sequence
  Description of Artificial Sequence: Synthetic oligonucleotide
aguuaaaaggaaagcagau

SEQ ID NO: 21666 - RNA, 19 nt, Artificial Sequence
  Description of Artificial Sequence: Synthetic oligonucleotide
uuucuucagugacuuugug

SEQ ID NO: 21667 - RNA, 19 nt, Artificial Sequence
  Description of Artificial Sequence: Synthetic oligonucleotide
gguccuacuaacuacaacc

SEQ ID NO: 21668 - RNA, 19 nt, Artificial Sequence
  Description of Artificial Sequence: Synthetic oligonucleotide
caguuugggugacagggcu

SEQ ID NO: 21669 - RNA, 19 nt, Artificial Sequence
  Description of Artificial Sequence: Synthetic oligonucleotide
ugguaaagucccaguguua

SEQ ID NO: 21670 - RNA, 19 nt, Artificial Sequence
  Description of Artificial Sequence: Synthetic oligonucleotide
agaugagugaccuaaauau

SEQ ID NO: 21671 - RNA, 19 nt, Artificial Sequence
  Description of Artificial Sequence: Synthetic oligonucleotide
uacuuagauuucuaaguau

SEQ ID NO: 21672 - RNA, 19 nt, Artificial Sequence
  Description of Artificial Sequence: Synthetic oligonucleotide
uggugcucucagguccaag

SEQ ID NO: 21673 - RNA, 19 nt, Artificial Sequence
  Description of Artificial Sequence: Synthetic oligonucleotide
guucaacuauucuuaagca

SEQ ID NO: 21674 - RNA, 19 nt, Artificial Sequence
  Description of Artificial Sequence: Synthetic oligonucleotide
agugcaauucuucccaguu

SEQ ID NO: 21675 - RNA, 19 nt, Artificial Sequence
  Description of Artificial Sequence: Synthetic oligonucleotide
uauuugagaugaaagaucu

SEQ ID NO: 21676 - RNA, 19 nt, Artificial Sequence
  Description of Artificial Sequence: Synthetic oligonucleotide
ucugcuuauugaagaugua

SEQ ID NO: 21677 - RNA, 19 nt, Artificial Sequence
  Description of Artificial Sequence: Synthetic oligonucleotide
accuucuaaaacuuuccua

SEQ ID NO: 21678 - RNA, 19 nt, Artificial Sequence
  Description of Artificial Sequence: Synthetic oligonucleotide
aaaagugucugauguuuuu

SEQ ID NO: 21679 - RNA, 19 nt, Artificial Sequence
  Description of Artificial Sequence: Synthetic oligonucleotide
uacucaagaggggaguggu

SEQ ID NO: 21680 - RNA, 19 nt, Artificial Sequence
  Description of Artificial Sequence: Synthetic oligonucleotide
uaaaauuaaauacucuauu

SEQ ID NO: 21681 - RNA, 19 nt, Artificial Sequence
  Description of Artificial Sequence: Synthetic oligonucleotide
uguucaauucucuaaaauc

SEQ ID NO: 21682 - RNA, 19 nt, Artificial Sequence
  Description of Artificial Sequence: Synthetic oligonucleotide
cccagaacacaaucagaaa

SEQ ID NO: 21683 - RNA, 19 nt, Artificial Sequence
  Description of Artificial Sequence: Synthetic oligonucleotide
auagcucaggcagacacua

SEQ ID NO: 21684 - RNA, 19 nt, Artificial Sequence
  Description of Artificial Sequence: Synthetic oligonucleotide
aauaauuaagaacgcucuu

SEQ ID NO: 21685 - RNA, 19 nt, Artificial Sequence
  Description of Artificial Sequence: Synthetic oligonucleotide
uccucuucauaacugcuuu

SEQ ID NO: 21686 - RNA, 19 nt, Artificial Sequence
  Description of Artificial Sequence: Synthetic oligonucleotide
ugcaaguuuccugugaaaa

SEQ ID NO: 21687 - RNA, 19 nt, Artificial Sequence
  Description of Artificial Sequence: Synthetic oligonucleotide
acaucaguuuccuguacca

SEQ ID NO: 21688 - RNA, 19 nt, Artificial Sequence
  Description of Artificial Sequence: Synthetic oligonucleotide
aaagucaaaaugaacguua

SEQ ID NO: 21689 - RNA, 19 nt, Artificial Sequence
  Description of Artificial Sequence: Synthetic oligonucleotide
acaucacucuaaccugaac

SEQ ID NO: 21690 - RNA, 19 nt, Artificial Sequence
  Description of Artificial Sequence: Synthetic oligonucleotide
cagcucacaauguagcugu

SEQ ID NO: 21691 - RNA, 19 nt, Artificial Sequence
  Description of Artificial Sequence: Synthetic oligonucleotide
uaaauauaaaaaaugagag

SEQ ID NO: 21692 - RNA, 19 nt, Artificial Sequence
  Description of Artificial Sequence: Synthetic oligonucleotide
guguucuacccaguuuuca

SEQ ID NO: 21693 - RNA, 19 nt, Artificial Sequence
  Description of Artificial Sequence: Synthetic oligonucleotide
aauaaaccuuccaggcugc

SEQ ID NO: 21694 - RNA, 19 nt, Artificial Sequence
  Description of Artificial Sequence: Synthetic oligonucleotide
caauaaccagcaagguuuu

SEQ ID NO: 21695 - RNA, 19 nt, Artificial Sequence
  Description of Artificial Sequence: Synthetic oligonucleotide
ucaguuaaagcccuaucug

SEQ ID NO: 21696 - RNA, 19 nt, Artificial Sequence
  Description of Artificial Sequence: Synthetic oligonucleotide
gcacuuuuuauuuauuagc

SEQ ID NO: 21697 - RNA, 19 nt, Artificial Sequence
  Description of Artificial Sequence: Synthetic oligonucleotide
cugaaauguaagcaggcau

SEQ ID NO: 21698 - RNA, 19 nt, Artificial Sequence
  Description of Artificial Sequence: Synthetic oligonucleotide
uauucacucacuuuucuuu

SEQ ID NO: 21699 - RNA, 19 nt, Artificial Sequence
  Description of Artificial Sequence: Synthetic oligonucleotide
ugccuuuccugagaguuuu

SEQ ID NO: 21700 - RNA, 19 nt, Artificial Sequence
  Description of Artificial Sequence: Synthetic oligonucleotide
uauuaaaacuucucccuug

SEQ ID NO: 21701 - RNA, 19 nt, Artificial Sequence
  Description of Artificial Sequence: Synthetic oligonucleotide
gguuaccuguuaucuuuug

SEQ ID NO: 21702 - RNA, 19 nt, Artificial Sequence
  Description of Artificial Sequence: Synthetic oligonucleotide
gcacuucuaacauguagcc

SEQ ID NO: 21703 - RNA, 19 nt, Artificial Sequence
  Description of Artificial Sequence: Synthetic oligonucleotide
caauaaaucuauuugauag

SEQ ID NO: 21704 - RNA, 19 nt, Artificial Sequence
  Description of Artificial Sequence: Synthetic oligonucleotide
gccaucaaaggaauaaaaa

SEQ ID NO: 21705 - RNA, 19 nt, Artificial Sequence
  Description of Artificial Sequence: Synthetic oligonucleotide
agcuggccguacaaauuac

SEQ ID NO: 21706 - RNA, 19 nt, Artificial Sequence
  Description of Artificial Sequence: Synthetic oligonucleotide
cauuucaaaacaaacccua

SEQ ID NO: 21707 - RNA, 19 nt, Artificial Sequence
  Description of Artificial Sequence: Synthetic oligonucleotide
aauaaauccacauuuccgc

SEQ ID NO: 21708 - RNA, 19 nt, Artificial Sequence
  Description of Artificial Sequence: Synthetic oligonucleotide
cauggcucauucaccugga

SEQ ID NO: 21709 - RNA, 19 nt, Artificial Sequence
  Description of Artificial Sequence: Synthetic oligonucleotide
aauaaugccuuuuauugaa

SEQ ID NO: 21710 - RNA, 19 nt, Artificial Sequence
  Description of Artificial Sequence: Synthetic oligonucleotide
auauguucuuauagggcaa

SEQ ID NO: 21711 - RNA, 19 nt, Artificial Sequence
  Description of Artificial Sequence: Synthetic oligonucleotide
aaacacuuucauaaguaga

SEQ ID NO: 21712 - RNA, 19 nt, Artificial Sequence
  Description of Artificial Sequence: Synthetic oligonucleotide
aguuuuuuauguuuuuugu

SEQ ID NO: 21713 - RNA, 19 nt, Artificial Sequence
  Description of Artificial Sequence: Synthetic oligonucleotide
ucauaucgguaacaugcag

SEQ ID NO: 21714 - RNA, 19 nt, Artificial Sequence
  Description of Artificial Sequence: Synthetic oligonucleotide
gcuuuuuccucucauagca

SEQ ID NO: 21715 - RNA, 19 nt, Artificial Sequence
  Description of Artificial Sequence: Synthetic oligonucleotide
auuuucuauagcgaaugua

SEQ ID NO: 21716 - RNA, 19 nt, Artificial Sequence
  Description of Artificial Sequence: Synthetic oligonucleotide
aauaugccucuuaucuuca

SEQ ID NO: 21717 - RNA, 19 nt, Artificial Sequence
  Description of Artificial Sequence: Synthetic oligonucleotide
augaaaaauaaauauugcu

SEQ ID NO: 21718 - RNA, 19 nt, Artificial Sequence
  Description of Artificial Sequence: Synthetic oligonucleotide
uuuugaacaaaacuaaaaa

SEQ ID NO: 21719 - RNA, 19 nt, Artificial Sequence
  Description of Artificial Sequence: Synthetic oligonucleotide
aggcgagaugacuuguacc

SEQ ID NO: 21720 - RNA, 25 nt, Artificial Sequence
  Description of Artificial Sequence: Synthetic oligonucleotide
ucucaggggccgcggccggggcugg

SEQ ID NO: 21721 - RNA, 25 nt, Artificial Sequence
  Description of Artificial Sequence: Synthetic oligonucleotide
gagaacgcugcugcuccgcucgccu

SEQ ID NO: 21722 - RNA, 25 nt, Artificial Sequence
  Description of Artificial Sequence: Synthetic oligonucleotide
ugccccgcuagauucggcgcugccc

SEQ ID NO: 21723 - RNA, 25 nt, Artificial Sequence
  Description of Artificial Sequence: Synthetic oligonucleotide
cgcccccugcagccugugcugcagc

SEQ ID NO: 21724 - RNA, 25 nt, Artificial Sequence
  Description of Artificial Sequence: Synthetic oligonucleotide
cugccggccaccggagggggcgaac

SEQ ID NO: 21725 - RNA, 25 nt, Artificial Sequence
  Description of Artificial Sequence: Synthetic oligonucleotide
caaacaaacgucaaccuguuguuug

SEQ ID NO: 21726 - RNA, 25 nt, Artificial Sequence
  Description of Artificial Sequence: Synthetic oligonucleotide
gucccgucaccauuuaucagcucag

SEQ ID NO: 21727 - RNA, 25 nt, Artificial Sequence
  Description of Artificial Sequence: Synthetic oligonucleotide
gcaccacaaggaagugcggcaccca

SEQ ID NO: 21728 - RNA, 25 nt, Artificial Sequence
  Description of Artificial Sequence: Synthetic oligonucleotide
acacgcgcucggaaaguucagcaug

SEQ ID NO: 21729 - RNA, 25 nt, Artificial Sequence
  Description of Artificial Sequence: Synthetic oligonucleotide
gcaggaaguuuggggagagcucggc

SEQ ID NO: 21730 - RNA, 25 nt, Artificial Sequence
  Description of Artificial Sequence: Synthetic oligonucleotide
cgauuagcacagcgacccgggccag

SEQ ID NO: 21731 - RNA, 25 nt, Artificial Sequence
  Description of Artificial Sequence: Synthetic oligonucleotide
gcgcagggcgagcgcaggcggcgag

SEQ ID NO: 21732 - RNA, 25 nt, Artificial Sequence
  Description of Artificial Sequence: Synthetic oligonucleotide
gagcgcagggcggcgcggcgucggu

SEQ ID NO: 21733 - RNA, 25 nt, Artificial Sequence
  Description of Artificial Sequence: Synthetic oligonucleotide
ucccgggagcagaacccggcuuuuu

SEQ ID NO: 21734 - RNA, 25 nt, Artificial Sequence
  Description of Artificial Sequence: Synthetic oligonucleotide
ucuuggagcgacgcugucucuaguc

SEQ ID NO: 21735 - RNA, 25 nt, Artificial Sequence
  Description of Artificial Sequence: Synthetic oligonucleotide
cgcugaucccaaaugcaccggcuca

SEQ ID NO: 21736 - RNA, 25 nt, Artificial Sequence
  Description of Artificial Sequence: Synthetic oligonucleotide
aucuuugucuacacucuaaucugcg

SEQ ID NO: 21737 - RNA, 25 nt, Artificial Sequence
  Description of Artificial Sequence: Synthetic oligonucleotide
gcaaacuuuugcagcugucgggaca

SEQ ID NO: 21738 - RNA, 25 nt, Artificial Sequence
  Description of Artificial Sequence: Synthetic oligonucleotide
acuucugcaaccccgcagagcgcau

SEQ ID NO: 21739 - RNA, 25 nt, Artificial Sequence
  Description of Artificial Sequence: Synthetic oligonucleotide
uccaucaaagcuuugcgcaacgcca

SEQ ID NO: 21740 - RNA, 25 nt, Artificial Sequence
  Description of Artificial Sequence: Synthetic oligonucleotide
aaccucaggcgagaugagagcaauc

SEQ ID NO: 21741 - RNA, 25 nt, Artificial Sequence
  Description of Artificial Sequence: Synthetic oligonucleotide
caccucacagacuuguaccgaagag

SEQ ID NO: 21742 - RNA, 25 nt, Artificial Sequence
  Description of Artificial Sequence: Synthetic oligonucleotide
gaugagaccauccaggugaaaggaa

SEQ ID NO: 21743 - RNA, 25 nt, Artificial Sequence
  Description of Artificial Sequence: Synthetic oligonucleotide
aacggcuacgugcagaguccuagau

SEQ ID NO: 21744 - RNA, 25 nt, Artificial Sequence
  Description of Artificial Sequence: Synthetic oligonucleotide
uucccgaacagcuaccccaggaacc

SEQ ID NO: 21745 - RNA, 25 nt, Artificial Sequence
  Description of Artificial Sequence: Synthetic oligonucleotide
cugcuccugacauggcggcuucacu

SEQ ID NO: 21746 - RNA, 25 nt, Artificial Sequence
  Description of Artificial Sequence: Synthetic oligonucleotide
ucucaggagaauacacggauacagc

SEQ ID NO: 21747 - RNA, 25 nt, Artificial Sequence
  Description of Artificial Sequence: Synthetic oligonucleotide
cuaguguuugacaaucaguuuggau

SEQ ID NO: 21748 - RNA, 25 nt, Artificial Sequence
  Description of Artificial Sequence: Synthetic oligonucleotide
uuagaggaagcagaaaaugauaucu

SEQ ID NO: 21749 - RNA, 25 nt, Artificial Sequence
  Description of Artificial Sequence: Synthetic oligonucleotide
uguagguaugauuuuguggaaguug

SEQ ID NO: 21750 - RNA, 25 nt, Artificial Sequence
  Description of Artificial Sequence: Synthetic oligonucleotide
gaagauauauccgaaaccaguacca

SEQ ID NO: 21751 - RNA, 25 nt, Artificial Sequence
  Description of Artificial Sequence: Synthetic oligonucleotide
auuauuagaggacgaugguguggac

SEQ ID NO: 21752 - RNA, 25 nt, Artificial Sequence
  Description of Artificial Sequence: Synthetic oligonucleotide
cacaaggaaguuccuccaaggauaa

SEQ ID NO: 21753 - RNA, 25 nt, Artificial Sequence
  Description of Artificial Sequence: Synthetic oligonucleotide
aaaucaagaacgaaccaaauuaaaa

SEQ ID NO: 21754 - RNA, 25 nt, Artificial Sequence
  Description of Artificial Sequence: Synthetic oligonucleotide
aucacauucaaguccgaugacuacu

SEQ ID NO: 21755 - RNA, 25 nt, Artificial Sequence
  Description of Artificial Sequence: Synthetic oligonucleotide
uuuguggcuaaaccuggauucaaga

SEQ ID NO: 21756 - RNA, 25 nt, Artificial Sequence
  Description of Artificial Sequence: Synthetic oligonucleotide
auuuauuauucuuugcuggaagauu

SEQ ID NO: 21757 - RNA, 25 nt, Artificial Sequence
  Description of Artificial Sequence: Synthetic oligonucleotide
uuccaacccgcagcagcuucagaga

SEQ ID NO: 21758 - RNA, 25 nt, Artificial Sequence
  Description of Artificial Sequence: Synthetic oligonucleotide
accaacugggaaucugucacaagcu

SEQ ID NO: 21759 - RNA, 25 nt, Artificial Sequence
  Description of Artificial Sequence: Synthetic oligonucleotide
ucuauuucagggguauccuauaacu

SEQ ID NO: 21760 - RNA, 25 nt, Artificial Sequence
  Description of Artificial Sequence: Synthetic oligonucleotide
ucuccaucaguaacggaucccacuc

SEQ ID NO: 21761 - RNA, 25 nt, Artificial Sequence
  Description of Artificial Sequence: Synthetic oligonucleotide
cugauugcggaugcucuggacaaaa

SEQ ID NO: 21762 - RNA, 25 nt, Artificial Sequence
  Description of Artificial Sequence: Synthetic oligonucleotide
aaaauugcagaauuugauacagugg

SEQ ID NO: 21763 - RNA, 25 nt, Artificial Sequence
  Description of Artificial Sequence: Synthetic oligonucleotide
gaagaucugcucaaguacuucaauc

SEQ ID NO: 21764 - RNA, 25 nt, Artificial Sequence
  Description of Artificial Sequence: Synthetic oligonucleotide
ccagagucauggcaagaagaucuug

SEQ ID NO: 21765 - RNA, 25 nt, Artificial Sequence
  Description of Artificial Sequence: Synthetic oligonucleotide
gagaauauguaucuggacaccccuc

SEQ ID NO: 21766 - RNA, 25 nt, Artificial Sequence
  Description of Artificial Sequence: Synthetic oligonucleotide
cgguaucgaggcaggucauaccaug

SEQ ID NO: 21767 - RNA, 25 nt, Artificial Sequence
  Description of Artificial Sequence: Synthetic oligonucleotide
gaccggaagucaaaaguugaccugg

SEQ ID NO: 21768 - RNA, 25 nt, Artificial Sequence
  Description of Artificial Sequence: Synthetic oligonucleotide
gauaggcucaaugaugaugccaagc

SEQ ID NO: 21769 - RNA, 25 nt, Artificial Sequence
  Description of Artificial Sequence: Synthetic oligonucleotide
cguuacaguugcacucccaggaauu

SEQ ID NO: 21770 - RNA, 25 nt, Artificial Sequence
  Description of Artificial Sequence: Synthetic oligonucleotide
uacucggucaauauaagagaagagc

SEQ ID NO: 21771 - RNA, 25 nt, Artificial Sequence
  Description of Artificial Sequence: Synthetic oligonucleotide
cugaaguuggccaauguggucuucu

SEQ ID NO: 21772 - RNA, 25 nt, Artificial Sequence
  Description of Artificial Sequence: Synthetic oligonucleotide
uuuccacguugccuccucgugcagc

SEQ ID NO: 21773 - RNA, 25 nt, Artificial Sequence
  Description of Artificial Sequence: Synthetic oligonucleotide
cgcuguggaggaaauuguggcugug

SEQ ID NO: 21774 - RNA, 25 nt, Artificial Sequence
  Description of Artificial Sequence: Synthetic oligonucleotide
ggaacugucaacuggagguccugca

SEQ ID NO: 21775 - RNA, 25 nt, Artificial Sequence
  Description of Artificial Sequence: Synthetic oligonucleotide
acaugcaauucagggaaaaccguga

SEQ ID NO: 21776 - RNA, 25 nt, Artificial Sequence
  Description of Artificial Sequence: Synthetic oligonucleotide
aaaaaguaucaugagguauuacagu

SEQ ID NO: 21777 - RNA, 25 nt, Artificial Sequence
  Description of Artificial Sequence: Synthetic oligonucleotide
uuugagccuggccacaucaagagga

SEQ ID NO: 21778 - RNA, 25 nt, Artificial Sequence
  Description of Artificial Sequence: Synthetic oligonucleotide
agggguagagcuaagaccauggcuc

SEQ ID NO: 21779 - RNA, 25 nt, Artificial Sequence
  Description of Artificial Sequence: Synthetic oligonucleotide
cuaguugacauccaguuggaucacc

SEQ ID NO: 21780 - RNA, 25 nt, Artificial Sequence
  Description of Artificial Sequence: Synthetic oligonucleotide
caugaacgaugugauuguaucugca

SEQ ID NO: 21781 - RNA, 25 nt, Artificial Sequence
  Description of Artificial Sequence: Synthetic oligonucleotide
agcucaagaccaccucgauaagaga

SEQ ID NO: 21782 - RNA, 25 nt, Artificial Sequence
  Description of Artificial Sequence: Synthetic oligonucleotide
aaugugcacauccuuacauuaagcc

SEQ ID NO: 21783 - RNA, 25 nt, Artificial Sequence
  Description of Artificial Sequence: Synthetic oligonucleotide
cugaaagaaccuuuaguuuaaggag

SEQ ID NO: 21784 - RNA, 25 nt, Artificial Sequence
  Description of Artificial Sequence: Synthetic oligonucleotide
gggugagauaagagacccuuuuccu

SEQ ID NO: 21785 - RNA, 25 nt, Artificial Sequence
  Description of Artificial Sequence: Synthetic oligonucleotide
uaccagcaaccaaacuuacuacuag

SEQ ID NO: 21786 - RNA, 25 nt, Artificial Sequence
  Description of Artificial Sequence: Synthetic oligonucleotide
gccugcaaugcaaugaacacaagug

SEQ ID NO: 21787 - RNA, 25 nt, Artificial Sequence
  Description of Artificial Sequence: Synthetic oligonucleotide
gguugcugagucucagccuugcuuu

SEQ ID NO: 21788 - RNA, 25 nt, Artificial Sequence
  Description of Artificial Sequence: Synthetic oligonucleotide
uguuaaugccauggcaaguagaaag

SEQ ID NO: 21789 - RNA, 25 nt, Artificial Sequence
  Description of Artificial Sequence: Synthetic oligonucleotide
gguauaucaucaacuucuauaccua

SEQ ID NO: 21790 - RNA, 25 nt, Artificial Sequence
  Description of Artificial Sequence: Synthetic oligonucleotide
aagaauauaggauugcauuuaauaa

SEQ ID NO: 21791 - RNA, 25 nt, Artificial Sequence
  Description of Artificial Sequence: Synthetic oligonucleotide
auaguguuugagguuauauaugcac

SEQ ID NO: 21792 - RNA, 25 nt, Artificial Sequence
  Description of Artificial Sequence: Synthetic oligonucleotide
caaacacacacagaaauauauucau

SEQ ID NO: 21793 - RNA, 25 nt, Artificial Sequence
  Description of Artificial Sequence: Synthetic oligonucleotide
ugucuauguguauauagaucaaaug

SEQ ID NO: 21794 - RNA, 25 nt, Artificial Sequence
  Description of Artificial Sequence: Synthetic oligonucleotide
guuuuuuuugguauauauaaccagg

SEQ ID NO: 21795 - RNA, 25 nt, Artificial Sequence
  Description of Artificial Sequence: Synthetic oligonucleotide
guacaccagagcuuacauauguuug

SEQ ID NO: 21796 - RNA, 25 nt, Artificial Sequence
  Description of Artificial Sequence: Synthetic oligonucleotide
gaguuagacucuuaaaauccuuugc

SEQ ID NO: 21797 - RNA, 25 nt, Artificial Sequence
  Description of Artificial Sequence: Synthetic oligonucleotide
ccaaaauaagggauggucaaauaua

SEQ ID NO: 21798 - RNA, 25 nt, Artificial Sequence
  Description of Artificial Sequence: Synthetic oligonucleotide
augaaacaugucuuuagaaaauuua

SEQ ID NO: 21799 - RNA, 25 nt, Artificial Sequence
  Description of Artificial Sequence: Synthetic oligonucleotide
aggagauaaauuuauuuuuaaauuu

SEQ ID NO: 21800 - RNA, 25 nt, Artificial Sequence
  Description of Artificial Sequence: Synthetic oligonucleotide
uugaaacacaaaacaauuuugaauc

SEQ ID NO: 21801 - RNA, 25 nt, Artificial Sequence
  Description of Artificial Sequence: Synthetic oligonucleotide
cuugcucucuuaaagaaagcaucuu

SEQ ID NO: 21802 - RNA, 25 nt, Artificial Sequence
  Description of Artificial Sequence: Synthetic oligonucleotide
uguauauuaaaaaucaaaagaugag

SEQ ID NO: 21803 - RNA, 25 nt, Artificial Sequence
  Description of Artificial Sequence: Synthetic oligonucleotide
ggcuuucuuacauauacaucuuagu

SEQ ID NO: 21804 - RNA, 25 nt, Artificial Sequence
  Description of Artificial Sequence: Synthetic oligonucleotide
uugauuauuaaaaaaggaaaaauau

SEQ ID NO: 21805 - RNA, 25 nt, Artificial Sequence
  Description of Artificial Sequence: Synthetic oligonucleotide
ugguuuccagagaaaaggccaauac

SEQ ID NO: 21806 - RNA, 25 nt, Artificial Sequence
  Description of Artificial Sequence: Synthetic oligonucleotide
ccuaagcauuuuuuccaugagaagc

SEQ ID NO: 21807 - RNA, 25 nt, Artificial Sequence
  Description of Artificial Sequence: Synthetic oligonucleotide
cacugcauacuuaccuauguggacu

SEQ ID NO: 21808 - RNA, 25 nt, Artificial Sequence
  Description of Artificial Sequence: Synthetic oligonucleotide
uauaauaaccugucuccaaaaccau

SEQ ID NO: 21809 - RNA, 25 nt, Artificial Sequence
  Description of Artificial Sequence: Synthetic oligonucleotide
ugccauaauaauauaagugcuuuag

SEQ ID NO: 21810 - RNA, 25 nt, Artificial Sequence
  Description of Artificial Sequence: Synthetic oligonucleotide
gaaauuaaaucauuguguuuuuuau

SEQ ID NO: 21811 - RNA, 25 nt, Artificial Sequence
  Description of Artificial Sequence: Synthetic oligonucleotide
ugcauuuugcugaggcaugcuuauu

SEQ ID NO: 21812 - RNA, 25 nt, Artificial Sequence
  Description of Artificial Sequence: Synthetic oligonucleotide
ucauuuaacaccuaucucaaaaacu

SEQ ID NO: 21813 - RNA, 25 nt, Artificial Sequence
  Description of Artificial Sequence: Synthetic oligonucleotide
uuacuuagaagguuuuuuauuauag

SEQ ID NO: 21814 - RNA, 25 nt, Artificial Sequence
  Description of Artificial Sequence: Synthetic oligonucleotide
guccuacaaaagacaauguauaagc

SEQ ID NO: 21815 - RNA, 25 nt, Artificial Sequence
  Description of Artificial Sequence: Synthetic oligonucleotide
cuguaacagaauuuugaauuguuuu

SEQ ID NO: 21816 - RNA, 25 nt, Artificial Sequence
  Description of Artificial Sequence: Synthetic oligonucleotide
uucuuugcaaaaccccuccacaaaa

SEQ ID NO: 21817 - RNA, 25 nt, Artificial Sequence
  Description of Artificial Sequence: Synthetic oligonucleotide
agcaaauccuuucaagaauggcaug

SEQ ID NO: 21818 - RNA, 25 nt, Artificial Sequence
  Description of Artificial Sequence: Synthetic oligonucleotide
gggcauucuguaugaaccuuuccag

SEQ ID NO: 21819 - RNA, 25 nt, Artificial Sequence
  Description of Artificial Sequence: Synthetic oligonucleotide
gaugguguucagugaaagauguggg

SEQ ID NO: 21820 - RNA, 25 nt, Artificial Sequence
  Description of Artificial Sequence: Synthetic oligonucleotide
guaguugagaacuuaaaaagugaac

SEQ ID NO: 21821 - RNA, 25 nt, Artificial Sequence
  Description of Artificial Sequence: Synthetic oligonucleotide
cauugaaacaucgacguaacuggaa

SEQ ID NO: 21822 - RNA, 25 nt, Artificial Sequence
  Description of Artificial Sequence: Synthetic oligonucleotide
aauuaggugggauauuugauaggau

SEQ ID NO: 21823 - RNA, 25 nt, Artificial Sequence
  Description of Artificial Sequence: Synthetic oligonucleotide
uccauaucuaauaauggauucgaac

SEQ ID NO: 21824 - RNA, 25 nt, Artificial Sequence
  Description of Artificial Sequence: Synthetic oligonucleotide
cucuccaaacuacaccaauuaauuu

SEQ ID NO: 21825 - RNA, 25 nt, Artificial Sequence
  Description of Artificial Sequence: Synthetic oligonucleotide
uaauguaucuugcuuuuguguuccc

SEQ ID NO: 21826 - RNA, 25 nt, Artificial Sequence
  Description of Artificial Sequence: Synthetic oligonucleotide
cgucuuuuugaaauauagacaugga

SEQ ID NO: 21827 - RNA, 25 nt, Artificial Sequence
  Description of Artificial Sequence: Synthetic oligonucleotide
auuuauaauggcauuuuauauuugg

SEQ ID NO: 21828 - RNA, 25 nt, Artificial Sequence
  Description of Artificial Sequence: Synthetic oligonucleotide
gcaggccaucauagauuauuuacaa

SEQ ID NO: 21829 - RNA, 25 nt, Artificial Sequence
  Description of Artificial Sequence: Synthetic oligonucleotide
accuaaaagcuuuuguguaucaaaa

SEQ ID NO: 21830 - RNA, 25 nt, Artificial Sequence
  Description of Artificial Sequence: Synthetic oligonucleotide
aaaaucacauuuuauuaauguaaau

SEQ ID NO: 21831 - RNA, 25 nt, Artificial Sequence
  Description of Artificial Sequence: Synthetic oligonucleotide
uuucuaaucguauacuugcucacug

SEQ ID NO: 21832 - RNA, 25 nt, Artificial Sequence
  Description of Artificial Sequence: Synthetic oligonucleotide
guucugauuuccuguuucugaacca

SEQ ID NO: 21833 - RNA, 25 nt, Artificial Sequence
  Description of Artificial Sequence: Synthetic oligonucleotide
aaguaaaaucaguccuagaggcuau

SEQ ID NO: 21834 - RNA, 25 nt, Artificial Sequence
  Description of Artificial Sequence: Synthetic oligonucleotide
ugguucuuaaucuauggagcuugcu

SEQ ID NO: 21835 - RNA, 25 nt, Artificial Sequence
  Description of Artificial Sequence: Synthetic oligonucleotide
uuuaagaagccaguugucaauugug

SEQ ID NO: 21836 - RNA, 25 nt, Artificial Sequence
  Description of Artificial Sequence: Synthetic oligonucleotide
gguaacacaaguuuggcccugcugu

SEQ ID NO: 21837 - RNA, 25 nt, Artificial Sequence
  Description of Artificial Sequence: Synthetic oligonucleotide
uccuacuguuuaauagaaaacuguu

SEQ ID NO: 21838 - RNA, 25 nt, Artificial Sequence
  Description of Artificial Sequence: Synthetic oligonucleotide
uuuacauugguuaaugguauuuaga

SEQ ID NO: 21839 - RNA, 25 nt, Artificial Sequence
  Description of Artificial Sequence: Synthetic oligonucleotide
aguaauuuuuucucucugccuccuu

SEQ ID NO: 21840 - RNA, 25 nt, Artificial Sequence
  Description of Artificial Sequence: Synthetic oligonucleotide
uugugucuguuuuaaaggagacuaa

SEQ ID NO: 21841 - RNA, 25 nt, Artificial Sequence
  Description of Artificial Sequence: Synthetic oligonucleotide
acuccaggaguaggaaaugauucau

SEQ ID NO: 21842 - RNA, 25 nt, Artificial Sequence
  Description of Artificial Sequence: Synthetic oligonucleotide
ucauccuccaaagcaagaggcuuaa

SEQ ID NO: 21843 - RNA, 25 nt, Artificial Sequence
  Description of Artificial Sequence: Synthetic oligonucleotide
agagagaaacaccgaaauucagaua

SEQ ID NO: 21844 - RNA, 25 nt, Artificial Sequence
  Description of Artificial Sequence: Synthetic oligonucleotide
agcucagggacugcuaacagagaac

SEQ ID NO: 21845 - RNA, 25 nt, Artificial Sequence
  Description of Artificial Sequence: Synthetic oligonucleotide
cuacauuuuucuuauugccuugaaa

SEQ ID NO: 21846 - RNA, 25 nt, Artificial Sequence
  Description of Artificial Sequence: Synthetic oligonucleotide
aguuaaaaggaaagcagauuucuuc

SEQ ID NO: 21847 - RNA, 25 nt, Artificial Sequence
  Description of Artificial Sequence: Synthetic oligonucleotide
cagugacuuugugguccuacuaacu

SEQ ID NO: 21848 - RNA, 25 nt, Artificial Sequence
  Description of Artificial Sequence: Synthetic oligonucleotide
uacaaccaguuugggugacagggcu

SEQ ID NO: 21849 - RNA, 25 nt, Artificial Sequence
  Description of Artificial Sequence: Synthetic oligonucleotide
ugguaaagucccaguguuagaugag

SEQ ID NO: 21850 - RNA, 25 nt, Artificial Sequence
  Description of Artificial Sequence: Synthetic oligonucleotide
gugaccuaaauauacuuagauuucu

SEQ ID NO: 21851 - RNA, 25 nt, Artificial Sequence
  Description of Artificial Sequence: Synthetic oligonucleotide
uaaguauggugcucucagguccaag

SEQ ID NO: 21852 - RNA, 25 nt, Artificial Sequence
  Description of Artificial Sequence: Synthetic oligonucleotide
guucaacuauucuuaagcagugcaa

SEQ ID NO: 21853 - RNA, 25 nt, Artificial Sequence
  Description of Artificial Sequence: Synthetic oligonucleotide
auucuucccaguuauuugagaugaa

SEQ ID NO: 21854 - RNA, 25 nt, Artificial Sequence
  Description of Artificial Sequence: Synthetic oligonucleotide
aagaucucugcuuauugaagaugua

SEQ ID NO: 21855 - RNA, 25 nt, Artificial Sequence
  Description of Artificial Sequence: Synthetic oligonucleotide
accuucuaaaacuuuccuaaaagug

SEQ ID NO: 21856 - RNA, 25 nt, Artificial Sequence
  Description of Artificial Sequence: Synthetic oligonucleotide
gucugauguuuuuacucaagagggg

SEQ ID NO: 21857 - RNA, 25 nt, Artificial Sequence
  Description of Artificial Sequence: Synthetic oligonucleotide
gagugguaaaauuaaauacucuauu

SEQ ID NO: 21858 - RNA, 25 nt, Artificial Sequence
  Description of Artificial Sequence: Synthetic oligonucleotide
uguucaauucucuaaaaucccagaa

SEQ ID NO: 21859 - RNA, 25 nt, Artificial Sequence
  Description of Artificial Sequence: Synthetic oligonucleotide
acacaaucagaaauagcucaggcag

SEQ ID NO: 21860 - RNA, 25 nt, Artificial Sequence
  Description of Artificial Sequence: Synthetic oligonucleotide
gacacuaauaauuaagaacgcucuu

SEQ ID NO: 21861 - RNA, 25 nt, Artificial Sequence
  Description of Artificial Sequence: Synthetic oligonucleotide
uccucuucauaacugcuuugcaagu

SEQ ID NO: 21862 - RNA, 25 nt, Artificial Sequence
  Description of Artificial Sequence: Synthetic oligonucleotide
uuuccugugaaaacaucaguuuccu

SEQ ID NO: 21863 - RNA, 25 nt, Artificial Sequence
  Description of Artificial Sequence: Synthetic oligonucleotide
uguaccaaagucaaaaugaacguua

SEQ ID NO: 21864 - RNA, 25 nt, Artificial Sequence
  Description of Artificial Sequence: Synthetic oligonucleotide
acaucacucuaaccugaacagcuca

SEQ ID NO: 21865 - RNA, 25 nt, Artificial Sequence
  Description of Artificial Sequence: Synthetic oligonucleotide
acaauguagcuguaaauauaaaaaa

SEQ ID NO: 21866 - RNA, 25 nt, Artificial Sequence
  Description of Artificial Sequence: Synthetic oligonucleotide
augagaguguucuacccaguuuuca

SEQ ID NO: 21867 - RNA, 25 nt, Artificial Sequence
  Description of Artificial Sequence: Synthetic oligonucleotide
aauaaaccuuccaggcugcaauaac

SEQ ID NO: 21868 - RNA, 25 nt, Artificial Sequence
  Description of Artificial Sequence: Synthetic oligonucleotide
ccagcaagguuuucaguuaaagccc

SEQ ID NO: 21869 - RNA, 25 nt, Artificial Sequence
  Description of Artificial Sequence: Synthetic oligonucleotide
cuaucugcacuuuuuauuuauuagc

SEQ ID NO: 21870 - RNA, 25 nt, Artificial Sequence
  Description of Artificial Sequence: Synthetic oligonucleotide
cugaaauguaagcaggcauauucac

SEQ ID NO: 21871 - RNA, 25 nt, Artificial Sequence
  Description of Artificial Sequence: Synthetic oligonucleotide
cucacuuuucuuugccuuuccugag

SEQ ID NO: 21872 - RNA, 25 nt, Artificial Sequence
  Description of Artificial Sequence: Synthetic oligonucleotide
gaguuuuauuaaaacuucucccuug

SEQ ID NO: 21873 - RNA, 25 nt, Artificial Sequence
  Description of Artificial Sequence: Synthetic oligonucleotide
gguuaccuguuaucuuuugcacuuc

SEQ ID NO: 21874 - RNA, 25 nt, Artificial Sequence
  Description of Artificial Sequence: Synthetic oligonucleotide
cuaacauguagccaauaaaucuauu

SEQ ID NO: 21875 - RNA, 25 nt, Artificial Sequence
  Description of Artificial Sequence: Synthetic oligonucleotide
uugauagccaucaaaggaauaaaaa

SEQ ID NO: 21876 - RNA, 25 nt, Artificial Sequence
  Description of Artificial Sequence: Synthetic oligonucleotide
agcuggccguacaaauuacauuuca

SEQ ID NO: 21877 - RNA, 25 nt, Artificial Sequence
  Description of Artificial Sequence: Synthetic oligonucleotide
aaaacaaacccuaauaaauccacau

SEQ ID NO: 21878 - RNA, 25 nt, Artificial Sequence
  Description of Artificial Sequence: Synthetic oligonucleotide
uuuccgcauggcucauucaccugga

SEQ ID NO: 21879 - RNA, 25 nt, Artificial Sequence
  Description of Artificial Sequence: Synthetic oligonucleotide
aauaaugccuuuuauugaauauguu

SEQ ID NO: 21880 - RNA, 25 nt, Artificial Sequence
  Description of Artificial Sequence: Synthetic oligonucleotide
ucuuauagggcaaaacacuuucaua

SEQ ID NO: 21881 - RNA, 25 nt, Artificial Sequence
  Description of Artificial Sequence: Synthetic oligonucleotide
aaguagaguuuuuuauguuuuuugu

SEQ ID NO: 21882 - RNA, 25 nt, Artificial Sequence
  Description of Artificial Sequence: Synthetic oligonucleotide
ucauaucgguaacaugcagcuuuuu

SEQ ID NO: 21883 - RNA, 25 nt, Artificial Sequence
  Description of Artificial Sequence: Synthetic oligonucleotide
uccucucauagcauuuucuauagcg

SEQ ID NO: 21884 - RNA, 25 nt, Artificial Sequence
  Description of Artificial Sequence: Synthetic oligonucleotide
gaauguaauaugccucuuaucuuca

SEQ ID NO: 21885 - RNA, 25 nt, Artificial Sequence
  Description of Artificial Sequence: Synthetic oligonucleotide
augaaaaauaaauauugcuuuugaa

SEQ ID NO: 21886 - RNA, 25 nt, Artificial Sequence
  Description of Artificial Sequence: Synthetic oligonucleotide
uauugcuuuugaacaaaacuaaaaa

SEQ ID NO: 21887 - RNA, 25 nt, Artificial Sequence
  Description of Artificial Sequence: Synthetic oligonucleotide
aaccucaggcgagaugacuuguacc

SEQ ID NO: 21888 - RNA, 25 nt, Artificial Sequence
  Description of Artificial Sequence: Synthetic oligonucleotide
cgaagagaugagaccauccagguga

SEQ ID NO: 21889 - RNA, 25 nt, Artificial Sequence
  Description of Artificial Sequence: Synthetic oligonucleotide
aaaggaaacggcuacgugcagaguc

SEQ ID NO: 21890 - RNA, 25 nt, Artificial Sequence
  Description of Artificial Sequence: Synthetic oligonucleotide
ccuagauucccgaacagcuacccca

SEQ ID NO: 21891 - RNA, 25 nt, Artificial Sequence
  Description of Artificial Sequence: Synthetic oligonucleotide
aggaaccugcuccugacauggcggc

SEQ ID NO: 21892 - RNA, 25 nt, Artificial Sequence
  Description of Artificial Sequence: Synthetic oligonucleotide
cuucacucucaggagaauacacgga

SEQ ID NO: 21893 - RNA, 25 nt, Artificial Sequence
  Description of Artificial Sequence: Synthetic oligonucleotide
auacagcuaguguuugacaaucagu

SEQ ID NO: 21894 - RNA, 25 nt, Artificial Sequence
  Description of Artificial Sequence: Synthetic oligonucleotide
uuuggauuagaggaagcagaaaaug

SEQ ID NO: 21895 - RNA, 25 nt, Artificial Sequence
  Description of Artificial Sequence: Synthetic oligonucleotide
gauaucuguagguaugauuuugugg

SEQ ID NO: 21896 - RNA, 25 nt, Artificial Sequence
  Description of Artificial Sequence: Synthetic oligonucleotide
gaaguugaagauauauccgaaacca

SEQ ID NO: 21897 - RNA, 25 nt, Artificial Sequence
  Description of Artificial Sequence: Synthetic oligonucleotide
aguaccauuauuagaggacgauggu

SEQ ID NO: 21898 - RNA, 25 nt, Artificial Sequence
  Description of Artificial Sequence: Synthetic oligonucleotide
uguggacacaaggaaguuccuccaa

SEQ ID NO: 21899 - RNA, 25 nt, Artificial Sequence
  Description of Artificial Sequence: Synthetic oligonucleotide
aggauaaaaucaagaacgaaccaaa

SEQ ID NO: 21900 - RNA, 25 nt, Artificial Sequence
  Description of Artificial Sequence: Synthetic oligonucleotide
auuaaaaucacauucaaguccgaug

SEQ ID NO: 21901 - RNA, 25 nt, Artificial Sequence
  Description of Artificial Sequence: Synthetic oligonucleotide
gacuacuuuguggcuaaaccuggau

SEQ ID NO: 21902 - RNA, 25 nt, Artificial Sequence
  Description of Artificial Sequence: Synthetic oligonucleotide
uucaagauuuauuauucuuugcugg

SEQ ID NO: 21903 - RNA, 25 nt, Artificial Sequence
  Description of Artificial Sequence: Synthetic oligonucleotide
gaagauuuccaacccgcagcagcuu

SEQ ID NO: 21904 - RNA, 25 nt, Artificial Sequence
  Description of Artificial Sequence: Synthetic oligonucleotide
ucagagaccaacugggaaucuguca

SEQ ID NO: 21905 - RNA, 25 nt, Artificial Sequence
  Description of Artificial Sequence: Synthetic oligonucleotide
acaagcucuauuucagggguauccu

SEQ ID NO: 21906 - RNA, 25 nt, Artificial Sequence
  Description of Artificial Sequence: Synthetic oligonucleotide
uauaacucuccaucaguaacggauc

SEQ ID NO: 21907 - RNA, 25 nt, Artificial Sequence
  Description of Artificial Sequence: Synthetic oligonucleotide
cccacucugauugcggaugcucugg

SEQ ID NO: 21908 - RNA, 25 nt, Artificial Sequence
  Description of Artificial Sequence: Synthetic oligonucleotide
gacaaaaaaauugcagaauuugaua

SEQ ID NO: 21909 - RNA, 25 nt, Artificial Sequence
  Description of Artificial Sequence: Synthetic oligonucleotide
acaguggaagaucugcucaaguacu

SEQ ID NO: 21910 - RNA, 25 nt, Artificial Sequence
  Description of Artificial Sequence: Synthetic oligonucleotide
uucaauccagagucauggcaagaag

SEQ ID NO: 21911 - RNA, 25 nt, Artificial Sequence
  Description of Artificial Sequence: Synthetic oligonucleotide
gaucuugagaauauguaucuggaca

SEQ ID NO: 21912 - RNA, 25 nt, Artificial Sequence
  Description of Artificial Sequence: Synthetic oligonucleotide
accccucgguaucgaggcaggucau

SEQ ID NO: 21913 - RNA, 25 nt, Artificial Sequence
  Description of Artificial Sequence: Synthetic oligonucleotide
uaccaugaccggaagucaaaaguug

SEQ ID NO: 21914 - RNA, 25 nt, Artificial Sequence
  Description of Artificial Sequence: Synthetic oligonucleotide
gaccuggauaggcucaaugaugaug

SEQ ID NO: 21915 - RNA, 25 nt, Artificial Sequence
  Description of Artificial Sequence: Synthetic oligonucleotide
gccaagcguuacaguugcacuccca

SEQ ID NO: 21916 - RNA, 25 nt, Artificial Sequence
  Description of Artificial Sequence: Synthetic oligonucleotide
aggaauuacucggucaauauaagag

SEQ ID NO: 21917 - RNA, 25 nt, Artificial Sequence
  Description of Artificial Sequence: Synthetic oligonucleotide
gaagagcugaaguuggccaaugugg

SEQ ID NO: 21918 - RNA, 25 nt, Artificial Sequence
  Description of Artificial Sequence: Synthetic oligonucleotide
gucuucuuuccacguugccuccucg

SEQ ID NO: 21919 - RNA, 25 nt, Artificial Sequence
  Description of Artificial Sequence: Synthetic oligonucleotide
gugcagcgcuguggaggaaauugug

SEQ ID NO: 21920 - RNA, 25 nt, Artificial Sequence
  Description of Artificial Sequence: Synthetic oligonucleotide
ggcuguggaacugucaacuggaggu

SEQ ID NO: 21921 - RNA, 25 nt, Artificial Sequence
  Description of Artificial Sequence: Synthetic oligonucleotide
uccugcacaugcaauucagggaaaa

SEQ ID NO: 21922 - RNA, 25 nt, Artificial Sequence
  Description of Artificial Sequence: Synthetic oligonucleotide
accgugaaaaaguaucaugagguau

SEQ ID NO: 21923 - RNA, 25 nt, Artificial Sequence
  Description of Artificial Sequence: Synthetic oligonucleotide
uuacaguuugagccuggccacauca

SEQ ID NO: 21924 - RNA, 25 nt, Artificial Sequence
  Description of Artificial Sequence: Synthetic oligonucleotide
aagaggagggguagagcuaagacca

SEQ ID NO: 21925 - RNA, 25 nt, Artificial Sequence
  Description of Artificial Sequence: Synthetic oligonucleotide
auggcucuaguugacauccaguugg

SEQ ID NO: 21926 - RNA, 25 nt, Artificial Sequence
  Description of Artificial Sequence: Synthetic oligonucleotide
gaucaccaugaacgaugugauugua

SEQ ID NO: 21927 - RNA, 25 nt, Artificial Sequence
  Description of Artificial Sequence: Synthetic oligonucleotide
aucugcagcucaagaccaccucgau

SEQ ID NO: 21928 - RNA, 25 nt, Artificial Sequence
  Description of Artificial Sequence: Synthetic oligonucleotide
uaagagaaugugcacauccuuacau

SEQ ID NO: 21929 - RNA, 25 nt, Artificial Sequence
  Description of Artificial Sequence: Synthetic oligonucleotide
uuaagccugaaagaaccuuuaguuu

SEQ ID NO: 21930 - RNA, 25 nt, Artificial Sequence
  Description of Artificial Sequence: Synthetic oligonucleotide
uaaggagggugagauaagagacccu

SEQ ID NO: 21931 - RNA, 25 nt, Artificial Sequence
  Description of Artificial Sequence: Synthetic oligonucleotide
uuuuccuaccagcaaccaaacuuac

SEQ ID NO: 21932 - RNA, 25 nt, Artificial Sequence
  Description of Artificial Sequence: Synthetic oligonucleotide
cuacuagccugcaaugcaaugaaca

SEQ ID NO: 21933 - RNA, 25 nt, Artificial Sequence
  Description of Artificial Sequence: Synthetic oligonucleotide
acaagugguugcugagucucagccu

SEQ ID NO: 21934 - RNA, 25 nt, Artificial Sequence
  Description of Artificial Sequence: Synthetic oligonucleotide
uugcuuuguuaaugccauggcaagu

SEQ ID NO: 21935 - RNA, 25 nt, Artificial Sequence
  Description of Artificial Sequence: Synthetic oligonucleotide
uagaaagguauaucaucaacuucua

SEQ ID NO: 21936 - RNA, 25 nt, Artificial Sequence
  Description of Artificial Sequence: Synthetic oligonucleotide
auaccuaagaauauaggauugcauu

SEQ ID NO: 21937 - RNA, 25 nt, Artificial Sequence
  Description of Artificial Sequence: Synthetic oligonucleotide
uuaauaauaguguuugagguuauau

SEQ ID NO: 21938 - RNA, 25 nt, Artificial Sequence
  Description of Artificial Sequence: Synthetic oligonucleotide
uaugcacaaacacacacagaaauau

SEQ ID NO: 21939 - RNA, 25 nt, Artificial Sequence
  Description of Artificial Sequence: Synthetic oligonucleotide
uauucaugucuauguguauauagau

SEQ ID NO: 21940 - RNA, 25 nt, Artificial Sequence
  Description of Artificial Sequence: Synthetic oligonucleotide
ucaaauguuuuuuuugguauauaua

SEQ ID NO: 21941 - RNA, 25 nt, Artificial Sequence
  Description of Artificial Sequence: Synthetic oligonucleotide
aaccagguacaccagagcuuacaua

SEQ ID NO: 21942 - RNA, 25 nt, Artificial Sequence
  Description of Artificial Sequence: Synthetic oligonucleotide
auguuugaguuagacucuuaaaauc

SEQ ID NO: 21943 - RNA, 25 nt, Artificial Sequence
  Description of Artificial Sequence: Synthetic oligonucleotide
ccuuugccaaaauaagggaugguca

SEQ ID NO: 21944 - RNA, 25 nt, Artificial Sequence
  Description of Artificial Sequence: Synthetic oligonucleotide
aaauauaugaaacaugucuuuagaa

SEQ ID NO: 21945 - RNA, 25 nt, Artificial Sequence
  Description of Artificial Sequence: Synthetic oligonucleotide
aaauuuaggagauaaauuuauuuuu

SEQ ID NO: 21946 - RNA, 25 nt, Artificial Sequence
  Description of Artificial Sequence: Synthetic oligonucleotide
uaaauuuugaaacacaaaacaauuu

SEQ ID NO: 21947 - RNA, 25 nt, Artificial Sequence
  Description of Artificial Sequence: Synthetic oligonucleotide
uugaaucuugcucucuuaaagaaag

SEQ ID NO: 21948 - RNA, 25 nt, Artificial Sequence
  Description of Artificial Sequence: Synthetic oligonucleotide
gcaucuuguauauuaaaaaucaaaa

SEQ ID NO: 21949 - RNA, 25 nt, Artificial Sequence
  Description of Artificial Sequence: Synthetic oligonucleotide
agaugaggcuuucuuacauauacau

SEQ ID NO: 21950 - RNA, 25 nt, Artificial Sequence
  Description of Artificial Sequence: Synthetic oligonucleotide
ucuuaguugauuauuaaaaaaggaa

SEQ ID NO: 21951 - RNA, 25 nt, Artificial Sequence
  Description of Artificial Sequence: Synthetic oligonucleotide
aaaauaugguuuccagagaaaaggc

SEQ ID NO: 21952 - RNA, 25 nt, Artificial Sequence
  Description of Artificial Sequence: Synthetic oligonucleotide
ccaauaccuaagcauuuuuuccaug

SEQ ID NO: 21953 - RNA, 25 nt, Artificial Sequence
  Description of Artificial Sequence: Synthetic oligonucleotide
gagaagcacugcauacuuaccuaug

SEQ ID NO: 21954 - RNA, 25 nt, Artificial Sequence
  Description of Artificial Sequence: Synthetic oligonucleotide
guggacuauaauaaccugucuccaa

SEQ ID NO: 21955 - RNA, 25 nt, Artificial Sequence
  Description of Artificial Sequence: Synthetic oligonucleotide
aaaccaugccauaauaauauaagug

SEQ ID NO: 21956 - RNA, 25 nt, Artificial Sequence
  Description of Artificial Sequence: Synthetic oligonucleotide
gcuuuagaaauuaaaucauuguguu

SEQ ID NO: 21957 - RNA, 25 nt, Artificial Sequence
  Description of Artificial Sequence: Synthetic oligonucleotide
uuuuuaugcauuuugcugaggcaug

SEQ ID NO: 21958 - RNA, 25 nt, Artificial Sequence
  Description of Artificial Sequence: Synthetic oligonucleotide
gcuuauucauuuaacaccuaucuca

SEQ ID NO: 21959 - RNA, 25 nt, Artificial Sequence
  Description of Artificial Sequence: Synthetic oligonucleotide
aaaaacuuacuuagaagguuuuuua

SEQ ID NO: 21960 - RNA, 25 nt, Artificial Sequence
  Description of Artificial Sequence: Synthetic oligonucleotide
auuauaguccuacaaaagacaaugu

SEQ ID NO: 21961 - RNA, 25 nt, Artificial Sequence
  Description of Artificial Sequence: Synthetic oligonucleotide
uauaagcuguaacagaauuuugaau

SEQ ID NO: 21962 - RNA, 25 nt, Artificial Sequence
  Description of Artificial Sequence: Synthetic oligonucleotide
uuguuuuucuuugcaaaaccccucc

SEQ ID NO: 21963 - RNA, 25 nt, Artificial Sequence
  Description of Artificial Sequence: Synthetic oligonucleotide
cacaaaagcaaauccuuucaagaau

SEQ ID NO: 21964 - RNA, 25 nt, Artificial Sequence
  Description of Artificial Sequence: Synthetic oligonucleotide
uggcaugggcauucuguaugaaccu

SEQ ID NO: 21965 - RNA, 25 nt, Artificial Sequence
  Description of Artificial Sequence: Synthetic oligonucleotide
uuuccagaugguguucagugaaaga

SEQ ID NO: 21966 - RNA, 25 nt, Artificial Sequence
  Description of Artificial Sequence: Synthetic oligonucleotide
auguggguaguugagaacuuaaaaa

SEQ ID NO: 21967 - RNA, 25 nt, Artificial Sequence
  Description of Artificial Sequence: Synthetic oligonucleotide
agugaacauugaaacaucgacguaa

SEQ ID NO: 21968 - RNA, 25 nt, Artificial Sequence
  Description of Artificial Sequence: Synthetic oligonucleotide
acuggaaauuaggugggauauuuga

SEQ ID NO: 21969 - RNA, 25 nt, Artificial Sequence
  Description of Artificial Sequence: Synthetic oligonucleotide
auaggauccauaucuaauaauggau

SEQ ID NO: 21970 - RNA, 25 nt, Artificial Sequence
  Description of Artificial Sequence: Synthetic oligonucleotide
uucgaacucuccaaacuacaccaau

SEQ ID NO: 21971 - RNA, 25 nt, Artificial Sequence
  Description of Artificial Sequence: Synthetic oligonucleotide
uuaauuuaauguaucuugcuuuugu

SEQ ID NO: 21972 - RNA, 25 nt, Artificial Sequence
  Description of Artificial Sequence: Synthetic oligonucleotide
uguucccgucuuuuugaaauauaga

SEQ ID NO: 21973 - RNA, 25 nt, Artificial Sequence
  Description of Artificial Sequence: Synthetic oligonucleotide
acauggauuuauaauggcauuuuau

SEQ ID NO: 21974 - RNA, 25 nt, Artificial Sequence
  Description of Artificial Sequence: Synthetic oligonucleotide
uauuuggcaggccaucauagauuau

SEQ ID NO: 21975 - RNA, 25 nt, Artificial Sequence
  Description of Artificial Sequence: Synthetic oligonucleotide
uuuacaaccuaaaagcuuuugugua

SEQ ID NO: 21976 - RNA, 25 nt, Artificial Sequence
  Description of Artificial Sequence: Synthetic oligonucleotide
aucaaaaaaaucacauuuuauuaau

SEQ ID NO: 21977 - RNA, 25 nt, Artificial Sequence
  Description of Artificial Sequence: Synthetic oligonucleotide
uguaaauuucuaaucguauacuugc

SEQ ID NO: 21978 - RNA, 25 nt, Artificial Sequence
  Description of Artificial Sequence: Synthetic oligonucleotide
cucacuguucugauuuccuguuucu

SEQ ID NO: 21979 - RNA, 25 nt, Artificial Sequence
  Description of Artificial Sequence: Synthetic oligonucleotide
ugaaccaaguaaaaucaguccuaga

SEQ ID NO: 21980 - RNA, 25 nt, Artificial Sequence
  Description of Artificial Sequence: Synthetic oligonucleotide
aggcuaugguucuuaaucuauggag

SEQ ID NO: 21981 - RNA, 25 nt, Artificial Sequence
  Description of Artificial Sequence: Synthetic oligonucleotide
gcuugcuuuaagaagccaguuguca

SEQ ID NO: 21982 - RNA, 25 nt, Artificial Sequence
  Description of Artificial Sequence: Synthetic oligonucleotide
aauugugguaacacaaguuuggccc

SEQ ID NO: 21983 - RNA, 25 nt, Artificial Sequence
  Description of Artificial Sequence: Synthetic oligonucleotide
cugcuguccuacuguuuaauagaaa

SEQ ID NO: 21984 - RNA, 25 nt, Artificial Sequence
  Description of Artificial Sequence: Synthetic oligonucleotide
aacuguuuuacauugguuaauggua

SEQ ID NO: 21985 - RNA, 25 nt, Artificial Sequence
  Description of Artificial Sequence: Synthetic oligonucleotide
auuuagaguaauuuuuucucucugc

SEQ ID NO: 21986 - RNA, 25 nt, Artificial Sequence
  Description of Artificial Sequence: Synthetic oligonucleotide
ccuccuuugugucuguuuuaaagga

SEQ ID NO: 21987 - RNA, 25 nt, Artificial Sequence
  Description of Artificial Sequence: Synthetic oligonucleotide
agacuaacuccaggaguaggaaaug

SEQ ID NO: 21988 - RNA, 25 nt, Artificial Sequence
  Description of Artificial Sequence: Synthetic oligonucleotide
gauucaucauccuccaaagcaagag

SEQ ID NO: 21989 - RNA, 25 nt, Artificial Sequence
  Description of Artificial Sequence: Synthetic oligonucleotide
ggcuuaagagagaaacaccgaaauu

SEQ ID NO: 21990 - RNA, 25 nt, Artificial Sequence
  Description of Artificial Sequence: Synthetic oligonucleotide
ucagauagcucagggacugcuaaca

SEQ ID NO: 21991 - RNA, 25 nt, Artificial Sequence
  Description of Artificial Sequence: Synthetic oligonucleotide
agagaacuacauuuuucuuauugcc

SEQ ID NO: 21992 - RNA, 25 nt, Artificial Sequence
  Description of Artificial Sequence: Synthetic oligonucleotide
cuugaaaguuaaaaggaaagcagau

SEQ ID NO: 21993 - RNA, 25 nt, Artificial Sequence
  Description of Artificial Sequence: Synthetic oligonucleotide
uuucuucagugacuuugugguccua

SEQ ID NO: 21994 - RNA, 25 nt, Artificial Sequence
  Description of Artificial Sequence: Synthetic oligonucleotide
acuaacuacaaccaguuugggugac

SEQ ID NO: 21995 - RNA, 25 nt, Artificial Sequence
  Description of Artificial Sequence: Synthetic oligonucleotide
cagggcugguaaagucccaguguua

SEQ ID NO: 21996 - RNA, 25 nt, Artificial Sequence
  Description of Artificial Sequence: Synthetic oligonucleotide
agaugagugaccuaaauauacuuag

SEQ ID NO: 21997 - RNA, 25 nt, Artificial Sequence
  Description of Artificial Sequence: Synthetic oligonucleotide
gauuucuaaguauggugcucucagg

SEQ ID NO: 21998 - RNA, 25 nt, Artificial Sequence
  Description of Artificial Sequence: Synthetic oligonucleotide
guccaaguucaacuauucuuaagca

SEQ ID NO: 21999 - RNA, 25 nt, Artificial Sequence
  Description of Artificial Sequence: Synthetic oligonucleotide
agugcaauucuucccaguuauuuga

SEQ ID NO: 22000 - RNA, 25 nt, Artificial Sequence
  Description of Artificial Sequence: Synthetic oligonucleotide
agaugaaagaucucugcuuauugaa

SEQ ID NO: 22001 - RNA, 25 nt, Artificial Sequence
  Description of Artificial Sequence: Synthetic oligonucleotide
agauguaccuucuaaaacuuuccua

SEQ ID NO: 22002 - RNA, 25 nt, Artificial Sequence
  Description of Artificial Sequence: Synthetic oligonucleotide
aaaagugucugauguuuuuacucaa

SEQ ID NO: 22003 - RNA, 25 nt, Artificial Sequence
  Description of Artificial Sequence: Synthetic oligonucleotide
agaggggagugguaaaauuaaauac

SEQ ID NO: 22004 - RNA, 25 nt, Artificial Sequence
  Description of Artificial Sequence: Synthetic oligonucleotide
cucuauuguucaauucucuaaaauc

SEQ ID NO: 22005 - RNA, 25 nt, Artificial Sequence
  Description of Artificial Sequence: Synthetic oligonucleotide
cccagaacacaaucagaaauagcuc

SEQ ID NO: 22006 - RNA, 25 nt, Artificial Sequence
  Description of Artificial Sequence: Synthetic oligonucleotide
caggcagacacuaauaauuaagaac

SEQ ID NO: 22007 - RNA, 25 nt, Artificial Sequence
  Description of Artificial Sequence: Synthetic oligonucleotide
cgcucuuccucuucauaacugcuuu

SEQ ID NO: 22008 - RNA, 25 nt, Artificial Sequence
  Description of Artificial Sequence: Synthetic oligonucleotide
ugcaaguuuccugugaaaacaucag

SEQ ID NO: 22009 - RNA, 25 nt, Artificial Sequence
  Description of Artificial Sequence: Synthetic oligonucleotide
guuuccuguaccaaagucaaaauga

SEQ ID NO: 22010 - RNA, 25 nt, Artificial Sequence
  Description of Artificial Sequence: Synthetic oligonucleotide
aacguuacaucacucuaaccugaac

SEQ ID NO: 22011 - RNA, 25 nt, Artificial Sequence
  Description of Artificial Sequence: Synthetic oligonucleotide
cagcucacaauguagcuguaaauau

SEQ ID NO: 22012 - RNA, 25 nt, Artificial Sequence
  Description of Artificial Sequence: Synthetic oligonucleotide
uaaaaaaugagaguguucuacccag

SEQ ID NO: 22013 - RNA, 25 nt, Artificial Sequence
  Description of Artificial Sequence: Synthetic oligonucleotide
guuuucaauaaaccuuccaggcugc

SEQ ID NO: 22014 - RNA, 25 nt, Artificial Sequence
  Description of Artificial Sequence: Synthetic oligonucleotide
caauaaccagcaagguuuucaguua

SEQ ID NO: 22015 - RNA, 25 nt, Artificial Sequence
  Description of Artificial Sequence: Synthetic oligonucleotide
aaagcccuaucugcacuuuuuauuu

SEQ ID NO: 22016 - RNA, 25 nt, Artificial Sequence
  Description of Artificial Sequence: Synthetic oligonucleotide
uauuagcugaaauguaagcaggcau

SEQ ID NO: 22017 - RNA, 25 nt, Artificial Sequence
  Description of Artificial Sequence: Synthetic oligonucleotide
uauucacucacuuuucuuugccuuu

SEQ ID NO: 22018 - RNA, 25 nt, Artificial Sequence
  Description of Artificial Sequence: Synthetic oligonucleotide
uccugagaguuuuauuaaaacuucu

SEQ ID NO: 22019 - RNA, 25 nt, Artificial Sequence
  Description of Artificial Sequence: Synthetic oligonucleotide
ucccuugguuaccuguuaucuuuug

SEQ ID NO: 22020 - RNA, 25 nt, Artificial Sequence
  Description of Artificial Sequence: Synthetic oligonucleotide
gcacuucuaacauguagccaauaaa

SEQ ID NO: 22021 - RNA, 25 nt, Artificial Sequence
  Description of Artificial Sequence: Synthetic oligonucleotide
aucuauuugauagccaucaaaggaa

SEQ ID NO: 22022 - RNA, 25 nt, Artificial Sequence
  Description of Artificial Sequence: Synthetic oligonucleotide
auaaaaagcuggccguacaaauuac

SEQ ID NO: 22023 - RNA, 25 nt, Artificial Sequence
  Description of Artificial Sequence: Synthetic oligonucleotide
cauuucaaaacaaacccuaauaaau

SEQ ID NO: 22024 - RNA, 25 nt, Artificial Sequence
  Description of Artificial Sequence: Synthetic oligonucleotide
uccacauuuccgcauggcucauuca

SEQ ID NO: 22025 - RNA, 25 nt, Artificial Sequence
  Description of Artificial Sequence: Synthetic oligonucleotide
accuggaauaaugccuuuuauugaa

SEQ ID NO: 22026 - RNA, 25 nt, Artificial Sequence
  Description of Artificial Sequence: Synthetic oligonucleotide
auauguucuuauagggcaaaacacu

SEQ ID NO: 22027 - RNA, 25 nt, Artificial Sequence
  Description of Artificial Sequence: Synthetic oligonucleotide
uuucauaaguagaguuuuuuauguu

SEQ ID NO: 22028 - RNA, 25 nt, Artificial Sequence
  Description of Artificial Sequence: Synthetic oligonucleotide
uuuuugucauaucgguaacaugcag

SEQ ID NO: 22029 - RNA, 25 nt, Artificial Sequence
  Description of Artificial Sequence: Synthetic oligonucleotide
gcuuuuuccucucauagcauuuucu

SEQ ID NO: 22030 - RNA, 25 nt, Artificial Sequence
  Description of Artificial Sequence: Synthetic oligonucleotide
uauagcgaauguaauaugccucuua

SEQ ID NO: 22031 - RNA, 25 nt, Artificial Sequence
  Description of Artificial Sequence: Synthetic oligonucleotide
aucuucaugaaaaauaaauauugcu

SEQ ID NO: 22032 - DNA, 21 bp, Artificial Sequence
  Description of Artificial Sequence: Synthetic oligonucleotide
  Description of Combined DNA/RNA Molecule: Synthetic oligonucleotide
cuacacaaaucagcgauuutt

SEQ ID NO: 22033 - DNA, 21 bp, Artificial Sequence
  Description of Artificial Sequence: Synthetic oligonucleotide
  Description of Combined DNA/RNA Molecule: Synthetic oligonucleotide
aaaucgcugauuuguguagtt

SEQ ID NO: 22034 - DNA, 25 bp, Artificial Sequence
  Description of Artificial Sequence: Synthetic oligonucleotide
  Description of Combined DNA/RNA Molecule: Synthetic oligonucleotide
cuacacaaaucagcgauuuccaugt

SEQ ID NO: 22035 - RNA, 27 nt, Artificial Sequence
  Description of Artificial Sequence: Synthetic oligonucleotide
acauggaaaucgcugauuuguguaguc

SEQ ID NO: 22036 - RNA, 13 nt, Artificial Sequence
  Description of Artificial Sequence: Synthetic oligonucleotide
cuacacaaaucag

SEQ ID NO: 22037 - DNA, 11 bp, Artificial Sequence
  Description of Artificial Sequence: Synthetic oligonucleotide
  Description of Combined DNA/RNA Molecule: Synthetic oligonucleotide
gauuuccaugt

SEQ ID NO: 22038 - DNA, 21 bp, Artificial Sequence
  Description of Artificial Sequence: Synthetic oligonucleotide
  Description of Combined DNA/RNA Molecule: Synthetic oligonucleotide
ggaucuuauuucuucggagtt

SEQ ID NO: 22039 - DNA, 21 bp, Artificial Sequence
  Description of Artificial Sequence: Synthetic oligonucleotide
  Description of Combined DNA/RNA Molecule: Synthetic oligonucleotide
cuccgaagaaauaagaucctt

SEQ ID NO: 22040 - RNA, 11 nt, Artificial Sequence
  Description of Artificial Sequence: Synthetic oligonucleotide
ggaucuuauuu

SEQ ID NO: 22041 - DNA, 10 bp, Artificial Sequence
  Description of Artificial Sequence: Synthetic oligonucleotide
  Description of Combined DNA/RNA Molecule: Synthetic oligonucleotide
cuucggagtt

SEQ ID NO: 22042 - RNA, 27 nt, Artificial Sequence
  Description of Artificial Sequence: Synthetic oligonucleotide
cauugucuccgaagaaauaagauccuu

SEQ ID NO: 22043 - RNA, 8 nt, Artificial Sequence
  Description of Artificial Sequence: Synthetic oligonucleotide
  modified_base (2): LNA-G
ggaucuua

SEQ ID NO: 22044 - DNA, 17 bp, Artificial Sequence
  Description of Artificial Sequence: Synthetic oligonucleotide
  Description of Combined DNA/RNA Molecule: Synthetic oligonucleotide
uuucuucggagacaatg

SEQ ID NO: 22045 - DNA, 16 bp, Artificial Sequence
  Description of Artificial Sequence: Synthetic oligonucleotide
  Description of Combined DNA/RNA Molecule: Synthetic oligonucleotide
uucuucggagacaatg

SEQ ID NO: 22046 - DNA, 15 bp, Artificial Sequence
  Description of Artificial Sequence: Synthetic oligonucleotide
  Description of Combined DNA/RNA Molecule: Synthetic oligonucleotide
ucuucggagacaatg

SEQ ID NO: 22047 - DNA, 14 bp, Artificial Sequence
  Description of Artificial Sequence: Synthetic oligonucleotide
  Description of Combined DNA/RNA Molecule: Synthetic oligonucleotide
cuucggagacaatg

SEQ ID NO: 22048 - DNA, 13 bp, Artificial Sequence
  Description of Artificial Sequence: Synthetic oligonucleotide
  Description of Combined DNA/RNA Molecule: Synthetic oligonucleotide
uucggagacaatg

SEQ ID NO: 22049 - DNA, 12 bp, Artificial Sequence
  Description of Artificial Sequence: Synthetic oligonucleotide
  Description of Combined DNA/RNA Molecule: Synthetic oligonucleotide
ucggagacaatg

SEQ ID NO: 22050 - DNA, 11 bp, Artificial Sequence
  Description of Artificial Sequence: Synthetic oligonucleotide
  Description of Combined DNA/RNA Molecule: Synthetic oligonucleotide
cggagacaatg

SEQ ID NO: 22051 - RNA, 9 nt, Artificial Sequence
  Description of Artificial Sequence: Synthetic oligonucleotide
  modified_base (2): LNA-G
ggaucuuau

SEQ ID NO: 22052 - RNA, 10 nt, Artificial Sequence
  Description of Artificial Sequence: Synthetic oligonucleotide
  modified_base (2): LNA-G
ggaucuuauu

SEQ ID NO: 22053 - RNA, 11 nt, Artificial Sequence
  Description of Artificial Sequence: Synthetic oligonucleotide
  modified_base (2): LNA-G
ggaucuuauuu

SEQ ID NO: 22054 - RNA, 12 nt, Artificial Sequence
  Description of Artificial Sequence: Synthetic oligonucleotide
  modified_base (2): LNA-G
ggaucuuauuuc

SEQ ID NO: 22055 - RNA, 8 nt, Artificial Sequence
  Description of Artificial Sequence: Synthetic oligonucleotide
  modified_base (3): LNA-A
cuacacaa

SEQ ID NO: 22056 - DNA, 13 bp, Artificial Sequence
  Description of Artificial Sequence: Synthetic oligonucleotide
  Description of Combined DNA/RNA Molecule: Synthetic oligonucleotide
  modified_base (8): LNA-A
aucagcgauuutt

SEQ ID NO: 22057 - DNA, 12 bp, Artificial Sequence
  Description of Artificial Sequence: Synthetic oligonucleotide
  Description of Combined DNA/RNA Molecule: Synthetic oligonucleotide
  modified_base (7): LNA-A
ucagcgauuutt

SEQ ID NO: 22058 - DNA, 11 bp, Artificial Sequence
  Description of Artificial Sequence: Synthetic oligonucleotide
  Description of Combined DNA/RNA Molecule: Synthetic oligonucleotide
  modified_base (6): LNA-A
cagcgauuutt

SEQ ID NO: 22059 - DNA, 10 bp, Artificial Sequence
  Description of Artificial Sequence: Synthetic oligonucleotide
  Description of Combined DNA/RNA Molecule: Synthetic oligonucleotide
  modified_base (5): LNA-A
agcgauuutt

SEQ ID NO: 22060 - DNA, 9 bp, Artificial Sequence
  Description of Artificial Sequence: Synthetic oligonucleotide
  Description of Combined DNA/RNA Molecule: Synthetic oligonucleotide
  modified_base (4): LNA-A
gcgauuutt

SEQ ID NO: 22061 - DNA, 8 bp, Artificial Sequence
  Description of Artificial Sequence: Synthetic oligonucleotide
  Description of Combined DNA/RNA Molecule: Synthetic oligonucleotide
  modified_base (3): LNA-A
cgauuutt

SEQ ID NO: 22062 - DNA, 7 bp, Artificial Sequence
  Description of Artificial Sequence: Synthetic oligonucleotide
  Description of Combined DNA/RNA Molecule: Synthetic oligonucleotide
  modified_base (2): LNA-A
gauuutt

SEQ ID NO: 22063 - RNA, 9 nt, Artificial Sequence
  Description of Artificial Sequence: Synthetic oligonucleotide
  modified_base (3): LNA-A
cuacacaaa

SEQ ID NO: 22064 - RNA, 10 nt, Artificial Sequence
  Description of Artificial Sequence: Synthetic oligonucleotide
  modified_base (3): LNA-A
cuacacaaau

SEQ ID NO: 22065 - RNA, 11 nt, Artificial Sequence
  Description of Artificial Sequence: Synthetic oligonucleotide
  modified_base (3): LNA-A
cuacacaaauc

SEQ ID NO: 22066 - RNA, 12 nt, Artificial Sequence
  Description of Artificial Sequence: Synthetic oligonucleotide
  modified_base (3): LNA-A
cuacacaaauca

SEQ ID NO: 22067 - RNA, 13 nt, Artificial Sequence
  Description of Artificial Sequence: Synthetic oligonucleotide
  modified_base (3): LNA-A
cuacacaaaucag

SEQ ID NO: 22068 - RNA, 14 nt, Artificial Sequence
  Description of Artificial Sequence: Synthetic oligonucleotide
  modified_base (3): LNA-A
cuacacaaaucagc

SEQ ID NO: 22069 - RNA, 13 nt, Artificial Sequence
  Description of Artificial Sequence: Synthetic oligonucleotide
  modified_base (2): LNA-G
ggaucuuauuucu

SEQ ID NO: 22070 - RNA, 14 nt, Artificial Sequence
  Description of Artificial Sequence: Synthetic oligonucleotide
  modified_base (2): LNA-G
ggaucuuauuucuu

SEQ ID NO: 22071 - RNA, 8 nt, Artificial Sequence
  Description of Artificial Sequence: Synthetic oligonucleotide
  modified_base (2): LNA-G
  modified_base (8): LNA-A
ggaucuua

SEQ ID NO: 22072 - RNA, 9 nt, Artificial Sequence
  Description of Artificial Sequence: Synthetic oligonucleotide
  modified_base (2): LNA-G
  modified_base (9): LNA-U
ggaucuuau

SEQ ID NO: 22073 - RNA, 10 nt, Artificial Sequence
  Description of Artificial Sequence: Synthetic oligonucleotide
  modified_base (2): LNA-G
  modified_base (10): LNA-U
ggaucuuauu

SEQ ID NO: 22074 - RNA, 11 nt, Artificial Sequence
  Description of Artificial Sequence: Synthetic oligonucleotide
  modified_base (2): LNA-G
  modified_base (11): LNA-U
ggaucuuauuu

SEQ ID NO: 22075 - RNA, 12 nt, Artificial Sequence
  Description of Artificial Sequence: Synthetic oligonucleotide
  modified_base (2): LNA-G
  modified_base (12): LNA-C
ggaucuuauuuc

SEQ ID NO: 22076 - RNA, 13 nt, Artificial Sequence
  Description of Artificial Sequence: Synthetic oligonucleotide
  modified_base (2): LNA-G
  modified_base (13): LNA-U
ggaucuuauuucu

SEQ ID NO: 22077 - RNA, 14 nt, Artificial Sequence
  Description of Artificial Sequence: Synthetic oligonucleotide
  modified_base (2): LNA-G
  modified_base (14): LNA-U
ggaucuuauuucuu

SEQ ID NO: 22078 - DNA, 13 bp, Artificial Sequence
  Description of Artificial Sequence: Synthetic oligonucleotide
  Description of Combined DNA/RNA Molecule: Synthetic oligonucleotide
  modified_base (8): LNA-G
uuucuucggagtt

SEQ ID NO: 22079 - DNA, 12 bp, Artificial Sequence
  Description of Artificial Sequence: Synthetic oligonucleotide
  Description of Combined DNA/RNA Molecule: Synthetic oligonucleotide
  modified_base (7): LNA-G
uucuucggagtt

SEQ ID NO: 22080 - DNA, 11 bp, Artificial Sequence
  Description of Artificial Sequence: Synthetic oligonucleotide
  Description of Combined DNA/RNA Molecule: Synthetic oligonucleotide
  modified_base (6): LNA-G
ucuucggagtt

SEQ ID NO: 22081 - DNA, 10 bp, Artificial Sequence
  Description of Artificial Sequence: Synthetic oligonucleotide
  Description of Combined DNA/RNA Molecule: Synthetic oligonucleotide
  modified_base (5): LNA-G
cuucggagtt

SEQ ID NO: 22082 - DNA, 9 bp, Artificial Sequence
  Description of Artificial Sequence: Synthetic oligonucleotide
  Description of Combined DNA/RNA Molecule: Synthetic oligonucleotide
  modified_base (4): LNA-G
uucggagtt

SEQ ID NO: 22083 - DNA, 8 bp, Artificial Sequence
  Description of Artificial Sequence: Synthetic oligonucleotide
  Description of Combined DNA/RNA Molecule: Synthetic oligonucleotide
  modified_base (3): LNA-G
ucggagtt

SEQ ID NO: 22084 - DNA, 7 bp, Artificial Sequence
  Description of Artificial Sequence: Synthetic oligonucleotide
  Description of Combined DNA/RNA Molecule: Synthetic oligonucleotide
  modified_base (2): LNA-G
cggagtt

SEQ ID NO: 22085 - DNA, 13 bp, Artificial Sequence
  Description of Artificial Sequence: Synthetic oligonucleotide
  Description of Combined DNA/RNA Molecule: Synthetic oligonucleotide
  modified_base (1): LNA-U
  modified_base (8): LNA-G
uuucuucggagtt

SEQ ID NO: 22086 - DNA, 12 bp, Artificial Sequence
  Description of Artificial Sequence: Synthetic oligonucleotide
  Description of Combined DNA/RNA Molecule: Synthetic oligonucleotide
  modified_base (1): LNA-U
  modified_base (7): LNA-G
uucuucggagtt

SEQ ID NO: 22087 - DNA, 11 bp, Artificial Sequence
  Description of Artificial Sequence: Synthetic oligonucleotide
  Description of Combined DNA/RNA Molecule: Synthetic oligonucleotide
  modified_base (1): LNA-U
  modified_base (6): LNA-G
ucuucggagtt

SEQ ID NO: 22088 - DNA, 10 bp, Artificial Sequence
  Description of Artificial Sequence: Synthetic oligonucleotide
  Description of Combined DNA/RNA Molecule: Synthetic oligonucleotide
  modified_base (1): LNA-C
  modified_base (5): LNA-G
cuucggagtt

SEQ ID NO: 22089 - DNA, 9 bp, Artificial Sequence
  Description of Artificial Sequence: Synthetic oligonucleotide
  Description of Combined DNA/RNA Molecule: Synthetic oligonucleotide
  modified_base (1): LNA-U
  modified_base (4): LNA-G
uucggagtt

SEQ ID NO: 22090 - DNA, 8 bp, Artificial Sequence
  Description of Artificial Sequence: Synthetic oligonucleotide
  Description of Combined DNA/RNA Molecule: Synthetic oligonucleotide
  modified_base (1): LNA-U
  modified_base (3): LNA-G
ucggagtt

SEQ ID NO: 22091 - DNA, 7 bp, Artificial Sequence
  Description of Artificial Sequence: Synthetic oligonucleotide
  Description of Combined DNA/RNA Molecule: Synthetic oligonucleotide
  modified_base (1): LNA-C
  modified_base (2): LNA-G
cggagtt

SEQ ID NO: 22092 - DNA, 21 bp, Artificial Sequence
  Description of Artificial Sequence: Synthetic oligonucleotide
  Description of Combined DNA/RNA Molecule: Synthetic oligonucleotide
  modified_base (2): LNA-G
  modified_base (16): LNA-G
ggaucuuauuucuucggagtt

SEQ ID NO: 22093 - DNA, 25 bp, Artificial Sequence
  Description of Artificial Sequence: Synthetic oligonucleotide
  Description of Combined DNA/RNA Molecule: Synthetic oligonucleotide
ggaucuuauuucuucggagacaatg

SEQ ID NO: 22094 - RNA, 25 nt, Artificial Sequence
  Description of Artificial Sequence: Synthetic oligonucleotide
uuaagcagaguucaaaagcccuuca

SEQ ID NO: 22095 - RNA, 25 nt, Artificial Sequence
  Description of Artificial Sequence: Synthetic oligonucleotide
uaagcagaguucaaaagcccuucag

SEQ ID NO: 22096 - RNA, 25 nt, Artificial Sequence
  Description of Artificial Sequence: Synthetic oligonucleotide
agcagaguucaaaagcccuucagcg

SEQ ID NO: 22097 - RNA, 25 nt, Artificial Sequence
  Description of Artificial Sequence: Synthetic oligonucleotide
cucagggucugagugaagccgcucg

SEQ ID NO: 22098 - RNA, 25 nt, Artificial Sequence
  Description of Artificial Sequence: Synthetic oligonucleotide
caagcaacuacaucacgccagucaa

SEQ ID NO: 22099 - RNA, 25 nt, Artificial Sequence
  Description of Artificial Sequence: Synthetic oligonucleotide
aucaauggcagcuucuuggugcgug

SEQ ID NO: 22100 - RNA, 25 nt, Artificial Sequence
  Description of Artificial Sequence: Synthetic oligonucleotide
uuccagcccacauuggauucaucag

SEQ ID NO: 22101 - RNA, 25 nt, Artificial Sequence
  Description of Artificial Sequence: Synthetic oligonucleotide
cagcugagaauguggaauaccuaag

SEQ ID NO: 22102 - RNA, 25 nt, Artificial Sequence
  Description of Artificial Sequence: Synthetic oligonucleotide
aacguaucuccuaauuugaggcuca

SEQ ID NO: 22103 - RNA, 25 nt, Artificial Sequence
  Description of Artificial Sequence: Synthetic oligonucleotide
ccuaaaauaauuucucuacaauugg

SEQ ID NO: 22104 - RNA, 25 nt, Artificial Sequence
  Description of Artificial Sequence: Synthetic oligonucleotide
uggaagauucagcuaguuaggagcc

SEQ ID NO: 22105 - RNA, 25 nt, Artificial Sequence
  Description of Artificial Sequence: Synthetic oligonucleotide
uuaaacucuccuagucaauauccac

SEQ ID NO: 22106 - RNA, 25 nt, Artificial Sequence
  Description of Artificial Sequence: Synthetic oligonucleotide
cagccuacaguuauguucagucaca

SEQ ID NO: 22107 - RNA, 25 nt, Artificial Sequence
  Description of Artificial Sequence: Synthetic oligonucleotide
guuauguucagucacacacacauac

SEQ ID NO: 22108 - RNA, 25 nt, Artificial Sequence
  Description of Artificial Sequence: Synthetic oligonucleotide
cacauacaaaauguuccuuuugcuu

SEQ ID NO: 22109 - RNA, 25 nt, Artificial Sequence
  Description of Artificial Sequence: Synthetic oligonucleotide
uccuuuugcuuuuaaaguaauuuuu

SEQ ID NO: 22110 - RNA, 25 nt, Artificial Sequence
  Description of Artificial Sequence: Synthetic oligonucleotide
ugaccugugaagcaacagucaaugg

SEQ ID NO: 22111 - RNA, 25 nt, Artificial Sequence
  Description of Artificial Sequence: Synthetic oligonucleotide
cuaucucacacaucgacaaaccaau

SEQ ID NO: 22112 - RNA, 25 nt, Artificial Sequence
  Description of Artificial Sequence: Synthetic oligonucleotide
uguccucaauuguacugcuaccacu

SEQ ID NO: 22113 - RNA, 25 nt, Artificial Sequence
  Description of Artificial Sequence: Synthetic oligonucleotide
aaaccguagcuggcaagcggucuua

SEQ ID NO: 22114 - RNA, 25 nt, Artificial Sequence
  Description of Artificial Sequence: Synthetic oligonucleotide
uagcuggcaagcggucuuaccggcu

SEQ ID NO: 22115 - RNA, 25 nt, Artificial Sequence
  Description of Artificial Sequence: Synthetic oligonucleotide
uuguaugguuaaaagauggguuacc

SEQ ID NO: 22116 - RNA, 25 nt, Artificial Sequence
  Description of Artificial Sequence: Synthetic oligonucleotide
ugguuaaaagauggguuaccugcga

SEQ ID NO: 22117 - RNA, 25 nt, Artificial Sequence
  Description of Artificial Sequence: Synthetic oligonucleotide
cagggaauuauacaaucuugcugag

SEQ ID NO: 22118 - RNA, 25 nt, Artificial Sequence
  Description of Artificial Sequence: Synthetic oligonucleotide
acaaucuugcugagcauaaaacagu

SEQ ID NO: 22119 - RNA, 25 nt, Artificial Sequence
  Description of Artificial Sequence: Synthetic oligonucleotide
ccaauaaugaagaguccuuuauccu

SEQ ID NO: 22120 - RNA, 25 nt, Artificial Sequence
  Description of Artificial Sequence: Synthetic oligonucleotide
acuuuggauguuccaacgcaaguug

SEQ ID NO: 22121 - RNA, 25 nt, Artificial Sequence
  Description of Artificial Sequence: Synthetic oligonucleotide
aaugcuuccacuaaacugaaaccau

SEQ ID NO: 22122 - RNA, 25 nt, Artificial Sequence
  Description of Artificial Sequence: Synthetic oligonucleotide
gagaaaguuugacuuuguuaaauau

SEQ ID NO: 22123 - RNA, 25 nt, Artificial Sequence
  Description of Artificial Sequence: Synthetic oligonucleotide
aaagaacuacuguauauuaaaaguu

SEQ ID NO: 22124 - RNA, 25 nt, Artificial Sequence
  Description of Artificial Sequence: Synthetic oligonucleotide
uuagaaauacggguuuugacuuaac

SEQ ID NO: 22125 - RNA, 25 nt, Artificial Sequence
  Description of Artificial Sequence: Synthetic oligonucleotide
aacauggguacagcaaacucagcac

SEQ ID NO: 22126 - RNA, 25 nt, Artificial Sequence
  Description of Artificial Sequence: Synthetic oligonucleotide
aaagacacagaagaugcugaccuca

SEQ ID NO: 22127 - RNA, 25 nt, Artificial Sequence
  Description of Artificial Sequence: Synthetic oligonucleotide
uaguagggagguuuauucagaucgc

SEQ ID NO: 22128 - RNA, 25 nt, Artificial Sequence
  Description of Artificial Sequence: Synthetic oligonucleotide
gccuucugcagcaggguucugggau

SEQ ID NO: 22129 - RNA, 25 nt, Artificial Sequence
  Description of Artificial Sequence: Synthetic oligonucleotide
ggucugguacauauuggaaauuaug

SEQ ID NO: 22130 - RNA, 25 nt, Artificial Sequence
  Description of Artificial Sequence: Synthetic oligonucleotide
cuaguccuuccgauggaagcacuag

SEQ ID NO: 22131 - RNA, 25 nt, Artificial Sequence
  Description of Artificial Sequence: Synthetic oligonucleotide
ccagugaauauuguuuuuaugugga

SEQ ID NO: 22132 - RNA, 25 nt, Artificial Sequence
  Description of Artificial Sequence: Synthetic oligonucleotide
augaauucaaguuggaauugguaga

SEQ ID NO: 22133 - RNA, 25 nt, Artificial Sequence
  Description of Artificial Sequence: Synthetic oligonucleotide
caggacacagauuuagacuuggaga

SEQ ID NO: 22134 - RNA, 25 nt, Artificial Sequence
  Description of Artificial Sequence: Synthetic oligonucleotide
cucaaagcacaguuacaguauucca

SEQ ID NO: 22135 - RNA, 25 nt, Artificial Sequence
  Description of Artificial Sequence: Synthetic oligonucleotide
accacugccaccacugaugaauuaa

SEQ ID NO: 22136 - RNA, 25 nt, Artificial Sequence
  Description of Artificial Sequence: Synthetic oligonucleotide
gaaacuacuagugccacaucaucac

SEQ ID NO: 22137 - RNA, 25 nt, Artificial Sequence
  Description of Artificial Sequence: Synthetic oligonucleotide
aagucggacagccucaccaaacaga

SEQ ID NO: 22138 - RNA, 25 nt, Artificial Sequence
  Description of Artificial Sequence: Synthetic oligonucleotide
gaaagcgaaaaauggaacaugaugg

SEQ ID NO: 22139 - RNA, 25 nt, Artificial Sequence
  Description of Artificial Sequence: Synthetic oligonucleotide
cccucugauuuagcauguagacugc

SEQ ID NO: 22140 - RNA, 25 nt, Artificial Sequence
  Description of Artificial Sequence: Synthetic oligonucleotide
ugagcuauuuaaggaucuauuuaug

SEQ ID NO: 22141 - RNA, 25 nt, Artificial Sequence
  Description of Artificial Sequence: Synthetic oligonucleotide
aaaaggugaaaaagcacuauuauca

SEQ ID NO: 22142 - RNA, 25 nt, Artificial Sequence
  Description of Artificial Sequence: Synthetic oligonucleotide
gaaaaagcacuauuaucaguucugc

SEQ ID NO: 22143 - RNA, 25 nt, Artificial Sequence
  Description of Artificial Sequence: Synthetic oligonucleotide
ggcugaaaagaaagauuaaaccuac

SEQ ID NO: 22144 - RNA, 25 nt, Artificial Sequence
  Description of Artificial Sequence: Synthetic oligonucleotide
uaaacccuuauaauaaaauccuucu

SEQ ID NO: 22145 - RNA, 25 nt, Artificial Sequence
  Description of Artificial Sequence: Synthetic oligonucleotide
cauacuauuagccaaugcuguagac

SEQ ID NO: 22146 - RNA, 25 nt, Artificial Sequence
  Description of Artificial Sequence: Synthetic oligonucleotide
gacagaagcauuuugauaggaauag

SEQ ID NO: 22147 - RNA, 25 nt, Artificial Sequence
  Description of Artificial Sequence: Synthetic oligonucleotide
agagcaaauaagauaauggcccuga

SEQ ID NO: 22148 - RNA, 25 nt, Artificial Sequence
  Description of Artificial Sequence: Synthetic oligonucleotide
ccaacauuuuucucuuccucaagca

SEQ ID NO: 22149 - RNA, 25 nt, Artificial Sequence
  Description of Artificial Sequence: Synthetic oligonucleotide
uuaaguaugagaaaaguucagccca

SEQ ID NO: 22150 - RNA, 25 nt, Artificial Sequence
  Description of Artificial Sequence: Synthetic oligonucleotide
caggaauaaagauggcugcugaacc

SEQ ID NO: 22151 - RNA, 25 nt, Artificial Sequence
  Description of Artificial Sequence: Synthetic oligonucleotide
aauuugaaugaccaaguucucuuca

SEQ ID NO: 22152 - RNA, 25 nt, Artificial Sequence
  Description of Artificial Sequence: Synthetic oligonucleotide
auguauaaagauagccagccuagag

SEQ ID NO: 22153 - RNA, 25 nt, Artificial Sequence
  Description of Artificial Sequence: Synthetic oligonucleotide
ggcuguaacuaucucugugaagugu

SEQ ID NO: 22154 - RNA, 25 nt, Artificial Sequence
  Description of Artificial Sequence: Synthetic oligonucleotide
ucugugaagugugagaaaauuucaa

SEQ ID NO: 22155 - RNA, 25 nt, Artificial Sequence
  Description of Artificial Sequence: Synthetic oligonucleotide
ccuuuaaggaaaugaauccuccuga

SEQ ID NO: 22156 - RNA, 25 nt, Artificial Sequence
  Description of Artificial Sequence: Synthetic oligonucleotide
aaggauacaaaaagugacaucauau

SEQ ID NO: 22157 - RNA, 25 nt, Artificial Sequence
  Description of Artificial Sequence: Synthetic oligonucleotide
agaugcaauuugaaucuucaucaua

SEQ ID NO: 22158 - RNA, 25 nt, Artificial Sequence
  Description of Artificial Sequence: Synthetic oligonucleotide
guucaaaacgaagacuagcuauuaa

SEQ ID NO: 22159 - RNA, 25 nt, Artificial Sequence
  Description of Artificial Sequence: Synthetic oligonucleotide
gugaaaccucaucucuacuaaaaau

SEQ ID NO: 22160 - RNA, 25 nt, Artificial Sequence
  Description of Artificial Sequence: Synthetic oligonucleotide
acgaaagagaagcucuaucucgccu

SEQ ID NO: 22161 - RNA, 25 nt, Artificial Sequence
  Description of Artificial Sequence: Synthetic oligonucleotide
cuccacaagcgccuucgguccaguu

SEQ ID NO: 22162 - RNA, 25 nt, Artificial Sequence
  Description of Artificial Sequence: Synthetic oligonucleotide
gagaagauuccaaagauguagccgc

SEQ ID NO: 22163 - RNA, 25 nt, Artificial Sequence
  Description of Artificial Sequence: Synthetic oligonucleotide
aaucuggauucaaugaggagacuug

SEQ ID NO: 22164 - RNA, 25 nt, Artificial Sequence
  Description of Artificial Sequence: Synthetic oligonucleotide
agaacagauuugagaguagugagga

SEQ ID NO: 22165 - RNA, 25 nt, Artificial Sequence
  Description of Artificial Sequence: Synthetic oligonucleotide
ccagagcugugcagaugaguacaaa

SEQ ID NO: 22166 - RNA, 25 nt, Artificial Sequence
  Description of Artificial Sequence: Synthetic oligonucleotide
ccucagauuguuguuguuaaugggc

SEQ ID NO: 22167 - RNA, 25 nt, Artificial Sequence
  Description of Artificial Sequence: Synthetic oligonucleotide
cuauuuuaauuauuuuuaauuuauu

SEQ ID NO: 22168 - RNA, 25 nt, Artificial Sequence
  Description of Artificial Sequence: Synthetic oligonucleotide
uuuaauuuauuaauauuuaaauaug

SEQ ID NO: 22169 - RNA, 25 nt, Artificial Sequence
  Description of Artificial Sequence: Synthetic oligonucleotide
augcaguuugaauauccuuuguuuc

SEQ ID NO: 22170 - RNA, 25 nt, Artificial Sequence
  Description of Artificial Sequence: Synthetic oligonucleotide
caugcugcuggcgucuaaguguuug

SEQ ID NO: 22171 - RNA, 25 nt, Artificial Sequence
  Description of Artificial Sequence: Synthetic oligonucleotide
agaugugcauuucaccugugacaaa

SEQ ID NO: 22172 - RNA, 25 nt, Artificial Sequence
  Description of Artificial Sequence: Synthetic oligonucleotide
ucaaaaccugugccaggcugaauua

SEQ ID NO: 22173 - RNA, 25 nt, Artificial Sequence
  Description of Artificial Sequence: Synthetic oligonucleotide
gaauguggguagucauucuuacaau

SEQ ID NO: 22174 - RNA, 25 nt, Artificial Sequence
  Description of Artificial Sequence: Synthetic oligonucleotide
auguggguagucauucuuacaauug

SEQ ID NO: 22175 - RNA, 25 nt, Artificial Sequence
  Description of Artificial Sequence: Synthetic oligonucleotide
ugaaaaugagcaucagagaguguac

SEQ ID NO: 22176 - RNA, 25 nt, Artificial Sequence
  Description of Artificial Sequence: Synthetic oligonucleotide
uugcuuuucauguagaacucagcag

SEQ ID NO: 22177 - RNA, 25 nt, Artificial Sequence
  Description of Artificial Sequence: Synthetic oligonucleotide
uguauuucuauauuuauuuucagua

SEQ ID NO: 22178 - RNA, 25 nt, Artificial Sequence
  Description of Artificial Sequence: Synthetic oligonucleotide
uuugauuaauguuucuuaaauggaa

SEQ ID NO: 22179 - RNA, 25 nt, Artificial Sequence
  Description of Artificial Sequence: Synthetic oligonucleotide
caacguguauagugccuaaaauugu

SEQ ID NO: 22180 - RNA, 25 nt, Artificial Sequence
  Description of Artificial Sequence: Synthetic oligonucleotide
cauauccuuggcuacuaacaucugg

SEQ ID NO: 22181 - RNA, 25 nt, Artificial Sequence
  Description of Artificial Sequence: Synthetic oligonucleotide
uacuaacaucuggagacugugagcu

SEQ ID NO: 22182 - RNA, 25 nt, Artificial Sequence
  Description of Artificial Sequence: Synthetic oligonucleotide
cauaaguugugugcuuuuuauuaau

SEQ ID NO: 22183 - RNA, 25 nt, Artificial Sequence
  Description of Artificial Sequence: Synthetic oligonucleotide
gcaucauuuuggcucuucuuacauu

SEQ ID NO: 22184 - RNA, 25 nt, Artificial Sequence
  Description of Artificial Sequence: Synthetic oligonucleotide
gcucuucuuacauuuguaaaaaugu

SEQ ID NO: 22185 - RNA, 25 nt, Artificial Sequence
  Description of Artificial Sequence: Synthetic oligonucleotide
agauuaggucaucuuaauucauauu

SEQ ID NO: 22186 - RNA, 25 nt, Artificial Sequence
  Description of Artificial Sequence: Synthetic oligonucleotide
auggaauugaaagaacuaaucauga

SEQ ID NO: 22187 - RNA, 25 nt, Artificial Sequence
  Description of Artificial Sequence: Synthetic oligonucleotide
cacacucauuccuucugcucuuggg

SEQ ID NO: 22188 - RNA, 25 nt, Artificial Sequence
  Description of Artificial Sequence: Synthetic oligonucleotide
uguagagguaaccaguagcuuugag

SEQ ID NO: 22189 - RNA, 25 nt, Artificial Sequence
  Description of Artificial Sequence: Synthetic oligonucleotide
caaccacaugccacguaauauuuca

SEQ ID NO: 22190 - RNA, 25 nt, Artificial Sequence
  Description of Artificial Sequence: Synthetic oligonucleotide
ucggaaacaaguuauucucuucacu

SEQ ID NO: 22191 - RNA, 25 nt, Artificial Sequence
  Description of Artificial Sequence: Synthetic oligonucleotide
acucccaauaacuaaugcuaagaaa

SEQ ID NO: 22192 - RNA, 25 nt, Artificial Sequence
  Description of Artificial Sequence: Synthetic oligonucleotide
aaugcuaagaaaugcugaaaaucaa

SEQ ID NO: 22193 - RNA, 25 nt, Artificial Sequence
  Description of Artificial Sequence: Synthetic oligonucleotide
gucuuucucuaaauaugauuacuuu

SEQ ID NO: 22194 - RNA, 25 nt, Artificial Sequence
  Description of Artificial Sequence: Synthetic oligonucleotide
ugaauuucaggcauuuuguucuaca

SEQ ID NO: 22195 - RNA, 25 nt, Artificial Sequence
  Description of Artificial Sequence: Synthetic oligonucleotide
cgauucccucucacccgggacucuc

SEQ ID NO: 22196 - RNA, 25 nt, Artificial Sequence
  Description of Artificial Sequence: Synthetic oligonucleotide
aggaaagugaaccuuuaaaguaaag

SEQ ID NO: 22197 - RNA, 25 nt, Artificial Sequence
  Description of Artificial Sequence: Synthetic oligonucleotide
gaggcugcaugcucuggaagccugg

SEQ ID NO: 22198 - RNA, 25 nt, Artificial Sequence
  Description of Artificial Sequence: Synthetic oligonucleotide
ucucugaacagaaaacaaaagagag

SEQ ID NO: 22199 - RNA, 25 nt, Artificial Sequence
  Description of Artificial Sequence: Synthetic oligonucleotide
aacuuggcuguaaucaguuaugccg

SEQ ID NO: 22200 - RNA, 25 nt, Artificial Sequence
  Description of Artificial Sequence: Synthetic oligonucleotide
agaagccaaaauuaaaagaagucca

SEQ ID NO: 22201 - RNA, 25 nt, Artificial Sequence
  Description of Artificial Sequence: Synthetic oligonucleotide
auuaaaagaaguccaggugagguua

SEQ ID NO: 22202 - RNA, 25 nt, Artificial Sequence
  Description of Artificial Sequence: Synthetic oligonucleotide
gaauccggauuaucgggaagaggac

SEQ ID NO: 22203 - RNA, 25 nt, Artificial Sequence
  Description of Artificial Sequence: Synthetic oligonucleotide
aaugugacaucaaagcaaguauugu

SEQ ID NO: 22204 - RNA, 25 nt, Artificial Sequence
  Description of Artificial Sequence: Synthetic oligonucleotide
caucaaagcaaguauuguagcacuc

SEQ ID NO: 22205 - RNA, 25 nt, Artificial Sequence
  Description of Artificial Sequence: Synthetic oligonucleotide
agagagagaaaacaaaaccacaaau

SEQ ID NO: 22206 - RNA, 25 nt, Artificial Sequence
  Description of Artificial Sequence: Synthetic oligonucleotide
ucgcuguaguauuuaagcccauaca

SEQ ID NO: 22207 - RNA, 25 nt, Artificial Sequence
  Description of Artificial Sequence: Synthetic oligonucleotide
cgcuguaguauuuaagcccauacag

SEQ ID NO: 22208 - RNA, 25 nt, Artificial Sequence
  Description of Artificial Sequence: Synthetic oligonucleotide
auuuaagcccauacagaaaccuucc

SEQ ID NO: 22209 - RNA, 25 nt, Artificial Sequence
  Description of Artificial Sequence: Synthetic oligonucleotide
auuaaaauaaacaugguauaccuac

SEQ ID NO: 22210 - RNA, 25 nt, Artificial Sequence
  Description of Artificial Sequence: Synthetic oligonucleotide
cuguucugaucggccaguuuucgga

SEQ ID NO: 22211 - RNA, 25 nt, Artificial Sequence
  Description of Artificial Sequence: Synthetic oligonucleotide
aaauaauuugaacuuuggaacaggg

SEQ ID NO: 22212 - RNA, 25 nt, Artificial Sequence
  Description of Artificial Sequence: Synthetic oligonucleotide
ugcgaccuuaauuuaacuuuccagu

SEQ ID NO: 22213 - RNA, 25 nt, Artificial Sequence
  Description of Artificial Sequence: Synthetic oligonucleotide
cugagaaagcuaaaguuugguuuug

SEQ ID NO: 22214 - RNA, 25 nt, Artificial Sequence
  Description of Artificial Sequence: Synthetic oligonucleotide
aguaaagaugcuacuucccacugua

SEQ ID NO: 22215 - RNA, 25 nt, Artificial Sequence
  Description of Artificial Sequence: Synthetic oligonucleotide
cugcuuaauugcugauaccauauga

SEQ ID NO: 22216 - RNA, 25 nt, Artificial Sequence
  Description of Artificial Sequence: Synthetic oligonucleotide
uaccauaugaaugaaacaugggcug

SEQ ID NO: 22217 - RNA, 25 nt, Artificial Sequence
  Description of Artificial Sequence: Synthetic oligonucleotide
aacuuucuuauccaacuuuuucaua

SEQ ID NO: 22218 - RNA, 25 nt, Artificial Sequence
  Description of Artificial Sequence: Synthetic oligonucleotide
ccuugcaugacaucaugaggccgga

SEQ ID NO: 22219 - RNA, 25 nt, Artificial Sequence
  Description of Artificial Sequence: Synthetic oligonucleotide
ugaauuuguauaugacugcauuugu

SEQ ID NO: 22220 - RNA, 25 nt, Artificial Sequence
  Description of Artificial Sequence: Synthetic oligonucleotide
gaauccuaguagaauguuuacuacc

SEQ ID NO: 22221 - RNA, 25 nt, Artificial Sequence
  Description of Artificial Sequence: Synthetic oligonucleotide
gaaagggaagaauuuuuugaugaaa

SEQ ID NO: 22222 - RNA, 25 nt, Artificial Sequence
  Description of Artificial Sequence: Synthetic oligonucleotide
uaucggcaugccagugugugaauuu

SEQ ID NO: 22223 - RNA, 25 nt, Artificial Sequence
  Description of Artificial Sequence: Synthetic oligonucleotide
caccucauaguagagcaauguaugu

SEQ ID NO: 22224 - RNA, 25 nt, Artificial Sequence
  Description of Artificial Sequence: Synthetic oligonucleotide
ccagaauugccaaagcacauauaua

SEQ ID NO: 22225 - RNA, 25 nt, Artificial Sequence
  Description of Artificial Sequence: Synthetic oligonucleotide
uggugaucuggguaauaguuucucc

SEQ ID NO: 22226 - RNA, 25 nt, Artificial Sequence
  Description of Artificial Sequence: Synthetic oligonucleotide
gaucuggguaauaguuucuccaaau

SEQ ID NO: 22227 - RNA, 25 nt, Artificial Sequence
  Description of Artificial Sequence: Synthetic oligonucleotide
ggaugugaugaauacuuccuagaaa

SEQ ID NO: 22228 - RNA, 25 nt, Artificial Sequence
  Description of Artificial Sequence: Synthetic oligonucleotide
cauuuccacagcuacaccauauaug

SEQ ID NO: 22229 - RNA, 25 nt, Artificial Sequence
  Description of Artificial Sequence: Synthetic oligonucleotide
acagcuacaccauauaugaauggag

SEQ ID NO: 22230 - RNA, 25 nt, Artificial Sequence
  Description of Artificial Sequence: Synthetic oligonucleotide
ugcaguucuuacacgagaagaagau

SEQ ID NO: 22231 - RNA, 25 nt, Artificial Sequence
  Description of Artificial Sequence: Synthetic oligonucleotide
acgagaagaagaucauuuacaggga

SEQ ID NO: 22232 - RNA, 25 nt, Artificial Sequence
  Description of Artificial Sequence: Synthetic oligonucleotide
cgagaagaagaucauuuacagggac

SEQ ID NO: 22233 - RNA, 25 nt, Artificial Sequence
  Description of Artificial Sequence: Synthetic oligonucleotide
aagaagaucauuuacagggaccuga

SEQ ID NO: 22234 - RNA, 25 nt, Artificial Sequence
  Description of Artificial Sequence: Synthetic oligonucleotide
agaggaagagguguuugacugcauc

SEQ ID NO: 22235 - RNA, 25 nt, Artificial Sequence
  Description of Artificial Sequence: Synthetic oligonucleotide
gaggaagagguguuugacugcaucg

SEQ ID NO: 22236 - RNA, 25 nt, Artificial Sequence
  Description of Artificial Sequence: Synthetic oligonucleotide
cuacuuugagggcgaguucacaggg

SEQ ID NO: 22237 - RNA, 25 nt, Artificial Sequence
  Description of Artificial Sequence: Synthetic oligonucleotide
agggcaucuccuggcaccucugucc

SEQ ID NO: 22238 - RNA, 25 nt, Artificial Sequence
  Description of Artificial Sequence: Synthetic oligonucleotide
ggagugauaugguuugucuuuuuaa

SEQ ID NO: 22239 - RNA, 25 nt, Artificial Sequence
  Description of Artificial Sequence: Synthetic oligonucleotide
gagugauaugguuugucuuuuuaag

SEQ ID NO: 22240 - RNA, 25 nt, Artificial Sequence
  Description of Artificial Sequence: Synthetic oligonucleotide
ugcaguaaagauccuaaagguuguc

SEQ ID NO: 22241 - RNA, 25 nt, Artificial Sequence
  Description of Artificial Sequence: Synthetic oligonucleotide
aguaaagauccuaaagguugucgac

SEQ ID NO: 22242 - RNA, 25 nt, Artificial Sequence
  Description of Artificial Sequence: Synthetic oligonucleotide
ugacaaaggacaaccuggcaauugu

SEQ ID NO: 22243 - RNA, 25 nt, Artificial Sequence
  Description of Artificial Sequence: Synthetic oligonucleotide
gcaauugugacccaguggugcgagg

SEQ ID NO: 22244 - RNA, 25 nt, Artificial Sequence
  Description of Artificial Sequence: Synthetic oligonucleotide
aacaucauccauagagacaugaaau

SEQ ID NO: 22245 - RNA, 25 nt, Artificial Sequence
  Description of Artificial Sequence: Synthetic oligonucleotide
ugaaauccaacaauauauuucucca

SEQ ID NO: 22246 - RNA, 25 nt, Artificial Sequence
  Description of Artificial Sequence: Synthetic oligonucleotide
aacaauauauuucuccaugaaggcu

SEQ ID NO: 22247 - RNA, 25 nt, Artificial Sequence
  Description of Artificial Sequence: Synthetic oligonucleotide
aacaguaaagucacgcuggaguggu

SEQ ID NO: 22248 - RNA, 25 nt, Artificial Sequence
  Description of Artificial Sequence: Synthetic oligonucleotide
ugugaagaaaguaaaggaagagagg

SEQ ID NO: 22249 - RNA, 25 nt, Artificial Sequence
  Description of Artificial Sequence: Synthetic oligonucleotide
cuuccgagccauccuugcaucgggc

SEQ ID NO: 22250 - RNA, 25 nt, Artificial Sequence
  Description of Artificial Sequence: Synthetic oligonucleotide
aauggagguugaauauccuacugug

SEQ ID NO: 22251 - RNA, 25 nt, Artificial Sequence
  Description of Artificial Sequence: Synthetic oligonucleotide
ggagguugaauauccuacuguguaa

SEQ ID NO: 22252 - RNA, 25 nt, Artificial Sequence
  Description of Artificial Sequence: Synthetic oligonucleotide
auuuugaguuuucccuuguagugua

SEQ ID NO: 22253 - RNA, 25 nt, Artificial Sequence
  Description of Artificial Sequence: Synthetic oligonucleotide
uauccuguuuguucuuuguugauug

SEQ ID NO: 22254 - RNA, 25 nt, Artificial Sequence
  Description of Artificial Sequence: Synthetic oligonucleotide
ccuguuuguucuuuguugauugaaa

SEQ ID NO: 22255 - RNA, 25 nt, Artificial Sequence
  Description of Artificial Sequence: Synthetic oligonucleotide
cucuacagccuucuuuuucuuccau

SEQ ID NO: 22256 - RNA, 25 nt, Artificial Sequence
  Description of Artificial Sequence: Synthetic oligonucleotide
ucuuccauagcuaaucuuccuucua

SEQ ID NO: 22257 - RNA, 25 nt, Artificial Sequence
  Description of Artificial Sequence: Synthetic oligonucleotide
auaaucuuccuguugaaugcuucau

SEQ ID NO: 22258 - RNA, 25 nt, Artificial Sequence
  Description of Artificial Sequence: Synthetic oligonucleotide
uaaucuuccuguugaaugcuucaug

SEQ ID NO: 22259 - RNA, 25 nt, Artificial Sequence
  Description of Artificial Sequence: Synthetic oligonucleotide
cuucaugacuugaauucuacuuuga

SEQ ID NO: 22260 - RNA, 25 nt, Artificial Sequence
  Description of Artificial Sequence: Synthetic oligonucleotide
aagagggagagaagcaacuacagac

SEQ ID NO: 22261 - RNA, 25 nt, Artificial Sequence
  Description of Artificial Sequence: Synthetic oligonucleotide
cgucuccuaccagaccaaggucaac

SEQ ID NO: 22262 - RNA, 25 nt, Artificial Sequence
  Description of Artificial Sequence: Synthetic oligonucleotide
gaucaaucggcccgacuaucucgac

SEQ ID NO: 22263 - RNA, 25 nt, Artificial Sequence
  Description of Artificial Sequence: Synthetic oligonucleotide
ggacgaacauccaaccuucccaaac

SEQ ID NO: 22264 - RNA, 25 nt, Artificial Sequence
  Description of Artificial Sequence: Synthetic oligonucleotide
agggucggaacccaagcuuagaacu

SEQ ID NO: 22265 - RNA, 25 nt, Artificial Sequence
  Description of Artificial Sequence: Synthetic oligonucleotide
ucggaacccaagcuuagaacuuuaa

SEQ ID NO: 22266 - RNA, 25 nt, Artificial Sequence
  Description of Artificial Sequence: Synthetic oligonucleotide
acccaagcuuagaacuuuaagcaac

SEQ ID NO: 22267 - RNA, 25 nt, Artificial Sequence
  Description of Artificial Sequence: Synthetic oligonucleotide
gaacuuuaagcaacaagaccaccac

SEQ ID NO: 22268 - RNA, 25 nt, Artificial Sequence
  Description of Artificial Sequence: Synthetic oligonucleotide
acuauucaguggcgagaaauaaagu

SEQ ID NO: 22269 - RNA, 25 nt, Artificial Sequence
  Description of Artificial Sequence: Synthetic oligonucleotide
cuauucaguggcgagaaauaaaguu

SEQ ID NO: 22270 - RNA, 25 nt, Artificial Sequence
  Description of Artificial Sequence: Synthetic oligonucleotide
aaacacagauaacaggaaaugaucc

SEQ ID NO: 22271 - RNA, 25 nt, Artificial Sequence
  Description of Artificial Sequence: Synthetic oligonucleotide
cuuaagaaaagagaagaaaugaaac

SEQ ID NO: 22272 - RNA, 25 nt, Artificial Sequence
  Description of Artificial Sequence: Synthetic oligonucleotide
cugaaggaguguguuuccauccucc

SEQ ID NO: 22273 - RNA, 25 nt, Artificial Sequence
  Description of Artificial Sequence: Synthetic oligonucleotide
ucaccgcgggacugaaaaucuuuga

SEQ ID NO: 22274 - RNA, 25 nt, Artificial Sequence
  Description of Artificial Sequence: Synthetic oligonucleotide
agcagaaauaagcgugccguucagg

SEQ ID NO: 22275 - RNA, 25 nt, Artificial Sequence
  Description of Artificial Sequence: Synthetic oligonucleotide
aagcgugccguucaggguccagaag

SEQ ID NO: 22276 - RNA, 25 nt, Artificial Sequence
  Description of Artificial Sequence: Synthetic oligonucleotide
agaaacagucacucaagacugcuug

SEQ ID NO: 22277 - RNA, 25 nt, Artificial Sequence
  Description of Artificial Sequence: Synthetic oligonucleotide
agaggaagaagguccaugucuuugg

SEQ ID NO: 22278 - RNA, 25 nt, Artificial Sequence
  Description of Artificial Sequence: Synthetic oligonucleotide
uguauucaaaauaugccugaaacac

SEQ ID NO: 22279 - RNA, 25 nt, Artificial Sequence
  Description of Artificial Sequence: Synthetic oligonucleotide
auuuuccucccuuucucuguaccuc

SEQ ID NO: 22280 - RNA, 25 nt, Artificial Sequence
  Description of Artificial Sequence: Synthetic oligonucleotide
caaagaaagauagagcaagacaaga

SEQ ID NO: 22281 - RNA, 25 nt, Artificial Sequence
  Description of Artificial Sequence: Synthetic oligonucleotide
aagaaagauagagcaagacaagaaa

SEQ ID NO: 22282 - RNA, 25 nt, Artificial Sequence
  Description of Artificial Sequence: Synthetic oligonucleotide
gaaagcauuuguuuguacaagaucc

SEQ ID NO: 22283 - RNA, 25 nt, Artificial Sequence
  Description of Artificial Sequence: Synthetic oligonucleotide
ugaguuaaacgaacguacuugcaga

SEQ ID NO: 22284 - RNA, 25 nt, Artificial Sequence
  Description of Artificial Sequence: Synthetic oligonucleotide
acugauacagaacgaucgauacaga

SEQ ID NO: 22285 - RNA, 25 nt, Artificial Sequence
  Description of Artificial Sequence: Synthetic oligonucleotide
auauuauauauauauaaaaauaaau

SEQ ID NO: 22286 - RNA, 25 nt, Artificial Sequence
  Description of Artificial Sequence: Synthetic oligonucleotide
auuauauauauauaaaaauaaauau

SEQ ID NO: 22287 - RNA, 25 nt, Artificial Sequence
  Description of Artificial Sequence: Synthetic oligonucleotide
ucacuggauguauuugacugcugug

SEQ ID NO: 22288 - RNA, 25 nt, Artificial Sequence
  Description of Artificial Sequence: Synthetic oligonucleotide
cagggaagaggaggagaugagagac

SEQ ID NO: 22289 - RNA, 25 nt, Artificial Sequence
  Description of Artificial Sequence: Synthetic oligonucleotide
augaucuuuuuuuugucccacuugg

SEQ ID NO: 22290 - RNA, 27 nt, Artificial Sequence
  Description of Artificial Sequence: Synthetic oligonucleotide
ggccgugaacuccucaucaaaauaccu

SEQ ID NO: 22291 - RNA, 27 nt, Artificial Sequence
  Description of Artificial Sequence: Synthetic oligonucleotide
uggugugauggugaucaucugggccgu

SEQ ID NO: 22292 - RNA, 27 nt, Artificial Sequence
  Description of Artificial Sequence: Synthetic oligonucleotide
aaacccgcaggauaguuuucuucccua

SEQ ID NO: 22293 - RNA, 27 nt, Artificial Sequence
  Description of Artificial Sequence: Synthetic oligonucleotide
caaacuggaugaaauaaauuaaaaccc

SEQ ID NO: 22294 - RNA, 27 nt, Artificial Sequence
  Description of Artificial Sequence: Synthetic oligonucleotide
agaaguccuuaacauuucccuacguga

SEQ ID NO: 22295 - RNA, 27 nt, Artificial Sequence
  Description of Artificial Sequence: Synthetic oligonucleotide
cucugucccacuggguaaacccuggcc

SEQ ID NO: 22296 - RNA, 27 nt, Artificial Sequence
  Description of Artificial Sequence: Synthetic oligonucleotide
cacaauaacaaauuuaaaccuugcucc

SEQ ID NO: 22297 - RNA, 27 nt, Artificial Sequence
  Description of Artificial Sequence: Synthetic oligonucleotide
aaaugcauuugaacaacauaauacaca

SEQ ID NO: 22298 - RNA, 27 nt, Artificial Sequence
  Description of Artificial Sequence: Synthetic oligonucleotide
ggcuuuccugucacaaagauuaaaaac

SEQ ID NO: 22299 - RNA, 27 nt, Artificial Sequence
  Description of Artificial Sequence: Synthetic oligonucleotide
agggcuuuccugucacaaagauuaaaa

SEQ ID NO: 22300 - RNA, 27 nt, Artificial Sequence
  Description of Artificial Sequence: Synthetic oligonucleotide
ggccaugcugggagacauaagcagcag

SEQ ID NO: 22301 - RNA, 27 nt, Artificial Sequence
  Description of Artificial Sequence: Synthetic oligonucleotide
ucagggagaagcuucugaaacacuucu

SEQ ID NO: 22302 - RNA, 27 nt, Artificial Sequence
  Description of Artificial Sequence: Synthetic oligonucleotide
aagggcuucuuccuuauugauggucag

SEQ ID NO: 22303 - RNA, 27 nt, Artificial Sequence
  Description of Artificial Sequence: Synthetic oligonucleotide
ugaagggcuucuuccuuauugaugguc

SEQ ID NO: 22304 - RNA, 27 nt, Artificial Sequence
  Description of Artificial Sequence: Synthetic oligonucleotide
cgcugaagggcuucuuccuuauugaug

SEQ ID NO: 22305 - RNA, 27 nt, Artificial Sequence
  Description of Artificial Sequence: Synthetic oligonucleotide
gccgcugaagggcuucuuccuuauuga

SEQ ID NO: 22306 - RNA, 27 nt, Artificial Sequence
  Description of Artificial Sequence: Synthetic oligonucleotide
acuggccgcugaagggcuucuuccuua

SEQ ID NO: 22307 - RNA, 27 nt, Artificial Sequence
  Description of Artificial Sequence: Synthetic oligonucleotide
cggagcuuuucaccuuuaguuaugcuu

SEQ ID NO: 22308 - RNA, 27 nt, Artificial Sequence
  Description of Artificial Sequence: Synthetic oligonucleotide
ccggagcuuuucaccuuuaguuaugcu

SEQ ID NO: 22309 - RNA, 27 nt, Artificial Sequence
  Description of Artificial Sequence: Synthetic oligonucleotide
cagacuguugacuggcgugauguaguu

SEQ ID NO: 22310 - RNA, 27 nt, Artificial Sequence
  Description of Artificial Sequence: Synthetic oligonucleotide
cuuuugaacucugcuuaaauccagugg

SEQ ID NO: 22311 - RNA, 27 nt, Artificial Sequence
  Description of Artificial Sequence: Synthetic oligonucleotide
gcuuuugaacucugcuuaaauccagug

SEQ ID NO: 22312 - RNA, 27 nt, Artificial Sequence
  Description of Artificial Sequence: Synthetic oligonucleotide
agggcuuuugaacucugcuuaaaucca

SEQ ID NO: 22313 - RNA, 27 nt, Artificial Sequence
  Description of Artificial Sequence: Synthetic oligonucleotide
aagggcuuuugaacucugcuuaaaucc

SEQ ID NO: 22314 - RNA, 27 nt, Artificial Sequence
  Description of Artificial Sequence: Synthetic oligonucleotide
ugaagggcuuuugaacucugcuuaaau

SEQ ID NO: 22315 - RNA, 27 nt, Artificial Sequence
  Description of Artificial Sequence: Synthetic oligonucleotide
cugaagggcuuuugaacucugcuuaaa

SEQ ID NO: 22316 - RNA, 27 nt, Artificial Sequence
  Description of Artificial Sequence: Synthetic oligonucleotide
cgcugaagggcuuuugaacucugcuua

SEQ ID NO: 22317 - RNA, 27 nt, Artificial Sequence
  Description of Artificial Sequence: Synthetic oligonucleotide
cgagcggcuucacucagacccugaggc

SEQ ID NO: 22318 - RNA, 27 nt, Artificial Sequence
  Description of Artificial Sequence: Synthetic oligonucleotide
uugacuggcgugauguaguugcuuggg

SEQ ID NO: 22319 - RNA, 27 nt, Artificial Sequence
  Description of Artificial Sequence: Synthetic oligonucleotide
cacgcaccaagaagcugccauugaucc

SEQ ID NO: 22320 - RNA, 27 nt, Artificial Sequence
  Description of Artificial Sequence: Synthetic oligonucleotide
cugaugaauccaaugugggcuggaauc

SEQ ID NO: 22321 - RNA, 27 nt, Artificial Sequence
  Description of Artificial Sequence: Synthetic oligonucleotide
cuuagguauuccacauucucagcugug

SEQ ID NO: 22322 - RNA, 27 nt, Artificial Sequence
  Description of Artificial Sequence: Synthetic oligonucleotide
ugagccucaaauuaggagauacguuuu

SEQ ID NO: 22323 - RNA, 27 nt, Artificial Sequence
  Description of Artificial Sequence: Synthetic oligonucleotide
ccaauuguagagaaauuauuuuaggaa

SEQ ID NO: 22324 - RNA, 27 nt, Artificial Sequence
  Description of Artificial Sequence: Synthetic oligonucleotide
ggcuccuaacuagcugaaucuuccaau

SEQ ID NO: 22325 - RNA, 27 nt, Artificial Sequence
  Description of Artificial Sequence: Synthetic oligonucleotide
guggauauugacuaggagaguuuaaaa

SEQ ID NO: 22326 - RNA, 27 nt, Artificial Sequence
  Description of Artificial Sequence: Synthetic oligonucleotide
ugugacugaacauaacuguaggcugaa

SEQ ID NO: 22327 - RNA, 27 nt, Artificial Sequence
  Description of Artificial Sequence: Synthetic oligonucleotide
guaugugugugugacugaacauaacug

SEQ ID NO: 22328 - RNA, 27 nt, Artificial Sequence
  Description of Artificial Sequence: Synthetic oligonucleotide
aagcaaaaggaacauuuuguaugugug

SEQ ID NO: 22329 - RNA, 27 nt, Artificial Sequence
  Description of Artificial Sequence: Synthetic oligonucleotide
aaaaauuacuuuaaaagcaaaaggaac

SEQ ID NO: 22330 - RNA, 27 nt, Artificial Sequence
  Description of Artificial Sequence: Synthetic oligonucleotide
ccauugacuguugcuucacaggucaga

SEQ ID NO: 22331 - RNA, 27 nt, Artificial Sequence
  Description of Artificial Sequence: Synthetic oligonucleotide
auugguuugucgaugugugagauaguu

SEQ ID NO: 22332 - RNA, 27 nt, Artificial Sequence
  Description of Artificial Sequence: Synthetic oligonucleotide
agugguagcaguacaauugaggacaag

SEQ ID NO: 22333 - RNA, 27 nt, Artificial Sequence
  Description of Artificial Sequence: Synthetic oligonucleotide
uaagaccgcuugccagcuacgguuuca

SEQ ID NO: 22334 - RNA, 27 nt, Artificial Sequence
  Description of Artificial Sequence: Synthetic oligonucleotide
agccgguaagaccgcuugccagcuacg

SEQ ID NO: 22335 - RNA, 27 nt, Artificial Sequence
  Description of Artificial Sequence: Synthetic oligonucleotide
gguaacccaucuuuuaaccauacaacu

SEQ ID NO: 22336 - RNA, 27 nt, Artificial Sequence
  Description of Artificial Sequence: Synthetic oligonucleotide
ucgcagguaacccaucuuuuaaccaua

SEQ ID NO: 22337 - RNA, 27 nt, Artificial Sequence
  Description of Artificial Sequence: Synthetic oligonucleotide
cucagcaagauuguauaauucccugca

SEQ ID NO: 22338 - RNA, 27 nt, Artificial Sequence
  Description of Artificial Sequence: Synthetic oligonucleotide
acuguuuuaugcucagcaagauuguau

SEQ ID NO: 22339 - RNA, 27 nt, Artificial Sequence
  Description of Artificial Sequence: Synthetic oligonucleotide
aggauaaaggacucuucauuauuggaa

SEQ ID NO: 22340 - RNA, 27 nt, Artificial Sequence
  Description of Artificial Sequence: Synthetic oligonucleotide
caacuugcguuggaacauccaaagugu

SEQ ID NO: 22341 - RNA, 27 nt, Artificial Sequence
  Description of Artificial Sequence: Synthetic oligonucleotide
augguuucaguuuaguggaagcauuua

SEQ ID NO: 22342 - RNA, 27 nt, Artificial Sequence
  Description of Artificial Sequence: Synthetic oligonucleotide
auauuuaacaaagucaaacuuucucac

SEQ ID NO: 22343 - RNA, 27 nt, Artificial Sequence
  Description of Artificial Sequence: Synthetic oligonucleotide
aacuuuuaauauacaguaguucuuuuc

SEQ ID NO: 22344 - RNA, 27 nt, Artificial Sequence
  Description of Artificial Sequence: Synthetic oligonucleotide
guuaagucaaaacccguauuucuaaag

SEQ ID NO: 22345 - RNA, 27 nt, Artificial Sequence
  Description of Artificial Sequence: Synthetic oligonucleotide
gugcugaguuugcuguacccauguuga

SEQ ID NO: 22346 - RNA, 27 nt, Artificial Sequence
  Description of Artificial Sequence: Synthetic oligonucleotide
ugaggucagcaucuucugugucuuuac

SEQ ID NO: 22347 - RNA, 27 nt, Artificial Sequence
  Description of Artificial Sequence: Synthetic oligonucleotide
gcgaucugaauaaaccucccuacuagc

SEQ ID NO: 22348 - RNA, 27 nt, Artificial Sequence
  Description of Artificial Sequence: Synthetic oligonucleotide
aucccagaacccugcugcagaaggcca

SEQ ID NO: 22349 - RNA, 27 nt, Artificial Sequence
  Description of Artificial Sequence: Synthetic oligonucleotide
cauaauuuccaauauguaccagaccuu

SEQ ID NO: 22350 - RNA, 27 nt, Artificial Sequence
  Description of Artificial Sequence: Synthetic oligonucleotide
cuagugcuuccaucggaaggacuaggu

SEQ ID NO: 22351 - RNA, 27 nt, Artificial Sequence
  Description of Artificial Sequence: Synthetic oligonucleotide
uccacauaaaaacaauauucacuggga

SEQ ID NO: 22352 - RNA, 27 nt, Artificial Sequence
  Description of Artificial Sequence: Synthetic oligonucleotide
ucuaccaauuccaacuugaauucauug

SEQ ID NO: 22353 - RNA, 27 nt, Artificial Sequence
  Description of Artificial Sequence: Synthetic oligonucleotide
ucuccaagucuaaaucuguguccugag

SEQ ID NO: 22354 - RNA, 27 nt, Artificial Sequence
  Description of Artificial Sequence: Synthetic oligonucleotide
uggaauacuguaacugugcuuugagga

SEQ ID NO: 22355 - RNA, 27 nt, Artificial Sequence
  Description of Artificial Sequence: Synthetic oligonucleotide
uuaauucaucagugguggcagugguag

SEQ ID NO: 22356 - RNA, 27 nt, Artificial Sequence
  Description of Artificial Sequence: Synthetic oligonucleotide
gugaugauguggcacuaguaguuucuu

SEQ ID NO: 22357 - RNA, 27 nt, Artificial Sequence
  Description of Artificial Sequence: Synthetic oligonucleotide
ucuguuuggugaggcuguccgacuuug

SEQ ID NO: 22358 - RNA, 27 nt, Artificial Sequence
  Description of Artificial Sequence: Synthetic oligonucleotide
ccaucauguuccauuuuucgcuuucuc

SEQ ID NO: 22359 - RNA, 27 nt, Artificial Sequence
  Description of Artificial Sequence: Synthetic oligonucleotide
gcagucuacaugcuaaaucagagggua

SEQ ID NO: 22360 - RNA, 27 nt, Artificial Sequence
  Description of Artificial Sequence: Synthetic oligonucleotide
cauaaauagauccuuaaauagcucaaa

SEQ ID NO: 22361 - RNA, 27 nt, Artificial Sequence
  Description of Artificial Sequence: Synthetic oligonucleotide
ugauaauagugcuuuuucaccuuuuuc

SEQ ID NO: 22362 - RNA, 27 nt, Artificial Sequence
  Description of Artificial Sequence: Synthetic oligonucleotide
gcagaacugauaauagugcuuuuucac

SEQ ID NO: 22363 - RNA, 27 nt, Artificial Sequence
  Description of Artificial Sequence: Synthetic oligonucleotide
guagguuuaaucuuucuuuucagccau

SEQ ID NO: 22364 - RNA, 27 nt, Artificial Sequence
  Description of Artificial Sequence: Synthetic oligonucleotide
agaaggauuuuauuauaaggguuuaau

SEQ ID NO: 22365 - RNA, 27 nt, Artificial Sequence
  Description of Artificial Sequence: Synthetic oligonucleotide
gucuacagcauuggcuaauaguaugaa

SEQ ID NO: 22366 - RNA, 27 nt, Artificial Sequence
  Description of Artificial Sequence: Synthetic oligonucleotide
cuauuccuaucaaaaugcuucugucua

SEQ ID NO: 22367 - RNA, 27 nt, Artificial Sequence
  Description of Artificial Sequence: Synthetic oligonucleotide
ucagggccauuaucuuauuugcucuau

SEQ ID NO: 22368 - RNA, 27 nt, Artificial Sequence
  Description of Artificial Sequence: Synthetic oligonucleotide
ugcuugaggaagagaaaaauguugguc

SEQ ID NO: 22369 - RNA, 27 nt, Artificial Sequence
  Description of Artificial Sequence: Synthetic oligonucleotide
ugggcugaacuuuucucauacuuaaag

SEQ ID NO: 22370 - RNA, 27 nt, Artificial Sequence
  Description of Artificial Sequence: Synthetic oligonucleotide
gguucagcagccaucuuuauuccugcg

SEQ ID NO: 22371 - RNA, 27 nt, Artificial Sequence
  Description of Artificial Sequence: Synthetic oligonucleotide
ugaagagaacuuggucauucaaauuuc

SEQ ID NO: 22372 - RNA, 27 nt, Artificial Sequence
  Description of Artificial Sequence: Synthetic oligonucleotide
cucuaggcuggcuaucuuuauacauac

SEQ ID NO: 22373 - RNA, 27 nt, Artificial Sequence
  Description of Artificial Sequence: Synthetic oligonucleotide
acacuucacagagauaguuacagccau

SEQ ID NO: 22374 - RNA, 27 nt, Artificial Sequence
  Description of Artificial Sequence: Synthetic oligonucleotide
uugaaauuuucucacacuucacagaga

SEQ ID NO: 22375 - RNA, 27 nt, Artificial Sequence
  Description of Artificial Sequence: Synthetic oligonucleotide
ucaggaggauucauuuccuuaaaggaa

SEQ ID NO: 22376 - RNA, 27 nt, Artificial Sequence
  Description of Artificial Sequence: Synthetic oligonucleotide
auaugaugucacuuuuuguauccuuga

SEQ ID NO: 22377 - RNA, 27 nt, Artificial Sequence
  Description of Artificial Sequence: Synthetic oligonucleotide
uaugaugaagauucaaauugcaucuua

SEQ ID NO: 22378 - RNA, 27 nt, Artificial Sequence
  Description of Artificial Sequence: Synthetic oligonucleotide
uuaauagcuagucuucguuuugaacag

SEQ ID NO: 22379 - RNA, 27 nt, Artificial Sequence
  Description of Artificial Sequence: Synthetic oligonucleotide
auuuuuaguagagaugagguuucacca

SEQ ID NO: 22380 - RNA, 27 nt, Artificial Sequence
  Description of Artificial Sequence: Synthetic oligonucleotide
aggcgagauagagcuucucuuucguuc

SEQ ID NO: 22381 - RNA, 27 nt, Artificial Sequence
  Description of Artificial Sequence: Synthetic oligonucleotide
aacuggaccgaaggcgcuuguggagaa

SEQ ID NO: 22382 - RNA, 27 nt, Artificial Sequence
  Description of Artificial Sequence: Synthetic oligonucleotide
gcggcuacaucuuuggaaucuucuccu

SEQ ID NO: 22383 - RNA, 27 nt, Artificial Sequence
  Description of Artificial Sequence: Synthetic oligonucleotide
caagucuccucauugaauccagauugg

SEQ ID NO: 22384 - RNA, 27 nt, Artificial Sequence
  Description of Artificial Sequence: Synthetic oligonucleotide
uccucacuacucucaaaucuguucugg

SEQ ID NO: 22385 - RNA, 27 nt, Artificial Sequence
  Description of Artificial Sequence: Synthetic oligonucleotide
uuuguacucaucugcacagcucuggcu

SEQ ID NO: 22386 - RNA, 27 nt, Artificial Sequence
  Description of Artificial Sequence: Synthetic oligonucleotide
gcccauuaacaacaacaaucugaggug

SEQ ID NO: 22387 - RNA, 27 nt, Artificial Sequence
  Description of Artificial Sequence: Synthetic oligonucleotide
aauaaauuaaaaauaauuaaaauagug

SEQ ID NO: 22388 - RNA, 27 nt, Artificial Sequence
  Description of Artificial Sequence: Synthetic oligonucleotide
cauauuuaaauauuaauaaauuaaaaa

SEQ ID NO: 22389 - RNA, 27 nt, Artificial Sequence
  Description of Artificial Sequence: Synthetic oligonucleotide
gaaacaaaggauauucaaacugcauag

SEQ ID NO: 22390 - RNA, 27 nt, Artificial Sequence
  Description of Artificial Sequence: Synthetic oligonucleotide
caaacacuuagacgccagcagcauggg

SEQ ID NO: 22391 - RNA, 27 nt, Artificial Sequence
  Description of Artificial Sequence: Synthetic oligonucleotide
uuugucacaggugaaaugcacaucuga

SEQ ID NO: 22392 - RNA, 27 nt, Artificial Sequence
  Description of Artificial Sequence: Synthetic oligonucleotide
uaauucagccuggcacagguuuugauc

SEQ ID NO: 22393 - RNA, 27 nt, Artificial Sequence
  Description of Artificial Sequence: Synthetic oligonucleotide
auuguaagaaugacuacccacauucac

SEQ ID NO: 22394 - RNA, 27 nt, Artificial Sequence
  Description of Artificial Sequence: Synthetic oligonucleotide
caauuguaagaaugacuacccacauuc

SEQ ID NO: 22395 - RNA, 27 nt, Artificial Sequence
  Description of Artificial Sequence: Synthetic oligonucleotide
guacacucucugaugcucauuuucaua

SEQ ID NO: 22396 - RNA, 27 nt, Artificial Sequence
  Description of Artificial Sequence: Synthetic oligonucleotide
cugcugaguucuacaugaaaagcaaau

SEQ ID NO: 22397 - RNA, 27 nt, Artificial Sequence
  Description of Artificial Sequence: Synthetic oligonucleotide
uacugaaaauaaauauagaaauacaac

SEQ ID NO: 22398 - RNA, 27 nt, Artificial Sequence
  Description of Artificial Sequence: Synthetic oligonucleotide
uuccauuuaagaaacauuaaucaaaac

SEQ ID NO: 22399 - RNA, 27 nt, Artificial Sequence
  Description of Artificial Sequence: Synthetic oligonucleotide
acaauuuuaggcacuauacacguuguu

SEQ ID NO: 22400 - RNA, 27 nt, Artificial Sequence
  Description of Artificial Sequence: Synthetic oligonucleotide
ccagauguuaguagccaaggauauggu

SEQ ID NO: 22401 - RNA, 27 nt, Artificial Sequence
  Description of Artificial Sequence: Synthetic oligonucleotide
agcucacagucuccagauguuaguagc

SEQ ID NO: 22402 - RNA, 27 nt, Artificial Sequence
  Description of Artificial Sequence: Synthetic oligonucleotide
auuaauaaaaagcacacaacuuauggc

SEQ ID NO: 22403 - RNA, 27 nt, Artificial Sequence
  Description of Artificial Sequence: Synthetic oligonucleotide
aauguaagaagagccaaaaugaugcau

SEQ ID NO: 22404 - RNA, 27 nt, Artificial Sequence
  Description of Artificial Sequence: Synthetic oligonucleotide
acauuuuuacaaauguaagaagagcca

SEQ ID NO: 22405 - RNA, 27 nt, Artificial Sequence
  Description of Artificial Sequence: Synthetic oligonucleotide
aauaugaauuaagaugaccuaaucugu

SEQ ID NO: 22406 - RNA, 27 nt, Artificial Sequence
  Description of Artificial Sequence: Synthetic oligonucleotide
ucaugauuaguucuuucaauuccaucc

SEQ ID NO: 22407 - RNA, 27 nt, Artificial Sequence
  Description of Artificial Sequence: Synthetic oligonucleotide
cccaagagcagaaggaaugagugugca

SEQ ID NO: 22408 - RNA, 27 nt, Artificial Sequence
  Description of Artificial Sequence: Synthetic oligonucleotide
cucaaagcuacugguuaccucuacacc

SEQ ID NO: 22409 - RNA, 27 nt, Artificial Sequence
  Description of Artificial Sequence: Synthetic oligonucleotide
ugaaauauuacguggcaugugguuggg

SEQ ID NO: 22410 - RNA, 27 nt, Artificial Sequence
  Description of Artificial Sequence: Synthetic oligonucleotide
agugaagagaauaacuuguuuccgaag

SEQ ID NO: 22411 - RNA, 27 nt, Artificial Sequence
  Description of Artificial Sequence: Synthetic oligonucleotide
uuucuuagcauuaguuauugggaguga

SEQ ID NO: 22412 - RNA, 27 nt, Artificial Sequence
  Description of Artificial Sequence: Synthetic oligonucleotide
uugauuuucagcauuucuuagcauuag

SEQ ID NO: 22413 - RNA, 27 nt, Artificial Sequence
  Description of Artificial Sequence: Synthetic oligonucleotide
aaaguaaucauauuuagagaaagacag

SEQ ID NO: 22414 - RNA, 27 nt, Artificial Sequence
  Description of Artificial Sequence: Synthetic oligonucleotide
uguagaacaaaaugccugaaauucagc

SEQ ID NO: 22415 - RNA, 27 nt, Artificial Sequence
  Description of Artificial Sequence: Synthetic oligonucleotide
gagagucccgggugagagggaaucgcc

SEQ ID NO: 22416 - RNA, 27 nt, Artificial Sequence
  Description of Artificial Sequence: Synthetic oligonucleotide
cuuuacuuuaaagguucacuuuccuug

SEQ ID NO: 22417 - RNA, 27 nt, Artificial Sequence
  Description of Artificial Sequence: Synthetic oligonucleotide
ccaggcuuccagagcaugcagccuccu

SEQ ID NO: 22418 - RNA, 27 nt, Artificial Sequence
  Description of Artificial Sequence: Synthetic oligonucleotide
cucucuuuuguuuucuguucagagaaa

SEQ ID NO: 22419 - RNA, 27 nt, Artificial Sequence
  Description of Artificial Sequence: Synthetic oligonucleotide
cggcauaacugauuacagccaaguuca

SEQ ID NO: 22420 - RNA, 27 nt, Artificial Sequence
  Description of Artificial Sequence: Synthetic oligonucleotide
uggacuucuuuuaauuuuggcuucuuc

SEQ ID NO: 22421 - RNA, 27 nt, Artificial Sequence
  Description of Artificial Sequence: Synthetic oligonucleotide
uaaccucaccuggacuucuuuuaauuu

SEQ ID NO: 22422 - RNA, 27 nt, Artificial Sequence
  Description of Artificial Sequence: Synthetic oligonucleotide
guccucuucccgauaauccggauucag

SEQ ID NO: 22423 - RNA, 27 nt, Artificial Sequence
  Description of Artificial Sequence: Synthetic oligonucleotide
acaauacuugcuuugaugucacauuaa

SEQ ID NO: 22424 - RNA, 27 nt, Artificial Sequence
  Description of Artificial Sequence: Synthetic oligonucleotide
gagugcuacaauacuugcuuugauguc

SEQ ID NO: 22425 - RNA, 27 nt, Artificial Sequence
  Description of Artificial Sequence: Synthetic oligonucleotide
auuugugguuuuguuuucucucucucu

SEQ ID NO: 22426 - RNA, 27 nt, Artificial Sequence
  Description of Artificial Sequence: Synthetic oligonucleotide
uguaugggcuuaaauacuacagcgagg

SEQ ID NO: 22427 - RNA, 27 nt, Artificial Sequence
  Description of Artificial Sequence: Synthetic oligonucleotide
cuguaugggcuuaaauacuacagcgag

SEQ ID NO: 22428 - RNA, 27 nt, Artificial Sequence
  Description of Artificial Sequence: Synthetic oligonucleotide
ggaagguuucuguaugggcuuaaauac

SEQ ID NO: 22429 - RNA, 27 nt, Artificial Sequence
  Description of Artificial Sequence: Synthetic oligonucleotide
guagguauaccauguuuauuuuaauac

SEQ ID NO: 22430 - RNA, 27 nt, Artificial Sequence
  Description of Artificial Sequence: Synthetic oligonucleotide
uccgaaaacuggccgaucagaacagcc

SEQ ID NO: 22431 - RNA, 27 nt, Artificial Sequence
  Description of Artificial Sequence: Synthetic oligonucleotide
cccuguuccaaaguucaaauuauuugu

SEQ ID NO: 22432 - RNA, 27 nt, Artificial Sequence
  Description of Artificial Sequence: Synthetic oligonucleotide
acuggaaaguuaaauuaaggucgcaau

SEQ ID NO: 22433 - RNA, 27 nt, Artificial Sequence
  Description of Artificial Sequence: Synthetic oligonucleotide
caaaaccaaacuuuagcuuucucagcc

SEQ ID NO: 22434 - RNA, 27 nt, Artificial Sequence
  Description of Artificial Sequence: Synthetic oligonucleotide
uacagugggaaguagcaucuuuacuuu

SEQ ID NO: 22435 - RNA, 27 nt, Artificial Sequence
  Description of Artificial Sequence: Synthetic oligonucleotide
ucauaugguaucagcaauuaagcagua

SEQ ID NO: 22436 - RNA, 27 nt, Artificial Sequence
  Description of Artificial Sequence: Synthetic oligonucleotide
cagcccauguuucauucauaugguauc

SEQ ID NO: 22437 - RNA, 27 nt, Artificial Sequence
  Description of Artificial Sequence: Synthetic oligonucleotide
uaugaaaaaguuggauaagaaaguugg

SEQ ID NO: 22438 - RNA, 27 nt, Artificial Sequence
  Description of Artificial Sequence: Synthetic oligonucleotide
uccggccucaugaugucaugcaaggcu

SEQ ID NO: 22439 - RNA, 27 nt, Artificial Sequence
  Description of Artificial Sequence: Synthetic oligonucleotide
acaaaugcagucauauacaaauucagg

SEQ ID NO: 22440 - RNA, 27 nt, Artificial Sequence
  Description of Artificial Sequence: Synthetic oligonucleotide
gguaguaaacauucuacuaggauucuu

SEQ ID NO: 22441 - RNA, 27 nt, Artificial Sequence
  Description of Artificial Sequence: Synthetic oligonucleotide
uuucaucaaaaaauucuucccuuucug

SEQ ID NO: 22442 - RNA, 27 nt, Artificial Sequence
  Description of Artificial Sequence: Synthetic oligonucleotide
aaauucacacacuggcaugccgauagc

SEQ ID NO: 22443 - RNA, 27 nt, Artificial Sequence
  Description of Artificial Sequence: Synthetic oligonucleotide
acauacauugcucuacuaugaggugaa

SEQ ID NO: 22444 - RNA, 27 nt, Artificial Sequence
  Description of Artificial Sequence: Synthetic oligonucleotide
uauauaugugcuuuggcaauucuggug

SEQ ID NO: 22445 - RNA, 27 nt, Artificial Sequence
  Description of Artificial Sequence: Synthetic oligonucleotide
ggagaaacuauuacccagaucaccacu

SEQ ID NO: 22446 - RNA, 27 nt, Artificial Sequence
  Description of Artificial Sequence: Synthetic oligonucleotide
auuuggagaaacuauuacccagaucac

SEQ ID NO: 22447 - RNA, 27 nt, Artificial Sequence
  Description of Artificial Sequence: Synthetic oligonucleotide
uuucuaggaaguauucaucacauccac

SEQ ID NO: 22448 - RNA, 27 nt, Artificial Sequence
  Description of Artificial Sequence: Synthetic oligonucleotide
cauauaugguguagcuguggaaaugcg

SEQ ID NO: 22449 - RNA, 27 nt, Artificial Sequence
  Description of Artificial Sequence: Synthetic oligonucleotide
cuccauucauauaugguguagcugugg

SEQ ID NO: 22450 - RNA, 27 nt, Artificial Sequence
  Description of Artificial Sequence: Synthetic oligonucleotide
aucuucuucucguguaagaacugcagc

SEQ ID NO: 22451 - RNA, 27 nt, Artificial Sequence
  Description of Artificial Sequence: Synthetic oligonucleotide
ucccuguaaaugaucuucuucucgugu

SEQ ID NO: 22452 - RNA, 27 nt, Artificial Sequence
  Description of Artificial Sequence: Synthetic oligonucleotide
gucccuguaaaugaucuucuucucgug

SEQ ID NO: 22453 - RNA, 27 nt, Artificial Sequence
  Description of Artificial Sequence: Synthetic oligonucleotide
ucaggucccuguaaaugaucuucuucu

SEQ ID NO: 22454 - RNA, 27 nt, Artificial Sequence
  Description of Artificial Sequence: Synthetic oligonucleotide
gaugcagucaaacaccucuuccucugu

SEQ ID NO: 22455 - RNA, 27 nt, Artificial Sequence
  Description of Artificial Sequence: Synthetic oligonucleotide
cgaugcagucaaacaccucuuccucug

SEQ ID NO: 22456 - RNA, 27 nt, Artificial Sequence
  Description of Artificial Sequence: Synthetic oligonucleotide
cccugugaacucgcccucaaaguagcg

SEQ ID NO: 22457 - RNA, 27 nt, Artificial Sequence
  Description of Artificial Sequence: Synthetic oligonucleotide
ggacagaggugccaggagaugcccuca

SEQ ID NO: 22458 - RNA, 27 nt, Artificial Sequence
  Description of Artificial Sequence: Synthetic oligonucleotide
uuaaaaagacaaaccauaucacuccuu

SEQ ID NO: 22459 - RNA, 27 nt, Artificial Sequence
  Description of Artificial Sequence: Synthetic oligonucleotide
cuuaaaaagacaaaccauaucacuccu

SEQ ID NO: 22460 - RNA, 27 nt, Artificial Sequence
  Description of Artificial Sequence: Synthetic oligonucleotide
gacaaccuuuaggaucuuuacugcaac

SEQ ID NO: 22461 - RNA, 27 nt, Artificial Sequence
  Description of Artificial Sequence: Synthetic oligonucleotide
gucgacaaccuuuaggaucuuuacugc

SEQ ID NO: 22462 - RNA, 27 nt, Artificial Sequence
  Description of Artificial Sequence: Synthetic oligonucleotide
acaauugccagguuguccuuugucaug

SEQ ID NO: 22463 - RNA, 27 nt, Artificial Sequence
  Description of Artificial Sequence: Synthetic oligonucleotide
ccucgcaccacugggucacaauugcca

SEQ ID NO: 22464 - RNA, 27 nt, Artificial Sequence
  Description of Artificial Sequence: Synthetic oligonucleotide
auuucaugucucuauggaugauguucu

SEQ ID NO: 22465 - RNA, 27 nt, Artificial Sequence
  Description of Artificial Sequence: Synthetic oligonucleotide
uggagaaauauauuguuggauuucaug

SEQ ID NO: 22466 - RNA, 27 nt, Artificial Sequence
  Description of Artificial Sequence: Synthetic oligonucleotide
agccuucauggagaaauauauuguugg

SEQ ID NO: 22467 - RNA, 27 nt, Artificial Sequence
  Description of Artificial Sequence: Synthetic oligonucleotide
accacuccagcgugacuuuacuguugc

SEQ ID NO: 22468 - RNA, 27 nt, Artificial Sequence
  Description of Artificial Sequence: Synthetic oligonucleotide
ccucucuuccuuuacuuucuucacaca

SEQ ID NO: 22469 - RNA, 27 nt, Artificial Sequence
  Description of Artificial Sequence: Synthetic oligonucleotide
gcccgaugcaaggauggcucggaagcg

SEQ ID NO: 22470 - RNA, 27 nt, Artificial Sequence
  Description of Artificial Sequence: Synthetic oligonucleotide
cacaguaggauauucaaccuccauuuc

SEQ ID NO: 22471 - RNA, 27 nt, Artificial Sequence
  Description of Artificial Sequence: Synthetic oligonucleotide
uuacacaguaggauauucaaccuccau

SEQ ID NO: 22472 - RNA, 27 nt, Artificial Sequence
  Description of Artificial Sequence: Synthetic oligonucleotide
uacacuacaagggaaaacucaaaaucu

SEQ ID NO: 22473 - RNA, 27 nt, Artificial Sequence
  Description of Artificial Sequence: Synthetic oligonucleotide
caaucaacaaagaacaaacaggauaaa

SEQ ID NO: 22474 - RNA, 27 nt, Artificial Sequence
  Description of Artificial Sequence: Synthetic oligonucleotide
uuucaaucaacaaagaacaaacaggau

SEQ ID NO: 22475 - RNA, 27 nt, Artificial Sequence
  Description of Artificial Sequence: Synthetic oligonucleotide
auggaagaaaaagaaggcuguagagaa

SEQ ID NO: 22476 - RNA, 27 nt, Artificial Sequence
  Description of Artificial Sequence: Synthetic oligonucleotide
uagaaggaagauuagcuauggaagaaa

SEQ ID NO: 22477 - RNA, 27 nt, Artificial Sequence
  Description of Artificial Sequence: Synthetic oligonucleotide
augaagcauucaacaggaagauuauuu

SEQ ID NO: 22478 - RNA, 27 nt, Artificial Sequence
  Description of Artificial Sequence: Synthetic oligonucleotide
caugaagcauucaacaggaagauuauu

SEQ ID NO: 22479 - RNA, 27 nt, Artificial Sequence
  Description of Artificial Sequence: Synthetic oligonucleotide
ucaaaguagaauucaagucaugaagca

SEQ ID NO: 22480 - RNA, 27 nt, Artificial Sequence
  Description of Artificial Sequence: Synthetic oligonucleotide
gucuguaguugcuucucucccucuuag

SEQ ID NO: 22481 - RNA, 27 nt, Artificial Sequence
  Description of Artificial Sequence: Synthetic oligonucleotide
guugaccuuggucugguaggagacggc

SEQ ID NO: 22482 - RNA, 27 nt, Artificial Sequence
  Description of Artificial Sequence: Synthetic oligonucleotide
gucgagauagucgggccgauugaucuc

SEQ ID NO: 22483 - RNA, 27 nt, Artificial Sequence
  Description of Artificial Sequence: Synthetic oligonucleotide
guuugggaagguuggauguucguccuc

SEQ ID NO: 22484 - RNA, 27 nt, Artificial Sequence
  Description of Artificial Sequence: Synthetic oligonucleotide
aguucuaagcuuggguuccgacccuaa

SEQ ID NO: 22485 - RNA, 27 nt, Artificial Sequence
  Description of Artificial Sequence: Synthetic oligonucleotide
uuaaaguucuaagcuuggguuccgacc

SEQ ID NO: 22486 - RNA, 27 nt, Artificial Sequence
  Description of Artificial Sequence: Synthetic oligonucleotide
guugcuuaaaguucuaagcuuggguuc

SEQ ID NO: 22487 - RNA, 27 nt, Artificial Sequence
  Description of Artificial Sequence: Synthetic oligonucleotide
gugguggucuuguugcuuaaaguucua

SEQ ID NO: 22488 - RNA, 27 nt, Artificial Sequence
  Description of Artificial Sequence: Synthetic oligonucleotide
acuuuauuucucgccacugaauaguag

SEQ ID NO: 22489 - RNA, 27 nt, Artificial Sequence
  Description of Artificial Sequence: Synthetic oligonucleotide
aacuuuauuucucgccacugaauagua

SEQ ID NO: 22490 - RNA, 27 nt, Artificial Sequence
  Description of Artificial Sequence: Synthetic oligonucleotide
ggaucauuuccuguuaucuguguuugu

SEQ ID NO: 22491 - RNA, 27 nt, Artificial Sequence
  Description of Artificial Sequence: Synthetic oligonucleotide
guuucauuucuucucuuuucuuaaggc

SEQ ID NO: 22492 - RNA, 27 nt, Artificial Sequence
  Description of Artificial Sequence: Synthetic oligonucleotide
ggaggauggaaacacacuccuucaguu

SEQ ID NO: 22493 - RNA, 27 nt, Artificial Sequence
  Description of Artificial Sequence: Synthetic oligonucleotide
ucaaagauuuucagucccgcggugaca

SEQ ID NO: 22494 - RNA, 27 nt, Artificial Sequence
  Description of Artificial Sequence: Synthetic oligonucleotide
ccugaacggcacgcuuauuucugcugu

SEQ ID NO: 22495 - RNA, 27 nt, Artificial Sequence
  Description of Artificial Sequence: Synthetic oligonucleotide
cuucuggacccugaacggcacgcuuau

SEQ ID NO: 22496 - RNA, 27 nt, Artificial Sequence
  Description of Artificial Sequence: Synthetic oligonucleotide
caagcagucuugagugacuguuucuuc

SEQ ID NO: 22497 - RNA, 27 nt, Artificial Sequence
  Description of Artificial Sequence: Synthetic oligonucleotide
ccaaagacauggaccuucuuccucuga

SEQ ID NO: 22498 - RNA, 27 nt, Artificial Sequence
  Description of Artificial Sequence: Synthetic oligonucleotide
guguuucaggcauauuuugaauacauc

SEQ ID NO: 22499 - RNA, 27 nt, Artificial Sequence
  Description of Artificial Sequence: Synthetic oligonucleotide
gagguacagagaaagggaggaaaauag

SEQ ID NO: 22500 - RNA, 27 nt, Artificial Sequence
  Description of Artificial Sequence: Synthetic oligonucleotide
ucuugucuugcucuaucuuucuuuggu

SEQ ID NO: 22501 - RNA, 27 nt, Artificial Sequence
  Description of Artificial Sequence: Synthetic oligonucleotide
uuucuugucuugcucuaucuuucuuug

SEQ ID NO: 22502 - RNA, 27 nt, Artificial Sequence
  Description of Artificial Sequence: Synthetic oligonucleotide
ggaucuuguacaaacaaaugcuuucuc

SEQ ID NO: 22503 - RNA, 27 nt, Artificial Sequence
  Description of Artificial Sequence: Synthetic oligonucleotide
ucugcaaguacguucguuuaacucaag

SEQ ID NO: 22504 - RNA, 27 nt, Artificial Sequence
  Description of Artificial Sequence: Synthetic oligonucleotide
ucuguaucgaucguucuguaucagucu

SEQ ID NO: 22505 - RNA, 27 nt, Artificial Sequence
  Description of Artificial Sequence: Synthetic oligonucleotide
auuuauuuuuauauauauauaauauau

SEQ ID NO: 22506 - RNA, 27 nt, Artificial Sequence
  Description of Artificial Sequence: Synthetic oligonucleotide
auauuuauuuuuauauauauauaauau

SEQ ID NO: 22507 - RNA, 27 nt, Artificial Sequence
  Description of Artificial Sequence: Synthetic oligonucleotide
cacagcagucaaauacauccagugaag

SEQ ID NO: 22508 - RNA, 27 nt, Artificial Sequence
  Description of Artificial Sequence: Synthetic oligonucleotide
gucucucaucuccuccucuucccuguc

SEQ ID NO: 22509 - RNA, 27 nt, Artificial Sequence
  Description of Artificial Sequence: Synthetic oligonucleotide
ccaagugggacaaaaaaaagaucaugc

SEQ ID NO: 22510 - RNA, 14 nt, Artificial Sequence
  Description of Artificial Sequence: Synthetic oligonucleotide
guauuuugaugagg

SEQ ID NO: 22511 - RNA, 12 nt, Artificial Sequence
  Description of Artificial Sequence: Synthetic oligonucleotide
ggcccagaugau

SEQ ID NO: 22512 - RNA, 14 nt, Artificial Sequence
  Description of Artificial Sequence: Synthetic oligonucleotide
gggaagaaaacuau

SEQ ID NO: 22513 - RNA, 15 nt, Artificial Sequence
  Description of Artificial Sequence: Synthetic oligonucleotide
guuuuaauuuauuuc

SEQ ID NO: 22514 - RNA, 12 nt, Artificial Sequence
  Description of Artificial Sequence: Synthetic oligonucleotide
acguagggaaau

SEQ ID NO: 22515 - RNA, 12 nt, Artificial Sequence
  Description of Artificial Sequence: Synthetic oligonucleotide
ccaggguuuacc

SEQ ID NO: 22516 - RNA, 11 nt, Artificial Sequence
  Description of Artificial Sequence: Synthetic oligonucleotide
agcaagguuua

SEQ ID NO: 22517 - RNA, 12 nt, Artificial Sequence
  Description of Artificial Sequence: Synthetic oligonucleotide
uguauuauguug

SEQ ID NO: 22518 - RNA, 15 nt, Artificial Sequence
  Description of Artificial Sequence: Synthetic oligonucleotide
uuuuaaucuuuguga

SEQ ID NO: 22519 - RNA, 14 nt, Artificial Sequence
  Description of Artificial Sequence: Synthetic oligonucleotide
uuaaucuuugugac

SEQ ID NO: 22520 - RNA, 13 nt, Artificial Sequence
  Description of Artificial Sequence: Synthetic oligonucleotide
gcugcuuaugucu

SEQ ID NO: 22521 - RNA, 14 nt, Artificial Sequence
  Description of Artificial Sequence: Synthetic oligonucleotide
aaguguuucagaag

SEQ ID NO: 22522 - RNA, 13 nt, Artificial Sequence
  Description of Artificial Sequence: Synthetic oligonucleotide
gaccaucaauaag

SEQ ID NO: 22523 - RNA, 13 nt, Artificial Sequence
  Description of Artificial Sequence: Synthetic oligonucleotide
ccaucaauaagga

SEQ ID NO: 22524 - RNA, 14 nt, Artificial Sequence
  Description of Artificial Sequence: Synthetic oligonucleotide
ucaauaaggaagaa

SEQ ID NO: 22525 - RNA, 14 nt, Artificial Sequence
  Description of Artificial Sequence: Synthetic oligonucleotide
aauaaggaagaagc

SEQ ID NO: 22526 - RNA, 13 nt, Artificial Sequence
  Description of Artificial Sequence: Synthetic oligonucleotide
aggaagaagcccu

SEQ ID NO: 22527 - RNA, 13 nt, Artificial Sequence
  Description of Artificial Sequence: Synthetic oligonucleotide
gcauaacuaaagg

SEQ ID NO: 22528 - RNA, 14 nt, Artificial Sequence
  Description of Artificial Sequence: Synthetic oligonucleotide
cauaacuaaaggug

SEQ ID NO: 22529 - RNA, 12 nt, Artificial Sequence
  Description of Artificial Sequence: Synthetic oligonucleotide
cuacaucacgcc

SEQ ID NO: 22530 - RNA, 12 nt, Artificial Sequence
  Description of Artificial Sequence: Synthetic oligonucleotide
acuggauuuaag

SEQ ID NO: 22531 - RNA, 12 nt, Artificial Sequence
  Description of Artificial Sequence: Synthetic oligonucleotide
cuggauuuaagc

SEQ ID NO: 22532 - RNA, 13 nt, Artificial Sequence
  Description of Artificial Sequence: Synthetic oligonucleotide
gauuuaagcagag

SEQ ID NO: 22533 - RNA, 13 nt, Artificial Sequence
  Description of Artificial Sequence: Synthetic oligonucleotide
auuuaagcagagu

SEQ ID NO: 22534 - RNA, 13 nt, Artificial Sequence
  Description of Artificial Sequence: Synthetic oligonucleotide
uuaagcagaguuc

SEQ ID NO: 22535 - RNA, 13 nt, Artificial Sequence
  Description of Artificial Sequence: Synthetic oligonucleotide
uaagcagaguuca

SEQ ID NO: 22536 - RNA, 14 nt, Artificial Sequence
  Description of Artificial Sequence: Synthetic oligonucleotide
agcagaguucaaaa

SEQ ID NO: 22537 - RNA, 12 nt, Artificial Sequence
  Description of Artificial Sequence: Synthetic oligonucleotide
cucagggucuga

SEQ ID NO: 22538 - RNA, 13 nt, Artificial Sequence
  Description of Artificial Sequence: Synthetic oligonucleotide
caagcaacuacau

SEQ ID NO: 22539 - RNA, 12 nt, Artificial Sequence
  Description of Artificial Sequence: Synthetic oligonucleotide
aucaauggcagc

SEQ ID NO: 22540 - RNA, 11 nt, Artificial Sequence
  Description of Artificial Sequence: Synthetic oligonucleotide
uuccagcccac

SEQ ID NO: 22541 - RNA, 12 nt, Artificial Sequence
  Description of Artificial Sequence: Synthetic oligonucleotide
cagcugagaaug

SEQ ID NO: 22542 - RNA, 13 nt, Artificial Sequence
  Description of Artificial Sequence: Synthetic oligonucleotide
aacguaucuccua

SEQ ID NO: 22543 - RNA, 14 nt, Artificial Sequence
  Description of Artificial Sequence: Synthetic oligonucleotide
ccuaaaauaauuuc

SEQ ID NO: 22544 - RNA, 13 nt, Artificial Sequence
  Description of Artificial Sequence: Synthetic oligonucleotide
uggaagauucagc

SEQ ID NO: 22545 - RNA, 12 nt, Artificial Sequence
  Description of Artificial Sequence: Synthetic oligonucleotide
uuaaacucuccu

SEQ ID NO: 22546 - RNA, 12 nt, Artificial Sequence
  Description of Artificial Sequence: Synthetic oligonucleotide
cagccuacaguu

SEQ ID NO: 22547 - RNA, 13 nt, Artificial Sequence
  Description of Artificial Sequence: Synthetic oligonucleotide
guuauguucaguc

SEQ ID NO: 22548 - RNA, 13 nt, Artificial Sequence
  Description of Artificial Sequence: Synthetic oligonucleotide
cacauacaaaaug

SEQ ID NO: 22549 - RNA, 9 nt, Artificial Sequence
  Description of Artificial Sequence: Synthetic oligonucleotide
uccuuuugc

SEQ ID NO: 22550 - RNA, 12 nt, Artificial Sequence
  Description of Artificial Sequence: Synthetic oligonucleotide
ugaccugugaag

SEQ ID NO: 22551 - RNA, 12 nt, Artificial Sequence
  Description of Artificial Sequence: Synthetic oligonucleotide
cuaucucacaca

SEQ ID NO: 22552 - RNA, 13 nt, Artificial Sequence
  Description of Artificial Sequence: Synthetic oligonucleotide
uguccucaauugu

SEQ ID NO: 22553 - RNA, 12 nt, Artificial Sequence
  Description of Artificial Sequence: Synthetic oligonucleotide
aaaccguagcug

SEQ ID NO: 22554 - RNA, 12 nt, Artificial Sequence
  Description of Artificial Sequence: Synthetic oligonucleotide
uagcuggcaagc

SEQ ID NO: 22555 - RNA, 14 nt, Artificial Sequence
  Description of Artificial Sequence: Synthetic oligonucleotide
uuguaugguuaaaa

SEQ ID NO: 22556 - RNA, 14 nt, Artificial Sequence
  Description of Artificial Sequence: Synthetic oligonucleotide
ugguuaaaagaugg

SEQ ID NO: 22557 - RNA, 13 nt, Artificial Sequence
  Description of Artificial Sequence: Synthetic oligonucleotide
cagggaauuauac

SEQ ID NO: 22558 - RNA, 12 nt, Artificial Sequence
  Description of Artificial Sequence: Synthetic oligonucleotide
acaaucuugcug

SEQ ID NO: 22559 - RNA, 13 nt, Artificial Sequence
  Description of Artificial Sequence: Synthetic oligonucleotide
ccaauaaugaaga

SEQ ID NO: 22560 - RNA, 13 nt, Artificial Sequence
  Description of Artificial Sequence: Synthetic oligonucleotide
acuuuggauguuc

SEQ ID NO: 22561 - RNA, 12 nt, Artificial Sequence
  Description of Artificial Sequence: Synthetic oligonucleotide
aaugcuuccacu

SEQ ID NO: 22562 - RNA, 11 nt, Artificial Sequence
  Description of Artificial Sequence: Synthetic oligonucleotide
gagaaaguuug

SEQ ID NO: 22563 - RNA, 11 nt, Artificial Sequence
  Description of Artificial Sequence: Synthetic oligonucleotide
aaagaacuacu

SEQ ID NO: 22564 - RNA, 12 nt, Artificial Sequence
  Description of Artificial Sequence: Synthetic oligonucleotide
uuagaaauacgg

SEQ ID NO: 22565 - RNA, 12 nt, Artificial Sequence
  Description of Artificial Sequence: Synthetic oligonucleotide
aacauggguaca

SEQ ID NO: 22566 - RNA, 14 nt, Artificial Sequence
  Description of Artificial Sequence: Synthetic oligonucleotide
aaagacacagaaga

SEQ ID NO: 22567 - RNA, 11 nt, Artificial Sequence
  Description of Artificial Sequence: Synthetic oligonucleotide
uaguagggagg

SEQ ID NO: 22568 - RNA, 12 nt, Artificial Sequence
  Description of Artificial Sequence: Synthetic oligonucleotide
gccuucugcagc

SEQ ID NO: 22569 - RNA, 10 nt, Artificial Sequence
  Description of Artificial Sequence: Synthetic oligonucleotide
ggucugguac

SEQ ID NO: 22570 - RNA, 12 nt, Artificial Sequence
  Description of Artificial Sequence: Synthetic oligonucleotide
cuaguccuuccg

SEQ ID NO: 22571 - RNA, 12 nt, Artificial Sequence
  Description of Artificial Sequence: Synthetic oligonucleotide
ccagugaauauu

SEQ ID NO: 22572 - RNA, 13 nt, Artificial Sequence
  Description of Artificial Sequence: Synthetic oligonucleotide
augaauucaaguu

SEQ ID NO: 22573 - RNA, 12 nt, Artificial Sequence
  Description of Artificial Sequence: Synthetic oligonucleotide
caggacacagau

SEQ ID NO: 22574 - RNA, 12 nt, Artificial Sequence
  Description of Artificial Sequence: Synthetic oligonucleotide
cucaaagcacag

SEQ ID NO: 22575 - RNA, 10 nt, Artificial Sequence
  Description of Artificial Sequence: Synthetic oligonucleotide
accacugcca

SEQ ID NO: 22576 - RNA, 13 nt, Artificial Sequence
  Description of Artificial Sequence: Synthetic oligonucleotide
gaaacuacuagug

SEQ ID NO: 22577 - RNA, 12 nt, Artificial Sequence
  Description of Artificial Sequence: Synthetic oligonucleotide
aagucggacagc

SEQ ID NO: 22578 - RNA, 13 nt, Artificial Sequence
  Description of Artificial Sequence: Synthetic oligonucleotide
gaaagcgaaaaau

SEQ ID NO: 22579 - RNA, 13 nt, Artificial Sequence
  Description of Artificial Sequence: Synthetic oligonucleotide
cccucugauuuag

SEQ ID NO: 22580 - RNA, 12 nt, Artificial Sequence
  Description of Artificial Sequence: Synthetic oligonucleotide
ugagcuauuuaa

SEQ ID NO: 22581 - RNA, 13 nt, Artificial Sequence
  Description of Artificial Sequence: Synthetic oligonucleotide
aaaaggugaaaaa

SEQ ID NO: 22582 - RNA, 14 nt, Artificial Sequence
  Description of Artificial Sequence: Synthetic oligonucleotide
gaaaaagcacuauu

SEQ ID NO: 22583 - RNA, 12 nt, Artificial Sequence
  Description of Artificial Sequence: Synthetic oligonucleotide
ggcugaaaagaa

SEQ ID NO: 22584 - RNA, 12 nt, Artificial Sequence
  Description of Artificial Sequence: Synthetic oligonucleotide
uaaacccuuaua

SEQ ID NO: 22585 - RNA, 13 nt, Artificial Sequence
  Description of Artificial Sequence: Synthetic oligonucleotide
cauacuauuagcc

SEQ ID NO: 22586 - RNA, 12 nt, Artificial Sequence
  Description of Artificial Sequence: Synthetic oligonucleotide
gacagaagcauu

SEQ ID NO: 22587 - RNA, 14 nt, Artificial Sequence
  Description of Artificial Sequence: Synthetic oligonucleotide
agagcaaauaagau

SEQ ID NO: 22588 - RNA, 14 nt, Artificial Sequence
  Description of Artificial Sequence: Synthetic oligonucleotide
ccaacauuuuucuc

SEQ ID NO: 22589 - RNA, 15 nt, Artificial Sequence
  Description of Artificial Sequence: Synthetic oligonucleotide
uuaaguaugagaaaa

SEQ ID NO: 22590 - RNA, 14 nt, Artificial Sequence
  Description of Artificial Sequence: Synthetic oligonucleotide
caggaauaaagaug

SEQ ID NO: 22591 - RNA, 13 nt, Artificial Sequence
  Description of Artificial Sequence: Synthetic oligonucleotide
aauuugaaugacc

SEQ ID NO: 22592 - RNA, 14 nt, Artificial Sequence
  Description of Artificial Sequence: Synthetic oligonucleotide
auguauaaagauag

SEQ ID NO: 22593 - RNA, 12 nt, Artificial Sequence
  Description of Artificial Sequence: Synthetic oligonucleotide
ggcuguaacuau

SEQ ID NO: 22594 - RNA, 11 nt, Artificial Sequence
  Description of Artificial Sequence: Synthetic oligonucleotide
ucugugaagug

SEQ ID NO: 22595 - RNA, 14 nt, Artificial Sequence
  Description of Artificial Sequence: Synthetic oligonucleotide
ccuuuaaggaaaug

SEQ ID NO: 22596 - RNA, 13 nt, Artificial Sequence
  Description of Artificial Sequence: Synthetic oligonucleotide
aaggauacaaaaa

SEQ ID NO: 22597 - RNA, 12 nt, Artificial Sequence
  Description of Artificial Sequence: Synthetic oligonucleotide
agaugcaauuug

SEQ ID NO: 22598 - RNA, 12 nt, Artificial Sequence
  Description of Artificial Sequence: Synthetic oligonucleotide
guucaaaacgaa

SEQ ID NO: 22599 - RNA, 11 nt, Artificial Sequence
  Description of Artificial Sequence: Synthetic oligonucleotide
gugaaaccuca

SEQ ID NO: 22600 - RNA, 13 nt, Artificial Sequence
  Description of Artificial Sequence: Synthetic oligonucleotide
acgaaagagaagc

SEQ ID NO: 22601 - RNA, 12 nt, Artificial Sequence
  Description of Artificial Sequence: Synthetic oligonucleotide
cuccacaagcgc

SEQ ID NO: 22602 - RNA, 14 nt, Artificial Sequence
  Description of Artificial Sequence: Synthetic oligonucleotide
gagaagauuccaaa

SEQ ID NO: 22603 - RNA, 13 nt, Artificial Sequence
  Description of Artificial Sequence: Synthetic oligonucleotide
aaucuggauucaa

SEQ ID NO: 22604 - RNA, 13 nt, Artificial Sequence
  Description of Artificial Sequence: Synthetic oligonucleotide
agaacagauuuga

SEQ ID NO: 22605 - RNA, 11 nt, Artificial Sequence
  Description of Artificial Sequence: Synthetic oligonucleotide
ccagagcugug

SEQ ID NO: 22606 - RNA, 12 nt, Artificial Sequence
  Description of Artificial Sequence: Synthetic oligonucleotide
ccucagauuguu

SEQ ID NO: 22607 - RNA, 12 nt, Artificial Sequence
  Description of Artificial Sequence: Synthetic oligonucleotide
cuauuuuaauua

SEQ ID NO: 22608 - RNA, 13 nt, Artificial Sequence
  Description of Artificial Sequence: Synthetic oligonucleotide
uuuaauuuauuaa

SEQ ID NO: 22609 - RNA, 12 nt, Artificial Sequence
  Description of Artificial Sequence: Synthetic oligonucleotide
augcaguuugaa

SEQ ID NO: 22610 - RNA, 11 nt, Artificial Sequence
  Description of Artificial Sequence: Synthetic oligonucleotide
caugcugcugg

SEQ ID NO: 22611 - RNA, 13 nt, Artificial Sequence
  Description of Artificial Sequence: Synthetic oligonucleotide
agaugugcauuuc

SEQ ID NO: 22612 - RNA, 12 nt, Artificial Sequence
  Description of Artificial Sequence: Synthetic oligonucleotide
ucaaaaccugug

SEQ ID NO: 22613 - RNA, 11 nt, Artificial Sequence
  Description of Artificial Sequence: Synthetic oligonucleotide
gaaugugggua

SEQ ID NO: 22614 - RNA, 10 nt, Artificial Sequence
  Description of Artificial Sequence: Synthetic oligonucleotide
auguggguag

SEQ ID NO: 22615 - RNA, 13 nt, Artificial Sequence
  Description of Artificial Sequence: Synthetic oligonucleotide
ugaaaaugagcau

SEQ ID NO: 22616 - RNA, 13 nt, Artificial Sequence
  Description of Artificial Sequence: Synthetic oligonucleotide
uugcuuuucaugu

SEQ ID NO: 22617 - RNA, 12 nt, Artificial Sequence
  Description of Artificial Sequence: Synthetic oligonucleotide
uguauuucuaua

SEQ ID NO: 22618 - RNA, 13 nt, Artificial Sequence
  Description of Artificial Sequence: Synthetic oligonucleotide
uuugauuaauguu

SEQ ID NO: 22619 - RNA, 12 nt, Artificial Sequence
  Description of Artificial Sequence: Synthetic oligonucleotide
caacguguauag

SEQ ID NO: 22620 - RNA, 12 nt, Artificial Sequence
  Description of Artificial Sequence: Synthetic oligonucleotide
cauauccuuggc

SEQ ID NO: 22621 - RNA, 13 nt, Artificial Sequence
  Description of Artificial Sequence: Synthetic oligonucleotide
uacuaacaucugg

SEQ ID NO: 22622 - RNA, 11 nt, Artificial Sequence
  Description of Artificial Sequence: Synthetic oligonucleotide
cauaaguugug

SEQ ID NO: 22623 - RNA, 12 nt, Artificial Sequence
  Description of Artificial Sequence: Synthetic oligonucleotide
gcaucauuuugg

SEQ ID NO: 22624 - RNA, 10 nt, Artificial Sequence
  Description of Artificial Sequence: Synthetic oligonucleotide
gcucuucuua

SEQ ID NO: 22625 - RNA, 10 nt, Artificial Sequence
  Description of Artificial Sequence: Synthetic oligonucleotide
agauuagguc

SEQ ID NO: 22626 - RNA, 12 nt, Artificial Sequence
  Description of Artificial Sequence: Synthetic oligonucleotide
auggaauugaaa

SEQ ID NO: 22627 - RNA, 13 nt, Artificial Sequence
  Description of Artificial Sequence: Synthetic oligonucleotide
cacacucauuccu

SEQ ID NO: 22628 - RNA, 12 nt, Artificial Sequence
  Description of Artificial Sequence: Synthetic oligonucleotide
uguagagguaac

SEQ ID NO: 22629 - RNA, 11 nt, Artificial Sequence
  Description of Artificial Sequence: Synthetic oligonucleotide
caaccacaugc

SEQ ID NO: 22630 - RNA, 12 nt, Artificial Sequence
  Description of Artificial Sequence: Synthetic oligonucleotide
ucggaaacaagu

SEQ ID NO: 22631 - RNA, 11 nt, Artificial Sequence
  Description of Artificial Sequence: Synthetic oligonucleotide
acucccaauaa

SEQ ID NO: 22632 - RNA, 13 nt, Artificial Sequence
  Description of Artificial Sequence: Synthetic oligonucleotide
aaugcuaagaaau

SEQ ID NO: 22633 - RNA, 11 nt, Artificial Sequence
  Description of Artificial Sequence: Synthetic oligonucleotide
gucuuucucua

SEQ ID NO: 22634 - RNA, 11 nt, Artificial Sequence
  Description of Artificial Sequence: Synthetic oligonucleotide
ugaauuucagg

SEQ ID NO: 22635 - RNA, 13 nt, Artificial Sequence
  Description of Artificial Sequence: Synthetic oligonucleotide
cgauucccucuca

SEQ ID NO: 22636 - RNA, 11 nt, Artificial Sequence
  Description of Artificial Sequence: Synthetic oligonucleotide
aggaaagugaa

SEQ ID NO: 22637 - RNA, 12 nt, Artificial Sequence
  Description of Artificial Sequence: Synthetic oligonucleotide
gaggcugcaugc

SEQ ID NO: 22638 - RNA, 11 nt, Artificial Sequence
  Description of Artificial Sequence: Synthetic oligonucleotide
ucucugaacag

SEQ ID NO: 22639 - RNA, 12 nt, Artificial Sequence
  Description of Artificial Sequence: Synthetic oligonucleotide
aacuuggcugua

SEQ ID NO: 22640 - RNA, 12 nt, Artificial Sequence
  Description of Artificial Sequence: Synthetic oligonucleotide
agaagccaaaau

SEQ ID NO: 22641 - RNA, 14 nt, Artificial Sequence
  Description of Artificial Sequence: Synthetic oligonucleotide
auuaaaagaagucc

SEQ ID NO: 22642 - RNA, 14 nt, Artificial Sequence
  Description of Artificial Sequence: Synthetic oligonucleotide
gaauccggauuauc

SEQ ID NO: 22643 - RNA, 12 nt, Artificial Sequence
  Description of Artificial Sequence: Synthetic oligonucleotide
aaugugacauca

SEQ ID NO: 22644 - RNA, 13 nt, Artificial Sequence
  Description of Artificial Sequence: Synthetic oligonucleotide
caucaaagcaagu

SEQ ID NO: 22645 - RNA, 11 nt, Artificial Sequence
  Description of Artificial Sequence: Synthetic oligonucleotide
agagagagaaa

SEQ ID NO: 22646 - RNA, 13 nt, Artificial Sequence
  Description of Artificial Sequence: Synthetic oligonucleotide
ucgcuguaguauu

SEQ ID NO: 22647 - RNA, 14 nt, Artificial Sequence
  Description of Artificial Sequence: Synthetic oligonucleotide
cgcuguaguauuua

SEQ ID NO: 22648 - RNA, 13 nt, Artificial Sequence
  Description of Artificial Sequence: Synthetic oligonucleotide
auuuaagcccaua

SEQ ID NO: 22649 - RNA, 15 nt, Artificial Sequence
  Description of Artificial Sequence: Synthetic oligonucleotide
auuaaaauaaacaug

SEQ ID NO: 22650 - RNA, 12 nt, Artificial Sequence
  Description of Artificial Sequence: Synthetic oligonucleotide
cuguucugaucg

SEQ ID NO: 22651 - RNA, 16 nt, Artificial Sequence
  Description of Artificial Sequence: Synthetic oligonucleotide
aaauaauuugaacuuu

SEQ ID NO: 22652 - RNA, 12 nt, Artificial Sequence
  Description of Artificial Sequence: Synthetic oligonucleotide
ugcgaccuuaau

SEQ ID NO: 22653 - RNA, 11 nt, Artificial Sequence
  Description of Artificial Sequence: Synthetic oligonucleotide
cugagaaagcu

SEQ ID NO: 22654 - RNA, 13 nt, Artificial Sequence
  Description of Artificial Sequence: Synthetic oligonucleotide
aguaaagaugcua

SEQ ID NO: 22655 - RNA, 12 nt, Artificial Sequence
  Description of Artificial Sequence: Synthetic oligonucleotide
cugcuuaauugc

SEQ ID NO: 22656 - RNA, 14 nt, Artificial Sequence
  Description of Artificial Sequence: Synthetic oligonucleotide
uaccauaugaauga

SEQ ID NO: 22657 - RNA, 12 nt, Artificial Sequence
  Description of Artificial Sequence: Synthetic oligonucleotide
aacuuucuuauc

SEQ ID NO: 22658 - RNA, 13 nt, Artificial Sequence
  Description of Artificial Sequence: Synthetic oligonucleotide
ccuugcaugacau

SEQ ID NO: 22659 - RNA, 14 nt, Artificial Sequence
  Description of Artificial Sequence: Synthetic oligonucleotide
ugaauuuguauaug

SEQ ID NO: 22660 - RNA, 12 nt, Artificial Sequence
  Description of Artificial Sequence: Synthetic oligonucleotide
gaauccuaguag

SEQ ID NO: 22661 - RNA, 10 nt, Artificial Sequence
  Description of Artificial Sequence: Synthetic oligonucleotide
gaaagggaag

SEQ ID NO: 22662 - RNA, 11 nt, Artificial Sequence
  Description of Artificial Sequence: Synthetic oligonucleotide
uaucggcaugc

SEQ ID NO: 22663 - RNA, 12 nt, Artificial Sequence
  Description of Artificial Sequence: Synthetic oligonucleotide
caccucauagua

SEQ ID NO: 22664 - RNA, 11 nt, Artificial Sequence
  Description of Artificial Sequence: Synthetic oligonucleotide
ccagaauugcc

SEQ ID NO: 22665 - RNA, 11 nt, Artificial Sequence
  Description of Artificial Sequence: Synthetic oligonucleotide
uggugaucugg

SEQ ID NO: 22666 - RNA, 12 nt, Artificial Sequence
  Description of Artificial Sequence: Synthetic oligonucleotide
gaucuggguaau

SEQ ID NO: 22667 - RNA, 12 nt, Artificial Sequence
  Description of Artificial Sequence: Synthetic oligonucleotide
ggaugugaugaa

SEQ ID NO: 22668 - RNA, 12 nt, Artificial Sequence
  Description of Artificial Sequence: Synthetic oligonucleotide
cauuuccacagc

SEQ ID NO: 22669 - RNA, 11 nt, Artificial Sequence
  Description of Artificial Sequence: Synthetic oligonucleotide
acagcuacacc

SEQ ID NO: 22670 - RNA, 12 nt, Artificial Sequence
  Description of Artificial Sequence: Synthetic oligonucleotide
ugcaguucuuac

SEQ ID NO: 22671 - RNA, 12 nt, Artificial Sequence
  Description of Artificial Sequence: Synthetic oligonucleotide
acgagaagaaga

SEQ ID NO: 22672 - RNA, 12 nt, Artificial Sequence
  Description of Artificial Sequence: Synthetic oligonucleotide
cgagaagaagau

SEQ ID NO: 22673 - RNA, 15 nt, Artificial Sequence
  Description of Artificial Sequence: Synthetic oligonucleotide
aagaagaucauuuac

SEQ ID NO: 22674 - RNA, 11 nt, Artificial Sequence
  Description of Artificial Sequence: Synthetic oligonucleotide
agaggaagagg

SEQ ID NO: 22675 - RNA, 12 nt, Artificial Sequence
  Description of Artificial Sequence: Synthetic oligonucleotide
gaggaagaggug

SEQ ID NO: 22676 - RNA, 13 nt, Artificial Sequence
  Description of Artificial Sequence: Synthetic oligonucleotide
cuacuuugagggc

SEQ ID NO: 22677 - RNA, 12 nt, Artificial Sequence
  Description of Artificial Sequence: Synthetic oligonucleotide
agggcaucuccu

SEQ ID NO: 22678 - RNA, 10 nt, Artificial Sequence
  Description of Artificial Sequence: Synthetic oligonucleotide
ggagugauau

SEQ ID NO: 22679 - RNA, 11 nt, Artificial Sequence
  Description of Artificial Sequence: Synthetic oligonucleotide
gagugauaugg

SEQ ID NO: 22680 - RNA, 12 nt, Artificial Sequence
  Description of Artificial Sequence: Synthetic oligonucleotide
ugcaguaaagau

SEQ ID NO: 22681 - RNA, 13 nt, Artificial Sequence
  Description of Artificial Sequence: Synthetic oligonucleotide
aguaaagauccua

SEQ ID NO: 22682 - RNA, 12 nt, Artificial Sequence
  Description of Artificial Sequence: Synthetic oligonucleotide
ugacaaaggaca

SEQ ID NO: 22683 - RNA, 13 nt, Artificial Sequence
  Description of Artificial Sequence: Synthetic oligonucleotide
gcaauugugaccc

SEQ ID NO: 22684 - RNA, 12 nt, Artificial Sequence
  Description of Artificial Sequence: Synthetic oligonucleotide
aacaucauccau

SEQ ID NO: 22685 - RNA, 12 nt, Artificial Sequence
  Description of Artificial Sequence: Synthetic oligonucleotide
ugaaauccaaca

SEQ ID NO: 22686 - RNA, 15 nt, Artificial Sequence
  Description of Artificial Sequence: Synthetic oligonucleotide
aacaauauauuucuc

SEQ ID NO: 22687 - RNA, 14 nt, Artificial Sequence
  Description of Artificial Sequence: Synthetic oligonucleotide
aacaguaaagucac

SEQ ID NO: 22688 - RNA, 14 nt, Artificial Sequence
  Description of Artificial Sequence: Synthetic oligonucleotide
ugugaagaaaguaa

SEQ ID NO: 22689 - RNA, 13 nt, Artificial Sequence
  Description of Artificial Sequence: Synthetic oligonucleotide
cuuccgagccauc

SEQ ID NO: 22690 - RNA, 12 nt, Artificial Sequence
  Description of Artificial Sequence: Synthetic oligonucleotide
aauggagguuga

SEQ ID NO: 22691 - RNA, 12 nt, Artificial Sequence
  Description of Artificial Sequence: Synthetic oligonucleotide
ggagguugaaua

SEQ ID NO: 22692 - RNA, 13 nt, Artificial Sequence
  Description of Artificial Sequence: Synthetic oligonucleotide
auuuugaguuuuc

SEQ ID NO: 22693 - RNA, 12 nt, Artificial Sequence
  Description of Artificial Sequence: Synthetic oligonucleotide
uauccuguuugu

SEQ ID NO: 22694 - RNA, 11 nt, Artificial Sequence
  Description of Artificial Sequence: Synthetic oligonucleotide
ccuguuuguuc

SEQ ID NO: 22695 - RNA, 10 nt, Artificial Sequence
  Description of Artificial Sequence: Synthetic oligonucleotide
cucuacagcc

SEQ ID NO: 22696 - RNA, 12 nt, Artificial Sequence
  Description of Artificial Sequence: Synthetic oligonucleotide
ucuuccauagcu

SEQ ID NO: 22697 - RNA, 12 nt, Artificial Sequence
  Description of Artificial Sequence: Synthetic oligonucleotide
auaaucuuccug

SEQ ID NO: 22698 - RNA, 12 nt, Artificial Sequence
  Description of Artificial Sequence: Synthetic oligonucleotide
uaaucuuccugu

SEQ ID NO: 22699 - RNA, 12 nt, Artificial Sequence
  Description of Artificial Sequence: Synthetic oligonucleotide
cuucaugacuug

SEQ ID NO: 22700 - RNA, 12 nt, Artificial Sequence
  Description of Artificial Sequence: Synthetic oligonucleotide
aagagggagaga

SEQ ID NO: 22701 - RNA, 12 nt, Artificial Sequence
  Description of Artificial Sequence: Synthetic oligonucleotide
cgucuccuacca

SEQ ID NO: 22702 - RNA, 12 nt, Artificial Sequence
  Description of Artificial Sequence: Synthetic oligonucleotide
gaucaaucggcc

SEQ ID NO: 22703 - RNA, 12 nt, Artificial Sequence
  Description of Artificial Sequence: Synthetic oligonucleotide
ggacgaacaucc

SEQ ID NO: 22704 - RNA, 11 nt, Artificial Sequence
  Description of Artificial Sequence: Synthetic oligonucleotide
agggucggaac

SEQ ID NO: 22705 - RNA, 10 nt, Artificial Sequence
  Description of Artificial Sequence: Synthetic oligonucleotide
ucggaaccca

SEQ ID NO: 22706 - RNA, 11 nt, Artificial Sequence
  Description of Artificial Sequence: Synthetic oligonucleotide
acccaagcuua

SEQ ID NO: 22707 - RNA, 14 nt, Artificial Sequence
  Description of Artificial Sequence: Synthetic oligonucleotide
gaacuuuaagcaac

SEQ ID NO: 22708 - RNA, 11 nt, Artificial Sequence
  Description of Artificial Sequence: Synthetic oligonucleotide
acuauucagug

SEQ ID NO: 22709 - RNA, 11 nt, Artificial Sequence
  Description of Artificial Sequence: Synthetic oligonucleotide
cuauucagugg

SEQ ID NO: 22710 - RNA, 13 nt, Artificial Sequence
  Description of Artificial Sequence: Synthetic oligonucleotide
aaacacagauaac

SEQ ID NO: 22711 - RNA, 12 nt, Artificial Sequence
  Description of Artificial Sequence: Synthetic oligonucleotide
cuuaagaaaaga

SEQ ID NO: 22712 - RNA, 12 nt, Artificial Sequence
  Description of Artificial Sequence: Synthetic oligonucleotide
cugaaggagugu

SEQ ID NO: 22713 - RNA, 10 nt, Artificial Sequence
  Description of Artificial Sequence: Synthetic oligonucleotide
ucaccgcggg

SEQ ID NO: 22714 - RNA, 14 nt, Artificial Sequence
  Description of Artificial Sequence: Synthetic oligonucleotide
agcagaaauaagcg

SEQ ID NO: 22715 - RNA, 12 nt, Artificial Sequence
  Description of Artificial Sequence: Synthetic oligonucleotide
aagcgugccguu

SEQ ID NO: 22716 - RNA, 12 nt, Artificial Sequence
  Description of Artificial Sequence: Synthetic oligonucleotide
agaaacagucac

SEQ ID NO: 22717 - RNA, 12 nt, Artificial Sequence
  Description of Artificial Sequence: Synthetic oligonucleotide
agaggaagaagg

SEQ ID NO: 22718 - RNA, 14 nt, Artificial Sequence
  Description of Artificial Sequence: Synthetic oligonucleotide
uguauucaaaauau

SEQ ID NO: 22719 - RNA, 13 nt, Artificial Sequence
  Description of Artificial Sequence: Synthetic oligonucleotide
auuuuccucccuu

SEQ ID NO: 22720 - RNA, 13 nt, Artificial Sequence
  Description of Artificial Sequence: Synthetic oligonucleotide
caaagaaagauag

SEQ ID NO: 22721 - RNA, 12 nt, Artificial Sequence
  Description of Artificial Sequence: Synthetic oligonucleotide
aagaaagauaga

SEQ ID NO: 22722 - RNA, 13 nt, Artificial Sequence
  Description of Artificial Sequence: Synthetic oligonucleotide
gaaagcauuuguu

SEQ ID NO: 22723 - RNA, 13 nt, Artificial Sequence
  Description of Artificial Sequence: Synthetic oligonucleotide
ugaguuaaacgaa

SEQ ID NO: 22724 - RNA, 12 nt, Artificial Sequence
  Description of Artificial Sequence: Synthetic oligonucleotide
acugauacagaa

SEQ ID NO: 22725 - RNA, 12 nt, Artificial Sequence
  Description of Artificial Sequence: Synthetic oligonucleotide
auauuauauaua

SEQ ID NO: 22726 - RNA, 12 nt, Artificial Sequence
  Description of Artificial Sequence: Synthetic oligonucleotide
auuauauauaua

SEQ ID NO: 22727 - RNA, 12 nt, Artificial Sequence
  Description of Artificial Sequence: Synthetic oligonucleotide
ucacuggaugua

SEQ ID NO: 22728 - RNA, 12 nt, Artificial Sequence
  Description of Artificial Sequence: Synthetic oligonucleotide
cagggaagagga

SEQ ID NO: 22729 - RNA, 15 nt, Artificial Sequence
  Description of Artificial Sequence: Synthetic oligonucleotide
augaucuuuuuuuug

SEQ ID NO: 22730 - RNA, 11 nt, Artificial Sequence
  Description of Artificial Sequence: Synthetic oligonucleotide
aguucacggcc

SEQ ID NO: 22731 - RNA, 13 nt, Artificial Sequence
  Description of Artificial Sequence: Synthetic oligonucleotide
caccaucacacca

SEQ ID NO: 22732 - RNA, 11 nt, Artificial Sequence
  Description of Artificial Sequence: Synthetic oligonucleotide
ccugcggguuu

SEQ ID NO: 22733 - RNA, 10 nt, Artificial Sequence
  Description of Artificial Sequence: Synthetic oligonucleotide
auccaguuug

SEQ ID NO: 22734 - RNA, 13 nt, Artificial Sequence
  Description of Artificial Sequence: Synthetic oligonucleotide
guuaaggacuucu

SEQ ID NO: 22735 - RNA, 13 nt, Artificial Sequence
  Description of Artificial Sequence: Synthetic oligonucleotide
cagugggacagag

SEQ ID NO: 22736 - RNA, 14 nt, Artificial Sequence
  Description of Artificial Sequence: Synthetic oligonucleotide
aauuuguuauugug

SEQ ID NO: 22737 - RNA, 13 nt, Artificial Sequence
  Description of Artificial Sequence: Synthetic oligonucleotide
uucaaaugcauuu

SEQ ID NO: 22738 - RNA, 10 nt, Artificial Sequence
  Description of Artificial Sequence: Synthetic oligonucleotide
caggaaagcc

SEQ ID NO: 22739 - RNA, 11 nt, Artificial Sequence
  Description of Artificial Sequence: Synthetic oligonucleotide
aggaaagcccu

SEQ ID NO: 22740 - RNA, 12 nt, Artificial Sequence
  Description of Artificial Sequence: Synthetic oligonucleotide
cccagcauggcc

SEQ ID NO: 22741 - RNA, 11 nt, Artificial Sequence
  Description of Artificial Sequence: Synthetic oligonucleotide
cuucucccuga

SEQ ID NO: 22742 - RNA, 12 nt, Artificial Sequence
  Description of Artificial Sequence: Synthetic oligonucleotide
gaagaagcccuu

SEQ ID NO: 22743 - RNA, 12 nt, Artificial Sequence
  Description of Artificial Sequence: Synthetic oligonucleotide
agaagcccuuca

SEQ ID NO: 22744 - RNA, 11 nt, Artificial Sequence
  Description of Artificial Sequence: Synthetic oligonucleotide
gcccuucagcg

SEQ ID NO: 22745 - RNA, 11 nt, Artificial Sequence
  Description of Artificial Sequence: Synthetic oligonucleotide
ccuucagcggc

SEQ ID NO: 22746 - RNA, 12 nt, Artificial Sequence
  Description of Artificial Sequence: Synthetic oligonucleotide
ucagcggccagu

SEQ ID NO: 22747 - RNA, 12 nt, Artificial Sequence
  Description of Artificial Sequence: Synthetic oligonucleotide
ugaaaagcuccg

SEQ ID NO: 22748 - RNA, 11 nt, Artificial Sequence
  Description of Artificial Sequence: Synthetic oligonucleotide
aaaagcuccgg

SEQ ID NO: 22749 - RNA, 13 nt, Artificial Sequence
  Description of Artificial Sequence: Synthetic oligonucleotide
agucaacagucug

SEQ ID NO: 22750 - RNA, 13 nt, Artificial Sequence
  Description of Artificial Sequence: Synthetic oligonucleotide
cagaguucaaaag

SEQ ID NO: 22751 - RNA, 13 nt, Artificial Sequence
  Description of Artificial Sequence: Synthetic oligonucleotide
agaguucaaaagc

SEQ ID NO: 22752 - RNA, 12 nt, Artificial Sequence
  Description of Artificial Sequence: Synthetic oligonucleotide
uucaaaagcccu

SEQ ID NO: 22753 - RNA, 12 nt, Artificial Sequence
  Description of Artificial Sequence: Synthetic oligonucleotide
ucaaaagcccuu

SEQ ID NO: 22754 - RNA, 12 nt, Artificial Sequence
  Description of Artificial Sequence: Synthetic oligonucleotide
aaaagcccuuca

SEQ ID NO: 22755 - RNA, 12 nt, Artificial Sequence
  Description of Artificial Sequence: Synthetic oligonucleotide
aaagcccuucag

SEQ ID NO: 22756 - RNA, 13 nt, Artificial Sequence
  Description of Artificial Sequence: Synthetic oligonucleotide
gugaagccgcucg

SEQ ID NO: 22757 - RNA, 12 nt, Artificial Sequence
  Description of Artificial Sequence: Synthetic oligonucleotide
cacgccagucaa

SEQ ID NO: 22758 - RNA, 13 nt, Artificial Sequence
  Description of Artificial Sequence: Synthetic oligonucleotide
uucuuggugcgug

SEQ ID NO: 22759 - RNA, 14 nt, Artificial Sequence
  Description of Artificial Sequence: Synthetic oligonucleotide
auuggauucaucag

SEQ ID NO: 22760 - RNA, 13 nt, Artificial Sequence
  Description of Artificial Sequence: Synthetic oligonucleotide
uggaauaccuaag

SEQ ID NO: 22761 - RNA, 12 nt, Artificial Sequence
  Description of Artificial Sequence: Synthetic oligonucleotide
auuugaggcuca

SEQ ID NO: 22762 - RNA, 11 nt, Artificial Sequence
  Description of Artificial Sequence: Synthetic oligonucleotide
ucuacaauugg

SEQ ID NO: 22763 - RNA, 12 nt, Artificial Sequence
  Description of Artificial Sequence: Synthetic oligonucleotide
uaguuaggagcc

SEQ ID NO: 22764 - RNA, 13 nt, Artificial Sequence
  Description of Artificial Sequence: Synthetic oligonucleotide
agucaauauccac

SEQ ID NO: 22765 - RNA, 13 nt, Artificial Sequence
  Description of Artificial Sequence: Synthetic oligonucleotide
auguucagucaca

SEQ ID NO: 22766 - RNA, 12 nt, Artificial Sequence
  Description of Artificial Sequence: Synthetic oligonucleotide
acacacacauac

SEQ ID NO: 22767 - RNA, 12 nt, Artificial Sequence
  Description of Artificial Sequence: Synthetic oligonucleotide
uuccuuuugcuu

SEQ ID NO: 22768 - RNA, 16 nt, Artificial Sequence
  Description of Artificial Sequence: Synthetic oligonucleotide
uuuuaaaguaauuuuu

SEQ ID NO: 22769 - RNA, 13 nt, Artificial Sequence
  Description of Artificial Sequence: Synthetic oligonucleotide
caacagucaaugg

SEQ ID NO: 22770 - RNA, 13 nt, Artificial Sequence
  Description of Artificial Sequence: Synthetic oligonucleotide
ucgacaaaccaau

SEQ ID NO: 22771 - RNA, 12 nt, Artificial Sequence
  Description of Artificial Sequence: Synthetic oligonucleotide
acugcuaccacu

SEQ ID NO: 22772 - RNA, 13 nt, Artificial Sequence
  Description of Artificial Sequence: Synthetic oligonucleotide
gcaagcggucuua

SEQ ID NO: 22773 - RNA, 13 nt, Artificial Sequence
  Description of Artificial Sequence: Synthetic oligonucleotide
ggucuuaccggcu

SEQ ID NO: 22774 - RNA, 11 nt, Artificial Sequence
  Description of Artificial Sequence: Synthetic oligonucleotide
gauggguuacc

SEQ ID NO: 22775 - RNA, 11 nt, Artificial Sequence
  Description of Artificial Sequence: Synthetic oligonucleotide
guuaccugcga

SEQ ID NO: 22776 - RNA, 12 nt, Artificial Sequence
  Description of Artificial Sequence: Synthetic oligonucleotide
aaucuugcugag

SEQ ID NO: 22777 - RNA, 13 nt, Artificial Sequence
  Description of Artificial Sequence: Synthetic oligonucleotide
agcauaaaacagu

SEQ ID NO: 22778 - RNA, 12 nt, Artificial Sequence
  Description of Artificial Sequence: Synthetic oligonucleotide
guccuuuauccu

SEQ ID NO: 22779 - RNA, 12 nt, Artificial Sequence
  Description of Artificial Sequence: Synthetic oligonucleotide
caacgcaaguug

SEQ ID NO: 22780 - RNA, 13 nt, Artificial Sequence
  Description of Artificial Sequence: Synthetic oligonucleotide
aaacugaaaccau

SEQ ID NO: 22781 - RNA, 14 nt, Artificial Sequence
  Description of Artificial Sequence: Synthetic oligonucleotide
acuuuguuaaauau

SEQ ID NO: 22782 - RNA, 14 nt, Artificial Sequence
  Description of Artificial Sequence: Synthetic oligonucleotide
guauauuaaaaguu

SEQ ID NO: 22783 - RNA, 13 nt, Artificial Sequence
  Description of Artificial Sequence: Synthetic oligonucleotide
guuuugacuuaac

SEQ ID NO: 22784 - RNA, 13 nt, Artificial Sequence
  Description of Artificial Sequence: Synthetic oligonucleotide
gcaaacucagcac

SEQ ID NO: 22785 - RNA, 11 nt, Artificial Sequence
  Description of Artificial Sequence: Synthetic oligonucleotide
ugcugaccuca

SEQ ID NO: 22786 - RNA, 14 nt, Artificial Sequence
  Description of Artificial Sequence: Synthetic oligonucleotide
uuuauucagaucgc

SEQ ID NO: 22787 - RNA, 13 nt, Artificial Sequence
  Description of Artificial Sequence: Synthetic oligonucleotide
aggguucugggau

SEQ ID NO: 22788 - RNA, 15 nt, Artificial Sequence
  Description of Artificial Sequence: Synthetic oligonucleotide
auauuggaaauuaug

SEQ ID NO: 22789 - RNA, 13 nt, Artificial Sequence
  Description of Artificial Sequence: Synthetic oligonucleotide
auggaagcacuag

SEQ ID NO: 22790 - RNA, 13 nt, Artificial Sequence
  Description of Artificial Sequence: Synthetic oligonucleotide
guuuuuaugugga

SEQ ID NO: 22791 - RNA, 12 nt, Artificial Sequence
  Description of Artificial Sequence: Synthetic oligonucleotide
ggaauugguaga

SEQ ID NO: 22792 - RNA, 13 nt, Artificial Sequence
  Description of Artificial Sequence: Synthetic oligonucleotide
uuagacuuggaga

SEQ ID NO: 22793 - RNA, 13 nt, Artificial Sequence
  Description of Artificial Sequence: Synthetic oligonucleotide
uuacaguauucca

SEQ ID NO: 22794 - RNA, 15 nt, Artificial Sequence
  Description of Artificial Sequence: Synthetic oligonucleotide
ccacugaugaauuaa

SEQ ID NO: 22795 - RNA, 12 nt, Artificial Sequence
  Description of Artificial Sequence: Synthetic oligonucleotide
ccacaucaucac

SEQ ID NO: 22796 - RNA, 13 nt, Artificial Sequence
  Description of Artificial Sequence: Synthetic oligonucleotide
cucaccaaacaga

SEQ ID NO: 22797 - RNA, 12 nt, Artificial Sequence
  Description of Artificial Sequence: Synthetic oligonucleotide
ggaacaugaugg

SEQ ID NO: 22798 - RNA, 12 nt, Artificial Sequence
  Description of Artificial Sequence: Synthetic oligonucleotide
cauguagacugc

SEQ ID NO: 22799 - RNA, 13 nt, Artificial Sequence
  Description of Artificial Sequence: Synthetic oligonucleotide
ggaucuauuuaug

SEQ ID NO: 22800 - RNA, 12 nt, Artificial Sequence
  Description of Artificial Sequence: Synthetic oligonucleotide
gcacuauuauca

SEQ ID NO: 22801 - RNA, 11 nt, Artificial Sequence
  Description of Artificial Sequence: Synthetic oligonucleotide
aucaguucugc

SEQ ID NO: 22802 - RNA, 13 nt, Artificial Sequence
  Description of Artificial Sequence: Synthetic oligonucleotide
agauuaaaccuac

SEQ ID NO: 22803 - RNA, 13 nt, Artificial Sequence
  Description of Artificial Sequence: Synthetic oligonucleotide
auaaaauccuucu

SEQ ID NO: 22804 - RNA, 12 nt, Artificial Sequence
  Description of Artificial Sequence: Synthetic oligonucleotide
aaugcuguagac

SEQ ID NO: 22805 - RNA, 13 nt, Artificial Sequence
  Description of Artificial Sequence: Synthetic oligonucleotide
uugauaggaauag

SEQ ID NO: 22806 - RNA, 11 nt, Artificial Sequence
  Description of Artificial Sequence: Synthetic oligonucleotide
aauggcccuga

SEQ ID NO: 22807 - RNA, 11 nt, Artificial Sequence
  Description of Artificial Sequence: Synthetic oligonucleotide
uuccucaagca

SEQ ID NO: 22808 - RNA, 10 nt, Artificial Sequence
  Description of Artificial Sequence: Synthetic oligonucleotide
guucagccca

SEQ ID NO: 22809 - RNA, 11 nt, Artificial Sequence
  Description of Artificial Sequence: Synthetic oligonucleotide
gcugcugaacc

SEQ ID NO: 22810 - RNA, 12 nt, Artificial Sequence
  Description of Artificial Sequence: Synthetic oligonucleotide
aaguucucuuca

SEQ ID NO: 22811 - RNA, 11 nt, Artificial Sequence
  Description of Artificial Sequence: Synthetic oligonucleotide
ccagccuagag

SEQ ID NO: 22812 - RNA, 13 nt, Artificial Sequence
  Description of Artificial Sequence: Synthetic oligonucleotide
cucugugaagugu

SEQ ID NO: 22813 - RNA, 14 nt, Artificial Sequence
  Description of Artificial Sequence: Synthetic oligonucleotide
ugagaaaauuucaa

SEQ ID NO: 22814 - RNA, 11 nt, Artificial Sequence
  Description of Artificial Sequence: Synthetic oligonucleotide
aauccuccuga

SEQ ID NO: 22815 - RNA, 12 nt, Artificial Sequence
  Description of Artificial Sequence: Synthetic oligonucleotide
gugacaucauau

SEQ ID NO: 22816 - RNA, 13 nt, Artificial Sequence
  Description of Artificial Sequence: Synthetic oligonucleotide
aaucuucaucaua

SEQ ID NO: 22817 - RNA, 13 nt, Artificial Sequence
  Description of Artificial Sequence: Synthetic oligonucleotide
gacuagcuauuaa

SEQ ID NO: 22818 - RNA, 14 nt, Artificial Sequence
  Description of Artificial Sequence: Synthetic oligonucleotide
ucucuacuaaaaau

SEQ ID NO: 22819 - RNA, 12 nt, Artificial Sequence
  Description of Artificial Sequence: Synthetic oligonucleotide
ucuaucucgccu

SEQ ID NO: 22820 - RNA, 13 nt, Artificial Sequence
  Description of Artificial Sequence: Synthetic oligonucleotide
cuucgguccaguu

SEQ ID NO: 22821 - RNA, 11 nt, Artificial Sequence
  Description of Artificial Sequence: Synthetic oligonucleotide
gauguagccgc

SEQ ID NO: 22822 - RNA, 12 nt, Artificial Sequence
  Description of Artificial Sequence: Synthetic oligonucleotide
ugaggagacuug

SEQ ID NO: 22823 - RNA, 12 nt, Artificial Sequence
  Description of Artificial Sequence: Synthetic oligonucleotide
gaguagugagga

SEQ ID NO: 22824 - RNA, 14 nt, Artificial Sequence
  Description of Artificial Sequence: Synthetic oligonucleotide
cagaugaguacaaa

SEQ ID NO: 22825 - RNA, 13 nt, Artificial Sequence
  Description of Artificial Sequence: Synthetic oligonucleotide
guuguuaaugggc

SEQ ID NO: 22826 - RNA, 13 nt, Artificial Sequence
  Description of Artificial Sequence: Synthetic oligonucleotide
uuuuuaauuuauu

SEQ ID NO: 22827 - RNA, 12 nt, Artificial Sequence
  Description of Artificial Sequence: Synthetic oligonucleotide
uauuuaaauaug

SEQ ID NO: 22828 - RNA, 13 nt, Artificial Sequence
  Description of Artificial Sequence: Synthetic oligonucleotide
uauccuuuguuuc

SEQ ID NO: 22829 - RNA, 14 nt, Artificial Sequence
  Description of Artificial Sequence: Synthetic oligonucleotide
cgucuaaguguuug

SEQ ID NO: 22830 - RNA, 12 nt, Artificial Sequence
  Description of Artificial Sequence: Synthetic oligonucleotide
accugugacaaa

SEQ ID NO: 22831 - RNA, 13 nt, Artificial Sequence
  Description of Artificial Sequence: Synthetic oligonucleotide
ccaggcugaauua

SEQ ID NO: 22832 - RNA, 14 nt, Artificial Sequence
  Description of Artificial Sequence: Synthetic oligonucleotide
gucauucuuacaau

SEQ ID NO: 22833 - RNA, 15 nt, Artificial Sequence
  Description of Artificial Sequence: Synthetic oligonucleotide
ucauucuuacaauug

SEQ ID NO: 22834 - RNA, 12 nt, Artificial Sequence
  Description of Artificial Sequence: Synthetic oligonucleotide
cagagaguguac

SEQ ID NO: 22835 - RNA, 12 nt, Artificial Sequence
  Description of Artificial Sequence: Synthetic oligonucleotide
agaacucagcag

SEQ ID NO: 22836 - RNA, 13 nt, Artificial Sequence
  Description of Artificial Sequence: Synthetic oligonucleotide
uuuauuuucagua

SEQ ID NO: 22837 - RNA, 12 nt, Artificial Sequence
  Description of Artificial Sequence: Synthetic oligonucleotide
ucuuaaauggaa

SEQ ID NO: 22838 - RNA, 13 nt, Artificial Sequence
  Description of Artificial Sequence: Synthetic oligonucleotide
ugccuaaaauugu

SEQ ID NO: 22839 - RNA, 12 nt, Artificial Sequence
  Description of Artificial Sequence: Synthetic oligonucleotide
agacugugagcu

SEQ ID NO: 22840 - RNA, 14 nt, Artificial Sequence
  Description of Artificial Sequence: Synthetic oligonucleotide
ugcuuuuuauuaau

SEQ ID NO: 22841 - RNA, 13 nt, Artificial Sequence
  Description of Artificial Sequence: Synthetic oligonucleotide
cucuucuuacauu

SEQ ID NO: 22842 - RNA, 15 nt, Artificial Sequence
  Description of Artificial Sequence: Synthetic oligonucleotide
cauuuguaaaaaugu

SEQ ID NO: 22843 - RNA, 15 nt, Artificial Sequence
  Description of Artificial Sequence: Synthetic oligonucleotide
aucuuaauucauauu

SEQ ID NO: 22844 - RNA, 13 nt, Artificial Sequence
  Description of Artificial Sequence: Synthetic oligonucleotide
gaacuaaucauga

SEQ ID NO: 22845 - RNA, 12 nt, Artificial Sequence
  Description of Artificial Sequence: Synthetic oligonucleotide
ucugcucuuggg

SEQ ID NO: 22846 - RNA, 13 nt, Artificial Sequence
  Description of Artificial Sequence: Synthetic oligonucleotide
caguagcuuugag

SEQ ID NO: 22847 - RNA, 14 nt, Artificial Sequence
  Description of Artificial Sequence: Synthetic oligonucleotide
cacguaauauuuca

SEQ ID NO: 22848 - RNA, 13 nt, Artificial Sequence
  Description of Artificial Sequence: Synthetic oligonucleotide
uauucucuucacu

SEQ ID NO: 22849 - RNA, 14 nt, Artificial Sequence
  Description of Artificial Sequence: Synthetic oligonucleotide
cuaaugcuaagaaa

SEQ ID NO: 22850 - RNA, 12 nt, Artificial Sequence
  Description of Artificial Sequence: Synthetic oligonucleotide
gcugaaaaucaa

SEQ ID NO: 22851 - RNA, 14 nt, Artificial Sequence
  Description of Artificial Sequence: Synthetic oligonucleotide
aauaugauuacuuu

SEQ ID NO: 22852 - RNA, 14 nt, Artificial Sequence
  Description of Artificial Sequence: Synthetic oligonucleotide
cauuuuguucuaca

SEQ ID NO: 22853 - RNA, 12 nt, Artificial Sequence
  Description of Artificial Sequence: Synthetic oligonucleotide
cccgggacucuc

SEQ ID NO: 22854 - RNA, 14 nt, Artificial Sequence
  Description of Artificial Sequence: Synthetic oligonucleotide
ccuuuaaaguaaag

SEQ ID NO: 22855 - RNA, 13 nt, Artificial Sequence
  Description of Artificial Sequence: Synthetic oligonucleotide
ucuggaagccugg

SEQ ID NO: 22856 - RNA, 14 nt, Artificial Sequence
  Description of Artificial Sequence: Synthetic oligonucleotide
aaaacaaaagagag

SEQ ID NO: 22857 - RNA, 13 nt, Artificial Sequence
  Description of Artificial Sequence: Synthetic oligonucleotide
aucaguuaugccg

SEQ ID NO: 22858 - RNA, 13 nt, Artificial Sequence
  Description of Artificial Sequence: Synthetic oligonucleotide
uaaaagaagucca

SEQ ID NO: 22859 - RNA, 11 nt, Artificial Sequence
  Description of Artificial Sequence: Synthetic oligonucleotide
aggugagguua

SEQ ID NO: 22860 - RNA, 11 nt, Artificial Sequence
  Description of Artificial Sequence: Synthetic oligonucleotide
gggaagaggac

SEQ ID NO: 22861 - RNA, 13 nt, Artificial Sequence
  Description of Artificial Sequence: Synthetic oligonucleotide
aagcaaguauugu

SEQ ID NO: 22862 - RNA, 12 nt, Artificial Sequence
  Description of Artificial Sequence: Synthetic oligonucleotide
auuguagcacuc

SEQ ID NO: 22863 - RNA, 14 nt, Artificial Sequence
  Description of Artificial Sequence: Synthetic oligonucleotide
acaaaaccacaaau

SEQ ID NO: 22864 - RNA, 12 nt, Artificial Sequence
  Description of Artificial Sequence: Synthetic oligonucleotide
uaagcccauaca

SEQ ID NO: 22865 - RNA, 11 nt, Artificial Sequence
  Description of Artificial Sequence: Synthetic oligonucleotide
agcccauacag

SEQ ID NO: 22866 - RNA, 12 nt, Artificial Sequence
  Description of Artificial Sequence: Synthetic oligonucleotide
cagaaaccuucc

SEQ ID NO: 22867 - RNA, 10 nt, Artificial Sequence
  Description of Artificial Sequence: Synthetic oligonucleotide
guauaccuac

SEQ ID NO: 22868 - RNA, 13 nt, Artificial Sequence
  Description of Artificial Sequence: Synthetic oligonucleotide
gccaguuuucgga

SEQ ID NO: 22869 - RNA, 9 nt, Artificial Sequence
  Description of Artificial Sequence: Synthetic oligonucleotide
ggaacaggg

SEQ ID NO: 22870 - RNA, 13 nt, Artificial Sequence
  Description of Artificial Sequence: Synthetic oligonucleotide
uuaacuuuccagu

SEQ ID NO: 22871 - RNA, 14 nt, Artificial Sequence
  Description of Artificial Sequence: Synthetic oligonucleotide
aaaguuugguuuug

SEQ ID NO: 22872 - RNA, 12 nt, Artificial Sequence
  Description of Artificial Sequence: Synthetic oligonucleotide
cuucccacugua

SEQ ID NO: 22873 - RNA, 13 nt, Artificial Sequence
  Description of Artificial Sequence: Synthetic oligonucleotide
ugauaccauauga

SEQ ID NO: 22874 - RNA, 11 nt, Artificial Sequence
  Description of Artificial Sequence: Synthetic oligonucleotide
aacaugggcug

SEQ ID NO: 22875 - RNA, 13 nt, Artificial Sequence
  Description of Artificial Sequence: Synthetic oligonucleotide
caacuuuuucaua

SEQ ID NO: 22876 - RNA, 12 nt, Artificial Sequence
  Description of Artificial Sequence: Synthetic oligonucleotide
caugaggccgga

SEQ ID NO: 22877 - RNA, 11 nt, Artificial Sequence
  Description of Artificial Sequence: Synthetic oligonucleotide
acugcauuugu

SEQ ID NO: 22878 - RNA, 13 nt, Artificial Sequence
  Description of Artificial Sequence: Synthetic oligonucleotide
aauguuuacuacc

SEQ ID NO: 22879 - RNA, 15 nt, Artificial Sequence
  Description of Artificial Sequence: Synthetic oligonucleotide
aauuuuuugaugaaa

SEQ ID NO: 22880 - RNA, 14 nt, Artificial Sequence
  Description of Artificial Sequence: Synthetic oligonucleotide
cagugugugaauuu

SEQ ID NO: 22881 - RNA, 13 nt, Artificial Sequence
  Description of Artificial Sequence: Synthetic oligonucleotide
gagcaauguaugu

SEQ ID NO: 22882 - RNA, 14 nt, Artificial Sequence
  Description of Artificial Sequence: Synthetic oligonucleotide
aaagcacauauaua

SEQ ID NO: 22883 - RNA, 14 nt, Artificial Sequence
  Description of Artificial Sequence: Synthetic oligonucleotide
guaauaguuucucc

SEQ ID NO: 22884 - RNA, 13 nt, Artificial Sequence
  Description of Artificial Sequence: Synthetic oligonucleotide
aguuucuccaaau

SEQ ID NO: 22885 - RNA, 13 nt, Artificial Sequence
  Description of Artificial Sequence: Synthetic oligonucleotide
uacuuccuagaaa

SEQ ID NO: 22886 - RNA, 13 nt, Artificial Sequence
  Description of Artificial Sequence: Synthetic oligonucleotide
uacaccauauaug

SEQ ID NO: 22887 - RNA, 14 nt, Artificial Sequence
  Description of Artificial Sequence: Synthetic oligonucleotide
auauaugaauggag

SEQ ID NO: 22888 - RNA, 13 nt, Artificial Sequence
  Description of Artificial Sequence: Synthetic oligonucleotide
acgagaagaagau

SEQ ID NO: 22889 - RNA, 13 nt, Artificial Sequence
  Description of Artificial Sequence: Synthetic oligonucleotide
ucauuuacaggga

SEQ ID NO: 22890 - RNA, 13 nt, Artificial Sequence
  Description of Artificial Sequence: Synthetic oligonucleotide
cauuuacagggac

SEQ ID NO: 22891 - RNA, 10 nt, Artificial Sequence
  Description of Artificial Sequence: Synthetic oligonucleotide
agggaccuga

SEQ ID NO: 22892 - RNA, 14 nt, Artificial Sequence
  Description of Artificial Sequence: Synthetic oligonucleotide
uguuugacugcauc

SEQ ID NO: 22893 - RNA, 13 nt, Artificial Sequence
  Description of Artificial Sequence: Synthetic oligonucleotide
uuugacugcaucg

SEQ ID NO: 22894 - RNA, 12 nt, Artificial Sequence
  Description of Artificial Sequence: Synthetic oligonucleotide
gaguucacaggg

SEQ ID NO: 22895 - RNA, 13 nt, Artificial Sequence
  Description of Artificial Sequence: Synthetic oligonucleotide
ggcaccucugucc

SEQ ID NO: 22896 - RNA, 15 nt, Artificial Sequence
  Description of Artificial Sequence: Synthetic oligonucleotide
gguuugucuuuuuaa

SEQ ID NO: 22897 - RNA, 14 nt, Artificial Sequence
  Description of Artificial Sequence: Synthetic oligonucleotide
uuugucuuuuuaag

SEQ ID NO: 22898 - RNA, 13 nt, Artificial Sequence
  Description of Artificial Sequence: Synthetic oligonucleotide
ccuaaagguuguc

SEQ ID NO: 22899 - RNA, 12 nt, Artificial Sequence
  Description of Artificial Sequence: Synthetic oligonucleotide
aagguugucgac

SEQ ID NO: 22900 - RNA, 13 nt, Artificial Sequence
  Description of Artificial Sequence: Synthetic oligonucleotide
accuggcaauugu

SEQ ID NO: 22901 - RNA, 12 nt, Artificial Sequence
  Description of Artificial Sequence: Synthetic oligonucleotide
aguggugcgagg

SEQ ID NO: 22902 - RNA, 13 nt, Artificial Sequence
  Description of Artificial Sequence: Synthetic oligonucleotide
agagacaugaaau

SEQ ID NO: 22903 - RNA, 13 nt, Artificial Sequence
  Description of Artificial Sequence: Synthetic oligonucleotide
auauauuucucca

SEQ ID NO: 22904 - RNA, 10 nt, Artificial Sequence
  Description of Artificial Sequence: Synthetic oligonucleotide
caugaaggcu

SEQ ID NO: 22905 - RNA, 11 nt, Artificial Sequence
  Description of Artificial Sequence: Synthetic oligonucleotide
gcuggaguggu

SEQ ID NO: 22906 - RNA, 11 nt, Artificial Sequence
  Description of Artificial Sequence: Synthetic oligonucleotide
aggaagagagg

SEQ ID NO: 22907 - RNA, 12 nt, Artificial Sequence
  Description of Artificial Sequence: Synthetic oligonucleotide
cuugcaucgggc

SEQ ID NO: 22908 - RNA, 13 nt, Artificial Sequence
  Description of Artificial Sequence: Synthetic oligonucleotide
auauccuacugug

SEQ ID NO: 22909 - RNA, 13 nt, Artificial Sequence
  Description of Artificial Sequence: Synthetic oligonucleotide
uccuacuguguaa

SEQ ID NO: 22910 - RNA, 12 nt, Artificial Sequence
  Description of Artificial Sequence: Synthetic oligonucleotide
ccuuguagugua

SEQ ID NO: 22911 - RNA, 13 nt, Artificial Sequence
  Description of Artificial Sequence: Synthetic oligonucleotide
ucuuuguugauug

SEQ ID NO: 22912 - RNA, 14 nt, Artificial Sequence
  Description of Artificial Sequence: Synthetic oligonucleotide
uuuguugauugaaa

SEQ ID NO: 22913 - RNA, 15 nt, Artificial Sequence
  Description of Artificial Sequence: Synthetic oligonucleotide
uucuuuuucuuccau

SEQ ID NO: 22914 - RNA, 13 nt, Artificial Sequence
  Description of Artificial Sequence: Synthetic oligonucleotide
aaucuuccuucua

SEQ ID NO: 22915 - RNA, 13 nt, Artificial Sequence
  Description of Artificial Sequence: Synthetic oligonucleotide
uugaaugcuucau

SEQ ID NO: 22916 - RNA, 13 nt, Artificial Sequence
  Description of Artificial Sequence: Synthetic oligonucleotide
ugaaugcuucaug

SEQ ID NO: 22917 - RNA, 13 nt, Artificial Sequence
  Description of Artificial Sequence: Synthetic oligonucleotide
aauucuacuuuga

SEQ ID NO: 22918 - RNA, 13 nt, Artificial Sequence
  Description of Artificial Sequence: Synthetic oligonucleotide
agcaacuacagac

SEQ ID NO: 22919 - RNA, 13 nt, Artificial Sequence
  Description of Artificial Sequence: Synthetic oligonucleotide
gaccaaggucaac

SEQ ID NO: 22920 - RNA, 13 nt, Artificial Sequence
  Description of Artificial Sequence: Synthetic oligonucleotide
cgacuaucucgac

SEQ ID NO: 22921 - RNA, 13 nt, Artificial Sequence
  Description of Artificial Sequence: Synthetic oligonucleotide
aaccuucccaaac

SEQ ID NO: 22922 - RNA, 14 nt, Artificial Sequence
  Description of Artificial Sequence: Synthetic oligonucleotide
ccaagcuuagaacu

SEQ ID NO: 22923 - RNA, 15 nt, Artificial Sequence
  Description of Artificial Sequence: Synthetic oligonucleotide
agcuuagaacuuuaa

SEQ ID NO: 22924 - RNA, 11 nt, Artificial Sequence
  Description of Artificial Sequence: Synthetic oligonucleotide
aagaccaccac

SEQ ID NO: 22925 - RNA, 14 nt, Artificial Sequence
  Description of Artificial Sequence: Synthetic oligonucleotide
gcgagaaauaaagu

SEQ ID NO: 22926 - RNA, 14 nt, Artificial Sequence
  Description of Artificial Sequence: Synthetic oligonucleotide
cgagaaauaaaguu

SEQ ID NO: 22927 - RNA, 12 nt, Artificial Sequence
  Description of Artificial Sequence: Synthetic oligonucleotide
aggaaaugaucc

SEQ ID NO: 22928 - RNA, 13 nt, Artificial Sequence
  Description of Artificial Sequence: Synthetic oligonucleotide
gaagaaaugaaac

SEQ ID NO: 22929 - RNA, 13 nt, Artificial Sequence
  Description of Artificial Sequence: Synthetic oligonucleotide
guuuccauccucc

SEQ ID NO: 22930 - RNA, 15 nt, Artificial Sequence
  Description of Artificial Sequence: Synthetic oligonucleotide
acugaaaaucuuuga

SEQ ID NO: 22931 - RNA, 11 nt, Artificial Sequence
  Description of Artificial Sequence: Synthetic oligonucleotide
ugccguucagg

SEQ ID NO: 22932 - RNA, 13 nt, Artificial Sequence
  Description of Artificial Sequence: Synthetic oligonucleotide
caggguccagaag

SEQ ID NO: 22933 - RNA, 13 nt, Artificial Sequence
  Description of Artificial Sequence: Synthetic oligonucleotide
ucaagacugcuug

SEQ ID NO: 22934 - RNA, 13 nt, Artificial Sequence
  Description of Artificial Sequence: Synthetic oligonucleotide
uccaugucuuugg

SEQ ID NO: 22935 - RNA, 11 nt, Artificial Sequence
  Description of Artificial Sequence: Synthetic oligonucleotide
gccugaaacac

SEQ ID NO: 22936 - RNA, 12 nt, Artificial Sequence
  Description of Artificial Sequence: Synthetic oligonucleotide
ucucuguaccuc

SEQ ID NO: 22937 - RNA, 12 nt, Artificial Sequence
  Description of Artificial Sequence: Synthetic oligonucleotide
agcaagacaaga

SEQ ID NO: 22938 - RNA, 13 nt, Artificial Sequence
  Description of Artificial Sequence: Synthetic oligonucleotide
gcaagacaagaaa

SEQ ID NO: 22939 - RNA, 12 nt, Artificial Sequence
  Description of Artificial Sequence: Synthetic oligonucleotide
uguacaagaucc

SEQ ID NO: 22940 - RNA, 12 nt, Artificial Sequence
  Description of Artificial Sequence: Synthetic oligonucleotide
cguacuugcaga

SEQ ID NO: 22941 - RNA, 13 nt, Artificial Sequence
  Description of Artificial Sequence: Synthetic oligonucleotide
cgaucgauacaga

SEQ ID NO: 22942 - RNA, 13 nt, Artificial Sequence
  Description of Artificial Sequence: Synthetic oligonucleotide
uauaaaaauaaau

SEQ ID NO: 22943 - RNA, 13 nt, Artificial Sequence
  Description of Artificial Sequence: Synthetic oligonucleotide
uaaaaauaaauau

SEQ ID NO: 22944 - RNA, 13 nt, Artificial Sequence
  Description of Artificial Sequence: Synthetic oligonucleotide
uuugacugcugug

SEQ ID NO: 22945 - RNA, 13 nt, Artificial Sequence
  Description of Artificial Sequence: Synthetic oligonucleotide
ggagaugagagac

SEQ ID NO: 22946 - RNA, 10 nt, Artificial Sequence
  Description of Artificial Sequence: Synthetic oligonucleotide
ucccacuugg

SEQ ID NO: 22947 - RNA, 10 nt, Artificial Sequence
  Description of Artificial Sequence: Synthetic oligonucleotide
guucacggcc

SEQ ID NO: 22948 - RNA, 12 nt, Artificial Sequence
  Description of Artificial Sequence: Synthetic oligonucleotide
accaucacacca

SEQ ID NO: 22949 - RNA, 10 nt, Artificial Sequence
  Description of Artificial Sequence: Synthetic oligonucleotide
cugcggguuu

SEQ ID NO: 22950 - RNA, 9 nt, Artificial Sequence
  Description of Artificial Sequence: Synthetic oligonucleotide
uccaguuug

SEQ ID NO: 22951 - RNA, 12 nt, Artificial Sequence
  Description of Artificial Sequence: Synthetic oligonucleotide
uuaaggacuucu

SEQ ID NO: 22952 - RNA, 12 nt, Artificial Sequence
  Description of Artificial Sequence: Synthetic oligonucleotide
agugggacagag

SEQ ID NO: 22953 - RNA, 13 nt, Artificial Sequence
  Description of Artificial Sequence: Synthetic oligonucleotide
auuuguuauugug

SEQ ID NO: 22954 - RNA, 12 nt, Artificial Sequence
  Description of Artificial Sequence: Synthetic oligonucleotide
ucaaaugcauuu

SEQ ID NO: 22955 - RNA, 9 nt, Artificial Sequence
  Description of Artificial Sequence: Synthetic oligonucleotide
aggaaagcc

SEQ ID NO: 22956 - RNA, 10 nt, Artificial Sequence
  Description of Artificial Sequence: Synthetic oligonucleotide
ggaaagcccu

SEQ ID NO: 22957 - RNA, 11 nt, Artificial Sequence
  Description of Artificial Sequence: Synthetic oligonucleotide
ccagcauggcc

SEQ ID NO: 22958 - RNA, 10 nt, Artificial Sequence
  Description of Artificial Sequence: Synthetic oligonucleotide
uucucccuga

SEQ ID NO: 22959 - RNA, 11 nt, Artificial Sequence
  Description of Artificial Sequence: Synthetic oligonucleotide
aagaagcccuu

SEQ ID NO: 22960 - RNA, 11 nt, Artificial Sequence
  Description of Artificial Sequence: Synthetic oligonucleotide
gaagcccuuca

SEQ ID NO: 22961 - RNA, 10 nt, Artificial Sequence
  Description of Artificial Sequence: Synthetic oligonucleotide
cccuucagcg

SEQ ID NO: 22962 - RNA, 10 nt, Artificial Sequence
  Description of Artificial Sequence: Synthetic oligonucleotide
cuucagcggc

SEQ ID NO: 22963 - RNA, 11 nt, Artificial Sequence
  Description of Artificial Sequence: Synthetic oligonucleotide
cagcggccagu

SEQ ID NO: 22964 - RNA, 11 nt, Artificial Sequence
  Description of Artificial Sequence: Synthetic oligonucleotide
gaaaagcuccg

SEQ ID NO: 22965 - RNA, 10 nt, Artificial Sequence
  Description of Artificial Sequence: Synthetic oligonucleotide
aaagcuccgg

SEQ ID NO: 22966 - RNA, 12 nt, Artificial Sequence
  Description of Artificial Sequence: Synthetic oligonucleotide
gucaacagucug

SEQ ID NO: 22967 - RNA, 12 nt, Artificial Sequence
  Description of Artificial Sequence: Synthetic oligonucleotide
agaguucaaaag

SEQ ID NO: 22968 - RNA, 12 nt, Artificial Sequence
  Description of Artificial Sequence: Synthetic oligonucleotide
gaguucaaaagc

SEQ ID NO: 22969 - RNA, 11 nt, Artificial Sequence
  Description of Artificial Sequence: Synthetic oligonucleotide
ucaaaagcccu

SEQ ID NO: 22970 - RNA, 11 nt, Artificial Sequence
  Description of Artificial Sequence: Synthetic oligonucleotide
caaaagcccuu

SEQ ID NO: 22971 - RNA, 11 nt, Artificial Sequence
  Description of Artificial Sequence: Synthetic oligonucleotide
aaagcccuuca

SEQ ID NO: 22972 - RNA, 11 nt, Artificial Sequence
  Description of Artificial Sequence: Synthetic oligonucleotide
aagcccuucag

SEQ ID NO: 22973 - RNA, 12 nt, Artificial Sequence
  Description of Artificial Sequence: Synthetic oligonucleotide
ugaagccgcucg

SEQ ID NO: 22974 - RNA, 11 nt, Artificial Sequence
  Description of Artificial Sequence: Synthetic oligonucleotide
acgccagucaa

SEQ ID NO: 22975 - RNA, 12 nt, Artificial Sequence
  Description of Artificial Sequence: Synthetic oligonucleotide
ucuuggugcgug

SEQ ID NO: 22976 - RNA, 13 nt, Artificial Sequence
  Description of Artificial Sequence: Synthetic oligonucleotide
uuggauucaucag

SEQ ID NO: 22977 - RNA, 12 nt, Artificial Sequence
  Description of Artificial Sequence: Synthetic oligonucleotide
ggaauaccuaag

SEQ ID NO: 22978 - RNA, 11 nt, Artificial Sequence
  Description of Artificial Sequence: Synthetic oligonucleotide
uuugaggcuca

SEQ ID NO: 22979 - RNA, 10 nt, Artificial Sequence
  Description of Artificial Sequence: Synthetic oligonucleotide
cuacaauugg

SEQ ID NO: 22980 - RNA, 11 nt, Artificial Sequence
  Description of Artificial Sequence: Synthetic oligonucleotide
aguuaggagcc

SEQ ID NO: 22981 - RNA, 12 nt, Artificial Sequence
  Description of Artificial Sequence: Synthetic oligonucleotide
gucaauauccac

SEQ ID NO: 22982 - RNA, 12 nt, Artificial Sequence
  Description of Artificial Sequence: Synthetic oligonucleotide
uguucagucaca

SEQ ID NO: 22983 - RNA, 11 nt, Artificial Sequence
  Description of Artificial Sequence: Synthetic oligonucleotide
cacacacauac

SEQ ID NO: 22984 - RNA, 11 nt, Artificial Sequence
  Description of Artificial Sequence: Synthetic oligonucleotide
uccuuuugcuu

SEQ ID NO: 22985 - RNA, 15 nt, Artificial Sequence
  Description of Artificial Sequence: Synthetic oligonucleotide
uuuaaaguaauuuuu

SEQ ID NO: 22986 - RNA, 12 nt, Artificial Sequence
  Description of Artificial Sequence: Synthetic oligonucleotide
aacagucaaugg

SEQ ID NO: 22987 - RNA, 12 nt, Artificial Sequence
  Description of Artificial Sequence: Synthetic oligonucleotide
cgacaaaccaau

SEQ ID NO: 22988 - RNA, 11 nt, Artificial Sequence
  Description of Artificial Sequence: Synthetic oligonucleotide
cugcuaccacu

SEQ ID NO: 22989 - RNA, 12 nt, Artificial Sequence
  Description of Artificial Sequence: Synthetic oligonucleotide
caagcggucuua

SEQ ID NO: 22990 - RNA, 12 nt, Artificial Sequence
  Description of Artificial Sequence: Synthetic oligonucleotide
gucuuaccggcu

SEQ ID NO: 22991 - RNA, 10 nt, Artificial Sequence
  Description of Artificial Sequence: Synthetic oligonucleotide
auggguuacc

SEQ ID NO: 22992 - RNA, 10 nt, Artificial Sequence
  Description of Artificial Sequence: Synthetic oligonucleotide
uuaccugcga

SEQ ID NO: 22993 - RNA, 11 nt, Artificial Sequence
  Description of Artificial Sequence: Synthetic oligonucleotide
aucuugcugag

SEQ ID NO: 22994 - RNA, 12 nt, Artificial Sequence
  Description of Artificial Sequence: Synthetic oligonucleotide
gcauaaaacagu

SEQ ID NO: 22995 - RNA, 11 nt, Artificial Sequence
  Description of Artificial Sequence: Synthetic oligonucleotide
uccuuuauccu

SEQ ID NO: 22996 - RNA, 11 nt, Artificial Sequence
  Description of Artificial Sequence: Synthetic oligonucleotide
aacgcaaguug

SEQ ID NO: 22997 - RNA, 12 nt, Artificial Sequence
  Description of Artificial Sequence: Synthetic oligonucleotide
aacugaaaccau

SEQ ID NO: 22998 - RNA, 13 nt, Artificial Sequence
  Description of Artificial Sequence: Synthetic oligonucleotide
cuuuguuaaauau

SEQ ID NO: 22999 - RNA, 13 nt, Artificial Sequence
  Description of Artificial Sequence: Synthetic oligonucleotide
uauauuaaaaguu

SEQ ID NO: 23000 - RNA, 12 nt, Artificial Sequence
  Description of Artificial Sequence: Synthetic oligonucleotide
uuuugacuuaac

SEQ ID NO: 23001 - RNA, 12 nt, Artificial Sequence
  Description of Artificial Sequence: Synthetic oligonucleotide
caaacucagcac

SEQ ID NO: 23002 - RNA, 10 nt, Artificial Sequence
  Description of Artificial Sequence: Synthetic oligonucleotide
gcugaccuca

SEQ ID NO: 23003 - RNA, 13 nt, Artificial Sequence
  Description of Artificial Sequence: Synthetic oligonucleotide
uuauucagaucgc

SEQ ID NO: 23004 - RNA, 12 nt, Artificial Sequence
  Description of Artificial Sequence: Synthetic oligonucleotide
ggguucugggau

SEQ ID NO: 23005 - RNA, 14 nt, Artificial Sequence
  Description of Artificial Sequence: Synthetic oligonucleotide
uauuggaaauuaug

SEQ ID NO: 23006 - RNA, 12 nt, Artificial Sequence
  Description of Artificial Sequence: Synthetic oligonucleotide
uggaagcacuag

SEQ ID NO: 23007 - RNA, 12 nt, Artificial Sequence
  Description of Artificial Sequence: Synthetic oligonucleotide
uuuuuaugugga

SEQ ID NO: 23008 - RNA, 11 nt, Artificial Sequence
  Description of Artificial Sequence: Synthetic oligonucleotide
gaauugguaga

SEQ ID NO: 23009 - RNA, 12 nt, Artificial Sequence
  Description of Artificial Sequence: Synthetic oligonucleotide
uagacuuggaga

SEQ ID NO: 23010 - RNA, 12 nt, Artificial Sequence
  Description of Artificial Sequence: Synthetic oligonucleotide
uacaguauucca

SEQ ID NO: 23011 - RNA, 14 nt, Artificial Sequence
  Description of Artificial Sequence: Synthetic oligonucleotide
cacugaugaauuaa

SEQ ID NO: 23012 - RNA, 11 nt, Artificial Sequence
  Description of Artificial Sequence: Synthetic oligonucleotide
cacaucaucac

SEQ ID NO: 23013 - RNA, 12 nt, Artificial Sequence
  Description of Artificial Sequence: Synthetic oligonucleotide
ucaccaaacaga

SEQ ID NO: 23014 - RNA, 11 nt, Artificial Sequence
  Description of Artificial Sequence: Synthetic oligonucleotide
gaacaugaugg

SEQ ID NO: 23015 - RNA, 11 nt, Artificial Sequence
  Description of Artificial Sequence: Synthetic oligonucleotide
auguagacugc

SEQ ID NO: 23016 - RNA, 12 nt, Artificial Sequence
  Description of Artificial Sequence: Synthetic oligonucleotide
gaucuauuuaug

SEQ ID NO: 23017 - RNA, 11 nt, Artificial Sequence
  Description of Artificial Sequence: Synthetic oligonucleotide
cacuauuauca

SEQ ID NO: 23018 - RNA, 10 nt, Artificial Sequence
  Description of Artificial Sequence: Synthetic oligonucleotide
ucaguucugc

SEQ ID NO: 23019 - RNA, 12 nt, Artificial Sequence
  Description of Artificial Sequence: Synthetic oligonucleotide
gauuaaaccuac

SEQ ID NO: 23020 - RNA, 12 nt, Artificial Sequence
  Description of Artificial Sequence: Synthetic oligonucleotide
uaaaauccuucu

SEQ ID NO: 23021 - RNA, 11 nt, Artificial Sequence
  Description of Artificial Sequence: Synthetic oligonucleotide
augcuguagac

SEQ ID NO: 23022 - RNA, 12 nt, Artificial Sequence
  Description of Artificial Sequence: Synthetic oligonucleotide
ugauaggaauag

SEQ ID NO: 23023 - RNA, 10 nt, Artificial Sequence
  Description of Artificial Sequence: Synthetic oligonucleotide
auggcccuga

SEQ ID NO: 23024 - RNA, 10 nt, Artificial Sequence
  Description of Artificial Sequence: Synthetic oligonucleotide
uccucaagca

SEQ ID NO: 23025 - RNA, 9 nt, Artificial Sequence
  Description of Artificial Sequence: Synthetic oligonucleotide
uucagccca

SEQ ID NO: 23026 - RNA, 10 nt, Artificial Sequence
  Description of Artificial Sequence: Synthetic oligonucleotide
cugcugaacc

SEQ ID NO: 23027 - RNA, 11 nt, Artificial Sequence
  Description of Artificial Sequence: Synthetic oligonucleotide
aguucucuuca

SEQ ID NO: 23028 - RNA, 10 nt, Artificial Sequence
  Description of Artificial Sequence: Synthetic oligonucleotide
cagccuagag

SEQ ID NO: 23029 - RNA, 12 nt, Artificial Sequence
  Description of Artificial Sequence: Synthetic oligonucleotide
ucugugaagugu

SEQ ID NO: 23030 - RNA, 13 nt, Artificial Sequence
  Description of Artificial Sequence: Synthetic oligonucleotide
gagaaaauuucaa

SEQ ID NO: 23031 - RNA, 10 nt, Artificial Sequence
  Description of Artificial Sequence: Synthetic oligonucleotide
auccuccuga

SEQ ID NO: 23032 - RNA, 11 nt, Artificial Sequence
  Description of Artificial Sequence: Synthetic oligonucleotide
ugacaucauau

SEQ ID NO: 23033 - RNA, 12 nt, Artificial Sequence
  Description of Artificial Sequence: Synthetic oligonucleotide
aucuucaucaua

SEQ ID NO: 23034 - RNA, 12 nt, Artificial Sequence
  Description of Artificial Sequence: Synthetic oligonucleotide
acuagcuauuaa

SEQ ID NO: 23035 - RNA, 13 nt, Artificial Sequence
  Description of Artificial Sequence: Synthetic oligonucleotide
cucuacuaaaaau

SEQ ID NO: 23036 - RNA, 11 nt, Artificial Sequence
  Description of Artificial Sequence: Synthetic oligonucleotide
cuaucucgccu

SEQ ID NO: 23037 - RNA, 12 nt, Artificial Sequence
  Description of Artificial Sequence: Synthetic oligonucleotide
uucgguccaguu

SEQ ID NO: 23038 - RNA, 10 nt, Artificial Sequence
  Description of Artificial Sequence: Synthetic oligonucleotide
auguagccgc

SEQ ID NO: 23039 - RNA, 11 nt, Artificial Sequence
  Description of Artificial Sequence: Synthetic oligonucleotide
gaggagacuug

SEQ ID NO: 23040 - RNA, 11 nt, Artificial Sequence
  Description of Artificial Sequence: Synthetic oligonucleotide
aguagugagga

SEQ ID NO: 23041 - RNA, 13 nt, Artificial Sequence
  Description of Artificial Sequence: Synthetic oligonucleotide
agaugaguacaaa

SEQ ID NO: 23042 - RNA, 12 nt, Artificial Sequence
  Description of Artificial Sequence: Synthetic oligonucleotide
uuguuaaugggc

SEQ ID NO: 23043 - RNA, 12 nt, Artificial Sequence
  Description of Artificial Sequence: Synthetic oligonucleotide
uuuuaauuuauu

SEQ ID NO: 23044 - RNA, 11 nt, Artificial Sequence
  Description of Artificial Sequence: Synthetic oligonucleotide
auuuaaauaug

SEQ ID NO: 23045 - RNA, 12 nt, Artificial Sequence
  Description of Artificial Sequence: Synthetic oligonucleotide
auccuuuguuuc

SEQ ID NO: 23046 - RNA, 13 nt, Artificial Sequence
  Description of Artificial Sequence: Synthetic oligonucleotide
gucuaaguguuug

SEQ ID NO: 23047 - RNA, 11 nt, Artificial Sequence
  Description of Artificial Sequence: Synthetic oligonucleotide
ccugugacaaa

SEQ ID NO: 23048 - RNA, 12 nt, Artificial Sequence
  Description of Artificial Sequence: Synthetic oligonucleotide
caggcugaauua

SEQ ID NO: 23049 - RNA, 13 nt, Artificial Sequence
  Description of Artificial Sequence: Synthetic oligonucleotide
ucauucuuacaau

SEQ ID NO: 23050 - RNA, 14 nt, Artificial Sequence
  Description of Artificial Sequence: Synthetic oligonucleotide
cauucuuacaauug

SEQ ID NO: 23051 - RNA, 11 nt, Artificial Sequence
  Description of Artificial Sequence: Synthetic oligonucleotide
agagaguguac

SEQ ID NO: 23052 - RNA, 11 nt, Artificial Sequence
  Description of Artificial Sequence: Synthetic oligonucleotide
gaacucagcag

SEQ ID NO: 23053 - RNA, 12 nt, Artificial Sequence
  Description of Artificial Sequence: Synthetic oligonucleotide
uuauuuucagua

SEQ ID NO: 23054 - RNA, 11 nt, Artificial Sequence
  Description of Artificial Sequence: Synthetic oligonucleotide
cuuaaauggaa

SEQ ID NO: 23055 - RNA, 12 nt, Artificial Sequence
  Description of Artificial Sequence: Synthetic oligonucleotide
gccuaaaauugu

SEQ ID NO: 23056 - RNA, 12 nt, Artificial Sequence
  Description of Artificial Sequence: Synthetic oligonucleotide
acuaacaucugg

SEQ ID NO: 23057 - RNA, 11 nt, Artificial Sequence
  Description of Artificial Sequence: Synthetic oligonucleotide
gacugugagcu

SEQ ID NO: 23058 - RNA, 13 nt, Artificial Sequence
  Description of Artificial Sequence: Synthetic oligonucleotide
gcuuuuuauuaau

SEQ ID NO: 23059 - RNA, 12 nt, Artificial Sequence
  Description of Artificial Sequence: Synthetic oligonucleotide
ucuucuuacauu

SEQ ID NO: 23060 - RNA, 14 nt, Artificial Sequence
  Description of Artificial Sequence: Synthetic oligonucleotide
auuuguaaaaaugu

SEQ ID NO: 23061 - RNA, 14 nt, Artificial Sequence
  Description of Artificial Sequence: Synthetic oligonucleotide
ucuuaauucauauu

SEQ ID NO: 23062 - RNA, 12 nt, Artificial Sequence
  Description of Artificial Sequence: Synthetic oligonucleotide
aacuaaucauga

SEQ ID NO: 23063 - RNA, 11 nt, Artificial Sequence
  Description of Artificial Sequence: Synthetic oligonucleotide
cugcucuuggg

SEQ ID NO: 23064 - RNA, 12 nt, Artificial Sequence
  Description of Artificial Sequence: Synthetic oligonucleotide
aguagcuuugag

SEQ ID NO: 23065 - RNA, 13 nt, Artificial Sequence
  Description of Artificial Sequence: Synthetic oligonucleotide
acguaauauuuca

SEQ ID NO: 23066 - RNA, 12 nt, Artificial Sequence
  Description of Artificial Sequence: Synthetic oligonucleotide
auucucuucacu

SEQ ID NO: 23067 - RNA, 13 nt, Artificial Sequence
  Description of Artificial Sequence: Synthetic oligonucleotide
uaaugcuaagaaa

SEQ ID NO: 23068 - RNA, 11 nt, Artificial Sequence
  Description of Artificial Sequence: Synthetic oligonucleotide
cugaaaaucaa

SEQ ID NO: 23069 - RNA, 13 nt, Artificial Sequence
  Description of Artificial Sequence: Synthetic oligonucleotide
auaugauuacuuu

SEQ ID NO: 23070 - RNA, 13 nt, Artificial Sequence
  Description of Artificial Sequence: Synthetic oligonucleotide
auuuuguucuaca

SEQ ID NO: 23071 - RNA, 11 nt, Artificial Sequence
  Description of Artificial Sequence: Synthetic oligonucleotide
ccgggacucuc

SEQ ID NO: 23072 - RNA, 13 nt, Artificial Sequence
  Description of Artificial Sequence: Synthetic oligonucleotide
cuuuaaaguaaag

SEQ ID NO: 23073 - RNA, 12 nt, Artificial Sequence
  Description of Artificial Sequence: Synthetic oligonucleotide
cuggaagccugg

SEQ ID NO: 23074 - RNA, 13 nt, Artificial Sequence
  Description of Artificial Sequence: Synthetic oligonucleotide
aaacaaaagagag

SEQ ID NO: 23075 - RNA, 12 nt, Artificial Sequence
  Description of Artificial Sequence: Synthetic oligonucleotide
ucaguuaugccg

SEQ ID NO: 23076 - RNA, 12 nt, Artificial Sequence
  Description of Artificial Sequence: Synthetic oligonucleotide
aaaagaagucca

SEQ ID NO: 23077 - RNA, 10 nt, Artificial Sequence
  Description of Artificial Sequence: Synthetic oligonucleotide
ggugagguua

SEQ ID NO: 23078 - RNA, 10 nt, Artificial Sequence
  Description of Artificial Sequence: Synthetic oligonucleotide
ggaagaggac

SEQ ID NO: 23079 - RNA, 12 nt, Artificial Sequence
  Description of Artificial Sequence: Synthetic oligonucleotide
agcaaguauugu

SEQ ID NO: 23080 - RNA, 11 nt, Artificial Sequence
  Description of Artificial Sequence: Synthetic oligonucleotide
uuguagcacuc

SEQ ID NO: 23081 - RNA, 13 nt, Artificial Sequence
  Description of Artificial Sequence: Synthetic oligonucleotide
caaaaccacaaau

SEQ ID NO: 23082 - RNA, 11 nt, Artificial Sequence
  Description of Artificial Sequence: Synthetic oligonucleotide
aagcccauaca

SEQ ID NO: 23083 - RNA, 10 nt, Artificial Sequence
  Description of Artificial Sequence: Synthetic oligonucleotide
gcccauacag

SEQ ID NO: 23084 - RNA, 11 nt, Artificial Sequence
  Description of Artificial Sequence: Synthetic oligonucleotide
agaaaccuucc

SEQ ID NO: 23085 - RNA, 9 nt, Artificial Sequence
  Description of Artificial Sequence: Synthetic oligonucleotide
uauaccuac

SEQ ID NO: 23086 - RNA, 12 nt, Artificial Sequence
  Description of Artificial Sequence: Synthetic oligonucleotide
ccaguuuucgga

SEQ ID NO: 23087 - RNA, 8 nt, Artificial Sequence
  Description of Artificial Sequence: Synthetic oligonucleotide
gaacaggg

SEQ ID NO: 23088 - RNA, 12 nt, Artificial Sequence
  Description of Artificial Sequence: Synthetic oligonucleotide
uaacuuuccagu

SEQ ID NO: 23089 - RNA, 13 nt, Artificial Sequence
  Description of Artificial Sequence: Synthetic oligonucleotide
aaguuugguuuug

SEQ ID NO: 23090 - RNA, 11 nt, Artificial Sequence
  Description of Artificial Sequence: Synthetic oligonucleotide
uucccacugua

SEQ ID NO: 23091 - RNA, 12 nt, Artificial Sequence
  Description of Artificial Sequence: Synthetic oligonucleotide
gauaccauauga

SEQ ID NO: 23092 - RNA, 10 nt, Artificial Sequence
  Description of Artificial Sequence: Synthetic oligonucleotide
acaugggcug

SEQ ID NO: 23093 - RNA, 12 nt, Artificial Sequence
  Description of Artificial Sequence: Synthetic oligonucleotide
aacuuuuucaua

SEQ ID NO: 23094 - RNA, 11 nt, Artificial Sequence
  Description of Artificial Sequence: Synthetic oligonucleotide
augaggccgga

SEQ ID NO: 23095 - RNA, 10 nt, Artificial Sequence
  Description of Artificial Sequence: Synthetic oligonucleotide
cugcauuugu

SEQ ID NO: 23096 - RNA, 12 nt, Artificial Sequence
  Description of Artificial Sequence: Synthetic oligonucleotide
auguuuacuacc

SEQ ID NO: 23097 - RNA, 14 nt, Artificial Sequence
  Description of Artificial Sequence: Synthetic oligonucleotide
auuuuuugaugaaa

SEQ ID NO: 23098 - RNA, 13 nt, Artificial Sequence
  Description of Artificial Sequence: Synthetic oligonucleotide
agugugugaauuu

SEQ ID NO: 23099 - RNA, 12 nt, Artificial Sequence
  Description of Artificial Sequence: Synthetic oligonucleotide
agcaauguaugu

SEQ ID NO: 23100 - RNA, 13 nt, Artificial Sequence
  Description of Artificial Sequence: Synthetic oligonucleotide
aagcacauauaua

SEQ ID NO: 23101 - RNA, 13 nt, Artificial Sequence
  Description of Artificial Sequence: Synthetic oligonucleotide
uaauaguuucucc

SEQ ID NO: 23102 - RNA, 12 nt, Artificial Sequence
  Description of Artificial Sequence: Synthetic oligonucleotide
guuucuccaaau

SEQ ID NO: 23103 - RNA, 12 nt, Artificial Sequence
  Description of Artificial Sequence: Synthetic oligonucleotide
acuuccuagaaa

SEQ ID NO: 23104 - RNA, 12 nt, Artificial Sequence
  Description of Artificial Sequence: Synthetic oligonucleotide
acaccauauaug

SEQ ID NO: 23105 - RNA, 13 nt, Artificial Sequence
  Description of Artificial Sequence: Synthetic oligonucleotide
uauaugaauggag

SEQ ID NO: 23106 - RNA, 12 nt, Artificial Sequence
  Description of Artificial Sequence: Synthetic oligonucleotide
cauuuacaggga

SEQ ID NO: 23107 - RNA, 12 nt, Artificial Sequence
  Description of Artificial Sequence: Synthetic oligonucleotide
auuuacagggac

SEQ ID NO: 23108 - RNA, 9 nt, Artificial Sequence
  Description of Artificial Sequence: Synthetic oligonucleotide
gggaccuga

SEQ ID NO: 23109 - RNA, 13 nt, Artificial Sequence
  Description of Artificial Sequence: Synthetic oligonucleotide
guuugacugcauc

SEQ ID NO: 23110 - RNA, 12 nt, Artificial Sequence
  Description of Artificial Sequence: Synthetic oligonucleotide
uugacugcaucg

SEQ ID NO: 23111 - RNA, 11 nt, Artificial Sequence
  Description of Artificial Sequence: Synthetic oligonucleotide
aguucacaggg

SEQ ID NO: 23112 - RNA, 12 nt, Artificial Sequence
  Description of Artificial Sequence: Synthetic oligonucleotide
gcaccucugucc

SEQ ID NO: 23113 - RNA, 14 nt, Artificial Sequence
  Description of Artificial Sequence: Synthetic oligonucleotide
guuugucuuuuuaa

SEQ ID NO: 23114 - RNA, 13 nt, Artificial Sequence
  Description of Artificial Sequence: Synthetic oligonucleotide
uugucuuuuuaag

SEQ ID NO: 23115 - RNA, 12 nt, Artificial Sequence
  Description of Artificial Sequence: Synthetic oligonucleotide
cuaaagguuguc

SEQ ID NO: 23116 - RNA, 11 nt, Artificial Sequence
  Description of Artificial Sequence: Synthetic oligonucleotide
agguugucgac

SEQ ID NO: 23117 - RNA, 12 nt, Artificial Sequence
  Description of Artificial Sequence: Synthetic oligonucleotide
ccuggcaauugu

SEQ ID NO: 23118 - RNA, 11 nt, Artificial Sequence
  Description of Artificial Sequence: Synthetic oligonucleotide
guggugcgagg

SEQ ID NO: 23119 - RNA, 12 nt, Artificial Sequence
  Description of Artificial Sequence: Synthetic oligonucleotide
gagacaugaaau

SEQ ID NO: 23120 - RNA, 12 nt, Artificial Sequence
  Description of Artificial Sequence: Synthetic oligonucleotide
uauauuucucca

SEQ ID NO: 23121 - RNA, 9 nt, Artificial Sequence
  Description of Artificial Sequence: Synthetic oligonucleotide
augaaggcu

SEQ ID NO: 23122 - RNA, 10 nt, Artificial Sequence
  Description of Artificial Sequence: Synthetic oligonucleotide
cuggaguggu

SEQ ID NO: 23123 - RNA, 10 nt, Artificial Sequence
  Description of Artificial Sequence: Synthetic oligonucleotide
ggaagagagg

SEQ ID NO: 23124 - RNA, 11 nt, Artificial Sequence
  Description of Artificial Sequence: Synthetic oligonucleotide
uugcaucgggc

SEQ ID NO: 23125 - RNA, 12 nt, Artificial Sequence
  Description of Artificial Sequence: Synthetic oligonucleotide
uauccuacugug

SEQ ID NO: 23126 - RNA, 12 nt, Artificial Sequence
  Description of Artificial Sequence: Synthetic oligonucleotide
ccuacuguguaa

SEQ ID NO: 23127 - RNA, 11 nt, Artificial Sequence
  Description of Artificial Sequence: Synthetic oligonucleotide
cuuguagugua

SEQ ID NO: 23128 - RNA, 12 nt, Artificial Sequence
  Description of Artificial Sequence: Synthetic oligonucleotide
cuuuguugauug

SEQ ID NO: 23129 - RNA, 13 nt, Artificial Sequence
  Description of Artificial Sequence: Synthetic oligonucleotide
uuguugauugaaa

SEQ ID NO: 23130 - RNA, 14 nt, Artificial Sequence
  Description of Artificial Sequence: Synthetic oligonucleotide
ucuuuuucuuccau

SEQ ID NO: 23131 - RNA, 12 nt, Artificial Sequence
  Description of Artificial Sequence: Synthetic oligonucleotide
aucuuccuucua

(The sequence listing continues in the following parts.)
